United States Patent Application Publication US 2007/0042381 A1 - sequence listing, part 12

SEQ ID NO: 496165 - RNA, 22 nt, Human
auuacaguaacagcuacaaugc

SEQ ID NO: 496166 - RNA, 22 nt, Human
auggggcugggauucuccucgg

SEQ ID NO: 496167 - RNA, 22 nt, Human
ccucuggccacaugggacauag

SEQ ID NO: 496168 - RNA, 22 nt, Human
uggagccagcccaggccccucu

SEQ ID NO: 496169 - RNA, 22 nt, Human
ugaggcagaaaauagcaguuca

SEQ ID NO: 496170 - RNA, 22 nt, Human
uucaggaggugagcaagaaggg

SEQ ID NO: 496171 - RNA, 22 nt, Human
agcauuuaguuaguaaauguuu

SEQ ID NO: 496172 - RNA, 22 nt, Human
uggaaacuaagacuagagagac

SEQ ID NO: 496173 - RNA, 22 nt, Human
uccucagacacccugcuggcuu

SEQ ID NO: 496174 - RNA, 22 nt, Human
agagacagaggcaauauagcuu

SEQ ID NO: 496175 - RNA, 22 nt, Human
uggcucagcauucacuggucuu

SEQ ID NO: 496176 - RNA, 22 nt, Human
gggggcaguaaccucaaagugu

SEQ ID NO: 496177 - RNA, 22 nt, Human
cuggccucagagggucauggug

SEQ ID NO: 496178 - RNA, 22 nt, Human
aauauuucuguagcuauguucu

SEQ ID NO: 496179 - RNA, 22 nt, Human
ucucugggugauggcagggcac

SEQ ID NO: 496180 - RNA, 22 nt, Human
agauuuguccugcuuucuaccu

SEQ ID NO: 496181 - RNA, 22 nt, Human
uguagcauguaaauugguuauu

SEQ ID NO: 496182 - RNA, 22 nt, Human
gaagcagccacggggagacaga

SEQ ID NO: 496183 - RNA, 22 nt, Human
uuugcuauuuuucugugcagcu

SEQ ID NO: 496184 - RNA, 22 nt, Human
ucgugucagaucagagguuccu

SEQ ID NO: 496185 - RNA, 22 nt, Human
guucccauacaguaucagugcu

SEQ ID NO: 496186 - RNA, 22 nt, Human
agauuucccucuuguauuugca

SEQ ID NO: 496187 - RNA, 22 nt, Human
cucaccaggaacagcugcggag

SEQ ID NO: 496188 - RNA, 22 nt, Human
ugaguccaagagccagugggaa

SEQ ID NO: 496189 - RNA, 22 nt, Human
cagcccugagaaggaggaucuc

SEQ ID NO: 496190 - RNA, 22 nt, Human
uaugcauacaaugagauauucc

SEQ ID NO: 496191 - RNA, 22 nt, Human
ucauuguugcguuaaugucuuc

SEQ ID NO: 496192 - RNA, 22 nt, Human
cagagcagugaggaguugugua

SEQ ID NO: 496193 - RNA, 22 nt, Human
ggccugagcuugggcagcguau

SEQ ID NO: 496194 - RNA, 22 nt, Human
uccuggcuaacacggugacacc

SEQ ID NO: 496195 - RNA, 22 nt, Human
aacuguaaagguugagugguaa

SEQ ID NO: 496196 - RNA, 22 nt, Human
gcacaggaggccgaugcucaug

SEQ ID NO: 496197 - RNA, 22 nt, Human
ugaaggccagggauuugcagcc

SEQ ID NO: 496198 - RNA, 22 nt, Human
ugucugaauuuuggaaucaagu

SEQ ID NO: 496199 - RNA, 22 nt, Human
aacaguguuuuucuucagcacu

SEQ ID NO: 496200 - RNA, 22 nt, Human
uacagaaagaccucucgggaaa

SEQ ID NO: 496201 - RNA, 22 nt, Human
agucuguggauggacuggcaga

SEQ ID NO: 496202 - RNA, 22 nt, Human
agcuccugaaaagcgcuugcuu

SEQ ID NO: 496203 - RNA, 22 nt, Human
agccagggcucuccuucgcgug

SEQ ID NO: 496204 - RNA, 22 nt, Human
auccuguggggcggcugcaggg

SEQ ID NO: 496205 - RNA, 22 nt, Human
guccucugagggggcugcacgc

SEQ ID NO: 496206 - RNA, 22 nt, Human
cauuuguaauacugacuugcag

SEQ ID NO: 496207 - RNA, 22 nt, Human
gcagggguagugucuuccugag

SEQ ID NO: 496208 - RNA, 22 nt, Human
ucugggagagcacguggcugac

SEQ ID NO: 496209 - RNA, 22 nt, Human
uuguccugcaaccucacauggc

SEQ ID NO: 496210 - RNA, 22 nt, Human
cugucucuguugccuguaggug

SEQ ID NO: 496211 - RNA, 22 nt, Human
ucauugucagcucuugacuucu

SEQ ID NO: 496212 - RNA, 22 nt, Human
auugacaaucuacuauguucug

SEQ ID NO: 496213 - RNA, 22 nt, Human
aggacuggcccugaggggaggc

SEQ ID NO: 496214 - RNA, 22 nt, Human
aguggcuguuuauaggugggua

SEQ ID NO: 496215 - RNA, 22 nt, Human
gcugccucuguagcuuuggacc

SEQ ID NO: 496216 - RNA, 22 nt, Human
gcccucucggcauagcaggggc

SEQ ID NO: 496217 - RNA, 22 nt, Human
gaaacccaaacuaagacaguag

SEQ ID NO: 496218 - RNA, 22 nt, Human
cuggagaaguacugagacauuu

SEQ ID NO: 496219 - RNA, 23 nt, Human
cuguggcugaguccuguuggagu

SEQ ID NO: 496220 - RNA, 22 nt, Human
aagagcuggaguuugcagcccu

SEQ ID NO: 496221 - RNA, 22 nt, Human
cugugccaggcccagcugacuu

SEQ ID NO: 496222 - RNA, 22 nt, Human
cgcugggggaacagcgagggug

SEQ ID NO: 496223 - RNA, 22 nt, Human
ucuccugcucagaacagccuca

SEQ ID NO: 496224 - RNA, 21 nt, Human
aguccaggaggaggccagguu

SEQ ID NO: 496225 - RNA, 22 nt, Human
uguuuuaaucucccauugcucu

SEQ ID NO: 496226 - RNA, 22 nt, Human
gacccugaggauucccugcuga

SEQ ID NO: 496227 - RNA, 22 nt, Human
guuugucuuaauuaggcaucga

SEQ ID NO: 496228 - RNA, 22 nt, Human
accaucuuaguggccagcucuc

SEQ ID NO: 496229 - RNA, 22 nt, Human
gcugggagugggcaagaugaga

SEQ ID NO: 496230 - RNA, 21 nt, Human
ggccucagccaccuggcucug

SEQ ID NO: 496231 - RNA, 22 nt, Human
gcccuuagucagcacuuucacu

SEQ ID NO: 496232 - RNA, 22 nt, Human
uugauuucuuacucuuccaagg

SEQ ID NO: 496233 - RNA, 22 nt, Human
uucccuggggaaggugaccuuu

SEQ ID NO: 496234 - RNA, 22 nt, Human
augauucagcaauuuuauaucu

SEQ ID NO: 496235 - RNA, 22 nt, Human
ugagguggcuagggaggcacuc

SEQ ID NO: 496236 - RNA, 22 nt, Human
cugcugcugcuaucuacccagg

SEQ ID NO: 496237 - RNA, 22 nt, Human
agagccaggccaggccggggca

SEQ ID NO: 496238 - RNA, 23 nt, Human
ugcuguccaacagacuggccaug

SEQ ID NO: 496239 - RNA, 22 nt, Human
ugcagagguguugcugagauaa

SEQ ID NO: 496240 - RNA, 22 nt, Human
uguaaugauguacuuagaagga

SEQ ID NO: 496241 - RNA, 22 nt, Human
cacagcagaaaguguaggagga

SEQ ID NO: 496242 - RNA, 22 nt, Human
acacagaguuugacacauggga

SEQ ID NO: 496243 - RNA, 22 nt, Human
aagggcagccugacucacgguc

SEQ ID NO: 496244 - RNA, 22 nt, Human
gccuccuggauuuuagugccau

SEQ ID NO: 496245 - RNA, 22 nt, Human
caggcccauaaugcaaauauuu

SEQ ID NO: 496246 - RNA, 23 nt, Human
uguuuuucauucacaugggcugu

SEQ ID NO: 496247 - RNA, 22 nt, Human
gauuuauuuuuaaucagcaggg

SEQ ID NO: 496248 - RNA, 22 nt, Human
aggaucaaaugaaauauuuuga

SEQ ID NO: 496249 - RNA, 22 nt, Human
ucagcuuuuuacaugugaaaua

SEQ ID NO: 496250 - RNA, 22 nt, Human
agcgggugcugugucagcccuc

SEQ ID NO: 496251 - RNA, 22 nt, Human
uucuugauuagucucaugccaa

SEQ ID NO: 496252 - RNA, 22 nt, Human
gaaagagaaccugggccuagau

SEQ ID NO: 496253 - RNA, 22 nt, Human
caaguuuucuggguucagagca

SEQ ID NO: 496254 - RNA, 22 nt, Human
ggagauaauccagggagggacu

SEQ ID NO: 496255 - RNA, 22 nt, Human
uuugucuuaaaucuuguuacug

SEQ ID NO: 496256 - RNA, 22 nt, Human
caugccaguuuugagaugcacc

SEQ ID NO: 496257 - RNA, 22 nt, Human
aaggcuggguuugggaugugau

SEQ ID NO: 496258 - RNA, 22 nt, Human
aguggcuguaggcuaugagaga

SEQ ID NO: 496259 - RNA, 22 nt, Human
uggaggaaguggcuggccagaa

SEQ ID NO: 496260 - RNA, 22 nt, Human
cccaugcugaguggccugagau

SEQ ID NO: 496261 - RNA, 22 nt, Human
aaacucuggauuggaguccagc

SEQ ID NO: 496262 - RNA, 22 nt, Human
ugcugggcuugaaagcugcuaa

SEQ ID NO: 496263 - RNA, 22 nt, Human
uguacauacauagauauacaca

SEQ ID NO: 496264 - RNA, 22 nt, Human
ugcccuggggagcccagccagg

SEQ ID NO: 496265 - RNA, 22 nt, Human
agggcacaggcuccggguccag

SEQ ID NO: 496266 - RNA, 22 nt, Human
ucuauucauucaauuuagcucu

SEQ ID NO: 496267 - RNA, 20 nt, Human
aaggcacuaugucugcuagc

SEQ ID NO: 496268 - RNA, 22 nt, Human
ggcuccuucaaagcaccuggcu

SEQ ID NO: 496269 - RNA, 16 nt, Human
aaggagggaagagaau

SEQ ID NO: 496270 - RNA, 22 nt, Human
agauauauuuccugcccaaggc

SEQ ID NO: 496271 - RNA, 23 nt, Human
ucucaggacacacaugucuauca

SEQ ID NO: 496272 - RNA, 22 nt, Human
guuuauuaacugucaagugauu

SEQ ID NO: 496273 - RNA, 22 nt, Human
acaauagacaaagugaauggcu

SEQ ID NO: 496274 - RNA, 22 nt, Human
ucucuggaagcgcagaucuguu

SEQ ID NO: 496275 - RNA, 22 nt, Human
ucacaagauacaguuagaagca

SEQ ID NO: 496276 - RNA, 22 nt, Human
gaggguuggugcaaaugggaug

SEQ ID NO: 496277 - RNA, 19 nt, Human
uccccagcaccucugaguc

SEQ ID NO: 496278 - RNA, 22 nt, Human
ggagaagguggcucagcaaagg

SEQ ID NO: 496279 - RNA, 22 nt, Human
uuucuaguucucugccaaaaaa

SEQ ID NO: 496280 - RNA, 22 nt, Human
gcagccacagaggagggaugca

SEQ ID NO: 496281 - RNA, 22 nt, Human
agaucugguuggaguccugaca

SEQ ID NO: 496282 - RNA, 22 nt, Human
auaaaguggagguaguauucau

SEQ ID NO: 496283 - RNA, 22 nt, Human
cagggcaguuugugccuaugag

SEQ ID NO: 496284 - RNA, 22 nt, Human
uggcucugagacacaggcucuc

SEQ ID NO: 496285 - RNA, 21 nt, Human
uuacuuuugcagcaaccuaau

SEQ ID NO: 496286 - RNA, 22 nt, Human
acacaagauuguguauugaauu

SEQ ID NO: 496287 - RNA, 22 nt, Human
aaaguuuccugcuaagugcuau

SEQ ID NO: 496288 - RNA, 22 nt, Human
uuccaggaagauucaacaaaag

SEQ ID NO: 496289 - RNA, 19 nt, Human
uuaugaaggcuggggggag

SEQ ID NO: 496290 - RNA, 22 nt, Human
uguagaaagaauauguuucaua

SEQ ID NO: 496291 - RNA, 22 nt, Human
cggagaggaccugcaacucgcu

SEQ ID NO: 496292 - RNA, 20 nt, Human
aauguauauuuuaugccagg

SEQ ID NO: 496293 - RNA, 23 nt, Human
ucaguuuuggcuguucaguguug

SEQ ID NO: 496294 - RNA, 22 nt, Human
cccagcucaagcagagagcuaa

SEQ ID NO: 496295 - RNA, 20 nt, Human
agcaggaaugaugcuuucau

SEQ ID NO: 496296 - RNA, 22 nt, Human
caggcugggaacgccacccgcu

SEQ ID NO: 496297 - RNA, 22 nt, Human
agacagcugccuccaccacagc

SEQ ID NO: 496298 - RNA, 22 nt, Human
gccagcuggagacuggcagggg

SEQ ID NO: 496299 - RNA, 22 nt, Human
gcucugggugaauggcagauug

SEQ ID NO: 496300 - RNA, 22 nt, Human
cagaugaauaaaugaugaggua

SEQ ID NO: 496301 - RNA, 20 nt, Human
gcuuuuucuaauagcagucc

SEQ ID NO: 496302 - RNA, 22 nt, Human
guugaaaguggagaaccugguu

SEQ ID NO: 496303 - RNA, 22 nt, Human
aagaugauaggacuugcuuaag

SEQ ID NO: 496304 - RNA, 22 nt, Human
uccccagucccggcggugggug

SEQ ID NO: 496305 - RNA, 22 nt, Human
gcaggagccacuucagggaugc

SEQ ID NO: 496306 - RNA, 22 nt, Human
acaggugaccugcucauaugaa

SEQ ID NO: 496307 - RNA, 22 nt, Human
auuauuucucacucacauaaua

SEQ ID NO: 496308 - RNA, 22 nt, Human
ugguccugaucaccgcugggca

SEQ ID NO: 496309 - RNA, 22 nt, Human
gagcuuccauggacgccaucug

SEQ ID NO: 496310 - RNA, 22 nt, Human
uuuccuuccaaaugcccgggag

SEQ ID NO: 496311 - RNA, 22 nt, Human
gcuuccuuauuguugccauagu

SEQ ID NO: 496312 - RNA, 22 nt, Human
ucaguccucacuugguucuaag

SEQ ID NO: 496313 - RNA, 22 nt, Human
ccucuguacaggucagcaucua

SEQ ID NO: 496314 - RNA, 22 nt, Human
ccaggagccacucaggcccaca

SEQ ID NO: 496315 - RNA, 22 nt, Human
cagaaguaagauuacugugagu

SEQ ID NO: 496316 - RNA, 22 nt, Human
uuccaaguguugagauuagagg

SEQ ID NO: 496317 - RNA, 22 nt, Human
cuauacaucccaauuucagaga

SEQ ID NO: 496318 - RNA, 22 nt, Human
ugguccuugcuauagagugaua

SEQ ID NO: 496319 - RNA, 22 nt, Human
caggaugggugucggccagcac

SEQ ID NO: 496320 - RNA, 22 nt, Human
caugcuggguaaagguggugaa

SEQ ID NO: 496321 - RNA, 22 nt, Human
ggaaaguggugguggaaagagg

SEQ ID NO: 496322 - RNA, 18 nt, Human
uaggaagcuuaauguuuu

SEQ ID NO: 496323 - RNA, 22 nt, Human
cuuggcaguuucggaaggauga

SEQ ID NO: 496324 - RNA, 23 nt, Human
ugagcccaggaggucaaggcugc

SEQ ID NO: 496325 - RNA, 22 nt, Human
cugccugugcaugcagucagaa

SEQ ID NO: 496326 - RNA, 22 nt, Human
agagccaggaucuguuuugggg

SEQ ID NO: 496327 - RNA, 22 nt, Human
ucuuucucucuaaucaagcaca

SEQ ID NO: 496328 - RNA, 22 nt, Human
cauugugcagggauaaugcagc

SEQ ID NO: 496329 - RNA, 21 nt, Human
caggucuggugaacacucuca

SEQ ID NO: 496330 - RNA, 17 nt, Human
gaaaggaggcaacacug

SEQ ID NO: 496331 - RNA, 22 nt, Human
cagcuucccuuggcugagcaga

SEQ ID NO: 496332 - RNA, 22 nt, Human
ugaacacacacaucuuaauaau

SEQ ID NO: 496333 - RNA, 22 nt, Human
aagcagaacugggaaguagugg

SEQ ID NO: 496334 - RNA, 22 nt, Human
ccugcagaccacacucaguccu

SEQ ID NO: 496335 - RNA, 22 nt, Human
ugcccaagcagaggagugauuc

SEQ ID NO: 496336 - RNA, 22 nt, Human
ucuaauaaauaaaugcucuagg

SEQ ID NO: 496337 - RNA, 22 nt, Human
aacaggaauugcaggcagaucu

SEQ ID NO: 496338 - RNA, 22 nt, Human
gcacuucuauuuuuuucagugg

SEQ ID NO: 496339 - RNA, 22 nt, Human
cugcugagcaucagggcugccc

SEQ ID NO: 496340 - RNA, 22 nt, Human
ucucugauguauaucagagaac

SEQ ID NO: 496341 - RNA, 22 nt, Human
ccaagggcugcugaggugucca

SEQ ID NO: 496342 - RNA, 22 nt, Human
gaaaauguuuccuguuauuugc

SEQ ID NO: 496343 - RNA, 22 nt, Human
auauucuuccaaaacaucauuu

SEQ ID NO: 496344 - RNA, 22 nt, Human
aggcccaguuauccuacuuguu

SEQ ID NO: 496345 - RNA, 22 nt, Human
aggcuccacccuacagagcucc

SEQ ID NO: 496346 - RNA, 22 nt, Human
aauuccagcuaggaaaagcuuc

SEQ ID NO: 496347 - RNA, 18 nt, Human
cugagggcaacagaggcu

SEQ ID NO: 496348 - RNA, 22 nt, Human
uuuuuacagucauggucacuca

SEQ ID NO: 496349 - RNA, 20 nt, Human
uccaguuuuggagacauucu

SEQ ID NO: 496350 - RNA, 22 nt, Human
uugaagguuuaacugagaggca

SEQ ID NO: 496351 - RNA, 22 nt, Human
uagggaggcuacuucuuguagg

SEQ ID NO: 496352 - RNA, 22 nt, Human
cugaggcuggggaagggaagug

SEQ ID NO: 496353 - RNA, 22 nt, Human
augggcuggccuuucccgcucu

SEQ ID NO: 496354 - RNA, 22 nt, Human
agcugagcuaguaguuccagug

SEQ ID NO: 496355 - RNA, 20 nt, Human
caguccaaucagaggccacc

SEQ ID NO: 496356 - RNA, 22 nt, Human
gugcugggugcugcagacaggu

SEQ ID NO: 496357 - RNA, 18 nt, Human
acagaggcagacauguau

SEQ ID NO: 496358 - RNA, 22 nt, Human
acuuucucccacccacccgucu

SEQ ID NO: 496359 - RNA, 22 nt, Human
caauugaacagaugaguuaaau

SEQ ID NO: 496360 - RNA, 22 nt, Human
gcacuagucuaggugcuaagau

SEQ ID NO: 496361 - RNA, 22 nt, Human
aaguucuuggaggaugaagagu

SEQ ID NO: 496362 - RNA, 22 nt, Human
gucaagaugagaauucuuuuua

SEQ ID NO: 496363 - RNA, 22 nt, Human
auuucauugaaguuaauucuuc

SEQ ID NO: 496364 - RNA, 22 nt, Human
aauuuguuacacagcaauauaa

SEQ ID NO: 496365 - RNA, 22 nt, Human
aagauuucugcuccugagagaa

SEQ ID NO: 496366 - RNA, 22 nt, Human
uuaaaaccaucagcuguaagau

SEQ ID NO: 496367 - RNA, 22 nt, Human
cucaggaggccauucucaaggu

SEQ ID NO: 496368 - RNA, 22 nt, Human
ggaugcugggagacagcaggca

SEQ ID NO: 496369 - RNA, 22 nt, Human
cguccgcaaugcaagccuuuua

SEQ ID NO: 496370 - RNA, 22 nt, Human
cuggucaccuccuucccagcua

SEQ ID NO: 496371 - RNA, 22 nt, Human
agaggcagcagucauacuacag

SEQ ID NO: 496372 - RNA, 22 nt, Human
aggcugggcaccguuuugaucc

SEQ ID NO: 496373 - RNA, 22 nt, Human
cuucacagccaacaugggcaca

SEQ ID NO: 496374 - RNA, 22 nt, Human
uucugaaggucagcagcuuggu

SEQ ID NO: 496375 - RNA, 22 nt, Human
cagguggguguaugaaugcaaa

SEQ ID NO: 496376 - RNA, 22 nt, Human
ugggcugcccaagguggccaug

SEQ ID NO: 496377 - RNA, 22 nt, Human
uuugaaaggugucgagaugugu

SEQ ID NO: 496378 - RNA, 22 nt, Human
ucucuggcuuagguugagugca

SEQ ID NO: 496379 - RNA, 22 nt, Human
aguaucauguuggaauuaauca

SEQ ID NO: 496380 - RNA, 22 nt, Human
agucccagcucagaaccacuag

SEQ ID NO: 496381 - RNA, 22 nt, Human
cagggcccaagacacaaugagg

SEQ ID NO: 496382 - RNA, 20 nt, Human
cacagcuugccuuuuaugac

SEQ ID NO: 496383 - RNA, 22 nt, Human
ccacucugcugugcuccaugau

SEQ ID NO: 496384 - RNA, 22 nt, Human
agcagggggcauccuugcccuu

SEQ ID NO: 496385 - RNA, 22 nt, Human
gaugcaggugugccacagagcu

SEQ ID NO: 496386 - RNA, 22 nt, Human
cuccaguggcaaguccgggcgg

SEQ ID NO: 496387 - RNA, 22 nt, Human
uuugcauugccucugacuuaug

SEQ ID NO: 496388 - RNA, 22 nt, Human
uaaagcaauuugagcaaguucu

SEQ ID NO: 496389 - RNA, 22 nt, Human
guagcccaccuggggagggcga

SEQ ID NO: 496390 - RNA, 22 nt, Human
aaacucugccauuuuuggccug

SEQ ID NO: 496391 - RNA, 22 nt, Human
agggggaggcugugcugcgucu

SEQ ID NO: 496392 - RNA, 22 nt, Human
guuauuaguaagacucgcacau

SEQ ID NO: 496393 - RNA, 22 nt, Human
ucucuggaauuuugagagugac

SEQ ID NO: 496394 - RNA, 22 nt, Human
aaccagaggcagcaguaccuga

SEQ ID NO: 496395 - RNA, 18 nt, Human
uuggaccugugucagggc

SEQ ID NO: 496396 - RNA, 22 nt, Human
gaguucaguguuucuaguagug

SEQ ID NO: 496397 - RNA, 22 nt, Human
ccccuuccacagugcuuccuaa

SEQ ID NO: 496398 - RNA, 22 nt, Human
uccugagauucugcauuucuaa

SEQ ID NO: 496399 - RNA, 22 nt, Human
gccugagagucugcauuucuaa

SEQ ID NO: 496400 - RNA, 20 nt, Human
ugcucaggauggagaggugu

SEQ ID NO: 496401 - RNA, 22 nt, Human
gcuggagguagggagguccugu

SEQ ID NO: 496402 - RNA, 16 nt, Human
agaggccuugaggaag

SEQ ID NO: 496403 - RNA, 18 nt, Human
gguccugggccuggcuca

SEQ ID NO: 496404 - RNA, 22 nt, Human
agagugaaguuuuugaaaguga

SEQ ID NO: 496405 - RNA, 22 nt, Human
gccagcagguggagagaucaag

SEQ ID NO: 496406 - RNA, 22 nt, Human
caggaaccuaaagagacauuac

SEQ ID NO: 496407 - RNA, 22 nt, Human
ccugcccuagagaugacacaau

SEQ ID NO: 496408 - RNA, 22 nt, Human
agguucagucuuuggaccccuc

SEQ ID NO: 496409 - RNA, 22 nt, Human
agcuucuuaaguuccugcagca

SEQ ID NO: 496410 - RNA, 22 nt, Human
uccaggcauuggagagauaaug

SEQ ID NO: 496411 - RNA, 22 nt, Human
aaaaguauggugguccuuuuua

SEQ ID NO: 496412 - RNA, 22 nt, Human
ccucuccaguuuuaacgugacc

SEQ ID NO: 496413 - RNA, 22 nt, Human
gcugcccagcaggccccagggg

SEQ ID NO: 496414 - RNA, 22 nt, Human
ugugccuggcauucugggcuuc

SEQ ID NO: 496415 - RNA, 18 nt, Human
cacaggcucccagugagg

SEQ ID NO: 496416 - RNA, 22 nt, Human
cucaggccauucuuccagcugc

SEQ ID NO: 496417 - RNA, 22 nt, Human
agggagaacaguugcagcagac

SEQ ID NO: 496418 - RNA, 22 nt, Human
uguggcugucuguucuccuagg

SEQ ID NO: 496419 - RNA, 22 nt, Human
augaaugaagaacaucugugcc

SEQ ID NO: 496420 - RNA, 22 nt, Human
auuuagugaaacccauaaagca

SEQ ID NO: 496421 - RNA, 22 nt, Human
aggagcccugcgggaggcagag

SEQ ID NO: 496422 - RNA, 22 nt, Human
cuggggcaucugacagauaaau

SEQ ID NO: 496423 - RNA, 22 nt, Human
uuuaauuagcaagccagagagc

SEQ ID NO: 496424 - RNA, 20 nt, Human
cagcaguggaugagaguuuu

SEQ ID NO: 496425 - RNA, 22 nt, Human
ugguucauaauuugcacuacug

SEQ ID NO: 496426 - RNA, 19 nt, Human
gggagagccaggcucaccc

SEQ ID NO: 496427 - RNA, 22 nt, Human
gguagcagggcugugagucaga

SEQ ID NO: 496428 - RNA, 22 nt, Human
cucccagagaccaagcugagaa

SEQ ID NO: 496429 - RNA, 22 nt, Human
auaacagaguugggaagugaaa

SEQ ID NO: 496430 - RNA, 19 nt, Human
gucacauuugucucccagg

SEQ ID NO: 496431 - RNA, 19 nt, Human
uuugaaaggauuguuauuu

SEQ ID NO: 496432 - RNA, 22 nt, Human
uuagaaagcuuuccauagucaa

SEQ ID NO: 496433 - RNA, 22 nt, Human
gaagcagcaaaucugcaguauc

SEQ ID NO: 496434 - RNA, 22 nt, Human
uuugugcagugguuaagaccau

SEQ ID NO: 496435 - RNA, 22 nt, Human
gaggcaaggccgcacgucucag

SEQ ID NO: 496436 - RNA, 22 nt, Human
aggagaaggaagugcaucacua

SEQ ID NO: 496437 - RNA, 22 nt, Human
ggcugccucuggaagcuggaga

SEQ ID NO: 496438 - RNA, 22 nt, Human
cauuuguaucugggcugcugug

SEQ ID NO: 496439 - RNA, 22 nt, Human
aguguguaagggaucaaagagu

SEQ ID NO: 496440 - RNA, 22 nt, Human
guggcccaggcacccugaugac

SEQ ID NO: 496441 - RNA, 22 nt, Human
ugcagcucauauuagagagaag

SEQ ID NO: 496442 - RNA, 22 nt, Human
uuuggaaaguguacaaauuuga

SEQ ID NO: 496443 - RNA, 22 nt, Human
ugcaggcuauaucuuauuugac

SEQ ID NO: 496444 - RNA, 22 nt, Human
cugccagcucgccacaaugaca

SEQ ID NO: 496445 - RNA, 22 nt, Human
cucacugacgaggaagcugaga

SEQ ID NO: 496446 - RNA, 22 nt, Human
aauguguucacaggaaauacag

SEQ ID NO: 496447 - RNA, 19 nt, Human
aaaguucugacuguagagc

SEQ ID NO: 496448 - RNA, 22 nt, Human
aaaggcaggcuuucacaucuca

SEQ ID NO: 496449 - RNA, 21 nt, Human
uccuccuccacuaggcuagcc

SEQ ID NO: 496450 - RNA, 22 nt, Human
uugcaauugcuauggagagcgu

SEQ ID NO: 496451 - RNA, 22 nt, Human
cuuacagugaucaacacaaaga

SEQ ID NO: 496452 - RNA, 22 nt, Human
agccauccucccaccucagccu

SEQ ID NO: 496453 - RNA, 22 nt, Human
ugcuucugaaguggaugggugc

SEQ ID NO: 496454 - RNA, 22 nt, Human
gcauggccauggcacuauggac

SEQ ID NO: 496455 - RNA, 22 nt, Human
acccacacaucucuaauucagu

SEQ ID NO: 496456 - RNA, 22 nt, Human
uuucuauucuggaucuguggca

SEQ ID NO: 496457 - RNA, 22 nt, Human
gccugccuuugugaggaagcgg

SEQ ID NO: 496458 - RNA, 22 nt, Human
uaaagugcgacccaguccccag

SEQ ID NO: 496459 - RNA, 22 nt, Human
cgaggcagacaaaaguuggaag

SEQ ID NO: 496460 - RNA, 22 nt, Human
cugcuuugaggggcucuguaua

SEQ ID NO: 496461 - RNA, 22 nt, Human
acauuucuuccuaauuaucccu

SEQ ID NO: 496462 - RNA, 21 nt, Human
gcucuggccuacuguucccuc

SEQ ID NO: 496463 - RNA, 22 nt, Human
cuccuuccccuacucagcaucc

SEQ ID NO: 496464 - RNA, 22 nt, Human
ucccagaagugaaauuucuaga

SEQ ID NO: 496465 - RNA, 22 nt, Human
cagugcagaggccagggaggau

SEQ ID NO: 496466 - RNA, 22 nt, Human
ucaaggaaugacuauaugagga

SEQ ID NO: 496467 - RNA, 22 nt, Human
augucuuucuuauggucuguug

SEQ ID NO: 496468 - RNA, 22 nt, Human
agggggcaucagguccuggcuc

SEQ ID NO: 496469 - RNA, 22 nt, Human
agggcugguauguccaugaaag

SEQ ID NO: 496470 - RNA, 22 nt, Human
auuuugaaaagcauuugaguaa

SEQ ID NO: 496471 - RNA, 22 nt, Human
ucugucaggagauuggcagcug

SEQ ID NO: 496472 - RNA, 22 nt, Human
ucacacaugcuaagccagagau

SEQ ID NO: 496473 - RNA, 22 nt, Human
aaguuguauauaccgcuuuaag

SEQ ID NO: 496474 - RNA, 22 nt, Human
uggcagcagggaggccaguguu

SEQ ID NO: 496475 - RNA, 22 nt, Human
accugcagcuaaagauguaggg

SEQ ID NO: 496476 - RNA, 22 nt, Human
ccaaauagucuuucauugaauu

SEQ ID NO: 496477 - RNA, 22 nt, Human
ucugccugccagucugguccuc

SEQ ID NO: 496478 - RNA, 22 nt, Human
uuuuuccuuggaugugucucuc

SEQ ID NO: 496479 - RNA, 22 nt, Human
cagggcuuugugugccugggga

SEQ ID NO: 496480 - RNA, 21 nt, Human
guucaaauggguagauucaca

SEQ ID NO: 496481 - RNA, 22 nt, Human
aacaacuugcguucagagaugu

SEQ ID NO: 496482 - RNA, 18 nt, Human
agcagaauucuaggguuc

SEQ ID NO: 496483 - RNA, 20 nt, Human
cagcucugggaaagaggcca

SEQ ID NO: 496484 - RNA, 22 nt, Human
ugccugucuuaauaucuggaaa

SEQ ID NO: 496485 - RNA, 22 nt, Human
ggggaugguggcauuuguaaaa

SEQ ID NO: 496486 - RNA, 22 nt, Human
augugcagcuuuucuagagaag

SEQ ID NO: 496487 - RNA, 22 nt, Human
uaguccugaccuugccaccagc

SEQ ID NO: 496488 - RNA, 21 nt, Human
ccucuggcuugugcugugccc

SEQ ID NO: 496489 - RNA, 22 nt, Human
aucugccugagucuagguuuuc

SEQ ID NO: 496490 - RNA, 22 nt, Human
aggaaacuaacuuaucuuuaua

SEQ ID NO: 496491 - RNA, 22 nt, Human
guuccugacuguggaguuuggu

SEQ ID NO: 496492 - RNA, 22 nt, Human
ucaguguucuuauuuaauuagg

SEQ ID NO: 496493 - RNA, 22 nt, Human
agcucugggggaaagucugcuc

SEQ ID NO: 496494 - RNA, 22 nt, Human
ggauccagaggugaagauggga

SEQ ID NO: 496495 - RNA, 23 nt, Human
agccccucauaucugcuuucucu

SEQ ID NO: 496496 - RNA, 22 nt, Human
auauuuuccgaacuugagguag

SEQ ID NO: 496497 - RNA, 22 nt, Human
gggguggccaaggacucugacc

SEQ ID NO: 496498 - RNA, 18 nt, Human
ucaugagguagaggcugg

SEQ ID NO: 496499 - RNA, 22 nt, Human
caaguccucaaagggcucugcu

SEQ ID NO: 496500 - RNA, 22 nt, Human
acauuucuggaguuucucaaca

SEQ ID NO: 496501 - RNA, 22 nt, Human
ucucagaguuuagagcugagcc

SEQ ID NO: 496502 - RNA, 22 nt, Human
gagcuuugcuggaagccugggg

SEQ ID NO: 496503 - RNA, 19 nt, Human
accaggcuuauggucagug

SEQ ID NO: 496504 - RNA, 20 nt, Human
cugcccagccacugagggau

SEQ ID NO: 496505 - RNA, 22 nt, Human
cugcaugaagucuuuuuuauag

SEQ ID NO: 496506 - RNA, 22 nt, Human
gcugugcagucuuuggugugcc

SEQ ID NO: 496507 - RNA, 22 nt, Human
uaagccugcaugaaccaugaga

SEQ ID NO: 496508 - RNA, 20 nt, Human
uggaccacccuccucuuugc

SEQ ID NO: 496509 - RNA, 22 nt, Human
agggucugacaaugugacuuag

SEQ ID NO: 496510 - RNA, 21 nt, Human
cccuguguuccacagcagaca

SEQ ID NO: 496511 - RNA, 22 nt, Human
uguccauggagaagcucagggc

SEQ ID NO: 496512 - RNA, 22 nt, Human
cagcaaagguagaagcacagga

SEQ ID NO: 496513 - RNA, 22 nt, Human
uggaccugaagaauaggaagua

SEQ ID NO: 496514 - RNA, 22 nt, Human
cagugagguggauggauggccu

SEQ ID NO: 496515 - RNA, 22 nt, Human
ucagaggaaagggaacauaguc

SEQ ID NO: 496516 - RNA, 23 nt, Human
acuuuagauaaauuaugugcaca

SEQ ID NO: 496517 - RNA, 22 nt, Human
aaugaacaucaaaugccuacca

SEQ ID NO: 496518 - RNA, 22 nt, Human
cuaggccacagggcaaaaagga

SEQ ID NO: 496519 - RNA, 22 nt, Human
uuuuagaaguucaugugggauu

SEQ ID NO: 496520 - RNA, 19 nt, Human
uagcccagagccuggcuac

SEQ ID NO: 496521 - RNA, 22 nt, Human
agagacaggauaucugcucaug

SEQ ID NO: 496522 - RNA, 22 nt, Human
uuggaagguucuggucaugguu

SEQ ID NO: 496523 - RNA, 22 nt, Human
caagaugccccugguagggauc

SEQ ID NO: 496524 - RNA, 22 nt, Human
acccagagucauguuuauuccc

SEQ ID NO: 496525 - RNA, 22 nt, Human
ucuagggaacaugggucaagcu

SEQ ID NO: 496526 - RNA, 22 nt, Human
ucugaaggugcuagagaaagcu

SEQ ID NO: 496527 - RNA, 22 nt, Human
ugcuuuauggagcccaucucau

SEQ ID NO: 496528 - RNA, 22 nt, Human
aagggcagcugacagaugcuua

SEQ ID NO: 496529 - RNA, 22 nt, Human
ugaaugaugcaguauaaugaua

SEQ ID NO: 496530 - RNA, 19 nt, Human
gcauuucucuuuacagcca

SEQ ID NO: 496531 - RNA, 22 nt, Human
uccuggcuguuagagaggcaag

SEQ ID NO: 496532 - RNA, 22 nt, Human
caagacuucaccgcucugugcu

SEQ ID NO: 496533 - RNA, 22 nt, Human
ccagcuggaagagugcagaacu

SEQ ID NO: 496534 - RNA, 22 nt, Human
gaugaagaggcacugacauauu

SEQ ID NO: 496535 - RNA, 22 nt, Human
ugcugaaauuagaacauugagg

SEQ ID NO: 496536 - RNA, 22 nt, Human
ggaagagccuggggugucaggc

SEQ ID NO: 496537 - RNA, 22 nt, Human
uggggagcacgguagggaaaug

SEQ ID NO: 496538 - RNA, 22 nt, Human
cuccagggcagcauggcagugg

SEQ ID NO: 496539 - RNA, 22 nt, Human
cccagggcccuggacagcuaca

SEQ ID NO: 496540 - RNA, 22 nt, Human
cuuuggaaaaauaccuggcaua

SEQ ID NO: 496541 - RNA, 22 nt, Human
uucucagggucuggauggccug

SEQ ID NO: 496542 - RNA, 22 nt, Human
gaggaggcuggcgccgccugcc

SEQ ID NO: 496543 - RNA, 22 nt, Human
cccuggguucuggcugggcugc

SEQ ID NO: 496544 - RNA, 22 nt, Human
agaucaaagccaugagagauuu

SEQ ID NO: 496545 - RNA, 22 nt, Human
auuagagguacaaaccuucacu

SEQ ID NO: 496546 - RNA, 22 nt, Human
uuucacaaguaaaguccuaagu

SEQ ID NO: 496547 - RNA, 22 nt, Human
uggaaacucuaccucucuaaga

SEQ ID NO: 496548 - RNA, 22 nt, Human
uacauucaacaugucacuaugu

SEQ ID NO: 496549 - RNA, 22 nt, Human
gacaggguacgggcuaggcaca

SEQ ID NO: 496550 - RNA, 22 nt, Human
gugcagguguuuuggcugccag

SEQ ID NO: 496551 - RNA, 22 nt, Human
ugaguucugacugugaugccag

SEQ ID NO: 496552 - RNA, 22 nt, Human
ucuggagccacaaaccucagcu

SEQ ID NO: 496553 - RNA, 22 nt, Human
aaggcaguuugggccaccaucu

SEQ ID NO: 496554 - RNA, 22 nt, Human
gauuucaaaaguagauccauca

SEQ ID NO: 496555 - RNA, 22 nt, Human
gguuggggcgagcuggaggccc

SEQ ID NO: 496556 - RNA, 23 nt, Human
uccagccucuugcucucacaugc

SEQ ID NO: 496557 - RNA, 22 nt, Human
cagcagcaguggcugcagaaca

SEQ ID NO: 496558 - RNA, 21 nt, Human
agaugaggauacugaggccua

SEQ ID NO: 496559 - RNA, 22 nt, Human
uugaaguugcacauuauaauuu

SEQ ID NO: 496560 - RNA, 22 nt, Human
auccccaggggcauucaagcuu

SEQ ID NO: 496561 - RNA, 17 nt, Human
ucauuuguugugacuag

SEQ ID NO: 496562 - RNA, 22 nt, Human
ccucauggccuugagcugaggg

SEQ ID NO: 496563 - RNA, 22 nt, Human
aguugugagaaacagaaugagc

SEQ ID NO: 496564 - RNA, 21 nt, Human
uuagaaagcucacuacaguua

SEQ ID NO: 496565 - RNA, 22 nt, Human
cauugcacgggcgucugucugu

SEQ ID NO: 496566 - RNA, 22 nt, Human
aggcuccuuguucaucauccau

SEQ ID NO: 496567 - RNA, 22 nt, Human
cccuccagcucaaagcaaccgg

SEQ ID NO: 496568 - RNA, 22 nt, Human
ggagccuguuaguugagugcuc

SEQ ID NO: 496569 - RNA, 22 nt, Human
agcagcucccuccucagccacc

SEQ ID NO: 496570 - RNA, 22 nt, Human
aaggaggcacccugagccugcc

SEQ ID NO: 496571 - RNA, 22 nt, Human
uaagugcaauguuuuacuuaaa

SEQ ID NO: 496572 - RNA, 22 nt, Human
ggccaccuccgugaaggaauga

SEQ ID NO: 496573 - RNA, 22 nt, Human
cugagccagggccacacaugga

SEQ ID NO: 496574 - RNA, 22 nt, Human
uucagagaguccaguaugcagu

SEQ ID NO: 496575 - RNA, 22 nt, Human
cagcugccaugacauguccugc

SEQ ID NO: 496576 - RNA, 22 nt, Human
agcugcugagccaggcugaugu

SEQ ID NO: 496577 - RNA, 22 nt, Human
gccagcuguucagacauucuuu

SEQ ID NO: 496578 - RNA, 22 nt, Human
agcugugggccugggagagcug

SEQ ID NO: 496579 - RNA, 22 nt, Human
ggaaggaucuggcugaaaucca

SEQ ID NO: 496580 - RNA, 22 nt, Human
cugucucugucuuaacucccag

SEQ ID NO: 496581 - RNA, 22 nt, Human
caauuucuaacauuccauggau

SEQ ID NO: 496582 - RNA, 16 nt, Human
uaaacagcagacaguu

SEQ ID NO: 496583 - RNA, 22 nt, Human
ugagcuucaaaguuggaucuga

SEQ ID NO: 496584 - RNA, 22 nt, Human
ggggaccuuuccauuucugaga

SEQ ID NO: 496585 - RNA, 17 nt, Human
uguagcuucuccuucuc

SEQ ID NO: 496586 - RNA, 22 nt, Human
ggacaaaggucuggggaaccug

SEQ ID NO: 496587 - RNA, 22 nt, Human
guuauguauugggaaauccaag

SEQ ID NO: 496588 - RNA, 19 nt, Human
ucucacaucagcuccuagc

SEQ ID NO: 496589 - RNA, 22 nt, Human
gaagaacaccugcugcccagug

SEQ ID NO: 496590 - RNA, 22 nt, Human
ccagaucuaaguccaaaguacu

SEQ ID NO: 496591 - RNA, 22 nt, Human
guggcucuugcauggggucucu

SEQ ID NO: 496592 - RNA, 22 nt, Human
cagcagagcugugugggaaggg

SEQ ID NO: 496593 - RNA, 22 nt, Human
ugccagggucagcugcagcucu

SEQ ID NO: 496594 - RNA, 22 nt, Human
aaccaggacaauuugaauagaa

SEQ ID NO: 496595 - RNA, 22 nt, Human
cucucuggucccagauuccaga

SEQ ID NO: 496596 - RNA, 22 nt, Human
agcugaaggcuagaacagcugg

SEQ ID NO: 496597 - RNA, 22 nt, Human
agagcuguagcuuccuagagcc

SEQ ID NO: 496598 - RNA, 22 nt, Human
ggcacugacacuagcauggcac

SEQ ID NO: 496599 - RNA, 20 nt, Human
cauauauaccuagaagugga

SEQ ID NO: 496600 - RNA, 22 nt, Human
gggauggggagcuggaaagggg

SEQ ID NO: 496601 - RNA, 22 nt, Human
cagcaggacauggaggaguaaa

SEQ ID NO: 496602 - RNA, 22 nt, Human
cugcuggccuagcccauccucu

SEQ ID NO: 496603 - RNA, 22 nt, Human
uaugugcaguuugcucuuaaca

SEQ ID NO: 496604 - RNA, 22 nt, Human
aaucauaauucaaauaagcuua

SEQ ID NO: 496605 - RNA, 19 nt, Human
cagcugcaccgugaccauc

SEQ ID NO: 496606 - RNA, 22 nt, Human
guuauugcaguauagaggucua

SEQ ID NO: 496607 - RNA, 22 nt, Human
uggccugguaccacauagauuu

SEQ ID NO: 496608 - RNA, 22 nt, Human
cagguggcuuauuagggucagu

SEQ ID NO: 496609 - RNA, 22 nt, Human
ugccaccuggacaaccuuaugc

SEQ ID NO: 496610 - RNA, 23 nt, Human
uuucauaugguguggaugaagaa

SEQ ID NO: 496611 - RNA, 22 nt, Human
ccagagucuuuauauuccugaa

SEQ ID NO: 496612 - RNA, 21 nt, Human
guuuucaugauagagucugua

SEQ ID NO: 496613 - RNA, 22 nt, Human
uaaaaguaggaaugaaacgcau

SEQ ID NO: 496614 - RNA, 22 nt, Human
gaguuuaaagcauacauauuuu

SEQ ID NO: 496615 - RNA, 22 nt, Human
gccuggaggggacagucucugg

SEQ ID NO: 496616 - RNA, 22 nt, Human
uaaguuuggggaaaauguuaag

SEQ ID NO: 496617 - RNA, 22 nt, Human
aaaguagaacauuuucuuaucu

SEQ ID NO: 496618 - RNA, 22 nt, Human
ugucuguaagguguuuauguua

SEQ ID NO: 496619 - RNA, 22 nt, Human
acaaugucucauauucguguuc

SEQ ID NO: 496620 - RNA, 22 nt, Human
cccugccuucuuggccuuuaaa

SEQ ID NO: 496621 - RNA, 22 nt, Human
auucaaguacaguuuucuucuu

SEQ ID NO: 496622 - RNA, 22 nt, Human
acaaacagaguugaaaaauagg

SEQ ID NO: 496623 - RNA, 22 nt, Human
uggcccugacuuggaggccuga

SEQ ID NO: 496624 - RNA, 22 nt, Human
caguuucuauggcugggcucug

SEQ ID NO: 496625 - RNA, 22 nt, Human
ccugggagccgacugacugugc

SEQ ID NO: 496626 - RNA, 22 nt, Human
gccugucucuuggaacuuggua

SEQ ID NO: 496627 - RNA, 22 nt, Human
uccagguccuacuggcccauag

SEQ ID NO: 496628 - RNA, 22 nt, Human
ggcagggaguggagacucccua

SEQ ID NO: 496629 - RNA, 22 nt, Human
uuaaagaguaaucauaggucaa

SEQ ID NO: 496630 - RNA, 22 nt, Human
guuugcauggaagacagugagu

SEQ ID NO: 496631 - RNA, 22 nt, Human
agggcagagaucugagugggca

SEQ ID NO: 496632 - RNA, 22 nt, Human
gcugucacucuccggccuuccc

SEQ ID NO: 496633 - RNA, 22 nt, Human
agggcuccaaggaaguguagcu

SEQ ID NO: 496634 - RNA, 22 nt, Human
aauggcagaggcaaagauggua

SEQ ID NO: 496635 - RNA, 22 nt, Human
aaagcugcuuuaaacaucuaug

SEQ ID NO: 496636 - RNA, 22 nt, Human
acucuuugucuguugccgcuua

SEQ ID NO: 496637 - RNA, 22 nt, Human
ucugggcagccaugugccuggc

SEQ ID NO: 496638 - RNA, 23 nt, Human
aaauaggaguaucuggaucauga

SEQ ID NO: 496639 - RNA, 22 nt, Human
agucccagcucugccacuuacu

SEQ ID NO: 496640 - RNA, 22 nt, Human
gagggcugauaaaugcgcaugg

SEQ ID NO: 496641 - RNA, 21 nt, Human
ccugagccuguuuauccagaa

SEQ ID NO: 496642 - RNA, 22 nt, Human
uucagcagugcagacacccagu

SEQ ID NO: 496643 - RNA, 21 nt, Human
ggugggcacaggagagcagag

SEQ ID NO: 496644 - RNA, 22 nt, Human
ccccagccuuccaugggaauug

SEQ ID NO: 496645 - RNA, 22 nt, Human
ggaggggagucucccaaagccg

SEQ ID NO: 496646 - RNA, 18 nt, Human
cugugggcuggugcauga

SEQ ID NO: 496647 - RNA, 22 nt, Human
uaggagccugcucugcagggac

SEQ ID NO: 496648 - RNA, 22 nt, Human
agcugggccugagcuggaagcu

SEQ ID NO: 496649 - RNA, 22 nt, Human
aggcagcaauugaaaucauugu

SEQ ID NO: 496650 - RNA, 22 nt, Human
cuggcucacuagcccugcccug

SEQ ID NO: 496651 - RNA, 19 nt, Human
gugucugccuuugugccac

SEQ ID NO: 496652 - RNA, 19 nt, Human
gcaggguguugacuguccc

SEQ ID NO: 496653 - RNA, 23 nt, Human
ggagccuggcauaugagacgcau

SEQ ID NO: 496654 - RNA, 21 nt, Human
uucucuccauaugcccagccc

SEQ ID NO: 496655 - RNA, 22 nt, Human
cugagcaguagagggucucuuu

SEQ ID NO: 496656 - RNA, 22 nt, Human
cacagaaguuucauagucucga

SEQ ID NO: 496657 - RNA, 22 nt, Human
agguccagagguugaacggugg

SEQ ID NO: 496658 - RNA, 22 nt, Human
ugaagccagggacugacacuuc

SEQ ID NO: 496659 - RNA, 22 nt, Human
aaacagauugaaauucguagua

SEQ ID NO: 496660 - RNA, 22 nt, Human
aagcagcauucagugaaaugug

SEQ ID NO: 496661 - RNA, 22 nt, Human
uccugggagcccuugcuccacc

SEQ ID NO: 496662 - RNA, 22 nt, Human
guaaauuauuucaagaucaucu

SEQ ID NO: 496663 - RNA, 22 nt, Human
aggccagcuguuacuagagcca

SEQ ID NO: 496664 - RNA, 22 nt, Human
ggcaaaguuuucaucucauaac

SEQ ID NO: 496665 - RNA, 21 nt, Human
caggaaagaaaacguacauau

SEQ ID NO: 496666 - RNA, 22 nt, Human
gccuucagcggccgcucgcugc

SEQ ID NO: 496667 - RNA, 22 nt, Human
ugucuuuuauaacugacauaua

SEQ ID NO: 496668 - RNA, 22 nt, Human
guuucauuuacaucuguaggua

SEQ ID NO: 496669 - RNA, 22 nt, Human
augaauugaggaaaacagucgu

SEQ ID NO: 496670 - RNA, 22 nt, Human
ucuccuucgaggcccagcuccc

SEQ ID NO: 496671 - RNA, 22 nt, Human
uggccuggugcucaggcaguag

SEQ ID NO: 496672 - RNA, 22 nt, Human
uacaggaggauuaucaaaggau

SEQ ID NO: 496673 - RNA, 22 nt, Human
cuucacagcaugagcuuuggag

SEQ ID NO: 496674 - RNA, 22 nt, Human
uccugggcagcgggacgcucag

SEQ ID NO: 496675 - RNA, 22 nt, Human
ucuggggugugaccugagcaug

SEQ ID NO: 496676 - RNA, 22 nt, Human
ucccuggcuguguucaggugcg

SEQ ID NO: 496677 - RNA, 22 nt, Human
uccuguggaagacaguguuggg

SEQ ID NO: 496678 - RNA, 22 nt, Human
gaaggucaccuccccucucugg

SEQ ID NO: 496679 - RNA, 22 nt, Human
ugccaggcgugguggugcgcac

SEQ ID NO: 496680 - RNA, 23 nt, Human
acacaaggguaacugccagccau

SEQ ID NO: 496681 - RNA, 22 nt, Human
aagaauugguuuccucugucau

SEQ ID NO: 496682 - RNA, 22 nt, Human
gggcccacuggcugucugaccc

SEQ ID NO: 496683 - RNA, 22 nt, Human
ugcagcugcuggcccaggugcu

SEQ ID NO: 496684 - RNA, 16 nt, Human
uggcugagagaggguu

SEQ ID NO: 496685 - RNA, 22 nt, Human
agggcuggaggguacuaguuua

SEQ ID NO: 496686 - RNA, 19 nt, Human
cagaccuguccagccugug

SEQ ID NO: 496687 - RNA, 22 nt, Human
uaucuguuccaggcacucagcu

SEQ ID NO: 496688 - RNA, 22 nt, Human
gguggcugcuuccucaagagga

SEQ ID NO: 496689 - RNA, 22 nt, Human
acuuccuguuaugugugccucu

SEQ ID NO: 496690 - RNA, 22 nt, Human
uccaggcauagaaggcacgcac

SEQ ID NO: 496691 - RNA, 22 nt, Human
uguggaauuucuuucagguaug

SEQ ID NO: 496692 - RNA, 22 nt, Human
ugcuucaaguugaaauauucuu

SEQ ID NO: 496693 - RNA, 22 nt, Human
aggucucugaguacugcuggac

SEQ ID NO: 496694 - RNA, 20 nt, Human
ggcaggacccgguagggagc

SEQ ID NO: 496695 - RNA, 22 nt, Human
caggccugugaguugaggcccc

SEQ ID NO: 496696 - RNA, 22 nt, Human
agggggcucagcaggcucugga

SEQ ID NO: 496697 - RNA, 22 nt, Human
gcaggcagaucaccugucagga

SEQ ID NO: 496698 - RNA, 19 nt, Human
acaaagcugugagcagcuu

SEQ ID NO: 496699 - RNA, 22 nt, Human
gauacaaauucaugucugaauu

SEQ ID NO: 496700 - RNA, 22 nt, Human
uuccagauuucuacacaagacc

SEQ ID NO: 496701 - RNA, 22 nt, Human
ucugucuccugccagugccucu

SEQ ID NO: 496702 - RNA, 22 nt, Human
auuagcuuccuauaguaagggg

SEQ ID NO: 496703 - RNA, 21 nt, Human
aguaguuuagcacaggguuug

SEQ ID NO: 496704 - RNA, 22 nt, Human
caaggugaacuugcuguacagc

SEQ ID NO: 496705 - RNA, 22 nt, Human
ugagcuggaaucuucuugacug

SEQ ID NO: 496706 - RNA, 17 nt, Human
acacagggagagggagc

SEQ ID NO: 496707 - RNA, 22 nt, Human
ucagagaguuuucacuagggug

SEQ ID NO: 496708 - RNA, 22 nt, Human
uagguucagugucuuguucugc

SEQ ID NO: 496709 - RNA, 22 nt, Human
agcucccagagcucgagaguaa

SEQ ID NO: 496710 - RNA, 22 nt, Human
auuucuguugcuuauaaauuac

SEQ ID NO: 496711 - RNA, 22 nt, Human
cccuggcugcuaccagguagcu

SEQ ID NO: 496712 - RNA, 22 nt, Human
ugcagaggagucagccugggca

SEQ ID NO: 496713 - RNA, 22 nt, Human
uggagcagggcaucacugugcg

SEQ ID NO: 496714 - RNA, 22 nt, Human
ggcacagaguuggcagagcugc

SEQ ID NO: 496715 - RNA, 22 nt, Human
acagagucugacagguaggcgc

SEQ ID NO: 496716 - RNA, 22 nt, Human
gugaaaucugaggcccaugaug

SEQ ID NO: 496717 - RNA, 22 nt, Human
acagaaggcggggacaaggcgg

SEQ ID NO: 496718 - RNA, 22 nt, Human
gccuggggucucugacucacag

SEQ ID NO: 496719 - RNA, 22 nt, Human
ugaugggaaaaugaggccuggg

SEQ ID NO: 496720 - RNA, 22 nt, Human
agccuccaaaugucaggucccg

SEQ ID NO: 496721 - RNA, 19 nt, Human
aaacucugaaggccacugg

SEQ ID NO: 496722 - RNA, 22 nt, Human
agcagggcucuguggagggugg

SEQ ID NO: 496723 - RNA, 22 nt, Human
cccugcagagggaugggggcag

SEQ ID NO: 496724 - RNA, 22 nt, Human
aggccaggccuuucuccauucc

SEQ ID NO: 496725 - RNA, 22 nt, Human
uguguuuuaucuauuguaucuu

SEQ ID NO: 496726 - RNA, 22 nt, Human
uuuugagauggagucuugcucu

SEQ ID NO: 496727 - RNA, 22 nt, Human
uagcauuagucagauauguuuu

SEQ ID NO: 496728 - RNA, 22 nt, Human
acuggaagccaguugacaauca

SEQ ID NO: 496729 - RNA, 22 nt, Human
ggccucagaccggagcuggcca

SEQ ID NO: 496730 - RNA, 22 nt, Human
ucauuucuaucuaugcagcuuc

SEQ ID NO: 496731 - RNA, 22 nt, Human
ucucaggaaauaggauuugagu

SEQ ID NO: 496732 - RNA, 22 nt, Human
acaucuuuuuggaaacggcuga

SEQ ID NO: 496733 - RNA, 22 nt, Human
gcuggagucuggaggugugcca

SEQ ID NO: 496734 - RNA, 22 nt, Human
gccuuccuuuuaccaccagcca

SEQ ID NO: 496735 - RNA, 23 nt, Human
guuuuacaggugagaaaauggag

SEQ ID NO: 496736 - RNA, 22 nt, Human
aggcagagaaaaaccagauaug

SEQ ID NO: 496737 - RNA, 23 nt, Human
aaaguuugaagcaacaguaguug

SEQ ID NO: 496738 - RNA, 22 nt, Human
uucuaugccauguucagcuacu

SEQ ID NO: 496739 - RNA, 22 nt, Human
guuucugagcacuuuuauugca

SEQ ID NO: 496740 - RNA, 22 nt, Human
ucuggcccugcugcugugagca

SEQ ID NO: 496741 - RNA, 22 nt, Human
ggacuccucuagaaguugaggc

SEQ ID NO: 496742 - RNA, 22 nt, Human
gugccuggggguaauguaggau

SEQ ID NO: 496743 - RNA, 22 nt, Human
ucuuggaaucuccauagaguga

SEQ ID NO: 496744 - RNA, 22 nt, Human
gcugucaccaaagcaggcacug

SEQ ID NO: 496745 - RNA, 22 nt, Human
ccagcccugaacccugcugcau

SEQ ID NO: 496746 - RNA, 22 nt, Human
ggcucuggucagugaggggccu

SEQ ID NO: 496747 - RNA, 22 nt, Human
ucuuggcuccucacagcaucag

SEQ ID NO: 496748 - RNA, 22 nt, Human
acugggcuuauuucuugugaac

SEQ ID NO: 496749 - RNA, 22 nt, Human
acacagugguguuuacaaaauu

SEQ ID NO: 496750 - RNA, 19 nt, Human
cucagcuguagcucaugug

SEQ ID NO: 496751 - RNA, 22 nt, Human
ccaguugguuucaaugggacag

SEQ ID NO: 496752 - RNA, 22 nt, Human
uccugggcgguuaugugaucug

SEQ ID NO: 496753 - RNA, 22 nt, Human
agcucccagcuccuuugagaga

SEQ ID NO: 496754 - RNA, 22 nt, Human
aggagcuggaguccaggcaagu

SEQ ID NO: 496755 - RNA, 22 nt, Human
aggaaacugggccucagguuag

SEQ ID NO: 496756 - RNA, 22 nt, Human
cugggcucuaagggagcaccgu

SEQ ID NO: 496757 - RNA, 22 nt, Human
acagugcagggcgggaagaagg

SEQ ID NO: 496758 - RNA, 22 nt, Human
ucagcuuuccuugcuuuagauu

SEQ ID NO: 496759 - RNA, 22 nt, Human
ucauugcauuuauucacuggca

SEQ ID NO: 496760 - RNA, 22 nt, Human
ucacauuuuuuacuggacuuaa

SEQ ID NO: 496761 - RNA, 17 nt, Human
gagauggguggaucacc

SEQ ID NO: 496762 - RNA, 22 nt, Human
uguguguauaugcauuuaucua

SEQ ID NO: 496763 - RNA, 22 nt, Human
gguagcacauugcauuaggaga

SEQ ID NO: 496764 - RNA, 22 nt, Human
ucugcaggcuuggaguggcagc

SEQ ID NO: 496765 - RNA, 22 nt, Human
augcugcacaagccacauguag

SEQ ID NO: 496766 - RNA, 22 nt, Human
caggaggcccaaagggcgcaga

SEQ ID NO: 496767 - RNA, 22 nt, Human
uacagaaaaacuggcauugaag

SEQ ID NO: 496768 - RNA, 22 nt, Human
acuuggcaaguaucuauaaagu

SEQ ID NO: 496769 - RNA, 22 nt, Human
ugaaaucaugaacaagguaggu

SEQ ID NO: 496770 - RNA, 22 nt, Human
uugucuguccaggcaccccaag

SEQ ID NO: 496771 - RNA, 22 nt, Human
cuggagggauguaggguguauu

SEQ ID NO: 496772 - RNA, 21 nt, Human
accuucaagccagaggugguc

SEQ ID NO: 496773 - RNA, 22 nt, Human
cagagucauaucagagaauaug

SEQ ID NO: 496774 - RNA, 22 nt, Human
uuaacagagugccuggcaugua

SEQ ID NO: 496775 - RNA, 22 nt, Human
gaaggcaggcuucugauuaggu

SEQ ID NO: 496776 - RNA, 22 nt, Human
caggccugagacaucugagaua

SEQ ID NO: 496777 - RNA, 19 nt, Human
agugaaauggaguauucaa

SEQ ID NO: 496778 - RNA, 22 nt, Human
gaugcagggcuggcaggagcuu

SEQ ID NO: 496779 - RNA, 17 nt, Human
accaggcaacacgccca

SEQ ID NO: 496780 - RNA, 22 nt, Human
ugaaagaagugucacauugcca

SEQ ID NO: 496781 - RNA, 22 nt, Human
uaguacuuaucucugucauugu

SEQ ID NO: 496782 - RNA, 22 nt, Human
aagagcugugggugguaguccu

SEQ ID NO: 496783 - RNA, 22 nt, Human
ggccucagagaaggcugugcgg

SEQ ID NO: 496784 - RNA, 22 nt, Human
ucccagcagagccagcaagccg

SEQ ID NO: 496785 - RNA, 20 nt, Human
uccaggcagacagcuauggg

SEQ ID NO: 496786 - RNA, 22 nt, Human
aacacuguacuggaagauggac

SEQ ID NO: 496787 - RNA, 22 nt, Human
aaacucuggggguggagcccag

SEQ ID NO: 496788 - RNA, 22 nt, Human
gccguuagauaauaacaagcau

SEQ ID NO: 496789 - RNA, 19 nt, Human
caggaugaucccaugacac

SEQ ID NO: 496790 - RNA, 20 nt, Human
aagagcauaguacaggaaga

SEQ ID NO: 496791 - RNA, 22 nt, Human
gcaguguuaccucuucaguggg

SEQ ID NO: 496792 - RNA, 22 nt, Human
cuuuccuuaauaagcagguaua

SEQ ID NO: 496793 - RNA, 22 nt, Human
agcagcuuacauguggccuauc

SEQ ID NO: 496794 - RNA, 22 nt, Human
auguguguauauauagucauuu

SEQ ID NO: 496795 - RNA, 22 nt, Human
uagagucuaguguauacaaagu

SEQ ID NO: 496796 - RNA, 22 nt, Human
uugguuuaggaacuggcuugga

SEQ ID NO: 496797 - RNA, 22 nt, Human
gucuucuguaagaugagguccc

SEQ ID NO: 496798 - RNA, 22 nt, Human
gaggagaggccaucguuguuau

SEQ ID NO: 496799 - RNA, 22 nt, Human
uucugaggcacuggcucuccca

SEQ ID NO: 496800 - RNA, 22 nt, Human
uuuauucugugcuacaugaaga

SEQ ID NO: 496801 - RNA, 19 nt, Human
gcacugaagaguuggucac

SEQ ID NO: 496802 - RNA, 22 nt, Human
aacuguaaugaauuguucauga

SEQ ID NO: 496803 - RNA, 22 nt, Human
ccuggagcgcgggucaagcugg

SEQ ID NO: 496804 - RNA, 22 nt, Human
cuguggauuuaggcagagcuga

SEQ ID NO: 496805 - RNA, 22 nt, Human
ugggccuggcccuguggaggag

SEQ ID NO: 496806 - RNA, 22 nt, Human
ugcagggagggcccagcaaucu

SEQ ID NO: 496807 - RNA, 22 nt, Human
gccagaggggcucgaaggcgcg

SEQ ID NO: 496808 - RNA, 22 nt, Human
cuuaggaacgcucugccuagug

SEQ ID NO: 496809 - RNA, 22 nt, Human
aaauguguuucuuugugaaugg

SEQ ID NO: 496810 - RNA, 22 nt, Human
agagcuggcagcagcuucuccu

SEQ ID NO: 496811 - RNA, 22 nt, Human
gcagggcagcucacugugguuc

SEQ ID NO: 496812 - RNA, 21 nt, Human
ugcaggcuacuucugacucua

SEQ ID NO: 496813 - RNA, 22 nt, Human
cagaagagaugaaauaguauua

SEQ ID NO: 496814 - RNA, 20 nt, Human
cucuuuguuggcaaacucuu

SEQ ID NO: 496815 - RNA, 22 nt, Human
agcaaacagugugcuaagaaau

SEQ ID NO: 496816 - RNA, 22 nt, Human
gcaggcugugguauguugggca

SEQ ID NO: 496817 - RNA, 22 nt, Human
uccaggcauguugggaagauga

SEQ ID NO: 496818 - RNA, 22 nt, Human
gcucccaggaagagaagggcca

SEQ ID NO: 496819 - RNA, 22 nt, Human
aaaugcuugcaacaucccaggu

SEQ ID NO: 496820 - RNA, 20 nt, Human
accaggagauggaggcaggg

SEQ ID NO: 496821 - RNA, 22 nt, Human
gcaggagccaggccgagcuggu

SEQ ID NO: 496822 - RNA, 22 nt, Human
cuccucuucugaguaccaggga

SEQ ID NO: 496823 - RNA, 22 nt, Human
augaacaaugacuacauauuga

SEQ ID NO: 496824 - RNA, 20 nt, Human
ccugucugcaauggagguca

SEQ ID NO: 496825 - RNA, 22 nt, Human
uguugugacccagaccaagaag

SEQ ID NO: 496826 - RNA, 20 nt, Human
uuucauugucagaaucuuau

SEQ ID NO: 496827 - RNA, 22 nt, Human
ucugggccggagccgacggcag

SEQ ID NO: 496828 - RNA, 22 nt, Human
ugcuuucaaaggcuuucuagau

SEQ ID NO: 496829 - RNA, 22 nt, Human
uggggaccagauuagaccaugg

SEQ ID NO: 496830 - RNA, 22 nt, Human
ggcacagcaccuuuucacauug

SEQ ID NO: 496831 - RNA, 22 nt, Human
uucaagauggcugcaaauacuu

SEQ ID NO: 496832 - RNA, 22 nt, Human
ucacagaagguggccauagcug

SEQ ID NO: 496833 - RNA, 22 nt, Human
agcugcucccuauccuuuccuu

SEQ ID NO: 496834 - RNA, 22 nt, Human
agguggguaucaugagagauua

SEQ ID NO: 496835 - RNA, 20 nt, Human
ggccggggagcucuccaggg

SEQ ID NO: 496836 - RNA, 22 nt, Human
cugggagaugacucagagcagg

SEQ ID NO: 496837 - RNA, 22 nt, Human
cucugguugcagcugaaguucc

SEQ ID NO: 496838 - RNA, 22 nt, Human
ugcucugucaagaaaagaugcc

SEQ ID NO: 496839 - RNA, 22 nt, Human
cagaaaauaaaguuucuacgca

SEQ ID NO: 496840 - RNA, 22 nt, Human
ccacugagaccuuuuggaggag

SEQ ID NO: 496841 - RNA, 22 nt, Human
gaaaacugugauuagaaugccu

SEQ ID NO: 496842 - RNA, 22 nt, Human
gcccccucaaagaggaagcucu

SEQ ID NO: 496843 - RNA, 22 nt, Human
gggcccuggacguggcggcaga

SEQ ID NO: 496844 - RNA, 22 nt, Human
ggcaggcuagcacugauguccu

SEQ ID NO: 496845 - RNA, 22 nt, Human
cuguaaaacacuguaguaucug

SEQ ID NO: 496846 - RNA, 22 nt, Human
ccagccugaaaugccucauccu

SEQ ID NO: 496847 - RNA, 22 nt, Human
ggugagaaagggauuccuguuc

SEQ ID NO: 496848 - RNA, 22 nt, Human
gcuuuccuggcccugucccugc

SEQ ID NO: 496849 - RNA, 22 nt, Human
aguuuaugaaacacagauuuga

SEQ ID NO: 496850 - RNA, 22 nt, Human
guuuagaacacggaaauacuga

SEQ ID NO: 496851 - RNA, 22 nt, Human
ggugaggcagguggcugcugag

SEQ ID NO: 496852 - RNA, 22 nt, Human
ugagcuguguccugggggcagu

SEQ ID NO: 496853 - RNA, 22 nt, Human
aaaacuguaucuucuugggacu

SEQ ID NO: 496854 - RNA, 22 nt, Human
ggugcagcugcagccugggagc

SEQ ID NO: 496855 - RNA, 22 nt, Human
cgugucaucugagccuugggcg

SEQ ID NO: 496856 - RNA, 20 nt, Human
uauaacaguguugggugugu

SEQ ID NO: 496857 - RNA, 16 nt, Human
gcugggagggagaggu

SEQ ID NO: 496858 - RNA, 22 nt, Human
ucucagagaggggccgggccuu

SEQ ID NO: 496859 - RNA, 22 nt, Human
cacagggcuaaaugaaggguug

SEQ ID NO: 496860 - RNA, 22 nt, Human
cugaggccuaagacaugaauga

SEQ ID NO: 496861 - RNA, 22 nt, Human
aggaccugacuggcuccugcuu

SEQ ID NO: 496862 - RNA, 20 nt, Human
uuaagaaaagcacauccugc

SEQ ID NO: 496863 - RNA, 22 nt, Human
uuagauaacaguagaauaucaa

SEQ ID NO: 496864 - RNA, 22 nt, Human
acagccaggcccagcacgcagg

SEQ ID NO: 496865 - RNA, 21 nt, Human
gcacagggacagaucaucaca

SEQ ID NO: 496866 - RNA, 22 nt, Human
caggaaaaugucaauggaaagc

SEQ ID NO: 496867 - RNA, 22 nt, Human
ucugggccugucucagagcugg

SEQ ID NO: 496868 - RNA, 22 nt, Human
agacugugagaagauggcugcg

SEQ ID NO: 496869 - RNA, 22 nt, Human
cugcccuggccacugugcccag

SEQ ID NO: 496870 - RNA, 22 nt, Human
ugucauguguucuuaaauacau

SEQ ID NO: 496871 - RNA, 22 nt, Human
gugaaugacuguuuucagcauu

SEQ ID NO: 496872 - RNA, 22 nt, Human
aaagacuaaccaguugucaaaa

SEQ ID NO: 496873 - RNA, 22 nt, Human
caaaagcaguucuaucugaguu

SEQ ID NO: 496874 - RNA, 22 nt, Human
ugaggcuggcaaggcugguauu

SEQ ID NO: 496875 - RNA, 22 nt, Human
aggaggggcauagaaauguaau

SEQ ID NO: 496876 - RNA, 22 nt, Human
agacagggagggagcgcggcug

SEQ ID NO: 496877 - RNA, 22 nt, Human
ucugaaaugcaaauuugacuga

SEQ ID NO: 496878 - RNA, 22 nt, Human
ucuucacagaugcauauacuuc

SEQ ID NO: 496879 - RNA, 22 nt, Human
ggacugggcaugggugcucugc

SEQ ID NO: 496880 - RNA, 22 nt, Human
ucucaaauauuuggagagagga

SEQ ID NO: 496881 - RNA, 22 nt, Human
caggcucccugcaggccaguga

SEQ ID NO: 496882 - RNA, 22 nt, Human
aaaauccucuaauucuagaaua

SEQ ID NO: 496883 - RNA, 22 nt, Human
gggagcaggagccugccugcca

SEQ ID NO: 496884 - RNA, 22 nt, Human
ccuggcagacagcacugaagcu

SEQ ID NO: 496885 - RNA, 22 nt, Human
uugcauuguaggauguuagaag

SEQ ID NO: 496886 - RNA, 19 nt, Human
uuucaaagggcauaagccu

SEQ ID NO: 496887 - RNA, 23 nt, Human
uuguccugccgaucucugagaau

SEQ ID NO: 496888 - RNA, 22 nt, Human
gacccggcuccaggcccagcag

SEQ ID NO: 496889 - RNA, 18 nt, Human
uguuaaaugaagauuugc

SEQ ID NO: 496890 - RNA, 22 nt, Human
cccuggaggucagaggccuggg

SEQ ID NO: 496891 - RNA, 22 nt, Human
cucuagcugaggucacugcuau

SEQ ID NO: 496892 - RNA, 22 nt, Human
ugccccucuugcuggcccuguc

SEQ ID NO: 496893 - RNA, 22 nt, Human
acuuccuggcugggugaccugg

SEQ ID NO: 496894 - RNA, 22 nt, Human
uucaauaucauuguuuagucuc

SEQ ID NO: 496895 - RNA, 22 nt, Human
aggagccauuuuccaagggcga

SEQ ID NO: 496896 - RNA, 22 nt, Human
uacaaagucagaauaacaggug

SEQ ID NO: 496897 - RNA, 22 nt, Human
caagcuuguuucuccugggggu

SEQ ID NO: 496898 - RNA, 20 nt, Human
uccugagugcaguuggcuug

SEQ ID NO: 496899 - RNA, 22 nt, Human
cuacccagcaccuaggcugccu

SEQ ID NO: 496900 - RNA, 22 nt, Human
uuuccagguaucaagcuucagg

SEQ ID NO: 496901 - RNA, 22 nt, Human
uccacagugguugaacuaguaa

SEQ ID NO: 496902 - RNA, 22 nt, Human
aggcuccagucuccucuggcag

SEQ ID NO: 496903 - RNA, 23 nt, Human
ucuguggccccuucgccccacuc

SEQ ID NO: 496904 - RNA, 22 nt, Human
uaaaugcagauuccugagccua

SEQ ID NO: 496905 - RNA, 22 nt, Human
ucuggcugucauuggaggcccc

SEQ ID NO: 496906 - RNA, 22 nt, Human
gucugucaucugagauggagug

SEQ ID NO: 496907 - RNA, 22 nt, Human
gggcuggcuaagacuuuucugu

SEQ ID NO: 496908 - RNA, 22 nt, Human
ggagcagagcucuucaucugca

SEQ ID NO: 496909 - RNA, 22 nt, Human
aaagaucagucugaagcaacau

SEQ ID NO: 496910 - RNA, 22 nt, Human
ucccagaggaaauggcagcuga

SEQ ID NO: 496911 - RNA, 22 nt, Human
ccacagaccuuggcuuccaccu

SEQ ID NO: 496912 - RNA, 22 nt, Human
cccuggaggcggagcuugcagu

SEQ ID NO: 496913 - RNA, 22 nt, Human
ugggccacgucaucucccacaa

SEQ ID NO: 496914 - RNA, 22 nt, Human
gguuccccaggcggcccuugga

SEQ ID NO: 496915 - RNA, 22 nt, Human
gcucccaggaugaggagccagg

SEQ ID NO: 496916 - RNA, 22 nt, Human
cagagacauguggccugcacgu

SEQ ID NO: 496917 - RNA, 22 nt, Human
ucaggucuauagaagaggaggg

SEQ ID NO: 496918 - RNA, 22 nt, Human
uuuguucacugagcaaugauua

SEQ ID NO: 496919 - RNA, 22 nt, Human
uuucagaauagcaaagcaagcu

SEQ ID NO: 496920 - RNA, 22 nt, Human
agaguucaguuguagccauauu

SEQ ID NO: 496921 - RNA, 22 nt, Human
uguuuacuuuccuucucacagg

SEQ ID NO: 496922 - RNA, 22 nt, Human
ucuuuuggaaaugaugugcagg

SEQ ID NO: 496923 - RNA, 22 nt, Human
uguacagauaaagacuguaaau

SEQ ID NO: 496924 - RNA, 22 nt, Human
aaucuaagccaccaguaguuuc

SEQ ID NO: 496925 - RNA, 22 nt, Human
agcauaaaggucaacguuuuag

SEQ ID NO: 496926 - RNA, 22 nt, Human
uucagagggacauucaagggaa

SEQ ID NO: 496927 - RNA, 23 nt, Human
acagggcauugcuggccucgagg

SEQ ID NO: 496928 - RNA, 22 nt, Human
uagagguagcaacaggacuaga

SEQ ID NO: 496929 - RNA, 18 nt, Human
gguggcucagucaugggg

SEQ ID NO: 496930 - RNA, 22 nt, Human
cccagcagauggcuaugugcua

SEQ ID NO: 496931 - RNA, 22 nt, Human
ucugagagguuaagcaauuuga

SEQ ID NO: 496932 - RNA, 22 nt, Human
caccagaguuguccaaaugauu

SEQ ID NO: 496933 - RNA, 23 nt, Human
cagggcugggcuugguguuaggc

SEQ ID NO: 496934 - RNA, 22 nt, Human
gcuguccucugaucucuggagg

SEQ ID NO: 496935 - RNA, 22 nt, Human
uaacagcuggcguuauaggaau

SEQ ID NO: 496936 - RNA, 22 nt, Human
ucucugaagauauuuauuauua

SEQ ID NO: 496937 - RNA, 22 nt, Human
cagcccagcagucuuagccugc

SEQ ID NO: 496938 - RNA, 19 nt, Human
ggccccucucacaggaguu

SEQ ID NO: 496939 - RNA, 22 nt, Human
uacauugugauguuucaauaca

SEQ ID NO: 496940 - RNA, 20 nt, Human
ucacagaaacaaauagagaa

SEQ ID NO: 496941 - RNA, 22 nt, Human
aacagcuuuuuuggucagcauu

SEQ ID NO: 496942 - RNA, 18 nt, Human
uguuuauuuuucucuuac

SEQ ID NO: 496943 - RNA, 22 nt, Human
cuuugugaugaggccuaagaca

SEQ ID NO: 496944 - RNA, 22 nt, Human
agguaaaauagauaguauuucu

SEQ ID NO: 496945 - RNA, 17 nt, Human
uugggagagaaagguau

SEQ ID NO: 496946 - RNA, 22 nt, Human
ucuggcucuguguccucaccca

SEQ ID NO: 496947 - RNA, 22 nt, Human
uuuguaaaaggaggaagcaugg

SEQ ID NO: 496948 - RNA, 22 nt, Human
auucaagguuggcucaggaauu

SEQ ID NO: 496949 - RNA, 22 nt, Human
aaagaugaucuacaaguucauu

SEQ ID NO: 496950 - RNA, 22 nt, Human
auuuguuccacacauauuuacu

SEQ ID NO: 496951 - RNA, 17 nt, Human
auccccagcaucuagaa

SEQ ID NO: 496952 - RNA, 22 nt, Human
gcugggagucgcgucuguggcc

SEQ ID NO: 496953 - RNA, 22 nt, Human
agguggggccaaaugcuacagu

SEQ ID NO: 496954 - RNA, 21 nt, Human
aaaugaaugugguagugcaag

SEQ ID NO: 496955 - RNA, 22 nt, Human
gggagggaagguaccuguguga

SEQ ID NO: 496956 - RNA, 22 nt, Human
gcagagugauggaaugugggug

SEQ ID NO: 496957 - RNA, 22 nt, Human
ccucacccagucaccuaggugg

SEQ ID NO: 496958 - RNA, 22 nt, Human
cagucucuugcuucauuaguug

SEQ ID NO: 496959 - RNA, 22 nt, Human
aucugccugcaguggagguggg

SEQ ID NO: 496960 - RNA, 22 nt, Human
ccaggccucaccugcccaccua

SEQ ID NO: 496961 - RNA, 22 nt, Human
agcuggagccagugugaggcuu

SEQ ID NO: 496962 - RNA, 22 nt, Human
auugaaaauauaauucuaggag

SEQ ID NO: 496963 - RNA, 22 nt, Human
aaggucugaguuuugccaggcc

SEQ ID NO: 496964 - RNA, 22 nt, Human
uccaggcaaagccuuguagacg

SEQ ID NO: 496965 - RNA, 22 nt, Human
acagaauauuguaagugccacu

SEQ ID NO: 496966 - RNA, 22 nt, Human
acagcuuuucugauagauccug

SEQ ID NO: 496967 - RNA, 22 nt, Human
uaaggcacccuucugaguagag

SEQ ID NO: 496968 - RNA, 22 nt, Human
gagcagcuggaggccuuguugg

SEQ ID NO: 496969 - RNA, 22 nt, Human
aaucagaaaauucaguggaauu

SEQ ID NO: 496970 - RNA, 22 nt, Human
gugccugccccacuccucagca

SEQ ID NO: 496971 - RNA, 22 nt, Human
gcagcuuuaaaggaggcucuga

SEQ ID NO: 496972 - RNA, 22 nt, Human
uuuaauauuucuuuccugaagc

SEQ ID NO: 496973 - RNA, 21 nt, Human
agaagggauugugguaaagau

SEQ ID NO: 496974 - RNA, 22 nt, Human
ggagaagggacagacucagcuu

SEQ ID NO: 496975 - RNA, 21 nt, Human
uggcuuuuauggagcucuggg

SEQ ID NO: 496976 - RNA, 22 nt, Human
cuggagaagcauucaaauaauu

SEQ ID NO: 496977 - RNA, 22 nt, Human
gcugccacauuuucaggacuaa

SEQ ID NO: 496978 - RNA, 22 nt, Human
ucagcucucacagaucucaacc

SEQ ID NO: 496979 - RNA, 22 nt, Human
cauugaauccuuccuucagaag

SEQ ID NO: 496980 - RNA, 22 nt, Human
ugccuggcugggcugcucaugg

SEQ ID NO: 496981 - RNA, 22 nt, Human
gucauugcaguggcaaaucaca

SEQ ID NO: 496982 - RNA, 22 nt, Human
agaggcuccaccuucucugucc

SEQ ID NO: 496983 - RNA, 22 nt, Human
ugaugguugauuauaaaucagu

SEQ ID NO: 496984 - RNA, 22 nt, Human
ugguccaguagcagggauacca

SEQ ID NO: 496985 - RNA, 22 nt, Human
ccaaauuaaaucauacagacag

SEQ ID NO: 496986 - RNA, 17 nt, Human
cagacagauauccuggg

SEQ ID NO: 496987 - RNA, 22 nt, Human
guaaacaugcuguguacucagc

SEQ ID NO: 496988 - RNA, 22 nt, Human
gccaggcaguucaaguacacca

SEQ ID NO: 496989 - RNA, 22 nt, Human
ggguaggagaggugucugugug

SEQ ID NO: 496990 - RNA, 20 nt, Human
cccuccagcaaccaggacuu

SEQ ID NO: 496991 - RNA, 22 nt, Human
ugaucaguguugguucuaucua

SEQ ID NO: 496992 - RNA, 22 nt, Human
cuguguuuugagauauuauuaa

SEQ ID NO: 496993 - RNA, 22 nt, Human
cugcucuguucccccaucaucu

SEQ ID NO: 496994 - RNA, 22 nt, Human
gcuguuggcgaggagcucagcu

SEQ ID NO: 496995 - RNA, 22 nt, Human
acuuccugcaaucguccacucc

SEQ ID NO: 496996 - RNA, 22 nt, Human
aguggcagagguugacugcagu

SEQ ID NO: 496997 - RNA, 22 nt, Human
acacaucaugccaaguuucacc

SEQ ID NO: 496998 - RNA, 22 nt, Human
uguggcugggcuaauaggcaaa

SEQ ID NO: 496999 - RNA, 22 nt, Human
agcuccugcacccagccuugag

SEQ ID NO: 497000 - RNA, 22 nt, Human
acacacagcgccuaccaugugc

SEQ ID NO: 497001 - RNA, 22 nt, Human
ccugggcucaagcgaucuuguc

SEQ ID NO: 497002 - RNA, 22 nt, Human
caucuucagguucauggucaua

SEQ ID NO: 497003 - RNA, 19 nt, Human
gugauuucuuuccacaagc

SEQ ID NO: 497004 - RNA, 19 nt, Human
uggaaacuccugauauuag

SEQ ID NO: 497005 - RNA, 22 nt, Human
gaccuccagcggcccugcagag

SEQ ID NO: 497006 - RNA, 22 nt, Human
uuacaggugggaaaacuaagcu

SEQ ID NO: 497007 - RNA, 22 nt, Human
ucauugcaagcucauuuaucug

SEQ ID NO: 497008 - RNA, 22 nt, Human
agccucugacugucagcaaggu

SEQ ID NO: 497009 - RNA, 22 nt, Human
caggccugauacacugaacucu

SEQ ID NO: 497010 - RNA, 22 nt, Human
aaaugcacagaggccagagagg

SEQ ID NO: 497011 - RNA, 22 nt, Human
ucacagcaaaagugugcagagc

SEQ ID NO: 497012 - RNA, 22 nt, Human
gcauggccuccagccaacagca

SEQ ID NO: 497013 - RNA, 22 nt, Human
cagggccucuccuccaggaacu

SEQ ID NO: 497014 - RNA, 22 nt, Human
cucaggauugugccuagggaga

SEQ ID NO: 497015 - RNA, 22 nt, Human
uuccuauuuccaugaaacacaa

SEQ ID NO: 497016 - RNA, 22 nt, Human
acuuccugcagcuucucagccc

SEQ ID NO: 497017 - RNA, 22 nt, Human
gggaaacuagaagcaggguuau

SEQ ID NO: 497018 - RNA, 20 nt, Human
gacauucauaguuauuacca

SEQ ID NO: 497019 - RNA, 22 nt, Human
cagggcugaaaucaagguguag

SEQ ID NO: 497020 - RNA, 22 nt, Human
gccucugcggggcccgagcccg

SEQ ID NO: 497021 - RNA, 22 nt, Human
cuacaggucaguaagaccuaga

SEQ ID NO: 497022 - RNA, 22 nt, Human
cccacauuuuugagucuucauc

SEQ ID NO: 497023 - RNA, 22 nt, Human
uacccaggaggaaacugaggcu

SEQ ID NO: 497024 - RNA, 22 nt, Human
ccugcagacacuuguccagcaa

SEQ ID NO: 497025 - RNA, 22 nt, Human
gcuggccauggggagugaggag

SEQ ID NO: 497026 - RNA, 22 nt, Human
agcagggaggcggugugcuggc

SEQ ID NO: 497027 - RNA, 22 nt, Human
cuggccuagcucucugcuugaa

SEQ ID NO: 497028 - RNA, 22 nt, Human
ugugugugaguccuggcuuucc

SEQ ID NO: 497029 - RNA, 22 nt, Human
gcucaggaucagccaccucuuu

SEQ ID NO: 497030 - RNA, 22 nt, Human
guuauuaaaguauuugauguua

SEQ ID NO: 497031 - RNA, 22 nt, Human
ggaggcaggaaagacagguuca

SEQ ID NO: 497032 - RNA, 22 nt, Human
ugucaugccauuuaaaauguuu

SEQ ID NO: 497033 - RNA, 22 nt, Human
guccugggccugcugaggcuga

SEQ ID NO: 497034 - RNA, 22 nt, Human
ugcugaggucaccuugcugcua

SEQ ID NO: 497035 - RNA, 22 nt, Human
cccucaccaggcuccaggcaug

SEQ ID NO: 497036 - RNA, 22 nt, Human
aaaaucugcuuccuuuuacaga

SEQ ID NO: 497037 - RNA, 22 nt, Human
ucuccugguacccuuccuagca

SEQ ID NO: 497038 - RNA, 22 nt, Human
gaaggcccugguauucuugagg

SEQ ID NO: 497039 - RNA, 22 nt, Human
aaggcucuggguuucauaggug

SEQ ID NO: 497040 - RNA, 22 nt, Human
caggaugugaggaggccauuug

SEQ ID NO: 497041 - RNA, 22 nt, Human
gaugaagucauuauccuuuugg

SEQ ID NO: 497042 - RNA, 22 nt, Human
ggccucggcccacugcugcggu

SEQ ID NO: 497043 - RNA, 22 nt, Human
gcugggagccccgagccagcgc

SEQ ID NO: 497044 - RNA, 22 nt, Human
uagccggguguugugucaugca

SEQ ID NO: 497045 - RNA, 22 nt, Human
auaauauuugcauuacugugau

SEQ ID NO: 497046 - RNA, 22 nt, Human
cugccucugguuuuggucccug

SEQ ID NO: 497047 - RNA, 22 nt, Human
uugagaagaaauaguuugcaau

SEQ ID NO: 497048 - RNA, 18 nt, Human
gggaagaggaucuggccc

SEQ ID NO: 497049 - RNA, 22 nt, Human
ucagagagcuggugggcagagg

SEQ ID NO: 497050 - RNA, 22 nt, Human
ugugccaugaggcucugauaug

SEQ ID NO: 497051 - RNA, 22 nt, Human
caggugggagccacagcguaca

SEQ ID NO: 497052 - RNA, 22 nt, Human
guugaaagaucauguggcugcc

SEQ ID NO: 497053 - RNA, 22 nt, Human
uguauacauucucuuggguuug

SEQ ID NO: 497054 - RNA, 22 nt, Human
uccaguggagugugggggugaa

SEQ ID NO: 497055 - RNA, 22 nt, Human
gccaggcagcagcgaggauggu

SEQ ID NO: 497056 - RNA, 22 nt, Human
cugggucccggcuucuauccac

SEQ ID NO: 497057 - RNA, 22 nt, Human
aagagagagugcgcucacagaa

SEQ ID NO: 497058 - RNA, 22 nt, Human
cagcagaggcacgucugugaau

SEQ ID NO: 497059 - RNA, 22 nt, Human
ucucagugaagaguauaacaaa

SEQ ID NO: 497060 - RNA, 22 nt, Human
gacugcaaccuuagacuagaaa

SEQ ID NO: 497061 - RNA, 22 nt, Human
ggacaggguaaguacuagugug

SEQ ID NO: 497062 - RNA, 23 nt, Human
aggcuuccuaucuuagagcuggg

SEQ ID NO: 497063 - RNA, 22 nt, Human
ugaguuacugccuaguaacuug

SEQ ID NO: 497064 - RNA, 22 nt, Human
uuuucuuauggugaagcacaaa

SEQ ID NO: 497065 - RNA, 22 nt, Human
ccuggggauucugacacggagu

SEQ ID NO: 497066 - RNA, 22 nt, Human
cccaggaguaagugacauuguu

SEQ ID NO: 497067 - RNA, 22 nt, Human
aagauguuagaggucaugcaga

SEQ ID NO: 497068 - RNA, 22 nt, Human
ucaguccugaugacaggcccaa

SEQ ID NO: 497069 - RNA, 20 nt, Human
acaguguuagguuuuuccuu

SEQ ID NO: 497070 - RNA, 22 nt, Human
ugcagcugugaaagggaaccaa

SEQ ID NO: 497071 - RNA, 22 nt, Human
ucugaacauccagcaaugcaca

SEQ ID NO: 497072 - RNA, 22 nt, Human
cugcccugcccaggccuugggc

SEQ ID NO: 497073 - RNA, 22 nt, Human
uccauuuuagaagaaaauccac

SEQ ID NO: 497074 - RNA, 22 nt, Human
acuuugugcccaacagaaagaa

SEQ ID NO: 497075 - RNA, 22 nt, Human
acaguguuccuuuguugugacu

SEQ ID NO: 497076 - RNA, 22 nt, Human
aaggcagguauugaugccacag

SEQ ID NO: 497077 - RNA, 22 nt, Human
uugcugaaaguggcaagaagua

SEQ ID NO: 497078 - RNA, 20 nt, Human
ucuguaggcaaguuagcagg

SEQ ID NO: 497079 - RNA, 22 nt, Human
uguccugggccggcgacugguc

SEQ ID NO: 497080 - RNA, 22 nt, Human
ggagcuggucagccuugagcau

SEQ ID NO: 497081 - RNA, 22 nt, Human
ucaaagucacaacucucuaauu

SEQ ID NO: 497082 - RNA, 22 nt, Human
cagugaaguucuacugaauggu

SEQ ID NO: 497083 - RNA, 22 nt, Human
accacugggcgggcagccugcu

SEQ ID NO: 497084 - RNA, 22 nt, Human
cugcagccacgagucacagccc

SEQ ID NO: 497085 - RNA, 22 nt, Human
gggccaggucggugaaugguca

SEQ ID NO: 497086 - RNA, 23 nt, Human
uguaaaagcauuugucagccugg

SEQ ID NO: 497087 - RNA, 22 nt, Human
aagcagccuggacuugggcugg

SEQ ID NO: 497088 - RNA, 22 nt, Human
ggcugcaggcagaggcugucug

SEQ ID NO: 497089 - RNA, 22 nt, Human
cugagagaucaagccacaggau

SEQ ID NO: 497090 - RNA, 22 nt, Human
gagccagccuucuucugagguc

SEQ ID NO: 497091 - RNA, 22 nt, Human
acauuuaaccaaacuguuuaau

SEQ ID NO: 497092 - RNA, 22 nt, Human
ugaggccaggaucccaggcucu

SEQ ID NO: 497093 - RNA, 22 nt, Human
cuuugggauuucaugagagcua

SEQ ID NO: 497094 - RNA, 21 nt, Human
ugaggcaggggugcuuuuguc

SEQ ID NO: 497095 - RNA, 18 nt, Human
gugggguguugugaggau

SEQ ID NO: 497096 - RNA, 22 nt, Human
caaagugcagaaggaacugggu

SEQ ID NO: 497097 - RNA, 22 nt, Human
uccucccugcacucagugaagu

SEQ ID NO: 497098 - RNA, 22 nt, Human
uggcucugggaaucuguugcuu

SEQ ID NO: 497099 - RNA, 22 nt, Human
uggcuucuggcuggugagaaau

SEQ ID NO: 497100 - RNA, 22 nt, Human
cgguccuggcacuugcggcucc

SEQ ID NO: 497101 - RNA, 22 nt, Human
gggaccuggcgagggucacaca

SEQ ID NO: 497102 - RNA, 22 nt, Human
ugggcucugaagucagucugcu

SEQ ID NO: 497103 - RNA, 22 nt, Human
guuccuauauagccuuaaggau

SEQ ID NO: 497104 - RNA, 22 nt, Human
ccagagcccagggucaugcagg

SEQ ID NO: 497105 - RNA, 22 nt, Human
gggcagguggagggcccagcca

SEQ ID NO: 497106 - RNA, 22 nt, Human
ucucugagggagauggccugcc

SEQ ID NO: 497107 - RNA, 22 nt, Human
gguucacacuaagcuuaagugg

SEQ ID NO: 497108 - RNA, 19 nt, Human
cucuccagcuccaguagcu

SEQ ID NO: 497109 - RNA, 22 nt, Human
cuacauuuugugauuaugaaau

SEQ ID NO: 497110 - RNA, 22 nt, Human
uaugcauauagaugcacacaca

SEQ ID NO: 497111 - RNA, 22 nt, Human
uagcaggguccaaugugaggca

SEQ ID NO: 497112 - RNA, 22 nt, Human
caaaaguucucacccagacaug

SEQ ID NO: 497113 - RNA, 22 nt, Human
uggucccuagcacagcuguccu

SEQ ID NO: 497114 - RNA, 22 nt, Human
ggcaggacugaucagugggaug

SEQ ID NO: 497115 - RNA, 22 nt, Human
uaaaugcuuucuaugaaagagg

SEQ ID NO: 497116 - RNA, 22 nt, Human
acagcauucaauaaauaauaac

SEQ ID NO: 497117 - RNA, 22 nt, Human
aaagccuugggauuugugauca

SEQ ID NO: 497118 - RNA, 21 nt, Human
agaaaaaccagcauguuuuca

SEQ ID NO: 497119 - RNA, 22 nt, Human
ggccuugggcuggcugcaguau

SEQ ID NO: 497120 - RNA, 22 nt, Human
augucaccuucgguggcacggu

SEQ ID NO: 497121 - RNA, 22 nt, Human
ugcugaauaaagauauauuuuc

SEQ ID NO: 497122 - RNA, 22 nt, Human
ugcuucugggcaaaugugugug

SEQ ID NO: 497123 - RNA, 20 nt, Human
ucugggcuucccccagcucc

SEQ ID NO: 497124 - RNA, 22 nt, Human
gucaggaugggcagccaaacua

SEQ ID NO: 497125 - RNA, 23 nt, Human
acagacauuccauaauguacacc

SEQ ID NO: 497126 - RNA, 22 nt, Human
augugacaauauuuggucuuau

SEQ ID NO: 497127 - RNA, 22 nt, Human
cuggugggaagauggaaaacau

SEQ ID NO: 497128 - RNA, 23 nt, Human
gggagaugggaaaugaaggcucu

SEQ ID NO: 497129 - RNA, 22 nt, Human
gaggcagagucacaaagagucu

SEQ ID NO: 497130 - RNA, 22 nt, Human
auggcugcagccggcccugcgc

SEQ ID NO: 497131 - RNA, 22 nt, Human
acacauuauaggcaaucaaaag

SEQ ID NO: 497132 - RNA, 22 nt, Human
gggagacacgcugcaggcauaa

SEQ ID NO: 497133 - RNA, 22 nt, Human
cccucacuucacgcucugcaga

SEQ ID NO: 497134 - RNA, 22 nt, Human
aauacagauauucagugguacu

SEQ ID NO: 497135 - RNA, 22 nt, Human
gggugggguguaucggauccua

SEQ ID NO: 497136 - RNA, 22 nt, Human
uaacaguaaaguaaguuagcuu

SEQ ID NO: 497137 - RNA, 22 nt, Human
uauaacaguuuaggugguguca

SEQ ID NO: 497138 - RNA, 22 nt, Human
aggcagcuuuaacugguaguag

SEQ ID NO: 497139 - RNA, 22 nt, Human
uuccaggacuggguguuugaag

SEQ ID NO: 497140 - RNA, 22 nt, Human
agaaaacauaggagacaggaaa

SEQ ID NO: 497141 - RNA, 22 nt, Human
ggcuuuauuuugcaugaaugcu

SEQ ID NO: 497142 - RNA, 22 nt, Human
uuauuaaaaugcggauuuggcu

SEQ ID NO: 497143 - RNA, 22 nt, Human
agugggaggcggcugacgggcg

SEQ ID NO: 497144 - RNA, 21 nt, Human
agcuggccugguuugagcucc

SEQ ID NO: 497145 - RNA, 22 nt, Human
ucagaggaaaggucagauggcu

SEQ ID NO: 497146 - RNA, 22 nt, Human
gcagaggcuccauuuuacagau

SEQ ID NO: 497147 - RNA, 22 nt, Human
ccagcagcucccucaggguccg

SEQ ID NO: 497148 - RNA, 22 nt, Human
cugggucuaaaaauucucagau

SEQ ID NO: 497149 - RNA, 22 nt, Human
gcaggucuagaagcugccucug

SEQ ID NO: 497150 - RNA, 22 nt, Human
aaauggcuuugaggguaggaca

SEQ ID NO: 497151 - RNA, 22 nt, Human
gaacagaauuaccgaagaucug

SEQ ID NO: 497152 - RNA, 22 nt, Human
cuggggcucacuccagcccugg

SEQ ID NO: 497153 - RNA, 22 nt, Human
gggaucugcuccagagggaaaa

SEQ ID NO: 497154 - RNA, 22 nt, Human
gagaggcccugaagcccacaga

SEQ ID NO: 497155 - RNA, 22 nt, Human
ugcauccuccuuuguccucuug

SEQ ID NO: 497156 - RNA, 22 nt, Human
uccugggcuuaagugauccucc

SEQ ID NO: 497157 - RNA, 22 nt, Human
guaaaauucuagcaucugaaag

SEQ ID NO: 497158 - RNA, 22 nt, Human
caggugggccgggguuuguucu

SEQ ID NO: 497159 - RNA, 22 nt, Human
ucuccagggacugaggcuggag

SEQ ID NO: 497160 - RNA, 22 nt, Human
ucagggacugcagagggaagcu

SEQ ID NO: 497161 - RNA, 22 nt, Human
gccuggcccagggcuccgcagg

SEQ ID NO: 497162 - RNA, 22 nt, Human
cguggccuuugagugagcuccc

SEQ ID NO: 497163 - RNA, 22 nt, Human
uugcagcagggugaauucacuc

SEQ ID NO: 497164 - RNA, 22 nt, Human
cagggcucaggaaaucagacgu

SEQ ID NO: 497165 - RNA, 22 nt, Human
ggaaggggccuugagcaaacug

SEQ ID NO: 497166 - RNA, 20 nt, Human
ucagccagcuaacaugggga

SEQ ID NO: 497167 - RNA, 22 nt, Human
gagcuuggggcauauggugcua

SEQ ID NO: 497168 - RNA, 20 nt, Human
gcuccccuucucugggccuc

SEQ ID NO: 497169 - RNA, 22 nt, Human
aagaaauuaaggaaugcaacga

SEQ ID NO: 497170 - RNA, 22 nt, Human
gccugcagauauauaggauggu

SEQ ID NO: 497171 - RNA, 22 nt, Human
gcagaacaacguaggaguggag

SEQ ID NO: 497172 - RNA, 22 nt, Human
ucuagaaacaugacauugaucu

SEQ ID NO: 497173 - RNA, 22 nt, Human
ucacagagagguuaagcaguug

SEQ ID NO: 497174 - RNA, 22 nt, Human
uuuaguaaguucacugcaaagc

SEQ ID NO: 497175 - RNA, 22 nt, Human
aaagacacacagugcuucaguu

SEQ ID NO: 497176 - RNA, 19 nt, Human
ccuuggaguuccaggugga

SEQ ID NO: 497177 - RNA, 22 nt, Human
cugcagggaacugaggcccaga

SEQ ID NO: 497178 - RNA, 22 nt, Human
guuccuugggaacaacgcugaa

SEQ ID NO: 497179 - RNA, 22 nt, Human
gggcugacucugcacugagcca

SEQ ID NO: 497180 - RNA, 22 nt, Human
gacaagacuauguagaaaguau

SEQ ID NO: 497181 - RNA, 22 nt, Human
uugcucugacuggagugcagug

SEQ ID NO: 497182 - RNA, 22 nt, Human
ccugccuggaucagccauccug

SEQ ID NO: 497183 - RNA, 22 nt, Human
uuguaacaaucugucauaaaug

SEQ ID NO: 497184 - RNA, 22 nt, Human
aagggccauaacuugcaguguu

SEQ ID NO: 497185 - RNA, 22 nt, Human
uaggcugagcuuguagaucgua

SEQ ID NO: 497186 - RNA, 17 nt, Human
agauggcaggaggcaga

SEQ ID NO: 497187 - RNA, 22 nt, Human
uacuacauuaauaaaacauuca

SEQ ID NO: 497188 - RNA, 22 nt, Human
aaggaggaauuucagggugaau

SEQ ID NO: 497189 - RNA, 22 nt, Human
agacagcaugagccugcugaug

SEQ ID NO: 497190 - RNA, 18 nt, Human
ggcaggagcaagaauagg

SEQ ID NO: 497191 - RNA, 22 nt, Human
ccuaggccuuacuuuccugugc

SEQ ID NO: 497192 - RNA, 22 nt, Human
ucuguggcauguugcacuugua

SEQ ID NO: 497193 - RNA, 21 nt, Human
cacugaggucagggguagggu

SEQ ID NO: 497194 - RNA, 22 nt, Human
uaugaagacaaugauagcauga

SEQ ID NO: 497195 - RNA, 22 nt, Human
gcccagcugagaagcgcggggc

SEQ ID NO: 497196 - RNA, 22 nt, Human
agagugagggggcacugagacg

SEQ ID NO: 497197 - RNA, 22 nt, Human
acagaauugauggaaaucucag

SEQ ID NO: 497198 - RNA, 22 nt, Human
uggccagguugggcuuugcagc

SEQ ID NO: 497199 - RNA, 22 nt, Human
aggaggugacagccugcaucug

SEQ ID NO: 497200 - RNA, 22 nt, Human
uggcucaggaucuaagcagaau

SEQ ID NO: 497201 - RNA, 22 nt, Human
auguaucaauuaucugucugca

SEQ ID NO: 497202 - RNA, 22 nt, Human
caguuuauagcucuagcagcuu

SEQ ID NO: 497203 - RNA, 22 nt, Human
uauacagaaccgccugaagucu

SEQ ID NO: 497204 - RNA, 22 nt, Human
aucaggauguuuggcugucaua

SEQ ID NO: 497205 - RNA, 22 nt, Human
auauuguacuaggguuacaugu

SEQ ID NO: 497206 - RNA, 22 nt, Human
aguucuggugguuuggagaucu

SEQ ID NO: 497207 - RNA, 22 nt, Human
ccucuguccuggggaguggagc

SEQ ID NO: 497208 - RNA, 22 nt, Human
ccagcuuuccugcgaguugauu

SEQ ID NO: 497209 - RNA, 22 nt, Human
acucagcuuccuacagcuagaa

SEQ ID NO: 497210 - RNA, 22 nt, Human
aauguuacgaucaacaacacau

SEQ ID NO: 497211 - RNA, 22 nt, Human
cccagccuacucugccauagca

SEQ ID NO: 497212 - RNA, 23 nt, Human
ccucccaccuauuucacuuucuu

SEQ ID NO: 497213 - RNA, 22 nt, Human
aaugccaguguguugauuccag

SEQ ID NO: 497214 - RNA, 22 nt, Human
ggcugagcucaggggcagcagg

SEQ ID NO: 497215 - RNA, 22 nt, Human
cuggcagcgguuugcagccugg

SEQ ID NO: 497216 - RNA, 22 nt, Human
gcagggccagugcagagaggaa

SEQ ID NO: 497217 - RNA, 22 nt, Human
cacugucuuuugugaagacaau

SEQ ID NO: 497218 - RNA, 22 nt, Human
uccuccuucgggacugcuugac

SEQ ID NO: 497219 - RNA, 22 nt, Human
uucugggggaauacagcuauga

SEQ ID NO: 497220 - RNA, 22 nt, Human
gcuccugucuuggggcacuggc

SEQ ID NO: 497221 - RNA, 22 nt, Human
agcuccuggcaaggucauggug

SEQ ID NO: 497222 - RNA, 22 nt, Human
ugcugaauuuacauuuuuguag

SEQ ID NO: 497223 - RNA, 22 nt, Human
agguggguccuggcucugccau

SEQ ID NO: 497224 - RNA, 22 nt, Human
uugaggagaagacuuugcuucc

SEQ ID NO: 497225 - RNA, 19 nt, Human
ccagcagguucauuucagg

SEQ ID NO: 497226 - RNA, 22 nt, Human
ucucaucuucauaucugaaaga

SEQ ID NO: 497227 - RNA, 22 nt, Human
cuggccuggucuggccucucca

SEQ ID NO: 497228 - RNA, 22 nt, Human
ucacaccuguaaucccaggccu

SEQ ID NO: 497229 - RNA, 22 nt, Human
cucugagcagaggccguggcua

SEQ ID NO: 497230 - RNA, 19 nt, Human
uuucaauggcuuagagaaa

SEQ ID NO: 497231 - RNA, 22 nt, Human
ugccuucauccauguuauagug

SEQ ID NO: 497232 - RNA, 22 nt, Human
ugaaccacaugcaaagugaaua

SEQ ID NO: 497233 - RNA, 22 nt, Human
gggucucucucggcuccacgcg

SEQ ID NO: 497234 - RNA, 19 nt, Human
auuccucaaggacagaaau

SEQ ID NO: 497235 - RNA, 22 nt, Human
ccagggcagggaccacgugucu

SEQ ID NO: 497236 - RNA, 22 nt, Human
ggugaagggccuuaggagacag

SEQ ID NO: 497237 - RNA, 22 nt, Human
uccuggcugccgucguccugcg

SEQ ID NO: 497238 - RNA, 22 nt, Human
acaguguuuaagagauggcauu

SEQ ID NO: 497239 - RNA, 22 nt, Human
uucagugugaagcuucugaaag

SEQ ID NO: 497240 - RNA, 22 nt, Human
agcugucugucuccugaggaga

SEQ ID NO: 497241 - RNA, 22 nt, Human
ucugaaaguaucuggaucuuuu

SEQ ID NO: 497242 - RNA, 22 nt, Human
agagcugggacuuggacucaau

SEQ ID NO: 497243 - RNA, 22 nt, Human
caaggcugucuccagcuuccaa

SEQ ID NO: 497244 - RNA, 22 nt, Human
ucugcuggccuuagcaggucua

SEQ ID NO: 497245 - RNA, 22 nt, Human
gggaguccaaauugguacaaua

SEQ ID NO: 497246 - RNA, 22 nt, Human
uauaauuaguaaauggcagauu

SEQ ID NO: 497247 - RNA, 22 nt, Human
agaagcaguuauuuuuugcaca

SEQ ID NO: 497248 - RNA, 22 nt, Human
acagcacuggucccgcaagccu

SEQ ID NO: 497249 - RNA, 22 nt, Human
cacaggccugucucuuucuaac

SEQ ID NO: 497250 - RNA, 22 nt, Human
gcacacagcuagauuaccauuc

SEQ ID NO: 497251 - RNA, 22 nt, Human
auuugaauggcuuaacacaacg

SEQ ID NO: 497252 - RNA, 22 nt, Human
ggaggguuagcaaaggcacaga

SEQ ID NO: 497253 - RNA, 22 nt, Human
aaacuagagcaugugaguggga

SEQ ID NO: 497254 - RNA, 22 nt, Human
uuucugcaacgagucuuugacu

SEQ ID NO: 497255 - RNA, 22 nt, Human
guccuggugccaccugcgggau

SEQ ID NO: 497256 - RNA, 22 nt, Human
caaugugguggcagaugucagu

SEQ ID NO: 497257 - RNA, 22 nt, Human
cucucugguacauagaguuugg

SEQ ID NO: 497258 - RNA, 22 nt, Human
uuaguugauagccaaaauuuau

SEQ ID NO: 497259 - RNA, 22 nt, Human
gaucauuuacuuguucuggacu

SEQ ID NO: 497260 - RNA, 22 nt, Human
uuaaaaugcagauucugauuca

SEQ ID NO: 497261 - RNA, 22 nt, Human
ggaagggaaaauucauucggcu

SEQ ID NO: 497262 - RNA, 22 nt, Human
gccagagcagaauagaguggcc

SEQ ID NO: 497263 - RNA, 22 nt, Human
cagcaggcagccauuucacugu

SEQ ID NO: 497264 - RNA, 22 nt, Human
guccucugaaagaugaaccaug

SEQ ID NO: 497265 - RNA, 21 nt, Human
aggaaguggccagauugggaa

SEQ ID NO: 497266 - RNA, 22 nt, Human
cuugcugggguaagucugugcu

SEQ ID NO: 497267 - RNA, 22 nt, Human
uaggccaguggcagguugugug

SEQ ID NO: 497268 - RNA, 22 nt, Human
gcacagaauaacacucugggcu

SEQ ID NO: 497269 - RNA, 23 nt, Human
uccaagggcuacaaacacagacc

SEQ ID NO: 497270 - RNA, 22 nt, Human
cccuuagcucaauuucuugccc

SEQ ID NO: 497271 - RNA, 22 nt, Human
aggcuuuguaccuggggucuua

SEQ ID NO: 497272 - RNA, 22 nt, Human
caaggccuucgucuccuagcuu

SEQ ID NO: 497273 - RNA, 20 nt, Human
ugaaggccagcagcauaggg

SEQ ID NO: 497274 - RNA, 22 nt, Human
ggcagcucugaugaugcucugg

SEQ ID NO: 497275 - RNA, 22 nt, Human
uuagcauuucuggaaucacaag

SEQ ID NO: 497276 - RNA, 22 nt, Human
uuccugggagcuagccacaucu

SEQ ID NO: 497277 - RNA, 22 nt, Human
ccaggagcuggagggugcagug

SEQ ID NO: 497278 - RNA, 22 nt, Human
ccucagagccuccagaaggaau

SEQ ID NO: 497279 - RNA, 22 nt, Human
uacaaugagcuguacaucucca

SEQ ID NO: 497280 - RNA, 22 nt, Human
aaaaugauauccugacuuuuau

SEQ ID NO: 497281 - RNA, 20 nt, Human
uccugguggauacugcuuaa

SEQ ID NO: 497282 - RNA, 22 nt, Human
aaaggccaagcaugagguggac

SEQ ID NO: 497283 - RNA, 22 nt, Human
gugacagaguuuuagaucucau

SEQ ID NO: 497284 - RNA, 20 nt, Human
uucuuucaucuacacguugu

SEQ ID NO: 497285 - RNA, 21 nt, Human
ugcagcugacacugguaugcc

SEQ ID NO: 497286 - RNA, 22 nt, Human
ugggcagagucauacaggagac

SEQ ID NO: 497287 - RNA, 22 nt, Human
uauucacaguugauuuacaguu

SEQ ID NO: 497288 - RNA, 22 nt, Human
ucugccuugagguccucagcuc

SEQ ID NO: 497289 - RNA, 22 nt, Human
agcuuugggcagaagaggauuc

SEQ ID NO: 497290 - RNA, 22 nt, Human
agcucccaauugacuugaacua

SEQ ID NO: 497291 - RNA, 22 nt, Human
ccucagaguaggucucagcugu

SEQ ID NO: 497292 - RNA, 22 nt, Human
ucacuggggcccacaucaacau

SEQ ID NO: 497293 - RNA, 22 nt, Human
ucagggcaggcgagcagcugcu

SEQ ID NO: 497294 - RNA, 23 nt, Human
ucuguguagccaggucuggaggg

SEQ ID NO: 497295 - RNA, 22 nt, Human
caaauguguaaggaaguguuag

SEQ ID NO: 497296 - RNA, 22 nt, Human
gaggggcagaaugugaucaggg

SEQ ID NO: 497297 - RNA, 22 nt, Human
ggcuucaccgcgggguugcagg

SEQ ID NO: 497298 - RNA, 22 nt, Human
ggcuguccuuggccaaggcacu

SEQ ID NO: 497299 - RNA, 22 nt, Human
cugguuuagcuguaagguuccc

SEQ ID NO: 497300 - RNA, 22 nt, Human
cauuugugugggaacccaucag

SEQ ID NO: 497301 - RNA, 22 nt, Human
aucauucagccuaagcaaguac

SEQ ID NO: 497302 - RNA, 22 nt, Human
uccaguggguugcugagggagg

SEQ ID NO: 497303 - RNA, 22 nt, Human
aaugucuauuugcuacaaagcc

SEQ ID NO: 497304 - RNA, 22 nt, Human
ucuguggccugccuccucauuu

SEQ ID NO: 497305 - RNA, 22 nt, Human
aauauguugagucuaucuuuau

SEQ ID NO: 497306 - RNA, 22 nt, Human
aagaaagagaucacuccuccau

SEQ ID NO: 497307 - RNA, 22 nt, Human
gaaaugcaaauucucucucgcu

SEQ ID NO: 497308 - RNA, 22 nt, Human
ugggaaggcagucacuguccua

SEQ ID NO: 497309 - RNA, 22 nt, Human
cagcaggaagguuuccccugca

SEQ ID NO: 497310 - RNA, 19 nt, Human
ccagcagcuuugauucucu

SEQ ID NO: 497311 - RNA, 22 nt, Human
ucuggccaggauggcaagacca

SEQ ID NO: 497312 - RNA, 22 nt, Human
cuggcuccuccaaggccuggag

SEQ ID NO: 497313 - RNA, 22 nt, Human
uccagggcuggguuggcucagc

SEQ ID NO: 497314 - RNA, 22 nt, Human
uuccucugaaauggcuuggaaa

SEQ ID NO: 497315 - RNA, 22 nt, Human
uuauguaccugaauuaguaaag

SEQ ID NO: 497316 - RNA, 17 nt, Human
cucacggaggaugaauc

SEQ ID NO: 497317 - RNA, 22 nt, Human
uguguuuauaguguaucuucca

SEQ ID NO: 497318 - RNA, 22 nt, Human
agguaaagacugcaaggagaau

SEQ ID NO: 497319 - RNA, 19 nt, Human
ucugaagaauuagagagca

SEQ ID NO: 497320 - RNA, 21 nt, Human
acuguucauuugaugaacugg

SEQ ID NO: 497321 - RNA, 22 nt, Human
aagaaauggcuucaucugagua

SEQ ID NO: 497322 - RNA, 22 nt, Human
gcugucagcgcccaaggagcuc

SEQ ID NO: 497323 - RNA, 22 nt, Human
agggccagcacuccuggcagga

SEQ ID NO: 497324 - RNA, 22 nt, Human
aguccuggccccaaggaaggau

SEQ ID NO: 497325 - RNA, 22 nt, Human
ucaguuuuucuauacuuuguag

SEQ ID NO: 497326 - RNA, 22 nt, Human
uaaaucccuacaucuguguuuu

SEQ ID NO: 497327 - RNA, 22 nt, Human
ggccucugaggacagccuuggc

SEQ ID NO: 497328 - RNA, 22 nt, Human
gcugccaguguggcaugaugca

SEQ ID NO: 497329 - RNA, 22 nt, Human
uguacaaugccgagacuaacuc

SEQ ID NO: 497330 - RNA, 22 nt, Human
auauggaacuauucuguguaga

SEQ ID NO: 497331 - RNA, 22 nt, Human
cacugcuuauaaauucuaggca

SEQ ID NO: 497332 - RNA, 22 nt, Human
ggucucagcccucgccagcagc

SEQ ID NO: 497333 - RNA, 22 nt, Human
aggcucugccaauuccuuccuc

SEQ ID NO: 497334 - RNA, 22 nt, Human
uguguuuugaacucaucuacug

SEQ ID NO: 497335 - RNA, 22 nt, Human
ucucuuaauuuuggaauagugu

SEQ ID NO: 497336 - RNA, 22 nt, Human
aguuauuucaguaacauaauag

SEQ ID NO: 497337 - RNA, 22 nt, Human
uagcaauguguguguauaaauu

SEQ ID NO: 497338 - RNA, 21 nt, Human
agguuccagcagccagagaau

SEQ ID NO: 497339 - RNA, 22 nt, Human
ucccagagugugggcaucaagg

SEQ ID NO: 497340 - RNA, 22 nt, Human
ccugcccuucuuuccccagcau

SEQ ID NO: 497341 - RNA, 20 nt, Human
aucaaaauccuauugagguu

SEQ ID NO: 497342 - RNA, 22 nt, Human
gaggccugaggcugccuggagc

SEQ ID NO: 497343 - RNA, 22 nt, Human
ucugggcccacucaacuucacu

SEQ ID NO: 497344 - RNA, 22 nt, Human
cagaggcaaaagagguggaggu

SEQ ID NO: 497345 - RNA, 22 nt, Human
ugcuuuauuuuaaauaugccau

SEQ ID NO: 497346 - RNA, 22 nt, Human
ugggcacuggaagccugcugug

SEQ ID NO: 497347 - RNA, 22 nt, Human
uuucuguaaguggcaaauaaug

SEQ ID NO: 497348 - RNA, 22 nt, Human
aggucuagauuuauagacagca

SEQ ID NO: 497349 - RNA, 22 nt, Human
acagauuuguucuuuugggcua

SEQ ID NO: 497350 - RNA, 22 nt, Human
aagccaagaguuaacuauuugu

SEQ ID NO: 497351 - RNA, 22 nt, Human
gaaucauuggaaccacauccaa

SEQ ID NO: 497352 - RNA, 22 nt, Human
aagugauuucugccugcauguu

SEQ ID NO: 497353 - RNA, 22 nt, Human
caguuucuguggucucuuuuca

SEQ ID NO: 497354 - RNA, 22 nt, Human
ccugacucuggccaggccagcu

SEQ ID NO: 497355 - RNA, 18 nt, Human
aguccuggagaucaccaa

SEQ ID NO: 497356 - RNA, 22 nt, Human
auuuuuccugcuggaucugcuc

SEQ ID NO: 497357 - RNA, 22 nt, Human
ugugaaagcaagucuaguucuc

SEQ ID NO: 497358 - RNA, 22 nt, Human
gggcagagaaauggacaguugg

SEQ ID NO: 497359 - RNA, 22 nt, Human
cacauggggcgcugcauuggcc

SEQ ID NO: 497360 - RNA, 22 nt, Human
aagagaugcuuuacaucggaug

SEQ ID NO: 497361 - RNA, 22 nt, Human
cagggugacaaguggcaaggag

SEQ ID NO: 497362 - RNA, 22 nt, Human
cuuauuagugucugucugaguu

SEQ ID NO: 497363 - RNA, 22 nt, Human
guggcuuggaccagucacagug

SEQ ID NO: 497364 - RNA, 22 nt, Human
gcacagagggcagugagccucu

SEQ ID NO: 497365 - RNA, 22 nt, Human
gcagagugggagcccagggcug

SEQ ID NO: 497366 - RNA, 22 nt, Human
aaaugucuaucuggcauauucc

SEQ ID NO: 497367 - RNA, 22 nt, Human
gcagcagaugcuuucauggaca

SEQ ID NO: 497368 - RNA, 22 nt, Human
cacaaaggagaaugucagcaua

SEQ ID NO: 497369 - RNA, 22 nt, Human
cuggcucccucucccugaguca

SEQ ID NO: 497370 - RNA, 22 nt, Human
uugcauuuugguuguaaauaug

SEQ ID NO: 497371 - RNA, 22 nt, Human
gccagcugguaggcaccuagcc

SEQ ID NO: 497372 - RNA, 22 nt, Human
cucagaaguucagccuagagua

SEQ ID NO: 497373 - RNA, 22 nt, Human
aacagcaugcuggguaacauug

SEQ ID NO: 497374 - RNA, 22 nt, Human
uucuccuugaaaagcugcaucu

SEQ ID NO: 497375 - RNA, 22 nt, Human
agcuccuguucugagagcagga

SEQ ID NO: 497376 - RNA, 22 nt, Human
gcagcagcucaguucugggagg

SEQ ID NO: 497377 - RNA, 22 nt, Human
uguggaaaagaauaagggagau

SEQ ID NO: 497378 - RNA, 19 nt, Human
aauuagggagucgguuaag

SEQ ID NO: 497379 - RNA, 22 nt, Human
aaagacaguggauucaaaaucc

SEQ ID NO: 497380 - RNA, 21 nt, Human
ucucugguuggaguugugcca

SEQ ID NO: 497381 - RNA, 22 nt, Human
gugucauguagaaauugaugaa

SEQ ID NO: 497382 - RNA, 22 nt, Human
ucuguucaucaucuggacacau

SEQ ID NO: 497383 - RNA, 22 nt, Human
uggcagagcccagaacugagca

SEQ ID NO: 497384 - RNA, 22 nt, Human
agacaaguucugugggucaccu

SEQ ID NO: 497385 - RNA, 22 nt, Human
guuuccuguggccacagaauaa

SEQ ID NO: 497386 - RNA, 22 nt, Human
ucauccaggaaaagauuuggaa

SEQ ID NO: 497387 - RNA, 22 nt, Human
cagucagucaauacucuuugag

SEQ ID NO: 497388 - RNA, 22 nt, Human
uuccugugugaccgagacagug

SEQ ID NO: 497389 - RNA, 22 nt, Human
ucuguucuauuggucuaugugu

SEQ ID NO: 497390 - RNA, 22 nt, Human
accuggcacuacaggcaccugu

SEQ ID NO: 497391 - RNA, 22 nt, Human
uccagucaagcuugagaauuuc

SEQ ID NO: 497392 - RNA, 18 nt, Human
uggaucuuuaugaggcug

SEQ ID NO: 497393 - RNA, 22 nt, Human
guugacagaaaaauaacauagc

SEQ ID NO: 497394 - RNA, 22 nt, Human
ccugagcugaacuaagcaguuu

SEQ ID NO: 497395 - RNA, 22 nt, Human
ugcuggccggccaggugcugag

SEQ ID NO: 497396 - RNA, 22 nt, Human
ggcugcggaucuaaggcuggga

SEQ ID NO: 497397 - RNA, 22 nt, Human
augaggagucaaggagucggag

SEQ ID NO: 497398 - RNA, 22 nt, Human
aggcccagcugggccaggaaca

SEQ ID NO: 497399 - RNA, 22 nt, Human
ucugucugacaggguaugaacu

SEQ ID NO: 497400 - RNA, 22 nt, Human
uccuggcuuagguuuccagaac

SEQ ID NO: 497401 - RNA, 22 nt, Human
uaaaugagauuuguucuuuugu

SEQ ID NO: 497402 - RNA, 22 nt, Human
gccucugccaagggggcugcgg

SEQ ID NO: 497403 - RNA, 22 nt, Human
agcaggcaggcccagcggcugg

SEQ ID NO: 497404 - RNA, 22 nt, Human
ggagaagaggagcuggaagccu

SEQ ID NO: 497405 - RNA, 22 nt, Human
uuauuagguuuacauaaagguu

SEQ ID NO: 497406 - RNA, 22 nt, Human
cauuuacacuucuaaccacaag

SEQ ID NO: 497407 - RNA, 22 nt, Human
gcagcccaauggacugagacag

SEQ ID NO: 497408 - RNA, 22 nt, Human
caaagguauaaguuaauauaca

SEQ ID NO: 497409 - RNA, 17 nt, Human
agugaaauuuacauugc

SEQ ID NO: 497410 - RNA, 22 nt, Human
uaugaguacaaggacucugucu

SEQ ID NO: 497411 - RNA, 19 nt, Human
ggcugcugguuacagaggc

SEQ ID NO: 497412 - RNA, 22 nt, Human
acauuuuuauucaucaaagcag

SEQ ID NO: 497413 - RNA, 22 nt, Human
gaaagcaaguugacugcagaau

SEQ ID NO: 497414 - RNA, 19 nt, Human
aggaauggaauuaauucug

SEQ ID NO: 497415 - RNA, 22 nt, Human
gucaggauguuuauucuccagu

SEQ ID NO: 497416 - RNA, 19 nt, Human
uuucaggagcuaugcaggg

SEQ ID NO: 497417 - RNA, 22 nt, Human
aauuaguauugcgauucauuag

SEQ ID NO: 497418 - RNA, 22 nt, Human
agcugcuguccuaggcacugua

SEQ ID NO: 497419 - RNA, 22 nt, Human
aaaugcauuuuuaauuagaccc

SEQ ID NO: 497420 - RNA, 22 nt, Human
ggucccaggaagugcggcggcg

SEQ ID NO: 497421 - RNA, 19 nt, Human
gcuggccacgccccaguug

SEQ ID NO: 497422 - RNA, 22 nt, Human
uguuucuguaugaucaauauug

SEQ ID NO: 497423 - RNA, 22 nt, Human
ucagaacaguucuuaauauugc

SEQ ID NO: 497424 - RNA, 22 nt, Human
agggcgggcucaucacaugcuc

SEQ ID NO: 497425 - RNA, 18 nt, Human
ggcagggaaaagauaggg

SEQ ID NO: 497426 - RNA, 22 nt, Human
aggcaguuguugcugagcagcu

SEQ ID NO: 497427 - RNA, 22 nt, Human
agguuuaugccuuggagcuggg

SEQ ID NO: 497428 - RNA, 22 nt, Human
uagacacaucuucauccacaau

SEQ ID NO: 497429 - RNA, 22 nt, Human
aauuuagaauucgcuagcuaau

SEQ ID NO: 497430 - RNA, 22 nt, Human
ucuuacaagaaauaagccaaug

SEQ ID NO: 497431 - RNA, 22 nt, Human
gaggaaccacucugagaagcca

SEQ ID NO: 497432 - RNA, 22 nt, Human
agagaagggccuguauguaauc

SEQ ID NO: 497433 - RNA, 22 nt, Human
ggaaacuuguuauuguauuuuc

SEQ ID NO: 497434 - RNA, 22 nt, Human
cagcccaaagccccaggcuaga

SEQ ID NO: 497435 - RNA, 22 nt, Human
ugccuggcacagagcagguggc

SEQ ID NO: 497436 - RNA, 22 nt, Human
uaggagcuaaaauauuuuauau

SEQ ID NO: 497437 - RNA, 22 nt, Human
acucaggaaaugagaggcucuc

SEQ ID NO: 497438 - RNA, 22 nt, Human
uuauacaguuuauacuuagaau

SEQ ID NO: 497439 - RNA, 22 nt, Human
cuaggaaucaccaagauucuag

SEQ ID NO: 497440 - RNA, 22 nt, Human
uccaguucuaggucacucucug

SEQ ID NO: 497441 - RNA, 22 nt, Human
agcagcucacaggauuccugaa

SEQ ID NO: 497442 - RNA, 22 nt, Human
agccuucagcaguucaggugcc

SEQ ID NO: 497443 - RNA, 22 nt, Human
agggagagguugaaaccucagu

SEQ ID NO: 497444 - RNA, 22 nt, Human
agguuucuuuaugcugcuagaa

SEQ ID NO: 497445 - RNA, 22 nt, Human
ucugcuguaaagaauuucugcc

SEQ ID NO: 497446 - RNA, 22 nt, Human
gggaugaauugagucagaaggg

SEQ ID NO: 497447 - RNA, 22 nt, Human
auuaauuuuucugacagccaca

SEQ ID NO: 497448 - RNA, 19 nt, Human
ucagugugugggagguggu

SEQ ID NO: 497449 - RNA, 22 nt, Human
uaucauuuuacugugacauuuu

SEQ ID NO: 497450 - RNA, 21 nt, Human
gggagcuggaaacugggugac

SEQ ID NO: 497451 - RNA, 22 nt, Human
uccugggacuuucaaggcuagg

SEQ ID NO: 497452 - RNA, 22 nt, Human
caaagcaggaagaauauugaaa

SEQ ID NO: 497453 - RNA, 22 nt, Human
auaugcauuuaccuggcauaua

SEQ ID NO: 497454 - RNA, 21 nt, Human
agagagaaggccauauggucc

SEQ ID NO: 497455 - RNA, 23 nt, Human
aaaguguagccagguuaagaacc

SEQ ID NO: 497456 - RNA, 20 nt, Human
aguaccuuuuguauguuacc

SEQ ID NO: 497457 - RNA, 22 nt, Human
uaacagaaaggcucaggugcuc

SEQ ID NO: 497458 - RNA, 22 nt, Human
cccagaggugaaggagguggga

SEQ ID NO: 497459 - RNA, 22 nt, Human
uggcucaguuuagcagcucagu

SEQ ID NO: 497460 - RNA, 22 nt, Human
aaaggccaccaacaugaagcau

SEQ ID NO: 497461 - RNA, 22 nt, Human
gugugcaggccacaggccaggg

SEQ ID NO: 497462 - RNA, 22 nt, Human
agggaggaguccucaaagucau

SEQ ID NO: 497463 - RNA, 22 nt, Human
auucaagguauuuaaaacauaa

SEQ ID NO: 497464 - RNA, 22 nt, Human
ucucugggguagggcccaggac

SEQ ID NO: 497465 - RNA, 22 nt, Human
cagcccugggaguuggggccga

SEQ ID NO: 497466 - RNA, 22 nt, Human
ugggggucaggaugaggccuug

SEQ ID NO: 497467 - RNA, 22 nt, Human
caguggugaagagcaggggcuc

SEQ ID NO: 497468 - RNA, 21 nt, Human
uccuggccagggcacuaggca

SEQ ID NO: 497469 - RNA, 22 nt, Human
cagcuuuaguaacccacugcuc

SEQ ID NO: 497470 - RNA, 22 nt, Human
gcagggagguuugcugaccugg

SEQ ID NO: 497471 - RNA, 22 nt, Human
agcagcugaucaaagcacuuau

SEQ ID NO: 497472 - RNA, 22 nt, Human
guuuuuccugcugacuuggguc

SEQ ID NO: 497473 - RNA, 22 nt, Human
agaggcucuaauccccuccaca

SEQ ID NO: 497474 - RNA, 22 nt, Human
auauauuuacucuccuguugca

SEQ ID NO: 497475 - RNA, 22 nt, Human
ggaagagagaucccauagaugu

SEQ ID NO: 497476 - RNA, 22 nt, Human
acagccagugacugcagacccu

SEQ ID NO: 497477 - RNA, 22 nt, Human
aaaucuuucccuuuacuaucca

SEQ ID NO: 497478 - RNA, 22 nt, Human
ugggagcagcagggagaugcgg

SEQ ID NO: 497479 - RNA, 22 nt, Human
caggauggucucgaucuccuga

SEQ ID NO: 497480 - RNA, 17 nt, Human
ggcuuccagguggcucu

SEQ ID NO: 497481 - RNA, 22 nt, Human
uacauucuauaucuguuacauc

SEQ ID NO: 497482 - RNA, 22 nt, Human
auuguaaguagaaauguuaugg

SEQ ID NO: 497483 - RNA, 22 nt, Human
aaaacaguuuuugcuaacugcu

SEQ ID NO: 497484 - RNA, 22 nt, Human
agaauauucaucuguauucuua

SEQ ID NO: 497485 - RNA, 22 nt, Human
gcaggguauaauacuuagguga

SEQ ID NO: 497486 - RNA, 23 nt, Human
aggcccugccugucccucuuuuu

SEQ ID NO: 497487 - RNA, 22 nt, Human
cccaggacucuucacugcagcc

SEQ ID NO: 497488 - RNA, 22 nt, Human
caagaacaguuugccaaauugg

SEQ ID NO: 497489 - RNA, 17 nt, Human
ggcugcugugcuggugc

SEQ ID NO: 497490 - RNA, 22 nt, Human
acucaagauagggaaaguacaa

SEQ ID NO: 497491 - RNA, 22 nt, Human
cacagcuucuccccgcugcggc

SEQ ID NO: 497492 - RNA, 22 nt, Human
auacaucuaugccuuucugaca

SEQ ID NO: 497493 - RNA, 21 nt, Human
ccuguucacagaucuguaacu

SEQ ID NO: 497494 - RNA, 22 nt, Human
auucuccagcucacuguccaua

SEQ ID NO: 497495 - RNA, 22 nt, Human
ccagguggugaaagugggcccu

SEQ ID NO: 497496 - RNA, 21 nt, Human
ucaggaaacaccucuuaagga

SEQ ID NO: 497497 - RNA, 22 nt, Human
ugcagggauuauguagggguug

SEQ ID NO: 497498 - RNA, 21 nt, Human
cagcuucugaagguguaggaa

SEQ ID NO: 497499 - RNA, 19 nt, Human
cacugugguccuucacugc

SEQ ID NO: 497500 - RNA, 22 nt, Human
uggcuaggaauccaugacucuc

SEQ ID NO: 497501 - RNA, 22 nt, Human
uguagcauuuuauguaauaagu

SEQ ID NO: 497502 - RNA, 22 nt, Human
gcugggcuucucaaugcugccu

SEQ ID NO: 497503 - RNA, 22 nt, Human
aagaggagacuucagcaacuug

SEQ ID NO: 497504 - RNA, 21 nt, Human
cagaggccucaugcucugugc

SEQ ID NO: 497505 - RNA, 22 nt, Human
ccaggcugcucacaagcugccc

SEQ ID NO: 497506 - RNA, 22 nt, Human
ccucugcugcuguugagcaccg

SEQ ID NO: 497507 - RNA, 22 nt, Human
cuccaggagcugugucuuucuu

SEQ ID NO: 497508 - RNA, 22 nt, Human
uccaagucuuccuucccaaacc

SEQ ID NO: 497509 - RNA, 22 nt, Human
ugguccugcccacgcccaucug

SEQ ID NO: 497510 - RNA, 22 nt, Human
cagagggcacaugguuuccuca

SEQ ID NO: 497511 - RNA, 22 nt, Human
uagaaaucagguuuuuagaaag

SEQ ID NO: 497512 - RNA, 23 nt, Human
acacugucucauggauagacugc

SEQ ID NO: 497513 - RNA, 22 nt, Human
uuccaagucacccuuaggguca

SEQ ID NO: 497514 - RNA, 22 nt, Human
cugggcucaccuguggcuggca

SEQ ID NO: 497515 - RNA, 22 nt, Human
aucagugcuaaagcaaaugccc

SEQ ID NO: 497516 - RNA, 22 nt, Human
gaggggcucuugggcaugaagg

SEQ ID NO: 497517 - RNA, 22 nt, Human
uguaaucauuacaguacaugga

SEQ ID NO: 497518 - RNA, 22 nt, Human
ggcuggcacugaggagagcucu

SEQ ID NO: 497519 - RNA, 22 nt, Human
acaugauucuugauaggcauug

SEQ ID NO: 497520 - RNA, 22 nt, Human
gcagggccuuagcagcggcugc

SEQ ID NO: 497521 - RNA, 19 nt, Human
cugggagguguucagagaa

SEQ ID NO: 497522 - RNA, 22 nt, Human
cauguaaaacacucagaacagu

SEQ ID NO: 497523 - RNA, 22 nt, Human
ggcaguucucagccaaggcaau

SEQ ID NO: 497524 - RNA, 22 nt, Human
ugauauuuuucacuggccucug

SEQ ID NO: 497525 - RNA, 23 nt, Human
uucugggcuguggaagccucggg

SEQ ID NO: 497526 - RNA, 22 nt, Human
agcuggcuaugcccugugaacc

SEQ ID NO: 497527 - RNA, 22 nt, Human
ugggggcuccaggcuccaggga

SEQ ID NO: 497528 - RNA, 22 nt, Human
cugggcacuuuggggagccuac

SEQ ID NO: 497529 - RNA, 22 nt, Human
ggcacagcaggagcuaugugaa

SEQ ID NO: 497530 - RNA, 22 nt, Human
cuaauuuaaugaaugagucuua

SEQ ID NO: 497531 - RNA, 22 nt, Human
caguaagucaacaaacaugggg

SEQ ID NO: 497532 - RNA, 22 nt, Human
ucugagccccuagaacugagcg

SEQ ID NO: 497533 - RNA, 17 nt, Human
cccguucucuucgcugg

SEQ ID NO: 497534 - RNA, 22 nt, Human
agcaggcauagaguagcacuca

SEQ ID NO: 497535 - RNA, 22 nt, Human
uauuagcuuuagccuuuggaug

SEQ ID NO: 497536 - RNA, 22 nt, Human
cacccaggcuggagugcagggg

SEQ ID NO: 497537 - RNA, 22 nt, Human
aggugcuuggcucgugcacaca

SEQ ID NO: 497538 - RNA, 22 nt, Human
cugaaugauaaucuuuugcugg

SEQ ID NO: 497539 - RNA, 21 nt, Human
caugaagccgguucccuguuu

SEQ ID NO: 497540 - RNA, 22 nt, Human
aaguauucauaaggacauaugu

SEQ ID NO: 497541 - RNA, 22 nt, Human
aagggaaaucauauggugcagu

SEQ ID NO: 497542 - RNA, 22 nt, Human
agacagcaugauacaugaugcu

SEQ ID NO: 497543 - RNA, 22 nt, Human
gagcuucagaauuuaacagacu

SEQ ID NO: 497544 - RNA, 22 nt, Human
ucugucacugagcucaggauuc

SEQ ID NO: 497545 - RNA, 22 nt, Human
gcucccagggaccgcagggcag

SEQ ID NO: 497546 - RNA, 22 nt, Human
augcagaaugaguucacgaucu

SEQ ID NO: 497547 - RNA, 22 nt, Human
cagcuggcagaaccugcaucca

SEQ ID NO: 497548 - RNA, 22 nt, Human
cuguacaucucugaggacagua

SEQ ID NO: 497549 - RNA, 22 nt, Human
ugucugcuacuugguucuacca

SEQ ID NO: 497550 - RNA, 20 nt, Human
ugccuggccuuucucugccc

SEQ ID NO: 497551 - RNA, 22 nt, Human
cauugcacuccagcuugggcaa

SEQ ID NO: 497552 - RNA, 22 nt, Human
agauuacagcaugggaauggga

SEQ ID NO: 497553 - RNA, 22 nt, Human
gguucucuaacuuugacuggag

SEQ ID NO: 497554 - RNA, 22 nt, Human
gcagaaggucaaagcaagaugu

SEQ ID NO: 497555 - RNA, 22 nt, Human
gggaaauugugugagaucuuug

SEQ ID NO: 497556 - RNA, 21 nt, Human
ccagaggccucucuuggccac

SEQ ID NO: 497557 - RNA, 22 nt, Human
ggucugagcuugagcccaugcu

SEQ ID NO: 497558 - RNA, 22 nt, Human
augggcugcuuggcuuccaccc

SEQ ID NO: 497559 - RNA, 22 nt, Human
aaaucaguaaauguucauuaac

SEQ ID NO: 497560 - RNA, 22 nt, Human
ucugaaugcacuuaguuaccaa

SEQ ID NO: 497561 - RNA, 22 nt, Human
ucugggcuuuguaaugggaggu

SEQ ID NO: 497562 - RNA, 22 nt, Human
ugccucugguuaucugguaccu

SEQ ID NO: 497563 - RNA, 22 nt, Human
caaauagaacucacagacaaga

SEQ ID NO: 497564 - RNA, 22 nt, Human
ggaaguagaaguaaugaaauca

SEQ ID NO: 497565 - RNA, 22 nt, Human
cuacauucaacagcagaguuuu

SEQ ID NO: 497566 - RNA, 22 nt, Human
ccagcuccauugcuuaguguaa

SEQ ID NO: 497567 - RNA, 22 nt, Human
uaggcacaagaccaugcaaagg

SEQ ID NO: 497568 - RNA, 22 nt, Human
ucacauuuguuccucugcacuu

SEQ ID NO: 497569 - RNA, 22 nt, Human
auggcagacgaggcagcagggg

SEQ ID NO: 497570 - RNA, 22 nt, Human
ugguccagacauuucugaggua

SEQ ID NO: 497571 - RNA, 22 nt, Human
guuacacaggaaaacauuagca

SEQ ID NO: 497572 - RNA, 22 nt, Human
uagaagauucuaaaguggagag

SEQ ID NO: 497573 - RNA, 22 nt, Human
uggcagucggacuucuaucuca

SEQ ID NO: 497574 - RNA, 22 nt, Human
uggagcagagaugggagcccaa

SEQ ID NO: 497575 - RNA, 22 nt, Human
uagcuuuaagacauggugaaug

SEQ ID NO: 497576 - RNA, 21 nt, Human
uucuuuccccagaggacuaaa

SEQ ID NO: 497577 - RNA, 22 nt, Human
cagucccagaagagccugggag

SEQ ID NO: 497578 - RNA, 22 nt, Human
cccugggcagucugcacuucag

SEQ ID NO: 497579 - RNA, 22 nt, Human
uuguaugaucaaaagaaaugua

SEQ ID NO: 497580 - RNA, 22 nt, Human
gagguccauacagcuauucuac

SEQ ID NO: 497581 - RNA, 22 nt, Human
ugggaccugcuccuggaaugag

SEQ ID NO: 497582 - RNA, 22 nt, Human
uuauuuuguagcucugaucuuu

SEQ ID NO: 497583 - RNA, 21 nt, Human
uccucugcagugagguggccu

SEQ ID NO: 497584 - RNA, 20 nt, Human
acuuaguguaggguuccuag

SEQ ID NO: 497585 - RNA, 22 nt, Human
ugcuucuguauuuugggcuuga

SEQ ID NO: 497586 - RNA, 20 nt, Human
cugcugugugugccucagcc

SEQ ID NO: 497587 - RNA, 22 nt, Human
uuaauuaauuaguuaagcaugu

SEQ ID NO: 497588 - RNA, 19 nt, Human
ccagguggaacugagguag

SEQ ID NO: 497589 - RNA, 22 nt, Human
gagauguuuugcugagaauggg

SEQ ID NO: 497590 - RNA, 22 nt, Human
ugaaaaugcacgcuggaaagca

SEQ ID NO: 497591 - RNA, 22 nt, Human
uuaggaaguguguccagaagcg

SEQ ID NO: 497592 - RNA, 22 nt, Human
ccuucugcucccuggccagggc

SEQ ID NO: 497593 - RNA, 22 nt, Human
cuuguucaguccugacuuccug

SEQ ID NO: 497594 - RNA, 22 nt, Human
auuucuucagguucuucuagga

SEQ ID NO: 497595 - RNA, 22 nt, Human
gagguccaacacaauggguguu

SEQ ID NO: 497596 - RNA, 22 nt, Human
gcucacugcaaccucugcuucc

SEQ ID NO: 497597 - RNA, 22 nt, Human
auaaucuuguauuuccuaaagu

SEQ ID NO: 497598 - RNA, 22 nt, Human
ugcuuccagcucucuguaaggu

SEQ ID NO: 497599 - RNA, 22 nt, Human
auguuucugaguguauauacau

SEQ ID NO: 497600 - RNA, 22 nt, Human
aaaaggauguuuucaugaaaca

SEQ ID NO: 497601 - RNA, 22 nt, Human
gcuucagcccaucccaguacau

SEQ ID NO: 497602 - RNA, 23 nt, Human
ggguccagccaauuccaaggaaa

SEQ ID NO: 497603 - RNA, 22 nt, Human
aagauuuaccacuuuauucaag

SEQ ID NO: 497604 - RNA, 22 nt, Human
gcuuccuagaucugugguacuc

SEQ ID NO: 497605 - RNA, 22 nt, Human
ucuuucaaugugaaaccaugua

SEQ ID NO: 497606 - RNA, 22 nt, Human
gcuuccuucuaccacaucaugc

SEQ ID NO: 497607 - RNA, 22 nt, Human
ugugugacccccagugaagccu

SEQ ID NO: 497608 - RNA, 22 nt, Human
cccucucugcugcauagaggaa

SEQ ID NO: 497609 - RNA, 22 nt, Human
ggucuggccucgggcaccccca

SEQ ID NO: 497610 - RNA, 22 nt, Human
cagggcaaagucuucuagaacc

SEQ ID NO: 497611 - RNA, 22 nt, Human
gugcaguggcagauccuagcuc

SEQ ID NO: 497612 - RNA, 22 nt, Human
gguggccuuucaguggaucagg

SEQ ID NO: 497613 - RNA, 22 nt, Human
caguguacuuggaauguaacag

SEQ ID NO: 497614 - RNA, 17 nt, Human
aagacagaagccaugag

SEQ ID NO: 497615 - RNA, 22 nt, Human
acugcuuuucuaagauucugug

SEQ ID NO: 497616 - RNA, 22 nt, Human
gccagccugugggggcucugug

SEQ ID NO: 497617 - RNA, 22 nt, Human
agcaggugacccaagcaggcug

SEQ ID NO: 497618 - RNA, 22 nt, Human
aucagcaaguccuguuaauucu

SEQ ID NO: 497619 - RNA, 22 nt, Human
uggagucaucuuaaucuaggca

SEQ ID NO: 497620 - RNA, 21 nt, Human
gcccagcaaggugagaaggcc

SEQ ID NO: 497621 - RNA, 22 nt, Human
ggagucaucucagcugagaggc

SEQ ID NO: 497622 - RNA, 22 nt, Human
cagucccaggguugguucagcu

SEQ ID NO: 497623 - RNA, 22 nt, Human
gugcgccagcucaaggggaggc

SEQ ID NO: 497624 - RNA, 22 nt, Human
agcuucuugggcuuuacacaaa

SEQ ID NO: 497625 - RNA, 22 nt, Human
uuuuuccuuagggguuacucac

SEQ ID NO: 497626 - RNA, 22 nt, Human
ucaaaugcacguagagaaaaua

SEQ ID NO: 497627 - RNA, 22 nt, Human
ucauagaaauaucacgucuuuu

SEQ ID NO: 497628 - RNA, 22 nt, Human
cugccuccugccgugcagcuuc

SEQ ID NO: 497629 - RNA, 20 nt, Human
caggaggcaaggucaagguc

SEQ ID NO: 497630 - RNA, 20 nt, Human
accccacagaguccauugca

SEQ ID NO: 497631 - RNA, 22 nt, Human
ccagcuuuuggggugacaauuu

SEQ ID NO: 497632 - RNA, 22 nt, Human
cuauuuaucuauuucugaauga

SEQ ID NO: 497633 - RNA, 18 nt, Human
ccugccagucuggagcag

SEQ ID NO: 497634 - RNA, 22 nt, Human
uucaguguauauuuuuugagua

SEQ ID NO: 497635 - RNA, 22 nt, Human
acuguucauuuguccuguaucu

SEQ ID NO: 497636 - RNA, 18 nt, Human
augcccuguugacuucag

SEQ ID NO: 497637 - RNA, 22 nt, Human
aguucucagcuuaguaugcugu

SEQ ID NO: 497638 - RNA, 22 nt, Human
ugaagccauaggacagaggaua

SEQ ID NO: 497639 - RNA, 22 nt, Human
uaagaacauaaauucauacggg

SEQ ID NO: 497640 - RNA, 22 nt, Human
ggaagggguuaggggucccuga

SEQ ID NO: 497641 - RNA, 22 nt, Human
uguucuugagccuuuagaccua

SEQ ID NO: 497642 - RNA, 22 nt, Human
cagcucugugcaggccugggga

SEQ ID NO: 497643 - RNA, 22 nt, Human
uguaugaagguuuaccugcugu

SEQ ID NO: 497644 - RNA, 22 nt, Human
guggcucuguaaaaugccugca

SEQ ID NO: 497645 - RNA, 22 nt, Human
cagugcagacguggagggggca

SEQ ID NO: 497646 - RNA, 22 nt, Human
ggagaagggaacugaguuuuug

SEQ ID NO: 497647 - RNA, 22 nt, Human
cacaggggcaaacuguagggga

SEQ ID NO: 497648 - RNA, 21 nt, Human
aacacauccagaguauuugac

SEQ ID NO: 497649 - RNA, 22 nt, Human
agugcagaggcugggaaaugcu

SEQ ID NO: 497650 - RNA, 20 nt, Human
ucaucagauagguuaguaca

SEQ ID NO: 497651 - RNA, 22 nt, Human
uuuacagugagagcuuagugag

SEQ ID NO: 497652 - RNA, 22 nt, Human
uuuuauaagcaagaaagggaaa

SEQ ID NO: 497653 - RNA, 22 nt, Human
aaaggaagaugccaggacucug

SEQ ID NO: 497654 - RNA, 20 nt, Human
uuucacaucugucccuuuaa

SEQ ID NO: 497655 - RNA, 22 nt, Human
acauuguauaaugauuaucaca

SEQ ID NO: 497656 - RNA, 22 nt, Human
cccagcagccagaaugaggagc

SEQ ID NO: 497657 - RNA, 22 nt, Human
ugcagcauucuuggccacuacu

SEQ ID NO: 497658 - RNA, 22 nt, Human
agaguccacccuggggucaggc

SEQ ID NO: 497659 - RNA, 22 nt, Human
acacaucagaaauaugaaugag

SEQ ID NO: 497660 - RNA, 22 nt, Human
ggcagaagaaaggcuaagucuc

SEQ ID NO: 497661 - RNA, 22 nt, Human
agagcugagaauguggcuuccu

SEQ ID NO: 497662 - RNA, 22 nt, Human
cagagcaucgcgcagagagccu

SEQ ID NO: 497663 - RNA, 22 nt, Human
uaaaaaucuuaugaauggcaag

SEQ ID NO: 497664 - RNA, 22 nt, Human
uggguccuugcuaacuucuaug

SEQ ID NO: 497665 - RNA, 22 nt, Human
ggaaggggugucgcccauggau

SEQ ID NO: 497666 - RNA, 22 nt, Human
agccaccuucuccaaggccuag

SEQ ID NO: 497667 - RNA, 22 nt, Human
gucaggggccaugggccaagga

SEQ ID NO: 497668 - RNA, 22 nt, Human
uuuccuugcacauugguuucca

SEQ ID NO: 497669 - RNA, 22 nt, Human
aguguugucaaacggcucagca

SEQ ID NO: 497670 - RNA, 22 nt, Human
augcccugcaucaagugacacu

SEQ ID NO: 497671 - RNA, 22 nt, Human
uuacuuucaaaaacuacguggg

SEQ ID NO: 497672 - RNA, 19 nt, Human
gcagagugggguggagggu

SEQ ID NO: 497673 - RNA, 22 nt, Human
aggcuccaugcaaaggcuguuu

SEQ ID NO: 497674 - RNA, 22 nt, Human
gcccagguuggagagcaguggc

SEQ ID NO: 497675 - RNA, 22 nt, Human
cagcuccccaugguuccugaag

SEQ ID NO: 497676 - RNA, 21 nt, Human
agaaauguaucauucuuuucc

SEQ ID NO: 497677 - RNA, 22 nt, Human
uguucuaagcugccaaaaugcu

SEQ ID NO: 497678 - RNA, 22 nt, Human
gggcuccaguuuggccaggaag

SEQ ID NO: 497679 - RNA, 22 nt, Human
cagcuguucggggcuggcaugu

SEQ ID NO: 497680 - RNA, 22 nt, Human
guacaguaguaaaagugaauga

SEQ ID NO: 497681 - RNA, 22 nt, Human
uacauagcaaggaaaugacaga

SEQ ID NO: 497682 - RNA, 22 nt, Human
aaagauuaagguauuguuagcu

SEQ ID NO: 497683 - RNA, 22 nt, Human
uggccuggugucugcgaggccu

SEQ ID NO: 497684 - RNA, 19 nt, Human
ggcugccuuuccuuaccag

SEQ ID NO: 497685 - RNA, 22 nt, Human
uuauucugacuaauguauaacu

SEQ ID NO: 497686 - RNA, 22 nt, Human
cagggugcugcaccaucccuca

SEQ ID NO: 497687 - RNA, 22 nt, Human
agugcauuauauguuucaaugg

SEQ ID NO: 497688 - RNA, 22 nt, Human
uuggaagggauauuggcauaug

SEQ ID NO: 497689 - RNA, 23 nt, Human
cuggcucuguagguggcauccuu

SEQ ID NO: 497690 - RNA, 22 nt, Human
gggccuguguguucaggagccu

SEQ ID NO: 497691 - RNA, 22 nt, Human
gcagcuuucuugcccuaaucuu

SEQ ID NO: 497692 - RNA, 22 nt, Human
ucauuuggagccuuccuguuuu

SEQ ID NO: 497693 - RNA, 22 nt, Human
ucagcacuauacauuuugaaua

SEQ ID NO: 497694 - RNA, 19 nt, Human
cugcugggugcugagggag

SEQ ID NO: 497695 - RNA, 22 nt, Human
ggaaagaaucaagugauccugu

SEQ ID NO: 497696 - RNA, 22 nt, Human
ggaugggcccgggacggcgcug

SEQ ID NO: 497697 - RNA, 22 nt, Human
cacugaaggcuaggauuagaug

SEQ ID NO: 497698 - RNA, 22 nt, Human
cuucucucugcauaggcauggg

SEQ ID NO: 497699 - RNA, 22 nt, Human
uuugggcugguuugccaugccc

SEQ ID NO: 497700 - RNA, 21 nt, Human
ucucuggaauuagaccauguu

SEQ ID NO: 497701 - RNA, 22 nt, Human
ucaggccugcaggcuuccugga

SEQ ID NO: 497702 - RNA, 20 nt, Human
cagaggcauuuucagacucu

SEQ ID NO: 497703 - RNA, 22 nt, Human
uggggcuggggaucuugagccu

SEQ ID NO: 497704 - RNA, 22 nt, Human
ucaggcaguagaauugcuugaa

SEQ ID NO: 497705 - RNA, 22 nt, Human
uuucacauuuaggcgugaauug

SEQ ID NO: 497706 - RNA, 23 nt, Human
augcaguauaugucaguaguuua

SEQ ID NO: 497707 - RNA, 22 nt, Human
gagaaaaugucagacuuggucg

SEQ ID NO: 497708 - RNA, 22 nt, Human
gaaacauuuguugaguacuugc

SEQ ID NO: 497709 - RNA, 22 nt, Human
uccaggcauaaugcccaguggu

SEQ ID NO: 497710 - RNA, 22 nt, Human
uggguagagacacagucugggg

SEQ ID NO: 497711 - RNA, 19 nt, Human
agggaaggauucugucauu

SEQ ID NO: 497712 - RNA, 22 nt, Human
gcugcucucagagcucaugcug

SEQ ID NO: 497713 - RNA, 22 nt, Human
uucucuuauucuggauaugcag

SEQ ID NO: 497714 - RNA, 22 nt, Human
uacaaagccugguagauaucug

SEQ ID NO: 497715 - RNA, 22 nt, Human
agagaaucugggaagauguuaa

SEQ ID NO: 497716 - RNA, 20 nt, Human
uuuuauauguaggguauaug

SEQ ID NO: 497717 - RNA, 22 nt, Human
ggggccuuuucugaauguggaa

SEQ ID NO: 497718 - RNA, 22 nt, Human
uggggcugugagacuacaggau

SEQ ID NO: 497719 - RNA, 22 nt, Human
gguucacacuuucaugauuuca

SEQ ID NO: 497720 - RNA, 22 nt, Human
ugcauuaaaaugugccucucuu

SEQ ID NO: 497721 - RNA, 22 nt, Human
uccuggaguugugcagugcaca

SEQ ID NO: 497722 - RNA, 22 nt, Human
auuuguugaauaaauuaguauu

SEQ ID NO: 497723 - RNA, 22 nt, Human
gcugggucuggaugcucaggug

SEQ ID NO: 497724 - RNA, 22 nt, Human
auugaaagaguuuucugcugca

SEQ ID NO: 497725 - RNA, 22 nt, Human
cugucuccagggcaggugcagg

SEQ ID NO: 497726 - RNA, 22 nt, Human
cccccaggcucugacacaggag

SEQ ID NO: 497727 - RNA, 22 nt, Human
ggccaugguuggggaagacaug

SEQ ID NO: 497728 - RNA, 22 nt, Human
agguuuucagcuguauccugag

SEQ ID NO: 497729 - RNA, 22 nt, Human
uucuguauauuguaaagacuca

SEQ ID NO: 497730 - RNA, 22 nt, Human
cuggcuccacucccugccugac

SEQ ID NO: 497731 - RNA, 23 nt, Human
aucuaaaguguuaaauagcuggg

SEQ ID NO: 497732 - RNA, 22 nt, Human
ccugccagauccccugagcuga

SEQ ID NO: 497733 - RNA, 22 nt, Human
agauggggcagaauggagccau

SEQ ID NO: 497734 - RNA, 22 nt, Human
auaugcauaugucaaaacuuau

SEQ ID NO: 497735 - RNA, 22 nt, Human
cuggcucuaagugucagcuccc

SEQ ID NO: 497736 - RNA, 22 nt, Human
auaaauaucacuguugucccuc

SEQ ID NO: 497737 - RNA, 22 nt, Human
aaagaauuuguacacccuacua

SEQ ID NO: 497738 - RNA, 22 nt, Human
aucaggauucaccccagagcug

SEQ ID NO: 497739 - RNA, 22 nt, Human
uuagcacuuugauucaugcaga

SEQ ID NO: 497740 - RNA, 22 nt, Human
ugggcuccucgucacucgcugu

SEQ ID NO: 497741 - RNA, 22 nt, Human
auagauuauuugcucauuacuu

SEQ ID NO: 497742 - RNA, 22 nt, Human
agcugggucuugggccaggaga

SEQ ID NO: 497743 - RNA, 22 nt, Human
gaggguccuggcuaagucugac

SEQ ID NO: 497744 - RNA, 22 nt, Human
uauaauuuuagaagagauggaa

SEQ ID NO: 497745 - RNA, 22 nt, Human
acagaguauuggaaaggcagug

SEQ ID NO: 497746 - RNA, 20 nt, Human
ugucagugccugaggcacag

SEQ ID NO: 497747 - RNA, 22 nt, Human
gcugcuggcaucuagggggugg

SEQ ID NO: 497748 - RNA, 22 nt, Human
aaccugcauguuucuaaaagca

SEQ ID NO: 497749 - RNA, 22 nt, Human
auggaaagccaguguuccauca

SEQ ID NO: 497750 - RNA, 22 nt, Human
ggcugcagauuguagucuguua

SEQ ID NO: 497751 - RNA, 22 nt, Human
cuggaagguuccucccagcucc

SEQ ID NO: 497752 - RNA, 22 nt, Human
uaacagaaguuguucauugugg

SEQ ID NO: 497753 - RNA, 22 nt, Human
aggacagguguagugggcucug

SEQ ID NO: 497754 - RNA, 22 nt, Human
aaguuauuuccucgugacugaa

SEQ ID NO: 497755 - RNA, 16 nt, Human
cuacccagugagaagg

SEQ ID NO: 497756 - RNA, 22 nt, Human
gucccucugugucccugcaguc

SEQ ID NO: 497757 - RNA, 20 nt, Human
cagagccaagagcagcaucu

SEQ ID NO: 497758 - RNA, 22 nt, Human
aucacagagcucccuuccacug

SEQ ID NO: 497759 - RNA, 22 nt, Human
agugucugcgggcagaggagcg

SEQ ID NO: 497760 - RNA, 22 nt, Human
aggcaguggcugagaccagggg

SEQ ID NO: 497761 - RNA, 22 nt, Human
cauuucugggagacaugcuaga

SEQ ID NO: 497762 - RNA, 22 nt, Human
gcuggguccaugguccucgggu

SEQ ID NO: 497763 - RNA, 20 nt, Human
uccaggagaacugggagccg

SEQ ID NO: 497764 - RNA, 22 nt, Human
ccacacagggggaugaguuauu

SEQ ID NO: 497765 - RNA, 22 nt, Human
ugcuucuggcuuaucucgugcc

SEQ ID NO: 497766 - RNA, 22 nt, Human
gcucaggagcugacagccucaa

SEQ ID NO: 497767 - RNA, 22 nt, Human
uagaaugaccuccucuuagcuu

SEQ ID NO: 497768 - RNA, 22 nt, Human
auucaauaaauaugcuacaugg

SEQ ID NO: 497769 - RNA, 22 nt, Human
cucccgugauccuggaggagag

SEQ ID NO: 497770 - RNA, 22 nt, Human
ccuacacaucucaccucacagg

SEQ ID NO: 497771 - RNA, 22 nt, Human
augugcaguugguggccaggag

SEQ ID NO: 497772 - RNA, 22 nt, Human
ggagcuggccgccuaugugcag

SEQ ID NO: 497773 - RNA, 22 nt, Human
gccaccccauagguguuaggug

SEQ ID NO: 497774 - RNA, 19 nt, Human
gcauaaaaugucaaugugu

SEQ ID NO: 497775 - RNA, 22 nt, Human
agcugcugugugcucaggcagg

SEQ ID NO: 497776 - RNA, 22 nt, Human
cccagggucccugcucucugug

SEQ ID NO: 497777 - RNA, 22 nt, Human
guggcaggggcgggcuguuccg

SEQ ID NO: 497778 - RNA, 22 nt, Human
ggcucuguggcuggccaugaug

SEQ ID NO: 497779 - RNA, 22 nt, Human
ggcugcucuucuuggcgaccuc

SEQ ID NO: 497780 - RNA, 22 nt, Human
aguaggaggcgggagcaugaag

SEQ ID NO: 497781 - RNA, 22 nt, Human
ggcaggcaggagcgugcuuggg

SEQ ID NO: 497782 - RNA, 22 nt, Human
uuaaaacugcaaauccuacuga

SEQ ID NO: 497783 - RNA, 22 nt, Human
ggcugaaguguaguggcucacu

SEQ ID NO: 497784 - RNA, 22 nt, Human
gcccucagcuccuggacacaug

SEQ ID NO: 497785 - RNA, 22 nt, Human
gauggggaugagaagugagcag

SEQ ID NO: 497786 - RNA, 22 nt, Human
cuccucacacccacugcaacca

SEQ ID NO: 497787 - RNA, 22 nt, Human
cgcuggccauagccuccugugu

SEQ ID NO: 497788 - RNA, 22 nt, Human
ugcaaaaacugcaauugcuuuu

SEQ ID NO: 497789 - RNA, 22 nt, Human
uaauuacagagguuugccaguu

SEQ ID NO: 497790 - RNA, 22 nt, Human
cugucacacugauaucaggcuu

SEQ ID NO: 497791 - RNA, 19 nt, Human
agcuguggggccuagcacc

SEQ ID NO: 497792 - RNA, 22 nt, Human
cuggccagaagcaccuuuggcg

SEQ ID NO: 497793 - RNA, 22 nt, Human
aggcaggggagcuggaagggua

SEQ ID NO: 497794 - RNA, 22 nt, Human
ucucaguguuguucugcagaug

SEQ ID NO: 497795 - RNA, 22 nt, Human
gcagggcagaaggugcugagga

SEQ ID NO: 497796 - RNA, 21 nt, Human
cagagcugaaggguguagugu

SEQ ID NO: 497797 - RNA, 22 nt, Human
guagaagugaugucauguuaua

SEQ ID NO: 497798 - RNA, 22 nt, Human
cuuuguugugccugagugcacc

SEQ ID NO: 497799 - RNA, 18 nt, Human
uaaugauaagccuugaag

SEQ ID NO: 497800 - RNA, 22 nt, Human
ucacaugcccuguauuuaccag

SEQ ID NO: 497801 - RNA, 22 nt, Human
ucccaggccauaaaacucagag

SEQ ID NO: 497802 - RNA, 22 nt, Human
auggcagagggauugaacagcu

SEQ ID NO: 497803 - RNA, 22 nt, Human
cccugcagggaggauucugaag

SEQ ID NO: 497804 - RNA, 22 nt, Human
cagagggaaaaggggaguaaua

SEQ ID NO: 497805 - RNA, 22 nt, Human
auguccagggcacacagcagug

SEQ ID NO: 497806 - RNA, 22 nt, Human
uugauacagcagccugugaucc

SEQ ID NO: 497807 - RNA, 22 nt, Human
cauggccucaaaggacugcaga

SEQ ID NO: 497808 - RNA, 20 nt, Human
ggcucugcuugugagcagcc

SEQ ID NO: 497809 - RNA, 22 nt, Human
gcuguccugggaacaggcacua

SEQ ID NO: 497810 - RNA, 19 nt, Human
ucucuucucccugguuuua

SEQ ID NO: 497811 - RNA, 22 nt, Human
cacauuauucuaaagagguacu

SEQ ID NO: 497812 - RNA, 22 nt, Human
ccacagggcucuaggcgcuucc

SEQ ID NO: 497813 - RNA, 22 nt, Human
cucagugcagcuaggcaugaga

SEQ ID NO: 497814 - RNA, 22 nt, Human
guggcugcaucggggugaccag

SEQ ID NO: 497815 - RNA, 22 nt, Human
ccugggagagccaucuguggcc

SEQ ID NO: 497816 - RNA, 22 nt, Human
agggccuguccgcucccgcccg

SEQ ID NO: 497817 - RNA, 19 nt, Human
ucucuggcuugucugccug

SEQ ID NO: 497818 - RNA, 22 nt, Human
ugaaggcauugaugaaggaauc

SEQ ID NO: 497819 - RNA, 22 nt, Human
uagagaaaagcagggaucagga

SEQ ID NO: 497820 - RNA, 22 nt, Human
aggaugggccugggauaugcuu

SEQ ID NO: 497821 - RNA, 22 nt, Human
gccaggugcaccugcccuggcc

SEQ ID NO: 497822 - RNA, 22 nt, Human
ggcagccagagggcagcuggau

SEQ ID NO: 497823 - RNA, 22 nt, Human
gaagagcuggaauccagucugg

SEQ ID NO: 497824 - RNA, 22 nt, Human
auauuuaaacaggguaccaaua

SEQ ID NO: 497825 - RNA, 22 nt, Human
caccagcuuugcccacugccca

SEQ ID NO: 497826 - RNA, 22 nt, Human
agcugcaggcccaugcucaguc

SEQ ID NO: 497827 - RNA, 22 nt, Human
accaggaggccuggagcacaaa

SEQ ID NO: 497828 - RNA, 22 nt, Human
caaaugcauagaaagaugaaac

SEQ ID NO: 497829 - RNA, 20 nt, Human
uucuuaaagaccucacuuug

SEQ ID NO: 497830 - RNA, 22 nt, Human
uagacauuuggcaugguuuuca

SEQ ID NO: 497831 - RNA, 22 nt, Human
ugugaugguucacugggcauga

SEQ ID NO: 497832 - RNA, 19 nt, Human
gguccagacuucagacuag

SEQ ID NO: 497833 - RNA, 22 nt, Human
cugcccugcuucugagggaagc

SEQ ID NO: 497834 - RNA, 22 nt, Human
ugggcaagucacuucugucuuu

SEQ ID NO: 497835 - RNA, 22 nt, Human
ggaggcagaauagagugugggu

SEQ ID NO: 497836 - RNA, 22 nt, Human
uggagcauauucuggagcuugg

SEQ ID NO: 497837 - RNA, 23 nt, Human
agagagaguuugugucagguacc

SEQ ID NO: 497838 - RNA, 22 nt, Human
aaaugguauuuacucuguauua

SEQ ID NO: 497839 - RNA, 22 nt, Human
agaugacagccaaggagaugaa

SEQ ID NO: 497840 - RNA, 22 nt, Human
uccaggcuuuggggcaggagcg

SEQ ID NO: 497841 - RNA, 22 nt, Human
uccugggugugauauucauaga

SEQ ID NO: 497842 - RNA, 22 nt, Human
caaauguguuuuuucuucuaca

SEQ ID NO: 497843 - RNA, 22 nt, Human
cagagcauugagggucugccaa

SEQ ID NO: 497844 - RNA, 22 nt, Human
cagggaugaccagagggaugug

SEQ ID NO: 497845 - RNA, 22 nt, Human
gaagaacugugacagaagcagu

SEQ ID NO: 497846 - RNA, 22 nt, Human
aacaguaaugugguguuggguu

SEQ ID NO: 497847 - RNA, 22 nt, Human
agagccaguuaagcacuuacag

SEQ ID NO: 497848 - RNA, 22 nt, Human
gccacugauuccaagucaauuu

SEQ ID NO: 497849 - RNA, 22 nt, Human
gcucccagcaauugaggcagcc

SEQ ID NO: 497850 - RNA, 22 nt, Human
uccugggcugcagggaagagca

SEQ ID NO: 497851 - RNA, 22 nt, Human
cacagggcagugcugcccacuc

SEQ ID NO: 497852 - RNA, 22 nt, Human
gaugcacagugacccugccagu

SEQ ID NO: 497853 - RNA, 22 nt, Human
cagaaguaagauuacugugaga

SEQ ID NO: 497854 - RNA, 22 nt, Human
gggcagguacuggguggugagc

SEQ ID NO: 497855 - RNA, 22 nt, Human
aaguuuaacuugaauucuuucu

SEQ ID NO: 497856 - RNA, 22 nt, Human
ggcucuggguucugcaaugcgu

SEQ ID NO: 497857 - RNA, 22 nt, Human
guuuaagaggguuucauuccca

SEQ ID NO: 497858 - RNA, 22 nt, Human
uuucacagcgucuuucucuugc

SEQ ID NO: 497859 - RNA, 22 nt, Human
cuguggcuccagugaaccaaug

SEQ ID NO: 497860 - RNA, 22 nt, Human
acacaguaccccaaggcugggc

SEQ ID NO: 497861 - RNA, 20 nt, Human
uguucacaguaguugcugcu

SEQ ID NO: 497862 - RNA, 20 nt, Human
gauuacaaaaugaaaugcau

SEQ ID NO: 497863 - RNA, 22 nt, Human
ucauugaauuucacagcuuuau

SEQ ID NO: 497864 - RNA, 22 nt, Human
acccuggggguggccagugcca

SEQ ID NO: 497865 - RNA, 22 nt, Human
ccaggucuggaaccaccagggc

SEQ ID NO: 497866 - RNA, 22 nt, Human
ccucagggucugaggagaccgu

SEQ ID NO: 497867 - RNA, 22 nt, Human
uggagggcaucuguggucaggc

SEQ ID NO: 497868 - RNA, 22 nt, Human
acuggggauuagggacucagug

SEQ ID NO: 497869 - RNA, 22 nt, Human
gggccuggugcuucugacuccu

SEQ ID NO: 497870 - RNA, 22 nt, Human
ccuuggugaucugggcuggaag

SEQ ID NO: 497871 - RNA, 22 nt, Human
ucaggucuuuugucuccuagaa

SEQ ID NO: 497872 - RNA, 22 nt, Human
uguguccauucaggcacugacc

SEQ ID NO: 497873 - RNA, 19 nt, Human
agcuccuguucagcagcuc

SEQ ID NO: 497874 - RNA, 23 nt, Human
aaggccagaauuucaauggugcc

SEQ ID NO: 497875 - RNA, 22 nt, Human
gugcccugguccccagcauaua

SEQ ID NO: 497876 - RNA, 22 nt, Human
cucaggucuuaguucugucauc

SEQ ID NO: 497877 - RNA, 22 nt, Human
auugacaacccugguaugagca

SEQ ID NO: 497878 - RNA, 22 nt, Human
acagacuguuugguucaugucu

SEQ ID NO: 497879 - RNA, 22 nt, Human
gagcccagguucugcuuccagc

SEQ ID NO: 497880 - RNA, 22 nt, Human
aaagcucuuauagcagagugug

SEQ ID NO: 497881 - RNA, 22 nt, Human
caguagucuuuuuccuccuaga

SEQ ID NO: 497882 - RNA, 22 nt, Human
ugcuugagacacauaugaauuu

SEQ ID NO: 497883 - RNA, 22 nt, Human
aagauguugcauuagaauaccu

SEQ ID NO: 497884 - RNA, 22 nt, Human
gccuguguggaugcgccggugc

SEQ ID NO: 497885 - RNA, 22 nt, Human
uggcagcuugaaugcagucuuu

SEQ ID NO: 497886 - RNA, 20 nt, Human
gaagccagaggggaaaggag

SEQ ID NO: 497887 - RNA, 22 nt, Human
aaguugagaugucauaggagac

SEQ ID NO: 497888 - RNA, 22 nt, Human
uuucuguuaggcaucauuuuaa

SEQ ID NO: 497889 - RNA, 22 nt, Human
gucaaacaaauuaacauaucca

SEQ ID NO: 497890 - RNA, 22 nt, Human
cggagaggugggggcagcaucu

SEQ ID NO: 497891 - RNA, 22 nt, Human
uuacuuuggauggucaagaaag

SEQ ID NO: 497892 - RNA, 18 nt, Human
agagcagcggcaucacac

SEQ ID NO: 497893 - RNA, 22 nt, Human
ggagcacuauaauagagauuuu

SEQ ID NO: 497894 - RNA, 22 nt, Human
acaauguuuuuguucaaagagu

SEQ ID NO: 497895 - RNA, 22 nt, Human
aucaggauggguuuggcuuagg

SEQ ID NO: 497896 - RNA, 22 nt, Human
gcagcugcuguggcaucaagcu

SEQ ID NO: 497897 - RNA, 22 nt, Human
agcgugaauuaguugguacaca

SEQ ID NO: 497898 - RNA, 22 nt, Human
uaccugcaaaguuccuuuugcc

SEQ ID NO: 497899 - RNA, 17 nt, Human
uggacccuugggccucc

SEQ ID NO: 497900 - RNA, 22 nt, Human
gcaggccuuggcaaugagccug

SEQ ID NO: 497901 - RNA, 22 nt, Human
gugcaugugucuuuauaguaga

SEQ ID NO: 497902 - RNA, 23 nt, Human
uggagcugggcucagacccuggg

SEQ ID NO: 497903 - RNA, 22 nt, Human
uaguuaggguucugcagagaca

SEQ ID NO: 497904 - RNA, 22 nt, Human
gcaaugauugcauuagaagaug

SEQ ID NO: 497905 - RNA, 22 nt, Human
agcauuuaugacuaauguaaaa

SEQ ID NO: 497906 - RNA, 22 nt, Human
aggcucugguuggcaaguaaag

SEQ ID NO: 497907 - RNA, 22 nt, Human
accuuucaaaguggcuaucacu

SEQ ID NO: 497908 - RNA, 18 nt, Human
cugccccuucucugagau

SEQ ID NO: 497909 - RNA, 22 nt, Human
uuaaaugacuuuuauuauucuc

SEQ ID NO: 497910 - RNA, 22 nt, Human
cauguguuucgagacuguugag

SEQ ID NO: 497911 - RNA, 22 nt, Human
acccugagggguauagcagaag

SEQ ID NO: 497912 - RNA, 22 nt, Human
gauuuucugagccuucaaauuu

SEQ ID NO: 497913 - RNA, 22 nt, Human
cagacacagcaauucuguguug

SEQ ID NO: 497914 - RNA, 22 nt, Human
cagccccucacagagcuguccu

SEQ ID NO: 497915 - RNA, 22 nt, Human
cagggcucugccuugagggaug

SEQ ID NO: 497916 - RNA, 22 nt, Human
gauccuguuagaaauguagacu

SEQ ID NO: 497917 - RNA, 17 nt, Human
ggcagcugccacuuuuu

SEQ ID NO: 497918 - RNA, 22 nt, Human
caguuugugcuaggcacuauuu

SEQ ID NO: 497919 - RNA, 22 nt, Human
auggaagguccuacagagcgca

SEQ ID NO: 497920 - RNA, 22 nt, Human
uggagagguugaauaacuuguc

SEQ ID NO: 497921 - RNA, 22 nt, Human
cucacugugaccucagcagaca

SEQ ID NO: 497922 - RNA, 22 nt, Human
agccucuggcccuagacugcuu

SEQ ID NO: 497923 - RNA, 22 nt, Human
aagcaucucuauguggagagug

SEQ ID NO: 497924 - RNA, 18 nt, Human
gggcuguguucaugccca

SEQ ID NO: 497925 - RNA, 22 nt, Human
ugaacagaucaauagaacugac

SEQ ID NO: 497926 - RNA, 22 nt, Human
aggcucauucuugccucugagc

SEQ ID NO: 497927 - RNA, 22 nt, Human
agacagcugcucgcagagcuau

SEQ ID NO: 497928 - RNA, 22 nt, Human
ucagggcaucaucaugaauaua

SEQ ID NO: 497929 - RNA, 22 nt, Human
gcucucagguacaaagcugugu

SEQ ID NO: 497930 - RNA, 22 nt, Human
aaacuguaagagaauaaacuac

SEQ ID NO: 497931 - RNA, 22 nt, Human
aacagugcuucauucacacauu

SEQ ID NO: 497932 - RNA, 22 nt, Human
ucaguguugaauuuuuugcaaa

SEQ ID NO: 497933 - RNA, 21 nt, Human
ugaaggagaggaccgagugcu

SEQ ID NO: 497934 - RNA, 22 nt, Human
gcugugcagccaagugccucug

SEQ ID NO: 497935 - RNA, 22 nt, Human
uaccagccuuuuaacaugggcc

SEQ ID NO: 497936 - RNA, 22 nt, Human
caggaacauuuaaccacagggu

SEQ ID NO: 497937 - RNA, 22 nt, Human
aaacauuugcaacucgguuugg

SEQ ID NO: 497938 - RNA, 22 nt, Human
aggcacugacaauucuggacug

SEQ ID NO: 497939 - RNA, 22 nt, Human
uaugaagaaguucugugaaaug

SEQ ID NO: 497940 - RNA, 22 nt, Human
gcucaguguguucaagggcuca

SEQ ID NO: 497941 - RNA, 22 nt, Human
gaagugucuccguuuuuaaagg

SEQ ID NO: 497942 - RNA, 22 nt, Human
gcccuuauaaacaaggcuucag

SEQ ID NO: 497943 - RNA, 22 nt, Human
ccagguggacggcgaguacagg

SEQ ID NO: 497944 - RNA, 22 nt, Human
cucuggagcaccgggcuaucca

SEQ ID NO: 497945 - RNA, 22 nt, Human
cugccucuugacagaucguggc

SEQ ID NO: 497946 - RNA, 19 nt, Human
caggccucuggucugcugu

SEQ ID NO: 497947 - RNA, 22 nt, Human
cagggcaguaccgcccucuggc

SEQ ID NO: 497948 - RNA, 22 nt, Human
uagcagcuccauuucucuggca

SEQ ID NO: 497949 - RNA, 22 nt, Human
cuggggacuugcagacacaauu

SEQ ID NO: 497950 - RNA, 22 nt, Human
aauaagaucuuaaagguuauau

SEQ ID NO: 497951 - RNA, 22 nt, Human
augaaauaucuugaagaaauuc

SEQ ID NO: 497952 - RNA, 22 nt, Human
gcugccacgaucucugcuguag

SEQ ID NO: 497953 - RNA, 22 nt, Human
ccuggugcuuaccagagcuuuu

SEQ ID NO: 497954 - RNA, 22 nt, Human
uagcugcugcagcacagggagg

SEQ ID NO: 497955 - RNA, 22 nt, Human
agcugagcauuugauccaccuc

SEQ ID NO: 497956 - RNA, 22 nt, Human
ggcagagcuuguuccuucuguu

SEQ ID NO: 497957 - RNA, 22 nt, Human
uggagcucaaaggccuguggga

SEQ ID NO: 497958 - RNA, 22 nt, Human
ccagucagccaagcugcagcgg

SEQ ID NO: 497959 - RNA, 22 nt, Human
acagcuggaggccccauugucc

SEQ ID NO: 497960 - RNA, 22 nt, Human
uugucacauguaguucauucuc

SEQ ID NO: 497961 - RNA, 22 nt, Human
acugccuguuuggcauggcccc

SEQ ID NO: 497962 - RNA, 22 nt, Human
cuguaucuguguuggaugaguu

SEQ ID NO: 497963 - RNA, 22 nt, Human
uggcuuccugcacagugucugc

SEQ ID NO: 497964 - RNA, 22 nt, Human
guuauguaugagggaaugauua

SEQ ID NO: 497965 - RNA, 22 nt, Human
ccagcuuuggaguguuguugcu

SEQ ID NO: 497966 - RNA, 22 nt, Human
cacagggcagagaccugggugc

SEQ ID NO: 497967 - RNA, 22 nt, Human
uagaaauguuagauguauugag

SEQ ID NO: 497968 - RNA, 22 nt, Human
uugaagucaguucauauuuuua

SEQ ID NO: 497969 - RNA, 22 nt, Human
augcugagacuggagcagcugg

SEQ ID NO: 497970 - RNA, 23 nt, Human
uaaagugcugauggugagggagc

SEQ ID NO: 497971 - RNA, 22 nt, Human
agcagcauguucauuacauuau

SEQ ID NO: 497972 - RNA, 22 nt, Human
aggaaagacuggggccccagaa

SEQ ID NO: 497973 - RNA, 22 nt, Human
uuccauaauaaccugagagaaa

SEQ ID NO: 497974 - RNA, 22 nt, Human
cagaagucacccucagaauaac

SEQ ID NO: 497975 - RNA, 22 nt, Human
ugcccugugugugcaagcacug

SEQ ID NO: 497976 - RNA, 22 nt, Human
gcuguacauucuguggguuugg

SEQ ID NO: 497977 - RNA, 22 nt, Human
uccuguuucuccugcaaaaucc

SEQ ID NO: 497978 - RNA, 22 nt, Human
uggcagcuguguccagguagaa

SEQ ID NO: 497979 - RNA, 22 nt, Human
caggaguggugugagggacucc

SEQ ID NO: 497980 - RNA, 22 nt, Human
uguacaagcaaauagaccuuca

SEQ ID NO: 497981 - RNA, 22 nt, Human
guggccugccgugugguauggg

SEQ ID NO: 497982 - RNA, 22 nt, Human
ccaggagagcaaaggucacucu

SEQ ID NO: 497983 - RNA, 22 nt, Human
agcucagagauaaucaagagac

SEQ ID NO: 497984 - RNA, 21 nt, Human
uuccucuugcuuccgccuugc

SEQ ID NO: 497985 - RNA, 22 nt, Human
uggcagaguuggagguggaaga

SEQ ID NO: 497986 - RNA, 22 nt, Human
uugauugaauuuugaaaaucua

SEQ ID NO: 497987 - RNA, 19 nt, Human
uggcagggagugauauuag

SEQ ID NO: 497988 - RNA, 22 nt, Human
ugaggcagguaagcaaguuuug

SEQ ID NO: 497989 - RNA, 22 nt, Human
cagggugcagugucgcugcuag

SEQ ID NO: 497990 - RNA, 22 nt, Human
ggagcugcuccuucagccaagu

SEQ ID NO: 497991 - RNA, 22 nt, Human
gaagcuucguggcucuucaaau

SEQ ID NO: 497992 - RNA, 22 nt, Human
gaauacauuggaaaucagaaua

SEQ ID NO: 497993 - RNA, 22 nt, Human
cuucaaaagccagaagccugcg

SEQ ID NO: 497994 - RNA, 22 nt, Human
aguuucucuuugacaccaaaau

SEQ ID NO: 497995 - RNA, 22 nt, Human
gggacagcuguagugcuuggcu

SEQ ID NO: 497996 - RNA, 22 nt, Human
uugauguacagaauuguucaca

SEQ ID NO: 497997 - RNA, 22 nt, Human
ccagucugaggccuggugaggg

SEQ ID NO: 497998 - RNA, 22 nt, Human
guuugccugccgacgcucucau

SEQ ID NO: 497999 - RNA, 22 nt, Human
cagugagauaccacagagcaaa

SEQ ID NO: 498000 - RNA, 22 nt, Human
gaagcuaaugagauaaaugcca

SEQ ID NO: 498001 - RNA, 21 nt, Human
ugcagcagaagucucuguguc

SEQ ID NO: 498002 - RNA, 18 nt, Human
agcaaagcaagagaucac

SEQ ID NO: 498003 - RNA, 22 nt, Human
ugccaaauugcccuauaaauga

SEQ ID NO: 498004 - RNA, 21 nt, Human
uucagcaguccucuagagaua

SEQ ID NO: 498005 - RNA, 22 nt, Human
cagagcucagagcugccaggca

SEQ ID NO: 498006 - RNA, 22 nt, Human
ggaaagagcuaaaagggugaga

SEQ ID NO: 498007 - RNA, 22 nt, Human
uauacaagugagaagaagaguu

SEQ ID NO: 498008 - RNA, 22 nt, Human
gcucucugccauaugaggauac

SEQ ID NO: 498009 - RNA, 22 nt, Human
ggguacaaagauuucauaagau

SEQ ID NO: 498010 - RNA, 22 nt, Human
cugggcccacgagggcucuggg

SEQ ID NO: 498011 - RNA, 22 nt, Human
gucaggauuugaacucaggucu

SEQ ID NO: 498012 - RNA, 21 nt, Human
ucagaggcacugagagcaaug

SEQ ID NO: 498013 - RNA, 22 nt, Human
cugcuugggguuaggguguccu

SEQ ID NO: 498014 - RNA, 22 nt, Human
ggccaccucugcccuaccgagu

SEQ ID NO: 498015 - RNA, 19 nt, Human
aagaagcaauaagcuguga

SEQ ID NO: 498016 - RNA, 22 nt, Human
acaggugggcuuaagagucggc

SEQ ID NO: 498017 - RNA, 22 nt, Human
acuguggcuaauucauuugguc

SEQ ID NO: 498018 - RNA, 22 nt, Human
ggcuuagcaacuccugaggcuc

SEQ ID NO: 498019 - RNA, 22 nt, Human
uggaaagaauuccuaugguuca

SEQ ID NO: 498020 - RNA, 22 nt, Human
uugcugaagugaagguauguuu

SEQ ID NO: 498021 - RNA, 20 nt, Human
aauaaacuacugagagaugu

SEQ ID NO: 498022 - RNA, 22 nt, Human
agcaggugggaucaagcuggca

SEQ ID NO: 498023 - RNA, 22 nt, Human
ucaugaaaauagaucagaaauu

SEQ ID NO: 498024 - RNA, 22 nt, Human
ucagaguguuuuacuaaacaag

SEQ ID NO: 498025 - RNA, 22 nt, Human
gcuguccaugucuggccucagu

SEQ ID NO: 498026 - RNA, 22 nt, Human
uuauuauaaugagggauaaaaa

SEQ ID NO: 498027 - RNA, 22 nt, Human
gcugcugcuugaaggcucggag

SEQ ID NO: 498028 - RNA, 23 nt, Human
auuuuacaggucaguuccuugaa

SEQ ID NO: 498029 - RNA, 22 nt, Human
ggccugagaaccauggggccaa

SEQ ID NO: 498030 - RNA, 22 nt, Human
gggccccugggaauucugugau

SEQ ID NO: 498031 - RNA, 22 nt, Human
uuugucauaucacacaauuuug

SEQ ID NO: 498032 - RNA, 22 nt, Human
aauaauuauuugagagcagacc

SEQ ID NO: 498033 - RNA, 20 nt, Human
uuuauuggccuuucaggaac

SEQ ID NO: 498034 - RNA, 22 nt, Human
auucuauuuuuuaagaaguagu

SEQ ID NO: 498035 - RNA, 22 nt, Human
agcucccagcagagcuggccac

SEQ ID NO: 498036 - RNA, 22 nt, Human
ucugcagcuuuuugguggggug

SEQ ID NO: 498037 - RNA, 22 nt, Human
uccaucauguucacagcuauau

SEQ ID NO: 498038 - RNA, 22 nt, Human
gcugagggcuguaacagcagag

SEQ ID NO: 498039 - RNA, 22 nt, Human
cuccuucccuucaaguguuccu

SEQ ID NO: 498040 - RNA, 22 nt, Human
uggcagcugaggggaggcuuug

SEQ ID NO: 498041 - RNA, 22 nt, Human
aggccuagaggaauggccaggg

SEQ ID NO: 498042 - RNA, 22 nt, Human
gcagggggauggaguugaaaug

SEQ ID NO: 498043 - RNA, 22 nt, Human
ucaccuuagcuagaggaagaga

SEQ ID NO: 498044 - RNA, 22 nt, Human
aguaacuaugcuugagaaucag

SEQ ID NO: 498045 - RNA, 22 nt, Human
aauaugugagguauguucagug

SEQ ID NO: 498046 - RNA, 22 nt, Human
ucaggaagcugcucuggguggu

SEQ ID NO: 498047 - RNA, 22 nt, Human
aacaaauguaaaaugcagaugc

SEQ ID NO: 498048 - RNA, 22 nt, Human
aaaugcauaucaaagacuugaa

SEQ ID NO: 498049 - RNA, 22 nt, Human
guucaaaauucaaaugguauac

SEQ ID NO: 498050 - RNA, 22 nt, Human
cuggcucaccuccgcuccagca

SEQ ID NO: 498051 - RNA, 22 nt, Human
agaucaaaucugggauuucuaa

SEQ ID NO: 498052 - RNA, 22 nt, Human
agggcagagauuaauuaagaca

SEQ ID NO: 498053 - RNA, 22 nt, Human
auacauuagcucauaugauuaa

SEQ ID NO: 498054 - RNA, 22 nt, Human
aaguccauucuuccagccagcu

SEQ ID NO: 498055 - RNA, 22 nt, Human
gccugggauuguguaagugaau

SEQ ID NO: 498056 - RNA, 22 nt, Human
aaagcucacaguaauacaaggc

SEQ ID NO: 498057 - RNA, 20 nt, Human
ugcuuugauggaaauacagc

SEQ ID NO: 498058 - RNA, 20 nt, Human
aggguggggacguucugacu

SEQ ID NO: 498059 - RNA, 22 nt, Human
aaagagaacuuuuacccaagaa

SEQ ID NO: 498060 - RNA, 20 nt, Human
ugugcccaauguccagguuc

SEQ ID NO: 498061 - RNA, 22 nt, Human
cugagauggucucuuuguuacu

SEQ ID NO: 498062 - RNA, 22 nt, Human
uagcugccaaaagggugggcua

SEQ ID NO: 498063 - RNA, 22 nt, Human
ugguuccaaucgcacuggcuca

SEQ ID NO: 498064 - RNA, 22 nt, Human
cuucacauguuggaguccuuug

SEQ ID NO: 498065 - RNA, 22 nt, Human
cccuguggcaggaggaggagca

SEQ ID NO: 498066 - RNA, 22 nt, Human
ggucagcagugcagggcagagc

SEQ ID NO: 498067 - RNA, 22 nt, Human
agccugguguggggcugcagag

SEQ ID NO: 498068 - RNA, 22 nt, Human
ggccagaaguuggaaaagagcc

SEQ ID NO: 498069 - RNA, 22 nt, Human
caaaugugguuucucagcauuc

SEQ ID NO: 498070 - RNA, 22 nt, Human
aucuggcuuaccuagggugccu

SEQ ID NO: 498071 - RNA, 22 nt, Human
ugugcauagacuuucaccaccu

SEQ ID NO: 498072 - RNA, 22 nt, Human
cugggcccaggcggcucucgga

SEQ ID NO: 498073 - RNA, 22 nt, Human
acacaguaugaaaagucuaguu

SEQ ID NO: 498074 - RNA, 22 nt, Human
acagaguaggugcugucgacug

SEQ ID NO: 498075 - RNA, 22 nt, Human
aggucaaguuuagauagaguua

SEQ ID NO: 498076 - RNA, 17 nt, Human
agcuccugcccauggcu

SEQ ID NO: 498077 - RNA, 18 nt, Human
cagaagcaggcagugcag

SEQ ID NO: 498078 - RNA, 22 nt, Human
cacccagcagcacuuaagacua

SEQ ID NO: 498079 - RNA, 22 nt, Human
ugggcugcacccucagccucug

SEQ ID NO: 498080 - RNA, 19 nt, Human
uugaaagauuagcuuucua

SEQ ID NO: 498081 - RNA, 22 nt, Human
uacccagcccaugccuaccuca

SEQ ID NO: 498082 - RNA, 22 nt, Human
aaaggcucuaacaaggagagag

SEQ ID NO: 498083 - RNA, 22 nt, Human
ugcagcagucagucaggccugg

SEQ ID NO: 498084 - RNA, 22 nt, Human
ccaguguuuccccagaagagag

SEQ ID NO: 498085 - RNA, 22 nt, Human
ggauaagaaaauuguaauaacu

SEQ ID NO: 498086 - RNA, 22 nt, Human
aaagcaagucucuacaaaguac

SEQ ID NO: 498087 - RNA, 21 nt, Human
aaacugaccuugccugagaca

SEQ ID NO: 498088 - RNA, 22 nt, Human
uagcuuuccuuguugccugugc

SEQ ID NO: 498089 - RNA, 21 nt, Human
cugcaucucauagaacauguc

SEQ ID NO: 498090 - RNA, 22 nt, Human
ucaauagcauagcaauuaaugu

SEQ ID NO: 498091 - RNA, 17 nt, Human
ugguccagguggagcca

SEQ ID NO: 498092 - RNA, 18 nt, Human
cuuguucuucucuuggcg

SEQ ID NO: 498093 - RNA, 22 nt, Human
ccuccugguccagcaucucuuu

SEQ ID NO: 498094 - RNA, 22 nt, Human
uggcucuggugcgggcuccugc

SEQ ID NO: 498095 - RNA, 22 nt, Human
aaaaaguuucaacugccaacuc

SEQ ID NO: 498096 - RNA, 22 nt, Human
aggcacugugcugaugucuuau

SEQ ID NO: 498097 - RNA, 22 nt, Human
cuggaagggggacagccacaca

SEQ ID NO: 498098 - RNA, 22 nt, Human
aaggcugagguagggccuaaaa

SEQ ID NO: 498099 - RNA, 22 nt, Human
agcaggcuaggaaccucacugc

SEQ ID NO: 498100 - RNA, 22 nt, Human
caguggguggcuaaguggcuga

SEQ ID NO: 498101 - RNA, 22 nt, Human
uccaggcacagaguuggucagu

SEQ ID NO: 498102 - RNA, 22 nt, Human
ugcuccuuccucauccugugca

SEQ ID NO: 498103 - RNA, 19 nt, Human
gggaaauucacuugcuucc

SEQ ID NO: 498104 - RNA, 22 nt, Human
gccagggcaggggagcaucugc

SEQ ID NO: 498105 - RNA, 20 nt, Human
auuucaguguuugcaauuuc

SEQ ID NO: 498106 - RNA, 22 nt, Human
aaacagcugucauuguuuuaaa

SEQ ID NO: 498107 - RNA, 22 nt, Human
cagacuugacggcagcugcuuu

SEQ ID NO: 498108 - RNA, 22 nt, Human
uguuacaaacuguuguuucuau

SEQ ID NO: 498109 - RNA, 22 nt, Human
ugcucagacaagcugaacagua

SEQ ID NO: 498110 - RNA, 22 nt, Human
gcuuuaaaccucuacucugucc

SEQ ID NO: 498111 - RNA, 22 nt, Human
ccacaggggucucuguagcuga

SEQ ID NO: 498112 - RNA, 22 nt, Human
cagggaugggauggagucaguu

SEQ ID NO: 498113 - RNA, 22 nt, Human
uuuccucuucgauuaaguuugg

SEQ ID NO: 498114 - RNA, 22 nt, Human
ugaggcagcccacuuuccuuag

SEQ ID NO: 498115 - RNA, 22 nt, Human
agcuccugcaccaggggccccu

SEQ ID NO: 498116 - RNA, 22 nt, Human
uuugugaauaagagaaugacag

SEQ ID NO: 498117 - RNA, 22 nt, Human
agcaucagcagacucucagcua

SEQ ID NO: 498118 - RNA, 20 nt, Human
gagagcuggaaauaaagucc

SEQ ID NO: 498119 - RNA, 22 nt, Human
uucacaguuuaauggcaaggau

SEQ ID NO: 498120 - RNA, 22 nt, Human
uucaggauccccuugaugggcu

SEQ ID NO: 498121 - RNA, 22 nt, Human
agcuccagaagccugcaaggua

SEQ ID NO: 498122 - RNA, 22 nt, Human
aacauuucagcaaauaagaaca

SEQ ID NO: 498123 - RNA, 22 nt, Human
agcuggagaugcccagcaccgg

SEQ ID NO: 498124 - RNA, 22 nt, Human
ccucagagacaguaacuggaau

SEQ ID NO: 498125 - RNA, 22 nt, Human
cuggggacuuugguucuccaug

SEQ ID NO: 498126 - RNA, 22 nt, Human
agacauggagaaggagccagug

SEQ ID NO: 498127 - RNA, 22 nt, Human
agccagcaggugagugcagccu

SEQ ID NO: 498128 - RNA, 20 nt, Human
ccagcuuucccugcagcauc

SEQ ID NO: 498129 - RNA, 22 nt, Human
uguccaguccuuggggugcugu

SEQ ID NO: 498130 - RNA, 22 nt, Human
agcuuuaucccuugcccaucga

SEQ ID NO: 498131 - RNA, 22 nt, Human
aguguuccuugcuuucccagag

SEQ ID NO: 498132 - RNA, 22 nt, Human
aggucauugaaguuauuuucuu

SEQ ID NO: 498133 - RNA, 21 nt, Human
gcagcaguguucuagaauacu

SEQ ID NO: 498134 - RNA, 22 nt, Human
ggccacaacuugcuccuagccc

SEQ ID NO: 498135 - RNA, 22 nt, Human
acagaauacuacagacugguua

SEQ ID NO: 498136 - RNA, 22 nt, Human
aucauacagccuuuguuagugu

SEQ ID NO: 498137 - RNA, 22 nt, Human
acacucuguaaugucacacucc

SEQ ID NO: 498138 - RNA, 22 nt, Human
gcaguguugagccagcuggggg

SEQ ID NO: 498139 - RNA, 22 nt, Human
cacugaagccacuggaagagga

SEQ ID NO: 498140 - RNA, 22 nt, Human
gccugccaguguuugaggauug

SEQ ID NO: 498141 - RNA, 22 nt, Human
gaccacagacuggaaagagggc

SEQ ID NO: 498142 - RNA, 22 nt, Human
gcacaggaaaugacucauguua

SEQ ID NO: 498143 - RNA, 22 nt, Human
uccagggccaagucauggaacc

SEQ ID NO: 498144 - RNA, 22 nt, Human
ugcuucagugugucauuauuua

SEQ ID NO: 498145 - RNA, 22 nt, Human
cagagcggccacuagagggcgc

SEQ ID NO: 498146 - RNA, 22 nt, Human
ccugggcucacagccaaggcuc

SEQ ID NO: 498147 - RNA, 22 nt, Human
cugccucuauaggaguccacca

SEQ ID NO: 498148 - RNA, 22 nt, Human
uuucuaaaugguggcugcauug

SEQ ID NO: 498149 - RNA, 22 nt, Human
gcucccugaaaagaacaaaguc

SEQ ID NO: 498150 - RNA, 18 nt, Human
acauuucucucugcguga

SEQ ID NO: 498151 - RNA, 21 nt, Human
caggccccaggccuggggugc

SEQ ID NO: 498152 - RNA, 22 nt, Human
aauguguacuuuuucaugcuca

SEQ ID NO: 498153 - RNA, 22 nt, Human
gcuuucuugguucugcaggggc

SEQ ID NO: 498154 - RNA, 18 nt, Human
ccaaggccccugcugggg

SEQ ID NO: 498155 - RNA, 22 nt, Human
ucacagaaauaagauaguuauu

SEQ ID NO: 498156 - RNA, 22 nt, Human
augagguaauacuuucaguccu

SEQ ID NO: 498157 - RNA, 22 nt, Human
uucagcacaguucaagauggua

SEQ ID NO: 498158 - RNA, 22 nt, Human
uuaauuacaaaacacauagguu

SEQ ID NO: 498159 - RNA, 22 nt, Human
auaugcaagcacauagaauacu

SEQ ID NO: 498160 - RNA, 22 nt, Human
cucccaggguagggagagacua

SEQ ID NO: 498161 - RNA, 22 nt, Human
cagaugaggcaaccucauugcu

SEQ ID NO: 498162 - RNA, 22 nt, Human
ggugaaggaggaagcugaugga

SEQ ID NO: 498163 - RNA, 22 nt, Human
aggaaucaggagaugagcacgg

SEQ ID NO: 498164 - RNA, 22 nt, Human
gugcccugugaacuguaaggaa

SEQ ID NO: 498165 - RNA, 22 nt, Human
uuucucauagucaugccucuua

SEQ ID NO: 498166 - RNA, 22 nt, Human
gcaggggcugcugggaacucgg

SEQ ID NO: 498167 - RNA, 19 nt, Human
acauuuaaauucagaucuc

SEQ ID NO: 498168 - RNA, 22 nt, Human
uagauaugaugagucacuugag

SEQ ID NO: 498169 - RNA, 22 nt, Human
uggccuggcugcccugucugga

SEQ ID NO: 498170 - RNA, 22 nt, Human
ggcuuuauuucacuguaccaua

SEQ ID NO: 498171 - RNA, 22 nt, Human
aaaugugucaguuucauucucu

SEQ ID NO: 498172 - RNA, 22 nt, Human
uagggcaguuauaacauuagug

SEQ ID NO: 498173 - RNA, 22 nt, Human
uaaguucucaauacauuguagc

SEQ ID NO: 498174 - RNA, 22 nt, Human
agcagccaaccuuacauucauc

SEQ ID NO: 498175 - RNA, 22 nt, Human
gccagcagcccagaaggacuuu

SEQ ID NO: 498176 - RNA, 22 nt, Human
acagauuuauugaagcugcugc

SEQ ID NO: 498177 - RNA, 23 nt, Human
ccaggcucuuucaccugcuauuc

SEQ ID NO: 498178 - RNA, 22 nt, Human
gccgaagcugccgucugguccu

SEQ ID NO: 498179 - RNA, 22 nt, Human
uaagaugguuguagauggacug

SEQ ID NO: 498180 - RNA, 22 nt, Human
uauuucuggcuuugagggugau

SEQ ID NO: 498181 - RNA, 22 nt, Human
guggagccaggaucuccgcaca

SEQ ID NO: 498182 - RNA, 22 nt, Human
cauggccagcccugagguucag

SEQ ID NO: 498183 - RNA, 22 nt, Human
auuuccaguccuaaugaucugg

SEQ ID NO: 498184 - RNA, 22 nt, Human
aaaagacaucuauuucaggcag

SEQ ID NO: 498185 - RNA, 22 nt, Human
gauuuauugucccuguccugcu

SEQ ID NO: 498186 - RNA, 22 nt, Human
cauucaaacauuaauuuauuca

SEQ ID NO: 498187 - RNA, 22 nt, Human
ugcaggugucugggggcaacag

SEQ ID NO: 498188 - RNA, 22 nt, Human
auguaucaugcaggguccauga

SEQ ID NO: 498189 - RNA, 22 nt, Human
agcagcagaucaaacaggcuug

SEQ ID NO: 498190 - RNA, 22 nt, Human
gggaagaagacauggugaaggc

SEQ ID NO: 498191 - RNA, 22 nt, Human
caccagguggaaaugucacagc

SEQ ID NO: 498192 - RNA, 22 nt, Human
gagccugggacugggggucaug

SEQ ID NO: 498193 - RNA, 22 nt, Human
agggcugcugaggaagccuugc

SEQ ID NO: 498194 - RNA, 22 nt, Human
caguuucuguuuuaaauagcag

SEQ ID NO: 498195 - RNA, 22 nt, Human
accagagcuuacaugcuagaaa

SEQ ID NO: 498196 - RNA, 22 nt, Human
aaucaguuaggguguuaaugag

SEQ ID NO: 498197 - RNA, 22 nt, Human
agagccugugggagaugcagcu

SEQ ID NO: 498198 - RNA, 22 nt, Human
uccaggcauuccagccauucca

SEQ ID NO: 498199 - RNA, 22 nt, Human
gggcuccaacggugagcaugga

SEQ ID NO: 498200 - RNA, 22 nt, Human
agggccugggccagcacccuuu

SEQ ID NO: 498201 - RNA, 22 nt, Human
aaagcuucuauucacuuacuug

SEQ ID NO: 498202 - RNA, 22 nt, Human
ggaaggaggggcaaagcaguuc

SEQ ID NO: 498203 - RNA, 22 nt, Human
gcugccucugcacagcucacuc

SEQ ID NO: 498204 - RNA, 18 nt, Human
ggcugccuguuccugaag

SEQ ID NO: 498205 - RNA, 22 nt, Human
acagauuuaggacuguagcgau

SEQ ID NO: 498206 - RNA, 22 nt, Human
ugaugaaaauaugauucugagg

SEQ ID NO: 498207 - RNA, 22 nt, Human
caaaguuaugaaugauaagauu

SEQ ID NO: 498208 - RNA, 22 nt, Human
ugcuggcccaugaagacgcagu

SEQ ID NO: 498209 - RNA, 22 nt, Human
agucagugaaaacuagaauguu

SEQ ID NO: 498210 - RNA, 22 nt, Human
cauuuauucaugaucuguagcu

SEQ ID NO: 498211 - RNA, 22 nt, Human
uggccucugggaaagcagauuc

SEQ ID NO: 498212 - RNA, 16 nt, Human
ccucuggcaauuagau

SEQ ID NO: 498213 - RNA, 22 nt, Human
aagggcuggaucucucugagca

SEQ ID NO: 498214 - RNA, 22 nt, Human
gggaaggcagugggaggaacug

SEQ ID NO: 498215 - RNA, 19 nt, Human
cagaguacaccagauagga

SEQ ID NO: 498216 - RNA, 20 nt, Human
aguaggggaaugcaagagca

SEQ ID NO: 498217 - RNA, 22 nt, Human
ugugagucuaggucaggguguu

SEQ ID NO: 498218 - RNA, 22 nt, Human
cggcaggugugcucacucugcc

SEQ ID NO: 498219 - RNA, 22 nt, Human
acaagagauuaucuacagauga

SEQ ID NO: 498220 - RNA, 22 nt, Human
gugaauaacuuucuauguuaau

SEQ ID NO: 498221 - RNA, 22 nt, Human
ggcagcuguggacgucgucauu

SEQ ID NO: 498222 - RNA, 21 nt, Human
agcaggucuacagguucauag

SEQ ID NO: 498223 - RNA, 22 nt, Human
cuggccagaguuggagggugug

SEQ ID NO: 498224 - RNA, 22 nt, Human
uggcuucaucugcagcacugcc

SEQ ID NO: 498225 - RNA, 18 nt, Human
gaaagugcggggcagggg

SEQ ID NO: 498226 - RNA, 22 nt, Human
aauaaaauggucaguuuucuca

SEQ ID NO: 498227 - RNA, 22 nt, Human
cugagccagcuggcaugugcua

SEQ ID NO: 498228 - RNA, 22 nt, Human
aacagaacccgagugugaaucu

SEQ ID NO: 498229 - RNA, 22 nt, Human
uuuguguaccuuguacauuugu

SEQ ID NO: 498230 - RNA, 22 nt, Human
aagaauguucuuguagucauga

SEQ ID NO: 498231 - RNA, 20 nt, Human
cuggccagaacgccuacaca

SEQ ID NO: 498232 - RNA, 22 nt, Human
aggucagguaucagcagguauu

SEQ ID NO: 498233 - RNA, 22 nt, Human
uuccaagugggggaagcugagu

SEQ ID NO: 498234 - RNA, 22 nt, Human
ugggcagauuaaugcaguggcu

SEQ ID NO: 498235 - RNA, 22 nt, Human
caugagagauccuucaugagag

SEQ ID NO: 498236 - RNA, 22 nt, Human
gggaaagaccuuccuggggugu

SEQ ID NO: 498237 - RNA, 22 nt, Human
aaugcacaugucuuggccucac

SEQ ID NO: 498238 - RNA, 21 nt, Human
aaguaaaucagagaaauaacc

SEQ ID NO: 498239 - RNA, 23 nt, Human
ggcacugaagcuacaauggugag

SEQ ID NO: 498240 - RNA, 22 nt, Human
uuuagggaaauugaggguuaag

SEQ ID NO: 498241 - RNA, 22 nt, Human
ccagaggcuggggaaggauaca

SEQ ID NO: 498242 - RNA, 22 nt, Human
ucaccugggagggcugugguag

SEQ ID NO: 498243 - RNA, 22 nt, Human
gccccagguugccugucccagg

SEQ ID NO: 498244 - RNA, 22 nt, Human
cugcugguuagucuuaguggga

SEQ ID NO: 498245 - RNA, 23 nt, Human
uacagaaggaguagucacuaaga

SEQ ID NO: 498246 - RNA, 22 nt, Human
cugugaaugcuaguaagagugc

SEQ ID NO: 498247 - RNA, 22 nt, Human
aagaauucacugguagagucaa

SEQ ID NO: 498248 - RNA, 22 nt, Human
cugaggaugguguggucuucuc

SEQ ID NO: 498249 - RNA, 22 nt, Human
ugccagaagugcuuuauaagug

SEQ ID NO: 498250 - RNA, 22 nt, Human
ugaagcaggaucguuugcuuca

SEQ ID NO: 498251 - RNA, 22 nt, Human
agugagggaugaagaacugcgg

SEQ ID NO: 498252 - RNA, 21 nt, Human
cagcccagcccauugacagug

SEQ ID NO: 498253 - RNA, 22 nt, Human
cagggagcuggugccagccgac

SEQ ID NO: 498254 - RNA, 23 nt, Human
ucuccuggcugcacuguggccac

SEQ ID NO: 498255 - RNA, 22 nt, Human
gaauauauuucucuuaccuuua

SEQ ID NO: 498256 - RNA, 22 nt, Human
gcugcugggggaacaguuaaaa

SEQ ID NO: 498257 - RNA, 19 nt, Human
augagcuggcauuucaggu

SEQ ID NO: 498258 - RNA, 22 nt, Human
cccaggcagucuggcucuaaag

SEQ ID NO: 498259 - RNA, 22 nt, Human
gcacagccacguaaugugguca

SEQ ID NO: 498260 - RNA, 22 nt, Human
acauuucuaauuuaauguaaca

SEQ ID NO: 498261 - RNA, 19 nt, Human
cuggcugcaaugccagggu

SEQ ID NO: 498262 - RNA, 22 nt, Human
gaauuacaugacccugaguaga

SEQ ID NO: 498263 - RNA, 22 nt, Human
acuuugaaggggaacauuuuaa

SEQ ID NO: 498264 - RNA, 22 nt, Human
agggcucccgugaggugacugc

SEQ ID NO: 498265 - RNA, 22 nt, Human
uauguaaaguagauggcaggua

SEQ ID NO: 498266 - RNA, 22 nt, Human
cuuugcuugacacugugauugu

SEQ ID NO: 498267 - RNA, 22 nt, Human
cagagccaaaccucagggcccg

SEQ ID NO: 498268 - RNA, 22 nt, Human
gaggccacagcuaucagggaca

SEQ ID NO: 498269 - RNA, 22 nt, Human
gucccagaggacagggucacau

SEQ ID NO: 498270 - RNA, 23 nt, Human
ugugaauugaggacaucaaaagc

SEQ ID NO: 498271 - RNA, 22 nt, Human
cacuggggaaaacaggcuucuu

SEQ ID NO: 498272 - RNA, 22 nt, Human
uuuuucauugcagccucucucc

SEQ ID NO: 498273 - RNA, 22 nt, Human
gcuggccauagaagccaaagag

SEQ ID NO: 498274 - RNA, 22 nt, Human
ucuuuaauuguggaagagcagc

SEQ ID NO: 498275 - RNA, 17 nt, Human
aagcauuuaauuugcua

SEQ ID NO: 498276 - RNA, 22 nt, Human
caaaguccauaguuuacaauag

SEQ ID NO: 498277 - RNA, 22 nt, Human
ggaggcuccacugcucuuccug

SEQ ID NO: 498278 - RNA, 22 nt, Human
uccaggaggaggaaggcugcca

SEQ ID NO: 498279 - RNA, 22 nt, Human
gcauugaauccuaucaggcaaa

SEQ ID NO: 498280 - RNA, 18 nt, Human
ugcuuuaugcuuauauaa

SEQ ID NO: 498281 - RNA, 22 nt, Human
ggagucuguuuuacaugcagga

SEQ ID NO: 498282 - RNA, 22 nt, Human
aguaugaacggaaggccuggga

SEQ ID NO: 498283 - RNA, 21 nt, Human
agguggagugcuuagcaucca

SEQ ID NO: 498284 - RNA, 20 nt, Human
uccagggcaacuagagugug

SEQ ID NO: 498285 - RNA, 22 nt, Human
uugcucuguaauaaucuggggu

SEQ ID NO: 498286 - RNA, 19 nt, Human
gcuccuggaugaccugugg

SEQ ID NO: 498287 - RNA, 22 nt, Human
uccugcagaccucagucagguc

SEQ ID NO: 498288 - RNA, 22 nt, Human
gucacuggggccacaugcagaa

SEQ ID NO: 498289 - RNA, 22 nt, Human
cacacacugacaccuuaucuug

SEQ ID NO: 498290 - RNA, 23 nt, Human
cugcagagaacugagggacagcc

SEQ ID NO: 498291 - RNA, 22 nt, Human
agacucaagcagauaggaauua

SEQ ID NO: 498292 - RNA, 22 nt, Human
ggaggccuagccagcuccaguu

SEQ ID NO: 498293 - RNA, 22 nt, Human
aagaacaacugcuuuaaaagca

SEQ ID NO: 498294 - RNA, 22 nt, Human
aaaugucaaggugauagaugca

SEQ ID NO: 498295 - RNA, 22 nt, Human
aauuucaaguggcaucuuugau

SEQ ID NO: 498296 - RNA, 21 nt, Human
acagauuuuauaucucugcug

SEQ ID NO: 498297 - RNA, 22 nt, Human
ggcuggccucaggguccucgcu

SEQ ID NO: 498298 - RNA, 22 nt, Human
gcagguguggaguggggugagc

SEQ ID NO: 498299 - RNA, 22 nt, Human
gccugugcuguucccucugcca

SEQ ID NO: 498300 - RNA, 22 nt, Human
caggugaagaggauaaaaaguu

SEQ ID NO: 498301 - RNA, 22 nt, Human
ccucaggggcuuuucguuguug

SEQ ID NO: 498302 - RNA, 22 nt, Human
ucgagucauguucucccauuaa

SEQ ID NO: 498303 - RNA, 22 nt, Human
gugcaaguccagaaagaacucu

SEQ ID NO: 498304 - RNA, 23 nt, Human
cauaugaauuuuagaggcaguuu

SEQ ID NO: 498305 - RNA, 22 nt, Human
agcuuuggagacugacuccauc

SEQ ID NO: 498306 - RNA, 22 nt, Human
uuggaggacuaguuaagagacc

SEQ ID NO: 498307 - RNA, 18 nt, Human
acagcagguuucauucuu

SEQ ID NO: 498308 - RNA, 22 nt, Human
uagccuucucaagacaaaguug

SEQ ID NO: 498309 - RNA, 22 nt, Human
guguccugcauuggcucugccc

SEQ ID NO: 498310 - RNA, 22 nt, Human
ccucagugcguacugaacagug

SEQ ID NO: 498311 - RNA, 22 nt, Human
cacugcauggaugauggcugua

SEQ ID NO: 498312 - RNA, 22 nt, Human
caggcugucugaauggaggccc

SEQ ID NO: 498313 - RNA, 22 nt, Human
cagaggaggccaccgcauaggc

SEQ ID NO: 498314 - RNA, 22 nt, Human
guggagcccugguagggacccc

SEQ ID NO: 498315 - RNA, 22 nt, Human
gcagugcuuuagucuguccuuu

SEQ ID NO: 498316 - RNA, 22 nt, Human
ccugccugcaaaaugggacaag

SEQ ID NO: 498317 - RNA, 22 nt, Human
ugggcagugagaaaggucaggu

SEQ ID NO: 498318 - RNA, 22 nt, Human
uuuucauuuacauuagggaaga

SEQ ID NO: 498319 - RNA, 22 nt, Human
uuagccauauagaaaaagagcu

SEQ ID NO: 498320 - RNA, 22 nt, Human
agcaggcaccagggcucguccu

SEQ ID NO: 498321 - RNA, 22 nt, Human
gggcuggcucccagguguugaa

SEQ ID NO: 498322 - RNA, 23 nt, Human
uucuuauuuacuuuggaaucucc

SEQ ID NO: 498323 - RNA, 22 nt, Human
uggccaguagauaggcaggcaa

SEQ ID NO: 498324 - RNA, 22 nt, Human
aaaguguagagacuuuggaacc

SEQ ID NO: 498325 - RNA, 22 nt, Human
cuggcucaugugaugagggcaa

SEQ ID NO: 498326 - RNA, 22 nt, Human
augauguuaccaguacuuagag

SEQ ID NO: 498327 - RNA, 22 nt, Human
ugugccugugacagcgaccugg

SEQ ID NO: 498328 - RNA, 22 nt, Human
augcuucagugcuaccuucaaa

SEQ ID NO: 498329 - RNA, 19 nt, Human
cagagcagugguuccugaa

SEQ ID NO: 498330 - RNA, 22 nt, Human
uaaauguauaggcacuaaaccu

SEQ ID NO: 498331 - RNA, 22 nt, Human
ccaacaguccagaugagauggu

SEQ ID NO: 498332 - RNA, 22 nt, Human
cugggcugagccugggcugugu

SEQ ID NO: 498333 - RNA, 22 nt, Human
ccagcuuuucuuaucauuauaa

SEQ ID NO: 498334 - RNA, 22 nt, Human
augaaggcuguguggagccccc

SEQ ID NO: 498335 - RNA, 22 nt, Human
aggaaauguaguccucaucucc

SEQ ID NO: 498336 - RNA, 22 nt, Human
uagguucacacaucuuccagau

SEQ ID NO: 498337 - RNA, 22 nt, Human
ugcaggagaaaguacggagcgu

SEQ ID NO: 498338 - RNA, 22 nt, Human
uggcagagaacacacaugauuc

SEQ ID NO: 498339 - RNA, 22 nt, Human
ucuauuuuauacucaaaucuuc

SEQ ID NO: 498340 - RNA, 20 nt, Human
cucauguggcaccaggcacu

SEQ ID NO: 498341 - RNA, 22 nt, Human
cugggcaggagaggugguugga

SEQ ID NO: 498342 - RNA, 22 nt, Human
aagauuuccuggauguaauucc

SEQ ID NO: 498343 - RNA, 22 nt, Human
uagaggccugaaagaaugauca

SEQ ID NO: 498344 - RNA, 22 nt, Human
cccaggguagcugagcuggcag

SEQ ID NO: 498345 - RNA, 22 nt, Human
agaaaucuuugaaguguaaugu

SEQ ID NO: 498346 - RNA, 22 nt, Human
ccaggcugaauauguuccaggg

SEQ ID NO: 498347 - RNA, 22 nt, Human
ucuccaggccuuucccaucuua

SEQ ID NO: 498348 - RNA, 22 nt, Human
ggaggagcacuugacggggucu

SEQ ID NO: 498349 - RNA, 22 nt, Human
cagagggaccagaacauacugu

SEQ ID NO: 498350 - RNA, 22 nt, Human
ugucugaaucucgguuuccuca

SEQ ID NO: 498351 - RNA, 19 nt, Human
aaaguuuuauucucauuug

SEQ ID NO: 498352 - RNA, 22 nt, Human
ugcuucugaacucagcaugugg

SEQ ID NO: 498353 - RNA, 22 nt, Human
uauguacauguuaaagggcaaa

SEQ ID NO: 498354 - RNA, 22 nt, Human
cacagcaauagcuaacugauac

SEQ ID NO: 498355 - RNA, 22 nt, Human
cccagagccucauucuguuggg

SEQ ID NO: 498356 - RNA, 22 nt, Human
gaaggccaguuuugagauaggu

SEQ ID NO: 498357 - RNA, 22 nt, Human
uucaauucugcucugaucuuag

SEQ ID NO: 498358 - RNA, 22 nt, Human
cagcacaucuucugaucuuuug

SEQ ID NO: 498359 - RNA, 22 nt, Human
ucagcuuuccugcagcuaaggg

SEQ ID NO: 498360 - RNA, 22 nt, Human
acuuuccuagacuucagugaca

SEQ ID NO: 498361 - RNA, 22 nt, Human
ggcaggcugggugucauggagu

SEQ ID NO: 498362 - RNA, 22 nt, Human
ucaaagcaugguuuugaaagac

SEQ ID NO: 498363 - RNA, 22 nt, Human
ucaguauccacaaaugcucaaa

SEQ ID NO: 498364 - RNA, 22 nt, Human
guucaaguucauaucucuuaac

SEQ ID NO: 498365 - RNA, 22 nt, Human
ggugcaggagcggggugcucgg

SEQ ID NO: 498366 - RNA, 22 nt, Human
cauuuggaccaaaauagccaac

SEQ ID NO: 498367 - RNA, 19 nt, Human
auaaggcaggaggaaauuu

SEQ ID NO: 498368 - RNA, 22 nt, Human
agcaucugcauauugggagacc

SEQ ID NO: 498369 - RNA, 22 nt, Human
cuguauuucccacauucucuau

SEQ ID NO: 498370 - RNA, 22 nt, Human
gaagcccuauccucuccuggga

SEQ ID NO: 498371 - RNA, 22 nt, Human
gggcuggaggaccggccucgga

SEQ ID NO: 498372 - RNA, 22 nt, Human
ccaggagcaacuugaaggcaag

SEQ ID NO: 498373 - RNA, 22 nt, Human
aacagcuugaggaauaucauca

SEQ ID NO: 498374 - RNA, 22 nt, Human
ugcugaauuaaacucuaugugg

SEQ ID NO: 498375 - RNA, 20 nt, Human
caggccagagguuugauggc

SEQ ID NO: 498376 - RNA, 22 nt, Human
aagcuuggaagucuuccuuuca

SEQ ID NO: 498377 - RNA, 22 nt, Human
cagaccuggaaaacaggcuugc

SEQ ID NO: 498378 - RNA, 22 nt, Human
ccagugcgcaggcgccaccugu

SEQ ID NO: 498379 - RNA, 22 nt, Human
caaggccaagguuuugugaacu

SEQ ID NO: 498380 - RNA, 22 nt, Human
auguuuuauauuuugcagcagu

SEQ ID NO: 498381 - RNA, 22 nt, Human
ccuggcucucugcagauccugg

SEQ ID NO: 498382 - RNA, 22 nt, Human
agagaggcugcuggacuauaug

SEQ ID NO: 498383 - RNA, 22 nt, Human
cuucugggauuuuugaagacuc

SEQ ID NO: 498384 - RNA, 22 nt, Human
gguccuugggucuccuguguuu

SEQ ID NO: 498385 - RNA, 22 nt, Human
auuauucaaucauauuaaaagu

SEQ ID NO: 498386 - RNA, 22 nt, Human
caggaggaacaagagguucugg

SEQ ID NO: 498387 - RNA, 20 nt, Human
cccagggaccugagcuccau

SEQ ID NO: 498388 - RNA, 23 nt, Human
ucuuuacauacugaugaguucuc

SEQ ID NO: 498389 - RNA, 22 nt, Human
gugccaaaagcuauaauuuggu

SEQ ID NO: 498390 - RNA, 22 nt, Human
gccuggagaccugcuccucuac

SEQ ID NO: 498391 - RNA, 22 nt, Human
cagggcugguuugucgaagaaa

SEQ ID NO: 498392 - RNA, 22 nt, Human
gacacagagcucacagucuccu

SEQ ID NO: 498393 - RNA, 22 nt, Human
gcuuaguggugugcaaaggggu

SEQ ID NO: 498394 - RNA, 22 nt, Human
aucgagggugaguacagcggac

SEQ ID NO: 498395 - RNA, 22 nt, Human
agagggggaaaauagagguguu

SEQ ID NO: 498396 - RNA, 22 nt, Human
gccagcaaagcaaguugucagc

SEQ ID NO: 498397 - RNA, 21 nt, Human
cuugaaagguagagucuacag

SEQ ID NO: 498398 - RNA, 22 nt, Human
uguggcugggaagaagguaacu

SEQ ID NO: 498399 - RNA, 22 nt, Human
ucaguguucagcggugugugca

SEQ ID NO: 498400 - RNA, 22 nt, Human
uggggacacagagguucguugg

SEQ ID NO: 498401 - RNA, 22 nt, Human
auauuuguugaguucuuaugau

SEQ ID NO: 498402 - RNA, 22 nt, Human
gaaugaguuaauauuugcuugg

SEQ ID NO: 498403 - RNA, 22 nt, Human
agguucaguaaauguuaguuga

SEQ ID NO: 498404 - RNA, 22 nt, Human
ugcauugauagaaaaacaugga

SEQ ID NO: 498405 - RNA, 22 nt, Human
aauggcucugauguuguuguga

SEQ ID NO: 498406 - RNA, 22 nt, Human
uuaucugucuaucaagacuagc

SEQ ID NO: 498407 - RNA, 22 nt, Human
auuuccauguccaaaaauuagu

SEQ ID NO: 498408 - RNA, 22 nt, Human
aguugaaauuagaguccuggcu

SEQ ID NO: 498409 - RNA, 22 nt, Human
acaauuccacauggcaugcagg

SEQ ID NO: 498410 - RNA, 22 nt, Human
cucuuuccaggguaccccaggu

SEQ ID NO: 498411 - RNA, 22 nt, Human
uuuuuccuagcgauuugucagc

SEQ ID NO: 498412 - RNA, 22 nt, Human
uuuucaggugcaguaaucauau

SEQ ID NO: 498413 - RNA, 22 nt, Human
cugugaggcccugggugcugga

SEQ ID NO: 498414 - RNA, 22 nt, Human
ucagugcauuaauaauaucagu

SEQ ID NO: 498415 - RNA, 18 nt, Human
guccauggccuccaccca

SEQ ID NO: 498416 - RNA, 22 nt, Human
agggcagagggugccucaccug

SEQ ID NO: 498417 - RNA, 22 nt, Human
gugcuuccaucuagagggucac

SEQ ID NO: 498418 - RNA, 22 nt, Human
accuggagaaagccucucccug

SEQ ID NO: 498419 - RNA, 22 nt, Human
auggccugggcccgcuucagau

SEQ ID NO: 498420 - RNA, 22 nt, Human
ucuuucuacaucauuugcuucu

SEQ ID NO: 498421 - RNA, 21 nt, Human
ugccagcauguaggcuaguug

SEQ ID NO: 498422 - RNA, 22 nt, Human
gcaguguucagugaagcaggag

SEQ ID NO: 498423 - RNA, 22 nt, Human
uuagccauuaauguccugugca

SEQ ID NO: 498424 - RNA, 23 nt, Human
uggagaauucuuccuuccacugu

SEQ ID NO: 498425 - RNA, 22 nt, Human
cugugggaugggaccucagcug

SEQ ID NO: 498426 - RNA, 22 nt, Human
augaaauguaugagucuggguu

SEQ ID NO: 498427 - RNA, 22 nt, Human
ugugacagccaguaaaguaagc

SEQ ID NO: 498428 - RNA, 19 nt, Human
uguccuguccugcucugac

SEQ ID NO: 498429 - RNA, 22 nt, Human
gaggccugguuuccagcauccu

SEQ ID NO: 498430 - RNA, 23 nt, Human
cagaugugcaacucuaggcaaug

SEQ ID NO: 498431 - RNA, 22 nt, Human
ugggaugggaucucgcuguguc

SEQ ID NO: 498432 - RNA, 22 nt, Human
aacagugucaggauuacagaua

SEQ ID NO: 498433 - RNA, 22 nt, Human
gagccuguguuuccuguagcca

SEQ ID NO: 498434 - RNA, 22 nt, Human
guugcugaaggcaugccagaga

SEQ ID NO: 498435 - RNA, 22 nt, Human
uuccaggauggcaauaaugaau

SEQ ID NO: 498436 - RNA, 22 nt, Human
cggggacacacuggcagcuccu

SEQ ID NO: 498437 - RNA, 22 nt, Human
ugucagggcuggacacagcugc

SEQ ID NO: 498438 - RNA, 22 nt, Human
ugggcagaggcagcagaaaccu

SEQ ID NO: 498439 - RNA, 22 nt, Human
aucucagggcuggagcccugga

SEQ ID NO: 498440 - RNA, 22 nt, Human
agggcagaaguacagacacuua

SEQ ID NO: 498441 - RNA, 22 nt, Human
agacuuugagcucuuagagaag

SEQ ID NO: 498442 - RNA, 22 nt, Human
gcuuucuaggcagagaugacug

SEQ ID NO: 498443 - RNA, 22 nt, Human
uauuccagugugaucuuuguag

SEQ ID NO: 498444 - RNA, 23 nt, Human
aagaguuuagagucuugcagagu

SEQ ID NO: 498445 - RNA, 22 nt, Human
uauuuugacgauuuuaugcaaa

SEQ ID NO: 498446 - RNA, 21 nt, Human
acagagcauaaugguguggca

SEQ ID NO: 498447 - RNA, 22 nt, Human
uaguagcaggaaucugaaggua

SEQ ID NO: 498448 - RNA, 22 nt, Human
guccuucaagguccuuggugug

SEQ ID NO: 498449 - RNA, 22 nt, Human
accugggauggggccagguuua

SEQ ID NO: 498450 - RNA, 22 nt, Human
uuucagaugcaauuaauuuuca

SEQ ID NO: 498451 - RNA, 22 nt, Human
ugucuucaguaaaauacacuau

SEQ ID NO: 498452 - RNA, 18 nt, Human
cagaugagaugcaaucuc

SEQ ID NO: 498453 - RNA, 22 nt, Human
ugaugguuuuauuaauaggacc

SEQ ID NO: 498454 - RNA, 22 nt, Human
uggggaggacgggcgccuuccu

SEQ ID NO: 498455 - RNA, 22 nt, Human
acauggaagcaaaguucuauuu

SEQ ID NO: 498456 - RNA, 22 nt, Human
auacagaacucucaguuguaua

SEQ ID NO: 498457 - RNA, 22 nt, Human
gcccaggccggagagcagugcu

SEQ ID NO: 498458 - RNA, 22 nt, Human
gaaaauguuagcuucauaguca

SEQ ID NO: 498459 - RNA, 22 nt, Human
aaaaagauguccugaaguuuag

SEQ ID NO: 498460 - RNA, 22 nt, Human
gcugugugaaaacugggccugg

SEQ ID NO: 498461 - RNA, 22 nt, Human
ggcacugaaccaggacacaagc

SEQ ID NO: 498462 - RNA, 22 nt, Human
cuaguucugccauucaguguca

SEQ ID NO: 498463 - RNA, 22 nt, Human
ggccuccuguuggcuaguguga

SEQ ID NO: 498464 - RNA, 22 nt, Human
aucuggaauccuuguggacaau

SEQ ID NO: 498465 - RNA, 18 nt, Human
acagaacucaggggcacc

SEQ ID NO: 498466 - RNA, 22 nt, Human
gcugagcugaggcagggcuggg

SEQ ID NO: 498467 - RNA, 22 nt, Human
cuggcagcaguuaugaaacaau

SEQ ID NO: 498468 - RNA, 22 nt, Human
cuguccuugcuggccagguaug

SEQ ID NO: 498469 - RNA, 22 nt, Human
cccagccugaucucggccagcu

SEQ ID NO: 498470 - RNA, 22 nt, Human
uccugggcacaagugagucucc

SEQ ID NO: 498471 - RNA, 22 nt, Human
ugggccacaagccaugggacca

SEQ ID NO: 498472 - RNA, 22 nt, Human
uguguauuaccauuuuacagcu

SEQ ID NO: 498473 - RNA, 22 nt, Human
aaagaacaaauuagcuguuuua

SEQ ID NO: 498474 - RNA, 17 nt, Human
uggcuucccugggccac

SEQ ID NO: 498475 - RNA, 17 nt, Human
auguaagaagaaagcag

SEQ ID NO: 498476 - RNA, 22 nt, Human
gaggguggggaauagacugcua

SEQ ID NO: 498477 - RNA, 22 nt, Human
uacacauguauuuauguguaca

SEQ ID NO: 498478 - RNA, 22 nt, Human
ggccccacgggggaguccuagu

SEQ ID NO: 498479 - RNA, 22 nt, Human
cggcuggguagaggugccgggu

SEQ ID NO: 498480 - RNA, 22 nt, Human
acagaugaugugcacagauaga

SEQ ID NO: 498481 - RNA, 22 nt, Human
agagaggcauucggugauccca

SEQ ID NO: 498482 - RNA, 22 nt, Human
aggcagggcugggauuagacuc

SEQ ID NO: 498483 - RNA, 22 nt, Human
aacagaaaucauuuagggcucu

SEQ ID NO: 498484 - RNA, 22 nt, Human
ccucuggggguccucagagucu

SEQ ID NO: 498485 - RNA, 22 nt, Human
uuauuuaaaauguagguuggga

SEQ ID NO: 498486 - RNA, 22 nt, Human
gagcugucuggggacucugggu

SEQ ID NO: 498487 - RNA, 22 nt, Human
ucaggaaagaguguauccauca

SEQ ID NO: 498488 - RNA, 22 nt, Human
guuguauucuucaauaucagag

SEQ ID NO: 498489 - RNA, 22 nt, Human
ugugaaggacuuguuccauugu

SEQ ID NO: 498490 - RNA, 22 nt, Human
cacaguggcuuugcuggucucg

SEQ ID NO: 498491 - RNA, 22 nt, Human
ugcagccaauucauucauucuu

SEQ ID NO: 498492 - RNA, 22 nt, Human
ugcugccaccugguggcugaag

SEQ ID NO: 498493 - RNA, 22 nt, Human
cagauguggaaugcagcaggcu

SEQ ID NO: 498494 - RNA, 22 nt, Human
gauaugaaguggcauugugaag

SEQ ID NO: 498495 - RNA, 22 nt, Human
gcacagcccugagcgcaugucu

SEQ ID NO: 498496 - RNA, 22 nt, Human
augggaggaaggaggcccuuga

SEQ ID NO: 498497 - RNA, 22 nt, Human
cugauauucuuugagcugcuaa

SEQ ID NO: 498498 - RNA, 22 nt, Human
acagguguccucacagggggug

SEQ ID NO: 498499 - RNA, 22 nt, Human
auauucguggucaaguaaggcc

SEQ ID NO: 498500 - RNA, 22 nt, Human
cacagagagcuacgugcagcgu

SEQ ID NO: 498501 - RNA, 21 nt, Human
ugauuuccagaaaauuggccc

SEQ ID NO: 498502 - RNA, 22 nt, Human
uaauuuaauuccauggauucua

SEQ ID NO: 498503 - RNA, 22 nt, Human
agagaaggaaagcugacauggg

SEQ ID NO: 498504 - RNA, 22 nt, Human
aaggucuguauuagaguuucau

SEQ ID NO: 498505 - RNA, 22 nt, Human
ugcagucuggauguccucagau

SEQ ID NO: 498506 - RNA, 22 nt, Human
cccaggcuggagggcaguguca

SEQ ID NO: 498507 - RNA, 19 nt, Human
ugcuuccucaccaucuccc

SEQ ID NO: 498508 - RNA, 22 nt, Human
uaucauaaguuaauuaaacagu

SEQ ID NO: 498509 - RNA, 22 nt, Human
aggcuggagggcaauggcaaga

SEQ ID NO: 498510 - RNA, 22 nt, Human
aaaugcagauugucauucagga

SEQ ID NO: 498511 - RNA, 19 nt, Human
agggagaauuccaagagga

SEQ ID NO: 498512 - RNA, 22 nt, Human
ccagcugggucccugcuggggc

SEQ ID NO: 498513 - RNA, 22 nt, Human
ucccagagcucugacaccagcu

SEQ ID NO: 498514 - RNA, 22 nt, Human
ugcagggaaucuguggcuggac

SEQ ID NO: 498515 - RNA, 22 nt, Human
cucugcaugccuugcucagaca

SEQ ID NO: 498516 - RNA, 22 nt, Human
ggcuccucucuggccgcucccg

SEQ ID NO: 498517 - RNA, 22 nt, Human
uuugaaucugauauggcagcau

SEQ ID NO: 498518 - RNA, 22 nt, Human
acaaagauaagucagaaaguca

SEQ ID NO: 498519 - RNA, 22 nt, Human
uacacauccauguuuugacuuu

SEQ ID NO: 498520 - RNA, 22 nt, Human
ucccagcccagauuugugugac

SEQ ID NO: 498521 - RNA, 22 nt, Human
acccacgaagaugagcggcaug

SEQ ID NO: 498522 - RNA, 22 nt, Human
ugaaggagaaauggaaaguggg

SEQ ID NO: 498523 - RNA, 22 nt, Human
ccugugccauccugagcauccc

SEQ ID NO: 498524 - RNA, 22 nt, Human
ucacagugaugacgugggagca

SEQ ID NO: 498525 - RNA, 22 nt, Human
ggugaaggucuacugugugcca

SEQ ID NO: 498526 - RNA, 21 nt, Human
auuagcuucaaaagcuugucu

SEQ ID NO: 498527 - RNA, 22 nt, Human
uggucucugacucugaagaccc

SEQ ID NO: 498528 - RNA, 20 nt, Human
ugagcaccaagaaucaagaa

SEQ ID NO: 498529 - RNA, 22 nt, Human
ucaaugauaucagcaggaugug

SEQ ID NO: 498530 - RNA, 22 nt, Human
ucagcacugaaauucuucacau

SEQ ID NO: 498531 - RNA, 22 nt, Human
gggcagagguucaacuucaaca

SEQ ID NO: 498532 - RNA, 22 nt, Human
ggagucugaguccucauagaca

SEQ ID NO: 498533 - RNA, 22 nt, Human
cacugcagaucagaggcugaga

SEQ ID NO: 498534 - RNA, 22 nt, Human
gacauaauaaucugaccuagau

SEQ ID NO: 498535 - RNA, 22 nt, Human
aggaggccgcugaugggcuccc

SEQ ID NO: 498536 - RNA, 22 nt, Human
caggaaugaggucguaaguguc

SEQ ID NO: 498537 - RNA, 23 nt, Human
aguguuccaguugguugagagug

SEQ ID NO: 498538 - RNA, 22 nt, Human
gugccugugcggacucagggaa

SEQ ID NO: 498539 - RNA, 20 nt, Human
ggcacuggaagcacacagga

SEQ ID NO: 498540 - RNA, 22 nt, Human
caguggcuguuucuggaaggca

SEQ ID NO: 498541 - RNA, 23 nt, Human
gcucugagggcuuaucccuccca

SEQ ID NO: 498542 - RNA, 22 nt, Human
ugcagguggcagcggggcacca

SEQ ID NO: 498543 - RNA, 22 nt, Human
cucuagaguacgggcuggcaug

SEQ ID NO: 498544 - RNA, 22 nt, Human
aucuacaggauuuuacagaguu

SEQ ID NO: 498545 - RNA, 22 nt, Human
gcagggcuauuggaaggagaug

SEQ ID NO: 498546 - RNA, 21 nt, Human
uuuagggaggauauuuaacuu

SEQ ID NO: 498547 - RNA, 22 nt, Human
ugcagcugauuaaagggcagac

SEQ ID NO: 498548 - RNA, 22 nt, Human
ugguccugggcacaguauaugc

SEQ ID NO: 498549 - RNA, 22 nt, Human
cagguggccaguacucaaggau

SEQ ID NO: 498550 - RNA, 22 nt, Human
aggcugaggaucccuguguucu

SEQ ID NO: 498551 - RNA, 21 nt, Human
gagugucuaauccaggcuguc

SEQ ID NO: 498552 - RNA, 22 nt, Human
cggcuggguucggcugcaggcc

SEQ ID NO: 498553 - RNA, 22 nt, Human
gcacuagucaagugaacaauuu

SEQ ID NO: 498554 - RNA, 22 nt, Human
acaggcuuggggcucagacaga

SEQ ID NO: 498555 - RNA, 22 nt, Human
ucaagagagugcugcuuggggu

SEQ ID NO: 498556 - RNA, 22 nt, Human
agggaaggaggccauguguccc

SEQ ID NO: 498557 - RNA, 22 nt, Human
ggagaaaauugaugaaguuggc

SEQ ID NO: 498558 - RNA, 22 nt, Human
cacagaggaaaggcaguuggua

SEQ ID NO: 498559 - RNA, 22 nt, Human
uugaauaauaugcuucguucuc

SEQ ID NO: 498560 - RNA, 22 nt, Human
ccagcucucaaggcucccuggg

SEQ ID NO: 498561 - RNA, 22 nt, Human
ugaugaauaaacuugagaguca

SEQ ID NO: 498562 - RNA, 22 nt, Human
agcugcuggggagggcagacac

SEQ ID NO: 498563 - RNA, 22 nt, Human
uauuccagguauucuucaagag

SEQ ID NO: 498564 - RNA, 22 nt, Human
cucugggucuauaaugcagcug

SEQ ID NO: 498565 - RNA, 22 nt, Human
uuucauggcuaggacuagagug

SEQ ID NO: 498566 - RNA, 22 nt, Human
aaaggagauaaagggcccuuca

SEQ ID NO: 498567 - RNA, 22 nt, Human
auacaaaguauuaauccuggau

SEQ ID NO: 498568 - RNA, 22 nt, Human
uuuauuaauguagcauccaugg

SEQ ID NO: 498569 - RNA, 22 nt, Human
caagggcucacggucugcuggg

SEQ ID NO: 498570 - RNA, 22 nt, Human
ccugugcauccgguggucauug

SEQ ID NO: 498571 - RNA, 22 nt, Human
cagcagugugcaggugugcugg

SEQ ID NO: 498572 - RNA, 22 nt, Human
uauacacaccuccaaagcagga

SEQ ID NO: 498573 - RNA, 22 nt, Human
gcccagcuggcuuccagcacau

SEQ ID NO: 498574 - RNA, 22 nt, Human
ugcagggcccuugggguugaac

SEQ ID NO: 498575 - RNA, 22 nt, Human
aagcacuuagaagagugccugc

SEQ ID NO: 498576 - RNA, 22 nt, Human
aaaugugucauauucaaaguca

SEQ ID NO: 498577 - RNA, 20 nt, Human
auauguguacguguauacau

SEQ ID NO: 498578 - RNA, 22 nt, Human
uuccuggggcuccagcuaccag

SEQ ID NO: 498579 - RNA, 22 nt, Human
augggcaagggguaaggacacu

SEQ ID NO: 498580 - RNA, 22 nt, Human
caggcugaggguuaggccuuag

SEQ ID NO: 498581 - RNA, 20 nt, Human
ggcaggcuuuauauggaggg

SEQ ID NO: 498582 - RNA, 22 nt, Human
cugaggcugggcauggggucca

SEQ ID NO: 498583 - RNA, 22 nt, Human
ucucuggguaaaguucucucau

SEQ ID NO: 498584 - RNA, 22 nt, Human
uucuuacuaguauguuucagca

SEQ ID NO: 498585 - RNA, 22 nt, Human
ggcucugccugcccagcagcac

SEQ ID NO: 498586 - RNA, 17 nt, Human
ugagcaguagaagaugc

SEQ ID NO: 498587 - RNA, 22 nt, Human
ggagggccaucuugggugugau

SEQ ID NO: 498588 - RNA, 22 nt, Human
aggacaaaggaccagaucugga

SEQ ID NO: 498589 - RNA, 19 nt, Human
aguagcagaaagugcagug

SEQ ID NO: 498590 - RNA, 22 nt, Human
caauagcaggucuacagagaga

SEQ ID NO: 498591 - RNA, 22 nt, Human
uauuugagcgaagcaguguuuu

SEQ ID NO: 498592 - RNA, 22 nt, Human
uuuagaguugaguauucauugg

SEQ ID NO: 498593 - RNA, 22 nt, Human
gcugccuguugaagggucugug

SEQ ID NO: 498594 - RNA, 22 nt, Human
ucucuucacacuaccccugugu

SEQ ID NO: 498595 - RNA, 22 nt, Human
gacccugagcaaaagcaguucu

SEQ ID NO: 498596 - RNA, 23 nt, Human
guggccuccccggaaugccucgc

SEQ ID NO: 498597 - RNA, 22 nt, Human
cucagcagugacaagagaguau

SEQ ID NO: 498598 - RNA, 22 nt, Human
ugcugucccuaagucucuucaa

SEQ ID NO: 498599 - RNA, 22 nt, Human
ccugcugggccugagcaaugag

SEQ ID NO: 498600 - RNA, 22 nt, Human
uuaguuaguggggcugucaguc

SEQ ID NO: 498601 - RNA, 22 nt, Human
gcugaggccaggccccaccgga

SEQ ID NO: 498602 - RNA, 20 nt, Human
acccagcucugugcccuggg

SEQ ID NO: 498603 - RNA, 22 nt, Human
gccuccugguugcuucuccaac

SEQ ID NO: 498604 - RNA, 22 nt, Human
ggcuuuaguguagguuucuguu

SEQ ID NO: 498605 - RNA, 22 nt, Human
gcucccuccaugaggcagaccg

SEQ ID NO: 498606 - RNA, 23 nt, Human
agcagguagguugaaauuuuccu

SEQ ID NO: 498607 - RNA, 19 nt, Human
gggcuuggggcugaagccu

SEQ ID NO: 498608 - RNA, 22 nt, Human
ggacucucaggcugucggcuuc

SEQ ID NO: 498609 - RNA, 22 nt, Human
gggcuccagaguccauguucuu

SEQ ID NO: 498610 - RNA, 22 nt, Human
cagcaccagcauauuccagggc

SEQ ID NO: 498611 - RNA, 22 nt, Human
gcagaggucucuucaaaauaau

SEQ ID NO: 498612 - RNA, 22 nt, Human
auggcugcagagaccugaagaa

SEQ ID NO: 498613 - RNA, 22 nt, Human
cauugcacucuggcuggaacgg

SEQ ID NO: 498614 - RNA, 22 nt, Human
aggcauggggcugcagucaggu

SEQ ID NO: 498615 - RNA, 22 nt, Human
caggucuuuguugcagcaugga

SEQ ID NO: 498616 - RNA, 22 nt, Human
gcccagcaccucucucaggguu

SEQ ID NO: 498617 - RNA, 22 nt, Human
ggagugaaucacuagaugcaga

SEQ ID NO: 498618 - RNA, 22 nt, Human
aagaggaacugggggcugaguc

SEQ ID NO: 498619 - RNA, 22 nt, Human
gugcugaauccacucuuaggaa

SEQ ID NO: 498620 - RNA, 22 nt, Human
cugggucucaggaguucugagg

SEQ ID NO: 498621 - RNA, 17 nt, Human
uucaaugauuaaugcau

SEQ ID NO: 498622 - RNA, 22 nt, Human
cacaaggagguccugaggaagc

SEQ ID NO: 498623 - RNA, 22 nt, Human
gcuggcuggaaugggagaagaa

SEQ ID NO: 498624 - RNA, 22 nt, Human
uacauucuggaaaggcacagac

SEQ ID NO: 498625 - RNA, 22 nt, Human
cagcucccagagugaccagcag

SEQ ID NO: 498626 - RNA, 22 nt, Human
uuucugcaaacuuccacgucuc

SEQ ID NO: 498627 - RNA, 22 nt, Human
aaacagcagcuguuuaauuugc

SEQ ID NO: 498628 - RNA, 22 nt, Human
gcagacuguaucaaugucagua

SEQ ID NO: 498629 - RNA, 20 nt, Human
gccagcccugacacaggagc

SEQ ID NO: 498630 - RNA, 22 nt, Human
uggcucaggcuugaaaauagau

SEQ ID NO: 498631 - RNA, 22 nt, Human
aacuguaauuuuuacauaguaa

SEQ ID NO: 498632 - RNA, 22 nt, Human
agggcuuucggcacucugaggg

SEQ ID NO: 498633 - RNA, 22 nt, Human
cagucucugugccagauccugg

SEQ ID NO: 498634 - RNA, 22 nt, Human
gaaagugcaugugcccaccauu

SEQ ID NO: 498635 - RNA, 22 nt, Human
aagcacaggaucuugaggagcg

SEQ ID NO: 498636 - RNA, 22 nt, Human
uccaggcugggcugaagggugc

SEQ ID NO: 498637 - RNA, 22 nt, Human
acaguguucaaaccacuaggcu

SEQ ID NO: 498638 - RNA, 22 nt, Human
caggagcagaggguggucagca

SEQ ID NO: 498639 - RNA, 22 nt, Human
aggcuuuggaaucagaguucug

SEQ ID NO: 498640 - RNA, 22 nt, Human
acucugugugaguagagccugu

SEQ ID NO: 498641 - RNA, 21 nt, Human
cagugcucaaucugacagugg

SEQ ID NO: 498642 - RNA, 23 nt, Human
ugaagguauuaccugagaugcuc

SEQ ID NO: 498643 - RNA, 22 nt, Human
uucaaaacaaucuguuugcauu

SEQ ID NO: 498644 - RNA, 22 nt, Human
aguggcugguaguuacugagca

SEQ ID NO: 498645 - RNA, 21 nt, Human
cauugucgacauuuuccccuc

SEQ ID NO: 498646 - RNA, 18 nt, Human
gagcugagaagaggaugc

SEQ ID NO: 498647 - RNA, 22 nt, Human
ucccagaaaaaggaggcuauga

SEQ ID NO: 498648 - RNA, 22 nt, Human
ccacagaaaauaaagcacgauu

SEQ ID NO: 498649 - RNA, 20 nt, Human
uucaugggagcaaagaggcc

SEQ ID NO: 498650 - RNA, 20 nt, Human
gcagcugaaaguaugacacc

SEQ ID NO: 498651 - RNA, 22 nt, Human
auaguggugagcugcauuuaug

SEQ ID NO: 498652 - RNA, 22 nt, Human
acacccaggcuggcgugcagug

SEQ ID NO: 498653 - RNA, 22 nt, Human
ucagugcuuauauucugagccu

SEQ ID NO: 498654 - RNA, 22 nt, Human
aguauuucuaguugguucuacu

SEQ ID NO: 498655 - RNA, 22 nt, Human
aaggcugauuagacugauagcu

SEQ ID NO: 498656 - RNA, 22 nt, Human
gccucaguugaucugugugagc

SEQ ID NO: 498657 - RNA, 22 nt, Human
cugccagcagaggccagcgcug

SEQ ID NO: 498658 - RNA, 22 nt, Human
gcuggcuccucuguccucacgg

SEQ ID NO: 498659 - RNA, 22 nt, Human
ccagguggcuucugcccgaugu

SEQ ID NO: 498660 - RNA, 22 nt, Human
ucaggcucaaagggccggauga

SEQ ID NO: 498661 - RNA, 18 nt, Human
cccucuugcacaaagcaa

SEQ ID NO: 498662 - RNA, 22 nt, Human
ccaguccuggccaguaacauga

SEQ ID NO: 498663 - RNA, 22 nt, Human
ccuccucugggaagauucagag

SEQ ID NO: 498664 - RNA, 22 nt, Human
uugcucaggcuuagagcuacua

SEQ ID NO: 498665 - RNA, 22 nt, Human
augcaaaaguaguugcaguuuu

SEQ ID NO: 498666 - RNA, 16 nt, Human
cuguggcucccagguu

SEQ ID NO: 498667 - RNA, 23 nt, Human
acaaaugcccauacaucuaguuc

SEQ ID NO: 498668 - RNA, 20 nt, Human
acacaugucaagcuaaaggc

SEQ ID NO: 498669 - RNA, 22 nt, Human
cauuaauaaacauuucagaaga

SEQ ID NO: 498670 - RNA, 19 nt, Human
aggcacagguugucuggac

SEQ ID NO: 498671 - RNA, 22 nt, Human
cuuagcuuuguccuaggucucu

SEQ ID NO: 498672 - RNA, 22 nt, Human
acaggcugcugagccauuugcu

SEQ ID NO: 498673 - RNA, 22 nt, Human
uuccuugguagagagaauauuu

SEQ ID NO: 498674 - RNA, 21 nt, Human
uccugcaggaggccugagagg

SEQ ID NO: 498675 - RNA, 22 nt, Human
gggaguggguuuggccuaggcc

SEQ ID NO: 498676 - RNA, 22 nt, Human
gcugcagcucgccuuccggccu

SEQ ID NO: 498677 - RNA, 22 nt, Human
guucacaagaguuacagacaga

SEQ ID NO: 498678 - RNA, 18 nt, Human
uggcugcuggaguagggu

SEQ ID NO: 498679 - RNA, 22 nt, Human
uuacaguaugaucaacuuuuca

SEQ ID NO: 498680 - RNA, 22 nt, Human
cugggugguuuugaugugaauu

SEQ ID NO: 498681 - RNA, 22 nt, Human
ccagcugagaaguguaaaguga

SEQ ID NO: 498682 - RNA, 22 nt, Human
aucagcaaucaaauugcagagu

SEQ ID NO: 498683 - RNA, 22 nt, Human
cugggucuccggcagccucggg

SEQ ID NO: 498684 - RNA, 22 nt, Human
ucagagagguuaaauaucuugu

SEQ ID NO: 498685 - RNA, 22 nt, Human
uggcucagcugucacagccugg

SEQ ID NO: 498686 - RNA, 22 nt, Human
uuuaaaauuuagaccucuccac

SEQ ID NO: 498687 - RNA, 22 nt, Human
gaggggcuggcacgauggcugc

SEQ ID NO: 498688 - RNA, 22 nt, Human
cugugugugucugcagcauacu

SEQ ID NO: 498689 - RNA, 22 nt, Human
agggaagaagcugguaguaggu

SEQ ID NO: 498690 - RNA, 22 nt, Human
ggcccaaacggguccagugaaa

SEQ ID NO: 498691 - RNA, 22 nt, Human
auaugguaagaguauauuuacu

SEQ ID NO: 498692 - RNA, 22 nt, Human
gcaguguugugauccaggucuu

SEQ ID NO: 498693 - RNA, 22 nt, Human
ucaggcucucagaccaacagca

SEQ ID NO: 498694 - RNA, 22 nt, Human
cccaagcagggugcagaggcau

SEQ ID NO: 498695 - RNA, 22 nt, Human
accagagcuggcucugagcacc

SEQ ID NO: 498696 - RNA, 22 nt, Human
agugccucuugucuacgguuuu

SEQ ID NO: 498697 - RNA, 22 nt, Human
acuuuguauaagacaauaaaga

SEQ ID NO: 498698 - RNA, 22 nt, Human
gcagggaccagggccagaucca

SEQ ID NO: 498699 - RNA, 22 nt, Human
cagcaggguagguuguaucagu

SEQ ID NO: 498700 - RNA, 22 nt, Human
caggggccuggcugucuaggaa

SEQ ID NO: 498701 - RNA, 22 nt, Human
gggcaguggguggcugcagccu

SEQ ID NO: 498702 - RNA, 18 nt, Human
caugucugcgccacaagg

SEQ ID NO: 498703 - RNA, 22 nt, Human
uggccaccuucccacuucugcc

SEQ ID NO: 498704 - RNA, 22 nt, Human
caccaggcuggagugcagaggu

SEQ ID NO: 498705 - RNA, 22 nt, Human
ugagggucuggaaucugggcuu

SEQ ID NO: 498706 - RNA, 22 nt, Human
cucugugcccuacugcucagcu

SEQ ID NO: 498707 - RNA, 21 nt, Human
cugguguagcacucaggugcu

SEQ ID NO: 498708 - RNA, 18 nt, Human
ggcucaggcuauccuaac

SEQ ID NO: 498709 - RNA, 22 nt, Human
cacucccucuaguugcauucug

SEQ ID NO: 498710 - RNA, 22 nt, Human
uuuuauucucaagacaauggga

SEQ ID NO: 498711 - RNA, 22 nt, Human
cuuuaguguuguugugaggauu

SEQ ID NO: 498712 - RNA, 22 nt, Human
ggguuucaugguucucacaaug

SEQ ID NO: 498713 - RNA, 22 nt, Human
gaggcugauucggggaacagca

SEQ ID NO: 498714 - RNA, 22 nt, Human
ugaagcuggaaguuagguagac

SEQ ID NO: 498715 - RNA, 22 nt, Human
acagauugaucuugagaauuau

SEQ ID NO: 498716 - RNA, 22 nt, Human
uuugaacaugcugcaugauaau

SEQ ID NO: 498717 - RNA, 22 nt, Human
guccagcccgggcuccgccagc

SEQ ID NO: 498718 - RNA, 22 nt, Human
aaguccaguuucauuugagguc

SEQ ID NO: 498719 - RNA, 22 nt, Human
gcaugggcaagaggacuggggg

SEQ ID NO: 498720 - RNA, 22 nt, Human
gagucugugguauuuuaucaua

SEQ ID NO: 498721 - RNA, 22 nt, Human
ugaggaagcaaaggcuugugug

SEQ ID NO: 498722 - RNA, 22 nt, Human
uaaguagacuguugaacuuggu

SEQ ID NO: 498723 - RNA, 22 nt, Human
ggcucuggagacauguggagag

SEQ ID NO: 498724 - RNA, 21 nt, Human
auuuacaaaacagucccuucc

SEQ ID NO: 498725 - RNA, 22 nt, Human
cacguuuuaugacagaagaagc

SEQ ID NO: 498726 - RNA, 22 nt, Human
aguggcugaagcaucaaaggca

SEQ ID NO: 498727 - RNA, 22 nt, Human
aaaaguauuuauggcuauguaa

SEQ ID NO: 498728 - RNA, 22 nt, Human
caggauggagagugagggguca

SEQ ID NO: 498729 - RNA, 22 nt, Human
cucaggauggaagccuacagga

SEQ ID NO: 498730 - RNA, 22 nt, Human
agcacuuaacugacaguacuau

SEQ ID NO: 498731 - RNA, 22 nt, Human
uuagaaucuaacauucuuaucu

SEQ ID NO: 498732 - RNA, 22 nt, Human
ccuggcacgaagggcugagguu

SEQ ID NO: 498733 - RNA, 19 nt, Human
agcagagcagggccguggg

SEQ ID NO: 498734 - RNA, 22 nt, Human
aggaccauccuaagguaggcaa

SEQ ID NO: 498735 - RNA, 22 nt, Human
cugggagcggcugucacugguu

SEQ ID NO: 498736 - RNA, 19 nt, Human
cacagggcaggucucaugu

SEQ ID NO: 498737 - RNA, 19 nt, Human
agcuccugggcucugggcc

SEQ ID NO: 498738 - RNA, 22 nt, Human
ucaaguagaacuauaaugaugu

SEQ ID NO: 498739 - RNA, 21 nt, Human
cugcuguggcccccgacaugc

SEQ ID NO: 498740 - RNA, 22 nt, Human
ucaggaaauacaagugacauca

SEQ ID NO: 498741 - RNA, 22 nt, Human
agcuuuauuugucauucacggc

SEQ ID NO: 498742 - RNA, 22 nt, Human
ugccucagucuaaagucucuca

SEQ ID NO: 498743 - RNA, 22 nt, Human
ugagcuggucuugaguguagcu

SEQ ID NO: 498744 - RNA, 22 nt, Human
ucuguggauuuuaguguucaug

SEQ ID NO: 498745 - RNA, 19 nt, Human
ccaguagagacagcugcag

SEQ ID NO: 498746 - RNA, 17 nt, Human
acagagcacaucaagau

SEQ ID NO: 498747 - RNA, 22 nt, Human
cacaagacuuauuuguguagaa

SEQ ID NO: 498748 - RNA, 21 nt, Human
ccugugugucugacugggcua

SEQ ID NO: 498749 - RNA, 22 nt, Human
caaauucucuuacuguuugaca

SEQ ID NO: 498750 - RNA, 22 nt, Human
ccagggugagaaaaggcuggau

SEQ ID NO: 498751 - RNA, 22 nt, Human
uuccagagcaguuuucagauca

SEQ ID NO: 498752 - RNA, 22 nt, Human
uaguguuuaguacauaugcaua

SEQ ID NO: 498753 - RNA, 22 nt, Human
gcacagccagcaucugagggau

SEQ ID NO: 498754 - RNA, 22 nt, Human
aagacaucagugaugacauuug

SEQ ID NO: 498755 - RNA, 22 nt, Human
ugccagccagggaagcucaccc

SEQ ID NO: 498756 - RNA, 22 nt, Human
ggccucugccucaucugggcac

SEQ ID NO: 498757 - RNA, 21 nt, Human
acaguucaugauaacuccauc

SEQ ID NO: 498758 - RNA, 22 nt, Human
gaggcagcugaaggagugacag

SEQ ID NO: 498759 - RNA, 22 nt, Human
cuggcagggugggcuuugcuuu

SEQ ID NO: 498760 - RNA, 22 nt, Human
guguccugagugaggccuggcc

SEQ ID NO: 498761 - RNA, 22 nt, Human
ugccacuggcucaauggugcag

SEQ ID NO: 498762 - RNA, 22 nt, Human
auagcauuauuuacaauuagua

SEQ ID NO: 498763 - RNA, 22 nt, Human
agcuccuggacgaacagggagu

SEQ ID NO: 498764 - RNA, 22 nt, Human
uaggaagggcucagggcucggu

SEQ ID NO: 498765 - RNA, 22 nt, Human
cagagccugcucacgucucugu

SEQ ID NO: 498766 - RNA, 22 nt, Human
aaguaacaaugcuguugaauug

SEQ ID NO: 498767 - RNA, 22 nt, Human
cagcagggggcagcgcagauca

SEQ ID NO: 498768 - RNA, 22 nt, Human
uugaaaaaauugguagaggaug

SEQ ID NO: 498769 - RNA, 22 nt, Human
cagggccacuguagaugaggag

SEQ ID NO: 498770 - RNA, 22 nt, Human
ggcaccugcucaucuggacuca

SEQ ID NO: 498771 - RNA, 22 nt, Human
uuugcauuuguucaaguauuga

SEQ ID NO: 498772 - RNA, 22 nt, Human
aaugucaaaggcuauacauuca

SEQ ID NO: 498773 - RNA, 22 nt, Human
cacagggcuucucauggggugc

SEQ ID NO: 498774 - RNA, 21 nt, Human
agauuacaggugugauccacc

SEQ ID NO: 498775 - RNA, 22 nt, Human
uaauuuacuugcaaauaacaau

SEQ ID NO: 498776 - RNA, 22 nt, Human
guguguccaggcgggagucaag

SEQ ID NO: 498777 - RNA, 22 nt, Human
gccaggcuggugcaaggauauu

SEQ ID NO: 498778 - RNA, 22 nt, Human
uagagguauaccaaaaaggcau

SEQ ID NO: 498779 - RNA, 22 nt, Human
gagccuggauugaagugggugg

SEQ ID NO: 498780 - RNA, 22 nt, Human
uucagucagugacuaagcaguu

SEQ ID NO: 498781 - RNA, 22 nt, Human
ugggguacuuguaucaaagcac

SEQ ID NO: 498782 - RNA, 22 nt, Human
aggugcagugaaggaaaaggaa

SEQ ID NO: 498783 - RNA, 22 nt, Human
uggcugggugcuauccaguacu

SEQ ID NO: 498784 - RNA, 22 nt, Human
uccagccaagccuugguagcug

SEQ ID NO: 498785 - RNA, 22 nt, Human
uauuauuaugcauagcaugaaa

SEQ ID NO: 498786 - RNA, 22 nt, Human
ggagccugcgggagcucccauu

SEQ ID NO: 498787 - RNA, 22 nt, Human
uuggauccaucucaggcauagg

SEQ ID NO: 498788 - RNA, 22 nt, Human
aauuuguguuauaccugcuccu

SEQ ID NO: 498789 - RNA, 22 nt, Human
uagaaaugcccagauucugcua

SEQ ID NO: 498790 - RNA, 22 nt, Human
uugcauuucccauugaguaaug

SEQ ID NO: 498791 - RNA, 22 nt, Human
cugaagagacuggagggggcau

SEQ ID NO: 498792 - RNA, 19 nt, Human
uggagaggaaaugcugcuc

SEQ ID NO: 498793 - RNA, 22 nt, Human
uaggacauaaguauucuaacuu

SEQ ID NO: 498794 - RNA, 22 nt, Human
uggguagagcaggcuggggcuu

SEQ ID NO: 498795 - RNA, 22 nt, Human
agcaugaaagcauaggacaguc

SEQ ID NO: 498796 - RNA, 22 nt, Human
gugcuuaauacaugucaauaac

SEQ ID NO: 498797 - RNA, 22 nt, Human
aagcugcccaagacugaagcau

SEQ ID NO: 498798 - RNA, 22 nt, Human
gucuugaucuccugaccuugug

SEQ ID NO: 498799 - RNA, 22 nt, Human
agcugcagagguuugugcaaca

SEQ ID NO: 498800 - RNA, 22 nt, Human
cagcuuggcuucacauucugua

SEQ ID NO: 498801 - RNA, 22 nt, Human
agaaaugggccuugggacacaa

SEQ ID NO: 498802 - RNA, 22 nt, Human
uuucuuauauucugucauuguu

SEQ ID NO: 498803 - RNA, 22 nt, Human
ccugccugcagaaaguaucucc

SEQ ID NO: 498804 - RNA, 22 nt, Human
guggcagguggagccuccugca

SEQ ID NO: 498805 - RNA, 22 nt, Human
gaugcacuuucuuuucaacagu

SEQ ID NO: 498806 - RNA, 22 nt, Human
cugggaggugaacagaaaaacu

SEQ ID NO: 498807 - RNA, 22 nt, Human
uacagagagagggguuaccagg

SEQ ID NO: 498808 - RNA, 22 nt, Human
gaaguucugguguaugugauaa

SEQ ID NO: 498809 - RNA, 22 nt, Human
ggcagcuggggcagugcccugu

SEQ ID NO: 498810 - RNA, 21 nt, Human
aucugaaguuugagaggaaag

SEQ ID NO: 498811 - RNA, 18 nt, Human
cucucugggugaggacaa

SEQ ID NO: 498812 - RNA, 22 nt, Human
ggcccagcgaggccaccuacag

SEQ ID NO: 498813 - RNA, 22 nt, Human
guugugaauagugccgcaauaa

SEQ ID NO: 498814 - RNA, 22 nt, Human
cagaagcagauucuaaagcaag

SEQ ID NO: 498815 - RNA, 20 nt, Human
ucacaucuggcagcugauga

SEQ ID NO: 498816 - RNA, 22 nt, Human
ucccagggcagcuguccagaag

SEQ ID NO: 498817 - RNA, 22 nt, Human
aaagguuuauuuaaucagggag

SEQ ID NO: 498818 - RNA, 22 nt, Human
gccauuuagggaggcaagguga

SEQ ID NO: 498819 - RNA, 22 nt, Human
uucugugugucucagcaagcug

SEQ ID NO: 498820 - RNA, 22 nt, Human
auguccuggggucuucucuuca

SEQ ID NO: 498821 - RNA, 22 nt, Human
agcagccacagucugggacagg

SEQ ID NO: 498822 - RNA, 22 nt, Human
ugaggcagcaauuguauuguau

SEQ ID NO: 498823 - RNA, 22 nt, Human
uuuuuguagucauuagaagagg

SEQ ID NO: 498824 - RNA, 22 nt, Human
guugcaggaagcacacacaugu

SEQ ID NO: 498825 - RNA, 22 nt, Human
uguguacagcaggauuucucaa

SEQ ID NO: 498826 - RNA, 22 nt, Human
uggagaggagcaccauggccau

SEQ ID NO: 498827 - RNA, 22 nt, Human
ucaugaaucguggaaugauuua

SEQ ID NO: 498828 - RNA, 22 nt, Human
cagaaauguuuguuaauauugu

SEQ ID NO: 498829 - RNA, 22 nt, Human
auaaaugauucagcaggaaaua

SEQ ID NO: 498830 - RNA, 22 nt, Human
uagaacagaggguugcccagau

SEQ ID NO: 498831 - RNA, 22 nt, Human
auaaaagaaguuuugguacuug

SEQ ID NO: 498832 - RNA, 22 nt, Human
ugggcagauguccucugaagug

SEQ ID NO: 498833 - RNA, 20 nt, Human
ugcagcugguuucacaggga

SEQ ID NO: 498834 - RNA, 22 nt, Human
agcaaugcuaccgggugauucg

SEQ ID NO: 498835 - RNA, 18 nt, Human
agggucagugucacuggc

SEQ ID NO: 498836 - RNA, 20 nt, Human
ucacuaguaaccaucugcuu

SEQ ID NO: 498837 - RNA, 22 nt, Human
agugauggggcccugcacugau

SEQ ID NO: 498838 - RNA, 21 nt, Human
ccacuguagacucauucugag

SEQ ID NO: 498839 - RNA, 22 nt, Human
uuauugugucuugguuuaucuu

SEQ ID NO: 498840 - RNA, 22 nt, Human
uggcuucuugggaugggucauu

SEQ ID NO: 498841 - RNA, 22 nt, Human
augcauugucugguuucauuuu

SEQ ID NO: 498842 - RNA, 21 nt, Human
cagagcagcguucugcugugg

SEQ ID NO: 498843 - RNA, 22 nt, Human
uuuacauggaauauugucuugu

SEQ ID NO: 498844 - RNA, 22 nt, Human
acucagaguuuuacccagagac

SEQ ID NO: 498845 - RNA, 22 nt, Human
ucacacauuucucaaguguagg

SEQ ID NO: 498846 - RNA, 22 nt, Human
cagccagguaugggcgugcggg

SEQ ID NO: 498847 - RNA, 22 nt, Human
gcacacccucucaccagcacug

SEQ ID NO: 498848 - RNA, 22 nt, Human
aacccaggagacagguugcagu

SEQ ID NO: 498849 - RNA, 22 nt, Human
uuuccucacacagaagaucuug

SEQ ID NO: 498850 - RNA, 22 nt, Human
caguguguggauccucccagga

SEQ ID NO: 498851 - RNA, 22 nt, Human
cucugagguccuacagugaccc

SEQ ID NO: 498852 - RNA, 22 nt, Human
aauucuuguuguuaguauauuu

SEQ ID NO: 498853 - RNA, 22 nt, Human
auuauuugacuugagaacaggu

SEQ ID NO: 498854 - RNA, 22 nt, Human
gaaaggcaguacagcugagccu

SEQ ID NO: 498855 - RNA, 22 nt, Human
ggcugucucugugacugccacc

SEQ ID NO: 498856 - RNA, 22 nt, Human
acugaaggaaagccuuugcaug

SEQ ID NO: 498857 - RNA, 22 nt, Human
agccuggaggccaggagacagu

SEQ ID NO: 498858 - RNA, 22 nt, Human
cacccacauggaaauucacagu

SEQ ID NO: 498859 - RNA, 22 nt, Human
gaggagagaacauuccuccaua

SEQ ID NO: 498860 - RNA, 18 nt, Human
aaauuagauggaccugug

SEQ ID NO: 498861 - RNA, 23 nt, Human
aacaauagguuuuggcagaauag

SEQ ID NO: 498862 - RNA, 22 nt, Human
cugagauggaguuucgcucuuc

SEQ ID NO: 498863 - RNA, 22 nt, Human
ugcaggugugguuccucagcca

SEQ ID NO: 498864 - RNA, 22 nt, Human
aaagugcaaggauuacaggcau

SEQ ID NO: 498865 - RNA, 22 nt, Human
ugugugcauucacaugcaugcc

SEQ ID NO: 498866 - RNA, 23 nt, Human
augauguuuuugguagucaaaug

SEQ ID NO: 498867 - RNA, 21 nt, Human
acagagccgggcacaaagcug

SEQ ID NO: 498868 - RNA, 22 nt, Human
auuuccuagccucucuugcagu

SEQ ID NO: 498869 - RNA, 22 nt, Human
aggcuccuugcucacaggcuca

SEQ ID NO: 498870 - RNA, 22 nt, Human
aaguuuggggagaauuucauuu

SEQ ID NO: 498871 - RNA, 22 nt, Human
cucugcagaauuugagcugcuc

SEQ ID NO: 498872 - RNA, 21 nt, Human
ugcucaugcaaugcaugucca

SEQ ID NO: 498873 - RNA, 22 nt, Human
cagagggagcccuccaggagca

SEQ ID NO: 498874 - RNA, 22 nt, Human
gagaguuccaguaaguggauuc

SEQ ID NO: 498875 - RNA, 23 nt, Human
ugcagagggacugaagccagcuu

SEQ ID NO: 498876 - RNA, 22 nt, Human
guccuagugccuggaagcuggg

SEQ ID NO: 498877 - RNA, 21 nt, Human
cuggaucugucaucgaguuuu

SEQ ID NO: 498878 - RNA, 19 nt, Human
ggcagguagagggccaguc

SEQ ID NO: 498879 - RNA, 22 nt, Human
gcucugggaaguccuuuaccau

SEQ ID NO: 498880 - RNA, 22 nt, Human
ugcaaauggagcauguauaaga

SEQ ID NO: 498881 - RNA, 22 nt, Human
ggccugcugcuaugacuuccug

SEQ ID NO: 498882 - RNA, 22 nt, Human
gaaaacacuuugaucugaaagu

SEQ ID NO: 498883 - RNA, 22 nt, Human
gcugccuguguggccacucacu

SEQ ID NO: 498884 - RNA, 22 nt, Human
uuacaauaguuccuucuuuugu

SEQ ID NO: 498885 - RNA, 22 nt, Human
acauauuuccaugcagcauguc

SEQ ID NO: 498886 - RNA, 22 nt, Human
ucucagagcuucagaaagcacc

SEQ ID NO: 498887 - RNA, 22 nt, Human
cuuccucaugugcaaugcaagc

SEQ ID NO: 498888 - RNA, 22 nt, Human
acagccagaagucaggguggga

SEQ ID NO: 498889 - RNA, 20 nt, Human
acagagaucagcugaugggc

SEQ ID NO: 498890 - RNA, 22 nt, Human
uggcucuggauuaaucuaggaa

SEQ ID NO: 498891 - RNA, 22 nt, Human
aucugggucacaguggcaucua

SEQ ID NO: 498892 - RNA, 22 nt, Human
aaggcugaggcagugaggcaga

SEQ ID NO: 498893 - RNA, 22 nt, Human
cuccagugggggugagccuaga

SEQ ID NO: 498894 - RNA, 22 nt, Human
uggcucaggauaauuuucccaa

SEQ ID NO: 498895 - RNA, 18 nt, Human
cugggcucgagagauccu

SEQ ID NO: 498896 - RNA, 22 nt, Human
cagcugccuucugcgggaaguc

SEQ ID NO: 498897 - RNA, 22 nt, Human
ucccaagagcucugggauaagg

SEQ ID NO: 498898 - RNA, 22 nt, Human
uggcagagagagugcagucgac

SEQ ID NO: 498899 - RNA, 22 nt, Human
cugggcaggagggcucuaugga

SEQ ID NO: 498900 - RNA, 22 nt, Human
uguccugggucaaauccugguc

SEQ ID NO: 498901 - RNA, 22 nt, Human
gagugcugaaugcgagaacaga

SEQ ID NO: 498902 - RNA, 22 nt, Human
auguuggagucguaaggcaugg

SEQ ID NO: 498903 - RNA, 22 nt, Human
guguccagggcuggaagugagg

SEQ ID NO: 498904 - RNA, 22 nt, Human
uaaaaaguagugagaauggcgc

SEQ ID NO: 498905 - RNA, 17 nt, Human
uauacacagacagacug

SEQ ID NO: 498906 - RNA, 22 nt, Human
cuggcagcauuaacagagagca

SEQ ID NO: 498907 - RNA, 22 nt, Human
ucagggacuuacaaaccagaag

SEQ ID NO: 498908 - RNA, 22 nt, Human
ggagaaggaagaaagcuacuau

SEQ ID NO: 498909 - RNA, 21 nt, Human
gccacugcacuccagccuggg

SEQ ID NO: 498910 - RNA, 18 nt, Human
uggguggcuagggaguuu

SEQ ID NO: 498911 - RNA, 22 nt, Human
ccauaaucuggcuuugagagag

SEQ ID NO: 498912 - RNA, 22 nt, Human
ggcugccuccucgagacaggau

SEQ ID NO: 498913 - RNA, 21 nt, Human
gcugcugccccuagugaggcc

SEQ ID NO: 498914 - RNA, 22 nt, Human
gacauaauccuccucaccuacu

SEQ ID NO: 498915 - RNA, 18 nt, Human
cauuaugugguuauagaa

SEQ ID NO: 498916 - RNA, 22 nt, Human
aagaauuuuccagcaugucagu

SEQ ID NO: 498917 - RNA, 22 nt, Human
ugugccaggcacuugcccaggc

SEQ ID NO: 498918 - RNA, 22 nt, Human
ugcaggugagugcaggggcuca

SEQ ID NO: 498919 - RNA, 22 nt, Human
gagggcugcaaugagacagaga

SEQ ID NO: 498920 - RNA, 22 nt, Human
gagcugcuggcuccucagguua

SEQ ID NO: 498921 - RNA, 22 nt, Human
gugcagagagguggagggacuu

SEQ ID NO: 498922 - RNA, 22 nt, Human
cuuaauguggaccugguuucua

SEQ ID NO: 498923 - RNA, 22 nt, Human
ugcccuuaggaaggcucaccaa

SEQ ID NO: 498924 - RNA, 22 nt, Human
uggcuuccuaaacugauuucca

SEQ ID NO: 498925 - RNA, 22 nt, Human
gcaggauggugcccuuucugcc

SEQ ID NO: 498926 - RNA, 22 nt, Human
uccuuagcuuacaagucuucug

SEQ ID NO: 498927 - RNA, 22 nt, Human
aucaaaucauugcauuaauguu

SEQ ID NO: 498928 - RNA, 22 nt, Human
guucaaagcuccugguacagua

SEQ ID NO: 498929 - RNA, 22 nt, Human
gcugcucuccauggccgugagu

SEQ ID NO: 498930 - RNA, 22 nt, Human
caggaaaucacucugauuuugg

SEQ ID NO: 498931 - RNA, 22 nt, Human
ucagcuuugggggucucaggag

SEQ ID NO: 498932 - RNA, 22 nt, Human
auucaagaggaacaaugaagau

SEQ ID NO: 498933 - RNA, 22 nt, Human
ucaguuuccugguuuuaauauu

SEQ ID NO: 498934 - RNA, 22 nt, Human
gggcuggcaggaccugggcuga

SEQ ID NO: 498935 - RNA, 22 nt, Human
uuuggaaacugccucagcucuu

SEQ ID NO: 498936 - RNA, 22 nt, Human
gggagucugggcuagacuccuu

SEQ ID NO: 498937 - RNA, 22 nt, Human
cuugggcucugugggccuuagu

SEQ ID NO: 498938 - RNA, 22 nt, Human
ggcacagggagccgcaguugca

SEQ ID NO: 498939 - RNA, 22 nt, Human
aagcacuaggucacacaaguua

SEQ ID NO: 498940 - RNA, 22 nt, Human
agagauguucauucagcauguu

SEQ ID NO: 498941 - RNA, 22 nt, Human
uggccagugauuaaugacgcuu

SEQ ID NO: 498942 - RNA, 23 nt, Human
gagggcucugagugcuugggcca

SEQ ID NO: 498943 - RNA, 22 nt, Human
aggagaaguaaggcuagaugau

SEQ ID NO: 498944 - RNA, 22 nt, Human
ugcagaagcugcaggucagugg

SEQ ID NO: 498945 - RNA, 22 nt, Human
ugcaucugauucucaggcagaa

SEQ ID NO: 498946 - RNA, 22 nt, Human
aaggcugguuccaucccuggug

SEQ ID NO: 498947 - RNA, 22 nt, Human
agucccagacuccaguuuucug

SEQ ID NO: 498948 - RNA, 22 nt, Human
gccugguguccagaggcgagug

SEQ ID NO: 498949 - RNA, 18 nt, Human
cagauccaggcagcuauu

SEQ ID NO: 498950 - RNA, 22 nt, Human
uccuucagcuuauuucuuagga

SEQ ID NO: 498951 - RNA, 22 nt, Human
ggacucagcagccaggaguggc

SEQ ID NO: 498952 - RNA, 22 nt, Human
gcagagaaaguuuuguccucag

SEQ ID NO: 498953 - RNA, 22 nt, Human
caaggccaguuucuccuaguca

SEQ ID NO: 498954 - RNA, 22 nt, Human
uucacauaaauagaucacauca

SEQ ID NO: 498955 - RNA, 22 nt, Human
agcuccugcuugacagaagagg

SEQ ID NO: 498956 - RNA, 22 nt, Human
caggugcugcguggcggagcug

SEQ ID NO: 498957 - RNA, 22 nt, Human
uugcugaagcugccaaaccagu

SEQ ID NO: 498958 - RNA, 22 nt, Human
uccucacagaguggcaggcaau

SEQ ID NO: 498959 - RNA, 22 nt, Human
acauuucuccuacuuguuauuu

SEQ ID NO: 498960 - RNA, 22 nt, Human
cagaguggcacucugcuggaug

SEQ ID NO: 498961 - RNA, 22 nt, Human
uugaagcaggaaaauuucuauu

SEQ ID NO: 498962 - RNA, 22 nt, Human
agagcagccugugaugaugcac

SEQ ID NO: 498963 - RNA, 22 nt, Human
aauaaacugcucaauugcauca

SEQ ID NO: 498964 - RNA, 19 nt, Human
accugcaguaauaauuccu

SEQ ID NO: 498965 - RNA, 22 nt, Human
agcagcuguuagaaacaggaag

SEQ ID NO: 498966 - RNA, 22 nt, Human
cuguguuugacaggcggucucc

SEQ ID NO: 498967 - RNA, 22 nt, Human
ggcagcaguggcugcuauuguc

SEQ ID NO: 498968 - RNA, 22 nt, Human
gcagcugaauguccauugcugc

SEQ ID NO: 498969 - RNA, 22 nt, Human
uuggcuucucuuaacccuaaag

SEQ ID NO: 498970 - RNA, 22 nt, Human
uuucacauaaauauuaugccua

SEQ ID NO: 498971 - RNA, 22 nt, Human
gcugcagguugggcaacagagu

SEQ ID NO: 498972 - RNA, 22 nt, Human
aaagugcugggauuacaggccu

SEQ ID NO: 498973 - RNA, 22 nt, Human
agggcaucucuaacagucuccu

SEQ ID NO: 498974 - RNA, 22 nt, Human
aagacugucugggacaagauga

SEQ ID NO: 498975 - RNA, 22 nt, Human
aauuaacaaauguagcugugau

SEQ ID NO: 498976 - RNA, 19 nt, Human
ucuccaaaaccaaucacua

SEQ ID NO: 498977 - RNA, 22 nt, Human
gggagagagaaaacguggcgca

SEQ ID NO: 498978 - RNA, 22 nt, Human
gucuccagggcugcuggcgccu

SEQ ID NO: 498979 - RNA, 22 nt, Human
cccaguccagaccaugaccuca

SEQ ID NO: 498980 - RNA, 22 nt, Human
uccccuccaacuccaacuaugg

SEQ ID NO: 498981 - RNA, 22 nt, Human
gagcauuuuugucugcauuuua

SEQ ID NO: 498982 - RNA, 21 nt, Human
uccugcagggcagcagagugg

SEQ ID NO: 498983 - RNA, 22 nt, Human
ugucugcagaagauggcauggg

SEQ ID NO: 498984 - RNA, 22 nt, Human
acucugacuggagugagagagg

SEQ ID NO: 498985 - RNA, 22 nt, Human
cucccucucaccggagcccugg

SEQ ID NO: 498986 - RNA, 22 nt, Human
ccagcucuggcuucuugcuggg

SEQ ID NO: 498987 - RNA, 22 nt, Human
gggcucuggacccaggcaagag

SEQ ID NO: 498988 - RNA, 21 nt, Human
ccaggacuccauggggucucu

SEQ ID NO: 498989 - RNA, 22 nt, Human
ucagcugaaguggagaagcaga

SEQ ID NO: 498990 - RNA, 22 nt, Human
cuguggcucaggccuguaagcc

SEQ ID NO: 498991 - RNA, 22 nt, Human
gagcucagacucgggccugggg

SEQ ID NO: 498992 - RNA, 22 nt, Human
cccaggcuggaauuccaggccu

SEQ ID NO: 498993 - RNA, 21 nt, Human
ccagccucagaucagggagcu

SEQ ID NO: 498994 - RNA, 19 nt, Human
aaaaagaggcuauaauauu

SEQ ID NO: 498995 - RNA, 22 nt, Human
uggcagcauuuuuuccagaaca

SEQ ID NO: 498996 - RNA, 22 nt, Human
acccagcaugacaccugcacau

SEQ ID NO: 498997 - RNA, 21 nt, Human
ugcacagccauacccuccuug

SEQ ID NO: 498998 - RNA, 22 nt, Human
ugcaggcuggaggagggacuaa

SEQ ID NO: 498999 - RNA, 22 nt, Human
cuccagggggcauccacacagc

SEQ ID NO: 499000 - RNA, 22 nt, Human
caaggcaggcaguucacuugag

SEQ ID NO: 499001 - RNA, 22 nt, Human
gggacuggaguagaggccggug

SEQ ID NO: 499002 - RNA, 22 nt, Human
aguuuccaaagcauguucacac

SEQ ID NO: 499003 - RNA, 22 nt, Human
ugagggcuaaauuguggcaggu

SEQ ID NO: 499004 - RNA, 22 nt, Human
cuggaagggaaaucucuuggca

SEQ ID NO: 499005 - RNA, 22 nt, Human
ccucccagugccuccagagcag

SEQ ID NO: 499006 - RNA, 22 nt, Human
ccuguacaagagccaucuggau

SEQ ID NO: 499007 - RNA, 22 nt, Human
uucaacacaggaacaugauaua

SEQ ID NO: 499008 - RNA, 22 nt, Human
uccuuagcugugaaaugagaau

SEQ ID NO: 499009 - RNA, 22 nt, Human
gguuucagcccugcuguuccug

SEQ ID NO: 499010 - RNA, 22 nt, Human
aaauuagaccaguucaggucca

SEQ ID NO: 499011 - RNA, 22 nt, Human
cccuggagcuagucugagcaga

SEQ ID NO: 499012 - RNA, 22 nt, Human
cuugaaauccagauuucagagg

SEQ ID NO: 499013 - RNA, 22 nt, Human
uuccaggagacuuccagaaaua

SEQ ID NO: 499014 - RNA, 22 nt, Human
ucucuggcuggcaccccaggga

SEQ ID NO: 499015 - RNA, 22 nt, Human
agcuccuguggcagcucuucug

SEQ ID NO: 499016 - RNA, 22 nt, Human
gaaaugugggucaugacccauu

SEQ ID NO: 499017 - RNA, 22 nt, Human
uaguuuuuucaacaaauggugc

SEQ ID NO: 499018 - RNA, 21 nt, Human
aaacugaagagacaggaacuu

SEQ ID NO: 499019 - RNA, 22 nt, Human
cugucagcacucuacuacagau

SEQ ID NO: 499020 - RNA, 22 nt, Human
cacucugcgcugggcgccagcg

SEQ ID NO: 499021 - RNA, 22 nt, Human
aaggucuguggccaccucuggg

SEQ ID NO: 499022 - RNA, 22 nt, Human
gcacagaacagagaaauagcca

SEQ ID NO: 499023 - RNA, 18 nt, Human
augggaggggccaagaga

SEQ ID NO: 499024 - RNA, 22 nt, Human
ucacagaaguugaauuugcaug

SEQ ID NO: 499025 - RNA, 22 nt, Human
cccgacuagcugggauuacagg

SEQ ID NO: 499026 - RNA, 22 nt, Human
ugauucuauggaaggcauaagg

SEQ ID NO: 499027 - RNA, 22 nt, Human
ugaggcagcuuuuucugugugu

SEQ ID NO: 499028 - RNA, 22 nt, Human
aguccuggguccagcagguccu

SEQ ID NO: 499029 - RNA, 20 nt, Human
cuccaggggaagagccuucc

SEQ ID NO: 499030 - RNA, 22 nt, Human
cagggccacccucugcugggug

SEQ ID NO: 499031 - RNA, 22 nt, Human
cagugcaacagauucgagaagc

SEQ ID NO: 499032 - RNA, 22 nt, Human
uauuucuguuuauuuguacauc

SEQ ID NO: 499033 - RNA, 22 nt, Human
uggccucuuacgacauagccuu

SEQ ID NO: 499034 - RNA, 22 nt, Human
acagucaaucagaacagcaugu

SEQ ID NO: 499035 - RNA, 23 nt, Human
ucacacagcuggucagguacaga

SEQ ID NO: 499036 - RNA, 22 nt, Human
uuuggacuuagccugcagaauu

SEQ ID NO: 499037 - RNA, 22 nt, Human
agguccugacuccacguucuag

SEQ ID NO: 499038 - RNA, 23 nt, Human
ugucaucuccagacucccagugc

SEQ ID NO: 499039 - RNA, 22 nt, Human
uuucagaugugugucucugaag

SEQ ID NO: 499040 - RNA, 22 nt, Human
cagcuucagggacagcuucuuu

SEQ ID NO: 499041 - RNA, 22 nt, Human
gcucagugaauuuuugcccaug

SEQ ID NO: 499042 - RNA, 23 nt, Human
gaggucaaggcugcagugauugc

SEQ ID NO: 499043 - RNA, 22 nt, Human
uggcccugcagaacuagccugg

SEQ ID NO: 499044 - RNA, 22 nt, Human
uaaugagaucauaucuucugag

SEQ ID NO: 499045 - RNA, 22 nt, Human
aaggcagcuucaccacagcauu

SEQ ID NO: 499046 - RNA, 22 nt, Human
aagagcugauuaagucaugagg

SEQ ID NO: 499047 - RNA, 22 nt, Human
ucagagaugcagugccaccuac

SEQ ID NO: 499048 - RNA, 22 nt, Human
auucagaaaggguugccugguu

SEQ ID NO: 499049 - RNA, 22 nt, Human
gccagguggucuggcuccagag

SEQ ID NO: 499050 - RNA, 22 nt, Human
cacagcugcccuacuccaugug

SEQ ID NO: 499051 - RNA, 22 nt, Human
uggcagccaucagagcaggggu

SEQ ID NO: 499052 - RNA, 22 nt, Human
caggcaugagccaggccccucc

SEQ ID NO: 499053 - RNA, 22 nt, Human
uggcccaggaggccagagggca

SEQ ID NO: 499054 - RNA, 22 nt, Human
gcugucugcaucucuagagcuu

SEQ ID NO: 499055 - RNA, 22 nt, Human
ucucuuaaaagauuuuaaugac

SEQ ID NO: 499056 - RNA, 22 nt, Human
gagauuuaauuggauuaacuua

SEQ ID NO: 499057 - RNA, 22 nt, Human
cuggaagggagcacuguagaga

SEQ ID NO: 499058 - RNA, 22 nt, Human
ccugcagaggucaggccagaaa

SEQ ID NO: 499059 - RNA, 22 nt, Human
aaguccagcucuaaauaucuga

SEQ ID NO: 499060 - RNA, 22 nt, Human
cccaguuguugccggcucugga

SEQ ID NO: 499061 - RNA, 22 nt, Human
cuguggcuuugcagggcuuguu

SEQ ID NO: 499062 - RNA, 21 nt, Human
uccuuccuugagguccuuucc

SEQ ID NO: 499063 - RNA, 22 nt, Human
uggggguguccuggugcacaca

SEQ ID NO: 499064 - RNA, 22 nt, Human
cucugcccgcggaugccacguc

SEQ ID NO: 499065 - RNA, 22 nt, Human
acuuuugguucuguaacuguga

SEQ ID NO: 499066 - RNA, 22 nt, Human
cuucaauaccugcguugcuagu

SEQ ID NO: 499067 - RNA, 22 nt, Human
uuucuacauucaaaaacuacca

SEQ ID NO: 499068 - RNA, 22 nt, Human
cagagacaccccagaaaauaag

SEQ ID NO: 499069 - RNA, 22 nt, Human
ugggcagacugagcccuguccc

SEQ ID NO: 499070 - RNA, 22 nt, Human
ccaggcugcagucaaggggcau

SEQ ID NO: 499071 - RNA, 22 nt, Human
uguacagacuuugcagugugca

SEQ ID NO: 499072 - RNA, 22 nt, Human
augucacagcaggaguauucuu

SEQ ID NO: 499073 - RNA, 22 nt, Human
accaccccagaauuuuucaagg

SEQ ID NO: 499074 - RNA, 23 nt, Human
cagcuccagugcacucagguagc

SEQ ID NO: 499075 - RNA, 22 nt, Human
augaguugaagcuacaagaggc

SEQ ID NO: 499076 - RNA, 22 nt, Human
agcagccaguucucugugguag

SEQ ID NO: 499077 - RNA, 22 nt, Human
uggcagggccuaccccaauauc

SEQ ID NO: 499078 - RNA, 22 nt, Human
uacccagcuucaagucaggacu

SEQ ID NO: 499079 - RNA, 22 nt, Human
ucacacugugaagagacaagca

SEQ ID NO: 499080 - RNA, 22 nt, Human
uguguugugacauucuuggaug

SEQ ID NO: 499081 - RNA, 22 nt, Human
aauaacuucauguaacauuuaa

SEQ ID NO: 499082 - RNA, 22 nt, Human
acaggcugcccgcuccccaccu

SEQ ID NO: 499083 - RNA, 22 nt, Human
ugcccacaggaagacaccagcg

SEQ ID NO: 499084 - RNA, 21 nt, Human
aaucaagaguacugguguggc

SEQ ID NO: 499085 - RNA, 17 nt, Human
gucuggaguggccuuca

SEQ ID NO: 499086 - RNA, 22 nt, Human
agagcuggguggacuuguaguu

SEQ ID NO: 499087 - RNA, 22 nt, Human
ggucccugaagaggccuggggu

SEQ ID NO: 499088 - RNA, 19 nt, Human
cagugcuguucauucagug

SEQ ID NO: 499089 - RNA, 22 nt, Human
ucugaauguuaggaaacuuucu

SEQ ID NO: 499090 - RNA, 22 nt, Human
uuaaaugagauguucagauauu

SEQ ID NO: 499091 - RNA, 23 nt, Human
uacauucuguauuuuuauagagu

SEQ ID NO: 499092 - RNA, 22 nt, Human
uguaaagguaggugcaaaauga

SEQ ID NO: 499093 - RNA, 22 nt, Human
aggcacuguggaagacaugguu

SEQ ID NO: 499094 - RNA, 22 nt, Human
ccagagagaaauggauuugagu

SEQ ID NO: 499095 - RNA, 22 nt, Human
uuccauauuuguguggcaaaag

SEQ ID NO: 499096 - RNA, 22 nt, Human
aauguguuauuucagaauccag

SEQ ID NO: 499097 - RNA, 22 nt, Human
gcagaugguggggcaggaaaau

SEQ ID NO: 499098 - RNA, 22 nt, Human
ugugugugcaggagagcaggug

SEQ ID NO: 499099 - RNA, 22 nt, Human
cagccaucccagccugugguuc

SEQ ID NO: 499100 - RNA, 22 nt, Human
ugccuggcaacuguggugggcu

SEQ ID NO: 499101 - RNA, 19 nt, Human
agucacagggaagaggaac

SEQ ID NO: 499102 - RNA, 22 nt, Human
ccaggccuagccccugagggua

SEQ ID NO: 499103 - RNA, 22 nt, Human
cuuugcauacaauuuuuagaaa

SEQ ID NO: 499104 - RNA, 22 nt, Human
uugauacauagcacaguuuagg

SEQ ID NO: 499105 - RNA, 22 nt, Human
cauggcugcgagaagagugggu

SEQ ID NO: 499106 - RNA, 22 nt, Human
aggaccagaggccagagucagc

SEQ ID NO: 499107 - RNA, 22 nt, Human
guguggccguguauccauggcu

SEQ ID NO: 499108 - RNA, 22 nt, Human
caguagcagggauuauuuuagg

SEQ ID NO: 499109 - RNA, 22 nt, Human
uaaaauguuugcaagagaccag

SEQ ID NO: 499110 - RNA, 22 nt, Human
ccugagccugaguggugcaggg

SEQ ID NO: 499111 - RNA, 22 nt, Human
cugucagguuggucucagagcu

SEQ ID NO: 499112 - RNA, 22 nt, Human
ucucccacgguacaggauaaac

SEQ ID NO: 499113 - RNA, 22 nt, Human
gcgguccaggagcgcagguccu

SEQ ID NO: 499114 - RNA, 22 nt, Human
ucccagccuuccagucugguuu

SEQ ID NO: 499115 - RNA, 22 nt, Human
uccuggagccacggagcuuuca

SEQ ID NO: 499116 - RNA, 22 nt, Human
cagaaugagauaacccagauug

SEQ ID NO: 499117 - RNA, 22 nt, Human
uggcagaguaggauggcccugu

SEQ ID NO: 499118 - RNA, 22 nt, Human
gugauuccuauuaguacaugca

SEQ ID NO: 499119 - RNA, 22 nt, Human
uuuuccucaccuaacucaaggu

SEQ ID NO: 499120 - RNA, 22 nt, Human
ucuggaguaauuacagugacug

SEQ ID NO: 499121 - RNA, 22 nt, Human
gacagagugcagggcuagaaga

SEQ ID NO: 499122 - RNA, 21 nt, Human
cgcagagcgaacuugcggcgc

SEQ ID NO: 499123 - RNA, 22 nt, Human
uggucaggcugcucugcggcgu

SEQ ID NO: 499124 - RNA, 23 nt, Human
gcaagagacagagcauccuguuc

SEQ ID NO: 499125 - RNA, 22 nt, Human
ugucugaacaaacucugccucc

SEQ ID NO: 499126 - RNA, 22 nt, Human
gaaagcagaugaaauugcaaca

SEQ ID NO: 499127 - RNA, 22 nt, Human
gugggcuuugcuggauccuucc

SEQ ID NO: 499128 - RNA, 22 nt, Human
ccugugugguagccagcggugc

SEQ ID NO: 499129 - RNA, 19 nt, Human
acugggcuuguccucgugg

SEQ ID NO: 499130 - RNA, 20 nt, Human
ggaaucuuugcaggaaaaua

SEQ ID NO: 499131 - RNA, 22 nt, Human
gcucagagcacucagacucagc

SEQ ID NO: 499132 - RNA, 22 nt, Human
aagaaguuaauaauggugagaa

SEQ ID NO: 499133 - RNA, 22 nt, Human
aaauauguaagauuagcacuag

SEQ ID NO: 499134 - RNA, 22 nt, Human
gacagaggcaagaccagaagcc

SEQ ID NO: 499135 - RNA, 21 nt, Human
cacuccacuuagaacaggguu

SEQ ID NO: 499136 - RNA, 22 nt, Human
ggaggcccagagaggugaagug

SEQ ID NO: 499137 - RNA, 22 nt, Human
acccaggcugcuucucaguggc

SEQ ID NO: 499138 - RNA, 22 nt, Human
ugucucaucucuuaaccccacu

SEQ ID NO: 499139 - RNA, 22 nt, Human
uggccucagauuauugcacagu

SEQ ID NO: 499140 - RNA, 23 nt, Human
ugccaaaguuuaccuaacacugg

SEQ ID NO: 499141 - RNA, 17 nt, Human
gggcagggacuccuggg

SEQ ID NO: 499142 - RNA, 22 nt, Human
auuuuccucaagccucuggaag

SEQ ID NO: 499143 - RNA, 22 nt, Human
gagcuggucaguuucaggagag

SEQ ID NO: 499144 - RNA, 19 nt, Human
gcugggagcagacccuccc

SEQ ID NO: 499145 - RNA, 22 nt, Human
cugagggaugggcugggccgcc

SEQ ID NO: 499146 - RNA, 22 nt, Human
caugcacagugauaucugaaga

SEQ ID NO: 499147 - RNA, 22 nt, Human
ucagcaaaggcaauucauuauu

SEQ ID NO: 499148 - RNA, 22 nt, Human
uggccacaguguccagcagcag

SEQ ID NO: 499149 - RNA, 22 nt, Human
cagguucuggagaugcagagau

SEQ ID NO: 499150 - RNA, 22 nt, Human
ccggggacuuaaagugaaggaa

SEQ ID NO: 499151 - RNA, 22 nt, Human
caagucugaccucugggugaag

SEQ ID NO: 499152 - RNA, 22 nt, Human
acagaugaggaagagucagcca

SEQ ID NO: 499153 - RNA, 22 nt, Human
cauugcacagcccuguggugau

SEQ ID NO: 499154 - RNA, 22 nt, Human
gggagcugaauggcaauggaga

SEQ ID NO: 499155 - RNA, 22 nt, Human
aaagguuuucaucacagcaaga

SEQ ID NO: 499156 - RNA, 23 nt, Human
ugagcaucacaggagaaccaggc

SEQ ID NO: 499157 - RNA, 22 nt, Human
gcacggcaagacggggccuccu

SEQ ID NO: 499158 - RNA, 22 nt, Human
acucccagguugccuggcaggc

SEQ ID NO: 499159 - RNA, 22 nt, Human
gagguuucacuguguuguccag

SEQ ID NO: 499160 - RNA, 22 nt, Human
ucccaaggccaggcaucuagaa

SEQ ID NO: 499161 - RNA, 22 nt, Human
agagccuggaccugagcuacaa

SEQ ID NO: 499162 - RNA, 22 nt, Human
uuauuuguaucaaggacgguug

SEQ ID NO: 499163 - RNA, 22 nt, Human
aagaaugagcucaaagaucuua

SEQ ID NO: 499164 - RNA, 22 nt, Human
ucccuucacagaugcgauguuu

SEQ ID NO: 499165 - RNA, 22 nt, Human
uccuuuggaacugacuccguua

SEQ ID NO: 499166 - RNA, 22 nt, Human
augaucucauucuuucaaaggg

SEQ ID NO: 499167 - RNA, 22 nt, Human
uguuaaucaaucaacaguauua

SEQ ID NO: 499168 - RNA, 19 nt, Human
gggaugggcccucacccuc

SEQ ID NO: 499169 - RNA, 22 nt, Human
ccaccaggacagcccugagggg

SEQ ID NO: 499170 - RNA, 19 nt, Human
ccuuccuccccagggccau

SEQ ID NO: 499171 - RNA, 22 nt, Human
uguacaugugucuguauaucuu

SEQ ID NO: 499172 - RNA, 22 nt, Human
uauuuuacuuuaaagcgagaga

SEQ ID NO: 499173 - RNA, 22 nt, Human
agagcaauggcauccagcugau

SEQ ID NO: 499174 - RNA, 22 nt, Human
caauauauaaugaguacuuucc

SEQ ID NO: 499175 - RNA, 22 nt, Human
ugagcuuacuucuguacacaga

SEQ ID NO: 499176 - RNA, 22 nt, Human
ugauguucuguauaucauauag

SEQ ID NO: 499177 - RNA, 22 nt, Human
ccaguccagugccaugcauggc

SEQ ID NO: 499178 - RNA, 22 nt, Human
aaacagcuccuuaguuuccauc

SEQ ID NO: 499179 - RNA, 22 nt, Human
auccuugacacacuccaguacu

SEQ ID NO: 499180 - RNA, 22 nt, Human
augggaggaagagaagaugucu

SEQ ID NO: 499181 - RNA, 22 nt, Human
aggagccccucuucaguccugg

SEQ ID NO: 499182 - RNA, 22 nt, Human
gcccagcugucuggcagggaug

SEQ ID NO: 499183 - RNA, 20 nt, Human
uccagcacccucacagagaa

SEQ ID NO: 499184 - RNA, 22 nt, Human
auaauuuaauuuucacaguggu

SEQ ID NO: 499185 - RNA, 22 nt, Human
auuucuacaguacacaugcauu

SEQ ID NO: 499186 - RNA, 22 nt, Human
gaggucuggaccaagucgcccc

SEQ ID NO: 499187 - RNA, 22 nt, Human
ccaaaguccauaguuuacauaa

SEQ ID NO: 499188 - RNA, 22 nt, Human
uaugcauagguaucuauacuca

SEQ ID NO: 499189 - RNA, 22 nt, Human
augcaguacauacaaacacuga

SEQ ID NO: 499190 - RNA, 19 nt, Human
uccauaagcuuguguucau

SEQ ID NO: 499191 - RNA, 22 nt, Human
cagcugcccaagccccagaugu

SEQ ID NO: 499192 - RNA, 22 nt, Human
aggaaagguagcgugccagcag

SEQ ID NO: 499193 - RNA, 22 nt, Human
agcauaaguugguacagccacu

SEQ ID NO: 499194 - RNA, 22 nt, Human
ggcagcuguuggcucucuagga

SEQ ID NO: 499195 - RNA, 22 nt, Human
uucuaagucacucagauuuugg

SEQ ID NO: 499196 - RNA, 22 nt, Human
cagguaagagacggauuggccc

SEQ ID NO: 499197 - RNA, 22 nt, Human
ucugggcuuuacacugugcuua

SEQ ID NO: 499198 - RNA, 22 nt, Human
ucuccugucuucucagcacccc

SEQ ID NO: 499199 - RNA, 22 nt, Human
uggaggaugccauccaggauac

SEQ ID NO: 499200 - RNA, 22 nt, Human
ggaggcucgcuggucgcacagc

SEQ ID NO: 499201 - RNA, 22 nt, Human
agccagagcagggaauuggaca

SEQ ID NO: 499202 - RNA, 22 nt, Human
gagcagugaagacagaaguaca

SEQ ID NO: 499203 - RNA, 22 nt, Human
augcuuuuccaggagaaauaua

SEQ ID NO: 499204 - RNA, 22 nt, Human
agagacaggaguucuguuucca

SEQ ID NO: 499205 - RNA, 22 nt, Human
agcugccuccauggucaaagau

SEQ ID NO: 499206 - RNA, 22 nt, Human
guguccagggccguguugucuu

SEQ ID NO: 499207 - RNA, 22 nt, Human
ggcaggcuugauauggggggac

SEQ ID NO: 499208 - RNA, 22 nt, Human
agagggaucacccuguuucugg

SEQ ID NO: 499209 - RNA, 22 nt, Human
aggcugccaaagcuucugucuc

SEQ ID NO: 499210 - RNA, 22 nt, Human
cagcuugcuaauuuugacuuca

SEQ ID NO: 499211 - RNA, 22 nt, Human
gugaaggaccaauaugacucau

SEQ ID NO: 499212 - RNA, 19 nt, Human
uuuggcacucugaaguguu

SEQ ID NO: 499213 - RNA, 22 nt, Human
gaaucucaaauuaagaauuuua

SEQ ID NO: 499214 - RNA, 20 nt, Human
uuguuuuaaauccuggauga

SEQ ID NO: 499215 - RNA, 22 nt, Human
uaaguauuggccuauagcuaga

SEQ ID NO: 499216 - RNA, 22 nt, Human
ugagaaugugcaauauccuucc

SEQ ID NO: 499217 - RNA, 22 nt, Human
ggccaggaagggaagaucagca

SEQ ID NO: 499218 - RNA, 22 nt, Human
uuguaacaggcacucugugcca

SEQ ID NO: 499219 - RNA, 23 nt, Human
uucuggauguucuagucugagag

SEQ ID NO: 499220 - RNA, 22 nt, Human
auaaacugaagggaacacugag

SEQ ID NO: 499221 - RNA, 22 nt, Human
uguggguuuaagaggcagcaug

SEQ ID NO: 499222 - RNA, 22 nt, Human
uuauuaaugaguacaaguuauu

SEQ ID NO: 499223 - RNA, 22 nt, Human
ccagagagguagcuuacccucu

SEQ ID NO: 499224 - RNA, 22 nt, Human
aaggucauggcaaauuacuuuu

SEQ ID NO: 499225 - RNA, 22 nt, Human
aaaucaguucucccuuucuuca

SEQ ID NO: 499226 - RNA, 22 nt, Human
ucaggcucagguuaggggccaa

SEQ ID NO: 499227 - RNA, 22 nt, Human
gagcagcuggacaggccucccu

SEQ ID NO: 499228 - RNA, 22 nt, Human
ugucugaaacuuaugauauacu

SEQ ID NO: 499229 - RNA, 22 nt, Human
cauugcaacuucaaacuccugg

SEQ ID NO: 499230 - RNA, 22 nt, Human
accugcaguggccacuccuaau

SEQ ID NO: 499231 - RNA, 19 nt, Human
cugugcaggccgggcugag

SEQ ID NO: 499232 - RNA, 22 nt, Human
ucccugggccuccugcuaugca

SEQ ID NO: 499233 - RNA, 22 nt, Human
ugcagagaaaacuccuggguac

SEQ ID NO: 499234 - RNA, 22 nt, Human
uuggagcccugaggaucuggau

SEQ ID NO: 499235 - RNA, 22 nt, Human
guggcuucuggcugggccucag

SEQ ID NO: 499236 - RNA, 22 nt, Human
ucacagaaaaguggagagccua

SEQ ID NO: 499237 - RNA, 22 nt, Human
gcccagugguaaaagcaggccu

SEQ ID NO: 499238 - RNA, 22 nt, Human
agcugguguccuccuggagcug

SEQ ID NO: 499239 - RNA, 22 nt, Human
gcauuaauguaagacccacucc

SEQ ID NO: 499240 - RNA, 22 nt, Human
caagaugacaaggcuggaggcu

SEQ ID NO: 499241 - RNA, 22 nt, Human
cucugggucucccugaggcuaa

SEQ ID NO: 499242 - RNA, 22 nt, Human
aaugcaaugcagcaccuccuug

SEQ ID NO: 499243 - RNA, 22 nt, Human
auuccuuguauaucuacaugca

SEQ ID NO: 499244 - RNA, 22 nt, Human
cagaaauguuuauauguggugu

SEQ ID NO: 499245 - RNA, 18 nt, Human
gaaaugugauucuagggc

SEQ ID NO: 499246 - RNA, 22 nt, Human
ggcugcaggaacgacggagggg

SEQ ID NO: 499247 - RNA, 22 nt, Human
gccugcagcaugcuaggucuug

SEQ ID NO: 499248 - RNA, 22 nt, Human
auaaaacuuauuagaauugugu

SEQ ID NO: 499249 - RNA, 22 nt, Human
gcuggccccgagugcuacgcuc

SEQ ID NO: 499250 - RNA, 22 nt, Human
cagcccagcacuaaguagauuu

SEQ ID NO: 499251 - RNA, 22 nt, Human
acaugauuuuaguaucauaaua

SEQ ID NO: 499252 - RNA, 22 nt, Human
uccugccagcuggggcugcuuc

SEQ ID NO: 499253 - RNA, 22 nt, Human
accuggcuuccaaucuaggagc

SEQ ID NO: 499254 - RNA, 22 nt, Human
aagaggucauaccagauaaggg

SEQ ID NO: 499255 - RNA, 22 nt, Human
caggagcuucugcccauggcca

SEQ ID NO: 499256 - RNA, 22 nt, Human
aaguucaaguguaaucuuuauu

SEQ ID NO: 499257 - RNA, 22 nt, Human
ccacaggcugcugcaggucccg

SEQ ID NO: 499258 - RNA, 22 nt, Human
ucccagcgcggggggaggaucc

SEQ ID NO: 499259 - RNA, 22 nt, Human
guuuuggcagccguguucacau

SEQ ID NO: 499260 - RNA, 22 nt, Human
aaauacacguacauguguaaaa

SEQ ID NO: 499261 - RNA, 22 nt, Human
agagaaaagaguucaggcuuug

SEQ ID NO: 499262 - RNA, 22 nt, Human
agggugcauguuugcaagagug

SEQ ID NO: 499263 - RNA, 21 nt, Human
ggugucaguuuuggucauuag

SEQ ID NO: 499264 - RNA, 22 nt, Human
uuucagcacuuuaggcagcagg

SEQ ID NO: 499265 - RNA, 21 nt, Human
uggcugccuacaugcugcagg

SEQ ID NO: 499266 - RNA, 22 nt, Human
cagggccaagcugcagcaucug

SEQ ID NO: 499267 - RNA, 22 nt, Human
cuguggcuguauuuggccagag

SEQ ID NO: 499268 - RNA, 22 nt, Human
uuuauugcauacacaaauguca

SEQ ID NO: 499269 - RNA, 22 nt, Human
gccuggcuauggccucccccau

SEQ ID NO: 499270 - RNA, 22 nt, Human
aucacgucaugguuugaucugg

SEQ ID NO: 499271 - RNA, 22 nt, Human
cagcauuuucuuaauguaggug

SEQ ID NO: 499272 - RNA, 22 nt, Human
aagugugggaaguugcuaaaau

SEQ ID NO: 499273 - RNA, 22 nt, Human
cuggcagcuuagcacucugguu

SEQ ID NO: 499274 - RNA, 22 nt, Human
caggugccgggaaugcagcaau

SEQ ID NO: 499275 - RNA, 22 nt, Human
aaacaaagccagggaaguuaug

SEQ ID NO: 499276 - RNA, 22 nt, Human
cugggcagccucacacaauguu

SEQ ID NO: 499277 - RNA, 22 nt, Human
auauuuaacuggucccaauaua

SEQ ID NO: 499278 - RNA, 22 nt, Human
aguguacauguuuacagcaucu

SEQ ID NO: 499279 - RNA, 23 nt, Human
gugcucugcggucugcuagucug

SEQ ID NO: 499280 - RNA, 23 nt, Human
ggcuccuggauucaaauccugcc

SEQ ID NO: 499281 - RNA, 22 nt, Human
aagauauagauaaaacuaugca

SEQ ID NO: 499282 - RNA, 22 nt, Human
gggcuguggagccgcgagggcu

SEQ ID NO: 499283 - RNA, 22 nt, Human
ugagcagcccuuccuccggcca

SEQ ID NO: 499284 - RNA, 22 nt, Human
uguuacuuaucucacgugaugc

SEQ ID NO: 499285 - RNA, 22 nt, Human
uuuucucuauauugucugugaa

SEQ ID NO: 499286 - RNA, 22 nt, Human
cccuggccccucacuccgaggc

SEQ ID NO: 499287 - RNA, 22 nt, Human
uagugcaaugugaggcaguacc

SEQ ID NO: 499288 - RNA, 22 nt, Human
uggcuccuucauucuccugcca

SEQ ID NO: 499289 - RNA, 22 nt, Human
ccugucagaugaaguaauugug

SEQ ID NO: 499290 - RNA, 22 nt, Human
auguguccacaggugugagaga

SEQ ID NO: 499291 - RNA, 22 nt, Human
uguccugggaggcgggguccag

SEQ ID NO: 499292 - RNA, 22 nt, Human
ccaggcauggggagagccagau

SEQ ID NO: 499293 - RNA, 21 nt, Human
aggccucuucauggccaugau

SEQ ID NO: 499294 - RNA, 22 nt, Human
cuggggcccugggucugcccuc

SEQ ID NO: 499295 - RNA, 22 nt, Human
gaugcacaugugaguauagaag

SEQ ID NO: 499296 - RNA, 22 nt, Human
gcagcagcucugaaugggcccc

SEQ ID NO: 499297 - RNA, 22 nt, Human
uugcuuuuuaauuaggaggcag

SEQ ID NO: 499298 - RNA, 22 nt, Human
acugagcugugacaaugcuuaa

SEQ ID NO: 499299 - RNA, 22 nt, Human
aauacaaucaaauucacuagca

SEQ ID NO: 499300 - RNA, 22 nt, Human
gggcugaccccaccccucacuc

SEQ ID NO: 499301 - RNA, 22 nt, Human
aacaaaggccguuaauaaccac

SEQ ID NO: 499302 - RNA, 22 nt, Human
uuccuguauuuugcgaauuuuc

SEQ ID NO: 499303 - RNA, 22 nt, Human
gucagaggaauggaugagugau

SEQ ID NO: 499304 - RNA, 22 nt, Human
gggugggaacaggaugccagga

SEQ ID NO: 499305 - RNA, 22 nt, Human
cauggccagggcagauggcagg

SEQ ID NO: 499306 - RNA, 22 nt, Human
cucugcuuuuuagggagccuag

SEQ ID NO: 499307 - RNA, 22 nt, Human
uggcucuguuuuaugaguacca

SEQ ID NO: 499308 - RNA, 22 nt, Human
uuuuccucaggaaugcuaagcu

SEQ ID NO: 499309 - RNA, 22 nt, Human
aaggaugauugguaaugacacu

SEQ ID NO: 499310 - RNA, 21 nt, Human
cucuggagucaagagcuucca

SEQ ID NO: 499311 - RNA, 23 nt, Human
cuuucauugugguuucacagagc

SEQ ID NO: 499312 - RNA, 22 nt, Human
ugacagcugagccccaggcaag

SEQ ID NO: 499313 - RNA, 22 nt, Human
gggcacugcuggaggcucccug

SEQ ID NO: 499314 - RNA, 22 nt, Human
ccuuagugugccugaggcagau

SEQ ID NO: 499315 - RNA, 22 nt, Human
acaguaauuaaaauggaucugc

SEQ ID NO: 499316 - RNA, 22 nt, Human
uuguccugugucuguuuggauu

SEQ ID NO: 499317 - RNA, 22 nt, Human
gucacaggccuggaugaggggc

SEQ ID NO: 499318 - RNA, 22 nt, Human
ucauugcaggcauuccccugcc

SEQ ID NO: 499319 - RNA, 22 nt, Human
cuuuauguuggggugucuuagu

SEQ ID NO: 499320 - RNA, 22 nt, Human
ucaguuuuuaagaguuaugcga

SEQ ID NO: 499321 - RNA, 22 nt, Human
ucuguucagaauuguaacacuc

SEQ ID NO: 499322 - RNA, 22 nt, Human
auuucucacucacaguccaugu

SEQ ID NO: 499323 - RNA, 20 nt, Human
cuggggacagcaauggcugu

SEQ ID NO: 499324 - RNA, 22 nt, Human
ggagcagcacugccacacagag

SEQ ID NO: 499325 - RNA, 22 nt, Human
gagggugggcuccuaucugggu

SEQ ID NO: 499326 - RNA, 22 nt, Human
cagaguguugaccauaagccca

SEQ ID NO: 499327 - RNA, 19 nt, Human
uaaggccaaaaguaagugu

SEQ ID NO: 499328 - RNA, 22 nt, Human
aaguucaaggcagguccugagg

SEQ ID NO: 499329 - RNA, 22 nt, Human
uccuaauugcuucauguguugu

SEQ ID NO: 499330 - RNA, 19 nt, Human
uagcugccuguuaccucca

SEQ ID NO: 499331 - RNA, 22 nt, Human
uccugagauguggagcuccaug

SEQ ID NO: 499332 - RNA, 22 nt, Human
uugaggagcaggaugggaggcu

SEQ ID NO: 499333 - RNA, 22 nt, Human
cccuggaguagcacugggucgc

SEQ ID NO: 499334 - RNA, 22 nt, Human
gucaggaaaaauugauaauuuu

SEQ ID NO: 499335 - RNA, 23 nt, Human
ugcagggcaaguuagagacccca

SEQ ID NO: 499336 - RNA, 22 nt, Human
gggagggccagugcucucuaga

SEQ ID NO: 499337 - RNA, 22 nt, Human
gagccagcuacauggucugcaa

SEQ ID NO: 499338 - RNA, 22 nt, Human
aggcagccagauggcagccugc

SEQ ID NO: 499339 - RNA, 22 nt, Human
gcagcugguuaaugggagaauu

SEQ ID NO: 499340 - RNA, 22 nt, Human
cucucuggauauuuguaugcug

SEQ ID NO: 499341 - RNA, 22 nt, Human
gcacacaguagggauucaauga

SEQ ID NO: 499342 - RNA, 22 nt, Human
gguuggaggugggaauagcuag

SEQ ID NO: 499343 - RNA, 22 nt, Human
acucacauuucaucaggccaag

SEQ ID NO: 499344 - RNA, 22 nt, Human
gcugucucggggcuuucuccug

SEQ ID NO: 499345 - RNA, 22 nt, Human
gaaggccauugcguccugggau

SEQ ID NO: 499346 - RNA, 22 nt, Human
acaacaaagacacuugaaauga

SEQ ID NO: 499347 - RNA, 22 nt, Human
ccagcucuguaagcugugaaau

SEQ ID NO: 499348 - RNA, 22 nt, Human
uugagaagaggcuuuguaggaa

SEQ ID NO: 499349 - RNA, 22 nt, Human
uuguuuucuccacugcaucuua

SEQ ID NO: 499350 - RNA, 22 nt, Human
ggaaagccaggugcucuggugu

SEQ ID NO: 499351 - RNA, 22 nt, Human
ggcugccagugagugcagaccg

SEQ ID NO: 499352 - RNA, 22 nt, Human
gaaguagaaaacucaguuucaa

SEQ ID NO: 499353 - RNA, 22 nt, Human
agugcauugcaucucugcuuca

SEQ ID NO: 499354 - RNA, 22 nt, Human
cccuggaggcggauguugcagu

SEQ ID NO: 499355 - RNA, 21 nt, Human
aggcacuguuugugguuuggg

SEQ ID NO: 499356 - RNA, 22 nt, Human
aagaaauuaaugugccauuacu

SEQ ID NO: 499357 - RNA, 22 nt, Human
acaagaauuauuucuaguuaac

SEQ ID NO: 499358 - RNA, 17 nt, Human
ggcuggaggggacccgg

SEQ ID NO: 499359 - RNA, 19 nt, Human
agacaaguuuccagaagcc

SEQ ID NO: 499360 - RNA, 22 nt, Human
ggcugaggggcccagaggaaca

SEQ ID NO: 499361 - RNA, 22 nt, Human
gcugccuggaauaacggcuggc

SEQ ID NO: 499362 - RNA, 22 nt, Human
guaguucugcagugucaccuga

SEQ ID NO: 499363 - RNA, 22 nt, Human
cuguggcugcgccaucgaaaac

SEQ ID NO: 499364 - RNA, 22 nt, Human
ccuggccucgugcucacggcuc

SEQ ID NO: 499365 - RNA, 22 nt, Human
aauuucucauggauucaguuau

SEQ ID NO: 499366 - RNA, 22 nt, Human
cugggcuggauaauucuuugcu

SEQ ID NO: 499367 - RNA, 22 nt, Human
aggccagguggucaugcuugcu

SEQ ID NO: 499368 - RNA, 22 nt, Human
uugaacaguuuugucagguuca

SEQ ID NO: 499369 - RNA, 22 nt, Human
acugggccuggauuggcguguc

SEQ ID NO: 499370 - RNA, 22 nt, Human
ccacugucuuuuccaggcugaa

SEQ ID NO: 499371 - RNA, 22 nt, Human
gcugggccgaccugggcugcag

SEQ ID NO: 499372 - RNA, 22 nt, Human
uggagucacuuccauaugggaa

SEQ ID NO: 499373 - RNA, 22 nt, Human
acagggcagagaggcaggcuug

SEQ ID NO: 499374 - RNA, 22 nt, Human
aauuagcuuuccgccaucacac

SEQ ID NO: 499375 - RNA, 22 nt, Human
gaguggguaccggagcaggugc

SEQ ID NO: 499376 - RNA, 22 nt, Human
caggcaaggagcuggcucaagu

SEQ ID NO: 499377 - RNA, 22 nt, Human
uuuugugagcccauaaaugcca

SEQ ID NO: 499378 - RNA, 22 nt, Human
auuauguagguuaggugguugu

SEQ ID NO: 499379 - RNA, 22 nt, Human
ccugaggcuggcccuuccaucc

SEQ ID NO: 499380 - RNA, 22 nt, Human
uggccugcccagagcagcucug

SEQ ID NO: 499381 - RNA, 22 nt, Human
ugggcuggugagggaucauuua

SEQ ID NO: 499382 - RNA, 22 nt, Human
cacaguggauugggugaugccc

SEQ ID NO: 499383 - RNA, 18 nt, Human
gcugggguugagcucucc

SEQ ID NO: 499384 - RNA, 22 nt, Human
guucauauuacuuugagugcag

SEQ ID NO: 499385 - RNA, 22 nt, Human
cuguggcugcgcccugggggag

SEQ ID NO: 499386 - RNA, 22 nt, Human
ggcagggaaacagcugauccca

SEQ ID NO: 499387 - RNA, 22 nt, Human
cucuguccacagguuugucccu

SEQ ID NO: 499388 - RNA, 22 nt, Human
cugggcaaauugugccagcuau

SEQ ID NO: 499389 - RNA, 22 nt, Human
cagcagcagauucagcgucugg

SEQ ID NO: 499390 - RNA, 21 nt, Human
uagaaucacuaauaagaugua

SEQ ID NO: 499391 - RNA, 22 nt, Human
uccaggucagacuucugugccc

SEQ ID NO: 499392 - RNA, 22 nt, Human
uucucuucuguucagugcccaa

SEQ ID NO: 499393 - RNA, 20 nt, Human
cuguggcaucugucauggug

SEQ ID NO: 499394 - RNA, 22 nt, Human
ugugugaacucucugauguaca

SEQ ID NO: 499395 - RNA, 22 nt, Human
ccucagccuuggccccaggcag

SEQ ID NO: 499396 - RNA, 22 nt, Human
caggcagccugagggaucuggg

SEQ ID NO: 499397 - RNA, 22 nt, Human
gccucugcaucuucgccgcacu

SEQ ID NO: 499398 - RNA, 18 nt, Human
gcuucucauuucuaagca

SEQ ID NO: 499399 - RNA, 22 nt, Human
uuucagaaccaagagagacauc

SEQ ID NO: 499400 - RNA, 21 nt, Human
gaagacaaaugggaauagcug

SEQ ID NO: 499401 - RNA, 22 nt, Human
gugccucagcaccgccugcagc

SEQ ID NO: 499402 - RNA, 22 nt, Human
cagugcaagugacugaucaagg

SEQ ID NO: 499403 - RNA, 22 nt, Human
caaaggcaacauauacuuguuu

SEQ ID NO: 499404 - RNA, 22 nt, Human
uccagcagaccaucaaggcuca

SEQ ID NO: 499405 - RNA, 22 nt, Human
ucuuuaauauaaaggaaugaau

SEQ ID NO: 499406 - RNA, 22 nt, Human
caguaaaagauggaaauagaau

SEQ ID NO: 499407 - RNA, 22 nt, Human
ccucuuugacuauaguaguuaa

SEQ ID NO: 499408 - RNA, 22 nt, Human
cagggccuccccggcagucuuu

SEQ ID NO: 499409 - RNA, 22 nt, Human
gggaccugcgccacucacuguc

SEQ ID NO: 499410 - RNA, 22 nt, Human
uccuggccuuauccccaaacug

SEQ ID NO: 499411 - RNA, 22 nt, Human
caguucuuaauaccaugugguu

SEQ ID NO: 499412 - RNA, 22 nt, Human
gccuucuguccaaccccacgau

SEQ ID NO: 499413 - RNA, 22 nt, Human
uaaaaguggauaagcuguagga

SEQ ID NO: 499414 - RNA, 22 nt, Human
uagaggugucacuuugggaagu

SEQ ID NO: 499415 - RNA, 22 nt, Human
auaagcuuccuguuagaaaccg

SEQ ID NO: 499416 - RNA, 22 nt, Human
ggccacagugggaaauccuggg

SEQ ID NO: 499417 - RNA, 22 nt, Human
aaugcacacauuugguacugaa

SEQ ID NO: 499418 - RNA, 22 nt, Human
uucuuugugcugaagaagcccu

SEQ ID NO: 499419 - RNA, 22 nt, Human
cagcaggaggcauggcuucccu

SEQ ID NO: 499420 - RNA, 22 nt, Human
cagcccugcucuuagugucucc

SEQ ID NO: 499421 - RNA, 22 nt, Human
ggagucugacucugacccugga

SEQ ID NO: 499422 - RNA, 20 nt, Human
gucuccacuggggguuaacc

SEQ ID NO: 499423 - RNA, 22 nt, Human
ggagaaggcacacccaccucug

SEQ ID NO: 499424 - RNA, 22 nt, Human
gucacacuagggccaaguggag

SEQ ID NO: 499425 - RNA, 20 nt, Human
gaguuccccauuucuccugg

SEQ ID NO: 499426 - RNA, 22 nt, Human
ugucucugccagcuagcagaau

SEQ ID NO: 499427 - RNA, 22 nt, Human
gccaccagccccaugcgcugug

SEQ ID NO: 499428 - RNA, 22 nt, Human
ugagggagucaugauuaaggaa

SEQ ID NO: 499429 - RNA, 22 nt, Human
cagccaggccuggugaccaaag

SEQ ID NO: 499430 - RNA, 22 nt, Human
acagccugcugccugcuucuug

SEQ ID NO: 499431 - RNA, 22 nt, Human
agccacagcaacaagugcaauu

SEQ ID NO: 499432 - RNA, 22 nt, Human
gcucaggaucccaggggugugc

SEQ ID NO: 499433 - RNA, 22 nt, Human
aaggcaguacuuuauguccaua

SEQ ID NO: 499434 - RNA, 22 nt, Human
auaauggccgggggcugaaugc

SEQ ID NO: 499435 - RNA, 22 nt, Human
guaagagcacugucuccugcug

SEQ ID NO: 499436 - RNA, 21 nt, Human
aaaguucaugcuuuaauauuc

SEQ ID NO: 499437 - RNA, 22 nt, Human
uuucucaucuggaaacagugcu

SEQ ID NO: 499438 - RNA, 20 nt, Human
ccugucuggagacaaagaga

SEQ ID NO: 499439 - RNA, 22 nt, Human
ucagucuccuuuccucuagaca

SEQ ID NO: 499440 - RNA, 22 nt, Human
cagucuccaaaucagucugaau

SEQ ID NO: 499441 - RNA, 22 nt, Human
uaaaugugucuuuuuaaggccu

SEQ ID NO: 499442 - RNA, 18 nt, Human
caggaugagugaugggga

SEQ ID NO: 499443 - RNA, 22 nt, Human
aguucuucauaaccuuacugug

SEQ ID NO: 499444 - RNA, 22 nt, Human
ucucccaagugaccaggaaaga

SEQ ID NO: 499445 - RNA, 22 nt, Human
uagcagggguagauagagugug

SEQ ID NO: 499446 - RNA, 22 nt, Human
guugcacaguuccucaagcagg

SEQ ID NO: 499447 - RNA, 22 nt, Human
gugugcagaagacacaagacau

SEQ ID NO: 499448 - RNA, 22 nt, Human
uuccauaaaggugauaguauac

SEQ ID NO: 499449 - RNA, 20 nt, Human
ggcugugcccuuccguggcc

SEQ ID NO: 499450 - RNA, 23 nt, Human
agccagggcacugguggagauug

SEQ ID NO: 499451 - RNA, 22 nt, Human
ggagaggacauggcucccacag

SEQ ID NO: 499452 - RNA, 19 nt, Human
caaguucuggagauuaggg

SEQ ID NO: 499453 - RNA, 22 nt, Human
acagggccaggugagaggugcu

SEQ ID NO: 499454 - RNA, 22 nt, Human
auguuucagauacagaucaaau

SEQ ID NO: 499455 - RNA, 22 nt, Human
aguagaaagaaggcacugggcc

SEQ ID NO: 499456 - RNA, 22 nt, Human
ccacagagacaggguccuugcu

SEQ ID NO: 499457 - RNA, 22 nt, Human
cuguccugaaguuuucaugaga

SEQ ID NO: 499458 - RNA, 22 nt, Human
uucuaauuguguuugcauaucu

SEQ ID NO: 499459 - RNA, 22 nt, Human
uuccagaauuuuguucugcuug

SEQ ID NO: 499460 - RNA, 22 nt, Human
aaguuacaguuacagaauggag

SEQ ID NO: 499461 - RNA, 22 nt, Human
auaaauuaugaauggcccuuuu

SEQ ID NO: 499462 - RNA, 23 nt, Human
guucauuuuauugucugauugcu

SEQ ID NO: 499463 - RNA, 22 nt, Human
cgcauacauagaaacacacaga

SEQ ID NO: 499464 - RNA, 22 nt, Human
aagggggcacagucacuguaau

SEQ ID NO: 499465 - RNA, 22 nt, Human
ggaaaaggccauuguuucucug

SEQ ID NO: 499466 - RNA, 20 nt, Human
gagguagggcuuaaggcaag

SEQ ID NO: 499467 - RNA, 22 nt, Human
aaugcuguaaagaugcuaucug

SEQ ID NO: 499468 - RNA, 15 nt, Human
aggcacugugggacc

SEQ ID NO: 499469 - RNA, 22 nt, Human
caagaaauuucuuaagaacuaa

SEQ ID NO: 499470 - RNA, 22 nt, Human
aggccagcccugggcugagaga

SEQ ID NO: 499471 - RNA, 22 nt, Human
caaaugauaccuauuacuaggc

SEQ ID NO: 499472 - RNA, 22 nt, Human
ccacuguuuuucaguuaacuuu

SEQ ID NO: 499473 - RNA, 22 nt, Human
uaagauaugguaggaaguuugg

SEQ ID NO: 499474 - RNA, 21 nt, Human
ggucuuccaaauaaggagaaa

SEQ ID NO: 499475 - RNA, 22 nt, Human
ccugggcuuuggaacaguacuu

SEQ ID NO: 499476 - RNA, 22 nt, Human
gggcggggcuuccguccuccac

SEQ ID NO: 499477 - RNA, 22 nt, Human
aaaguuucaauagaggaagugg

SEQ ID NO: 499478 - RNA, 22 nt, Human
uccagccuaggggaacagcugc

SEQ ID NO: 499479 - RNA, 22 nt, Human
ugucauuuauucucuuauucua

SEQ ID NO: 499480 - RNA, 22 nt, Human
auucuguauggaaaagcacuau

SEQ ID NO: 499481 - RNA, 22 nt, Human
caugugugaaucuugugaucau

SEQ ID NO: 499482 - RNA, 22 nt, Human
agaacagcaguuaugguucauu

SEQ ID NO: 499483 - RNA, 22 nt, Human
gacuagucauuugcauuccguc

SEQ ID NO: 499484 - RNA, 22 nt, Human
acuuucuuauccaugaucucac

SEQ ID NO: 499485 - RNA, 22 nt, Human
aacagugagaagguggacagga

SEQ ID NO: 499486 - RNA, 20 nt, Human
uauuuguauuugggaaaguu

SEQ ID NO: 499487 - RNA, 22 nt, Human
uuuccuugggucucuuaguggc

SEQ ID NO: 499488 - RNA, 22 nt, Human
ugggccugggagggcagacgcu

SEQ ID NO: 499489 - RNA, 22 nt, Human
uuaguaaauaaagucuacuuuc

SEQ ID NO: 499490 - RNA, 22 nt, Human
cuucuggguguggagugaggac

SEQ ID NO: 499491 - RNA, 22 nt, Human
ugcagugccucggcagugcagc

SEQ ID NO: 499492 - RNA, 22 nt, Human
acuacagaagucuuauuagaga

SEQ ID NO: 499493 - RNA, 22 nt, Human
uucugggguuaugggugauucu

SEQ ID NO: 499494 - RNA, 22 nt, Human
gaggcuggcagaaaagcacagg

SEQ ID NO: 499495 - RNA, 19 nt, Human
ugacaggcuguugccuuga

SEQ ID NO: 499496 - RNA, 22 nt, Human
agcauauaggaaauguugaauc

SEQ ID NO: 499497 - RNA, 22 nt, Human
gccuuuuuuguugcucugucac

SEQ ID NO: 499498 - RNA, 22 nt, Human
gcuguucacggaggaggauggg

SEQ ID NO: 499499 - RNA, 17 nt, Human
agaggcagauacuugga

SEQ ID NO: 499500 - RNA, 22 nt, Human
ugaggggcggccugcagaggcc

SEQ ID NO: 499501 - RNA, 22 nt, Human
aggagggcaggcuggcugccua

SEQ ID NO: 499502 - RNA, 22 nt, Human
aauuaaaagauaacccaugagu

SEQ ID NO: 499503 - RNA, 22 nt, Human
auuauuagugauguuguuacug

SEQ ID NO: 499504 - RNA, 22 nt, Human
ccuggguuauuuuggucuagug

SEQ ID NO: 499505 - RNA, 22 nt, Human
gcugcucuugaggggcucacug

SEQ ID NO: 499506 - RNA, 22 nt, Human
aauuuguuagcauacucuaguu

SEQ ID NO: 499507 - RNA, 22 nt, Human
aaggagcugggagggacacaug

SEQ ID NO: 499508 - RNA, 22 nt, Human
uuucacauuuuauacuuaagcc

SEQ ID NO: 499509 - RNA, 22 nt, Human
gagccaccuucaacucaggaau

SEQ ID NO: 499510 - RNA, 17 nt, Human
aggcauggucuggggug

SEQ ID NO: 499511 - RNA, 18 nt, Human
gcaggagauggguggggu

SEQ ID NO: 499512 - RNA, 22 nt, Human
ggacaggugcaaagggcacaug

SEQ ID NO: 499513 - RNA, 22 nt, Human
uuacauuuugggguaaggauaa

SEQ ID NO: 499514 - RNA, 22 nt, Human
ugggggcagccaggcugucaag

SEQ ID NO: 499515 - RNA, 22 nt, Human
uccuugaagcuuguaucuaaua

SEQ ID NO: 499516 - RNA, 20 nt, Human
aagguccaaacucuguguuc

SEQ ID NO: 499517 - RNA, 22 nt, Human
ucucccaacauguggaggucag

SEQ ID NO: 499518 - RNA, 22 nt, Human
uggccugcagaggcuguggggc

SEQ ID NO: 499519 - RNA, 22 nt, Human
caugucuguguacacaugcaca

SEQ ID NO: 499520 - RNA, 22 nt, Human
agaugagggguagaaaggacuu

SEQ ID NO: 499521 - RNA, 21 nt, Human
uucuacaggaugaaugaaaac

SEQ ID NO: 499522 - RNA, 21 nt, Human
ggagaaggacaauguugagua

SEQ ID NO: 499523 - RNA, 22 nt, Human
ggugcccagcgaaguggcugug

SEQ ID NO: 499524 - RNA, 22 nt, Human
uccuggcccggccgggccugcu

SEQ ID NO: 499525 - RNA, 22 nt, Human
gggaucugacuugcuggugggu

SEQ ID NO: 499526 - RNA, 22 nt, Human
cucaggauagcugcgcagccug

SEQ ID NO: 499527 - RNA, 22 nt, Human
aucagcaaggcaaucacugcag

SEQ ID NO: 499528 - RNA, 22 nt, Human
aggccucugggucuccucugac

SEQ ID NO: 499529 - RNA, 22 nt, Human
auaauguagguauguguauuua

SEQ ID NO: 499530 - RNA, 22 nt, Human
uaagaacagugacagccaacau

SEQ ID NO: 499531 - RNA, 22 nt, Human
caguccugggcaggucaggcca

SEQ ID NO: 499532 - RNA, 22 nt, Human
cagagguagggagcuauguuau

SEQ ID NO: 499533 - RNA, 22 nt, Human
cucugcccacgucuugcccaga

SEQ ID NO: 499534 - RNA, 22 nt, Human
agggacuuguguccuauguaug

SEQ ID NO: 499535 - RNA, 22 nt, Human
ucugggcuuuuccaugccugug

SEQ ID NO: 499536 - RNA, 22 nt, Human
uggcacugccaaccugcuaggu

SEQ ID NO: 499537 - RNA, 22 nt, Human
aguauucuggaauucuauguga

SEQ ID NO: 499538 - RNA, 22 nt, Human
ccacaggaaguuaugaguacua

SEQ ID NO: 499539 - RNA, 22 nt, Human
cacauguguauaugugaggggg

SEQ ID NO: 499540 - RNA, 22 nt, Human
agaggcccuggcuagagcagcu

SEQ ID NO: 499541 - RNA, 18 nt, Human
cagucccaaaccuuagga

SEQ ID NO: 499542 - RNA, 22 nt, Human
gcagggugccgacuucagggau

SEQ ID NO: 499543 - RNA, 22 nt, Human
agguccaggauuuguggggucu

SEQ ID NO: 499544 - RNA, 22 nt, Human
aaggagaagucuguugagauug

SEQ ID NO: 499545 - RNA, 22 nt, Human
cucugggaauucugagcaagca

SEQ ID NO: 499546 - RNA, 19 nt, Human
acacauuugcacaauccac

SEQ ID NO: 499547 - RNA, 22 nt, Human
auggccaguguuucccucaguu

SEQ ID NO: 499548 - RNA, 22 nt, Human
caguccagcucaucaguggcac

SEQ ID NO: 499549 - RNA, 22 nt, Human
ccugauguccauaauccuguaa

SEQ ID NO: 499550 - RNA, 22 nt, Human
uccaagcuuuccaugcccucac

SEQ ID NO: 499551 - RNA, 22 nt, Human
gcccugagggguggugucugua

SEQ ID NO: 499552 - RNA, 21 nt, Human
ccagggaagaaaugagggcag

SEQ ID NO: 499553 - RNA, 22 nt, Human
uggguggcacuucuggggucca

SEQ ID NO: 499554 - RNA, 22 nt, Human
ccuggaccaaacacuggccugg

SEQ ID NO: 499555 - RNA, 22 nt, Human
uuuguacacugucuacuaugaa

SEQ ID NO: 499556 - RNA, 22 nt, Human
cugagcugggcucucuugaggg

SEQ ID NO: 499557 - RNA, 22 nt, Human
uagcagcaauuucagaaguuug

SEQ ID NO: 499558 - RNA, 22 nt, Human
cccugugucuucuugccuuugu

SEQ ID NO: 499559 - RNA, 22 nt, Human
ucuguucaguugauguaguuuu

SEQ ID NO: 499560 - RNA, 17 nt, Human
gagucuguguucaucag

SEQ ID NO: 499561 - RNA, 22 nt, Human
aaaggccauuacuugcuuuuag

SEQ ID NO: 499562 - RNA, 22 nt, Human
acacugaauauacaaugaauau

SEQ ID NO: 499563 - RNA, 22 nt, Human
cugagccagcgggcucacuuuu

SEQ ID NO: 499564 - RNA, 21 nt, Human
gacaggggaagaagcaaggag

SEQ ID NO: 499565 - RNA, 22 nt, Human
agggauggaagcucgucugcaa

SEQ ID NO: 499566 - RNA, 22 nt, Human
cacugaaggacaguaggaaggg

SEQ ID NO: 499567 - RNA, 22 nt, Human
uuccagaagccuccauauuacu

SEQ ID NO: 499568 - RNA, 22 nt, Human
acuaagugauucuaagcaucuu

SEQ ID NO: 499569 - RNA, 22 nt, Human
gaguuauuggguggaaagguag

SEQ ID NO: 499570 - RNA, 20 nt, Human
cucaguguauucugggugcu

SEQ ID NO: 499571 - RNA, 22 nt, Human
cagcaauaagccagguuagaca

SEQ ID NO: 499572 - RNA, 22 nt, Human
agggccugucagcgguguccug

SEQ ID NO: 499573 - RNA, 22 nt, Human
cagcugagaccagaaugcaggu

SEQ ID NO: 499574 - RNA, 22 nt, Human
gauccuguuauaauuuggaugu

SEQ ID NO: 499575 - RNA, 22 nt, Human
gauacuuuccauccaaaugcau

SEQ ID NO: 499576 - RNA, 22 nt, Human
agacuguaauugacaugucagc

SEQ ID NO: 499577 - RNA, 22 nt, Human
agcucccagucuccucuccaug

SEQ ID NO: 499578 - RNA, 22 nt, Human
agaggcugggaaggguccccgg

SEQ ID NO: 499579 - RNA, 21 nt, Human
acaggcuuuagaaaaugacuc

SEQ ID NO: 499580 - RNA, 18 nt, Human
uggagcugagugcugugc

SEQ ID NO: 499581 - RNA, 22 nt, Human
uccuggcugucacucggguuga

SEQ ID NO: 499582 - RNA, 22 nt, Human
uuagcagcaauggcaucaacua

SEQ ID NO: 499583 - RNA, 22 nt, Human
ggggagcagaagcagcaacaac

SEQ ID NO: 499584 - RNA, 22 nt, Human
gucucccaaccccugugcccag

SEQ ID NO: 499585 - RNA, 22 nt, Human
uucauacaguggcugcacucca

SEQ ID NO: 499586 - RNA, 22 nt, Human
agguuauaugucauacugaagu

SEQ ID NO: 499587 - RNA, 22 nt, Human
gcucugaggcugggagcacucu

SEQ ID NO: 499588 - RNA, 22 nt, Human
gcagggcuguggacacuuuggu

SEQ ID NO: 499589 - RNA, 22 nt, Human
augucacagcucccauuccucc

SEQ ID NO: 499590 - RNA, 22 nt, Human
uaagcaaauaaugcaucaaggg

SEQ ID NO: 499591 - RNA, 22 nt, Human
caaaugaagguggugggucauu

SEQ ID NO: 499592 - RNA, 22 nt, Human
agggaaaggcugaugcuguggg

SEQ ID NO: 499593 - RNA, 22 nt, Human
ugguccaguuuagcauugagug

SEQ ID NO: 499594 - RNA, 22 nt, Human
cagggcagaaggcacucuacuc

SEQ ID NO: 499595 - RNA, 22 nt, Human
cacagggcagaggguccguggc

SEQ ID NO: 499596 - RNA, 22 nt, Human
caggcugggcugguguuagagu

SEQ ID NO: 499597 - RNA, 22 nt, Human
cccagguggcagaagcugcagu

SEQ ID NO: 499598 - RNA, 22 nt, Human
uguuuucuauuaccugagauug

SEQ ID NO: 499599 - RNA, 22 nt, Human
cagcccuguccagcagagggug

SEQ ID NO: 499600 - RNA, 22 nt, Human
uuuguuugaaagucucuacagc

SEQ ID NO: 499601 - RNA, 22 nt, Human
aaaguagcuuuguagguacagu

SEQ ID NO: 499602 - RNA, 22 nt, Human
aguggcaucaaaucaagguuug

SEQ ID NO: 499603 - RNA, 22 nt, Human
agcaccugcacaguggaggaaa

SEQ ID NO: 499604 - RNA, 21 nt, Human
uagggcaggcauuggaagaga

SEQ ID NO: 499605 - RNA, 22 nt, Human
guggccagccccauggacaguu

SEQ ID NO: 499606 - RNA, 22 nt, Human
ugaucacaagucugaagaauga

SEQ ID NO: 499607 - RNA, 22 nt, Human
gcagcuuucuacuuccuacagc

SEQ ID NO: 499608 - RNA, 19 nt, Human
uggcuucuguuuucauguu

SEQ ID NO: 499609 - RNA, 22 nt, Human
cccaggccagaacuugguugcu

SEQ ID NO: 499610 - RNA, 22 nt, Human
uuguuuucacagcuuugcccgg

SEQ ID NO: 499611 - RNA, 22 nt, Human
gagcucugacugcugggugaca

SEQ ID NO: 499612 - RNA, 22 nt, Human
gucccagaugucuggaacuccc

SEQ ID NO: 499613 - RNA, 21 nt, Human
ugucuucauaugagauggugu

SEQ ID NO: 499614 - RNA, 22 nt, Human
cucaacauuuaacagugaaaaa

SEQ ID NO: 499615 - RNA, 22 nt, Human
accuguuucucucugaguuacu

SEQ ID NO: 499616 - RNA, 22 nt, Human
gaaggccacuuuguguugagaa

SEQ ID NO: 499617 - RNA, 22 nt, Human
uguacaaugccagggaacacca

SEQ ID NO: 499618 - RNA, 22 nt, Human
gcagaggcauuucugacgcugc

SEQ ID NO: 499619 - RNA, 22 nt, Human
uauuuugagguauuuuugagcu

SEQ ID NO: 499620 - RNA, 22 nt, Human
aaagucaaugauuucuccugga

SEQ ID NO: 499621 - RNA, 22 nt, Human
gcuccaagguauccaccagggu

SEQ ID NO: 499622 - RNA, 18 nt, Human
cugaggcuggcaggagcc

SEQ ID NO: 499623 - RNA, 22 nt, Human
ggagaaagcuguaguggaaugu

SEQ ID NO: 499624 - RNA, 22 nt, Human
cugagcugaaacuugagaggcu

SEQ ID NO: 499625 - RNA, 22 nt, Human
agaagcagacucugaggcaagg

SEQ ID NO: 499626 - RNA, 22 nt, Human
auacagugaauacuuacagugu

SEQ ID NO: 499627 - RNA, 22 nt, Human
aucaaaaugcuccagugauggu

SEQ ID NO: 499628 - RNA, 22 nt, Human
caggagacuauggcccaaggcc

SEQ ID NO: 499629 - RNA, 21 nt, Human
uucuccaggcaaccauuucag

SEQ ID NO: 499630 - RNA, 22 nt, Human
ggaaggaggaugcucuggccuu

SEQ ID NO: 499631 - RNA, 22 nt, Human
gggaaagaagaucuagauacug

SEQ ID NO: 499632 - RNA, 22 nt, Human
ccucugccuuuagugaaaguug

SEQ ID NO: 499633 - RNA, 22 nt, Human
cuuaacagcaagaucuguguca

SEQ ID NO: 499634 - RNA, 22 nt, Human
cuauaauuaugcucaaaaugua

SEQ ID NO: 499635 - RNA, 22 nt, Human
gcugggcagccccuacagagag

SEQ ID NO: 499636 - RNA, 22 nt, Human
gaaagacauaguugcaagaugg

SEQ ID NO: 499637 - RNA, 22 nt, Human
ugcugcuuugauguguaaauca

SEQ ID NO: 499638 - RNA, 22 nt, Human
uuuccuuguuauuauuuguccu

SEQ ID NO: 499639 - RNA, 22 nt, Human
uuguuaaaaugcauauucuggu

SEQ ID NO: 499640 - RNA, 22 nt, Human
aaguuugacagaaguuucuaau

SEQ ID NO: 499641 - RNA, 22 nt, Human
acaguaaugauucugagucucu

SEQ ID NO: 499642 - RNA, 22 nt, Human
aggugccuaucuggucucugca

SEQ ID NO: 499643 - RNA, 22 nt, Human
gccuggaggggccaggguggua

SEQ ID NO: 499644 - RNA, 22 nt, Human
gugaaugaaaggaugauucuuu

SEQ ID NO: 499645 - RNA, 22 nt, Human
uuccagauauuuuuauguggaa

SEQ ID NO: 499646 - RNA, 21 nt, Human
aaugcauuaacauaaagcuga

SEQ ID NO: 499647 - RNA, 22 nt, Human
agugcugaagacuggcuaggga

SEQ ID NO: 499648 - RNA, 22 nt, Human
gcacauacugcaaagauuacua

SEQ ID NO: 499649 - RNA, 22 nt, Human
aucagagauuguaguaugugca

SEQ ID NO: 499650 - RNA, 23 nt, Human
cagugcagggcaacucagacucc

SEQ ID NO: 499651 - RNA, 22 nt, Human
agaagccacuggagguugagau

SEQ ID NO: 499652 - RNA, 22 nt, Human
acuguacacagugguguacugu

SEQ ID NO: 499653 - RNA, 22 nt, Human
ugaaaucauugggguugaauaa

SEQ ID NO: 499654 - RNA, 22 nt, Human
ugcccuggcacacacacagcug

SEQ ID NO: 499655 - RNA, 22 nt, Human
agcagcugccagagagaguucc

SEQ ID NO: 499656 - RNA, 22 nt, Human
agaauuagucacaauuauagga

SEQ ID NO: 499657 - RNA, 22 nt, Human
ugcuauaagaauuauauuacuc

SEQ ID NO: 499658 - RNA, 22 nt, Human
uucuggggccccaguguccucg

SEQ ID NO: 499659 - RNA, 22 nt, Human
uaagaugggggaaagaaauagu

SEQ ID NO: 499660 - RNA, 22 nt, Human
gggcugcuuauacugaugauaa

SEQ ID NO: 499661 - RNA, 22 nt, Human
guguuuccucuagaagccaugg

SEQ ID NO: 499662 - RNA, 22 nt, Human
ugguccuggagaucaauaugca

SEQ ID NO: 499663 - RNA, 22 nt, Human
agagcuguggauaguccuggau

SEQ ID NO: 499664 - RNA, 22 nt, Human
acaggcugccacuugcauccaa

SEQ ID NO: 499665 - RNA, 22 nt, Human
ucucugaguaagugacaguuca

SEQ ID NO: 499666 - RNA, 22 nt, Human
uugucuggucaaaucacuugua

SEQ ID NO: 499667 - RNA, 22 nt, Human
cccuggagguggagguugcagg

SEQ ID NO: 499668 - RNA, 22 nt, Human
cuucuccuuauaugucccguuc

SEQ ID NO: 499669 - RNA, 22 nt, Human
cuggaagaggaagccagcugga

SEQ ID NO: 499670 - RNA, 22 nt, Human
cugccugugccaaugcuccuuu

SEQ ID NO: 499671 - RNA, 22 nt, Human
cugccagcucucuggaggcucu

SEQ ID NO: 499672 - RNA, 22 nt, Human
cagcagcaggcgcacggccguc

SEQ ID NO: 499673 - RNA, 22 nt, Human
cugaggucuagacaccccaggg

SEQ ID NO: 499674 - RNA, 22 nt, Human
ggguccaggcggcauaguugua

SEQ ID NO: 499675 - RNA, 22 nt, Human
aaauugcaaaaguacuuuuagg

SEQ ID NO: 499676 - RNA, 23 nt, Human
ccaggcaguagcuauugaaguga

SEQ ID NO: 499677 - RNA, 22 nt, Human
ugcagucuuccagcugcacaaa

SEQ ID NO: 499678 - RNA, 22 nt, Human
agccuggaggaggaguugagca

SEQ ID NO: 499679 - RNA, 22 nt, Human
caaaguuuaaaguagauuucag

SEQ ID NO: 499680 - RNA, 22 nt, Human
uaaagugcagacucccggaaac

SEQ ID NO: 499681 - RNA, 22 nt, Human
gagggggcgugcaaggcuccgc

SEQ ID NO: 499682 - RNA, 22 nt, Human
ugaacacugccauauuuaagaa

SEQ ID NO: 499683 - RNA, 22 nt, Human
ucuguccagcucuggggcucac

SEQ ID NO: 499684 - RNA, 22 nt, Human
ccuguggcacaugcagggauuc

SEQ ID NO: 499685 - RNA, 22 nt, Human
ucuuuccuacuuuauugugaac

SEQ ID NO: 499686 - RNA, 22 nt, Human
uuccaggaggcacugacagagg

SEQ ID NO: 499687 - RNA, 22 nt, Human
agggcuuuguggcagucacuau

SEQ ID NO: 499688 - RNA, 22 nt, Human
ugcagcuccucuggcugccuga

SEQ ID NO: 499689 - RNA, 22 nt, Human
cauugcacugcagcccgggcaa

SEQ ID NO: 499690 - RNA, 22 nt, Human
aagaacaguguccugggacucg

SEQ ID NO: 499691 - RNA, 22 nt, Human
gcugguuagaaaacagagcuca

SEQ ID NO: 499692 - RNA, 19 nt, Human
cugaggugcaguaagaggc

SEQ ID NO: 499693 - RNA, 22 nt, Human
gaagaucagaguaagcuuuuua

SEQ ID NO: 499694 - RNA, 22 nt, Human
gaagggggagcucuuccuaauu

SEQ ID NO: 499695 - RNA, 22 nt, Human
guacuuccagccaagugagaca

SEQ ID NO: 499696 - RNA, 22 nt, Human
uuuuccuucugauacuccauuu

SEQ ID NO: 499697 - RNA, 22 nt, Human
ccugggggccaggaagguguga

SEQ ID NO: 499698 - RNA, 22 nt, Human
ugagagcagaggugggcagccu

SEQ ID NO: 499699 - RNA, 23 nt, Human
gcagauggccccagagugcugcc

SEQ ID NO: 499700 - RNA, 22 nt, Human
augugugccugagugauggacu

SEQ ID NO: 499701 - RNA, 22 nt, Human
gacacagaaggucacauguuca

SEQ ID NO: 499702 - RNA, 22 nt, Human
aggagacagaauuuaaauuugg

SEQ ID NO: 499703 - RNA, 22 nt, Human
guuugauucaagaacaaagagu

SEQ ID NO: 499704 - RNA, 22 nt, Human
uccucagucucuaaggccucag

SEQ ID NO: 499705 - RNA, 22 nt, Human
uucuggaaaagaaaguuaagau

SEQ ID NO: 499706 - RNA, 22 nt, Human
uaaaacugcuugguauggucua

SEQ ID NO: 499707 - RNA, 22 nt, Human
gauccuugcacuugacuuggca

SEQ ID NO: 499708 - RNA, 22 nt, Human
uggaacacuggcuuuccacugu

SEQ ID NO: 499709 - RNA, 22 nt, Human
uaaaguauauuuuuucucaaua

SEQ ID NO: 499710 - RNA, 22 nt, Human
ggcaggugcuaagagagguaaa

SEQ ID NO: 499711 - RNA, 22 nt, Human
gauauuuuuaggugaugcaggc

SEQ ID NO: 499712 - RNA, 22 nt, Human
uugauguaaagugauucauggg

SEQ ID NO: 499713 - RNA, 22 nt, Human
guccaaguacauguguguacau

SEQ ID NO: 499714 - RNA, 23 nt, Human
ucugggccacuugucugcacuuc

SEQ ID NO: 499715 - RNA, 22 nt, Human
cuucaaguugggcggcgggcag

SEQ ID NO: 499716 - RNA, 20 nt, Human
guccaggacccagcaggagg

SEQ ID NO: 499717 - RNA, 22 nt, Human
auggaaagggaagcaaggaaca

SEQ ID NO: 499718 - RNA, 22 nt, Human
agugcuggaaagggacggagga

SEQ ID NO: 499719 - RNA, 22 nt, Human
gccucaaaaguguuguagaggg

SEQ ID NO: 499720 - RNA, 22 nt, Human
uggaaucucuuuggggacugaa

SEQ ID NO: 499721 - RNA, 22 nt, Human
aauuguuguacagaauaaauga

SEQ ID NO: 499722 - RNA, 22 nt, Human
gaaauauuacaguggaggggau

SEQ ID NO: 499723 - RNA, 17 nt, Human
ucugggcuucagugguc

SEQ ID NO: 499724 - RNA, 22 nt, Human
agcaugaaaggcgugccaacuu

SEQ ID NO: 499725 - RNA, 22 nt, Human
uccgcccgcacguauggagugg

SEQ ID NO: 499726 - RNA, 22 nt, Human
ugguuccucaagcgcuggcggc

SEQ ID NO: 499727 - RNA, 22 nt, Human
aagauacauaaagguagagucu

SEQ ID NO: 499728 - RNA, 22 nt, Human
cucugggcugaauggcugaacc

SEQ ID NO: 499729 - RNA, 22 nt, Human
acauuuuuggguugaugucuga

SEQ ID NO: 499730 - RNA, 22 nt, Human
ucaaauaccagcuuuuccagaa

SEQ ID NO: 499731 - RNA, 22 nt, Human
uggaagcaucacuucuugccug

SEQ ID NO: 499732 - RNA, 22 nt, Human
ucauuacaguguuuauaugucu

SEQ ID NO: 499733 - RNA, 22 nt, Human
gucuggaguggggccugagaau

SEQ ID NO: 499734 - RNA, 19 nt, Human
cccucuugcacaaagcaaa

SEQ ID NO: 499735 - RNA, 22 nt, Human
aguuucuguuaccauauuugac

SEQ ID NO: 499736 - RNA, 23 nt, Human
gccugggacucaggaggagcuca

SEQ ID NO: 499737 - RNA, 22 nt, Human
gcugcaggcauuuuccugggca

SEQ ID NO: 499738 - RNA, 22 nt, Human
auuagcuuugguggaaaggagu

SEQ ID NO: 499739 - RNA, 21 nt, Human
aagaagcaauuuauuggaagg

SEQ ID NO: 499740 - RNA, 22 nt, Human
cauguguggucuguggcuaucu

SEQ ID NO: 499741 - RNA, 22 nt, Human
ucucaggggccuggaguccugg

SEQ ID NO: 499742 - RNA, 22 nt, Human
cuugugcauuucauuccucagg

SEQ ID NO: 499743 - RNA, 22 nt, Human
ucucaggaauagaguggcagca

SEQ ID NO: 499744 - RNA, 22 nt, Human
gagcuuccacucuagaaggagu

SEQ ID NO: 499745 - RNA, 23 nt, Human
gaaucaguggcuaacaaggaaac

SEQ ID NO: 499746 - RNA, 22 nt, Human
agccacagagcaggagaccuuu

SEQ ID NO: 499747 - RNA, 22 nt, Human
ccagggaaaggagguugacuug

SEQ ID NO: 499748 - RNA, 22 nt, Human
uucaaacacagacagcagcaug

SEQ ID NO: 499749 - RNA, 22 nt, Human
aucaguuucuaccauguggaau

SEQ ID NO: 499750 - RNA, 22 nt, Human
ucugggugcccuuugcucuguu

SEQ ID NO: 499751 - RNA, 22 nt, Human
ccagcuuuauagcuucaaagga

SEQ ID NO: 499752 - RNA, 22 nt, Human
ucauugcagacuaacaaucuca

SEQ ID NO: 499753 - RNA, 22 nt, Human
auuugccuugugaauuggauau

SEQ ID NO: 499754 - RNA, 22 nt, Human
uauaguacauggaaucuucaua

SEQ ID NO: 499755 - RNA, 18 nt, Human
ccucugccauagccagca

SEQ ID NO: 499756 - RNA, 23 nt, Human
caguggagacucaugcuuccuua

SEQ ID NO: 499757 - RNA, 22 nt, Human
ucuagucauauuuuuucaguau

SEQ ID NO: 499758 - RNA, 22 nt, Human
agaaaugcagucucgucaaaag

SEQ ID NO: 499759 - RNA, 22 nt, Human
cacucugagaaguacaagcucc

SEQ ID NO: 499760 - RNA, 22 nt, Human
uguauuugaguuaugaaagaga

SEQ ID NO: 499761 - RNA, 22 nt, Human
uauaaagagucucaaagaaguu

SEQ ID NO: 499762 - RNA, 22 nt, Human
ugcccagccaauuuguuauguu

SEQ ID NO: 499763 - RNA, 22 nt, Human
gcaugucaugucauguaggaau

SEQ ID NO: 499764 - RNA, 22 nt, Human
ggcugccuucauagaccauggg

SEQ ID NO: 499765 - RNA, 22 nt, Human
ugcugccaugcagagcaacaga

SEQ ID NO: 499766 - RNA, 22 nt, Human
uucacaggauauaugugcaggg

SEQ ID NO: 499767 - RNA, 22 nt, Human
ggcacugauaauguccucucuc

SEQ ID NO: 499768 - RNA, 22 nt, Human
uauuugaaggcauacauuuuga

SEQ ID NO: 499769 - RNA, 22 nt, Human
acaguguuuaaaauaauaugcu

SEQ ID NO: 499770 - RNA, 18 nt, Human
ugaauuaguuugugguuu

SEQ ID NO: 499771 - RNA, 22 nt, Human
ugaugcugcugggaguggugcu

SEQ ID NO: 499772 - RNA, 22 nt, Human
gcugggcaccggagagacccca

SEQ ID NO: 499773 - RNA, 22 nt, Human
uagggaccuuagaauuguaugu

SEQ ID NO: 499774 - RNA, 22 nt, Human
ccugaggucaugguccaguguu

SEQ ID NO: 499775 - RNA, 22 nt, Human
uuucuacauuuguaaccagauu

SEQ ID NO: 499776 - RNA, 22 nt, Human
uguaggccuauguccagcaauu

SEQ ID NO: 499777 - RNA, 22 nt, Human
ucucucagucagaugcuaaaga

SEQ ID NO: 499778 - RNA, 19 nt, Human
cuguccugguuuggucccu

SEQ ID NO: 499779 - RNA, 22 nt, Human
gaccuucaguguguuucucaca

SEQ ID NO: 499780 - RNA, 22 nt, Human
aagggcaggcagagaucauaua

SEQ ID NO: 499781 - RNA, 22 nt, Human
cauuuagacauuugauuugggg

SEQ ID NO: 499782 - RNA, 22 nt, Human
cagagcacccaaggagcauuug

SEQ ID NO: 499783 - RNA, 22 nt, Human
uggcucugggaaugggaagaug

SEQ ID NO: 499784 - RNA, 22 nt, Human
uagaaagcugaguaauacauuu

SEQ ID NO: 499785 - RNA, 22 nt, Human
aaggaccuauauugucagagga

SEQ ID NO: 499786 - RNA, 22 nt, Human
uucaguguggugcacaguuuug

SEQ ID NO: 499787 - RNA, 22 nt, Human
ucaaaugcuguauuguaguaau

SEQ ID NO: 499788 - RNA, 22 nt, Human
ggcucagguuaccagucccucc

SEQ ID NO: 499789 - RNA, 22 nt, Human
aggcacuguacuagguacaggg

SEQ ID NO: 499790 - RNA, 22 nt, Human
ccaaaguccacaguuuacauua

SEQ ID NO: 499791 - RNA, 22 nt, Human
ugaugauguuuaucuugguauu

SEQ ID NO: 499792 - RNA, 22 nt, Human
uguggcucucagauccuccaau

SEQ ID NO: 499793 - RNA, 22 nt, Human
cguguacacgcacacguguccu

SEQ ID NO: 499794 - RNA, 22 nt, Human
caggaaauaaaaaguaucuucu

SEQ ID NO: 499795 - RNA, 22 nt, Human
cucaggaggaugacugccuugg

SEQ ID NO: 499796 - RNA, 22 nt, Human
ugauacuuuucuuuuagacuaa

SEQ ID NO: 499797 - RNA, 18 nt, Human
gaucgggggcgccccaag

SEQ ID NO: 499798 - RNA, 22 nt, Human
aucaaaguggaaguuuacuagg

SEQ ID NO: 499799 - RNA, 22 nt, Human
aaggaucaaguggauuuucuua

SEQ ID NO: 499800 - RNA, 22 nt, Human
gcagagguggcaucugggcucu

SEQ ID NO: 499801 - RNA, 22 nt, Human
ccaguguguucccugccucacu

SEQ ID NO: 499802 - RNA, 22 nt, Human
agcagguggacagaggaagaaa

SEQ ID NO: 499803 - RNA, 22 nt, Human
auggacuuaagagucagaagcu

SEQ ID NO: 499804 - RNA, 22 nt, Human
cagccuggauugcagaaugcua

SEQ ID NO: 499805 - RNA, 22 nt, Human
ugcagcugaggccagcuaugcc

SEQ ID NO: 499806 - RNA, 22 nt, Human
aagcagaaaaacugagcuccaa

SEQ ID NO: 499807 - RNA, 22 nt, Human
ugcauuuuacuuaccuguuagu

SEQ ID NO: 499808 - RNA, 22 nt, Human
ggggcuccagucuucacauuuu

SEQ ID NO: 499809 - RNA, 22 nt, Human
aaggaagguacucagugauucu

SEQ ID NO: 499810 - RNA, 22 nt, Human
gcagguggauuaucagaagugc

SEQ ID NO: 499811 - RNA, 22 nt, Human
aagcagcacaguaauauuggug

SEQ ID NO: 499812 - RNA, 22 nt, Human
aagaucaauguucauuaagaug

SEQ ID NO: 499813 - RNA, 22 nt, Human
ggcagcaugugugguccgcugg

SEQ ID NO: 499814 - RNA, 22 nt, Human
uggaaugacagagagucugaau

SEQ ID NO: 499815 - RNA, 22 nt, Human
cuuagcaugugguguccuugua

SEQ ID NO: 499816 - RNA, 20 nt, Human
agguuccagccacaaccagc

SEQ ID NO: 499817 - RNA, 20 nt, Human
ucagagagagggugccacuu

SEQ ID NO: 499818 - RNA, 21 nt, Human
gcucccuggcugugugaccug

SEQ ID NO: 499819 - RNA, 22 nt, Human
ggagcugaaggggugggcucag

SEQ ID NO: 499820 - RNA, 22 nt, Human
cugccugugauuuuucucuagu

SEQ ID NO: 499821 - RNA, 22 nt, Human
gggcagagagcuggaacuccuu

SEQ ID NO: 499822 - RNA, 22 nt, Human
uugucugaagucacacagaugc

SEQ ID NO: 499823 - RNA, 22 nt, Human
uaugcuuuuaaccuguaacuga

SEQ ID NO: 499824 - RNA, 22 nt, Human
agggccagccgacuuccagccu

SEQ ID NO: 499825 - RNA, 22 nt, Human
ggggauggaggcgugugguccu

SEQ ID NO: 499826 - RNA, 22 nt, Human
ucugccuggguguggagcagag

SEQ ID NO: 499827 - RNA, 22 nt, Human
gcucuucucagauuguacacuc

SEQ ID NO: 499828 - RNA, 22 nt, Human
cagagacagaaaauggaucuag

SEQ ID NO: 499829 - RNA, 22 nt, Human
aaauugugagcuauagaucuag

SEQ ID NO: 499830 - RNA, 22 nt, Human
gaagagcauaugaagagcauau

SEQ ID NO: 499831 - RNA, 22 nt, Human
acucugcuuauugcugcaggca

SEQ ID NO: 499832 - RNA, 22 nt, Human
agggccagcccauaaugccaaa

SEQ ID NO: 499833 - RNA, 22 nt, Human
cugcccacuauguugucauggg

SEQ ID NO: 499834 - RNA, 19 nt, Human
ucccuggcgccucucgggc

SEQ ID NO: 499835 - RNA, 22 nt, Human
uucacccuggaccagaaauugg

SEQ ID NO: 499836 - RNA, 22 nt, Human
aagaguuugucagaucugcacg

SEQ ID NO: 499837 - RNA, 22 nt, Human
uaaggccaaguucauauacaac

SEQ ID NO: 499838 - RNA, 22 nt, Human
gcaguguugcuaggugcgguga

SEQ ID NO: 499839 - RNA, 21 nt, Human
cuguuucuugugaagugacac

SEQ ID NO: 499840 - RNA, 20 nt, Human
gcugucuggauuagaagccu

SEQ ID NO: 499841 - RNA, 22 nt, Human
caguguccucagccagcagcua

SEQ ID NO: 499842 - RNA, 22 nt, Human
ugaggcaggagaaucaccggaa

SEQ ID NO: 499843 - RNA, 22 nt, Human
uuuacagucuauguugaauuaa

SEQ ID NO: 499844 - RNA, 22 nt, Human
uuuggacugcaugaugaucugg

SEQ ID NO: 499845 - RNA, 22 nt, Human
aagcagaugggacuccaaggca

SEQ ID NO: 499846 - RNA, 22 nt, Human
ugcuuccuugaucauucccaaa

SEQ ID NO: 499847 - RNA, 22 nt, Human
uccacagaccaguaucugcagc

SEQ ID NO: 499848 - RNA, 22 nt, Human
uaauuuugucccccugcacaua

SEQ ID NO: 499849 - RNA, 22 nt, Human
ccuguucacccuccaugcacag

SEQ ID NO: 499850 - RNA, 22 nt, Human
gcuggcagggacagcugcgugu

SEQ ID NO: 499851 - RNA, 22 nt, Human
aguaaaaauugaggugcaaaau

SEQ ID NO: 499852 - RNA, 19 nt, Human
cccuggcaggcaagccugg

SEQ ID NO: 499853 - RNA, 22 nt, Human
ccacagggcacaagggagguug

SEQ ID NO: 499854 - RNA, 22 nt, Human
acagagaugucagauuggcagc

SEQ ID NO: 499855 - RNA, 22 nt, Human
uccccaccuaagauacccaucu

SEQ ID NO: 499856 - RNA, 19 nt, Human
uuuuuacaaguagguguga

SEQ ID NO: 499857 - RNA, 23 nt, Human
caugcaaacacuauugcauuugg

SEQ ID NO: 499858 - RNA, 22 nt, Human
aagcacagugccaaguucuauu

SEQ ID NO: 499859 - RNA, 22 nt, Human
guacacacuguuugaucauuuc

SEQ ID NO: 499860 - RNA, 22 nt, Human
uuccugcauggauugaggcuau

SEQ ID NO: 499861 - RNA, 22 nt, Human
gcaggcucguuggaaguccccu

SEQ ID NO: 499862 - RNA, 22 nt, Human
ugguccuuuaagucuuucucug

SEQ ID NO: 499863 - RNA, 22 nt, Human
acugggaguucuccaugucccu

SEQ ID NO: 499864 - RNA, 22 nt, Human
uuggaauugaggauuuacauag

SEQ ID NO: 499865 - RNA, 22 nt, Human
uuucauugucaauaaacuguau

SEQ ID NO: 499866 - RNA, 20 nt, Human
agcagcuguguuuucauccu

SEQ ID NO: 499867 - RNA, 23 nt, Human
uggacgccgacuuuggaggcgcu

SEQ ID NO: 499868 - RNA, 22 nt, Human
agccuggcccugcugaacucug

SEQ ID NO: 499869 - RNA, 22 nt, Human
uuucuaagugaacauucaaguu

SEQ ID NO: 499870 - RNA, 22 nt, Human
ugccugcugcuaagcucuuugu

SEQ ID NO: 499871 - RNA, 22 nt, Human
cuacuuuaauuuucugcagaga

SEQ ID NO: 499872 - RNA, 22 nt, Human
ucugggcugaaaugaaggccuu

SEQ ID NO: 499873 - RNA, 22 nt, Human
cacccaggacaggccagaugug

SEQ ID NO: 499874 - RNA, 22 nt, Human
uuccaagucuaaguuauaaauc

SEQ ID NO: 499875 - RNA, 22 nt, Human
auuggucaccucccucagcucu

SEQ ID NO: 499876 - RNA, 21 nt, Human
uauacaugugugcauacgugu

SEQ ID NO: 499877 - RNA, 22 nt, Human
ucugggccucaccugcugcuca

SEQ ID NO: 499878 - RNA, 22 nt, Human
acauacauaugacaacuuuccu

SEQ ID NO: 499879 - RNA, 22 nt, Human
gaugcacuugccccuccucaga

SEQ ID NO: 499880 - RNA, 22 nt, Human
caggcagcagccacucugguau

SEQ ID NO: 499881 - RNA, 22 nt, Human
aaucacaauuacuuuugcacca

SEQ ID NO: 499882 - RNA, 23 nt, Human
agcccagcagagaaccuaggucc

SEQ ID NO: 499883 - RNA, 22 nt, Human
ugguccaguaaggguggagaga

SEQ ID NO: 499884 - RNA, 22 nt, Human
aagcuugggaaccacgguaauc

SEQ ID NO: 499885 - RNA, 22 nt, Human
agcagcacacgggagaaagaca

SEQ ID NO: 499886 - RNA, 22 nt, Human
ccaccagcuucagcagccgcgg

SEQ ID NO: 499887 - RNA, 22 nt, Human
ucuuguuucuucuaagcagcag

SEQ ID NO: 499888 - RNA, 22 nt, Human
gccagcucccaagugagccccu

SEQ ID NO: 499889 - RNA, 22 nt, Human
uuguuucaaauauuucagaaua

SEQ ID NO: 499890 - RNA, 22 nt, Human
ggaggcucugcuccguguguuc

SEQ ID NO: 499891 - RNA, 22 nt, Human
gaugcacugcaguauauacugu

SEQ ID NO: 499892 - RNA, 22 nt, Human
ucuuuggauaucgcuagaccgu

SEQ ID NO: 499893 - RNA, 22 nt, Human
cuuggacuuuagucucucucca

SEQ ID NO: 499894 - RNA, 23 nt, Human
auguccugcauaguugcuucugu

SEQ ID NO: 499895 - RNA, 22 nt, Human
gucacacucagaaugacuagag

SEQ ID NO: 499896 - RNA, 22 nt, Human
uuuacagucugucuagcaaugu

SEQ ID NO: 499897 - RNA, 22 nt, Human
cugccucuguugggcauggucu

SEQ ID NO: 499898 - RNA, 20 nt, Human
uccagccacuuccgcugguc

SEQ ID NO: 499899 - RNA, 19 nt, Human
aguguguacugaaagcacu

SEQ ID NO: 499900 - RNA, 15 nt, Human
aaucuggcggcaagu

SEQ ID NO: 499901 - RNA, 22 nt, Human
cagggucaccagagaucugcau

SEQ ID NO: 499902 - RNA, 22 nt, Human
auuaaaauuccaagguaugcca

SEQ ID NO: 499903 - RNA, 22 nt, Human
caaggcugcugcgggucgcacc

SEQ ID NO: 499904 - RNA, 22 nt, Human
uuccacauuccuuacauucaua

SEQ ID NO: 499905 - RNA, 18 nt, Human
gagacacaagggccugga

SEQ ID NO: 499906 - RNA, 22 nt, Human
ugccugccaugcagaaagcuga

SEQ ID NO: 499907 - RNA, 22 nt, Human
augaaguucuagugagaaaugc

SEQ ID NO: 499908 - RNA, 22 nt, Human
cuggcucaguucuugguuuuca

SEQ ID NO: 499909 - RNA, 22 nt, Human
uggcucagauaauucaaggggc

SEQ ID NO: 499910 - RNA, 22 nt, Human
auguaaauuguacugacacacg

SEQ ID NO: 499911 - RNA, 22 nt, Human
uguugagacugagggagucagc

SEQ ID NO: 499912 - RNA, 22 nt, Human
aaggcucugcaaaaccuccaag

SEQ ID NO: 499913 - RNA, 22 nt, Human
uagaggugacacugagaccaua

SEQ ID NO: 499914 - RNA, 22 nt, Human
ugucuuuaagcaaacaguguuu

SEQ ID NO: 499915 - RNA, 22 nt, Human
agcauaaaggcacuagaaagag

SEQ ID NO: 499916 - RNA, 22 nt, Human
aagcagauauugugggaguggg

SEQ ID NO: 499917 - RNA, 22 nt, Human
aggcccugcuuuccagagcuca

SEQ ID NO: 499918 - RNA, 22 nt, Human
caaaauuagaaaugcagcuguu

SEQ ID NO: 499919 - RNA, 23 nt, Human
uuguuuuuagagguggcaugaga

SEQ ID NO: 499920 - RNA, 22 nt, Human
gaggggcuggcuguggucccau

SEQ ID NO: 499921 - RNA, 22 nt, Human
ggaugcaggaguugaagaagga

SEQ ID NO: 499922 - RNA, 22 nt, Human
ucugugucugguugggccagua

SEQ ID NO: 499923 - RNA, 22 nt, Human
uucccucuuuuccaacaguugu

SEQ ID NO: 499924 - RNA, 22 nt, Human
ugaaaugagcauuuauucuuua

SEQ ID NO: 499925 - RNA, 22 nt, Human
ccaggauggggagcagauagaa

SEQ ID NO: 499926 - RNA, 22 nt, Human
uuugacauuggcuuauucuguu

SEQ ID NO: 499927 - RNA, 22 nt, Human
cagaguggcgacccccucagcu

SEQ ID NO: 499928 - RNA, 22 nt, Human
cuuucucaaugccggaaggcac

SEQ ID NO: 499929 - RNA, 22 nt, Human
gcugggaggaucucucccuguc

SEQ ID NO: 499930 - RNA, 22 nt, Human
gggggaggugaaugcaauaagg

SEQ ID NO: 499931 - RNA, 22 nt, Human
uuagaaagguuuugcucugaaa

SEQ ID NO: 499932 - RNA, 22 nt, Human
cccagccucagcuuuacuucca

SEQ ID NO: 499933 - RNA, 17 nt, Human
auuuccucagggcugag

SEQ ID NO: 499934 - RNA, 22 nt, Human
cacaauguauauguauaucaaa

SEQ ID NO: 499935 - RNA, 22 nt, Human
agaaaugaagcaggaguuauua

SEQ ID NO: 499936 - RNA, 22 nt, Human
gagggcucacugagaaagcagu

SEQ ID NO: 499937 - RNA, 22 nt, Human
cguguacagucuaucuuuuuuc

SEQ ID NO: 499938 - RNA, 22 nt, Human
gcaguggcaugaugugggcuca

SEQ ID NO: 499939 - RNA, 22 nt, Human
gucuggccauuugcccauugug

SEQ ID NO: 499940 - RNA, 22 nt, Human
gaccacagaagccuugauaggg

SEQ ID NO: 499941 - RNA, 22 nt, Human
acagaauuaaugaaaauuacaa

SEQ ID NO: 499942 - RNA, 22 nt, Human
uuagaaaacauaagugguaaag

SEQ ID NO: 499943 - RNA, 22 nt, Human
gagauggggaauaggagcaagc

SEQ ID NO: 499944 - RNA, 22 nt, Human
agagguagagguugcagugagc

SEQ ID NO: 499945 - RNA, 22 nt, Human
agaugagaauuuuuagagugcu

SEQ ID NO: 499946 - RNA, 22 nt, Human
uuaaagcauccugucagucugu

SEQ ID NO: 499947 - RNA, 22 nt, Human
gccaccucggcuuucucugcuc

SEQ ID NO: 499948 - RNA, 22 nt, Human
ggcugcugacaaacaugaucau

SEQ ID NO: 499949 - RNA, 20 nt, Human
ucauccaggacaggaguggc

SEQ ID NO: 499950 - RNA, 20 nt, Human
agagaauucccuuuggagau

SEQ ID NO: 499951 - RNA, 22 nt, Human
aucaggaucugggagccugaaa

SEQ ID NO: 499952 - RNA, 22 nt, Human
uggcauggcaacccugcaggga

SEQ ID NO: 499953 - RNA, 22 nt, Human
gauucugagcugguguuuuacg

SEQ ID NO: 499954 - RNA, 23 nt, Human
ugaggagcauagcugacugacag

SEQ ID NO: 499955 - RNA, 22 nt, Human
uuuacaguuaagaaauguuacc

SEQ ID NO: 499956 - RNA, 19 nt, Human
ggaaggagagaaaugcaug

SEQ ID NO: 499957 - RNA, 22 nt, Human
ucaagacauauuaaaugugcga

SEQ ID NO: 499958 - RNA, 22 nt, Human
ccaggagcaggagcuggacaga

SEQ ID NO: 499959 - RNA, 22 nt, Human
ugccauauugcaaagugucugc

SEQ ID NO: 499960 - RNA, 22 nt, Human
ucauuucaguggcacagaagau

SEQ ID NO: 499961 - RNA, 22 nt, Human
ugcucuguaaggucagaaaagg

SEQ ID NO: 499962 - RNA, 22 nt, Human
acucagugggcuugaugucgaa

SEQ ID NO: 499963 - RNA, 22 nt, Human
gccucaugagggaucugcccuc

SEQ ID NO: 499964 - RNA, 22 nt, Human
auggaaaggcuguggaaacuua

SEQ ID NO: 499965 - RNA, 22 nt, Human
aauaaauguuuguuggauguuu

SEQ ID NO: 499966 - RNA, 23 nt, Human
agggcugaugccauugcagcucu

SEQ ID NO: 499967 - RNA, 22 nt, Human
acuugaauuuaguuuuuccuaa

SEQ ID NO: 499968 - RNA, 22 nt, Human
uucauugugauucuuggcuagc

SEQ ID NO: 499969 - RNA, 22 nt, Human
uuuuucaucugauugauaacuc

SEQ ID NO: 499970 - RNA, 22 nt, Human
uggccuuguguuuaagcaagaa

SEQ ID NO: 499971 - RNA, 22 nt, Human
cuggcagcuucaggacacucgg

SEQ ID NO: 499972 - RNA, 22 nt, Human
aggcucugcagaccccagcugu

SEQ ID NO: 499973 - RNA, 22 nt, Human
caggggcucugggugaugugag

SEQ ID NO: 499974 - RNA, 22 nt, Human
cagcucagucuugaagcacugg

SEQ ID NO: 499975 - RNA, 22 nt, Human
caucuuuucagaagccauucug

SEQ ID NO: 499976 - RNA, 20 nt, Human
gccuguccugagugucaugg

SEQ ID NO: 499977 - RNA, 22 nt, Human
ucauacauaacuuguacaguga

SEQ ID NO: 499978 - RNA, 22 nt, Human
uuuuagaagugccuauccuaug

SEQ ID NO: 499979 - RNA, 22 nt, Human
gcugucuugcucacucuugcag

SEQ ID NO: 499980 - RNA, 22 nt, Human
auggggcuguucucugcccugc

SEQ ID NO: 499981 - RNA, 22 nt, Human
gaggcugcaggcaaugcugccc

SEQ ID NO: 499982 - RNA, 22 nt, Human
ugccuacuaguacuauuuugug

SEQ ID NO: 499983 - RNA, 22 nt, Human
ucucagagaagugaugagcaau

SEQ ID NO: 499984 - RNA, 20 nt, Human
ggccacagggugcuggugga

SEQ ID NO: 499985 - RNA, 21 nt, Human
ccaccaggucuucugcucggg

SEQ ID NO: 499986 - RNA, 22 nt, Human
ccucaguguguuuggggugagg

SEQ ID NO: 499987 - RNA, 22 nt, Human
agaaaguuaaacagugauaaga

SEQ ID NO: 499988 - RNA, 22 nt, Human
uucacauuagugguucuauaua

SEQ ID NO: 499989 - RNA, 22 nt, Human
uggcucuguugugcugagccag

SEQ ID NO: 499990 - RNA, 22 nt, Human
ucagagagcagaacuuuuuuac

SEQ ID NO: 499991 - RNA, 22 nt, Human
cagcuucuguuucuagccccug

SEQ ID NO: 499992 - RNA, 22 nt, Human
ucugucaccauucagcuugaau

SEQ ID NO: 499993 - RNA, 16 nt, Human
gcagggguggguggag

SEQ ID NO: 499994 - RNA, 22 nt, Human
agaguggggaagguguugagaa

SEQ ID NO: 499995 - RNA, 22 nt, Human
ucaaaacaaucauuggaugugc

SEQ ID NO: 499996 - RNA, 22 nt, Human
augaggcaguacacacaaagcc

SEQ ID NO: 499997 - RNA, 22 nt, Human
aggcugaggcagguggaucacc

SEQ ID NO: 499998 - RNA, 22 nt, Human
cauugcacuuuggguccaggac

SEQ ID NO: 499999 - RNA, 22 nt, Human
uggcuggagcauuccuugucuu

SEQ ID NO: 500000 - RNA, 22 nt, Human
aagaguuucugggucaaggauu

SEQ ID NO: 500001 - RNA, 22 nt, Human
uuucacauguggaaugccaggu

SEQ ID NO: 500002 - RNA, 22 nt, Human
ucacuuagauggggaucaucac

SEQ ID NO: 500003 - RNA, 22 nt, Human
acagaugaggcuggcgagggca

SEQ ID NO: 500004 - RNA, 22 nt, Human
gccuggcugcuuagccuacuuc

SEQ ID NO: 500005 - RNA, 22 nt, Human
cccuggcauaaaacuucuccag

SEQ ID NO: 500006 - RNA, 22 nt, Human
agugucuggugagggcucucuc

SEQ ID NO: 500007 - RNA, 22 nt, Human
acuuuggggaacuuuucuccuc

SEQ ID NO: 500008 - RNA, 21 nt, Human
ccuccaggugauuccgugcuc

SEQ ID NO: 500009 - RNA, 22 nt, Human
agagccugggcagcuccucugg

SEQ ID NO: 500010 - RNA, 22 nt, Human
uagagcagaacuuguuaacacc

SEQ ID NO: 500011 - RNA, 21 nt, Human
gcagggaccgcgacuucuggg

SEQ ID NO: 500012 - RNA, 22 nt, Human
gucaaaacaaaguuaagaauuc

SEQ ID NO: 500013 - RNA, 22 nt, Human
cggcagagcuuccugcucagcg

SEQ ID NO: 500014 - RNA, 22 nt, Human
acugccuugaaagauuguugag

SEQ ID NO: 500015 - RNA, 22 nt, Human
gcagcaggcacuuaccguugcu

SEQ ID NO: 500016 - RNA, 22 nt, Human
aaggcugagccagggccccuau

SEQ ID NO: 500017 - RNA, 22 nt, Human
uuguuuuuaugaacauccagga

SEQ ID NO: 500018 - RNA, 22 nt, Human
gaaggccacaagagaaguuaag

SEQ ID NO: 500019 - RNA, 23 nt, Human
ucagugcaaaaauaggauuuugg

SEQ ID NO: 500020 - RNA, 19 nt, Human
gcagccaccgcggcggccg

SEQ ID NO: 500021 - RNA, 22 nt, Human
auggccagccacuccugauggc

SEQ ID NO: 500022 - RNA, 22 nt, Human
gcuggccagugucccagggauc

SEQ ID NO: 500023 - RNA, 22 nt, Human
cugggucuggugucaggcgacg

SEQ ID NO: 500024 - RNA, 22 nt, Human
auauuagguuggugcaaaagua

SEQ ID NO: 500025 - RNA, 22 nt, Human
aaaugauguuauaagaccagga

SEQ ID NO: 500026 - RNA, 22 nt, Human
aggauccuccuuagaaaagacc

SEQ ID NO: 500027 - RNA, 22 nt, Human
uccagggcuacaaggcaccaga

SEQ ID NO: 500028 - RNA, 20 nt, Human
uacugggcaagcccacagac

SEQ ID NO: 500029 - RNA, 22 nt, Human
ggguggcacaggugcagagggu

SEQ ID NO: 500030 - RNA, 22 nt, Human
caaagcaagggcugaagacucc

SEQ ID NO: 500031 - RNA, 22 nt, Human
ugcuggagaucauuaauguuca

SEQ ID NO: 500032 - RNA, 22 nt, Human
agcgcaggaacacgucugccuu

SEQ ID NO: 500033 - RNA, 22 nt, Human
cagcugccccgcuggcugacca

SEQ ID NO: 500034 - RNA, 22 nt, Human
ugcuggcuacugauggcaggcc

SEQ ID NO: 500035 - RNA, 22 nt, Human
ugugcuucagguugucgccacg

SEQ ID NO: 500036 - RNA, 22 nt, Human
acagggcaaccucugggagacu

SEQ ID NO: 500037 - RNA, 22 nt, Human
guuucuuagguaaauucuuuga

SEQ ID NO: 500038 - RNA, 22 nt, Human
aaggcacugacugugcagggga

SEQ ID NO: 500039 - RNA, 22 nt, Human
cagggacaugacuggucucugu

SEQ ID NO: 500040 - RNA, 22 nt, Human
uugaaggugacauaucuggagc

SEQ ID NO: 500041 - RNA, 22 nt, Human
uuuuagaaggaaugcuauggug

SEQ ID NO: 500042 - RNA, 22 nt, Human
cuguggcucuuuaguugagcac

SEQ ID NO: 500043 - RNA, 22 nt, Human
gcugcugucuggucugagggcu

SEQ ID NO: 500044 - RNA, 22 nt, Human
uccugaggacuaacaggaagga

SEQ ID NO: 500045 - RNA, 22 nt, Human
ccugaggcuccaccuccagaga

SEQ ID NO: 500046 - RNA, 22 nt, Human
cagcucccuauggugaggcgac

SEQ ID NO: 500047 - RNA, 17 nt, Human
ugagcuucaaucaggug

SEQ ID NO: 500048 - RNA, 22 nt, Human
ggggaagaggcgugauggaucc

SEQ ID NO: 500049 - RNA, 22 nt, Human
acucugugaagaugcaggcuug

SEQ ID NO: 500050 - RNA, 22 nt, Human
cuggagcauccaugcccagggu

SEQ ID NO: 500051 - RNA, 22 nt, Human
gcuuccuagcauuagccauugc

SEQ ID NO: 500052 - RNA, 22 nt, Human
gauauuuugagaaauccuauga

SEQ ID NO: 500053 - RNA, 22 nt, Human
ccagcccuugaggucuguccau

SEQ ID NO: 500054 - RNA, 19 nt, Human
gcuuuaguuuacucaucua

SEQ ID NO: 500055 - RNA, 16 nt, Human
ucucuggguugcacag

SEQ ID NO: 500056 - RNA, 22 nt, Human
agcagggcagugcuucagcucu

SEQ ID NO: 500057 - RNA, 22 nt, Human
ggaggccuugaggccaggagcu

SEQ ID NO: 500058 - RNA, 22 nt, Human
cuuuucauuguuuguacaugca

SEQ ID NO: 500059 - RNA, 22 nt, Human
cugccuggggaaugugaggauu

SEQ ID NO: 500060 - RNA, 22 nt, Human
ccucugggggcuuccuuacccu

SEQ ID NO: 500061 - RNA, 19 nt, Human
aggugaugugacucuagaa

SEQ ID NO: 500062 - RNA, 22 nt, Human
aaauuacagaucaccaaugcau

SEQ ID NO: 500063 - RNA, 22 nt, Human
ggcugggccagggccuguggac

SEQ ID NO: 500064 - RNA, 19 nt, Human
gcaggcacagcccugggug

SEQ ID NO: 500065 - RNA, 22 nt, Human
acagggcagguggcuacugguc

SEQ ID NO: 500066 - RNA, 23 nt, Human
aagaauaaaugacauuaaaggug

SEQ ID NO: 500067 - RNA, 22 nt, Human
ucccaugugacucagcugccug

SEQ ID NO: 500068 - RNA, 22 nt, Human
aggcagagagcaguggccgucu

SEQ ID NO: 500069 - RNA, 22 nt, Human
gggagggacacaaagaguuccc

SEQ ID NO: 500070 - RNA, 22 nt, Human
gggcugcaaugcuucaguuguu

SEQ ID NO: 500071 - RNA, 22 nt, Human
aaagauuuaagaauaauuugug

SEQ ID NO: 500072 - RNA, 22 nt, Human
agccccucuguggcucugccuc

SEQ ID NO: 500073 - RNA, 22 nt, Human
acagcuguggggacucuugccc

SEQ ID NO: 500074 - RNA, 22 nt, Human
uccaucuguuuacuauaaagau

SEQ ID NO: 500075 - RNA, 22 nt, Human
auguaguauuuggaaauguaaa

SEQ ID NO: 500076 - RNA, 22 nt, Human
gagagguccauuccccugucag

SEQ ID NO: 500077 - RNA, 22 nt, Human
uuucaugugcaauuagcaauau

SEQ ID NO: 500078 - RNA, 22 nt, Human
gcuucagagauuucacuaguuu

SEQ ID NO: 500079 - RNA, 22 nt, Human
cacaacuuuaggaaccacauuc

SEQ ID NO: 500080 - RNA, 22 nt, Human
ccaggcagggcucaaggaaccu

SEQ ID NO: 500081 - RNA, 22 nt, Human
gcuaggagugggauggaagucg

SEQ ID NO: 500082 - RNA, 23 nt, Human
uaguuauuuucucuguaauuugc

SEQ ID NO: 500083 - RNA, 22 nt, Human
uccuguuuaggcuguggucugg

SEQ ID NO: 500084 - RNA, 22 nt, Human
uaaguuuuaagcaaucugauaa

SEQ ID NO: 500085 - RNA, 22 nt, Human
aggaccaacauagcagcagugg

SEQ ID NO: 500086 - RNA, 22 nt, Human
uccugaggccucugugauguga

SEQ ID NO: 500087 - RNA, 22 nt, Human
ucucugggccucccuuuccaag

SEQ ID NO: 500088 - RNA, 22 nt, Human
cagagcagggguuucccagguu

SEQ ID NO: 500089 - RNA, 22 nt, Human
uuccagaaaucuuucagcucaa

SEQ ID NO: 500090 - RNA, 22 nt, Human
aggaaaugcaggcaaauacucu

SEQ ID NO: 500091 - RNA, 22 nt, Human
cagcuucugagcaagccagggg

SEQ ID NO: 500092 - RNA, 22 nt, Human
ccacagaaagccugggaagugg

SEQ ID NO: 500093 - RNA, 22 nt, Human
gacagaguuguugauguaugcu

SEQ ID NO: 500094 - RNA, 19 nt, Human
ggcauggucggaagagcuc

SEQ ID NO: 500095 - RNA, 19 nt, Human
acacugaauguagaauugg

SEQ ID NO: 500096 - RNA, 22 nt, Human
gucagaggggcagcugccaggc

SEQ ID NO: 500097 - RNA, 22 nt, Human
ccagcaggagaugccugugucu

SEQ ID NO: 500098 - RNA, 17 nt, Human
gcaucacagauaacacg

SEQ ID NO: 500099 - RNA, 22 nt, Human
guaggcagggcuguggggagaa

SEQ ID NO: 500100 - RNA, 22 nt, Human
guaauugacucagcucuguuca

SEQ ID NO: 500101 - RNA, 22 nt, Human
cgcuggggcuuuuugcuugaga

SEQ ID NO: 500102 - RNA, 19 nt, Human
aggcccagcgcugggggcu

SEQ ID NO: 500103 - RNA, 22 nt, Human
uacagagagauaaguguaaaag

SEQ ID NO: 500104 - RNA, 22 nt, Human
uagggcucagcucuagcuccug

SEQ ID NO: 500105 - RNA, 22 nt, Human
agaucuggaaaaucacaggugc

SEQ ID NO: 500106 - RNA, 22 nt, Human
ucucccaaggcacagaaagagu

SEQ ID NO: 500107 - RNA, 21 nt, Human
ucuuugcaucaguuguuuucu

SEQ ID NO: 500108 - RNA, 18 nt, Human
gcacauguaagaguaaag

SEQ ID NO: 500109 - RNA, 22 nt, Human
cuguuuaucucuaaccuguuua

SEQ ID NO: 500110 - RNA, 22 nt, Human
cagcuggggcagccacgugcgg

SEQ ID NO: 500111 - RNA, 22 nt, Human
aaguccagugaaauagaaugca

SEQ ID NO: 500112 - RNA, 19 nt, Human
gcaucagagcagaaggggu

SEQ ID NO: 500113 - RNA, 22 nt, Human
guaacacagaaaugaaauucca

SEQ ID NO: 500114 - RNA, 22 nt, Human
uguguccuucugggagucccag

SEQ ID NO: 500115 - RNA, 22 nt, Human
uccucaugccgggucucacgcu

SEQ ID NO: 500116 - RNA, 22 nt, Human
uccuggagcuuccuucauggua

SEQ ID NO: 500117 - RNA, 22 nt, Human
aacagaaaagguagguggcuuu

SEQ ID NO: 500118 - RNA, 22 nt, Human
gcaguaaaaaaggauaugugca

SEQ ID NO: 500119 - RNA, 22 nt, Human
cagugaggaguccagggcagag

SEQ ID NO: 500120 - RNA, 22 nt, Human
gauuucuuuagcucaucagauc

SEQ ID NO: 500121 - RNA, 22 nt, Human
gcaggcaguuauuuaguagaau

SEQ ID NO: 500122 - RNA, 22 nt, Human
uucuuacaaguauuccaggucc

SEQ ID NO: 500123 - RNA, 22 nt, Human
caucuuuguucuguaaacuuuu

SEQ ID NO: 500124 - RNA, 22 nt, Human
aaggcuuucagcuaacuugauu

SEQ ID NO: 500125 - RNA, 22 nt, Human
gcugccugaagugucuacacug

SEQ ID NO: 500126 - RNA, 22 nt, Human
uuucaugcacaaaugagcaagg

SEQ ID NO: 500127 - RNA, 22 nt, Human
auggcagcaaaugucuggcugg

SEQ ID NO: 500128 - RNA, 22 nt, Human
acugcuuuuagaaaucuauaga

SEQ ID NO: 500129 - RNA, 22 nt, Human
caggcuggagugcaauggcaca

SEQ ID NO: 500130 - RNA, 22 nt, Human
ugcaggcugcucaagacuuagu

SEQ ID NO: 500131 - RNA, 20 nt, Human
guggccucucacauucugag

SEQ ID NO: 500132 - RNA, 19 nt, Human
guggccagggcaggggcug

SEQ ID NO: 500133 - RNA, 22 nt, Human
cagaguguauucugcaguugca

SEQ ID NO: 500134 - RNA, 22 nt, Human
cuggcuccaucacugggugaug

SEQ ID NO: 500135 - RNA, 21 nt, Human
ugaaagaggauguggucauuc

SEQ ID NO: 500136 - RNA, 22 nt, Human
uauugacaauaggcaacugagg

SEQ ID NO: 500137 - RNA, 20 nt, Human
cuguggugagcaggagagua

SEQ ID NO: 500138 - RNA, 22 nt, Human
gugucugcuugcugagcauuua

SEQ ID NO: 500139 - RNA, 22 nt, Human
cucucccagucaggcucaggau

SEQ ID NO: 500140 - RNA, 22 nt, Human
ucugcaggacugaggccuguuu

SEQ ID NO: 500141 - RNA, 17 nt, Human
uucucuuccuggauagu

SEQ ID NO: 500142 - RNA, 22 nt, Human
uaagcuucaaagaacauauugg

SEQ ID NO: 500143 - RNA, 22 nt, Human
ucuauuucgcauauaaguuuug

SEQ ID NO: 500144 - RNA, 22 nt, Human
gauaauuauaggcuaagccacu

SEQ ID NO: 500145 - RNA, 22 nt, Human
uaaggcacacaguugcugcaug

SEQ ID NO: 500146 - RNA, 22 nt, Human
aauaagaauugccagauuugaa

SEQ ID NO: 500147 - RNA, 22 nt, Human
ccuggcucugaaguccacauca

SEQ ID NO: 500148 - RNA, 22 nt, Human
uuguaaauaguaguaagaugcc

SEQ ID NO: 500149 - RNA, 20 nt, Human
ucauuacagugcuaagaugu

SEQ ID NO: 500150 - RNA, 22 nt, Human
caguacuuggucaaggaagcag

SEQ ID NO: 500151 - RNA, 22 nt, Human
uuccuccacgugacaggagcca

SEQ ID NO: 500152 - RNA, 22 nt, Human
gaacaguaaauuuaugcagcac

SEQ ID NO: 500153 - RNA, 16 nt, Human
ugggcagaugagaaga

SEQ ID NO: 500154 - RNA, 22 nt, Human
gugggcuggauuugcuugcaga

SEQ ID NO: 500155 - RNA, 23 nt, Human
uugcacaguuucggaaacugagg

SEQ ID NO: 500156 - RNA, 18 nt, Human
cugccuguugcugagagg

SEQ ID NO: 500157 - RNA, 22 nt, Human
ggcuccuguccccucagcugcu

SEQ ID NO: 500158 - RNA, 17 nt, Human
uauuagcuagcuuccag

SEQ ID NO: 500159 - RNA, 22 nt, Human
gaggagaagcuauuggaaggac

SEQ ID NO: 500160 - RNA, 22 nt, Human
caaggccauaagagauacaaaa

SEQ ID NO: 500161 - RNA, 22 nt, Human
gacagcuuaggaaguuucuauu

SEQ ID NO: 500162 - RNA, 23 nt, Human
ccagugugguagguccacaggug

SEQ ID NO: 500163 - RNA, 22 nt, Human
agcugccuaguagauugauugg

SEQ ID NO: 500164 - RNA, 22 nt, Human
uuggaaggguuucaguuagucu

SEQ ID NO: 500165 - RNA, 22 nt, Human
ucccagagugagccaggggcag

SEQ ID NO: 500166 - RNA, 22 nt, Human
cuggaagggucagagugaugag

SEQ ID NO: 500167 - RNA, 22 nt, Human
ucucccacugcaagcccaggcu

SEQ ID NO: 500168 - RNA, 22 nt, Human
uuugcuauaaaagggucacacg

SEQ ID NO: 500169 - RNA, 22 nt, Human
uugcaccaaaugaguuaaaauu

SEQ ID NO: 500170 - RNA, 22 nt, Human
cugggccaggaccaggguugaa

SEQ ID NO: 500171 - RNA, 18 nt, Human
gccugcaggcacgggggu

SEQ ID NO: 500172 - RNA, 22 nt, Human
acuguucacuagugaggguuga

SEQ ID NO: 500173 - RNA, 22 nt, Human
uggccacccccaaugucaguag

SEQ ID NO: 500174 - RNA, 22 nt, Human
ugccugcucuuaccacucuccc

SEQ ID NO: 500175 - RNA, 22 nt, Human
aaugaagaaauggacaucuuua

SEQ ID NO: 500176 - RNA, 22 nt, Human
cuagggacugggaccuuaguua

SEQ ID NO: 500177 - RNA, 22 nt, Human
gcagugacagggcugcugccuu

SEQ ID NO: 500178 - RNA, 22 nt, Human
agaaggaaggauaacugcauua

SEQ ID NO: 500179 - RNA, 22 nt, Human
ccaguguuggaggauggcuugc

SEQ ID NO: 500180 - RNA, 22 nt, Human
uaaagcaaaaaugaacugccau

SEQ ID NO: 500181 - RNA, 22 nt, Human
ccagcugacgaugccuggucuc

SEQ ID NO: 500182 - RNA, 22 nt, Human
ugcccuuauaaaggaggccuga

SEQ ID NO: 500183 - RNA, 22 nt, Human
gaaaugugcagaauguguuaga

SEQ ID NO: 500184 - RNA, 22 nt, Human
gaggcugcuguuagcccugggc

SEQ ID NO: 500185 - RNA, 22 nt, Human
ugcugccuccaacuccugggcu

SEQ ID NO: 500186 - RNA, 22 nt, Human
ccagcuccagguagaugggcag

SEQ ID NO: 500187 - RNA, 22 nt, Human
augaggauaccgcagggggcag

SEQ ID NO: 500188 - RNA, 22 nt, Human
gguggccauucuaccgccuucu

SEQ ID NO: 500189 - RNA, 22 nt, Human
cacauacugagaaucacaccca

SEQ ID NO: 500190 - RNA, 22 nt, Human
agcagcugggcucagagcuggg

SEQ ID NO: 500191 - RNA, 22 nt, Human
gucucagaccacccucuuuggc

SEQ ID NO: 500192 - RNA, 22 nt, Human
auuagaagaggcugacgaaugu

SEQ ID NO: 500193 - RNA, 22 nt, Human
guacagagaagguuacauauga

SEQ ID NO: 500194 - RNA, 22 nt, Human
gauagcagcucuggggucagac

SEQ ID NO: 500195 - RNA, 22 nt, Human
aaguucuaauuuugcauucagg

SEQ ID NO: 500196 - RNA, 18 nt, Human
cgaggcaggcggaucacg

SEQ ID NO: 500197 - RNA, 22 nt, Human
agcaggcuaaauaauaauacau

SEQ ID NO: 500198 - RNA, 21 nt, Human
cagcuuugucugucuucgggg

SEQ ID NO: 500199 - RNA, 22 nt, Human
gcucuuauagucccagcauguu

SEQ ID NO: 500200 - RNA, 22 nt, Human
auacuugagguagcaacuuaag

SEQ ID NO: 500201 - RNA, 22 nt, Human
cacugcuuuuuuggcuauguac

SEQ ID NO: 500202 - RNA, 22 nt, Human
cuuccugggucagccuggaggu

SEQ ID NO: 500203 - RNA, 22 nt, Human
cugugcuugacagugggaagca

SEQ ID NO: 500204 - RNA, 22 nt, Human
uaaguucauaagcuuauucuua

SEQ ID NO: 500205 - RNA, 22 nt, Human
uguauacaggauuacucauagc

SEQ ID NO: 500206 - RNA, 22 nt, Human
ugguaauuuacgcauuucugua

SEQ ID NO: 500207 - RNA, 22 nt, Human
ggaugcaggggcagcagagccu

SEQ ID NO: 500208 - RNA, 22 nt, Human
uggcaguggcucagagugcaga

SEQ ID NO: 500209 - RNA, 22 nt, Human
uuuugccugagagugaaaauaa

SEQ ID NO: 500210 - RNA, 22 nt, Human
cccucugccugggaccaagucc

SEQ ID NO: 500211 - RNA, 22 nt, Human
ucucugggaaauggagaauuuu

SEQ ID NO: 500212 - RNA, 22 nt, Human
ccugggcuuacgaccucugacu

SEQ ID NO: 500213 - RNA, 22 nt, Human
acauuucuuugcuagacagcag

SEQ ID NO: 500214 - RNA, 19 nt, Human
ucauuuguuaguagaaguu

SEQ ID NO: 500215 - RNA, 21 nt, Human
ugcucaguaaaugcugaguga

SEQ ID NO: 500216 - RNA, 22 nt, Human
ucaguguuucaguuuggaaaug

SEQ ID NO: 500217 - RNA, 22 nt, Human
gcucucagaaguaacuugucca

SEQ ID NO: 500218 - RNA, 22 nt, Human
ugcaaggcuauucacauguauu

SEQ ID NO: 500219 - RNA, 22 nt, Human
acucuggggcgcuacuccaacu

SEQ ID NO: 500220 - RNA, 22 nt, Human
cugagcugggacucaguagcaa

SEQ ID NO: 500221 - RNA, 21 nt, Human
cacugcagccuugaccugggc

SEQ ID NO: 500222 - RNA, 22 nt, Human
cugcugugaguuuggaggucua

SEQ ID NO: 500223 - RNA, 18 nt, Human
uugagucuagccauggaa

SEQ ID NO: 500224 - RNA, 21 nt, Human
ucucuacaaauuauguuaggu

SEQ ID NO: 500225 - RNA, 22 nt, Human
caaagguauucucauuuuggaa

SEQ ID NO: 500226 - RNA, 22 nt, Human
ugcuuuaaaccauggaugugag

SEQ ID NO: 500227 - RNA, 22 nt, Human
agguagagcuccaguagaaaau

SEQ ID NO: 500228 - RNA, 22 nt, Human
ucagaaaugaucguuauucauu

SEQ ID NO: 500229 - RNA, 22 nt, Human
uucugaagcucccuuuuguagu

SEQ ID NO: 500230 - RNA, 22 nt, Human
ggccuggagucagggaaagcaa

SEQ ID NO: 500231 - RNA, 21 nt, Human
acucaggagacuaacuauguc

SEQ ID NO: 500232 - RNA, 22 nt, Human
caaacugagcaucagaaaguuu

SEQ ID NO: 500233 - RNA, 22 nt, Human
agggcacaggcuggcaggaucu

SEQ ID NO: 500234 - RNA, 22 nt, Human
uuuuauaaagagagucaguugg

SEQ ID NO: 500235 - RNA, 22 nt, Human
uaaaagauuuuauaggaacaag

SEQ ID NO: 500236 - RNA, 22 nt, Human
agugcugucccgacaacugagg

SEQ ID NO: 500237 - RNA, 22 nt, Human
ggcucaagcagucugccugccu

SEQ ID NO: 500238 - RNA, 22 nt, Human
ggugcaggaaucugcaauugaa

SEQ ID NO: 500239 - RNA, 22 nt, Human
guccugggcggagggcugcugu

SEQ ID NO: 500240 - RNA, 22 nt, Human
uucugaaaggcagguuguuugc

SEQ ID NO: 500241 - RNA, 22 nt, Human
uauuagcuguguaacucugguu

SEQ ID NO: 500242 - RNA, 22 nt, Human
ugcagggauuguuggcauccau

SEQ ID NO: 500243 - RNA, 22 nt, Human
ucagugcaguagaacuuuaguu

SEQ ID NO: 500244 - RNA, 22 nt, Human
gcugggucucucccugguccug

SEQ ID NO: 500245 - RNA, 22 nt, Human
uuaaagcauguugcuuaacagg

SEQ ID NO: 500246 - RNA, 22 nt, Human
cugcccugcucuccgggaucuu

SEQ ID NO: 500247 - RNA, 22 nt, Human
gcagcccaaaaaagagguagau

SEQ ID NO: 500248 - RNA, 22 nt, Human
agcucauggugcuaucucaggg

SEQ ID NO: 500249 - RNA, 22 nt, Human
ucagaggagaaguugggaaaau

SEQ ID NO: 500250 - RNA, 22 nt, Human
aggcucagcccaagguggagag

SEQ ID NO: 500251 - RNA, 22 nt, Human
ucuuccucuagaucugaggccc

SEQ ID NO: 500252 - RNA, 22 nt, Human
ggcagggcaggaaagucaggaa

SEQ ID NO: 500253 - RNA, 22 nt, Human
accucugcuucccggguucaag

SEQ ID NO: 500254 - RNA, 22 nt, Human
caaggaaaacagaugaucaaca

SEQ ID NO: 500255 - RNA, 22 nt, Human
cacccacauuccaucacucugc

SEQ ID NO: 500256 - RNA, 17 nt, Human
uucaaagcuuaucaagg

SEQ ID NO: 500257 - RNA, 22 nt, Human
ggcugccuggaccuccucuuuc

SEQ ID NO: 500258 - RNA, 22 nt, Human
cugggcaguuuauucaguucug

SEQ ID NO: 500259 - RNA, 22 nt, Human
cuucccagacgggguggcagcc

SEQ ID NO: 500260 - RNA, 17 nt, Human
ugaguuaaguuuagauc

SEQ ID NO: 500261 - RNA, 22 nt, Human
gggccugggaacuugcauuuag

SEQ ID NO: 500262 - RNA, 22 nt, Human
ccugggcaggaugggcccggug

SEQ ID NO: 500263 - RNA, 22 nt, Human
uacuccugcugauccugccagc

SEQ ID NO: 500264 - RNA, 22 nt, Human
ccaggacucaguggggaaaggg

SEQ ID NO: 500265 - RNA, 22 nt, Human
gcagaagcccggucagcgcacg

SEQ ID NO: 500266 - RNA, 22 nt, Human
auaggccaauacuguagaguuu

SEQ ID NO: 500267 - RNA, 22 nt, Human
acaggugauucaggcucuggga

SEQ ID NO: 500268 - RNA, 22 nt, Human
uuggaaggagucuuuggggaug

SEQ ID NO: 500269 - RNA, 21 nt, Human
gcaaguacuaucaucauuauc

SEQ ID NO: 500270 - RNA, 22 nt, Human
guuuauaagguaaaggagagag

SEQ ID NO: 500271 - RNA, 23 nt, Human
ucugggcugagacuuggaagguc

SEQ ID NO: 500272 - RNA, 22 nt, Human
aggccuggccugggcggcauug

SEQ ID NO: 500273 - RNA, 19 nt, Human
ucuggcuccugccaggcug

SEQ ID NO: 500274 - RNA, 22 nt, Human
gugcagcagggggaagacagug

SEQ ID NO: 500275 - RNA, 22 nt, Human
cacccacccacugcucauuggc

SEQ ID NO: 500276 - RNA, 22 nt, Human
acccagagcugggcuuggcaaa

SEQ ID NO: 500277 - RNA, 23 nt, Human
gugugccaagcacugugccagga

SEQ ID NO: 500278 - RNA, 20 nt, Human
acagguucauucugugugac

SEQ ID NO: 500279 - RNA, 22 nt, Human
gggcaggagagaacagucaugg

SEQ ID NO: 500280 - RNA, 19 nt, Human
gcagccaggugcucuaccu

SEQ ID NO: 500281 - RNA, 22 nt, Human
cuccagcuucccucagcugugg

SEQ ID NO: 500282 - RNA, 22 nt, Human
ucucagagcucacaccuccugg

SEQ ID NO: 500283 - RNA, 22 nt, Human
cagcugaauucuucagacucca

SEQ ID NO: 500284 - RNA, 22 nt, Human
acagugcauaaaaacaacuuuu

SEQ ID NO: 500285 - RNA, 22 nt, Human
guucuaauaggagaaaagacag

SEQ ID NO: 500286 - RNA, 23 nt, Human
guccucuggagagaaaggcagua

SEQ ID NO: 500287 - RNA, 22 nt, Human
aauaaauguuaagauugucuca

SEQ ID NO: 500288 - RNA, 22 nt, Human
augagguaguauuagaaggaga

SEQ ID NO: 500289 - RNA, 22 nt, Human
auguuucaaauauauagaguug

SEQ ID NO: 500290 - RNA, 22 nt, Human
uuuagcaucgaaguaaauuuag

SEQ ID NO: 500291 - RNA, 20 nt, Human
cauuugaaucuccauucugc

SEQ ID NO: 500292 - RNA, 22 nt, Human
gaggccugguuugcaugagaau

SEQ ID NO: 500293 - RNA, 22 nt, Human
uucuguguggguagcuccuguu

SEQ ID NO: 500294 - RNA, 22 nt, Human
agggggugcccagaugaaggau

SEQ ID NO: 500295 - RNA, 22 nt, Human
uuuugaaagggugauuuggcuu

SEQ ID NO: 500296 - RNA, 22 nt, Human
ugccugccuaggaagcugugaa

SEQ ID NO: 500297 - RNA, 22 nt, Human
uccugagggcugcagucauagg

SEQ ID NO: 500298 - RNA, 22 nt, Human
uauuucugggaguucagaaauu

SEQ ID NO: 500299 - RNA, 22 nt, Human
cuccuggcaguuccccuuguca

SEQ ID NO: 500300 - RNA, 22 nt, Human
acagccuguguaccagcuggga

SEQ ID NO: 500301 - RNA, 22 nt, Human
gggcagcuguaucugagcuuau

SEQ ID NO: 500302 - RNA, 22 nt, Human
gccagccuucuguggccugcaa

SEQ ID NO: 500303 - RNA, 22 nt, Human
gcugucacacauggccccagcu

SEQ ID NO: 500304 - RNA, 22 nt, Human
aaggcacuagcaagcugccugg

SEQ ID NO: 500305 - RNA, 22 nt, Human
cuugaaagauuuggccucugug

SEQ ID NO: 500306 - RNA, 22 nt, Human
auguacacaugcaugcaugugc

SEQ ID NO: 500307 - RNA, 22 nt, Human
cccagcccaucucaaaggucua

SEQ ID NO: 500308 - RNA, 22 nt, Human
uaagacaauucuucagucacaa

SEQ ID NO: 500309 - RNA, 22 nt, Human
gccucugucauagcucauguga

SEQ ID NO: 500310 - RNA, 22 nt, Human
gccugggagggcagcagugugg

SEQ ID NO: 500311 - RNA, 17 nt, Human
caggaaaauaugaguga

SEQ ID NO: 500312 - RNA, 22 nt, Human
guaaacauuacugugcuguaua

SEQ ID NO: 500313 - RNA, 22 nt, Human
gcuggagauaguaggauccaua

SEQ ID NO: 500314 - RNA, 22 nt, Human
auaggagaucaauaugcaauuu

SEQ ID NO: 500315 - RNA, 22 nt, Human
ugccugccuugcugcuggacag

SEQ ID NO: 500316 - RNA, 23 nt, Human
gggcagguuuuuauaggcuucag

SEQ ID NO: 500317 - RNA, 22 nt, Human
gugcugaggugggugggcagcc

SEQ ID NO: 500318 - RNA, 22 nt, Human
gagaaagacguaggcugggagg

SEQ ID NO: 500319 - RNA, 22 nt, Human
caggcugggacugaccccugcu

SEQ ID NO: 500320 - RNA, 22 nt, Human
gagguggccucaagcagucuuc

SEQ ID NO: 500321 - RNA, 22 nt, Human
gcauucaucuuccuccaugcag

SEQ ID NO: 500322 - RNA, 22 nt, Human
uuggaaggaauuaaggucauga

SEQ ID NO: 500323 - RNA, 22 nt, Human
accugagcaugccaggagagug

SEQ ID NO: 500324 - RNA, 22 nt, Human
uucaauguuucuuaucaaguug

SEQ ID NO: 500325 - RNA, 21 nt, Human
aguuuccucaacugcagaagg

SEQ ID NO: 500326 - RNA, 22 nt, Human
cacagcagagggagccauugaa

SEQ ID NO: 500327 - RNA, 19 nt, Human
cucagagaggggcagugcc

SEQ ID NO: 500328 - RNA, 22 nt, Human
gugcaggggccuccccuugcug

SEQ ID NO: 500329 - RNA, 22 nt, Human
aauguggcauugucauuauugg

SEQ ID NO: 500330 - RNA, 22 nt, Human
uaaucacagaaacagacuguuu

SEQ ID NO: 500331 - RNA, 22 nt, Human
agagccugucaauuguaaagag

SEQ ID NO: 500332 - RNA, 22 nt, Human
gcacuggggucauagccuccag

SEQ ID NO: 500333 - RNA, 22 nt, Human
uagcuuaaaccaaucugaauaa

SEQ ID NO: 500334 - RNA, 22 nt, Human
cuucugggcauggcagagccug

SEQ ID NO: 500335 - RNA, 22 nt, Human
agcuucagggacuuguggcaga

SEQ ID NO: 500336 - RNA, 20 nt, Human
acagugcauggggggacagc

SEQ ID NO: 500337 - RNA, 22 nt, Human
ugcuucugcauucaauguugga

SEQ ID NO: 500338 - RNA, 22 nt, Human
agggcagaggcggacacggaag

SEQ ID NO: 500339 - RNA, 20 nt, Human
aggcaguguagagaugagua

SEQ ID NO: 500340 - RNA, 22 nt, Human
aagggcagcuauuaucgucauc

SEQ ID NO: 500341 - RNA, 22 nt, Human
gugaccauaauagauuaugagu

SEQ ID NO: 500342 - RNA, 22 nt, Human
gugucccaaucuacuuuucccu

SEQ ID NO: 500343 - RNA, 22 nt, Human
gcagaggcagggcccuccucca

SEQ ID NO: 500344 - RNA, 22 nt, Human
acagauuuuauuauucagguau

SEQ ID NO: 500345 - RNA, 22 nt, Human
cuggaagggucuacuuagcaga

SEQ ID NO: 500346 - RNA, 22 nt, Human
agguggcuccucccauggcugg

SEQ ID NO: 500347 - RNA, 22 nt, Human
ugguccugcuugcugcuuaaga

SEQ ID NO: 500348 - RNA, 22 nt, Human
cugcccagaagccagaugggca

SEQ ID NO: 500349 - RNA, 22 nt, Human
caaauagauuguucaauccuga

SEQ ID NO: 500350 - RNA, 22 nt, Human
gcaagcaagcagguagagcuga

SEQ ID NO: 500351 - RNA, 22 nt, Human
ucucagagaccugaacucccug

SEQ ID NO: 500352 - RNA, 22 nt, Human
gcugggcuccacccucaacugu

SEQ ID NO: 500353 - RNA, 22 nt, Human
auuaaaacuaaaaugccugauu

SEQ ID NO: 500354 - RNA, 22 nt, Human
gacuguacuugagagaggaacu

SEQ ID NO: 500355 - RNA, 22 nt, Human
uccaggcagggcagccaucaag

SEQ ID NO: 500356 - RNA, 22 nt, Human
ucucccacagccgugcuucaag

SEQ ID NO: 500357 - RNA, 21 nt, Human
ccuccaggagcagagcccuga

SEQ ID NO: 500358 - RNA, 22 nt, Human
ucaggggagguugaaucgucuc

SEQ ID NO: 500359 - RNA, 23 nt, Human
gccuggagaaaagcugcaguuca

SEQ ID NO: 500360 - RNA, 22 nt, Human
gccuggucucuuucaugucagu

SEQ ID NO: 500361 - RNA, 23 nt, Human
cagcagcugccugguuuuuuggu

SEQ ID NO: 500362 - RNA, 22 nt, Human
gacagcuucuaugugacgagca

SEQ ID NO: 500363 - RNA, 22 nt, Human
ugaacaacugcaaaaaucucca

SEQ ID NO: 500364 - RNA, 20 nt, Human
uaugaguauuacuuucagga

SEQ ID NO: 500365 - RNA, 22 nt, Human
agggguggccugccuuacuccc

SEQ ID NO: 500366 - RNA, 22 nt, Human
uauauuaacacccacuugccuc

SEQ ID NO: 500367 - RNA, 22 nt, Human
ucucagggcgcagugaggcagu

SEQ ID NO: 500368 - RNA, 22 nt, Human
ucaggccccaucccagacuuau

SEQ ID NO: 500369 - RNA, 17 nt, Human
agcaggcacgucagcac

SEQ ID NO: 500370 - RNA, 22 nt, Human
uuuaacaugugaauuuuggaag

SEQ ID NO: 500371 - RNA, 22 nt, Human
caugcacaacauacucaagagg

SEQ ID NO: 500372 - RNA, 17 nt, Human
ucugcagaggcaaaccu

SEQ ID NO: 500373 - RNA, 22 nt, Human
acagugcaaacuuuugucuccu

SEQ ID NO: 500374 - RNA, 22 nt, Human
guuuucuuugaaugcuucuaga

SEQ ID NO: 500375 - RNA, 15 nt, Human
gcucuggguauuuga

SEQ ID NO: 500376 - RNA, 22 nt, Human
aucuuucaguuucauaccaauu

SEQ ID NO: 500377 - RNA, 22 nt, Human
agccaggauggucucgaucggc

SEQ ID NO: 500378 - RNA, 22 nt, Human
guuuuacaagguuaaucagcag

SEQ ID NO: 500379 - RNA, 23 nt, Human
agucuucauuguauuuccagacc

SEQ ID NO: 500380 - RNA, 22 nt, Human
ccuucuucuguguggcccaaga

SEQ ID NO: 500381 - RNA, 21 nt, Human
ugcacagggcccaggagagcc

SEQ ID NO: 500382 - RNA, 22 nt, Human
gugcuucucuucacacccaacu

SEQ ID NO: 500383 - RNA, 22 nt, Human
uacccagcuccucagaagacca

SEQ ID NO: 500384 - RNA, 22 nt, Human
uuuuccuaguaggccuauuaga

SEQ ID NO: 500385 - RNA, 22 nt, Human
aaaauagguacggauuagaaug

SEQ ID NO: 500386 - RNA, 22 nt, Human
auugacuuccauagcuaccugg

SEQ ID NO: 500387 - RNA, 22 nt, Human
ggaccagagcucgggcuucuca

SEQ ID NO: 500388 - RNA, 22 nt, Human
augacacaauuuuagagcugaa

SEQ ID NO: 500389 - RNA, 22 nt, Human
gacaagacugguuuauuuaagg

SEQ ID NO: 500390 - RNA, 22 nt, Human
gaaaauaggcugcaucuccuuc

SEQ ID NO: 500391 - RNA, 22 nt, Human
ggcagcagggucuagauugaug

SEQ ID NO: 500392 - RNA, 22 nt, Human
uguccuggugcuccagguggcu

SEQ ID NO: 500393 - RNA, 20 nt, Human
ucaaagcaaagggagaugau

SEQ ID NO: 500394 - RNA, 22 nt, Human
aauggagacccuaaggaagagg

SEQ ID NO: 500395 - RNA, 20 nt, Human
uucgcugggaguggccaggc

SEQ ID NO: 500396 - RNA, 22 nt, Human
gccaggcuggccagcaccuucu

SEQ ID NO: 500397 - RNA, 22 nt, Human
gugucagauguccagggcagca

SEQ ID NO: 500398 - RNA, 22 nt, Human
uccagcagguuggucaggugca

SEQ ID NO: 500399 - RNA, 22 nt, Human
cuuaagauugucagcuucagcc

SEQ ID NO: 500400 - RNA, 22 nt, Human
cuuggcccaguugccaaggaaa

SEQ ID NO: 500401 - RNA, 22 nt, Human
caggagcugggucuggaagcag

SEQ ID NO: 500402 - RNA, 22 nt, Human
cagcaggacccaggaauccugc

SEQ ID NO: 500403 - RNA, 22 nt, Human
acaggcagggaccuuggcuaag

SEQ ID NO: 500404 - RNA, 22 nt, Human
agcaggaggguuuuguagaguc

SEQ ID NO: 500405 - RNA, 18 nt, Human
uggcuccugccuccugca

SEQ ID NO: 500406 - RNA, 22 nt, Human
ugucuggcauaguugcucccug

SEQ ID NO: 500407 - RNA, 22 nt, Human
uucccaggcugugcuaccagag

SEQ ID NO: 500408 - RNA, 22 nt, Human
acagaaagaagguguauuugag

SEQ ID NO: 500409 - RNA, 22 nt, Human
agaaggcuggccauggugcccu

SEQ ID NO: 500410 - RNA, 22 nt, Human
uccucaguuuucuaguauggca

SEQ ID NO: 500411 - RNA, 23 nt, Human
acagcaagaggaccagaugugag

SEQ ID NO: 500412 - RNA, 22 nt, Human
acagagcacugcccugugccgc

SEQ ID NO: 500413 - RNA, 16 nt, Human
ccaccugcagcucuca

SEQ ID NO: 500414 - RNA, 22 nt, Human
agcaggguuuggggauuggcac

SEQ ID NO: 500415 - RNA, 22 nt, Human
ucagugcagacuguaaguugga

SEQ ID NO: 500416 - RNA, 22 nt, Human
ggcagguggccaagugucuaag

SEQ ID NO: 500417 - RNA, 22 nt, Human
aaaagucagucucuccuagcuc

SEQ ID NO: 500418 - RNA, 22 nt, Human
ucucuuuguggccaggagagga

SEQ ID NO: 500419 - RNA, 22 nt, Human
uuagucacuucuuccuucauca

SEQ ID NO: 500420 - RNA, 22 nt, Human
uccauguggcaauaggagacag

SEQ ID NO: 500421 - RNA, 22 nt, Human
agcaggcuuguuaugucugaga

SEQ ID NO: 500422 - RNA, 22 nt, Human
aggucauuccagccauuccccu

SEQ ID NO: 500423 - RNA, 22 nt, Human
uaccugcagcgggaauccauua

SEQ ID NO: 500424 - RNA, 22 nt, Human
ugguccuucuugaagagugagu

SEQ ID NO: 500425 - RNA, 22 nt, Human
ugccaggagagugcaugcaggg

SEQ ID NO: 500426 - RNA, 22 nt, Human
cugaagagaaagggagcucuuc

SEQ ID NO: 500427 - RNA, 22 nt, Human
gaguuguucaacgugugugaaa

SEQ ID NO: 500428 - RNA, 22 nt, Human
ugccucuguugagccuuggcug

SEQ ID NO: 500429 - RNA, 22 nt, Human
uggaauuuuguauuagcuuuga

SEQ ID NO: 500430 - RNA, 20 nt, Human
uguuucugacgguaggagag

SEQ ID NO: 500431 - RNA, 22 nt, Human
ugcuuaaaauaguucauuuuug

SEQ ID NO: 500432 - RNA, 22 nt, Human
aauguguacaugacagauagaa

SEQ ID NO: 500433 - RNA, 22 nt, Human
uccagggaccucccugagagcu

SEQ ID NO: 500434 - RNA, 22 nt, Human
acacauaagccuaaucaucucc

SEQ ID NO: 500435 - RNA, 22 nt, Human
gcuucuggagucuucagaggaa

SEQ ID NO: 500436 - RNA, 22 nt, Human
aagccaguaaguuuuugucauu

SEQ ID NO: 500437 - RNA, 22 nt, Human
agaaaacauuacauaggugugu

SEQ ID NO: 500438 - RNA, 22 nt, Human
ucugccuguucaagucuucuag

SEQ ID NO: 500439 - RNA, 22 nt, Human
uuaguuagucccugguaccuuu

SEQ ID NO: 500440 - RNA, 22 nt, Human
aaacuuguucucauguugcaga

SEQ ID NO: 500441 - RNA, 22 nt, Human
uucugggccaaucucuuaaucu

SEQ ID NO: 500442 - RNA, 22 nt, Human
uaaagacaugcaaagucuaauu

SEQ ID NO: 500443 - RNA, 22 nt, Human
uauuucuuucagguauguguug

SEQ ID NO: 500444 - RNA, 22 nt, Human
ucuuaaaccacaaaauucagag

SEQ ID NO: 500445 - RNA, 22 nt, Human
auuugucuucaguagguucuuc

SEQ ID NO: 500446 - RNA, 22 nt, Human
aagacauugucauuuuauaauu

SEQ ID NO: 500447 - RNA, 22 nt, Human
cuggagucuuagguuaugguga

SEQ ID NO: 500448 - RNA, 22 nt, Human
agcuuuauucaugauuucaggg

SEQ ID NO: 500449 - RNA, 22 nt, Human
cugcagggaugugaggcccguu

SEQ ID NO: 500450 - RNA, 22 nt, Human
uguggcuguugaggaccccaag

SEQ ID NO: 500451 - RNA, 22 nt, Human
uguggcugcaggcgauggagga

SEQ ID NO: 500452 - RNA, 22 nt, Human
ccuggguggcugccugccuuuc

SEQ ID NO: 500453 - RNA, 22 nt, Human
guggaaggugaaggagcagcga

SEQ ID NO: 500454 - RNA, 22 nt, Human
uaauuucuucaucucugcagcu

SEQ ID NO: 500455 - RNA, 19 nt, Human
ugcuucuggaaccaugauc

SEQ ID NO: 500456 - RNA, 22 nt, Human
agauaaauuccuaagauuucag

SEQ ID NO: 500457 - RNA, 20 nt, Human
aggaggcaauguagauaagc

SEQ ID NO: 500458 - RNA, 22 nt, Human
ggcucugcccagaugaagagga

SEQ ID NO: 500459 - RNA, 22 nt, Human
cagcagcugauggggaagugau

SEQ ID NO: 500460 - RNA, 22 nt, Human
uuucagaaaacuuaucaucagu

SEQ ID NO: 500461 - RNA, 22 nt, Human
agcuuuauggugccucacuuga

SEQ ID NO: 500462 - RNA, 22 nt, Human
acaaugcaauuguaaggugugu

SEQ ID NO: 500463 - RNA, 22 nt, Human
ugguuuugcuccaguauaaaua

SEQ ID NO: 500464 - RNA, 22 nt, Human
uuugugaagggaacagaagugu

SEQ ID NO: 500465 - RNA, 22 nt, Human
aagaugcgguugaccauggugu

SEQ ID NO: 500466 - RNA, 22 nt, Human
gcccagcacagcuggaagaguc

SEQ ID NO: 500467 - RNA, 22 nt, Human
ucaguuuuuaaaugauauaauu

SEQ ID NO: 500468 - RNA, 22 nt, Human
aucuggcuuucuuaaugacuua

SEQ ID NO: 500469 - RNA, 22 nt, Human
uuccuguauucuaaagggaaag

SEQ ID NO: 500470 - RNA, 22 nt, Human
uagcagcaauucaggugugaug

SEQ ID NO: 500471 - RNA, 22 nt, Human
ucagagaacacagaggugaugu

SEQ ID NO: 500472 - RNA, 22 nt, Human
aaaaaguauuggccaugguuga

SEQ ID NO: 500473 - RNA, 22 nt, Human
uacaggaacugggcaggacauu

SEQ ID NO: 500474 - RNA, 22 nt, Human
caggugggccaugaaaaaugac

SEQ ID NO: 500475 - RNA, 22 nt, Human
aaagauuucagaagccugugcc

SEQ ID NO: 500476 - RNA, 22 nt, Human
aguaaugucccuuaaauguggu

SEQ ID NO: 500477 - RNA, 22 nt, Human
acuuauaagagugcuaugggga

SEQ ID NO: 500478 - RNA, 22 nt, Human
auuuaaugucgagcuauuguag

SEQ ID NO: 500479 - RNA, 22 nt, Human
ucuagaaugacaugcaagagua

SEQ ID NO: 500480 - RNA, 22 nt, Human
auuagcaugccaagcuuuuaga

SEQ ID NO: 500481 - RNA, 22 nt, Human
cauauucuguuggucacauaga

SEQ ID NO: 500482 - RNA, 22 nt, Human
ucagcaggcugucagcaggggc

SEQ ID NO: 500483 - RNA, 22 nt, Human
ucauggcacuuagcacaguccu

SEQ ID NO: 500484 - RNA, 22 nt, Human
gccugagcuacuagggagucug

SEQ ID NO: 500485 - RNA, 22 nt, Human
ugcugggggugucucaccaggc

SEQ ID NO: 500486 - RNA, 22 nt, Human
aaaggagagugagucagaugcc

SEQ ID NO: 500487 - RNA, 22 nt, Human
uugaggcaaaaucaacgggaag

SEQ ID NO: 500488 - RNA, 20 nt, Human
gccugccucagcuagcugag

SEQ ID NO: 500489 - RNA, 22 nt, Human
cuggucuggcuacccagcgaau

SEQ ID NO: 500490 - RNA, 20 nt, Human
ggcucuggaaucuggugggc

SEQ ID NO: 500491 - RNA, 22 nt, Human
caccuuguggcccagucagguu

SEQ ID NO: 500492 - RNA, 19 nt, Human
uggcauugguccagauaaa

SEQ ID NO: 500493 - RNA, 22 nt, Human
uguacacaauucuuaacauaca

SEQ ID NO: 500494 - RNA, 22 nt, Human
cugggagcccgcguccuggugg

SEQ ID NO: 500495 - RNA, 22 nt, Human
ugagucaugggcuugagguuac

SEQ ID NO: 500496 - RNA, 22 nt, Human
uucccagagaaggaugaaaaag

SEQ ID NO: 500497 - RNA, 22 nt, Human
ucacaggguguacaucaccuau

SEQ ID NO: 500498 - RNA, 23 nt, Human
aaacaugcagcacaugaaugcua

SEQ ID NO: 500499 - RNA, 22 nt, Human
uggaggcaguaacugagcaaca

SEQ ID NO: 500500 - RNA, 16 nt, Human
auuguuuucaauuaga

SEQ ID NO: 500501 - RNA, 22 nt, Human
cccagccagccucuucccauau

SEQ ID NO: 500502 - RNA, 22 nt, Human
gagguccaggguggggccugag

SEQ ID NO: 500503 - RNA, 22 nt, Human
uuucugaauaacucuaugauau

SEQ ID NO: 500504 - RNA, 22 nt, Human
ucucaggaucuaauacauggua

SEQ ID NO: 500505 - RNA, 22 nt, Human
cuguucauggaaaaauaguugg

SEQ ID NO: 500506 - RNA, 22 nt, Human
aaaugcuguaacugauauucug

SEQ ID NO: 500507 - RNA, 22 nt, Human
gcaaagcaaucaggaguagcau

SEQ ID NO: 500508 - RNA, 21 nt, Human
ugcuuuaugggaaaaauguca

SEQ ID NO: 500509 - RNA, 22 nt, Human
ucuacagacagagcagguggga

SEQ ID NO: 500510 - RNA, 22 nt, Human
acaggcuuacuguuucauaggg

SEQ ID NO: 500511 - RNA, 22 nt, Human
uugcauguguaauuuuucuaaa

SEQ ID NO: 500512 - RNA, 22 nt, Human
cugggagauaugaggaucugga

SEQ ID NO: 500513 - RNA, 22 nt, Human
uagagcugauaaugaggccaag

SEQ ID NO: 500514 - RNA, 22 nt, Human
cccuggcuuaaaaaccucauau

SEQ ID NO: 500515 - RNA, 22 nt, Human
gcuuccucaccuucucuugcau

SEQ ID NO: 500516 - RNA, 22 nt, Human
uucauaaugagguccuagaggc

SEQ ID NO: 500517 - RNA, 22 nt, Human
ugucuuuagaaagaagcagaca

SEQ ID NO: 500518 - RNA, 22 nt, Human
uuccaggaggagguacuagagg

SEQ ID NO: 500519 - RNA, 22 nt, Human
auccugggaagcugacauugaa

SEQ ID NO: 500520 - RNA, 22 nt, Human
acaaaagugagugugucucaga

SEQ ID NO: 500521 - RNA, 22 nt, Human
agucugucuaauauuauucagg

SEQ ID NO: 500522 - RNA, 22 nt, Human
ucucagaguuccucuggagucc

SEQ ID NO: 500523 - RNA, 22 nt, Human
agugacuggugugaaguuaaau

SEQ ID NO: 500524 - RNA, 22 nt, Human
gaggcugguaggaaaggaaaca

SEQ ID NO: 500525 - RNA, 20 nt, Human
gugugaagcccucaggagga

SEQ ID NO: 500526 - RNA, 22 nt, Human
ccucugugccucguguccucug

SEQ ID NO: 500527 - RNA, 22 nt, Human
ugcauuuuuaacaaggcuaauu

SEQ ID NO: 500528 - RNA, 22 nt, Human
ugucacuucaggaaugcaggga

SEQ ID NO: 500529 - RNA, 22 nt, Human
uggaccugggguggccuccucu

SEQ ID NO: 500530 - RNA, 22 nt, Human
agcaggaaggggaugaugggca

SEQ ID NO: 500531 - RNA, 22 nt, Human
gcggcgccuaagccccgaccuc

SEQ ID NO: 500532 - RNA, 22 nt, Human
agcagcaucaacccucccgugu

SEQ ID NO: 500533 - RNA, 22 nt, Human
gcccacaccauuuauucuuugu

SEQ ID NO: 500534 - RNA, 22 nt, Human
caguggguggccucuugaguca

SEQ ID NO: 500535 - RNA, 22 nt, Human
caaggccauauugccuguaugu

SEQ ID NO: 500536 - RNA, 22 nt, Human
agcugucuaccugcagaguccu

SEQ ID NO: 500537 - RNA, 22 nt, Human
aagucacagaacccauuguaac

SEQ ID NO: 500538 - RNA, 22 nt, Human
uggaaacaucucugccuuuauu

SEQ ID NO: 500539 - RNA, 22 nt, Human
cauuugcuguauuuucagauuc

SEQ ID NO: 500540 - RNA, 22 nt, Human
acaauucugaugguuucccagu

SEQ ID NO: 500541 - RNA, 22 nt, Human
agcacuagcuuuaagcauucug

SEQ ID NO: 500542 - RNA, 22 nt, Human
agcaccugcuaugugucaggga

SEQ ID NO: 500543 - RNA, 22 nt, Human
cagaccagcucuaugaacccaa

SEQ ID NO: 500544 - RNA, 22 nt, Human
guccugguggagucucugggga

SEQ ID NO: 500545 - RNA, 22 nt, Human
aagauguuacucaaccaggaua

SEQ ID NO: 500546 - RNA, 21 nt, Human
ugaagccugaggcauagcccc

SEQ ID NO: 500547 - RNA, 22 nt, Human
aaggcucccucuucucgagugu

SEQ ID NO: 500548 - RNA, 20 nt, Human
gaggccucagccucagcucc

SEQ ID NO: 500549 - RNA, 22 nt, Human
uggcacuuuacacccauuuggc

SEQ ID NO: 500550 - RNA, 22 nt, Human
aacaugaaguuuucuauaguga

SEQ ID NO: 500551 - RNA, 22 nt, Human
gccuuggacucggguggacuca

SEQ ID NO: 500552 - RNA, 22 nt, Human
cugugccugccuuguucacuga

SEQ ID NO: 500553 - RNA, 22 nt, Human
guggauggacaugggcaagagg

SEQ ID NO: 500554 - RNA, 22 nt, Human
gcuguguaucagaugccacggg

SEQ ID NO: 500555 - RNA, 22 nt, Human
aagcauuuggcaugaaacucuu

SEQ ID NO: 500556 - RNA, 22 nt, Human
ucaguguuugaacccaggguua

SEQ ID NO: 500557 - RNA, 22 nt, Human
agccuccuggaguuucugggau

SEQ ID NO: 500558 - RNA, 22 nt, Human
ggggucugggcuuagcuggaau

SEQ ID NO: 500559 - RNA, 22 nt, Human
caggaaauuggcuauuugggau

SEQ ID NO: 500560 - RNA, 22 nt, Human
ucuggagcuugaagcuuugguu

SEQ ID NO: 500561 - RNA, 22 nt, Human
cacuguccaauagauacauaau

SEQ ID NO: 500562 - RNA, 23 nt, Human
aagcuuccuucacgucuccuggg

SEQ ID NO: 500563 - RNA, 22 nt, Human
uguguucaccaaaguguagaaa

SEQ ID NO: 500564 - RNA, 22 nt, Human
auccaaaccuggacaugagugg

SEQ ID NO: 500565 - RNA, 22 nt, Human
ucucagugcagcaaggaauuua

SEQ ID NO: 500566 - RNA, 22 nt, Human
gaugagaaauggacaggagugg

SEQ ID NO: 500567 - RNA, 22 nt, Human
gaauguaauagucaguagaaca

SEQ ID NO: 500568 - RNA, 22 nt, Human
gcucuccacugaccacggggca

SEQ ID NO: 500569 - RNA, 22 nt, Human
uggaguggacuucaugaggcca

SEQ ID NO: 500570 - RNA, 22 nt, Human
uaccaggcagcugcacagaggc

SEQ ID NO: 500571 - RNA, 21 nt, Human
aggaggaacccguggcugggc

SEQ ID NO: 500572 - RNA, 22 nt, Human
cagggcuuuccugagaagugau

SEQ ID NO: 500573 - RNA, 22 nt, Human
ugucugaagcagccagugcugu

SEQ ID NO: 500574 - RNA, 18 nt, Human
cccaggcuuugugggucu

SEQ ID NO: 500575 - RNA, 22 nt, Human
cuggagcuaauaauccaucuga

SEQ ID NO: 500576 - RNA, 22 nt, Human
ggcaguggaggacccugugucu

SEQ ID NO: 500577 - RNA, 22 nt, Human
cccagcuccuuggaugggcagg

SEQ ID NO: 500578 - RNA, 22 nt, Human
ggagcugaugguagaagaauga

SEQ ID NO: 500579 - RNA, 22 nt, Human
agcaauaugacauugcuacauc

SEQ ID NO: 500580 - RNA, 22 nt, Human
uucaggaucaaguugccaguag

SEQ ID NO: 500581 - RNA, 22 nt, Human
cccuguacagucucuguggcac

SEQ ID NO: 500582 - RNA, 22 nt, Human
ucugagccaauuucugugucca

SEQ ID NO: 500583 - RNA, 22 nt, Human
augcagaaagagaauguaaugu

SEQ ID NO: 500584 - RNA, 22 nt, Human
cagugcagaacacauggaaaau

SEQ ID NO: 500585 - RNA, 22 nt, Human
ccucugggcugccugcacgggu

SEQ ID NO: 500586 - RNA, 22 nt, Human
agucaaagaugaccgaguuccu

SEQ ID NO: 500587 - RNA, 22 nt, Human
uauuuaucaagguaggagaaua

SEQ ID NO: 500588 - RNA, 22 nt, Human
ggucagagggugggcugccugu

SEQ ID NO: 500589 - RNA, 22 nt, Human
ggccuguccagccugccuggcu

SEQ ID NO: 500590 - RNA, 22 nt, Human
cuggaaugagcagggcuuaugg

SEQ ID NO: 500591 - RNA, 22 nt, Human
ugaccuguguuugcuguugcuc

SEQ ID NO: 500592 - RNA, 22 nt, Human
gcucucugggugugucuagaua

SEQ ID NO: 500593 - RNA, 23 nt, Human
ugguccugguugaggugggcccc

SEQ ID NO: 500594 - RNA, 22 nt, Human
agugaauuuaaaacacugagga

SEQ ID NO: 500595 - RNA, 22 nt, Human
ucuggguccgggacuguggaug

SEQ ID NO: 500596 - RNA, 22 nt, Human
agaguauugugaccauuuguca

SEQ ID NO: 500597 - RNA, 22 nt, Human
ugagucuuuccaaagccgucau

SEQ ID NO: 500598 - RNA, 22 nt, Human
ggcagcaugagccuggugaauu

SEQ ID NO: 500599 - RNA, 22 nt, Human
gcuggccugcaaagcccggcug

SEQ ID NO: 500600 - RNA, 22 nt, Human
aggaaaugcugaugcuccugga

SEQ ID NO: 500601 - RNA, 18 nt, Human
cugggucuccaggcugcc

SEQ ID NO: 500602 - RNA, 22 nt, Human
ucauccaguaugacuggugucu

SEQ ID NO: 500603 - RNA, 22 nt, Human
cagcuggaucccugcagaacuu

SEQ ID NO: 500604 - RNA, 22 nt, Human
auuugcugaaucaaugaauuuu

SEQ ID NO: 500605 - RNA, 22 nt, Human
cugggcuuugaagccaggcugc

SEQ ID NO: 500606 - RNA, 23 nt, Human
gccugccauauaccuggaaacag

SEQ ID NO: 500607 - RNA, 22 nt, Human
aauguguagauguugcauuccu

SEQ ID NO: 500608 - RNA, 22 nt, Human
uuaaagcaggcaucauuccuca

SEQ ID NO: 500609 - RNA, 22 nt, Human
cagcacaucuccaagaauuucu

SEQ ID NO: 500610 - RNA, 22 nt, Human
uuagcaaauaucuugaaacagg

SEQ ID NO: 500611 - RNA, 22 nt, Human
cagggcagugaagaacacacgu

SEQ ID NO: 500612 - RNA, 22 nt, Human
cccaggcacaccccgaacggaa

SEQ ID NO: 500613 - RNA, 22 nt, Human
uucucuuuuagaggcuccauga

SEQ ID NO: 500614 - RNA, 17 nt, Human
ugcaggcuguuauagcc

SEQ ID NO: 500615 - RNA, 22 nt, Human
ucauuucugagccuuccaugau

SEQ ID NO: 500616 - RNA, 22 nt, Human
uuagcugcugauuaaauauguu

SEQ ID NO: 500617 - RNA, 21 nt, Human
ugcuccuuagcugccccugcc

SEQ ID NO: 500618 - RNA, 22 nt, Human
ggccucuguuuggagccaggau

SEQ ID NO: 500619 - RNA, 22 nt, Human
acagagcugggaucugaaccca

SEQ ID NO: 500620 - RNA, 22 nt, Human
ccaggaaggcaggccuccccgc

SEQ ID NO: 500621 - RNA, 22 nt, Human
ccagagagaaaauggagggcca

SEQ ID NO: 500622 - RNA, 22 nt, Human
uuuagcuucauuuggcgugauu

SEQ ID NO: 500623 - RNA, 22 nt, Human
gcuguauuuauuuucuaggguu

SEQ ID NO: 500624 - RNA, 21 nt, Human
aguggcugucaagggggccuu

SEQ ID NO: 500625 - RNA, 22 nt, Human
auuugcuucugcuaaacaacuu

SEQ ID NO: 500626 - RNA, 22 nt, Human
gagagugauucccucccauaga

SEQ ID NO: 500627 - RNA, 22 nt, Human
guucacauguggucaugcuguc

SEQ ID NO: 500628 - RNA, 22 nt, Human
gaaagugccagaauaggaggcc

SEQ ID NO: 500629 - RNA, 22 nt, Human
acaauucucucauaucuuauua

SEQ ID NO: 500630 - RNA, 22 nt, Human
acuuugcagagccagaagagaa

SEQ ID NO: 500631 - RNA, 22 nt, Human
uaugauauucuaaauugacacc

SEQ ID NO: 500632 - RNA, 22 nt, Human
aucaggaucugcaucauaagaa

SEQ ID NO: 500633 - RNA, 22 nt, Human
agccaaggcagcuagagcucug

SEQ ID NO: 500634 - RNA, 22 nt, Human
uucuuuccacagaggggaugau

SEQ ID NO: 500635 - RNA, 22 nt, Human
aguauguauuuuauacuuacag

SEQ ID NO: 500636 - RNA, 22 nt, Human
ugugacugagcugcagaguguc

SEQ ID NO: 500637 - RNA, 22 nt, Human
ccuuuccuuuuuagugugggag

SEQ ID NO: 500638 - RNA, 22 nt, Human
uggagcugagaaguggagcucu

SEQ ID NO: 500639 - RNA, 22 nt, Human
uucuggaaguggaauuuuugua

SEQ ID NO: 500640 - RNA, 22 nt, Human
aggugaguugguaggaaguuug

SEQ ID NO: 500641 - RNA, 20 nt, Human
aaagagaagccucaccuugu

SEQ ID NO: 500642 - RNA, 22 nt, Human
cacacacucuuccuggcaccua

SEQ ID NO: 500643 - RNA, 22 nt, Human
uuagcucagaaaauuuaaacuu

SEQ ID NO: 500644 - RNA, 22 nt, Human
uuagugcaaaccucagagacac

SEQ ID NO: 500645 - RNA, 22 nt, Human
caccauaaccaacaugucaguu

SEQ ID NO: 500646 - RNA, 23 nt, Human
gccugggacugguagugugaccu

SEQ ID NO: 500647 - RNA, 22 nt, Human
ccagugcaccaagaggccuaga

SEQ ID NO: 500648 - RNA, 19 nt, Human
agacucugugugagacuuu

SEQ ID NO: 500649 - RNA, 22 nt, Human
acccagagccagggucaggagc

SEQ ID NO: 500650 - RNA, 22 nt, Human
ggccaccucugcccuacugagu

SEQ ID NO: 500651 - RNA, 22 nt, Human
ucccagggauuaggacauggau

SEQ ID NO: 500652 - RNA, 22 nt, Human
gcagcagcaggcgcucggccgu

SEQ ID NO: 500653 - RNA, 22 nt, Human
ugggcagcagcaaagccagacu

SEQ ID NO: 500654 - RNA, 22 nt, Human
gagcccaggaaguggaggcuga

SEQ ID NO: 500655 - RNA, 22 nt, Human
agguccagaacgugccuacucu

SEQ ID NO: 500656 - RNA, 22 nt, Human
gagcucagauucuggugucaga

SEQ ID NO: 500657 - RNA, 22 nt, Human
ugcuucugaaaugcaggucuuc

SEQ ID NO: 500658 - RNA, 22 nt, Human
gccugccuggagcuugagguga

SEQ ID NO: 500659 - RNA, 22 nt, Human
cauacauuuauacacaucuaug

SEQ ID NO: 500660 - RNA, 22 nt, Human
cugucuuuucuucucauugaug

SEQ ID NO: 500661 - RNA, 22 nt, Human
uucucugggaacauaaaugaag

SEQ ID NO: 500662 - RNA, 22 nt, Human
gagcucauccccaugguccguc

SEQ ID NO: 500663 - RNA, 22 nt, Human
aggccugagguuccugugcuca

SEQ ID NO: 500664 - RNA, 22 nt, Human
uggcucaguagcagugugguca

SEQ ID NO: 500665 - RNA, 22 nt, Human
gagcugccaagauuacaaucag

SEQ ID NO: 500666 - RNA, 22 nt, Human
accuagaauuuaaaacauugcu

SEQ ID NO: 500667 - RNA, 22 nt, Human
augcugaggacaaagagaucaa

SEQ ID NO: 500668 - RNA, 22 nt, Human
agugucugcucagacagcuaca

SEQ ID NO: 500669 - RNA, 22 nt, Human
ccugccaggagcuggugcugca

SEQ ID NO: 500670 - RNA, 22 nt, Human
ugguccuguagcacuugauuag

SEQ ID NO: 500671 - RNA, 22 nt, Human
uugacaauguccuuugaauuuc

SEQ ID NO: 500672 - RNA, 22 nt, Human
cagagagcaugggaggcccgag

SEQ ID NO: 500673 - RNA, 22 nt, Human
agcagggcagugaucagaaagg

SEQ ID NO: 500674 - RNA, 22 nt, Human
gccugaggaaugcuccugacuu

SEQ ID NO: 500675 - RNA, 22 nt, Human
uuugauuuacuggauauucuca

SEQ ID NO: 500676 - RNA, 22 nt, Human
caugagaaugaagaagacuuaa

SEQ ID NO: 500677 - RNA, 22 nt, Human
cugcacagggauauggggagcu

SEQ ID NO: 500678 - RNA, 22 nt, Human
agcaguggcugaagauguuccu

SEQ ID NO: 500679 - RNA, 22 nt, Human
gcaccugcaggaugagccaggg

SEQ ID NO: 500680 - RNA, 22 nt, Human
ucaaaucccagcucagccucuc

SEQ ID NO: 500681 - RNA, 22 nt, Human
acugagcucuugacugggaguu

SEQ ID NO: 500682 - RNA, 22 nt, Human
gagcccagcuugcacauggagc

SEQ ID NO: 500683 - RNA, 22 nt, Human
ugagccugaguucaaggcugca

SEQ ID NO: 500684 - RNA, 22 nt, Human
ugguccagcuugauucucuucu

SEQ ID NO: 500685 - RNA, 22 nt, Human
gcccuuuguggucagaggccug

SEQ ID NO: 500686 - RNA, 21 nt, Human
cugagggccgcagcugggcuc

SEQ ID NO: 500687 - RNA, 22 nt, Human
gugucccaggccucuggaauua

SEQ ID NO: 500688 - RNA, 22 nt, Human
caggccuggcccccggcacacc

SEQ ID NO: 500689 - RNA, 22 nt, Human
acacccagagcgccagugccga

SEQ ID NO: 500690 - RNA, 22 nt, Human
ucaaaaaguugaagaguugggg

SEQ ID NO: 500691 - RNA, 22 nt, Human
gcucccaccuccagccugaguu

SEQ ID NO: 500692 - RNA, 22 nt, Human
ugcagaaguauuccaggcccca

SEQ ID NO: 500693 - RNA, 22 nt, Human
aaggcugagggcuguaccuggc

SEQ ID NO: 500694 - RNA, 22 nt, Human
aagugacacauggcacuucuau

SEQ ID NO: 500695 - RNA, 22 nt, Human
uugucugaauauguauguaucc

SEQ ID NO: 500696 - RNA, 22 nt, Human
aaaaaugucauuauggaacuga

SEQ ID NO: 500697 - RNA, 22 nt, Human
uuacauuagacccacuuucaug

SEQ ID NO: 500698 - RNA, 22 nt, Human
aaggaugaacauuaauacauca

SEQ ID NO: 500699 - RNA, 23 nt, Human
aucugggcaucuggagugguccu

SEQ ID NO: 500700 - RNA, 17 nt, Human
agcuucaguugcaaaac

SEQ ID NO: 500701 - RNA, 22 nt, Human
ugcauaaaauaugagaaaugua

SEQ ID NO: 500702 - RNA, 22 nt, Human
cagggcucagaagacagaccuc

SEQ ID NO: 500703 - RNA, 22 nt, Human
uacagcuuuugcagcuguuuug

SEQ ID NO: 500704 - RNA, 22 nt, Human
gccuucugauugcuggacugac

SEQ ID NO: 500705 - RNA, 20 nt, Human
acuggacacugaggugagcu

SEQ ID NO: 500706 - RNA, 22 nt, Human
uuccucucucuugccagaaugu

SEQ ID NO: 500707 - RNA, 22 nt, Human
uuugcagcaaggagagagcauu

SEQ ID NO: 500708 - RNA, 22 nt, Human
gcucuggcuacuguggcuaccg

SEQ ID NO: 500709 - RNA, 22 nt, Human
cccaaguuaauuuguagcugaa

SEQ ID NO: 500710 - RNA, 22 nt, Human
aaaugcacugaacacauguugu

SEQ ID NO: 500711 - RNA, 22 nt, Human
gcagacugcgagcgugcuggug

SEQ ID NO: 500712 - RNA, 22 nt, Human
acagggccucagcugauucugg

SEQ ID NO: 500713 - RNA, 21 nt, Human
ccagacuggccuaugugguag

SEQ ID NO: 500714 - RNA, 22 nt, Human
uaucuuuagaggaagagaaucu

SEQ ID NO: 500715 - RNA, 22 nt, Human
gagcuggcuccgccaugcugcu

SEQ ID NO: 500716 - RNA, 22 nt, Human
caggcacacccacuggugcaga

SEQ ID NO: 500717 - RNA, 22 nt, Human
auguaacuucugugaaucugac

SEQ ID NO: 500718 - RNA, 22 nt, Human
aaggcagagggcuggaucagag

SEQ ID NO: 500719 - RNA, 22 nt, Human
cuggagucagcaaggacgaggc

SEQ ID NO: 500720 - RNA, 22 nt, Human
gccugccuguuggcugaggugc

SEQ ID NO: 500721 - RNA, 22 nt, Human
aaguucuacuguggguaaaaug

SEQ ID NO: 500722 - RNA, 21 nt, Human
uaaaacuguaacuuuguccug

SEQ ID NO: 500723 - RNA, 22 nt, Human
uucuuacuacauuugcaggcua

SEQ ID NO: 500724 - RNA, 22 nt, Human
aaagacugcaaaaacgcacaga

SEQ ID NO: 500725 - RNA, 22 nt, Human
ggcugaaggaugaaagcugcag

SEQ ID NO: 500726 - RNA, 22 nt, Human
gcaguuaaaaauaaaccuucau

SEQ ID NO: 500727 - RNA, 22 nt, Human
cauacauaugcauguguguaua

SEQ ID NO: 500728 - RNA, 20 nt, Human
ggggcccaagcccucuugcc

SEQ ID NO: 500729 - RNA, 22 nt, Human
gcacaugugagaguagaggccu

SEQ ID NO: 500730 - RNA, 22 nt, Human
aagagagaccaugggggacagg

SEQ ID NO: 500731 - RNA, 23 nt, Human
ugggaguguugggaucucugcuc

SEQ ID NO: 500732 - RNA, 22 nt, Human
gaaaguauuagccuagaaguca

SEQ ID NO: 500733 - RNA, 18 nt, Human
caggagcaggaguugaac

SEQ ID NO: 500734 - RNA, 22 nt, Human
caggcuggaguuaccuuuaggg

SEQ ID NO: 500735 - RNA, 22 nt, Human
uaagaacaguguuucaucucua

SEQ ID NO: 500736 - RNA, 22 nt, Human
ccuucagaccuagacaggaauc

SEQ ID NO: 500737 - RNA, 22 nt, Human
aaaaugcugggaaaguuggaau

SEQ ID NO: 500738 - RNA, 22 nt, Human
auauuugugguuuuuggcuccu

SEQ ID NO: 500739 - RNA, 22 nt, Human
uugccagggccagugggggugu

SEQ ID NO: 500740 - RNA, 22 nt, Human
agaagccauggggucaccagag

SEQ ID NO: 500741 - RNA, 22 nt, Human
cuccagggaugagacagaguag

SEQ ID NO: 500742 - RNA, 22 nt, Human
uuugaaaguguuuacuugggaa

SEQ ID NO: 500743 - RNA, 22 nt, Human
aaccauuugcaguuacugagac

SEQ ID NO: 500744 - RNA, 22 nt, Human
agacucugauaagcaacucuug

SEQ ID NO: 500745 - RNA, 22 nt, Human
uaaaucucacuggguauauugg

SEQ ID NO: 500746 - RNA, 22 nt, Human
uccagcccugcuuccugccuca

SEQ ID NO: 500747 - RNA, 23 nt, Human
ucucagugcacgcaccaugccug

SEQ ID NO: 500748 - RNA, 18 nt, Human
ggucaggggcggagagaa

SEQ ID NO: 500749 - RNA, 22 nt, Human
gagcccucucuguaggcaagua

SEQ ID NO: 500750 - RNA, 22 nt, Human
agcuuuaaaucaauccagugag

SEQ ID NO: 500751 - RNA, 20 nt, Human
ugcaggcuucgcucuaggag

SEQ ID NO: 500752 - RNA, 19 nt, Human
agaggcagucuccaacagg

SEQ ID NO: 500753 - RNA, 22 nt, Human
ccaucagcaugggagcaugggc

SEQ ID NO: 500754 - RNA, 22 nt, Human
agguccaggagauuuggcaauu

SEQ ID NO: 500755 - RNA, 22 nt, Human
ggaaggagcauuugccaguuua

SEQ ID NO: 500756 - RNA, 22 nt, Human
uugaauaggacucagcagugau

SEQ ID NO: 500757 - RNA, 22 nt, Human
aaauggaucuguggaauacauu

SEQ ID NO: 500758 - RNA, 22 nt, Human
gcgcaggugcugcuggagcagc

SEQ ID NO: 500759 - RNA, 22 nt, Human
ucugucuccucugaggugccag

SEQ ID NO: 500760 - RNA, 22 nt, Human
agacacagauuuuggaaaagau

SEQ ID NO: 500761 - RNA, 22 nt, Human
augagcuagaaaaccaugugga

SEQ ID NO: 500762 - RNA, 22 nt, Human
ccugaggcuugggaguuccgcc

SEQ ID NO: 500763 - RNA, 22 nt, Human
auccaaaucaugucagaagaac

SEQ ID NO: 500764 - RNA, 22 nt, Human
uugucugacuucuuuaguuacu

SEQ ID NO: 500765 - RNA, 22 nt, Human
ucccacacuacacgguuguugg

SEQ ID NO: 500766 - RNA, 22 nt, Human
auagcauuuacuuuucagaaau

SEQ ID NO: 500767 - RNA, 22 nt, Human
gagguucugggggucugccugg

SEQ ID NO: 500768 - RNA, 22 nt, Human
cagcccuuuccuucucagcuuu

SEQ ID NO: 500769 - RNA, 22 nt, Human
agagccagcauuugacacuggc

SEQ ID NO: 500770 - RNA, 22 nt, Human
cagcccugcagccauggccugu

SEQ ID NO: 500771 - RNA, 22 nt, Human
aacggcuguggcuggcggcagc

SEQ ID NO: 500772 - RNA, 22 nt, Human
cugugucuucacauuugugugc

SEQ ID NO: 500773 - RNA, 22 nt, Human
ugaaguuuaagguuagauaagu

SEQ ID NO: 500774 - RNA, 22 nt, Human
guuucaauuugacccaaaucuu

SEQ ID NO: 500775 - RNA, 22 nt, Human
ggagccuugggcgcucucccau

SEQ ID NO: 500776 - RNA, 23 nt, Human
cagaaaugacaguaagcacccug

SEQ ID NO: 500777 - RNA, 22 nt, Human
ugcagggauuagaggccgggga

SEQ ID NO: 500778 - RNA, 22 nt, Human
ucaaagccuguggauaguuugg

SEQ ID NO: 500779 - RNA, 21 nt, Human
ggagcugcaggagccgaaggc

SEQ ID NO: 500780 - RNA, 22 nt, Human
gauuucaauccagcuuucuucu

SEQ ID NO: 500781 - RNA, 22 nt, Human
auuuccagcagcauauuugucu

SEQ ID NO: 500782 - RNA, 22 nt, Human
ugccucaggcaccuggcagguu

SEQ ID NO: 500783 - RNA, 22 nt, Human
cagagacccuucucaguggcca

SEQ ID NO: 500784 - RNA, 22 nt, Human
caucugccuaaguggcccuguu

SEQ ID NO: 500785 - RNA, 22 nt, Human
guucauucugaaaagcagcuug

SEQ ID NO: 500786 - RNA, 22 nt, Human
auguucaaacuuuuuacacacc

SEQ ID NO: 500787 - RNA, 22 nt, Human
cccagugucucuugugccuuuc

SEQ ID NO: 500788 - RNA, 22 nt, Human
uucuuccucagcagggcugccu

SEQ ID NO: 500789 - RNA, 22 nt, Human
aagcugaggcccauggcaaggu

SEQ ID NO: 500790 - RNA, 22 nt, Human
agugaguggacccugcaaggaa

SEQ ID NO: 500791 - RNA, 22 nt, Human
aaacucaagucuaugaacaagg

SEQ ID NO: 500792 - RNA, 22 nt, Human
gggaucuggaauuuugguaugu

SEQ ID NO: 500793 - RNA, 22 nt, Human
gcaaggacucccugggucauuc

SEQ ID NO: 500794 - RNA, 22 nt, Human
uacauuguuuuuucuugccauc

SEQ ID NO: 500795 - RNA, 22 nt, Human
gagaugagugggggaucucuca

SEQ ID NO: 500796 - RNA, 22 nt, Human
aagugacaccucuucccuuucc

SEQ ID NO: 500797 - RNA, 22 nt, Human
aggggagagaacauaaggaagu

SEQ ID NO: 500798 - RNA, 22 nt, Human
ugaaggccuaacuuccagugcu

SEQ ID NO: 500799 - RNA, 22 nt, Human
cugagcagcaccuucaagaaac

SEQ ID NO: 500800 - RNA, 22 nt, Human
augauacaagcaaaacuaauca

SEQ ID NO: 500801 - RNA, 17 nt, Human
ccucccacaccgcccug

SEQ ID NO: 500802 - RNA, 22 nt, Human
agggcucugggguggcagagau

SEQ ID NO: 500803 - RNA, 22 nt, Human
ucucagucuuugcaaggaugcu

SEQ ID NO: 500804 - RNA, 22 nt, Human
ugccccucuugagaagcucagc

SEQ ID NO: 500805 - RNA, 22 nt, Human
caugaagcacagcucucuuuuu

SEQ ID NO: 500806 - RNA, 22 nt, Human
uaucacuacaccuggcuaauua

SEQ ID NO: 500807 - RNA, 22 nt, Human
aacagaaugcaggggaugcugc

SEQ ID NO: 500808 - RNA, 23 nt, Human
accaugaugggagugcaaauaag

SEQ ID NO: 500809 - RNA, 22 nt, Human
ccuggcagcaggugggcccgug

SEQ ID NO: 500810 - RNA, 22 nt, Human
ugaguacucggagugcuuugga

SEQ ID NO: 500811 - RNA, 22 nt, Human
cgcugggcgccgaccugcuggc

SEQ ID NO: 500812 - RNA, 22 nt, Human
auaaauagugcugccaugagua

SEQ ID NO: 500813 - RNA, 20 nt, Human
caguagcaauaauuagaagc

SEQ ID NO: 500814 - RNA, 22 nt, Human
cucuggagguugagcccagcaa

SEQ ID NO: 500815 - RNA, 20 nt, Human
agaauucuuacccuuugaug

SEQ ID NO: 500816 - RNA, 22 nt, Human
uuucuuaggcucuaaaaugacu

SEQ ID NO: 500817 - RNA, 22 nt, Human
aucuucaaagcacaucguuugu

SEQ ID NO: 500818 - RNA, 22 nt, Human
aggaaggacuccaugguccguc

SEQ ID NO: 500819 - RNA, 22 nt, Human
acacugacgcuugacagucacc

SEQ ID NO: 500820 - RNA, 22 nt, Human
uucccucuuucacugugauuuu

SEQ ID NO: 500821 - RNA, 22 nt, Human
ucaggaaagccuagaagagaac

SEQ ID NO: 500822 - RNA, 22 nt, Human
cugagggucaacuugauuguau

SEQ ID NO: 500823 - RNA, 22 nt, Human
ugugugccagccuacgaggagc

SEQ ID NO: 500824 - RNA, 22 nt, Human
gagcuucagagaccacuuaacu

SEQ ID NO: 500825 - RNA, 22 nt, Human
ucaaauacauggucaaucaacu

SEQ ID NO: 500826 - RNA, 22 nt, Human
gggugcaggcagcccaggcagg

SEQ ID NO: 500827 - RNA, 22 nt, Human
acagccagaggagccaggcugg

SEQ ID NO: 500828 - RNA, 22 nt, Human
cugaugauagugauuuauugag

SEQ ID NO: 500829 - RNA, 22 nt, Human
uugcauuguugcaaugaaguau

SEQ ID NO: 500830 - RNA, 22 nt, Human
augugaggaagaaagagguaag

SEQ ID NO: 500831 - RNA, 22 nt, Human
aaugaugugaguuuuuauucuc

SEQ ID NO: 500832 - RNA, 22 nt, Human
uuuacaaggcagaacugauuaa

SEQ ID NO: 500833 - RNA, 22 nt, Human
ccaaaggaugucccuguguuuu

SEQ ID NO: 500834 - RNA, 23 nt, Human
uucuggaagauuuacuugagaca

SEQ ID NO: 500835 - RNA, 22 nt, Human
agaaaugacaagacugaucagg

SEQ ID NO: 500836 - RNA, 22 nt, Human
gagauggggucagcugggacau

SEQ ID NO: 500837 - RNA, 22 nt, Human
agcagggcuucugugccugugc

SEQ ID NO: 500838 - RNA, 20 nt, Human
agagauuuuaguagccacag

SEQ ID NO: 500839 - RNA, 22 nt, Human
ugaggcagaguaagauacauga

SEQ ID NO: 500840 - RNA, 22 nt, Human
uguuuuucaaauauugcucugu

SEQ ID NO: 500841 - RNA, 22 nt, Human
gugccuggagcuaauguguaua

SEQ ID NO: 500842 - RNA, 18 nt, Human
agcagguggcgucugcag

SEQ ID NO: 500843 - RNA, 21 nt, Human
agagaauugccuuagauguuc

SEQ ID NO: 500844 - RNA, 22 nt, Human
aagggcucugggcuacgcacug

SEQ ID NO: 500845 - RNA, 22 nt, Human
gaggagaggggcucccaagagc

SEQ ID NO: 500846 - RNA, 22 nt, Human
uucugucucccugauguagagc

SEQ ID NO: 500847 - RNA, 22 nt, Human
uguggggaagaguaugacuugg

SEQ ID NO: 500848 - RNA, 22 nt, Human
ugccugaugcaggaguaucaga

SEQ ID NO: 500849 - RNA, 22 nt, Human
aaguagaaaaccgcacuggacu

SEQ ID NO: 500850 - RNA, 22 nt, Human
guguggcugugggagauguuca

SEQ ID NO: 500851 - RNA, 22 nt, Human
ugagcuuacgugggaacagacu

SEQ ID NO: 500852 - RNA, 17 nt, Human
aaaauucuguaaagagg

SEQ ID NO: 500853 - RNA, 22 nt, Human
agaggcaggaagagcugauuuu

SEQ ID NO: 500854 - RNA, 22 nt, Human
uauuacaagaaagggcaugaau

SEQ ID NO: 500855 - RNA, 21 nt, Human
ucagcagcaucugccuagagu

SEQ ID NO: 500856 - RNA, 22 nt, Human
ugucucagauacgccaucaagg

SEQ ID NO: 500857 - RNA, 22 nt, Human
uuagugcaauucagagaacaau

SEQ ID NO: 500858 - RNA, 22 nt, Human
caaggccagggaauuuuucugg

SEQ ID NO: 500859 - RNA, 22 nt, Human
ccuuugggugaauuccucucuu

SEQ ID NO: 500860 - RNA, 22 nt, Human
gcagggacgccagggacagcaa

SEQ ID NO: 500861 - RNA, 22 nt, Human
gaaaaagugaccuugguagcua

SEQ ID NO: 500862 - RNA, 22 nt, Human
gcucugugcaguucagggacac

SEQ ID NO: 500863 - RNA, 22 nt, Human
ucacugcagagaccucuaguca

SEQ ID NO: 500864 - RNA, 22 nt, Human
auucuucauguugaagcuguca

SEQ ID NO: 500865 - RNA, 22 nt, Human
acaaugucaccucucauguuuu

SEQ ID NO: 500866 - RNA, 23 nt, Human
ugcucugggaggcccuggagagc

SEQ ID NO: 500867 - RNA, 22 nt, Human
aggaggccuacgcacaugucua

SEQ ID NO: 500868 - RNA, 22 nt, Human
agaauucuuggugguuagaaua

SEQ ID NO: 500869 - RNA, 22 nt, Human
uccaggacuagcauuucugaua

SEQ ID NO: 500870 - RNA, 22 nt, Human
ccagcccaugcccuuauagcau

SEQ ID NO: 500871 - RNA, 22 nt, Human
caaaguccuagaacagugcuug

SEQ ID NO: 500872 - RNA, 19 nt, Human
uggcucugucgaaggcaca

SEQ ID NO: 500873 - RNA, 22 nt, Human
cugggcugaaaguguuccuuga

SEQ ID NO: 500874 - RNA, 22 nt, Human
uuuccaggagaaagagagccuu

SEQ ID NO: 500875 - RNA, 22 nt, Human
ugcuucuguucuuucaccuacg

SEQ ID NO: 500876 - RNA, 17 nt, Human
aggagggaaauagcuug

SEQ ID NO: 500877 - RNA, 22 nt, Human
uugggccaagugauucucugcc

SEQ ID NO: 500878 - RNA, 22 nt, Human
agcuggugcugaagcucuugag

SEQ ID NO: 500879 - RNA, 22 nt, Human
ggcuguggucugggugcucccc

SEQ ID NO: 500880 - RNA, 22 nt, Human
acaaacuaccuacagauguuca

SEQ ID NO: 500881 - RNA, 21 nt, Human
ccagcagcucaaggaucucuu

SEQ ID NO: 500882 - RNA, 22 nt, Human
auguaaguauucaaaauauuuc

SEQ ID NO: 500883 - RNA, 22 nt, Human
aaggcugguggauuaugagguc

SEQ ID NO: 500884 - RNA, 22 nt, Human
cauguguguggacgagcguggc

SEQ ID NO: 500885 - RNA, 22 nt, Human
uggccagguguggguucucaga

SEQ ID NO: 500886 - RNA, 22 nt, Human
cuuguacaggaauccaugguau

SEQ ID NO: 500887 - RNA, 22 nt, Human
ggaggcugagaaguccaagauc

SEQ ID NO: 500888 - RNA, 22 nt, Human
gugggccuugcagggugcaggg

SEQ ID NO: 500889 - RNA, 22 nt, Human
gcacagggagcaggucucuggu

SEQ ID NO: 500890 - RNA, 22 nt, Human
ucucagggccucccucuguuuc

SEQ ID NO: 500891 - RNA, 22 nt, Human
uggcucugguaacauuggguag

SEQ ID NO: 500892 - RNA, 22 nt, Human
ucacugcugcugccaugaugga

SEQ ID NO: 500893 - RNA, 22 nt, Human
guccacauaggaacccagcuuc

SEQ ID NO: 500894 - RNA, 22 nt, Human
agcagccagugggagugauaca

SEQ ID NO: 500895 - RNA, 22 nt, Human
ugcuuccuugagcucuccaauc

SEQ ID NO: 500896 - RNA, 22 nt, Human
uccauuggucucugugcccagg

SEQ ID NO: 500897 - RNA, 22 nt, Human
aauaauacaugagauuaauguu

SEQ ID NO: 500898 - RNA, 22 nt, Human
gagcaggugccuguagcucucu

SEQ ID NO: 500899 - RNA, 23 nt, Human
ccagggagguugauugguuaccc

SEQ ID NO: 500900 - RNA, 22 nt, Human
cuggaugcuuccucucugcuag

SEQ ID NO: 500901 - RNA, 22 nt, Human
aagauuugguaucagaagaccu

SEQ ID NO: 500902 - RNA, 17 nt, Human
uccagagcacagagcuc

SEQ ID NO: 500903 - RNA, 22 nt, Human
gaccuggccugcacagcccuua

SEQ ID NO: 500904 - RNA, 22 nt, Human
ucaggggcuugaggugcauguc

SEQ ID NO: 500905 - RNA, 22 nt, Human
cagcagcuaccugcucuugugg

SEQ ID NO: 500906 - RNA, 22 nt, Human
uauaauuuaucaugucacaguu

SEQ ID NO: 500907 - RNA, 22 nt, Human
uccacagaauguaagauccaca

SEQ ID NO: 500908 - RNA, 22 nt, Human
uauauguaagcuauguaagagu

SEQ ID NO: 500909 - RNA, 22 nt, Human
cucagcccagcccaggaccagg

SEQ ID NO: 500910 - RNA, 22 nt, Human
ugcauauccacaccuuaucucu

SEQ ID NO: 500911 - RNA, 22 nt, Human
caaagaguuuuuucauauaaug

SEQ ID NO: 500912 - RNA, 20 nt, Human
aagggcagagggaacagacu

SEQ ID NO: 500913 - RNA, 22 nt, Human
gccuguuucccugacgcuuaca

SEQ ID NO: 500914 - RNA, 22 nt, Human
gccuguuuggcaucauugguug

SEQ ID NO: 500915 - RNA, 22 nt, Human
ugggagagugcucaaugugcaa

SEQ ID NO: 500916 - RNA, 22 nt, Human
cugccuggccacaacccagggu

SEQ ID NO: 500917 - RNA, 22 nt, Human
ccuggcaguggugaagaagagg

SEQ ID NO: 500918 - RNA, 20 nt, Human
agugucugggccucaggccc

SEQ ID NO: 500919 - RNA, 22 nt, Human
auuaagggccaauccuccagcc

SEQ ID NO: 500920 - RNA, 22 nt, Human
acucuguguuuugguggcagca

SEQ ID NO: 500921 - RNA, 22 nt, Human
ugcaauaaguuguguuaucacu

SEQ ID NO: 500922 - RNA, 20 nt, Human
aaagcauuuacuugugauug

SEQ ID NO: 500923 - RNA, 22 nt, Human
aaguguguugacugaauugggg

SEQ ID NO: 500924 - RNA, 22 nt, Human
cacccagccuucacacaggagu

SEQ ID NO: 500925 - RNA, 20 nt, Human
acaugaaaggaaacaggaaa

SEQ ID NO: 500926 - RNA, 22 nt, Human
gcagccagggcuaagcugggga

SEQ ID NO: 500927 - RNA, 22 nt, Human
uagaaaagaauuuuauuugaua

SEQ ID NO: 500928 - RNA, 22 nt, Human
agcaguuugaaucaauggccag

SEQ ID NO: 500929 - RNA, 22 nt, Human
ugggaagaugaggugccauggg

SEQ ID NO: 500930 - RNA, 22 nt, Human
gccuccuggaagucacauguuu

SEQ ID NO: 500931 - RNA, 22 nt, Human
aaguagacuuuugcaucaagga

SEQ ID NO: 500932 - RNA, 22 nt, Human
gcugggcuucaccuccagaguu

SEQ ID NO: 500933 - RNA, 22 nt, Human
cugcauccauguugcugcaaag

SEQ ID NO: 500934 - RNA, 22 nt, Human
uauuauuaaauggcagaauuuu

SEQ ID NO: 500935 - RNA, 22 nt, Human
ccagccaguccagcauuggugu

SEQ ID NO: 500936 - RNA, 22 nt, Human
ucugcagcgugcaggcuggugc

SEQ ID NO: 500937 - RNA, 22 nt, Human
agaccgagaaguucuccaggcc

SEQ ID NO: 500938 - RNA, 22 nt, Human
ucugggagugaagcaacagaug

SEQ ID NO: 500939 - RNA, 22 nt, Human
ccucccuuccccaguagucaag

SEQ ID NO: 500940 - RNA, 22 nt, Human
ccacagagacagagcccagggu

SEQ ID NO: 500941 - RNA, 22 nt, Human
agcaccugugcccugauggaga

SEQ ID NO: 500942 - RNA, 22 nt, Human
ucccagaggcuccagucucuau

SEQ ID NO: 500943 - RNA, 22 nt, Human
uggcuucugcuuucaguggagg

SEQ ID NO: 500944 - RNA, 22 nt, Human
ugagagugaaaugucacauguc

SEQ ID NO: 500945 - RNA, 22 nt, Human
auguaauaggguaacauaacau

SEQ ID NO: 500946 - RNA, 22 nt, Human
uggcuucauguaguuugaguug

SEQ ID NO: 500947 - RNA, 22 nt, Human
agagaguugaggaagcaacacu

SEQ ID NO: 500948 - RNA, 22 nt, Human
uagaaacauguucuguucuguu

SEQ ID NO: 500949 - RNA, 22 nt, Human
acaguacagugcagaggaagau

SEQ ID NO: 500950 - RNA, 22 nt, Human
gaagccuugaacugcaaacccc

SEQ ID NO: 500951 - RNA, 22 nt, Human
gugcuacagacugaguacacuu

SEQ ID NO: 500952 - RNA, 22 nt, Human
cuuccuggcucggugccucacc

SEQ ID NO: 500953 - RNA, 22 nt, Human
agagccaggcaggcaauguuga

SEQ ID NO: 500954 - RNA, 20 nt, Human
ugcucugucuaaaacuuccc

SEQ ID NO: 500955 - RNA, 22 nt, Human
uccugugguaugggagugaugu

SEQ ID NO: 500956 - RNA, 22 nt, Human
ugaggaaacuuacaaggcagaa

SEQ ID NO: 500957 - RNA, 22 nt, Human
caaggccaguccauuuuggaag

SEQ ID NO: 500958 - RNA, 22 nt, Human
ucacaguaucacacaaggauua

SEQ ID NO: 500959 - RNA, 22 nt, Human
ugccugggaucugugcccuuug

SEQ ID NO: 500960 - RNA, 19 nt, Human
acaggggccuuuccagggu

SEQ ID NO: 500961 - RNA, 22 nt, Human
aggcuccauuccaggagcuaga

SEQ ID NO: 500962 - RNA, 22 nt, Human
aguccaaagcagaugagggcca

SEQ ID NO: 500963 - RNA, 22 nt, Human
aguugucccggucuagccacuu

SEQ ID NO: 500964 - RNA, 22 nt, Human
cagcaggcucugaguggcugcc

SEQ ID NO: 500965 - RNA, 22 nt, Human
caguuaaacgggccaugugagu

SEQ ID NO: 500966 - RNA, 23 nt, Human
caggacaugggaggaaguauggc

SEQ ID NO: 500967 - RNA, 18 nt, Human
cugccacuuaauguggug

SEQ ID NO: 500968 - RNA, 22 nt, Human
agaggccugugugcuccagugg

SEQ ID NO: 500969 - RNA, 22 nt, Human
ccugggucuauagacuucaaga

SEQ ID NO: 500970 - RNA, 19 nt, Human
ugagcuggcugagccucuc

SEQ ID NO: 500971 - RNA, 19 nt, Human
ugaggccaaggucacagau

SEQ ID NO: 500972 - RNA, 22 nt, Human
ugagcccagagaucugagcuau

SEQ ID NO: 500973 - RNA, 22 nt, Human
uaaagguaacaugaacugcuuu

SEQ ID NO: 500974 - RNA, 23 nt, Human
cugggcugcuugagucccuggcu

SEQ ID NO: 500975 - RNA, 22 nt, Human
ucucaagcuuguugguauguuu

SEQ ID NO: 500976 - RNA, 22 nt, Human
uuucucaaaagacagaagugaa

SEQ ID NO: 500977 - RNA, 22 nt, Human
gaaggggguugcagucuagggu

SEQ ID NO: 500978 - RNA, 19 nt, Human
ucucuggcaguucagagca

SEQ ID NO: 500979 - RNA, 22 nt, Human
aacauuguuuucccuauaucca

SEQ ID NO: 500980 - RNA, 22 nt, Human
gugauauuuuuaaagauuaagg

SEQ ID NO: 500981 - RNA, 22 nt, Human
ccuggcacugaccaggcacuga

SEQ ID NO: 500982 - RNA, 22 nt, Human
ccagggccaagagaccucgagg

SEQ ID NO: 500983 - RNA, 22 nt, Human
cuggggcuucaaugcuucggug

SEQ ID NO: 500984 - RNA, 22 nt, Human
caagggcucuuuugaggaaugu

SEQ ID NO: 500985 - RNA, 22 nt, Human
acagcuuuuaugggaccagcca

SEQ ID NO: 500986 - RNA, 22 nt, Human
guuguauagagggcaugaaucu

SEQ ID NO: 500987 - RNA, 22 nt, Human
uugauacaggccuucuagauga

SEQ ID NO: 500988 - RNA, 22 nt, Human
aaaaucuaaguagcgaguaagg

SEQ ID NO: 500989 - RNA, 22 nt, Human
guggagcaggacuagcugagaa

SEQ ID NO: 500990 - RNA, 19 nt, Human
gcuuccagcacugcaggag

SEQ ID NO: 500991 - RNA, 22 nt, Human
agcaggaguuugaugcuuuuau

SEQ ID NO: 500992 - RNA, 22 nt, Human
agguccaguuuucugacaaggg

SEQ ID NO: 500993 - RNA, 22 nt, Human
ccuggagcccaaggcagugaga

SEQ ID NO: 500994 - RNA, 22 nt, Human
cuccugugguacucccagggcc

SEQ ID NO: 500995 - RNA, 21 nt, Human
agggagcuauuuauaguaagc

SEQ ID NO: 500996 - RNA, 22 nt, Human
cgguccaggauggcuggcaagc

SEQ ID NO: 500997 - RNA, 21 nt, Human
agcagccauuucacagagacu

SEQ ID NO: 500998 - RNA, 22 nt, Human
aggaagcccuugucauuucugu

SEQ ID NO: 500999 - RNA, 22 nt, Human
auuaguguucuuaucuucuagg

SEQ ID NO: 501000 - RNA, 17 nt, Human
ucucagugacugauagc

SEQ ID NO: 501001 - RNA, 22 nt, Human
agcugcucuuugaaggacacuu

SEQ ID NO: 501002 - RNA, 22 nt, Human
guuuccugugggaacucggcug

SEQ ID NO: 501003 - RNA, 22 nt, Human
uccugccaggagugcuggcccu

SEQ ID NO: 501004 - RNA, 22 nt, Human
uggaucugguucccugagccuu

SEQ ID NO: 501005 - RNA, 22 nt, Human
cauagaaacuugcagcaagcac

SEQ ID NO: 501006 - RNA, 22 nt, Human
gacacagaaugggugcucagua

SEQ ID NO: 501007 - RNA, 23 nt, Human
agaaaaguucauaccuuuuuaac

SEQ ID NO: 501008 - RNA, 22 nt, Human
ccccagcccacaagcauauuaa

SEQ ID NO: 501009 - RNA, 22 nt, Human
gccaaugacagucucaguucug

SEQ ID NO: 501010 - RNA, 22 nt, Human
uguuccuaaauaugaauggaga

SEQ ID NO: 501011 - RNA, 21 nt, Human
ucucuggaguuagcagagaga

SEQ ID NO: 501012 - RNA, 22 nt, Human
agcaggcuugguccccagccuc

SEQ ID NO: 501013 - RNA, 22 nt, Human
ugcagggaauccagucuagggu

SEQ ID NO: 501014 - RNA, 22 nt, Human
augcaagucuuaauaguuuagg

SEQ ID NO: 501015 - RNA, 18 nt, Human
aaggcuucaaagaguaga

SEQ ID NO: 501016 - RNA, 22 nt, Human
caacagcuuuagaaacacuuuc

SEQ ID NO: 501017 - RNA, 22 nt, Human
caucagagucagagcucuuucu

SEQ ID NO: 501018 - RNA, 22 nt, Human
auguaaggcugccuaugacacu

SEQ ID NO: 501019 - RNA, 20 nt, Human
uugcauuggaugugcaggug

SEQ ID NO: 501020 - RNA, 22 nt, Human
guggccagcaagugcugccucu

SEQ ID NO: 501021 - RNA, 17 nt, Human
cagugaucauuacauua

SEQ ID NO: 501022 - RNA, 22 nt, Human
ucucugcucugugccucaguuu

SEQ ID NO: 501023 - RNA, 22 nt, Human
gcucaggacccaggugugaccu

SEQ ID NO: 501024 - RNA, 22 nt, Human
uuuaagaaguuauguuauaaau

SEQ ID NO: 501025 - RNA, 22 nt, Human
gcugagcuagcuaucucagucu

SEQ ID NO: 501026 - RNA, 19 nt, Human
ugaggggcucacagucuca

SEQ ID NO: 501027 - RNA, 22 nt, Human
ugccacacucacuucuguggac

SEQ ID NO: 501028 - RNA, 22 nt, Human
cugcagagaauuguggggcuuc

SEQ ID NO: 501029 - RNA, 23 nt, Human
ucauggaacugggcaaucuugaa

SEQ ID NO: 501030 - RNA, 22 nt, Human
aagcccagaugggagcauuuca

SEQ ID NO: 501031 - RNA, 22 nt, Human
ugccuuggugcuucuucaugug

SEQ ID NO: 501032 - RNA, 22 nt, Human
ccccagcucagugcagggacau

SEQ ID NO: 501033 - RNA, 22 nt, Human
cacaaaaguaggaggcaggcgg

SEQ ID NO: 501034 - RNA, 22 nt, Human
cugaggagcccccucucagcau

SEQ ID NO: 501035 - RNA, 22 nt, Human
cuggagccaugucuugacugcu

SEQ ID NO: 501036 - RNA, 22 nt, Human
aacaaagcaccacugagucagu

SEQ ID NO: 501037 - RNA, 22 nt, Human
uaaaguucuggugagagguaag

SEQ ID NO: 501038 - RNA, 17 nt, Human
uucaagauauugaaaug

SEQ ID NO: 501039 - RNA, 22 nt, Human
ugggagucagucguucucagag

SEQ ID NO: 501040 - RNA, 21 nt, Human
uggccucccacacuuccaugg

SEQ ID NO: 501041 - RNA, 22 nt, Human
gcagagccgugaauggauuuca

SEQ ID NO: 501042 - RNA, 22 nt, Human
ucugccuuuucacugccacuaa

SEQ ID NO: 501043 - RNA, 22 nt, Human
ugggccaguuucucauugaaau

SEQ ID NO: 501044 - RNA, 22 nt, Human
cugccaucugagccaaaagugc

SEQ ID NO: 501045 - RNA, 22 nt, Human
aucugggccaauccuaguacca

SEQ ID NO: 501046 - RNA, 22 nt, Human
cauucacucagcgaugccagua

SEQ ID NO: 501047 - RNA, 22 nt, Human
ggugacuggagggacccaggcc

SEQ ID NO: 501048 - RNA, 22 nt, Human
ucaaaggauaacugagggcagu

SEQ ID NO: 501049 - RNA, 23 nt, Human
uuguaaaacagugugacgguucc

SEQ ID NO: 501050 - RNA, 22 nt, Human
cauaacauguacauauaaaugc

SEQ ID NO: 501051 - RNA, 22 nt, Human
agauuuagugguggaauuuugg

SEQ ID NO: 501052 - RNA, 22 nt, Human
uuguauuucgaugcacguguag

SEQ ID NO: 501053 - RNA, 22 nt, Human
ucauuuguucucauucucuacu

SEQ ID NO: 501054 - RNA, 22 nt, Human
gacuguacgucauugaaggcca

SEQ ID NO: 501055 - RNA, 22 nt, Human
cugccacucugggugggccugg

SEQ ID NO: 501056 - RNA, 22 nt, Human
gugcagagaaaugagaagucga

SEQ ID NO: 501057 - RNA, 22 nt, Human
uuaaagcaguuuguauacaugg

SEQ ID NO: 501058 - RNA, 22 nt, Human
guggcugcuguccucucugguu

SEQ ID NO: 501059 - RNA, 22 nt, Human
agggcgacaauggagagcguuu

SEQ ID NO: 501060 - RNA, 22 nt, Human
cuuccuucugaagcauagaagc

SEQ ID NO: 501061 - RNA, 22 nt, Human
agcuguguguuuccacugagcu

SEQ ID NO: 501062 - RNA, 22 nt, Human
aauuagaaucuuauuuggggaa

SEQ ID NO: 501063 - RNA, 22 nt, Human
ucugccagcccugugagucuug

SEQ ID NO: 501064 - RNA, 22 nt, Human
uuauuauagauuaugcaagauu

SEQ ID NO: 501065 - RNA, 22 nt, Human
uugaagguaaauuauauugauc

SEQ ID NO: 501066 - RNA, 22 nt, Human
uuaacagacauauauauuugua

SEQ ID NO: 501067 - RNA, 22 nt, Human
aguccuggugacacuccucuuc

SEQ ID NO: 501068 - RNA, 22 nt, Human
uugaaucauuacaauagauaag

SEQ ID NO: 501069 - RNA, 22 nt, Human
caaugaaagcaacugccuauaa

SEQ ID NO: 501070 - RNA, 22 nt, Human
ucagggugaaccaggcaggaau

SEQ ID NO: 501071 - RNA, 22 nt, Human
cuguuauuucugccaggugagu

SEQ ID NO: 501072 - RNA, 22 nt, Human
uaaugaauaaacuugagaguca

SEQ ID NO: 501073 - RNA, 22 nt, Human
cuaugaaaugucagauucugca

SEQ ID NO: 501074 - RNA, 18 nt, Human
gggcaagcggcugucacc

SEQ ID NO: 501075 - RNA, 19 nt, Human
uccuccuuacuuccucuug

SEQ ID NO: 501076 - RNA, 22 nt, Human
uacagcuuauccagcuugauag

SEQ ID NO: 501077 - RNA, 22 nt, Human
gccuguuucuaaucucauuucu

SEQ ID NO: 501078 - RNA, 22 nt, Human
ucacauuuuccuugguaucugu

SEQ ID NO: 501079 - RNA, 22 nt, Human
cagaccucaguccucaguagga

SEQ ID NO: 501080 - RNA, 22 nt, Human
ccagcuuucucagaggcuucua

SEQ ID NO: 501081 - RNA, 22 nt, Human
auuuucuagauagaugaugcau

SEQ ID NO: 501082 - RNA, 22 nt, Human
aggagggcuaggaaaaccagga

SEQ ID NO: 501083 - RNA, 22 nt, Human
ugauuucaaguagugacaugcu

SEQ ID NO: 501084 - RNA, 22 nt, Human
uggcagcagggccccuggagga

SEQ ID NO: 501085 - RNA, 22 nt, Human
augacagaaggccucccugaca

SEQ ID NO: 501086 - RNA, 22 nt, Human
ugcugccugguuucuucuugcu

SEQ ID NO: 501087 - RNA, 22 nt, Human
ugucaaauuuuuauugcaguau

SEQ ID NO: 501088 - RNA, 22 nt, Human
cagggcucgcugccagcuucag

SEQ ID NO: 501089 - RNA, 22 nt, Human
caggucuuuucuacugguggag

SEQ ID NO: 501090 - RNA, 22 nt, Human
gggagggaaggaccuuaugaau

SEQ ID NO: 501091 - RNA, 22 nt, Human
agcucagaacugcagacaugug

SEQ ID NO: 501092 - RNA, 19 nt, Human
ucugcuggcagaauucccu

SEQ ID NO: 501093 - RNA, 22 nt, Human
aggacacacagaauacaaaucc

SEQ ID NO: 501094 - RNA, 23 nt, Human
ucagaaugcacugaauuuacccu

SEQ ID NO: 501095 - RNA, 22 nt, Human
caguacuuugcaucauuccacu

SEQ ID NO: 501096 - RNA, 22 nt, Human
acugaggacagugaggagggcu

SEQ ID NO: 501097 - RNA, 21 nt, Human
uuucuaaguaacuggcagcau

SEQ ID NO: 501098 - RNA, 22 nt, Human
aaaaaugcuuggacuuaauaaa

SEQ ID NO: 501099 - RNA, 22 nt, Human
cugcagccucaaccuccugagc

SEQ ID NO: 501100 - RNA, 22 nt, Human
uuuuccuacugauaaacaguua

SEQ ID NO: 501101 - RNA, 22 nt, Human
agugucuuugacacauucaaag

SEQ ID NO: 501102 - RNA, 22 nt, Human
uaacagaauagcagaaacagaa

SEQ ID NO: 501103 - RNA, 22 nt, Human
gggaaccagccgcuuccgccuc

SEQ ID NO: 501104 - RNA, 22 nt, Human
gacagggccgcagauggagacu

SEQ ID NO: 501105 - RNA, 22 nt, Human
ugaugcaguguccucccaugca

SEQ ID NO: 501106 - RNA, 22 nt, Human
gaacagcucugaagcaguaaau

SEQ ID NO: 501107 - RNA, 20 nt, Human
uuugcuaugcauaucugacc

SEQ ID NO: 501108 - RNA, 22 nt, Human
uucucugggacaggaacaguuu

SEQ ID NO: 501109 - RNA, 22 nt, Human
ucugcagcuugcacaggcaggc

SEQ ID NO: 501110 - RNA, 22 nt, Human
aggaggguggggucugccuguc

SEQ ID NO: 501111 - RNA, 22 nt, Human
aggagcugaagucucugcacuc

SEQ ID NO: 501112 - RNA, 23 nt, Human
ugucuggggcgccagaagagaga

SEQ ID NO: 501113 - RNA, 22 nt, Human
auuuagaaauuccaaaaguauu

SEQ ID NO: 501114 - RNA, 22 nt, Human
gacaggcuuccuaagugccaga

SEQ ID NO: 501115 - RNA, 22 nt, Human
ucuuugcaaauguuauuaucuu

SEQ ID NO: 501116 - RNA, 22 nt, Human
aggcacaggaaugucauccagu

SEQ ID NO: 501117 - RNA, 22 nt, Human
gaauuucuggacccuuugagaa

SEQ ID NO: 501118 - RNA, 22 nt, Human
uauuuguauuucaugcaguaaa

SEQ ID NO: 501119 - RNA, 19 nt, Human
gaguuauugccagggcaug

SEQ ID NO: 501120 - RNA, 22 nt, Human
ucaaaggaaacacaagcuucug

SEQ ID NO: 501121 - RNA, 22 nt, Human
ugagaaaugggucugcugaaga

SEQ ID NO: 501122 - RNA, 22 nt, Human
ggaaggguucaggugggccugc

SEQ ID NO: 501123 - RNA, 22 nt, Human
ugcagaagacacaagguaacgu

SEQ ID NO: 501124 - RNA, 22 nt, Human
ggcagaggaaggaugaauucac

SEQ ID NO: 501125 - RNA, 22 nt, Human
aagggcagcuuaaauugguagc

SEQ ID NO: 501126 - RNA, 22 nt, Human
ugcucugguaacucacuuccau

SEQ ID NO: 501127 - RNA, 22 nt, Human
agccagggcugcagguuccuug

SEQ ID NO: 501128 - RNA, 22 nt, Human
guggggaggccuaagcaaguug

SEQ ID NO: 501129 - RNA, 22 nt, Human
ucuuauuauuguuguaaaagca

SEQ ID NO: 501130 - RNA, 22 nt, Human
ugaaugauuucuuaggcaauug

SEQ ID NO: 501131 - RNA, 22 nt, Human
uaacaguauagccuaacauuuc

SEQ ID NO: 501132 - RNA, 22 nt, Human
ucagcuuugccaccagcuguaa

SEQ ID NO: 501133 - RNA, 22 nt, Human
cagcccucagguccucagcagc

SEQ ID NO: 501134 - RNA, 22 nt, Human
aaacagaaauuuccucaugcuc

SEQ ID NO: 501135 - RNA, 22 nt, Human
cagcugcccaggccaccuggag

SEQ ID NO: 501136 - RNA, 22 nt, Human
ccccugcuggccugcugguuuc

SEQ ID NO: 501137 - RNA, 21 nt, Human
gagauuuagaaggaucaauuu

SEQ ID NO: 501138 - RNA, 22 nt, Human
agaugcagauuuggauucagga

SEQ ID NO: 501139 - RNA, 22 nt, Human
augacagaggagugcaggugau

SEQ ID NO: 501140 - RNA, 22 nt, Human
aaaggucuugucuugacagagu

SEQ ID NO: 501141 - RNA, 22 nt, Human
gccagcugcuucuccagaauuu

SEQ ID NO: 501142 - RNA, 22 nt, Human
uauuagcuucugguuuuguucu

SEQ ID NO: 501143 - RNA, 22 nt, Human
cucacuggcaagacuacaggug

SEQ ID NO: 501144 - RNA, 22 nt, Human
ugcaggcuguaaucugaggcua

SEQ ID NO: 501145 - RNA, 22 nt, Human
cucagcaguauacucugaagau

SEQ ID NO: 501146 - RNA, 22 nt, Human
augggcugggaauacacagggg

SEQ ID NO: 501147 - RNA, 22 nt, Human
cacaggaaagucagccagaaga

SEQ ID NO: 501148 - RNA, 19 nt, Human
gagaggccugugcuugaag

SEQ ID NO: 501149 - RNA, 22 nt, Human
gggcagguauuuaucuucuauu

SEQ ID NO: 501150 - RNA, 22 nt, Human
ggcaguuuggcaggauggaggg

SEQ ID NO: 501151 - RNA, 22 nt, Human
cugauauucuauuuugcuugcu

SEQ ID NO: 501152 - RNA, 22 nt, Human
uuccuuugggaaaucacuaagg

SEQ ID NO: 501153 - RNA, 22 nt, Human
ugaagccaaucugccaggcaga

SEQ ID NO: 501154 - RNA, 16 nt, Human
gaaggagauucagaaa

SEQ ID NO: 501155 - RNA, 22 nt, Human
acauuucuaguuguucaucucc

SEQ ID NO: 501156 - RNA, 22 nt, Human
cugugccuaagaugcaugucuc

SEQ ID NO: 501157 - RNA, 22 nt, Human
agggaaauuaaugugagcaaug

SEQ ID NO: 501158 - RNA, 22 nt, Human
cagugagagagaacgcauucau

SEQ ID NO: 501159 - RNA, 23 nt, Human
uuucacaaugagcauuacagaau

SEQ ID NO: 501160 - RNA, 22 nt, Human
agcagcugauggggaaggaguu

SEQ ID NO: 501161 - RNA, 22 nt, Human
uuuucuuaggugcuccaaguag

SEQ ID NO: 501162 - RNA, 22 nt, Human
caggcuugauuauucagacaau

SEQ ID NO: 501163 - RNA, 22 nt, Human
ggcagcuggccuccucgcccac

SEQ ID NO: 501164 - RNA, 22 nt, Human
aggagcugucagagugccagag

SEQ ID NO: 501165 - RNA, 22 nt, Human
uacagccucgaacuccugcauu

SEQ ID NO: 501166 - RNA, 22 nt, Human
gugcucaggaagcuguuccugc

SEQ ID NO: 501167 - RNA, 22 nt, Human
agugaaaucagguuuugacugc

SEQ ID NO: 501168 - RNA, 22 nt, Human
uuucacaaugcaauccuacuuc

SEQ ID NO: 501169 - RNA, 17 nt, Human
uagagcugguucaggag

SEQ ID NO: 501170 - RNA, 22 nt, Human
gagccuggccuccugccucagc

SEQ ID NO: 501171 - RNA, 22 nt, Human
auccacagucuuagccaucaaa

SEQ ID NO: 501172 - RNA, 22 nt, Human
guugggaagcagauggaugagc

SEQ ID NO: 501173 - RNA, 22 nt, Human
aaagcaguauauugguaguugu

SEQ ID NO: 501174 - RNA, 22 nt, Human
accuucugaccaguuaucuuga

SEQ ID NO: 501175 - RNA, 22 nt, Human
uguaauggaagugggauugcau

SEQ ID NO: 501176 - RNA, 22 nt, Human
cagagccuaaaacgacuccacu

SEQ ID NO: 501177 - RNA, 22 nt, Human
agguuucuaugcuguuuaucuu

SEQ ID NO: 501178 - RNA, 20 nt, Human
auuccauaguuggcacuuuu

SEQ ID NO: 501179 - RNA, 22 nt, Human
gucuccugagccuugacugcaa

SEQ ID NO: 501180 - RNA, 22 nt, Human
uuccaggacucguucuggcuca

SEQ ID NO: 501181 - RNA, 22 nt, Human
gcagggaccucacuacccccag

SEQ ID NO: 501182 - RNA, 22 nt, Human
caagaauuguacaaacugggug

SEQ ID NO: 501183 - RNA, 22 nt, Human
ucaggcugaggucaucugcauc

SEQ ID NO: 501184 - RNA, 17 nt, Human
ugggccaguagaaggga

SEQ ID NO: 501185 - RNA, 22 nt, Human
uuagaaaugauuucaccucuuu

SEQ ID NO: 501186 - RNA, 22 nt, Human
aaaggcaggacugcagcauagg

SEQ ID NO: 501187 - RNA, 22 nt, Human
auccugggcaagucaauguccc

SEQ ID NO: 501188 - RNA, 23 nt, Human
agggcccaagccuggacagcagg

SEQ ID NO: 501189 - RNA, 22 nt, Human
ucucuggagcugcagauccagg

SEQ ID NO: 501190 - RNA, 20 nt, Human
uccaauuuaagaauuuagag

SEQ ID NO: 501191 - RNA, 22 nt, Human
uuugaaagagcugauacaugaa

SEQ ID NO: 501192 - RNA, 22 nt, Human
ucccugggacucagacauggaa

SEQ ID NO: 501193 - RNA, 22 nt, Human
agggaccucuucuugcagcuga

SEQ ID NO: 501194 - RNA, 22 nt, Human
caggcacuagcagaaugaggcu

SEQ ID NO: 501195 - RNA, 22 nt, Human
caugauauaaaguaguagauaa

SEQ ID NO: 501196 - RNA, 23 nt, Human
aucaaaguggaaaucaauuaucu

SEQ ID NO: 501197 - RNA, 17 nt, Human
ccagguggaaucgugga

SEQ ID NO: 501198 - RNA, 22 nt, Human
cuucucccuggcuucugcacac

SEQ ID NO: 501199 - RNA, 22 nt, Human
ugauuuccaaaaggcuucuaag

SEQ ID NO: 501200 - RNA, 23 nt, Human
uuguauuuuuaguagagacaggg

SEQ ID NO: 501201 - RNA, 22 nt, Human
ggcagguggaaguuggcagagc

SEQ ID NO: 501202 - RNA, 20 nt, Human
aagggagaauaaugauugua

SEQ ID NO: 501203 - RNA, 22 nt, Human
ugaaugaucuccgauuaguccu

SEQ ID NO: 501204 - RNA, 22 nt, Human
ugaauuuaccuugccuauauuu

SEQ ID NO: 501205 - RNA, 22 nt, Human
aauuugauucagcaaauguuca

SEQ ID NO: 501206 - RNA, 22 nt, Human
aaaguucagauuagacucaaga

SEQ ID NO: 501207 - RNA, 22 nt, Human
auucaagguuuauucaguuuag

SEQ ID NO: 501208 - RNA, 22 nt, Human
cagcagcugacuccaagagagc

SEQ ID NO: 501209 - RNA, 22 nt, Human
gcagaaguaggcucuguguagg

SEQ ID NO: 501210 - RNA, 20 nt, Human
uaugaagauaugugaacagc

SEQ ID NO: 501211 - RNA, 22 nt, Human
ccauuuguucgcccagcuccaa

SEQ ID NO: 501212 - RNA, 22 nt, Human
uucauguuuuauucaguaauua

SEQ ID NO: 501213 - RNA, 22 nt, Human
aaggccacacuugcuggccagc

SEQ ID NO: 501214 - RNA, 22 nt, Human
agcagggguaacagaaggaaag

SEQ ID NO: 501215 - RNA, 22 nt, Human
ucucagucuuuuugguuacuca

SEQ ID NO: 501216 - RNA, 22 nt, Human
ugcugaaugaauggaugguugc

SEQ ID NO: 501217 - RNA, 22 nt, Human
gaacagcuauaaucaucugucc

SEQ ID NO: 501218 - RNA, 22 nt, Human
agagguggccaugggcgcugga

SEQ ID NO: 501219 - RNA, 22 nt, Human
ucuguuccaguagaaaggugca

SEQ ID NO: 501220 - RNA, 22 nt, Human
gagcagcuuaugucaagccaga

SEQ ID NO: 501221 - RNA, 22 nt, Human
ggagccaguuuagaccucaguu

SEQ ID NO: 501222 - RNA, 22 nt, Human
gcucagugcaucauuccaggcu

SEQ ID NO: 501223 - RNA, 22 nt, Human
acacagcuagugaguggcagag

SEQ ID NO: 501224 - RNA, 22 nt, Human
aggcucugacccaugggaccca

SEQ ID NO: 501225 - RNA, 22 nt, Human
agccucugucaagcuuuucaaa

SEQ ID NO: 501226 - RNA, 22 nt, Human
ccaaagcaagucacaugaucaa

SEQ ID NO: 501227 - RNA, 22 nt, Human
cccugccuuguuggagccuaug

SEQ ID NO: 501228 - RNA, 22 nt, Human
gucuggagccacccuaagcauu

SEQ ID NO: 501229 - RNA, 22 nt, Human
uucaggaaauuggaguccuucu

SEQ ID NO: 501230 - RNA, 21 nt, Human
acuuugggcacuuuccugccc

SEQ ID NO: 501231 - RNA, 22 nt, Human
ugaaccagagucuccagugguu

SEQ ID NO: 501232 - RNA, 21 nt, Human
cucaggaucuuauauauuagu

SEQ ID NO: 501233 - RNA, 22 nt, Human
gcggagggcgagcccgcggagc

SEQ ID NO: 501234 - RNA, 22 nt, Human
ggccuuggugcucuguguugca

SEQ ID NO: 501235 - RNA, 22 nt, Human
uggcucagaugcucuuccagug

SEQ ID NO: 501236 - RNA, 22 nt, Human
guguccugcaggccaggaaugg

SEQ ID NO: 501237 - RNA, 22 nt, Human
aucaggauccaccuugagccug

SEQ ID NO: 501238 - RNA, 22 nt, Human
cuuacauuuaaucaugugucau

SEQ ID NO: 501239 - RNA, 22 nt, Human
cuguccagucuuuagcaagcug

SEQ ID NO: 501240 - RNA, 22 nt, Human
uguggagacuauagccauaaca

SEQ ID NO: 501241 - RNA, 22 nt, Human
cagcuguucuugggacagacag

SEQ ID NO: 501242 - RNA, 22 nt, Human
ucucagagauucagggagaagu

SEQ ID NO: 501243 - RNA, 20 nt, Human
auacacauauucuugcaacu

SEQ ID NO: 501244 - RNA, 18 nt, Human
ugaccugcgcuucacggu

SEQ ID NO: 501245 - RNA, 22 nt, Human
guggggacgggauggcucacug

SEQ ID NO: 501246 - RNA, 22 nt, Human
uggaggagggcuggugucugua

SEQ ID NO: 501247 - RNA, 22 nt, Human
agcucuggaacucccggcugcu

SEQ ID NO: 501248 - RNA, 22 nt, Human
auguggcucagcaggcucccgu

SEQ ID NO: 501249 - RNA, 22 nt, Human
cugaaggauguguggugggagu

SEQ ID NO: 501250 - RNA, 22 nt, Human
aguaacaaagugggagaaugau

SEQ ID NO: 501251 - RNA, 22 nt, Human
caucuugaagguuucuuuagcu

SEQ ID NO: 501252 - RNA, 22 nt, Human
cagagcuggagcuugaauggag

SEQ ID NO: 501253 - RNA, 21 nt, Human
ucgugcagcagcugaggcuug

SEQ ID NO: 501254 - RNA, 22 nt, Human
ggcaggcugggagucaucagag

SEQ ID NO: 501255 - RNA, 22 nt, Human
gcuaggaaucggacccaggaag

SEQ ID NO: 501256 - RNA, 22 nt, Human
ccagggcugagcugugaccaug

SEQ ID NO: 501257 - RNA, 22 nt, Human
ucuucauuuuauagcaucugug

SEQ ID NO: 501258 - RNA, 20 nt, Human
auguccuguugcugccccag

SEQ ID NO: 501259 - RNA, 22 nt, Human
gaaguccuccuaucuugcucuu

SEQ ID NO: 501260 - RNA, 22 nt, Human
ucucucuacuggggcacuagga

SEQ ID NO: 501261 - RNA, 21 nt, Human
uuuagggaccaggucauaggc

SEQ ID NO: 501262 - RNA, 22 nt, Human
aaagcccauguggaaguacagg

SEQ ID NO: 501263 - RNA, 22 nt, Human
uuaugaaguuccuguuacagug

SEQ ID NO: 501264 - RNA, 22 nt, Human
guauuugauagauuucaaagga

SEQ ID NO: 501265 - RNA, 22 nt, Human
uagcuaucuguguccagaucca

SEQ ID NO: 501266 - RNA, 22 nt, Human
gggccggagcugggucccgcgc

SEQ ID NO: 501267 - RNA, 22 nt, Human
cugccuggguucaaguccuguu

SEQ ID NO: 501268 - RNA, 22 nt, Human
ucuguucacugagcaauggcaa

SEQ ID NO: 501269 - RNA, 22 nt, Human
ucagcacugucuauuagugaga

SEQ ID NO: 501270 - RNA, 22 nt, Human
ggagcagccacgucucagggca

SEQ ID NO: 501271 - RNA, 22 nt, Human
ucucagcaaggaaagaggcagg

SEQ ID NO: 501272 - RNA, 22 nt, Human
ucauaaaugcagugucauaaau

SEQ ID NO: 501273 - RNA, 22 nt, Human
gcugucugucucugucccacca

SEQ ID NO: 501274 - RNA, 22 nt, Human
uggaugcuguaggacacgcucu

SEQ ID NO: 501275 - RNA, 22 nt, Human
ucugggccugauggcuaaagcc

SEQ ID NO: 501276 - RNA, 22 nt, Human
gugucaugggagucagaaguga

SEQ ID NO: 501277 - RNA, 22 nt, Human
ggcugcuguacugaugucaguu

SEQ ID NO: 501278 - RNA, 23 nt, Human
gcucuggcagcuugugucagcac

SEQ ID NO: 501279 - RNA, 22 nt, Human
cucucuggcccauccuguugcc

SEQ ID NO: 501280 - RNA, 22 nt, Human
cucuuucaguucugauagucuc

SEQ ID NO: 501281 - RNA, 22 nt, Human
augcagcaguuuacaaagcaau

SEQ ID NO: 501282 - RNA, 22 nt, Human
uuccauaaucaccuuauucuuu

SEQ ID NO: 501283 - RNA, 22 nt, Human
ugcuucuggguaggccucagga

SEQ ID NO: 501284 - RNA, 22 nt, Human
gcaguaagaaagucaagcaguu

SEQ ID NO: 501285 - RNA, 21 nt, Human
uuuauuaacaacuguggacgu

SEQ ID NO: 501286 - RNA, 22 nt, Human
caggcuugggagcagagccacu

SEQ ID NO: 501287 - RNA, 22 nt, Human
gccaggguucgaauccguaugg

SEQ ID NO: 501288 - RNA, 22 nt, Human
augcaguaaauguuaagaaaaa

SEQ ID NO: 501289 - RNA, 22 nt, Human
gguaacuugaguguguuguuca

SEQ ID NO: 501290 - RNA, 22 nt, Human
gcagguggcagaggugggaucu

SEQ ID NO: 501291 - RNA, 20 nt, Human
gggaguggugguagccugug

SEQ ID NO: 501292 - RNA, 22 nt, Human
uugccaggagacaucuggagcc

SEQ ID NO: 501293 - RNA, 22 nt, Human
cuucuauucacuggucacaguu

SEQ ID NO: 501294 - RNA, 22 nt, Human
ccagugcaccauuucccucugu

SEQ ID NO: 501295 - RNA, 22 nt, Human
caggcacucauucagagaggug

SEQ ID NO: 501296 - RNA, 22 nt, Human
ccagggagccuggugugucagc

SEQ ID NO: 501297 - RNA, 22 nt, Human
agcuucuugaccaagccuguaa

SEQ ID NO: 501298 - RNA, 22 nt, Human
ucagcugccucucccuggaaga

SEQ ID NO: 501299 - RNA, 22 nt, Human
augcaaaugucaccacuucuaa

SEQ ID NO: 501300 - RNA, 22 nt, Human
guuuguugauaugccccuuugu

SEQ ID NO: 501301 - RNA, 22 nt, Human
ccccaggacacauggaccaagu

SEQ ID NO: 501302 - RNA, 22 nt, Human
gagcugccagacaugggaauga

SEQ ID NO: 501303 - RNA, 22 nt, Human
cuggaggggcuggcaugguagc

SEQ ID NO: 501304 - RNA, 18 nt, Human
ucucugaauauuuuaugu

SEQ ID NO: 501305 - RNA, 22 nt, Human
uucugggcaguuggaaauuuca

SEQ ID NO: 501306 - RNA, 22 nt, Human
ugacugugccuguugaaugaau

SEQ ID NO: 501307 - RNA, 22 nt, Human
caggccugguugagcccugaga

SEQ ID NO: 501308 - RNA, 18 nt, Human
cagagcagagguggagcg

SEQ ID NO: 501309 - RNA, 22 nt, Human
cauucaaaagcuccauguuugu

SEQ ID NO: 501310 - RNA, 22 nt, Human
cacagugugacugaccuucagc

SEQ ID NO: 501311 - RNA, 22 nt, Human
cugccugcaugcugccauagcu

SEQ ID NO: 501312 - RNA, 22 nt, Human
ugcauuaagugucugcauaugg

SEQ ID NO: 501313 - RNA, 22 nt, Human
gccaggggugcccacccaagga

SEQ ID NO: 501314 - RNA, 22 nt, Human
caccuaggguuucgccuuucuu

SEQ ID NO: 501315 - RNA, 22 nt, Human
uuucacaggggcaaccuccaug

SEQ ID NO: 501316 - RNA, 22 nt, Human
gcuucaugaaaaucacugguca

SEQ ID NO: 501317 - RNA, 22 nt, Human
ggagcugggaauuggaucaucu

SEQ ID NO: 501318 - RNA, 21 nt, Human
ccaggcagagcugugaguucu

SEQ ID NO: 501319 - RNA, 22 nt, Human
cguggcuggggcgacuccacgg

SEQ ID NO: 501320 - RNA, 23 nt, Human
cagaagcaccuguugacugcugc

SEQ ID NO: 501321 - RNA, 22 nt, Human
uuuggaauggaauagagauugc

SEQ ID NO: 501322 - RNA, 22 nt, Human
ugaagcaguuacuggguguuaa

SEQ ID NO: 501323 - RNA, 22 nt, Human
ugcuuuauuggaaccucauccu

SEQ ID NO: 501324 - RNA, 22 nt, Human
aggcacaguggcucacaccugu

SEQ ID NO: 501325 - RNA, 19 nt, Human
uggcucuuuuuaugacauu

SEQ ID NO: 501326 - RNA, 22 nt, Human
cauguuaauaugcauugaguac

SEQ ID NO: 501327 - RNA, 22 nt, Human
ucuuuauuuaagucuguuguaa

SEQ ID NO: 501328 - RNA, 22 nt, Human
acauguguauagccuguauaga

SEQ ID NO: 501329 - RNA, 20 nt, Human
gaggaaaagcugccaggccu

SEQ ID NO: 501330 - RNA, 22 nt, Human
caggggaagaugccaagggaga

SEQ ID NO: 501331 - RNA, 22 nt, Human
ugggcugccagcucuccagaug

SEQ ID NO: 501332 - RNA, 22 nt, Human
gugcauugcgaugcagacgacc

SEQ ID NO: 501333 - RNA, 21 nt, Human
aaggcagaagcauggaaugag

SEQ ID NO: 501334 - RNA, 22 nt, Human
caaaccuugcagaacugggcag

SEQ ID NO: 501335 - RNA, 22 nt, Human
cagcucugacacaguacaaaau

SEQ ID NO: 501336 - RNA, 22 nt, Human
auggaucuaccuucaggcucug

SEQ ID NO: 501337 - RNA, 22 nt, Human
gcauacagagaggauguggcau

SEQ ID NO: 501338 - RNA, 21 nt, Human
cccaccccauaaggcagaacc

SEQ ID NO: 501339 - RNA, 22 nt, Human
uguccuggaucaugccucugaa

SEQ ID NO: 501340 - RNA, 22 nt, Human
gcuggccugcugggcaccaccg

SEQ ID NO: 501341 - RNA, 20 nt, Human
ugccuuggagcagccaaggu

SEQ ID NO: 501342 - RNA, 22 nt, Human
aggaccagccuccaggucucuu

SEQ ID NO: 501343 - RNA, 22 nt, Human
agaaguuugguccuauaaacuc

SEQ ID NO: 501344 - RNA, 22 nt, Human
augcagcuucaggauuaugaug

SEQ ID NO: 501345 - RNA, 22 nt, Human
ggagucugucaccuguuucucu

SEQ ID NO: 501346 - RNA, 22 nt, Human
auagcaaagccuggcacaauga

SEQ ID NO: 501347 - RNA, 22 nt, Human
gucaacuuaucucuuuaucugu

SEQ ID NO: 501348 - RNA, 22 nt, Human
ugcugccauggucgcugguguc

SEQ ID NO: 501349 - RNA, 22 nt, Human
auguguuuguaccuuuaaauau

SEQ ID NO: 501350 - RNA, 22 nt, Human
cugggccucauccucagaguuu

SEQ ID NO: 501351 - RNA, 22 nt, Human
ccaggcucugacauagauggga

SEQ ID NO: 501352 - RNA, 22 nt, Human
gggccucucccuucucacgcau

SEQ ID NO: 501353 - RNA, 22 nt, Human
acacuaauuaagcugcuuuacu

SEQ ID NO: 501354 - RNA, 22 nt, Human
cucugagcuccuggaagcgugc

SEQ ID NO: 501355 - RNA, 22 nt, Human
caggaaugacugcagauggggc

SEQ ID NO: 501356 - RNA, 22 nt, Human
agcuuccuguugagagagggag

SEQ ID NO: 501357 - RNA, 22 nt, Human
cacauaaucaccaaguccuuuc

SEQ ID NO: 501358 - RNA, 22 nt, Human
aguguacaaaaugauagauaaa

SEQ ID NO: 501359 - RNA, 23 nt, Human
agcacagacuagaaaggucuuuc

SEQ ID NO: 501360 - RNA, 22 nt, Human
ugcccucauuauaagaggcuca

SEQ ID NO: 501361 - RNA, 23 nt, Human
uccaggcugaaggagcagauuuu

SEQ ID NO: 501362 - RNA, 22 nt, Human
caggagcaaggagcagugggau

SEQ ID NO: 501363 - RNA, 20 nt, Human
acuuuacagagaagacugac

SEQ ID NO: 501364 - RNA, 18 nt, Human
uccaggucccaggggaag

SEQ ID NO: 501365 - RNA, 22 nt, Human
cugcacaguggguggggcguca

SEQ ID NO: 501366 - RNA, 20 nt, Human
ugcagcugcaggaggguggg

SEQ ID NO: 501367 - RNA, 22 nt, Human
ccuccagguguuacauaugacu

SEQ ID NO: 501368 - RNA, 22 nt, Human
uaccagccucuguugggggugg

SEQ ID NO: 501369 - RNA, 22 nt, Human
uccugggcagccucucuggaag

SEQ ID NO: 501370 - RNA, 22 nt, Human
gcuggccauauauuuugcuguu

SEQ ID NO: 501371 - RNA, 22 nt, Human
accugccucuaagcagcaggug

SEQ ID NO: 501372 - RNA, 22 nt, Human
gcagggcucugcuguaguccua

SEQ ID NO: 501373 - RNA, 22 nt, Human
gcagugcaggacaaaucagugc

SEQ ID NO: 501374 - RNA, 21 nt, Human
ugcagcagaguaagcagggga

SEQ ID NO: 501375 - RNA, 22 nt, Human
caggcuggaguacaauugugug

SEQ ID NO: 501376 - RNA, 22 nt, Human
gagccuccuccuggugugccga

SEQ ID NO: 501377 - RNA, 22 nt, Human
ccugucuggccuuccacggggg

SEQ ID NO: 501378 - RNA, 18 nt, Human
aaugugaauauuuacuuc

SEQ ID NO: 501379 - RNA, 22 nt, Human
uaguucuacucaaagugugauc

SEQ ID NO: 501380 - RNA, 22 nt, Human
uaauuacaaagcaagcacaggg

SEQ ID NO: 501381 - RNA, 22 nt, Human
gaaguauuacucugaauguauu

SEQ ID NO: 501382 - RNA, 22 nt, Human
ugggaggacuugugggcuucau

SEQ ID NO: 501383 - RNA, 22 nt, Human
aggccuuaccauagcuguagca

SEQ ID NO: 501384 - RNA, 22 nt, Human
uggccugggucacaccaggguc

SEQ ID NO: 501385 - RNA, 22 nt, Human
gagccagguuugaaucucaguc

SEQ ID NO: 501386 - RNA, 22 nt, Human
ccuggguccaauucuggcuugu

SEQ ID NO: 501387 - RNA, 22 nt, Human
uaggggcagaagcggcggucca

SEQ ID NO: 501388 - RNA, 22 nt, Human
gcgaaaaauguguaaauauguu

SEQ ID NO: 501389 - RNA, 22 nt, Human
ugaaucauggauaaauagcuua

SEQ ID NO: 501390 - RNA, 23 nt, Human
uuuuccagaaucgacucuguaga

SEQ ID NO: 501391 - RNA, 22 nt, Human
ggggagugacgcagggccauag

SEQ ID NO: 501392 - RNA, 21 nt, Human
uggcucaguugcugggcacag

SEQ ID NO: 501393 - RNA, 22 nt, Human
uuugaaagggaaauaaacuccu

SEQ ID NO: 501394 - RNA, 22 nt, Human
caaacauucaaguacaagucuu

SEQ ID NO: 501395 - RNA, 16 nt, Human
uuuauuuacuaguguu

SEQ ID NO: 501396 - RNA, 22 nt, Human
aguccagucucacucuuggcag

SEQ ID NO: 501397 - RNA, 22 nt, Human
cugggcugucaauggcccucug

SEQ ID NO: 501398 - RNA, 22 nt, Human
uuucauucauuauacaguagag

SEQ ID NO: 501399 - RNA, 22 nt, Human
cuggcugggagcgagcugcuca

SEQ ID NO: 501400 - RNA, 22 nt, Human
cuggcagcucuacucagagccu

SEQ ID NO: 501401 - RNA, 22 nt, Human
ucagcagggcugugguguggcu

SEQ ID NO: 501402 - RNA, 19 nt, Human
gcugcuggcucuggcugga

SEQ ID NO: 501403 - RNA, 22 nt, Human
uggcagagagacucuccuugau

SEQ ID NO: 501404 - RNA, 22 nt, Human
cugucccagauguucucagcac

SEQ ID NO: 501405 - RNA, 22 nt, Human
aaauucagcagugaaaugcccc

SEQ ID NO: 501406 - RNA, 22 nt, Human
ggagggcugccagguggagcgg

SEQ ID NO: 501407 - RNA, 18 nt, Human
uuucacagauucaugacu

SEQ ID NO: 501408 - RNA, 22 nt, Human
uauguucaugcuuaugcagaau

SEQ ID NO: 501409 - RNA, 22 nt, Human
uuuacuaaguacuuguaucccu

SEQ ID NO: 501410 - RNA, 22 nt, Human
gucucaguuacucucccuggua

SEQ ID NO: 501411 - RNA, 18 nt, Human
ugagaggcuauuuuuugc

SEQ ID NO: 501412 - RNA, 21 nt, Human
acagcagggcuggcaugacag

SEQ ID NO: 501413 - RNA, 22 nt, Human
ccagggcugcugugggacucca

SEQ ID NO: 501414 - RNA, 22 nt, Human
cuggccucaccucagacuuacu

SEQ ID NO: 501415 - RNA, 22 nt, Human
uggcagcaauuagcuagagcug

SEQ ID NO: 501416 - RNA, 22 nt, Human
ugugcacauaaaacaguacuag

SEQ ID NO: 501417 - RNA, 22 nt, Human
ugaaggcuguuggauggggaag

SEQ ID NO: 501418 - RNA, 22 nt, Human
acaguggagaaggcaugaggcu

SEQ ID NO: 501419 - RNA, 22 nt, Human
ucacuguugaccuggaaguggg

SEQ ID NO: 501420 - RNA, 22 nt, Human
uuaauaaaguaugaauuggaaa

SEQ ID NO: 501421 - RNA, 22 nt, Human
cugcucuggggaagccagaugu

SEQ ID NO: 501422 - RNA, 22 nt, Human
cuucccacuaguaucacagagc

SEQ ID NO: 501423 - RNA, 19 nt, Human
aauaagcuuggguaaaacu

SEQ ID NO: 501424 - RNA, 22 nt, Human
aagcgccaugguuccugcgcag

SEQ ID NO: 501425 - RNA, 23 nt, Human
gugcaugugucuuuacaguagca

SEQ ID NO: 501426 - RNA, 22 nt, Human
cccaggacucugacacccccaa

SEQ ID NO: 501427 - RNA, 22 nt, Human
uggcagcuccuggggccagcac

SEQ ID NO: 501428 - RNA, 22 nt, Human
caggaaauaucucaacacuuua

SEQ ID NO: 501429 - RNA, 22 nt, Human
ugggcuguggagcaccuuugca

SEQ ID NO: 501430 - RNA, 22 nt, Human
cacaggaccaauucacauucca

SEQ ID NO: 501431 - RNA, 22 nt, Human
uccuugaacagagggccugggu

SEQ ID NO: 501432 - RNA, 22 nt, Human
ggaccugaacauaaaacgaggc

SEQ ID NO: 501433 - RNA, 22 nt, Human
aaggugucacugggacaggaaa

SEQ ID NO: 501434 - RNA, 22 nt, Human
ccaguguuccauggagugauua

SEQ ID NO: 501435 - RNA, 22 nt, Human
uccuugaaugaauguucucucc

SEQ ID NO: 501436 - RNA, 22 nt, Human
ggcucugcuggauugaggccag

SEQ ID NO: 501437 - RNA, 22 nt, Human
ucaggcagaguggaagcugcaa

SEQ ID NO: 501438 - RNA, 22 nt, Human
cuccaggugcagaaggacucag

SEQ ID NO: 501439 - RNA, 18 nt, Human
gaagggagcuggaaugca

SEQ ID NO: 501440 - RNA, 22 nt, Human
gcugggagaggcccugaaguga

SEQ ID NO: 501441 - RNA, 22 nt, Human
cagagcuggguuugggaaaccu

SEQ ID NO: 501442 - RNA, 22 nt, Human
ggcacuuuucuccccggucaug

SEQ ID NO: 501443 - RNA, 22 nt, Human
uuuaauuuucugggcccagcag

SEQ ID NO: 501444 - RNA, 22 nt, Human
caucauuguuagggacucuaac

SEQ ID NO: 501445 - RNA, 19 nt, Human
ucaaaacacaaaugguuga

SEQ ID NO: 501446 - RNA, 23 nt, Human
gaagcagaugucugaguaggcag

SEQ ID NO: 501447 - RNA, 22 nt, Human
ccagcuuuucagaaucugccug

SEQ ID NO: 501448 - RNA, 22 nt, Human
gcugucaguuuuacccacagac

SEQ ID NO: 501449 - RNA, 22 nt, Human
cuuguggcccauggcuuccugc

SEQ ID NO: 501450 - RNA, 22 nt, Human
gagcacagccaaaguaagaagg

SEQ ID NO: 501451 - RNA, 22 nt, Human
cauguguuuugucauuucaaua

SEQ ID NO: 501452 - RNA, 19 nt, Human
uaaaaacugaaggaagcag

SEQ ID NO: 501453 - RNA, 18 nt, Human
gcccagaggucugggccc

SEQ ID NO: 501454 - RNA, 22 nt, Human
gcaccaugauggagccucauua

SEQ ID NO: 501455 - RNA, 22 nt, Human
ccuuagcaaauuggcaucuucu

SEQ ID NO: 501456 - RNA, 22 nt, Human
acugaaggaagcgggcaggggu

SEQ ID NO: 501457 - RNA, 22 nt, Human
ugagcuguggugggguagagga

SEQ ID NO: 501458 - RNA, 22 nt, Human
aacaaagcccugcccaagagcu

SEQ ID NO: 501459 - RNA, 22 nt, Human
gacucguucauaguuccaauuu

SEQ ID NO: 501460 - RNA, 22 nt, Human
gaggggcaaugagggaaagagu

SEQ ID NO: 501461 - RNA, 22 nt, Human
ugaagaugucagcagggguggu

SEQ ID NO: 501462 - RNA, 19 nt, Human
ccagcuggccugggaccuc

SEQ ID NO: 501463 - RNA, 22 nt, Human
agcagccauccuuagagaaaga

SEQ ID NO: 501464 - RNA, 22 nt, Human
aaguuugugguuauacuugauu

SEQ ID NO: 501465 - RNA, 22 nt, Human
aaacagcuacuucuguauaaug

SEQ ID NO: 501466 - RNA, 22 nt, Human
cuguguggacugguugaggccc

SEQ ID NO: 501467 - RNA, 22 nt, Human
agagauaugaguaguugugaca

SEQ ID NO: 501468 - RNA, 22 nt, Human
ucacaucuuauuagaguaucuc

SEQ ID NO: 501469 - RNA, 22 nt, Human
ucuuccucucuaauugaucaga

SEQ ID NO: 501470 - RNA, 22 nt, Human
uguguacaaacuaacaacauau

SEQ ID NO: 501471 - RNA, 22 nt, Human
cauggcaggaggcugcuggcag

SEQ ID NO: 501472 - RNA, 22 nt, Human
aguuucuauuuucaugucuguu

SEQ ID NO: 501473 - RNA, 22 nt, Human
uuugacagcuuguuacaaaguu

SEQ ID NO: 501474 - RNA, 22 nt, Human
ucgugaagucacaauaaagucu

SEQ ID NO: 501475 - RNA, 22 nt, Human
ugguggccaauucacagggcuc

SEQ ID NO: 501476 - RNA, 22 nt, Human
uucccucucacuuaaagcuugg

SEQ ID NO: 501477 - RNA, 22 nt, Human
augcacgccccacacuggugug

SEQ ID NO: 501478 - RNA, 19 nt, Human
uaccaaauugcauuauggc

SEQ ID NO: 501479 - RNA, 22 nt, Human
cugaugcuauaagccacagugg

SEQ ID NO: 501480 - RNA, 22 nt, Human
augauauuugcaaugugcuugc

SEQ ID NO: 501481 - RNA, 22 nt, Human
cuggcccuguaggaugugaguu

SEQ ID NO: 501482 - RNA, 22 nt, Human
ucccagcagggccgaccagccu

SEQ ID NO: 501483 - RNA, 22 nt, Human
ccaggcucugccaggcccuuga

SEQ ID NO: 501484 - RNA, 22 nt, Human
caggugcuguccugcacauguc

SEQ ID NO: 501485 - RNA, 22 nt, Human
uacauguauugauuucucuucu

SEQ ID NO: 501486 - RNA, 22 nt, Human
ucacuucacacccacuaucaug

SEQ ID NO: 501487 - RNA, 22 nt, Human
agcagcauuuaaguuucuucua

SEQ ID NO: 501488 - RNA, 22 nt, Human
uagauuuaagacccugaauuug

SEQ ID NO: 501489 - RNA, 22 nt, Human
ggcaggcuguucaccugcuuuu

SEQ ID NO: 501490 - RNA, 22 nt, Human
uuuguuuagaaagagauuggug

SEQ ID NO: 501491 - RNA, 22 nt, Human
ugugaagauuuggcaugcagaa

SEQ ID NO: 501492 - RNA, 22 nt, Human
aaaugucuuucaauagagaaau

SEQ ID NO: 501493 - RNA, 22 nt, Human
gaaaccucuuagccucucuuug

SEQ ID NO: 501494 - RNA, 22 nt, Human
cacacaugucucuccaugcucu

SEQ ID NO: 501495 - RNA, 20 nt, Human
agugggagagggcagacugc

SEQ ID NO: 501496 - RNA, 22 nt, Human
gagcagcugagcuggaaugaga

SEQ ID NO: 501497 - RNA, 22 nt, Human
cccugccuugggguccacaccg

SEQ ID NO: 501498 - RNA, 22 nt, Human
gagcuccagcaucucugccaaa

SEQ ID NO: 501499 - RNA, 22 nt, Human
uagcuuggaauaaaaugagaau

SEQ ID NO: 501500 - RNA, 22 nt, Human
ccagggcagcagaauuggggca

SEQ ID NO: 501501 - RNA, 22 nt, Human
cgagaguuagcuaggagucaca

SEQ ID NO: 501502 - RNA, 22 nt, Human
uagggcucugcucaucaguugu

SEQ ID NO: 501503 - RNA, 22 nt, Human
cauuucuguacauguuuuggug

SEQ ID NO: 501504 - RNA, 22 nt, Human
aaugaaugaaccacauauaaca

SEQ ID NO: 501505 - RNA, 22 nt, Human
ucucgacagccuggcacagugg

SEQ ID NO: 501506 - RNA, 22 nt, Human
ugccacaccaacaucuuucagc

SEQ ID NO: 501507 - RNA, 22 nt, Human
gcauggcagugaggauggugcu

SEQ ID NO: 501508 - RNA, 22 nt, Human
ugcagugggccggaggccaggg

SEQ ID NO: 501509 - RNA, 22 nt, Human
gaaucauuuagcucugcaugga

SEQ ID NO: 501510 - RNA, 22 nt, Human
aaaaugacauuccagugauauu

SEQ ID NO: 501511 - RNA, 22 nt, Human
gccagacacuccccugggcagg

SEQ ID NO: 501512 - RNA, 19 nt, Human
agagaccacagagcugccu

SEQ ID NO: 501513 - RNA, 22 nt, Human
uggagcagcuaagccucugaga

SEQ ID NO: 501514 - RNA, 21 nt, Human
ucuggagcccuaagcugagaa

SEQ ID NO: 501515 - RNA, 22 nt, Human
ggucucuguugccuccaucaag

SEQ ID NO: 501516 - RNA, 19 nt, Human
ggcauccacgaaugcagag

SEQ ID NO: 501517 - RNA, 22 nt, Human
gcacccagugggaugcuuagca

SEQ ID NO: 501518 - RNA, 21 nt, Human
ugcuucucuagaucaacuacu

SEQ ID NO: 501519 - RNA, 22 nt, Human
ucugaggcagcuugccacucua

SEQ ID NO: 501520 - RNA, 22 nt, Human
cugacucuccucaagcauaaau

SEQ ID NO: 501521 - RNA, 22 nt, Human
cccuggggcugagggauggccg

SEQ ID NO: 501522 - RNA, 19 nt, Human
guugaaaguaggugagggu

SEQ ID NO: 501523 - RNA, 22 nt, Human
ugugugucuggaagcucaggga

SEQ ID NO: 501524 - RNA, 22 nt, Human
aaaugcagguaguauuuauuuu

SEQ ID NO: 501525 - RNA, 22 nt, Human
uguugaagauaaaguucucauu

SEQ ID NO: 501526 - RNA, 22 nt, Human
aaaaaagauugaugguggaugc

SEQ ID NO: 501527 - RNA, 22 nt, Human
cuucacaguauaggucccugag

SEQ ID NO: 501528 - RNA, 22 nt, Human
ucugggcucuuaguguacccuc

SEQ ID NO: 501529 - RNA, 22 nt, Human
gcugagggcauguguggcgacu

SEQ ID NO: 501530 - RNA, 22 nt, Human
caguggcgugaucucugcucac

SEQ ID NO: 501531 - RNA, 22 nt, Human
uggggaagggcacccuggagac

SEQ ID NO: 501532 - RNA, 22 nt, Human
uucagcagguggugaguucugc

SEQ ID NO: 501533 - RNA, 18 nt, Human
acagugguuugaugugcu

SEQ ID NO: 501534 - RNA, 22 nt, Human
caggccuggcugcagcucgccu

SEQ ID NO: 501535 - RNA, 22 nt, Human
agggcuccuaugccccauggac

SEQ ID NO: 501536 - RNA, 22 nt, Human
agaaagaacguugguuaucuua

SEQ ID NO: 501537 - RNA, 22 nt, Human
uucuuccucacacucucaccca

SEQ ID NO: 501538 - RNA, 22 nt, Human
uccaggcuuuuucaugcugucu

SEQ ID NO: 501539 - RNA, 22 nt, Human
ucucuucuaauuaggguccaug

SEQ ID NO: 501540 - RNA, 22 nt, Human
uaaagugcucauaaaaauggau

SEQ ID NO: 501541 - RNA, 22 nt, Human
ggaggugacgaaaagaaauugu

SEQ ID NO: 501542 - RNA, 22 nt, Human
ggcaggcgugguggccucagaa

SEQ ID NO: 501543 - RNA, 22 nt, Human
aauuuguacaaaauguuuauaa

SEQ ID NO: 501544 - RNA, 22 nt, Human
augaugaagaguaacaggcuga

SEQ ID NO: 501545 - RNA, 22 nt, Human
ucucagagagcuguguuuuccu

SEQ ID NO: 501546 - RNA, 22 nt, Human
ucuggccuuaucuguccaagcc

SEQ ID NO: 501547 - RNA, 22 nt, Human
uccuggcuccacugagcaggcc

SEQ ID NO: 501548 - RNA, 23 nt, Human
acacauuuuucccguucugaggu

SEQ ID NO: 501549 - RNA, 20 nt, Human
guguggccaggagcugcgcu

SEQ ID NO: 501550 - RNA, 22 nt, Human
gaugaggggucauuggcuggga

SEQ ID NO: 501551 - RNA, 22 nt, Human
gaggaaccaaucugugauauuc

SEQ ID NO: 501552 - RNA, 22 nt, Human
caggguggcaggcaccauggcc

SEQ ID NO: 501553 - RNA, 22 nt, Human
uugcugagcaguguuuaauugu

SEQ ID NO: 501554 - RNA, 22 nt, Human
uggcaggggaggugcuugcuua

SEQ ID NO: 501555 - RNA, 22 nt, Human
auacaaugggugcaaagaugug

SEQ ID NO: 501556 - RNA, 22 nt, Human
uucucuggccauagcuggcuag

SEQ ID NO: 501557 - RNA, 22 nt, Human
uaaggcagaaauaugagcaggg

SEQ ID NO: 501558 - RNA, 22 nt, Human
ucacugaagacugggcucuaaa

SEQ ID NO: 501559 - RNA, 22 nt, Human
cugaagcacagcauauaaauaa

SEQ ID NO: 501560 - RNA, 22 nt, Human
agugaaauacugucguuuuuag

SEQ ID NO: 501561 - RNA, 21 nt, Human
uucuucaugaugauuaauggc

SEQ ID NO: 501562 - RNA, 17 nt, Human
ugaaacaccaagacugu

SEQ ID NO: 501563 - RNA, 17 nt, Human
acaugggcugagacucc

SEQ ID NO: 501564 - RNA, 18 nt, Human
ucaagacaucaugaaaua

SEQ ID NO: 501565 - RNA, 22 nt, Human
ucagagugaggcccagcaaucu

SEQ ID NO: 501566 - RNA, 22 nt, Human
guggccuggaguuugauguagg

SEQ ID NO: 501567 - RNA, 22 nt, Human
aaaugcaggaaauuaugcuuuu

SEQ ID NO: 501568 - RNA, 22 nt, Human
ucaacacuauccaggcaaucuu

SEQ ID NO: 501569 - RNA, 22 nt, Human
uggagccagagcgcagccuggg

SEQ ID NO: 501570 - RNA, 22 nt, Human
uccaggcaguuuuccagguugu

SEQ ID NO: 501571 - RNA, 21 nt, Human
gaaaauacaaugagcuugacc

SEQ ID NO: 501572 - RNA, 22 nt, Human
cugccucuauucacugaggcag

SEQ ID NO: 501573 - RNA, 22 nt, Human
gcugguuaggugagggugcgcc

SEQ ID NO: 501574 - RNA, 22 nt, Human
cugcagagcaaguaacauccuc

SEQ ID NO: 501575 - RNA, 22 nt, Human
gcagccagaagacucagaacaa

SEQ ID NO: 501576 - RNA, 22 nt, Human
ucuggggagugccuaaguggaa

SEQ ID NO: 501577 - RNA, 22 nt, Human
gugccuggcaugcgccggugcu

SEQ ID NO: 501578 - RNA, 22 nt, Human
aggcugcuuccuuacguggcug

SEQ ID NO: 501579 - RNA, 22 nt, Human
acuccuggguugcaguccucaa

SEQ ID NO: 501580 - RNA, 22 nt, Human
acuguguggaccacucugaggc

SEQ ID NO: 501581 - RNA, 22 nt, Human
uuacaugggccauuuagacaug

SEQ ID NO: 501582 - RNA, 21 nt, Human
uuucaauguguucuuuguagu

SEQ ID NO: 501583 - RNA, 20 nt, Human
gaggcccagagaggugaagc

SEQ ID NO: 501584 - RNA, 22 nt, Human
cugccuggaaugccagcuucuc

SEQ ID NO: 501585 - RNA, 22 nt, Human
acuguccaagcaugccuggcuu

SEQ ID NO: 501586 - RNA, 22 nt, Human
cagcuuugauucuuucugccau

SEQ ID NO: 501587 - RNA, 22 nt, Human
auuguacauaaaauguaugucu

SEQ ID NO: 501588 - RNA, 22 nt, Human
gcuggcucuacauuugagguca

SEQ ID NO: 501589 - RNA, 22 nt, Human
gcugaggcucaauccccuucug

SEQ ID NO: 501590 - RNA, 22 nt, Human
cuguuuauaaauagaggggagu

SEQ ID NO: 501591 - RNA, 22 nt, Human
aucuguaacaucaguagcagaa

SEQ ID NO: 501592 - RNA, 22 nt, Human
aacaucugaucgaacagugcca

SEQ ID NO: 501593 - RNA, 22 nt, Human
ugaaugauuaaaacccggacua

SEQ ID NO: 501594 - RNA, 22 nt, Human
ucaugaauauugaaugcuucau

SEQ ID NO: 501595 - RNA, 22 nt, Human
ucugccugcuaacuccugcacc

SEQ ID NO: 501596 - RNA, 20 nt, Human
gguagcagcugcugucaucc

SEQ ID NO: 501597 - RNA, 22 nt, Human
ccuacucugagcgccuccgcau

SEQ ID NO: 501598 - RNA, 20 nt, Human
cucuuaaauguaaaguaggc

SEQ ID NO: 501599 - RNA, 22 nt, Human
cuguggcucaaaaucccaugau

SEQ ID NO: 501600 - RNA, 22 nt, Human
cuguggcuggccuuauugcugc

SEQ ID NO: 501601 - RNA, 22 nt, Human
caagacuuagagcaucuugaaa

SEQ ID NO: 501602 - RNA, 22 nt, Human
ucuggcugcugcgugagugcuu

SEQ ID NO: 501603 - RNA, 22 nt, Human
cugcugggcagaggcugcauga

SEQ ID NO: 501604 - RNA, 22 nt, Human
gggcucuguuuagaucagagau

SEQ ID NO: 501605 - RNA, 22 nt, Human
ggcccaguguaccccaggcagu

SEQ ID NO: 501606 - RNA, 22 nt, Human
caugaaugcuggguucauguaa

SEQ ID NO: 501607 - RNA, 22 nt, Human
auuucacaaagaacagaugcag

SEQ ID NO: 501608 - RNA, 22 nt, Human
uucagugugugauaccugcugu

SEQ ID NO: 501609 - RNA, 22 nt, Human
uagugcaaaggucuugcaccag

SEQ ID NO: 501610 - RNA, 22 nt, Human
ucaggagucugugcaguuccac

SEQ ID NO: 501611 - RNA, 22 nt, Human
uucugggggccaggacaguggu

SEQ ID NO: 501612 - RNA, 22 nt, Human
uuccucagccaaggcugggauc

SEQ ID NO: 501613 - RNA, 22 nt, Human
agaguccaaaugugcaguuaug

SEQ ID NO: 501614 - RNA, 22 nt, Human
agccccaguaagggagggccug

SEQ ID NO: 501615 - RNA, 22 nt, Human
ccuguucauuuuuugacucugc

SEQ ID NO: 501616 - RNA, 22 nt, Human
ggcagcucugugucugggaagc

SEQ ID NO: 501617 - RNA, 22 nt, Human
aaauuucuugaggcucucuagc

SEQ ID NO: 501618 - RNA, 22 nt, Human
acagaauuaucaggaaauguua

SEQ ID NO: 501619 - RNA, 21 nt, Human
uucucuggucaagcacacaua

SEQ ID NO: 501620 - RNA, 21 nt, Human
cugcaggaugcugaagccagg

SEQ ID NO: 501621 - RNA, 22 nt, Human
caggcuggcaaugcgucaagca

SEQ ID NO: 501622 - RNA, 22 nt, Human
uaggcaggugugcacugcccac

SEQ ID NO: 501623 - RNA, 22 nt, Human
gacucugcuacaggccgagguu

SEQ ID NO: 501624 - RNA, 21 nt, Human
ggagauggguaucgccugggc

SEQ ID NO: 501625 - RNA, 22 nt, Human
auuuaauuugugucuuuagcug

SEQ ID NO: 501626 - RNA, 22 nt, Human
ugcccugcugugccuggagcca

SEQ ID NO: 501627 - RNA, 22 nt, Human
caauuucugggccucacacaag

SEQ ID NO: 501628 - RNA, 22 nt, Human
uguuuucauuugauguaacaaa

SEQ ID NO: 501629 - RNA, 22 nt, Human
ucuuuauugcuacugguuuguc

SEQ ID NO: 501630 - RNA, 22 nt, Human
uuuacaaguacaccuaacagcu

SEQ ID NO: 501631 - RNA, 22 nt, Human
guccugggaaggaagccaggga

SEQ ID NO: 501632 - RNA, 22 nt, Human
guuucaaauagguuucagcaaa

SEQ ID NO: 501633 - RNA, 22 nt, Human
uucaaucauuuuuacauagucc

SEQ ID NO: 501634 - RNA, 22 nt, Human
ugccuggcaaugccagaagcca

SEQ ID NO: 501635 - RNA, 19 nt, Human
aggacucuggaggcaugag

SEQ ID NO: 501636 - RNA, 18 nt, Human
gggcuuuacagaguggag

SEQ ID NO: 501637 - RNA, 22 nt, Human
cugagggaacuugggcaagucu

SEQ ID NO: 501638 - RNA, 22 nt, Human
ugugcacauauacucauauucc

SEQ ID NO: 501639 - RNA, 22 nt, Human
agcugccauccgaggugucaga

SEQ ID NO: 501640 - RNA, 22 nt, Human
gauauuuuugcagacaccuggg

SEQ ID NO: 501641 - RNA, 22 nt, Human
uauuaauaagugacuacuagcu

SEQ ID NO: 501642 - RNA, 22 nt, Human
cagagcugagaauguugaugcu

SEQ ID NO: 501643 - RNA, 22 nt, Human
ccucuugccaaucagcuacaga

SEQ ID NO: 501644 - RNA, 22 nt, Human
ugccagggcugcuacuggcuga

SEQ ID NO: 501645 - RNA, 22 nt, Human
cccugguucagguuucucugaa

SEQ ID NO: 501646 - RNA, 22 nt, Human
gcugcugggcacccccugagcu

SEQ ID NO: 501647 - RNA, 20 nt, Human
agucccuuuggucagguauu

SEQ ID NO: 501648 - RNA, 22 nt, Human
ugucaugggcauuuauugaggg

SEQ ID NO: 501649 - RNA, 22 nt, Human
aaagugcugggauuacaggugu

SEQ ID NO: 501650 - RNA, 23 nt, Human
agcagcccugggaccuggccugc

SEQ ID NO: 501651 - RNA, 22 nt, Human
cugugggcauuugagugugggu

SEQ ID NO: 501652 - RNA, 22 nt, Human
ucaaaugcucuuugcagagagg

SEQ ID NO: 501653 - RNA, 22 nt, Human
ugccuaggcuggaaugcagugg

SEQ ID NO: 501654 - RNA, 22 nt, Human
ucugggcccugagauguucuuc

SEQ ID NO: 501655 - RNA, 22 nt, Human
uucugaauucaugagauuuggg

SEQ ID NO: 501656 - RNA, 22 nt, Human
uguaggcugaagaugaagugga

SEQ ID NO: 501657 - RNA, 22 nt, Human
cagccugggcuccagagucccu

SEQ ID NO: 501658 - RNA, 22 nt, Human
uucugggcccacuguagcaucc

SEQ ID NO: 501659 - RNA, 22 nt, Human
agcuggccuccgggugccuggg

SEQ ID NO: 501660 - RNA, 22 nt, Human
gugggcuuuugacagugccugg

SEQ ID NO: 501661 - RNA, 22 nt, Human
cuguuuauuacacuggauagca

SEQ ID NO: 501662 - RNA, 22 nt, Human
gaaguauuauagcauauuagcc

SEQ ID NO: 501663 - RNA, 16 nt, Human
uggcagguuuuuaucu

SEQ ID NO: 501664 - RNA, 22 nt, Human
ugcagggccuucuagaccaugg

SEQ ID NO: 501665 - RNA, 21 nt, Human
cuggagucuggggguggcagu

SEQ ID NO: 501666 - RNA, 22 nt, Human
ccagaggcuggcaagggcuccu

SEQ ID NO: 501667 - RNA, 22 nt, Human
cugggcugucaguuuuguuuua

SEQ ID NO: 501668 - RNA, 22 nt, Human
gggcacugcuuugcucugucac

SEQ ID NO: 501669 - RNA, 22 nt, Human
gaaaaaugcuccaaaucugugg

SEQ ID NO: 501670 - RNA, 22 nt, Human
aacaggcaggagaauucugccu

SEQ ID NO: 501671 - RNA, 22 nt, Human
ucucagucaguuuggacugugu

SEQ ID NO: 501672 - RNA, 22 nt, Human
agauacaucauuuauaccuuca

SEQ ID NO: 501673 - RNA, 23 nt, Human
uccugcagauaagcugguugaca

SEQ ID NO: 501674 - RNA, 22 nt, Human
aggaccuguaccucagcaucua

SEQ ID NO: 501675 - RNA, 22 nt, Human
ugccugucuuuccucccucgua

SEQ ID NO: 501676 - RNA, 22 nt, Human
agacagaccauggcuauucaga

SEQ ID NO: 501677 - RNA, 22 nt, Human
aaacucuguauuugcugugggu

SEQ ID NO: 501678 - RNA, 22 nt, Human
uggaagggguuacgcagcagga

SEQ ID NO: 501679 - RNA, 22 nt, Human
uccaaagggaagcgcuuucugu

SEQ ID NO: 501680 - RNA, 22 nt, Human
caagauggaguccgggaaugug

SEQ ID NO: 501681 - RNA, 22 nt, Human
agugaaccaggcugcgucccug

SEQ ID NO: 501682 - RNA, 22 nt, Human
ggaaacuuggaugccagcacuc

SEQ ID NO: 501683 - RNA, 22 nt, Human
aauaguuugaauuuaucagaug

SEQ ID NO: 501684 - RNA, 22 nt, Human
ggucacaggggagaagagugau

SEQ ID NO: 501685 - RNA, 22 nt, Human
agagacuguaaugagagguaca

SEQ ID NO: 501686 - RNA, 23 nt, Human
uggagaugccccacucccugucu

SEQ ID NO: 501687 - RNA, 22 nt, Human
cccaggcuggagugcaauggug

SEQ ID NO: 501688 - RNA, 22 nt, Human
acugcaacaccuccuggguuca

SEQ ID NO: 501689 - RNA, 22 nt, Human
gcacagggaggcuggccuggcc

SEQ ID NO: 501690 - RNA, 22 nt, Human
uucuuuguugagcaaguaggac

SEQ ID NO: 501691 - RNA, 22 nt, Human
uccuguguuacugccuggagcg

SEQ ID NO: 501692 - RNA, 22 nt, Human
ccagcugaggcagccacacagg

SEQ ID NO: 501693 - RNA, 22 nt, Human
uaguuucagcuccuucauccug

SEQ ID NO: 501694 - RNA, 22 nt, Human
ggcuuuauaggguagaggauca

SEQ ID NO: 501695 - RNA, 22 nt, Human
cuggcugcauuggcaagucaau

SEQ ID NO: 501696 - RNA, 22 nt, Human
aagggccuccuggggagccugg

SEQ ID NO: 501697 - RNA, 23 nt, Human
uaaagacagccuucaggauucug

SEQ ID NO: 501698 - RNA, 21 nt, Human
ucauuucucuauguauuucac

SEQ ID NO: 501699 - RNA, 22 nt, Human
cccagcucucugcucuuagccu

SEQ ID NO: 501700 - RNA, 22 nt, Human
gcuuccugagaaacaaucugau

SEQ ID NO: 501701 - RNA, 22 nt, Human
ucucugggucucaguuuguaca

SEQ ID NO: 501702 - RNA, 22 nt, Human
guggccagccagggugcugaug

SEQ ID NO: 501703 - RNA, 20 nt, Human
ucagauuuuucuaacuuuga

SEQ ID NO: 501704 - RNA, 22 nt, Human
caaaaguaauugcgguuuuugc

SEQ ID NO: 501705 - RNA, 18 nt, Human
acauuucuaugcuucugg

SEQ ID NO: 501706 - RNA, 22 nt, Human
uggaaggcagugauauuguuga

SEQ ID NO: 501707 - RNA, 22 nt, Human
agaaggguaguuguaagaguga

SEQ ID NO: 501708 - RNA, 22 nt, Human
cacaguggcaaaggggcuuggg

SEQ ID NO: 501709 - RNA, 20 nt, Human
uacugggucuggguccugga

SEQ ID NO: 501710 - RNA, 22 nt, Human
uugugaaugcuuaauauguuuc

SEQ ID NO: 501711 - RNA, 22 nt, Human
cuuccuugcugucugcuccagg

SEQ ID NO: 501712 - RNA, 22 nt, Human
cugggccaucuccuuugugugg

SEQ ID NO: 501713 - RNA, 22 nt, Human
cugcugagguccuugcucagac

SEQ ID NO: 501714 - RNA, 22 nt, Human
ucuccuggcucaccaggcugga

SEQ ID NO: 501715 - RNA, 22 nt, Human
guguccugguuccuuguggcug

SEQ ID NO: 501716 - RNA, 22 nt, Human
agcaggugggcaugaaagcuga

SEQ ID NO: 501717 - RNA, 22 nt, Human
ggugucccaggccagcugugug

SEQ ID NO: 501718 - RNA, 22 nt, Human
auaagaugagaucagcuuucug

SEQ ID NO: 501719 - RNA, 20 nt, Human
gugcccugugggcuauuuuc

SEQ ID NO: 501720 - RNA, 22 nt, Human
cuuguccuuuacuugagacuca

SEQ ID NO: 501721 - RNA, 22 nt, Human
cagcaggauagguuucuuugga

SEQ ID NO: 501722 - RNA, 22 nt, Human
aagagggaggugcgggugcaga

SEQ ID NO: 501723 - RNA, 22 nt, Human
auuuuuccaauuaggauaaaga

SEQ ID NO: 501724 - RNA, 22 nt, Human
ucucagagaucuuucugcaugu

SEQ ID NO: 501725 - RNA, 22 nt, Human
caaagaugucauugguaagaca

SEQ ID NO: 501726 - RNA, 19 nt, Human
ggccaccucucuucccagg

SEQ ID NO: 501727 - RNA, 22 nt, Human
cacaguguuugauuuaggggcc

SEQ ID NO: 501728 - RNA, 22 nt, Human
cuggcuucccugucuuauggaa

SEQ ID NO: 501729 - RNA, 21 nt, Human
uccucugcucucauaccacaa

SEQ ID NO: 501730 - RNA, 22 nt, Human
agauacaucuugaacuucuaga

SEQ ID NO: 501731 - RNA, 21 nt, Human
aggcccagagucuugggggga

SEQ ID NO: 501732 - RNA, 22 nt, Human
uugagucucugccaaaacacaa

SEQ ID NO: 501733 - RNA, 20 nt, Human
ugcuggggacauacagggug

SEQ ID NO: 501734 - RNA, 22 nt, Human
uuucaaauaccauaaaccuaau

SEQ ID NO: 501735 - RNA, 22 nt, Human
acagcacuuauucagcacagug

SEQ ID NO: 501736 - RNA, 22 nt, Human
agcuggguacagccugugccua

SEQ ID NO: 501737 - RNA, 18 nt, Human
gggcauggaugcagcauc

SEQ ID NO: 501738 - RNA, 19 nt, Human
ucagcaucaauuugguccu

SEQ ID NO: 501739 - RNA, 22 nt, Human
uuugcauuauauuuauagaaga

SEQ ID NO: 501740 - RNA, 22 nt, Human
cagggagcuggcuggcugugcc

SEQ ID NO: 501741 - RNA, 22 nt, Human
uugcauuccaguccccacugug

SEQ ID NO: 501742 - RNA, 22 nt, Human
caggaaaaaugccaggagucag

SEQ ID NO: 501743 - RNA, 22 nt, Human
ucagcuuugaucucaggcaauc

SEQ ID NO: 501744 - RNA, 22 nt, Human
gucacccugcuggcuguucagc

SEQ ID NO: 501745 - RNA, 22 nt, Human
ugcuaggaauacacagagcaau

SEQ ID NO: 501746 - RNA, 22 nt, Human
agcacagacuggucccaggucu

SEQ ID NO: 501747 - RNA, 22 nt, Human
ucuggccacccgaggccccugc

SEQ ID NO: 501748 - RNA, 22 nt, Human
uagugcacacgcauguagcagu

SEQ ID NO: 501749 - RNA, 22 nt, Human
aggcacugacucaagggagcca

SEQ ID NO: 501750 - RNA, 18 nt, Human
agcuggggccucuggucc

SEQ ID NO: 501751 - RNA, 22 nt, Human
gaggagcuggcagcgucuccgc

SEQ ID NO: 501752 - RNA, 20 nt, Human
agugcauggagggagagggc

SEQ ID NO: 501753 - RNA, 22 nt, Human
ucucuucauagugacacccauc

SEQ ID NO: 501754 - RNA, 22 nt, Human
cuuaauuuaagccuagaaugca

SEQ ID NO: 501755 - RNA, 22 nt, Human
auguccagggggcuugacuggu

SEQ ID NO: 501756 - RNA, 22 nt, Human
uuucaaauagaaucuuuccaaa

SEQ ID NO: 501757 - RNA, 22 nt, Human
guggugaguucaggcuggggug

SEQ ID NO: 501758 - RNA, 22 nt, Human
agaaguaggcagggcuguauca

SEQ ID NO: 501759 - RNA, 22 nt, Human
ucaggcugguggucagauggcu

SEQ ID NO: 501760 - RNA, 22 nt, Human
ucagggcacauucugcaguggc

SEQ ID NO: 501761 - RNA, 22 nt, Human
aagucagauaggugaguccaaa

SEQ ID NO: 501762 - RNA, 22 nt, Human
aggaaaauuaucaugagagcca

SEQ ID NO: 501763 - RNA, 22 nt, Human
agcagccagaaauccagaggug

SEQ ID NO: 501764 - RNA, 22 nt, Human
ucucaggaagauuagggcuaag

SEQ ID NO: 501765 - RNA, 22 nt, Human
acacauguuuacagucuucagu

SEQ ID NO: 501766 - RNA, 22 nt, Human
uacaguucacaguaucauaaau

SEQ ID NO: 501767 - RNA, 19 nt, Human
aaagaucugggauugagac

SEQ ID NO: 501768 - RNA, 22 nt, Human
ugagccuguggggugacaacca

SEQ ID NO: 501769 - RNA, 22 nt, Human
uaaagucaucuuuacaucuuug

SEQ ID NO: 501770 - RNA, 22 nt, Human
agcccugggaggccagcuugua

SEQ ID NO: 501771 - RNA, 22 nt, Human
gagcuuaggccagggacaggga

SEQ ID NO: 501772 - RNA, 22 nt, Human
ugugaggaacaggacuagagca

SEQ ID NO: 501773 - RNA, 22 nt, Human
ugcagggagcucuggggugcag

SEQ ID NO: 501774 - RNA, 22 nt, Human
ggcuuuaugcacagcagauggu

SEQ ID NO: 501775 - RNA, 22 nt, Human
aagcagcuggaagaguaagaug

SEQ ID NO: 501776 - RNA, 22 nt, Human
cuguggcugcagccuugguccu

SEQ ID NO: 501777 - RNA, 22 nt, Human
uagaucugauacaauucaucug

SEQ ID NO: 501778 - RNA, 22 nt, Human
aaaaugcucaucagcgauggcu

SEQ ID NO: 501779 - RNA, 22 nt, Human
gagcaucacuguccucuccccg

SEQ ID NO: 501780 - RNA, 22 nt, Human
uggaugagucugagauugggca

SEQ ID NO: 501781 - RNA, 22 nt, Human
cccagcugcaccucuauggccu

SEQ ID NO: 501782 - RNA, 22 nt, Human
cuggagcccugaaugggcagga

SEQ ID NO: 501783 - RNA, 22 nt, Human
ucaggcucugagcugaugcuaa

SEQ ID NO: 501784 - RNA, 22 nt, Human
caggcaccccaggugagcacug

SEQ ID NO: 501785 - RNA, 21 nt, Human
uacauugacuacaaauaaagc

SEQ ID NO: 501786 - RNA, 22 nt, Human
uaggcagcugcaaacuucgguc

SEQ ID NO: 501787 - RNA, 22 nt, Human
gccugccuuuguaugacccuga

SEQ ID NO: 501788 - RNA, 22 nt, Human
cagaguacugggagaacagaag

SEQ ID NO: 501789 - RNA, 22 nt, Human
cuaaaugacuuccagugguuau

SEQ ID NO: 501790 - RNA, 22 nt, Human
accaagcuucguggaggaaguu

SEQ ID NO: 501791 - RNA, 23 nt, Human
cccuggccuuggggcacaggcug

SEQ ID NO: 501792 - RNA, 22 nt, Human
uuggaaggugagucccuggguu

SEQ ID NO: 501793 - RNA, 22 nt, Human
acaacaaaaucacuagucuucc

SEQ ID NO: 501794 - RNA, 22 nt, Human
gagagaagaauguuccgaggcc

SEQ ID NO: 501795 - RNA, 22 nt, Human
ccagaggucuccugcacgggau

SEQ ID NO: 501796 - RNA, 22 nt, Human
ucucagugguguuuugagucca

SEQ ID NO: 501797 - RNA, 20 nt, Human
uucuagcauacuuacaagga

SEQ ID NO: 501798 - RNA, 22 nt, Human
caguacuugggggguucuaagu

SEQ ID NO: 501799 - RNA, 22 nt, Human
gaguaggaauguucugccaucu

SEQ ID NO: 501800 - RNA, 22 nt, Human
uuuuuccuaagcaguggagcug

SEQ ID NO: 501801 - RNA, 22 nt, Human
gggcugugggacccggcacuuu

SEQ ID NO: 501802 - RNA, 20 nt, Human
agucccagaucaaauuucug

SEQ ID NO: 501803 - RNA, 22 nt, Human
aagaguuucuuuauuaaccuuu

SEQ ID NO: 501804 - RNA, 21 nt, Human
gauugaaaccauggcagugag

SEQ ID NO: 501805 - RNA, 22 nt, Human
cugugucccuugucccagagcc

SEQ ID NO: 501806 - RNA, 19 nt, Human
gggcuuuacuccaaguggg

SEQ ID NO: 501807 - RNA, 22 nt, Human
ucaggaagugguaaaggauguu

SEQ ID NO: 501808 - RNA, 22 nt, Human
cagggguguuuuuggccaggag

SEQ ID NO: 501809 - RNA, 22 nt, Human
ugguucauagccucacaggaua

SEQ ID NO: 501810 - RNA, 23 nt, Human
aggagccaggaaccagcuucccc

SEQ ID NO: 501811 - RNA, 22 nt, Human
uucauguauuuaucauguaaau

SEQ ID NO: 501812 - RNA, 18 nt, Human
uccagagcuacuguggug

SEQ ID NO: 501813 - RNA, 22 nt, Human
aguuucaguucugucauuuaua

SEQ ID NO: 501814 - RNA, 22 nt, Human
uguuuuaagggucaacugucac

SEQ ID NO: 501815 - RNA, 22 nt, Human
ggcucugcugguaagaugccuc

SEQ ID NO: 501816 - RNA, 19 nt, Human
acagaaauguaagugagac

SEQ ID NO: 501817 - RNA, 22 nt, Human
ucugugcucuucucaguaucac

SEQ ID NO: 501818 - RNA, 22 nt, Human
agaagcagaaaagggcacuuuu

SEQ ID NO: 501819 - RNA, 17 nt, Human
uccaggcagcaacugag

SEQ ID NO: 501820 - RNA, 22 nt, Human
uguaagccuucccugagaaagu

SEQ ID NO: 501821 - RNA, 22 nt, Human
uuccgcuguuuaguugaaguuu

SEQ ID NO: 501822 - RNA, 22 nt, Human
aggcagcagccacaaggccuga

SEQ ID NO: 501823 - RNA, 22 nt, Human
ugcuuuauggauuuguguccug

SEQ ID NO: 501824 - RNA, 22 nt, Human
uuccacaggacuaaaugucauc

SEQ ID NO: 501825 - RNA, 18 nt, Human
auuuugaacaaugcugua

SEQ ID NO: 501826 - RNA, 22 nt, Human
uccaccccugggaaugucaaua

SEQ ID NO: 501827 - RNA, 22 nt, Human
gaggggcuugaggcccugaugg

SEQ ID NO: 501828 - RNA, 18 nt, Human
uuuguccuguggcagcug

SEQ ID NO: 501829 - RNA, 22 nt, Human
gacagcaucuguguggcaggag

SEQ ID NO: 501830 - RNA, 22 nt, Human
gugccugugccaggggugugcu

SEQ ID NO: 501831 - RNA, 22 nt, Human
gcccugcuccaggagaauaccc

SEQ ID NO: 501832 - RNA, 22 nt, Human
agaguuuggugaagcaauuuga

SEQ ID NO: 501833 - RNA, 22 nt, Human
acuggcaguggcagcagaaaga

SEQ ID NO: 501834 - RNA, 22 nt, Human
ugaggcaguauuuuagugacuu

SEQ ID NO: 501835 - RNA, 22 nt, Human
gugucccaaagauuagaaauca

SEQ ID NO: 501836 - RNA, 19 nt, Human
auuugaaagcugugcuugc

SEQ ID NO: 501837 - RNA, 22 nt, Human
uucuuucacucaagaaggaucu

SEQ ID NO: 501838 - RNA, 22 nt, Human
uacauuccauguguguguauuc

SEQ ID NO: 501839 - RNA, 18 nt, Human
acuggcuuuagcaucaga

SEQ ID NO: 501840 - RNA, 22 nt, Human
aguucaaagcugcaguaaugga

SEQ ID NO: 501841 - RNA, 22 nt, Human
cacaggugcuccucggggagcu

SEQ ID NO: 501842 - RNA, 22 nt, Human
ucccagccauuccuuuaggugu

SEQ ID NO: 501843 - RNA, 22 nt, Human
cagggagggaggaaaauuugcu

SEQ ID NO: 501844 - RNA, 22 nt, Human
ucucugggaguugagcagcagc

SEQ ID NO: 501845 - RNA, 22 nt, Human
uggccugggcaugaagcaucgu

SEQ ID NO: 501846 - RNA, 22 nt, Human
auuuaaauuuucugauggagag

SEQ ID NO: 501847 - RNA, 22 nt, Human
cccagcucuaggagugguggca

SEQ ID NO: 501848 - RNA, 22 nt, Human
gccaguuccuguggagucagag

SEQ ID NO: 501849 - RNA, 22 nt, Human
gugucccaggagaggagacaau

SEQ ID NO: 501850 - RNA, 22 nt, Human
augcaacaaaugcuacgaaucg

SEQ ID NO: 501851 - RNA, 22 nt, Human
cugcaaaaguaauuggggcuuu

SEQ ID NO: 501852 - RNA, 22 nt, Human
ucucugucucccguguguccgg

SEQ ID NO: 501853 - RNA, 22 nt, Human
gcuguggcuuucuguuucuguu

SEQ ID NO: 501854 - RNA, 22 nt, Human
uggcacuuaaugcaugugcuau

SEQ ID NO: 501855 - RNA, 22 nt, Human
cucaggcuccagacuuccgucc

SEQ ID NO: 501856 - RNA, 22 nt, Human
ugauuuaaaagaaacauugucu

SEQ ID NO: 501857 - RNA, 22 nt, Human
acuaggaacgggguuugcacuc

SEQ ID NO: 501858 - RNA, 22 nt, Human
gagggacagcuaaagagaaauu

SEQ ID NO: 501859 - RNA, 22 nt, Human
ucucagaguaauucuuuaaggu

SEQ ID NO: 501860 - RNA, 22 nt, Human
auuucucaaccaggucaaaaag

SEQ ID NO: 501861 - RNA, 22 nt, Human
acucugggaucuugaaaagagu

SEQ ID NO: 501862 - RNA, 22 nt, Human
gaggccaaucaauagggcaaua

SEQ ID NO: 501863 - RNA, 22 nt, Human
agagcugaaaaagcugacccgg

SEQ ID NO: 501864 - RNA, 22 nt, Human
acuguacacacuucucugucuu

SEQ ID NO: 501865 - RNA, 19 nt, Human
aaauggagcuaaucuuguc

SEQ ID NO: 501866 - RNA, 21 nt, Human
agaugcaguuaugagaugcag

SEQ ID NO: 501867 - RNA, 22 nt, Human
uagaaaagauaacauucugugc

SEQ ID NO: 501868 - RNA, 22 nt, Human
ggcaaaaaccgcaauaacuucu

SEQ ID NO: 501869 - RNA, 22 nt, Human
ugccuggcucuaucaguggugg

SEQ ID NO: 501870 - RNA, 22 nt, Human
uguggccuccccacuucugggg

SEQ ID NO: 501871 - RNA, 22 nt, Human
gcccagccuccaagcuccaagg

SEQ ID NO: 501872 - RNA, 22 nt, Human
uuuccucuuuguaccuugacua

SEQ ID NO: 501873 - RNA, 22 nt, Human
cuuauuagaguuguguucuguu

SEQ ID NO: 501874 - RNA, 22 nt, Human
gcugcagcaagcccuccagggg

SEQ ID NO: 501875 - RNA, 22 nt, Human
uggagcuguagccaccacccug

SEQ ID NO: 501876 - RNA, 22 nt, Human
gccaggcucagcagucaaccug

SEQ ID NO: 501877 - RNA, 22 nt, Human
cagcaguggaacuacccaggga

SEQ ID NO: 501878 - RNA, 22 nt, Human
gcagagaccccgcagugaggcc

SEQ ID NO: 501879 - RNA, 22 nt, Human
uuaauuuuaaccuguuuguguc

SEQ ID NO: 501880 - RNA, 20 nt, Human
ccagaagagaugaucaucca

SEQ ID NO: 501881 - RNA, 22 nt, Human
acagaggcugaucuucaagccc

SEQ ID NO: 501882 - RNA, 22 nt, Human
cagcuuguuaccgagggagggu

SEQ ID NO: 501883 - RNA, 22 nt, Human
ccggucccaggugccccgguga

SEQ ID NO: 501884 - RNA, 22 nt, Human
aagggcagggaguuugugucua

SEQ ID NO: 501885 - RNA, 23 nt, Human
uccuucagagccucccuccaagc

SEQ ID NO: 501886 - RNA, 22 nt, Human
aggaaagcucccaguagggcuc

SEQ ID NO: 501887 - RNA, 22 nt, Human
auuauuuuaugugcggccugau

SEQ ID NO: 501888 - RNA, 21 nt, Human
gcagccaggacuuugggcugg

SEQ ID NO: 501889 - RNA, 22 nt, Human
gccagcucagugccaggccccu

SEQ ID NO: 501890 - RNA, 22 nt, Human
ugcugcugaggcuaaaguauag

SEQ ID NO: 501891 - RNA, 19 nt, Human
ucugugcugggaggcagca

SEQ ID NO: 501892 - RNA, 22 nt, Human
gcugagaguccaggaaaacauc

SEQ ID NO: 501893 - RNA, 22 nt, Human
ugcagucuccaccuccugggug

SEQ ID NO: 501894 - RNA, 20 nt, Human
cucugcugcccgccggcugc

SEQ ID NO: 501895 - RNA, 22 nt, Human
ccagcuuucugggugguuucug

SEQ ID NO: 501896 - RNA, 17 nt, Human
ucaggauccaggguucu

SEQ ID NO: 501897 - RNA, 22 nt, Human
gggcugccaagccugccugccu

SEQ ID NO: 501898 - RNA, 22 nt, Human
cuccucucaaaaguagguugac

SEQ ID NO: 501899 - RNA, 22 nt, Human
gaggcccagagagguugcauga

SEQ ID NO: 501900 - RNA, 22 nt, Human
aggagggagcuuaagccaggca

SEQ ID NO: 501901 - RNA, 22 nt, Human
ugauuacacuauuugggaauag

SEQ ID NO: 501902 - RNA, 22 nt, Human
gcaguguuguuaaaagauuaga

SEQ ID NO: 501903 - RNA, 22 nt, Human
ucagccucucugaguccagacc

SEQ ID NO: 501904 - RNA, 19 nt, Human
uccaggagcaaagccaguu

SEQ ID NO: 501905 - RNA, 22 nt, Human
ucuaaaaaagucuguucacuug

SEQ ID NO: 501906 - RNA, 22 nt, Human
caaaauucugcauuucuaauaa

SEQ ID NO: 501907 - RNA, 22 nt, Human
gcagcugcaggcaggcuugcug

SEQ ID NO: 501908 - RNA, 22 nt, Human
gaggagcuucagaggaaucuua

SEQ ID NO: 501909 - RNA, 22 nt, Human
aauguagaaugauccuuaggau

SEQ ID NO: 501910 - RNA, 22 nt, Human
aggcccuggcacugccugggag

SEQ ID NO: 501911 - RNA, 22 nt, Human
aagaagagaaaugugcugcugg

SEQ ID NO: 501912 - RNA, 22 nt, Human
aauauucaaguuauucuuucuu

SEQ ID NO: 501913 - RNA, 20 nt, Human
auauuucuuaagaacuuuca

SEQ ID NO: 501914 - RNA, 22 nt, Human
cuggguguagcccaguaugagg

SEQ ID NO: 501915 - RNA, 22 nt, Human
agucauuaauuaguaggaaggu

SEQ ID NO: 501916 - RNA, 22 nt, Human
gccuggguuccaugaucuccag

SEQ ID NO: 501917 - RNA, 22 nt, Human
ucuucaaaaauacagguuuuca

SEQ ID NO: 501918 - RNA, 22 nt, Human
uugauauuuugcacgcuuggua

SEQ ID NO: 501919 - RNA, 22 nt, Human
cagugcagguggcagaggacag

SEQ ID NO: 501920 - RNA, 22 nt, Human
ucuguaguagguuguaguucuu

SEQ ID NO: 501921 - RNA, 22 nt, Human
ugcccccuuuucuuguuacacu

SEQ ID NO: 501922 - RNA, 22 nt, Human
cagagccugccaccuuucuccc

SEQ ID NO: 501923 - RNA, 22 nt, Human
uuugggaagaggaaucucugga

SEQ ID NO: 501924 - RNA, 22 nt, Human
ucugcaggaucagagccagagg

SEQ ID NO: 501925 - RNA, 22 nt, Human
cuggagcucuucugagugugcu

SEQ ID NO: 501926 - RNA, 22 nt, Human
cagagcagguaucuuuggugaa

SEQ ID NO: 501927 - RNA, 22 nt, Human
aaugcagugagccauuaaaugg

SEQ ID NO: 501928 - RNA, 22 nt, Human
agcagggcagcugaugcgcacg

SEQ ID NO: 501929 - RNA, 22 nt, Human
cagcagcugggaaggaggcuga

SEQ ID NO: 501930 - RNA, 22 nt, Human
uuuguauuuuucccagcuagcu

SEQ ID NO: 501931 - RNA, 22 nt, Human
uugucuuaaauggauggacaau

SEQ ID NO: 501932 - RNA, 22 nt, Human
gcuggcuguaucaccuggccag

SEQ ID NO: 501933 - RNA, 17 nt, Human
uccugccaccugucagg

SEQ ID NO: 501934 - RNA, 22 nt, Human
aguauacauauauuagccuucg

SEQ ID NO: 501935 - RNA, 22 nt, Human
augcaguaaaauaggagguaau

SEQ ID NO: 501936 - RNA, 22 nt, Human
gucuuucuuaauucaagugcuu

SEQ ID NO: 501937 - RNA, 22 nt, Human
ccugagcaucagcgccuccuua

SEQ ID NO: 501938 - RNA, 22 nt, Human
gaggccuggugugucucccgcu

SEQ ID NO: 501939 - RNA, 22 nt, Human
ggcccaguguggguggauguug

SEQ ID NO: 501940 - RNA, 22 nt, Human
uccaggcagucauuaaucucua

SEQ ID NO: 501941 - RNA, 20 nt, Human
ucagccuugaaugcuugaaa

SEQ ID NO: 501942 - RNA, 22 nt, Human
cagggcugugcccaucuucccc

SEQ ID NO: 501943 - RNA, 22 nt, Human
ucugcucuaguugcuuccugcc

SEQ ID NO: 501944 - RNA, 22 nt, Human
caguuuauuuccaagaugacaa

SEQ ID NO: 501945 - RNA, 22 nt, Human
ugggagaagcauggggugcaga

SEQ ID NO: 501946 - RNA, 22 nt, Human
ugucuucaucucagacacaguu

SEQ ID NO: 501947 - RNA, 22 nt, Human
uuacagaacugucuugaaauuu

SEQ ID NO: 501948 - RNA, 22 nt, Human
gagccagacugccugaagcuca

SEQ ID NO: 501949 - RNA, 22 nt, Human
uggcaaaggaaaugauuuaaga

SEQ ID NO: 501950 - RNA, 22 nt, Human
uugggcugaacccugcagcuga

SEQ ID NO: 501951 - RNA, 22 nt, Human
auacauguuguaccauauguuu

SEQ ID NO: 501952 - RNA, 22 nt, Human
gccugagggcuccuagcaggcu

SEQ ID NO: 501953 - RNA, 22 nt, Human
acuuuuuuauaaggaagaagau

SEQ ID NO: 501954 - RNA, 22 nt, Human
agacauuauggcuuucacuggg

SEQ ID NO: 501955 - RNA, 22 nt, Human
ggcaguuucaucaggagaaaag

SEQ ID NO: 501956 - RNA, 22 nt, Human
uaaaguucuuagaacaaggccu

SEQ ID NO: 501957 - RNA, 22 nt, Human
ggugggcaggcgaggcccaggu

SEQ ID NO: 501958 - RNA, 22 nt, Human
cagggccugagggcugcucugc

SEQ ID NO: 501959 - RNA, 22 nt, Human
ccuggcuuccuggagcucacaa

SEQ ID NO: 501960 - RNA, 17 nt, Human
gcacugagccacaguuu

SEQ ID NO: 501961 - RNA, 22 nt, Human
uccucugccccagaugaaauuu

SEQ ID NO: 501962 - RNA, 22 nt, Human
gaguccaguucuuuccagcagu

SEQ ID NO: 501963 - RNA, 19 nt, Human
caaggccaccauuucuccg

SEQ ID NO: 501964 - RNA, 18 nt, Human
gguggcuggggacggaca

SEQ ID NO: 501965 - RNA, 22 nt, Human
gguggcugggauuaguagccca

SEQ ID NO: 501966 - RNA, 22 nt, Human
aaagcaaugcccguucauuauc

SEQ ID NO: 501967 - RNA, 22 nt, Human
ggguccaguuucaucugagguu

SEQ ID NO: 501968 - RNA, 22 nt, Human
uaagacacaugcguacaagaua

SEQ ID NO: 501969 - RNA, 22 nt, Human
accaaacaaaauugugcacugu

SEQ ID NO: 501970 - RNA, 22 nt, Human
cgcaggcuggcgcggaguggca

SEQ ID NO: 501971 - RNA, 22 nt, Human
acucugccccgaguucugggaa

SEQ ID NO: 501972 - RNA, 22 nt, Human
agcccuagagcuggaggucagu

SEQ ID NO: 501973 - RNA, 22 nt, Human
uuagcauucuucuggggggcac

SEQ ID NO: 501974 - RNA, 22 nt, Human
gccuggugugcgccgcgcagcu

SEQ ID NO: 501975 - RNA, 22 nt, Human
ccaggcucugugugggcuagag

SEQ ID NO: 501976 - RNA, 22 nt, Human
cccagccucuguuugcuccucu

SEQ ID NO: 501977 - RNA, 22 nt, Human
aaggccagagcguguccugccu

SEQ ID NO: 501978 - RNA, 22 nt, Human
caccagcuugggcuguggaaau

SEQ ID NO: 501979 - RNA, 22 nt, Human
ccucugagaccagcucugcacc

SEQ ID NO: 501980 - RNA, 22 nt, Human
ucccuccugcaugaggcucggc

SEQ ID NO: 501981 - RNA, 20 nt, Human
ugguccugucccacccacuc

SEQ ID NO: 501982 - RNA, 22 nt, Human
cagcuggguggcucuucugcuc

SEQ ID NO: 501983 - RNA, 22 nt, Human
cuguggcuucugcuugggccuc

SEQ ID NO: 501984 - RNA, 22 nt, Human
auaauuuacuaagcucuaccuu

SEQ ID NO: 501985 - RNA, 22 nt, Human
gcuguucauagaaauggucuca

SEQ ID NO: 501986 - RNA, 22 nt, Human
uuuaacuuagaagagauauccu

SEQ ID NO: 501987 - RNA, 22 nt, Human
agaacaauguuaaauuauuaag

SEQ ID NO: 501988 - RNA, 22 nt, Human
cagucacauugcccugcauuua

SEQ ID NO: 501989 - RNA, 22 nt, Human
uucugggcccaacccuagagug

SEQ ID NO: 501990 - RNA, 22 nt, Human
guuagggaagcgcuguguucuu

SEQ ID NO: 501991 - RNA, 22 nt, Human
ugcuccauucucuagccagugc

SEQ ID NO: 501992 - RNA, 22 nt, Human
caggagugaaaugaggcccagg

SEQ ID NO: 501993 - RNA, 22 nt, Human
gcagugcagugggacagggcgc

SEQ ID NO: 501994 - RNA, 20 nt, Human
caucaucacaugagccaauu

SEQ ID NO: 501995 - RNA, 22 nt, Human
gaaucauagaacauuaauagaa

SEQ ID NO: 501996 - RNA, 22 nt, Human
gcaguguuaaugcgaguguuca

SEQ ID NO: 501997 - RNA, 22 nt, Human
ugaguccagaugggccagcagg

SEQ ID NO: 501998 - RNA, 22 nt, Human
ggcucccaggagggccuggagg

SEQ ID NO: 501999 - RNA, 22 nt, Human
uggguccugcacugcaagcacc

SEQ ID NO: 502000 - RNA, 22 nt, Human
aaauugcucuuuaaaaguacug

SEQ ID NO: 502001 - RNA, 22 nt, Human
uccaggcuugagaccaggcucu

SEQ ID NO: 502002 - RNA, 23 nt, Human
acaggcucuuaaucagugcuccu

SEQ ID NO: 502003 - RNA, 20 nt, Human
uaggaaauauguuuuuaccc

SEQ ID NO: 502004 - RNA, 22 nt, Human
aguacuuugcacuuugcucaga

SEQ ID NO: 502005 - RNA, 22 nt, Human
ccucuuugacaaguaccugccc

SEQ ID NO: 502006 - RNA, 22 nt, Human
acuuuggacgccaugcuguuug

SEQ ID NO: 502007 - RNA, 22 nt, Human
auuuggcaacauuaauugaauc

SEQ ID NO: 502008 - RNA, 22 nt, Human
ggucucagacuggcaggcagug

SEQ ID NO: 502009 - RNA, 22 nt, Human
cucuccucagaacaggcccucu

SEQ ID NO: 502010 - RNA, 22 nt, Human
uuacaagauaacggagaaagca

SEQ ID NO: 502011 - RNA, 22 nt, Human
ggucagggcucuuccaguggcu

SEQ ID NO: 502012 - RNA, 22 nt, Human
ucagcuuuugucagaaauugua

SEQ ID NO: 502013 - RNA, 22 nt, Human
aggcuaggguaacagauguggc

SEQ ID NO: 502014 - RNA, 22 nt, Human
aucuuugugcuaauguaguucu

SEQ ID NO: 502015 - RNA, 22 nt, Human
cagcacuaauccugcaauuucu

SEQ ID NO: 502016 - RNA, 22 nt, Human
gggcucugguacuuccuggcuc

SEQ ID NO: 502017 - RNA, 22 nt, Human
cugaggucagaguuuagucugg

SEQ ID NO: 502018 - RNA, 22 nt, Human
auagcauauaaguuauaaaacu

SEQ ID NO: 502019 - RNA, 22 nt, Human
uguaccuuuuucugugcaugcu

SEQ ID NO: 502020 - RNA, 22 nt, Human
agcucagcccuccugugcagcu

SEQ ID NO: 502021 - RNA, 22 nt, Human
ggccucucuccuuggcuugcag

SEQ ID NO: 502022 - RNA, 23 nt, Human
uccagcagccaagaaggguagaa

SEQ ID NO: 502023 - RNA, 22 nt, Human
ggcugccugccuccaagccggg

SEQ ID NO: 502024 - RNA, 23 nt, Human
uaaauuaccuuuccagugcaggg

SEQ ID NO: 502025 - RNA, 22 nt, Human
agggaguguaaauggugcucag

SEQ ID NO: 502026 - RNA, 19 nt, Human
ugggcuuccccagggcaga

SEQ ID NO: 502027 - RNA, 22 nt, Human
aaggcugccucugccagaggag

SEQ ID NO: 502028 - RNA, 22 nt, Human
ucucaguggguuaaaagagaag

SEQ ID NO: 502029 - RNA, 22 nt, Human
agaaauccugauggagucugaa

SEQ ID NO: 502030 - RNA, 22 nt, Human
ucagagcuuuggagaccaggaa

SEQ ID NO: 502031 - RNA, 22 nt, Human
cuccagugagcgcggggcaugg

SEQ ID NO: 502032 - RNA, 22 nt, Human
cgcauccagggcgcaggaucug

SEQ ID NO: 502033 - RNA, 22 nt, Human
auuuuacuucauuugaaaugcc

SEQ ID NO: 502034 - RNA, 22 nt, Human
ggccagaggugguacauagcuu

SEQ ID NO: 502035 - RNA, 22 nt, Human
ggcuucugcucagccugcacgc

SEQ ID NO: 502036 - RNA, 22 nt, Human
ucuguggccuguguccaagugc

SEQ ID NO: 502037 - RNA, 22 nt, Human
caguggagagacuuuuacucuu

SEQ ID NO: 502038 - RNA, 22 nt, Human
aagagauguggaaucauuuaca

SEQ ID NO: 502039 - RNA, 22 nt, Human
auagaauagcauagaaaauuga

SEQ ID NO: 502040 - RNA, 22 nt, Human
ugaaucaauaguugcaaguauu

SEQ ID NO: 502041 - RNA, 20 nt, Human
ggguccaggacucugaauuu

SEQ ID NO: 502042 - RNA, 22 nt, Human
ugacaaagacaaagauaugucc

SEQ ID NO: 502043 - RNA, 22 nt, Human
aagacagaccacgugacagggc

SEQ ID NO: 502044 - RNA, 22 nt, Human
caggagacaaguuagcagcuga

SEQ ID NO: 502045 - RNA, 17 nt, Human
gccugcaggcccgcaga

SEQ ID NO: 502046 - RNA, 23 nt, Human
uggggagaguuacccuggaagcg

SEQ ID NO: 502047 - RNA, 22 nt, Human
uagauauaagguccuuagaaca

SEQ ID NO: 502048 - RNA, 22 nt, Human
gaggccacaguccugaggcauc

SEQ ID NO: 502049 - RNA, 22 nt, Human
uauuucugucagccagauaugg

SEQ ID NO: 502050 - RNA, 22 nt, Human
aagccagccagugccagucuua

SEQ ID NO: 502051 - RNA, 22 nt, Human
uuauguauggauggcugaaagu

SEQ ID NO: 502052 - RNA, 23 nt, Human
ugucccagagggagggauaggcu

SEQ ID NO: 502053 - RNA, 22 nt, Human
agagccagcauuugggcccugc

SEQ ID NO: 502054 - RNA, 22 nt, Human
ugcacagcuggcucuccuuuuc

SEQ ID NO: 502055 - RNA, 22 nt, Human
aaaaaauuccauucugugccuu

SEQ ID NO: 502056 - RNA, 22 nt, Human
cauuucugcagaauugcucuuc

SEQ ID NO: 502057 - RNA, 22 nt, Human
gugagggcaaauuagaaucaaa

SEQ ID NO: 502058 - RNA, 22 nt, Human
guucauuuuacuguaaauagca

SEQ ID NO: 502059 - RNA, 22 nt, Human
acagacaguaaauaguguggcu

SEQ ID NO: 502060 - RNA, 22 nt, Human
cugggcagcacaucaucguauc

SEQ ID NO: 502061 - RNA, 22 nt, Human
gaguggguaaaggugcuuggcu

SEQ ID NO: 502062 - RNA, 22 nt, Human
auugucgcuuauuuaggugcuu

SEQ ID NO: 502063 - RNA, 22 nt, Human
caggcaggugcagauuccucuu

SEQ ID NO: 502064 - RNA, 22 nt, Human
aguagggagaccggaggccgcc

SEQ ID NO: 502065 - RNA, 22 nt, Human
ggcugggcucgcugauuggcug

SEQ ID NO: 502066 - RNA, 22 nt, Human
uuucucaaauacuguuccagga

SEQ ID NO: 502067 - RNA, 22 nt, Human
cagagaaagggugaauuccuuc

SEQ ID NO: 502068 - RNA, 22 nt, Human
gcugugcugauucauucccugc

SEQ ID NO: 502069 - RNA, 22 nt, Human
cuggccugagcacagcggcugc

SEQ ID NO: 502070 - RNA, 22 nt, Human
ucuccaaauaguuauauuuaga

SEQ ID NO: 502071 - RNA, 22 nt, Human
agaggggcucaagcaguggucu

SEQ ID NO: 502072 - RNA, 22 nt, Human
ugcucagugagucugugacagg

SEQ ID NO: 502073 - RNA, 22 nt, Human
gacagcauuccaucugcagguu

SEQ ID NO: 502074 - RNA, 22 nt, Human
gcugaggccucagaaggcugag

SEQ ID NO: 502075 - RNA, 22 nt, Human
augcuggucugcagaguuggga

SEQ ID NO: 502076 - RNA, 22 nt, Human
gaaggcuugcagcucuguggca

SEQ ID NO: 502077 - RNA, 22 nt, Human
aaggaaccauuugugugcaugg

SEQ ID NO: 502078 - RNA, 19 nt, Human
auaaauaaaaagugggaga

SEQ ID NO: 502079 - RNA, 23 nt, Human
ucuccagugucucuucauugagu

SEQ ID NO: 502080 - RNA, 22 nt, Human
aggugcuguuugucagcaguuu

SEQ ID NO: 502081 - RNA, 22 nt, Human
ugauuuccacagucaggggugc

SEQ ID NO: 502082 - RNA, 22 nt, Human
agcugcuguuucuugcacguau

SEQ ID NO: 502083 - RNA, 17 nt, Human
agugugugaaauggugg

SEQ ID NO: 502084 - RNA, 22 nt, Human
accagugucuuauugaccaucu

SEQ ID NO: 502085 - RNA, 22 nt, Human
uucugugaaacuaaagagagga

SEQ ID NO: 502086 - RNA, 18 nt, Human
agaaggagcuaugggcag

SEQ ID NO: 502087 - RNA, 22 nt, Human
aauaguguuguucacucaggag

SEQ ID NO: 502088 - RNA, 22 nt, Human
aaguuuugaaauacugaagugu

SEQ ID NO: 502089 - RNA, 22 nt, Human
cugcagccuaggugcagcuggg

SEQ ID NO: 502090 - RNA, 22 nt, Human
gcaggaugguggaaggccugcu

SEQ ID NO: 502091 - RNA, 22 nt, Human
cucugcaggggaggcaugcacu

SEQ ID NO: 502092 - RNA, 22 nt, Human
uccaggcaugguguaauuuugc

SEQ ID NO: 502093 - RNA, 22 nt, Human
ggucugagugccagggagagaa

SEQ ID NO: 502094 - RNA, 22 nt, Human
ugagccuggguggucgaggcug

SEQ ID NO: 502095 - RNA, 22 nt, Human
ucucuguaguugggcagcugcu

SEQ ID NO: 502096 - RNA, 22 nt, Human
cuggcugcuuguuuugaugggu

SEQ ID NO: 502097 - RNA, 22 nt, Human
gauuucaaggaguuuucacagu

SEQ ID NO: 502098 - RNA, 22 nt, Human
acacauuucucuuuuuguaagu

SEQ ID NO: 502099 - RNA, 22 nt, Human
gaggucugggcuugggccuggu

SEQ ID NO: 502100 - RNA, 22 nt, Human
uggccaggcuggucuggaacgc

SEQ ID NO: 502101 - RNA, 22 nt, Human
agugaccaucuaacgccuguga

SEQ ID NO: 502102 - RNA, 22 nt, Human
guuucacagucugcagaauuuu

SEQ ID NO: 502103 - RNA, 22 nt, Human
ugcaggcucucugcugccagau

SEQ ID NO: 502104 - RNA, 22 nt, Human
uauuuucuguggaggaccagau

SEQ ID NO: 502105 - RNA, 22 nt, Human
ccagcugcuugggaaaaugucu

SEQ ID NO: 502106 - RNA, 22 nt, Human
guggagaggaacccagcucugu

SEQ ID NO: 502107 - RNA, 22 nt, Human
uccagaccauggauggcugcaa

SEQ ID NO: 502108 - RNA, 23 nt, Human
agcuccagaacauagcacaggaa

SEQ ID NO: 502109 - RNA, 22 nt, Human
ccagugcgagccugugcuggcc

SEQ ID NO: 502110 - RNA, 22 nt, Human
auuucucaguuccuacuguuua

SEQ ID NO: 502111 - RNA, 22 nt, Human
ugggcucauggcccagcacugg

SEQ ID NO: 502112 - RNA, 19 nt, Human
uguggcugagcacuccuua

SEQ ID NO: 502113 - RNA, 22 nt, Human
ccaggcucaccuggagccccug

SEQ ID NO: 502114 - RNA, 22 nt, Human
cagcuauuuucucauuaaggau

SEQ ID NO: 502115 - RNA, 22 nt, Human
cucuggcuggcaccugaucuga

SEQ ID NO: 502116 - RNA, 22 nt, Human
agcuggguguguaucagauaaa

SEQ ID NO: 502117 - RNA, 22 nt, Human
gucaaguuuauccgcucauuca

SEQ ID NO: 502118 - RNA, 22 nt, Human
uggcagcuuccugcucauagga

SEQ ID NO: 502119 - RNA, 22 nt, Human
gcagcuggacccacacggcuua

SEQ ID NO: 502120 - RNA, 22 nt, Human
cugagaggugacagcgugcugg

SEQ ID NO: 502121 - RNA, 22 nt, Human
uuugcauuucuaaugagcuccg

SEQ ID NO: 502122 - RNA, 22 nt, Human
aggagggauagaaaaauacuug

SEQ ID NO: 502123 - RNA, 22 nt, Human
ggcgggugcacagacccuuccc

SEQ ID NO: 502124 - RNA, 22 nt, Human
uaguccagccuuggguguagcc

SEQ ID NO: 502125 - RNA, 20 nt, Human
ugcauggcgcacaucugugg

SEQ ID NO: 502126 - RNA, 22 nt, Human
ugaggcagggaguuuaauuguc

SEQ ID NO: 502127 - RNA, 22 nt, Human
cacccagcauuggcuaagagag

SEQ ID NO: 502128 - RNA, 22 nt, Human
ugugugcagccucugucuuugg

SEQ ID NO: 502129 - RNA, 19 nt, Human
cucuggccucuggaugcug

SEQ ID NO: 502130 - RNA, 22 nt, Human
gggacuggcacagggcugggag

SEQ ID NO: 502131 - RNA, 22 nt, Human
uuuccuaagguagugauaauuu

SEQ ID NO: 502132 - RNA, 22 nt, Human
gagugaugucuguagugaagaa

SEQ ID NO: 502133 - RNA, 22 nt, Human
ugagcacagcuuucacuagaaa

SEQ ID NO: 502134 - RNA, 22 nt, Human
cagggagcuggcuggcgugagu

SEQ ID NO: 502135 - RNA, 22 nt, Human
uagugcaacagggaaagagugu

SEQ ID NO: 502136 - RNA, 22 nt, Human
auucagcugacuuugauucauu

SEQ ID NO: 502137 - RNA, 22 nt, Human
acagcucuuaggcagaaccaac

SEQ ID NO: 502138 - RNA, 22 nt, Human
acacacuuuaaauuaaaccucu

SEQ ID NO: 502139 - RNA, 22 nt, Human
acuugaauuauauuucuagaga

SEQ ID NO: 502140 - RNA, 22 nt, Human
agggcucuguccccagaggccc

SEQ ID NO: 502141 - RNA, 22 nt, Human
ugccaggccaaugaaggcaggg

SEQ ID NO: 502142 - RNA, 22 nt, Human
aagguccacaacugguaaaugg

SEQ ID NO: 502143 - RNA, 22 nt, Human
aaugugaaaccgcacagaauaa

SEQ ID NO: 502144 - RNA, 22 nt, Human
ggauccuucuuugaccucacag

SEQ ID NO: 502145 - RNA, 22 nt, Human
cagcaggaaacuuaaagguaau

SEQ ID NO: 502146 - RNA, 22 nt, Human
agcaggcuuacuuucugauuag

SEQ ID NO: 502147 - RNA, 22 nt, Human
aaaugcaaggcacauuccuuuu

SEQ ID NO: 502148 - RNA, 22 nt, Human
ccagggcauccucacaucgcag

SEQ ID NO: 502149 - RNA, 22 nt, Human
gaaaggccauuucugaggguuu

SEQ ID NO: 502150 - RNA, 22 nt, Human
uuaucguacgcuucagaaauuu

SEQ ID NO: 502151 - RNA, 22 nt, Human
ucauuaaucccgggguccaggg

SEQ ID NO: 502152 - RNA, 19 nt, Human
ugcccugcacgcuguccug

SEQ ID NO: 502153 - RNA, 22 nt, Human
uuacaaagagaaguuguagaau

SEQ ID NO: 502154 - RNA, 22 nt, Human
ggagaaggcgaagucauucuuu

SEQ ID NO: 502155 - RNA, 22 nt, Human
uggcaauguaggcaagaacauu

SEQ ID NO: 502156 - RNA, 22 nt, Human
aaaacuguaggaauugggugcc

SEQ ID NO: 502157 - RNA, 22 nt, Human
gcuguacaaauuccacaagaga

SEQ ID NO: 502158 - RNA, 20 nt, Human
uggagccacagucagguucc

SEQ ID NO: 502159 - RNA, 22 nt, Human
ucucuggcagacuggcugggcu

SEQ ID NO: 502160 - RNA, 18 nt, Human
uggagccagcucuaggau

SEQ ID NO: 502161 - RNA, 22 nt, Human
aggcacagauuuggggaaagca

SEQ ID NO: 502162 - RNA, 22 nt, Human
uccagggcaggugcugggcucu

SEQ ID NO: 502163 - RNA, 22 nt, Human
agggucugaccaccaguaggga

SEQ ID NO: 502164 - RNA, 22 nt, Human
ugaugaauuaguaacaaaugag

SEQ ID NO: 502165 - RNA, 22 nt, Human
ugcaccauuaauuuaugugaga

SEQ ID NO: 502166 - RNA, 20 nt, Human
gaaauucucguauuaguuua

SEQ ID NO: 502167 - RNA, 22 nt, Human
uucauauaaauggaaucagaau

SEQ ID NO: 502168 - RNA, 22 nt, Human
uagagcuauuuagagcauuuua

SEQ ID NO: 502169 - RNA, 22 nt, Human
gcagcauccugggccacagucc

SEQ ID NO: 502170 - RNA, 22 nt, Human
gcagugcugaucccauggcaga

SEQ ID NO: 502171 - RNA, 22 nt, Human
cccugcagccuugcaugccuuc

SEQ ID NO: 502172 - RNA, 22 nt, Human
uuauacuaaaacgcauugaauu

SEQ ID NO: 502173 - RNA, 22 nt, Human
aggcuucccagcugagcucagc

SEQ ID NO: 502174 - RNA, 22 nt, Human
gccuggugcuaugagggccagc

SEQ ID NO: 502175 - RNA, 22 nt, Human
aacacagacauagugauuacag

SEQ ID NO: 502176 - RNA, 22 nt, Human
gcucaguguuucugguagaaaa

SEQ ID NO: 502177 - RNA, 18 nt, Human
ccagagcuggcuccucgc

SEQ ID NO: 502178 - RNA, 22 nt, Human
ucaaaacacuauuaccuuuaau

SEQ ID NO: 502179 - RNA, 22 nt, Human
gcucaagggaugggagugggug

SEQ ID NO: 502180 - RNA, 22 nt, Human
ucucugcugagaagggcuggca

SEQ ID NO: 502181 - RNA, 22 nt, Human
uccugggaaguugcaucaccgu

SEQ ID NO: 502182 - RNA, 17 nt, Human
aggugcuggagcaucag

SEQ ID NO: 502183 - RNA, 22 nt, Human
acugucaccaucagagcgggaa

SEQ ID NO: 502184 - RNA, 22 nt, Human
caguccuggagcccuucuuggc

SEQ ID NO: 502185 - RNA, 22 nt, Human
agagccagcaagugaauaguga

SEQ ID NO: 502186 - RNA, 22 nt, Human
cugggcuuugguacugugauua

SEQ ID NO: 502187 - RNA, 20 nt, Human
aucaggauucuugcuuuguu

SEQ ID NO: 502188 - RNA, 22 nt, Human
aauaugcaaagcguguuaucug

SEQ ID NO: 502189 - RNA, 22 nt, Human
uguugauuugugggcugcaaaa

SEQ ID NO: 502190 - RNA, 22 nt, Human
ucuucauuccguagauauuuau

SEQ ID NO: 502191 - RNA, 22 nt, Human
ggccacacucugguagagguga

SEQ ID NO: 502192 - RNA, 22 nt, Human
agaagaaaugaggccguucugc

SEQ ID NO: 502193 - RNA, 22 nt, Human
ugaaaaaccucaguccgcuuua

SEQ ID NO: 502194 - RNA, 21 nt, Human
gcugccaccgcgugcuccagg

SEQ ID NO: 502195 - RNA, 22 nt, Human
agcaguuguagucauggaaaau

SEQ ID NO: 502196 - RNA, 22 nt, Human
uucuucaaaauccagcaugauu

SEQ ID NO: 502197 - RNA, 22 nt, Human
ccaggggcuggugcugagcugg

SEQ ID NO: 502198 - RNA, 22 nt, Human
uggcucaggggucuggcucugu

SEQ ID NO: 502199 - RNA, 21 nt, Human
ccaggaaggacugagcucccu

SEQ ID NO: 502200 - RNA, 22 nt, Human
aaauccuaaugacaaguuuagu

SEQ ID NO: 502201 - RNA, 22 nt, Human
gcugucacaaauauuucucagc

SEQ ID NO: 502202 - RNA, 19 nt, Human
uuagggacaugaauucuag

SEQ ID NO: 502203 - RNA, 22 nt, Human
cugaaugaggaaaagagugagg

SEQ ID NO: 502204 - RNA, 23 nt, Human
ccagggcuacgggcaccguccug

SEQ ID NO: 502205 - RNA, 22 nt, Human
aauuuucugguguguaaugaag

SEQ ID NO: 502206 - RNA, 22 nt, Human
uggcagaguggaccauacucaa

SEQ ID NO: 502207 - RNA, 22 nt, Human
agcccuccucacaucagcgucc

SEQ ID NO: 502208 - RNA, 22 nt, Human
ugggagcugggguuggacgucu

SEQ ID NO: 502209 - RNA, 22 nt, Human
acagagccaaaaggacauagua

SEQ ID NO: 502210 - RNA, 22 nt, Human
cuggugggagcagcaggcagcu

SEQ ID NO: 502211 - RNA, 22 nt, Human
gaugaagcuuugaagucuaauc

SEQ ID NO: 502212 - RNA, 22 nt, Human
ucccuguggauaucugcagcug

SEQ ID NO: 502213 - RNA, 22 nt, Human
aauuucucgguuuugauauugu

SEQ ID NO: 502214 - RNA, 22 nt, Human
caaguauuuccugauggccugu

SEQ ID NO: 502215 - RNA, 22 nt, Human
auguucuuccaaaucuguaaca

SEQ ID NO: 502216 - RNA, 22 nt, Human
gugguaaucggauucuuaccgg

SEQ ID NO: 502217 - RNA, 22 nt, Human
ucaucaaagucaaagaaugacu

SEQ ID NO: 502218 - RNA, 22 nt, Human
ccugggcugaagucaagugugg

SEQ ID NO: 502219 - RNA, 22 nt, Human
cucuggaauguuuacaugcccu

SEQ ID NO: 502220 - RNA, 22 nt, Human
ggcugugcgggcagccguggga

SEQ ID NO: 502221 - RNA, 19 nt, Human
agcucuuugcugcauucca

SEQ ID NO: 502222 - RNA, 22 nt, Human
gugagcaguugugagccccaaa

SEQ ID NO: 502223 - RNA, 21 nt, Human
cuccugggcuaagauauagug

SEQ ID NO: 502224 - RNA, 22 nt, Human
augugcauuaaaugucaauguu

SEQ ID NO: 502225 - RNA, 22 nt, Human
acucugggauuguuucugguau

SEQ ID NO: 502226 - RNA, 22 nt, Human
ccugagggcgccgagcucccag

SEQ ID NO: 502227 - RNA, 22 nt, Human
cacacaucuuaucccaguuauu

SEQ ID NO: 502228 - RNA, 22 nt, Human
uccuucaguuaucacaguacug

SEQ ID NO: 502229 - RNA, 22 nt, Human
ggcacugaucugauuucccucc

SEQ ID NO: 502230 - RNA, 22 nt, Human
aaaguuuguugcuuacaaagaa

SEQ ID NO: 502231 - RNA, 22 nt, Human
agaaauguuguggguuuuguua

SEQ ID NO: 502232 - RNA, 22 nt, Human
auaauuaucucagacacuuguu

SEQ ID NO: 502233 - RNA, 22 nt, Human
guggaauuuuuaccuaugaaug

SEQ ID NO: 502234 - RNA, 22 nt, Human
uuuuauuaucuuugaaugggac

SEQ ID NO: 502235 - RNA, 22 nt, Human
auuccaaagccugaauaaugga

SEQ ID NO: 502236 - RNA, 22 nt, Human
gcuggcucugccccaccuguuc

SEQ ID NO: 502237 - RNA, 23 nt, Human
auuuuuagccucucugagcugag

SEQ ID NO: 502238 - RNA, 22 nt, Human
uuuaucaaacaaauuauccagc

SEQ ID NO: 502239 - RNA, 22 nt, Human
aguccagugucaaggugccauu

SEQ ID NO: 502240 - RNA, 22 nt, Human
acaugcauacaagcacauguag

SEQ ID NO: 502241 - RNA, 22 nt, Human
ccuggguccacccugugaagua

SEQ ID NO: 502242 - RNA, 22 nt, Human
ggcucucuccuuggcuuucaga

SEQ ID NO: 502243 - RNA, 22 nt, Human
gggcuggcugauuuuccucucu

SEQ ID NO: 502244 - RNA, 22 nt, Human
aaugggagguaguaugggaggu

SEQ ID NO: 502245 - RNA, 22 nt, Human
cuuccaaagcacuuuauggacc

SEQ ID NO: 502246 - RNA, 20 nt, Human
cccucccagaugcuucccaa

SEQ ID NO: 502247 - RNA, 22 nt, Human
gguggccuccagggcauaggug

SEQ ID NO: 502248 - RNA, 22 nt, Human
ugguccuggugcaagugcauuu

SEQ ID NO: 502249 - RNA, 22 nt, Human
ggccugaggccaccagcagccc

SEQ ID NO: 502250 - RNA, 22 nt, Human
cacaggagagcugggaggugcc

SEQ ID NO: 502251 - RNA, 22 nt, Human
agccaagcacucaacuccugga

SEQ ID NO: 502252 - RNA, 22 nt, Human
agaaaucugacugcugugcaca

SEQ ID NO: 502253 - RNA, 21 nt, Human
acaugcauagagagauuucug

SEQ ID NO: 502254 - RNA, 22 nt, Human
cuccuggcucgcccccagcuga

SEQ ID NO: 502255 - RNA, 22 nt, Human
gagcuuuaagggauaaaaugau

SEQ ID NO: 502256 - RNA, 22 nt, Human
ucaggcuggaaugcaguggggc

SEQ ID NO: 502257 - RNA, 22 nt, Human
uuuguuugccacacaaaacagu

SEQ ID NO: 502258 - RNA, 22 nt, Human
caucaugucugcaggaaugugu

SEQ ID NO: 502259 - RNA, 22 nt, Human
agccagagcugaugucauucuc

SEQ ID NO: 502260 - RNA, 22 nt, Human
guccucaggaaagcagauaaca

SEQ ID NO: 502261 - RNA, 22 nt, Human
ccagcuccggugugcuuauuuc

SEQ ID NO: 502262 - RNA, 22 nt, Human
uuucuguaauuaaaagggcagg

SEQ ID NO: 502263 - RNA, 22 nt, Human
auuuuuaugacaaaccauccuc

SEQ ID NO: 502264 - RNA, 22 nt, Human
aucugggcagggcagcaaggcg

SEQ ID NO: 502265 - RNA, 22 nt, Human
guggccugggguuuguucugag

SEQ ID NO: 502266 - RNA, 20 nt, Human
cagaggcaaggagacuugga

SEQ ID NO: 502267 - RNA, 22 nt, Human
uacauuccuguuagcaucuaag

SEQ ID NO: 502268 - RNA, 22 nt, Human
gcaucuucacacaaagccagug

SEQ ID NO: 502269 - RNA, 19 nt, Human
gcucaacagcucggguccu

SEQ ID NO: 502270 - RNA, 21 nt, Human
gagacagacuuucguccccug

SEQ ID NO: 502271 - RNA, 23 nt, Human
cucugcaggagagugggcagggc

SEQ ID NO: 502272 - RNA, 22 nt, Human
auaauuuacaacugcuuuuaau

SEQ ID NO: 502273 - RNA, 21 nt, Human
auucugaguugucagucuuca

SEQ ID NO: 502274 - RNA, 22 nt, Human
guuguaaguuuaaugucaauug

SEQ ID NO: 502275 - RNA, 22 nt, Human
ccucccuuggccauagccagcc

SEQ ID NO: 502276 - RNA, 22 nt, Human
gauguacaagauuguaggaaug

SEQ ID NO: 502277 - RNA, 22 nt, Human
cuggcugguccucggggacagc

SEQ ID NO: 502278 - RNA, 22 nt, Human
auguugagagcugagaucagcc

SEQ ID NO: 502279 - RNA, 22 nt, Human
ugguccuggccuugaccccagg

SEQ ID NO: 502280 - RNA, 22 nt, Human
ugucugucugcaagccagaaag

SEQ ID NO: 502281 - RNA, 22 nt, Human
uucacaagucauuagcugcaua

SEQ ID NO: 502282 - RNA, 22 nt, Human
uacaagacgagggaaguucuuu

SEQ ID NO: 502283 - RNA, 22 nt, Human
agagccuugaagaucuggaaaa

SEQ ID NO: 502284 - RNA, 22 nt, Human
ugcacuuugcaggcauggaaac

SEQ ID NO: 502285 - RNA, 19 nt, Human
cugucaggggcuggauguu

SEQ ID NO: 502286 - RNA, 22 nt, Human
uugaaauagaugcgucagagau

SEQ ID NO: 502287 - RNA, 22 nt, Human
ugugucuguccucgguugaugc

SEQ ID NO: 502288 - RNA, 22 nt, Human
accaaggaagagauucucaguu

SEQ ID NO: 502289 - RNA, 22 nt, Human
aaaggagacuucagaucuccuu

SEQ ID NO: 502290 - RNA, 22 nt, Human
cccaggcugguccugaacuccu

SEQ ID NO: 502291 - RNA, 22 nt, Human
ugccccucgacgcaaugaaggg

SEQ ID NO: 502292 - RNA, 22 nt, Human
gagcuuggccucuugaacgugg

SEQ ID NO: 502293 - RNA, 22 nt, Human
acaaaguccugguguauggcca

SEQ ID NO: 502294 - RNA, 22 nt, Human
auuaaauacugcaggcuaagca

SEQ ID NO: 502295 - RNA, 22 nt, Human
cucagcacacucccaucuaauu

SEQ ID NO: 502296 - RNA, 22 nt, Human
uucuuuuaaugucuggcuuuca

SEQ ID NO: 502297 - RNA, 22 nt, Human
gccugggugaauuugauccuaa

SEQ ID NO: 502298 - RNA, 22 nt, Human
cugggcugcaucaaagaggcau

SEQ ID NO: 502299 - RNA, 22 nt, Human
guugggaaggcaagaaguagaa

SEQ ID NO: 502300 - RNA, 22 nt, Human
cagcacagugaccagacccacu

SEQ ID NO: 502301 - RNA, 22 nt, Human
agcacuagagccaaaauuuggg

SEQ ID NO: 502302 - RNA, 22 nt, Human
ccaggcugggcuacaaguugag

SEQ ID NO: 502303 - RNA, 22 nt, Human
aggagcugacuuguaaagcauu

SEQ ID NO: 502304 - RNA, 22 nt, Human
uauguacauggagagcaauuga

SEQ ID NO: 502305 - RNA, 22 nt, Human
cugcuguguuccuccugcaucu

SEQ ID NO: 502306 - RNA, 22 nt, Human
ucccagagcugauaagccuuua

SEQ ID NO: 502307 - RNA, 22 nt, Human
uccucaggugacuagguaucuu

SEQ ID NO: 502308 - RNA, 22 nt, Human
cugcuggggucagagcacuggg

SEQ ID NO: 502309 - RNA, 22 nt, Human
agccagacauggcuccugcucc

SEQ ID NO: 502310 - RNA, 22 nt, Human
ucugagagagggucagaugcua

SEQ ID NO: 502311 - RNA, 22 nt, Human
uuagaauuauuguuuccuucua

SEQ ID NO: 502312 - RNA, 22 nt, Human
gugugcaguagagaaagagcag

SEQ ID NO: 502313 - RNA, 22 nt, Human
uucaaugagcccaagaacguga

SEQ ID NO: 502314 - RNA, 22 nt, Human
agcagcuuaucuuggagaggca

SEQ ID NO: 502315 - RNA, 22 nt, Human
uuauuuaauuuucucacucaga

SEQ ID NO: 502316 - RNA, 22 nt, Human
ggcagcuguaagaugagugaau

SEQ ID NO: 502317 - RNA, 22 nt, Human
ugccugucuccucugcagggug

SEQ ID NO: 502318 - RNA, 22 nt, Human
uuccugggcugcagagagcacc

SEQ ID NO: 502319 - RNA, 22 nt, Human
cuaggcuguaaagagcuaggag

SEQ ID NO: 502320 - RNA, 22 nt, Human
cugagccaaccacagcaggagc

SEQ ID NO: 502321 - RNA, 22 nt, Human
cuggaaggcggagguuguagug

SEQ ID NO: 502322 - RNA, 21 nt, Human
ugccuggccuuugcuuuuccu

SEQ ID NO: 502323 - RNA, 22 nt, Human
caguccugggagacuuacccag

SEQ ID NO: 502324 - RNA, 22 nt, Human
auucauucugaccucaagagaa

SEQ ID NO: 502325 - RNA, 21 nt, Human
uugcacagaaaaccauagaga

SEQ ID NO: 502326 - RNA, 20 nt, Human
gcagcugcccccagucccug

SEQ ID NO: 502327 - RNA, 22 nt, Human
caggaaagccgagugccauagg

SEQ ID NO: 502328 - RNA, 22 nt, Human
gagccagguuggaggcugcagu

SEQ ID NO: 502329 - RNA, 22 nt, Human
cauuuguguccgucccaguucu

SEQ ID NO: 502330 - RNA, 19 nt, Human
aggucugcagcugcaguuu

SEQ ID NO: 502331 - RNA, 22 nt, Human
ugcuggccaagcagaggucaau

SEQ ID NO: 502332 - RNA, 22 nt, Human
uaugaaaagguggccaauguag

SEQ ID NO: 502333 - RNA, 22 nt, Human
uccagaggcucugagggagagu

SEQ ID NO: 502334 - RNA, 18 nt, Human
aaauguacuguccauggc

SEQ ID NO: 502335 - RNA, 22 nt, Human
agggccaggcucccaugucagg

SEQ ID NO: 502336 - RNA, 20 nt, Human
uggccuuggggagcucacac

SEQ ID NO: 502337 - RNA, 21 nt, Human
agccuggcccagggggaggcu

SEQ ID NO: 502338 - RNA, 22 nt, Human
gagcugucucuauaugaaugcu

SEQ ID NO: 502339 - RNA, 22 nt, Human
uccaugucuucaugugucuaac

SEQ ID NO: 502340 - RNA, 22 nt, Human
auucuggacaaggcaagcuccu

SEQ ID NO: 502341 - RNA, 22 nt, Human
cucaggauuuaaaggggcacuc

SEQ ID NO: 502342 - RNA, 22 nt, Human
aggcuucuugagccccacaggc

SEQ ID NO: 502343 - RNA, 22 nt, Human
cccagcucuuuuagcggcaucu

SEQ ID NO: 502344 - RNA, 22 nt, Human
caggaaggcccaccuguccugu

SEQ ID NO: 502345 - RNA, 22 nt, Human
cugauucuuugaagaugcaccc

SEQ ID NO: 502346 - RNA, 22 nt, Human
uagugcaaaggcccugagaugg

SEQ ID NO: 502347 - RNA, 22 nt, Human
gagucauugcacacuagcucag

SEQ ID NO: 502348 - RNA, 22 nt, Human
uaaaguguaugccaucucucau

SEQ ID NO: 502349 - RNA, 22 nt, Human
aaaugcaaggccaugugaagga

SEQ ID NO: 502350 - RNA, 22 nt, Human
ccacuaguuuaauaccuuccuu

SEQ ID NO: 502351 - RNA, 22 nt, Human
acugagcugcuugaagugaacu

SEQ ID NO: 502352 - RNA, 22 nt, Human
ggcagguggacgugcuaaagcu

SEQ ID NO: 502353 - RNA, 21 nt, Human
uggcucugagccucauggcug

SEQ ID NO: 502354 - RNA, 22 nt, Human
ggugggcacccgagacuggauc

SEQ ID NO: 502355 - RNA, 22 nt, Human
cugggccugccaccaucuuagg

SEQ ID NO: 502356 - RNA, 22 nt, Human
gccaacaggccuugcucugcuc

SEQ ID NO: 502357 - RNA, 22 nt, Human
cuauuauuuccucaucuauaaa

SEQ ID NO: 502358 - RNA, 22 nt, Human
guagaauuaccucucuaugucc

SEQ ID NO: 502359 - RNA, 22 nt, Human
uccagcuggggcaguggcuggg

SEQ ID NO: 502360 - RNA, 22 nt, Human
uugcagcugugagcuuuacacg

SEQ ID NO: 502361 - RNA, 22 nt, Human
cagugggugccaucgugcccuu

SEQ ID NO: 502362 - RNA, 22 nt, Human
uguaaacagccccauggagagc

SEQ ID NO: 502363 - RNA, 22 nt, Human
ugcagccuugccuccucccagc

SEQ ID NO: 502364 - RNA, 21 nt, Human
ugcucacagaugugcucagug

SEQ ID NO: 502365 - RNA, 22 nt, Human
cuggagggagauucaaaggagg

SEQ ID NO: 502366 - RNA, 22 nt, Human
gaaaugcauaaucuuaguagau

SEQ ID NO: 502367 - RNA, 22 nt, Human
agccagagagccccagguucua

SEQ ID NO: 502368 - RNA, 22 nt, Human
aggcucugcagugcuggaggac

SEQ ID NO: 502369 - RNA, 22 nt, Human
augcuuggcguuucacuuccug

SEQ ID NO: 502370 - RNA, 22 nt, Human
agaggccagggacacugcucaa

SEQ ID NO: 502371 - RNA, 22 nt, Human
gcacagggagacagccguggcc

SEQ ID NO: 502372 - RNA, 22 nt, Human
cagagcuguugcggggcuuggc

SEQ ID NO: 502373 - RNA, 22 nt, Human
ugccaggcccagcuccagagcu

SEQ ID NO: 502374 - RNA, 22 nt, Human
cugaagccacgauagcuuccua

SEQ ID NO: 502375 - RNA, 22 nt, Human
ugaauuuaucaaagauucuuaa

SEQ ID NO: 502376 - RNA, 22 nt, Human
aggaguccucaugucugugcga

SEQ ID NO: 502377 - RNA, 22 nt, Human
acauuaacaccgugaguuuggu

SEQ ID NO: 502378 - RNA, 22 nt, Human
gaaggagacccugaagaugcug

SEQ ID NO: 502379 - RNA, 22 nt, Human
ugcucauuggcgaucugaggga

SEQ ID NO: 502380 - RNA, 22 nt, Human
caucacauuagucucaagagaa

SEQ ID NO: 502381 - RNA, 19 nt, Human
aauguaguguuaugucaac

SEQ ID NO: 502382 - RNA, 22 nt, Human
uagguucucuauugcccccaaa

SEQ ID NO: 502383 - RNA, 22 nt, Human
uccucacauggugagccacaca

SEQ ID NO: 502384 - RNA, 22 nt, Human
auguggcugguaguugacaacu

SEQ ID NO: 502385 - RNA, 22 nt, Human
agcucucugauaaauugauaaa

SEQ ID NO: 502386 - RNA, 22 nt, Human
gggcacaguacuccaaucaacu

SEQ ID NO: 502387 - RNA, 22 nt, Human
cucaaauagaacugaucuauaa

SEQ ID NO: 502388 - RNA, 22 nt, Human
gaaauacaggaaugccacacag

SEQ ID NO: 502389 - RNA, 19 nt, Human
caggaaugagguaauggcu

SEQ ID NO: 502390 - RNA, 22 nt, Human
ccugagguggcugcagcacugc

SEQ ID NO: 502391 - RNA, 22 nt, Human
agagcacagaaguuauauguua

SEQ ID NO: 502392 - RNA, 22 nt, Human
ggaugggcugaaagguagcccc

SEQ ID NO: 502393 - RNA, 19 nt, Human
aaaugugaugguacaauuc

SEQ ID NO: 502394 - RNA, 22 nt, Human
ugcaggcucacccuggagcuga

SEQ ID NO: 502395 - RNA, 22 nt, Human
agggcucagaacaaugagugua

SEQ ID NO: 502396 - RNA, 22 nt, Human
gagcagcugguaggugaaccca

SEQ ID NO: 502397 - RNA, 22 nt, Human
aucaggaucacagaaacuuuua

SEQ ID NO: 502398 - RNA, 21 nt, Human
auuuucauuaauucagugugg

SEQ ID NO: 502399 - RNA, 21 nt, Human
aggcucccagaaaugggcauc

SEQ ID NO: 502400 - RNA, 22 nt, Human
cauauuuauagaucuggcauuu

SEQ ID NO: 502401 - RNA, 22 nt, Human
aggcuuccgaguagcugggacu

SEQ ID NO: 502402 - RNA, 22 nt, Human
cccaaggccucuccuuggcuug

SEQ ID NO: 502403 - RNA, 22 nt, Human
uggcagguccacucacagaucu

SEQ ID NO: 502404 - RNA, 23 nt, Human
aacguccucaacaggauugcacc

SEQ ID NO: 502405 - RNA, 22 nt, Human
uucucauucugacucaguguag

SEQ ID NO: 502406 - RNA, 22 nt, Human
gcugccagucuaaugggaaaca

SEQ ID NO: 502407 - RNA, 22 nt, Human
uuccaagugaaaguagcuuugu

SEQ ID NO: 502408 - RNA, 22 nt, Human
cuuccuuggcuucuggggugug

SEQ ID NO: 502409 - RNA, 22 nt, Human
aggcagcauuucugcuuaucca

SEQ ID NO: 502410 - RNA, 22 nt, Human
ccagcacuccugucucaagucu

SEQ ID NO: 502411 - RNA, 22 nt, Human
ggagcuguucaggacugcuuca

SEQ ID NO: 502412 - RNA, 22 nt, Human
cuccaggguuccccgauccacu

SEQ ID NO: 502413 - RNA, 22 nt, Human
ccaucccuccuccaccagcuag

SEQ ID NO: 502414 - RNA, 22 nt, Human
aaggaaauacaacauguauuca

SEQ ID NO: 502415 - RNA, 20 nt, Human
auaaaauaacugccacaaga

SEQ ID NO: 502416 - RNA, 22 nt, Human
uggagaaugauauuccaucauu

SEQ ID NO: 502417 - RNA, 19 nt, Human
cugugcuuuaaacuccuau

SEQ ID NO: 502418 - RNA, 22 nt, Human
ccaggcuccgcauagaccccac

SEQ ID NO: 502419 - RNA, 22 nt, Human
agcauggggcaaugcaugugcu

SEQ ID NO: 502420 - RNA, 22 nt, Human
aaugagaauguaagugaagaga

SEQ ID NO: 502421 - RNA, 22 nt, Human
gggagcugagcuggaagagaau

SEQ ID NO: 502422 - RNA, 22 nt, Human
uuaacuugucagaaaauacagu

SEQ ID NO: 502423 - RNA, 21 nt, Human
ugcugaaucugccauauuuuc

SEQ ID NO: 502424 - RNA, 22 nt, Human
aggcccugcccagugccacaag

SEQ ID NO: 502425 - RNA, 22 nt, Human
agcuguguggugucugacagcu

SEQ ID NO: 502426 - RNA, 22 nt, Human
uugaggaguguuuagggugagg

SEQ ID NO: 502427 - RNA, 22 nt, Human
cuccuggggcacuuagaagcaa

SEQ ID NO: 502428 - RNA, 22 nt, Human
ucuuuaagccaagauauauuua

SEQ ID NO: 502429 - RNA, 22 nt, Human
cuuauuugaauguaugaguuuu

SEQ ID NO: 502430 - RNA, 22 nt, Human
auguaauuugcccucaaguuaa

SEQ ID NO: 502431 - RNA, 22 nt, Human
uuguuaaaacuccauugguuug

SEQ ID NO: 502432 - RNA, 22 nt, Human
gucaggauuuuaaaaucccagu

SEQ ID NO: 502433 - RNA, 22 nt, Human
uucaauucugaugaaggcaaua

SEQ ID NO: 502434 - RNA, 22 nt, Human
gggcuacauugugagagaaguu

SEQ ID NO: 502435 - RNA, 22 nt, Human
ugggaggaucgcuugagcccag

SEQ ID NO: 502436 - RNA, 22 nt, Human
cuuucucugugugguaaagggc

SEQ ID NO: 502437 - RNA, 22 nt, Human
cccugcagaucuaggguccuuc

SEQ ID NO: 502438 - RNA, 21 nt, Human
gcagacugcccugcugucccc

SEQ ID NO: 502439 - RNA, 22 nt, Human
ugcccucaagcaacagagagga

SEQ ID NO: 502440 - RNA, 22 nt, Human
cagcucugugggagcguaugug

SEQ ID NO: 502441 - RNA, 22 nt, Human
cugagggccuuggcuccugccc

SEQ ID NO: 502442 - RNA, 22 nt, Human
gccagggaacccaagggccuca

SEQ ID NO: 502443 - RNA, 22 nt, Human
aggcacugaauauccaguaaaa

SEQ ID NO: 502444 - RNA, 22 nt, Human
uuugcaaacacuuaagaagaga

SEQ ID NO: 502445 - RNA, 22 nt, Human
aagauaauauucauuaacuaga

SEQ ID NO: 502446 - RNA, 22 nt, Human
uagaauaguguuuucauuaugg

SEQ ID NO: 502447 - RNA, 22 nt, Human
uucuggaggccccuuccuucuc

SEQ ID NO: 502448 - RNA, 22 nt, Human
guuugcauguauuaagucaaua

SEQ ID NO: 502449 - RNA, 22 nt, Human
ggcccagcccgagucagccuuc

SEQ ID NO: 502450 - RNA, 22 nt, Human
ugauuuccuggcuuuggaguuc

SEQ ID NO: 502451 - RNA, 22 nt, Human
augaggauguuaguggacugga

SEQ ID NO: 502452 - RNA, 22 nt, Human
uucacagaauggcaaguuaugg

SEQ ID NO: 502453 - RNA, 22 nt, Human
cuguggcagggaagaggccaug

SEQ ID NO: 502454 - RNA, 22 nt, Human
agcccagcuuugaaccauauca

SEQ ID NO: 502455 - RNA, 22 nt, Human
uccucucugcacuggcccugcc

SEQ ID NO: 502456 - RNA, 22 nt, Human
gugcugggauuacaggugugag

SEQ ID NO: 502457 - RNA, 22 nt, Human
augaaauuaaucaacacauaca

SEQ ID NO: 502458 - RNA, 22 nt, Human
aauuaugauuggucuaaaccag

SEQ ID NO: 502459 - RNA, 22 nt, Human
uccugcagcucugagaagcauc

SEQ ID NO: 502460 - RNA, 22 nt, Human
uggcuccuaucaaggagugggu

SEQ ID NO: 502461 - RNA, 22 nt, Human
uuauucuucuucucuugccagg

SEQ ID NO: 502462 - RNA, 18 nt, Human
cucagggcaucagucugg

SEQ ID NO: 502463 - RNA, 22 nt, Human
ucagcagucacauguuguccca

SEQ ID NO: 502464 - RNA, 22 nt, Human
cagcauuucaggaggcugaggu

SEQ ID NO: 502465 - RNA, 22 nt, Human
gcacagaggaagcacagacucu

SEQ ID NO: 502466 - RNA, 22 nt, Human
guuaaccaaggcaccaagugua

SEQ ID NO: 502467 - RNA, 22 nt, Human
agcuggccuuagugagcaccug

SEQ ID NO: 502468 - RNA, 22 nt, Human
cugcaaaaguaauugcagguuu

SEQ ID NO: 502469 - RNA, 22 nt, Human
aacacagaucaaaauauuuccu

SEQ ID NO: 502470 - RNA, 22 nt, Human
ccagugcauugccgugucuagg

SEQ ID NO: 502471 - RNA, 22 nt, Human
ugggugcucugcgaccguaggg

SEQ ID NO: 502472 - RNA, 22 nt, Human
cagacaggcuagccagacucac

SEQ ID NO: 502473 - RNA, 22 nt, Human
gcccuuagccuuauagccucua

SEQ ID NO: 502474 - RNA, 22 nt, Human
aagagagucagucugagcacca

SEQ ID NO: 502475 - RNA, 18 nt, Human
gcaggugccacugcuguu

SEQ ID NO: 502476 - RNA, 21 nt, Human
uccugggggguaggugaguuu

SEQ ID NO: 502477 - RNA, 19 nt, Human
cccaguccuuguccugggc

SEQ ID NO: 502478 - RNA, 22 nt, Human
auagauuagcccuauaguuuua

SEQ ID NO: 502479 - RNA, 22 nt, Human
uucacauugguucuugauagcu

SEQ ID NO: 502480 - RNA, 22 nt, Human
accuaaaucuaccucauguuuu

SEQ ID NO: 502481 - RNA, 22 nt, Human
cagucuggcacagcacacugaa

SEQ ID NO: 502482 - RNA, 22 nt, Human
ggagcugggguuggcaucuucc

SEQ ID NO: 502483 - RNA, 22 nt, Human
agugacugguuuugacaggaau

SEQ ID NO: 502484 - RNA, 22 nt, Human
uccuugaauauaauaacaguag

SEQ ID NO: 502485 - RNA, 20 nt, Human
agaaacagcacaauucuguu

SEQ ID NO: 502486 - RNA, 20 nt, Human
agaaaauguuuucagcugga

SEQ ID NO: 502487 - RNA, 22 nt, Human
aggucuggaggcggagucagga

SEQ ID NO: 502488 - RNA, 22 nt, Human
uccucaguaaggaucgucagcu

SEQ ID NO: 502489 - RNA, 22 nt, Human
uccaguggcacuggagacuaga

SEQ ID NO: 502490 - RNA, 22 nt, Human
gcucaggacuggaggagcgggg

SEQ ID NO: 502491 - RNA, 22 nt, Human
uccagcagcccgaaggcccauc

SEQ ID NO: 502492 - RNA, 22 nt, Human
caaagaugcugauguuggauca

SEQ ID NO: 502493 - RNA, 22 nt, Human
aguuauguccucagcaaaucaa

SEQ ID NO: 502494 - RNA, 22 nt, Human
ccugugucagccccugccucca

SEQ ID NO: 502495 - RNA, 22 nt, Human
auaaauagugugucauaaaguc

SEQ ID NO: 502496 - RNA, 22 nt, Human
cagggcccaggccacuggguug

SEQ ID NO: 502497 - RNA, 22 nt, Human
ugagcacagcucgcaccagcuu

SEQ ID NO: 502498 - RNA, 22 nt, Human
ugcccuuaugaaagaggcccaa

SEQ ID NO: 502499 - RNA, 19 nt, Human
ggcaccuuucugcuguguc

SEQ ID NO: 502500 - RNA, 22 nt, Human
ugaguagacgugaucuaguaac

SEQ ID NO: 502501 - RNA, 22 nt, Human
cuucuuccugcugcagccucca

SEQ ID NO: 502502 - RNA, 22 nt, Human
uccuggcucaggccccuggugc

SEQ ID NO: 502503 - RNA, 22 nt, Human
aggagacauacuauaggaauau

SEQ ID NO: 502504 - RNA, 17 nt, Human
ggaacaaauacuaugca

SEQ ID NO: 502505 - RNA, 22 nt, Human
ucagugcagcggcagcagcucu

SEQ ID NO: 502506 - RNA, 22 nt, Human
gggugccacagagcuuccacuu

SEQ ID NO: 502507 - RNA, 22 nt, Human
ugcagccauuuucugccaaugc

SEQ ID NO: 502508 - RNA, 22 nt, Human
ucugagccguauggcuuggcua

SEQ ID NO: 502509 - RNA, 19 nt, Human
uagcuucacguggucuaga

SEQ ID NO: 502510 - RNA, 22 nt, Human
uaaagcaauuacucaguggcuu

SEQ ID NO: 502511 - RNA, 22 nt, Human
cucagagaagucuuugcuaaac

SEQ ID NO: 502512 - RNA, 22 nt, Human
cugcagggagaggggacagccu

SEQ ID NO: 502513 - RNA, 22 nt, Human
cuguuuuaucucaagaguucaa

SEQ ID NO: 502514 - RNA, 22 nt, Human
aaaguuuucugccuucauuaga

SEQ ID NO: 502515 - RNA, 22 nt, Human
caucagucccacggagcagccc

SEQ ID NO: 502516 - RNA, 22 nt, Human
guccaggaguuuccaauuaagc

SEQ ID NO: 502517 - RNA, 23 nt, Human
ucuguacaauugagaagagaaca

SEQ ID NO: 502518 - RNA, 22 nt, Human
ccacagcuagggcaaucugauu

SEQ ID NO: 502519 - RNA, 22 nt, Human
cugggcucaguggcucauggcu

SEQ ID NO: 502520 - RNA, 22 nt, Human
aguuuccuuggauucaauuugg

SEQ ID NO: 502521 - RNA, 22 nt, Human
gcuggggucugugaggagggcu

SEQ ID NO: 502522 - RNA, 22 nt, Human
ggggugggcgugcagggacacc

SEQ ID NO: 502523 - RNA, 22 nt, Human
cagugcagccaaggacaggcac

SEQ ID NO: 502524 - RNA, 22 nt, Human
uccgccaggacugagggcccau

SEQ ID NO: 502525 - RNA, 22 nt, Human
ggcagcugaccuagcaccaucc

SEQ ID NO: 502526 - RNA, 22 nt, Human
ccuaggaagcugagauugcagu

SEQ ID NO: 502527 - RNA, 22 nt, Human
agccaaagugguauauagggaa

SEQ ID NO: 502528 - RNA, 22 nt, Human
ccuggccaaucuagggcuguua

SEQ ID NO: 502529 - RNA, 22 nt, Human
ucagaggucccuagcaggagug

SEQ ID NO: 502530 - RNA, 23 nt, Human
ggauggagccacuuugaaaccac

SEQ ID NO: 502531 - RNA, 22 nt, Human
ucagcagggaggcucugugccc

SEQ ID NO: 502532 - RNA, 22 nt, Human
aauucacauguugaaguccuaa

SEQ ID NO: 502533 - RNA, 22 nt, Human
uagugcaaggauugcugcagag

SEQ ID NO: 502534 - RNA, 22 nt, Human
agguacagaugaaagucuaguu

SEQ ID NO: 502535 - RNA, 22 nt, Human
agucugcacucagguggagguc

SEQ ID NO: 502536 - RNA, 20 nt, Human
aauuagcuuaagucaaucag

SEQ ID NO: 502537 - RNA, 22 nt, Human
auuugccucugcuuucaaggau

SEQ ID NO: 502538 - RNA, 22 nt, Human
cucuggagaacgcuauggaucu

SEQ ID NO: 502539 - RNA, 22 nt, Human
gcugcucuacccaugcaucugu

SEQ ID NO: 502540 - RNA, 22 nt, Human
ccacagaagauggggagagugg

SEQ ID NO: 502541 - RNA, 22 nt, Human
gaaagugcuaggaaguguuaga

SEQ ID NO: 502542 - RNA, 22 nt, Human
auuuugaagggaauugaaguuc

SEQ ID NO: 502543 - RNA, 20 nt, Human
acauugauuauguuuguaga

SEQ ID NO: 502544 - RNA, 22 nt, Human
ucagaacagaagaaggaacacg

SEQ ID NO: 502545 - RNA, 22 nt, Human
uuugaguugcuuauuuaauagg

SEQ ID NO: 502546 - RNA, 22 nt, Human
ucccugggccacagcugugagc

SEQ ID NO: 502547 - RNA, 21 nt, Human
uccuguaagcuuggguggcuc

SEQ ID NO: 502548 - RNA, 22 nt, Human
aguuauauaacuaucuagaugc

SEQ ID NO: 502549 - RNA, 22 nt, Human
agguccuggacugcucuuguua

SEQ ID NO: 502550 - RNA, 22 nt, Human
caauaauauccugugcuguuug

SEQ ID NO: 502551 - RNA, 22 nt, Human
uccagagcagguggucagaagg

SEQ ID NO: 502552 - RNA, 22 nt, Human
cugaggccguuggugggccuua

SEQ ID NO: 502553 - RNA, 22 nt, Human
guccagagaggcaggaggcuac

SEQ ID NO: 502554 - RNA, 22 nt, Human
auuauuauuguugauguuaggg

SEQ ID NO: 502555 - RNA, 22 nt, Human
aggcccugaagucggccccuca

SEQ ID NO: 502556 - RNA, 22 nt, Human
cuguggaguggggaguacuggu

SEQ ID NO: 502557 - RNA, 22 nt, Human
caggcagcaucagucugcugua

SEQ ID NO: 502558 - RNA, 22 nt, Human
caucaucuggcuuuuagaaaaa

SEQ ID NO: 502559 - RNA, 22 nt, Human
ucagcaggcacggacaggcugc

SEQ ID NO: 502560 - RNA, 22 nt, Human
caaauagacuucaaucucuuga

SEQ ID NO: 502561 - RNA, 22 nt, Human
aaaugguaagacaacacauuau

SEQ ID NO: 502562 - RNA, 22 nt, Human
ugucccugauccacuggacccc

SEQ ID NO: 502563 - RNA, 22 nt, Human
cucuuuguggccaccuaaucuu

SEQ ID NO: 502564 - RNA, 22 nt, Human
uuugaaagcaccauuugaguag

SEQ ID NO: 502565 - RNA, 22 nt, Human
gggcacagucugcagcccccca

SEQ ID NO: 502566 - RNA, 22 nt, Human
aucuacucaguaacugcuuagg

SEQ ID NO: 502567 - RNA, 22 nt, Human
aagcagaugccaagauuuacca

SEQ ID NO: 502568 - RNA, 22 nt, Human
ucucuggcagacaccucccuga

SEQ ID NO: 502569 - RNA, 22 nt, Human
ccuucauugcaucuuuaagaga

SEQ ID NO: 502570 - RNA, 22 nt, Human
acacaguaaauauguauugaau

SEQ ID NO: 502571 - RNA, 22 nt, Human
ucuggccaacaaaaacuaaguc

SEQ ID NO: 502572 - RNA, 22 nt, Human
uuagcugcauuaucaaaguuau

SEQ ID NO: 502573 - RNA, 22 nt, Human
uugaagaggacuuugcagcugu

SEQ ID NO: 502574 - RNA, 22 nt, Human
ccagccuggagggcaguggugg

SEQ ID NO: 502575 - RNA, 22 nt, Human
uccaggcaucuguauuuuuuaa

SEQ ID NO: 502576 - RNA, 22 nt, Human
ucuguucauuugccucggcucu

SEQ ID NO: 502577 - RNA, 22 nt, Human
ccagggcaucacauccaguguu

SEQ ID NO: 502578 - RNA, 22 nt, Human
gggauggcucaaaggagucagg

SEQ ID NO: 502579 - RNA, 22 nt, Human
aaaguagaguuguggaauuacu

SEQ ID NO: 502580 - RNA, 22 nt, Human
cagaggcaggaagaugggcagu

SEQ ID NO: 502581 - RNA, 22 nt, Human
uugaaugaguguuuuacucaug

SEQ ID NO: 502582 - RNA, 22 nt, Human
uagaaucuaguucauucauuug

SEQ ID NO: 502583 - RNA, 21 nt, Human
ugcugccaucaugcagagaug

SEQ ID NO: 502584 - RNA, 22 nt, Human
uccuauugguagacauuucugu

SEQ ID NO: 502585 - RNA, 22 nt, Human
uuuauauuguaaaaaugguucu

SEQ ID NO: 502586 - RNA, 20 nt, Human
aggcacuguugucuguaucc

SEQ ID NO: 502587 - RNA, 22 nt, Human
gcccacacaccagcucaggagg

SEQ ID NO: 502588 - RNA, 22 nt, Human
cuugccuucuguuccuauagaa

SEQ ID NO: 502589 - RNA, 22 nt, Human
cucuuccucucaugcggucaua

SEQ ID NO: 502590 - RNA, 19 nt, Human
cccucaggucugagcaguc

SEQ ID NO: 502591 - RNA, 22 nt, Human
ucugugcugucucagagaaagc

SEQ ID NO: 502592 - RNA, 22 nt, Human
uauguugaucauagguaaaaga

SEQ ID NO: 502593 - RNA, 22 nt, Human
ugucacauugaauaugauuuau

SEQ ID NO: 502594 - RNA, 22 nt, Human
guguccaucagcagccacugug

SEQ ID NO: 502595 - RNA, 22 nt, Human
gcagggcugcagagggcacugu

SEQ ID NO: 502596 - RNA, 22 nt, Human
uccagggcugacuugggagagg

SEQ ID NO: 502597 - RNA, 22 nt, Human
gacugccagaaugugaggccug

SEQ ID NO: 502598 - RNA, 22 nt, Human
caguccugagccaaucaugaug

SEQ ID NO: 502599 - RNA, 22 nt, Human
cugugccacugccccaggccuc

SEQ ID NO: 502600 - RNA, 22 nt, Human
aaauagaauuaacuagcuacug

SEQ ID NO: 502601 - RNA, 23 nt, Human
cccuguagcccaggacaggcuuu

SEQ ID NO: 502602 - RNA, 22 nt, Human
guuuagaaaauagugaagcaag

SEQ ID NO: 502603 - RNA, 22 nt, Human
uuuccucugacugcuccccugc

SEQ ID NO: 502604 - RNA, 22 nt, Human
caaaagucuuccuauucucuua

SEQ ID NO: 502605 - RNA, 22 nt, Human
agguuucugcuguccuccuucu

SEQ ID NO: 502606 - RNA, 22 nt, Human
ugaaggaaagagggaacauccc

SEQ ID NO: 502607 - RNA, 22 nt, Human
augggugugaaaauggucaucu

SEQ ID NO: 502608 - RNA, 22 nt, Human
aacagacagaaaaaugugaucu

SEQ ID NO: 502609 - RNA, 22 nt, Human
gcagaggcacagccccagauga

SEQ ID NO: 502610 - RNA, 22 nt, Human
agcagagacaugaaauaugcuu

SEQ ID NO: 502611 - RNA, 22 nt, Human
cagaggcucagauggcccuggc

SEQ ID NO: 502612 - RNA, 22 nt, Human
agcuucuguucaucuuccaggc

SEQ ID NO: 502613 - RNA, 18 nt, Human
cagacacucugcucugca

SEQ ID NO: 502614 - RNA, 22 nt, Human
uuccucuggggccaggccaaca

SEQ ID NO: 502615 - RNA, 22 nt, Human
ucucuggguaugguaacguugg

SEQ ID NO: 502616 - RNA, 23 nt, Human
ucuugaaaagccuacagcaguuc

SEQ ID NO: 502617 - RNA, 22 nt, Human
uccuagaaucuuuguaagauug

SEQ ID NO: 502618 - RNA, 22 nt, Human
aggggugaaagagggcccucaa

SEQ ID NO: 502619 - RNA, 22 nt, Human
gcugcaggggggucuggacuug

SEQ ID NO: 502620 - RNA, 20 nt, Human
uggaggcaccuguggagauc

SEQ ID NO: 502621 - RNA, 22 nt, Human
agcugggaugauaaccucaguc

SEQ ID NO: 502622 - RNA, 22 nt, Human
auaaggaaaugaaacucuaaua

SEQ ID NO: 502623 - RNA, 22 nt, Human
gcagcaggagaguaauagcggu

SEQ ID NO: 502624 - RNA, 22 nt, Human
ugcugucuuccaggauggugaa

SEQ ID NO: 502625 - RNA, 22 nt, Human
cacagugcaugaugggcagaag

SEQ ID NO: 502626 - RNA, 22 nt, Human
augcagaauugcuaaguaucug

SEQ ID NO: 502627 - RNA, 22 nt, Human
uuuuuauaugaaggauagugcg

SEQ ID NO: 502628 - RNA, 22 nt, Human
uggggcagcuccaucuauucca

SEQ ID NO: 502629 - RNA, 22 nt, Human
aucuucaacuugaucauuugaa

SEQ ID NO: 502630 - RNA, 22 nt, Human
aaugaucuacucucauuaucuc

SEQ ID NO: 502631 - RNA, 22 nt, Human
uaccuguugucacgauaacacu

SEQ ID NO: 502632 - RNA, 21 nt, Human
agucuggggaagggaucccag

SEQ ID NO: 502633 - RNA, 22 nt, Human
uguccucuaauuggccucuugc

SEQ ID NO: 502634 - RNA, 22 nt, Human
ucuggugucaguauucuuugaa

SEQ ID NO: 502635 - RNA, 22 nt, Human
agaugguaaucacauuuaucug

SEQ ID NO: 502636 - RNA, 22 nt, Human
cugggagaggcugcuccgcucu

SEQ ID NO: 502637 - RNA, 22 nt, Human
gaggaaggucccaucagaauuu

SEQ ID NO: 502638 - RNA, 22 nt, Human
uggcaggguacaccuuaacacc

SEQ ID NO: 502639 - RNA, 22 nt, Human
gaagaagcaggaguguguagca

SEQ ID NO: 502640 - RNA, 22 nt, Human
caggucuguuuccaucagugcu

SEQ ID NO: 502641 - RNA, 22 nt, Human
gccucugcucggacuuugccuc

SEQ ID NO: 502642 - RNA, 22 nt, Human
guuuuuaucuaauagcaguuau

SEQ ID NO: 502643 - RNA, 22 nt, Human
uugaagcauuugcuauagcauu

SEQ ID NO: 502644 - RNA, 22 nt, Human
ccauccuaucugaccuacuugu

SEQ ID NO: 502645 - RNA, 22 nt, Human
gcacccaggccggcgacugcag

SEQ ID NO: 502646 - RNA, 22 nt, Human
ucucaucauuccuucaaagccc

SEQ ID NO: 502647 - RNA, 22 nt, Human
uuuguuuagaugguaaaucagu

SEQ ID NO: 502648 - RNA, 22 nt, Human
ugggcagggagcuggaaccaca

SEQ ID NO: 502649 - RNA, 22 nt, Human
aagcuucauuucaacucagggg

SEQ ID NO: 502650 - RNA, 22 nt, Human
caaggagaguaauugaaugaga

SEQ ID NO: 502651 - RNA, 20 nt, Human
aggaaggaaguuugcaugga

SEQ ID NO: 502652 - RNA, 22 nt, Human
agcugguggauuaugcuguaca

SEQ ID NO: 502653 - RNA, 22 nt, Human
agcugguaaaggggaaagcaga

SEQ ID NO: 502654 - RNA, 22 nt, Human
gggccaggaguggagauauggg

SEQ ID NO: 502655 - RNA, 22 nt, Human
ucaaaaauaagauauucuggac

SEQ ID NO: 502656 - RNA, 22 nt, Human
acaugauuaaaagauuuuaaag

SEQ ID NO: 502657 - RNA, 22 nt, Human
gaauuccacuuuggcuuuuggg

SEQ ID NO: 502658 - RNA, 16 nt, Human
uucucugggguugugc

SEQ ID NO: 502659 - RNA, 22 nt, Human
cauuugaauuguucugugggaa

SEQ ID NO: 502660 - RNA, 22 nt, Human
ggcugcuugcuguuucuuggau

SEQ ID NO: 502661 - RNA, 22 nt, Human
aggggcaggugcugcacuuaga

SEQ ID NO: 502662 - RNA, 22 nt, Human
uuuucuaaaagaagucacugau

SEQ ID NO: 502663 - RNA, 22 nt, Human
gugcuuuccauccucccugcug

SEQ ID NO: 502664 - RNA, 22 nt, Human
uuuuucauauuccccucucugg

SEQ ID NO: 502665 - RNA, 22 nt, Human
aaaugcauugguuucuacuugu

SEQ ID NO: 502666 - RNA, 22 nt, Human
ucagaccauccugcuguuagug

SEQ ID NO: 502667 - RNA, 22 nt, Human
uuuaauuguuguggguacauag

SEQ ID NO: 502668 - RNA, 22 nt, Human
agcugcaggccucuccugggga

SEQ ID NO: 502669 - RNA, 22 nt, Human
caugcacuuaccugaaauucaa

SEQ ID NO: 502670 - RNA, 22 nt, Human
cuggcagccaagugggauacuc

SEQ ID NO: 502671 - RNA, 22 nt, Human
ucuuuccucugagcuccuguag

SEQ ID NO: 502672 - RNA, 22 nt, Human
gcauuauuaauagcugcaugag

SEQ ID NO: 502673 - RNA, 22 nt, Human
ggcaggcuggcuuuguuccagg

SEQ ID NO: 502674 - RNA, 22 nt, Human
acugucuccucaucaugccugg

SEQ ID NO: 502675 - RNA, 22 nt, Human
uagguagggaccaccuugggga

SEQ ID NO: 502676 - RNA, 22 nt, Human
ugcccugggaggcuuuccuguu

SEQ ID NO: 502677 - RNA, 22 nt, Human
acacccuuguccauagcagaug

SEQ ID NO: 502678 - RNA, 22 nt, Human
aagaacauuuuguagaaugaca

SEQ ID NO: 502679 - RNA, 22 nt, Human
gccaccugcgggccguggugga

SEQ ID NO: 502680 - RNA, 22 nt, Human
aagcuuuaugacuuggagacag

SEQ ID NO: 502681 - RNA, 22 nt, Human
ugaaucaaagcugaaguuuuca

SEQ ID NO: 502682 - RNA, 23 nt, Human
auuuacagcugugugagcaaguu

SEQ ID NO: 502683 - RNA, 18 nt, Human
gcuccuggaccaggucac

SEQ ID NO: 502684 - RNA, 22 nt, Human
gagcuuggugcacagugguuaa

SEQ ID NO: 502685 - RNA, 22 nt, Human
uuccagcuaacucacaucccuu

SEQ ID NO: 502686 - RNA, 22 nt, Human
agaaagcacucugucuuuuacc

SEQ ID NO: 502687 - RNA, 22 nt, Human
uaagaguuacugguuuagaacc

SEQ ID NO: 502688 - RNA, 22 nt, Human
uuggaauuccuguuguuucguc

SEQ ID NO: 502689 - RNA, 22 nt, Human
aggucaagaguaaauuugggua

SEQ ID NO: 502690 - RNA, 22 nt, Human
ugaguucucacccauucuucuu

SEQ ID NO: 502691 - RNA, 22 nt, Human
gguggcugaaucaaaucaggcc

SEQ ID NO: 502692 - RNA, 22 nt, Human
aaagccuuugucucaggcucug

SEQ ID NO: 502693 - RNA, 20 nt, Human
caccuucaaauuuccuggca

SEQ ID NO: 502694 - RNA, 19 nt, Human
acugugcucgggaaccacu

SEQ ID NO: 502695 - RNA, 22 nt, Human
cuggaaggguacauaggaaacu

SEQ ID NO: 502696 - RNA, 22 nt, Human
aagucacaagcauauaugcauu

SEQ ID NO: 502697 - RNA, 22 nt, Human
cagucucagaggugggaguggg

SEQ ID NO: 502698 - RNA, 22 nt, Human
uuccacuuaguggaagggcaug

SEQ ID NO: 502699 - RNA, 22 nt, Human
cugagggagaagucacgggcag

SEQ ID NO: 502700 - RNA, 22 nt, Human
accugccagaauccaagccaca

SEQ ID NO: 502701 - RNA, 22 nt, Human
cccaggcucagacuggcuuguu

SEQ ID NO: 502702 - RNA, 22 nt, Human
ucacauuuuaucuauuuuaagu

SEQ ID NO: 502703 - RNA, 22 nt, Human
uggguccuaaaugcagucacau

SEQ ID NO: 502704 - RNA, 22 nt, Human
gccuuaauugcagagcaauaua

SEQ ID NO: 502705 - RNA, 22 nt, Human
aagcaggauggagguugaguua

SEQ ID NO: 502706 - RNA, 22 nt, Human
gcuggcugcgucaucacagggc

SEQ ID NO: 502707 - RNA, 22 nt, Human
agaggccuaauugcuacccuuu

SEQ ID NO: 502708 - RNA, 21 nt, Human
uggcauggagguagcagugug

SEQ ID NO: 502709 - RNA, 22 nt, Human
cuuguuuuggcuaguaugaugu

SEQ ID NO: 502710 - RNA, 22 nt, Human
uugucugaaccaucucccuggc

SEQ ID NO: 502711 - RNA, 22 nt, Human
ugacaguuaagguauacauuca

SEQ ID NO: 502712 - RNA, 22 nt, Human
acacaggggaaaguggagcuga

SEQ ID NO: 502713 - RNA, 22 nt, Human
uggcagagguauauugggagga

SEQ ID NO: 502714 - RNA, 23 nt, Human
gcugagguacauuuacaggaaga

SEQ ID NO: 502715 - RNA, 22 nt, Human
gcuguaaagaacauuaggaauc

SEQ ID NO: 502716 - RNA, 22 nt, Human
cucagucucuugggcugugaag

SEQ ID NO: 502717 - RNA, 22 nt, Human
cagcaauaagguaagcuucucc

SEQ ID NO: 502718 - RNA, 22 nt, Human
gagagucuagugcaccuaguuu

SEQ ID NO: 502719 - RNA, 22 nt, Human
gacucugugggaggaggcucag

SEQ ID NO: 502720 - RNA, 22 nt, Human
agcuacucagaguuccacucua

SEQ ID NO: 502721 - RNA, 22 nt, Human
cucccagggccaucgagucacu

SEQ ID NO: 502722 - RNA, 22 nt, Human
gggcaggagagggccaccugga

SEQ ID NO: 502723 - RNA, 22 nt, Human
aggggccuggacauggacgcgc

SEQ ID NO: 502724 - RNA, 22 nt, Human
aaauagaauuggaagcagaguu

SEQ ID NO: 502725 - RNA, 20 nt, Human
ugccagggccagcagaggcu

SEQ ID NO: 502726 - RNA, 22 nt, Human
cuggguauaggaaacaguuaag

SEQ ID NO: 502727 - RNA, 22 nt, Human
ccagcucuaaacggcucugugg

SEQ ID NO: 502728 - RNA, 17 nt, Human
cccugccaccaggaagc

SEQ ID NO: 502729 - RNA, 19 nt, Human
aggcugcaagguggugggc

SEQ ID NO: 502730 - RNA, 17 nt, Human
ucaggauguagcaguag

SEQ ID NO: 502731 - RNA, 22 nt, Human
caggaaaugcuaucauagcuga

SEQ ID NO: 502732 - RNA, 22 nt, Human
ugcauuaaggccauugaaauuu

SEQ ID NO: 502733 - RNA, 22 nt, Human
aagaguuuccaugcucugugcu

SEQ ID NO: 502734 - RNA, 22 nt, Human
cuggccuggggggacacauccc

SEQ ID NO: 502735 - RNA, 22 nt, Human
aagaugaaucaguauguguccu

SEQ ID NO: 502736 - RNA, 22 nt, Human
uacauuuauaaggcuucucugu

SEQ ID NO: 502737 - RNA, 22 nt, Human
ugccagcuccgaggagcugcag

SEQ ID NO: 502738 - RNA, 22 nt, Human
guccugggcccaggggcugccu

SEQ ID NO: 502739 - RNA, 21 nt, Human
cugcucuggggaccggcugug

SEQ ID NO: 502740 - RNA, 22 nt, Human
ugucccagaucacaggagggga

SEQ ID NO: 502741 - RNA, 22 nt, Human
uacauguucaaauuugucuuuc

SEQ ID NO: 502742 - RNA, 22 nt, Human
ccuaaguauuuucaguguuaac

SEQ ID NO: 502743 - RNA, 22 nt, Human
ucuggcuccacuuucuucauuu

SEQ ID NO: 502744 - RNA, 22 nt, Human
ucucacuggguauaaaugagua

SEQ ID NO: 502745 - RNA, 22 nt, Human
cucagggucugguccuuagauu

SEQ ID NO: 502746 - RNA, 22 nt, Human
ugggccuccuccgacagccggg

SEQ ID NO: 502747 - RNA, 22 nt, Human
uccugacuccagguccugugug

SEQ ID NO: 502748 - RNA, 23 nt, Human
cuuuucauugccuuagcgcagag

SEQ ID NO: 502749 - RNA, 22 nt, Human
ccugcaggcugcaggccaguuc

SEQ ID NO: 502750 - RNA, 22 nt, Human
gcaaagaaaugucagugagagg

SEQ ID NO: 502751 - RNA, 22 nt, Human
cuccuggacauggagcggagga

SEQ ID NO: 502752 - RNA, 22 nt, Human
gcacagguugcaaaaguucaca

SEQ ID NO: 502753 - RNA, 20 nt, Human
ugaagcagccuugauucugu

SEQ ID NO: 502754 - RNA, 22 nt, Human
guauacauagaugaugaacaag

SEQ ID NO: 502755 - RNA, 22 nt, Human
ccacagggccuuuccugcuggc

SEQ ID NO: 502756 - RNA, 22 nt, Human
cagcugccagcuucucuccauc

SEQ ID NO: 502757 - RNA, 22 nt, Human
cauuugaaccuggauguucuua

SEQ ID NO: 502758 - RNA, 23 nt, Human
aggaagcuaaguguggcugcgga

SEQ ID NO: 502759 - RNA, 22 nt, Human
auggggugaccaugagcauuua

SEQ ID NO: 502760 - RNA, 21 nt, Human
agaguuacugucauccuaggu

SEQ ID NO: 502761 - RNA, 22 nt, Human
ugggcagaauugugguaguuaa

SEQ ID NO: 502762 - RNA, 20 nt, Human
cccucugcacauggcugugg

SEQ ID NO: 502763 - RNA, 22 nt, Human
ccaggcaucacgggcauguggc

SEQ ID NO: 502764 - RNA, 22 nt, Human
ugcccuugaggacagcucccag

SEQ ID NO: 502765 - RNA, 22 nt, Human
gagcaguugggcucuaggaagu

SEQ ID NO: 502766 - RNA, 22 nt, Human
uucauauauaugcacuacguac

SEQ ID NO: 502767 - RNA, 22 nt, Human
ccucccugcuccucaacuggca

SEQ ID NO: 502768 - RNA, 22 nt, Human
cauggcagcuuugggaggagga

SEQ ID NO: 502769 - RNA, 22 nt, Human
agcaggggucucugcuaaugaa

SEQ ID NO: 502770 - RNA, 22 nt, Human
uuuauauccaucuuugaaguaa

SEQ ID NO: 502771 - RNA, 22 nt, Human
agggaaaguaagcauuucauua

SEQ ID NO: 502772 - RNA, 22 nt, Human
auguccuuccauuuugaucugu

SEQ ID NO: 502773 - RNA, 22 nt, Human
ucugacccguggcucugccucc

SEQ ID NO: 502774 - RNA, 22 nt, Human
acacugcagaugaaagcauaag

SEQ ID NO: 502775 - RNA, 22 nt, Human
aguggcugacaacuggguuaac

SEQ ID NO: 502776 - RNA, 22 nt, Human
cuguggagguaggagcaggaca

SEQ ID NO: 502777 - RNA, 22 nt, Human
auucagcaguuccugcuucagu

SEQ ID NO: 502778 - RNA, 21 nt, Human
cucaaagaccaaaaguguaga

SEQ ID NO: 502779 - RNA, 22 nt, Human
ugcagcugguuuagaacuagau

SEQ ID NO: 502780 - RNA, 22 nt, Human
agauggaguuaguaccagaguc

SEQ ID NO: 502781 - RNA, 22 nt, Human
gaacaaacacaucccagcagug

SEQ ID NO: 502782 - RNA, 22 nt, Human
caaaggaagcuccuugauggcg

SEQ ID NO: 502783 - RNA, 22 nt, Human
ccagcugcaggggagcagugga

SEQ ID NO: 502784 - RNA, 22 nt, Human
uccaggaugcccgcuuuugcuu

SEQ ID NO: 502785 - RNA, 22 nt, Human
caauuucuuguuaauucucagg

SEQ ID NO: 502786 - RNA, 22 nt, Human
cugcccagaagcuuagagcuua

SEQ ID NO: 502787 - RNA, 22 nt, Human
gccugagcccaggugugcagag

SEQ ID NO: 502788 - RNA, 22 nt, Human
uccugggaguaauugagucaug

SEQ ID NO: 502789 - RNA, 22 nt, Human
gcuuuuauuucuucacaaaagu

SEQ ID NO: 502790 - RNA, 22 nt, Human
ggguccagcuacaucagggugg

SEQ ID NO: 502791 - RNA, 22 nt, Human
gagacugggggcuuggccuuuu

SEQ ID NO: 502792 - RNA, 21 nt, Human
ugcaggaaagugcugcgaccc

SEQ ID NO: 502793 - RNA, 22 nt, Human
aaaagaugaaauggugucuugg

SEQ ID NO: 502794 - RNA, 22 nt, Human
ccuggagcaggagcugcagagg

SEQ ID NO: 502795 - RNA, 22 nt, Human
aaagcagucucagacuuaagca

SEQ ID NO: 502796 - RNA, 22 nt, Human
cggcacagccgggcaaggcugg

SEQ ID NO: 502797 - RNA, 22 nt, Human
aguggcuguacuauuuuuucau

SEQ ID NO: 502798 - RNA, 20 nt, Human
ccuggcugcauucaggacgg

SEQ ID NO: 502799 - RNA, 21 nt, Human
ugcagccauucagcccuaugc

SEQ ID NO: 502800 - RNA, 22 nt, Human
ggagaggugagagguacaaguu

SEQ ID NO: 502801 - RNA, 22 nt, Human
auucauuuagguauucacuuac

SEQ ID NO: 502802 - RNA, 22 nt, Human
agaaagaggaugcagaucucau

SEQ ID NO: 502803 - RNA, 22 nt, Human
gcaaggcugcugccacccaucu

SEQ ID NO: 502804 - RNA, 22 nt, Human
agagucugccuuuuucuccugc

SEQ ID NO: 502805 - RNA, 21 nt, Human
uggaccuguccuucucgcugu

SEQ ID NO: 502806 - RNA, 22 nt, Human
gaaauauugggacucagagcuu

SEQ ID NO: 502807 - RNA, 22 nt, Human
gggcaagugucaagcaugucau

SEQ ID NO: 502808 - RNA, 22 nt, Human
ucccugugggaugaggacucug

SEQ ID NO: 502809 - RNA, 22 nt, Human
aaggaaaggaugagcaugcauu

SEQ ID NO: 502810 - RNA, 22 nt, Human
acucaggaauggggcugggacu

SEQ ID NO: 502811 - RNA, 18 nt, Human
uacagcuugaguugacug

SEQ ID NO: 502812 - RNA, 22 nt, Human
aggcaaaauuacaaaguuauua

SEQ ID NO: 502813 - RNA, 22 nt, Human
cccagcccacgguccugggugg

SEQ ID NO: 502814 - RNA, 22 nt, Human
uuuacucuugcuacacaacugu

SEQ ID NO: 502815 - RNA, 22 nt, Human
acacugugagcugaagggcugc

SEQ ID NO: 502816 - RNA, 22 nt, Human
uuacaagauaaccugaugcugu

SEQ ID NO: 502817 - RNA, 22 nt, Human
guguggcugauugacaugguca

SEQ ID NO: 502818 - RNA, 22 nt, Human
uaaaugugucuauggacccgcc

SEQ ID NO: 502819 - RNA, 22 nt, Human
aaaccuuuaccagacuagcaag

SEQ ID NO: 502820 - RNA, 22 nt, Human
ugcaggucucugcaaggccuau

SEQ ID NO: 502821 - RNA, 22 nt, Human
agucucugucguagaucagcgu

SEQ ID NO: 502822 - RNA, 22 nt, Human
uaccuggggcugggcuuugauu

SEQ ID NO: 502823 - RNA, 22 nt, Human
ggauggagaugaccauggugac

SEQ ID NO: 502824 - RNA, 22 nt, Human
cugugacagagcuugagugaga

SEQ ID NO: 502825 - RNA, 22 nt, Human
caaaaggcaggggaaagagugc

SEQ ID NO: 502826 - RNA, 22 nt, Human
ugccuggguucccaccccaaag

SEQ ID NO: 502827 - RNA, 22 nt, Human
ggccccuggcaccaggcugauu

SEQ ID NO: 502828 - RNA, 20 nt, Human
uuucagagugucuuuccauu

SEQ ID NO: 502829 - RNA, 22 nt, Human
acuguguguuugucuagcacag

SEQ ID NO: 502830 - RNA, 22 nt, Human
auaugaaaauguuuuagcugua

SEQ ID NO: 502831 - RNA, 22 nt, Human
acacaugcauaagccuucccuu

SEQ ID NO: 502832 - RNA, 22 nt, Human
cagagcugauuggauccagaga

SEQ ID NO: 502833 - RNA, 22 nt, Human
ugagcaguaggucugaauagug

SEQ ID NO: 502834 - RNA, 22 nt, Human
agaggaggcucugggaucgucc

SEQ ID NO: 502835 - RNA, 20 nt, Human
ccucucugaagaggucaucu

SEQ ID NO: 502836 - RNA, 22 nt, Human
ucuuugaaaagauauuccuccu

SEQ ID NO: 502837 - RNA, 22 nt, Human
cccaggucuaugccagcucuga

SEQ ID NO: 502838 - RNA, 22 nt, Human
uuguggcucaucuucagcuccc

SEQ ID NO: 502839 - RNA, 22 nt, Human
uaaaacaccuguagugucugcc

SEQ ID NO: 502840 - RNA, 22 nt, Human
uuuuccucugcagagcaguuag

SEQ ID NO: 502841 - RNA, 22 nt, Human
uuuccuuugcccaauacauguc

SEQ ID NO: 502842 - RNA, 21 nt, Human
acagaugggaugagcacacug

SEQ ID NO: 502843 - RNA, 21 nt, Human
aucagaaucucuagauuugga

SEQ ID NO: 502844 - RNA, 21 nt, Human
cuguggccuggcuagcaccgu

SEQ ID NO: 502845 - RNA, 22 nt, Human
caacauguguuagacaauagac

SEQ ID NO: 502846 - RNA, 22 nt, Human
aggaaaaucgagucuggaggca

SEQ ID NO: 502847 - RNA, 22 nt, Human
auuauugugauaggugucagug

SEQ ID NO: 502848 - RNA, 22 nt, Human
gcugccuucccaggccuuugcu

SEQ ID NO: 502849 - RNA, 22 nt, Human
agcugguucauucauucauggu

SEQ ID NO: 502850 - RNA, 22 nt, Human
ccagcuugaagaugugcugguu

SEQ ID NO: 502851 - RNA, 22 nt, Human
ucccugugagaaaugaagcagg

SEQ ID NO: 502852 - RNA, 22 nt, Human
uguauauucugccuaaaagcuu

SEQ ID NO: 502853 - RNA, 19 nt, Human
acucaagucuaaugaaauc

SEQ ID NO: 502854 - RNA, 22 nt, Human
cucuggagcauuucaccuacau

SEQ ID NO: 502855 - RNA, 22 nt, Human
gagccagccgcaagagcuguga

SEQ ID NO: 502856 - RNA, 23 nt, Human
agcuggguggccugcgugaagcu

SEQ ID NO: 502857 - RNA, 22 nt, Human
cacaggaggaggugcccgggcc

SEQ ID NO: 502858 - RNA, 22 nt, Human
aaaugcucuggggauaagacug

SEQ ID NO: 502859 - RNA, 22 nt, Human
ggagcuguaacgagccauugcu

SEQ ID NO: 502860 - RNA, 22 nt, Human
uguaugaaucucauuuguuuaa

SEQ ID NO: 502861 - RNA, 22 nt, Human
uucuaccagcuacucacugaua

SEQ ID NO: 502862 - RNA, 22 nt, Human
cugggccucacacccaccaaau

SEQ ID NO: 502863 - RNA, 22 nt, Human
gggcaggucugggucagccuga

SEQ ID NO: 502864 - RNA, 22 nt, Human
agaagcugacagaugcagcagg

SEQ ID NO: 502865 - RNA, 22 nt, Human
cucacugcaaguuccaccuacc

SEQ ID NO: 502866 - RNA, 22 nt, Human
gucaggaucucccaguacauau

SEQ ID NO: 502867 - RNA, 22 nt, Human
gagcuuccugaugccgaccagu

SEQ ID NO: 502868 - RNA, 22 nt, Human
uccaauaacaucuaaaaacuua

SEQ ID NO: 502869 - RNA, 22 nt, Human
uuguuuuaaccuaguguuuaug

SEQ ID NO: 502870 - RNA, 22 nt, Human
aaagacuuucaccuagcaaaga

SEQ ID NO: 502871 - RNA, 22 nt, Human
cugaggccgucugggucugcag

SEQ ID NO: 502872 - RNA, 20 nt, Human
uggccaccacuguauaucaa

SEQ ID NO: 502873 - RNA, 22 nt, Human
acuggggcagugggcagugguu

SEQ ID NO: 502874 - RNA, 22 nt, Human
uuuugagauggugucucgcucc

SEQ ID NO: 502875 - RNA, 22 nt, Human
agggcuccaggggaccaucagu

SEQ ID NO: 502876 - RNA, 22 nt, Human
ggcagccuccagggcacuggug

SEQ ID NO: 502877 - RNA, 22 nt, Human
gggucagcugcugggggcugac

SEQ ID NO: 502878 - RNA, 22 nt, Human
ugguaaauauguccauucucuu

SEQ ID NO: 502879 - RNA, 22 nt, Human
aucaauaucagaucagacagga

SEQ ID NO: 502880 - RNA, 22 nt, Human
uggcuccguuguacaggcugga

SEQ ID NO: 502881 - RNA, 22 nt, Human
uugcaauuaacauaugucaacu

SEQ ID NO: 502882 - RNA, 22 nt, Human
ggagcagacauaaccuuacaga

SEQ ID NO: 502883 - RNA, 22 nt, Human
cugccuguuuucugauagauuu

SEQ ID NO: 502884 - RNA, 22 nt, Human
agguccagguuccguuucugcg

SEQ ID NO: 502885 - RNA, 22 nt, Human
aggcagaagccagccagggucc

SEQ ID NO: 502886 - RNA, 22 nt, Human
uuucaaggcuaguuuuaauuag

SEQ ID NO: 502887 - RNA, 22 nt, Human
ggagugggcagcacugcccugu

SEQ ID NO: 502888 - RNA, 22 nt, Human
gccagcugaaauuucaguucug

SEQ ID NO: 502889 - RNA, 19 nt, Human
cuggaaugauagagaccuc

SEQ ID NO: 502890 - RNA, 22 nt, Human
uccuucagaaccugugauggaa

SEQ ID NO: 502891 - RNA, 22 nt, Human
uagccaggcgaggucagugucg

SEQ ID NO: 502892 - RNA, 23 nt, Human
uuuggcauguuaacuucacuuac

SEQ ID NO: 502893 - RNA, 22 nt, Human
uggcuccaucauccaugcaaga

SEQ ID NO: 502894 - RNA, 18 nt, Human
uggcagagugucuguucu

SEQ ID NO: 502895 - RNA, 22 nt, Human
ccaguccugcucccugaccacc

SEQ ID NO: 502896 - RNA, 22 nt, Human
gggcauguacauaaucuagaaa

SEQ ID NO: 502897 - RNA, 22 nt, Human
auauaguuggguuucauucuac

SEQ ID NO: 502898 - RNA, 22 nt, Human
aggcagguuggugagaagacug

SEQ ID NO: 502899 - RNA, 23 nt, Human
acugggcuuaugaggaggcuugu

SEQ ID NO: 502900 - RNA, 18 nt, Human
uagcagcacuggccgcuu

SEQ ID NO: 502901 - RNA, 22 nt, Human
uucaguuucagucuugcaaaaa

SEQ ID NO: 502902 - RNA, 21 nt, Human
aagcagcuuaauaaaguaugu

SEQ ID NO: 502903 - RNA, 22 nt, Human
cuggccugugggcugucuccgg

SEQ ID NO: 502904 - RNA, 22 nt, Human
gucuggcauaugcaaagugcau

SEQ ID NO: 502905 - RNA, 22 nt, Human
cgggcagaucacacagggcuug

SEQ ID NO: 502906 - RNA, 22 nt, Human
uauaguaaaauuuucauuuaug

SEQ ID NO: 502907 - RNA, 22 nt, Human
uuucucuaaauagggaggcuua

SEQ ID NO: 502908 - RNA, 22 nt, Human
agccaggggauucaucagggac

SEQ ID NO: 502909 - RNA, 22 nt, Human
uguguacacaaugauugcagag

SEQ ID NO: 502910 - RNA, 22 nt, Human
ugaggcucaaggucugguggag

SEQ ID NO: 502911 - RNA, 19 nt, Human
caugagcugcucacuuccc

SEQ ID NO: 502912 - RNA, 22 nt, Human
acaaauccagugaacuccagug

SEQ ID NO: 502913 - RNA, 22 nt, Human
ucuguggcuuucuuauguugua

SEQ ID NO: 502914 - RNA, 22 nt, Human
uugacucauaccugccugaccc

SEQ ID NO: 502915 - RNA, 22 nt, Human
aagguccuguagccacagagcc

SEQ ID NO: 502916 - RNA, 22 nt, Human
cuggaagguggauggcgaggcc

SEQ ID NO: 502917 - RNA, 22 nt, Human
acagugcacauccugagugauu

SEQ ID NO: 502918 - RNA, 22 nt, Human
cuaggaaagacacagagaguuu

SEQ ID NO: 502919 - RNA, 22 nt, Human
agaugaagacucaggagcaggu

SEQ ID NO: 502920 - RNA, 22 nt, Human
cucugggcuuccuuuguggguu

SEQ ID NO: 502921 - RNA, 22 nt, Human
ucuucuuccuccacagggccca

SEQ ID NO: 502922 - RNA, 22 nt, Human
aaggguggauuucugagcucua

SEQ ID NO: 502923 - RNA, 22 nt, Human
cagccucuuuccacaucaggca

SEQ ID NO: 502924 - RNA, 22 nt, Human
gagcacagcuggagguagcauu

SEQ ID NO: 502925 - RNA, 19 nt, Human
ucauucaggaccaguggau

SEQ ID NO: 502926 - RNA, 22 nt, Human
ucacacagauugguagagcuga

SEQ ID NO: 502927 - RNA, 22 nt, Human
ugcugaauaaauaaagucuauu

SEQ ID NO: 502928 - RNA, 22 nt, Human
ccagagccggauugugaagugc

SEQ ID NO: 502929 - RNA, 22 nt, Human
gaagcagcuaggaucuucauuu

SEQ ID NO: 502930 - RNA, 22 nt, Human
uuugcaaauaccaugaaacuug

SEQ ID NO: 502931 - RNA, 22 nt, Human
uaaacagcuacugugucaaagg

SEQ ID NO: 502932 - RNA, 22 nt, Human
agucaguugcaaacaucaggca

SEQ ID NO: 502933 - RNA, 22 nt, Human
gaaauccaguucccuacucuua

SEQ ID NO: 502934 - RNA, 22 nt, Human
aucaggauagugguuaccuggg

SEQ ID NO: 502935 - RNA, 22 nt, Human
ucauuuacauagaaacaauaua

SEQ ID NO: 502936 - RNA, 22 nt, Human
ccugugaggucaucugugguaa

SEQ ID NO: 502937 - RNA, 22 nt, Human
ugagccuggggccugggcagcg

SEQ ID NO: 502938 - RNA, 22 nt, Human
uagagcaguuggcagcuguauu

SEQ ID NO: 502939 - RNA, 22 nt, Human
aauggcagaaugggccagaagc

SEQ ID NO: 502940 - RNA, 22 nt, Human
auaauuuaaauuaguaugugau

SEQ ID NO: 502941 - RNA, 22 nt, Human
gcuggcugccuuacuuugugga

SEQ ID NO: 502942 - RNA, 22 nt, Human
auuuuguggcagaugcagaacc

SEQ ID NO: 502943 - RNA, 22 nt, Human
agucucugugagcucccaaugg

SEQ ID NO: 502944 - RNA, 22 nt, Human
ggcagaccucuccagccccaca

SEQ ID NO: 502945 - RNA, 22 nt, Human
cagggcucuucaucacacagua

SEQ ID NO: 502946 - RNA, 22 nt, Human
ucucuuugacccuuuagcucca

SEQ ID NO: 502947 - RNA, 22 nt, Human
aacuuucuuucacagaaguauc

SEQ ID NO: 502948 - RNA, 22 nt, Human
ugggcuuugagcucggucaccu

SEQ ID NO: 502949 - RNA, 22 nt, Human
uagcagaggcuacugcuccuug

SEQ ID NO: 502950 - RNA, 17 nt, Human
ccaggcuauaccaggcu

SEQ ID NO: 502951 - RNA, 22 nt, Human
cucaggagacaguguccacaug

SEQ ID NO: 502952 - RNA, 22 nt, Human
caggccagcagggccuccgugg

SEQ ID NO: 502953 - RNA, 22 nt, Human
uuucuuugagucucaguuugcu

SEQ ID NO: 502954 - RNA, 22 nt, Human
ugcugucugauucagggugauu

SEQ ID NO: 502955 - RNA, 17 nt, Human
cucagaguugcuuuguc

SEQ ID NO: 502956 - RNA, 22 nt, Human
agcagauguuucagagcaggcu

SEQ ID NO: 502957 - RNA, 22 nt, Human
guccacagggauggccacacau

SEQ ID NO: 502958 - RNA, 20 nt, Human
ucucuggccagaaacaacag

SEQ ID NO: 502959 - RNA, 22 nt, Human
gucaggaugacaagugcuuuca

SEQ ID NO: 502960 - RNA, 22 nt, Human
ucugaauuuuaacuacacaaag

SEQ ID NO: 502961 - RNA, 22 nt, Human
auucaaaagaccaugcagacuc

SEQ ID NO: 502962 - RNA, 22 nt, Human
ugaaggaggaauguggccucca

SEQ ID NO: 502963 - RNA, 22 nt, Human
ccaggugguucaggucaccaua

SEQ ID NO: 502964 - RNA, 18 nt, Human
cucaguguuugcugaaaa

SEQ ID NO: 502965 - RNA, 22 nt, Human
agagccugucugccuuucuacc

SEQ ID NO: 502966 - RNA, 22 nt, Human
ucugcagguagagcucaggaau

SEQ ID NO: 502967 - RNA, 22 nt, Human
uguuucuugggugcucacauca

SEQ ID NO: 502968 - RNA, 22 nt, Human
aaugauauuuauugaauagaug

SEQ ID NO: 502969 - RNA, 22 nt, Human
uuugacuucugggcauuuuggu

SEQ ID NO: 502970 - RNA, 22 nt, Human
gaccaaggaagaggggagccag

SEQ ID NO: 502971 - RNA, 22 nt, Human
ccauaagguuuggggccaugca

SEQ ID NO: 502972 - RNA, 21 nt, Human
ggcccugguuacgccuccucu

SEQ ID NO: 502973 - RNA, 22 nt, Human
aggggacacggcuucuccaggg

SEQ ID NO: 502974 - RNA, 22 nt, Human
agccuggaauuaaggaaaugca

SEQ ID NO: 502975 - RNA, 21 nt, Human
acucccugcauaagugauuua

SEQ ID NO: 502976 - RNA, 22 nt, Human
cauuaaaauaucucaugguguu

SEQ ID NO: 502977 - RNA, 22 nt, Human
cagcucccagaacugaccaugu

SEQ ID NO: 502978 - RNA, 22 nt, Human
ugcagaggaccauuguccugga

SEQ ID NO: 502979 - RNA, 22 nt, Human
gugagggguggcugagcaguuu

SEQ ID NO: 502980 - RNA, 22 nt, Human
ugcagggcuaagucagagccug

SEQ ID NO: 502981 - RNA, 22 nt, Human
cuggagccccaggcugugcaga

SEQ ID NO: 502982 - RNA, 22 nt, Human
caaauccagaucccagucguag

SEQ ID NO: 502983 - RNA, 23 nt, Human
cagcuuucagggcuuuagggaag

SEQ ID NO: 502984 - RNA, 22 nt, Human
agccaggcugcaguuggcuggc

SEQ ID NO: 502985 - RNA, 22 nt, Human
uccugccucuugccuucuucac

SEQ ID NO: 502986 - RNA, 22 nt, Human
agauggaguuguagcagugacu

SEQ ID NO: 502987 - RNA, 22 nt, Human
ugcuguuauacuuagcugguua

SEQ ID NO: 502988 - RNA, 22 nt, Human
ucccagagccucugccacucug

SEQ ID NO: 502989 - RNA, 22 nt, Human
ggucagggggaucugugaggua

SEQ ID NO: 502990 - RNA, 22 nt, Human
auaagcuugauguaacuaacca

SEQ ID NO: 502991 - RNA, 22 nt, Human
cccagguccccaccugucugcu

SEQ ID NO: 502992 - RNA, 22 nt, Human
ggggcagauggaacagagcaca

SEQ ID NO: 502993 - RNA, 22 nt, Human
uggaggucgcuagcgagcgggc

SEQ ID NO: 502994 - RNA, 22 nt, Human
gggcugugagaguggggcugcu

SEQ ID NO: 502995 - RNA, 22 nt, Human
ugguacuuggaggcagaaaaau

SEQ ID NO: 502996 - RNA, 22 nt, Human
ugaaggccucugguacaugcca

SEQ ID NO: 502997 - RNA, 22 nt, Human
guuaucuuaggguacaaaggac

SEQ ID NO: 502998 - RNA, 22 nt, Human
ucaggucuauacuaugagaggc

SEQ ID NO: 502999 - RNA, 22 nt, Human
cugaggagcugaaggcccucca

SEQ ID NO: 503000 - RNA, 18 nt, Human
guuucaugcaugugaaac

SEQ ID NO: 503001 - RNA, 22 nt, Human
gcugccuucaguucugauucau

SEQ ID NO: 503002 - RNA, 22 nt, Human
cugccagccaggccagguaggc

SEQ ID NO: 503003 - RNA, 22 nt, Human
auacuuaugauaaauaauugcu

SEQ ID NO: 503004 - RNA, 22 nt, Human
agcuggguguucuugggccuaa

SEQ ID NO: 503005 - RNA, 22 nt, Human
cagaccagaaggaagccgacaa

SEQ ID NO: 503006 - RNA, 22 nt, Human
aggcaucugaguuugcaagcuu

SEQ ID NO: 503007 - RNA, 22 nt, Human
ggggaccuggccacccauccuu

SEQ ID NO: 503008 - RNA, 22 nt, Human
ugccugggccuucccaccucug

SEQ ID NO: 503009 - RNA, 22 nt, Human
ccucugggccuggaagggcagu

SEQ ID NO: 503010 - RNA, 22 nt, Human
aaaaaccucaauuacuuuugca

SEQ ID NO: 503011 - RNA, 22 nt, Human
uucccacagagauuacauugaa

SEQ ID NO: 503012 - RNA, 22 nt, Human
guccucugggagccuugagccu

SEQ ID NO: 503013 - RNA, 22 nt, Human
ugucucagggcagcagcagggg

SEQ ID NO: 503014 - RNA, 22 nt, Human
gcagauggcagcccaggcuggg

SEQ ID NO: 503015 - RNA, 22 nt, Human
uuguuuguaaggcucuuagaau

SEQ ID NO: 503016 - RNA, 22 nt, Human
ucucagugacugcugggucccc

SEQ ID NO: 503017 - RNA, 22 nt, Human
uguagaaauuaguaagaucaac

SEQ ID NO: 503018 - RNA, 22 nt, Human
acugaaauacugcucuuggauu

SEQ ID NO: 503019 - RNA, 22 nt, Human
ccagcuccccucagcagguaau

SEQ ID NO: 503020 - RNA, 20 nt, Human
uccugggguaagccaugguc

SEQ ID NO: 503021 - RNA, 20 nt, Human
gccagcacagggagcaguuc

SEQ ID NO: 503022 - RNA, 22 nt, Human
gccccucccagucaggagcacu

SEQ ID NO: 503023 - RNA, 22 nt, Human
uauuugcugaaucugauucaga

SEQ ID NO: 503024 - RNA, 22 nt, Human
ugaggcagcaauugauuauuca

SEQ ID NO: 503025 - RNA, 22 nt, Human
ccagucccaucucugucgcuua

SEQ ID NO: 503026 - RNA, 22 nt, Human
cagggccugcuuccuucuuguu

SEQ ID NO: 503027 - RNA, 22 nt, Human
caggguggaaaagcuaguugga

SEQ ID NO: 503028 - RNA, 22 nt, Human
ggcaaaaaccauaauuacuuuu

SEQ ID NO: 503029 - RNA, 22 nt, Human
gcagggacaacugugcaccuga

SEQ ID NO: 503030 - RNA, 22 nt, Human
ucacugaauacuugucucaucc

SEQ ID NO: 503031 - RNA, 22 nt, Human
ggugccaggcuguagucagggu

SEQ ID NO: 503032 - RNA, 22 nt, Human
cagcauggguuccgggggccug

SEQ ID NO: 503033 - RNA, 22 nt, Human
uauucccagccucuuucuaucu

SEQ ID NO: 503034 - RNA, 22 nt, Human
ugcuucaggagaugucaccaug

SEQ ID NO: 503035 - RNA, 22 nt, Human
uaacagaaaggggacagaaaua

SEQ ID NO: 503036 - RNA, 22 nt, Human
auguaacuguuauauuuuguug

SEQ ID NO: 503037 - RNA, 20 nt, Human
uugauucccucuaaacucgc

SEQ ID NO: 503038 - RNA, 22 nt, Human
ucgcugugaaaaccuuggacaa

SEQ ID NO: 503039 - RNA, 22 nt, Human
aggcuucccaagcagcugcaaa

SEQ ID NO: 503040 - RNA, 22 nt, Human
ucacuguagugagcagaauaua

SEQ ID NO: 503041 - RNA, 22 nt, Human
ugcauugcauuugucaugaaga

SEQ ID NO: 503042 - RNA, 22 nt, Human
ucugggcuuuaagaacucuguu

SEQ ID NO: 503043 - RNA, 22 nt, Human
cacaccagagguuaccugcaaa

SEQ ID NO: 503044 - RNA, 22 nt, Human
cuguauuuaguuaaaaugcuaa

SEQ ID NO: 503045 - RNA, 22 nt, Human
uggcucucaggccugcugcguu

SEQ ID NO: 503046 - RNA, 22 nt, Human
gggcuggaggagauccagaggc

SEQ ID NO: 503047 - RNA, 23 nt, Human
ucucuggccuuugaucagguuga

SEQ ID NO: 503048 - RNA, 22 nt, Human
agucccagcccaguccuguaag

SEQ ID NO: 503049 - RNA, 22 nt, Human
auauguguguauuucuuacuag

SEQ ID NO: 503050 - RNA, 22 nt, Human
uucauuccuucuguaccuugcc

SEQ ID NO: 503051 - RNA, 22 nt, Human
cagauuuagaguggggcuugga

SEQ ID NO: 503052 - RNA, 22 nt, Human
cuuugauauaaguauacauagu

SEQ ID NO: 503053 - RNA, 22 nt, Human
aaaaauguuaucuacuguccga

SEQ ID NO: 503054 - RNA, 22 nt, Human
gugucugcacauaggaucucaa

SEQ ID NO: 503055 - RNA, 22 nt, Human
cuggccacaugugugcugagca

SEQ ID NO: 503056 - RNA, 22 nt, Human
ucagagagugcaaaauauagcu

SEQ ID NO: 503057 - RNA, 19 nt, Human
uuagaaacuguugacacug

SEQ ID NO: 503058 - RNA, 22 nt, Human
acaaauagagauucaaauaaag

SEQ ID NO: 503059 - RNA, 22 nt, Human
cuucauuuggagaacugugcuu

SEQ ID NO: 503060 - RNA, 22 nt, Human
aggagcugcauggauaccuggu

SEQ ID NO: 503061 - RNA, 22 nt, Human
cugugugcucggauggacucgu

SEQ ID NO: 503062 - RNA, 22 nt, Human
gucugggcuuagggacauggca

SEQ ID NO: 503063 - RNA, 22 nt, Human
cccaggcuggggcuccuccagc

SEQ ID NO: 503064 - RNA, 22 nt, Human
aaggcagcagugcacgacugau

SEQ ID NO: 503065 - RNA, 22 nt, Human
uguccugcaacugaaggagaag

SEQ ID NO: 503066 - RNA, 22 nt, Human
aggacccugagcgggcaugccg

SEQ ID NO: 503067 - RNA, 22 nt, Human
aaaguguggagauugaacuaaa

SEQ ID NO: 503068 - RNA, 19 nt, Human
acauuuagaauguacuugc

SEQ ID NO: 503069 - RNA, 22 nt, Human
aauaugcaaauagguguaauga

SEQ ID NO: 503070 - RNA, 21 nt, Human
augugcagcaagcagcaugcu

SEQ ID NO: 503071 - RNA, 22 nt, Human
uccugaggcucacuuugaaugu

SEQ ID NO: 503072 - RNA, 22 nt, Human
gcauccagagguagccacugug

SEQ ID NO: 503073 - RNA, 22 nt, Human
ucuuagcaaauacuacuuagaa

SEQ ID NO: 503074 - RNA, 21 nt, Human
agagaagggacucuuccaguc

SEQ ID NO: 503075 - RNA, 20 nt, Human
accugggaaaaccuuuuccu

SEQ ID NO: 503076 - RNA, 22 nt, Human
acuggcugaaguuuacuuuuug

SEQ ID NO: 503077 - RNA, 22 nt, Human
agccaggaaccagcuacagucu

SEQ ID NO: 503078 - RNA, 22 nt, Human
cuccagucuaguagagccugcu

SEQ ID NO: 503079 - RNA, 22 nt, Human
uuacaguauuguuaaacucuuu

SEQ ID NO: 503080 - RNA, 22 nt, Human
cugaggagagaucacguggugu

SEQ ID NO: 503081 - RNA, 22 nt, Human
agucacccuccaacucuccacu

SEQ ID NO: 503082 - RNA, 21 nt, Human
uuagcuuucuagaaucuuugu

SEQ ID NO: 503083 - RNA, 22 nt, Human
uuauguugggaaaagucagauu

SEQ ID NO: 503084 - RNA, 20 nt, Human
uccagcccagcagccugaca

SEQ ID NO: 503085 - RNA, 22 nt, Human
agcugccugggcuuguacaccu

SEQ ID NO: 503086 - RNA, 22 nt, Human
aagccuaaaugaugcuauuaug

SEQ ID NO: 503087 - RNA, 22 nt, Human
gcacagcccuggucggggcccc

SEQ ID NO: 503088 - RNA, 21 nt, Human
ugaaugaucugguugccuuuu

SEQ ID NO: 503089 - RNA, 22 nt, Human
auuacaguggacagcuaugcac

SEQ ID NO: 503090 - RNA, 22 nt, Human
uccugagguggauugagcagag

SEQ ID NO: 503091 - RNA, 22 nt, Human
ucagaggacgcacuaggguugu

SEQ ID NO: 503092 - RNA, 22 nt, Human
gaagcagaaguacgauuuacua

SEQ ID NO: 503093 - RNA, 22 nt, Human
gcuggcagcauuagacccuggg

SEQ ID NO: 503094 - RNA, 22 nt, Human
cuucagcaccucagcuggagag

SEQ ID NO: 503095 - RNA, 22 nt, Human
ggaaucagaauuaggauuugaa

SEQ ID NO: 503096 - RNA, 22 nt, Human
gcacagaacuucucuuaguagg

SEQ ID NO: 503097 - RNA, 22 nt, Human
aauguuugugcauaaauauguu

SEQ ID NO: 503098 - RNA, 21 nt, Human
caaaggacuguagcucacuga

SEQ ID NO: 503099 - RNA, 22 nt, Human
gaggguggccuuuagagcccau

SEQ ID NO: 503100 - RNA, 22 nt, Human
uugaaagucacaauggcauuaa

SEQ ID NO: 503101 - RNA, 22 nt, Human
aagggggccacaccugguguga

SEQ ID NO: 503102 - RNA, 22 nt, Human
ccaggcucuaucccuccuucuu

SEQ ID NO: 503103 - RNA, 22 nt, Human
gcugcucuggcucugcaguguc

SEQ ID NO: 503104 - RNA, 22 nt, Human
aggcugggaaauguauuccagc

SEQ ID NO: 503105 - RNA, 22 nt, Human
ggaccugcauuuuaacaagauc

SEQ ID NO: 503106 - RNA, 22 nt, Human
gguggcugcaauggcuaacuuc

SEQ ID NO: 503107 - RNA, 22 nt, Human
cugcagaguggagccucggcug

SEQ ID NO: 503108 - RNA, 22 nt, Human
ucauuucuccgaccugcugucc

SEQ ID NO: 503109 - RNA, 22 nt, Human
ugcauacacaagcauacaugua

SEQ ID NO: 503110 - RNA, 23 nt, Human
uugaaggagaaagcuuucuuggu

SEQ ID NO: 503111 - RNA, 22 nt, Human
cucuuaaauaacaucauugcuu

SEQ ID NO: 503112 - RNA, 22 nt, Human
agguuucugcaauguguguaca

SEQ ID NO: 503113 - RNA, 22 nt, Human
cccugaggaugucuccuuccug

SEQ ID NO: 503114 - RNA, 22 nt, Human
gcaaagcaaaugccugaaggcg

SEQ ID NO: 503115 - RNA, 22 nt, Human
caggucuggcaucagcugugug

SEQ ID NO: 503116 - RNA, 22 nt, Human
uuucuauaugaggagcuaaagu

SEQ ID NO: 503117 - RNA, 22 nt, Human
ucuuuuaguaauaaauauuugu

SEQ ID NO: 503118 - RNA, 22 nt, Human
aaagugcugagauuacaagcgu

SEQ ID NO: 503119 - RNA, 22 nt, Human
agcugcuguggggcucggccug

SEQ ID NO: 503120 - RNA, 22 nt, Human
gcucucagaugcuccagcagcc

SEQ ID NO: 503121 - RNA, 22 nt, Human
accugccuauggagccacaugg

SEQ ID NO: 503122 - RNA, 22 nt, Human
acugggccacauagaccugcug

SEQ ID NO: 503123 - RNA, 22 nt, Human
gagcuuggacaagcucugaagg

SEQ ID NO: 503124 - RNA, 22 nt, Human
cacugugggguuuggcuggaac

SEQ ID NO: 503125 - RNA, 22 nt, Human
uucuugauuucaugcaguuaag

SEQ ID NO: 503126 - RNA, 22 nt, Human
uuuacuuugugucaagucaaga

SEQ ID NO: 503127 - RNA, 22 nt, Human
uguucuuucaguuagacacagu

SEQ ID NO: 503128 - RNA, 22 nt, Human
caccagcuucucauugcggguc

SEQ ID NO: 503129 - RNA, 22 nt, Human
uucaaugagcccggggccauag

SEQ ID NO: 503130 - RNA, 22 nt, Human
ggccaccuggguucgacugggc

SEQ ID NO: 503131 - RNA, 22 nt, Human
ccuugcagacaucaguaguggc

SEQ ID NO: 503132 - RNA, 22 nt, Human
agugcaauguguacagaaaaau

SEQ ID NO: 503133 - RNA, 20 nt, Human
uguuaaaggacacuugcuuu

SEQ ID NO: 503134 - RNA, 22 nt, Human
ucucagcucuuuuuucacagaa

SEQ ID NO: 503135 - RNA, 22 nt, Human
aggagcagcccacuccuguccu

SEQ ID NO: 503136 - RNA, 23 nt, Human
ucuggcuuugcuggaaguuuuga

SEQ ID NO: 503137 - RNA, 22 nt, Human
uggacaggugagugacucaggg

SEQ ID NO: 503138 - RNA, 22 nt, Human
uguguacaagaguguuuacugu

SEQ ID NO: 503139 - RNA, 18 nt, Human
ccugugcuccagcaucug

SEQ ID NO: 503140 - RNA, 22 nt, Human
ucuugcuagaaucauuuggaga

SEQ ID NO: 503141 - RNA, 21 nt, Human
agacuucuagaagugagauag

SEQ ID NO: 503142 - RNA, 22 nt, Human
ggucaguggcaggggguacuuc

SEQ ID NO: 503143 - RNA, 22 nt, Human
aaucucuucccaguaaaaaugg

SEQ ID NO: 503144 - RNA, 22 nt, Human
agcacuagccuguuuugcugug

SEQ ID NO: 503145 - RNA, 20 nt, Human
cugggcucaagugagccucc

SEQ ID NO: 503146 - RNA, 22 nt, Human
cccucccuauguagaugauguu

SEQ ID NO: 503147 - RNA, 22 nt, Human
caggucagaggcgcagccccca

SEQ ID NO: 503148 - RNA, 22 nt, Human
uguguaaauuuauuuacauaaa

SEQ ID NO: 503149 - RNA, 22 nt, Human
gcuuccugauauucauacuguu

SEQ ID NO: 503150 - RNA, 22 nt, Human
aggacagugguguucuggagug

SEQ ID NO: 503151 - RNA, 22 nt, Human
caggcagccugcggucugcaca

SEQ ID NO: 503152 - RNA, 22 nt, Human
cccagcucugcagaccugcccu

SEQ ID NO: 503153 - RNA, 22 nt, Human
aaaugucuuucuucugcuacgu

SEQ ID NO: 503154 - RNA, 22 nt, Human
ccagcuuucauaucaugaggua

SEQ ID NO: 503155 - RNA, 22 nt, Human
gcuggcagaagagcugguucaa

SEQ ID NO: 503156 - RNA, 23 nt, Human
caggaaauguucuugaagccuga

SEQ ID NO: 503157 - RNA, 22 nt, Human
uuccuggggugaagauauuuuu

SEQ ID NO: 503158 - RNA, 22 nt, Human
agucccagugagaugagccacg

SEQ ID NO: 503159 - RNA, 22 nt, Human
ggagagaacuggcuccuucuag

SEQ ID NO: 503160 - RNA, 22 nt, Human
ucaaagucauggcaggcucaga

SEQ ID NO: 503161 - RNA, 22 nt, Human
agccucucuuaucccuucaaag

SEQ ID NO: 503162 - RNA, 22 nt, Human
cucaggcucuguacucccuuug

SEQ ID NO: 503163 - RNA, 22 nt, Human
ugucaguguauacauacaguau

SEQ ID NO: 503164 - RNA, 22 nt, Human
agggcuccuaugaugcucugcc

SEQ ID NO: 503165 - RNA, 22 nt, Human
cuaaauuaucaugagaauuaug

SEQ ID NO: 503166 - RNA, 22 nt, Human
aaauaagaaauucuucuuugca

SEQ ID NO: 503167 - RNA, 18 nt, Human
ggccugaggauuucagca

SEQ ID NO: 503168 - RNA, 22 nt, Human
aagucacagcuaaauagcuaag

SEQ ID NO: 503169 - RNA, 22 nt, Human
uggaaacagaucauaacuaagc

SEQ ID NO: 503170 - RNA, 22 nt, Human
acucaucagauuagauuagggc

SEQ ID NO: 503171 - RNA, 19 nt, Human
ucuccagcuuugggcuuuu

SEQ ID NO: 503172 - RNA, 22 nt, Human
ugcaaagccacaaugaaaucag

SEQ ID NO: 503173 - RNA, 22 nt, Human
gagccuucaucgcagccuuguu

SEQ ID NO: 503174 - RNA, 22 nt, Human
uuguccuguuacuuguuuggau

SEQ ID NO: 503175 - RNA, 22 nt, Human
cagagucaugggccgucaggca

SEQ ID NO: 503176 - RNA, 22 nt, Human
uucacauugugcagauuauggu

SEQ ID NO: 503177 - RNA, 19 nt, Human
ccagcagacacagcugccc

SEQ ID NO: 503178 - RNA, 22 nt, Human
caggcacuucugcugcuugucu

SEQ ID NO: 503179 - RNA, 22 nt, Human
ugcagaguaaaagcagaugcua

SEQ ID NO: 503180 - RNA, 22 nt, Human
cauuguuaccaucuuuuaccua

SEQ ID NO: 503181 - RNA, 22 nt, Human
cugaggucucuuuccauaguga

SEQ ID NO: 503182 - RNA, 22 nt, Human
gugggaugguagguagguaaua

SEQ ID NO: 503183 - RNA, 22 nt, Human
ugcugcacucaccaacagauaa

SEQ ID NO: 503184 - RNA, 22 nt, Human
aagugggaauagaaaugaaggu

SEQ ID NO: 503185 - RNA, 22 nt, Human
aggcuucuuagauuggcuggag

SEQ ID NO: 503186 - RNA, 22 nt, Human
augucuguuuauccuucaagau

SEQ ID NO: 503187 - RNA, 22 nt, Human
uaauacuuuugccuuguauuca

SEQ ID NO: 503188 - RNA, 22 nt, Human
augauauuauucuagcccagag

SEQ ID NO: 503189 - RNA, 19 nt, Human
cagcucaguuugauucucu

SEQ ID NO: 503190 - RNA, 22 nt, Human
gagaauuagggcguaauucaga

SEQ ID NO: 503191 - RNA, 20 nt, Human
acagaaagcugccuuguccc

SEQ ID NO: 503192 - RNA, 22 nt, Human
guuuccugaugugggagaucuu

SEQ ID NO: 503193 - RNA, 22 nt, Human
uuuacacauaccucuuuaaagu

SEQ ID NO: 503194 - RNA, 22 nt, Human
uguggcuggauugauuuuaccu

SEQ ID NO: 503195 - RNA, 22 nt, Human
acagaggaaggcugagcugccc

SEQ ID NO: 503196 - RNA, 22 nt, Human
gcaggcucccuugcagagcagg

SEQ ID NO: 503197 - RNA, 22 nt, Human
ccugucugaaggcagggggaug

SEQ ID NO: 503198 - RNA, 22 nt, Human
ccagcucccauucuucaccugu

SEQ ID NO: 503199 - RNA, 22 nt, Human
gggcagugguuacacagcugag

SEQ ID NO: 503200 - RNA, 22 nt, Human
ggcugccugaacuuuggggaaa

SEQ ID NO: 503201 - RNA, 22 nt, Human
auuuggaaacaauuauauucuu

SEQ ID NO: 503202 - RNA, 22 nt, Human
agcauguaaagcucuuagcacc

SEQ ID NO: 503203 - RNA, 22 nt, Human
accauugccuagaaaaauuccu

SEQ ID NO: 503204 - RNA, 22 nt, Human
gguccugucugacaucacugcu

SEQ ID NO: 503205 - RNA, 20 nt, Human
ggcuucuuuacaucuguguu

SEQ ID NO: 503206 - RNA, 22 nt, Human
uugaagcagagaaauacuugaa

SEQ ID NO: 503207 - RNA, 22 nt, Human
uguauuuuuagaccuuuagacc

SEQ ID NO: 503208 - RNA, 22 nt, Human
uuucuucugagaucagggagaa

SEQ ID NO: 503209 - RNA, 22 nt, Human
ucacaggcuccagggccuggau

SEQ ID NO: 503210 - RNA, 22 nt, Human
caaggccugccucuggcagaaa

SEQ ID NO: 503211 - RNA, 22 nt, Human
uuuugugauggcauuacauuua

SEQ ID NO: 503212 - RNA, 22 nt, Human
ucucuuccaguaagagucuuua

SEQ ID NO: 503213 - RNA, 22 nt, Human
auuuacagccuugaaaacagca

SEQ ID NO: 503214 - RNA, 22 nt, Human
uccuugaaaaucuugguuuaga

SEQ ID NO: 503215 - RNA, 22 nt, Human
uauuccaguucaccuuuucauc

SEQ ID NO: 503216 - RNA, 20 nt, Human
aggaaaaggguggugguaga

SEQ ID NO: 503217 - RNA, 22 nt, Human
cugcagagguugguucuaagau

SEQ ID NO: 503218 - RNA, 22 nt, Human
auucauuugcuauuguguaugg

SEQ ID NO: 503219 - RNA, 22 nt, Human
uuccuuccauagcaaaacaugc

SEQ ID NO: 503220 - RNA, 22 nt, Human
cagagcagaaaccugggugauu

SEQ ID NO: 503221 - RNA, 22 nt, Human
gcaguguuaccuugggcugguu

SEQ ID NO: 503222 - RNA, 20 nt, Human
cuccugggacugcugguuau

SEQ ID NO: 503223 - RNA, 21 nt, Human
aaagagcccgcugagagguuc

SEQ ID NO: 503224 - RNA, 22 nt, Human
auguaugauauuuccaguauca

SEQ ID NO: 503225 - RNA, 22 nt, Human
ugcuggggcagaagagccaaga

SEQ ID NO: 503226 - RNA, 20 nt, Human
cagagcugggauuugaacac

SEQ ID NO: 503227 - RNA, 22 nt, Human
gagauggagucuuuuucuguca

SEQ ID NO: 503228 - RNA, 22 nt, Human
uccugcagagacagaggccuca

SEQ ID NO: 503229 - RNA, 22 nt, Human
ccugggaggcggagguugcagu

SEQ ID NO: 503230 - RNA, 22 nt, Human
agacagcaggggagucugguuu

SEQ ID NO: 503231 - RNA, 22 nt, Human
acuuagugcccuggcccuuaca

SEQ ID NO: 503232 - RNA, 22 nt, Human
ugaaugcuuggagucauaaaau

SEQ ID NO: 503233 - RNA, 22 nt, Human
agcugucuccagauacaggauu

SEQ ID NO: 503234 - RNA, 22 nt, Human
cacugccuggaaggagagacau

SEQ ID NO: 503235 - RNA, 23 nt, Human
ugagcugguauuguccaucucca

SEQ ID NO: 503236 - RNA, 22 nt, Human
cauuuguaggaugcuucuuguu

SEQ ID NO: 503237 - RNA, 22 nt, Human
ggagccaggcaaucuguacuuu

SEQ ID NO: 503238 - RNA, 22 nt, Human
gcccagcaggacagagugguuu

SEQ ID NO: 503239 - RNA, 22 nt, Human
accagggcuuacagcaguagcu

SEQ ID NO: 503240 - RNA, 22 nt, Human
ccucagagguguggcaucucug

SEQ ID NO: 503241 - RNA, 22 nt, Human
ccuggccuccuggccuucucau

SEQ ID NO: 503242 - RNA, 22 nt, Human
agggcccaggacagcaucaggg

SEQ ID NO: 503243 - RNA, 19 nt, Human
ccuggguccacucagacua

SEQ ID NO: 503244 - RNA, 22 nt, Human
agucagggguuggacggggcca

SEQ ID NO: 503245 - RNA, 20 nt, Human
ccugucuccucuuaccuggc

SEQ ID NO: 503246 - RNA, 22 nt, Human
acauaucuuucccucuccugaa

SEQ ID NO: 503247 - RNA, 16 nt, Human
uguuagcugugcauua

SEQ ID NO: 503248 - RNA, 22 nt, Human
aaggaggagugggguccuggaa

SEQ ID NO: 503249 - RNA, 22 nt, Human
cagugcuggagauggguggaac

SEQ ID NO: 503250 - RNA, 23 nt, Human
ccuggggagcuguauccagagug

SEQ ID NO: 503251 - RNA, 22 nt, Human
agguucagugccuggaacaggg

SEQ ID NO: 503252 - RNA, 23 nt, Human
ggacagggcccugcccuauggcc

SEQ ID NO: 503253 - RNA, 22 nt, Human
cagagcugagucuucaagguug

SEQ ID NO: 503254 - RNA, 22 nt, Human
ggcugccugugcccaggcacac

SEQ ID NO: 503255 - RNA, 22 nt, Human
agcugccagaugacagugcuau

SEQ ID NO: 503256 - RNA, 22 nt, Human
ugcuucugggucccagccuggc

SEQ ID NO: 503257 - RNA, 22 nt, Human
cacagcugaaguagccaugugg

SEQ ID NO: 503258 - RNA, 22 nt, Human
uucaaaacagcuagauauugga

SEQ ID NO: 503259 - RNA, 22 nt, Human
cccaggcuccugacucauucua

SEQ ID NO: 503260 - RNA, 22 nt, Human
cuaggccaguuaggaagagaag

SEQ ID NO: 503261 - RNA, 22 nt, Human
ggccugagaauguaccagaucu

SEQ ID NO: 503262 - RNA, 22 nt, Human
auuuauguaucuguguagauca

SEQ ID NO: 503263 - RNA, 22 nt, Human
uuuccugugcuuaacaaauauu

SEQ ID NO: 503264 - RNA, 22 nt, Human
uucacagucacccuucuccaug

SEQ ID NO: 503265 - RNA, 23 nt, Human
uuuaacuuuccaauaauucauug

SEQ ID NO: 503266 - RNA, 22 nt, Human
auaguauuuaauaguuagcuca

SEQ ID NO: 503267 - RNA, 22 nt, Human
gaggugggaugugugugcuacu

SEQ ID NO: 503268 - RNA, 22 nt, Human
gagugcaauggcaugaucuggg

SEQ ID NO: 503269 - RNA, 22 nt, Human
uccauuuacuauucucauaucg

SEQ ID NO: 503270 - RNA, 22 nt, Human
uagcaguggaaucuuuugucca

SEQ ID NO: 503271 - RNA, 22 nt, Human
ccuguccuccaagagcacaucu

SEQ ID NO: 503272 - RNA, 22 nt, Human
aaagcaguaguuuucaaauagu

SEQ ID NO: 503273 - RNA, 22 nt, Human
uguuacacagcagaauagcaag

SEQ ID NO: 503274 - RNA, 22 nt, Human
uugauucagaaaaagauggaga

SEQ ID NO: 503275 - RNA, 22 nt, Human
caaggagaaaacggcuucugaa

SEQ ID NO: 503276 - RNA, 22 nt, Human
gcaaagcagaacccucucuauc

SEQ ID NO: 503277 - RNA, 22 nt, Human
gcagaggcucuuuaaugcuuag

SEQ ID NO: 503278 - RNA, 22 nt, Human
gaagaccacccccuacagcaca

SEQ ID NO: 503279 - RNA, 22 nt, Human
ggcacagcucaggucccagcuc

SEQ ID NO: 503280 - RNA, 22 nt, Human
ugaagccagcuuuggaagacac

SEQ ID NO: 503281 - RNA, 22 nt, Human
ccagcacucuauugaauauucu

SEQ ID NO: 503282 - RNA, 22 nt, Human
agaccaagugcaggugccacua

SEQ ID NO: 503283 - RNA, 20 nt, Human
gugggcagaugugugcaugg

SEQ ID NO: 503284 - RNA, 22 nt, Human
agggccuggcgcguggccgccg

SEQ ID NO: 503285 - RNA, 22 nt, Human
caaguagaguucacuugucuuu

SEQ ID NO: 503286 - RNA, 22 nt, Human
cuggggugucucgucugccauu

SEQ ID NO: 503287 - RNA, 22 nt, Human
agggccugugaauucucccugc

SEQ ID NO: 503288 - RNA, 22 nt, Human
acagagcuucccagccugagca

SEQ ID NO: 503289 - RNA, 22 nt, Human
gccucaguguccuccuccaugu

SEQ ID NO: 503290 - RNA, 22 nt, Human
uccaugagacagauacuguaag

SEQ ID NO: 503291 - RNA, 22 nt, Human
guagauuccaguggucuguguc

SEQ ID NO: 503292 - RNA, 22 nt, Human
uucucaaagaaagcugucauua

SEQ ID NO: 503293 - RNA, 22 nt, Human
uggagccaggagccugggaguc

SEQ ID NO: 503294 - RNA, 22 nt, Human
uauguuaaauguuugauguuua

SEQ ID NO: 503295 - RNA, 22 nt, Human
ccuggcuccaaagcugugacuc

SEQ ID NO: 503296 - RNA, 22 nt, Human
accuucaagauugugggucaau

SEQ ID NO: 503297 - RNA, 22 nt, Human
aaugcugcucucauaauuauag

SEQ ID NO: 503298 - RNA, 22 nt, Human
ucucuggcugauauuccucugc

SEQ ID NO: 503299 - RNA, 22 nt, Human
ucuggcucuguguccccaccca

SEQ ID NO: 503300 - RNA, 17 nt, Human
caguggccuauggcuuu

SEQ ID NO: 503301 - RNA, 22 nt, Human
cucagcagagaccagggaggaa

SEQ ID NO: 503302 - RNA, 22 nt, Human
gcucucuggaggccauggacag

SEQ ID NO: 503303 - RNA, 22 nt, Human
uuuauuaugauggacaccuucg

SEQ ID NO: 503304 - RNA, 22 nt, Human
uuaaauauuuucagcaggguca

SEQ ID NO: 503305 - RNA, 22 nt, Human
gggaguguugagcgcccugcca

SEQ ID NO: 503306 - RNA, 22 nt, Human
gcaucuaaauaaacgugggagu

SEQ ID NO: 503307 - RNA, 22 nt, Human
gggcaggaugcaguuucagaga

SEQ ID NO: 503308 - RNA, 22 nt, Human
uauacaagaggugagaugagca

SEQ ID NO: 503309 - RNA, 22 nt, Human
guacaugucaaaaaaugcauaa

SEQ ID NO: 503310 - RNA, 18 nt, Human
uuuuacucauagcaggcc

SEQ ID NO: 503311 - RNA, 22 nt, Human
uucuaguucauauucucaaaga

SEQ ID NO: 503312 - RNA, 22 nt, Human
guauacagauacuuagacgugc

SEQ ID NO: 503313 - RNA, 22 nt, Human
agagaaggguguagccugggcc

SEQ ID NO: 503314 - RNA, 22 nt, Human
ggaaggaacaaacccugugugg

SEQ ID NO: 503315 - RNA, 22 nt, Human
uacauaauuaaucuuuaaguuc

SEQ ID NO: 503316 - RNA, 22 nt, Human
auauuugugguaaagguaagaa

SEQ ID NO: 503317 - RNA, 22 nt, Human
uggguaggaccagaaaugcacu

SEQ ID NO: 503318 - RNA, 17 nt, Human
acagagguuauacagac

SEQ ID NO: 503319 - RNA, 22 nt, Human
gguggcggccacuucagcccug

SEQ ID NO: 503320 - RNA, 22 nt, Human
ccucugggcuggaaaauuaaug

SEQ ID NO: 503321 - RNA, 16 nt, Human
ccuuucucugccuucc

SEQ ID NO: 503322 - RNA, 23 nt, Human
aaguuaguuucaauaaagcaauu

SEQ ID NO: 503323 - RNA, 22 nt, Human
ggucccaggauugguugcgcag

SEQ ID NO: 503324 - RNA, 22 nt, Human
agcagcagaggucagaaaggua

SEQ ID NO: 503325 - RNA, 22 nt, Human
gauaauaagcacagcaggaugu

SEQ ID NO: 503326 - RNA, 22 nt, Human
auagucuuagaucagauaaagu

SEQ ID NO: 503327 - RNA, 23 nt, Human
agucagugcgggauggucagggg

SEQ ID NO: 503328 - RNA, 22 nt, Human
uaguuaggaaaguccagggagc

SEQ ID NO: 503329 - RNA, 22 nt, Human
auaagguaugaaaaguaaaugg

SEQ ID NO: 503330 - RNA, 22 nt, Human
guugcugaaagcccugacuggc

SEQ ID NO: 503331 - RNA, 18 nt, Human
cucucuuuccacucuuug

SEQ ID NO: 503332 - RNA, 22 nt, Human
agagugaaguaauuguuaggau

SEQ ID NO: 503333 - RNA, 22 nt, Human
auucaccuguuaguaaaaaucu

SEQ ID NO: 503334 - RNA, 22 nt, Human
uggcacugggaugcuacuguua

SEQ ID NO: 503335 - RNA, 17 nt, Human
cacaggugugguuugag

SEQ ID NO: 503336 - RNA, 22 nt, Human
uagucacacaauuguguacauu

SEQ ID NO: 503337 - RNA, 22 nt, Human
cccaggcucacuguccgcuucc

SEQ ID NO: 503338 - RNA, 21 nt, Human
uggauaaaggcacuuuucauc

SEQ ID NO: 503339 - RNA, 22 nt, Human
uacaagagguauauagaaacag

SEQ ID NO: 503340 - RNA, 22 nt, Human
cagagacacuuaacaggaaugg

SEQ ID NO: 503341 - RNA, 22 nt, Human
agaggccagguccagaguuugu

SEQ ID NO: 503342 - RNA, 19 nt, Human
uuccugggguuccauugug

SEQ ID NO: 503343 - RNA, 22 nt, Human
aauaauauuccucugugugcgu

SEQ ID NO: 503344 - RNA, 22 nt, Human
gcugggcucguucccacacgcg

SEQ ID NO: 503345 - RNA, 22 nt, Human
uauuacugagguuuuauggagu

SEQ ID NO: 503346 - RNA, 22 nt, Human
ggagagaacugaccugaaagga

SEQ ID NO: 503347 - RNA, 22 nt, Human
gagacacacccaagguuaugag

SEQ ID NO: 503348 - RNA, 22 nt, Human
uguacauuuagagcucaauaga

SEQ ID NO: 503349 - RNA, 22 nt, Human
gccuccuggguucaugccauuc

SEQ ID NO: 503350 - RNA, 22 nt, Human
ugucccagauacuggacauaga

SEQ ID NO: 503351 - RNA, 22 nt, Human
gugcuccucacaguguggcccu

SEQ ID NO: 503352 - RNA, 22 nt, Human
ccaggccugugcaaggagggag

SEQ ID NO: 503353 - RNA, 22 nt, Human
ggcuuuggggugugcagagaug

SEQ ID NO: 503354 - RNA, 22 nt, Human
aacaugauuuaguauaaugcag

SEQ ID NO: 503355 - RNA, 22 nt, Human
gcucagugaaacaucaaauagu

SEQ ID NO: 503356 - RNA, 22 nt, Human
agucaauuaucucuaggucauc

SEQ ID NO: 503357 - RNA, 22 nt, Human
cagcucagucuggagagaugca

SEQ ID NO: 503358 - RNA, 22 nt, Human
uuuaggauauuaauguucagag

SEQ ID NO: 503359 - RNA, 22 nt, Human
agaggccggccgagcccauggg

SEQ ID NO: 503360 - RNA, 22 nt, Human
ggagaggaaaugccagcacuuc

SEQ ID NO: 503361 - RNA, 22 nt, Human
uaaagguacgaagugagggauu

SEQ ID NO: 503362 - RNA, 22 nt, Human
uggggcuccuccuggcaggagg

SEQ ID NO: 503363 - RNA, 21 nt, Human
ugaauuucgguauggcuauaa

SEQ ID NO: 503364 - RNA, 23 nt, Human
gcccaugcuguugggcccgagca

SEQ ID NO: 503365 - RNA, 22 nt, Human
gcacagaaaugucuacacaugu

SEQ ID NO: 503366 - RNA, 22 nt, Human
aucugggggagcugcucaugga

SEQ ID NO: 503367 - RNA, 22 nt, Human
ugcuaucucuauauccauuuau

SEQ ID NO: 503368 - RNA, 22 nt, Human
aacuagaaccacuuguauuucc

SEQ ID NO: 503369 - RNA, 22 nt, Human
gugugagggacagagaaagggg

SEQ ID NO: 503370 - RNA, 22 nt, Human
gggaaagagugcuuguccagag

SEQ ID NO: 503371 - RNA, 22 nt, Human
cuucaauaggaacugcauggca

SEQ ID NO: 503372 - RNA, 22 nt, Human
gaggagaagggcacggagaaaa

SEQ ID NO: 503373 - RNA, 23 nt, Human
augagguaaagaucagcuuuaaa

SEQ ID NO: 503374 - RNA, 22 nt, Human
cacagcugccauggcugcacuu

SEQ ID NO: 503375 - RNA, 22 nt, Human
ccugggcucugucagaauuggg

SEQ ID NO: 503376 - RNA, 22 nt, Human
ggcagugaaaaaguauguuucc

SEQ ID NO: 503377 - RNA, 22 nt, Human
ggauccuuaacuaucacaguga

SEQ ID NO: 503378 - RNA, 22 nt, Human
cccuggagggauuucucaauca

SEQ ID NO: 503379 - RNA, 22 nt, Human
uuuagaaauugcagagugggug

SEQ ID NO: 503380 - RNA, 22 nt, Human
cugggcagugguggcaucuuug

SEQ ID NO: 503381 - RNA, 22 nt, Human
cucuggggaagcagccagcugg

SEQ ID NO: 503382 - RNA, 22 nt, Human
gcagggcacagacagugccaag

SEQ ID NO: 503383 - RNA, 22 nt, Human
uguggccucaaggcugcccuca

SEQ ID NO: 503384 - RNA, 22 nt, Human
auucauaacggcaaaugucacc

SEQ ID NO: 503385 - RNA, 22 nt, Human
augcaguagauaggcacuuuua

SEQ ID NO: 503386 - RNA, 22 nt, Human
uaaaacugaauacauacugagg

SEQ ID NO: 503387 - RNA, 22 nt, Human
agcaggguuccaggaguugcag

SEQ ID NO: 503388 - RNA, 22 nt, Human
gcaguguuacuuggaguacuaa

SEQ ID NO: 503389 - RNA, 17 nt, Human
aaucuguuuacagucag

SEQ ID NO: 503390 - RNA, 22 nt, Human
aggucaccauggcaugcuccac

SEQ ID NO: 503391 - RNA, 22 nt, Human
acuguccauaauauuggugaac

SEQ ID NO: 503392 - RNA, 22 nt, Human
agguauagaauugaaaggguuu

SEQ ID NO: 503393 - RNA, 22 nt, Human
acaggcucuggggcaggauggc

SEQ ID NO: 503394 - RNA, 21 nt, Human
caguguggugaccagggucuc

SEQ ID NO: 503395 - RNA, 22 nt, Human
uggaaggcaugggaacuguucu

SEQ ID NO: 503396 - RNA, 22 nt, Human
aggcuccugcaggugaggugcu

SEQ ID NO: 503397 - RNA, 22 nt, Human
uacaguuaaaaaguucaauggu

SEQ ID NO: 503398 - RNA, 22 nt, Human
auucugaguacaacaagauguu

SEQ ID NO: 503399 - RNA, 22 nt, Human
ucacagggauggaauagaaaua

SEQ ID NO: 503400 - RNA, 17 nt, Human
ccugucuuguuucugcc

SEQ ID NO: 503401 - RNA, 22 nt, Human
cucagggccaaggaugcuguug

SEQ ID NO: 503402 - RNA, 22 nt, Human
agcagagcgccugcucagaggg

SEQ ID NO: 503403 - RNA, 22 nt, Human
ccucugccugcacaucauccug

SEQ ID NO: 503404 - RNA, 22 nt, Human
ugucaccagcugcuccucagga

SEQ ID NO: 503405 - RNA, 22 nt, Human
gcagaggcaaucagguaugugg

SEQ ID NO: 503406 - RNA, 16 nt, Human
uaugugugugggagug

SEQ ID NO: 503407 - RNA, 22 nt, Human
auucaguaggucuagaauaaga

SEQ ID NO: 503408 - RNA, 22 nt, Human
agucucagaguaccugagggac

SEQ ID NO: 503409 - RNA, 22 nt, Human
uucuuguauauaaaaaucauuu

SEQ ID NO: 503410 - RNA, 22 nt, Human
cagguggguacaucacagagac

SEQ ID NO: 503411 - RNA, 22 nt, Human
gacuacucaaacuuucucuaua

SEQ ID NO: 503412 - RNA, 23 nt, Human
cuucacaaucaaaaucaguucug

SEQ ID NO: 503413 - RNA, 22 nt, Human
gcagcauacagggagaguacuc

SEQ ID NO: 503414 - RNA, 22 nt, Human
cagagacagggcagggagugug

SEQ ID NO: 503415 - RNA, 22 nt, Human
ugggugggagcacccugucugg

SEQ ID NO: 503416 - RNA, 22 nt, Human
ggagggcuguagaggagaccug

SEQ ID NO: 503417 - RNA, 22 nt, Human
agcagccagagucugaacauua

SEQ ID NO: 503418 - RNA, 22 nt, Human
gcacagccuugcccugugcccu

SEQ ID NO: 503419 - RNA, 22 nt, Human
aaaugucuguuagucauaucau

SEQ ID NO: 503420 - RNA, 22 nt, Human
ccugggcucaagugaugguccc

SEQ ID NO: 503421 - RNA, 22 nt, Human
acaacacauguguauaugugug

SEQ ID NO: 503422 - RNA, 22 nt, Human
gaagcagcugccagagaugucu

SEQ ID NO: 503423 - RNA, 22 nt, Human
uuccauaauaggcuuaagugaa

SEQ ID NO: 503424 - RNA, 20 nt, Human
agcacauuaaacauacuccu

SEQ ID NO: 503425 - RNA, 22 nt, Human
ugcaggugugggcaggggagca

SEQ ID NO: 503426 - RNA, 22 nt, Human
cccaggaguuugaguucagcau

SEQ ID NO: 503427 - RNA, 22 nt, Human
gaggcugcacuggcuaaaggcu

SEQ ID NO: 503428 - RNA, 22 nt, Human
gucugggcuccuggcaggcagc

SEQ ID NO: 503429 - RNA, 22 nt, Human
acagcagcuaaaggugucuccu

SEQ ID NO: 503430 - RNA, 22 nt, Human
ucacugcucuccaauguggagu

SEQ ID NO: 503431 - RNA, 22 nt, Human
ggacacaguggaagacagcuug

SEQ ID NO: 503432 - RNA, 22 nt, Human
acugggccuugccauggcagcc

SEQ ID NO: 503433 - RNA, 22 nt, Human
ucuguaaucaagauauuugaga

SEQ ID NO: 503434 - RNA, 22 nt, Human
cagcuggaugggagaccauguu

SEQ ID NO: 503435 - RNA, 19 nt, Human
agggcuuugugugcugcuc

SEQ ID NO: 503436 - RNA, 22 nt, Human
gcaguggcaccgcuggcucugg

SEQ ID NO: 503437 - RNA, 22 nt, Human
ccagagagagaggucaauggca

SEQ ID NO: 503438 - RNA, 22 nt, Human
uaaagcauguacugugugcuag

SEQ ID NO: 503439 - RNA, 22 nt, Human
caggaaccuaaugaaggcucac

SEQ ID NO: 503440 - RNA, 22 nt, Human
ucuguucagguuucagagaacu

SEQ ID NO: 503441 - RNA, 22 nt, Human
gccagaaacauacacaucacuu

SEQ ID NO: 503442 - RNA, 22 nt, Human
gcagguccagucaccagagaga

SEQ ID NO: 503443 - RNA, 22 nt, Human
cagcuuugcaggcuggucagug

SEQ ID NO: 503444 - RNA, 22 nt, Human
uucauugucucuguuugccuuc

SEQ ID NO: 503445 - RNA, 22 nt, Human
agaggaauaaauuucuguagug

SEQ ID NO: 503446 - RNA, 22 nt, Human
ugagccuggagucguggagggg

SEQ ID NO: 503447 - RNA, 22 nt, Human
aggcuggcuuggcucuccugug

SEQ ID NO: 503448 - RNA, 22 nt, Human
auggaguucugccagcgcugcu

SEQ ID NO: 503449 - RNA, 19 nt, Human
agcuguggaugugggauuu

SEQ ID NO: 503450 - RNA, 22 nt, Human
agcauucaaguaauucacuugg

SEQ ID NO: 503451 - RNA, 22 nt, Human
aggaccuggaucacagagaucu

SEQ ID NO: 503452 - RNA, 22 nt, Human
ccugaggggcugcaggccagcu

SEQ ID NO: 503453 - RNA, 22 nt, Human
agggcugcugcuccgggcccag

SEQ ID NO: 503454 - RNA, 20 nt, Human
cugugccuaaaccuccgggu

SEQ ID NO: 503455 - RNA, 22 nt, Human
ggaaccacagcccccagcaggc

SEQ ID NO: 503456 - RNA, 22 nt, Human
uucaaggagauuggagucuacu

SEQ ID NO: 503457 - RNA, 22 nt, Human
ccaccagcuuugccacccugcu

SEQ ID NO: 503458 - RNA, 22 nt, Human
ccaggcuuccuaaugugugcag

SEQ ID NO: 503459 - RNA, 22 nt, Human
cgacccuacagacagugcugag

SEQ ID NO: 503460 - RNA, 22 nt, Human
ucacagaagagcauuaagauga

SEQ ID NO: 503461 - RNA, 22 nt, Human
ucuucuuuuauuucaagggugu

SEQ ID NO: 503462 - RNA, 22 nt, Human
gagagcccugcuccuaucccag

SEQ ID NO: 503463 - RNA, 22 nt, Human
cggucaggugcagcguuggcac

SEQ ID NO: 503464 - RNA, 22 nt, Human
ucaggggaaaucucucagcgaa

SEQ ID NO: 503465 - RNA, 22 nt, Human
ugccuucacugagcuuauggga

SEQ ID NO: 503466 - RNA, 22 nt, Human
uguagcacagagcuuugacacu

SEQ ID NO: 503467 - RNA, 22 nt, Human
cagcagcugguuauaccugugg

SEQ ID NO: 503468 - RNA, 22 nt, Human
acaguaaaaagccuuagaauuu

SEQ ID NO: 503469 - RNA, 22 nt, Human
caggccugggcuucggggcuga

SEQ ID NO: 503470 - RNA, 18 nt, Human
guuaauuuugaaguucau

SEQ ID NO: 503471 - RNA, 22 nt, Human
cuccucugucuggcccugagcc

SEQ ID NO: 503472 - RNA, 22 nt, Human
caagagcauuuaguuagcuggu

SEQ ID NO: 503473 - RNA, 22 nt, Human
ugaaggagcucaaugaugaugc

SEQ ID NO: 503474 - RNA, 22 nt, Human
aaauuuuguauucuaguucuag

SEQ ID NO: 503475 - RNA, 17 nt, Human
gugaagagucauugaau

SEQ ID NO: 503476 - RNA, 22 nt, Human
caguuucuuggaugccaauuuc

SEQ ID NO: 503477 - RNA, 22 nt, Human
auccugugcaaugacugcaucu

SEQ ID NO: 503478 - RNA, 22 nt, Human
uugaagcacaaugucuuuuauc

SEQ ID NO: 503479 - RNA, 21 nt, Human
agugaaauugcaucagaggga

SEQ ID NO: 503480 - RNA, 22 nt, Human
ucauguguguuucauguaugga

SEQ ID NO: 503481 - RNA, 22 nt, Human
caggcccugggcaggaucagcc

SEQ ID NO: 503482 - RNA, 22 nt, Human
guucuuccucauugcuuugaag

SEQ ID NO: 503483 - RNA, 22 nt, Human
ggccuggaaugcuuuccuacca

SEQ ID NO: 503484 - RNA, 22 nt, Human
uucaaaauuguucuaagcucug

SEQ ID NO: 503485 - RNA, 23 nt, Human
gugauuucagggaacagaaucag

SEQ ID NO: 503486 - RNA, 20 nt, Human
ucucuggcaagaagcugcag

SEQ ID NO: 503487 - RNA, 22 nt, Human
acccucccauuuccauguagca

SEQ ID NO: 503488 - RNA, 23 nt, Human
aguguucagcauguaguaaauac

SEQ ID NO: 503489 - RNA, 22 nt, Human
ugugccuacugauagagccaag

SEQ ID NO: 503490 - RNA, 23 nt, Human
agacugaggcugccagggucaga

SEQ ID NO: 503491 - RNA, 22 nt, Human
gggaucagaaacauagcccuga

SEQ ID NO: 503492 - RNA, 22 nt, Human
aauucuagcauugugaaaauau

SEQ ID NO: 503493 - RNA, 22 nt, Human
ucuggccugaaaguccaugcuu

SEQ ID NO: 503494 - RNA, 22 nt, Human
uuucugaagggcagcagacucu

SEQ ID NO: 503495 - RNA, 22 nt, Human
uccugcugcuaccuggcccacg

SEQ ID NO: 503496 - RNA, 22 nt, Human
ggagccugggccuccugcccuu

SEQ ID NO: 503497 - RNA, 22 nt, Human
aaugagacacgugaagcagaug

SEQ ID NO: 503498 - RNA, 19 nt, Human
gaaggggaagguggguacc

SEQ ID NO: 503499 - RNA, 16 nt, Human
ccacagggcaaggggc

SEQ ID NO: 503500 - RNA, 22 nt, Human
cagaaauguacugacaugcagu

SEQ ID NO: 503501 - RNA, 22 nt, Human
uuaccuguuuuacaugcacaac

SEQ ID NO: 503502 - RNA, 22 nt, Human
cacuguaucuuuuccaaagucu

SEQ ID NO: 503503 - RNA, 22 nt, Human
ccaggugggaggaaagcagaga

SEQ ID NO: 503504 - RNA, 22 nt, Human
acugggccuugugugucucauc

SEQ ID NO: 503505 - RNA, 22 nt, Human
cagagggcucuuggcugccugc

SEQ ID NO: 503506 - RNA, 22 nt, Human
gggaccugaggagggguuucag

SEQ ID NO: 503507 - RNA, 22 nt, Human
aauaauuacccaucuuuuugua

SEQ ID NO: 503508 - RNA, 20 nt, Human
agcugaggcaccugagguua

SEQ ID NO: 503509 - RNA, 15 nt, Human
gggcaggucuggggc

SEQ ID NO: 503510 - RNA, 22 nt, Human
auucuguguuaggauagauggu

SEQ ID NO: 503511 - RNA, 22 nt, Human
cuccagagaguccagcucuggg

SEQ ID NO: 503512 - RNA, 22 nt, Human
caggcacuguguuaggcacugu

SEQ ID NO: 503513 - RNA, 22 nt, Human
agggcugcuccuccuucaggcc

SEQ ID NO: 503514 - RNA, 22 nt, Human
ucccagccuuccuuguggugaa

SEQ ID NO: 503515 - RNA, 22 nt, Human
cuguacaucccgagagccagua

SEQ ID NO: 503516 - RNA, 22 nt, Human
ucugaggcccaguucaacucuu

SEQ ID NO: 503517 - RNA, 22 nt, Human
ggagucugagcuuguguccugg

SEQ ID NO: 503518 - RNA, 23 nt, Human
uccuggguuugaauucuagucuu

SEQ ID NO: 503519 - RNA, 22 nt, Human
gaugcugaagugaagugaucuu

SEQ ID NO: 503520 - RNA, 22 nt, Human
ugaaaaggaguccuuguuuuca

SEQ ID NO: 503521 - RNA, 22 nt, Human
uauacagauaucuaagauguaa

SEQ ID NO: 503522 - RNA, 22 nt, Human
gcuggccugucuagagccuuac

SEQ ID NO: 503523 - RNA, 22 nt, Human
uauaauaugaggcaggagugau

SEQ ID NO: 503524 - RNA, 22 nt, Human
gcagggcagcuuagucccuguc

SEQ ID NO: 503525 - RNA, 22 nt, Human
caaguagaaggaugugauugua

SEQ ID NO: 503526 - RNA, 22 nt, Human
uucuuguauguaugcaaaauca

SEQ ID NO: 503527 - RNA, 22 nt, Human
uuugugaacaaacaugaagaug

SEQ ID NO: 503528 - RNA, 22 nt, Human
aggcuagaggcuucuggcuuca

SEQ ID NO: 503529 - RNA, 22 nt, Human
ggccucaggguugggcccauua

SEQ ID NO: 503530 - RNA, 22 nt, Human
uggggacauagccagucuggcu

SEQ ID NO: 503531 - RNA, 19 nt, Human
guccaguguuuuccaguca

SEQ ID NO: 503532 - RNA, 22 nt, Human
acaggggcuccgaaggugaggg

SEQ ID NO: 503533 - RNA, 22 nt, Human
gacuggauauugaguacugcaa

SEQ ID NO: 503534 - RNA, 22 nt, Human
ggccaccuaggagccacaguga

SEQ ID NO: 503535 - RNA, 22 nt, Human
acuuucaacuuggugggagagc

SEQ ID NO: 503536 - RNA, 22 nt, Human
ggcugccuucagacuccagcuu

SEQ ID NO: 503537 - RNA, 22 nt, Human
ggaggagagagguugcaaacac

SEQ ID NO: 503538 - RNA, 22 nt, Human
ugucucugaaauauguggcucc

SEQ ID NO: 503539 - RNA, 22 nt, Human
uugaagcauuguggcuuguauu

SEQ ID NO: 503540 - RNA, 23 nt, Human
ggccauggagacuuagaaugggc

SEQ ID NO: 503541 - RNA, 22 nt, Human
cacaggaauaagucaaacuuca

SEQ ID NO: 503542 - RNA, 22 nt, Human
ucauugcagugauguuguaugu

SEQ ID NO: 503543 - RNA, 22 nt, Human
caaagucccagcugcuuagaga

SEQ ID NO: 503544 - RNA, 22 nt, Human
uuccagcaggcagacaggagau

SEQ ID NO: 503545 - RNA, 22 nt, Human
ccaggcugggcggggaaccugg

SEQ ID NO: 503546 - RNA, 22 nt, Human
agggggaguuucaguuagaaag

SEQ ID NO: 503547 - RNA, 22 nt, Human
uuucuauugaucuaauaaacau

SEQ ID NO: 503548 - RNA, 22 nt, Human
aauuagggagagguagcuaggu

SEQ ID NO: 503549 - RNA, 22 nt, Human
ugucaugcagguuuguuauaga

SEQ ID NO: 503550 - RNA, 21 nt, Human
uccccacauuucuaaacagac

SEQ ID NO: 503551 - RNA, 22 nt, Human
uuuuagaaagaucccuggcagg

SEQ ID NO: 503552 - RNA, 22 nt, Human
uugccaggagacaaagugggcc

SEQ ID NO: 503553 - RNA, 22 nt, Human
aggcagguguugggagacacca

SEQ ID NO: 503554 - RNA, 22 nt, Human
aucuucaaagggauguccaugg

SEQ ID NO: 503555 - RNA, 22 nt, Human
ucacacagguuugcaaugauuu

SEQ ID NO: 503556 - RNA, 22 nt, Human
aaucucuuuggcucaaggaucc

SEQ ID NO: 503557 - RNA, 22 nt, Human
guuugcauuuauuagucuucug

SEQ ID NO: 503558 - RNA, 23 nt, Human
uagagcaguagaucaccauggga

SEQ ID NO: 503559 - RNA, 20 nt, Human
gugcagccaagcugagccgc

SEQ ID NO: 503560 - RNA, 23 nt, Human
cagaccuggcagucauccucaac

SEQ ID NO: 503561 - RNA, 22 nt, Human
uacuuccagcaaucugcauauu

SEQ ID NO: 503562 - RNA, 22 nt, Human
guggcugcagcucugaacggac

SEQ ID NO: 503563 - RNA, 22 nt, Human
cagcugccccuccagggcuggg

SEQ ID NO: 503564 - RNA, 22 nt, Human
cagagccagcccacuguucccg

SEQ ID NO: 503565 - RNA, 22 nt, Human
uaauaagcguagaagguauauc

SEQ ID NO: 503566 - RNA, 22 nt, Human
uuugcugauauuuugcugauac

SEQ ID NO: 503567 - RNA, 22 nt, Human
agccaggacguugcucagcucc

SEQ ID NO: 503568 - RNA, 22 nt, Human
ucugcugcugagcacacuccua

SEQ ID NO: 503569 - RNA, 22 nt, Human
aggcuucuggggcaccgagcga

SEQ ID NO: 503570 - RNA, 22 nt, Human
cagggcuucgugucucagugcu

SEQ ID NO: 503571 - RNA, 22 nt, Human
aggugauguccacagcuugcag

SEQ ID NO: 503572 - RNA, 22 nt, Human
acaaugaagauaauguugcagu

SEQ ID NO: 503573 - RNA, 22 nt, Human
gcuggcucugaugggcuccagg

SEQ ID NO: 503574 - RNA, 22 nt, Human
auuucuuccucugucaguaacu

SEQ ID NO: 503575 - RNA, 22 nt, Human
agagcaggcauaaagcuuugaa

SEQ ID NO: 503576 - RNA, 21 nt, Human
cggaaacucggcucugguucc

SEQ ID NO: 503577 - RNA, 22 nt, Human
cgcugccaggauccccugccgg

SEQ ID NO: 503578 - RNA, 22 nt, Human
agucuugaaagcacauuagagu

SEQ ID NO: 503579 - RNA, 21 nt, Human
aaagcagcccauggcacaguc

SEQ ID NO: 503580 - RNA, 22 nt, Human
ucccaggauguuggcggcaggu

SEQ ID NO: 503581 - RNA, 22 nt, Human
gaaaguuucuucauuaagaugu

SEQ ID NO: 503582 - RNA, 23 nt, Human
aguaugaauucauuguuuuaguu

SEQ ID NO: 503583 - RNA, 19 nt, Human
guuuuucccagacgaggca

SEQ ID NO: 503584 - RNA, 23 nt, Human
ggucccugacagcgggcaaguug

SEQ ID NO: 503585 - RNA, 22 nt, Human
gacacagagauaggccuguguu

SEQ ID NO: 503586 - RNA, 22 nt, Human
uagauguuuugauauuugcuga

SEQ ID NO: 503587 - RNA, 22 nt, Human
cuucugggcagaaguuuugaga

SEQ ID NO: 503588 - RNA, 22 nt, Human
guuucauucggcagcucauaag

SEQ ID NO: 503589 - RNA, 22 nt, Human
aguagcagaaggucuugaaggg

SEQ ID NO: 503590 - RNA, 22 nt, Human
cagggccaugaggcacaggguc

SEQ ID NO: 503591 - RNA, 22 nt, Human
uuccuuguuuguagcucuggga

SEQ ID NO: 503592 - RNA, 22 nt, Human
ucagagcuaaggggagagcaaa

SEQ ID NO: 503593 - RNA, 22 nt, Human
aaaggcucacgcaguuagugau

SEQ ID NO: 503594 - RNA, 22 nt, Human
uccccagccgugaaggagagga

SEQ ID NO: 503595 - RNA, 22 nt, Human
uggaccccagacaagccagggu

SEQ ID NO: 503596 - RNA, 22 nt, Human
cuggcucaggaaaguugcugcu

SEQ ID NO: 503597 - RNA, 22 nt, Human
aaucuuuuaggggauccugagg

SEQ ID NO: 503598 - RNA, 22 nt, Human
ugcacuccaggcugggugacag

SEQ ID NO: 503599 - RNA, 21 nt, Human
ugcaugcuauguuuuuauuuc

SEQ ID NO: 503600 - RNA, 22 nt, Human
uucaugugaauauauuugucuu

SEQ ID NO: 503601 - RNA, 22 nt, Human
ucagcaauaugauaggcuuugu

SEQ ID NO: 503602 - RNA, 21 nt, Human
uccagaggaggacagacucag

SEQ ID NO: 503603 - RNA, 22 nt, Human
agcuggagaguuuccaggaagg

SEQ ID NO: 503604 - RNA, 22 nt, Human
cacacaugaaucccuaguaccu

SEQ ID NO: 503605 - RNA, 21 nt, Human
uuuucuggaguaugucuccuc

SEQ ID NO: 503606 - RNA, 22 nt, Human
gaguguucccacaccccaguug

SEQ ID NO: 503607 - RNA, 22 nt, Human
uuccucuuuagggcuggccagg

SEQ ID NO: 503608 - RNA, 22 nt, Human
uggcagggaauacagauguuua

SEQ ID NO: 503609 - RNA, 22 nt, Human
aauguacacugaaagccuauca

SEQ ID NO: 503610 - RNA, 22 nt, Human
agcacuuuccuggcaaaugugg

SEQ ID NO: 503611 - RNA, 22 nt, Human
caaaaugugagucccaccucaa

SEQ ID NO: 503612 - RNA, 22 nt, Human
agaggcagccguauuucaaagg

SEQ ID NO: 503613 - RNA, 22 nt, Human
uuguuuuaacgacucagcuugu

SEQ ID NO: 503614 - RNA, 22 nt, Human
ugucauuuaguccucugugugu

SEQ ID NO: 503615 - RNA, 22 nt, Human
uugaagaugguagcaauuuccu

SEQ ID NO: 503616 - RNA, 22 nt, Human
auguccuguuuuggcuugcucu

SEQ ID NO: 503617 - RNA, 22 nt, Human
cuggaucugucuuuuggauccc

SEQ ID NO: 503618 - RNA, 22 nt, Human
uuuccucuucuggcaggcaggg

SEQ ID NO: 503619 - RNA, 22 nt, Human
cugucaccuguucacugcagca

SEQ ID NO: 503620 - RNA, 22 nt, Human
aauucucaggaauuucaucugu

SEQ ID NO: 503621 - RNA, 22 nt, Human
uggcgugcccuccagacuuggc

SEQ ID NO: 503622 - RNA, 23 nt, Human
ucacagggcacuggcugggguug

SEQ ID NO: 503623 - RNA, 22 nt, Human
uagagguacuccccucaaaguu

SEQ ID NO: 503624 - RNA, 22 nt, Human
ugcgcccagccaagucuggcac

SEQ ID NO: 503625 - RNA, 22 nt, Human
ccugcgucgugugggcagugac

SEQ ID NO: 503626 - RNA, 22 nt, Human
gggcacuguacacugugcaugg

SEQ ID NO: 503627 - RNA, 22 nt, Human
gggauggggggaagcguccaug

SEQ ID NO: 503628 - RNA, 22 nt, Human
ucagggcaaugucccucagaag

SEQ ID NO: 503629 - RNA, 22 nt, Human
augcccugugacucuccuggac

SEQ ID NO: 503630 - RNA, 22 nt, Human
caggcagcucgaugccuuguug

SEQ ID NO: 503631 - RNA, 22 nt, Human
uaauuuauuucaacugccaagg

SEQ ID NO: 503632 - RNA, 22 nt, Human
agaguguuuuucugucaaggac

SEQ ID NO: 503633 - RNA, 22 nt, Human
ccugcagagccacgugccagcg

SEQ ID NO: 503634 - RNA, 22 nt, Human
agguacuaccagggauuuucag

SEQ ID NO: 503635 - RNA, 22 nt, Human
auuuaugacuggugaauagaac

SEQ ID NO: 503636 - RNA, 22 nt, Human
uaaaauguguuucuguaugguu

SEQ ID NO: 503637 - RNA, 22 nt, Human
cccagcagugacccagugauac

SEQ ID NO: 503638 - RNA, 22 nt, Human
ugggcugcagagcccggccuuc

SEQ ID NO: 503639 - RNA, 22 nt, Human
cauguuaaaauauacauucuga

SEQ ID NO: 503640 - RNA, 22 nt, Human
ugccugucucugacugccauua

SEQ ID NO: 503641 - RNA, 22 nt, Human
gggguccuggaggccagcugga

SEQ ID NO: 503642 - RNA, 22 nt, Human
guccuggcuagucguccgcgac

SEQ ID NO: 503643 - RNA, 22 nt, Human
ucccagccggugccuggguccc

SEQ ID NO: 503644 - RNA, 22 nt, Human
gacccagccugguuuuuauagg

SEQ ID NO: 503645 - RNA, 22 nt, Human
caugucuuauuuaugcuucuua

SEQ ID NO: 503646 - RNA, 22 nt, Human
cuuagaugaagucacagaaccc

SEQ ID NO: 503647 - RNA, 22 nt, Human
aggguccaucaaggacugcaca

SEQ ID NO: 503648 - RNA, 22 nt, Human
aaugaaguguuauuuaguuuca

SEQ ID NO: 503649 - RNA, 22 nt, Human
gccagaggcccaaggacagcug

SEQ ID NO: 503650 - RNA, 19 nt, Human
cagaugagaaaagugaggu

SEQ ID NO: 503651 - RNA, 18 nt, Human
uggccuggagacaacucu

SEQ ID NO: 503652 - RNA, 22 nt, Human
uagaaagacuguccagauuuca

SEQ ID NO: 503653 - RNA, 22 nt, Human
ugucaugcccaggagcaaggua

SEQ ID NO: 503654 - RNA, 18 nt, Human
ccagguggugacagagau

SEQ ID NO: 503655 - RNA, 22 nt, Human
caggaugagaggcccagggaag

SEQ ID NO: 503656 - RNA, 22 nt, Human
gcuggcugaguucugucgucug

SEQ ID NO: 503657 - RNA, 21 nt, Human
cagcuucuucugugaccuggu

SEQ ID NO: 503658 - RNA, 22 nt, Human
cagucccagcugcucagaaggc

SEQ ID NO: 503659 - RNA, 22 nt, Human
cccacucccugcacgccugccg

SEQ ID NO: 503660 - RNA, 22 nt, Human
acccagcuggaugcauggaggc

SEQ ID NO: 503661 - RNA, 22 nt, Human
gaagcccauuuguacagcacau

SEQ ID NO: 503662 - RNA, 22 nt, Human
ccagcgcuucccaucagggagg

SEQ ID NO: 503663 - RNA, 22 nt, Human
guauuagguuggugcaaaagua

SEQ ID NO: 503664 - RNA, 21 nt, Human
uguguucuucuaggucagcua

SEQ ID NO: 503665 - RNA, 23 nt, Human
acugagccagggccugggucagc

SEQ ID NO: 503666 - RNA, 22 nt, Human
ucacagacacagggagaagcau

SEQ ID NO: 503667 - RNA, 21 nt, Human
acugccuggggugcuggccaa

SEQ ID NO: 503668 - RNA, 22 nt, Human
cugggccucauccccagaguuu

SEQ ID NO: 503669 - RNA, 22 nt, Human
gaggagcccagcaccaucacuu

SEQ ID NO: 503670 - RNA, 22 nt, Human
ucauuuauaaggaugcaauuaa

SEQ ID NO: 503671 - RNA, 22 nt, Human
aaguucaagucugcaucuuuuu

SEQ ID NO: 503672 - RNA, 22 nt, Human
cuggcagcuuccuuugcaucug

SEQ ID NO: 503673 - RNA, 22 nt, Human
ugaaaggugacauuucuuggau

SEQ ID NO: 503674 - RNA, 22 nt, Human
caggccugcaggaaaggcuccc

SEQ ID NO: 503675 - RNA, 20 nt, Human
aggucucagagcaagagccc

SEQ ID NO: 503676 - RNA, 22 nt, Human
ggcugggcugcugggucagagc

SEQ ID NO: 503677 - RNA, 22 nt, Human
augagacuaccuguaauguggc

SEQ ID NO: 503678 - RNA, 22 nt, Human
uuauuuuaccuuccucugagcu

SEQ ID NO: 503679 - RNA, 22 nt, Human
uguuugugguuauaauaaguau

SEQ ID NO: 503680 - RNA, 22 nt, Human
acaaaugagaauguagacagag

SEQ ID NO: 503681 - RNA, 22 nt, Human
ggcccucugcucacuuccuauu

SEQ ID NO: 503682 - RNA, 21 nt, Human
ugauccuuucccccauguugc

SEQ ID NO: 503683 - RNA, 22 nt, Human
augucugauaaauaaugcauaa

SEQ ID NO: 503684 - RNA, 22 nt, Human
guaaauauuaaaggcugcuaga

SEQ ID NO: 503685 - RNA, 19 nt, Human
acagagcucucugcuucug

SEQ ID NO: 503686 - RNA, 22 nt, Human
cuguggccccacccucuuggcc

SEQ ID NO: 503687 - RNA, 22 nt, Human
gucaggaaguggcauuggagaa

SEQ ID NO: 503688 - RNA, 22 nt, Human
ggucauuguucuuuucugugau

SEQ ID NO: 503689 - RNA, 22 nt, Human
gaaagugcuuuugagugugugc

SEQ ID NO: 503690 - RNA, 22 nt, Human
uucauuguacuuuaagagaugc

SEQ ID NO: 503691 - RNA, 22 nt, Human
uaaagugcaugcggggccagau

SEQ ID NO: 503692 - RNA, 22 nt, Human
gaaagggcaugggcaugacaac

SEQ ID NO: 503693 - RNA, 22 nt, Human
cucagagaaaugucacaacaau

SEQ ID NO: 503694 - RNA, 22 nt, Human
gaggaugugucuggucugggca

SEQ ID NO: 503695 - RNA, 22 nt, Human
uuuuccuuucaucaggacaaag

SEQ ID NO: 503696 - RNA, 22 nt, Human
uaggccagcccuuaguccuguc

SEQ ID NO: 503697 - RNA, 22 nt, Human
ucugagcuguggccauucuucc

SEQ ID NO: 503698 - RNA, 21 nt, Human
uguaugcacgcacaugcacac

SEQ ID NO: 503699 - RNA, 22 nt, Human
ccugccuguaagauggguacaa

SEQ ID NO: 503700 - RNA, 22 nt, Human
ucacuguauuuggaagggaugg

SEQ ID NO: 503701 - RNA, 22 nt, Human
ugaauccagagcuauuucgucc

SEQ ID NO: 503702 - RNA, 22 nt, Human
uacauauuugucuuuguacugu

SEQ ID NO: 503703 - RNA, 19 nt, Human
ucuguucacauuguuucgc

SEQ ID NO: 503704 - RNA, 22 nt, Human
ugaggcaggacuugcauaaagu

SEQ ID NO: 503705 - RNA, 22 nt, Human
agagcagaggcauggccguggg

SEQ ID NO: 503706 - RNA, 22 nt, Human
uuccauuuuucuaacucucaga

SEQ ID NO: 503707 - RNA, 19 nt, Human
cucaccuggaggugcugau

SEQ ID NO: 503708 - RNA, 22 nt, Human
ugccaaguuucucucagggacu

SEQ ID NO: 503709 - RNA, 22 nt, Human
ccagcuccaaguuugggcauca

SEQ ID NO: 503710 - RNA, 22 nt, Human
aagauuucugcuuuuggaggca

SEQ ID NO: 503711 - RNA, 22 nt, Human
cacagcuugggcucugacaaua

SEQ ID NO: 503712 - RNA, 22 nt, Human
gaguucuauuaugguuagaagu

SEQ ID NO: 503713 - RNA, 23 nt, Human
ccagcccuccaccagcucuaggc

SEQ ID NO: 503714 - RNA, 22 nt, Human
gcuggagccaagcugcucuugg

SEQ ID NO: 503715 - RNA, 22 nt, Human
uuccuguaugucagugaagagc

SEQ ID NO: 503716 - RNA, 22 nt, Human
ucccagggacugggcuaggcuu

SEQ ID NO: 503717 - RNA, 22 nt, Human
ugucaaaaagcugggacaagca

SEQ ID NO: 503718 - RNA, 21 nt, Human
ggagcuggggagcuggcccca

SEQ ID NO: 503719 - RNA, 22 nt, Human
acuccugggugcugaccagcgu

SEQ ID NO: 503720 - RNA, 22 nt, Human
gcccagccccuggguggacgug

SEQ ID NO: 503721 - RNA, 22 nt, Human
acgcagaagggccuggcgugcc

SEQ ID NO: 503722 - RNA, 22 nt, Human
cuauuaggcuuccauuucaugc

SEQ ID NO: 503723 - RNA, 22 nt, Human
uucucuuagcuguaaagucaau

SEQ ID NO: 503724 - RNA, 19 nt, Human
uggcagaggcaguuuguac

SEQ ID NO: 503725 - RNA, 22 nt, Human
cugcucugagaggcucuuccua

SEQ ID NO: 503726 - RNA, 22 nt, Human
ucugggcugugccaaagcucuu

SEQ ID NO: 503727 - RNA, 22 nt, Human
gaggcugccccuuccucagcug

SEQ ID NO: 503728 - RNA, 22 nt, Human
uuuauuuaccuuauguccucca

SEQ ID NO: 503729 - RNA, 22 nt, Human
caggcccucaggcaagggcucu

SEQ ID NO: 503730 - RNA, 22 nt, Human
ugaccugcguaggugguuucug

SEQ ID NO: 503731 - RNA, 22 nt, Human
acccagaggcggagguugcagu

SEQ ID NO: 503732 - RNA, 22 nt, Human
caaagaagagauuuacagagcu

SEQ ID NO: 503733 - RNA, 22 nt, Human
gccuggcccagggcucuuguug

SEQ ID NO: 503734 - RNA, 22 nt, Human
uugcaacaucugaacauuuauc

SEQ ID NO: 503735 - RNA, 22 nt, Human
cuggguucuauuuuuggcuuca

SEQ ID NO: 503736 - RNA, 22 nt, Human
uggccuggccacauccagcagg

SEQ ID NO: 503737 - RNA, 22 nt, Human
ggagugacucucggggccacua

SEQ ID NO: 503738 - RNA, 22 nt, Human
agguccagccugcccucucucc

SEQ ID NO: 503739 - RNA, 22 nt, Human
aagauggcuuagaguccuggug

SEQ ID NO: 503740 - RNA, 22 nt, Human
uacagagauuuauugcuaaggc

SEQ ID NO: 503741 - RNA, 23 nt, Human
uccuuuaaugcuggaauggcuag

SEQ ID NO: 503742 - RNA, 19 nt, Human
ugucuuaauuaacucagag

SEQ ID NO: 503743 - RNA, 22 nt, Human
aguggcuggucuaaggucacag

SEQ ID NO: 503744 - RNA, 22 nt, Human
auacagugccccuuuucacaug

SEQ ID NO: 503745 - RNA, 22 nt, Human
ucccaggacaggccacauggaa

SEQ ID NO: 503746 - RNA, 22 nt, Human
cucuuaguuuaucuuugacaaa

SEQ ID NO: 503747 - RNA, 22 nt, Human
gcauguguggaggagaugugcu

SEQ ID NO: 503748 - RNA, 19 nt, Human
ccacuuugcuucucugggu

SEQ ID NO: 503749 - RNA, 22 nt, Human
gcaaagcaagcugucagccuca

SEQ ID NO: 503750 - RNA, 22 nt, Human
uugaaauaucaaguuauuagug

SEQ ID NO: 503751 - RNA, 22 nt, Human
augcacuugcguguuugcaaau

SEQ ID NO: 503752 - RNA, 22 nt, Human
agcaggcagccauuuggaaggc

SEQ ID NO: 503753 - RNA, 22 nt, Human
gccuuccuuacaccugcucagc

SEQ ID NO: 503754 - RNA, 22 nt, Human
uuuguuaauucuuauguuagag

SEQ ID NO: 503755 - RNA, 22 nt, Human
ugagaaccaugaaaagcuguca

SEQ ID NO: 503756 - RNA, 22 nt, Human
ggcuuugggcccucaagucucc

SEQ ID NO: 503757 - RNA, 22 nt, Human
cucaggagcuuccucagcccau

SEQ ID NO: 503758 - RNA, 22 nt, Human
gcccugugcgcugaguucaggg

SEQ ID NO: 503759 - RNA, 22 nt, Human
cagagcuuugugucagggcugu

SEQ ID NO: 503760 - RNA, 22 nt, Human
ccuccagggcagacggggagca

SEQ ID NO: 503761 - RNA, 22 nt, Human
gggggcuggaauauccaucaac

SEQ ID NO: 503762 - RNA, 22 nt, Human
accuguuuuagucuuuaaucau

SEQ ID NO: 503763 - RNA, 22 nt, Human
augggcuggcagccugaacagc

SEQ ID NO: 503764 - RNA, 22 nt, Human
cuuuauguccuugaagaguugu

SEQ ID NO: 503765 - RNA, 22 nt, Human
agggcagcagcggcccaggccu

SEQ ID NO: 503766 - RNA, 22 nt, Human
gggagggauuaguucugccugg

SEQ ID NO: 503767 - RNA, 22 nt, Human
uggcagagucaucacaucugga

SEQ ID NO: 503768 - RNA, 22 nt, Human
uuguaugaauguauccuaauuu

SEQ ID NO: 503769 - RNA, 22 nt, Human
guccuggccucuggggguaugg

SEQ ID NO: 503770 - RNA, 22 nt, Human
uuuagaaauucaucuauggccu

SEQ ID NO: 503771 - RNA, 22 nt, Human
ggcaguggguuccccaaggcac

SEQ ID NO: 503772 - RNA, 22 nt, Human
agggggcucagcauggauggag

SEQ ID NO: 503773 - RNA, 22 nt, Human
ucugggucuuuacccauggaau

SEQ ID NO: 503774 - RNA, 22 nt, Human
cuggaaggcagagguugcagug

SEQ ID NO: 503775 - RNA, 22 nt, Human
ucugaaaauguugacuuuguuu

SEQ ID NO: 503776 - RNA, 22 nt, Human
ugaagcaggguggccagauugu

SEQ ID NO: 503777 - RNA, 22 nt, Human
gagacagagaucuugcugaguc

SEQ ID NO: 503778 - RNA, 22 nt, Human
uuuccaggcagaggaguuguga

SEQ ID NO: 503779 - RNA, 22 nt, Human
ucucugaucuuuaauucagaua

SEQ ID NO: 503780 - RNA, 22 nt, Human
gacagcuccuuuuggugcauau

SEQ ID NO: 503781 - RNA, 22 nt, Human
cuggcuuccaugcuguaguggc

SEQ ID NO: 503782 - RNA, 22 nt, Human
ucaaaggagacacaaggagaaa

SEQ ID NO: 503783 - RNA, 22 nt, Human
aaggcugacguuuguguuuauu

SEQ ID NO: 503784 - RNA, 22 nt, Human
cagcccaggccgacaguuccuc

SEQ ID NO: 503785 - RNA, 22 nt, Human
uaaaguauaagcauuggaguau

SEQ ID NO: 503786 - RNA, 22 nt, Human
uuugcauuuugauaagaucacu

SEQ ID NO: 503787 - RNA, 22 nt, Human
ggcccacacugacagcugagcu

SEQ ID NO: 503788 - RNA, 22 nt, Human
ucagcuuucucucgccaucagg

SEQ ID NO: 503789 - RNA, 22 nt, Human
auucauguuagcccacauguag

SEQ ID NO: 503790 - RNA, 22 nt, Human
ugggggagccuucacaguagcu

SEQ ID NO: 503791 - RNA, 18 nt, Human
aaaugcuaggcuacauga

SEQ ID NO: 503792 - RNA, 21 nt, Human
gucagcagauccagcacuugu

SEQ ID NO: 503793 - RNA, 22 nt, Human
uguuucagucccuguguucaau

SEQ ID NO: 503794 - RNA, 21 nt, Human
uguccaagguaugcacugggg

SEQ ID NO: 503795 - RNA, 22 nt, Human
agcagguguauauaaggcugag

SEQ ID NO: 503796 - RNA, 21 nt, Human
cagaccauugcaugagcaggu

SEQ ID NO: 503797 - RNA, 22 nt, Human
gaggcugaacagguucucauga

SEQ ID NO: 503798 - RNA, 22 nt, Human
agaacagaagggaggaaggccu

SEQ ID NO: 503799 - RNA, 22 nt, Human
augccaggaacaaacaguggug

SEQ ID NO: 503800 - RNA, 22 nt, Human
ggagagaauuccauggacaugu

SEQ ID NO: 503801 - RNA, 22 nt, Human
aaggcagggaaaguggauuagg

SEQ ID NO: 503802 - RNA, 22 nt, Human
uaaauguguuguggaugaaguu

SEQ ID NO: 503803 - RNA, 22 nt, Human
ccucugggugggaggccgggcg

SEQ ID NO: 503804 - RNA, 22 nt, Human
ucaguggaacugucugggugag

SEQ ID NO: 503805 - RNA, 22 nt, Human
uaacagaaauauuuccagguga

SEQ ID NO: 503806 - RNA, 21 nt, Human
aggggacagaguagcuccagg

SEQ ID NO: 503807 - RNA, 22 nt, Human
uguaucaaggguuuauguaagc

SEQ ID NO: 503808 - RNA, 22 nt, Human
agagcggggauaguuaauauuc

SEQ ID NO: 503809 - RNA, 22 nt, Human
gcuguguccucacacagccuuu

SEQ ID NO: 503810 - RNA, 22 nt, Human
cauuuguucugauuucaaaagg

SEQ ID NO: 503811 - RNA, 22 nt, Human
uccuguggagaggacuggaggu

SEQ ID NO: 503812 - RNA, 22 nt, Human
aggguucugccagugucuugag

SEQ ID NO: 503813 - RNA, 19 nt, Human
agacagagcucaguggguu

SEQ ID NO: 503814 - RNA, 22 nt, Human
ccucccuggccagagcagcagc

SEQ ID NO: 503815 - RNA, 22 nt, Human
gaugccuccaaaugagggcaga

SEQ ID NO: 503816 - RNA, 22 nt, Human
agccugagugcuuaggacuguu

SEQ ID NO: 503817 - RNA, 22 nt, Human
ggcugaguugagaggauuacuu

SEQ ID NO: 503818 - RNA, 22 nt, Human
ccucugcaaagaauuugucucc

SEQ ID NO: 503819 - RNA, 18 nt, Human
cuccagggaacucaguca

SEQ ID NO: 503820 - RNA, 22 nt, Human
gucccagggaugcagacaugag

SEQ ID NO: 503821 - RNA, 22 nt, Human
gcccugggauuggguggaggcu

SEQ ID NO: 503822 - RNA, 22 nt, Human
uacagaagcugagacacugaga

SEQ ID NO: 503823 - RNA, 22 nt, Human
aaaugcaaggauuuuguuaggc

SEQ ID NO: 503824 - RNA, 22 nt, Human
uccugggaguggccauguaaug

SEQ ID NO: 503825 - RNA, 22 nt, Human
aaggagagagcuuugcuggaac

SEQ ID NO: 503826 - RNA, 22 nt, Human
ucuggggacggggcccagcaau

SEQ ID NO: 503827 - RNA, 22 nt, Human
cuucaucuuucugagccucagu

SEQ ID NO: 503828 - RNA, 22 nt, Human
agacccugucaguguuaggaaa

SEQ ID NO: 503829 - RNA, 22 nt, Human
ucagaggcuucuggccagucug

SEQ ID NO: 503830 - RNA, 21 nt, Human
uccugggagucugagauccug

SEQ ID NO: 503831 - RNA, 22 nt, Human
caaagucauggggaugcagguc

SEQ ID NO: 503832 - RNA, 19 nt, Human
aggccugggguuuugcacu

SEQ ID NO: 503833 - RNA, 22 nt, Human
ggucuggccaauagacagcccc

SEQ ID NO: 503834 - RNA, 22 nt, Human
aggcaccuugagagcaggagcu

SEQ ID NO: 503835 - RNA, 22 nt, Human
cugucccucucacaccucacca

SEQ ID NO: 503836 - RNA, 22 nt, Human
gaggccugcuuuggcacucugg

SEQ ID NO: 503837 - RNA, 20 nt, Human
aggcacuggggauagguaag

SEQ ID NO: 503838 - RNA, 22 nt, Human
acuuugcacuaaguuacucauu

SEQ ID NO: 503839 - RNA, 22 nt, Human
ccugcccccgucagaggugaug

SEQ ID NO: 503840 - RNA, 22 nt, Human
cuucagcagccucuugcauaaa

SEQ ID NO: 503841 - RNA, 22 nt, Human
agaaguccccccagcaucguag

SEQ ID NO: 503842 - RNA, 22 nt, Human
ucaugcacaugugucaccauca

SEQ ID NO: 503843 - RNA, 22 nt, Human
uuccauaacugaccgaaugcau

SEQ ID NO: 503844 - RNA, 23 nt, Human
uuauaaauauuuucagguguguu

SEQ ID NO: 503845 - RNA, 22 nt, Human
agggccacaguaaugcugagua

SEQ ID NO: 503846 - RNA, 22 nt, Human
uggagccauaacccuuucguac

SEQ ID NO: 503847 - RNA, 22 nt, Human
uuugaaagaauuuauguacuuu

SEQ ID NO: 503848 - RNA, 22 nt, Human
uggcacuggcgcaggauggcgg

SEQ ID NO: 503849 - RNA, 22 nt, Human
aggcagguguuaacccucugag

SEQ ID NO: 503850 - RNA, 22 nt, Human
ccaaagugauaugugcuguaag

SEQ ID NO: 503851 - RNA, 22 nt, Human
cagggggugcaggcccugugac

SEQ ID NO: 503852 - RNA, 22 nt, Human
ggcagagcugcaugagcacuca

SEQ ID NO: 503853 - RNA, 22 nt, Human
uugccaggggacaucuggagcc

SEQ ID NO: 503854 - RNA, 22 nt, Human
caguuccuaugggcaaaacaca

SEQ ID NO: 503855 - RNA, 22 nt, Human
cugggagguggagguugcauug

SEQ ID NO: 503856 - RNA, 22 nt, Human
aggucaaagaaccuagcuauag

SEQ ID NO: 503857 - RNA, 22 nt, Human
aagcauuucagguagagauauu

SEQ ID NO: 503858 - RNA, 22 nt, Human
ucagugcaaucaagguauguuu

SEQ ID NO: 503859 - RNA, 22 nt, Human
cagagacuggagugcaguggcg

SEQ ID NO: 503860 - RNA, 22 nt, Human
ugcuucuguauugaaauuguua

SEQ ID NO: 503861 - RNA, 22 nt, Human
uuuaaacuaacaguacacguug

SEQ ID NO: 503862 - RNA, 19 nt, Human
ccaaaagcaauuccaagua

SEQ ID NO: 503863 - RNA, 22 nt, Human
agaagcagcaagcccuucaaag

SEQ ID NO: 503864 - RNA, 22 nt, Human
auaucuuuuagagcaagcuugu

SEQ ID NO: 503865 - RNA, 22 nt, Human
agguuccagguucgaaucccau

SEQ ID NO: 503866 - RNA, 22 nt, Human
agcuugggcaacacagcaagac

SEQ ID NO: 503867 - RNA, 22 nt, Human
ggcaagucaggaaguugacauu

SEQ ID NO: 503868 - RNA, 22 nt, Human
agcuuuaaaaauccaauaucca

SEQ ID NO: 503869 - RNA, 22 nt, Human
agcucuccacacauaggacuag

SEQ ID NO: 503870 - RNA, 22 nt, Human
agaacagugcugauaaaucaua

SEQ ID NO: 503871 - RNA, 22 nt, Human
cagugcuggcuguuaggacagu

SEQ ID NO: 503872 - RNA, 22 nt, Human
cagcuccuauuagacacugaau

SEQ ID NO: 503873 - RNA, 22 nt, Human
gguggcagagaggagguaguuu

SEQ ID NO: 503874 - RNA, 21 nt, Human
uauacagaggggaacaggaga

SEQ ID NO: 503875 - RNA, 21 nt, Human
ucuggggaagacaucuaggau

SEQ ID NO: 503876 - RNA, 22 nt, Human
ucucaaauuuguuagauaaaau

SEQ ID NO: 503877 - RNA, 22 nt, Human
ucuugauuacaaauaacaucau

SEQ ID NO: 503878 - RNA, 22 nt, Human
uugggcugaaguagagggcaga

SEQ ID NO: 503879 - RNA, 22 nt, Human
agaucugaaucucauccgagga

SEQ ID NO: 503880 - RNA, 22 nt, Human
ugaaggccagcagagugaaggc

SEQ ID NO: 503881 - RNA, 22 nt, Human
agagugaucagauaucaggugu

SEQ ID NO: 503882 - RNA, 22 nt, Human
gccaggcauuuauugauugaau

SEQ ID NO: 503883 - RNA, 22 nt, Human
ggcuucuccagguacugagcau

SEQ ID NO: 503884 - RNA, 19 nt, Human
cuuaugcagcugagcuugg

SEQ ID NO: 503885 - RNA, 22 nt, Human
acaugaaaguuauucugaguug

SEQ ID NO: 503886 - RNA, 22 nt, Human
ggucugcccuggguggaggcgc

SEQ ID NO: 503887 - RNA, 22 nt, Human
acaaagcuagagaagagaauug

SEQ ID NO: 503888 - RNA, 22 nt, Human
ccacccagccagaugcaggaag

SEQ ID NO: 503889 - RNA, 22 nt, Human
agucucugggcaugguugugac

SEQ ID NO: 503890 - RNA, 22 nt, Human
agguccagugaaacuuuauuug

SEQ ID NO: 503891 - RNA, 22 nt, Human
gcagcagcccagggcucucaga

SEQ ID NO: 503892 - RNA, 22 nt, Human
caugaaauguuagaauuagaca

SEQ ID NO: 503893 - RNA, 22 nt, Human
ccuuaaagaauaagucuuaucu

SEQ ID NO: 503894 - RNA, 22 nt, Human
cccagcuccuuacagggccgaa

SEQ ID NO: 503895 - RNA, 22 nt, Human
aucaggaugacaacugcugggu

SEQ ID NO: 503896 - RNA, 22 nt, Human
cccugccuacaggguuuucuuu

SEQ ID NO: 503897 - RNA, 22 nt, Human
guguaugaacgaaagaauggau

SEQ ID NO: 503898 - RNA, 20 nt, Human
ugucaugcauuagaugaaga

SEQ ID NO: 503899 - RNA, 22 nt, Human
ccuggccacagggcucugcauu

SEQ ID NO: 503900 - RNA, 22 nt, Human
aagcaauaagccagauuuggau

SEQ ID NO: 503901 - RNA, 22 nt, Human
uccaggcauaagccuugagugu

SEQ ID NO: 503902 - RNA, 22 nt, Human
caucucaugggcaugccaagcu

SEQ ID NO: 503903 - RNA, 22 nt, Human
augugcaaauccaaugugaaug

SEQ ID NO: 503904 - RNA, 22 nt, Human
gcugugcagguccccacugccu

SEQ ID NO: 503905 - RNA, 22 nt, Human
uuguaugagcuccaggaacuca

SEQ ID NO: 503906 - RNA, 22 nt, Human
cugagcauggccgguccauggu

SEQ ID NO: 503907 - RNA, 22 nt, Human
cuccugggaggaugcggacccg

SEQ ID NO: 503908 - RNA, 22 nt, Human
uaagaauuguguugaauagagu

SEQ ID NO: 503909 - RNA, 22 nt, Human
cagaggccuuucuacagugaua

SEQ ID NO: 503910 - RNA, 17 nt, Human
uuaagguggaucagcac

SEQ ID NO: 503911 - RNA, 22 nt, Human
aagcugccuugcugaggagaaa

SEQ ID NO: 503912 - RNA, 22 nt, Human
ggaccugcucucccaguucucu

SEQ ID NO: 503913 - RNA, 22 nt, Human
uuuauuaagaugcgaaugcuga

SEQ ID NO: 503914 - RNA, 22 nt, Human
auuugucaaaacacagagaaca

SEQ ID NO: 503915 - RNA, 22 nt, Human
uaagagcuaggauuuuaaauca

SEQ ID NO: 503916 - RNA, 22 nt, Human
ggaaucuuugaaggauuuuaag

SEQ ID NO: 503917 - RNA, 22 nt, Human
gcacugcaucuacuggcaagua

SEQ ID NO: 503918 - RNA, 22 nt, Human
gcauggccuugcuguaguggua

SEQ ID NO: 503919 - RNA, 22 nt, Human
gcagaggcugggugucccaguc

SEQ ID NO: 503920 - RNA, 22 nt, Human
cugcacugagcucucccagccc

SEQ ID NO: 503921 - RNA, 22 nt, Human
uucuuuuaauguucugaaguuu

SEQ ID NO: 503922 - RNA, 22 nt, Human
caggccugugacaccgugucug

SEQ ID NO: 503923 - RNA, 22 nt, Human
caaagcucaugcucuuagccau

SEQ ID NO: 503924 - RNA, 22 nt, Human
ggccuuugcguccacgccgcuu

SEQ ID NO: 503925 - RNA, 22 nt, Human
ugaagccacagagcaucugccu

SEQ ID NO: 503926 - RNA, 22 nt, Human
gaaggaagauucuguuggaauc

SEQ ID NO: 503927 - RNA, 22 nt, Human
agcuguggaguaggggguugga

SEQ ID NO: 503928 - RNA, 22 nt, Human
cuggaucugaacaucgguauca

SEQ ID NO: 503929 - RNA, 22 nt, Human
agcaccaucagaugcaauaucu

SEQ ID NO: 503930 - RNA, 22 nt, Human
aggagcugggagaaggacuaaa

SEQ ID NO: 503931 - RNA, 22 nt, Human
ccagagccucuuaugaagaucg

SEQ ID NO: 503932 - RNA, 22 nt, Human
cagaugagaguggccaggguuc

SEQ ID NO: 503933 - RNA, 22 nt, Human
cuggacuuuggcccaucugcca

SEQ ID NO: 503934 - RNA, 22 nt, Human
agcuuccugucuucugcacaaa

SEQ ID NO: 503935 - RNA, 22 nt, Human
ggcuuuaagguuuaggaagcaa

SEQ ID NO: 503936 - RNA, 22 nt, Human
cugggcuguucugccccugggu

SEQ ID NO: 503937 - RNA, 22 nt, Human
cagagcaugaauaaaaguuaca

SEQ ID NO: 503938 - RNA, 23 nt, Human
aguucaaaaucaaccaggacacu

SEQ ID NO: 503939 - RNA, 22 nt, Human
ucagggcaggacaguguaggcc

SEQ ID NO: 503940 - RNA, 22 nt, Human
agcagcaucuucuaaguaaggc

SEQ ID NO: 503941 - RNA, 22 nt, Human
gccucuggggcagcugagucau

SEQ ID NO: 503942 - RNA, 22 nt, Human
aaggcacuguacuaguuaguua

SEQ ID NO: 503943 - RNA, 22 nt, Human
cacaguggaaguccaggauccc

SEQ ID NO: 503944 - RNA, 22 nt, Human
acagagagggagugauaaaucc

SEQ ID NO: 503945 - RNA, 22 nt, Human
agcaguuuuccugagcuccuca

SEQ ID NO: 503946 - RNA, 22 nt, Human
gggcucuggaaggugcaccaug

SEQ ID NO: 503947 - RNA, 22 nt, Human
ugggcagaaaucaguaucagau

SEQ ID NO: 503948 - RNA, 22 nt, Human
ccuuuuuucuaugccaacucug

SEQ ID NO: 503949 - RNA, 22 nt, Human
agagaagacuuacagccacagu

SEQ ID NO: 503950 - RNA, 17 nt, Human
cagagucugucugcauc

SEQ ID NO: 503951 - RNA, 22 nt, Human
aaaugcuagggagaaacucucc

SEQ ID NO: 503952 - RNA, 22 nt, Human
caggcccugccuugagggaccu

SEQ ID NO: 503953 - RNA, 20 nt, Human
ucucaggguucagcaaagua

SEQ ID NO: 503954 - RNA, 23 nt, Human
uccuuccuuugagaggcuccauc

SEQ ID NO: 503955 - RNA, 22 nt, Human
uggcuuggcuaagaucuaagcu

SEQ ID NO: 503956 - RNA, 22 nt, Human
aguacauacuucaaauguacuu

SEQ ID NO: 503957 - RNA, 22 nt, Human
gccuguuuguuugcaaaggagc

SEQ ID NO: 503958 - RNA, 22 nt, Human
aggcagcaaagaaaugaugcug

SEQ ID NO: 503959 - RNA, 22 nt, Human
acuuguguaacacagaaagaac

SEQ ID NO: 503960 - RNA, 22 nt, Human
uucucacuauguauguagauug

SEQ ID NO: 503961 - RNA, 22 nt, Human
agucauccaagagccugggcag

SEQ ID NO: 503962 - RNA, 22 nt, Human
caguaaauacauaucagagaag

SEQ ID NO: 503963 - RNA, 18 nt, Human
acacacacaccuguguau

SEQ ID NO: 503964 - RNA, 20 nt, Human
guaaaauauggucuuugggu

SEQ ID NO: 503965 - RNA, 21 nt, Human
gcagccagccgagaccaugcc

SEQ ID NO: 503966 - RNA, 20 nt, Human
ccuguguggccagcugaggc

SEQ ID NO: 503967 - RNA, 22 nt, Human
agugacagcugggaaggugaaa

SEQ ID NO: 503968 - RNA, 22 nt, Human
ggagccaguauuuaguggucuu

SEQ ID NO: 503969 - RNA, 22 nt, Human
cagguggccuugccaucuccug

SEQ ID NO: 503970 - RNA, 22 nt, Human
uacacagaagccagaaggccug

SEQ ID NO: 503971 - RNA, 22 nt, Human
uggcagagucugggcuugggca

SEQ ID NO: 503972 - RNA, 22 nt, Human
ucugccaccuucauccuccacu

SEQ ID NO: 503973 - RNA, 22 nt, Human
ccagcccuguaaggaugaggca

SEQ ID NO: 503974 - RNA, 22 nt, Human
cgugagcaaaauggacacuccc

SEQ ID NO: 503975 - RNA, 22 nt, Human
cagaauuugaaguaauauucca

SEQ ID NO: 503976 - RNA, 22 nt, Human
guuuuauuggaacacagccaug

SEQ ID NO: 503977 - RNA, 20 nt, Human
ccugggcucaaagcauccuc

SEQ ID NO: 503978 - RNA, 22 nt, Human
acccugccgugggcugcuugug

SEQ ID NO: 503979 - RNA, 22 nt, Human
cacuguacagcauuaacaaggc

SEQ ID NO: 503980 - RNA, 22 nt, Human
gagacacaaucucauuuacauu

SEQ ID NO: 503981 - RNA, 22 nt, Human
aguguuguaugggaugacugcu

SEQ ID NO: 503982 - RNA, 22 nt, Human
agggccaguaccaggugggugg

SEQ ID NO: 503983 - RNA, 22 nt, Human
aaaaacugguaacuauucccca

SEQ ID NO: 503984 - RNA, 22 nt, Human
ccagcagggcagugcccuggac

SEQ ID NO: 503985 - RNA, 22 nt, Human
aaugauuuccccuacacagaag

SEQ ID NO: 503986 - RNA, 22 nt, Human
gaccugggguaagcuuggcaac

SEQ ID NO: 503987 - RNA, 20 nt, Human
agggcagcuugaggagccgg

SEQ ID NO: 503988 - RNA, 22 nt, Human
aaucagaauuuauugaaucuuu

SEQ ID NO: 503989 - RNA, 22 nt, Human
ucucugagcucaggagcugcag

SEQ ID NO: 503990 - RNA, 22 nt, Human
uucaguguuuguagagauaacu

SEQ ID NO: 503991 - RNA, 22 nt, Human
accccacagcauacaaaggcac

SEQ ID NO: 503992 - RNA, 22 nt, Human
ccucugcucugguccaugugcu

SEQ ID NO: 503993 - RNA, 19 nt, Human
uggcugggugccaauggcc

SEQ ID NO: 503994 - RNA, 22 nt, Human
cuggagcucuguguguuccuga

SEQ ID NO: 503995 - RNA, 22 nt, Human
cucucugaggaaggagcaucug

SEQ ID NO: 503996 - RNA, 22 nt, Human
cagcucugaagaaaggugucua

SEQ ID NO: 503997 - RNA, 22 nt, Human
gcugagcucccagcaguaucug

SEQ ID NO: 503998 - RNA, 18 nt, Human
ugaggcagucagugaugg

SEQ ID NO: 503999 - RNA, 22 nt, Human
uucauucacccaggaaacaucu

SEQ ID NO: 504000 - RNA, 22 nt, Human
ucacagaagggaaagaugccaa

SEQ ID NO: 504001 - RNA, 22 nt, Human
caggccagaggcuguuguugcg

SEQ ID NO: 504002 - RNA, 22 nt, Human
gacccaggguggucaccugaaa

SEQ ID NO: 504003 - RNA, 22 nt, Human
uugccacuaacuagcugugaga

SEQ ID NO: 504004 - RNA, 22 nt, Human
cagggcucuuccggagcaggga

SEQ ID NO: 504005 - RNA, 22 nt, Human
ucuccaggagcaagucacccag

SEQ ID NO: 504006 - RNA, 22 nt, Human
guggccaguggugggcgcccug

SEQ ID NO: 504007 - RNA, 20 nt, Human
cagaccugcacccacuucga

SEQ ID NO: 504008 - RNA, 22 nt, Human
agagaaaugauuccugggcaga

SEQ ID NO: 504009 - RNA, 22 nt, Human
ccuaauuugauuuuaaauagcc

SEQ ID NO: 504010 - RNA, 22 nt, Human
gcucuggacccuggaguggcug

SEQ ID NO: 504011 - RNA, 22 nt, Human
cugggaugucuauagaacacuu

SEQ ID NO: 504012 - RNA, 22 nt, Human
uuguauuuggguaguauagaga

SEQ ID NO: 504013 - RNA, 22 nt, Human
cagguccaagguuccugaauag

SEQ ID NO: 504014 - RNA, 22 nt, Human
uucaaguucauguguagucagu

SEQ ID NO: 504015 - RNA, 22 nt, Human
aggacuucaucaccuguauaaa

SEQ ID NO: 504016 - RNA, 22 nt, Human
cacugagaggucucauuuccaa

SEQ ID NO: 504017 - RNA, 22 nt, Human
auacaugacucacacauucugc

SEQ ID NO: 504018 - RNA, 22 nt, Human
cuguggcucucugcaggguccc

SEQ ID NO: 504019 - RNA, 22 nt, Human
gcugccuggcuuuaguccacuu

SEQ ID NO: 504020 - RNA, 20 nt, Human
gcauccagacacccagcugc

SEQ ID NO: 504021 - RNA, 22 nt, Human
uacaaaguuuucuuggauugag

SEQ ID NO: 504022 - RNA, 22 nt, Human
caguuucuucaucaguuaagca

SEQ ID NO: 504023 - RNA, 22 nt, Human
uacaguauggaaaauguauagu

SEQ ID NO: 504024 - RNA, 19 nt, Human
ccuuugaaucaggacacuu

SEQ ID NO: 504025 - RNA, 22 nt, Human
uagcugucagcaaucaaguggu

SEQ ID NO: 504026 - RNA, 22 nt, Human
caggugcccagcuccugcugug

SEQ ID NO: 504027 - RNA, 22 nt, Human
aggcugccuguuccaaucuccu

SEQ ID NO: 504028 - RNA, 22 nt, Human
gacugugacuucugaagcaaua

SEQ ID NO: 504029 - RNA, 22 nt, Human
ucaauaauggcaggauaaauuu

SEQ ID NO: 504030 - RNA, 22 nt, Human
ggcaguucuggaugcauuguca

SEQ ID NO: 504031 - RNA, 22 nt, Human
ucuggcucuauaacuccuagcu

SEQ ID NO: 504032 - RNA, 22 nt, Human
cuugagcuuagguucaggauug

SEQ ID NO: 504033 - RNA, 22 nt, Human
uguaucaaaccaaauuaauucu

SEQ ID NO: 504034 - RNA, 22 nt, Human
gaaaaugugucaucccuacugu

SEQ ID NO: 504035 - RNA, 22 nt, Human
uccagggcaugcucagacucag

SEQ ID NO: 504036 - RNA, 22 nt, Human
ggccaggcuggucucagacuuc

SEQ ID NO: 504037 - RNA, 22 nt, Human
aaaaucuugacuguuuuuagaa

SEQ ID NO: 504038 - RNA, 22 nt, Human
cagaggccuauccaguguccau

SEQ ID NO: 504039 - RNA, 22 nt, Human
agguuucuggaaagguuuugcu

SEQ ID NO: 504040 - RNA, 22 nt, Human
uauacuuuccugcaacuuugau

SEQ ID NO: 504041 - RNA, 22 nt, Human
gucccugggaugcccuucuggg

SEQ ID NO: 504042 - RNA, 22 nt, Human
aaaguccuagcgauccacagaa

SEQ ID NO: 504043 - RNA, 22 nt, Human
cagcaggaggugaguagcaggu

SEQ ID NO: 504044 - RNA, 22 nt, Human
gcagcccagguguagcucuuug

SEQ ID NO: 504045 - RNA, 23 nt, Human
uucaagauacgguuuccaggcug

SEQ ID NO: 504046 - RNA, 22 nt, Human
cuggccuuuaaaaugaccuuau

SEQ ID NO: 504047 - RNA, 22 nt, Human
cucugaauggacacuccagugu

SEQ ID NO: 504048 - RNA, 22 nt, Human
accgaaggaaacuggaaccguu

SEQ ID NO: 504049 - RNA, 22 nt, Human
cugggcugcuguccacuagggu

SEQ ID NO: 504050 - RNA, 22 nt, Human
uugcaggggaaggagcagagcu

SEQ ID NO: 504051 - RNA, 22 nt, Human
aaaguauguuguggcuuuuaaa

SEQ ID NO: 504052 - RNA, 22 nt, Human
gccuggcugccggccuuggcaa

SEQ ID NO: 504053 - RNA, 22 nt, Human
uauuuucaucuuguccuuggau

SEQ ID NO: 504054 - RNA, 22 nt, Human
auuugccuuggugauuuguaaa

SEQ ID NO: 504055 - RNA, 22 nt, Human
gcauuucugugcauacacauga

SEQ ID NO: 504056 - RNA, 22 nt, Human
ugccagccuccugauaucaucc

SEQ ID NO: 504057 - RNA, 22 nt, Human
aucagcaagauugugucuugua

SEQ ID NO: 504058 - RNA, 22 nt, Human
uacaacagaccuagaugaauga

SEQ ID NO: 504059 - RNA, 22 nt, Human
cuuuguuuuacucagaggcaug

SEQ ID NO: 504060 - RNA, 22 nt, Human
agaaauguggaucguuuuaaaa

SEQ ID NO: 504061 - RNA, 22 nt, Human
auuuuagcuguccaguggauug

SEQ ID NO: 504062 - RNA, 22 nt, Human
cucagccccaauucuccccauu

SEQ ID NO: 504063 - RNA, 22 nt, Human
accucugccaagaugugcuccc

SEQ ID NO: 504064 - RNA, 22 nt, Human
uucacagaccaggaggcuguga

SEQ ID NO: 504065 - RNA, 22 nt, Human
ucugucacuuuuauuuacugaa

SEQ ID NO: 504066 - RNA, 22 nt, Human
ccaggcucagcuauuaagaaac

SEQ ID NO: 504067 - RNA, 22 nt, Human
acuguuuucuguaaagggccag

SEQ ID NO: 504068 - RNA, 22 nt, Human
agguaacacuacuuaguauacu

SEQ ID NO: 504069 - RNA, 22 nt, Human
aggaagccuggggcugcccucg

SEQ ID NO: 504070 - RNA, 22 nt, Human
agaccaagaaaggaugaggauc

SEQ ID NO: 504071 - RNA, 22 nt, Human
ucaauucaacacaugcacauug

SEQ ID NO: 504072 - RNA, 20 nt, Human
ggcaggaccccaguggcauc

SEQ ID NO: 504073 - RNA, 17 nt, Human
gcagugaaaagagauca

SEQ ID NO: 504074 - RNA, 22 nt, Human
uugaauuuagauuguauguuga

SEQ ID NO: 504075 - RNA, 22 nt, Human
ggagucuuaaaaaucaaaugga

SEQ ID NO: 504076 - RNA, 22 nt, Human
gaguccaguuagugaggcuggg

SEQ ID NO: 504077 - RNA, 22 nt, Human
cucugugggggagaggcagcug

SEQ ID NO: 504078 - RNA, 22 nt, Human
cauacuuuugcccugacauucu

SEQ ID NO: 504079 - RNA, 22 nt, Human
cuuugaaagcucccaggacuua

SEQ ID NO: 504080 - RNA, 19 nt, Human
gcuggggaauggauauuga

SEQ ID NO: 504081 - RNA, 22 nt, Human
uacauuccacuagugacuggcg

SEQ ID NO: 504082 - RNA, 22 nt, Human
auuguugagugcuucagcugua

SEQ ID NO: 504083 - RNA, 22 nt, Human
ugccuggguccaggccaagccu

SEQ ID NO: 504084 - RNA, 22 nt, Human
ggccagaggccauccuccugcu

SEQ ID NO: 504085 - RNA, 22 nt, Human
ggcccagcugugcuuccagccc

SEQ ID NO: 504086 - RNA, 22 nt, Human
agaagucaaugaugagagugcu

SEQ ID NO: 504087 - RNA, 22 nt, Human
uuggaaggagccuaaaagagac

SEQ ID NO: 504088 - RNA, 22 nt, Human
cagagccuggcgaugucaugga

SEQ ID NO: 504089 - RNA, 22 nt, Human
ggcuagaagucagaggucaaga

SEQ ID NO: 504090 - RNA, 22 nt, Human
uuccagugaugggcaauuuggu

SEQ ID NO: 504091 - RNA, 21 nt, Human
guucaauagcucuuugaaugc

SEQ ID NO: 504092 - RNA, 23 nt, Human
cauguacacacagcuguacagug

SEQ ID NO: 504093 - RNA, 21 nt, Human
ccacaggggcuccccugucag

SEQ ID NO: 504094 - RNA, 22 nt, Human
uggcuccuaggauggugccugg

SEQ ID NO: 504095 - RNA, 19 nt, Human
gccugccuggguuucugag

SEQ ID NO: 504096 - RNA, 22 nt, Human
cagaggucccuguucuuaagga

SEQ ID NO: 504097 - RNA, 22 nt, Human
gagcuuuacuucugacuggugc

SEQ ID NO: 504098 - RNA, 22 nt, Human
cagcagcugccucagcugggga

SEQ ID NO: 504099 - RNA, 22 nt, Human
agcaguggaccucagugcuauu

SEQ ID NO: 504100 - RNA, 22 nt, Human
ccugaguuaguugcugugucuc

SEQ ID NO: 504101 - RNA, 22 nt, Human
ggcugcucugccuuccagcugg

SEQ ID NO: 504102 - RNA, 22 nt, Human
ugagccaugggacuccaaggga

SEQ ID NO: 504103 - RNA, 23 nt, Human
aacaccaaggcucagagagauaa

SEQ ID NO: 504104 - RNA, 18 nt, Human
aguggucuguuauaucau

SEQ ID NO: 504105 - RNA, 18 nt, Human
aggucuguggucaccagg

SEQ ID NO: 504106 - RNA, 22 nt, Human
accucugcaguagggcugugcc

SEQ ID NO: 504107 - RNA, 22 nt, Human
uacagcuugaugagagcgcgag

SEQ ID NO: 504108 - RNA, 22 nt, Human
ucaguggagcuaagcaugagau

SEQ ID NO: 504109 - RNA, 22 nt, Human
gaaucucaguggaagcaggaag

SEQ ID NO: 504110 - RNA, 22 nt, Human
augcuauguaacuggcagauag

SEQ ID NO: 504111 - RNA, 21 nt, Human
ucuuuuaacaccaggaauucc

SEQ ID NO: 504112 - RNA, 22 nt, Human
caagagcuagaaauugguuaga

SEQ ID NO: 504113 - RNA, 22 nt, Human
agaggccaugcuagaggccugg

SEQ ID NO: 504114 - RNA, 22 nt, Human
auuuccucaugaucauaaugca

SEQ ID NO: 504115 - RNA, 22 nt, Human
gccuggcugcucagccacucac

SEQ ID NO: 504116 - RNA, 22 nt, Human
guugaaagagcauggacuugaa

SEQ ID NO: 504117 - RNA, 22 nt, Human
caaacuguucucugugggauuc

SEQ ID NO: 504118 - RNA, 22 nt, Human
cuucaagaagacagcagagcau

SEQ ID NO: 504119 - RNA, 22 nt, Human
agcaguuuuagggagacacauu

SEQ ID NO: 504120 - RNA, 22 nt, Human
ccagcugcugugcagggaggcu

SEQ ID NO: 504121 - RNA, 22 nt, Human
cagggucaggaggaucuggcuu

SEQ ID NO: 504122 - RNA, 22 nt, Human
cuuucucuguguuucacaugcu

SEQ ID NO: 504123 - RNA, 22 nt, Human
ucauaaauugauuaugugcuuu

SEQ ID NO: 504124 - RNA, 22 nt, Human
ggcucaggggccaggccugucc

SEQ ID NO: 504125 - RNA, 22 nt, Human
uucacaguggcugugccauuug

SEQ ID NO: 504126 - RNA, 22 nt, Human
uccugcagagucccacugauuu

SEQ ID NO: 504127 - RNA, 22 nt, Human
aggagaggucucccuuccccag

SEQ ID NO: 504128 - RNA, 22 nt, Human
gcuaggagauugagcucugaag

SEQ ID NO: 504129 - RNA, 22 nt, Human
uauacaggaaauuuuggaacag

SEQ ID NO: 504130 - RNA, 18 nt, Human
gucauugcaacauacugu

SEQ ID NO: 504131 - RNA, 22 nt, Human
uaagaacaagcuggggguucca

SEQ ID NO: 504132 - RNA, 22 nt, Human
uuagauaaauugcaacuugauu

SEQ ID NO: 504133 - RNA, 22 nt, Human
uguguucaaucccuagucucag

SEQ ID NO: 504134 - RNA, 23 nt, Human
ucucagugccgauugcauacaca

SEQ ID NO: 504135 - RNA, 22 nt, Human
uggaaagagguagaggaucugg

SEQ ID NO: 504136 - RNA, 22 nt, Human
uauuucuuguucccuccaaguu

SEQ ID NO: 504137 - RNA, 17 nt, Human
uuacaacaauucaugag

SEQ ID NO: 504138 - RNA, 18 nt, Human
ucuuggaguaaugaucaa

SEQ ID NO: 504139 - RNA, 22 nt, Human
gaguuuaaauaacacauuucca

SEQ ID NO: 504140 - RNA, 21 nt, Human
ugaaugaugccccagaguugu

SEQ ID NO: 504141 - RNA, 22 nt, Human
gcuggccugaccagccacaggc

SEQ ID NO: 504142 - RNA, 22 nt, Human
uaacuuuggggacacuucucuu

SEQ ID NO: 504143 - RNA, 22 nt, Human
ugcugcacaauuggaaaguauc

SEQ ID NO: 504144 - RNA, 22 nt, Human
aagacaauguuucugauagaua

SEQ ID NO: 504145 - RNA, 22 nt, Human
cugcccugccuggccagugugg

SEQ ID NO: 504146 - RNA, 22 nt, Human
gauccugucuguggagucagca

SEQ ID NO: 504147 - RNA, 22 nt, Human
ggcaguggguggaucucaggga

SEQ ID NO: 504148 - RNA, 22 nt, Human
cugggccauggaagucucugcc

SEQ ID NO: 504149 - RNA, 22 nt, Human
gucagauuaauagcaauaauaa

SEQ ID NO: 504150 - RNA, 22 nt, Human
agggaucaaaaaauguacaugc

SEQ ID NO: 504151 - RNA, 22 nt, Human
uccagccaagggagguuacuag

SEQ ID NO: 504152 - RNA, 22 nt, Human
uggggcuggcacagucucuauu

SEQ ID NO: 504153 - RNA, 22 nt, Human
ugcuucaggaagaaacgccagg

SEQ ID NO: 504154 - RNA, 22 nt, Human
uggccaggggaguuccccucca

SEQ ID NO: 504155 - RNA, 22 nt, Human
ugcccccugguggccagagccg

SEQ ID NO: 504156 - RNA, 21 nt, Human
ugcaauauauauuugccugaa

SEQ ID NO: 504157 - RNA, 21 nt, Human
gagcucucaggcaagaagcag

SEQ ID NO: 504158 - RNA, 22 nt, Human
uccugggaggcaggaccccuuu

SEQ ID NO: 504159 - RNA, 22 nt, Human
accuucaaguaugugggcugaa

SEQ ID NO: 504160 - RNA, 22 nt, Human
gcagugguggagcuuacauauc

SEQ ID NO: 504161 - RNA, 22 nt, Human
guggcucuggcuuuccaggcgg

SEQ ID NO: 504162 - RNA, 22 nt, Human
ggcuggcacucuguccaguguc

SEQ ID NO: 504163 - RNA, 22 nt, Human
aacaugauggggaagaacaaga

SEQ ID NO: 504164 - RNA, 22 nt, Human
accucugcaacccuggaauggg

SEQ ID NO: 504165 - RNA, 22 nt, Human
uagcauuccuuguggcuucuga

SEQ ID NO: 504166 - RNA, 22 nt, Human
cuggcuggccggagcgaggcgg

SEQ ID NO: 504167 - RNA, 23 nt, Human
agggccugauggcucccgcuggc

SEQ ID NO: 504168 - RNA, 22 nt, Human
ugggccugggcuccuguccucu

SEQ ID NO: 504169 - RNA, 22 nt, Human
ccagggaaguaguugugagagc

SEQ ID NO: 504170 - RNA, 22 nt, Human
ccagcagaggggcggagugcag

SEQ ID NO: 504171 - RNA, 21 nt, Human
uccaaaucccauucuguaguc

SEQ ID NO: 504172 - RNA, 22 nt, Human
gaagauuugaaacacauagaca

SEQ ID NO: 504173 - RNA, 22 nt, Human
cggcagagacggcgcuuugaac

SEQ ID NO: 504174 - RNA, 22 nt, Human
acaguguuuucuuaaggagaaa

SEQ ID NO: 504175 - RNA, 22 nt, Human
cuggcugaggcagagccugggg

SEQ ID NO: 504176 - RNA, 22 nt, Human
cauugacaguucuuuaaguugc

SEQ ID NO: 504177 - RNA, 22 nt, Human
ugggcaggggcccugcuuccgu

SEQ ID NO: 504178 - RNA, 22 nt, Human
gguuccacgguguuuggaggca

SEQ ID NO: 504179 - RNA, 22 nt, Human
gggcuucucuuuagugagcuga

SEQ ID NO: 504180 - RNA, 16 nt, Human
cagcccugaggaagaa

SEQ ID NO: 504181 - RNA, 22 nt, Human
auucucaauuuugccaaagggu

SEQ ID NO: 504182 - RNA, 22 nt, Human
ugugcagagaagccacuggggg

SEQ ID NO: 504183 - RNA, 22 nt, Human
cugggcuccacucccacagugu

SEQ ID NO: 504184 - RNA, 22 nt, Human
uucauucccaagaguaaacaua

SEQ ID NO: 504185 - RNA, 22 nt, Human
gagccagcugagcugcacuguc

SEQ ID NO: 504186 - RNA, 22 nt, Human
gccaggcagagccccgugcagc

SEQ ID NO: 504187 - RNA, 22 nt, Human
ugucucagaauggcucauaaua

SEQ ID NO: 504188 - RNA, 22 nt, Human
ugccaggcuaaguggaggacuu

SEQ ID NO: 504189 - RNA, 22 nt, Human
aaugaagccagguagaagagaa

SEQ ID NO: 504190 - RNA, 22 nt, Human
gagagguagaggcucugcuuaa

SEQ ID NO: 504191 - RNA, 22 nt, Human
uacagugucuggauaucaaagg

SEQ ID NO: 504192 - RNA, 21 nt, Human
agcgucaauaucgucaacagg

SEQ ID NO: 504193 - RNA, 21 nt, Human
uccaagcucaacucccuuccu

SEQ ID NO: 504194 - RNA, 22 nt, Human
gagcuggucaguuucagggcca

SEQ ID NO: 504195 - RNA, 22 nt, Human
aaaggagaguagguuacuccau

SEQ ID NO: 504196 - RNA, 22 nt, Human
agcacagauucugaagaguccu

SEQ ID NO: 504197 - RNA, 22 nt, Human
uccaaagaaccuggcuacuguc

SEQ ID NO: 504198 - RNA, 22 nt, Human
uucuuuccucccagccuuugga

SEQ ID NO: 504199 - RNA, 22 nt, Human
uggcugaaggaagauucuucua

SEQ ID NO: 504200 - RNA, 22 nt, Human
aaauuauuacaagcuaguuggc

SEQ ID NO: 504201 - RNA, 22 nt, Human
cugccucucaggucccugagau

SEQ ID NO: 504202 - RNA, 22 nt, Human
uagagaaauaagcuuugccuug

SEQ ID NO: 504203 - RNA, 22 nt, Human
gaggcaguuugccaugccagga

SEQ ID NO: 504204 - RNA, 22 nt, Human
aagggcuccauccuuauaaaug

SEQ ID NO: 504205 - RNA, 22 nt, Human
cuaaaauuaucaagauaauucc

SEQ ID NO: 504206 - RNA, 19 nt, Human
ggggagaacuagagacagc

SEQ ID NO: 504207 - RNA, 22 nt, Human
ucauuaauuugcuuagacuuau

SEQ ID NO: 504208 - RNA, 22 nt, Human
cuuccucuguguccugggcuuc

SEQ ID NO: 504209 - RNA, 22 nt, Human
ucagcaggcgguuccuuguggg

SEQ ID NO: 504210 - RNA, 22 nt, Human
accugagaaugggggcaugugu

SEQ ID NO: 504211 - RNA, 22 nt, Human
cugccucugcgucccacagagu

SEQ ID NO: 504212 - RNA, 19 nt, Human
uggggccuccugucccugg

SEQ ID NO: 504213 - RNA, 23 nt, Human
ugaaauauucuuuugcaugagcu

SEQ ID NO: 504214 - RNA, 22 nt, Human
acuauucaagugcucauucaga

SEQ ID NO: 504215 - RNA, 20 nt, Human
gcucaguggagaaaugcacc

SEQ ID NO: 504216 - RNA, 22 nt, Human
ucuggauuuguggaaaaucugc

SEQ ID NO: 504217 - RNA, 22 nt, Human
cuccucccacggucucaggaag

SEQ ID NO: 504218 - RNA, 22 nt, Human
caagaccucaaaaugagagggg

SEQ ID NO: 504219 - RNA, 22 nt, Human
auggcugcaucauccugguuga

SEQ ID NO: 504220 - RNA, 22 nt, Human
ugggcuccagcaccugugcucu

SEQ ID NO: 504221 - RNA, 22 nt, Human
gaaacaauuuuuguugucuaag

SEQ ID NO: 504222 - RNA, 22 nt, Human
guccucuguuagaaaugugcuu

SEQ ID NO: 504223 - RNA, 20 nt, Human
uagguccaaugcucgucuuc

SEQ ID NO: 504224 - RNA, 22 nt, Human
aaacagcucaagaaguuacucu

SEQ ID NO: 504225 - RNA, 22 nt, Human
ggguccaguaguugguggccgu

SEQ ID NO: 504226 - RNA, 22 nt, Human
ucucagcagccagauccagagc

SEQ ID NO: 504227 - RNA, 22 nt, Human
gaaggggaaaguugagcaaaua

SEQ ID NO: 504228 - RNA, 22 nt, Human
gggcuccagcccgggaccaggu

SEQ ID NO: 504229 - RNA, 22 nt, Human
auccugggaaugggagggucau

SEQ ID NO: 504230 - RNA, 22 nt, Human
cugagaggaugcugcaguggag

SEQ ID NO: 504231 - RNA, 22 nt, Human
auguagcugcagaugauaaugc

SEQ ID NO: 504232 - RNA, 20 nt, Human
uggaccugucucuuuaggga

SEQ ID NO: 504233 - RNA, 22 nt, Human
gagcuggugaucagcuggagga

SEQ ID NO: 504234 - RNA, 22 nt, Human
agugauuugggugucagaaagu

SEQ ID NO: 504235 - RNA, 22 nt, Human
cucugggcccacuuaaaucugg

SEQ ID NO: 504236 - RNA, 19 nt, Human
ucucagagcccuagaggcc

SEQ ID NO: 504237 - RNA, 22 nt, Human
uggcugcucaagggaggaggcu

SEQ ID NO: 504238 - RNA, 22 nt, Human
ggcucagaccucccagcuccag

SEQ ID NO: 504239 - RNA, 22 nt, Human
cugguucauccccuuccaggaa

SEQ ID NO: 504240 - RNA, 22 nt, Human
ggccugccucacagucagcacc

SEQ ID NO: 504241 - RNA, 22 nt, Human
gggaguggauuauguggaccca

SEQ ID NO: 504242 - RNA, 22 nt, Human
uggaaggaagccaaggaagguu

SEQ ID NO: 504243 - RNA, 22 nt, Human
uaucugcaucugcauguguauu

SEQ ID NO: 504244 - RNA, 22 nt, Human
gacaagacaugugaugacauca

SEQ ID NO: 504245 - RNA, 22 nt, Human
aggcaguguauugcuagcggcu

SEQ ID NO: 504246 - RNA, 22 nt, Human
gcccuguguguuugcacugauu

SEQ ID NO: 504247 - RNA, 22 nt, Human
ugcagcaggcacaggacggaag

SEQ ID NO: 504248 - RNA, 22 nt, Human
uauuagggaacugcaagacuaa

SEQ ID NO: 504249 - RNA, 22 nt, Human
cugcaguguucuggaaugcauu

SEQ ID NO: 504250 - RNA, 22 nt, Human
gggcugcuuuuaagggucucag

SEQ ID NO: 504251 - RNA, 22 nt, Human
cauaaguuggguaauauaauga

SEQ ID NO: 504252 - RNA, 22 nt, Human
uuucaucuuccuuggcauaggu

SEQ ID NO: 504253 - RNA, 18 nt, Human
auguacauuugcuaaagc

SEQ ID NO: 504254 - RNA, 22 nt, Human
cagagccaucaugauauggagu

SEQ ID NO: 504255 - RNA, 23 nt, Human
uaugagaacccauacgcugucuu

SEQ ID NO: 504256 - RNA, 22 nt, Human
uucaggaugacaccauguccag

SEQ ID NO: 504257 - RNA, 22 nt, Human
agggacacacuccaguguuauu

SEQ ID NO: 504258 - RNA, 22 nt, Human
caggccagcguccagaacaagc

SEQ ID NO: 504259 - RNA, 22 nt, Human
ugcucagagcuccagcucuccu

SEQ ID NO: 504260 - RNA, 22 nt, Human
gggaaaucucguccucuauuua

SEQ ID NO: 504261 - RNA, 20 nt, Human
aggcagacaaggagucuguu

SEQ ID NO: 504262 - RNA, 22 nt, Human
uuagggagcucaguccucagau

SEQ ID NO: 504263 - RNA, 22 nt, Human
gcaguguuaaacaacugcugcu

SEQ ID NO: 504264 - RNA, 22 nt, Human
cagggaguuuuuguuccucuag

SEQ ID NO: 504265 - RNA, 22 nt, Human
agcagcauagaugcuauccgag

SEQ ID NO: 504266 - RNA, 22 nt, Human
ucucuccuuaucauuguguuua

SEQ ID NO: 504267 - RNA, 17 nt, Human
ccuguguuugcuccuuc

SEQ ID NO: 504268 - RNA, 22 nt, Human
gcugcagggggugggcgucucc

SEQ ID NO: 504269 - RNA, 22 nt, Human
cggggcugcucguccuccugug

SEQ ID NO: 504270 - RNA, 22 nt, Human
guccucugggcagcugccccac

SEQ ID NO: 504271 - RNA, 23 nt, Human
agagccugaaagacuucuggcac

SEQ ID NO: 504272 - RNA, 22 nt, Human
ucagagugguagccuauuuucu

SEQ ID NO: 504273 - RNA, 22 nt, Human
uucuuacauuacuuuacaugug

SEQ ID NO: 504274 - RNA, 22 nt, Human
cucugggcuucaagucagauuu

SEQ ID NO: 504275 - RNA, 22 nt, Human
uagcagcugucaguuucacaua

SEQ ID NO: 504276 - RNA, 22 nt, Human
gagggaccccaggcuggcccuu

SEQ ID NO: 504277 - RNA, 22 nt, Human
ggcagggcuugucucugugaug

SEQ ID NO: 504278 - RNA, 22 nt, Human
gggcuuuagauugcagaggauu

SEQ ID NO: 504279 - RNA, 22 nt, Human
acagagucauucacugaugaag

SEQ ID NO: 504280 - RNA, 22 nt, Human
cuguggcuuuggggcggaggac

SEQ ID NO: 504281 - RNA, 22 nt, Human
aaaaguauuggccaccauuucu

SEQ ID NO: 504282 - RNA, 22 nt, Human
agccagaaaggggcauuaucug

SEQ ID NO: 504283 - RNA, 22 nt, Human
gugggugauguacuggaggcca

SEQ ID NO: 504284 - RNA, 22 nt, Human
ugcugggcuagaagcugaggcc

SEQ ID NO: 504285 - RNA, 22 nt, Human
ggcccuguuagagcucccacaa

SEQ ID NO: 504286 - RNA, 22 nt, Human
gagagcuggccagcuucaguau

SEQ ID NO: 504287 - RNA, 19 nt, Human
aggugacaugugacagccu

SEQ ID NO: 504288 - RNA, 22 nt, Human
auggccuggggagcaugggaag

SEQ ID NO: 504289 - RNA, 22 nt, Human
aacagcuuuguauacaguaacu

SEQ ID NO: 504290 - RNA, 22 nt, Human
agccagggauggcagugcccag

SEQ ID NO: 504291 - RNA, 19 nt, Human
aacuagaaagguuuugaga

SEQ ID NO: 504292 - RNA, 22 nt, Human
agcuggagauucuggggacagu

SEQ ID NO: 504293 - RNA, 22 nt, Human
agaguguuucagucuuccuaga

SEQ ID NO: 504294 - RNA, 22 nt, Human
ucaaaagucugcauucuucaca

SEQ ID NO: 504295 - RNA, 22 nt, Human
uacaaaguuugagaaugcuuuc

SEQ ID NO: 504296 - RNA, 22 nt, Human
aguaaaauuguauuggaaaaca

SEQ ID NO: 504297 - RNA, 22 nt, Human
augcuggugguugauggcagga

SEQ ID NO: 504298 - RNA, 22 nt, Human
ugcaggucuauuuaaaugauug

SEQ ID NO: 504299 - RNA, 22 nt, Human
aaggaaaugugccugacacugc

SEQ ID NO: 504300 - RNA, 22 nt, Human
ucccaaggugcucggcaacagg

SEQ ID NO: 504301 - RNA, 22 nt, Human
aaagccuuuuaugaucaguuaa

SEQ ID NO: 504302 - RNA, 22 nt, Human
uuuauauguuuguacaauuaag

SEQ ID NO: 504303 - RNA, 22 nt, Human
cucuggcuucuaccuugcaguu

SEQ ID NO: 504304 - RNA, 22 nt, Human
guccucagggagucccagucau

SEQ ID NO: 504305 - RNA, 22 nt, Human
ccugguguugugaaguagccgu

SEQ ID NO: 504306 - RNA, 22 nt, Human
aggccacaguugaggccagcaa

SEQ ID NO: 504307 - RNA, 22 nt, Human
aggccucaguucuugccaggug

SEQ ID NO: 504308 - RNA, 19 nt, Human
accucugcagagauguuua

SEQ ID NO: 504309 - RNA, 22 nt, Human
aaaacauugaauugcacacuau

SEQ ID NO: 504310 - RNA, 22 nt, Human
agccagcugccuuucacaucug

SEQ ID NO: 504311 - RNA, 22 nt, Human
gagaaagauuguccuucagggg

SEQ ID NO: 504312 - RNA, 22 nt, Human
caguggucccugagguugcugg

SEQ ID NO: 504313 - RNA, 22 nt, Human
guuccaggcaagugggauagga

SEQ ID NO: 504314 - RNA, 22 nt, Human
ucaauucaguccaacaguaauu

SEQ ID NO: 504315 - RNA, 22 nt, Human
agccuggaagaaccugaagucu

SEQ ID NO: 504316 - RNA, 22 nt, Human
gcccaucaucacuguggaggcu

SEQ ID NO: 504317 - RNA, 22 nt, Human
gccaggagugucccacucauuu

SEQ ID NO: 504318 - RNA, 22 nt, Human
ucacuugccuagcccaguucag

SEQ ID NO: 504319 - RNA, 22 nt, Human
guaacauuauucaugagauaca

SEQ ID NO: 504320 - RNA, 22 nt, Human
gagagcugcauucucagacaca

SEQ ID NO: 504321 - RNA, 22 nt, Human
uuuuucugccauucaaagagga

SEQ ID NO: 504322 - RNA, 22 nt, Human
guacauuucucuuguucuuauu

SEQ ID NO: 504323 - RNA, 22 nt, Human
agauacaaaagauaagauuuag

SEQ ID NO: 504324 - RNA, 22 nt, Human
auacaucucauguaagagauaa

SEQ ID NO: 504325 - RNA, 18 nt, Human
agacccucuaagggcagu

SEQ ID NO: 504326 - RNA, 22 nt, Human
uccuggagaauccugccaccug

SEQ ID NO: 504327 - RNA, 22 nt, Human
cagcugccacuugcucucggcu

SEQ ID NO: 504328 - RNA, 22 nt, Human
auagaagauagcuuuuguuucu

SEQ ID NO: 504329 - RNA, 22 nt, Human
ggccucucucccuggcuugcag

SEQ ID NO: 504330 - RNA, 22 nt, Human
uuagccaugugggaaaaacagc

SEQ ID NO: 504331 - RNA, 22 nt, Human
ggcagugacuggggacccccaa

SEQ ID NO: 504332 - RNA, 22 nt, Human
caucuugagacaugaaaggugu

SEQ ID NO: 504333 - RNA, 22 nt, Human
ucaccucuuuuuuaacaggcuu

SEQ ID NO: 504334 - RNA, 23 nt, Human
acuuaaaugguucuuuaucucag

SEQ ID NO: 504335 - RNA, 22 nt, Human
ucucuuugucugcucuuaguug

SEQ ID NO: 504336 - RNA, 21 nt, Human
uacagaugaggagaccaaggc

SEQ ID NO: 504337 - RNA, 22 nt, Human
ucaggcugagaaaaucuggacc

SEQ ID NO: 504338 - RNA, 22 nt, Human
uucuacuuuagcaugcucauuc

SEQ ID NO: 504339 - RNA, 22 nt, Human
ggcuggaagguagaagaugagg

SEQ ID NO: 504340 - RNA, 22 nt, Human
uggguacuccuauuaguucagu

SEQ ID NO: 504341 - RNA, 22 nt, Human
aagaaagggcuauuguucucca

SEQ ID NO: 504342 - RNA, 22 nt, Human
ugcauuguuuagaacucuuugg

SEQ ID NO: 504343 - RNA, 22 nt, Human
uaaauacagucauuugagccau

SEQ ID NO: 504344 - RNA, 22 nt, Human
ggcucuggaaaguguccuugau

SEQ ID NO: 504345 - RNA, 22 nt, Human
ccucuccuugcacccgucccgc

SEQ ID NO: 504346 - RNA, 22 nt, Human
ggccucacccaucggugccuuu

SEQ ID NO: 504347 - RNA, 22 nt, Human
ugcagcuucuccaucuccuugu

SEQ ID NO: 504348 - RNA, 19 nt, Human
ccauggcaaugaucugaug

SEQ ID NO: 504349 - RNA, 22 nt, Human
ucaaggaagauagcuauuauga

SEQ ID NO: 504350 - RNA, 22 nt, Human
agagccuggcucccagcuaccg

SEQ ID NO: 504351 - RNA, 17 nt, Human
cugaagauaauggcaac

SEQ ID NO: 504352 - RNA, 22 nt, Human
agagaaugcagggcuucggaca

SEQ ID NO: 504353 - RNA, 22 nt, Human
ugcuggccgugagcucucggga

SEQ ID NO: 504354 - RNA, 22 nt, Human
ggcacagcuacuugcucacucu

SEQ ID NO: 504355 - RNA, 22 nt, Human
ugccugcauuuuguggcuggcu

SEQ ID NO: 504356 - RNA, 22 nt, Human
cuggaaggggcagucuuugggc

SEQ ID NO: 504357 - RNA, 22 nt, Human
uaggaacacacauguguagcug

SEQ ID NO: 504358 - RNA, 22 nt, Human
agacauaagugcuaugacauug

SEQ ID NO: 504359 - RNA, 22 nt, Human
auuucucaucaagugccaacuc

SEQ ID NO: 504360 - RNA, 22 nt, Human
aucuggcuugacuuugcgacuu

SEQ ID NO: 504361 - RNA, 21 nt, Human
uucucuggauaggccaguccu

SEQ ID NO: 504362 - RNA, 22 nt, Human
uaagcauucaaugcuuagcacu

SEQ ID NO: 504363 - RNA, 22 nt, Human
ugaugauuucauuucuagcugu

SEQ ID NO: 504364 - RNA, 22 nt, Human
ugggcacuguagcuggugcugg

SEQ ID NO: 504365 - RNA, 22 nt, Human
gcaagcugcuuaagcucauugu

SEQ ID NO: 504366 - RNA, 22 nt, Human
aggcugugggaguugagagucu

SEQ ID NO: 504367 - RNA, 22 nt, Human
ccugagugaauucccucacugu

SEQ ID NO: 504368 - RNA, 22 nt, Human
gucugggcuucagaguuagaga

SEQ ID NO: 504369 - RNA, 22 nt, Human
aaaaugaugcuguaauuuggca

SEQ ID NO: 504370 - RNA, 22 nt, Human
gaguccugcuuucaauucuuuu

SEQ ID NO: 504371 - RNA, 22 nt, Human
acugccauuggucaaaugagug

SEQ ID NO: 504372 - RNA, 20 nt, Human
ggccuuggguuucgccuguu

SEQ ID NO: 504373 - RNA, 22 nt, Human
uucagccuguucaugcuguugc

SEQ ID NO: 504374 - RNA, 22 nt, Human
uguccuggguggaugcuucauu

SEQ ID NO: 504375 - RNA, 22 nt, Human
aaugcaaagcaagcagagauuu

SEQ ID NO: 504376 - RNA, 22 nt, Human
ucagaauaugcuaaugacauuu

SEQ ID NO: 504377 - RNA, 22 nt, Human
cacuguguaagaagaugggcuu

SEQ ID NO: 504378 - RNA, 22 nt, Human
uuaauacagucuccagaaguaa

SEQ ID NO: 504379 - RNA, 22 nt, Human
ugaggcaggaguuaaugugcuc

SEQ ID NO: 504380 - RNA, 22 nt, Human
cugcagagaugaagaagguggc

SEQ ID NO: 504381 - RNA, 22 nt, Human
ucaggcagaccaccgugggcag

SEQ ID NO: 504382 - RNA, 22 nt, Human
uccagcauucuuagaccucuau

SEQ ID NO: 504383 - RNA, 22 nt, Human
cauuugcuagcaggccuuuuau

SEQ ID NO: 504384 - RNA, 22 nt, Human
gcugcucucucccuaaguuggg

SEQ ID NO: 504385 - RNA, 22 nt, Human
cucuggcacacuccuuccaggu

SEQ ID NO: 504386 - RNA, 22 nt, Human
ugccugggacaugcuguggacu

SEQ ID NO: 504387 - RNA, 22 nt, Human
gagucaggcacugcugcugcuc

SEQ ID NO: 504388 - RNA, 22 nt, Human
aagcagcuuaaauuagagccug

SEQ ID NO: 504389 - RNA, 22 nt, Human
agggccagggaagcuguauuuu

SEQ ID NO: 504390 - RNA, 22 nt, Human
gcuguucuuugcaucucuggug

SEQ ID NO: 504391 - RNA, 17 nt, Human
ugaaggccaugaccacg

SEQ ID NO: 504392 - RNA, 22 nt, Human
auuucauagauuguaaaucccu

SEQ ID NO: 504393 - RNA, 22 nt, Human
ggccauggaccccgagcugacc

SEQ ID NO: 504394 - RNA, 22 nt, Human
ugucccaguuuaucugggacug

SEQ ID NO: 504395 - RNA, 21 nt, Human
caauuacagauggcucagggg

SEQ ID NO: 504396 - RNA, 22 nt, Human
auguccaguuucuacacacaua

SEQ ID NO: 504397 - RNA, 22 nt, Human
ggcuggccagggcccucgcugg

SEQ ID NO: 504398 - RNA, 22 nt, Human
agggguggagaguguugccagu

SEQ ID NO: 504399 - RNA, 22 nt, Human
uaaagguagcaugaaacugcaa

SEQ ID NO: 504400 - RNA, 23 nt, Human
gcugcagcuguggauguucucag

SEQ ID NO: 504401 - RNA, 22 nt, Human
agcagaugagccucaugacugg

SEQ ID NO: 504402 - RNA, 22 nt, Human
cucugcuuggaacuggacagaa

SEQ ID NO: 504403 - RNA, 22 nt, Human
ucagaacaauuccuuuauaaca

SEQ ID NO: 504404 - RNA, 22 nt, Human
acauccagaucucagcauggcu

SEQ ID NO: 504405 - RNA, 22 nt, Human
ugcaggcuccaugaggacaggc

SEQ ID NO: 504406 - RNA, 22 nt, Human
gagggucccgagcccugucaga

SEQ ID NO: 504407 - RNA, 22 nt, Human
cagcaggcguugggagaaagac

SEQ ID NO: 504408 - RNA, 18 nt, Human
uuauuuguuacagcacau

SEQ ID NO: 504409 - RNA, 22 nt, Human
ggaggccaccugaccugcuguu

SEQ ID NO: 504410 - RNA, 22 nt, Human
ccugugucuuccccacuggugu

SEQ ID NO: 504411 - RNA, 22 nt, Human
uucuggaaguguuagaaucugg

SEQ ID NO: 504412 - RNA, 21 nt, Human
agcagcagaucuggugagggc

SEQ ID NO: 504413 - RNA, 22 nt, Human
uccugucuuaaugaucucgugc

SEQ ID NO: 504414 - RNA, 22 nt, Human
augggcagcagcugccauucau

SEQ ID NO: 504415 - RNA, 22 nt, Human
gcaugguggccuuaggguagcc

SEQ ID NO: 504416 - RNA, 22 nt, Human
ugucccauggauaccaggcuau

SEQ ID NO: 504417 - RNA, 22 nt, Human
ugagcugggaguggugaugagg

SEQ ID NO: 504418 - RNA, 22 nt, Human
aucccugcccucauggagcuua

SEQ ID NO: 504419 - RNA, 22 nt, Human
uaaugcaguacugauauaaaca

SEQ ID NO: 504420 - RNA, 22 nt, Human
uggcacagugcuggauggugcu

SEQ ID NO: 504421 - RNA, 22 nt, Human
aguggcugcuggaguggagaug

SEQ ID NO: 504422 - RNA, 23 nt, Human
auugaugacuugauuacacuuuu

SEQ ID NO: 504423 - RNA, 23 nt, Human
agccacuucuaucuugcuccugg

SEQ ID NO: 504424 - RNA, 22 nt, Human
caggucaaagguuaguuauguu

SEQ ID NO: 504425 - RNA, 22 nt, Human
aagacaugacugcacagccaaa

SEQ ID NO: 504426 - RNA, 22 nt, Human
caggaaaugcguaguugaacuu

SEQ ID NO: 504427 - RNA, 22 nt, Human
aggaagaaaacuaauuagaugg

SEQ ID NO: 504428 - RNA, 22 nt, Human
gcugggcuucacagagccuuua

SEQ ID NO: 504429 - RNA, 22 nt, Human
guggcccugucccaggccuccu

SEQ ID NO: 504430 - RNA, 22 nt, Human
gcuccucuucucccacugaaug

SEQ ID NO: 504431 - RNA, 22 nt, Human
cgcagggauuucaaggggccuu

SEQ ID NO: 504432 - RNA, 22 nt, Human
uacacauguccaaggugucacc

SEQ ID NO: 504433 - RNA, 22 nt, Human
uugggggguugaggaguagaua

SEQ ID NO: 504434 - RNA, 22 nt, Human
uagcaaaauguggauguaguug

SEQ ID NO: 504435 - RNA, 22 nt, Human
ggcaugggccgaggugccuccu

SEQ ID NO: 504436 - RNA, 22 nt, Human
cccagcaguaaccaguggaaau

SEQ ID NO: 504437 - RNA, 22 nt, Human
acaaaugaaucauacauaaugu

SEQ ID NO: 504438 - RNA, 22 nt, Human
cuuccaaacccaggguaugggc

SEQ ID NO: 504439 - RNA, 22 nt, Human
ucugagcucuaucugugggaau

SEQ ID NO: 504440 - RNA, 22 nt, Human
ucuggccugggccugccggugc

SEQ ID NO: 504441 - RNA, 22 nt, Human
cagccagcuggcacugugagua

SEQ ID NO: 504442 - RNA, 22 nt, Human
acccugggucauauacagugug

SEQ ID NO: 504443 - RNA, 22 nt, Human
cuggcugcgucugcucugacag

SEQ ID NO: 504444 - RNA, 22 nt, Human
uucugggcagagcuggagcugc

SEQ ID NO: 504445 - RNA, 22 nt, Human
agaggccuuucuguugagugaa

SEQ ID NO: 504446 - RNA, 22 nt, Human
acuuagcauuauguaauuacua

SEQ ID NO: 504447 - RNA, 20 nt, Human
gccuggcacccggggcuggc

SEQ ID NO: 504448 - RNA, 22 nt, Human
acagggagaugggugaaagcgg

SEQ ID NO: 504449 - RNA, 22 nt, Human
aggcagguagaaggaucuuuau

SEQ ID NO: 504450 - RNA, 22 nt, Human
uccugggcagaaugggauggcu

SEQ ID NO: 504451 - RNA, 22 nt, Human
aggcagcccacaggacacagga

SEQ ID NO: 504452 - RNA, 22 nt, Human
aggagagagcugagcuuugcug

SEQ ID NO: 504453 - RNA, 22 nt, Human
aggaggaaagaaggcccccagc

SEQ ID NO: 504454 - RNA, 22 nt, Human
ucucugggaauucacaagcccu

SEQ ID NO: 504455 - RNA, 22 nt, Human
uuacaaagauuauauucaguua

SEQ ID NO: 504456 - RNA, 22 nt, Human
aucauguuccagaaacagugau

SEQ ID NO: 504457 - RNA, 22 nt, Human
ucuaggaguaaugagcuagcac

SEQ ID NO: 504458 - RNA, 22 nt, Human
ugccucuguggaaauggugguc

SEQ ID NO: 504459 - RNA, 22 nt, Human
uggacagguugaguaggaggag

SEQ ID NO: 504460 - RNA, 22 nt, Human
gugacagauuugcugcgcaugg

SEQ ID NO: 504461 - RNA, 21 nt, Human
ucaguccuguuagccuuuggg

SEQ ID NO: 504462 - RNA, 22 nt, Human
gccuggagggcucuagagaggc

SEQ ID NO: 504463 - RNA, 22 nt, Human
ucuuuauuucugaaucccccau

SEQ ID NO: 504464 - RNA, 22 nt, Human
acaggcucacagucauuucauu

SEQ ID NO: 504465 - RNA, 22 nt, Human
gcuucuuuggcaacccugacau

SEQ ID NO: 504466 - RNA, 20 nt, Human
ccucaguguccuggacuggg

SEQ ID NO: 504467 - RNA, 22 nt, Human
aaagaaugucugaacagcuggc

SEQ ID NO: 504468 - RNA, 22 nt, Human
ccuggcuccugccucugcaggg

SEQ ID NO: 504469 - RNA, 22 nt, Human
acauguuuaaguuuaaugaaaa

SEQ ID NO: 504470 - RNA, 22 nt, Human
guguuuuaucagacaaaguaua

SEQ ID NO: 504471 - RNA, 22 nt, Human
ucuuguuuggauuuugggcagu

SEQ ID NO: 504472 - RNA, 22 nt, Human
aaggaggaauucugaguucaug

SEQ ID NO: 504473 - RNA, 22 nt, Human
aaguccaccagucagacuagga

SEQ ID NO: 504474 - RNA, 22 nt, Human
uggcucaguuugggggauugaa

SEQ ID NO: 504475 - RNA, 21 nt, Human
uaugagaaaacugaggugcau

SEQ ID NO: 504476 - RNA, 22 nt, Human
ucacaacucuuuccauuuaaua

SEQ ID NO: 504477 - RNA, 22 nt, Human
cccaggaggccaagguugcagu

SEQ ID NO: 504478 - RNA, 17 nt, Human
ccaggucuccuugcuuu

SEQ ID NO: 504479 - RNA, 22 nt, Human
gugugcuguuguucagguagaa

SEQ ID NO: 504480 - RNA, 22 nt, Human
caggacauugauccauuggcac

SEQ ID NO: 504481 - RNA, 22 nt, Human
gggcucuggauggagccugcag

SEQ ID NO: 504482 - RNA, 21 nt, Human
caucacauuacucaaaguccu

SEQ ID NO: 504483 - RNA, 22 nt, Human
uggcagagucucuccuuuccag

SEQ ID NO: 504484 - RNA, 22 nt, Human
agccauugaguuuuaugugcua

SEQ ID NO: 504485 - RNA, 22 nt, Human
gcugaggcaaaccaagaaugua

SEQ ID NO: 504486 - RNA, 22 nt, Human
cucugagagagcuggugagcac

SEQ ID NO: 504487 - RNA, 21 nt, Human
ucaggggcuguguuuuccauc

SEQ ID NO: 504488 - RNA, 22 nt, Human
cagcuccuagaucggcgaagug

SEQ ID NO: 504489 - RNA, 22 nt, Human
gccuggaagugugucgugggaa

SEQ ID NO: 504490 - RNA, 22 nt, Human
ugcaggagcagagauggcugga

SEQ ID NO: 504491 - RNA, 22 nt, Human
ucuggcagggguucugcacuug

SEQ ID NO: 504492 - RNA, 22 nt, Human
caggcuugcugcuagagcacuu

SEQ ID NO: 504493 - RNA, 18 nt, Human
gagaggcccggcugugcc

SEQ ID NO: 504494 - RNA, 22 nt, Human
ccugggcagguguggcuucccc

SEQ ID NO: 504495 - RNA, 22 nt, Human
cagggcaggaauuugacauugc

SEQ ID NO: 504496 - RNA, 21 nt, Human
uucauuuguuauagacaaagu

SEQ ID NO: 504497 - RNA, 22 nt, Human
aaaugcuaacaaggaaugcugc

SEQ ID NO: 504498 - RNA, 22 nt, Human
gaaacagcacguuuggagagau

SEQ ID NO: 504499 - RNA, 22 nt, Human
agcagcuccucuaggaacggau

SEQ ID NO: 504500 - RNA, 21 nt, Human
gcugcagggcccagggcaccc

SEQ ID NO: 504501 - RNA, 22 nt, Human
ccugagagagaagcgaccuggu

SEQ ID NO: 504502 - RNA, 21 nt, Human
ugugucacuaacuagaggcua

SEQ ID NO: 504503 - RNA, 22 nt, Human
aaauguguauaugaaacaugau

SEQ ID NO: 504504 - RNA, 22 nt, Human
uguggcagaguaaggacccagu

SEQ ID NO: 504505 - RNA, 22 nt, Human
augcuuuacaguuuuccaaaca

SEQ ID NO: 504506 - RNA, 22 nt, Human
ccucuggcauagcaaguggccu

SEQ ID NO: 504507 - RNA, 22 nt, Human
ggcacacagauggagcacuagc

SEQ ID NO: 504508 - RNA, 22 nt, Human
cccaggagguggagcuugcagu

SEQ ID NO: 504509 - RNA, 22 nt, Human
ccugccuggcugucagcagagc

SEQ ID NO: 504510 - RNA, 22 nt, Human
gcagugcauuacucacauguuu

SEQ ID NO: 504511 - RNA, 22 nt, Human
cuggcuuuuagugugaagacuu

SEQ ID NO: 504512 - RNA, 22 nt, Human
caggcuggagugcaauggugcu

SEQ ID NO: 504513 - RNA, 19 nt, Human
agaggccucagcagcuggc

SEQ ID NO: 504514 - RNA, 22 nt, Human
cauuguauugaggauacuuaag

SEQ ID NO: 504515 - RNA, 22 nt, Human
ugagucuuuuauccugggaaug

SEQ ID NO: 504516 - RNA, 22 nt, Human
aguccuucaagaaaucuggaaa

SEQ ID NO: 504517 - RNA, 22 nt, Human
uugcagcugaggaaauugaagc

SEQ ID NO: 504518 - RNA, 22 nt, Human
ccugcagguaaggcuaacugcc

SEQ ID NO: 504519 - RNA, 22 nt, Human
ugcagcucaggauucucagggc

SEQ ID NO: 504520 - RNA, 22 nt, Human
acuguggccggaacagugggac

SEQ ID NO: 504521 - RNA, 22 nt, Human
ucagaguguggugagaugugca

SEQ ID NO: 504522 - RNA, 22 nt, Human
agcugauacauuucuuguagcc

SEQ ID NO: 504523 - RNA, 22 nt, Human
uuuagcuuugaaggauaugguu

SEQ ID NO: 504524 - RNA, 22 nt, Human
uuuucaguuacuguuuauguga

SEQ ID NO: 504525 - RNA, 22 nt, Human
aaggcuggaguacagugcagug

SEQ ID NO: 504526 - RNA, 22 nt, Human
guuugcauuccaauuuagggga

SEQ ID NO: 504527 - RNA, 22 nt, Human
aaagcauuucaugucuagaaag

SEQ ID NO: 504528 - RNA, 22 nt, Human
gagcuuuagcugagaccugcuu

SEQ ID NO: 504529 - RNA, 22 nt, Human
uccagaccaugugagaggcgca

SEQ ID NO: 504530 - RNA, 22 nt, Human
acugaggauggauaggucauau

SEQ ID NO: 504531 - RNA, 22 nt, Human
guggccuggcgagcuggcgcgg

SEQ ID NO: 504532 - RNA, 22 nt, Human
acaucacagagcccagauaaag

SEQ ID NO: 504533 - RNA, 22 nt, Human
acagguggagugguuagcaggc

SEQ ID NO: 504534 - RNA, 22 nt, Human
ggcaggcucagcagccaaggag

SEQ ID NO: 504535 - RNA, 22 nt, Human
uguguacauaucuauccuagau

SEQ ID NO: 504536 - RNA, 22 nt, Human
cagccaggcccccgagucguug

SEQ ID NO: 504537 - RNA, 22 nt, Human
uugugaaacauucauggauuug

SEQ ID NO: 504538 - RNA, 22 nt, Human
gugcagugagcagugcagcacc

SEQ ID NO: 504539 - RNA, 22 nt, Human
uccugcagccauuagaggucaa

SEQ ID NO: 504540 - RNA, 22 nt, Human
auuauuggacacuucuucugca

SEQ ID NO: 504541 - RNA, 22 nt, Human
uaccagccugacccugucugac

SEQ ID NO: 504542 - RNA, 22 nt, Human
auuagcuuuggauucagaagau

SEQ ID NO: 504543 - RNA, 22 nt, Human
cauccaggcaccacaaccagcu

SEQ ID NO: 504544 - RNA, 22 nt, Human
auaaacagaguaguugcuacug

SEQ ID NO: 504545 - RNA, 22 nt, Human
gggacaucuuucuagucagggu

SEQ ID NO: 504546 - RNA, 22 nt, Human
aaagcaauggcacaugauggua

SEQ ID NO: 504547 - RNA, 17 nt, Human
acagcaggcccggaggg

SEQ ID NO: 504548 - RNA, 22 nt, Human
aggccugaaguguggagugggg

SEQ ID NO: 504549 - RNA, 22 nt, Human
aggaugaggcuggcaggucuug

SEQ ID NO: 504550 - RNA, 22 nt, Human
uguguucauguauguauacaua

SEQ ID NO: 504551 - RNA, 22 nt, Human
acagugcucaugugacauggug

SEQ ID NO: 504552 - RNA, 22 nt, Human
gagagggcaaacuuguagcuaa

SEQ ID NO: 504553 - RNA, 22 nt, Human
aggagaguucacacuggucaga

SEQ ID NO: 504554 - RNA, 22 nt, Human
cagcaaggguuauaucaaagau

SEQ ID NO: 504555 - RNA, 22 nt, Human
aaggccaucuacuuacggaauu

SEQ ID NO: 504556 - RNA, 22 nt, Human
ugaggccagucucaucacaggc

SEQ ID NO: 504557 - RNA, 22 nt, Human
gaaggcucuggggauugagaua

SEQ ID NO: 504558 - RNA, 22 nt, Human
gccaugccugugucuccaggcc

SEQ ID NO: 504559 - RNA, 19 nt, Human
uccaaaggacccaccucca

SEQ ID NO: 504560 - RNA, 22 nt, Human
uauuuuugccucucagauaaaa

SEQ ID NO: 504561 - RNA, 22 nt, Human
gaauuacagccagaagaaugaa

SEQ ID NO: 504562 - RNA, 22 nt, Human
acagcucacucacagggcuagu

SEQ ID NO: 504563 - RNA, 22 nt, Human
guucgcaucuugaucauggacu

SEQ ID NO: 504564 - RNA, 22 nt, Human
aguccagggcuuagucagcggg

SEQ ID NO: 504565 - RNA, 22 nt, Human
acagaaauuagcagugaguuua

SEQ ID NO: 504566 - RNA, 22 nt, Human
gaggcacugcugggccccugua

SEQ ID NO: 504567 - RNA, 22 nt, Human
aagcaaaagguuacacuucugg

SEQ ID NO: 504568 - RNA, 22 nt, Human
uuccaggauagcuuucaggaau

SEQ ID NO: 504569 - RNA, 22 nt, Human
agaagccaauucugugugaguc

SEQ ID NO: 504570 - RNA, 22 nt, Human
aggaaaggccucagcagaaacc

SEQ ID NO: 504571 - RNA, 22 nt, Human
cugggccuagcaacagaggagu

SEQ ID NO: 504572 - RNA, 22 nt, Human
gcuaccugagcaagagcuucaa

SEQ ID NO: 504573 - RNA, 22 nt, Human
uaucuugagagacaacacagca

SEQ ID NO: 504574 - RNA, 22 nt, Human
cagcacaggucaguuuuuuaag

SEQ ID NO: 504575 - RNA, 17 nt, Human
ucugucuugacugucac

SEQ ID NO: 504576 - RNA, 22 nt, Human
cugcaggcccccuuccuggagu

SEQ ID NO: 504577 - RNA, 22 nt, Human
aaaauccugcugacucgagaug

SEQ ID NO: 504578 - RNA, 22 nt, Human
ggcucaggacacagugguuuag

SEQ ID NO: 504579 - RNA, 22 nt, Human
cagccagggagggcaaaugaga

SEQ ID NO: 504580 - RNA, 22 nt, Human
ucagugcuccuaaagugaaugc

SEQ ID NO: 504581 - RNA, 22 nt, Human
cugcauccuggaaauagcuaag

SEQ ID NO: 504582 - RNA, 22 nt, Human
uggacagguuugggugccuguu

SEQ ID NO: 504583 - RNA, 22 nt, Human
uaagacauuugaaaugugaucc

SEQ ID NO: 504584 - RNA, 22 nt, Human
cuauuuguacagcauuaguaau

SEQ ID NO: 504585 - RNA, 22 nt, Human
aagguccaguuugaauuacugu

SEQ ID NO: 504586 - RNA, 22 nt, Human
gauuauauaauggaagcucuug

SEQ ID NO: 504587 - RNA, 22 nt, Human
uauguacaauuuguuguauguc

SEQ ID NO: 504588 - RNA, 22 nt, Human
ugagccaggcucaagugauccu

SEQ ID NO: 504589 - RNA, 22 nt, Human
gggcaaaaccugggcaucauga

SEQ ID NO: 504590 - RNA, 22 nt, Human
caggacacagaauaaggcaguu

SEQ ID NO: 504591 - RNA, 23 nt, Human
aagcacagaaugguuuaggaguu

SEQ ID NO: 504592 - RNA, 22 nt, Human
uugaauucauuucucauugagu

SEQ ID NO: 504593 - RNA, 22 nt, Human
uguuuaagcugaugagguaucg

SEQ ID NO: 504594 - RNA, 22 nt, Human
aaaguauucaaaaauauuuggu

SEQ ID NO: 504595 - RNA, 22 nt, Human
aggccugacuugaauuuagggc

SEQ ID NO: 504596 - RNA, 20 nt, Human
gggaggcauuggucccucac

SEQ ID NO: 504597 - RNA, 22 nt, Human
acacugcucacuucuucccuug

SEQ ID NO: 504598 - RNA, 22 nt, Human
agucugaagacucaugucugaa

SEQ ID NO: 504599 - RNA, 22 nt, Human
uccuggugcugacacccauagc

SEQ ID NO: 504600 - RNA, 22 nt, Human
gcugcuggggucacaugguaag

SEQ ID NO: 504601 - RNA, 22 nt, Human
ccagucuguacuuugcucuguu

SEQ ID NO: 504602 - RNA, 22 nt, Human
caggcuggagugcaguugugca

SEQ ID NO: 504603 - RNA, 22 nt, Human
cuccugggggacagcggcaggg

SEQ ID NO: 504604 - RNA, 22 nt, Human
uacauauacugagugauuugcu

SEQ ID NO: 504605 - RNA, 22 nt, Human
uccuggcccaaucugcccauga

SEQ ID NO: 504606 - RNA, 22 nt, Human
ucaaaaauggucuuugagcugc

SEQ ID NO: 504607 - RNA, 22 nt, Human
ucuguucauacagaguauagua

SEQ ID NO: 504608 - RNA, 19 nt, Human
aggcuuggcuagauuuacu

SEQ ID NO: 504609 - RNA, 22 nt, Human
uaaugcacauagaaguacuuag

SEQ ID NO: 504610 - RNA, 22 nt, Human
caagguaguucuggucauugac

SEQ ID NO: 504611 - RNA, 22 nt, Human
cagcugccacaggacuuucuga

SEQ ID NO: 504612 - RNA, 22 nt, Human
cagcuuggcgaauguagguaug

SEQ ID NO: 504613 - RNA, 22 nt, Human
gaggaggucgcugcugagcccc

SEQ ID NO: 504614 - RNA, 22 nt, Human
uggcucagcagguuagaaacua

SEQ ID NO: 504615 - RNA, 22 nt, Human
aagucaauuaguaaacuuggaa

SEQ ID NO: 504616 - RNA, 22 nt, Human
gcauuuauuucuuuacugcauc

SEQ ID NO: 504617 - RNA, 22 nt, Human
gguaugaauucacuacuuccaa

SEQ ID NO: 504618 - RNA, 22 nt, Human
ccugggucccugagagaugauu

SEQ ID NO: 504619 - RNA, 22 nt, Human
cuuuucaugccagcccaucaca

SEQ ID NO: 504620 - RNA, 22 nt, Human
ccugggaggcagagguugcagu

SEQ ID NO: 504621 - RNA, 22 nt, Human
agggcuuuacuucucaguucua

SEQ ID NO: 504622 - RNA, 22 nt, Human
ucaggcagaugcagggauggau

SEQ ID NO: 504623 - RNA, 22 nt, Human
acagcagcauaaacugacuaag

SEQ ID NO: 504624 - RNA, 22 nt, Human
uuaccuaaaauagcucaauuua

SEQ ID NO: 504625 - RNA, 22 nt, Human
ugccucugcugcuguggcauca

SEQ ID NO: 504626 - RNA, 22 nt, Human
agucugggagaaggugagauua

SEQ ID NO: 504627 - RNA, 22 nt, Human
gaauuccuuaggcucuugacug

SEQ ID NO: 504628 - RNA, 22 nt, Human
ugccugucuucaggagugucac

SEQ ID NO: 504629 - RNA, 22 nt, Human
agccucucugaugugacagcua

SEQ ID NO: 504630 - RNA, 22 nt, Human
aagcuucacauugaacuugggu

SEQ ID NO: 504631 - RNA, 22 nt, Human
uugggaaggcguggaagcagaa

SEQ ID NO: 504632 - RNA, 22 nt, Human
ucccucuguguugggcaugccu

SEQ ID NO: 504633 - RNA, 19 nt, Human
agcaaauauaauaguguuc

SEQ ID NO: 504634 - RNA, 22 nt, Human
ugaaagcuguccacuaggcugu

SEQ ID NO: 504635 - RNA, 22 nt, Human
accccaagacaguagaagagaa

SEQ ID NO: 504636 - RNA, 22 nt, Human
cauugcuguuaauugucucuag

SEQ ID NO: 504637 - RNA, 22 nt, Human
ggguucagguuggccugagcac

SEQ ID NO: 504638 - RNA, 22 nt, Human
ggcagaggaagcuggaaguggg

SEQ ID NO: 504639 - RNA, 22 nt, Human
ggggccugcgagguucaacuuc

SEQ ID NO: 504640 - RNA, 23 nt, Human
gaagugucugagcuguauuuuuc

SEQ ID NO: 504641 - RNA, 22 nt, Human
cauggcaggugcagauucugug

SEQ ID NO: 504642 - RNA, 22 nt, Human
cagcagcuggugagacacagcc

SEQ ID NO: 504643 - RNA, 22 nt, Human
cucuccagaucugcugagccag

SEQ ID NO: 504644 - RNA, 22 nt, Human
ggacuggacucucaggcucaca

SEQ ID NO: 504645 - RNA, 22 nt, Human
gcuguucucuguaacaugcauu

SEQ ID NO: 504646 - RNA, 22 nt, Human
aaugacuaauaaguuuuacugu

SEQ ID NO: 504647 - RNA, 22 nt, Human
gccccagccaaggugacacgaa

SEQ ID NO: 504648 - RNA, 22 nt, Human
uagcagcugugaguaaaagcca

SEQ ID NO: 504649 - RNA, 22 nt, Human
aucagagaccggucaagucaug

SEQ ID NO: 504650 - RNA, 22 nt, Human
gagggcucaacuacuacuaggc

SEQ ID NO: 504651 - RNA, 22 nt, Human
uggccacacugcccccacuggg

SEQ ID NO: 504652 - RNA, 22 nt, Human
cagggugggcacccagccucca

SEQ ID NO: 504653 - RNA, 19 nt, Human
cagguggcgcucuacaggg

SEQ ID NO: 504654 - RNA, 22 nt, Human
gcugcccugucugcagcaggac

SEQ ID NO: 504655 - RNA, 22 nt, Human
ggagcaaaugccaagugggagg

SEQ ID NO: 504656 - RNA, 22 nt, Human
ugugcccauuccacuugaguac

SEQ ID NO: 504657 - RNA, 21 nt, Human
uuuauguacuucauagaguag

SEQ ID NO: 504658 - RNA, 22 nt, Human
agagaugaaaaguggagacugg

SEQ ID NO: 504659 - RNA, 22 nt, Human
ccucuggcagccagccaguugu

SEQ ID NO: 504660 - RNA, 17 nt, Human
gcuuccugugcugggga

SEQ ID NO: 504661 - RNA, 22 nt, Human
aaugaaaucugcuggguaaaga

SEQ ID NO: 504662 - RNA, 22 nt, Human
uggcagggugccaguugcgagu

SEQ ID NO: 504663 - RNA, 22 nt, Human
aguauaugccagagagauagcu

SEQ ID NO: 504664 - RNA, 22 nt, Human
uuguuuuaguagguacacugag

SEQ ID NO: 504665 - RNA, 22 nt, Human
cuguucucuggcgguggcuguu

SEQ ID NO: 504666 - RNA, 22 nt, Human
cuuagggaauugggaggaugcc

SEQ ID NO: 504667 - RNA, 20 nt, Human
uucaggauucuagaccacac

SEQ ID NO: 504668 - RNA, 22 nt, Human
ggcauggcucggagucagaaca

SEQ ID NO: 504669 - RNA, 22 nt, Human
augugggccgugcggguguccu

SEQ ID NO: 504670 - RNA, 22 nt, Human
auucuucacuguuucagaauga

SEQ ID NO: 504671 - RNA, 22 nt, Human
uucaaagcagagggucaauaca

SEQ ID NO: 504672 - RNA, 22 nt, Human
uucagugugcuucaggacguua

SEQ ID NO: 504673 - RNA, 22 nt, Human
aggggagguggcagaaaugugc

SEQ ID NO: 504674 - RNA, 22 nt, Human
acagggccagccugggaccugg

SEQ ID NO: 504675 - RNA, 22 nt, Human
aaaaguauuuugagcacuuuau

SEQ ID NO: 504676 - RNA, 22 nt, Human
uaaagauggagaugaccuagga

SEQ ID NO: 504677 - RNA, 22 nt, Human
augaagcugaccuugucuugcu

SEQ ID NO: 504678 - RNA, 22 nt, Human
ugugaauauuuccuucuuugga

SEQ ID NO: 504679 - RNA, 22 nt, Human
gcagcuuugaagacuuauuugc

SEQ ID NO: 504680 - RNA, 22 nt, Human
gcagcauugcacuuuuguucuu

SEQ ID NO: 504681 - RNA, 22 nt, Human
uuaauuuucucaucugugaaau

SEQ ID NO: 504682 - RNA, 22 nt, Human
cugccagguuggcgcucgcucu

SEQ ID NO: 504683 - RNA, 22 nt, Human
cugugccacugcccugccacgc

SEQ ID NO: 504684 - RNA, 20 nt, Human
uagaaaucuuauaaaagacu

SEQ ID NO: 504685 - RNA, 22 nt, Human
cagcagggaagcugugcuguuu

SEQ ID NO: 504686 - RNA, 22 nt, Human
cugcagcugucucuacugggca

SEQ ID NO: 504687 - RNA, 22 nt, Human
ugaugggacugccagcugcuga

SEQ ID NO: 504688 - RNA, 22 nt, Human
caggagcuggauaggaccacaa

SEQ ID NO: 504689 - RNA, 22 nt, Human
uggcuguguuaccacuucaugu

SEQ ID NO: 504690 - RNA, 22 nt, Human
aaacauagauaauagauagaug

SEQ ID NO: 504691 - RNA, 22 nt, Human
ucccagggacucucugccuucc

SEQ ID NO: 504692 - RNA, 22 nt, Human
aucuccagauugugaucaucag

SEQ ID NO: 504693 - RNA, 22 nt, Human
agacagaacagaauaauuguug

SEQ ID NO: 504694 - RNA, 23 nt, Human
agguggagcugugcagccggggc

SEQ ID NO: 504695 - RNA, 22 nt, Human
uuuuuaguagagguggguuuca

SEQ ID NO: 504696 - RNA, 22 nt, Human
cuggguuccauguagccaagag

SEQ ID NO: 504697 - RNA, 22 nt, Human
ggagcugaugacgucaccaugg

SEQ ID NO: 504698 - RNA, 22 nt, Human
gauguacacucagaaaagucau

SEQ ID NO: 504699 - RNA, 22 nt, Human
uucagugucccuaguagaaguu

SEQ ID NO: 504700 - RNA, 22 nt, Human
ccucuggcuuacuguuggguuu

SEQ ID NO: 504701 - RNA, 22 nt, Human
uaugcacauugguuuccucauu

SEQ ID NO: 504702 - RNA, 22 nt, Human
ugaaucaaugaauugcacuuca

SEQ ID NO: 504703 - RNA, 22 nt, Human
gggauggcuuuguggcugacuc

SEQ ID NO: 504704 - RNA, 22 nt, Human
agaagagaacugccaaacacuu

SEQ ID NO: 504705 - RNA, 22 nt, Human
auacauauccacaggagauaaa

SEQ ID NO: 504706 - RNA, 22 nt, Human
uauuccagguuucuuguuguau

SEQ ID NO: 504707 - RNA, 22 nt, Human
agcagggccucuggcacugguc

SEQ ID NO: 504708 - RNA, 22 nt, Human
uuugucuucccccuuuaaucag

SEQ ID NO: 504709 - RNA, 22 nt, Human
cugcaggggaccaaagucugac

SEQ ID NO: 504710 - RNA, 22 nt, Human
gaaaagcuaggccaguucagcu

SEQ ID NO: 504711 - RNA, 22 nt, Human
gcuguucugcgucccaggcugg

SEQ ID NO: 504712 - RNA, 22 nt, Human
cugagccauccauaccagcuua

SEQ ID NO: 504713 - RNA, 22 nt, Human
auccugggcaaaguaugcuguc

SEQ ID NO: 504714 - RNA, 22 nt, Human
uguaugcaccauuguauuaccu

SEQ ID NO: 504715 - RNA, 22 nt, Human
ucugggggcgaccagggacugc

SEQ ID NO: 504716 - RNA, 22 nt, Human
cauuuacauuuaagguuaauau

SEQ ID NO: 504717 - RNA, 22 nt, Human
uuauuuucagcuaggaaagcca

SEQ ID NO: 504718 - RNA, 21 nt, Human
acagugugcuucucucccucc

SEQ ID NO: 504719 - RNA, 22 nt, Human
gcucugcuguguuuguucagca

SEQ ID NO: 504720 - RNA, 22 nt, Human
auggccucuagcugagaccaau

SEQ ID NO: 504721 - RNA, 22 nt, Human
acagagaugcaaguguguauuu

SEQ ID NO: 504722 - RNA, 22 nt, Human
ccucuaggauguggcuggagga

SEQ ID NO: 504723 - RNA, 22 nt, Human
agccucugcuggcccuggcacu

SEQ ID NO: 504724 - RNA, 22 nt, Human
guuucauuaccugacccaugag

SEQ ID NO: 504725 - RNA, 20 nt, Human
uggcccaguggggcagggug

SEQ ID NO: 504726 - RNA, 22 nt, Human
gccuuggagaucacugcucaug

SEQ ID NO: 504727 - RNA, 22 nt, Human
agugucuggucucugaacuaaa

SEQ ID NO: 504728 - RNA, 22 nt, Human
guagucacaaaccauucauaug

SEQ ID NO: 504729 - RNA, 22 nt, Human
auggauaaauacuuggugguau

SEQ ID NO: 504730 - RNA, 22 nt, Human
ucugagcugggcacagaaggcg

SEQ ID NO: 504731 - RNA, 21 nt, Human
agaaguccccacucugucgca

SEQ ID NO: 504732 - RNA, 22 nt, Human
uaucuaagagagucaauauuua

SEQ ID NO: 504733 - RNA, 22 nt, Human
uuugcauuuguuuagaaccuga

SEQ ID NO: 504734 - RNA, 22 nt, Human
ugguccugagaauccuguccuc

SEQ ID NO: 504735 - RNA, 22 nt, Human
ggccagggccuggggacugucc

SEQ ID NO: 504736 - RNA, 22 nt, Human
ugggccugauucuugaauccug

SEQ ID NO: 504737 - RNA, 22 nt, Human
gcccucugcuggccucaccucg

SEQ ID NO: 504738 - RNA, 22 nt, Human
auaaacaguagagaaagguggu

SEQ ID NO: 504739 - RNA, 22 nt, Human
aaaauaacuucuacuauuugca

SEQ ID NO: 504740 - RNA, 22 nt, Human
ggcagagaugugggucagaauc

SEQ ID NO: 504741 - RNA, 22 nt, Human
uaguaaaaguuuaguugaaagu

SEQ ID NO: 504742 - RNA, 22 nt, Human
uaaagacaugguguaggugaac

SEQ ID NO: 504743 - RNA, 22 nt, Human
ucugaggccugaagcagcagag

SEQ ID NO: 504744 - RNA, 22 nt, Human
ugagcuguagcagaugcuguug

SEQ ID NO: 504745 - RNA, 22 nt, Human
ucugugccuuuaagaagcucau

SEQ ID NO: 504746 - RNA, 22 nt, Human
guccagaguauucaaguaacuu

SEQ ID NO: 504747 - RNA, 22 nt, Human
agcuugccucuuaaucaccuca

SEQ ID NO: 504748 - RNA, 22 nt, Human
gcuggcagaauuucuucuugcu

SEQ ID NO: 504749 - RNA, 22 nt, Human
uucaaugauuuuuagggaucau

SEQ ID NO: 504750 - RNA, 22 nt, Human
ucugaagaacugaguaaacaug

SEQ ID NO: 504751 - RNA, 22 nt, Human
cuggagagaaaugacaaagcua

SEQ ID NO: 504752 - RNA, 22 nt, Human
uggccugccccgagauccuggc

SEQ ID NO: 504753 - RNA, 22 nt, Human
uccuuuuuauaguuagagaaac

SEQ ID NO: 504754 - RNA, 22 nt, Human
ggcugccuugacccuggcuccg

SEQ ID NO: 504755 - RNA, 22 nt, Human
uuuguaaauagcaguacucaug

SEQ ID NO: 504756 - RNA, 22 nt, Human
uagcagcaggggaaacagcugu

SEQ ID NO: 504757 - RNA, 22 nt, Human
cagcccuguccaaugucugcuc

SEQ ID NO: 504758 - RNA, 22 nt, Human
aggaccaggucuaaugaagaca

SEQ ID NO: 504759 - RNA, 22 nt, Human
ugggcugcccugaugguccuca

SEQ ID NO: 504760 - RNA, 22 nt, Human
agggagaagagaacaaagcccu

SEQ ID NO: 504761 - RNA, 22 nt, Human
ccaggccuguguuguguggagg

SEQ ID NO: 504762 - RNA, 22 nt, Human
aagugaguggccuggagaggug

SEQ ID NO: 504763 - RNA, 22 nt, Human
uccucaggagagcuccuaugcc

SEQ ID NO: 504764 - RNA, 22 nt, Human
cuauacaguaaccacagugauu

SEQ ID NO: 504765 - RNA, 22 nt, Human
aguguucuucuucaaagcucug

SEQ ID NO: 504766 - RNA, 22 nt, Human
uuggaaaugcaaauauauugaa

SEQ ID NO: 504767 - RNA, 18 nt, Human
ugcaggcugggguuccuc

SEQ ID NO: 504768 - RNA, 22 nt, Human
acagcaaaggacgaacacucug

SEQ ID NO: 504769 - RNA, 22 nt, Human
ugucucugugacuccuuccgcc

SEQ ID NO: 504770 - RNA, 22 nt, Human
ggagucuggaguggggcccaag

SEQ ID NO: 504771 - RNA, 22 nt, Human
caguacuuaguucucaugguuu

SEQ ID NO: 504772 - RNA, 22 nt, Human
uacauaauugucuuuguccuca

SEQ ID NO: 504773 - RNA, 22 nt, Human
guaagccucugcucuaucuggu

SEQ ID NO: 504774 - RNA, 22 nt, Human
ucagaagcaggagugugcacaa

SEQ ID NO: 504775 - RNA, 22 nt, Human
uuaaaagagacuuccuuuguuu

SEQ ID NO: 504776 - RNA, 22 nt, Human
uugugaauagugcugcaauaaa

SEQ ID NO: 504777 - RNA, 22 nt, Human
gccuggaggaauguagcugagg

SEQ ID NO: 504778 - RNA, 22 nt, Human
ccaguccucagauggucugugc

SEQ ID NO: 504779 - RNA, 22 nt, Human
gagaaggaaguugagccagcau

SEQ ID NO: 504780 - RNA, 22 nt, Human
ucagaacauuuaaaaagugguu

SEQ ID NO: 504781 - RNA, 22 nt, Human
ggugggaucaaagagucauucg

SEQ ID NO: 504782 - RNA, 22 nt, Human
gaaauucacuguauuucuuggg

SEQ ID NO: 504783 - RNA, 22 nt, Human
caguucugagcuuucccagaag

SEQ ID NO: 504784 - RNA, 22 nt, Human
ccagggccaguaagauuggcau

SEQ ID NO: 504785 - RNA, 22 nt, Human
cagcagcuuugccaagucagcc

SEQ ID NO: 504786 - RNA, 22 nt, Human
uuuccuccuagccuccagccgc

SEQ ID NO: 504787 - RNA, 22 nt, Human
ugccagcacuucuggcugucug

SEQ ID NO: 504788 - RNA, 21 nt, Human
ggacuuacauagguaaggggu

SEQ ID NO: 504789 - RNA, 22 nt, Human
ggagaagggccaauuccaugua

SEQ ID NO: 504790 - RNA, 22 nt, Human
gagcaggcuugcagagaagggg

SEQ ID NO: 504791 - RNA, 22 nt, Human
aggaaagauggaaggaggauaa

SEQ ID NO: 504792 - RNA, 22 nt, Human
cccugggcaagcccuauuuucc

SEQ ID NO: 504793 - RNA, 22 nt, Human
ccagggcaugggaagaacugaa

SEQ ID NO: 504794 - RNA, 22 nt, Human
aggaagagcccgggugacauaa

SEQ ID NO: 504795 - RNA, 22 nt, Human
accaggcaugauguggagcaca

SEQ ID NO: 504796 - RNA, 22 nt, Human
cuucagaggggacucaaaguca

SEQ ID NO: 504797 - RNA, 22 nt, Human
cugcugcucagugucaucaugu

SEQ ID NO: 504798 - RNA, 22 nt, Human
gaggcagcauucgcauagacag

SEQ ID NO: 504799 - RNA, 22 nt, Human
ugagcagacuugaugaggcagc

SEQ ID NO: 504800 - RNA, 22 nt, Human
uuccugagucccggguaaagau

SEQ ID NO: 504801 - RNA, 22 nt, Human
gagcugccugugugccaugaug

SEQ ID NO: 504802 - RNA, 22 nt, Human
ucagcagggccuccuugugcag

SEQ ID NO: 504803 - RNA, 22 nt, Human
augaggcaucugcagucacuag

SEQ ID NO: 504804 - RNA, 22 nt, Human
guguauaacuaucuaucuagua

SEQ ID NO: 504805 - RNA, 22 nt, Human
agaaaggguucucugaggugcu

SEQ ID NO: 504806 - RNA, 22 nt, Human
aacuucauggguucaaagcugg

SEQ ID NO: 504807 - RNA, 22 nt, Human
gcugcugggauccugggucuca

SEQ ID NO: 504808 - RNA, 22 nt, Human
agcagcuguacuuucaucuguu

SEQ ID NO: 504809 - RNA, 19 nt, Human
agucuguggauuugugggu

SEQ ID NO: 504810 - RNA, 22 nt, Human
acacagggcaaugcuuugaccu

SEQ ID NO: 504811 - RNA, 22 nt, Human
caguucuuauuuggccaguguc

SEQ ID NO: 504812 - RNA, 22 nt, Human
aaguuaugaaauuuggacagcu

SEQ ID NO: 504813 - RNA, 18 nt, Human
ccugcagcccaggaggcc

SEQ ID NO: 504814 - RNA, 22 nt, Human
guggccugccagcagauggcgc

SEQ ID NO: 504815 - RNA, 22 nt, Human
ugucucugauaaguaguucagu

SEQ ID NO: 504816 - RNA, 22 nt, Human
gccaccuggacagcugugcccu

SEQ ID NO: 504817 - RNA, 22 nt, Human
uucauacucacuccaauaacug

SEQ ID NO: 504818 - RNA, 22 nt, Human
caggcugauuaggccucgucca

SEQ ID NO: 504819 - RNA, 22 nt, Human
gagaagcaauuuccaacugugc

SEQ ID NO: 504820 - RNA, 22 nt, Human
cugguggagagugggcucugga

SEQ ID NO: 504821 - RNA, 22 nt, Human
gaagaggaugacaggagccggu

SEQ ID NO: 504822 - RNA, 19 nt, Human
ugggcagguucaguaaugg

SEQ ID NO: 504823 - RNA, 22 nt, Human
agaagccagcuucagcugcccg

SEQ ID NO: 504824 - RNA, 22 nt, Human
aguuucuaacauauagcauugg

SEQ ID NO: 504825 - RNA, 22 nt, Human
aagcagaauuuaauagaaaggu

SEQ ID NO: 504826 - RNA, 22 nt, Human
cacagccugcugcacucaagaa

SEQ ID NO: 504827 - RNA, 22 nt, Human
cuggccagcauuuuugcuuuag

SEQ ID NO: 504828 - RNA, 22 nt, Human
agggccugggauguccuccuag

SEQ ID NO: 504829 - RNA, 22 nt, Human
ggagaguggauuccagcuguau

SEQ ID NO: 504830 - RNA, 22 nt, Human
agagcacacugacgucagucug

SEQ ID NO: 504831 - RNA, 22 nt, Human
uuuucuaacaucuaguaauuug

SEQ ID NO: 504832 - RNA, 22 nt, Human
cuucuggaggacacuggcccca

SEQ ID NO: 504833 - RNA, 22 nt, Human
gccuucugugcuccuggccuuu

SEQ ID NO: 504834 - RNA, 22 nt, Human
ugaggcagugcugggaagccug

SEQ ID NO: 504835 - RNA, 22 nt, Human
ccucuggguuaguuuagggagc

SEQ ID NO: 504836 - RNA, 22 nt, Human
gccuguuuuagaugcauugaug

SEQ ID NO: 504837 - RNA, 22 nt, Human
agcagggagaccaucucuuccu

SEQ ID NO: 504838 - RNA, 22 nt, Human
ggucuccauuccuucaucucac

SEQ ID NO: 504839 - RNA, 22 nt, Human
uaaagcaggcaucucucuccuc

SEQ ID NO: 504840 - RNA, 22 nt, Human
gaaugcuacuugacucagcuca

SEQ ID NO: 504841 - RNA, 22 nt, Human
cguggccaguuucaagcuacca

SEQ ID NO: 504842 - RNA, 22 nt, Human
ugcuggggauccguaccaaccc

SEQ ID NO: 504843 - RNA, 22 nt, Human
ccagggucucugcugccugaga

SEQ ID NO: 504844 - RNA, 22 nt, Human
ugucacauaauuuaucuguagg

SEQ ID NO: 504845 - RNA, 22 nt, Human
ucagacaguuugcagugugccu

SEQ ID NO: 504846 - RNA, 22 nt, Human
uuauuagggugguuuauguucu

SEQ ID NO: 504847 - RNA, 22 nt, Human
agcuuuaaagcauauuucuaag

SEQ ID NO: 504848 - RNA, 22 nt, Human
aagccgggccugagaaaugaca

SEQ ID NO: 504849 - RNA, 18 nt, Human
uggcagcaggaagccauu

SEQ ID NO: 504850 - RNA, 22 nt, Human
ucauauaagagcuuuagaguca

SEQ ID NO: 504851 - RNA, 22 nt, Human
ccuggggcucugcacagagcag

SEQ ID NO: 504852 - RNA, 22 nt, Human
aaggaguuuggguagucauaca

SEQ ID NO: 504853 - RNA, 22 nt, Human
cauaauuuuuuuaagucagaac

SEQ ID NO: 504854 - RNA, 22 nt, Human
aggaaaaagaguugcugccuuc

SEQ ID NO: 504855 - RNA, 22 nt, Human
aucaaaguucguaacugauaac

SEQ ID NO: 504856 - RNA, 20 nt, Human
aaucagaaagugugagcucu

SEQ ID NO: 504857 - RNA, 22 nt, Human
cacuacuugaaagaauuacaga

SEQ ID NO: 504858 - RNA, 22 nt, Human
agagguaugugucagugcuuau

SEQ ID NO: 504859 - RNA, 22 nt, Human
augaaugacugucuacuuuggg

SEQ ID NO: 504860 - RNA, 22 nt, Human
ggcagcuccuccuagucugccc

SEQ ID NO: 504861 - RNA, 22 nt, Human
ggaggugggcuaaggacucucu

SEQ ID NO: 504862 - RNA, 22 nt, Human
agcagcaccuguccucgcugcu

SEQ ID NO: 504863 - RNA, 22 nt, Human
ucagugcaggaaucucuagcca

SEQ ID NO: 504864 - RNA, 22 nt, Human
uccugagguauaugcuuugcag

SEQ ID NO: 504865 - RNA, 22 nt, Human
agauggaguggagaugaguaaa

SEQ ID NO: 504866 - RNA, 20 nt, Human
cacaggaaagcuacucaguu

SEQ ID NO: 504867 - RNA, 22 nt, Human
caagaggagcaggcaggugugc

SEQ ID NO: 504868 - RNA, 21 nt, Human
ccccugggagcccugucagua

SEQ ID NO: 504869 - RNA, 22 nt, Human
cccaaguuaaaauucagugcuc

SEQ ID NO: 504870 - RNA, 22 nt, Human
cuggaaaggguccucauucugu

SEQ ID NO: 504871 - RNA, 22 nt, Human
agcuugaguuuuggaugaagug

SEQ ID NO: 504872 - RNA, 22 nt, Human
uugcaacuaaaagaacuugaca

SEQ ID NO: 504873 - RNA, 22 nt, Human
ccuccuggugggcgcuucuggc

SEQ ID NO: 504874 - RNA, 22 nt, Human
ggaaggagucuuuaacacccau

SEQ ID NO: 504875 - RNA, 22 nt, Human
aagcagggugucuugacccaug

SEQ ID NO: 504876 - RNA, 22 nt, Human
uagaaagaacuucauguaaaac

SEQ ID NO: 504877 - RNA, 22 nt, Human
acagaaauauagaagguaggaa

SEQ ID NO: 504878 - RNA, 22 nt, Human
uugcaacauuguaaguuuauau

SEQ ID NO: 504879 - RNA, 22 nt, Human
aaugucaaagugcuuugcaaac

SEQ ID NO: 504880 - RNA, 22 nt, Human
ggggcugggauuugaacccagg

SEQ ID NO: 504881 - RNA, 22 nt, Human
uggccagcagaguucacucucu

SEQ ID NO: 504882 - RNA, 22 nt, Human
uaugagcuuccaguguugcaug

SEQ ID NO: 504883 - RNA, 22 nt, Human
agucuucacucuucacuacuau

SEQ ID NO: 504884 - RNA, 22 nt, Human
uacacaucucugucaguaguga

SEQ ID NO: 504885 - RNA, 22 nt, Human
aagcaauaggguaaucuacuca

SEQ ID NO: 504886 - RNA, 22 nt, Human
uuguuuuaagccagucugccua

SEQ ID NO: 504887 - RNA, 22 nt, Human
gggagucagagagguaauggga

SEQ ID NO: 504888 - RNA, 22 nt, Human
ucagggcaagucucagaagguu

SEQ ID NO: 504889 - RNA, 22 nt, Human
cugggcucagugucucacuccu

SEQ ID NO: 504890 - RNA, 22 nt, Human
augccuguaaucccagugcuuu

SEQ ID NO: 504891 - RNA, 22 nt, Human
gccucccuccaccacugcaggu

SEQ ID NO: 504892 - RNA, 22 nt, Human
aaugcuuuaauugcauguagug

SEQ ID NO: 504893 - RNA, 22 nt, Human
acaaugcauaccuagcagcuca

SEQ ID NO: 504894 - RNA, 22 nt, Human
cagccagaaccuaggaugagcu

SEQ ID NO: 504895 - RNA, 22 nt, Human
auaaguucagguaaagaaauca

SEQ ID NO: 504896 - RNA, 22 nt, Human
gcuaggaaaggaagaacuuuga

SEQ ID NO: 504897 - RNA, 23 nt, Human
auguuauuauuagcagucuugcc

SEQ ID NO: 504898 - RNA, 22 nt, Human
cucccccuuagcucuugucuuu

SEQ ID NO: 504899 - RNA, 22 nt, Human
auguucuuugugauucugagcu

SEQ ID NO: 504900 - RNA, 22 nt, Human
agcugaguuaauucaucacuua

SEQ ID NO: 504901 - RNA, 22 nt, Human
uguaaguaguaauggaaggaca

SEQ ID NO: 504902 - RNA, 22 nt, Human
aaaguucucuaugguguaaaaa

SEQ ID NO: 504903 - RNA, 19 nt, Human
gaggcaguagucaaagcuu

SEQ ID NO: 504904 - RNA, 22 nt, Human
uacaagagacaccagggaggcu

SEQ ID NO: 504905 - RNA, 22 nt, Human
auuaauaaaauaccacuuuguu

SEQ ID NO: 504906 - RNA, 22 nt, Human
gcccucagaggacagcugacuu

SEQ ID NO: 504907 - RNA, 22 nt, Human
ggagacaguauggcuuguagcu

SEQ ID NO: 504908 - RNA, 22 nt, Human
gucccuggaucugggacagcug

SEQ ID NO: 504909 - RNA, 22 nt, Human
cugcuuuguguggucccuccag

SEQ ID NO: 504910 - RNA, 22 nt, Human
gauccugucuccgcaccguguu

SEQ ID NO: 504911 - RNA, 22 nt, Human
aaauuacagccuuggguagcuu

SEQ ID NO: 504912 - RNA, 20 nt, Human
gggcuggcgcauggggaaag

SEQ ID NO: 504913 - RNA, 22 nt, Human
aggaggccgggauucuggagau

SEQ ID NO: 504914 - RNA, 22 nt, Human
cagcugcccauccugggaaaug

SEQ ID NO: 504915 - RNA, 22 nt, Human
acucuggcuugaggaccagguc

SEQ ID NO: 504916 - RNA, 22 nt, Human
aacuagaaaacaagaugcugau

SEQ ID NO: 504917 - RNA, 22 nt, Human
cagaguguuagcgcugguuggg

SEQ ID NO: 504918 - RNA, 22 nt, Human
gcagcagagaacacaaugaugg

SEQ ID NO: 504919 - RNA, 22 nt, Human
uuacaaagcguugagacaagua

SEQ ID NO: 504920 - RNA, 22 nt, Human
ucauuuguaccauuuuuuaaga

SEQ ID NO: 504921 - RNA, 22 nt, Human
auuccuuggaacagaugcgaag

SEQ ID NO: 504922 - RNA, 22 nt, Human
cucugagcccgcugcagcccca

SEQ ID NO: 504923 - RNA, 23 nt, Human
cccugcagucagggugagauggu

SEQ ID NO: 504924 - RNA, 22 nt, Human
aggucugacucuuugccacaua

SEQ ID NO: 504925 - RNA, 22 nt, Human
ucaaaugcaggucuggucuugg

SEQ ID NO: 504926 - RNA, 22 nt, Human
cccaggcagugugugcaugcgu

SEQ ID NO: 504927 - RNA, 22 nt, Human
uuaaaauuuccccaccauguau

SEQ ID NO: 504928 - RNA, 22 nt, Human
aagauguugcaagggacucuuc

SEQ ID NO: 504929 - RNA, 22 nt, Human
agucauuacggacuaguacuac

SEQ ID NO: 504930 - RNA, 22 nt, Human
ugaggaaggaauugagguuuua

SEQ ID NO: 504931 - RNA, 22 nt, Human
uggccaggcagguagaacggcc

SEQ ID NO: 504932 - RNA, 22 nt, Human
gcuggugcauuagcugcaguuc

SEQ ID NO: 504933 - RNA, 22 nt, Human
agacaucagcuugugugcaggg

SEQ ID NO: 504934 - RNA, 22 nt, Human
ugucagggcaugcgguccagcc

SEQ ID NO: 504935 - RNA, 22 nt, Human
uauugaugcuuggauugggcca

SEQ ID NO: 504936 - RNA, 22 nt, Human
aucuuccuucacuuucucccac

SEQ ID NO: 504937 - RNA, 23 nt, Human
uccugaggguuucccagccuugg

SEQ ID NO: 504938 - RNA, 22 nt, Human
gcauucaggguucacggucaac

SEQ ID NO: 504939 - RNA, 22 nt, Human
gguuugcauucugaaaggcuca

SEQ ID NO: 504940 - RNA, 22 nt, Human
uuguacuuuggggaaauguuga

SEQ ID NO: 504941 - RNA, 21 nt, Human
augaaugauuucuacucuuaa

SEQ ID NO: 504942 - RNA, 22 nt, Human
ggccuggccuccagaugugggc

SEQ ID NO: 504943 - RNA, 22 nt, Human
cagucccaaggaggaagcaguc

SEQ ID NO: 504944 - RNA, 22 nt, Human
uuggaaggcugaauggccucuc

SEQ ID NO: 504945 - RNA, 22 nt, Human
gauggguggucucagacuugcc

SEQ ID NO: 504946 - RNA, 22 nt, Human
uuucugaagauacagcuuugcu

SEQ ID NO: 504947 - RNA, 22 nt, Human
ggucccagcugcucaagaggcu

SEQ ID NO: 504948 - RNA, 20 nt, Human
ugcuuuaugcuauacuuugu

SEQ ID NO: 504949 - RNA, 22 nt, Human
gccucugcaugcucagcaccca

SEQ ID NO: 504950 - RNA, 22 nt, Human
ggcucccugggugcuccugcuc

SEQ ID NO: 504951 - RNA, 22 nt, Human
uggcagguacccauuggcugua

SEQ ID NO: 504952 - RNA, 18 nt, Human
gggagcugggaagcuggu

SEQ ID NO: 504953 - RNA, 22 nt, Human
gcugucugcaagccaggaaaug

SEQ ID NO: 504954 - RNA, 22 nt, Human
acaguucccgucuugcacagcu

SEQ ID NO: 504955 - RNA, 22 nt, Human
ugcauauugugaaaauguagau

SEQ ID NO: 504956 - RNA, 22 nt, Human
caagagcucccagaccugggca

SEQ ID NO: 504957 - RNA, 22 nt, Human
gcagauggugccaugucuugug

SEQ ID NO: 504958 - RNA, 22 nt, Human
uggcuagguagcuuucugcugu

SEQ ID NO: 504959 - RNA, 18 nt, Human
acagacaaaauggaaaug

SEQ ID NO: 504960 - RNA, 19 nt, Human
acauauguggauauacaug

SEQ ID NO: 504961 - RNA, 23 nt, Human
agcuuuaacccuuucaggagcau

SEQ ID NO: 504962 - RNA, 22 nt, Human
auuuguuucagggccuugguau

SEQ ID NO: 504963 - RNA, 22 nt, Human
cugccacuuacuaggcauggug

SEQ ID NO: 504964 - RNA, 22 nt, Human
gggcugacuccuauuggaugaa

SEQ ID NO: 504965 - RNA, 22 nt, Human
ggcugucugugguggagcguug

SEQ ID NO: 504966 - RNA, 22 nt, Human
ugguccuggagaguguuccaua

SEQ ID NO: 504967 - RNA, 21 nt, Human
aggcucagagaucaaacagua

SEQ ID NO: 504968 - RNA, 22 nt, Human
uaaaaaguugaaaggacuuauc

SEQ ID NO: 504969 - RNA, 22 nt, Human
ugacaugcuuguuuuccuugaa

SEQ ID NO: 504970 - RNA, 21 nt, Human
acaaaggaagucucuuuuaag

SEQ ID NO: 504971 - RNA, 22 nt, Human
cagggacugagauccagacugu

SEQ ID NO: 504972 - RNA, 22 nt, Human
aggugcuggagucugggcagga

SEQ ID NO: 504973 - RNA, 23 nt, Human
uaaugagaagcuuuguuuccuga

SEQ ID NO: 504974 - RNA, 22 nt, Human
gaaaguauucucccugaauuuu

SEQ ID NO: 504975 - RNA, 22 nt, Human
gugugucagagcucagagaagu

SEQ ID NO: 504976 - RNA, 22 nt, Human
ggccagaggaccucucauagcc

SEQ ID NO: 504977 - RNA, 22 nt, Human
agcagggggaguuagacuagau

SEQ ID NO: 504978 - RNA, 22 nt, Human
ggcucagggaaugaggaagaau

SEQ ID NO: 504979 - RNA, 22 nt, Human
agaaggcuaaagaaacagauug

SEQ ID NO: 504980 - RNA, 22 nt, Human
cuagaaauauuuuacagucaag

SEQ ID NO: 504981 - RNA, 22 nt, Human
agugggagccagcagcuugggg

SEQ ID NO: 504982 - RNA, 22 nt, Human
aagaggaggauugaugugggag

SEQ ID NO: 504983 - RNA, 18 nt, Human
ccgggcuuuggugacaca

SEQ ID NO: 504984 - RNA, 20 nt, Human
cccugagaccagagagcagc

SEQ ID NO: 504985 - RNA, 22 nt, Human
aagagcuggauggaaucuggga

SEQ ID NO: 504986 - RNA, 22 nt, Human
agcugcugaaugacacugcaag

SEQ ID NO: 504987 - RNA, 22 nt, Human
caaggccaugagcagcgagugu

SEQ ID NO: 504988 - RNA, 22 nt, Human
ggugcagaaggaagggagcugg

SEQ ID NO: 504989 - RNA, 22 nt, Human
acauuuaaugauccuacuguga

SEQ ID NO: 504990 - RNA, 22 nt, Human
agcaggcuaaucuugcugaaca

SEQ ID NO: 504991 - RNA, 20 nt, Human
gggguuggcuggcacaggga

SEQ ID NO: 504992 - RNA, 22 nt, Human
cacaugcauaaggauaauuacu

SEQ ID NO: 504993 - RNA, 22 nt, Human
cuggugggaggcaagguggaag

SEQ ID NO: 504994 - RNA, 22 nt, Human
caacagcugaucuuugaugaag

SEQ ID NO: 504995 - RNA, 22 nt, Human
gcuucuggaagcugcuucugcc

SEQ ID NO: 504996 - RNA, 22 nt, Human
ucacaggguuuggaagccuccu

SEQ ID NO: 504997 - RNA, 22 nt, Human
gucagcaugagcaagggcugac

SEQ ID NO: 504998 - RNA, 22 nt, Human
gagcuggugugugcccgagcac

SEQ ID NO: 504999 - RNA, 22 nt, Human
accugccuaucagcugccugcu

SEQ ID NO: 505000 - RNA, 22 nt, Human
cagggagaucuuggcuccuggu

SEQ ID NO: 505001 - RNA, 22 nt, Human
uggcacagaaaaaugcuccauu

SEQ ID NO: 505002 - RNA, 20 nt, Human
uccuggaggcuucauccaua

SEQ ID NO: 505003 - RNA, 22 nt, Human
uuucaauaacaaagcucauuuu

SEQ ID NO: 505004 - RNA, 22 nt, Human
gggcucucaugaguguguggua

SEQ ID NO: 505005 - RNA, 19 nt, Human
uccaccccagccagcucug

SEQ ID NO: 505006 - RNA, 22 nt, Human
cugcucuguuaauuaaacuuug

SEQ ID NO: 505007 - RNA, 22 nt, Human
cuacauaaauauuuaugugucu

SEQ ID NO: 505008 - RNA, 22 nt, Human
ugcugcucaaugagaugccauc

SEQ ID NO: 505009 - RNA, 22 nt, Human
acagauccugguuacagccauu

SEQ ID NO: 505010 - RNA, 22 nt, Human
ggccacuccgcugcuacuggaa

SEQ ID NO: 505011 - RNA, 22 nt, Human
agaaaucauucccaaacccaua

SEQ ID NO: 505012 - RNA, 22 nt, Human
uucaguguucuuuucuguuagc

SEQ ID NO: 505013 - RNA, 22 nt, Human
cugugcauugucuugucuguag

SEQ ID NO: 505014 - RNA, 22 nt, Human
uuucugugguggguaguucaga

SEQ ID NO: 505015 - RNA, 22 nt, Human
cagcuucuggcguggagccuga

SEQ ID NO: 505016 - RNA, 22 nt, Human
uccucugcuccaggcuggacuu

SEQ ID NO: 505017 - RNA, 22 nt, Human
ggcuuuauuauguggccaugug

SEQ ID NO: 505018 - RNA, 22 nt, Human
cccagagaauuccacauagagg

SEQ ID NO: 505019 - RNA, 22 nt, Human
agggcagcucucaccucuggcc

SEQ ID NO: 505020 - RNA, 22 nt, Human
ugccaccaggagaaccagugca

SEQ ID NO: 505021 - RNA, 22 nt, Human
uauuuggaaaggacauguaagu

SEQ ID NO: 505022 - RNA, 22 nt, Human
aguccaaggagagacagcauuu

SEQ ID NO: 505023 - RNA, 22 nt, Human
uuuuccucugagcuuugaauaa

SEQ ID NO: 505024 - RNA, 22 nt, Human
gagauguacaauguguauuaau

SEQ ID NO: 505025 - RNA, 22 nt, Human
ccagcacucugucccagcuucc

SEQ ID NO: 505026 - RNA, 22 nt, Human
uggcucagccagcccuaggaac

SEQ ID NO: 505027 - RNA, 22 nt, Human
cccagagaaucuuucagaaagg

SEQ ID NO: 505028 - RNA, 22 nt, Human
acauuucuuagccuaguuccag

SEQ ID NO: 505029 - RNA, 22 nt, Human
aagauuucagaguuugggggaa

SEQ ID NO: 505030 - RNA, 22 nt, Human
aggcagcuggcagcacccaggg

SEQ ID NO: 505031 - RNA, 23 nt, Human
gggaucuguaaaccuggagaacc

SEQ ID NO: 505032 - RNA, 22 nt, Human
cugccucagcguuguggcccua

SEQ ID NO: 505033 - RNA, 22 nt, Human
cccuguuuggauggggacccag

SEQ ID NO: 505034 - RNA, 22 nt, Human
agggagcugacuggcugccauu

SEQ ID NO: 505035 - RNA, 22 nt, Human
gccaggugcuaucccugcgcug

SEQ ID NO: 505036 - RNA, 22 nt, Human
ucagagguaagggcugagagga

SEQ ID NO: 505037 - RNA, 22 nt, Human
uuuaauauccaguggauacaaa

SEQ ID NO: 505038 - RNA, 22 nt, Human
gacaguuaggacaacugacuuc

SEQ ID NO: 505039 - RNA, 22 nt, Human
acagagcaauaacagggagagg

SEQ ID NO: 505040 - RNA, 22 nt, Human
ggaggugaggccguagggugug

SEQ ID NO: 505041 - RNA, 22 nt, Human
ccugggccuggcgggucggcuc

SEQ ID NO: 505042 - RNA, 22 nt, Human
acugccaaugguaguuugaugg

SEQ ID NO: 505043 - RNA, 22 nt, Human
uccaggaggugaggggaccaaa

SEQ ID NO: 505044 - RNA, 22 nt, Human
gaggagggagcuggaagcucuu

SEQ ID NO: 505045 - RNA, 22 nt, Human
ccagcucuuuuggcugagugag

SEQ ID NO: 505046 - RNA, 22 nt, Human
ccucccacuucuugcugagguc

SEQ ID NO: 505047 - RNA, 22 nt, Human
uaacagaaauaguaggugaggg

SEQ ID NO: 505048 - RNA, 22 nt, Human
agaaaauaaauugaugguggaa

SEQ ID NO: 505049 - RNA, 22 nt, Human
aaagacugguguguuacauaua

SEQ ID NO: 505050 - RNA, 22 nt, Human
agaggccuaaccaagauguccu

SEQ ID NO: 505051 - RNA, 21 nt, Human
agagcugggacuugccugaga

SEQ ID NO: 505052 - RNA, 22 nt, Human
uagaacagaguuccagugauca

SEQ ID NO: 505053 - RNA, 22 nt, Human
uuucagagaggcuucaaaucuu

SEQ ID NO: 505054 - RNA, 22 nt, Human
gaggcagcucuucugaaugggg

SEQ ID NO: 505055 - RNA, 22 nt, Human
uccuggccacccgacagaaguc

SEQ ID NO: 505056 - RNA, 22 nt, Human
cuucaggauuaauuuggggccu

SEQ ID NO: 505057 - RNA, 22 nt, Human
aguaugaauggaaacuaccuau

SEQ ID NO: 505058 - RNA, 22 nt, Human
ccaggccugcaucugcugcgca

SEQ ID NO: 505059 - RNA, 22 nt, Human
gcagcuggucuggccuagagua

SEQ ID NO: 505060 - RNA, 22 nt, Human
cagguggcaugacugccuacaa

SEQ ID NO: 505061 - RNA, 22 nt, Human
uccugcagugugucuccugcac

SEQ ID NO: 505062 - RNA, 22 nt, Human
caggaacaauaucuguccuggu

SEQ ID NO: 505063 - RNA, 22 nt, Human
cagcccugccauggagccuccu

SEQ ID NO: 505064 - RNA, 22 nt, Human
gugacucacacaggccugggcu

SEQ ID NO: 505065 - RNA, 22 nt, Human
ccuuuggccgcuuuauggagga

SEQ ID NO: 505066 - RNA, 22 nt, Human
uugucugaggguuugagagaau

SEQ ID NO: 505067 - RNA, 22 nt, Human
ccugaccacccuuggacaaggu

SEQ ID NO: 505068 - RNA, 21 nt, Human
uugaaggaucacuucuguacc

SEQ ID NO: 505069 - RNA, 22 nt, Human
agccagcuggugggucagcugg

SEQ ID NO: 505070 - RNA, 22 nt, Human
aacuccugaggaaauggucuca

SEQ ID NO: 505071 - RNA, 22 nt, Human
aaagcacagggugcuagagagu

SEQ ID NO: 505072 - RNA, 22 nt, Human
ucucuguacaguacaugccgug

SEQ ID NO: 505073 - RNA, 22 nt, Human
uuugcauuguaauauuuaguuc

SEQ ID NO: 505074 - RNA, 21 nt, Human
uuacuuuugcaccaaccuaau

SEQ ID NO: 505075 - RNA, 22 nt, Human
auucaucuaugacucuaaugug

SEQ ID NO: 505076 - RNA, 22 nt, Human
aauuucagaccauuugcaauua

SEQ ID NO: 505077 - RNA, 22 nt, Human
acuggcuugaaguagauucaaa

SEQ ID NO: 505078 - RNA, 22 nt, Human
cagauggccagaggcagcugca

SEQ ID NO: 505079 - RNA, 22 nt, Human
uuucacauggaagcucucgaga

SEQ ID NO: 505080 - RNA, 22 nt, Human
cugggcuggcgcauccgacacg

SEQ ID NO: 505081 - RNA, 22 nt, Human
accuggcugguugugauuccca

SEQ ID NO: 505082 - RNA, 23 nt, Human
uauuuggaaagagggaagaagac

SEQ ID NO: 505083 - RNA, 22 nt, Human
gcuggccaggugcuuugguucu

SEQ ID NO: 505084 - RNA, 22 nt, Human
cugcauccuaaccuccaugcag

SEQ ID NO: 505085 - RNA, 22 nt, Human
acaaagucugaaaccugaggca

SEQ ID NO: 505086 - RNA, 22 nt, Human
agugucugccaacugcaugguc

SEQ ID NO: 505087 - RNA, 22 nt, Human
aggguauguuuuuaucuacugu

SEQ ID NO: 505088 - RNA, 22 nt, Human
uucuggagaggaacagaaaggu

SEQ ID NO: 505089 - RNA, 22 nt, Human
cacugaagccugggaguaagac

SEQ ID NO: 505090 - RNA, 22 nt, Human
ucaguguuggcuacaucugccu

SEQ ID NO: 505091 - RNA, 23 nt, Human
ucuguuuugcaacaugugacaag

SEQ ID NO: 505092 - RNA, 20 nt, Human
ccaggcacugucccaugcag

SEQ ID NO: 505093 - RNA, 22 nt, Human
cugagccaccggcagggacauc

SEQ ID NO: 505094 - RNA, 22 nt, Human
gccucugcaggugcgguuaucc

SEQ ID NO: 505095 - RNA, 22 nt, Human
cccagcuccgagcuccgagccg

SEQ ID NO: 505096 - RNA, 22 nt, Human
gcauuuuucaucccucuugggu

SEQ ID NO: 505097 - RNA, 22 nt, Human
cagcagcaaggugaggguggag

SEQ ID NO: 505098 - RNA, 22 nt, Human
ucuggggagggagccacagguc

SEQ ID NO: 505099 - RNA, 22 nt, Human
uacaguaaccuuauuugucauu

SEQ ID NO: 505100 - RNA, 22 nt, Human
uguaccacucuacuaaggguuc

SEQ ID NO: 505101 - RNA, 21 nt, Human
gcccccuggacuccucaucca

SEQ ID NO: 505102 - RNA, 22 nt, Human
uucuggcuccagaugcuucugu

SEQ ID NO: 505103 - RNA, 22 nt, Human
ucuggagaaggaagagucuuug

SEQ ID NO: 505104 - RNA, 20 nt, Human
agagaugggguaucaccgua

SEQ ID NO: 505105 - RNA, 23 nt, Human
ucaaaggaggcaucguucugcag

SEQ ID NO: 505106 - RNA, 22 nt, Human
agcucccagaaggcccugcgcc

SEQ ID NO: 505107 - RNA, 22 nt, Human
uccauguguuuuccuguccaca

SEQ ID NO: 505108 - RNA, 22 nt, Human
uucccagaccuguaggaucaga

SEQ ID NO: 505109 - RNA, 22 nt, Human
guagcauucugaguucgcagag

SEQ ID NO: 505110 - RNA, 20 nt, Human
cagcuuggaugagaggcuga

SEQ ID NO: 505111 - RNA, 18 nt, Human
gucacuguguuucugagc

SEQ ID NO: 505112 - RNA, 22 nt, Human
agagggcuuugauucucaguuc

SEQ ID NO: 505113 - RNA, 22 nt, Human
aaaguguaaggaauuuaaguaa

SEQ ID NO: 505114 - RNA, 22 nt, Human
gggaaagaagaagagccauuuu

SEQ ID NO: 505115 - RNA, 22 nt, Human
cauuucugugacacuuccaucu

SEQ ID NO: 505116 - RNA, 22 nt, Human
ucaggugguccuaagugccauc

SEQ ID NO: 505117 - RNA, 22 nt, Human
caaugcaagcaagauggucaca

SEQ ID NO: 505118 - RNA, 22 nt, Human
agucuucagcagccuucucagg

SEQ ID NO: 505119 - RNA, 19 nt, Human
auggaaaaugccagacuga

SEQ ID NO: 505120 - RNA, 22 nt, Human
gggcaugguggugcacaccugu

SEQ ID NO: 505121 - RNA, 22 nt, Human
auaugaaaagaagucaccauug

SEQ ID NO: 505122 - RNA, 22 nt, Human
aucugggccagccccaagagac

SEQ ID NO: 505123 - RNA, 22 nt, Human
gcuguucaagacuaggaaauuu

SEQ ID NO: 505124 - RNA, 22 nt, Human
uggcccugacacgugguacugg

SEQ ID NO: 505125 - RNA, 22 nt, Human
uuaaagcugagcccucagaagc

SEQ ID NO: 505126 - RNA, 22 nt, Human
aaguucaaggcucuagaguucc

SEQ ID NO: 505127 - RNA, 19 nt, Human
uucacaauuaugaaauuag

SEQ ID NO: 505128 - RNA, 22 nt, Human
uauuuagaaugcguguacgugu

SEQ ID NO: 505129 - RNA, 22 nt, Human
ggaugaggaagauuacugagaa

SEQ ID NO: 505130 - RNA, 22 nt, Human
aaagaucaauagauaaagcuac

SEQ ID NO: 505131 - RNA, 22 nt, Human
auuguacuuuuauuacauguag

SEQ ID NO: 505132 - RNA, 22 nt, Human
ggcuccacccugcuuccagaag

SEQ ID NO: 505133 - RNA, 22 nt, Human
acugcagccuugaacucugggc

SEQ ID NO: 505134 - RNA, 22 nt, Human
cagguccugccuugguuacccu

SEQ ID NO: 505135 - RNA, 22 nt, Human
cacagugucugugcuucagugu

SEQ ID NO: 505136 - RNA, 22 nt, Human
gagcagcuccagccgcaugacu

SEQ ID NO: 505137 - RNA, 22 nt, Human
aagagcuguaugccauaugauu

SEQ ID NO: 505138 - RNA, 22 nt, Human
ccauaagguugaaaacuguaca

SEQ ID NO: 505139 - RNA, 22 nt, Human
gcugccuguggcccuucugggu

SEQ ID NO: 505140 - RNA, 22 nt, Human
cacagaguggaggcuuggccug

SEQ ID NO: 505141 - RNA, 22 nt, Human
aggaaacuccccuacaucucaa

SEQ ID NO: 505142 - RNA, 20 nt, Human
agugaguuaucagcuacagu

SEQ ID NO: 505143 - RNA, 22 nt, Human
agaggcuguuacacucccagau

SEQ ID NO: 505144 - RNA, 22 nt, Human
aucuucucauguguaaugaggu

SEQ ID NO: 505145 - RNA, 22 nt, Human
uccaguccagggaauggcugau

SEQ ID NO: 505146 - RNA, 22 nt, Human
uuuuccuauaugcaaagaaugc

SEQ ID NO: 505147 - RNA, 22 nt, Human
auguuucugaaguuuacagaua

SEQ ID NO: 505148 - RNA, 22 nt, Human
ucaggccacuucacaggugauu

SEQ ID NO: 505149 - RNA, 22 nt, Human
ucugggcugugguuccacuccg

SEQ ID NO: 505150 - RNA, 21 nt, Human
gccuggcuucacaggcacuga

SEQ ID NO: 505151 - RNA, 22 nt, Human
uuucaggagagaccagaaauga

SEQ ID NO: 505152 - RNA, 22 nt, Human
ggcugugccucaaggcuacuca

SEQ ID NO: 505153 - RNA, 22 nt, Human
caaagugccuguaccacuuugc

SEQ ID NO: 505154 - RNA, 22 nt, Human
cuggagucuccccaggagcgug

SEQ ID NO: 505155 - RNA, 22 nt, Human
acuaggaaguggcaaaacugga

SEQ ID NO: 505156 - RNA, 22 nt, Human
ggcuauauccucacaagaugga

SEQ ID NO: 505157 - RNA, 22 nt, Human
gcauuccuacaggcugcuauga

SEQ ID NO: 505158 - RNA, 23 nt, Human
cuguuaaauuccuuaagagcagg

SEQ ID NO: 505159 - RNA, 22 nt, Human
uuccuguaguugugcaauguac

SEQ ID NO: 505160 - RNA, 22 nt, Human
acagcuguauccccagagcuca

SEQ ID NO: 505161 - RNA, 22 nt, Human
cugagggcccugaagcuuggca

SEQ ID NO: 505162 - RNA, 22 nt, Human
auggccacauuuaguaacuggu

SEQ ID NO: 505163 - RNA, 22 nt, Human
ucuguucaguuguaccuucccc

SEQ ID NO: 505164 - RNA, 22 nt, Human
acaucucagaacugaguaaccg

SEQ ID NO: 505165 - RNA, 22 nt, Human
ucuggaggcucugagggugagu

SEQ ID NO: 505166 - RNA, 22 nt, Human
gaaaguaugccaucuaccucuu

SEQ ID NO: 505167 - RNA, 22 nt, Human
uucuguuuuagaaauaaguagu

SEQ ID NO: 505168 - RNA, 22 nt, Human
ccacagggucagccacucugca

SEQ ID NO: 505169 - RNA, 22 nt, Human
guaucuuuuacaccaggaaauu

SEQ ID NO: 505170 - RNA, 22 nt, Human
cugcacagccugucugggggcc

SEQ ID NO: 505171 - RNA, 22 nt, Human
cagaauuuagcacaauguaugg

SEQ ID NO: 505172 - RNA, 20 nt, Human
acaauauguagaugaauagc

SEQ ID NO: 505173 - RNA, 22 nt, Human
ucaguccucucuggguuucuua

SEQ ID NO: 505174 - RNA, 22 nt, Human
uagccgggugugguggaacucc

SEQ ID NO: 505175 - RNA, 22 nt, Human
agagucagcuuaugacacaguc

SEQ ID NO: 505176 - RNA, 22 nt, Human
ccaccagcagugugcaaggauu

SEQ ID NO: 505177 - RNA, 22 nt, Human
auuguguaauuuucagcucaua

SEQ ID NO: 505178 - RNA, 20 nt, Human
gcugggcuuugacugacaca

SEQ ID NO: 505179 - RNA, 22 nt, Human
ucacagaagaugcuggauguug

SEQ ID NO: 505180 - RNA, 21 nt, Human
augacagaugcugcagaucgu

SEQ ID NO: 505181 - RNA, 20 nt, Human
cuccaguguucaggggagug

SEQ ID NO: 505182 - RNA, 20 nt, Human
uagauuucauacuucucuuu

SEQ ID NO: 505183 - RNA, 22 nt, Human
gccagcuggcugcaggucccag

SEQ ID NO: 505184 - RNA, 22 nt, Human
uagucacaugaucacaggaucg

SEQ ID NO: 505185 - RNA, 22 nt, Human
uccucagucacgguagcacauu

SEQ ID NO: 505186 - RNA, 22 nt, Human
auacaguauaacuaauaaaccc

SEQ ID NO: 505187 - RNA, 22 nt, Human
ccagcagagggucuuggccauu

SEQ ID NO: 505188 - RNA, 22 nt, Human
aguccugaugcucuggcaggag

SEQ ID NO: 505189 - RNA, 19 nt, Human
uagauaaggcauuuaaucu

SEQ ID NO: 505190 - RNA, 22 nt, Human
gaggaggcugaacaaugcccug

SEQ ID NO: 505191 - RNA, 22 nt, Human
agcaguaagcaacugagcuugc

SEQ ID NO: 505192 - RNA, 21 nt, Human
auucagaaagggaauaaacuc

SEQ ID NO: 505193 - RNA, 22 nt, Human
acugggccagacacugauuccc

SEQ ID NO: 505194 - RNA, 22 nt, Human
augaguucaauuguuucaguca

SEQ ID NO: 505195 - RNA, 22 nt, Human
ucagcuuucucuucuaucgaua

SEQ ID NO: 505196 - RNA, 22 nt, Human
gggucugccugcugugaaguca

SEQ ID NO: 505197 - RNA, 22 nt, Human
uccuuagcccacuaauacuuau

SEQ ID NO: 505198 - RNA, 22 nt, Human
uaaaucaagaauaucagcuugu

SEQ ID NO: 505199 - RNA, 22 nt, Human
gcugucuugaugauuggaugcu

SEQ ID NO: 505200 - RNA, 22 nt, Human
ugaaaguugcacauaagagaau

SEQ ID NO: 505201 - RNA, 22 nt, Human
gaacaauagugguaacaaagcc

SEQ ID NO: 505202 - RNA, 22 nt, Human
cuccagugagugagcaggcgac

SEQ ID NO: 505203 - RNA, 22 nt, Human
uucuuuguggcagugagcuggg

SEQ ID NO: 505204 - RNA, 22 nt, Human
cauuaucugccauugacaccau

SEQ ID NO: 505205 - RNA, 22 nt, Human
aauaaagacaaacaggggagcc

SEQ ID NO: 505206 - RNA, 22 nt, Human
ccagcccaaacaagccgccuuc

SEQ ID NO: 505207 - RNA, 22 nt, Human
ggcagugguuagaaacaugagc

SEQ ID NO: 505208 - RNA, 22 nt, Human
agcugccucagcaacacagacc

SEQ ID NO: 505209 - RNA, 22 nt, Human
cugaucuuaaguaacauuauuu

SEQ ID NO: 505210 - RNA, 22 nt, Human
uucauuaguucugaagaugucu

SEQ ID NO: 505211 - RNA, 22 nt, Human
gcucugcucuugacuuaccagg

SEQ ID NO: 505212 - RNA, 22 nt, Human
uuucucaguucucugcaaggag

SEQ ID NO: 505213 - RNA, 20 nt, Human
agaagcugauacugauggaa

SEQ ID NO: 505214 - RNA, 22 nt, Human
ucugaauguaucgaauugaggc

SEQ ID NO: 505215 - RNA, 22 nt, Human
cagggccagagagggcuggcug

SEQ ID NO: 505216 - RNA, 22 nt, Human
ccucucucuccugcacacacac

SEQ ID NO: 505217 - RNA, 22 nt, Human
guccagagauggacgagcagau

SEQ ID NO: 505218 - RNA, 22 nt, Human
cuacuucuaaguacauggugau

SEQ ID NO: 505219 - RNA, 22 nt, Human
cccuuagcucacaagcuaaagc

SEQ ID NO: 505220 - RNA, 22 nt, Human
ccagcuggagcucgcagauagg

SEQ ID NO: 505221 - RNA, 22 nt, Human
cucugcagauucaucccuucac

SEQ ID NO: 505222 - RNA, 22 nt, Human
gauuagaugacuaaugagcugu

SEQ ID NO: 505223 - RNA, 22 nt, Human
ugagaggccccagcucuuggcc

SEQ ID NO: 505224 - RNA, 22 nt, Human
uauaaagaaggcacagcaagac

SEQ ID NO: 505225 - RNA, 22 nt, Human
gccuggcuuggggcucaguggu

SEQ ID NO: 505226 - RNA, 22 nt, Human
gaguuuguaaacuauucacuaa

SEQ ID NO: 505227 - RNA, 22 nt, Human
ccuauugacaauucucuucucc

SEQ ID NO: 505228 - RNA, 22 nt, Human
ggccugggcccacugucaagag

SEQ ID NO: 505229 - RNA, 21 nt, Human
aggcccagcuuuccucuugcu

SEQ ID NO: 505230 - RNA, 22 nt, Human
cagauguaauuacucaagucaa

SEQ ID NO: 505231 - RNA, 22 nt, Human
ucacauguuaggucgggcaagg

SEQ ID NO: 505232 - RNA, 22 nt, Human
agauuucaaugugagcauuagu

SEQ ID NO: 505233 - RNA, 22 nt, Human
agcagcauauugugucuucaua

SEQ ID NO: 505234 - RNA, 22 nt, Human
cuucccagaccuuagagugcag

SEQ ID NO: 505235 - RNA, 22 nt, Human
cuuaaacugggcauucagagaa

SEQ ID NO: 505236 - RNA, 22 nt, Human
uacagcuuuucauauuuguguu

SEQ ID NO: 505237 - RNA, 22 nt, Human
uuccuguccgcaauggccuggg

SEQ ID NO: 505238 - RNA, 22 nt, Human
gcuggcucugcacccaggccuc

SEQ ID NO: 505239 - RNA, 18 nt, Human
acaguaaagaaaggaauu

SEQ ID NO: 505240 - RNA, 22 nt, Human
agggacccauagagagaccagu

SEQ ID NO: 505241 - RNA, 22 nt, Human
auuuaucaccaguuagcugacu

SEQ ID NO: 505242 - RNA, 19 nt, Human
auuuacugccuaaaaucuc

SEQ ID NO: 505243 - RNA, 16 nt, Human
gggggugagagagagu

SEQ ID NO: 505244 - RNA, 22 nt, Human
agcaggcuuuccacagaaggag

SEQ ID NO: 505245 - RNA, 20 nt, Human
ucaggaugugcugagugaag

SEQ ID NO: 505246 - RNA, 22 nt, Human
cugagaaggaagccuccacucu

SEQ ID NO: 505247 - RNA, 22 nt, Human
aaaaaugugaccacaggguguu

SEQ ID NO: 505248 - RNA, 22 nt, Human
gcaaagcauucuguggagucua

SEQ ID NO: 505249 - RNA, 22 nt, Human
gagaaguuucugguuugcauag

SEQ ID NO: 505250 - RNA, 22 nt, Human
uugucugagaaagugaguugcu

SEQ ID NO: 505251 - RNA, 22 nt, Human
agcucagggcgaucugucucgg

SEQ ID NO: 505252 - RNA, 22 nt, Human
caggcugggcuccggagauaaa

SEQ ID NO: 505253 - RNA, 22 nt, Human
uaaauuagagccagguaaguuu

SEQ ID NO: 505254 - RNA, 22 nt, Human
caggccagugugcuucccaggc

SEQ ID NO: 505255 - RNA, 22 nt, Human
uggaggcaccacuggcugcccg

SEQ ID NO: 505256 - RNA, 22 nt, Human
auuagggcuggaugcaaggaaa

SEQ ID NO: 505257 - RNA, 23 nt, Human
ucuggcuccauccuuggggaucc

SEQ ID NO: 505258 - RNA, 22 nt, Human
acucuggguucuuucacuugac

SEQ ID NO: 505259 - RNA, 22 nt, Human
ccuuugugaauaugcagaaaau

SEQ ID NO: 505260 - RNA, 22 nt, Human
uuagugucuucuucauccucug

SEQ ID NO: 505261 - RNA, 22 nt, Human
caguuuauaugucagagcugua

SEQ ID NO: 505262 - RNA, 22 nt, Human
aaauguguuccuuugcuacaga

SEQ ID NO: 505263 - RNA, 22 nt, Human
ugcagccaucuuucuuggagga

SEQ ID NO: 505264 - RNA, 22 nt, Human
ucauaaaaugcuccugauauug

SEQ ID NO: 505265 - RNA, 20 nt, Human
aucccuggccuuaaggagug

SEQ ID NO: 505266 - RNA, 22 nt, Human
ucaggcacuggcugagugaugg

SEQ ID NO: 505267 - RNA, 22 nt, Human
ugcaggugccaucgcugcucau

SEQ ID NO: 505268 - RNA, 22 nt, Human
ucaggggacuuaggagagaagu

SEQ ID NO: 505269 - RNA, 20 nt, Human
cagaaagaagguagauuuuu

SEQ ID NO: 505270 - RNA, 22 nt, Human
gcagccuguuguaccagccugu

SEQ ID NO: 505271 - RNA, 22 nt, Human
ugccaccuaguggucuuuaguc

SEQ ID NO: 505272 - RNA, 22 nt, Human
uuuaauuugaaaugaguaaccc

SEQ ID NO: 505273 - RNA, 22 nt, Human
cuggcucuucagugcuugguuc

SEQ ID NO: 505274 - RNA, 22 nt, Human
uauggaaaguguuuucuucugu

SEQ ID NO: 505275 - RNA, 22 nt, Human
uggcaugaagucagcagcuggg

SEQ ID NO: 505276 - RNA, 22 nt, Human
gcugccuguccugaggaguccg

SEQ ID NO: 505277 - RNA, 22 nt, Human
aacagcuuagaaauguugcuaa

SEQ ID NO: 505278 - RNA, 22 nt, Human
ggcucagagaccugcgaucuga

SEQ ID NO: 505279 - RNA, 20 nt, Human
cguaaggcaagugcugcauc

SEQ ID NO: 505280 - RNA, 21 nt, Human
gccugggaaaucugggaagcc

SEQ ID NO: 505281 - RNA, 22 nt, Human
uacacagaaccugguguacagu

SEQ ID NO: 505282 - RNA, 22 nt, Human
cagcaaaguaagcugacaugua

SEQ ID NO: 505283 - RNA, 22 nt, Human
ucuggcucugaauucacuucug

SEQ ID NO: 505284 - RNA, 22 nt, Human
uucugggcuuggcuguuuccau

SEQ ID NO: 505285 - RNA, 22 nt, Human
ggcagaggaggggugaauuugc

SEQ ID NO: 505286 - RNA, 22 nt, Human
cugauuaacugaacugaauuua

SEQ ID NO: 505287 - RNA, 22 nt, Human
aggggagcgacauuccgugccg

SEQ ID NO: 505288 - RNA, 18 nt, Human
cccagcccaccauuucuc

SEQ ID NO: 505289 - RNA, 20 nt, Human
cugcucugcuuugcaggugg

SEQ ID NO: 505290 - RNA, 22 nt, Human
ggaggccagggacccagucagc

SEQ ID NO: 505291 - RNA, 22 nt, Human
aaacugaaacaucaucauguug

SEQ ID NO: 505292 - RNA, 22 nt, Human
aacagccacugauacugaauag

SEQ ID NO: 505293 - RNA, 19 nt, Human
uccuuugaauaucaguuga

SEQ ID NO: 505294 - RNA, 22 nt, Human
augaaugcugggacaaauauau

SEQ ID NO: 505295 - RNA, 22 nt, Human
ggaaucuuaauggcauggaguu

SEQ ID NO: 505296 - RNA, 22 nt, Human
uaauccaaaacugaaucugugg

SEQ ID NO: 505297 - RNA, 22 nt, Human
ugcaggcugaggcuggcucaac

SEQ ID NO: 505298 - RNA, 22 nt, Human
uauagcauauacagauaagcug

SEQ ID NO: 505299 - RNA, 22 nt, Human
guaaaucccauccuuucucugg

SEQ ID NO: 505300 - RNA, 23 nt, Human
gcagagcugcccuauugccuugg

SEQ ID NO: 505301 - RNA, 22 nt, Human
cugucagcuucuccuggccaga

SEQ ID NO: 505302 - RNA, 22 nt, Human
uccugcgguucaugcucauucu

SEQ ID NO: 505303 - RNA, 22 nt, Human
ucucagggccccaaaggcuagu

SEQ ID NO: 505304 - RNA, 20 nt, Human
aggaacuggaagggaggaaa

SEQ ID NO: 505305 - RNA, 22 nt, Human
cagcuugcaguacuuguuuuug

SEQ ID NO: 505306 - RNA, 22 nt, Human
uuucuagaaacauuaucucuau

SEQ ID NO: 505307 - RNA, 22 nt, Human
agguccugacgcccuuugaaau

SEQ ID NO: 505308 - RNA, 22 nt, Human
gcacagagccugguaccgagaa

SEQ ID NO: 505309 - RNA, 22 nt, Human
ucucaggggauucacuggcacc

SEQ ID NO: 505310 - RNA, 22 nt, Human
aggaggccgauuucagaggucg

SEQ ID NO: 505311 - RNA, 22 nt, Human
auaaaguuuaaaagucaauagu

SEQ ID NO: 505312 - RNA, 19 nt, Human
acccagagcccuuugcagg

SEQ ID NO: 505313 - RNA, 22 nt, Human
uggaggcauaggccugggcccu

SEQ ID NO: 505314 - RNA, 22 nt, Human
agaauaguggcaaugacugcac

SEQ ID NO: 505315 - RNA, 21 nt, Human
aacauuucaggauccaaauug

SEQ ID NO: 505316 - RNA, 22 nt, Human
cagggcauuacuucagguccuu

SEQ ID NO: 505317 - RNA, 22 nt, Human
aggaauugagauccuagguuuu

SEQ ID NO: 505318 - RNA, 22 nt, Human
ugcaggcugccuucacagagcc

SEQ ID NO: 505319 - RNA, 22 nt, Human
gucucuggguuaagcagugcau

SEQ ID NO: 505320 - RNA, 22 nt, Human
uggugcugauaauggcaggauu

SEQ ID NO: 505321 - RNA, 17 nt, Human
uggagcugcguguguuc

SEQ ID NO: 505322 - RNA, 22 nt, Human
gacacagaauuuacucccgaua

SEQ ID NO: 505323 - RNA, 22 nt, Human
ucaggcugccuaucagacugug

SEQ ID NO: 505324 - RNA, 22 nt, Human
caggucucggguucagcaguga

SEQ ID NO: 505325 - RNA, 22 nt, Human
uccagggccaugaaguugcaca

SEQ ID NO: 505326 - RNA, 22 nt, Human
ccaggucuggcacuggccaguc

SEQ ID NO: 505327 - RNA, 22 nt, Human
gccucucucuacccaguaugau

SEQ ID NO: 505328 - RNA, 22 nt, Human
cauggcagaaaccugagcugcu

SEQ ID NO: 505329 - RNA, 22 nt, Human
auugaagaaacccaaauaaugg

SEQ ID NO: 505330 - RNA, 23 nt, Human
uggaagcagaaguuucaauaucc

SEQ ID NO: 505331 - RNA, 22 nt, Human
uguccacuuugucagugucaua

SEQ ID NO: 505332 - RNA, 22 nt, Human
cagcuccagcucugggcgccuc

SEQ ID NO: 505333 - RNA, 22 nt, Human
cugaaugacugaagucacaauu

SEQ ID NO: 505334 - RNA, 22 nt, Human
aagggcucuucuauuuauggcc

SEQ ID NO: 505335 - RNA, 20 nt, Human
aguggcugauggaaagaagc

SEQ ID NO: 505336 - RNA, 22 nt, Human
gagagcugcagccgagaggggg

SEQ ID NO: 505337 - RNA, 22 nt, Human
ccagagguccugcucacuggug

SEQ ID NO: 505338 - RNA, 22 nt, Human
uccuucuuucccccuagucauu

SEQ ID NO: 505339 - RNA, 19 nt, Human
ucuggagcugaugcaggug

SEQ ID NO: 505340 - RNA, 23 nt, Human
ucugugccaguuuccaugucugu

SEQ ID NO: 505341 - RNA, 22 nt, Human
agagcuggcugugggugacuuu

SEQ ID NO: 505342 - RNA, 22 nt, Human
uggcuggcuuguucacugacug

SEQ ID NO: 505343 - RNA, 22 nt, Human
acaguguucugaaaguugaggg

SEQ ID NO: 505344 - RNA, 22 nt, Human
uccauauuaacuaaaacuagaa

SEQ ID NO: 505345 - RNA, 22 nt, Human
ggugacugguuuaucuggcagu

SEQ ID NO: 505346 - RNA, 22 nt, Human
uguggccuugcagccuggaggu

SEQ ID NO: 505347 - RNA, 22 nt, Human
gcaaagcacacuggagaugucg

SEQ ID NO: 505348 - RNA, 22 nt, Human
cagggcucaggcucugggauuc

SEQ ID NO: 505349 - RNA, 22 nt, Human
cagagguacagccauugaagau

SEQ ID NO: 505350 - RNA, 22 nt, Human
gaugaggcaagccagaggacug

SEQ ID NO: 505351 - RNA, 22 nt, Human
uccugggacucaacuuagaagg

SEQ ID NO: 505352 - RNA, 22 nt, Human
ccaggguguagggauuccagau

SEQ ID NO: 505353 - RNA, 22 nt, Human
cuggguggcgucuggggccagu

SEQ ID NO: 505354 - RNA, 22 nt, Human
ccuguacauuagcugugaauug

SEQ ID NO: 505355 - RNA, 22 nt, Human
gcaggaaagguugagacuuugc

SEQ ID NO: 505356 - RNA, 22 nt, Human
cagagagcuuagugugcugcau

SEQ ID NO: 505357 - RNA, 22 nt, Human
cagggccagccgcagcauccac

SEQ ID NO: 505358 - RNA, 22 nt, Human
caucuuaaauuaaagcuuaagg

SEQ ID NO: 505359 - RNA, 22 nt, Human
uaaagcaaggaauagaguaguc

SEQ ID NO: 505360 - RNA, 19 nt, Human
gggguggcuggggcuccag

SEQ ID NO: 505361 - RNA, 22 nt, Human
uuuuccucuguuauuaguguga

SEQ ID NO: 505362 - RNA, 22 nt, Human
cucagggaggcccugggacccu

SEQ ID NO: 505363 - RNA, 22 nt, Human
auggagacgcaagggaccuagg

SEQ ID NO: 505364 - RNA, 21 nt, Human
agaagccaugccaguaaaauu

SEQ ID NO: 505365 - RNA, 22 nt, Human
uagggucccagauaggagccag

SEQ ID NO: 505366 - RNA, 22 nt, Human
ucauguuuuugccauaugacuc

SEQ ID NO: 505367 - RNA, 22 nt, Human
uguuccuggggaccugccuucc

SEQ ID NO: 505368 - RNA, 22 nt, Human
uuccggaagguucucuagaauu

SEQ ID NO: 505369 - RNA, 22 nt, Human
uucaggagcuggcugcgaagga

SEQ ID NO: 505370 - RNA, 20 nt, Human
ccagagcagccacugaaguu

SEQ ID NO: 505371 - RNA, 22 nt, Human
acagguguagcaggagcaucaa

SEQ ID NO: 505372 - RNA, 20 nt, Human
ggccucaguguccuuguuug

SEQ ID NO: 505373 - RNA, 22 nt, Human
gaggaggaaaggaguugaaaug

SEQ ID NO: 505374 - RNA, 22 nt, Human
ugcccagcugucaaaguagaua

SEQ ID NO: 505375 - RNA, 21 nt, Human
aaggaaaagcuuggucucuga

SEQ ID NO: 505376 - RNA, 22 nt, Human
ugaggccagccacagccacccu

SEQ ID NO: 505377 - RNA, 22 nt, Human
uggcucugcugaaccuagugca

SEQ ID NO: 505378 - RNA, 22 nt, Human
aucaaguuuucuuaguugacug

SEQ ID NO: 505379 - RNA, 22 nt, Human
aaagagccagcuaccucaguuu

SEQ ID NO: 505380 - RNA, 22 nt, Human
agugcaggagccuggccagagc

SEQ ID NO: 505381 - RNA, 22 nt, Human
accucuuaauauugcaccuucu

SEQ ID NO: 505382 - RNA, 22 nt, Human
uaugcacacaucgcagcaggaa

SEQ ID NO: 505383 - RNA, 22 nt, Human
uggcuuccaguaaucaggauuu

SEQ ID NO: 505384 - RNA, 22 nt, Human
caggaaauguauaauuuuauaa

SEQ ID NO: 505385 - RNA, 22 nt, Human
cuggagccuagguugaccuggg

SEQ ID NO: 505386 - RNA, 22 nt, Human
cccauucauccucgcuuccuuc

SEQ ID NO: 505387 - RNA, 22 nt, Human
agacaucaaugaucagagguag

SEQ ID NO: 505388 - RNA, 22 nt, Human
uaugauaugcacuuuaucagaa

SEQ ID NO: 505389 - RNA, 22 nt, Human
acacagggauauuucagguggu

SEQ ID NO: 505390 - RNA, 22 nt, Human
uguccuggacaacagccccuag

SEQ ID NO: 505391 - RNA, 22 nt, Human
agcagagcuauucuugugcaau

SEQ ID NO: 505392 - RNA, 22 nt, Human
aucauucaaaugauuuggaggu

SEQ ID NO: 505393 - RNA, 22 nt, Human
ugagcugggaagagcagccaga

SEQ ID NO: 505394 - RNA, 23 nt, Human
uccaggcacgcauuucuucuagc

SEQ ID NO: 505395 - RNA, 22 nt, Human
aaaaaucuaugacugcuucucc

SEQ ID NO: 505396 - RNA, 22 nt, Human
acucacagucccuguaggagug

SEQ ID NO: 505397 - RNA, 22 nt, Human
cagcucccgccaucgggaggca

SEQ ID NO: 505398 - RNA, 22 nt, Human
agaggcaggagguugacuugag

SEQ ID NO: 505399 - RNA, 22 nt, Human
ccucagcugcuucccuggagcc

SEQ ID NO: 505400 - RNA, 22 nt, Human
aacagcauauuucauauauuga

SEQ ID NO: 505401 - RNA, 22 nt, Human
ucacagaaagcuguguccugac

SEQ ID NO: 505402 - RNA, 22 nt, Human
ccuuuguggggcgguggguaau

SEQ ID NO: 505403 - RNA, 18 nt, Human
cuggagucacagugggga

SEQ ID NO: 505404 - RNA, 22 nt, Human
auuucaguguugguuagcaagc

SEQ ID NO: 505405 - RNA, 22 nt, Human
ucaggaugagcucauaacuaug

SEQ ID NO: 505406 - RNA, 22 nt, Human
aagagagagcauucuucuguua

SEQ ID NO: 505407 - RNA, 19 nt, Human
gggcucuggccucaguggg

SEQ ID NO: 505408 - RNA, 22 nt, Human
aauuucuugggagcucagagaa

SEQ ID NO: 505409 - RNA, 22 nt, Human
caaaugauagagccgauuauca

SEQ ID NO: 505410 - RNA, 22 nt, Human
uaccuuggguugaguucauucu

SEQ ID NO: 505411 - RNA, 22 nt, Human
uauuuguugaguuguuaugucu

SEQ ID NO: 505412 - RNA, 22 nt, Human
ccugggagcuguggaaaggcug

SEQ ID NO: 505413 - RNA, 22 nt, Human
aauagcauccuaaaacauacuu

SEQ ID NO: 505414 - RNA, 22 nt, Human
acugggcuguuuuuugagugga

SEQ ID NO: 505415 - RNA, 22 nt, Human
augcuauacucaaagaaauuca

SEQ ID NO: 505416 - RNA, 22 nt, Human
agccugguuuaagcauuuuaua

SEQ ID NO: 505417 - RNA, 22 nt, Human
ccagccaggcuggcuguggagg

SEQ ID NO: 505418 - RNA, 22 nt, Human
gugauuucuaaucaucugaaug

SEQ ID NO: 505419 - RNA, 22 nt, Human
ggcuucccuuuccgagaggaga

SEQ ID NO: 505420 - RNA, 22 nt, Human
gggccaugagagguucaucaac

SEQ ID NO: 505421 - RNA, 20 nt, Human
ucugaggcugagcucuacuu

SEQ ID NO: 505422 - RNA, 22 nt, Human
acaggucuggucugggugggac

SEQ ID NO: 505423 - RNA, 22 nt, Human
ucucugggaauuuuuuggacau

SEQ ID NO: 505424 - RNA, 22 nt, Human
ugaaagguuauuuaggucugcu

SEQ ID NO: 505425 - RNA, 22 nt, Human
aaaguuuuuaagcaagacccuu

SEQ ID NO: 505426 - RNA, 22 nt, Human
uaaguuucuccaaagcacagaa

SEQ ID NO: 505427 - RNA, 22 nt, Human
ggagccuggcccggcccuuggc

SEQ ID NO: 505428 - RNA, 22 nt, Human
ggccucagugggccgcugcagg

SEQ ID NO: 505429 - RNA, 22 nt, Human
cugugcuucagagucagugcug

SEQ ID NO: 505430 - RNA, 22 nt, Human
gaccauuugcuaguaaauugca

SEQ ID NO: 505431 - RNA, 22 nt, Human
cccagguggguuggccucuguc

SEQ ID NO: 505432 - RNA, 23 nt, Human
guuaauaaugaacacuuucuccc

SEQ ID NO: 505433 - RNA, 22 nt, Human
acauacuuuuuaaaagauugcu

SEQ ID NO: 505434 - RNA, 22 nt, Human
aggccucacauugggcuucaag

SEQ ID NO: 505435 - RNA, 22 nt, Human
cagggccuucguaaguguccgg

SEQ ID NO: 505436 - RNA, 22 nt, Human
gggugacauuucccaaugagcc

SEQ ID NO: 505437 - RNA, 22 nt, Human
aaguucaauggaaaagcuuuag

SEQ ID NO: 505438 - RNA, 22 nt, Human
uugccaggcuuguuucuaggcu

SEQ ID NO: 505439 - RNA, 21 nt, Human
cccugguuccacugucaccgc

SEQ ID NO: 505440 - RNA, 22 nt, Human
guuuuauaauugcuucauaaga

SEQ ID NO: 505441 - RNA, 22 nt, Human
ggaccaugaggagaugggccuc

SEQ ID NO: 505442 - RNA, 22 nt, Human
cagucaccuugaggacucagac

SEQ ID NO: 505443 - RNA, 19 nt, Human
ucuuuagccagagcucugg

SEQ ID NO: 505444 - RNA, 22 nt, Human
gccagcagggcccaaaugcugg

SEQ ID NO: 505445 - RNA, 22 nt, Human
uccugggccuguacuccauccg

SEQ ID NO: 505446 - RNA, 22 nt, Human
ccuggcuggcaagaucgugaag

SEQ ID NO: 505447 - RNA, 22 nt, Human
cagagccaugguaugggcuugu

SEQ ID NO: 505448 - RNA, 22 nt, Human
ugggcugcuguuacaggggcug

SEQ ID NO: 505449 - RNA, 22 nt, Human
cagauccuuaggacaaccaucc

SEQ ID NO: 505450 - RNA, 22 nt, Human
ucaaaguagggguaagccaggc

SEQ ID NO: 505451 - RNA, 23 nt, Human
uggagggcagaauaacagacuac

SEQ ID NO: 505452 - RNA, 22 nt, Human
cccuggaagguucucuggcuca

SEQ ID NO: 505453 - RNA, 22 nt, Human
agggagaagguuuagcugugag

SEQ ID NO: 505454 - RNA, 18 nt, Human
cugggccagaguuucugc

SEQ ID NO: 505455 - RNA, 22 nt, Human
gcugucuggaggcucugaggga

SEQ ID NO: 505456 - RNA, 22 nt, Human
aguccaguguguucuggcagca

SEQ ID NO: 505457 - RNA, 22 nt, Human
acacacaaaucuauuagugaau

SEQ ID NO: 505458 - RNA, 22 nt, Human
cacaggguuguucugaggauuc

SEQ ID NO: 505459 - RNA, 22 nt, Human
agguuccucuuccucuggccug

SEQ ID NO: 505460 - RNA, 22 nt, Human
gcugagagcaaggacaaagcau

SEQ ID NO: 505461 - RNA, 20 nt, Human
gauuucaaagcagaguggcc

SEQ ID NO: 505462 - RNA, 22 nt, Human
auggggagagaagggcugagcu

SEQ ID NO: 505463 - RNA, 22 nt, Human
uccagcagggaauuaguagucu

SEQ ID NO: 505464 - RNA, 22 nt, Human
uuuugugagcugagaaauguau

SEQ ID NO: 505465 - RNA, 22 nt, Human
ucaucugucccaggcuuuuuuc

SEQ ID NO: 505466 - RNA, 22 nt, Human
ucucacagcaucauugcucaug

SEQ ID NO: 505467 - RNA, 22 nt, Human
uucagagacagcaaccaggaca

SEQ ID NO: 505468 - RNA, 22 nt, Human
aagcuguuguucauccugaauu

SEQ ID NO: 505469 - RNA, 22 nt, Human
gagcacagaaucuucccaugca

SEQ ID NO: 505470 - RNA, 22 nt, Human
ggcacaagguuuaaauaacauc

SEQ ID NO: 505471 - RNA, 22 nt, Human
gauuuccuugcauauugguaau

SEQ ID NO: 505472 - RNA, 22 nt, Human
gggugggccacugagcagcgug

SEQ ID NO: 505473 - RNA, 22 nt, Human
aaagugccacaacuggacaacc

SEQ ID NO: 505474 - RNA, 22 nt, Human
gagccaggcccguacuugcugu

SEQ ID NO: 505475 - RNA, 22 nt, Human
uugugaauggugccgcaauaaa

SEQ ID NO: 505476 - RNA, 22 nt, Human
aggggcuuauguuucuccaggc

SEQ ID NO: 505477 - RNA, 23 nt, Human
uggcucuguggaucccucaggag

SEQ ID NO: 505478 - RNA, 22 nt, Human
aaugucaauuaccagaacagaa

SEQ ID NO: 505479 - RNA, 21 nt, Human
ggcuccugcuuugugaggggc

SEQ ID NO: 505480 - RNA, 22 nt, Human
caaaugcauaguuuauaagaag

SEQ ID NO: 505481 - RNA, 21 nt, Human
gcagaugggaagagacgaggc

SEQ ID NO: 505482 - RNA, 22 nt, Human
gcgagccucuggaguccucugg

SEQ ID NO: 505483 - RNA, 23 nt, Human
ggcagagagcauggcuggggccc

SEQ ID NO: 505484 - RNA, 22 nt, Human
agaaacauuuagauuauauguc

SEQ ID NO: 505485 - RNA, 22 nt, Human
ugugcaaaauaauaaaucacug

SEQ ID NO: 505486 - RNA, 22 nt, Human
cagggacccuacuagcucacac

SEQ ID NO: 505487 - RNA, 22 nt, Human
aaggcacugcuuugcugcgccc

SEQ ID NO: 505488 - RNA, 21 nt, Human
ugguuugcggccaaaguuaaa

SEQ ID NO: 505489 - RNA, 22 nt, Human
ucagcacugauagaagucaaua

SEQ ID NO: 505490 - RNA, 23 nt, Human
ggcugagacuacaggcgcuugcc

SEQ ID NO: 505491 - RNA, 22 nt, Human
uauuucuaagagauaucuguac

SEQ ID NO: 505492 - RNA, 22 nt, Human
caggcagcaggagcccugcucg

SEQ ID NO: 505493 - RNA, 22 nt, Human
ggcagggagagcaugcugauaa

SEQ ID NO: 505494 - RNA, 22 nt, Human
uguuuucucuugaaaagcaguc

SEQ ID NO: 505495 - RNA, 22 nt, Human
cucagucugucuugucuguguu

SEQ ID NO: 505496 - RNA, 22 nt, Human
aucagagauggcuccagugcuc

SEQ ID NO: 505497 - RNA, 22 nt, Human
gcagcuuucugggacagaaagg

SEQ ID NO: 505498 - RNA, 22 nt, Human
aagauacugaugauguaggcua

SEQ ID NO: 505499 - RNA, 22 nt, Human
aggagcuggccuagaaaggaga

SEQ ID NO: 505500 - RNA, 22 nt, Human
ucauugaacgaagagcuccauu

SEQ ID NO: 505501 - RNA, 22 nt, Human
cuucugggagagcuuuugcuuc

SEQ ID NO: 505502 - RNA, 17 nt, Human
gcacugaacaauccugu

SEQ ID NO: 505503 - RNA, 19 nt, Human
cuuccuugcuccccaugug

SEQ ID NO: 505504 - RNA, 22 nt, Human
uuaaacaccugucuaguguagc

SEQ ID NO: 505505 - RNA, 22 nt, Human
cucuggcugucccgaugagcag

SEQ ID NO: 505506 - RNA, 22 nt, Human
gcuaggaguggugggucaagga

SEQ ID NO: 505507 - RNA, 22 nt, Human
cuauuagguaugugguugcuau

SEQ ID NO: 505508 - RNA, 22 nt, Human
gaggggcugcccuggugucagg

SEQ ID NO: 505509 - RNA, 22 nt, Human
ucagagugggagaaugugccaa

SEQ ID NO: 505510 - RNA, 22 nt, Human
gaggcaguaauugugggcaaua

SEQ ID NO: 505511 - RNA, 22 nt, Human
ccuuucucuuggauaccgauug

SEQ ID NO: 505512 - RNA, 22 nt, Human
augucuuuggcuuugacauggc

SEQ ID NO: 505513 - RNA, 22 nt, Human
gcaaagcagucuucugugccua

SEQ ID NO: 505514 - RNA, 22 nt, Human
aggcccagcccguccucgugcu

SEQ ID NO: 505515 - RNA, 23 nt, Human
ggucagugaguucguuucucugg

SEQ ID NO: 505516 - RNA, 22 nt, Human
auauuucuccaaauguuuucaa

SEQ ID NO: 505517 - RNA, 22 nt, Human
uuaacauuguccuuagcagauu

SEQ ID NO: 505518 - RNA, 22 nt, Human
ucuugaaggggggcaguguuga

SEQ ID NO: 505519 - RNA, 22 nt, Human
aagcacaaugaacaucuuagau

SEQ ID NO: 505520 - RNA, 22 nt, Human
gacagccucaugaggagcaaaa

SEQ ID NO: 505521 - RNA, 22 nt, Human
cuauauacuuuucacagauguu

SEQ ID NO: 505522 - RNA, 22 nt, Human
gccaggcagcugggagggugcc

SEQ ID NO: 505523 - RNA, 22 nt, Human
gcuguucacauuuugggccaaa

SEQ ID NO: 505524 - RNA, 22 nt, Human
ugcagcuucuuguccugugauu

SEQ ID NO: 505525 - RNA, 22 nt, Human
ugcacaggugguccaucugcac

SEQ ID NO: 505526 - RNA, 22 nt, Human
cagcuuuauuaaugauugucuu

SEQ ID NO: 505527 - RNA, 22 nt, Human
uuugcaaauaaauaagugcucg

SEQ ID NO: 505528 - RNA, 22 nt, Human
ucuuuguuauugcuuuaucuau

SEQ ID NO: 505529 - RNA, 22 nt, Human
uauuugaaaguguacaaaaacu

SEQ ID NO: 505530 - RNA, 21 nt, Human
aagaaguuuggauuuuguccu

SEQ ID NO: 505531 - RNA, 21 nt, Human
uucaucagccagaaaucaagc

SEQ ID NO: 505532 - RNA, 22 nt, Human
gccuggagugcaguggcgugau

SEQ ID NO: 505533 - RNA, 22 nt, Human
uuccuacaucaccagggggagu

SEQ ID NO: 505534 - RNA, 22 nt, Human
cacagggcaccaguuggccauc

SEQ ID NO: 505535 - RNA, 22 nt, Human
cagguccccuccccuaccaggc

SEQ ID NO: 505536 - RNA, 22 nt, Human
acaugauauuaaugucuuauuu

SEQ ID NO: 505537 - RNA, 22 nt, Human
gcuuccucgcugggcagaggca

SEQ ID NO: 505538 - RNA, 22 nt, Human
ugucccagcacuuugggagucu

SEQ ID NO: 505539 - RNA, 22 nt, Human
gcugccuuugugagccaagggg

SEQ ID NO: 505540 - RNA, 22 nt, Human
aauagguagccagauauauaaa

SEQ ID NO: 505541 - RNA, 22 nt, Human
cacagguauauguguauauacu

SEQ ID NO: 505542 - RNA, 22 nt, Human
uccaggaggguuuucugccuuc

SEQ ID NO: 505543 - RNA, 22 nt, Human
uuagaaaaaggcuguggucuua

SEQ ID NO: 505544 - RNA, 22 nt, Human
uguacagauugaucauggagag

SEQ ID NO: 505545 - RNA, 22 nt, Human
cucacugcccugaaguuggguu

SEQ ID NO: 505546 - RNA, 22 nt, Human
gcugaguguaaugauggcagag

SEQ ID NO: 505547 - RNA, 22 nt, Human
gaugccucuuuuggcugaauua

SEQ ID NO: 505548 - RNA, 22 nt, Human
augaaucaaaguucauuugauc

SEQ ID NO: 505549 - RNA, 22 nt, Human
cacuggggugggccugguagag

SEQ ID NO: 505550 - RNA, 23 nt, Human
uccuggcucugcacuugcuaaug

SEQ ID NO: 505551 - RNA, 22 nt, Human
ugcagggaaugcuugcagcaug

SEQ ID NO: 505552 - RNA, 22 nt, Human
aggggcugggacagagccaagc

SEQ ID NO: 505553 - RNA, 22 nt, Human
cuggugguucaggagaauggcu

SEQ ID NO: 505554 - RNA, 22 nt, Human
ugcuggugauuaaauccugaag

SEQ ID NO: 505555 - RNA, 22 nt, Human
caaagccucugauuucacuugu

SEQ ID NO: 505556 - RNA, 22 nt, Human
gacaggaagucugaaggaggga

SEQ ID NO: 505557 - RNA, 22 nt, Human
aaauuucaguuaccuuuacguu

SEQ ID NO: 505558 - RNA, 22 nt, Human
uuuccucugaugcugacuugga

SEQ ID NO: 505559 - RNA, 22 nt, Human
cccuccucaacucuggcuucca

SEQ ID NO: 505560 - RNA, 22 nt, Human
cagguggagcugacugagggca

SEQ ID NO: 505561 - RNA, 22 nt, Human
ccaggcaggcgauggugcagug

SEQ ID NO: 505562 - RNA, 22 nt, Human
cucaaaagacuuaaacauaaga

SEQ ID NO: 505563 - RNA, 22 nt, Human
aggcugcaggucugggucaugu

SEQ ID NO: 505564 - RNA, 22 nt, Human
uggaacacagugauugauagcg

SEQ ID NO: 505565 - RNA, 22 nt, Human
agcaaauacuugaauaaaaaga

SEQ ID NO: 505566 - RNA, 22 nt, Human
uccuugaaaagaaugucuccau

SEQ ID NO: 505567 - RNA, 22 nt, Human
acagccaggagccaugggcagg

SEQ ID NO: 505568 - RNA, 22 nt, Human
ggagggugcauuuuacccugug

SEQ ID NO: 505569 - RNA, 22 nt, Human
cagguacacucccuugugcuga

SEQ ID NO: 505570 - RNA, 22 nt, Human
cugcccuguggcucugagucau

SEQ ID NO: 505571 - RNA, 22 nt, Human
gccaccaggagcccaguccaaa

SEQ ID NO: 505572 - RNA, 22 nt, Human
uaaaauguagcuucuaggcugg

SEQ ID NO: 505573 - RNA, 22 nt, Human
uuccugggccuuaaaucuuuug

SEQ ID NO: 505574 - RNA, 18 nt, Human
cgggcgggcgccuggccc

SEQ ID NO: 505575 - RNA, 22 nt, Human
ugucuuuagagucacaaaacca

SEQ ID NO: 505576 - RNA, 22 nt, Human
caugggggucuggacaacaggc

SEQ ID NO: 505577 - RNA, 22 nt, Human
acuguggccaaagccucuggga

SEQ ID NO: 505578 - RNA, 19 nt, Human
cuauuagcuugggcaucau

SEQ ID NO: 505579 - RNA, 18 nt, Human
gcuggcugcacuucugcu

SEQ ID NO: 505580 - RNA, 22 nt, Human
ggagccugugcccaagcccaga

SEQ ID NO: 505581 - RNA, 22 nt, Human
aggcugugauuccaccacucuc

SEQ ID NO: 505582 - RNA, 23 nt, Human
aaaguugauuugcaguuuaagag

SEQ ID NO: 505583 - RNA, 22 nt, Human
uuggcauuggagaugcaagaac

SEQ ID NO: 505584 - RNA, 22 nt, Human
gggcagagacucagaaacagaa

SEQ ID NO: 505585 - RNA, 22 nt, Human
cuggcccucagacucaugggca

SEQ ID NO: 505586 - RNA, 20 nt, Human
accauuaauguaagcuuugu

SEQ ID NO: 505587 - RNA, 23 nt, Human
agaggggagcaucugcuggcuga

SEQ ID NO: 505588 - RNA, 22 nt, Human
ucaguguuggucaagaaucagu

SEQ ID NO: 505589 - RNA, 22 nt, Human
aacaugcaaugucugaaaaucc

SEQ ID NO: 505590 - RNA, 22 nt, Human
aaagcaguauaaguaacggaag

SEQ ID NO: 505591 - RNA, 22 nt, Human
uucugcaucugaauuuaaguac

SEQ ID NO: 505592 - RNA, 23 nt, Human
caucagagguugccacucccugg

SEQ ID NO: 505593 - RNA, 22 nt, Human
uuccugggcucuggcuggccua

SEQ ID NO: 505594 - RNA, 22 nt, Human
ugggccacucuucccugggucu

SEQ ID NO: 505595 - RNA, 20 nt, Human
aucugggcaucaauuuugug

SEQ ID NO: 505596 - RNA, 20 nt, Human
ucaggcaguggggaaaggca

SEQ ID NO: 505597 - RNA, 22 nt, Human
ggcaggagcucuccaguuugcc

SEQ ID NO: 505598 - RNA, 22 nt, Human
ggucauugucagagccuguacu

SEQ ID NO: 505599 - RNA, 22 nt, Human
ucugggcuauauggucucugcu

SEQ ID NO: 505600 - RNA, 22 nt, Human
uggcucuggcgugaagcccaga

SEQ ID NO: 505601 - RNA, 22 nt, Human
aggcagguccccuggaaggcac

SEQ ID NO: 505602 - RNA, 20 nt, Human
ugagaagcuccugucuccuc

SEQ ID NO: 505603 - RNA, 22 nt, Human
ccuggguuggagagcaauggug

SEQ ID NO: 505604 - RNA, 22 nt, Human
ucuggcuccacucugugcaugc

SEQ ID NO: 505605 - RNA, 22 nt, Human
ugcauccuuaaccagcaucacu

SEQ ID NO: 505606 - RNA, 18 nt, Human
cagcauuagcagcuucca

SEQ ID NO: 505607 - RNA, 22 nt, Human
aaauguguuugauaggaauauu

SEQ ID NO: 505608 - RNA, 17 nt, Human
uccuucagugccucugc

SEQ ID NO: 505609 - RNA, 22 nt, Human
acagggccauuaucuguucuag

SEQ ID NO: 505610 - RNA, 22 nt, Human
gcucacagucugcugagugcag

SEQ ID NO: 505611 - RNA, 22 nt, Human
ugcaucuuacguuuugaaaggg

SEQ ID NO: 505612 - RNA, 22 nt, Human
agucucuggggaggaguggaaa

SEQ ID NO: 505613 - RNA, 22 nt, Human
aagugagugguaaggagcaugg

SEQ ID NO: 505614 - RNA, 22 nt, Human
ucccagggcucuagagugcugg

SEQ ID NO: 505615 - RNA, 22 nt, Human
gauaccagacagggagggagaa

SEQ ID NO: 505616 - RNA, 22 nt, Human
aguggcugugaaauacauggga

SEQ ID NO: 505617 - RNA, 22 nt, Human
cuacauggagaagaaaauucuu

SEQ ID NO: 505618 - RNA, 18 nt, Human
ucagcuggggcugcagcc

SEQ ID NO: 505619 - RNA, 22 nt, Human
aggggagaguuaaugugaaugu

SEQ ID NO: 505620 - RNA, 17 nt, Human
gagugcugguggagcuc

SEQ ID NO: 505621 - RNA, 22 nt, Human
cccaguggggagcugagguuca

SEQ ID NO: 505622 - RNA, 22 nt, Human
uguucagagacagaaauucuaa

SEQ ID NO: 505623 - RNA, 22 nt, Human
auaaugaggauuugcauauuag

SEQ ID NO: 505624 - RNA, 22 nt, Human
ccaucuccaaauaccaucacau

SEQ ID NO: 505625 - RNA, 22 nt, Human
cagcuuugccaaguaaggucuu

SEQ ID NO: 505626 - RNA, 22 nt, Human
uauuucugaggcccaggaagug

SEQ ID NO: 505627 - RNA, 23 nt, Human
uggccugcagaguuucugcuggg

SEQ ID NO: 505628 - RNA, 22 nt, Human
uuagccauuuuauucagcaggu

SEQ ID NO: 505629 - RNA, 22 nt, Human
cgguccagggaacgcccccgcc

SEQ ID NO: 505630 - RNA, 22 nt, Human
ggaggaccccagcagcucccca

SEQ ID NO: 505631 - RNA, 22 nt, Human
cacaguguuccagagcaguggu

SEQ ID NO: 505632 - RNA, 22 nt, Human
cccaggagagaggccaguuggc

SEQ ID NO: 505633 - RNA, 22 nt, Human
uauuugucuuucuuauaagaau

SEQ ID NO: 505634 - RNA, 22 nt, Human
cuggcuggucaucagcaguacg

SEQ ID NO: 505635 - RNA, 22 nt, Human
gcaggcugaguauuacccuagu

SEQ ID NO: 505636 - RNA, 22 nt, Human
uuuauguaauuucauaggugug

SEQ ID NO: 505637 - RNA, 22 nt, Human
agagcuguuuggacaucugagu

SEQ ID NO: 505638 - RNA, 22 nt, Human
aggcagguuucccggcugucaa

SEQ ID NO: 505639 - RNA, 22 nt, Human
agggaggaucugcuccuugucu

SEQ ID NO: 505640 - RNA, 22 nt, Human
gccuuggacuaccacucccaca

SEQ ID NO: 505641 - RNA, 22 nt, Human
agagcccucuucacugccccuu

SEQ ID NO: 505642 - RNA, 22 nt, Human
uaaguucaaugaacucaguucu

SEQ ID NO: 505643 - RNA, 22 nt, Human
uccccucuggaggcugcagggg

SEQ ID NO: 505644 - RNA, 22 nt, Human
agggcagauggaacuuccccga

SEQ ID NO: 505645 - RNA, 22 nt, Human
cauggccacauuggaccgaagc

SEQ ID NO: 505646 - RNA, 22 nt, Human
uguggucuccugucuuggccuu

SEQ ID NO: 505647 - RNA, 22 nt, Human
gagaguggauggagcugcgaag

SEQ ID NO: 505648 - RNA, 22 nt, Human
ucacagaagagauauugacaga

SEQ ID NO: 505649 - RNA, 22 nt, Human
ugagccagaguggagugugccu

SEQ ID NO: 505650 - RNA, 22 nt, Human
cuggagcuggcuuccuuccacu

SEQ ID NO: 505651 - RNA, 22 nt, Human
uugauauuagaguauuuguuug

SEQ ID NO: 505652 - RNA, 22 nt, Human
ugucucagaggcaggaagagcc

SEQ ID NO: 505653 - RNA, 23 nt, Human
ccagcgcucacucagagcauguu

SEQ ID NO: 505654 - RNA, 18 nt, Human
uucacaagggcuugguuu

SEQ ID NO: 505655 - RNA, 23 nt, Human
uggggcugauggagacggaccag

SEQ ID NO: 505656 - RNA, 18 nt, Human
aggcaggugcuaauauuu

SEQ ID NO: 505657 - RNA, 22 nt, Human
uugcagcuguugcaaagucucu

SEQ ID NO: 505658 - RNA, 22 nt, Human
aggaaagaaguacauucucaug

SEQ ID NO: 505659 - RNA, 22 nt, Human
uucucuuuucaccaguugcuaa

SEQ ID NO: 505660 - RNA, 23 nt, Human
aggugcagcccuggaccugcccc

SEQ ID NO: 505661 - RNA, 22 nt, Human
gagcugcugguugcuggugccu

SEQ ID NO: 505662 - RNA, 22 nt, Human
guccaagagucaagaagggggc

SEQ ID NO: 505663 - RNA, 22 nt, Human
gccacuguacuccagccugcga

SEQ ID NO: 505664 - RNA, 22 nt, Human
acacauguuuccaaaagcaccc

SEQ ID NO: 505665 - RNA, 22 nt, Human
cuuagaaaugcagauucucagg

SEQ ID NO: 505666 - RNA, 22 nt, Human
cuggcucagacagcugugcagu

SEQ ID NO: 505667 - RNA, 22 nt, Human
caaaugaaguccaaagggcuua

SEQ ID NO: 505668 - RNA, 22 nt, Human
ucaagagacaggacguguuuca

SEQ ID NO: 505669 - RNA, 22 nt, Human
gauauuuucagucuccuuucaa

SEQ ID NO: 505670 - RNA, 22 nt, Human
uggucuggggaccgaggguuac

SEQ ID NO: 505671 - RNA, 22 nt, Human
gcuggccugaccugaggcuggg

SEQ ID NO: 505672 - RNA, 22 nt, Human
acaugauuggacuccuuccccu

SEQ ID NO: 505673 - RNA, 22 nt, Human
uuuucugugauucugagguugg

SEQ ID NO: 505674 - RNA, 22 nt, Human
cucuuccuacagucugcuaugc

SEQ ID NO: 505675 - RNA, 22 nt, Human
guguuuccaguucagaaagcaa

SEQ ID NO: 505676 - RNA, 22 nt, Human
agcaaagcaccauauggcaguu

SEQ ID NO: 505677 - RNA, 22 nt, Human
aaugaaaugaagauaugaucag

SEQ ID NO: 505678 - RNA, 22 nt, Human
cuguggcucugcagucccaaca

SEQ ID NO: 505679 - RNA, 22 nt, Human
agggagcugcucugcuuccgug

SEQ ID NO: 505680 - RNA, 22 nt, Human
cuggggggcuacugacagagga

SEQ ID NO: 505681 - RNA, 22 nt, Human
guuagggagggugcauaugugu

SEQ ID NO: 505682 - RNA, 22 nt, Human
uuucaauguaacauuuccaggc

SEQ ID NO: 505683 - RNA, 22 nt, Human
uuugucuuggccaagguucuga

SEQ ID NO: 505684 - RNA, 22 nt, Human
uccuggggcucuuugaugugau

SEQ ID NO: 505685 - RNA, 22 nt, Human
ugccuggcaagaggggcuggcu

SEQ ID NO: 505686 - RNA, 22 nt, Human
aagggcucccaacucaucuuuu

SEQ ID NO: 505687 - RNA, 22 nt, Human
uccucagucguuugagccaaaa

SEQ ID NO: 505688 - RNA, 22 nt, Human
uacaaaguauauuucuagcugu

SEQ ID NO: 505689 - RNA, 22 nt, Human
gcacacaggcaguuuccagcca

SEQ ID NO: 505690 - RNA, 22 nt, Human
ggguccagaguuuucccgcccu

SEQ ID NO: 505691 - RNA, 22 nt, Human
aggugcagcugguggagucugg

SEQ ID NO: 505692 - RNA, 22 nt, Human
acaccauacucauguugguucc

SEQ ID NO: 505693 - RNA, 22 nt, Human
guucagcccacagagggggccg

SEQ ID NO: 505694 - RNA, 22 nt, Human
aggcaggugggucacuugaguc

SEQ ID NO: 505695 - RNA, 22 nt, Human
cugggcucagaugagaggaagg

SEQ ID NO: 505696 - RNA, 22 nt, Human
ccuguucaauauucuuccuugu

SEQ ID NO: 505697 - RNA, 22 nt, Human
aggagguggccugagcgugccc

SEQ ID NO: 505698 - RNA, 22 nt, Human
cugcagggcccgccugagcccu

SEQ ID NO: 505699 - RNA, 22 nt, Human
ucugcagaaguggcugggccac

SEQ ID NO: 505700 - RNA, 22 nt, Human
ucauuucuauugcuacugucug

SEQ ID NO: 505701 - RNA, 22 nt, Human
acaguuagguccuaaaauucug

SEQ ID NO: 505702 - RNA, 22 nt, Human
ggugaggguaaauauaggcaaa

SEQ ID NO: 505703 - RNA, 22 nt, Human
ucagguggcuucggggaguggc

SEQ ID NO: 505704 - RNA, 22 nt, Human
caggaaaaggagacuuuagcac

SEQ ID NO: 505705 - RNA, 22 nt, Human
gcagggucgcucuaggagauca

SEQ ID NO: 505706 - RNA, 22 nt, Human
guuagcauuuguuuaauaucag

SEQ ID NO: 505707 - RNA, 22 nt, Human
uauaagaaacaaggcaaauuuu

SEQ ID NO: 505708 - RNA, 18 nt, Human
gccucaguuuccucaccu

SEQ ID NO: 505709 - RNA, 22 nt, Human
auaaggcauauagucacuuuuu

SEQ ID NO: 505710 - RNA, 19 nt, Human
accugccaugacagccuga

SEQ ID NO: 505711 - RNA, 22 nt, Human
ucauguaaguauagaaagcagu

SEQ ID NO: 505712 - RNA, 22 nt, Human
ggagaggagcuauugggggcuc

SEQ ID NO: 505713 - RNA, 22 nt, Human
gcagcuguguaaugagcccaca

SEQ ID NO: 505714 - RNA, 22 nt, Human
gcaggccagcugugcagauggg

SEQ ID NO: 505715 - RNA, 22 nt, Human
aagauaaugugucugucuuugc

SEQ ID NO: 505716 - RNA, 22 nt, Human
guaggcagauaggagugcagcc

SEQ ID NO: 505717 - RNA, 22 nt, Human
ggcugcuggcauugagguaggu

SEQ ID NO: 505718 - RNA, 17 nt, Human
agguggcugcugcgccu

SEQ ID NO: 505719 - RNA, 22 nt, Human
cucaggccuugaagucuuuucu

SEQ ID NO: 505720 - RNA, 22 nt, Human
uaauuuaauuucaugccagccu

SEQ ID NO: 505721 - RNA, 22 nt, Human
guuagcaugacuuagaaucagg

SEQ ID NO: 505722 - RNA, 22 nt, Human
aaccaugcuagcaucaaaaugu

SEQ ID NO: 505723 - RNA, 20 nt, Human
ucucugcuguccacauuugc

SEQ ID NO: 505724 - RNA, 23 nt, Human
auaucacacccaguacagucucc

SEQ ID NO: 505725 - RNA, 20 nt, Human
ucuguucaaaucuuaguucc

SEQ ID NO: 505726 - RNA, 20 nt, Human
gccugcagagaaggucagag

SEQ ID NO: 505727 - RNA, 23 nt, Human
ucugggcaccuuguugacaugau

SEQ ID NO: 505728 - RNA, 15 nt, Human
uccaggcauucauuc

SEQ ID NO: 505729 - RNA, 22 nt, Human
agcagcaucuucuguucuccgc

SEQ ID NO: 505730 - RNA, 18 nt, Human
ggccagagggaggguccc

SEQ ID NO: 505731 - RNA, 21 nt, Human
uucugggccaugcugcuucuc

SEQ ID NO: 505732 - RNA, 22 nt, Human
aggaggcaggaagucuauggga

SEQ ID NO: 505733 - RNA, 22 nt, Human
gaaggaagucauuagugcagac

SEQ ID NO: 505734 - RNA, 18 nt, Human
agcuccaucugucagcau

SEQ ID NO: 505735 - RNA, 22 nt, Human
ucagcaggcaccggaaguguuu

SEQ ID NO: 505736 - RNA, 22 nt, Human
gaugcaaagaggaccuucagua

SEQ ID NO: 505737 - RNA, 22 nt, Human
uuuauucuugagagugagaaga

SEQ ID NO: 505738 - RNA, 22 nt, Human
ccuggcagcgccgaagcuggcc

SEQ ID NO: 505739 - RNA, 22 nt, Human
cucuggacacuggcaugggguc

SEQ ID NO: 505740 - RNA, 22 nt, Human
ucaguguuauuagaugagguuu

SEQ ID NO: 505741 - RNA, 22 nt, Human
uagaaaauagggccuguggagc

SEQ ID NO: 505742 - RNA, 22 nt, Human
agcuuuguggcuuugcaagacu

SEQ ID NO: 505743 - RNA, 22 nt, Human
agccucugcuuaugcaaaggua

SEQ ID NO: 505744 - RNA, 22 nt, Human
gaggggagacagggaaaucagu

SEQ ID NO: 505745 - RNA, 22 nt, Human
aaauacugcugcuauuccuuuu

SEQ ID NO: 505746 - RNA, 22 nt, Human
acugggcuagaguggaagcugg

SEQ ID NO: 505747 - RNA, 17 nt, Human
gcagcagagagacccuc

SEQ ID NO: 505748 - RNA, 22 nt, Human
agccugagagccaagcugugca

SEQ ID NO: 505749 - RNA, 20 nt, Human
aagaaacuugaaaguacaag

SEQ ID NO: 505750 - RNA, 22 nt, Human
aauaacaggcucaucagaugcu

SEQ ID NO: 505751 - RNA, 22 nt, Human
gcacugaaaauguuggauucca

SEQ ID NO: 505752 - RNA, 22 nt, Human
aaggagagguuguccguguugu

SEQ ID NO: 505753 - RNA, 22 nt, Human
ucugagcccagugagucucgca

SEQ ID NO: 505754 - RNA, 22 nt, Human
guggaaguagauuugagaaggu

SEQ ID NO: 505755 - RNA, 22 nt, Human
gaaucucaggaagaucucugca

SEQ ID NO: 505756 - RNA, 22 nt, Human
ucuggccauggcaagccgagug

SEQ ID NO: 505757 - RNA, 22 nt, Human
cuggggaggaugcuacgaccug

SEQ ID NO: 505758 - RNA, 22 nt, Human
agcagcaggcuguguggacuga

SEQ ID NO: 505759 - RNA, 22 nt, Human
agaagaaacugucggggauauu

SEQ ID NO: 505760 - RNA, 22 nt, Human
cuguucaugcugauucuguaug

SEQ ID NO: 505761 - RNA, 22 nt, Human
ucccagugagguccuggcuguc

SEQ ID NO: 505762 - RNA, 20 nt, Human
gaggagccaccuugagcugg

SEQ ID NO: 505763 - RNA, 21 nt, Human
aacugcuggucuuuucugucu

SEQ ID NO: 505764 - RNA, 22 nt, Human
uccuucagucuucugagccaua

SEQ ID NO: 505765 - RNA, 22 nt, Human
uggggacagggcucagcaauuu

SEQ ID NO: 505766 - RNA, 23 nt, Human
augugcacaucuccuuguccacc

SEQ ID NO: 505767 - RNA, 22 nt, Human
acaggacagucuaguaacagua

SEQ ID NO: 505768 - RNA, 18 nt, Human
guuuccugaggugaaggg

SEQ ID NO: 505769 - RNA, 22 nt, Human
ucuggagcuggagggcaaggca

SEQ ID NO: 505770 - RNA, 22 nt, Human
agggcagcuaaggugcugacug

SEQ ID NO: 505771 - RNA, 22 nt, Human
aucaacaugaauuucucugaag

SEQ ID NO: 505772 - RNA, 22 nt, Human
agacccugcaccucucgugggc

SEQ ID NO: 505773 - RNA, 22 nt, Human
agggcaguucaacuucauagug

SEQ ID NO: 505774 - RNA, 22 nt, Human
uggagcaagcuggagagaacau

SEQ ID NO: 505775 - RNA, 22 nt, Human
cacugucccuguuuccuggaaa

SEQ ID NO: 505776 - RNA, 22 nt, Human
uggccuggcccugaggcccugu

SEQ ID NO: 505777 - RNA, 22 nt, Human
agaguucugucugccacacgaa

SEQ ID NO: 505778 - RNA, 22 nt, Human
aagauacaucauucaggaguga

SEQ ID NO: 505779 - RNA, 22 nt, Human
cccagcccagcguucgaggggu

SEQ ID NO: 505780 - RNA, 22 nt, Human
acacacaacucauuguguaaua

SEQ ID NO: 505781 - RNA, 22 nt, Human
caguguggugugcacagcuuag

SEQ ID NO: 505782 - RNA, 22 nt, Human
agagcugugaaaaugagguuug

SEQ ID NO: 505783 - RNA, 22 nt, Human
agucugaagauauucuugcagg

SEQ ID NO: 505784 - RNA, 22 nt, Human
gcuggcuuugcacugggugcau

SEQ ID NO: 505785 - RNA, 22 nt, Human
uaugcuuugguagagaguugug

SEQ ID NO: 505786 - RNA, 22 nt, Human
uuggaaggagucaaccagcuga

SEQ ID NO: 505787 - RNA, 22 nt, Human
ccuguucaaguugcagggcugg

SEQ ID NO: 505788 - RNA, 22 nt, Human
caugaagcuugaagcaguccac

SEQ ID NO: 505789 - RNA, 22 nt, Human
acuacuuugggccauuuguuua

SEQ ID NO: 505790 - RNA, 22 nt, Human
gucagcugucuccccagagugg

SEQ ID NO: 505791 - RNA, 21 nt, Human
guggcccugccgcagugucca

SEQ ID NO: 505792 - RNA, 21 nt, Human
uagagaaaagaagcuguuccu

SEQ ID NO: 505793 - RNA, 20 nt, Human
caguccaggcuagaaaacaa

SEQ ID NO: 505794 - RNA, 22 nt, Human
cagcuucuagcaucggcuuuga

SEQ ID NO: 505795 - RNA, 22 nt, Human
gcagcuuggauuucuguaguuu

SEQ ID NO: 505796 - RNA, 22 nt, Human
ccucccucuuucagucccacag

SEQ ID NO: 505797 - RNA, 21 nt, Human
gcuggcugucccagggaagca

SEQ ID NO: 505798 - RNA, 22 nt, Human
cacauccuucagcugagcccag

SEQ ID NO: 505799 - RNA, 22 nt, Human
gcuucgggguccaagcgcgugu

SEQ ID NO: 505800 - RNA, 22 nt, Human
ucucuugggaggaaagagagaa

SEQ ID NO: 505801 - RNA, 22 nt, Human
uaaucacaucaggguaaauggg

SEQ ID NO: 505802 - RNA, 22 nt, Human
agguuucuucuuaggaauaugu

SEQ ID NO: 505803 - RNA, 22 nt, Human
ucaaaggaaacgugguccuggc

SEQ ID NO: 505804 - RNA, 22 nt, Human
uccuguuuccaauuuguugggu

SEQ ID NO: 505805 - RNA, 22 nt, Human
acaggcucucuauugagugcag

SEQ ID NO: 505806 - RNA, 21 nt, Human
acagaguaguugaaacagaga

SEQ ID NO: 505807 - RNA, 22 nt, Human
uuguuugaauaacagacaaauu

SEQ ID NO: 505808 - RNA, 22 nt, Human
uggccugccucccggcuucuuu

SEQ ID NO: 505809 - RNA, 18 nt, Human
uccagucccaaggccagc

SEQ ID NO: 505810 - RNA, 22 nt, Human
aggugaguuacaggaggagguc

SEQ ID NO: 505811 - RNA, 22 nt, Human
cugccuguuagucuagcaguua

SEQ ID NO: 505812 - RNA, 22 nt, Human
aaaguguaaaagcauguuaggg

SEQ ID NO: 505813 - RNA, 22 nt, Human
uuucauaauagugcaguuuguu

SEQ ID NO: 505814 - RNA, 22 nt, Human
uugcccugcguuaccaucucuu

SEQ ID NO: 505815 - RNA, 22 nt, Human
gcuuccuggagggagagagcug

SEQ ID NO: 505816 - RNA, 22 nt, Human
ugcccuggugaagugcucuccu

SEQ ID NO: 505817 - RNA, 22 nt, Human
cuuguaauuauaauguacuguu

SEQ ID NO: 505818 - RNA, 22 nt, Human
ugagccagagagguugaggcua

SEQ ID NO: 505819 - RNA, 22 nt, Human
ccacaaguuucagcacccagag

SEQ ID NO: 505820 - RNA, 22 nt, Human
gccuggcaggccucaugagggg

SEQ ID NO: 505821 - RNA, 22 nt, Human
cugcugucuuuauuucacugcu

SEQ ID NO: 505822 - RNA, 22 nt, Human
ccagcucugccaagcgucagcu

SEQ ID NO: 505823 - RNA, 22 nt, Human
acaguguguucugggaccucca

SEQ ID NO: 505824 - RNA, 22 nt, Human
uaugcacgucuauuuaugaaga

SEQ ID NO: 505825 - RNA, 22 nt, Human
caggaaagggaugggcugccac

SEQ ID NO: 505826 - RNA, 22 nt, Human
uuuuguuuucuuagaaaccugg

SEQ ID NO: 505827 - RNA, 22 nt, Human
gcucucugaggugcuggcagag

SEQ ID NO: 505828 - RNA, 22 nt, Human
acaguguucuugauauuacagu

SEQ ID NO: 505829 - RNA, 22 nt, Human
agcccugggcuguagauaagca

SEQ ID NO: 505830 - RNA, 22 nt, Human
ucccacaggaaaguagacauug

SEQ ID NO: 505831 - RNA, 22 nt, Human
cuggccacugauuccuccccug

SEQ ID NO: 505832 - RNA, 22 nt, Human
ccaggacagggagacgggagcc

SEQ ID NO: 505833 - RNA, 23 nt, Human
uccucccaaauuucagccucauu

SEQ ID NO: 505834 - RNA, 22 nt, Human
gaaaauuauugaaaauggcucu

SEQ ID NO: 505835 - RNA, 22 nt, Human
aaacaccagucccaguauacac

SEQ ID NO: 505836 - RNA, 21 nt, Human
gggccacaccuucugcagacc

SEQ ID NO: 505837 - RNA, 22 nt, Human
ugaagcacaggcauacacaacc

SEQ ID NO: 505838 - RNA, 22 nt, Human
caguguggagggagagagccug

SEQ ID NO: 505839 - RNA, 22 nt, Human
uaccaaguguauuaugcuuugu

SEQ ID NO: 505840 - RNA, 22 nt, Human
uccugccuguuuaccuguacuu

SEQ ID NO: 505841 - RNA, 22 nt, Human
aaggcugaauucaaggguaggc

SEQ ID NO: 505842 - RNA, 22 nt, Human
uguguucaucaugauaucaggu

SEQ ID NO: 505843 - RNA, 22 nt, Human
gagcacaggcuuugguggacac

SEQ ID NO: 505844 - RNA, 22 nt, Human
gaaaguauuuacauuaacaucu

SEQ ID NO: 505845 - RNA, 22 nt, Human
caggaugguggcaugaucagaa

SEQ ID NO: 505846 - RNA, 22 nt, Human
acuguggccuuguggguucagg

SEQ ID NO: 505847 - RNA, 22 nt, Human
gcagugggccugaggaagggug

SEQ ID NO: 505848 - RNA, 22 nt, Human
cagggcuugaaucaaggaaguc

SEQ ID NO: 505849 - RNA, 22 nt, Human
cugggagagccuuuccugaguc

SEQ ID NO: 505850 - RNA, 22 nt, Human
agggcugcuauguugauucaga

SEQ ID NO: 505851 - RNA, 22 nt, Human
auauacuuggagacuaucauug

SEQ ID NO: 505852 - RNA, 22 nt, Human
auuucugugcaguaaaugguga

SEQ ID NO: 505853 - RNA, 22 nt, Human
gcuuagcaucuuacaaugcuga

SEQ ID NO: 505854 - RNA, 22 nt, Human
auacagggacauccaguuuuuc

SEQ ID NO: 505855 - RNA, 22 nt, Human
gaggagguuccggguggagaag

SEQ ID NO: 505856 - RNA, 22 nt, Human
gagcugggacauggguccucuc

SEQ ID NO: 505857 - RNA, 22 nt, Human
uauuuuacagacuacuuuagau

SEQ ID NO: 505858 - RNA, 22 nt, Human
ugagauggguggggagcucagg

SEQ ID NO: 505859 - RNA, 22 nt, Human
gccugucugcgucacgcuuauu

SEQ ID NO: 505860 - RNA, 22 nt, Human
ugggcacagagucccaucugcc

SEQ ID NO: 505861 - RNA, 22 nt, Human
uggagccugagucagcggaggc

SEQ ID NO: 505862 - RNA, 22 nt, Human
uccuugaauccuagcauccuau

SEQ ID NO: 505863 - RNA, 22 nt, Human
aacaccuucuccuugcaggcca

SEQ ID NO: 505864 - RNA, 22 nt, Human
uuuauuugaaucaggggagaau

SEQ ID NO: 505865 - RNA, 22 nt, Human
auuagcauaaguguucggugca

SEQ ID NO: 505866 - RNA, 22 nt, Human
cagggccagcgcccaggcccag

SEQ ID NO: 505867 - RNA, 22 nt, Human
ccucucuguguggccucuccau

SEQ ID NO: 505868 - RNA, 22 nt, Human
aagcagcuuccccaaagugccu

SEQ ID NO: 505869 - RNA, 22 nt, Human
aggagcuggguuccuuuggugg

SEQ ID NO: 505870 - RNA, 22 nt, Human
ucagaggugguaaaggacagca

SEQ ID NO: 505871 - RNA, 22 nt, Human
uggaggaaaauuacuggggucu

SEQ ID NO: 505872 - RNA, 22 nt, Human
gaagucaugcucccaucuugcu

SEQ ID NO: 505873 - RNA, 22 nt, Human
uccugaaguauggguauggagu

SEQ ID NO: 505874 - RNA, 22 nt, Human
ggcucugggcauagaaggaagc

SEQ ID NO: 505875 - RNA, 23 nt, Human
cucugggcgggcaggucagccuc

SEQ ID NO: 505876 - RNA, 22 nt, Human
gaaugauaaauggaagcagcau

SEQ ID NO: 505877 - RNA, 22 nt, Human
auccaagucagggauaguuuga

SEQ ID NO: 505878 - RNA, 22 nt, Human
uguguccuuuggaggaucagcg

SEQ ID NO: 505879 - RNA, 22 nt, Human
uggcaggugccuguaaucucag

SEQ ID NO: 505880 - RNA, 22 nt, Human
ucagcacuuugaagcagaagga

SEQ ID NO: 505881 - RNA, 22 nt, Human
agcaaucaccaccucuauauuu

SEQ ID NO: 505882 - RNA, 23 nt, Human
uugcuuagagaccuccucaucag

SEQ ID NO: 505883 - RNA, 22 nt, Human
ugcuggcuggccuggccuggac

SEQ ID NO: 505884 - RNA, 22 nt, Human
uggcuaggcuccaagagcugga

SEQ ID NO: 505885 - RNA, 22 nt, Human
ggcugugagcaggcagaaugcu

SEQ ID NO: 505886 - RNA, 22 nt, Human
ggcaguuucucaggcaggggua

SEQ ID NO: 505887 - RNA, 22 nt, Human
acuggcugugcccauagagcuc

SEQ ID NO: 505888 - RNA, 22 nt, Human
ugagcuccggcauauggaauua

SEQ ID NO: 505889 - RNA, 22 nt, Human
aagaacagguucuagaaccauu

SEQ ID NO: 505890 - RNA, 22 nt, Human
aaguauucuggcagucauucag

SEQ ID NO: 505891 - RNA, 22 nt, Human
auggcagggaccaagcugucau

SEQ ID NO: 505892 - RNA, 22 nt, Human
gcucugagagugggugauucug

SEQ ID NO: 505893 - RNA, 20 nt, Human
aucuggcucagauccugcag

SEQ ID NO: 505894 - RNA, 22 nt, Human
uggcucaggccuacgacgccuu

SEQ ID NO: 505895 - RNA, 18 nt, Human
ucucuucuuggcagucaa

SEQ ID NO: 505896 - RNA, 22 nt, Human
ucuuucagccacuuaccugucu

SEQ ID NO: 505897 - RNA, 22 nt, Human
guuauuuucauuggcucagacu

SEQ ID NO: 505898 - RNA, 22 nt, Human
acuucucuucauagguggcaau

SEQ ID NO: 505899 - RNA, 22 nt, Human
uucauguaccguguaccaggca

SEQ ID NO: 505900 - RNA, 22 nt, Human
aauuagcuucagcuuguggggc

SEQ ID NO: 505901 - RNA, 22 nt, Human
uaaacaaggguuacugagcaug

SEQ ID NO: 505902 - RNA, 22 nt, Human
cucaggaugcaggucacaggac

SEQ ID NO: 505903 - RNA, 22 nt, Human
ucugcugcacaaauucaucucu

SEQ ID NO: 505904 - RNA, 22 nt, Human
agucacaguuccuacccaguaa

SEQ ID NO: 505905 - RNA, 22 nt, Human
gaaaaugagccucagcuacauu

SEQ ID NO: 505906 - RNA, 22 nt, Human
aggcgcagaaggccaggggccu

SEQ ID NO: 505907 - RNA, 22 nt, Human
guuucuaauuggaacuuugagg

SEQ ID NO: 505908 - RNA, 22 nt, Human
aggcuccaggcaaaauuucgga

SEQ ID NO: 505909 - RNA, 22 nt, Human
gagaggggcgcgcagcucgcga

SEQ ID NO: 505910 - RNA, 22 nt, Human
gaacugaguuuucugccuggac

SEQ ID NO: 505911 - RNA, 22 nt, Human
aauguucagaggacaauauaaa

SEQ ID NO: 505912 - RNA, 22 nt, Human
uccuugaagcaacgugcagaca

SEQ ID NO: 505913 - RNA, 22 nt, Human
cugcuggugaugucugggcaug

SEQ ID NO: 505914 - RNA, 22 nt, Human
uccagccacguauuaucucacu

SEQ ID NO: 505915 - RNA, 22 nt, Human
uucccucugcgcauugaauuuc

SEQ ID NO: 505916 - RNA, 22 nt, Human
uuucuuuuacaguguggcuauu

SEQ ID NO: 505917 - RNA, 22 nt, Human
guccuggggauacagaagugaa

SEQ ID NO: 505918 - RNA, 20 nt, Human
agguuccuuuguggagaauu

SEQ ID NO: 505919 - RNA, 18 nt, Human
uugaaguuauuuacauuc

SEQ ID NO: 505920 - RNA, 22 nt, Human
gcaggucuggagggcacugggg

SEQ ID NO: 505921 - RNA, 22 nt, Human
ccuggagggacccuggcccugu

SEQ ID NO: 505922 - RNA, 22 nt, Human
gugccugcugcagagucgcugu

SEQ ID NO: 505923 - RNA, 22 nt, Human
cagccagcugucccaagugccu

SEQ ID NO: 505924 - RNA, 22 nt, Human
cucucugggguuccagacgugg

SEQ ID NO: 505925 - RNA, 22 nt, Human
ggcaggagaaaggucucuucuu

SEQ ID NO: 505926 - RNA, 22 nt, Human
uccuuagacaaagagugggcuu

SEQ ID NO: 505927 - RNA, 22 nt, Human
gccacaggcacuuaagggcugg

SEQ ID NO: 505928 - RNA, 22 nt, Human
aauucaugaguagaaucuauau

SEQ ID NO: 505929 - RNA, 22 nt, Human
ucagugcaucacagaacuuugu

SEQ ID NO: 505930 - RNA, 22 nt, Human
auaauauaauccuacuucccau

SEQ ID NO: 505931 - RNA, 22 nt, Human
cuccugggaugacucuuucuuu

SEQ ID NO: 505932 - RNA, 22 nt, Human
uauguguaggaggaggacaggg

SEQ ID NO: 505933 - RNA, 22 nt, Human
ucagguguuagaagaaauuuca

SEQ ID NO: 505934 - RNA, 22 nt, Human
acaguguucacuuaacaaugga

SEQ ID NO: 505935 - RNA, 21 nt, Human
uaucuacuggugucuuucaga

SEQ ID NO: 505936 - RNA, 22 nt, Human
cuaugaaaggauuuggaguugu

SEQ ID NO: 505937 - RNA, 22 nt, Human
gcuguucacagacucugcucug

SEQ ID NO: 505938 - RNA, 22 nt, Human
gaaaauguuuguccggagcuga

SEQ ID NO: 505939 - RNA, 22 nt, Human
ugacucuguaccugucugccuu

SEQ ID NO: 505940 - RNA, 22 nt, Human
uaggaaauuggaaacucuucac

SEQ ID NO: 505941 - RNA, 22 nt, Human
gcucccaguucccaaagugacc

SEQ ID NO: 505942 - RNA, 22 nt, Human
aggaagcugcuaagaaacaaug

SEQ ID NO: 505943 - RNA, 22 nt, Human
gacuggccuggagaugcagcug

SEQ ID NO: 505944 - RNA, 18 nt, Human
ugugguggagcugccuuc

SEQ ID NO: 505945 - RNA, 22 nt, Human
aaguaugucuuuggguauuauu

SEQ ID NO: 505946 - RNA, 19 nt, Human
cccagagcauccugaacuu

SEQ ID NO: 505947 - RNA, 22 nt, Human
cauucacaaaaccacaugccau

SEQ ID NO: 505948 - RNA, 22 nt, Human
ccccuuccuuccucagacagcc

SEQ ID NO: 505949 - RNA, 22 nt, Human
acugcaucugaaacauggguca

SEQ ID NO: 505950 - RNA, 22 nt, Human
gcagcauuucucaaaggguggu

SEQ ID NO: 505951 - RNA, 22 nt, Human
cuuguggcagguggauggugcc

SEQ ID NO: 505952 - RNA, 22 nt, Human
caggacacuacagaugggaggg

SEQ ID NO: 505953 - RNA, 22 nt, Human
auaaggcacacauagauagggu

SEQ ID NO: 505954 - RNA, 22 nt, Human
uuuucuaaaauauccaggacag

SEQ ID NO: 505955 - RNA, 22 nt, Human
uuagaaaucugcugccaugcaa

SEQ ID NO: 505956 - RNA, 22 nt, Human
cuagugaacgugguacuaugga

SEQ ID NO: 505957 - RNA, 22 nt, Human
caugagaaguggccuucaaaaa

SEQ ID NO: 505958 - RNA, 22 nt, Human
guaguucuuucucaauguucaa

SEQ ID NO: 505959 - RNA, 22 nt, Human
cugagaggcacaaggcauuucg

SEQ ID NO: 505960 - RNA, 22 nt, Human
cagauccacccuuguagugaca

SEQ ID NO: 505961 - RNA, 22 nt, Human
cuucagagaacuugaucgcugc

SEQ ID NO: 505962 - RNA, 22 nt, Human
aggcgcaggguuuggacccagg

SEQ ID NO: 505963 - RNA, 22 nt, Human
cagcagcugaggcgcuggcgug

SEQ ID NO: 505964 - RNA, 22 nt, Human
agggcugaguggugcagucaaa

SEQ ID NO: 505965 - RNA, 22 nt, Human
aauagcauagaguuaaaaugca

SEQ ID NO: 505966 - RNA, 22 nt, Human
aggcaagugcauuagaagagca

SEQ ID NO: 505967 - RNA, 22 nt, Human
ucagugcuucggcgagcaccua

SEQ ID NO: 505968 - RNA, 22 nt, Human
aaacucuguagcuaaacauaau

SEQ ID NO: 505969 - RNA, 22 nt, Human
ucagcuggagaugagaaccgaa

SEQ ID NO: 505970 - RNA, 16 nt, Human
uugcccugaggggagg

SEQ ID NO: 505971 - RNA, 19 nt, Human
ggaaggcagaggggcugug

SEQ ID NO: 505972 - RNA, 22 nt, Human
caguggaggcucaagugugcuu

SEQ ID NO: 505973 - RNA, 22 nt, Human
aaucuguuaagaacagaaaugu

SEQ ID NO: 505974 - RNA, 22 nt, Human
ugucccugguggaggcuggcag

SEQ ID NO: 505975 - RNA, 22 nt, Human
gccugggacccuuagcucuugg

SEQ ID NO: 505976 - RNA, 22 nt, Human
ugcaggggcuugucugggccug

SEQ ID NO: 505977 - RNA, 22 nt, Human
ggaggggauuuaguagaugcua

SEQ ID NO: 505978 - RNA, 22 nt, Human
agcugcccugggucuugcugcu

SEQ ID NO: 505979 - RNA, 22 nt, Human
ugucugaacgaaguagguccac

SEQ ID NO: 505980 - RNA, 19 nt, Human
gggaucagcccagggcucu

SEQ ID NO: 505981 - RNA, 17 nt, Human
gcauguaguacauguaa

SEQ ID NO: 505982 - RNA, 22 nt, Human
cugaaggagaaggccacuguuc

SEQ ID NO: 505983 - RNA, 22 nt, Human
cagugguggaaugaggaauugu

SEQ ID NO: 505984 - RNA, 22 nt, Human
cucaggauagauuguccucuca

SEQ ID NO: 505985 - RNA, 22 nt, Human
uguggcagucucacuggagggc

SEQ ID NO: 505986 - RNA, 22 nt, Human
ugcugcucucagccaccaggaa

SEQ ID NO: 505987 - RNA, 22 nt, Human
uagcuucaguggcccuagacac

SEQ ID NO: 505988 - RNA, 22 nt, Human
aaugauggucauggcaacuuuu

SEQ ID NO: 505989 - RNA, 22 nt, Human
ugaggaagugguuguaugguuu

SEQ ID NO: 505990 - RNA, 22 nt, Human
aacaaaugauuguugguuggag

SEQ ID NO: 505991 - RNA, 22 nt, Human
ggcguggggccuucugcccgcu

SEQ ID NO: 505992 - RNA, 22 nt, Human
acagagcaauucuuggguguuu

SEQ ID NO: 505993 - RNA, 22 nt, Human
cuauuaaacacuacugugcacu

SEQ ID NO: 505994 - RNA, 22 nt, Human
cucugggcaaguuucuucauga

SEQ ID NO: 505995 - RNA, 22 nt, Human
aauuagcuaauuaauuguagcc

SEQ ID NO: 505996 - RNA, 22 nt, Human
ggagacaugcagacugagauac

SEQ ID NO: 505997 - RNA, 22 nt, Human
cuggaauguagagacagcuuag

SEQ ID NO: 505998 - RNA, 22 nt, Human
agaggagcugggaggcccucgu

SEQ ID NO: 505999 - RNA, 22 nt, Human
uggcuggcuguccagcugggca

SEQ ID NO: 506000 - RNA, 22 nt, Human
guggcugcuacagagcuggagg

SEQ ID NO: 506001 - RNA, 20 nt, Human
uuucugugauagagaggugu

SEQ ID NO: 506002 - RNA, 17 nt, Human
acaggccugcuugcacu

SEQ ID NO: 506003 - RNA, 22 nt, Human
cugaaggauuuaguucuuugcu

SEQ ID NO: 506004 - RNA, 22 nt, Human
uaauuauuaugacaacaauugc

SEQ ID NO: 506005 - RNA, 22 nt, Human
cacugcugauuucauaggcagg

SEQ ID NO: 506006 - RNA, 22 nt, Human
gguuccaccuggcgagggguau

SEQ ID NO: 506007 - RNA, 22 nt, Human
aagauuuagggccaguuuacau

SEQ ID NO: 506008 - RNA, 22 nt, Human
ggggccuguagagcuucaggga

SEQ ID NO: 506009 - RNA, 22 nt, Human
gccuguuuuugcuucguuuaag

SEQ ID NO: 506010 - RNA, 19 nt, Human
agcuggggcgguguguguu

SEQ ID NO: 506011 - RNA, 22 nt, Human
aaacauguuuagaaagcagcug

SEQ ID NO: 506012 - RNA, 17 nt, Human
gcaagggaugggagauu

SEQ ID NO: 506013 - RNA, 22 nt, Human
ugcaggcuccaggugcacauau

SEQ ID NO: 506014 - RNA, 22 nt, Human
cuccagggaggagcacggguuc

SEQ ID NO: 506015 - RNA, 22 nt, Human
agagccaggaugucuucugggg

SEQ ID NO: 506016 - RNA, 22 nt, Human
cccugcagugugaccucaccua

SEQ ID NO: 506017 - RNA, 22 nt, Human
uuggccuucugguguucauuuu

SEQ ID NO: 506018 - RNA, 22 nt, Human
auguccagagccggccugcuga

SEQ ID NO: 506019 - RNA, 22 nt, Human
uuaugagcuaaguuguggcccc

SEQ ID NO: 506020 - RNA, 22 nt, Human
guccaggucuggacccugagcc

SEQ ID NO: 506021 - RNA, 22 nt, Human
uuuccucugucaugacagcuga

SEQ ID NO: 506022 - RNA, 22 nt, Human
uaagauguaagaucagagcuug

SEQ ID NO: 506023 - RNA, 22 nt, Human
ucaggcucaggaauguguuuau

SEQ ID NO: 506024 - RNA, 22 nt, Human
acuggggaauggaacugggaau

SEQ ID NO: 506025 - RNA, 22 nt, Human
cccagcacuuugaauaugucac

SEQ ID NO: 506026 - RNA, 22 nt, Human
cauacagaaaauauauuuugau

SEQ ID NO: 506027 - RNA, 22 nt, Human
uacagcaugaucacaauggaaa

SEQ ID NO: 506028 - RNA, 22 nt, Human
uuaucaguuguguguauacacg

SEQ ID NO: 506029 - RNA, 22 nt, Human
gcucugggugaaggguaccauu

SEQ ID NO: 506030 - RNA, 22 nt, Human
auaucuuuguaugguucagcag

SEQ ID NO: 506031 - RNA, 22 nt, Human
ccugggagugucagacuugcuu

SEQ ID NO: 506032 - RNA, 22 nt, Human
uguuauugagguuacuuauaag

SEQ ID NO: 506033 - RNA, 23 nt, Human
ucacauaauccuucauccacagg

SEQ ID NO: 506034 - RNA, 22 nt, Human
ucacagaauagcacuguaagcg

SEQ ID NO: 506035 - RNA, 22 nt, Human
aucuggcucuuccuggaguucc

SEQ ID NO: 506036 - RNA, 22 nt, Human
uagggcagauucgguggaguuu

SEQ ID NO: 506037 - RNA, 22 nt, Human
gcucuggacuggggccugagaa

SEQ ID NO: 506038 - RNA, 22 nt, Human
caaggaaacaugaaaugcauug

SEQ ID NO: 506039 - RNA, 23 nt, Human
uagagcagggaaaucugucagag

SEQ ID NO: 506040 - RNA, 22 nt, Human
uuggcuucuugugaaaucugag

SEQ ID NO: 506041 - RNA, 22 nt, Human
ccaaggcuccucagcuggucuu

SEQ ID NO: 506042 - RNA, 22 nt, Human
uuagagaauuccaaaugacuac

SEQ ID NO: 506043 - RNA, 22 nt, Human
ggagccuguggcugcuugaagc

SEQ ID NO: 506044 - RNA, 22 nt, Human
agggucuguauuucuggcaagc

SEQ ID NO: 506045 - RNA, 22 nt, Human
aagugaaacauguaucucuuua

SEQ ID NO: 506046 - RNA, 22 nt, Human
gcucucuguuauuaagaucuuu

SEQ ID NO: 506047 - RNA, 22 nt, Human
accagacacugugaagacaggc

SEQ ID NO: 506048 - RNA, 22 nt, Human
ggcagcuccaaaaggaaacacu

SEQ ID NO: 506049 - RNA, 22 nt, Human
caaagugcugagauuacaggua

SEQ ID NO: 506050 - RNA, 22 nt, Human
aagagacuauggugucuaugaa

SEQ ID NO: 506051 - RNA, 22 nt, Human
ggcuucuggugggagcaugacu

SEQ ID NO: 506052 - RNA, 19 nt, Human
ucuguggccuucccugaug

SEQ ID NO: 506053 - RNA, 22 nt, Human
gaggccuggcucugcccuccug

SEQ ID NO: 506054 - RNA, 22 nt, Human
gcugagcugggacaguccuggg

SEQ ID NO: 506055 - RNA, 22 nt, Human
cuggcccuucucuugcuuccug

SEQ ID NO: 506056 - RNA, 22 nt, Human
ggucucagaucuuuauuaaggc

SEQ ID NO: 506057 - RNA, 22 nt, Human
ggggacaguuaaagaccaagac

SEQ ID NO: 506058 - RNA, 22 nt, Human
uggcugaguuccuggcacacgg

SEQ ID NO: 506059 - RNA, 22 nt, Human
cucugcaacuucuagcaguguc

SEQ ID NO: 506060 - RNA, 22 nt, Human
aacaaagaugggugggaaagag

SEQ ID NO: 506061 - RNA, 22 nt, Human
agguccuguuucuucccugggg

SEQ ID NO: 506062 - RNA, 22 nt, Human
gccuucugcgcucgugucuccg

SEQ ID NO: 506063 - RNA, 22 nt, Human
gccuugccucagccauggaaac

SEQ ID NO: 506064 - RNA, 22 nt, Human
ucccggcgcugggagguggguc

SEQ ID NO: 506065 - RNA, 22 nt, Human
gcaggugggggucggugcaucu

SEQ ID NO: 506066 - RNA, 22 nt, Human
cccaggccccagggcuugucag

SEQ ID NO: 506067 - RNA, 23 nt, Human
acugccaguuuuaccacagacgg

SEQ ID NO: 506068 - RNA, 22 nt, Human
ugaaaaggguagaucccuaagu

SEQ ID NO: 506069 - RNA, 22 nt, Human
ugccagccuggccugagucuuu

SEQ ID NO: 506070 - RNA, 22 nt, Human
cagugcagucaaggaagaacca

SEQ ID NO: 506071 - RNA, 22 nt, Human
ggcugccugaggcugaggcccg

SEQ ID NO: 506072 - RNA, 22 nt, Human
gggaaauugucaacacucucaa

SEQ ID NO: 506073 - RNA, 19 nt, Human
guaagggcuaauggacuau

SEQ ID NO: 506074 - RNA, 22 nt, Human
ugcucaucaacaugaugaucau

SEQ ID NO: 506075 - RNA, 22 nt, Human
gucaccagugcuaagaggugga

SEQ ID NO: 506076 - RNA, 22 nt, Human
cccagcauccucagggagcggg

SEQ ID NO: 506077 - RNA, 22 nt, Human
cagagguacaagcuaaguuggg

SEQ ID NO: 506078 - RNA, 21 nt, Human
auuauuauuucuguguccagc

SEQ ID NO: 506079 - RNA, 22 nt, Human
uguggaaaauuggaacguuccu

SEQ ID NO: 506080 - RNA, 22 nt, Human
gcagggcagugugucugugggg

SEQ ID NO: 506081 - RNA, 22 nt, Human
uggcugcugagaaggcagcugu

SEQ ID NO: 506082 - RNA, 22 nt, Human
agggaccugcucacugccuggc

SEQ ID NO: 506083 - RNA, 22 nt, Human
guguccugaucaauugagcugg

SEQ ID NO: 506084 - RNA, 22 nt, Human
accagagcgcucaagccuuccc

SEQ ID NO: 506085 - RNA, 22 nt, Human
gugaccaucagagaauaacaaa

SEQ ID NO: 506086 - RNA, 22 nt, Human
gcaaggaccuuugagcgugcca

SEQ ID NO: 506087 - RNA, 22 nt, Human
acaacugucaguaaagaauauu

SEQ ID NO: 506088 - RNA, 22 nt, Human
guuucuaagcacaugugagugu

SEQ ID NO: 506089 - RNA, 22 nt, Human
acuuaaaaccagacagcgucau

SEQ ID NO: 506090 - RNA, 20 nt, Human
aacacagauaccaaagguug

SEQ ID NO: 506091 - RNA, 22 nt, Human
uggcuacaucacagagaauucc

SEQ ID NO: 506092 - RNA, 22 nt, Human
uccuggagauaauugcagugaa

SEQ ID NO: 506093 - RNA, 22 nt, Human
aggggcuggcuuaucugagagu

SEQ ID NO: 506094 - RNA, 22 nt, Human
cacagcauaaugaaauauacuu

SEQ ID NO: 506095 - RNA, 22 nt, Human
uccaggcauguggccaguacuc

SEQ ID NO: 506096 - RNA, 22 nt, Human
cucucugggggccaugccaaga

SEQ ID NO: 506097 - RNA, 22 nt, Human
ucuuugcaacucccauuuccau

SEQ ID NO: 506098 - RNA, 22 nt, Human
cuagucacuguaauaaucugcu

SEQ ID NO: 506099 - RNA, 21 nt, Human
uucaaaguuugccuaaagauu

SEQ ID NO: 506100 - RNA, 22 nt, Human
ggucucagcaguugcuuugacu

SEQ ID NO: 506101 - RNA, 22 nt, Human
ugaggcaggaugcuugcacagg

SEQ ID NO: 506102 - RNA, 22 nt, Human
cucucugaggcaggccuguggg

SEQ ID NO: 506103 - RNA, 22 nt, Human
ggccucagggucacucuguaga

SEQ ID NO: 506104 - RNA, 22 nt, Human
auaaggcaagcugucaguuugu

SEQ ID NO: 506105 - RNA, 22 nt, Human
ccuuccaggagucucugcaggu

SEQ ID NO: 506106 - RNA, 22 nt, Human
cagcuggcccuuugguagccuu

SEQ ID NO: 506107 - RNA, 22 nt, Human
uuccaggaauucagcucucagu

SEQ ID NO: 506108 - RNA, 22 nt, Human
gccucccuguucuuccacaaua

SEQ ID NO: 506109 - RNA, 22 nt, Human
gccuggcucugaguuucucucc

SEQ ID NO: 506110 - RNA, 22 nt, Human
guguccugggggacuucagguu

SEQ ID NO: 506111 - RNA, 19 nt, Human
agcauuuggaauucuacac

SEQ ID NO: 506112 - RNA, 22 nt, Human
ugggaguguucuuggcuugcuu

SEQ ID NO: 506113 - RNA, 22 nt, Human
cugcagcuuuggaaaccuguuu

SEQ ID NO: 506114 - RNA, 22 nt, Human
cacagcagaaauaugaaggcag

SEQ ID NO: 506115 - RNA, 22 nt, Human
gccagggaggcuguaggguccu

SEQ ID NO: 506116 - RNA, 21 nt, Human
agcugggccucagccugcagu

SEQ ID NO: 506117 - RNA, 22 nt, Human
gagcagggccacuucuguaccu

SEQ ID NO: 506118 - RNA, 22 nt, Human
agggaagaaaauccaucgcugc

SEQ ID NO: 506119 - RNA, 22 nt, Human
uccuucagauuccugcuucugg

SEQ ID NO: 506120 - RNA, 22 nt, Human
ucuggcuccaccuccuuuacua

SEQ ID NO: 506121 - RNA, 22 nt, Human
agugaguggguuacagauggga

SEQ ID NO: 506122 - RNA, 22 nt, Human
ugggcagaguagcucagaagaa

SEQ ID NO: 506123 - RNA, 22 nt, Human
uuucuauuggcgucacuguugu

SEQ ID NO: 506124 - RNA, 22 nt, Human
uuuugcuuuuguaacacagugu

SEQ ID NO: 506125 - RNA, 22 nt, Human
aagacaauuugauacuaguugc

SEQ ID NO: 506126 - RNA, 22 nt, Human
uccugcaggggcugaggaacca

SEQ ID NO: 506127 - RNA, 22 nt, Human
acucugggagaggacaaacaaa

SEQ ID NO: 506128 - RNA, 22 nt, Human
agcuccugucucaagggagccu

SEQ ID NO: 506129 - RNA, 20 nt, Human
cuguagggugcagcaggcuc

SEQ ID NO: 506130 - RNA, 22 nt, Human
guggauggauugaggcaguggg

SEQ ID NO: 506131 - RNA, 22 nt, Human
cagcuuuaccaauauuuggaaa

SEQ ID NO: 506132 - RNA, 22 nt, Human
gagcucaggagcaucagaagaa

SEQ ID NO: 506133 - RNA, 22 nt, Human
gccagaucugacauaguggaag

SEQ ID NO: 506134 - RNA, 22 nt, Human
ggccacagagggcgggaugcug

SEQ ID NO: 506135 - RNA, 22 nt, Human
uucaagugaggcugucuuuaga

SEQ ID NO: 506136 - RNA, 22 nt, Human
aaauuagaagugcucaggaaua

SEQ ID NO: 506137 - RNA, 20 nt, Human
aauuagauguuuaaucaaua

SEQ ID NO: 506138 - RNA, 22 nt, Human
auuccuugggcugccuuauuau

SEQ ID NO: 506139 - RNA, 22 nt, Human
uugggguguuggauggagcaag

SEQ ID NO: 506140 - RNA, 22 nt, Human
uucuggcaucugggggaggccu

SEQ ID NO: 506141 - RNA, 22 nt, Human
agcugccagggacugggcaugg

SEQ ID NO: 506142 - RNA, 22 nt, Human
cagagacaggaaucagcugcag

SEQ ID NO: 506143 - RNA, 22 nt, Human
auacagcaguuugugauccuag

SEQ ID NO: 506144 - RNA, 22 nt, Human
guucuuaagaccacaauaaaaa

SEQ ID NO: 506145 - RNA, 22 nt, Human
ccagcucucuguccuccccaca

SEQ ID NO: 506146 - RNA, 22 nt, Human
ucagccuggcaggauggccugg

SEQ ID NO: 506147 - RNA, 22 nt, Human
agcaccuucacaggcucucagg

SEQ ID NO: 506148 - RNA, 22 nt, Human
cucuguccuugcacaguuccua

SEQ ID NO: 506149 - RNA, 22 nt, Human
gagguucacaggcuaucacagu

SEQ ID NO: 506150 - RNA, 22 nt, Human
acugggccuacccagauuggca

SEQ ID NO: 506151 - RNA, 22 nt, Human
agagugggugaucucuguuguc

SEQ ID NO: 506152 - RNA, 22 nt, Human
ccauuccaugugcuacacauaa

SEQ ID NO: 506153 - RNA, 22 nt, Human
agaugaaaagauaagcagcaau

SEQ ID NO: 506154 - RNA, 22 nt, Human
acggcuucuugacuguggguug

SEQ ID NO: 506155 - RNA, 22 nt, Human
agagcagcugcauucagcaccu

SEQ ID NO: 506156 - RNA, 22 nt, Human
aaggcugaaagaccuugaaccu

SEQ ID NO: 506157 - RNA, 22 nt, Human
ugggggcauggaccagccuggc

SEQ ID NO: 506158 - RNA, 22 nt, Human
uucaugaaaguguaucuugugg

SEQ ID NO: 506159 - RNA, 22 nt, Human
ugaauaugugacuuugauuuca

SEQ ID NO: 506160 - RNA, 22 nt, Human
caggccagguggcaggcaaaac

SEQ ID NO: 506161 - RNA, 22 nt, Human
gaggaaaagagacagguuauug

SEQ ID NO: 506162 - RNA, 23 nt, Human
uugcuucugugcaauucaguacu

SEQ ID NO: 506163 - RNA, 22 nt, Human
gaguaagagcuggcuuuggugu

SEQ ID NO: 506164 - RNA, 22 nt, Human
cagguucagcaggaggcauccc

SEQ ID NO: 506165 - RNA, 22 nt, Human
gaaggagcuaaagggagcccug

SEQ ID NO: 506166 - RNA, 22 nt, Human
ucucaggccccugaguuucucu

SEQ ID NO: 506167 - RNA, 22 nt, Human
uauuugugagacugacugaagu

SEQ ID NO: 506168 - RNA, 22 nt, Human
uuugaaagaaaccagugaguga

SEQ ID NO: 506169 - RNA, 22 nt, Human
gccaggcugaggcucuggaaga

SEQ ID NO: 506170 - RNA, 22 nt, Human
aaaugugugcacaaagacagcu

SEQ ID NO: 506171 - RNA, 22 nt, Human
agagcccucucauuggcuuauu

SEQ ID NO: 506172 - RNA, 22 nt, Human
ccuaggcccucaaagagcauaa

SEQ ID NO: 506173 - RNA, 19 nt, Human
ccugugugggguagagauc

SEQ ID NO: 506174 - RNA, 19 nt, Human
gagggcucauuugaacaau

SEQ ID NO: 506175 - RNA, 22 nt, Human
uuguguuucccuugcauauucc

SEQ ID NO: 506176 - RNA, 22 nt, Human
ggccacagaacagcuacaggac

SEQ ID NO: 506177 - RNA, 22 nt, Human
acagaaauauucguggugcuug

SEQ ID NO: 506178 - RNA, 22 nt, Human
ugaccaaaggugguuuauuugg

SEQ ID NO: 506179 - RNA, 22 nt, Human
ccagggcacuuaggcccagccc

SEQ ID NO: 506180 - RNA, 22 nt, Human
ccugaagagcacucuagaguug

SEQ ID NO: 506181 - RNA, 22 nt, Human
acauuucugagcagggagcugu

SEQ ID NO: 506182 - RNA, 23 nt, Human
ggcucugugcugggccugcagga

SEQ ID NO: 506183 - RNA, 22 nt, Human
ggcugggagcuggacaggccgg

SEQ ID NO: 506184 - RNA, 22 nt, Human
auaaacaguaaaugugagcagu

SEQ ID NO: 506185 - RNA, 22 nt, Human
agagaugaagggcauuccccag

SEQ ID NO: 506186 - RNA, 22 nt, Human
gacagguggggaaacuaaggua

SEQ ID NO: 506187 - RNA, 22 nt, Human
ggccuaguuuuuucugguaggu

SEQ ID NO: 506188 - RNA, 19 nt, Human
augucuguugaauuucaua

SEQ ID NO: 506189 - RNA, 22 nt, Human
ggcgugggaaguggggcuucug

SEQ ID NO: 506190 - RNA, 22 nt, Human
guguguucagcaagagguaagg

SEQ ID NO: 506191 - RNA, 22 nt, Human
caugaaaaugucaaguucugcu

SEQ ID NO: 506192 - RNA, 21 nt, Human
aacaaagggaugcucaucuuu

SEQ ID NO: 506193 - RNA, 22 nt, Human
gugcaugugucuuuauaguagc

SEQ ID NO: 506194 - RNA, 21 nt, Human
acacagaggcaucaucacuuu

SEQ ID NO: 506195 - RNA, 22 nt, Human
aaggguccaaggcuuugcguuu

SEQ ID NO: 506196 - RNA, 22 nt, Human
acuccuggggcugccaucacag

SEQ ID NO: 506197 - RNA, 22 nt, Human
caguauguacucuuaucaugua

SEQ ID NO: 506198 - RNA, 22 nt, Human
uugaaagaggcaaaguuugauc

SEQ ID NO: 506199 - RNA, 22 nt, Human
cagccagcuggugcggcagagc

SEQ ID NO: 506200 - RNA, 22 nt, Human
gugggggcuggcucguccugug

SEQ ID NO: 506201 - RNA, 22 nt, Human
cccugcagccggccagcucauu

SEQ ID NO: 506202 - RNA, 22 nt, Human
agagccccugguggagugagaa

SEQ ID NO: 506203 - RNA, 22 nt, Human
cuguccccgcgaguccagagcu

SEQ ID NO: 506204 - RNA, 20 nt, Human
uaugcuuuuuauaagauuga

SEQ ID NO: 506205 - RNA, 22 nt, Human
ugucacuuuggggagaguuuug

SEQ ID NO: 506206 - RNA, 22 nt, Human
ugccuggcaccccagucugcac

SEQ ID NO: 506207 - RNA, 22 nt, Human
uguaaacauauguauguaugua

SEQ ID NO: 506208 - RNA, 22 nt, Human
ggaggaugccaagcugugcaca

SEQ ID NO: 506209 - RNA, 22 nt, Human
auaccuuuuagacauguaguug

SEQ ID NO: 506210 - RNA, 22 nt, Human
ugucaaaaauaagagagauugu

SEQ ID NO: 506211 - RNA, 22 nt, Human
ugaggcaggacugagcgggaug

SEQ ID NO: 506212 - RNA, 22 nt, Human
ugugaauguauaguuuguauau

SEQ ID NO: 506213 - RNA, 22 nt, Human
uauuucuauuccccaggcaagu

SEQ ID NO: 506214 - RNA, 22 nt, Human
gucagaucuuuggggaugcugu

SEQ ID NO: 506215 - RNA, 19 nt, Human
ggcaccuuggucuuggacu

SEQ ID NO: 506216 - RNA, 22 nt, Human
uucuuuaucaguuacucauagg

SEQ ID NO: 506217 - RNA, 22 nt, Human
cuuaaauucuuaaugcccucau

SEQ ID NO: 506218 - RNA, 22 nt, Human
gcucuggcagcugauauuagga

SEQ ID NO: 506219 - RNA, 22 nt, Human
gaggcccuccagcugucagcug

SEQ ID NO: 506220 - RNA, 22 nt, Human
augcaccugaacuccaucagcu

SEQ ID NO: 506221 - RNA, 22 nt, Human
ugccagcccaccuuggggccuc

SEQ ID NO: 506222 - RNA, 17 nt, Human
gcuucuggagcuucugu

SEQ ID NO: 506223 - RNA, 22 nt, Human
augcuauacauaugacaucaca

SEQ ID NO: 506224 - RNA, 22 nt, Human
ggguccagaaugagaaugggcu

SEQ ID NO: 506225 - RNA, 22 nt, Human
uuguccuugugauaguuugcug

SEQ ID NO: 506226 - RNA, 22 nt, Human
cacacugucagguaaauaacac

SEQ ID NO: 506227 - RNA, 22 nt, Human
aaugauggauuuagacaagcug

SEQ ID NO: 506228 - RNA, 22 nt, Human
gccuuucaguuccaucaaagga

SEQ ID NO: 506229 - RNA, 22 nt, Human
uaaaucacccaucuccuaaucu

SEQ ID NO: 506230 - RNA, 22 nt, Human
ggcacagagcccagcuuccuag

SEQ ID NO: 506231 - RNA, 22 nt, Human
gcucugagaggaugcugagcag

SEQ ID NO: 506232 - RNA, 23 nt, Human
aacagccaacuuuagcggguggc

SEQ ID NO: 506233 - RNA, 22 nt, Human
aggacucaucccugcuugucag

SEQ ID NO: 506234 - RNA, 22 nt, Human
uggagcugauacagcuggcuuu

SEQ ID NO: 506235 - RNA, 22 nt, Human
aagccagguuccauggaggagc

SEQ ID NO: 506236 - RNA, 22 nt, Human
gaggccuggaccagccacagag

SEQ ID NO: 506237 - RNA, 22 nt, Human
guggcagcggcccaggccgucu

SEQ ID NO: 506238 - RNA, 22 nt, Human
agcugcucucacuggacgccug

SEQ ID NO: 506239 - RNA, 22 nt, Human
cugaaacauugcaauaacaaag

SEQ ID NO: 506240 - RNA, 22 nt, Human
uaugagaaagucguaugucucc

SEQ ID NO: 506241 - RNA, 21 nt, Human
uggcagguucaaaggccuauc

SEQ ID NO: 506242 - RNA, 22 nt, Human
cugaagccaugugcucacuggu

SEQ ID NO: 506243 - RNA, 22 nt, Human
cccuggagugccggaaucaaga

SEQ ID NO: 506244 - RNA, 22 nt, Human
uugcuaauaaaguuuuuaugug

SEQ ID NO: 506245 - RNA, 22 nt, Human
uuaaauugucauuugagcaaug

SEQ ID NO: 506246 - RNA, 22 nt, Human
uacauguguucuguuucaaguu

SEQ ID NO: 506247 - RNA, 22 nt, Human
gaugggggccagggccugcuuu

SEQ ID NO: 506248 - RNA, 22 nt, Human
ggacaggcccggggagccugga

SEQ ID NO: 506249 - RNA, 22 nt, Human
cucuugggagugcucuggagaa

SEQ ID NO: 506250 - RNA, 22 nt, Human
uccuuccuggggucucugcugc

SEQ ID NO: 506251 - RNA, 22 nt, Human
gccuggcuuuugccucauguuc

SEQ ID NO: 506252 - RNA, 23 nt, Human
uuacuuuugcaccaaccuaauau

SEQ ID NO: 506253 - RNA, 22 nt, Human
aggggccugguuggccucuguu

SEQ ID NO: 506254 - RNA, 22 nt, Human
cagaggcauacucccagucuug

SEQ ID NO: 506255 - RNA, 22 nt, Human
auuaaauuuucacuaggcuccc

SEQ ID NO: 506256 - RNA, 22 nt, Human
aggcucagagagcuguguccau

SEQ ID NO: 506257 - RNA, 23 nt, Human
gugcacagucaagcccagcuuag

SEQ ID NO: 506258 - RNA, 22 nt, Human
agcacagagguggaaguguaua

SEQ ID NO: 506259 - RNA, 22 nt, Human
aucuggcuauugacauguuaua

SEQ ID NO: 506260 - RNA, 22 nt, Human
ugugugccugagccgugccugg

SEQ ID NO: 506261 - RNA, 22 nt, Human
ucagcucuaccugggagcuguc

SEQ ID NO: 506262 - RNA, 22 nt, Human
agcaugcacaugacuggcuuaa

SEQ ID NO: 506263 - RNA, 22 nt, Human
ugcccuggaaccaucuacaguc

SEQ ID NO: 506264 - RNA, 22 nt, Human
cugggucucuuuagggugccgu

SEQ ID NO: 506265 - RNA, 22 nt, Human
gccuucaggaggguuccagaca

SEQ ID NO: 506266 - RNA, 22 nt, Human
ucugggagguguuuugagaacu

SEQ ID NO: 506267 - RNA, 22 nt, Human
aagggcucucugcauugaaauu

SEQ ID NO: 506268 - RNA, 22 nt, Human
ucagagaguuagugucuuagcu

SEQ ID NO: 506269 - RNA, 22 nt, Human
ccagggcaggggcuggaguuca

SEQ ID NO: 506270 - RNA, 22 nt, Human
guauuaggugguggaauuguag

SEQ ID NO: 506271 - RNA, 22 nt, Human
gaauuagacaugcuuugcuuuu

SEQ ID NO: 506272 - RNA, 22 nt, Human
ugggggugugccagggaccucc

SEQ ID NO: 506273 - RNA, 22 nt, Human
gcucagugguauucggaaacug

SEQ ID NO: 506274 - RNA, 22 nt, Human
ucccacaugugaauccucaggu

SEQ ID NO: 506275 - RNA, 22 nt, Human
gcugggcucaccaggccacuag

SEQ ID NO: 506276 - RNA, 22 nt, Human
cagcccuggugccaagguuccc

SEQ ID NO: 506277 - RNA, 19 nt, Human
uagucuuuauucuuaauuu

SEQ ID NO: 506278 - RNA, 22 nt, Human
agucaguuaaccucacagcauc

SEQ ID NO: 506279 - RNA, 22 nt, Human
auuuauaacgugcagccagggu

SEQ ID NO: 506280 - RNA, 22 nt, Human
aaaguguugggauuacaggugu

SEQ ID NO: 506281 - RNA, 22 nt, Human
uucaaaccuaucuaagaaauag

SEQ ID NO: 506282 - RNA, 22 nt, Human
gcacuaguguucuucaguaaua

SEQ ID NO: 506283 - RNA, 22 nt, Human
acucccacuccagaguagaagc

SEQ ID NO: 506284 - RNA, 22 nt, Human
ccagggccugccacuuagcaag

SEQ ID NO: 506285 - RNA, 19 nt, Human
uuacaucugcaacacuggu

SEQ ID NO: 506286 - RNA, 22 nt, Human
ggcugaggguauagcuguccca

SEQ ID NO: 506287 - RNA, 22 nt, Human
caauaguaaauuacggaggaga

SEQ ID NO: 506288 - RNA, 22 nt, Human
uggcucaguuccaucaucugga

SEQ ID NO: 506289 - RNA, 22 nt, Human
auuucccuccagggaaagcuua

SEQ ID NO: 506290 - RNA, 22 nt, Human
gcuuccuaaaugcacagggcag

SEQ ID NO: 506291 - RNA, 22 nt, Human
uuauuucauugauuucuaagac

SEQ ID NO: 506292 - RNA, 22 nt, Human
uuucuacagaagauacacugcu

SEQ ID NO: 506293 - RNA, 22 nt, Human
gccaggcagcuagcaaccccug

SEQ ID NO: 506294 - RNA, 22 nt, Human
uuguccugcagguggcugggag

SEQ ID NO: 506295 - RNA, 22 nt, Human
caagggaguuacugagggcggg

SEQ ID NO: 506296 - RNA, 22 nt, Human
acauuuuuuagagucccacauu

SEQ ID NO: 506297 - RNA, 22 nt, Human
cugccugggccggccacccucu

SEQ ID NO: 506298 - RNA, 22 nt, Human
ucuggagcuuccucauuuacag

SEQ ID NO: 506299 - RNA, 22 nt, Human
acuuuggguaagccaggugcua

SEQ ID NO: 506300 - RNA, 22 nt, Human
uccaggagaccagauguaggcc

SEQ ID NO: 506301 - RNA, 22 nt, Human
ugggcagacgcuguuggaaggc

SEQ ID NO: 506302 - RNA, 19 nt, Human
uggcaucuguaaaauggug

SEQ ID NO: 506303 - RNA, 22 nt, Human
cucaguccgucccgcuaggugc

SEQ ID NO: 506304 - RNA, 22 nt, Human
uugggcuggcccuugucucugg

SEQ ID NO: 506305 - RNA, 22 nt, Human
ugaaggagcucaggagauaguc

SEQ ID NO: 506306 - RNA, 22 nt, Human
caucucugguucagucucugug

SEQ ID NO: 506307 - RNA, 23 nt, Human
aggcccaacucugugagggcugc

SEQ ID NO: 506308 - RNA, 22 nt, Human
gcugggcccugggugcccuagc

SEQ ID NO: 506309 - RNA, 22 nt, Human
uccugguguuuaugucacauag

SEQ ID NO: 506310 - RNA, 23 nt, Human
cucccuggcccuugggagaccug

SEQ ID NO: 506311 - RNA, 22 nt, Human
uagguucaggagauauugcaca

SEQ ID NO: 506312 - RNA, 22 nt, Human
uacagcuugacccauaaugucu

SEQ ID NO: 506313 - RNA, 20 nt, Human
uuggagucuaaagacugggg

SEQ ID NO: 506314 - RNA, 22 nt, Human
aagucaaucacaugcacacuga

SEQ ID NO: 506315 - RNA, 22 nt, Human
ugcagcaccacaccuggcuaau

SEQ ID NO: 506316 - RNA, 22 nt, Human
ggcugagcuuauauaugugcug

SEQ ID NO: 506317 - RNA, 22 nt, Human
guccaggaagcaauaaauagaa

SEQ ID NO: 506318 - RNA, 22 nt, Human
cauugcugugggcauuugcugc

SEQ ID NO: 506319 - RNA, 22 nt, Human
uuauguacaauguuaauguaaa

SEQ ID NO: 506320 - RNA, 22 nt, Human
gcucaggaaaacagucuaguaa

SEQ ID NO: 506321 - RNA, 18 nt, Human
uggccccuuaucaguccu

SEQ ID NO: 506322 - RNA, 22 nt, Human
gcaaaaaccacaauuacuuuug

SEQ ID NO: 506323 - RNA, 22 nt, Human
acaggucuacuggcaagcagug

SEQ ID NO: 506324 - RNA, 20 nt, Human
agacccuguguccuguggcc

SEQ ID NO: 506325 - RNA, 22 nt, Human
ggagacacuggaaaguauuaca

SEQ ID NO: 506326 - RNA, 22 nt, Human
guucuuuaaguggagaaggaaa

SEQ ID NO: 506327 - RNA, 22 nt, Human
ugcuauugugaacagugccaca

SEQ ID NO: 506328 - RNA, 22 nt, Human
ucuggggaccauggcaucuaaa

SEQ ID NO: 506329 - RNA, 22 nt, Human
ccggcgggcgcggugacgucag

SEQ ID NO: 506330 - RNA, 21 nt, Human
acagaugugauaugcagucuu

SEQ ID NO: 506331 - RNA, 22 nt, Human
ggagccagcagggugacacuga

SEQ ID NO: 506332 - RNA, 20 nt, Human
uucacagaggacucagguca

SEQ ID NO: 506333 - RNA, 22 nt, Human
ugcaauaaggaguaauaguaaa

SEQ ID NO: 506334 - RNA, 22 nt, Human
ugaauucuuaaugaaaucuacu

SEQ ID NO: 506335 - RNA, 22 nt, Human
agccugugugcuuuggacaggg

SEQ ID NO: 506336 - RNA, 22 nt, Human
cugucagagauggggagucaga

SEQ ID NO: 506337 - RNA, 22 nt, Human
gauauuuucauucggaugcuca

SEQ ID NO: 506338 - RNA, 22 nt, Human
uccugggucugggugucugagg

SEQ ID NO: 506339 - RNA, 22 nt, Human
gugcacagagcccagggccgcg

SEQ ID NO: 506340 - RNA, 22 nt, Human
caaaaguaauugcaguuuuugc

SEQ ID NO: 506341 - RNA, 22 nt, Human
uccugccucuuuucuuauucca

SEQ ID NO: 506342 - RNA, 22 nt, Human
ucagaaagcuauaugguguguc

SEQ ID NO: 506343 - RNA, 18 nt, Human
caggucugucugccuccc

SEQ ID NO: 506344 - RNA, 22 nt, Human
ugggcuuuaucaugggucuggu

SEQ ID NO: 506345 - RNA, 22 nt, Human
uagcuuuaagaugagaugugga

SEQ ID NO: 506346 - RNA, 21 nt, Human
uauuagcuucuggugcuguuu

SEQ ID NO: 506347 - RNA, 22 nt, Human
aagcacagagagguaaaguaac

SEQ ID NO: 506348 - RNA, 22 nt, Human
aaaugaguagcgaugcacauua

SEQ ID NO: 506349 - RNA, 22 nt, Human
acucuggcgggcgggcgagcca

SEQ ID NO: 506350 - RNA, 22 nt, Human
aguuccagaacuggaaaaggac

SEQ ID NO: 506351 - RNA, 22 nt, Human
uggcccugcugggucagagcug

SEQ ID NO: 506352 - RNA, 22 nt, Human
gccugcuggcuguccauugcag

SEQ ID NO: 506353 - RNA, 22 nt, Human
cccagccuggugcacugugggg

SEQ ID NO: 506354 - RNA, 22 nt, Human
uccuucuccuccuugagugaca

SEQ ID NO: 506355 - RNA, 22 nt, Human
aggaauggugcucagcagaaau

SEQ ID NO: 506356 - RNA, 22 nt, Human
uaauguguccugaaagcuucug

SEQ ID NO: 506357 - RNA, 22 nt, Human
auguucuacagauggaaagggg

SEQ ID NO: 506358 - RNA, 17 nt, Human
uccuggcucugccacug

SEQ ID NO: 506359 - RNA, 22 nt, Human
cugucucaagacugcaggcacu

SEQ ID NO: 506360 - RNA, 22 nt, Human
uacauagaggguaauagcauca

SEQ ID NO: 506361 - RNA, 22 nt, Human
aagagccuggcugcuaggcuca

SEQ ID NO: 506362 - RNA, 22 nt, Human
ccaguccugccacccugucuau

SEQ ID NO: 506363 - RNA, 23 nt, Human
cugcagccgcguggggacgugga

SEQ ID NO: 506364 - RNA, 22 nt, Human
ccucauggaccucagacugucc

SEQ ID NO: 506365 - RNA, 22 nt, Human
uuagggcuuuucugaauaggcc

SEQ ID NO: 506366 - RNA, 22 nt, Human
gaaugcuauuauuucugugugu

SEQ ID NO: 506367 - RNA, 22 nt, Human
augggcugggaucugaguguca

SEQ ID NO: 506368 - RNA, 22 nt, Human
ucagacugcugucccugccugg

SEQ ID NO: 506369 - RNA, 19 nt, Human
uccugcagaccagaccugu

SEQ ID NO: 506370 - RNA, 22 nt, Human
ggucccaggaaucuguguucua

SEQ ID NO: 506371 - RNA, 22 nt, Human
ucagcuuucucagaggccuaac

SEQ ID NO: 506372 - RNA, 22 nt, Human
uagguccagcacgguguagcuu

SEQ ID NO: 506373 - RNA, 22 nt, Human
aggcugucugaccccagagccc

SEQ ID NO: 506374 - RNA, 22 nt, Human
ucccagggacaccaagcuguuu

SEQ ID NO: 506375 - RNA, 22 nt, Human
cuggccuuuuguuucuggagaa

SEQ ID NO: 506376 - RNA, 22 nt, Human
gcuucucucaggagcaucagcc

SEQ ID NO: 506377 - RNA, 22 nt, Human
gcugucccgcugacuuccagcu

SEQ ID NO: 506378 - RNA, 22 nt, Human
uaaauuguuuucuagaaguugu

SEQ ID NO: 506379 - RNA, 22 nt, Human
cagacuuucaaggagugaaggc

SEQ ID NO: 506380 - RNA, 22 nt, Human
gcagaggacacaggagggcaag

SEQ ID NO: 506381 - RNA, 22 nt, Human
uaaugcuuaauuuucacaagcc

SEQ ID NO: 506382 - RNA, 22 nt, Human
aaaaguauaggguuuggaguca

SEQ ID NO: 506383 - RNA, 22 nt, Human
gugggggcagugggcuucgagc

SEQ ID NO: 506384 - RNA, 22 nt, Human
agucucagcuacuugggaggcu

SEQ ID NO: 506385 - RNA, 22 nt, Human
acauucuagaagucuuugcaau

SEQ ID NO: 506386 - RNA, 22 nt, Human
uuccucagagggcgcuggggaa

SEQ ID NO: 506387 - RNA, 22 nt, Human
uauucacaggcuggagugaugu

SEQ ID NO: 506388 - RNA, 22 nt, Human
uguaugaauauguuggggaggu

SEQ ID NO: 506389 - RNA, 21 nt, Human
agcuuccugcagugggagguc

SEQ ID NO: 506390 - RNA, 22 nt, Human
gccuggcugaggccucugcuaa

SEQ ID NO: 506391 - RNA, 22 nt, Human
aauuagggaaaacauuugcuuu

SEQ ID NO: 506392 - RNA, 20 nt, Human
uucaaguugggucucuggcu

SEQ ID NO: 506393 - RNA, 22 nt, Human
auaccuguguauccacaagcgu

SEQ ID NO: 506394 - RNA, 22 nt, Human
augguccuuauggccgugauau

SEQ ID NO: 506395 - RNA, 22 nt, Human
auucagaauggcaaacuucuag

SEQ ID NO: 506396 - RNA, 20 nt, Human
uauuugaaauggccaagugu

SEQ ID NO: 506397 - RNA, 22 nt, Human
ugaagauauuuuaaaauacuga

SEQ ID NO: 506398 - RNA, 22 nt, Human
ugguuccaagauggcugccaca

SEQ ID NO: 506399 - RNA, 22 nt, Human
ugcagggccgcuggaggucaug

SEQ ID NO: 506400 - RNA, 22 nt, Human
agcagagcggggccuccggaag

SEQ ID NO: 506401 - RNA, 22 nt, Human
cuggucugcaaggccauauaga

SEQ ID NO: 506402 - RNA, 22 nt, Human
cccagggagguagcaggagaaa

SEQ ID NO: 506403 - RNA, 22 nt, Human
auucaagagcccauguuuccug

SEQ ID NO: 506404 - RNA, 22 nt, Human
uucaaacaaaacuguucccaua

SEQ ID NO: 506405 - RNA, 22 nt, Human
caggaacacaaguucagggaug

SEQ ID NO: 506406 - RNA, 22 nt, Human
acacauauaccacuguaaauga

SEQ ID NO: 506407 - RNA, 22 nt, Human
aaaugcagauuuugaugcagca

SEQ ID NO: 506408 - RNA, 23 nt, Human
gcucagaugcccuaggagguggc

SEQ ID NO: 506409 - RNA, 22 nt, Human
cagcuggcauaccugggcccgg

SEQ ID NO: 506410 - RNA, 22 nt, Human
ccagaagucaggaaugagucuu

SEQ ID NO: 506411 - RNA, 22 nt, Human
gugcccugacacaccuggugug

SEQ ID NO: 506412 - RNA, 22 nt, Human
ccagccaggcauugcaaacuga

SEQ ID NO: 506413 - RNA, 22 nt, Human
uagaaguucaugcgaauuauuu

SEQ ID NO: 506414 - RNA, 18 nt, Human
gggcccuggcguccgccc

SEQ ID NO: 506415 - RNA, 19 nt, Human
ugagagugaggaaggcuuc

SEQ ID NO: 506416 - RNA, 22 nt, Human
uugcagcuucaagcagguugac

SEQ ID NO: 506417 - RNA, 23 nt, Human
gguuccugagcagggaucuggaa

SEQ ID NO: 506418 - RNA, 22 nt, Human
cuggcucaauuuguacugcugu

SEQ ID NO: 506419 - RNA, 22 nt, Human
gucaggucuuggaagauaggcu

SEQ ID NO: 506420 - RNA, 23 nt, Human
cccuggagcuagucugagcagag

SEQ ID NO: 506421 - RNA, 22 nt, Human
agcccugguagccugcugccau

SEQ ID NO: 506422 - RNA, 22 nt, Human
uuguuuccuuucuauacaggau

SEQ ID NO: 506423 - RNA, 22 nt, Human
uuccugagaaauuuguaccugg

SEQ ID NO: 506424 - RNA, 22 nt, Human
gcucuuccauuucucuugaacu

SEQ ID NO: 506425 - RNA, 22 nt, Human
acagagauggcacagagaaggu

SEQ ID NO: 506426 - RNA, 22 nt, Human
ccuggccagcagccccuuccuc

SEQ ID NO: 506427 - RNA, 19 nt, Human
acagggcagcaauaggaua

SEQ ID NO: 506428 - RNA, 22 nt, Human
cugccugcugccuguggagggu

SEQ ID NO: 506429 - RNA, 22 nt, Human
ggcuuuauuaacucauccguaa

SEQ ID NO: 506430 - RNA, 22 nt, Human
auaaggaaugauguaucaguuu

SEQ ID NO: 506431 - RNA, 22 nt, Human
ggcugcagauagccagccacca

SEQ ID NO: 506432 - RNA, 22 nt, Human
cuacagcagagcuacacuaacu

SEQ ID NO: 506433 - RNA, 22 nt, Human
gggucuggagauccgggugaag

SEQ ID NO: 506434 - RNA, 22 nt, Human
ucagacagugugaucagucucu

SEQ ID NO: 506435 - RNA, 22 nt, Human
aguggugcugcgcgcggagcuc

SEQ ID NO: 506436 - RNA, 22 nt, Human
agcugaagcucagcccaguagu

SEQ ID NO: 506437 - RNA, 22 nt, Human
ccugucuguauugguuugcuau

SEQ ID NO: 506438 - RNA, 22 nt, Human
ugcuggcucaguuugcagacuc

SEQ ID NO: 506439 - RNA, 22 nt, Human
gccuugcuuugcuucuggacag

SEQ ID NO: 506440 - RNA, 21 nt, Human
uugaaaguaaauucagcagcu

SEQ ID NO: 506441 - RNA, 22 nt, Human
cacauacaaugguguuauuugg

SEQ ID NO: 506442 - RNA, 20 nt, Human
cucucuggaaggugggagcc

SEQ ID NO: 506443 - RNA, 22 nt, Human
cucaggguaaugaaagacgaau

SEQ ID NO: 506444 - RNA, 20 nt, Human
uccaagggcagcagaaucag

SEQ ID NO: 506445 - RNA, 22 nt, Human
acaaagucucuaauaaucuucu

SEQ ID NO: 506446 - RNA, 19 nt, Human
ucucagugccgcugaccgc

SEQ ID NO: 506447 - RNA, 17 nt, Human
gggugggcacugcuggc

SEQ ID NO: 506448 - RNA, 22 nt, Human
ccacuuugaaccacugaggugg

SEQ ID NO: 506449 - RNA, 22 nt, Human
cuggcucuuucagccgcuggag

SEQ ID NO: 506450 - RNA, 22 nt, Human
cauuugaugacucaacucauaa

SEQ ID NO: 506451 - RNA, 22 nt, Human
agggagccagaguugggagcuc

SEQ ID NO: 506452 - RNA, 22 nt, Human
uccucuggggucagggcacuac

SEQ ID NO: 506453 - RNA, 22 nt, Human
gacaugcauuaagacacacuga

SEQ ID NO: 506454 - RNA, 22 nt, Human
ugcugccaggucuugcugucca

SEQ ID NO: 506455 - RNA, 22 nt, Human
cucagaguccccacaucugggu

SEQ ID NO: 506456 - RNA, 21 nt, Human
aacauuucugggagaacucac

SEQ ID NO: 506457 - RNA, 23 nt, Human
caggcucccggaccaggauccgc

SEQ ID NO: 506458 - RNA, 22 nt, Human
ggcauagauuucuuuagguuua

SEQ ID NO: 506459 - RNA, 22 nt, Human
cccaggaccauccuucugugcc

SEQ ID NO: 506460 - RNA, 22 nt, Human
accccagguccagguuacagag

SEQ ID NO: 506461 - RNA, 18 nt, Human
ccuggagcuccacagcaa

SEQ ID NO: 506462 - RNA, 22 nt, Human
aagcugccaaugguaagcugcu

SEQ ID NO: 506463 - RNA, 22 nt, Human
uacauugaaagucauuuaaucc

SEQ ID NO: 506464 - RNA, 22 nt, Human
gccuggcugagguggggaggca

SEQ ID NO: 506465 - RNA, 22 nt, Human
cagaagaggacuggguagcuca

SEQ ID NO: 506466 - RNA, 22 nt, Human
uucagagaugacaccugguguu

SEQ ID NO: 506467 - RNA, 22 nt, Human
ucaauucuaguggagagaguuu

SEQ ID NO: 506468 - RNA, 22 nt, Human
ugcagagggacagccacagcuc

SEQ ID NO: 506469 - RNA, 22 nt, Human
ggccuuggguauagguggguau

SEQ ID NO: 506470 - RNA, 22 nt, Human
uccuuccugcaggccaaguccu

SEQ ID NO: 506471 - RNA, 22 nt, Human
guguuauuagagcauuaauuuu

SEQ ID NO: 506472 - RNA, 22 nt, Human
uccugugccuccaccugcuccg

SEQ ID NO: 506473 - RNA, 22 nt, Human
agcaggaaggucugugugaguc

SEQ ID NO: 506474 - RNA, 22 nt, Human
gccucugggcucugccccuggc

SEQ ID NO: 506475 - RNA, 22 nt, Human
acuggacagaggaaauauggag

SEQ ID NO: 506476 - RNA, 22 nt, Human
gucaaauauacuaagagguaaa

SEQ ID NO: 506477 - RNA, 22 nt, Human
uuccugggcuuuccccucuggu

SEQ ID NO: 506478 - RNA, 22 nt, Human
ugcaggcugugucauuuaguga

SEQ ID NO: 506479 - RNA, 22 nt, Human
gaggcucaccuagggagcacug

SEQ ID NO: 506480 - RNA, 22 nt, Human
uucaguguacagugaagggauu

SEQ ID NO: 506481 - RNA, 22 nt, Human
uuacauuuggcuauguccucua

SEQ ID NO: 506482 - RNA, 22 nt, Human
agccuggacagcuacggagaac

SEQ ID NO: 506483 - RNA, 22 nt, Human
acacacagaaggaagccccacu

SEQ ID NO: 506484 - RNA, 22 nt, Human
gcagcugauggaaguccuauug

SEQ ID NO: 506485 - RNA, 22 nt, Human
uuguugaauuaguugacugugu

SEQ ID NO: 506486 - RNA, 22 nt, Human
uugaaagggauauaucuuucug

SEQ ID NO: 506487 - RNA, 22 nt, Human
acuuugaaacuaaaauucauua

SEQ ID NO: 506488 - RNA, 22 nt, Human
agggcugcaggcaagauauggc

SEQ ID NO: 506489 - RNA, 22 nt, Human
cugggacagcugagacaggaga

SEQ ID NO: 506490 - RNA, 22 nt, Human
ugugaagguaaggaggggcaag

SEQ ID NO: 506491 - RNA, 21 nt, Human
ucccagagugcuugggacugc

SEQ ID NO: 506492 - RNA, 22 nt, Human
acacugaagagcacuuucaaag

SEQ ID NO: 506493 - RNA, 22 nt, Human
cugggugguucuaacuguugau

SEQ ID NO: 506494 - RNA, 22 nt, Human
caacagcuggaggcuuggcccg

SEQ ID NO: 506495 - RNA, 22 nt, Human
cagcucuguaaauuccuucauc

SEQ ID NO: 506496 - RNA, 22 nt, Human
ccugggcucugaggagggaguc

SEQ ID NO: 506497 - RNA, 22 nt, Human
cccagggauuauaaaggugaaa

SEQ ID NO: 506498 - RNA, 20 nt, Human
ugcucuggggguggagagac

SEQ ID NO: 506499 - RNA, 22 nt, Human
ggcucaggccagaccacgacuc

SEQ ID NO: 506500 - RNA, 22 nt, Human
cauuugugcuuuuauaaaauag

SEQ ID NO: 506501 - RNA, 22 nt, Human
cagcgcugugggaacagggcua

SEQ ID NO: 506502 - RNA, 22 nt, Human
agggcuuuugcaauccaagucu

SEQ ID NO: 506503 - RNA, 20 nt, Human
uuuuuccuucucuacaggca

SEQ ID NO: 506504 - RNA, 20 nt, Human
ucauuccaaauaguucagca

SEQ ID NO: 506505 - RNA, 22 nt, Human
augauacaucuucaugucagug

SEQ ID NO: 506506 - RNA, 22 nt, Human
gaggagagaagcuaacggugcu

SEQ ID NO: 506507 - RNA, 22 nt, Human
uguuuuaaagccauugccuuuc

SEQ ID NO: 506508 - RNA, 22 nt, Human
aggucauuuuugccuucuauuu

SEQ ID NO: 506509 - RNA, 22 nt, Human
ccuuagcagggagucuguccag

SEQ ID NO: 506510 - RNA, 17 nt, Human
gagaguguauuggaugc

SEQ ID NO: 506511 - RNA, 22 nt, Human
auucagcaaugagcuuggauuu

SEQ ID NO: 506512 - RNA, 22 nt, Human
uauguguauugagcauuguuac

SEQ ID NO: 506513 - RNA, 22 nt, Human
gucucccacuuucuggccucuu

SEQ ID NO: 506514 - RNA, 22 nt, Human
cacugccugugagcugugugcc

SEQ ID NO: 506515 - RNA, 22 nt, Human
ccuggggaaucuugcaggggaa

SEQ ID NO: 506516 - RNA, 22 nt, Human
acaaagugcugacauuacaggc

SEQ ID NO: 506517 - RNA, 22 nt, Human
gguuuucucccccucuucucag

SEQ ID NO: 506518 - RNA, 22 nt, Human
cccaccaguacagaugguagau

SEQ ID NO: 506519 - RNA, 22 nt, Human
aaaucgguugguucaagguaau

SEQ ID NO: 506520 - RNA, 22 nt, Human
ccuccagggccccucucacugg

SEQ ID NO: 506521 - RNA, 22 nt, Human
ggcugccaggagggaggccagu

SEQ ID NO: 506522 - RNA, 22 nt, Human
ucagagaguccuggucauuugc

SEQ ID NO: 506523 - RNA, 22 nt, Human
ccugccugcggcccgcggggag

SEQ ID NO: 506524 - RNA, 22 nt, Human
ucuuggagacucuuguauauuu

SEQ ID NO: 506525 - RNA, 22 nt, Human
ccagugggugcugggcucugcc

SEQ ID NO: 506526 - RNA, 21 nt, Human
ccugagggugguugugaagau

SEQ ID NO: 506527 - RNA, 22 nt, Human
uggcagcaaaaccagaaucaga

SEQ ID NO: 506528 - RNA, 22 nt, Human
aagaggagaaaggcuggcuuug

SEQ ID NO: 506529 - RNA, 22 nt, Human
uaaagcauguuucaguaagguu

SEQ ID NO: 506530 - RNA, 22 nt, Human
cuucaucaacucuaacaaaugu

SEQ ID NO: 506531 - RNA, 22 nt, Human
ucaaaguuuuugagaauuacau

SEQ ID NO: 506532 - RNA, 22 nt, Human
cauugcccaguaggaucaccag

SEQ ID NO: 506533 - RNA, 22 nt, Human
auuauuuggaauaggcauugca

SEQ ID NO: 506534 - RNA, 22 nt, Human
cugcaggguuuuucaaggacaa

SEQ ID NO: 506535 - RNA, 22 nt, Human
agcuucaguuuucuauuguuaa

SEQ ID NO: 506536 - RNA, 22 nt, Human
agcagcaacuuauuuuucuuau

SEQ ID NO: 506537 - RNA, 17 nt, Human
gagagcugcugcuuccg

SEQ ID NO: 506538 - RNA, 22 nt, Human
ccuggagcuuggucacgcugcg

SEQ ID NO: 506539 - RNA, 22 nt, Human
cugcaggcucgaagacacggau

SEQ ID NO: 506540 - RNA, 22 nt, Human
aguuuuauuccaaugugcagca

SEQ ID NO: 506541 - RNA, 22 nt, Human
agggcuccgggccaccggccug

SEQ ID NO: 506542 - RNA, 22 nt, Human
ccagcaggacuuuggaaauaug

SEQ ID NO: 506543 - RNA, 22 nt, Human
uucucaggugaggcugaggcug

SEQ ID NO: 506544 - RNA, 22 nt, Human
uuucuacagcuggugcaacuuu

SEQ ID NO: 506545 - RNA, 20 nt, Human
uacuugaauguugcagcagu

SEQ ID NO: 506546 - RNA, 22 nt, Human
cuggagcccaggccuggugucu

SEQ ID NO: 506547 - RNA, 22 nt, Human
cuccugggcucaagugauccuc

SEQ ID NO: 506548 - RNA, 22 nt, Human
aggcaacauaacacgaaagucu

SEQ ID NO: 506549 - RNA, 22 nt, Human
uucauguaggcugcaaugcaca

SEQ ID NO: 506550 - RNA, 22 nt, Human
ucucugggaucguuuugggcuc

SEQ ID NO: 506551 - RNA, 22 nt, Human
cgaggcucagagagggugacuu

SEQ ID NO: 506552 - RNA, 22 nt, Human
uguuaggguccugugcaggggc

SEQ ID NO: 506553 - RNA, 22 nt, Human
ugagcaguaacagcucacaggg

SEQ ID NO: 506554 - RNA, 22 nt, Human
uaauacaucauucaucuaagga

SEQ ID NO: 506555 - RNA, 22 nt, Human
ugggccuggaguuuguccagag

SEQ ID NO: 506556 - RNA, 22 nt, Human
ucacaugcccuaccuaaucuua

SEQ ID NO: 506557 - RNA, 22 nt, Human
agcugggacucaacugucuggg

SEQ ID NO: 506558 - RNA, 22 nt, Human
cuccuggaggauagugacuggg

SEQ ID NO: 506559 - RNA, 19 nt, Human
ccuagagcaguaccuggua

SEQ ID NO: 506560 - RNA, 22 nt, Human
ucuaugaaaagucuauucauuc

SEQ ID NO: 506561 - RNA, 22 nt, Human
ugcaucuguucagagcugucga

SEQ ID NO: 506562 - RNA, 23 nt, Human
gggggcugguugacucucugcag

SEQ ID NO: 506563 - RNA, 22 nt, Human
ggggagaguccuuuccaguucc

SEQ ID NO: 506564 - RNA, 22 nt, Human
cacuggaauggauagagcagag

SEQ ID NO: 506565 - RNA, 20 nt, Human
uacaggaaucaagacugcau

SEQ ID NO: 506566 - RNA, 22 nt, Human
ggccccagauucugggcugggu

SEQ ID NO: 506567 - RNA, 22 nt, Human
gaaacagccccugugugaagca

SEQ ID NO: 506568 - RNA, 22 nt, Human
ucccagaguucaaugggaaggu

SEQ ID NO: 506569 - RNA, 22 nt, Human
auuugcauaauagugauuugua

SEQ ID NO: 506570 - RNA, 22 nt, Human
gagauuucuuuugaugccuguc

SEQ ID NO: 506571 - RNA, 22 nt, Human
agggcaucuaguucccucucuu

SEQ ID NO: 506572 - RNA, 18 nt, Human
gccugccuagagcuugcc

SEQ ID NO: 506573 - RNA, 22 nt, Human
guucugaguccuccuuugaagg

SEQ ID NO: 506574 - RNA, 22 nt, Human
aaauagauuuccuagcauugga

SEQ ID NO: 506575 - RNA, 22 nt, Human
ugcuucuguuucauugaucuua

SEQ ID NO: 506576 - RNA, 22 nt, Human
ucccacauaugcaauccugaau

SEQ ID NO: 506577 - RNA, 22 nt, Human
acagaacaggcugagaaaaaca

SEQ ID NO: 506578 - RNA, 22 nt, Human
uagguucaaguucaggcucuau

SEQ ID NO: 506579 - RNA, 22 nt, Human
uaggaaaugaaugcaggcuccc

SEQ ID NO: 506580 - RNA, 22 nt, Human
uuacuucuuacaaaagaaauau

SEQ ID NO: 506581 - RNA, 22 nt, Human
cucaaggacuuauucaugccug

SEQ ID NO: 506582 - RNA, 22 nt, Human
agcccaagcuaugaggugaccu

SEQ ID NO: 506583 - RNA, 22 nt, Human
cagcuucuucaguccuggagcu

SEQ ID NO: 506584 - RNA, 22 nt, Human
cuuacacagucuggcacuucuu

SEQ ID NO: 506585 - RNA, 22 nt, Human
aggugggaacccagcagggccc

SEQ ID NO: 506586 - RNA, 22 nt, Human
acagaccaaguuuccagcaggu

SEQ ID NO: 506587 - RNA, 22 nt, Human
cuguuuaucccuuuggucagca

SEQ ID NO: 506588 - RNA, 22 nt, Human
gucccucugccugugguucucu

SEQ ID NO: 506589 - RNA, 21 nt, Human
aaguuugggauucaguuucca

SEQ ID NO: 506590 - RNA, 20 nt, Human
gccugcagguuggaugggau

SEQ ID NO: 506591 - RNA, 22 nt, Human
ccuucagccuagaacuugagag

SEQ ID NO: 506592 - RNA, 22 nt, Human
uugauuaaacaggcauauucaa

SEQ ID NO: 506593 - RNA, 22 nt, Human
uauugguguacuuauagcagag

SEQ ID NO: 506594 - RNA, 22 nt, Human
cuguggcugaguuccuuauguu

SEQ ID NO: 506595 - RNA, 22 nt, Human
ggcccugugguuuugcaaaguc

SEQ ID NO: 506596 - RNA, 22 nt, Human
gagggccagaucccaggaggaa

SEQ ID NO: 506597 - RNA, 22 nt, Human
ucuugcacuucaugaauauguu

SEQ ID NO: 506598 - RNA, 22 nt, Human
uucuacaugguugcucagaggg

SEQ ID NO: 506599 - RNA, 22 nt, Human
cuuuacaaagcaauuuugucuc

SEQ ID NO: 506600 - RNA, 22 nt, Human
cugaagaggacgcagcagcaag

SEQ ID NO: 506601 - RNA, 22 nt, Human
caugcaaagcguuuugaccagc

SEQ ID NO: 506602 - RNA, 22 nt, Human
agugggcagcccaggaggucuu

SEQ ID NO: 506603 - RNA, 22 nt, Human
ggguggagccaguugacucugu

SEQ ID NO: 506604 - RNA, 22 nt, Human
cugccugcacugccuggcucca

SEQ ID NO: 506605 - RNA, 22 nt, Human
aaccaggacaauuuugaaagua

SEQ ID NO: 506606 - RNA, 20 nt, Human
ucagagucaucaaagauggu

SEQ ID NO: 506607 - RNA, 22 nt, Human
cacaguaaccccaggacuggga

SEQ ID NO: 506608 - RNA, 22 nt, Human
gccaccauguagcccauuagag

SEQ ID NO: 506609 - RNA, 22 nt, Human
gccuuggaaagcuggagcaguu

SEQ ID NO: 506610 - RNA, 22 nt, Human
ucucagucagccuugauguccc

SEQ ID NO: 506611 - RNA, 22 nt, Human
aaguuuuccuguguccaagaug

SEQ ID NO: 506612 - RNA, 22 nt, Human
ugggauaguagcugagagacaa

SEQ ID NO: 506613 - RNA, 22 nt, Human
uagucucuggagacucuagggg

SEQ ID NO: 506614 - RNA, 22 nt, Human
ucucuggcagaggcccuauccc

SEQ ID NO: 506615 - RNA, 22 nt, Human
cuguaugaacccauauacuuau

SEQ ID NO: 506616 - RNA, 22 nt, Human
gccaggcagccacccucugcga

SEQ ID NO: 506617 - RNA, 22 nt, Human
gaagcccagggcguggccgggc

SEQ ID NO: 506618 - RNA, 20 nt, Human
ccuggagccuggaaggaguc

SEQ ID NO: 506619 - RNA, 22 nt, Human
uagcagagcagggaucagagcc

SEQ ID NO: 506620 - RNA, 20 nt, Human
ccagacagcaccugccuggu

SEQ ID NO: 506621 - RNA, 22 nt, Human
aauuagaagcuguuagcaaaau

SEQ ID NO: 506622 - RNA, 22 nt, Human
cucagagauauagucccugcuu

SEQ ID NO: 506623 - RNA, 22 nt, Human
ugcauuauuugcaugugccugu

SEQ ID NO: 506624 - RNA, 22 nt, Human
uuggaauucaaguuguagcuua

SEQ ID NO: 506625 - RNA, 22 nt, Human
gcaggagcucguuuccaggcug

SEQ ID NO: 506626 - RNA, 23 nt, Human
gaggcagcuccugcagugcccug

SEQ ID NO: 506627 - RNA, 22 nt, Human
uccugggagaguuugauucauu

SEQ ID NO: 506628 - RNA, 22 nt, Human
ucugcucagugcuuaucucuaa

SEQ ID NO: 506629 - RNA, 23 nt, Human
ugacacauuuccuuuccacugca

SEQ ID NO: 506630 - RNA, 22 nt, Human
gaguccagcagaaugagccaag

SEQ ID NO: 506631 - RNA, 22 nt, Human
agacccagaaagcagcugcauu

SEQ ID NO: 506632 - RNA, 22 nt, Human
aggcaacaaggguagucaguga

SEQ ID NO: 506633 - RNA, 22 nt, Human
gccagggagucugggccacaga

SEQ ID NO: 506634 - RNA, 22 nt, Human
aagcagcugaaggauucagggu

SEQ ID NO: 506635 - RNA, 22 nt, Human
gucuuuuuuacaccuuacauca

SEQ ID NO: 506636 - RNA, 22 nt, Human
uggccuggggaagaccaugggc

SEQ ID NO: 506637 - RNA, 22 nt, Human
ugcaguggaggccgugagacag

SEQ ID NO: 506638 - RNA, 22 nt, Human
uuuauuuggcaucucugccaag

SEQ ID NO: 506639 - RNA, 17 nt, Human
aucuggcugcuucuaga

SEQ ID NO: 506640 - RNA, 22 nt, Human
gcagggugauagugaggcucag

SEQ ID NO: 506641 - RNA, 22 nt, Human
cugcucugcaaggcacagugau

SEQ ID NO: 506642 - RNA, 22 nt, Human
ugggcucucacacauguucuga

SEQ ID NO: 506643 - RNA, 22 nt, Human
cugggcaguucgcuuucguuuu

SEQ ID NO: 506644 - RNA, 22 nt, Human
agcuucucucuuugcacucaca

SEQ ID NO: 506645 - RNA, 22 nt, Human
cccagccugucuuucccaauga

SEQ ID NO: 506646 - RNA, 21 nt, Human
ucaccuggcuucugaccuggc

SEQ ID NO: 506647 - RNA, 20 nt, Human
uucugggcagccauguacuu

SEQ ID NO: 506648 - RNA, 22 nt, Human
ggccuggcauggggacuaaggg

SEQ ID NO: 506649 - RNA, 22 nt, Human
acccaggguagaaccucagagc

SEQ ID NO: 506650 - RNA, 22 nt, Human
gcaguguuccuucuacuggggc

SEQ ID NO: 506651 - RNA, 22 nt, Human
ccuggcucccugcacagggcuc

SEQ ID NO: 506652 - RNA, 22 nt, Human
cugggaggcggagguuguagug

SEQ ID NO: 506653 - RNA, 22 nt, Human
cucaucaccacauauaacaaag

SEQ ID NO: 506654 - RNA, 22 nt, Human
ccaagugauacacccgccucgg

SEQ ID NO: 506655 - RNA, 22 nt, Human
gaggaagaaagcauaggugggg

SEQ ID NO: 506656 - RNA, 22 nt, Human
aaagccuuuucuguuuaacaca

SEQ ID NO: 506657 - RNA, 19 nt, Human
agcacagacaagaccagca

SEQ ID NO: 506658 - RNA, 22 nt, Human
cauuuguacagaacagcuuuau

SEQ ID NO: 506659 - RNA, 21 nt, Human
gcagcaaaugacaacagugag

SEQ ID NO: 506660 - RNA, 22 nt, Human
gccugcagccccucugcaguag

SEQ ID NO: 506661 - RNA, 22 nt, Human
cauaauuagagaauucauguua

SEQ ID NO: 506662 - RNA, 22 nt, Human
ucagugcuaaaagagcuggugu

SEQ ID NO: 506663 - RNA, 22 nt, Human
uagggcuauaagagaauaagac

SEQ ID NO: 506664 - RNA, 23 nt, Human
cauguacagaguuugauaaagug

SEQ ID NO: 506665 - RNA, 22 nt, Human
agugaggcuaauaggcaauggu

SEQ ID NO: 506666 - RNA, 22 nt, Human
gcaggagcagucaggggcagcu

SEQ ID NO: 506667 - RNA, 23 nt, Human
ugucuggcucauggugggucuca

SEQ ID NO: 506668 - RNA, 22 nt, Human
acuaaaaacuacugccaauagc

SEQ ID NO: 506669 - RNA, 18 nt, Human
gccugggaggaggaaaug

SEQ ID NO: 506670 - RNA, 22 nt, Human
gguaacaguauguagaguaaga

SEQ ID NO: 506671 - RNA, 22 nt, Human
auccacccugugguggcuuucu

SEQ ID NO: 506672 - RNA, 22 nt, Human
agccucuguagaaagcagugug

SEQ ID NO: 506673 - RNA, 22 nt, Human
acaggaaagagcuaggcauagg

SEQ ID NO: 506674 - RNA, 20 nt, Human
aggccccaggaaacucucag

SEQ ID NO: 506675 - RNA, 22 nt, Human
cauaucccauuggccaggacau

SEQ ID NO: 506676 - RNA, 22 nt, Human
ucagcuuggacagcuugguuga

SEQ ID NO: 506677 - RNA, 22 nt, Human
aauauaaugcuguuuuaugcca

SEQ ID NO: 506678 - RNA, 22 nt, Human
acacaggagauauguaauggcu

SEQ ID NO: 506679 - RNA, 22 nt, Human
ggcucuggcguccaauggagcg

SEQ ID NO: 506680 - RNA, 22 nt, Human
ucuguggaaauuuccugaggca

SEQ ID NO: 506681 - RNA, 22 nt, Human
ccaugccuuucacugaaccagu

SEQ ID NO: 506682 - RNA, 22 nt, Human
cagcuauuggcaagaaguggug

SEQ ID NO: 506683 - RNA, 22 nt, Human
uaaaugcaguuaguacuugcca

SEQ ID NO: 506684 - RNA, 22 nt, Human
ggugcugguucaggguggcugu

SEQ ID NO: 506685 - RNA, 22 nt, Human
acacacaugguauuguucagaa

SEQ ID NO: 506686 - RNA, 22 nt, Human
ccuuccaggugcaggcaagccu

SEQ ID NO: 506687 - RNA, 22 nt, Human
cccuccucucccuaagagucac

SEQ ID NO: 506688 - RNA, 22 nt, Human
uccuuggggacgcugacaucgu

SEQ ID NO: 506689 - RNA, 22 nt, Human
auagucacugccuuccauuugu

SEQ ID NO: 506690 - RNA, 22 nt, Human
aaagcaaugcuuguggaaugua

SEQ ID NO: 506691 - RNA, 22 nt, Human
ugcagguggacacgggagacgg

SEQ ID NO: 506692 - RNA, 22 nt, Human
ugaaagggguugaguuacagcu

SEQ ID NO: 506693 - RNA, 22 nt, Human
cccuuagccaggaaaucgaccu

SEQ ID NO: 506694 - RNA, 22 nt, Human
ggagaccuuaaggugcuuccua

SEQ ID NO: 506695 - RNA, 22 nt, Human
aucuacagugcacaggacagcc

SEQ ID NO: 506696 - RNA, 22 nt, Human
ucccacugugaauccaaggccu

SEQ ID NO: 506697 - RNA, 22 nt, Human
cagcuacagaggccacauggcu

SEQ ID NO: 506698 - RNA, 22 nt, Human
auguuacauaguccuuauuugu

SEQ ID NO: 506699 - RNA, 22 nt, Human
ugaaagguagcuggccucauag

SEQ ID NO: 506700 - RNA, 22 nt, Human
auuuguagugaagugaaaauaa

SEQ ID NO: 506701 - RNA, 22 nt, Human
aaaguggucaccuucucauuuc

SEQ ID NO: 506702 - RNA, 22 nt, Human
cacucugacuggcccugcagga

SEQ ID NO: 506703 - RNA, 22 nt, Human
cacagcuuaugccacugauugg

SEQ ID NO: 506704 - RNA, 20 nt, Human
cucaguguggccugaguguu

SEQ ID NO: 506705 - RNA, 22 nt, Human
gaagcagcuuucuggugaggag

SEQ ID NO: 506706 - RNA, 22 nt, Human
gaugauuuuaugucuugucauu

SEQ ID NO: 506707 - RNA, 22 nt, Human
ccaggaucugauauugggcucc

SEQ ID NO: 506708 - RNA, 22 nt, Human
aauuucaagucuugaagaagua

SEQ ID NO: 506709 - RNA, 22 nt, Human
uaccauuucauucuuuccucau

SEQ ID NO: 506710 - RNA, 21 nt, Human
ucuccaguauccuucucugag

SEQ ID NO: 506711 - RNA, 22 nt, Human
uacuuacagagcuuauaaguua

SEQ ID NO: 506712 - RNA, 22 nt, Human
agggcugagacuaaggccagau

SEQ ID NO: 506713 - RNA, 22 nt, Human
ccucuggguaucuguggaagua

SEQ ID NO: 506714 - RNA, 22 nt, Human
agggcagcauugccuuucucca

SEQ ID NO: 506715 - RNA, 22 nt, Human
ugcugugcuggcggcagaggcc

SEQ ID NO: 506716 - RNA, 22 nt, Human
ugacacagauuagagacauacc

SEQ ID NO: 506717 - RNA, 22 nt, Human
aauaugcauuaacuguguacau

SEQ ID NO: 506718 - RNA, 22 nt, Human
gcaggcuggaggcuguucuggg

SEQ ID NO: 506719 - RNA, 22 nt, Human
ugcaugucaaggcacucaggau

SEQ ID NO: 506720 - RNA, 22 nt, Human
ccugccucaucaacuugucgug

SEQ ID NO: 506721 - RNA, 22 nt, Human
cauuuauucucagauccuuguc

SEQ ID NO: 506722 - RNA, 22 nt, Human
uucucacacuuuccacugaggu

SEQ ID NO: 506723 - RNA, 22 nt, Human
gagucacaaagccuuucuuauu

SEQ ID NO: 506724 - RNA, 22 nt, Human
ccaaguaguugagacuacaggu

SEQ ID NO: 506725 - RNA, 22 nt, Human
ccuggggaauagagucaagggg

SEQ ID NO: 506726 - RNA, 22 nt, Human
cugccacuuuggagugcucaga

SEQ ID NO: 506727 - RNA, 22 nt, Human
uccaagaagucaucuaaacugu

SEQ ID NO: 506728 - RNA, 22 nt, Human
agagcacagaagaauaggugcu

SEQ ID NO: 506729 - RNA, 22 nt, Human
gcaggcccuccucuagcaaggc

SEQ ID NO: 506730 - RNA, 22 nt, Human
cuugugcaauugacauugaauc

SEQ ID NO: 506731 - RNA, 22 nt, Human
caggaggccaacugugggacuu

SEQ ID NO: 506732 - RNA, 22 nt, Human
ugagaagcccacacucuuuccu

SEQ ID NO: 506733 - RNA, 22 nt, Human
ucuucacaccgggcagcaggaa

SEQ ID NO: 506734 - RNA, 22 nt, Human
cagcccagcagggucuggcccu

SEQ ID NO: 506735 - RNA, 19 nt, Human
acuuugcaugugugucuaa

SEQ ID NO: 506736 - RNA, 22 nt, Human
gcaggagucacugacuuggucc

SEQ ID NO: 506737 - RNA, 22 nt, Human
ucaugccaaaauccaguggcuu

SEQ ID NO: 506738 - RNA, 22 nt, Human
ucuugccucuuccccuuuccau

SEQ ID NO: 506739 - RNA, 22 nt, Human
agcucugacugaagagaugcaa

SEQ ID NO: 506740 - RNA, 22 nt, Human
cugugccuggggggcagagcug

SEQ ID NO: 506741 - RNA, 22 nt, Human
agggccugacacccuugccagc

SEQ ID NO: 506742 - RNA, 22 nt, Human
ugcuugggcggccagcauggcg

SEQ ID NO: 506743 - RNA, 22 nt, Human
ucauuuccucaaauucaagguu

SEQ ID NO: 506744 - RNA, 22 nt, Human
agcaaagccgagacagccagug

SEQ ID NO: 506745 - RNA, 22 nt, Human
ucagggcauguauguuucuuua

SEQ ID NO: 506746 - RNA, 22 nt, Human
auaugaguuucccacuucugga

SEQ ID NO: 506747 - RNA, 23 nt, Human
uuccaagugcuuuacuuaauccu

SEQ ID NO: 506748 - RNA, 22 nt, Human
acauagaacuucccagugagca

SEQ ID NO: 506749 - RNA, 22 nt, Human
gaaaucuuuuccaauuguuuag

SEQ ID NO: 506750 - RNA, 18 nt, Human
uccucucuuuccccaggg

SEQ ID NO: 506751 - RNA, 22 nt, Human
acaugcuuucuagguccuucug

SEQ ID NO: 506752 - RNA, 22 nt, Human
ggaagaggcugaggccaugcug

SEQ ID NO: 506753 - RNA, 22 nt, Human
ugaggaaauugaggcucacaga

SEQ ID NO: 506754 - RNA, 22 nt, Human
aaacuguaaauacuaguaagug

SEQ ID NO: 506755 - RNA, 22 nt, Human
guguccacggcugagaaugauu

SEQ ID NO: 506756 - RNA, 22 nt, Human
gucaggaucaaauugaaguuau

SEQ ID NO: 506757 - RNA, 22 nt, Human
uuuuugaaggcugaugugauua

SEQ ID NO: 506758 - RNA, 22 nt, Human
ucagcccuagccucaguccagg

SEQ ID NO: 506759 - RNA, 22 nt, Human
ccuguggcugccacuuggguga

SEQ ID NO: 506760 - RNA, 22 nt, Human
gugucccacucuggaggugaag

SEQ ID NO: 506761 - RNA, 22 nt, Human
uuggcauucaugggacaacaaa

SEQ ID NO: 506762 - RNA, 22 nt, Human
ugucugaacugcacugaaagac

SEQ ID NO: 506763 - RNA, 22 nt, Human
uuauuccauuauuucacuuagg

SEQ ID NO: 506764 - RNA, 19 nt, Human
caggagagcaugcacuuug

SEQ ID NO: 506765 - RNA, 21 nt, Human
ugcagcagauuugggggaaga

SEQ ID NO: 506766 - RNA, 22 nt, Human
ucugggagguaaccaugcugau

SEQ ID NO: 506767 - RNA, 22 nt, Human
ugggauggcauccugggccuug

SEQ ID NO: 506768 - RNA, 22 nt, Human
ucucuacauaaccucaauacuc

SEQ ID NO: 506769 - RNA, 22 nt, Human
acugucacuccaacugagucgu

SEQ ID NO: 506770 - RNA, 22 nt, Human
uggggaaggcggagcuugcagc

SEQ ID NO: 506771 - RNA, 22 nt, Human
uuccuggggacuuaccgucauu

SEQ ID NO: 506772 - RNA, 22 nt, Human
gcugcagcccggcgcgccugag

SEQ ID NO: 506773 - RNA, 22 nt, Human
aaauuaguacauugcaaagucc

SEQ ID NO: 506774 - RNA, 22 nt, Human
uggcagaguucgcugugccuuu

SEQ ID NO: 506775 - RNA, 22 nt, Human
auaaggcagucacuggaauguu

SEQ ID NO: 506776 - RNA, 22 nt, Human
cuguucacacacuuguacucuc

SEQ ID NO: 506777 - RNA, 22 nt, Human
uuugccugauucuaagagcuca

SEQ ID NO: 506778 - RNA, 21 nt, Human
cugggcucaagcaauccuuuc

SEQ ID NO: 506779 - RNA, 22 nt, Human
ucuuugcaugugcuucuuggcc

SEQ ID NO: 506780 - RNA, 22 nt, Human
ggacugggauucuggaucugcu

SEQ ID NO: 506781 - RNA, 22 nt, Human
cccauucccuuuacuguugcau

SEQ ID NO: 506782 - RNA, 22 nt, Human
uccugucagugaggcagaugaa

SEQ ID NO: 506783 - RNA, 22 nt, Human
ggaggagacaguaaaaagcacg

SEQ ID NO: 506784 - RNA, 22 nt, Human
accaguccgcggagcuccgggg

SEQ ID NO: 506785 - RNA, 22 nt, Human
gaggccacgguuuuccuugggg

SEQ ID NO: 506786 - RNA, 22 nt, Human
ucuggcaccacugagucugcag

SEQ ID NO: 506787 - RNA, 22 nt, Human
cuguggcuuugugucuauugua

SEQ ID NO: 506788 - RNA, 22 nt, Human
ggaggccaggaaggcucggaga

SEQ ID NO: 506789 - RNA, 22 nt, Human
aguggggaagagcaugggcccu

SEQ ID NO: 506790 - RNA, 22 nt, Human
uccucagggcggccuccgucuu

SEQ ID NO: 506791 - RNA, 22 nt, Human
aggcuccacggucacuggcucu

SEQ ID NO: 506792 - RNA, 22 nt, Human
gccuuugccugcgacguggcug

SEQ ID NO: 506793 - RNA, 22 nt, Human
cccuggcaaaacacucucuuga

SEQ ID NO: 506794 - RNA, 22 nt, Human
gcagcugcagguggucccaugc

SEQ ID NO: 506795 - RNA, 22 nt, Human
uccaggagagguguggggacug

SEQ ID NO: 506796 - RNA, 22 nt, Human
ugacacaguugucgacucuaca

SEQ ID NO: 506797 - RNA, 22 nt, Human
auaaucagaauucaugaaagau

SEQ ID NO: 506798 - RNA, 22 nt, Human
cuggaaagaccugcuugcuuuu

SEQ ID NO: 506799 - RNA, 22 nt, Human
gggucugggcaggcgcuuccuc

SEQ ID NO: 506800 - RNA, 22 nt, Human
caaagugcugggauuauaggca

SEQ ID NO: 506801 - RNA, 22 nt, Human
ccuggcucaggcacgcauggcu

SEQ ID NO: 506802 - RNA, 22 nt, Human
uggagggaacccaggcugcucu

SEQ ID NO: 506803 - RNA, 22 nt, Human
ucauggagacuuugagccuguu

SEQ ID NO: 506804 - RNA, 22 nt, Human
ggcuccugaaagacuaugggaa

SEQ ID NO: 506805 - RNA, 22 nt, Human
uuacacaguugguaggggcaga

SEQ ID NO: 506806 - RNA, 22 nt, Human
ccucuuugagauucaguuuucc

SEQ ID NO: 506807 - RNA, 22 nt, Human
ggugcucaagagggcauccucu

SEQ ID NO: 506808 - RNA, 22 nt, Human
acugucuuccaggucuggaggu

SEQ ID NO: 506809 - RNA, 22 nt, Human
gcauaugaucacgugugucggu

SEQ ID NO: 506810 - RNA, 22 nt, Human
ccaguguuuccgucaguacacg

SEQ ID NO: 506811 - RNA, 22 nt, Human
uuugaaauaugaggcauuauga

SEQ ID NO: 506812 - RNA, 17 nt, Human
gcauccaguaacaugcc

SEQ ID NO: 506813 - RNA, 18 nt, Human
agucucagcggaggagua

SEQ ID NO: 506814 - RNA, 22 nt, Human
gcucccagggcagcgcagaaga

SEQ ID NO: 506815 - RNA, 23 nt, Human
ugguggcagaaguagcagaugac

SEQ ID NO: 506816 - RNA, 22 nt, Human
uggcauuuaguugcguauugca

SEQ ID NO: 506817 - RNA, 22 nt, Human
gcacugaaugccaaaguguagg

SEQ ID NO: 506818 - RNA, 22 nt, Human
cgaggcagaggcugaaacggcu

SEQ ID NO: 506819 - RNA, 22 nt, Human
aaauggucacuggugaguguca

SEQ ID NO: 506820 - RNA, 22 nt, Human
gauuuccucacuaacauccauc

SEQ ID NO: 506821 - RNA, 22 nt, Human
uccaggcaagggaggagcaugg

SEQ ID NO: 506822 - RNA, 21 nt, Human
ccuggcagaagccugauaugc

SEQ ID NO: 506823 - RNA, 22 nt, Human
agaaacagcauuagcaucaauu

SEQ ID NO: 506824 - RNA, 22 nt, Human
ugaaaucuacccuauucagggu

SEQ ID NO: 506825 - RNA, 22 nt, Human
ccucugugucagggaagagacu

SEQ ID NO: 506826 - RNA, 22 nt, Human
ucuucaaacccuggcucuuccu

SEQ ID NO: 506827 - RNA, 22 nt, Human
aaagauuauggcauugaaauac

SEQ ID NO: 506828 - RNA, 22 nt, Human
uaacacugguauuucauuuagu

SEQ ID NO: 506829 - RNA, 22 nt, Human
aagucauuaucucuucuaaucu

SEQ ID NO: 506830 - RNA, 18 nt, Human
auccuugaugagaggucu

SEQ ID NO: 506831 - RNA, 22 nt, Human
uauuugcaggcuuuugucaugg

SEQ ID NO: 506832 - RNA, 22 nt, Human
ucugcaggaaaaaagugccugg

SEQ ID NO: 506833 - RNA, 22 nt, Human
caaagggcucuagacucagcag

SEQ ID NO: 506834 - RNA, 22 nt, Human
cagguaggauggaagggcucaa

SEQ ID NO: 506835 - RNA, 22 nt, Human
cuuccaggguccaggaagagcc

SEQ ID NO: 506836 - RNA, 22 nt, Human
auuaauuuccaggcacugugcu

SEQ ID NO: 506837 - RNA, 22 nt, Human
auggauaauggugauaguugca

SEQ ID NO: 506838 - RNA, 20 nt, Human
gacagcuuggggugucaccu

SEQ ID NO: 506839 - RNA, 22 nt, Human
cagaguguuucuuugggugggu

SEQ ID NO: 506840 - RNA, 22 nt, Human
cccugcagagaccacugaccuu

SEQ ID NO: 506841 - RNA, 22 nt, Human
uccaagcuguauguuccuagag

SEQ ID NO: 506842 - RNA, 22 nt, Human
acaggccugacacacagagggc

SEQ ID NO: 506843 - RNA, 22 nt, Human
cugagggagcugcuggccuugg

SEQ ID NO: 506844 - RNA, 22 nt, Human
agccuguccagaggacagggcu

SEQ ID NO: 506845 - RNA, 22 nt, Human
uugaaaguuuauggagucugca

SEQ ID NO: 506846 - RNA, 22 nt, Human
agcuggcuccagaaggagucgu

SEQ ID NO: 506847 - RNA, 22 nt, Human
uccugcagguggaugauucucu

SEQ ID NO: 506848 - RNA, 22 nt, Human
cccaggucugugccagcucuga

SEQ ID NO: 506849 - RNA, 18 nt, Human
ucugcugcugcguccugc

SEQ ID NO: 506850 - RNA, 22 nt, Human
ucuggcucucaacaaauauuua

SEQ ID NO: 506851 - RNA, 22 nt, Human
cuggccaacuugcuuguuggca

SEQ ID NO: 506852 - RNA, 22 nt, Human
aauucuauaggcaagcuauuuu

SEQ ID NO: 506853 - RNA, 22 nt, Human
ugccuugggagccagcaugcca

SEQ ID NO: 506854 - RNA, 22 nt, Human
acagccuggacuggcucucugc

SEQ ID NO: 506855 - RNA, 22 nt, Human
gcacccagaauaaggacaggac

SEQ ID NO: 506856 - RNA, 22 nt, Human
ccugggcucaagugauccuccu

SEQ ID NO: 506857 - RNA, 22 nt, Human
ugucaaaaugacuuuacuacag

SEQ ID NO: 506858 - RNA, 22 nt, Human
cacugcaguuccccagugcgca

SEQ ID NO: 506859 - RNA, 22 nt, Human
gaugcaaagauaaaacagacgc

SEQ ID NO: 506860 - RNA, 23 nt, Human
ugcaggcuaggaagagagccuuc

SEQ ID NO: 506861 - RNA, 22 nt, Human
aagaggaauggguguguuuaug

SEQ ID NO: 506862 - RNA, 22 nt, Human
aaauacagaguugcuuaaaagc

SEQ ID NO: 506863 - RNA, 22 nt, Human
acagaguaggugcucaguaaau

SEQ ID NO: 506864 - RNA, 23 nt, Human
aaguccagaaggagaacugggag

SEQ ID NO: 506865 - RNA, 22 nt, Human
cucugcauuuuaacagaugauu

SEQ ID NO: 506866 - RNA, 19 nt, Human
ucaguuuuagucaucaguu

SEQ ID NO: 506867 - RNA, 21 nt, Human
ucagucccuggguguguccca

SEQ ID NO: 506868 - RNA, 22 nt, Human
gaguccaguuguucacagaggc

SEQ ID NO: 506869 - RNA, 22 nt, Human
uggccugauuuugcuaagagaa

SEQ ID NO: 506870 - RNA, 22 nt, Human
aaggagcuuguucgccuuccuc

SEQ ID NO: 506871 - RNA, 22 nt, Human
acaaaauuguguuaaacuuuau

SEQ ID NO: 506872 - RNA, 22 nt, Human
ggugggugagcccugggagcug

SEQ ID NO: 506873 - RNA, 22 nt, Human
ucccuggggauguuggccugcc

SEQ ID NO: 506874 - RNA, 22 nt, Human
ucugggucaugacucagcguga

SEQ ID NO: 506875 - RNA, 22 nt, Human
uaaagaugcccacauugcaggu

SEQ ID NO: 506876 - RNA, 22 nt, Human
cuuugaaaacuuaaauaacagc

SEQ ID NO: 506877 - RNA, 22 nt, Human
uguguguguccucauuugcaga

SEQ ID NO: 506878 - RNA, 22 nt, Human
ucacuuuugaucccuaugcagu

SEQ ID NO: 506879 - RNA, 22 nt, Human
auaaggcagaaauagggaaagu

SEQ ID NO: 506880 - RNA, 22 nt, Human
agcagcaggcuuaaggaaaagu

SEQ ID NO: 506881 - RNA, 22 nt, Human
cauuugucucuaggaagugagg

SEQ ID NO: 506882 - RNA, 22 nt, Human
aacuguacgauaauaaauuugu

SEQ ID NO: 506883 - RNA, 22 nt, Human
cccuggccagcucaugucugag

SEQ ID NO: 506884 - RNA, 22 nt, Human
acaacaggguaaggcaggccau

SEQ ID NO: 506885 - RNA, 20 nt, Human
aauuuacucacagaaugaau

SEQ ID NO: 506886 - RNA, 22 nt, Human
agcugguuagcaaucuaaguga

SEQ ID NO: 506887 - RNA, 22 nt, Human
cuguggcucaauugccuacuga

SEQ ID NO: 506888 - RNA, 22 nt, Human
ugcaggcugggaagagggacaa

SEQ ID NO: 506889 - RNA, 22 nt, Human
acuuuggaucugauguaaucag

SEQ ID NO: 506890 - RNA, 22 nt, Human
auccaaagcccuaaguuaacug

SEQ ID NO: 506891 - RNA, 21 nt, Human
ugcaggagucugugagucagg

SEQ ID NO: 506892 - RNA, 19 nt, Human
uagaaugcccacuuaaaaa

SEQ ID NO: 506893 - RNA, 22 nt, Human
uaaaugugcacagguuagaagg

SEQ ID NO: 506894 - RNA, 19 nt, Human
cagaguccuugaccagucc

SEQ ID NO: 506895 - RNA, 22 nt, Human
ugcccaggaucuggcgaugcuc

SEQ ID NO: 506896 - RNA, 22 nt, Human
auguagcagauauuugugcaca

SEQ ID NO: 506897 - RNA, 22 nt, Human
aagggcugccagggggugccag

SEQ ID NO: 506898 - RNA, 22 nt, Human
ugcaaaaauugcuggaaucuuu

SEQ ID NO: 506899 - RNA, 22 nt, Human
ugugacuggaguccagcccacu

SEQ ID NO: 506900 - RNA, 22 nt, Human
cuuauguauaauguuccacaua

SEQ ID NO: 506901 - RNA, 21 nt, Human
ucuuguccuugcucucccacu

SEQ ID NO: 506902 - RNA, 22 nt, Human
agccagggagguggagguugca

SEQ ID NO: 506903 - RNA, 22 nt, Human
cagcauugaucccaggcugugg

SEQ ID NO: 506904 - RNA, 22 nt, Human
agguaagggucacaguucauau

SEQ ID NO: 506905 - RNA, 22 nt, Human
uuagauauguuuuugcuaaugc

SEQ ID NO: 506906 - RNA, 22 nt, Human
gggaucugaguugucaggaagg

SEQ ID NO: 506907 - RNA, 22 nt, Human
aaugauuuggcaaaggaaucca

SEQ ID NO: 506908 - RNA, 22 nt, Human
ucuggcucaucucuccagguaa

SEQ ID NO: 506909 - RNA, 22 nt, Human
acugggcuguggacacccagcg

SEQ ID NO: 506910 - RNA, 22 nt, Human
cuucuuaaauuggauugcuauu

SEQ ID NO: 506911 - RNA, 22 nt, Human
ccacagaaaguugucuagagua

SEQ ID NO: 506912 - RNA, 22 nt, Human
ugagagcacacagaaauauuuu

SEQ ID NO: 506913 - RNA, 20 nt, Human
gagcuucaacucagcaaaca

SEQ ID NO: 506914 - RNA, 22 nt, Human
agcugcugcaaguggugcuaac

SEQ ID NO: 506915 - RNA, 22 nt, Human
cagcuggccugaucccuguggc

SEQ ID NO: 506916 - RNA, 22 nt, Human
ucaggauaaaauguaauggcaa

SEQ ID NO: 506917 - RNA, 22 nt, Human
caggcucccgaaaucacccaug

SEQ ID NO: 506918 - RNA, 22 nt, Human
uuaacaaaguaacgggaaaaga

SEQ ID NO: 506919 - RNA, 22 nt, Human
uucucaagaacauauguagggu

SEQ ID NO: 506920 - RNA, 22 nt, Human
gcucagagauguucaguagcuu

SEQ ID NO: 506921 - RNA, 22 nt, Human
uccucagcaaacacuucacucu

SEQ ID NO: 506922 - RNA, 22 nt, Human
uuguuacacauaauaacauuuu

SEQ ID NO: 506923 - RNA, 22 nt, Human
acccaggccugagagacaggag

SEQ ID NO: 506924 - RNA, 22 nt, Human
cucuggguggucucacugagug

SEQ ID NO: 506925 - RNA, 22 nt, Human
uccccugcagaugagggcagug

SEQ ID NO: 506926 - RNA, 22 nt, Human
gccaccuguaagccauuaggcc

SEQ ID NO: 506927 - RNA, 22 nt, Human
agaauguagucuuggagauuua

SEQ ID NO: 506928 - RNA, 22 nt, Human
uggcugcugcuuggucuucuuc

SEQ ID NO: 506929 - RNA, 22 nt, Human
ggcagcugagaucaugcuguug

SEQ ID NO: 506930 - RNA, 22 nt, Human
gucuggaggcacuuucucauga

SEQ ID NO: 506931 - RNA, 22 nt, Human
gucccuaguggaaagacaugau

SEQ ID NO: 506932 - RNA, 22 nt, Human
augggaggcagcagagcccagc

SEQ ID NO: 506933 - RNA, 21 nt, Human
caggaaaagcggaagucuagc

SEQ ID NO: 506934 - RNA, 22 nt, Human
ugaaagaacuagcaucuucaag

SEQ ID NO: 506935 - RNA, 22 nt, Human
guuuauaaugucugugccaaaa

SEQ ID NO: 506936 - RNA, 22 nt, Human
agucauaauuauaaacaucagu

SEQ ID NO: 506937 - RNA, 22 nt, Human
uaggacugauaaggggccagag

SEQ ID NO: 506938 - RNA, 22 nt, Human
ccacagaaugaugacacuucag

SEQ ID NO: 506939 - RNA, 22 nt, Human
ucaaaguuuguggcaauuuauu

SEQ ID NO: 506940 - RNA, 22 nt, Human
ucucaguggaucucagaauuuu

SEQ ID NO: 506941 - RNA, 22 nt, Human
uuuugugagcuccuuggaggua

SEQ ID NO: 506942 - RNA, 22 nt, Human
ugaauaaucuuggguauuaaua

SEQ ID NO: 506943 - RNA, 20 nt, Human
gucagaggacccuagagcga

SEQ ID NO: 506944 - RNA, 23 nt, Human
ugcaggugugcagagggcucuug

SEQ ID NO: 506945 - RNA, 22 nt, Human
gaaagugcuuagagugugguau

SEQ ID NO: 506946 - RNA, 22 nt, Human
aaggccagacaggaccacaucu

SEQ ID NO: 506947 - RNA, 22 nt, Human
uggacucagugcugccauuccc

SEQ ID NO: 506948 - RNA, 18 nt, Human
uucacaggaaaugucuuu

SEQ ID NO: 506949 - RNA, 22 nt, Human
ugucacaaacauacauuauaga

SEQ ID NO: 506950 - RNA, 22 nt, Human
acagagucuuacguggugauaa

SEQ ID NO: 506951 - RNA, 22 nt, Human
gcagcaaggaugaagcacuugg

SEQ ID NO: 506952 - RNA, 22 nt, Human
aagggcugaaugaaggguugaa

SEQ ID NO: 506953 - RNA, 22 nt, Human
ucugggagauccaagcagaacu

SEQ ID NO: 506954 - RNA, 21 nt, Human
aagagcugucaggaaggcugc

SEQ ID NO: 506955 - RNA, 18 nt, Human
cccuuagccuuuccucuc

SEQ ID NO: 506956 - RNA, 22 nt, Human
uuuguuagagugugggaggcug

SEQ ID NO: 506957 - RNA, 22 nt, Human
aggucugguguugaugaauucc

SEQ ID NO: 506958 - RNA, 22 nt, Human
aagggacccuggaucaaaugga

SEQ ID NO: 506959 - RNA, 22 nt, Human
cccuuagcuggugagcccagcg

SEQ ID NO: 506960 - RNA, 22 nt, Human
caaagacacgggaaacaacguu

SEQ ID NO: 506961 - RNA, 22 nt, Human
acauuucucauucuccccuaac

SEQ ID NO: 506962 - RNA, 19 nt, Human
gcuggcagauguggccgug

SEQ ID NO: 506963 - RNA, 22 nt, Human
aagacaauuuugaguaugcaca

SEQ ID NO: 506964 - RNA, 20 nt, Human
aggagggaccuggauuggcg

SEQ ID NO: 506965 - RNA, 22 nt, Human
uguggcucggccagcugcugaa

SEQ ID NO: 506966 - RNA, 22 nt, Human
ggcaggguaaaccgagguaagu

SEQ ID NO: 506967 - RNA, 22 nt, Human
gaaaugugugacaaguuucaau

SEQ ID NO: 506968 - RNA, 22 nt, Human
cccuggagcaucucugcugucu

SEQ ID NO: 506969 - RNA, 22 nt, Human
aagaggagggcagauucaaggc

SEQ ID NO: 506970 - RNA, 22 nt, Human
uucuuucccagaagauauguuu

SEQ ID NO: 506971 - RNA, 22 nt, Human
gcugagguggagauugcaguga

SEQ ID NO: 506972 - RNA, 22 nt, Human
ugucaugccaggaaauaguccc

SEQ ID NO: 506973 - RNA, 22 nt, Human
auugaaaaaugacuauugcuua

SEQ ID NO: 506974 - RNA, 22 nt, Human
uccacgugagcuucgugugcag

SEQ ID NO: 506975 - RNA, 22 nt, Human
ccgggcgggggcucucgucacc

SEQ ID NO: 506976 - RNA, 22 nt, Human
cugggcuguuuguucuggucuc

SEQ ID NO: 506977 - RNA, 22 nt, Human
acuuuauuuccuauugcaucca

SEQ ID NO: 506978 - RNA, 22 nt, Human
uuacaagacacugcugacacag

SEQ ID NO: 506979 - RNA, 22 nt, Human
ucuggagcgaggucccugucug

SEQ ID NO: 506980 - RNA, 22 nt, Human
ucaucccuaaggacagcucugc

SEQ ID NO: 506981 - RNA, 22 nt, Human
agugcuggagggaggcagguuc

SEQ ID NO: 506982 - RNA, 22 nt, Human
uucucuggagggcugcccggcc

SEQ ID NO: 506983 - RNA, 22 nt, Human
gagcuuggaagcagauccucac

SEQ ID NO: 506984 - RNA, 22 nt, Human
uaaagguaguuuuaaaggugcu

SEQ ID NO: 506985 - RNA, 22 nt, Human
ucuuuucuggacucugcaugga

SEQ ID NO: 506986 - RNA, 22 nt, Human
cuauacagcagcuuacuaguua

SEQ ID NO: 506987 - RNA, 22 nt, Human
gucaggauuauaauccccaugg

SEQ ID NO: 506988 - RNA, 22 nt, Human
gucuuguuugggauguggaugg

SEQ ID NO: 506989 - RNA, 22 nt, Human
aguggcagagcugugucuugaa

SEQ ID NO: 506990 - RNA, 22 nt, Human
acacagaguuauuaugugaacu

SEQ ID NO: 506991 - RNA, 22 nt, Human
auggcagaauuaggauuucaag

SEQ ID NO: 506992 - RNA, 22 nt, Human
ggcuucccaaggagccaggaug

SEQ ID NO: 506993 - RNA, 22 nt, Human
gagcccuccauggagccaggca

SEQ ID NO: 506994 - RNA, 22 nt, Human
gccaggcuggugucacaacucu

SEQ ID NO: 506995 - RNA, 21 nt, Human
uguuuaauacauauuugugga

SEQ ID NO: 506996 - RNA, 22 nt, Human
uagaauaugugguaggaucugg

SEQ ID NO: 506997 - RNA, 23 nt, Human
aaagcaaggaauuggcaacagag

SEQ ID NO: 506998 - RNA, 22 nt, Human
agggagcuuccgaacuacagcu

SEQ ID NO: 506999 - RNA, 22 nt, Human
uggacccccucaaggcagagcu

SEQ ID NO: 507000 - RNA, 22 nt, Human
gcaaaugaguuguaacauaaaa

SEQ ID NO: 507001 - RNA, 22 nt, Human
guggcucuaggugagcauggag

SEQ ID NO: 507002 - RNA, 22 nt, Human
ggcaggcuccguguuccauucc

SEQ ID NO: 507003 - RNA, 21 nt, Human
ccacucugaguguugaacaga

SEQ ID NO: 507004 - RNA, 22 nt, Human
auuucacagcugucaguguuac

SEQ ID NO: 507005 - RNA, 22 nt, Human
gcagggacgcagcacucuccgu

SEQ ID NO: 507006 - RNA, 21 nt, Human
uguuuauggaaaagagacaaa

SEQ ID NO: 507007 - RNA, 17 nt, Human
ccugggaggaguuauga

SEQ ID NO: 507008 - RNA, 22 nt, Human
aagggacuuugucagcuuucca

SEQ ID NO: 507009 - RNA, 17 nt, Human
cugggccuccccugucc

SEQ ID NO: 507010 - RNA, 22 nt, Human
guaucuuucccaccaaucacaa

SEQ ID NO: 507011 - RNA, 22 nt, Human
caagggugguauugggagcaua

SEQ ID NO: 507012 - RNA, 22 nt, Human
aaaaucuugugacuuaggaagg

SEQ ID NO: 507013 - RNA, 23 nt, Human
uuuauauuccuaaugucuugagc

SEQ ID NO: 507014 - RNA, 22 nt, Human
uucagagagaaaccagugggaa

SEQ ID NO: 507015 - RNA, 21 nt, Human
ccugggccaaauucccuggac

SEQ ID NO: 507016 - RNA, 22 nt, Human
gaaaggccagcucacagaugag

SEQ ID NO: 507017 - RNA, 22 nt, Human
agggcuuuaaugauuauuuucu

SEQ ID NO: 507018 - RNA, 20 nt, Human
ccaccuggccaaggcugugc

SEQ ID NO: 507019 - RNA, 22 nt, Human
gcccugcugcuggcagaggcgc

SEQ ID NO: 507020 - RNA, 22 nt, Human
gaaguugauagaguacaugauu

SEQ ID NO: 507021 - RNA, 22 nt, Human
ggcuccuggcaucuggugggua

SEQ ID NO: 507022 - RNA, 22 nt, Human
gcagcugccgugagcucacgcc

SEQ ID NO: 507023 - RNA, 22 nt, Human
gcagcuuggugaaaggugaugg

SEQ ID NO: 507024 - RNA, 22 nt, Human
auguccugggcuggguuauguu

SEQ ID NO: 507025 - RNA, 22 nt, Human
cugggagcuagcucugagcuga

SEQ ID NO: 507026 - RNA, 22 nt, Human
aggucauuguuaagucaccaua

SEQ ID NO: 507027 - RNA, 22 nt, Human
caagggccuccaccuugcucgu

SEQ ID NO: 507028 - RNA, 22 nt, Human
ccuggcugcuauagcagcaugu

SEQ ID NO: 507029 - RNA, 22 nt, Human
caaugacauggauaaucauauu

SEQ ID NO: 507030 - RNA, 22 nt, Human
ccucuuccacugggccccaucc

SEQ ID NO: 507031 - RNA, 22 nt, Human
ucacagaaacagaauggcacag

SEQ ID NO: 507032 - RNA, 22 nt, Human
uucaagaucuggguuuucagcu

SEQ ID NO: 507033 - RNA, 18 nt, Human
aggaaagacgaagagggc

SEQ ID NO: 507034 - RNA, 22 nt, Human
cccaggcucccaggugggacaa

SEQ ID NO: 507035 - RNA, 22 nt, Human
agagacuggaguuacgaguuca

SEQ ID NO: 507036 - RNA, 22 nt, Human
uuaaaguauagaggacaaaaac

SEQ ID NO: 507037 - RNA, 22 nt, Human
gagucccaugaugauagccaca

SEQ ID NO: 507038 - RNA, 19 nt, Human
ucaaaugccaaugucacag

SEQ ID NO: 507039 - RNA, 22 nt, Human
cacacagaugguaagggaggga

SEQ ID NO: 507040 - RNA, 22 nt, Human
ggaucuguuuugccucugaggg

SEQ ID NO: 507041 - RNA, 22 nt, Human
aagagcuggaagugaagauaac

SEQ ID NO: 507042 - RNA, 22 nt, Human
aacuuaaacccacucauguaga

SEQ ID NO: 507043 - RNA, 22 nt, Human
gaauuucagagguaacaucauc

SEQ ID NO: 507044 - RNA, 22 nt, Human
uuccugggauuauugucaagca

SEQ ID NO: 507045 - RNA, 20 nt, Human
ggcugccuccuuccuuuccu

SEQ ID NO: 507046 - RNA, 22 nt, Human
agagaacaaauuaaaggugguu

SEQ ID NO: 507047 - RNA, 22 nt, Human
cuaguccacuguccugccucca

SEQ ID NO: 507048 - RNA, 20 nt, Human
uggguccugcuucuuccuga

SEQ ID NO: 507049 - RNA, 22 nt, Human
uuugcauuaguuuagauuucaa

SEQ ID NO: 507050 - RNA, 22 nt, Human
uggccagcccuucagccaugcc

SEQ ID NO: 507051 - RNA, 22 nt, Human
agauguggaaagaaguuagaag

SEQ ID NO: 507052 - RNA, 22 nt, Human
accagguggccccagcgugguu

SEQ ID NO: 507053 - RNA, 22 nt, Human
uagcauuucccaaaugcauuug

SEQ ID NO: 507054 - RNA, 22 nt, Human
agaauauugaaaguucuugaca

SEQ ID NO: 507055 - RNA, 22 nt, Human
cuugaaagucacaugcagcccu

SEQ ID NO: 507056 - RNA, 19 nt, Human
aggcaggugcagagguccc

SEQ ID NO: 507057 - RNA, 22 nt, Human
gauuuaaaguagaccuuuguuu

SEQ ID NO: 507058 - RNA, 22 nt, Human
agaggagguggugaugcuuuaa

SEQ ID NO: 507059 - RNA, 22 nt, Human
cauuccaaguauauacaugaua

SEQ ID NO: 507060 - RNA, 22 nt, Human
agccacaccuguccugccagcu

SEQ ID NO: 507061 - RNA, 22 nt, Human
ucuucaaaaaauauccaucagu

SEQ ID NO: 507062 - RNA, 22 nt, Human
cuccaggacucaggccccuggg

SEQ ID NO: 507063 - RNA, 22 nt, Human
ggggaaacauguuguucagacc

SEQ ID NO: 507064 - RNA, 22 nt, Human
ucagcugccuuucccaugcuag

SEQ ID NO: 507065 - RNA, 22 nt, Human
gucaugccuggcuucuuagaca

SEQ ID NO: 507066 - RNA, 22 nt, Human
ugggugggagcgcccugucugg

SEQ ID NO: 507067 - RNA, 22 nt, Human
gaggcagcaaaauauaucauaa

SEQ ID NO: 507068 - RNA, 22 nt, Human
cuugaaagcacuccuuugacug

SEQ ID NO: 507069 - RNA, 22 nt, Human
gccuaggaguggggauggcggu

SEQ ID NO: 507070 - RNA, 23 nt, Human
ucugucacuuucugcuguggagu

SEQ ID NO: 507071 - RNA, 22 nt, Human
cuuuggcaaugaaacacaagaa

SEQ ID NO: 507072 - RNA, 22 nt, Human
uucuuuccaaccagauauuggu

SEQ ID NO: 507073 - RNA, 22 nt, Human
gcauagucaguaggauucucaa

SEQ ID NO: 507074 - RNA, 22 nt, Human
uugcacuccagcccgagcaaca

SEQ ID NO: 507075 - RNA, 23 nt, Human
cagcaggagggugccugggcugc

SEQ ID NO: 507076 - RNA, 21 nt, Human
gcagugcagcuuggaggguag

SEQ ID NO: 507077 - RNA, 22 nt, Human
agggaagaaucacugggauguu

SEQ ID NO: 507078 - RNA, 22 nt, Human
cuggggcuguaggaggacuuau

SEQ ID NO: 507079 - RNA, 22 nt, Human
guggcugguuuccugcaugcaa

SEQ ID NO: 507080 - RNA, 22 nt, Human
ucagggcaaaagggaaaccauu

SEQ ID NO: 507081 - RNA, 22 nt, Human
ugcaggccggcccuaggccuca

SEQ ID NO: 507082 - RNA, 22 nt, Human
gccucaguuuauacaccuguaa

SEQ ID NO: 507083 - RNA, 22 nt, Human
gggaucuguguugcgauggauu

SEQ ID NO: 507084 - RNA, 22 nt, Human
acaggcugacuuccugccaugu

SEQ ID NO: 507085 - RNA, 22 nt, Human
cugagcagccccaccagccauu

SEQ ID NO: 507086 - RNA, 22 nt, Human
ugaaauguuaaacaaguggcuc

SEQ ID NO: 507087 - RNA, 22 nt, Human
uccuggggaggguucuggcucc

SEQ ID NO: 507088 - RNA, 22 nt, Human
uucucuggacagugaagagagg

SEQ ID NO: 507089 - RNA, 22 nt, Human
ucucagagcuucaguuauuuuc

SEQ ID NO: 507090 - RNA, 22 nt, Human
agguccagcuguugcagccucc

SEQ ID NO: 507091 - RNA, 22 nt, Human
uggagaugaauauguguaccug

SEQ ID NO: 507092 - RNA, 22 nt, Human
cucccucuguccgaggccggcu

SEQ ID NO: 507093 - RNA, 22 nt, Human
ggaaaaauagaguauacuuuaa

SEQ ID NO: 507094 - RNA, 22 nt, Human
uuagauaauguuauuguaauuu

SEQ ID NO: 507095 - RNA, 21 nt, Human
aaagugguaaggauuauuuug

SEQ ID NO: 507096 - RNA, 22 nt, Human
ccagcuuuaucaagucugagcu

SEQ ID NO: 507097 - RNA, 22 nt, Human
auauaaagagcuuaguauagug

SEQ ID NO: 507098 - RNA, 22 nt, Human
ccuuagagaguacugggcugcc

SEQ ID NO: 507099 - RNA, 22 nt, Human
gcuagcuuuauaaugcugggcg

SEQ ID NO: 507100 - RNA, 22 nt, Human
guggcugggcuccgagcggcuu

SEQ ID NO: 507101 - RNA, 22 nt, Human
gggacagaaggaagugagcaca

SEQ ID NO: 507102 - RNA, 22 nt, Human
cuguggcuucuagguccccgau

SEQ ID NO: 507103 - RNA, 22 nt, Human
cuugggaggagaacaaagcucc

SEQ ID NO: 507104 - RNA, 19 nt, Human
agccagaguggcccagggg

SEQ ID NO: 507105 - RNA, 22 nt, Human
auccaggguguggagagagcuc

SEQ ID NO: 507106 - RNA, 22 nt, Human
augagcagaugcuccugccucu

SEQ ID NO: 507107 - RNA, 22 nt, Human
acauguguacuuuuaaggaugu

SEQ ID NO: 507108 - RNA, 22 nt, Human
ccuggguggcagagguugcagu

SEQ ID NO: 507109 - RNA, 22 nt, Human
ugaggagcgggcagggaugcag

SEQ ID NO: 507110 - RNA, 22 nt, Human
ugcugccaccccucaccagagc

SEQ ID NO: 507111 - RNA, 18 nt, Human
acauuucuccuucugacc

SEQ ID NO: 507112 - RNA, 22 nt, Human
uggugcugacaguucugagugc

SEQ ID NO: 507113 - RNA, 22 nt, Human
ggcuuuaucaaaugagacccug

SEQ ID NO: 507114 - RNA, 22 nt, Human
aaaugcucuccaaaaugaaagu

SEQ ID NO: 507115 - RNA, 17 nt, Human
ugaaggaaggaugaugu

SEQ ID NO: 507116 - RNA, 22 nt, Human
ucccagccugacagugcaucaa

SEQ ID NO: 507117 - RNA, 22 nt, Human
gcagaggagcaagcuggacacc

SEQ ID NO: 507118 - RNA, 22 nt, Human
caucaaauggcaagugaaagcu

SEQ ID NO: 507119 - RNA, 22 nt, Human
agggcuuugauguccaugagga

SEQ ID NO: 507120 - RNA, 19 nt, Human
uucuggggccuggccuugg

SEQ ID NO: 507121 - RNA, 21 nt, Human
ucacaucuauguuaagcaaac

SEQ ID NO: 507122 - RNA, 22 nt, Human
cacccagcuuuugcauccuccg

SEQ ID NO: 507123 - RNA, 22 nt, Human
caggaguccagagugucauuuu

SEQ ID NO: 507124 - RNA, 22 nt, Human
cugagcagugguucuugagcgc

SEQ ID NO: 507125 - RNA, 22 nt, Human
ugcccugcccaucuacccuguc

SEQ ID NO: 507126 - RNA, 22 nt, Human
uccugugucucagcgugaagca

SEQ ID NO: 507127 - RNA, 19 nt, Human
uccaauuucuauucauguu

SEQ ID NO: 507128 - RNA, 22 nt, Human
uagcugccuuugggcuccugcu

SEQ ID NO: 507129 - RNA, 22 nt, Human
cuccagggaggucugcaggacu

SEQ ID NO: 507130 - RNA, 22 nt, Human
auuagugucugugaauaauucu

SEQ ID NO: 507131 - RNA, 22 nt, Human
auuucuguggcuucauucuccu

SEQ ID NO: 507132 - RNA, 22 nt, Human
agcugagccagcagcaacagga

SEQ ID NO: 507133 - RNA, 22 nt, Human
gaaugugugacucuauugagca

SEQ ID NO: 507134 - RNA, 22 nt, Human
caggaaagagcugccaggcagg

SEQ ID NO: 507135 - RNA, 22 nt, Human
ccuggccagcgccggcugcucg

SEQ ID NO: 507136 - RNA, 22 nt, Human
aaauugcugugaggugguagua

SEQ ID NO: 507137 - RNA, 22 nt, Human
ugcacaaacacagagaauagau

SEQ ID NO: 507138 - RNA, 22 nt, Human
ugggcugaacuucaucugauga

SEQ ID NO: 507139 - RNA, 22 nt, Human
ugcaggugcagcgauacuguga

SEQ ID NO: 507140 - RNA, 22 nt, Human
gggaaacucaggcauuuccacu

SEQ ID NO: 507141 - RNA, 22 nt, Human
uggcagggccugcucaucaucc

SEQ ID NO: 507142 - RNA, 22 nt, Human
aaaacauguccauacagaaacu

SEQ ID NO: 507143 - RNA, 22 nt, Human
acagagccuccaggagugcugg

SEQ ID NO: 507144 - RNA, 22 nt, Human
aauggccauaucauugcagagc

SEQ ID NO: 507145 - RNA, 22 nt, Human
aggaaucccgcaccagcugcug

SEQ ID NO: 507146 - RNA, 22 nt, Human
ccacccuuggguucggaggccg

SEQ ID NO: 507147 - RNA, 22 nt, Human
augcauuuuugaguaugaauga

SEQ ID NO: 507148 - RNA, 22 nt, Human
ucaaauauuggcuauuucacau

SEQ ID NO: 507149 - RNA, 22 nt, Human
aaccaggugacucauggugagc

SEQ ID NO: 507150 - RNA, 22 nt, Human
ccuuaaaagaacuaucucuucu

SEQ ID NO: 507151 - RNA, 22 nt, Human
auguggaggaaaugaguguaca

SEQ ID NO: 507152 - RNA, 22 nt, Human
aaugucugccugaacuuuauau

SEQ ID NO: 507153 - RNA, 22 nt, Human
acagaugauuuuuaugaaaaca

SEQ ID NO: 507154 - RNA, 22 nt, Human
ccaggcugugguuuagauagag

SEQ ID NO: 507155 - RNA, 23 nt, Human
acucagugaagcaaacagauagu

SEQ ID NO: 507156 - RNA, 22 nt, Human
aacccuggggcagcugcuaggg

SEQ ID NO: 507157 - RNA, 22 nt, Human
uugcauaaaagaguauaucuua

SEQ ID NO: 507158 - RNA, 22 nt, Human
cuguggcuaauaauuaguauuu

SEQ ID NO: 507159 - RNA, 22 nt, Human
ucuuuacaucacaauuguaugg

SEQ ID NO: 507160 - RNA, 22 nt, Human
gccagccccuuagggcucuccc

SEQ ID NO: 507161 - RNA, 22 nt, Human
ugcuuccugcuaaggcugccug

SEQ ID NO: 507162 - RNA, 22 nt, Human
uacagaguuuuccugccaagaa

SEQ ID NO: 507163 - RNA, 22 nt, Human
cugggagagaagcgaagcuggg

SEQ ID NO: 507164 - RNA, 22 nt, Human
uucuggggccaauugccacugc

SEQ ID NO: 507165 - RNA, 22 nt, Human
aauaagacacacaacugucaag

SEQ ID NO: 507166 - RNA, 22 nt, Human
uggaaucucugguaucugggga

SEQ ID NO: 507167 - RNA, 22 nt, Human
cucuggagguggagguugcagu

SEQ ID NO: 507168 - RNA, 22 nt, Human
aaauacuguagauaauagaguu

SEQ ID NO: 507169 - RNA, 22 nt, Human
ugucauaaaacacaagcuguug

SEQ ID NO: 507170 - RNA, 22 nt, Human
uugggcaaaguguuucuggagc

SEQ ID NO: 507171 - RNA, 22 nt, Human
uccagggacagcgcuggagcua

SEQ ID NO: 507172 - RNA, 22 nt, Human
uauuaauucuugccaauucucc

SEQ ID NO: 507173 - RNA, 22 nt, Human
ccucucccgggugccgcugggc

SEQ ID NO: 507174 - RNA, 22 nt, Human
aagguagauucuggaucgaagg

SEQ ID NO: 507175 - RNA, 22 nt, Human
aaagcaauaguaaugguaauag

SEQ ID NO: 507176 - RNA, 22 nt, Human
uggagccaaggccaguucucag

SEQ ID NO: 507177 - RNA, 22 nt, Human
ugggcacaaacaucugccuguu

SEQ ID NO: 507178 - RNA, 22 nt, Human
ucugagaguagagcugccucuu

SEQ ID NO: 507179 - RNA, 22 nt, Human
cucuggaggccuaaggaagugg

SEQ ID NO: 507180 - RNA, 22 nt, Human
auugcuuuagaaagaaaaauau

SEQ ID NO: 507181 - RNA, 22 nt, Human
cagagcuggacuuaaauauauu

SEQ ID NO: 507182 - RNA, 22 nt, Human
cuggggcugcagcgaucuucau

SEQ ID NO: 507183 - RNA, 22 nt, Human
auggcagauggcuggagcaggu

SEQ ID NO: 507184 - RNA, 18 nt, Human
ugagaauguaagaaaugg

SEQ ID NO: 507185 - RNA, 22 nt, Human
aauaagcuggagcuauauugag

SEQ ID NO: 507186 - RNA, 21 nt, Human
uggccagcuggagucuccaca

SEQ ID NO: 507187 - RNA, 22 nt, Human
ugugugaauggauuauucuauu

SEQ ID NO: 507188 - RNA, 22 nt, Human
agauggggcugaaaguuccaau

SEQ ID NO: 507189 - RNA, 22 nt, Human
uggcucugucgccguuuggaau

SEQ ID NO: 507190 - RNA, 22 nt, Human
uagcagggucucaggagucagg

SEQ ID NO: 507191 - RNA, 22 nt, Human
guuuucagccaggagcacauuu

SEQ ID NO: 507192 - RNA, 22 nt, Human
gccugugcauagcagcggacuc

SEQ ID NO: 507193 - RNA, 22 nt, Human
aagagcuggcucuugcagcagc

SEQ ID NO: 507194 - RNA, 22 nt, Human
cugcccugagggccuguguguu

SEQ ID NO: 507195 - RNA, 22 nt, Human
ggacagcccauacacaugucug

SEQ ID NO: 507196 - RNA, 22 nt, Human
uuauuuucuccucagaaagugg

SEQ ID NO: 507197 - RNA, 20 nt, Human
acagaauaugcugguugugg

SEQ ID NO: 507198 - RNA, 22 nt, Human
ccagcucucugcagaaaggacu

SEQ ID NO: 507199 - RNA, 22 nt, Human
ggagacagugacuuagagacug

SEQ ID NO: 507200 - RNA, 22 nt, Human
aaauguagaccuauagggaccu

SEQ ID NO: 507201 - RNA, 22 nt, Human
aagucucagaaaacuagugugg

SEQ ID NO: 507202 - RNA, 22 nt, Human
cucaggaucgcuugcccuaggg

SEQ ID NO: 507203 - RNA, 23 nt, Human
gagagcccauuggcagggguacc

SEQ ID NO: 507204 - RNA, 22 nt, Human
cccuggagucagguuggccugg

SEQ ID NO: 507205 - RNA, 22 nt, Human
ccacuguaaguuugaaaauaac

SEQ ID NO: 507206 - RNA, 22 nt, Human
gucccuggguagcucaguggcu

SEQ ID NO: 507207 - RNA, 22 nt, Human
gugcauuugacgaauacucacu

SEQ ID NO: 507208 - RNA, 22 nt, Human
acuguacaacugcugagcagaa

SEQ ID NO: 507209 - RNA, 22 nt, Human
acugccuggccuggccucacug

SEQ ID NO: 507210 - RNA, 22 nt, Human
uucuguuuugcacagacuugaa

SEQ ID NO: 507211 - RNA, 22 nt, Human
acauuucuuuucaucucuauau

SEQ ID NO: 507212 - RNA, 22 nt, Human
ucccaaaguauuagcauuucaa

SEQ ID NO: 507213 - RNA, 22 nt, Human
cagccagggucaggcagcuucu

SEQ ID NO: 507214 - RNA, 23 nt, Human
uguaaacaucacccccuggaguu

SEQ ID NO: 507215 - RNA, 22 nt, Human
agcagcauagaagcugggagga

SEQ ID NO: 507216 - RNA, 22 nt, Human
auugcagcuggucaggguaauu

SEQ ID NO: 507217 - RNA, 22 nt, Human
caggcagcugaggacuuugcua

SEQ ID NO: 507218 - RNA, 22 nt, Human
guucugaguggcccaagcccug

SEQ ID NO: 507219 - RNA, 22 nt, Human
ucuguccucuuugaagcugcuc

SEQ ID NO: 507220 - RNA, 22 nt, Human
uaggcacaaaaugaaaauggca

SEQ ID NO: 507221 - RNA, 22 nt, Human
gguaugaaaugauuccauguua

SEQ ID NO: 507222 - RNA, 22 nt, Human
guuacucuuccccggggucugg

SEQ ID NO: 507223 - RNA, 22 nt, Human
ugagcuuccucccugcauccau

SEQ ID NO: 507224 - RNA, 22 nt, Human
cuucaggauuuaggaagaugaa

SEQ ID NO: 507225 - RNA, 22 nt, Human
ugcucuggguccugggccuccu

SEQ ID NO: 507226 - RNA, 22 nt, Human
ggcugggagccccacagaguca

SEQ ID NO: 507227 - RNA, 23 nt, Human
acaccugugcuguagucacuaca

SEQ ID NO: 507228 - RNA, 22 nt, Human
guacacacaaucucuggucagu

SEQ ID NO: 507229 - RNA, 22 nt, Human
gcuggagccauuggcuuggccu

SEQ ID NO: 507230 - RNA, 22 nt, Human
cuggcuccucaggacugcggga

SEQ ID NO: 507231 - RNA, 22 nt, Human
uuuacaagucagggacuguucu

SEQ ID NO: 507232 - RNA, 22 nt, Human
ugggaccucucuugagagagca

SEQ ID NO: 507233 - RNA, 22 nt, Human
gggacccugggaggcuggcgca

SEQ ID NO: 507234 - RNA, 22 nt, Human
uguccagggggcuuaccuggag

SEQ ID NO: 507235 - RNA, 22 nt, Human
uuuuaccugaaccacacaguau

SEQ ID NO: 507236 - RNA, 22 nt, Human
ugguccagugacagauaggcac

SEQ ID NO: 507237 - RNA, 22 nt, Human
ccacuguauuuuggaagcagau

SEQ ID NO: 507238 - RNA, 22 nt, Human
uuaaaaugaauauugauuagca

SEQ ID NO: 507239 - RNA, 22 nt, Human
ucucagugggaagggcacaguu

SEQ ID NO: 507240 - RNA, 22 nt, Human
gaauauauuggugaaaauaguu

SEQ ID NO: 507241 - RNA, 22 nt, Human
agggcuggagccacagcuggga

SEQ ID NO: 507242 - RNA, 18 nt, Human
ugguccaguucagauaua

SEQ ID NO: 507243 - RNA, 18 nt, Human
gaugggagcaagagaaga

SEQ ID NO: 507244 - RNA, 22 nt, Human
uucuuucucuguaaaaggaaaa

SEQ ID NO: 507245 - RNA, 23 nt, Human
uucaaagcuuaagcucuuuccac

SEQ ID NO: 507246 - RNA, 22 nt, Human
aaacuuguucucuugugccuau

SEQ ID NO: 507247 - RNA, 22 nt, Human
ugaggcaaagacaaagcagcau

SEQ ID NO: 507248 - RNA, 22 nt, Human
uggccuggaaccuggcagggac

SEQ ID NO: 507249 - RNA, 22 nt, Human
ggccuguguccuccuugcccug

SEQ ID NO: 507250 - RNA, 20 nt, Human
ggucccugcccucugucauc

SEQ ID NO: 507251 - RNA, 20 nt, Human
gucucaaguaucucacaguc

SEQ ID NO: 507252 - RNA, 22 nt, Human
cuguaugaaauugucauuuuua

SEQ ID NO: 507253 - RNA, 22 nt, Human
caguccugcuggccuucccugg

SEQ ID NO: 507254 - RNA, 23 nt, Human
uuuagcuucccuuuaguuagggg

SEQ ID NO: 507255 - RNA, 22 nt, Human
cuggcugccagcauuuggggga

SEQ ID NO: 507256 - RNA, 22 nt, Human
ccagcugggauuaagggaaaau

SEQ ID NO: 507257 - RNA, 22 nt, Human
uccuggcuccugaucugucacu

SEQ ID NO: 507258 - RNA, 22 nt, Human
gagcagcucagaggacuagugu

SEQ ID NO: 507259 - RNA, 22 nt, Human
acacagggucuagaguuaggcc

SEQ ID NO: 507260 - RNA, 22 nt, Human
ggugaaggcacaagagggcaag

SEQ ID NO: 507261 - RNA, 22 nt, Human
auucacaacaaaaggauaugag

SEQ ID NO: 507262 - RNA, 19 nt, Human
ccugcagggaugagagguu

SEQ ID NO: 507263 - RNA, 22 nt, Human
ccucccacauugaggacaugcu

SEQ ID NO: 507264 - RNA, 22 nt, Human
uccuuucccuuuccauccuggc

SEQ ID NO: 507265 - RNA, 19 nt, Human
gagcagcugcacccauuga

SEQ ID NO: 507266 - RNA, 20 nt, Human
cuuagcuaguaagaagcugu

SEQ ID NO: 507267 - RNA, 22 nt, Human
cacaggaggaggccagagcgua

SEQ ID NO: 507268 - RNA, 20 nt, Human
cacaacuguccacaugcucc

SEQ ID NO: 507269 - RNA, 22 nt, Human
uggcucuguugagguauggauu

SEQ ID NO: 507270 - RNA, 22 nt, Human
cugggcucuucccagauccaga

SEQ ID NO: 507271 - RNA, 22 nt, Human
ugaaggagcugauguaaggggu

SEQ ID NO: 507272 - RNA, 22 nt, Human
cugaaugaaugguuugucuuau

SEQ ID NO: 507273 - RNA, 22 nt, Human
cugugcuggcagaccuggaguu

SEQ ID NO: 507274 - RNA, 22 nt, Human
aucucuggccccugggguccga

SEQ ID NO: 507275 - RNA, 22 nt, Human
ucacagccuggucacucugccc

SEQ ID NO: 507276 - RNA, 22 nt, Human
cucugagagcggucuguggcuu

SEQ ID NO: 507277 - RNA, 22 nt, Human
gagcuggaggaccaggacuggg

SEQ ID NO: 507278 - RNA, 22 nt, Human
gcugaggccaguuuaaugagga

SEQ ID NO: 507279 - RNA, 22 nt, Human
uccacccccagacagcugguga

SEQ ID NO: 507280 - RNA, 22 nt, Human
agaaaaggauugauggaucaga

SEQ ID NO: 507281 - RNA, 22 nt, Human
ccagacuguggaguuccuggug

SEQ ID NO: 507282 - RNA, 22 nt, Human
guccugguuuucacagaccuuu

SEQ ID NO: 507283 - RNA, 22 nt, Human
cuggagucacucauguagcugc

SEQ ID NO: 507284 - RNA, 22 nt, Human
ugcacacagaugguacaugcau

SEQ ID NO: 507285 - RNA, 22 nt, Human
ggaugcuggggaccaaucucug

SEQ ID NO: 507286 - RNA, 22 nt, Human
uugcagagaucagcagguuuga

SEQ ID NO: 507287 - RNA, 22 nt, Human
uccuuagccagggcagcucaaa

SEQ ID NO: 507288 - RNA, 22 nt, Human
cagggcucgcucuugcccuucg

SEQ ID NO: 507289 - RNA, 21 nt, Human
cagcaaaucauugggcagacu

SEQ ID NO: 507290 - RNA, 22 nt, Human
uuuggucucugugcauccuccu

SEQ ID NO: 507291 - RNA, 22 nt, Human
ggcucuggggaagcucucuuca

SEQ ID NO: 507292 - RNA, 22 nt, Human
cugccucuccccagaguggccc

SEQ ID NO: 507293 - RNA, 22 nt, Human
cagugcuguuguaagcucauug

SEQ ID NO: 507294 - RNA, 22 nt, Human
ucuggggagucaaagagaccug

SEQ ID NO: 507295 - RNA, 22 nt, Human
augcccugcugcuggggcagug

SEQ ID NO: 507296 - RNA, 22 nt, Human
acagggcagugucuugaaaaau

SEQ ID NO: 507297 - RNA, 23 nt, Human
uuuagcaugaagcagcuggagaa

SEQ ID NO: 507298 - RNA, 22 nt, Human
aaugugguuaacccauuuaaga

SEQ ID NO: 507299 - RNA, 22 nt, Human
uuauuccauucaguucaacaag

SEQ ID NO: 507300 - RNA, 22 nt, Human
cccagccaaggugcugguguug

SEQ ID NO: 507301 - RNA, 22 nt, Human
gcucaggaccgaggggugggaa

SEQ ID NO: 507302 - RNA, 22 nt, Human
auuucugauacccggucacccu

SEQ ID NO: 507303 - RNA, 21 nt, Human
guccucagcugaugggagcug

SEQ ID NO: 507304 - RNA, 22 nt, Human
uuggguuuucccuugaaacuga

SEQ ID NO: 507305 - RNA, 21 nt, Human
cagaggcaggcucugugugug

SEQ ID NO: 507306 - RNA, 22 nt, Human
aaacagugacugguacauaaua

SEQ ID NO: 507307 - RNA, 22 nt, Human
aaaucaguucacguucugaggu

SEQ ID NO: 507308 - RNA, 22 nt, Human
gaaggaaaggucucaugccuuu

SEQ ID NO: 507309 - RNA, 22 nt, Human
gcucagccgaacuucagagcag

SEQ ID NO: 507310 - RNA, 17 nt, Human
gcaggcacugcugccug

SEQ ID NO: 507311 - RNA, 22 nt, Human
ugccucagagugggcuugcuau

SEQ ID NO: 507312 - RNA, 22 nt, Human
caguccugcuagugugaaaagc

SEQ ID NO: 507313 - RNA, 22 nt, Human
cugaaggagcauagucaguuuu

SEQ ID NO: 507314 - RNA, 22 nt, Human
aguguuuaaugccuuuuccagc

SEQ ID NO: 507315 - RNA, 22 nt, Human
acauuuuuacugggcaucugca

SEQ ID NO: 507316 - RNA, 20 nt, Human
acaguggguggggagcacug

SEQ ID NO: 507317 - RNA, 22 nt, Human
gcugccuccaaucugugccccg

SEQ ID NO: 507318 - RNA, 22 nt, Human
uuugaaaggagcuuuauccaga

SEQ ID NO: 507319 - RNA, 20 nt, Human
gacaggagaguuagguaggu

SEQ ID NO: 507320 - RNA, 22 nt, Human
cugccuugaggagguuguggga

SEQ ID NO: 507321 - RNA, 22 nt, Human
gccuccccugcaauuguccuug

SEQ ID NO: 507322 - RNA, 22 nt, Human
uagggcagaguccaggaugggc

SEQ ID NO: 507323 - RNA, 22 nt, Human
cagggcuccccgcaccgcagcc

SEQ ID NO: 507324 - RNA, 22 nt, Human
agaccaugggcuccugggacau

SEQ ID NO: 507325 - RNA, 22 nt, Human
cccaggguggaugcaagcagca

SEQ ID NO: 507326 - RNA, 22 nt, Human
ucagggcaagauugguuaauaa

SEQ ID NO: 507327 - RNA, 22 nt, Human
cccagcuugcgggcggcaggag

SEQ ID NO: 507328 - RNA, 22 nt, Human
aagagcaucuauuucacagugg

SEQ ID NO: 507329 - RNA, 22 nt, Human
gcuuuauuuugugagggauuac

SEQ ID NO: 507330 - RNA, 20 nt, Human
gcuuccagaggaggccccgu

SEQ ID NO: 507331 - RNA, 22 nt, Human
cagaagaguagcugaacaaguu

SEQ ID NO: 507332 - RNA, 22 nt, Human
ugcuuuauucccuucugaugug

SEQ ID NO: 507333 - RNA, 22 nt, Human
ccagagaguaaacauuuuccgg

SEQ ID NO: 507334 - RNA, 22 nt, Human
cagcacagggacaauagcagau

SEQ ID NO: 507335 - RNA, 22 nt, Human
cacaggagaaaggggaagcucg

SEQ ID NO: 507336 - RNA, 19 nt, Human
uggcucuguuucucuggag

SEQ ID NO: 507337 - RNA, 22 nt, Human
ucucagggagggcgagucagcg

SEQ ID NO: 507338 - RNA, 22 nt, Human
caugggcuacagaagcaugcug

SEQ ID NO: 507339 - RNA, 22 nt, Human
ucacaggguaucugggauggau

SEQ ID NO: 507340 - RNA, 22 nt, Human
ggcugcagaaguacuuccggau

SEQ ID NO: 507341 - RNA, 23 nt, Human
cccagcagagaugaggagggguc

SEQ ID NO: 507342 - RNA, 22 nt, Human
ugagucugggcauguucacuuu

SEQ ID NO: 507343 - RNA, 20 nt, Human
acaggggcagcacaauaaug

SEQ ID NO: 507344 - RNA, 22 nt, Human
gggcucucgauuagacccuggg

SEQ ID NO: 507345 - RNA, 23 nt, Human
gagagcugacugucaagacuguu

SEQ ID NO: 507346 - RNA, 22 nt, Human
uagaaaucauuuagaaguauug

SEQ ID NO: 507347 - RNA, 22 nt, Human
cugugacugggugacaguccuc

SEQ ID NO: 507348 - RNA, 22 nt, Human
guggcagguuccguagacagca

SEQ ID NO: 507349 - RNA, 22 nt, Human
uagaaguugcucaauaaauguu

SEQ ID NO: 507350 - RNA, 22 nt, Human
aagacagagggaagcaaugaug

SEQ ID NO: 507351 - RNA, 21 nt, Human
ugucagagcuuguaggacauu

SEQ ID NO: 507352 - RNA, 22 nt, Human
agccagccgggggaccacagug

SEQ ID NO: 507353 - RNA, 22 nt, Human
uggccaggaggcugcuucugac

SEQ ID NO: 507354 - RNA, 22 nt, Human
uugggcuggcagagguggucuu

SEQ ID NO: 507355 - RNA, 22 nt, Human
aaggggaagagaccgcagaguc

SEQ ID NO: 507356 - RNA, 22 nt, Human
ggcucccuggaaaucccgaggc

SEQ ID NO: 507357 - RNA, 22 nt, Human
aaagaugucacaagaugugaug

SEQ ID NO: 507358 - RNA, 22 nt, Human
auuucuguaguccacauucuuu

SEQ ID NO: 507359 - RNA, 22 nt, Human
cagggcaguaacgggaacaucu

SEQ ID NO: 507360 - RNA, 22 nt, Human
ggcagcugucucugaguuagca

SEQ ID NO: 507361 - RNA, 22 nt, Human
cucaggaguuggaggcuacagu

SEQ ID NO: 507362 - RNA, 22 nt, Human
cccaguguuccuugaggggcug

SEQ ID NO: 507363 - RNA, 19 nt, Human
ggcugucucggcccagcca

SEQ ID NO: 507364 - RNA, 22 nt, Human
cauguacauucuguagauggag

SEQ ID NO: 507365 - RNA, 22 nt, Human
gauugaaacauaggcagucgag

SEQ ID NO: 507366 - RNA, 22 nt, Human
ugguaaaguguacugaauauga

SEQ ID NO: 507367 - RNA, 22 nt, Human
uguacacugcaggaugcauugc

SEQ ID NO: 507368 - RNA, 18 nt, Human
ugacucacccugucagug

SEQ ID NO: 507369 - RNA, 22 nt, Human
ucagcaggcucugguugaccau

SEQ ID NO: 507370 - RNA, 22 nt, Human
cauucucaauaguagaugagua

SEQ ID NO: 507371 - RNA, 22 nt, Human
cagcuuuguggccuugaccucg

SEQ ID NO: 507372 - RNA, 22 nt, Human
uugcuauuuugagagucauagu

SEQ ID NO: 507373 - RNA, 22 nt, Human
cagcucugguuccugggcccag

SEQ ID NO: 507374 - RNA, 22 nt, Human
uccucagcuuugguuuacucau

SEQ ID NO: 507375 - RNA, 22 nt, Human
ugguuccuacgcacauugaauu

SEQ ID NO: 507376 - RNA, 20 nt, Human
uccaggcccacucagcugaa

SEQ ID NO: 507377 - RNA, 22 nt, Human
cucugagguccuucccagcucu

SEQ ID NO: 507378 - RNA, 22 nt, Human
cacauaauaaauguuccugaug

SEQ ID NO: 507379 - RNA, 22 nt, Human
aaaggcagagugcucagcuggc

SEQ ID NO: 507380 - RNA, 22 nt, Human
cacagugugggcauggugccug

SEQ ID NO: 507381 - RNA, 22 nt, Human
uccugcagcugcagaccugggg

SEQ ID NO: 507382 - RNA, 22 nt, Human
gggcagcucucacagcagccaa

SEQ ID NO: 507383 - RNA, 22 nt, Human
uaccaaauguaaucauucuaau

SEQ ID NO: 507384 - RNA, 23 nt, Human
agcuucauugaccuccgcagggg

SEQ ID NO: 507385 - RNA, 22 nt, Human
ucugggagagucuaacuuguuu

SEQ ID NO: 507386 - RNA, 22 nt, Human
cccaugagauucugaauuuggc

SEQ ID NO: 507387 - RNA, 22 nt, Human
ucugcagcuucuugccagagag

SEQ ID NO: 507388 - RNA, 22 nt, Human
uaaaugcaaugugcuuuaccag

SEQ ID NO: 507389 - RNA, 22 nt, Human
ugcacuggggucccagcgcacg

SEQ ID NO: 507390 - RNA, 22 nt, Human
auuagcuucaaagccaucaacc

SEQ ID NO: 507391 - RNA, 22 nt, Human
aggguccuaagccucagauaag

SEQ ID NO: 507392 - RNA, 22 nt, Human
cagcucugcugggaggaugcag

SEQ ID NO: 507393 - RNA, 20 nt, Human
cugagcccccagccugcagg

SEQ ID NO: 507394 - RNA, 22 nt, Human
ugcugggggcuuucuggauacc

SEQ ID NO: 507395 - RNA, 22 nt, Human
augaguaagaccauaauuuuug

SEQ ID NO: 507396 - RNA, 22 nt, Human
uuuuaaucaugcuucuaugucc

SEQ ID NO: 507397 - RNA, 22 nt, Human
cccuggaggagcuuagagcuug

SEQ ID NO: 507398 - RNA, 22 nt, Human
aggcuccaccccgccagaccuu

SEQ ID NO: 507399 - RNA, 22 nt, Human
gaaggaggucugauacaauaug

SEQ ID NO: 507400 - RNA, 22 nt, Human
gccuggagcagacgugucccgg

SEQ ID NO: 507401 - RNA, 22 nt, Human
acagggcauuuccucuaugugu

SEQ ID NO: 507402 - RNA, 22 nt, Human
cuguuaaaugagaaagcagacu

SEQ ID NO: 507403 - RNA, 22 nt, Human
gccugagauucugcauuucuaa

SEQ ID NO: 507404 - RNA, 22 nt, Human
ucaucacauguguagucauccc

SEQ ID NO: 507405 - RNA, 22 nt, Human
gcucuggagauggagccuugag

SEQ ID NO: 507406 - RNA, 20 nt, Human
agcacagcgcgguguuccuu

SEQ ID NO: 507407 - RNA, 21 nt, Human
ccaggucuugguccuuggacu

SEQ ID NO: 507408 - RNA, 22 nt, Human
ucuuugcagaauuuaacuuugc

SEQ ID NO: 507409 - RNA, 22 nt, Human
cugugcaagcccaagauaaaac

SEQ ID NO: 507410 - RNA, 22 nt, Human
aucaacagugaagagaucaaga

SEQ ID NO: 507411 - RNA, 22 nt, Human
cuccagaagacccauccucaug

SEQ ID NO: 507412 - RNA, 22 nt, Human
gccuagagaaaaagccucugca

SEQ ID NO: 507413 - RNA, 22 nt, Human
gagcagagcuucucaaaguaaa

SEQ ID NO: 507414 - RNA, 22 nt, Human
gcagcucucuggccugcccugg

SEQ ID NO: 507415 - RNA, 22 nt, Human
auuuuucucuccacuccauuaa

SEQ ID NO: 507416 - RNA, 22 nt, Human
cuccugggcugucggcgcucug

SEQ ID NO: 507417 - RNA, 22 nt, Human
acauauugagcucuaaaaguac

SEQ ID NO: 507418 - RNA, 22 nt, Human
ugaaauaucauuuucaucuccc

SEQ ID NO: 507419 - RNA, 22 nt, Human
aaugaacacagcccucuacuuu

SEQ ID NO: 507420 - RNA, 21 nt, Human
acagucuccccagaucucucc

SEQ ID NO: 507421 - RNA, 22 nt, Human
gucagggcuccacucacccucc

SEQ ID NO: 507422 - RNA, 22 nt, Human
accugccucagugcagcuggau

SEQ ID NO: 507423 - RNA, 22 nt, Human
ucugggcugggagcguguggac

SEQ ID NO: 507424 - RNA, 17 nt, Human
guccugggaggagagag

SEQ ID NO: 507425 - RNA, 22 nt, Human
gcagcuuuagaaacaagggcug

SEQ ID NO: 507426 - RNA, 22 nt, Human
gggaaacuguccaguucucccc

SEQ ID NO: 507427 - RNA, 22 nt, Human
cggcagcuccgcgccguaggac

SEQ ID NO: 507428 - RNA, 22 nt, Human
aggagcagaacuguuguggagg

SEQ ID NO: 507429 - RNA, 22 nt, Human
cuugaaagcacuuaguaaauua

SEQ ID NO: 507430 - RNA, 22 nt, Human
gucccacugggcaacuagaaaa

SEQ ID NO: 507431 - RNA, 22 nt, Human
gcaguguuacuugguuugcaga

SEQ ID NO: 507432 - RNA, 22 nt, Human
uuguggaagcccuaugagagac

SEQ ID NO: 507433 - RNA, 22 nt, Human
ugggcugcuucuauuggugguc

SEQ ID NO: 507434 - RNA, 22 nt, Human
aaagccuggguuccucacuauc

SEQ ID NO: 507435 - RNA, 22 nt, Human
auugugaauagugccgcaguaa

SEQ ID NO: 507436 - RNA, 22 nt, Human
ucagcccuuccuggagcuuuua

SEQ ID NO: 507437 - RNA, 22 nt, Human
aaagauuuaugaaguucaauua

SEQ ID NO: 507438 - RNA, 22 nt, Human
aaaaaugaauucuucaguggca

SEQ ID NO: 507439 - RNA, 22 nt, Human
gccaagcucaccuucugaugga

SEQ ID NO: 507440 - RNA, 22 nt, Human
uggaagccaggcccgcuccuaa

SEQ ID NO: 507441 - RNA, 22 nt, Human
augcagaaagcggcaaacaggu

SEQ ID NO: 507442 - RNA, 22 nt, Human
agcagcagauucagcaggaaug

SEQ ID NO: 507443 - RNA, 22 nt, Human
gaaacauucagucaacaguguu

SEQ ID NO: 507444 - RNA, 22 nt, Human
uauguacauaacaugaaaugca

SEQ ID NO: 507445 - RNA, 22 nt, Human
ugggagagaauucuggugacug

SEQ ID NO: 507446 - RNA, 22 nt, Human
gagcagagacaguacaacuggc

SEQ ID NO: 507447 - RNA, 22 nt, Human
guuugccugugauguacauuuc

SEQ ID NO: 507448 - RNA, 22 nt, Human
ugugggcucccccucacucugu

SEQ ID NO: 507449 - RNA, 22 nt, Human
cagcucuggcuauugaggacca

SEQ ID NO: 507450 - RNA, 22 nt, Human
cuccagggagcuguggagguuu

SEQ ID NO: 507451 - RNA, 22 nt, Human
ucugagcuucugcauuuccaac

SEQ ID NO: 507452 - RNA, 22 nt, Human
uaugaaauuucuaguucugcuu

SEQ ID NO: 507453 - RNA, 22 nt, Human
aaaucuggccccuugccuauuu

SEQ ID NO: 507454 - RNA, 22 nt, Human
ugcucuggaaauaaaugauuua

SEQ ID NO: 507455 - RNA, 22 nt, Human
agugugagccuacaggccaaag

SEQ ID NO: 507456 - RNA, 22 nt, Human
uauagaaguaagcauugugaug

SEQ ID NO: 507457 - RNA, 22 nt, Human
uggcugugcggccucgggcaga

SEQ ID NO: 507458 - RNA, 22 nt, Human
cucucugggaauauuuuauucu

SEQ ID NO: 507459 - RNA, 22 nt, Human
aaucucuugggaggaaugaauu

SEQ ID NO: 507460 - RNA, 22 nt, Human
agcugccaucugaagaacugca

SEQ ID NO: 507461 - RNA, 22 nt, Human
uccugagggacugguuccucgc

SEQ ID NO: 507462 - RNA, 22 nt, Human
agagaggcugggcguagggcuu

SEQ ID NO: 507463 - RNA, 21 nt, Human
uccauuguuuucccaggguuu

SEQ ID NO: 507464 - RNA, 22 nt, Human
aaugcaaagcucuuuaauccuu

SEQ ID NO: 507465 - RNA, 22 nt, Human
ggcagggugccuggcuccuguu

SEQ ID NO: 507466 - RNA, 22 nt, Human
uuccuugaccacugcauaauga

SEQ ID NO: 507467 - RNA, 22 nt, Human
ggggauggauuccgggucccug

SEQ ID NO: 507468 - RNA, 22 nt, Human
gggcugacaaccaucugacaag

SEQ ID NO: 507469 - RNA, 22 nt, Human
ugggggugcugagaagacagga

SEQ ID NO: 507470 - RNA, 22 nt, Human
aauaagcugcuaggaacuuagu

SEQ ID NO: 507471 - RNA, 22 nt, Human
auuagcuuaucacacaagcugc

SEQ ID NO: 507472 - RNA, 22 nt, Human
ugggcuuaggucggaggcggcc

SEQ ID NO: 507473 - RNA, 21 nt, Human
aucucgggcuucucgcccagc

SEQ ID NO: 507474 - RNA, 22 nt, Human
uacauacacaaauauacuguuu

SEQ ID NO: 507475 - RNA, 22 nt, Human
ccuggcuccgugucacgugccc

SEQ ID NO: 507476 - RNA, 22 nt, Human
cugagcagugcuuugcaguggg

SEQ ID NO: 507477 - RNA, 22 nt, Human
ugugacagugccagcuucauag

SEQ ID NO: 507478 - RNA, 22 nt, Human
cugagggcuggagcugaggccu

SEQ ID NO: 507479 - RNA, 22 nt, Human
gcacccagcccagggcgugaug

SEQ ID NO: 507480 - RNA, 22 nt, Human
agaagccagauuguagugggac

SEQ ID NO: 507481 - RNA, 22 nt, Human
agucucugccagcuuguccucu

SEQ ID NO: 507482 - RNA, 22 nt, Human
ggaaagauuugucacaugaaug

SEQ ID NO: 507483 - RNA, 22 nt, Human
uccugggcgauuuucugaauau

SEQ ID NO: 507484 - RNA, 22 nt, Human
acaggacagguaggauucgcag

SEQ ID NO: 507485 - RNA, 22 nt, Human
gccaaaucuugcacacucuugu

SEQ ID NO: 507486 - RNA, 22 nt, Human
auaaugcauuuagaauaauuca

SEQ ID NO: 507487 - RNA, 21 nt, Human
cugugcuucuuccuaagccag

SEQ ID NO: 507488 - RNA, 22 nt, Human
uucaacuuuggagauuuaauaa

SEQ ID NO: 507489 - RNA, 22 nt, Human
aagggcucugcugucucucccc

SEQ ID NO: 507490 - RNA, 22 nt, Human
cuguggcucucagaggcugcug

SEQ ID NO: 507491 - RNA, 22 nt, Human
gaaguucucagcuaggugaugu

SEQ ID NO: 507492 - RNA, 22 nt, Human
guccucuguguaggcugcagac

SEQ ID NO: 507493 - RNA, 22 nt, Human
gcagagcuucuguccuucagga

SEQ ID NO: 507494 - RNA, 22 nt, Human
uuccuuccgggcaccaggcacu

SEQ ID NO: 507495 - RNA, 22 nt, Human
agcugcugcgccucacccuggc

SEQ ID NO: 507496 - RNA, 22 nt, Human
gagguagcaugcuggaagggac

SEQ ID NO: 507497 - RNA, 22 nt, Human
gcaguggcuaagcucgcaugca

SEQ ID NO: 507498 - RNA, 23 nt, Human
ccaagacuguuaggaguggggag

SEQ ID NO: 507499 - RNA, 19 nt, Human
ugaucuggaaggaaccagg

SEQ ID NO: 507500 - RNA, 22 nt, Human
auaugaagucagacaaacuggg

SEQ ID NO: 507501 - RNA, 22 nt, Human
uucauggaucaugccuuuugug

SEQ ID NO: 507502 - RNA, 22 nt, Human
uugaacagcuguuacauuguua

SEQ ID NO: 507503 - RNA, 22 nt, Human
agaaaauaauuucuuggcuggu

SEQ ID NO: 507504 - RNA, 20 nt, Human
aggcucagcugagcucuugg

SEQ ID NO: 507505 - RNA, 22 nt, Human
auuauucuuaugucaucauggc

SEQ ID NO: 507506 - RNA, 22 nt, Human
ccacugggggcugcucccaggu

SEQ ID NO: 507507 - RNA, 22 nt, Human
uagcuuuagugaaaaauaucag

SEQ ID NO: 507508 - RNA, 22 nt, Human
augucccagcugagagacaacu

SEQ ID NO: 507509 - RNA, 22 nt, Human
ucacauuuucuacuacuguacg

SEQ ID NO: 507510 - RNA, 22 nt, Human
aaucuggcauguaagcuuagag

SEQ ID NO: 507511 - RNA, 22 nt, Human
uuggcuucugauguauuccuga

SEQ ID NO: 507512 - RNA, 22 nt, Human
gaugaagccccaguguaaguaa

SEQ ID NO: 507513 - RNA, 22 nt, Human
ugagaauuacaaaugagucaca

SEQ ID NO: 507514 - RNA, 22 nt, Human
acauucuguuuccccaaagaga

SEQ ID NO: 507515 - RNA, 22 nt, Human
ugugucuguuuugcucaccauu

SEQ ID NO: 507516 - RNA, 22 nt, Human
uccugcagccuugggcuggagc

SEQ ID NO: 507517 - RNA, 22 nt, Human
ugguccaguucugugauauugc

SEQ ID NO: 507518 - RNA, 22 nt, Human
ggaugcacgaaggcgccucgga

SEQ ID NO: 507519 - RNA, 22 nt, Human
gcaggagcuggaaagugauguu

SEQ ID NO: 507520 - RNA, 22 nt, Human
uucuacaucacuuaacaugcua

SEQ ID NO: 507521 - RNA, 22 nt, Human
ggcuccagcccuggcucuucac

SEQ ID NO: 507522 - RNA, 22 nt, Human
gggugggaucuguggagccuca

SEQ ID NO: 507523 - RNA, 20 nt, Human
gauacacagcacagagggcc

SEQ ID NO: 507524 - RNA, 22 nt, Human
ucagguccucugggucccagcc

SEQ ID NO: 507525 - RNA, 22 nt, Human
uaggguccaagccuuauaauua

SEQ ID NO: 507526 - RNA, 22 nt, Human
uggcccugacagguccugggca

SEQ ID NO: 507527 - RNA, 22 nt, Human
accuucaacucaaaguguccca

SEQ ID NO: 507528 - RNA, 22 nt, Human
aaguucaaggaagccuccaguu

SEQ ID NO: 507529 - RNA, 22 nt, Human
uuaaacagguuuuugaauggcc

SEQ ID NO: 507530 - RNA, 22 nt, Human
uucugguucucaggaaugcuaa

SEQ ID NO: 507531 - RNA, 22 nt, Human
cagcacuaggauauacauuucc

SEQ ID NO: 507532 - RNA, 22 nt, Human
ucccaggcuaggccucugcguu

SEQ ID NO: 507533 - RNA, 22 nt, Human
aacagcuugcugcaccuuaaua

SEQ ID NO: 507534 - RNA, 22 nt, Human
gagagcuguaauagucaugucu

SEQ ID NO: 507535 - RNA, 22 nt, Human
uggcucuguuuguuaacuagac

SEQ ID NO: 507536 - RNA, 22 nt, Human
aggugggcccagugggcuccag

SEQ ID NO: 507537 - RNA, 22 nt, Human
caggcagaagaaguggaaggac

SEQ ID NO: 507538 - RNA, 22 nt, Human
ugcugucuguuuacuggcuaua

SEQ ID NO: 507539 - RNA, 22 nt, Human
aaaauauuuuagggccaggaga

SEQ ID NO: 507540 - RNA, 22 nt, Human
agacucaagacugcagaagacg

SEQ ID NO: 507541 - RNA, 22 nt, Human
ugguccugccccgugcacagag

SEQ ID NO: 507542 - RNA, 22 nt, Human
caggggccggcuguccgugccc

SEQ ID NO: 507543 - RNA, 22 nt, Human
ugaaaucuuauacuuugguagu

SEQ ID NO: 507544 - RNA, 22 nt, Human
ucaguguuuacaugcauccuug

SEQ ID NO: 507545 - RNA, 22 nt, Human
uguuuuuccaugugcagaacaa

SEQ ID NO: 507546 - RNA, 22 nt, Human
caggcaggcugcuuuuuguuca

SEQ ID NO: 507547 - RNA, 22 nt, Human
uccugccugagcguggaggagg

SEQ ID NO: 507548 - RNA, 22 nt, Human
uuaaauaguaggucuauuuugg

SEQ ID NO: 507549 - RNA, 21 nt, Human
agaaaauggcguuuuagauuu

SEQ ID NO: 507550 - RNA, 23 nt, Human
uccugagaugagacagugcugcc

SEQ ID NO: 507551 - RNA, 22 nt, Human
ccagagcugaugggcccagggu

SEQ ID NO: 507552 - RNA, 22 nt, Human
gagggguccaggaggcacuuac

SEQ ID NO: 507553 - RNA, 22 nt, Human
guucacauccuugugaggauuu

SEQ ID NO: 507554 - RNA, 22 nt, Human
cauguuuuguguacagaauauu

SEQ ID NO: 507555 - RNA, 22 nt, Human
ggguuccuccaguuccuagagc

SEQ ID NO: 507556 - RNA, 22 nt, Human
gcagcuggcccugacacgcaga

SEQ ID NO: 507557 - RNA, 22 nt, Human
aaagugcugggauuacaagugu

SEQ ID NO: 507558 - RNA, 22 nt, Human
auguccuggucuagcuuccggg

SEQ ID NO: 507559 - RNA, 22 nt, Human
uugcagcuuagugauguuaucu

SEQ ID NO: 507560 - RNA, 18 nt, Human
gaagugaagugacucaau

SEQ ID NO: 507561 - RNA, 22 nt, Human
ucugcagauuuaucagcagcug

SEQ ID NO: 507562 - RNA, 22 nt, Human
ggcagcaggcgacuucccuauu

SEQ ID NO: 507563 - RNA, 22 nt, Human
guccagggggcuuaagcaaacu

SEQ ID NO: 507564 - RNA, 22 nt, Human
uguaaaaccaaaucaaucuagu

SEQ ID NO: 507565 - RNA, 22 nt, Human
cacauuucugugagucaauauu

SEQ ID NO: 507566 - RNA, 22 nt, Human
aaguguauauaugacuuauaaa

SEQ ID NO: 507567 - RNA, 18 nt, Human
uggcucagauggcuuuaa

SEQ ID NO: 507568 - RNA, 22 nt, Human
gauacauuuuaucuccuaacag

SEQ ID NO: 507569 - RNA, 22 nt, Human
agacacaguauaagcacaacaa

SEQ ID NO: 507570 - RNA, 22 nt, Human
cacaguaagaaaugaagaggua

SEQ ID NO: 507571 - RNA, 22 nt, Human
uugggggcagagggagcaucug

SEQ ID NO: 507572 - RNA, 22 nt, Human
uuucauaaugucacagucaaaa

SEQ ID NO: 507573 - RNA, 22 nt, Human
cuuccagagauagggccucaag

SEQ ID NO: 507574 - RNA, 22 nt, Human
aggcagagcuaggaagaauugu

SEQ ID NO: 507575 - RNA, 22 nt, Human
ggccccaggaccuccacggucc

SEQ ID NO: 507576 - RNA, 22 nt, Human
ugggcaugaguggacagagaag

SEQ ID NO: 507577 - RNA, 22 nt, Human
guccugggggcagcugugucca

SEQ ID NO: 507578 - RNA, 22 nt, Human
cccaggauggggcugcaguuau

SEQ ID NO: 507579 - RNA, 22 nt, Human
uagaagaacaugucaaacuaua

SEQ ID NO: 507580 - RNA, 22 nt, Human
cccuucagcugagugggacagc

SEQ ID NO: 507581 - RNA, 22 nt, Human
guuuuauaggugaaauauuacu

SEQ ID NO: 507582 - RNA, 22 nt, Human
cucuggcuuugcucaugcaucc

SEQ ID NO: 507583 - RNA, 22 nt, Human
aaauccuaaaaguuugacuuaa

SEQ ID NO: 507584 - RNA, 22 nt, Human
uuuauugacccaaagcgagagu

SEQ ID NO: 507585 - RNA, 23 nt, Human
agguuacaguuguuaaguugcaa

SEQ ID NO: 507586 - RNA, 22 nt, Human
gcaguccauugacagaggucuu

SEQ ID NO: 507587 - RNA, 22 nt, Human
auucacaugugcuucuuaucac

SEQ ID NO: 507588 - RNA, 22 nt, Human
ggcagguacagcaagaggacaa

SEQ ID NO: 507589 - RNA, 22 nt, Human
cacugccuccccaggcuccaca

SEQ ID NO: 507590 - RNA, 22 nt, Human
augaaggauggcuggcugcccu

SEQ ID NO: 507591 - RNA, 22 nt, Human
aucuggaaaacacaguguagac

SEQ ID NO: 507592 - RNA, 22 nt, Human
gcugucacaagcaucuggggca

SEQ ID NO: 507593 - RNA, 22 nt, Human
caaugauggcuaggcagcugcu

SEQ ID NO: 507594 - RNA, 22 nt, Human
augacagaugcuguggggaggu

SEQ ID NO: 507595 - RNA, 19 nt, Human
gcuucccaccagccagccc

SEQ ID NO: 507596 - RNA, 22 nt, Human
ugggcaggaugcguugauucuu

SEQ ID NO: 507597 - RNA, 22 nt, Human
agccugagccccauccagcuga

SEQ ID NO: 507598 - RNA, 20 nt, Human
auacacauucauagaaaaau

SEQ ID NO: 507599 - RNA, 22 nt, Human
uguugaguauauaccuacaagu

SEQ ID NO: 507600 - RNA, 22 nt, Human
uccugaggugcucagccaggaa

SEQ ID NO: 507601 - RNA, 22 nt, Human
guacauuuuacuuuguuugaau

SEQ ID NO: 507602 - RNA, 22 nt, Human
ccacccagcagaggaggcaaga

SEQ ID NO: 507603 - RNA, 22 nt, Human
ggcuucugccacgagagggaag

SEQ ID NO: 507604 - RNA, 22 nt, Human
aggucugaguauggccugagaa

SEQ ID NO: 507605 - RNA, 22 nt, Human
caggccaggugcucuagaauca

SEQ ID NO: 507606 - RNA, 22 nt, Human
ccaggccauucccagaguugcu

SEQ ID NO: 507607 - RNA, 22 nt, Human
gagucuggacuauucuggucuu

SEQ ID NO: 507608 - RNA, 22 nt, Human
ggagucuucagauagaguauuu

SEQ ID NO: 507609 - RNA, 22 nt, Human
ucacacaugaguaaauacaggg

SEQ ID NO: 507610 - RNA, 22 nt, Human
ucaggcagagcuguggagcucu

SEQ ID NO: 507611 - RNA, 22 nt, Human
agucacaugggauuagaaccca

SEQ ID NO: 507612 - RNA, 22 nt, Human
aaagaggaaccaagagcacgug

SEQ ID NO: 507613 - RNA, 22 nt, Human
uacacacagaggccaugggauu

SEQ ID NO: 507614 - RNA, 22 nt, Human
guaggcagaccaguggaugggu

SEQ ID NO: 507615 - RNA, 22 nt, Human
uccuggccuugcgucuugggag

SEQ ID NO: 507616 - RNA, 22 nt, Human
gugcugggcccugagaccaggg

SEQ ID NO: 507617 - RNA, 22 nt, Human
cacccaggcuagagugcagugg

SEQ ID NO: 507618 - RNA, 22 nt, Human
ucuucucaguuucucuaggaug

SEQ ID NO: 507619 - RNA, 22 nt, Human
agcaaguaguaccaaguagcuc

SEQ ID NO: 507620 - RNA, 22 nt, Human
caguagcauguaauaaagacag

SEQ ID NO: 507621 - RNA, 22 nt, Human
agagccugggaauuugcauguu

SEQ ID NO: 507622 - RNA, 22 nt, Human
agagaucaguuaaaaucuuuuu

SEQ ID NO: 507623 - RNA, 22 nt, Human
uauacagcuauggcaagacaaa

SEQ ID NO: 507624 - RNA, 22 nt, Human
ucagguggcuuggagggggacg

SEQ ID NO: 507625 - RNA, 22 nt, Human
ugagcccaggaguuggaggcug

SEQ ID NO: 507626 - RNA, 22 nt, Human
aacagcuauucacuacuauggg

SEQ ID NO: 507627 - RNA, 22 nt, Human
cuccaggacacuaacccaggcu

SEQ ID NO: 507628 - RNA, 22 nt, Human
auauuugucaauucacuguuca

SEQ ID NO: 507629 - RNA, 22 nt, Human
ucaaaaauguuuuauauuggua

SEQ ID NO: 507630 - RNA, 22 nt, Human
ugaaggaaugagggaguggguc

SEQ ID NO: 507631 - RNA, 22 nt, Human
augccagucaaagaagaugaca

SEQ ID NO: 507632 - RNA, 22 nt, Human
gcaaaugcuaaaguguagagac

SEQ ID NO: 507633 - RNA, 22 nt, Human
gagccuggggacccuccugagu

SEQ ID NO: 507634 - RNA, 22 nt, Human
uuguuuuaucuuucuacagacu

SEQ ID NO: 507635 - RNA, 22 nt, Human
ggugggcaacauuuggccugag

SEQ ID NO: 507636 - RNA, 22 nt, Human
accuucaaacuagauagaaguu

SEQ ID NO: 507637 - RNA, 22 nt, Human
gucugggcaccuggccugggaa

SEQ ID NO: 507638 - RNA, 23 nt, Human
ccuucagaagaaguaacaggggc

SEQ ID NO: 507639 - RNA, 22 nt, Human
cugacccauauaagaguggagg

SEQ ID NO: 507640 - RNA, 22 nt, Human
augcagaacguuugugaaacuu

SEQ ID NO: 507641 - RNA, 23 nt, Human
agaaggguccuuggcagcgacag

SEQ ID NO: 507642 - RNA, 22 nt, Human
ugugccauuucuauucugcagc

SEQ ID NO: 507643 - RNA, 22 nt, Human
ccuggcugggguagaagugagg

SEQ ID NO: 507644 - RNA, 22 nt, Human
uaagauguacaaccacuucucu

SEQ ID NO: 507645 - RNA, 22 nt, Human
aguuagagacacaugcacaugc

SEQ ID NO: 507646 - RNA, 22 nt, Human
uggcccucagucuugcuccugc

SEQ ID NO: 507647 - RNA, 20 nt, Human
uggaaggcaucugcauuauu

SEQ ID NO: 507648 - RNA, 22 nt, Human
uggcucagagcagggacucugg

SEQ ID NO: 507649 - RNA, 22 nt, Human
uucaggauggcggauguugggg

SEQ ID NO: 507650 - RNA, 22 nt, Human
aaauccuaagcagaggaauuua

SEQ ID NO: 507651 - RNA, 20 nt, Human
ugcugcaguuucaugggacu

SEQ ID NO: 507652 - RNA, 22 nt, Human
cuguuuguuggcuauugacagu

SEQ ID NO: 507653 - RNA, 22 nt, Human
ugaaacuuuugagguucuucca

SEQ ID NO: 507654 - RNA, 22 nt, Human
uccagaccuagggcaccccagu

SEQ ID NO: 507655 - RNA, 22 nt, Human
guuucuaagggagagcugccag

SEQ ID NO: 507656 - RNA, 22 nt, Human
gguggguuuggaagagcaggcu

SEQ ID NO: 507657 - RNA, 23 nt, Human
guuuucaacacaauaaauguaac

SEQ ID NO: 507658 - RNA, 22 nt, Human
gguuucaacuaaaucaagaagg

SEQ ID NO: 507659 - RNA, 22 nt, Human
ucugagcuuuagcugggauuuu

SEQ ID NO: 507660 - RNA, 22 nt, Human
cucagacacagccccacgaagu

SEQ ID NO: 507661 - RNA, 22 nt, Human
cccagccucuggguucugccgg

SEQ ID NO: 507662 - RNA, 22 nt, Human
cuaugagaagaaaacaagauua

SEQ ID NO: 507663 - RNA, 22 nt, Human
ugacagagcauguagugacagc

SEQ ID NO: 507664 - RNA, 22 nt, Human
auuagcuuaucccauuucugaa

SEQ ID NO: 507665 - RNA, 22 nt, Human
uggcucaggccacuucuuuuau

SEQ ID NO: 507666 - RNA, 22 nt, Human
uccaggaauagaucagagauuu

SEQ ID NO: 507667 - RNA, 22 nt, Human
caaaguauauuucauagucuca

SEQ ID NO: 507668 - RNA, 22 nt, Human
agauaacucauuuuguauaucc

SEQ ID NO: 507669 - RNA, 22 nt, Human
uccugggaagagaccugagcau

SEQ ID NO: 507670 - RNA, 22 nt, Human
ugagaaagugggugccuagcaa

SEQ ID NO: 507671 - RNA, 19 nt, Human
ggcugggucuggcagguuc

SEQ ID NO: 507672 - RNA, 22 nt, Human
uggucaacaggcagggaugaaa

SEQ ID NO: 507673 - RNA, 22 nt, Human
agguucagaugacuuuuaugcu

SEQ ID NO: 507674 - RNA, 22 nt, Human
gugaaaauaaggcugguucuug

SEQ ID NO: 507675 - RNA, 22 nt, Human
uucacaguggcccucucugagu

SEQ ID NO: 507676 - RNA, 22 nt, Human
aaucuggcauuugagaguagga

SEQ ID NO: 507677 - RNA, 22 nt, Human
uaaaugagauguacauaacuca

SEQ ID NO: 507678 - RNA, 22 nt, Human
aagcagaauuucccacuaguug

SEQ ID NO: 507679 - RNA, 19 nt, Human
ggcggguggacuggagccc

SEQ ID NO: 507680 - RNA, 22 nt, Human
ugcccucucaaguugagucaga

SEQ ID NO: 507681 - RNA, 22 nt, Human
aaaggucauugaaaaggaggaa

SEQ ID NO: 507682 - RNA, 22 nt, Human
uuagcauuguacauuugugcuu

SEQ ID NO: 507683 - RNA, 22 nt, Human
cucuccagccacagaagcugcu

SEQ ID NO: 507684 - RNA, 22 nt, Human
uguccagggauggggucaggga

SEQ ID NO: 507685 - RNA, 22 nt, Human
aagcagagaaaagcuuagguuc

SEQ ID NO: 507686 - RNA, 22 nt, Human
uccuggcuuccacaccugucau

SEQ ID NO: 507687 - RNA, 22 nt, Human
agccacagucaaccuguccaua

SEQ ID NO: 507688 - RNA, 18 nt, Human
guccacagcccucacagc

SEQ ID NO: 507689 - RNA, 22 nt, Human
ccaaggcaggggaucaaaguuu

SEQ ID NO: 507690 - RNA, 22 nt, Human
gaggguccccaugcagagcuca

SEQ ID NO: 507691 - RNA, 22 nt, Human
cagaagccugccucagaugcac

SEQ ID NO: 507692 - RNA, 22 nt, Human
ugcaggcuuggaucacaucucc

SEQ ID NO: 507693 - RNA, 22 nt, Human
aagggagccaagaaagcagggc

SEQ ID NO: 507694 - RNA, 19 nt, Human
gccagcagaaugaugaggc

SEQ ID NO: 507695 - RNA, 22 nt, Human
cucaucugauaaaucacucuua

SEQ ID NO: 507696 - RNA, 22 nt, Human
cuggccuuggugcuugcagaca

SEQ ID NO: 507697 - RNA, 22 nt, Human
uuugucuuguaaguuaaauuca

SEQ ID NO: 507698 - RNA, 22 nt, Human
uagcacaucuggcgcuuauagg

SEQ ID NO: 507699 - RNA, 22 nt, Human
uuugucaucccuuuugaaacug

SEQ ID NO: 507700 - RNA, 22 nt, Human
cccagcauggagugaggacuca

SEQ ID NO: 507701 - RNA, 22 nt, Human
aaagugcacuagaauccagauu

SEQ ID NO: 507702 - RNA, 22 nt, Human
gucaauauauucugucucuuug

SEQ ID NO: 507703 - RNA, 22 nt, Human
cccaggagguagagguugcagu

SEQ ID NO: 507704 - RNA, 22 nt, Human
agacucugugcuccuugcuuuc

SEQ ID NO: 507705 - RNA, 22 nt, Human
augcugaaaauuggauuugaau

SEQ ID NO: 507706 - RNA, 22 nt, Human
cagcagcuuuugcauucucauu

SEQ ID NO: 507707 - RNA, 22 nt, Human
ccugggugacccgugagcgucc

SEQ ID NO: 507708 - RNA, 22 nt, Human
gaggccugggagccuguccucc

SEQ ID NO: 507709 - RNA, 22 nt, Human
agauuuguauagaugugguuga

SEQ ID NO: 507710 - RNA, 22 nt, Human
cuuuuuccagcuucaggguggg

SEQ ID NO: 507711 - RNA, 22 nt, Human
gcugucuccauagcuguguguc

SEQ ID NO: 507712 - RNA, 22 nt, Human
ugaguccaccuuaguauauggg

SEQ ID NO: 507713 - RNA, 22 nt, Human
gaaggagggugcggaucugagc

SEQ ID NO: 507714 - RNA, 22 nt, Human
aguuucucuagagucuuugaaa

SEQ ID NO: 507715 - RNA, 22 nt, Human
aguaugaagcugaaugauuuua

SEQ ID NO: 507716 - RNA, 22 nt, Human
caaguccaggugggcaaauaaa

SEQ ID NO: 507717 - RNA, 22 nt, Human
ugagagucuguuccucuugcag

SEQ ID NO: 507718 - RNA, 22 nt, Human
ccaggccuucugaggacacucu

SEQ ID NO: 507719 - RNA, 22 nt, Human
agucugggugugaaugaacuug

SEQ ID NO: 507720 - RNA, 22 nt, Human
ucacuguauuugcugaugcaua

SEQ ID NO: 507721 - RNA, 22 nt, Human
aagccuuccugagugcaaggcc

SEQ ID NO: 507722 - RNA, 22 nt, Human
agcagaaucuguccuuggaaga

SEQ ID NO: 507723 - RNA, 22 nt, Human
caagacaagaucuaagcaugcu

SEQ ID NO: 507724 - RNA, 22 nt, Human
gugggccucuugaggguggcua

SEQ ID NO: 507725 - RNA, 22 nt, Human
cagaguaaaccugucaucaaga

SEQ ID NO: 507726 - RNA, 22 nt, Human
ucccuggccauuccucuaggcc

SEQ ID NO: 507727 - RNA, 22 nt, Human
ccagcuucucucugaugcagcu

SEQ ID NO: 507728 - RNA, 22 nt, Human
gugcagggcagccgaaugggcu

SEQ ID NO: 507729 - RNA, 22 nt, Human
auacauguugagaaaauaucug

SEQ ID NO: 507730 - RNA, 22 nt, Human
uugucugaaaagguaaauauuu

SEQ ID NO: 507731 - RNA, 22 nt, Human
uguggcucucaugcacucccag

SEQ ID NO: 507732 - RNA, 21 nt, Human
agaugcaguuugcaggugggu

SEQ ID NO: 507733 - RNA, 22 nt, Human
uuagccauuugaggucuucauu

SEQ ID NO: 507734 - RNA, 22 nt, Human
ggucucgagccaggcagcugca

SEQ ID NO: 507735 - RNA, 22 nt, Human
agcagcugagaugguaagauuc

SEQ ID NO: 507736 - RNA, 21 nt, Human
ugggggagaauugguugcuuu

SEQ ID NO: 507737 - RNA, 22 nt, Human
cucucagugccacacagccauu

SEQ ID NO: 507738 - RNA, 22 nt, Human
aguaaaugaaagcaauuuuaga

SEQ ID NO: 507739 - RNA, 22 nt, Human
acagaacugggaaaugcacaua

SEQ ID NO: 507740 - RNA, 22 nt, Human
acugggccuguacagagaaaac

SEQ ID NO: 507741 - RNA, 22 nt, Human
cccuggcacuagcgacggccau

SEQ ID NO: 507742 - RNA, 22 nt, Human
ggagcagccgcgucucagggca

SEQ ID NO: 507743 - RNA, 22 nt, Human
aaagugggaacaauggagagug

SEQ ID NO: 507744 - RNA, 22 nt, Human
ccaggacuucgaggcuacagug

SEQ ID NO: 507745 - RNA, 22 nt, Human
ccagcuggugacauccccaacc

SEQ ID NO: 507746 - RNA, 20 nt, Human
caguccugucccugcugccc

SEQ ID NO: 507747 - RNA, 22 nt, Human
ucaaggugcugugcugugcuag

SEQ ID NO: 507748 - RNA, 22 nt, Human
ucccacaccugucuauuccuag

SEQ ID NO: 507749 - RNA, 18 nt, Human
uggcagccagcugcuccu

SEQ ID NO: 507750 - RNA, 22 nt, Human
uucagcacaagacuagacaggu

SEQ ID NO: 507751 - RNA, 22 nt, Human
cuccucccugcgauugcucugc

SEQ ID NO: 507752 - RNA, 22 nt, Human
aaguaacaucugaacaugaugu

SEQ ID NO: 507753 - RNA, 22 nt, Human
acauguuuugugccuugacuag

SEQ ID NO: 507754 - RNA, 19 nt, Human
cuccaagugccaaggacag

SEQ ID NO: 507755 - RNA, 22 nt, Human
gcagggcaaauguggaaaggag

SEQ ID NO: 507756 - RNA, 22 nt, Human
aagucuuuugcuaagaguaaug

SEQ ID NO: 507757 - RNA, 23 nt, Human
uggagaauguguuuacuucgugu

SEQ ID NO: 507758 - RNA, 22 nt, Human
aagcagccaccucaucuccacu

SEQ ID NO: 507759 - RNA, 20 nt, Human
agccucugcccuucccacug

SEQ ID NO: 507760 - RNA, 18 nt, Human
uucuggcucacucaugcu

SEQ ID NO: 507761 - RNA, 22 nt, Human
ucacagaaugucuagcauaauu

SEQ ID NO: 507762 - RNA, 22 nt, Human
auguggcuaguccucugcggca

SEQ ID NO: 507763 - RNA, 22 nt, Human
uuuauuugucuugccauuuagu

SEQ ID NO: 507764 - RNA, 22 nt, Human
cccugggacccgcugcagaggc

SEQ ID NO: 507765 - RNA, 17 nt, Human
aguguggcccugguuaa

SEQ ID NO: 507766 - RNA, 22 nt, Human
cagagcacugcuuggaggauuu

SEQ ID NO: 507767 - RNA, 22 nt, Human
agagucccagggacacuccaga

SEQ ID NO: 507768 - RNA, 22 nt, Human
aauugcuaaagauuauguuuuc

SEQ ID NO: 507769 - RNA, 22 nt, Human
uuucugcagguauugcauaagu

SEQ ID NO: 507770 - RNA, 22 nt, Human
gugcagguuuaggaagcagcuc

SEQ ID NO: 507771 - RNA, 20 nt, Human
cucacagucaaugcagaggu

SEQ ID NO: 507772 - RNA, 22 nt, Human
uguguucauuuaacuguucuuu

SEQ ID NO: 507773 - RNA, 22 nt, Human
aggcacugaagaacucuuuuug

SEQ ID NO: 507774 - RNA, 22 nt, Human
ucugauuagagcauucuugagu

SEQ ID NO: 507775 - RNA, 22 nt, Human
ugggggugacuaucucgggaau

SEQ ID NO: 507776 - RNA, 22 nt, Human
gaaaaaugagcugaugucaggg

SEQ ID NO: 507777 - RNA, 22 nt, Human
cccucccagaugggcuugaggu

SEQ ID NO: 507778 - RNA, 17 nt, Human
agguauaaaaugguagc

SEQ ID NO: 507779 - RNA, 22 nt, Human
gagaagguggaccugaaggagc

SEQ ID NO: 507780 - RNA, 22 nt, Human
aaacucugcacugcgguaaggu

SEQ ID NO: 507781 - RNA, 22 nt, Human
ucuguggccuccuuccacuuac

SEQ ID NO: 507782 - RNA, 22 nt, Human
augagagacuguguguugggag

SEQ ID NO: 507783 - RNA, 22 nt, Human
cucugggccaugcuacugcucu

SEQ ID NO: 507784 - RNA, 22 nt, Human
agcagcauuccuggcuucuauc

SEQ ID NO: 507785 - RNA, 21 nt, Human
agugaaaugaaguguaugcuc

SEQ ID NO: 507786 - RNA, 22 nt, Human
ugagguagaagccuggguugag

SEQ ID NO: 507787 - RNA, 22 nt, Human
uuacaagacagugugguaaaua

SEQ ID NO: 507788 - RNA, 22 nt, Human
gacccugacucuaaugcuuggc

SEQ ID NO: 507789 - RNA, 22 nt, Human
gcugagagcaaagcaugucuag

SEQ ID NO: 507790 - RNA, 21 nt, Human
ugucagaaauaagcaugugau

SEQ ID NO: 507791 - RNA, 22 nt, Human
cucaguuucuucauauuguagg

SEQ ID NO: 507792 - RNA, 22 nt, Human
ugaaaucaauugcaauguuuau

SEQ ID NO: 507793 - RNA, 22 nt, Human
aaauagcuucuaagccuuuuga

SEQ ID NO: 507794 - RNA, 22 nt, Human
agacccucuccaugcccacugc

SEQ ID NO: 507795 - RNA, 22 nt, Human
cagccuucgacaguuggaguag

SEQ ID NO: 507796 - RNA, 22 nt, Human
ccacaggaccagaggagaucac

SEQ ID NO: 507797 - RNA, 22 nt, Human
uaaacauggauucugaucacag

SEQ ID NO: 507798 - RNA, 22 nt, Human
gagcucagcacuaaaaucaugu

SEQ ID NO: 507799 - RNA, 19 nt, Human
gcacacccugcaccaccau

SEQ ID NO: 507800 - RNA, 22 nt, Human
ucagaaacacucuucuucuguc

SEQ ID NO: 507801 - RNA, 22 nt, Human
agccuguggaucccugcacugg

SEQ ID NO: 507802 - RNA, 21 nt, Human
gagccuucccucugcccuuuc

SEQ ID NO: 507803 - RNA, 22 nt, Human
uaaauuacccuuuagggaauug

SEQ ID NO: 507804 - RNA, 22 nt, Human
caaagcaaggcucaguuugaac

SEQ ID NO: 507805 - RNA, 22 nt, Human
gguaaacuaaccauuuuaauuu

SEQ ID NO: 507806 - RNA, 22 nt, Human
uugcugaaugcaaguuggauag

SEQ ID NO: 507807 - RNA, 22 nt, Human
aucuacagcugucugcacagua

SEQ ID NO: 507808 - RNA, 22 nt, Human
aaaugucuuugaguauuucugc

SEQ ID NO: 507809 - RNA, 22 nt, Human
cugggggucuugaaagggagag

SEQ ID NO: 507810 - RNA, 20 nt, Human
cuuuagaagaacccaagcau

SEQ ID NO: 507811 - RNA, 22 nt, Human
aggcagguguuaccucugguuu

SEQ ID NO: 507812 - RNA, 22 nt, Human
cauuucuagggaucauaaagua

SEQ ID NO: 507813 - RNA, 22 nt, Human
gugugucugaaguugaguagac

SEQ ID NO: 507814 - RNA, 22 nt, Human
ccacagggauaggaauggggcu

SEQ ID NO: 507815 - RNA, 22 nt, Human
cuguggcucagcacggggucag

SEQ ID NO: 507816 - RNA, 22 nt, Human
uagucccauuuugagguauuug

SEQ ID NO: 507817 - RNA, 22 nt, Human
gaaauuuauuaucuacaucauu

SEQ ID NO: 507818 - RNA, 22 nt, Human
uggaacaacaugcuggaaaauu

SEQ ID NO: 507819 - RNA, 22 nt, Human
ucugaaggaaaaggguagauau

SEQ ID NO: 507820 - RNA, 22 nt, Human
acagcuguggccacuugcaucc

SEQ ID NO: 507821 - RNA, 22 nt, Human
ccugucugaggaggugcucuuu

SEQ ID NO: 507822 - RNA, 22 nt, Human
gugaccauuugacauauccuug

SEQ ID NO: 507823 - RNA, 22 nt, Human
acaaagucuuuuacaacaguca

SEQ ID NO: 507824 - RNA, 22 nt, Human
uccuggaggcaaaugagcacau

SEQ ID NO: 507825 - RNA, 22 nt, Human
ccuccaaguuugacucaggaca

SEQ ID NO: 507826 - RNA, 23 nt, Human
cagagcugauuaaacuuaaucuc

SEQ ID NO: 507827 - RNA, 22 nt, Human
aaguucaaguaguguuacaugg

SEQ ID NO: 507828 - RNA, 22 nt, Human
aaggguccagcaccucggcucc

SEQ ID NO: 507829 - RNA, 22 nt, Human
ucugggauaagaccacagauuu

SEQ ID NO: 507830 - RNA, 22 nt, Human
ccagggugugagaaggaaguag

SEQ ID NO: 507831 - RNA, 22 nt, Human
agaaugugaagauuuugaauua

SEQ ID NO: 507832 - RNA, 22 nt, Human
augggggcggcugaagcccagg

SEQ ID NO: 507833 - RNA, 20 nt, Human
gcucugggagggaugugaug

SEQ ID NO: 507834 - RNA, 22 nt, Human
agggcucuuccuuugccucuca

SEQ ID NO: 507835 - RNA, 19 nt, Human
aaagcagaggagcaucuga

SEQ ID NO: 507836 - RNA, 22 nt, Human
acuuaguggcuaugugaccuua

SEQ ID NO: 507837 - RNA, 22 nt, Human
ccucaggcugggcugccccugg

SEQ ID NO: 507838 - RNA, 22 nt, Human
cagccagagaaagggcacugcc

SEQ ID NO: 507839 - RNA, 22 nt, Human
caugagauuugggaggggccag

SEQ ID NO: 507840 - RNA, 22 nt, Human
uuauauaucuugauuuguucca

SEQ ID NO: 507841 - RNA, 22 nt, Human
cugcccugggaguaccuguccu

SEQ ID NO: 507842 - RNA, 22 nt, Human
augcacaagaggcuagaaaaga

SEQ ID NO: 507843 - RNA, 22 nt, Human
ccuggccuggcacucccucugc

SEQ ID NO: 507844 - RNA, 22 nt, Human
uacuuaaaacugauagaaucuc

SEQ ID NO: 507845 - RNA, 22 nt, Human
caaugucaaggagaccaaaacg

SEQ ID NO: 507846 - RNA, 22 nt, Human
ggguccaggcguggcccagaug

SEQ ID NO: 507847 - RNA, 20 nt, Human
acuggagccaucucagccua

SEQ ID NO: 507848 - RNA, 22 nt, Human
gaaguuuauuucaaucuauuca

SEQ ID NO: 507849 - RNA, 22 nt, Human
ccauaaggagccagacauucca

SEQ ID NO: 507850 - RNA, 22 nt, Human
aucauaaagugcuaucugauug

SEQ ID NO: 507851 - RNA, 22 nt, Human
guggcugcagagccagcaagcu

SEQ ID NO: 507852 - RNA, 22 nt, Human
aaugcacagcguuccaugcuug

SEQ ID NO: 507853 - RNA, 20 nt, Human
ccagcauguacacaugugga

SEQ ID NO: 507854 - RNA, 22 nt, Human
agccuggcacugccccauccau

SEQ ID NO: 507855 - RNA, 22 nt, Human
auuuucaguugaaaaaguuggu

SEQ ID NO: 507856 - RNA, 22 nt, Human
auuguauacaagcuuaauuguu

SEQ ID NO: 507857 - RNA, 22 nt, Human
gccucagugauaugugggacaa

SEQ ID NO: 507858 - RNA, 22 nt, Human
uuuuuaucuacagauucucagc

SEQ ID NO: 507859 - RNA, 22 nt, Human
ucccacacuugaaacaaggcug

SEQ ID NO: 507860 - RNA, 22 nt, Human
gggagagaugcugauugccaau

SEQ ID NO: 507861 - RNA, 22 nt, Human
agugaaauuccuggucuuuguu

SEQ ID NO: 507862 - RNA, 22 nt, Human
acuggccaggcagcaguagcuu

SEQ ID NO: 507863 - RNA, 22 nt, Human
cugugugccuagaggguggccg

SEQ ID NO: 507864 - RNA, 22 nt, Human
gcaggaguguggugggacaucc

SEQ ID NO: 507865 - RNA, 22 nt, Human
agggagaaaauuggaugcacaa

SEQ ID NO: 507866 - RNA, 22 nt, Human
gagguuucuuaucaagaaagcu

SEQ ID NO: 507867 - RNA, 21 nt, Human
aggagcuguguuagcuggucg

SEQ ID NO: 507868 - RNA, 22 nt, Human
cuguguccucccgcugcaccca

SEQ ID NO: 507869 - RNA, 22 nt, Human
ggccacuguccucuagcccaga

SEQ ID NO: 507870 - RNA, 22 nt, Human
cccuaggggcaaugauggugcu

SEQ ID NO: 507871 - RNA, 22 nt, Human
agcccugggucccaguccuggc

SEQ ID NO: 507872 - RNA, 22 nt, Human
agcuguggggcaggcagcgagg

SEQ ID NO: 507873 - RNA, 22 nt, Human
cugcagagcaaguucucuguug

SEQ ID NO: 507874 - RNA, 22 nt, Human
cucugagaggugagaagcagca

SEQ ID NO: 507875 - RNA, 22 nt, Human
guccagcuccagggaggcaggc

SEQ ID NO: 507876 - RNA, 23 nt, Human
acagagaucuugacuuguaugga

SEQ ID NO: 507877 - RNA, 22 nt, Human
ggucugaguagagggcuggcga

SEQ ID NO: 507878 - RNA, 22 nt, Human
uccagggccacagaggaugcua

SEQ ID NO: 507879 - RNA, 19 nt, Human
ucccaggaagcaaauguca

SEQ ID NO: 507880 - RNA, 22 nt, Human
uucucuugugccaaguuguugc

SEQ ID NO: 507881 - RNA, 22 nt, Human
aucuagaaguggcaugaauuac

SEQ ID NO: 507882 - RNA, 22 nt, Human
uugugucccccuuugagagcca

SEQ ID NO: 507883 - RNA, 22 nt, Human
ugcauaaagugccauaguauua

SEQ ID NO: 507884 - RNA, 22 nt, Human
agggaccucauguaaguggauu

SEQ ID NO: 507885 - RNA, 22 nt, Human
uaaguucagaguucucauuugu

SEQ ID NO: 507886 - RNA, 22 nt, Human
ccagcuggugggucuuucucug

SEQ ID NO: 507887 - RNA, 22 nt, Human
ccagcuccugggucuuagucag

SEQ ID NO: 507888 - RNA, 22 nt, Human
uccugagugagagcugggaggu

SEQ ID NO: 507889 - RNA, 22 nt, Human
ggguccagcgacagcaggcuca

SEQ ID NO: 507890 - RNA, 22 nt, Human
uguacaauagcuauuaucucca

SEQ ID NO: 507891 - RNA, 22 nt, Human
aggcuggggaauugaauuugcu

SEQ ID NO: 507892 - RNA, 22 nt, Human
ugaggccacuuccccacagccc

SEQ ID NO: 507893 - RNA, 22 nt, Human
cucagagaggcaguggaaguca

SEQ ID NO: 507894 - RNA, 22 nt, Human
uuuaaauaggacuccugggggu

SEQ ID NO: 507895 - RNA, 21 nt, Human
cagaggcagguccugggacgg

SEQ ID NO: 507896 - RNA, 22 nt, Human
gacagcuugccugguacugcaa

SEQ ID NO: 507897 - RNA, 22 nt, Human
agagccagauggagccgugugu

SEQ ID NO: 507898 - RNA, 22 nt, Human
gcuccuucaggugguagcuguu

SEQ ID NO: 507899 - RNA, 23 nt, Human
ggaaagagaggaguugugcauag

SEQ ID NO: 507900 - RNA, 22 nt, Human
ucagaaccagcccagcagauga

SEQ ID NO: 507901 - RNA, 22 nt, Human
acugggccugauugggucggag

SEQ ID NO: 507902 - RNA, 22 nt, Human
ccacagggacuguuaaaacccu

SEQ ID NO: 507903 - RNA, 22 nt, Human
ccaucacaguccccaucgugau

SEQ ID NO: 507904 - RNA, 22 nt, Human
gggcgcaucaccugaggucagg

SEQ ID NO: 507905 - RNA, 22 nt, Human
aguuagaauauaauuauguuaa

SEQ ID NO: 507906 - RNA, 22 nt, Human
uucugucacuuaggaggucaua

SEQ ID NO: 507907 - RNA, 22 nt, Human
cagggcuuuuuauuagcugccu

SEQ ID NO: 507908 - RNA, 22 nt, Human
guuguugaugaagaucugacug

SEQ ID NO: 507909 - RNA, 22 nt, Human
aguuucuauguaagcuacguga

SEQ ID NO: 507910 - RNA, 22 nt, Human
agggggcuccuccggugcuucc

SEQ ID NO: 507911 - RNA, 22 nt, Human
gaucucuguggacucuuagcac

SEQ ID NO: 507912 - RNA, 22 nt, Human
ucaagcaucuuggucuacgauc

SEQ ID NO: 507913 - RNA, 22 nt, Human
ucucugggacacugggucaguu

SEQ ID NO: 507914 - RNA, 23 nt, Human
aaagaugugaguauucauauggc

SEQ ID NO: 507915 - RNA, 22 nt, Human
guuuccugacccuggcccagca

SEQ ID NO: 507916 - RNA, 22 nt, Human
gggggacaggaugaauaucugu

SEQ ID NO: 507917 - RNA, 21 nt, Human
ucagaguggaagacaguuuga

SEQ ID NO: 507918 - RNA, 22 nt, Human
cugcucuggcuguguacuucag

SEQ ID NO: 507919 - RNA, 23 nt, Human
agucucagcuggaaacauguguc

SEQ ID NO: 507920 - RNA, 22 nt, Human
gugagcagaauaaggguugaga

SEQ ID NO: 507921 - RNA, 22 nt, Human
auguaguguagagauuagucuc

SEQ ID NO: 507922 - RNA, 22 nt, Human
uccuucaagaugccacagcuuu

SEQ ID NO: 507923 - RNA, 18 nt, Human
agaauugcugcuucuucu

SEQ ID NO: 507924 - RNA, 22 nt, Human
ugcuuccuucccguucuucucc

SEQ ID NO: 507925 - RNA, 22 nt, Human
cagucacauagguauacacaua

SEQ ID NO: 507926 - RNA, 22 nt, Human
gcagccaggguuaauuauauuu

SEQ ID NO: 507927 - RNA, 23 nt, Human
gcucagagguuuuucucuggaug

SEQ ID NO: 507928 - RNA, 22 nt, Human
guacacauuaugcuucucuaaa

SEQ ID NO: 507929 - RNA, 22 nt, Human
ugcauuaagggccuggagauac

SEQ ID NO: 507930 - RNA, 18 nt, Human
ugucucaggcugaaacag

SEQ ID NO: 507931 - RNA, 22 nt, Human
cacagguguucuugcagugaaa

SEQ ID NO: 507932 - RNA, 22 nt, Human
uguggcagagagagcuuccuug

SEQ ID NO: 507933 - RNA, 17 nt, Human
gucagcagcuugcuugu

SEQ ID NO: 507934 - RNA, 22 nt, Human
uguuucuuuguagauauucuuu

SEQ ID NO: 507935 - RNA, 22 nt, Human
agcaguuuggaaaauacuagaa

SEQ ID NO: 507936 - RNA, 22 nt, Human
acacugaauguuuaagaacuug

SEQ ID NO: 507937 - RNA, 22 nt, Human
uaaggcacuucaauguuuagaa

SEQ ID NO: 507938 - RNA, 22 nt, Human
gcagccacucucauuccacgug

SEQ ID NO: 507939 - RNA, 22 nt, Human
uucagcagucguccaggaaaag

SEQ ID NO: 507940 - RNA, 22 nt, Human
ccuggagcacagcccaguccca

SEQ ID NO: 507941 - RNA, 22 nt, Human
ucaugacaacuauauuauucca

SEQ ID NO: 507942 - RNA, 22 nt, Human
auugcugacuuuaauauuauau

SEQ ID NO: 507943 - RNA, 22 nt, Human
gaagccaguacugugcucugca

SEQ ID NO: 507944 - RNA, 22 nt, Human
caagucaaugauuauaagaguc

SEQ ID NO: 507945 - RNA, 20 nt, Human
acauaugaaugauagagcca

SEQ ID NO: 507946 - RNA, 22 nt, Human
aaacaugcauucaagaaaaucu

SEQ ID NO: 507947 - RNA, 22 nt, Human
uacuaggaagcagcugcauugg

SEQ ID NO: 507948 - RNA, 17 nt, Human
ugcuccuguggcagccu

SEQ ID NO: 507949 - RNA, 22 nt, Human
aaggcacugaacuuaaauucug

SEQ ID NO: 507950 - RNA, 22 nt, Human
uuccaguucccaugaggauuaa

SEQ ID NO: 507951 - RNA, 22 nt, Human
ugcuuaaacacauacauacaua

SEQ ID NO: 507952 - RNA, 22 nt, Human
uggcuucuggccaggcacagga

SEQ ID NO: 507953 - RNA, 22 nt, Human
ggcagcagggcugucucccuac

SEQ ID NO: 507954 - RNA, 22 nt, Human
gggcucuguccauuccuucaua

SEQ ID NO: 507955 - RNA, 22 nt, Human
ggacaggugacugcccagagug

SEQ ID NO: 507956 - RNA, 22 nt, Human
cauaacuagagugaaauguuga

SEQ ID NO: 507957 - RNA, 22 nt, Human
ggucccagguugacagggagac

SEQ ID NO: 507958 - RNA, 20 nt, Human
ugugcccugcagacuucuuu

SEQ ID NO: 507959 - RNA, 19 nt, Human
ugagugggccccugcagac

SEQ ID NO: 507960 - RNA, 22 nt, Human
ugggcuggcugaggcauucacu

SEQ ID NO: 507961 - RNA, 21 nt, Human
aagcuucccugcucuccaggg

SEQ ID NO: 507962 - RNA, 22 nt, Human
cauaaucagauguguacauaag

SEQ ID NO: 507963 - RNA, 22 nt, Human
uucacagugugaucuaugggca

SEQ ID NO: 507964 - RNA, 22 nt, Human
ugcacagcugccuccucucugc

SEQ ID NO: 507965 - RNA, 22 nt, Human
aggugccagaugcacagcugaa

SEQ ID NO: 507966 - RNA, 22 nt, Human
cugcagaggucuugcugauggu

SEQ ID NO: 507967 - RNA, 22 nt, Human
ugcaggcaggggaugagcagcc

SEQ ID NO: 507968 - RNA, 22 nt, Human
ccaggaaugaaauguagauaaa

SEQ ID NO: 507969 - RNA, 22 nt, Human
ugcccucuuaggucugcgcagc

SEQ ID NO: 507970 - RNA, 22 nt, Human
uggcagguuuccuccucauagu

SEQ ID NO: 507971 - RNA, 22 nt, Human
uuuguaaagucuguucugaguu

SEQ ID NO: 507972 - RNA, 22 nt, Human
aguaugaagaauacauagauga

SEQ ID NO: 507973 - RNA, 22 nt, Human
uuucaaggugcaggaggguuuu

SEQ ID NO: 507974 - RNA, 22 nt, Human
agguaccauaugcgggagcaac

SEQ ID NO: 507975 - RNA, 22 nt, Human
agcuuaggaggaugaugaacau

SEQ ID NO: 507976 - RNA, 22 nt, Human
ggaggcggagcuugcagugagc

SEQ ID NO: 507977 - RNA, 22 nt, Human
aucacuguuaucuagaagcaca

SEQ ID NO: 507978 - RNA, 22 nt, Human
uccuggggcugcaaggccuguc

SEQ ID NO: 507979 - RNA, 22 nt, Human
gagauguuaacuacauagcuac

SEQ ID NO: 507980 - RNA, 23 nt, Human
cuugcagggcuggaggcuuagaa

SEQ ID NO: 507981 - RNA, 22 nt, Human
agccuguguuuuuucuauugca

SEQ ID NO: 507982 - RNA, 22 nt, Human
ucauggauggccgggaggugau

SEQ ID NO: 507983 - RNA, 22 nt, Human
agggccaccagagcagggcagu

SEQ ID NO: 507984 - RNA, 22 nt, Human
ucugugcaggaagucauuauga

SEQ ID NO: 507985 - RNA, 22 nt, Human
ugggaaauauucuaaaagucuu

SEQ ID NO: 507986 - RNA, 22 nt, Human
gaggaaugucagcacaggccuc

SEQ ID NO: 507987 - RNA, 22 nt, Human
ucuuauuuuuuaaugacagaga

SEQ ID NO: 507988 - RNA, 22 nt, Human
cugagggagggacuuugagacu

SEQ ID NO: 507989 - RNA, 22 nt, Human
aaauguauccuacuuccugagu

SEQ ID NO: 507990 - RNA, 22 nt, Human
ucucagagaugucaagagucua

SEQ ID NO: 507991 - RNA, 22 nt, Human
ccuguucacgguguguuguuag

SEQ ID NO: 507992 - RNA, 22 nt, Human
ccagagaggggaagggcuugcc

SEQ ID NO: 507993 - RNA, 18 nt, Human
auauucaagaagacagag

SEQ ID NO: 507994 - RNA, 22 nt, Human
agaugauggccauguccucucc

SEQ ID NO: 507995 - RNA, 22 nt, Human
cucagcucugacaggaggcauc

SEQ ID NO: 507996 - RNA, 22 nt, Human
caagaugaucccugaaggcagc

SEQ ID NO: 507997 - RNA, 22 nt, Human
ugcaaugagaauauauuaacca

SEQ ID NO: 507998 - RNA, 22 nt, Human
gacacagagacuugcaguugua

SEQ ID NO: 507999 - RNA, 22 nt, Human
agcagcucuuaacaaagcaugg

SEQ ID NO: 508000 - RNA, 22 nt, Human
ucucuggcagcuugugcuguug

SEQ ID NO: 508001 - RNA, 22 nt, Human
auuguugggucucacuccuaga

SEQ ID NO: 508002 - RNA, 22 nt, Human
agcugccauccuguucagcacc

SEQ ID NO: 508003 - RNA, 22 nt, Human
aaucuggcucagaagaagauga

SEQ ID NO: 508004 - RNA, 22 nt, Human
uccaggauugucagccagaagg

SEQ ID NO: 508005 - RNA, 22 nt, Human
aacagcaauagcacuauucauu

SEQ ID NO: 508006 - RNA, 22 nt, Human
ggaggagcugcugugggggccc

SEQ ID NO: 508007 - RNA, 22 nt, Human
acagagguguguguaggacagu

SEQ ID NO: 508008 - RNA, 20 nt, Human
ugggcucugcuuccuggagu

SEQ ID NO: 508009 - RNA, 22 nt, Human
ugcuucugacuaagcugcauga

SEQ ID NO: 508010 - RNA, 22 nt, Human
ucuguuuuguaccagauacagc

SEQ ID NO: 508011 - RNA, 22 nt, Human
uggaaggcugugauuacugugc

SEQ ID NO: 508012 - RNA, 22 nt, Human
guuuucugauuagcaaaucuga

SEQ ID NO: 508013 - RNA, 22 nt, Human
uugaauaguuuuggauagcaua

SEQ ID NO: 508014 - RNA, 22 nt, Human
aacauguagcagaaacgacuaa

SEQ ID NO: 508015 - RNA, 22 nt, Human
aagcuuccugaaugcucauuua

SEQ ID NO: 508016 - RNA, 22 nt, Human
uuacuaguauaugucaagcaac

SEQ ID NO: 508017 - RNA, 22 nt, Human
auuguugauaaucguguuguca

SEQ ID NO: 508018 - RNA, 22 nt, Human
uguuuugugcauuuacaacaug

SEQ ID NO: 508019 - RNA, 22 nt, Human
aagcuucaguucuggggcaaug

SEQ ID NO: 508020 - RNA, 20 nt, Human
ucccaaggaugccugggugu

SEQ ID NO: 508021 - RNA, 22 nt, Human
acagcucagacaucacugcucu

SEQ ID NO: 508022 - RNA, 22 nt, Human
uugcauaaagauuuuauugcau

SEQ ID NO: 508023 - RNA, 22 nt, Human
ucuguacaaaggcuauuuggag

SEQ ID NO: 508024 - RNA, 22 nt, Human
uugcaucuaccauaucaaagau

SEQ ID NO: 508025 - RNA, 22 nt, Human
ugcagcugcugguggcugaaag

SEQ ID NO: 508026 - RNA, 22 nt, Human
cacuuggaggaaggccuauuca

SEQ ID NO: 508027 - RNA, 22 nt, Human
ucugucugagggagugacauuu

SEQ ID NO: 508028 - RNA, 22 nt, Human
agcagacaacccagaugaccca

SEQ ID NO: 508029 - RNA, 19 nt, Human
aucccaaggagcugggacu

SEQ ID NO: 508030 - RNA, 22 nt, Human
uaaggucauggugaauaauaag

SEQ ID NO: 508031 - RNA, 22 nt, Human
gcuggacucaggggacucaggg

SEQ ID NO: 508032 - RNA, 22 nt, Human
gagagcuguccggcugagcagc

SEQ ID NO: 508033 - RNA, 22 nt, Human
uagaaaggcaagcgugaaauau

SEQ ID NO: 508034 - RNA, 22 nt, Human
ugucugaauucaagaaauucaa

SEQ ID NO: 508035 - RNA, 22 nt, Human
caugcuccaaaaacaagagaau

SEQ ID NO: 508036 - RNA, 22 nt, Human
ucaaugauagacaagaucuaag

SEQ ID NO: 508037 - RNA, 22 nt, Human
cagggugcgccacucagaugua

SEQ ID NO: 508038 - RNA, 20 nt, Human
ccuucagaacuuacauagua

SEQ ID NO: 508039 - RNA, 22 nt, Human
guggcagggcuuugcuguucuu

SEQ ID NO: 508040 - RNA, 17 nt, Human
agcagcuggcacaggag

SEQ ID NO: 508041 - RNA, 18 nt, Human
ucagucuauuguauaaga

SEQ ID NO: 508042 - RNA, 22 nt, Human
acuaggaaggcauaugggcaga

SEQ ID NO: 508043 - RNA, 22 nt, Human
accauguguuuuacacauggua

SEQ ID NO: 508044 - RNA, 22 nt, Human
acaaaaguguaggaauuccuua

SEQ ID NO: 508045 - RNA, 17 nt, Human
ugagacagggcaggccc

SEQ ID NO: 508046 - RNA, 22 nt, Human
uuguaaacugcugcaggagugc

SEQ ID NO: 508047 - RNA, 22 nt, Human
caguccagagcccaccagagga

SEQ ID NO: 508048 - RNA, 22 nt, Human
uuccaguucuggcuuugccacu

SEQ ID NO: 508049 - RNA, 21 nt, Human
ccugccaggaaacugaguguc

SEQ ID NO: 508050 - RNA, 22 nt, Human
agcaggcaggaaggcagcacug

SEQ ID NO: 508051 - RNA, 22 nt, Human
guuccugaugcuuugaaauuca

SEQ ID NO: 508052 - RNA, 22 nt, Human
agggagcuaggauccugaaggu

SEQ ID NO: 508053 - RNA, 22 nt, Human
gagggcugcugccagauaugcc

SEQ ID NO: 508054 - RNA, 21 nt, Human
gaugaagcaaucuuucuguug

SEQ ID NO: 508055 - RNA, 22 nt, Human
uuguugcaaggguuaaaugaga

SEQ ID NO: 508056 - RNA, 22 nt, Human
cagcucuggguaggaggaaucu

SEQ ID NO: 508057 - RNA, 22 nt, Human
aaaauacacauacuaggggaaa

SEQ ID NO: 508058 - RNA, 22 nt, Human
cucagugugagugagaagugca

SEQ ID NO: 508059 - RNA, 22 nt, Human
aggucacauggauaaugaucag

SEQ ID NO: 508060 - RNA, 22 nt, Human
acaguguuuauguacagauugu

SEQ ID NO: 508061 - RNA, 22 nt, Human
auuguugacuugauuacucaac

SEQ ID NO: 508062 - RNA, 22 nt, Human
gcuugaaaauucauagguauuu

SEQ ID NO: 508063 - RNA, 22 nt, Human
uucagcauagcagcuucaggac

SEQ ID NO: 508064 - RNA, 22 nt, Human
aagggcucacccaacucacuuc

SEQ ID NO: 508065 - RNA, 19 nt, Human
agcaccugugagagccugg

SEQ ID NO: 508066 - RNA, 22 nt, Human
uuguaacagcuguuuauauagu

SEQ ID NO: 508067 - RNA, 22 nt, Human
ugucuuuuuacuauguucaauc

SEQ ID NO: 508068 - RNA, 23 nt, Human
acucacaaagcaggaucauguug

SEQ ID NO: 508069 - RNA, 22 nt, Human
auuuaguguguauugcuauuau

SEQ ID NO: 508070 - RNA, 22 nt, Human
gagccauacaaccuauaaagug

SEQ ID NO: 508071 - RNA, 22 nt, Human
uuuuucucuucuguaaaguggu

SEQ ID NO: 508072 - RNA, 22 nt, Human
uuuauaaaauagacugggucua

SEQ ID NO: 508073 - RNA, 19 nt, Human
ccaggccaucccaguuccc

SEQ ID NO: 508074 - RNA, 22 nt, Human
gcccuuaggcaagcagaagccc

SEQ ID NO: 508075 - RNA, 22 nt, Human
ugacacacagggggauggaguu

SEQ ID NO: 508076 - RNA, 21 nt, Human
agcucagccgggcacaguggc

SEQ ID NO: 508077 - RNA, 22 nt, Human
gaaauacagaaagggcugaaug

SEQ ID NO: 508078 - RNA, 22 nt, Human
ugggagucaacccucacgagca

SEQ ID NO: 508079 - RNA, 17 nt, Human
caggcuccuuccagauu

SEQ ID NO: 508080 - RNA, 22 nt, Human
cugggcacugcagcaggcauca

SEQ ID NO: 508081 - RNA, 22 nt, Human
gaagcucucaaacucuccccuu

SEQ ID NO: 508082 - RNA, 19 nt, Human
cccagcuugaccaccugcu

SEQ ID NO: 508083 - RNA, 19 nt, Human
ggccugaggccacagaucc

SEQ ID NO: 508084 - RNA, 22 nt, Human
uaucuacaggugucagguaaga

SEQ ID NO: 508085 - RNA, 22 nt, Human
agccaagcugaucuccugcuga

SEQ ID NO: 508086 - RNA, 19 nt, Human
cagcaauaaugccagaugg

SEQ ID NO: 508087 - RNA, 22 nt, Human
aaaugcacacaccaggaaacua

SEQ ID NO: 508088 - RNA, 22 nt, Human
ugggagcucagaaagggagguc

SEQ ID NO: 508089 - RNA, 22 nt, Human
ucaggaugguccuuuaugagaa

SEQ ID NO: 508090 - RNA, 22 nt, Human
gugggcuuuggccucuuucucc

SEQ ID NO: 508091 - RNA, 22 nt, Human
ccaggcucugcaaaaucaggcu

SEQ ID NO: 508092 - RNA, 22 nt, Human
aggacaggauugagcugaacug

SEQ ID NO: 508093 - RNA, 22 nt, Human
aucauucagucucugggacagu

SEQ ID NO: 508094 - RNA, 22 nt, Human
aaagcaguauaguggaagggcu

SEQ ID NO: 508095 - RNA, 22 nt, Human
aaaugaacucuuccugcauccc

SEQ ID NO: 508096 - RNA, 19 nt, Human
ccccaggguaggcuagggg

SEQ ID NO: 508097 - RNA, 22 nt, Human
cucuggccagagccugcgggaa

SEQ ID NO: 508098 - RNA, 22 nt, Human
uccaguccuagaaacuggagag

SEQ ID NO: 508099 - RNA, 22 nt, Human
ggccccaguucacuccuggccg

SEQ ID NO: 508100 - RNA, 22 nt, Human
guguggcuagaagugucuuguu

SEQ ID NO: 508101 - RNA, 23 nt, Human
agcugggaauuuucugaagcuuu

SEQ ID NO: 508102 - RNA, 22 nt, Human
aggcagcugugaggacuggauu

SEQ ID NO: 508103 - RNA, 22 nt, Human
caguguuuguggaauucaggug

SEQ ID NO: 508104 - RNA, 22 nt, Human
gcccucuggcagccuuggcugg

SEQ ID NO: 508105 - RNA, 22 nt, Human
caggugggcguggcgagaaggc

SEQ ID NO: 508106 - RNA, 22 nt, Human
aauuagggaggacaaagguaca

SEQ ID NO: 508107 - RNA, 22 nt, Human
ucauugcaguagggagagaccc

SEQ ID NO: 508108 - RNA, 22 nt, Human
ucucagagcaucauuuucuuag

SEQ ID NO: 508109 - RNA, 22 nt, Human
cacaguggcagguguggguugu

SEQ ID NO: 508110 - RNA, 22 nt, Human
uuuauauagagauuugugcaug

SEQ ID NO: 508111 - RNA, 22 nt, Human
cacuggaauucaagauacugag

SEQ ID NO: 508112 - RNA, 22 nt, Human
gaacacaugauuauaaaugcua

SEQ ID NO: 508113 - RNA, 22 nt, Human
cugacccuugcucgggcccugu

SEQ ID NO: 508114 - RNA, 18 nt, Human
acucaggaaaugaugaca

SEQ ID NO: 508115 - RNA, 22 nt, Human
cuauucuagauuacaguauaaa

SEQ ID NO: 508116 - RNA, 22 nt, Human
auuuaaaugcuuaagaggguuu

SEQ ID NO: 508117 - RNA, 22 nt, Human
aaacucuggagauguuuaugca

SEQ ID NO: 508118 - RNA, 22 nt, Human
gaugggcguggcgcguuuggug

SEQ ID NO: 508119 - RNA, 22 nt, Human
acuggcagagguuggacaccau

SEQ ID NO: 508120 - RNA, 22 nt, Human
agagcuaagaaacagaauugcu

SEQ ID NO: 508121 - RNA, 22 nt, Human
cacauguaguaagcaggcaaug

SEQ ID NO: 508122 - RNA, 22 nt, Human
caggcucaaggcugacuuccau

SEQ ID NO: 508123 - RNA, 22 nt, Human
aagaguuugaccugugccaucc

SEQ ID NO: 508124 - RNA, 22 nt, Human
ggcagcucaccucugguccagg

SEQ ID NO: 508125 - RNA, 22 nt, Human
cuaggaggcgggggcugcagua

SEQ ID NO: 508126 - RNA, 22 nt, Human
uaagcaaauagcuagaucagag

SEQ ID NO: 508127 - RNA, 22 nt, Human
uccaaaggcccuaauaagcuug

SEQ ID NO: 508128 - RNA, 22 nt, Human
uuguagcugaaaguaaagaagu

SEQ ID NO: 508129 - RNA, 22 nt, Human
ugcagagaagaggacaguucua

SEQ ID NO: 508130 - RNA, 22 nt, Human
cuagagcuguucugugcacuca

SEQ ID NO: 508131 - RNA, 22 nt, Human
ccugcccuguguuuggggacua

SEQ ID NO: 508132 - RNA, 22 nt, Human
aagaauggugguggggccagca

SEQ ID NO: 508133 - RNA, 23 nt, Human
agucugaauugagaugugcugug

SEQ ID NO: 508134 - RNA, 22 nt, Human
uuccuguggccuuacaucugug

SEQ ID NO: 508135 - RNA, 22 nt, Human
uuguuaaagaugcagauuccau

SEQ ID NO: 508136 - RNA, 20 nt, Human
cacaggccuugugagcagac

SEQ ID NO: 508137 - RNA, 22 nt, Human
agcaccugugugguagggaggu

SEQ ID NO: 508138 - RNA, 22 nt, Human
aaaaaauuaucauaguuccuga

SEQ ID NO: 508139 - RNA, 22 nt, Human
ucucaccauggugcuugcuuau

SEQ ID NO: 508140 - RNA, 22 nt, Human
agauacauagcugugagcacac

SEQ ID NO: 508141 - RNA, 22 nt, Human
caggcccagcccuuagccaggu

SEQ ID NO: 508142 - RNA, 22 nt, Human
aauauguuccacuuaaagcugg

SEQ ID NO: 508143 - RNA, 22 nt, Human
ccagacuggggcuccuugaggg

SEQ ID NO: 508144 - RNA, 22 nt, Human
ccaggcugcuuagccuuaucuu

SEQ ID NO: 508145 - RNA, 22 nt, Human
acacaugcugauaagaauauaa

SEQ ID NO: 508146 - RNA, 22 nt, Human
uccuguggcguuaucaugugau

SEQ ID NO: 508147 - RNA, 22 nt, Human
gugaggugguacaauauuaacu

SEQ ID NO: 508148 - RNA, 22 nt, Human
gagagugucgggggccccagga

SEQ ID NO: 508149 - RNA, 20 nt, Human
cccaggagugagcagcuuua

SEQ ID NO: 508150 - RNA, 22 nt, Human
gcaggcagagguggaggagaca

SEQ ID NO: 508151 - RNA, 20 nt, Human
aggcagcuggccaggcaggu

SEQ ID NO: 508152 - RNA, 23 nt, Human
ugugucugaggauauaugugcau

SEQ ID NO: 508153 - RNA, 22 nt, Human
gauucuuacuucuaagcaagcu

SEQ ID NO: 508154 - RNA, 22 nt, Human
caggggcuuuuccucuauaagg

SEQ ID NO: 508155 - RNA, 22 nt, Human
uagaaauggggaaguaguuagg

SEQ ID NO: 508156 - RNA, 22 nt, Human
aaaggccucuguccuagugccu

SEQ ID NO: 508157 - RNA, 22 nt, Human
aaaguccuuuuugccaugcaag

SEQ ID NO: 508158 - RNA, 22 nt, Human
agggccugcaucaggagcuugg

SEQ ID NO: 508159 - RNA, 22 nt, Human
aaacucugaugcuuauugggaa

SEQ ID NO: 508160 - RNA, 17 nt, Human
cugucugcgcaugaggu

SEQ ID NO: 508161 - RNA, 22 nt, Human
aaaagagagcugaggagcucca

SEQ ID NO: 508162 - RNA, 22 nt, Human
ucagcaaugagaacuggcauuu

SEQ ID NO: 508163 - RNA, 18 nt, Human
guguccuggcugcggcgc

SEQ ID NO: 508164 - RNA, 22 nt, Human
ugcugccuuagcagccaggcaa

SEQ ID NO: 508165 - RNA, 22 nt, Human
uugugucugggggagugacauc

SEQ ID NO: 508166 - RNA, 22 nt, Human
gcacccagaggucagcagugcu

SEQ ID NO: 508167 - RNA, 22 nt, Human
aaugaacaaaauaugcuuugca

SEQ ID NO: 508168 - RNA, 22 nt, Human
gccugcaguucugugcuaggca

SEQ ID NO: 508169 - RNA, 22 nt, Human
uuccugggaggcuguguacuug

SEQ ID NO: 508170 - RNA, 22 nt, Human
gaaagauaaucaauuacuccuu

SEQ ID NO: 508171 - RNA, 22 nt, Human
cugcccaggcugaaggaacauc

SEQ ID NO: 508172 - RNA, 22 nt, Human
ugaagcagcaccauuuuagagc

SEQ ID NO: 508173 - RNA, 22 nt, Human
cagcucagacgcaggucgagca

SEQ ID NO: 508174 - RNA, 22 nt, Human
cuaauacucauuucuguaacuc

SEQ ID NO: 508175 - RNA, 21 nt, Human
aaggcuggagaugcaggucug

SEQ ID NO: 508176 - RNA, 22 nt, Human
ggcacugauuccauucaugaag

SEQ ID NO: 508177 - RNA, 22 nt, Human
cauggccaaggaugcucaacca

SEQ ID NO: 508178 - RNA, 22 nt, Human
uguagcagugucuaccacauua

SEQ ID NO: 508179 - RNA, 22 nt, Human
uuuuauuggagugauaccaagc

SEQ ID NO: 508180 - RNA, 21 nt, Human
uucugccuucgaggucucagg

SEQ ID NO: 508181 - RNA, 22 nt, Human
aucugccuccaaguccaugugu

SEQ ID NO: 508182 - RNA, 22 nt, Human
gagggcugccacguugggcgag

SEQ ID NO: 508183 - RNA, 22 nt, Human
cuccugggcugggaacucagcc

SEQ ID NO: 508184 - RNA, 23 nt, Human
uguaacuucuuaaauucuucacu

SEQ ID NO: 508185 - RNA, 22 nt, Human
uuccugagggacuuuugagauu

SEQ ID NO: 508186 - RNA, 22 nt, Human
aaguggacuaauacaaggacua

SEQ ID NO: 508187 - RNA, 22 nt, Human
agagggcugcugcacagugcuc

SEQ ID NO: 508188 - RNA, 22 nt, Human
cuacugaguccuucagcugcca

SEQ ID NO: 508189 - RNA, 21 nt, Human
gcugggcuccagucugccgcu

SEQ ID NO: 508190 - RNA, 22 nt, Human
ucagaaauagucuuuaaaauga

SEQ ID NO: 508191 - RNA, 22 nt, Human
caggccacaaguuggguucaag

SEQ ID NO: 508192 - RNA, 22 nt, Human
gaacagcuucuugggagcuggg

SEQ ID NO: 508193 - RNA, 22 nt, Human
uaagcugugggagauuggcaua

SEQ ID NO: 508194 - RNA, 22 nt, Human
aaagguuaguucuuagaagugc

SEQ ID NO: 508195 - RNA, 22 nt, Human
ugggcucucaaagugcggcuug

SEQ ID NO: 508196 - RNA, 22 nt, Human
caggcugggcagccuccccggc

SEQ ID NO: 508197 - RNA, 21 nt, Human
gcuccuggugcugcguggcgc

SEQ ID NO: 508198 - RNA, 21 nt, Human
agaggccuuacaggauagacc

SEQ ID NO: 508199 - RNA, 22 nt, Human
uuuucauuagaaugacugagaa

SEQ ID NO: 508200 - RNA, 22 nt, Human
caaaauguucuggcaccuuuaa

SEQ ID NO: 508201 - RNA, 22 nt, Human
gggcagguaggugaaauaauga

SEQ ID NO: 508202 - RNA, 22 nt, Human
aucugccucuucuucauugcga

SEQ ID NO: 508203 - RNA, 22 nt, Human
ccaucccugccauuauagccca

SEQ ID NO: 508204 - RNA, 20 nt, Human
agguauaagaaaugugauuu

SEQ ID NO: 508205 - RNA, 22 nt, Human
ccugggcaucucaugcaccugc

SEQ ID NO: 508206 - RNA, 17 nt, Human
uuccuggaagucauucc

SEQ ID NO: 508207 - RNA, 22 nt, Human
cagcaugacagucugcagcaga

SEQ ID NO: 508208 - RNA, 22 nt, Human
cagagccccuggguugggagcu

SEQ ID NO: 508209 - RNA, 22 nt, Human
ggccagguuggguggaaguggc

SEQ ID NO: 508210 - RNA, 22 nt, Human
ccagggcauguaacuaauggug

SEQ ID NO: 508211 - RNA, 22 nt, Human
cgggcacacacuugacagguuc

SEQ ID NO: 508212 - RNA, 22 nt, Human
ugagcccuaagggucaagcagg

SEQ ID NO: 508213 - RNA, 22 nt, Human
gagcuuggacaccuuggcaggu

SEQ ID NO: 508214 - RNA, 22 nt, Human
ucaggagauguaaccuuagcug

SEQ ID NO: 508215 - RNA, 22 nt, Human
aaggccagauucacuuuacaau

SEQ ID NO: 508216 - RNA, 23 nt, Human
acacaauagaguacuauucagcc

SEQ ID NO: 508217 - RNA, 23 nt, Human
ggucccaguggagaggccucacc

SEQ ID NO: 508218 - RNA, 22 nt, Human
gcugagagugggugcagugcuu

SEQ ID NO: 508219 - RNA, 22 nt, Human
gcuggccacauugugccguccu

SEQ ID NO: 508220 - RNA, 22 nt, Human
ccuggcaggcaagaggaaggga

SEQ ID NO: 508221 - RNA, 22 nt, Human
gggcacaggagaaggaucuggc

SEQ ID NO: 508222 - RNA, 22 nt, Human
ccugaguagcuggaauuaaagg

SEQ ID NO: 508223 - RNA, 22 nt, Human
cuuuagaaggguaacggaauua

SEQ ID NO: 508224 - RNA, 22 nt, Human
cccaggucuccugcuucccagg

SEQ ID NO: 508225 - RNA, 21 nt, Human
guauucuuuaugaagugaaaa

SEQ ID NO: 508226 - RNA, 22 nt, Human
acucugggcuguuaggagcugu

SEQ ID NO: 508227 - RNA, 22 nt, Human
uggaccugcguaggugcugggc

SEQ ID NO: 508228 - RNA, 22 nt, Human
auguccagaggugagucagagc

SEQ ID NO: 508229 - RNA, 22 nt, Human
ggaggccaucagggagggcauu

SEQ ID NO: 508230 - RNA, 19 nt, Human
cugggcugaggucugccuu

SEQ ID NO: 508231 - RNA, 22 nt, Human
uucuggagaucugccuauggga

SEQ ID NO: 508232 - RNA, 22 nt, Human
uccucagacuucccuuugugua

SEQ ID NO: 508233 - RNA, 22 nt, Human
ugaggcaggagaaucacaugaa

SEQ ID NO: 508234 - RNA, 22 nt, Human
cugugggcucccagcuucucuc

SEQ ID NO: 508235 - RNA, 22 nt, Human
ggcccugggcagaggagugggc

SEQ ID NO: 508236 - RNA, 22 nt, Human
gccuggagcuacuggacacuga

SEQ ID NO: 508237 - RNA, 22 nt, Human
uagggcagccuuauagcuccca

SEQ ID NO: 508238 - RNA, 22 nt, Human
aaagauugaaagagaauuuguc

SEQ ID NO: 508239 - RNA, 22 nt, Human
uggcagagcccagacuccaguc

SEQ ID NO: 508240 - RNA, 22 nt, Human
gggaugagagcugggacagaag

SEQ ID NO: 508241 - RNA, 22 nt, Human
gugugcagugagcaaaagaucu

SEQ ID NO: 508242 - RNA, 22 nt, Human
cccucaguuuuccagugugggc

SEQ ID NO: 508243 - RNA, 19 nt, Human
accaggaguaucagagcug

SEQ ID NO: 508244 - RNA, 22 nt, Human
guucuucaccaaggucagaggc

SEQ ID NO: 508245 - RNA, 22 nt, Human
uugaagcaugguacuuguucaa

SEQ ID NO: 508246 - RNA, 22 nt, Human
uggccucuggcugaggacuaac

SEQ ID NO: 508247 - RNA, 19 nt, Human
ucaaugcaugaaaucagcc

SEQ ID NO: 508248 - RNA, 17 nt, Human
ugaaaucagcacccagg

SEQ ID NO: 508249 - RNA, 22 nt, Human
cauuacaaccccaaauuacaaa

SEQ ID NO: 508250 - RNA, 22 nt, Human
cuuacauugugugcaugagggg

SEQ ID NO: 508251 - RNA, 22 nt, Human
uauguguuugacacccugcaag

SEQ ID NO: 508252 - RNA, 22 nt, Human
cauaauuacugauaugcugauu

SEQ ID NO: 508253 - RNA, 22 nt, Human
ccuggcuccugcacagaucuuu

SEQ ID NO: 508254 - RNA, 22 nt, Human
auggcuagcaccgcguugcugg

SEQ ID NO: 508255 - RNA, 22 nt, Human
ugucugguggguugacaggcag

SEQ ID NO: 508256 - RNA, 22 nt, Human
gccucugcgccucagccgaccu

SEQ ID NO: 508257 - RNA, 21 nt, Human
aaagagguuaauauuguaagu

SEQ ID NO: 508258 - RNA, 22 nt, Human
ucugucugagugguguuagagu

SEQ ID NO: 508259 - RNA, 22 nt, Human
cagaagcagugagagaugugca

SEQ ID NO: 508260 - RNA, 22 nt, Human
ggcaguuuuaacagagguagua

SEQ ID NO: 508261 - RNA, 22 nt, Human
ucauugcagaaauaaaggugaa

SEQ ID NO: 508262 - RNA, 22 nt, Human
gcuggguuuucuuccgggccua

SEQ ID NO: 508263 - RNA, 22 nt, Human
aaaaauacuucacuucugggug

SEQ ID NO: 508264 - RNA, 19 nt, Human
auagaaaggguuaaagaca

SEQ ID NO: 508265 - RNA, 18 nt, Human
ggucugagaucguuuuuc

SEQ ID NO: 508266 - RNA, 22 nt, Human
aguaaugugccugaaauacuug

SEQ ID NO: 508267 - RNA, 22 nt, Human
guuuccaaccccaccaaagugc

SEQ ID NO: 508268 - RNA, 22 nt, Human
uggagguacauaaugagagggu

SEQ ID NO: 508269 - RNA, 22 nt, Human
ugaagcagagugaaggugaauu

SEQ ID NO: 508270 - RNA, 22 nt, Human
uggugcaauauuaugaaaggua

SEQ ID NO: 508271 - RNA, 22 nt, Human
uagcccagagucccaauuccag

SEQ ID NO: 508272 - RNA, 22 nt, Human
uaucuuugcaaauaucucuaag

SEQ ID NO: 508273 - RNA, 22 nt, Human
acagagucucagggaugaaagc

SEQ ID NO: 508274 - RNA, 22 nt, Human
ucuuggcuacuuaggaggauuc

SEQ ID NO: 508275 - RNA, 22 nt, Human
caaaguauaguguaggauggca

SEQ ID NO: 508276 - RNA, 22 nt, Human
aaguguuuauuuauaacgaucu

SEQ ID NO: 508277 - RNA, 23 nt, Human
cagguggcuccacgagggguggg

SEQ ID NO: 508278 - RNA, 21 nt, Human
ccagcuuucccaagucccuuu

SEQ ID NO: 508279 - RNA, 22 nt, Human
cugggcucuaggaaccauuccu

SEQ ID NO: 508280 - RNA, 18 nt, Human
uugagggaggggcagagu

SEQ ID NO: 508281 - RNA, 22 nt, Human
agcauuccacacugaagucugc

SEQ ID NO: 508282 - RNA, 22 nt, Human
uuauguaauuuguuugcucuuc

SEQ ID NO: 508283 - RNA, 19 nt, Human
ccagucccauacaggagau

SEQ ID NO: 508284 - RNA, 22 nt, Human
cacuguacugugaauaaggagg

SEQ ID NO: 508285 - RNA, 22 nt, Human
caaagcaggcuugucaaauugc

SEQ ID NO: 508286 - RNA, 22 nt, Human
agcuucuccaucugcccagaga

SEQ ID NO: 508287 - RNA, 22 nt, Human
ggggcagcucccgagggcagga

SEQ ID NO: 508288 - RNA, 22 nt, Human
ccaaagagcuagaauuauaggc

SEQ ID NO: 508289 - RNA, 22 nt, Human
caugaagcauguuuugucauga

SEQ ID NO: 508290 - RNA, 22 nt, Human
agggugccuggaagccacucac

SEQ ID NO: 508291 - RNA, 22 nt, Human
uucuaguuaaaguauguauuag

SEQ ID NO: 508292 - RNA, 22 nt, Human
agaaggccagauggacggggcu

SEQ ID NO: 508293 - RNA, 22 nt, Human
gccaggcuggcaaaaggaaacc

SEQ ID NO: 508294 - RNA, 22 nt, Human
aucuggcugagcgaggcccaca

SEQ ID NO: 508295 - RNA, 22 nt, Human
ucagguccccaacucuucucac

SEQ ID NO: 508296 - RNA, 22 nt, Human
cagcagcccacgcgugcugucc

SEQ ID NO: 508297 - RNA, 22 nt, Human
uccucugcuguucugguucuuu

SEQ ID NO: 508298 - RNA, 22 nt, Human
auuauuugaguuccucucuacc

SEQ ID NO: 508299 - RNA, 21 nt, Human
aguguccuugaucuugccuug

SEQ ID NO: 508300 - RNA, 22 nt, Human
ccagagcccgggaccuggacuu

SEQ ID NO: 508301 - RNA, 22 nt, Human
ggccucgcggcuucugguggcu

SEQ ID NO: 508302 - RNA, 22 nt, Human
aggcaguuuaggcagcgauuua

SEQ ID NO: 508303 - RNA, 22 nt, Human
uggggcagcagaccuuucuugg

SEQ ID NO: 508304 - RNA, 22 nt, Human
uacagagacccacaagagacug

SEQ ID NO: 508305 - RNA, 22 nt, Human
ucacuguaauagguuugaagau

SEQ ID NO: 508306 - RNA, 22 nt, Human
cagaggcugggaccucaggcau

SEQ ID NO: 508307 - RNA, 22 nt, Human
cuguggcuaggaagcuguggga

SEQ ID NO: 508308 - RNA, 22 nt, Human
ucagaaaccagcucucucaauu

SEQ ID NO: 508309 - RNA, 22 nt, Human
cagugcauagauccugaggccu

SEQ ID NO: 508310 - RNA, 22 nt, Human
ucuauuuaccaaauguaguucc

SEQ ID NO: 508311 - RNA, 22 nt, Human
ucuggcccagccccugauccca

SEQ ID NO: 508312 - RNA, 22 nt, Human
ucugccuggauuccauucucca

SEQ ID NO: 508313 - RNA, 22 nt, Human
ggccuugggaggagggucagaa

SEQ ID NO: 508314 - RNA, 17 nt, Human
aggcagcucagaacauc

SEQ ID NO: 508315 - RNA, 19 nt, Human
cuguccuuggcugcacugu

SEQ ID NO: 508316 - RNA, 22 nt, Human
ugaaagguuaaaaguaguauug

SEQ ID NO: 508317 - RNA, 19 nt, Human
ggaugagggucaggcauag

SEQ ID NO: 508318 - RNA, 22 nt, Human
cuuccaggugcuggccuggccu

SEQ ID NO: 508319 - RNA, 22 nt, Human
cauggcaggaaaaugaacaggc

SEQ ID NO: 508320 - RNA, 19 nt, Human
uguggccaugguucagcug

SEQ ID NO: 508321 - RNA, 21 nt, Human
ggcagcccgcccucuccuggc

SEQ ID NO: 508322 - RNA, 22 nt, Human
ugaauaagaauuauuauaauga

SEQ ID NO: 508323 - RNA, 22 nt, Human
ucagcuuugcaaguuagaaaau

SEQ ID NO: 508324 - RNA, 22 nt, Human
agcugucuuucugccuccugau

SEQ ID NO: 508325 - RNA, 20 nt, Human
cacaggcuauaugagagcca

SEQ ID NO: 508326 - RNA, 22 nt, Human
cuccucucaggcuggauggcgc

SEQ ID NO: 508327 - RNA, 19 nt, Human
uuugucucugaauaauauu

SEQ ID NO: 508328 - RNA, 22 nt, Human
cacacauuucagaugcuacaau

SEQ ID NO: 508329 - RNA, 16 nt, Human
agcagggcgggaagga

SEQ ID NO: 508330 - RNA, 22 nt, Human
aaagccuugcccgucacuggga

SEQ ID NO: 508331 - RNA, 22 nt, Human
ccagagaggccaaggucguggu

SEQ ID NO: 508332 - RNA, 22 nt, Human
gugggagcuuuggcaucaggcu

SEQ ID NO: 508333 - RNA, 22 nt, Human
ugauuacacagcaguaauuuca

SEQ ID NO: 508334 - RNA, 22 nt, Human
gggcagguacaagaugcuucuu

SEQ ID NO: 508335 - RNA, 22 nt, Human
uuuggugauagugcagagaaau

SEQ ID NO: 508336 - RNA, 22 nt, Human
aagggagguaaagcuauuuaaa

SEQ ID NO: 508337 - RNA, 22 nt, Human
caaauacuaaacauaagauuuu

SEQ ID NO: 508338 - RNA, 23 nt, Human
agggaaaguaguaauggccuuug

SEQ ID NO: 508339 - RNA, 22 nt, Human
auuagggaaacugacuugucuc

SEQ ID NO: 508340 - RNA, 22 nt, Human
ccagggcagaaaaagagggaau

SEQ ID NO: 508341 - RNA, 22 nt, Human
caggcagauuugcugcccucca

SEQ ID NO: 508342 - RNA, 22 nt, Human
ugugcugcucucagugacagcc

SEQ ID NO: 508343 - RNA, 22 nt, Human
ugagugugcagggaaguggcgg

SEQ ID NO: 508344 - RNA, 21 nt, Human
ugugaguccaucugagcagaa

SEQ ID NO: 508345 - RNA, 22 nt, Human
cuggugagacgguugacaggag

SEQ ID NO: 508346 - RNA, 22 nt, Human
gaggccugguagccgagcccca

SEQ ID NO: 508347 - RNA, 22 nt, Human
uucaaaccuucacuugcagagu

SEQ ID NO: 508348 - RNA, 22 nt, Human
cauuuauugaguggccacagug

SEQ ID NO: 508349 - RNA, 22 nt, Human
agcuucucagaagaguccugua

SEQ ID NO: 508350 - RNA, 23 nt, Human
ugaaucaauuaugggauucaaug

SEQ ID NO: 508351 - RNA, 22 nt, Human
cagagagaggccacugcuauua

SEQ ID NO: 508352 - RNA, 22 nt, Human
uuucucuuugacaggaaucaga

SEQ ID NO: 508353 - RNA, 22 nt, Human
aucaggaucagggcuagcagag

SEQ ID NO: 508354 - RNA, 23 nt, Human
aggugccaacugagagcugagag

SEQ ID NO: 508355 - RNA, 22 nt, Human
acacuaguagaauaguguuugc

SEQ ID NO: 508356 - RNA, 22 nt, Human
augaauugaaagaagaauaucu

SEQ ID NO: 508357 - RNA, 22 nt, Human
gugcagcugugugagagcucca

SEQ ID NO: 508358 - RNA, 22 nt, Human
caaaugcuaacuucuuuccaaa

SEQ ID NO: 508359 - RNA, 22 nt, Human
gcagaauguaggccuucagugu

SEQ ID NO: 508360 - RNA, 22 nt, Human
cucucuucccgugaguguugca

SEQ ID NO: 508361 - RNA, 22 nt, Human
gcagccuccgcacugcgagucc

SEQ ID NO: 508362 - RNA, 22 nt, Human
acaguguuuugucuggcagggc

SEQ ID NO: 508363 - RNA, 18 nt, Human
agggccagcugugaguag

SEQ ID NO: 508364 - RNA, 22 nt, Human
gucaauaauugauagauauugg

SEQ ID NO: 508365 - RNA, 22 nt, Human
ccuggcagucaggggaguccuu

SEQ ID NO: 508366 - RNA, 22 nt, Human
ggcugcugguagggguaggaag

SEQ ID NO: 508367 - RNA, 22 nt, Human
aagaaaacaaugacuugccagc

SEQ ID NO: 508368 - RNA, 22 nt, Human
uguaacaguaagccugugagcu

SEQ ID NO: 508369 - RNA, 22 nt, Human
agcagcauguaugagggugaac

SEQ ID NO: 508370 - RNA, 22 nt, Human
uucuaguuuucaguccaccagg

SEQ ID NO: 508371 - RNA, 22 nt, Human
uuucagaggaggaaggcaguua

SEQ ID NO: 508372 - RNA, 22 nt, Human
cagcccuggccucuucgcuuuc

SEQ ID NO: 508373 - RNA, 22 nt, Human
guacaaaguggaccugauagua

SEQ ID NO: 508374 - RNA, 22 nt, Human
cucucaguccugcgcgccucug

SEQ ID NO: 508375 - RNA, 22 nt, Human
gcucaggaaauaguuuaguguu

SEQ ID NO: 508376 - RNA, 22 nt, Human
aagauucagccaaauuguucau

SEQ ID NO: 508377 - RNA, 22 nt, Human
auauguguauuugguuagccua

SEQ ID NO: 508378 - RNA, 21 nt, Human
agacagcuuuaaagacacagg

SEQ ID NO: 508379 - RNA, 22 nt, Human
caccucuuugauuugaggcaag

SEQ ID NO: 508380 - RNA, 22 nt, Human
ccucaggggugcccacagcugc

SEQ ID NO: 508381 - RNA, 22 nt, Human
acaggacaggcugggcuagacu

SEQ ID NO: 508382 - RNA, 22 nt, Human
cagguucccuagcagcaaagcc

SEQ ID NO: 508383 - RNA, 22 nt, Human
acacacacaagcagguugugga

SEQ ID NO: 508384 - RNA, 22 nt, Human
caggggcgguggcucacgccug

SEQ ID NO: 508385 - RNA, 22 nt, Human
aagaguuucugauucaguaggu

SEQ ID NO: 508386 - RNA, 21 nt, Human
gcugucuccuccuugcaccag

SEQ ID NO: 508387 - RNA, 22 nt, Human
uggccuuguguuuuagagaaag

SEQ ID NO: 508388 - RNA, 22 nt, Human
ugucacagucucgugagcaucu

SEQ ID NO: 508389 - RNA, 22 nt, Human
auaagagcuagucuuuuccuug

SEQ ID NO: 508390 - RNA, 22 nt, Human
ucccaggguccucuucuggaau

SEQ ID NO: 508391 - RNA, 22 nt, Human
uucuuugcccuuaaugaaauaa

SEQ ID NO: 508392 - RNA, 22 nt, Human
agcagcucaaagccugcaagga

SEQ ID NO: 508393 - RNA, 22 nt, Human
uguguccuguccccuugcugcu

SEQ ID NO: 508394 - RNA, 22 nt, Human
aggcuccagcagccagaggaag

SEQ ID NO: 508395 - RNA, 22 nt, Human
gcugaggcucaagucauggguc

SEQ ID NO: 508396 - RNA, 22 nt, Human
ggccucugcccucacuccuguc

SEQ ID NO: 508397 - RNA, 21 nt, Human
aaaaagcuggggcaugcaugc

SEQ ID NO: 508398 - RNA, 22 nt, Human
aagauuuucagcuaauggugca

SEQ ID NO: 508399 - RNA, 22 nt, Human
aggcucagagaugaguaagcac

SEQ ID NO: 508400 - RNA, 22 nt, Human
aaucagucauuagcucugaccu

SEQ ID NO: 508401 - RNA, 22 nt, Human
acugggcuucacuuggcacauc

SEQ ID NO: 508402 - RNA, 22 nt, Human
accugggaggcggagguugcag

SEQ ID NO: 508403 - RNA, 22 nt, Human
ccugagaccaaguugcagccau

SEQ ID NO: 508404 - RNA, 22 nt, Human
ucuguucagacacuuuacaugu

SEQ ID NO: 508405 - RNA, 23 nt, Human
agccuucaggcaaugucaguaga

SEQ ID NO: 508406 - RNA, 21 nt, Human
gccugcagaccccaccaggcu

SEQ ID NO: 508407 - RNA, 22 nt, Human
uggcugaauaaaauaugguguu

SEQ ID NO: 508408 - RNA, 18 nt, Human
gugacagcugcuagcuca

SEQ ID NO: 508409 - RNA, 22 nt, Human
ugaugaaauguugaggcaguga

SEQ ID NO: 508410 - RNA, 22 nt, Human
cacagcuggggaagcugaggcc

SEQ ID NO: 508411 - RNA, 23 nt, Human
aguggcuggacagacuuuccugg

SEQ ID NO: 508412 - RNA, 22 nt, Human
ccugccagggccuuggaagaaa

SEQ ID NO: 508413 - RNA, 22 nt, Human
acucaggaagaaagcagcuggu

SEQ ID NO: 508414 - RNA, 22 nt, Human
uuauuagcugggcuucagggug

SEQ ID NO: 508415 - RNA, 22 nt, Human
ccaggcucugcgcuggacaugg

SEQ ID NO: 508416 - RNA, 22 nt, Human
cauagagugauguaagguaugu

SEQ ID NO: 508417 - RNA, 20 nt, Human
uaaggcuguuuuguauuccu

SEQ ID NO: 508418 - RNA, 22 nt, Human
agcagggaggucuagcacgugg

SEQ ID NO: 508419 - RNA, 22 nt, Human
uuccugccuacaugccuuaugc

SEQ ID NO: 508420 - RNA, 22 nt, Human
gagcucuggcagggcaggucug

SEQ ID NO: 508421 - RNA, 22 nt, Human
ucagccucagguguucagauuu

SEQ ID NO: 508422 - RNA, 22 nt, Human
agcaggcuuucaagagucuucu

SEQ ID NO: 508423 - RNA, 23 nt, Human
uggccuggagagaaaagaugagu

SEQ ID NO: 508424 - RNA, 22 nt, Human
gcagcuuucugcaaugucaucc

SEQ ID NO: 508425 - RNA, 22 nt, Human
uaaggcacgcauaagagggggc

SEQ ID NO: 508426 - RNA, 22 nt, Human
gagcucagccugaggccuggcu

SEQ ID NO: 508427 - RNA, 22 nt, Human
agacaggacacaagcugcauaa

SEQ ID NO: 508428 - RNA, 22 nt, Human
agaugggcgcccuggacugagg

SEQ ID NO: 508429 - RNA, 22 nt, Human
ugccagcucccuuuucuccucc

SEQ ID NO: 508430 - RNA, 22 nt, Human
uccuggcccucugcaaacgcca

SEQ ID NO: 508431 - RNA, 22 nt, Human
auuuauuaccucggaguuucug

SEQ ID NO: 508432 - RNA, 22 nt, Human
cugucuccuccacugcauggga

SEQ ID NO: 508433 - RNA, 22 nt, Human
ugcugaauuccagggccccacu

SEQ ID NO: 508434 - RNA, 22 nt, Human
guuauguacuuuuuaaaucuug

SEQ ID NO: 508435 - RNA, 22 nt, Human
uagacagauuucuuguuagaca

SEQ ID NO: 508436 - RNA, 17 nt, Human
cugagcauccgugcucu

SEQ ID NO: 508437 - RNA, 22 nt, Human
gaaauaacagcucuggaagagu

SEQ ID NO: 508438 - RNA, 22 nt, Human
cuauuugucacaacugguguuu

SEQ ID NO: 508439 - RNA, 17 nt, Human
gcuaggagagggaggag

SEQ ID NO: 508440 - RNA, 22 nt, Human
gggccucugugcagaggggccu

SEQ ID NO: 508441 - RNA, 22 nt, Human
aaaucuguaagcaauugcucag

SEQ ID NO: 508442 - RNA, 22 nt, Human
gccaccuguuucagaugugguu

SEQ ID NO: 508443 - RNA, 22 nt, Human
ccuaguccccaggaggucagug

SEQ ID NO: 508444 - RNA, 19 nt, Human
uuuacaaguucuuuguaug

SEQ ID NO: 508445 - RNA, 22 nt, Human
agagccugaggccaggaaaaug

SEQ ID NO: 508446 - RNA, 23 nt, Human
gggagccauggguggucauggag

SEQ ID NO: 508447 - RNA, 22 nt, Human
uaggaacauaugcagugcuuuu

SEQ ID NO: 508448 - RNA, 22 nt, Human
aaagaaauagauggcauuuaaa

SEQ ID NO: 508449 - RNA, 22 nt, Human
auugacaagaaagauauuuuua

SEQ ID NO: 508450 - RNA, 22 nt, Human
gggccagagcuuggcagcuggg

SEQ ID NO: 508451 - RNA, 22 nt, Human
uuccugggcaggacgagagucu

SEQ ID NO: 508452 - RNA, 22 nt, Human
cauggacucugguuuggggagc

SEQ ID NO: 508453 - RNA, 22 nt, Human
uccugccugcaaucccagcacu

SEQ ID NO: 508454 - RNA, 22 nt, Human
uuucugcugugcuuucuugcgu

SEQ ID NO: 508455 - RNA, 19 nt, Human
ugaccccacgcuccagagc

SEQ ID NO: 508456 - RNA, 22 nt, Human
uuugcuuguucaagauuucugu

SEQ ID NO: 508457 - RNA, 22 nt, Human
agcaaaguagcugcuguucuua

SEQ ID NO: 508458 - RNA, 22 nt, Human
ucagugcauucauggguggcug

SEQ ID NO: 508459 - RNA, 22 nt, Human
aagugacuauuugaguacauca

SEQ ID NO: 508460 - RNA, 22 nt, Human
ugaugcugagccugggacugac

SEQ ID NO: 508461 - RNA, 22 nt, Human
cauuuguauagugcuuagacca

SEQ ID NO: 508462 - RNA, 22 nt, Human
aauuccacagaugucuaucugu

SEQ ID NO: 508463 - RNA, 22 nt, Human
uucucugggaucuggcaaaagg

SEQ ID NO: 508464 - RNA, 22 nt, Human
uccucucagugugguuguggga

SEQ ID NO: 508465 - RNA, 22 nt, Human
cucugcuggccaugaagagaga

SEQ ID NO: 508466 - RNA, 22 nt, Human
ggcucugcccagguggacagca

SEQ ID NO: 508467 - RNA, 17 nt, Human
agcagaagucagaggga

SEQ ID NO: 508468 - RNA, 22 nt, Human
auguuuuauguuccacucaagg

SEQ ID NO: 508469 - RNA, 22 nt, Human
cccugcaguccuuucuuggcuc

SEQ ID NO: 508470 - RNA, 22 nt, Human
uucuggcugaaaguuuauuuga

SEQ ID NO: 508471 - RNA, 22 nt, Human
caggcugcagaggccuuucaug

SEQ ID NO: 508472 - RNA, 22 nt, Human
ucacaggagggagagacaccca

SEQ ID NO: 508473 - RNA, 22 nt, Human
ugaaacaaaccaguaauuuugu

SEQ ID NO: 508474 - RNA, 22 nt, Human
agaguucugcucuucucaguga

SEQ ID NO: 508475 - RNA, 22 nt, Human
augaguaaaaccacuauuuaca

SEQ ID NO: 508476 - RNA, 22 nt, Human
cuguuuaucuaggaguugcagg

SEQ ID NO: 508477 - RNA, 22 nt, Human
gcugggagcaaagccaugcaua

SEQ ID NO: 508478 - RNA, 22 nt, Human
cugagagccuccuguuggcuag

SEQ ID NO: 508479 - RNA, 22 nt, Human
ugccugggggacuaaggccaaa

SEQ ID NO: 508480 - RNA, 22 nt, Human
ggcuagaauaauugacuucauu

SEQ ID NO: 508481 - RNA, 22 nt, Human
ccugagagcauuccacacugaa

SEQ ID NO: 508482 - RNA, 22 nt, Human
auauaaguuaguggucauguuu

SEQ ID NO: 508483 - RNA, 22 nt, Human
gguggggcccuggcacugguau

SEQ ID NO: 508484 - RNA, 19 nt, Human
cucugggcugcaucuuggu

SEQ ID NO: 508485 - RNA, 22 nt, Human
uggaucugacuggcuuuucuuc

SEQ ID NO: 508486 - RNA, 22 nt, Human
aucaggaacguucauggacugu

SEQ ID NO: 508487 - RNA, 22 nt, Human
agagacugcaaugagugguagg

SEQ ID NO: 508488 - RNA, 22 nt, Human
auggcccaggccuccuguggcu

SEQ ID NO: 508489 - RNA, 22 nt, Human
aguccugguucugauucugaca

SEQ ID NO: 508490 - RNA, 22 nt, Human
ucauaagcuagcugcaccauau

SEQ ID NO: 508491 - RNA, 19 nt, Human
ucagggaaguucaaagcuc

SEQ ID NO: 508492 - RNA, 22 nt, Human
cugccuuggaaaaugugguaau

SEQ ID NO: 508493 - RNA, 22 nt, Human
uggcaugggcaaaccagggaaa

SEQ ID NO: 508494 - RNA, 22 nt, Human
cucacagaugcugugggucagg

SEQ ID NO: 508495 - RNA, 23 nt, Human
aggauccugguacaggagcagag

SEQ ID NO: 508496 - RNA, 22 nt, Human
ucaucaguuuagaaaaaauaug

SEQ ID NO: 508497 - RNA, 22 nt, Human
ucugucuuggccagccaucugg

SEQ ID NO: 508498 - RNA, 22 nt, Human
uccagggagagccgcugcucca

SEQ ID NO: 508499 - RNA, 22 nt, Human
uuuugucuaagaacuuugcaaa

SEQ ID NO: 508500 - RNA, 22 nt, Human
ugcaggcuguuugguggaucuc

SEQ ID NO: 508501 - RNA, 20 nt, Human
ugggcagcacugcuggcugg

SEQ ID NO: 508502 - RNA, 22 nt, Human
agagugaagguugacacuucac

SEQ ID NO: 508503 - RNA, 22 nt, Human
gcagcuguggguuccaagucua

SEQ ID NO: 508504 - RNA, 22 nt, Human
ccagcaugagacgaugaugaag

SEQ ID NO: 508505 - RNA, 18 nt, Human
aaggccuagucccucucu

SEQ ID NO: 508506 - RNA, 22 nt, Human
gucaccaggucugaugcagcca

SEQ ID NO: 508507 - RNA, 22 nt, Human
auuaaauuagcaaacugugaaa

SEQ ID NO: 508508 - RNA, 22 nt, Human
ccauggccaggaaagccaaggu

SEQ ID NO: 508509 - RNA, 22 nt, Human
cagcccuggccccagguggucu

SEQ ID NO: 508510 - RNA, 22 nt, Human
agcagcauccccggccuccacc

SEQ ID NO: 508511 - RNA, 22 nt, Human
cccuccagagccuggacauucu

SEQ ID NO: 508512 - RNA, 18 nt, Human
uaaaugcauguuaauaac

SEQ ID NO: 508513 - RNA, 22 nt, Human
ugaucuggaauucccuguggua

SEQ ID NO: 508514 - RNA, 22 nt, Human
agccuucaguaagggcuuagca

SEQ ID NO: 508515 - RNA, 22 nt, Human
gcacuaaaccaacauguaauaa

SEQ ID NO: 508516 - RNA, 22 nt, Human
guucucuaucauuagugaauuu

SEQ ID NO: 508517 - RNA, 17 nt, Human
aagagaggcugagcugg

SEQ ID NO: 508518 - RNA, 22 nt, Human
cagcuuuaccuuuaggaguaac

SEQ ID NO: 508519 - RNA, 22 nt, Human
cccaggcacauccacucuguga

SEQ ID NO: 508520 - RNA, 22 nt, Human
ucucuggaauuggcugaggcaa

SEQ ID NO: 508521 - RNA, 22 nt, Human
auacagaaaaugaugcagaguu

SEQ ID NO: 508522 - RNA, 22 nt, Human
ugagccaggcccagugggguca

SEQ ID NO: 508523 - RNA, 17 nt, Human
cgggcauggagggcagg

SEQ ID NO: 508524 - RNA, 20 nt, Human
gccugagcuauugccaggau

SEQ ID NO: 508525 - RNA, 22 nt, Human
uucuaaagacucauggaagugg

SEQ ID NO: 508526 - RNA, 22 nt, Human
gccugggauucucaaaggggug

SEQ ID NO: 508527 - RNA, 22 nt, Human
uuauccaaacuggugaaucauu

SEQ ID NO: 508528 - RNA, 22 nt, Human
cagagccccucagcucucuccc

SEQ ID NO: 508529 - RNA, 22 nt, Human
cuccucuggaaauuccucugcc

SEQ ID NO: 508530 - RNA, 22 nt, Human
cuagauaagguggcuuggaauu

SEQ ID NO: 508531 - RNA, 22 nt, Human
ggucccaggcugcgggcuggug

SEQ ID NO: 508532 - RNA, 22 nt, Human
gcuuccaggucauucucacccu

SEQ ID NO: 508533 - RNA, 22 nt, Human
agggcacaagacucugagcccc

SEQ ID NO: 508534 - RNA, 22 nt, Human
auugguggugaggacaugccag

SEQ ID NO: 508535 - RNA, 22 nt, Human
cugacugucucuucucccauga

SEQ ID NO: 508536 - RNA, 22 nt, Human
aggccugcagcaggagcaaacc

SEQ ID NO: 508537 - RNA, 22 nt, Human
gaaugugucacccugucccaug

SEQ ID NO: 508538 - RNA, 22 nt, Human
gugaggggaguaaagccauguu

SEQ ID NO: 508539 - RNA, 22 nt, Human
auguguagaacuguaaugccca

SEQ ID NO: 508540 - RNA, 22 nt, Human
auguaucaacaaauuguacagu

SEQ ID NO: 508541 - RNA, 22 nt, Human
guggcuucaucaacugugcuua

SEQ ID NO: 508542 - RNA, 22 nt, Human
gcucagagggaacaaggggcug

SEQ ID NO: 508543 - RNA, 22 nt, Human
uugaaggaggcuccuuuuuaaa

SEQ ID NO: 508544 - RNA, 22 nt, Human
gguucacauauugagaguauuc

SEQ ID NO: 508545 - RNA, 22 nt, Human
ugggcucugcugcguaccaguu

SEQ ID NO: 508546 - RNA, 22 nt, Human
uuuccacugggcacggggccag

SEQ ID NO: 508547 - RNA, 22 nt, Human
aauuuucacagugcugugagau

SEQ ID NO: 508548 - RNA, 22 nt, Human
acagagcuguacaugugccaug

SEQ ID NO: 508549 - RNA, 20 nt, Human
gaguccaggggccuguagca

SEQ ID NO: 508550 - RNA, 22 nt, Human
cugcccaggaaggagaggaugg

SEQ ID NO: 508551 - RNA, 22 nt, Human
gaggagagaugguagauugggu

SEQ ID NO: 508552 - RNA, 22 nt, Human
uagaaugagaaaguguagcagg

SEQ ID NO: 508553 - RNA, 22 nt, Human
agaggcaagauuaucagggcau

SEQ ID NO: 508554 - RNA, 22 nt, Human
cagguccucgggggaggccggc

SEQ ID NO: 508555 - RNA, 22 nt, Human
gaagaacaagcagugcuuuccu

SEQ ID NO: 508556 - RNA, 22 nt, Human
ccacagggcacagacaggaagc

SEQ ID NO: 508557 - RNA, 22 nt, Human
cauuagcaggcacuaagaaggu

SEQ ID NO: 508558 - RNA, 22 nt, Human
gcugugugacugagagccuggc

SEQ ID NO: 508559 - RNA, 22 nt, Human
caauuucucuuuauaucucaca

SEQ ID NO: 508560 - RNA, 22 nt, Human
caguccagccaguagggugugg

SEQ ID NO: 508561 - RNA, 22 nt, Human
uccccaccccagaacuacuagg

SEQ ID NO: 508562 - RNA, 23 nt, Human
uguaccaggaguuucagcagacu

SEQ ID NO: 508563 - RNA, 22 nt, Human
caagcuccuuacauccacaggg

SEQ ID NO: 508564 - RNA, 22 nt, Human
ucugaaaugcaggcaauuugcu

SEQ ID NO: 508565 - RNA, 22 nt, Human
cugggcuuuugagucacaaggg

SEQ ID NO: 508566 - RNA, 22 nt, Human
cugucaguucuuccagauagag

SEQ ID NO: 508567 - RNA, 22 nt, Human
gcaggcaccggguugcuccccu

SEQ ID NO: 508568 - RNA, 22 nt, Human
gggggcaggucuggaacuuuga

SEQ ID NO: 508569 - RNA, 22 nt, Human
cacagcaagagcuaaaugacca

SEQ ID NO: 508570 - RNA, 22 nt, Human
ccugugugcugaugacgacaga

SEQ ID NO: 508571 - RNA, 22 nt, Human
ccagagcagaaccggaacacca

SEQ ID NO: 508572 - RNA, 22 nt, Human
uccuugggaaaucacuagcacu

SEQ ID NO: 508573 - RNA, 22 nt, Human
agggaucagcagaggguguggu

SEQ ID NO: 508574 - RNA, 22 nt, Human
uucuccaguuucucccuucagu

SEQ ID NO: 508575 - RNA, 22 nt, Human
uauguacacacacaugcaugua

SEQ ID NO: 508576 - RNA, 20 nt, Human
ugguccaggaccuggugucc

SEQ ID NO: 508577 - RNA, 22 nt, Human
guccagugcuaacagguugagg

SEQ ID NO: 508578 - RNA, 22 nt, Human
uagcauuauuuccucuuuuugu

SEQ ID NO: 508579 - RNA, 22 nt, Human
uugaauaguguuuucaguauac

SEQ ID NO: 508580 - RNA, 22 nt, Human
aggggaggagcuuuucuugccu

SEQ ID NO: 508581 - RNA, 22 nt, Human
uuauuuauuguguaccuacugu

SEQ ID NO: 508582 - RNA, 22 nt, Human
uuggcuuccugcacuugaguuu

SEQ ID NO: 508583 - RNA, 22 nt, Human
ccagccuggguguuagaagaca

SEQ ID NO: 508584 - RNA, 22 nt, Human
uucacaggcuuggagguggggg

SEQ ID NO: 508585 - RNA, 17 nt, Human
gccaaaggguuccaauc

SEQ ID NO: 508586 - RNA, 17 nt, Human
ucuguucaagugagagg

SEQ ID NO: 508587 - RNA, 22 nt, Human
uggcagagaauaaaucuugacu

SEQ ID NO: 508588 - RNA, 22 nt, Human
agagccagccuucucagcuuac

SEQ ID NO: 508589 - RNA, 22 nt, Human
ucccagcauaacaaacugcccg

SEQ ID NO: 508590 - RNA, 22 nt, Human
cagcuuggauuuuggcacgugu

SEQ ID NO: 508591 - RNA, 22 nt, Human
uaaugugugucaucaguagagu

SEQ ID NO: 508592 - RNA, 22 nt, Human
ggaggccaucuggcuggaggcu

SEQ ID NO: 508593 - RNA, 22 nt, Human
gcuguacaaggccucugccauc

SEQ ID NO: 508594 - RNA, 22 nt, Human
gaggcuggugguuaguuccauu

SEQ ID NO: 508595 - RNA, 22 nt, Human
agugugcugcuuaaacaguugu

SEQ ID NO: 508596 - RNA, 22 nt, Human
augggaggcagacacuaaguuc

SEQ ID NO: 508597 - RNA, 22 nt, Human
cccaugccuucugacucacagg

SEQ ID NO: 508598 - RNA, 17 nt, Human
uggcuucaggcugagca

SEQ ID NO: 508599 - RNA, 18 nt, Human
uggcagguccagcugugg

SEQ ID NO: 508600 - RNA, 22 nt, Human
uccuggguccauggcagccgaa

SEQ ID NO: 508601 - RNA, 22 nt, Human
uagaagauaagacaagugcugc

SEQ ID NO: 508602 - RNA, 20 nt, Human
ugcugcuuugccacuaguug

SEQ ID NO: 508603 - RNA, 22 nt, Human
uuuggcauagcucuuuguuccu

SEQ ID NO: 508604 - RNA, 22 nt, Human
ugccacacauugucagguuagu

SEQ ID NO: 508605 - RNA, 19 nt, Human
acagagggcaacugagaaa

SEQ ID NO: 508606 - RNA, 22 nt, Human
aaguccauagguuucaugaggg

SEQ ID NO: 508607 - RNA, 22 nt, Human
accuucaagaaacauuuccuug

SEQ ID NO: 508608 - RNA, 22 nt, Human
cagaaagaccugggcucaagag

SEQ ID NO: 508609 - RNA, 22 nt, Human
uaauuuuuccacguacacuggg

SEQ ID NO: 508610 - RNA, 22 nt, Human
uguauuuucagaguggcauuuc

SEQ ID NO: 508611 - RNA, 22 nt, Human
uccaggcaaagugcugggcugc

SEQ ID NO: 508612 - RNA, 22 nt, Human
aagggcucgguagcaguccuga

SEQ ID NO: 508613 - RNA, 22 nt, Human
ccuuuuucccuggagggacagc

SEQ ID NO: 508614 - RNA, 22 nt, Human
ucaggauguccaaaauccagcc

SEQ ID NO: 508615 - RNA, 22 nt, Human
aguuuuuccguggcuacgauaa

SEQ ID NO: 508616 - RNA, 22 nt, Human
uuugugaauggaauccacagac

SEQ ID NO: 508617 - RNA, 22 nt, Human
cugggagucaccaggagcaagg

SEQ ID NO: 508618 - RNA, 22 nt, Human
ccucugcaccauagccuucagc

SEQ ID NO: 508619 - RNA, 22 nt, Human
acucugaggcaggucagggcag

SEQ ID NO: 508620 - RNA, 20 nt, Human
ucucagcauaagaacccuuc

SEQ ID NO: 508621 - RNA, 22 nt, Human
uugugaauagugccgcaauaaa

SEQ ID NO: 508622 - RNA, 22 nt, Human
uggcugccuuucaccucaucuc

SEQ ID NO: 508623 - RNA, 22 nt, Human
uaggcugagguugaugccaggg

SEQ ID NO: 508624 - RNA, 23 nt, Human
aggcugcagaagaauagggucau

SEQ ID NO: 508625 - RNA, 22 nt, Human
uccaggugugcucugugcccug

SEQ ID NO: 508626 - RNA, 22 nt, Human
uccaguggcaccuuggcccuca

SEQ ID NO: 508627 - RNA, 21 nt, Human
agcaggcaaaggugaagucuu

SEQ ID NO: 508628 - RNA, 22 nt, Human
ugaggcagguggauuacaaggu

SEQ ID NO: 508629 - RNA, 22 nt, Human
uuuagggaagaagcccauggcc

SEQ ID NO: 508630 - RNA, 20 nt, Human
auguuuuauaaaagaacggg

SEQ ID NO: 508631 - RNA, 22 nt, Human
caggcaggagacauuugguugg

SEQ ID NO: 508632 - RNA, 22 nt, Human
uguaugaagccagaaucuguuu

SEQ ID NO: 508633 - RNA, 22 nt, Human
ugaugaaacugagguuccaaga

SEQ ID NO: 508634 - RNA, 22 nt, Human
aaaaguaauugaugcaaucgua

SEQ ID NO: 508635 - RNA, 21 nt, Human
gccuggcuagaagcuccuagc

SEQ ID NO: 508636 - RNA, 19 nt, Human
aaaagucuauucaauuaca

SEQ ID NO: 508637 - RNA, 22 nt, Human
auguacagccacuucacaguua

SEQ ID NO: 508638 - RNA, 22 nt, Human
uggccacccagcugacgccuuc

SEQ ID NO: 508639 - RNA, 22 nt, Human
uccuucagcuacucaguuucca

SEQ ID NO: 508640 - RNA, 22 nt, Human
ucucugggccucaguuuucuca

SEQ ID NO: 508641 - RNA, 22 nt, Human
acagagcugggugcccccugga

SEQ ID NO: 508642 - RNA, 22 nt, Human
uucacagacauugcagacugaa

SEQ ID NO: 508643 - RNA, 22 nt, Human
ugucucaguauacgaaacacuu

SEQ ID NO: 508644 - RNA, 22 nt, Human
ccuguccagggacugagggaga

SEQ ID NO: 508645 - RNA, 22 nt, Human
aauguguagcauuuaaugcagu

SEQ ID NO: 508646 - RNA, 22 nt, Human
acaaugcaauaggagcuagaaa

SEQ ID NO: 508647 - RNA, 22 nt, Human
ugucuuuuggagcaucuuucuu

SEQ ID NO: 508648 - RNA, 22 nt, Human
agucauuacagcaggcagaagg

SEQ ID NO: 508649 - RNA, 22 nt, Human
cagagccagaacuagaccuugu

SEQ ID NO: 508650 - RNA, 22 nt, Human
gccucgaggcugagaaggcaca

SEQ ID NO: 508651 - RNA, 22 nt, Human
gguuuauuaaugugaacuguau

SEQ ID NO: 508652 - RNA, 22 nt, Human
caucaaaguugauauccaauua

SEQ ID NO: 508653 - RNA, 19 nt, Human
ggcugucuggcguguggau

SEQ ID NO: 508654 - RNA, 22 nt, Human
uggcuccacaggccagggugug

SEQ ID NO: 508655 - RNA, 22 nt, Human
auaugcacauacauacauaggu

SEQ ID NO: 508656 - RNA, 22 nt, Human
gugccuuccccgguggucuguu

SEQ ID NO: 508657 - RNA, 22 nt, Human
cuuucauucuuagauauuagug

SEQ ID NO: 508658 - RNA, 20 nt, Human
acugcuucuuucucugaccu

SEQ ID NO: 508659 - RNA, 22 nt, Human
auggcucauuuaucuugcagcc

SEQ ID NO: 508660 - RNA, 22 nt, Human
uuguaaacuggauagaccuauu

SEQ ID NO: 508661 - RNA, 22 nt, Human
uugucuuuggaaauuuaauguu

SEQ ID NO: 508662 - RNA, 22 nt, Human
ggcaggcuccaagcauccuaug

SEQ ID NO: 508663 - RNA, 22 nt, Human
cuagcacagcccauucagucua

SEQ ID NO: 508664 - RNA, 22 nt, Human
acagaagcucaagagagcagug

SEQ ID NO: 508665 - RNA, 22 nt, Human
uuguccuuaccucaaucuggaa

SEQ ID NO: 508666 - RNA, 22 nt, Human
uuacaguuuauccaggaagagc

SEQ ID NO: 508667 - RNA, 22 nt, Human
agguccugaggguucgucugca

SEQ ID NO: 508668 - RNA, 22 nt, Human
agaaagacgugaugaagaagua

SEQ ID NO: 508669 - RNA, 22 nt, Human
uacacuuuuuacuacagauucu

SEQ ID NO: 508670 - RNA, 22 nt, Human
ugagggaggcccuuugagcaga

SEQ ID NO: 508671 - RNA, 22 nt, Human
agcaggagcccuuaucaccagg

SEQ ID NO: 508672 - RNA, 22 nt, Human
guuauaaauaccuaauaggauu

SEQ ID NO: 508673 - RNA, 22 nt, Human
cugggcucuguguuucaguuuc

SEQ ID NO: 508674 - RNA, 22 nt, Human
uuuauuuaaagucguguguuaa

SEQ ID NO: 508675 - RNA, 22 nt, Human
agagcugcaggguggacccagg

SEQ ID NO: 508676 - RNA, 22 nt, Human
aaacaucaccauuuuaccuaau

SEQ ID NO: 508677 - RNA, 22 nt, Human
cacaggaaugaacagggaaaga

SEQ ID NO: 508678 - RNA, 22 nt, Human
cugauaugaugggugauuuuca

SEQ ID NO: 508679 - RNA, 22 nt, Human
cugcugguaccaguggccguca

SEQ ID NO: 508680 - RNA, 22 nt, Human
caugcaaaugguggcuaaaugg

SEQ ID NO: 508681 - RNA, 22 nt, Human
auguaucacagcaauguaguca

SEQ ID NO: 508682 - RNA, 22 nt, Human
uccagccuuucuacucacugag

SEQ ID NO: 508683 - RNA, 22 nt, Human
gccaggcucucagugacugccc

SEQ ID NO: 508684 - RNA, 22 nt, Human
aauccagcacauggacacaguc

SEQ ID NO: 508685 - RNA, 22 nt, Human
ucaggaaggcacuugguguguu

SEQ ID NO: 508686 - RNA, 22 nt, Human
aucuaaaguguuucaugaaaga

SEQ ID NO: 508687 - RNA, 22 nt, Human
cagagcagccuccagggggagc

SEQ ID NO: 508688 - RNA, 22 nt, Human
cucuggagugcagccugguggc

SEQ ID NO: 508689 - RNA, 22 nt, Human
gagaggcugugugccauuguug

SEQ ID NO: 508690 - RNA, 22 nt, Human
auuuacagaugaugcuauuuga

SEQ ID NO: 508691 - RNA, 22 nt, Human
uuuugugacagaaagauuaagu

SEQ ID NO: 508692 - RNA, 22 nt, Human
ucuguucaucucaugggagaau

SEQ ID NO: 508693 - RNA, 22 nt, Human
ugccugggccucugaggaaggc

SEQ ID NO: 508694 - RNA, 22 nt, Human
acuguucacagauuagucgaug

SEQ ID NO: 508695 - RNA, 22 nt, Human
ccagaccacccuggccaugcac

SEQ ID NO: 508696 - RNA, 22 nt, Human
aauaauuuuagcucagaguugu

SEQ ID NO: 508697 - RNA, 22 nt, Human
acaggagugaaucuggcacuua

SEQ ID NO: 508698 - RNA, 22 nt, Human
gccuccugagaagccacaggcu

SEQ ID NO: 508699 - RNA, 22 nt, Human
agacacugauguucagcucaau

SEQ ID NO: 508700 - RNA, 22 nt, Human
gcagcgagugcggcugccacag

SEQ ID NO: 508701 - RNA, 22 nt, Human
aaagggcugaugugacauagcu

SEQ ID NO: 508702 - RNA, 22 nt, Human
ucagagccccuccgcuguccca

SEQ ID NO: 508703 - RNA, 22 nt, Human
aaaguauucuugacuguuuuuc

SEQ ID NO: 508704 - RNA, 22 nt, Human
agaggccaggcugcagagggau

SEQ ID NO: 508705 - RNA, 22 nt, Human
uagcagcuccuaaacaguggug

SEQ ID NO: 508706 - RNA, 23 nt, Human
aauuacaaccaagaacuggaagg

SEQ ID NO: 508707 - RNA, 22 nt, Human
ugcaauaacccaguaucuguga

SEQ ID NO: 508708 - RNA, 22 nt, Human
aaggcugguuuccuugauguuu

SEQ ID NO: 508709 - RNA, 22 nt, Human
ccagggugggguccaggaacca

SEQ ID NO: 508710 - RNA, 22 nt, Human
aggaccugaaauucuugcuuuu

SEQ ID NO: 508711 - RNA, 20 nt, Human
ucccauguccauaucagccc

SEQ ID NO: 508712 - RNA, 22 nt, Human
aggaccugagaguuggaaaucc

SEQ ID NO: 508713 - RNA, 22 nt, Human
guuugcauuucuugaacuauau

SEQ ID NO: 508714 - RNA, 22 nt, Human
caggagacaauggcuguggggc

SEQ ID NO: 508715 - RNA, 22 nt, Human
ggcucucugaggaaacccuucc

SEQ ID NO: 508716 - RNA, 22 nt, Human
caggagugaguuggggucuaca

SEQ ID NO: 508717 - RNA, 22 nt, Human
gcuggagaaacugcagcugagg

SEQ ID NO: 508718 - RNA, 22 nt, Human
augauggaauauuauucaggca

SEQ ID NO: 508719 - RNA, 22 nt, Human
uucaaaagacucagauguagcg

SEQ ID NO: 508720 - RNA, 22 nt, Human
gauuucuguaacacuucagaua

SEQ ID NO: 508721 - RNA, 18 nt, Human
cuccuuggagaagaggcc

SEQ ID NO: 508722 - RNA, 22 nt, Human
acccaggguagagugcaguggc

SEQ ID NO: 508723 - RNA, 22 nt, Human
uccagccaugcaugacaaucac

SEQ ID NO: 508724 - RNA, 18 nt, Human
uucuccagaaaacauagc

SEQ ID NO: 508725 - RNA, 22 nt, Human
aguacuuuacuucuuacaguuu

SEQ ID NO: 508726 - RNA, 22 nt, Human
ggcacugagcgggcucugagcg

SEQ ID NO: 508727 - RNA, 23 nt, Human
ucugucaccuauggcugcucuuc

SEQ ID NO: 508728 - RNA, 22 nt, Human
caugcuuugggucagaaaugcc

SEQ ID NO: 508729 - RNA, 20 nt, Human
acugugaaugcugaauuagc

SEQ ID NO: 508730 - RNA, 22 nt, Human
gaucugguacaggccugcagcc

SEQ ID NO: 508731 - RNA, 22 nt, Human
gaagagcuauguccagggagca

SEQ ID NO: 508732 - RNA, 22 nt, Human
acaugacuuuucucuuccagag

SEQ ID NO: 508733 - RNA, 22 nt, Human
ucucacaggugcacguggcugu

SEQ ID NO: 508734 - RNA, 22 nt, Human
ugggcugcagggguugagagcu

SEQ ID NO: 508735 - RNA, 22 nt, Human
ucacagaaucucugauaagucu

SEQ ID NO: 508736 - RNA, 22 nt, Human
cacuuagucucaccaguucagu

SEQ ID NO: 508737 - RNA, 22 nt, Human
acuuguuuuaucugucaauaga

SEQ ID NO: 508738 - RNA, 22 nt, Human
auuaaagacagcagauggaugg

SEQ ID NO: 508739 - RNA, 22 nt, Human
aagcacagggacucaggaccgg

SEQ ID NO: 508740 - RNA, 22 nt, Human
uucaggaucacuaaacccucca

SEQ ID NO: 508741 - RNA, 22 nt, Human
cugguggaggugccaggauuug

SEQ ID NO: 508742 - RNA, 17 nt, Human
uuuagaauacaauguuu

SEQ ID NO: 508743 - RNA, 22 nt, Human
uaugaagcucucacuguguguc

SEQ ID NO: 508744 - RNA, 19 nt, Human
augaagauugguaaauuca

SEQ ID NO: 508745 - RNA, 22 nt, Human
uuucagaggaaaucucauugag

SEQ ID NO: 508746 - RNA, 22 nt, Human
ccuguucagagcuaagcaucau

SEQ ID NO: 508747 - RNA, 22 nt, Human
cucucuggcacuucauugcugu

SEQ ID NO: 508748 - RNA, 22 nt, Human
cagugugucucuuguccuggcu

SEQ ID NO: 508749 - RNA, 22 nt, Human
gccuguccuggaugcucugcaa

SEQ ID NO: 508750 - RNA, 22 nt, Human
ucagaggauugccucagcgagc

SEQ ID NO: 508751 - RNA, 22 nt, Human
caaagugcuggaauuauagggg

SEQ ID NO: 508752 - RNA, 22 nt, Human
gggcuaggcuuggccagcacug

SEQ ID NO: 508753 - RNA, 23 nt, Human
uggcucugagagguucagaugcu

SEQ ID NO: 508754 - RNA, 20 nt, Human
uuuacauuuugaaacaguga

SEQ ID NO: 508755 - RNA, 22 nt, Human
ucucagcugacugcuuuccucg

SEQ ID NO: 508756 - RNA, 23 nt, Human
agccucuuuucuccugcccugca

SEQ ID NO: 508757 - RNA, 22 nt, Human
gucccagaggcuuuggccacag

SEQ ID NO: 508758 - RNA, 22 nt, Human
ugcagggaagcaaggguggcuc

SEQ ID NO: 508759 - RNA, 22 nt, Human
caguugcuacaguucaagugug

SEQ ID NO: 508760 - RNA, 22 nt, Human
gcaggagaacaaagcaagcugc

SEQ ID NO: 508761 - RNA, 23 nt, Human
agcaggcugcuucuccacagcug

SEQ ID NO: 508762 - RNA, 22 nt, Human
accccagaggcggaggcugcag

SEQ ID NO: 508763 - RNA, 22 nt, Human
accagagcagacuacuggaggu

SEQ ID NO: 508764 - RNA, 22 nt, Human
cucuggucaagcaaagagguuu

SEQ ID NO: 508765 - RNA, 22 nt, Human
uuccugagcaccagacacugca

SEQ ID NO: 508766 - RNA, 23 nt, Human
ugacaguguauuugacuauaugg

SEQ ID NO: 508767 - RNA, 22 nt, Human
gaagccagauuaucacaagcca

SEQ ID NO: 508768 - RNA, 22 nt, Human
ugccaggcauuugacagacacu

SEQ ID NO: 508769 - RNA, 22 nt, Human
guccagccccugacucccaggc

SEQ ID NO: 508770 - RNA, 22 nt, Human
aggcagaggagaaugaucuucc

SEQ ID NO: 508771 - RNA, 22 nt, Human
ucuggcucuuugggugauugua

SEQ ID NO: 508772 - RNA, 22 nt, Human
cagcagaaauggauuuugagau

SEQ ID NO: 508773 - RNA, 22 nt, Human
ugcccacauggugccauggcca

SEQ ID NO: 508774 - RNA, 22 nt, Human
ccucaguguuaggauaagagaa

SEQ ID NO: 508775 - RNA, 22 nt, Human
uggucaguugcaucagagaagu

SEQ ID NO: 508776 - RNA, 22 nt, Human
ccagcaggaaagugacguuuga

SEQ ID NO: 508777 - RNA, 22 nt, Human
cucccaagcugugcugaacugu

SEQ ID NO: 508778 - RNA, 22 nt, Human
ugcuucugcuuuacuugguuca

SEQ ID NO: 508779 - RNA, 22 nt, Human
ugggagaaucuugcucugcuac

SEQ ID NO: 508780 - RNA, 22 nt, Human
acaaaauagaguucuccccugg

SEQ ID NO: 508781 - RNA, 21 nt, Human
agguuucucuuuuauggaggg

SEQ ID NO: 508782 - RNA, 22 nt, Human
uguguucaaucaccaaagguau

SEQ ID NO: 508783 - RNA, 22 nt, Human
uguuuuguuuaugagagcacag

SEQ ID NO: 508784 - RNA, 22 nt, Human
cugggcagagcuaacaccugag

SEQ ID NO: 508785 - RNA, 22 nt, Human
auaaugagcuuuugaauacuga

SEQ ID NO: 508786 - RNA, 22 nt, Human
cuaaaugcccuacaaugacugg

SEQ ID NO: 508787 - RNA, 22 nt, Human
cagcuucucagaaagcugaggu

SEQ ID NO: 508788 - RNA, 22 nt, Human
uacacagauaugugaucaauca

SEQ ID NO: 508789 - RNA, 22 nt, Human
gaaccaaguaggauacaaggag

SEQ ID NO: 508790 - RNA, 22 nt, Human
uugcugaaggccucuugggguu

SEQ ID NO: 508791 - RNA, 23 nt, Human
cugaggucugcaauucuaguagu

SEQ ID NO: 508792 - RNA, 22 nt, Human
aggccaucaaaucauguagugc

SEQ ID NO: 508793 - RNA, 22 nt, Human
uuucauaaccucaagcuacagu

SEQ ID NO: 508794 - RNA, 22 nt, Human
ggcagguguuuuuauauuaaag

SEQ ID NO: 508795 - RNA, 22 nt, Human
agcugaggccacgagugaaggg

SEQ ID NO: 508796 - RNA, 22 nt, Human
ugauucacagacuucacaaggc

SEQ ID NO: 508797 - RNA, 17 nt, Human
ggagagugggaauggcc

SEQ ID NO: 508798 - RNA, 22 nt, Human
aucugggcauggaggaaagaga

SEQ ID NO: 508799 - RNA, 21 nt, Human
ugggagagcguugcuguccuc

SEQ ID NO: 508800 - RNA, 22 nt, Human
augugcuguaauccauugaagg

SEQ ID NO: 508801 - RNA, 22 nt, Human
aggcacuggguaauuaguagcu

SEQ ID NO: 508802 - RNA, 22 nt, Human
guauuaggagguggagccuuug

SEQ ID NO: 508803 - RNA, 22 nt, Human
uagauguuaagcuucuagaagg

SEQ ID NO: 508804 - RNA, 22 nt, Human
cagguggggcagcugugggagc

SEQ ID NO: 508805 - RNA, 22 nt, Human
cugggcuucucccccuggcaga

SEQ ID NO: 508806 - RNA, 22 nt, Human
ccuggcucuucugugucagccc

SEQ ID NO: 508807 - RNA, 22 nt, Human
aauaauguuaugucauucuucu

SEQ ID NO: 508808 - RNA, 22 nt, Human
acauagaaggaagaguaguagg

SEQ ID NO: 508809 - RNA, 22 nt, Human
ugaaauguuugaagaccacuga

SEQ ID NO: 508810 - RNA, 22 nt, Human
auauaauacaaccugcuaagug

SEQ ID NO: 508811 - RNA, 22 nt, Human
cucucugggcccaguuggcacc

SEQ ID NO: 508812 - RNA, 22 nt, Human
acagaacugagaauucucuauc

SEQ ID NO: 508813 - RNA, 22 nt, Human
ugcuucucccaaccagggccug

SEQ ID NO: 508814 - RNA, 22 nt, Human
aucagagacaaaaccagcacuu

SEQ ID NO: 508815 - RNA, 22 nt, Human
accuguuuuccuaucuagauug

SEQ ID NO: 508816 - RNA, 22 nt, Human
agguccaggcauuuggguuggg

SEQ ID NO: 508817 - RNA, 22 nt, Human
caguuucuuaagacugagaucu

SEQ ID NO: 508818 - RNA, 20 nt, Human
gcccaagguccagaaggggg

SEQ ID NO: 508819 - RNA, 22 nt, Human
uaggagaggugaauggcacacu

SEQ ID NO: 508820 - RNA, 22 nt, Human
ggggaggcugaugugggcaaag

SEQ ID NO: 508821 - RNA, 22 nt, Human
ugagaguauuuuggcauuauca

SEQ ID NO: 508822 - RNA, 22 nt, Human
uuggcugcugaaauauguucug

SEQ ID NO: 508823 - RNA, 22 nt, Human
gagaccaggaaguacagcagcc

SEQ ID NO: 508824 - RNA, 18 nt, Human
gaggccugagaaccaggu

SEQ ID NO: 508825 - RNA, 22 nt, Human
aaugaugguauugaugagcuaa

SEQ ID NO: 508826 - RNA, 23 nt, Human
ccucuaauaaacuugaccuugug

SEQ ID NO: 508827 - RNA, 22 nt, Human
uuugacaguaauaaagcacaag

SEQ ID NO: 508828 - RNA, 19 nt, Human
agaaucaggucaggugaca

SEQ ID NO: 508829 - RNA, 17 nt, Human
ucagcaggggccaagcu

SEQ ID NO: 508830 - RNA, 22 nt, Human
aggcaggucuguaucuagucuc

SEQ ID NO: 508831 - RNA, 22 nt, Human
ucucuucuuguguuuuccugcc

SEQ ID NO: 508832 - RNA, 20 nt, Human
aaagcaguaugcaaguagag

SEQ ID NO: 508833 - RNA, 22 nt, Human
agugaaauaaagcugccuaugg

SEQ ID NO: 508834 - RNA, 22 nt, Human
acccagcucuuugauggucuug

SEQ ID NO: 508835 - RNA, 22 nt, Human
uuggaagggaacaccauuugac

SEQ ID NO: 508836 - RNA, 22 nt, Human
aucuaauuuucacucauuugcu

SEQ ID NO: 508837 - RNA, 22 nt, Human
agcugguucagaaauuagaugg

SEQ ID NO: 508838 - RNA, 22 nt, Human
gccugagauucccggagccgug

SEQ ID NO: 508839 - RNA, 23 nt, Human
agggguggucaguacccgcagug

SEQ ID NO: 508840 - RNA, 22 nt, Human
ucagcacuuuuuaaagcagcau

SEQ ID NO: 508841 - RNA, 22 nt, Human
cucucagacugaagggccugug

SEQ ID NO: 508842 - RNA, 22 nt, Human
caguaaauauaggaacguggaa

SEQ ID NO: 508843 - RNA, 22 nt, Human
ucucaaggacuuugggcacuaa

SEQ ID NO: 508844 - RNA, 22 nt, Human
gcucccagcauugcuucccagg

SEQ ID NO: 508845 - RNA, 22 nt, Human
agagccugugauugucaucacc

SEQ ID NO: 508846 - RNA, 23 nt, Human
uagcagcauuuuuagccucuguc

SEQ ID NO: 508847 - RNA, 22 nt, Human
ugccacacagcuguaugaggga

SEQ ID NO: 508848 - RNA, 22 nt, Human
agcaaagucaguggaaccaucc

SEQ ID NO: 508849 - RNA, 22 nt, Human
ggcaggugccuucugugcuagc

SEQ ID NO: 508850 - RNA, 22 nt, Human
gccuggagaggaagccggugga

SEQ ID NO: 508851 - RNA, 22 nt, Human
uguaaagaaauagcauuuguag

SEQ ID NO: 508852 - RNA, 22 nt, Human
gaagucuucauucucucugaga

SEQ ID NO: 508853 - RNA, 22 nt, Human
aaaagaguguuucaacuuuggc

SEQ ID NO: 508854 - RNA, 22 nt, Human
ugccugcccacgacuacagcag

SEQ ID NO: 508855 - RNA, 22 nt, Human
guaucuuuccacaucuucagua

SEQ ID NO: 508856 - RNA, 22 nt, Human
aagauuucucuccuggaaagca

SEQ ID NO: 508857 - RNA, 22 nt, Human
uuccucucaacaugccugccgg

SEQ ID NO: 508858 - RNA, 22 nt, Human
agcaguggccuggggcucugug

SEQ ID NO: 508859 - RNA, 22 nt, Human
gugcaaugugcuucgugccaug

SEQ ID NO: 508860 - RNA, 22 nt, Human
gcucucuggaagguaucauuau

SEQ ID NO: 508861 - RNA, 22 nt, Human
uucuaaguccuaccugaaagca

SEQ ID NO: 508862 - RNA, 22 nt, Human
cugggucccacagccugcuggg

SEQ ID NO: 508863 - RNA, 22 nt, Human
auugcacaaacacagucagacu

SEQ ID NO: 508864 - RNA, 22 nt, Human
auuuucagaacauucauucacu

SEQ ID NO: 508865 - RNA, 22 nt, Human
auuuuucucuuuccacugagau

SEQ ID NO: 508866 - RNA, 22 nt, Human
caggaggacauacuggcucaca

SEQ ID NO: 508867 - RNA, 22 nt, Human
aaaaugcuauuucauggaggag

SEQ ID NO: 508868 - RNA, 22 nt, Human
ggccuugggauguggcugcagc

SEQ ID NO: 508869 - RNA, 22 nt, Human
aggaaggacugcagcauuuggu

SEQ ID NO: 508870 - RNA, 22 nt, Human
gccugccuuuuggaggcacauu

SEQ ID NO: 508871 - RNA, 22 nt, Human
ccucacugcuauguguuugcuc

SEQ ID NO: 508872 - RNA, 22 nt, Human
uguuaaaugagauuggaauuug

SEQ ID NO: 508873 - RNA, 22 nt, Human
ugaauaaacuaugaggaggaau

SEQ ID NO: 508874 - RNA, 22 nt, Human
agacuguaauuuguggccuccu

SEQ ID NO: 508875 - RNA, 22 nt, Human
gugcccuggcucacagugucuc

SEQ ID NO: 508876 - RNA, 22 nt, Human
cccuuagcuccaagggguuugg

SEQ ID NO: 508877 - RNA, 22 nt, Human
ggcugaaacagauuucaagaca

SEQ ID NO: 508878 - RNA, 22 nt, Human
ugaaggugucuuugugaacauc

SEQ ID NO: 508879 - RNA, 22 nt, Human
cuuacauuaaguaagagauuga

SEQ ID NO: 508880 - RNA, 22 nt, Human
gagcugcuucugugugccgggu

SEQ ID NO: 508881 - RNA, 22 nt, Human
ugcauuaaaaugauggagaaau

SEQ ID NO: 508882 - RNA, 22 nt, Human
cagccagcuucagauccaagcc

SEQ ID NO: 508883 - RNA, 22 nt, Human
cacagcuuguuuagugacucac

SEQ ID NO: 508884 - RNA, 22 nt, Human
ucuggccagugaaaugcagaau

SEQ ID NO: 508885 - RNA, 22 nt, Human
aaucuacauagagaucaaauga

SEQ ID NO: 508886 - RNA, 22 nt, Human
gcagagugaggaagagcuucca

SEQ ID NO: 508887 - RNA, 22 nt, Human
uuggcagggccaggcucucucu

SEQ ID NO: 508888 - RNA, 22 nt, Human
auaaaauuugcuacuguuaaau

SEQ ID NO: 508889 - RNA, 22 nt, Human
acagacaaguaguucagacaag

SEQ ID NO: 508890 - RNA, 22 nt, Human
uagaaauguugguauuaacauu

SEQ ID NO: 508891 - RNA, 20 nt, Human
caggccucugggggcccugg

SEQ ID NO: 508892 - RNA, 22 nt, Human
ugggcucuggggaaacugugau

SEQ ID NO: 508893 - RNA, 19 nt, Human
aggugagugugggaaaggg

SEQ ID NO: 508894 - RNA, 22 nt, Human
gcucuuuguauuuuggaaucaa

SEQ ID NO: 508895 - RNA, 22 nt, Human
acugaaggguaaugugggagcc

SEQ ID NO: 508896 - RNA, 22 nt, Human
cuucauuaaccaaaaugcaaua

SEQ ID NO: 508897 - RNA, 18 nt, Human
ggccucagccuggccgga

SEQ ID NO: 508898 - RNA, 22 nt, Human
cagggcccauggcucagguagg

SEQ ID NO: 508899 - RNA, 22 nt, Human
agucucagcaagcauggcuagu

SEQ ID NO: 508900 - RNA, 22 nt, Human
ucuucuuugaaucauagugacc

SEQ ID NO: 508901 - RNA, 22 nt, Human
aagaaaacguuuugaggaguuu

SEQ ID NO: 508902 - RNA, 19 nt, Human
ggcuggaguggccaucugu

SEQ ID NO: 508903 - RNA, 22 nt, Human
acagagaugggaacauucaggu

SEQ ID NO: 508904 - RNA, 22 nt, Human
gaacuguauaggagcaguguuu

SEQ ID NO: 508905 - RNA, 22 nt, Human
ugugugucacugaaagaaaucu

SEQ ID NO: 508906 - RNA, 22 nt, Human
gugagaagauaaguauugcaaa

SEQ ID NO: 508907 - RNA, 22 nt, Human
aaaugguguuucuaaugcuaga

SEQ ID NO: 508908 - RNA, 18 nt, Human
cuguucagcugaacuaca

SEQ ID NO: 508909 - RNA, 22 nt, Human
gcuguacaggguuauccuuucc

SEQ ID NO: 508910 - RNA, 21 nt, Human
auggaaauuggcaaaugcuac

SEQ ID NO: 508911 - RNA, 21 nt, Human
uagaaaucagcuggugccucu

SEQ ID NO: 508912 - RNA, 22 nt, Human
gguuuuaacuacagaauugcaa

SEQ ID NO: 508913 - RNA, 22 nt, Human
uuuaaucaggcaaagcauaaua

SEQ ID NO: 508914 - RNA, 22 nt, Human
cuaggaaugguaccucuuacaa

SEQ ID NO: 508915 - RNA, 22 nt, Human
agggagaguuugauguuuccuc

SEQ ID NO: 508916 - RNA, 22 nt, Human
ccagggcagcgccccuccacgc

SEQ ID NO: 508917 - RNA, 22 nt, Human
uaaggccaauuacauauguuca

SEQ ID NO: 508918 - RNA, 22 nt, Human
cugggccaagaaguuguguaug

SEQ ID NO: 508919 - RNA, 22 nt, Human
ugccagggagcccugcugacca

SEQ ID NO: 508920 - RNA, 22 nt, Human
cauuuauucauuugcuagggcu

SEQ ID NO: 508921 - RNA, 21 nt, Human
ggcuaggaugcugggguuucc

SEQ ID NO: 508922 - RNA, 22 nt, Human
cugcccuguuuggacagcccgg

SEQ ID NO: 508923 - RNA, 22 nt, Human
ugguuccuucugcauuuucagc

SEQ ID NO: 508924 - RNA, 22 nt, Human
aggguccugagccuggggcgca

SEQ ID NO: 508925 - RNA, 22 nt, Human
aucagcaagacuaggggaauac

SEQ ID NO: 508926 - RNA, 20 nt, Human
gacaucauguacacauugcc

SEQ ID NO: 508927 - RNA, 22 nt, Human
uucacagagcuuguucauggcc

SEQ ID NO: 508928 - RNA, 22 nt, Human
aggcauggacauuucggcagcu

SEQ ID NO: 508929 - RNA, 22 nt, Human
uuuaucuggacugugauauaaa

SEQ ID NO: 508930 - RNA, 22 nt, Human
guuauuagaagugaaggauugu

SEQ ID NO: 508931 - RNA, 22 nt, Human
agaguguuauuugcucuguauu

SEQ ID NO: 508932 - RNA, 22 nt, Human
auggauaagaacaaauaucuga

SEQ ID NO: 508933 - RNA, 22 nt, Human
ucuuccaguguagacaucugcc

SEQ ID NO: 508934 - RNA, 22 nt, Human
agggguuggauuuggccuagag

SEQ ID NO: 508935 - RNA, 22 nt, Human
cuaguagacagaaauguccagu

SEQ ID NO: 508936 - RNA, 22 nt, Human
ugacagcauaacacuggucuug

SEQ ID NO: 508937 - RNA, 22 nt, Human
gcacagggcccugugcguaggu

SEQ ID NO: 508938 - RNA, 22 nt, Human
uucuuuggggaauauucugguu

SEQ ID NO: 508939 - RNA, 22 nt, Human
ccucugcacuucaccuuagcuc

SEQ ID NO: 508940 - RNA, 22 nt, Human
aaaucaaaagacauguguuuua

SEQ ID NO: 508941 - RNA, 22 nt, Human
aagguccagaggucccgucacc

SEQ ID NO: 508942 - RNA, 22 nt, Human
aacuccagggggucaauauuua

SEQ ID NO: 508943 - RNA, 22 nt, Human
uguggaggauucugaugccagc

SEQ ID NO: 508944 - RNA, 22 nt, Human
ugaaugugaugcuaaacauaug

SEQ ID NO: 508945 - RNA, 22 nt, Human
ugccauccaacaguuccaucuu

SEQ ID NO: 508946 - RNA, 22 nt, Human
uugccaggcucugguuccagcc

SEQ ID NO: 508947 - RNA, 22 nt, Human
uugcugaauugaauccuuuggu

SEQ ID NO: 508948 - RNA, 22 nt, Human
ccuguacagugaaugaauguga

SEQ ID NO: 508949 - RNA, 22 nt, Human
agcaugcugguguucauggcag

SEQ ID NO: 508950 - RNA, 22 nt, Human
aggagcugggcugcugcuggga

SEQ ID NO: 508951 - RNA, 22 nt, Human
ugugcccaucccucuggagugu

SEQ ID NO: 508952 - RNA, 22 nt, Human
gcagcaucuguacauagacgcu

SEQ ID NO: 508953 - RNA, 22 nt, Human
gccacccccaaguagguggucu

SEQ ID NO: 508954 - RNA, 22 nt, Human
caguccuguguuaaacaagagc

SEQ ID NO: 508955 - RNA, 22 nt, Human
cuggcucauuuuagcaucaggu

SEQ ID NO: 508956 - RNA, 22 nt, Human
guguccuguuucccugucuaua

SEQ ID NO: 508957 - RNA, 22 nt, Human
ccaggagcgggaaaaggaagaa

SEQ ID NO: 508958 - RNA, 22 nt, Human
ggagugugggauggagcucagg

SEQ ID NO: 508959 - RNA, 22 nt, Human
gaaggaaaacagaucugccuga

SEQ ID NO: 508960 - RNA, 22 nt, Human
acccagcaaagauaaacuuaug

SEQ ID NO: 508961 - RNA, 22 nt, Human
aagaauguuaguuucugauaca

SEQ ID NO: 508962 - RNA, 22 nt, Human
agaugacaaaucaggggacggg

SEQ ID NO: 508963 - RNA, 22 nt, Human
gugugaaaugguucucuuuguu

SEQ ID NO: 508964 - RNA, 22 nt, Human
agaccuggaugugagggaagua

SEQ ID NO: 508965 - RNA, 19 nt, Human
accaggagacagugagcuu

SEQ ID NO: 508966 - RNA, 21 nt, Human
ccaggguccagcugccauggu

SEQ ID NO: 508967 - RNA, 22 nt, Human
gaagauuucaguuaaguaucua

SEQ ID NO: 508968 - RNA, 22 nt, Human
ugcugaaucccacccuccagug

SEQ ID NO: 508969 - RNA, 22 nt, Human
agacagugauggacaggcagac

SEQ ID NO: 508970 - RNA, 22 nt, Human
auacaguagacaaucucaugaa

SEQ ID NO: 508971 - RNA, 22 nt, Human
cagagccaggucuaggagucuc

SEQ ID NO: 508972 - RNA, 22 nt, Human
cucagaguccauaguuuacagu

SEQ ID NO: 508973 - RNA, 21 nt, Human
gcagcagaggcuugacagaca

SEQ ID NO: 508974 - RNA, 22 nt, Human
gggcaaguugagaagaaugcua

SEQ ID NO: 508975 - RNA, 22 nt, Human
ugaaggucaugguaauauuuuu

SEQ ID NO: 508976 - RNA, 22 nt, Human
uccaggucugguuggacagguu

SEQ ID NO: 508977 - RNA, 22 nt, Human
auuguauuagcacaauacaauu

SEQ ID NO: 508978 - RNA, 22 nt, Human
ucucagugcagcuugacagaga

SEQ ID NO: 508979 - RNA, 22 nt, Human
ggcagaggugacagugucuuuu

SEQ ID NO: 508980 - RNA, 22 nt, Human
caaacauuugacuucucucagg

SEQ ID NO: 508981 - RNA, 22 nt, Human
uacugugugauuccauuuacgu

SEQ ID NO: 508982 - RNA, 18 nt, Human
uguuccaaggaaggaauc

SEQ ID NO: 508983 - RNA, 22 nt, Human
ggcugcuuuaucggcugcugaa

SEQ ID NO: 508984 - RNA, 19 nt, Human
cagauguuuucaguucauu

SEQ ID NO: 508985 - RNA, 22 nt, Human
aucauaagacccagccaguauu

SEQ ID NO: 508986 - RNA, 22 nt, Human
cugcccugggauggucugugcg

SEQ ID NO: 508987 - RNA, 22 nt, Human
uguaugcagggcuuguaugcag

SEQ ID NO: 508988 - RNA, 22 nt, Human
uuagucaauagugaauauagag

SEQ ID NO: 508989 - RNA, 22 nt, Human
cagugaguaaguagacagcuua

SEQ ID NO: 508990 - RNA, 22 nt, Human
uuuaguagaaugauacagggca

SEQ ID NO: 508991 - RNA, 22 nt, Human
ucuguucauaguaguguauaug

SEQ ID NO: 508992 - RNA, 22 nt, Human
aagcauuuuaguaaugaacuug

SEQ ID NO: 508993 - RNA, 22 nt, Human
gccugggagauuaauuaggaag

SEQ ID NO: 508994 - RNA, 22 nt, Human
gugcccugucucuugucuccag

SEQ ID NO: 508995 - RNA, 19 nt, Human
gcugggcuuggguuuguag

SEQ ID NO: 508996 - RNA, 22 nt, Human
uguuuugucuaaucuaaauucu

SEQ ID NO: 508997 - RNA, 22 nt, Human
aguacuucagaggcugcccagg

SEQ ID NO: 508998 - RNA, 22 nt, Human
uugcuuccaguccaagucuguu

SEQ ID NO: 508999 - RNA, 22 nt, Human
ugcauuaugcuugugcuguaua

SEQ ID NO: 509000 - RNA, 22 nt, Human
gccuggaaugcaaugugacgaa

SEQ ID NO: 509001 - RNA, 22 nt, Human
gucucugggugugugaugccaa

SEQ ID NO: 509002 - RNA, 20 nt, Human
augugagggguugaaguggg

SEQ ID NO: 509003 - RNA, 23 nt, Human
uccaggcaugagcucuggaugga

SEQ ID NO: 509004 - RNA, 22 nt, Human
cuggccccaggcagccugcugg

SEQ ID NO: 509005 - RNA, 22 nt, Human
auggauaagucaaagaguaucc

SEQ ID NO: 509006 - RNA, 22 nt, Human
cagcuucuccauucuucuggcu

SEQ ID NO: 509007 - RNA, 22 nt, Human
aaauuucuggaagugucagagu

SEQ ID NO: 509008 - RNA, 22 nt, Human
ucagugcaaaaaaugggcuaga

SEQ ID NO: 509009 - RNA, 22 nt, Human
uguccucaaggagcuucagucu

SEQ ID NO: 509010 - RNA, 22 nt, Human
agcucccagaagccagagucgg

SEQ ID NO: 509011 - RNA, 22 nt, Human
agccuugcaugauuucauucau

SEQ ID NO: 509012 - RNA, 21 nt, Human
aggugggcagguggaguggcc

SEQ ID NO: 509013 - RNA, 21 nt, Human
uauacagcaaagucuggagca

SEQ ID NO: 509014 - RNA, 22 nt, Human
ggcaggugcaccugagccaucu

SEQ ID NO: 509015 - RNA, 22 nt, Human
gaggcugacggcaccaucuucu

SEQ ID NO: 509016 - RNA, 22 nt, Human
ccccagcugcauacuugccaag

SEQ ID NO: 509017 - RNA, 22 nt, Human
gguggccucgguggugcacagg

SEQ ID NO: 509018 - RNA, 22 nt, Human
ugcccagguuugagugcccaag

SEQ ID NO: 509019 - RNA, 22 nt, Human
uauucacauucucaggccuggu

SEQ ID NO: 509020 - RNA, 22 nt, Human
gccuggcacauugcaguggauu

SEQ ID NO: 509021 - RNA, 22 nt, Human
uccaggcaggguuaaggguccu

SEQ ID NO: 509022 - RNA, 22 nt, Human
aguuucuuuagauagaaaguuc

SEQ ID NO: 509023 - RNA, 22 nt, Human
ucuuggcugcagagccggcaag

SEQ ID NO: 509024 - RNA, 22 nt, Human
cacugaagguaggaccaaggcu

SEQ ID NO: 509025 - RNA, 22 nt, Human
gagauuggccuggcuugccaac

SEQ ID NO: 509026 - RNA, 20 nt, Human
acagccagaggaggcagaca

SEQ ID NO: 509027 - RNA, 22 nt, Human
aggugccauugcuugccaguuu

SEQ ID NO: 509028 - RNA, 22 nt, Human
aaggcccuaauagagcacauau

SEQ ID NO: 509029 - RNA, 22 nt, Human
ccugagcuggcagugaccugga

SEQ ID NO: 509030 - RNA, 22 nt, Human
aagggcagaauagagaagaugg

SEQ ID NO: 509031 - RNA, 22 nt, Human
auucucaauggcuacuuucaua

SEQ ID NO: 509032 - RNA, 22 nt, Human
uagagagguuugaauuggcugc

SEQ ID NO: 509033 - RNA, 22 nt, Human
aggucucaaguugagaaggcag

SEQ ID NO: 509034 - RNA, 22 nt, Human
gagagcugggggacuguggaug

SEQ ID NO: 509035 - RNA, 22 nt, Human
ggcuggagugggcuccagaguu

SEQ ID NO: 509036 - RNA, 22 nt, Human
uuugaaagucaaccuuccaguu

SEQ ID NO: 509037 - RNA, 22 nt, Human
ucuucuuuggaugaaagaauau

SEQ ID NO: 509038 - RNA, 22 nt, Human
uucaggccuaauuucuagcccc

SEQ ID NO: 509039 - RNA, 22 nt, Human
ugacugaaauugcauuuuaaaa

SEQ ID NO: 509040 - RNA, 22 nt, Human
ccucuggcucacagcaccaacu

SEQ ID NO: 509041 - RNA, 22 nt, Human
ggggccuuggaucugugccccg

SEQ ID NO: 509042 - RNA, 22 nt, Human
caaauucagaaaauugguagag

SEQ ID NO: 509043 - RNA, 22 nt, Human
cccugcagaccaaugccauaga

SEQ ID NO: 509044 - RNA, 18 nt, Human
uccuuagcugagcuuguc

SEQ ID NO: 509045 - RNA, 22 nt, Human
aggguggcaguuacuggagcaa

SEQ ID NO: 509046 - RNA, 22 nt, Human
ugcugccagagagacagggacu

SEQ ID NO: 509047 - RNA, 22 nt, Human
agcaccugcuugugacuaggga

SEQ ID NO: 509048 - RNA, 22 nt, Human
ugcccugguuacacuggagucc

SEQ ID NO: 509049 - RNA, 22 nt, Human
ucugguccucucugugaugcua

SEQ ID NO: 509050 - RNA, 22 nt, Human
agugaaauccuggucaacaggu

SEQ ID NO: 509051 - RNA, 19 nt, Human
uggggcuguguuuugaccc

SEQ ID NO: 509052 - RNA, 22 nt, Human
cuggagcugucuucacaggccu

SEQ ID NO: 509053 - RNA, 22 nt, Human
uuccuccagccuggagcacuuc

SEQ ID NO: 509054 - RNA, 22 nt, Human
aacaugaagguaggaugguuuu

SEQ ID NO: 509055 - RNA, 22 nt, Human
uacauaaugagcuaguuaaguu

SEQ ID NO: 509056 - RNA, 22 nt, Human
aguggcugccaagagcaaugcu

SEQ ID NO: 509057 - RNA, 17 nt, Human
acagaggcaggagugga

SEQ ID NO: 509058 - RNA, 22 nt, Human
ucaguguucgcucagggacucc

SEQ ID NO: 509059 - RNA, 22 nt, Human
caguccugaauacuggacggug

SEQ ID NO: 509060 - RNA, 18 nt, Human
cucugggagaggcauaca

SEQ ID NO: 509061 - RNA, 22 nt, Human
uggugccuugggccuacagcgc

SEQ ID NO: 509062 - RNA, 22 nt, Human
cuuucuaauucucccauagucu

SEQ ID NO: 509063 - RNA, 22 nt, Human
ucacagaagcccucgcaaacua

SEQ ID NO: 509064 - RNA, 22 nt, Human
uccaauuugaaaugguauaugu

SEQ ID NO: 509065 - RNA, 22 nt, Human
ucuccaggaagcccucccugac

SEQ ID NO: 509066 - RNA, 22 nt, Human
aguauaauuagauaucaaaagu

SEQ ID NO: 509067 - RNA, 22 nt, Human
aucuguaaaugcaaauguagcu

SEQ ID NO: 509068 - RNA, 22 nt, Human
augcccugaggaaugucacgcu

SEQ ID NO: 509069 - RNA, 22 nt, Human
uugcuuuugucucggguuugga

SEQ ID NO: 509070 - RNA, 22 nt, Human
ucugucaccgagggcauccaaa

SEQ ID NO: 509071 - RNA, 22 nt, Human
cagaacauuccaugugcccugc

SEQ ID NO: 509072 - RNA, 22 nt, Human
gcaaaaaaugcuuguugcuuag

SEQ ID NO: 509073 - RNA, 22 nt, Human
ccccuucuggucuucaauggug

SEQ ID NO: 509074 - RNA, 22 nt, Human
uaugugcauuauuaccagugga

SEQ ID NO: 509075 - RNA, 22 nt, Human
uuccuuggaguuaagacccugg

SEQ ID NO: 509076 - RNA, 22 nt, Human
uuuguguuuguacaaugcacua

SEQ ID NO: 509077 - RNA, 22 nt, Human
caggaaggggcucacucuggcc

SEQ ID NO: 509078 - RNA, 20 nt, Human
gcugcucuccacggucugca

SEQ ID NO: 509079 - RNA, 22 nt, Human
auguuacaauucaaaaugcugc

SEQ ID NO: 509080 - RNA, 22 nt, Human
agaagcagggcagggaaaagca

SEQ ID NO: 509081 - RNA, 22 nt, Human
ugacagaaugugacucucagau

SEQ ID NO: 509082 - RNA, 22 nt, Human
ugcaguggaagagguggagauc

SEQ ID NO: 509083 - RNA, 21 nt, Human
agcugccugcucuggaccugg

SEQ ID NO: 509084 - RNA, 22 nt, Human
ggccugaggcgucccagcugug

SEQ ID NO: 509085 - RNA, 22 nt, Human
aagacaagcaucaaaucaggca

SEQ ID NO: 509086 - RNA, 22 nt, Human
accuuucauuaaagucuguagu

SEQ ID NO: 509087 - RNA, 22 nt, Human
gccaccccaaccucccuaaguu

SEQ ID NO: 509088 - RNA, 22 nt, Human
gcaaagucucaagacccaagug

SEQ ID NO: 509089 - RNA, 22 nt, Human
caccaggcacauaguaggcacu

SEQ ID NO: 509090 - RNA, 21 nt, Human
aguccccuguccuuacuucua

SEQ ID NO: 509091 - RNA, 22 nt, Human
agguccagacuguguacccuag

SEQ ID NO: 509092 - RNA, 22 nt, Human
caggcccugggcaggcacagag

SEQ ID NO: 509093 - RNA, 22 nt, Human
ggcuuugguagacacagauuga

SEQ ID NO: 509094 - RNA, 22 nt, Human
uucaaugaggauagaacuggau

SEQ ID NO: 509095 - RNA, 22 nt, Human
ucccagcacgucugcuguuucu

SEQ ID NO: 509096 - RNA, 22 nt, Human
uccugccucacaguugaaguuu

SEQ ID NO: 509097 - RNA, 22 nt, Human
ugaggaggcccagguuggggcu

SEQ ID NO: 509098 - RNA, 17 nt, Human
cccucuggggagggagg

SEQ ID NO: 509099 - RNA, 22 nt, Human
ucugucacucuagagauggcag

SEQ ID NO: 509100 - RNA, 22 nt, Human
aaggccugggaguacugggaca

SEQ ID NO: 509101 - RNA, 22 nt, Human
ugguggcaauguccuggagaag

SEQ ID NO: 509102 - RNA, 22 nt, Human
uuuccucuccaccaggaggucu

SEQ ID NO: 509103 - RNA, 22 nt, Human
uaagauaaggaacauucuguga

SEQ ID NO: 509104 - RNA, 22 nt, Human
agggagaggagggucuuguuga

SEQ ID NO: 509105 - RNA, 22 nt, Human
augaaguuccaguauaugcagu

SEQ ID NO: 509106 - RNA, 22 nt, Human
cagaggcagaggucaucucugg

SEQ ID NO: 509107 - RNA, 22 nt, Human
gcugccuggagcucagccugcc

SEQ ID NO: 509108 - RNA, 22 nt, Human
uaugaaauugccauuuuuaugg

SEQ ID NO: 509109 - RNA, 22 nt, Human
uggcagaggcucugugauguug

SEQ ID NO: 509110 - RNA, 22 nt, Human
aaacaguuuucucauuuagugu

SEQ ID NO: 509111 - RNA, 22 nt, Human
ccugucuguccucucaugagcc

SEQ ID NO: 509112 - RNA, 22 nt, Human
auguccagccaaccacuggauu

SEQ ID NO: 509113 - RNA, 22 nt, Human
aaggaaagacauauaaaugacu

SEQ ID NO: 509114 - RNA, 22 nt, Human
agcuuccacaucugucuucagu

SEQ ID NO: 509115 - RNA, 22 nt, Human
guccugagcccucagcacagca

SEQ ID NO: 509116 - RNA, 19 nt, Human
caacaguacugguuugucc

SEQ ID NO: 509117 - RNA, 22 nt, Human
gcuguacauucugcacaggccc

SEQ ID NO: 509118 - RNA, 22 nt, Human
aaaagcaaguugccuagguuga

SEQ ID NO: 509119 - RNA, 22 nt, Human
uaauuucacugauaugaaguca

SEQ ID NO: 509120 - RNA, 22 nt, Human
cccagcaucccagugggcagca

SEQ ID NO: 509121 - RNA, 22 nt, Human
agaggccagcagugccuaucug

SEQ ID NO: 509122 - RNA, 22 nt, Human
guccuucaaguaaccugggacc

SEQ ID NO: 509123 - RNA, 19 nt, Human
uguuuucaagugggauuau

SEQ ID NO: 509124 - RNA, 22 nt, Human
agcucugggccaggaacccuaa

SEQ ID NO: 509125 - RNA, 22 nt, Human
caguacuuguccucagguguua

SEQ ID NO: 509126 - RNA, 22 nt, Human
cugcucuggcguacucggcauc

SEQ ID NO: 509127 - RNA, 21 nt, Human
ugucuuuggccucauucccag

SEQ ID NO: 509128 - RNA, 22 nt, Human
ccuggcagguggagguugcagu

SEQ ID NO: 509129 - RNA, 22 nt, Human
gcucuguguccacagcuggaaa

SEQ ID NO: 509130 - RNA, 22 nt, Human
aggggccauuguucugcccgcu

SEQ ID NO: 509131 - RNA, 22 nt, Human
caggcugccuggaagaggacug

SEQ ID NO: 509132 - RNA, 21 nt, Human
cuaagcaaggagcagggguag

SEQ ID NO: 509133 - RNA, 22 nt, Human
aggagggugauccgggcugguc

SEQ ID NO: 509134 - RNA, 20 nt, Human
ucagugcagauuguccaagu

SEQ ID NO: 509135 - RNA, 22 nt, Human
uuacaugggcuugugaguccuu

SEQ ID NO: 509136 - RNA, 22 nt, Human
aguggcugucuuccaaaaucug

SEQ ID NO: 509137 - RNA, 22 nt, Human
aggcucuguuauucuagagggc

SEQ ID NO: 509138 - RNA, 22 nt, Human
acagguccuuauaagagcacuc

SEQ ID NO: 509139 - RNA, 22 nt, Human
ugggcugaguggcagccagagu

SEQ ID NO: 509140 - RNA, 22 nt, Human
gcccagcuccucugcagacccu

SEQ ID NO: 509141 - RNA, 22 nt, Human
uucuagaugauaaaccagcagc

SEQ ID NO: 509142 - RNA, 22 nt, Human
gggcacagagaagguuuuagug

SEQ ID NO: 509143 - RNA, 22 nt, Human
cuggaaugccucccugucagag

SEQ ID NO: 509144 - RNA, 22 nt, Human
ccaaguacucucaccaaagcuu

SEQ ID NO: 509145 - RNA, 22 nt, Human
gccugaugagcuuccagcugag

SEQ ID NO: 509146 - RNA, 22 nt, Human
aguguguacucauauacuucca

SEQ ID NO: 509147 - RNA, 22 nt, Human
aggaagaauguuuacauaucaa

SEQ ID NO: 509148 - RNA, 22 nt, Human
cucugcgccacccucgccugcu

SEQ ID NO: 509149 - RNA, 22 nt, Human
gugugccacugccugaggaccc

SEQ ID NO: 509150 - RNA, 22 nt, Human
auguuuuauuaccaacuuguac

SEQ ID NO: 509151 - RNA, 22 nt, Human
gcugucccgaaccccugguaau

SEQ ID NO: 509152 - RNA, 18 nt, Human
uccagcgugcuccagggc

SEQ ID NO: 509153 - RNA, 19 nt, Human
guguacagcucagugaauu

SEQ ID NO: 509154 - RNA, 22 nt, Human
gaguccaggcuguugcucaucu

SEQ ID NO: 509155 - RNA, 22 nt, Human
agugcuguccaguuucacaggu

SEQ ID NO: 509156 - RNA, 22 nt, Human
uagcaaagggaaagaagggccu

SEQ ID NO: 509157 - RNA, 22 nt, Human
ccuguucauuuguauuugucuu

SEQ ID NO: 509158 - RNA, 23 nt, Human
uguagcaucucuuauuucucagc

SEQ ID NO: 509159 - RNA, 21 nt, Human
uuuguucaggggcaaaguuaa

SEQ ID NO: 509160 - RNA, 22 nt, Human
gcagagcagugcuugcccagcg

SEQ ID NO: 509161 - RNA, 22 nt, Human
agagggcauuaacucugucuug

SEQ ID NO: 509162 - RNA, 19 nt, Human
gaggcgaggcgugcaggag

SEQ ID NO: 509163 - RNA, 22 nt, Human
acugggcugccugguucuucua

SEQ ID NO: 509164 - RNA, 22 nt, Human
aagaguuuccaguuguggcuca

SEQ ID NO: 509165 - RNA, 22 nt, Human
gcaguguugacuaugguaugag

SEQ ID NO: 509166 - RNA, 22 nt, Human
ggcugggucccagcugggagga

SEQ ID NO: 509167 - RNA, 22 nt, Human
acagcuuuaguguggguggugc

SEQ ID NO: 509168 - RNA, 22 nt, Human
guggagacuucuacuagagacc

SEQ ID NO: 509169 - RNA, 22 nt, Human
uuccaagugcugaggacaguag

SEQ ID NO: 509170 - RNA, 18 nt, Human
agcagcugucagaaugcc

SEQ ID NO: 509171 - RNA, 22 nt, Human
cagagcuggcggugagaagaca

SEQ ID NO: 509172 - RNA, 22 nt, Human
uaaaugauuuauguaugugaaa

SEQ ID NO: 509173 - RNA, 19 nt, Human
uggagacugagagugagca

SEQ ID NO: 509174 - RNA, 22 nt, Human
uccuucaguucaauuaguccgu

SEQ ID NO: 509175 - RNA, 23 nt, Human
uccugccagaugacuccuuucuu

SEQ ID NO: 509176 - RNA, 22 nt, Human
ccuggcaggccccuccuggauu

SEQ ID NO: 509177 - RNA, 22 nt, Human
aagaaaugugaauauugaauag

SEQ ID NO: 509178 - RNA, 22 nt, Human
uuggaaauacagcaguuacuuu

SEQ ID NO: 509179 - RNA, 19 nt, Human
ggagccuggagcacgugcc

SEQ ID NO: 509180 - RNA, 22 nt, Human
ccaaugauggugcccacgauga

SEQ ID NO: 509181 - RNA, 22 nt, Human
ggaguuggugagcaccaggcuu

SEQ ID NO: 509182 - RNA, 19 nt, Human
gcugucugaugcugagguc

SEQ ID NO: 509183 - RNA, 22 nt, Human
uuauuuguaaggcagggccagu

SEQ ID NO: 509184 - RNA, 22 nt, Human
ccuguguguaggccaggggagu

SEQ ID NO: 509185 - RNA, 20 nt, Human
ugaggcaggagaauggcaug

SEQ ID NO: 509186 - RNA, 22 nt, Human
gggcugggcaugguguucccuc

SEQ ID NO: 509187 - RNA, 22 nt, Human
gugcuuccugccuggugccuuu

SEQ ID NO: 509188 - RNA, 22 nt, Human
cagcuucuaccaucaggaaauu

SEQ ID NO: 509189 - RNA, 22 nt, Human
gcucuguccagcgugcacagaa

SEQ ID NO: 509190 - RNA, 22 nt, Human
uacaugcucaguaacuuucagu

SEQ ID NO: 509191 - RNA, 22 nt, Human
gaaaucugcggugaggccugag

SEQ ID NO: 509192 - RNA, 17 nt, Human
ugcauuguaggcuagcc

SEQ ID NO: 509193 - RNA, 22 nt, Human
agcaggcuacuccuguguucgu

SEQ ID NO: 509194 - RNA, 22 nt, Human
gcaagcuggcuguuagaggaug

SEQ ID NO: 509195 - RNA, 22 nt, Human
ugagccagccuugcagcugugc

SEQ ID NO: 509196 - RNA, 22 nt, Human
ucaggagaaucagggcuguccu

SEQ ID NO: 509197 - RNA, 18 nt, Human
aaggucugucugguaggu

SEQ ID NO: 509198 - RNA, 22 nt, Human
uuucacaauuuuaaggagcaaa

SEQ ID NO: 509199 - RNA, 22 nt, Human
augccaaauucucagccucuuu

SEQ ID NO: 509200 - RNA, 22 nt, Human
agcuggguggagggcccacggu

SEQ ID NO: 509201 - RNA, 15 nt, Human
auuauuugugcucag

SEQ ID NO: 509202 - RNA, 22 nt, Human
aggagacauaacuaugaugaga

SEQ ID NO: 509203 - RNA, 22 nt, Human
uaauacuuaccuugcagagucu

SEQ ID NO: 509204 - RNA, 22 nt, Human
agagacaggguuuugucguguu

SEQ ID NO: 509205 - RNA, 22 nt, Human
gcaaacauuccacagaaggaag

SEQ ID NO: 509206 - RNA, 22 nt, Human
ccaggaguuggagguugcagug

SEQ ID NO: 509207 - RNA, 21 nt, Human
gccagccuguuuaccuguggu

SEQ ID NO: 509208 - RNA, 22 nt, Human
uggcagcugucuguggggucuc

SEQ ID NO: 509209 - RNA, 22 nt, Human
cuaaagcaacugagacacauag

SEQ ID NO: 509210 - RNA, 22 nt, Human
aggcagugagcagggugucaug

SEQ ID NO: 509211 - RNA, 18 nt, Human
cagcagagacauucaaaa

SEQ ID NO: 509212 - RNA, 22 nt, Human
gcucaaggcaggcagacaugag

SEQ ID NO: 509213 - RNA, 18 nt, Human
gagcagcaggaucaagaa

SEQ ID NO: 509214 - RNA, 22 nt, Human
ccagaggagcaggcuggcucca

SEQ ID NO: 509215 - RNA, 22 nt, Human
caucacugucaccaucuuuccu

SEQ ID NO: 509216 - RNA, 22 nt, Human
cucuggaauuaaggaagccugu

SEQ ID NO: 509217 - RNA, 17 nt, Human
ucugucugugguccacu

SEQ ID NO: 509218 - RNA, 22 nt, Human
acccaggagcaggcugggcagu

SEQ ID NO: 509219 - RNA, 22 nt, Human
aguggcaauugacaacaaagga

SEQ ID NO: 509220 - RNA, 22 nt, Human
aaacuucagugaaugacuuaug

SEQ ID NO: 509221 - RNA, 22 nt, Human
gcugagugagguccagagcuug

SEQ ID NO: 509222 - RNA, 22 nt, Human
gggagagcgcgcuagggccgag

SEQ ID NO: 509223 - RNA, 23 nt, Human
uguugaaguaacuguuacauaga

SEQ ID NO: 509224 - RNA, 22 nt, Human
uuacaguagauuuugaaugugg

SEQ ID NO: 509225 - RNA, 23 nt, Human
uugucugugcuuuuccaguugcu

SEQ ID NO: 509226 - RNA, 22 nt, Human
ccuggggcuuucuuuguaucau

SEQ ID NO: 509227 - RNA, 22 nt, Human
gcaguccucucauuggccuccu

SEQ ID NO: 509228 - RNA, 22 nt, Human
agcuggagcuucaagcagguaa

SEQ ID NO: 509229 - RNA, 22 nt, Human
gcaaagcaucaguagaaauguu

SEQ ID NO: 509230 - RNA, 22 nt, Human
ccuggcaguuuugcccaggauu

SEQ ID NO: 509231 - RNA, 22 nt, Human
auauaaaguguuuagaaagcug

SEQ ID NO: 509232 - RNA, 22 nt, Human
gggaccuggucuagcacugagc

SEQ ID NO: 509233 - RNA, 22 nt, Human
aguggcugccaagauauaauuc

SEQ ID NO: 509234 - RNA, 22 nt, Human
ggucucaaggaauauaaugagu

SEQ ID NO: 509235 - RNA, 22 nt, Human
uggguggcggccugguucugag

SEQ ID NO: 509236 - RNA, 22 nt, Human
gcauuuaaauuugaacuucaga

SEQ ID NO: 509237 - RNA, 21 nt, Human
ggagucagggucuggcugggg

SEQ ID NO: 509238 - RNA, 22 nt, Human
ggcugcugugaccucaggugau

SEQ ID NO: 509239 - RNA, 22 nt, Human
cuuugggcaaagggccaauucg

SEQ ID NO: 509240 - RNA, 22 nt, Human
ugcaugcagcuggugauaagaa

SEQ ID NO: 509241 - RNA, 22 nt, Human
uaaagugcagauugugauucag

SEQ ID NO: 509242 - RNA, 22 nt, Human
gaaggcuggggccuucucaucu

SEQ ID NO: 509243 - RNA, 22 nt, Human
uucuccucuguuggccuucccu

SEQ ID NO: 509244 - RNA, 22 nt, Human
gacauucacaguuuccgauggu

SEQ ID NO: 509245 - RNA, 22 nt, Human
ugugacagaucuuuaaauaaug

SEQ ID NO: 509246 - RNA, 22 nt, Human
acugggcucccaggcuugucau

SEQ ID NO: 509247 - RNA, 22 nt, Human
agcagcuggugagcaagcucag

SEQ ID NO: 509248 - RNA, 22 nt, Human
uggggccuggucagagcugcac

SEQ ID NO: 509249 - RNA, 17 nt, Human
acucaggaucugggagu

SEQ ID NO: 509250 - RNA, 22 nt, Human
augaaagaugauuuaaaguacu

SEQ ID NO: 509251 - RNA, 22 nt, Human
uggcagcugauuagauggugcc

SEQ ID NO: 509252 - RNA, 22 nt, Human
ggcacagagcuuugucccaguu

SEQ ID NO: 509253 - RNA, 22 nt, Human
gccucugcugacaagauggaca

SEQ ID NO: 509254 - RNA, 22 nt, Human
gccaggcugccuuaucucuagc

SEQ ID NO: 509255 - RNA, 22 nt, Human
agugucaacugucuacagggag

SEQ ID NO: 509256 - RNA, 22 nt, Human
gaggccuggcugucagucccca

SEQ ID NO: 509257 - RNA, 22 nt, Human
cagguccacagcccaucacugc

SEQ ID NO: 509258 - RNA, 21 nt, Human
ugccuuggcaaaugaccauga

SEQ ID NO: 509259 - RNA, 20 nt, Human
ggaagcagagaacuguuuuc

SEQ ID NO: 509260 - RNA, 22 nt, Human
ggcuucuguccucuggaucugu

SEQ ID NO: 509261 - RNA, 17 nt, Human
gggagaugaagggauau

SEQ ID NO: 509262 - RNA, 22 nt, Human
ccagaaagaaugaacugaaccc

SEQ ID NO: 509263 - RNA, 18 nt, Human
gccucccuggcuacacuu

SEQ ID NO: 509264 - RNA, 22 nt, Human
uuacaaagcaggucagcugaaa

SEQ ID NO: 509265 - RNA, 22 nt, Human
aacuguucuucauuuucaguau

SEQ ID NO: 509266 - RNA, 22 nt, Human
cugugccuuggcgcugugccac

SEQ ID NO: 509267 - RNA, 22 nt, Human
acaaagucacaauaauuaaccu

SEQ ID NO: 509268 - RNA, 22 nt, Human
uacacccuucuccugagugugu

SEQ ID NO: 509269 - RNA, 22 nt, Human
ccuggcucgcugaccucagggg

SEQ ID NO: 509270 - RNA, 22 nt, Human
cuccugggcucauaucauucag

SEQ ID NO: 509271 - RNA, 23 nt, Human
gcuguacaggaaccaguuuggag

SEQ ID NO: 509272 - RNA, 22 nt, Human
caggcugccgugaagcaggccu

SEQ ID NO: 509273 - RNA, 22 nt, Human
cucuuaaagaauguuccagcug

SEQ ID NO: 509274 - RNA, 22 nt, Human
uguuuuaagagcgcacuuuaua

SEQ ID NO: 509275 - RNA, 22 nt, Human
uacaguaaagcugcuaugaauu

SEQ ID NO: 509276 - RNA, 22 nt, Human
gcacagagcuggcccuccaggc

SEQ ID NO: 509277 - RNA, 22 nt, Human
agauguuuuggagacacuaacc

SEQ ID NO: 509278 - RNA, 22 nt, Human
uugggccaaggcagaucuccaa

SEQ ID NO: 509279 - RNA, 22 nt, Human
uccagggacacagaguccuucu

SEQ ID NO: 509280 - RNA, 22 nt, Human
caguauagaaaguuuuaaauug

SEQ ID NO: 509281 - RNA, 22 nt, Human
uaugcacaauaugaucuauuug

SEQ ID NO: 509282 - RNA, 22 nt, Human
gcaccuuucuauauucaguggc

SEQ ID NO: 509283 - RNA, 22 nt, Human
ucaaaggaguuuaaguuacugg

SEQ ID NO: 509284 - RNA, 21 nt, Human
acccuggguucuccauacccu

SEQ ID NO: 509285 - RNA, 22 nt, Human
uaagaacauuuucggaaagaua

SEQ ID NO: 509286 - RNA, 22 nt, Human
ggaggccaaggagggcggauca

SEQ ID NO: 509287 - RNA, 22 nt, Human
guguucauugcuagugaggugu

SEQ ID NO: 509288 - RNA, 22 nt, Human
aaaagguaguugccaaauaagg

SEQ ID NO: 509289 - RNA, 22 nt, Human
auaauauuuggauaggacagua

SEQ ID NO: 509290 - RNA, 22 nt, Human
gcuaggagccgcugcacuaggu

SEQ ID NO: 509291 - RNA, 22 nt, Human
ugaagaucugucaaccccauau

SEQ ID NO: 509292 - RNA, 22 nt, Human
uguguuuuacaaauucucuuaa

SEQ ID NO: 509293 - RNA, 22 nt, Human
acccugggcuuggccugcucag

SEQ ID NO: 509294 - RNA, 20 nt, Human
gucuuuauguuuuaugaccu

SEQ ID NO: 509295 - RNA, 22 nt, Human
ugcucuggggagcuccucugcg

SEQ ID NO: 509296 - RNA, 22 nt, Human
gagcugaauugaagcaaggagc

SEQ ID NO: 509297 - RNA, 22 nt, Human
gcucaggccucggacacacaau

SEQ ID NO: 509298 - RNA, 22 nt, Human
gaguggggcguggauccagcgu

SEQ ID NO: 509299 - RNA, 22 nt, Human
uuuaagaugguauuuuauaaag

SEQ ID NO: 509300 - RNA, 22 nt, Human
ccaaggucuuggacagcuaaug

SEQ ID NO: 509301 - RNA, 22 nt, Human
ucuguucuuggugcagcuggga

SEQ ID NO: 509302 - RNA, 22 nt, Human
ucaggccuccagguuaccauuu

SEQ ID NO: 509303 - RNA, 22 nt, Human
gcagcagaaguagaaguacagg

SEQ ID NO: 509304 - RNA, 22 nt, Human
uguagaaagcucuucugaaauc

SEQ ID NO: 509305 - RNA, 22 nt, Human
ucucuucuagcuucuugugguu

SEQ ID NO: 509306 - RNA, 18 nt, Human
uccagucccagcucugcc

SEQ ID NO: 509307 - RNA, 22 nt, Human
augccacugacauggacaauuu

SEQ ID NO: 509308 - RNA, 22 nt, Human
ccugggcugcucauggggauga

SEQ ID NO: 509309 - RNA, 19 nt, Human
augaggaacugaggcucag

SEQ ID NO: 509310 - RNA, 22 nt, Human
ggcugcagggcagcuggugugg

SEQ ID NO: 509311 - RNA, 18 nt, Human
uggagcagguaggcauga

SEQ ID NO: 509312 - RNA, 22 nt, Human
aggguccauguuuccaguuaau

SEQ ID NO: 509313 - RNA, 19 nt, Human
guuucauuaagauaggaaa

SEQ ID NO: 509314 - RNA, 22 nt, Human
cagcugaggucaaagaagcagg

SEQ ID NO: 509315 - RNA, 19 nt, Human
ucauaaggagagaggaaau

SEQ ID NO: 509316 - RNA, 22 nt, Human
aggcuucuaggguuggcagcgg

SEQ ID NO: 509317 - RNA, 22 nt, Human
uacagucuuuggaaagagauag

SEQ ID NO: 509318 - RNA, 22 nt, Human
aucccagauagugacccucagg

SEQ ID NO: 509319 - RNA, 22 nt, Human
ugaguccaauaggggccuggaa

SEQ ID NO: 509320 - RNA, 22 nt, Human
guggccuggaugagcuucgaca

SEQ ID NO: 509321 - RNA, 22 nt, Human
ggccucugguucguggugaccu

SEQ ID NO: 509322 - RNA, 22 nt, Human
acagagcaugcucaguguguga

SEQ ID NO: 509323 - RNA, 23 nt, Human
guccuagugcuuggugcccaggc

SEQ ID NO: 509324 - RNA, 22 nt, Human
uauuucuugaguggucaguuuc

SEQ ID NO: 509325 - RNA, 22 nt, Human
cgcaggcuuuagaaucugcuac

SEQ ID NO: 509326 - RNA, 22 nt, Human
caguggggaggccaggauagaa

SEQ ID NO: 509327 - RNA, 22 nt, Human
ugaacagauggcccagcagagg

SEQ ID NO: 509328 - RNA, 22 nt, Human
gccuccagcuggggcauuucag

SEQ ID NO: 509329 - RNA, 22 nt, Human
ugggccagcugaagugccgccc

SEQ ID NO: 509330 - RNA, 22 nt, Human
ugguggcacaagggagagaauc

SEQ ID NO: 509331 - RNA, 22 nt, Human
gugcagugaaaaaagaaugucc

SEQ ID NO: 509332 - RNA, 22 nt, Human
cagccaucaguaaagacagcuu

SEQ ID NO: 509333 - RNA, 22 nt, Human
cagaaauauuuauugagugaca

SEQ ID NO: 509334 - RNA, 22 nt, Human
gcuguacaguuuacuagguggg

SEQ ID NO: 509335 - RNA, 22 nt, Human
cagggacaauggcagagccuga

SEQ ID NO: 509336 - RNA, 22 nt, Human
acaguggugagugacugauagg

SEQ ID NO: 509337 - RNA, 19 nt, Human
aguccaugaauggaggaug

SEQ ID NO: 509338 - RNA, 22 nt, Human
ggaggggccggcugccugccac

SEQ ID NO: 509339 - RNA, 22 nt, Human
uagcauuuauggucaugugucc

SEQ ID NO: 509340 - RNA, 22 nt, Human
ugccagcacaaguuaagagauc

SEQ ID NO: 509341 - RNA, 22 nt, Human
uuacauaguuaaauaguacagc

SEQ ID NO: 509342 - RNA, 22 nt, Human
cuggcuuucucugugguguuca

SEQ ID NO: 509343 - RNA, 22 nt, Human
gccugggagagggauagugcag

SEQ ID NO: 509344 - RNA, 22 nt, Human
cugugaugacaggcagggccaa

SEQ ID NO: 509345 - RNA, 22 nt, Human
acagggcaugugcaagagacau

SEQ ID NO: 509346 - RNA, 22 nt, Human
aauguuacaguuuuaauucuga

SEQ ID NO: 509347 - RNA, 22 nt, Human
aauuucaauuacuuuugcacca

SEQ ID NO: 509348 - RNA, 22 nt, Human
ucaguguuuguggcaaauguua

SEQ ID NO: 509349 - RNA, 22 nt, Human
cugaccugcuaagccccugucc

SEQ ID NO: 509350 - RNA, 22 nt, Human
uguggcuuaagaaugccuuuaa

SEQ ID NO: 509351 - RNA, 22 nt, Human
uuacaagauugauuugcuuggc

SEQ ID NO: 509352 - RNA, 22 nt, Human
ugcucuguugugcaugugggau

SEQ ID NO: 509353 - RNA, 22 nt, Human
ggcuccugccgucuuuucugag

SEQ ID NO: 509354 - RNA, 22 nt, Human
agcaggagcugugggaagaugg

SEQ ID NO: 509355 - RNA, 22 nt, Human
ucaggaagacaaucuuuggcuc

SEQ ID NO: 509356 - RNA, 22 nt, Human
accugggagucacaccugagaa

SEQ ID NO: 509357 - RNA, 22 nt, Human
uauccaauucaccauugauggg

SEQ ID NO: 509358 - RNA, 22 nt, Human
cuggccugcugggugagguccu

SEQ ID NO: 509359 - RNA, 22 nt, Human
cccaguggcuuuugcccagguu

SEQ ID NO: 509360 - RNA, 22 nt, Human
ccugggucuugguucaugcucu

SEQ ID NO: 509361 - RNA, 22 nt, Human
uguggggugugguccaggcauc

SEQ ID NO: 509362 - RNA, 22 nt, Human
ucucaggguuuccugggggcug

SEQ ID NO: 509363 - RNA, 20 nt, Human
auucuacaagaauaagcaug

SEQ ID NO: 509364 - RNA, 22 nt, Human
ccucccaccguaucucaguggc

SEQ ID NO: 509365 - RNA, 22 nt, Human
uuaagucauuucugauuauaga

SEQ ID NO: 509366 - RNA, 22 nt, Human
gccuguggccacugcgucugca

SEQ ID NO: 509367 - RNA, 22 nt, Human
auggacagugugaagcagauag

SEQ ID NO: 509368 - RNA, 22 nt, Human
guccugagaugucacaagguuu

SEQ ID NO: 509369 - RNA, 22 nt, Human
uggccuuggacagagcgcuccu

SEQ ID NO: 509370 - RNA, 21 nt, Human
gcagaggcacggcaccaaggg

SEQ ID NO: 509371 - RNA, 22 nt, Human
acuuucuauucccacagagaua

SEQ ID NO: 509372 - RNA, 22 nt, Human
uuuccauauuuggucuuuggga

SEQ ID NO: 509373 - RNA, 23 nt, Human
aucuuagcauagacuugaguccc

SEQ ID NO: 509374 - RNA, 22 nt, Human
uuuuaacuuaaaauacauagau

SEQ ID NO: 509375 - RNA, 22 nt, Human
aauauuuguuaguguuuuaaug

SEQ ID NO: 509376 - RNA, 23 nt, Human
gccuggccaccccagggcugcuu

SEQ ID NO: 509377 - RNA, 22 nt, Human
aagggcagagggaaucccacau

SEQ ID NO: 509378 - RNA, 22 nt, Human
ccagggcuggguuugucggugu

SEQ ID NO: 509379 - RNA, 22 nt, Human
ucuggaaguuagaggaggaaag

SEQ ID NO: 509380 - RNA, 22 nt, Human
uggcuccugcagaccaucugga

SEQ ID NO: 509381 - RNA, 22 nt, Human
uagauucaaguauucaguuugg

SEQ ID NO: 509382 - RNA, 22 nt, Human
aaagaucuccccuucaaagagu

SEQ ID NO: 509383 - RNA, 22 nt, Human
gggcaugccugagccugccacu

SEQ ID NO: 509384 - RNA, 22 nt, Human
gcagcuggggccacacuuaggc

SEQ ID NO: 509385 - RNA, 22 nt, Human
ucucuggcagggauaucuggcu

SEQ ID NO: 509386 - RNA, 22 nt, Human
cauggccagcccccaguuccuc

SEQ ID NO: 509387 - RNA, 22 nt, Human
cagaccugagguugaguaccag

SEQ ID NO: 509388 - RNA, 22 nt, Human
augcagguugggcaaguguggg

SEQ ID NO: 509389 - RNA, 20 nt, Human
agucacaggccuggaacaug

SEQ ID NO: 509390 - RNA, 22 nt, Human
caggucccguuccccagagauu

SEQ ID NO: 509391 - RNA, 22 nt, Human
gcauugucaaaagugguaugac

SEQ ID NO: 509392 - RNA, 22 nt, Human
gccaaaucacagggccaaaagc

SEQ ID NO: 509393 - RNA, 22 nt, Human
ccccaccugugcgucugccgca

SEQ ID NO: 509394 - RNA, 22 nt, Human
cccuggagugugacgaggcauu

SEQ ID NO: 509395 - RNA, 22 nt, Human
cuucacagucuuuauuuccucc

SEQ ID NO: 509396 - RNA, 22 nt, Human
augucugcggcccaggccaggg

SEQ ID NO: 509397 - RNA, 22 nt, Human
uaaguuuucuggaauaacuugg

SEQ ID NO: 509398 - RNA, 22 nt, Human
gaggcacuggaggaaaggagaa

SEQ ID NO: 509399 - RNA, 22 nt, Human
uagguucagagaacugaaaaua

SEQ ID NO: 509400 - RNA, 22 nt, Human
acguguucaauuuccaucugac

SEQ ID NO: 509401 - RNA, 22 nt, Human
aggucccaggcauagcuggucu

SEQ ID NO: 509402 - RNA, 22 nt, Human
uacgaauccuguggaugaaugu

SEQ ID NO: 509403 - RNA, 22 nt, Human
uaaauguggagacucaggaguc

SEQ ID NO: 509404 - RNA, 20 nt, Human
gucugaggagcagugggaaa

SEQ ID NO: 509405 - RNA, 22 nt, Human
gcaggggcaggagaucucaggc

SEQ ID NO: 509406 - RNA, 22 nt, Human
gauuuuucaguauaaaauauau

SEQ ID NO: 509407 - RNA, 22 nt, Human
uccaagggcagccauagaacuu

SEQ ID NO: 509408 - RNA, 22 nt, Human
cuauuuguaaagugccuggugu

SEQ ID NO: 509409 - RNA, 20 nt, Human
ccccuucaucuacagccuga

SEQ ID NO: 509410 - RNA, 20 nt, Human
cugagcgucuaagaggugag

SEQ ID NO: 509411 - RNA, 22 nt, Human
uccaggcuccccugcgugcucc

SEQ ID NO: 509412 - RNA, 22 nt, Human
cugcugaaaacaauaaugauga

SEQ ID NO: 509413 - RNA, 22 nt, Human
cugugcuuaccugcccagguga

SEQ ID NO: 509414 - RNA, 22 nt, Human
cuggcagcgugagcagcaucca

SEQ ID NO: 509415 - RNA, 22 nt, Human
ccagggcagugggagaaggugc

SEQ ID NO: 509416 - RNA, 22 nt, Human
gagccugcccagcccuguccac

SEQ ID NO: 509417 - RNA, 22 nt, Human
aggggagguguccccaaaucuc

SEQ ID NO: 509418 - RNA, 22 nt, Human
gagggaugugccugaaggcagg

SEQ ID NO: 509419 - RNA, 22 nt, Human
gaagaaagauuggcaugcuuca

SEQ ID NO: 509420 - RNA, 22 nt, Human
aggcacugcagauuacaggcgc

SEQ ID NO: 509421 - RNA, 22 nt, Human
caggugcucccagagaagugcu

SEQ ID NO: 509422 - RNA, 22 nt, Human
auuucuuuucaagagggugcuu

SEQ ID NO: 509423 - RNA, 22 nt, Human
cuuguucaguugccucuccugc

SEQ ID NO: 509424 - RNA, 21 nt, Human
acaggcucuggggaugcuggg

SEQ ID NO: 509425 - RNA, 22 nt, Human
auuauguaacugugguucagca

SEQ ID NO: 509426 - RNA, 22 nt, Human
aaagguuaagguguucaagaaa

SEQ ID NO: 509427 - RNA, 22 nt, Human
caggcucacuuucucagucaca

SEQ ID NO: 509428 - RNA, 22 nt, Human
ugccuggcaucuagcccuggga

SEQ ID NO: 509429 - RNA, 22 nt, Human
gaaggagagagacaucgucccu

SEQ ID NO: 509430 - RNA, 22 nt, Human
ugcaccauacccauuccccucu

SEQ ID NO: 509431 - RNA, 22 nt, Human
ugagggaggccuccaucugcca

SEQ ID NO: 509432 - RNA, 22 nt, Human
uaaaucagggagucaucugcga

SEQ ID NO: 509433 - RNA, 22 nt, Human
ucaaaugcuucuacuccuaaga

SEQ ID NO: 509434 - RNA, 22 nt, Human
gcaggguaggugacagguaguc

SEQ ID NO: 509435 - RNA, 21 nt, Human
gaaggagaaagcaagugcugc

SEQ ID NO: 509436 - RNA, 22 nt, Human
cccuggagcugcuugcauguug

SEQ ID NO: 509437 - RNA, 22 nt, Human
uauuugauagagauaaaugaua

SEQ ID NO: 509438 - RNA, 22 nt, Human
aguaucaaggaucuccagcacc

SEQ ID NO: 509439 - RNA, 22 nt, Human
auccuugaacuuagacacuagg

SEQ ID NO: 509440 - RNA, 22 nt, Human
gagucuguaugucuuccaugca

SEQ ID NO: 509441 - RNA, 22 nt, Human
auccccagaaaauaggugccua

SEQ ID NO: 509442 - RNA, 20 nt, Human
uccugcaguuccuaggaggg

SEQ ID NO: 509443 - RNA, 22 nt, Human
uucugggccuccuaggacaggc

SEQ ID NO: 509444 - RNA, 22 nt, Human
aagcagcacgcuuugccaacaa

SEQ ID NO: 509445 - RNA, 22 nt, Human
cuggcucacaggugagaugcau

SEQ ID NO: 509446 - RNA, 22 nt, Human
gcucccagacugaccagaggug

SEQ ID NO: 509447 - RNA, 22 nt, Human
ggaggccaaggcagguggauca

SEQ ID NO: 509448 - RNA, 22 nt, Human
ugggcugcugagaaugagagag

SEQ ID NO: 509449 - RNA, 22 nt, Human
cuguccagaaagggggcaacaa

SEQ ID NO: 509450 - RNA, 22 nt, Human
aggucucacuuuguggaaguga

SEQ ID NO: 509451 - RNA, 18 nt, Human
cuucauuuguagaguucc

SEQ ID NO: 509452 - RNA, 22 nt, Human
ccacccugagccgcaagagcag

SEQ ID NO: 509453 - RNA, 22 nt, Human
augcccgauaccuaguuaacuc

SEQ ID NO: 509454 - RNA, 22 nt, Human
cugcccaguuugggagccuuuc

SEQ ID NO: 509455 - RNA, 22 nt, Human
aaaguaugauuggggauuauuu

SEQ ID NO: 509456 - RNA, 22 nt, Human
uagcagcuguggaggggcugug

SEQ ID NO: 509457 - RNA, 22 nt, Human
ggucugagauauuuguucagcu

SEQ ID NO: 509458 - RNA, 22 nt, Human
cccugagcccauaguugacauu

SEQ ID NO: 509459 - RNA, 22 nt, Human
ugaaggaaugaguauacuguuu

SEQ ID NO: 509460 - RNA, 22 nt, Human
cagcaggacguccaagugcuau

SEQ ID NO: 509461 - RNA, 22 nt, Human
gaggagaaauuuggggaccuga

SEQ ID NO: 509462 - RNA, 22 nt, Human
aagccaaauaauguagguacau

SEQ ID NO: 509463 - RNA, 22 nt, Human
auuuggaaaugcaucucuugag

SEQ ID NO: 509464 - RNA, 22 nt, Human
agccccaggcccggacgccucu

SEQ ID NO: 509465 - RNA, 22 nt, Human
aagcagcugugugacauaaucu

SEQ ID NO: 509466 - RNA, 22 nt, Human
agcccccaaaagugcuuaugau

SEQ ID NO: 509467 - RNA, 22 nt, Human
gugcuggcccuguccucgagcu

SEQ ID NO: 509468 - RNA, 22 nt, Human
auagcuguuagauuggggucga

SEQ ID NO: 509469 - RNA, 22 nt, Human
cagcccugcuuccccgcuaguu

SEQ ID NO: 509470 - RNA, 22 nt, Human
gcugggagccguaccugucacg

SEQ ID NO: 509471 - RNA, 22 nt, Human
ggagggagagugacccuaccaa

SEQ ID NO: 509472 - RNA, 22 nt, Human
aagagcauauuaauaguggaga

SEQ ID NO: 509473 - RNA, 22 nt, Human
uugaaagugccaaguccuagug

SEQ ID NO: 509474 - RNA, 22 nt, Human
ccagggccucguguucugagug

SEQ ID NO: 509475 - RNA, 22 nt, Human
gugcccaggugucccugagaag

SEQ ID NO: 509476 - RNA, 22 nt, Human
agaaaagguugaaaguaggauu

SEQ ID NO: 509477 - RNA, 22 nt, Human
guagggacuuguuuuacuagua

SEQ ID NO: 509478 - RNA, 22 nt, Human
uguaugaauauguauuuucaua

SEQ ID NO: 509479 - RNA, 22 nt, Human
ucuguuuaggcaaaauagcuac

SEQ ID NO: 509480 - RNA, 22 nt, Human
caaaauaccacgacuuguuuua

SEQ ID NO: 509481 - RNA, 22 nt, Human
gccuuggccuuccuaggccuga

SEQ ID NO: 509482 - RNA, 22 nt, Human
augggagugacagggccacugg

SEQ ID NO: 509483 - RNA, 22 nt, Human
cauuggaaugcauuugaagaga

SEQ ID NO: 509484 - RNA, 22 nt, Human
ugugaagcuggauccuggagcu

SEQ ID NO: 509485 - RNA, 22 nt, Human
ucauuacagagauauaaucuac

SEQ ID NO: 509486 - RNA, 22 nt, Human
ggcggggguccaggagccugca

SEQ ID NO: 509487 - RNA, 22 nt, Human
uccucaggcugccuggaagacu

SEQ ID NO: 509488 - RNA, 22 nt, Human
cagagucuggacugcaggcucc

SEQ ID NO: 509489 - RNA, 22 nt, Human
ucaguuuuguauguuguaaguc

SEQ ID NO: 509490 - RNA, 22 nt, Human
agauuuguugugagcaggaaua

SEQ ID NO: 509491 - RNA, 23 nt, Human
cuuuccuuucuuugacacccagc

SEQ ID NO: 509492 - RNA, 22 nt, Human
ucucagugauggcccauuugga

SEQ ID NO: 509493 - RNA, 22 nt, Human
guuucccaaauuguucacaggg

SEQ ID NO: 509494 - RNA, 22 nt, Human
uauuauguagaguaaggguuaa

SEQ ID NO: 509495 - RNA, 22 nt, Human
uucaggagaauuccaagaagua

SEQ ID NO: 509496 - RNA, 22 nt, Human
ugguccuguguucuuccugccu

SEQ ID NO: 509497 - RNA, 22 nt, Human
ucugggcugucuacagguuggc

SEQ ID NO: 509498 - RNA, 22 nt, Human
uggcucuguggauguucugacc

SEQ ID NO: 509499 - RNA, 22 nt, Human
uuaauuuuuauguauagugugu

SEQ ID NO: 509500 - RNA, 22 nt, Human
cacugcuuuaaggcugaguaac

SEQ ID NO: 509501 - RNA, 22 nt, Human
ucauuucaaguucugacagcua

SEQ ID NO: 509502 - RNA, 21 nt, Human
ugcuggcugaaaggcacagag

SEQ ID NO: 509503 - RNA, 22 nt, Human
cagcagugucuccagcaucaca

SEQ ID NO: 509504 - RNA, 22 nt, Human
uuucacagucaauuuggaguca

SEQ ID NO: 509505 - RNA, 17 nt, Human
gccuggcccagccuggc

SEQ ID NO: 509506 - RNA, 22 nt, Human
auugaaagcauggauuuggauu

SEQ ID NO: 509507 - RNA, 22 nt, Human
gccaggccugcaagugcuggug

SEQ ID NO: 509508 - RNA, 22 nt, Human
agagcagucaggcuaggacacu

SEQ ID NO: 509509 - RNA, 22 nt, Human
auaaguaggaaaauuugaauau

SEQ ID NO: 509510 - RNA, 22 nt, Human
aaauuagaccagggcuccugga

SEQ ID NO: 509511 - RNA, 22 nt, Human
ucaggaagggugguccacaggg

SEQ ID NO: 509512 - RNA, 22 nt, Human
ucuccaagaaaagaucucagcu

SEQ ID NO: 509513 - RNA, 22 nt, Human
uuuugccugugaauacuaucuu

SEQ ID NO: 509514 - RNA, 22 nt, Human
accuguuuguuaagaaagcuuc

SEQ ID NO: 509515 - RNA, 22 nt, Human
uccucacacuauagaugaggau

SEQ ID NO: 509516 - RNA, 22 nt, Human
aagaugcuuauugcuccugcag

SEQ ID NO: 509517 - RNA, 17 nt, Human
uggaaggcuucaauauu

SEQ ID NO: 509518 - RNA, 22 nt, Human
auucuaaagcuuguggagcuua

SEQ ID NO: 509519 - RNA, 22 nt, Human
guguaaggccccagguucuuua

SEQ ID NO: 509520 - RNA, 22 nt, Human
ccuuagugaaacagaggcaauu

SEQ ID NO: 509521 - RNA, 22 nt, Human
agacagggucuugaucagagcu

SEQ ID NO: 509522 - RNA, 22 nt, Human
aagccuucaguccguugcagag

SEQ ID NO: 509523 - RNA, 22 nt, Human
ugggaccaagucauuucuuuag

SEQ ID NO: 509524 - RNA, 22 nt, Human
aaaguuuuauaugcugcagcga

SEQ ID NO: 509525 - RNA, 22 nt, Human
uucucuggguuaggggaacuau

SEQ ID NO: 509526 - RNA, 22 nt, Human
caggaaagguagucacaaugua

SEQ ID NO: 509527 - RNA, 22 nt, Human
ucuucaaaugcuaguaauauca

SEQ ID NO: 509528 - RNA, 22 nt, Human
gcagugggcaacaagagcugga

SEQ ID NO: 509529 - RNA, 22 nt, Human
gcucuggcuuggggcacucguc

SEQ ID NO: 509530 - RNA, 22 nt, Human
gcagaggggaagcugaggaauu

SEQ ID NO: 509531 - RNA, 18 nt, Human
aagaggaggagcagguug

SEQ ID NO: 509532 - RNA, 22 nt, Human
gugccuggaacuggguaggcug

SEQ ID NO: 509533 - RNA, 22 nt, Human
ucagaggcaucauucauaguua

SEQ ID NO: 509534 - RNA, 22 nt, Human
aaggagucucagcugggccuga

SEQ ID NO: 509535 - RNA, 22 nt, Human
ucccuccuggugagcaggggcu

SEQ ID NO: 509536 - RNA, 20 nt, Human
aaaaucucccagaaacuuau

SEQ ID NO: 509537 - RNA, 22 nt, Human
agcacagguacggagaugcuac

SEQ ID NO: 509538 - RNA, 22 nt, Human
augaggcaggagugcaguggca

SEQ ID NO: 509539 - RNA, 22 nt, Human
uugaaaggaauacagaggccua

SEQ ID NO: 509540 - RNA, 22 nt, Human
ccucacagggccaggccccuca

SEQ ID NO: 509541 - RNA, 22 nt, Human
aagagcuggagcugcuacagga

SEQ ID NO: 509542 - RNA, 22 nt, Human
aaaucugggagcagcucggcca

SEQ ID NO: 509543 - RNA, 22 nt, Human
cugaguggguuucugcuuguca

SEQ ID NO: 509544 - RNA, 22 nt, Human
ugcauguggaccccuggugccu

SEQ ID NO: 509545 - RNA, 23 nt, Human
cugcccugaucuugaucuauugu

SEQ ID NO: 509546 - RNA, 22 nt, Human
uuuucucuacaaaauaaccagc

SEQ ID NO: 509547 - RNA, 22 nt, Human
aaggauuuuuggaaugagaugg

SEQ ID NO: 509548 - RNA, 22 nt, Human
uuaagaauggaaugaggaauuu

SEQ ID NO: 509549 - RNA, 22 nt, Human
uaguguucuaagaacauccaug

SEQ ID NO: 509550 - RNA, 21 nt, Human
auugaaagucaacaaucaguu

SEQ ID NO: 509551 - RNA, 22 nt, Human
uauuagaggaaccaagguggag

SEQ ID NO: 509552 - RNA, 22 nt, Human
cagcagaggaaagcaaaucuaa

SEQ ID NO: 509553 - RNA, 22 nt, Human
uggcuggggccacaguuuuccu

SEQ ID NO: 509554 - RNA, 22 nt, Human
caugcagucaauaaacaugugu

SEQ ID NO: 509555 - RNA, 22 nt, Human
gcagcaaucuucacagugucau

SEQ ID NO: 509556 - RNA, 22 nt, Human
cagaagcacuaggaggaaacgu

SEQ ID NO: 509557 - RNA, 22 nt, Human
caaaugaagggagcugaagucu

SEQ ID NO: 509558 - RNA, 22 nt, Human
agaugcugcuccacaggccagg

SEQ ID NO: 509559 - RNA, 22 nt, Human
uccuuuccaugcuucuagaggc

SEQ ID NO: 509560 - RNA, 23 nt, Human
ugccucugccucccuagucugca

SEQ ID NO: 509561 - RNA, 22 nt, Human
aggcacugaaagguggccagag

SEQ ID NO: 509562 - RNA, 19 nt, Human
ccagagagcuagguacaga

SEQ ID NO: 509563 - RNA, 22 nt, Human
gaaggccuagggaugcucugcg

SEQ ID NO: 509564 - RNA, 21 nt, Human
guggcccugguguggcugcac

SEQ ID NO: 509565 - RNA, 22 nt, Human
ggaugcaggacggcauggaugu

SEQ ID NO: 509566 - RNA, 22 nt, Human
ugaguagagaauucagcuaagg

SEQ ID NO: 509567 - RNA, 21 nt, Human
ggcagccucuguggaagggga

SEQ ID NO: 509568 - RNA, 22 nt, Human
cagaaacuucuggugucaaaua

SEQ ID NO: 509569 - RNA, 22 nt, Human
cuggucacuggucucauccagc

SEQ ID NO: 509570 - RNA, 21 nt, Human
agcagagugcuuugacuuugu

SEQ ID NO: 509571 - RNA, 22 nt, Human
uccuggcuccuggagaccugcu

SEQ ID NO: 509572 - RNA, 22 nt, Human
ucuaccuauuucuucuauuggu

SEQ ID NO: 509573 - RNA, 22 nt, Human
aguguccccuccaagggccugg

SEQ ID NO: 509574 - RNA, 19 nt, Human
gagcccucuccauggccac

SEQ ID NO: 509575 - RNA, 22 nt, Human
cagcuugggaguuugguuuuau

SEQ ID NO: 509576 - RNA, 22 nt, Human
agaauaauacugaaaugcugaa

SEQ ID NO: 509577 - RNA, 22 nt, Human
agugucugaugcacaguugucc

SEQ ID NO: 509578 - RNA, 22 nt, Human
aggucugguauuuuucuauacu

SEQ ID NO: 509579 - RNA, 22 nt, Human
ccagugcagucccccugaacug

SEQ ID NO: 509580 - RNA, 22 nt, Human
agguucuugacucuaccuucca

SEQ ID NO: 509581 - RNA, 22 nt, Human
uguguacaucucuucucacauu

SEQ ID NO: 509582 - RNA, 22 nt, Human
cacagaggcaaccuucuggggu

SEQ ID NO: 509583 - RNA, 22 nt, Human
cauuugcugaggccuucagagg

SEQ ID NO: 509584 - RNA, 20 nt, Human
uguauauuuucugguguaaa

SEQ ID NO: 509585 - RNA, 22 nt, Human
cauaaauucaguucugccucuu

SEQ ID NO: 509586 - RNA, 22 nt, Human
uggaggcauuugauguucauaa

SEQ ID NO: 509587 - RNA, 22 nt, Human
ggaccaggccagccucccugcg

SEQ ID NO: 509588 - RNA, 23 nt, Human
cuauggaauaccaaugauucuca

SEQ ID NO: 509589 - RNA, 22 nt, Human
uuuagggaauagaagaucugaa

SEQ ID NO: 509590 - RNA, 22 nt, Human
auucuccaucaccacuggcacu

SEQ ID NO: 509591 - RNA, 22 nt, Human
augaaauguauucagauaugua

SEQ ID NO: 509592 - RNA, 23 nt, Human
gggaccagcuagggcugugaccu

SEQ ID NO: 509593 - RNA, 22 nt, Human
aggcucugggaagcagugaguu

SEQ ID NO: 509594 - RNA, 22 nt, Human
uuauuuaggagaaggaacccug

SEQ ID NO: 509595 - RNA, 22 nt, Human
auauggaaauagcaauaugguu

SEQ ID NO: 509596 - RNA, 22 nt, Human
ggcucccugccuguccucaguc

SEQ ID NO: 509597 - RNA, 22 nt, Human
uaauuucuagggacuaaggugc

SEQ ID NO: 509598 - RNA, 22 nt, Human
cuggagucuucagcuugcugcc

SEQ ID NO: 509599 - RNA, 22 nt, Human
agaccauggccauccuaggaaa

SEQ ID NO: 509600 - RNA, 22 nt, Human
aauagugcuuacauuaucauga

SEQ ID NO: 509601 - RNA, 22 nt, Human
aggaagcucggagagggcaaau

SEQ ID NO: 509602 - RNA, 22 nt, Human
ugggcucucuggcaggaaggcu

SEQ ID NO: 509603 - RNA, 19 nt, Human
gcuggggccugaccagaca

SEQ ID NO: 509604 - RNA, 22 nt, Human
ugcugccucagcuuccugggcu

SEQ ID NO: 509605 - RNA, 22 nt, Human
aaccagagagucuucuucauug

SEQ ID NO: 509606 - RNA, 22 nt, Human
aggccagcccucaccuguguuc

SEQ ID NO: 509607 - RNA, 17 nt, Human
agcuccuggggucuuua

SEQ ID NO: 509608 - RNA, 22 nt, Human
ucugggcugcuucagccuucgc

SEQ ID NO: 509609 - RNA, 22 nt, Human
ugugucccuuggaaccucagcu

SEQ ID NO: 509610 - RNA, 21 nt, Human
gcugucucuggcuccugggaa

SEQ ID NO: 509611 - RNA, 22 nt, Human
uccuggcucuaaguccugagug

SEQ ID NO: 509612 - RNA, 22 nt, Human
uaaugcacagaauugacauggg

SEQ ID NO: 509613 - RNA, 22 nt, Human
ccagggcaacgcugucucagag

SEQ ID NO: 509614 - RNA, 22 nt, Human
gcuucagcuuugucuccuuggg

SEQ ID NO: 509615 - RNA, 22 nt, Human
uaaagccacgcuggaaaucagg

SEQ ID NO: 509616 - RNA, 22 nt, Human
gcuugggauaugcugauguaaa

SEQ ID NO: 509617 - RNA, 22 nt, Human
ggcaggaggaagaguuagcacc

SEQ ID NO: 509618 - RNA, 22 nt, Human
ggcggggucugagcgccgcgcc

SEQ ID NO: 509619 - RNA, 22 nt, Human
gaugaagcuauuugguuggcac

SEQ ID NO: 509620 - RNA, 22 nt, Human
uacuguacucaacaugugaguu

SEQ ID NO: 509621 - RNA, 22 nt, Human
uggcaaggccacaggugcaguu

SEQ ID NO: 509622 - RNA, 20 nt, Human
acaauagauuugagcaaagu

SEQ ID NO: 509623 - RNA, 22 nt, Human
ucugucuuagccaucucaggcu

SEQ ID NO: 509624 - RNA, 22 nt, Human
gggagauggcucagaggccgcg

SEQ ID NO: 509625 - RNA, 22 nt, Human
agggcuuuguuuaggugaccac

SEQ ID NO: 509626 - RNA, 21 nt, Human
ugacuaauugugauaaagugc

SEQ ID NO: 509627 - RNA, 22 nt, Human
cuggaucuaaagguggauguag

SEQ ID NO: 509628 - RNA, 22 nt, Human
augccaaauucuacuuucagca

SEQ ID NO: 509629 - RNA, 19 nt, Human
uguuuuguuaaagcagucc

SEQ ID NO: 509630 - RNA, 22 nt, Human
ucugaggcuauguucaggcuaa

SEQ ID NO: 509631 - RNA, 22 nt, Human
gcaguguucuaaauugggugug

SEQ ID NO: 509632 - RNA, 22 nt, Human
caggaaauuuauguucuacuua

SEQ ID NO: 509633 - RNA, 23 nt, Human
auaagccuuuucuuucugcccca

SEQ ID NO: 509634 - RNA, 22 nt, Human
uacugacacaaagccaaucccu

SEQ ID NO: 509635 - RNA, 22 nt, Human
agucuucagagaaauuaacucu

SEQ ID NO: 509636 - RNA, 22 nt, Human
uaguuaaagcccuaaauugaua

SEQ ID NO: 509637 - RNA, 22 nt, Human
cugucugcuagaacaucuauac

SEQ ID NO: 509638 - RNA, 22 nt, Human
aaagaacuuauccuagaauuug

SEQ ID NO: 509639 - RNA, 22 nt, Human
ucucucagaggaagaggcagug

SEQ ID NO: 509640 - RNA, 21 nt, Human
ucagggcagcugcucuucaga

SEQ ID NO: 509641 - RNA, 22 nt, Human
ucuuacagaaaauagauaacau

SEQ ID NO: 509642 - RNA, 22 nt, Human
cugugcugauucagcacaggcc

SEQ ID NO: 509643 - RNA, 23 nt, Human
auguuuuaugucucuagcugcca

SEQ ID NO: 509644 - RNA, 22 nt, Human
ggaguggccucuccugugcagg

SEQ ID NO: 509645 - RNA, 22 nt, Human
agugccuggcacauggaaggug

SEQ ID NO: 509646 - RNA, 22 nt, Human
uuuauuuggcauccagggagaa

SEQ ID NO: 509647 - RNA, 22 nt, Human
cuggcucccucgcugaggugcu

SEQ ID NO: 509648 - RNA, 22 nt, Human
ccagcuggcaggagagucaggg

SEQ ID NO: 509649 - RNA, 22 nt, Human
guaggcagguggaggagugaag

SEQ ID NO: 509650 - RNA, 22 nt, Human
uggcugaguuacgaacagagca

SEQ ID NO: 509651 - RNA, 22 nt, Human
ucagggcagccuaaggcaccuc

SEQ ID NO: 509652 - RNA, 20 nt, Human
accucugcaucaauccuuug

SEQ ID NO: 509653 - RNA, 22 nt, Human
aucuuuuacauuacugcccaga

SEQ ID NO: 509654 - RNA, 22 nt, Human
ugccugagugauguggcagcca

SEQ ID NO: 509655 - RNA, 22 nt, Human
ucucugguuauuaacuaacucc

SEQ ID NO: 509656 - RNA, 22 nt, Human
cugaagaugucugagaugcuca

SEQ ID NO: 509657 - RNA, 22 nt, Human
gcugggcuggaaggccaaggca

SEQ ID NO: 509658 - RNA, 22 nt, Human
uuugcauugcagugguuuacag

SEQ ID NO: 509659 - RNA, 22 nt, Human
gcaggaagggaaagguugacuc

SEQ ID NO: 509660 - RNA, 22 nt, Human
aauagaggagcuuuggacuccc

SEQ ID NO: 509661 - RNA, 19 nt, Human
agccaggguccagacaugu

SEQ ID NO: 509662 - RNA, 22 nt, Human
ucauccaguuguggagagggaa

SEQ ID NO: 509663 - RNA, 19 nt, Human
uucuaccuuacuguaggcu

SEQ ID NO: 509664 - RNA, 22 nt, Human
acagccagguaaaggcauggca

SEQ ID NO: 509665 - RNA, 19 nt, Human
guggccucggagcgcgcgg

SEQ ID NO: 509666 - RNA, 22 nt, Human
cauguuaaugaauuuuugcagu

SEQ ID NO: 509667 - RNA, 22 nt, Human
cagucccacaagaucuccacaa

SEQ ID NO: 509668 - RNA, 22 nt, Human
aucaguuuuuauuaauguagcu

SEQ ID NO: 509669 - RNA, 22 nt, Human
agaggaaaaugaguuccagaau

SEQ ID NO: 509670 - RNA, 22 nt, Human
gagguaacaacugaaaugagaa

SEQ ID NO: 509671 - RNA, 22 nt, Human
cuggaaagugucuccauccugg

SEQ ID NO: 509672 - RNA, 22 nt, Human
gggcagguguuuccaaggugag

SEQ ID NO: 509673 - RNA, 22 nt, Human
agaccacagucaggcuccuggu

SEQ ID NO: 509674 - RNA, 22 nt, Human
guuauaaaugacugcaaaaguu

SEQ ID NO: 509675 - RNA, 21 nt, Human
uggcucuggguaggagagugc

SEQ ID NO: 509676 - RNA, 22 nt, Human
gggggcuaccgucucuggagcu

SEQ ID NO: 509677 - RNA, 21 nt, Human
uuucuaagugcuugguuuggg

SEQ ID NO: 509678 - RNA, 22 nt, Human
gaaagggagugaagaugguaua

SEQ ID NO: 509679 - RNA, 22 nt, Human
gaaggacccucuggggucucag

SEQ ID NO: 509680 - RNA, 22 nt, Human
ucacaacuugaagcugauuuaa

SEQ ID NO: 509681 - RNA, 22 nt, Human
acuuagaacaggcagaauucca

SEQ ID NO: 509682 - RNA, 22 nt, Human
ugauucaacuuucauaacaaaa

SEQ ID NO: 509683 - RNA, 22 nt, Human
uauuuaauuagugauuguagag

SEQ ID NO: 509684 - RNA, 22 nt, Human
uaauagaauaguggaaacauug

SEQ ID NO: 509685 - RNA, 22 nt, Human
uugaagauuauucuauuaaaag

SEQ ID NO: 509686 - RNA, 22 nt, Human
agggaggauaguagucaguuua

SEQ ID NO: 509687 - RNA, 22 nt, Human
ggcucuggcuacuccacccugu

SEQ ID NO: 509688 - RNA, 22 nt, Human
ggccucucuggcauggcugccc

SEQ ID NO: 509689 - RNA, 22 nt, Human
uucaaaaguaaucaguauuaga

SEQ ID NO: 509690 - RNA, 22 nt, Human
agguuuauguuuggugcaggag

SEQ ID NO: 509691 - RNA, 22 nt, Human
cccuggcugcuuguagucuggc

SEQ ID NO: 509692 - RNA, 22 nt, Human
gagucagguccguggacaguua

SEQ ID NO: 509693 - RNA, 22 nt, Human
ugaagcaggaaacuucuuguuu

SEQ ID NO: 509694 - RNA, 22 nt, Human
ucagggacauuuagacacugau

SEQ ID NO: 509695 - RNA, 22 nt, Human
gguuucaacuucaaccucucca

SEQ ID NO: 509696 - RNA, 22 nt, Human
ccucugggagacugcuacugag

SEQ ID NO: 509697 - RNA, 22 nt, Human
ucauugcacuccagccugggca

SEQ ID NO: 509698 - RNA, 22 nt, Human
ugcaggugcguuuucaagccuc

SEQ ID NO: 509699 - RNA, 22 nt, Human
cucuucaaaagucuaauccuua

SEQ ID NO: 509700 - RNA, 22 nt, Human
cguggcuggggaggucagccag

SEQ ID NO: 509701 - RNA, 17 nt, Human
uuacaacgucaucucug

SEQ ID NO: 509702 - RNA, 22 nt, Human
ugagaaucauccagaggcuucu

SEQ ID NO: 509703 - RNA, 22 nt, Human
agucacauuugggggugucaaa

SEQ ID NO: 509704 - RNA, 22 nt, Human
ccagccacagcuuccagcuccu

SEQ ID NO: 509705 - RNA, 22 nt, Human
aggacuggugccagacaaggua

SEQ ID NO: 509706 - RNA, 22 nt, Human
auagacauggucuuuugucauu

SEQ ID NO: 509707 - RNA, 22 nt, Human
gccugccugaaggcuguaccag

SEQ ID NO: 509708 - RNA, 22 nt, Human
ggaggggaggauuaaugacaaa

SEQ ID NO: 509709 - RNA, 22 nt, Human
caaugaaaaugaggacuccugu

SEQ ID NO: 509710 - RNA, 22 nt, Human
cuggcccuauuccaggccuucc

SEQ ID NO: 509711 - RNA, 22 nt, Human
aucuaagaguuaacaucaagaa

SEQ ID NO: 509712 - RNA, 22 nt, Human
agcccagcaaagggagguucag

SEQ ID NO: 509713 - RNA, 22 nt, Human
uccaggaguggggcagaggucu

SEQ ID NO: 509714 - RNA, 22 nt, Human
ugugcagagcccacaggcagcu

SEQ ID NO: 509715 - RNA, 22 nt, Human
agaaucaauuagauucuaugag

SEQ ID NO: 509716 - RNA, 22 nt, Human
ccuggagccccucuggccagcc

SEQ ID NO: 509717 - RNA, 22 nt, Human
gcugccuuuugcuccucccacc

SEQ ID NO: 509718 - RNA, 22 nt, Human
ugggccuguugggguugaguua

SEQ ID NO: 509719 - RNA, 22 nt, Human
gacaggcuuugagucccagaac

SEQ ID NO: 509720 - RNA, 22 nt, Human
aaggcugaccaguuuacacuuu

SEQ ID NO: 509721 - RNA, 22 nt, Human
cauguguguccaugugacuaag

SEQ ID NO: 509722 - RNA, 22 nt, Human
uugcuuucccaaggcagaacau

SEQ ID NO: 509723 - RNA, 22 nt, Human
caaggaaaaagcgagcucgggg

SEQ ID NO: 509724 - RNA, 22 nt, Human
ggcucuggggccuccucccuug

SEQ ID NO: 509725 - RNA, 22 nt, Human
acacuagcuaaaugcugauuaa

SEQ ID NO: 509726 - RNA, 22 nt, Human
cuucucuaucuuuggcacauca

SEQ ID NO: 509727 - RNA, 22 nt, Human
uagcugccagaccauucuuacu

SEQ ID NO: 509728 - RNA, 22 nt, Human
uccuuccucggggacccagauc

SEQ ID NO: 509729 - RNA, 22 nt, Human
caaagacugcauaacacaugaa

SEQ ID NO: 509730 - RNA, 22 nt, Human
ugguccaggguguaguacagag

SEQ ID NO: 509731 - RNA, 22 nt, Human
ggugggcacauucagucucugu

SEQ ID NO: 509732 - RNA, 22 nt, Human
cugucucagcaggaagucauca

SEQ ID NO: 509733 - RNA, 22 nt, Human
ccauaaucguguguuaaauaau

SEQ ID NO: 509734 - RNA, 22 nt, Human
acucuggccaggugcgguaugu

SEQ ID NO: 509735 - RNA, 22 nt, Human
ccuggcagcuaagugcuuugag

SEQ ID NO: 509736 - RNA, 22 nt, Human
acagcagagacacucaggaggc

SEQ ID NO: 509737 - RNA, 22 nt, Human
ucagccuugcuucuggacuggu

SEQ ID NO: 509738 - RNA, 22 nt, Human
gaagccuuaucagucacuuaua

SEQ ID NO: 509739 - RNA, 22 nt, Human
ccagccagucccgcaugaccgc

SEQ ID NO: 509740 - RNA, 22 nt, Human
ucccuggacagccuugccuggg

SEQ ID NO: 509741 - RNA, 22 nt, Human
gcugcccauuccacuggauggu

SEQ ID NO: 509742 - RNA, 22 nt, Human
ucccugggaccggcagcucaca

SEQ ID NO: 509743 - RNA, 22 nt, Human
guccugugugagugcaccaccu

SEQ ID NO: 509744 - RNA, 22 nt, Human
cgguccagagcuaguucauugc

SEQ ID NO: 509745 - RNA, 22 nt, Human
cugggcucaagaagucuucccu

SEQ ID NO: 509746 - RNA, 22 nt, Human
gcuucccacagcuggacugggg

SEQ ID NO: 509747 - RNA, 22 nt, Human
gccaaaucuggauuuagcaaga

SEQ ID NO: 509748 - RNA, 19 nt, Human
gccaggcucuuauucugug

SEQ ID NO: 509749 - RNA, 22 nt, Human
cuccagggagcuuggaaagacc

SEQ ID NO: 509750 - RNA, 22 nt, Human
ccuuuugcucucccauccagaa

SEQ ID NO: 509751 - RNA, 22 nt, Human
ggcuuccuggagaaggucugag

SEQ ID NO: 509752 - RNA, 22 nt, Human
ucaggggacagccagcuggagg

SEQ ID NO: 509753 - RNA, 22 nt, Human
ucaggaggccaccaggaccugu

SEQ ID NO: 509754 - RNA, 22 nt, Human
ccagagccucgcccggagccuc

SEQ ID NO: 509755 - RNA, 22 nt, Human
acagcagccugcagcccugugu

SEQ ID NO: 509756 - RNA, 20 nt, Human
ugcauuaaguggcauugagc

SEQ ID NO: 509757 - RNA, 22 nt, Human
uuuauuagauuaucaaagaggu

SEQ ID NO: 509758 - RNA, 22 nt, Human
uuccuacagcccugaaucucua

SEQ ID NO: 509759 - RNA, 22 nt, Human
cuugaauccaaaugggagauga

SEQ ID NO: 509760 - RNA, 22 nt, Human
ggcccuuccucuugugcuggca

SEQ ID NO: 509761 - RNA, 22 nt, Human
acaguguugaggugcuuguuuc

SEQ ID NO: 509762 - RNA, 22 nt, Human
aaugucugagucucuguauccc

SEQ ID NO: 509763 - RNA, 22 nt, Human
cuggcccuguggaggcaggaac

SEQ ID NO: 509764 - RNA, 22 nt, Human
agaggucagaacaggaaagugu

SEQ ID NO: 509765 - RNA, 22 nt, Human
ugauauggaaggaagauguaca

SEQ ID NO: 509766 - RNA, 22 nt, Human
auauuguguguacaaguaguua

SEQ ID NO: 509767 - RNA, 22 nt, Human
uggcuggcguuggggccaguga

SEQ ID NO: 509768 - RNA, 22 nt, Human
accuuuuuguucuguucucagc

SEQ ID NO: 509769 - RNA, 21 nt, Human
uagggcucuauuuuuauuuca

SEQ ID NO: 509770 - RNA, 22 nt, Human
gggacaauggaggccucucucc

SEQ ID NO: 509771 - RNA, 22 nt, Human
aguggcaggcggagauguagga

SEQ ID NO: 509772 - RNA, 22 nt, Human
cuccaggggccagaagccuggc

SEQ ID NO: 509773 - RNA, 22 nt, Human
uccuagaagauggaucagagaa

SEQ ID NO: 509774 - RNA, 22 nt, Human
auuauaggcuugagccaccgug

SEQ ID NO: 509775 - RNA, 22 nt, Human
ccugacgaaaggcgugcuggag

SEQ ID NO: 509776 - RNA, 20 nt, Human
aagcaauauagugcaaaugu

SEQ ID NO: 509777 - RNA, 22 nt, Human
cugcccugugguuguggguucu

SEQ ID NO: 509778 - RNA, 22 nt, Human
cuuuggaagugaccacaauccu

SEQ ID NO: 509779 - RNA, 22 nt, Human
aguuuuguaauucucaaaaaua

SEQ ID NO: 509780 - RNA, 22 nt, Human
acaguuugcacuguucaucaaa

SEQ ID NO: 509781 - RNA, 22 nt, Human
auugacaaauggauguugacau

SEQ ID NO: 509782 - RNA, 22 nt, Human
acagucucuccacacugcaggg

SEQ ID NO: 509783 - RNA, 20 nt, Human
agcuuugguuaagccagugg

SEQ ID NO: 509784 - RNA, 22 nt, Human
uuucuaaguaaacacagcauac

SEQ ID NO: 509785 - RNA, 22 nt, Human
auucucaaacaagugguuugau

SEQ ID NO: 509786 - RNA, 18 nt, Human
ugaggccagagugggcau

SEQ ID NO: 509787 - RNA, 22 nt, Human
acuugauuuugaaccuuucuac

SEQ ID NO: 509788 - RNA, 22 nt, Human
ggcugagcaauuuugaugacau

SEQ ID NO: 509789 - RNA, 22 nt, Human
cagcagcucacucagguggcuc

SEQ ID NO: 509790 - RNA, 22 nt, Human
cacauacaugcacaccuaaaua

SEQ ID NO: 509791 - RNA, 22 nt, Human
aaggaaggaauugaucaugcgc

SEQ ID NO: 509792 - RNA, 22 nt, Human
accugggaguaugcagugguga

SEQ ID NO: 509793 - RNA, 22 nt, Human
ggagccccaauugagcaguacg

SEQ ID NO: 509794 - RNA, 22 nt, Human
uagagcaguggguaccauggca

SEQ ID NO: 509795 - RNA, 22 nt, Human
ugggagaagcagcagccaagug

SEQ ID NO: 509796 - RNA, 22 nt, Human
ugguuuauuucucugaaagguu

SEQ ID NO: 509797 - RNA, 22 nt, Human
caggccuggggcuggcuuccag

SEQ ID NO: 509798 - RNA, 22 nt, Human
ugguuucugcccucagagcuca

SEQ ID NO: 509799 - RNA, 22 nt, Human
ugaggauggaaugcugugcaag

SEQ ID NO: 509800 - RNA, 22 nt, Human
cccacacauuuuucacuuaccg

SEQ ID NO: 509801 - RNA, 22 nt, Human
uucuuucucuacuagcagagcu

SEQ ID NO: 509802 - RNA, 22 nt, Human
ucuuuacacaagacaagaauaa

SEQ ID NO: 509803 - RNA, 22 nt, Human
gccaggcauguccucugcagaa

SEQ ID NO: 509804 - RNA, 22 nt, Human
gaccauuuuuacagagcauuca

SEQ ID NO: 509805 - RNA, 22 nt, Human
aguucucagaauugcaccucaa

SEQ ID NO: 509806 - RNA, 22 nt, Human
ucuguccauucagccauccauc

SEQ ID NO: 509807 - RNA, 22 nt, Human
cucuggcuccauuucccuaugu

SEQ ID NO: 509808 - RNA, 22 nt, Human
ugccccucagggaacggguauc

SEQ ID NO: 509809 - RNA, 21 nt, Human
gagugcaggucugaugccauc

SEQ ID NO: 509810 - RNA, 22 nt, Human
uuagcuaaacuguaacuagaau

SEQ ID NO: 509811 - RNA, 22 nt, Human
uugcauugcuuggucuucaaga

SEQ ID NO: 509812 - RNA, 22 nt, Human
uacaugaacaaaauagcagaaa

SEQ ID NO: 509813 - RNA, 22 nt, Human
ugcuuuaucugugagaaccuga

SEQ ID NO: 509814 - RNA, 22 nt, Human
acaguucaagucuuagacaaca

SEQ ID NO: 509815 - RNA, 22 nt, Human
gaacagaagaggcuggugccac

SEQ ID NO: 509816 - RNA, 22 nt, Human
augcccugcugccaucuggccg

SEQ ID NO: 509817 - RNA, 22 nt, Human
aguagcauaaauagugguagua

SEQ ID NO: 509818 - RNA, 19 nt, Human
cucucuggcggugucugcg

SEQ ID NO: 509819 - RNA, 22 nt, Human
uccuggaggggacagcaugggc

SEQ ID NO: 509820 - RNA, 22 nt, Human
cuuauuagaaagaaaagacaug

SEQ ID NO: 509821 - RNA, 22 nt, Human
aaguauuauuuaacaaauuugu

SEQ ID NO: 509822 - RNA, 20 nt, Human
gaagcagcuucauguagaca

SEQ ID NO: 509823 - RNA, 20 nt, Human
ggcuccuucuuucauggccc

SEQ ID NO: 509824 - RNA, 22 nt, Human
uauuccuauggccacugcuacu

SEQ ID NO: 509825 - RNA, 22 nt, Human
cucagagaguuaagugaauuac

SEQ ID NO: 509826 - RNA, 22 nt, Human
uggccccugaggagcgucagcc

SEQ ID NO: 509827 - RNA, 22 nt, Human
agccuggccaggccugcccagg

SEQ ID NO: 509828 - RNA, 22 nt, Human
aggagcugagucagcccgacag

SEQ ID NO: 509829 - RNA, 22 nt, Human
ggagaucuugcuugaaggcaug

SEQ ID NO: 509830 - RNA, 22 nt, Human
gccucugcccuccugggacugc

SEQ ID NO: 509831 - RNA, 22 nt, Human
caggcacuggccagucagcaca

SEQ ID NO: 509832 - RNA, 22 nt, Human
agugaaaugauaguguaaauac

SEQ ID NO: 509833 - RNA, 22 nt, Human
uauuaggguuuugaagguuugu

SEQ ID NO: 509834 - RNA, 22 nt, Human
gcagcuggccccuuuccuuguu

SEQ ID NO: 509835 - RNA, 22 nt, Human
agccccuugcugcccucuagag

SEQ ID NO: 509836 - RNA, 22 nt, Human
ccuggaugauccaugucaugga

SEQ ID NO: 509837 - RNA, 22 nt, Human
guagcugauccugaggacaggg

SEQ ID NO: 509838 - RNA, 22 nt, Human
ucugggcuuuugcacuggccau

SEQ ID NO: 509839 - RNA, 22 nt, Human
cuggaaggagaaggaggcugug

SEQ ID NO: 509840 - RNA, 22 nt, Human
caggaaauaucuccuggcagag

SEQ ID NO: 509841 - RNA, 21 nt, Human
gggaaacucugcuuaacagag

SEQ ID NO: 509842 - RNA, 16 nt, Human
gaggggagcaguaggc

SEQ ID NO: 509843 - RNA, 22 nt, Human
uagaaguggcaacacucagaaa

SEQ ID NO: 509844 - RNA, 22 nt, Human
acguuuucuagagaauaugcag

SEQ ID NO: 509845 - RNA, 22 nt, Human
caggguggaagcuguagagugg

SEQ ID NO: 509846 - RNA, 22 nt, Human
cucuugcagauaccuugaagga

SEQ ID NO: 509847 - RNA, 22 nt, Human
gaauaauagcagaaauuagcag

SEQ ID NO: 509848 - RNA, 22 nt, Human
ugggcugcugucugcacaugcu

SEQ ID NO: 509849 - RNA, 22 nt, Human
gcaggaugagugaguacauuua

SEQ ID NO: 509850 - RNA, 22 nt, Human
aacagcuagaauucuacuggcu

SEQ ID NO: 509851 - RNA, 22 nt, Human
uugcugaaguuaaugcuugcaa

SEQ ID NO: 509852 - RNA, 22 nt, Human
ggagcuguugcgcaugcgcucg

SEQ ID NO: 509853 - RNA, 19 nt, Human
auuagcaugcuugaggaug

SEQ ID NO: 509854 - RNA, 22 nt, Human
agucccagcuucccccaugcag

SEQ ID NO: 509855 - RNA, 22 nt, Human
auggcagggcccuuggcuccca

SEQ ID NO: 509856 - RNA, 22 nt, Human
uuucuaagaaaguaaugguuau

SEQ ID NO: 509857 - RNA, 22 nt, Human
aaugagaaaacacagaggaggu

SEQ ID NO: 509858 - RNA, 22 nt, Human
ggaccuggcaauuugcaucucu

SEQ ID NO: 509859 - RNA, 22 nt, Human
uuucagaguuaguagagcaugu

SEQ ID NO: 509860 - RNA, 22 nt, Human
ggcguuucaccauguugaccag

SEQ ID NO: 509861 - RNA, 22 nt, Human
uagaauaugauuaauuuucuua

SEQ ID NO: 509862 - RNA, 22 nt, Human
uucagacaauaagagucaucuc

SEQ ID NO: 509863 - RNA, 22 nt, Human
aaugcacaugccacauguggua

SEQ ID NO: 509864 - RNA, 22 nt, Human
caugucagggaagagagucagu

SEQ ID NO: 509865 - RNA, 18 nt, Human
ccuaggaaagggaggcaa

SEQ ID NO: 509866 - RNA, 17 nt, Human
ccuuagggcaguguggu

SEQ ID NO: 509867 - RNA, 22 nt, Human
caggaaaggugugucaugaugg

SEQ ID NO: 509868 - RNA, 22 nt, Human
uugauauucugagaagcugaag

SEQ ID NO: 509869 - RNA, 22 nt, Human
ugccugggguuggcaaacugcu

SEQ ID NO: 509870 - RNA, 22 nt, Human
aaccaggaauugcagggcugca

SEQ ID NO: 509871 - RNA, 22 nt, Human
cagugcaguuucccagaugcug

SEQ ID NO: 509872 - RNA, 19 nt, Human
ccaaaggaaguuucccucc

SEQ ID NO: 509873 - RNA, 22 nt, Human
cucugagggcucgagggacgcg

SEQ ID NO: 509874 - RNA, 22 nt, Human
cagcucccaguggcagcuccuu

SEQ ID NO: 509875 - RNA, 22 nt, Human
ugcucccaaacgaccuacugug

SEQ ID NO: 509876 - RNA, 22 nt, Human
cagggcugagaauuuagagaca

SEQ ID NO: 509877 - RNA, 22 nt, Human
gugggggcaggcagugcuagga

SEQ ID NO: 509878 - RNA, 22 nt, Human
aaagcugccaaggagaauacua

SEQ ID NO: 509879 - RNA, 22 nt, Human
ccaucuccacugucccugucaa

SEQ ID NO: 509880 - RNA, 22 nt, Human
uaugcacaguuacaagaauauc

SEQ ID NO: 509881 - RNA, 22 nt, Human
uggggagagguaucauugagau

SEQ ID NO: 509882 - RNA, 22 nt, Human
acaggucugcaguaacugggaa

SEQ ID NO: 509883 - RNA, 21 nt, Human
ggucagggggugccuccaggu

SEQ ID NO: 509884 - RNA, 22 nt, Human
ugaggggcagagagguguccag

SEQ ID NO: 509885 - RNA, 22 nt, Human
ucauuuguggaagugauugugg

SEQ ID NO: 509886 - RNA, 22 nt, Human
guaggcagugguuggaagagaa

SEQ ID NO: 509887 - RNA, 22 nt, Human
cagggugccucccgcucgccgg

SEQ ID NO: 509888 - RNA, 22 nt, Human
auuuucugguugagguuuaaca

SEQ ID NO: 509889 - RNA, 20 nt, Human
aaaaacaguaaugcugaaga

SEQ ID NO: 509890 - RNA, 23 nt, Human
ggaagcucacguaguccugcacu

SEQ ID NO: 509891 - RNA, 22 nt, Human
ugcaccugagaggucucugagg

SEQ ID NO: 509892 - RNA, 22 nt, Human
ugaguucuaguggcugcagauu

SEQ ID NO: 509893 - RNA, 22 nt, Human
gccucaguggcuuuaggaguuc

SEQ ID NO: 509894 - RNA, 22 nt, Human
gccucuggaguugcuuguaaau

SEQ ID NO: 509895 - RNA, 22 nt, Human
cacaucccuggaguuacccagu

SEQ ID NO: 509896 - RNA, 22 nt, Human
accuuagcuguuaaaacuaagu

SEQ ID NO: 509897 - RNA, 22 nt, Human
cucccucugucuuguccagaaa

SEQ ID NO: 509898 - RNA, 17 nt, Human
cagugaggccuuuccuc

SEQ ID NO: 509899 - RNA, 22 nt, Human
ucauaaaacacaccagguaguu

SEQ ID NO: 509900 - RNA, 22 nt, Human
aagaaauguagagccuaguaaa

SEQ ID NO: 509901 - RNA, 22 nt, Human
ccucuggccaucccccauuaag

SEQ ID NO: 509902 - RNA, 22 nt, Human
uggccugacugucaggcuguau

SEQ ID NO: 509903 - RNA, 19 nt, Human
uuuuccugccucauuguuu

SEQ ID NO: 509904 - RNA, 22 nt, Human
ccucuggcuguaccacuggcac

SEQ ID NO: 509905 - RNA, 22 nt, Human
ugugucagaaggcaauggggau

SEQ ID NO: 509906 - RNA, 22 nt, Human
ucugccugagggagcugaggaa

SEQ ID NO: 509907 - RNA, 22 nt, Human
cacacaugguagcagguacaag

SEQ ID NO: 509908 - RNA, 22 nt, Human
augcaguacugauacaugccac

SEQ ID NO: 509909 - RNA, 22 nt, Human
cugccagcaaugugaccaugcu

SEQ ID NO: 509910 - RNA, 22 nt, Human
gcuggcuguguuccuucugcca

SEQ ID NO: 509911 - RNA, 22 nt, Human
uggacuggaaugcugauccucu

SEQ ID NO: 509912 - RNA, 22 nt, Human
ccucagugaccuauugcauuca

SEQ ID NO: 509913 - RNA, 22 nt, Human
ugucugaguggugcaaggcuga

SEQ ID NO: 509914 - RNA, 20 nt, Human
cuugauucuuugaugaggua

SEQ ID NO: 509915 - RNA, 22 nt, Human
cugucauuuaagacauucugga

SEQ ID NO: 509916 - RNA, 22 nt, Human
uggcagggugggcuucagcccc

SEQ ID NO: 509917 - RNA, 22 nt, Human
cuuguccagauguuuguuaggu

SEQ ID NO: 509918 - RNA, 22 nt, Human
cacacacuggagcaaggagaug

SEQ ID NO: 509919 - RNA, 22 nt, Human
uggccaguuugcucaggcaguc

SEQ ID NO: 509920 - RNA, 22 nt, Human
gcaggggcugagcaccagcggg

SEQ ID NO: 509921 - RNA, 18 nt, Human
aucucccauuggccaagg

SEQ ID NO: 509922 - RNA, 22 nt, Human
cugcucugaguauuaacggagg

SEQ ID NO: 509923 - RNA, 22 nt, Human
ccaggaccuggagcucuaugaa

SEQ ID NO: 509924 - RNA, 22 nt, Human
gcagcaucagguucacugcgug

SEQ ID NO: 509925 - RNA, 22 nt, Human
aggaaagaaaggaggugcauuu

SEQ ID NO: 509926 - RNA, 22 nt, Human
augcagcugugggcaagaaaug

SEQ ID NO: 509927 - RNA, 22 nt, Human
guuauguaucuugauugggugg

SEQ ID NO: 509928 - RNA, 19 nt, Human
aggguccagggagcggcuc

SEQ ID NO: 509929 - RNA, 22 nt, Human
cugggcugucccaaccccaucc

SEQ ID NO: 509930 - RNA, 22 nt, Human
ucugggucuggcugcuggugca

SEQ ID NO: 509931 - RNA, 22 nt, Human
gcuggaccaggugugcacaggc

SEQ ID NO: 509932 - RNA, 22 nt, Human
acagguguacaaugcaugacag

SEQ ID NO: 509933 - RNA, 22 nt, Human
aagacauuacuggaaucugacu

SEQ ID NO: 509934 - RNA, 22 nt, Human
agagcacaaauuaguuggucuu

SEQ ID NO: 509935 - RNA, 22 nt, Human
gcuggcagguaaagccccgggg

SEQ ID NO: 509936 - RNA, 22 nt, Human
caagaauauaaauacuuucaaa

SEQ ID NO: 509937 - RNA, 22 nt, Human
ccaaggcuggagugcaguggcg

SEQ ID NO: 509938 - RNA, 22 nt, Human
aagccaggggcugcuuaggaga

SEQ ID NO: 509939 - RNA, 22 nt, Human
cugugcuggagaugggccagag

SEQ ID NO: 509940 - RNA, 18 nt, Human
cccucuccugcuaguggg

SEQ ID NO: 509941 - RNA, 22 nt, Human
gagagggagccagccaggaacc

SEQ ID NO: 509942 - RNA, 22 nt, Human
uuccaggaugggcuguccuacu

SEQ ID NO: 509943 - RNA, 22 nt, Human
ugcccuuacacauggaaaggga

SEQ ID NO: 509944 - RNA, 22 nt, Human
ccggcgggcagcggcagugagc

SEQ ID NO: 509945 - RNA, 22 nt, Human
uuacauuuuaguuaaccuguga

SEQ ID NO: 509946 - RNA, 22 nt, Human
gguggcuggaggagcugaugga

SEQ ID NO: 509947 - RNA, 22 nt, Human
auaagcuuugcuggagagaccu

SEQ ID NO: 509948 - RNA, 22 nt, Human
gcugguccacucccuggaggcu

SEQ ID NO: 509949 - RNA, 22 nt, Human
uggcagcagacaaaaggccauu

SEQ ID NO: 509950 - RNA, 22 nt, Human
cucuuccuuaagacuauaaaga

SEQ ID NO: 509951 - RNA, 22 nt, Human
aggaaacuguccccucauccua

SEQ ID NO: 509952 - RNA, 22 nt, Human
cagaggccucacuuccagccag

SEQ ID NO: 509953 - RNA, 22 nt, Human
uggaaggcaacggagugagcug

SEQ ID NO: 509954 - RNA, 20 nt, Human
caggugagcagaucugggug

SEQ ID NO: 509955 - RNA, 19 nt, Human
auccuggguccuccagcug

SEQ ID NO: 509956 - RNA, 22 nt, Human
ucuuuacaaucuaagcauaguu

SEQ ID NO: 509957 - RNA, 22 nt, Human
caggcacacugucuacacugag

SEQ ID NO: 509958 - RNA, 22 nt, Human
agcaagcuaccuagauagucua

SEQ ID NO: 509959 - RNA, 22 nt, Human
cugugggcgccugucagccuca

SEQ ID NO: 509960 - RNA, 22 nt, Human
ccagcccugucaccaacuggag

SEQ ID NO: 509961 - RNA, 22 nt, Human
uggaaggagcuaaggaccuggg

SEQ ID NO: 509962 - RNA, 22 nt, Human
caaguauauuugaacauguaaa

SEQ ID NO: 509963 - RNA, 22 nt, Human
ucccagcauuaaugccugucag

SEQ ID NO: 509964 - RNA, 22 nt, Human
agcagcucggccagucaccagg

SEQ ID NO: 509965 - RNA, 18 nt, Human
gagcugccauauuuaguu

SEQ ID NO: 509966 - RNA, 22 nt, Human
gcucugagacaguagagauggc

SEQ ID NO: 509967 - RNA, 22 nt, Human
gaggcugcugagagcccuguuu

SEQ ID NO: 509968 - RNA, 22 nt, Human
acaugcaaaaauauauuuauga

SEQ ID NO: 509969 - RNA, 22 nt, Human
agguccagcucuauugaaaaga

SEQ ID NO: 509970 - RNA, 22 nt, Human
augauucaagaaaauaggaugg

SEQ ID NO: 509971 - RNA, 22 nt, Human
ugggcacagggguaggaaugag

SEQ ID NO: 509972 - RNA, 22 nt, Human
aucaguuuguauaugaaacacu

SEQ ID NO: 509973 - RNA, 22 nt, Human
agcauuaauaagaaauggcucc

SEQ ID NO: 509974 - RNA, 22 nt, Human
ugaagacagaccaaggagaaug

SEQ ID NO: 509975 - RNA, 22 nt, Human
acuuguuuacaagcaguucuga

SEQ ID NO: 509976 - RNA, 22 nt, Human
uccgggagcugaacgucuugcg

SEQ ID NO: 509977 - RNA, 22 nt, Human
uggccugaauuauggcagaucu

SEQ ID NO: 509978 - RNA, 22 nt, Human
cacccuggcuggaggugcagug

SEQ ID NO: 509979 - RNA, 22 nt, Human
uuaacagauguuuauggagcau

SEQ ID NO: 509980 - RNA, 22 nt, Human
uagucacaggaaguuucaaugu

SEQ ID NO: 509981 - RNA, 22 nt, Human
aggguagggcccggagacagac

SEQ ID NO: 509982 - RNA, 22 nt, Human
uaguaaaucucagaaaaagauc

SEQ ID NO: 509983 - RNA, 22 nt, Human
uguagaaaauuggagcauucau

SEQ ID NO: 509984 - RNA, 19 nt, Human
gccugagccagccaugcaa

SEQ ID NO: 509985 - RNA, 22 nt, Human
agugggcagugcgcucggaugc

SEQ ID NO: 509986 - RNA, 22 nt, Human
aaggucauuuuuuccucuguug

SEQ ID NO: 509987 - RNA, 22 nt, Human
cuggcagcagcuucuggaucga

SEQ ID NO: 509988 - RNA, 22 nt, Human
agaggcuuggccucaguucugu

SEQ ID NO: 509989 - RNA, 22 nt, Human
augaaggcaguuaaacgucauc

SEQ ID NO: 509990 - RNA, 22 nt, Human
uucaaagcaagacacaauuccu

SEQ ID NO: 509991 - RNA, 22 nt, Human
caggcagccuucucgucucaca

SEQ ID NO: 509992 - RNA, 22 nt, Human
guggcugcuaagucuccuuccu

SEQ ID NO: 509993 - RNA, 22 nt, Human
aagggagcaaauggacagacgg

SEQ ID NO: 509994 - RNA, 22 nt, Human
acacacuguugcucauccaggc

SEQ ID NO: 509995 - RNA, 22 nt, Human
uccugggucccgcacaucuguc

SEQ ID NO: 509996 - RNA, 22 nt, Human
guccucagagugggcagguccu

SEQ ID NO: 509997 - RNA, 22 nt, Human
uccuggcugaguucccaagucg

SEQ ID NO: 509998 - RNA, 22 nt, Human
ggacaaaauccaaacuucuuag

SEQ ID NO: 509999 - RNA, 22 nt, Human
cauauuugguauaacuuaagca

SEQ ID NO: 510000 - RNA, 22 nt, Human
aaaauggucucagcuggcacca

SEQ ID NO: 510001 - RNA, 22 nt, Human
ccaggcucuguuccccgaggag

SEQ ID NO: 510002 - RNA, 22 nt, Human
uggagagaacagugucugaaag

SEQ ID NO: 510003 - RNA, 18 nt, Human
agggagagaccgcggguc

SEQ ID NO: 510004 - RNA, 22 nt, Human
ucagagucucccccaguuuggg

SEQ ID NO: 510005 - RNA, 22 nt, Human
aaugagaaccuugaaaggaacu

SEQ ID NO: 510006 - RNA, 22 nt, Human
uaccuggcuggggaauagccag

SEQ ID NO: 510007 - RNA, 22 nt, Human
uuaaacagucccagaggcugac

SEQ ID NO: 510008 - RNA, 22 nt, Human
accaagcuagaacauuacaggc

SEQ ID NO: 510009 - RNA, 22 nt, Human
cucagaguggggcucccugagg

SEQ ID NO: 510010 - RNA, 22 nt, Human
cucccugguguccccuccagga

SEQ ID NO: 510011 - RNA, 22 nt, Human
ccagagcugauuccugggacuu

SEQ ID NO: 510012 - RNA, 22 nt, Human
ugucuucaucuccaugcacaga

SEQ ID NO: 510013 - RNA, 22 nt, Human
ucuggcucacuucaggcuucac

SEQ ID NO: 510014 - RNA, 22 nt, Human
agagcacaguaucugcacauca

SEQ ID NO: 510015 - RNA, 22 nt, Human
uguggcugacuccuggucccca

SEQ ID NO: 510016 - RNA, 22 nt, Human
cucacuguuuaauagcuggauc

SEQ ID NO: 510017 - RNA, 22 nt, Human
agggccagcugcagaauuagca

SEQ ID NO: 510018 - RNA, 22 nt, Human
gccugucaauuuuguguacaau

SEQ ID NO: 510019 - RNA, 22 nt, Human
uggcagaggagaauuaagauua

SEQ ID NO: 510020 - RNA, 22 nt, Human
gcccuggccuucaucucagaca

SEQ ID NO: 510021 - RNA, 22 nt, Human
uuugcauuccugccugcauuca

SEQ ID NO: 510022 - RNA, 22 nt, Human
aggccagguuccucaaucuuga

SEQ ID NO: 510023 - RNA, 19 nt, Human
uguguccuagcagccaguc

SEQ ID NO: 510024 - RNA, 22 nt, Human
uacauggugguggcacuugacu

SEQ ID NO: 510025 - RNA, 22 nt, Human
cuguccuccagacgacaguccc

SEQ ID NO: 510026 - RNA, 22 nt, Human
aaauccuaccaagaaauucccu

SEQ ID NO: 510027 - RNA, 22 nt, Human
ucuguucagaagaggugaaagu

SEQ ID NO: 510028 - RNA, 22 nt, Human
agcagccaagguaaccugugcu

SEQ ID NO: 510029 - RNA, 22 nt, Human
uguggcugcaaaggaaggcugc

SEQ ID NO: 510030 - RNA, 22 nt, Human
gcagggccagguacaagaagca

SEQ ID NO: 510031 - RNA, 22 nt, Human
uaaggcacccgugagcugccag

SEQ ID NO: 510032 - RNA, 22 nt, Human
ugacagugcggguacaucauag

SEQ ID NO: 510033 - RNA, 22 nt, Human
caggccuggguucaaaucccuu

SEQ ID NO: 510034 - RNA, 22 nt, Human
aguuucuaccgguacauucagg

SEQ ID NO: 510035 - RNA, 22 nt, Human
cuuccaggacaccaggguagua

SEQ ID NO: 510036 - RNA, 22 nt, Human
cugggaggacaacuuggagcuc

SEQ ID NO: 510037 - RNA, 22 nt, Human
uuccuugaaaguuugaacugac

SEQ ID NO: 510038 - RNA, 21 nt, Human
agcugcuuucagcuccuagag

SEQ ID NO: 510039 - RNA, 22 nt, Human
cuucuccucugaguccugggag

SEQ ID NO: 510040 - RNA, 22 nt, Human
uccuggauucugcccugaaggc

SEQ ID NO: 510041 - RNA, 22 nt, Human
uaugaagcugauaaucacugau

SEQ ID NO: 510042 - RNA, 22 nt, Human
cagcaggauaugguggagagag

SEQ ID NO: 510043 - RNA, 22 nt, Human
gcaaagcaagauucagauguag

SEQ ID NO: 510044 - RNA, 22 nt, Human
aguagaaucccuugcaaugucc

SEQ ID NO: 510045 - RNA, 22 nt, Human
gaacagcccuguuaagucuguu

SEQ ID NO: 510046 - RNA, 22 nt, Human
guacacacuauguauuguacac

SEQ ID NO: 510047 - RNA, 22 nt, Human
aggcucagauucacauuugguu

SEQ ID NO: 510048 - RNA, 22 nt, Human
cagguggggagaguguggagca

SEQ ID NO: 510049 - RNA, 22 nt, Human
cagcucaggaaggaaggccggc

SEQ ID NO: 510050 - RNA, 22 nt, Human
gguggagagcuggaugagaggu

SEQ ID NO: 510051 - RNA, 22 nt, Human
cuccuggcccugagcucccagg

SEQ ID NO: 510052 - RNA, 22 nt, Human
ugaaaccacugaugguaccaag

SEQ ID NO: 510053 - RNA, 22 nt, Human
gcagagcuccccaagacaccaa

SEQ ID NO: 510054 - RNA, 22 nt, Human
aggcacugguccauuuucugca

SEQ ID NO: 510055 - RNA, 22 nt, Human
ccaggaggcagagguuacagug

SEQ ID NO: 510056 - RNA, 22 nt, Human
acagagaaagugggcugaagau

SEQ ID NO: 510057 - RNA, 22 nt, Human
gugcccugaaagaguuaauuca

SEQ ID NO: 510058 - RNA, 22 nt, Human
gucccaggugggcuccaccucu

SEQ ID NO: 510059 - RNA, 22 nt, Human
uucucaggccccugccuggacu

SEQ ID NO: 510060 - RNA, 20 nt, Human
cagagacccaggcuucagcu

SEQ ID NO: 510061 - RNA, 19 nt, Human
ccagugcaagguaagauag

SEQ ID NO: 510062 - RNA, 22 nt, Human
agccugcuucccuuugugcccc

SEQ ID NO: 510063 - RNA, 22 nt, Human
caugagaaccaggucuguguuu

SEQ ID NO: 510064 - RNA, 22 nt, Human
ccugggugcccggcccuucucu

SEQ ID NO: 510065 - RNA, 22 nt, Human
agggccagggaaacgaucagca

SEQ ID NO: 510066 - RNA, 22 nt, Human
gacaggaggcagagcucaggug

SEQ ID NO: 510067 - RNA, 22 nt, Human
cagaauuuaaguggauuauucu

SEQ ID NO: 510068 - RNA, 22 nt, Human
uugcuuuucccugucucugauu

SEQ ID NO: 510069 - RNA, 23 nt, Human
uaugugugggucuacuagaaguc

SEQ ID NO: 510070 - RNA, 22 nt, Human
gggcaggugcccagggccagag

SEQ ID NO: 510071 - RNA, 22 nt, Human
gugccuggcacacagaaggcaa

SEQ ID NO: 510072 - RNA, 22 nt, Human
gcagggcucauucuaguacaau

SEQ ID NO: 510073 - RNA, 22 nt, Human
guuuauaaggcccaauauuucu

SEQ ID NO: 510074 - RNA, 22 nt, Human
ccuaugccugucacucugcgcu

SEQ ID NO: 510075 - RNA, 22 nt, Human
gcugucuguucgagcguguguu

SEQ ID NO: 510076 - RNA, 22 nt, Human
cucugcugaucucagcugggcu

SEQ ID NO: 510077 - RNA, 22 nt, Human
auucuggauuaucaguccacca

SEQ ID NO: 510078 - RNA, 22 nt, Human
aaggaaauuagguuauuuugcu

SEQ ID NO: 510079 - RNA, 22 nt, Human
aaacacuagcaggaagcacuga

SEQ ID NO: 510080 - RNA, 22 nt, Human
caguuuaggucauccuugcuuu

SEQ ID NO: 510081 - RNA, 22 nt, Human
aaaucagugcucauuugaaagg

SEQ ID NO: 510082 - RNA, 22 nt, Human
ugucaaacugugacuucuaaug

SEQ ID NO: 510083 - RNA, 22 nt, Human
ugcaggcugcuggcaguagcuu

SEQ ID NO: 510084 - RNA, 22 nt, Human
uaaaagauaucuuagggauuug

SEQ ID NO: 510085 - RNA, 22 nt, Human
gcccagcuuuucacuuccacac

SEQ ID NO: 510086 - RNA, 22 nt, Human
agauacauugaguuuccuccug

SEQ ID NO: 510087 - RNA, 22 nt, Human
aucuucaauugaaaacuagccu

SEQ ID NO: 510088 - RNA, 19 nt, Human
agguuucuaacuauucaag

SEQ ID NO: 510089 - RNA, 22 nt, Human
cucugcugcccaggccugcuag

SEQ ID NO: 510090 - RNA, 22 nt, Human
uuugugaacacugcgcagaacu

SEQ ID NO: 510091 - RNA, 22 nt, Human
uggagacugugcuaagggaguu

SEQ ID NO: 510092 - RNA, 22 nt, Human
augguacagauaauacaugcug

SEQ ID NO: 510093 - RNA, 21 nt, Human
auggagucaggggaaugggcc

SEQ ID NO: 510094 - RNA, 22 nt, Human
uccagagcugagggucaguaga

SEQ ID NO: 510095 - RNA, 19 nt, Human
uggggaugcugaugaccaa

SEQ ID NO: 510096 - RNA, 22 nt, Human
gacagggcauggugcagaguuc

SEQ ID NO: 510097 - RNA, 22 nt, Human
uaugugcauaugcauacacaca

SEQ ID NO: 510098 - RNA, 22 nt, Human
aguuuuucugcuggucucacua

SEQ ID NO: 510099 - RNA, 22 nt, Human
acagagauggcuuuucagaggc

SEQ ID NO: 510100 - RNA, 22 nt, Human
aaugagcugcugcuguuccacc

SEQ ID NO: 510101 - RNA, 22 nt, Human
acaaaggacugaaacuggcugu

SEQ ID NO: 510102 - RNA, 22 nt, Human
ucacugcagacaaccucaguca

SEQ ID NO: 510103 - RNA, 22 nt, Human
uggguccucuggagcagcagca

SEQ ID NO: 510104 - RNA, 20 nt, Human
gugcaauggcgcaaucucgg

SEQ ID NO: 510105 - RNA, 22 nt, Human
gaggcugggaaguccaagacca

SEQ ID NO: 510106 - RNA, 22 nt, Human
uugauacaggcucuauuucauc

SEQ ID NO: 510107 - RNA, 22 nt, Human
cauguugaauggccuugauuuu

SEQ ID NO: 510108 - RNA, 22 nt, Human
cccaggguugccugccucugcu

SEQ ID NO: 510109 - RNA, 19 nt, Human
cucuggagaacaauagugc

SEQ ID NO: 510110 - RNA, 22 nt, Human
cccagcucucgcacuuacuagc

SEQ ID NO: 510111 - RNA, 22 nt, Human
acuucuucuucagcugggggau

SEQ ID NO: 510112 - RNA, 19 nt, Human
agaaaucucgagauuuguu

SEQ ID NO: 510113 - RNA, 20 nt, Human
gcacugaagguuccagggga

SEQ ID NO: 510114 - RNA, 22 nt, Human
uuguaacagguacuaaauaacu

SEQ ID NO: 510115 - RNA, 22 nt, Human
cacaugaugguggaagccauag

SEQ ID NO: 510116 - RNA, 22 nt, Human
ucuucacauucacguaacauag

SEQ ID NO: 510117 - RNA, 22 nt, Human
ugggggagauuagagcuucuua

SEQ ID NO: 510118 - RNA, 22 nt, Human
aagaaagggagaaggauggugu

SEQ ID NO: 510119 - RNA, 22 nt, Human
auuggaaauacaguagaaaaau

SEQ ID NO: 510120 - RNA, 22 nt, Human
aguggcuguucauuuuacacaa

SEQ ID NO: 510121 - RNA, 22 nt, Human
uugcaaaagcaauugcaguuuu

SEQ ID NO: 510122 - RNA, 22 nt, Human
gggcaggugugcagagcuguug

SEQ ID NO: 510123 - RNA, 22 nt, Human
gcugggcuuguggccagcuggg

SEQ ID NO: 510124 - RNA, 22 nt, Human
gacaaaggaucagagguuggga

SEQ ID NO: 510125 - RNA, 22 nt, Human
ucuucuggaugagagcggaggc

SEQ ID NO: 510126 - RNA, 22 nt, Human
aggaggcacucacucucagggu

SEQ ID NO: 510127 - RNA, 22 nt, Human
cuuagaaaucgaacucagguua

SEQ ID NO: 510128 - RNA, 22 nt, Human
aguaugaagauuauaauuuuuc

SEQ ID NO: 510129 - RNA, 22 nt, Human
cagcuucauugccugaugucuu

SEQ ID NO: 510130 - RNA, 22 nt, Human
ugcuuuauguuaucagaagggu

SEQ ID NO: 510131 - RNA, 22 nt, Human
uaaagugcuuccuaacccagag

SEQ ID NO: 510132 - RNA, 22 nt, Human
gggcugcugccaccagguggau

SEQ ID NO: 510133 - RNA, 22 nt, Human
cuguguggccucaagccagccu

SEQ ID NO: 510134 - RNA, 22 nt, Human
agggcucugagcuggaccaccu

SEQ ID NO: 510135 - RNA, 22 nt, Human
ggugggagagcucugucuccag

SEQ ID NO: 510136 - RNA, 22 nt, Human
caucuucugggacuucucaguu

SEQ ID NO: 510137 - RNA, 22 nt, Human
ugaacagaugccuucucccaug

SEQ ID NO: 510138 - RNA, 22 nt, Human
ugaggcaggagguugagaacug

SEQ ID NO: 510139 - RNA, 22 nt, Human
gaugaagcuaaaucuaagguuu

SEQ ID NO: 510140 - RNA, 22 nt, Human
acaggcacuuugacaugccauc

SEQ ID NO: 510141 - RNA, 22 nt, Human
gggccuccggggugagcugugg

SEQ ID NO: 510142 - RNA, 22 nt, Human
uguggaaugcuccuaagugaau

SEQ ID NO: 510143 - RNA, 23 nt, Human
ugagacacucauucauggaguau

SEQ ID NO: 510144 - RNA, 22 nt, Human
agauuucagguuggggcagaag

SEQ ID NO: 510145 - RNA, 22 nt, Human
cucccugcuuguuucccuucag

SEQ ID NO: 510146 - RNA, 22 nt, Human
ucccagagacagagccuccucc

SEQ ID NO: 510147 - RNA, 22 nt, Human
cagagggcucaguccugcugga

SEQ ID NO: 510148 - RNA, 22 nt, Human
gucuguggcaggggagaaguuu

SEQ ID NO: 510149 - RNA, 22 nt, Human
gaaaguuuauagguuauauaau

SEQ ID NO: 510150 - RNA, 22 nt, Human
agaaggcucauuugacugcauu

SEQ ID NO: 510151 - RNA, 22 nt, Human
uucucugguuugcuguuucuga

SEQ ID NO: 510152 - RNA, 22 nt, Human
acagacuggccugucucgcacc

SEQ ID NO: 510153 - RNA, 22 nt, Human
auuccaaagguuaaugcccauu

SEQ ID NO: 510154 - RNA, 22 nt, Human
ccuguggcucucuuuggagguc

SEQ ID NO: 510155 - RNA, 22 nt, Human
ccugggcaacauagggagaccc

SEQ ID NO: 510156 - RNA, 22 nt, Human
agccuauuccaggaugagcuca

SEQ ID NO: 510157 - RNA, 22 nt, Human
gaaugauauauuagcagauuuu

SEQ ID NO: 510158 - RNA, 22 nt, Human
uacauuugcuuugauuuucagc

SEQ ID NO: 510159 - RNA, 22 nt, Human
aaaggccaugguuggaguguuu

SEQ ID NO: 510160 - RNA, 22 nt, Human
uuacaucuaaacugugaacaau

SEQ ID NO: 510161 - RNA, 22 nt, Human
ugagcaucuuuuuacagguuua

SEQ ID NO: 510162 - RNA, 22 nt, Human
gggcugacagcacgccuucugu

SEQ ID NO: 510163 - RNA, 22 nt, Human
aggagucauugagagggguccu

SEQ ID NO: 510164 - RNA, 22 nt, Human
ugcaggcugcaccccugcccug

SEQ ID NO: 510165 - RNA, 22 nt, Human
gcucuggguucugauuuaugag

SEQ ID NO: 510166 - RNA, 19 nt, Human
ucccucagucugccaggcc

SEQ ID NO: 510167 - RNA, 22 nt, Human
guguccagcguggaaugagggu

SEQ ID NO: 510168 - RNA, 22 nt, Human
uacuuucuagcucuccccaguu

SEQ ID NO: 510169 - RNA, 22 nt, Human
ggcuccuggaggcaccacuggu

SEQ ID NO: 510170 - RNA, 22 nt, Human
ggaaggggagcuggaaagggua

SEQ ID NO: 510171 - RNA, 22 nt, Human
aggcucaggucucaggucuggc

SEQ ID NO: 510172 - RNA, 22 nt, Human
gaagguccagcguggccaaguc

SEQ ID NO: 510173 - RNA, 22 nt, Human
uuuccacuguagagauguugaa

SEQ ID NO: 510174 - RNA, 22 nt, Human
ccagagccggcucccucagcuu

SEQ ID NO: 510175 - RNA, 19 nt, Human
ccaggccuccugggagguc

SEQ ID NO: 510176 - RNA, 22 nt, Human
ucaagaauuuggauaagaaaug

SEQ ID NO: 510177 - RNA, 22 nt, Human
ucugguaaccuuuaucccuccu

SEQ ID NO: 510178 - RNA, 22 nt, Human
cacugaagaugcgacuagugcu

SEQ ID NO: 510179 - RNA, 23 nt, Human
agcacaaaguguuuuccuuguag

SEQ ID NO: 510180 - RNA, 22 nt, Human
gacagggcgcccagccuguuuc

SEQ ID NO: 510181 - RNA, 22 nt, Human
cugagcugggaguagagacucu

SEQ ID NO: 510182 - RNA, 21 nt, Human
ucaaagcacauauuugcacau

SEQ ID NO: 510183 - RNA, 22 nt, Human
ucaugccacuuacaaaauaaug

SEQ ID NO: 510184 - RNA, 22 nt, Human
aggggagcuaacaccagagccc

SEQ ID NO: 510185 - RNA, 22 nt, Human
accaggcagcaccaaagccggu

SEQ ID NO: 510186 - RNA, 23 nt, Human
cagcccugaaaucgaggugacac

SEQ ID NO: 510187 - RNA, 22 nt, Human
ccugggucuggucacuaaguca

SEQ ID NO: 510188 - RNA, 21 nt, Human
cuuuagugaaaaggggcuaac

SEQ ID NO: 510189 - RNA, 22 nt, Human
acugugcaugaaccgaaacaaa

SEQ ID NO: 510190 - RNA, 22 nt, Human
gcauuuagcuuuaaaauauuuc

SEQ ID NO: 510191 - RNA, 22 nt, Human
gggagccuugggagugccagcc

SEQ ID NO: 510192 - RNA, 22 nt, Human
aagcaugggaaucccacagggu

SEQ ID NO: 510193 - RNA, 22 nt, Human
acuguucaucucuuagaaagua

SEQ ID NO: 510194 - RNA, 20 nt, Human
uguuucuuuuaaugagcggc

SEQ ID NO: 510195 - RNA, 22 nt, Human
gagggaggggagcuccacccuc

SEQ ID NO: 510196 - RNA, 22 nt, Human
gauaagcuaacccaagcccuuu

SEQ ID NO: 510197 - RNA, 20 nt, Human
ccuccuggucaggugugcag

SEQ ID NO: 510198 - RNA, 23 nt, Human
augguccagccagcugcacagga

SEQ ID NO: 510199 - RNA, 22 nt, Human
aaaaugaagcaaaggcauucag

SEQ ID NO: 510200 - RNA, 22 nt, Human
ucagaaccugcaagucuaaccu

SEQ ID NO: 510201 - RNA, 22 nt, Human
auggaaggcuuuaugacucaaa

SEQ ID NO: 510202 - RNA, 22 nt, Human
uuaaagggccgauuuccaggcc

SEQ ID NO: 510203 - RNA, 22 nt, Human
uuuagcuugaaaguuuuggagg

SEQ ID NO: 510204 - RNA, 22 nt, Human
caugggcucuucuggacugcac

SEQ ID NO: 510205 - RNA, 22 nt, Human
guccagugacaaguagcuggcc

SEQ ID NO: 510206 - RNA, 22 nt, Human
gagcugguucuguccagggaau

SEQ ID NO: 510207 - RNA, 22 nt, Human
gcugucugcugggucgcucagg

SEQ ID NO: 510208 - RNA, 22 nt, Human
agccaggggagucagcugcugg

SEQ ID NO: 510209 - RNA, 22 nt, Human
cuuagcuucucugcaucugugu

SEQ ID NO: 510210 - RNA, 22 nt, Human
aggagagagaacacuugggucc

SEQ ID NO: 510211 - RNA, 19 nt, Human
caggucuucuuggaggacu

SEQ ID NO: 510212 - RNA, 22 nt, Human
cagcuugaaauauuaggagaug

SEQ ID NO: 510213 - RNA, 22 nt, Human
uacagcauugcauuuuccuuug

SEQ ID NO: 510214 - RNA, 22 nt, Human
uuaggaauauuuucugaguagu

SEQ ID NO: 510215 - RNA, 23 nt, Human
ggccucuguguucugcccacaug

SEQ ID NO: 510216 - RNA, 22 nt, Human
cccauuuaucccaagguuacuc

SEQ ID NO: 510217 - RNA, 22 nt, Human
aggaaccagacagaacugaaug

SEQ ID NO: 510218 - RNA, 22 nt, Human
gcccuucacgaugguaucuuag

SEQ ID NO: 510219 - RNA, 22 nt, Human
aggggaauggguagacuguuga

SEQ ID NO: 510220 - RNA, 22 nt, Human
ugaguggacaccugcuucuuua

SEQ ID NO: 510221 - RNA, 22 nt, Human
uucuuucugaauacaguugagu

SEQ ID NO: 510222 - RNA, 22 nt, Human
auuguacaaugccuggaacauu

SEQ ID NO: 510223 - RNA, 22 nt, Human
cgaaaucagcaucuugaggcaa

SEQ ID NO: 510224 - RNA, 22 nt, Human
cccagcaggucggugcugccug

SEQ ID NO: 510225 - RNA, 21 nt, Human
ggcagcugaccgcgcggugca

SEQ ID NO: 510226 - RNA, 22 nt, Human
caguggccaugguggcaggggu

SEQ ID NO: 510227 - RNA, 22 nt, Human
cagaugaacugugacugaaaau

SEQ ID NO: 510228 - RNA, 22 nt, Human
gugaaauauuuaacguccaggu

SEQ ID NO: 510229 - RNA, 22 nt, Human
cugcacagagcagggcagacac

SEQ ID NO: 510230 - RNA, 22 nt, Human
gggcucugggauucagagcaag

SEQ ID NO: 510231 - RNA, 21 nt, Human
ccacucaugacuccacucacc

SEQ ID NO: 510232 - RNA, 22 nt, Human
aagagggagggcaaaggcacug

SEQ ID NO: 510233 - RNA, 22 nt, Human
ccugguggaaggugagugaggc

SEQ ID NO: 510234 - RNA, 22 nt, Human
cagcauggggaucacuguaggc

SEQ ID NO: 510235 - RNA, 22 nt, Human
ccuguggcugccccgcuguugg

SEQ ID NO: 510236 - RNA, 22 nt, Human
ugggccacacacagaagaauca

SEQ ID NO: 510237 - RNA, 22 nt, Human
acagcuuuguuuucccugcuga

SEQ ID NO: 510238 - RNA, 22 nt, Human
cuccaaguauguuaaaaucuaa

SEQ ID NO: 510239 - RNA, 22 nt, Human
aagcugucaauguaucuagucu

SEQ ID NO: 510240 - RNA, 22 nt, Human
ucucugggcccagaccuuccuu

SEQ ID NO: 510241 - RNA, 19 nt, Human
agauggggaagagugugag

SEQ ID NO: 510242 - RNA, 22 nt, Human
cagggcuguggcuuugugcugu

SEQ ID NO: 510243 - RNA, 22 nt, Human
caggguacagaguuuucuaaac

SEQ ID NO: 510244 - RNA, 22 nt, Human
ucccagagucagagguggggcc

SEQ ID NO: 510245 - RNA, 22 nt, Human
aucuguggcgcaaacaaaggcu

SEQ ID NO: 510246 - RNA, 22 nt, Human
cucuuaaaaacuugauauauuu

SEQ ID NO: 510247 - RNA, 17 nt, Human
uuugaaaggaugucagu

SEQ ID NO: 510248 - RNA, 22 nt, Human
uucucaguuucauagcugagca

SEQ ID NO: 510249 - RNA, 22 nt, Human
caggaaaugggucguuuuauaa

SEQ ID NO: 510250 - RNA, 22 nt, Human
cucugugauuuugugagccaga

SEQ ID NO: 510251 - RNA, 22 nt, Human
gggcagguggcagggucucugg

SEQ ID NO: 510252 - RNA, 22 nt, Human
aaaugugcuaaaguauuaacau

SEQ ID NO: 510253 - RNA, 22 nt, Human
auauuuguuagagucuaugugu

SEQ ID NO: 510254 - RNA, 22 nt, Human
acaguguguuggaggagacugu

SEQ ID NO: 510255 - RNA, 22 nt, Human
auccuugagccaaugacugauu

SEQ ID NO: 510256 - RNA, 22 nt, Human
ugccuuccuggagcugaaggcu

SEQ ID NO: 510257 - RNA, 21 nt, Human
ugccagcauuaaacagucauu

SEQ ID NO: 510258 - RNA, 22 nt, Human
gcccucagaugggaaaggaggg

SEQ ID NO: 510259 - RNA, 22 nt, Human
ugggaauggaugcuaagugcua

SEQ ID NO: 510260 - RNA, 22 nt, Human
uacauaauaaggggcauggugu

SEQ ID NO: 510261 - RNA, 22 nt, Human
ucugagccagacaagacagcca

SEQ ID NO: 510262 - RNA, 22 nt, Human
ugaagcuuuaggauggguucau

SEQ ID NO: 510263 - RNA, 23 nt, Human
uggcucagcuaguuuuccauuuc

SEQ ID NO: 510264 - RNA, 21 nt, Human
gaggaaaugcucugguguuca

SEQ ID NO: 510265 - RNA, 19 nt, Human
cugcagggaugugcagagu

SEQ ID NO: 510266 - RNA, 22 nt, Human
gaggcaguuccugagugacaag

SEQ ID NO: 510267 - RNA, 22 nt, Human
agucagggccuggccugcugaa

SEQ ID NO: 510268 - RNA, 22 nt, Human
uggcugggccgggccuugugcc

SEQ ID NO: 510269 - RNA, 22 nt, Human
cugaggcuuugugugcaugccu

SEQ ID NO: 510270 - RNA, 22 nt, Human
gugcaugucggggugcauguca

SEQ ID NO: 510271 - RNA, 22 nt, Human
aaagcacaugaguaguguagua

SEQ ID NO: 510272 - RNA, 22 nt, Human
ggugaauaagcugaacacuugg

SEQ ID NO: 510273 - RNA, 22 nt, Human
gcgggggcggcgcagaccucag

SEQ ID NO: 510274 - RNA, 22 nt, Human
cauggccaggcacgcgcauagc

SEQ ID NO: 510275 - RNA, 22 nt, Human
guggaggagaggcgccuugcgg

SEQ ID NO: 510276 - RNA, 22 nt, Human
ucacacacauggauaguauuuu

SEQ ID NO: 510277 - RNA, 22 nt, Human
agucuucugaauaagaaucacu

SEQ ID NO: 510278 - RNA, 23 nt, Human
ggguccagagacaggcaugggug

SEQ ID NO: 510279 - RNA, 23 nt, Human
ugauggccgcccuuugcccuguc

SEQ ID NO: 510280 - RNA, 22 nt, Human
auccugggggcagcuggaaaca

SEQ ID NO: 510281 - RNA, 22 nt, Human
ggcccucuuuuauccaucauaa

SEQ ID NO: 510282 - RNA, 22 nt, Human
aaggccaugcacauccuaggca

SEQ ID NO: 510283 - RNA, 19 nt, Human
auaaggcaauuggauuugg

SEQ ID NO: 510284 - RNA, 22 nt, Human
gaggcagccucaguggaccucg

SEQ ID NO: 510285 - RNA, 22 nt, Human
agcucacagaaauccugcagga

SEQ ID NO: 510286 - RNA, 20 nt, Human
gagagcuggggaugaggcug

SEQ ID NO: 510287 - RNA, 22 nt, Human
cucaggacccgguccagguggg

SEQ ID NO: 510288 - RNA, 22 nt, Human
uauacagauggaaagauacaca

SEQ ID NO: 510289 - RNA, 22 nt, Human
aucaagaguauugacaagacca

SEQ ID NO: 510290 - RNA, 22 nt, Human
uagggcucagagaaguggggcc

SEQ ID NO: 510291 - RNA, 22 nt, Human
uccuugggaaacaucauguaau

SEQ ID NO: 510292 - RNA, 23 nt, Human
aagugcaagugaaaggcacaguu

SEQ ID NO: 510293 - RNA, 22 nt, Human
acagagacaggcagacagucuu

SEQ ID NO: 510294 - RNA, 19 nt, Human
cuggugcuugagugaguca

SEQ ID NO: 510295 - RNA, 19 nt, Human
acauucccaucagcaaugu

SEQ ID NO: 510296 - RNA, 22 nt, Human
agagggcaugcuugguggccug

SEQ ID NO: 510297 - RNA, 23 nt, Human
uguaugaauaugccacaguuuaa

SEQ ID NO: 510298 - RNA, 22 nt, Human
uggcucagaguucaucuuuuag

SEQ ID NO: 510299 - RNA, 22 nt, Human
aaugcagauucuuauucuguag

SEQ ID NO: 510300 - RNA, 22 nt, Human
ccuggauucaagucuuucuuuc

SEQ ID NO: 510301 - RNA, 22 nt, Human
acagcagagugugagauagcca

SEQ ID NO: 510302 - RNA, 20 nt, Human
ugacaguuucauaugguuca

SEQ ID NO: 510303 - RNA, 22 nt, Human
auauuuacugcuguggugaagg

SEQ ID NO: 510304 - RNA, 22 nt, Human
cagcugccccauaaaucacagu

SEQ ID NO: 510305 - RNA, 22 nt, Human
ugggcccaagagagucuccaac

SEQ ID NO: 510306 - RNA, 22 nt, Human
agagguauuagguaauucagua

SEQ ID NO: 510307 - RNA, 22 nt, Human
uuuugugagaugcguaugaaug

SEQ ID NO: 510308 - RNA, 22 nt, Human
ucuggcucaggucagacaggga

SEQ ID NO: 510309 - RNA, 22 nt, Human
ugcuaauguuucauuuuuagau

SEQ ID NO: 510310 - RNA, 22 nt, Human
gccuaggaguacagaaugguuu

SEQ ID NO: 510311 - RNA, 22 nt, Human
auuccacacaguaauacucaau

SEQ ID NO: 510312 - RNA, 22 nt, Human
uauaacacucagaaagaaucau

SEQ ID NO: 510313 - RNA, 23 nt, Human
uccugcugaaagcuccagcuggc

SEQ ID NO: 510314 - RNA, 22 nt, Human
cagagcugcgcuuuuuccuggu

SEQ ID NO: 510315 - RNA, 22 nt, Human
ccugagcuuuaaaagccaugua

SEQ ID NO: 510316 - RNA, 23 nt, Human
ucuguacacaucagcaucuccca

SEQ ID NO: 510317 - RNA, 22 nt, Human
uggcagcuacagacagagguga

SEQ ID NO: 510318 - RNA, 17 nt, Human
aggcagguaagaguuau

SEQ ID NO: 510319 - RNA, 22 nt, Human
aggugccagugcuguggucccc

SEQ ID NO: 510320 - RNA, 22 nt, Human
gcucugcuggaaguucucugga

SEQ ID NO: 510321 - RNA, 22 nt, Human
ggcuucaccaggugcaugcaug

SEQ ID NO: 510322 - RNA, 22 nt, Human
agcccagaggcugggcgugcau

SEQ ID NO: 510323 - RNA, 21 nt, Human
uucuuucugaaucugaaguau

SEQ ID NO: 510324 - RNA, 22 nt, Human
gaugaaaaaagacgagcauaua

SEQ ID NO: 510325 - RNA, 22 nt, Human
cuuggucauuuggggcugcuau

SEQ ID NO: 510326 - RNA, 22 nt, Human
ggcucuucuguuucacaggcca

SEQ ID NO: 510327 - RNA, 22 nt, Human
uuagagagaaccaucaggaucu

SEQ ID NO: 510328 - RNA, 19 nt, Human
caucuggaugauucuccug

SEQ ID NO: 510329 - RNA, 22 nt, Human
ucucuaaagccuggaagaggag

SEQ ID NO: 510330 - RNA, 22 nt, Human
gcagaugaaguuuacaggaaac

SEQ ID NO: 510331 - RNA, 22 nt, Human
cagcagcaugaauucgagccac

SEQ ID NO: 510332 - RNA, 18 nt, Human
ugaucuuugaguauaaug

SEQ ID NO: 510333 - RNA, 22 nt, Human
ccaugcagugcuggagcugauu

SEQ ID NO: 510334 - RNA, 22 nt, Human
ucucuggguccuggcaagcuca

SEQ ID NO: 510335 - RNA, 20 nt, Human
uugcaaagugaauagcaauu

SEQ ID NO: 510336 - RNA, 22 nt, Human
ggcugagcacuuuaggcaggag

SEQ ID NO: 510337 - RNA, 22 nt, Human
cucugggcaaagaugccucauc

SEQ ID NO: 510338 - RNA, 22 nt, Human
ggacuucuaagugccagacacu

SEQ ID NO: 510339 - RNA, 23 nt, Human
agcuccagcugacgugggcagcc

SEQ ID NO: 510340 - RNA, 22 nt, Human
ugugucugaacuaguugcucuc

SEQ ID NO: 510341 - RNA, 22 nt, Human
cagcuuuauugagguauaauug

SEQ ID NO: 510342 - RNA, 22 nt, Human
gagagucacugucugcauuucc

SEQ ID NO: 510343 - RNA, 22 nt, Human
ugucagcacaucuguaaucaca

SEQ ID NO: 510344 - RNA, 20 nt, Human
ccugccugccucggcucauu

SEQ ID NO: 510345 - RNA, 22 nt, Human
cagggacauugguggccagguu

SEQ ID NO: 510346 - RNA, 22 nt, Human
aauaagauccugaagauauguu

SEQ ID NO: 510347 - RNA, 22 nt, Human
cauuuugugcuagacacuaugg

SEQ ID NO: 510348 - RNA, 23 nt, Human
uggcucugagcuuccugguggcc

SEQ ID NO: 510349 - RNA, 22 nt, Human
guuauaaaaugcacaguuguuu

SEQ ID NO: 510350 - RNA, 22 nt, Human
gcuccaggcugcucugucccau

SEQ ID NO: 510351 - RNA, 22 nt, Human
uuauucugcacuuuuaaaauau

SEQ ID NO: 510352 - RNA, 22 nt, Human
ccaggguggggcaggcccacug

SEQ ID NO: 510353 - RNA, 22 nt, Human
ucaucacauaugucaugauuug

SEQ ID NO: 510354 - RNA, 22 nt, Human
cugccuggucucaggcaugggg

SEQ ID NO: 510355 - RNA, 23 nt, Human
cuggccuccgacacuggccaaga

SEQ ID NO: 510356 - RNA, 22 nt, Human
cagcuucuccggccuggugcgg

SEQ ID NO: 510357 - RNA, 22 nt, Human
auaguauuuccagaaauagucu

SEQ ID NO: 510358 - RNA, 22 nt, Human
gcagcagaggcccuacucuuug

SEQ ID NO: 510359 - RNA, 22 nt, Human
auggaagcugaaaaagacacgg

SEQ ID NO: 510360 - RNA, 22 nt, Human
auuaagugacuaaaguaaugcu

SEQ ID NO: 510361 - RNA, 22 nt, Human
aucaaagugauuuguaaacagg

SEQ ID NO: 510362 - RNA, 22 nt, Human
uggcagagcuggcugcggauga

SEQ ID NO: 510363 - RNA, 22 nt, Human
aaucagcuaaauaaacuaguca

SEQ ID NO: 510364 - RNA, 22 nt, Human
ucagguccagcuccugugccuc

SEQ ID NO: 510365 - RNA, 22 nt, Human
uugaggagucaggggcacggaa

SEQ ID NO: 510366 - RNA, 22 nt, Human
auuucuguaacuuaugaaaguu

SEQ ID NO: 510367 - RNA, 22 nt, Human
cuauaaaucuacccagcauugg

SEQ ID NO: 510368 - RNA, 22 nt, Human
gaagcagcgaaguggaagggac

SEQ ID NO: 510369 - RNA, 22 nt, Human
cuggggcuggugaggcaggcuc

SEQ ID NO: 510370 - RNA, 16 nt, Human
uccaggcauaucugag

SEQ ID NO: 510371 - RNA, 19 nt, Human
caguggagauuggaggagg

SEQ ID NO: 510372 - RNA, 22 nt, Human
caaauagacucuagaauuuauu

SEQ ID NO: 510373 - RNA, 22 nt, Human
cucacaggcaucucaucaggcu

SEQ ID NO: 510374 - RNA, 22 nt, Human
gggaaagacccugagucuuauu

SEQ ID NO: 510375 - RNA, 22 nt, Human
aucauuccacauguaccacuag

SEQ ID NO: 510376 - RNA, 21 nt, Human
cuguccaguaauuccuggcac

SEQ ID NO: 510377 - RNA, 22 nt, Human
cagcccaggucucucuuccagu

SEQ ID NO: 510378 - RNA, 22 nt, Human
gugggguguccagcagcgagcu

SEQ ID NO: 510379 - RNA, 22 nt, Human
ugucccagguccuagaugacca

SEQ ID NO: 510380 - RNA, 22 nt, Human
uaaguagaugcaaaauggaguu

SEQ ID NO: 510381 - RNA, 22 nt, Human
gcugcaggcgccugcggucucu

SEQ ID NO: 510382 - RNA, 22 nt, Human
ucugggagcacacgcagugauc

SEQ ID NO: 510383 - RNA, 22 nt, Human
acugggcccagugguguggcug

SEQ ID NO: 510384 - RNA, 22 nt, Human
accccagcgcauauggucugcg

SEQ ID NO: 510385 - RNA, 18 nt, Human
ccagggagcuuauuagga

SEQ ID NO: 510386 - RNA, 22 nt, Human
caaauggauacaggcaaacauu

SEQ ID NO: 510387 - RNA, 22 nt, Human
uggcagcaguggagguagaaag

SEQ ID NO: 510388 - RNA, 22 nt, Human
cuccuguauguugggcuucaca

SEQ ID NO: 510389 - RNA, 22 nt, Human
gugagcaggauuucauggugua

SEQ ID NO: 510390 - RNA, 22 nt, Human
uugcauugaugucuauacgcug

SEQ ID NO: 510391 - RNA, 22 nt, Human
ugaaguuuuacauccucuccaa

SEQ ID NO: 510392 - RNA, 22 nt, Human
auucccaucgucaacuucacug

SEQ ID NO: 510393 - RNA, 22 nt, Human
agcacagaaaguauugacugaa

SEQ ID NO: 510394 - RNA, 22 nt, Human
acugggcuccagaugugauacg

SEQ ID NO: 510395 - RNA, 22 nt, Human
auaaauuuauaauuguuuccug

SEQ ID NO: 510396 - RNA, 19 nt, Human
ucugucacuggggguauuc

SEQ ID NO: 510397 - RNA, 22 nt, Human
aaugaucuggcucaggauauca

SEQ ID NO: 510398 - RNA, 20 nt, Human
acaggagaucugaggaaagg

SEQ ID NO: 510399 - RNA, 22 nt, Human
uauguacaucguugaauucaaa

SEQ ID NO: 510400 - RNA, 18 nt, Human
gggcucugauccuucacc

SEQ ID NO: 510401 - RNA, 22 nt, Human
gggcacuguggggcccaugcug

SEQ ID NO: 510402 - RNA, 22 nt, Human
ccaggcuccucaugaucuuguu

SEQ ID NO: 510403 - RNA, 22 nt, Human
auuagcuucugaagcccuugaa

SEQ ID NO: 510404 - RNA, 22 nt, Human
ggaaggaaauuggggcaguugu

SEQ ID NO: 510405 - RNA, 22 nt, Human
aggcaaauagauaguccauaca

SEQ ID NO: 510406 - RNA, 22 nt, Human
uccucaggauguggaguagaau

SEQ ID NO: 510407 - RNA, 17 nt, Human
cucuccuuccucugagg

SEQ ID NO: 510408 - RNA, 22 nt, Human
uucuggaguauuccuggcaccu

SEQ ID NO: 510409 - RNA, 22 nt, Human
aaacagcuaaguacauucaagg

SEQ ID NO: 510410 - RNA, 22 nt, Human
ucacuguaaaguaauacuguca

SEQ ID NO: 510411 - RNA, 22 nt, Human
augggcugacccagucguggca

SEQ ID NO: 510412 - RNA, 22 nt, Human
cagcuggcagcccuggcccugc

SEQ ID NO: 510413 - RNA, 22 nt, Human
ugggcucuccuggaggacaaca

SEQ ID NO: 510414 - RNA, 22 nt, Human
ggagucaggagcaggcugggcu

SEQ ID NO: 510415 - RNA, 22 nt, Human
aagaaugucguugguauuuuaa

SEQ ID NO: 510416 - RNA, 22 nt, Human
gcuggcauuacaggagagaacc

SEQ ID NO: 510417 - RNA, 22 nt, Human
auuuguugcuagcagcacugau

SEQ ID NO: 510418 - RNA, 22 nt, Human
cagggucuuauaaggccaauuu

SEQ ID NO: 510419 - RNA, 22 nt, Human
ucugucugcaccuaagcacagu

SEQ ID NO: 510420 - RNA, 20 nt, Human
ggccuuggccucuuugcagc

SEQ ID NO: 510421 - RNA, 22 nt, Human
caguagcaggcaggugcuuuug

SEQ ID NO: 510422 - RNA, 22 nt, Human
ggcucaggacugcagcguagag

SEQ ID NO: 510423 - RNA, 22 nt, Human
cuuucacagcugugcuuaugau

SEQ ID NO: 510424 - RNA, 22 nt, Human
agagcuagaaggaagcauuucu

SEQ ID NO: 510425 - RNA, 22 nt, Human
aggguccuucuguuccugagca

SEQ ID NO: 510426 - RNA, 22 nt, Human
cugucuguuucugauucaaccu

SEQ ID NO: 510427 - RNA, 22 nt, Human
ggccucuggucaagacaagcau

SEQ ID NO: 510428 - RNA, 22 nt, Human
gcucugcucuaacauuccugac

SEQ ID NO: 510429 - RNA, 22 nt, Human
cugggcagugcagcuauagaac

SEQ ID NO: 510430 - RNA, 22 nt, Human
agcugguggaagggagcccaaa

SEQ ID NO: 510431 - RNA, 22 nt, Human
acagcuugcaauggcuuucaac

SEQ ID NO: 510432 - RNA, 22 nt, Human
gggaguaaacuauggugaggau

SEQ ID NO: 510433 - RNA, 18 nt, Human
ccucggagccuccguguc

SEQ ID NO: 510434 - RNA, 22 nt, Human
cagaaagcccuauguacagugg

SEQ ID NO: 510435 - RNA, 22 nt, Human
caggccuggagugcaauggcac

SEQ ID NO: 510436 - RNA, 22 nt, Human
gagagugagauaauuucacaua

SEQ ID NO: 510437 - RNA, 22 nt, Human
guuggcuuugcucucuguccua

SEQ ID NO: 510438 - RNA, 22 nt, Human
acagaggucauggagaguucuc

SEQ ID NO: 510439 - RNA, 22 nt, Human
gcuccaggagagggaagcagau

SEQ ID NO: 510440 - RNA, 22 nt, Human
cauuagggucucucagcugaau

SEQ ID NO: 510441 - RNA, 22 nt, Human
gccugcagccucagagaauuuu

SEQ ID NO: 510442 - RNA, 21 nt, Human
cacucaggguaugugccaggc

SEQ ID NO: 510443 - RNA, 22 nt, Human
gcugggccuuccgauucucaag

SEQ ID NO: 510444 - RNA, 20 nt, Human
gaggcugaaguguuuuugcu

SEQ ID NO: 510445 - RNA, 22 nt, Human
aaggccuggauuuagguuguga

SEQ ID NO: 510446 - RNA, 22 nt, Human
ugcagggcuuccucuuggaguu

SEQ ID NO: 510447 - RNA, 22 nt, Human
aacaaacaaacauuuugucauc

SEQ ID NO: 510448 - RNA, 22 nt, Human
uguaugaaccuuuaauauagug

SEQ ID NO: 510449 - RNA, 22 nt, Human
ccacauuucuucacuuguccca

SEQ ID NO: 510450 - RNA, 22 nt, Human
uguccugggaaugggaugcagu

SEQ ID NO: 510451 - RNA, 22 nt, Human
cacagaaaaaggcuugaaaauc

SEQ ID NO: 510452 - RNA, 22 nt, Human
uauaaagaaaugauuuccagaa

SEQ ID NO: 510453 - RNA, 22 nt, Human
gggcugacauauuuggugcucu

SEQ ID NO: 510454 - RNA, 22 nt, Human
uaugcacauucacacaaaaaug

SEQ ID NO: 510455 - RNA, 22 nt, Human
uccaugagggacacuggaugcu

SEQ ID NO: 510456 - RNA, 22 nt, Human
agugacucacuagcucucagug

SEQ ID NO: 510457 - RNA, 22 nt, Human
gccagcuggagugagagugggc

SEQ ID NO: 510458 - RNA, 22 nt, Human
uccaggauggugacgguggcca

SEQ ID NO: 510459 - RNA, 22 nt, Human
aggcagcuggaggcagagacua

SEQ ID NO: 510460 - RNA, 22 nt, Human
aggaccuguagggccugcaucc

SEQ ID NO: 510461 - RNA, 22 nt, Human
uggaggcaucagagugcuuggc

SEQ ID NO: 510462 - RNA, 22 nt, Human
ccaaggaguagagcaggaagcu

SEQ ID NO: 510463 - RNA, 22 nt, Human
uuaccugugucaguauaugaga

SEQ ID NO: 510464 - RNA, 22 nt, Human
aggugggggcuguguccuugac

SEQ ID NO: 510465 - RNA, 20 nt, Human
cuggguggcaagcaaggggg

SEQ ID NO: 510466 - RNA, 22 nt, Human
uggggugccgacagggagggca

SEQ ID NO: 510467 - RNA, 22 nt, Human
caggggcuguuugccucaggcc

SEQ ID NO: 510468 - RNA, 21 nt, Human
auccauccaucuuggccuaac

SEQ ID NO: 510469 - RNA, 22 nt, Human
gagggguguggagccaucaguu

SEQ ID NO: 510470 - RNA, 22 nt, Human
aggccuccuggcuccaggccuu

SEQ ID NO: 510471 - RNA, 22 nt, Human
ccacccuggacaggccucugag

SEQ ID NO: 510472 - RNA, 22 nt, Human
aaagcaauagguuaggucaaga

SEQ ID NO: 510473 - RNA, 22 nt, Human
uauuucugaauccaaaagguca

SEQ ID NO: 510474 - RNA, 22 nt, Human
cagcugaguuacucugaggucu

SEQ ID NO: 510475 - RNA, 22 nt, Human
uauuuuacuauuuggcaaaguc

SEQ ID NO: 510476 - RNA, 22 nt, Human
gggaacagagugccagacugac

SEQ ID NO: 510477 - RNA, 22 nt, Human
uggggugggcaugcgcuguccu

SEQ ID NO: 510478 - RNA, 22 nt, Human
aagcugccuagaguugaauguc

SEQ ID NO: 510479 - RNA, 22 nt, Human
ccagcaggagacuagcaacaua

SEQ ID NO: 510480 - RNA, 22 nt, Human
cagaggccaggcugccugacug

SEQ ID NO: 510481 - RNA, 22 nt, Human
ccugaguggagggauucugcag

SEQ ID NO: 510482 - RNA, 20 nt, Human
uacagaaugcaauaaaaugg

SEQ ID NO: 510483 - RNA, 22 nt, Human
agaaaugugaauuucauuuccu

SEQ ID NO: 510484 - RNA, 21 nt, Human
gugcagaggaauguagggggc

SEQ ID NO: 510485 - RNA, 22 nt, Human
aucaggaucaugcuggguggga

SEQ ID NO: 510486 - RNA, 22 nt, Human
auaagcuuuugauucacuucag

SEQ ID NO: 510487 - RNA, 22 nt, Human
uucacauuaucaggauuguuuc

SEQ ID NO: 510488 - RNA, 20 nt, Human
aaguccugaccuagucuaaa

SEQ ID NO: 510489 - RNA, 22 nt, Human
cuuguuuuggaacagagugaau

SEQ ID NO: 510490 - RNA, 21 nt, Human
ugcuggccaugugcugggcau

SEQ ID NO: 510491 - RNA, 22 nt, Human
auuucuguuauaccuuucucag

SEQ ID NO: 510492 - RNA, 22 nt, Human
gagacugauggggcucccagaa

SEQ ID NO: 510493 - RNA, 22 nt, Human
agaucaaaaacuuaauggcuuu

SEQ ID NO: 510494 - RNA, 22 nt, Human
gccuggagagcacugugcgcuu

SEQ ID NO: 510495 - RNA, 22 nt, Human
cuguagccagaagcagaaggcc

SEQ ID NO: 510496 - RNA, 20 nt, Human
uacagaaacaggacuuuugg

SEQ ID NO: 510497 - RNA, 22 nt, Human
gcuccagaugaaaggccagagg

SEQ ID NO: 510498 - RNA, 22 nt, Human
uauuucaugugcaccauaauuc

SEQ ID NO: 510499 - RNA, 22 nt, Human
gggcacuggaaggcucucaggc

SEQ ID NO: 510500 - RNA, 22 nt, Human
agcuuccuuggcgcugaggccu

SEQ ID NO: 510501 - RNA, 22 nt, Human
agccaaggacacggagccuccu

SEQ ID NO: 510502 - RNA, 22 nt, Human
aaagauuugaguucugcuuaua

SEQ ID NO: 510503 - RNA, 22 nt, Human
uaguucuugguucuuaguucuu

SEQ ID NO: 510504 - RNA, 22 nt, Human
aggccagugcagcuggaacaga

SEQ ID NO: 510505 - RNA, 22 nt, Human
uuauuccagcuaagaguccugg

SEQ ID NO: 510506 - RNA, 23 nt, Human
gcugucugucaucucugcgggag

SEQ ID NO: 510507 - RNA, 22 nt, Human
uucucuggggacugucucuauu

SEQ ID NO: 510508 - RNA, 22 nt, Human
guagcuuauuagggauaauagu

SEQ ID NO: 510509 - RNA, 22 nt, Human
cagagcaggcccacugcccucc

SEQ ID NO: 510510 - RNA, 22 nt, Human
auuuaauuuauagauguggaua

SEQ ID NO: 510511 - RNA, 22 nt, Human
augcaucuauucccaagggcag

SEQ ID NO: 510512 - RNA, 22 nt, Human
ugucaugccaccguuucccaga

SEQ ID NO: 510513 - RNA, 22 nt, Human
aagggcuggccacauucugggu

SEQ ID NO: 510514 - RNA, 22 nt, Human
acacaggggcucggcugggugc

SEQ ID NO: 510515 - RNA, 22 nt, Human
gccuggagcucaugugggcauu

SEQ ID NO: 510516 - RNA, 22 nt, Human
agcuguggaagacugucagggu

SEQ ID NO: 510517 - RNA, 22 nt, Human
guuuucauuacugcugugauuu

SEQ ID NO: 510518 - RNA, 22 nt, Human
cauugucacccaaagcucauag

SEQ ID NO: 510519 - RNA, 22 nt, Human
agugggcaugaucuggugucug

SEQ ID NO: 510520 - RNA, 22 nt, Human
gaggcaguggucugaugcaagg

SEQ ID NO: 510521 - RNA, 22 nt, Human
uuacaugguuguuggaaaugcu

SEQ ID NO: 510522 - RNA, 22 nt, Human
gcagcauccccaggcagcaggg

SEQ ID NO: 510523 - RNA, 23 nt, Human
uauacacauguggcaguauagug

SEQ ID NO: 510524 - RNA, 22 nt, Human
uugugcaauuuaaaaucuuccu

SEQ ID NO: 510525 - RNA, 22 nt, Human
uucuacuuuggacauaaaggac

SEQ ID NO: 510526 - RNA, 22 nt, Human
uaggauaggauggagacagaau

SEQ ID NO: 510527 - RNA, 22 nt, Human
ucagcagggcauacugagccua

SEQ ID NO: 510528 - RNA, 22 nt, Human
cccacacaaaucauggggagaa

SEQ ID NO: 510529 - RNA, 20 nt, Human
aguguuccggaagacuggca

SEQ ID NO: 510530 - RNA, 22 nt, Human
guccucugggcuuugagcaguc

SEQ ID NO: 510531 - RNA, 18 nt, Human
uauucuguccuaugaagc

SEQ ID NO: 510532 - RNA, 22 nt, Human
agggaagagcuugcaagaaacc

SEQ ID NO: 510533 - RNA, 22 nt, Human
agcugcugguuuaagggauggg

SEQ ID NO: 510534 - RNA, 22 nt, Human
cuaaauaaucccucuggucuua

SEQ ID NO: 510535 - RNA, 22 nt, Human
ucaccagggcuccagccagccu

SEQ ID NO: 510536 - RNA, 22 nt, Human
uauuccagaugaaaucauucag

SEQ ID NO: 510537 - RNA, 22 nt, Human
cuggggggagcugcguccagca

SEQ ID NO: 510538 - RNA, 22 nt, Human
uggcaggaaauacccugccuag

SEQ ID NO: 510539 - RNA, 22 nt, Human
ucucagggugaggaaagaauuu

SEQ ID NO: 510540 - RNA, 22 nt, Human
ggugcagaggagccagcugggg

SEQ ID NO: 510541 - RNA, 22 nt, Human
ugugugcuaauguaugcucuaa

SEQ ID NO: 510542 - RNA, 22 nt, Human
cagcaauauacacagucuaugg

SEQ ID NO: 510543 - RNA, 22 nt, Human
cucugagaaagcugugagcuaa

SEQ ID NO: 510544 - RNA, 21 nt, Human
uuuaauuugcauguaugacgc

SEQ ID NO: 510545 - RNA, 22 nt, Human
gccagggcucgcggucccucgu

SEQ ID NO: 510546 - RNA, 22 nt, Human
aaaauaucagcaaagggugaca

SEQ ID NO: 510547 - RNA, 22 nt, Human
aaggagaguacaggaguuggua

SEQ ID NO: 510548 - RNA, 22 nt, Human
ccugggagugugccaucucugu

SEQ ID NO: 510549 - RNA, 22 nt, Human
uuuugauaucaugaugaacaga

SEQ ID NO: 510550 - RNA, 22 nt, Human
cucaguccuuauuugccucuac

SEQ ID NO: 510551 - RNA, 20 nt, Human
uaugauaauuacaaaauagu

SEQ ID NO: 510552 - RNA, 22 nt, Human
cucaacaugccuacucagucug

SEQ ID NO: 510553 - RNA, 22 nt, Human
accaucuuaaggggacuucuua

SEQ ID NO: 510554 - RNA, 17 nt, Human
gccucugcuugugucau

SEQ ID NO: 510555 - RNA, 22 nt, Human
cagguccaauugcgcuaaaauc

SEQ ID NO: 510556 - RNA, 22 nt, Human
gcagaguucucuuccagcuaac

SEQ ID NO: 510557 - RNA, 22 nt, Human
aaagcacuucaggagcaguuug

SEQ ID NO: 510558 - RNA, 22 nt, Human
acacucacccucccacugccug

SEQ ID NO: 510559 - RNA, 22 nt, Human
acaggcagcacuaaucucuggu

SEQ ID NO: 510560 - RNA, 22 nt, Human
aggcuucugauaccaugagaga

SEQ ID NO: 510561 - RNA, 20 nt, Human
agccagaagaaggcuggaga

SEQ ID NO: 510562 - RNA, 22 nt, Human
auuuucaugacuaccuuaaaua

SEQ ID NO: 510563 - RNA, 22 nt, Human
ucaaauaugugauagaagcuaa

SEQ ID NO: 510564 - RNA, 20 nt, Human
uucaaagacccucaggucca

SEQ ID NO: 510565 - RNA, 22 nt, Human
gaggugaguggaucacgagguc

SEQ ID NO: 510566 - RNA, 22 nt, Human
cccaggcuagaaaggccaacaa

SEQ ID NO: 510567 - RNA, 22 nt, Human
ugauaaauccauguaaauggua

SEQ ID NO: 510568 - RNA, 22 nt, Human
ugggccugacucaccugccucc

SEQ ID NO: 510569 - RNA, 21 nt, Human
uguucacauggagcagaaugu

SEQ ID NO: 510570 - RNA, 22 nt, Human
uccagucucuacucugagauaa

SEQ ID NO: 510571 - RNA, 22 nt, Human
uucuuacagauuuggugaauga

SEQ ID NO: 510572 - RNA, 22 nt, Human
agagaaucuagaauguuuauac

SEQ ID NO: 510573 - RNA, 22 nt, Human
cagggagggacaauugucaccu

SEQ ID NO: 510574 - RNA, 22 nt, Human
uucaagaugccagggacgcggc

SEQ ID NO: 510575 - RNA, 22 nt, Human
ucccagagcccaaguuggagag

SEQ ID NO: 510576 - RNA, 22 nt, Human
agccccucuccgcccugagucg

SEQ ID NO: 510577 - RNA, 22 nt, Human
agugggagagaagcaaguagua

SEQ ID NO: 510578 - RNA, 22 nt, Human
uccucagcauggaaucuggacu

SEQ ID NO: 510579 - RNA, 22 nt, Human
cugucuguuuuaccuucuccag

SEQ ID NO: 510580 - RNA, 22 nt, Human
ggccccaggccuuuggucuggc

SEQ ID NO: 510581 - RNA, 22 nt, Human
ccugcaguuuguugugaccccg

SEQ ID NO: 510582 - RNA, 22 nt, Human
cuuccuggccauugccauggca

SEQ ID NO: 510583 - RNA, 22 nt, Human
acuuguugcccuccugaaaauu

SEQ ID NO: 510584 - RNA, 22 nt, Human
ggugcaggacgaaguggggguu

SEQ ID NO: 510585 - RNA, 22 nt, Human
aaucuugaguguuacucucauu

SEQ ID NO: 510586 - RNA, 22 nt, Human
cccaggcacucuuggucauuuu

SEQ ID NO: 510587 - RNA, 22 nt, Human
ucuggcucuaacuaggcaucag

SEQ ID NO: 510588 - RNA, 22 nt, Human
gcucuguacgcaggaugagggg

SEQ ID NO: 510589 - RNA, 22 nt, Human
ucucugagcccaauguagcaau

SEQ ID NO: 510590 - RNA, 22 nt, Human
cuaggaauccuuuuagaguugg

SEQ ID NO: 510591 - RNA, 22 nt, Human
ucagcaaugugauacugugcaa

SEQ ID NO: 510592 - RNA, 22 nt, Human
cucuuugucacucauacaguca

SEQ ID NO: 510593 - RNA, 22 nt, Human
aggcuuccuggaggaagaggua

SEQ ID NO: 510594 - RNA, 22 nt, Human
ucucagagggaaacaugaguga

SEQ ID NO: 510595 - RNA, 22 nt, Human
cugugagcuggguggccaggac

SEQ ID NO: 510596 - RNA, 22 nt, Human
agaucuggaacugagguuuauu

SEQ ID NO: 510597 - RNA, 22 nt, Human
uccugucugucuuuggucccuu

SEQ ID NO: 510598 - RNA, 22 nt, Human
cacugcuuaguugguaaaugug

SEQ ID NO: 510599 - RNA, 21 nt, Human
ccugcagcaccagaaggagau

SEQ ID NO: 510600 - RNA, 22 nt, Human
caggauggucuucauuuggcuc

SEQ ID NO: 510601 - RNA, 22 nt, Human
auggcuucuagcauugucacaa

SEQ ID NO: 510602 - RNA, 22 nt, Human
gcugagugauugauauuuuagu

SEQ ID NO: 510603 - RNA, 22 nt, Human
cagacccugggccacagaggag

SEQ ID NO: 510604 - RNA, 22 nt, Human
augaagucuagcaagcauugaa

SEQ ID NO: 510605 - RNA, 22 nt, Human
cucuggccugcuuccucaggua

SEQ ID NO: 510606 - RNA, 22 nt, Human
ccuaaguaaguugacuuucaga

SEQ ID NO: 510607 - RNA, 21 nt, Human
ugccaggccugagcugggguc

SEQ ID NO: 510608 - RNA, 19 nt, Human
ggagucugagcccagguau

SEQ ID NO: 510609 - RNA, 22 nt, Human
uuugcaaagugcuugcagagua

SEQ ID NO: 510610 - RNA, 22 nt, Human
uggccagccuugucaucgcuuu

SEQ ID NO: 510611 - RNA, 21 nt, Human
cagagcuguccaaacccugac

SEQ ID NO: 510612 - RNA, 22 nt, Human
aagcugccagcugagcugaggc

SEQ ID NO: 510613 - RNA, 22 nt, Human
ugcugcauuuaucuucucaaac

SEQ ID NO: 510614 - RNA, 22 nt, Human
cagggccucauccucagagauu

SEQ ID NO: 510615 - RNA, 22 nt, Human
gcugcucugugacagccuccgg

SEQ ID NO: 510616 - RNA, 22 nt, Human
agagcccuuucuccaggcaccu

SEQ ID NO: 510617 - RNA, 21 nt, Human
cccucaggaaacagaaugcac

SEQ ID NO: 510618 - RNA, 22 nt, Human
aucaguuuggugcuuucaguga

SEQ ID NO: 510619 - RNA, 22 nt, Human
auaagcucuggacagccacauu

SEQ ID NO: 510620 - RNA, 18 nt, Human
ucugagggugcgggagcu

SEQ ID NO: 510621 - RNA, 22 nt, Human
caguccuggggaccaggcugag

SEQ ID NO: 510622 - RNA, 22 nt, Human
auggaaauaucuuuagagcuua

SEQ ID NO: 510623 - RNA, 22 nt, Human
cuccuucagcugaaucccugcu

SEQ ID NO: 510624 - RNA, 18 nt, Human
uuuauauggauagagacc

SEQ ID NO: 510625 - RNA, 22 nt, Human
uuuauucacuucagugccaaag

SEQ ID NO: 510626 - RNA, 22 nt, Human
cagaugagcaugggcacaagca

SEQ ID NO: 510627 - RNA, 22 nt, Human
gauaauauuagaagauacaaau

SEQ ID NO: 510628 - RNA, 22 nt, Human
auucuuuucccaacugcuuuaa

SEQ ID NO: 510629 - RNA, 22 nt, Human
agcuucauaauuccuugacuca

SEQ ID NO: 510630 - RNA, 22 nt, Human
gagccccuucugcagucagguu

SEQ ID NO: 510631 - RNA, 22 nt, Human
augaaaacuuuagccucauuag

SEQ ID NO: 510632 - RNA, 22 nt, Human
acagugcaggucucaacaauua

SEQ ID NO: 510633 - RNA, 21 nt, Human
gcagggacaaagcuucaggag

SEQ ID NO: 510634 - RNA, 22 nt, Human
uuacuuuagaucauacugugug

SEQ ID NO: 510635 - RNA, 23 nt, Human
uauuugcuacugguaauucugga

SEQ ID NO: 510636 - RNA, 22 nt, Human
aagcagacagagaauggguuug

SEQ ID NO: 510637 - RNA, 22 nt, Human
accaggcagucaccguccagga

SEQ ID NO: 510638 - RNA, 22 nt, Human
cagggagaagucuggucagucc

SEQ ID NO: 510639 - RNA, 22 nt, Human
uuuggccaugcucaaggguaua

SEQ ID NO: 510640 - RNA, 20 nt, Human
guggagaggcuggcgggacu

SEQ ID NO: 510641 - RNA, 22 nt, Human
uuuugccuaggguugacccguu

SEQ ID NO: 510642 - RNA, 22 nt, Human
gcugccuccugaaagcgcucug

SEQ ID NO: 510643 - RNA, 22 nt, Human
uacaacaggaauuucaacuuug

SEQ ID NO: 510644 - RNA, 22 nt, Human
agcagcagggacaaaggaacag

SEQ ID NO: 510645 - RNA, 22 nt, Human
gacaauugcuuuugccgaauaa

SEQ ID NO: 510646 - RNA, 20 nt, Human
agugaauagagacauugccc

SEQ ID NO: 510647 - RNA, 22 nt, Human
ggcuggcaagugucugcucaug

SEQ ID NO: 510648 - RNA, 22 nt, Human
aaacaauguagauuaccauuua

SEQ ID NO: 510649 - RNA, 22 nt, Human
ugacagugacagccaaaggcuu

SEQ ID NO: 510650 - RNA, 22 nt, Human
ccacaggggcccacgagccgcu

SEQ ID NO: 510651 - RNA, 19 nt, Human
agcagagcccugaagaucc

SEQ ID NO: 510652 - RNA, 22 nt, Human
gaauacauggcagggagucauc

SEQ ID NO: 510653 - RNA, 18 nt, Human
ugcucuguuuaaugauuu

SEQ ID NO: 510654 - RNA, 22 nt, Human
acuaagaccuagauacuagggg

SEQ ID NO: 510655 - RNA, 22 nt, Human
ucucacucauuuccuaggucuu

SEQ ID NO: 510656 - RNA, 22 nt, Human
ggccacugaccuacaucugggg

SEQ ID NO: 510657 - RNA, 22 nt, Human
aucuuucagagcuccaucaggg

SEQ ID NO: 510658 - RNA, 22 nt, Human
ucuggcucaggagcuguguuca

SEQ ID NO: 510659 - RNA, 22 nt, Human
gcuccucuauuccccacauuuu

SEQ ID NO: 510660 - RNA, 22 nt, Human
ugaauucuuuuagaauucagug

SEQ ID NO: 510661 - RNA, 22 nt, Human
uugcuuuacaaaaauugauggu

SEQ ID NO: 510662 - RNA, 22 nt, Human
aauauaugacuccacugcauga

SEQ ID NO: 510663 - RNA, 22 nt, Human
agguccugucuaucacccucgc

SEQ ID NO: 510664 - RNA, 22 nt, Human
ucagagaggcaauacuguuuaa

SEQ ID NO: 510665 - RNA, 22 nt, Human
ggcucuggugggaagguuagau

SEQ ID NO: 510666 - RNA, 22 nt, Human
ccaguccacgucaagaagaggu

SEQ ID NO: 510667 - RNA, 22 nt, Human
uugaaugauccuaucuagcaca

SEQ ID NO: 510668 - RNA, 22 nt, Human
ucccagagacaucauuucuccg

SEQ ID NO: 510669 - RNA, 22 nt, Human
ucucugggauaaacugggccag

SEQ ID NO: 510670 - RNA, 21 nt, Human
ggcacagccugaaaugccuca

SEQ ID NO: 510671 - RNA, 22 nt, Human
ccugccagcccgcguucaugcc

SEQ ID NO: 510672 - RNA, 21 nt, Human
ucacagacuggucagugaggc

SEQ ID NO: 510673 - RNA, 22 nt, Human
uuaugcuaaaugaaucaaguca

SEQ ID NO: 510674 - RNA, 22 nt, Human
cugucugucaaguucaucucca

SEQ ID NO: 510675 - RNA, 22 nt, Human
aagauucucagagugaaagaau

SEQ ID NO: 510676 - RNA, 22 nt, Human
gggaaggcauaccugagggaga

SEQ ID NO: 510677 - RNA, 22 nt, Human
cauuaggguaauugaacacuua

SEQ ID NO: 510678 - RNA, 22 nt, Human
cuguagcaaguuauucaauaaa

SEQ ID NO: 510679 - RNA, 22 nt, Human
ugggcucuagacuuuagugugg

SEQ ID NO: 510680 - RNA, 22 nt, Human
uuaauaaguaguaguuauuguu

SEQ ID NO: 510681 - RNA, 22 nt, Human
ugcauuauacuuuuagaaauuu

SEQ ID NO: 510682 - RNA, 22 nt, Human
ggagucugauacugaguuccuc

SEQ ID NO: 510683 - RNA, 22 nt, Human
guccucugauuucuagguauau

SEQ ID NO: 510684 - RNA, 22 nt, Human
auguacaaaaugccacugaauu

SEQ ID NO: 510685 - RNA, 22 nt, Human
acaaaugcaaguuuuaugucaa

SEQ ID NO: 510686 - RNA, 22 nt, Human
acaccagggccuagccagggcg

SEQ ID NO: 510687 - RNA, 22 nt, Human
guacauuuugagguuaaaacaa

SEQ ID NO: 510688 - RNA, 22 nt, Human
gaugguuuaugauagaugggaa

SEQ ID NO: 510689 - RNA, 22 nt, Human
gccuggagcucuccacuugggg

SEQ ID NO: 510690 - RNA, 22 nt, Human
ccccaugaaguagggucucuga

SEQ ID NO: 510691 - RNA, 22 nt, Human
gagcuucccucugcagucccug

SEQ ID NO: 510692 - RNA, 22 nt, Human
acugcagccuuugggcucauaa

SEQ ID NO: 510693 - RNA, 22 nt, Human
uuuauguacauauccacaagga

SEQ ID NO: 510694 - RNA, 22 nt, Human
cagggcaggacagauacauuac

SEQ ID NO: 510695 - RNA, 22 nt, Human
acaguguuguauuuaguuugau

SEQ ID NO: 510696 - RNA, 22 nt, Human
gcccucugcacagcucugagca

SEQ ID NO: 510697 - RNA, 22 nt, Human
gcagaggugaccagcagcaggg

SEQ ID NO: 510698 - RNA, 22 nt, Human
uuucuguagugugguauguagg

SEQ ID NO: 510699 - RNA, 22 nt, Human
agggcuuuugagcgcacgucug

SEQ ID NO: 510700 - RNA, 20 nt, Human
ugucauuguuucuaggaccu

SEQ ID NO: 510701 - RNA, 22 nt, Human
cugagccaaggggacagugaca

SEQ ID NO: 510702 - RNA, 22 nt, Human
ccaguguuuuccaguuugccca

SEQ ID NO: 510703 - RNA, 22 nt, Human
ugcaccauguaaguggccacgu

SEQ ID NO: 510704 - RNA, 22 nt, Human
auuguacaugcagugagucauc

SEQ ID NO: 510705 - RNA, 18 nt, Human
uggcagggaggaaauaua

SEQ ID NO: 510706 - RNA, 22 nt, Human
ccagucacagguguguuuauau

SEQ ID NO: 510707 - RNA, 22 nt, Human
agagaaaacucauugagguguc

SEQ ID NO: 510708 - RNA, 22 nt, Human
aagugccugggcaacauagcaa

SEQ ID NO: 510709 - RNA, 22 nt, Human
ucuggcuucccacucugccggg

SEQ ID NO: 510710 - RNA, 22 nt, Human
agcugcugagccauguccugcu

SEQ ID NO: 510711 - RNA, 22 nt, Human
cagaacugggcagggagcagag

SEQ ID NO: 510712 - RNA, 22 nt, Human
gcugagagugugagaucagauu

SEQ ID NO: 510713 - RNA, 19 nt, Human
ucugaaugggaugaguugg

SEQ ID NO: 510714 - RNA, 22 nt, Human
ucaggagacuuaugucacagug

SEQ ID NO: 510715 - RNA, 22 nt, Human
aaacaguauuaucaauauauuu

SEQ ID NO: 510716 - RNA, 22 nt, Human
uugauucagagaagauuggccc

SEQ ID NO: 510717 - RNA, 22 nt, Human
uugucaaguaaggcugacauuu

SEQ ID NO: 510718 - RNA, 17 nt, Human
gauuuccugaaguucuu

SEQ ID NO: 510719 - RNA, 22 nt, Human
ucagcaucagguugucugaauu

SEQ ID NO: 510720 - RNA, 22 nt, Human
ggccaccuuccaguugccugca

SEQ ID NO: 510721 - RNA, 21 nt, Human
uaaaagaugacaagacagcuc

SEQ ID NO: 510722 - RNA, 22 nt, Human
agcugacucuggccucuggucc

SEQ ID NO: 510723 - RNA, 22 nt, Human
cugagagguaagcagcgcagug

SEQ ID NO: 510724 - RNA, 22 nt, Human
aagauuuccuucaguagagcua

SEQ ID NO: 510725 - RNA, 22 nt, Human
uaaaugaaaggguuuaauuuau

SEQ ID NO: 510726 - RNA, 22 nt, Human
cuguggagcuuguggcaguggg

SEQ ID NO: 510727 - RNA, 22 nt, Human
cucucagaaguagcacgugggc

SEQ ID NO: 510728 - RNA, 20 nt, Human
cagucccaauccagggccag

SEQ ID NO: 510729 - RNA, 22 nt, Human
uuccuugguacagaguagcuuu

SEQ ID NO: 510730 - RNA, 22 nt, Human
cucaggaugcaauuccaucaag

SEQ ID NO: 510731 - RNA, 22 nt, Human
gaaaugcagaaccugagaccau

SEQ ID NO: 510732 - RNA, 22 nt, Human
agcagugggggaguguuaguuu

SEQ ID NO: 510733 - RNA, 22 nt, Human
ucuguucaugucuuuuuaagug

SEQ ID NO: 510734 - RNA, 22 nt, Human
gcagggcugggugggagacaga

SEQ ID NO: 510735 - RNA, 22 nt, Human
gcagcuuuguggagaggcccau

SEQ ID NO: 510736 - RNA, 22 nt, Human
guggugcaggccagcaggggcg

SEQ ID NO: 510737 - RNA, 22 nt, Human
aggagagggguaggauuaauuu

SEQ ID NO: 510738 - RNA, 22 nt, Human
gcagccccaggagacgcccagg

SEQ ID NO: 510739 - RNA, 22 nt, Human
agucuguguauauucacugccc

SEQ ID NO: 510740 - RNA, 22 nt, Human
gguggccucugcaggccucgac

SEQ ID NO: 510741 - RNA, 23 nt, Human
aaucuggcugauguuuuuucucu

SEQ ID NO: 510742 - RNA, 22 nt, Human
accaaggagccacauacaaccu

SEQ ID NO: 510743 - RNA, 22 nt, Human
uaggaacaaguuuccuugcugu

SEQ ID NO: 510744 - RNA, 22 nt, Human
ugaaaucuccucuuuauauauc

SEQ ID NO: 510745 - RNA, 22 nt, Human
cuguguuuggacaacuuuucag

SEQ ID NO: 510746 - RNA, 22 nt, Human
cuggaggaccacagaagcuggu

SEQ ID NO: 510747 - RNA, 22 nt, Human
ucuacuuuucccuauacaguuu

SEQ ID NO: 510748 - RNA, 22 nt, Human
guugacagcuggugagcugcua

SEQ ID NO: 510749 - RNA, 22 nt, Human
auugaaaguccuaucuaaggga

SEQ ID NO: 510750 - RNA, 22 nt, Human
uugaaauggcagcagcugaccu

SEQ ID NO: 510751 - RNA, 22 nt, Human
ugucaccucuuuggcugcagcu

SEQ ID NO: 510752 - RNA, 22 nt, Human
uccuggaggcaaaugaagacuc

SEQ ID NO: 510753 - RNA, 22 nt, Human
aucucugggcuuugaguuuguu

SEQ ID NO: 510754 - RNA, 22 nt, Human
ugcaggcuggauuugcuuuugu

SEQ ID NO: 510755 - RNA, 22 nt, Human
uuguucaugguuguaaguuuga

SEQ ID NO: 510756 - RNA, 22 nt, Human
uccucuggcccagcugccucug

SEQ ID NO: 510757 - RNA, 22 nt, Human
uuaauuaugagaaagggaaaag

SEQ ID NO: 510758 - RNA, 22 nt, Human
uucucuucccacuuucuguauu

SEQ ID NO: 510759 - RNA, 22 nt, Human
ggcaggugcucugugggccugg

SEQ ID NO: 510760 - RNA, 22 nt, Human
uccaggucuuccuauuccaggu

SEQ ID NO: 510761 - RNA, 22 nt, Human
auugacaagugagcugggcugc

SEQ ID NO: 510762 - RNA, 22 nt, Human
caaagugcuggaauuacaggug

SEQ ID NO: 510763 - RNA, 22 nt, Human
gugaggugggcuggccagagac

SEQ ID NO: 510764 - RNA, 22 nt, Human
gcugcugcgcuugucuacuguu

SEQ ID NO: 510765 - RNA, 22 nt, Human
agccccucuguagcuaauagua

SEQ ID NO: 510766 - RNA, 22 nt, Human
ucccacucccaggcaggccucu

SEQ ID NO: 510767 - RNA, 22 nt, Human
cagagccacugucugccaggca

SEQ ID NO: 510768 - RNA, 22 nt, Human
cagucacacaaguggacuuggg

SEQ ID NO: 510769 - RNA, 22 nt, Human
uggccuggaaaaaugcagaugg

SEQ ID NO: 510770 - RNA, 22 nt, Human
uagcuauuguugguaguuaccc

SEQ ID NO: 510771 - RNA, 22 nt, Human
gggcagaggcucuggcccaucc

SEQ ID NO: 510772 - RNA, 22 nt, Human
gacagggcaagacucugucuaa

SEQ ID NO: 510773 - RNA, 22 nt, Human
caggucagagucccccuguccu

SEQ ID NO: 510774 - RNA, 22 nt, Human
acucugggccccagguggagcu

SEQ ID NO: 510775 - RNA, 22 nt, Human
cagguggcuucucccuaggcca

SEQ ID NO: 510776 - RNA, 22 nt, Human
augaauaugagacugagagccu

SEQ ID NO: 510777 - RNA, 22 nt, Human
ugaaugaucuaguuuuguagac

SEQ ID NO: 510778 - RNA, 21 nt, Human
cugugcuuuuuaagugugaug

SEQ ID NO: 510779 - RNA, 22 nt, Human
gugggacucuucuuuggcagug

SEQ ID NO: 510780 - RNA, 22 nt, Human
aucugaagggaaguggaaggca

SEQ ID NO: 510781 - RNA, 22 nt, Human
cugggcugucccagggcggcag

SEQ ID NO: 510782 - RNA, 22 nt, Human
aaaauuuugcccuauccuucau

SEQ ID NO: 510783 - RNA, 22 nt, Human
uggcucaguggcagccgcagcu

SEQ ID NO: 510784 - RNA, 22 nt, Human
gcugaggcaguccacccuugug

SEQ ID NO: 510785 - RNA, 22 nt, Human
agggccagaaucccucagucua

SEQ ID NO: 510786 - RNA, 22 nt, Human
caggcaggagaggaggauuucu

SEQ ID NO: 510787 - RNA, 22 nt, Human
aggagucauaaaugugaacaaa

SEQ ID NO: 510788 - RNA, 22 nt, Human
gcuggagguggugagaaaaggu

SEQ ID NO: 510789 - RNA, 22 nt, Human
uagguccacaagaucaaugcag

SEQ ID NO: 510790 - RNA, 22 nt, Human
auuuauuauugugguuacuucu

SEQ ID NO: 510791 - RNA, 22 nt, Human
ccaaggcuucccagagaugcuc

SEQ ID NO: 510792 - RNA, 19 nt, Human
auggcugcugauuggggau

SEQ ID NO: 510793 - RNA, 22 nt, Human
gaugcgggcccgcuccacugcc

SEQ ID NO: 510794 - RNA, 22 nt, Human
ugguaauuaauuugauagguuc

SEQ ID NO: 510795 - RNA, 18 nt, Human
gcagagugcgucucugug

SEQ ID NO: 510796 - RNA, 22 nt, Human
guuuccugggccccaacccaga

SEQ ID NO: 510797 - RNA, 22 nt, Human
uacaaugcugugcauguaaugg

SEQ ID NO: 510798 - RNA, 22 nt, Human
acuguacauauggauucuaaga

SEQ ID NO: 510799 - RNA, 22 nt, Human
cuuuaagagaucaccaaucaca

SEQ ID NO: 510800 - RNA, 22 nt, Human
cucacugugccuuuucccaaac

SEQ ID NO: 510801 - RNA, 22 nt, Human
cuuguagaauugaaauggucuc

SEQ ID NO: 510802 - RNA, 22 nt, Human
uagcuuuacaaagugcugcacc

SEQ ID NO: 510803 - RNA, 22 nt, Human
ugcccaggguggagugcagcgg

SEQ ID NO: 510804 - RNA, 22 nt, Human
cagcccugcagagggcgcuccu

SEQ ID NO: 510805 - RNA, 22 nt, Human
ucuuuggggcaucugggagauu

SEQ ID NO: 510806 - RNA, 22 nt, Human
caaaguaugaaccaguuucucu

SEQ ID NO: 510807 - RNA, 22 nt, Human
aguggcuguccuggcucuaacu

SEQ ID NO: 510808 - RNA, 22 nt, Human
ucagaggcuacagucugggagu

SEQ ID NO: 510809 - RNA, 22 nt, Human
aggcagcuucugauuagcagcg

SEQ ID NO: 510810 - RNA, 22 nt, Human
cagugucuccagaugcuccaau

SEQ ID NO: 510811 - RNA, 22 nt, Human
auaugcacacucugcccacaga

SEQ ID NO: 510812 - RNA, 22 nt, Human
uuaaguaagaccuuaugucuug

SEQ ID NO: 510813 - RNA, 20 nt, Human
aaagugcacagauacagcuc

SEQ ID NO: 510814 - RNA, 22 nt, Human
uacauucucuucccauugucuc

SEQ ID NO: 510815 - RNA, 22 nt, Human
ucauguuauugacucauaauau

SEQ ID NO: 510816 - RNA, 22 nt, Human
cucuggaguggguggccgggag

SEQ ID NO: 510817 - RNA, 22 nt, Human
auuuugcugugguacauuagga

SEQ ID NO: 510818 - RNA, 22 nt, Human
ucaagagauugaauaauaacug

SEQ ID NO: 510819 - RNA, 23 nt, Human
cuggcuccgaagacuccaggauc

SEQ ID NO: 510820 - RNA, 22 nt, Human
ucuccaagcagggcugcaaggc

SEQ ID NO: 510821 - RNA, 22 nt, Human
guaaacaucgacccaacagggg

SEQ ID NO: 510822 - RNA, 22 nt, Human
ucuccacucugagugccuuuca

SEQ ID NO: 510823 - RNA, 22 nt, Human
uccuugaauugugccacuuacc

SEQ ID NO: 510824 - RNA, 22 nt, Human
ugcagcccuuccuuccucuggg

SEQ ID NO: 510825 - RNA, 17 nt, Human
ucugccgacugccagcu

SEQ ID NO: 510826 - RNA, 22 nt, Human
uagaaucauugagaauaacagg

SEQ ID NO: 510827 - RNA, 23 nt, Human
gguccaggaaaggcagcagcacc

SEQ ID NO: 510828 - RNA, 19 nt, Human
cgcaggcuucgggucgcuc

SEQ ID NO: 510829 - RNA, 22 nt, Human
aucucagacauguuguccauga

SEQ ID NO: 510830 - RNA, 22 nt, Human
agggagguaggagcuucuagcu

SEQ ID NO: 510831 - RNA, 22 nt, Human
gcaggcucacucuguuuggcuc

SEQ ID NO: 510832 - RNA, 19 nt, Human
ucuaacagaagugucgucc

SEQ ID NO: 510833 - RNA, 22 nt, Human
ugcuccagugagcuggccaucc

SEQ ID NO: 510834 - RNA, 21 nt, Human
uccacaaguuagaaggaaauu

SEQ ID NO: 510835 - RNA, 22 nt, Human
ggcuucuuaaucaugagaguga

SEQ ID NO: 510836 - RNA, 22 nt, Human
uuagcauuucauuucaagagga

SEQ ID NO: 510837 - RNA, 22 nt, Human
guccucuguagggcugggccac

SEQ ID NO: 510838 - RNA, 22 nt, Human
uaguccaguaaaacagcuaacg

SEQ ID NO: 510839 - RNA, 22 nt, Human
aggugccaauuuucagugaaca

SEQ ID NO: 510840 - RNA, 22 nt, Human
caggccaggcugcauuugcccc

SEQ ID NO: 510841 - RNA, 20 nt, Human
gcacugaaauucaauguuug

SEQ ID NO: 510842 - RNA, 22 nt, Human
cucuaaauccaaauaagugucc

SEQ ID NO: 510843 - RNA, 22 nt, Human
uccauuuuucaugacuccucaa

SEQ ID NO: 510844 - RNA, 22 nt, Human
aaagcagugcaccuuaauugau

SEQ ID NO: 510845 - RNA, 22 nt, Human
ccaggaguuugaggcugcagug

SEQ ID NO: 510846 - RNA, 22 nt, Human
aaugacaugcuuuuuaauuaua

SEQ ID NO: 510847 - RNA, 22 nt, Human
agagggccauaggugcauaguu

SEQ ID NO: 510848 - RNA, 21 nt, Human
gccaccucgucucggagcagc

SEQ ID NO: 510849 - RNA, 22 nt, Human
cuggccacuggagguggcaccc

SEQ ID NO: 510850 - RNA, 22 nt, Human
aguaaaaucuuaagcacagugg

SEQ ID NO: 510851 - RNA, 22 nt, Human
ugcugaauaauaagauuacuca

SEQ ID NO: 510852 - RNA, 22 nt, Human
cagagcuguauuuaucuuucca

SEQ ID NO: 510853 - RNA, 22 nt, Human
ggagaauggccaucuuuucaga

SEQ ID NO: 510854 - RNA, 22 nt, Human
uggcaguguauagguggcuccu

SEQ ID NO: 510855 - RNA, 22 nt, Human
aagcagaucugauagggcccug

SEQ ID NO: 510856 - RNA, 22 nt, Human
caggaaauggcugaauaaauuc

SEQ ID NO: 510857 - RNA, 22 nt, Human
agagggcugccucagucagcua

SEQ ID NO: 510858 - RNA, 22 nt, Human
agcacaaauauaaaaaugucug

SEQ ID NO: 510859 - RNA, 18 nt, Human
ggguucaccugccuuugg

SEQ ID NO: 510860 - RNA, 22 nt, Human
aagauguugucguuagugauga

SEQ ID NO: 510861 - RNA, 22 nt, Human
gcagcuuuggagguggaacucu

SEQ ID NO: 510862 - RNA, 22 nt, Human
ccucucuguaagggucccuccc

SEQ ID NO: 510863 - RNA, 22 nt, Human
aagaauguucauuaaacuguug

SEQ ID NO: 510864 - RNA, 22 nt, Human
gcugcagcagaaguucucagag

SEQ ID NO: 510865 - RNA, 22 nt, Human
gaauauuuucaguacagauggu

SEQ ID NO: 510866 - RNA, 22 nt, Human
uguuuugucuaauagggcaggu

SEQ ID NO: 510867 - RNA, 22 nt, Human
caccaggcugaaccagagggga

SEQ ID NO: 510868 - RNA, 22 nt, Human
uuagcauuuucugggcugaaau

SEQ ID NO: 510869 - RNA, 22 nt, Human
caggcuccuucccagggauggu

SEQ ID NO: 510870 - RNA, 22 nt, Human
uccaagcacuguuaauuaaacu

SEQ ID NO: 510871 - RNA, 22 nt, Human
gccacagucacugcugcagggg

SEQ ID NO: 510872 - RNA, 22 nt, Human
cuccagcugccaccagauguuu

SEQ ID NO: 510873 - RNA, 22 nt, Human
cagcaaaagccagcauaagcuc

SEQ ID NO: 510874 - RNA, 20 nt, Human
auacaaagagauugauguau

SEQ ID NO: 510875 - RNA, 22 nt, Human
guccuggcugguucuguggggc

SEQ ID NO: 510876 - RNA, 22 nt, Human
uuguagaaucauuauuucuagu

SEQ ID NO: 510877 - RNA, 22 nt, Human
uucucuggaacugaaacaagau

SEQ ID NO: 510878 - RNA, 22 nt, Human
aacauuaauuacagucaaacau

SEQ ID NO: 510879 - RNA, 22 nt, Human
aaaaaugaaacggcugguuggc

SEQ ID NO: 510880 - RNA, 22 nt, Human
agagcugggugguggugacuca

SEQ ID NO: 510881 - RNA, 22 nt, Human
agucacaguuucccugagagag

SEQ ID NO: 510882 - RNA, 22 nt, Human
aaggcuuuugggaauuuucaac

SEQ ID NO: 510883 - RNA, 22 nt, Human
ucacagaaguguagugaggaaa

SEQ ID NO: 510884 - RNA, 22 nt, Human
cccagagaucuuguccuuucca

SEQ ID NO: 510885 - RNA, 22 nt, Human
aaacagcuggucucaaauguuc

SEQ ID NO: 510886 - RNA, 22 nt, Human
uucaguguggcccaugaagagg

SEQ ID NO: 510887 - RNA, 22 nt, Human
ggcucagacucccaggcccucu

SEQ ID NO: 510888 - RNA, 22 nt, Human
ugcuccuguuucaucagcuaua

SEQ ID NO: 510889 - RNA, 22 nt, Human
aaugaagcaagcugcuguguuu

SEQ ID NO: 510890 - RNA, 22 nt, Human
gaggcacaguguuuggucagug

SEQ ID NO: 510891 - RNA, 22 nt, Human
cagucucuuuauccaccaagcc

SEQ ID NO: 510892 - RNA, 22 nt, Human
ucugaggcuaagagacagaggc

SEQ ID NO: 510893 - RNA, 22 nt, Human
augcaaagcacacacagaaucc

SEQ ID NO: 510894 - RNA, 22 nt, Human
aucaggauucaguaucuccagc

SEQ ID NO: 510895 - RNA, 22 nt, Human
acuuccugggcaugcagagucc

SEQ ID NO: 510896 - RNA, 22 nt, Human
gcugucucauacaaggcccugc

SEQ ID NO: 510897 - RNA, 22 nt, Human
gaggcacaucacuuggugcauu

SEQ ID NO: 510898 - RNA, 20 nt, Human
auuuguuucuacucucugac

SEQ ID NO: 510899 - RNA, 21 nt, Human
agcugccacccuagcuucuga

SEQ ID NO: 510900 - RNA, 22 nt, Human
ugucccaguuuugcagguuaga

SEQ ID NO: 510901 - RNA, 22 nt, Human
accauuuuggguauuuucagag

SEQ ID NO: 510902 - RNA, 22 nt, Human
ccacugggcguuucuguccaau

SEQ ID NO: 510903 - RNA, 22 nt, Human
cccagagcuccgguccugccca

SEQ ID NO: 510904 - RNA, 22 nt, Human
ugaaaucugcaugcaaaguccu

SEQ ID NO: 510905 - RNA, 22 nt, Human
gcucaggagcucuugguggcgc

SEQ ID NO: 510906 - RNA, 23 nt, Human
uaauuagauguugauuccugaga

SEQ ID NO: 510907 - RNA, 22 nt, Human
caguucuaauuaauaggaguaa

SEQ ID NO: 510908 - RNA, 22 nt, Human
gcacacauucggauucuuaacc

SEQ ID NO: 510909 - RNA, 22 nt, Human
uuacaaucugauugucucaucu

SEQ ID NO: 510910 - RNA, 22 nt, Human
uucuugcaggucacucacugag

SEQ ID NO: 510911 - RNA, 22 nt, Human
ccagcuccgggaguugcugcug

SEQ ID NO: 510912 - RNA, 22 nt, Human
cucugggugggcagcagaugga

SEQ ID NO: 510913 - RNA, 22 nt, Human
aaggcagccgugugacugcaug

SEQ ID NO: 510914 - RNA, 19 nt, Human
uuucugcagcccagcagca

SEQ ID NO: 510915 - RNA, 18 nt, Human
ugaauagggguuugcaga

SEQ ID NO: 510916 - RNA, 22 nt, Human
cagcagcugguugaauccuucu

SEQ ID NO: 510917 - RNA, 22 nt, Human
aggcaugugacccuggacucag

SEQ ID NO: 510918 - RNA, 22 nt, Human
auuugccuuacugaagaaggag

SEQ ID NO: 510919 - RNA, 22 nt, Human
aaaugaguuugccucuagauag

SEQ ID NO: 510920 - RNA, 22 nt, Human
uagucacaaccuucaaguuguc

SEQ ID NO: 510921 - RNA, 22 nt, Human
uagcauuucacugaucuucacu

SEQ ID NO: 510922 - RNA, 20 nt, Human
auuauucauacaugugugac

SEQ ID NO: 510923 - RNA, 22 nt, Human
ugggaccugaagcagguuggca

SEQ ID NO: 510924 - RNA, 22 nt, Human
cugaggccucucuccugggcuu

SEQ ID NO: 510925 - RNA, 22 nt, Human
agaauucuguucuucgggugug

SEQ ID NO: 510926 - RNA, 22 nt, Human
aaggcuggucagauguggugaa

SEQ ID NO: 510927 - RNA, 22 nt, Human
cuagagaggcagauguccugug

SEQ ID NO: 510928 - RNA, 22 nt, Human
agucucagggccacccggggaa

SEQ ID NO: 510929 - RNA, 22 nt, Human
agguccuguccuuggucucuga

SEQ ID NO: 510930 - RNA, 22 nt, Human
uuuacaugaguagcagauguuc

SEQ ID NO: 510931 - RNA, 22 nt, Human
ccuggaggcucugggagggcag

SEQ ID NO: 510932 - RNA, 22 nt, Human
uuuccuuguucauuugcccuau

SEQ ID NO: 510933 - RNA, 22 nt, Human
ugggcagagaguagaggcaacg

SEQ ID NO: 510934 - RNA, 22 nt, Human
gcaaagcacacccucagaguuu

SEQ ID NO: 510935 - RNA, 22 nt, Human
ugcuuuauaggggauugcaggc

SEQ ID NO: 510936 - RNA, 22 nt, Human
agcuggaggggccagcaggugu

SEQ ID NO: 510937 - RNA, 22 nt, Human
ucccagaggcaguugguaacuu

SEQ ID NO: 510938 - RNA, 22 nt, Human
guaugaaguaagauauuguuca

SEQ ID NO: 510939 - RNA, 22 nt, Human
aaucaaagaaugggcuaguugg

SEQ ID NO: 510940 - RNA, 22 nt, Human
ugaaguuuucugguugauuaag

SEQ ID NO: 510941 - RNA, 22 nt, Human
ucuccucaccaccagcagcaga

SEQ ID NO: 510942 - RNA, 22 nt, Human
ucagagugaccuuacauggucu

SEQ ID NO: 510943 - RNA, 22 nt, Human
gcaaacauguugugagauacca

SEQ ID NO: 510944 - RNA, 22 nt, Human
cagcucuguucauagauggugc

SEQ ID NO: 510945 - RNA, 22 nt, Human
aaguguuuggggaucauuuuaa

SEQ ID NO: 510946 - RNA, 22 nt, Human
uuguuucauggggauguuuauu

SEQ ID NO: 510947 - RNA, 17 nt, Human
ugcuucuguauugcugg

SEQ ID NO: 510948 - RNA, 22 nt, Human
cucccagagagcaggugggccg

SEQ ID NO: 510949 - RNA, 22 nt, Human
cauuucuauggcaaugggaaaa

SEQ ID NO: 510950 - RNA, 22 nt, Human
caccccagucuaaaaccagccu

SEQ ID NO: 510951 - RNA, 20 nt, Human
gcuucaaagccauccuuuua

SEQ ID NO: 510952 - RNA, 22 nt, Human
ccagcagagucuaggaaggagg

SEQ ID NO: 510953 - RNA, 23 nt, Human
agagcuuagggaauucacaugag

SEQ ID NO: 510954 - RNA, 22 nt, Human
aaacugaauucccaagggcaug

SEQ ID NO: 510955 - RNA, 20 nt, Human
auagauaucaucuuuagaag

SEQ ID NO: 510956 - RNA, 22 nt, Human
accaggagccauagagucaggc

SEQ ID NO: 510957 - RNA, 22 nt, Human
uagcagaaccagcagucaauuu

SEQ ID NO: 510958 - RNA, 23 nt, Human
gccucuggagccccagugcucag

SEQ ID NO: 510959 - RNA, 22 nt, Human
gguggccaggccagcucuggcc

SEQ ID NO: 510960 - RNA, 22 nt, Human
aggaggcccuagagcucuagag

SEQ ID NO: 510961 - RNA, 22 nt, Human
gcaggcacuccuaggaccauca

SEQ ID NO: 510962 - RNA, 22 nt, Human
auguguaaaaagugcuuaauau

SEQ ID NO: 510963 - RNA, 22 nt, Human
auguccuuugcuucucuggucc

SEQ ID NO: 510964 - RNA, 22 nt, Human
agcugugguguuuucaagcccu

SEQ ID NO: 510965 - RNA, 22 nt, Human
cuggguucucugcuuagggccu

SEQ ID NO: 510966 - RNA, 22 nt, Human
ggaggccauaguuugggaguca

SEQ ID NO: 510967 - RNA, 22 nt, Human
uuguggcucgugagauguuagg

SEQ ID NO: 510968 - RNA, 22 nt, Human
ucagcuuucucaaagaagcugg

SEQ ID NO: 510969 - RNA, 20 nt, Human
aagcagaagcugcucucagc

SEQ ID NO: 510970 - RNA, 22 nt, Human
agucccagcuacucaagaggcu

SEQ ID NO: 510971 - RNA, 22 nt, Human
ucagcucuguguacaguuagca

SEQ ID NO: 510972 - RNA, 22 nt, Human
gccacacuuauucucaugcaca

SEQ ID NO: 510973 - RNA, 22 nt, Human
aggccuccugcagggaugagug

SEQ ID NO: 510974 - RNA, 22 nt, Human
aagacuguacauuuuccagucu

SEQ ID NO: 510975 - RNA, 22 nt, Human
ugguacacauguccaaggucag

SEQ ID NO: 510976 - RNA, 22 nt, Human
cagauagcaauuugggcagggg

SEQ ID NO: 510977 - RNA, 22 nt, Human
aagaaagguguguuugcagaug

SEQ ID NO: 510978 - RNA, 22 nt, Human
uuagcuuaauuaaauaaucagu

SEQ ID NO: 510979 - RNA, 22 nt, Human
uggcuucuugacuucuuggcug

SEQ ID NO: 510980 - RNA, 22 nt, Human
acaugauuuuuaaagagauaau

SEQ ID NO: 510981 - RNA, 22 nt, Human
guguccagagaaacucacagcu

SEQ ID NO: 510982 - RNA, 22 nt, Human
uaucagcaucuccucaaagaua

SEQ ID NO: 510983 - RNA, 22 nt, Human
aguucacuuucuguaguggaag

SEQ ID NO: 510984 - RNA, 22 nt, Human
aggggagaaaaaugccuucugu

SEQ ID NO: 510985 - RNA, 20 nt, Human
uugauucaagggcugaugga

SEQ ID NO: 510986 - RNA, 23 nt, Human
gcauugucuccccacuucugggc

SEQ ID NO: 510987 - RNA, 22 nt, Human
cuggcccagagagcagagcuua

SEQ ID NO: 510988 - RNA, 22 nt, Human
uccauggguagcccugguugag

SEQ ID NO: 510989 - RNA, 22 nt, Human
ccuccaggaacuugagagacac

SEQ ID NO: 510990 - RNA, 22 nt, Human
cccagacauaacagcagagagg

SEQ ID NO: 510991 - RNA, 22 nt, Human
cuuuagaaaucuggauguauuu

SEQ ID NO: 510992 - RNA, 22 nt, Human
ucaguguuugguuucagaauug

SEQ ID NO: 510993 - RNA, 22 nt, Human
uuaguuuucccaucuuuauggu

SEQ ID NO: 510994 - RNA, 22 nt, Human
cagggcuugcaggagaaaguuu

SEQ ID NO: 510995 - RNA, 22 nt, Human
gggucccaggaaggagcagugu

SEQ ID NO: 510996 - RNA, 22 nt, Human
agcuuuaugggagcuuagauaa

SEQ ID NO: 510997 - RNA, 22 nt, Human
guuuggauagugagagauacuu

SEQ ID NO: 510998 - RNA, 22 nt, Human
ucucagaguuuuuuuccaggac

SEQ ID NO: 510999 - RNA, 22 nt, Human
aguguuuggggugauuguaacc

SEQ ID NO: 511000 - RNA, 22 nt, Human
uaagaacagauaaaguuucccc

SEQ ID NO: 511001 - RNA, 23 nt, Human
ugaaggccuggaggacgcguugu

SEQ ID NO: 511002 - RNA, 22 nt, Human
gcagauggugggggaggaguac

SEQ ID NO: 511003 - RNA, 22 nt, Human
ccuucucuacuccugaugcaug

SEQ ID NO: 511004 - RNA, 17 nt, Human
uuccaaggagcauuuga

SEQ ID NO: 511005 - RNA, 22 nt, Human
aucaggauagucuguaaauugu

SEQ ID NO: 511006 - RNA, 22 nt, Human
agggggugcuacuuccagaguu

SEQ ID NO: 511007 - RNA, 22 nt, Human
gucuggagccugggucccugcu

SEQ ID NO: 511008 - RNA, 22 nt, Human
ggagagguuauccguguuaugu

SEQ ID NO: 511009 - RNA, 22 nt, Human
ucacacagcuccuuuccuuagu

SEQ ID NO: 511010 - RNA, 22 nt, Human
cacauuuaaagguugaagcuga

SEQ ID NO: 511011 - RNA, 21 nt, Human
uccauaagagaccaucuccua

SEQ ID NO: 511012 - RNA, 22 nt, Human
aagauacagacagagccaaaau

SEQ ID NO: 511013 - RNA, 22 nt, Human
uggccucuuaggacauccucua

SEQ ID NO: 511014 - RNA, 22 nt, Human
ggucaugcugugaaucagugcu

SEQ ID NO: 511015 - RNA, 22 nt, Human
cucugugcuuaugcuccauggg

SEQ ID NO: 511016 - RNA, 22 nt, Human
aaacagcuaauggccaggaaua

SEQ ID NO: 511017 - RNA, 22 nt, Human
ugcaaaauaaugaacgauuuuu

SEQ ID NO: 511018 - RNA, 22 nt, Human
aauacuuuccuauauaaggugc

SEQ ID NO: 511019 - RNA, 22 nt, Human
acacagaaccucauagccucuc

SEQ ID NO: 511020 - RNA, 22 nt, Human
aagcaagacagaaguuacugcc

SEQ ID NO: 511021 - RNA, 22 nt, Human
ucaaguauuuauuucugcuggc

SEQ ID NO: 511022 - RNA, 22 nt, Human
ugauucuguucuccuugagaau

SEQ ID NO: 511023 - RNA, 21 nt, Human
ucugucugguuuuagaguggc

SEQ ID NO: 511024 - RNA, 22 nt, Human
cuggucugagggcucuugaggc

SEQ ID NO: 511025 - RNA, 20 nt, Human
ucugugugccaucaccuaac

SEQ ID NO: 511026 - RNA, 22 nt, Human
ucucuucuugauuuucacugga

SEQ ID NO: 511027 - RNA, 22 nt, Human
ucaggcucuacacuugacacac

SEQ ID NO: 511028 - RNA, 22 nt, Human
aauuaggggaggacguaucaua

SEQ ID NO: 511029 - RNA, 22 nt, Human
cuacauuucccagcugccuucc

SEQ ID NO: 511030 - RNA, 22 nt, Human
uggcuguggacucagauggcuc

SEQ ID NO: 511031 - RNA, 22 nt, Human
ugagagagccugaaucucuuac

SEQ ID NO: 511032 - RNA, 22 nt, Human
ccugagagcagcuuccugcuua

SEQ ID NO: 511033 - RNA, 22 nt, Human
cuguaugaguugggaauagaau

SEQ ID NO: 511034 - RNA, 22 nt, Human
ccagggcaauuauuuggagggu

SEQ ID NO: 511035 - RNA, 22 nt, Human
ugccaaguggagcucaggaauc

SEQ ID NO: 511036 - RNA, 22 nt, Human
acucugggaugagaaaaggguu

SEQ ID NO: 511037 - RNA, 22 nt, Human
auuagcuucugugcauggacuu

SEQ ID NO: 511038 - RNA, 22 nt, Human
acacuguagcugagggcaugcg

SEQ ID NO: 511039 - RNA, 22 nt, Human
uggcagcacuagguacugagcu

SEQ ID NO: 511040 - RNA, 22 nt, Human
ggcugcuguuucagagacuguu

SEQ ID NO: 511041 - RNA, 22 nt, Human
uggagcugagagccaggcuggc

SEQ ID NO: 511042 - RNA, 22 nt, Human
cuguccuccggccaccuacagu

SEQ ID NO: 511043 - RNA, 22 nt, Human
ccucuggccauucuuugaugga

SEQ ID NO: 511044 - RNA, 22 nt, Human
ugcugauauauucuaguuuucu

SEQ ID NO: 511045 - RNA, 22 nt, Human
aaugaacuggagaacaaugacc

SEQ ID NO: 511046 - RNA, 22 nt, Human
gacaucauagggugggaggaaa

SEQ ID NO: 511047 - RNA, 22 nt, Human
aggcaggcacuccggaaguguc

SEQ ID NO: 511048 - RNA, 22 nt, Human
cuggugcaggaaggagcuggca

SEQ ID NO: 511049 - RNA, 22 nt, Human
uuuucauuuuuguagaugcaag

SEQ ID NO: 511050 - RNA, 22 nt, Human
ucagaggacagcagcuaaauaa

SEQ ID NO: 511051 - RNA, 22 nt, Human
agauguggaacacuagacugcu

SEQ ID NO: 511052 - RNA, 22 nt, Human
aaaguaucaagggaagcauuuu

SEQ ID NO: 511053 - RNA, 22 nt, Human
uagucaaaccucagaauacccc

SEQ ID NO: 511054 - RNA, 22 nt, Human
ccuggcugcauuuugcuggaug

SEQ ID NO: 511055 - RNA, 22 nt, Human
caugugugugagggaaacaugu

SEQ ID NO: 511056 - RNA, 22 nt, Human
cuauuuguaagagccccacacc

SEQ ID NO: 511057 - RNA, 22 nt, Human
ggagauuuauagcacacuucag

SEQ ID NO: 511058 - RNA, 22 nt, Human
uggaagagaaaauccacccuua

SEQ ID NO: 511059 - RNA, 22 nt, Human
uuagauaaaaguguucaauaaa

SEQ ID NO: 511060 - RNA, 22 nt, Human
ugcuacacuuaaaucagucacc

SEQ ID NO: 511061 - RNA, 22 nt, Human
cagagcuggagaaguggauuua

SEQ ID NO: 511062 - RNA, 22 nt, Human
auuguacauaugauguauguaa

SEQ ID NO: 511063 - RNA, 22 nt, Human
ccccacacucuuuacauucaua

SEQ ID NO: 511064 - RNA, 22 nt, Human
ccuucaaaacacuaguuuuuga

SEQ ID NO: 511065 - RNA, 22 nt, Human
cuggagagggagcccuggcagu

SEQ ID NO: 511066 - RNA, 22 nt, Human
auggcugcuuucccuuagcacc

SEQ ID NO: 511067 - RNA, 22 nt, Human
aagaugauagaucugucaaugu

SEQ ID NO: 511068 - RNA, 22 nt, Human
gucuggcauucuuccuggagaa

SEQ ID NO: 511069 - RNA, 22 nt, Human
accucaguucaauucaguuaga

SEQ ID NO: 511070 - RNA, 22 nt, Human
gucccuggagcugagcagugcu

SEQ ID NO: 511071 - RNA, 22 nt, Human
uuuaacacuaguuucuuuaacu

SEQ ID NO: 511072 - RNA, 22 nt, Human
uuucacagauguuuuggagucu

SEQ ID NO: 511073 - RNA, 22 nt, Human
aauauugagaaccagcauguuu

SEQ ID NO: 511074 - RNA, 22 nt, Human
ugagccuggcggaagcagcgug

SEQ ID NO: 511075 - RNA, 22 nt, Human
ggcagcuccucucagcaaaaga

SEQ ID NO: 511076 - RNA, 22 nt, Human
cccauuuagauaacaguucaaa

SEQ ID NO: 511077 - RNA, 22 nt, Human
cagcugagcucccaggccauca

SEQ ID NO: 511078 - RNA, 22 nt, Human
aaggccagccugagagcuaaca

SEQ ID NO: 511079 - RNA, 22 nt, Human
agcucucaagauaagaaagaac

SEQ ID NO: 511080 - RNA, 22 nt, Human
ugaaaucuuuaguuucuguccc

SEQ ID NO: 511081 - RNA, 18 nt, Human
cugcugcaggcacucagg

SEQ ID NO: 511082 - RNA, 22 nt, Human
uccagagccccagucuaguggg

SEQ ID NO: 511083 - RNA, 22 nt, Human
gagacugguguuugcugggcug

SEQ ID NO: 511084 - RNA, 22 nt, Human
ccucuggccuaggccgggagag

SEQ ID NO: 511085 - RNA, 22 nt, Human
ccugucauacuaacguaguggg

SEQ ID NO: 511086 - RNA, 22 nt, Human
agaccuggugauagcuguccua

SEQ ID NO: 511087 - RNA, 22 nt, Human
cuucuugcugggggccucagug

SEQ ID NO: 511088 - RNA, 22 nt, Human
gugguaauuuaauccuacacug

SEQ ID NO: 511089 - RNA, 22 nt, Human
ucuguccauuuuccauuuuggc

SEQ ID NO: 511090 - RNA, 22 nt, Human
gcagggacaaggcagguguucu

SEQ ID NO: 511091 - RNA, 22 nt, Human
accucugccacuuucuaacucu

SEQ ID NO: 511092 - RNA, 22 nt, Human
uauggcuucugcuuucuugacu

SEQ ID NO: 511093 - RNA, 22 nt, Human
cuuauaguaugauguugagaau

SEQ ID NO: 511094 - RNA, 22 nt, Human
uuuggccucaugaauuucuugc

SEQ ID NO: 511095 - RNA, 22 nt, Human
uggcuagcccuuguggggagag

SEQ ID NO: 511096 - RNA, 22 nt, Human
aggucaaggccaaaagaguggu

SEQ ID NO: 511097 - RNA, 22 nt, Human
ugcugccacugguagucucauu

SEQ ID NO: 511098 - RNA, 22 nt, Human
ucccacauuacccugacugaca

SEQ ID NO: 511099 - RNA, 22 nt, Human
cuggcuccaggucaugcacuca

SEQ ID NO: 511100 - RNA, 22 nt, Human
uucucuggccugaggcgaggcc

SEQ ID NO: 511101 - RNA, 22 nt, Human
gcagauggcucagacacugggg

SEQ ID NO: 511102 - RNA, 22 nt, Human
aggcccugggcaguucuguagc

SEQ ID NO: 511103 - RNA, 23 nt, Human
aagcugccagucugaagccuggg

SEQ ID NO: 511104 - RNA, 20 nt, Human
cagagaccaggccagguguc

SEQ ID NO: 511105 - RNA, 17 nt, Human
ccucacagggaccagac

SEQ ID NO: 511106 - RNA, 22 nt, Human
cagcagcaacaacggaagccuu

SEQ ID NO: 511107 - RNA, 22 nt, Human
aauguauuugauguauuagccu

SEQ ID NO: 511108 - RNA, 22 nt, Human
cuucuggcguuggaggucugag

SEQ ID NO: 511109 - RNA, 23 nt, Human
ggcagcucucaucugaugacuga

SEQ ID NO: 511110 - RNA, 22 nt, Human
aggaaacagugaacuuggcagg

SEQ ID NO: 511111 - RNA, 22 nt, Human
aaggcccuggccccagcuucuu

SEQ ID NO: 511112 - RNA, 22 nt, Human
caaauuuagguaacagucugua

SEQ ID NO: 511113 - RNA, 22 nt, Human
gaagaaagaucaaauaguuucc

SEQ ID NO: 511114 - RNA, 22 nt, Human
gcugugugcuaggauauguuuu

SEQ ID NO: 511115 - RNA, 22 nt, Human
gaaauauucuugucuuguuuuc

SEQ ID NO: 511116 - RNA, 22 nt, Human
ugcacuuuauuuccucucacac

SEQ ID NO: 511117 - RNA, 22 nt, Human
gcugcuccgucugagcucuggu

SEQ ID NO: 511118 - RNA, 22 nt, Human
acugggcugcuugagugccuuc

SEQ ID NO: 511119 - RNA, 22 nt, Human
agugcuggguacuguucccauu

SEQ ID NO: 511120 - RNA, 22 nt, Human
gagaacuuucuguguuuuuauc

SEQ ID NO: 511121 - RNA, 22 nt, Human
ugggcacuauggcucugugcac

SEQ ID NO: 511122 - RNA, 22 nt, Human
ugguuucucugaacucuacgac

SEQ ID NO: 511123 - RNA, 22 nt, Human
aggaagcaaaaggcagggucua

SEQ ID NO: 511124 - RNA, 22 nt, Human
cagaaggcuggcagauugagau

SEQ ID NO: 511125 - RNA, 22 nt, Human
cacaggcuugucagcaugaggc

SEQ ID NO: 511126 - RNA, 22 nt, Human
ccuggcagcauugguagagauu

SEQ ID NO: 511127 - RNA, 22 nt, Human
aauguguauacuggcaauuaag

SEQ ID NO: 511128 - RNA, 20 nt, Human
auacacaugcagacagaugc

SEQ ID NO: 511129 - RNA, 22 nt, Human
uaaauucugaucaaguuccuuc

SEQ ID NO: 511130 - RNA, 22 nt, Human
auggccaccauuuaaugaagcu

SEQ ID NO: 511131 - RNA, 22 nt, Human
ccagcucucuuugaagcauaaa

SEQ ID NO: 511132 - RNA, 22 nt, Human
uaccucaaguuccaggaaagcg

SEQ ID NO: 511133 - RNA, 22 nt, Human
gcacaaaagguacuucauguag

SEQ ID NO: 511134 - RNA, 22 nt, Human
cauacauuuugcauauuuacca

SEQ ID NO: 511135 - RNA, 22 nt, Human
caaugugugcuuacaggccagu

SEQ ID NO: 511136 - RNA, 22 nt, Human
uucugggacaucuggacaguuu

SEQ ID NO: 511137 - RNA, 22 nt, Human
uucagcacuggacagcgagucu

SEQ ID NO: 511138 - RNA, 22 nt, Human
uggcagcacaagguggcccaug

SEQ ID NO: 511139 - RNA, 22 nt, Human
cuagaaaaauacuuuauuguga

SEQ ID NO: 511140 - RNA, 22 nt, Human
aauucacaaaaccagauugcuu

SEQ ID NO: 511141 - RNA, 22 nt, Human
aaaacacugcaaagcugauugg

SEQ ID NO: 511142 - RNA, 22 nt, Human
gagguccucuguguccgcgggc

SEQ ID NO: 511143 - RNA, 22 nt, Human
augugacaguguuugacagaug

SEQ ID NO: 511144 - RNA, 20 nt, Human
cccucugcuacacugggagc

SEQ ID NO: 511145 - RNA, 19 nt, Human
agggcugcucuggccuggg

SEQ ID NO: 511146 - RNA, 22 nt, Human
gagcugggaguuauagcauguu

SEQ ID NO: 511147 - RNA, 23 nt, Human
uugaauaggguggcaacaaacug

SEQ ID NO: 511148 - RNA, 22 nt, Human
ccagagacgucggucagggcgc

SEQ ID NO: 511149 - RNA, 22 nt, Human
aaugcacagcuaaagugguucc

SEQ ID NO: 511150 - RNA, 21 nt, Human
ugugugcauaugcauguacau

SEQ ID NO: 511151 - RNA, 22 nt, Human
uuuuugcaccaaccuaauagaa

SEQ ID NO: 511152 - RNA, 21 nt, Human
uucauaaaccauucucaugca

SEQ ID NO: 511153 - RNA, 22 nt, Human
uaaauuagggacuuuaguuaau

SEQ ID NO: 511154 - RNA, 22 nt, Human
acguuuucagccuuaauguaga

SEQ ID NO: 511155 - RNA, 22 nt, Human
uuggcugaagguuaagugcugg

SEQ ID NO: 511156 - RNA, 22 nt, Human
ccuguguggccaggcuggaguc

SEQ ID NO: 511157 - RNA, 22 nt, Human
cccaggaggcagagguugcagu

SEQ ID NO: 511158 - RNA, 22 nt, Human
uccccaguaagccugcacugug

SEQ ID NO: 511159 - RNA, 22 nt, Human
gcuuccaaaucuguucaaaaug

SEQ ID NO: 511160 - RNA, 22 nt, Human
caugucugaguagagugugauu

SEQ ID NO: 511161 - RNA, 22 nt, Human
agcaugaaaacaugaaacagca

SEQ ID NO: 511162 - RNA, 22 nt, Human
ugaaggccagcucuuuaucagc

SEQ ID NO: 511163 - RNA, 22 nt, Human
agcagaaccacagcacuguuga

SEQ ID NO: 511164 - RNA, 22 nt, Human
ccaggccuggacggguggccug

SEQ ID NO: 511165 - RNA, 22 nt, Human
aggccagaugucgggcuagaag

SEQ ID NO: 511166 - RNA, 22 nt, Human
gggcaagcucuucagaagcucu

SEQ ID NO: 511167 - RNA, 22 nt, Human
uagcagcucacuaacucugcgu

SEQ ID NO: 511168 - RNA, 18 nt, Human
uccauuguucuacuguga

SEQ ID NO: 511169 - RNA, 19 nt, Human
caaggguugggucugucau

SEQ ID NO: 511170 - RNA, 22 nt, Human
cccagcccugaccuauuggaaa

SEQ ID NO: 511171 - RNA, 22 nt, Human
ccagugugguagguccacaggu

SEQ ID NO: 511172 - RNA, 22 nt, Human
agaaggccuaacuugggggcaa

SEQ ID NO: 511173 - RNA, 21 nt, Human
aagagcuggaucaaggauaag

SEQ ID NO: 511174 - RNA, 22 nt, Human
agcugguaugaacaggauagga

SEQ ID NO: 511175 - RNA, 22 nt, Human
cucucuggcuuggcacggagau

SEQ ID NO: 511176 - RNA, 22 nt, Human
uuauggcauauuccucauugua

SEQ ID NO: 511177 - RNA, 22 nt, Human
uuucuacaugucaauccaaacc

SEQ ID NO: 511178 - RNA, 22 nt, Human
uuauuuacuggauggccuuggg

SEQ ID NO: 511179 - RNA, 19 nt, Human
cuguggcugaccucuggcc

SEQ ID NO: 511180 - RNA, 22 nt, Human
uagauuuuacuucugucauuac

SEQ ID NO: 511181 - RNA, 22 nt, Human
aggcugaggcagguggaucauu

SEQ ID NO: 511182 - RNA, 22 nt, Human
agucaguguagaaagcccaggc

SEQ ID NO: 511183 - RNA, 22 nt, Human
auguguuuauaauuacucaauc

SEQ ID NO: 511184 - RNA, 22 nt, Human
uggcucugcgucuguucguggg

SEQ ID NO: 511185 - RNA, 22 nt, Human
ucagauggcacacagagccugc

SEQ ID NO: 511186 - RNA, 22 nt, Human
cucaacagcucugccauacucc

SEQ ID NO: 511187 - RNA, 22 nt, Human
ggcaggugcugggagcaucuca

SEQ ID NO: 511188 - RNA, 19 nt, Human
ggcucucuuaaagcuguuu

SEQ ID NO: 511189 - RNA, 21 nt, Human
aaauuuucuuggcuguagugu

SEQ ID NO: 511190 - RNA, 22 nt, Human
caggcuuaggagucagccugcu

SEQ ID NO: 511191 - RNA, 22 nt, Human
ucaaagucucugcuucuguaac

SEQ ID NO: 511192 - RNA, 22 nt, Human
cauguacaaaaggcaaaugccu

SEQ ID NO: 511193 - RNA, 22 nt, Human
gcagagccaggcuggggcaggu

SEQ ID NO: 511194 - RNA, 22 nt, Human
uacauguuauuucacuauuggu

SEQ ID NO: 511195 - RNA, 19 nt, Human
gcccaggggcccgaugcug

SEQ ID NO: 511196 - RNA, 22 nt, Human
ucuuuuagagcauuucugauuc

SEQ ID NO: 511197 - RNA, 22 nt, Human
agaguggcuucuuugacaugcu

SEQ ID NO: 511198 - RNA, 22 nt, Human
ggagccugggcauuaguaauuu

SEQ ID NO: 511199 - RNA, 22 nt, Human
gguguccgcgcuguagaagguc

SEQ ID NO: 511200 - RNA, 22 nt, Human
gagggcugaagauuguggcccc

SEQ ID NO: 511201 - RNA, 22 nt, Human
agcacagagcucggggaaugga

SEQ ID NO: 511202 - RNA, 22 nt, Human
uggcccugccacucacugcuga

SEQ ID NO: 511203 - RNA, 22 nt, Human
agauguggccggcuagggagag

SEQ ID NO: 511204 - RNA, 22 nt, Human
ucuguagcaagugagaggcauu

SEQ ID NO: 511205 - RNA, 22 nt, Human
cagccugcauuuguaucuguau

SEQ ID NO: 511206 - RNA, 22 nt, Human
gggccacacagaaccuccuggu

SEQ ID NO: 511207 - RNA, 22 nt, Human
uuaaaugaugcauaucauuuag

SEQ ID NO: 511208 - RNA, 21 nt, Human
uuacaaagcuacagauguugc

SEQ ID NO: 511209 - RNA, 22 nt, Human
aaggucuggaugaugggugugc

SEQ ID NO: 511210 - RNA, 22 nt, Human
ugaccaaagaguugcuuguauu

SEQ ID NO: 511211 - RNA, 22 nt, Human
aacacagcuaauuucugucaau

SEQ ID NO: 511212 - RNA, 22 nt, Human
cccugccugugggcaucaacau

SEQ ID NO: 511213 - RNA, 22 nt, Human
uacaaauggguuaaaauauagu

SEQ ID NO: 511214 - RNA, 22 nt, Human
uuucgagggccuuaaguauucc

SEQ ID NO: 511215 - RNA, 22 nt, Human
cauaauuucuguaucagcacca

SEQ ID NO: 511216 - RNA, 22 nt, Human
agcugcccuggcggagcugcuc

SEQ ID NO: 511217 - RNA, 22 nt, Human
gggcuggagccagcuguggcug

SEQ ID NO: 511218 - RNA, 22 nt, Human
ugaaggagggaagaaggcucug

SEQ ID NO: 511219 - RNA, 22 nt, Human
agggcagagaaauguaguugag

SEQ ID NO: 511220 - RNA, 22 nt, Human
aagcccaguuucacacugagac

SEQ ID NO: 511221 - RNA, 22 nt, Human
gcaggcucagagcagauuagca

SEQ ID NO: 511222 - RNA, 22 nt, Human
ugucugaaagaggacgagcugg

SEQ ID NO: 511223 - RNA, 22 nt, Human
guccucugucccuggggcacgg

SEQ ID NO: 511224 - RNA, 22 nt, Human
uuagucuucuuccuuauauguu

SEQ ID NO: 511225 - RNA, 22 nt, Human
uaaagcaggccacauaugugau

SEQ ID NO: 511226 - RNA, 22 nt, Human
gccuggagggucccucucugga

SEQ ID NO: 511227 - RNA, 22 nt, Human
ccugggcuugguuguugagaac

SEQ ID NO: 511228 - RNA, 22 nt, Human
guuuacauauuuuaauugguga

SEQ ID NO: 511229 - RNA, 22 nt, Human
gaggcacugcaguacagugacu

SEQ ID NO: 511230 - RNA, 22 nt, Human
ccagagcuccagggcuacagaa

SEQ ID NO: 511231 - RNA, 22 nt, Human
auacaucuuccuuuuaaaaugc

SEQ ID NO: 511232 - RNA, 22 nt, Human
acauuuaaauaugccuuauauu

SEQ ID NO: 511233 - RNA, 22 nt, Human
aacacuguggucuuuucaguaa

SEQ ID NO: 511234 - RNA, 22 nt, Human
uagcauuuggcaccaguuauuu

SEQ ID NO: 511235 - RNA, 22 nt, Human
aguuuuaugcaguguucugaua

SEQ ID NO: 511236 - RNA, 22 nt, Human
aaggaaaucuuuguaacaucuu

SEQ ID NO: 511237 - RNA, 22 nt, Human
caaaugaugcauggcuagugag

SEQ ID NO: 511238 - RNA, 20 nt, Human
ccuccaggcacacccaugug

SEQ ID NO: 511239 - RNA, 22 nt, Human
gagggcugauaacaggaauaca

SEQ ID NO: 511240 - RNA, 22 nt, Human
cuggaggcacccuuagagaggc

SEQ ID NO: 511241 - RNA, 22 nt, Human
uugugguuaaccgcacauuuuu

SEQ ID NO: 511242 - RNA, 22 nt, Human
ucaccagucuuucuuaccauug

SEQ ID NO: 511243 - RNA, 22 nt, Human
caggcagccaggggaccugucc

SEQ ID NO: 511244 - RNA, 22 nt, Human
ugcucacugaacucuugcuguc

SEQ ID NO: 511245 - RNA, 22 nt, Human
cagagccaggccugcccucuuu

SEQ ID NO: 511246 - RNA, 22 nt, Human
aaccuguucccugguccuugac

SEQ ID NO: 511247 - RNA, 22 nt, Human
cacacaugugugcagcuuagaa

SEQ ID NO: 511248 - RNA, 22 nt, Human
uccucagucagcuccguucuug

SEQ ID NO: 511249 - RNA, 22 nt, Human
guggcagggguauuccagcuga

SEQ ID NO: 511250 - RNA, 22 nt, Human
aaagcauagaauuagaguuagg

SEQ ID NO: 511251 - RNA, 22 nt, Human
ggcagcagaacuggcccuguau

SEQ ID NO: 511252 - RNA, 22 nt, Human
aggcucagauccuuguguccug

SEQ ID NO: 511253 - RNA, 17 nt, Human
cagcuuuaugcuacugu

SEQ ID NO: 511254 - RNA, 22 nt, Human
uucuaguucccucuggaaugua

SEQ ID NO: 511255 - RNA, 22 nt, Human
caaggagauaaaauguugagcu

SEQ ID NO: 511256 - RNA, 20 nt, Human
aggaagcugagauguagagg

SEQ ID NO: 511257 - RNA, 22 nt, Human
gccuggugguauccuggcaaga

SEQ ID NO: 511258 - RNA, 22 nt, Human
agucucugcaugaugcagcaca

SEQ ID NO: 511259 - RNA, 22 nt, Human
aauaaaugaacaaagcagguug

SEQ ID NO: 511260 - RNA, 20 nt, Human
aggcagcugggaaaugaggg

SEQ ID NO: 511261 - RNA, 22 nt, Human
agggcuggcaagggauugaaau

SEQ ID NO: 511262 - RNA, 22 nt, Human
ccaggucuuugacuaauaugcu

SEQ ID NO: 511263 - RNA, 22 nt, Human
gcgcagaguagcagagugcuga

SEQ ID NO: 511264 - RNA, 22 nt, Human
agcaaagacagggacgaccaag

SEQ ID NO: 511265 - RNA, 23 nt, Human
uccagcagagccuuccaggaggg

SEQ ID NO: 511266 - RNA, 22 nt, Human
cugugaauugaauaugacuaug

SEQ ID NO: 511267 - RNA, 22 nt, Human
gaaaagggcaagagagagggca

SEQ ID NO: 511268 - RNA, 22 nt, Human
cagagguauugcaaaagccuag

SEQ ID NO: 511269 - RNA, 22 nt, Human
gccaggcacaguucuaggugcu

SEQ ID NO: 511270 - RNA, 22 nt, Human
uuccaaaggaauggggagcuau

SEQ ID NO: 511271 - RNA, 22 nt, Human
uccugcaggccuguucccagua

SEQ ID NO: 511272 - RNA, 22 nt, Human
ggcagaggagcuggaaacaugg

SEQ ID NO: 511273 - RNA, 22 nt, Human
cugcugggaaggucugcucagu

SEQ ID NO: 511274 - RNA, 20 nt, Human
auuagcuuggagacaguggc

SEQ ID NO: 511275 - RNA, 22 nt, Human
uguccuggagacacaagguggu

SEQ ID NO: 511276 - RNA, 22 nt, Human
augggaugaacuugaucugcuu

SEQ ID NO: 511277 - RNA, 22 nt, Human
ucaaagucuaucuguaauuacu

SEQ ID NO: 511278 - RNA, 18 nt, Human
uguacaguuaugagcauu

SEQ ID NO: 511279 - RNA, 22 nt, Human
caugaguucaucugcuucucuu

SEQ ID NO: 511280 - RNA, 22 nt, Human
agacuguagggauagaggucuu

SEQ ID NO: 511281 - RNA, 22 nt, Human
guguccugggucucugauucuu

SEQ ID NO: 511282 - RNA, 22 nt, Human
cagacagaaggcuccuugaggu

SEQ ID NO: 511283 - RNA, 22 nt, Human
uuuuccugggcuuucuguguaa

SEQ ID NO: 511284 - RNA, 22 nt, Human
uacacauguuuggcaaguaugu

SEQ ID NO: 511285 - RNA, 22 nt, Human
ggcuuucuagaucuagcucugu

SEQ ID NO: 511286 - RNA, 22 nt, Human
uuccuggguugugcauuguaca

SEQ ID NO: 511287 - RNA, 22 nt, Human
uccaguggugguuugaagggca

SEQ ID NO: 511288 - RNA, 22 nt, Human
gcugauuauuacaugucugugg

SEQ ID NO: 511289 - RNA, 22 nt, Human
gaugguuugguaaaaguauguu

SEQ ID NO: 511290 - RNA, 22 nt, Human
cacacaugagucuccccauugg

SEQ ID NO: 511291 - RNA, 22 nt, Human
cugggguggugcaggccucaug

SEQ ID NO: 511292 - RNA, 22 nt, Human
acaggucugugugcacagugcu

SEQ ID NO: 511293 - RNA, 19 nt, Human
cuucagcaucuccggagcu

SEQ ID NO: 511294 - RNA, 22 nt, Human
cucuccuggggagcacacacac

SEQ ID NO: 511295 - RNA, 22 nt, Human
cgccucagccguggucaucuuc

SEQ ID NO: 511296 - RNA, 22 nt, Human
uccugagcccuguaggacccug

SEQ ID NO: 511297 - RNA, 22 nt, Human
aagggcaggugggcauuucugg

SEQ ID NO: 511298 - RNA, 22 nt, Human
ucccugugucuuccucuugccc

SEQ ID NO: 511299 - RNA, 22 nt, Human
gucccuggggaaucagcuggag

SEQ ID NO: 511300 - RNA, 22 nt, Human
uugcagcuucuugcaucagaaa

SEQ ID NO: 511301 - RNA, 22 nt, Human
caggagugcagguggugaggca

SEQ ID NO: 511302 - RNA, 22 nt, Human
aguguggcugcguagggcucuc

SEQ ID NO: 511303 - RNA, 22 nt, Human
ugcagagagauccucaggguuu

SEQ ID NO: 511304 - RNA, 22 nt, Human
accugggaggcagagguugcag

SEQ ID NO: 511305 - RNA, 22 nt, Human
aaaguucugggggagaagaacg

SEQ ID NO: 511306 - RNA, 22 nt, Human
uuagaaaugucacagaucugau

SEQ ID NO: 511307 - RNA, 22 nt, Human
gagcaggcauucuaguggcuga

SEQ ID NO: 511308 - RNA, 22 nt, Human
uugguuuacuaggauucaaauu

SEQ ID NO: 511309 - RNA, 22 nt, Human
ucuagagacaaaggaaggaggg

SEQ ID NO: 511310 - RNA, 22 nt, Human
gaccagagaaaggcacuggaag

SEQ ID NO: 511311 - RNA, 22 nt, Human
uggcuucuuuccacuguccugu

SEQ ID NO: 511312 - RNA, 22 nt, Human
guguggcccugcguccugaguc

SEQ ID NO: 511313 - RNA, 22 nt, Human
ggcagcugggucacaccgaucu

SEQ ID NO: 511314 - RNA, 22 nt, Human
ugccuggguugacucuuagcug

SEQ ID NO: 511315 - RNA, 22 nt, Human
ucuuguuuugaacucaucagga

SEQ ID NO: 511316 - RNA, 22 nt, Human
auguagcaucuauccugauaaa

SEQ ID NO: 511317 - RNA, 22 nt, Human
agcauuuaggagaauuugagaa

SEQ ID NO: 511318 - RNA, 21 nt, Human
ucuguucaaggaacuacggau

SEQ ID NO: 511319 - RNA, 22 nt, Human
cagucucucugaaguauuaaga

SEQ ID NO: 511320 - RNA, 22 nt, Human
ugcuuauuaaacaugcauauuc

SEQ ID NO: 511321 - RNA, 22 nt, Human
ugccacccagccaggaguggga

SEQ ID NO: 511322 - RNA, 22 nt, Human
uauggcaguuacccuugaugau

SEQ ID NO: 511323 - RNA, 22 nt, Human
cagagaaaaaauccugcucuca

SEQ ID NO: 511324 - RNA, 22 nt, Human
uauuuagaugcauuuggauugc

SEQ ID NO: 511325 - RNA, 22 nt, Human
ccuuucagaugggcauggaccg

SEQ ID NO: 511326 - RNA, 20 nt, Human
ccagcugagccaaggggaga

SEQ ID NO: 511327 - RNA, 22 nt, Human
uguaggaaaaacaaugaucugc

SEQ ID NO: 511328 - RNA, 22 nt, Human
uuccugggggcagcagucuuga

SEQ ID NO: 511329 - RNA, 22 nt, Human
cagccagguucaaguccuuaua

SEQ ID NO: 511330 - RNA, 22 nt, Human
ugucuguacaaauuuucugugu

SEQ ID NO: 511331 - RNA, 19 nt, Human
ccacacagugugcaauuua

SEQ ID NO: 511332 - RNA, 22 nt, Human
ccaguguugcauaggaugggga

SEQ ID NO: 511333 - RNA, 22 nt, Human
cccagcaggcauguugggagga

SEQ ID NO: 511334 - RNA, 22 nt, Human
gugcuuccccaagccacagccu

SEQ ID NO: 511335 - RNA, 22 nt, Human
acugucugcuggccccugguua

SEQ ID NO: 511336 - RNA, 21 nt, Human
acacaggaguuucuucuuucu

SEQ ID NO: 511337 - RNA, 22 nt, Human
uuucuaguccucaugcaucauu

SEQ ID NO: 511338 - RNA, 22 nt, Human
acaucucaugaaugauaaauca

SEQ ID NO: 511339 - RNA, 22 nt, Human
cugagagucagcuucuccuccu

SEQ ID NO: 511340 - RNA, 22 nt, Human
augaaugaaugagaguagguca

SEQ ID NO: 511341 - RNA, 22 nt, Human
uucacagggcagcagcugagcc

SEQ ID NO: 511342 - RNA, 22 nt, Human
uccaggcuaauuuugcauuguu

SEQ ID NO: 511343 - RNA, 22 nt, Human
cuguacagaguucugaguguac

SEQ ID NO: 511344 - RNA, 22 nt, Human
gccaagcuuggaaggaucaugg

SEQ ID NO: 511345 - RNA, 22 nt, Human
aaaagcucuuucugcuguagau

SEQ ID NO: 511346 - RNA, 22 nt, Human
cagcagcagagauacugguuuc

SEQ ID NO: 511347 - RNA, 22 nt, Human
aagauggaguaguguaaugguu

SEQ ID NO: 511348 - RNA, 22 nt, Human
uggacagcgaaagugccuggga

SEQ ID NO: 511349 - RNA, 22 nt, Human
cagagccaggguugcaccccug

SEQ ID NO: 511350 - RNA, 22 nt, Human
aggcccagacucagcggggcgg

SEQ ID NO: 511351 - RNA, 21 nt, Human
agacagcagauagucgaaagg

SEQ ID NO: 511352 - RNA, 22 nt, Human
aggcacugagaggcuguguugc

SEQ ID NO: 511353 - RNA, 22 nt, Human
ucucuggguugagaacuaggac

SEQ ID NO: 511354 - RNA, 22 nt, Human
ccugcacuaccuggggcugcug

SEQ ID NO: 511355 - RNA, 22 nt, Human
gcuccccagcuuagcccuggcu

SEQ ID NO: 511356 - RNA, 22 nt, Human
uagccgcuuaauuauuugguga

SEQ ID NO: 511357 - RNA, 22 nt, Human
ccuggcagguggcgcccucggc

SEQ ID NO: 511358 - RNA, 22 nt, Human
augugugccccuuuuacucuuu

SEQ ID NO: 511359 - RNA, 22 nt, Human
uggagggcgcuuagauggaggg

SEQ ID NO: 511360 - RNA, 22 nt, Human
aaauugcuauaugugaauguga

SEQ ID NO: 511361 - RNA, 22 nt, Human
augugucaauuuucaaaugcuu

SEQ ID NO: 511362 - RNA, 22 nt, Human
gggagccaaggagagaggccuu

SEQ ID NO: 511363 - RNA, 18 nt, Human
uggugaaggguggaggag

SEQ ID NO: 511364 - RNA, 22 nt, Human
cauaauaucuccgauuacuugc

SEQ ID NO: 511365 - RNA, 19 nt, Human
gggcuucugggaucaagag

SEQ ID NO: 511366 - RNA, 22 nt, Human
aggguauaaagagcaagcagaa

SEQ ID NO: 511367 - RNA, 22 nt, Human
gagggaaagguuaauacaugau

SEQ ID NO: 511368 - RNA, 22 nt, Human
gccugagagacccauggggcaa

SEQ ID NO: 511369 - RNA, 22 nt, Human
uuuccuaugauauucuaugugu

SEQ ID NO: 511370 - RNA, 22 nt, Human
aagcuggcaauuaucaaaacug

SEQ ID NO: 511371 - RNA, 22 nt, Human
gaggggcugggcagucccugga

SEQ ID NO: 511372 - RNA, 22 nt, Human
aauguacaucucaguguaguac

SEQ ID NO: 511373 - RNA, 22 nt, Human
caaaagaagcucuuggggcuag

SEQ ID NO: 511374 - RNA, 22 nt, Human
uaacaucuuuagcagcucgaac

SEQ ID NO: 511375 - RNA, 22 nt, Human
gaggaggaguauauauuagaau

SEQ ID NO: 511376 - RNA, 22 nt, Human
aauauagaaucacuuuccuuca

SEQ ID NO: 511377 - RNA, 21 nt, Human
ucacuuauaauguauuugcug

SEQ ID NO: 511378 - RNA, 22 nt, Human
ggggaccugggcuucaaggguu

SEQ ID NO: 511379 - RNA, 22 nt, Human
acagagcuaaauuucaauccca

SEQ ID NO: 511380 - RNA, 22 nt, Human
gcugggcucuuaucaccuguac

SEQ ID NO: 511381 - RNA, 22 nt, Human
uagcaguuaaucugagccaaga

SEQ ID NO: 511382 - RNA, 22 nt, Human
ucucuaguugaggacugagcag

SEQ ID NO: 511383 - RNA, 22 nt, Human
augagcugggccauccagugau

SEQ ID NO: 511384 - RNA, 22 nt, Human
aaaggaaaauaaguaguuccau

SEQ ID NO: 511385 - RNA, 22 nt, Human
ugaucagucccaugaucuucca

SEQ ID NO: 511386 - RNA, 22 nt, Human
ccugagccgagcgcucuuucuc

SEQ ID NO: 511387 - RNA, 20 nt, Human
acacaugugcguguucagua

SEQ ID NO: 511388 - RNA, 22 nt, Human
uuuauuauagugguggggacug

SEQ ID NO: 511389 - RNA, 22 nt, Human
cagggcuuggaucuguggucag

SEQ ID NO: 511390 - RNA, 23 nt, Human
ugggaccuguuugcccacagaug

SEQ ID NO: 511391 - RNA, 22 nt, Human
aagggcuggcccugggaagagu

SEQ ID NO: 511392 - RNA, 22 nt, Human
ccagagaguaucauggagagua

SEQ ID NO: 511393 - RNA, 22 nt, Human
augcccugggagugcuguacca

SEQ ID NO: 511394 - RNA, 22 nt, Human
ucaaaguaaaaguauagaguuu

SEQ ID NO: 511395 - RNA, 22 nt, Human
ccacagaauucugucuccagga

SEQ ID NO: 511396 - RNA, 22 nt, Human
gaauuugucccuugauauaaaa

SEQ ID NO: 511397 - RNA, 22 nt, Human
ggcaucuguccaucucuccagc

SEQ ID NO: 511398 - RNA, 22 nt, Human
ggcaggguggcagaggcucaga

SEQ ID NO: 511399 - RNA, 23 nt, Human
agcuccaggugauuguaaugugu

SEQ ID NO: 511400 - RNA, 22 nt, Human
agagcagcguuuguggaacacu

SEQ ID NO: 511401 - RNA, 22 nt, Human
agcuuaaacucuuugaaguuau

SEQ ID NO: 511402 - RNA, 22 nt, Human
uagggacacugcucaugaguuc

SEQ ID NO: 511403 - RNA, 21 nt, Human
ugcccacagcaaaugcagagg

SEQ ID NO: 511404 - RNA, 22 nt, Human
aaaagucugcucucauuucaga

SEQ ID NO: 511405 - RNA, 22 nt, Human
uugaaucucuugaaucucuguu

SEQ ID NO: 511406 - RNA, 22 nt, Human
uuuaauuuuccucuuccuggag

SEQ ID NO: 511407 - RNA, 22 nt, Human
acaggccucaagacacccaggu

SEQ ID NO: 511408 - RNA, 22 nt, Human
aguguucacucuguggagccca

SEQ ID NO: 511409 - RNA, 22 nt, Human
gcugggcugagaaguuaagcaa

SEQ ID NO: 511410 - RNA, 22 nt, Human
cagagccaacgccaccugccca

SEQ ID NO: 511411 - RNA, 21 nt, Human
aagcaggacauaugaugcccu

SEQ ID NO: 511412 - RNA, 22 nt, Human
uuucacaaagcauagcacuuua

SEQ ID NO: 511413 - RNA, 22 nt, Human
ggcucugggugugaccuugggu

SEQ ID NO: 511414 - RNA, 22 nt, Human
ggguccagacacuccagaggaa

SEQ ID NO: 511415 - RNA, 17 nt, Human
cgagggcuugcuggcuc

SEQ ID NO: 511416 - RNA, 22 nt, Human
uagaaucaagcaguagagcaga

SEQ ID NO: 511417 - RNA, 22 nt, Human
uugugaaauguuucaaaauagu

SEQ ID NO: 511418 - RNA, 22 nt, Human
guauccuuugcggaaauuucua

SEQ ID NO: 511419 - RNA, 22 nt, Human
ugggccacugcuccaaguagcu

SEQ ID NO: 511420 - RNA, 22 nt, Human
acacacuugcagagaggaggga

SEQ ID NO: 511421 - RNA, 22 nt, Human
augcccuggacuagcuauacuu

SEQ ID NO: 511422 - RNA, 22 nt, Human
uccuggcuucugucuccuuauu

SEQ ID NO: 511423 - RNA, 22 nt, Human
agagacaggguuuugccauguu

SEQ ID NO: 511424 - RNA, 22 nt, Human
ucacgagaggcacagaauagag

SEQ ID NO: 511425 - RNA, 22 nt, Human
aaguaugacauuuaagacaauu

SEQ ID NO: 511426 - RNA, 22 nt, Human
uacaguagucgucuuauuuuga

SEQ ID NO: 511427 - RNA, 22 nt, Human
cccucccaagcacucugacaua

SEQ ID NO: 511428 - RNA, 22 nt, Human
uuuucugccugcguguuuagga

SEQ ID NO: 511429 - RNA, 22 nt, Human
uccagaguuguaaguguugaca

SEQ ID NO: 511430 - RNA, 22 nt, Human
gcccagcaggggauggcagcuc

SEQ ID NO: 511431 - RNA, 22 nt, Human
ucaggucuugagccaucaggau

SEQ ID NO: 511432 - RNA, 22 nt, Human
gagggcugcuggaaaaaugcag

SEQ ID NO: 511433 - RNA, 22 nt, Human
acagagccacuuuggugccuac

SEQ ID NO: 511434 - RNA, 22 nt, Human
agagcagcuggggcagagacca

SEQ ID NO: 511435 - RNA, 20 nt, Human
caaaagcaaugaaguuauga

SEQ ID NO: 511436 - RNA, 22 nt, Human
gcucagagcuugaaguuccacu

SEQ ID NO: 511437 - RNA, 22 nt, Human
cugggccuugccuugcccacag

SEQ ID NO: 511438 - RNA, 22 nt, Human
cccuccaugagugugcugcugg

SEQ ID NO: 511439 - RNA, 22 nt, Human
cuggucccugcagugugcuggg

SEQ ID NO: 511440 - RNA, 22 nt, Human
ugccugccaaugaugcuugugu

SEQ ID NO: 511441 - RNA, 22 nt, Human
ucaaaaguuucacauagagaua

SEQ ID NO: 511442 - RNA, 22 nt, Human
guuuacaguggcuucauuggau

SEQ ID NO: 511443 - RNA, 22 nt, Human
uuucuuuugcccuguggguuag

SEQ ID NO: 511444 - RNA, 22 nt, Human
ccuggcucuguccucgcgcaaa

SEQ ID NO: 511445 - RNA, 22 nt, Human
uccagaggcaaaaagguaugga

SEQ ID NO: 511446 - RNA, 22 nt, Human
ccugaggcaaggacuugguggc

SEQ ID NO: 511447 - RNA, 22 nt, Human
cugcccuguccuucccgccggc

SEQ ID NO: 511448 - RNA, 22 nt, Human
ccuuccuggagcccaugcagau

SEQ ID NO: 511449 - RNA, 22 nt, Human
uugggguacgcaggucugggag

SEQ ID NO: 511450 - RNA, 22 nt, Human
uugcauaaaugcuuaaaauuug

SEQ ID NO: 511451 - RNA, 22 nt, Human
gagcucagcccaaagagcagug

SEQ ID NO: 511452 - RNA, 22 nt, Human
ugcaauaaagugcuauaaaucc

SEQ ID NO: 511453 - RNA, 22 nt, Human
ccugcucugguuuagucagucu

SEQ ID NO: 511454 - RNA, 17 nt, Human
ucuguucaugcauaccu

SEQ ID NO: 511455 - RNA, 22 nt, Human
uucaguuuugcuuuuaaucaug

SEQ ID NO: 511456 - RNA, 18 nt, Human
agcagcugugccacacug

SEQ ID NO: 511457 - RNA, 22 nt, Human
agaguuucuugugagcacugac

SEQ ID NO: 511458 - RNA, 22 nt, Human
agaauccugaugaaaaggagag

SEQ ID NO: 511459 - RNA, 22 nt, Human
uguaaagagaaugguauaugga

SEQ ID NO: 511460 - RNA, 22 nt, Human
cauggccacaugauaaucaagu

SEQ ID NO: 511461 - RNA, 22 nt, Human
aggagccaugagugacaucaca

SEQ ID NO: 511462 - RNA, 22 nt, Human
ugccuccuucaggagggcccgg

SEQ ID NO: 511463 - RNA, 22 nt, Human
caaauucacaugauugcuucug

SEQ ID NO: 511464 - RNA, 19 nt, Human
ucaucucacagggccuggc

SEQ ID NO: 511465 - RNA, 22 nt, Human
gaggcagugucgguggcaggau

SEQ ID NO: 511466 - RNA, 22 nt, Human
cccuggcagaaugucucugggc

SEQ ID NO: 511467 - RNA, 21 nt, Human
ugcauaaagaaauacaaauac

SEQ ID NO: 511468 - RNA, 22 nt, Human
acguuugcuuucuuuggccugg

SEQ ID NO: 511469 - RNA, 22 nt, Human
cuggcugguucccugcuccagg

SEQ ID NO: 511470 - RNA, 22 nt, Human
caucagcagucacaugaugcug

SEQ ID NO: 511471 - RNA, 22 nt, Human
acuuucucaggaauucacagac

SEQ ID NO: 511472 - RNA, 22 nt, Human
aucuggcuauuucuggucgggg

SEQ ID NO: 511473 - RNA, 22 nt, Human
cugggaggauucauugagguga

SEQ ID NO: 511474 - RNA, 22 nt, Human
aauuagggaaguauuuaguagu

SEQ ID NO: 511475 - RNA, 23 nt, Human
cagugugacgaggugaggcaggc

SEQ ID NO: 511476 - RNA, 22 nt, Human
gucucagagagcuacucucuua

SEQ ID NO: 511477 - RNA, 22 nt, Human
uggcaggugccaugggcucaga

SEQ ID NO: 511478 - RNA, 22 nt, Human
aucugacaaccuauugacuuga

SEQ ID NO: 511479 - RNA, 18 nt, Human
agugugugcccuuucagg

SEQ ID NO: 511480 - RNA, 19 nt, Human
caagugaagccugggaugg

SEQ ID NO: 511481 - RNA, 22 nt, Human
uuaugggagcaauuggggaggu

SEQ ID NO: 511482 - RNA, 22 nt, Human
ugcuggcauuucaggacucacc

SEQ ID NO: 511483 - RNA, 22 nt, Human
cauuucugauuacagaauacua

SEQ ID NO: 511484 - RNA, 22 nt, Human
ggaggggaugguuugacccugg

SEQ ID NO: 511485 - RNA, 22 nt, Human
uggccuggcagagcaaggccug

SEQ ID NO: 511486 - RNA, 22 nt, Human
caggugccucaggaugagacaa

SEQ ID NO: 511487 - RNA, 22 nt, Human
uacagcuuuagcaaauuaccua

SEQ ID NO: 511488 - RNA, 22 nt, Human
aauuagagaucaguucuuugac

SEQ ID NO: 511489 - RNA, 22 nt, Human
uauagagguggaaacugagguu

SEQ ID NO: 511490 - RNA, 22 nt, Human
uggaaggggccaggcgcggagu

SEQ ID NO: 511491 - RNA, 22 nt, Human
uguaugaaguuacugagccucu

SEQ ID NO: 511492 - RNA, 22 nt, Human
aaagacauggaacuagagaugg

SEQ ID NO: 511493 - RNA, 20 nt, Human
uuucagugguuugugccuag

SEQ ID NO: 511494 - RNA, 22 nt, Human
gccaggcaugggcuucugggcg

SEQ ID NO: 511495 - RNA, 22 nt, Human
cagaccaucuugaagcaaacug

SEQ ID NO: 511496 - RNA, 22 nt, Human
auguguucacgugcacaugugc

SEQ ID NO: 511497 - RNA, 22 nt, Human
gaauuguagagggaacagaagc

SEQ ID NO: 511498 - RNA, 22 nt, Human
ccagcuaggcuugcacucuugu

SEQ ID NO: 511499 - RNA, 22 nt, Human
gcacuaguucuacugccagcaa

SEQ ID NO: 511500 - RNA, 22 nt, Human
ccagccuggggaggcagcuucu

SEQ ID NO: 511501 - RNA, 22 nt, Human
gcuguucauuagaaauagaaug

SEQ ID NO: 511502 - RNA, 22 nt, Human
acuguacaugcaucuugucuau

SEQ ID NO: 511503 - RNA, 22 nt, Human
ucuauaaauuaugcagucucag

SEQ ID NO: 511504 - RNA, 22 nt, Human
ccugggaggcuguuuccagccu

SEQ ID NO: 511505 - RNA, 18 nt, Human
acaggccucaguccugca

SEQ ID NO: 511506 - RNA, 19 nt, Human
cuccaaguuaagagggagg

SEQ ID NO: 511507 - RNA, 22 nt, Human
cuuccucuguguccugggcuug

SEQ ID NO: 511508 - RNA, 22 nt, Human
uggagcugccuggcaccuacag

SEQ ID NO: 511509 - RNA, 22 nt, Human
aaagaaggaccuggaggaggau

SEQ ID NO: 511510 - RNA, 22 nt, Human
cuucugcaauaaguuuuggucc

SEQ ID NO: 511511 - RNA, 22 nt, Human
aagaacagauucagccugaacu

SEQ ID NO: 511512 - RNA, 22 nt, Human
guuucuuuugugaucaccaacc

SEQ ID NO: 511513 - RNA, 22 nt, Human
cuuccuaaaagcuucaagagaa

SEQ ID NO: 511514 - RNA, 22 nt, Human
aucaggaugcugucaguuacca

SEQ ID NO: 511515 - RNA, 22 nt, Human
gaggggcucuuuaauaguaaca

SEQ ID NO: 511516 - RNA, 22 nt, Human
uggcgucucucauaaguaugug

SEQ ID NO: 511517 - RNA, 22 nt, Human
ccuuuggcugcauagggaaggg

SEQ ID NO: 511518 - RNA, 22 nt, Human
cuguguuucugagaagugggga

SEQ ID NO: 511519 - RNA, 20 nt, Human
cuucaggacccauccucccc

SEQ ID NO: 511520 - RNA, 22 nt, Human
cgggcuggcugcagcugcugga

SEQ ID NO: 511521 - RNA, 22 nt, Human
uuugcauuucucguaaggaaac

SEQ ID NO: 511522 - RNA, 22 nt, Human
agaguucacacucagugcaccc

SEQ ID NO: 511523 - RNA, 22 nt, Human
ucucagggcagcaaggaagcau

SEQ ID NO: 511524 - RNA, 22 nt, Human
gcagugccuugcuucucugucu

SEQ ID NO: 511525 - RNA, 22 nt, Human
gaagagagagcccugggguccg

SEQ ID NO: 511526 - RNA, 22 nt, Human
gaaauaaccucaugcaccauga

SEQ ID NO: 511527 - RNA, 22 nt, Human
ucucacugcaaauauuauguau

SEQ ID NO: 511528 - RNA, 22 nt, Human
uuaugacauaugaguacaagua

SEQ ID NO: 511529 - RNA, 22 nt, Human
caggccucuuccaugcagcagc

SEQ ID NO: 511530 - RNA, 22 nt, Human
caaaaguaauuaugguuuuugc

SEQ ID NO: 511531 - RNA, 22 nt, Human
ucugccagugguuuggcccuga

SEQ ID NO: 511532 - RNA, 22 nt, Human
uuaugacaggaaaaucacagaa

SEQ ID NO: 511533 - RNA, 22 nt, Human
gcugucuggguugagggcccug

SEQ ID NO: 511534 - RNA, 22 nt, Human
aaauuuucucucuaagacuuaa

SEQ ID NO: 511535 - RNA, 22 nt, Human
uagagcugcuggacuguaacag

SEQ ID NO: 511536 - RNA, 22 nt, Human
aggcacuguggguguggccgga

SEQ ID NO: 511537 - RNA, 22 nt, Human
uuucaguggguuuauuucaugu

SEQ ID NO: 511538 - RNA, 22 nt, Human
gcuggccucuggagaagggcuu

SEQ ID NO: 511539 - RNA, 20 nt, Human
aaacauucauguacaaguga

SEQ ID NO: 511540 - RNA, 22 nt, Human
acacacaugccuuuccuaagua

SEQ ID NO: 511541 - RNA, 22 nt, Human
cugugcuugcggguguggagcc

SEQ ID NO: 511542 - RNA, 22 nt, Human
cucucuggaauuaaagcccaau

SEQ ID NO: 511543 - RNA, 22 nt, Human
cugggggcagcaagaagccaug

SEQ ID NO: 511544 - RNA, 22 nt, Human
ccugccugcaccuucucugggg

SEQ ID NO: 511545 - RNA, 22 nt, Human
ggauggagguucucagaugcuc

SEQ ID NO: 511546 - RNA, 22 nt, Human
gggaucugauuuaggaugggag

SEQ ID NO: 511547 - RNA, 22 nt, Human
acucaggaaaugaagacugguu

SEQ ID NO: 511548 - RNA, 22 nt, Human
cccagcuugucugauucagccu

SEQ ID NO: 511549 - RNA, 21 nt, Human
aaaaaugaaguuguucaggaa

SEQ ID NO: 511550 - RNA, 22 nt, Human
cugggccacaucagaugaagac

SEQ ID NO: 511551 - RNA, 22 nt, Human
cugcccugauaugauuuagaac

SEQ ID NO: 511552 - RNA, 22 nt, Human
cuccugggcuaugucugcuugg

SEQ ID NO: 511553 - RNA, 22 nt, Human
aaagagaaaaagaucccggcuc

SEQ ID NO: 511554 - RNA, 22 nt, Human
gggcuacagacaugcucuaagc

SEQ ID NO: 511555 - RNA, 22 nt, Human
uggaacacuguggaugagaaga

SEQ ID NO: 511556 - RNA, 22 nt, Human
aguguucaggaucugaggccag

SEQ ID NO: 511557 - RNA, 22 nt, Human
auuaaauuggaucugcauaguu

SEQ ID NO: 511558 - RNA, 21 nt, Human
aggcagaaagagcccaggcug

SEQ ID NO: 511559 - RNA, 22 nt, Human
gcugcucugggucugcccagcu

SEQ ID NO: 511560 - RNA, 22 nt, Human
agguggggugagcugcagacua

SEQ ID NO: 511561 - RNA, 22 nt, Human
caggaacaacucccagcaucuc

SEQ ID NO: 511562 - RNA, 22 nt, Human
cauaauuauaaacgcaaguuca

SEQ ID NO: 511563 - RNA, 20 nt, Human
cugaaccaaggcuuucucag

SEQ ID NO: 511564 - RNA, 23 nt, Human
agacuggggcauaagaagauggc

SEQ ID NO: 511565 - RNA, 22 nt, Human
aagaaguuagguguaacaauau

SEQ ID NO: 511566 - RNA, 22 nt, Human
gaagccucaacaucucugcguc

SEQ ID NO: 511567 - RNA, 22 nt, Human
uauuugucacugcacuugaaau

SEQ ID NO: 511568 - RNA, 22 nt, Human
uacaaauguauuuuauuuuggu

SEQ ID NO: 511569 - RNA, 22 nt, Human
ugcacacauguuuacaagcauc

SEQ ID NO: 511570 - RNA, 22 nt, Human
uggcucagagagggagugugga

SEQ ID NO: 511571 - RNA, 21 nt, Human
uggagcugccacuuguccucc

SEQ ID NO: 511572 - RNA, 22 nt, Human
aaacaucaauugcaucucccaa

SEQ ID NO: 511573 - RNA, 22 nt, Human
uggccucagauuucaggggugg

SEQ ID NO: 511574 - RNA, 23 nt, Human
aguacauucgaaaaauucuguga

SEQ ID NO: 511575 - RNA, 22 nt, Human
uagagcuggccgggacagcugg

SEQ ID NO: 511576 - RNA, 22 nt, Human
acaaggaccaugaggcagaccc

SEQ ID NO: 511577 - RNA, 22 nt, Human
cuggcagguuuggugucuggug

SEQ ID NO: 511578 - RNA, 22 nt, Human
gcucccuguucucagccaugau

SEQ ID NO: 511579 - RNA, 22 nt, Human
ccuuggcccuagccucaggcaa

SEQ ID NO: 511580 - RNA, 22 nt, Human
gacauaaaccuugagauauuaa

SEQ ID NO: 511581 - RNA, 22 nt, Human
auucaguucuaaggucagugcc

SEQ ID NO: 511582 - RNA, 22 nt, Human
uuaacagagaacauagaaguag

SEQ ID NO: 511583 - RNA, 17 nt, Human
aagauuucauuagcuga

SEQ ID NO: 511584 - RNA, 22 nt, Human
gcucccagauuucagccuugug

SEQ ID NO: 511585 - RNA, 22 nt, Human
uggcagggucuugcuguguugc

SEQ ID NO: 511586 - RNA, 22 nt, Human
cugaaggaagcagguggccugu

SEQ ID NO: 511587 - RNA, 22 nt, Human
ggagcagagcauuucacagccu

SEQ ID NO: 511588 - RNA, 22 nt, Human
gccacaugcaauugcagcacgu

SEQ ID NO: 511589 - RNA, 22 nt, Human
gccaggcauucuagaaguagug

SEQ ID NO: 511590 - RNA, 22 nt, Human
aagaccuugucuaaacauguag

SEQ ID NO: 511591 - RNA, 22 nt, Human
aucuguguguucaggaaguccu

SEQ ID NO: 511592 - RNA, 22 nt, Human
agcagcucuguuuaccuggagg

SEQ ID NO: 511593 - RNA, 22 nt, Human
gcucaagagagaugcaguucuu

SEQ ID NO: 511594 - RNA, 22 nt, Human
guuugcauguguacuuaauugg

SEQ ID NO: 511595 - RNA, 22 nt, Human
cccugcagaucagugagaacuu

SEQ ID NO: 511596 - RNA, 22 nt, Human
uuggcuucaaugucagagacag

SEQ ID NO: 511597 - RNA, 22 nt, Human
caguaaauaguggagauguggg

SEQ ID NO: 511598 - RNA, 22 nt, Human
ggaggagcacuucugagcucag

SEQ ID NO: 511599 - RNA, 22 nt, Human
uucuuuuuaaaguguguaugca

SEQ ID NO: 511600 - RNA, 22 nt, Human
aaacaucauaggcaugcaugau

SEQ ID NO: 511601 - RNA, 22 nt, Human
ccucggagaaaggcagcuccac

SEQ ID NO: 511602 - RNA, 22 nt, Human
ucagugcuuuugagaagcuccu

SEQ ID NO: 511603 - RNA, 23 nt, Human
ucccuggaggcagguccagggcc

SEQ ID NO: 511604 - RNA, 22 nt, Human
guccuucagcaccucccucggc

SEQ ID NO: 511605 - RNA, 22 nt, Human
ccucuggucccagcucugcugc

SEQ ID NO: 511606 - RNA, 22 nt, Human
acucuggggugaugucucugag

SEQ ID NO: 511607 - RNA, 22 nt, Human
acuguaaauuuugguugcaggu

SEQ ID NO: 511608 - RNA, 22 nt, Human
ccugggcuuucggcggcuuccu

SEQ ID NO: 511609 - RNA, 22 nt, Human
ucacagaauaaauugagaagac

SEQ ID NO: 511610 - RNA, 22 nt, Human
aucuggcucgcuaggcucuggg

SEQ ID NO: 511611 - RNA, 22 nt, Human
uuugcauuugcaaauaaugaaa

SEQ ID NO: 511612 - RNA, 17 nt, Human
uugcccugauuuuuaac

SEQ ID NO: 511613 - RNA, 18 nt, Human
gccugccagccgagggac

SEQ ID NO: 511614 - RNA, 22 nt, Human
ccuggagcacucucccuggcug

SEQ ID NO: 511615 - RNA, 19 nt, Human
ugaagcagcaaacucucag

SEQ ID NO: 511616 - RNA, 22 nt, Human
aguggcugagugacugugacuc

SEQ ID NO: 511617 - RNA, 22 nt, Human
gcuccugcaggacccaggagac

SEQ ID NO: 511618 - RNA, 22 nt, Human
ccugggcaacauagugagaccc

SEQ ID NO: 511619 - RNA, 22 nt, Human
gccaccuggacucagagccagg

SEQ ID NO: 511620 - RNA, 22 nt, Human
agccucugauggcucccaagga

SEQ ID NO: 511621 - RNA, 22 nt, Human
agaaagggagcguggaucaauu

SEQ ID NO: 511622 - RNA, 22 nt, Human
uugguuccuucugaaaguauug

SEQ ID NO: 511623 - RNA, 22 nt, Human
agagccugcuaccucauuccag

SEQ ID NO: 511624 - RNA, 22 nt, Human
ccacccagaccagggaucuggg

SEQ ID NO: 511625 - RNA, 22 nt, Human
auuguauuuccagcuugaaugu

SEQ ID NO: 511626 - RNA, 22 nt, Human
agggcuccuccccggccuccac

SEQ ID NO: 511627 - RNA, 21 nt, Human
gugcccuguucccacaugccc

SEQ ID NO: 511628 - RNA, 20 nt, Human
gagcagcuguuugcauugca

SEQ ID NO: 511629 - RNA, 22 nt, Human
uuugugacuugcuucucagaau

SEQ ID NO: 511630 - RNA, 22 nt, Human
gguguucaaaugaacacaugca

SEQ ID NO: 511631 - RNA, 22 nt, Human
gccugggauucccagaggggca

SEQ ID NO: 511632 - RNA, 22 nt, Human
uggcucaggguccccaaauggu

SEQ ID NO: 511633 - RNA, 22 nt, Human
aaguuuuaacaaguacuuacua

SEQ ID NO: 511634 - RNA, 22 nt, Human
agcuggaggauaacucacuucu

SEQ ID NO: 511635 - RNA, 22 nt, Human
ccagugugggcccggccuccuc

SEQ ID NO: 511636 - RNA, 19 nt, Human
uggcaugaugauggauggg

SEQ ID NO: 511637 - RNA, 22 nt, Human
ugcuuuauagacaaggaaguag

SEQ ID NO: 511638 - RNA, 22 nt, Human
augggggccugaacaggcaaaa

SEQ ID NO: 511639 - RNA, 22 nt, Human
aguuucacauagcucagugcuc

SEQ ID NO: 511640 - RNA, 22 nt, Human
caugaaagcaggaaugguuuua

SEQ ID NO: 511641 - RNA, 22 nt, Human
ugguccugcaguaauagacauc

SEQ ID NO: 511642 - RNA, 20 nt, Human
ucacacaugguaagcuauga

SEQ ID NO: 511643 - RNA, 22 nt, Human
aaagcuuuucaguauguucaug

SEQ ID NO: 511644 - RNA, 22 nt, Human
ggcugcaggcaggguauccacu

SEQ ID NO: 511645 - RNA, 22 nt, Human
uauugaguuacagaaaauacuu

SEQ ID NO: 511646 - RNA, 22 nt, Human
agaacagaggccuuauguuuca

SEQ ID NO: 511647 - RNA, 17 nt, Human
ucaggcugggugcagug

SEQ ID NO: 511648 - RNA, 22 nt, Human
aagcuguucucuaaguuucaug

SEQ ID NO: 511649 - RNA, 22 nt, Human
augacuucugcaaggucauuug

SEQ ID NO: 511650 - RNA, 22 nt, Human
uugcccugucucacuauguuaa

SEQ ID NO: 511651 - RNA, 22 nt, Human
uucagugucacaagagcaagcc

SEQ ID NO: 511652 - RNA, 22 nt, Human
accaggguugagucagcugcgu

SEQ ID NO: 511653 - RNA, 22 nt, Human
gccagagcugagacacgagucc

SEQ ID NO: 511654 - RNA, 22 nt, Human
caaguccuuuucuuggcucagg

SEQ ID NO: 511655 - RNA, 22 nt, Human
uggcuucagacuucugcuacgu

SEQ ID NO: 511656 - RNA, 22 nt, Human
uccagcucagaugcagggauca

SEQ ID NO: 511657 - RNA, 22 nt, Human
cuccauugaacauccucucaga

SEQ ID NO: 511658 - RNA, 22 nt, Human
ucuccucuccuuucauguuguu

SEQ ID NO: 511659 - RNA, 22 nt, Human
uaaggcauucucaugcugugaa

SEQ ID NO: 511660 - RNA, 22 nt, Human
caguauuuucaggauuuggaag

SEQ ID NO: 511661 - RNA, 22 nt, Human
agggucuguuguuuguucugga

SEQ ID NO: 511662 - RNA, 22 nt, Human
aaaaucaguacacuuuauuuug

SEQ ID NO: 511663 - RNA, 22 nt, Human
gggagcuguaguccagauaccg

SEQ ID NO: 511664 - RNA, 22 nt, Human
uggcagcacuugaacuugagcc

SEQ ID NO: 511665 - RNA, 22 nt, Human
uuuaaagaaauuccucaucuuu

SEQ ID NO: 511666 - RNA, 22 nt, Human
ugcagcugguaucccauggauu

SEQ ID NO: 511667 - RNA, 19 nt, Human
ccucugcgcuguccugcuc

SEQ ID NO: 511668 - RNA, 22 nt, Human
gcccagaaguugaggcugcagu

SEQ ID NO: 511669 - RNA, 22 nt, Human
acaggcugccuaccaaguauca

SEQ ID NO: 511670 - RNA, 22 nt, Human
gguggggccagggcuccaaccu

SEQ ID NO: 511671 - RNA, 22 nt, Human
ugacuucaaaggcucuacuccu

SEQ ID NO: 511672 - RNA, 22 nt, Human
uuggguaggagaaagaacagau

SEQ ID NO: 511673 - RNA, 17 nt, Human
ccagagcuacugagacu

SEQ ID NO: 511674 - RNA, 22 nt, Human
uccuagaauaaucuuugacugc

SEQ ID NO: 511675 - RNA, 22 nt, Human
caggccugacccugagcuucac

SEQ ID NO: 511676 - RNA, 20 nt, Human
uuugucuguuaaguguuucu

SEQ ID NO: 511677 - RNA, 23 nt, Human
uuuuaauuuggacauaagaagau

SEQ ID NO: 511678 - RNA, 18 nt, Human
aauuucuuugacaacuua

SEQ ID NO: 511679 - RNA, 22 nt, Human
ugcacacaguucucaggaaaga

SEQ ID NO: 511680 - RNA, 22 nt, Human
uggcagcagccauggaaggccc

SEQ ID NO: 511681 - RNA, 22 nt, Human
cuacagaggacacaaagaucuu

SEQ ID NO: 511682 - RNA, 22 nt, Human
uaaauagagaaucagcuuggag

SEQ ID NO: 511683 - RNA, 22 nt, Human
uggcuucucagaauacucugga

SEQ ID NO: 511684 - RNA, 21 nt, Human
ucuuuccugcccaguugcccu

SEQ ID NO: 511685 - RNA, 22 nt, Human
agggcuuuggcccccugcugca

SEQ ID NO: 511686 - RNA, 22 nt, Human
ccagcuccucuucccaguguca

SEQ ID NO: 511687 - RNA, 22 nt, Human
ugggagaggcugccaucuugca

SEQ ID NO: 511688 - RNA, 22 nt, Human
ucucagugguggcauuccagac

SEQ ID NO: 511689 - RNA, 22 nt, Human
aagugugauuuguagaaugccu

SEQ ID NO: 511690 - RNA, 22 nt, Human
gcgggcggggguucccaggucu

SEQ ID NO: 511691 - RNA, 22 nt, Human
ggcagcugauuagcaucaagga

SEQ ID NO: 511692 - RNA, 22 nt, Human
gcugaagcccacguggcuugua

SEQ ID NO: 511693 - RNA, 22 nt, Human
ugcauaaacagauacuucaugu

SEQ ID NO: 511694 - RNA, 22 nt, Human
caggcuggagugcagugucgcc

SEQ ID NO: 511695 - RNA, 22 nt, Human
gaaaauacuucaguguucuggc

SEQ ID NO: 511696 - RNA, 22 nt, Human
acagugucuccugguacccagu

SEQ ID NO: 511697 - RNA, 19 nt, Human
gcucagugaugccagacca

SEQ ID NO: 511698 - RNA, 22 nt, Human
agugggggccaacgagggcagc

SEQ ID NO: 511699 - RNA, 22 nt, Human
gggagggaucugcuaggcaaug

SEQ ID NO: 511700 - RNA, 22 nt, Human
ccuggccacccagccuuggcca

SEQ ID NO: 511701 - RNA, 22 nt, Human
ccagcccuugcugaaggguggc

SEQ ID NO: 511702 - RNA, 18 nt, Human
ucacagugcucuugccua

SEQ ID NO: 511703 - RNA, 22 nt, Human
uccuguuuuuguaaucgacucu

SEQ ID NO: 511704 - RNA, 22 nt, Human
uacauaguuccauuuacaggaa

SEQ ID NO: 511705 - RNA, 22 nt, Human
gccaggcacugcucuaagcccu

SEQ ID NO: 511706 - RNA, 22 nt, Human
aggcugggaaaccugaaguugu

SEQ ID NO: 511707 - RNA, 22 nt, Human
uuccaggaugcugcugcuuuuu

SEQ ID NO: 511708 - RNA, 22 nt, Human
caggaaggcgcggcugugccug

SEQ ID NO: 511709 - RNA, 22 nt, Human
gcugccaccguggagaugagug

SEQ ID NO: 511710 - RNA, 22 nt, Human
gucagugcuugaagggcagaga

SEQ ID NO: 511711 - RNA, 18 nt, Human
ccucagggagagagacgc

SEQ ID NO: 511712 - RNA, 22 nt, Human
ugcacagaucugguggcaagga

SEQ ID NO: 511713 - RNA, 22 nt, Human
acagguggaggcuuuaggaggu

SEQ ID NO: 511714 - RNA, 22 nt, Human
acacaggaagucagcacugaug

SEQ ID NO: 511715 - RNA, 22 nt, Human
cuguggcuuuuccggggagccu

SEQ ID NO: 511716 - RNA, 22 nt, Human
cugggccacaaaaaacuccugu

SEQ ID NO: 511717 - RNA, 22 nt, Human
uagaaacugauagucuugugcu

SEQ ID NO: 511718 - RNA, 22 nt, Human
uuuuuagaguguuaccaguaua

SEQ ID NO: 511719 - RNA, 22 nt, Human
uguccugugcacuguagcaugu

SEQ ID NO: 511720 - RNA, 22 nt, Human
uaacagaagagcaggcagcccu

SEQ ID NO: 511721 - RNA, 22 nt, Human
guuagggaucaggaacaagagc

SEQ ID NO: 511722 - RNA, 22 nt, Human
ugagagaggggacugccugcuu

SEQ ID NO: 511723 - RNA, 22 nt, Human
cccccuggcaggcuggccucuc

SEQ ID NO: 511724 - RNA, 22 nt, Human
gaaagaaugagcaucaugacuu

SEQ ID NO: 511725 - RNA, 22 nt, Human
agugaaauugcuguaagaggaa

SEQ ID NO: 511726 - RNA, 22 nt, Human
uuuauuauguacaggcacuaua

SEQ ID NO: 511727 - RNA, 22 nt, Human
cuggugaauggauaaacuguug

SEQ ID NO: 511728 - RNA, 22 nt, Human
gccaggcuccccggaucccugg

SEQ ID NO: 511729 - RNA, 22 nt, Human
cuuuaagacucugcucuuggug

SEQ ID NO: 511730 - RNA, 20 nt, Human
ucucccaggcucagggaaga

SEQ ID NO: 511731 - RNA, 22 nt, Human
aggcuggcuggcaggggacaca

SEQ ID NO: 511732 - RNA, 22 nt, Human
uaauuacagguccaaaacaauc

SEQ ID NO: 511733 - RNA, 22 nt, Human
uggcucagagccuugagagcug

SEQ ID NO: 511734 - RNA, 22 nt, Human
guuuccugaaauagaguacugg

SEQ ID NO: 511735 - RNA, 22 nt, Human
aaagugcuaggauuacaagcgu

SEQ ID NO: 511736 - RNA, 22 nt, Human
aagaguuuucuauaaucuuggc

SEQ ID NO: 511737 - RNA, 22 nt, Human
aacaaucaaguuucuaaaugac

SEQ ID NO: 511738 - RNA, 22 nt, Human
uuuccuucaucaucugagagcu

SEQ ID NO: 511739 - RNA, 22 nt, Human
aguauuuguggauuuguauugg

SEQ ID NO: 511740 - RNA, 22 nt, Human
uggccagauucaugcauguauc

SEQ ID NO: 511741 - RNA, 22 nt, Human
gcuggcaucacuggcuucggug

SEQ ID NO: 511742 - RNA, 22 nt, Human
gcacugccaucaaugcaugaca

SEQ ID NO: 511743 - RNA, 21 nt, Human
ugggcagauggcaguguggcu

SEQ ID NO: 511744 - RNA, 23 nt, Human
uuuauuuauuuaggcugagggau

SEQ ID NO: 511745 - RNA, 22 nt, Human
aaggagguuaucccaguggacu

SEQ ID NO: 511746 - RNA, 22 nt, Human
caucacagggggcuagaagucu

SEQ ID NO: 511747 - RNA, 22 nt, Human
aagcagagaccggcuaauggag

SEQ ID NO: 511748 - RNA, 22 nt, Human
uuguaaaguucuuaggaagcuc

SEQ ID NO: 511749 - RNA, 22 nt, Human
cugcccugucugcagccuggcu

SEQ ID NO: 511750 - RNA, 22 nt, Human
cagcacuggggggauucggagc

SEQ ID NO: 511751 - RNA, 22 nt, Human
ucuggcaucacucgcaagagca

SEQ ID NO: 511752 - RNA, 21 nt, Human
gggcagaggggccuccugggu

SEQ ID NO: 511753 - RNA, 22 nt, Human
uguccaaugcccuuuccacaug

SEQ ID NO: 511754 - RNA, 22 nt, Human
ucagugcuugacagcucuggga

SEQ ID NO: 511755 - RNA, 22 nt, Human
ggggcagagucuggacuguugu

SEQ ID NO: 511756 - RNA, 22 nt, Human
gaguaaggcugcugauggagug

SEQ ID NO: 511757 - RNA, 22 nt, Human
cuuccugcaggacagccaucug

SEQ ID NO: 511758 - RNA, 22 nt, Human
cugcagggcagaagggcauaga

SEQ ID NO: 511759 - RNA, 22 nt, Human
gcucuggggaugcuucugccgu

SEQ ID NO: 511760 - RNA, 22 nt, Human
aacuaaaucuggcauuuagagc

SEQ ID NO: 511761 - RNA, 22 nt, Human
ugaggccagcuucagcagugga

SEQ ID NO: 511762 - RNA, 22 nt, Human
ucaaagcacacuuagugguaga

SEQ ID NO: 511763 - RNA, 22 nt, Human
ugcagaagcagagaguugccaa

SEQ ID NO: 511764 - RNA, 22 nt, Human
ugaagguggcauaggagagaug

SEQ ID NO: 511765 - RNA, 22 nt, Human
uaugugaauacagcaguggaug

SEQ ID NO: 511766 - RNA, 22 nt, Human
ucuccucucuuaccugguacaa

SEQ ID NO: 511767 - RNA, 21 nt, Human
gcaggggauagaaauggucug

SEQ ID NO: 511768 - RNA, 22 nt, Human
accuucaaugaaaauaauaguc

SEQ ID NO: 511769 - RNA, 22 nt, Human
agauuuagacugccuuaaucau

SEQ ID NO: 511770 - RNA, 22 nt, Human
gcuguauuuaacaacuggcuca

SEQ ID NO: 511771 - RNA, 21 nt, Human
uucagcuuaugugucacuugc

SEQ ID NO: 511772 - RNA, 22 nt, Human
ggggcagaaguagugccccuga

SEQ ID NO: 511773 - RNA, 22 nt, Human
uggcuuccaaaggaaugggccu

SEQ ID NO: 511774 - RNA, 23 nt, Human
uggagaauuuagagucucuagga

SEQ ID NO: 511775 - RNA, 22 nt, Human
uaggcagggauuaggguugauu

SEQ ID NO: 511776 - RNA, 20 nt, Human
uacauucaaaacaaacucug

SEQ ID NO: 511777 - RNA, 22 nt, Human
ggccucugcaacuggcuguggc

SEQ ID NO: 511778 - RNA, 22 nt, Human
ggagugucagaaacaguguccu

SEQ ID NO: 511779 - RNA, 22 nt, Human
cugaggcucccucgggucugcu

SEQ ID NO: 511780 - RNA, 22 nt, Human
auaugagagaggaaagauuuua

SEQ ID NO: 511781 - RNA, 22 nt, Human
gccugcagaacugugaggcaau

SEQ ID NO: 511782 - RNA, 22 nt, Human
agcaauauaaauguuggguaga

SEQ ID NO: 511783 - RNA, 22 nt, Human
acccagccuacaaagcucaccu

SEQ ID NO: 511784 - RNA, 19 nt, Human
cgcagguggaaggagccgc

SEQ ID NO: 511785 - RNA, 22 nt, Human
ggagcuguuggcagcuaucuug

SEQ ID NO: 511786 - RNA, 22 nt, Human
acuguacacauucgucaagacu

SEQ ID NO: 511787 - RNA, 22 nt, Human
gguuugguuuuggccaucuucc

SEQ ID NO: 511788 - RNA, 17 nt, Human
ccucagcuucuuuccuc

SEQ ID NO: 511789 - RNA, 22 nt, Human
ucuuugaaguugaaguaguugg

SEQ ID NO: 511790 - RNA, 22 nt, Human
agggagcaugggugaagcaggc

SEQ ID NO: 511791 - RNA, 21 nt, Human
aguguguucuuggcauuaccu

SEQ ID NO: 511792 - RNA, 22 nt, Human
agaguuuacagaaauaagcugu

SEQ ID NO: 511793 - RNA, 22 nt, Human
aaagauucgagcgauguauaaa

SEQ ID NO: 511794 - RNA, 22 nt, Human
ggguccaggucuucaggcagag

SEQ ID NO: 511795 - RNA, 22 nt, Human
cuggggcugcggacgggagccc

SEQ ID NO: 511796 - RNA, 22 nt, Human
agagcuucacuggagagcacau

SEQ ID NO: 511797 - RNA, 20 nt, Human
cccuggagagaagcuccacg

SEQ ID NO: 511798 - RNA, 22 nt, Human
gggccugugcacaguucuguua

SEQ ID NO: 511799 - RNA, 22 nt, Human
gaauccaggguuguuugagcua

SEQ ID NO: 511800 - RNA, 22 nt, Human
caggagcuacucagguuggguu

SEQ ID NO: 511801 - RNA, 22 nt, Human
uauucacagcugccgcacucag

SEQ ID NO: 511802 - RNA, 22 nt, Human
ccugagucuguguuuuccuaag

SEQ ID NO: 511803 - RNA, 22 nt, Human
ucagcacugucuuuuauuugaa

SEQ ID NO: 511804 - RNA, 22 nt, Human
agccaugggcucccaguccuuu

SEQ ID NO: 511805 - RNA, 19 nt, Human
cacauacagaaaagaguaa

SEQ ID NO: 511806 - RNA, 22 nt, Human
gacagcagggacauguaggaag

SEQ ID NO: 511807 - RNA, 22 nt, Human
ugugaaggagaugaagggagug

SEQ ID NO: 511808 - RNA, 22 nt, Human
cuggccaggcuugggacagaca

SEQ ID NO: 511809 - RNA, 22 nt, Human
agaauguguuuuaacaugggaa

SEQ ID NO: 511810 - RNA, 22 nt, Human
acagcuggaggucugugagcac

SEQ ID NO: 511811 - RNA, 22 nt, Human
aaaauuuccaccaucuuugugu

SEQ ID NO: 511812 - RNA, 17 nt, Human
uuccucucacauuuuuu

SEQ ID NO: 511813 - RNA, 22 nt, Human
caguaaauuuuauuugugggug

SEQ ID NO: 511814 - RNA, 22 nt, Human
gucauuccuauccauuugauac

SEQ ID NO: 511815 - RNA, 22 nt, Human
acagucuugcuguauggucagg

SEQ ID NO: 511816 - RNA, 22 nt, Human
cucucugcuguauccuuaggcu

SEQ ID NO: 511817 - RNA, 22 nt, Human
gaagcagcagcuggggacaguu

SEQ ID NO: 511818 - RNA, 21 nt, Human
ucagcuuugcaacugcacauc

SEQ ID NO: 511819 - RNA, 22 nt, Human
gcuggccaguguggugaccacc

SEQ ID NO: 511820 - RNA, 22 nt, Human
uggcugagccuuuggggcuuuc

SEQ ID NO: 511821 - RNA, 22 nt, Human
ccauuugucaccucugcacucc

SEQ ID NO: 511822 - RNA, 22 nt, Human
uuuauuccaugugucuaugacc

SEQ ID NO: 511823 - RNA, 22 nt, Human
ugcucuggacgcugagugguuu

SEQ ID NO: 511824 - RNA, 22 nt, Human
ugaggcaguauucuccauucca

SEQ ID NO: 511825 - RNA, 22 nt, Human
uuguuucugaguuuucauguau

SEQ ID NO: 511826 - RNA, 22 nt, Human
caguccugaggaagagcugcug

SEQ ID NO: 511827 - RNA, 22 nt, Human
agcugccaucagccuuuggaug

SEQ ID NO: 511828 - RNA, 22 nt, Human
agccucucuccagcuuggcaga

SEQ ID NO: 511829 - RNA, 22 nt, Human
agggucccgaaggagacagcaa

SEQ ID NO: 511830 - RNA, 22 nt, Human
cuucucucccuggcacucagac

SEQ ID NO: 511831 - RNA, 22 nt, Human
cuuggcugucuauaggaaagag

SEQ ID NO: 511832 - RNA, 22 nt, Human
uccucagucucucaaaugaggc

SEQ ID NO: 511833 - RNA, 22 nt, Human
gcaggauggguguagcccagca

SEQ ID NO: 511834 - RNA, 17 nt, Human
ggcucugggugucacau

SEQ ID NO: 511835 - RNA, 22 nt, Human
acauaccauacauggugagaug

SEQ ID NO: 511836 - RNA, 22 nt, Human
guaaaugugcuucuuuuaacuu

SEQ ID NO: 511837 - RNA, 22 nt, Human
agaaucaaggugaagcccacag

SEQ ID NO: 511838 - RNA, 22 nt, Human
aaugaugguuaaacacuggagg

SEQ ID NO: 511839 - RNA, 22 nt, Human
uggaggaugccuggggaggccu

SEQ ID NO: 511840 - RNA, 22 nt, Human
ucauugucuugauaugauuguc

SEQ ID NO: 511841 - RNA, 20 nt, Human
ccaggcuggcaaaugggggc

SEQ ID NO: 511842 - RNA, 22 nt, Human
ugacagaaauaguucuuaauuu

SEQ ID NO: 511843 - RNA, 22 nt, Human
cugagccagagggagucggguc

SEQ ID NO: 511844 - RNA, 17 nt, Human
cccagcuggcagugccg

SEQ ID NO: 511845 - RNA, 21 nt, Human
aucuggaagaacugguaagug

SEQ ID NO: 511846 - RNA, 22 nt, Human
aagcccagcaucccugcaccag

SEQ ID NO: 511847 - RNA, 22 nt, Human
acugaguguaggacuuugaguu

SEQ ID NO: 511848 - RNA, 20 nt, Human
agagccuugaggaagaugau

SEQ ID NO: 511849 - RNA, 22 nt, Human
ccuguugucucuuccuguugac

SEQ ID NO: 511850 - RNA, 22 nt, Human
ugcucagggacaauggagaggg

SEQ ID NO: 511851 - RNA, 22 nt, Human
agggucuguggaugcaucuggg

SEQ ID NO: 511852 - RNA, 22 nt, Human
uucugggcaccaccacagacuu

SEQ ID NO: 511853 - RNA, 22 nt, Human
aacagcuugagacuggauaugc

SEQ ID NO: 511854 - RNA, 22 nt, Human
ggaggagacccugugucaguuu

SEQ ID NO: 511855 - RNA, 22 nt, Human
aggccucagcucagugugacag

SEQ ID NO: 511856 - RNA, 22 nt, Human
uucaucuugauggcuuccuaau

SEQ ID NO: 511857 - RNA, 22 nt, Human
aaaaugaggucaauauccuuuu

SEQ ID NO: 511858 - RNA, 22 nt, Human
ggagaaggguauguguggcgga

SEQ ID NO: 511859 - RNA, 22 nt, Human
agauggguaacuggagucugcu

SEQ ID NO: 511860 - RNA, 22 nt, Human
gccaccuguuucgcuugcccag

SEQ ID NO: 511861 - RNA, 22 nt, Human
aaggagacauuugcagagcacc

SEQ ID NO: 511862 - RNA, 22 nt, Human
uggcuccuuuccgggucuccag

SEQ ID NO: 511863 - RNA, 22 nt, Human
uggaaagaaaaacaggccauga

SEQ ID NO: 511864 - RNA, 22 nt, Human
caucaucaaaagugacagagaa

SEQ ID NO: 511865 - RNA, 20 nt, Human
agucucuguagugccugaga

SEQ ID NO: 511866 - RNA, 22 nt, Human
augugugugugcgcgcgcagga

SEQ ID NO: 511867 - RNA, 22 nt, Human
cagcuucuguuuauugugugcc

SEQ ID NO: 511868 - RNA, 22 nt, Human
ugaugacaaacuuuccugaugc

SEQ ID NO: 511869 - RNA, 22 nt, Human
uuucaaugacacaaaagagaaa

SEQ ID NO: 511870 - RNA, 22 nt, Human
uccugggguccugacugcuucc

SEQ ID NO: 511871 - RNA, 22 nt, Human
gucaacauuuacugcccuggcc

SEQ ID NO: 511872 - RNA, 22 nt, Human
agugacugacaccuguaauccc

SEQ ID NO: 511873 - RNA, 22 nt, Human
uuggaaggaagaaccgcgguag

SEQ ID NO: 511874 - RNA, 22 nt, Human
ugugcugguacaugugaggaug

SEQ ID NO: 511875 - RNA, 22 nt, Human
cacagcuucaguuucugacuug

SEQ ID NO: 511876 - RNA, 22 nt, Human
aaguucuuucuggaaggucugc

SEQ ID NO: 511877 - RNA, 22 nt, Human
caggcugcggucggcucugguc

SEQ ID NO: 511878 - RNA, 20 nt, Human
uggguccugcacauucucca

SEQ ID NO: 511879 - RNA, 20 nt, Human
aggcugggguguuuugccca

SEQ ID NO: 511880 - RNA, 22 nt, Human
augaaacaugagaaauggagag

SEQ ID NO: 511881 - RNA, 22 nt, Human
uucacaucuauaacuuagauaa

SEQ ID NO: 511882 - RNA, 22 nt, Human
uacuuugucauucuaaccuucc

SEQ ID NO: 511883 - RNA, 22 nt, Human
agagcccugaagcagagcuaaa

SEQ ID NO: 511884 - RNA, 22 nt, Human
uagggccagauaggcuucuuga

SEQ ID NO: 511885 - RNA, 22 nt, Human
ggccagaaaguuaagcuguggc

SEQ ID NO: 511886 - RNA, 22 nt, Human
caaugugucaggaaaagggcca

SEQ ID NO: 511887 - RNA, 22 nt, Human
agguucagaguuguugauguuu

SEQ ID NO: 511888 - RNA, 22 nt, Human
cacagaaauuauuaggaugcuu

SEQ ID NO: 511889 - RNA, 22 nt, Human
cuguuauuuagaacauggaauc

SEQ ID NO: 511890 - RNA, 22 nt, Human
auacaaguugugauaauguaaa

SEQ ID NO: 511891 - RNA, 20 nt, Human
ggaccagguggggcgguggc

SEQ ID NO: 511892 - RNA, 22 nt, Human
auuuaugauuagccuauuguug

SEQ ID NO: 511893 - RNA, 22 nt, Human
uucuaccagaccccagacuugu

SEQ ID NO: 511894 - RNA, 22 nt, Human
gccaccugguggcaucuucugg

SEQ ID NO: 511895 - RNA, 20 nt, Human
aacacugugcgugguaggug

SEQ ID NO: 511896 - RNA, 23 nt, Human
ucucaagaggaagcagggcucau

SEQ ID NO: 511897 - RNA, 22 nt, Human
ugcuggcccuggcucagggaac

SEQ ID NO: 511898 - RNA, 20 nt, Human
ggggaagaaaaggaugugau

SEQ ID NO: 511899 - RNA, 22 nt, Human
cacacccuugcuaacacuuguu

SEQ ID NO: 511900 - RNA, 22 nt, Human
aaacagcuuguaagguguaauu

SEQ ID NO: 511901 - RNA, 22 nt, Human
gagauuuagcugcuuaacuccu

SEQ ID NO: 511902 - RNA, 22 nt, Human
aaaugucuuuaucucauguaac

SEQ ID NO: 511903 - RNA, 22 nt, Human
cuguccucuguccucagcagga

SEQ ID NO: 511904 - RNA, 22 nt, Human
cugagcugcggcaggcaccugg

SEQ ID NO: 511905 - RNA, 22 nt, Human
gcaaggagacuguagggccaag

SEQ ID NO: 511906 - RNA, 22 nt, Human
gugcacagauucagagguuuug

SEQ ID NO: 511907 - RNA, 21 nt, Human
ccccucauacacucuccuugc

SEQ ID NO: 511908 - RNA, 22 nt, Human
cagcacugcugcuguacacaca

SEQ ID NO: 511909 - RNA, 22 nt, Human
uggcucagugaagagauaacuu

SEQ ID NO: 511910 - RNA, 22 nt, Human
ucucuggcacucccuuauggcu

SEQ ID NO: 511911 - RNA, 22 nt, Human
aggaagcucaaagccaugaugu

SEQ ID NO: 511912 - RNA, 22 nt, Human
aacaucuuuuuguuugcugaaa

SEQ ID NO: 511913 - RNA, 22 nt, Human
cagagguguacagagggaggcc

SEQ ID NO: 511914 - RNA, 22 nt, Human
cccugcagaaccacagacaaac

SEQ ID NO: 511915 - RNA, 22 nt, Human
ugcuucuggaguaacaggguga

SEQ ID NO: 511916 - RNA, 22 nt, Human
gcugcugguccucagagcucau

SEQ ID NO: 511917 - RNA, 22 nt, Human
uuggaagggaaccgaguuugcu

SEQ ID NO: 511918 - RNA, 22 nt, Human
cuccugcugaauggccaggagc

SEQ ID NO: 511919 - RNA, 22 nt, Human
acauagcuuaaaugagaagaua

SEQ ID NO: 511920 - RNA, 22 nt, Human
agaccagcugccucccagggcc

SEQ ID NO: 511921 - RNA, 22 nt, Human
augauugcagcccuacagcugu

SEQ ID NO: 511922 - RNA, 22 nt, Human
agguccaaauguugagacugau

SEQ ID NO: 511923 - RNA, 22 nt, Human
auuagcauugcuacucucaaga

SEQ ID NO: 511924 - RNA, 22 nt, Human
gcacagaagagcuuuggaauga

SEQ ID NO: 511925 - RNA, 22 nt, Human
caguccuguuccuggaguaguu

SEQ ID NO: 511926 - RNA, 22 nt, Human
cucuucaauagauuguugaggg

SEQ ID NO: 511927 - RNA, 22 nt, Human
uucucauggugucuuuauacau

SEQ ID NO: 511928 - RNA, 19 nt, Human
gugggacagacauuacaua

SEQ ID NO: 511929 - RNA, 18 nt, Human
caguuuuuauaucuggca

SEQ ID NO: 511930 - RNA, 22 nt, Human
cuguccugcaguugggggcagg

SEQ ID NO: 511931 - RNA, 22 nt, Human
uaugcacagaaguuugcugaau

SEQ ID NO: 511932 - RNA, 22 nt, Human
auaaauucucugauguauagua

SEQ ID NO: 511933 - RNA, 22 nt, Human
gaaaacuaacggaaaaguuagg

SEQ ID NO: 511934 - RNA, 22 nt, Human
ccugccugucaucgccugcgcc

SEQ ID NO: 511935 - RNA, 21 nt, Human
uaagaacauuaucuucuuccu

SEQ ID NO: 511936 - RNA, 20 nt, Human
gagcugugcucucaggagcc

SEQ ID NO: 511937 - RNA, 19 nt, Human
agacacacuugauaugugu

SEQ ID NO: 511938 - RNA, 22 nt, Human
cuacauaaauuuaucacagacu

SEQ ID NO: 511939 - RNA, 22 nt, Human
gacccaggguuucugcacaggg

SEQ ID NO: 511940 - RNA, 21 nt, Human
ugguccuucuuuacugccucc

SEQ ID NO: 511941 - RNA, 22 nt, Human
ggccugugucugugccuguccu

SEQ ID NO: 511942 - RNA, 22 nt, Human
aagagggaaauuguuggcugcu

SEQ ID NO: 511943 - RNA, 22 nt, Human
ggagaccagaaggaagcuucga

SEQ ID NO: 511944 - RNA, 22 nt, Human
uggccacacccaccuagaggag

SEQ ID NO: 511945 - RNA, 22 nt, Human
ugcaggugucuccagggcaggu

SEQ ID NO: 511946 - RNA, 22 nt, Human
ucauucacugcccagcagugua

SEQ ID NO: 511947 - RNA, 22 nt, Human
agagcuuagaauuucagaugau

SEQ ID NO: 511948 - RNA, 22 nt, Human
ucuccuugcuacccaguauguc

SEQ ID NO: 511949 - RNA, 22 nt, Human
gcagugaaacaauaggaucaaa

SEQ ID NO: 511950 - RNA, 22 nt, Human
ucaaauagguaugaguagaaau

SEQ ID NO: 511951 - RNA, 22 nt, Human
gaccacagcagugcaagaggag

SEQ ID NO: 511952 - RNA, 22 nt, Human
gccuuggcugaugugcgaauga

SEQ ID NO: 511953 - RNA, 22 nt, Human
gucuggagggaagagaugucag

SEQ ID NO: 511954 - RNA, 22 nt, Human
uggcaggcugaguuggccuggu

SEQ ID NO: 511955 - RNA, 23 nt, Human
ucugagagaacaaugccuccuau

SEQ ID NO: 511956 - RNA, 22 nt, Human
ucaguuuucaauuucaucagag

SEQ ID NO: 511957 - RNA, 22 nt, Human
aaagcauuacuagacuggauuu

SEQ ID NO: 511958 - RNA, 22 nt, Human
caggaacaggguguccuggcag

SEQ ID NO: 511959 - RNA, 22 nt, Human
ggucugaggcuccaaggaggug

SEQ ID NO: 511960 - RNA, 20 nt, Human
agaaguggcugcagacacua

SEQ ID NO: 511961 - RNA, 22 nt, Human
ugguuaaguccagaaaggaagc

SEQ ID NO: 511962 - RNA, 22 nt, Human
agugaauucuccacccaguagg

SEQ ID NO: 511963 - RNA, 20 nt, Human
ggggggcuucagggccugug

SEQ ID NO: 511964 - RNA, 22 nt, Human
acuuagcagguacuuucauauu

SEQ ID NO: 511965 - RNA, 22 nt, Human
acaucugaggagaccagccucu

SEQ ID NO: 511966 - RNA, 22 nt, Human
agauaugacuagaagcucauuu

SEQ ID NO: 511967 - RNA, 22 nt, Human
uggcacuggaaucguagccuug

SEQ ID NO: 511968 - RNA, 22 nt, Human
cugccuguuuccucuugcuccc

SEQ ID NO: 511969 - RNA, 22 nt, Human
cuuuacaaauagggagggagug

SEQ ID NO: 511970 - RNA, 22 nt, Human
caggaagggggauccuuggaag

SEQ ID NO: 511971 - RNA, 22 nt, Human
uaauuucaauagcuugcauaau

SEQ ID NO: 511972 - RNA, 22 nt, Human
ggugaguugggguucacagguc

SEQ ID NO: 511973 - RNA, 22 nt, Human
gugccacuuaccugggaggagu

SEQ ID NO: 511974 - RNA, 22 nt, Human
auacaguauguaggcuuuucag

SEQ ID NO: 511975 - RNA, 22 nt, Human
cuuccucuagccuaguaaugcc

SEQ ID NO: 511976 - RNA, 22 nt, Human
uguccugugaccuggcaccaca

SEQ ID NO: 511977 - RNA, 22 nt, Human
ucagcaguuuuauaugcagcuu

SEQ ID NO: 511978 - RNA, 22 nt, Human
uugcccugaagaacgucccaga

SEQ ID NO: 511979 - RNA, 22 nt, Human
ucugggucacugugggagggca

SEQ ID NO: 511980 - RNA, 22 nt, Human
aagggaggaggauuuauuguac

SEQ ID NO: 511981 - RNA, 22 nt, Human
gaaggggacuggcagcugcaga

SEQ ID NO: 511982 - RNA, 22 nt, Human
uggcucugaucagauguccagu

SEQ ID NO: 511983 - RNA, 22 nt, Human
auauuacauaaacaugagugaa

SEQ ID NO: 511984 - RNA, 22 nt, Human
acucuacuguaguaugggcacu

SEQ ID NO: 511985 - RNA, 22 nt, Human
ucaggaagugccuaggcuggcc

SEQ ID NO: 511986 - RNA, 22 nt, Human
gggagagguuacccgagcaacu

SEQ ID NO: 511987 - RNA, 22 nt, Human
ucucucagaggccaggguccug

SEQ ID NO: 511988 - RNA, 22 nt, Human
uuagaaagaacuuuagauauca

SEQ ID NO: 511989 - RNA, 22 nt, Human
gaggggcugggguugacuccaa

SEQ ID NO: 511990 - RNA, 22 nt, Human
acuccaggcaucugcuucugcu

SEQ ID NO: 511991 - RNA, 22 nt, Human
ucagcucucugggcucgaaccu

SEQ ID NO: 511992 - RNA, 22 nt, Human
uugucugaaagaucauuacauu

SEQ ID NO: 511993 - RNA, 22 nt, Human
ucacacacauuugcugucugau

SEQ ID NO: 511994 - RNA, 23 nt, Human
caugccaguuugugcaggcagau

SEQ ID NO: 511995 - RNA, 22 nt, Human
uggccaccccuuucucugcacu

SEQ ID NO: 511996 - RNA, 22 nt, Human
ugcaggcucugugugugccugg

SEQ ID NO: 511997 - RNA, 22 nt, Human
acauuucucuuagaguuggacu

SEQ ID NO: 511998 - RNA, 22 nt, Human
uugcagcuucuaacagcuucag

SEQ ID NO: 511999 - RNA, 22 nt, Human
agugcugggauugcaggcauga

SEQ ID NO: 512000 - RNA, 22 nt, Human
gaucauuugcaggaaacauuaa

SEQ ID NO: 512001 - RNA, 22 nt, Human
agugcugggauuacaggcauaa

SEQ ID NO: 512002 - RNA, 22 nt, Human
gcuggugagcaaaggagaagga

SEQ ID NO: 512003 - RNA, 22 nt, Human
gccaggaacacaaugccaagcu

SEQ ID NO: 512004 - RNA, 22 nt, Human
cauuuaaugccuuugccaucca

SEQ ID NO: 512005 - RNA, 22 nt, Human
cauuuucagcacccaucugaaa

SEQ ID NO: 512006 - RNA, 22 nt, Human
uccucaggaucuaggagugcuu

SEQ ID NO: 512007 - RNA, 22 nt, Human
uguaaauaaugcauguaaauca

SEQ ID NO: 512008 - RNA, 21 nt, Human
uggcucugaaagagugcugca

SEQ ID NO: 512009 - RNA, 22 nt, Human
gcagagcugggucuguauccaa

SEQ ID NO: 512010 - RNA, 22 nt, Human
cuacagguaugugcaugacauc

SEQ ID NO: 512011 - RNA, 22 nt, Human
aaaguccuguuugaaggaccug

SEQ ID NO: 512012 - RNA, 22 nt, Human
cuuucagagguuacucaggaaa

SEQ ID NO: 512013 - RNA, 22 nt, Human
aauguacaaggguuccaguuuu

SEQ ID NO: 512014 - RNA, 22 nt, Human
agauuucagaugcucggcaguu

SEQ ID NO: 512015 - RNA, 22 nt, Human
agauggggcucaguguggaggc

SEQ ID NO: 512016 - RNA, 22 nt, Human
caggcuccacuguaggcagcuc

SEQ ID NO: 512017 - RNA, 22 nt, Human
cuccaggcucguccaagaucga

SEQ ID NO: 512018 - RNA, 22 nt, Human
gaaaucugucuuuguuugaaua

SEQ ID NO: 512019 - RNA, 22 nt, Human
uuuagugauucauuuagaaaaa

SEQ ID NO: 512020 - RNA, 22 nt, Human
aacucagcauccugcacagaga

SEQ ID NO: 512021 - RNA, 22 nt, Human
cccuggcaugcaugucccuggc

SEQ ID NO: 512022 - RNA, 22 nt, Human
ggagcuggcuacagagaacucc

SEQ ID NO: 512023 - RNA, 22 nt, Human
gcacauguugcuaguuacuugc

SEQ ID NO: 512024 - RNA, 22 nt, Human
uucuggaauucuugcagccacu

SEQ ID NO: 512025 - RNA, 22 nt, Human
gccuggagaagauggaacuagc

SEQ ID NO: 512026 - RNA, 22 nt, Human
cuguccuggccgcccuugugag

SEQ ID NO: 512027 - RNA, 22 nt, Human
uggccugcuuucauuugaugcu

SEQ ID NO: 512028 - RNA, 22 nt, Human
uuucacauaucaacucuauccu

SEQ ID NO: 512029 - RNA, 22 nt, Human
ucuguucagaaauggaagugcc

SEQ ID NO: 512030 - RNA, 22 nt, Human
gggcagucacagugcuggagca

SEQ ID NO: 512031 - RNA, 22 nt, Human
cacauacauacguauguauaca

SEQ ID NO: 512032 - RNA, 22 nt, Human
gggcaugguggcaggcaccugu

SEQ ID NO: 512033 - RNA, 22 nt, Human
uugaaaggccuguuuauccagc

SEQ ID NO: 512034 - RNA, 22 nt, Human
augggcuggggaagcucacucc

SEQ ID NO: 512035 - RNA, 22 nt, Human
ugcuuuaucugacuuggcgcug

SEQ ID NO: 512036 - RNA, 22 nt, Human
ugggaggagcccucugggaagg

SEQ ID NO: 512037 - RNA, 18 nt, Human
acaaauguagugucuuaa

SEQ ID NO: 512038 - RNA, 22 nt, Human
aggaaggaagagacaccauuug

SEQ ID NO: 512039 - RNA, 22 nt, Human
aggaagcauguuggauccacuu

SEQ ID NO: 512040 - RNA, 22 nt, Human
aggucacaggguugaaguacuu

SEQ ID NO: 512041 - RNA, 22 nt, Human
gucuggaggaggaagaaggcac

SEQ ID NO: 512042 - RNA, 22 nt, Human
ggccccugcggacugccuagag

SEQ ID NO: 512043 - RNA, 22 nt, Human
ucccacacagcccgcucaccgg

SEQ ID NO: 512044 - RNA, 22 nt, Human
uagauuucaggcuggcuugcgg

SEQ ID NO: 512045 - RNA, 22 nt, Human
aguggcuggagccccaggcugg

SEQ ID NO: 512046 - RNA, 22 nt, Human
gagauuagaguuguuucauugu

SEQ ID NO: 512047 - RNA, 22 nt, Human
ucuugggauugcccugcaguuc

SEQ ID NO: 512048 - RNA, 22 nt, Human
acucugccuuucagcagaugaa

SEQ ID NO: 512049 - RNA, 22 nt, Human
gcuuccaccuacuaaaugccac

SEQ ID NO: 512050 - RNA, 22 nt, Human
ucuggggagcagcccuggugag

SEQ ID NO: 512051 - RNA, 21 nt, Human
gcucucugcaugguggcucag

SEQ ID NO: 512052 - RNA, 22 nt, Human
ugugugaaucuauugaauauau

SEQ ID NO: 512053 - RNA, 16 nt, Human
uccuggccuuuggaag

SEQ ID NO: 512054 - RNA, 22 nt, Human
uggcugccuagucccucagccu

SEQ ID NO: 512055 - RNA, 22 nt, Human
gcagagccaggagagacccuug

SEQ ID NO: 512056 - RNA, 22 nt, Human
caguguuucugaguuccagcuc

SEQ ID NO: 512057 - RNA, 22 nt, Human
gggagggaaagcuugaucuguc

SEQ ID NO: 512058 - RNA, 22 nt, Human
cuccugggagcuguggcagagc

SEQ ID NO: 512059 - RNA, 22 nt, Human
aucugggcguauaggugcaagu

SEQ ID NO: 512060 - RNA, 22 nt, Human
caagugucuauaucagugcuug

SEQ ID NO: 512061 - RNA, 22 nt, Human
agcacagaauggcuuggaagcc

SEQ ID NO: 512062 - RNA, 22 nt, Human
ugggaaggaacugccuuuagcu

SEQ ID NO: 512063 - RNA, 22 nt, Human
cacucaggcugugucaggagga

SEQ ID NO: 512064 - RNA, 22 nt, Human
cuggagaggccccaagauauuu

SEQ ID NO: 512065 - RNA, 22 nt, Human
aaacauugcuaaauaaugcugc

SEQ ID NO: 512066 - RNA, 22 nt, Human
uccagggaaggugugaggcugg

SEQ ID NO: 512067 - RNA, 22 nt, Human
cuucuggggauggagcccagaa

SEQ ID NO: 512068 - RNA, 22 nt, Human
uguccugggaacucacagucca

SEQ ID NO: 512069 - RNA, 22 nt, Human
gugaaggacugaaugaaaaugu

SEQ ID NO: 512070 - RNA, 22 nt, Human
gggcugacucaaccuugcaaag

SEQ ID NO: 512071 - RNA, 22 nt, Human
ggcacagcccucucuguggaca

SEQ ID NO: 512072 - RNA, 22 nt, Human
ggcaccuggagguuuacuggau

SEQ ID NO: 512073 - RNA, 22 nt, Human
aggugacugguuuaucuggcag

SEQ ID NO: 512074 - RNA, 22 nt, Human
ccugccagcauggcuuaucucc

SEQ ID NO: 512075 - RNA, 22 nt, Human
gaggcugcccaacuggagugga

SEQ ID NO: 512076 - RNA, 22 nt, Human
auuuccauacacccauuucuga

SEQ ID NO: 512077 - RNA, 22 nt, Human
aaaucaguuggaacacaagcag

SEQ ID NO: 512078 - RNA, 23 nt, Human
ucucagugaaucucagaauucgc

SEQ ID NO: 512079 - RNA, 22 nt, Human
cucucuggacuugaguaucagc

SEQ ID NO: 512080 - RNA, 22 nt, Human
ugccaggcccucccacagauua

SEQ ID NO: 512081 - RNA, 22 nt, Human
ggccuugggcagacacgucaca

SEQ ID NO: 512082 - RNA, 22 nt, Human
ucuuaaaaguaugccaauugga

SEQ ID NO: 512083 - RNA, 22 nt, Human
uccuggccugucuggaguagcu

SEQ ID NO: 512084 - RNA, 22 nt, Human
ccucuggccagagaaaggccag

SEQ ID NO: 512085 - RNA, 22 nt, Human
gguccugaggggagcugaaggu

SEQ ID NO: 512086 - RNA, 22 nt, Human
caaaugaauauuuccauggguu

SEQ ID NO: 512087 - RNA, 22 nt, Human
cuuucuuauaccugucagggcc

SEQ ID NO: 512088 - RNA, 22 nt, Human
gcacugaaauuauaugcauuug

SEQ ID NO: 512089 - RNA, 22 nt, Human
cuacaagauuuuuaaaacugua

SEQ ID NO: 512090 - RNA, 22 nt, Human
aagaguuuuuggagugugaguu

SEQ ID NO: 512091 - RNA, 22 nt, Human
agcugcagauucuaucuagaag

SEQ ID NO: 512092 - RNA, 22 nt, Human
auuugcagagcucugaauuuug

SEQ ID NO: 512093 - RNA, 22 nt, Human
agguucuuggugagcauuuggu

SEQ ID NO: 512094 - RNA, 22 nt, Human
cucugggcacuguauggguucu

SEQ ID NO: 512095 - RNA, 23 nt, Human
cugugucuaugcagccauaucca

SEQ ID NO: 512096 - RNA, 19 nt, Human
ggcuggcaagugacagugu

SEQ ID NO: 512097 - RNA, 22 nt, Human
uuagcaucugcuguaagcuuau

SEQ ID NO: 512098 - RNA, 22 nt, Human
gugcugcucacaucuggaggua

SEQ ID NO: 512099 - RNA, 22 nt, Human
uacauaguauucacauuguuuu

SEQ ID NO: 512100 - RNA, 22 nt, Human
uucugugugccagaguugugcu

SEQ ID NO: 512101 - RNA, 22 nt, Human
cagaggcccagugagagggcug

SEQ ID NO: 512102 - RNA, 22 nt, Human
gaggccuggcugggaggaggug

SEQ ID NO: 512103 - RNA, 22 nt, Human
cugaccuggccuuggugggcca

SEQ ID NO: 512104 - RNA, 22 nt, Human
aaucacaucucauucaacagcc

SEQ ID NO: 512105 - RNA, 22 nt, Human
uccuggcucucuacaaaccaga

SEQ ID NO: 512106 - RNA, 22 nt, Human
ucagugucuucucuuuccuacc

SEQ ID NO: 512107 - RNA, 22 nt, Human
ggaagagaaaugagucaagacu

SEQ ID NO: 512108 - RNA, 22 nt, Human
cagcagcuguuuacggaacacc

SEQ ID NO: 512109 - RNA, 22 nt, Human
cucagagucccuucccucgugg

SEQ ID NO: 512110 - RNA, 22 nt, Human
cuagcaucagaugagaagcugu

SEQ ID NO: 512111 - RNA, 22 nt, Human
ggcucaggaugagccuucucau

SEQ ID NO: 512112 - RNA, 22 nt, Human
gaguguggugaacaggagcacc

SEQ ID NO: 512113 - RNA, 22 nt, Human
cagcccucaucucagcuucuuu

SEQ ID NO: 512114 - RNA, 22 nt, Human
uguuucauuaguacugacaaua

SEQ ID NO: 512115 - RNA, 17 nt, Human
gcucccugaggacagcu

SEQ ID NO: 512116 - RNA, 22 nt, Human
aggagccuccuucucaugugca

SEQ ID NO: 512117 - RNA, 22 nt, Human
aaggaagacacagaugaaguga

SEQ ID NO: 512118 - RNA, 22 nt, Human
ugagugccugaacauagaguag

SEQ ID NO: 512119 - RNA, 22 nt, Human
ugcaaagaagccuuugccuucu

SEQ ID NO: 512120 - RNA, 22 nt, Human
ugggucuccaguucagggcagg

SEQ ID NO: 512121 - RNA, 22 nt, Human
ggggagcaauaguugaggugug

SEQ ID NO: 512122 - RNA, 18 nt, Human
cccagccucuccuuucua

SEQ ID NO: 512123 - RNA, 22 nt, Human
gcugucccaugguugcaagaug

SEQ ID NO: 512124 - RNA, 22 nt, Human
uucuuuuaauagagauccugug

SEQ ID NO: 512125 - RNA, 22 nt, Human
ggccuagggaguggccaugccu

SEQ ID NO: 512126 - RNA, 22 nt, Human
agugaaauggaugcugcuacug

SEQ ID NO: 512127 - RNA, 22 nt, Human
gagagcaggaggcagcgggacg

SEQ ID NO: 512128 - RNA, 22 nt, Human
uagggcuucaggugugaggcag

SEQ ID NO: 512129 - RNA, 22 nt, Human
cuggccuuggaagggagcccgu

SEQ ID NO: 512130 - RNA, 22 nt, Human
agauaacuuuuggguauucaug

SEQ ID NO: 512131 - RNA, 22 nt, Human
gaaggaaaucugugauuuaugc

SEQ ID NO: 512132 - RNA, 22 nt, Human
gaacccaggcuuuugaggcugu

SEQ ID NO: 512133 - RNA, 22 nt, Human
guuaaauaaccucauguccguu

SEQ ID NO: 512134 - RNA, 22 nt, Human
uacacagggaaaggucucagag

SEQ ID NO: 512135 - RNA, 22 nt, Human
ucaugccaauuucugcauggcu

SEQ ID NO: 512136 - RNA, 22 nt, Human
ggaaccuuaguguucuuuuacc

SEQ ID NO: 512137 - RNA, 22 nt, Human
agagcugggaccgucuggaagu

SEQ ID NO: 512138 - RNA, 17 nt, Human
ucuguccagggagugug

SEQ ID NO: 512139 - RNA, 22 nt, Human
aacuuguuuagaagagguuacu

SEQ ID NO: 512140 - RNA, 22 nt, Human
cagcuucuccagaugacccuca

SEQ ID NO: 512141 - RNA, 22 nt, Human
cugccucuggccucaggcccag

SEQ ID NO: 512142 - RNA, 22 nt, Human
ggagggggaauucagccccagc

SEQ ID NO: 512143 - RNA, 22 nt, Human
gcuucagccucacacugauauc

SEQ ID NO: 512144 - RNA, 22 nt, Human
aaagauuagauaagauagauuu

SEQ ID NO: 512145 - RNA, 22 nt, Human
uuaaaagaccuguugagguuag

SEQ ID NO: 512146 - RNA, 22 nt, Human
aucacauuguuagcauagacug

SEQ ID NO: 512147 - RNA, 22 nt, Human
ccucaaaguagagggagaugag

SEQ ID NO: 512148 - RNA, 22 nt, Human
cagggugccuguccucagcaaa

SEQ ID NO: 512149 - RNA, 22 nt, Human
ucauuuguugcuguuaccugag

SEQ ID NO: 512150 - RNA, 22 nt, Human
cccuuggaagguagcuggcagu

SEQ ID NO: 512151 - RNA, 22 nt, Human
uucuaguuuugccuuaucaaca

SEQ ID NO: 512152 - RNA, 21 nt, Human
ucuugaaaauuguagcaguuu

SEQ ID NO: 512153 - RNA, 22 nt, Human
uguaugcuuguguauaauauaa

SEQ ID NO: 512154 - RNA, 22 nt, Human
ggcucugcgcgguaaagugacu

SEQ ID NO: 512155 - RNA, 22 nt, Human
aguggcaguggcugggcagagc

SEQ ID NO: 512156 - RNA, 22 nt, Human
ccaggcguggcuucagcagccc

SEQ ID NO: 512157 - RNA, 22 nt, Human
cucuuuccucagccacagucua

SEQ ID NO: 512158 - RNA, 22 nt, Human
gccaccucuuugucucugccgc

SEQ ID NO: 512159 - RNA, 22 nt, Human
aaggggagaugucaugggcccu

SEQ ID NO: 512160 - RNA, 22 nt, Human
agcagcauuuaaggauccaagu

SEQ ID NO: 512161 - RNA, 22 nt, Human
ccaaggacuggacacacagguu

SEQ ID NO: 512162 - RNA, 22 nt, Human
gccuggcacucacugaagaggc

SEQ ID NO: 512163 - RNA, 23 nt, Human
gcagagguuuuucaguaugguuu

SEQ ID NO: 512164 - RNA, 22 nt, Human
ugcacacacaggagucuccucc

SEQ ID NO: 512165 - RNA, 22 nt, Human
gccugcagacguguuuuccuca

SEQ ID NO: 512166 - RNA, 22 nt, Human
cuguuuuugugcugugucuccc

SEQ ID NO: 512167 - RNA, 22 nt, Human
gggcugugugcccacuucccau

SEQ ID NO: 512168 - RNA, 22 nt, Human
uaagaagcuucugcuaaugccu

SEQ ID NO: 512169 - RNA, 22 nt, Human
ucugagagauacaaggaggcaa

SEQ ID NO: 512170 - RNA, 22 nt, Human
uuaaugcagaaaucaaacugac

SEQ ID NO: 512171 - RNA, 22 nt, Human
uucuucaaccaucuacauaaac

SEQ ID NO: 512172 - RNA, 21 nt, Human
agcagaggcagaauguaugca

SEQ ID NO: 512173 - RNA, 22 nt, Human
aaagaauagccuuuguccaaau

SEQ ID NO: 512174 - RNA, 22 nt, Human
ccagcuuguuugaagcucguca

SEQ ID NO: 512175 - RNA, 21 nt, Human
uccuccuucaaguccuggccu

SEQ ID NO: 512176 - RNA, 22 nt, Human
gcucccagcauugcugcugaau

SEQ ID NO: 512177 - RNA, 18 nt, Human
aguuccuuaaauuggugu

SEQ ID NO: 512178 - RNA, 22 nt, Human
ggcugccacgucgaggguccaa

SEQ ID NO: 512179 - RNA, 17 nt, Human
uaaauacacaaggguau

SEQ ID NO: 512180 - RNA, 22 nt, Human
ggaaggaaagcagcuuggcccu

SEQ ID NO: 512181 - RNA, 20 nt, Human
ucacuguaauugccuacauu

SEQ ID NO: 512182 - RNA, 22 nt, Human
ucccuggagauaacuucuggga

SEQ ID NO: 512183 - RNA, 22 nt, Human
uuuggcuuaacuuacaugauau

SEQ ID NO: 512184 - RNA, 22 nt, Human
ggcaggguuuacaauagcaaua

SEQ ID NO: 512185 - RNA, 22 nt, Human
aguggcuguuccaggugaggac

SEQ ID NO: 512186 - RNA, 22 nt, Human
aggcaagggggcgccaccuucc

SEQ ID NO: 512187 - RNA, 22 nt, Human
aaaugucugagacuucugaacu

SEQ ID NO: 512188 - RNA, 22 nt, Human
uccuucaagugcaguaccugag

SEQ ID NO: 512189 - RNA, 22 nt, Human
ucucuggggccuuucuacauca

SEQ ID NO: 512190 - RNA, 22 nt, Human
ugaaagcacucacuucugcucu

SEQ ID NO: 512191 - RNA, 22 nt, Human
gccuggaggguugagguuuugu

SEQ ID NO: 512192 - RNA, 20 nt, Human
ugcuuccuggccacugcggg

SEQ ID NO: 512193 - RNA, 20 nt, Human
uccugagauuuaagggguuc

SEQ ID NO: 512194 - RNA, 18 nt, Human
ucacagaauauugagugg

SEQ ID NO: 512195 - RNA, 22 nt, Human
acuuucuuaggcuguauaaaug

SEQ ID NO: 512196 - RNA, 22 nt, Human
cucacaggagaaagucaugguc

SEQ ID NO: 512197 - RNA, 22 nt, Human
uuuaccaagcuuuaauuacaua

SEQ ID NO: 512198 - RNA, 22 nt, Human
aagugcaaauuuaagaaggcau

SEQ ID NO: 512199 - RNA, 20 nt, Human
uggagcuccagcguccaugu

SEQ ID NO: 512200 - RNA, 22 nt, Human
uagcaucaugaucagaacuguu

SEQ ID NO: 512201 - RNA, 22 nt, Human
ggagccagcucccuccuuguga

SEQ ID NO: 512202 - RNA, 22 nt, Human
gauucaagaccuagcucagcca

SEQ ID NO: 512203 - RNA, 22 nt, Human
cauagugucugguaacauagua

SEQ ID NO: 512204 - RNA, 22 nt, Human
ggcagccaugucccagggcuuc

SEQ ID NO: 512205 - RNA, 22 nt, Human
aaguucuugcugugugucagau

SEQ ID NO: 512206 - RNA, 22 nt, Human
cagagcagcagagcuuccaugg

SEQ ID NO: 512207 - RNA, 22 nt, Human
uugaucaucuugugcugacggc

SEQ ID NO: 512208 - RNA, 17 nt, Human
gguggccugcaguggcu

SEQ ID NO: 512209 - RNA, 19 nt, Human
ugcaggaggacugagcaga

SEQ ID NO: 512210 - RNA, 22 nt, Human
cuguggcuggccugucugacau

SEQ ID NO: 512211 - RNA, 20 nt, Human
aaaaugaugggcagggcagg

SEQ ID NO: 512212 - RNA, 22 nt, Human
ccuggcugggccugauuucuca

SEQ ID NO: 512213 - RNA, 22 nt, Human
ggugcccaccugucuuccugga

SEQ ID NO: 512214 - RNA, 21 nt, Human
acagaacuguauagugauaaa

SEQ ID NO: 512215 - RNA, 22 nt, Human
gggagccaugcuggucuucuuu

SEQ ID NO: 512216 - RNA, 22 nt, Human
ggccugagucccaccuggcugu

SEQ ID NO: 512217 - RNA, 22 nt, Human
uggaacacaagucauugagggg

SEQ ID NO: 512218 - RNA, 22 nt, Human
ugggccacagagugagaaaugu

SEQ ID NO: 512219 - RNA, 22 nt, Human
gccacagggcagaugcgcagag

SEQ ID NO: 512220 - RNA, 22 nt, Human
ucagcucuaaguuuuaugcaaa

SEQ ID NO: 512221 - RNA, 22 nt, Human
agagugucugguagcugcucug

SEQ ID NO: 512222 - RNA, 22 nt, Human
guauucuugguuaucaaaauac

SEQ ID NO: 512223 - RNA, 22 nt, Human
ggcagcaggagccaucugguag

SEQ ID NO: 512224 - RNA, 22 nt, Human
ugguccugcuacaggggauuag

SEQ ID NO: 512225 - RNA, 22 nt, Human
caagucaaagacuagaacuagu

SEQ ID NO: 512226 - RNA, 22 nt, Human
gaugugagugguagcugggauu

SEQ ID NO: 512227 - RNA, 19 nt, Human
ugugugcccucaccacaua

SEQ ID NO: 512228 - RNA, 22 nt, Human
uuccaagaguaaauucaaauug

SEQ ID NO: 512229 - RNA, 17 nt, Human
agcugagcuggccaggg

SEQ ID NO: 512230 - RNA, 22 nt, Human
ggagccagaaaugcugugguug

SEQ ID NO: 512231 - RNA, 22 nt, Human
ugcagcagguuccaaaggguua

SEQ ID NO: 512232 - RNA, 22 nt, Human
ugccacacuccccugcugcagu

SEQ ID NO: 512233 - RNA, 22 nt, Human
agcagaagaaagccacaugacu

SEQ ID NO: 512234 - RNA, 20 nt, Human
agccugccagcuggcccaga

SEQ ID NO: 512235 - RNA, 22 nt, Human
auaauguuucaguacugucugu

SEQ ID NO: 512236 - RNA, 22 nt, Human
aacacaaagaagcugcaggauc

SEQ ID NO: 512237 - RNA, 22 nt, Human
gaugcagggaacuuagugggcu

SEQ ID NO: 512238 - RNA, 22 nt, Human
uuuauuauucucuggagaaugu

SEQ ID NO: 512239 - RNA, 22 nt, Human
uccucacagucaacacuuugag

SEQ ID NO: 512240 - RNA, 22 nt, Human
ucucugggagcaauuguuugcu

SEQ ID NO: 512241 - RNA, 22 nt, Human
gcagggcagcugaagcuaggug

SEQ ID NO: 512242 - RNA, 22 nt, Human
aagagcuggcccaaucugagca

SEQ ID NO: 512243 - RNA, 22 nt, Human
gcugcugucagcaggccuuguu

SEQ ID NO: 512244 - RNA, 22 nt, Human
aagaugcagcuuuacaauaagg

SEQ ID NO: 512245 - RNA, 22 nt, Human
gaauucugggagagaucugaca

SEQ ID NO: 512246 - RNA, 22 nt, Human
gcccugugccagucacgcugug

SEQ ID NO: 512247 - RNA, 22 nt, Human
aaaagaggagugguuuaugaca

SEQ ID NO: 512248 - RNA, 22 nt, Human
acagggucaagggugcuacaag

SEQ ID NO: 512249 - RNA, 22 nt, Human
ucauccaguucacauggugagu

SEQ ID NO: 512250 - RNA, 22 nt, Human
ugauuucuuccuugucauuaga

SEQ ID NO: 512251 - RNA, 22 nt, Human
ccagcucaucucagugaaaugc

SEQ ID NO: 512252 - RNA, 22 nt, Human
ggcacagcacuguaggccuggg

SEQ ID NO: 512253 - RNA, 22 nt, Human
uauuucagcaagaagaaugugg

SEQ ID NO: 512254 - RNA, 22 nt, Human
uaaacagccuccccuuucacuc

SEQ ID NO: 512255 - RNA, 22 nt, Human
cagggccuccuaaggcaucuaa

SEQ ID NO: 512256 - RNA, 22 nt, Human
ugacaaacccugcaaauagcuc

SEQ ID NO: 512257 - RNA, 22 nt, Human
ucaagucuugaugagacaaacc

SEQ ID NO: 512258 - RNA, 20 nt, Human
gcagagcuguucugugggga

SEQ ID NO: 512259 - RNA, 22 nt, Human
uuauuuaaaagugguaagauuc

SEQ ID NO: 512260 - RNA, 19 nt, Human
agagaaagaauugagucua

SEQ ID NO: 512261 - RNA, 22 nt, Human
ccagggaggagcauuucauggu

SEQ ID NO: 512262 - RNA, 22 nt, Human
agcagcagauccaaaaaaugug

SEQ ID NO: 512263 - RNA, 22 nt, Human
uguucauuuggcccuuuuguau

SEQ ID NO: 512264 - RNA, 22 nt, Human
ugggcugcggauaggccucgga

SEQ ID NO: 512265 - RNA, 19 nt, Human
ggcucagggcgcugccgcc

SEQ ID NO: 512266 - RNA, 22 nt, Human
uucacagggccacuggcaggag

SEQ ID NO: 512267 - RNA, 22 nt, Human
augcucugggcaggagcccugg

SEQ ID NO: 512268 - RNA, 22 nt, Human
cuucuugcaauuuucaucuuau

SEQ ID NO: 512269 - RNA, 22 nt, Human
agugcaggccccaggccaggcc

SEQ ID NO: 512270 - RNA, 22 nt, Human
ucauuucuccuaagugaaauau

SEQ ID NO: 512271 - RNA, 22 nt, Human
ucccuucaagauuuggggaaau

SEQ ID NO: 512272 - RNA, 22 nt, Human
gccacugucauacccuggcaau

SEQ ID NO: 512273 - RNA, 22 nt, Human
gaucauuuugaugcccuuuuag

SEQ ID NO: 512274 - RNA, 22 nt, Human
aggcagagcuggguuuugaaau

SEQ ID NO: 512275 - RNA, 22 nt, Human
gggcugcugcccaggaggcacc

SEQ ID NO: 512276 - RNA, 22 nt, Human
gcugccaguuccuucuuacucc

SEQ ID NO: 512277 - RNA, 22 nt, Human
cagggagaaaucuccaggaggu

SEQ ID NO: 512278 - RNA, 22 nt, Human
agaggcugucccuugcuauucc

SEQ ID NO: 512279 - RNA, 22 nt, Human
gaggaagcagggcuuggcugag

SEQ ID NO: 512280 - RNA, 22 nt, Human
uugcuauaaaugguuucauauu

SEQ ID NO: 512281 - RNA, 22 nt, Human
agggacugagcuaggaucuagu

SEQ ID NO: 512282 - RNA, 22 nt, Human
uagauuucgcugcaucucaauc

SEQ ID NO: 512283 - RNA, 22 nt, Human
uugauuuuuccagcuucuagag

SEQ ID NO: 512284 - RNA, 22 nt, Human
aguuuggaagaauuuggucugu

SEQ ID NO: 512285 - RNA, 22 nt, Human
gggugcagcagagcuccucugu

SEQ ID NO: 512286 - RNA, 18 nt, Human
agaagcagguucucccag

SEQ ID NO: 512287 - RNA, 22 nt, Human
cuggaagguaacaaggccauua

SEQ ID NO: 512288 - RNA, 22 nt, Human
acagaggccccgugggagagcc

SEQ ID NO: 512289 - RNA, 22 nt, Human
auugaaagguuuugagcagaua

SEQ ID NO: 512290 - RNA, 22 nt, Human
aagaagaugguuaacuuucagu

SEQ ID NO: 512291 - RNA, 22 nt, Human
aagguccaguggaaacuagagu

SEQ ID NO: 512292 - RNA, 19 nt, Human
cuggucugucaugcucccc

SEQ ID NO: 512293 - RNA, 22 nt, Human
cagguggaucucuaaggacuga

SEQ ID NO: 512294 - RNA, 22 nt, Human
cuggggugagcagaaacagggg

SEQ ID NO: 512295 - RNA, 22 nt, Human
gccugcagcugcuuccacacac

SEQ ID NO: 512296 - RNA, 22 nt, Human
gcccagaguucaaggcugcagu

SEQ ID NO: 512297 - RNA, 22 nt, Human
ucccagagcagaugugcuaaag

SEQ ID NO: 512298 - RNA, 22 nt, Human
ccuuggcugaggagggagcuga

SEQ ID NO: 512299 - RNA, 22 nt, Human
acagggcagaaauguugcaucu

SEQ ID NO: 512300 - RNA, 22 nt, Human
uccuuggagguguucaucugcc

SEQ ID NO: 512301 - RNA, 18 nt, Human
ggugagggagcuggaagc

SEQ ID NO: 512302 - RNA, 22 nt, Human
ggcuccaaagggcagugugagg

SEQ ID NO: 512303 - RNA, 22 nt, Human
ggaucauuaacacauccaucac

SEQ ID NO: 512304 - RNA, 22 nt, Human
cugcuuuagacaacugcuggga

SEQ ID NO: 512305 - RNA, 22 nt, Human
ccaagaugaucuuuacaguguu

SEQ ID NO: 512306 - RNA, 17 nt, Human
aaguccagaguugagca

SEQ ID NO: 512307 - RNA, 22 nt, Human
acagcaggauuuggcgauguug

SEQ ID NO: 512308 - RNA, 22 nt, Human
gacaucauaucaggaggcaugu

SEQ ID NO: 512309 - RNA, 20 nt, Human
ugccaggcacggagugcaug

SEQ ID NO: 512310 - RNA, 22 nt, Human
acucucucacagcuuggcugau

SEQ ID NO: 512311 - RNA, 22 nt, Human
agauacaaguuaagagaaagga

SEQ ID NO: 512312 - RNA, 22 nt, Human
gagcagugacuggagcaugaga

SEQ ID NO: 512313 - RNA, 19 nt, Human
cacuagucuagaugggaug

SEQ ID NO: 512314 - RNA, 19 nt, Human
aucuuacagagcagaguac

SEQ ID NO: 512315 - RNA, 22 nt, Human
ucaguguuuauucaauguuauu

SEQ ID NO: 512316 - RNA, 22 nt, Human
cgaugguucuggcugcuuguau

SEQ ID NO: 512317 - RNA, 22 nt, Human
ugaagcuugagugucaguuccu

SEQ ID NO: 512318 - RNA, 22 nt, Human
cauguguaaggcucacaggcag

SEQ ID NO: 512319 - RNA, 22 nt, Human
agacaauauauaauuuuaguug

SEQ ID NO: 512320 - RNA, 22 nt, Human
gaaagugcucucucuauacaca

SEQ ID NO: 512321 - RNA, 22 nt, Human
gggcagaggggcgcuucccucu

SEQ ID NO: 512322 - RNA, 22 nt, Human
uucagagauggaaggcagaaug

SEQ ID NO: 512323 - RNA, 22 nt, Human
cuguccagcuuggcuccugggg

SEQ ID NO: 512324 - RNA, 22 nt, Human
aaaucaguuguuauauuaaaga

SEQ ID NO: 512325 - RNA, 22 nt, Human
ccaguguuauuuuagaguguga

SEQ ID NO: 512326 - RNA, 18 nt, Human
gucagaggauggggaaau

SEQ ID NO: 512327 - RNA, 22 nt, Human
cuggccuggcagggagggcaug

SEQ ID NO: 512328 - RNA, 22 nt, Human
agguggggaaaccagcgauccc

SEQ ID NO: 512329 - RNA, 22 nt, Human
aauacagagaauguuauuugga

SEQ ID NO: 512330 - RNA, 22 nt, Human
uggcagguagaguucugagaug

SEQ ID NO: 512331 - RNA, 23 nt, Human
acucagugagggccuugggcugc

SEQ ID NO: 512332 - RNA, 22 nt, Human
uacaguaucuucuggcaagcau

SEQ ID NO: 512333 - RNA, 22 nt, Human
augggcugacuaaugguaaacu

SEQ ID NO: 512334 - RNA, 22 nt, Human
ucccagagaagagcuggaugga

SEQ ID NO: 512335 - RNA, 22 nt, Human
gaggaguguauuccacaccacu

SEQ ID NO: 512336 - RNA, 22 nt, Human
acagccagugcuccgugaggac

SEQ ID NO: 512337 - RNA, 22 nt, Human
gagguggcuccuucagggaaua

SEQ ID NO: 512338 - RNA, 22 nt, Human
gcucagagcaucccagugaaug

SEQ ID NO: 512339 - RNA, 22 nt, Human
auguguauauuuauuguaguuu

SEQ ID NO: 512340 - RNA, 22 nt, Human
ccugccugucccucaguccaca

SEQ ID NO: 512341 - RNA, 22 nt, Human
cgcaccacugaauuccagccug

SEQ ID NO: 512342 - RNA, 22 nt, Human
uaaaugcaagggaaaggcaaga

SEQ ID NO: 512343 - RNA, 22 nt, Human
agcuuuaucacaauauuggcua

SEQ ID NO: 512344 - RNA, 22 nt, Human
ccagagcccagcacacggugcu

SEQ ID NO: 512345 - RNA, 22 nt, Human
accucaggauguggacacagaa

SEQ ID NO: 512346 - RNA, 22 nt, Human
gccuguuuuccugcugugguug

SEQ ID NO: 512347 - RNA, 22 nt, Human
cagggcuggauuucauuucuag

SEQ ID NO: 512348 - RNA, 22 nt, Human
gagguccagagcagguucagug

SEQ ID NO: 512349 - RNA, 17 nt, Human
agugacuuggaaagagc

SEQ ID NO: 512350 - RNA, 22 nt, Human
aaugaagccagcugggaugcga

SEQ ID NO: 512351 - RNA, 22 nt, Human
uucugagccagagucaguuaug

SEQ ID NO: 512352 - RNA, 22 nt, Human
ucauuuuucacacagggucacc

SEQ ID NO: 512353 - RNA, 22 nt, Human
gggccaaggggagcuggaaggg

SEQ ID NO: 512354 - RNA, 22 nt, Human
ccacagggaacaugacagccuu

SEQ ID NO: 512355 - RNA, 22 nt, Human
aucauuuuauggcugagaggac

SEQ ID NO: 512356 - RNA, 22 nt, Human
cagcugccacaccucuuucucu

SEQ ID NO: 512357 - RNA, 22 nt, Human
ccaggcagcucugauuuauguc

SEQ ID NO: 512358 - RNA, 22 nt, Human
uacauguuugguaaaugauggc

SEQ ID NO: 512359 - RNA, 22 nt, Human
aagaggaaaugauugacuauau

SEQ ID NO: 512360 - RNA, 22 nt, Human
uccugccuugccugggacauca

SEQ ID NO: 512361 - RNA, 22 nt, Human
guuugccuuuuagauaggaaug

SEQ ID NO: 512362 - RNA, 22 nt, Human
aggagcugaaacuucucauaug

SEQ ID NO: 512363 - RNA, 22 nt, Human
ugggccugggucuuugcugcca

SEQ ID NO: 512364 - RNA, 23 nt, Human
ggcacagaugcugagcaugugca

SEQ ID NO: 512365 - RNA, 22 nt, Human
gauaaauuaucagggguuuaaa

SEQ ID NO: 512366 - RNA, 22 nt, Human
agaagacagagucuacauucua

SEQ ID NO: 512367 - RNA, 22 nt, Human
gaagguagcugcugagaugaca

SEQ ID NO: 512368 - RNA, 22 nt, Human
gaccuucuugcuguguccuaac

SEQ ID NO: 512369 - RNA, 23 nt, Human
acagugugguggacaaggagcag

SEQ ID NO: 512370 - RNA, 22 nt, Human
gcaguguuucaaaucaaaggca

SEQ ID NO: 512371 - RNA, 19 nt, Human
uuucuaagcuaaaugcuuc

SEQ ID NO: 512372 - RNA, 22 nt, Human
uacaugugguagggagggcagu

SEQ ID NO: 512373 - RNA, 22 nt, Human
ggguccugcgugggcccaggac

SEQ ID NO: 512374 - RNA, 22 nt, Human
uauacuuaugcuaaaaaauguu

SEQ ID NO: 512375 - RNA, 22 nt, Human
accauuugacucucuaaggaua

SEQ ID NO: 512376 - RNA, 22 nt, Human
augcuaaauucagacaggguua

SEQ ID NO: 512377 - RNA, 22 nt, Human
cugugggcugaaagugcucccg

SEQ ID NO: 512378 - RNA, 22 nt, Human
cagcaggguauacagggaauuu

SEQ ID NO: 512379 - RNA, 22 nt, Human
aagauguuaggaaaguuagggu

SEQ ID NO: 512380 - RNA, 22 nt, Human
cuuccuccgaagaaguugcugg

SEQ ID NO: 512381 - RNA, 16 nt, Human
ugggugggaggagcgg

SEQ ID NO: 512382 - RNA, 22 nt, Human
agugucugccugggaggagcau

SEQ ID NO: 512383 - RNA, 22 nt, Human
gcagagccuugcgucaugugcc

SEQ ID NO: 512384 - RNA, 22 nt, Human
auaguguguuagugacauaggc

SEQ ID NO: 512385 - RNA, 22 nt, Human
ugagccaguggaagauggcagu

SEQ ID NO: 512386 - RNA, 21 nt, Human
guuuuaagggagaaaaccuag

SEQ ID NO: 512387 - RNA, 22 nt, Human
agccaaaguccaaaugcagugu

SEQ ID NO: 512388 - RNA, 22 nt, Human
caccaaagucgcuucugucguc

SEQ ID NO: 512389 - RNA, 22 nt, Human
aggucaaaccacagcucuaggc

SEQ ID NO: 512390 - RNA, 22 nt, Human
cuuauuauaaaauccuguuuga

SEQ ID NO: 512391 - RNA, 22 nt, Human
aguaugaaucucuuuauucugc

SEQ ID NO: 512392 - RNA, 22 nt, Human
gaggccagcgcgcagcacuuuu

SEQ ID NO: 512393 - RNA, 22 nt, Human
ugcguugcgcuccugcagcagg

SEQ ID NO: 512394 - RNA, 22 nt, Human
agucccaguucgguucuuccuc

SEQ ID NO: 512395 - RNA, 22 nt, Human
ucugaagcuggaggaagcuuug

SEQ ID NO: 512396 - RNA, 22 nt, Human
cuguauuuguccucuauuuauu

SEQ ID NO: 512397 - RNA, 18 nt, Human
gggaucaggcugccuagg

SEQ ID NO: 512398 - RNA, 22 nt, Human
agcuggcuucucugcagacauu

SEQ ID NO: 512399 - RNA, 22 nt, Human
uccucaguuauaaauaggaaac

SEQ ID NO: 512400 - RNA, 22 nt, Human
ggcucccuguucuauucccugg

SEQ ID NO: 512401 - RNA, 22 nt, Human
uuucauauuguccagucagcgc

SEQ ID NO: 512402 - RNA, 22 nt, Human
agaaggccaagaagaagccuau

SEQ ID NO: 512403 - RNA, 22 nt, Human
ugagagacacacugugcaugua

SEQ ID NO: 512404 - RNA, 22 nt, Human
aauaaugagacagcuuauuuaa

SEQ ID NO: 512405 - RNA, 22 nt, Human
auuguugaucuucugguaagcc

SEQ ID NO: 512406 - RNA, 19 nt, Human
gguaaaagugagcuucagg

SEQ ID NO: 512407 - RNA, 23 nt, Human
acucguggaauucucugcgaucg

SEQ ID NO: 512408 - RNA, 18 nt, Human
caugggugacagguggau

SEQ ID NO: 512409 - RNA, 22 nt, Human
ugagcccaggaguuggagaccg

SEQ ID NO: 512410 - RNA, 22 nt, Human
uuuaucugagcugauagauagu

SEQ ID NO: 512411 - RNA, 22 nt, Human
gaugcugagagguggagggaac

SEQ ID NO: 512412 - RNA, 22 nt, Human
gcugggucuggcugugagccgg

SEQ ID NO: 512413 - RNA, 22 nt, Human
uccugcagccacugcaggcaga

SEQ ID NO: 512414 - RNA, 22 nt, Human
uucuuucucacucuuuaggaag

SEQ ID NO: 512415 - RNA, 22 nt, Human
aauuccaacagacaaaguuaga

SEQ ID NO: 512416 - RNA, 22 nt, Human
ugagccaguucuucagauccau

SEQ ID NO: 512417 - RNA, 22 nt, Human
uaaacaagcugucugauauucu

SEQ ID NO: 512418 - RNA, 22 nt, Human
agcccaugcaacaggccuagcg

SEQ ID NO: 512419 - RNA, 20 nt, Human
auguccugcuucuccucacc

SEQ ID NO: 512420 - RNA, 22 nt, Human
uauuaguagcuugaaauuggug

SEQ ID NO: 512421 - RNA, 22 nt, Human
gcaaggcuuugugaauuuuaaa

SEQ ID NO: 512422 - RNA, 22 nt, Human
acaaugaacgcuuuuuaacugu

SEQ ID NO: 512423 - RNA, 22 nt, Human
aucaguuucugugaagaacaca

SEQ ID NO: 512424 - RNA, 22 nt, Human
ccuuggauuuugugcccacgcc

SEQ ID NO: 512425 - RNA, 22 nt, Human
ccaggacuuuaaguccagcacu

SEQ ID NO: 512426 - RNA, 22 nt, Human
ggcaggugcuugucgaaggccu

SEQ ID NO: 512427 - RNA, 22 nt, Human
cagacagacagccguggccacc

SEQ ID NO: 512428 - RNA, 22 nt, Human
gguggggccugcuccagcggcc

SEQ ID NO: 512429 - RNA, 22 nt, Human
aaguguuaaaagauuaaaugcu

SEQ ID NO: 512430 - RNA, 21 nt, Human
acacacugaguuuuccacugu

SEQ ID NO: 512431 - RNA, 22 nt, Human
ggagcauguggggugagcaggg

SEQ ID NO: 512432 - RNA, 22 nt, Human
aggagccaggaaaccugcucug

SEQ ID NO: 512433 - RNA, 22 nt, Human
ucacacagcugacagagccuuu

SEQ ID NO: 512434 - RNA, 18 nt, Human
aggcacagagcauacaua

SEQ ID NO: 512435 - RNA, 22 nt, Human
gccugcagugagugcagaaggu

SEQ ID NO: 512436 - RNA, 22 nt, Human
aaauuucuguuguuuugagcca

SEQ ID NO: 512437 - RNA, 22 nt, Human
ugauugaacugagcuucaagau

SEQ ID NO: 512438 - RNA, 22 nt, Human
cuccugucagaagcauccugag

SEQ ID NO: 512439 - RNA, 22 nt, Human
ccugccugggcucacuugccag

SEQ ID NO: 512440 - RNA, 22 nt, Human
augauuuccaguuguugcuaag

SEQ ID NO: 512441 - RNA, 22 nt, Human
aaugcauuagcuacauaugucu

SEQ ID NO: 512442 - RNA, 22 nt, Human
uggaagggggaagacagcucug

SEQ ID NO: 512443 - RNA, 22 nt, Human
gguccccguggaggcuggagcg

SEQ ID NO: 512444 - RNA, 22 nt, Human
uucaacauguucuacauaaggg

SEQ ID NO: 512445 - RNA, 22 nt, Human
aaguugaaucaguaacacaguu

SEQ ID NO: 512446 - RNA, 22 nt, Human
cagaagaauggugucugagcuc

SEQ ID NO: 512447 - RNA, 22 nt, Human
gcagcacauauaaacaaagaga

SEQ ID NO: 512448 - RNA, 22 nt, Human
agagccuguacuuuucugugaa

SEQ ID NO: 512449 - RNA, 22 nt, Human
agagaggcgaguuaccugugcu

SEQ ID NO: 512450 - RNA, 22 nt, Human
ugauaaacuggagagguggagg

SEQ ID NO: 512451 - RNA, 22 nt, Human
ucagggcugacugcuacucucc

SEQ ID NO: 512452 - RNA, 22 nt, Human
gccugggagcacaucggggucc

SEQ ID NO: 512453 - RNA, 22 nt, Human
aauguugagcuugaaaguaggu

SEQ ID NO: 512454 - RNA, 22 nt, Human
cccucugcaggcuggaccugcc

SEQ ID NO: 512455 - RNA, 22 nt, Human
ccacaguccgggcuggcaggac

SEQ ID NO: 512456 - RNA, 22 nt, Human
cacacagguauauauauguaca

SEQ ID NO: 512457 - RNA, 22 nt, Human
ggagguccaugugaauguggcc

SEQ ID NO: 512458 - RNA, 16 nt, Human
gagggcagaggcggaa

SEQ ID NO: 512459 - RNA, 22 nt, Human
gucagcaggguccccuugagug

SEQ ID NO: 512460 - RNA, 22 nt, Human
ugcaggugccucuugagcuugu

SEQ ID NO: 512461 - RNA, 21 nt, Human
agaagccauuuguuaggacuu

SEQ ID NO: 512462 - RNA, 22 nt, Human
cuagucacucagcacugacaaa

SEQ ID NO: 512463 - RNA, 22 nt, Human
uggcucagccauucguguugcc

SEQ ID NO: 512464 - RNA, 22 nt, Human
caagaaauguuuacugagcauc

SEQ ID NO: 512465 - RNA, 22 nt, Human
ggaagggcaaaagagaugaacu

SEQ ID NO: 512466 - RNA, 22 nt, Human
gaggcaggcacuguuaucagca

SEQ ID NO: 512467 - RNA, 22 nt, Human
accugccaagcaucaguggcag

SEQ ID NO: 512468 - RNA, 22 nt, Human
aaauucuaugucaauguuuauu

SEQ ID NO: 512469 - RNA, 23 nt, Human
agaaaguuugugccuugugacac

SEQ ID NO: 512470 - RNA, 22 nt, Human
uguguguuaucuuaguucaucu

SEQ ID NO: 512471 - RNA, 21 nt, Human
acagccugucaucucaugguc

SEQ ID NO: 512472 - RNA, 22 nt, Human
ucauugcaguugaguuguguua

SEQ ID NO: 512473 - RNA, 22 nt, Human
cucuguuuggcgcugcuccuuc

SEQ ID NO: 512474 - RNA, 22 nt, Human
gucuggaggcccgucagcccua

SEQ ID NO: 512475 - RNA, 22 nt, Human
gggacccagguaauccugugcu

SEQ ID NO: 512476 - RNA, 22 nt, Human
cagggagaggcaucauagggaa

SEQ ID NO: 512477 - RNA, 22 nt, Human
ugauuuccugugcgcccuuagg

SEQ ID NO: 512478 - RNA, 22 nt, Human
uuacaguuguucuaucagcaug

SEQ ID NO: 512479 - RNA, 22 nt, Human
acuaaauauuugagagguguag

SEQ ID NO: 512480 - RNA, 22 nt, Human
gucccugggucuaaggcaguaa

SEQ ID NO: 512481 - RNA, 22 nt, Human
ggagccuuccagacugcccaca

SEQ ID NO: 512482 - RNA, 22 nt, Human
cacuuaagcaguuaauuuaucu

SEQ ID NO: 512483 - RNA, 22 nt, Human
acauuucucccugcaugccugc

SEQ ID NO: 512484 - RNA, 22 nt, Human
uuguauauauucuuaaagaugu

SEQ ID NO: 512485 - RNA, 22 nt, Human
caguauuucauucagaauuguu

SEQ ID NO: 512486 - RNA, 22 nt, Human
ugcucuguauucuauggcaguu

SEQ ID NO: 512487 - RNA, 22 nt, Human
cagcagcucagucucucaguag

SEQ ID NO: 512488 - RNA, 22 nt, Human
uuugacagauccuuaacucagc

SEQ ID NO: 512489 - RNA, 22 nt, Human
ucagggacuaggugcugccuga

SEQ ID NO: 512490 - RNA, 22 nt, Human
auguaucagauaaagcaugugg

SEQ ID NO: 512491 - RNA, 22 nt, Human
ugggaggaaugucacugagcca

SEQ ID NO: 512492 - RNA, 22 nt, Human
cacuaguccugguuucaugcua

SEQ ID NO: 512493 - RNA, 22 nt, Human
uccucagggggccaacccagcc

SEQ ID NO: 512494 - RNA, 22 nt, Human
aaucaguuguucacucugaaaa

SEQ ID NO: 512495 - RNA, 22 nt, Human
acagaguagcucaagaagauug

SEQ ID NO: 512496 - RNA, 22 nt, Human
acagguguugacucacaggccc

SEQ ID NO: 512497 - RNA, 22 nt, Human
uauugugaguucagacuaaaaa

SEQ ID NO: 512498 - RNA, 21 nt, Human
guacacacagguggaugggcu

SEQ ID NO: 512499 - RNA, 19 nt, Human
ugucccagacuccgugucu

SEQ ID NO: 512500 - RNA, 22 nt, Human
aaauaauugaguuggucaauau

SEQ ID NO: 512501 - RNA, 22 nt, Human
acaggcucucagccaguuggca

SEQ ID NO: 512502 - RNA, 22 nt, Human
ucuagcugaggguaggagaccu

SEQ ID NO: 512503 - RNA, 22 nt, Human
cucuggaggccguuggcccuua

SEQ ID NO: 512504 - RNA, 22 nt, Human
caaguuugcugauccuuguuuu

SEQ ID NO: 512505 - RNA, 22 nt, Human
uaaagugccucagguccugggu

SEQ ID NO: 512506 - RNA, 22 nt, Human
ggcccaaggcccaggucgagcu

SEQ ID NO: 512507 - RNA, 18 nt, Human
uguggcugguccacacug

SEQ ID NO: 512508 - RNA, 22 nt, Human
uuuugugaauaguuuaucuaag

SEQ ID NO: 512509 - RNA, 22 nt, Human
gaguuauuaauggcugaguuug

SEQ ID NO: 512510 - RNA, 22 nt, Human
gagaggagguggcuaugacagc

SEQ ID NO: 512511 - RNA, 22 nt, Human
ggaggccaaggcagguggaucg

SEQ ID NO: 512512 - RNA, 22 nt, Human
gcucugcugcuuacuagauggu

SEQ ID NO: 512513 - RNA, 22 nt, Human
cuuaaaaucuggcaguuagcua

SEQ ID NO: 512514 - RNA, 22 nt, Human
ugaggugaagaguggagcucag

SEQ ID NO: 512515 - RNA, 19 nt, Human
gcucugugaugcugagggg

SEQ ID NO: 512516 - RNA, 22 nt, Human
cuggccucauagccaagcugug

SEQ ID NO: 512517 - RNA, 22 nt, Human
ucccagagcucuggagguugga

SEQ ID NO: 512518 - RNA, 22 nt, Human
uguguuccugccuggcucuggu

SEQ ID NO: 512519 - RNA, 22 nt, Human
uuuucucaggugcuuaucuaag

SEQ ID NO: 512520 - RNA, 22 nt, Human
ucccaggguuacagccagggca

SEQ ID NO: 512521 - RNA, 22 nt, Human
agugacugggcagggcagggcc

SEQ ID NO: 512522 - RNA, 22 nt, Human
uccauuuucaucucauguauaa

SEQ ID NO: 512523 - RNA, 20 nt, Human
auuuggcaugaaguauugau

SEQ ID NO: 512524 - RNA, 22 nt, Human
caaaugauccuugcaagcugug

SEQ ID NO: 512525 - RNA, 22 nt, Human
augagguauucguaauauuucc

SEQ ID NO: 512526 - RNA, 22 nt, Human
uguacaguaggaacuuguuauu

SEQ ID NO: 512527 - RNA, 22 nt, Human
auacuguuucucuucuacauga

SEQ ID NO: 512528 - RNA, 22 nt, Human
uucagcacuguuauggauuugc

SEQ ID NO: 512529 - RNA, 22 nt, Human
agagucugaggaggaccaacag

SEQ ID NO: 512530 - RNA, 22 nt, Human
ccagcuggcacuguggcugccc

SEQ ID NO: 512531 - RNA, 22 nt, Human
augcuuuauuauuuugcaggga

SEQ ID NO: 512532 - RNA, 22 nt, Human
ucagagaaaugaaguagggauu

SEQ ID NO: 512533 - RNA, 22 nt, Human
caggcagggagcuggaaaggau

SEQ ID NO: 512534 - RNA, 22 nt, Human
cuggcugcuugggacagccaug

SEQ ID NO: 512535 - RNA, 22 nt, Human
gggcaaguccggugcccagagc

SEQ ID NO: 512536 - RNA, 22 nt, Human
gaagagcuguagccugcucuuu

SEQ ID NO: 512537 - RNA, 22 nt, Human
auggaaauacagccagagcaga

SEQ ID NO: 512538 - RNA, 20 nt, Human
ugccuugggacagugccugu

SEQ ID NO: 512539 - RNA, 21 nt, Human
ugggccugauucccaggguca

SEQ ID NO: 512540 - RNA, 22 nt, Human
cugcuuuguaaaauagacauaa

SEQ ID NO: 512541 - RNA, 22 nt, Human
uggagcugggguuugaaucugg

SEQ ID NO: 512542 - RNA, 22 nt, Human
cagugcaauguuaaauaggaaa

SEQ ID NO: 512543 - RNA, 22 nt, Human
aggggugauuugggacaggaca

SEQ ID NO: 512544 - RNA, 22 nt, Human
aaagaugucauacacauuaaga

SEQ ID NO: 512545 - RNA, 22 nt, Human
ggacuuuagcuguaaugugugu

SEQ ID NO: 512546 - RNA, 22 nt, Human
gggaaacugaauucaggacucu

SEQ ID NO: 512547 - RNA, 22 nt, Human
uacagcuuuauacccaucaaaa

SEQ ID NO: 512548 - RNA, 22 nt, Human
agggcagcagcccauggcucug

SEQ ID NO: 512549 - RNA, 22 nt, Human
gggcuggggcucaauaauuugu

SEQ ID NO: 512550 - RNA, 22 nt, Human
ccugggagguggagguugcagc

SEQ ID NO: 512551 - RNA, 22 nt, Human
uauguagaagcugcucaaagaa

SEQ ID NO: 512552 - RNA, 22 nt, Human
aaugaagccacugaagacaauc

SEQ ID NO: 512553 - RNA, 22 nt, Human
aggcagaaccagcugggacuuu

SEQ ID NO: 512554 - RNA, 22 nt, Human
ucauaaauuagcugucuuugaa

SEQ ID NO: 512555 - RNA, 22 nt, Human
aagaguucucagaaacgugggu

SEQ ID NO: 512556 - RNA, 19 nt, Human
ccugggaggcggagguugc

SEQ ID NO: 512557 - RNA, 22 nt, Human
gccggggcuggggagagacaug

SEQ ID NO: 512558 - RNA, 22 nt, Human
uuucagauuaucucaacuuugg

SEQ ID NO: 512559 - RNA, 22 nt, Human
cucaaguaagaaacagaauugg

SEQ ID NO: 512560 - RNA, 22 nt, Human
cccaggcuuuuaaguuagacag

SEQ ID NO: 512561 - RNA, 22 nt, Human
gacaauaaaaugaucuuacagu

SEQ ID NO: 512562 - RNA, 22 nt, Human
ucccugcuuggaaugacccuua

SEQ ID NO: 512563 - RNA, 22 nt, Human
uugaaguucugcauuucuaaua

SEQ ID NO: 512564 - RNA, 22 nt, Human
uguccugggucccugcuagaag

SEQ ID NO: 512565 - RNA, 22 nt, Human
uuccaggggcagcagugauggu

SEQ ID NO: 512566 - RNA, 22 nt, Human
gaacauuuccagaaaggaacua

SEQ ID NO: 512567 - RNA, 22 nt, Human
ccaaaucaccagcacgaucauu

SEQ ID NO: 512568 - RNA, 22 nt, Human
ggcucugcuucagaaggcucau

SEQ ID NO: 512569 - RNA, 22 nt, Human
agcccugggauacaguaaaagc

SEQ ID NO: 512570 - RNA, 18 nt, Human
ggguccuguucuuggaag

SEQ ID NO: 512571 - RNA, 17 nt, Human
cuuguuuuccacuggga

SEQ ID NO: 512572 - RNA, 22 nt, Human
aggccagagaggggaccagccu

SEQ ID NO: 512573 - RNA, 23 nt, Human
agucaguguaaguuuggaaugca

SEQ ID NO: 512574 - RNA, 17 nt, Human
ugcugccaagucccaac

SEQ ID NO: 512575 - RNA, 22 nt, Human
ucacaguuauagucuguagaau

SEQ ID NO: 512576 - RNA, 22 nt, Human
cauugaaaccuaacauaggcug

SEQ ID NO: 512577 - RNA, 22 nt, Human
aacuauguuaauaaguuucauu

SEQ ID NO: 512578 - RNA, 22 nt, Human
aucuuggggaauccucugugua

SEQ ID NO: 512579 - RNA, 22 nt, Human
uaacagaaacagauaaguguaa

SEQ ID NO: 512580 - RNA, 22 nt, Human
cuguccugauggugccacuggu

SEQ ID NO: 512581 - RNA, 22 nt, Human
gcccaggcuagcguagagugca

SEQ ID NO: 512582 - RNA, 21 nt, Human
auucagaguaauucaucuuua

SEQ ID NO: 512583 - RNA, 22 nt, Human
agugucugaaccugcaguggga

SEQ ID NO: 512584 - RNA, 22 nt, Human
ugguuucccauuaucugcagga

SEQ ID NO: 512585 - RNA, 22 nt, Human
uagcaggguaaauguagaugga

SEQ ID NO: 512586 - RNA, 22 nt, Human
uauauaugggggaagcuggaug

SEQ ID NO: 512587 - RNA, 22 nt, Human
gcuggagggguaauaggauggg

SEQ ID NO: 512588 - RNA, 22 nt, Human
gggcugcuuuuuucuuagcaga

SEQ ID NO: 512589 - RNA, 22 nt, Human
gccucugggguggagcccagca

SEQ ID NO: 512590 - RNA, 23 nt, Human
ucuggcucuaugugacagcucuc

SEQ ID NO: 512591 - RNA, 22 nt, Human
ugggccugggcuggacagccug

SEQ ID NO: 512592 - RNA, 22 nt, Human
cagggcucccaaauaucucuuc

SEQ ID NO: 512593 - RNA, 22 nt, Human
ucacaugcuacugagccagacc

SEQ ID NO: 512594 - RNA, 22 nt, Human
ggccucucuccagucagugcag

SEQ ID NO: 512595 - RNA, 22 nt, Human
cccagcuucugagggggccuug

SEQ ID NO: 512596 - RNA, 22 nt, Human
aaaucaguuagugguaggauug

SEQ ID NO: 512597 - RNA, 22 nt, Human
acucugagcaucccaagucuua

SEQ ID NO: 512598 - RNA, 22 nt, Human
uuuaccaucugccacagauaug

SEQ ID NO: 512599 - RNA, 22 nt, Human
cuaguccagucucaaaaugcua

SEQ ID NO: 512600 - RNA, 22 nt, Human
gggcugcacagaucuucaaggg

SEQ ID NO: 512601 - RNA, 22 nt, Human
uuuaugaacuacagauauaacu

SEQ ID NO: 512602 - RNA, 22 nt, Human
cccagccuuccacccuggacua

SEQ ID NO: 512603 - RNA, 21 nt, Human
ucagaacaauuccaugccucc

SEQ ID NO: 512604 - RNA, 22 nt, Human
cucuccagaauaugccgccgug

SEQ ID NO: 512605 - RNA, 22 nt, Human
ggcagcaugggugccuuuguga

SEQ ID NO: 512606 - RNA, 22 nt, Human
uagcaaaagcucaacaggaagg

SEQ ID NO: 512607 - RNA, 22 nt, Human
cuagagcagauugcagaguagg

SEQ ID NO: 512608 - RNA, 22 nt, Human
ggaaggagccauaucauaucca

SEQ ID NO: 512609 - RNA, 22 nt, Human
ggguuccaaugaugagcaagag

SEQ ID NO: 512610 - RNA, 20 nt, Human
gcagagccucacugcaaggg

SEQ ID NO: 512611 - RNA, 22 nt, Human
gagggucccugcucagggccag

SEQ ID NO: 512612 - RNA, 20 nt, Human
ggccaccugcuucagacccc

SEQ ID NO: 512613 - RNA, 22 nt, Human
cagaggcucaccagccuuucac

SEQ ID NO: 512614 - RNA, 22 nt, Human
uccagagccuauauguucaacu

SEQ ID NO: 512615 - RNA, 22 nt, Human
gaaacaugucugacaauuuacc

SEQ ID NO: 512616 - RNA, 22 nt, Human
acaggcucaguucacuggauuu

SEQ ID NO: 512617 - RNA, 19 nt, Human
ugcccaggccucccaaaag

SEQ ID NO: 512618 - RNA, 22 nt, Human
agcuucuuuaauucagcaugau

SEQ ID NO: 512619 - RNA, 22 nt, Human
gcuucugggguucuggcaugcu

SEQ ID NO: 512620 - RNA, 22 nt, Human
ggcucagaaacuaaaggcgcug

SEQ ID NO: 512621 - RNA, 22 nt, Human
uuggaucuuaugaagguggcau

SEQ ID NO: 512622 - RNA, 22 nt, Human
uggagagccuggagucccugau

SEQ ID NO: 512623 - RNA, 22 nt, Human
uuaaauuauugagggauuguca

SEQ ID NO: 512624 - RNA, 22 nt, Human
uucacagugagcuaugucuugu

SEQ ID NO: 512625 - RNA, 22 nt, Human
uuacuuuguucucaagauaugu

SEQ ID NO: 512626 - RNA, 22 nt, Human
ucaggcuguuagccaccuccuc

SEQ ID NO: 512627 - RNA, 22 nt, Human
aaacagacugaagaguugaagc

SEQ ID NO: 512628 - RNA, 22 nt, Human
ucucacaucugcccugugcugg

SEQ ID NO: 512629 - RNA, 22 nt, Human
gacacaaaguuugucagaaauu

SEQ ID NO: 512630 - RNA, 22 nt, Human
gcugccugcuucaugugggaga

SEQ ID NO: 512631 - RNA, 22 nt, Human
ggaggcggggaaggcaucccau

SEQ ID NO: 512632 - RNA, 22 nt, Human
agagcagcuuuucggaaccacu

SEQ ID NO: 512633 - RNA, 22 nt, Human
ugagaggcagaauggugccugc

SEQ ID NO: 512634 - RNA, 22 nt, Human
guuuucucaucuccucaauggu

SEQ ID NO: 512635 - RNA, 22 nt, Human
uucaugaauggaaucaaugcuc

SEQ ID NO: 512636 - RNA, 22 nt, Human
uggaaucuuuaggaagcacaua

SEQ ID NO: 512637 - RNA, 23 nt, Human
ugcuggcuuccagcugcucccuc

SEQ ID NO: 512638 - RNA, 22 nt, Human
agaaggaguguacaggucaugc

SEQ ID NO: 512639 - RNA, 22 nt, Human
uucacaggaauguaggggucuu

SEQ ID NO: 512640 - RNA, 22 nt, Human
gcucacugccauucucuagaug

SEQ ID NO: 512641 - RNA, 22 nt, Human
uagugucagcaucucauugagc

SEQ ID NO: 512642 - RNA, 22 nt, Human
uuucaaaugcaugucuuuccuc

SEQ ID NO: 512643 - RNA, 22 nt, Human
aguggcaauguagagagugauc

SEQ ID NO: 512644 - RNA, 22 nt, Human
gcaggcguguuucacgugccag

SEQ ID NO: 512645 - RNA, 22 nt, Human
gcacaaaacacauuuugacaau

SEQ ID NO: 512646 - RNA, 21 nt, Human
ggcuguggagccaugacucac

SEQ ID NO: 512647 - RNA, 22 nt, Human
ugcauuugaguugggagcaggc

SEQ ID NO: 512648 - RNA, 22 nt, Human
aucuggcucaccuggguaaaua

SEQ ID NO: 512649 - RNA, 22 nt, Human
uucccaugccuggccccuaucc

SEQ ID NO: 512650 - RNA, 22 nt, Human
gcauuccugagaaugcagagug

SEQ ID NO: 512651 - RNA, 22 nt, Human
agaggggcucauauccugucau

SEQ ID NO: 512652 - RNA, 22 nt, Human
ccugaggacacacgcugcagga

SEQ ID NO: 512653 - RNA, 22 nt, Human
auucaaguggcugcuauguuaa

SEQ ID NO: 512654 - RNA, 22 nt, Human
ugugccugauggucacguggcc

SEQ ID NO: 512655 - RNA, 22 nt, Human
ucuggagcuggcagggcccugg

SEQ ID NO: 512656 - RNA, 22 nt, Human
ugcacgugggcucucugcucuu

SEQ ID NO: 512657 - RNA, 19 nt, Human
aggaaggaaccugagucug

SEQ ID NO: 512658 - RNA, 22 nt, Human
ccagcuuuagguugccugccag

SEQ ID NO: 512659 - RNA, 23 nt, Human
cucccuggaguuucuggaagaug

SEQ ID NO: 512660 - RNA, 22 nt, Human
uuauuauugugaccugagaaug

SEQ ID NO: 512661 - RNA, 19 nt, Human
acuaaaaaugauguuugag

SEQ ID NO: 512662 - RNA, 22 nt, Human
accuucuggucugccugacagc

SEQ ID NO: 512663 - RNA, 22 nt, Human
ugccugaacaugaauaguuuau

SEQ ID NO: 512664 - RNA, 22 nt, Human
uagggacccucccugcucuaac

SEQ ID NO: 512665 - RNA, 22 nt, Human
uagcagcuuccagagagggcag

SEQ ID NO: 512666 - RNA, 20 nt, Human
gcuuccuucccagcccccac

SEQ ID NO: 512667 - RNA, 20 nt, Human
agcugccuucauuuucuaga

SEQ ID NO: 512668 - RNA, 22 nt, Human
uugauuccuugaaauauccuug

SEQ ID NO: 512669 - RNA, 22 nt, Human
uggccucaagucugagggccuu

SEQ ID NO: 512670 - RNA, 22 nt, Human
aagcagcaugauuguaauacua

SEQ ID NO: 512671 - RNA, 22 nt, Human
auauuaggcaaggagauuauuu

SEQ ID NO: 512672 - RNA, 20 nt, Human
auugacagaaaguguucacc

SEQ ID NO: 512673 - RNA, 22 nt, Human
ucauaacagcuaagucccuuuc

SEQ ID NO: 512674 - RNA, 22 nt, Human
ccuggacucagaggugcuggug

SEQ ID NO: 512675 - RNA, 22 nt, Human
agcuccaggugcaagucauggu

SEQ ID NO: 512676 - RNA, 22 nt, Human
uggagugcaguugggaggacac

SEQ ID NO: 512677 - RNA, 22 nt, Human
guaaauauaaaugcuagcugcc

SEQ ID NO: 512678 - RNA, 22 nt, Human
cacaggcucuucucacuugauu

SEQ ID NO: 512679 - RNA, 22 nt, Human
uugaagcagcucaggaggcuua

SEQ ID NO: 512680 - RNA, 22 nt, Human
cuauacagugacuagaaguaau

SEQ ID NO: 512681 - RNA, 22 nt, Human
cagcagcucaggcugcuuccca

SEQ ID NO: 512682 - RNA, 22 nt, Human
caccuggcuggaagugcuccgg

SEQ ID NO: 512683 - RNA, 22 nt, Human
ucacagaagaaguagauugcau

SEQ ID NO: 512684 - RNA, 22 nt, Human
cauuuguauguuccuccuuagg

SEQ ID NO: 512685 - RNA, 22 nt, Human
ucucuggggaaaaggcugauac

SEQ ID NO: 512686 - RNA, 20 nt, Human
cucugggucgagacagacuu

SEQ ID NO: 512687 - RNA, 22 nt, Human
agucacaggguacacaaggauu

SEQ ID NO: 512688 - RNA, 22 nt, Human
cccagcucaucaggagccgccc

SEQ ID NO: 512689 - RNA, 22 nt, Human
ccaggaagccucagaugcugag

SEQ ID NO: 512690 - RNA, 22 nt, Human
ggguguguuccuaaggaaacca

SEQ ID NO: 512691 - RNA, 22 nt, Human
aucuacauaaaacgaauacaua

SEQ ID NO: 512692 - RNA, 22 nt, Human
gacuuugguuugagcaagucag

SEQ ID NO: 512693 - RNA, 22 nt, Human
uaaagugcaggcuacucagaag

SEQ ID NO: 512694 - RNA, 19 nt, Human
gcucugagaggggcauggg

SEQ ID NO: 512695 - RNA, 22 nt, Human
cuuauaaaguccaucugaacaa

SEQ ID NO: 512696 - RNA, 22 nt, Human
ugagaaugaggggguagaaggu

SEQ ID NO: 512697 - RNA, 22 nt, Human
accucugcaaugcaaugucaug

SEQ ID NO: 512698 - RNA, 22 nt, Human
ggggagaauuacauggcgugga

SEQ ID NO: 512699 - RNA, 18 nt, Human
ucagagagcagcuuuauu

SEQ ID NO: 512700 - RNA, 22 nt, Human
ugagguguguccccagggaggu

SEQ ID NO: 512701 - RNA, 22 nt, Human
ccugucugcaugaucccugcca

SEQ ID NO: 512702 - RNA, 20 nt, Human
auguccagugacuggaccau

SEQ ID NO: 512703 - RNA, 22 nt, Human
ccugcuucagggaugauggcac

SEQ ID NO: 512704 - RNA, 22 nt, Human
uggccugguuguugcugccguu

SEQ ID NO: 512705 - RNA, 22 nt, Human
ugcuuaaaggauaguuuaaacu

SEQ ID NO: 512706 - RNA, 22 nt, Human
gagcugaacaucauggaaaggc

SEQ ID NO: 512707 - RNA, 22 nt, Human
ccaggucuuguuugacaucaau

SEQ ID NO: 512708 - RNA, 20 nt, Human
gccucagccaacccaugggg

SEQ ID NO: 512709 - RNA, 22 nt, Human
ucuguguuuaaaagauaugucc

SEQ ID NO: 512710 - RNA, 22 nt, Human
ugggccugaguuugggaacugg

SEQ ID NO: 512711 - RNA, 22 nt, Human
aggccugggacgggagccguga

SEQ ID NO: 512712 - RNA, 22 nt, Human
gcagagcuaucuucuggauuug

SEQ ID NO: 512713 - RNA, 22 nt, Human
cagaggccaguggacaagggcc

SEQ ID NO: 512714 - RNA, 22 nt, Human
ucaggcagcuccaggaauggua

SEQ ID NO: 512715 - RNA, 22 nt, Human
uccaggcaaggauaauaaacau

SEQ ID NO: 512716 - RNA, 22 nt, Human
aucuggcucacuuagucuagga

SEQ ID NO: 512717 - RNA, 22 nt, Human
uuccugaugcacacagucauuu

SEQ ID NO: 512718 - RNA, 22 nt, Human
aaauguguguauguacauauau

SEQ ID NO: 512719 - RNA, 22 nt, Human
aaggaagguucauagucaaaga

SEQ ID NO: 512720 - RNA, 19 nt, Human
gagguggguccccgcagcc

SEQ ID NO: 512721 - RNA, 22 nt, Human
cuggaaggucuguccccacugc

SEQ ID NO: 512722 - RNA, 22 nt, Human
cugggcugcggugguagguugu

SEQ ID NO: 512723 - RNA, 22 nt, Human
agcugccuggagucauuuccug

SEQ ID NO: 512724 - RNA, 22 nt, Human
uugcauugaaaauauauuuuaa

SEQ ID NO: 512725 - RNA, 22 nt, Human
ucaggcagaggauggggagcgu

SEQ ID NO: 512726 - RNA, 16 nt, Human
uguaugaacgucucca

SEQ ID NO: 512727 - RNA, 22 nt, Human
auccuucaaggggcugacagcu

SEQ ID NO: 512728 - RNA, 22 nt, Human
cagcugucuaaguugagcagga

SEQ ID NO: 512729 - RNA, 22 nt, Human
uugacaauugggagauauaaag

SEQ ID NO: 512730 - RNA, 22 nt, Human
cacauaauugaacgugaugagu

SEQ ID NO: 512731 - RNA, 22 nt, Human
caaaugcuacuaauaggcaagu

SEQ ID NO: 512732 - RNA, 22 nt, Human
agcccucauggaacagcuccua

SEQ ID NO: 512733 - RNA, 22 nt, Human
gcaggcaccacggcucaggucu

SEQ ID NO: 512734 - RNA, 22 nt, Human
gcccuucaguuacuccuugaug

SEQ ID NO: 512735 - RNA, 22 nt, Human
ggcugcugaaguguggcaaucu

SEQ ID NO: 512736 - RNA, 22 nt, Human
agagugauucuaguuagggaau

SEQ ID NO: 512737 - RNA, 22 nt, Human
aaguaugucaaucauacuucaa

SEQ ID NO: 512738 - RNA, 22 nt, Human
auaaacacuucuagggcacaca

SEQ ID NO: 512739 - RNA, 22 nt, Human
gaggcccaguccugcaagcacg

SEQ ID NO: 512740 - RNA, 22 nt, Human
ccuuuuucaauauagaauugca

SEQ ID NO: 512741 - RNA, 22 nt, Human
aacaguaaaaaucauuuaguug

SEQ ID NO: 512742 - RNA, 22 nt, Human
cugggcugcgggcgccccucca

SEQ ID NO: 512743 - RNA, 23 nt, Human
ccugucugugcuggguggacaca

SEQ ID NO: 512744 - RNA, 22 nt, Human
agcagcugcagagggcuccccc

SEQ ID NO: 512745 - RNA, 22 nt, Human
aguuucucucaguauagaauag

SEQ ID NO: 512746 - RNA, 22 nt, Human
aggcaagaacagacaugggagu

SEQ ID NO: 512747 - RNA, 22 nt, Human
ucucugggcucaggagcccggc

SEQ ID NO: 512748 - RNA, 22 nt, Human
agggggcugccaaggaauguaa

SEQ ID NO: 512749 - RNA, 17 nt, Human
gcugccaccuuuggagc

SEQ ID NO: 512750 - RNA, 18 nt, Human
aggaagcaggaggaaggc

SEQ ID NO: 512751 - RNA, 22 nt, Human
ugcuuaauauugugauguaaua

SEQ ID NO: 512752 - RNA, 22 nt, Human
uuguuuaaaagaaaucauagaa

SEQ ID NO: 512753 - RNA, 22 nt, Human
aguuggagaagaggucgggaau

SEQ ID NO: 512754 - RNA, 22 nt, Human
guagaugagcucacaugaccuu

SEQ ID NO: 512755 - RNA, 22 nt, Human
gugugccaacaaaagacagugc

SEQ ID NO: 512756 - RNA, 22 nt, Human
ggcagaguugguggagucaguu

SEQ ID NO: 512757 - RNA, 22 nt, Human
cugggacacccaaggaaagagc

SEQ ID NO: 512758 - RNA, 20 nt, Human
ucuuuguuaauuuuaucucc

SEQ ID NO: 512759 - RNA, 22 nt, Human
gcaggcagguggcaucuuguga

SEQ ID NO: 512760 - RNA, 22 nt, Human
uuggcaggaauauugcagaggu

SEQ ID NO: 512761 - RNA, 22 nt, Human
acauaaugagcucuuuauaaau

SEQ ID NO: 512762 - RNA, 22 nt, Human
uauguguguaugacagacagag

SEQ ID NO: 512763 - RNA, 22 nt, Human
auguaacauugaauuauauagu

SEQ ID NO: 512764 - RNA, 19 nt, Human
ugccuggcaccagcuccac

SEQ ID NO: 512765 - RNA, 22 nt, Human
uuccaguuaaggaagcuauucu

SEQ ID NO: 512766 - RNA, 22 nt, Human
ucacauaaauuauacaauuuca

SEQ ID NO: 512767 - RNA, 22 nt, Human
aacacauaggcagagcaugaca

SEQ ID NO: 512768 - RNA, 22 nt, Human
gaaugcagauggcugguguaug

SEQ ID NO: 512769 - RNA, 22 nt, Human
cacacccucgugcucccucccg

SEQ ID NO: 512770 - RNA, 22 nt, Human
uucaaucauuagaaucucaggc

SEQ ID NO: 512771 - RNA, 22 nt, Human
gagcccgagcgcguacccggcg

SEQ ID NO: 512772 - RNA, 22 nt, Human
cagcagcagccccaggaagguu

SEQ ID NO: 512773 - RNA, 22 nt, Human
cagaaauggaauuuuccaucac

SEQ ID NO: 512774 - RNA, 22 nt, Human
gcacaggcuccggaggagagcu

SEQ ID NO: 512775 - RNA, 22 nt, Human
agccuggaccaggggccucaga

SEQ ID NO: 512776 - RNA, 22 nt, Human
uucuucauggguucuuuuagga

SEQ ID NO: 512777 - RNA, 17 nt, Human
agcagcugaagcagcca

SEQ ID NO: 512778 - RNA, 18 nt, Human
acauacauucugucugca

SEQ ID NO: 512779 - RNA, 17 nt, Human
gaauuucuuggucaaaa

SEQ ID NO: 512780 - RNA, 22 nt, Human
guacacacuauuuaaaguguuu

SEQ ID NO: 512781 - RNA, 22 nt, Human
gaaacaaucaucaugugauuug

SEQ ID NO: 512782 - RNA, 22 nt, Human
gcauuuguguucuuccuagagc

SEQ ID NO: 512783 - RNA, 22 nt, Human
agggcuggcaucucuaaugcug

SEQ ID NO: 512784 - RNA, 22 nt, Human
acaguaaaucaacagaauaucu

SEQ ID NO: 512785 - RNA, 22 nt, Human
cugccuuccaaccccagacucc

SEQ ID NO: 512786 - RNA, 22 nt, Human
gugucacaagagcccaggaaac

SEQ ID NO: 512787 - RNA, 22 nt, Human
cuauugaauagcccaaaucauu

SEQ ID NO: 512788 - RNA, 22 nt, Human
uacaguaaccagucuacuuaga

SEQ ID NO: 512789 - RNA, 22 nt, Human
uggccaccuuauggcuauugga

SEQ ID NO: 512790 - RNA, 22 nt, Human
gcagcaggaauuuaaauuuaua

SEQ ID NO: 512791 - RNA, 22 nt, Human
cucuggagaacuccuugugucu

SEQ ID NO: 512792 - RNA, 20 nt, Human
gaggcugcggacugcuggac

SEQ ID NO: 512793 - RNA, 22 nt, Human
ucacugcuauauuggauacuga

SEQ ID NO: 512794 - RNA, 22 nt, Human
uugaaaggcacaggcaccuggg

SEQ ID NO: 512795 - RNA, 22 nt, Human
ggcugucaauucauaggucaga

SEQ ID NO: 512796 - RNA, 22 nt, Human
gcucucugccuuucucaaugac

SEQ ID NO: 512797 - RNA, 22 nt, Human
cuuccugggucuggagacugga

SEQ ID NO: 512798 - RNA, 22 nt, Human
uguguacaggccuugcuagacu

SEQ ID NO: 512799 - RNA, 22 nt, Human
acucagacgaaaacaugaacau

SEQ ID NO: 512800 - RNA, 22 nt, Human
uccauuuucuugcucuagguaa

SEQ ID NO: 512801 - RNA, 22 nt, Human
gcacaaggagcaguguaugaaa

SEQ ID NO: 512802 - RNA, 22 nt, Human
aaguugaaugcguacgugacau

SEQ ID NO: 512803 - RNA, 22 nt, Human
uagucccggaacuccuucaggu

SEQ ID NO: 512804 - RNA, 22 nt, Human
gcucccugccuacacggaccuu

SEQ ID NO: 512805 - RNA, 22 nt, Human
cccuucaagcucucuggguuuu

SEQ ID NO: 512806 - RNA, 22 nt, Human
acacacaauuaguuuuaugcuu

SEQ ID NO: 512807 - RNA, 22 nt, Human
uacaguauuaugagugauugaa

SEQ ID NO: 512808 - RNA, 22 nt, Human
gaagagaugacaaaggagcaug

SEQ ID NO: 512809 - RNA, 22 nt, Human
augucuuucucacagccaguuc

SEQ ID NO: 512810 - RNA, 22 nt, Human
ucccuggacaacagacuucacu

SEQ ID NO: 512811 - RNA, 23 nt, Human
gguggcaggaguggaugcugagc

SEQ ID NO: 512812 - RNA, 22 nt, Human
ccuggcucuucgggaguuuguu

SEQ ID NO: 512813 - RNA, 22 nt, Human
gugcccugaguggguaggagag

SEQ ID NO: 512814 - RNA, 22 nt, Human
caaagccaggcuuucuaaugua

SEQ ID NO: 512815 - RNA, 22 nt, Human
uucaagaugucuucacaauagu

SEQ ID NO: 512816 - RNA, 22 nt, Human
ucuaauuccauuaaauugaugu

SEQ ID NO: 512817 - RNA, 22 nt, Human
ggcaggcuuucagcaucaaguc

SEQ ID NO: 512818 - RNA, 22 nt, Human
ggcugcugguggaaugguaggc

SEQ ID NO: 512819 - RNA, 22 nt, Human
cuuauguaaacuacagauaaua

SEQ ID NO: 512820 - RNA, 22 nt, Human
cugggcucugcggugucgcucu

SEQ ID NO: 512821 - RNA, 22 nt, Human
uuggccuuguacaucauauuaa

SEQ ID NO: 512822 - RNA, 22 nt, Human
caggaaagaaaugagaacacca

SEQ ID NO: 512823 - RNA, 22 nt, Human
cuauugaauuaacuauuaaagu

SEQ ID NO: 512824 - RNA, 22 nt, Human
ucuucauuuuacaggcagaccu

SEQ ID NO: 512825 - RNA, 22 nt, Human
caggguggcacaucacagcauu

SEQ ID NO: 512826 - RNA, 22 nt, Human
uuugaaauguaucaguauaggu

SEQ ID NO: 512827 - RNA, 23 nt, Human
ugaguucucaucuuggcuucuau

SEQ ID NO: 512828 - RNA, 22 nt, Human
acccagcuguuucccgugucau

SEQ ID NO: 512829 - RNA, 22 nt, Human
ucaggcucugccaccuagauua

SEQ ID NO: 512830 - RNA, 19 nt, Human
cuguggccuccaggaggga

SEQ ID NO: 512831 - RNA, 20 nt, Human
uucucuggauagccagaugu

SEQ ID NO: 512832 - RNA, 22 nt, Human
acauuuguaugcguuuuuacug

SEQ ID NO: 512833 - RNA, 22 nt, Human
caacauuucaaggucuuuagga

SEQ ID NO: 512834 - RNA, 22 nt, Human
gcuggccucgcaggcaggaugu

SEQ ID NO: 512835 - RNA, 22 nt, Human
ggccuucacgugaccuggcgug

SEQ ID NO: 512836 - RNA, 19 nt, Human
ggacacagaaagcugcauu

SEQ ID NO: 512837 - RNA, 22 nt, Human
uuggcaggaggcuucaguuccu

SEQ ID NO: 512838 - RNA, 22 nt, Human
cagagccccccuucugaucaca

SEQ ID NO: 512839 - RNA, 22 nt, Human
cugguuccaggauggaucuuuc

SEQ ID NO: 512840 - RNA, 22 nt, Human
agaaaauuagauuuuacugugu

SEQ ID NO: 512841 - RNA, 22 nt, Human
cccaggcagagagcuggugagc

SEQ ID NO: 512842 - RNA, 23 nt, Human
ugcugguucaaaaaggaaggagg

SEQ ID NO: 512843 - RNA, 22 nt, Human
gcagagccaugggagguuuuug

SEQ ID NO: 512844 - RNA, 22 nt, Human
ccaggccuggaccaugccaggg

SEQ ID NO: 512845 - RNA, 22 nt, Human
uggccccugaggagcaucagcc

SEQ ID NO: 512846 - RNA, 22 nt, Human
ugucagugaguuaguugcaagu

SEQ ID NO: 512847 - RNA, 22 nt, Human
ucagcacuuuuacucucuuugc

SEQ ID NO: 512848 - RNA, 22 nt, Human
gaggcagcagggcugguuccuu

SEQ ID NO: 512849 - RNA, 23 nt, Human
uggaccugaaccagugccucugu

SEQ ID NO: 512850 - RNA, 22 nt, Human
uccaggcagagcaacaaaauau

SEQ ID NO: 512851 - RNA, 22 nt, Human
cucagcaucaugguaucugggg

SEQ ID NO: 512852 - RNA, 22 nt, Human
ucacugcucucuaagcaucgcc

SEQ ID NO: 512853 - RNA, 22 nt, Human
ccugggcucuauccugacccag

SEQ ID NO: 512854 - RNA, 22 nt, Human
uagggaggaggguuuucaaauc

SEQ ID NO: 512855 - RNA, 22 nt, Human
ccacauacaaauggggugcugu

SEQ ID NO: 512856 - RNA, 22 nt, Human
gagacacagagaggcuguguga

SEQ ID NO: 512857 - RNA, 17 nt, Human
uaucaagaagucuggcc

SEQ ID NO: 512858 - RNA, 22 nt, Human
guguacauauugagucugcuga

SEQ ID NO: 512859 - RNA, 22 nt, Human
uaaggccaggcuguggucggca

SEQ ID NO: 512860 - RNA, 22 nt, Human
auguagaagcugacagugcugu

SEQ ID NO: 512861 - RNA, 22 nt, Human
agcaauaacagaaaacuuuccu

SEQ ID NO: 512862 - RNA, 22 nt, Human
ucagggaaaagucacacugggu

SEQ ID NO: 512863 - RNA, 20 nt, Human
gagggcaggcacccauuuca

SEQ ID NO: 512864 - RNA, 22 nt, Human
gcucuuuggauuccuuuacaaa

SEQ ID NO: 512865 - RNA, 22 nt, Human
gcaguggggaaugcuggggaga

SEQ ID NO: 512866 - RNA, 22 nt, Human
agugcuggcccauagcugcugg

SEQ ID NO: 512867 - RNA, 22 nt, Human
ggccucagaaauagaguaaaau

SEQ ID NO: 512868 - RNA, 22 nt, Human
ccaccccaaaugaagaccucuc

SEQ ID NO: 512869 - RNA, 22 nt, Human
aacagaauaguugauguacagu

SEQ ID NO: 512870 - RNA, 22 nt, Human
gucccugggaaaggagagggca

SEQ ID NO: 512871 - RNA, 22 nt, Human
agcuccuggcuuuccucucacc

SEQ ID NO: 512872 - RNA, 22 nt, Human
agggggugcauuugugaaugaa

SEQ ID NO: 512873 - RNA, 22 nt, Human
cagguccuggcaucaggcaggu

SEQ ID NO: 512874 - RNA, 22 nt, Human
acuuaguauuuuucagcuuuga

SEQ ID NO: 512875 - RNA, 22 nt, Human
cucugcagaggcccaaggcuga

SEQ ID NO: 512876 - RNA, 22 nt, Human
gcauccagucuuggcuccugga

SEQ ID NO: 512877 - RNA, 22 nt, Human
aguccagggcucucugugggau

SEQ ID NO: 512878 - RNA, 22 nt, Human
gcauuucuuccuggugugagcc

SEQ ID NO: 512879 - RNA, 22 nt, Human
agcacagaguugcagagagcgu

SEQ ID NO: 512880 - RNA, 22 nt, Human
uacuuuggauccuuacaauagc

SEQ ID NO: 512881 - RNA, 22 nt, Human
uggaacacuuuguugaaaugca

SEQ ID NO: 512882 - RNA, 22 nt, Human
uugccagggucaggaugagauc

SEQ ID NO: 512883 - RNA, 22 nt, Human
ccuuccuggcuguccgccugau

SEQ ID NO: 512884 - RNA, 22 nt, Human
cucagaaucugccaaguucagg

SEQ ID NO: 512885 - RNA, 20 nt, Human
uuugagaccagucugcccaa

SEQ ID NO: 512886 - RNA, 22 nt, Human
cugcugccggcgagccucccuu

SEQ ID NO: 512887 - RNA, 17 nt, Human
cccuggcaaagaauggc

SEQ ID NO: 512888 - RNA, 22 nt, Human
ucucuggggaugcuuauucuug

SEQ ID NO: 512889 - RNA, 22 nt, Human
ucaugcagaggaaggcuaguuu

SEQ ID NO: 512890 - RNA, 22 nt, Human
ugagacgaagucuugcucuguu

SEQ ID NO: 512891 - RNA, 18 nt, Human
ucaggcucucuggcuaga

SEQ ID NO: 512892 - RNA, 22 nt, Human
aggcacugggaauaugcugagg

SEQ ID NO: 512893 - RNA, 22 nt, Human
aucacauucuuucaaagcaguc

SEQ ID NO: 512894 - RNA, 22 nt, Human
ucugggucucagagugaccaug

SEQ ID NO: 512895 - RNA, 23 nt, Human
gggaccugguaggaggugauugg

SEQ ID NO: 512896 - RNA, 22 nt, Human
cucccuggaggugagcuggcac

SEQ ID NO: 512897 - RNA, 22 nt, Human
aucaggaagaucuagcgaaugu

SEQ ID NO: 512898 - RNA, 21 nt, Human
cacaggugggucagugaggcc

SEQ ID NO: 512899 - RNA, 22 nt, Human
gcagugcuaaguagcuggccca

SEQ ID NO: 512900 - RNA, 22 nt, Human
ucccagccuccugacaguuuug

SEQ ID NO: 512901 - RNA, 22 nt, Human
cagcccugagagaaccaucuau

SEQ ID NO: 512902 - RNA, 22 nt, Human
gcaggggcuaaggacacagaga

SEQ ID NO: 512903 - RNA, 22 nt, Human
cauucacaauggauugcuucaa

SEQ ID NO: 512904 - RNA, 22 nt, Human
agggcagaaaucgauuacaccu

SEQ ID NO: 512905 - RNA, 22 nt, Human
ucagaagcaaacaucacucuag

SEQ ID NO: 512906 - RNA, 22 nt, Human
gggccuggcaugcagccccguu

SEQ ID NO: 512907 - RNA, 22 nt, Human
auggggcucugcggcugcuccc

SEQ ID NO: 512908 - RNA, 22 nt, Human
gcaggaugccagggcagcagcg

SEQ ID NO: 512909 - RNA, 22 nt, Human
agucaguguucuccggagaggc

SEQ ID NO: 512910 - RNA, 22 nt, Human
uccagagggcgauggcuggggg

SEQ ID NO: 512911 - RNA, 22 nt, Human
ugaguguauaucaggagagagc

SEQ ID NO: 512912 - RNA, 22 nt, Human
gucaggauuggggucaugaguc

SEQ ID NO: 512913 - RNA, 22 nt, Human
ccuggcugugcauugccggccc

SEQ ID NO: 512914 - RNA, 22 nt, Human
caggauggucagaugcauuguc

SEQ ID NO: 512915 - RNA, 22 nt, Human
gggguggcccuacccucuggaa

SEQ ID NO: 512916 - RNA, 22 nt, Human
caggggcuguggcacauggugu

SEQ ID NO: 512917 - RNA, 22 nt, Human
cugccuggaccggcagcccucc

SEQ ID NO: 512918 - RNA, 22 nt, Human
agccaacuaggagauuaaggua

SEQ ID NO: 512919 - RNA, 22 nt, Human
gcagugaaucuggcaagaauuu

SEQ ID NO: 512920 - RNA, 22 nt, Human
gagcaagacucacugcaucuug

SEQ ID NO: 512921 - RNA, 22 nt, Human
gcugaggcuccucgggaggaca

SEQ ID NO: 512922 - RNA, 22 nt, Human
ucaggagagaaagaauacaauu

SEQ ID NO: 512923 - RNA, 22 nt, Human
ucccagagguugagucacuuau

SEQ ID NO: 512924 - RNA, 22 nt, Human
uguggcagaacugggacucaaa

SEQ ID NO: 512925 - RNA, 22 nt, Human
ucauggcuugcagauggccacc

SEQ ID NO: 512926 - RNA, 22 nt, Human
augauguugauaaauuacuuua

SEQ ID NO: 512927 - RNA, 22 nt, Human
ccuagagcucugcuuuaucuaa

SEQ ID NO: 512928 - RNA, 22 nt, Human
acauuuugcccuuauuugcuga

SEQ ID NO: 512929 - RNA, 22 nt, Human
ugcucccaggcauucucuguug

SEQ ID NO: 512930 - RNA, 22 nt, Human
ugguccugaggcuuguuuccac

SEQ ID NO: 512931 - RNA, 22 nt, Human
cugaggagaccaucaacuaauu

SEQ ID NO: 512932 - RNA, 22 nt, Human
uaacagcucuguguggcuguaa

SEQ ID NO: 512933 - RNA, 22 nt, Human
ccagcucucagcgggagacuca

SEQ ID NO: 512934 - RNA, 22 nt, Human
ccaggucucgggucugcucgug

SEQ ID NO: 512935 - RNA, 22 nt, Human
gcucugagucucagcuaccaca

SEQ ID NO: 512936 - RNA, 22 nt, Human
cucuucagauaaaagggauauu

SEQ ID NO: 512937 - RNA, 22 nt, Human
gcuggcuggaguaaggagggag

SEQ ID NO: 512938 - RNA, 22 nt, Human
auucucuuuguauaacaucuug

SEQ ID NO: 512939 - RNA, 22 nt, Human
uggguccuggaaggcgacaggu

SEQ ID NO: 512940 - RNA, 22 nt, Human
gggccuguaugggucucagaua

SEQ ID NO: 512941 - RNA, 22 nt, Human
auacagcagugaauaagauaaa

SEQ ID NO: 512942 - RNA, 22 nt, Human
cuguaugaggaucagacuggac

SEQ ID NO: 512943 - RNA, 22 nt, Human
uuuuaauuuugcaaaucuggug

SEQ ID NO: 512944 - RNA, 22 nt, Human
agggaacagugaaaggcaucag

SEQ ID NO: 512945 - RNA, 22 nt, Human
aucuggcucauucagggaacgg

SEQ ID NO: 512946 - RNA, 22 nt, Human
cucccuggcuuuguccugaggc

SEQ ID NO: 512947 - RNA, 22 nt, Human
ucacagugagccaugucagaga

SEQ ID NO: 512948 - RNA, 22 nt, Human
agggccucuaccauccaagguu

SEQ ID NO: 512949 - RNA, 22 nt, Human
uugucugaauucuucuaggcag

SEQ ID NO: 512950 - RNA, 22 nt, Human
uacauuaacuuacguccacaug

SEQ ID NO: 512951 - RNA, 23 nt, Human
aggcagagccaaggucaaaaccc

SEQ ID NO: 512952 - RNA, 22 nt, Human
ucagagagguuggugauaagaa

SEQ ID NO: 512953 - RNA, 20 nt, Human
cauuugggaucaugagguuu

SEQ ID NO: 512954 - RNA, 22 nt, Human
ggaggagauuccccucucacuu

SEQ ID NO: 512955 - RNA, 22 nt, Human
agcaggugguaggcagucagca

SEQ ID NO: 512956 - RNA, 22 nt, Human
ccuuacaaugcaguuuacuuag

SEQ ID NO: 512957 - RNA, 22 nt, Human
cuagggccaaaggcugugaugc

SEQ ID NO: 512958 - RNA, 22 nt, Human
aaagcuaugaggcaugcauuuc

SEQ ID NO: 512959 - RNA, 22 nt, Human
cugagcagcaacccagagccuc

SEQ ID NO: 512960 - RNA, 22 nt, Human
uuagccuuagaagcuuagcaaa

SEQ ID NO: 512961 - RNA, 22 nt, Human
ggcaggugaggcaugugccugg

SEQ ID NO: 512962 - RNA, 22 nt, Human
cuguggcuucagcauucagagc

SEQ ID NO: 512963 - RNA, 22 nt, Human
gcagcagaguuugggagauggu

SEQ ID NO: 512964 - RNA, 22 nt, Human
aguguuccacacaucuggggaa

SEQ ID NO: 512965 - RNA, 22 nt, Human
agaaauguuacaguuguuauuu

SEQ ID NO: 512966 - RNA, 22 nt, Human
ccccuguguuguucaaggguca

SEQ ID NO: 512967 - RNA, 22 nt, Human
gcacugcagccucagauggugg

SEQ ID NO: 512968 - RNA, 22 nt, Human
guccagagaguaaaggggguaa

SEQ ID NO: 512969 - RNA, 22 nt, Human
uugcccugcagcggugaguggu

SEQ ID NO: 512970 - RNA, 22 nt, Human
ggcaggcuugguggcaccgguu

SEQ ID NO: 512971 - RNA, 22 nt, Human
uggauuaaagauuaaaaugaca

SEQ ID NO: 512972 - RNA, 22 nt, Human
ucuugcuaggagcuauggaaga

SEQ ID NO: 512973 - RNA, 22 nt, Human
gaaggagaggauugugaggcug

SEQ ID NO: 512974 - RNA, 22 nt, Human
caaguuuuagaaauaucuggau

SEQ ID NO: 512975 - RNA, 19 nt, Human
agcagcuggagguggagug

SEQ ID NO: 512976 - RNA, 22 nt, Human
auacaagaucacuccagaaaau

SEQ ID NO: 512977 - RNA, 22 nt, Human
uugcugaacccugcccucuaau

SEQ ID NO: 512978 - RNA, 22 nt, Human
agggaaauggagaguguaguuu

SEQ ID NO: 512979 - RNA, 22 nt, Human
uccuaggguaaucagcauacau

SEQ ID NO: 512980 - RNA, 22 nt, Human
ucagcagggagaggagaaugca

SEQ ID NO: 512981 - RNA, 18 nt, Human
agcagagcccaugcauuc

SEQ ID NO: 512982 - RNA, 23 nt, Human
uccuucaaguuaggaagugaaca

SEQ ID NO: 512983 - RNA, 17 nt, Human
auuucacuuagcaugag

SEQ ID NO: 512984 - RNA, 22 nt, Human
caagcucugggauagcagagag

SEQ ID NO: 512985 - RNA, 22 nt, Human
ggucccaggagaauaggugcaa

SEQ ID NO: 512986 - RNA, 20 nt, Human
aaguuuucuccaaauacagu

SEQ ID NO: 512987 - RNA, 22 nt, Human
acucugggcuuugauuuguuac

SEQ ID NO: 512988 - RNA, 22 nt, Human
ucuguucaguugauuagacaga

SEQ ID NO: 512989 - RNA, 22 nt, Human
agagcuggcugguagcccugau

SEQ ID NO: 512990 - RNA, 22 nt, Human
guguuuggucagacguccgggg

SEQ ID NO: 512991 - RNA, 20 nt, Human
uugauaggcagcuugucagg

SEQ ID NO: 512992 - RNA, 17 nt, Human
gggcugacaguggccuc

SEQ ID NO: 512993 - RNA, 22 nt, Human
cuggaagguucuuugugugccu

SEQ ID NO: 512994 - RNA, 22 nt, Human
ccugucugcaugagugagcaua

SEQ ID NO: 512995 - RNA, 22 nt, Human
gaaaauacaaauagccuugaaa

SEQ ID NO: 512996 - RNA, 20 nt, Human
agggucaguagcacagagcu

SEQ ID NO: 512997 - RNA, 22 nt, Human
ugaaggagaauuaauaggcauu

SEQ ID NO: 512998 - RNA, 22 nt, Human
cuacauuuuaauaagcugcuua

SEQ ID NO: 512999 - RNA, 22 nt, Human
cugaaucauggucauuaguuua

SEQ ID NO: 513000 - RNA, 22 nt, Human
gcuggaggaucacuugagccca

SEQ ID NO: 513001 - RNA, 22 nt, Human
uggcugucagcugccuggugcg

SEQ ID NO: 513002 - RNA, 22 nt, Human
gcacagccggaccgaggaaaag

SEQ ID NO: 513003 - RNA, 22 nt, Human
aagaaaagaaaccugaggcuuu

SEQ ID NO: 513004 - RNA, 22 nt, Human
uucuggcuuauccuaacucuaa

SEQ ID NO: 513005 - RNA, 22 nt, Human
cugacccuagcaucucugugca

SEQ ID NO: 513006 - RNA, 22 nt, Human
gcuuccugucccucagccauga

SEQ ID NO: 513007 - RNA, 23 nt, Human
cuggggcuuucaaaucugggcag

SEQ ID NO: 513008 - RNA, 22 nt, Human
agauugucauugacgaugagca

SEQ ID NO: 513009 - RNA, 22 nt, Human
cugggugaguugaugaaggaga

SEQ ID NO: 513010 - RNA, 22 nt, Human
gucagugugagauaaucuugga

SEQ ID NO: 513011 - RNA, 22 nt, Human
uggcccagcucagggugggcgg

SEQ ID NO: 513012 - RNA, 22 nt, Human
caggcacacauccgugagagau

SEQ ID NO: 513013 - RNA, 20 nt, Human
accuggcuuccucuuggcau

SEQ ID NO: 513014 - RNA, 21 nt, Human
uugcaccaugauaaauucaga

SEQ ID NO: 513015 - RNA, 22 nt, Human
gcuguggccaacaaaccacuuu

SEQ ID NO: 513016 - RNA, 20 nt, Human
gucucagaauggauuugcau

SEQ ID NO: 513017 - RNA, 22 nt, Human
uuucuaagacauuugucaucuu

SEQ ID NO: 513018 - RNA, 22 nt, Human
uucaggauucugugucugacaa

SEQ ID NO: 513019 - RNA, 22 nt, Human
aauaauuuugagagccuggaaa

SEQ ID NO: 513020 - RNA, 22 nt, Human
ccugggcuggaguacagcagug

SEQ ID NO: 513021 - RNA, 22 nt, Human
uuauuucauguaaaauuuaugu

SEQ ID NO: 513022 - RNA, 22 nt, Human
uaagcagaaaaagugggaguua

SEQ ID NO: 513023 - RNA, 22 nt, Human
caagagcugaggcuggagaggu

SEQ ID NO: 513024 - RNA, 22 nt, Human
cagcuuuccagagaccugcccc

SEQ ID NO: 513025 - RNA, 22 nt, Human
aggccucugcuggaaagaguug

SEQ ID NO: 513026 - RNA, 22 nt, Human
acccuggguucccgcagcacca

SEQ ID NO: 513027 - RNA, 22 nt, Human
uauuuauaaucugccaaagaga

SEQ ID NO: 513028 - RNA, 23 nt, Human
agagaaucauggaaacucuuucu

SEQ ID NO: 513029 - RNA, 22 nt, Human
aggugcaguggcucaugccugu

SEQ ID NO: 513030 - RNA, 22 nt, Human
cagugcaguggcugagcuggag

SEQ ID NO: 513031 - RNA, 22 nt, Human
gccucugcacuguggcacacca

SEQ ID NO: 513032 - RNA, 22 nt, Human
uggccugccuucgcugagcuga

SEQ ID NO: 513033 - RNA, 22 nt, Human
gccuuugcaccaucagugcaau

SEQ ID NO: 513034 - RNA, 22 nt, Human
auuugccuuucgaaucaacagg

SEQ ID NO: 513035 - RNA, 22 nt, Human
aagucuuuuugaaucuauaacu

SEQ ID NO: 513036 - RNA, 22 nt, Human
uuggaggcaaugggaaggaggc

SEQ ID NO: 513037 - RNA, 22 nt, Human
cagaaagcgggaugcagcaugu

SEQ ID NO: 513038 - RNA, 22 nt, Human
caugugugggacccuuagguug

SEQ ID NO: 513039 - RNA, 19 nt, Human
ugucccuggucaccagacu

SEQ ID NO: 513040 - RNA, 22 nt, Human
uucgaguuggcuuuauuaaacu

SEQ ID NO: 513041 - RNA, 22 nt, Human
uuuguagaacuguagaacaaug

SEQ ID NO: 513042 - RNA, 22 nt, Human
ugguggcagcugggacagaggu

SEQ ID NO: 513043 - RNA, 22 nt, Human
uccucugcucagcauuccucac

SEQ ID NO: 513044 - RNA, 22 nt, Human
ugguuccaguuuucaauagagc

SEQ ID NO: 513045 - RNA, 22 nt, Human
gccugggagugcacagugaggu

SEQ ID NO: 513046 - RNA, 22 nt, Human
ugcccuggcucuccacuaguuu

SEQ ID NO: 513047 - RNA, 22 nt, Human
caguggcaugguugacugcagu

SEQ ID NO: 513048 - RNA, 22 nt, Human
uacuuuuugucucuuugaaugu

SEQ ID NO: 513049 - RNA, 22 nt, Human
gaggaggaaacccuguuccucu

SEQ ID NO: 513050 - RNA, 22 nt, Human
uguauguguauguacauaugca

SEQ ID NO: 513051 - RNA, 22 nt, Human
uggccaggcauucagauaagac

SEQ ID NO: 513052 - RNA, 22 nt, Human
uugcauuagugucauaaggugg

SEQ ID NO: 513053 - RNA, 22 nt, Human
acccagagcccuuagcacagac

SEQ ID NO: 513054 - RNA, 22 nt, Human
caagccucagaaucuucuccau

SEQ ID NO: 513055 - RNA, 22 nt, Human
uuagucacaugcccaucucuga

SEQ ID NO: 513056 - RNA, 22 nt, Human
auuuaugacaaccaaagaguga

SEQ ID NO: 513057 - RNA, 22 nt, Human
augcccugagcaggccuucaag

SEQ ID NO: 513058 - RNA, 20 nt, Human
cugggcucgguggcccuggc

SEQ ID NO: 513059 - RNA, 22 nt, Human
agcagaagaggucuuguugcug

SEQ ID NO: 513060 - RNA, 22 nt, Human
auggccuggccagagcucugcu

SEQ ID NO: 513061 - RNA, 22 nt, Human
ugucucaguucccuucucugga

SEQ ID NO: 513062 - RNA, 21 nt, Human
auacuuugaauuacagccuug

SEQ ID NO: 513063 - RNA, 22 nt, Human
agccuggccugggcaggcacau

SEQ ID NO: 513064 - RNA, 22 nt, Human
guggguggaggcgucgagggca

SEQ ID NO: 513065 - RNA, 22 nt, Human
gcacugggcuccaggaaggagg

SEQ ID NO: 513066 - RNA, 22 nt, Human
gacuggccuggggcugggcaca

SEQ ID NO: 513067 - RNA, 22 nt, Human
gugcccuguucauuucucuccc

SEQ ID NO: 513068 - RNA, 22 nt, Human
cuaaagcauucucagauuuugc

SEQ ID NO: 513069 - RNA, 22 nt, Human
aguaugaaccuggguucuggau

SEQ ID NO: 513070 - RNA, 22 nt, Human
gggcagauggggcacaggcuga

SEQ ID NO: 513071 - RNA, 22 nt, Human
agucaaagcuacaggcauuuga

SEQ ID NO: 513072 - RNA, 22 nt, Human
gugcauguuaaugguguacaaa

SEQ ID NO: 513073 - RNA, 22 nt, Human
cugggaguugacgaggcuugua

SEQ ID NO: 513074 - RNA, 22 nt, Human
uaccaugucuucaauaagucua

SEQ ID NO: 513075 - RNA, 22 nt, Human
ggcaggugugagcuguaaagga

SEQ ID NO: 513076 - RNA, 22 nt, Human
ugguccagacuuugaccucuca

SEQ ID NO: 513077 - RNA, 22 nt, Human
ccaggagcauuaagagaacaua

SEQ ID NO: 513078 - RNA, 22 nt, Human
auguaugagagauucuuuuauu

SEQ ID NO: 513079 - RNA, 22 nt, Human
gaggcagagugcaccccaggag

SEQ ID NO: 513080 - RNA, 22 nt, Human
gcugaagggagugcugagucug

SEQ ID NO: 513081 - RNA, 22 nt, Human
uuucuuagcgaugcuugauaaa

SEQ ID NO: 513082 - RNA, 20 nt, Human
ccugggcuccaggagccccg

SEQ ID NO: 513083 - RNA, 23 nt, Human
ucagugauguugaaccuagcagu

SEQ ID NO: 513084 - RNA, 22 nt, Human
augaaauugaucuugaacuuuu

SEQ ID NO: 513085 - RNA, 22 nt, Human
gcagaagggaauaaggagcuuu

SEQ ID NO: 513086 - RNA, 22 nt, Human
cccacaggcuagggguagggca

SEQ ID NO: 513087 - RNA, 22 nt, Human
cuggaaggagcccgggcggauc

SEQ ID NO: 513088 - RNA, 22 nt, Human
acagggucuuagagaucaccug

SEQ ID NO: 513089 - RNA, 22 nt, Human
cagugucuuauuuguagcucag

SEQ ID NO: 513090 - RNA, 22 nt, Human
uuccagggcuaauuccugugga

SEQ ID NO: 513091 - RNA, 22 nt, Human
uaaaguauccaguuauucuucu

SEQ ID NO: 513092 - RNA, 22 nt, Human
uuugugcagauguauauuugug

SEQ ID NO: 513093 - RNA, 22 nt, Human
ucucacagcaggggccaggucu

SEQ ID NO: 513094 - RNA, 22 nt, Human
gcagggauugugcagggggcua

SEQ ID NO: 513095 - RNA, 22 nt, Human
ggcgccagcacugcagcgccuc

SEQ ID NO: 513096 - RNA, 20 nt, Human
ugcacagggugggaagcaac

SEQ ID NO: 513097 - RNA, 22 nt, Human
ucuuuugagggccagaggaaga

SEQ ID NO: 513098 - RNA, 22 nt, Human
ggcaggaaguagcagucugagc

SEQ ID NO: 513099 - RNA, 22 nt, Human
gcuggccaggaagagucucaga

SEQ ID NO: 513100 - RNA, 22 nt, Human
uguaaugagucacuuaccuuaa

SEQ ID NO: 513101 - RNA, 22 nt, Human
uccuucaguuaaagaucucaca

SEQ ID NO: 513102 - RNA, 21 nt, Human
gccacguuucagucuucucag

SEQ ID NO: 513103 - RNA, 22 nt, Human
aaaugccucugcuguacacaau

SEQ ID NO: 513104 - RNA, 22 nt, Human
uaaauagaaucuaaacugcuca

SEQ ID NO: 513105 - RNA, 22 nt, Human
ucagcuggagauccuuguugug

SEQ ID NO: 513106 - RNA, 22 nt, Human
auggagggugucagagagcgaa

SEQ ID NO: 513107 - RNA, 22 nt, Human
agagcuggauggucaagauggc

SEQ ID NO: 513108 - RNA, 21 nt, Human
gggcaggucucugaugucaac

SEQ ID NO: 513109 - RNA, 22 nt, Human
ggcuucaggggcccagucagca

SEQ ID NO: 513110 - RNA, 22 nt, Human
ucuggcucucucaucacccaau

SEQ ID NO: 513111 - RNA, 22 nt, Human
ucacaggcuugugaacauugca

SEQ ID NO: 513112 - RNA, 19 nt, Human
uccagccugcuguuucucu

SEQ ID NO: 513113 - RNA, 19 nt, Human
ugguaaagacuguccccca

SEQ ID NO: 513114 - RNA, 22 nt, Human
gccugguggugugcucaagugg

SEQ ID NO: 513115 - RNA, 22 nt, Human
uaggaaaagucuagauugauga

SEQ ID NO: 513116 - RNA, 22 nt, Human
cucucugguuucagcgaagggg

SEQ ID NO: 513117 - RNA, 22 nt, Human
gagcagcacugaguuagcagcu

SEQ ID NO: 513118 - RNA, 21 nt, Human
aggcagcucaggcccagagag

SEQ ID NO: 513119 - RNA, 22 nt, Human
uggcccugucccuggagccugg

SEQ ID NO: 513120 - RNA, 22 nt, Human
ugugaaaggggucacagggaaa

SEQ ID NO: 513121 - RNA, 22 nt, Human
gagcuggucgaaaugggcugac

SEQ ID NO: 513122 - RNA, 22 nt, Human
aaguccugggugagaacugucc

SEQ ID NO: 513123 - RNA, 23 nt, Human
aaaaaaccauguaggcacucagu

SEQ ID NO: 513124 - RNA, 22 nt, Human
ucaguguuggcauucagaaaug

SEQ ID NO: 513125 - RNA, 22 nt, Human
ggaaaagacagaauucuagaau

SEQ ID NO: 513126 - RNA, 22 nt, Human
gcucagagaugucugcugccuu

SEQ ID NO: 513127 - RNA, 22 nt, Human
ucccuccuggugaugaugcaaa

SEQ ID NO: 513128 - RNA, 22 nt, Human
gaaucucaaggcuugugaggau

SEQ ID NO: 513129 - RNA, 22 nt, Human
ccagucccaggcagaaauccag

SEQ ID NO: 513130 - RNA, 22 nt, Human
ggcagaaggcaauuagagacug

SEQ ID NO: 513131 - RNA, 22 nt, Human
ugaggcuguucuaccagggcca

SEQ ID NO: 513132 - RNA, 22 nt, Human
aguggggagguccaggccaccc

SEQ ID NO: 513133 - RNA, 22 nt, Human
cuggccaccaagagcuugcuca

SEQ ID NO: 513134 - RNA, 22 nt, Human
agcagccagaaagggcagucga

SEQ ID NO: 513135 - RNA, 22 nt, Human
uggguaggggacguggaagaaa

SEQ ID NO: 513136 - RNA, 22 nt, Human
ccuggcucagcagcucuuucuc

SEQ ID NO: 513137 - RNA, 22 nt, Human
ggggcugagaauucagucucgg

SEQ ID NO: 513138 - RNA, 22 nt, Human
ucugggggaggaggcauggccc

SEQ ID NO: 513139 - RNA, 22 nt, Human
auaagcagggucaaaugccuac

SEQ ID NO: 513140 - RNA, 22 nt, Human
aucugugaucaagacagacagu

SEQ ID NO: 513141 - RNA, 22 nt, Human
aacauucaaaacccaguucagu

SEQ ID NO: 513142 - RNA, 22 nt, Human
cuccucagcugggaggaguccc

SEQ ID NO: 513143 - RNA, 22 nt, Human
agggcacagccuaaagccuaug

SEQ ID NO: 513144 - RNA, 19 nt, Human
caggaacauggagggaggg

SEQ ID NO: 513145 - RNA, 22 nt, Human
gagccuggguccuucccuggga

SEQ ID NO: 513146 - RNA, 22 nt, Human
agguccagugcucuuggugguu

SEQ ID NO: 513147 - RNA, 22 nt, Human
agcugcccccagggcugugcuu

SEQ ID NO: 513148 - RNA, 21 nt, Human
ucucuacacuuucacuaggcu

SEQ ID NO: 513149 - RNA, 20 nt, Human
accugccacagagaaaggua

SEQ ID NO: 513150 - RNA, 22 nt, Human
aagcaauagcaacaacuuuaca

SEQ ID NO: 513151 - RNA, 22 nt, Human
uagggcaggugaagaaaagcua

SEQ ID NO: 513152 - RNA, 22 nt, Human
agagaagagcaaugauaaauuu

SEQ ID NO: 513153 - RNA, 22 nt, Human
uauugaggaucuccugcuaauu

SEQ ID NO: 513154 - RNA, 22 nt, Human
cacugaaggaaggacuacugca

SEQ ID NO: 513155 - RNA, 22 nt, Human
gagacacagcagauauucaauc

SEQ ID NO: 513156 - RNA, 22 nt, Human
ggguguccugugccaagcuggg

SEQ ID NO: 513157 - RNA, 22 nt, Human
cugggaggcacuauucaggagg

SEQ ID NO: 513158 - RNA, 22 nt, Human
ccagagcuucggggcggcugua

SEQ ID NO: 513159 - RNA, 22 nt, Human
augugugcuacaggugugggaa

SEQ ID NO: 513160 - RNA, 22 nt, Human
cagcagugcuucagugugagau

SEQ ID NO: 513161 - RNA, 22 nt, Human
gcagaggccugaagguggcggg

SEQ ID NO: 513162 - RNA, 22 nt, Human
cuggcucugggcuaagcuccca

SEQ ID NO: 513163 - RNA, 22 nt, Human
cacagaagaaucaugcuguguu

SEQ ID NO: 513164 - RNA, 22 nt, Human
uggacucaaguccaaguucacg

SEQ ID NO: 513165 - RNA, 22 nt, Human
accacuguaucuccagcacauu

SEQ ID NO: 513166 - RNA, 22 nt, Human
agaccaagacuauaaugagagg

SEQ ID NO: 513167 - RNA, 19 nt, Human
auaaggcagugacuuuuuu

SEQ ID NO: 513168 - RNA, 22 nt, Human
aggaccugacauuguguuuucu

SEQ ID NO: 513169 - RNA, 22 nt, Human
uaaguggaagguuauaugcuaa

SEQ ID NO: 513170 - RNA, 21 nt, Human
aucagcaaaugccugucuccc

SEQ ID NO: 513171 - RNA, 22 nt, Human
aagauguuaaauugggggcauu

SEQ ID NO: 513172 - RNA, 22 nt, Human
aagcugcccuguguuagaguuc

SEQ ID NO: 513173 - RNA, 22 nt, Human
auuuacaggacagcuuggcauu

SEQ ID NO: 513174 - RNA, 22 nt, Human
cuccagauuccguuuauucagg

SEQ ID NO: 513175 - RNA, 22 nt, Human
cuuauguauauuuggaacguac

SEQ ID NO: 513176 - RNA, 22 nt, Human
aaguuauaucaucucauugacg

SEQ ID NO: 513177 - RNA, 22 nt, Human
caggcagcguccugcuuccugu

SEQ ID NO: 513178 - RNA, 20 nt, Human
gucaucgccggcagcaaaga

SEQ ID NO: 513179 - RNA, 22 nt, Human
ugaagcaacuggacaaguuggc

SEQ ID NO: 513180 - RNA, 22 nt, Human
gcuuuaaauggcuugcccaagu

SEQ ID NO: 513181 - RNA, 23 nt, Human
ggggccugcaccggucugcgcgg

SEQ ID NO: 513182 - RNA, 22 nt, Human
acacauguuuguguagucaguu

SEQ ID NO: 513183 - RNA, 22 nt, Human
auuagcuuuaaaccacagcagu

SEQ ID NO: 513184 - RNA, 22 nt, Human
uaaagcaaugaaaguuuugcag

SEQ ID NO: 513185 - RNA, 22 nt, Human
ugcauuaaauauaaucuguuga

SEQ ID NO: 513186 - RNA, 22 nt, Human
auuugugggacuauaaugcagg

SEQ ID NO: 513187 - RNA, 22 nt, Human
gacucagugauuugacaugccu

SEQ ID NO: 513188 - RNA, 22 nt, Human
cagcaccuguuagcauuaaaua

SEQ ID NO: 513189 - RNA, 22 nt, Human
uggaaacuagagaguuuguauu

SEQ ID NO: 513190 - RNA, 22 nt, Human
ccugauuauuguaaauauauuu

SEQ ID NO: 513191 - RNA, 22 nt, Human
caggagaagguuuggagugcag

SEQ ID NO: 513192 - RNA, 22 nt, Human
uuuauaaacaguaccacggugc

SEQ ID NO: 513193 - RNA, 22 nt, Human
aaagucuuuauuuuguaucuuu

SEQ ID NO: 513194 - RNA, 22 nt, Human
guucagcaagaauguuucuauu

SEQ ID NO: 513195 - RNA, 22 nt, Human
cugacucugacaggacuugugg

SEQ ID NO: 513196 - RNA, 22 nt, Human
ugauacagucagcucacaauug

SEQ ID NO: 513197 - RNA, 22 nt, Human
uccuggcuaaugcugcugaugg

SEQ ID NO: 513198 - RNA, 22 nt, Human
gccauuuucugucuuguuuauu

SEQ ID NO: 513199 - RNA, 22 nt, Human
aggaggccccuccuggguugcu

SEQ ID NO: 513200 - RNA, 21 nt, Human
ccugggcugugguuuggagac

SEQ ID NO: 513201 - RNA, 22 nt, Human
agaaugcauuuuguguagcuau

SEQ ID NO: 513202 - RNA, 22 nt, Human
cagugcugagagccuggccagg

SEQ ID NO: 513203 - RNA, 22 nt, Human
ugcagaagaaugagcuuggagu

SEQ ID NO: 513204 - RNA, 22 nt, Human
guuucucaguuuggucugcaga

SEQ ID NO: 513205 - RNA, 22 nt, Human
caguucugguuugcagauauau

SEQ ID NO: 513206 - RNA, 22 nt, Human
uggagcuggaauuugagcugga

SEQ ID NO: 513207 - RNA, 22 nt, Human
ucugggccgcugcguuccauga

SEQ ID NO: 513208 - RNA, 22 nt, Human
aaucuguuuaguucugcguaug

SEQ ID NO: 513209 - RNA, 22 nt, Human
cucuucaggauggcuugugaug

SEQ ID NO: 513210 - RNA, 19 nt, Human
acauugaauuuucuucuuu

SEQ ID NO: 513211 - RNA, 22 nt, Human
cugcugcaggaugggcacucug

SEQ ID NO: 513212 - RNA, 22 nt, Human
auugucuguacuuuaaaaaugu

SEQ ID NO: 513213 - RNA, 22 nt, Human
agugcaaagcagccuguacacc

SEQ ID NO: 513214 - RNA, 22 nt, Human
ggccacucggccaccccugccg

SEQ ID NO: 513215 - RNA, 22 nt, Human
acaaagugaauugcaucgaguu

SEQ ID NO: 513216 - RNA, 22 nt, Human
ccuggagaccagaggauacuuc

SEQ ID NO: 513217 - RNA, 22 nt, Human
ugaaugaugcauuuguuuccca

SEQ ID NO: 513218 - RNA, 22 nt, Human
uuucaggauuaguuuaagcagg

SEQ ID NO: 513219 - RNA, 22 nt, Human
guuggccauuaauuggaggaca

SEQ ID NO: 513220 - RNA, 22 nt, Human
aggggccucgcaggaccgcucc

SEQ ID NO: 513221 - RNA, 22 nt, Human
ugggcuggcccaccacaccucg

SEQ ID NO: 513222 - RNA, 22 nt, Human
uuggaaggccagcaccuugagu

SEQ ID NO: 513223 - RNA, 22 nt, Human
ugcagcagacugaguaugagaa

SEQ ID NO: 513224 - RNA, 22 nt, Human
acuagucauuuaggugauauua

SEQ ID NO: 513225 - RNA, 22 nt, Human
agucaguggcuccgagccuggu

SEQ ID NO: 513226 - RNA, 22 nt, Human
cagagcugggcauggugaaagg

SEQ ID NO: 513227 - RNA, 20 nt, Human
uauugccuaaauaccagaau

SEQ ID NO: 513228 - RNA, 22 nt, Human
uuagccaugcccuagaagagga

SEQ ID NO: 513229 - RNA, 22 nt, Human
cgguccuguacuugaugagaua

SEQ ID NO: 513230 - RNA, 22 nt, Human
gccauccucugagcacuaggca

SEQ ID NO: 513231 - RNA, 22 nt, Human
gcucugggguuggaaagugauc

SEQ ID NO: 513232 - RNA, 22 nt, Human
gaugggaggaaccugggucccu

SEQ ID NO: 513233 - RNA, 22 nt, Human
cagagcauuuggaagccacgug

SEQ ID NO: 513234 - RNA, 22 nt, Human
cugcccugacugaccuuuugaa

SEQ ID NO: 513235 - RNA, 23 nt, Human
uggcucagggucucuuaugaagu

SEQ ID NO: 513236 - RNA, 22 nt, Human
gacagcuucuagaggaauuggu

SEQ ID NO: 513237 - RNA, 22 nt, Human
uuggaaauguagaaaagcagau

SEQ ID NO: 513238 - RNA, 22 nt, Human
aguuucaauucuuuucacaaag

SEQ ID NO: 513239 - RNA, 22 nt, Human
cuggcuuucauuucaagcacgu

SEQ ID NO: 513240 - RNA, 22 nt, Human
cuggcuccauccuaggcaaaug

SEQ ID NO: 513241 - RNA, 22 nt, Human
ggcacagcaagaagggaaauga

SEQ ID NO: 513242 - RNA, 18 nt, Human
gagguagauaagauuuuc

SEQ ID NO: 513243 - RNA, 22 nt, Human
uauagaagagacaugugcauag

SEQ ID NO: 513244 - RNA, 22 nt, Human
gcccaugcacuuucugugaugg

SEQ ID NO: 513245 - RNA, 22 nt, Human
aaaugcacagguuuuaaauccu

SEQ ID NO: 513246 - RNA, 22 nt, Human
acauucuagauauguuauauuu

SEQ ID NO: 513247 - RNA, 22 nt, Human
uagaaacauauaggauggcagg

SEQ ID NO: 513248 - RNA, 22 nt, Human
cauguuuucuaggcuuucacaa

SEQ ID NO: 513249 - RNA, 21 nt, Human
cuguccucagauguggacgag

SEQ ID NO: 513250 - RNA, 23 nt, Human
cccauuuucauguuaacuccugg

SEQ ID NO: 513251 - RNA, 22 nt, Human
cacaauuuuaauacacagucaa

SEQ ID NO: 513252 - RNA, 22 nt, Human
gggagcugagggaccucugugg

SEQ ID NO: 513253 - RNA, 22 nt, Human
acuuccuguguuggucuugcug

SEQ ID NO: 513254 - RNA, 22 nt, Human
acccagccacagcauugaggga

SEQ ID NO: 513255 - RNA, 22 nt, Human
aagaugaacugucuucacccau

SEQ ID NO: 513256 - RNA, 22 nt, Human
gcugggagaggcagcuuucgga

SEQ ID NO: 513257 - RNA, 19 nt, Human
uccccaagaguucuagcuc

SEQ ID NO: 513258 - RNA, 22 nt, Human
gacggcagaaacucaugagguc

SEQ ID NO: 513259 - RNA, 22 nt, Human
uuucuaaguguauugagcuugg

SEQ ID NO: 513260 - RNA, 22 nt, Human
cagagcuggccugugauuuuug

SEQ ID NO: 513261 - RNA, 22 nt, Human
gaacaggguugggugagagagg

SEQ ID NO: 513262 - RNA, 19 nt, Human
uucaggauugacccuacug

SEQ ID NO: 513263 - RNA, 22 nt, Human
ucacuuauaaaaugcaagaucu

SEQ ID NO: 513264 - RNA, 22 nt, Human
uccuggcucugcugccuccuag

SEQ ID NO: 513265 - RNA, 22 nt, Human
ugaagccaucaggaagccagca

SEQ ID NO: 513266 - RNA, 22 nt, Human
gugacuguaauuaccuuagcaa

SEQ ID NO: 513267 - RNA, 22 nt, Human
aaugauauagcagacauagccu

SEQ ID NO: 513268 - RNA, 22 nt, Human
agagacagaucugagggaccuc

SEQ ID NO: 513269 - RNA, 22 nt, Human
uagggcucacugagaugaauau

SEQ ID NO: 513270 - RNA, 22 nt, Human
aggcuccacggcaggaugcugu

SEQ ID NO: 513271 - RNA, 22 nt, Human
ugccaaggguaugggcaagaua

SEQ ID NO: 513272 - RNA, 22 nt, Human
uaaggccagcaugaaugcagca

SEQ ID NO: 513273 - RNA, 22 nt, Human
acauaaaggugacuaacaucuu

SEQ ID NO: 513274 - RNA, 22 nt, Human
cagcuuggaggaggaucuaaga

SEQ ID NO: 513275 - RNA, 22 nt, Human
gccuggcuccuaagagcacaac

SEQ ID NO: 513276 - RNA, 22 nt, Human
uugcacagaguggauauucagu

SEQ ID NO: 513277 - RNA, 22 nt, Human
cuuagggagaaugccucugcag

SEQ ID NO: 513278 - RNA, 22 nt, Human
ggagcaagucccaggcacuagu

SEQ ID NO: 513279 - RNA, 22 nt, Human
uggcuuccuggacagaugcggu

SEQ ID NO: 513280 - RNA, 22 nt, Human
ugcugaaucauaugguaauucu

SEQ ID NO: 513281 - RNA, 22 nt, Human
cuccaguaucuguaggaaaagg

SEQ ID NO: 513282 - RNA, 22 nt, Human
agggcuggcuaggugcguuccc

SEQ ID NO: 513283 - RNA, 22 nt, Human
gccugagacagugugguccaau

SEQ ID NO: 513284 - RNA, 22 nt, Human
cacugcaggucugagauggggg

SEQ ID NO: 513285 - RNA, 22 nt, Human
ucugucuuuagaggccugugcu

SEQ ID NO: 513286 - RNA, 21 nt, Human
aacaguucucuuugaaggugu

SEQ ID NO: 513287 - RNA, 22 nt, Human
cuggcuccaaggaagagguuuu

SEQ ID NO: 513288 - RNA, 22 nt, Human
uuuccaauaaagugucauuguu

SEQ ID NO: 513289 - RNA, 22 nt, Human
uccagaguacggaagagucauc

SEQ ID NO: 513290 - RNA, 22 nt, Human
caguguuuaaucauugugaauu

SEQ ID NO: 513291 - RNA, 22 nt, Human
ucaguggauauuucuguggcug

SEQ ID NO: 513292 - RNA, 22 nt, Human
uaagaacagugucugucucaca

SEQ ID NO: 513293 - RNA, 22 nt, Human
caaaugcagauucaggaguucu

SEQ ID NO: 513294 - RNA, 22 nt, Human
aaaaggcucuucaaaauggaag

SEQ ID NO: 513295 - RNA, 22 nt, Human
agagccagguguagucucggag

SEQ ID NO: 513296 - RNA, 22 nt, Human
auuuguguuguauuaagcugcu

SEQ ID NO: 513297 - RNA, 22 nt, Human
aucucuggcaaugcagcaucgu

SEQ ID NO: 513298 - RNA, 22 nt, Human
augcacagacccaaaggccauc

SEQ ID NO: 513299 - RNA, 22 nt, Human
acacagccgugaaucugcuucu

SEQ ID NO: 513300 - RNA, 22 nt, Human
gggcacagcccagugggguccc

SEQ ID NO: 513301 - RNA, 22 nt, Human
caggucucucccaagcuacaau

SEQ ID NO: 513302 - RNA, 21 nt, Human
aauuagggugccucuuauaau

SEQ ID NO: 513303 - RNA, 19 nt, Human
aggucauugauagugcagg

SEQ ID NO: 513304 - RNA, 22 nt, Human
gcguaaggccucuggucucgga

SEQ ID NO: 513305 - RNA, 22 nt, Human
agggcugccugacuccagagcc

SEQ ID NO: 513306 - RNA, 22 nt, Human
uaccuugggcuauuaucuuuga

SEQ ID NO: 513307 - RNA, 22 nt, Human
augggcugaaagaguaagcugu

SEQ ID NO: 513308 - RNA, 22 nt, Human
agagcugcccacacagcagauu

SEQ ID NO: 513309 - RNA, 22 nt, Human
gguggcagaggugcaucagccc

SEQ ID NO: 513310 - RNA, 22 nt, Human
acagaugaggaauuuauuuggu

SEQ ID NO: 513311 - RNA, 19 nt, Human
ugggcagcucccucugucc

SEQ ID NO: 513312 - RNA, 22 nt, Human
gauggcagucaaccaggugagg

SEQ ID NO: 513313 - RNA, 22 nt, Human
cuucugggcauucagcugcaca

SEQ ID NO: 513314 - RNA, 23 nt, Human
cccagcuuucccacugccgagag

SEQ ID NO: 513315 - RNA, 22 nt, Human
ccuggcaggcuggggacagugc

SEQ ID NO: 513316 - RNA, 22 nt, Human
agggagacacaugaggaaguca

SEQ ID NO: 513317 - RNA, 18 nt, Human
gcuuuauuucuuggggaa

SEQ ID NO: 513318 - RNA, 22 nt, Human
uuccugagucgccgagucuaug

SEQ ID NO: 513319 - RNA, 22 nt, Human
caaaaguaauggcgguuuuuac

SEQ ID NO: 513320 - RNA, 22 nt, Human
acuugggagggugugggcagcu

SEQ ID NO: 513321 - RNA, 22 nt, Human
cugccuugaaaaugaagcuuua

SEQ ID NO: 513322 - RNA, 21 nt, Human
accaggcuugugggagggagc

SEQ ID NO: 513323 - RNA, 22 nt, Human
guggccagaaucuugaggccuu

SEQ ID NO: 513324 - RNA, 22 nt, Human
cccaggcagccccagaagcuug

SEQ ID NO: 513325 - RNA, 22 nt, Human
uucauugugaacacauucugcc

SEQ ID NO: 513326 - RNA, 22 nt, Human
ucaaggcuaaacuuucagagua

SEQ ID NO: 513327 - RNA, 22 nt, Human
ugcauuguugaugaguugaaua

SEQ ID NO: 513328 - RNA, 17 nt, Human
aggugcagaggcagagc

SEQ ID NO: 513329 - RNA, 22 nt, Human
uggccagugggguugagcagga

SEQ ID NO: 513330 - RNA, 22 nt, Human
cuaguucuuaacuguuaugauu

SEQ ID NO: 513331 - RNA, 22 nt, Human
caggugaccuuuguccuaaguu

SEQ ID NO: 513332 - RNA, 21 nt, Human
ugcugccauagaccugaggga

SEQ ID NO: 513333 - RNA, 22 nt, Human
agguggagaagagaugggcagu

SEQ ID NO: 513334 - RNA, 22 nt, Human
ccagggggcuuggugaggccau

SEQ ID NO: 513335 - RNA, 22 nt, Human
gugccuggaaugcgccucggcg

SEQ ID NO: 513336 - RNA, 22 nt, Human
ucacagaauaaauguacuggcc

SEQ ID NO: 513337 - RNA, 22 nt, Human
ucaugcaaggcugaaacauggu

SEQ ID NO: 513338 - RNA, 22 nt, Human
aucaguuuauacuuauaaaucu

SEQ ID NO: 513339 - RNA, 22 nt, Human
gaaacagcuagaaagccauugg

SEQ ID NO: 513340 - RNA, 22 nt, Human
gcccaggcuggagugcaguagc

SEQ ID NO: 513341 - RNA, 22 nt, Human
ucaguguuuauugcggugugua

SEQ ID NO: 513342 - RNA, 22 nt, Human
ugcauauuauguguaucugucu

SEQ ID NO: 513343 - RNA, 22 nt, Human
ucuuuguuugccuuuaucaaga

SEQ ID NO: 513344 - RNA, 22 nt, Human
uaauuuuguauugccauuguag

SEQ ID NO: 513345 - RNA, 22 nt, Human
ggucccaguccucucccugcua

SEQ ID NO: 513346 - RNA, 22 nt, Human
acuuucuucuuaugcauuaagg

SEQ ID NO: 513347 - RNA, 22 nt, Human
gcacccagccagcaucucagag

SEQ ID NO: 513348 - RNA, 22 nt, Human
uccagggaucuuuagagucuuu

SEQ ID NO: 513349 - RNA, 22 nt, Human
aggguaggguaaaugaugcauc

SEQ ID NO: 513350 - RNA, 20 nt, Human
gcucccugguagaaauguuu

SEQ ID NO: 513351 - RNA, 22 nt, Human
ugcugguggagaaaguggaggu

SEQ ID NO: 513352 - RNA, 22 nt, Human
agcugagcucaggcugauguaa

SEQ ID NO: 513353 - RNA, 22 nt, Human
uuauuaauaaaguggcauagcc

SEQ ID NO: 513354 - RNA, 22 nt, Human
uguggccaggaaaaggagaugg

SEQ ID NO: 513355 - RNA, 22 nt, Human
ccuggaaggcaggcauggauug

SEQ ID NO: 513356 - RNA, 22 nt, Human
aaacagcuuguuucaggaaagu

SEQ ID NO: 513357 - RNA, 22 nt, Human
cccugcucuuagugccugugug

SEQ ID NO: 513358 - RNA, 22 nt, Human
ccaggcuuuguaccaggcuuuc

SEQ ID NO: 513359 - RNA, 22 nt, Human
uauaaaugcacuuuugaaauau

SEQ ID NO: 513360 - RNA, 22 nt, Human
ucaaaccaccuuguuacugggg

SEQ ID NO: 513361 - RNA, 21 nt, Human
gccuggcucucacuggccugg

SEQ ID NO: 513362 - RNA, 22 nt, Human
gccuucagcccugacuggccag

SEQ ID NO: 513363 - RNA, 22 nt, Human
uucuaguugagggagacaaaua

SEQ ID NO: 513364 - RNA, 22 nt, Human
agggaaauaaucuauucugagg

SEQ ID NO: 513365 - RNA, 18 nt, Human
agagaugguguagaguuu

SEQ ID NO: 513366 - RNA, 22 nt, Human
agucucugagguucagaugccu

SEQ ID NO: 513367 - RNA, 22 nt, Human
augggcuguccuaguccagccc

SEQ ID NO: 513368 - RNA, 22 nt, Human
ugcagcagcagggaggaggcuc

SEQ ID NO: 513369 - RNA, 20 nt, Human
gagccugggaagucuaaggu

SEQ ID NO: 513370 - RNA, 19 nt, Human
acacagggaucagaggguu

SEQ ID NO: 513371 - RNA, 22 nt, Human
ucaguuuucucaucuguaauuu

SEQ ID NO: 513372 - RNA, 22 nt, Human
uugcccugcggguccugcgcaa

SEQ ID NO: 513373 - RNA, 22 nt, Human
uucauucaucucuaaaaugccu

SEQ ID NO: 513374 - RNA, 22 nt, Human
uucucacaggauuucuuuuagu

SEQ ID NO: 513375 - RNA, 22 nt, Human
gaaaguauuuaaguccauauuu

SEQ ID NO: 513376 - RNA, 22 nt, Human
ugugaggacauuggaggacuca

SEQ ID NO: 513377 - RNA, 22 nt, Human
uccaggcaaaaggaacugcuug

SEQ ID NO: 513378 - RNA, 22 nt, Human
ggccucugguucacagggagga

SEQ ID NO: 513379 - RNA, 22 nt, Human
ugggauggagccugaguauagu

SEQ ID NO: 513380 - RNA, 22 nt, Human
aucugaagaaugaauggaauua

SEQ ID NO: 513381 - RNA, 22 nt, Human
gaggggucacaugggcuggcuu

SEQ ID NO: 513382 - RNA, 22 nt, Human
ugccuacauuccuugcuuaugg

SEQ ID NO: 513383 - RNA, 22 nt, Human
ccaggcuggaguguagucgcau

SEQ ID NO: 513384 - RNA, 22 nt, Human
cuggagcaggcuugucccagcu

SEQ ID NO: 513385 - RNA, 22 nt, Human
cacuggugacuucugagcugga

SEQ ID NO: 513386 - RNA, 22 nt, Human
caguacuugggaaugcugggga

SEQ ID NO: 513387 - RNA, 19 nt, Human
uucuaaguuuugcuugcug

SEQ ID NO: 513388 - RNA, 19 nt, Human
uggcaggcccaggauggac

SEQ ID NO: 513389 - RNA, 22 nt, Human
cugggccugugacucccauccu

SEQ ID NO: 513390 - RNA, 22 nt, Human
auggaggaugugcagcaugggc

SEQ ID NO: 513391 - RNA, 22 nt, Human
augggcugaggugggauagaag

SEQ ID NO: 513392 - RNA, 22 nt, Human
agauggagaaugacaauuaagg

SEQ ID NO: 513393 - RNA, 22 nt, Human
uugagggucuggaucugcugcu

SEQ ID NO: 513394 - RNA, 22 nt, Human
cugggggccuuacggaacucca

SEQ ID NO: 513395 - RNA, 22 nt, Human
uagcuccuggugagccuacucu

SEQ ID NO: 513396 - RNA, 22 nt, Human
auaugugugccauuucagcagu

SEQ ID NO: 513397 - RNA, 22 nt, Human
uguacauugucacucaucaagu

SEQ ID NO: 513398 - RNA, 22 nt, Human
uguguacagcaugguccagcag

SEQ ID NO: 513399 - RNA, 22 nt, Human
aacacaguuuuccaaaauagag

SEQ ID NO: 513400 - RNA, 22 nt, Human
ucaaugauaguacaaucagccu

SEQ ID NO: 513401 - RNA, 22 nt, Human
ugcuggggucauggggcgcccg

SEQ ID NO: 513402 - RNA, 22 nt, Human
agugucauuuuguccaucuucu

SEQ ID NO: 513403 - RNA, 22 nt, Human
ccagagaggccuuggcaagaca

SEQ ID NO: 513404 - RNA, 22 nt, Human
acugucugcccugagaugccag

SEQ ID NO: 513405 - RNA, 17 nt, Human
ggugagaccucccacuc

SEQ ID NO: 513406 - RNA, 22 nt, Human
caggaccuggaaugcuugugaa

SEQ ID NO: 513407 - RNA, 20 nt, Human
agaggcuuccuugggaggag

SEQ ID NO: 513408 - RNA, 22 nt, Human
ugcaagagguaaaaugaaagga

SEQ ID NO: 513409 - RNA, 23 nt, Human
aaccagauaaauggcuccagggc

SEQ ID NO: 513410 - RNA, 22 nt, Human
uaggaagcugagcagcauuccu

SEQ ID NO: 513411 - RNA, 22 nt, Human
agucuggaauuuggccugagca

SEQ ID NO: 513412 - RNA, 22 nt, Human
ggaggaccugcuggcccugcaa

SEQ ID NO: 513413 - RNA, 22 nt, Human
caucuggguucucagauggaua

SEQ ID NO: 513414 - RNA, 22 nt, Human
ugcagaaggaggaggaaaucca

SEQ ID NO: 513415 - RNA, 22 nt, Human
caagccagcuccugccacagag

SEQ ID NO: 513416 - RNA, 22 nt, Human
gucccagggagguucagggcuu

SEQ ID NO: 513417 - RNA, 22 nt, Human
ggcacagcacagagcacaugua

SEQ ID NO: 513418 - RNA, 22 nt, Human
uuaaauuccagccucauaauag

SEQ ID NO: 513419 - RNA, 22 nt, Human
ggaaacuuggcauaauuuuaag

SEQ ID NO: 513420 - RNA, 22 nt, Human
ggcucccacccauagggcgagu

SEQ ID NO: 513421 - RNA, 22 nt, Human
ucaguaaaucucuaauuggcau

SEQ ID NO: 513422 - RNA, 22 nt, Human
ugucccagucaaggcugucauc

SEQ ID NO: 513423 - RNA, 16 nt, Human
ucacauacuuccuugc

SEQ ID NO: 513424 - RNA, 22 nt, Human
ucuaggagcaugaagggaaggc

SEQ ID NO: 513425 - RNA, 22 nt, Human
caguacuuuucaaccaguauga

SEQ ID NO: 513426 - RNA, 22 nt, Human
uucucucauucaaauuaaagug

SEQ ID NO: 513427 - RNA, 19 nt, Human
ccagagacauuggcaucuu

SEQ ID NO: 513428 - RNA, 22 nt, Human
uggagcaggcaucuuucucucu

SEQ ID NO: 513429 - RNA, 22 nt, Human
cagagguauuuugauaaacgcc

SEQ ID NO: 513430 - RNA, 22 nt, Human
ccugggcaaaugccagagacaa

SEQ ID NO: 513431 - RNA, 19 nt, Human
agcagccaucgaccaugga

SEQ ID NO: 513432 - RNA, 21 nt, Human
gugcugggacacagccaggcu

SEQ ID NO: 513433 - RNA, 22 nt, Human
cagagcuguuacuauucaugaa

SEQ ID NO: 513434 - RNA, 23 nt, Human
caggcaggaugaggacuacacuc

SEQ ID NO: 513435 - RNA, 22 nt, Human
caggccucccggugcacacuga

SEQ ID NO: 513436 - RNA, 18 nt, Human
ugcuggcaacuacuauug

SEQ ID NO: 513437 - RNA, 22 nt, Human
gaccauuucuaggaaucagacu

SEQ ID NO: 513438 - RNA, 22 nt, Human
ccugccucaggacucugcauau

SEQ ID NO: 513439 - RNA, 22 nt, Human
uagcagaacaauagucaaugau

SEQ ID NO: 513440 - RNA, 22 nt, Human
acuguacauguaaacauuguca

SEQ ID NO: 513441 - RNA, 22 nt, Human
uuucauaauacuguacaugaaa

SEQ ID NO: 513442 - RNA, 22 nt, Human
cuuaacagagagaaguguugcu

SEQ ID NO: 513443 - RNA, 22 nt, Human
acaucccacagaaacauacaua

SEQ ID NO: 513444 - RNA, 22 nt, Human
ugcuggccugguuagaaagggg

SEQ ID NO: 513445 - RNA, 22 nt, Human
uggccugccugggagcagcagg

SEQ ID NO: 513446 - RNA, 22 nt, Human
ucugcccuuggcucucuuguug

SEQ ID NO: 513447 - RNA, 22 nt, Human
ugcagcauuugcugaagcagga

SEQ ID NO: 513448 - RNA, 22 nt, Human
ccugggagggcaagugcugaug

SEQ ID NO: 513449 - RNA, 22 nt, Human
cagcucucacacccuccuccca

SEQ ID NO: 513450 - RNA, 22 nt, Human
gacacauaugcguauaguuuag

SEQ ID NO: 513451 - RNA, 22 nt, Human
gagccaggguuugaaacuagac

SEQ ID NO: 513452 - RNA, 22 nt, Human
gagggggagaugugcacacacu

SEQ ID NO: 513453 - RNA, 22 nt, Human
ccaguguuuucauccucccuug

SEQ ID NO: 513454 - RNA, 18 nt, Human
gccagagguacuacugau

SEQ ID NO: 513455 - RNA, 22 nt, Human
ggcaaaaaguucccaucagugu

SEQ ID NO: 513456 - RNA, 22 nt, Human
uggagucugugaugcucugggu

SEQ ID NO: 513457 - RNA, 22 nt, Human
agaugugagaaucaagugacca

SEQ ID NO: 513458 - RNA, 22 nt, Human
ugaagcccugugucagcuucca

SEQ ID NO: 513459 - RNA, 22 nt, Human
ccugcagaaaggguccccagga

SEQ ID NO: 513460 - RNA, 22 nt, Human
cuuccaaguugcucugcugacc

SEQ ID NO: 513461 - RNA, 22 nt, Human
caggugggaccaugauagggca

SEQ ID NO: 513462 - RNA, 22 nt, Human
accaggcagcacuuuccuugca

SEQ ID NO: 513463 - RNA, 22 nt, Human
accugccagcugagaagggugu

SEQ ID NO: 513464 - RNA, 22 nt, Human
caggguccggcugccuggcugu

SEQ ID NO: 513465 - RNA, 22 nt, Human
gcugccugccuugccuggagga

SEQ ID NO: 513466 - RNA, 22 nt, Human
ggcuucuuccugugaacauguu

SEQ ID NO: 513467 - RNA, 22 nt, Human
caccagcuacagacuacugugu

SEQ ID NO: 513468 - RNA, 22 nt, Human
ugaggaaagaaaggcaugcaug

SEQ ID NO: 513469 - RNA, 22 nt, Human
ugagguaugguaagguaaaauc

SEQ ID NO: 513470 - RNA, 22 nt, Human
gcuccuguuuucuuccagaaau

SEQ ID NO: 513471 - RNA, 22 nt, Human
gaagaggacuguggcauccuag

SEQ ID NO: 513472 - RNA, 18 nt, Human
ugccagccgacuggccug

SEQ ID NO: 513473 - RNA, 22 nt, Human
aaacacugugggacaucuuacu

SEQ ID NO: 513474 - RNA, 22 nt, Human
caaguuuguguucuaucauucu

SEQ ID NO: 513475 - RNA, 22 nt, Human
ugucucugaacagcuuacuaaa

SEQ ID NO: 513476 - RNA, 22 nt, Human
aggaaacuuucuuuugcuucau

SEQ ID NO: 513477 - RNA, 22 nt, Human
uuuuguuuguguccacugcagu

SEQ ID NO: 513478 - RNA, 22 nt, Human
aaagaacaaaugauauaugguu

SEQ ID NO: 513479 - RNA, 23 nt, Human
agaggccagccuuuggagacacc

SEQ ID NO: 513480 - RNA, 22 nt, Human
aaaggccacacagagcagggag

SEQ ID NO: 513481 - RNA, 22 nt, Human
agggccaguucagaggacaugg

SEQ ID NO: 513482 - RNA, 22 nt, Human
uacaggaagcacucaagaaaug

SEQ ID NO: 513483 - RNA, 22 nt, Human
ugggcugcugcggugcucuugg

SEQ ID NO: 513484 - RNA, 22 nt, Human
uccugucugcucacagagcugg

SEQ ID NO: 513485 - RNA, 22 nt, Human
agcacaugcacagugcuacacu

SEQ ID NO: 513486 - RNA, 22 nt, Human
aguuucacagaggguuagacgc

SEQ ID NO: 513487 - RNA, 22 nt, Human
ugucaugcuuauguuacauacu

SEQ ID NO: 513488 - RNA, 19 nt, Human
ggcuggagaaaggaaucag

SEQ ID NO: 513489 - RNA, 22 nt, Human
cggggcugcgcucuuccugccg

SEQ ID NO: 513490 - RNA, 22 nt, Human
aggccuuccucggagacaggga

SEQ ID NO: 513491 - RNA, 22 nt, Human
ucccuggcagcuguccuuucag

SEQ ID NO: 513492 - RNA, 22 nt, Human
uccuggcuuccugcucuuguca

SEQ ID NO: 513493 - RNA, 21 nt, Human
aaggccugcuuacugcuaguu

SEQ ID NO: 513494 - RNA, 16 nt, Human
gagccaggugccuuga

SEQ ID NO: 513495 - RNA, 23 nt, Human
acacagaagaagacccaaggaag

SEQ ID NO: 513496 - RNA, 22 nt, Human
ccugaggcccuggcugugcuga

SEQ ID NO: 513497 - RNA, 22 nt, Human
aaaucugggucaagguggagug

SEQ ID NO: 513498 - RNA, 22 nt, Human
aaagugcugugauuacaggcau

SEQ ID NO: 513499 - RNA, 22 nt, Human
cccaggcagccugcagggaagg

SEQ ID NO: 513500 - RNA, 22 nt, Human
uggccugaggcucggcaugggu

SEQ ID NO: 513501 - RNA, 22 nt, Human
ggagggcucaauugacuccuga

SEQ ID NO: 513502 - RNA, 22 nt, Human
cuucccuuggugaacagagcau

SEQ ID NO: 513503 - RNA, 22 nt, Human
gagcagcuguucugacuugucu

SEQ ID NO: 513504 - RNA, 22 nt, Human
uuucacauuuguuuuaagaagu

SEQ ID NO: 513505 - RNA, 18 nt, Human
ggagccagucugucucug

SEQ ID NO: 513506 - RNA, 22 nt, Human
uuacaagauuaauuauuggagu

SEQ ID NO: 513507 - RNA, 22 nt, Human
ucucuuguaauuuaaaaaaucu

SEQ ID NO: 513508 - RNA, 22 nt, Human
ugauucaauaggaauugaguag

SEQ ID NO: 513509 - RNA, 22 nt, Human
ucucaucugccauuugcaggag

SEQ ID NO: 513510 - RNA, 19 nt, Human
ugccagagauacucccaga

SEQ ID NO: 513511 - RNA, 19 nt, Human
ccugucugucuucagcuag

SEQ ID NO: 513512 - RNA, 22 nt, Human
uucagagaacuucauggaagag

SEQ ID NO: 513513 - RNA, 22 nt, Human
guguggcuaccucagaggagca

SEQ ID NO: 513514 - RNA, 22 nt, Human
gggugaggagcugccagucaug

SEQ ID NO: 513515 - RNA, 22 nt, Human
agucucuggacugggagauggc

SEQ ID NO: 513516 - RNA, 22 nt, Human
acagccagucaucucagcaggg

SEQ ID NO: 513517 - RNA, 22 nt, Human
ugaggcagccugcauuaaagag

SEQ ID NO: 513518 - RNA, 23 nt, Human
aggcacugaaugugucagugagu

SEQ ID NO: 513519 - RNA, 17 nt, Human
agagagagcaugccacc

SEQ ID NO: 513520 - RNA, 23 nt, Human
ugggcaucuccucugugccaggc

SEQ ID NO: 513521 - RNA, 22 nt, Human
uauuccuaagucccaacuacau

SEQ ID NO: 513522 - RNA, 22 nt, Human
auuugcugagcucaaagaaaag

SEQ ID NO: 513523 - RNA, 22 nt, Human
ugugccuggagucccugaggag

SEQ ID NO: 513524 - RNA, 21 nt, Human
uccugcagaaugccuuccuac

SEQ ID NO: 513525 - RNA, 22 nt, Human
aggccagcucacccuggcuccu

SEQ ID NO: 513526 - RNA, 22 nt, Human
uuauucaccgcaggugcuuccc

SEQ ID NO: 513527 - RNA, 22 nt, Human
ugcuccugcugcaugcaucucc

SEQ ID NO: 513528 - RNA, 22 nt, Human
agcugccaaguuucucaguuua

SEQ ID NO: 513529 - RNA, 22 nt, Human
acaguuugaauaauuuagauag

SEQ ID NO: 513530 - RNA, 22 nt, Human
ucugagcauugaauuuucuucc

SEQ ID NO: 513531 - RNA, 22 nt, Human
cugucuguucagauucauuacu

SEQ ID NO: 513532 - RNA, 22 nt, Human
cagcaggguuaagugacucacc

SEQ ID NO: 513533 - RNA, 22 nt, Human
aaaucagucccucuuggaauuu

SEQ ID NO: 513534 - RNA, 22 nt, Human
cccaggcaggagugugguggcu

SEQ ID NO: 513535 - RNA, 22 nt, Human
ccaaggagcucauauucuuguu

SEQ ID NO: 513536 - RNA, 22 nt, Human
aggcugagauagguggaucauu

SEQ ID NO: 513537 - RNA, 22 nt, Human
cgaggcggcggaagugcccgua

SEQ ID NO: 513538 - RNA, 22 nt, Human
aguaugaaaguuaaucaauuua

SEQ ID NO: 513539 - RNA, 22 nt, Human
cacagagcuggaaaggcugggc

SEQ ID NO: 513540 - RNA, 17 nt, Human
aucuggaagcuagcuga

SEQ ID NO: 513541 - RNA, 22 nt, Human
ucagcacugauguuucagaaga

SEQ ID NO: 513542 - RNA, 22 nt, Human
uaacagaaauuuuaguuagggg

SEQ ID NO: 513543 - RNA, 22 nt, Human
ugggaccugcccuggccccauc

SEQ ID NO: 513544 - RNA, 22 nt, Human
cagcagcugcgugcccaggccg

SEQ ID NO: 513545 - RNA, 22 nt, Human
accaugaucugcucugguguuu

SEQ ID NO: 513546 - RNA, 22 nt, Human
cuuccagguucugguugggaag

SEQ ID NO: 513547 - RNA, 22 nt, Human
gaggaacuuaugauauucuacu

SEQ ID NO: 513548 - RNA, 20 nt, Human
uuccacaucuuugcacaugc

SEQ ID NO: 513549 - RNA, 22 nt, Human
aguggcuggacgacaaggguga

SEQ ID NO: 513550 - RNA, 22 nt, Human
ucccuuaaaacucauguguugu

SEQ ID NO: 513551 - RNA, 17 nt, Human
uggggaugguucaugag

SEQ ID NO: 513552 - RNA, 22 nt, Human
gagcuuggugaugccuccuggu

SEQ ID NO: 513553 - RNA, 22 nt, Human
uucuggagacccagcaacaggg

SEQ ID NO: 513554 - RNA, 22 nt, Human
ugaggagcuucuggaaagugca

SEQ ID NO: 513555 - RNA, 22 nt, Human
ucccagggucaguggugaggcc

SEQ ID NO: 513556 - RNA, 22 nt, Human
auggcccaaacugcaauuacuu

SEQ ID NO: 513557 - RNA, 22 nt, Human
gagggagggaaaguuuaacacu

SEQ ID NO: 513558 - RNA, 22 nt, Human
aaaggccacugcaagggaaggu

SEQ ID NO: 513559 - RNA, 22 nt, Human
agggacacaugugauuauuuau

SEQ ID NO: 513560 - RNA, 22 nt, Human
gagcucccaggccccagcaagg

SEQ ID NO: 513561 - RNA, 22 nt, Human
aacaugagcauucuugugcuug

SEQ ID NO: 513562 - RNA, 22 nt, Human
uacuuuuagccuauuugauucu

SEQ ID NO: 513563 - RNA, 22 nt, Human
gaaagaaugcuauagugacuuc

SEQ ID NO: 513564 - RNA, 22 nt, Human
acagcagcgucaacuuaaaauu

SEQ ID NO: 513565 - RNA, 22 nt, Human
ggagaaugauucuuugcucacu

SEQ ID NO: 513566 - RNA, 22 nt, Human
uggagcaggugcucaggguaau

SEQ ID NO: 513567 - RNA, 20 nt, Human
acaaaugcauucugugacau

SEQ ID NO: 513568 - RNA, 22 nt, Human
guucauuuaugauguaacaugu

SEQ ID NO: 513569 - RNA, 22 nt, Human
agucaauucuuuucaacucaag

SEQ ID NO: 513570 - RNA, 22 nt, Human
ugugcagggaagggcaugcuau

SEQ ID NO: 513571 - RNA, 22 nt, Human
agcugccaggccccugagaacc

SEQ ID NO: 513572 - RNA, 17 nt, Human
cuccuggcagccucagg

SEQ ID NO: 513573 - RNA, 22 nt, Human
uuauacauguguuuugagauga

SEQ ID NO: 513574 - RNA, 22 nt, Human
uacagaaaucacaucgcuuuga

SEQ ID NO: 513575 - RNA, 22 nt, Human
auacagaagaacuauagccacu

SEQ ID NO: 513576 - RNA, 18 nt, Human
aaguagaucaugagccac

SEQ ID NO: 513577 - RNA, 22 nt, Human
ggagaaggaauauuggaguagg

SEQ ID NO: 513578 - RNA, 22 nt, Human
acauucuuggacuccacucuag

SEQ ID NO: 513579 - RNA, 22 nt, Human
uagcugcuucucacaugggcaa

SEQ ID NO: 513580 - RNA, 22 nt, Human
ugcuucugauucaugguuauug

SEQ ID NO: 513581 - RNA, 22 nt, Human
uuucacacugcagcaucagaga

SEQ ID NO: 513582 - RNA, 21 nt, Human
uuugaaagcccuauguuuuca

SEQ ID NO: 513583 - RNA, 22 nt, Human
ugagggaguguggauacaguag

SEQ ID NO: 513584 - RNA, 22 nt, Human
cagcccagccgagggccuggcu

SEQ ID NO: 513585 - RNA, 22 nt, Human
gccagagccacuuuugggugau

SEQ ID NO: 513586 - RNA, 22 nt, Human
gccaggcuggucuugaacuccu

SEQ ID NO: 513587 - RNA, 22 nt, Human
caggagagcccggguccgggcu

SEQ ID NO: 513588 - RNA, 22 nt, Human
cuggagccacugggucuuguau

SEQ ID NO: 513589 - RNA, 22 nt, Human
ucagccuuugaagggcugcagg

SEQ ID NO: 513590 - RNA, 18 nt, Human
cggcagagugcuucuagc

SEQ ID NO: 513591 - RNA, 22 nt, Human
uacaaaaaauugauacugacga

SEQ ID NO: 513592 - RNA, 22 nt, Human
cacuguccaugcuugcuaaccc

SEQ ID NO: 513593 - RNA, 22 nt, Human
acucagcugaugaagcacaagu

SEQ ID NO: 513594 - RNA, 22 nt, Human
aagauuauggcagauaacaauu

SEQ ID NO: 513595 - RNA, 22 nt, Human
ucaccacugaacagaccuuugg

SEQ ID NO: 513596 - RNA, 22 nt, Human
guuuauaauccaacucugcucc

SEQ ID NO: 513597 - RNA, 22 nt, Human
agcuggagaucaugcugauacu

SEQ ID NO: 513598 - RNA, 20 nt, Human
aacagggggcugcagagggc

SEQ ID NO: 513599 - RNA, 22 nt, Human
cacagguguaugaauaugucca

SEQ ID NO: 513600 - RNA, 22 nt, Human
gcucugucaacagcuagcugug

SEQ ID NO: 513601 - RNA, 22 nt, Human
uaacagaauccuguuauugcca

SEQ ID NO: 513602 - RNA, 22 nt, Human
guccagugcuuauagaaucagu

SEQ ID NO: 513603 - RNA, 22 nt, Human
acuccuggggauccauuccuuu

SEQ ID NO: 513604 - RNA, 22 nt, Human
uaugcuaauuguuagucacaug

SEQ ID NO: 513605 - RNA, 22 nt, Human
aguagauuuuagauuacauagu

SEQ ID NO: 513606 - RNA, 22 nt, Human
gagggcagagacagugauucac

SEQ ID NO: 513607 - RNA, 22 nt, Human
accugaggaagggcgagaagcu

SEQ ID NO: 513608 - RNA, 22 nt, Human
ggaaagagcccagcagugcuug

SEQ ID NO: 513609 - RNA, 22 nt, Human
gagugcaguuggggugagggga

SEQ ID NO: 513610 - RNA, 22 nt, Human
aaauggaggcaaaauugguuuc

SEQ ID NO: 513611 - RNA, 22 nt, Human
uuguagaacaugcagcacaaug

SEQ ID NO: 513612 - RNA, 22 nt, Human
agaggccccaugggauggcggu

SEQ ID NO: 513613 - RNA, 22 nt, Human
agugaccaaucaugguuagauu

SEQ ID NO: 513614 - RNA, 22 nt, Human
caggaggcccacaggccccugc

SEQ ID NO: 513615 - RNA, 22 nt, Human
cacagcagucuuucacuaaaua

SEQ ID NO: 513616 - RNA, 22 nt, Human
ucuugcuaaagaccaacacauu

SEQ ID NO: 513617 - RNA, 22 nt, Human
ugaagcaguucucagaaguggg

SEQ ID NO: 513618 - RNA, 22 nt, Human
gcccugcucuggucucugcccg

SEQ ID NO: 513619 - RNA, 22 nt, Human
accugccagugaauacuaucuu

SEQ ID NO: 513620 - RNA, 22 nt, Human
uccaaaggggcaguguccagcc

SEQ ID NO: 513621 - RNA, 22 nt, Human
guaaaguucuauuugaauuuag

SEQ ID NO: 513622 - RNA, 21 nt, Human
cccagggaagccgcagucacc

SEQ ID NO: 513623 - RNA, 22 nt, Human
auuuacagacguggauuagugc

SEQ ID NO: 513624 - RNA, 22 nt, Human
gggcuuuaaucuuguuaacuag

SEQ ID NO: 513625 - RNA, 19 nt, Human
uguuucuuccuccaucuga

SEQ ID NO: 513626 - RNA, 22 nt, Human
gagcuuggaugucuuuuguuca

SEQ ID NO: 513627 - RNA, 22 nt, Human
gcagcaggcuuuucauaccuug

SEQ ID NO: 513628 - RNA, 22 nt, Human
uaugaaugcuccaguaacuuuc

SEQ ID NO: 513629 - RNA, 22 nt, Human
gcuguccagagcaugggagcaa

SEQ ID NO: 513630 - RNA, 22 nt, Human
guucugucugagcaccacagga

SEQ ID NO: 513631 - RNA, 22 nt, Human
agaacagaugugggcagaccug

SEQ ID NO: 513632 - RNA, 22 nt, Human
ugcugucccccgugucugggcu

SEQ ID NO: 513633 - RNA, 22 nt, Human
ggccacugccuccgccauggcu

SEQ ID NO: 513634 - RNA, 22 nt, Human
agauuccagaucccaaaaauga

SEQ ID NO: 513635 - RNA, 22 nt, Human
cuggagcuccagggucuccucu

SEQ ID NO: 513636 - RNA, 22 nt, Human
ccuggagguggagguugcagug

SEQ ID NO: 513637 - RNA, 22 nt, Human
auggaaaaggcugauuucauua

SEQ ID NO: 513638 - RNA, 22 nt, Human
ccugggcuugcaucugugcugg

SEQ ID NO: 513639 - RNA, 19 nt, Human
cccaggguuuccucucucc

SEQ ID NO: 513640 - RNA, 22 nt, Human
gaggaagccccauugaagccag

SEQ ID NO: 513641 - RNA, 22 nt, Human
guuagaaacacauucuuauuga

SEQ ID NO: 513642 - RNA, 22 nt, Human
cugcccugcuaaugaguuccaa

SEQ ID NO: 513643 - RNA, 22 nt, Human
aggccugggucucgugccuacc

SEQ ID NO: 513644 - RNA, 22 nt, Human
uccuugaaaggggcugcagggc

SEQ ID NO: 513645 - RNA, 22 nt, Human
aggagugcaaauaguccagaga

SEQ ID NO: 513646 - RNA, 22 nt, Human
uauccuuguacuauaguauuua

SEQ ID NO: 513647 - RNA, 22 nt, Human
aaaauguguuuaugcauuucgu

SEQ ID NO: 513648 - RNA, 22 nt, Human
ucuccucuacugggucugcaga

SEQ ID NO: 513649 - RNA, 22 nt, Human
auacauguucguguacauguuc

SEQ ID NO: 513650 - RNA, 20 nt, Human
gcucugggugguaaaugacu

SEQ ID NO: 513651 - RNA, 22 nt, Human
ucugaggcccugcaggcagugu

SEQ ID NO: 513652 - RNA, 18 nt, Human
cagaaaucacaccagcac

SEQ ID NO: 513653 - RNA, 18 nt, Human
gcugucugaggucugagg

SEQ ID NO: 513654 - RNA, 22 nt, Human
agguuacagucaucucagaauc

SEQ ID NO: 513655 - RNA, 20 nt, Human
gucaggauuaguaaacucug

SEQ ID NO: 513656 - RNA, 22 nt, Human
aggccuggugugccggaugcag

SEQ ID NO: 513657 - RNA, 22 nt, Human
uuuguaaaggccugaauuucag

SEQ ID NO: 513658 - RNA, 22 nt, Human
gaucugguuucaucauggacuu

SEQ ID NO: 513659 - RNA, 22 nt, Human
cagguagaggcugccaucagcu

SEQ ID NO: 513660 - RNA, 20 nt, Human
ugaaggccauuuguuccaga

SEQ ID NO: 513661 - RNA, 18 nt, Human
uuucacaaccuccagagg

SEQ ID NO: 513662 - RNA, 22 nt, Human
cuucacaggcaagucuguuuuu

SEQ ID NO: 513663 - RNA, 20 nt, Human
caggcacacucauuccugcu

SEQ ID NO: 513664 - RNA, 22 nt, Human
aacaugaaaaccuccacagcaa

SEQ ID NO: 513665 - RNA, 22 nt, Human
ucaaaugcggucauggcuuuua

SEQ ID NO: 513666 - RNA, 22 nt, Human
uucacaggugacuggggauaac

SEQ ID NO: 513667 - RNA, 22 nt, Human
ccacagcugaccgcaggugagc

SEQ ID NO: 513668 - RNA, 22 nt, Human
gcaccacaucaaugaggggagc

SEQ ID NO: 513669 - RNA, 22 nt, Human
uggcucuguucgccaucaggag

SEQ ID NO: 513670 - RNA, 22 nt, Human
cagagguagaacuggcccucac

SEQ ID NO: 513671 - RNA, 20 nt, Human
accugaggucccuauggucu

SEQ ID NO: 513672 - RNA, 22 nt, Human
uuucaaagagaggcagaaggaa

SEQ ID NO: 513673 - RNA, 22 nt, Human
uggggcuggcuauugucucccu

SEQ ID NO: 513674 - RNA, 22 nt, Human
gcucugcugaagccccuugcau

SEQ ID NO: 513675 - RNA, 17 nt, Human
acacagccagguucucc

SEQ ID NO: 513676 - RNA, 19 nt, Human
gcuggcuggaggagggaca

SEQ ID NO: 513677 - RNA, 22 nt, Human
uguacagagacuaccauuaaua

SEQ ID NO: 513678 - RNA, 19 nt, Human
ugguccagcuucuucuccu

SEQ ID NO: 513679 - RNA, 22 nt, Human
caagaugggcaccccagcaccu

SEQ ID NO: 513680 - RNA, 22 nt, Human
cauuuguuggucagauuguagu

SEQ ID NO: 513681 - RNA, 22 nt, Human
ugccuacccaugguuagacaua

SEQ ID NO: 513682 - RNA, 22 nt, Human
uauuucugauugcucaugaggc

SEQ ID NO: 513683 - RNA, 22 nt, Human
cccucugccugcgcccuggugu

SEQ ID NO: 513684 - RNA, 22 nt, Human
ucaguuuuuacggucacaggga

SEQ ID NO: 513685 - RNA, 22 nt, Human
gcagggcaugggcccugucugc

SEQ ID NO: 513686 - RNA, 22 nt, Human
cucuucuuauggccguggcuga

SEQ ID NO: 513687 - RNA, 22 nt, Human
ugguccagucguuccuuuccuu

SEQ ID NO: 513688 - RNA, 20 nt, Human
gcccuggagccuuguccugg

SEQ ID NO: 513689 - RNA, 20 nt, Human
ccugaggguuuguguucuuu

SEQ ID NO: 513690 - RNA, 22 nt, Human
cuucacaaauggccuagaguuc

SEQ ID NO: 513691 - RNA, 22 nt, Human
cuucuaggcuucucagggggca

SEQ ID NO: 513692 - RNA, 22 nt, Human
guauuagcugccuuggagcuaa

SEQ ID NO: 513693 - RNA, 22 nt, Human
cuggcagcauggagccugugcu

SEQ ID NO: 513694 - RNA, 22 nt, Human
uccagccacucagcagggauug

SEQ ID NO: 513695 - RNA, 22 nt, Human
uccagcagaaaagagguaggga

SEQ ID NO: 513696 - RNA, 22 nt, Human
uuaauaauaaugagcccauuuu

SEQ ID NO: 513697 - RNA, 22 nt, Human
cagcagggcccccgggugcgcc

SEQ ID NO: 513698 - RNA, 22 nt, Human
uggaaagugagacauauuuaua

SEQ ID NO: 513699 - RNA, 17 nt, Human
gggcuuuagguggugua

SEQ ID NO: 513700 - RNA, 22 nt, Human
uccaggauugcaggugcacaac

SEQ ID NO: 513701 - RNA, 22 nt, Human
cacugaaauauuaauaucuuau

SEQ ID NO: 513702 - RNA, 22 nt, Human
cagaguccuggacacagagaca

SEQ ID NO: 513703 - RNA, 22 nt, Human
agccccugggaguagcugcugc

SEQ ID NO: 513704 - RNA, 22 nt, Human
aggcagcugaggucuggcgccc

SEQ ID NO: 513705 - RNA, 22 nt, Human
ucagcacuuacuaguggccuuu

SEQ ID NO: 513706 - RNA, 22 nt, Human
aguaaaaucaccaucucuuugu

SEQ ID NO: 513707 - RNA, 22 nt, Human
uuaaaugacgggacuggguuuu

SEQ ID NO: 513708 - RNA, 20 nt, Human
gcuguggcaaagcuuugugu

SEQ ID NO: 513709 - RNA, 22 nt, Human
ccagagcuaaacacacaggcug

SEQ ID NO: 513710 - RNA, 17 nt, Human
aaggccauuuccaccca

SEQ ID NO: 513711 - RNA, 22 nt, Human
ucugucuuugagaucucagccu

SEQ ID NO: 513712 - RNA, 22 nt, Human
ccuguacauggccaucuuuacc

SEQ ID NO: 513713 - RNA, 22 nt, Human
gcaaaugcucuccuuggucagg

SEQ ID NO: 513714 - RNA, 23 nt, Human
agacagaggcugaggcuggccgc

SEQ ID NO: 513715 - RNA, 22 nt, Human
ugccucugaggaagauuguguu

SEQ ID NO: 513716 - RNA, 22 nt, Human
gcagaggccuagguggaaggcc

SEQ ID NO: 513717 - RNA, 22 nt, Human
cccaagggagugccuggucaac

SEQ ID NO: 513718 - RNA, 17 nt, Human
agauggccucuaagauu

SEQ ID NO: 513719 - RNA, 22 nt, Human
auuuucuguaacuauuucuaua

SEQ ID NO: 513720 - RNA, 22 nt, Human
ccugucuggaacauggccuguu

SEQ ID NO: 513721 - RNA, 22 nt, Human
ugcacccucaucagucaaaugg

SEQ ID NO: 513722 - RNA, 22 nt, Human
cagaggcaggauaagaacugcg

SEQ ID NO: 513723 - RNA, 22 nt, Human
aaauccuaauaaugcacuagug

SEQ ID NO: 513724 - RNA, 22 nt, Human
aaguaacuuauuugcaaacagg

SEQ ID NO: 513725 - RNA, 22 nt, Human
caagggaccugagauggucucu

SEQ ID NO: 513726 - RNA, 22 nt, Human
caggaacaauguaagucucauu

SEQ ID NO: 513727 - RNA, 20 nt, Human
gcugccagugccugaugcuu

SEQ ID NO: 513728 - RNA, 22 nt, Human
agggccagaggcaccuugcagc

SEQ ID NO: 513729 - RNA, 22 nt, Human
acccugagaaagucacaugcau

SEQ ID NO: 513730 - RNA, 22 nt, Human
agggcuccaggggcugggugac

SEQ ID NO: 513731 - RNA, 22 nt, Human
agcaucuggucaugagugagaa

SEQ ID NO: 513732 - RNA, 22 nt, Human
ggccagagagccgcuguuagga

SEQ ID NO: 513733 - RNA, 20 nt, Human
uccugcagucgcuagcgccc

SEQ ID NO: 513734 - RNA, 22 nt, Human
aaacaguuuauaacaugauacu

SEQ ID NO: 513735 - RNA, 22 nt, Human
cagcucucuaaggucuugcuuu

SEQ ID NO: 513736 - RNA, 22 nt, Human
cugggccugguagggcuugaaa

SEQ ID NO: 513737 - RNA, 22 nt, Human
cugggccaguuaugucucaucu

SEQ ID NO: 513738 - RNA, 22 nt, Human
acaguccuguacaggccauauc

SEQ ID NO: 513739 - RNA, 22 nt, Human
cagacagcugcuuucuugcugu

SEQ ID NO: 513740 - RNA, 22 nt, Human
ccagcuaguaagcaccugcauc

SEQ ID NO: 513741 - RNA, 22 nt, Human
caucagcaggcaacacucuugg

SEQ ID NO: 513742 - RNA, 22 nt, Human
aaguucaagcucugccuaaaau

SEQ ID NO: 513743 - RNA, 16 nt, Human
aaggcugauuuucccu

SEQ ID NO: 513744 - RNA, 22 nt, Human
gguggauagguacauggacuuu

SEQ ID NO: 513745 - RNA, 22 nt, Human
ucuguaucuaauuuuacaguag

SEQ ID NO: 513746 - RNA, 22 nt, Human
ugcagcugggucugcccuggcu

SEQ ID NO: 513747 - RNA, 22 nt, Human
uaauauuucuacccugcugccu

SEQ ID NO: 513748 - RNA, 22 nt, Human
ugugggaggucuggaaggcucc

SEQ ID NO: 513749 - RNA, 22 nt, Human
gggaggcuggcucuggccacag

SEQ ID NO: 513750 - RNA, 22 nt, Human
cagugccaugucugagccccua

SEQ ID NO: 513751 - RNA, 22 nt, Human
ggcugccuucccugagccccgg

SEQ ID NO: 513752 - RNA, 19 nt, Human
ucccuuccugucgggcucc

SEQ ID NO: 513753 - RNA, 21 nt, Human
agggccugugcucuccagguc

SEQ ID NO: 513754 - RNA, 22 nt, Human
ggucagugcgauuucccacucc

SEQ ID NO: 513755 - RNA, 20 nt, Human
uuggaugugcauggccgugc

SEQ ID NO: 513756 - RNA, 22 nt, Human
ccucagggacuccaugcugcag

SEQ ID NO: 513757 - RNA, 22 nt, Human
ggaagacaagcaguggcugagc

SEQ ID NO: 513758 - RNA, 22 nt, Human
uccaaauauuaugauuauagga

SEQ ID NO: 513759 - RNA, 22 nt, Human
gggagcaggacauaauagcaau

SEQ ID NO: 513760 - RNA, 22 nt, Human
uucagugugccuaagucaguug

SEQ ID NO: 513761 - RNA, 22 nt, Human
cccuccagccauggacccaggu

SEQ ID NO: 513762 - RNA, 22 nt, Human
gcuggggagggcgucaaggcca

SEQ ID NO: 513763 - RNA, 22 nt, Human
guagggacccacagucuauauu

SEQ ID NO: 513764 - RNA, 22 nt, Human
gaggcuagauguuugcugggag

SEQ ID NO: 513765 - RNA, 22 nt, Human
cuuaagaauauugaaguugugg

SEQ ID NO: 513766 - RNA, 22 nt, Human
agccugucugucuccaaagcug

SEQ ID NO: 513767 - RNA, 22 nt, Human
gaggaggcuaagugggcucugg

SEQ ID NO: 513768 - RNA, 22 nt, Human
ggguuccagucugaaacuacag

SEQ ID NO: 513769 - RNA, 22 nt, Human
acugccuugucucuugccuguu

SEQ ID NO: 513770 - RNA, 22 nt, Human
gaagagcugugauucaggcuua

SEQ ID NO: 513771 - RNA, 22 nt, Human
ccuucaggucauauaugucaga

SEQ ID NO: 513772 - RNA, 22 nt, Human
ccuccuggcccugggccuggaa

SEQ ID NO: 513773 - RNA, 22 nt, Human
cccuagaacacgcagacacuga

SEQ ID NO: 513774 - RNA, 22 nt, Human
cagcacaugcucaucagggaag

SEQ ID NO: 513775 - RNA, 22 nt, Human
aaagccuugagauccuauaguu

SEQ ID NO: 513776 - RNA, 22 nt, Human
uagaaaugauugguugagcucu

SEQ ID NO: 513777 - RNA, 22 nt, Human
ucaggccucaagcugcuuuaag

SEQ ID NO: 513778 - RNA, 22 nt, Human
uggcucagcaagacauugaccu

SEQ ID NO: 513779 - RNA, 22 nt, Human
uccacagcacaaagccagugug

SEQ ID NO: 513780 - RNA, 19 nt, Human
uugguggugguuuugguuc

SEQ ID NO: 513781 - RNA, 22 nt, Human
ucauucagguugggcaaguguc

SEQ ID NO: 513782 - RNA, 19 nt, Human
cagagccucagagcuagaa

SEQ ID NO: 513783 - RNA, 22 nt, Human
aguggcaggaaaguggaagaga

SEQ ID NO: 513784 - RNA, 22 nt, Human
acaggccugagauuuugcauuu

SEQ ID NO: 513785 - RNA, 22 nt, Human
gugggggcuggaaaucuugcca

SEQ ID NO: 513786 - RNA, 22 nt, Human
guccucuggccuuucccaggac

SEQ ID NO: 513787 - RNA, 22 nt, Human
cagcuccugccugggcagcugu

SEQ ID NO: 513788 - RNA, 22 nt, Human
gggaccaggugggugcauuccg

SEQ ID NO: 513789 - RNA, 22 nt, Human
uggcugaggucuggggcuucug

SEQ ID NO: 513790 - RNA, 22 nt, Human
agcaguuauauuacucucaggu

SEQ ID NO: 513791 - RNA, 22 nt, Human
uuccucagacccucauugugag

SEQ ID NO: 513792 - RNA, 22 nt, Human
cccaggaggucgaagcugcagu

SEQ ID NO: 513793 - RNA, 22 nt, Human
cccagaaggucgaggcugcagu

SEQ ID NO: 513794 - RNA, 22 nt, Human
agaagcugcguuuauuuaaauc

SEQ ID NO: 513795 - RNA, 22 nt, Human
gccuggcugcuagccagaggca

SEQ ID NO: 513796 - RNA, 22 nt, Human
auuauuaggacuacugggguug

SEQ ID NO: 513797 - RNA, 22 nt, Human
ggugcccagagccaggaaugag

SEQ ID NO: 513798 - RNA, 22 nt, Human
agauuuguaugucuaaauguaa

SEQ ID NO: 513799 - RNA, 20 nt, Human
uagggcucauuaugaucucc

SEQ ID NO: 513800 - RNA, 22 nt, Human
agcuccuccugugccaggccag

SEQ ID NO: 513801 - RNA, 22 nt, Human
ccuggcugcuuucacuauggag

SEQ ID NO: 513802 - RNA, 23 nt, Human
cuuuuaacuugaucugagaccag

SEQ ID NO: 513803 - RNA, 22 nt, Human
aacuuguuagaaaugcagaauc

SEQ ID NO: 513804 - RNA, 18 nt, Human
ccuggcagccaugcgcgc

SEQ ID NO: 513805 - RNA, 22 nt, Human
aaggcgacacaggcagcaggcc

SEQ ID NO: 513806 - RNA, 22 nt, Human
gccuggcugucuggcaagguuc

SEQ ID NO: 513807 - RNA, 22 nt, Human
agccuggagaggcgccauacac

SEQ ID NO: 513808 - RNA, 22 nt, Human
agggaccugucaaugacaguua

SEQ ID NO: 513809 - RNA, 21 nt, Human
ucugggcugcugcugcccauc

SEQ ID NO: 513810 - RNA, 22 nt, Human
gagggugguggcuuaaggugcu

SEQ ID NO: 513811 - RNA, 22 nt, Human
ucagcacugaaucuggauuugc

SEQ ID NO: 513812 - RNA, 22 nt, Human
augcccugaaagauucaaaggc

SEQ ID NO: 513813 - RNA, 22 nt, Human
uggugcaagucucugaggaggg

SEQ ID NO: 513814 - RNA, 22 nt, Human
ugggcugagcagugaagcucau

SEQ ID NO: 513815 - RNA, 22 nt, Human
gcugaggcugggagcagccugu

SEQ ID NO: 513816 - RNA, 22 nt, Human
gaaauugucagcuucuuucagu

SEQ ID NO: 513817 - RNA, 22 nt, Human
auuuccaugaaggcagauuuua

SEQ ID NO: 513818 - RNA, 22 nt, Human
uaauuucuggagggagaaagag

SEQ ID NO: 513819 - RNA, 22 nt, Human
cuucugugcuucacaguugcca

SEQ ID NO: 513820 - RNA, 22 nt, Human
ucucaguguggugcuuaggaua

SEQ ID NO: 513821 - RNA, 22 nt, Human
guccugucccccaaggcugugg

SEQ ID NO: 513822 - RNA, 22 nt, Human
aagaacuuccuaauauauuuuc

SEQ ID NO: 513823 - RNA, 23 nt, Human
aucaagucaucagcaaaauacau

SEQ ID NO: 513824 - RNA, 20 nt, Human
ugggccugagccugugggcu

SEQ ID NO: 513825 - RNA, 22 nt, Human
uggcccagaucucugaccuuga

SEQ ID NO: 513826 - RNA, 22 nt, Human
aggauccuguauggagaagcug

SEQ ID NO: 513827 - RNA, 21 nt, Human
ugcaggcuguuuaagaggcaa

SEQ ID NO: 513828 - RNA, 22 nt, Human
gcuauugugacagcuuuucgcc

SEQ ID NO: 513829 - RNA, 22 nt, Human
gccccugggagcagagccacca

SEQ ID NO: 513830 - RNA, 22 nt, Human
aggagaggcaucaagaaaaucg

SEQ ID NO: 513831 - RNA, 22 nt, Human
uccaggcaucccccaggacaga

SEQ ID NO: 513832 - RNA, 18 nt, Human
uggcucuggacuugcucc

SEQ ID NO: 513833 - RNA, 22 nt, Human
uguaacacucaaucuguuuaac

SEQ ID NO: 513834 - RNA, 21 nt, Human
acacacucugagucuucuauu

SEQ ID NO: 513835 - RNA, 22 nt, Human
gaaaugauuuuaguuuaucaug

SEQ ID NO: 513836 - RNA, 22 nt, Human
cagagccuuccuagcagacucu

SEQ ID NO: 513837 - RNA, 22 nt, Human
cuuuucaugagucuguuauggg

SEQ ID NO: 513838 - RNA, 21 nt, Human
gcaggcuggucaaaccucagu

SEQ ID NO: 513839 - RNA, 22 nt, Human
aguccuggcucuacgggcuuca

SEQ ID NO: 513840 - RNA, 22 nt, Human
gggcuggaucuccugcaggcag

SEQ ID NO: 513841 - RNA, 22 nt, Human
cugggaggauacacaagaucag

SEQ ID NO: 513842 - RNA, 20 nt, Human
ggcagagggccugggagaag

SEQ ID NO: 513843 - RNA, 22 nt, Human
ucaccuaauugaagucaggagu

SEQ ID NO: 513844 - RNA, 22 nt, Human
auguaugaugcuaggcucucag

SEQ ID NO: 513845 - RNA, 22 nt, Human
guguacaguaagugaaucuagg

SEQ ID NO: 513846 - RNA, 22 nt, Human
aaggcacuagcagaauuaguga

SEQ ID NO: 513847 - RNA, 22 nt, Human
uccaggcagcccuuccugacuc

SEQ ID NO: 513848 - RNA, 22 nt, Human
gcucuuugcacagcucugcccu

SEQ ID NO: 513849 - RNA, 22 nt, Human
ugcacagcgggugucugucagg

SEQ ID NO: 513850 - RNA, 22 nt, Human
uucacugaauuaauuuccuucu

SEQ ID NO: 513851 - RNA, 22 nt, Human
guuucacagauggggagacacg

SEQ ID NO: 513852 - RNA, 22 nt, Human
aaagguuugcauggaauuuacc

SEQ ID NO: 513853 - RNA, 22 nt, Human
agaguguaauaagggcaagggc

SEQ ID NO: 513854 - RNA, 22 nt, Human
gagcagcugugggguugaccau

SEQ ID NO: 513855 - RNA, 22 nt, Human
aguuauucauuuauucuguaca

SEQ ID NO: 513856 - RNA, 22 nt, Human
ucugaggcauaaccuguucugc

SEQ ID NO: 513857 - RNA, 22 nt, Human
cuguggcugccucaccuacagg

SEQ ID NO: 513858 - RNA, 19 nt, Human
gugaggauacugcucagag

SEQ ID NO: 513859 - RNA, 22 nt, Human
gaggucagucagaccaggguuu

SEQ ID NO: 513860 - RNA, 22 nt, Human
agggcccuccccgcucagggca

SEQ ID NO: 513861 - RNA, 22 nt, Human
agggacagaugaaugacugagu

SEQ ID NO: 513862 - RNA, 22 nt, Human
cacaagagagugcgcguugcaa

SEQ ID NO: 513863 - RNA, 17 nt, Human
cagggcugucugccuag

SEQ ID NO: 513864 - RNA, 22 nt, Human
agauacaugucaagagacuuau

SEQ ID NO: 513865 - RNA, 22 nt, Human
ggccacauguggcugcucguau

SEQ ID NO: 513866 - RNA, 22 nt, Human
aagacuuucucccaaauccuca

SEQ ID NO: 513867 - RNA, 22 nt, Human
cuuuauuagauguagacuuucu

SEQ ID NO: 513868 - RNA, 22 nt, Human
ucucuggguauucacugccuuc

SEQ ID NO: 513869 - RNA, 22 nt, Human
aucuauuaugcugagaaacugu

SEQ ID NO: 513870 - RNA, 22 nt, Human
gcucugcugucuucuugcaggc

SEQ ID NO: 513871 - RNA, 22 nt, Human
uccagucauuuccauuguuccc

SEQ ID NO: 513872 - RNA, 22 nt, Human
gaugugggguugagggaccagc

SEQ ID NO: 513873 - RNA, 22 nt, Human
gauggagucugaagcugggaac

SEQ ID NO: 513874 - RNA, 19 nt, Human
gagcacagcggcauuuggu

SEQ ID NO: 513875 - RNA, 19 nt, Human
uccugggcugcgucuugcc

SEQ ID NO: 513876 - RNA, 22 nt, Human
aggcacugaagugguaaaugua

SEQ ID NO: 513877 - RNA, 22 nt, Human
gaggaaaauggaguguaauuaa

SEQ ID NO: 513878 - RNA, 20 nt, Human
acagcagauaccacaacuau

SEQ ID NO: 513879 - RNA, 22 nt, Human
ugaagcaaacgcuucuguuccu

SEQ ID NO: 513880 - RNA, 22 nt, Human
ucucagcacguuguuuucauug

SEQ ID NO: 513881 - RNA, 21 nt, Human
agaaaaguagaguuuucagag

SEQ ID NO: 513882 - RNA, 22 nt, Human
ggcagugacuguucagacgucc

SEQ ID NO: 513883 - RNA, 22 nt, Human
gcuggcagguccaagauagagc

SEQ ID NO: 513884 - RNA, 22 nt, Human
caguagcacuagauaugugugg

SEQ ID NO: 513885 - RNA, 22 nt, Human
gcuggcaggguucucacugaaa

SEQ ID NO: 513886 - RNA, 22 nt, Human
cacuucagcuacaaucacauga

SEQ ID NO: 513887 - RNA, 22 nt, Human
cugcccagaaucacucacucga

SEQ ID NO: 513888 - RNA, 22 nt, Human
ccagagccccugagcuucccug

SEQ ID NO: 513889 - RNA, 22 nt, Human
ucuguggcccaagugauggcug

SEQ ID NO: 513890 - RNA, 22 nt, Human
cagccccucccucaggcaggug

SEQ ID NO: 513891 - RNA, 22 nt, Human
uuagcauucucugugugcauaa

SEQ ID NO: 513892 - RNA, 23 nt, Human
uggccucuccccaccuggcagaa

SEQ ID NO: 513893 - RNA, 22 nt, Human
auauuucuggggguguguuucu

SEQ ID NO: 513894 - RNA, 22 nt, Human
uccugggguguguuuugcugcu

SEQ ID NO: 513895 - RNA, 22 nt, Human
caggcuccuuaucuuacaacuu

SEQ ID NO: 513896 - RNA, 22 nt, Human
agcagcuguggggacaagggua

SEQ ID NO: 513897 - RNA, 19 nt, Human
uggcuccugccugccuucu

SEQ ID NO: 513898 - RNA, 22 nt, Human
caugaguuuuuuaguucaugca

SEQ ID NO: 513899 - RNA, 22 nt, Human
uuugcauugcauuaaguauucu

SEQ ID NO: 513900 - RNA, 22 nt, Human
gccagcagguugucaaggagcu

SEQ ID NO: 513901 - RNA, 22 nt, Human
cagcaauaguguguuuguuuca

SEQ ID NO: 513902 - RNA, 22 nt, Human
gcucagggaacuuuuugcaggc

SEQ ID NO: 513903 - RNA, 22 nt, Human
gacagcagagcagacuaaugga

SEQ ID NO: 513904 - RNA, 22 nt, Human
ggagacaggguugaaccacgca

SEQ ID NO: 513905 - RNA, 22 nt, Human
aaagccagaguguguuagagac

SEQ ID NO: 513906 - RNA, 22 nt, Human
uucugaagggcuaagugucuau

SEQ ID NO: 513907 - RNA, 22 nt, Human
auggaagacuaacagaaacaug

SEQ ID NO: 513908 - RNA, 22 nt, Human
aguggcagaagucacuggguag

SEQ ID NO: 513909 - RNA, 22 nt, Human
ggugccuguauuuggggcacag

SEQ ID NO: 513910 - RNA, 22 nt, Human
uaagaugucuaagaggagaugc

SEQ ID NO: 513911 - RNA, 22 nt, Human
gcugagagaaaagugagguucu

SEQ ID NO: 513912 - RNA, 22 nt, Human
caguuucuuaucuucaaaauug

SEQ ID NO: 513913 - RNA, 21 nt, Human
ugaaugcuucgucauccuggc

SEQ ID NO: 513914 - RNA, 22 nt, Human
gaggccuggaauuccagccugg

SEQ ID NO: 513915 - RNA, 21 nt, Human
acagcaagccuuccuuucagg

SEQ ID NO: 513916 - RNA, 22 nt, Human
cuggggcucacuuuggucaggc

SEQ ID NO: 513917 - RNA, 22 nt, Human
uuccauaauuaaguggagagaa

SEQ ID NO: 513918 - RNA, 22 nt, Human
gguuccaggcauggcaggaugu

SEQ ID NO: 513919 - RNA, 19 nt, Human
ugucacugucauggcccag

SEQ ID NO: 513920 - RNA, 19 nt, Human
cagagcugcuggccucguc

SEQ ID NO: 513921 - RNA, 22 nt, Human
cugggcuugaguuccugcucgu

SEQ ID NO: 513922 - RNA, 22 nt, Human
cuuaaauuggaugaguuaaguu

SEQ ID NO: 513923 - RNA, 22 nt, Human
augcaguauaaaucauuucugg

SEQ ID NO: 513924 - RNA, 22 nt, Human
ccccucucccucacuuaucaau

SEQ ID NO: 513925 - RNA, 22 nt, Human
aggcugggaagguaaaguugua

SEQ ID NO: 513926 - RNA, 22 nt, Human
gacccagcuaaccaggugggga

SEQ ID NO: 513927 - RNA, 22 nt, Human
auguacauuuuccuaauguuuu

SEQ ID NO: 513928 - RNA, 21 nt, Human
accaucuuccaugcauuauau

SEQ ID NO: 513929 - RNA, 22 nt, Human
auuucaguagaaaaucuugauu

SEQ ID NO: 513930 - RNA, 22 nt, Human
auaucacaaacaagucuguacu

SEQ ID NO: 513931 - RNA, 22 nt, Human
cuuucacacacauacauuugga

SEQ ID NO: 513932 - RNA, 22 nt, Human
cuuguuaaauuauauaagcaga

SEQ ID NO: 513933 - RNA, 22 nt, Human
gagacacaguuaucaggcauac

SEQ ID NO: 513934 - RNA, 22 nt, Human
agguacaguagacagacaguua

SEQ ID NO: 513935 - RNA, 22 nt, Human
gccuggcugggcaccaggggag

SEQ ID NO: 513936 - RNA, 22 nt, Human
gaggggaguguccuccgggccc

SEQ ID NO: 513937 - RNA, 22 nt, Human
auaaucaaaguccuaugacauc

SEQ ID NO: 513938 - RNA, 22 nt, Human
ugcugaaugcugcaugccguau

SEQ ID NO: 513939 - RNA, 22 nt, Human
ugucuuuuaccuaaugagcugg

SEQ ID NO: 513940 - RNA, 22 nt, Human
gacccagcuuaagucacauguu

SEQ ID NO: 513941 - RNA, 22 nt, Human
aaaugcagguucuugagccaag

SEQ ID NO: 513942 - RNA, 22 nt, Human
ccugcaggggagagacuucuag

SEQ ID NO: 513943 - RNA, 22 nt, Human
aggacaguccgggguccuccac

SEQ ID NO: 513944 - RNA, 22 nt, Human
ggccggggccuccccgcgucgc

SEQ ID NO: 513945 - RNA, 22 nt, Human
uuuaauauucugcauucuccuu

SEQ ID NO: 513946 - RNA, 22 nt, Human
ggcaggugcccagagagcacga

SEQ ID NO: 513947 - RNA, 22 nt, Human
caguuucuacgaaggucaaccc

SEQ ID NO: 513948 - RNA, 20 nt, Human
uccuaauaaccugaagaaau

SEQ ID NO: 513949 - RNA, 22 nt, Human
ucugggcuuggauuggcucugc

SEQ ID NO: 513950 - RNA, 22 nt, Human
gcagcugccccgacugugaguc

SEQ ID NO: 513951 - RNA, 22 nt, Human
gggauggaggguagagcaagug

SEQ ID NO: 513952 - RNA, 18 nt, Human
uuaagagcugaaagggga

SEQ ID NO: 513953 - RNA, 22 nt, Human
aaaugcaccuugcugugagacu

SEQ ID NO: 513954 - RNA, 22 nt, Human
ccuggggcucaagauggcgccg

SEQ ID NO: 513955 - RNA, 22 nt, Human
cuacauuaaauuggcuuacuua

SEQ ID NO: 513956 - RNA, 22 nt, Human
acugccugccuuccagguacug

SEQ ID NO: 513957 - RNA, 22 nt, Human
cucagagaaaaggagcaagggu

SEQ ID NO: 513958 - RNA, 22 nt, Human
aggacagaccuaggacuggagc

SEQ ID NO: 513959 - RNA, 22 nt, Human
aaaggcuccuucucccaugacc

SEQ ID NO: 513960 - RNA, 22 nt, Human
ccagugcaggugagcaccaggu

SEQ ID NO: 513961 - RNA, 22 nt, Human
auccagcuuugucuggucuucg

SEQ ID NO: 513962 - RNA, 22 nt, Human
ggagacagcaggaagaaauauc

SEQ ID NO: 513963 - RNA, 22 nt, Human
uaccugagcccagugcagcaua

SEQ ID NO: 513964 - RNA, 22 nt, Human
uucuuucagaacacaagugauu

SEQ ID NO: 513965 - RNA, 22 nt, Human
caggggccaggcugucugcugu

SEQ ID NO: 513966 - RNA, 22 nt, Human
uccuucagggggccgccugcac

SEQ ID NO: 513967 - RNA, 20 nt, Human
ucuggggaugaggucuagga

SEQ ID NO: 513968 - RNA, 22 nt, Human
ggcagcaguccauggcccaagg

SEQ ID NO: 513969 - RNA, 22 nt, Human
uagggcucuggugggcucuguu

SEQ ID NO: 513970 - RNA, 22 nt, Human
uguggcugcucaggugcagacc

SEQ ID NO: 513971 - RNA, 22 nt, Human
augaggcauuccacucaaacuc

SEQ ID NO: 513972 - RNA, 22 nt, Human
gaccacagcuacaagggcaagg

SEQ ID NO: 513973 - RNA, 21 nt, Human
uguggcugccucuggcccugg

SEQ ID NO: 513974 - RNA, 22 nt, Human
gcugauccuuuuaugucuagcu

SEQ ID NO: 513975 - RNA, 22 nt, Human
cugugucuucugcuuacagucu

SEQ ID NO: 513976 - RNA, 22 nt, Human
ucaggaauccagacagggcaca

SEQ ID NO: 513977 - RNA, 22 nt, Human
uugauuaaucccaugugaguag

SEQ ID NO: 513978 - RNA, 22 nt, Human
cagggcagcuuccuuuguuagg

SEQ ID NO: 513979 - RNA, 22 nt, Human
uugcccugucaguagaagugca

SEQ ID NO: 513980 - RNA, 22 nt, Human
uggagcuggaagacagugauau

SEQ ID NO: 513981 - RNA, 22 nt, Human
uuguccugauuuugcaacuucu

SEQ ID NO: 513982 - RNA, 22 nt, Human
aucuggaacaaagcuuaggaau

SEQ ID NO: 513983 - RNA, 22 nt, Human
aaauacauacacuguacguggc

SEQ ID NO: 513984 - RNA, 18 nt, Human
aggaaagaaaggcaggug

SEQ ID NO: 513985 - RNA, 22 nt, Human
ccuggcagacugugagggcagg

SEQ ID NO: 513986 - RNA, 22 nt, Human
ucugcaggaggcuggcugcagg

SEQ ID NO: 513987 - RNA, 22 nt, Human
uggagcaggccggaaguggcuu

SEQ ID NO: 513988 - RNA, 22 nt, Human
cuguggugagcaacugacugaa

SEQ ID NO: 513989 - RNA, 22 nt, Human
guaacugaggcagcuuuuaaga

SEQ ID NO: 513990 - RNA, 22 nt, Human
uaaaugaguaauauagcuguuu

SEQ ID NO: 513991 - RNA, 19 nt, Human
cugggucuuauucugugaa

SEQ ID NO: 513992 - RNA, 22 nt, Human
ggguccagaguugaagagguua

SEQ ID NO: 513993 - RNA, 22 nt, Human
caucuugacugggauaagggau

SEQ ID NO: 513994 - RNA, 22 nt, Human
caaaugauacuguuuuuagucu

SEQ ID NO: 513995 - RNA, 22 nt, Human
uacccagcaaucccuagagguu

SEQ ID NO: 513996 - RNA, 22 nt, Human
aaaggugacugcagcagcuauu

SEQ ID NO: 513997 - RNA, 22 nt, Human
guguacaugagaaaucaacuuu

SEQ ID NO: 513998 - RNA, 22 nt, Human
ccaguguucaguaugcauuaag

SEQ ID NO: 513999 - RNA, 22 nt, Human
ucaacacucuuuggcacaguua

SEQ ID NO: 514000 - RNA, 22 nt, Human
ccuggagcuuuuccauccugga

SEQ ID NO: 514001 - RNA, 22 nt, Human
uccugggaacucggaaagcucu

SEQ ID NO: 514002 - RNA, 22 nt, Human
aaggagucugggccauucagag

SEQ ID NO: 514003 - RNA, 22 nt, Human
cugaggccccucucuugagcuu

SEQ ID NO: 514004 - RNA, 22 nt, Human
cagcuuugugcaaugcagucuc

SEQ ID NO: 514005 - RNA, 22 nt, Human
gucaggauuaaugggaguaugc

SEQ ID NO: 514006 - RNA, 23 nt, Human
guaaugaugggaauuuacuuaga

SEQ ID NO: 514007 - RNA, 22 nt, Human
cuguaauucacuagggucagcg

SEQ ID NO: 514008 - RNA, 20 nt, Human
auguuguuuacucauagcau

SEQ ID NO: 514009 - RNA, 22 nt, Human
uacaugcuccuuaugagaaucu

SEQ ID NO: 514010 - RNA, 22 nt, Human
uccuuggcaagcugcaauggga

SEQ ID NO: 514011 - RNA, 23 nt, Human
uuguccuucugaaauauaucugg

SEQ ID NO: 514012 - RNA, 22 nt, Human
guauuaggaaauaugaagaaag

SEQ ID NO: 514013 - RNA, 22 nt, Human
ucucagagauguuagggaagag

SEQ ID NO: 514014 - RNA, 22 nt, Human
agaucuggcccucagcuugauu

SEQ ID NO: 514015 - RNA, 22 nt, Human
agaacgucuuuacucuuacgaa

SEQ ID NO: 514016 - RNA, 22 nt, Human
agcccagcagaaaguccagccu

SEQ ID NO: 514017 - RNA, 22 nt, Human
caauaugcaagcuauuaaguau

SEQ ID NO: 514018 - RNA, 22 nt, Human
uagacauuauguauuaaguucu

SEQ ID NO: 514019 - RNA, 22 nt, Human
gaggcugaugcugccucacaga

SEQ ID NO: 514020 - RNA, 22 nt, Human
agucucuuuaaucacagugucu

SEQ ID NO: 514021 - RNA, 22 nt, Human
gauuucaagcccccagagauuc

SEQ ID NO: 514022 - RNA, 22 nt, Human
aaugcaaacuucuuguuacuug

SEQ ID NO: 514023 - RNA, 22 nt, Human
aguucagaggcaggagaaggcu

SEQ ID NO: 514024 - RNA, 22 nt, Human
agguccuguguccaggggccug

SEQ ID NO: 514025 - RNA, 22 nt, Human
aaacauuguaauuuuagcaugg

SEQ ID NO: 514026 - RNA, 22 nt, Human
cugggcaauaugcugggccugg

SEQ ID NO: 514027 - RNA, 22 nt, Human
ggagaggugaauggcugcucua

SEQ ID NO: 514028 - RNA, 19 nt, Human
acugccugaggcucacagg

SEQ ID NO: 514029 - RNA, 23 nt, Human
ucagcugcuuccuccugccugcc

SEQ ID NO: 514030 - RNA, 22 nt, Human
accaaaaccugcuacuaaagga

SEQ ID NO: 514031 - RNA, 20 nt, Human
agaggccaguuaggagucua

SEQ ID NO: 514032 - RNA, 22 nt, Human
agaggccaauaguagguggcau

SEQ ID NO: 514033 - RNA, 22 nt, Human
acacaauacagggcucaaaaua

SEQ ID NO: 514034 - RNA, 22 nt, Human
uauguacaccggggaagguggg

SEQ ID NO: 514035 - RNA, 22 nt, Human
uguuuauaccuugguauaacca

SEQ ID NO: 514036 - RNA, 22 nt, Human
uuaaaaugcagauuaugacuca

SEQ ID NO: 514037 - RNA, 22 nt, Human
ccauuguaaagaguauacuuug

SEQ ID NO: 514038 - RNA, 20 nt, Human
gcacagagaugagcaaagua

SEQ ID NO: 514039 - RNA, 22 nt, Human
cagagcaguccuugucaaucag

SEQ ID NO: 514040 - RNA, 22 nt, Human
uccguauuugacuauugcaccg

SEQ ID NO: 514041 - RNA, 22 nt, Human
guugaaagcuuuucauuuaguu

SEQ ID NO: 514042 - RNA, 17 nt, Human
aggagucucagaugagc

SEQ ID NO: 514043 - RNA, 22 nt, Human
uuccaugugaguacacugugau

SEQ ID NO: 514044 - RNA, 22 nt, Human
aggggagccccugguccuggug

SEQ ID NO: 514045 - RNA, 22 nt, Human
ugucagagcaaggccaggccag

SEQ ID NO: 514046 - RNA, 22 nt, Human
cuauuuguacagcauucgaguu

SEQ ID NO: 514047 - RNA, 22 nt, Human
uggacuuucuaggguagaggaa

SEQ ID NO: 514048 - RNA, 22 nt, Human
ccuccacucuggccucucaggu

SEQ ID NO: 514049 - RNA, 22 nt, Human
acugccuuauaugcugugugug

SEQ ID NO: 514050 - RNA, 22 nt, Human
ucucagagccuaacuaaccuaa

SEQ ID NO: 514051 - RNA, 22 nt, Human
ggguaugauagggaggugaaau

SEQ ID NO: 514052 - RNA, 22 nt, Human
ccucagagguuuucauucugua

SEQ ID NO: 514053 - RNA, 22 nt, Human
agagaacagacagaugcaauga

SEQ ID NO: 514054 - RNA, 22 nt, Human
auuucacucucccugccacuua

SEQ ID NO: 514055 - RNA, 22 nt, Human
ggucccagcuggucacugucag

SEQ ID NO: 514056 - RNA, 22 nt, Human
uacaguagacaauguuaguaug

SEQ ID NO: 514057 - RNA, 22 nt, Human
acagcucugcauggcaguuauu

SEQ ID NO: 514058 - RNA, 22 nt, Human
cugagccauaagggaggcuggg

SEQ ID NO: 514059 - RNA, 22 nt, Human
cucagggaguagcacaugugga

SEQ ID NO: 514060 - RNA, 22 nt, Human
cucucaggcuugggucguggca

SEQ ID NO: 514061 - RNA, 22 nt, Human
gaaguagauucguugcaucuug

SEQ ID NO: 514062 - RNA, 22 nt, Human
agguccugggaguucuagugug

SEQ ID NO: 514063 - RNA, 22 nt, Human
augcuuuuccuaaaaugaugcc

SEQ ID NO: 514064 - RNA, 22 nt, Human
ucaucucaaaacccaaggggca

SEQ ID NO: 514065 - RNA, 22 nt, Human
aguguggggucaccggcccagg

SEQ ID NO: 514066 - RNA, 22 nt, Human
uaaauguaccuucugccuuacu

SEQ ID NO: 514067 - RNA, 22 nt, Human
uuaaaaauauguagggcccgau

SEQ ID NO: 514068 - RNA, 22 nt, Human
gggaucugaguaggcagaagcu

SEQ ID NO: 514069 - RNA, 22 nt, Human
ucuuuguuuguacuguuagaau

SEQ ID NO: 514070 - RNA, 22 nt, Human
agcaggugcauggcgagcgcgg

SEQ ID NO: 514071 - RNA, 22 nt, Human
gcuggcccagggucaccuagga

SEQ ID NO: 514072 - RNA, 22 nt, Human
guuuccauggcucuguuaaugg

SEQ ID NO: 514073 - RNA, 22 nt, Human
agccagaguugaaugugagucu

SEQ ID NO: 514074 - RNA, 22 nt, Human
gcugucugagaacaugguggaa

SEQ ID NO: 514075 - RNA, 22 nt, Human
ugugaauauccauuuguuucag

SEQ ID NO: 514076 - RNA, 22 nt, Human
cagggcuagugacaccccaguc

SEQ ID NO: 514077 - RNA, 22 nt, Human
aguguauugauuggaacagccu

SEQ ID NO: 514078 - RNA, 22 nt, Human
aacugcauuugcauaaguccau

SEQ ID NO: 514079 - RNA, 22 nt, Human
uguucaauccccagguccugaa

SEQ ID NO: 514080 - RNA, 22 nt, Human
gguggagcuggaccaggagagg

SEQ ID NO: 514081 - RNA, 22 nt, Human
uccuggcccgaucccugugaag

SEQ ID NO: 514082 - RNA, 22 nt, Human
gcuccucucccagagcugcagg

SEQ ID NO: 514083 - RNA, 22 nt, Human
uuuguagacuaccaguaauugu

SEQ ID NO: 514084 - RNA, 22 nt, Human
gcagggugugucucauacaguu

SEQ ID NO: 514085 - RNA, 22 nt, Human
cuggaucuguuugugcuugugg

SEQ ID NO: 514086 - RNA, 22 nt, Human
gaaauguuguccugucucuuga

SEQ ID NO: 514087 - RNA, 22 nt, Human
ggagagcugacaucaugauguu

SEQ ID NO: 514088 - RNA, 23 nt, Human
gacagagugagaccuugucuuac

SEQ ID NO: 514089 - RNA, 18 nt, Human
caggucagccuggccuca

SEQ ID NO: 514090 - RNA, 22 nt, Human
cagccucucuguaucucaggau

SEQ ID NO: 514091 - RNA, 22 nt, Human
cuuuucuuauguggacguaccu

SEQ ID NO: 514092 - RNA, 22 nt, Human
uugcugaagaaaaaauauguua

SEQ ID NO: 514093 - RNA, 22 nt, Human
aagacuguaugagacaauauaa

SEQ ID NO: 514094 - RNA, 22 nt, Human
caggauggccccggggcugugc

SEQ ID NO: 514095 - RNA, 22 nt, Human
ccaggaucuguacaccucugag

SEQ ID NO: 514096 - RNA, 22 nt, Human
aaaugucagaagcuuuacuucu

SEQ ID NO: 514097 - RNA, 22 nt, Human
ugcaagaggaauucuagaagca

SEQ ID NO: 514098 - RNA, 22 nt, Human
uucuaaauuuuggaagaugcag

SEQ ID NO: 514099 - RNA, 22 nt, Human
agauguuccagccaaugggaau

SEQ ID NO: 514100 - RNA, 22 nt, Human
cucuacuccaaaaggcuacaau

SEQ ID NO: 514101 - RNA, 22 nt, Human
ucuccuggagcaggaagguggg

SEQ ID NO: 514102 - RNA, 22 nt, Human
agagguauauauucuccauauu

SEQ ID NO: 514103 - RNA, 22 nt, Human
acucuggcaagcuuccacuucc

SEQ ID NO: 514104 - RNA, 22 nt, Human
caguuaaaggcccaauaucugg

SEQ ID NO: 514105 - RNA, 22 nt, Human
ccaguguucugguguucauuuc

SEQ ID NO: 514106 - RNA, 22 nt, Human
uggggugguaauacaccguucu

SEQ ID NO: 514107 - RNA, 22 nt, Human
cuggagccauguauagccuaug

SEQ ID NO: 514108 - RNA, 23 nt, Human
gagugcagaauagacaugcagug

SEQ ID NO: 514109 - RNA, 22 nt, Human
gacagcaugagagaugccagug

SEQ ID NO: 514110 - RNA, 22 nt, Human
caaaggcaugugaguauaugug

SEQ ID NO: 514111 - RNA, 19 nt, Human
cccuggagaauacccugga

SEQ ID NO: 514112 - RNA, 22 nt, Human
uuaaaaaccaucuuccuuuccu

SEQ ID NO: 514113 - RNA, 22 nt, Human
gucccuggucuaccguggcuuc

SEQ ID NO: 514114 - RNA, 23 nt, Human
uugagcucaguagcucugcuggu

SEQ ID NO: 514115 - RNA, 22 nt, Human
uuugaaagcuacuuucggguca

SEQ ID NO: 514116 - RNA, 22 nt, Human
augggcugacaagacaugcaua

SEQ ID NO: 514117 - RNA, 22 nt, Human
caaaguuaucaacugcaacauu

SEQ ID NO: 514118 - RNA, 23 nt, Human
uaggcaggacucagauaugacag

SEQ ID NO: 514119 - RNA, 22 nt, Human
ccuguucaccauggucacgugc

SEQ ID NO: 514120 - RNA, 22 nt, Human
uacaugucuacaugcauuuuug

SEQ ID NO: 514121 - RNA, 22 nt, Human
ccugccagugaagcugacgggc

SEQ ID NO: 514122 - RNA, 22 nt, Human
gugcccuggggugaaccccugg

SEQ ID NO: 514123 - RNA, 22 nt, Human
uggaacacugaucauugccuuu

SEQ ID NO: 514124 - RNA, 22 nt, Human
uggaaggcuuugcuguccuugc

SEQ ID NO: 514125 - RNA, 22 nt, Human
uuuagcauauccuauaaaacua

SEQ ID NO: 514126 - RNA, 22 nt, Human
auggcagggacuguggcccuug

SEQ ID NO: 514127 - RNA, 22 nt, Human
aagagcuggucacagguccauu

SEQ ID NO: 514128 - RNA, 22 nt, Human
gccagagcuucccccgagugug

SEQ ID NO: 514129 - RNA, 22 nt, Human
ggugcagggagaggcaggcccc

SEQ ID NO: 514130 - RNA, 22 nt, Human
ccugggccuugaccucgugggc

SEQ ID NO: 514131 - RNA, 22 nt, Human
aagauguuuagauuuauacaau

SEQ ID NO: 514132 - RNA, 22 nt, Human
cucagggggaaucaggucacag

SEQ ID NO: 514133 - RNA, 22 nt, Human
uauuccaagcacagcaacccag

SEQ ID NO: 514134 - RNA, 22 nt, Human
ucccaaauauaaugcaagagac

SEQ ID NO: 514135 - RNA, 22 nt, Human
aguggcagagcaggugcuggaa

SEQ ID NO: 514136 - RNA, 22 nt, Human
agccaggacagggcagcucgcu

SEQ ID NO: 514137 - RNA, 22 nt, Human
gguccuggaaauugacggaaag

SEQ ID NO: 514138 - RNA, 22 nt, Human
aggggugaaggcccgauaggag

SEQ ID NO: 514139 - RNA, 22 nt, Human
aggcagcuuaagcccuggccca

SEQ ID NO: 514140 - RNA, 22 nt, Human
aaauauugguaggaugcuuguu

SEQ ID NO: 514141 - RNA, 20 nt, Human
ccuggcuuugcaucugugau

SEQ ID NO: 514142 - RNA, 18 nt, Human
gucaccuggaucagauua

SEQ ID NO: 514143 - RNA, 22 nt, Human
ucugggccagaucuagggaucu

SEQ ID NO: 514144 - RNA, 22 nt, Human
acagagcauuugggacagagag

SEQ ID NO: 514145 - RNA, 18 nt, Human
ugcagcauguucccauaa

SEQ ID NO: 514146 - RNA, 22 nt, Human
cagcauuuggaggagaggcuuu

SEQ ID NO: 514147 - RNA, 22 nt, Human
gucugggcucccagggucggcg

SEQ ID NO: 514148 - RNA, 22 nt, Human
cagcagccuacaaugcacagaa

SEQ ID NO: 514149 - RNA, 22 nt, Human
aucuggcuuuuaccccacggcc

SEQ ID NO: 514150 - RNA, 22 nt, Human
ggcuucagaggggagguagugc

SEQ ID NO: 514151 - RNA, 22 nt, Human
caggcagcugacugucagauau

SEQ ID NO: 514152 - RNA, 22 nt, Human
guuauaaaggugauaaugguca

SEQ ID NO: 514153 - RNA, 22 nt, Human
gagcaggcucugccuguguguc

SEQ ID NO: 514154 - RNA, 22 nt, Human
ugccagccagguucugaggcua

SEQ ID NO: 514155 - RNA, 22 nt, Human
guggcacagagauggggcauga

SEQ ID NO: 514156 - RNA, 22 nt, Human
uuauuuguuuucugagaaguau

SEQ ID NO: 514157 - RNA, 20 nt, Human
uccaugaguuagagacuaua

SEQ ID NO: 514158 - RNA, 22 nt, Human
ccagcuggagccaagguggacu

SEQ ID NO: 514159 - RNA, 22 nt, Human
ugccugccucuggagcccaucc

SEQ ID NO: 514160 - RNA, 19 nt, Human
ggccaggcugacugugguc

SEQ ID NO: 514161 - RNA, 20 nt, Human
aacuccuagccucaagugau

SEQ ID NO: 514162 - RNA, 22 nt, Human
gacauguugaagaauauuugga

SEQ ID NO: 514163 - RNA, 22 nt, Human
caaggcaggaagccugucuuau

SEQ ID NO: 514164 - RNA, 22 nt, Human
cacaugugcaaauacugaggcu

SEQ ID NO: 514165 - RNA, 22 nt, Human
guacccagaggcaugaucccag

SEQ ID NO: 514166 - RNA, 22 nt, Human
cagaauggcuuuuauggcucag

SEQ ID NO: 514167 - RNA, 22 nt, Human
ugcagcugccuagggcuggcuu

SEQ ID NO: 514168 - RNA, 23 nt, Human
gaggagggucugacaaguguagc

SEQ ID NO: 514169 - RNA, 22 nt, Human
cagcuucaacugcacagucaac

SEQ ID NO: 514170 - RNA, 22 nt, Human
acaaucacacaugcaauuauac

SEQ ID NO: 514171 - RNA, 23 nt, Human
auucuucauuaucuucuagaaaa

SEQ ID NO: 514172 - RNA, 22 nt, Human
uacuguacugcaguucugcaaa

SEQ ID NO: 514173 - RNA, 20 nt, Human
uuucugugcccaggucuguu

SEQ ID NO: 514174 - RNA, 22 nt, Human
ugagaggugaggcaugaggcau

SEQ ID NO: 514175 - RNA, 22 nt, Human
ugugcuucaucacuucucaguu

SEQ ID NO: 514176 - RNA, 22 nt, Human
ucagaagagcuggugcugccug

SEQ ID NO: 514177 - RNA, 22 nt, Human
gcagcacugauccuaaacuuag

SEQ ID NO: 514178 - RNA, 22 nt, Human
ccucaggcuuacgggcaaugga

SEQ ID NO: 514179 - RNA, 18 nt, Human
uuguuuuaagacucuguc

SEQ ID NO: 514180 - RNA, 22 nt, Human
acauucaugucccacuucuagc

SEQ ID NO: 514181 - RNA, 21 nt, Human
ccugugugugucccuuuaaga

SEQ ID NO: 514182 - RNA, 22 nt, Human
uucauucauuacgugccaggca

SEQ ID NO: 514183 - RNA, 23 nt, Human
cagggaggagauacuguguaucu

SEQ ID NO: 514184 - RNA, 22 nt, Human
aagcaugggaggccuggaggag

SEQ ID NO: 514185 - RNA, 22 nt, Human
cuucccaagacuguauugcaag

SEQ ID NO: 514186 - RNA, 22 nt, Human
uggguucuagagggaccagaac

SEQ ID NO: 514187 - RNA, 22 nt, Human
ugugcagcuaguccuggacuug

SEQ ID NO: 514188 - RNA, 22 nt, Human
auuugcuuucccuucccugaca

SEQ ID NO: 514189 - RNA, 22 nt, Human
ugucccagacacaguaugcgcu

SEQ ID NO: 514190 - RNA, 22 nt, Human
cugagcugagccaaaucugucu

SEQ ID NO: 514191 - RNA, 22 nt, Human
uagcagcugcaucauuuuacag

SEQ ID NO: 514192 - RNA, 22 nt, Human
aauauguucaaaauagaucacu

SEQ ID NO: 514193 - RNA, 17 nt, Human
uuaaaggaugcucucuc

SEQ ID NO: 514194 - RNA, 22 nt, Human
acugagagucaagauagcaugg

SEQ ID NO: 514195 - RNA, 23 nt, Human
auuuacagguuaaaugaaaucag

SEQ ID NO: 514196 - RNA, 22 nt, Human
cugaaggaagcagaagcgaggu

SEQ ID NO: 514197 - RNA, 22 nt, Human
gccuggguccacugaucaugcu

SEQ ID NO: 514198 - RNA, 23 nt, Human
aggaggccugaaacugaggcuga

SEQ ID NO: 514199 - RNA, 21 nt, Human
ucccacucuaaauggacugaa

SEQ ID NO: 514200 - RNA, 22 nt, Human
aaacuugagucacuucucuucc

SEQ ID NO: 514201 - RNA, 22 nt, Human
gggcagguuggcaucccgggca

SEQ ID NO: 514202 - RNA, 22 nt, Human
agaagcugccuacaugaccagc

SEQ ID NO: 514203 - RNA, 22 nt, Human
ccuucaaggcaaggagggcugg

SEQ ID NO: 514204 - RNA, 22 nt, Human
cugggcuggacacacuuaaccu

SEQ ID NO: 514205 - RNA, 22 nt, Human
aguggcuggaauugcaggugcg

SEQ ID NO: 514206 - RNA, 19 nt, Human
agccuggcuuugcucugcu

SEQ ID NO: 514207 - RNA, 23 nt, Human
uaaagcaaagucaagugcacucc

SEQ ID NO: 514208 - RNA, 22 nt, Human
ucuggcuuucucagcauggcau

SEQ ID NO: 514209 - RNA, 22 nt, Human
uggcagaguucgcuccuauuca

SEQ ID NO: 514210 - RNA, 17 nt, Human
agccugcugaucucaca

SEQ ID NO: 514211 - RNA, 21 nt, Human
ugcaggcaggcagagaugcug

SEQ ID NO: 514212 - RNA, 22 nt, Human
uggggagaguuacaaggaaucu

SEQ ID NO: 514213 - RNA, 22 nt, Human
cccucucucaggcugacagccu

SEQ ID NO: 514214 - RNA, 19 nt, Human
gccacuccugaugcugccc

SEQ ID NO: 514215 - RNA, 22 nt, Human
ugucccaguucccaggguugcu

SEQ ID NO: 514216 - RNA, 21 nt, Human
guccuucagcaaguuaguggc

SEQ ID NO: 514217 - RNA, 22 nt, Human
gccugcuggauguggccaggcc

SEQ ID NO: 514218 - RNA, 22 nt, Human
uggcugugggauaugugacuga

SEQ ID NO: 514219 - RNA, 22 nt, Human
ucuuacauauagcaugaguaca

SEQ ID NO: 514220 - RNA, 22 nt, Human
uggagcaggacugcugcccuca

SEQ ID NO: 514221 - RNA, 22 nt, Human
cagagugaaaacugagcucaaa

SEQ ID NO: 514222 - RNA, 22 nt, Human
cucagagucugcauuucuguca

SEQ ID NO: 514223 - RNA, 22 nt, Human
auuuguaauuucuuaucugugu

SEQ ID NO: 514224 - RNA, 22 nt, Human
ccacaucugguggccagugcua

SEQ ID NO: 514225 - RNA, 22 nt, Human
agccuugaaugcgcugcauugg

SEQ ID NO: 514226 - RNA, 22 nt, Human
uauauuuaaauccagguugaaa

SEQ ID NO: 514227 - RNA, 22 nt, Human
ucugggcuuuaguuuguuaucu

SEQ ID NO: 514228 - RNA, 22 nt, Human
aacaguaacgagauguccuaac

SEQ ID NO: 514229 - RNA, 22 nt, Human
aagcagccacuggccaguuaua

SEQ ID NO: 514230 - RNA, 22 nt, Human
uggcacugccuggcagggcccc

SEQ ID NO: 514231 - RNA, 22 nt, Human
uguggagaugugagcaagggga

SEQ ID NO: 514232 - RNA, 20 nt, Human
aaaguguaagcauauaauua

SEQ ID NO: 514233 - RNA, 16 nt, Human
cagaguguaaacagga

SEQ ID NO: 514234 - RNA, 22 nt, Human
gcagggacugugaucucacaga

SEQ ID NO: 514235 - RNA, 22 nt, Human
gccugugucauguaguagcuuc

SEQ ID NO: 514236 - RNA, 22 nt, Human
uccacacacauuucuaugugca

SEQ ID NO: 514237 - RNA, 22 nt, Human
ccugggaguggcacucacagca

SEQ ID NO: 514238 - RNA, 22 nt, Human
cugcuuugcauagcugccagag

SEQ ID NO: 514239 - RNA, 22 nt, Human
cuacccaggcuggagugcagua

SEQ ID NO: 514240 - RNA, 22 nt, Human
gccagcucaguuucaaaguagg

SEQ ID NO: 514241 - RNA, 22 nt, Human
uuuuuacacuuagcauugagcg

SEQ ID NO: 514242 - RNA, 19 nt, Human
uggcagguagugagcaguc

SEQ ID NO: 514243 - RNA, 22 nt, Human
uuugacaggacuaacauauggc

SEQ ID NO: 514244 - RNA, 22 nt, Human
cagccacguagcccuuggccgu

SEQ ID NO: 514245 - RNA, 22 nt, Human
aaggccaacuaggaugagcuag

SEQ ID NO: 514246 - RNA, 22 nt, Human
cucuaggcugcccaggagcuga

SEQ ID NO: 514247 - RNA, 20 nt, Human
aggcucugccugcaggccca

SEQ ID NO: 514248 - RNA, 22 nt, Human
gcacauaaagggcaugggaggu

SEQ ID NO: 514249 - RNA, 21 nt, Human
ccuucuccacagggucuccgg

SEQ ID NO: 514250 - RNA, 17 nt, Human
aaucagauuucugagga

SEQ ID NO: 514251 - RNA, 23 nt, Human
augggccaagcaagacccaugac

SEQ ID NO: 514252 - RNA, 22 nt, Human
aggcccugcccagagcuccucg

SEQ ID NO: 514253 - RNA, 22 nt, Human
agaggcccucucugcucagucu

SEQ ID NO: 514254 - RNA, 22 nt, Human
cagagggaucaucuuccugaag

SEQ ID NO: 514255 - RNA, 22 nt, Human
gcuucugggcaccugaacagga

SEQ ID NO: 514256 - RNA, 22 nt, Human
gcagccacccucaaggcugaau

SEQ ID NO: 514257 - RNA, 22 nt, Human
agagcucaagacgcucacagua

SEQ ID NO: 514258 - RNA, 22 nt, Human
gagcagugggaaggaacagggu

SEQ ID NO: 514259 - RNA, 22 nt, Human
cauuucugucacguucuuuuau

SEQ ID NO: 514260 - RNA, 22 nt, Human
ccagcucuuggugcacuuacau

SEQ ID NO: 514261 - RNA, 22 nt, Human
uagagcugggcagugcucugag

SEQ ID NO: 514262 - RNA, 22 nt, Human
agauaauuauuuacuucaaagu

SEQ ID NO: 514263 - RNA, 23 nt, Human
aucaagauaauccagaugaccua

SEQ ID NO: 514264 - RNA, 22 nt, Human
auccugggccucagaggugugu

SEQ ID NO: 514265 - RNA, 22 nt, Human
gguccugggaagaugcucauga

SEQ ID NO: 514266 - RNA, 23 nt, Human
cugcagucgccggccugggugcc

SEQ ID NO: 514267 - RNA, 22 nt, Human
gcuccuggcaggcagugugugu

SEQ ID NO: 514268 - RNA, 16 nt, Human
ucugccagggacaggc

SEQ ID NO: 514269 - RNA, 22 nt, Human
ugcagccauuugaaaagcaguu

SEQ ID NO: 514270 - RNA, 21 nt, Human
uggaaggcugcucugccaggg

SEQ ID NO: 514271 - RNA, 22 nt, Human
cauaugaaauaugaguugaaca

SEQ ID NO: 514272 - RNA, 22 nt, Human
aggcagucagcccugcuagggu

SEQ ID NO: 514273 - RNA, 22 nt, Human
aaggccagaguacuagaggcug

SEQ ID NO: 514274 - RNA, 22 nt, Human
uuuggccuuaguccagaagaag

SEQ ID NO: 514275 - RNA, 23 nt, Human
gagcugggauacaggcuuacugc

SEQ ID NO: 514276 - RNA, 22 nt, Human
uccaggucuggccugcuaggca

SEQ ID NO: 514277 - RNA, 22 nt, Human
gaauuacaaagugagacaagcu

SEQ ID NO: 514278 - RNA, 22 nt, Human
agggaggagaauggacuccuuc

SEQ ID NO: 514279 - RNA, 19 nt, Human
aucugccuuagugcugcug

SEQ ID NO: 514280 - RNA, 22 nt, Human
ggguccagggacguuucugcag

SEQ ID NO: 514281 - RNA, 22 nt, Human
cacagcuggugcacuagcucug

SEQ ID NO: 514282 - RNA, 22 nt, Human
uggcagugccccuugaccagug

SEQ ID NO: 514283 - RNA, 22 nt, Human
aaaugcacagagccuuagagau

SEQ ID NO: 514284 - RNA, 18 nt, Human
gaggauggaaggagaugc

SEQ ID NO: 514285 - RNA, 17 nt, Human
ucagcaaagacaaagga

SEQ ID NO: 514286 - RNA, 22 nt, Human
aaugaaguucuauucauuuucu

SEQ ID NO: 514287 - RNA, 22 nt, Human
ccugucuguaucgguucagagu

SEQ ID NO: 514288 - RNA, 22 nt, Human
cacagcaggugcuuaaugauua

SEQ ID NO: 514289 - RNA, 22 nt, Human
gugcauauguguguauacaaac

SEQ ID NO: 514290 - RNA, 22 nt, Human
uacagaguggugagaucuuuug

SEQ ID NO: 514291 - RNA, 22 nt, Human
gccuguggccgacugagagccu

SEQ ID NO: 514292 - RNA, 22 nt, Human
ugacagggcuagaggcaaugca

SEQ ID NO: 514293 - RNA, 22 nt, Human
uaucaucugcaaagcacaucua

SEQ ID NO: 514294 - RNA, 22 nt, Human
uaaaugugaccuucauuuuaua

SEQ ID NO: 514295 - RNA, 22 nt, Human
ccuggagauuauuugguccaau

SEQ ID NO: 514296 - RNA, 22 nt, Human
ucaggugggaccugcuaggaca

SEQ ID NO: 514297 - RNA, 22 nt, Human
ucuggagauaagacagacagau

SEQ ID NO: 514298 - RNA, 21 nt, Human
ugggcucuuuaacccaggcac

SEQ ID NO: 514299 - RNA, 22 nt, Human
acaauucuggguauuuauauag

SEQ ID NO: 514300 - RNA, 22 nt, Human
ugugccugaguuggcugaguac

SEQ ID NO: 514301 - RNA, 22 nt, Human
ucugucacuuauuaagauggau

SEQ ID NO: 514302 - RNA, 22 nt, Human
augccuggacugacaugcacug

SEQ ID NO: 514303 - RNA, 22 nt, Human
acugaaggcuuaacucuuucau

SEQ ID NO: 514304 - RNA, 22 nt, Human
ugcuuccuauccacacaaugcc

SEQ ID NO: 514305 - RNA, 22 nt, Human
aguaacaagugccaacguuaga

SEQ ID NO: 514306 - RNA, 20 nt, Human
gaaguccuguuauauccuuu

SEQ ID NO: 514307 - RNA, 22 nt, Human
uucuaaagugcaaucugacaga

SEQ ID NO: 514308 - RNA, 22 nt, Human
cugaggcugggcugaggguaua

SEQ ID NO: 514309 - RNA, 22 nt, Human
gcuucuggcagugcagccacca

SEQ ID NO: 514310 - RNA, 22 nt, Human
cugccccugccaggcagcuguc

SEQ ID NO: 514311 - RNA, 22 nt, Human
uggaaggccuguuguguccuag

SEQ ID NO: 514312 - RNA, 22 nt, Human
uguuuaauucaccaucauguuc

SEQ ID NO: 514313 - RNA, 22 nt, Human
aaagagaaaaugaucuguacau

SEQ ID NO: 514314 - RNA, 22 nt, Human
agagauggccuuaggugggaau

SEQ ID NO: 514315 - RNA, 22 nt, Human
agugcacagcgugauguauugg

SEQ ID NO: 514316 - RNA, 22 nt, Human
uucaggaagugcugccuggugu

SEQ ID NO: 514317 - RNA, 22 nt, Human
ccagcagcgauagggugagugc

SEQ ID NO: 514318 - RNA, 22 nt, Human
ccucccucuguuagagcugucu

SEQ ID NO: 514319 - RNA, 23 nt, Human
gcaguguuugcuucaucuuaucc

SEQ ID NO: 514320 - RNA, 21 nt, Human
gcuucagcaaggcuugcuggu

SEQ ID NO: 514321 - RNA, 22 nt, Human
gaucuugagcaaguuguguaac

SEQ ID NO: 514322 - RNA, 22 nt, Human
ugcauuaagguaauuguauaau

SEQ ID NO: 514323 - RNA, 22 nt, Human
agccacagcauguguguaugua

SEQ ID NO: 514324 - RNA, 22 nt, Human
uguagcagaguaucucuguuuu

SEQ ID NO: 514325 - RNA, 22 nt, Human
aggccuguuggcgugggcucua

SEQ ID NO: 514326 - RNA, 22 nt, Human
cuucacaauucuaacagggcaa

SEQ ID NO: 514327 - RNA, 22 nt, Human
agucuucccugugccagagugu

SEQ ID NO: 514328 - RNA, 22 nt, Human
gccaggcuaagaaaggugugau

SEQ ID NO: 514329 - RNA, 22 nt, Human
ccagagcaauucucacagaacu

SEQ ID NO: 514330 - RNA, 22 nt, Human
uuuccuguugccaucaagaaug

SEQ ID NO: 514331 - RNA, 22 nt, Human
ucaaauguucccuguacuggcc

SEQ ID NO: 514332 - RNA, 22 nt, Human
ggaggccaguccuggccgggcu

SEQ ID NO: 514333 - RNA, 22 nt, Human
ggucugugcucuggagccucug

SEQ ID NO: 514334 - RNA, 22 nt, Human
acuggcagccacaacuggcagg

SEQ ID NO: 514335 - RNA, 22 nt, Human
ucaugacaucuguuuaucucaa

SEQ ID NO: 514336 - RNA, 17 nt, Human
cagucacaggucuuuuc

SEQ ID NO: 514337 - RNA, 22 nt, Human
acaguuucuccauuuacaccuu

SEQ ID NO: 514338 - RNA, 22 nt, Human
ugugccugucacccucagagag

SEQ ID NO: 514339 - RNA, 22 nt, Human
ugagccagauaagggcucacgc

SEQ ID NO: 514340 - RNA, 22 nt, Human
ggcugagccuggagcaucuggu

SEQ ID NO: 514341 - RNA, 22 nt, Human
uguaggaguccaaucaggagac

SEQ ID NO: 514342 - RNA, 22 nt, Human
uaaagugcuuaugauaaccaag

SEQ ID NO: 514343 - RNA, 22 nt, Human
gucucuggcuuuaugcugguuu

SEQ ID NO: 514344 - RNA, 22 nt, Human
ccuggcucccggaacagggucu

SEQ ID NO: 514345 - RNA, 22 nt, Human
cuauugcauuugcaucuucauc

SEQ ID NO: 514346 - RNA, 22 nt, Human
gagguggaaggcaggaacaaau

SEQ ID NO: 514347 - RNA, 22 nt, Human
augcuguagaucuuagccucua

SEQ ID NO: 514348 - RNA, 22 nt, Human
agcccuucaaccugccuacucc

SEQ ID NO: 514349 - RNA, 22 nt, Human
ggaaggaaguaaaugaugcuau

SEQ ID NO: 514350 - RNA, 22 nt, Human
uaggacagaguucccugauggc

SEQ ID NO: 514351 - RNA, 20 nt, Human
ucuggcucuuugcuccuccc

SEQ ID NO: 514352 - RNA, 22 nt, Human
uuauguguauaauuacaggaag

SEQ ID NO: 514353 - RNA, 22 nt, Human
cuguagcagugugcucuuuuuc

SEQ ID NO: 514354 - RNA, 22 nt, Human
ccaugccuggacuccacucuca

SEQ ID NO: 514355 - RNA, 21 nt, Human
ucaggaagagcuucucccacu

SEQ ID NO: 514356 - RNA, 22 nt, Human
ugaaggcccuaucuccauauac

SEQ ID NO: 514357 - RNA, 22 nt, Human
acaagagacaagagguucuucu

SEQ ID NO: 514358 - RNA, 22 nt, Human
ccuccagucaccuggaugagaa

SEQ ID NO: 514359 - RNA, 22 nt, Human
uaaacagagagugcaguuauag

SEQ ID NO: 514360 - RNA, 22 nt, Human
cugugcccuggccaggccucuc

SEQ ID NO: 514361 - RNA, 22 nt, Human
cuucacagucacccugcugugu

SEQ ID NO: 514362 - RNA, 22 nt, Human
guugcugauuaacacuuugagu

SEQ ID NO: 514363 - RNA, 22 nt, Human
ucaccgccuugcccggccgggc

SEQ ID NO: 514364 - RNA, 18 nt, Human
uggagcaggaagccuggc

SEQ ID NO: 514365 - RNA, 22 nt, Human
acacaugagaaacaucaguugu

SEQ ID NO: 514366 - RNA, 22 nt, Human
aauacagaggggucacaauuca

SEQ ID NO: 514367 - RNA, 22 nt, Human
ggagaggcgaugagucacagcc

SEQ ID NO: 514368 - RNA, 22 nt, Human
ccaggaugacccccacuuuccu

SEQ ID NO: 514369 - RNA, 22 nt, Human
uuguuucagcccagaucuuuac

SEQ ID NO: 514370 - RNA, 22 nt, Human
auuauaaagaacaugugugugg

SEQ ID NO: 514371 - RNA, 22 nt, Human
uagagcaguguuguccaucaga

SEQ ID NO: 514372 - RNA, 22 nt, Human
agggccagcugaugagaaugag

SEQ ID NO: 514373 - RNA, 22 nt, Human
gccagcagccacagaagucacu

SEQ ID NO: 514374 - RNA, 22 nt, Human
caguguuuguauagaauaugca

SEQ ID NO: 514375 - RNA, 22 nt, Human
ggugccaggcucccagcucagg

SEQ ID NO: 514376 - RNA, 22 nt, Human
gcacugagucugucaugcugca

SEQ ID NO: 514377 - RNA, 22 nt, Human
ucugggcucugucagcaccucu

SEQ ID NO: 514378 - RNA, 22 nt, Human
auucaauaagucacuguggaau

SEQ ID NO: 514379 - RNA, 22 nt, Human
ucucagaggcccgacguucucc

SEQ ID NO: 514380 - RNA, 22 nt, Human
auccuguguugcuacuggagga

SEQ ID NO: 514381 - RNA, 22 nt, Human
auguaacaggugaagcucugag

SEQ ID NO: 514382 - RNA, 22 nt, Human
ucugggccuuggaguggggaga

SEQ ID NO: 514383 - RNA, 22 nt, Human
aaaguuugaaugauauauuagu

SEQ ID NO: 514384 - RNA, 22 nt, Human
aaauaauuauagcgagucuauc

SEQ ID NO: 514385 - RNA, 22 nt, Human
cauuuauugguuaggccagcag

SEQ ID NO: 514386 - RNA, 22 nt, Human
gcuggcuugacagaggccuggg

SEQ ID NO: 514387 - RNA, 23 nt, Human
uugaauuucucuugcaauauuua

SEQ ID NO: 514388 - RNA, 21 nt, Human
uuccuggggacuuccguggga

SEQ ID NO: 514389 - RNA, 22 nt, Human
agauaauuaugucaauuucuug

SEQ ID NO: 514390 - RNA, 22 nt, Human
aaagugcugaaauuacaggugu

SEQ ID NO: 514391 - RNA, 22 nt, Human
auguggccagucauguaguaac

SEQ ID NO: 514392 - RNA, 22 nt, Human
uggggacacagagccaaacuau

SEQ ID NO: 514393 - RNA, 17 nt, Human
ucuuuccugccaugcuc

SEQ ID NO: 514394 - RNA, 22 nt, Human
ggaaggcuugaguucccagguc

SEQ ID NO: 514395 - RNA, 22 nt, Human
ggcugcagagcugggugggccu

SEQ ID NO: 514396 - RNA, 22 nt, Human
cuucagaacuauaaaaaguacu

SEQ ID NO: 514397 - RNA, 22 nt, Human
gugauccuauaaagugagcaca

SEQ ID NO: 514398 - RNA, 22 nt, Human
agccccuccaguggcauaaaau

SEQ ID NO: 514399 - RNA, 22 nt, Human
uggagggcaugcuguccauggg

SEQ ID NO: 514400 - RNA, 22 nt, Human
guggaaggugcuagaacaagga

SEQ ID NO: 514401 - RNA, 22 nt, Human
cuggagccuucaccaggggaaa

SEQ ID NO: 514402 - RNA, 18 nt, Human
gcccaugguaaaugcugu

SEQ ID NO: 514403 - RNA, 22 nt, Human
gagcuuuaagggcacuggucuu

SEQ ID NO: 514404 - RNA, 22 nt, Human
gcaggccuccccugcuggagcu

SEQ ID NO: 514405 - RNA, 22 nt, Human
agaagugccauacuguggucca

SEQ ID NO: 514406 - RNA, 22 nt, Human
uaucaaaguuguccugugaagu

SEQ ID NO: 514407 - RNA, 22 nt, Human
auagauauuugaguuguuucca

SEQ ID NO: 514408 - RNA, 22 nt, Human
ucaaugauuagaguuuagugug

SEQ ID NO: 514409 - RNA, 22 nt, Human
aauguguuuucacugaagauuc

SEQ ID NO: 514410 - RNA, 22 nt, Human
aggcccaguagucgacggcgcu

SEQ ID NO: 514411 - RNA, 22 nt, Human
cuagauaaggauuucucaacuu

SEQ ID NO: 514412 - RNA, 23 nt, Human
gagcagagcgggcggggguccug

SEQ ID NO: 514413 - RNA, 22 nt, Human
cugggccuuugcuuauuaauuu

SEQ ID NO: 514414 - RNA, 22 nt, Human
agcuuuauuaacucuccaggug

SEQ ID NO: 514415 - RNA, 22 nt, Human
cccugcagacgucuugaugccu

SEQ ID NO: 514416 - RNA, 22 nt, Human
cccuggcucugccucagagccc

SEQ ID NO: 514417 - RNA, 22 nt, Human
uuuuaugugugaaaugcugucu

SEQ ID NO: 514418 - RNA, 22 nt, Human
ccugaccauuugccacaugggu

SEQ ID NO: 514419 - RNA, 22 nt, Human
uggguggaauaaaucaguucug

SEQ ID NO: 514420 - RNA, 22 nt, Human
uagagcugaguugacuccauuu

SEQ ID NO: 514421 - RNA, 22 nt, Human
ccucaguguguggauguuagag

SEQ ID NO: 514422 - RNA, 22 nt, Human
gccuggaguacuccuugaagug

SEQ ID NO: 514423 - RNA, 22 nt, Human
ucucaguguuuaaaaagauuuc

SEQ ID NO: 514424 - RNA, 22 nt, Human
ggucucuggccuuggagauuga

SEQ ID NO: 514425 - RNA, 22 nt, Human
ugucuagggagcugcucaggcu

SEQ ID NO: 514426 - RNA, 22 nt, Human
cuuuggaauaauuuccuggagu

SEQ ID NO: 514427 - RNA, 22 nt, Human
aaagcagagguugcagugagcu

SEQ ID NO: 514428 - RNA, 22 nt, Human
ccagggcaauaggaacacuuuu

SEQ ID NO: 514429 - RNA, 22 nt, Human
cagaagcauuccagcaaauagu

SEQ ID NO: 514430 - RNA, 22 nt, Human
uuccucuccucccaccagguga

SEQ ID NO: 514431 - RNA, 22 nt, Human
ucagcuggaagauggugcagaa

SEQ ID NO: 514432 - RNA, 22 nt, Human
aggcuacauguugggguggaag

SEQ ID NO: 514433 - RNA, 22 nt, Human
auuauuaggugcucucugacaa

SEQ ID NO: 514434 - RNA, 22 nt, Human
cuggguguuggguacugaccgu

SEQ ID NO: 514435 - RNA, 21 nt, Human
ggcagccugacccccagagag

SEQ ID NO: 514436 - RNA, 22 nt, Human
caagggggcaggaucacacuug

SEQ ID NO: 514437 - RNA, 23 nt, Human
agaggcaggaguggcuugcccgg

SEQ ID NO: 514438 - RNA, 22 nt, Human
aaaugauggaaaugaggcugaa

SEQ ID NO: 514439 - RNA, 20 nt, Human
aggcucugccauugucccug

SEQ ID NO: 514440 - RNA, 18 nt, Human
gggcaucauucacaaagu

SEQ ID NO: 514441 - RNA, 22 nt, Human
cccgagugucuacucacuccca

SEQ ID NO: 514442 - RNA, 17 nt, Human
aggcugcugggccaggg

SEQ ID NO: 514443 - RNA, 22 nt, Human
agaggcucagaggccugguccu

SEQ ID NO: 514444 - RNA, 22 nt, Human
ggucagcaucugguugagggca

SEQ ID NO: 514445 - RNA, 22 nt, Human
acaguauaccauugugacuuug

SEQ ID NO: 514446 - RNA, 22 nt, Human
cacacuagucuauccauuagcu

SEQ ID NO: 514447 - RNA, 22 nt, Human
ccagggugaccagcuggccuag

SEQ ID NO: 514448 - RNA, 22 nt, Human
ggcugccauaacugauaccaua

SEQ ID NO: 514449 - RNA, 22 nt, Human
gcagcguggggcugagucagcu

SEQ ID NO: 514450 - RNA, 18 nt, Human
auaaagugcuaauaaugg

SEQ ID NO: 514451 - RNA, 22 nt, Human
uugcugaaaacaggucaucagg

SEQ ID NO: 514452 - RNA, 22 nt, Human
gugcauuugugcaugcacaugu

SEQ ID NO: 514453 - RNA, 22 nt, Human
gcugagcugcuguucauccugc

SEQ ID NO: 514454 - RNA, 22 nt, Human
ggcuggccuguguggccgccac

SEQ ID NO: 514455 - RNA, 22 nt, Human
ggggcggggcucugagaagcau

SEQ ID NO: 514456 - RNA, 22 nt, Human
ucaaaggaauuugauuuugaug

SEQ ID NO: 514457 - RNA, 23 nt, Human
cacaccuguuaagaagagugccu

SEQ ID NO: 514458 - RNA, 22 nt, Human
aaguuacaguuauuauuuaaaa

SEQ ID NO: 514459 - RNA, 19 nt, Human
ucuagucagucagucauuc

SEQ ID NO: 514460 - RNA, 22 nt, Human
uggcagaggaggcucagauuga

SEQ ID NO: 514461 - RNA, 21 nt, Human
uggcugcuggcccucucucca

SEQ ID NO: 514462 - RNA, 22 nt, Human
auguaguuuggggcuagauuua

SEQ ID NO: 514463 - RNA, 19 nt, Human
agagaggcugugugaggga

SEQ ID NO: 514464 - RNA, 22 nt, Human
uguuaaauguuccuuuacugga

SEQ ID NO: 514465 - RNA, 22 nt, Human
cagggcagggagcuuagaauga

SEQ ID NO: 514466 - RNA, 22 nt, Human
auguguuuugguaauuucugcu

SEQ ID NO: 514467 - RNA, 22 nt, Human
agacacauaggaccacacugug

SEQ ID NO: 514468 - RNA, 22 nt, Human
ccagccugguucagaauuggcu

SEQ ID NO: 514469 - RNA, 22 nt, Human
ugccgcuccaggucucgcggug

SEQ ID NO: 514470 - RNA, 22 nt, Human
uugaaaaguuuugaaacacucu

SEQ ID NO: 514471 - RNA, 22 nt, Human
guugaguggguuaggaugcuga

SEQ ID NO: 514472 - RNA, 22 nt, Human
agaaagggaacuggcaaagcca

SEQ ID NO: 514473 - RNA, 22 nt, Human
aagaaagugcuuuguaaauuau

SEQ ID NO: 514474 - RNA, 19 nt, Human
ggcuucagggaguuagcau

SEQ ID NO: 514475 - RNA, 22 nt, Human
gaaaugugaccuacuuccuugu

SEQ ID NO: 514476 - RNA, 22 nt, Human
ugggccaacaggaggucuagga

SEQ ID NO: 514477 - RNA, 22 nt, Human
ccagcuuuuccucucauugcuu

SEQ ID NO: 514478 - RNA, 22 nt, Human
ccaggagguggagauugcagug

SEQ ID NO: 514479 - RNA, 22 nt, Human
cuggcagcguguuuaugaacau

SEQ ID NO: 514480 - RNA, 20 nt, Human
uaucuaaaugcuuacauuac

SEQ ID NO: 514481 - RNA, 23 nt, Human
acuuuauugaccccaggucaguu

SEQ ID NO: 514482 - RNA, 22 nt, Human
cccugaggggcuuacuuugccc

SEQ ID NO: 514483 - RNA, 23 nt, Human
uccucaguauauaaaggcagaug

SEQ ID NO: 514484 - RNA, 22 nt, Human
cuccuggggccauggaaggaac

SEQ ID NO: 514485 - RNA, 22 nt, Human
uuacaagacacagugcugaagg

SEQ ID NO: 514486 - RNA, 21 nt, Human
ugagugccaccugcuggccaa

SEQ ID NO: 514487 - RNA, 22 nt, Human
gccucugcaauuacauugugcc

SEQ ID NO: 514488 - RNA, 22 nt, Human
ucauccuuuugcaugggaaggc

SEQ ID NO: 514489 - RNA, 22 nt, Human
ccuggggagagaaagcccagcc

SEQ ID NO: 514490 - RNA, 19 nt, Human
ggugaccaccuggucagug

SEQ ID NO: 514491 - RNA, 22 nt, Human
cugcaggggccucgagcacagg

SEQ ID NO: 514492 - RNA, 22 nt, Human
cagcuugugcaaagguccuggg

SEQ ID NO: 514493 - RNA, 20 nt, Human
agcuucaggcucaagagaac

SEQ ID NO: 514494 - RNA, 22 nt, Human
aacauuucauaacuugacuuuu

SEQ ID NO: 514495 - RNA, 22 nt, Human
guacccaggcacgccuugcuga

SEQ ID NO: 514496 - RNA, 22 nt, Human
gguggcaggcccugagcauccc

SEQ ID NO: 514497 - RNA, 22 nt, Human
cuccugaggaaaagcuugguca

SEQ ID NO: 514498 - RNA, 22 nt, Human
acuaggaauucaaguagacaga

SEQ ID NO: 514499 - RNA, 22 nt, Human
caguccugugucccuugguggg

SEQ ID NO: 514500 - RNA, 22 nt, Human
ugcaggucauguggcgggacug

SEQ ID NO: 514501 - RNA, 19 nt, Human
gaaggagagcugaguuagg

SEQ ID NO: 514502 - RNA, 22 nt, Human
gaggccugcagcguggucccug

SEQ ID NO: 514503 - RNA, 22 nt, Human
agagggcauaaaauagagcacg

SEQ ID NO: 514504 - RNA, 22 nt, Human
gcugccaauccagcugugggag

SEQ ID NO: 514505 - RNA, 18 nt, Human
aucuuuccauagcauguu

SEQ ID NO: 514506 - RNA, 22 nt, Human
agcauccaacaggagggaaggg

SEQ ID NO: 514507 - RNA, 22 nt, Human
ugguccuggggaucugcaguga

SEQ ID NO: 514508 - RNA, 22 nt, Human
ucaggaugaccacgagccucua

SEQ ID NO: 514509 - RNA, 22 nt, Human
uuauaaagguuugugcauauuu

SEQ ID NO: 514510 - RNA, 22 nt, Human
ucaggagauggucuuuauaggc

SEQ ID NO: 514511 - RNA, 22 nt, Human
ggcuucucucuucacauggcuu

SEQ ID NO: 514512 - RNA, 20 nt, Human
accuugaacccgccagccau

SEQ ID NO: 514513 - RNA, 22 nt, Human
uauguccugcuacucucucaug

SEQ ID NO: 514514 - RNA, 22 nt, Human
aguaauaauuuauauuagggag

SEQ ID NO: 514515 - RNA, 17 nt, Human
ggugaguguccaggugg

SEQ ID NO: 514516 - RNA, 22 nt, Human
cccuguccuuggcugugaggcu

SEQ ID NO: 514517 - RNA, 20 nt, Human
acagaugaggaaaaugaagu

SEQ ID NO: 514518 - RNA, 20 nt, Human
agguggcuccugcugggggu

SEQ ID NO: 514519 - RNA, 22 nt, Human
gugcuggggagauaggaagaga

SEQ ID NO: 514520 - RNA, 22 nt, Human
aggcaauccccugaggauacuu

SEQ ID NO: 514521 - RNA, 22 nt, Human
acagaacaagaccugcuuauug

SEQ ID NO: 514522 - RNA, 22 nt, Human
uccugagggcgauucagcaggu

SEQ ID NO: 514523 - RNA, 22 nt, Human
uccugccuagcaggugaccuau

SEQ ID NO: 514524 - RNA, 22 nt, Human
uaacacaaaagaauaugugugu

SEQ ID NO: 514525 - RNA, 22 nt, Human
cuuccuugcggccccugccuag

SEQ ID NO: 514526 - RNA, 22 nt, Human
guggccagaggucccauguguc

SEQ ID NO: 514527 - RNA, 22 nt, Human
aagauguuagauuauggggaca

SEQ ID NO: 514528 - RNA, 22 nt, Human
acagcucucccucagagaaaug

SEQ ID NO: 514529 - RNA, 22 nt, Human
ugggaagggccgauggagccuc

SEQ ID NO: 514530 - RNA, 22 nt, Human
agagauuacagcaggguccagc

SEQ ID NO: 514531 - RNA, 22 nt, Human
ggggugggagugccauccuuga

SEQ ID NO: 514532 - RNA, 22 nt, Human
ucucuuuaaagacucagagauu

SEQ ID NO: 514533 - RNA, 22 nt, Human
auaaagaggauguauuuacagc

SEQ ID NO: 514534 - RNA, 22 nt, Human
gaggccugaaaggggaccuaug

SEQ ID NO: 514535 - RNA, 22 nt, Human
ucuggccuauuucugucagauc

SEQ ID NO: 514536 - RNA, 22 nt, Human
gcucccaccaggcagaccuacc

SEQ ID NO: 514537 - RNA, 22 nt, Human
aucagcugaugaauggaugaau

SEQ ID NO: 514538 - RNA, 22 nt, Human
ucccagcagucagagcuaugug

SEQ ID NO: 514539 - RNA, 22 nt, Human
agcagccauagauagcaugcaa

SEQ ID NO: 514540 - RNA, 22 nt, Human
uggcuggggagccccgacuccc

SEQ ID NO: 514541 - RNA, 22 nt, Human
uucacagauguauuggaacucc

SEQ ID NO: 514542 - RNA, 18 nt, Human
acagacacuuaguaugag

SEQ ID NO: 514543 - RNA, 22 nt, Human
agaggucuuuuggucugcagaa

SEQ ID NO: 514544 - RNA, 22 nt, Human
uaaggccagccagcaaaucugu

SEQ ID NO: 514545 - RNA, 22 nt, Human
gggcagcugccaagugcaucgc

SEQ ID NO: 514546 - RNA, 22 nt, Human
cagcugccuguauuguccucau

SEQ ID NO: 514547 - RNA, 22 nt, Human
gcagugcaggaacauagcuucu

SEQ ID NO: 514548 - RNA, 22 nt, Human
auuguggugucaguuauaggca

SEQ ID NO: 514549 - RNA, 22 nt, Human
ucacguuuuacugagugagaua

SEQ ID NO: 514550 - RNA, 21 nt, Human
uuugaaagcuacaucuauagc

SEQ ID NO: 514551 - RNA, 19 nt, Human
gccuaugucuucaaaucau

SEQ ID NO: 514552 - RNA, 22 nt, Human
agguaaggcuguaagcuaagcc

SEQ ID NO: 514553 - RNA, 21 nt, Human
ucucugggaggacuugugaga

SEQ ID NO: 514554 - RNA, 22 nt, Human
acagagcuuaauucaggagcuu

SEQ ID NO: 514555 - RNA, 22 nt, Human
cacagaggacuguagcggggag

SEQ ID NO: 514556 - RNA, 20 nt, Human
cacagaacaaauugcaggac

SEQ ID NO: 514557 - RNA, 22 nt, Human
cucagcaccccgacaggacauu

SEQ ID NO: 514558 - RNA, 22 nt, Human
uaaacaucugucauguguuuau

SEQ ID NO: 514559 - RNA, 22 nt, Human
ugcuggaggccugacuguguuu

SEQ ID NO: 514560 - RNA, 22 nt, Human
cuggaugcugagagguaccaag

SEQ ID NO: 514561 - RNA, 22 nt, Human
uuucuaauaucacuuccagcug

SEQ ID NO: 514562 - RNA, 23 nt, Human
uugagucuuauaggauugaggug

SEQ ID NO: 514563 - RNA, 22 nt, Human
ucaguguccggagccugagugc

SEQ ID NO: 514564 - RNA, 22 nt, Human
ggaggccaaagugugggcggcu

SEQ ID NO: 514565 - RNA, 23 nt, Human
cauuucugggagauuuauaaaau

SEQ ID NO: 514566 - RNA, 22 nt, Human
ucuaggagaaccaucagggagg

SEQ ID NO: 514567 - RNA, 22 nt, Human
cauuuucucaaugaacccucuu

SEQ ID NO: 514568 - RNA, 22 nt, Human
ucacagaaggcaucacagaaga

SEQ ID NO: 514569 - RNA, 22 nt, Human
ggaagggaauccaucugguuag

SEQ ID NO: 514570 - RNA, 22 nt, Human
uuugaagagccacagugaaauu

SEQ ID NO: 514571 - RNA, 22 nt, Human
aucuggcuuuuacugaauugcu

SEQ ID NO: 514572 - RNA, 22 nt, Human
ccuguacacaauuccgaggaua

SEQ ID NO: 514573 - RNA, 22 nt, Human
uuguccuggcccaaaugucaac

SEQ ID NO: 514574 - RNA, 22 nt, Human
agcagagccaggucucucugua

SEQ ID NO: 514575 - RNA, 22 nt, Human
aucugccuggcuccaggugagc

SEQ ID NO: 514576 - RNA, 22 nt, Human
acugcuuacaaaaggaaagaau

SEQ ID NO: 514577 - RNA, 22 nt, Human
ugaagcagaggggucuugagcu

SEQ ID NO: 514578 - RNA, 22 nt, Human
ggcuccacugcugaccacucca

SEQ ID NO: 514579 - RNA, 22 nt, Human
acaguguuuuaugagaauuguu

SEQ ID NO: 514580 - RNA, 22 nt, Human
uagcagcucugauucugggccc

SEQ ID NO: 514581 - RNA, 22 nt, Human
uacaaagugugcccaugcugag

SEQ ID NO: 514582 - RNA, 22 nt, Human
ucucaagagggaggcaaucaug

SEQ ID NO: 514583 - RNA, 22 nt, Human
uuuucacacaaggugauaaguu

SEQ ID NO: 514584 - RNA, 22 nt, Human
ggaggcucccacgcagcucaca

SEQ ID NO: 514585 - RNA, 23 nt, Human
agaugaaagcuucccaucacagu

SEQ ID NO: 514586 - RNA, 22 nt, Human
guccucuggaagaugaguucuu

SEQ ID NO: 514587 - RNA, 22 nt, Human
cucuccucugaaguggugaccc

SEQ ID NO: 514588 - RNA, 22 nt, Human
aaaggucagacuuaggcugggc

SEQ ID NO: 514589 - RNA, 22 nt, Human
gacagggcgagacucagucuca

SEQ ID NO: 514590 - RNA, 22 nt, Human
uaaagcaaggcaaauuguuggu

SEQ ID NO: 514591 - RNA, 22 nt, Human
cugggguggauggguccaaguu

SEQ ID NO: 514592 - RNA, 23 nt, Human
cuucaucaaaaguuaacacuagu

SEQ ID NO: 514593 - RNA, 22 nt, Human
gcaguguugagugguggcugaa

SEQ ID NO: 514594 - RNA, 22 nt, Human
caucacugaaccccaacuuucu

SEQ ID NO: 514595 - RNA, 22 nt, Human
gcuggccuccugcuagauggaa

SEQ ID NO: 514596 - RNA, 22 nt, Human
cuguggcuucugggucaguuca

SEQ ID NO: 514597 - RNA, 22 nt, Human
gcccagcagcugguggagaagg

SEQ ID NO: 514598 - RNA, 22 nt, Human
ggccuugguuccaaagcaggca

SEQ ID NO: 514599 - RNA, 22 nt, Human
acugagcugcaagucagggagg

SEQ ID NO: 514600 - RNA, 22 nt, Human
gcagagaguugggcugcgccag

SEQ ID NO: 514601 - RNA, 22 nt, Human
cugcccugggugcuggggaucc

SEQ ID NO: 514602 - RNA, 22 nt, Human
aagcaggcauuccagagacaau

SEQ ID NO: 514603 - RNA, 22 nt, Human
acagaguacauucagagacuau

SEQ ID NO: 514604 - RNA, 22 nt, Human
cugaaugagggauucugagggc

SEQ ID NO: 514605 - RNA, 22 nt, Human
agugacaaggugguaaugaagc

SEQ ID NO: 514606 - RNA, 22 nt, Human
aaagacaugacacauuggagag

SEQ ID NO: 514607 - RNA, 22 nt, Human
acagcacaaucugagucccaga

SEQ ID NO: 514608 - RNA, 22 nt, Human
uuggcugcuggucuuuggauau

SEQ ID NO: 514609 - RNA, 22 nt, Human
cuccucccucuuugccacacau

SEQ ID NO: 514610 - RNA, 22 nt, Human
ucuggggaauguucauuucuga

SEQ ID NO: 514611 - RNA, 22 nt, Human
uuucuaggacaugauaggauau

SEQ ID NO: 514612 - RNA, 22 nt, Human
ggcaguggugggaggcucgcuc

SEQ ID NO: 514613 - RNA, 20 nt, Human
gagggcucguggauggauaa

SEQ ID NO: 514614 - RNA, 22 nt, Human
ccagcuuuugcacuggacuggg

SEQ ID NO: 514615 - RNA, 20 nt, Human
ucccaggcuccacccuagac

SEQ ID NO: 514616 - RNA, 22 nt, Human
gccugcagccagggaguucucu

SEQ ID NO: 514617 - RNA, 22 nt, Human
uggggagaaaugucuuuguucc

SEQ ID NO: 514618 - RNA, 22 nt, Human
guguacaaaaugucuccaugga

SEQ ID NO: 514619 - RNA, 22 nt, Human
gggcauggaggucugucugcag

SEQ ID NO: 514620 - RNA, 22 nt, Human
ugguugugucacuuagauuaga

SEQ ID NO: 514621 - RNA, 22 nt, Human
cuaggcagacugagcucuaggg

SEQ ID NO: 514622 - RNA, 22 nt, Human
gccagcccagcuccaggggaaa

SEQ ID NO: 514623 - RNA, 22 nt, Human
guuuggggucugcagagcggcg

SEQ ID NO: 514624 - RNA, 22 nt, Human
uguauguaaaguuuguaauaga

SEQ ID NO: 514625 - RNA, 22 nt, Human
auuguuaugaaaauaagauguu

SEQ ID NO: 514626 - RNA, 22 nt, Human
cugcucugaagccaggauucug

SEQ ID NO: 514627 - RNA, 21 nt, Human
auggagggaccagggaagcag

SEQ ID NO: 514628 - RNA, 19 nt, Human
gcugugugaccuugggcaa

SEQ ID NO: 514629 - RNA, 23 nt, Human
gggcugcuccaggccaaggcugg

SEQ ID NO: 514630 - RNA, 22 nt, Human
gagaggggcccaagccacauag

SEQ ID NO: 514631 - RNA, 22 nt, Human
ggugucugcuucccuccagcug

SEQ ID NO: 514632 - RNA, 22 nt, Human
cagggccuuuuagcaucuucuc

SEQ ID NO: 514633 - RNA, 22 nt, Human
cauggacagugggacagugugu

SEQ ID NO: 514634 - RNA, 22 nt, Human
uuauuuguaaagguccauagua

SEQ ID NO: 514635 - RNA, 22 nt, Human
uacacagauuucaguaucauca

SEQ ID NO: 514636 - RNA, 22 nt, Human
aagcucugcucagcagacuagg

SEQ ID NO: 514637 - RNA, 22 nt, Human
caggauccccaggucgccgucc

SEQ ID NO: 514638 - RNA, 23 nt, Human
ugggauagaauuucauggcugcu

SEQ ID NO: 514639 - RNA, 22 nt, Human
acagucugccucucagagcagc

SEQ ID NO: 514640 - RNA, 22 nt, Human
agaggaaguaaucaggaccugc

SEQ ID NO: 514641 - RNA, 22 nt, Human
ucuggagucugagaucugagga

SEQ ID NO: 514642 - RNA, 22 nt, Human
agugcagugguuaggagccagg

SEQ ID NO: 514643 - RNA, 22 nt, Human
agcagcacccagagccaugucu

SEQ ID NO: 514644 - RNA, 17 nt, Human
cugcuuugugcaacgcu

SEQ ID NO: 514645 - RNA, 22 nt, Human
ccagucacuggaaaaugggaau

SEQ ID NO: 514646 - RNA, 22 nt, Human
uuagauaccuuuguguuguaga

SEQ ID NO: 514647 - RNA, 22 nt, Human
acugggccggugcagaguaguu

SEQ ID NO: 514648 - RNA, 22 nt, Human
ugugaggccuagacagccuggg

SEQ ID NO: 514649 - RNA, 22 nt, Human
gccuggcugcugguucugagga

SEQ ID NO: 514650 - RNA, 22 nt, Human
gcucugggugaacuuggagcaa

SEQ ID NO: 514651 - RNA, 19 nt, Human
auagucuuuccaauuauac

SEQ ID NO: 514652 - RNA, 22 nt, Human
uugcccugccucccugagguga

SEQ ID NO: 514653 - RNA, 17 nt, Human
aggcuggcucacaggga

SEQ ID NO: 514654 - RNA, 22 nt, Human
uuccaaguugagcgauuuuccu

SEQ ID NO: 514655 - RNA, 22 nt, Human
acagguggcauaggcaguuuga

SEQ ID NO: 514656 - RNA, 22 nt, Human
gcugcucugaaaaugacuguug

SEQ ID NO: 514657 - RNA, 22 nt, Human
uccaagaugguugguguggugg

SEQ ID NO: 514658 - RNA, 22 nt, Human
aagaagaaguguuauuuuuaga

SEQ ID NO: 514659 - RNA, 22 nt, Human
agccaggaauuggacaacacau

SEQ ID NO: 514660 - RNA, 18 nt, Human
aguaguggguuuagcuuc

SEQ ID NO: 514661 - RNA, 22 nt, Human
uuccucaucugugcaccucacu

SEQ ID NO: 514662 - RNA, 22 nt, Human
augacuucaccucugugaagca

SEQ ID NO: 514663 - RNA, 22 nt, Human
aauguugauguuuucagugagc

SEQ ID NO: 514664 - RNA, 22 nt, Human
ucaggucccacugcuaguaagu

SEQ ID NO: 514665 - RNA, 22 nt, Human
aaggcuguccaggagaaaauag

SEQ ID NO: 514666 - RNA, 22 nt, Human
uucaguguuaaucuugggagaa

SEQ ID NO: 514667 - RNA, 20 nt, Human
uggcggggaugagggaguua

SEQ ID NO: 514668 - RNA, 22 nt, Human
augcaaaucuuaaguaugugug

SEQ ID NO: 514669 - RNA, 22 nt, Human
ugccuggcugaggugacagguu

SEQ ID NO: 514670 - RNA, 22 nt, Human
acuguauaaggcauagguaagc

SEQ ID NO: 514671 - RNA, 22 nt, Human
uuauuaggaacucaggauuuuu

SEQ ID NO: 514672 - RNA, 20 nt, Human
cuaucuccuggcgugccuuc

SEQ ID NO: 514673 - RNA, 22 nt, Human
aguguuucaagugaugcuuugg

SEQ ID NO: 514674 - RNA, 18 nt, Human
gagcccugagucugcaca

SEQ ID NO: 514675 - RNA, 22 nt, Human
ggcugagggccagggcuagucu

SEQ ID NO: 514676 - RNA, 20 nt, Human
uuccagagaucugcauuuua

SEQ ID NO: 514677 - RNA, 22 nt, Human
cugaagagcucuccuguccccu

SEQ ID NO: 514678 - RNA, 22 nt, Human
agggggucguccggaagaccug

SEQ ID NO: 514679 - RNA, 22 nt, Human
ccugcagcuguaggagaaggcg

SEQ ID NO: 514680 - RNA, 22 nt, Human
ggugggcagcucuuggcaggca

SEQ ID NO: 514681 - RNA, 22 nt, Human
cucagugcuucuagcuugauga

SEQ ID NO: 514682 - RNA, 21 nt, Human
agcacagcuuuaagccaugug

SEQ ID NO: 514683 - RNA, 22 nt, Human
ugcugaauauagagcaagaagu

SEQ ID NO: 514684 - RNA, 22 nt, Human
ccaggcucugagccucacucuu

SEQ ID NO: 514685 - RNA, 22 nt, Human
uccugagggcucggggcucaug

SEQ ID NO: 514686 - RNA, 22 nt, Human
gcagggucuugagaggcagcca

SEQ ID NO: 514687 - RNA, 22 nt, Human
cugggccacuccagaugcccac

SEQ ID NO: 514688 - RNA, 22 nt, Human
acagguccucaagucagcuggg

SEQ ID NO: 514689 - RNA, 22 nt, Human
auaauuaauuucaguaaucucc

SEQ ID NO: 514690 - RNA, 22 nt, Human
aggaccaguaugagagcaucug

SEQ ID NO: 514691 - RNA, 22 nt, Human
aaugucaaacagagcagagcua

SEQ ID NO: 514692 - RNA, 23 nt, Human
uauuagggccaggacuggcaaau

SEQ ID NO: 514693 - RNA, 22 nt, Human
uagcagcaagaaugggaugugu

SEQ ID NO: 514694 - RNA, 22 nt, Human
acagagucaugguagucaaagg

SEQ ID NO: 514695 - RNA, 22 nt, Human
uugauaaaaugauaucuucuuu

SEQ ID NO: 514696 - RNA, 21 nt, Human
ucccugcuuucuggcccaguc

SEQ ID NO: 514697 - RNA, 22 nt, Human
ggcaggucagguccaugaccaa

SEQ ID NO: 514698 - RNA, 22 nt, Human
ugccugggaaccaauccuggcu

SEQ ID NO: 514699 - RNA, 22 nt, Human
uuacuuugaugaucaaugagcg

SEQ ID NO: 514700 - RNA, 20 nt, Human
cacguuuuuccacuagcaaa

SEQ ID NO: 514701 - RNA, 22 nt, Human
uugcuuuauguguaugacuuga

SEQ ID NO: 514702 - RNA, 22 nt, Human
agcaggagagcagugcgugguc

SEQ ID NO: 514703 - RNA, 22 nt, Human
aguugacauccauaacaggaag

SEQ ID NO: 514704 - RNA, 22 nt, Human
aaauaacagucagggacaacau

SEQ ID NO: 514705 - RNA, 20 nt, Human
uaaagacauaagcuacuauc

SEQ ID NO: 514706 - RNA, 22 nt, Human
gagagaagggacuucuacacuu

SEQ ID NO: 514707 - RNA, 22 nt, Human
gaguggggcccacugcugggug

SEQ ID NO: 514708 - RNA, 22 nt, Human
uggagaauuuugucaccagaca

SEQ ID NO: 514709 - RNA, 22 nt, Human
cauucugugauucuaaaucccu

SEQ ID NO: 514710 - RNA, 19 nt, Human
ucagaggauuuggcuauga

SEQ ID NO: 514711 - RNA, 22 nt, Human
gcagacuggucuucagccuugg

SEQ ID NO: 514712 - RNA, 22 nt, Human
uucuuuuacauuaagauuucag

SEQ ID NO: 514713 - RNA, 22 nt, Human
cuuguuuucuucugcagucuau

SEQ ID NO: 514714 - RNA, 20 nt, Human
gcauugaguauagacagaug

SEQ ID NO: 514715 - RNA, 22 nt, Human
acaggacaacucagcagccagc

SEQ ID NO: 514716 - RNA, 22 nt, Human
ucauuuaauaauuuuugaguag

SEQ ID NO: 514717 - RNA, 22 nt, Human
cagcaggcugcgauugcucauu

SEQ ID NO: 514718 - RNA, 22 nt, Human
uugccaggagcucaucugaggg

SEQ ID NO: 514719 - RNA, 23 nt, Human
agcuuugugaaagcagacauggg

SEQ ID NO: 514720 - RNA, 22 nt, Human
aagcuucaaugagauaauuguu

SEQ ID NO: 514721 - RNA, 22 nt, Human
ggauggcauguugggcucuguu

SEQ ID NO: 514722 - RNA, 22 nt, Human
cagucucucuuguagugcagcu

SEQ ID NO: 514723 - RNA, 22 nt, Human
caguggcagagaacagagaccu

SEQ ID NO: 514724 - RNA, 22 nt, Human
cuccuugguguaguacugagca

SEQ ID NO: 514725 - RNA, 22 nt, Human
gccuggcuccuaaggacuggcu

SEQ ID NO: 514726 - RNA, 22 nt, Human
uagcagcucuuuacuaaccagu

SEQ ID NO: 514727 - RNA, 22 nt, Human
uacauggguagguuaagucaua

SEQ ID NO: 514728 - RNA, 20 nt, Human
ugauauuucuggaaguggag

SEQ ID NO: 514729 - RNA, 22 nt, Human
gugcccugcaugccccggguau

SEQ ID NO: 514730 - RNA, 22 nt, Human
caggcccauucuaggcuugcua

SEQ ID NO: 514731 - RNA, 22 nt, Human
ggugccagccuagugcaguggu

SEQ ID NO: 514732 - RNA, 22 nt, Human
agaaaucuauguuuugguuaga

SEQ ID NO: 514733 - RNA, 22 nt, Human
gcugucugggaggccuccacuu

SEQ ID NO: 514734 - RNA, 19 nt, Human
augucccaccgccccugag

SEQ ID NO: 514735 - RNA, 22 nt, Human
aggaagcucauuuugacauauc

SEQ ID NO: 514736 - RNA, 22 nt, Human
aagucagagcaacugagacauu

SEQ ID NO: 514737 - RNA, 22 nt, Human
aauucuauguucuugaguaaga

SEQ ID NO: 514738 - RNA, 22 nt, Human
acauguaaaaggaacaugcaug

SEQ ID NO: 514739 - RNA, 22 nt, Human
uggcucuguggucuuagcaugc

SEQ ID NO: 514740 - RNA, 22 nt, Human
ugccugaggagucagggcaggu

SEQ ID NO: 514741 - RNA, 22 nt, Human
ccaugcccuaaaggacuggcag

SEQ ID NO: 514742 - RNA, 22 nt, Human
gcuuucugaagcaguguuucuc

SEQ ID NO: 514743 - RNA, 22 nt, Human
gcuccugggcccugggcuaacu

SEQ ID NO: 514744 - RNA, 22 nt, Human
uuguuucaggaugguuuguuac

SEQ ID NO: 514745 - RNA, 22 nt, Human
uccaggagacacaagguacaua

SEQ ID NO: 514746 - RNA, 22 nt, Human
aauuacagucggagcagcacug

SEQ ID NO: 514747 - RNA, 22 nt, Human
gccagcaguccugcugugugcc

SEQ ID NO: 514748 - RNA, 22 nt, Human
gcagcucuccucugugaggaac

SEQ ID NO: 514749 - RNA, 22 nt, Human
uaguaucuauuaguaacaagag

SEQ ID NO: 514750 - RNA, 22 nt, Human
ugggcucugugccagguuggug

SEQ ID NO: 514751 - RNA, 18 nt, Human
gcucugguuccuucaacc

SEQ ID NO: 514752 - RNA, 22 nt, Human
cagggccauuggcguggcuguc

SEQ ID NO: 514753 - RNA, 22 nt, Human
cagccaggagccucugcaacua

SEQ ID NO: 514754 - RNA, 22 nt, Human
ggugcaggcgguggggcaagua

SEQ ID NO: 514755 - RNA, 22 nt, Human
ucaacagaagugauagcuauua

SEQ ID NO: 514756 - RNA, 19 nt, Human
cuggaaggagggacuguuc

SEQ ID NO: 514757 - RNA, 21 nt, Human
aaauccaaacacuaguccaca

SEQ ID NO: 514758 - RNA, 22 nt, Human
ggccacacagaugacugcuuuc

SEQ ID NO: 514759 - RNA, 22 nt, Human
caaaguaauuuggagauauaua

SEQ ID NO: 514760 - RNA, 22 nt, Human
gcuugcuggugccugcaggcuc

SEQ ID NO: 514761 - RNA, 22 nt, Human
gcagcuuucuaagcuuuauugc

SEQ ID NO: 514762 - RNA, 22 nt, Human
guuuucaugucuauugggcaua

SEQ ID NO: 514763 - RNA, 22 nt, Human
gagcucauucauucauugccug

SEQ ID NO: 514764 - RNA, 22 nt, Human
cuggcuucugggccagggcaga

SEQ ID NO: 514765 - RNA, 22 nt, Human
aaauguucuaaauuacauguga

SEQ ID NO: 514766 - RNA, 22 nt, Human
cugaaugauauaagaucuuucu

SEQ ID NO: 514767 - RNA, 22 nt, Human
uggagucaguggcuauugggca

SEQ ID NO: 514768 - RNA, 22 nt, Human
agagcuguuaauuuugcacugg

SEQ ID NO: 514769 - RNA, 22 nt, Human
uuccugguuugccuggaaucca

SEQ ID NO: 514770 - RNA, 22 nt, Human
aggcugggcuccgcccaacucc

SEQ ID NO: 514771 - RNA, 22 nt, Human
ucuguaucacccguucccagaa

SEQ ID NO: 514772 - RNA, 22 nt, Human
aggcccuguccauggugcugaa

SEQ ID NO: 514773 - RNA, 22 nt, Human
caggacagguguucuagaucag

SEQ ID NO: 514774 - RNA, 22 nt, Human
gcaguguuuguguucucacaug

SEQ ID NO: 514775 - RNA, 22 nt, Human
uuuauuccaguguuucucaaau

SEQ ID NO: 514776 - RNA, 22 nt, Human
ccaggagucaauaaaggaagcu

SEQ ID NO: 514777 - RNA, 22 nt, Human
cccagcucucucaguucugcuu

SEQ ID NO: 514778 - RNA, 22 nt, Human
gagggcaguagccucguacccu

SEQ ID NO: 514779 - RNA, 22 nt, Human
ucagcagggcugggagcuguga

SEQ ID NO: 514780 - RNA, 20 nt, Human
cuuguugauucuaggaauga

SEQ ID NO: 514781 - RNA, 22 nt, Human
agccuccacagaugcaaagggc

SEQ ID NO: 514782 - RNA, 22 nt, Human
agaaauaugcugauuagaugaa

SEQ ID NO: 514783 - RNA, 22 nt, Human
ugggcagggaucucuuuugcaa

SEQ ID NO: 514784 - RNA, 22 nt, Human
gagcacugauuuauuuuugucu

SEQ ID NO: 514785 - RNA, 22 nt, Human
guugcugaaauuaauauuggag

SEQ ID NO: 514786 - RNA, 22 nt, Human
cuguggcuaugguguacauacu

SEQ ID NO: 514787 - RNA, 22 nt, Human
cuccccauccaggcagcaggug

SEQ ID NO: 514788 - RNA, 22 nt, Human
cagaugaagaucauagaauagu

SEQ ID NO: 514789 - RNA, 22 nt, Human
auuuaagauugcguauucaugu

SEQ ID NO: 514790 - RNA, 22 nt, Human
ugggcaaguaucggacucugag

SEQ ID NO: 514791 - RNA, 22 nt, Human
acugaaagauaaaucaguuagc

SEQ ID NO: 514792 - RNA, 22 nt, Human
guggcaggagacuggaagaugg

SEQ ID NO: 514793 - RNA, 22 nt, Human
agggagugguuaagaaggugca

SEQ ID NO: 514794 - RNA, 22 nt, Human
cauuuauuggcauguaguaggu

SEQ ID NO: 514795 - RNA, 22 nt, Human
gcuuuuauugucuuuacgacga

SEQ ID NO: 514796 - RNA, 21 nt, Human
ucucuggcgguguuuggcucc

SEQ ID NO: 514797 - RNA, 22 nt, Human
guggauggauuuugaggaaugg

SEQ ID NO: 514798 - RNA, 22 nt, Human
aaaguuuuagaacuaggaagca

SEQ ID NO: 514799 - RNA, 19 nt, Human
cccaacuugacuauuuucu

SEQ ID NO: 514800 - RNA, 22 nt, Human
uccucaggaugugggguagaau

SEQ ID NO: 514801 - RNA, 22 nt, Human
accugagggcccaaacuuggua

SEQ ID NO: 514802 - RNA, 22 nt, Human
uugugugguagcuucauugaac

SEQ ID NO: 514803 - RNA, 22 nt, Human
cccaggagguggagguugcagc

SEQ ID NO: 514804 - RNA, 22 nt, Human
uuuuaucugcuucauuaguuga

SEQ ID NO: 514805 - RNA, 22 nt, Human
ucuggggaugagguccagugau

SEQ ID NO: 514806 - RNA, 22 nt, Human
aaagucauguaaugauaugauu

SEQ ID NO: 514807 - RNA, 22 nt, Human
uguaggacauguacuuguaaca

SEQ ID NO: 514808 - RNA, 22 nt, Human
cucaggaggaggaaguucauug

SEQ ID NO: 514809 - RNA, 22 nt, Human
ugucccaggccucauguugcca

SEQ ID NO: 514810 - RNA, 22 nt, Human
uccugcugagcgucugucauuu

SEQ ID NO: 514811 - RNA, 22 nt, Human
uuuauguuugacaaugaucugg

SEQ ID NO: 514812 - RNA, 22 nt, Human
ucugggcuuggguagaaaucac

SEQ ID NO: 514813 - RNA, 22 nt, Human
cauugacaucaggcuuggccaa

SEQ ID NO: 514814 - RNA, 22 nt, Human
ccagcugcgggcaucgagaguu

SEQ ID NO: 514815 - RNA, 22 nt, Human
cuguccauuuucgugccuccuu

SEQ ID NO: 514816 - RNA, 20 nt, Human
ugacaaagaguaagaggagg

SEQ ID NO: 514817 - RNA, 22 nt, Human
caggcucuuuugguggcaagga

SEQ ID NO: 514818 - RNA, 22 nt, Human
gguggguauaguuagggccucu

SEQ ID NO: 514819 - RNA, 22 nt, Human
gcuggcagagacaagaagacua

SEQ ID NO: 514820 - RNA, 22 nt, Human
aguggcagagccaggguuggga

SEQ ID NO: 514821 - RNA, 22 nt, Human
ucacaggacccugaggguggcg

SEQ ID NO: 514822 - RNA, 22 nt, Human
uuugaacuucuccauucugaug

SEQ ID NO: 514823 - RNA, 22 nt, Human
cugggcugcagcgggagcgacg

SEQ ID NO: 514824 - RNA, 22 nt, Human
agccuaggucugggucuagcag

SEQ ID NO: 514825 - RNA, 22 nt, Human
caggucugugugccauuuccaa

SEQ ID NO: 514826 - RNA, 22 nt, Human
gacacagggacgugcucugccu

SEQ ID NO: 514827 - RNA, 22 nt, Human
ugggccacagcucacacaucca

SEQ ID NO: 514828 - RNA, 22 nt, Human
ucaguuuucucauuuaugagau

SEQ ID NO: 514829 - RNA, 22 nt, Human
aagacuugaccagguugaaggc

SEQ ID NO: 514830 - RNA, 22 nt, Human
uguggccaaaauaaaaugaggu

SEQ ID NO: 514831 - RNA, 22 nt, Human
cagggccucgaagccucugggc

SEQ ID NO: 514832 - RNA, 22 nt, Human
ucucaguccaaaugagagguug

SEQ ID NO: 514833 - RNA, 22 nt, Human
uauaauuuuaagugguaaauua

SEQ ID NO: 514834 - RNA, 22 nt, Human
caguuauuaugaggucauuagg

SEQ ID NO: 514835 - RNA, 22 nt, Human
gucuggagagcugagcagaguu

SEQ ID NO: 514836 - RNA, 22 nt, Human
uuggaaggggcagaguggcugc

SEQ ID NO: 514837 - RNA, 23 nt, Human
ugguccugccaacggugccccuc

SEQ ID NO: 514838 - RNA, 22 nt, Human
uaaguucaagucuuggauauaa

SEQ ID NO: 514839 - RNA, 22 nt, Human
caaauuacccucaacaucuaga

SEQ ID NO: 514840 - RNA, 22 nt, Human
cuguucaguaaccuauaaaaca

SEQ ID NO: 514841 - RNA, 22 nt, Human
cugggcacagcguugggcucuu

SEQ ID NO: 514842 - RNA, 22 nt, Human
aggcugugacagggucauggag

SEQ ID NO: 514843 - RNA, 20 nt, Human
cugagccaacucucuucuug

SEQ ID NO: 514844 - RNA, 22 nt, Human
cugagguguugaugaccuaugc

SEQ ID NO: 514845 - RNA, 22 nt, Human
ccugagggaaggaugcuaccca

SEQ ID NO: 514846 - RNA, 22 nt, Human
acauuugagaugccuuuuaggu

SEQ ID NO: 514847 - RNA, 22 nt, Human
uucagcuugaaucuggcuuuga

SEQ ID NO: 514848 - RNA, 22 nt, Human
gugcauauaugcacauaugugu

SEQ ID NO: 514849 - RNA, 18 nt, Human
cacaggaaggggaauauc

SEQ ID NO: 514850 - RNA, 22 nt, Human
ggagagcagggaggcugcucug

SEQ ID NO: 514851 - RNA, 22 nt, Human
ugauuaaauuaauuaagaugag

SEQ ID NO: 514852 - RNA, 22 nt, Human
ugucauugaggaaaacuaggug

SEQ ID NO: 514853 - RNA, 22 nt, Human
aucacaaaggcugcuucaugau

SEQ ID NO: 514854 - RNA, 22 nt, Human
ugcaaguaguccagccuuuggg

SEQ ID NO: 514855 - RNA, 22 nt, Human
cagauaacacaaagaaaugggc

SEQ ID NO: 514856 - RNA, 22 nt, Human
ggcagguagccuagaggagguu

SEQ ID NO: 514857 - RNA, 22 nt, Human
cagcuugggucaggugccugcu

SEQ ID NO: 514858 - RNA, 22 nt, Human
uaguuaaugcuaauuaacaaau

SEQ ID NO: 514859 - RNA, 22 nt, Human
ugcugccaagcccgugcuccug

SEQ ID NO: 514860 - RNA, 22 nt, Human
gcucagugagauauugacucca

SEQ ID NO: 514861 - RNA, 22 nt, Human
ugcugggcuaggguggagcucu

SEQ ID NO: 514862 - RNA, 22 nt, Human
agagcagcuggcugcaucuaga

SEQ ID NO: 514863 - RNA, 22 nt, Human
gccuggccgcuccgagcuccgc

SEQ ID NO: 514864 - RNA, 22 nt, Human
cugagcuguuuaaucccagaua

SEQ ID NO: 514865 - RNA, 19 nt, Human
gcucagagggcccugugcu

SEQ ID NO: 514866 - RNA, 22 nt, Human
uccaggucccuggggagauuuu

SEQ ID NO: 514867 - RNA, 22 nt, Human
ccuguucacugcacaguuuccg

SEQ ID NO: 514868 - RNA, 22 nt, Human
guaucacuuuugagagugagaa

SEQ ID NO: 514869 - RNA, 18 nt, Human
acccucuggcuucugagc

SEQ ID NO: 514870 - RNA, 22 nt, Human
ucagagcccugcuccuccccaa

SEQ ID NO: 514871 - RNA, 22 nt, Human
cucugaagggagggccaagccc

SEQ ID NO: 514872 - RNA, 22 nt, Human
aggccaccacccuaucuccugg

SEQ ID NO: 514873 - RNA, 22 nt, Human
ggcaagguacucuagagcacau

SEQ ID NO: 514874 - RNA, 22 nt, Human
uuuccuugccuccuguccuucu

SEQ ID NO: 514875 - RNA, 22 nt, Human
ucauuucucugagucugauaau

SEQ ID NO: 514876 - RNA, 22 nt, Human
gcucacagccggcuggcagggg

SEQ ID NO: 514877 - RNA, 22 nt, Human
gaggcuucccgcccaugcugga

SEQ ID NO: 514878 - RNA, 22 nt, Human
aaggaaaugagguugauggaug

SEQ ID NO: 514879 - RNA, 22 nt, Human
agguauaagucucauuucuguu

SEQ ID NO: 514880 - RNA, 16 nt, Human
ccugggcucuguugga

SEQ ID NO: 514881 - RNA, 22 nt, Human
cuggccugggagcugcuagcgu

SEQ ID NO: 514882 - RNA, 22 nt, Human
cuggauuuaauuaacuguugcu

SEQ ID NO: 514883 - RNA, 22 nt, Human
acucauguccuaggaguaaagc

SEQ ID NO: 514884 - RNA, 22 nt, Human
gcacaaagguggaaggaggaag

SEQ ID NO: 514885 - RNA, 19 nt, Human
uuucacaaagagagcguga

SEQ ID NO: 514886 - RNA, 21 nt, Human
ucagagagucacagugaacug

SEQ ID NO: 514887 - RNA, 21 nt, Human
gcugaagaacucuuuauuuuc

SEQ ID NO: 514888 - RNA, 22 nt, Human
uaggaaaaauacagaauuauau

SEQ ID NO: 514889 - RNA, 22 nt, Human
aguuuucuguucuacaauuuga

SEQ ID NO: 514890 - RNA, 22 nt, Human
ugagagugguucagcucagaag

SEQ ID NO: 514891 - RNA, 22 nt, Human
acagccuguuugaucuggugcu

SEQ ID NO: 514892 - RNA, 22 nt, Human
cccugccaaucccgucucucug

SEQ ID NO: 514893 - RNA, 22 nt, Human
ggcagcugguucuuuccauuaa

SEQ ID NO: 514894 - RNA, 22 nt, Human
cacauuucucuaccucacacaa

SEQ ID NO: 514895 - RNA, 22 nt, Human
ccagagccugcugagccccauu

SEQ ID NO: 514896 - RNA, 22 nt, Human
ucagaaauguaagcugaugacu

SEQ ID NO: 514897 - RNA, 22 nt, Human
uguuuguucccucucuuuccug

SEQ ID NO: 514898 - RNA, 22 nt, Human
agagaguuguaccacacucaua

SEQ ID NO: 514899 - RNA, 22 nt, Human
gccugcagggcccuuguggguc

SEQ ID NO: 514900 - RNA, 20 nt, Human
gccuggaggcagagauaaag

SEQ ID NO: 514901 - RNA, 22 nt, Human
acacuuuguuguggcauauacg

SEQ ID NO: 514902 - RNA, 22 nt, Human
aagcacagaaaaggagcaugga

SEQ ID NO: 514903 - RNA, 22 nt, Human
uguguauuucuggaacagacua

SEQ ID NO: 514904 - RNA, 22 nt, Human
ggcucaggaccugggauugcca

SEQ ID NO: 514905 - RNA, 19 nt, Human
ggcagaagguguaggggga

SEQ ID NO: 514906 - RNA, 22 nt, Human
aaguguguauuguuuaugcugc

SEQ ID NO: 514907 - RNA, 22 nt, Human
gcuucuauuauuuggagcugag

SEQ ID NO: 514908 - RNA, 22 nt, Human
cacugaaggcugcagcucagcc

SEQ ID NO: 514909 - RNA, 22 nt, Human
uacagagaguacagcauccaca

SEQ ID NO: 514910 - RNA, 22 nt, Human
caauauucaguggaaaagccau

SEQ ID NO: 514911 - RNA, 22 nt, Human
acacacuggcccccaguacuga

SEQ ID NO: 514912 - RNA, 22 nt, Human
gacaagacauugguaaagauau

SEQ ID NO: 514913 - RNA, 22 nt, Human
ucucuacagacacuguugacuu

SEQ ID NO: 514914 - RNA, 22 nt, Human
cccaucaggaacccaggagccc

SEQ ID NO: 514915 - RNA, 22 nt, Human
ugccugcuaggcccugcugggu

SEQ ID NO: 514916 - RNA, 20 nt, Human
cuuccacacaagaagcacag

SEQ ID NO: 514917 - RNA, 22 nt, Human
ccuuagcauggcugugcugugu

SEQ ID NO: 514918 - RNA, 22 nt, Human
ugagccaggcacugcuccugga

SEQ ID NO: 514919 - RNA, 22 nt, Human
cuguacauaaaggaauaggugu

SEQ ID NO: 514920 - RNA, 22 nt, Human
uuagcugacugugugauuuggc

SEQ ID NO: 514921 - RNA, 22 nt, Human
gggcacagaagucuaagacauc

SEQ ID NO: 514922 - RNA, 22 nt, Human
aagagcaucaaugacucgcagu

SEQ ID NO: 514923 - RNA, 22 nt, Human
gccaggucuaagcaucagccac

SEQ ID NO: 514924 - RNA, 22 nt, Human
cugaggugagcuucccugggcu

SEQ ID NO: 514925 - RNA, 22 nt, Human
gcagauggaaagugcuugaggg

SEQ ID NO: 514926 - RNA, 19 nt, Human
cucugggcaagucacuuaa

SEQ ID NO: 514927 - RNA, 22 nt, Human
uucucaguaugugacgaggacc

SEQ ID NO: 514928 - RNA, 22 nt, Human
gggagcuguaagggacagguag

SEQ ID NO: 514929 - RNA, 22 nt, Human
guuuagaauggcaaaauuaagu

SEQ ID NO: 514930 - RNA, 22 nt, Human
gcacacacuguuuuccucacau

SEQ ID NO: 514931 - RNA, 23 nt, Human
caacagcuguuagauaugggcuu

SEQ ID NO: 514932 - RNA, 22 nt, Human
uauuccaguccuauccucuuuu

SEQ ID NO: 514933 - RNA, 22 nt, Human
agcagcaagcagugcacggguu

SEQ ID NO: 514934 - RNA, 22 nt, Human
gcaaagcugggugugaaugcac

SEQ ID NO: 514935 - RNA, 22 nt, Human
agagauuugucaaugauuucca

SEQ ID NO: 514936 - RNA, 22 nt, Human
gagggcagaaaauuaugcggug

SEQ ID NO: 514937 - RNA, 22 nt, Human
cugcccugagucaugccagaug

SEQ ID NO: 514938 - RNA, 22 nt, Human
uguggccaggccccugauggug

SEQ ID NO: 514939 - RNA, 22 nt, Human
ggaacacugccuuuuauuuucc

SEQ ID NO: 514940 - RNA, 22 nt, Human
auaaaaguuuccaaucaugccu

SEQ ID NO: 514941 - RNA, 22 nt, Human
ucucaguguguugagaggucug

SEQ ID NO: 514942 - RNA, 22 nt, Human
ugucccagcagcuggguucucu

SEQ ID NO: 514943 - RNA, 22 nt, Human
agcuaggagauuuugugaggcu

SEQ ID NO: 514944 - RNA, 22 nt, Human
gaucucugaaucugaagccuuc

SEQ ID NO: 514945 - RNA, 22 nt, Human
ugaacuuagugggaauaucucu

SEQ ID NO: 514946 - RNA, 22 nt, Human
aguuucuugaagacugauguuu

SEQ ID NO: 514947 - RNA, 22 nt, Human
uugacagcaaagauugugccua

SEQ ID NO: 514948 - RNA, 22 nt, Human
cccugagaugccucacccuagu

SEQ ID NO: 514949 - RNA, 22 nt, Human
gacagccaugcacuucugcugu

SEQ ID NO: 514950 - RNA, 22 nt, Human
gccagcugaagggaagcuccug

SEQ ID NO: 514951 - RNA, 22 nt, Human
agcacagauaacauggagugga

SEQ ID NO: 514952 - RNA, 22 nt, Human
aacuagaacgucuaguugcugg

SEQ ID NO: 514953 - RNA, 22 nt, Human
uaaauucagugaguaauuucug

SEQ ID NO: 514954 - RNA, 22 nt, Human
cagcaggcccagaguuucaugg

SEQ ID NO: 514955 - RNA, 22 nt, Human
ccaguuuuuccagugcuuucug

SEQ ID NO: 514956 - RNA, 22 nt, Human
ugagccuguccugugcauguga

SEQ ID NO: 514957 - RNA, 22 nt, Human
cagagccaaaugcugugguuau

SEQ ID NO: 514958 - RNA, 20 nt, Human
aggcacuggauuucuuauau

SEQ ID NO: 514959 - RNA, 22 nt, Human
aaugaccucagagcacccagaa

SEQ ID NO: 514960 - RNA, 22 nt, Human
gaauuugugcucaggaagauua

SEQ ID NO: 514961 - RNA, 22 nt, Human
agugcaaauuauuuaccugauu

SEQ ID NO: 514962 - RNA, 22 nt, Human
auaaggcagaaaugauucuagu

SEQ ID NO: 514963 - RNA, 22 nt, Human
gccaggaguucagaugcauguu

SEQ ID NO: 514964 - RNA, 22 nt, Human
agucuggggucugguagaacga

SEQ ID NO: 514965 - RNA, 21 nt, Human
gccagggaagagaguuggcug

SEQ ID NO: 514966 - RNA, 22 nt, Human
cccuuuaaguagaauauauuau

SEQ ID NO: 514967 - RNA, 21 nt, Human
uggacuggugaguuuaggcug

SEQ ID NO: 514968 - RNA, 22 nt, Human
uguuuagaugcaaagucucaca

SEQ ID NO: 514969 - RNA, 22 nt, Human
ccagcucugauuuugaccucca

SEQ ID NO: 514970 - RNA, 20 nt, Human
acaguguuuuugaguagagc

SEQ ID NO: 514971 - RNA, 22 nt, Human
cagaugaggggcauauaacaau

SEQ ID NO: 514972 - RNA, 22 nt, Human
ucuggggaugaggaccuagaug

SEQ ID NO: 514973 - RNA, 22 nt, Human
gaauuugaaaagugaugggaau

SEQ ID NO: 514974 - RNA, 21 nt, Human
ucugggcuuucuuauaaggca

SEQ ID NO: 514975 - RNA, 22 nt, Human
caguacuuauuucuauuuaggg

SEQ ID NO: 514976 - RNA, 22 nt, Human
ccagcucugcauguuucccuug

SEQ ID NO: 514977 - RNA, 22 nt, Human
acagcugugaaaauccacagga

SEQ ID NO: 514978 - RNA, 22 nt, Human
ucaaagagcuauucaguugugg

SEQ ID NO: 514979 - RNA, 22 nt, Human
gccucaggacuggcauacucau

SEQ ID NO: 514980 - RNA, 22 nt, Human
aaugaagcaguuuucaucaagu

SEQ ID NO: 514981 - RNA, 22 nt, Human
guuccuuguauuucagacauga

SEQ ID NO: 514982 - RNA, 22 nt, Human
uugaaugagaaguuauugccau

SEQ ID NO: 514983 - RNA, 22 nt, Human
ugccucagaguugucccuacca

SEQ ID NO: 514984 - RNA, 22 nt, Human
cacauguacagaagcaggcugg

SEQ ID NO: 514985 - RNA, 22 nt, Human
aaauuagaaauacuuucaaagc

SEQ ID NO: 514986 - RNA, 22 nt, Human
uuccuucucagcccucgaggau

SEQ ID NO: 514987 - RNA, 19 nt, Human
auuucaagagguuuauugg

SEQ ID NO: 514988 - RNA, 22 nt, Human
guaagcaucugucucuucugca

SEQ ID NO: 514989 - RNA, 22 nt, Human
ggucauugaaaucagaaggguu

SEQ ID NO: 514990 - RNA, 22 nt, Human
uucucaaggacaaaaugacaug

SEQ ID NO: 514991 - RNA, 22 nt, Human
ucagguccuuuugguguauauu

SEQ ID NO: 514992 - RNA, 22 nt, Human
caauucaauggcaaaguauugu

SEQ ID NO: 514993 - RNA, 22 nt, Human
cagaaauggagcccaggaaucu

SEQ ID NO: 514994 - RNA, 20 nt, Human
ggguccugacuuggucuccu

SEQ ID NO: 514995 - RNA, 22 nt, Human
uaugcuuuacuuuucauuguga

SEQ ID NO: 514996 - RNA, 22 nt, Human
aggcagcaugcucugcuucuac

SEQ ID NO: 514997 - RNA, 22 nt, Human
ucagcauaucuugagcuucaug

SEQ ID NO: 514998 - RNA, 22 nt, Human
cagagacaaccugguagagaaa

SEQ ID NO: 514999 - RNA, 19 nt, Human
ccuguucaugacucugucc

SEQ ID NO: 515000 - RNA, 22 nt, Human
ccacagguacggauugaggacc

SEQ ID NO: 515001 - RNA, 22 nt, Human
ccugcagggugcugccacagau

SEQ ID NO: 515002 - RNA, 22 nt, Human
uggaagggagugacagucagag

SEQ ID NO: 515003 - RNA, 22 nt, Human
acagaacugcaggaggaaaagc

SEQ ID NO: 515004 - RNA, 22 nt, Human
uuguauuuccuauaaccuuucu

SEQ ID NO: 515005 - RNA, 22 nt, Human
gcagagaggauauuauugucca

SEQ ID NO: 515006 - RNA, 22 nt, Human
gcucugggaaggaucguaguga

SEQ ID NO: 515007 - RNA, 22 nt, Human
gaaguucaggugggaauugagc

SEQ ID NO: 515008 - RNA, 18 nt, Human
cuuucagauggauaugcu

SEQ ID NO: 515009 - RNA, 22 nt, Human
gagucacauuaauuuaauuuua

SEQ ID NO: 515010 - RNA, 22 nt, Human
gggggcuagagagaugaaauau

SEQ ID NO: 515011 - RNA, 22 nt, Human
aaaguccagggaaagagcgucu

SEQ ID NO: 515012 - RNA, 18 nt, Human
aggcccuggccucgaaca

SEQ ID NO: 515013 - RNA, 22 nt, Human
uggcuugucauguaucugaggc

SEQ ID NO: 515014 - RNA, 22 nt, Human
gcuggcucuuuuugccgggcuc

SEQ ID NO: 515015 - RNA, 22 nt, Human
agggcuuugcaaugcacagugg

SEQ ID NO: 515016 - RNA, 22 nt, Human
aagguacaaaguauuauuuaaa

SEQ ID NO: 515017 - RNA, 23 nt, Human
uccagggcaguggcugggucugc

SEQ ID NO: 515018 - RNA, 22 nt, Human
ucagcacaggucuugcaaaaca

SEQ ID NO: 515019 - RNA, 22 nt, Human
uggaagggaacagguggguguu

SEQ ID NO: 515020 - RNA, 22 nt, Human
acaggacauguaccaggugguc

SEQ ID NO: 515021 - RNA, 22 nt, Human
cugggagcugucaggagcgugu

SEQ ID NO: 515022 - RNA, 22 nt, Human
gaggaaagaaccccagucaaua

SEQ ID NO: 515023 - RNA, 22 nt, Human
gucagggcacagugacagcucc

SEQ ID NO: 515024 - RNA, 22 nt, Human
uccuggccuugcuccugaugcc

SEQ ID NO: 515025 - RNA, 22 nt, Human
uacugccuggagcauuggugcu

SEQ ID NO: 515026 - RNA, 22 nt, Human
ugcagugguguccagguguacu

SEQ ID NO: 515027 - RNA, 22 nt, Human
uaaugagaauucuuuuugggua

SEQ ID NO: 515028 - RNA, 22 nt, Human
aaccagagaaauggagugauaa

SEQ ID NO: 515029 - RNA, 22 nt, Human
ugggcuccggcggccucaggcu

SEQ ID NO: 515030 - RNA, 22 nt, Human
gcugaggccccagggugauggg

SEQ ID NO: 515031 - RNA, 22 nt, Human
ucuguggcuuccuauuucuugg

SEQ ID NO: 515032 - RNA, 22 nt, Human
uccugaggacccugucaggggc

SEQ ID NO: 515033 - RNA, 22 nt, Human
ucacucuggaguccgcuaccag

SEQ ID NO: 515034 - RNA, 22 nt, Human
cucugggccaccgcugguguau

SEQ ID NO: 515035 - RNA, 22 nt, Human
aggucuggagugggaucugaga

SEQ ID NO: 515036 - RNA, 22 nt, Human
guacaacaggauugauguacca

SEQ ID NO: 515037 - RNA, 22 nt, Human
gaugguuuggaaugaaguagcu

SEQ ID NO: 515038 - RNA, 22 nt, Human
aguguuccugcucucaggaagc

SEQ ID NO: 515039 - RNA, 22 nt, Human
ugucagagagcaggcaguagaa

SEQ ID NO: 515040 - RNA, 22 nt, Human
gagcacccuuugcacaucaguc

SEQ ID NO: 515041 - RNA, 22 nt, Human
cuuugugauaguguuaagacca

SEQ ID NO: 515042 - RNA, 22 nt, Human
uccaggucaucuuggagagcug

SEQ ID NO: 515043 - RNA, 22 nt, Human
gggcucucaaggcagggcccca

SEQ ID NO: 515044 - RNA, 20 nt, Human
caguccugccccuuggggac

SEQ ID NO: 515045 - RNA, 22 nt, Human
uccuggcucgauugcuaccaau

SEQ ID NO: 515046 - RNA, 22 nt, Human
acuggcugcgggguggaagaag

SEQ ID NO: 515047 - RNA, 22 nt, Human
cuagaaauacaggcacgugcca

SEQ ID NO: 515048 - RNA, 22 nt, Human
ucccuggguccugcuugcucuc

SEQ ID NO: 515049 - RNA, 22 nt, Human
uuucaacaucaccuagcaguuc

SEQ ID NO: 515050 - RNA, 22 nt, Human
ucugcccacugcucugcugccc

SEQ ID NO: 515051 - RNA, 22 nt, Human
augucuuuauaaauguauaaug

SEQ ID NO: 515052 - RNA, 22 nt, Human
acagaaauugcuaauagcucau

SEQ ID NO: 515053 - RNA, 22 nt, Human
ccuaagaauuaaugaauacacc

SEQ ID NO: 515054 - RNA, 22 nt, Human
acuggcagcuguaggaugcaug

SEQ ID NO: 515055 - RNA, 22 nt, Human
gagcugugagggacacauugcu

SEQ ID NO: 515056 - RNA, 22 nt, Human
ccuucaaguuccuggucccugg

SEQ ID NO: 515057 - RNA, 22 nt, Human
uaggaagguguuuuuaaggagc

SEQ ID NO: 515058 - RNA, 22 nt, Human
ccucugggcagguagcagcagc

SEQ ID NO: 515059 - RNA, 20 nt, Human
ucacauccucucccaacaug

SEQ ID NO: 515060 - RNA, 22 nt, Human
ucugggcuggugcucaugaauu

SEQ ID NO: 515061 - RNA, 22 nt, Human
gcagggcuguucaggagggugg

SEQ ID NO: 515062 - RNA, 22 nt, Human
ccaggagucuggaugagguguc

SEQ ID NO: 515063 - RNA, 22 nt, Human
agugauggugagugagaagcuc

SEQ ID NO: 515064 - RNA, 22 nt, Human
augauggugagguugagcacag

SEQ ID NO: 515065 - RNA, 22 nt, Human
ucuggcucucauacucgccagu

SEQ ID NO: 515066 - RNA, 22 nt, Human
cagaauuuuucgaauguacugu

SEQ ID NO: 515067 - RNA, 22 nt, Human
cuuuucacaggaggauaagccc

SEQ ID NO: 515068 - RNA, 18 nt, Human
ggaaggaguggaccccag

SEQ ID NO: 515069 - RNA, 22 nt, Human
ucuuccagcaaugugaaaucac

SEQ ID NO: 515070 - RNA, 22 nt, Human
uugaaagaagaagcugcgaugu

SEQ ID NO: 515071 - RNA, 22 nt, Human
ucacaggaaccaucagagaaau

SEQ ID NO: 515072 - RNA, 22 nt, Human
agguccaggccucaugauggcc

SEQ ID NO: 515073 - RNA, 22 nt, Human
ucagagugaggcgucaacauga

SEQ ID NO: 515074 - RNA, 20 nt, Human
aaacagcuaaaccagcucuc

SEQ ID NO: 515075 - RNA, 22 nt, Human
auagguccaaggagaggucuuu

SEQ ID NO: 515076 - RNA, 22 nt, Human
uuaaacaguguuucaugugggg

SEQ ID NO: 515077 - RNA, 22 nt, Human
uucucugcagcuuaggcccagu

SEQ ID NO: 515078 - RNA, 22 nt, Human
agucccagccuaggcugugcug

SEQ ID NO: 515079 - RNA, 22 nt, Human
ugggagaacccagggucaggcu

SEQ ID NO: 515080 - RNA, 22 nt, Human
uacagggguaacaguggggaau

SEQ ID NO: 515081 - RNA, 22 nt, Human
ggaggccaaggcaggcggauca

SEQ ID NO: 515082 - RNA, 22 nt, Human
agcagccaaaugaagauuuuac

SEQ ID NO: 515083 - RNA, 22 nt, Human
ucagagaggauuuuaauaagug

SEQ ID NO: 515084 - RNA, 22 nt, Human
ugcagcucauugguguccuggu

SEQ ID NO: 515085 - RNA, 23 nt, Human
aaguagauaacacuguucugaga

SEQ ID NO: 515086 - RNA, 22 nt, Human
uaauuuaauccaaguguuacau

SEQ ID NO: 515087 - RNA, 22 nt, Human
ugcccuggcuggagugcagugg

SEQ ID NO: 515088 - RNA, 22 nt, Human
ucuggggaugagugaugucgua

SEQ ID NO: 515089 - RNA, 22 nt, Human
gcagggguuuucugacuugagu

SEQ ID NO: 515090 - RNA, 22 nt, Human
gaacccaguccaggugcagccu

SEQ ID NO: 515091 - RNA, 22 nt, Human
ucucuuuuauguacacccugac

SEQ ID NO: 515092 - RNA, 23 nt, Human
cccagcgcugagcccugcaggca

SEQ ID NO: 515093 - RNA, 22 nt, Human
cucuuugugcuauuaugauccu

SEQ ID NO: 515094 - RNA, 22 nt, Human
ggcacugggagaggugagacgg

SEQ ID NO: 515095 - RNA, 22 nt, Human
cacugauuaagucugcuagagg

SEQ ID NO: 515096 - RNA, 22 nt, Human
ugcccuuggguaacuugcugau

SEQ ID NO: 515097 - RNA, 22 nt, Human
uaagcauaacuaaaaaugauuu

SEQ ID NO: 515098 - RNA, 22 nt, Human
uaauuucuaauucauuuucagu

SEQ ID NO: 515099 - RNA, 22 nt, Human
uacuuccuguuuccaugucugu

SEQ ID NO: 515100 - RNA, 22 nt, Human
gugucacaugguuuacugcagc

SEQ ID NO: 515101 - RNA, 22 nt, Human
agugaccauuuucagcuagagg

SEQ ID NO: 515102 - RNA, 20 nt, Human
aacuuguucuaccuguuuca

SEQ ID NO: 515103 - RNA, 19 nt, Human
ugugauaagcagaauucca

SEQ ID NO: 515104 - RNA, 19 nt, Human
agugcagggagcacccuca

SEQ ID NO: 515105 - RNA, 22 nt, Human
uuuggaauuaugcuuaaaguuu

SEQ ID NO: 515106 - RNA, 22 nt, Human
ggccagggaggagaggccccug

SEQ ID NO: 515107 - RNA, 22 nt, Human
uggcaccugaacuuagaggugu

SEQ ID NO: 515108 - RNA, 20 nt, Human
uaucaaucagaaagaagacu

SEQ ID NO: 515109 - RNA, 19 nt, Human
ccagagucaugucuccccc

SEQ ID NO: 515110 - RNA, 22 nt, Human
cauuacauuucaaaauguuucc

SEQ ID NO: 515111 - RNA, 22 nt, Human
ccugcagguccccggaugcgca

SEQ ID NO: 515112 - RNA, 22 nt, Human
cccucugcugccuggcuggguc

SEQ ID NO: 515113 - RNA, 22 nt, Human
ucaggaucggccuuuuuuuaag

SEQ ID NO: 515114 - RNA, 22 nt, Human
acauucauuccaggucagucag

SEQ ID NO: 515115 - RNA, 22 nt, Human
ggcacagggggcugaggacuag

SEQ ID NO: 515116 - RNA, 22 nt, Human
aggugagugugacugcaagaga

SEQ ID NO: 515117 - RNA, 22 nt, Human
aucuccaggcauuucaagagac

SEQ ID NO: 515118 - RNA, 18 nt, Human
cccagcuuagcgccccuc

SEQ ID NO: 515119 - RNA, 22 nt, Human
guccugggcaugcagggcuuuc

SEQ ID NO: 515120 - RNA, 22 nt, Human
gagcugaaucagagauauuauu

SEQ ID NO: 515121 - RNA, 22 nt, Human
aggucaagggcaagagugaggu

SEQ ID NO: 515122 - RNA, 17 nt, Human
gcagccagugcagcagg

SEQ ID NO: 515123 - RNA, 22 nt, Human
gcuacagacugagcauggcucu

SEQ ID NO: 515124 - RNA, 22 nt, Human
uggcugggggugcuauagcugc

SEQ ID NO: 515125 - RNA, 22 nt, Human
augugaaacugaagcauccaua

SEQ ID NO: 515126 - RNA, 22 nt, Human
gcagagccaggagcccaggauc

SEQ ID NO: 515127 - RNA, 22 nt, Human
ucccuguccugggcaaucccag

SEQ ID NO: 515128 - RNA, 22 nt, Human
ccugccaggcuuugggcuucug

SEQ ID NO: 515129 - RNA, 22 nt, Human
ugauauuuuaugagcuuucaua

SEQ ID NO: 515130 - RNA, 21 nt, Human
agggccagaucaccaaggagc

SEQ ID NO: 515131 - RNA, 22 nt, Human
gaaaucugcuucuugcauagua

SEQ ID NO: 515132 - RNA, 22 nt, Human
auagggccuaaaaaguauugcu

SEQ ID NO: 515133 - RNA, 22 nt, Human
guauuugauacaugaaauggug

SEQ ID NO: 515134 - RNA, 22 nt, Human
uaaaugcagcaguuucuguucu

SEQ ID NO: 515135 - RNA, 23 nt, Human
gguaccagcacagaguggagagg

SEQ ID NO: 515136 - RNA, 22 nt, Human
accaggaguuuugaccaggggc

SEQ ID NO: 515137 - RNA, 22 nt, Human
gcucugggccauccuggccggg

SEQ ID NO: 515138 - RNA, 22 nt, Human
auugaaagauaggcuacugugg

SEQ ID NO: 515139 - RNA, 22 nt, Human
cugcagggugacguugcccacc

SEQ ID NO: 515140 - RNA, 21 nt, Human
ccagagccugcugagcccccu

SEQ ID NO: 515141 - RNA, 20 nt, Human
ccucaagcagacugacagcu

SEQ ID NO: 515142 - RNA, 22 nt, Human
gauuuauuggucuuucauuggu

SEQ ID NO: 515143 - RNA, 22 nt, Human
ggcuuuauuaagcaggguaagu

SEQ ID NO: 515144 - RNA, 22 nt, Human
aagcuuucagagcagaauguga

SEQ ID NO: 515145 - RNA, 22 nt, Human
cagguccacggcgcccaggggu

SEQ ID NO: 515146 - RNA, 22 nt, Human
agcugucagugcugugccugua

SEQ ID NO: 515147 - RNA, 22 nt, Human
cauacuuugggauaagagugga

SEQ ID NO: 515148 - RNA, 22 nt, Human
acauucugucaacagugagcag

SEQ ID NO: 515149 - RNA, 22 nt, Human
ucucagaguuuacggggcugaa

SEQ ID NO: 515150 - RNA, 22 nt, Human
ucccagcagcauagcucagaau

SEQ ID NO: 515151 - RNA, 22 nt, Human
ucucuuuaaguauaaucuuaua

SEQ ID NO: 515152 - RNA, 21 nt, Human
ugaaacaaucagacagagucu

SEQ ID NO: 515153 - RNA, 22 nt, Human
caucagagugguggccuggugu

SEQ ID NO: 515154 - RNA, 22 nt, Human
aaauugugcucacacugauauu

SEQ ID NO: 515155 - RNA, 22 nt, Human
aaaagcaaggcagucugucuga

SEQ ID NO: 515156 - RNA, 22 nt, Human
ugaaagcucugucaucauuccu

SEQ ID NO: 515157 - RNA, 22 nt, Human
cuggcuuguuuuaagaauacaa

SEQ ID NO: 515158 - RNA, 22 nt, Human
agaggcccugggcuggugugcu

SEQ ID NO: 515159 - RNA, 22 nt, Human
uuucaaauggagucgugaaaug

SEQ ID NO: 515160 - RNA, 21 nt, Human
agcuggugucagagcucuggg

SEQ ID NO: 515161 - RNA, 22 nt, Human
uucuaagcucugaaauaaaucu

SEQ ID NO: 515162 - RNA, 22 nt, Human
ggaccagagaagugagcaccug

SEQ ID NO: 515163 - RNA, 22 nt, Human
uagccacaugcagacuuucaug

SEQ ID NO: 515164 - RNA, 18 nt, Human
acauuucuaggugaaagc

SEQ ID NO: 515165 - RNA, 22 nt, Human
auuuagaacuuuguuugccaau

SEQ ID NO: 515166 - RNA, 22 nt, Human
gcuggccauggccugcgccauc

SEQ ID NO: 515167 - RNA, 22 nt, Human
ccagcuggcccagcugugcucc

SEQ ID NO: 515168 - RNA, 22 nt, Human
uggcagaaguucacuaguagcu

SEQ ID NO: 515169 - RNA, 22 nt, Human
cacaggagcuguggggcagugu

SEQ ID NO: 515170 - RNA, 22 nt, Human
uccacagggauguugaguucuu

SEQ ID NO: 515171 - RNA, 22 nt, Human
ugcugagucguauuauuuuuua

SEQ ID NO: 515172 - RNA, 22 nt, Human
uacuguguggugagcugucucc

SEQ ID NO: 515173 - RNA, 22 nt, Human
ugggcuccuugggagcaaguga

SEQ ID NO: 515174 - RNA, 22 nt, Human
uacagaaaaacaucuggagccg

SEQ ID NO: 515175 - RNA, 22 nt, Human
auuucagcagcccauguuugga

SEQ ID NO: 515176 - RNA, 22 nt, Human
augguuuguaacccaauacucc

SEQ ID NO: 515177 - RNA, 22 nt, Human
gugcugaagugaaauucaucaa

SEQ ID NO: 515178 - RNA, 22 nt, Human
ucuggccccggucuucacagcu

SEQ ID NO: 515179 - RNA, 22 nt, Human
gccucugcccauccaccaucag

SEQ ID NO: 515180 - RNA, 22 nt, Human
ggccaaggaugguggcucuggu

SEQ ID NO: 515181 - RNA, 22 nt, Human
ugcagguggauucaauguggga

SEQ ID NO: 515182 - RNA, 22 nt, Human
ggcuucugaaccaggcccugga

SEQ ID NO: 515183 - RNA, 22 nt, Human
gcacagaggaugaggcagcucu

SEQ ID NO: 515184 - RNA, 22 nt, Human
auguucuaaucccugcuaugua

SEQ ID NO: 515185 - RNA, 22 nt, Human
ucacagacuguguugcuacuca

SEQ ID NO: 515186 - RNA, 22 nt, Human
uccagcuggggacaugggcuuc

SEQ ID NO: 515187 - RNA, 18 nt, Human
uaaauauauuucccccuu

SEQ ID NO: 515188 - RNA, 22 nt, Human
caugagaagguuuuggcauaua

SEQ ID NO: 515189 - RNA, 22 nt, Human
uauuuugcaaaccugaguuuga

SEQ ID NO: 515190 - RNA, 22 nt, Human
uguggaauauuagauuagguug

SEQ ID NO: 515191 - RNA, 22 nt, Human
caggugggagcggagacugauu

SEQ ID NO: 515192 - RNA, 22 nt, Human
ugcaaguaugacagccccaugg

SEQ ID NO: 515193 - RNA, 22 nt, Human
gucucccaucguuugugaggaa

SEQ ID NO: 515194 - RNA, 22 nt, Human
uugcauugaaugcacauuuuua

SEQ ID NO: 515195 - RNA, 22 nt, Human
ugagcagaacacgggauccaug

SEQ ID NO: 515196 - RNA, 22 nt, Human
ugagaaggcucaggcuuagaga

SEQ ID NO: 515197 - RNA, 22 nt, Human
auagaaaacagauguccuuaaa

SEQ ID NO: 515198 - RNA, 22 nt, Human
agugugagcccuggaguggugc

SEQ ID NO: 515199 - RNA, 22 nt, Human
cucagaguucuccugggaggug

SEQ ID NO: 515200 - RNA, 22 nt, Human
ugcuuuauuuauaaaauagcaa

SEQ ID NO: 515201 - RNA, 23 nt, Human
aagaggaggcccugcucccgucc

SEQ ID NO: 515202 - RNA, 22 nt, Human
caugugugaguauaucuuaucc

SEQ ID NO: 515203 - RNA, 22 nt, Human
cuguggcugugaaacuucucag

SEQ ID NO: 515204 - RNA, 22 nt, Human
ucucuggcacauaauaaggucu

SEQ ID NO: 515205 - RNA, 22 nt, Human
uauugaaauucuucauguccuc

SEQ ID NO: 515206 - RNA, 22 nt, Human
aagcagcauaauugcuauuuua

SEQ ID NO: 515207 - RNA, 22 nt, Human
guuuauaaauucugcuuuuguu

SEQ ID NO: 515208 - RNA, 22 nt, Human
gccagugugguguagucaugaa

SEQ ID NO: 515209 - RNA, 22 nt, Human
ggcagcuggguuggccagaaac

SEQ ID NO: 515210 - RNA, 22 nt, Human
ggcuccaagucucagagugaag

SEQ ID NO: 515211 - RNA, 22 nt, Human
gcauggccaggaaagguagaaa

SEQ ID NO: 515212 - RNA, 22 nt, Human
uggcagaaugaagacuggggcc

SEQ ID NO: 515213 - RNA, 22 nt, Human
caauguaucaaccagaaaguuc

SEQ ID NO: 515214 - RNA, 22 nt, Human
ggcugggcaaacaagacucuuc

SEQ ID NO: 515215 - RNA, 22 nt, Human
uuucuuccuuaccuuacuagag

SEQ ID NO: 515216 - RNA, 22 nt, Human
ccaggccaaauucagucagcag

SEQ ID NO: 515217 - RNA, 22 nt, Human
aaggggaaguagcaccagaggu

SEQ ID NO: 515218 - RNA, 22 nt, Human
ugcugcuccccagcacacagca

SEQ ID NO: 515219 - RNA, 22 nt, Human
ucuggccuacuggaguccauga

SEQ ID NO: 515220 - RNA, 22 nt, Human
auucagucaaaaaugauggaga

SEQ ID NO: 515221 - RNA, 22 nt, Human
augggguggaguccgggcagcg

SEQ ID NO: 515222 - RNA, 20 nt, Human
cgcccagugcgguucugacc

SEQ ID NO: 515223 - RNA, 22 nt, Human
agucccagaucuacaggaggga

SEQ ID NO: 515224 - RNA, 22 nt, Human
agggcagcuagcuguagaaaga

SEQ ID NO: 515225 - RNA, 22 nt, Human
ucagucucuggggcuucuguuu

SEQ ID NO: 515226 - RNA, 22 nt, Human
accaggcaguauggugcugcaa

SEQ ID NO: 515227 - RNA, 18 nt, Human
ucucuuuuccccucauug

SEQ ID NO: 515228 - RNA, 22 nt, Human
uuugcauuguuucaaaagugaa

SEQ ID NO: 515229 - RNA, 22 nt, Human
agcuccugggccaagcccaugc

SEQ ID NO: 515230 - RNA, 22 nt, Human
auuccuugggaauuauugaaug

SEQ ID NO: 515231 - RNA, 22 nt, Human
gucauuuuucacugcauauaga

SEQ ID NO: 515232 - RNA, 22 nt, Human
ugaaaucuucacuaagucucuu

SEQ ID NO: 515233 - RNA, 22 nt, Human
agggcccuagggaaugagacau

SEQ ID NO: 515234 - RNA, 21 nt, Human
uucaagauauuuaaaaggugg

SEQ ID NO: 515235 - RNA, 20 nt, Human
uggagccaaggugugucugg

SEQ ID NO: 515236 - RNA, 17 nt, Human
agcaaaaguaucaaagc

SEQ ID NO: 515237 - RNA, 22 nt, Human
ugggccaggauuucaagacccu

SEQ ID NO: 515238 - RNA, 22 nt, Human
uggagccaugccuggccuuucc

SEQ ID NO: 515239 - RNA, 22 nt, Human
caggggcuagcacuuaauguuu

SEQ ID NO: 515240 - RNA, 22 nt, Human
cagggcuucuuggcauuugcug

SEQ ID NO: 515241 - RNA, 22 nt, Human
gggcccuggauuuaagcaugga

SEQ ID NO: 515242 - RNA, 22 nt, Human
ucugagaguccaucuccaagcc

SEQ ID NO: 515243 - RNA, 22 nt, Human
agaaaagggcaggagggauaca

SEQ ID NO: 515244 - RNA, 22 nt, Human
ggagccuguggccgucacgacu

SEQ ID NO: 515245 - RNA, 22 nt, Human
ugauuuuuagcuauucugaaga

SEQ ID NO: 515246 - RNA, 22 nt, Human
uccagugguuugaaaggggugu

SEQ ID NO: 515247 - RNA, 22 nt, Human
ucugaagguugagaagggcuga

SEQ ID NO: 515248 - RNA, 19 nt, Human
ucacaggcaucuccccaga

SEQ ID NO: 515249 - RNA, 22 nt, Human
gcacagggccuggcacauaaga

SEQ ID NO: 515250 - RNA, 22 nt, Human
gcugccagcucacucuccugag

SEQ ID NO: 515251 - RNA, 22 nt, Human
aagcaauauacugauaugauua

SEQ ID NO: 515252 - RNA, 22 nt, Human
agccagcaugaagacagaggcc

SEQ ID NO: 515253 - RNA, 22 nt, Human
cugaaggacacgugaggagcca

SEQ ID NO: 515254 - RNA, 22 nt, Human
ccuggagcaaaaaucuaaggag

SEQ ID NO: 515255 - RNA, 17 nt, Human
ucaugcccaacuauuac

SEQ ID NO: 515256 - RNA, 22 nt, Human
cuuagcuuuguuuaacacaggg

SEQ ID NO: 515257 - RNA, 22 nt, Human
aggagcuaauucauaagccacu

SEQ ID NO: 515258 - RNA, 20 nt, Human
caccaggcgcucugagaaca

SEQ ID NO: 515259 - RNA, 22 nt, Human
ggcaaggccuugcccagcauuc

SEQ ID NO: 515260 - RNA, 22 nt, Human
gucccuggaauggacucugcgc

SEQ ID NO: 515261 - RNA, 22 nt, Human
ucuucuguuuuagauugcauac

SEQ ID NO: 515262 - RNA, 22 nt, Human
uugacaaaggaccuugcuauuu

SEQ ID NO: 515263 - RNA, 22 nt, Human
uucaggugucaaggauaggcug

SEQ ID NO: 515264 - RNA, 22 nt, Human
ugcuggggagugauugaccauc

SEQ ID NO: 515265 - RNA, 22 nt, Human
uaaacagccuaaaacuuucuuu

SEQ ID NO: 515266 - RNA, 22 nt, Human
caugcauuccuccucugccuua

SEQ ID NO: 515267 - RNA, 22 nt, Human
ugcagcaguuuaaugcaggguu

SEQ ID NO: 515268 - RNA, 17 nt, Human
uagcugccccgaaugcu

SEQ ID NO: 515269 - RNA, 22 nt, Human
uugagcuugaggaguuauuuga

SEQ ID NO: 515270 - RNA, 22 nt, Human
caagagcuggguggcaagcuag

SEQ ID NO: 515271 - RNA, 22 nt, Human
cugggcugugguguggcccaaa

SEQ ID NO: 515272 - RNA, 22 nt, Human
gcugaaggaggcucugguacua

SEQ ID NO: 515273 - RNA, 22 nt, Human
cagagcuggcucugcauguaca

SEQ ID NO: 515274 - RNA, 22 nt, Human
aaaucucaauuugaauuguagc

SEQ ID NO: 515275 - RNA, 22 nt, Human
agcccugggcagccaaggaagc

SEQ ID NO: 515276 - RNA, 22 nt, Human
uggccucugcaauggauucacc

SEQ ID NO: 515277 - RNA, 22 nt, Human
ucuguggcuugggccugccugu

SEQ ID NO: 515278 - RNA, 22 nt, Human
cucaugauguagcgaaugagaa

SEQ ID NO: 515279 - RNA, 20 nt, Human
agcaguuuccuaacucagcu

SEQ ID NO: 515280 - RNA, 22 nt, Human
acagccagggcauugucgccga

SEQ ID NO: 515281 - RNA, 21 nt, Human
uuggccuuugucucagacacu

SEQ ID NO: 515282 - RNA, 22 nt, Human
ccuguucaagguauuaauuauc

SEQ ID NO: 515283 - RNA, 20 nt, Human
uccagggcuagggagcucau

SEQ ID NO: 515284 - RNA, 22 nt, Human
uucaagaucuuccaaaggauac

SEQ ID NO: 515285 - RNA, 17 nt, Human
agguggguggaucaccu

SEQ ID NO: 515286 - RNA, 22 nt, Human
gcuacaaacugucauggugcuu

SEQ ID NO: 515287 - RNA, 23 nt, Human
uggcagagacccagaaucuacau

SEQ ID NO: 515288 - RNA, 22 nt, Human
agauuucccaaauacuuguuau

SEQ ID NO: 515289 - RNA, 22 nt, Human
ggggaccuucccagagcaguug

SEQ ID NO: 515290 - RNA, 22 nt, Human
uuagggacaaauuugcagaacc

SEQ ID NO: 515291 - RNA, 22 nt, Human
guccugaggcaggauggguuuc

SEQ ID NO: 515292 - RNA, 21 nt, Human
agguggggcugcaccucugcu

SEQ ID NO: 515293 - RNA, 22 nt, Human
ccacagcaugcaggccugacac

SEQ ID NO: 515294 - RNA, 22 nt, Human
gcuggcucccauugguccuucc

SEQ ID NO: 515295 - RNA, 22 nt, Human
gauuucaccugaucuugucauc

SEQ ID NO: 515296 - RNA, 22 nt, Human
cacugggcaauucugagccuaa

SEQ ID NO: 515297 - RNA, 22 nt, Human
cugugcccaccuggcucugagg

SEQ ID NO: 515298 - RNA, 22 nt, Human
ucagcugcucuguugagcugaa

SEQ ID NO: 515299 - RNA, 22 nt, Human
aaagacuagcauuuauauguac

SEQ ID NO: 515300 - RNA, 22 nt, Human
aggcaguuuauccccagagccu

SEQ ID NO: 515301 - RNA, 21 nt, Human
ugggaugggucugggaccagc

SEQ ID NO: 515302 - RNA, 22 nt, Human
uauguguguuucaguggaaaug

SEQ ID NO: 515303 - RNA, 22 nt, Human
gcagagcaguacucucuugacu

SEQ ID NO: 515304 - RNA, 22 nt, Human
ucucugaagcuguuguagucuc

SEQ ID NO: 515305 - RNA, 22 nt, Human
ucuggcuccaggaccgggcaca

SEQ ID NO: 515306 - RNA, 18 nt, Human
agaagcagguaaaauucu

SEQ ID NO: 515307 - RNA, 22 nt, Human
gaugauauuuugacuggagaau

SEQ ID NO: 515308 - RNA, 22 nt, Human
gucucagauucagacaucuaca

SEQ ID NO: 515309 - RNA, 20 nt, Human
uccuucaggcagggccuagu

SEQ ID NO: 515310 - RNA, 22 nt, Human
gccacugcacuccagcccaggc

SEQ ID NO: 515311 - RNA, 22 nt, Human
ccagccccgggaaccuggccgu

SEQ ID NO: 515312 - RNA, 22 nt, Human
uugcagaaaacaguuuucuugu

SEQ ID NO: 515313 - RNA, 22 nt, Human
gggcugacgaaggccaugugug

SEQ ID NO: 515314 - RNA, 22 nt, Human
cccaaggcugcagugagcauga

SEQ ID NO: 515315 - RNA, 22 nt, Human
gccaggagaaugcuagcagagg

SEQ ID NO: 515316 - RNA, 23 nt, Human
uggcaccaggcauucuaggggua

SEQ ID NO: 515317 - RNA, 22 nt, Human
ccuggcugucguuuugugaaau

SEQ ID NO: 515318 - RNA, 22 nt, Human
ccucaggauccgcaggugcagu

SEQ ID NO: 515319 - RNA, 22 nt, Human
gccagagguucaacaacugucu

SEQ ID NO: 515320 - RNA, 22 nt, Human
aucagcaagcauuuauugagug

SEQ ID NO: 515321 - RNA, 22 nt, Human
gagagcugauagaugagcuacu

SEQ ID NO: 515322 - RNA, 23 nt, Human
cacaccaggagccgucugggcca

SEQ ID NO: 515323 - RNA, 22 nt, Human
aaugauguauuaguacaacaca

SEQ ID NO: 515324 - RNA, 21 nt, Human
aagccucaagcagaagacaga

SEQ ID NO: 515325 - RNA, 22 nt, Human
aauagauggguuaaacagcaaa

SEQ ID NO: 515326 - RNA, 22 nt, Human
ugacacaggcagcucccagcac

SEQ ID NO: 515327 - RNA, 22 nt, Human
accugaggacuggaugguagaa

SEQ ID NO: 515328 - RNA, 22 nt, Human
gaugaaaaucuugagaugucga

SEQ ID NO: 515329 - RNA, 22 nt, Human
ccuggccucagccuagggcuga

SEQ ID NO: 515330 - RNA, 22 nt, Human
cgcaggcuccggggugcccugg

SEQ ID NO: 515331 - RNA, 22 nt, Human
gggugcugacuggggccugaaa

SEQ ID NO: 515332 - RNA, 22 nt, Human
acagagcauauaaagugcuuug

SEQ ID NO: 515333 - RNA, 22 nt, Human
ccaggcucacagcaucccagga

SEQ ID NO: 515334 - RNA, 23 nt, Human
uguguacacaauagaugagguuu

SEQ ID NO: 515335 - RNA, 22 nt, Human
acaaguaccaaaugcucaagua

SEQ ID NO: 515336 - RNA, 22 nt, Human
gggaccugccauugcucacagg

SEQ ID NO: 515337 - RNA, 22 nt, Human
acuuagcaguuuagaauauguc

SEQ ID NO: 515338 - RNA, 22 nt, Human
gagugaaaaaggaagggccaua

SEQ ID NO: 515339 - RNA, 22 nt, Human
cucagggaggagcuucugggcc

SEQ ID NO: 515340 - RNA, 22 nt, Human
ggcagagucagaggugguucug

SEQ ID NO: 515341 - RNA, 22 nt, Human
gaaaucuuccaauggucacauc

SEQ ID NO: 515342 - RNA, 22 nt, Human
agcauuagguguguuucagagg

SEQ ID NO: 515343 - RNA, 22 nt, Human
uuucauuaaagucaaaucuggu

SEQ ID NO: 515344 - RNA, 22 nt, Human
aagaugauguuguguuuucacu

SEQ ID NO: 515345 - RNA, 22 nt, Human
ugagaaagacagacauuccuaa

SEQ ID NO: 515346 - RNA, 22 nt, Human
ucaggaagggcucagucugugc

SEQ ID NO: 515347 - RNA, 22 nt, Human
uuucuaagaugugguuucaagg

SEQ ID NO: 515348 - RNA, 22 nt, Human
aauaucuguggccauacaauuu

SEQ ID NO: 515349 - RNA, 22 nt, Human
uaaggccaccguuauagaacca

SEQ ID NO: 515350 - RNA, 22 nt, Human
aggaugagccgcgcaagcugac

SEQ ID NO: 515351 - RNA, 17 nt, Human
ugguuccaaccauacgc

SEQ ID NO: 515352 - RNA, 22 nt, Human
gccugguggacacugggcauca

SEQ ID NO: 515353 - RNA, 22 nt, Human
uagucacaguacaggauaaaga

SEQ ID NO: 515354 - RNA, 22 nt, Human
agccccuugugggcgcacagca

SEQ ID NO: 515355 - RNA, 22 nt, Human
ucuggcucggauuugucuagca

SEQ ID NO: 515356 - RNA, 22 nt, Human
gugcccugagcuuaugcauucu

SEQ ID NO: 515357 - RNA, 22 nt, Human
gaaguuacauacugucacuucu

SEQ ID NO: 515358 - RNA, 22 nt, Human
caugccuguauuucugaucuau

SEQ ID NO: 515359 - RNA, 22 nt, Human
gggaccuggcaccuuugcucug

SEQ ID NO: 515360 - RNA, 20 nt, Human
cagguccagcacgugcacgg

SEQ ID NO: 515361 - RNA, 22 nt, Human
agaugcagaguuugcuguggac

SEQ ID NO: 515362 - RNA, 22 nt, Human
gcuggccucaucacugacuucu

SEQ ID NO: 515363 - RNA, 22 nt, Human
ucugaacagaaaagaugcacaa

SEQ ID NO: 515364 - RNA, 22 nt, Human
cauaccuuucucaagcacaugu

SEQ ID NO: 515365 - RNA, 22 nt, Human
gcacacacaugugaguacaugc

SEQ ID NO: 515366 - RNA, 22 nt, Human
ccugccaggccagugagcuucc

SEQ ID NO: 515367 - RNA, 22 nt, Human
accaggggaugguuggcacugu

SEQ ID NO: 515368 - RNA, 22 nt, Human
acugugugacuguuauuacugu

SEQ ID NO: 515369 - RNA, 22 nt, Human
auacaucuugucagauucaugu

SEQ ID NO: 515370 - RNA, 22 nt, Human
cuccagguuuuacaaggucuau

SEQ ID NO: 515371 - RNA, 22 nt, Human
gcaggcugaugacuggaguugg

SEQ ID NO: 515372 - RNA, 22 nt, Human
uugaaggacauccuauuucuag

SEQ ID NO: 515373 - RNA, 22 nt, Human
gugcuuucugcugcauuccucu

SEQ ID NO: 515374 - RNA, 22 nt, Human
uugggccaaauagcuauuuacu

SEQ ID NO: 515375 - RNA, 22 nt, Human
aacuaauacauuaauacaugug

SEQ ID NO: 515376 - RNA, 22 nt, Human
ggcaucaggaucugucuugcuu

SEQ ID NO: 515377 - RNA, 18 nt, Human
gcaagcccucuccauuaa

SEQ ID NO: 515378 - RNA, 22 nt, Human
acuucuggugucauacugcauu

SEQ ID NO: 515379 - RNA, 22 nt, Human
gaguccuggcguccaauuuccu

SEQ ID NO: 515380 - RNA, 20 nt, Human
auucuaaagcucugcucuuu

SEQ ID NO: 515381 - RNA, 22 nt, Human
agcagaaccugcagaccugucu

SEQ ID NO: 515382 - RNA, 22 nt, Human
gccacagugggcuggggccaga

SEQ ID NO: 515383 - RNA, 17 nt, Human
auuugugauguaacguc

SEQ ID NO: 515384 - RNA, 23 nt, Human
uagggcagcugggagggacaugc

SEQ ID NO: 515385 - RNA, 22 nt, Human
ucaggaugguguggaggaaaua

SEQ ID NO: 515386 - RNA, 22 nt, Human
uccuggaguugucuguacucau

SEQ ID NO: 515387 - RNA, 22 nt, Human
cucauggagggagugcucuucc

SEQ ID NO: 515388 - RNA, 22 nt, Human
aucuggcucccuuggaauccgu

SEQ ID NO: 515389 - RNA, 22 nt, Human
acugcagccuagggaccacagu

SEQ ID NO: 515390 - RNA, 17 nt, Human
aggccucccuccaggcc

SEQ ID NO: 515391 - RNA, 22 nt, Human
ccaagggcucugacuugccugc

SEQ ID NO: 515392 - RNA, 21 nt, Human
gccugccugcgugacccucuu

SEQ ID NO: 515393 - RNA, 22 nt, Human
ugggauaguggccaggaccccc

SEQ ID NO: 515394 - RNA, 20 nt, Human
auucacaaagccaguguugc

SEQ ID NO: 515395 - RNA, 22 nt, Human
gggcuguaggagcuggaauggg

SEQ ID NO: 515396 - RNA, 22 nt, Human
uccaauguuccugcuuucagcu

SEQ ID NO: 515397 - RNA, 22 nt, Human
uuuagggacaagggucuggggu

SEQ ID NO: 515398 - RNA, 22 nt, Human
cuguggagugcuuggcucagug

SEQ ID NO: 515399 - RNA, 22 nt, Human
acauuucucagguaagucauuu

SEQ ID NO: 515400 - RNA, 22 nt, Human
uuguaugaggauagcaagaagc

SEQ ID NO: 515401 - RNA, 22 nt, Human
gagggagggccaggucccaacc

SEQ ID NO: 515402 - RNA, 22 nt, Human
cuucaaauacaaguagauuaug

SEQ ID NO: 515403 - RNA, 22 nt, Human
uguuuucuguguagagaucaca

SEQ ID NO: 515404 - RNA, 22 nt, Human
uaaauuuacccaaggaacaugu

SEQ ID NO: 515405 - RNA, 22 nt, Human
cuuuucuguaucaaaaggauua

SEQ ID NO: 515406 - RNA, 22 nt, Human
cauuagggacugaggaauaagg

SEQ ID NO: 515407 - RNA, 22 nt, Human
aucuagauuagguauaagagcu

SEQ ID NO: 515408 - RNA, 22 nt, Human
ccuggaaggugaugguacagca

SEQ ID NO: 515409 - RNA, 22 nt, Human
cugcacagcccucaagagccug

SEQ ID NO: 515410 - RNA, 22 nt, Human
agaggccccaggugagcaugcc

SEQ ID NO: 515411 - RNA, 22 nt, Human
gagagcacaugaacauggagga

SEQ ID NO: 515412 - RNA, 22 nt, Human
agguggggcugggaaagauucc

SEQ ID NO: 515413 - RNA, 22 nt, Human
ucaggucuguacuauugucuug

SEQ ID NO: 515414 - RNA, 22 nt, Human
gcuggagccuucugcucuguug

SEQ ID NO: 515415 - RNA, 20 nt, Human
cuuagcuucuaagguucugg

SEQ ID NO: 515416 - RNA, 23 nt, Human
acagaaaguucugcuggacagag

SEQ ID NO: 515417 - RNA, 22 nt, Human
gaaucaauugugaagacuauga

SEQ ID NO: 515418 - RNA, 22 nt, Human
uccucccugaguggggacagcu

SEQ ID NO: 515419 - RNA, 22 nt, Human
caagagcuacccugugccauau

SEQ ID NO: 515420 - RNA, 22 nt, Human
uuugcuuucuugauucagauua

SEQ ID NO: 515421 - RNA, 22 nt, Human
gaggccaggacaugaaagcuga

SEQ ID NO: 515422 - RNA, 22 nt, Human
ggagcugggacccugucaucug

SEQ ID NO: 515423 - RNA, 22 nt, Human
ucagcagaggggaaggcaucug

SEQ ID NO: 515424 - RNA, 22 nt, Human
ugggcucagucugcuugguccu

SEQ ID NO: 515425 - RNA, 22 nt, Human
gcuggggagcaagaguagugag

SEQ ID NO: 515426 - RNA, 22 nt, Human
ugauauggcuaaagaaaguuuc

SEQ ID NO: 515427 - RNA, 22 nt, Human
uugaaucuggguacuuguaaua

SEQ ID NO: 515428 - RNA, 22 nt, Human
uuccucaugggguuccuucaga

SEQ ID NO: 515429 - RNA, 22 nt, Human
ccagggugaggaggcucccacg

SEQ ID NO: 515430 - RNA, 22 nt, Human
uccagcccgacugggccugccg

SEQ ID NO: 515431 - RNA, 20 nt, Human
ucucaggcccccuccuugcu

SEQ ID NO: 515432 - RNA, 22 nt, Human
gugcugauugggagcugggauu

SEQ ID NO: 515433 - RNA, 22 nt, Human
gcagacagacugcagugauuuu

SEQ ID NO: 515434 - RNA, 22 nt, Human
uagcagagguaaguguggcaau

SEQ ID NO: 515435 - RNA, 22 nt, Human
cugggucugugcccagggaccu

SEQ ID NO: 515436 - RNA, 18 nt, Human
gggcacuggggacuggag

SEQ ID NO: 515437 - RNA, 22 nt, Human
cuggucaccagguagcauugua

SEQ ID NO: 515438 - RNA, 22 nt, Human
uccucagaaaccccugugaggu

SEQ ID NO: 515439 - RNA, 22 nt, Human
ccuggacucaggcugugggcac

SEQ ID NO: 515440 - RNA, 22 nt, Human
agcagggccaacaguaaacacc

SEQ ID NO: 515441 - RNA, 22 nt, Human
gcagagacuccacugucuugug

SEQ ID NO: 515442 - RNA, 22 nt, Human
ugaggcaggaauggggaaaagu

SEQ ID NO: 515443 - RNA, 20 nt, Human
cuguccccgaggucaccagg

SEQ ID NO: 515444 - RNA, 22 nt, Human
uuguugaauggauaaauaaauu

SEQ ID NO: 515445 - RNA, 22 nt, Human
gcugaggcaaauaguuuuaagu

SEQ ID NO: 515446 - RNA, 20 nt, Human
acguggccaccaguggcuua

SEQ ID NO: 515447 - RNA, 22 nt, Human
uggcagagaacacggcugaucu

SEQ ID NO: 515448 - RNA, 22 nt, Human
aaaucaguuaagaugaggccau

SEQ ID NO: 515449 - RNA, 22 nt, Human
uucauuuguggugaaugaagug

SEQ ID NO: 515450 - RNA, 22 nt, Human
uacaguuucccagcagaugcaa

SEQ ID NO: 515451 - RNA, 22 nt, Human
uugaguguaaggaauguggggc

SEQ ID NO: 515452 - RNA, 22 nt, Human
ccuuucugauggccucccagcc

SEQ ID NO: 515453 - RNA, 22 nt, Human
agcuuucacgauuuggaacagg

SEQ ID NO: 515454 - RNA, 22 nt, Human
ggcagggaggaggugaaaguga

SEQ ID NO: 515455 - RNA, 22 nt, Human
caggccccauuccucuugggac

SEQ ID NO: 515456 - RNA, 20 nt, Human
ucacaggagggaaggcaggu

SEQ ID NO: 515457 - RNA, 20 nt, Human
gcaggucccuggcaugcaga

SEQ ID NO: 515458 - RNA, 22 nt, Human
ucauugcagcuucagguguuca

SEQ ID NO: 515459 - RNA, 22 nt, Human
auuccaguuaguggcagcuuau

SEQ ID NO: 515460 - RNA, 22 nt, Human
uacaaagcuguauagccugguc

SEQ ID NO: 515461 - RNA, 22 nt, Human
aggacacaugcacacccugcgu

SEQ ID NO: 515462 - RNA, 17 nt, Human
cauuuguugaucaguug

SEQ ID NO: 515463 - RNA, 22 nt, Human
ugcucccagggacucuggcugg

SEQ ID NO: 515464 - RNA, 22 nt, Human
aggcaggugggagugauuccuu

SEQ ID NO: 515465 - RNA, 22 nt, Human
agggccaggaacaccugaaggg

SEQ ID NO: 515466 - RNA, 22 nt, Human
ugauuucccucaucauaacaga

SEQ ID NO: 515467 - RNA, 22 nt, Human
ugugacaucgcugugucuguuu

SEQ ID NO: 515468 - RNA, 22 nt, Human
cacacaguaggcacucauuaau

SEQ ID NO: 515469 - RNA, 22 nt, Human
uacuuagagcgauaauuuauac

SEQ ID NO: 515470 - RNA, 22 nt, Human
uagaaaucuacuuagacuuucu

SEQ ID NO: 515471 - RNA, 22 nt, Human
gugugagagaagcugccaugga

SEQ ID NO: 515472 - RNA, 22 nt, Human
gcugucugucucugugacuuaa

SEQ ID NO: 515473 - RNA, 22 nt, Human
acagauguggaguuugcaugau

SEQ ID NO: 515474 - RNA, 22 nt, Human
agggcugcccagugugagagcu

SEQ ID NO: 515475 - RNA, 19 nt, Human
acacagggcuagaguuaca

SEQ ID NO: 515476 - RNA, 22 nt, Human
ggucucaggagacuggagagca

SEQ ID NO: 515477 - RNA, 22 nt, Human
ucccuccuuaauaagaggucug

SEQ ID NO: 515478 - RNA, 22 nt, Human
guccaguguguuuaucuuggau

SEQ ID NO: 515479 - RNA, 22 nt, Human
ucagcugaguucuagagcacuc

SEQ ID NO: 515480 - RNA, 22 nt, Human
gggcggugccugucuccgaagc

SEQ ID NO: 515481 - RNA, 22 nt, Human
aaugcuagugugauauguaagg

SEQ ID NO: 515482 - RNA, 22 nt, Human
guuagcaugauuccugcucauu

SEQ ID NO: 515483 - RNA, 22 nt, Human
uggagcaggugccaggugugug

SEQ ID NO: 515484 - RNA, 22 nt, Human
cagagacauuaagugccaugau

SEQ ID NO: 515485 - RNA, 22 nt, Human
aggagcuguuuuguucagcaaa

SEQ ID NO: 515486 - RNA, 22 nt, Human
gagacaaaaguuggagugcaag

SEQ ID NO: 515487 - RNA, 22 nt, Human
cccaggcuggagugcaauggca

SEQ ID NO: 515488 - RNA, 22 nt, Human
gaguggggucugggcaucaguc

SEQ ID NO: 515489 - RNA, 22 nt, Human
caggugagcucuaucuagggag

SEQ ID NO: 515490 - RNA, 22 nt, Human
ggguucagacuaaagcuaugca

SEQ ID NO: 515491 - RNA, 22 nt, Human
uuuuuggguccaggcuguaucu

SEQ ID NO: 515492 - RNA, 21 nt, Human
uccagggaauuucaacuuuua

SEQ ID NO: 515493 - RNA, 22 nt, Human
cucccaagggguaagggagcug

SEQ ID NO: 515494 - RNA, 22 nt, Human
cccagcagaccgcugugauggc

SEQ ID NO: 515495 - RNA, 22 nt, Human
ggacccugggcuugcuccuggg

SEQ ID NO: 515496 - RNA, 22 nt, Human
ucuggagccuuggaugggaaag

SEQ ID NO: 515497 - RNA, 20 nt, Human
cccagccccuaccuguugcc

SEQ ID NO: 515498 - RNA, 22 nt, Human
aucaguuugauaauaaggcuug

SEQ ID NO: 515499 - RNA, 22 nt, Human
ucaaaacaacacucagguguaa

SEQ ID NO: 515500 - RNA, 22 nt, Human
gauuucuuuagguguaauagug

SEQ ID NO: 515501 - RNA, 22 nt, Human
auacaaagacaaaucucaaucu

SEQ ID NO: 515502 - RNA, 19 nt, Human
ugagacugggugcaguacu

SEQ ID NO: 515503 - RNA, 22 nt, Human
cagggcucaucugugugaccag

SEQ ID NO: 515504 - RNA, 22 nt, Human
acaacagagcuggacugagagg

SEQ ID NO: 515505 - RNA, 18 nt, Human
uggcagguagacucaggu

SEQ ID NO: 515506 - RNA, 22 nt, Human
gccuccuggccuuugcuccuca

SEQ ID NO: 515507 - RNA, 21 nt, Human
gcugggccuguacuugcccug

SEQ ID NO: 515508 - RNA, 21 nt, Human
agucccaggggugagugaugu

SEQ ID NO: 515509 - RNA, 22 nt, Human
uagggcuauucugaguaauaau

SEQ ID NO: 515510 - RNA, 18 nt, Human
ugagagcauucgaggcaa

SEQ ID NO: 515511 - RNA, 22 nt, Human
ggcagcuuuuaucccugacaga

SEQ ID NO: 515512 - RNA, 22 nt, Human
ucauuauuuuggacuggagugu

SEQ ID NO: 515513 - RNA, 22 nt, Human
cuuagaaauaaugguuucaguu

SEQ ID NO: 515514 - RNA, 22 nt, Human
aagcaauaaucccaaagugcug

SEQ ID NO: 515515 - RNA, 22 nt, Human
aacagcagggggaccugcuggu

SEQ ID NO: 515516 - RNA, 22 nt, Human
ugccacacagucugguagaaua

SEQ ID NO: 515517 - RNA, 22 nt, Human
uagcagggaaggugugcugagc

SEQ ID NO: 515518 - RNA, 22 nt, Human
gccuggcuugccagcccuggcg

SEQ ID NO: 515519 - RNA, 22 nt, Human
ccugccugacagagaagguuca

SEQ ID NO: 515520 - RNA, 22 nt, Human
agcagccacccagcugcucauu

SEQ ID NO: 515521 - RNA, 22 nt, Human
uggcagguuaacuuacaacugu

SEQ ID NO: 515522 - RNA, 21 nt, Human
gcaugccugcaucuuaguguu

SEQ ID NO: 515523 - RNA, 22 nt, Human
cacaugggugugccuggaggaa

SEQ ID NO: 515524 - RNA, 22 nt, Human
aggcugagcugaccugguuugg

SEQ ID NO: 515525 - RNA, 17 nt, Human
cucuggggacaguucua

SEQ ID NO: 515526 - RNA, 22 nt, Human
gcagagccagaauggccaggac

SEQ ID NO: 515527 - RNA, 22 nt, Human
ccaggucugcgggcggcaggca

SEQ ID NO: 515528 - RNA, 22 nt, Human
cugcaggcaucuaacugugggc

SEQ ID NO: 515529 - RNA, 22 nt, Human
uagcugugagcacccaggcugu

SEQ ID NO: 515530 - RNA, 22 nt, Human
agagggagcccagucauagcug

SEQ ID NO: 515531 - RNA, 22 nt, Human
gccuaauaugcaaaauugauac

SEQ ID NO: 515532 - RNA, 22 nt, Human
cauuacaugguccaggauauau

SEQ ID NO: 515533 - RNA, 22 nt, Human
gagagguacacccuuuaaacuu

SEQ ID NO: 515534 - RNA, 22 nt, Human
ugguuucuuuccacucuccacc

SEQ ID NO: 515535 - RNA, 22 nt, Human
gacaguuuuuaauccuuucaug

SEQ ID NO: 515536 - RNA, 22 nt, Human
ugaggccaagccuccucugcca

SEQ ID NO: 515537 - RNA, 22 nt, Human
uuuacagugucuuguugacugu

SEQ ID NO: 515538 - RNA, 22 nt, Human
uuuccauauucugcgucugcca

SEQ ID NO: 515539 - RNA, 22 nt, Human
aggcgcagacauacagggucug

SEQ ID NO: 515540 - RNA, 22 nt, Human
uuggccuuugucaucaagauca

SEQ ID NO: 515541 - RNA, 22 nt, Human
gcuucaaacugagcuucaagug

SEQ ID NO: 515542 - RNA, 22 nt, Human
gacccagaaggagugcccuaga

SEQ ID NO: 515543 - RNA, 22 nt, Human
ggcaggagauaaaauauuaguu

SEQ ID NO: 515544 - RNA, 22 nt, Human
ucccagggcacucacccucccu

SEQ ID NO: 515545 - RNA, 22 nt, Human
cauuucuacagcuucuucagaa

SEQ ID NO: 515546 - RNA, 22 nt, Human
ggcaggacagucccaguucaaa

SEQ ID NO: 515547 - RNA, 21 nt, Human
gaaaggucuuaacuuacagag

SEQ ID NO: 515548 - RNA, 22 nt, Human
cuggcuggcaaguagaacacaa

SEQ ID NO: 515549 - RNA, 22 nt, Human
agugcagccgagaucaggugcu

SEQ ID NO: 515550 - RNA, 22 nt, Human
uccugguggugccagcugcagg

SEQ ID NO: 515551 - RNA, 22 nt, Human
caggccucagagaguggcgggg

SEQ ID NO: 515552 - RNA, 22 nt, Human
gagacagaguuucacucuuguu

SEQ ID NO: 515553 - RNA, 23 nt, Human
uggagccugggauacaauagaug

SEQ ID NO: 515554 - RNA, 22 nt, Human
ggcuucucucccccagcuccac

SEQ ID NO: 515555 - RNA, 22 nt, Human
ucccucugguccucgguggaga

SEQ ID NO: 515556 - RNA, 22 nt, Human
ggcauguuucaucacaucaaga

SEQ ID NO: 515557 - RNA, 22 nt, Human
auuagcuuaguguuuccguaau

SEQ ID NO: 515558 - RNA, 22 nt, Human
aauuuucuaaggugaugaucug

SEQ ID NO: 515559 - RNA, 22 nt, Human
cugcuucuaagaaccugcagcu

SEQ ID NO: 515560 - RNA, 22 nt, Human
gcccugucccuuggcuucuagg

SEQ ID NO: 515561 - RNA, 22 nt, Human
cuggcucccguuguccuugaag

SEQ ID NO: 515562 - RNA, 20 nt, Human
uggcuucauaaugguuucug

SEQ ID NO: 515563 - RNA, 22 nt, Human
cuggagccggaccagggacggu

SEQ ID NO: 515564 - RNA, 22 nt, Human
augugugugcauuucucucccu

SEQ ID NO: 515565 - RNA, 22 nt, Human
ucaucuucuauuaauagggaga

SEQ ID NO: 515566 - RNA, 22 nt, Human
ucuggaaagaucauuaaaucca

SEQ ID NO: 515567 - RNA, 19 nt, Human
ugagaggcuuaaggcagcu

SEQ ID NO: 515568 - RNA, 22 nt, Human
aagggaggggauguaagccugg

SEQ ID NO: 515569 - RNA, 22 nt, Human
gggaggucagggugccugcugg

SEQ ID NO: 515570 - RNA, 22 nt, Human
agcaguggagcgagauguuuaa

SEQ ID NO: 515571 - RNA, 19 nt, Human
cugagagaugcuucacaca

SEQ ID NO: 515572 - RNA, 22 nt, Human
aucugggccuguucccucaccu

SEQ ID NO: 515573 - RNA, 22 nt, Human
guccugugucccagagaaagag

SEQ ID NO: 515574 - RNA, 22 nt, Human
auauuaaugagcaaguaaguga

SEQ ID NO: 515575 - RNA, 22 nt, Human
gcucugcuugcaucaugacugc

SEQ ID NO: 515576 - RNA, 22 nt, Human
gcugucugcugugcacugagca

SEQ ID NO: 515577 - RNA, 22 nt, Human
aauuccugucuuaacaguucug

SEQ ID NO: 515578 - RNA, 22 nt, Human
guacaaaaguuauugcgguuuu

SEQ ID NO: 515579 - RNA, 19 nt, Human
gccaggucuuggguccagg

SEQ ID NO: 515580 - RNA, 22 nt, Human
augggccacacacgauugggug

SEQ ID NO: 515581 - RNA, 22 nt, Human
aggcaggcucaggcccaugcuu

SEQ ID NO: 515582 - RNA, 22 nt, Human
uguggcugcuccugggugguca

SEQ ID NO: 515583 - RNA, 18 nt, Human
cucagagaugcccuuauu

SEQ ID NO: 515584 - RNA, 22 nt, Human
uggaagcacuuggguuuuguug

SEQ ID NO: 515585 - RNA, 22 nt, Human
uaugcacacauguaugcaugug

SEQ ID NO: 515586 - RNA, 22 nt, Human
uuguuuuauucugcaauuuccc

SEQ ID NO: 515587 - RNA, 21 nt, Human
gggccacucuagagaaagaaa

SEQ ID NO: 515588 - RNA, 22 nt, Human
gagaaagauguaggcugggagg

SEQ ID NO: 515589 - RNA, 22 nt, Human
uuucuggcagcgggacaggggu

SEQ ID NO: 515590 - RNA, 22 nt, Human
uuauuuauggcacuguuggugg

SEQ ID NO: 515591 - RNA, 22 nt, Human
ucauguguccuaguucauauaa

SEQ ID NO: 515592 - RNA, 19 nt, Human
agcauccagucaugggauc

SEQ ID NO: 515593 - RNA, 23 nt, Human
agcuccagggaacaggcaguagg

SEQ ID NO: 515594 - RNA, 22 nt, Human
uugaagagugccuuccagacau

SEQ ID NO: 515595 - RNA, 22 nt, Human
cugagcuuggccaggaaugaau

SEQ ID NO: 515596 - RNA, 22 nt, Human
ucccaagugucuuggaccaggg

SEQ ID NO: 515597 - RNA, 22 nt, Human
uucaagauaauaggaaugaaaa

SEQ ID NO: 515598 - RNA, 22 nt, Human
agaugguguuuccccaggugga

SEQ ID NO: 515599 - RNA, 22 nt, Human
uagauaauuuggcaucauauug

SEQ ID NO: 515600 - RNA, 22 nt, Human
gggaugucacugugccuggcac

SEQ ID NO: 515601 - RNA, 22 nt, Human
agguacagcaauauaagagguc

SEQ ID NO: 515602 - RNA, 22 nt, Human
uaacagaagaaaacauauugga

SEQ ID NO: 515603 - RNA, 22 nt, Human
gaggaguggaguugcuggguug

SEQ ID NO: 515604 - RNA, 22 nt, Human
gcagagcucuguucuuaucucc

SEQ ID NO: 515605 - RNA, 22 nt, Human
augaccagccgagauaaacaga

SEQ ID NO: 515606 - RNA, 22 nt, Human
acuuccugcuaugagcuucugu

SEQ ID NO: 515607 - RNA, 23 nt, Human
acugccugcuacuaugcccacgg

SEQ ID NO: 515608 - RNA, 20 nt, Human
uggcuccucuuggcuguggc

SEQ ID NO: 515609 - RNA, 22 nt, Human
ucuguacaccaggggccauucu

SEQ ID NO: 515610 - RNA, 22 nt, Human
ggcagccauggacacuggcuag

SEQ ID NO: 515611 - RNA, 20 nt, Human
agcuggccuguccuaggccu

SEQ ID NO: 515612 - RNA, 17 nt, Human
uuucaucugggaccacc

SEQ ID NO: 515613 - RNA, 22 nt, Human
cagagaaacucagauagcugau

SEQ ID NO: 515614 - RNA, 22 nt, Human
gucucagugucaccuccagcug

SEQ ID NO: 515615 - RNA, 22 nt, Human
ucagccuccgaaagugcuggga

SEQ ID NO: 515616 - RNA, 22 nt, Human
ugcacacaaguuggagaaugaa

SEQ ID NO: 515617 - RNA, 22 nt, Human
agccuggagguaaugaggaaac

SEQ ID NO: 515618 - RNA, 22 nt, Human
uccuggcuuccacuccucuguu

SEQ ID NO: 515619 - RNA, 22 nt, Human
gguguugcaguugaagacuggu

SEQ ID NO: 515620 - RNA, 22 nt, Human
ucugggcugggcuuaggaaccc

SEQ ID NO: 515621 - RNA, 22 nt, Human
aguccaggaguugggugacauu

SEQ ID NO: 515622 - RNA, 22 nt, Human
auuuguuguugcuccccuaaga

SEQ ID NO: 515623 - RNA, 22 nt, Human
uuucuguagggauuucacaguu

SEQ ID NO: 515624 - RNA, 22 nt, Human
ugggcaggagagaagcuaaaga

SEQ ID NO: 515625 - RNA, 22 nt, Human
uggcuggcgccgggcuagccac

SEQ ID NO: 515626 - RNA, 22 nt, Human
uuuuaucuucauuccuaucuac

SEQ ID NO: 515627 - RNA, 22 nt, Human
cugcccugcuuguuuccagugg

SEQ ID NO: 515628 - RNA, 22 nt, Human
ccaggcugcuuuauuacucugu

SEQ ID NO: 515629 - RNA, 22 nt, Human
aagcagcauaugacagcaucca

SEQ ID NO: 515630 - RNA, 22 nt, Human
cuucugggugccugugaguguu

SEQ ID NO: 515631 - RNA, 22 nt, Human
uggcuucuuagaccaguggccu

SEQ ID NO: 515632 - RNA, 22 nt, Human
cugggcuuguguuagcugacaa

SEQ ID NO: 515633 - RNA, 22 nt, Human
gccugcagggccugggccuacc

SEQ ID NO: 515634 - RNA, 22 nt, Human
ugcugaauucuaccauccauuu

SEQ ID NO: 515635 - RNA, 22 nt, Human
aaggcuaugaucuuuuucauga

SEQ ID NO: 515636 - RNA, 22 nt, Human
gcacagaaguaaaauacaaguc

SEQ ID NO: 515637 - RNA, 22 nt, Human
uuaaauuuuagaaacagacucu

SEQ ID NO: 515638 - RNA, 22 nt, Human
ucaguuuucauuucaugagcag

SEQ ID NO: 515639 - RNA, 22 nt, Human
uggcucaggugugagcugaaga

SEQ ID NO: 515640 - RNA, 22 nt, Human
cugucccaggagcuguaagaca

SEQ ID NO: 515641 - RNA, 22 nt, Human
ucgggcucgcucuccuagcgga

SEQ ID NO: 515642 - RNA, 22 nt, Human
gcccugugcgacucuagagguu

SEQ ID NO: 515643 - RNA, 22 nt, Human
ucugagaggauuccugucccga

SEQ ID NO: 515644 - RNA, 22 nt, Human
cagagcaguaaaucuggggcac

SEQ ID NO: 515645 - RNA, 22 nt, Human
cagagccauccaggugccuguu

SEQ ID NO: 515646 - RNA, 22 nt, Human
uuacaaaguguuaugauaaaca

SEQ ID NO: 515647 - RNA, 22 nt, Human
uucugugacuccucagagauuu

SEQ ID NO: 515648 - RNA, 22 nt, Human
agagcugguuuacucaggaauu

SEQ ID NO: 515649 - RNA, 22 nt, Human
ugaguagcggcuauguguaacu

SEQ ID NO: 515650 - RNA, 22 nt, Human
uccuuugacuucuugcagucca

SEQ ID NO: 515651 - RNA, 22 nt, Human
ucacacaggguucuggucucau

SEQ ID NO: 515652 - RNA, 22 nt, Human
ugcagcucugaacagucaugaa

SEQ ID NO: 515653 - RNA, 22 nt, Human
ccagccuuugcaucccccaucu

SEQ ID NO: 515654 - RNA, 22 nt, Human
ggccggccuuugcgagcauucu

SEQ ID NO: 515655 - RNA, 22 nt, Human
ccagccuucugagcugccugga

SEQ ID NO: 515656 - RNA, 22 nt, Human
caaguucacuugucuacaaggg

SEQ ID NO: 515657 - RNA, 22 nt, Human
uucugcauuggagucuauucuu

SEQ ID NO: 515658 - RNA, 22 nt, Human
ucagcaauccucccacaggugg

SEQ ID NO: 515659 - RNA, 22 nt, Human
uacacaugacaguggacugaga

SEQ ID NO: 515660 - RNA, 22 nt, Human
gaggcucagagaagucauggua

SEQ ID NO: 515661 - RNA, 22 nt, Human
agauuuccugcacugccuuuga

SEQ ID NO: 515662 - RNA, 22 nt, Human
aguguccaacucagcuugucaa

SEQ ID NO: 515663 - RNA, 22 nt, Human
auuucaaggcuacagaaaccuu

SEQ ID NO: 515664 - RNA, 21 nt, Human
ggccuaggggcagauggugcu

SEQ ID NO: 515665 - RNA, 22 nt, Human
gcuggccaaaguguaccuggag

SEQ ID NO: 515666 - RNA, 22 nt, Human
caggucagagguagaugagaug

SEQ ID NO: 515667 - RNA, 22 nt, Human
ccagaagaccccguccaccucc

SEQ ID NO: 515668 - RNA, 22 nt, Human
gcucugagcacugugcggcugg

SEQ ID NO: 515669 - RNA, 22 nt, Human
gcucugcugagauaucugggag

SEQ ID NO: 515670 - RNA, 22 nt, Human
aaaugaaaugagugccuggagg

SEQ ID NO: 515671 - RNA, 22 nt, Human
uugucuguaaagacggccacca

SEQ ID NO: 515672 - RNA, 19 nt, Human
aagcauuagccaaagcauu

SEQ ID NO: 515673 - RNA, 22 nt, Human
cagaggcagccgggggagaacg

SEQ ID NO: 515674 - RNA, 22 nt, Human
gcagcugcuggaaguuccugcc

SEQ ID NO: 515675 - RNA, 22 nt, Human
uugcaaauauuguuuaccuuuc

SEQ ID NO: 515676 - RNA, 22 nt, Human
aagaggccuuggucugaccuga

SEQ ID NO: 515677 - RNA, 22 nt, Human
cccuggagggacagcugcucua

SEQ ID NO: 515678 - RNA, 22 nt, Human
gcagcucuuuucuuaaagagau

SEQ ID NO: 515679 - RNA, 22 nt, Human
gccaagcuggaugaagagguug

SEQ ID NO: 515680 - RNA, 22 nt, Human
auaagcuuuuaaagcuacuuug

SEQ ID NO: 515681 - RNA, 22 nt, Human
aaggcacuugcccagagcugca

SEQ ID NO: 515682 - RNA, 22 nt, Human
ucuguacaugaguugagaauca

SEQ ID NO: 515683 - RNA, 22 nt, Human
gagcugaguaugaaggauguga

SEQ ID NO: 515684 - RNA, 21 nt, Human
accagcaggagaucagaagga

SEQ ID NO: 515685 - RNA, 16 nt, Human
cagcuuuaugucagug

SEQ ID NO: 515686 - RNA, 22 nt, Human
ucugagaggcagaccuuccuaa

SEQ ID NO: 515687 - RNA, 22 nt, Human
caugagcugcugggagccuguc

SEQ ID NO: 515688 - RNA, 22 nt, Human
ucuucaaacccugguuuuguga

SEQ ID NO: 515689 - RNA, 22 nt, Human
gagaaagggaacuuacagagug

SEQ ID NO: 515690 - RNA, 22 nt, Human
ugaagguaaaggaaggaggcuu

SEQ ID NO: 515691 - RNA, 22 nt, Human
gagguccagccaagcggcaagg

SEQ ID NO: 515692 - RNA, 22 nt, Human
ccagcucccugaagccuggucu

SEQ ID NO: 515693 - RNA, 22 nt, Human
auuccugguggcagaaacauga

SEQ ID NO: 515694 - RNA, 22 nt, Human
caagagcuggagaggcagucua

SEQ ID NO: 515695 - RNA, 22 nt, Human
gaggaaugggugucucgugauu

SEQ ID NO: 515696 - RNA, 22 nt, Human
uacaauauguggccuuuuguga

SEQ ID NO: 515697 - RNA, 22 nt, Human
ccaggaguuggaagcugccaug

SEQ ID NO: 515698 - RNA, 23 nt, Human
acagcugcaccuggccgccuggc

SEQ ID NO: 515699 - RNA, 22 nt, Human
cagccagggagcaaagaguuga

SEQ ID NO: 515700 - RNA, 21 nt, Human
cucuuuguggcaauguauuuu

SEQ ID NO: 515701 - RNA, 22 nt, Human
ucagagugugagacauauugga

SEQ ID NO: 515702 - RNA, 22 nt, Human
cagggugccucugcucccacca

SEQ ID NO: 515703 - RNA, 22 nt, Human
cccuggaggaccccaauguggc

SEQ ID NO: 515704 - RNA, 22 nt, Human
ugucugaaacuugguccuaugc

SEQ ID NO: 515705 - RNA, 22 nt, Human
guccucugcuucaugcccugau

SEQ ID NO: 515706 - RNA, 22 nt, Human
uuaagucacuuaucuaaagaca

SEQ ID NO: 515707 - RNA, 22 nt, Human
guuuuggcucuggcauguggaa

SEQ ID NO: 515708 - RNA, 22 nt, Human
ugaggccagugacauauauuaa

SEQ ID NO: 515709 - RNA, 22 nt, Human
acagaagcaaagacucaggcaa

SEQ ID NO: 515710 - RNA, 22 nt, Human
ugagcuucuuuauuuggccaga

SEQ ID NO: 515711 - RNA, 22 nt, Human
accaucagagcacaguccgugc

SEQ ID NO: 515712 - RNA, 22 nt, Human
ugccugccaggcaaccugggag

SEQ ID NO: 515713 - RNA, 22 nt, Human
uccuggguuaauuaugauucac

SEQ ID NO: 515714 - RNA, 22 nt, Human
ggagggguggaaggagugccug

SEQ ID NO: 515715 - RNA, 22 nt, Human
caggcacaagaagcaaauguua

SEQ ID NO: 515716 - RNA, 22 nt, Human
agagccuguaacaucuuucuua

SEQ ID NO: 515717 - RNA, 22 nt, Human
ccagucugugugccagccugcg

SEQ ID NO: 515718 - RNA, 22 nt, Human
gcacagagguggaggacaaaua

SEQ ID NO: 515719 - RNA, 22 nt, Human
auuucuguuugcuacuauaagu

SEQ ID NO: 515720 - RNA, 22 nt, Human
acagaaauucugggacagaaaa

SEQ ID NO: 515721 - RNA, 22 nt, Human
ugccugaguuuaacccucagag

SEQ ID NO: 515722 - RNA, 22 nt, Human
ugcaccauuuugucaggcuacu

SEQ ID NO: 515723 - RNA, 22 nt, Human
uccugaggcccuguuagggucu

SEQ ID NO: 515724 - RNA, 22 nt, Human
ugagccacagugagagcuccug

SEQ ID NO: 515725 - RNA, 22 nt, Human
ugcaguuuuggccauugaaggc

SEQ ID NO: 515726 - RNA, 22 nt, Human
gcagcaggagaguuuguccugc

SEQ ID NO: 515727 - RNA, 22 nt, Human
ccaggacuuauuacaguauaac

SEQ ID NO: 515728 - RNA, 22 nt, Human
cugaggcugcccagggccaggu

SEQ ID NO: 515729 - RNA, 22 nt, Human
aggcuccguccagucucaggcc

SEQ ID NO: 515730 - RNA, 22 nt, Human
aggcugcuuucauggccgcccc

SEQ ID NO: 515731 - RNA, 22 nt, Human
aaaugcacaauaaaguaaaggc

SEQ ID NO: 515732 - RNA, 22 nt, Human
agagcagauggagcuggaagag

SEQ ID NO: 515733 - RNA, 22 nt, Human
cucaggaggugguagaggcccu

SEQ ID NO: 515734 - RNA, 22 nt, Human
caucaguguggcaguucacugu

SEQ ID NO: 515735 - RNA, 22 nt, Human
auacuuuggggguuaguguaga

SEQ ID NO: 515736 - RNA, 22 nt, Human
agggcucccgcgguguccggga

SEQ ID NO: 515737 - RNA, 20 nt, Human
agaguaacuggcacauaggg

SEQ ID NO: 515738 - RNA, 22 nt, Human
cagggccuuauccugccauuga

SEQ ID NO: 515739 - RNA, 22 nt, Human
uauuuccugcauggugauguaa

SEQ ID NO: 515740 - RNA, 18 nt, Human
ucuucaucuccugagcug

SEQ ID NO: 515741 - RNA, 22 nt, Human
ucagggcacaggccuguggguu

SEQ ID NO: 515742 - RNA, 22 nt, Human
ccugggcauaaaucacuccaag

SEQ ID NO: 515743 - RNA, 22 nt, Human
acauuucucauaggagagccac

SEQ ID NO: 515744 - RNA, 21 nt, Human
caaaagagacugauucuugga

SEQ ID NO: 515745 - RNA, 22 nt, Human
uuucacauucagauauagacuu

SEQ ID NO: 515746 - RNA, 22 nt, Human
cucuggagggaggcugagcugg

SEQ ID NO: 515747 - RNA, 22 nt, Human
gcuacaggagcugucacaugcu

SEQ ID NO: 515748 - RNA, 18 nt, Human
aagauguuuaaugggaag

SEQ ID NO: 515749 - RNA, 22 nt, Human
aaucuuucccuauuaaaugugg

SEQ ID NO: 515750 - RNA, 22 nt, Human
aagggaggccagagguuuugca

SEQ ID NO: 515751 - RNA, 20 nt, Human
agaagaggauacaaccaggc

SEQ ID NO: 515752 - RNA, 23 nt, Human
ucaugcccaggcuccagauguca

SEQ ID NO: 515753 - RNA, 22 nt, Human
aaaguguugauaugugacaucc

SEQ ID NO: 515754 - RNA, 22 nt, Human
agguggagaucagggacuaagg

SEQ ID NO: 515755 - RNA, 22 nt, Human
ggccugcuucucagugagcuug

SEQ ID NO: 515756 - RNA, 22 nt, Human
ucagcaggggccguugggugga

SEQ ID NO: 515757 - RNA, 22 nt, Human
cagcaggggaacugugggccag

SEQ ID NO: 515758 - RNA, 22 nt, Human
uuccucagaaaauacuguccaa

SEQ ID NO: 515759 - RNA, 22 nt, Human
ccugcccugucacuggcuaggg

SEQ ID NO: 515760 - RNA, 22 nt, Human
uucugugucuucuuguucugug

SEQ ID NO: 515761 - RNA, 22 nt, Human
uuaagugucauaauuuccaaga

SEQ ID NO: 515762 - RNA, 22 nt, Human
gauguacaaguaaaauaugugu

SEQ ID NO: 515763 - RNA, 22 nt, Human
uuucacacaacgugaauauacu

SEQ ID NO: 515764 - RNA, 17 nt, Human
ggccuuggggccucagu

SEQ ID NO: 515765 - RNA, 22 nt, Human
uuugagguuagcuagcagauca

SEQ ID NO: 515766 - RNA, 22 nt, Human
ugcuggcugggcugcuggagac

SEQ ID NO: 515767 - RNA, 20 nt, Human
caguccugcaggcgggagaa

SEQ ID NO: 515768 - RNA, 17 nt, Human
uccaggcauaucuccua

SEQ ID NO: 515769 - RNA, 22 nt, Human
ccaguguggccaggugcuggua

SEQ ID NO: 515770 - RNA, 22 nt, Human
aaacagcuuucagaaucucuca

SEQ ID NO: 515771 - RNA, 22 nt, Human
aagauguuuuaauauuucgagg

SEQ ID NO: 515772 - RNA, 22 nt, Human
gccaggcuccaggcccuccuga

SEQ ID NO: 515773 - RNA, 22 nt, Human
uaugagaaauugcugauauuug

SEQ ID NO: 515774 - RNA, 22 nt, Human
cccugcagcuuuugcauaguca

SEQ ID NO: 515775 - RNA, 22 nt, Human
cacaucagguagaccuacagag

SEQ ID NO: 515776 - RNA, 22 nt, Human
agucccaggcagccgagccggu

SEQ ID NO: 515777 - RNA, 22 nt, Human
gugaaugauagcuucucuuugg

SEQ ID NO: 515778 - RNA, 19 nt, Human
ucuuucauuucuagcucug

SEQ ID NO: 515779 - RNA, 22 nt, Human
ccagagccuggcaucugcauaa

SEQ ID NO: 515780 - RNA, 22 nt, Human
agcucccauuaucuucugaaac

SEQ ID NO: 515781 - RNA, 22 nt, Human
uuccugggacuggagcagccca

SEQ ID NO: 515782 - RNA, 22 nt, Human
aacaaaguagcugcuguucuua

SEQ ID NO: 515783 - RNA, 22 nt, Human
agacuacauaugccacaugaag

SEQ ID NO: 515784 - RNA, 22 nt, Human
gcacugaaugcuuuuacuguaa

SEQ ID NO: 515785 - RNA, 22 nt, Human
uugcauuugagaaaguucuccu

SEQ ID NO: 515786 - RNA, 22 nt, Human
ggcuuuauuugcagccauuguu

SEQ ID NO: 515787 - RNA, 22 nt, Human
agcugccucccugugcuugucc

SEQ ID NO: 515788 - RNA, 22 nt, Human
ugggaggcagguaggugaugau

SEQ ID NO: 515789 - RNA, 22 nt, Human
agggggugggaagucuagaauc

SEQ ID NO: 515790 - RNA, 22 nt, Human
cuuuagaauuucauguuugguc

SEQ ID NO: 515791 - RNA, 22 nt, Human
ugcuucuguuacauaccagaac

SEQ ID NO: 515792 - RNA, 21 nt, Human
uccagggaacuucucaggaau

SEQ ID NO: 515793 - RNA, 21 nt, Human
auggagccuaagaguggaggu

SEQ ID NO: 515794 - RNA, 22 nt, Human
auuuucauuuugcagggugaga

SEQ ID NO: 515795 - RNA, 22 nt, Human
ugagucuucuuccgggauugcu

SEQ ID NO: 515796 - RNA, 22 nt, Human
ucuggcuccuggcuccacugcc

SEQ ID NO: 515797 - RNA, 22 nt, Human
gaggccagaaugagcugaaugc

SEQ ID NO: 515798 - RNA, 22 nt, Human
ugcuucugucucuuaugccuug

SEQ ID NO: 515799 - RNA, 23 nt, Human
uggcucucucagugcugcagagg

SEQ ID NO: 515800 - RNA, 22 nt, Human
ucagggcugcagaagaggcagg

SEQ ID NO: 515801 - RNA, 22 nt, Human
cucuaaauccacgguauaguug

SEQ ID NO: 515802 - RNA, 23 nt, Human
augcccuguagaggcugcugacc

SEQ ID NO: 515803 - RNA, 22 nt, Human
cgcaggcucgguucacagagca

SEQ ID NO: 515804 - RNA, 22 nt, Human
ugggacagagugagcuuuggcc

SEQ ID NO: 515805 - RNA, 19 nt, Human
ucccagagucuagagguug

SEQ ID NO: 515806 - RNA, 22 nt, Human
guggaagguaaugcagcuuacu

SEQ ID NO: 515807 - RNA, 22 nt, Human
agucagugggcuuggcacagaa

SEQ ID NO: 515808 - RNA, 22 nt, Human
gcaggcagagagggguuuccag

SEQ ID NO: 515809 - RNA, 22 nt, Human
ggcacugagaggcucuuccuaa

SEQ ID NO: 515810 - RNA, 22 nt, Human
uggaaggggagcuggaaagggg

SEQ ID NO: 515811 - RNA, 22 nt, Human
agcaggcuaagggaccuguuua

SEQ ID NO: 515812 - RNA, 22 nt, Human
uguccaggucagcagcagggac

SEQ ID NO: 515813 - RNA, 22 nt, Human
ccugccuggcuuccagaagaga

SEQ ID NO: 515814 - RNA, 22 nt, Human
aucuggcugcugugcuuaagcu

SEQ ID NO: 515815 - RNA, 22 nt, Human
cugccaggacugacgucuucag

SEQ ID NO: 515816 - RNA, 22 nt, Human
gcucuguggcaggaggucuugu

SEQ ID NO: 515817 - RNA, 22 nt, Human
uccuggccagaggacaaagcug

SEQ ID NO: 515818 - RNA, 22 nt, Human
uacaagaaacuacaugaaugca

SEQ ID NO: 515819 - RNA, 23 nt, Human
ucccuguguacagccugcaugag

SEQ ID NO: 515820 - RNA, 20 nt, Human
cagcccuccaguggaggcag

SEQ ID NO: 515821 - RNA, 22 nt, Human
uucuggcucuccccugcugggu

SEQ ID NO: 515822 - RNA, 22 nt, Human
agggacagucuacuguucacug

SEQ ID NO: 515823 - RNA, 22 nt, Human
ugguuugagagugugagcuuuu

SEQ ID NO: 515824 - RNA, 22 nt, Human
gaaaucugcccagugcacuggu

SEQ ID NO: 515825 - RNA, 22 nt, Human
ccuggcagcgugccgagcugcg

SEQ ID NO: 515826 - RNA, 22 nt, Human
uguguucauguugauucauagc

SEQ ID NO: 515827 - RNA, 22 nt, Human
ucuccuccuuuuuucaacauag

SEQ ID NO: 515828 - RNA, 22 nt, Human
aauccagguggcggagguugug

SEQ ID NO: 515829 - RNA, 22 nt, Human
ugucaugguagcugaaggaugu

SEQ ID NO: 515830 - RNA, 22 nt, Human
gcugugcuugcaugagugucug

SEQ ID NO: 515831 - RNA, 21 nt, Human
uagcacuucgcuguaauuggg

SEQ ID NO: 515832 - RNA, 22 nt, Human
ucaggucugaugccucauccau

SEQ ID NO: 515833 - RNA, 22 nt, Human
ucagggcauccauugccuguug

SEQ ID NO: 515834 - RNA, 22 nt, Human
agcugaagggaggauauguaca

SEQ ID NO: 515835 - RNA, 22 nt, Human
ccuuucucauuuuaagcauuag

SEQ ID NO: 515836 - RNA, 22 nt, Human
uccugaggcacaauccuagaau

SEQ ID NO: 515837 - RNA, 22 nt, Human
gcccuuagggccacugucacug

SEQ ID NO: 515838 - RNA, 22 nt, Human
gcugccugucccaggaugagga

SEQ ID NO: 515839 - RNA, 22 nt, Human
cuuuuauuuugaauuaagggcu

SEQ ID NO: 515840 - RNA, 21 nt, Human
aguguguguggaaugagaaua

SEQ ID NO: 515841 - RNA, 22 nt, Human
uuggaaggaccaggccuugauu

SEQ ID NO: 515842 - RNA, 22 nt, Human
cccagaggugacaucccauucu

SEQ ID NO: 515843 - RNA, 21 nt, Human
ggagggcagcccagacuggcu

SEQ ID NO: 515844 - RNA, 17 nt, Human
ugcugucugcuucccua

SEQ ID NO: 515845 - RNA, 22 nt, Human
ggcuuuaugcagggauagaaau

SEQ ID NO: 515846 - RNA, 22 nt, Human
cuggggcucucuggaaugcuug

SEQ ID NO: 515847 - RNA, 22 nt, Human
uggaaggaaagguagcagagaa

SEQ ID NO: 515848 - RNA, 22 nt, Human
gcugccugcucggcuccuggga

SEQ ID NO: 515849 - RNA, 22 nt, Human
cuggaggacagaggccaugucu

SEQ ID NO: 515850 - RNA, 18 nt, Human
agccuggaggguugaagu

SEQ ID NO: 515851 - RNA, 22 nt, Human
aaaguacaugcaauucuucuga

SEQ ID NO: 515852 - RNA, 22 nt, Human
agagccaggcucccauggggca

SEQ ID NO: 515853 - RNA, 22 nt, Human
gagggcuccauuccccgugccc

SEQ ID NO: 515854 - RNA, 22 nt, Human
cauggccaaagaauuauauuuu

SEQ ID NO: 515855 - RNA, 22 nt, Human
gggcgcagccaauccuggcccu

SEQ ID NO: 515856 - RNA, 22 nt, Human
acuccugugggcauggcacccc

SEQ ID NO: 515857 - RNA, 22 nt, Human
uguaacaaaauaccuuggauug

SEQ ID NO: 515858 - RNA, 22 nt, Human
uuauuuguggcauccauguugg

SEQ ID NO: 515859 - RNA, 22 nt, Human
ccugcugcuaugaaggugacag

SEQ ID NO: 515860 - RNA, 22 nt, Human
uguggcaguauaagagcuagaa

SEQ ID NO: 515861 - RNA, 19 nt, Human
gggcuccuugggccucucu

SEQ ID NO: 515862 - RNA, 22 nt, Human
ccagagucuaugaguccucauu

SEQ ID NO: 515863 - RNA, 22 nt, Human
gagcagcuguccccaaagcuuc

SEQ ID NO: 515864 - RNA, 22 nt, Human
gaguccaggcuggucaaauagc

SEQ ID NO: 515865 - RNA, 22 nt, Human
uguaaaauaauucuccauguuu

SEQ ID NO: 515866 - RNA, 22 nt, Human
caggcuggagugaguguagugg

SEQ ID NO: 515867 - RNA, 22 nt, Human
auggcaaaaauuaacagaucaa

SEQ ID NO: 515868 - RNA, 22 nt, Human
caggagcucaagaccacccugg

SEQ ID NO: 515869 - RNA, 22 nt, Human
ggcacagcgacuaccaucgaaa

SEQ ID NO: 515870 - RNA, 22 nt, Human
uuggccuuguuaaggaggcccu

SEQ ID NO: 515871 - RNA, 22 nt, Human
aauuccaagagcuuccuaagug

SEQ ID NO: 515872 - RNA, 22 nt, Human
ugugaccauaauuuguaaauaa

SEQ ID NO: 515873 - RNA, 22 nt, Human
aaucuugagggacucaugaggu

SEQ ID NO: 515874 - RNA, 22 nt, Human
auuauaaaccuuugaggguggg

SEQ ID NO: 515875 - RNA, 22 nt, Human
ucacacagcuuggaguuauggu

SEQ ID NO: 515876 - RNA, 22 nt, Human
ugucagugguagacccagaggu

SEQ ID NO: 515877 - RNA, 22 nt, Human
ugcacacacgcggcacaucugu

SEQ ID NO: 515878 - RNA, 21 nt, Human
aagaggaagcauuauggcaua

SEQ ID NO: 515879 - RNA, 18 nt, Human
ucugucucuguccuugcu

SEQ ID NO: 515880 - RNA, 22 nt, Human
uuuagcauuacuaaaaugaaaa

SEQ ID NO: 515881 - RNA, 22 nt, Human
agaccauagggaccucagguug

SEQ ID NO: 515882 - RNA, 22 nt, Human
uggauaaacucacuguaaguug

SEQ ID NO: 515883 - RNA, 22 nt, Human
gagaaagcuucuuucccacagg

SEQ ID NO: 515884 - RNA, 22 nt, Human
ugugugaagugauuuuaagucu

SEQ ID NO: 515885 - RNA, 22 nt, Human
ccugggcugggcgucucauggg

SEQ ID NO: 515886 - RNA, 22 nt, Human
cggccaagccggggccccgaag

SEQ ID NO: 515887 - RNA, 22 nt, Human
gcagaagcugggagaagggauu

SEQ ID NO: 515888 - RNA, 22 nt, Human
uucaaugccuagaacuuagcau

SEQ ID NO: 515889 - RNA, 22 nt, Human
ugugccuggaucucugugacaa

SEQ ID NO: 515890 - RNA, 22 nt, Human
agcaguuuuuauaacacuggaa

SEQ ID NO: 515891 - RNA, 21 nt, Human
gcagagccggggcgagaaggc

SEQ ID NO: 515892 - RNA, 22 nt, Human
ggcagauggagaagcagcaggu

SEQ ID NO: 515893 - RNA, 22 nt, Human
agagccaggcucuaccuggguu

SEQ ID NO: 515894 - RNA, 22 nt, Human
cugggcacacagugacucugca

SEQ ID NO: 515895 - RNA, 22 nt, Human
gacacagacaguuagagguaau

SEQ ID NO: 515896 - RNA, 22 nt, Human
auuaaagaaacccagcauguga

SEQ ID NO: 515897 - RNA, 22 nt, Human
gugcauuucucauacacuaaau

SEQ ID NO: 515898 - RNA, 22 nt, Human
gcucuagaaagaaggauguggg

SEQ ID NO: 515899 - RNA, 23 nt, Human
agaaaagcuuggacacauggccu

SEQ ID NO: 515900 - RNA, 19 nt, Human
agccagggugagaaggagc

SEQ ID NO: 515901 - RNA, 23 nt, Human
aaagacucuccagagggaaguag

SEQ ID NO: 515902 - RNA, 22 nt, Human
cagugcaugaaacaauaugcag

SEQ ID NO: 515903 - RNA, 22 nt, Human
agaggcuccuagccacuggcuu

SEQ ID NO: 515904 - RNA, 22 nt, Human
cugggucugggccuccuggagu

SEQ ID NO: 515905 - RNA, 17 nt, Human
ggaaaaggaugauacag

SEQ ID NO: 515906 - RNA, 22 nt, Human
cagagugagggccugcaccugc

SEQ ID NO: 515907 - RNA, 22 nt, Human
auuugucuuuggaccugugaga

SEQ ID NO: 515908 - RNA, 22 nt, Human
gggaaacuucugcuaaaaccag

SEQ ID NO: 515909 - RNA, 19 nt, Human
ucacauucagccuugcuga

SEQ ID NO: 515910 - RNA, 21 nt, Human
ucccacugccacagcuucagg

SEQ ID NO: 515911 - RNA, 22 nt, Human
cccagggacagcuagguggggc

SEQ ID NO: 515912 - RNA, 22 nt, Human
cugagccaguagucagggacaa

SEQ ID NO: 515913 - RNA, 22 nt, Human
augauauauguguugagcuugc

SEQ ID NO: 515914 - RNA, 22 nt, Human
uggagagcgcgacgggaggaag

SEQ ID NO: 515915 - RNA, 22 nt, Human
agccauuuugguaaugauaaca

SEQ ID NO: 515916 - RNA, 22 nt, Human
cugagcccaggcgggagcugag

SEQ ID NO: 515917 - RNA, 21 nt, Human
ucauauuucucuugcuauugu

SEQ ID NO: 515918 - RNA, 22 nt, Human
uacucaaaaaguuaugaaucau

SEQ ID NO: 515919 - RNA, 22 nt, Human
gugugcaugugcuugcacagau

SEQ ID NO: 515920 - RNA, 22 nt, Human
uuucauaaacaguagaagacua

SEQ ID NO: 515921 - RNA, 22 nt, Human
agcucagcuuccucuccaugcu

SEQ ID NO: 515922 - RNA, 22 nt, Human
aaagcugcccuugugaaacaag

SEQ ID NO: 515923 - RNA, 19 nt, Human
cucugccucuggcuguggc

SEQ ID NO: 515924 - RNA, 22 nt, Human
caggucuggguugauggccugg

SEQ ID NO: 515925 - RNA, 22 nt, Human
ggggcugguggugguuucucca

SEQ ID NO: 515926 - RNA, 22 nt, Human
aggucauuggggacuaucuccg

SEQ ID NO: 515927 - RNA, 22 nt, Human
ugcagaagcagagccgguggcc

SEQ ID NO: 515928 - RNA, 22 nt, Human
ucagugucuugaccugggugug

SEQ ID NO: 515929 - RNA, 22 nt, Human
acaggagaaaucuggucaaaag

SEQ ID NO: 515930 - RNA, 22 nt, Human
cuggccgguauuugccucuggg

SEQ ID NO: 515931 - RNA, 20 nt, Human
accaauguuagcuuaguacu

SEQ ID NO: 515932 - RNA, 22 nt, Human
cuauacagagcauccuuaacuu

SEQ ID NO: 515933 - RNA, 22 nt, Human
ucucacagugagccugaggucg

SEQ ID NO: 515934 - RNA, 22 nt, Human
cuggggugugcucagagcaggg

SEQ ID NO: 515935 - RNA, 22 nt, Human
ugagccaggucucacucaccuu

SEQ ID NO: 515936 - RNA, 22 nt, Human
agccuggaguucccaggagaag

SEQ ID NO: 515937 - RNA, 22 nt, Human
augagcuguaagguggcuuccu

SEQ ID NO: 515938 - RNA, 22 nt, Human
uccuugaagagugggcggucga

SEQ ID NO: 515939 - RNA, 22 nt, Human
uggucucuucuuccaagauggc

SEQ ID NO: 515940 - RNA, 22 nt, Human
agcagcugagccccagcuguga

SEQ ID NO: 515941 - RNA, 19 nt, Human
aggcuucuacccuguccag

SEQ ID NO: 515942 - RNA, 22 nt, Human
ggguucuuauaguaucagagcu

SEQ ID NO: 515943 - RNA, 22 nt, Human
gaggcagcaugguaccuuggag

SEQ ID NO: 515944 - RNA, 22 nt, Human
agaaguuugaaauuaggagaaa

SEQ ID NO: 515945 - RNA, 22 nt, Human
ugcauauuuguaugauguuuag

SEQ ID NO: 515946 - RNA, 22 nt, Human
acagugugugcuuucccuuacg

SEQ ID NO: 515947 - RNA, 23 nt, Human
cucccugaacaugacacaccaga

SEQ ID NO: 515948 - RNA, 22 nt, Human
agugucauaugccacugcaucc

SEQ ID NO: 515949 - RNA, 22 nt, Human
caagcagacaguaggccuagaa

SEQ ID NO: 515950 - RNA, 22 nt, Human
augcuugggacucccuguagca

SEQ ID NO: 515951 - RNA, 22 nt, Human
gcagcaggcacggucucgacau

SEQ ID NO: 515952 - RNA, 22 nt, Human
cucacagguaccagcacccucc

SEQ ID NO: 515953 - RNA, 22 nt, Human
cacauacauucauguuacucua

SEQ ID NO: 515954 - RNA, 22 nt, Human
agauuguagaaacuguagcauu

SEQ ID NO: 515955 - RNA, 22 nt, Human
cagcagcuaaggcauguuccug

SEQ ID NO: 515956 - RNA, 22 nt, Human
ugucucuggcugcagccuguuc

SEQ ID NO: 515957 - RNA, 22 nt, Human
ggggauggugggaaggcaaucu

SEQ ID NO: 515958 - RNA, 22 nt, Human
gugagcuuugugguaaugaagu

SEQ ID NO: 515959 - RNA, 22 nt, Human
aguuuucucuguguucugcuua

SEQ ID NO: 515960 - RNA, 22 nt, Human
gcuuuguguagaaggaggaugg

SEQ ID NO: 515961 - RNA, 22 nt, Human
aaaguuacacaucuaguaagug

SEQ ID NO: 515962 - RNA, 22 nt, Human
ucagaggucacacagcaaguuu

SEQ ID NO: 515963 - RNA, 22 nt, Human
cagcagagguuggaacaguucu

SEQ ID NO: 515964 - RNA, 22 nt, Human
cacuggauuuccaggaauacuc

SEQ ID NO: 515965 - RNA, 22 nt, Human
uuuauuagugcuuguaucacug

SEQ ID NO: 515966 - RNA, 22 nt, Human
aaacacugguaugauguauagu

SEQ ID NO: 515967 - RNA, 22 nt, Human
uugcugaaagguagcugugugg

SEQ ID NO: 515968 - RNA, 22 nt, Human
aaaugaacaguugcauucucug

SEQ ID NO: 515969 - RNA, 22 nt, Human
aaauugcuaaauuguaagaggg

SEQ ID NO: 515970 - RNA, 22 nt, Human
aggccagcaagaaagagagucu

SEQ ID NO: 515971 - RNA, 22 nt, Human
gucaggaugagggaugaggagu

SEQ ID NO: 515972 - RNA, 20 nt, Human
cuaggaacuauggucuggcu

SEQ ID NO: 515973 - RNA, 22 nt, Human
cagcuccagcccaggcagcucc

SEQ ID NO: 515974 - RNA, 21 nt, Human
aauuuugaaggaagauuaagg

SEQ ID NO: 515975 - RNA, 22 nt, Human
acaaaugccauauauaaauucu

SEQ ID NO: 515976 - RNA, 22 nt, Human
uuucuguuuagcauaaaguggc

SEQ ID NO: 515977 - RNA, 23 nt, Human
cccuucagcgagggcauuaaggu

SEQ ID NO: 515978 - RNA, 18 nt, Human
aggccagcccugcuacug

SEQ ID NO: 515979 - RNA, 22 nt, Human
agcagcaugaugacagagucuc

SEQ ID NO: 515980 - RNA, 22 nt, Human
gcugccuuccaaagaguuuuau

SEQ ID NO: 515981 - RNA, 22 nt, Human
cagcucucacacuuagcuucua

SEQ ID NO: 515982 - RNA, 22 nt, Human
cccccaaggccaggcugagacc

SEQ ID NO: 515983 - RNA, 22 nt, Human
cagcagagcauuugguaggagg

SEQ ID NO: 515984 - RNA, 22 nt, Human
ggaaacagagggcaccugagcc

SEQ ID NO: 515985 - RNA, 22 nt, Human
cccuuccuccucgccugucaga

SEQ ID NO: 515986 - RNA, 22 nt, Human
agcagagccagaauuggaccag

SEQ ID NO: 515987 - RNA, 22 nt, Human
ugacuuaagcuguucuuuagau

SEQ ID NO: 515988 - RNA, 22 nt, Human
gggcaggugaccucuuguccug

SEQ ID NO: 515989 - RNA, 22 nt, Human
ucucagaguuugaaucuggagu

SEQ ID NO: 515990 - RNA, 22 nt, Human
cuuugccuccuagagcacguuc

SEQ ID NO: 515991 - RNA, 22 nt, Human
uuccaaguuaggcgagcuggug

SEQ ID NO: 515992 - RNA, 23 nt, Human
ggccucagcgcacagaaacugcu

SEQ ID NO: 515993 - RNA, 22 nt, Human
auuguacagaugagguaaguga

SEQ ID NO: 515994 - RNA, 22 nt, Human
guaugaaggcgagagcccacua

SEQ ID NO: 515995 - RNA, 22 nt, Human
ggcagaagauaggacagggaau

SEQ ID NO: 515996 - RNA, 22 nt, Human
uagcauuaucugucuuaucauu

SEQ ID NO: 515997 - RNA, 22 nt, Human
cucaggauucucgacacucaca

SEQ ID NO: 515998 - RNA, 22 nt, Human
aaggccaugaccacuugcugug

SEQ ID NO: 515999 - RNA, 22 nt, Human
aaaaguuuaagacucauucuag

SEQ ID NO: 516000 - RNA, 22 nt, Human
acaugugucuaagaaugaaaga

SEQ ID NO: 516001 - RNA, 22 nt, Human
aaacacuucuuaggucuuaagu

SEQ ID NO: 516002 - RNA, 22 nt, Human
ucaauaacuuuguuuagcauug

SEQ ID NO: 516003 - RNA, 22 nt, Human
ccugaggcuuaaucugucccaa

SEQ ID NO: 516004 - RNA, 22 nt, Human
acuccugggugcauuucugauu

SEQ ID NO: 516005 - RNA, 22 nt, Human
ugaagcugugggcaguggagcc

SEQ ID NO: 516006 - RNA, 22 nt, Human
gaaaucugaacaacagcuguca

SEQ ID NO: 516007 - RNA, 22 nt, Human
uggaggccagagguacugggac

SEQ ID NO: 516008 - RNA, 22 nt, Human
agguucuuuuggccaaccucau

SEQ ID NO: 516009 - RNA, 22 nt, Human
uagagcuguaucaaagagccuu

SEQ ID NO: 516010 - RNA, 22 nt, Human
ucauggaaacagcaaugcuaau

SEQ ID NO: 516011 - RNA, 22 nt, Human
aauggacaggagagcauaguca

SEQ ID NO: 516012 - RNA, 22 nt, Human
accugccuaguugguucugccc

SEQ ID NO: 516013 - RNA, 22 nt, Human
uacaugcuccacuuucuccugu

SEQ ID NO: 516014 - RNA, 22 nt, Human
uccauuuuagagaugaagaaac

SEQ ID NO: 516015 - RNA, 22 nt, Human
gccuggagggauagaaugcaag

SEQ ID NO: 516016 - RNA, 22 nt, Human
ccuggaaguuggagguugcagu

SEQ ID NO: 516017 - RNA, 22 nt, Human
acuguggcacuaggcaccuuac

SEQ ID NO: 516018 - RNA, 22 nt, Human
uaaaugcaagugcuccugggag

SEQ ID NO: 516019 - RNA, 20 nt, Human
uuucacaaugaacaugucuc

SEQ ID NO: 516020 - RNA, 22 nt, Human
uccaugggaagauuuugagugg

SEQ ID NO: 516021 - RNA, 22 nt, Human
uuugugcagguauaggcggaga

SEQ ID NO: 516022 - RNA, 22 nt, Human
agaagccauugaagcagaccuc

SEQ ID NO: 516023 - RNA, 22 nt, Human
ucugagagccucuagccuaagu

SEQ ID NO: 516024 - RNA, 22 nt, Human
acaauuugaggcuacucaauug

SEQ ID NO: 516025 - RNA, 22 nt, Human
ccugggugaugugcugcccucg

SEQ ID NO: 516026 - RNA, 22 nt, Human
uuugacaaaggaaaaaugcaca

SEQ ID NO: 516027 - RNA, 22 nt, Human
ggagggagucagcugauuagaa

SEQ ID NO: 516028 - RNA, 22 nt, Human
uuucuuucaauucuccuaaugc

SEQ ID NO: 516029 - RNA, 22 nt, Human
gcacaguguaccacagucccua

SEQ ID NO: 516030 - RNA, 22 nt, Human
gugggcaaggucccugccagcu

SEQ ID NO: 516031 - RNA, 22 nt, Human
agcagcuagacuucagaaucug

SEQ ID NO: 516032 - RNA, 22 nt, Human
uccugccuucauacugcuguau

SEQ ID NO: 516033 - RNA, 22 nt, Human
uggcagccacaucucguggauu

SEQ ID NO: 516034 - RNA, 22 nt, Human
ggaggugggagacauaggcggc

SEQ ID NO: 516035 - RNA, 22 nt, Human
ucuggagagucacagugccaga

SEQ ID NO: 516036 - RNA, 22 nt, Human
uucaagauggcaccagugagug

SEQ ID NO: 516037 - RNA, 22 nt, Human
agggacacugaugagaaauucu

SEQ ID NO: 516038 - RNA, 22 nt, Human
guaaauaacugguaauuggggu

SEQ ID NO: 516039 - RNA, 21 nt, Human
uggcggggacuuguggcugcc

SEQ ID NO: 516040 - RNA, 19 nt, Human
gggaccugacuaauuggca

SEQ ID NO: 516041 - RNA, 22 nt, Human
ucuggcuuucauuuguuuaaag

SEQ ID NO: 516042 - RNA, 22 nt, Human
ccuggagggcgccgcacagucc

SEQ ID NO: 516043 - RNA, 22 nt, Human
gcagcuggagccagccagacac

SEQ ID NO: 516044 - RNA, 19 nt, Human
gggcaguggcacuagggag

SEQ ID NO: 516045 - RNA, 22 nt, Human
ggggcucaguucggacagccug

SEQ ID NO: 516046 - RNA, 22 nt, Human
agggaaagguagugaggucaca

SEQ ID NO: 516047 - RNA, 22 nt, Human
aaggcuuuaugugaccaaaaga

SEQ ID NO: 516048 - RNA, 22 nt, Human
gagggcucugucuggaagggaa

SEQ ID NO: 516049 - RNA, 22 nt, Human
uugggggcauauugaguagugg

SEQ ID NO: 516050 - RNA, 22 nt, Human
auaacagauacucucugugagg

SEQ ID NO: 516051 - RNA, 23 nt, Human
acugggcugaaauuaaagguguc

SEQ ID NO: 516052 - RNA, 22 nt, Human
ccaaagucugcauuuuaacaug

SEQ ID NO: 516053 - RNA, 22 nt, Human
ggagggggaaacuuuggcugcc

SEQ ID NO: 516054 - RNA, 22 nt, Human
ugcaggccuaugguggggcccc

SEQ ID NO: 516055 - RNA, 22 nt, Human
uacuuuaaaaacugauaauuca

SEQ ID NO: 516056 - RNA, 22 nt, Human
ccugccuguacuagagacccag

SEQ ID NO: 516057 - RNA, 19 nt, Human
cugagcagcggcagcacuu

SEQ ID NO: 516058 - RNA, 22 nt, Human
aggccucacucucagagcuucu

SEQ ID NO: 516059 - RNA, 22 nt, Human
aagggcagaaagggacgcuuug

SEQ ID NO: 516060 - RNA, 22 nt, Human
guguucuuuugcuucacagaaa

SEQ ID NO: 516061 - RNA, 22 nt, Human
aggucugguguugggccugaaa

SEQ ID NO: 516062 - RNA, 23 nt, Human
aagcugccuucgcaguuggucug

SEQ ID NO: 516063 - RNA, 22 nt, Human
aucaaugcuugccaaauggaag

SEQ ID NO: 516064 - RNA, 22 nt, Human
cucugaacucuugggcagcaug

SEQ ID NO: 516065 - RNA, 22 nt, Human
cuggggcaucauccauucuuuc

SEQ ID NO: 516066 - RNA, 22 nt, Human
ugucucaggggcauugaaauaa

SEQ ID NO: 516067 - RNA, 22 nt, Human
guuaauaaagguauagaaucag

SEQ ID NO: 516068 - RNA, 22 nt, Human
gagugcaauaaacuguuuucua

SEQ ID NO: 516069 - RNA, 22 nt, Human
uccuucagaggacggcagccag

SEQ ID NO: 516070 - RNA, 22 nt, Human
gcaaggcugugcacuuugcauu

SEQ ID NO: 516071 - RNA, 20 nt, Human
aggcugccaggucucacauc

SEQ ID NO: 516072 - RNA, 22 nt, Human
ccuggaggagcgcugaccagcu

SEQ ID NO: 516073 - RNA, 22 nt, Human
ccuggcugcuuccucugccaug

SEQ ID NO: 516074 - RNA, 22 nt, Human
aaagccuucugucuagcagaua

SEQ ID NO: 516075 - RNA, 22 nt, Human
gaucacaugaauggaauagaag

SEQ ID NO: 516076 - RNA, 22 nt, Human
caaaggagguaaugggugugag

SEQ ID NO: 516077 - RNA, 22 nt, Human
guuagguagaaguuuacuuuga

SEQ ID NO: 516078 - RNA, 22 nt, Human
ucagggcagguuaacuugggug

SEQ ID NO: 516079 - RNA, 22 nt, Human
uggcacaggagcacugcccugg

SEQ ID NO: 516080 - RNA, 22 nt, Human
cuggccacaacuagcccaggac

SEQ ID NO: 516081 - RNA, 22 nt, Human
uucaaauccuagcccuguggcc

SEQ ID NO: 516082 - RNA, 22 nt, Human
uucaggaugcagagguuguagu

SEQ ID NO: 516083 - RNA, 22 nt, Human
augugaaagagguguucagugg

SEQ ID NO: 516084 - RNA, 22 nt, Human
uugcugaaaucuaugacauccu

SEQ ID NO: 516085 - RNA, 22 nt, Human
cacagaaucugugacuccaaga

SEQ ID NO: 516086 - RNA, 22 nt, Human
uggcccuuguucaaauauguca

SEQ ID NO: 516087 - RNA, 23 nt, Human
ccagcucccaggucugaggacug

SEQ ID NO: 516088 - RNA, 22 nt, Human
agcagcuccugccaugagugcu

SEQ ID NO: 516089 - RNA, 22 nt, Human
gggcagccucggugccugcugc

SEQ ID NO: 516090 - RNA, 21 nt, Human
agagucugcauuucugacaag

SEQ ID NO: 516091 - RNA, 22 nt, Human
aggaagcuccuggagagccagu

SEQ ID NO: 516092 - RNA, 22 nt, Human
agaggcccucucucuccugaug

SEQ ID NO: 516093 - RNA, 22 nt, Human
guggccaggccgacugccaggc

SEQ ID NO: 516094 - RNA, 22 nt, Human
cauuugaaauaguucauucuug

SEQ ID NO: 516095 - RNA, 22 nt, Human
cccucaggagaugucagcugga

SEQ ID NO: 516096 - RNA, 22 nt, Human
gaaaggucuuccggucuuccag

SEQ ID NO: 516097 - RNA, 22 nt, Human
gcugaagcugcagcaggaggaa

SEQ ID NO: 516098 - RNA, 22 nt, Human
uuauguacucugcaauguuuga

SEQ ID NO: 516099 - RNA, 22 nt, Human
cuuuucugugaugcugacaguc

SEQ ID NO: 516100 - RNA, 18 nt, Human
agucuucugauccauuuu

SEQ ID NO: 516101 - RNA, 22 nt, Human
uacuuuagaaggaaauaaguuc

SEQ ID NO: 516102 - RNA, 22 nt, Human
aaaaauaggucaaccguguaug

SEQ ID NO: 516103 - RNA, 22 nt, Human
cuaagacaugcccugcaugaua

SEQ ID NO: 516104 - RNA, 22 nt, Human
augaggcaugugaggagaaggg

SEQ ID NO: 516105 - RNA, 22 nt, Human
cagcuccucuguuagcccuggg

SEQ ID NO: 516106 - RNA, 20 nt, Human
uccuggaguauuccaugcuu

SEQ ID NO: 516107 - RNA, 22 nt, Human
cccagcagcuugcacagugcug

SEQ ID NO: 516108 - RNA, 22 nt, Human
ccuggcagcuguuuggcuuggc

SEQ ID NO: 516109 - RNA, 19 nt, Human
ccagccucucuuccacccc

SEQ ID NO: 516110 - RNA, 22 nt, Human
uccuugaagaaugauucuugga

SEQ ID NO: 516111 - RNA, 22 nt, Human
cugggccagaagacauuuagga

SEQ ID NO: 516112 - RNA, 22 nt, Human
agcugagagguggcaagcugua

SEQ ID NO: 516113 - RNA, 20 nt, Human
cuccagggaacagacuggag

SEQ ID NO: 516114 - RNA, 22 nt, Human
uccugcagacauuuacaccuuu

SEQ ID NO: 516115 - RNA, 21 nt, Human
uccuggcuuuaugcuaccucu

SEQ ID NO: 516116 - RNA, 22 nt, Human
cuuguuuuuaagagauguuuac

SEQ ID NO: 516117 - RNA, 22 nt, Human
gcagcuggaagugacacucugu

SEQ ID NO: 516118 - RNA, 22 nt, Human
ugauuuccucuacuagcaauua

SEQ ID NO: 516119 - RNA, 22 nt, Human
cugcccugugcacaggaaacug

SEQ ID NO: 516120 - RNA, 22 nt, Human
auuaguguacaucucacacgca

SEQ ID NO: 516121 - RNA, 22 nt, Human
ccagagagucgaugggggacac

SEQ ID NO: 516122 - RNA, 22 nt, Human
cugcugcaaucuggcuuccaug

SEQ ID NO: 516123 - RNA, 22 nt, Human
agagcuggcugcugcggugcuu

SEQ ID NO: 516124 - RNA, 22 nt, Human
uaaggaaacaacuuguauuuuu

SEQ ID NO: 516125 - RNA, 22 nt, Human
uggggcucaccuaggcuggaag

SEQ ID NO: 516126 - RNA, 22 nt, Human
agggccacuggcugacggcugc

SEQ ID NO: 516127 - RNA, 22 nt, Human
ugauauaagaaguaguauggau

SEQ ID NO: 516128 - RNA, 22 nt, Human
gauuucaaagguucugcaugcc

SEQ ID NO: 516129 - RNA, 22 nt, Human
acagcuggugaauguucucugu

SEQ ID NO: 516130 - RNA, 22 nt, Human
cugggaggcagucucucuagaa

SEQ ID NO: 516131 - RNA, 22 nt, Human
aaagcagaggugauaugacuua

SEQ ID NO: 516132 - RNA, 22 nt, Human
uagaaguuucaaaagacuucau

SEQ ID NO: 516133 - RNA, 22 nt, Human
cagagguaccagcagccucugg

SEQ ID NO: 516134 - RNA, 22 nt, Human
caugagugucaucucagcagcu

SEQ ID NO: 516135 - RNA, 22 nt, Human
ugcuggaugcuugauuuugagg

SEQ ID NO: 516136 - RNA, 22 nt, Human
aucuuugcuauuguaaaucacg

SEQ ID NO: 516137 - RNA, 22 nt, Human
cugucauugagccugucagggc

SEQ ID NO: 516138 - RNA, 22 nt, Human
uuacugaaaauucuucaggauu

SEQ ID NO: 516139 - RNA, 22 nt, Human
gacacuucaccuuucccagccu

SEQ ID NO: 516140 - RNA, 22 nt, Human
ggccagcagucacagggucaga

SEQ ID NO: 516141 - RNA, 20 nt, Human
agggcagagggauuacaggc

SEQ ID NO: 516142 - RNA, 22 nt, Human
uuggcugagagaggaaaagggc

SEQ ID NO: 516143 - RNA, 22 nt, Human
uggcauguuuaauguacuguau

SEQ ID NO: 516144 - RNA, 22 nt, Human
caaauauuccagguacaucccu

SEQ ID NO: 516145 - RNA, 22 nt, Human
acagcuuuuuacuaauagauug

SEQ ID NO: 516146 - RNA, 22 nt, Human
uuugcauuuuagauuuaggccu

SEQ ID NO: 516147 - RNA, 22 nt, Human
ccucugggugacagacucuugg

SEQ ID NO: 516148 - RNA, 22 nt, Human
aggaagcuaaccagggagugag

SEQ ID NO: 516149 - RNA, 22 nt, Human
ccuggcacauaguaaguacuag

SEQ ID NO: 516150 - RNA, 22 nt, Human
aggagcagaccguaguccugca

SEQ ID NO: 516151 - RNA, 22 nt, Human
cuaauuguaagcuccuugaggg

SEQ ID NO: 516152 - RNA, 22 nt, Human
aaggccugggaggccucucuuc

SEQ ID NO: 516153 - RNA, 22 nt, Human
acucuugucucaacuuuuguau

SEQ ID NO: 516154 - RNA, 22 nt, Human
ggagccugacagugcccagcau

SEQ ID NO: 516155 - RNA, 22 nt, Human
accaagcuguauauuauugguu

SEQ ID NO: 516156 - RNA, 22 nt, Human
guggccugucagaagccguggg

SEQ ID NO: 516157 - RNA, 22 nt, Human
ucacagaaggagggaagcuagu

SEQ ID NO: 516158 - RNA, 22 nt, Human
uuauucagucugucuagggagu

SEQ ID NO: 516159 - RNA, 22 nt, Human
agguauauauucugguccuuau

SEQ ID NO: 516160 - RNA, 21 nt, Human
gcagccacugccuucaacaau

SEQ ID NO: 516161 - RNA, 21 nt, Human
ugggauagaaauauggcugcu

SEQ ID NO: 516162 - RNA, 22 nt, Human
uuggccaguggaaagaggagga

SEQ ID NO: 516163 - RNA, 22 nt, Human
auuagcuuuauuugaaauagga

SEQ ID NO: 516164 - RNA, 23 nt, Human
ugcugggcagagcuggugcugag

SEQ ID NO: 516165 - RNA, 22 nt, Human
ugggugcuucgucagcucugag

SEQ ID NO: 516166 - RNA, 22 nt, Human
cagcccagccuugucucuuuau

SEQ ID NO: 516167 - RNA, 22 nt, Human
gugaauaaucacccuucuggau

SEQ ID NO: 516168 - RNA, 22 nt, Human
uauuugaagauucuucugaugu

SEQ ID NO: 516169 - RNA, 22 nt, Human
cugaggcucaagggcagguggg

SEQ ID NO: 516170 - RNA, 22 nt, Human
auaaaaguaggaccaacuuaca

SEQ ID NO: 516171 - RNA, 22 nt, Human
gcugcagcagcugcaggguugu

SEQ ID NO: 516172 - RNA, 22 nt, Human
guggaagggucacagccccuac

SEQ ID NO: 516173 - RNA, 22 nt, Human
aaugucuacaccguauguuguu

SEQ ID NO: 516174 - RNA, 23 nt, Human
aacuccugaaucgugagccaucu

SEQ ID NO: 516175 - RNA, 22 nt, Human
gggccccuuguaucucuggcuc

SEQ ID NO: 516176 - RNA, 22 nt, Human
ggcucacgcaauuaucccggcc

SEQ ID NO: 516177 - RNA, 22 nt, Human
acagcuuuugaaaaauuacugg

SEQ ID NO: 516178 - RNA, 22 nt, Human
auacauauaugguacuuccugg

SEQ ID NO: 516179 - RNA, 22 nt, Human
gacagcauggugucuguucagg

SEQ ID NO: 516180 - RNA, 22 nt, Human
gccaccagugggggccugggca

SEQ ID NO: 516181 - RNA, 22 nt, Human
uagacacauccguggaagcuuc

SEQ ID NO: 516182 - RNA, 22 nt, Human
cuuaauuucaaacugcuaguga

SEQ ID NO: 516183 - RNA, 22 nt, Human
augcuuuuaugucacaugguca

SEQ ID NO: 516184 - RNA, 22 nt, Human
aaacauuguacauucuguagcu

SEQ ID NO: 516185 - RNA, 22 nt, Human
cugggccuggcguuccaggcug

SEQ ID NO: 516186 - RNA, 22 nt, Human
ugucuguggcaauuguggguaa

SEQ ID NO: 516187 - RNA, 22 nt, Human
uagcuuuaccauagaagaguau

SEQ ID NO: 516188 - RNA, 22 nt, Human
uggaagcuguggcauaacugag

SEQ ID NO: 516189 - RNA, 23 nt, Human
ugcucccaggugacgcugcuguu

SEQ ID NO: 516190 - RNA, 22 nt, Human
gcugggucccaagccuggggag

SEQ ID NO: 516191 - RNA, 22 nt, Human
cagggcagaacauauagauagu

SEQ ID NO: 516192 - RNA, 19 nt, Human
cacaacuucgcuugauucc

SEQ ID NO: 516193 - RNA, 22 nt, Human
ugcugccagggcucugcccaca

SEQ ID NO: 516194 - RNA, 22 nt, Human
aauuaacagagggcuuauuacu

SEQ ID NO: 516195 - RNA, 19 nt, Human
ggcaccuuggcuaugccug

SEQ ID NO: 516196 - RNA, 22 nt, Human
aaggcacugagccagccgucuc

SEQ ID NO: 516197 - RNA, 22 nt, Human
cuucugggccauggccuuccuc

SEQ ID NO: 516198 - RNA, 22 nt, Human
aggcacuguucccaguuauccu

SEQ ID NO: 516199 - RNA, 22 nt, Human
ugucuuuucuacuguaagcaua

SEQ ID NO: 516200 - RNA, 22 nt, Human
gagaaggggugauguggguaau

SEQ ID NO: 516201 - RNA, 22 nt, Human
ccagagcugcauccagcagguu

SEQ ID NO: 516202 - RNA, 20 nt, Human
aguuauaguaucuagccaug

SEQ ID NO: 516203 - RNA, 22 nt, Human
agcagaacauuuucagggcugu

SEQ ID NO: 516204 - RNA, 22 nt, Human
cagauaaaggcuuacuaguagu

SEQ ID NO: 516205 - RNA, 22 nt, Human
uaaagugcuggauuugaguaaa

SEQ ID NO: 516206 - RNA, 22 nt, Human
uccaagaucuacagcaguuuag

SEQ ID NO: 516207 - RNA, 22 nt, Human
uuccaguugguagaauguaagg

SEQ ID NO: 516208 - RNA, 21 nt, Human
uucaaagagugggcauuguca

SEQ ID NO: 516209 - RNA, 22 nt, Human
cacauuugaaggaauuagcauu

SEQ ID NO: 516210 - RNA, 22 nt, Human
aaaguuagaaugauaucaacga

SEQ ID NO: 516211 - RNA, 20 nt, Human
ggaaaaaugcaugcucaaga

SEQ ID NO: 516212 - RNA, 22 nt, Human
acaggcagguccugucccagcu

SEQ ID NO: 516213 - RNA, 22 nt, Human
uucugggcaggacuggggaccc

SEQ ID NO: 516214 - RNA, 22 nt, Human
cugccaggcugucccagguccg

SEQ ID NO: 516215 - RNA, 22 nt, Human
ucuguucuuguccccacuucag

SEQ ID NO: 516216 - RNA, 22 nt, Human
agccacagagagggagcugcaa

SEQ ID NO: 516217 - RNA, 22 nt, Human
cagaggccuggcuuggacaccu

SEQ ID NO: 516218 - RNA, 22 nt, Human
caggguggcccuguggucucau

SEQ ID NO: 516219 - RNA, 22 nt, Human
uguuaucugagcaacgucgacg

SEQ ID NO: 516220 - RNA, 22 nt, Human
ggacacacaaguuaucuaauga

SEQ ID NO: 516221 - RNA, 18 nt, Human
aaagaaggauuggagagc

SEQ ID NO: 516222 - RNA, 22 nt, Human
cagaaauaaacuucucacaucg

SEQ ID NO: 516223 - RNA, 23 nt, Human
uugugggcagauuccauggggag

SEQ ID NO: 516224 - RNA, 22 nt, Human
cugggagggguagccaauccua

SEQ ID NO: 516225 - RNA, 22 nt, Human
gaugagaauguuuaucaaaugc

SEQ ID NO: 516226 - RNA, 19 nt, Human
ccaggccucuggggccugu

SEQ ID NO: 516227 - RNA, 22 nt, Human
aaguuucaugauguaauuauug

SEQ ID NO: 516228 - RNA, 22 nt, Human
uuccuugaaugagucauggaaa

SEQ ID NO: 516229 - RNA, 22 nt, Human
ugcccuguggguaucugauggc

SEQ ID NO: 516230 - RNA, 22 nt, Human
aaagagcuucauuuccauuuau

SEQ ID NO: 516231 - RNA, 22 nt, Human
uaaaugugagugaugcggugaa

SEQ ID NO: 516232 - RNA, 22 nt, Human
uacagugucccuuuuucagaca

SEQ ID NO: 516233 - RNA, 22 nt, Human
acauuuaggauguuuugagaga

SEQ ID NO: 516234 - RNA, 22 nt, Human
cuuguacauagagaagaagccu

SEQ ID NO: 516235 - RNA, 22 nt, Human
augccaaagcccaaguucauca

SEQ ID NO: 516236 - RNA, 22 nt, Human
uggcugcuagccagagcuucag

SEQ ID NO: 516237 - RNA, 22 nt, Human
cagaggugcauacaggucauua

SEQ ID NO: 516238 - RNA, 22 nt, Human
uauguguggcagcugggagugu

SEQ ID NO: 516239 - RNA, 22 nt, Human
aaguuuguucauucauucaucc

SEQ ID NO: 516240 - RNA, 22 nt, Human
caauuacauuuauugagcauuc

SEQ ID NO: 516241 - RNA, 22 nt, Human
acucacuuuccauucaagcacc

SEQ ID NO: 516242 - RNA, 22 nt, Human
acagcagcuaaccccugggcca

SEQ ID NO: 516243 - RNA, 22 nt, Human
aaucucacucaaagaauucucu

SEQ ID NO: 516244 - RNA, 22 nt, Human
auugacuuucccuucuccucau

SEQ ID NO: 516245 - RNA, 22 nt, Human
ugggcucuggagggccuaggau

SEQ ID NO: 516246 - RNA, 22 nt, Human
uauuuauguggaccauaagccu

SEQ ID NO: 516247 - RNA, 22 nt, Human
uuuaguagaaauauuugggccu

SEQ ID NO: 516248 - RNA, 20 nt, Human
accuaguacaaucuguuucu

SEQ ID NO: 516249 - RNA, 22 nt, Human
gccuguuuaaguauucugacau

SEQ ID NO: 516250 - RNA, 22 nt, Human
cuuuucuagagccgcagcccua

SEQ ID NO: 516251 - RNA, 22 nt, Human
aucaaaguccaucagaagguag

SEQ ID NO: 516252 - RNA, 22 nt, Human
uucacuuaacaucauaucauga

SEQ ID NO: 516253 - RNA, 22 nt, Human
auguaagguucagaguauguga

SEQ ID NO: 516254 - RNA, 22 nt, Human
agccauccuacuaccucagcau

SEQ ID NO: 516255 - RNA, 22 nt, Human
guauuagcaagaguugugauuu

SEQ ID NO: 516256 - RNA, 22 nt, Human
gcacugcagguggguggagagg

SEQ ID NO: 516257 - RNA, 22 nt, Human
cagcucugguccagggagggca

SEQ ID NO: 516258 - RNA, 22 nt, Human
guuggccugaauggucaagagg

SEQ ID NO: 516259 - RNA, 22 nt, Human
ccacugggggcugcaggcacuc

SEQ ID NO: 516260 - RNA, 22 nt, Human
ucugaggccccugggcaggaug

SEQ ID NO: 516261 - RNA, 22 nt, Human
aaaaugagccaugaaccaacca

SEQ ID NO: 516262 - RNA, 22 nt, Human
aggggauggagcuggaaggcag

SEQ ID NO: 516263 - RNA, 22 nt, Human
uagcugaagggcauuuaauaaa

SEQ ID NO: 516264 - RNA, 22 nt, Human
caggggcuuaagugacagaagg

SEQ ID NO: 516265 - RNA, 22 nt, Human
uggccugggugcugcugacauc

SEQ ID NO: 516266 - RNA, 22 nt, Human
ggaggccagccugaggcugagg

SEQ ID NO: 516267 - RNA, 22 nt, Human
uguaagauauucagcuuauuga

SEQ ID NO: 516268 - RNA, 22 nt, Human
guggcccaggcuuggcgcuggc

SEQ ID NO: 516269 - RNA, 22 nt, Human
uucagcaccuggaauagcaccu

SEQ ID NO: 516270 - RNA, 23 nt, Human
augcucugggcugugggaccugc

SEQ ID NO: 516271 - RNA, 22 nt, Human
ggcauccaguucugaucaacaa

SEQ ID NO: 516272 - RNA, 22 nt, Human
ucuacagugucaaugugucuug

SEQ ID NO: 516273 - RNA, 22 nt, Human
agacuucuuugugagcauuuuc

SEQ ID NO: 516274 - RNA, 22 nt, Human
ugcuuaaaaagcuccaucaaua

SEQ ID NO: 516275 - RNA, 22 nt, Human
gcacugaacuuuaaucauuucu

SEQ ID NO: 516276 - RNA, 19 nt, Human
gucucuggauuucaggucc

SEQ ID NO: 516277 - RNA, 22 nt, Human
ccuggugccacuagagaauguc

SEQ ID NO: 516278 - RNA, 22 nt, Human
gcugcugggguggagaaacgcu

SEQ ID NO: 516279 - RNA, 22 nt, Human
uggcagcucuguucaacaugag

SEQ ID NO: 516280 - RNA, 22 nt, Human
gugggguagaucuuucucagga

SEQ ID NO: 516281 - RNA, 22 nt, Human
accaugaugggaagcucagggc

SEQ ID NO: 516282 - RNA, 22 nt, Human
aauucuugguccuaguguauaa

SEQ ID NO: 516283 - RNA, 22 nt, Human
accugagccuagggagguugag

SEQ ID NO: 516284 - RNA, 22 nt, Human
uggcagguggcacagccuggga

SEQ ID NO: 516285 - RNA, 22 nt, Human
ccuggcucauuaugugccccca

SEQ ID NO: 516286 - RNA, 22 nt, Human
ucagccacuacccaccuuaaca

SEQ ID NO: 516287 - RNA, 22 nt, Human
ucucauggagucaggagcagaa

SEQ ID NO: 516288 - RNA, 22 nt, Human
gucagagagggcacgugcacac

SEQ ID NO: 516289 - RNA, 22 nt, Human
cuagucacacaguaaggacggg

SEQ ID NO: 516290 - RNA, 22 nt, Human
ggcaggguggcccuccagugag

SEQ ID NO: 516291 - RNA, 22 nt, Human
uagcacuauauguuagcuauua

SEQ ID NO: 516292 - RNA, 22 nt, Human
uccucagcuuuuauuucacuug

SEQ ID NO: 516293 - RNA, 19 nt, Human
cacacccaugcuugccaag

SEQ ID NO: 516294 - RNA, 22 nt, Human
uuucuguauuuaaaagaucugg

SEQ ID NO: 516295 - RNA, 22 nt, Human
uguucuugggaaucuuacaguu

SEQ ID NO: 516296 - RNA, 20 nt, Human
ucagccuucucauccugggg

SEQ ID NO: 516297 - RNA, 22 nt, Human
caguggguccugcgucugccag

SEQ ID NO: 516298 - RNA, 22 nt, Human
cugguccuccuugccuucagau

SEQ ID NO: 516299 - RNA, 22 nt, Human
aagccaggcaugcuuggacagu

SEQ ID NO: 516300 - RNA, 22 nt, Human
cugaauaauauuccauuaugag

SEQ ID NO: 516301 - RNA, 22 nt, Human
agcugcagcuuccuaguccagc

SEQ ID NO: 516302 - RNA, 18 nt, Human
caggugggucuccugccc

SEQ ID NO: 516303 - RNA, 22 nt, Human
aaaggccaauaaagacaagcug

SEQ ID NO: 516304 - RNA, 22 nt, Human
agccaugcaccuuacucuugcu

SEQ ID NO: 516305 - RNA, 22 nt, Human
ggaaggcucuguuccuugacuu

SEQ ID NO: 516306 - RNA, 22 nt, Human
agucucugcaugccugcugugc

SEQ ID NO: 516307 - RNA, 22 nt, Human
ucccacugcuuugcucugcuca

SEQ ID NO: 516308 - RNA, 22 nt, Human
aaggcugagacagcacaggucc

SEQ ID NO: 516309 - RNA, 22 nt, Human
cugggcucaaauccuaucucca

SEQ ID NO: 516310 - RNA, 22 nt, Human
acauuucagauucaugaaguga

SEQ ID NO: 516311 - RNA, 22 nt, Human
uggggacauucaugcagguugu

SEQ ID NO: 516312 - RNA, 22 nt, Human
aagcaggacguauuucuauccu

SEQ ID NO: 516313 - RNA, 22 nt, Human
ggguaauuggggccuugcagug

SEQ ID NO: 516314 - RNA, 22 nt, Human
uuccaggaaaacaguuggaagu

SEQ ID NO: 516315 - RNA, 22 nt, Human
aagagaugauggcagccagagg

SEQ ID NO: 516316 - RNA, 22 nt, Human
caggaggcaucauggagcggac

SEQ ID NO: 516317 - RNA, 22 nt, Human
auuauguauuugguauaguuug

SEQ ID NO: 516318 - RNA, 22 nt, Human
ggcugcuggaagacugaacaag

SEQ ID NO: 516319 - RNA, 22 nt, Human
aggauccuuuggccacuucuua

SEQ ID NO: 516320 - RNA, 22 nt, Human
gccuggggaacuugauccuguc

SEQ ID NO: 516321 - RNA, 23 nt, Human
agguccuggacauaugugcauca

SEQ ID NO: 516322 - RNA, 23 nt, Human
aaauucaguccuucaacucugag

SEQ ID NO: 516323 - RNA, 22 nt, Human
acagauguuagcaaugaugaug

SEQ ID NO: 516324 - RNA, 22 nt, Human
acugucucucuagcaguucagg

SEQ ID NO: 516325 - RNA, 22 nt, Human
uugcaucuagggcaacccagag

SEQ ID NO: 516326 - RNA, 22 nt, Human
ucucuggcuccugccgggucca

SEQ ID NO: 516327 - RNA, 22 nt, Human
ggaggugguggcagugacaauu

SEQ ID NO: 516328 - RNA, 23 nt, Human
acagaggcuuaaaugaguggcag

SEQ ID NO: 516329 - RNA, 22 nt, Human
ccuggcuuuuguuuauaaauuc

SEQ ID NO: 516330 - RNA, 22 nt, Human
ggaaggcagaggugucgugggg

SEQ ID NO: 516331 - RNA, 22 nt, Human
ugcagaagaauguaggcauaag

SEQ ID NO: 516332 - RNA, 22 nt, Human
gggaaggcagugucugguugaa

SEQ ID NO: 516333 - RNA, 22 nt, Human
agccaggaagaaggucacacca

SEQ ID NO: 516334 - RNA, 22 nt, Human
ccccaugcugggaucugacacc

SEQ ID NO: 516335 - RNA, 22 nt, Human
gcucugggaauucagaaagccu

SEQ ID NO: 516336 - RNA, 22 nt, Human
cuuuguggcuccugcaggccau

SEQ ID NO: 516337 - RNA, 22 nt, Human
gagaggccaaaaucccugcccc

SEQ ID NO: 516338 - RNA, 22 nt, Human
cucugggcaaguaugauagaaa

SEQ ID NO: 516339 - RNA, 22 nt, Human
cagacccucgggugaguuggcc

SEQ ID NO: 516340 - RNA, 22 nt, Human
caucuugcuugucuuuaguaag

SEQ ID NO: 516341 - RNA, 22 nt, Human
ugaagcagcuucuuucugucaa

SEQ ID NO: 516342 - RNA, 22 nt, Human
ucuacugcacuggugucucauc

SEQ ID NO: 516343 - RNA, 22 nt, Human
uauucacaaaaugagguccuca

SEQ ID NO: 516344 - RNA, 22 nt, Human
gcagggacaucuucagaucacu

SEQ ID NO: 516345 - RNA, 22 nt, Human
gggaucugaugcacugcugaaa

SEQ ID NO: 516346 - RNA, 22 nt, Human
gagcccaggcagagguugcagu

SEQ ID NO: 516347 - RNA, 22 nt, Human
cucucagugccugcccuaggcu

SEQ ID NO: 516348 - RNA, 22 nt, Human
guccuggcccacuggcaggcug

SEQ ID NO: 516349 - RNA, 22 nt, Human
caggcagcgcucguggccuggc

SEQ ID NO: 516350 - RNA, 21 nt, Human
gcaaggcuuuuguguuuccca

SEQ ID NO: 516351 - RNA, 22 nt, Human
caggcacugcacuaccacuuuu

SEQ ID NO: 516352 - RNA, 22 nt, Human
ccucagugugcagcagcaucug

SEQ ID NO: 516353 - RNA, 22 nt, Human
aagggcucugugcuugucccau

SEQ ID NO: 516354 - RNA, 17 nt, Human
ggccuugggcugcucuu

SEQ ID NO: 516355 - RNA, 22 nt, Human
gcuggccacacugcugauggag

SEQ ID NO: 516356 - RNA, 22 nt, Human
acucuggcuauucacuauaaua

SEQ ID NO: 516357 - RNA, 23 nt, Human
uuucuguuggguauauauccaag

SEQ ID NO: 516358 - RNA, 22 nt, Human
aggccugucuggggcucagcca

SEQ ID NO: 516359 - RNA, 22 nt, Human
cugugucugccugggauccauu

SEQ ID NO: 516360 - RNA, 22 nt, Human
gcguggcuuagagugggguacc

SEQ ID NO: 516361 - RNA, 22 nt, Human
gagugcaggccugagcaccauc

SEQ ID NO: 516362 - RNA, 22 nt, Human
auacuugagguuguauaaauau

SEQ ID NO: 516363 - RNA, 17 nt, Human
aaugaaugaauucuuug

SEQ ID NO: 516364 - RNA, 22 nt, Human
gggucuggcaugcugagaugga

SEQ ID NO: 516365 - RNA, 22 nt, Human
gaugaagccugacuucucggug

SEQ ID NO: 516366 - RNA, 22 nt, Human
acugcguggggagcugugacua

SEQ ID NO: 516367 - RNA, 22 nt, Human
uauauacaagguagguuuaggu

SEQ ID NO: 516368 - RNA, 22 nt, Human
uauaauuuggggaaaguggugu

SEQ ID NO: 516369 - RNA, 22 nt, Human
agggcuggccacaugauuuggu

SEQ ID NO: 516370 - RNA, 22 nt, Human
uuugaugaugaugauaaaguuu

SEQ ID NO: 516371 - RNA, 22 nt, Human
gagcugccaguguaugaauucu

SEQ ID NO: 516372 - RNA, 20 nt, Human
agagcugggaagcucccuau

SEQ ID NO: 516373 - RNA, 22 nt, Human
acacacagguaaaggagccugg

SEQ ID NO: 516374 - RNA, 22 nt, Human
auacuguacgucccagauagga

SEQ ID NO: 516375 - RNA, 22 nt, Human
agcaggcacgcucccugcgcga

SEQ ID NO: 516376 - RNA, 22 nt, Human
cacacauugaauucauucuugu

SEQ ID NO: 516377 - RNA, 20 nt, Human
uggaauggguccuugaaaaa

SEQ ID NO: 516378 - RNA, 22 nt, Human
gcaggcugauagaggauuccau

SEQ ID NO: 516379 - RNA, 22 nt, Human
uucauguguauggaacauuuuu

SEQ ID NO: 516380 - RNA, 22 nt, Human
aaaggagaaaacauacaggacu

SEQ ID NO: 516381 - RNA, 22 nt, Human
aggugacaucccggcagcagag

SEQ ID NO: 516382 - RNA, 22 nt, Human
ggccucagaggaggugugaguc

SEQ ID NO: 516383 - RNA, 22 nt, Human
cagcagcuccucugcggcuaug

SEQ ID NO: 516384 - RNA, 17 nt, Human
gcugcagcgguaggcag

SEQ ID NO: 516385 - RNA, 22 nt, Human
gugguccuggcaaccaugguga

SEQ ID NO: 516386 - RNA, 22 nt, Human
ggcaucuuguugcucaaaucua

SEQ ID NO: 516387 - RNA, 22 nt, Human
ucacagaagcaucauacccgga

SEQ ID NO: 516388 - RNA, 22 nt, Human
auguaaaguaucugaaaugcug

SEQ ID NO: 516389 - RNA, 22 nt, Human
uuucagagaugcagaauucagg

SEQ ID NO: 516390 - RNA, 22 nt, Human
gccaggcaggccacgcuguguu

SEQ ID NO: 516391 - RNA, 22 nt, Human
cagcaggaaagacaucugagca

SEQ ID NO: 516392 - RNA, 22 nt, Human
uauguacaguccuuaacuuaaa

SEQ ID NO: 516393 - RNA, 22 nt, Human
uucucuggaaggcucuacggga

SEQ ID NO: 516394 - RNA, 22 nt, Human
gcuggagcugcagccugggccu

SEQ ID NO: 516395 - RNA, 22 nt, Human
gcaggggaguccacucuaugca

SEQ ID NO: 516396 - RNA, 22 nt, Human
aauuucuccaagaaugcuuaga

SEQ ID NO: 516397 - RNA, 22 nt, Human
cuuguuuuaaacuguuguggcu

SEQ ID NO: 516398 - RNA, 22 nt, Human
gccugccugcugugugcaaguu

SEQ ID NO: 516399 - RNA, 22 nt, Human
ccagagagcuacaaggcauaaa

SEQ ID NO: 516400 - RNA, 22 nt, Human
aaauaguucagccacggugacu

SEQ ID NO: 516401 - RNA, 22 nt, Human
ccagaggcauguucaaagcaau

SEQ ID NO: 516402 - RNA, 22 nt, Human
ggaagagagggcugggccucaa

SEQ ID NO: 516403 - RNA, 22 nt, Human
cuucauuaaugucuauaaguuu

SEQ ID NO: 516404 - RNA, 21 nt, Human
agggcagauuagcuguaagag

SEQ ID NO: 516405 - RNA, 22 nt, Human
uuugggcaggcuuuucccuaga

SEQ ID NO: 516406 - RNA, 21 nt, Human
agacagaacaacugcucucca

SEQ ID NO: 516407 - RNA, 22 nt, Human
uccuggcccuguggccugcagu

SEQ ID NO: 516408 - RNA, 22 nt, Human
aucuggcucucucauuuacaaa

SEQ ID NO: 516409 - RNA, 22 nt, Human
augguguagcaugugauaugac

SEQ ID NO: 516410 - RNA, 22 nt, Human
gagguacaugaggauacacagg

SEQ ID NO: 516411 - RNA, 20 nt, Human
cugggcagguguuugaucuc

SEQ ID NO: 516412 - RNA, 22 nt, Human
acaaggaggucuggggggcccu

SEQ ID NO: 516413 - RNA, 22 nt, Human
gaggaccacagaugagccugca

SEQ ID NO: 516414 - RNA, 17 nt, Human
uuucagauucacuuucu

SEQ ID NO: 516415 - RNA, 22 nt, Human
aaaaacugcaauuacuuuuguc

SEQ ID NO: 516416 - RNA, 22 nt, Human
ccuuuuggccaggucagugcag

SEQ ID NO: 516417 - RNA, 22 nt, Human
auugaaagagaauguagcucuu

SEQ ID NO: 516418 - RNA, 21 nt, Human
uuccuggggaaggagcugccu

SEQ ID NO: 516419 - RNA, 22 nt, Human
aagggcaggaaaagauggaugu

SEQ ID NO: 516420 - RNA, 22 nt, Human
ucccuguguccaugccaggagg

SEQ ID NO: 516421 - RNA, 17 nt, Human
gaacuuuuauuaaauuc

SEQ ID NO: 516422 - RNA, 22 nt, Human
agucugaaccagauggcaaggu

SEQ ID NO: 516423 - RNA, 22 nt, Human
uuauacaggagauuccuuacuu

SEQ ID NO: 516424 - RNA, 22 nt, Human
auuaaauuggacgcugggggaa

SEQ ID NO: 516425 - RNA, 22 nt, Human
uguccuguucuugcuguguccu

SEQ ID NO: 516426 - RNA, 22 nt, Human
aaucaauguuagucaugaauuu

SEQ ID NO: 516427 - RNA, 19 nt, Human
uccugcccaccagccaggg

SEQ ID NO: 516428 - RNA, 22 nt, Human
ugggcagaggacagggaagauc

SEQ ID NO: 516429 - RNA, 22 nt, Human
aauuuggcagugucuugaagua

SEQ ID NO: 516430 - RNA, 22 nt, Human
ucacacguccuugcuacuccuc

SEQ ID NO: 516431 - RNA, 22 nt, Human
cacaugugugcugaggacugug

SEQ ID NO: 516432 - RNA, 21 nt, Human
ugcagagauaucugaagcaga

SEQ ID NO: 516433 - RNA, 23 nt, Human
aggcagguuugggcucuucuugu

SEQ ID NO: 516434 - RNA, 22 nt, Human
uguggccagggggccauguccc

SEQ ID NO: 516435 - RNA, 22 nt, Human
aaaccaucagauaauucauacu

SEQ ID NO: 516436 - RNA, 22 nt, Human
ugggaguccaaggcaggcggau

SEQ ID NO: 516437 - RNA, 22 nt, Human
cuccaggagguugcugcuuccu

SEQ ID NO: 516438 - RNA, 22 nt, Human
aagauuuccauuucuagcucau

SEQ ID NO: 516439 - RNA, 22 nt, Human
cuggagccugcaguuuucacuu

SEQ ID NO: 516440 - RNA, 22 nt, Human
uccuuggcagcagggagcauga

SEQ ID NO: 516441 - RNA, 22 nt, Human
gacuuuggcaucuagacauugu

SEQ ID NO: 516442 - RNA, 22 nt, Human
aagcagccucauuugugguaag

SEQ ID NO: 516443 - RNA, 22 nt, Human
caugagauaauuuuucuccagu

SEQ ID NO: 516444 - RNA, 22 nt, Human
ugcuucugcugauauuuuguga

SEQ ID NO: 516445 - RNA, 22 nt, Human
acuuugcaauacuuaauacaaa

SEQ ID NO: 516446 - RNA, 22 nt, Human
uaguguuccagaagcaaacaag

SEQ ID NO: 516447 - RNA, 22 nt, Human
gcagccagccccucugaccucu

SEQ ID NO: 516448 - RNA, 22 nt, Human
gagcagagucuauuuccacacu

SEQ ID NO: 516449 - RNA, 22 nt, Human
gagcagcucugugccuggagac

SEQ ID NO: 516450 - RNA, 22 nt, Human
cccugccucugaagcugcucag

SEQ ID NO: 516451 - RNA, 22 nt, Human
ccucuggggcaucagacaaagg

SEQ ID NO: 516452 - RNA, 22 nt, Human
uuccuggugguggugacagcac

SEQ ID NO: 516453 - RNA, 22 nt, Human
agaaaucagaacccugaaguuc

SEQ ID NO: 516454 - RNA, 22 nt, Human
agggaauguagcaagaugccaa

SEQ ID NO: 516455 - RNA, 22 nt, Human
aaauguuccuuuggauuaaacu

SEQ ID NO: 516456 - RNA, 22 nt, Human
acagugaaugcccaagaaaagu

SEQ ID NO: 516457 - RNA, 22 nt, Human
agccacagggggugagggacaa

SEQ ID NO: 516458 - RNA, 17 nt, Human
gguucaguucugcauuc

SEQ ID NO: 516459 - RNA, 22 nt, Human
agcuccagggaaagaguggauc

SEQ ID NO: 516460 - RNA, 22 nt, Human
ucaaucaaugguuuccaaauuu

SEQ ID NO: 516461 - RNA, 22 nt, Human
auccaaaggugacacagaauac

SEQ ID NO: 516462 - RNA, 22 nt, Human
ucagggcugccgggcagaccgu

SEQ ID NO: 516463 - RNA, 17 nt, Human
uuuucucucuuggauuc

SEQ ID NO: 516464 - RNA, 22 nt, Human
uucuuuccccauggaguucgga

SEQ ID NO: 516465 - RNA, 17 nt, Human
ugcauguccuuuguucc

SEQ ID NO: 516466 - RNA, 22 nt, Human
uggcucaguuucaguccugguu

SEQ ID NO: 516467 - RNA, 22 nt, Human
aguccguggccagacucaagag

SEQ ID NO: 516468 - RNA, 22 nt, Human
agagauugugcuacucacccaa

SEQ ID NO: 516469 - RNA, 20 nt, Human
gccucagucacauggccuac

SEQ ID NO: 516470 - RNA, 18 nt, Human
gugcugugggcaguggcc

SEQ ID NO: 516471 - RNA, 22 nt, Human
ccagagaccagaacauggggau

SEQ ID NO: 516472 - RNA, 22 nt, Human
gggacuucauagcuaggcacuu

SEQ ID NO: 516473 - RNA, 22 nt, Human
cagagguagccgagugcaaucg

SEQ ID NO: 516474 - RNA, 22 nt, Human
agggccacaguggggccugaga

SEQ ID NO: 516475 - RNA, 22 nt, Human
cagcaauaacucaaagccauuu

SEQ ID NO: 516476 - RNA, 22 nt, Human
ucuguuuugcauaauguucuuu

SEQ ID NO: 516477 - RNA, 22 nt, Human
uaauauguguuacugacuuuuu

SEQ ID NO: 516478 - RNA, 20 nt, Human
gggcaguggcgcuaucucag

SEQ ID NO: 516479 - RNA, 22 nt, Human
guggguggaucaccugagguca

SEQ ID NO: 516480 - RNA, 22 nt, Human
uuucauuauacagcuucauaaa

SEQ ID NO: 516481 - RNA, 22 nt, Human
aucacagagauugcuuuuaaaa

SEQ ID NO: 516482 - RNA, 21 nt, Human
guuauuuuaagugagcuuugc

SEQ ID NO: 516483 - RNA, 22 nt, Human
gaagagaaaggcaaggaguuuu

SEQ ID NO: 516484 - RNA, 22 nt, Human
aguuucuagccucacuguuuag

SEQ ID NO: 516485 - RNA, 22 nt, Human
aaguccagugcuuuagauucca

SEQ ID NO: 516486 - RNA, 22 nt, Human
cagugccucuuaagugucaccc

SEQ ID NO: 516487 - RNA, 22 nt, Human
cuguggaguccuggggaaugga

SEQ ID NO: 516488 - RNA, 22 nt, Human
cugggcuggagugcaauggcgc

SEQ ID NO: 516489 - RNA, 22 nt, Human
agcuuuaccugccuuggggcac

SEQ ID NO: 516490 - RNA, 22 nt, Human
ucccaaagcuacucuucugacu

SEQ ID NO: 516491 - RNA, 22 nt, Human
caaagcagugauccuuaaagga

SEQ ID NO: 516492 - RNA, 22 nt, Human
ugcuucugaguugcaggacuug

SEQ ID NO: 516493 - RNA, 22 nt, Human
agcauuuaauuacaguuuaauu

SEQ ID NO: 516494 - RNA, 22 nt, Human
aauguauaaaguguuaauaacu

SEQ ID NO: 516495 - RNA, 22 nt, Human
cuuuggcucaugguuuuaucca

SEQ ID NO: 516496 - RNA, 22 nt, Human
gugucaugcacacucaguguug

SEQ ID NO: 516497 - RNA, 22 nt, Human
cugaauaauacagacuagcuuc

SEQ ID NO: 516498 - RNA, 19 nt, Human
agcagccauagacaauaug

SEQ ID NO: 516499 - RNA, 21 nt, Human
cuuguuuugaaaggacuggcc

SEQ ID NO: 516500 - RNA, 22 nt, Human
uagaaagcuugggguguuuaaa

SEQ ID NO: 516501 - RNA, 21 nt, Human
uccaggcuggaaggggcguug

SEQ ID NO: 516502 - RNA, 21 nt, Human
guuuagaaguagucuggcuca

SEQ ID NO: 516503 - RNA, 22 nt, Human
ggaggccaaggcgggcggauca

SEQ ID NO: 516504 - RNA, 20 nt, Human
ucacagaaugccugaagaag

SEQ ID NO: 516505 - RNA, 22 nt, Human
cagcuccccucuguggggcagu

SEQ ID NO: 516506 - RNA, 20 nt, Human
ucaagacagacauggaguuu

SEQ ID NO: 516507 - RNA, 22 nt, Human
uggagccuguguuucugcccag

SEQ ID NO: 516508 - RNA, 20 nt, Human
acaaaauagguacuggguag

SEQ ID NO: 516509 - RNA, 22 nt, Human
ucaggagcugcacugggcccac

SEQ ID NO: 516510 - RNA, 22 nt, Human
uuucaguguuaugacuuucauu

SEQ ID NO: 516511 - RNA, 22 nt, Human
cugccugugccaccgccucauu

SEQ ID NO: 516512 - RNA, 21 nt, Human
ugggccucaggcagcugugac

SEQ ID NO: 516513 - RNA, 22 nt, Human
ucccucugcuagugcuugagcu

SEQ ID NO: 516514 - RNA, 22 nt, Human
ggcucugguugaccaugauggc

SEQ ID NO: 516515 - RNA, 22 nt, Human
uacauauagacaguuacucuag

SEQ ID NO: 516516 - RNA, 22 nt, Human
aggcacugaccugcuuccuuga

SEQ ID NO: 516517 - RNA, 22 nt, Human
cuguggcucauaucuguaaucu

SEQ ID NO: 516518 - RNA, 20 nt, Human
cagccuccacucacucagcu

SEQ ID NO: 516519 - RNA, 22 nt, Human
acacauuuacauguuuacguau

SEQ ID NO: 516520 - RNA, 22 nt, Human
acauuuacagugcuagacaauc

SEQ ID NO: 516521 - RNA, 22 nt, Human
ccccuuccgucucuugaguguc

SEQ ID NO: 516522 - RNA, 22 nt, Human
gaggcacagagcccuaggagcu

SEQ ID NO: 516523 - RNA, 22 nt, Human
cugggcagugguggcccuuccc

SEQ ID NO: 516524 - RNA, 22 nt, Human
gccugggaaagaguagggaaau

SEQ ID NO: 516525 - RNA, 22 nt, Human
uaauaauagcaguagcugccac

SEQ ID NO: 516526 - RNA, 22 nt, Human
ucauuucuuaacuagagugaac

SEQ ID NO: 516527 - RNA, 22 nt, Human
cuccugggaauuuaguugugag

SEQ ID NO: 516528 - RNA, 22 nt, Human
gugauugcccagcaccauuguu

SEQ ID NO: 516529 - RNA, 22 nt, Human
ugcaaacuauugguagagaugg

SEQ ID NO: 516530 - RNA, 21 nt, Human
aaauacagaugcaaaucuguu

SEQ ID NO: 516531 - RNA, 22 nt, Human
ucugucugacuaccaugaggca

SEQ ID NO: 516532 - RNA, 22 nt, Human
cugaaggagguagagugacaua

SEQ ID NO: 516533 - RNA, 22 nt, Human
gcuucauuacugacagucugug

SEQ ID NO: 516534 - RNA, 22 nt, Human
gucccuuggcucacaaacagcu

SEQ ID NO: 516535 - RNA, 22 nt, Human
auucucagggaguauuuucuau

SEQ ID NO: 516536 - RNA, 20 nt, Human
ugggucugcuuggcuucagu

SEQ ID NO: 516537 - RNA, 23 nt, Human
ccagcuccgugagccucgggcuc

SEQ ID NO: 516538 - RNA, 22 nt, Human
uggcagcaaguucuugggaggu

SEQ ID NO: 516539 - RNA, 22 nt, Human
uuuguagaggguaauugacaga

SEQ ID NO: 516540 - RNA, 22 nt, Human
caguggguccuaaguacaguuc

SEQ ID NO: 516541 - RNA, 22 nt, Human
cccagggacagaugggcagcua

SEQ ID NO: 516542 - RNA, 22 nt, Human
aacauuucuucugaaacugagu

SEQ ID NO: 516543 - RNA, 22 nt, Human
uggguccuugcugauugcugag

SEQ ID NO: 516544 - RNA, 22 nt, Human
uaggguccauauggaugaaugg

SEQ ID NO: 516545 - RNA, 22 nt, Human
ggccaggccaagaggguuggaa

SEQ ID NO: 516546 - RNA, 22 nt, Human
gccccagcucugccacaacuag

SEQ ID NO: 516547 - RNA, 22 nt, Human
uccugagcccuggggucagugu

SEQ ID NO: 516548 - RNA, 22 nt, Human
aaggcaguuaauuuggcuagaa

SEQ ID NO: 516549 - RNA, 22 nt, Human
gguucccggaucuccgaguccc

SEQ ID NO: 516550 - RNA, 22 nt, Human
cucuugaagcaggggccaguuc

SEQ ID NO: 516551 - RNA, 23 nt, Human
cccagcagauuguaaagugucca

SEQ ID NO: 516552 - RNA, 22 nt, Human
agcagagaagacacaggcuuca

SEQ ID NO: 516553 - RNA, 22 nt, Human
ugaagcagagaauuugacaguc

SEQ ID NO: 516554 - RNA, 22 nt, Human
uucaagauggccccagugagcc

SEQ ID NO: 516555 - RNA, 22 nt, Human
uagaggcacccuggaggagacu

SEQ ID NO: 516556 - RNA, 22 nt, Human
cugggagcccugacuagccugg

SEQ ID NO: 516557 - RNA, 21 nt, Human
uuccucugcaacugaugcuca

SEQ ID NO: 516558 - RNA, 22 nt, Human
ccaggcuuucccagccucucca

SEQ ID NO: 516559 - RNA, 22 nt, Human
gccugggaagacuaagugggag

SEQ ID NO: 516560 - RNA, 22 nt, Human
gcccuguggacagugagaagug

SEQ ID NO: 516561 - RNA, 22 nt, Human
ugucagaggcucagggucucag

SEQ ID NO: 516562 - RNA, 17 nt, Human
ggccuguguggcugcag

SEQ ID NO: 516563 - RNA, 22 nt, Human
ugcagggaggccccgcagcccu

SEQ ID NO: 516564 - RNA, 22 nt, Human
augugugcaucaaugauagauc

SEQ ID NO: 516565 - RNA, 22 nt, Human
uucaagucaaggaaagaggucu

SEQ ID NO: 516566 - RNA, 22 nt, Human
cuccaggauguuagacguccag

SEQ ID NO: 516567 - RNA, 22 nt, Human
ugauucaagccaccacauacug

SEQ ID NO: 516568 - RNA, 22 nt, Human
gugguccugcacccgcuuggcc

SEQ ID NO: 516569 - RNA, 21 nt, Human
uuaagagcuuagcaguaggcc

SEQ ID NO: 516570 - RNA, 23 nt, Human
acaaugucuguucauaaaauacc

SEQ ID NO: 516571 - RNA, 23 nt, Human
ucugcucugaaguucggcugagc

SEQ ID NO: 516572 - RNA, 22 nt, Human
ccaggcaggcagcguucucagg

SEQ ID NO: 516573 - RNA, 20 nt, Human
cucuuuugacucuuugcaag

SEQ ID NO: 516574 - RNA, 22 nt, Human
gccagagcaugcacugccugca

SEQ ID NO: 516575 - RNA, 22 nt, Human
acagaggucaccuuuguaucuu

SEQ ID NO: 516576 - RNA, 20 nt, Human
aauaaaagaagccuucaccc

SEQ ID NO: 516577 - RNA, 23 nt, Human
uucaaaacuggaaaaucagaugc

SEQ ID NO: 516578 - RNA, 22 nt, Human
uucuaccuacccucugcauaca

SEQ ID NO: 516579 - RNA, 22 nt, Human
gcaggucuugaaggugugauuu

SEQ ID NO: 516580 - RNA, 22 nt, Human
aaaauucugucauuaaauugug

SEQ ID NO: 516581 - RNA, 22 nt, Human
gccuggagugguccugcugccc

SEQ ID NO: 516582 - RNA, 22 nt, Human
uugcagcugcaguaaauguuca

SEQ ID NO: 516583 - RNA, 22 nt, Human
uaagauagaacucugaggcuac

SEQ ID NO: 516584 - RNA, 21 nt, Human
gcugagagguugggaaguuca

SEQ ID NO: 516585 - RNA, 22 nt, Human
uaauaucuacuucauagaguuu

SEQ ID NO: 516586 - RNA, 22 nt, Human
ccagggaagauuagaagccacu

SEQ ID NO: 516587 - RNA, 22 nt, Human
caggagcuggaucuccuugcgg

SEQ ID NO: 516588 - RNA, 21 nt, Human
uggcaggcagcuggaagcuug

SEQ ID NO: 516589 - RNA, 22 nt, Human
cuuauuugagagaaaagaaacu

SEQ ID NO: 516590 - RNA, 19 nt, Human
ugcuucuggaaugcaaggc

SEQ ID NO: 516591 - RNA, 22 nt, Human
ugcugccuuugggaccuggccu

SEQ ID NO: 516592 - RNA, 22 nt, Human
ggguccagacuaugaagaacuu

SEQ ID NO: 516593 - RNA, 22 nt, Human
ucagagaguuggaaagaauuaa

SEQ ID NO: 516594 - RNA, 22 nt, Human
aaaaaugcugugguagcugugu

SEQ ID NO: 516595 - RNA, 20 nt, Human
agugacagagacuguguggc

SEQ ID NO: 516596 - RNA, 22 nt, Human
uagagcagauagugaaacagaa

SEQ ID NO: 516597 - RNA, 22 nt, Human
agccggccauguggucuugugc

SEQ ID NO: 516598 - RNA, 22 nt, Human
caaauucucacccuguuugauu

SEQ ID NO: 516599 - RNA, 22 nt, Human
uugcagggcaggaccauggaca

SEQ ID NO: 516600 - RNA, 22 nt, Human
ugaaaucugucccacuuuagcu

SEQ ID NO: 516601 - RNA, 22 nt, Human
agagcauccaucggccaggacc

SEQ ID NO: 516602 - RNA, 22 nt, Human
ugcugcucuucaccauggccuc

SEQ ID NO: 516603 - RNA, 22 nt, Human
auccugggaaguggccuccucc

SEQ ID NO: 516604 - RNA, 22 nt, Human
caucuggcuagcuaucauugug

SEQ ID NO: 516605 - RNA, 22 nt, Human
ggcagguguggaguguuauuuu

SEQ ID NO: 516606 - RNA, 17 nt, Human
ccauacugacauauuga

SEQ ID NO: 516607 - RNA, 22 nt, Human
ggcugccugggagcccuccucu

SEQ ID NO: 516608 - RNA, 22 nt, Human
ggaggccaaggaggagcuugcc

SEQ ID NO: 516609 - RNA, 22 nt, Human
cagugcugugcuggaagcuguu

SEQ ID NO: 516610 - RNA, 18 nt, Human
cccagcuggugggucagu

SEQ ID NO: 516611 - RNA, 22 nt, Human
aaagaacaucggagugggcggg

SEQ ID NO: 516612 - RNA, 19 nt, Human
agucccaggcccgaaagag

SEQ ID NO: 516613 - RNA, 22 nt, Human
aguucaaagucaaggaaacugu

SEQ ID NO: 516614 - RNA, 22 nt, Human
caggcucacuguaaggucagcu

SEQ ID NO: 516615 - RNA, 22 nt, Human
caguuuuuagauuaguuggugg

SEQ ID NO: 516616 - RNA, 22 nt, Human
gggagacuagugcuauguuuuc

SEQ ID NO: 516617 - RNA, 22 nt, Human
ccuggcucugcgugcagcuccg

SEQ ID NO: 516618 - RNA, 22 nt, Human
cguguggucccggcaaggcaag

SEQ ID NO: 516619 - RNA, 22 nt, Human
ggcccaggcuggagugcggugg

SEQ ID NO: 516620 - RNA, 22 nt, Human
gcuugcucaacccccgucucuc

SEQ ID NO: 516621 - RNA, 22 nt, Human
gcagcauuaccaagacauggca

SEQ ID NO: 516622 - RNA, 22 nt, Human
caggcccauuuguagccacuuu

SEQ ID NO: 516623 - RNA, 22 nt, Human
uuggagagcaguaaaccacacu

SEQ ID NO: 516624 - RNA, 22 nt, Human
aagcagcagccaucccccaagg

SEQ ID NO: 516625 - RNA, 23 nt, Human
ggggaaagaccaugcuugaggac

SEQ ID NO: 516626 - RNA, 22 nt, Human
agguaggguuaauggagauaua

SEQ ID NO: 516627 - RNA, 22 nt, Human
agaaugcuccagagcugaaaga

SEQ ID NO: 516628 - RNA, 22 nt, Human
aacagacaacuccuguggcuca

SEQ ID NO: 516629 - RNA, 23 nt, Human
cuggccaccaucuuucuggcuuc

SEQ ID NO: 516630 - RNA, 22 nt, Human
ucuccugugcacccucccugug

SEQ ID NO: 516631 - RNA, 22 nt, Human
ucagugugaggggcuggguccu

SEQ ID NO: 516632 - RNA, 22 nt, Human
gucccucucaaauuuauaugcu

SEQ ID NO: 516633 - RNA, 22 nt, Human
uaaaguucagugcaugaaugug

SEQ ID NO: 516634 - RNA, 22 nt, Human
ccagauagaaaagaaggcagga

SEQ ID NO: 516635 - RNA, 22 nt, Human
aaagcaauuacaaaagggauaa

SEQ ID NO: 516636 - RNA, 22 nt, Human
acagauuugacugguaccuggc

SEQ ID NO: 516637 - RNA, 22 nt, Human
gagaagggauaugccacucucg

SEQ ID NO: 516638 - RNA, 22 nt, Human
uguuccugaaugccuggcuggc

SEQ ID NO: 516639 - RNA, 23 nt, Human
agagcuuucuaaaauguaaaucu

SEQ ID NO: 516640 - RNA, 22 nt, Human
aaaugugcuugugaucagcugu

SEQ ID NO: 516641 - RNA, 22 nt, Human
aaggcacugaaaaauugugugu

SEQ ID NO: 516642 - RNA, 22 nt, Human
uccaggcaaaaaccaacuacag

SEQ ID NO: 516643 - RNA, 22 nt, Human
ucaucacuguaucauugauaga

SEQ ID NO: 516644 - RNA, 22 nt, Human
cagugggcugugauggauucac

SEQ ID NO: 516645 - RNA, 22 nt, Human
agcuccugaguagcuuuacuca

SEQ ID NO: 516646 - RNA, 22 nt, Human
cagauaaauagauagauaaacu

SEQ ID NO: 516647 - RNA, 22 nt, Human
aggcccaaaagaaaccacuggg

SEQ ID NO: 516648 - RNA, 22 nt, Human
cugcagugcaagcccagaugga

SEQ ID NO: 516649 - RNA, 22 nt, Human
ucugccugaaauucacauguaa

SEQ ID NO: 516650 - RNA, 22 nt, Human
cagguccaagagauccuccuac

SEQ ID NO: 516651 - RNA, 22 nt, Human
uuguccuggagguuaauagagu

SEQ ID NO: 516652 - RNA, 22 nt, Human
aaaucucaggccucuauuuacu

SEQ ID NO: 516653 - RNA, 22 nt, Human
auguagagcaguguuguccaau

SEQ ID NO: 516654 - RNA, 22 nt, Human
aauagaauguaaucuaauacau

SEQ ID NO: 516655 - RNA, 22 nt, Human
agagcugcaauuucauguggug

SEQ ID NO: 516656 - RNA, 22 nt, Human
cagggauggccuggcgggccac

SEQ ID NO: 516657 - RNA, 22 nt, Human
ggacggggagcuggaaagggga

SEQ ID NO: 516658 - RNA, 23 nt, Human
ccuggcugaccugaagguguagu

SEQ ID NO: 516659 - RNA, 22 nt, Human
ccagggcagccaacccagaugc

SEQ ID NO: 516660 - RNA, 18 nt, Human
augugagagaaucuucuu

SEQ ID NO: 516661 - RNA, 20 nt, Human
ucccuggaggugguggcauc

SEQ ID NO: 516662 - RNA, 22 nt, Human
cucuggucauuuggaagagcau

SEQ ID NO: 516663 - RNA, 22 nt, Human
ggcuucugagugcucugcuguu

SEQ ID NO: 516664 - RNA, 22 nt, Human
aggacuggcagugugagggguc

SEQ ID NO: 516665 - RNA, 22 nt, Human
cauuugucaucacugagcugcc

SEQ ID NO: 516666 - RNA, 22 nt, Human
auguccaggaucuauccccaga

SEQ ID NO: 516667 - RNA, 22 nt, Human
cuggguggaucgcagccccagg

SEQ ID NO: 516668 - RNA, 22 nt, Human
auuagcuuuaaagacuuugauu

SEQ ID NO: 516669 - RNA, 22 nt, Human
gcacccaguuugucucaggguu

SEQ ID NO: 516670 - RNA, 22 nt, Human
aagccaggaagagagccuucac

SEQ ID NO: 516671 - RNA, 22 nt, Human
cagcauccuuugcugguuuccc

SEQ ID NO: 516672 - RNA, 22 nt, Human
uuccagccaugguuucccuaug

SEQ ID NO: 516673 - RNA, 22 nt, Human
cuguuuucaaagagagagaaug

SEQ ID NO: 516674 - RNA, 22 nt, Human
cagcuucaugacaaacaguuuu

SEQ ID NO: 516675 - RNA, 20 nt, Human
ggcugaaaguagaaaguauu

SEQ ID NO: 516676 - RNA, 22 nt, Human
agaagccaacagggcaggagag

SEQ ID NO: 516677 - RNA, 21 nt, Human
cauuucuauugaugagaaaag

SEQ ID NO: 516678 - RNA, 22 nt, Human
uucuggggacauaacaguaagc

SEQ ID NO: 516679 - RNA, 22 nt, Human
uacaaagugagcaaccucuuuu

SEQ ID NO: 516680 - RNA, 23 nt, Human
gcucuuuguucauguggaugccu

SEQ ID NO: 516681 - RNA, 22 nt, Human
augcuggucucauuggguuagg

SEQ ID NO: 516682 - RNA, 22 nt, Human
agaauucucuuccauugaaaca

SEQ ID NO: 516683 - RNA, 22 nt, Human
uggggacccggacuccuggguc

SEQ ID NO: 516684 - RNA, 22 nt, Human
gacaaagucaacaguacucuca

SEQ ID NO: 516685 - RNA, 22 nt, Human
accaucaguacuggaugcugac

SEQ ID NO: 516686 - RNA, 22 nt, Human
uuucuauuguaagucuccuaua

SEQ ID NO: 516687 - RNA, 22 nt, Human
guuucucaagcuugaaugcaca

SEQ ID NO: 516688 - RNA, 22 nt, Human
ugcagggacaggcucuggggau

SEQ ID NO: 516689 - RNA, 22 nt, Human
agggccuggaacuggagaccac

SEQ ID NO: 516690 - RNA, 22 nt, Human
ucagggcaaagggcagaguuug

SEQ ID NO: 516691 - RNA, 22 nt, Human
gaggcugaaguguacaugggug

SEQ ID NO: 516692 - RNA, 22 nt, Human
aauauuucuccuucguuauagc

SEQ ID NO: 516693 - RNA, 22 nt, Human
aucuuugcccagagacucagcc

SEQ ID NO: 516694 - RNA, 22 nt, Human
gaaagcaauuuguguaaucugu

SEQ ID NO: 516695 - RNA, 22 nt, Human
aagucacacuagacaacugagg

SEQ ID NO: 516696 - RNA, 22 nt, Human
ugcugucaguuggcaggaugag

SEQ ID NO: 516697 - RNA, 22 nt, Human
gccagccugugcuuggccaggc

SEQ ID NO: 516698 - RNA, 22 nt, Human
aggccugagccccagguuuguu

SEQ ID NO: 516699 - RNA, 22 nt, Human
ggaagggaguaguuggaaugca

SEQ ID NO: 516700 - RNA, 22 nt, Human
uuacaauggguauacuuccauu

SEQ ID NO: 516701 - RNA, 20 nt, Human
gaaaugugaccucuucugug

SEQ ID NO: 516702 - RNA, 22 nt, Human
gccagagccggcuucacaggau

SEQ ID NO: 516703 - RNA, 22 nt, Human
uccucaggcggugaggaggggc

SEQ ID NO: 516704 - RNA, 22 nt, Human
uccaggaggccucauuuccugu

SEQ ID NO: 516705 - RNA, 22 nt, Human
gaaugauagagcugccuucgga

SEQ ID NO: 516706 - RNA, 22 nt, Human
aaaacucugcaguuaguuucua

SEQ ID NO: 516707 - RNA, 22 nt, Human
aggucuggcucuucuccacaga

SEQ ID NO: 516708 - RNA, 22 nt, Human
aagaugcagcuuccacuuuugc

SEQ ID NO: 516709 - RNA, 22 nt, Human
aagaacugugcuccaggcucca

SEQ ID NO: 516710 - RNA, 22 nt, Human
ccucagggaggccucuguggcu

SEQ ID NO: 516711 - RNA, 21 nt, Human
acugggcuagccugacuucug

SEQ ID NO: 516712 - RNA, 22 nt, Human
uccaauuuguuugaugauggaa

SEQ ID NO: 516713 - RNA, 22 nt, Human
gacugucauucuagugcccaug

SEQ ID NO: 516714 - RNA, 22 nt, Human
aguggcagagccaaguagagcc

SEQ ID NO: 516715 - RNA, 22 nt, Human
agggcaaguugagugugcgugg

SEQ ID NO: 516716 - RNA, 22 nt, Human
aaagcaaugaugguagacacgu

SEQ ID NO: 516717 - RNA, 22 nt, Human
ucaguaacuuacuuauucaccu

SEQ ID NO: 516718 - RNA, 23 nt, Human
gggagccaggaccucgcgcccca

SEQ ID NO: 516719 - RNA, 22 nt, Human
cccagcaugcacgcugacacuc

SEQ ID NO: 516720 - RNA, 22 nt, Human
ggaaaaggccacagggacacau

SEQ ID NO: 516721 - RNA, 22 nt, Human
ugcagagagaccccugggccag

SEQ ID NO: 516722 - RNA, 22 nt, Human
ucaaaucagcaagcagcuuccc

SEQ ID NO: 516723 - RNA, 22 nt, Human
acagcagggggagcuguuggac

SEQ ID NO: 516724 - RNA, 22 nt, Human
acagaugaauuuauggauggaa

SEQ ID NO: 516725 - RNA, 22 nt, Human
aaaugcaucagcucauaagaga

SEQ ID NO: 516726 - RNA, 22 nt, Human
ugcagccaucgcagagucugua

SEQ ID NO: 516727 - RNA, 23 nt, Human
uaagaacagacaagcauuuacau

SEQ ID NO: 516728 - RNA, 22 nt, Human
ggaugggcagacaggacggcac

SEQ ID NO: 516729 - RNA, 22 nt, Human
cugaaugucgaucagcuugggu

SEQ ID NO: 516730 - RNA, 23 nt, Human
ucugggcugcuuaaggaucaagg

SEQ ID NO: 516731 - RNA, 20 nt, Human
agcuaggagaaagcauggag

SEQ ID NO: 516732 - RNA, 20 nt, Human
cuccucaguuccaugggagg

SEQ ID NO: 516733 - RNA, 22 nt, Human
uaaaguuauaaauuaccuguca

SEQ ID NO: 516734 - RNA, 22 nt, Human
gagggaggcaucaugaauccag

SEQ ID NO: 516735 - RNA, 22 nt, Human
ccagcucugcagggccuggggu

SEQ ID NO: 516736 - RNA, 19 nt, Human
uuggaaggagccagagugg

SEQ ID NO: 516737 - RNA, 22 nt, Human
cuggcugguuacuauuucuggu

SEQ ID NO: 516738 - RNA, 22 nt, Human
cugugugcugaaaugcagugag

SEQ ID NO: 516739 - RNA, 22 nt, Human
acagagagguaaaauauauagu

SEQ ID NO: 516740 - RNA, 19 nt, Human
cuggggcuuugguacugcc

SEQ ID NO: 516741 - RNA, 22 nt, Human
aagugcaaugaauagcugcaau

SEQ ID NO: 516742 - RNA, 22 nt, Human
gugggccaguuccucacaggua

SEQ ID NO: 516743 - RNA, 22 nt, Human
gggcugcacguauucugcucac

SEQ ID NO: 516744 - RNA, 22 nt, Human
ucugagcuacgaugccugucac

SEQ ID NO: 516745 - RNA, 22 nt, Human
gggcuccaaaaucuaugucuuc

SEQ ID NO: 516746 - RNA, 22 nt, Human
uccagccuugccacuuuucugu

SEQ ID NO: 516747 - RNA, 22 nt, Human
cagugaggugcccagccugccc

SEQ ID NO: 516748 - RNA, 19 nt, Human
aguguuaacccaguguugg

SEQ ID NO: 516749 - RNA, 22 nt, Human
uggccugguccuugucaaggca

SEQ ID NO: 516750 - RNA, 22 nt, Human
ccugagggaggguauaggcugu

SEQ ID NO: 516751 - RNA, 22 nt, Human
uuucuuccaaaggcacguucuc

SEQ ID NO: 516752 - RNA, 22 nt, Human
uuuguuuacucauucauugaug

SEQ ID NO: 516753 - RNA, 22 nt, Human
aagcuccccgaaacccaccucu

SEQ ID NO: 516754 - RNA, 22 nt, Human
gggcugcugcugccagcgacac

SEQ ID NO: 516755 - RNA, 22 nt, Human
gccucccugagucacccaagca

SEQ ID NO: 516756 - RNA, 22 nt, Human
ggcucugcaugugagugggugg

SEQ ID NO: 516757 - RNA, 22 nt, Human
cugugucccaguaccuugggua

SEQ ID NO: 516758 - RNA, 22 nt, Human
agggcugcaucugccuggugaa

SEQ ID NO: 516759 - RNA, 19 nt, Human
ucucagaggaaaaauugcu

SEQ ID NO: 516760 - RNA, 22 nt, Human
uagaaauggagaacagauuaau

SEQ ID NO: 516761 - RNA, 22 nt, Human
cucaggauuaaggaaucuaaau

SEQ ID NO: 516762 - RNA, 22 nt, Human
ucaaguuuaauugagauguuua

SEQ ID NO: 516763 - RNA, 22 nt, Human
gaggggcagugcacccgggccc

SEQ ID NO: 516764 - RNA, 22 nt, Human
auucuacacaacaugaugaugg

SEQ ID NO: 516765 - RNA, 22 nt, Human
ccuguacaagcucuuggugaca

SEQ ID NO: 516766 - RNA, 22 nt, Human
ucuuagcacagcuauauaaguu

SEQ ID NO: 516767 - RNA, 22 nt, Human
uagagacaccaguaccauucug

SEQ ID NO: 516768 - RNA, 22 nt, Human
gggcccuggggccugauuugca

SEQ ID NO: 516769 - RNA, 22 nt, Human
gagaggccauggcugugcagug

SEQ ID NO: 516770 - RNA, 22 nt, Human
aagaaucauccugcaagagucu

SEQ ID NO: 516771 - RNA, 22 nt, Human
ccuggcugaaccaaugaagugg

SEQ ID NO: 516772 - RNA, 22 nt, Human
acagugucaugucguguucccc

SEQ ID NO: 516773 - RNA, 22 nt, Human
cucugggcuuguugaccugcac

SEQ ID NO: 516774 - RNA, 22 nt, Human
gagcuccaccaccuucaggcag

SEQ ID NO: 516775 - RNA, 22 nt, Human
gcuggccugggcagaggcuaug

SEQ ID NO: 516776 - RNA, 22 nt, Human
gacaugcaacaauuuggcauuu

SEQ ID NO: 516777 - RNA, 21 nt, Human
aggagggcacaaggccaggaa

SEQ ID NO: 516778 - RNA, 22 nt, Human
agggcuuucuuuguaaaagaag

SEQ ID NO: 516779 - RNA, 22 nt, Human
uggguccuugcuggcuucaaag

SEQ ID NO: 516780 - RNA, 22 nt, Human
agaaugcaagauaaacuuuauu

SEQ ID NO: 516781 - RNA, 22 nt, Human
gagcagugagugaauguugccu

SEQ ID NO: 516782 - RNA, 21 nt, Human
aaagauguuucaucugagaaa

SEQ ID NO: 516783 - RNA, 22 nt, Human
cagagcucagagcagggcacuc

SEQ ID NO: 516784 - RNA, 22 nt, Human
cacaauuccauggcauucuuug

SEQ ID NO: 516785 - RNA, 22 nt, Human
ugggacaguuguccuccacucu

SEQ ID NO: 516786 - RNA, 22 nt, Human
ucacugcaaccucugccuuccg

SEQ ID NO: 516787 - RNA, 18 nt, Human
gcugaaugucugcuuugc

SEQ ID NO: 516788 - RNA, 22 nt, Human
gagugucugaauuagagcacaa

SEQ ID NO: 516789 - RNA, 22 nt, Human
uggagcugacucacaccagcua

SEQ ID NO: 516790 - RNA, 22 nt, Human
cucaggauuuacuaauuucaag

SEQ ID NO: 516791 - RNA, 22 nt, Human
cagguccagucacuggucugca

SEQ ID NO: 516792 - RNA, 22 nt, Human
aucccucucugcaugacugugu

SEQ ID NO: 516793 - RNA, 22 nt, Human
gcauuuguguggcggaaggauu

SEQ ID NO: 516794 - RNA, 22 nt, Human
ucucugucugagccuggcagac

SEQ ID NO: 516795 - RNA, 22 nt, Human
gggguuaacaguauugcucaug

SEQ ID NO: 516796 - RNA, 22 nt, Human
gacagcuucuagaaauggucac

SEQ ID NO: 516797 - RNA, 22 nt, Human
acagggcaccugagguaggaag

SEQ ID NO: 516798 - RNA, 20 nt, Human
ccccacacuauugagcacuu

SEQ ID NO: 516799 - RNA, 22 nt, Human
acacagggcugcgccugacccc

SEQ ID NO: 516800 - RNA, 22 nt, Human
uaaacagaaagcagauguacuu

SEQ ID NO: 516801 - RNA, 22 nt, Human
gagcuuggcagugucacuaggg

SEQ ID NO: 516802 - RNA, 22 nt, Human
aauguguucaguuaaaugaacu

SEQ ID NO: 516803 - RNA, 22 nt, Human
ugacagaaagaauaugucaauc

SEQ ID NO: 516804 - RNA, 22 nt, Human
guaaaguucuacuagaaucaac

SEQ ID NO: 516805 - RNA, 22 nt, Human
agaggccaucugcucugugggg

SEQ ID NO: 516806 - RNA, 22 nt, Human
uuuaaauguguucuuaguagcu

SEQ ID NO: 516807 - RNA, 22 nt, Human
uauuuuacaugauccagaguug

SEQ ID NO: 516808 - RNA, 22 nt, Human
cuugucugugucggauaaaacu

SEQ ID NO: 516809 - RNA, 22 nt, Human
cugccacuagcuuucacaucuu

SEQ ID NO: 516810 - RNA, 22 nt, Human
ucuggagcaacagagcaggaca

SEQ ID NO: 516811 - RNA, 22 nt, Human
cagugggaagggcagaggcuuu

SEQ ID NO: 516812 - RNA, 22 nt, Human
gggcagugggaccaggcaccag

SEQ ID NO: 516813 - RNA, 22 nt, Human
gaccacagauuccuaaguggca

SEQ ID NO: 516814 - RNA, 22 nt, Human
ggcucccuagggagagugggag

SEQ ID NO: 516815 - RNA, 23 nt, Human
uuugcaaauuggacacaaccaca

SEQ ID NO: 516816 - RNA, 22 nt, Human
ucucagugcuauccauauucca

SEQ ID NO: 516817 - RNA, 22 nt, Human
ucuccucuauuucuguauguau

SEQ ID NO: 516818 - RNA, 22 nt, Human
acagcuuuaucucagggaucag

SEQ ID NO: 516819 - RNA, 22 nt, Human
cuuccuguugucacagucugcg

SEQ ID NO: 516820 - RNA, 22 nt, Human
ucuucuccagugcuucugcaca

SEQ ID NO: 516821 - RNA, 23 nt, Human
aaggguccauagcuaucauuaca

SEQ ID NO: 516822 - RNA, 22 nt, Human
gagcagcuaaaauucucaugca

SEQ ID NO: 516823 - RNA, 22 nt, Human
agcagauggugucaugggaugg

SEQ ID NO: 516824 - RNA, 22 nt, Human
caagauguggugggcugaguuu

SEQ ID NO: 516825 - RNA, 22 nt, Human
ugcuuaaacauacuauuuauau

SEQ ID NO: 516826 - RNA, 22 nt, Human
ugagccuggccugcagagacca

SEQ ID NO: 516827 - RNA, 22 nt, Human
cccaggcuccuagaggcccaga

SEQ ID NO: 516828 - RNA, 22 nt, Human
guggcuugaccaucccugcuac

SEQ ID NO: 516829 - RNA, 22 nt, Human
ugugugaacauguuuucauuuc

SEQ ID NO: 516830 - RNA, 22 nt, Human
agaaugugugauugaagcucuu

SEQ ID NO: 516831 - RNA, 18 nt, Human
uccugccugugccccagg

SEQ ID NO: 516832 - RNA, 22 nt, Human
ucccaaggcacagggcagggac

SEQ ID NO: 516833 - RNA, 22 nt, Human
agaaagaacgcacuugugcugc

SEQ ID NO: 516834 - RNA, 22 nt, Human
uuccacagcccaagcugguggc

SEQ ID NO: 516835 - RNA, 22 nt, Human
aguucuuuugugaacauaugcu

SEQ ID NO: 516836 - RNA, 22 nt, Human
uucagcacccucugaggcaucc

SEQ ID NO: 516837 - RNA, 22 nt, Human
gagggccagaguccugggguca

SEQ ID NO: 516838 - RNA, 21 nt, Human
ugaggcuguuguaccagggag

SEQ ID NO: 516839 - RNA, 22 nt, Human
ugcaggcugcagucucaggugg

SEQ ID NO: 516840 - RNA, 22 nt, Human
uccacugcagcuucugauggaa

SEQ ID NO: 516841 - RNA, 22 nt, Human
gcaguguuuuucaaugcuucca

SEQ ID NO: 516842 - RNA, 22 nt, Human
cacaaugcguacauauaucaaa

SEQ ID NO: 516843 - RNA, 22 nt, Human
augggcugaggaagcuccugag

SEQ ID NO: 516844 - RNA, 22 nt, Human
guggaaggaagagauggcccca

SEQ ID NO: 516845 - RNA, 20 nt, Human
caaggccuggaucuaguugc

SEQ ID NO: 516846 - RNA, 22 nt, Human
cagaguguaucuguguaagcau

SEQ ID NO: 516847 - RNA, 22 nt, Human
aguacaaguagaaugcuacaag

SEQ ID NO: 516848 - RNA, 22 nt, Human
gugugcugagugacugucauca

SEQ ID NO: 516849 - RNA, 22 nt, Human
uuaaaguucauuaaaugagcca

SEQ ID NO: 516850 - RNA, 21 nt, Human
cuuuuacauucagucaugaug

SEQ ID NO: 516851 - RNA, 22 nt, Human
ccucccaccauuuagagagagc

SEQ ID NO: 516852 - RNA, 22 nt, Human
acacagggcagagagcuggcuc

SEQ ID NO: 516853 - RNA, 22 nt, Human
cagcuaccaugguuuguuccag

SEQ ID NO: 516854 - RNA, 22 nt, Human
ccagagccagagaggugccugc

SEQ ID NO: 516855 - RNA, 22 nt, Human
uccucccacauaggacaauggg

SEQ ID NO: 516856 - RNA, 22 nt, Human
cagauagcguuugagagcauaa

SEQ ID NO: 516857 - RNA, 22 nt, Human
aguuuuucuccccuggcuucau

SEQ ID NO: 516858 - RNA, 22 nt, Human
cugaggugcuauggaggauacg

SEQ ID NO: 516859 - RNA, 22 nt, Human
uuaauaaacaggugcagcugaa

SEQ ID NO: 516860 - RNA, 22 nt, Human
cugggcuccacuacuugcuaac

SEQ ID NO: 516861 - RNA, 22 nt, Human
gggcuuuaggggccagugacca

SEQ ID NO: 516862 - RNA, 22 nt, Human
uuugaaaauuagacacaggcua

SEQ ID NO: 516863 - RNA, 22 nt, Human
gaggcaugucuggccuguccca

SEQ ID NO: 516864 - RNA, 22 nt, Human
uccagcaguccaugugagacac

SEQ ID NO: 516865 - RNA, 22 nt, Human
cuguaugauauccaaauugaua

SEQ ID NO: 516866 - RNA, 22 nt, Human
gcagagcugucuaagucacuuc

SEQ ID NO: 516867 - RNA, 22 nt, Human
cagcaucuuucucuucuggagu

SEQ ID NO: 516868 - RNA, 22 nt, Human
caaggccaaagggccacuguca

SEQ ID NO: 516869 - RNA, 22 nt, Human
gcuggagcuugagaggacaggg

SEQ ID NO: 516870 - RNA, 22 nt, Human
auuucaguguuuuaagaguuca

SEQ ID NO: 516871 - RNA, 22 nt, Human
gugcuaggauuacaggcauggg

SEQ ID NO: 516872 - RNA, 22 nt, Human
uugcaaaugugaauaauuacac

SEQ ID NO: 516873 - RNA, 22 nt, Human
agauguaaacucucaugucauu

SEQ ID NO: 516874 - RNA, 22 nt, Human
gcagggcaaugaucccgagagg

SEQ ID NO: 516875 - RNA, 22 nt, Human
ugcuuuggccacuagaauucag

SEQ ID NO: 516876 - RNA, 22 nt, Human
gagaugaauguaaacaaaggca

SEQ ID NO: 516877 - RNA, 22 nt, Human
cauggccagauucuuucuucuc

SEQ ID NO: 516878 - RNA, 20 nt, Human
agguccuguuccuugucucc

SEQ ID NO: 516879 - RNA, 19 nt, Human
auuugcuugucugcucugc

SEQ ID NO: 516880 - RNA, 22 nt, Human
gagagguacggaaagagcgugg

SEQ ID NO: 516881 - RNA, 22 nt, Human
agagauuuacacaugccuuuuc

SEQ ID NO: 516882 - RNA, 22 nt, Human
guuaauuuaguagaguccagau

SEQ ID NO: 516883 - RNA, 22 nt, Human
agggagaaugaccaagguauau

SEQ ID NO: 516884 - RNA, 19 nt, Human
ccccuuagggguuaagccu

SEQ ID NO: 516885 - RNA, 22 nt, Human
uccuucagugucccgcucaggu

SEQ ID NO: 516886 - RNA, 22 nt, Human
cugcccuggcagccuaccaugg

SEQ ID NO: 516887 - RNA, 22 nt, Human
acugggcucaagugauuguccu

SEQ ID NO: 516888 - RNA, 22 nt, Human
ggcagagguagcuggaaccagg

SEQ ID NO: 516889 - RNA, 22 nt, Human
ucugugugcccaccugacaccu

SEQ ID NO: 516890 - RNA, 22 nt, Human
aagcugccuuccaugugaggaa

SEQ ID NO: 516891 - RNA, 22 nt, Human
cagcuuuauuucacguguuugu

SEQ ID NO: 516892 - RNA, 22 nt, Human
aggcacugugcagucccaagca

SEQ ID NO: 516893 - RNA, 22 nt, Human
ccucuucugagugagacucccu

SEQ ID NO: 516894 - RNA, 22 nt, Human
gggcugccuuucuucugggagc

SEQ ID NO: 516895 - RNA, 22 nt, Human
gcagccaggggcugugaccugu

SEQ ID NO: 516896 - RNA, 22 nt, Human
cuggagccacuuuuuauccuuu

SEQ ID NO: 516897 - RNA, 22 nt, Human
cagcuggcuccaccucugggcu

SEQ ID NO: 516898 - RNA, 22 nt, Human
agggaccuugauggguuuggga

SEQ ID NO: 516899 - RNA, 21 nt, Human
ucugggggugagccuagaaau

SEQ ID NO: 516900 - RNA, 22 nt, Human
ugaguaucaauuacauaguugu

SEQ ID NO: 516901 - RNA, 22 nt, Human
gcagggcaucccugagcgggug

SEQ ID NO: 516902 - RNA, 22 nt, Human
ccucucauagucuguauccuuu

SEQ ID NO: 516903 - RNA, 22 nt, Human
accagcucagaagccagaaaga

SEQ ID NO: 516904 - RNA, 23 nt, Human
cagugggcuucuaacugcuccug

SEQ ID NO: 516905 - RNA, 22 nt, Human
aucuaggauuugaaugcacagu

SEQ ID NO: 516906 - RNA, 22 nt, Human
uuuccaggugcauagaaaacag

SEQ ID NO: 516907 - RNA, 22 nt, Human
aaacuugauuuagaacuaaggc

SEQ ID NO: 516908 - RNA, 22 nt, Human
cagcuggcguggagugauugca

SEQ ID NO: 516909 - RNA, 22 nt, Human
cugaggcaugggaaguugggug

SEQ ID NO: 516910 - RNA, 22 nt, Human
aacuucauuccuuuuuaugacu

SEQ ID NO: 516911 - RNA, 22 nt, Human
cagaguguggcaucuuccaacu

SEQ ID NO: 516912 - RNA, 22 nt, Human
augagaaagaguuguaucuaga

SEQ ID NO: 516913 - RNA, 22 nt, Human
gcuggggacuccccaccauagc

SEQ ID NO: 516914 - RNA, 22 nt, Human
ggggcacacuuuugguagauau

SEQ ID NO: 516915 - RNA, 23 nt, Human
aguuuuucugcaugguucuguau

SEQ ID NO: 516916 - RNA, 22 nt, Human
aggaagccugcaggugacugcu

SEQ ID NO: 516917 - RNA, 22 nt, Human
agucacagaaugauggcuccag

SEQ ID NO: 516918 - RNA, 22 nt, Human
aggucacacaacugucagaggc

SEQ ID NO: 516919 - RNA, 22 nt, Human
aagagguaaugacugcuugagu

SEQ ID NO: 516920 - RNA, 22 nt, Human
gcccaagcuggacugcaguggc

SEQ ID NO: 516921 - RNA, 22 nt, Human
aauaauguacauacauauuucg

SEQ ID NO: 516922 - RNA, 22 nt, Human
uucaguuccauuucaggugggu

SEQ ID NO: 516923 - RNA, 22 nt, Human
uuucacagugcucuguaaguau

SEQ ID NO: 516924 - RNA, 22 nt, Human
aggaugagauugcuguguugua

SEQ ID NO: 516925 - RNA, 22 nt, Human
cugcaggaauucaaagugagcu

SEQ ID NO: 516926 - RNA, 22 nt, Human
uucagaggguuuuagggucaga

SEQ ID NO: 516927 - RNA, 22 nt, Human
agucucagaaaauaugcuuuuu

SEQ ID NO: 516928 - RNA, 22 nt, Human
agugaggggauucaggcaaggu

SEQ ID NO: 516929 - RNA, 22 nt, Human
uccuuucaccaaaaaguguugu

SEQ ID NO: 516930 - RNA, 22 nt, Human
cauguacaugccuacuaucaau

SEQ ID NO: 516931 - RNA, 22 nt, Human
aaaguguugggaagaaagugca

SEQ ID NO: 516932 - RNA, 20 nt, Human
uugcagcagugaggugaagg

SEQ ID NO: 516933 - RNA, 22 nt, Human
gggcaaguguuuugucugccug

SEQ ID NO: 516934 - RNA, 22 nt, Human
uguggucucguuauguugccca

SEQ ID NO: 516935 - RNA, 22 nt, Human
gagagaaaaaugagcuucauug

SEQ ID NO: 516936 - RNA, 22 nt, Human
aaucagaaagaggucauguugc

SEQ ID NO: 516937 - RNA, 22 nt, Human
guccaucuguaggagggacaca

SEQ ID NO: 516938 - RNA, 22 nt, Human
acauuucuuucuauucaguagc

SEQ ID NO: 516939 - RNA, 22 nt, Human
uuccuggguucccucucauucu

SEQ ID NO: 516940 - RNA, 22 nt, Human
caucucaguguacagggagucu

SEQ ID NO: 516941 - RNA, 22 nt, Human
cuggagagaccgaaagaggcug

SEQ ID NO: 516942 - RNA, 21 nt, Human
cucuugugucagagccagagg

SEQ ID NO: 516943 - RNA, 22 nt, Human
gaacauuuaugaugcaauaccu

SEQ ID NO: 516944 - RNA, 22 nt, Human
ucuggcugcguggccuuuagca

SEQ ID NO: 516945 - RNA, 22 nt, Human
aaaugcuugcucuugauuauuu

SEQ ID NO: 516946 - RNA, 22 nt, Human
aggcacaggccucagcacccag

SEQ ID NO: 516947 - RNA, 22 nt, Human
uuggaaggauuuagagaugucu

SEQ ID NO: 516948 - RNA, 22 nt, Human
uuugauaguugauuaaauucca

SEQ ID NO: 516949 - RNA, 22 nt, Human
cauuguuauagcauuacacacc

SEQ ID NO: 516950 - RNA, 22 nt, Human
caggauagaaaggccauggagu

SEQ ID NO: 516951 - RNA, 22 nt, Human
uccuggcuuuucuuggcucauc

SEQ ID NO: 516952 - RNA, 22 nt, Human
cagggugccaaagaacaaauau

SEQ ID NO: 516953 - RNA, 22 nt, Human
gagggaguaacguacuacagug

SEQ ID NO: 516954 - RNA, 22 nt, Human
gcauguuuugcaacaagugacc

SEQ ID NO: 516955 - RNA, 22 nt, Human
ugcaggagcugugcggugaggg

SEQ ID NO: 516956 - RNA, 22 nt, Human
ucccuggagguguuugcucagg

SEQ ID NO: 516957 - RNA, 22 nt, Human
agagccuggucugagauaggac

SEQ ID NO: 516958 - RNA, 22 nt, Human
aaauaugagauguucucuuucg

SEQ ID NO: 516959 - RNA, 22 nt, Human
uuagccauugucagcacauggc

SEQ ID NO: 516960 - RNA, 22 nt, Human
gguggcagcgucuaucugacau

SEQ ID NO: 516961 - RNA, 22 nt, Human
cuucucuuggguguggugucuu

SEQ ID NO: 516962 - RNA, 22 nt, Human
uaggcugaaaggagaggugaag

SEQ ID NO: 516963 - RNA, 22 nt, Human
cuguggcuggaauaauaaaugu

SEQ ID NO: 516964 - RNA, 22 nt, Human
agguccugaugaucucugagag

SEQ ID NO: 516965 - RNA, 22 nt, Human
auucacaugcccaagcagcacc

SEQ ID NO: 516966 - RNA, 22 nt, Human
cuggcucagugccuucagaagu

SEQ ID NO: 516967 - RNA, 22 nt, Human
uguggccagcagguggcugugu

SEQ ID NO: 516968 - RNA, 22 nt, Human
uucauguaauuccauaagguaa

SEQ ID NO: 516969 - RNA, 22 nt, Human
gagagaagggggauaugagccu

SEQ ID NO: 516970 - RNA, 22 nt, Human
uucaggauuguguuuuuccuga

SEQ ID NO: 516971 - RNA, 21 nt, Human
ccuauugaauauaggaagauu

SEQ ID NO: 516972 - RNA, 18 nt, Human
uuugcaaaggaaguaugg

SEQ ID NO: 516973 - RNA, 22 nt, Human
gcagcuuuuuggaugucaguua

SEQ ID NO: 516974 - RNA, 22 nt, Human
agagugauggguugugcugacc

SEQ ID NO: 516975 - RNA, 22 nt, Human
uauucccauuccacuuaucaag

SEQ ID NO: 516976 - RNA, 22 nt, Human
uaaacaugugagugugcauaua

SEQ ID NO: 516977 - RNA, 22 nt, Human
ggcagggguccugguguugacu

SEQ ID NO: 516978 - RNA, 22 nt, Human
ccucagcucuucccugugcaca

SEQ ID NO: 516979 - RNA, 22 nt, Human
uggcagagaaccugggcuuugu

SEQ ID NO: 516980 - RNA, 22 nt, Human
cugggagaggaaccucgagggu

SEQ ID NO: 516981 - RNA, 22 nt, Human
ccuggccuuaagggcagggagc

SEQ ID NO: 516982 - RNA, 22 nt, Human
gguccagguauguggugugaau

SEQ ID NO: 516983 - RNA, 22 nt, Human
aaguccagugauacuggcagga

SEQ ID NO: 516984 - RNA, 22 nt, Human
cuggccuuuagccccagugucu

SEQ ID NO: 516985 - RNA, 22 nt, Human
cgagaguggacagggcgcagcu

SEQ ID NO: 516986 - RNA, 16 nt, Human
uggaaggggucuccgg

SEQ ID NO: 516987 - RNA, 22 nt, Human
ugguuucuggguuugucuagga

SEQ ID NO: 516988 - RNA, 21 nt, Human
aggaagaaagguuggagguug

SEQ ID NO: 516989 - RNA, 22 nt, Human
cagcagagcuuauguuggguca

SEQ ID NO: 516990 - RNA, 22 nt, Human
ggagaugguggaagcuggugca

SEQ ID NO: 516991 - RNA, 21 nt, Human
cccugcaggccagggcugagc

SEQ ID NO: 516992 - RNA, 22 nt, Human
auuguaauuuuagagaaagugg

SEQ ID NO: 516993 - RNA, 22 nt, Human
ugaagccaucccucagauggcc

SEQ ID NO: 516994 - RNA, 22 nt, Human
ucagaacagaagcuggcuauaa

SEQ ID NO: 516995 - RNA, 23 nt, Human
gccuuggagaagucacucaggga

SEQ ID NO: 516996 - RNA, 22 nt, Human
guagggagcccagagcccagug

SEQ ID NO: 516997 - RNA, 22 nt, Human
uuucacauuggcuucuauuucu

SEQ ID NO: 516998 - RNA, 22 nt, Human
ggcaggugccaguuggcuuggg

SEQ ID NO: 516999 - RNA, 22 nt, Human
uagcuuuagaaauauucucaga

SEQ ID NO: 517000 - RNA, 22 nt, Human
uguggugagaaacugguagauu

SEQ ID NO: 517001 - RNA, 22 nt, Human
ugaaugauuugggugcauucag

SEQ ID NO: 517002 - RNA, 22 nt, Human
gcuccuggugcuguagagauuu

SEQ ID NO: 517003 - RNA, 22 nt, Human
ucccccacucuaaaggagccuu

SEQ ID NO: 517004 - RNA, 22 nt, Human
cugggccagggaggugucugua

SEQ ID NO: 517005 - RNA, 22 nt, Human
uaaaagcucuucuguugaguua

SEQ ID NO: 517006 - RNA, 22 nt, Human
ugggcuucauaauugguccuag

SEQ ID NO: 517007 - RNA, 22 nt, Human
aguggcugcugacuuuaauaca

SEQ ID NO: 517008 - RNA, 22 nt, Human
gcagcuggugcaaaugucacuc

SEQ ID NO: 517009 - RNA, 22 nt, Human
uuacaagauaugugagaacuag

SEQ ID NO: 517010 - RNA, 22 nt, Human
aauagcugggaccugaauuagc

SEQ ID NO: 517011 - RNA, 22 nt, Human
gcugcccucccagggcaagcuu

SEQ ID NO: 517012 - RNA, 22 nt, Human
acuuucuaggucucaguccuuu

SEQ ID NO: 517013 - RNA, 22 nt, Human
uucuucauucccuuacuuccga

SEQ ID NO: 517014 - RNA, 22 nt, Human
aguaugaauacagauuuucucu

SEQ ID NO: 517015 - RNA, 22 nt, Human
uaggggugaggccaggcaucag

SEQ ID NO: 517016 - RNA, 22 nt, Human
cugagccaugagccugcgccca

SEQ ID NO: 517017 - RNA, 22 nt, Human
aggccagaaaugucagggagug

SEQ ID NO: 517018 - RNA, 22 nt, Human
cucagaauuacaucccauuuua

SEQ ID NO: 517019 - RNA, 22 nt, Human
aggcuagggccauggcugguga

SEQ ID NO: 517020 - RNA, 22 nt, Human
cacaccucagccauguggaggc

SEQ ID NO: 517021 - RNA, 22 nt, Human
aaaggccacacugcucuuucuc

SEQ ID NO: 517022 - RNA, 21 nt, Human
ucagugcaauucuauggggaa

SEQ ID NO: 517023 - RNA, 22 nt, Human
gauuucuucucucccaagagga

SEQ ID NO: 517024 - RNA, 22 nt, Human
aggagcugcagauucugccuug

SEQ ID NO: 517025 - RNA, 20 nt, Human
ugcacagacaaugagcccag

SEQ ID NO: 517026 - RNA, 22 nt, Human
ccucacucuuguccuggcaggu

SEQ ID NO: 517027 - RNA, 22 nt, Human
uguguacacaugacaggcaccc

SEQ ID NO: 517028 - RNA, 22 nt, Human
uuguacagggaaguaauacaag

SEQ ID NO: 517029 - RNA, 16 nt, Human
uuguccugucucacug

SEQ ID NO: 517030 - RNA, 19 nt, Human
ucuggcuccgccucuuagu

SEQ ID NO: 517031 - RNA, 22 nt, Human
uccagcucaggguuggcucaag

SEQ ID NO: 517032 - RNA, 22 nt, Human
aaggcagucugguuucaaagca

SEQ ID NO: 517033 - RNA, 22 nt, Human
gucucagauaacauguauucua

SEQ ID NO: 517034 - RNA, 22 nt, Human
agaaaaagucaaggaauuggac

SEQ ID NO: 517035 - RNA, 21 nt, Human
uccucagggccccagagcacu

SEQ ID NO: 517036 - RNA, 22 nt, Human
agggcagaaaccaccuugaugg

SEQ ID NO: 517037 - RNA, 22 nt, Human
cuggagcuaggaaguccaagau

SEQ ID NO: 517038 - RNA, 22 nt, Human
agaggccaguggcugugcuguc

SEQ ID NO: 517039 - RNA, 20 nt, Human
guccugggagccacagcaca

SEQ ID NO: 517040 - RNA, 22 nt, Human
agguuccaagaaaucaucagug

SEQ ID NO: 517041 - RNA, 22 nt, Human
gcagcuggggaggucgugggga

SEQ ID NO: 517042 - RNA, 22 nt, Human
uugaaaacuuucuagaccaaga

SEQ ID NO: 517043 - RNA, 22 nt, Human
guccuggggaauacagaagccg

SEQ ID NO: 517044 - RNA, 22 nt, Human
uccagccuaauguucuucccac

SEQ ID NO: 517045 - RNA, 19 nt, Human
augauggucccauucaccu

SEQ ID NO: 517046 - RNA, 22 nt, Human
ccaggaggcggaagguacagug

SEQ ID NO: 517047 - RNA, 22 nt, Human
agccagugcaacagcagugaag

SEQ ID NO: 517048 - RNA, 22 nt, Human
acagacagggcaccugccuccu

SEQ ID NO: 517049 - RNA, 22 nt, Human
uucuuacauauuuucauauggu

SEQ ID NO: 517050 - RNA, 22 nt, Human
gcaggccuuuaucccugccuca

SEQ ID NO: 517051 - RNA, 22 nt, Human
uagagcauuuagaggggcagga

SEQ ID NO: 517052 - RNA, 22 nt, Human
aagccucaccuuuuagaagcua

SEQ ID NO: 517053 - RNA, 22 nt, Human
ccugcuggccaguggagggcug

SEQ ID NO: 517054 - RNA, 22 nt, Human
gcugagagcggccagcugggaa

SEQ ID NO: 517055 - RNA, 22 nt, Human
gugcucacugugagacguccug

SEQ ID NO: 517056 - RNA, 22 nt, Human
gcaggcugugaggcucagaugg

SEQ ID NO: 517057 - RNA, 22 nt, Human
ugcaggugauucugaugcaguu

SEQ ID NO: 517058 - RNA, 22 nt, Human
ugugcauguauugauuuguacc

SEQ ID NO: 517059 - RNA, 22 nt, Human
cugaaauuccauuucagccaca

SEQ ID NO: 517060 - RNA, 22 nt, Human
gcuuucugguucucaaagcacu

SEQ ID NO: 517061 - RNA, 22 nt, Human
cagagccugccucuggcugugg

SEQ ID NO: 517062 - RNA, 22 nt, Human
guggcuucuucuugggagcugc

SEQ ID NO: 517063 - RNA, 20 nt, Human
gagauggacagaugaagggg

SEQ ID NO: 517064 - RNA, 22 nt, Human
ugcaggucaaucuucagguucc

SEQ ID NO: 517065 - RNA, 22 nt, Human
cugggaagcuucgagcaggaaa

SEQ ID NO: 517066 - RNA, 22 nt, Human
caacugaaaagauucuacgcag

SEQ ID NO: 517067 - RNA, 22 nt, Human
uccagggcagugacuacagcgg

SEQ ID NO: 517068 - RNA, 22 nt, Human
ugcuucugcaacuugaauguac

SEQ ID NO: 517069 - RNA, 22 nt, Human
aagaguuuaccagugcugcuuc

SEQ ID NO: 517070 - RNA, 22 nt, Human
cagagcuggagggaacccuggc

SEQ ID NO: 517071 - RNA, 22 nt, Human
ucaaugcaugugacaaagagua

SEQ ID NO: 517072 - RNA, 22 nt, Human
gcugggcucuuuaccccuguac

SEQ ID NO: 517073 - RNA, 20 nt, Human
gcuuagcaggcauaguagcu

SEQ ID NO: 517074 - RNA, 22 nt, Human
uggcucagaggggaagugguuu

SEQ ID NO: 517075 - RNA, 22 nt, Human
uggggcugaggagccucacucu

SEQ ID NO: 517076 - RNA, 22 nt, Human
cucugggcuuaccugcuuccug

SEQ ID NO: 517077 - RNA, 22 nt, Human
cuacauuuuucaccgagccucu

SEQ ID NO: 517078 - RNA, 22 nt, Human
aggaggugagcggucauguggu

SEQ ID NO: 517079 - RNA, 22 nt, Human
gaggccugggagaacuguuuuu

SEQ ID NO: 517080 - RNA, 22 nt, Human
aauuugugaaucugucucuuga

SEQ ID NO: 517081 - RNA, 19 nt, Human
uacauuuguguacacuugu

SEQ ID NO: 517082 - RNA, 22 nt, Human
gaagaacacuucaugauucauu

SEQ ID NO: 517083 - RNA, 22 nt, Human
uguaaaaggaaaucaaagcacu

SEQ ID NO: 517084 - RNA, 22 nt, Human
ugcagcugcuugauucaucuug

SEQ ID NO: 517085 - RNA, 22 nt, Human
agguucacacacacaaaaagau

SEQ ID NO: 517086 - RNA, 22 nt, Human
gcccagcagaucucagugucuc

SEQ ID NO: 517087 - RNA, 22 nt, Human
caccuguuagcucuaauuuucu

SEQ ID NO: 517088 - RNA, 22 nt, Human
accagagauggggcuucucugu

SEQ ID NO: 517089 - RNA, 22 nt, Human
gucccucugggccaucaggucc

SEQ ID NO: 517090 - RNA, 22 nt, Human
aguggcugaauauauuuuacua

SEQ ID NO: 517091 - RNA, 21 nt, Human
aggcugcuggcucaggguccu

SEQ ID NO: 517092 - RNA, 22 nt, Human
agccacagcccacaggacucuu

SEQ ID NO: 517093 - RNA, 22 nt, Human
agaggccucuagggccccucag

SEQ ID NO: 517094 - RNA, 22 nt, Human
accaggcugugaagugagacua

SEQ ID NO: 517095 - RNA, 22 nt, Human
cugugucccccucagccaggug

SEQ ID NO: 517096 - RNA, 22 nt, Human
cagcucaaguuucccaggucag

SEQ ID NO: 517097 - RNA, 22 nt, Human
auccugggcugcacccucagcc

SEQ ID NO: 517098 - RNA, 22 nt, Human
gucccuggggguuuaggacuca

SEQ ID NO: 517099 - RNA, 22 nt, Human
gacacauagaucuaucucacuc

SEQ ID NO: 517100 - RNA, 22 nt, Human
agggcacccucucugcaguacc

SEQ ID NO: 517101 - RNA, 22 nt, Human
uugaaauuuuaggccuugcaau

SEQ ID NO: 517102 - RNA, 22 nt, Human
uuucacaggaguuguaccauuu

SEQ ID NO: 517103 - RNA, 22 nt, Human
ugauuaauaucaccaccauugg

SEQ ID NO: 517104 - RNA, 22 nt, Human
uuugauaauuaaaaauuguagu

SEQ ID NO: 517105 - RNA, 22 nt, Human
uaaagguuauugcacuggaguu

SEQ ID NO: 517106 - RNA, 22 nt, Human
uccagccccggcuuccuuacag

SEQ ID NO: 517107 - RNA, 22 nt, Human
cccuguguaguuaacuuuccac

SEQ ID NO: 517108 - RNA, 22 nt, Human
gauguagacacuuggaggcuua

SEQ ID NO: 517109 - RNA, 22 nt, Human
ggccaccuuccuguggucucug

SEQ ID NO: 517110 - RNA, 22 nt, Human
ugagaagauugggcagagugga

SEQ ID NO: 517111 - RNA, 22 nt, Human
uacuagucuucugcuauucccu

SEQ ID NO: 517112 - RNA, 19 nt, Human
ugaaggagggggauggcca

SEQ ID NO: 517113 - RNA, 22 nt, Human
uagaaaguaaaucaguuuuauu

SEQ ID NO: 517114 - RNA, 22 nt, Human
cucugcugcaggaaggcgugca

SEQ ID NO: 517115 - RNA, 22 nt, Human
gaaauacaaaugccuagauccu

SEQ ID NO: 517116 - RNA, 22 nt, Human
gccaagagaaugugagagaaau

SEQ ID NO: 517117 - RNA, 22 nt, Human
aguucuggcggcugucggcacu

SEQ ID NO: 517118 - RNA, 19 nt, Human
cuggcucuuggguggagga

SEQ ID NO: 517119 - RNA, 22 nt, Human
ccagcagaagcucccgcugggu

SEQ ID NO: 517120 - RNA, 22 nt, Human
aaugauaugcaaauuaucauca

SEQ ID NO: 517121 - RNA, 22 nt, Human
cuuuuucauuggcuuuaggaca

SEQ ID NO: 517122 - RNA, 22 nt, Human
guuucauaugcaguuaacagca

SEQ ID NO: 517123 - RNA, 22 nt, Human
ucagcuuuuaaaaacaagaagu

SEQ ID NO: 517124 - RNA, 22 nt, Human
ugcagcauuauucacaguagcc

SEQ ID NO: 517125 - RNA, 22 nt, Human
acugggaggcaucuggagcuga

SEQ ID NO: 517126 - RNA, 22 nt, Human
ucagaggaccuuacugagaacc

SEQ ID NO: 517127 - RNA, 22 nt, Human
cccuccccacaaagcuucacac

SEQ ID NO: 517128 - RNA, 22 nt, Human
uucccagacuccacacugaggc

SEQ ID NO: 517129 - RNA, 22 nt, Human
cagggcucccucuggcucccag

SEQ ID NO: 517130 - RNA, 22 nt, Human
ugcuguagcccugcacagugca

SEQ ID NO: 517131 - RNA, 22 nt, Human
agagcagguggcaacucuggga

SEQ ID NO: 517132 - RNA, 22 nt, Human
augcugaaugaaagaaauuagu

SEQ ID NO: 517133 - RNA, 22 nt, Human
gagacacaaacauuuauuccac

SEQ ID NO: 517134 - RNA, 22 nt, Human
agcugacuucuugauccaauga

SEQ ID NO: 517135 - RNA, 21 nt, Human
ccugucuuggacugaggcacc

SEQ ID NO: 517136 - RNA, 22 nt, Human
ugcauuaucuuuaauguucuca

SEQ ID NO: 517137 - RNA, 22 nt, Human
cugggccuagaggaagcugaca

SEQ ID NO: 517138 - RNA, 22 nt, Human
augggaggaugcucgggugcuc

SEQ ID NO: 517139 - RNA, 22 nt, Human
aggaguguggccagggcucugg

SEQ ID NO: 517140 - RNA, 22 nt, Human
agguaucaacagcagagucuga

SEQ ID NO: 517141 - RNA, 22 nt, Human
caggggacauuaaagcuccaua

SEQ ID NO: 517142 - RNA, 22 nt, Human
cauuaauauuguucuucuuuag

SEQ ID NO: 517143 - RNA, 22 nt, Human
agcaaagcuuccauaaagcagc

SEQ ID NO: 517144 - RNA, 22 nt, Human
aauuaaaaaaggagagcuugcu

SEQ ID NO: 517145 - RNA, 22 nt, Human
ugugacaugugucaucuuuucu

SEQ ID NO: 517146 - RNA, 22 nt, Human
uggugaagucagcggagcccgg

SEQ ID NO: 517147 - RNA, 20 nt, Human
cugagcugagcuccaugggu

SEQ ID NO: 517148 - RNA, 22 nt, Human
uggaggaaucagggcuuaggcu

SEQ ID NO: 517149 - RNA, 22 nt, Human
ggcugccauaacagaguaccac

SEQ ID NO: 517150 - RNA, 22 nt, Human
ugaaauauuuagagaguaaguu

SEQ ID NO: 517151 - RNA, 22 nt, Human
cucugucccagacccaccucuc

SEQ ID NO: 517152 - RNA, 22 nt, Human
ucugcugacauuuaugaauaga

SEQ ID NO: 517153 - RNA, 22 nt, Human
cacaggaaucagcauuaauggc

SEQ ID NO: 517154 - RNA, 22 nt, Human
aaggugacucacaaagccaguu

SEQ ID NO: 517155 - RNA, 22 nt, Human
cucagagaaccuaagcggagga

SEQ ID NO: 517156 - RNA, 22 nt, Human
ccaaagucagugcucagucguc

SEQ ID NO: 517157 - RNA, 23 nt, Human
uggcccugugcaugcugcuuccc

SEQ ID NO: 517158 - RNA, 22 nt, Human
caagccagcaguuuaaugacuc

SEQ ID NO: 517159 - RNA, 22 nt, Human
cacauguuuggcaugucaccaa

SEQ ID NO: 517160 - RNA, 22 nt, Human
gaaaguauucacaaaguucuug

SEQ ID NO: 517161 - RNA, 22 nt, Human
ggagugggaacaaugacauggu

SEQ ID NO: 517162 - RNA, 22 nt, Human
uacacaucacuguaucuuucag

SEQ ID NO: 517163 - RNA, 22 nt, Human
agcagggcagguaaggaucaga

SEQ ID NO: 517164 - RNA, 22 nt, Human
ucagcuccucaugcaggggaua

SEQ ID NO: 517165 - RNA, 22 nt, Human
gcugcagccaaauucauuguca

SEQ ID NO: 517166 - RNA, 22 nt, Human
aggcccuggguuagggcccacu

SEQ ID NO: 517167 - RNA, 22 nt, Human
uguacaguauauuucaaagcca

SEQ ID NO: 517168 - RNA, 22 nt, Human
gcugccucccccauggcuggaa

SEQ ID NO: 517169 - RNA, 22 nt, Human
ggagagaaauugagguagcaag

SEQ ID NO: 517170 - RNA, 22 nt, Human
auuuaagacugacuucaccagu

SEQ ID NO: 517171 - RNA, 22 nt, Human
caggaaaugaaagcuagcuaau

SEQ ID NO: 517172 - RNA, 22 nt, Human
ggguccagggccaguggcugag

SEQ ID NO: 517173 - RNA, 21 nt, Human
ucugaugguagaugagaugug

SEQ ID NO: 517174 - RNA, 22 nt, Human
ucagguccaagauggccaucca

SEQ ID NO: 517175 - RNA, 22 nt, Human
guuucauacagauuauucaugg

SEQ ID NO: 517176 - RNA, 22 nt, Human
uagggcucgggcacaggacagg

SEQ ID NO: 517177 - RNA, 23 nt, Human
gggaucuguaaguugaagacaaa

SEQ ID NO: 517178 - RNA, 22 nt, Human
uugauuuauagaauguucaagc

SEQ ID NO: 517179 - RNA, 22 nt, Human
uguccuggggcgacuuggggcc

SEQ ID NO: 517180 - RNA, 22 nt, Human
ugcucugggcaacagccucccu

SEQ ID NO: 517181 - RNA, 22 nt, Human
ggugaagggugucauggcauuu

SEQ ID NO: 517182 - RNA, 22 nt, Human
cugcagaggccucgccuccucu

SEQ ID NO: 517183 - RNA, 22 nt, Human
ucauaaagcauuucagcuuuug

SEQ ID NO: 517184 - RNA, 22 nt, Human
gucugcuguucagagauguugc

SEQ ID NO: 517185 - RNA, 22 nt, Human
uuagcauucucauuugcauaaa

SEQ ID NO: 517186 - RNA, 22 nt, Human
uauuagcuuguuuggcaggaug

SEQ ID NO: 517187 - RNA, 18 nt, Human
ugacagaaccuggagccu

SEQ ID NO: 517188 - RNA, 19 nt, Human
aagagggaaagugcuaugc

SEQ ID NO: 517189 - RNA, 22 nt, Human
aagauuucuuacuuauugaugc

SEQ ID NO: 517190 - RNA, 19 nt, Human
gccucugcuggggacaggc

SEQ ID NO: 517191 - RNA, 22 nt, Human
ugcccuguuccugccuccagcu

SEQ ID NO: 517192 - RNA, 21 nt, Human
cagggcacacagaggauggua

SEQ ID NO: 517193 - RNA, 19 nt, Human
uucucaguucaggagaaga

SEQ ID NO: 517194 - RNA, 23 nt, Human
gccagcuuuggucugucuccuag

SEQ ID NO: 517195 - RNA, 22 nt, Human
gagcugcccugagcuuugcaug

SEQ ID NO: 517196 - RNA, 22 nt, Human
gucacacagggccuccaaauca

SEQ ID NO: 517197 - RNA, 19 nt, Human
gcuuuuuguugucaaaggu

SEQ ID NO: 517198 - RNA, 22 nt, Human
ggugggcaggucacucugccuc

SEQ ID NO: 517199 - RNA, 22 nt, Human
agugcuggauuacaggcgugag

SEQ ID NO: 517200 - RNA, 22 nt, Human
ccuuuauucaauuaguccuaau

SEQ ID NO: 517201 - RNA, 22 nt, Human
ggcugccuacuuucccagaguu

SEQ ID NO: 517202 - RNA, 22 nt, Human
cagccugagccuucuguagcaa

SEQ ID NO: 517203 - RNA, 22 nt, Human
aaagacauuagcuuagauguca

SEQ ID NO: 517204 - RNA, 22 nt, Human
gcucccucccaccagccugcag

SEQ ID NO: 517205 - RNA, 22 nt, Human
aagauauucaaagauuuauuag

SEQ ID NO: 517206 - RNA, 22 nt, Human
gucugggcaagggagauggcgc

SEQ ID NO: 517207 - RNA, 22 nt, Human
aacagugcugauuauuuuaccu

SEQ ID NO: 517208 - RNA, 22 nt, Human
accugcaggggugcucucuggg

SEQ ID NO: 517209 - RNA, 22 nt, Human
agggacccugaugacugaggag

SEQ ID NO: 517210 - RNA, 22 nt, Human
uagaaacauucaguugcagucc

SEQ ID NO: 517211 - RNA, 22 nt, Human
aaguaacuaaagauauccauuu

SEQ ID NO: 517212 - RNA, 22 nt, Human
uauuuauucuuuguacugccuu

SEQ ID NO: 517213 - RNA, 22 nt, Human
cacaguccuacagagaucagag

SEQ ID NO: 517214 - RNA, 22 nt, Human
agccuucaguaaauccacugug

SEQ ID NO: 517215 - RNA, 22 nt, Human
gcugucugggaugucacugcug

SEQ ID NO: 517216 - RNA, 22 nt, Human
aaugaagcaguccaucugcucu

SEQ ID NO: 517217 - RNA, 22 nt, Human
gagcagcuggcuguauugguuu

SEQ ID NO: 517218 - RNA, 22 nt, Human
aagcagcauuguaaccaaugcc

SEQ ID NO: 517219 - RNA, 22 nt, Human
ugggccccagcacgucugggga

SEQ ID NO: 517220 - RNA, 22 nt, Human
cagaaaaccugacucuagaacu

SEQ ID NO: 517221 - RNA, 22 nt, Human
auuuugugaacccucaagcaau

SEQ ID NO: 517222 - RNA, 22 nt, Human
gcaaaaaccacaauuacuuuua

SEQ ID NO: 517223 - RNA, 22 nt, Human
guuuucuaaguagguagcacca

SEQ ID NO: 517224 - RNA, 22 nt, Human
uuuuucaagacaaccugcaugu

SEQ ID NO: 517225 - RNA, 22 nt, Human
cucuucaggaauaugucaguca

SEQ ID NO: 517226 - RNA, 22 nt, Human
ucuuuuagaaaaguugaaugua

SEQ ID NO: 517227 - RNA, 22 nt, Human
aaguccugggcauuugaacagg

SEQ ID NO: 517228 - RNA, 22 nt, Human
cuggcccauggugagcucuggg

SEQ ID NO: 517229 - RNA, 23 nt, Human
gcugggcuuacucuuucagugag

SEQ ID NO: 517230 - RNA, 22 nt, Human
acuaaagucagacugcauugau

SEQ ID NO: 517231 - RNA, 22 nt, Human
uguuacaguacuacaauucugc

SEQ ID NO: 517232 - RNA, 22 nt, Human
gcuucuaucccuccacugcacu

SEQ ID NO: 517233 - RNA, 22 nt, Human
ugcccagcacugugccagucac

SEQ ID NO: 517234 - RNA, 22 nt, Human
gacacagcacuguacaaggaau

SEQ ID NO: 517235 - RNA, 22 nt, Human
gggucuggagggcagcccuucu

SEQ ID NO: 517236 - RNA, 22 nt, Human
gaaaagagaacaucugaggauc

SEQ ID NO: 517237 - RNA, 22 nt, Human
ucauucuccucuggaaaaggca

SEQ ID NO: 517238 - RNA, 22 nt, Human
cccucagucuggcugggaagac

SEQ ID NO: 517239 - RNA, 22 nt, Human
uaugcacacaggcuuaauucau

SEQ ID NO: 517240 - RNA, 22 nt, Human
uggcucugugucucccagcagc

SEQ ID NO: 517241 - RNA, 22 nt, Human
ggcugcuggggacgugggagag

SEQ ID NO: 517242 - RNA, 22 nt, Human
ugucacauguguggcauuuuuc

SEQ ID NO: 517243 - RNA, 22 nt, Human
gggugcugggaggcugacaucu

SEQ ID NO: 517244 - RNA, 22 nt, Human
aagggcaggagaagacggauau

SEQ ID NO: 517245 - RNA, 22 nt, Human
aaguaaauaucuguuuauagca

SEQ ID NO: 517246 - RNA, 22 nt, Human
ggaguaaggcucagaggaaaug

SEQ ID NO: 517247 - RNA, 22 nt, Human
ugaggcaguugagcuuccugag

SEQ ID NO: 517248 - RNA, 22 nt, Human
auugaaucugcacuaguauuuu

SEQ ID NO: 517249 - RNA, 19 nt, Human
cugggaguucacugcugcc

SEQ ID NO: 517250 - RNA, 22 nt, Human
guccagcugcagcugggcagaa

SEQ ID NO: 517251 - RNA, 20 nt, Human
agugcaagaaagcacagcug

SEQ ID NO: 517252 - RNA, 22 nt, Human
ggcuuccuggggccuccugcaa

SEQ ID NO: 517253 - RNA, 22 nt, Human
auguaauuuauguuauccauaa

SEQ ID NO: 517254 - RNA, 22 nt, Human
aggugcagaaaaaaguccuuua

SEQ ID NO: 517255 - RNA, 21 nt, Human
ccagcccagcugugucccagc

SEQ ID NO: 517256 - RNA, 17 nt, Human
cugaggcccagggccca

SEQ ID NO: 517257 - RNA, 22 nt, Human
caggaucccuggccuccgccca

SEQ ID NO: 517258 - RNA, 22 nt, Human
ggcaccuggauguagcagugaa

SEQ ID NO: 517259 - RNA, 22 nt, Human
ugggcuggagcuuguugcuucc

SEQ ID NO: 517260 - RNA, 22 nt, Human
agcagcucugagaggccagcac

SEQ ID NO: 517261 - RNA, 22 nt, Human
ucagucucaucaacucuauucc

SEQ ID NO: 517262 - RNA, 22 nt, Human
ugcuuuauuaagagagaaauuu

SEQ ID NO: 517263 - RNA, 22 nt, Human
agacacugccacuucuguuccc

SEQ ID NO: 517264 - RNA, 17 nt, Human
uuuauaauuggccucuu

SEQ ID NO: 517265 - RNA, 19 nt, Human
gcagugucaugguaggagc

SEQ ID NO: 517266 - RNA, 20 nt, Human
augcccuguccucuucuguu

SEQ ID NO: 517267 - RNA, 22 nt, Human
acaggcugggcgcuuccugcgg

SEQ ID NO: 517268 - RNA, 22 nt, Human
gcuaaugacugaguuuuuagca

SEQ ID NO: 517269 - RNA, 22 nt, Human
ucaguguguacacugagcauuu

SEQ ID NO: 517270 - RNA, 22 nt, Human
caguguuugcuuaaguuauaug

SEQ ID NO: 517271 - RNA, 22 nt, Human
auuugucuagugguauucacgu

SEQ ID NO: 517272 - RNA, 22 nt, Human
uggccucaaccguccuaagcac

SEQ ID NO: 517273 - RNA, 22 nt, Human
agcagaacugaugagacuugag

SEQ ID NO: 517274 - RNA, 22 nt, Human
gccuucaguaguauccucauga

SEQ ID NO: 517275 - RNA, 22 nt, Human
agggaugauggaaagaagcagg

SEQ ID NO: 517276 - RNA, 21 nt, Human
aauaaaacaguuggugucaau

SEQ ID NO: 517277 - RNA, 22 nt, Human
gagccuggauagccuuguucca

SEQ ID NO: 517278 - RNA, 22 nt, Human
caggcaggagccagggauucca

SEQ ID NO: 517279 - RNA, 22 nt, Human
ccucgcggcacucgggccggau

SEQ ID NO: 517280 - RNA, 21 nt, Human
ucugucuuccucagccuaagg

SEQ ID NO: 517281 - RNA, 22 nt, Human
uuuguacauccuaauucugagu

SEQ ID NO: 517282 - RNA, 22 nt, Human
agcacuuugggagauaaagcug

SEQ ID NO: 517283 - RNA, 22 nt, Human
gcucccucugcucaggcacuug

SEQ ID NO: 517284 - RNA, 22 nt, Human
cagaggccagggggcucacaaa

SEQ ID NO: 517285 - RNA, 22 nt, Human
caggagcucucaucgucagggc

SEQ ID NO: 517286 - RNA, 22 nt, Human
gggagguucuguucgcacuuga

SEQ ID NO: 517287 - RNA, 22 nt, Human
cugcacagaggucggucugcca

SEQ ID NO: 517288 - RNA, 22 nt, Human
aaguuuaagguggaaguggugg

SEQ ID NO: 517289 - RNA, 22 nt, Human
ucaguguaaguuauguagaugu

SEQ ID NO: 517290 - RNA, 22 nt, Human
aguguucauuuauucauucacu

SEQ ID NO: 517291 - RNA, 22 nt, Human
aaggccaggacaccaggggacu

SEQ ID NO: 517292 - RNA, 22 nt, Human
aaagcagguugcaauuacagug

SEQ ID NO: 517293 - RNA, 22 nt, Human
auacaugucaucauauguuugu

SEQ ID NO: 517294 - RNA, 18 nt, Human
cccacggugcuguagggc

SEQ ID NO: 517295 - RNA, 22 nt, Human
uccaagcuugcuuuagccacag

SEQ ID NO: 517296 - RNA, 22 nt, Human
cuuuccuagauggccaucuuuc

SEQ ID NO: 517297 - RNA, 23 nt, Human
ugaugcaguaaauuggucucuaa

SEQ ID NO: 517298 - RNA, 22 nt, Human
ccuguucacuuugacuucucca

SEQ ID NO: 517299 - RNA, 22 nt, Human
aauuuguggccacauuguggaa

SEQ ID NO: 517300 - RNA, 20 nt, Human
ucauugcacauaauggaagc

SEQ ID NO: 517301 - RNA, 22 nt, Human
uucacagugccagggggcaggc

SEQ ID NO: 517302 - RNA, 22 nt, Human
agggacuauuuacccaucucac

SEQ ID NO: 517303 - RNA, 22 nt, Human
gcagaugauguagacagacagu

SEQ ID NO: 517304 - RNA, 22 nt, Human
ggccaggcacugugugagauau

SEQ ID NO: 517305 - RNA, 20 nt, Human
uuucuggguacucucccucu

SEQ ID NO: 517306 - RNA, 21 nt, Human
ccucugugcuaaagggcuccc

SEQ ID NO: 517307 - RNA, 22 nt, Human
cugucuuuucauacuuucccuc

SEQ ID NO: 517308 - RNA, 22 nt, Human
uuacaggggacauuggggacau

SEQ ID NO: 517309 - RNA, 22 nt, Human
cucccaggggaacuaucaagua

SEQ ID NO: 517310 - RNA, 22 nt, Human
ggggacccucaggacugcgucu

SEQ ID NO: 517311 - RNA, 20 nt, Human
uuggaagguggagaagagga

SEQ ID NO: 517312 - RNA, 22 nt, Human
uagagguagauggucagccaau

SEQ ID NO: 517313 - RNA, 22 nt, Human
cccagcuccagagccagaaaca

SEQ ID NO: 517314 - RNA, 22 nt, Human
aguaaacauaauuuaccuguag

SEQ ID NO: 517315 - RNA, 22 nt, Human
aaacucuuccuuucuuuaaagu

SEQ ID NO: 517316 - RNA, 22 nt, Human
gagcugccuguugcauagcaac

SEQ ID NO: 517317 - RNA, 22 nt, Human
gaagagaagcaucaauagguaa

SEQ ID NO: 517318 - RNA, 22 nt, Human
cugugcuuguguucauuguuaa

SEQ ID NO: 517319 - RNA, 22 nt, Human
agggcccuaaggaaggcacaca

SEQ ID NO: 517320 - RNA, 22 nt, Human
guuuagaagccaagauuugggu

SEQ ID NO: 517321 - RNA, 22 nt, Human
caaaaacugcaauuacuuuuac

SEQ ID NO: 517322 - RNA, 22 nt, Human
gcaaauucuuaacuggacugug

SEQ ID NO: 517323 - RNA, 22 nt, Human
cugcucuggucucuucauguuu

SEQ ID NO: 517324 - RNA, 22 nt, Human
uuuucuaacuuuacacucgaaa

SEQ ID NO: 517325 - RNA, 22 nt, Human
ugggccugccccaggcuucagc

SEQ ID NO: 517326 - RNA, 22 nt, Human
auucaagauuaauucuauguca

SEQ ID NO: 517327 - RNA, 22 nt, Human
cagcaggauuugaaaggaagag

SEQ ID NO: 517328 - RNA, 22 nt, Human
caggacacuuguucuucucugc

SEQ ID NO: 517329 - RNA, 22 nt, Human
ugagaaugccauaagagcuauu

SEQ ID NO: 517330 - RNA, 22 nt, Human
gcagagccugacgggauuuuuc

SEQ ID NO: 517331 - RNA, 22 nt, Human
agucucuuacccaagcagaaug

SEQ ID NO: 517332 - RNA, 22 nt, Human
uauaaauuaaugugcccaugag

SEQ ID NO: 517333 - RNA, 22 nt, Human
ugggaaauguguuucuggacca

SEQ ID NO: 517334 - RNA, 22 nt, Human
agauacauuguucuaagcauug

SEQ ID NO: 517335 - RNA, 22 nt, Human
cagcagugaugugugaggguuc

SEQ ID NO: 517336 - RNA, 22 nt, Human
ugcuuaaaaugaugauuauuuu

SEQ ID NO: 517337 - RNA, 22 nt, Human
aaugcacaaaggugucuauugc

SEQ ID NO: 517338 - RNA, 22 nt, Human
aguuucagaauuuaugcagaca

SEQ ID NO: 517339 - RNA, 21 nt, Human
uggagcugaauuuuuggcauc

SEQ ID NO: 517340 - RNA, 22 nt, Human
cuggacagaaaaggccacugga

SEQ ID NO: 517341 - RNA, 22 nt, Human
aaaguuccuuuuauagacauga

SEQ ID NO: 517342 - RNA, 22 nt, Human
auacauuagaaucugguacuca

SEQ ID NO: 517343 - RNA, 21 nt, Human
ucuggcaggcacgggcccagc

SEQ ID NO: 517344 - RNA, 22 nt, Human
ccuccugcacuugcuuuccuuc

SEQ ID NO: 517345 - RNA, 22 nt, Human
gcuucucucucagacugcaagc

SEQ ID NO: 517346 - RNA, 22 nt, Human
ggguuccaaacauagucuuccu

SEQ ID NO: 517347 - RNA, 22 nt, Human
uaagacaugguugaucuagugu

SEQ ID NO: 517348 - RNA, 22 nt, Human
ucuuuuauuaggcugaaauggg

SEQ ID NO: 517349 - RNA, 22 nt, Human
ugcucccaggcucuguggucug

SEQ ID NO: 517350 - RNA, 21 nt, Human
ucauuuuuauugcuaccuugc

SEQ ID NO: 517351 - RNA, 22 nt, Human
aaaagcaagaggcuggauuaaa

SEQ ID NO: 517352 - RNA, 22 nt, Human
cacagcuuagaaaagaagccau

SEQ ID NO: 517353 - RNA, 22 nt, Human
aggacagcagugcuggcacuug

SEQ ID NO: 517354 - RNA, 22 nt, Human
gggcucugaaucccaggucugc

SEQ ID NO: 517355 - RNA, 19 nt, Human
ugaguucugugguucucaa

SEQ ID NO: 517356 - RNA, 22 nt, Human
ccaggcaggcuagaauguaaau

SEQ ID NO: 517357 - RNA, 22 nt, Human
ucugggcugguugugcuugcuu

SEQ ID NO: 517358 - RNA, 22 nt, Human
aaucuucacagaaaaaugucug

SEQ ID NO: 517359 - RNA, 22 nt, Human
cuggcuccauccuugagcucug

SEQ ID NO: 517360 - RNA, 22 nt, Human
cauggcagagaaggggaacugg

SEQ ID NO: 517361 - RNA, 22 nt, Human
uuccaggaagcaguuagcagcc

SEQ ID NO: 517362 - RNA, 22 nt, Human
uuccauauguauauagcuguua

SEQ ID NO: 517363 - RNA, 22 nt, Human
ucauuuguucaucugcucuucu

SEQ ID NO: 517364 - RNA, 22 nt, Human
aaucaagaggcgauggauggaa

SEQ ID NO: 517365 - RNA, 22 nt, Human
gguuuccugcauugggaaauuu

SEQ ID NO: 517366 - RNA, 22 nt, Human
aguucacuauagaagacagugu

SEQ ID NO: 517367 - RNA, 22 nt, Human
cagacuggccacaucugcacug

SEQ ID NO: 517368 - RNA, 22 nt, Human
uggagcugagcaccuccagggc

SEQ ID NO: 517369 - RNA, 22 nt, Human
agauguaguagugggucuuuua

SEQ ID NO: 517370 - RNA, 22 nt, Human
aaagccaaaugaaagaugguuc

SEQ ID NO: 517371 - RNA, 21 nt, Human
ccaggcuccugaggcugguca

SEQ ID NO: 517372 - RNA, 22 nt, Human
ggaggccaaggugggcggauca

SEQ ID NO: 517373 - RNA, 22 nt, Human
auguagaggaguuucuggucug

SEQ ID NO: 517374 - RNA, 22 nt, Human
aagggaugcaggaaagaagguu

SEQ ID NO: 517375 - RNA, 22 nt, Human
gaggccaaguuggagaccaggu

SEQ ID NO: 517376 - RNA, 23 nt, Human
ugccagaggcagucacaguggug

SEQ ID NO: 517377 - RNA, 22 nt, Human
uucaagaugacccagucacacg

SEQ ID NO: 517378 - RNA, 22 nt, Human
uuuuuuaguuaggucagaaugu

SEQ ID NO: 517379 - RNA, 22 nt, Human
gcucugggcugaaucauuuauc

SEQ ID NO: 517380 - RNA, 22 nt, Human
cuuuuacaguggaccugccauu

SEQ ID NO: 517381 - RNA, 22 nt, Human
uaaccauauuuuccauuaaguu

SEQ ID NO: 517382 - RNA, 22 nt, Human
uggcagguggcucuggcauucu

SEQ ID NO: 517383 - RNA, 22 nt, Human
agccaggaaugcaugcucugcu

SEQ ID NO: 517384 - RNA, 22 nt, Human
gugcagugacccuggagagcug

SEQ ID NO: 517385 - RNA, 23 nt, Human
auuuccuacuauaaaagagguaa

SEQ ID NO: 517386 - RNA, 22 nt, Human
agcagggcuugccgcuuguccu

SEQ ID NO: 517387 - RNA, 22 nt, Human
ggccucugccccagccacaccu

SEQ ID NO: 517388 - RNA, 22 nt, Human
uugcuucagaaguucugcuugu

SEQ ID NO: 517389 - RNA, 22 nt, Human
uucuucaauuauuggaaagaaa

SEQ ID NO: 517390 - RNA, 22 nt, Human
aaggucauuuaacaauuuauga

SEQ ID NO: 517391 - RNA, 22 nt, Human
uaccaaaagcuuguuucauaca

SEQ ID NO: 517392 - RNA, 22 nt, Human
uucuuuguuugauaaguaugcu

SEQ ID NO: 517393 - RNA, 22 nt, Human
caugugugguuaccuacuugac

SEQ ID NO: 517394 - RNA, 22 nt, Human
cccugcagagccagcccugacc

SEQ ID NO: 517395 - RNA, 22 nt, Human
ucugugaacaucacauugacag

SEQ ID NO: 517396 - RNA, 22 nt, Human
agccuucaaccuagcuagagca

SEQ ID NO: 517397 - RNA, 22 nt, Human
ggguccuggaaucugcauuuua

SEQ ID NO: 517398 - RNA, 22 nt, Human
uagaaacacagaucugguguca

SEQ ID NO: 517399 - RNA, 22 nt, Human
acauacacaagcguacaugaac

SEQ ID NO: 517400 - RNA, 22 nt, Human
agcaggguauguuagagcugua

SEQ ID NO: 517401 - RNA, 22 nt, Human
guguccauucacugcaacacuu

SEQ ID NO: 517402 - RNA, 22 nt, Human
uuuagggaugucagaacaggga

SEQ ID NO: 517403 - RNA, 22 nt, Human
cucugggcuccuucagcccuuu

SEQ ID NO: 517404 - RNA, 20 nt, Human
gagauggcuaagugcugaac

SEQ ID NO: 517405 - RNA, 22 nt, Human
gccaugcuugguaugcugugag

SEQ ID NO: 517406 - RNA, 22 nt, Human
agcugccuuaaauuacuuugug

SEQ ID NO: 517407 - RNA, 22 nt, Human
uuccuuuagugucauauacuuu

SEQ ID NO: 517408 - RNA, 22 nt, Human
uggccacccacccuaaucuuuc

SEQ ID NO: 517409 - RNA, 22 nt, Human
acucugccaucccaggugcugu

SEQ ID NO: 517410 - RNA, 22 nt, Human
caaaguaucaacucccacacug

SEQ ID NO: 517411 - RNA, 22 nt, Human
uccucugguuauacuugcaccc

SEQ ID NO: 517412 - RNA, 21 nt, Human
agcagcugggcaacauggagg

SEQ ID NO: 517413 - RNA, 22 nt, Human
gcucuccaaacccuguggcuuu

SEQ ID NO: 517414 - RNA, 22 nt, Human
gcccauggcagaacugugagca

SEQ ID NO: 517415 - RNA, 22 nt, Human
auuuagaagcuaauuuuucaga

SEQ ID NO: 517416 - RNA, 22 nt, Human
uauucaugagauaggcaguuuu

SEQ ID NO: 517417 - RNA, 22 nt, Human
cagggcugaacugagcuuguga

SEQ ID NO: 517418 - RNA, 22 nt, Human
agguuccaucaccugcagugga

SEQ ID NO: 517419 - RNA, 22 nt, Human
cagcccugcacgcugccuccgc

SEQ ID NO: 517420 - RNA, 22 nt, Human
uuccugugguccagagucaucc

SEQ ID NO: 517421 - RNA, 22 nt, Human
ugggccagcaauugcugcucag

SEQ ID NO: 517422 - RNA, 22 nt, Human
aaaguauuugugauuuuuacca

SEQ ID NO: 517423 - RNA, 22 nt, Human
accaaggaagaaucuauuugag

SEQ ID NO: 517424 - RNA, 22 nt, Human
aaguucuugauaaguccacugu

SEQ ID NO: 517425 - RNA, 22 nt, Human
ucaaagcacuggggaaagccug

SEQ ID NO: 517426 - RNA, 22 nt, Human
gggcucagucugcggcgcgcgg

SEQ ID NO: 517427 - RNA, 22 nt, Human
ggaugucgaggaugggguagca

SEQ ID NO: 517428 - RNA, 20 nt, Human
agcaaagccuuuagaguuug

SEQ ID NO: 517429 - RNA, 22 nt, Human
cccagcuugcaaauggguugcu

SEQ ID NO: 517430 - RNA, 23 nt, Human
aguaacaugcaaauaacagucug

SEQ ID NO: 517431 - RNA, 22 nt, Human
aauaaugagcuugucuaauugu

SEQ ID NO: 517432 - RNA, 22 nt, Human
uaauacagggcacuuugaguga

SEQ ID NO: 517433 - RNA, 22 nt, Human
gcuccucugucaaaugagagug

SEQ ID NO: 517434 - RNA, 22 nt, Human
ucuggguccccgaggaaggaga

SEQ ID NO: 517435 - RNA, 22 nt, Human
agugaaauuuguuuagauaggu

SEQ ID NO: 517436 - RNA, 22 nt, Human
cagcagcucaggcuccuuccca

SEQ ID NO: 517437 - RNA, 22 nt, Human
acagagcuguacuacuuacuga

SEQ ID NO: 517438 - RNA, 22 nt, Human
aggaagcaguuuauaaugcauu

SEQ ID NO: 517439 - RNA, 22 nt, Human
accuguuuggaggagguguuag

SEQ ID NO: 517440 - RNA, 22 nt, Human
uggcaggguuggccaccuuacc

SEQ ID NO: 517441 - RNA, 22 nt, Human
aggagaauuaggaacucaagau

SEQ ID NO: 517442 - RNA, 22 nt, Human
augcacagcagugaguucagug

SEQ ID NO: 517443 - RNA, 22 nt, Human
ugccaggggaccuagggauguc

SEQ ID NO: 517444 - RNA, 22 nt, Human
agguaggauggguggagaugau

SEQ ID NO: 517445 - RNA, 22 nt, Human
ugccuucaaucaggauggucuc

SEQ ID NO: 517446 - RNA, 22 nt, Human
aggccugggcaagaaggggcgu

SEQ ID NO: 517447 - RNA, 22 nt, Human
uccuccucacgcuguugcuugu

SEQ ID NO: 517448 - RNA, 22 nt, Human
cuggauucuuucauaaaaguca

SEQ ID NO: 517449 - RNA, 22 nt, Human
guuugcauaucugugaaaugga

SEQ ID NO: 517450 - RNA, 22 nt, Human
ugcacagugaccacugagcaag

SEQ ID NO: 517451 - RNA, 22 nt, Human
ucuggcugauucccugggacug

SEQ ID NO: 517452 - RNA, 17 nt, Human
gacuuuggaguuucaua

SEQ ID NO: 517453 - RNA, 22 nt, Human
gccucacugcagccccaggaag

SEQ ID NO: 517454 - RNA, 22 nt, Human
aguaugaaucuuucagaccgua

SEQ ID NO: 517455 - RNA, 22 nt, Human
ccagcaggagagaacauuuccc

SEQ ID NO: 517456 - RNA, 22 nt, Human
aaauucaguuuuaauaaucacu

SEQ ID NO: 517457 - RNA, 22 nt, Human
gagcucauuguggauggauggg

SEQ ID NO: 517458 - RNA, 22 nt, Human
ugucuucaggaguaaauaucau

SEQ ID NO: 517459 - RNA, 22 nt, Human
ucacuagucaucaacuuccauu

SEQ ID NO: 517460 - RNA, 22 nt, Human
aagaacauguuaaaagauucac

SEQ ID NO: 517461 - RNA, 22 nt, Human
gccccuccgggcgcgucauagc

SEQ ID NO: 517462 - RNA, 23 nt, Human
aacacaaagcugauuccaguggc

SEQ ID NO: 517463 - RNA, 22 nt, Human
augaggaugggaagggagccaa

SEQ ID NO: 517464 - RNA, 22 nt, Human
ucugggucuaucccaugccuuu

SEQ ID NO: 517465 - RNA, 22 nt, Human
ggugaggcccagugaucugugu

SEQ ID NO: 517466 - RNA, 22 nt, Human
aguggcugcuucugguugcucc

SEQ ID NO: 517467 - RNA, 22 nt, Human
cucuuaaagcuuccaguuucaa

SEQ ID NO: 517468 - RNA, 22 nt, Human
cugggacauauugcuaguguug

SEQ ID NO: 517469 - RNA, 22 nt, Human
ucccagagcaguacuccaggag

SEQ ID NO: 517470 - RNA, 22 nt, Human
gcagcuggcucagagagguggg

SEQ ID NO: 517471 - RNA, 22 nt, Human
auuuuagcaaaugcaagaugga

SEQ ID NO: 517472 - RNA, 22 nt, Human
uggccuggaagagaggucgagg

SEQ ID NO: 517473 - RNA, 21 nt, Human
ucauuuauugagaaaugacug

SEQ ID NO: 517474 - RNA, 22 nt, Human
aagcuuuggaagggcaggguug

SEQ ID NO: 517475 - RNA, 22 nt, Human
uccaugugcuuccucaggggaa

SEQ ID NO: 517476 - RNA, 22 nt, Human
uucaagaugcacaguggcauuc

SEQ ID NO: 517477 - RNA, 22 nt, Human
gaggucaggcucaagcugggcc

SEQ ID NO: 517478 - RNA, 21 nt, Human
ggcagaaguagcauggacggg

SEQ ID NO: 517479 - RNA, 22 nt, Human
gcuacagagcucugugaagaga

SEQ ID NO: 517480 - RNA, 22 nt, Human
aacccagccguguagcugccgc

SEQ ID NO: 517481 - RNA, 22 nt, Human
cagggcuggcucaugaaaaguu

SEQ ID NO: 517482 - RNA, 22 nt, Human
cagggccaaguuggugccuuuu

SEQ ID NO: 517483 - RNA, 22 nt, Human
aagucacaaagugcuguacaug

SEQ ID NO: 517484 - RNA, 22 nt, Human
uggggagaagcaauagacucua

SEQ ID NO: 517485 - RNA, 22 nt, Human
uucuuugaguuaguacagucca

SEQ ID NO: 517486 - RNA, 22 nt, Human
uuggaauugugaacuaagugau

SEQ ID NO: 517487 - RNA, 22 nt, Human
uucucagugaaguuuagaacau

SEQ ID NO: 517488 - RNA, 22 nt, Human
ggugcagugguguggcaaaggg

SEQ ID NO: 517489 - RNA, 22 nt, Human
aaggcagcaccgccuccugaaa

SEQ ID NO: 517490 - RNA, 22 nt, Human
cagagccucucagaggucagac

SEQ ID NO: 517491 - RNA, 22 nt, Human
guaaaauugcaauuacuuuugc

SEQ ID NO: 517492 - RNA, 21 nt, Human
agcugagcccagaagacuggu

SEQ ID NO: 517493 - RNA, 22 nt, Human
uuggcucugauggggaucagga

SEQ ID NO: 517494 - RNA, 22 nt, Human
uggcugccaauggcuuggaaag

SEQ ID NO: 517495 - RNA, 21 nt, Human
agaauaaugguaucauuugcu

SEQ ID NO: 517496 - RNA, 22 nt, Human
uccuucaacuuuuuacuugccc

SEQ ID NO: 517497 - RNA, 22 nt, Human
auaaaaaggacagauguggucu

SEQ ID NO: 517498 - RNA, 22 nt, Human
acagugugguuugagcacuggg

SEQ ID NO: 517499 - RNA, 22 nt, Human
uccagugguacauggagacacu

SEQ ID NO: 517500 - RNA, 22 nt, Human
gcuguacauuuguguacacuug

SEQ ID NO: 517501 - RNA, 22 nt, Human
aacaguaucuuuuaucagaaau

SEQ ID NO: 517502 - RNA, 22 nt, Human
ggcugcaguuugucuuuugcuu

SEQ ID NO: 517503 - RNA, 22 nt, Human
ccacagaaucgcuaguggagca

SEQ ID NO: 517504 - RNA, 22 nt, Human
cguggcugguggaccugagggc

SEQ ID NO: 517505 - RNA, 22 nt, Human
gugcccuggaugacuuuggucu

SEQ ID NO: 517506 - RNA, 22 nt, Human
ggucucagcuggaguccuuggu

SEQ ID NO: 517507 - RNA, 22 nt, Human
cuccaggacccaguggcuccag

SEQ ID NO: 517508 - RNA, 22 nt, Human
gagagcauguggucuaguuuua

SEQ ID NO: 517509 - RNA, 22 nt, Human
cucuggguucacugaggcucug

SEQ ID NO: 517510 - RNA, 22 nt, Human
ugucccagggaaggcccagcac

SEQ ID NO: 517511 - RNA, 22 nt, Human
aggcugugcacagggcaccugc

SEQ ID NO: 517512 - RNA, 22 nt, Human
gcugucacaucaaggcacuaaa

SEQ ID NO: 517513 - RNA, 22 nt, Human
uggcucagucauggaugaguaa

SEQ ID NO: 517514 - RNA, 22 nt, Human
cugguuuugucagaagcuuuau

SEQ ID NO: 517515 - RNA, 22 nt, Human
uccuggagagugggcgagcaca

SEQ ID NO: 517516 - RNA, 22 nt, Human
ucugggagacguguguugucag

SEQ ID NO: 517517 - RNA, 21 nt, Human
cagaauccagucucuuauuac

SEQ ID NO: 517518 - RNA, 22 nt, Human
gcaguggggcgcugggaguugg

SEQ ID NO: 517519 - RNA, 22 nt, Human
ggaagacagaagccuacagcuu

SEQ ID NO: 517520 - RNA, 17 nt, Human
gcuuccucaugcaguuc

SEQ ID NO: 517521 - RNA, 22 nt, Human
gcugggcucagaccuagugaac

SEQ ID NO: 517522 - RNA, 22 nt, Human
cugagcagcguggggagcuggc

SEQ ID NO: 517523 - RNA, 22 nt, Human
ucugccugcaguguggcagggc

SEQ ID NO: 517524 - RNA, 22 nt, Human
acaaaguuauucuuucagagga

SEQ ID NO: 517525 - RNA, 22 nt, Human
agucccuucucaaagugugcgg

SEQ ID NO: 517526 - RNA, 22 nt, Human
guaacagaggguuugcagauau

SEQ ID NO: 517527 - RNA, 22 nt, Human
ugagucugcuccugguagcaga

SEQ ID NO: 517528 - RNA, 22 nt, Human
uacuguacauuccguuuguugc

SEQ ID NO: 517529 - RNA, 22 nt, Human
ucagugcucaggggagccgagg

SEQ ID NO: 517530 - RNA, 22 nt, Human
aaucaguuagaaggaagagaau

SEQ ID NO: 517531 - RNA, 22 nt, Human
acacaaacagucuauagcacca

SEQ ID NO: 517532 - RNA, 22 nt, Human
ggcuccuggggaggugagcuug

SEQ ID NO: 517533 - RNA, 22 nt, Human
accagccugucugagucguggg

SEQ ID NO: 517534 - RNA, 22 nt, Human
gaggcagugcauugucuagggg

SEQ ID NO: 517535 - RNA, 22 nt, Human
aggaaaaaccuguuaaugguag

SEQ ID NO: 517536 - RNA, 22 nt, Human
cagccucugacaccacagucgu

SEQ ID NO: 517537 - RNA, 22 nt, Human
auucaaguucuucugucuuugc

SEQ ID NO: 517538 - RNA, 22 nt, Human
uugcuaaaggauuuuguauuua

SEQ ID NO: 517539 - RNA, 22 nt, Human
gggccuggggugacguaccccu

SEQ ID NO: 517540 - RNA, 22 nt, Human
uuccugggugguccugguagag

SEQ ID NO: 517541 - RNA, 22 nt, Human
agugucuuucauauccuccauc

SEQ ID NO: 517542 - RNA, 22 nt, Human
ggcgggagauggggccguucag

SEQ ID NO: 517543 - RNA, 22 nt, Human
cagggucccaggagcugcuuuc

SEQ ID NO: 517544 - RNA, 22 nt, Human
ggucaggggcugcucuacagag

SEQ ID NO: 517545 - RNA, 22 nt, Human
gucugagggacagaguccuggc

SEQ ID NO: 517546 - RNA, 22 nt, Human
gugaaguugauuguuaucguca

SEQ ID NO: 517547 - RNA, 22 nt, Human
cagcccugucccugagggaccu

SEQ ID NO: 517548 - RNA, 22 nt, Human
uccagggauguccuguagcacu

SEQ ID NO: 517549 - RNA, 18 nt, Human
gauucugauucuggaggc

SEQ ID NO: 517550 - RNA, 22 nt, Human
ggcagaaggccucccagcuccu

SEQ ID NO: 517551 - RNA, 22 nt, Human
aagcagcuuucuuuccugugaa

SEQ ID NO: 517552 - RNA, 22 nt, Human
cagcccugcugacacugucuga

SEQ ID NO: 517553 - RNA, 22 nt, Human
uggggacaggagacuuacagcu

SEQ ID NO: 517554 - RNA, 22 nt, Human
uggagagguuuaaacaaaaguu

SEQ ID NO: 517555 - RNA, 22 nt, Human
gcaggaugaaggcagaggcuga

SEQ ID NO: 517556 - RNA, 22 nt, Human
aagcaaagaguuuaguggguga

SEQ ID NO: 517557 - RNA, 22 nt, Human
uggcucugcaccucaguguacc

SEQ ID NO: 517558 - RNA, 22 nt, Human
uggcugccuucccugcuggagg

SEQ ID NO: 517559 - RNA, 22 nt, Human
uucaaagugcauguuccucaga

SEQ ID NO: 517560 - RNA, 22 nt, Human
gugagagaugcuuucuuaacgc

SEQ ID NO: 517561 - RNA, 22 nt, Human
cacagguggcuccaaguuagag

SEQ ID NO: 517562 - RNA, 22 nt, Human
ucuuagaaauuccccaguggcu

SEQ ID NO: 517563 - RNA, 22 nt, Human
caggacaguuugcuuugcccug

SEQ ID NO: 517564 - RNA, 22 nt, Human
acugaaaaugaauuagaaacag

SEQ ID NO: 517565 - RNA, 22 nt, Human
aggcauggguagaagagaagcc

SEQ ID NO: 517566 - RNA, 22 nt, Human
uuguagaaaauuagaugcaugg

SEQ ID NO: 517567 - RNA, 22 nt, Human
ccugagcucaaagggugccugg

SEQ ID NO: 517568 - RNA, 22 nt, Human
aaaggagacagucuuaccugga

SEQ ID NO: 517569 - RNA, 22 nt, Human
ugcccaaguguuuggcugaguc

SEQ ID NO: 517570 - RNA, 22 nt, Human
cuuauuugcccauguuucuuua

SEQ ID NO: 517571 - RNA, 22 nt, Human
aagcagaugcguuggagcaguu

SEQ ID NO: 517572 - RNA, 22 nt, Human
aauacugucuuucacagauauu

SEQ ID NO: 517573 - RNA, 22 nt, Human
gcuggcuuccuucugcagcuag

SEQ ID NO: 517574 - RNA, 22 nt, Human
uggcacaggaauuuagaugcag

SEQ ID NO: 517575 - RNA, 22 nt, Human
gaaauagacacuuucuaugaau

SEQ ID NO: 517576 - RNA, 18 nt, Human
gaggaacauucaccuccu

SEQ ID NO: 517577 - RNA, 22 nt, Human
cacagacccagaagggaugaag

SEQ ID NO: 517578 - RNA, 22 nt, Human
gggccccuugcugcucugcugg

SEQ ID NO: 517579 - RNA, 23 nt, Human
aaguucaagucacagccugucuu

SEQ ID NO: 517580 - RNA, 22 nt, Human
uggcuuuaagaagacugacagc

SEQ ID NO: 517581 - RNA, 22 nt, Human
cugggcacaaguggcccuggau

SEQ ID NO: 517582 - RNA, 22 nt, Human
gggugggcccagcccagagaag

SEQ ID NO: 517583 - RNA, 22 nt, Human
cuggcagcugcccgagaugccc

SEQ ID NO: 517584 - RNA, 22 nt, Human
ucaaggaagggauauucuugaa

SEQ ID NO: 517585 - RNA, 22 nt, Human
ugcaaguaauuccagcuacuga

SEQ ID NO: 517586 - RNA, 22 nt, Human
gcugggcugagcuagacuuggc

SEQ ID NO: 517587 - RNA, 22 nt, Human
cuggcccagucucagaguguca

SEQ ID NO: 517588 - RNA, 22 nt, Human
uaaagugcccagggaaagcggg

SEQ ID NO: 517589 - RNA, 22 nt, Human
cucuggcuguuugcagcucaag

SEQ ID NO: 517590 - RNA, 22 nt, Human
gcaggcucaaaagcugguagga

SEQ ID NO: 517591 - RNA, 22 nt, Human
uaauaaaugaaagugcuggcau

SEQ ID NO: 517592 - RNA, 18 nt, Human
gaaaggagagacaguagg

SEQ ID NO: 517593 - RNA, 22 nt, Human
ugaaacagucuccagacuugga

SEQ ID NO: 517594 - RNA, 22 nt, Human
caauuagacauuuauuggccag

SEQ ID NO: 517595 - RNA, 22 nt, Human
agaaaugugagccccuuaucaa

SEQ ID NO: 517596 - RNA, 22 nt, Human
uguggcagggauacugaggcag

SEQ ID NO: 517597 - RNA, 22 nt, Human
uuccucuggaggcucuaggaga

SEQ ID NO: 517598 - RNA, 22 nt, Human
ggcuugcuucuuguccaggaau

SEQ ID NO: 517599 - RNA, 22 nt, Human
ugccaggcccugugcuggaugc

SEQ ID NO: 517600 - RNA, 22 nt, Human
agaucacaguggcaacucccuu

SEQ ID NO: 517601 - RNA, 22 nt, Human
gagcagaacuacucacauaucg

SEQ ID NO: 517602 - RNA, 22 nt, Human
gcuggugccuuguuguuguuac

SEQ ID NO: 517603 - RNA, 22 nt, Human
uguccuggagugcuugggggaa

SEQ ID NO: 517604 - RNA, 17 nt, Human
ccacagccuggcacuug

SEQ ID NO: 517605 - RNA, 20 nt, Human
ccuguuccauucccucaacc

SEQ ID NO: 517606 - RNA, 23 nt, Human
uccuccuuuugcuugugcuuccc

SEQ ID NO: 517607 - RNA, 23 nt, Human
agucauuaagaaguucaggaacu

SEQ ID NO: 517608 - RNA, 22 nt, Human
auagaacagaaacagaugcaca

SEQ ID NO: 517609 - RNA, 22 nt, Human
cucaggagguuuccugucuagg

SEQ ID NO: 517610 - RNA, 20 nt, Human
uauuuagauucaaguaugga

SEQ ID NO: 517611 - RNA, 22 nt, Human
auggcugcucuggauggagucc

SEQ ID NO: 517612 - RNA, 22 nt, Human
uuugcaauuugugcugcaaaug

SEQ ID NO: 517613 - RNA, 22 nt, Human
augaugguaaauucaguauccg

SEQ ID NO: 517614 - RNA, 22 nt, Human
uuggccuuaaccucucugugcc

SEQ ID NO: 517615 - RNA, 22 nt, Human
agcuguguucugguugauucac

SEQ ID NO: 517616 - RNA, 22 nt, Human
uugaaguucuaagccccaguac

SEQ ID NO: 517617 - RNA, 22 nt, Human
gcuguucagaugcgauucagga

SEQ ID NO: 517618 - RNA, 22 nt, Human
aagcugccugggaggaagggcu

SEQ ID NO: 517619 - RNA, 22 nt, Human
ggggaggaagcuggaacacggg

SEQ ID NO: 517620 - RNA, 22 nt, Human
ugccagugggugugcagagacu

SEQ ID NO: 517621 - RNA, 22 nt, Human
ugucaaaaccuuggaggcaagg

SEQ ID NO: 517622 - RNA, 22 nt, Human
guuuauaugaacuucauaccca

SEQ ID NO: 517623 - RNA, 22 nt, Human
ggagccagagucugcaguguaa

SEQ ID NO: 517624 - RNA, 22 nt, Human
aggcucugaguagagcugccag

SEQ ID NO: 517625 - RNA, 23 nt, Human
ucugggcugagcucgaguguaga

SEQ ID NO: 517626 - RNA, 22 nt, Human
ccagcacugcucucagacugag

SEQ ID NO: 517627 - RNA, 22 nt, Human
uucuaguguccuuggacuugcu

SEQ ID NO: 517628 - RNA, 22 nt, Human
ucagaaugaaauuucuuucaga

SEQ ID NO: 517629 - RNA, 22 nt, Human
gugggccaggccggagugcaga

SEQ ID NO: 517630 - RNA, 22 nt, Human
agacucugauucccucauguca

SEQ ID NO: 517631 - RNA, 22 nt, Human
cagaaauaucaguugaaagugc

SEQ ID NO: 517632 - RNA, 22 nt, Human
aucagucuguguuagaaaagag

SEQ ID NO: 517633 - RNA, 19 nt, Human
cucuggagcagacacugga

SEQ ID NO: 517634 - RNA, 22 nt, Human
agacagcauggagcugauaaca

SEQ ID NO: 517635 - RNA, 21 nt, Human
caaauacuuagaaacuuaaga

SEQ ID NO: 517636 - RNA, 19 nt, Human
acagaaauuaguuauuuuc

SEQ ID NO: 517637 - RNA, 22 nt, Human
aguaauaauagcuguaaagugc

SEQ ID NO: 517638 - RNA, 22 nt, Human
accuggccauccagcuggcauc

SEQ ID NO: 517639 - RNA, 22 nt, Human
gcaccaugacagugaggagaac

SEQ ID NO: 517640 - RNA, 23 nt, Human
agaccugcaucugauaggcccug

SEQ ID NO: 517641 - RNA, 22 nt, Human
cugauuccugauucaugcucuu

SEQ ID NO: 517642 - RNA, 22 nt, Human
cucuggguccuggggcuacaag

SEQ ID NO: 517643 - RNA, 22 nt, Human
augcugaagaguucaugauuau

SEQ ID NO: 517644 - RNA, 23 nt, Human
ggccuguguuuugucugaaguac

SEQ ID NO: 517645 - RNA, 22 nt, Human
uucaggauaguggugaguggca

SEQ ID NO: 517646 - RNA, 22 nt, Human
gagcucugggaaacaaagugua

SEQ ID NO: 517647 - RNA, 17 nt, Human
agccccucagcgucacc

SEQ ID NO: 517648 - RNA, 22 nt, Human
uucuggcaugagagaugggggu

SEQ ID NO: 517649 - RNA, 22 nt, Human
gagauucuguagucaggcaucu

SEQ ID NO: 517650 - RNA, 22 nt, Human
aaacucuauaggcagaagcaau

SEQ ID NO: 517651 - RNA, 22 nt, Human
uacaaaaguaauuacgguuuuu

SEQ ID NO: 517652 - RNA, 15 nt, Human
uucaggauaugacuc

SEQ ID NO: 517653 - RNA, 22 nt, Human
uagugcaagguuuugccaacuu

SEQ ID NO: 517654 - RNA, 21 nt, Human
uagaggcaggagggacugcag

SEQ ID NO: 517655 - RNA, 22 nt, Human
accugcagccacuucucuccuu

SEQ ID NO: 517656 - RNA, 22 nt, Human
uccaggcaugucccaagccgga

SEQ ID NO: 517657 - RNA, 22 nt, Human
uccaggcacgaggcccugugca

SEQ ID NO: 517658 - RNA, 22 nt, Human
gcgcaagccacacagccugggg

SEQ ID NO: 517659 - RNA, 22 nt, Human
ucauguacauguaagucagaaa

SEQ ID NO: 517660 - RNA, 22 nt, Human
cuguggcucauucuugguggca

SEQ ID NO: 517661 - RNA, 22 nt, Human
uaugaagcuuugaaaagcuuac

SEQ ID NO: 517662 - RNA, 22 nt, Human
agucagcagccuggccaggaga

SEQ ID NO: 517663 - RNA, 22 nt, Human
ugucugaggaagucagcccuuu

SEQ ID NO: 517664 - RNA, 21 nt, Human
guauugcagaguuaugugcuc

SEQ ID NO: 517665 - RNA, 22 nt, Human
agcccuggcccggcugugcuuu

SEQ ID NO: 517666 - RNA, 21 nt, Human
gcaggaugcaucuuggugucu

SEQ ID NO: 517667 - RNA, 23 nt, Human
gggcuccagucucugcucaguug

SEQ ID NO: 517668 - RNA, 23 nt, Human
agcaggcaucuguggcacaaggc

SEQ ID NO: 517669 - RNA, 22 nt, Human
agcugcagucaagcugggccac

SEQ ID NO: 517670 - RNA, 22 nt, Human
ugaccugcagucaagaggggaa

SEQ ID NO: 517671 - RNA, 21 nt, Human
aggugcagagccagggaccag

SEQ ID NO: 517672 - RNA, 22 nt, Human
uaagaacaguagaacaguaggu

SEQ ID NO: 517673 - RNA, 22 nt, Human
agcuuuaucagaggagucucua

SEQ ID NO: 517674 - RNA, 22 nt, Human
gccugccuucggugcgcagcgg

SEQ ID NO: 517675 - RNA, 22 nt, Human
agggcagccaugagccuucagg

SEQ ID NO: 517676 - RNA, 22 nt, Human
ccaggcucugucuggucagaag

SEQ ID NO: 517677 - RNA, 22 nt, Human
aagccagguguuuaggccagcg

SEQ ID NO: 517678 - RNA, 22 nt, Human
gaugcagaaaguagacaccauc

SEQ ID NO: 517679 - RNA, 22 nt, Human
uuccucuguaugcuuugcugcu

SEQ ID NO: 517680 - RNA, 22 nt, Human
ggcaaguauuugugcaucuaca

SEQ ID NO: 517681 - RNA, 22 nt, Human
cgcgguggcggccuccagcgcc

SEQ ID NO: 517682 - RNA, 22 nt, Human
caguuucucucauacauauuug

SEQ ID NO: 517683 - RNA, 22 nt, Human
uuuauauuaccuggaauagcuu

SEQ ID NO: 517684 - RNA, 22 nt, Human
acaguaauaaguguuggugagg

SEQ ID NO: 517685 - RNA, 22 nt, Human
uguguacacaaguauauauaca

SEQ ID NO: 517686 - RNA, 22 nt, Human
ugcaugcauaaauguacacaca

SEQ ID NO: 517687 - RNA, 22 nt, Human
gucccagggaagaaggcagcac

SEQ ID NO: 517688 - RNA, 22 nt, Human
aggcaggugagucaaaacagac

SEQ ID NO: 517689 - RNA, 22 nt, Human
uacuuguguucuacuagagaaa

SEQ ID NO: 517690 - RNA, 22 nt, Human
acauuguagacuuuucauaugu

SEQ ID NO: 517691 - RNA, 22 nt, Human
cuguggccuuggaccagcaucu

SEQ ID NO: 517692 - RNA, 22 nt, Human
uaaagcagccagggucuaagcc

SEQ ID NO: 517693 - RNA, 22 nt, Human
ggcugcagguugguuggcagcu

SEQ ID NO: 517694 - RNA, 22 nt, Human
gguuccagaguauuucauuuca

SEQ ID NO: 517695 - RNA, 22 nt, Human
guccuguggaaagcuagccgcu

SEQ ID NO: 517696 - RNA, 22 nt, Human
aguguacaucagaacauaucaa

SEQ ID NO: 517697 - RNA, 22 nt, Human
uuggccuucccuaccugggcca

SEQ ID NO: 517698 - RNA, 22 nt, Human
uccuagaaugcaccucugcugu

SEQ ID NO: 517699 - RNA, 22 nt, Human
cugcugggcuccucaugugacu

SEQ ID NO: 517700 - RNA, 22 nt, Human
caguuuuugccauuaagaguaa

SEQ ID NO: 517701 - RNA, 22 nt, Human
cuguccuguggaccugaggacg

SEQ ID NO: 517702 - RNA, 22 nt, Human
ggccagaggccacagcuguguc

SEQ ID NO: 517703 - RNA, 23 nt, Human
uugcaaauuucaguuaguucaug

SEQ ID NO: 517704 - RNA, 22 nt, Human
uuagaggugucaggagcacagg

SEQ ID NO: 517705 - RNA, 22 nt, Human
agcagcugaccagugaguccug

SEQ ID NO: 517706 - RNA, 21 nt, Human
ccuggcugcacaguugcuggu

SEQ ID NO: 517707 - RNA, 22 nt, Human
gaggagagggcugcgggcccac

SEQ ID NO: 517708 - RNA, 22 nt, Human
cugcacaguggacagugaagau

SEQ ID NO: 517709 - RNA, 22 nt, Human
gccuguuuacuuugccgcagga

SEQ ID NO: 517710 - RNA, 22 nt, Human
gccaagcuguuuuucagagacg

SEQ ID NO: 517711 - RNA, 22 nt, Human
gccaggcugcuccagggaggcc

SEQ ID NO: 517712 - RNA, 22 nt, Human
ugaaauguugccaugaggucuc

SEQ ID NO: 517713 - RNA, 22 nt, Human
uuguuuuggagaugagcuaaaa

SEQ ID NO: 517714 - RNA, 22 nt, Human
gcucugucuucagcacacagua

SEQ ID NO: 517715 - RNA, 22 nt, Human
auggaagggacagaagggcaag

SEQ ID NO: 517716 - RNA, 22 nt, Human
ugggggcacuucgaggucgccu

SEQ ID NO: 517717 - RNA, 22 nt, Human
uuguaugaccacaaucugacgu

SEQ ID NO: 517718 - RNA, 22 nt, Human
ugucuccucauacugucauauu

SEQ ID NO: 517719 - RNA, 22 nt, Human
uugauuugauugaugaacuaag

SEQ ID NO: 517720 - RNA, 22 nt, Human
aaguccuguuccucauacuucc

SEQ ID NO: 517721 - RNA, 22 nt, Human
cagggccugccugguuccugga

SEQ ID NO: 517722 - RNA, 21 nt, Human
agagccugagaucuuccagca

SEQ ID NO: 517723 - RNA, 22 nt, Human
guguaucaaagcacagacuuca

SEQ ID NO: 517724 - RNA, 22 nt, Human
aaauggcugacuaaauuaaauu

SEQ ID NO: 517725 - RNA, 22 nt, Human
acaccaugguucccaaacugug

SEQ ID NO: 517726 - RNA, 18 nt, Human
ugggauggagaguaacug

SEQ ID NO: 517727 - RNA, 22 nt, Human
ugucccaggcugaaguacagug

SEQ ID NO: 517728 - RNA, 22 nt, Human
ugaggcaggaaguuauauaaug

SEQ ID NO: 517729 - RNA, 22 nt, Human
gacaggccaggggcugaggugg

SEQ ID NO: 517730 - RNA, 22 nt, Human
cuggagcugcuguccuugggug

SEQ ID NO: 517731 - RNA, 22 nt, Human
aauggcuauacaacaugaguau

SEQ ID NO: 517732 - RNA, 22 nt, Human
auuuugaaaccaaguuauuucc

SEQ ID NO: 517733 - RNA, 18 nt, Human
gcagcugacacuggaguu

SEQ ID NO: 517734 - RNA, 22 nt, Human
gcaggucucaaucugagcaggc

SEQ ID NO: 517735 - RNA, 22 nt, Human
aaagcugcugccaaucaggcuu

SEQ ID NO: 517736 - RNA, 22 nt, Human
uauuuugucuucugcucaucac

SEQ ID NO: 517737 - RNA, 19 nt, Human
ucuuuucacgcauuuugaa

SEQ ID NO: 517738 - RNA, 23 nt, Human
cacugcagcguggucuggcagga

SEQ ID NO: 517739 - RNA, 22 nt, Human
uccuggccuagaguuuguguuc

SEQ ID NO: 517740 - RNA, 22 nt, Human
ugaaggagauuuuuagggaggc

SEQ ID NO: 517741 - RNA, 22 nt, Human
ucagggcagaauccaaagaauu

SEQ ID NO: 517742 - RNA, 22 nt, Human
ucaaaagaaacaccauguuccu

SEQ ID NO: 517743 - RNA, 22 nt, Human
caguccugggugcagcaggaaa

SEQ ID NO: 517744 - RNA, 22 nt, Human
agaaaguucacugguauauuuu

SEQ ID NO: 517745 - RNA, 22 nt, Human
augucuuucaaauucugccuag

SEQ ID NO: 517746 - RNA, 22 nt, Human
gcaggaguuaggcgucguggau

SEQ ID NO: 517747 - RNA, 22 nt, Human
agggcuacugccugccuucagg

SEQ ID NO: 517748 - RNA, 22 nt, Human
cccagagcugagucugauauau

SEQ ID NO: 517749 - RNA, 20 nt, Human
accuuucaaaugauucagca

SEQ ID NO: 517750 - RNA, 22 nt, Human
auugcugacucaauaauugaag

SEQ ID NO: 517751 - RNA, 22 nt, Human
guggaaggaauuaacagacuag

SEQ ID NO: 517752 - RNA, 20 nt, Human
aagcuucacuucauuugauc

SEQ ID NO: 517753 - RNA, 22 nt, Human
ucuguggcugugcugggccaga

SEQ ID NO: 517754 - RNA, 22 nt, Human
ccugggugucaugggcagcugg

SEQ ID NO: 517755 - RNA, 18 nt, Human
ugaacagaugaguugaag

SEQ ID NO: 517756 - RNA, 22 nt, Human
cacagcuucugucugacccaug

SEQ ID NO: 517757 - RNA, 22 nt, Human
ugugcccauuacacagaggcau

SEQ ID NO: 517758 - RNA, 22 nt, Human
gagguuggugaggggacacggu

SEQ ID NO: 517759 - RNA, 21 nt, Human
aggucccagguuugggcagca

SEQ ID NO: 517760 - RNA, 22 nt, Human
agcagagccugggcuaggggug

SEQ ID NO: 517761 - RNA, 22 nt, Human
ccuuccagaguucagucugccc

SEQ ID NO: 517762 - RNA, 22 nt, Human
uaaggaaaguacauguuuugac

SEQ ID NO: 517763 - RNA, 22 nt, Human
uagcuccuggcugcagggccuc

SEQ ID NO: 517764 - RNA, 22 nt, Human
guguuccauguuugagguaguu

SEQ ID NO: 517765 - RNA, 22 nt, Human
cugagcugguggaagcaugcag

SEQ ID NO: 517766 - RNA, 19 nt, Human
gucccugggcagaggcacc

SEQ ID NO: 517767 - RNA, 19 nt, Human
ggaagagaggaaaggugga

SEQ ID NO: 517768 - RNA, 22 nt, Human
ccagcuuuccaggguugacugg

SEQ ID NO: 517769 - RNA, 22 nt, Human
guuccuuggaagaacuugaggu

SEQ ID NO: 517770 - RNA, 22 nt, Human
auguguauacuugugcuuacuc

SEQ ID NO: 517771 - RNA, 22 nt, Human
aggcugaugcuggcugaggcug

SEQ ID NO: 517772 - RNA, 22 nt, Human
aauguguguucggggcccagag

SEQ ID NO: 517773 - RNA, 22 nt, Human
ucuggcccaaguuuucggugag

SEQ ID NO: 517774 - RNA, 22 nt, Human
acugggcuaccccaccauuacc

SEQ ID NO: 517775 - RNA, 22 nt, Human
auguuucaucaguaagguuuug

SEQ ID NO: 517776 - RNA, 22 nt, Human
cuggccuguccugacccagccu

SEQ ID NO: 517777 - RNA, 22 nt, Human
acagguggcuuauuggcugauu

SEQ ID NO: 517778 - RNA, 20 nt, Human
agugugcauuuagagucugc

SEQ ID NO: 517779 - RNA, 22 nt, Human
caguacuuaacuuauaggagag

SEQ ID NO: 517780 - RNA, 22 nt, Human
cagcugagucugagguucuuug

SEQ ID NO: 517781 - RNA, 22 nt, Human
ugguccugucucaaggagccuu

SEQ ID NO: 517782 - RNA, 22 nt, Human
cagcuucuauuuaucuuugugu

SEQ ID NO: 517783 - RNA, 22 nt, Human
ggucuuccgagaggccugugcu

SEQ ID NO: 517784 - RNA, 22 nt, Human
auaugccauuagcuagaaauaa

SEQ ID NO: 517785 - RNA, 22 nt, Human
gcaggucuaucaggcugcaggu

SEQ ID NO: 517786 - RNA, 22 nt, Human
auauacaggugguauguguaaa

SEQ ID NO: 517787 - RNA, 22 nt, Human
ucagagcugcccaugcaagggg

SEQ ID NO: 517788 - RNA, 22 nt, Human
ggcucaggcuggagugcagugg

SEQ ID NO: 517789 - RNA, 22 nt, Human
uguggcugugguuuucauaaau

SEQ ID NO: 517790 - RNA, 22 nt, Human
gagcuguccgccccugggccga

SEQ ID NO: 517791 - RNA, 22 nt, Human
agccugcuggaccaagcucaug

SEQ ID NO: 517792 - RNA, 22 nt, Human
ccuuugugguggcccagugugg

SEQ ID NO: 517793 - RNA, 23 nt, Human
agacccagagacuggcucugcuc

SEQ ID NO: 517794 - RNA, 22 nt, Human
aggcuggcccuacuggcugccu

SEQ ID NO: 517795 - RNA, 22 nt, Human
gggagggcuuggacccagaugu

SEQ ID NO: 517796 - RNA, 17 nt, Human
cguggcugagccauaga

SEQ ID NO: 517797 - RNA, 18 nt, Human
cacaggcaggugauaggu

SEQ ID NO: 517798 - RNA, 22 nt, Human
aaguucaagucuccugaguaua

SEQ ID NO: 517799 - RNA, 22 nt, Human
aggaugagagauacauggagca

SEQ ID NO: 517800 - RNA, 22 nt, Human
agcagccaauuggaggaugaag

SEQ ID NO: 517801 - RNA, 22 nt, Human
agagcucugcagcuggccucag

SEQ ID NO: 517802 - RNA, 22 nt, Human
gcaguguuucccagagauggaa

SEQ ID NO: 517803 - RNA, 22 nt, Human
cacagggcaggccccaggccuc

SEQ ID NO: 517804 - RNA, 19 nt, Human
ccaccccuuugcugggccc

SEQ ID NO: 517805 - RNA, 22 nt, Human
acagauauaaacuauaguagug

SEQ ID NO: 517806 - RNA, 22 nt, Human
ugaaacacugcgauaaaauccu

SEQ ID NO: 517807 - RNA, 22 nt, Human
ugugcaguuucuauguugucca

SEQ ID NO: 517808 - RNA, 22 nt, Human
uccagagccugcgcacuggcug

SEQ ID NO: 517809 - RNA, 23 nt, Human
aggaacugaggccuagggaggua

SEQ ID NO: 517810 - RNA, 22 nt, Human
cucugggcaccaaagagcagcu

SEQ ID NO: 517811 - RNA, 22 nt, Human
gugagcagaacagguggcuucu

SEQ ID NO: 517812 - RNA, 23 nt, Human
uucauuuaggaguucauaagagc

SEQ ID NO: 517813 - RNA, 22 nt, Human
gugggcugcccuugaggucagc

SEQ ID NO: 517814 - RNA, 22 nt, Human
uuguaaaugaccuuuucuaauu

SEQ ID NO: 517815 - RNA, 22 nt, Human
uguguacauauacacaaauaca

SEQ ID NO: 517816 - RNA, 23 nt, Human
agcaguaacuucagaaacaucag

SEQ ID NO: 517817 - RNA, 22 nt, Human
uccaggcuggacaugaggcggg

SEQ ID NO: 517818 - RNA, 20 nt, Human
gugggcagcaggcauacugg

SEQ ID NO: 517819 - RNA, 20 nt, Human
uggcaucucucaauuguagg

SEQ ID NO: 517820 - RNA, 22 nt, Human
cuggcaugaaauggcaucucau

SEQ ID NO: 517821 - RNA, 22 nt, Human
ugacagggugauuaugagagcu

SEQ ID NO: 517822 - RNA, 22 nt, Human
uuugaugaguuuaauaacagcc

SEQ ID NO: 517823 - RNA, 22 nt, Human
gcucugcucccucaaaugacau

SEQ ID NO: 517824 - RNA, 22 nt, Human
gggcgagggcgaaagcgagagc

SEQ ID NO: 517825 - RNA, 22 nt, Human
cacauuucuaggaaauuaaaug

SEQ ID NO: 517826 - RNA, 22 nt, Human
agcuggguucagaggcacaugg

SEQ ID NO: 517827 - RNA, 21 nt, Human
ccaggcugggagggcaguucc

SEQ ID NO: 517828 - RNA, 22 nt, Human
uagcagugccaggauuuugcug

SEQ ID NO: 517829 - RNA, 22 nt, Human
ugcuucuggaaacaguggcugu

SEQ ID NO: 517830 - RNA, 22 nt, Human
uuccucuccucacaugagucac

SEQ ID NO: 517831 - RNA, 22 nt, Human
gcugccuucccggaaugucauc

SEQ ID NO: 517832 - RNA, 22 nt, Human
uccuagaacuccaggacagucc

SEQ ID NO: 517833 - RNA, 22 nt, Human
uuccauaaugagauucccagcc

SEQ ID NO: 517834 - RNA, 20 nt, Human
aagauucauuguaauuaggg

SEQ ID NO: 517835 - RNA, 22 nt, Human
aauuacaaauguagacucucau

SEQ ID NO: 517836 - RNA, 22 nt, Human
uaggccauucuuggagcuuacu

SEQ ID NO: 517837 - RNA, 22 nt, Human
agagguauuagauuugcauagg

SEQ ID NO: 517838 - RNA, 22 nt, Human
guuuugugaggcacccacaggu

SEQ ID NO: 517839 - RNA, 22 nt, Human
cucuguagaaacagggcagaag

SEQ ID NO: 517840 - RNA, 22 nt, Human
uuuccacaauguuuuugcagga

SEQ ID NO: 517841 - RNA, 22 nt, Human
agggggcucagugacugaagug

SEQ ID NO: 517842 - RNA, 22 nt, Human
gggcaguggcucacgccuguaa

SEQ ID NO: 517843 - RNA, 22 nt, Human
agggcugccauuucuggcccaa

SEQ ID NO: 517844 - RNA, 22 nt, Human
gcucccagaaccaaggcugggg

SEQ ID NO: 517845 - RNA, 22 nt, Human
caggaugaagggcaaaggcaag

SEQ ID NO: 517846 - RNA, 22 nt, Human
uuaaagauucugaggcugauua

SEQ ID NO: 517847 - RNA, 18 nt, Human
acagaaauagcugugccu

SEQ ID NO: 517848 - RNA, 22 nt, Human
augagcugugggauuccagagg

SEQ ID NO: 517849 - RNA, 17 nt, Human
gugcagggaugaaggau

SEQ ID NO: 517850 - RNA, 22 nt, Human
acagagauguggaugagggauu

SEQ ID NO: 517851 - RNA, 22 nt, Human
gcuggccuucugcagaguucug

SEQ ID NO: 517852 - RNA, 22 nt, Human
ugccaggcauauggccucuuug

SEQ ID NO: 517853 - RNA, 22 nt, Human
agaugcugugaggaagcuagga

SEQ ID NO: 517854 - RNA, 22 nt, Human
ucagccugcgucauggugacac

SEQ ID NO: 517855 - RNA, 22 nt, Human
ggugcaaagauggcaguugcaa

SEQ ID NO: 517856 - RNA, 22 nt, Human
ggaaaucaugggagaguuggaa

SEQ ID NO: 517857 - RNA, 22 nt, Human
aguguuucuggcaaaugaaagu

SEQ ID NO: 517858 - RNA, 22 nt, Human
uccucagaugcucuuggacgcc

SEQ ID NO: 517859 - RNA, 22 nt, Human
ggccugcuauuggugggcagac

SEQ ID NO: 517860 - RNA, 22 nt, Human
ggggacugccuuccacagacac

SEQ ID NO: 517861 - RNA, 22 nt, Human
ccagaggaaaaauaucucccua

SEQ ID NO: 517862 - RNA, 22 nt, Human
ccagcccuugagauggaaggga

SEQ ID NO: 517863 - RNA, 22 nt, Human
gaaucaaaucaaguucuuuuga

SEQ ID NO: 517864 - RNA, 21 nt, Human
aaguggagaagaaaagcugga

SEQ ID NO: 517865 - RNA, 20 nt, Human
ugcuguaagauuagagagcu

SEQ ID NO: 517866 - RNA, 23 nt, Human
aguuccagaaaaaugcucaagca

SEQ ID NO: 517867 - RNA, 22 nt, Human
caggagccccaggcugacaaua

SEQ ID NO: 517868 - RNA, 20 nt, Human
cagaaggucuaagcuuuaga

SEQ ID NO: 517869 - RNA, 22 nt, Human
uugcccuggggcuggccuggca

SEQ ID NO: 517870 - RNA, 23 nt, Human
ucacuagucaagugccuuugagu

SEQ ID NO: 517871 - RNA, 22 nt, Human
ucaaggagcccacagucuaaug

SEQ ID NO: 517872 - RNA, 22 nt, Human
gaaggaagugcucauacuaguu

SEQ ID NO: 517873 - RNA, 22 nt, Human
acugggcuccaaggaccuggag

SEQ ID NO: 517874 - RNA, 22 nt, Human
gaagcuaaaccacagcuaagaa

SEQ ID NO: 517875 - RNA, 21 nt, Human
uucugccuuccccuagcuggg

SEQ ID NO: 517876 - RNA, 22 nt, Human
ugaaacaagggaccguccuuuc

SEQ ID NO: 517877 - RNA, 22 nt, Human
aacauuuaugguagucauugca

SEQ ID NO: 517878 - RNA, 22 nt, Human
ugaagccuuguguggccucucu

SEQ ID NO: 517879 - RNA, 22 nt, Human
agaaaauauucauugagaggcu

SEQ ID NO: 517880 - RNA, 22 nt, Human
cagcaaucgggugauaugcaau

SEQ ID NO: 517881 - RNA, 22 nt, Human
ggccugugcaagacagcacccc

SEQ ID NO: 517882 - RNA, 22 nt, Human
cagagcugguaagugguagagg

SEQ ID NO: 517883 - RNA, 22 nt, Human
gguggagcuguggacaggaagg

SEQ ID NO: 517884 - RNA, 22 nt, Human
gccuguuuccaucaacacaugc

SEQ ID NO: 517885 - RNA, 22 nt, Human
ccaguguuuacaguugaacaaa

SEQ ID NO: 517886 - RNA, 22 nt, Human
ugguggggucaucgucagaugc

SEQ ID NO: 517887 - RNA, 22 nt, Human
aucugggcucgaauccuagcuc

SEQ ID NO: 517888 - RNA, 23 nt, Human
ggacacaggccuugucugcgccu

SEQ ID NO: 517889 - RNA, 22 nt, Human
uacagucacauucugaggucuu

SEQ ID NO: 517890 - RNA, 22 nt, Human
gucagcagugucagcucugggg

SEQ ID NO: 517891 - RNA, 22 nt, Human
gggcaugccugcgcagugcaug

SEQ ID NO: 517892 - RNA, 22 nt, Human
agagaaggcauagaacuugagu

SEQ ID NO: 517893 - RNA, 22 nt, Human
gccucugcaucaucacuccagc

SEQ ID NO: 517894 - RNA, 21 nt, Human
cugaggcagcacagcuaguca

SEQ ID NO: 517895 - RNA, 22 nt, Human
gcuggcugaggucuagcucuuu

SEQ ID NO: 517896 - RNA, 22 nt, Human
ugcugaaugggugauuuuggag

SEQ ID NO: 517897 - RNA, 22 nt, Human
uccuccagugucuggggccuug

SEQ ID NO: 517898 - RNA, 22 nt, Human
aaacacagggauauauauucca

SEQ ID NO: 517899 - RNA, 22 nt, Human
cuggggaaggcggugacugcgc

SEQ ID NO: 517900 - RNA, 22 nt, Human
agaacugguggugaucaguuau

SEQ ID NO: 517901 - RNA, 22 nt, Human
agauauuuguaucuugcuauug

SEQ ID NO: 517902 - RNA, 22 nt, Human
ccucaugguacuuacuguagcu

SEQ ID NO: 517903 - RNA, 22 nt, Human
ucuuuacaguccucugucaauc

SEQ ID NO: 517904 - RNA, 22 nt, Human
gucuccugagacugcagucacc

SEQ ID NO: 517905 - RNA, 22 nt, Human
cuuguuuucuaaaacaucauuu

SEQ ID NO: 517906 - RNA, 22 nt, Human
uucugucuucccacugaggagc

SEQ ID NO: 517907 - RNA, 22 nt, Human
acugauacaucuguggaagugg

SEQ ID NO: 517908 - RNA, 22 nt, Human
accaccccaaaugaaccucugu

SEQ ID NO: 517909 - RNA, 20 nt, Human
aguuuauuccaggagaacug

SEQ ID NO: 517910 - RNA, 22 nt, Human
ucucugggaaugggccugggua

SEQ ID NO: 517911 - RNA, 22 nt, Human
ugguuucucagacucuuugcag

SEQ ID NO: 517912 - RNA, 22 nt, Human
acucagugaauuuucaucaaau

SEQ ID NO: 517913 - RNA, 18 nt, Human
uccugccugcgggcuccc

SEQ ID NO: 517914 - RNA, 22 nt, Human
gaaacuguauguaguuuuuggg

SEQ ID NO: 517915 - RNA, 22 nt, Human
gcagggacaccuuugugaagcu

SEQ ID NO: 517916 - RNA, 22 nt, Human
guccucaguaagagggccucug

SEQ ID NO: 517917 - RNA, 22 nt, Human
ucccaggcuggcaggcagcagu

SEQ ID NO: 517918 - RNA, 22 nt, Human
augcaaaaguaauugcaauuuu

SEQ ID NO: 517919 - RNA, 22 nt, Human
uuccugugauauuagccacugu

SEQ ID NO: 517920 - RNA, 22 nt, Human
guccugggaggggcugguccug

SEQ ID NO: 517921 - RNA, 22 nt, Human
ccaggccagcgcuggcuggagg

SEQ ID NO: 517922 - RNA, 22 nt, Human
aacaaagucguugccuagaaga

SEQ ID NO: 517923 - RNA, 22 nt, Human
ggccagaguugauggcaucuug

SEQ ID NO: 517924 - RNA, 22 nt, Human
uuaugcuaagugcaacaagcca

SEQ ID NO: 517925 - RNA, 22 nt, Human
agaacaaugcguauuuuacucc

SEQ ID NO: 517926 - RNA, 22 nt, Human
ucuggaguguguguauucagcu

SEQ ID NO: 517927 - RNA, 22 nt, Human
uacauacauuaccucauuuagu

SEQ ID NO: 517928 - RNA, 22 nt, Human
ggaggccacgguuuagcaccga

SEQ ID NO: 517929 - RNA, 22 nt, Human
ucuucaggaagggaaaucaucc

SEQ ID NO: 517930 - RNA, 22 nt, Human
guggaagggacugccuagagga

SEQ ID NO: 517931 - RNA, 22 nt, Human
guguaauuauauaaagaucuac

SEQ ID NO: 517932 - RNA, 22 nt, Human
uuuggaaugguaccuucaguug

SEQ ID NO: 517933 - RNA, 22 nt, Human
auugaaagauuuugggcucaug

SEQ ID NO: 517934 - RNA, 22 nt, Human
agcaggucuugcucucaacagg

SEQ ID NO: 517935 - RNA, 22 nt, Human
cugggucuggaggccaagggug

SEQ ID NO: 517936 - RNA, 22 nt, Human
caggauggugugagugugagga

SEQ ID NO: 517937 - RNA, 22 nt, Human
cccucugccucugaguaggaca

SEQ ID NO: 517938 - RNA, 22 nt, Human
auacauguaacugcauuguaau

SEQ ID NO: 517939 - RNA, 20 nt, Human
agcauuugaaauaugacuau

SEQ ID NO: 517940 - RNA, 22 nt, Human
aagcuucaguggacuguagugu

SEQ ID NO: 517941 - RNA, 18 nt, Human
ucagcuuuugaaaaccaa

SEQ ID NO: 517942 - RNA, 22 nt, Human
cugcucugugguccaugagaca

SEQ ID NO: 517943 - RNA, 22 nt, Human
cuccagugcuucuagaaaauac

SEQ ID NO: 517944 - RNA, 22 nt, Human
cccucucucgguugcugugguu

SEQ ID NO: 517945 - RNA, 22 nt, Human
ccuacauucucugaguuuuccu

SEQ ID NO: 517946 - RNA, 22 nt, Human
uacuguauuugauaagugaagu

SEQ ID NO: 517947 - RNA, 22 nt, Human
uaaggaaagugccaugauuucu

SEQ ID NO: 517948 - RNA, 22 nt, Human
cugggcugcaggaguggggcaa

SEQ ID NO: 517949 - RNA, 22 nt, Human
uaaaugugcacuuuacuuuuca

SEQ ID NO: 517950 - RNA, 22 nt, Human
acauguuugauaaauauuuggg

SEQ ID NO: 517951 - RNA, 22 nt, Human
ccuccaggcugaauaucuagaa

SEQ ID NO: 517952 - RNA, 22 nt, Human
cuguguuuugauuaaaaagcaa

SEQ ID NO: 517953 - RNA, 22 nt, Human
agggcucaauggugggcaugua

SEQ ID NO: 517954 - RNA, 22 nt, Human
aucuguguaugugaccuuaucu

SEQ ID NO: 517955 - RNA, 22 nt, Human
uauaaaguuucgaaagauguau

SEQ ID NO: 517956 - RNA, 20 nt, Human
ggguggaguugcggucugug

SEQ ID NO: 517957 - RNA, 22 nt, Human
gaaaucaauuucuugguugaua

SEQ ID NO: 517958 - RNA, 22 nt, Human
gcugcaggagcuggagcugugg

SEQ ID NO: 517959 - RNA, 22 nt, Human
cucuggagcgcugcuucccgcg

SEQ ID NO: 517960 - RNA, 22 nt, Human
gcauuuggaacuugguugagau

SEQ ID NO: 517961 - RNA, 22 nt, Human
cguuggagacacuugaggacuu

SEQ ID NO: 517962 - RNA, 22 nt, Human
gagagcugcaagguagggcggg

SEQ ID NO: 517963 - RNA, 22 nt, Human
uauuucuucgggauucaagcua

SEQ ID NO: 517964 - RNA, 22 nt, Human
caaaugaauuucccugcaaaug

SEQ ID NO: 517965 - RNA, 22 nt, Human
uauuauuauaguuauugggaag

SEQ ID NO: 517966 - RNA, 22 nt, Human
ggcaggcaggucuucauggccc

SEQ ID NO: 517967 - RNA, 22 nt, Human
uucagcuucauuugucuuuaug

SEQ ID NO: 517968 - RNA, 22 nt, Human
gugucccagcagcacauuggcu

SEQ ID NO: 517969 - RNA, 22 nt, Human
uccuggccuuagcgaggcgguc

SEQ ID NO: 517970 - RNA, 22 nt, Human
cacagcuucccaaaguggaccu

SEQ ID NO: 517971 - RNA, 22 nt, Human
cacaugggcguaauguccaugg

SEQ ID NO: 517972 - RNA, 22 nt, Human
aaauuucuaagcagccacuucc

SEQ ID NO: 517973 - RNA, 22 nt, Human
caugcuggucagccaguggaug

SEQ ID NO: 517974 - RNA, 22 nt, Human
ucucaggagccacagcgggagu

SEQ ID NO: 517975 - RNA, 23 nt, Human
uggagcugacagucagagggagg

SEQ ID NO: 517976 - RNA, 22 nt, Human
ggcaggcucuuggccuuaugag

SEQ ID NO: 517977 - RNA, 22 nt, Human
ugaaagguguccaauauuucuc

SEQ ID NO: 517978 - RNA, 21 nt, Human
aagcuuggcugauguuauugg

SEQ ID NO: 517979 - RNA, 23 nt, Human
ucccagccucuucucuugcauac

SEQ ID NO: 517980 - RNA, 22 nt, Human
ggagaggugcaggucaguggca

SEQ ID NO: 517981 - RNA, 22 nt, Human
cagcuuguuuuauuuggggacc

SEQ ID NO: 517982 - RNA, 22 nt, Human
ccaggcccugcuccucacacca

SEQ ID NO: 517983 - RNA, 22 nt, Human
uuuaccauccucuuuuagaauu

SEQ ID NO: 517984 - RNA, 22 nt, Human
cugggccuuggauugacacugu

SEQ ID NO: 517985 - RNA, 22 nt, Human
acugcagcaaagcccgugucuu

SEQ ID NO: 517986 - RNA, 22 nt, Human
uggccucaccacuagcugggug

SEQ ID NO: 517987 - RNA, 22 nt, Human
ugauucaacuuucuugaaugca

SEQ ID NO: 517988 - RNA, 22 nt, Human
ugagccaggaguuugaggcugu

SEQ ID NO: 517989 - RNA, 19 nt, Human
uacuuuuucaggacagagu

SEQ ID NO: 517990 - RNA, 22 nt, Human
ggcacugacugugcagcgcacc

SEQ ID NO: 517991 - RNA, 22 nt, Human
ucaguguuagacaaguuuggaa

SEQ ID NO: 517992 - RNA, 22 nt, Human
aagacacagcgaaauguuccug

SEQ ID NO: 517993 - RNA, 22 nt, Human
ugccugugucacagugauguuu

SEQ ID NO: 517994 - RNA, 22 nt, Human
aacaaauguguuuuguaauuaa

SEQ ID NO: 517995 - RNA, 22 nt, Human
uaagaacaucuguccccagauu

SEQ ID NO: 517996 - RNA, 23 nt, Human
ggacacauuuauuucagaauuca

SEQ ID NO: 517997 - RNA, 22 nt, Human
aagauuuacuagcauaauagcu

SEQ ID NO: 517998 - RNA, 22 nt, Human
ccugacaggagaagcgcagcau

SEQ ID NO: 517999 - RNA, 20 nt, Human
ccaggccugggccugcucua

SEQ ID NO: 518000 - RNA, 22 nt, Human
gcugccugcacagagcugcuuu

SEQ ID NO: 518001 - RNA, 22 nt, Human
ggcuggaaguccaagaucaagg

SEQ ID NO: 518002 - RNA, 23 nt, Human
uugcauguagcccaugaguaacu

SEQ ID NO: 518003 - RNA, 19 nt, Human
ugcagccacgugagagacu

SEQ ID NO: 518004 - RNA, 22 nt, Human
uggcugagcugcagcguggcuu

SEQ ID NO: 518005 - RNA, 22 nt, Human
ucaaacuguuuacagugagaua

SEQ ID NO: 518006 - RNA, 22 nt, Human
cuuccucacggugcaacaggaa

SEQ ID NO: 518007 - RNA, 22 nt, Human
aaggcugaggcuggagaauuac

SEQ ID NO: 518008 - RNA, 22 nt, Human
gggaucuuucugaugcuguggc

SEQ ID NO: 518009 - RNA, 16 nt, Human
ccucugggauguuugc

SEQ ID NO: 518010 - RNA, 22 nt, Human
gggaaggagccugcuugcuaga

SEQ ID NO: 518011 - RNA, 22 nt, Human
gcugcuucucugauggagucca

SEQ ID NO: 518012 - RNA, 22 nt, Human
agcaguccaacugagguggcau

SEQ ID NO: 518013 - RNA, 22 nt, Human
uaugagaacugacagagugcca

SEQ ID NO: 518014 - RNA, 22 nt, Human
caaaguucucggcucaaguccu

SEQ ID NO: 518015 - RNA, 22 nt, Human
uccugagaugagacagugcugc

SEQ ID NO: 518016 - RNA, 22 nt, Human
gcugggccagagcagcagcacu

SEQ ID NO: 518017 - RNA, 22 nt, Human
gcaggagaaaugaagauugggu

SEQ ID NO: 518018 - RNA, 22 nt, Human
ccugucuggccaccagggcgau

SEQ ID NO: 518019 - RNA, 21 nt, Human
acagggcaugcagcuggcugu

SEQ ID NO: 518020 - RNA, 22 nt, Human
aggacccagaggcagaggacgu

SEQ ID NO: 518021 - RNA, 20 nt, Human
aucuuugucucuguaguugu

SEQ ID NO: 518022 - RNA, 22 nt, Human
cucuccaggacuuuggcccaau

SEQ ID NO: 518023 - RNA, 22 nt, Human
acacauguauggcacuuacauu

SEQ ID NO: 518024 - RNA, 22 nt, Human
caguacauuucauaugauucua

SEQ ID NO: 518025 - RNA, 22 nt, Human
ugugcuucuugcagcuccugua

SEQ ID NO: 518026 - RNA, 22 nt, Human
cugagccuuauucaccagcccu

SEQ ID NO: 518027 - RNA, 23 nt, Human
uguguucucacacagaugcagua

SEQ ID NO: 518028 - RNA, 22 nt, Human
ugcagggaaaguguuggcagca

SEQ ID NO: 518029 - RNA, 22 nt, Human
ugguccuguagcucucuaaguu

SEQ ID NO: 518030 - RNA, 22 nt, Human
ucuuuuaucuguuguguaacaa

SEQ ID NO: 518031 - RNA, 22 nt, Human
agucagacauaauucuaacauu

SEQ ID NO: 518032 - RNA, 22 nt, Human
uuccugagcuuuuaaccuaguc

SEQ ID NO: 518033 - RNA, 22 nt, Human
ccuugugcagguucaugauggg

SEQ ID NO: 518034 - RNA, 22 nt, Human
ggccugagcagacagcaugaug

SEQ ID NO: 518035 - RNA, 22 nt, Human
uggaaggagacugggaagugug

SEQ ID NO: 518036 - RNA, 22 nt, Human
cugggcucuagaaaggaaagaa

SEQ ID NO: 518037 - RNA, 22 nt, Human
gagguagccacagauagagacu

SEQ ID NO: 518038 - RNA, 22 nt, Human
ccugugggcccuggacagagac

SEQ ID NO: 518039 - RNA, 22 nt, Human
uuuacagaaugucaauuucuau

SEQ ID NO: 518040 - RNA, 22 nt, Human
agggugccugcugcagguucag

SEQ ID NO: 518041 - RNA, 22 nt, Human
cagggcagccaggccccguggg

SEQ ID NO: 518042 - RNA, 22 nt, Human
aucuuaaucgaguccaugaaaa

SEQ ID NO: 518043 - RNA, 22 nt, Human
uagcuucaugcuucaccacgcu

SEQ ID NO: 518044 - RNA, 22 nt, Human
gcugagagugagcacuggauau

SEQ ID NO: 518045 - RNA, 22 nt, Human
uuggcucuggaacuauuucuga

SEQ ID NO: 518046 - RNA, 20 nt, Human
uauaaauucagagcuuuggu

SEQ ID NO: 518047 - RNA, 22 nt, Human
cagggcucgcucgcucgcucgc

SEQ ID NO: 518048 - RNA, 22 nt, Human
aggagccaguuccaccccagga

SEQ ID NO: 518049 - RNA, 22 nt, Human
caugucuuauauccugucuuca

SEQ ID NO: 518050 - RNA, 22 nt, Human
uucuuaaagaggcaaaacacag

SEQ ID NO: 518051 - RNA, 22 nt, Human
uaggugggugacuuccaugggg

SEQ ID NO: 518052 - RNA, 22 nt, Human
aguugaauaauuagacauaucu

SEQ ID NO: 518053 - RNA, 22 nt, Human
cuuacaagaccaaagaaaggau

SEQ ID NO: 518054 - RNA, 22 nt, Human
auugacaaggaaacuauaccag

SEQ ID NO: 518055 - RNA, 18 nt, Human
cagagcaguaugaauguu

SEQ ID NO: 518056 - RNA, 22 nt, Human
ggguccaggcacuaugcuaagu

SEQ ID NO: 518057 - RNA, 22 nt, Human
ucaguguugugcacauacaaaa

SEQ ID NO: 518058 - RNA, 19 nt, Human
cuauacagccucugaggaa

SEQ ID NO: 518059 - RNA, 22 nt, Human
gagugcaucguggccauuuuaa

SEQ ID NO: 518060 - RNA, 22 nt, Human
gccuggagaaaggaagguggga

SEQ ID NO: 518061 - RNA, 22 nt, Human
gucuggggaagucagggcauca

SEQ ID NO: 518062 - RNA, 22 nt, Human
uuuccagucucagcccuguaac

SEQ ID NO: 518063 - RNA, 22 nt, Human
aggcaggugcuuaugacuugcu

SEQ ID NO: 518064 - RNA, 22 nt, Human
aacaaguaaguuuauauauauu

SEQ ID NO: 518065 - RNA, 22 nt, Human
agggagcucaguuggaagcggu

SEQ ID NO: 518066 - RNA, 23 nt, Human
auaaggcauaaagguacauugga

SEQ ID NO: 518067 - RNA, 22 nt, Human
aaauggaggcacgcagugguua

SEQ ID NO: 518068 - RNA, 22 nt, Human
ggggaugguagaccggugacgu

SEQ ID NO: 518069 - RNA, 22 nt, Human
ccugggcagggagaccaggcuc

SEQ ID NO: 518070 - RNA, 19 nt, Human
agagacugccaccagcugu

SEQ ID NO: 518071 - RNA, 22 nt, Human
uggaagagggagcuggguggcc

SEQ ID NO: 518072 - RNA, 22 nt, Human
gagucaguaauggauaugucau

SEQ ID NO: 518073 - RNA, 22 nt, Human
ucuucuuccucauuuauacaua

SEQ ID NO: 518074 - RNA, 20 nt, Human
uaacagaaguagaagugggu

SEQ ID NO: 518075 - RNA, 22 nt, Human
ugauuacaguauuugagaucca

SEQ ID NO: 518076 - RNA, 22 nt, Human
ugggccagaggcauggagcuau

SEQ ID NO: 518077 - RNA, 22 nt, Human
ugggccagcacugggugcucau

SEQ ID NO: 518078 - RNA, 22 nt, Human
ucugccuggauuuuggaaagcu

SEQ ID NO: 518079 - RNA, 22 nt, Human
gauuucuuuaugaaguacagaa

SEQ ID NO: 518080 - RNA, 22 nt, Human
caugcacaaagguaagaugcgu

SEQ ID NO: 518081 - RNA, 22 nt, Human
uggcacaggaucucagcggcca

SEQ ID NO: 518082 - RNA, 22 nt, Human
agcuacucugcagugcccaugg

SEQ ID NO: 518083 - RNA, 22 nt, Human
augaaaacggaccagagcuauu

SEQ ID NO: 518084 - RNA, 16 nt, Human
ggguccagaucugcuc

SEQ ID NO: 518085 - RNA, 22 nt, Human
caccugcagggggagucaagag

SEQ ID NO: 518086 - RNA, 22 nt, Human
uccugagggcauuuuggugacu

SEQ ID NO: 518087 - RNA, 22 nt, Human
cauucccacguguucuuugcuu

SEQ ID NO: 518088 - RNA, 22 nt, Human
aagcagcugauuucacagcuca

SEQ ID NO: 518089 - RNA, 22 nt, Human
aggcucagcaucugauucauau

SEQ ID NO: 518090 - RNA, 22 nt, Human
aggcaggccuacacaaugggag

SEQ ID NO: 518091 - RNA, 21 nt, Human
ucacacacguuuccaagggca

SEQ ID NO: 518092 - RNA, 22 nt, Human
aacaaacauuaccuggugcugg

SEQ ID NO: 518093 - RNA, 22 nt, Human
acacaugugucugcaugcagug

SEQ ID NO: 518094 - RNA, 22 nt, Human
ggcccuguccccuucaguuuug

SEQ ID NO: 518095 - RNA, 22 nt, Human
gcacagccugucccuguccugg

SEQ ID NO: 518096 - RNA, 22 nt, Human
ugcugucugcaacaguacuaca

SEQ ID NO: 518097 - RNA, 21 nt, Human
agguccaguucugucuuggac

SEQ ID NO: 518098 - RNA, 22 nt, Human
cagagcagucuggagauccagc

SEQ ID NO: 518099 - RNA, 22 nt, Human
ggagccagggaagcugcuuccu

SEQ ID NO: 518100 - RNA, 22 nt, Human
ucucuuaauaaguaaauacuga

SEQ ID NO: 518101 - RNA, 17 nt, Human
ucugaggccucuaggag

SEQ ID NO: 518102 - RNA, 22 nt, Human
ugagcagagucgcuccagagug

SEQ ID NO: 518103 - RNA, 22 nt, Human
uggccuguggcuuaaggucugu

SEQ ID NO: 518104 - RNA, 22 nt, Human
ggcuccuuaucucuccuaugcc

SEQ ID NO: 518105 - RNA, 20 nt, Human
gugcaauggcucagucucag

SEQ ID NO: 518106 - RNA, 22 nt, Human
auuucacagcgugguugacugc

SEQ ID NO: 518107 - RNA, 22 nt, Human
ugcaaucucggcacuuugggag

SEQ ID NO: 518108 - RNA, 22 nt, Human
uuccauuguuucugucuucacu

SEQ ID NO: 518109 - RNA, 22 nt, Human
aggcauggcauggggcagaugu

SEQ ID NO: 518110 - RNA, 23 nt, Human
cucaccaagcgccgccgcugugu

SEQ ID NO: 518111 - RNA, 19 nt, Human
aagggcugggcaccucacu

SEQ ID NO: 518112 - RNA, 22 nt, Human
uccuggagggaggcggugcuac

SEQ ID NO: 518113 - RNA, 18 nt, Human
aggagccuuugcacugga

SEQ ID NO: 518114 - RNA, 22 nt, Human
cuguggagcagggcagggucac

SEQ ID NO: 518115 - RNA, 22 nt, Human
ggcucuggagcacagacgucug

SEQ ID NO: 518116 - RNA, 23 nt, Human
ggagugcaauggcgccaucucgg

SEQ ID NO: 518117 - RNA, 22 nt, Human
ugcacaaaggcucccugcugag

SEQ ID NO: 518118 - RNA, 22 nt, Human
agcccuggaagccacaguccua

SEQ ID NO: 518119 - RNA, 21 nt, Human
ccugggagaucagcugccuuc

SEQ ID NO: 518120 - RNA, 22 nt, Human
ggacugggaaucagggagaugc

SEQ ID NO: 518121 - RNA, 22 nt, Human
ccacagccauuccagggaggcu

SEQ ID NO: 518122 - RNA, 22 nt, Human
ggcaggacauugacuacaguga

SEQ ID NO: 518123 - RNA, 22 nt, Human
uuauuacacugaaagaauugcg

SEQ ID NO: 518124 - RNA, 22 nt, Human
accaggcagcugggggugaugu

SEQ ID NO: 518125 - RNA, 22 nt, Human
gcaggagcugcucuccugacga

SEQ ID NO: 518126 - RNA, 19 nt, Human
ugucucugaaagaugagcu

SEQ ID NO: 518127 - RNA, 22 nt, Human
uguaugaaugggaaaaggaaac

SEQ ID NO: 518128 - RNA, 22 nt, Human
acugucaccuaaauuuucauug

SEQ ID NO: 518129 - RNA, 22 nt, Human
uauuagcuccaguacuguugcc

SEQ ID NO: 518130 - RNA, 22 nt, Human
auuugcuuguaaauguaugccu

SEQ ID NO: 518131 - RNA, 22 nt, Human
ggagagugggagcaacuguugc

SEQ ID NO: 518132 - RNA, 22 nt, Human
ugaacccaggagguugcaguga

SEQ ID NO: 518133 - RNA, 22 nt, Human
aauuagcuuuaccuaggauugu

SEQ ID NO: 518134 - RNA, 22 nt, Human
gcagcaucuagggcacuggccu

SEQ ID NO: 518135 - RNA, 22 nt, Human
auuccuuggcauucuggacuug

SEQ ID NO: 518136 - RNA, 22 nt, Human
gcuuggaaguaggauugggaga

SEQ ID NO: 518137 - RNA, 22 nt, Human
gagauguuauucuucagugugu

SEQ ID NO: 518138 - RNA, 22 nt, Human
caugcuuucuguccaaauguua

SEQ ID NO: 518139 - RNA, 22 nt, Human
cuggguuuuauuacagugagcu

SEQ ID NO: 518140 - RNA, 22 nt, Human
uggaaacugugguauuucuuua

SEQ ID NO: 518141 - RNA, 22 nt, Human
ugcccugcagugagugcgucug

SEQ ID NO: 518142 - RNA, 22 nt, Human
gcuuaguguaggaccuggaaua

SEQ ID NO: 518143 - RNA, 22 nt, Human
gcaugugucuccccaguggagg

SEQ ID NO: 518144 - RNA, 22 nt, Human
gccuggcucccucugcagcucc

SEQ ID NO: 518145 - RNA, 22 nt, Human
acaaauguggacauggauaaug

SEQ ID NO: 518146 - RNA, 20 nt, Human
cuggcaggagcgagucuacc

SEQ ID NO: 518147 - RNA, 22 nt, Human
uuagaucuuaggcaaauguguu

SEQ ID NO: 518148 - RNA, 22 nt, Human
uguagcucuccagccagcaagg

SEQ ID NO: 518149 - RNA, 22 nt, Human
uucuggagccccaagaucugua

SEQ ID NO: 518150 - RNA, 22 nt, Human
caaagauaugacauggaaaaug

SEQ ID NO: 518151 - RNA, 22 nt, Human
cugaauaauuuuauaguugcug

SEQ ID NO: 518152 - RNA, 22 nt, Human
cccugcaggcucagacuggagu

SEQ ID NO: 518153 - RNA, 17 nt, Human
gaaagguccuagaaauc

SEQ ID NO: 518154 - RNA, 20 nt, Human
uaggcagagcugugcagccu

SEQ ID NO: 518155 - RNA, 22 nt, Human
cucuggccgcagcucagcucug

SEQ ID NO: 518156 - RNA, 22 nt, Human
uucaggauaugugauaucugaa

SEQ ID NO: 518157 - RNA, 22 nt, Human
acugggcuguaaagagaggcaa

SEQ ID NO: 518158 - RNA, 22 nt, Human
uuugugaauucuuggaagauug

SEQ ID NO: 518159 - RNA, 22 nt, Human
uucacauuugcccuuaugugug

SEQ ID NO: 518160 - RNA, 22 nt, Human
gaggaggaggaaguggaaccca

SEQ ID NO: 518161 - RNA, 22 nt, Human
uuguguccugauuugacacaau

SEQ ID NO: 518162 - RNA, 22 nt, Human
gccagggaaacugcagaccagc

SEQ ID NO: 518163 - RNA, 22 nt, Human
gggaaggcaccaugguguucca

SEQ ID NO: 518164 - RNA, 22 nt, Human
uuagcauuucaguacacauguu

SEQ ID NO: 518165 - RNA, 21 nt, Human
cacaagacacauaggguguuu

SEQ ID NO: 518166 - RNA, 22 nt, Human
ugagcagaaaagaaugcugagc

SEQ ID NO: 518167 - RNA, 22 nt, Human
uccaaauucuagggccuugguu

SEQ ID NO: 518168 - RNA, 22 nt, Human
aacacuguaacagcaucauuuu

SEQ ID NO: 518169 - RNA, 22 nt, Human
acuggcugaaaguaaagaacac

SEQ ID NO: 518170 - RNA, 22 nt, Human
acauacauggauucauggauuc

SEQ ID NO: 518171 - RNA, 20 nt, Human
agagguucagucuggagaag

SEQ ID NO: 518172 - RNA, 22 nt, Human
ccagggugagugucauggguua

SEQ ID NO: 518173 - RNA, 22 nt, Human
ugucucuggcccaugagcagag

SEQ ID NO: 518174 - RNA, 19 nt, Human
cugaagucuuuucagcugg

SEQ ID NO: 518175 - RNA, 22 nt, Human
gccuggcuggucacugccuggc

SEQ ID NO: 518176 - RNA, 22 nt, Human
caucugcuguuccuuggacuca

SEQ ID NO: 518177 - RNA, 22 nt, Human
ggcaugucugauggcccaaguc

SEQ ID NO: 518178 - RNA, 22 nt, Human
cagagccagcaguggggacagg

SEQ ID NO: 518179 - RNA, 22 nt, Human
aaauaugaaugauaagaguuau

SEQ ID NO: 518180 - RNA, 22 nt, Human
ucacagcaggguaacaggaaga

SEQ ID NO: 518181 - RNA, 22 nt, Human
guucuccauucagcuuccugug

SEQ ID NO: 518182 - RNA, 22 nt, Human
agaugcugccucuccucacaag

SEQ ID NO: 518183 - RNA, 22 nt, Human
uuuaugagcaaugcugagggga

SEQ ID NO: 518184 - RNA, 20 nt, Human
gaaguccuuucacucuuccc

SEQ ID NO: 518185 - RNA, 22 nt, Human
agcagcauacacaucauguuga

SEQ ID NO: 518186 - RNA, 22 nt, Human
cauagaaaucaggugagaaucu

SEQ ID NO: 518187 - RNA, 22 nt, Human
cugaggcuuggaggggucuggu

SEQ ID NO: 518188 - RNA, 22 nt, Human
uaacucuagucccaggcaugaa

SEQ ID NO: 518189 - RNA, 20 nt, Human
guugaaaguaauaugaugcu

SEQ ID NO: 518190 - RNA, 22 nt, Human
cuagggacagaaagaggguaga

SEQ ID NO: 518191 - RNA, 22 nt, Human
cuucaaaugugauuuuaauaac

SEQ ID NO: 518192 - RNA, 22 nt, Human
uuccuucuuccagaggcugccc

SEQ ID NO: 518193 - RNA, 22 nt, Human
agggcagugggaaagccugcuc

SEQ ID NO: 518194 - RNA, 22 nt, Human
uuguuuccauugcagacugugu

SEQ ID NO: 518195 - RNA, 22 nt, Human
ucccagaguuuccuguguccca

SEQ ID NO: 518196 - RNA, 22 nt, Human
uggcucaguaaucgagucuccu

SEQ ID NO: 518197 - RNA, 22 nt, Human
uguuccuguacugcuguggcuu

SEQ ID NO: 518198 - RNA, 22 nt, Human
agcagcuucuuucacuccugga

SEQ ID NO: 518199 - RNA, 22 nt, Human
uguuccugacggccaaagaggu

SEQ ID NO: 518200 - RNA, 23 nt, Human
ccugugugcccuuaauucacagc

SEQ ID NO: 518201 - RNA, 22 nt, Human
aaaaguguccagauuaugaaga

SEQ ID NO: 518202 - RNA, 22 nt, Human
acaggccuuggcaggcauguga

SEQ ID NO: 518203 - RNA, 22 nt, Human
acacugaauaauugagaguuga

SEQ ID NO: 518204 - RNA, 22 nt, Human
uccaagcucucuaugccaugau

SEQ ID NO: 518205 - RNA, 22 nt, Human
aggccaaguagcuagcauugaa

SEQ ID NO: 518206 - RNA, 22 nt, Human
ccaggcucaggccugcucguug

SEQ ID NO: 518207 - RNA, 22 nt, Human
uauguacacuuaaguuugagaa

SEQ ID NO: 518208 - RNA, 22 nt, Human
uccugcagcugauaaauacagu

SEQ ID NO: 518209 - RNA, 22 nt, Human
cuguggcuccauagaaguugca

SEQ ID NO: 518210 - RNA, 22 nt, Human
uugaacauuaacuucagucuau

SEQ ID NO: 518211 - RNA, 22 nt, Human
cagaggcuguguaggcagacug

SEQ ID NO: 518212 - RNA, 22 nt, Human
ugauuuuuggaucugagcugca

SEQ ID NO: 518213 - RNA, 22 nt, Human
gccuuagccugcacuuccuguu

SEQ ID NO: 518214 - RNA, 22 nt, Human
uuucagugcacguaguuuauuu

SEQ ID NO: 518215 - RNA, 22 nt, Human
caguuucuuagugacacaaauc

SEQ ID NO: 518216 - RNA, 22 nt, Human
auucuaggcuugaaacaugaag

SEQ ID NO: 518217 - RNA, 22 nt, Human
uacauuccuucguuuagagauu

SEQ ID NO: 518218 - RNA, 22 nt, Human
ggcugaaaggugggaggauggc

SEQ ID NO: 518219 - RNA, 22 nt, Human
acucaggagggaucagcuauca

SEQ ID NO: 518220 - RNA, 22 nt, Human
gaggaaaucauuccagaaaagg

SEQ ID NO: 518221 - RNA, 22 nt, Human
caggacagagcccagacugugu

SEQ ID NO: 518222 - RNA, 22 nt, Human
cagcucugggugacaggagggc

SEQ ID NO: 518223 - RNA, 22 nt, Human
uaaaagacauauaacuguagga

SEQ ID NO: 518224 - RNA, 22 nt, Human
caccugagcacuggggccgccc

SEQ ID NO: 518225 - RNA, 22 nt, Human
ggagggcaacuuuucaguaggu

SEQ ID NO: 518226 - RNA, 22 nt, Human
uccugccucaggcucuggagua

SEQ ID NO: 518227 - RNA, 22 nt, Human
cuccucuggguccugguggcca

SEQ ID NO: 518228 - RNA, 22 nt, Human
uuacaaagaguguucuuuucca

SEQ ID NO: 518229 - RNA, 22 nt, Human
ugcucucucaggccuggcccac

SEQ ID NO: 518230 - RNA, 19 nt, Human
agagccagacagcauagga

SEQ ID NO: 518231 - RNA, 22 nt, Human
uuaccaagcucugcauguuaag

SEQ ID NO: 518232 - RNA, 22 nt, Human
gcugggcagccuggccgcugcc

SEQ ID NO: 518233 - RNA, 22 nt, Human
aucucuggccuuccuuuuccaa

SEQ ID NO: 518234 - RNA, 23 nt, Human
uccagcucccuucaauggcacug

SEQ ID NO: 518235 - RNA, 22 nt, Human
cagggugacugcccuggccacu

SEQ ID NO: 518236 - RNA, 22 nt, Human
augggcugcuucuccagcaccu

SEQ ID NO: 518237 - RNA, 22 nt, Human
ccuggcuuccauauggcacaua

SEQ ID NO: 518238 - RNA, 23 nt, Human
ugcagcucaaagauggguaaaug

SEQ ID NO: 518239 - RNA, 22 nt, Human
uggugcugccaccuccucugcu

SEQ ID NO: 518240 - RNA, 22 nt, Human
aaaucuaggcucauccuggucc

SEQ ID NO: 518241 - RNA, 22 nt, Human
ugggccuggagcccuggagagu

SEQ ID NO: 518242 - RNA, 21 nt, Human
ggcaagaaacacaaucaagua

SEQ ID NO: 518243 - RNA, 21 nt, Human
ugggcacugagggugcugcuc

SEQ ID NO: 518244 - RNA, 22 nt, Human
ccaggcuccccaggaggcccuu

SEQ ID NO: 518245 - RNA, 22 nt, Human
uggcccuguguccugcugccag

SEQ ID NO: 518246 - RNA, 21 nt, Human
guagggacagagaguugguga

SEQ ID NO: 518247 - RNA, 22 nt, Human
ccuuuggguucaaucucggucu

SEQ ID NO: 518248 - RNA, 20 nt, Human
caggaugauuggacacgaug

SEQ ID NO: 518249 - RNA, 22 nt, Human
aucucuggguccauagaagaga

SEQ ID NO: 518250 - RNA, 23 nt, Human
ucagagaaguuguaggcugggga

SEQ ID NO: 518251 - RNA, 19 nt, Human
agcaggccacagggccagc

SEQ ID NO: 518252 - RNA, 22 nt, Human
cugccucaugcugccugcagcc

SEQ ID NO: 518253 - RNA, 22 nt, Human
auggcagaccuccuggccacaa

SEQ ID NO: 518254 - RNA, 22 nt, Human
aggcuggaguacaguggcuauu

SEQ ID NO: 518255 - RNA, 22 nt, Human
agagccagagaccuggguucac

SEQ ID NO: 518256 - RNA, 22 nt, Human
ucucuggcccuguuuucuaucu

SEQ ID NO: 518257 - RNA, 22 nt, Human
uuucuaagugugauuuuagauu

SEQ ID NO: 518258 - RNA, 22 nt, Human
gcagaaggucuggcacuucagg

SEQ ID NO: 518259 - RNA, 22 nt, Human
ccucccugcgcuccugcggcgg

SEQ ID NO: 518260 - RNA, 22 nt, Human
ccaggucuuggcccccggaccu

SEQ ID NO: 518261 - RNA, 22 nt, Human
gcuggguuuccagcaggcagga

SEQ ID NO: 518262 - RNA, 22 nt, Human
ucuucuuuuugucccacagaau

SEQ ID NO: 518263 - RNA, 22 nt, Human
ggaggaugagcuacgaggagcu

SEQ ID NO: 518264 - RNA, 22 nt, Human
uuuacuguucaacuugcaagua

SEQ ID NO: 518265 - RNA, 22 nt, Human
acacagaagcuuuuucuauucc

SEQ ID NO: 518266 - RNA, 22 nt, Human
cuucagcagaugcaaaaccccu

SEQ ID NO: 518267 - RNA, 22 nt, Human
cuggagccagccagggcccucu

SEQ ID NO: 518268 - RNA, 22 nt, Human
acuggggaguugaagcacuuuc

SEQ ID NO: 518269 - RNA, 22 nt, Human
ucccauggucuauauagaggca

SEQ ID NO: 518270 - RNA, 22 nt, Human
gcccagucucuucuggcccugu

SEQ ID NO: 518271 - RNA, 22 nt, Human
uggcagcuccggguaggggcug

SEQ ID NO: 518272 - RNA, 22 nt, Human
uucugagccucauucaugaggc

SEQ ID NO: 518273 - RNA, 20 nt, Human
aggagaugauccagagucag

SEQ ID NO: 518274 - RNA, 22 nt, Human
ucacauguguuuucucaccaac

SEQ ID NO: 518275 - RNA, 22 nt, Human
uuuuauguaauccuuacugucg

SEQ ID NO: 518276 - RNA, 22 nt, Human
gccuaauaacuagcuguguaac

SEQ ID NO: 518277 - RNA, 22 nt, Human
agucagcagugaaagcacagcc

SEQ ID NO: 518278 - RNA, 22 nt, Human
ccccagccagcaggaccucuga

SEQ ID NO: 518279 - RNA, 22 nt, Human
ugagaaugaaucuuuugcuuuc

SEQ ID NO: 518280 - RNA, 21 nt, Human
uggcagaguugaguaguuaug

SEQ ID NO: 518281 - RNA, 22 nt, Human
acucagagaaacagcagggugu

SEQ ID NO: 518282 - RNA, 22 nt, Human
ugaccuauuagauuuccuugcc

SEQ ID NO: 518283 - RNA, 22 nt, Human
cuccucaguugucccauggaga

SEQ ID NO: 518284 - RNA, 22 nt, Human
uuuaucuuuggaucuucagaaa

SEQ ID NO: 518285 - RNA, 22 nt, Human
cuugagcuaggaaggcugaggc

SEQ ID NO: 518286 - RNA, 22 nt, Human
acuguucauccuuuuugaacaa

SEQ ID NO: 518287 - RNA, 20 nt, Human
ggagagcagggaagacagua

SEQ ID NO: 518288 - RNA, 22 nt, Human
auucuacaaucauguagauccu

SEQ ID NO: 518289 - RNA, 22 nt, Human
gagaaccucuccacaagucugg

SEQ ID NO: 518290 - RNA, 22 nt, Human
ugggggacugcacuggcgucag

SEQ ID NO: 518291 - RNA, 22 nt, Human
uaauguguugaauauuuguaca

SEQ ID NO: 518292 - RNA, 22 nt, Human
gccuguuucuccuccuuggccc

SEQ ID NO: 518293 - RNA, 22 nt, Human
caagagcuagacuuugucagga

SEQ ID NO: 518294 - RNA, 22 nt, Human
auaucuuuguuuuugccaagau

SEQ ID NO: 518295 - RNA, 22 nt, Human
cccaccccuggacaggugagug

SEQ ID NO: 518296 - RNA, 22 nt, Human
cuggcccuggagggcugugcga

SEQ ID NO: 518297 - RNA, 22 nt, Human
agagcuggccagggaucacucu

SEQ ID NO: 518298 - RNA, 22 nt, Human
gcuccuggguguggcugccccu

SEQ ID NO: 518299 - RNA, 22 nt, Human
gaaagcacaguucugaccaugu

SEQ ID NO: 518300 - RNA, 22 nt, Human
guuuacaaauauuuuaaauggu

SEQ ID NO: 518301 - RNA, 22 nt, Human
agcagcaggagccgugggguga

SEQ ID NO: 518302 - RNA, 22 nt, Human
ggccagggccaaggcuuuccca

SEQ ID NO: 518303 - RNA, 19 nt, Human
ucauuguugguuugucggg

SEQ ID NO: 518304 - RNA, 22 nt, Human
gcaguuuuauuaugauggaaau

SEQ ID NO: 518305 - RNA, 22 nt, Human
aguggcagccgagcaggagaug

SEQ ID NO: 518306 - RNA, 23 nt, Human
uggcccugaaucuguccuggagg

SEQ ID NO: 518307 - RNA, 22 nt, Human
ucacauacugaaaguccaguga

SEQ ID NO: 518308 - RNA, 22 nt, Human
aagggcugagaaguggggcugg

SEQ ID NO: 518309 - RNA, 22 nt, Human
gagagucuaggaaccucauaua

SEQ ID NO: 518310 - RNA, 22 nt, Human
uguguucaugucacuggaaucc

SEQ ID NO: 518311 - RNA, 18 nt, Human
gggcucacacaggucauc

SEQ ID NO: 518312 - RNA, 22 nt, Human
uuauaaagauuguuauguaucu

SEQ ID NO: 518313 - RNA, 22 nt, Human
cuagucacgucuuucaguuacc

SEQ ID NO: 518314 - RNA, 22 nt, Human
uggccugggccggcagauauac

SEQ ID NO: 518315 - RNA, 22 nt, Human
ggugcuggacacguggcacucc

SEQ ID NO: 518316 - RNA, 22 nt, Human
guuauguaaucuaacacucagu

SEQ ID NO: 518317 - RNA, 23 nt, Human
gcugaauguaauguucuuugggu

SEQ ID NO: 518318 - RNA, 22 nt, Human
cugaggcacugguaaugggcau

SEQ ID NO: 518319 - RNA, 22 nt, Human
ggcagcucacugauuagcaauu

SEQ ID NO: 518320 - RNA, 22 nt, Human
uggguccuggcuuugucagggu

SEQ ID NO: 518321 - RNA, 22 nt, Human
gacagcuuagugaaaauguaaa

SEQ ID NO: 518322 - RNA, 22 nt, Human
auaugucgcuacaucauuagau

SEQ ID NO: 518323 - RNA, 22 nt, Human
uucagagagaccaaguggcgug

SEQ ID NO: 518324 - RNA, 22 nt, Human
ugucugggagggacagggcuac

SEQ ID NO: 518325 - RNA, 22 nt, Human
ugcagaagauggucugagcacc

SEQ ID NO: 518326 - RNA, 22 nt, Human
acccgggaggcaggagucauag

SEQ ID NO: 518327 - RNA, 22 nt, Human
uuccgcuggggccgccuggcgg

SEQ ID NO: 518328 - RNA, 22 nt, Human
aacaucagaauauccauguugg

SEQ ID NO: 518329 - RNA, 22 nt, Human
ugggccugugaugcugggcuau

SEQ ID NO: 518330 - RNA, 22 nt, Human
aauggccagcaacaggagugaa

SEQ ID NO: 518331 - RNA, 22 nt, Human
gcagcugagcgugaggaagagu

SEQ ID NO: 518332 - RNA, 22 nt, Human
ugccuugcagguuuuaaauaca

SEQ ID NO: 518333 - RNA, 22 nt, Human
auaugauuccacuauuguaugg

SEQ ID NO: 518334 - RNA, 22 nt, Human
gagcugccugaacaagcagcag

SEQ ID NO: 518335 - RNA, 22 nt, Human
gcagcuuuguaaaguaugaagc

SEQ ID NO: 518336 - RNA, 22 nt, Human
gagguggauguugcagugagcu

SEQ ID NO: 518337 - RNA, 23 nt, Human
guaaaauacgcagugcaguguga

SEQ ID NO: 518338 - RNA, 21 nt, Human
cccuugccugcacuccucggc

SEQ ID NO: 518339 - RNA, 22 nt, Human
uuugggaaacuuaggggucaga

SEQ ID NO: 518340 - RNA, 22 nt, Human
ugucucugggugauucaguccu

SEQ ID NO: 518341 - RNA, 22 nt, Human
ugcuuuuaagaacaaugcugcu

SEQ ID NO: 518342 - RNA, 22 nt, Human
cagcuucugcucauggaggggu

SEQ ID NO: 518343 - RNA, 22 nt, Human
cuguaaauaugaagaauauaug

SEQ ID NO: 518344 - RNA, 22 nt, Human
ugugugaggacucagugaaaca

SEQ ID NO: 518345 - RNA, 22 nt, Human
ugugggaagauguugcaggaga

SEQ ID NO: 518346 - RNA, 22 nt, Human
acucugggcccacccucagagu

SEQ ID NO: 518347 - RNA, 22 nt, Human
uggcucugggcaccguguccac

SEQ ID NO: 518348 - RNA, 20 nt, Human
ucccaggcugggcuccagcu

SEQ ID NO: 518349 - RNA, 22 nt, Human
agugccaggagcaaggagcucc

SEQ ID NO: 518350 - RNA, 22 nt, Human
agguggagugugcagggagagc

SEQ ID NO: 518351 - RNA, 22 nt, Human
uucucaugaaacucgcuuccuc

SEQ ID NO: 518352 - RNA, 22 nt, Human
cugcugagcccuggcacaggug

SEQ ID NO: 518353 - RNA, 22 nt, Human
gagagaaagccccugcaucccu

SEQ ID NO: 518354 - RNA, 22 nt, Human
uggcugccgacuggcucuuggc

SEQ ID NO: 518355 - RNA, 21 nt, Human
uuggaauuugggagcuaugug

SEQ ID NO: 518356 - RNA, 22 nt, Human
caccuucagaaugcuccaggca

SEQ ID NO: 518357 - RNA, 22 nt, Human
ucauuugugugagugauuugac

SEQ ID NO: 518358 - RNA, 22 nt, Human
uuccugguaguaagacaucugg

SEQ ID NO: 518359 - RNA, 22 nt, Human
aggaaaaaagucugugauuaua

SEQ ID NO: 518360 - RNA, 22 nt, Human
uggggaaacuauuuccuugucc

SEQ ID NO: 518361 - RNA, 22 nt, Human
aggcauggauguagcagugacc

SEQ ID NO: 518362 - RNA, 22 nt, Human
uccauuuucuaaguaucacuua

SEQ ID NO: 518363 - RNA, 22 nt, Human
cuggcccugccuaauguacuug

SEQ ID NO: 518364 - RNA, 22 nt, Human
gccacagggcgagcggaggcca

SEQ ID NO: 518365 - RNA, 20 nt, Human
ucagguagaucuuugagguc

SEQ ID NO: 518366 - RNA, 22 nt, Human
acauucaaaaagcaucugucac

SEQ ID NO: 518367 - RNA, 22 nt, Human
uuaauuaaauucaugagcauug

SEQ ID NO: 518368 - RNA, 22 nt, Human
gggaaacugcaacucagagagg

SEQ ID NO: 518369 - RNA, 22 nt, Human
augggaggcaggcucagaaccg

SEQ ID NO: 518370 - RNA, 22 nt, Human
aucagaagcuuguagucucucu

SEQ ID NO: 518371 - RNA, 22 nt, Human
gagaggccaccugacgagcagu

SEQ ID NO: 518372 - RNA, 22 nt, Human
ucaggauggcuucugcaucaaa

SEQ ID NO: 518373 - RNA, 22 nt, Human
aagugaagaaauacaugagaau

SEQ ID NO: 518374 - RNA, 22 nt, Human
ccugggcucaggcuugggcagc

SEQ ID NO: 518375 - RNA, 22 nt, Human
ugaggauggggagauggugucu

SEQ ID NO: 518376 - RNA, 22 nt, Human
ggagcagggaauuacagcgcag

SEQ ID NO: 518377 - RNA, 22 nt, Human
ggagucccagcaaagccuuccc

SEQ ID NO: 518378 - RNA, 19 nt, Human
ucugccucuggucaggcuc

SEQ ID NO: 518379 - RNA, 19 nt, Human
gcucagagacaccuguugc

SEQ ID NO: 518380 - RNA, 22 nt, Human
uccuaguucucugccagucgcu

SEQ ID NO: 518381 - RNA, 22 nt, Human
gcaaggcugagcacauuugcau

SEQ ID NO: 518382 - RNA, 22 nt, Human
gugucauggaaaauugcaaugg

SEQ ID NO: 518383 - RNA, 22 nt, Human
acugugcuuucucuggaggcau

SEQ ID NO: 518384 - RNA, 22 nt, Human
ucuggcuccugaguccaugcuc

SEQ ID NO: 518385 - RNA, 22 nt, Human
ggcugcugggaauaugccagcu

SEQ ID NO: 518386 - RNA, 22 nt, Human
gcucuggaagcaucugagagga

SEQ ID NO: 518387 - RNA, 22 nt, Human
agcaggugacagggcuguggug

SEQ ID NO: 518388 - RNA, 22 nt, Human
aagauguugggugccuccggaa

SEQ ID NO: 518389 - RNA, 22 nt, Human
ccaguucugacacaagcacagu

SEQ ID NO: 518390 - RNA, 22 nt, Human
ggcccagccucagacaugcccu

SEQ ID NO: 518391 - RNA, 19 nt, Human
ccuguacauuauucucccc

SEQ ID NO: 518392 - RNA, 22 nt, Human
acagacagauuuugucugaugu

SEQ ID NO: 518393 - RNA, 22 nt, Human
agcugccaaguuggaguagcaa

SEQ ID NO: 518394 - RNA, 17 nt, Human
ucaggcugugccuggua

SEQ ID NO: 518395 - RNA, 22 nt, Human
accucccagcucugagcuuggg

SEQ ID NO: 518396 - RNA, 22 nt, Human
auccucgucugcacaucaaagg

SEQ ID NO: 518397 - RNA, 22 nt, Human
gcacagagugggugagaugugg

SEQ ID NO: 518398 - RNA, 22 nt, Human
uuuguacauauauaaaaucugu

SEQ ID NO: 518399 - RNA, 23 nt, Human
ucagugugcaagaauggagaagc

SEQ ID NO: 518400 - RNA, 19 nt, Human
aucugccuguuaucacaua

SEQ ID NO: 518401 - RNA, 22 nt, Human
cuuccucugcggcgccgggcgc

SEQ ID NO: 518402 - RNA, 22 nt, Human
aaggcaggagcuguaucuuauu

SEQ ID NO: 518403 - RNA, 22 nt, Human
caugggagguuggcuuggcaug

SEQ ID NO: 518404 - RNA, 22 nt, Human
caaaugcuggcccugcuacuua

SEQ ID NO: 518405 - RNA, 23 nt, Human
ucccagggaaggugagcgaggcu

SEQ ID NO: 518406 - RNA, 22 nt, Human
caagagcucagaaacccuugcu

SEQ ID NO: 518407 - RNA, 22 nt, Human
uugaagauucuuuuuguuagua

SEQ ID NO: 518408 - RNA, 22 nt, Human
agaacagcagcacgucaagcug

SEQ ID NO: 518409 - RNA, 22 nt, Human
aggcacagcacaccuggccccc

SEQ ID NO: 518410 - RNA, 22 nt, Human
uguggcuguguccaccugcugc

SEQ ID NO: 518411 - RNA, 22 nt, Human
ucagcaggcacaccaaaaacug

SEQ ID NO: 518412 - RNA, 22 nt, Human
gggcagcagcaggaggucucug

SEQ ID NO: 518413 - RNA, 22 nt, Human
uuucagagucuggcugcagccu

SEQ ID NO: 518414 - RNA, 18 nt, Human
ccagcaugccagaggcug

SEQ ID NO: 518415 - RNA, 22 nt, Human
aggguaggaacugaguggaagg

SEQ ID NO: 518416 - RNA, 22 nt, Human
gugcugcagagucucgugccgc

SEQ ID NO: 518417 - RNA, 22 nt, Human
cuucagaaacuaguaacagcua

SEQ ID NO: 518418 - RNA, 22 nt, Human
aggcagggucuugcuauguugc

SEQ ID NO: 518419 - RNA, 22 nt, Human
cugcaggauucucccaguugga

SEQ ID NO: 518420 - RNA, 22 nt, Human
caaagagcuguucagugucgcu

SEQ ID NO: 518421 - RNA, 22 nt, Human
uuccaauuuguggugaguuaau

SEQ ID NO: 518422 - RNA, 22 nt, Human
gccuggagacagcagaggcggc

SEQ ID NO: 518423 - RNA, 22 nt, Human
caggguggggaaauagcgcccu

SEQ ID NO: 518424 - RNA, 22 nt, Human
agcugcugagagucugccgggc

SEQ ID NO: 518425 - RNA, 22 nt, Human
uccuggaguauuucuguggugu

SEQ ID NO: 518426 - RNA, 22 nt, Human
cuaugaccccagcaugaauaag

SEQ ID NO: 518427 - RNA, 22 nt, Human
uuugaaaggaauuaggaugaca

SEQ ID NO: 518428 - RNA, 22 nt, Human
caggccuccacuccacgcagac

SEQ ID NO: 518429 - RNA, 22 nt, Human
aggaaacuggguaugguuauac

SEQ ID NO: 518430 - RNA, 22 nt, Human
ugacagugcaugugacaaagga

SEQ ID NO: 518431 - RNA, 18 nt, Human
uucucugguggauguuau

SEQ ID NO: 518432 - RNA, 22 nt, Human
augaccaguuuccccacugucc

SEQ ID NO: 518433 - RNA, 22 nt, Human
cuggcucccagcuuucagggag

SEQ ID NO: 518434 - RNA, 22 nt, Human
ccucagggaaugggaggcuggg

SEQ ID NO: 518435 - RNA, 22 nt, Human
ggagaucuuuaggaguuggacu

SEQ ID NO: 518436 - RNA, 22 nt, Human
uguauuuucuucuggaagcuua

SEQ ID NO: 518437 - RNA, 22 nt, Human
guaacaaaguuucuaggugcug

SEQ ID NO: 518438 - RNA, 22 nt, Human
ugagaauuuuuugucaugcauu

SEQ ID NO: 518439 - RNA, 22 nt, Human
agccuggagaagauguguauug

SEQ ID NO: 518440 - RNA, 23 nt, Human
gggggcgugucauggagggccac

SEQ ID NO: 518441 - RNA, 22 nt, Human
ucuggcaggcaaucggcucugg

SEQ ID NO: 518442 - RNA, 22 nt, Human
ccugccugguguaagucuaagg

SEQ ID NO: 518443 - RNA, 21 nt, Human
gccagcugcagggcuuccuug

SEQ ID NO: 518444 - RNA, 22 nt, Human
gcaagauguuaacauagggaga

SEQ ID NO: 518445 - RNA, 22 nt, Human
aaugaacaggugaaugucagau

SEQ ID NO: 518446 - RNA, 22 nt, Human
uuucuaaguguguuucauagga

SEQ ID NO: 518447 - RNA, 22 nt, Human
uugcauugauguuccuucuugc

SEQ ID NO: 518448 - RNA, 22 nt, Human
ccacagagcauuagauuucaga

SEQ ID NO: 518449 - RNA, 22 nt, Human
ggaugagguagaugaacaaggg

SEQ ID NO: 518450 - RNA, 22 nt, Human
gugccugguuuggggaguguuc

SEQ ID NO: 518451 - RNA, 22 nt, Human
uagcugcccaucuuuccuuuag

SEQ ID NO: 518452 - RNA, 22 nt, Human
gguucaguuuacauuaaaaucu

SEQ ID NO: 518453 - RNA, 22 nt, Human
acagaaauugggcaaauggaag

SEQ ID NO: 518454 - RNA, 19 nt, Human
ugaagcaggcagagaagau

SEQ ID NO: 518455 - RNA, 22 nt, Human
ggacugggccagggguuggacu

SEQ ID NO: 518456 - RNA, 22 nt, Human
ugucuucaaauauugaaauccu

SEQ ID NO: 518457 - RNA, 22 nt, Human
uaggaaauugacaccugcuuga

SEQ ID NO: 518458 - RNA, 22 nt, Human
gaagaagccucuguggaucuga

SEQ ID NO: 518459 - RNA, 22 nt, Human
acauuucuugaugccucuguga

SEQ ID NO: 518460 - RNA, 22 nt, Human
uccuucaaagcuccuagugagc

SEQ ID NO: 518461 - RNA, 22 nt, Human
ucuuguuucuguauauaaugac

SEQ ID NO: 518462 - RNA, 22 nt, Human
gugcuggcuggacauggagcac

SEQ ID NO: 518463 - RNA, 22 nt, Human
gaagaaagggaauuaacuugag

SEQ ID NO: 518464 - RNA, 22 nt, Human
aggagccaguggaguuccugcc

SEQ ID NO: 518465 - RNA, 20 nt, Human
gcucuuuguaagggaauuug

SEQ ID NO: 518466 - RNA, 22 nt, Human
uugcucagcacuggagccagcu

SEQ ID NO: 518467 - RNA, 22 nt, Human
cuggaggcugaguugggucucc

SEQ ID NO: 518468 - RNA, 22 nt, Human
aaagacacacagccagcaagug

SEQ ID NO: 518469 - RNA, 22 nt, Human
auuuacagaagcauguaauagc

SEQ ID NO: 518470 - RNA, 22 nt, Human
ucuccucugugccacagcuugg

SEQ ID NO: 518471 - RNA, 22 nt, Human
aagcagcugcagguucaaagga

SEQ ID NO: 518472 - RNA, 22 nt, Human
gggugggccugucuggccaugu

SEQ ID NO: 518473 - RNA, 22 nt, Human
accaucagucauugucaguggg

SEQ ID NO: 518474 - RNA, 22 nt, Human
uggggcugucccgguuuggcga

SEQ ID NO: 518475 - RNA, 22 nt, Human
ugagaaaagguugagaugauaa

SEQ ID NO: 518476 - RNA, 22 nt, Human
ugcccugggaacacagaugcca

SEQ ID NO: 518477 - RNA, 22 nt, Human
gaaauagaucucugggaugcaa

SEQ ID NO: 518478 - RNA, 22 nt, Human
cugaaagaauaagauguuuaca

SEQ ID NO: 518479 - RNA, 22 nt, Human
auucagagcacuggguagaauu

SEQ ID NO: 518480 - RNA, 22 nt, Human
caguguggugagauuccaggug

SEQ ID NO: 518481 - RNA, 22 nt, Human
guauuuuucauuccaagugaga

SEQ ID NO: 518482 - RNA, 22 nt, Human
ggcacagcacaguggacccagg

SEQ ID NO: 518483 - RNA, 22 nt, Human
ggugcagaucuuucucuucagg

SEQ ID NO: 518484 - RNA, 22 nt, Human
cagcuuauucaguaagcacaua

SEQ ID NO: 518485 - RNA, 22 nt, Human
auuucugauaaacguaagcugc

SEQ ID NO: 518486 - RNA, 22 nt, Human
uaugaagauauaucugaucucu

SEQ ID NO: 518487 - RNA, 22 nt, Human
gggcacugugcuaggugcugag

SEQ ID NO: 518488 - RNA, 20 nt, Human
gggaugagaguccuagcucu

SEQ ID NO: 518489 - RNA, 22 nt, Human
ggcgcuggccacgguggcucug

SEQ ID NO: 518490 - RNA, 22 nt, Human
gcccuucauuuauaguuggaau

SEQ ID NO: 518491 - RNA, 21 nt, Human
gggaucugaggcaagucuccu

SEQ ID NO: 518492 - RNA, 19 nt, Human
uggcagcauugguaccuug

SEQ ID NO: 518493 - RNA, 22 nt, Human
cagagccucagaauccugugga

SEQ ID NO: 518494 - RNA, 22 nt, Human
cauuucagugucuugugaugaa

SEQ ID NO: 518495 - RNA, 22 nt, Human
guggcugcagcccagcggcacg

SEQ ID NO: 518496 - RNA, 19 nt, Human
ucucaauguucagaaagcu

SEQ ID NO: 518497 - RNA, 22 nt, Human
uuggcauugaaguuucauuggu

SEQ ID NO: 518498 - RNA, 22 nt, Human
ugcugcucuguaaagugaugag

SEQ ID NO: 518499 - RNA, 22 nt, Human
ucucaggacuuugggaagcuca

SEQ ID NO: 518500 - RNA, 20 nt, Human
ugagaaaguagagacucagg

SEQ ID NO: 518501 - RNA, 22 nt, Human
aacaugaaaguugcuaagugca

SEQ ID NO: 518502 - RNA, 22 nt, Human
acagcaaucugagagacauagu

SEQ ID NO: 518503 - RNA, 22 nt, Human
caugggcuuuggaggcuggagg

SEQ ID NO: 518504 - RNA, 22 nt, Human
cagccaagaaagcagugcucca

SEQ ID NO: 518505 - RNA, 22 nt, Human
uauuucacauaccacagagugu

SEQ ID NO: 518506 - RNA, 22 nt, Human
uccuuaaaugugaucuagauuu

SEQ ID NO: 518507 - RNA, 21 nt, Human
uccuugcuauuuuccucagcu

SEQ ID NO: 518508 - RNA, 22 nt, Human
gugugccaccacugacaggauu

SEQ ID NO: 518509 - RNA, 22 nt, Human
uccuggugccuggagcucucca

SEQ ID NO: 518510 - RNA, 22 nt, Human
cugaggccagcugcagagcucu

SEQ ID NO: 518511 - RNA, 22 nt, Human
agcaccaucacagcuguauguc

SEQ ID NO: 518512 - RNA, 22 nt, Human
agccuucauaaucuugggcuuu

SEQ ID NO: 518513 - RNA, 22 nt, Human
ucuacuguagugaugcugcagu

SEQ ID NO: 518514 - RNA, 22 nt, Human
ggagucugcggcagacacugua

SEQ ID NO: 518515 - RNA, 22 nt, Human
gagguacagaguguuccaaugu

SEQ ID NO: 518516 - RNA, 22 nt, Human
cacuguacccauuuaaauaaau

SEQ ID NO: 518517 - RNA, 22 nt, Human
caggcacugugcaagggucucg

SEQ ID NO: 518518 - RNA, 19 nt, Human
uggaaaauggauugaauca

SEQ ID NO: 518519 - RNA, 22 nt, Human
uguuaaauugauucaccuuucu

SEQ ID NO: 518520 - RNA, 21 nt, Human
ggccuuggcgggggccgaauu

SEQ ID NO: 518521 - RNA, 22 nt, Human
auuugcuugacuauggcuugca

SEQ ID NO: 518522 - RNA, 22 nt, Human
gggaaggcaggccucuguugga

SEQ ID NO: 518523 - RNA, 22 nt, Human
gucaggauuuacaaacuucagu

SEQ ID NO: 518524 - RNA, 20 nt, Human
ugcagggcucugcuucucuc

SEQ ID NO: 518525 - RNA, 22 nt, Human
cuggagagauccuccugaaaaa

SEQ ID NO: 518526 - RNA, 22 nt, Human
ccuuugggguccugccugggcu

SEQ ID NO: 518527 - RNA, 22 nt, Human
aaaguucaugguguuauagaaa

SEQ ID NO: 518528 - RNA, 22 nt, Human
cccacacacauuuaugauagga

SEQ ID NO: 518529 - RNA, 23 nt, Human
uggccagguagaggagguaguga

SEQ ID NO: 518530 - RNA, 22 nt, Human
gcauccaaaccauucaucagcc

SEQ ID NO: 518531 - RNA, 22 nt, Human
uaaggccaaggggccauagucu

SEQ ID NO: 518532 - RNA, 22 nt, Human
acagugcauuauugcugaaugc

SEQ ID NO: 518533 - RNA, 22 nt, Human
caguggguaggaaaggcucuuc

SEQ ID NO: 518534 - RNA, 22 nt, Human
agggccuggaacugugggcagg

SEQ ID NO: 518535 - RNA, 20 nt, Human
ccagagcugauggcugcccg

SEQ ID NO: 518536 - RNA, 22 nt, Human
guggagacgggacagaagcuaa

SEQ ID NO: 518537 - RNA, 22 nt, Human
ccucugugggccgggccugcug

SEQ ID NO: 518538 - RNA, 22 nt, Human
uagagcuggaauuugcagcaag

SEQ ID NO: 518539 - RNA, 22 nt, Human
gaaggccacaaaaaaugucaua

SEQ ID NO: 518540 - RNA, 22 nt, Human
cuucaguuagccaauucagguc

SEQ ID NO: 518541 - RNA, 22 nt, Human
gggcagcagagcccugccgagu

SEQ ID NO: 518542 - RNA, 22 nt, Human
uaugagaagguauggugacuug

SEQ ID NO: 518543 - RNA, 22 nt, Human
uagacacaucaaguauaguuaa

SEQ ID NO: 518544 - RNA, 22 nt, Human
uucuggagcuaaaguccacucu

SEQ ID NO: 518545 - RNA, 22 nt, Human
agugcagagaccuggucaggca

SEQ ID NO: 518546 - RNA, 20 nt, Human
cagcugccuggcucugggau

SEQ ID NO: 518547 - RNA, 22 nt, Human
gagcaggucuuucauggugcau

SEQ ID NO: 518548 - RNA, 22 nt, Human
aaguuacaggagaaagagauca

SEQ ID NO: 518549 - RNA, 22 nt, Human
agaaacugaauuauuucugagg

SEQ ID NO: 518550 - RNA, 22 nt, Human
cuggacucauccauagagguga

SEQ ID NO: 518551 - RNA, 22 nt, Human
uggacaggaucugagacugaga

SEQ ID NO: 518552 - RNA, 22 nt, Human
uacaaaugaaccaacuuugaug

SEQ ID NO: 518553 - RNA, 22 nt, Human
agcccaggucuggcccagccug

SEQ ID NO: 518554 - RNA, 22 nt, Human
guucagggagggacagaugaag

SEQ ID NO: 518555 - RNA, 22 nt, Human
aggagaggcucuaacucugugu

SEQ ID NO: 518556 - RNA, 22 nt, Human
aaggaggccuggcagaugaaga

SEQ ID NO: 518557 - RNA, 22 nt, Human
ucuccucugcgcggcagugccc

SEQ ID NO: 518558 - RNA, 22 nt, Human
cuuuuacauuuguugaagagua

SEQ ID NO: 518559 - RNA, 22 nt, Human
ucacauacacuaggauauuuuu

SEQ ID NO: 518560 - RNA, 22 nt, Human
guccagccacccuggaggcacg

SEQ ID NO: 518561 - RNA, 22 nt, Human
gucauucagagaugcagguaga

SEQ ID NO: 518562 - RNA, 22 nt, Human
ccaggcuuuuagcugcauggca

SEQ ID NO: 518563 - RNA, 22 nt, Human
ggauggcaggacaaggacccag

SEQ ID NO: 518564 - RNA, 22 nt, Human
uccacuuuagcaaugauugaau

SEQ ID NO: 518565 - RNA, 22 nt, Human
ucccugggcaucacguugcuuc

SEQ ID NO: 518566 - RNA, 22 nt, Human
ggcugaggguuaagaucagaca

SEQ ID NO: 518567 - RNA, 22 nt, Human
aucagcugaaaaacaggcagca

SEQ ID NO: 518568 - RNA, 22 nt, Human
uggcucuggagcuccugggccc

SEQ ID NO: 518569 - RNA, 22 nt, Human
acagaggccucggccugcccag

SEQ ID NO: 518570 - RNA, 22 nt, Human
ccugaagcaaggguaggcaggu

SEQ ID NO: 518571 - RNA, 22 nt, Human
aagagcaaguggguagugaagc

SEQ ID NO: 518572 - RNA, 22 nt, Human
uuuguucaugccuauauucuca

SEQ ID NO: 518573 - RNA, 22 nt, Human
uaaauguguaaaccuccauuac

SEQ ID NO: 518574 - RNA, 22 nt, Human
ccaggcauccauugcuuccucu

SEQ ID NO: 518575 - RNA, 22 nt, Human
uggcucaguuaggucagaaaca

SEQ ID NO: 518576 - RNA, 22 nt, Human
guccaagucuuccuucccaaac

SEQ ID NO: 518577 - RNA, 22 nt, Human
agucauauguggcauuuucuaa

SEQ ID NO: 518578 - RNA, 22 nt, Human
ugcugaaagaccguauuuaucu

SEQ ID NO: 518579 - RNA, 22 nt, Human
gcuggauuggagcaauagaguc

SEQ ID NO: 518580 - RNA, 22 nt, Human
agaaggcagaugggacggagca

SEQ ID NO: 518581 - RNA, 22 nt, Human
acuggggagagucaugccagca

SEQ ID NO: 518582 - RNA, 22 nt, Human
cuacagacccaccuuggaagaa

SEQ ID NO: 518583 - RNA, 21 nt, Human
agccugcaauguagguaccgg

SEQ ID NO: 518584 - RNA, 22 nt, Human
ugcuucugggccugguguuccc

SEQ ID NO: 518585 - RNA, 22 nt, Human
ugugaauggacaauuaaaucua

SEQ ID NO: 518586 - RNA, 22 nt, Human
ucugucugccuugugagggcac

SEQ ID NO: 518587 - RNA, 21 nt, Human
gcagaaguggcuacaucucca

SEQ ID NO: 518588 - RNA, 22 nt, Human
ggaccuuccuggcuccuggggu

SEQ ID NO: 518589 - RNA, 22 nt, Human
caggcagcccugcaccaagugu

SEQ ID NO: 518590 - RNA, 22 nt, Human
gauuuccuaauguggaucucug

SEQ ID NO: 518591 - RNA, 22 nt, Human
acaaggcugaacagugaagccg

SEQ ID NO: 518592 - RNA, 22 nt, Human
ucaagucuggagaucuggaacu

SEQ ID NO: 518593 - RNA, 22 nt, Human
aggcugcuggcaggcguggacg

SEQ ID NO: 518594 - RNA, 22 nt, Human
ugaggcagugugagauaauaaa

SEQ ID NO: 518595 - RNA, 22 nt, Human
cccaggcagugcugaucccuca

SEQ ID NO: 518596 - RNA, 22 nt, Human
gagguccacugaggcaacaggg

SEQ ID NO: 518597 - RNA, 22 nt, Human
ugugcacaggaagcuauucucu

SEQ ID NO: 518598 - RNA, 19 nt, Human
agucucaguguacagaggc

SEQ ID NO: 518599 - RNA, 22 nt, Human
cuggggaggcagggcugccccu

SEQ ID NO: 518600 - RNA, 22 nt, Human
caaugucaugauuuuccauuag

SEQ ID NO: 518601 - RNA, 22 nt, Human
cagagguuaccuagagcaagaa

SEQ ID NO: 518602 - RNA, 22 nt, Human
gauuugugcucauuuuccauua

SEQ ID NO: 518603 - RNA, 22 nt, Human
acucuggcugccuugugagcau

SEQ ID NO: 518604 - RNA, 22 nt, Human
auucugucuuuuuaaaauaaua

SEQ ID NO: 518605 - RNA, 22 nt, Human
aggagagucuugagucacuggu

SEQ ID NO: 518606 - RNA, 22 nt, Human
uucccagaggagauuugcuuau

SEQ ID NO: 518607 - RNA, 22 nt, Human
uacuaaaugauuaagcaggaau

SEQ ID NO: 518608 - RNA, 22 nt, Human
cugggcagaauuuuaggauggc

SEQ ID NO: 518609 - RNA, 22 nt, Human
uggagaaucuggaaacuguuga

SEQ ID NO: 518610 - RNA, 22 nt, Human
cuugaaagcuuugcgucuucua

SEQ ID NO: 518611 - RNA, 22 nt, Human
cugugcugaacaauucugcauu

SEQ ID NO: 518612 - RNA, 22 nt, Human
ucaggcccuucucccaggacuc

SEQ ID NO: 518613 - RNA, 22 nt, Human
uuuugugacacuucuugagaca

SEQ ID NO: 518614 - RNA, 22 nt, Human
gagaagccgagucagcugagcc

SEQ ID NO: 518615 - RNA, 22 nt, Human
uggguccucgucuuccaaggca

SEQ ID NO: 518616 - RNA, 22 nt, Human
uggcucagcuuacuuuugaggg

SEQ ID NO: 518617 - RNA, 22 nt, Human
uguuuuaagcucuagaagggga

SEQ ID NO: 518618 - RNA, 22 nt, Human
ccaguguuugaugggauuuuca

SEQ ID NO: 518619 - RNA, 22 nt, Human
gaggcagcuuaggguacugacu

SEQ ID NO: 518620 - RNA, 22 nt, Human
caagauggguguugugaugguu

SEQ ID NO: 518621 - RNA, 22 nt, Human
gcuccugggcucuaccuugcua

SEQ ID NO: 518622 - RNA, 22 nt, Human
uauguacaucuugagcaaugaa

SEQ ID NO: 518623 - RNA, 22 nt, Human
cacugugucaguuugguuagac

SEQ ID NO: 518624 - RNA, 22 nt, Human
auauuuguaguggguaagaagu

SEQ ID NO: 518625 - RNA, 22 nt, Human
aguuuucuuucgcaaagguaca

SEQ ID NO: 518626 - RNA, 22 nt, Human
cauugcucaggcccagcaggaa

SEQ ID NO: 518627 - RNA, 22 nt, Human
auuaaauuaaguggcuaauuua

SEQ ID NO: 518628 - RNA, 22 nt, Human
uucuaucauacuugaauacauu

SEQ ID NO: 518629 - RNA, 22 nt, Human
uuuauuguuguuagucauaagu

SEQ ID NO: 518630 - RNA, 23 nt, Human
cccuggaguaaauucuuggaagg

SEQ ID NO: 518631 - RNA, 22 nt, Human
caagccuuggaaauccauucug

SEQ ID NO: 518632 - RNA, 22 nt, Human
ucugccaggcuuggugcuagau

SEQ ID NO: 518633 - RNA, 22 nt, Human
gggcguggauggucagugcagg

SEQ ID NO: 518634 - RNA, 22 nt, Human
uggcagaggaaaaagucacugg

SEQ ID NO: 518635 - RNA, 22 nt, Human
aaacagcugcaguacacggccu

SEQ ID NO: 518636 - RNA, 22 nt, Human
cuuucacauaauugaccuugaa

SEQ ID NO: 518637 - RNA, 22 nt, Human
augaggcauauccuccuauggu

SEQ ID NO: 518638 - RNA, 22 nt, Human
agucuccacuugacaucagcag

SEQ ID NO: 518639 - RNA, 22 nt, Human
aaauggcuacaagaugugcucu

SEQ ID NO: 518640 - RNA, 22 nt, Human
agucccagugacuuggccagaa

SEQ ID NO: 518641 - RNA, 22 nt, Human
agccugagcugccugccgccuc

SEQ ID NO: 518642 - RNA, 22 nt, Human
gagcagcucaggcacuuagcca

SEQ ID NO: 518643 - RNA, 22 nt, Human
gaagcacugccauaauucagac

SEQ ID NO: 518644 - RNA, 20 nt, Human
auguaaaauuauaaggcuga

SEQ ID NO: 518645 - RNA, 22 nt, Human
cgccggcuugaggcaggcggca

SEQ ID NO: 518646 - RNA, 22 nt, Human
uacacagacucuucaauucaga

SEQ ID NO: 518647 - RNA, 22 nt, Human
gcagcagagaccccaggaagga

SEQ ID NO: 518648 - RNA, 22 nt, Human
agauggagaccuuggaugaacu

SEQ ID NO: 518649 - RNA, 22 nt, Human
gagccugagugcugccuccccu

SEQ ID NO: 518650 - RNA, 22 nt, Human
uuuagagacccucugcuauuuu

SEQ ID NO: 518651 - RNA, 22 nt, Human
aagggcuccaagagguagcugg

SEQ ID NO: 518652 - RNA, 22 nt, Human
aaaggauuaaauaaaugugcug

SEQ ID NO: 518653 - RNA, 23 nt, Human
ggcuggcccggggcugcuccuga

SEQ ID NO: 518654 - RNA, 22 nt, Human
acuucauuguaauauuauagca

SEQ ID NO: 518655 - RNA, 22 nt, Human
ugugcugacaagaucagaaggu

SEQ ID NO: 518656 - RNA, 22 nt, Human
gucagugucuuaacagagauua

SEQ ID NO: 518657 - RNA, 22 nt, Human
uugcugaaguaugaaaaagaca

SEQ ID NO: 518658 - RNA, 22 nt, Human
gccgagcacagugcagcugccu

SEQ ID NO: 518659 - RNA, 22 nt, Human
gcagggugaaggucacauagaa

SEQ ID NO: 518660 - RNA, 22 nt, Human
aguggccagugcugcucugggg

SEQ ID NO: 518661 - RNA, 22 nt, Human
cauucauuuacuuucaacagcu

SEQ ID NO: 518662 - RNA, 22 nt, Human
ccuugcaggggaacaggcagug

SEQ ID NO: 518663 - RNA, 22 nt, Human
acagggcccuugccagcacaag

SEQ ID NO: 518664 - RNA, 22 nt, Human
uccuguuuaucugugugacucg

SEQ ID NO: 518665 - RNA, 22 nt, Human
cagguuuagguggacgugcagg

SEQ ID NO: 518666 - RNA, 22 nt, Human
guuccugaagggacuggugcag

SEQ ID NO: 518667 - RNA, 22 nt, Human
gggcugugcugaguaggaggug

SEQ ID NO: 518668 - RNA, 19 nt, Human
aucagcaagguaggaugug

SEQ ID NO: 518669 - RNA, 22 nt, Human
cugccucucagccugaccgcca

SEQ ID NO: 518670 - RNA, 22 nt, Human
ucacuagucgcggggggaggua

SEQ ID NO: 518671 - RNA, 22 nt, Human
guucacaaaguacuguaugcau

SEQ ID NO: 518672 - RNA, 22 nt, Human
uacauguaauuuucauaguaag

SEQ ID NO: 518673 - RNA, 22 nt, Human
gauuuucauuugcacucuagaa

SEQ ID NO: 518674 - RNA, 22 nt, Human
uccuagaauagugugucuggag

SEQ ID NO: 518675 - RNA, 22 nt, Human
accaggcuggagugcaguggcg

SEQ ID NO: 518676 - RNA, 20 nt, Human
gcagccucaacaggcacagc

SEQ ID NO: 518677 - RNA, 22 nt, Human
gaggcacucucgacaagggugg

SEQ ID NO: 518678 - RNA, 22 nt, Human
cacacacuguuaauguaggagu

SEQ ID NO: 518679 - RNA, 22 nt, Human
ggcaggaggugaguggcgggug

SEQ ID NO: 518680 - RNA, 20 nt, Human
cugggcugcccagcuauggg

SEQ ID NO: 518681 - RNA, 22 nt, Human
auuguugaggcaguucaucuug

SEQ ID NO: 518682 - RNA, 22 nt, Human
uggcucagugacauuccuccca

SEQ ID NO: 518683 - RNA, 22 nt, Human
uccugagcugacacuuggggag

SEQ ID NO: 518684 - RNA, 22 nt, Human
cugucucucuaggacacugggg

SEQ ID NO: 518685 - RNA, 22 nt, Human
aggcccagcuugaagugggaag

SEQ ID NO: 518686 - RNA, 18 nt, Human
uagggcucuagggaguga

SEQ ID NO: 518687 - RNA, 22 nt, Human
accaggggugucaacagcauuu

SEQ ID NO: 518688 - RNA, 22 nt, Human
cugcuuuggcucagugacauca

SEQ ID NO: 518689 - RNA, 16 nt, Human
aggcagagauuuaccc

SEQ ID NO: 518690 - RNA, 21 nt, Human
aaggagccuaggaggcucagg

SEQ ID NO: 518691 - RNA, 22 nt, Human
acauuugucuucuuucagauua

SEQ ID NO: 518692 - RNA, 22 nt, Human
gccuaggagacaagcgugaaag

SEQ ID NO: 518693 - RNA, 22 nt, Human
caguugaugggacucauguggg

SEQ ID NO: 518694 - RNA, 22 nt, Human
gauuucuucauucauuagaugg

SEQ ID NO: 518695 - RNA, 22 nt, Human
ugcacaaagcauucuagacgca

SEQ ID NO: 518696 - RNA, 22 nt, Human
gacagacacaauugauccauga

SEQ ID NO: 518697 - RNA, 22 nt, Human
cuggggcauugggagaggccug

SEQ ID NO: 518698 - RNA, 22 nt, Human
uucucuggagaguaucuucuua

SEQ ID NO: 518699 - RNA, 22 nt, Human
uaaggccaaacuauuauaguuc

SEQ ID NO: 518700 - RNA, 18 nt, Human
gcccugguggagcuggug

SEQ ID NO: 518701 - RNA, 22 nt, Human
aucuguguccuuauaagagaca

SEQ ID NO: 518702 - RNA, 22 nt, Human
guggcuucugcggugugcgcag

SEQ ID NO: 518703 - RNA, 20 nt, Human
ucucuggguucucacucagc

SEQ ID NO: 518704 - RNA, 22 nt, Human
aaucuucacagagaaaauuagg

SEQ ID NO: 518705 - RNA, 21 nt, Human
ucucugggcccuccugugggg

SEQ ID NO: 518706 - RNA, 22 nt, Human
cugagucucccggcaguggagg

SEQ ID NO: 518707 - RNA, 18 nt, Human
auccugggagcagacagc

SEQ ID NO: 518708 - RNA, 22 nt, Human
agcagcauuaagggaacugcag

SEQ ID NO: 518709 - RNA, 22 nt, Human
cuuuuacacucaucugggaggg

SEQ ID NO: 518710 - RNA, 22 nt, Human
uaaggcaccuguccaggcuggg

SEQ ID NO: 518711 - RNA, 20 nt, Human
cacaagagaauacacacugg

SEQ ID NO: 518712 - RNA, 22 nt, Human
ucucaguguguuuucucucaga

SEQ ID NO: 518713 - RNA, 22 nt, Human
aggccucagccugccaggccug

SEQ ID NO: 518714 - RNA, 22 nt, Human
cagugcuccugauguacccuug

SEQ ID NO: 518715 - RNA, 22 nt, Human
gcacccagggacuuggcuggcc

SEQ ID NO: 518716 - RNA, 22 nt, Human
agccacagcgaaccucucuucc

SEQ ID NO: 518717 - RNA, 22 nt, Human
cuggccuucagacucggacuga

SEQ ID NO: 518718 - RNA, 22 nt, Human
cacucccuucaggagccuagga

SEQ ID NO: 518719 - RNA, 22 nt, Human
aagacccuauacucagugaccc

SEQ ID NO: 518720 - RNA, 22 nt, Human
cugaggugcuagggucccugcu

SEQ ID NO: 518721 - RNA, 19 nt, Human
ggcccaaguacugagugcc

SEQ ID NO: 518722 - RNA, 23 nt, Human
uuuuccuuuggacaggcuguauu

SEQ ID NO: 518723 - RNA, 17 nt, Human
aggaaacauuuucuuuc

SEQ ID NO: 518724 - RNA, 22 nt, Human
acaggcuuuuuuagaaugacau

SEQ ID NO: 518725 - RNA, 22 nt, Human
acagcucauuuguaaaacggag

SEQ ID NO: 518726 - RNA, 22 nt, Human
auucugaugccuggguacugcc

SEQ ID NO: 518727 - RNA, 23 nt, Human
aaaugcagggucgcagguuacag

SEQ ID NO: 518728 - RNA, 22 nt, Human
ggcaggagaauggcgugaacuc

SEQ ID NO: 518729 - RNA, 22 nt, Human
gaaguauuucugaguugcccag

SEQ ID NO: 518730 - RNA, 22 nt, Human
aucuaagauguauugagcacuu

SEQ ID NO: 518731 - RNA, 22 nt, Human
cuguacaggugaggagggggcu

SEQ ID NO: 518732 - RNA, 22 nt, Human
ugcagccccugaaaauggcagc

SEQ ID NO: 518733 - RNA, 23 nt, Human
uuugugaaaguguugagaggaga

SEQ ID NO: 518734 - RNA, 22 nt, Human
uugucugauguucccucaugau

SEQ ID NO: 518735 - RNA, 22 nt, Human
uagcugucaccagaaauggcca

SEQ ID NO: 518736 - RNA, 22 nt, Human
acuggagcugagagcaugggua

SEQ ID NO: 518737 - RNA, 22 nt, Human
uggcagggaguugcaggauuuc

SEQ ID NO: 518738 - RNA, 20 nt, Human
cccaggcagagcuagcggca

SEQ ID NO: 518739 - RNA, 22 nt, Human
ggugggagagcuugcuuugaug

SEQ ID NO: 518740 - RNA, 22 nt, Human
ggggcagagaauaaaaaccuaa

SEQ ID NO: 518741 - RNA, 18 nt, Human
aggcuucccaggcaggcc

SEQ ID NO: 518742 - RNA, 22 nt, Human
ggaaggucgagcugcaucuggc

SEQ ID NO: 518743 - RNA, 22 nt, Human
cugggcccuauggaagaaaggg

SEQ ID NO: 518744 - RNA, 22 nt, Human
gagcagcucgagaaggaagcag

SEQ ID NO: 518745 - RNA, 22 nt, Human
aaaauccuuagccgagugaggu

SEQ ID NO: 518746 - RNA, 22 nt, Human
guggcuuccaugugcaucugac

SEQ ID NO: 518747 - RNA, 22 nt, Human
acagaauauugguuacuguugc

SEQ ID NO: 518748 - RNA, 22 nt, Human
caggcagcugcgacaagagagc

SEQ ID NO: 518749 - RNA, 22 nt, Human
caagcagagagguuagaacaca

SEQ ID NO: 518750 - RNA, 22 nt, Human
ucuguccagagguccuggagac

SEQ ID NO: 518751 - RNA, 22 nt, Human
aagagcugcccaaggugaacag

SEQ ID NO: 518752 - RNA, 22 nt, Human
uacaggguauagguacagauga

SEQ ID NO: 518753 - RNA, 19 nt, Human
uagagcugcuuccuggcag

SEQ ID NO: 518754 - RNA, 22 nt, Human
uauuuuguuaauaauccagucc

SEQ ID NO: 518755 - RNA, 22 nt, Human
acuguggccugcuguaugggcu

SEQ ID NO: 518756 - RNA, 22 nt, Human
aauaauuagugggacagagaac

SEQ ID NO: 518757 - RNA, 22 nt, Human
cagaguuuuaucauacguggau

SEQ ID NO: 518758 - RNA, 22 nt, Human
cuccagggaaaggggcguccgc

SEQ ID NO: 518759 - RNA, 22 nt, Human
gagggggcucccugaagccagu

SEQ ID NO: 518760 - RNA, 22 nt, Human
ccauccugcauugcuauucaga

SEQ ID NO: 518761 - RNA, 22 nt, Human
cagcagcaacaauagcggucac

SEQ ID NO: 518762 - RNA, 22 nt, Human
aggcucagcugguggugaucgc

SEQ ID NO: 518763 - RNA, 22 nt, Human
cuagagggauguuaggauagca

SEQ ID NO: 518764 - RNA, 22 nt, Human
gggagacaaggagaaccaaaga

SEQ ID NO: 518765 - RNA, 15 nt, Human
uguggcuggcuccug

SEQ ID NO: 518766 - RNA, 22 nt, Human
guggggagcagccuuagccccu

SEQ ID NO: 518767 - RNA, 22 nt, Human
cagagcugcuucccaguuugug

SEQ ID NO: 518768 - RNA, 22 nt, Human
agcucccagaguccucugccca

SEQ ID NO: 518769 - RNA, 20 nt, Human
ucacaggggaccaggagcag

SEQ ID NO: 518770 - RNA, 19 nt, Human
cucuuaaauugucucuugc

SEQ ID NO: 518771 - RNA, 22 nt, Human
agcagcaguacauauaagacua

SEQ ID NO: 518772 - RNA, 22 nt, Human
aagcuggaacaucuugaggaag

SEQ ID NO: 518773 - RNA, 20 nt, Human
uccagcugucuuucagagac

SEQ ID NO: 518774 - RNA, 22 nt, Human
cagguuucuaguucuaagaaua

SEQ ID NO: 518775 - RNA, 22 nt, Human
cagggaggcugucuuaugccug

SEQ ID NO: 518776 - RNA, 22 nt, Human
gcagagugagccgaggcugcuc

SEQ ID NO: 518777 - RNA, 22 nt, Human
uggagcccagacacuggcauug

SEQ ID NO: 518778 - RNA, 22 nt, Human
aggcuuccucgugccuuagaua

SEQ ID NO: 518779 - RNA, 22 nt, Human
ugggagcccaagggagcugccg

SEQ ID NO: 518780 - RNA, 22 nt, Human
uucuagcacaagauaugaaagu

SEQ ID NO: 518781 - RNA, 22 nt, Human
acacauuucuaaauuuuuaccg

SEQ ID NO: 518782 - RNA, 22 nt, Human
gggucuggacggcugcaggaag

SEQ ID NO: 518783 - RNA, 21 nt, Human
cucugggccauuuucuuccac

SEQ ID NO: 518784 - RNA, 22 nt, Human
aagcaaaugugggugcagaauu

SEQ ID NO: 518785 - RNA, 22 nt, Human
ccaggaagcggugagggcugcc

SEQ ID NO: 518786 - RNA, 22 nt, Human
aggguggccaugagggagagau

SEQ ID NO: 518787 - RNA, 22 nt, Human
ggcuggaaguccaagaucaaga

SEQ ID NO: 518788 - RNA, 22 nt, Human
auagaaauguauuuuggacuag

SEQ ID NO: 518789 - RNA, 22 nt, Human
gcugugagugagcugccuaggc

SEQ ID NO: 518790 - RNA, 22 nt, Human
uggagaaagcugcauauggaaa

SEQ ID NO: 518791 - RNA, 22 nt, Human
cccagagaagugaagugacuug

SEQ ID NO: 518792 - RNA, 20 nt, Human
augcaaacucacaaaauacc

SEQ ID NO: 518793 - RNA, 22 nt, Human
gaaaucuuuauggaaauaacaa

SEQ ID NO: 518794 - RNA, 22 nt, Human
aaaugcaauuguauguacucca

SEQ ID NO: 518795 - RNA, 22 nt, Human
augcaucauggaaaacucaguu

SEQ ID NO: 518796 - RNA, 22 nt, Human
agcuugguggcccuccuggcug

SEQ ID NO: 518797 - RNA, 21 nt, Human
agcuggcagauauggugucug

SEQ ID NO: 518798 - RNA, 22 nt, Human
ccuggcagcuccuccccggcgg

SEQ ID NO: 518799 - RNA, 22 nt, Human
gcugggcugcgucggggaagcc

SEQ ID NO: 518800 - RNA, 22 nt, Human
gacagacauuuccugauccaau

SEQ ID NO: 518801 - RNA, 22 nt, Human
uccuuagcaggcauucaggacc

SEQ ID NO: 518802 - RNA, 20 nt, Human
ugcuccaucuaaagugauua

SEQ ID NO: 518803 - RNA, 22 nt, Human
uuuuggaaugaggaacauccag

SEQ ID NO: 518804 - RNA, 22 nt, Human
ucugaaauacugcagguucucu

SEQ ID NO: 518805 - RNA, 16 nt, Human
cuuccucuucacuggc

SEQ ID NO: 518806 - RNA, 22 nt, Human
ucuggaguugugcaguggaccu

SEQ ID NO: 518807 - RNA, 18 nt, Human
ccugagcccugcuuacuu

SEQ ID NO: 518808 - RNA, 22 nt, Human
agccagggcugcgagcagacag

SEQ ID NO: 518809 - RNA, 22 nt, Human
cuuuauguccaccagacugcaa

SEQ ID NO: 518810 - RNA, 22 nt, Human
ugcccacauucaaaaggugaug

SEQ ID NO: 518811 - RNA, 22 nt, Human
agcuccugcucuuugucccuaa

SEQ ID NO: 518812 - RNA, 22 nt, Human
gcuguccucuuggacucagggc

SEQ ID NO: 518813 - RNA, 22 nt, Human
ucugggcuugguuagggcuguu

SEQ ID NO: 518814 - RNA, 22 nt, Human
aagguccaugacucggcauagu

SEQ ID NO: 518815 - RNA, 22 nt, Human
auguuuauguugggcuauauuu

SEQ ID NO: 518816 - RNA, 22 nt, Human
uuaggaaaggguuuucuaacag

SEQ ID NO: 518817 - RNA, 22 nt, Human
ucugggugugguaucuuagcca

SEQ ID NO: 518818 - RNA, 22 nt, Human
auggggggaugaaggaguccaa

SEQ ID NO: 518819 - RNA, 22 nt, Human
ccagcagacacacaggcguggg

SEQ ID NO: 518820 - RNA, 22 nt, Human
ggaggcugcugccucacguggg

SEQ ID NO: 518821 - RNA, 22 nt, Human
ccaaguacagauuccuccacug

SEQ ID NO: 518822 - RNA, 22 nt, Human
ucagugaucuaaggguauggcc

SEQ ID NO: 518823 - RNA, 22 nt, Human
aaucaguuguccaaaguucaca

SEQ ID NO: 518824 - RNA, 22 nt, Human
guuuauuauacaacaaaagcua

SEQ ID NO: 518825 - RNA, 22 nt, Human
cauuuagaaacuguuuuuaaca

SEQ ID NO: 518826 - RNA, 22 nt, Human
cagugugacuucugagcugcca

SEQ ID NO: 518827 - RNA, 22 nt, Human
cuucaggaguaguuaccuagca

SEQ ID NO: 518828 - RNA, 22 nt, Human
cacagcuucugagugaggauuu

SEQ ID NO: 518829 - RNA, 22 nt, Human
ucugagcugcagaguggggugg

SEQ ID NO: 518830 - RNA, 22 nt, Human
cccuggcucuucaccaccugcc

SEQ ID NO: 518831 - RNA, 22 nt, Human
cagcuuuaggacucauaauaaa

SEQ ID NO: 518832 - RNA, 22 nt, Human
gaggucaggggagaggcugaug

SEQ ID NO: 518833 - RNA, 22 nt, Human
uuaugaaagacauuucuguugg

SEQ ID NO: 518834 - RNA, 22 nt, Human
aaugaaaauuggacccuagaac

SEQ ID NO: 518835 - RNA, 22 nt, Human
aggggcugcuggguccgccccu

SEQ ID NO: 518836 - RNA, 19 nt, Human
agaaguuagacauugcaau

SEQ ID NO: 518837 - RNA, 22 nt, Human
gcaaaaacugcaauuacuuuug

SEQ ID NO: 518838 - RNA, 18 nt, Human
ggcaccucucuugccuua

SEQ ID NO: 518839 - RNA, 22 nt, Human
acauuucuaucauccuguaaug

SEQ ID NO: 518840 - RNA, 22 nt, Human
cugggguggaggagcuccccug

SEQ ID NO: 518841 - RNA, 23 nt, Human
acaguuauagcugugaauaacau

SEQ ID NO: 518842 - RNA, 22 nt, Human
guccugggagaugggacccuga

SEQ ID NO: 518843 - RNA, 22 nt, Human
uuauuuacaacucuucucuucc

SEQ ID NO: 518844 - RNA, 21 nt, Human
uaaaucucuguauucuucagu

SEQ ID NO: 518845 - RNA, 22 nt, Human
gccaggcugcuggcugcugucc

SEQ ID NO: 518846 - RNA, 22 nt, Human
uugaaaguagcagcugcauaug

SEQ ID NO: 518847 - RNA, 22 nt, Human
aaaagcaauugcaguucuugcc

SEQ ID NO: 518848 - RNA, 22 nt, Human
aagcccagcugaaagcauuuuu

SEQ ID NO: 518849 - RNA, 22 nt, Human
ucugugcuagaggaguuggcca

SEQ ID NO: 518850 - RNA, 21 nt, Human
agcagaggggacauguuugau

SEQ ID NO: 518851 - RNA, 22 nt, Human
aagaaauauugggccuuauaaa

SEQ ID NO: 518852 - RNA, 22 nt, Human
ccagggugggaggcugaaggcg

SEQ ID NO: 518853 - RNA, 22 nt, Human
cugccuggagcauucugaaggu

SEQ ID NO: 518854 - RNA, 22 nt, Human
cuuaauuuuuguaguagaugga

SEQ ID NO: 518855 - RNA, 20 nt, Human
ggcugcugugggcagagagg

SEQ ID NO: 518856 - RNA, 22 nt, Human
caccagggacaaugcuaggggu

SEQ ID NO: 518857 - RNA, 22 nt, Human
ggggcugagucagugggaagag

SEQ ID NO: 518858 - RNA, 22 nt, Human
aaguccagcauuuggguagauu

SEQ ID NO: 518859 - RNA, 21 nt, Human
aaauuucugcaagccucaacu

SEQ ID NO: 518860 - RNA, 22 nt, Human
uugcaaaggggaauaaagcaau

SEQ ID NO: 518861 - RNA, 22 nt, Human
gagcucccuggagguucagaua

SEQ ID NO: 518862 - RNA, 23 nt, Human
cccaugcugggcgcagugaaugg

SEQ ID NO: 518863 - RNA, 22 nt, Human
cagcauggggcuuggagucagc

SEQ ID NO: 518864 - RNA, 22 nt, Human
uacagcuugauguuuguguguu

SEQ ID NO: 518865 - RNA, 22 nt, Human
uacaaacuuguuuuaaguaagu

SEQ ID NO: 518866 - RNA, 22 nt, Human
ucagagagccucaggcacugcc

SEQ ID NO: 518867 - RNA, 22 nt, Human
aaaaugcaugagaaugugcucg

SEQ ID NO: 518868 - RNA, 17 nt, Human
cugggccucugcccuuu

SEQ ID NO: 518869 - RNA, 22 nt, Human
ugguccuggaagguccugaggg

SEQ ID NO: 518870 - RNA, 22 nt, Human
aaauauaguaaaugcauaguuc

SEQ ID NO: 518871 - RNA, 22 nt, Human
aauguauucugggaaaauguua

SEQ ID NO: 518872 - RNA, 22 nt, Human
cacagggcagguacucucagag

SEQ ID NO: 518873 - RNA, 22 nt, Human
auaaugagaauacaguaacuau

SEQ ID NO: 518874 - RNA, 22 nt, Human
accuuucacgguaucagacauc

SEQ ID NO: 518875 - RNA, 22 nt, Human
gcaaaucaccaccuagcuggau

SEQ ID NO: 518876 - RNA, 22 nt, Human
ccagcauccaugcucccucggg

SEQ ID NO: 518877 - RNA, 22 nt, Human
guccugggaacuggacagcuaa

SEQ ID NO: 518878 - RNA, 22 nt, Human
ugagcccagagcccuuguaggg

SEQ ID NO: 518879 - RNA, 22 nt, Human
agacaaaggauuaaugaugaug

SEQ ID NO: 518880 - RNA, 22 nt, Human
aaaagcuuuguuaauagguuug

SEQ ID NO: 518881 - RNA, 22 nt, Human
gucccagaaacauauugcuggu

SEQ ID NO: 518882 - RNA, 22 nt, Human
gcuucuggugaggccucaggaa

SEQ ID NO: 518883 - RNA, 22 nt, Human
agagcugugcuuugcaccacgu

SEQ ID NO: 518884 - RNA, 19 nt, Human
ucccgcccacugagcgugc

SEQ ID NO: 518885 - RNA, 22 nt, Human
uuucacauacaguguauaguag

SEQ ID NO: 518886 - RNA, 22 nt, Human
uguuuuaugagccauauaaccu

SEQ ID NO: 518887 - RNA, 22 nt, Human
caaugaaauugagauccagaga

SEQ ID NO: 518888 - RNA, 22 nt, Human
ggccaccaguccucuggcaggg

SEQ ID NO: 518889 - RNA, 22 nt, Human
gguuucaacuuuugugaggaau

SEQ ID NO: 518890 - RNA, 20 nt, Human
agacaaaaugacuucaugca

SEQ ID NO: 518891 - RNA, 22 nt, Human
cucugggcacauuuuccaggac

SEQ ID NO: 518892 - RNA, 22 nt, Human
gaggagcccuguuccccaggcc

SEQ ID NO: 518893 - RNA, 22 nt, Human
auucacaauuagaaguagauaa

SEQ ID NO: 518894 - RNA, 22 nt, Human
ugcaaguaaccaucacuaucuc

SEQ ID NO: 518895 - RNA, 22 nt, Human
agacuguacuuucugcagcucu

SEQ ID NO: 518896 - RNA, 22 nt, Human
cucaggggaccuggcuccgagu

SEQ ID NO: 518897 - RNA, 22 nt, Human
uuggcuucuuuagucaguuugg

SEQ ID NO: 518898 - RNA, 22 nt, Human
gcugcuggagagcgagacuguu

SEQ ID NO: 518899 - RNA, 22 nt, Human
guuguugaucacaugcauaucu

SEQ ID NO: 518900 - RNA, 22 nt, Human
uuguuuguaugcugagaagaau

SEQ ID NO: 518901 - RNA, 17 nt, Human
cccagagaugcugccuu

SEQ ID NO: 518902 - RNA, 22 nt, Human
gaaagggaguggacaacaggca

SEQ ID NO: 518903 - RNA, 22 nt, Human
cagauaauaauaugacuucacu

SEQ ID NO: 518904 - RNA, 22 nt, Human
uaaguaaauuuauaaugugauu

SEQ ID NO: 518905 - RNA, 22 nt, Human
gggcgggguggcucaugccugu

SEQ ID NO: 518906 - RNA, 22 nt, Human
aggcucaggcaggaauggcgga

SEQ ID NO: 518907 - RNA, 21 nt, Human
cugcccauuugugaugucccc

SEQ ID NO: 518908 - RNA, 22 nt, Human
caagcccaggauuccccaguua

SEQ ID NO: 518909 - RNA, 22 nt, Human
acagccagaggugguccugggu

SEQ ID NO: 518910 - RNA, 22 nt, Human
guauuuuuagguaaggaaagua

SEQ ID NO: 518911 - RNA, 22 nt, Human
caggcucccuaagucagcagcc

SEQ ID NO: 518912 - RNA, 22 nt, Human
ucaguuuugauuccugguucuc

SEQ ID NO: 518913 - RNA, 22 nt, Human
cagggcucacucggcuggcguc

SEQ ID NO: 518914 - RNA, 20 nt, Human
gggaggccccagaguccagg

SEQ ID NO: 518915 - RNA, 20 nt, Human
caggcuccgcaggacuaggg

SEQ ID NO: 518916 - RNA, 17 nt, Human
gcaaucucagucuccuu

SEQ ID NO: 518917 - RNA, 22 nt, Human
gaaaggugccccauaggcagga

SEQ ID NO: 518918 - RNA, 22 nt, Human
agugucaaaugugugccaagcu

SEQ ID NO: 518919 - RNA, 22 nt, Human
uccugggauuaagguggugauu

SEQ ID NO: 518920 - RNA, 22 nt, Human
gccuguuugacuggucucugcu

SEQ ID NO: 518921 - RNA, 23 nt, Human
gccucugcagccuaguuaguguc

SEQ ID NO: 518922 - RNA, 22 nt, Human
agagagcauggcacagaggggu

SEQ ID NO: 518923 - RNA, 22 nt, Human
agguccagaggcuccuuauuac

SEQ ID NO: 518924 - RNA, 19 nt, Human
agcuggagauuggagggca

SEQ ID NO: 518925 - RNA, 17 nt, Human
agagggaaaaugcgguu

SEQ ID NO: 518926 - RNA, 22 nt, Human
uuaaacagagucugaaauguaa

SEQ ID NO: 518927 - RNA, 22 nt, Human
ggugcccagcaagcuuucaaug

SEQ ID NO: 518928 - RNA, 22 nt, Human
agguaaagacagugaaagaggg

SEQ ID NO: 518929 - RNA, 22 nt, Human
uucaggagaaaguucaguacuu

SEQ ID NO: 518930 - RNA, 22 nt, Human
ggcugcugaguuggccaggaga

SEQ ID NO: 518931 - RNA, 22 nt, Human
ggcugccugaggcagugagaga

SEQ ID NO: 518932 - RNA, 22 nt, Human
cugggccaucagaggggcugga

SEQ ID NO: 518933 - RNA, 22 nt, Human
aauuagcugucaaugaggaucu

SEQ ID NO: 518934 - RNA, 22 nt, Human
aacaguuugagcuuugaauuuc

SEQ ID NO: 518935 - RNA, 22 nt, Human
gagacacaggugguuccuguca

SEQ ID NO: 518936 - RNA, 22 nt, Human
cuaggcccaugagguuugcugg

SEQ ID NO: 518937 - RNA, 22 nt, Human
gagaaagaaagggaaguuuguu

SEQ ID NO: 518938 - RNA, 22 nt, Human
caggccagagcgcgugguuggg

SEQ ID NO: 518939 - RNA, 22 nt, Human
gccuguuugagaauagucaggg

SEQ ID NO: 518940 - RNA, 22 nt, Human
gaaggccauuuuuagguagaau

SEQ ID NO: 518941 - RNA, 22 nt, Human
agcagcaucugguucugaugug

SEQ ID NO: 518942 - RNA, 22 nt, Human
ugggaagaggcgggaggcuguu

SEQ ID NO: 518943 - RNA, 22 nt, Human
ugaggccagagaguuugcauuu

SEQ ID NO: 518944 - RNA, 22 nt, Human
ccugggaggcugugggucugcu

SEQ ID NO: 518945 - RNA, 22 nt, Human
ugauuuccaauaaggagaaugu

SEQ ID NO: 518946 - RNA, 19 nt, Human
ggcucucccuugagagagc

SEQ ID NO: 518947 - RNA, 22 nt, Human
guguccagagaacugugggagc

SEQ ID NO: 518948 - RNA, 22 nt, Human
cugagcauuugugcagcuucuc

SEQ ID NO: 518949 - RNA, 22 nt, Human
cauuuguaguaucuguuuauau

SEQ ID NO: 518950 - RNA, 20 nt, Human
agcccaggccugugugaguc

SEQ ID NO: 518951 - RNA, 22 nt, Human
ccaguguuuaggaauaaaaugu

SEQ ID NO: 518952 - RNA, 22 nt, Human
agucucagccacacagaccuau

SEQ ID NO: 518953 - RNA, 22 nt, Human
guagggacaugccauuaucuca

SEQ ID NO: 518954 - RNA, 22 nt, Human
cuggagccccagacagggagag

SEQ ID NO: 518955 - RNA, 22 nt, Human
uccaggcaaagggacuagcagg

SEQ ID NO: 518956 - RNA, 22 nt, Human
cacaaauaccaguuuccuaaca

SEQ ID NO: 518957 - RNA, 22 nt, Human
agcagcuguggaaaaguaacua

SEQ ID NO: 518958 - RNA, 22 nt, Human
guuuuacaaaugacggcauuca

SEQ ID NO: 518959 - RNA, 22 nt, Human
ggucuggccuggcauucuaugg

SEQ ID NO: 518960 - RNA, 22 nt, Human
ugaaaauuuccaucaguuauau

SEQ ID NO: 518961 - RNA, 21 nt, Human
guuugcaugaacaagucagcc

SEQ ID NO: 518962 - RNA, 22 nt, Human
cagcucugaggaacacuccuuu

SEQ ID NO: 518963 - RNA, 22 nt, Human
agagccaggugcugcuguuuga

SEQ ID NO: 518964 - RNA, 22 nt, Human
ucuggggcaguuacuggggccu

SEQ ID NO: 518965 - RNA, 22 nt, Human
gaaggccauuagagccugugcc

SEQ ID NO: 518966 - RNA, 22 nt, Human
cuucuuucuuuugaucacaggu

SEQ ID NO: 518967 - RNA, 22 nt, Human
gucagaggaggcugaguaggaa

SEQ ID NO: 518968 - RNA, 22 nt, Human
aaucaagagcugacuauauuuu

SEQ ID NO: 518969 - RNA, 22 nt, Human
uuaccauagaaacuuccuuuuu

SEQ ID NO: 518970 - RNA, 22 nt, Human
ggaggcuccuaagcugacuuga

SEQ ID NO: 518971 - RNA, 22 nt, Human
ucucuucacaugcuugcuccaa

SEQ ID NO: 518972 - RNA, 22 nt, Human
ggcaaagcccugccugguucaa

SEQ ID NO: 518973 - RNA, 22 nt, Human
ucacauucuagaauguuaucgu

SEQ ID NO: 518974 - RNA, 22 nt, Human
gcagggguggaggcuguccugu

SEQ ID NO: 518975 - RNA, 22 nt, Human
auguaugaagcuuuguuuggga

SEQ ID NO: 518976 - RNA, 22 nt, Human
cauaauuaaauucugggcaaga

SEQ ID NO: 518977 - RNA, 22 nt, Human
acuaaggaauaugacaaacuca

SEQ ID NO: 518978 - RNA, 22 nt, Human
aacaacugaaaagcuuuuucug

SEQ ID NO: 518979 - RNA, 22 nt, Human
uuugaaagggacaaagucacug

SEQ ID NO: 518980 - RNA, 22 nt, Human
cacaggaaaugauucugcagca

SEQ ID NO: 518981 - RNA, 22 nt, Human
aggcucaguuugguuuccauug

SEQ ID NO: 518982 - RNA, 22 nt, Human
gcugucuuccuugcuccaaggg

SEQ ID NO: 518983 - RNA, 22 nt, Human
uagaaagacaugggccagcagc

SEQ ID NO: 518984 - RNA, 22 nt, Human
gcagugggaagguuggcacaug

SEQ ID NO: 518985 - RNA, 22 nt, Human
cacagggcuuugauggcugagu

SEQ ID NO: 518986 - RNA, 22 nt, Human
ucagaggacaagcucccuggug

SEQ ID NO: 518987 - RNA, 22 nt, Human
uucccagagauaagacgucuua

SEQ ID NO: 518988 - RNA, 22 nt, Human
aaucaguucuacaucuuaucca

SEQ ID NO: 518989 - RNA, 22 nt, Human
gcugagaguguaggauguuuac

SEQ ID NO: 518990 - RNA, 22 nt, Human
uaacacugauuuguucucaggg

SEQ ID NO: 518991 - RNA, 21 nt, Human
gggcucaguggaaaagagugu

SEQ ID NO: 518992 - RNA, 22 nt, Human
gaaucaaugguagauuaaguaa

SEQ ID NO: 518993 - RNA, 22 nt, Human
acacaaaguuggaugacaaaau

SEQ ID NO: 518994 - RNA, 22 nt, Human
uucacaggaggguggaugcaug

SEQ ID NO: 518995 - RNA, 22 nt, Human
gagcuccacuuagcaaggccac

SEQ ID NO: 518996 - RNA, 21 nt, Human
acugagagauguuggaucaua

SEQ ID NO: 518997 - RNA, 22 nt, Human
ugcucugugguccaagauggcu

SEQ ID NO: 518998 - RNA, 21 nt, Human
uggcagggguaguaguacagc

SEQ ID NO: 518999 - RNA, 22 nt, Human
uaguaacagauuuauacagucu

SEQ ID NO: 519000 - RNA, 22 nt, Human
gagugcaaguucuuccuucuuc

SEQ ID NO: 519001 - RNA, 22 nt, Human
gguccuggcagcucugugucca

SEQ ID NO: 519002 - RNA, 22 nt, Human
ggagcugucuguagggcacagg

SEQ ID NO: 519003 - RNA, 22 nt, Human
gagggcugaugcuuacuuauuu

SEQ ID NO: 519004 - RNA, 22 nt, Human
caggcacagaguuauucauuua

SEQ ID NO: 519005 - RNA, 22 nt, Human
auauuugucaucugccuuaguu

SEQ ID NO: 519006 - RNA, 22 nt, Human
ugcugccuugaccuccugggcu

SEQ ID NO: 519007 - RNA, 22 nt, Human
agcagugaugcaugacagccua

SEQ ID NO: 519008 - RNA, 22 nt, Human
uguaugcagcaaaacaauuagu

SEQ ID NO: 519009 - RNA, 22 nt, Human
gucccauaaguagugcaacuug

SEQ ID NO: 519010 - RNA, 22 nt, Human
agcaggaaagaaaaaucugugu

SEQ ID NO: 519011 - RNA, 22 nt, Human
agcugccagcaucccggaaggg

SEQ ID NO: 519012 - RNA, 22 nt, Human
uucucaggucaccagggugcca

SEQ ID NO: 519013 - RNA, 22 nt, Human
ccacagggugucaucagcuuga

SEQ ID NO: 519014 - RNA, 22 nt, Human
aacucaguuacauauuagaaua

SEQ ID NO: 519015 - RNA, 22 nt, Human
accauccaaacugcuuucugug

SEQ ID NO: 519016 - RNA, 21 nt, Human
ucuguggcggacucuaggccc

SEQ ID NO: 519017 - RNA, 22 nt, Human
uggcccaggucucucugagccc

SEQ ID NO: 519018 - RNA, 22 nt, Human
agaagccagaggcaguggguac

SEQ ID NO: 519019 - RNA, 22 nt, Human
ugcaguggcgccaucucagcuc

SEQ ID NO: 519020 - RNA, 22 nt, Human
cagagcugcacauucuaugaug

SEQ ID NO: 519021 - RNA, 22 nt, Human
agggccagagucuguguagaua

SEQ ID NO: 519022 - RNA, 22 nt, Human
cagggaugucucuggaagggag

SEQ ID NO: 519023 - RNA, 22 nt, Human
uccuggcuggaauuucucacuc

SEQ ID NO: 519024 - RNA, 22 nt, Human
cagugagggcccccuuccaggu

SEQ ID NO: 519025 - RNA, 22 nt, Human
uagagcuagcuucaaaaugcga

SEQ ID NO: 519026 - RNA, 22 nt, Human
gaggggcuggguagggcaaccc

SEQ ID NO: 519027 - RNA, 22 nt, Human
ucuguacaguaccagauaguaa

SEQ ID NO: 519028 - RNA, 22 nt, Human
uggcccagagcacugcugggca

SEQ ID NO: 519029 - RNA, 22 nt, Human
uccagggaugguaaugagcagu

SEQ ID NO: 519030 - RNA, 22 nt, Human
ucacugggcaucggagcugaaa

SEQ ID NO: 519031 - RNA, 22 nt, Human
uguugauuaguguuuagacuua

SEQ ID NO: 519032 - RNA, 22 nt, Human
uuuguucauuuugagcucauca

SEQ ID NO: 519033 - RNA, 22 nt, Human
gagagugaugaaugguuaaaca

SEQ ID NO: 519034 - RNA, 22 nt, Human
guccucuggagguuuuuaggug

SEQ ID NO: 519035 - RNA, 23 nt, Human
cagaugagguuggcagcaugguc

SEQ ID NO: 519036 - RNA, 19 nt, Human
gcugugccucucuccugcu

SEQ ID NO: 519037 - RNA, 18 nt, Human
uggaaauugaaacagaaa

SEQ ID NO: 519038 - RNA, 22 nt, Human
uuacaagaucuuugaaggcaag

SEQ ID NO: 519039 - RNA, 22 nt, Human
ccuggcucccuggaccucauua

SEQ ID NO: 519040 - RNA, 22 nt, Human
gugccagcucuccccacaucug

SEQ ID NO: 519041 - RNA, 22 nt, Human
uuuacaaggaucaagggaucuc

SEQ ID NO: 519042 - RNA, 22 nt, Human
ugagccagaggaggcugugugg

SEQ ID NO: 519043 - RNA, 22 nt, Human
gaagauuaaacauauuuagugu

SEQ ID NO: 519044 - RNA, 22 nt, Human
uuuuaaguuaauauaauugagg

SEQ ID NO: 519045 - RNA, 22 nt, Human
ggcaguaugaguucaaauaauu

SEQ ID NO: 519046 - RNA, 22 nt, Human
agccacagcuccuugguggaga

SEQ ID NO: 519047 - RNA, 22 nt, Human
caagagcuuuagaaaugcucau

SEQ ID NO: 519048 - RNA, 19 nt, Human
gaaugggaaugggaaagcu

SEQ ID NO: 519049 - RNA, 22 nt, Human
uccugggaccaggcaccuacug

SEQ ID NO: 519050 - RNA, 21 nt, Human
agaagucaauugaacugaaau

SEQ ID NO: 519051 - RNA, 22 nt, Human
cugcugugcacccaggaaggcu

SEQ ID NO: 519052 - RNA, 22 nt, Human
gagccaggcaccuucuguguug

SEQ ID NO: 519053 - RNA, 22 nt, Human
gcugccugcucacccggccugg

SEQ ID NO: 519054 - RNA, 22 nt, Human
auguuucaugacugagcaaaau

SEQ ID NO: 519055 - RNA, 22 nt, Human
aauuugcaugaugagaacaaua

SEQ ID NO: 519056 - RNA, 22 nt, Human
gugugggaaggcuaggaugcug

SEQ ID NO: 519057 - RNA, 22 nt, Human
aaugauugcaaacauugagaac

SEQ ID NO: 519058 - RNA, 22 nt, Human
auguuauuuuggaaaauacaaa

SEQ ID NO: 519059 - RNA, 22 nt, Human
aggcacugacagauucuguguc

SEQ ID NO: 519060 - RNA, 22 nt, Human
gccagcaguauguccuggcagu

SEQ ID NO: 519061 - RNA, 22 nt, Human
auugaggcagcauaguucaggg

SEQ ID NO: 519062 - RNA, 22 nt, Human
cauuccuuaacguggggagucu

SEQ ID NO: 519063 - RNA, 22 nt, Human
uugcagcuucgagucuaucugu

SEQ ID NO: 519064 - RNA, 22 nt, Human
auguacaguuucuagacucaaa

SEQ ID NO: 519065 - RNA, 22 nt, Human
cagagaaagaagcccauucauu

SEQ ID NO: 519066 - RNA, 22 nt, Human
gugaggggccaagaguagggca

SEQ ID NO: 519067 - RNA, 22 nt, Human
ucauuuguugaacuuuagugcg

SEQ ID NO: 519068 - RNA, 22 nt, Human
auaagccugauucacuugucau

SEQ ID NO: 519069 - RNA, 22 nt, Human
caggcugaucagggcugggaug

SEQ ID NO: 519070 - RNA, 22 nt, Human
cucugagcugaaacaugagcau

SEQ ID NO: 519071 - RNA, 22 nt, Human
uggcugaauaauauucuguugu

SEQ ID NO: 519072 - RNA, 23 nt, Human
cagcugaagcagccugggcugga

SEQ ID NO: 519073 - RNA, 22 nt, Human
cucagugcuuuggauccuggau

SEQ ID NO: 519074 - RNA, 22 nt, Human
ccagcugcagguguuccagaug

SEQ ID NO: 519075 - RNA, 22 nt, Human
agggcugcaccggggcuucgcg

SEQ ID NO: 519076 - RNA, 22 nt, Human
uggaccugagccuggcccugcc

SEQ ID NO: 519077 - RNA, 22 nt, Human
ucagcaguguaguuuaucauuc

SEQ ID NO: 519078 - RNA, 19 nt, Human
uaauaagcaauauggaagu

SEQ ID NO: 519079 - RNA, 20 nt, Human
aucagcaacugccacucagu

SEQ ID NO: 519080 - RNA, 22 nt, Human
uuucaaagcaacugaaaaggaa

SEQ ID NO: 519081 - RNA, 22 nt, Human
cugggcuguaauguggcacuga

SEQ ID NO: 519082 - RNA, 22 nt, Human
aacagcuuacucaauggugauu

SEQ ID NO: 519083 - RNA, 22 nt, Human
uucaggauuauacucucuuccc

SEQ ID NO: 519084 - RNA, 22 nt, Human
auguaacaaaugguauacaugu

SEQ ID NO: 519085 - RNA, 22 nt, Human
cagagccagcuguccuuggcau

SEQ ID NO: 519086 - RNA, 22 nt, Human
ugcuggaggaguuuacuguggc

SEQ ID NO: 519087 - RNA, 22 nt, Human
ccccucuuggcauugagugcca

SEQ ID NO: 519088 - RNA, 23 nt, Human
aaauuauugcucuucaauugccu

SEQ ID NO: 519089 - RNA, 22 nt, Human
gcagaggauagcauaugaaccu

SEQ ID NO: 519090 - RNA, 22 nt, Human
ggcacagggaggcccuggugug

SEQ ID NO: 519091 - RNA, 22 nt, Human
auucuacaaaagaacuggaucu

SEQ ID NO: 519092 - RNA, 22 nt, Human
ccagcuggaaacaaauagagug

SEQ ID NO: 519093 - RNA, 22 nt, Human
acucuggcccuccugcugccag

SEQ ID NO: 519094 - RNA, 21 nt, Human
aauuacagauggaauuacaga

SEQ ID NO: 519095 - RNA, 22 nt, Human
ccccuuccaggaagcagaaucg

SEQ ID NO: 519096 - RNA, 22 nt, Human
gugucacaggcccagcucuuca

SEQ ID NO: 519097 - RNA, 22 nt, Human
cuuaacagauacaucugugguu

SEQ ID NO: 519098 - RNA, 22 nt, Human
gacaaucagccauauccagggu

SEQ ID NO: 519099 - RNA, 22 nt, Human
gugggcuuguuuugaugagauc

SEQ ID NO: 519100 - RNA, 19 nt, Human
uuaugaauagcuucaucca

SEQ ID NO: 519101 - RNA, 22 nt, Human
uccuucaaaaguugagagagcc

SEQ ID NO: 519102 - RNA, 22 nt, Human
guguguccucaguaguggcaug

SEQ ID NO: 519103 - RNA, 22 nt, Human
acagagguguuccagaccuagg

SEQ ID NO: 519104 - RNA, 22 nt, Human
guuuuauaugucucugcugaca

SEQ ID NO: 519105 - RNA, 22 nt, Human
uucucugggguucaguaucucu

SEQ ID NO: 519106 - RNA, 22 nt, Human
cuucagggugacgcaggcugca

SEQ ID NO: 519107 - RNA, 22 nt, Human
cugcugcauuacucuucucaag

SEQ ID NO: 519108 - RNA, 22 nt, Human
aagugguaggaagagagcacug

SEQ ID NO: 519109 - RNA, 22 nt, Human
gaaauauuucucuugagccccu

SEQ ID NO: 519110 - RNA, 22 nt, Human
ggaggcagaacuucccgucagu

SEQ ID NO: 519111 - RNA, 22 nt, Human
cauggaaggcaaaagacacaga

SEQ ID NO: 519112 - RNA, 21 nt, Human
agcccuuaggacauaagagag

SEQ ID NO: 519113 - RNA, 23 nt, Human
ggccuccuggucuaggcuagacu

SEQ ID NO: 519114 - RNA, 23 nt, Human
ccuggcagcaaacgaggagguua

SEQ ID NO: 519115 - RNA, 22 nt, Human
augcuuuaguucaaaggacuua

SEQ ID NO: 519116 - RNA, 22 nt, Human
cuuuaguguucaacccagauaa

SEQ ID NO: 519117 - RNA, 22 nt, Human
aaacaaguguaaacuagucugu

SEQ ID NO: 519118 - RNA, 22 nt, Human
cucuggaguucucaugaggaac

SEQ ID NO: 519119 - RNA, 22 nt, Human
acagacauuuucuguauugccu

SEQ ID NO: 519120 - RNA, 22 nt, Human
cugggggcaagcagacagcugu

SEQ ID NO: 519121 - RNA, 19 nt, Human
uuugaauccagcugguaac

SEQ ID NO: 519122 - RNA, 22 nt, Human
gggaaaaauaaugcacagauau

SEQ ID NO: 519123 - RNA, 22 nt, Human
gggcuggucuggcuuagucagg

SEQ ID NO: 519124 - RNA, 22 nt, Human
cucacuguccaacaggcuuuac

SEQ ID NO: 519125 - RNA, 22 nt, Human
ugccaggcuccggaacgacagu

SEQ ID NO: 519126 - RNA, 22 nt, Human
cccagcuaccucugcuaggaga

SEQ ID NO: 519127 - RNA, 17 nt, Human
gccuuccuuccuccaca

SEQ ID NO: 519128 - RNA, 22 nt, Human
cucaggcccacagcagacccac

SEQ ID NO: 519129 - RNA, 22 nt, Human
guuuuuuggguguauaucuucu

SEQ ID NO: 519130 - RNA, 22 nt, Human
ggggcagaguagcuggggugug

SEQ ID NO: 519131 - RNA, 22 nt, Human
caccugagugucaguauucuca

SEQ ID NO: 519132 - RNA, 20 nt, Human
gugcauuucaccuguacugu

SEQ ID NO: 519133 - RNA, 22 nt, Human
ugaagccacuuuccagaaucac

SEQ ID NO: 519134 - RNA, 22 nt, Human
ugcauacacaugugcacauacg

SEQ ID NO: 519135 - RNA, 21 nt, Human
acaggcucacgauccauuucu

SEQ ID NO: 519136 - RNA, 22 nt, Human
uggaguucauccaugacagcuu

SEQ ID NO: 519137 - RNA, 23 nt, Human
aaagugacuuuuauaccacuaac

SEQ ID NO: 519138 - RNA, 22 nt, Human
aaggcugaguaaaacagagaac

SEQ ID NO: 519139 - RNA, 22 nt, Human
ugaaugaugguguguucuugcc

SEQ ID NO: 519140 - RNA, 22 nt, Human
gugaaggacuagcauggagggc

SEQ ID NO: 519141 - RNA, 22 nt, Human
gcagccacacuguuacagaaug

SEQ ID NO: 519142 - RNA, 23 nt, Human
ugaaugauuguacugagcuuuua

SEQ ID NO: 519143 - RNA, 19 nt, Human
gcugcucugggucucaucu

SEQ ID NO: 519144 - RNA, 22 nt, Human
ccagagccuaagaucugauccu

SEQ ID NO: 519145 - RNA, 22 nt, Human
ggcuuuauauuguuugagcaga

SEQ ID NO: 519146 - RNA, 22 nt, Human
auuugucucugcacuuuacuca

SEQ ID NO: 519147 - RNA, 22 nt, Human
gagcagaacaggccggguggga

SEQ ID NO: 519148 - RNA, 23 nt, Human
cuguaugauguuaaguggaaagc

SEQ ID NO: 519149 - RNA, 22 nt, Human
cagccacuggugccaggcuguu

SEQ ID NO: 519150 - RNA, 22 nt, Human
aguccaaggccauacaguugug

SEQ ID NO: 519151 - RNA, 22 nt, Human
uguuaucacuuguaaaagcaau

SEQ ID NO: 519152 - RNA, 22 nt, Human
cagggcuugguuggaaccaccc

SEQ ID NO: 519153 - RNA, 22 nt, Human
gccuggugaaaggcagagagcg

SEQ ID NO: 519154 - RNA, 21 nt, Human
gaggggcagcucuuagcauua

SEQ ID NO: 519155 - RNA, 22 nt, Human
uggaggaugagugugggcucug

SEQ ID NO: 519156 - RNA, 22 nt, Human
ugggccuguugccugaguccau

SEQ ID NO: 519157 - RNA, 22 nt, Human
gaggggcagagguagagaacaa

SEQ ID NO: 519158 - RNA, 22 nt, Human
gcucccaacucaggccuccucc

SEQ ID NO: 519159 - RNA, 22 nt, Human
acugcuuuagaccuagagcucu

SEQ ID NO: 519160 - RNA, 22 nt, Human
caaagucagccagcuaguaggu

SEQ ID NO: 519161 - RNA, 22 nt, Human
gcaggcagagaaggaacauuua

SEQ ID NO: 519162 - RNA, 22 nt, Human
ugccaguugggaaaacagacau

SEQ ID NO: 519163 - RNA, 22 nt, Human
caccugcaaggagcuuucauuu

SEQ ID NO: 519164 - RNA, 22 nt, Human
gucaauaauuuuauggagagaa

SEQ ID NO: 519165 - RNA, 22 nt, Human
ggucccagaauugguuagcaca

SEQ ID NO: 519166 - RNA, 22 nt, Human
cagaggcauuacugaaaaggug

SEQ ID NO: 519167 - RNA, 22 nt, Human
ccagccucacuggcaucaccua

SEQ ID NO: 519168 - RNA, 22 nt, Human
gggagggaggugcugguucacg

SEQ ID NO: 519169 - RNA, 22 nt, Human
ccuuagcaacugucauagagca

SEQ ID NO: 519170 - RNA, 22 nt, Human
cugagccacugcuuguucagug

SEQ ID NO: 519171 - RNA, 22 nt, Human
uugaagcauuucuuugagcuuc

SEQ ID NO: 519172 - RNA, 22 nt, Human
ggaaagaggauaguggguaggu

SEQ ID NO: 519173 - RNA, 22 nt, Human
cuggcugccuggagugagggag

SEQ ID NO: 519174 - RNA, 15 nt, Human
ugauuuccuacuaac

SEQ ID NO: 519175 - RNA, 22 nt, Human
auucuuggcaaggagauuuaaa

SEQ ID NO: 519176 - RNA, 22 nt, Human
guuguaaauacagcagauaauu

SEQ ID NO: 519177 - RNA, 22 nt, Human
cuacauucugggaaaucagaug

SEQ ID NO: 519178 - RNA, 22 nt, Human
uguaugcuuuccaaaaaugcug

SEQ ID NO: 519179 - RNA, 22 nt, Human
ggacaaagccugguggcaggug

SEQ ID NO: 519180 - RNA, 22 nt, Human
uauauagaaaagcagauguugg

SEQ ID NO: 519181 - RNA, 22 nt, Human
gaggcucagagggagcaugguc

SEQ ID NO: 519182 - RNA, 22 nt, Human
cagaugugcaugaugggaaggg

SEQ ID NO: 519183 - RNA, 22 nt, Human
ccucacugaagaggugacauuu

SEQ ID NO: 519184 - RNA, 22 nt, Human
uaguaaguucucgcauuguuau

SEQ ID NO: 519185 - RNA, 22 nt, Human
cucuccuccaacagcccugccg

SEQ ID NO: 519186 - RNA, 22 nt, Human
gauuuguggugugaggaagagc

SEQ ID NO: 519187 - RNA, 22 nt, Human
cuucuuaaucccuuauauauuu

SEQ ID NO: 519188 - RNA, 22 nt, Human
aaaaagauagcauugugcuccu

SEQ ID NO: 519189 - RNA, 22 nt, Human
caggacaguauaggcuuuagga

SEQ ID NO: 519190 - RNA, 22 nt, Human
ccugguggccuucagcccacaa

SEQ ID NO: 519191 - RNA, 22 nt, Human
agaauuacauaaauacaugaau

SEQ ID NO: 519192 - RNA, 22 nt, Human
uaguuuguaaugaggagaagua

SEQ ID NO: 519193 - RNA, 22 nt, Human
uccugcagcauccgucgucugu

SEQ ID NO: 519194 - RNA, 23 nt, Human
ucuuuccucagcacacaccaaga

SEQ ID NO: 519195 - RNA, 22 nt, Human
gaggugccuggcgaugucucug

SEQ ID NO: 519196 - RNA, 22 nt, Human
aggaaggguucuuugugaaaga

SEQ ID NO: 519197 - RNA, 22 nt, Human
aaauucaauuaacuuucaugcu

SEQ ID NO: 519198 - RNA, 22 nt, Human
ugcugaauugguaguacuguug

SEQ ID NO: 519199 - RNA, 22 nt, Human
aucuguucuucaaaauauuaca

SEQ ID NO: 519200 - RNA, 22 nt, Human
uucuggggcuaauacagagguc

SEQ ID NO: 519201 - RNA, 22 nt, Human
uugcuuuguggugguucuucca

SEQ ID NO: 519202 - RNA, 22 nt, Human
ucccagaggucucugcugguuc

SEQ ID NO: 519203 - RNA, 22 nt, Human
uggaagagaaaggaguggaucu

SEQ ID NO: 519204 - RNA, 22 nt, Human
uugagcucuccucaucacccug

SEQ ID NO: 519205 - RNA, 22 nt, Human
cgcugccaggucaccaggggua

SEQ ID NO: 519206 - RNA, 22 nt, Human
ucacaaagagaauugugggugu

SEQ ID NO: 519207 - RNA, 22 nt, Human
cacacagaaccgcucgccacuu

SEQ ID NO: 519208 - RNA, 22 nt, Human
agcucuggaauaaugaugugau

SEQ ID NO: 519209 - RNA, 22 nt, Human
ugaggcaggacauggacaacug

SEQ ID NO: 519210 - RNA, 23 nt, Human
gcuugcucauucuaucacacagc

SEQ ID NO: 519211 - RNA, 22 nt, Human
caacuuuaugauugguuuguca

SEQ ID NO: 519212 - RNA, 22 nt, Human
guggagcccugccuugcucaug

SEQ ID NO: 519213 - RNA, 22 nt, Human
uuagaaaggaaucuucauuuca

SEQ ID NO: 519214 - RNA, 22 nt, Human
uggagucagaaugcgacaggcc

SEQ ID NO: 519215 - RNA, 22 nt, Human
uugccagggcuuugguggcauc

SEQ ID NO: 519216 - RNA, 22 nt, Human
aucuacuccugaauauaucuag

SEQ ID NO: 519217 - RNA, 22 nt, Human
gucugggguacuuucaucugau

SEQ ID NO: 519218 - RNA, 22 nt, Human
guggcucucgccagccugcggg

SEQ ID NO: 519219 - RNA, 22 nt, Human
ugaggccucauaaugagauuuc

SEQ ID NO: 519220 - RNA, 22 nt, Human
uuuucuuauagagcuuaaaguu

SEQ ID NO: 519221 - RNA, 22 nt, Human
aguggcuguaucagucaacccu

SEQ ID NO: 519222 - RNA, 22 nt, Human
uggcugagaccaucagggugua

SEQ ID NO: 519223 - RNA, 22 nt, Human
cccugaggagagcgcuucccga

SEQ ID NO: 519224 - RNA, 22 nt, Human
cugggccuucauugcucuccca

SEQ ID NO: 519225 - RNA, 22 nt, Human
uaugagaaauuauaccuagguu

SEQ ID NO: 519226 - RNA, 22 nt, Human
ugcucuggaguggcuugugcac

SEQ ID NO: 519227 - RNA, 22 nt, Human
gaggccuggguuggaggugcau

SEQ ID NO: 519228 - RNA, 22 nt, Human
ugcaugugucgggccugugcua

SEQ ID NO: 519229 - RNA, 21 nt, Human
cagaggcugagagggcaaucu

SEQ ID NO: 519230 - RNA, 22 nt, Human
uguggcaggcauucugaggcug

SEQ ID NO: 519231 - RNA, 18 nt, Human
cuucagugacagucuggc

SEQ ID NO: 519232 - RNA, 23 nt, Human
ugccucaguggaaugugagggug

SEQ ID NO: 519233 - RNA, 22 nt, Human
cuggcuccauuacucagcaucu

SEQ ID NO: 519234 - RNA, 22 nt, Human
agccccuuccaguucucagauc

SEQ ID NO: 519235 - RNA, 22 nt, Human
aagggcuuuuaagauuuauccu

SEQ ID NO: 519236 - RNA, 18 nt, Human
accugccuguucuucucu

SEQ ID NO: 519237 - RNA, 22 nt, Human
agugucugaaccaccggggcau

SEQ ID NO: 519238 - RNA, 21 nt, Human
ggccugaguauaggacaggcc

SEQ ID NO: 519239 - RNA, 22 nt, Human
gguaaaaaucacaaauacuuua

SEQ ID NO: 519240 - RNA, 22 nt, Human
guccagagaagggaggggacuc

SEQ ID NO: 519241 - RNA, 22 nt, Human
gucccucugcucuagagagcca

SEQ ID NO: 519242 - RNA, 22 nt, Human
gcuccacuugcagcuaggcuug

SEQ ID NO: 519243 - RNA, 22 nt, Human
aagcaggagaugggugcuuuuc

SEQ ID NO: 519244 - RNA, 22 nt, Human
cugggccaaaagaaguguucuu

SEQ ID NO: 519245 - RNA, 22 nt, Human
ccugggucuucagucugcuggu

SEQ ID NO: 519246 - RNA, 22 nt, Human
guuuuuccuugcugaggacccg

SEQ ID NO: 519247 - RNA, 22 nt, Human
uuucaaagaccauuaacuauca

SEQ ID NO: 519248 - RNA, 22 nt, Human
aucuggguucaccaugcuccug

SEQ ID NO: 519249 - RNA, 22 nt, Human
cccaggcugaguuagagguguc

SEQ ID NO: 519250 - RNA, 22 nt, Human
uggaggagaauuuauggucgaa

SEQ ID NO: 519251 - RNA, 22 nt, Human
agcuucuggaagccuggcagca

SEQ ID NO: 519252 - RNA, 22 nt, Human
agaaaucuaagaugcucaagga

SEQ ID NO: 519253 - RNA, 22 nt, Human
accugaggccuccccagcagac

SEQ ID NO: 519254 - RNA, 20 nt, Human
uggggccuguuucugugguu

SEQ ID NO: 519255 - RNA, 22 nt, Human
guggcuucaccccaguugucuc

SEQ ID NO: 519256 - RNA, 20 nt, Human
uccagcccagguccugccug

SEQ ID NO: 519257 - RNA, 22 nt, Human
aucacugucgucaucugagauu

SEQ ID NO: 519258 - RNA, 22 nt, Human
uggaaucuugcgggcacauggc

SEQ ID NO: 519259 - RNA, 22 nt, Human
agacacaggauucugcauuucu

SEQ ID NO: 519260 - RNA, 22 nt, Human
uggagaagucaaagugaacagg

SEQ ID NO: 519261 - RNA, 22 nt, Human
gcccugugagucaugcggcaga

SEQ ID NO: 519262 - RNA, 22 nt, Human
ugauugaagaggugaggaaguu

SEQ ID NO: 519263 - RNA, 22 nt, Human
ucagcuuuggucacauugaguu

SEQ ID NO: 519264 - RNA, 22 nt, Human
cucugggcugccuuuuagcucu

SEQ ID NO: 519265 - RNA, 22 nt, Human
cugagccaaaaagcagagcuug

SEQ ID NO: 519266 - RNA, 22 nt, Human
cacccaggcagguggcugagaa

SEQ ID NO: 519267 - RNA, 22 nt, Human
uguccuccagcagcaugguaug

SEQ ID NO: 519268 - RNA, 22 nt, Human
uggccagcccucuucccacacu

SEQ ID NO: 519269 - RNA, 22 nt, Human
ugugcuucugcagagacuauuu

SEQ ID NO: 519270 - RNA, 22 nt, Human
gaaguucuuuauagcaguguga

SEQ ID NO: 519271 - RNA, 22 nt, Human
acuuagaauuaaauauuuuugg

SEQ ID NO: 519272 - RNA, 22 nt, Human
uucuggagagaaaccuuacaaa

SEQ ID NO: 519273 - RNA, 22 nt, Human
gucuucuguucugugaggcuuc

SEQ ID NO: 519274 - RNA, 22 nt, Human
ugggcccugacuucaagcaucc

SEQ ID NO: 519275 - RNA, 20 nt, Human
ugagugauggaggcggguca

SEQ ID NO: 519276 - RNA, 22 nt, Human
cggagcugccugccaagccugc

SEQ ID NO: 519277 - RNA, 22 nt, Human
uccugcaggcuugaguccucag

SEQ ID NO: 519278 - RNA, 22 nt, Human
ucagaagcugguguccuuugaa

SEQ ID NO: 519279 - RNA, 23 nt, Human
uggccaggguacuacacccaccc

SEQ ID NO: 519280 - RNA, 22 nt, Human
gauuuccuagacauggggcaga

SEQ ID NO: 519281 - RNA, 22 nt, Human
ggcuguggccagcggggcugag

SEQ ID NO: 519282 - RNA, 22 nt, Human
gucacccugcuguuuguccauu

SEQ ID NO: 519283 - RNA, 22 nt, Human
ucccaguguggcaggccaugga

SEQ ID NO: 519284 - RNA, 22 nt, Human
caauguaucaagaagcaucagu

SEQ ID NO: 519285 - RNA, 23 nt, Human
aggauguaggauguauggcagag

SEQ ID NO: 519286 - RNA, 22 nt, Human
ugggcuucuggaguggggcaga

SEQ ID NO: 519287 - RNA, 22 nt, Human
uucaaauuaccacauuugcuua

SEQ ID NO: 519288 - RNA, 22 nt, Human
ugcccugucuaagcugucagua

SEQ ID NO: 519289 - RNA, 22 nt, Human
uagugaaauuuaugcacagcua

SEQ ID NO: 519290 - RNA, 22 nt, Human
uccuggcccacuaugccagcau

SEQ ID NO: 519291 - RNA, 22 nt, Human
uuaaagcacuaaaugaugaggg

SEQ ID NO: 519292 - RNA, 22 nt, Human
aagcuggacucugccauuuacu

SEQ ID NO: 519293 - RNA, 22 nt, Human
agaggagcuuuuggaaaaggcc

SEQ ID NO: 519294 - RNA, 22 nt, Human
ccagcuccucuugucucuagca

SEQ ID NO: 519295 - RNA, 22 nt, Human
ccagcccuucccaacuggccag

SEQ ID NO: 519296 - RNA, 22 nt, Human
ggccaagauggaaggagagaug

SEQ ID NO: 519297 - RNA, 22 nt, Human
ucuggcucaaaauacguacucu

SEQ ID NO: 519298 - RNA, 22 nt, Human
aaaguuugcaauuuauguuaau

SEQ ID NO: 519299 - RNA, 22 nt, Human
ggcagucccaggcugcauguug

SEQ ID NO: 519300 - RNA, 22 nt, Human
ccaggcagagggaauagcaagu

SEQ ID NO: 519301 - RNA, 22 nt, Human
uucagagaagcaaaggcagauu

SEQ ID NO: 519302 - RNA, 22 nt, Human
cuggcucaauaaauauuagcug

SEQ ID NO: 519303 - RNA, 23 nt, Human
ugauugaaaugaggaguauuugu

SEQ ID NO: 519304 - RNA, 22 nt, Human
uugaaaggguuaaagugguaaa

SEQ ID NO: 519305 - RNA, 22 nt, Human
aagauguaaaggcaauauaaag

SEQ ID NO: 519306 - RNA, 22 nt, Human
uuugcuuuugugcucuaguggu

SEQ ID NO: 519307 - RNA, 22 nt, Human
cuugccuguggcuaguuggcuc

SEQ ID NO: 519308 - RNA, 22 nt, Human
ccugucugcggaggaguggaag

SEQ ID NO: 519309 - RNA, 22 nt, Human
uggagcugucacucagaaccaa

SEQ ID NO: 519310 - RNA, 22 nt, Human
aggugccagcucucaggcagga

SEQ ID NO: 519311 - RNA, 22 nt, Human
caggcacuggggaugcugggau

SEQ ID NO: 519312 - RNA, 22 nt, Human
cagagucuuguguguucagccc

SEQ ID NO: 519313 - RNA, 22 nt, Human
aaacagcugggagguagaggcg

SEQ ID NO: 519314 - RNA, 22 nt, Human
uguuucaugauugcugucauuu

SEQ ID NO: 519315 - RNA, 22 nt, Human
uguggccaccagagcugcuauu

SEQ ID NO: 519316 - RNA, 22 nt, Human
ugaaaucaucugccaauaaguu

SEQ ID NO: 519317 - RNA, 22 nt, Human
cucuggcucccgcagcccccau

SEQ ID NO: 519318 - RNA, 22 nt, Human
uagguucacugucuugaggagc

SEQ ID NO: 519319 - RNA, 22 nt, Human
ggagggccccuccagugggcag

SEQ ID NO: 519320 - RNA, 22 nt, Human
aaccauuugccauuaucuuaag

SEQ ID NO: 519321 - RNA, 22 nt, Human
ugaccccacugugcucagaggu

SEQ ID NO: 519322 - RNA, 22 nt, Human
uucaggauucuuucagacuggg

SEQ ID NO: 519323 - RNA, 22 nt, Human
uaaggcacccauguucauacag

SEQ ID NO: 519324 - RNA, 22 nt, Human
ugcuggggguucagaugaguaa

SEQ ID NO: 519325 - RNA, 22 nt, Human
uggcccuguggaggucagugag

SEQ ID NO: 519326 - RNA, 22 nt, Human
agcagcugcagggagggucugc

SEQ ID NO: 519327 - RNA, 22 nt, Human
auuugaagaaaguuuucuagau

SEQ ID NO: 519328 - RNA, 22 nt, Human
uccuggaucagcgggggcaggc

SEQ ID NO: 519329 - RNA, 22 nt, Human
ccugggucuccuccugcuggcu

SEQ ID NO: 519330 - RNA, 22 nt, Human
ucucagagugguggucccucug

SEQ ID NO: 519331 - RNA, 22 nt, Human
gaaacauuguguucuacagauu

SEQ ID NO: 519332 - RNA, 20 nt, Human
gugaccagaagacagugggu

SEQ ID NO: 519333 - RNA, 22 nt, Human
uaccuguuuuaaagcuaaaagg

SEQ ID NO: 519334 - RNA, 22 nt, Human
gucugggcaggaaucugcauuc

SEQ ID NO: 519335 - RNA, 22 nt, Human
cucugguuucgcaggaaauaga

SEQ ID NO: 519336 - RNA, 22 nt, Human
uagcagcuuaaguaauuagaau

SEQ ID NO: 519337 - RNA, 22 nt, Human
gucugggcaucagacugcgggc

SEQ ID NO: 519338 - RNA, 22 nt, Human
uaugcacacauuagcacagggu

SEQ ID NO: 519339 - RNA, 22 nt, Human
cccaggcugcaugaguccaugg

SEQ ID NO: 519340 - RNA, 22 nt, Human
cuccugcaagccuccccaagca

SEQ ID NO: 519341 - RNA, 22 nt, Human
agcagggcugcagugugucuuu

SEQ ID NO: 519342 - RNA, 22 nt, Human
cauuuguuuagaagucuuuaua

SEQ ID NO: 519343 - RNA, 22 nt, Human
augggaugcauggcuguggcca

SEQ ID NO: 519344 - RNA, 17 nt, Human
gaggacagggaaguagg

SEQ ID NO: 519345 - RNA, 22 nt, Human
caggaggaggugagguagaacu

SEQ ID NO: 519346 - RNA, 22 nt, Human
gggcugagucugcugccuguca

SEQ ID NO: 519347 - RNA, 22 nt, Human
ugacacagaaauuaagcuguca

SEQ ID NO: 519348 - RNA, 22 nt, Human
ucucaagaucucaagauggccc

SEQ ID NO: 519349 - RNA, 22 nt, Human
ucacagaagcuugaagauuuuc

SEQ ID NO: 519350 - RNA, 22 nt, Human
acagagguaggacaugagauau

SEQ ID NO: 519351 - RNA, 22 nt, Human
ggcuucuuuuuaguaaauguca

SEQ ID NO: 519352 - RNA, 22 nt, Human
caaaugcagucccuuuguugcu

SEQ ID NO: 519353 - RNA, 23 nt, Human
ccugggcauuggcugcagcuucu

SEQ ID NO: 519354 - RNA, 21 nt, Human
agagacugucacugcaguacc

SEQ ID NO: 519355 - RNA, 22 nt, Human
ccuccugggacaggcuggcaca

SEQ ID NO: 519356 - RNA, 22 nt, Human
uccccacacagauacagaguag

SEQ ID NO: 519357 - RNA, 22 nt, Human
ucagugcaggaauuuccuuaga

SEQ ID NO: 519358 - RNA, 22 nt, Human
cccaggcaucccauuaaggagc

SEQ ID NO: 519359 - RNA, 22 nt, Human
auguuacagaaagcaaagauga

SEQ ID NO: 519360 - RNA, 22 nt, Human
cacucaggguacaauggagggc

SEQ ID NO: 519361 - RNA, 22 nt, Human
gccugcuguuaacugcaggaau

SEQ ID NO: 519362 - RNA, 22 nt, Human
gcacacaguauaugcucauuaa

SEQ ID NO: 519363 - RNA, 22 nt, Human
uugaaauacugcauuguucagu

SEQ ID NO: 519364 - RNA, 22 nt, Human
ucacagaauuuuugcuuccagu

SEQ ID NO: 519365 - RNA, 22 nt, Human
aucaguuucacuugcuugcaaa

SEQ ID NO: 519366 - RNA, 22 nt, Human
auuauguagcuaaaaauugugu

SEQ ID NO: 519367 - RNA, 22 nt, Human
augcacaaacccacaauuaguc

SEQ ID NO: 519368 - RNA, 22 nt, Human
agauguguuucuaguuccugca

SEQ ID NO: 519369 - RNA, 22 nt, Human
ucuggcucuccagugcucuuag

SEQ ID NO: 519370 - RNA, 22 nt, Human
ccauggcauuuuaugugucuua

SEQ ID NO: 519371 - RNA, 22 nt, Human
aggccucuucagggagcaugga

SEQ ID NO: 519372 - RNA, 22 nt, Human
uuccaaguccagccaggccaaa

SEQ ID NO: 519373 - RNA, 22 nt, Human
uacacagaaauuguguagggau

SEQ ID NO: 519374 - RNA, 22 nt, Human
aagguacagaaauuaacaagga

SEQ ID NO: 519375 - RNA, 22 nt, Human
aucaggaucacugggagucuug

SEQ ID NO: 519376 - RNA, 19 nt, Human
ugaaauggcaguugcuaaa

SEQ ID NO: 519377 - RNA, 22 nt, Human
cucugaccauucccuugauuuu

SEQ ID NO: 519378 - RNA, 22 nt, Human
ggagaaggugcuggucacugug

SEQ ID NO: 519379 - RNA, 20 nt, Human
aaucucaguauccuaugcaa

SEQ ID NO: 519380 - RNA, 22 nt, Human
gcugggcugcccaaccucugac

SEQ ID NO: 519381 - RNA, 22 nt, Human
cuucuuccaguuauaagagcuu

SEQ ID NO: 519382 - RNA, 22 nt, Human
agccuggauccauguggcuacc

SEQ ID NO: 519383 - RNA, 22 nt, Human
augaugcuguuuaucauauacu

SEQ ID NO: 519384 - RNA, 22 nt, Human
uggcuggcuagugggcaggauu

SEQ ID NO: 519385 - RNA, 21 nt, Human
agcugcuccagggagcucagg

SEQ ID NO: 519386 - RNA, 22 nt, Human
cuuucacagcacaagccugccu

SEQ ID NO: 519387 - RNA, 22 nt, Human
gcugucaggaacaugccuuggu

SEQ ID NO: 519388 - RNA, 22 nt, Human
gggauggggucaacauguaccu

SEQ ID NO: 519389 - RNA, 22 nt, Human
gccugucugcagggcugucauu

SEQ ID NO: 519390 - RNA, 22 nt, Human
gccuggagcucggcugagggcg

SEQ ID NO: 519391 - RNA, 22 nt, Human
agaauaugaucggaauacagau

SEQ ID NO: 519392 - RNA, 22 nt, Human
uauguacaaucagcaguucaua

SEQ ID NO: 519393 - RNA, 22 nt, Human
uuuaucuuuaggacuuugcaga

SEQ ID NO: 519394 - RNA, 22 nt, Human
agcuggccuguuagagcugagu

SEQ ID NO: 519395 - RNA, 21 nt, Human
gauaaaaugggccuugguccu

SEQ ID NO: 519396 - RNA, 22 nt, Human
ucacacacauaaucuaagauua

SEQ ID NO: 519397 - RNA, 23 nt, Human
uagcaaaguuguuugggaaauuu

SEQ ID NO: 519398 - RNA, 22 nt, Human
gagaggucaucucccaucagca

SEQ ID NO: 519399 - RNA, 18 nt, Human
cuguccaguagacucugc

SEQ ID NO: 519400 - RNA, 22 nt, Human
agcagcauuaugauauaucuua

SEQ ID NO: 519401 - RNA, 23 nt, Human
agcaauaagaagggauacaugug

SEQ ID NO: 519402 - RNA, 19 nt, Human
aggaaagguggccuuagca

SEQ ID NO: 519403 - RNA, 22 nt, Human
cauuucuaagaaggcugcacau

SEQ ID NO: 519404 - RNA, 22 nt, Human
uccaguccuaucugcccuugga

SEQ ID NO: 519405 - RNA, 22 nt, Human
caccaucagcagcaggugucaa

SEQ ID NO: 519406 - RNA, 22 nt, Human
gcauggccuugugcuccuucuc

SEQ ID NO: 519407 - RNA, 22 nt, Human
ggagcugugcagugacuacaga

SEQ ID NO: 519408 - RNA, 22 nt, Human
caguguuccaggcggcagugaa

SEQ ID NO: 519409 - RNA, 22 nt, Human
caggagcucacagucuuugggu

SEQ ID NO: 519410 - RNA, 22 nt, Human
caagagcugcaaauagcgugac

SEQ ID NO: 519411 - RNA, 22 nt, Human
gaaucaauuauccaggcuguug

SEQ ID NO: 519412 - RNA, 23 nt, Human
augcccugugcagaaauguggaa

SEQ ID NO: 519413 - RNA, 22 nt, Human
uuuguagaacuauacuuacauu

SEQ ID NO: 519414 - RNA, 22 nt, Human
ucuuugcaugcauuuucccuua

SEQ ID NO: 519415 - RNA, 22 nt, Human
gggccccaaaaugccaggcucu

SEQ ID NO: 519416 - RNA, 21 nt, Human
ggagucauuagucauuuccuu

SEQ ID NO: 519417 - RNA, 22 nt, Human
gcugcccuaauaucacauguua

SEQ ID NO: 519418 - RNA, 22 nt, Human
agcugccacaugcccaagggca

SEQ ID NO: 519419 - RNA, 22 nt, Human
caacagcucagacacgggaccu

SEQ ID NO: 519420 - RNA, 22 nt, Human
aaaaguauccacagcucaggag

SEQ ID NO: 519421 - RNA, 22 nt, Human
ucaguuuuuguuugccagauag

SEQ ID NO: 519422 - RNA, 22 nt, Human
ucaggcugcccguucagggcuc

SEQ ID NO: 519423 - RNA, 22 nt, Human
gcugccugguuucucagcugca

SEQ ID NO: 519424 - RNA, 22 nt, Human
aucaggaugaagcuguagcgaa

SEQ ID NO: 519425 - RNA, 22 nt, Human
gaagcagcucagauugacugaa

SEQ ID NO: 519426 - RNA, 22 nt, Human
uugggcucaggaguuugagacc

SEQ ID NO: 519427 - RNA, 22 nt, Human
gugcagcaaaguuugagauaua

SEQ ID NO: 519428 - RNA, 22 nt, Human
agcugcugcggaaagaugccac

SEQ ID NO: 519429 - RNA, 22 nt, Human
cuggugcuggagccuagucccu

SEQ ID NO: 519430 - RNA, 22 nt, Human
cauuaagauuuuuuucuacugg

SEQ ID NO: 519431 - RNA, 17 nt, Human
aauagcugcucagagag

SEQ ID NO: 519432 - RNA, 22 nt, Human
uaaauucccaacucugcucuuc

SEQ ID NO: 519433 - RNA, 22 nt, Human
uaugcauaugaccccaagcuug

SEQ ID NO: 519434 - RNA, 22 nt, Human
cuguauuuucaugccuacguac

SEQ ID NO: 519435 - RNA, 22 nt, Human
aaguccuuggagaauagaaagg

SEQ ID NO: 519436 - RNA, 20 nt, Human
ugaugguucuuuccggguug

SEQ ID NO: 519437 - RNA, 22 nt, Human
cugcagccuccuccagcuacgu

SEQ ID NO: 519438 - RNA, 22 nt, Human
ccucaggaaaugaauaaauggc

SEQ ID NO: 519439 - RNA, 17 nt, Human
gcacauguguucuuuua

SEQ ID NO: 519440 - RNA, 22 nt, Human
uauuagcucaugauuucggugg

SEQ ID NO: 519441 - RNA, 22 nt, Human
caugcagugacucagacacagg

SEQ ID NO: 519442 - RNA, 22 nt, Human
aguccuggguucugguguuuug

SEQ ID NO: 519443 - RNA, 22 nt, Human
acuuguucauugaguacauaug

SEQ ID NO: 519444 - RNA, 22 nt, Human
ucugggcuugccugguugugca

SEQ ID NO: 519445 - RNA, 22 nt, Human
gaaaggagggaaacagagcggu

SEQ ID NO: 519446 - RNA, 22 nt, Human
gcagccacuaguuuuccuguuu

SEQ ID NO: 519447 - RNA, 22 nt, Human
uuugaaguaccugguucugacu

SEQ ID NO: 519448 - RNA, 22 nt, Human
cagggguggcugcagcagaggu

SEQ ID NO: 519449 - RNA, 22 nt, Human
acagaacuuccugcuggagugg

SEQ ID NO: 519450 - RNA, 22 nt, Human
acacuacaaucucagaacuaua

SEQ ID NO: 519451 - RNA, 22 nt, Human
cuucccuucugugcagggcaga

SEQ ID NO: 519452 - RNA, 22 nt, Human
ucuucaaagaauuuuaguaauu

SEQ ID NO: 519453 - RNA, 22 nt, Human
ucauacauucagcagauauuug

SEQ ID NO: 519454 - RNA, 22 nt, Human
ugagccugcugucgcuggaccc

SEQ ID NO: 519455 - RNA, 20 nt, Human
aggaaaaauggaaacuggag

SEQ ID NO: 519456 - RNA, 22 nt, Human
uagagugguuaacaguuuagaa

SEQ ID NO: 519457 - RNA, 21 nt, Human
agcagcugcaguuucuaucug

SEQ ID NO: 519458 - RNA, 22 nt, Human
cagcaggaccauugaggcauca

SEQ ID NO: 519459 - RNA, 22 nt, Human
ggagccaggggaccuucacaga

SEQ ID NO: 519460 - RNA, 18 nt, Human
gcugagguggugucagag

SEQ ID NO: 519461 - RNA, 22 nt, Human
acaaaaauuagcugggcauggu

SEQ ID NO: 519462 - RNA, 22 nt, Human
cacauaagaaaugaauaugaga

SEQ ID NO: 519463 - RNA, 22 nt, Human
uagggcuccacucccagagauu

SEQ ID NO: 519464 - RNA, 22 nt, Human
cacccuggaaagaaggucuggg

SEQ ID NO: 519465 - RNA, 22 nt, Human
caggagugucuccacacagcaa

SEQ ID NO: 519466 - RNA, 22 nt, Human
gcaguuccuacaguggaaagcg

SEQ ID NO: 519467 - RNA, 22 nt, Human
gcagacagccagacugcacugg

SEQ ID NO: 519468 - RNA, 22 nt, Human
uauuccaaaaucccaaacugcc

SEQ ID NO: 519469 - RNA, 19 nt, Human
ucugaaguccagggcauac

SEQ ID NO: 519470 - RNA, 18 nt, Human
ccuggaccugucuccuuu

SEQ ID NO: 519471 - RNA, 22 nt, Human
uucagagccacuucaagucuaa

SEQ ID NO: 519472 - RNA, 22 nt, Human
ugcuggggcucugaccacucca

SEQ ID NO: 519473 - RNA, 19 nt, Human
cagaaauagcgaaguguaa

SEQ ID NO: 519474 - RNA, 22 nt, Human
gcaggcuccaaggccugggaga

SEQ ID NO: 519475 - RNA, 22 nt, Human
cuguggcugcagaccuuaaaca

SEQ ID NO: 519476 - RNA, 20 nt, Human
aagagaagaagucuuugaaa

SEQ ID NO: 519477 - RNA, 22 nt, Human
acaaagugcacaagaugagaac

SEQ ID NO: 519478 - RNA, 22 nt, Human
ucacagaacaagccugguggag

SEQ ID NO: 519479 - RNA, 22 nt, Human
gaagccaacauuccaaguagaa

SEQ ID NO: 519480 - RNA, 22 nt, Human
aaaaugagacacaugugacucc

SEQ ID NO: 519481 - RNA, 22 nt, Human
ucaaagucauggcuaguaauga

SEQ ID NO: 519482 - RNA, 22 nt, Human
ugucccuggaacuauggcucca

SEQ ID NO: 519483 - RNA, 22 nt, Human
agaaaggaggaagaaugaccuc

SEQ ID NO: 519484 - RNA, 22 nt, Human
uauuuagaacagacaauagaaa

SEQ ID NO: 519485 - RNA, 22 nt, Human
uucucuucaucucaguaaaugu

SEQ ID NO: 519486 - RNA, 22 nt, Human
gaauaacagcaaguuugcaggc

SEQ ID NO: 519487 - RNA, 22 nt, Human
accuggcuucuaaucauggcuc

SEQ ID NO: 519488 - RNA, 22 nt, Human
aggugcugccccgagaaggaug

SEQ ID NO: 519489 - RNA, 22 nt, Human
caggaacagcaccaggagcuag

SEQ ID NO: 519490 - RNA, 22 nt, Human
acaaaggugcgucccuucagcu

SEQ ID NO: 519491 - RNA, 23 nt, Human
gccuucagcucgggaaggcuccc

SEQ ID NO: 519492 - RNA, 22 nt, Human
cuccaggccagggaaguggaca

SEQ ID NO: 519493 - RNA, 22 nt, Human
aagccagauagaagaacucauu

SEQ ID NO: 519494 - RNA, 22 nt, Human
cagaggccccagaacuagcucu

SEQ ID NO: 519495 - RNA, 22 nt, Human
uuucacacuagucagaauacca

SEQ ID NO: 519496 - RNA, 22 nt, Human
ggccaucugccucaaugugugc

SEQ ID NO: 519497 - RNA, 22 nt, Human
gagcuuggugcugccuguuguc

SEQ ID NO: 519498 - RNA, 22 nt, Human
ccuggcuccagcugccuguccu

SEQ ID NO: 519499 - RNA, 20 nt, Human
cagagcuguuauggaugaug

SEQ ID NO: 519500 - RNA, 19 nt, Human
ggauucugcaguuuucaca

SEQ ID NO: 519501 - RNA, 22 nt, Human
ugugggaggaacacagccagaa

SEQ ID NO: 519502 - RNA, 22 nt, Human
ucuggggauaagacccagguau

SEQ ID NO: 519503 - RNA, 22 nt, Human
gcagggccagggcucaggcugu

SEQ ID NO: 519504 - RNA, 22 nt, Human
uuagccauggacugaauugacu

SEQ ID NO: 519505 - RNA, 22 nt, Human
aacguccucaccuguaacuugg

SEQ ID NO: 519506 - RNA, 22 nt, Human
uaaagccacuucauucuagucu

SEQ ID NO: 519507 - RNA, 22 nt, Human
uuuauacuccacucugcaagcg

SEQ ID NO: 519508 - RNA, 22 nt, Human
ucucuucuuuggggugggcuca

SEQ ID NO: 519509 - RNA, 22 nt, Human
aagaggccucaccucacugccc

SEQ ID NO: 519510 - RNA, 22 nt, Human
ucugucacccagagugcagugg

SEQ ID NO: 519511 - RNA, 22 nt, Human
aagugacaaaaggguauccaaa

SEQ ID NO: 519512 - RNA, 22 nt, Human
guccugugaccugcauccugag

SEQ ID NO: 519513 - RNA, 22 nt, Human
uagaaacucaggauacucuucc

SEQ ID NO: 519514 - RNA, 22 nt, Human
caucucaggucugugguucacu

SEQ ID NO: 519515 - RNA, 22 nt, Human
ugcaaggcuugcaauggugauc

SEQ ID NO: 519516 - RNA, 22 nt, Human
uaauuuugcugugaccauugaa

SEQ ID NO: 519517 - RNA, 21 nt, Human
aagaacuauugagguacacag

SEQ ID NO: 519518 - RNA, 15 nt, Human
ugggcagaucacuug

SEQ ID NO: 519519 - RNA, 22 nt, Human
gagguuccccauuguacuggcu

SEQ ID NO: 519520 - RNA, 22 nt, Human
gaaguucuuugcuccccaguac

SEQ ID NO: 519521 - RNA, 22 nt, Human
ccuuggagcggucagcacuggu

SEQ ID NO: 519522 - RNA, 22 nt, Human
aagccuucccuuuuugagcuca

SEQ ID NO: 519523 - RNA, 22 nt, Human
guauuagcuguuagcuacauca

SEQ ID NO: 519524 - RNA, 18 nt, Human
gcuccuggagucugacuc

SEQ ID NO: 519525 - RNA, 22 nt, Human
auauuucuugagcaccugguau

SEQ ID NO: 519526 - RNA, 22 nt, Human
acaaaugcagcauaaagugaac

SEQ ID NO: 519527 - RNA, 22 nt, Human
cuucagagaguccagggacugc

SEQ ID NO: 519528 - RNA, 22 nt, Human
ugggaagguacacgggaaagag

SEQ ID NO: 519529 - RNA, 22 nt, Human
ugaggaggucagagucuggcug

SEQ ID NO: 519530 - RNA, 22 nt, Human
cuguugcaucauggcucuuaau

SEQ ID NO: 519531 - RNA, 22 nt, Human
ccuuagcagggccgggccuggg

SEQ ID NO: 519532 - RNA, 23 nt, Human
cauggcagcaagagcucauggcc

SEQ ID NO: 519533 - RNA, 22 nt, Human
aaauaguuuagcucucauuuca

SEQ ID NO: 519534 - RNA, 22 nt, Human
aaaauccacaacgcucauuuca

SEQ ID NO: 519535 - RNA, 22 nt, Human
caugugucaaaugauguagcug

SEQ ID NO: 519536 - RNA, 22 nt, Human
accuguuuagaaagcuuaugag

SEQ ID NO: 519537 - RNA, 22 nt, Human
aagagucuauuggaacuagaca

SEQ ID NO: 519538 - RNA, 22 nt, Human
cacauuccuggugcucagcagc

SEQ ID NO: 519539 - RNA, 22 nt, Human
uggcccugaggacccagugugg

SEQ ID NO: 519540 - RNA, 22 nt, Human
ucugccagguggggagaggcca

SEQ ID NO: 519541 - RNA, 22 nt, Human
caaggccaagucucugugaaga

SEQ ID NO: 519542 - RNA, 22 nt, Human
ucacagaaggaccuuguuucau

SEQ ID NO: 519543 - RNA, 22 nt, Human
guggcuuuauaggaagaggaac

SEQ ID NO: 519544 - RNA, 22 nt, Human
gugcugaauugugcucuuuaca

SEQ ID NO: 519545 - RNA, 22 nt, Human
ggcuucugaaaucucugugcgu

SEQ ID NO: 519546 - RNA, 22 nt, Human
agggagagaaguuauacaagau

SEQ ID NO: 519547 - RNA, 22 nt, Human
ucccugcuuucuugugagggga

SEQ ID NO: 519548 - RNA, 20 nt, Human
agggucugaugugguggccc

SEQ ID NO: 519549 - RNA, 22 nt, Human
ucacaaagcuuugauaagcaga

SEQ ID NO: 519550 - RNA, 22 nt, Human
aucuggcuggauucuuagcguu

SEQ ID NO: 519551 - RNA, 23 nt, Human
agaagcagcuucuggaguaucgg

SEQ ID NO: 519552 - RNA, 22 nt, Human
augaaaugcugagaggugcuuc

SEQ ID NO: 519553 - RNA, 22 nt, Human
caguuucugggcguucacaggu

SEQ ID NO: 519554 - RNA, 22 nt, Human
ccuggccagccagggcuggggu

SEQ ID NO: 519555 - RNA, 22 nt, Human
aguacauuuauuaaugguaaaa

SEQ ID NO: 519556 - RNA, 22 nt, Human
aagaagcuguagggauuaacuc

SEQ ID NO: 519557 - RNA, 22 nt, Human
cuguccuguacuuugaggcccu

SEQ ID NO: 519558 - RNA, 22 nt, Human
cauugcacuucugcuuuuccuc

SEQ ID NO: 519559 - RNA, 22 nt, Human
ggggauggaauguaguagugau

SEQ ID NO: 519560 - RNA, 22 nt, Human
ucagagugcagcgggaggcugg

SEQ ID NO: 519561 - RNA, 22 nt, Human
cagucucacccuggaggcccca

SEQ ID NO: 519562 - RNA, 22 nt, Human
aagguacaccaaaguucaaguu

SEQ ID NO: 519563 - RNA, 22 nt, Human
ccugggaggcggagguugcagg

SEQ ID NO: 519564 - RNA, 22 nt, Human
acugggcuggggcucauucucc

SEQ ID NO: 519565 - RNA, 18 nt, Human
cccggcuaauuuuuggua

SEQ ID NO: 519566 - RNA, 18 nt, Human
acaaaggucugcaagacc

SEQ ID NO: 519567 - RNA, 21 nt, Human
acagccaggaacaugaggggc

SEQ ID NO: 519568 - RNA, 22 nt, Human
gaguggagcaaaagagguagau

SEQ ID NO: 519569 - RNA, 22 nt, Human
acuauaaaaggauaaaccagaa

SEQ ID NO: 519570 - RNA, 22 nt, Human
cuucaguucuaaaguagaaugu

SEQ ID NO: 519571 - RNA, 22 nt, Human
cuccaaguccgagggcucucaa

SEQ ID NO: 519572 - RNA, 22 nt, Human
aggagcugagggagcgcccuug

SEQ ID NO: 519573 - RNA, 22 nt, Human
aucuagaaaguguugaagauca

SEQ ID NO: 519574 - RNA, 22 nt, Human
agaccugggugcccugugcuuu

SEQ ID NO: 519575 - RNA, 22 nt, Human
gcugcuggaacaaaucacccca

SEQ ID NO: 519576 - RNA, 22 nt, Human
gagauuggauuuaauggccaaa

SEQ ID NO: 519577 - RNA, 22 nt, Human
gcuggcuguuggagguaccugc

SEQ ID NO: 519578 - RNA, 22 nt, Human
uuugaaaguucuucugacacua

SEQ ID NO: 519579 - RNA, 22 nt, Human
gcagggaagacccggagcagcg

SEQ ID NO: 519580 - RNA, 22 nt, Human
gaagucauccacuaugggggag

SEQ ID NO: 519581 - RNA, 22 nt, Human
cccaguguuacgugacagccug

SEQ ID NO: 519582 - RNA, 20 nt, Human
agcuucagcccuaggauugc

SEQ ID NO: 519583 - RNA, 22 nt, Human
cucucuggguccucuuuuauag

SEQ ID NO: 519584 - RNA, 21 nt, Human
gggugcuguggucaugcagga

SEQ ID NO: 519585 - RNA, 22 nt, Human
cagagcugucauuugccaguga

SEQ ID NO: 519586 - RNA, 22 nt, Human
aaugcaguuucauuuguagaau

SEQ ID NO: 519587 - RNA, 22 nt, Human
ccaggcucagcgcgcacgucug

SEQ ID NO: 519588 - RNA, 22 nt, Human
uccugccuaccuugcggaggug

SEQ ID NO: 519589 - RNA, 22 nt, Human
aagagaaggcccugacccaccc

SEQ ID NO: 519590 - RNA, 22 nt, Human
gggguccucggagccugggucu

SEQ ID NO: 519591 - RNA, 22 nt, Human
agccucucuuucugguggcuaa

SEQ ID NO: 519592 - RNA, 22 nt, Human
aauuucagagguagagauucua

SEQ ID NO: 519593 - RNA, 20 nt, Human
aguuugugugucuaugcgcu

SEQ ID NO: 519594 - RNA, 22 nt, Human
aggagcugucauuugauucaca

SEQ ID NO: 519595 - RNA, 22 nt, Human
uauuuggacaccaaguagaagu

SEQ ID NO: 519596 - RNA, 22 nt, Human
ggaccugcccuggcucagaugc

SEQ ID NO: 519597 - RNA, 22 nt, Human
gaccauuuguugaaaagauuau

SEQ ID NO: 519598 - RNA, 22 nt, Human
aaccugagauaauaggagagua

SEQ ID NO: 519599 - RNA, 22 nt, Human
ugacaauacagagagagcaaaa

SEQ ID NO: 519600 - RNA, 22 nt, Human
ucaggaaauggacaucuuugcu

SEQ ID NO: 519601 - RNA, 22 nt, Human
agaggcucugccgccucaggua

SEQ ID NO: 519602 - RNA, 22 nt, Human
caacagaaggaagcagggucag

SEQ ID NO: 519603 - RNA, 22 nt, Human
uggaagcagugauucuugucug

SEQ ID NO: 519604 - RNA, 22 nt, Human
uugucagccagcucgcacucuu

SEQ ID NO: 519605 - RNA, 22 nt, Human
ucuguacauuuggggaccccag

SEQ ID NO: 519606 - RNA, 22 nt, Human
agagacugucacauaacagagg

SEQ ID NO: 519607 - RNA, 22 nt, Human
gagccugaugaaacaggcagac

SEQ ID NO: 519608 - RNA, 22 nt, Human
cucaguguuaaauauaagguau

SEQ ID NO: 519609 - RNA, 22 nt, Human
uaguaucuuucuauauuuccca

SEQ ID NO: 519610 - RNA, 22 nt, Human
cacuggaauauggcguugaacc

SEQ ID NO: 519611 - RNA, 22 nt, Human
uagcauuuggacauugucaccu

SEQ ID NO: 519612 - RNA, 22 nt, Human
uagucuuuuuaauaaauaaugc

SEQ ID NO: 519613 - RNA, 22 nt, Human
auauuuguaaaauucugugucu

SEQ ID NO: 519614 - RNA, 22 nt, Human
uagguucaugaaauuuucagga

SEQ ID NO: 519615 - RNA, 22 nt, Human
ccagaggaugcuggucagccuc

SEQ ID NO: 519616 - RNA, 22 nt, Human
gaggccaggagugcuguaaguu

SEQ ID NO: 519617 - RNA, 20 nt, Human
ccagggcuggcuccugggau

SEQ ID NO: 519618 - RNA, 22 nt, Human
uaaagcagugugguuguguccc

SEQ ID NO: 519619 - RNA, 23 nt, Human
acugggcugaaauuuuucauggc

SEQ ID NO: 519620 - RNA, 22 nt, Human
acagcuggcaggggggcaugaa

SEQ ID NO: 519621 - RNA, 20 nt, Human
aaaggaauauaugaaguaua

SEQ ID NO: 519622 - RNA, 22 nt, Human
uuaauuuauguccaaaccagau

SEQ ID NO: 519623 - RNA, 22 nt, Human
cucccuggugacucccaaagcu

SEQ ID NO: 519624 - RNA, 22 nt, Human
ugcaggucaucccugugcuucu

SEQ ID NO: 519625 - RNA, 22 nt, Human
cugggucugucacuagauaaau

SEQ ID NO: 519626 - RNA, 22 nt, Human
cugcacagcuggccagggagag

SEQ ID NO: 519627 - RNA, 22 nt, Human
ugcuggccucggcgcugggccu

SEQ ID NO: 519628 - RNA, 22 nt, Human
cuggcagcuggaggcuagaggc

SEQ ID NO: 519629 - RNA, 22 nt, Human
uuguccuuggaugaagcuggga

SEQ ID NO: 519630 - RNA, 20 nt, Human
uuauuuguuuacuuuggucc

SEQ ID NO: 519631 - RNA, 22 nt, Human
uucccacaguguugaauccucu

SEQ ID NO: 519632 - RNA, 22 nt, Human
gggucaggcucagcagggcagc

SEQ ID NO: 519633 - RNA, 21 nt, Human
cugccuugaaugguacuggga

SEQ ID NO: 519634 - RNA, 22 nt, Human
gcuggguggaucggaggcucug

SEQ ID NO: 519635 - RNA, 22 nt, Human
gcguggugcugcccugcacaca

SEQ ID NO: 519636 - RNA, 22 nt, Human
agagcugauuugauuacagugc

SEQ ID NO: 519637 - RNA, 17 nt, Human
agcaggcugcagaggcc

SEQ ID NO: 519638 - RNA, 20 nt, Human
gugccuggagaagaggcugu

SEQ ID NO: 519639 - RNA, 22 nt, Human
guaagccugagaaacaccaccu

SEQ ID NO: 519640 - RNA, 22 nt, Human
aucagcaaaaaugccuucagaa

SEQ ID NO: 519641 - RNA, 22 nt, Human
uguuuauugagugccuacuaua

SEQ ID NO: 519642 - RNA, 22 nt, Human
uaaaagacccucuagaguccca

SEQ ID NO: 519643 - RNA, 22 nt, Human
auucaaguccagcuucucuaca

SEQ ID NO: 519644 - RNA, 22 nt, Human
guccuggcuuaguucgcuguaa

SEQ ID NO: 519645 - RNA, 22 nt, Human
aacuuucagaauccuaugcauu

SEQ ID NO: 519646 - RNA, 22 nt, Human
acuuucucaaaucagacuuuaa

SEQ ID NO: 519647 - RNA, 22 nt, Human
ugcaguggaaagacucagacuu

SEQ ID NO: 519648 - RNA, 22 nt, Human
uucacaaagcuggagcauuucc

SEQ ID NO: 519649 - RNA, 21 nt, Human
ggcuggucgcgugcaugucuc

SEQ ID NO: 519650 - RNA, 22 nt, Human
uugcauugugauuacagaggug

SEQ ID NO: 519651 - RNA, 22 nt, Human
auaaacagcuccauuuagugcc

SEQ ID NO: 519652 - RNA, 22 nt, Human
uaucaucuuguugucaugcagc

SEQ ID NO: 519653 - RNA, 22 nt, Human
gcucagaggaugcuccuuuaug

SEQ ID NO: 519654 - RNA, 22 nt, Human
gucaaaaaguagucauuucugu

SEQ ID NO: 519655 - RNA, 21 nt, Human
gagugcagcaagguagagucu

SEQ ID NO: 519656 - RNA, 22 nt, Human
uaacuucuggaaaugcaucugc

SEQ ID NO: 519657 - RNA, 22 nt, Human
cauuuacagugagaguuuuuac

SEQ ID NO: 519658 - RNA, 22 nt, Human
acugggcugguuaguuuuacua

SEQ ID NO: 519659 - RNA, 22 nt, Human
cuuaggauuuaauuucagacuc

SEQ ID NO: 519660 - RNA, 22 nt, Human
cugggccuccacgggccaucac

SEQ ID NO: 519661 - RNA, 22 nt, Human
gcaucuuucuguccauucagca

SEQ ID NO: 519662 - RNA, 22 nt, Human
cuucuugucaauuugccauugu

SEQ ID NO: 519663 - RNA, 22 nt, Human
gagagcugggaaagccguggag

SEQ ID NO: 519664 - RNA, 22 nt, Human
gcuggcuggaggugaggaagaa

SEQ ID NO: 519665 - RNA, 22 nt, Human
uaaaaugacuuccuccaacauc

SEQ ID NO: 519666 - RNA, 22 nt, Human
agagacuggagaugggcagugu

SEQ ID NO: 519667 - RNA, 22 nt, Human
gguccagaguccuugcuagaga

SEQ ID NO: 519668 - RNA, 22 nt, Human
aaaagagguuaaccaggugugu

SEQ ID NO: 519669 - RNA, 22 nt, Human
acaguguucugcuuuuuaaucc

SEQ ID NO: 519670 - RNA, 22 nt, Human
ucucagagaaaugugucaccau

SEQ ID NO: 519671 - RNA, 22 nt, Human
uccuggggccagcacuggugga

SEQ ID NO: 519672 - RNA, 22 nt, Human
cacauuuaauccuuuauaagua

SEQ ID NO: 519673 - RNA, 20 nt, Human
acauguacuaaugaauacag

SEQ ID NO: 519674 - RNA, 22 nt, Human
augucaaacacaacaccagugg

SEQ ID NO: 519675 - RNA, 22 nt, Human
gagagcugggcuuugggugaag

SEQ ID NO: 519676 - RNA, 20 nt, Human
uuguuucugcuauuuucuaa

SEQ ID NO: 519677 - RNA, 22 nt, Human
cugccaggugagcuccaggccu

SEQ ID NO: 519678 - RNA, 22 nt, Human
auaugcauguacgugugcacaa

SEQ ID NO: 519679 - RNA, 22 nt, Human
aacaaauguguggcaguguggg

SEQ ID NO: 519680 - RNA, 22 nt, Human
aaauauuauugcuuaaggggag

SEQ ID NO: 519681 - RNA, 22 nt, Human
acacagggaggaggugcugugc

SEQ ID NO: 519682 - RNA, 22 nt, Human
gagcccagcucuaccucagacu

SEQ ID NO: 519683 - RNA, 22 nt, Human
accucuggccuucaggcaucau

SEQ ID NO: 519684 - RNA, 19 nt, Human
ccugggagucagcugaagg

SEQ ID NO: 519685 - RNA, 22 nt, Human
gcguccagggaaggcccagcug

SEQ ID NO: 519686 - RNA, 22 nt, Human
ugccaggaggaggugggacaga

SEQ ID NO: 519687 - RNA, 21 nt, Human
ucuguacaucauugagucccc

SEQ ID NO: 519688 - RNA, 22 nt, Human
agcagccauuuaaaaugaauug

SEQ ID NO: 519689 - RNA, 22 nt, Human
guguggcugccagccaagaggc

SEQ ID NO: 519690 - RNA, 22 nt, Human
uccaaguccauuaugguggucu

SEQ ID NO: 519691 - RNA, 20 nt, Human
ggcaggugcucgcuuggucu

SEQ ID NO: 519692 - RNA, 22 nt, Human
uuacaacaaaggcacgugcaug

SEQ ID NO: 519693 - RNA, 22 nt, Human
cacccagggcugugccugccca

SEQ ID NO: 519694 - RNA, 22 nt, Human
aaugcaaacagcccagaaucca

SEQ ID NO: 519695 - RNA, 22 nt, Human
ugagagucucagaccuccuggu

SEQ ID NO: 519696 - RNA, 22 nt, Human
ugucagagcaaugagguucagc

SEQ ID NO: 519697 - RNA, 22 nt, Human
uggcccugcuguaucaucugcu

SEQ ID NO: 519698 - RNA, 17 nt, Human
caaggccagcaucuuca

SEQ ID NO: 519699 - RNA, 22 nt, Human
uugugaguagugccgcaauaaa

SEQ ID NO: 519700 - RNA, 22 nt, Human
caccuguuguuuauucaucucu

SEQ ID NO: 519701 - RNA, 22 nt, Human
agcccagguugaggcugcagug

SEQ ID NO: 519702 - RNA, 22 nt, Human
ucaguccuccucucauagagag

SEQ ID NO: 519703 - RNA, 18 nt, Human
ccucaggggaccuggcag

SEQ ID NO: 519704 - RNA, 22 nt, Human
aaauauagugacacuuauaguc

SEQ ID NO: 519705 - RNA, 22 nt, Human
uguauuuuuaggaaugcgcuau

SEQ ID NO: 519706 - RNA, 22 nt, Human
gugucauuaaccaccaugcaaa

SEQ ID NO: 519707 - RNA, 22 nt, Human
accagugggaaguggaaaauga

SEQ ID NO: 519708 - RNA, 22 nt, Human
auguccuucuccucuuaccugc

SEQ ID NO: 519709 - RNA, 22 nt, Human
uggagaauauuuccaaaucuaa

SEQ ID NO: 519710 - RNA, 22 nt, Human
gggcuucucccuaaggacucug

SEQ ID NO: 519711 - RNA, 20 nt, Human
cccagagccauagccagaca

SEQ ID NO: 519712 - RNA, 22 nt, Human
acaggucuccagagugagagga

SEQ ID NO: 519713 - RNA, 22 nt, Human
gggaggagcugagugugugugc

SEQ ID NO: 519714 - RNA, 22 nt, Human
uauuuguguggguaucuauaua

SEQ ID NO: 519715 - RNA, 22 nt, Human
aagugcaaaucuguggcugaaa

SEQ ID NO: 519716 - RNA, 22 nt, Human
aguggcugauuacaaacugagu

SEQ ID NO: 519717 - RNA, 22 nt, Human
augcagaaggagccaugcuugc

SEQ ID NO: 519718 - RNA, 22 nt, Human
ggcauggccuguaagacggaga

SEQ ID NO: 519719 - RNA, 22 nt, Human
aagcuucaggcccacccauguc

SEQ ID NO: 519720 - RNA, 22 nt, Human
cagaggcugcucuggguggcau

SEQ ID NO: 519721 - RNA, 22 nt, Human
uagcacauaacuuagaauaguu

SEQ ID NO: 519722 - RNA, 22 nt, Human
aacagcuuuagaggauaauagu

SEQ ID NO: 519723 - RNA, 22 nt, Human
aagucaaagcuuucagaggaaa

SEQ ID NO: 519724 - RNA, 23 nt, Human
ucucugggugggcugugucuaua

SEQ ID NO: 519725 - RNA, 22 nt, Human
augcuucuguaaugugggaaug

SEQ ID NO: 519726 - RNA, 22 nt, Human
agccagggaugcagcacaguga

SEQ ID NO: 519727 - RNA, 22 nt, Human
cccaggcuggauuucgguggca

SEQ ID NO: 519728 - RNA, 22 nt, Human
gcaguguuaggaauaaaaauga

SEQ ID NO: 519729 - RNA, 21 nt, Human
gauuucacuuaccuucauuua

SEQ ID NO: 519730 - RNA, 22 nt, Human
ccagcuuuuagugggcuuauua

SEQ ID NO: 519731 - RNA, 22 nt, Human
gcuggcucagggacuagaguuu

SEQ ID NO: 519732 - RNA, 22 nt, Human
caacaccuugaucuuggacuuc

SEQ ID NO: 519733 - RNA, 22 nt, Human
aaccugcaguuuuuauucugag

SEQ ID NO: 519734 - RNA, 22 nt, Human
cuuacaguacuucuaauaugau

SEQ ID NO: 519735 - RNA, 22 nt, Human
agcuguguagggaaucagagaa

SEQ ID NO: 519736 - RNA, 22 nt, Human
acucagcucaggagcuggcugg

SEQ ID NO: 519737 - RNA, 22 nt, Human
uuucuacaguacugauuucaua

SEQ ID NO: 519738 - RNA, 22 nt, Human
gcagcccagagcgcaggacccc

SEQ ID NO: 519739 - RNA, 22 nt, Human
cccuuucccuucuggcucaggg

SEQ ID NO: 519740 - RNA, 22 nt, Human
gggacaggccccucgcuagcuu

SEQ ID NO: 519741 - RNA, 22 nt, Human
ugcuucugacauguucuugguu

SEQ ID NO: 519742 - RNA, 22 nt, Human
ucuagaaaaaaacugcugugga

SEQ ID NO: 519743 - RNA, 22 nt, Human
ccugugucaucagcuguggcua

SEQ ID NO: 519744 - RNA, 22 nt, Human
aucuugugugaugaugagaaag

SEQ ID NO: 519745 - RNA, 22 nt, Human
cugcugugagugguucuugccu

SEQ ID NO: 519746 - RNA, 22 nt, Human
agauaaaaugguucaaaggcua

SEQ ID NO: 519747 - RNA, 22 nt, Human
ucagugcagggugggagagaga

SEQ ID NO: 519748 - RNA, 22 nt, Human
ccagcaggguugguuucuucug

SEQ ID NO: 519749 - RNA, 22 nt, Human
caucacagguccugaugacauu

SEQ ID NO: 519750 - RNA, 22 nt, Human
gcugccucugcgacucugggcg

SEQ ID NO: 519751 - RNA, 22 nt, Human
ucaggaaaauacugcuuaucca

SEQ ID NO: 519752 - RNA, 22 nt, Human
ggucccuggggaacuaggcugu

SEQ ID NO: 519753 - RNA, 22 nt, Human
uaauuauaacaguuacaucuua

SEQ ID NO: 519754 - RNA, 22 nt, Human
accugcagguguuuccacacuu

SEQ ID NO: 519755 - RNA, 22 nt, Human
gagugugggcacgggggccuug

SEQ ID NO: 519756 - RNA, 22 nt, Human
auugaaaaauucacaauucugg

SEQ ID NO: 519757 - RNA, 22 nt, Human
ccaguguuccagagagcugaug

SEQ ID NO: 519758 - RNA, 23 nt, Human
ugaaacauuuaggguagaauuuc

SEQ ID NO: 519759 - RNA, 22 nt, Human
auguccagaguguccuggaaag

SEQ ID NO: 519760 - RNA, 22 nt, Human
uacccaggagaaacagcagggc

SEQ ID NO: 519761 - RNA, 22 nt, Human
gcuguggcuguacagagaccau

SEQ ID NO: 519762 - RNA, 20 nt, Human
guucucacugaucugcaggg

SEQ ID NO: 519763 - RNA, 22 nt, Human
agcauugccugccuauugcuaa

SEQ ID NO: 519764 - RNA, 20 nt, Human
gcugaggucauuaugccuca

SEQ ID NO: 519765 - RNA, 22 nt, Human
agagagcccgggccagggcaca

SEQ ID NO: 519766 - RNA, 22 nt, Human
cugccuuggcccuaguucaugg

SEQ ID NO: 519767 - RNA, 22 nt, Human
gggcuccaucacaggcuccauc

SEQ ID NO: 519768 - RNA, 22 nt, Human
ggcccucccugagccagguggg

SEQ ID NO: 519769 - RNA, 22 nt, Human
gcucugggcugcccucuggaca

SEQ ID NO: 519770 - RNA, 20 nt, Human
uugaaugaaugucuggcuca

SEQ ID NO: 519771 - RNA, 22 nt, Human
augugucauuauccagaauaac

SEQ ID NO: 519772 - RNA, 22 nt, Human
aaauggauggaauugacauuua

SEQ ID NO: 519773 - RNA, 22 nt, Human
caggguggaauggaaugcuggc

SEQ ID NO: 519774 - RNA, 22 nt, Human
cauuuguaucauauguaucuua

SEQ ID NO: 519775 - RNA, 20 nt, Human
ucagaugggagugagccauc

SEQ ID NO: 519776 - RNA, 19 nt, Human
uggccagguacugucugcu

SEQ ID NO: 519777 - RNA, 22 nt, Human
guauuuguaguagcauagaauu

SEQ ID NO: 519778 - RNA, 22 nt, Human
agagucugaggcagcugcagcc

SEQ ID NO: 519779 - RNA, 22 nt, Human
cuuuuucuaaucauaauugucu

SEQ ID NO: 519780 - RNA, 22 nt, Human
aagauguaucaguuaagucuuc

SEQ ID NO: 519781 - RNA, 22 nt, Human
agugcaaagggaucagauuggg

SEQ ID NO: 519782 - RNA, 22 nt, Human
uggcacuugcuucagaugaugu

SEQ ID NO: 519783 - RNA, 22 nt, Human
cucagcuggcaauucuggcucc

SEQ ID NO: 519784 - RNA, 22 nt, Human
aaagcauuauucuguggaaaaa

SEQ ID NO: 519785 - RNA, 22 nt, Human
agcagggcuuugcagacuuggg

SEQ ID NO: 519786 - RNA, 22 nt, Human
gguggccucucaugcaagguag

SEQ ID NO: 519787 - RNA, 22 nt, Human
ccacagugacacgggcuggccc

SEQ ID NO: 519788 - RNA, 22 nt, Human
guccugugagauucaugcucaa

SEQ ID NO: 519789 - RNA, 22 nt, Human
agauacauuaguaguuacuugu

SEQ ID NO: 519790 - RNA, 22 nt, Human
cuauuacauuucuggacauuca

SEQ ID NO: 519791 - RNA, 21 nt, Human
ugggccagaucugaguuucua

SEQ ID NO: 519792 - RNA, 22 nt, Human
caggggcugugggcggagccuc

SEQ ID NO: 519793 - RNA, 22 nt, Human
auugaagauuaaaugcuuccuu

SEQ ID NO: 519794 - RNA, 22 nt, Human
aaguccaucucugccccacaca

SEQ ID NO: 519795 - RNA, 22 nt, Human
aagcccagaugugagaacugag

SEQ ID NO: 519796 - RNA, 22 nt, Human
aauauaauuuuauuccuagagu

SEQ ID NO: 519797 - RNA, 22 nt, Human
ggguccagguuuagucauuugu

SEQ ID NO: 519798 - RNA, 20 nt, Human
cucugggcugcguugcaaac

SEQ ID NO: 519799 - RNA, 22 nt, Human
cugaaccacuaauauuuugauu

SEQ ID NO: 519800 - RNA, 22 nt, Human
ugaggaugagaugagauaacac

SEQ ID NO: 519801 - RNA, 22 nt, Human
uagacagauuuaaaggaaugga

SEQ ID NO: 519802 - RNA, 22 nt, Human
uuuaaauuuguguuuagagggu

SEQ ID NO: 519803 - RNA, 22 nt, Human
aagccuucagaguuggcugguc

SEQ ID NO: 519804 - RNA, 22 nt, Human
cauaauuagucauguuaugcau

SEQ ID NO: 519805 - RNA, 22 nt, Human
gacaccagcaaggcugugagga

SEQ ID NO: 519806 - RNA, 23 nt, Human
agccccucauggugucuagacag

SEQ ID NO: 519807 - RNA, 22 nt, Human
aggguagggccguagggccaug

SEQ ID NO: 519808 - RNA, 22 nt, Human
ucuccuggucaccucagaaguc

SEQ ID NO: 519809 - RNA, 22 nt, Human
uucaaucauugcaaaguaaugg

SEQ ID NO: 519810 - RNA, 22 nt, Human
cccaggucucccugcagcccug

SEQ ID NO: 519811 - RNA, 20 nt, Human
gcaaauggaucccacaagcc

SEQ ID NO: 519812 - RNA, 22 nt, Human
caacuuguucuugguagaucua

SEQ ID NO: 519813 - RNA, 22 nt, Human
ugcagcauuauguagcuguuuu

SEQ ID NO: 519814 - RNA, 22 nt, Human
acucaggaaauugagauaaugg

SEQ ID NO: 519815 - RNA, 22 nt, Human
agucucuuggcauucugaaaca

SEQ ID NO: 519816 - RNA, 21 nt, Human
ugcacuuugggggacaggcug

SEQ ID NO: 519817 - RNA, 22 nt, Human
ccuggccugugaaucugagagc

SEQ ID NO: 519818 - RNA, 22 nt, Human
uuuugccugcacuguauauaua

SEQ ID NO: 519819 - RNA, 22 nt, Human
aggccugaggaccuucuggagg

SEQ ID NO: 519820 - RNA, 22 nt, Human
guucaauuuagaaagcacaguu

SEQ ID NO: 519821 - RNA, 22 nt, Human
gccugaaguuucaugccucuau

SEQ ID NO: 519822 - RNA, 22 nt, Human
augaggcaaggaucagguaagg

SEQ ID NO: 519823 - RNA, 22 nt, Human
ugaggcagucacccccuccugc

SEQ ID NO: 519824 - RNA, 22 nt, Human
ugcaaauagccugaugaaagaa

SEQ ID NO: 519825 - RNA, 22 nt, Human
agccauggcgccacuagaggga

SEQ ID NO: 519826 - RNA, 22 nt, Human
aguuucauauuaccaugucacc

SEQ ID NO: 519827 - RNA, 22 nt, Human
gagugugucggucagcguggcg

SEQ ID NO: 519828 - RNA, 22 nt, Human
auagaaauggcagcuggugcua

SEQ ID NO: 519829 - RNA, 22 nt, Human
acaaaaagcuccauuacugucc

SEQ ID NO: 519830 - RNA, 22 nt, Human
uucccaguauuaccuucaggaa

SEQ ID NO: 519831 - RNA, 18 nt, Human
gccaggaagaggaaugug

SEQ ID NO: 519832 - RNA, 22 nt, Human
aggccuggccuuuauguucaag

SEQ ID NO: 519833 - RNA, 21 nt, Human
aaauguguuccauaaugcuuu

SEQ ID NO: 519834 - RNA, 23 nt, Human
accuggcugcucaaccugcaggg

SEQ ID NO: 519835 - RNA, 23 nt, Human
ugauuuccagugagucaguggga

SEQ ID NO: 519836 - RNA, 22 nt, Human
uccuggaguggagucuguuguu

SEQ ID NO: 519837 - RNA, 22 nt, Human
ucugagagcuguagaagccuau

SEQ ID NO: 519838 - RNA, 22 nt, Human
ggggaaaggccauggcaagaac

SEQ ID NO: 519839 - RNA, 23 nt, Human
ccucucucccuguuuggcaaaua

SEQ ID NO: 519840 - RNA, 22 nt, Human
cagaaugcaaauuuuauaauau

SEQ ID NO: 519841 - RNA, 18 nt, Human
ugucucugaauuccagug

SEQ ID NO: 519842 - RNA, 22 nt, Human
uguuuaauuucacaaaguugac

SEQ ID NO: 519843 - RNA, 19 nt, Human
cuuuucaucaacagccaau

SEQ ID NO: 519844 - RNA, 22 nt, Human
uugaaacaguagcucauagacc

SEQ ID NO: 519845 - RNA, 22 nt, Human
cuggcccugguaaggacaccca

SEQ ID NO: 519846 - RNA, 22 nt, Human
ccucugcagcagagagccagag

SEQ ID NO: 519847 - RNA, 22 nt, Human
agcuccugcgcacggugcacac

SEQ ID NO: 519848 - RNA, 22 nt, Human
gacccugaggaugcaccagcag

SEQ ID NO: 519849 - RNA, 22 nt, Human
cuggcugccacuucagggucuu

SEQ ID NO: 519850 - RNA, 22 nt, Human
caaauguguagagcuuuugggg

SEQ ID NO: 519851 - RNA, 22 nt, Human
gccaggcagauaugugagcuua

SEQ ID NO: 519852 - RNA, 22 nt, Human
gcaaagguagccaaggagcuca

SEQ ID NO: 519853 - RNA, 22 nt, Human
ggaguucacugugcaggcucug

SEQ ID NO: 519854 - RNA, 22 nt, Human
uauuucuaagcuguaagucuga

SEQ ID NO: 519855 - RNA, 23 nt, Human
gaguguucauagcaggcucuugc

SEQ ID NO: 519856 - RNA, 22 nt, Human
ggucaacagagguaaugguaac

SEQ ID NO: 519857 - RNA, 22 nt, Human
gugcaugugcauccauguguac

SEQ ID NO: 519858 - RNA, 22 nt, Human
aaagcaaucagauucagauguc

SEQ ID NO: 519859 - RNA, 22 nt, Human
agaggcugcacuugcucaugau

SEQ ID NO: 519860 - RNA, 22 nt, Human
gggggucccaagcugggcugcu

SEQ ID NO: 519861 - RNA, 22 nt, Human
agagcagcacguuguccccaca

SEQ ID NO: 519862 - RNA, 22 nt, Human
auuaaaagcuucccaagaguua

SEQ ID NO: 519863 - RNA, 22 nt, Human
ccagggcacguugggacaguac

SEQ ID NO: 519864 - RNA, 22 nt, Human
gauccuugcaacucugugaggu

SEQ ID NO: 519865 - RNA, 22 nt, Human
ggagauagacuuggugagccac

SEQ ID NO: 519866 - RNA, 22 nt, Human
caguagcaggcacucagcacgu

SEQ ID NO: 519867 - RNA, 22 nt, Human
uagaaagagcuuugcuuccuuu

SEQ ID NO: 519868 - RNA, 22 nt, Human
aaagauuugaaauuaggcauca

SEQ ID NO: 519869 - RNA, 22 nt, Human
gaaguucuuagucucauuugca

SEQ ID NO: 519870 - RNA, 22 nt, Human
agguggaacguucaggugcuag

SEQ ID NO: 519871 - RNA, 22 nt, Human
augaggcagguggaggcugcca

SEQ ID NO: 519872 - RNA, 22 nt, Human
ccuguauuagguagacaacuau

SEQ ID NO: 519873 - RNA, 22 nt, Human
uggcuuccugcauggauccucu

SEQ ID NO: 519874 - RNA, 19 nt, Human
ugagaaggcaguggggagc

SEQ ID NO: 519875 - RNA, 22 nt, Human
agaaauggaaauccaagcaacu

SEQ ID NO: 519876 - RNA, 22 nt, Human
uggccaggccggggacagaacu

SEQ ID NO: 519877 - RNA, 20 nt, Human
augggcugguuaggaagugu

SEQ ID NO: 519878 - RNA, 22 nt, Human
uuggaaggcccugccuagcagg

SEQ ID NO: 519879 - RNA, 22 nt, Human
cagcucuggcgucagggagcga

SEQ ID NO: 519880 - RNA, 22 nt, Human
auggauaaucaugaacuuugag

SEQ ID NO: 519881 - RNA, 22 nt, Human
agacaugucaccaauucuuacu

SEQ ID NO: 519882 - RNA, 22 nt, Human
cugagaaaggaccucaaacagg

SEQ ID NO: 519883 - RNA, 22 nt, Human
gccugcagccucaagggcugag

SEQ ID NO: 519884 - RNA, 22 nt, Human
cucagagagggcaccagggcca

SEQ ID NO: 519885 - RNA, 22 nt, Human
cugugugcauaguugugcucaa

SEQ ID NO: 519886 - RNA, 22 nt, Human
caggggcaggugugagaucauc

SEQ ID NO: 519887 - RNA, 22 nt, Human
uccucuggaaccucacccuugc

SEQ ID NO: 519888 - RNA, 22 nt, Human
auuccucauuuguugagaacca

SEQ ID NO: 519889 - RNA, 22 nt, Human
ucaaggaaggucuguugcucca

SEQ ID NO: 519890 - RNA, 22 nt, Human
agguggccggugccagccgggc

SEQ ID NO: 519891 - RNA, 22 nt, Human
gccucuggucccucaugcugug

SEQ ID NO: 519892 - RNA, 22 nt, Human
uucaauucaauucuaaauauau

SEQ ID NO: 519893 - RNA, 22 nt, Human
agaccaugggcucugaagagca

SEQ ID NO: 519894 - RNA, 19 nt, Human
agcagcuguagauagacac

SEQ ID NO: 519895 - RNA, 22 nt, Human
agaggcaguauacaauccgagc

SEQ ID NO: 519896 - RNA, 22 nt, Human
caaugaaaauuuaaguugcagc

SEQ ID NO: 519897 - RNA, 22 nt, Human
uuagauaaauuaagacuuuaca

SEQ ID NO: 519898 - RNA, 22 nt, Human
cugcccugcagcuccacggacu

SEQ ID NO: 519899 - RNA, 22 nt, Human
uagaaauccccagucucauagu

SEQ ID NO: 519900 - RNA, 22 nt, Human
aagccagcauuuucccauuccu

SEQ ID NO: 519901 - RNA, 22 nt, Human
gggcccagcacuggcugggauc

SEQ ID NO: 519902 - RNA, 22 nt, Human
gaggcugaggguuagagaguca

SEQ ID NO: 519903 - RNA, 22 nt, Human
ugugccuuaugaauucuuucug

SEQ ID NO: 519904 - RNA, 22 nt, Human
ccuuucucuggcagcaggacag

SEQ ID NO: 519905 - RNA, 21 nt, Human
uuugccuucacgaagcauccu

SEQ ID NO: 519906 - RNA, 22 nt, Human
ccucuggcaagugauuuaucau

SEQ ID NO: 519907 - RNA, 22 nt, Human
acagacagacagagaacuauuc

SEQ ID NO: 519908 - RNA, 20 nt, Human
gccugagcuccgccuccugu

SEQ ID NO: 519909 - RNA, 22 nt, Human
ccucuuuguucaggcugcuggc

SEQ ID NO: 519910 - RNA, 22 nt, Human
guguaauugaaauugagaacca

SEQ ID NO: 519911 - RNA, 22 nt, Human
acuggcaguuugagaaugcauu

SEQ ID NO: 519912 - RNA, 22 nt, Human
uaacagaaaagaacugaguuug

SEQ ID NO: 519913 - RNA, 22 nt, Human
gaggagccuggccccacaucca

SEQ ID NO: 519914 - RNA, 22 nt, Human
uggccacuuggcaugugugcca

SEQ ID NO: 519915 - RNA, 22 nt, Human
ccagagggagccaccagggugu

SEQ ID NO: 519916 - RNA, 22 nt, Human
cauggggagacaccuagggaaa

SEQ ID NO: 519917 - RNA, 22 nt, Human
gggcuggaggugagcaggacag

SEQ ID NO: 519918 - RNA, 22 nt, Human
ugguuuaccccuguccuauauc

SEQ ID NO: 519919 - RNA, 22 nt, Human
cuugcuuuguccagaaauucag

SEQ ID NO: 519920 - RNA, 22 nt, Human
cagagcagagugauuguucugg

SEQ ID NO: 519921 - RNA, 22 nt, Human
ugggcucugcaucagugcccau

SEQ ID NO: 519922 - RNA, 22 nt, Human
uuccaaaguuauucaagcagua

SEQ ID NO: 519923 - RNA, 22 nt, Human
augugcagaggcuuccuugacu

SEQ ID NO: 519924 - RNA, 22 nt, Human
uuuuccucugcaauaaaagcag

SEQ ID NO: 519925 - RNA, 22 nt, Human
ucagcugccccaguggccccag

SEQ ID NO: 519926 - RNA, 22 nt, Human
aacaguaaagacagaauuuauc

SEQ ID NO: 519927 - RNA, 22 nt, Human
aauuuagauugauaaacaugga

SEQ ID NO: 519928 - RNA, 22 nt, Human
cacacaggagagugcuggaggu

SEQ ID NO: 519929 - RNA, 21 nt, Human
cagaaguaaggguaacuucuc

SEQ ID NO: 519930 - RNA, 22 nt, Human
cuuccugaacaaugccaucaau

SEQ ID NO: 519931 - RNA, 22 nt, Human
caucaucaaaacaaauggaguc

SEQ ID NO: 519932 - RNA, 22 nt, Human
aaauaugacuagaaugccaggu

SEQ ID NO: 519933 - RNA, 18 nt, Human
uucagcagcagacacacu

SEQ ID NO: 519934 - RNA, 22 nt, Human
uggcaggcgggagccauagagg

SEQ ID NO: 519935 - RNA, 22 nt, Human
agcagccacagcagaucugagu

SEQ ID NO: 519936 - RNA, 22 nt, Human
aaguacuucuagauggauaauc

SEQ ID NO: 519937 - RNA, 22 nt, Human
aaauacauuuacagucguggcu

SEQ ID NO: 519938 - RNA, 19 nt, Human
gcccugcaggagguggggc

SEQ ID NO: 519939 - RNA, 22 nt, Human
uggcucugaccagguagaggag

SEQ ID NO: 519940 - RNA, 22 nt, Human
accugcaggcacaggugugcgc

SEQ ID NO: 519941 - RNA, 22 nt, Human
gagcagcuagauaaagcccuuc

SEQ ID NO: 519942 - RNA, 22 nt, Human
cagcugcaggaacaaaaaugug

SEQ ID NO: 519943 - RNA, 22 nt, Human
gcccugcugucuucagaguaua

SEQ ID NO: 519944 - RNA, 22 nt, Human
ucagaggacuaccuucuccagu

SEQ ID NO: 519945 - RNA, 22 nt, Human
caaguagaacagagcuaccuug

SEQ ID NO: 519946 - RNA, 22 nt, Human
ugcuugcaagagaugcaaugac

SEQ ID NO: 519947 - RNA, 22 nt, Human
ucuuucagcucuucaggaccca

SEQ ID NO: 519948 - RNA, 22 nt, Human
cucagugucacguuuugccuua

SEQ ID NO: 519949 - RNA, 22 nt, Human
caguuuugguccuuucuaggua

SEQ ID NO: 519950 - RNA, 22 nt, Human
gcuguucacaucuggaccauuu

SEQ ID NO: 519951 - RNA, 22 nt, Human
uggcagggccugaaucuuauac

SEQ ID NO: 519952 - RNA, 22 nt, Human
uucuuuugggaauuacguaugc

SEQ ID NO: 519953 - RNA, 22 nt, Human
agagugaaguucaucgugcagc

SEQ ID NO: 519954 - RNA, 22 nt, Human
ugcaggagcugcuguccugcuc

SEQ ID NO: 519955 - RNA, 22 nt, Human
gcucagugaagggugccaagua

SEQ ID NO: 519956 - RNA, 22 nt, Human
uuuacagaucuguugauuuguu

SEQ ID NO: 519957 - RNA, 22 nt, Human
aaagauaauguuuccuuauucu

SEQ ID NO: 519958 - RNA, 22 nt, Human
uuccaaguagaagcauuugcau

SEQ ID NO: 519959 - RNA, 22 nt, Human
gagaagcaaucaguggccaccc

SEQ ID NO: 519960 - RNA, 22 nt, Human
aaagcaaugucucugccugguu

SEQ ID NO: 519961 - RNA, 22 nt, Human
ggcuggcauccagggaaaucca

SEQ ID NO: 519962 - RNA, 22 nt, Human
auuugcaugcuucuauugugaa

SEQ ID NO: 519963 - RNA, 22 nt, Human
aagggagcuuaggagaucaggc

SEQ ID NO: 519964 - RNA, 22 nt, Human
ggcaaggugcuacagacaguga

SEQ ID NO: 519965 - RNA, 22 nt, Human
uaaaugcaguacaaauuguucu

SEQ ID NO: 519966 - RNA, 22 nt, Human
agugaaaugacugaaucagaua

SEQ ID NO: 519967 - RNA, 20 nt, Human
cuggggaggaggauguguuc

SEQ ID NO: 519968 - RNA, 22 nt, Human
uccuugaaugaagagaggugac

SEQ ID NO: 519969 - RNA, 22 nt, Human
uacagaauuagauuauuagaga

SEQ ID NO: 519970 - RNA, 22 nt, Human
ugugugaagcacauguucaagg

SEQ ID NO: 519971 - RNA, 22 nt, Human
guaacauuuacaguuccuagag

SEQ ID NO: 519972 - RNA, 22 nt, Human
agagagccugaguggcagcuau

SEQ ID NO: 519973 - RNA, 20 nt, Human
agcacuagguguggcaggug

SEQ ID NO: 519974 - RNA, 22 nt, Human
caggaacacaaugagucucaaa

SEQ ID NO: 519975 - RNA, 22 nt, Human
cagccagccucucaaccaugca

SEQ ID NO: 519976 - RNA, 22 nt, Human
uagcuuuaggaugguucucuug

SEQ ID NO: 519977 - RNA, 22 nt, Human
gccagaagggguggauccaggc

SEQ ID NO: 519978 - RNA, 22 nt, Human
uugauuacuauguguugaaagc

SEQ ID NO: 519979 - RNA, 22 nt, Human
gaaaaugugccuuuggguauug

SEQ ID NO: 519980 - RNA, 22 nt, Human
aggcauggcuuuaggcaggcgu

SEQ ID NO: 519981 - RNA, 22 nt, Human
cagacacagauaugcauauggc

SEQ ID NO: 519982 - RNA, 22 nt, Human
ucccugggguaucgcugaggca

SEQ ID NO: 519983 - RNA, 22 nt, Human
auauuuguuuggcagaguucag

SEQ ID NO: 519984 - RNA, 22 nt, Human
uucacauuugaaaggaaagaua

SEQ ID NO: 519985 - RNA, 22 nt, Human
ugguccuggucaucugggcugg

SEQ ID NO: 519986 - RNA, 22 nt, Human
agggaggaaggaacuccuucua

SEQ ID NO: 519987 - RNA, 22 nt, Human
ucacugcaaggaggcuucucaa

SEQ ID NO: 519988 - RNA, 22 nt, Human
aggaaugaacucgagugaucug

SEQ ID NO: 519989 - RNA, 22 nt, Human
gccuguccacuaaacagccaag

SEQ ID NO: 519990 - RNA, 22 nt, Human
uaguuuguagaaaucuagaaau

SEQ ID NO: 519991 - RNA, 21 nt, Human
uccagaccucccucuccuagc

SEQ ID NO: 519992 - RNA, 22 nt, Human
gagaaugggaaugaaaguagca

SEQ ID NO: 519993 - RNA, 22 nt, Human
agccaagcaccacuggcacucg

SEQ ID NO: 519994 - RNA, 22 nt, Human
aaugaaauaguuggcuguagag

SEQ ID NO: 519995 - RNA, 22 nt, Human
ugaagauuuccaccaaaucaca

SEQ ID NO: 519996 - RNA, 22 nt, Human
uguuuucacaaugaugucagau

SEQ ID NO: 519997 - RNA, 18 nt, Human
uccaaaaucauguauuuu

SEQ ID NO: 519998 - RNA, 22 nt, Human
ucucaggguuuguacaagugua

SEQ ID NO: 519999 - RNA, 22 nt, Human
uauacaaguaaugcugaaugau

SEQ ID NO: 520000 - RNA, 22 nt, Human
ucucagagauuuauggaaaacu

SEQ ID NO: 520001 - RNA, 21 nt, Human
uggcacugcuuagcagguucc

SEQ ID NO: 520002 - RNA, 22 nt, Human
gcaucuaauccaguccagcauc

SEQ ID NO: 520003 - RNA, 22 nt, Human
cugggacacccagagcugcaga

SEQ ID NO: 520004 - RNA, 19 nt, Human
cugucccucccagguauga

SEQ ID NO: 520005 - RNA, 22 nt, Human
gcaggugaugugaugugagcau

SEQ ID NO: 520006 - RNA, 22 nt, Human
uccagcagguccgagacaaguu

SEQ ID NO: 520007 - RNA, 22 nt, Human
uuguccuguuuagggauaagga

SEQ ID NO: 520008 - RNA, 22 nt, Human
uguccuggaguuauaaugccug

SEQ ID NO: 520009 - RNA, 22 nt, Human
caugaaaaauuuacuguuaaca

SEQ ID NO: 520010 - RNA, 22 nt, Human
agcuucucagcuucagaacugu

SEQ ID NO: 520011 - RNA, 22 nt, Human
gcaaggucuuucagaaaggaaa

SEQ ID NO: 520012 - RNA, 22 nt, Human
ugccuaggaaaccucaugcuuc

SEQ ID NO: 520013 - RNA, 20 nt, Human
gaggcucugggcauggcgcc

SEQ ID NO: 520014 - RNA, 19 nt, Human
uagcagcugccaaaggaga

SEQ ID NO: 520015 - RNA, 22 nt, Human
gcucugagaggugcagcaguaa

SEQ ID NO: 520016 - RNA, 22 nt, Human
gaggcugagaguuuguucuacu

SEQ ID NO: 520017 - RNA, 22 nt, Human
ccaggguggaggcuggauggag

SEQ ID NO: 520018 - RNA, 22 nt, Human
acugccugcuccuggcuccaca

SEQ ID NO: 520019 - RNA, 22 nt, Human
accuucaauuauuuuuguucca

SEQ ID NO: 520020 - RNA, 22 nt, Human
aaaugcacagaaaggaugugga

SEQ ID NO: 520021 - RNA, 22 nt, Human
acacagaagaucucuuaaugcu

SEQ ID NO: 520022 - RNA, 22 nt, Human
uugcugaaaacaguggguauug

SEQ ID NO: 520023 - RNA, 16 nt, Human
ggagagugucugcaaa

SEQ ID NO: 520024 - RNA, 22 nt, Human
uggccuuggcagugagaagagu

SEQ ID NO: 520025 - RNA, 22 nt, Human
agaauucugacaauagaauugg

SEQ ID NO: 520026 - RNA, 22 nt, Human
uggcacauagcagguacucagu

SEQ ID NO: 520027 - RNA, 22 nt, Human
uuucaauguaugucuuucugag

SEQ ID NO: 520028 - RNA, 22 nt, Human
ccuggguccuggcagccuccug

SEQ ID NO: 520029 - RNA, 22 nt, Human
ucacagaaaagcugagcaucag

SEQ ID NO: 520030 - RNA, 22 nt, Human
cucauggauauaagaacuguuu

SEQ ID NO: 520031 - RNA, 22 nt, Human
gagaccucuugguaucgcuagg

SEQ ID NO: 520032 - RNA, 22 nt, Human
ucauuguugacauaccaagagc

SEQ ID NO: 520033 - RNA, 19 nt, Human
ugccagcauuaggcugaag

SEQ ID NO: 520034 - RNA, 22 nt, Human
cacagcuucuuccauuccacuc

SEQ ID NO: 520035 - RNA, 22 nt, Human
uuguuuuaaugagggagguuga

SEQ ID NO: 520036 - RNA, 22 nt, Human
gaacuguaguuaauacuacaca

SEQ ID NO: 520037 - RNA, 22 nt, Human
ucauaaagcuugccugcagugu

SEQ ID NO: 520038 - RNA, 22 nt, Human
uccuucuuugacaaguggcaga

SEQ ID NO: 520039 - RNA, 23 nt, Human
aaguucuuuuagaugucuucgug

SEQ ID NO: 520040 - RNA, 22 nt, Human
agccagggaaggauaacaagaa

SEQ ID NO: 520041 - RNA, 22 nt, Human
caggggacaguaugguggauga

SEQ ID NO: 520042 - RNA, 22 nt, Human
ugcuuuauucgacaucugguag

SEQ ID NO: 520043 - RNA, 22 nt, Human
auacaguauuaccuguucagga

SEQ ID NO: 520044 - RNA, 21 nt, Human
uggccaaacuggagcauuuga

SEQ ID NO: 520045 - RNA, 22 nt, Human
uguuuagacucaaaauugaaag

SEQ ID NO: 520046 - RNA, 22 nt, Human
uucucacaggcuggaaugauga

SEQ ID NO: 520047 - RNA, 22 nt, Human
caugugucuuuauggagccaca

SEQ ID NO: 520048 - RNA, 22 nt, Human
aggagcagauugguaagaucau

SEQ ID NO: 520049 - RNA, 22 nt, Human
uggagcaggaagucuauggcug

SEQ ID NO: 520050 - RNA, 22 nt, Human
cacugaaucucaaggggagggu

SEQ ID NO: 520051 - RNA, 22 nt, Human
gcagcagggugccagcuuugca

SEQ ID NO: 520052 - RNA, 22 nt, Human
uccuucaggguugaggccgacu

SEQ ID NO: 520053 - RNA, 19 nt, Human
uucucuggacuagaugcug

SEQ ID NO: 520054 - RNA, 23 nt, Human
gcuucuagucaauuucaccagga

SEQ ID NO: 520055 - RNA, 22 nt, Human
cccuguccuggaugggagcacu

SEQ ID NO: 520056 - RNA, 22 nt, Human
aauaaaaugaacugguagaguu

SEQ ID NO: 520057 - RNA, 22 nt, Human
acagagagaggcccgaggcugc

SEQ ID NO: 520058 - RNA, 22 nt, Human
aaauaugugaucagugaauaaa

SEQ ID NO: 520059 - RNA, 22 nt, Human
aucaguuuaaaugggcuguugg

SEQ ID NO: 520060 - RNA, 22 nt, Human
cuccagugcgcaggacagcccc

SEQ ID NO: 520061 - RNA, 22 nt, Human
ucggagcuguagaugaaacccu

SEQ ID NO: 520062 - RNA, 22 nt, Human
ucagaaauacuaucagcuuuug

SEQ ID NO: 520063 - RNA, 22 nt, Human
uuguaacacuuuucuauuaaua

SEQ ID NO: 520064 - RNA, 22 nt, Human
gugaggauacuuaagagaacac

SEQ ID NO: 520065 - RNA, 22 nt, Human
gugcaggggaucagguugcagc

SEQ ID NO: 520066 - RNA, 22 nt, Human
cccucugaccuccugccacagu

SEQ ID NO: 520067 - RNA, 22 nt, Human
cugggccucaaucucagaguuu

SEQ ID NO: 520068 - RNA, 22 nt, Human
ucuggccucuugggaugcuccc

SEQ ID NO: 520069 - RNA, 22 nt, Human
ugggccaggcaugugaucagca

SEQ ID NO: 520070 - RNA, 22 nt, Human
agcaggcugggcaauaugggca

SEQ ID NO: 520071 - RNA, 22 nt, Human
ugucugaaucgcuuccuagagg

SEQ ID NO: 520072 - RNA, 22 nt, Human
ucuccuggauggaccuucucuu

SEQ ID NO: 520073 - RNA, 20 nt, Human
cagugcccguggaaaagaug

SEQ ID NO: 520074 - RNA, 22 nt, Human
ccucagaggugaacaucagugc

SEQ ID NO: 520075 - RNA, 22 nt, Human
cucuggcuuguuaaugcauauu

SEQ ID NO: 520076 - RNA, 22 nt, Human
aaauacagauuccagggucuua

SEQ ID NO: 520077 - RNA, 22 nt, Human
ccagcugauucgguggugguug

SEQ ID NO: 520078 - RNA, 22 nt, Human
auguagcagaagauguuuuccu

SEQ ID NO: 520079 - RNA, 20 nt, Human
uccaggaaugguagaggacu

SEQ ID NO: 520080 - RNA, 22 nt, Human
gucugcugcagagcauggcuuu

SEQ ID NO: 520081 - RNA, 20 nt, Human
uggcuccugcgguggaacca

SEQ ID NO: 520082 - RNA, 22 nt, Human
auguaacacccacuuuuauagc

SEQ ID NO: 520083 - RNA, 22 nt, Human
ggcucuggugugaagcagccuc

SEQ ID NO: 520084 - RNA, 22 nt, Human
aagauguuauugucuuccuugc

SEQ ID NO: 520085 - RNA, 22 nt, Human
augaagcugguuuuggcuuggg

SEQ ID NO: 520086 - RNA, 22 nt, Human
gaagagcugacagugucauccu

SEQ ID NO: 520087 - RNA, 22 nt, Human
cacaguccagacuccuggaguu

SEQ ID NO: 520088 - RNA, 22 nt, Human
uccaggcuagguuuacaggaca

SEQ ID NO: 520089 - RNA, 22 nt, Human
gagcuugggugccaugcugagc

SEQ ID NO: 520090 - RNA, 22 nt, Human
uucuggaauacuaaguuccuuu

SEQ ID NO: 520091 - RNA, 22 nt, Human
gagcccuggcagucugggaugg

SEQ ID NO: 520092 - RNA, 23 nt, Human
gaaguucuuucuucucaugcugu

SEQ ID NO: 520093 - RNA, 22 nt, Human
uugagucuccucagcagggcua

SEQ ID NO: 520094 - RNA, 22 nt, Human
gacagcuucuugggccgggccu

SEQ ID NO: 520095 - RNA, 22 nt, Human
aaaguguuuacauugcuauaag

SEQ ID NO: 520096 - RNA, 22 nt, Human
ugggccuguggcuuggcucuag

SEQ ID NO: 520097 - RNA, 17 nt, Human
uguuuucauucauugcu

SEQ ID NO: 520098 - RNA, 22 nt, Human
caggcaggucagugaagaagga

SEQ ID NO: 520099 - RNA, 22 nt, Human
ugggugagugggaaaagcccag

SEQ ID NO: 520100 - RNA, 23 nt, Human
agagcaucaugaugcuaagucug

SEQ ID NO: 520101 - RNA, 20 nt, Human
cagagaccugucuucacaga

SEQ ID NO: 520102 - RNA, 22 nt, Human
cuggcagcucugagucccuucu

SEQ ID NO: 520103 - RNA, 22 nt, Human
agagcagugcugaagaguaggg

SEQ ID NO: 520104 - RNA, 22 nt, Human
gggcugaccaaugccuugcuuu

SEQ ID NO: 520105 - RNA, 20 nt, Human
cuuugccuauucucugccug

SEQ ID NO: 520106 - RNA, 22 nt, Human
ggccaggagcaagccaggcucu

SEQ ID NO: 520107 - RNA, 22 nt, Human
gauuucaaggauguuagaggug

SEQ ID NO: 520108 - RNA, 22 nt, Human
gccaaaguaccuagcccucugc

SEQ ID NO: 520109 - RNA, 22 nt, Human
ggcucagguuuaaagugcuuua

SEQ ID NO: 520110 - RNA, 22 nt, Human
ggcugccuccugcugggcugga

SEQ ID NO: 520111 - RNA, 22 nt, Human
uggcaucucaaacaggcagauu

SEQ ID NO: 520112 - RNA, 22 nt, Human
aggggcucaaagugugcaggga

SEQ ID NO: 520113 - RNA, 22 nt, Human
aaagacauggcaagagaugggg

SEQ ID NO: 520114 - RNA, 22 nt, Human
aaucgguugaacccaggaagug

SEQ ID NO: 520115 - RNA, 22 nt, Human
uccagcucuggcuuggcuagcu

SEQ ID NO: 520116 - RNA, 22 nt, Human
uccauucuaugcuuacauuuau

SEQ ID NO: 520117 - RNA, 22 nt, Human
uuucuaaguaagauuaacuucu

SEQ ID NO: 520118 - RNA, 22 nt, Human
gccugugcuuaacugacgugag

SEQ ID NO: 520119 - RNA, 17 nt, Human
aguguuuccuuaucauu

SEQ ID NO: 520120 - RNA, 22 nt, Human
cagagcauuaaaaccagcucug

SEQ ID NO: 520121 - RNA, 22 nt, Human
acaguguuacuugauaguguau

SEQ ID NO: 520122 - RNA, 22 nt, Human
ugagcugguucuugaggcauga

SEQ ID NO: 520123 - RNA, 22 nt, Human
cugcaugucacucugcuguccc

SEQ ID NO: 520124 - RNA, 22 nt, Human
ggguaugagauauaggugaaua

SEQ ID NO: 520125 - RNA, 22 nt, Human
ugcucugggauucagcagccug

SEQ ID NO: 520126 - RNA, 22 nt, Human
aggcacugggggaugagcaagg

SEQ ID NO: 520127 - RNA, 22 nt, Human
aaauggaagaagugcaauacug

SEQ ID NO: 520128 - RNA, 23 nt, Human
ugauuacaagggccaaagaaagg

SEQ ID NO: 520129 - RNA, 22 nt, Human
ucucacagugcaggucugucuc

SEQ ID NO: 520130 - RNA, 22 nt, Human
ucacuuauugcucaucucaugc

SEQ ID NO: 520131 - RNA, 22 nt, Human
ugcaauaacuacuuuaauguug

SEQ ID NO: 520132 - RNA, 22 nt, Human
aagguacaguuuuaagaauaag

SEQ ID NO: 520133 - RNA, 20 nt, Human
uacaaaccuccacacuggug

SEQ ID NO: 520134 - RNA, 22 nt, Human
ggggugagugcucagccccgga

SEQ ID NO: 520135 - RNA, 22 nt, Human
agggggugaucaaggugcggcg

SEQ ID NO: 520136 - RNA, 22 nt, Human
ugcuugggaauguggagucaga

SEQ ID NO: 520137 - RNA, 22 nt, Human
gccuggaguucagccaaguccc

SEQ ID NO: 520138 - RNA, 22 nt, Human
ugaaaucuuagccauucugccu

SEQ ID NO: 520139 - RNA, 23 nt, Human
cagggccaggcagcagcugucac

SEQ ID NO: 520140 - RNA, 22 nt, Human
ucucucaaccucggcacuauug

SEQ ID NO: 520141 - RNA, 22 nt, Human
cacaugcaccagaaaucaacau

SEQ ID NO: 520142 - RNA, 22 nt, Human
cagugauggauauggagaaguc

SEQ ID NO: 520143 - RNA, 17 nt, Human
ugggggcgccagggucu

SEQ ID NO: 520144 - RNA, 22 nt, Human
ucugucucaaguucuugcacuc

SEQ ID NO: 520145 - RNA, 20 nt, Human
uggaugucaaauuaggcugg

SEQ ID NO: 520146 - RNA, 22 nt, Human
uaacacacugaaggugagaugg

SEQ ID NO: 520147 - RNA, 21 nt, Human
ucagcagaaagcaaggucagu

SEQ ID NO: 520148 - RNA, 22 nt, Human
uagacauuagguagguucaugg

SEQ ID NO: 520149 - RNA, 22 nt, Human
cccuucccuucugggagaucca

SEQ ID NO: 520150 - RNA, 22 nt, Human
aaguagaaucucagguaggcua

SEQ ID NO: 520151 - RNA, 22 nt, Human
ccagggcuccauugcucauccu

SEQ ID NO: 520152 - RNA, 22 nt, Human
gcucugggaacugacugccuuc

SEQ ID NO: 520153 - RNA, 22 nt, Human
ugucaacacaccuaucucaauu

SEQ ID NO: 520154 - RNA, 22 nt, Human
uuauuuugagagaaugugugcu

SEQ ID NO: 520155 - RNA, 22 nt, Human
ggaggacaggggcugcagcaca

SEQ ID NO: 520156 - RNA, 22 nt, Human
ccaggccuuucuucuuggucug

SEQ ID NO: 520157 - RNA, 22 nt, Human
ggagccugugggaugagaugug

SEQ ID NO: 520158 - RNA, 22 nt, Human
agcuggcccucgagagccaauu

SEQ ID NO: 520159 - RNA, 22 nt, Human
ucucugguggcuccaucaguag

SEQ ID NO: 520160 - RNA, 22 nt, Human
gccuggaaucaugcagggguua

SEQ ID NO: 520161 - RNA, 22 nt, Human
uauguacaugauuucauuugcu

SEQ ID NO: 520162 - RNA, 22 nt, Human
cuggccugaggucggcuguagg

SEQ ID NO: 520163 - RNA, 22 nt, Human
gcugccuugaacuuggccuggg

SEQ ID NO: 520164 - RNA, 22 nt, Human
uagcagggccaggcugggaacc

SEQ ID NO: 520165 - RNA, 22 nt, Human
auauguguacgugcaguauaua

SEQ ID NO: 520166 - RNA, 22 nt, Human
guuuaauuuuagguugucaagc

SEQ ID NO: 520167 - RNA, 20 nt, Human
gggagucuggaugaaagaug

SEQ ID NO: 520168 - RNA, 19 nt, Human
cagaacagaggucauggcc

SEQ ID NO: 520169 - RNA, 21 nt, Human
cauuuacaugacagauugguu

SEQ ID NO: 520170 - RNA, 22 nt, Human
gucauuccuuauguugauucag

SEQ ID NO: 520171 - RNA, 22 nt, Human
caggcagcugggucaccguccc

SEQ ID NO: 520172 - RNA, 22 nt, Human
guccucagggaauguggcgggu

SEQ ID NO: 520173 - RNA, 19 nt, Human
cuggucugcugcuuccagg

SEQ ID NO: 520174 - RNA, 22 nt, Human
gagccugccucuagucucuaga

SEQ ID NO: 520175 - RNA, 22 nt, Human
aguggcuggcauaggaacagac

SEQ ID NO: 520176 - RNA, 22 nt, Human
gugcccuggagggguugaaggg

SEQ ID NO: 520177 - RNA, 22 nt, Human
uuuccucuuccgagggggaggc

SEQ ID NO: 520178 - RNA, 18 nt, Human
ugggccugcauccuaguc

SEQ ID NO: 520179 - RNA, 22 nt, Human
aaguaaaagcuuuaccaugcgc

SEQ ID NO: 520180 - RNA, 22 nt, Human
uccugcagaucaaagccuuuga

SEQ ID NO: 520181 - RNA, 22 nt, Human
ucaggagcuugguagugugauu

SEQ ID NO: 520182 - RNA, 22 nt, Human
ccugugugcacacgaggccaug

SEQ ID NO: 520183 - RNA, 22 nt, Human
uggaaucaguuacaugugguug

SEQ ID NO: 520184 - RNA, 22 nt, Human
cagcaggaaguacuagcuuuga

SEQ ID NO: 520185 - RNA, 22 nt, Human
aauuugauuuucuuaaaccaua

SEQ ID NO: 520186 - RNA, 22 nt, Human
ugaccacugaauaugacugccu

SEQ ID NO: 520187 - RNA, 21 nt, Human
agaggaagugauuggucuggc

SEQ ID NO: 520188 - RNA, 22 nt, Human
auuuccaggcuguuuugugaau

SEQ ID NO: 520189 - RNA, 22 nt, Human
gugcauuggugcgccacuucac

SEQ ID NO: 520190 - RNA, 22 nt, Human
cagggcuucuauaccaauucau

SEQ ID NO: 520191 - RNA, 22 nt, Human
acacacaugcaugcuugccauu

SEQ ID NO: 520192 - RNA, 22 nt, Human
uccuuuuuaagucguuguggua

SEQ ID NO: 520193 - RNA, 22 nt, Human
ucucuucugaaaccugucuuua

SEQ ID NO: 520194 - RNA, 22 nt, Human
ccaggcucagggcagacuuuca

SEQ ID NO: 520195 - RNA, 22 nt, Human
ucagggcauggcugcacuuggc

SEQ ID NO: 520196 - RNA, 22 nt, Human
acaggcuuacaggcugcaagua

SEQ ID NO: 520197 - RNA, 22 nt, Human
caggugggcugccucuccagcu

SEQ ID NO: 520198 - RNA, 22 nt, Human
uucguuuucuaggaccaacaga

SEQ ID NO: 520199 - RNA, 22 nt, Human
aaauucuuucauggcuaauaag

SEQ ID NO: 520200 - RNA, 22 nt, Human
ugcaggugaaaauuaugaggau

SEQ ID NO: 520201 - RNA, 23 nt, Human
uggcagcuguguaagagaaagca

SEQ ID NO: 520202 - RNA, 22 nt, Human
uggcucugucaaacugcacaca

SEQ ID NO: 520203 - RNA, 22 nt, Human
cuggugugauugagcccaggug

SEQ ID NO: 520204 - RNA, 22 nt, Human
uuuauuggauauuuacaagaua

SEQ ID NO: 520205 - RNA, 23 nt, Human
uuauuuugucagaagggacuuuu

SEQ ID NO: 520206 - RNA, 22 nt, Human
ucugaaaucuguaagcacuagc

SEQ ID NO: 520207 - RNA, 22 nt, Human
uuacauaacgguaugaaaaaug

SEQ ID NO: 520208 - RNA, 23 nt, Human
gugagcagcccacuaggaaugcc

SEQ ID NO: 520209 - RNA, 22 nt, Human
ugaagcuuuccuguggucagga

SEQ ID NO: 520210 - RNA, 22 nt, Human
ggcccagucuggggcccuguga

SEQ ID NO: 520211 - RNA, 22 nt, Human
ugugucaauuuucauuccuacu

SEQ ID NO: 520212 - RNA, 22 nt, Human
agacaaagaaaccguagaagca

SEQ ID NO: 520213 - RNA, 22 nt, Human
gucccaggcagagucaggaggg

SEQ ID NO: 520214 - RNA, 21 nt, Human
agcaacucugacuagaugagg

SEQ ID NO: 520215 - RNA, 22 nt, Human
acacacagaguuuauacaggca

SEQ ID NO: 520216 - RNA, 22 nt, Human
ugguccugguagcggugugcuu

SEQ ID NO: 520217 - RNA, 22 nt, Human
cuccuucaugucauguguccgg

SEQ ID NO: 520218 - RNA, 20 nt, Human
aucacuggagaaggaaaccu

SEQ ID NO: 520219 - RNA, 17 nt, Human
guuugcaugguguuaac

SEQ ID NO: 520220 - RNA, 22 nt, Human
ugaggcaggaggauugcaggau

SEQ ID NO: 520221 - RNA, 22 nt, Human
cagggcaaguuugagauuauuu

SEQ ID NO: 520222 - RNA, 22 nt, Human
cagggccagcgucucgggcuau

SEQ ID NO: 520223 - RNA, 22 nt, Human
gcggggggcaggcaguacguug

SEQ ID NO: 520224 - RNA, 22 nt, Human
uucugucugauggugccagaac

SEQ ID NO: 520225 - RNA, 22 nt, Human
uuaugacagaaaugaaaagcug

SEQ ID NO: 520226 - RNA, 22 nt, Human
ucuggggugcagccuggacaua

SEQ ID NO: 520227 - RNA, 22 nt, Human
uccucagggaagaugagccuca

SEQ ID NO: 520228 - RNA, 22 nt, Human
cccuggaggcaaagguugcagu

SEQ ID NO: 520229 - RNA, 22 nt, Human
uugaggagcacuagucagguau

SEQ ID NO: 520230 - RNA, 22 nt, Human
cucaggccagguuucucccaca

SEQ ID NO: 520231 - RNA, 22 nt, Human
ggucagccuuggauuugguagc

SEQ ID NO: 520232 - RNA, 22 nt, Human
cagagguagcaugcuguggcuu

SEQ ID NO: 520233 - RNA, 22 nt, Human
acaguguuuaaaaaucagaucu

SEQ ID NO: 520234 - RNA, 18 nt, Human
ggaaaaggagugucuagc

SEQ ID NO: 520235 - RNA, 22 nt, Human
auuucacucauucauguuacuu

SEQ ID NO: 520236 - RNA, 22 nt, Human
uguggcaguaaaauugggcaac

SEQ ID NO: 520237 - RNA, 22 nt, Human
cugcucuguuucuuagcugggu

SEQ ID NO: 520238 - RNA, 22 nt, Human
gacccuguuucuacaaauaauu

SEQ ID NO: 520239 - RNA, 20 nt, Human
aguggcagggaaauggaaag

SEQ ID NO: 520240 - RNA, 22 nt, Human
uacauguaggugacauuuuaau

SEQ ID NO: 520241 - RNA, 22 nt, Human
gaggccuggagccgccuaggcg

SEQ ID NO: 520242 - RNA, 22 nt, Human
auuagcuuaggcaugaagagaa

SEQ ID NO: 520243 - RNA, 22 nt, Human
agggccugggguagcuuacugc

SEQ ID NO: 520244 - RNA, 22 nt, Human
ugcuuuauaucucucuucuuag

SEQ ID NO: 520245 - RNA, 22 nt, Human
uaugaauauaccacaauuuagg

SEQ ID NO: 520246 - RNA, 22 nt, Human
gggcauggugaugugcaccugu

SEQ ID NO: 520247 - RNA, 18 nt, Human
uagaagugugcuauacaa

SEQ ID NO: 520248 - RNA, 22 nt, Human
aguguuucccaguaggaugaaa

SEQ ID NO: 520249 - RNA, 21 nt, Human
gugcacaguccugcacacagg

SEQ ID NO: 520250 - RNA, 22 nt, Human
cugguuuuaauguuauguuuau

SEQ ID NO: 520251 - RNA, 22 nt, Human
gcugaggauugaagaguugcca

SEQ ID NO: 520252 - RNA, 22 nt, Human
acagugcaaauaggacugucuu

SEQ ID NO: 520253 - RNA, 22 nt, Human
uaaaucacuccuaauaaucagu

SEQ ID NO: 520254 - RNA, 22 nt, Human
agggggugaaugucugucuaca

SEQ ID NO: 520255 - RNA, 22 nt, Human
aacuguaaggcuuagaacagca

SEQ ID NO: 520256 - RNA, 22 nt, Human
gcuccucuuauuucaucagggc

SEQ ID NO: 520257 - RNA, 19 nt, Human
cauaauacaguggaucuga

SEQ ID NO: 520258 - RNA, 22 nt, Human
uaaaggguagguuuuacuguaa

SEQ ID NO: 520259 - RNA, 22 nt, Human
agcuucagauuuaucuuucugu

SEQ ID NO: 520260 - RNA, 22 nt, Human
aucagcaaucucguguauuagg

SEQ ID NO: 520261 - RNA, 22 nt, Human
aauguuaaaaccuucagugcuu

SEQ ID NO: 520262 - RNA, 22 nt, Human
gaaggcuggcuuucugagagca

SEQ ID NO: 520263 - RNA, 22 nt, Human
agcugccacugagggugcacag

SEQ ID NO: 520264 - RNA, 22 nt, Human
ucaaucaaugugucaguuccca

SEQ ID NO: 520265 - RNA, 22 nt, Human
ucuguuuucauuugucuugaga

SEQ ID NO: 520266 - RNA, 17 nt, Human
uccuggccuggugugug

SEQ ID NO: 520267 - RNA, 22 nt, Human
ugcaaauuucuuuaguacauaa

SEQ ID NO: 520268 - RNA, 22 nt, Human
uggcucaggagggaucuuugcu

SEQ ID NO: 520269 - RNA, 22 nt, Human
uccagggcuuggcugggacggu

SEQ ID NO: 520270 - RNA, 22 nt, Human
auuuugcacacuaugcagcuuu

SEQ ID NO: 520271 - RNA, 22 nt, Human
acacugaaugcuguuuagaaau

SEQ ID NO: 520272 - RNA, 22 nt, Human
uccugggcuguggccccgggca

SEQ ID NO: 520273 - RNA, 22 nt, Human
ccaggccuuccaguacgcagaa

SEQ ID NO: 520274 - RNA, 22 nt, Human
aggccagcagcaugacggcauc

SEQ ID NO: 520275 - RNA, 22 nt, Human
agaugaaauuuguguugaguug

SEQ ID NO: 520276 - RNA, 22 nt, Human
cauguccauuuaugcacagaaa

SEQ ID NO: 520277 - RNA, 22 nt, Human
cagugauguuucugcaucagag

SEQ ID NO: 520278 - RNA, 22 nt, Human
cagagcugcagauugaaggcau

SEQ ID NO: 520279 - RNA, 22 nt, Human
uuggaauucagcuugcuuauaa

SEQ ID NO: 520280 - RNA, 23 nt, Human
uuacaguaggaguuggaaaacca

SEQ ID NO: 520281 - RNA, 22 nt, Human
gccugaagaacagcugugagga

SEQ ID NO: 520282 - RNA, 22 nt, Human
uuuuuguggugcagacuaaagc

SEQ ID NO: 520283 - RNA, 22 nt, Human
cccuguuuaagaaaccuguaaa

SEQ ID NO: 520284 - RNA, 22 nt, Human
ucuguucaugaaauaucuuuuu

SEQ ID NO: 520285 - RNA, 22 nt, Human
gagcugggacuuggaauccaca

SEQ ID NO: 520286 - RNA, 22 nt, Human
acaguuaucuuugaaauagaga

SEQ ID NO: 520287 - RNA, 21 nt, Human
uacaagaccggauucgggccc

SEQ ID NO: 520288 - RNA, 22 nt, Human
cugcagggaccacaagcagguu

SEQ ID NO: 520289 - RNA, 22 nt, Human
ggggugggguuacucauugugc

SEQ ID NO: 520290 - RNA, 22 nt, Human
cacagaauaaauugguaucaga

SEQ ID NO: 520291 - RNA, 22 nt, Human
uccugcagcugaagcucaugug

SEQ ID NO: 520292 - RNA, 22 nt, Human
cucagacccccagagcugcuaa

SEQ ID NO: 520293 - RNA, 22 nt, Human
caggggcucccugggugccagu

SEQ ID NO: 520294 - RNA, 22 nt, Human
ugcugggccaaagcaggguuuu

SEQ ID NO: 520295 - RNA, 20 nt, Human
augccucuaauuuugcaaac

SEQ ID NO: 520296 - RNA, 22 nt, Human
aucacaauguacguuaaaaugu

SEQ ID NO: 520297 - RNA, 22 nt, Human
ccucuuugacucucaggucuuu

SEQ ID NO: 520298 - RNA, 22 nt, Human
ugcacacaaaugugaacgugcc

SEQ ID NO: 520299 - RNA, 22 nt, Human
uacaacauguaaagugguuuaa

SEQ ID NO: 520300 - RNA, 22 nt, Human
uaagacuucauuaguaauaugg

SEQ ID NO: 520301 - RNA, 22 nt, Human
ggcugucagggugagcuggcuu

SEQ ID NO: 520302 - RNA, 23 nt, Human
ugacaaagcgagacuccagcuca

SEQ ID NO: 520303 - RNA, 20 nt, Human
cugcagggugagugggcgau

SEQ ID NO: 520304 - RNA, 22 nt, Human
aauugcaacagguagacuuuuc

SEQ ID NO: 520305 - RNA, 22 nt, Human
agagcacaaauuuuaaggaggc

SEQ ID NO: 520306 - RNA, 21 nt, Human
agauuguauggaggugagagg

SEQ ID NO: 520307 - RNA, 22 nt, Human
ggccaccuuaaguuaaggauau

SEQ ID NO: 520308 - RNA, 22 nt, Human
acagugcagggugggaagaagg

SEQ ID NO: 520309 - RNA, 22 nt, Human
ggcuccuguccuccuggagcuc

SEQ ID NO: 520310 - RNA, 22 nt, Human
cugaaugaguggauuuuucauu

SEQ ID NO: 520311 - RNA, 22 nt, Human
caggguagacaguaggugucug

SEQ ID NO: 520312 - RNA, 22 nt, Human
ucuguacauuuguguugugaau

SEQ ID NO: 520313 - RNA, 22 nt, Human
uuccuggggcuuagcaauggag

SEQ ID NO: 520314 - RNA, 22 nt, Human
gccaggcuggaaagaacagaca

SEQ ID NO: 520315 - RNA, 22 nt, Human
ucucagggaccaugaugaugac

SEQ ID NO: 520316 - RNA, 22 nt, Human
aggcaguguguagcuggaagag

SEQ ID NO: 520317 - RNA, 22 nt, Human
augguacaaaauguauaaaguc

SEQ ID NO: 520318 - RNA, 18 nt, Human
uccuggccacacuaccuu

SEQ ID NO: 520319 - RNA, 22 nt, Human
uuggaugaagucuagcuuuagu

SEQ ID NO: 520320 - RNA, 19 nt, Human
aggcagcacccaguccuug

SEQ ID NO: 520321 - RNA, 19 nt, Human
ugcucauggggacuucucc

SEQ ID NO: 520322 - RNA, 22 nt, Human
gugugcaggcuugaggauuagg

SEQ ID NO: 520323 - RNA, 22 nt, Human
cccaggcagaauuaguguuuca

SEQ ID NO: 520324 - RNA, 18 nt, Human
cauaauuuucuuucuuua

SEQ ID NO: 520325 - RNA, 22 nt, Human
agcaugaagacuucagagcuag

SEQ ID NO: 520326 - RNA, 22 nt, Human
ccagggcauguccaagacuuag

SEQ ID NO: 520327 - RNA, 22 nt, Human
auguauguuaguguauuaucua

SEQ ID NO: 520328 - RNA, 22 nt, Human
aucaaugcucuguacccagaau

SEQ ID NO: 520329 - RNA, 21 nt, Human
cagagguggccugaccucuga

SEQ ID NO: 520330 - RNA, 17 nt, Human
cuuguugagcucguucc

SEQ ID NO: 520331 - RNA, 22 nt, Human
gcaggaagaugagcucagguaa

SEQ ID NO: 520332 - RNA, 22 nt, Human
gcucugggccgggcaccagccu

SEQ ID NO: 520333 - RNA, 22 nt, Human
cuucuuaaugacagauuaaaau

SEQ ID NO: 520334 - RNA, 23 nt, Human
auuuuaaccuugacuaacaugca

SEQ ID NO: 520335 - RNA, 22 nt, Human
ccucuuugugccugcaggcugc

SEQ ID NO: 520336 - RNA, 22 nt, Human
gcuugaguuuugggacaaagcc

SEQ ID NO: 520337 - RNA, 22 nt, Human
cucagcacugacccaggagaug

SEQ ID NO: 520338 - RNA, 22 nt, Human
guauuaggaggaacacaggccu

SEQ ID NO: 520339 - RNA, 22 nt, Human
cucagcauucaauguccagucc

SEQ ID NO: 520340 - RNA, 22 nt, Human
uagggcucagaguccaguuucu

SEQ ID NO: 520341 - RNA, 22 nt, Human
ccacugcuaacuugcugcagcu

SEQ ID NO: 520342 - RNA, 22 nt, Human
gcaguaaauaauuuuguguaua

SEQ ID NO: 520343 - RNA, 22 nt, Human
caggcugauaggguccaaaguu

SEQ ID NO: 520344 - RNA, 22 nt, Human
ugucucugagaugacucccacc

SEQ ID NO: 520345 - RNA, 22 nt, Human
gucauuucuguuucuucagugc

SEQ ID NO: 520346 - RNA, 22 nt, Human
aaucaguuaaauauugaguaca

SEQ ID NO: 520347 - RNA, 23 nt, Human
caguacuuaguguagcguuaauu

SEQ ID NO: 520348 - RNA, 22 nt, Human
gucaggaugcuauuguuauuaa

SEQ ID NO: 520349 - RNA, 22 nt, Human
gcaggagagucugugccagguu

SEQ ID NO: 520350 - RNA, 22 nt, Human
ucaggccuuucuucagagcuuc

SEQ ID NO: 520351 - RNA, 22 nt, Human
aaauuagucgguuuaggaauuu

SEQ ID NO: 520352 - RNA, 22 nt, Human
uccuggcccacuccuagcuucu

SEQ ID NO: 520353 - RNA, 22 nt, Human
gcugagcuagaaaaggaccaca

SEQ ID NO: 520354 - RNA, 22 nt, Human
acagcagcacuauugacauuuu

SEQ ID NO: 520355 - RNA, 22 nt, Human
uuagagaaauucugguaaugua

SEQ ID NO: 520356 - RNA, 21 nt, Human
ggcaggugggucucuguugcu

SEQ ID NO: 520357 - RNA, 22 nt, Human
gagagugaggccugggaaucua

SEQ ID NO: 520358 - RNA, 22 nt, Human
caugucuggguauaugcauaug

SEQ ID NO: 520359 - RNA, 22 nt, Human
guaggcagucucucaggugauc

SEQ ID NO: 520360 - RNA, 22 nt, Human
acaaauaugguacucggagaaa

SEQ ID NO: 520361 - RNA, 22 nt, Human
uucaauucuaaacuaauauucu

SEQ ID NO: 520362 - RNA, 23 nt, Human
uuaggcacuuaguagggccagag

SEQ ID NO: 520363 - RNA, 22 nt, Human
guggccucugugcuccugccua

SEQ ID NO: 520364 - RNA, 20 nt, Human
cccuggccuguuucaugccc

SEQ ID NO: 520365 - RNA, 23 nt, Human
ugcagcugccucuggcgggccgg

SEQ ID NO: 520366 - RNA, 22 nt, Human
caugagaagggguggaguuaga

SEQ ID NO: 520367 - RNA, 22 nt, Human
uggagucacagugaccugaguc

SEQ ID NO: 520368 - RNA, 21 nt, Human
aggcucucauccagggaccca

SEQ ID NO: 520369 - RNA, 21 nt, Human
ugggugggcagagucucuuca

SEQ ID NO: 520370 - RNA, 22 nt, Human
agucagcaucugcacugugcug

SEQ ID NO: 520371 - RNA, 22 nt, Human
augcaaaauuaccauucuguuc

SEQ ID NO: 520372 - RNA, 22 nt, Human
acuucuugggacccuggcaccg

SEQ ID NO: 520373 - RNA, 22 nt, Human
uaccacuacauuugcuaauggc

SEQ ID NO: 520374 - RNA, 22 nt, Human
cagacagaggcuguaugagggc

SEQ ID NO: 520375 - RNA, 23 nt, Human
acagagguccaaacaguauaagc

SEQ ID NO: 520376 - RNA, 19 nt, Human
uccugcagguggcuugcag

SEQ ID NO: 520377 - RNA, 22 nt, Human
caugcaaacacguaaacauuca

SEQ ID NO: 520378 - RNA, 22 nt, Human
aaggcuguuuauuagaaaaagu

SEQ ID NO: 520379 - RNA, 22 nt, Human
gagggagugccagagggccagc

SEQ ID NO: 520380 - RNA, 22 nt, Human
uuguccugagauaaggaacaga

SEQ ID NO: 520381 - RNA, 21 nt, Human
agaggcaggcauuaaguacac

SEQ ID NO: 520382 - RNA, 22 nt, Human
ucaggucugggcacaugguaca

SEQ ID NO: 520383 - RNA, 22 nt, Human
uuaaacagacaguaaaugaaac

SEQ ID NO: 520384 - RNA, 22 nt, Human
agcaggucgccgaagauagcuc

SEQ ID NO: 520385 - RNA, 22 nt, Human
cugggucuggccacaggaagua

SEQ ID NO: 520386 - RNA, 17 nt, Human
uccuucagggccucaca

SEQ ID NO: 520387 - RNA, 22 nt, Human
acaguguuguggcucuuaauag

SEQ ID NO: 520388 - RNA, 22 nt, Human
ccagcagggaaaaacccaccaa

SEQ ID NO: 520389 - RNA, 22 nt, Human
agggggcccuugcaggugagcg

SEQ ID NO: 520390 - RNA, 22 nt, Human
ugggcagaaggaagagccaccu

SEQ ID NO: 520391 - RNA, 22 nt, Human
ugggagaagcagugggacagua

SEQ ID NO: 520392 - RNA, 20 nt, Human
agcagcauuguucuagagca

SEQ ID NO: 520393 - RNA, 22 nt, Human
uuuccuuccagguuccuaaggc

SEQ ID NO: 520394 - RNA, 22 nt, Human
aagauucuacaguagguacauu

SEQ ID NO: 520395 - RNA, 22 nt, Human
cucccucccuacgugagcucac

SEQ ID NO: 520396 - RNA, 22 nt, Human
ucagaggguggcugggagcauc

SEQ ID NO: 520397 - RNA, 22 nt, Human
ggcucagauuccgaguggcccu

SEQ ID NO: 520398 - RNA, 22 nt, Human
aucagcaagcaugguuaggugu

SEQ ID NO: 520399 - RNA, 17 nt, Human
guccuacccauggucua

SEQ ID NO: 520400 - RNA, 23 nt, Human
augaaaguucuuaaaaugucaug

SEQ ID NO: 520401 - RNA, 22 nt, Human
ugaaaaggagccuuagguaggu

SEQ ID NO: 520402 - RNA, 22 nt, Human
uuuguacuggaagaacaugcaa

SEQ ID NO: 520403 - RNA, 22 nt, Human
ccccuuucucccgcgucuggcc

SEQ ID NO: 520404 - RNA, 22 nt, Human
ucuauuugcugguugcuucugu

SEQ ID NO: 520405 - RNA, 22 nt, Human
agagggcccauguugggcugcu

SEQ ID NO: 520406 - RNA, 22 nt, Human
uggccugguuauauugcuauca

SEQ ID NO: 520407 - RNA, 21 nt, Human
cugggcuuucucucaaagaca

SEQ ID NO: 520408 - RNA, 22 nt, Human
ugagucugauuuuucuagcauu

SEQ ID NO: 520409 - RNA, 22 nt, Human
uucuguguucugugcaaugagc

SEQ ID NO: 520410 - RNA, 22 nt, Human
gcagcucaagagaggugcuaug

SEQ ID NO: 520411 - RNA, 22 nt, Human
gcaaguagugggaaagaagaug

SEQ ID NO: 520412 - RNA, 22 nt, Human
aucagcacaacguacagagaaa

SEQ ID NO: 520413 - RNA, 22 nt, Human
gggaaggagguggcuugaagug

SEQ ID NO: 520414 - RNA, 23 nt, Human
cucagagguguuuuucacuuacu

SEQ ID NO: 520415 - RNA, 22 nt, Human
cuugggagacacaagaagacau

SEQ ID NO: 520416 - RNA, 22 nt, Human
acagagcuuaggaugacuccca

SEQ ID NO: 520417 - RNA, 22 nt, Human
cuuggcagauccaaaaaugaca

SEQ ID NO: 520418 - RNA, 22 nt, Human
cagcagcuccaaagaauagcca

SEQ ID NO: 520419 - RNA, 22 nt, Human
ugggcugagcacugaggaagga

SEQ ID NO: 520420 - RNA, 22 nt, Human
ucugucacaauuugcuuacucu

SEQ ID NO: 520421 - RNA, 22 nt, Human
gggcucugggaugcucuuagag

SEQ ID NO: 520422 - RNA, 22 nt, Human
aaggacuccaauucuuucaucu

SEQ ID NO: 520423 - RNA, 22 nt, Human
uguuuucaucacagaauguaac

SEQ ID NO: 520424 - RNA, 19 nt, Human
uggcugggcgugccuccgu

SEQ ID NO: 520425 - RNA, 22 nt, Human
gaguuauuucagaaggaaagau

SEQ ID NO: 520426 - RNA, 22 nt, Human
ucaugccaaacugaacacaguu

SEQ ID NO: 520427 - RNA, 22 nt, Human
ggcggguggcgaggcuucucgg

SEQ ID NO: 520428 - RNA, 23 nt, Human
ucuuuucaaugguucuuuaugug

SEQ ID NO: 520429 - RNA, 22 nt, Human
uuuguagacgucagaaguuacu

SEQ ID NO: 520430 - RNA, 22 nt, Human
auucacagggacaaugggagag

SEQ ID NO: 520431 - RNA, 22 nt, Human
ugcugaauucucauucccugga

SEQ ID NO: 520432 - RNA, 22 nt, Human
agcaggcugccuuccaaagccu

SEQ ID NO: 520433 - RNA, 22 nt, Human
aaauguucccaauaugaagcug

SEQ ID NO: 520434 - RNA, 20 nt, Human
ucugcccaccccggcuccca

SEQ ID NO: 520435 - RNA, 22 nt, Human
ugcucugcacaucccucacaaa

SEQ ID NO: 520436 - RNA, 22 nt, Human
uuggaaauggcuguaguuauga

SEQ ID NO: 520437 - RNA, 22 nt, Human
uguccugugauuccagcucuuc

SEQ ID NO: 520438 - RNA, 22 nt, Human
gggaccugccaaggccacccag

SEQ ID NO: 520439 - RNA, 22 nt, Human
ccuguucaagggaugauugacc

SEQ ID NO: 520440 - RNA, 22 nt, Human
uuugcaaaaugaggugaagagu

SEQ ID NO: 520441 - RNA, 22 nt, Human
acacucucagcuuuucaacuua

SEQ ID NO: 520442 - RNA, 18 nt, Human
cagggcuguggggucacu

SEQ ID NO: 520443 - RNA, 22 nt, Human
uuuuggcacugcgucuacaugg

SEQ ID NO: 520444 - RNA, 22 nt, Human
guggagaccuccuaggaugugu

SEQ ID NO: 520445 - RNA, 22 nt, Human
uaggcaggcugaauguagauuu

SEQ ID NO: 520446 - RNA, 22 nt, Human
gcauggccucugugcuuguugc

SEQ ID NO: 520447 - RNA, 22 nt, Human
uucaggaugcucagaguagucu

SEQ ID NO: 520448 - RNA, 15 nt, Human
cagucccagggaccc

SEQ ID NO: 520449 - RNA, 22 nt, Human
gauggcagcagcagccagggau

SEQ ID NO: 520450 - RNA, 22 nt, Human
agcuggccauugugaguggccu

SEQ ID NO: 520451 - RNA, 22 nt, Human
gccucugcaacuccgccuuggu

SEQ ID NO: 520452 - RNA, 22 nt, Human
aucaggaugacuauaaggcugc

SEQ ID NO: 520453 - RNA, 22 nt, Human
aggagaaagacuggacagccaa

SEQ ID NO: 520454 - RNA, 22 nt, Human
aggcuuuaauuaucuacaggag

SEQ ID NO: 520455 - RNA, 20 nt, Human
ucaaagcacugccugucauc

SEQ ID NO: 520456 - RNA, 20 nt, Human
agcuccaugaaguagucacu

SEQ ID NO: 520457 - RNA, 22 nt, Human
uuucagagccuuuaucucucua

SEQ ID NO: 520458 - RNA, 22 nt, Human
cccacagguccccaugaacucg

SEQ ID NO: 520459 - RNA, 20 nt, Human
cacugaagacuucuugcuca

SEQ ID NO: 520460 - RNA, 22 nt, Human
aggcuccauucaugugaaggca

SEQ ID NO: 520461 - RNA, 22 nt, Human
caagagcugugaccucauucac

SEQ ID NO: 520462 - RNA, 22 nt, Human
uuaagaaugugccuuuugguug

SEQ ID NO: 520463 - RNA, 22 nt, Human
agcaggagaacacuguggcucu

SEQ ID NO: 520464 - RNA, 19 nt, Human
uccuucagucagaucuggg

SEQ ID NO: 520465 - RNA, 22 nt, Human
cuuaucagauuaucugggcugu

SEQ ID NO: 520466 - RNA, 22 nt, Human
uaggaaauuagaacuuggaaac

SEQ ID NO: 520467 - RNA, 22 nt, Human
ugcaagaaugacccaucuaccc

SEQ ID NO: 520468 - RNA, 22 nt, Human
cagcauggugccagugagucca

SEQ ID NO: 520469 - RNA, 22 nt, Human
uauuuuguauuuaugcaagaaa

SEQ ID NO: 520470 - RNA, 22 nt, Human
ucuguaggguaguaguggagau

SEQ ID NO: 520471 - RNA, 22 nt, Human
ggcacugagaacaggcugacuu

SEQ ID NO: 520472 - RNA, 22 nt, Human
aacagaaggggguauuuacauu

SEQ ID NO: 520473 - RNA, 22 nt, Human
ucaaggaauuuaguuuaguaaa

SEQ ID NO: 520474 - RNA, 22 nt, Human
caguauguuugggagacaugac

SEQ ID NO: 520475 - RNA, 22 nt, Human
auccugggcaguuuugagugcu

SEQ ID NO: 520476 - RNA, 22 nt, Human
caguccugcccaggcugacaga

SEQ ID NO: 520477 - RNA, 22 nt, Human
guuuaagaaaauucauguuguu

SEQ ID NO: 520478 - RNA, 22 nt, Human
gugguccucauaauucagugag

SEQ ID NO: 520479 - RNA, 22 nt, Human
gccaggcauuauuccgaucccu

SEQ ID NO: 520480 - RNA, 22 nt, Human
agacaacaccaaaugcuagugu

SEQ ID NO: 520481 - RNA, 22 nt, Human
uugcauguuauuuaaucuguau

SEQ ID NO: 520482 - RNA, 22 nt, Human
caucucuucauuagcauuauug

SEQ ID NO: 520483 - RNA, 22 nt, Human
ugucugagugugccugggcauu

SEQ ID NO: 520484 - RNA, 22 nt, Human
ucagcaggguuugacuucuaau

SEQ ID NO: 520485 - RNA, 22 nt, Human
ucuggcucagggcucugaggga

SEQ ID NO: 520486 - RNA, 22 nt, Human
ucauuguuauguuuugcugucu

SEQ ID NO: 520487 - RNA, 22 nt, Human
ggcacauggagacuuggcauca

SEQ ID NO: 520488 - RNA, 22 nt, Human
uuccucuguaguugcugaugaa

SEQ ID NO: 520489 - RNA, 21 nt, Human
gcacagcaugaguguuggcau

SEQ ID NO: 520490 - RNA, 22 nt, Human
ugggcagaucuuugguggcuag

SEQ ID NO: 520491 - RNA, 22 nt, Human
uuugaaaagaaccaucgccuua

SEQ ID NO: 520492 - RNA, 22 nt, Human
cuacauuuguucuauagcuuuu

SEQ ID NO: 520493 - RNA, 22 nt, Human
gugauuucagguuuuucauacu

SEQ ID NO: 520494 - RNA, 22 nt, Human
uuccaggaacacucuguguccc

SEQ ID NO: 520495 - RNA, 22 nt, Human
ugcauuauaacugaauguuguu

SEQ ID NO: 520496 - RNA, 22 nt, Human
ugcugaaugggauauguugagc

SEQ ID NO: 520497 - RNA, 22 nt, Human
ugagagugauugguucgaaugu

SEQ ID NO: 520498 - RNA, 22 nt, Human
gcuuucucuucacugauguuca

SEQ ID NO: 520499 - RNA, 22 nt, Human
uuccagaaaaaaauguauaucu

SEQ ID NO: 520500 - RNA, 22 nt, Human
ggcccuuggagccuccacagug

SEQ ID NO: 520501 - RNA, 22 nt, Human
aaaacaggugucagcaaacuau

SEQ ID NO: 520502 - RNA, 22 nt, Human
cugggcuacguguugacagcau

SEQ ID NO: 520503 - RNA, 22 nt, Human
agcagagcugcaguggccugcu

SEQ ID NO: 520504 - RNA, 22 nt, Human
cuuaaauuuucaucuacaagaa

SEQ ID NO: 520505 - RNA, 22 nt, Human
agggcugaaguuauggcugagc

SEQ ID NO: 520506 - RNA, 22 nt, Human
auugucuucuggucuuaucuuu

SEQ ID NO: 520507 - RNA, 22 nt, Human
gcugggaggaauuuggggaaua

SEQ ID NO: 520508 - RNA, 22 nt, Human
cagucccaccaggaucgcucuu

SEQ ID NO: 520509 - RNA, 22 nt, Human
gaggugggagggcagucccuaa

SEQ ID NO: 520510 - RNA, 22 nt, Human
aaggcugacucaacagggggcc

SEQ ID NO: 520511 - RNA, 22 nt, Human
uaaggcaccauaauauauuuaa

SEQ ID NO: 520512 - RNA, 22 nt, Human
cuggggauccuuuuugcaucua

SEQ ID NO: 520513 - RNA, 22 nt, Human
gauuuagagaauguuuuguaag

SEQ ID NO: 520514 - RNA, 20 nt, Human
aggacagcagcugccacuug

SEQ ID NO: 520515 - RNA, 22 nt, Human
gguuugcacgauauuuccaugg

SEQ ID NO: 520516 - RNA, 22 nt, Human
gggcacagagggucuugaagaa

SEQ ID NO: 520517 - RNA, 22 nt, Human
uccaaagacuugcuguauguaa

SEQ ID NO: 520518 - RNA, 22 nt, Human
caagagcucaccggagagcauu

SEQ ID NO: 520519 - RNA, 22 nt, Human
cccugcaggggaccugcagccu

SEQ ID NO: 520520 - RNA, 22 nt, Human
uguggcccagaugagugugcua

SEQ ID NO: 520521 - RNA, 21 nt, Human
ugaaugaggaggauggcauuu

SEQ ID NO: 520522 - RNA, 22 nt, Human
acugucuguacuucuugcaagg

SEQ ID NO: 520523 - RNA, 22 nt, Human
gugcacagaaauugguaagacu

SEQ ID NO: 520524 - RNA, 22 nt, Human
cuccugggagucuuccuggaug

SEQ ID NO: 520525 - RNA, 22 nt, Human
gaugauggacaaagcauuggug

SEQ ID NO: 520526 - RNA, 22 nt, Human
acugugcacaauucuaaguccu

SEQ ID NO: 520527 - RNA, 17 nt, Human
uuucaagguuacguucc

SEQ ID NO: 520528 - RNA, 22 nt, Human
cccacacucugagaaaugcuga

SEQ ID NO: 520529 - RNA, 22 nt, Human
gggcagugguccaggcuacagc

SEQ ID NO: 520530 - RNA, 22 nt, Human
gccuggagccucagcaaggagg

SEQ ID NO: 520531 - RNA, 22 nt, Human
caauguguguguuuuucucaac

SEQ ID NO: 520532 - RNA, 22 nt, Human
uguguuccuucgucuucccuuc

SEQ ID NO: 520533 - RNA, 22 nt, Human
cugaaggauuagagagcacuua

SEQ ID NO: 520534 - RNA, 22 nt, Human
ucagggaaauagcagggcugaa

SEQ ID NO: 520535 - RNA, 22 nt, Human
agauuucucuuucccuggcuga

SEQ ID NO: 520536 - RNA, 22 nt, Human
ucuccauaggcaguucauaaca

SEQ ID NO: 520537 - RNA, 22 nt, Human
gagaaaauagcauguguaguau

SEQ ID NO: 520538 - RNA, 22 nt, Human
ucccagccuuucuuuucugcug

SEQ ID NO: 520539 - RNA, 22 nt, Human
uauuacaaauuauaaugggaga

SEQ ID NO: 520540 - RNA, 22 nt, Human
caggugggagcgaggagcuacu

SEQ ID NO: 520541 - RNA, 22 nt, Human
cccaggcagcggggucuccuug

SEQ ID NO: 520542 - RNA, 22 nt, Human
ucccagggugcgccugcccucg

SEQ ID NO: 520543 - RNA, 22 nt, Human
agucucagaaaagaagcaugga

SEQ ID NO: 520544 - RNA, 22 nt, Human
uaguccauuuucacacugcuga

SEQ ID NO: 520545 - RNA, 22 nt, Human
ggccucuggcaggcaggcccuc

SEQ ID NO: 520546 - RNA, 22 nt, Human
aaugucugccagaacugaucau

SEQ ID NO: 520547 - RNA, 22 nt, Human
ccagugcacaauggaacaacuc

SEQ ID NO: 520548 - RNA, 22 nt, Human
aacaggagaguaaauauaugau

SEQ ID NO: 520549 - RNA, 22 nt, Human
auggaaauggagugugcuugcu

SEQ ID NO: 520550 - RNA, 23 nt, Human
aggaaggagguccuaacaguauc

SEQ ID NO: 520551 - RNA, 22 nt, Human
ccuggccaggcucucagcacug

SEQ ID NO: 520552 - RNA, 22 nt, Human
caguaugagaguugaaucaagg

SEQ ID NO: 520553 - RNA, 22 nt, Human
aguaaucaauuuuucgguggau

SEQ ID NO: 520554 - RNA, 22 nt, Human
uuggaaauacgaguaguaucau

SEQ ID NO: 520555 - RNA, 22 nt, Human
guccucugcccaggucaagguu

SEQ ID NO: 520556 - RNA, 22 nt, Human
ucuguuuugugucucucuggug

SEQ ID NO: 520557 - RNA, 22 nt, Human
cagagcauaauugacaugaggu

SEQ ID NO: 520558 - RNA, 22 nt, Human
aaauguucuacuuugauaauua

SEQ ID NO: 520559 - RNA, 22 nt, Human
ugccuggcacuccuggagcuca

SEQ ID NO: 520560 - RNA, 22 nt, Human
acauaaauagauuauugggagg

SEQ ID NO: 520561 - RNA, 22 nt, Human
acuuugcugcagguuuaaagag

SEQ ID NO: 520562 - RNA, 22 nt, Human
uauucugugugauauguaaaug

SEQ ID NO: 520563 - RNA, 22 nt, Human
cagcaggaggugagaugugacc

SEQ ID NO: 520564 - RNA, 22 nt, Human
uacauguuuacuccaagucagg

SEQ ID NO: 520565 - RNA, 22 nt, Human
uagaaauguaggcuuccugaca

SEQ ID NO: 520566 - RNA, 20 nt, Human
gugcuucagaagccauugcu

SEQ ID NO: 520567 - RNA, 22 nt, Human
cuucaaguugucugaggguggg

SEQ ID NO: 520568 - RNA, 22 nt, Human
uagauucagauauuuaggacaa

SEQ ID NO: 520569 - RNA, 22 nt, Human
ccucugcucccuggugucugag

SEQ ID NO: 520570 - RNA, 22 nt, Human
uccccacaucucugcaucaggc

SEQ ID NO: 520571 - RNA, 22 nt, Human
cugcuuccauaaauaaugugcu

SEQ ID NO: 520572 - RNA, 22 nt, Human
ccugggccucacccagcucuug

SEQ ID NO: 520573 - RNA, 22 nt, Human
ccuguucaugaaacugcuuucc

SEQ ID NO: 520574 - RNA, 22 nt, Human
gcugccacucugagcuugcuuc

SEQ ID NO: 520575 - RNA, 22 nt, Human
agggugggcuagacucuucccc

SEQ ID NO: 520576 - RNA, 22 nt, Human
gcucaggaaggcucaaccagga

SEQ ID NO: 520577 - RNA, 21 nt, Human
acaugucucuaaucucaguga

SEQ ID NO: 520578 - RNA, 15 nt, Human
ucugggcugugagca

SEQ ID NO: 520579 - RNA, 23 nt, Human
ccuggcuggauucucugcauuca

SEQ ID NO: 520580 - RNA, 22 nt, Human
ggcugccugcuccuccugcacg

SEQ ID NO: 520581 - RNA, 22 nt, Human
gaaggccaagaggcuccaagau

SEQ ID NO: 520582 - RNA, 22 nt, Human
aaaggaagauugagcuuuucca

SEQ ID NO: 520583 - RNA, 22 nt, Human
ccugggcaacauagugagaccu

SEQ ID NO: 520584 - RNA, 22 nt, Human
gggaggagcuuggagauucacu

SEQ ID NO: 520585 - RNA, 22 nt, Human
guaugaaguuggacuguauaaa

SEQ ID NO: 520586 - RNA, 22 nt, Human
uuguaacagcugcuuaauagag

SEQ ID NO: 520587 - RNA, 23 nt, Human
gcucaucaggcuuagagucaagg

SEQ ID NO: 520588 - RNA, 22 nt, Human
agaagauuauuagagacuuugu

SEQ ID NO: 520589 - RNA, 22 nt, Human
agccucucuguuagucacuggg

SEQ ID NO: 520590 - RNA, 22 nt, Human
agcuggagaaaccugggagggu

SEQ ID NO: 520591 - RNA, 22 nt, Human
cugggcacauuuugacuagugu

SEQ ID NO: 520592 - RNA, 22 nt, Human
agagacauggagaggcaaaguu

SEQ ID NO: 520593 - RNA, 22 nt, Human
agcagcauucucugguaugggg

SEQ ID NO: 520594 - RNA, 22 nt, Human
uucacuuauagggauguuauug

SEQ ID NO: 520595 - RNA, 22 nt, Human
uacauugaauuuuuuagcaugu

SEQ ID NO: 520596 - RNA, 16 nt, Human
ugggaccuguggccaa

SEQ ID NO: 520597 - RNA, 22 nt, Human
caggucuggugagagaacaguu

SEQ ID NO: 520598 - RNA, 22 nt, Human
aguggggacuuaugccagcauu

SEQ ID NO: 520599 - RNA, 22 nt, Human
cacacaaauauucuggaggcaa

SEQ ID NO: 520600 - RNA, 20 nt, Human
ugacucugcaaccgucucuc

SEQ ID NO: 520601 - RNA, 22 nt, Human
ccucugggcggagaucugcugc

SEQ ID NO: 520602 - RNA, 22 nt, Human
ggucccaguugcccaggucagg

SEQ ID NO: 520603 - RNA, 22 nt, Human
aucauuaaauauaagcuucaca

SEQ ID NO: 520604 - RNA, 22 nt, Human
uucccuucuaguuuugagagac

SEQ ID NO: 520605 - RNA, 21 nt, Human
gugguuauuuucauuagcauc

SEQ ID NO: 520606 - RNA, 22 nt, Human
ucuugggcaauuucucuagagg

SEQ ID NO: 520607 - RNA, 19 nt, Human
gcaggcaguggcauucgga

SEQ ID NO: 520608 - RNA, 22 nt, Human
cccagcagccuggauguucuuu

SEQ ID NO: 520609 - RNA, 22 nt, Human
agggcagaccacgugcaaggau

SEQ ID NO: 520610 - RNA, 22 nt, Human
gggagggaggugaugcuuggcu

SEQ ID NO: 520611 - RNA, 22 nt, Human
agggccucugacgcccccagcc

SEQ ID NO: 520612 - RNA, 22 nt, Human
gcagccacugggagugcuuaua

SEQ ID NO: 520613 - RNA, 22 nt, Human
cugggagaucuccugagggcag

SEQ ID NO: 520614 - RNA, 22 nt, Human
uacagcuucagugugccccagu

SEQ ID NO: 520615 - RNA, 22 nt, Human
acugcagacucuacaguuauaa

SEQ ID NO: 520616 - RNA, 22 nt, Human
uugaaaguccuucuugaguuac

SEQ ID NO: 520617 - RNA, 22 nt, Human
cccugcagagagugcuuuugug

SEQ ID NO: 520618 - RNA, 22 nt, Human
ccugccagucacuaugucaccu

SEQ ID NO: 520619 - RNA, 22 nt, Human
agcagggggccacagucacagc

SEQ ID NO: 520620 - RNA, 22 nt, Human
cucagggcaguauggcugagag

SEQ ID NO: 520621 - RNA, 22 nt, Human
ucugaggcccuacccugagccu

SEQ ID NO: 520622 - RNA, 22 nt, Human
gaauagauccucauuuauugau

SEQ ID NO: 520623 - RNA, 22 nt, Human
ccugugcccucagccuggcucu

SEQ ID NO: 520624 - RNA, 22 nt, Human
aaggacagaaacagauugcugg

SEQ ID NO: 520625 - RNA, 22 nt, Human
gcucaggauuucauccaugugu

SEQ ID NO: 520626 - RNA, 22 nt, Human
caucaaagggccuguggugcag

SEQ ID NO: 520627 - RNA, 22 nt, Human
uaagaacaagauguuccuguuu

SEQ ID NO: 520628 - RNA, 22 nt, Human
gagcugugccaaucugucuggg

SEQ ID NO: 520629 - RNA, 22 nt, Human
aaguauauuuuuugaagcauau

SEQ ID NO: 520630 - RNA, 22 nt, Human
gucuggugggauuccaaguggc

SEQ ID NO: 520631 - RNA, 22 nt, Human
cuauuacaauucugcaaggagu

SEQ ID NO: 520632 - RNA, 22 nt, Human
aaguuagaaauaagggcucucc

SEQ ID NO: 520633 - RNA, 22 nt, Human
guguucauggaugucaauuuga

SEQ ID NO: 520634 - RNA, 20 nt, Human
caaugcacacagcugcuucu

SEQ ID NO: 520635 - RNA, 22 nt, Human
auccaguucucagugcuuacag

SEQ ID NO: 520636 - RNA, 22 nt, Human
gaguaaaucgucauugcagcau

SEQ ID NO: 520637 - RNA, 22 nt, Human
ccacacagauaaguguuuucua

SEQ ID NO: 520638 - RNA, 23 nt, Human
auaaauuacuaucucccuagagc

SEQ ID NO: 520639 - RNA, 22 nt, Human
ggccaccuggcugugggggcag

SEQ ID NO: 520640 - RNA, 22 nt, Human
agugaaauagcauuuaugaagc

SEQ ID NO: 520641 - RNA, 22 nt, Human
gccaagcucuuuaaaggccaaa

SEQ ID NO: 520642 - RNA, 18 nt, Human
aaaaugcaggcgacaugg

SEQ ID NO: 520643 - RNA, 22 nt, Human
guccucagucaguuuggugggg

SEQ ID NO: 520644 - RNA, 22 nt, Human
cauuucuagacaaguccuggag

SEQ ID NO: 520645 - RNA, 19 nt, Human
uuagccauccacagugaaa

SEQ ID NO: 520646 - RNA, 22 nt, Human
agcuuuaucuucaccugggaau

SEQ ID NO: 520647 - RNA, 22 nt, Human
auaaggcagugacuucaucuau

SEQ ID NO: 520648 - RNA, 22 nt, Human
ugauaugugaagcuauuaguuc

SEQ ID NO: 520649 - RNA, 22 nt, Human
aagcuucaucugaugccgaacu

SEQ ID NO: 520650 - RNA, 22 nt, Human
ccuggcacacgguggcauucaa

SEQ ID NO: 520651 - RNA, 22 nt, Human
cccaggcaguagaaagaagagg

SEQ ID NO: 520652 - RNA, 22 nt, Human
uccccacacuuucacuccuggc

SEQ ID NO: 520653 - RNA, 22 nt, Human
ccaaaguccauaguuuacauua

SEQ ID NO: 520654 - RNA, 22 nt, Human
uaaccaaagggccuaaggaaug

SEQ ID NO: 520655 - RNA, 22 nt, Human
cagcuugggggcgcuggccuca

SEQ ID NO: 520656 - RNA, 22 nt, Human
augcaguacagauaauucuaca

SEQ ID NO: 520657 - RNA, 22 nt, Human
ggcuggagauaugucuggaaca

SEQ ID NO: 520658 - RNA, 22 nt, Human
acugcaugauaauaauagcaga

SEQ ID NO: 520659 - RNA, 19 nt, Human
uguguucauucaucagagg

SEQ ID NO: 520660 - RNA, 22 nt, Human
uggagcagccaugaugacagag

SEQ ID NO: 520661 - RNA, 22 nt, Human
cgaggcaggcaggcggaggaua

SEQ ID NO: 520662 - RNA, 22 nt, Human
gcagcugaagcugcaguuccag

SEQ ID NO: 520663 - RNA, 22 nt, Human
ggaguagcugcauuccgagcac

SEQ ID NO: 520664 - RNA, 21 nt, Human
cugcuuuacuucagaggaucu

SEQ ID NO: 520665 - RNA, 22 nt, Human
gagacugcauuguccaaggguu

SEQ ID NO: 520666 - RNA, 22 nt, Human
aaguguuuacuuaaagucaugg

SEQ ID NO: 520667 - RNA, 22 nt, Human
agggagagacauuuccuucuug

SEQ ID NO: 520668 - RNA, 22 nt, Human
gguccagaagcugguaggguag

SEQ ID NO: 520669 - RNA, 22 nt, Human
uuccaaagaaauugaccaagac

SEQ ID NO: 520670 - RNA, 22 nt, Human
agaaaucucaguaucucaggga

SEQ ID NO: 520671 - RNA, 20 nt, Human
cagcaacuuuggacugaguu

SEQ ID NO: 520672 - RNA, 22 nt, Human
acagagcuaauguugcauaggc

SEQ ID NO: 520673 - RNA, 22 nt, Human
gaagcccaggcuuccuuggcuu

SEQ ID NO: 520674 - RNA, 19 nt, Human
cgcaggagccgaggugacc

SEQ ID NO: 520675 - RNA, 22 nt, Human
ucuguucaagacugaggugaca

SEQ ID NO: 520676 - RNA, 22 nt, Human
auuucagcccaguaugagcccc

SEQ ID NO: 520677 - RNA, 22 nt, Human
ccucagugaguguuuccuucuu

SEQ ID NO: 520678 - RNA, 22 nt, Human
ucuuugcaggagcccuuugaac

SEQ ID NO: 520679 - RNA, 22 nt, Human
agagaacagcauugcagcuuug

SEQ ID NO: 520680 - RNA, 22 nt, Human
gaggaacaugaggugaccuggg

SEQ ID NO: 520681 - RNA, 22 nt, Human
aggaaagguucagugauugaaa

SEQ ID NO: 520682 - RNA, 22 nt, Human
auccuugagaaaauaaaugacc

SEQ ID NO: 520683 - RNA, 22 nt, Human
ccuggcucugcagccacuccag

SEQ ID NO: 520684 - RNA, 22 nt, Human
cacucugcagcugaagggcugg

SEQ ID NO: 520685 - RNA, 18 nt, Human
ucagagguacagaaaagu

SEQ ID NO: 520686 - RNA, 22 nt, Human
ucuggcucugacacuacuguua

SEQ ID NO: 520687 - RNA, 22 nt, Human
gagagaauguacaugcuagggg

SEQ ID NO: 520688 - RNA, 22 nt, Human
gagcagcucugggugacccagu

SEQ ID NO: 520689 - RNA, 22 nt, Human
aaugaugguuucaucacuugaa

SEQ ID NO: 520690 - RNA, 22 nt, Human
ugcuagaaaucugaaacuagca

SEQ ID NO: 520691 - RNA, 22 nt, Human
cagggcuggcuguggcaaucuc

SEQ ID NO: 520692 - RNA, 20 nt, Human
ucucaggccccaguuuucuu

SEQ ID NO: 520693 - RNA, 22 nt, Human
cucccuggcacagcgagagguu

SEQ ID NO: 520694 - RNA, 22 nt, Human
gaggaagaagcaaaccagcuaa

SEQ ID NO: 520695 - RNA, 22 nt, Human
ugcuaggagaggcagcacagcg

SEQ ID NO: 520696 - RNA, 18 nt, Human
gcagugcaggaagaagag

SEQ ID NO: 520697 - RNA, 17 nt, Human
agaaagaggauccacag

SEQ ID NO: 520698 - RNA, 22 nt, Human
gucaguaggaaccuagggucaa

SEQ ID NO: 520699 - RNA, 21 nt, Human
cugccaggauagcaugcaggc

SEQ ID NO: 520700 - RNA, 22 nt, Human
gcucaccacugcuagagucuau

SEQ ID NO: 520701 - RNA, 22 nt, Human
aggcagaauguuggaaaggaag

SEQ ID NO: 520702 - RNA, 22 nt, Human
uucuuucccuuccagcagcucc

SEQ ID NO: 520703 - RNA, 22 nt, Human
guauuagguuggugcaaaauug

SEQ ID NO: 520704 - RNA, 19 nt, Human
agggaauccggcugaggga

SEQ ID NO: 520705 - RNA, 17 nt, Human
ucuggccuuccugaacu

SEQ ID NO: 520706 - RNA, 23 nt, Human
ucguugaauagcaauagcacaac

SEQ ID NO: 520707 - RNA, 22 nt, Human
acuuuuuacaggguguauacca

SEQ ID NO: 520708 - RNA, 22 nt, Human
uuacauaaaaguucacguaggc

SEQ ID NO: 520709 - RNA, 21 nt, Human
gccagagcaguacaaugaggu

SEQ ID NO: 520710 - RNA, 20 nt, Human
agggccuggaguacagcagg

SEQ ID NO: 520711 - RNA, 22 nt, Human
ucaggggcugugcauuucccag

SEQ ID NO: 520712 - RNA, 22 nt, Human
agcagcauggcugacuaaagac

SEQ ID NO: 520713 - RNA, 22 nt, Human
accuguuuacccugggcucccc

SEQ ID NO: 520714 - RNA, 22 nt, Human
agaaaaggcuugaagagguuuu

SEQ ID NO: 520715 - RNA, 22 nt, Human
ccuggcucccccaucauagcug

SEQ ID NO: 520716 - RNA, 22 nt, Human
aggugggacccguggggugcga

SEQ ID NO: 520717 - RNA, 22 nt, Human
aaacaaacauagguuugaaagu

SEQ ID NO: 520718 - RNA, 22 nt, Human
guggcucuccauugacauggaa

SEQ ID NO: 520719 - RNA, 22 nt, Human
uuccucucgcucuccggggccc

SEQ ID NO: 520720 - RNA, 22 nt, Human
caggccagugggaaauagggau

SEQ ID NO: 520721 - RNA, 22 nt, Human
acagagucucaaaccuacaaag

SEQ ID NO: 520722 - RNA, 22 nt, Human
auaaaagaucccuucugagcuc

SEQ ID NO: 520723 - RNA, 22 nt, Human
gcagggaggaagagaugcuucc

SEQ ID NO: 520724 - RNA, 18 nt, Human
uggacaggguggagaaaa

SEQ ID NO: 520725 - RNA, 22 nt, Human
aggaggcugguucaggccauau

SEQ ID NO: 520726 - RNA, 22 nt, Human
uguguucaaugacuucaucuuu

SEQ ID NO: 520727 - RNA, 22 nt, Human
aaaaguaauugcaauuuuguag

SEQ ID NO: 520728 - RNA, 22 nt, Human
ugaugcuucacgcugaauaugc

SEQ ID NO: 520729 - RNA, 22 nt, Human
gggguggauuccuacaggucca

SEQ ID NO: 520730 - RNA, 22 nt, Human
uuucucucagccuguagaaacu

SEQ ID NO: 520731 - RNA, 22 nt, Human
uuaagacaguguauuuguuuuc

SEQ ID NO: 520732 - RNA, 22 nt, Human
uauugucuguccgggucaaagc

SEQ ID NO: 520733 - RNA, 22 nt, Human
acaugcauucucuaaaagcaaa

SEQ ID NO: 520734 - RNA, 22 nt, Human
uccagccaacugccuagggagc

SEQ ID NO: 520735 - RNA, 21 nt, Human
uuguucuuccagaagcaaagu

SEQ ID NO: 520736 - RNA, 17 nt, Human
uggucuggaagaacuga

SEQ ID NO: 520737 - RNA, 22 nt, Human
cagaggcugaugugggaugggc

SEQ ID NO: 520738 - RNA, 22 nt, Human
uccucuggggcgugguccugga

SEQ ID NO: 520739 - RNA, 22 nt, Human
uucacauaaugauacaaagcuu

SEQ ID NO: 520740 - RNA, 22 nt, Human
ggucaggguuccagguaucuuc

SEQ ID NO: 520741 - RNA, 22 nt, Human
uguuaacaucuuggacucguga

SEQ ID NO: 520742 - RNA, 20 nt, Human
uguacacaguacuuuacaau

SEQ ID NO: 520743 - RNA, 22 nt, Human
uguggccuggaaggggcugcuc

SEQ ID NO: 520744 - RNA, 22 nt, Human
gugcucuccuggcugcccugac

SEQ ID NO: 520745 - RNA, 22 nt, Human
agcagggacuacgugaaaguga

SEQ ID NO: 520746 - RNA, 22 nt, Human
uacaaaguuugggguccucaaa

SEQ ID NO: 520747 - RNA, 22 nt, Human
ccuguacaucugcucucauugc

SEQ ID NO: 520748 - RNA, 16 nt, Human
gcacacacaucaauga

SEQ ID NO: 520749 - RNA, 22 nt, Human
aucccccucuuggauggcggca

SEQ ID NO: 520750 - RNA, 22 nt, Human
aaugggaggauuuucucucuug

SEQ ID NO: 520751 - RNA, 22 nt, Human
gaaaugaacugauuaucauugc

SEQ ID NO: 520752 - RNA, 22 nt, Human
augaugguuguccuaggugcau

SEQ ID NO: 520753 - RNA, 22 nt, Human
ccuggggagccgccugagcccc

SEQ ID NO: 520754 - RNA, 22 nt, Human
caggugggcuugggagaacacu

SEQ ID NO: 520755 - RNA, 22 nt, Human
ccucaaaggccuggcaccagaa

SEQ ID NO: 520756 - RNA, 21 nt, Human
cccuucuugggucaaaguaua

SEQ ID NO: 520757 - RNA, 19 nt, Human
ccaggccuggcgucuccgc

SEQ ID NO: 520758 - RNA, 22 nt, Human
ccaggcuggagugcaauggugc

SEQ ID NO: 520759 - RNA, 22 nt, Human
caguccugagcuccugggcuga

SEQ ID NO: 520760 - RNA, 17 nt, Human
ugccagccugucccagg

SEQ ID NO: 520761 - RNA, 22 nt, Human
ccuuucucuaucgacccaucgc

SEQ ID NO: 520762 - RNA, 23 nt, Human
gagcucugcacuaggcccuggga

SEQ ID NO: 520763 - RNA, 22 nt, Human
cuccaguggugauggggaagaa

SEQ ID NO: 520764 - RNA, 22 nt, Human
gcaggguccauggaggcagccc

SEQ ID NO: 520765 - RNA, 22 nt, Human
auacauucaaaggaaggauaga

SEQ ID NO: 520766 - RNA, 22 nt, Human
cuguuuauacgacagguggagg

SEQ ID NO: 520767 - RNA, 22 nt, Human
uuuuuaagcuccuuugauguca

SEQ ID NO: 520768 - RNA, 22 nt, Human
uguaugcaaauuuauuagcaca

SEQ ID NO: 520769 - RNA, 22 nt, Human
uacauucugaaauaaaugguuu

SEQ ID NO: 520770 - RNA, 22 nt, Human
acacaguauuacaauaggugcu

SEQ ID NO: 520771 - RNA, 22 nt, Human
gaaaucugaacucuguauccuu

SEQ ID NO: 520772 - RNA, 22 nt, Human
acuuucuccagaaaaccaagga

SEQ ID NO: 520773 - RNA, 22 nt, Human
cauggccaggcccagggcccag

SEQ ID NO: 520774 - RNA, 22 nt, Human
ugcucuucggggccacugcuug

SEQ ID NO: 520775 - RNA, 22 nt, Human
gcagagccugggggucugcgga

SEQ ID NO: 520776 - RNA, 22 nt, Human
auaauaaaccaggaugggucug

SEQ ID NO: 520777 - RNA, 22 nt, Human
auggcugcaguccgugcccugg

SEQ ID NO: 520778 - RNA, 21 nt, Human
ucucugugucuuuaagcugga

SEQ ID NO: 520779 - RNA, 22 nt, Human
gcugggcuugguuucccugcuu

SEQ ID NO: 520780 - RNA, 22 nt, Human
cagccaagaaccacagacccag

SEQ ID NO: 520781 - RNA, 22 nt, Human
uuaauuaacuagccaaccacua

SEQ ID NO: 520782 - RNA, 22 nt, Human
ccucugggaagccaguccugcu

SEQ ID NO: 520783 - RNA, 22 nt, Human
gcugccugaucauacaccaggg

SEQ ID NO: 520784 - RNA, 22 nt, Human
gugggaugcaguggugaguggc

SEQ ID NO: 520785 - RNA, 22 nt, Human
gagcuuggcuggaccucacgga

SEQ ID NO: 520786 - RNA, 22 nt, Human
ucucuggguucucacucagcac

SEQ ID NO: 520787 - RNA, 22 nt, Human
cuggcugcuuguagacucgacu

SEQ ID NO: 520788 - RNA, 22 nt, Human
cuucagcaucuuuuucuugggg

SEQ ID NO: 520789 - RNA, 22 nt, Human
gggaggugauggcaagcagcgg

SEQ ID NO: 520790 - RNA, 22 nt, Human
ugcaggcucugguuuauagugc

SEQ ID NO: 520791 - RNA, 18 nt, Human
uggagcugagggcaaugc

SEQ ID NO: 520792 - RNA, 22 nt, Human
uggcucagucuggguugacuga

SEQ ID NO: 520793 - RNA, 22 nt, Human
uaguuaggaauagcagcgacuc

SEQ ID NO: 520794 - RNA, 22 nt, Human
aguguguguuugggcgguuuau

SEQ ID NO: 520795 - RNA, 22 nt, Human
auccaaagauggaaagaacuuu

SEQ ID NO: 520796 - RNA, 22 nt, Human
gccugggugucgaucacuagug

SEQ ID NO: 520797 - RNA, 21 nt, Human
augcauguuccauaaaguggg

SEQ ID NO: 520798 - RNA, 22 nt, Human
uggguccuugccaucuuggagu

SEQ ID NO: 520799 - RNA, 22 nt, Human
guccucuguuuccaucugacuu

SEQ ID NO: 520800 - RNA, 21 nt, Human
cagugcugccuaauagggagu

SEQ ID NO: 520801 - RNA, 22 nt, Human
cuggguccccucagugacacug

SEQ ID NO: 520802 - RNA, 22 nt, Human
ggcuuccuaauacucccuacac

SEQ ID NO: 520803 - RNA, 22 nt, Human
gacagacacagggccaugauug

SEQ ID NO: 520804 - RNA, 22 nt, Human
ggcugcugggucaugaugcaga

SEQ ID NO: 520805 - RNA, 22 nt, Human
uuaaauuagucaagcuucucug

SEQ ID NO: 520806 - RNA, 22 nt, Human
gcaggucccagaaaguuaauuc

SEQ ID NO: 520807 - RNA, 22 nt, Human
uagguucacuuagcugugggaa

SEQ ID NO: 520808 - RNA, 22 nt, Human
cagaguucaaagccugcuggga

SEQ ID NO: 520809 - RNA, 22 nt, Human
uucugggcucucuuucugugug

SEQ ID NO: 520810 - RNA, 22 nt, Human
auauuauucuagcucuugugug

SEQ ID NO: 520811 - RNA, 22 nt, Human
cagguggggcgcccucaggcag

SEQ ID NO: 520812 - RNA, 22 nt, Human
cuggcuccugaggcuuggcccc

SEQ ID NO: 520813 - RNA, 22 nt, Human
ccaggccagcaggcacaccugc

SEQ ID NO: 520814 - RNA, 22 nt, Human
cagggcagggauguugcggcag

SEQ ID NO: 520815 - RNA, 20 nt, Human
ugcugcugugagcgucccug

SEQ ID NO: 520816 - RNA, 22 nt, Human
uuuaacagaugugaaauuuuca

SEQ ID NO: 520817 - RNA, 22 nt, Human
ucugggcucacgagucuggaca

SEQ ID NO: 520818 - RNA, 22 nt, Human
ucucuuaaaggucuucagcuga

SEQ ID NO: 520819 - RNA, 22 nt, Human
gaaaugcauggaucuuggcaga

SEQ ID NO: 520820 - RNA, 22 nt, Human
auauaaagaaguggaaaaugag

SEQ ID NO: 520821 - RNA, 22 nt, Human
ggcucuggcaaggggaggcuac

SEQ ID NO: 520822 - RNA, 22 nt, Human
gcccugcuucuggcaugcagaa

SEQ ID NO: 520823 - RNA, 22 nt, Human
aaaaguguucaggaagaauaau

SEQ ID NO: 520824 - RNA, 22 nt, Human
acauagaguucaauuuucaguc

SEQ ID NO: 520825 - RNA, 22 nt, Human
gcugccugauguccagcaggac

SEQ ID NO: 520826 - RNA, 22 nt, Human
gaaggcagguuuuucaaaacug

SEQ ID NO: 520827 - RNA, 22 nt, Human
gagugcaguaugagaggcugcu

SEQ ID NO: 520828 - RNA, 22 nt, Human
cucuggcugccucucaggccug

SEQ ID NO: 520829 - RNA, 22 nt, Human
agagccuggacuuuucugagcc

SEQ ID NO: 520830 - RNA, 22 nt, Human
uucaggaagguccuauagcaga

SEQ ID NO: 520831 - RNA, 22 nt, Human
agccacagagguugaugugguu

SEQ ID NO: 520832 - RNA, 22 nt, Human
gagucuucuacgcucacacaaa

SEQ ID NO: 520833 - RNA, 18 nt, Human
acuccccacaggcucugu

SEQ ID NO: 520834 - RNA, 22 nt, Human
cauugcacuccaucuugggcaa

SEQ ID NO: 520835 - RNA, 22 nt, Human
gugagagggcugggcucaugau

SEQ ID NO: 520836 - RNA, 21 nt, Human
uuacaugguuuaucauaugga

SEQ ID NO: 520837 - RNA, 22 nt, Human
uguauagaguuggaagaugacu

SEQ ID NO: 520838 - RNA, 22 nt, Human
gugugaaaguaauugcgguuuu

SEQ ID NO: 520839 - RNA, 22 nt, Human
aaggcacucauucaaggagaua

SEQ ID NO: 520840 - RNA, 22 nt, Human
uauucaagauugaacuggcaga

SEQ ID NO: 520841 - RNA, 22 nt, Human
cagucccaucucccagguggcu

SEQ ID NO: 520842 - RNA, 17 nt, Human
guggcugcacacacaug

SEQ ID NO: 520843 - RNA, 22 nt, Human
ggguccagauggugagaguuaa

SEQ ID NO: 520844 - RNA, 22 nt, Human
gcaggugguccccguggagugg

SEQ ID NO: 520845 - RNA, 22 nt, Human
ccagagagauugcuucuaaaga

SEQ ID NO: 520846 - RNA, 22 nt, Human
agugugagaugauugaggagca

SEQ ID NO: 520847 - RNA, 17 nt, Human
uggaagcuucauguugg

SEQ ID NO: 520848 - RNA, 22 nt, Human
acugcagggcauccuggccaag

SEQ ID NO: 520849 - RNA, 22 nt, Human
gcccugucggaacugcgaccuc

SEQ ID NO: 520850 - RNA, 19 nt, Human
uuuauuugagacaugccuu

SEQ ID NO: 520851 - RNA, 22 nt, Human
cacugcucgcugcagcauggcc

SEQ ID NO: 520852 - RNA, 19 nt, Human
gaagaagcuugagaaguag

SEQ ID NO: 520853 - RNA, 22 nt, Human
gccagguggcugagugacugag

SEQ ID NO: 520854 - RNA, 22 nt, Human
ucagaagaagagacuccacagc

SEQ ID NO: 520855 - RNA, 22 nt, Human
uucuaguuuagggcucuucaac

SEQ ID NO: 520856 - RNA, 22 nt, Human
ugucccucauugacgcugugcc

SEQ ID NO: 520857 - RNA, 22 nt, Human
caggguccccgggucuccugug

SEQ ID NO: 520858 - RNA, 22 nt, Human
uaaagugucugccucagcucag

SEQ ID NO: 520859 - RNA, 22 nt, Human
ggauggcagucugcaugagaaa

SEQ ID NO: 520860 - RNA, 20 nt, Human
ucugucucugagcuagacuu

SEQ ID NO: 520861 - RNA, 22 nt, Human
cagcucaggcucuccaugcucc

SEQ ID NO: 520862 - RNA, 21 nt, Human
cucuggaggcaagggagagug

SEQ ID NO: 520863 - RNA, 22 nt, Human
uguaugaaaaggaauagauuga

SEQ ID NO: 520864 - RNA, 22 nt, Human
cugccuggcauggagaagagaa

SEQ ID NO: 520865 - RNA, 22 nt, Human
acauuucugcaucucagagcua

SEQ ID NO: 520866 - RNA, 22 nt, Human
cagcugagaagugauagcugca

SEQ ID NO: 520867 - RNA, 22 nt, Human
aguuuuuccugauuuuacagaa

SEQ ID NO: 520868 - RNA, 22 nt, Human
gccagagcugagugagguucuu

SEQ ID NO: 520869 - RNA, 18 nt, Human
cuuuaugugcagagcuuu

SEQ ID NO: 520870 - RNA, 21 nt, Human
gcugggucagcagguccucug

SEQ ID NO: 520871 - RNA, 22 nt, Human
ucaagagaagugcuccacagua

SEQ ID NO: 520872 - RNA, 22 nt, Human
agagcugagcaccaagcauggu

SEQ ID NO: 520873 - RNA, 22 nt, Human
gucccugcaucugcaggccaug

SEQ ID NO: 520874 - RNA, 22 nt, Human
auuagugauaugugacuagacc

SEQ ID NO: 520875 - RNA, 22 nt, Human
uaccuugggguuuuguugcucu

SEQ ID NO: 520876 - RNA, 22 nt, Human
gcuggggagcuagaccucagca

SEQ ID NO: 520877 - RNA, 22 nt, Human
uguggagaagaaggccacugca

SEQ ID NO: 520878 - RNA, 22 nt, Human
ucuggauggucagcucuuccug

SEQ ID NO: 520879 - RNA, 22 nt, Human
agggccugagcuggcugaccuc

SEQ ID NO: 520880 - RNA, 22 nt, Human
ucugugacuugcgggaggagaa

SEQ ID NO: 520881 - RNA, 23 nt, Human
uaacucugugaagggugacuggg

SEQ ID NO: 520882 - RNA, 22 nt, Human
aggccagcuuccagaggggcag

SEQ ID NO: 520883 - RNA, 22 nt, Human
agguccaguuuucaguucucau

SEQ ID NO: 520884 - RNA, 22 nt, Human
guggggcaguggccugggagca

SEQ ID NO: 520885 - RNA, 22 nt, Human
acccacaccuccguauaucacu

SEQ ID NO: 520886 - RNA, 22 nt, Human
cuugagcacagcggcuucagga

SEQ ID NO: 520887 - RNA, 23 nt, Human
gccucugcucugcguuggggacu

SEQ ID NO: 520888 - RNA, 23 nt, Human
uugggcuggcucucgaugccucu

SEQ ID NO: 520889 - RNA, 22 nt, Human
ugaccacagacccaaugacuac

SEQ ID NO: 520890 - RNA, 22 nt, Human
ggcccucugccugugcuggcga

SEQ ID NO: 520891 - RNA, 22 nt, Human
gugaaauuguauuuggcauuga

SEQ ID NO: 520892 - RNA, 22 nt, Human
gagaggcaggaauccuggguga

SEQ ID NO: 520893 - RNA, 22 nt, Human
gcagggcauagaggcacggagg

SEQ ID NO: 520894 - RNA, 22 nt, Human
uggcuccuggcagguguuucaa

SEQ ID NO: 520895 - RNA, 19 nt, Human
ucugaggguccagaugcau

SEQ ID NO: 520896 - RNA, 22 nt, Human
ggcacuggaaggaucaugugag

SEQ ID NO: 520897 - RNA, 22 nt, Human
gcuggucacucugggagcugcu

SEQ ID NO: 520898 - RNA, 22 nt, Human
aagccagggauuccugagggag

SEQ ID NO: 520899 - RNA, 22 nt, Human
auuagcuugguaugccauaaag

SEQ ID NO: 520900 - RNA, 22 nt, Human
gacuucuauuaauaccucuacu

SEQ ID NO: 520901 - RNA, 22 nt, Human
agaggccagcaaccacaguaaa

SEQ ID NO: 520902 - RNA, 20 nt, Human
aaaauauguauaacucuucu

SEQ ID NO: 520903 - RNA, 22 nt, Human
ucacaaagggagggauagcugg

SEQ ID NO: 520904 - RNA, 22 nt, Human
cgccuggaaccucuaggaccag

SEQ ID NO: 520905 - RNA, 22 nt, Human
agucugaaguagucuuuagugu

SEQ ID NO: 520906 - RNA, 22 nt, Human
cuggcucuuuccuagcuaggcu

SEQ ID NO: 520907 - RNA, 22 nt, Human
gcucccacaaccuucuugcucc

SEQ ID NO: 520908 - RNA, 22 nt, Human
gcggggggcagcagucgcucag

SEQ ID NO: 520909 - RNA, 22 nt, Human
uuccaagugucagaucagauuu

SEQ ID NO: 520910 - RNA, 22 nt, Human
agccuuaaaugcuagauucaua

SEQ ID NO: 520911 - RNA, 22 nt, Human
acucaguggcacuuuggaauuu

SEQ ID NO: 520912 - RNA, 22 nt, Human
aagccagggucaggggccuccu

SEQ ID NO: 520913 - RNA, 22 nt, Human
uuggccacacucacuagagccc

SEQ ID NO: 520914 - RNA, 22 nt, Human
agggucaggagacacuggcaac

SEQ ID NO: 520915 - RNA, 22 nt, Human
ucacuguaucauguugcacuua

SEQ ID NO: 520916 - RNA, 22 nt, Human
uauuuaguuaucuuucauaaaa

SEQ ID NO: 520917 - RNA, 22 nt, Human
cgccugggaguccacaccugcu

SEQ ID NO: 520918 - RNA, 22 nt, Human
aaggagcucccggcagaccagg

SEQ ID NO: 520919 - RNA, 22 nt, Human
gucaugccagcggagcucggga

SEQ ID NO: 520920 - RNA, 22 nt, Human
gcagagucagguccaaggacug

SEQ ID NO: 520921 - RNA, 22 nt, Human
cugagcugguucucuugugaaa

SEQ ID NO: 520922 - RNA, 22 nt, Human
caguggccugagccaggcuucc

SEQ ID NO: 520923 - RNA, 22 nt, Human
aggggcugacuggaaagugcca

SEQ ID NO: 520924 - RNA, 22 nt, Human
ggauuucuuccuuccucagaag

SEQ ID NO: 520925 - RNA, 22 nt, Human
gccaggcaaauuaaggaaugca

SEQ ID NO: 520926 - RNA, 22 nt, Human
cugggccacaagccugugugau

SEQ ID NO: 520927 - RNA, 22 nt, Human
ccuuagcaacacuuagcaacug

SEQ ID NO: 520928 - RNA, 22 nt, Human
ucuuuccuuagaauaauucuuu

SEQ ID NO: 520929 - RNA, 22 nt, Human
ggacaggaugcugaagaugaag

SEQ ID NO: 520930 - RNA, 22 nt, Human
cagucucucagcuuucagcugu

SEQ ID NO: 520931 - RNA, 22 nt, Human
cccaggcuaguaugauaucagu

SEQ ID NO: 520932 - RNA, 18 nt, Human
ucaaagucuggcuccacu

SEQ ID NO: 520933 - RNA, 22 nt, Human
guguacaggaugacuguacuua

SEQ ID NO: 520934 - RNA, 22 nt, Human
ugucacauaggcaaaauguuuu

SEQ ID NO: 520935 - RNA, 22 nt, Human
ccauuguaguaucuguuuuagu

SEQ ID NO: 520936 - RNA, 22 nt, Human
cgccccucagcgacccaccagc

SEQ ID NO: 520937 - RNA, 22 nt, Human
augaagauaagaccaggcugga

SEQ ID NO: 520938 - RNA, 22 nt, Human
uuccuggguuuacguauugggu

SEQ ID NO: 520939 - RNA, 22 nt, Human
ucaguguucuggauuuggggca

SEQ ID NO: 520940 - RNA, 22 nt, Human
aagcugcuggugacugggcuga

SEQ ID NO: 520941 - RNA, 22 nt, Human
uccaggcaugucugaguccuuc

SEQ ID NO: 520942 - RNA, 22 nt, Human
uuuuuccaccguacuuccugag

SEQ ID NO: 520943 - RNA, 22 nt, Human
cagcagguggacacacucaccu

SEQ ID NO: 520944 - RNA, 22 nt, Human
cuguggcaagucugccugucac

SEQ ID NO: 520945 - RNA, 22 nt, Human
cugcagugaaaucaggaagcaa

SEQ ID NO: 520946 - RNA, 22 nt, Human
auggaaaucgaugucuaaguua

SEQ ID NO: 520947 - RNA, 22 nt, Human
aagaaagccaaaguucauaccu

SEQ ID NO: 520948 - RNA, 22 nt, Human
cagccccuuccuggcaucugga

SEQ ID NO: 520949 - RNA, 22 nt, Human
aucuguuguuuguuugcuaaag

SEQ ID NO: 520950 - RNA, 22 nt, Human
gugcuggcaccccucuccaguu

SEQ ID NO: 520951 - RNA, 22 nt, Human
uagaaaugugauaauagcuuaa

SEQ ID NO: 520952 - RNA, 22 nt, Human
gcacaugagcugcugggauggg

SEQ ID NO: 520953 - RNA, 22 nt, Human
cuggcaggagcauucacagagg

SEQ ID NO: 520954 - RNA, 22 nt, Human
cagauucuucauucauucuaca

SEQ ID NO: 520955 - RNA, 19 nt, Human
cuucuggcccugagccacc

SEQ ID NO: 520956 - RNA, 18 nt, Human
ucagagagaauaguaauu

SEQ ID NO: 520957 - RNA, 22 nt, Human
aggaugaauaacugaaauggug

SEQ ID NO: 520958 - RNA, 22 nt, Human
gcccagcuuuuugaggcaggca

SEQ ID NO: 520959 - RNA, 22 nt, Human
cuggcucuaucuccaaggcugg

SEQ ID NO: 520960 - RNA, 22 nt, Human
gggcucagccccauugaaccag

SEQ ID NO: 520961 - RNA, 22 nt, Human
gaagcagcuggugagauggagc

SEQ ID NO: 520962 - RNA, 21 nt, Human
agugugugauaggcaggaaga

SEQ ID NO: 520963 - RNA, 22 nt, Human
cuggccuggggccucagcugcu

SEQ ID NO: 520964 - RNA, 22 nt, Human
ucacagaaguguguuucaggag

SEQ ID NO: 520965 - RNA, 22 nt, Human
uucucuuaucuggcauuauugg

SEQ ID NO: 520966 - RNA, 22 nt, Human
agcuccuugaagggcucuggga

SEQ ID NO: 520967 - RNA, 22 nt, Human
cuuuguaucuaaauaucuugaa

SEQ ID NO: 520968 - RNA, 22 nt, Human
uagcaaaggccuuggacacgcu

SEQ ID NO: 520969 - RNA, 21 nt, Human
ugcaagaaucaggaagcugcc

SEQ ID NO: 520970 - RNA, 22 nt, Human
ucugggugaugaaaugcacugu

SEQ ID NO: 520971 - RNA, 22 nt, Human
uggugcuguggaggggcagaag

SEQ ID NO: 520972 - RNA, 22 nt, Human
gggugggagucuggcccucaaa

SEQ ID NO: 520973 - RNA, 22 nt, Human
cugaggucaauuaaucaacaac

SEQ ID NO: 520974 - RNA, 22 nt, Human
ucugcaggcauuuuugguuguc

SEQ ID NO: 520975 - RNA, 22 nt, Human
ucauuuaugcaggaauggcaua

SEQ ID NO: 520976 - RNA, 17 nt, Human
uuauuuuuugggcugag

SEQ ID NO: 520977 - RNA, 22 nt, Human
cacacacaguuuuguauucugu

SEQ ID NO: 520978 - RNA, 22 nt, Human
guggccuuuccugaagaaauga

SEQ ID NO: 520979 - RNA, 19 nt, Human
cuggccuguguccugugcu

SEQ ID NO: 520980 - RNA, 22 nt, Human
uccaggcacuauauauacuuuu

SEQ ID NO: 520981 - RNA, 22 nt, Human
uaaauguguguagccaucugug

SEQ ID NO: 520982 - RNA, 22 nt, Human
uccagucaggcugaauucaagg

SEQ ID NO: 520983 - RNA, 21 nt, Human
ggcuuuaugcucacccagccu

SEQ ID NO: 520984 - RNA, 20 nt, Human
uccucagaagacauuugggg

SEQ ID NO: 520985 - RNA, 22 nt, Human
cugggaugauagugcuaguauu

SEQ ID NO: 520986 - RNA, 22 nt, Human
ucucagagauuuuguuucccuu

SEQ ID NO: 520987 - RNA, 22 nt, Human
ggcuggcuggcugguagacaag

SEQ ID NO: 520988 - RNA, 22 nt, Human
guggggggacguuggucacuuu

SEQ ID NO: 520989 - RNA, 22 nt, Human
cacccagcacagagggaggcga

SEQ ID NO: 520990 - RNA, 22 nt, Human
ugagcagaggagugacguaggu

SEQ ID NO: 520991 - RNA, 17 nt, Human
ugguggcuggagucagg

SEQ ID NO: 520992 - RNA, 22 nt, Human
agggcucugagugggaaagagg

SEQ ID NO: 520993 - RNA, 22 nt, Human
uuugaacaagagcuucacauua

SEQ ID NO: 520994 - RNA, 22 nt, Human
gcccauggacacccaagugcca

SEQ ID NO: 520995 - RNA, 21 nt, Human
ucagcaggcaccagaaggcug

SEQ ID NO: 520996 - RNA, 22 nt, Human
aguucagcuucccaggucacug

SEQ ID NO: 520997 - RNA, 22 nt, Human
aggggcugccuggcuuggcacu

SEQ ID NO: 520998 - RNA, 22 nt, Human
gcugggagcccuggucugcucc

SEQ ID NO: 520999 - RNA, 22 nt, Human
gaaggccucacucugcagcaua

SEQ ID NO: 521000 - RNA, 17 nt, Human
ccaggugggaggugggg

SEQ ID NO: 521001 - RNA, 22 nt, Human
caggcagggagccacuguauaa

SEQ ID NO: 521002 - RNA, 22 nt, Human
gagcagaugugugccaggaugc

SEQ ID NO: 521003 - RNA, 22 nt, Human
ugcucugguccucccucggcgc

SEQ ID NO: 521004 - RNA, 22 nt, Human
auuuucauggcuucugcucagu

SEQ ID NO: 521005 - RNA, 22 nt, Human
gaggaggucccccgacaugccu

SEQ ID NO: 521006 - RNA, 21 nt, Human
gccugggauaguggccuccgg

SEQ ID NO: 521007 - RNA, 22 nt, Human
uagacauuuggaguuuuaugac

SEQ ID NO: 521008 - RNA, 22 nt, Human
aaguucuacagcuucgcaggca

SEQ ID NO: 521009 - RNA, 22 nt, Human
ggccugcucugcagccucuaca

SEQ ID NO: 521010 - RNA, 22 nt, Human
uguccugggucaaccaggucga

SEQ ID NO: 521011 - RNA, 22 nt, Human
gagacaucauaaugaaguuucc

SEQ ID NO: 521012 - RNA, 22 nt, Human
aagggcucccugccugaggugg

SEQ ID NO: 521013 - RNA, 22 nt, Human
uaucuacaguuaauaugucauc

SEQ ID NO: 521014 - RNA, 20 nt, Human
ggagcuggcauccagccucu

SEQ ID NO: 521015 - RNA, 22 nt, Human
gccuucugauaucucuuggcau

SEQ ID NO: 521016 - RNA, 22 nt, Human
uugccacugaaccagucuugca

SEQ ID NO: 521017 - RNA, 22 nt, Human
guccucugaaguugugcaaugc

SEQ ID NO: 521018 - RNA, 22 nt, Human
cccagcauuucugggcugcacu

SEQ ID NO: 521019 - RNA, 22 nt, Human
uccuggcucggcuuggggacuu

SEQ ID NO: 521020 - RNA, 22 nt, Human
gaggcugcuuugaugacaggag

SEQ ID NO: 521021 - RNA, 22 nt, Human
gccccuucguggaagugcauuc

SEQ ID NO: 521022 - RNA, 22 nt, Human
ccacagaguccgcauuugaggc

SEQ ID NO: 521023 - RNA, 22 nt, Human
ccucagaugucuuaaggcacug

SEQ ID NO: 521024 - RNA, 23 nt, Human
ugaauuuggaacucagagaauua

SEQ ID NO: 521025 - RNA, 22 nt, Human
guccauuuuauucagagacuuu

SEQ ID NO: 521026 - RNA, 19 nt, Human
gccugccagauaguaauga

SEQ ID NO: 521027 - RNA, 22 nt, Human
gccacagucaggacggggagag

SEQ ID NO: 521028 - RNA, 22 nt, Human
cucugggcaggaccaguggacc

SEQ ID NO: 521029 - RNA, 22 nt, Human
cuguggcugucucuuucccaug

SEQ ID NO: 521030 - RNA, 22 nt, Human
augugcaggauccaggcuccua

SEQ ID NO: 521031 - RNA, 20 nt, Human
cagggccacgcuccaaggca

SEQ ID NO: 521032 - RNA, 22 nt, Human
cagagcugggaucccaugggcg

SEQ ID NO: 521033 - RNA, 22 nt, Human
acagauuuugguauuugcaaug

SEQ ID NO: 521034 - RNA, 22 nt, Human
cugugcaguaggucagggcugg

SEQ ID NO: 521035 - RNA, 22 nt, Human
gaggcugaguagcuuugugcuc

SEQ ID NO: 521036 - RNA, 22 nt, Human
aaagaacaauguggaaucuccu

SEQ ID NO: 521037 - RNA, 22 nt, Human
ggucccaggcucccucuugucc

SEQ ID NO: 521038 - RNA, 22 nt, Human
agagccacugggagacagagca

SEQ ID NO: 521039 - RNA, 21 nt, Human
agcuuguguguaucacagugu

SEQ ID NO: 521040 - RNA, 22 nt, Human
agcuggaacccgggugggcagc

SEQ ID NO: 521041 - RNA, 21 nt, Human
ucucuuugggaacauuaauca

SEQ ID NO: 521042 - RNA, 22 nt, Human
ugagcccagucugucugacaug

SEQ ID NO: 521043 - RNA, 22 nt, Human
gcccuuagguacuacuuauucu

SEQ ID NO: 521044 - RNA, 22 nt, Human
uccaugugccaaggggcagagg

SEQ ID NO: 521045 - RNA, 23 nt, Human
ugaaggcccuggagccacgaggc

SEQ ID NO: 521046 - RNA, 22 nt, Human
gcagugcaugucggaacucauu

SEQ ID NO: 521047 - RNA, 22 nt, Human
gcacacagauuaggaaacagaa

SEQ ID NO: 521048 - RNA, 22 nt, Human
cuguggcuuucucugccuccuu

SEQ ID NO: 521049 - RNA, 22 nt, Human
gcuuccucccugcugcucacua

SEQ ID NO: 521050 - RNA, 22 nt, Human
ggaaccaguggaaugauaugcu

SEQ ID NO: 521051 - RNA, 22 nt, Human
uacagagacuuuauggcacaaa

SEQ ID NO: 521052 - RNA, 22 nt, Human
gggcaggugauuuuggcuccau

SEQ ID NO: 521053 - RNA, 22 nt, Human
ucugccagaagccagggucugg

SEQ ID NO: 521054 - RNA, 22 nt, Human
ucuggcagggucagggcccagg

SEQ ID NO: 521055 - RNA, 22 nt, Human
uguacaguguagucaugagguu

SEQ ID NO: 521056 - RNA, 22 nt, Human
agagccuggagguucugcugaa

SEQ ID NO: 521057 - RNA, 22 nt, Human
cagaaaauagaguuucucugag

SEQ ID NO: 521058 - RNA, 22 nt, Human
gguccagggaacuuugaaggau

SEQ ID NO: 521059 - RNA, 22 nt, Human
uuuacaaccucauauucugaug

SEQ ID NO: 521060 - RNA, 22 nt, Human
aaaucugguucaguaaguccuc

SEQ ID NO: 521061 - RNA, 22 nt, Human
cagugcugggcagaggagagcg

SEQ ID NO: 521062 - RNA, 19 nt, Human
agguccugaucagcaagga

SEQ ID NO: 521063 - RNA, 22 nt, Human
ugcuucugacugggucaguuga

SEQ ID NO: 521064 - RNA, 22 nt, Human
gcucuggcuaguuaccucuuac

SEQ ID NO: 521065 - RNA, 18 nt, Human
uccugggaacuugcuagc

SEQ ID NO: 521066 - RNA, 22 nt, Human
ugucucugugagaucugacgau

SEQ ID NO: 521067 - RNA, 22 nt, Human
gcuggggagaauuggguuaucu

SEQ ID NO: 521068 - RNA, 22 nt, Human
agccaggccagcugucuugagu

SEQ ID NO: 521069 - RNA, 22 nt, Human
uggcaggagguuuucuccagga

SEQ ID NO: 521070 - RNA, 22 nt, Human
aggucuggugggcuuuagauug

SEQ ID NO: 521071 - RNA, 22 nt, Human
ggcuucugguaaagaccacacc

SEQ ID NO: 521072 - RNA, 22 nt, Human
aaaccuuugccuggaagggagu

SEQ ID NO: 521073 - RNA, 22 nt, Human
aaaguauuuuugacaggcauua

SEQ ID NO: 521074 - RNA, 22 nt, Human
gccaggcuguuuuuauuacugu

SEQ ID NO: 521075 - RNA, 22 nt, Human
aaagagcucacaguccacugga

SEQ ID NO: 521076 - RNA, 22 nt, Human
agggaugguggagguugcaagu

SEQ ID NO: 521077 - RNA, 22 nt, Human
cagcuuucaucagugacacuca

SEQ ID NO: 521078 - RNA, 22 nt, Human
cuuccucccccacacacucacu

SEQ ID NO: 521079 - RNA, 22 nt, Human
cagucucuaaaucaaucugaau

SEQ ID NO: 521080 - RNA, 22 nt, Human
aauagacuccagggucuauuuu

SEQ ID NO: 521081 - RNA, 22 nt, Human
auuucucagugaaaugacaggc

SEQ ID NO: 521082 - RNA, 22 nt, Human
acucaggaaaaauguagugaua

SEQ ID NO: 521083 - RNA, 23 nt, Human
agcagccagagauccucggcccu

SEQ ID NO: 521084 - RNA, 22 nt, Human
gcccuuccaacccagagggcaa

SEQ ID NO: 521085 - RNA, 22 nt, Human
acaaguucugggaauuaggaca

SEQ ID NO: 521086 - RNA, 20 nt, Human
ugcugaagaaucacagaugg

SEQ ID NO: 521087 - RNA, 22 nt, Human
ggccucaguuucuucaacugua

SEQ ID NO: 521088 - RNA, 22 nt, Human
uuuucauugagcaccugaguaa

SEQ ID NO: 521089 - RNA, 22 nt, Human
augacagacagaagggauuuuu

SEQ ID NO: 521090 - RNA, 22 nt, Human
uggggccugaaagguucucgcc

SEQ ID NO: 521091 - RNA, 22 nt, Human
uggagcagagaugguggccuuc

SEQ ID NO: 521092 - RNA, 22 nt, Human
gggcugaucgcuugagcucagg

SEQ ID NO: 521093 - RNA, 22 nt, Human
aggugcugggcagcagucauug

SEQ ID NO: 521094 - RNA, 22 nt, Human
uugcaccauuucacuuccauua

SEQ ID NO: 521095 - RNA, 22 nt, Human
gcagggcuaauggggcaaguag

SEQ ID NO: 521096 - RNA, 17 nt, Human
cuggagccaagagggcc

SEQ ID NO: 521097 - RNA, 20 nt, Human
uuuauagugaucaauuuaua

SEQ ID NO: 521098 - RNA, 22 nt, Human
ccccacaccugccgggcagcag

SEQ ID NO: 521099 - RNA, 22 nt, Human
agagugaaggccagguuacagu

SEQ ID NO: 521100 - RNA, 22 nt, Human
cuuccugguuugaagcucgccg

SEQ ID NO: 521101 - RNA, 22 nt, Human
ccaggucuucacuuuacugaag

SEQ ID NO: 521102 - RNA, 18 nt, Human
ucugggcuucccgaggcu

SEQ ID NO: 521103 - RNA, 22 nt, Human
ccacacuaaacugcucaaacca

SEQ ID NO: 521104 - RNA, 22 nt, Human
ccgggccucgggacaccgggua

SEQ ID NO: 521105 - RNA, 22 nt, Human
ggcuucuccccuuugagucuuc

SEQ ID NO: 521106 - RNA, 22 nt, Human
caugaccccccaaggccugcag

SEQ ID NO: 521107 - RNA, 22 nt, Human
acgugcaucuuuccauaugugg

SEQ ID NO: 521108 - RNA, 22 nt, Human
cuccagugcacccagaggauuu

SEQ ID NO: 521109 - RNA, 22 nt, Human
auguguaugagugugcuucuuu

SEQ ID NO: 521110 - RNA, 22 nt, Human
gggcuucucuuaugcuaacugg

SEQ ID NO: 521111 - RNA, 22 nt, Human
cuuagggaaucuuagagcugga

SEQ ID NO: 521112 - RNA, 22 nt, Human
gcagaagucagaccaucugaau

SEQ ID NO: 521113 - RNA, 22 nt, Human
ucaauucaauugaacaguuacu

SEQ ID NO: 521114 - RNA, 23 nt, Human
ugccaggguuuguuugugguuca

SEQ ID NO: 521115 - RNA, 22 nt, Human
cuguuaaucugcuugcaugaug

SEQ ID NO: 521116 - RNA, 22 nt, Human
cagcccuggcuagggcgagggc

SEQ ID NO: 521117 - RNA, 22 nt, Human
caggucugcagacagggccaug

SEQ ID NO: 521118 - RNA, 21 nt, Human
ugggaccuagcuuugcacagg

SEQ ID NO: 521119 - RNA, 22 nt, Human
gcuggccugggcagccugucgg

SEQ ID NO: 521120 - RNA, 22 nt, Human
acaucacaguaguuaagccaga

SEQ ID NO: 521121 - RNA, 22 nt, Human
ugucucagaguaucccugaacu

SEQ ID NO: 521122 - RNA, 22 nt, Human
guguuuccucacuucucugacu

SEQ ID NO: 521123 - RNA, 22 nt, Human
acagcaggaagcuggagggaaa

SEQ ID NO: 521124 - RNA, 22 nt, Human
ccaaaugcuccacugacuuugg

SEQ ID NO: 521125 - RNA, 22 nt, Human
aguuucucuuaaucuaguaucu

SEQ ID NO: 521126 - RNA, 22 nt, Human
cucaggaaaauauugaagaagu

SEQ ID NO: 521127 - RNA, 22 nt, Human
ucucaccaaagccuugaccaua

SEQ ID NO: 521128 - RNA, 22 nt, Human
uuguggaaauacagacuccaag

SEQ ID NO: 521129 - RNA, 22 nt, Human
ucuaccacuuauuagcucugug

SEQ ID NO: 521130 - RNA, 22 nt, Human
ucucuggagggcuccaggcggg

SEQ ID NO: 521131 - RNA, 20 nt, Human
agacccucuggacugggccc

SEQ ID NO: 521132 - RNA, 22 nt, Human
agcugccacauggugucacugu

SEQ ID NO: 521133 - RNA, 22 nt, Human
uagcuuuaggcacguuugaauu

SEQ ID NO: 521134 - RNA, 20 nt, Human
agaagccaagugacauguuu

SEQ ID NO: 521135 - RNA, 22 nt, Human
cugugagggccagagucagggc

SEQ ID NO: 521136 - RNA, 22 nt, Human
uggggcuguggauucucacgaa

SEQ ID NO: 521137 - RNA, 22 nt, Human
uacagccacaggugacucucau

SEQ ID NO: 521138 - RNA, 22 nt, Human
gucuggagacuugggucaucaa

SEQ ID NO: 521139 - RNA, 22 nt, Human
uggcucaguuucugcccagcug

SEQ ID NO: 521140 - RNA, 20 nt, Human
uuuucugugccaagaaaacu

SEQ ID NO: 521141 - RNA, 22 nt, Human
gcugccaugguccaggcuccag

SEQ ID NO: 521142 - RNA, 22 nt, Human
ggcccaguguugccagaccuga

SEQ ID NO: 521143 - RNA, 22 nt, Human
cugcagagcauaaaucugaaua

SEQ ID NO: 521144 - RNA, 22 nt, Human
gcucuggcacuggcgcgggaug

SEQ ID NO: 521145 - RNA, 22 nt, Human
ggcugcugcccaccccugcaug

SEQ ID NO: 521146 - RNA, 22 nt, Human
aaacaguuucauuuucaugacc

SEQ ID NO: 521147 - RNA, 19 nt, Human
gccugggaugggcagaacu

SEQ ID NO: 521148 - RNA, 22 nt, Human
agacaucauguuacagauuaag

SEQ ID NO: 521149 - RNA, 20 nt, Human
cagcucugggcaggucgagg

SEQ ID NO: 521150 - RNA, 22 nt, Human
acccagagcacagaugcaacgu

SEQ ID NO: 521151 - RNA, 23 nt, Human
uugauuuagcugggauugcaugc

SEQ ID NO: 521152 - RNA, 22 nt, Human
uggcucagaagaaaagguaaac

SEQ ID NO: 521153 - RNA, 22 nt, Human
agcuuuauauaaaagaguacau

SEQ ID NO: 521154 - RNA, 23 nt, Human
cuggcucauccugguugcagugg

SEQ ID NO: 521155 - RNA, 22 nt, Human
uuuuuccuagugcuuucuggua

SEQ ID NO: 521156 - RNA, 22 nt, Human
aggucauuccuugucuucuugc

SEQ ID NO: 521157 - RNA, 22 nt, Human
gggaagaguaacuagcccaugu

SEQ ID NO: 521158 - RNA, 22 nt, Human
ccuuagcauuagaagcuguggg

SEQ ID NO: 521159 - RNA, 22 nt, Human
ggggccacuggcaggaccuugg

SEQ ID NO: 521160 - RNA, 22 nt, Human
cugcugggggacacagguccgg

SEQ ID NO: 521161 - RNA, 22 nt, Human
aagcuuuaaggaauuuuaugga

SEQ ID NO: 521162 - RNA, 22 nt, Human
augauuucuauauaaacuuaaa

SEQ ID NO: 521163 - RNA, 22 nt, Human
auauuaggugcucaauacaugc

SEQ ID NO: 521164 - RNA, 22 nt, Human
aaggccugcucagcugucugug

SEQ ID NO: 521165 - RNA, 22 nt, Human
ggggcagaaagcccacagagug

SEQ ID NO: 521166 - RNA, 22 nt, Human
uuauuccaauuucuccuacaaa

SEQ ID NO: 521167 - RNA, 22 nt, Human
uucacagacuuuccauagauug

SEQ ID NO: 521168 - RNA, 22 nt, Human
cccaaggccuucaagccagcuc

SEQ ID NO: 521169 - RNA, 22 nt, Human
agacacaguguugaaggcuagu

SEQ ID NO: 521170 - RNA, 22 nt, Human
agcuguccuggcucaggcugug

SEQ ID NO: 521171 - RNA, 22 nt, Human
guacaguuuucaguguucacug

SEQ ID NO: 521172 - RNA, 22 nt, Human
gcuggagguuucaccugaguuu

SEQ ID NO: 521173 - RNA, 22 nt, Human
ugcauuguaggauguuuagcag

SEQ ID NO: 521174 - RNA, 22 nt, Human
uuuuagaaguucacuuggguuu

SEQ ID NO: 521175 - RNA, 22 nt, Human
caggcuggacauuagauacaua

SEQ ID NO: 521176 - RNA, 22 nt, Human
uuuauugggccuggaggaucua

SEQ ID NO: 521177 - RNA, 22 nt, Human
uagagguagaguuacauuaguc

SEQ ID NO: 521178 - RNA, 22 nt, Human
ccacugaaggucaacauagagc

SEQ ID NO: 521179 - RNA, 22 nt, Human
aauguguagggugccuguuuuu

SEQ ID NO: 521180 - RNA, 22 nt, Human
auuauuuguguccacagaauac

SEQ ID NO: 521181 - RNA, 22 nt, Human
ucacagggcauuauggcuccag

SEQ ID NO: 521182 - RNA, 22 nt, Human
agagcugaauuuggguggugga

SEQ ID NO: 521183 - RNA, 22 nt, Human
augugguugaagaauuacaucu

SEQ ID NO: 521184 - RNA, 19 nt, Human
auacacauacguaaacuga

SEQ ID NO: 521185 - RNA, 22 nt, Human
cagccugacaccagcuuugggc

SEQ ID NO: 521186 - RNA, 22 nt, Human
cccagccucuggauucugcccu

SEQ ID NO: 521187 - RNA, 22 nt, Human
gggaacagggccugagcugggg

SEQ ID NO: 521188 - RNA, 16 nt, Human
gccuggaguggcaggg

SEQ ID NO: 521189 - RNA, 22 nt, Human
uucuggcuugaccccuacuucc

SEQ ID NO: 521190 - RNA, 22 nt, Human
cacaugugcaguuacaugaauu

SEQ ID NO: 521191 - RNA, 22 nt, Human
caagagagaugcagcucacuca

SEQ ID NO: 521192 - RNA, 20 nt, Human
cugggcucaagugauccucc

SEQ ID NO: 521193 - RNA, 22 nt, Human
cuuggccugacauguggcaggg

SEQ ID NO: 521194 - RNA, 18 nt, Human
gacccagcagaugggcuu

SEQ ID NO: 521195 - RNA, 22 nt, Human
cccugcugucaggugcugggag

SEQ ID NO: 521196 - RNA, 22 nt, Human
ucacucucuaagcaugacagac

SEQ ID NO: 521197 - RNA, 22 nt, Human
gcaaguacaaacgcaucggcug

SEQ ID NO: 521198 - RNA, 22 nt, Human
ggccagggggcuucagacucca

SEQ ID NO: 521199 - RNA, 22 nt, Human
agccaggauuggcugagccuua

SEQ ID NO: 521200 - RNA, 20 nt, Human
uaaauuagccuugaagauua

SEQ ID NO: 521201 - RNA, 22 nt, Human
ucccuagucgcaucuguggaga

SEQ ID NO: 521202 - RNA, 22 nt, Human
agcaccuggucuccuggcgcug

SEQ ID NO: 521203 - RNA, 22 nt, Human
agccacagucugaugccugaga

SEQ ID NO: 521204 - RNA, 21 nt, Human
ucagaguguguuacagcaagc

SEQ ID NO: 521205 - RNA, 22 nt, Human
uugugauaaaacauuagacauu

SEQ ID NO: 521206 - RNA, 22 nt, Human
caauucaaguugaguacagcuu

SEQ ID NO: 521207 - RNA, 21 nt, Human
uuuauuuauauaggacacaug

SEQ ID NO: 521208 - RNA, 22 nt, Human
auuuaauuuucucaacagugcu

SEQ ID NO: 521209 - RNA, 22 nt, Human
ugauuuccaguugcugggugcu

SEQ ID NO: 521210 - RNA, 22 nt, Human
aggcuucuacguggucccaggg

SEQ ID NO: 521211 - RNA, 22 nt, Human
aaugcugcaagaggugaaaaga

SEQ ID NO: 521212 - RNA, 22 nt, Human
aguacugucagcaggguguuga

SEQ ID NO: 521213 - RNA, 22 nt, Human
caggauccuggcugcauggacg

SEQ ID NO: 521214 - RNA, 22 nt, Human
agagcugaggauccagcugagc

SEQ ID NO: 521215 - RNA, 22 nt, Human
gacagacaggaggcauucaggg

SEQ ID NO: 521216 - RNA, 22 nt, Human
gcucuugucaaaaauuaguuga

SEQ ID NO: 521217 - RNA, 22 nt, Human
gaggacagcuuagggcuuccug

SEQ ID NO: 521218 - RNA, 20 nt, Human
cucuccucacccgugucagg

SEQ ID NO: 521219 - RNA, 22 nt, Human
agccuggagcuugaguuaugag

SEQ ID NO: 521220 - RNA, 22 nt, Human
uacaacaguucaugaaaugaaa

SEQ ID NO: 521221 - RNA, 22 nt, Human
caucacuguccaaaguucaguu

SEQ ID NO: 521222 - RNA, 22 nt, Human
gccagguucuggggagguacaa

SEQ ID NO: 521223 - RNA, 22 nt, Human
ucuucagagacucugagccccu

SEQ ID NO: 521224 - RNA, 22 nt, Human
ggugauuuucgaguuucauguu

SEQ ID NO: 521225 - RNA, 22 nt, Human
uggcugaggagagggcggaagu

SEQ ID NO: 521226 - RNA, 22 nt, Human
agcuggcuuugagcugggaggu

SEQ ID NO: 521227 - RNA, 22 nt, Human
agaagggaacucagagaugauu

SEQ ID NO: 521228 - RNA, 22 nt, Human
cuggaaggcucugcugccuguc

SEQ ID NO: 521229 - RNA, 22 nt, Human
uacagucaacauugaugaugau

SEQ ID NO: 521230 - RNA, 21 nt, Human
ggaaagaaggcaaggcucagg

SEQ ID NO: 521231 - RNA, 22 nt, Human
aggcuccuaucgcuuucagcaa

SEQ ID NO: 521232 - RNA, 22 nt, Human
aauuagaagggaguuauugaua

SEQ ID NO: 521233 - RNA, 22 nt, Human
ggcugcucuccaucccaggccu

SEQ ID NO: 521234 - RNA, 22 nt, Human
aagcaggauggaucuaguguuc

SEQ ID NO: 521235 - RNA, 22 nt, Human
cugcucugcagcuuggacuccc

SEQ ID NO: 521236 - RNA, 22 nt, Human
cagggcagagccaggauuucaa

SEQ ID NO: 521237 - RNA, 22 nt, Human
cuggccacugcgggccucugcc

SEQ ID NO: 521238 - RNA, 22 nt, Human
ccugggcuccacuccaagagca

SEQ ID NO: 521239 - RNA, 22 nt, Human
gccugagccgccugagcggcgg

SEQ ID NO: 521240 - RNA, 22 nt, Human
gagggcagagucuaaugaugca

SEQ ID NO: 521241 - RNA, 22 nt, Human
cugucaguaggcucccaucauu

SEQ ID NO: 521242 - RNA, 22 nt, Human
cagcugagcaucacuagucugg

SEQ ID NO: 521243 - RNA, 21 nt, Human
gggaaauuaggauugcucauc

SEQ ID NO: 521244 - RNA, 18 nt, Human
cucucuggucuggauccc

SEQ ID NO: 521245 - RNA, 22 nt, Human
ccugucaggguuugccucagaa

SEQ ID NO: 521246 - RNA, 22 nt, Human
gaagcccacguuuggugaugua

SEQ ID NO: 521247 - RNA, 22 nt, Human
agugaccaacaaugcugagaag

SEQ ID NO: 521248 - RNA, 22 nt, Human
agguuccagggauuaggaugug

SEQ ID NO: 521249 - RNA, 22 nt, Human
augggccaaguaaacauucuca

SEQ ID NO: 521250 - RNA, 22 nt, Human
ggagugacucacagcugggaca

SEQ ID NO: 521251 - RNA, 22 nt, Human
ccaggucuuuggccuuggcacu

SEQ ID NO: 521252 - RNA, 22 nt, Human
aaacuguaaagcaggugaguag

SEQ ID NO: 521253 - RNA, 22 nt, Human
ucccaggaucugagggcagaga

SEQ ID NO: 521254 - RNA, 22 nt, Human
ugauuuccccagucuugcugcu

SEQ ID NO: 521255 - RNA, 22 nt, Human
cugcugugcaggugccuaugau

SEQ ID NO: 521256 - RNA, 22 nt, Human
ccagcagagcauggggaggaag

SEQ ID NO: 521257 - RNA, 22 nt, Human
cauggccuugagugacugcacu

SEQ ID NO: 521258 - RNA, 22 nt, Human
ggcucugguggcaauugacugg

SEQ ID NO: 521259 - RNA, 22 nt, Human
auugcaccuuggguuuugaaag

SEQ ID NO: 521260 - RNA, 22 nt, Human
ucagcuggcaguucagaggcug

SEQ ID NO: 521261 - RNA, 22 nt, Human
gugucccagccccacaggccug

SEQ ID NO: 521262 - RNA, 22 nt, Human
ucuuagcauuucauaacaacug

SEQ ID NO: 521263 - RNA, 22 nt, Human
auuucacaucuaucucagauuu

SEQ ID NO: 521264 - RNA, 22 nt, Human
ucuucacaugaccuucaugucu

SEQ ID NO: 521265 - RNA, 22 nt, Human
ucaucuaagagucuuacauuua

SEQ ID NO: 521266 - RNA, 22 nt, Human
ccucagagaaagguauggcuga

SEQ ID NO: 521267 - RNA, 22 nt, Human
guuugcauaaaguggaugcagg

SEQ ID NO: 521268 - RNA, 22 nt, Human
ccugccugucuuuauccccugu

SEQ ID NO: 521269 - RNA, 22 nt, Human
gaggcugcggggaggagccugc

SEQ ID NO: 521270 - RNA, 22 nt, Human
cacugaagcuuucauucucuug

SEQ ID NO: 521271 - RNA, 22 nt, Human
uagaacacuugaccacugcucc

SEQ ID NO: 521272 - RNA, 22 nt, Human
aucuggagaugggucugucacc

SEQ ID NO: 521273 - RNA, 21 nt, Human
ccucugcucgggcaugcguuu

SEQ ID NO: 521274 - RNA, 22 nt, Human
uguccugggaaaucccuuaggc

SEQ ID NO: 521275 - RNA, 22 nt, Human
aaggggaguuagugauaaaacc

SEQ ID NO: 521276 - RNA, 22 nt, Human
uauugaauuagacccuaaaaug

SEQ ID NO: 521277 - RNA, 22 nt, Human
agccuccaguagcugaagagac

SEQ ID NO: 521278 - RNA, 22 nt, Human
cagcuguucacauuuccaaaac

SEQ ID NO: 521279 - RNA, 22 nt, Human
aaaagacauaugugggcauucu

SEQ ID NO: 521280 - RNA, 22 nt, Human
uaggccauugauuuuuauaagu

SEQ ID NO: 521281 - RNA, 22 nt, Human
agugggagcggcagucggggac

SEQ ID NO: 521282 - RNA, 22 nt, Human
agcacagaaugagguggaagug

SEQ ID NO: 521283 - RNA, 22 nt, Human
agucccagagaggucggggcca

SEQ ID NO: 521284 - RNA, 22 nt, Human
aggccuggguguucaccagaag

SEQ ID NO: 521285 - RNA, 22 nt, Human
uucacauuacaaggccauauuu

SEQ ID NO: 521286 - RNA, 23 nt, Human
ccuccugggcacaggccugaugg

SEQ ID NO: 521287 - RNA, 22 nt, Human
cauuuacuguugaaucccuagc

SEQ ID NO: 521288 - RNA, 22 nt, Human
aggggugugcauccuggaggau

SEQ ID NO: 521289 - RNA, 22 nt, Human
cagcaugcaaguccagaugugg

SEQ ID NO: 521290 - RNA, 22 nt, Human
guggccaggacauugccaggca

SEQ ID NO: 521291 - RNA, 22 nt, Human
ccacugucugcaggccucagca

SEQ ID NO: 521292 - RNA, 22 nt, Human
aucuggcuuggguguggguagc

SEQ ID NO: 521293 - RNA, 22 nt, Human
uccucaguaaggcauggcuuug

SEQ ID NO: 521294 - RNA, 21 nt, Human
uagggcucucugugucaggug

SEQ ID NO: 521295 - RNA, 22 nt, Human
auaaauuaggaucugggguucc

SEQ ID NO: 521296 - RNA, 22 nt, Human
cagguucucagaaggcagucac

SEQ ID NO: 521297 - RNA, 22 nt, Human
ggagcagcuugcaugcucaggg

SEQ ID NO: 521298 - RNA, 22 nt, Human
agagccacaguggauaggagcc

SEQ ID NO: 521299 - RNA, 22 nt, Human
uacaguagaauuuuuaguaacu

SEQ ID NO: 521300 - RNA, 22 nt, Human
cccagcagaaucugaugagggc

SEQ ID NO: 521301 - RNA, 22 nt, Human
aggcccagggcugcucucugaa

SEQ ID NO: 521302 - RNA, 22 nt, Human
uuuuagauugggaaauguaaag

SEQ ID NO: 521303 - RNA, 22 nt, Human
ucucaucuauucacauuaacug

SEQ ID NO: 521304 - RNA, 20 nt, Human
acugccuugguucaguaggu

SEQ ID NO: 521305 - RNA, 22 nt, Human
gcugugcuggaaggggaccugc

SEQ ID NO: 521306 - RNA, 22 nt, Human
cuggggcugcgguggaggagcc

SEQ ID NO: 521307 - RNA, 22 nt, Human
agccugggcaacaacacagcga

SEQ ID NO: 521308 - RNA, 22 nt, Human
ugcuuuauaacuuaguuuaugg

SEQ ID NO: 521309 - RNA, 23 nt, Human
uggcuccaugaaaauuacgagga

SEQ ID NO: 521310 - RNA, 22 nt, Human
gcugcagcuguaggacacaauu

SEQ ID NO: 521311 - RNA, 22 nt, Human
accugccagaaugcuaguccug

SEQ ID NO: 521312 - RNA, 22 nt, Human
agucucaggcagaggaaggcua

SEQ ID NO: 521313 - RNA, 18 nt, Human
ugagaggcagguagagga

SEQ ID NO: 521314 - RNA, 22 nt, Human
aauucaaucuguagauugugau

SEQ ID NO: 521315 - RNA, 22 nt, Human
ccaggcucaggugcgagagaca

SEQ ID NO: 521316 - RNA, 22 nt, Human
gcuucucgggccugaugucguc

SEQ ID NO: 521317 - RNA, 22 nt, Human
agcaggcuccaggcuggccauc

SEQ ID NO: 521318 - RNA, 22 nt, Human
auuccaaaggcuggccuggagg

SEQ ID NO: 521319 - RNA, 22 nt, Human
acccucaacaaauucacucuau

SEQ ID NO: 521320 - RNA, 16 nt, Human
gcuuagugagagcaac

SEQ ID NO: 521321 - RNA, 22 nt, Human
gacccaggguauccagagcugc

SEQ ID NO: 521322 - RNA, 22 nt, Human
uggaacacaucuaaggaagcag

SEQ ID NO: 521323 - RNA, 22 nt, Human
gggccuccgugugcuggugcuc

SEQ ID NO: 521324 - RNA, 22 nt, Human
cagcccugagcaaggcuuuuaa

SEQ ID NO: 521325 - RNA, 22 nt, Human
uguggcuggucuccgagcgucg

SEQ ID NO: 521326 - RNA, 22 nt, Human
gccugccugcugucaucugccu

SEQ ID NO: 521327 - RNA, 22 nt, Human
uccugcaggccagaggggugag

SEQ ID NO: 521328 - RNA, 19 nt, Human
ucgagucaagacacuaggc

SEQ ID NO: 521329 - RNA, 22 nt, Human
ggguuggggcccagcagucugc

SEQ ID NO: 521330 - RNA, 22 nt, Human
acauugaugaaaagguaucauu

SEQ ID NO: 521331 - RNA, 22 nt, Human
acugucugugccagaugcuggg

SEQ ID NO: 521332 - RNA, 21 nt, Human
aaugugugcuauuuaucuuuu

SEQ ID NO: 521333 - RNA, 22 nt, Human
ucuggcugggaagggggcccga

SEQ ID NO: 521334 - RNA, 22 nt, Human
aaagcuucuaggccuauugcuu

SEQ ID NO: 521335 - RNA, 22 nt, Human
ugggccaccugcuuuuuugcau

SEQ ID NO: 521336 - RNA, 22 nt, Human
cagggcacggagaagucacccc

SEQ ID NO: 521337 - RNA, 22 nt, Human
uaucuagauauuuggauaaaug

SEQ ID NO: 521338 - RNA, 22 nt, Human
aguucuguggcugugcccugua

SEQ ID NO: 521339 - RNA, 22 nt, Human
cacagggccuggggcagcugcu

SEQ ID NO: 521340 - RNA, 22 nt, Human
cuggcucccaugagcucucacg

SEQ ID NO: 521341 - RNA, 22 nt, Human
aggggaggcagcgauaaaccug

SEQ ID NO: 521342 - RNA, 23 nt, Human
uuggaagggaagagcauuugaga

SEQ ID NO: 521343 - RNA, 19 nt, Human
gagcugccuuuugaagacc

SEQ ID NO: 521344 - RNA, 22 nt, Human
guggccugaugccagcccugug

SEQ ID NO: 521345 - RNA, 22 nt, Human
ucugggcuggcuuuaugcugac

SEQ ID NO: 521346 - RNA, 22 nt, Human
ggcagcuguuuguccuccuguu

SEQ ID NO: 521347 - RNA, 22 nt, Human
acauacacaugaauauauuuuu

SEQ ID NO: 521348 - RNA, 22 nt, Human
augggcugugagguccggcagg

SEQ ID NO: 521349 - RNA, 22 nt, Human
ugccagaagauucucuaucaga

SEQ ID NO: 521350 - RNA, 22 nt, Human
gaggagcacaugaggcugaggg

SEQ ID NO: 521351 - RNA, 22 nt, Human
ucugggcugcugugcagugacc

SEQ ID NO: 521352 - RNA, 22 nt, Human
guuccacaaaauguacccaguu

SEQ ID NO: 521353 - RNA, 22 nt, Human
cugcugaaguuguuggucuuuu

SEQ ID NO: 521354 - RNA, 22 nt, Human
acacuaguggaaauugauuugu

SEQ ID NO: 521355 - RNA, 22 nt, Human
cucagaguccccaguggguuug

SEQ ID NO: 521356 - RNA, 22 nt, Human
cuacagaaaaucagccacaggc

SEQ ID NO: 521357 - RNA, 22 nt, Human
ugcaggcuggcagauaucucau

SEQ ID NO: 521358 - RNA, 22 nt, Human
auggcagggcagccucucagag

SEQ ID NO: 521359 - RNA, 22 nt, Human
cagggaugcugcuuaggcaguu

SEQ ID NO: 521360 - RNA, 22 nt, Human
ccaggacaagccagagggacag

SEQ ID NO: 521361 - RNA, 22 nt, Human
uacauucugguggagaaaguaa

SEQ ID NO: 521362 - RNA, 22 nt, Human
agcaucuggugagggccuaguu

SEQ ID NO: 521363 - RNA, 22 nt, Human
augcaauaguaauucuagucug

SEQ ID NO: 521364 - RNA, 22 nt, Human
gagcucagagccuauaguuggu

SEQ ID NO: 521365 - RNA, 22 nt, Human
cagcugccuaugaccuagccuc

SEQ ID NO: 521366 - RNA, 22 nt, Human
gagugcagaugaacagaagauu

SEQ ID NO: 521367 - RNA, 22 nt, Human
uagaaguuaaaggaauacagaa

SEQ ID NO: 521368 - RNA, 22 nt, Human
ucucagaggucuucagccucug

SEQ ID NO: 521369 - RNA, 22 nt, Human
uguuccauaaguggugcuuugu

SEQ ID NO: 521370 - RNA, 22 nt, Human
ugguaucagagccaucuguauu

SEQ ID NO: 521371 - RNA, 22 nt, Human
auucugaguuagagucagccag

SEQ ID NO: 521372 - RNA, 22 nt, Human
uccugaggaaaguucaugaaug

SEQ ID NO: 521373 - RNA, 22 nt, Human
ccagaggaggggggucuuucug

SEQ ID NO: 521374 - RNA, 22 nt, Human
agccauuuuccugaaauauaac

SEQ ID NO: 521375 - RNA, 22 nt, Human
cugggccugggaggccaggucu

SEQ ID NO: 521376 - RNA, 22 nt, Human
uacagaaagggaugauugaucu

SEQ ID NO: 521377 - RNA, 22 nt, Human
acuuugcaaugggcagaaccca

SEQ ID NO: 521378 - RNA, 22 nt, Human
gcagggcugcugaaacuuguuu

SEQ ID NO: 521379 - RNA, 22 nt, Human
uaacagaagaugaaacuucuuu

SEQ ID NO: 521380 - RNA, 22 nt, Human
auauuuauaagcaagcaggacu

SEQ ID NO: 521381 - RNA, 18 nt, Human
ucuggcucaggacugaac

SEQ ID NO: 521382 - RNA, 22 nt, Human
ggcucuggugcccuggcuccca

SEQ ID NO: 521383 - RNA, 22 nt, Human
ccagagaauuuuagacaaaaau

SEQ ID NO: 521384 - RNA, 22 nt, Human
uucucaggccuuugggauggga

SEQ ID NO: 521385 - RNA, 22 nt, Human
cuggcuuccucaggagcagugg

SEQ ID NO: 521386 - RNA, 22 nt, Human
agaagaugucacugcagacagc

SEQ ID NO: 521387 - RNA, 22 nt, Human
ugcccagccuaaacuuggcaag

SEQ ID NO: 521388 - RNA, 22 nt, Human
cagccagcugaauguaccauga

SEQ ID NO: 521389 - RNA, 22 nt, Human
ccuggcucuucagagguuccua

SEQ ID NO: 521390 - RNA, 22 nt, Human
uuaagaagguacucaaagaucu

SEQ ID NO: 521391 - RNA, 20 nt, Human
uuacaaagaggcaucgcuuu

SEQ ID NO: 521392 - RNA, 22 nt, Human
uuucuccaauguaucagcacac

SEQ ID NO: 521393 - RNA, 22 nt, Human
aaggcucuuggagugaaugcag

SEQ ID NO: 521394 - RNA, 22 nt, Human
auggaaagcuaagccauuuacc

SEQ ID NO: 521395 - RNA, 22 nt, Human
uucaaaggcaggauagcagcug

SEQ ID NO: 521396 - RNA, 22 nt, Human
gagaggaguaggcugauggugc

SEQ ID NO: 521397 - RNA, 22 nt, Human
cugggcucuucucacccuguuu

SEQ ID NO: 521398 - RNA, 18 nt, Human
ugauggaggagggcuggu

SEQ ID NO: 521399 - RNA, 22 nt, Human
aagcacugggaggaggcugaga

SEQ ID NO: 521400 - RNA, 22 nt, Human
agugcauuugggguaguggaag

SEQ ID NO: 521401 - RNA, 22 nt, Human
aggaguggaauuacuggguucu

SEQ ID NO: 521402 - RNA, 22 nt, Human
uauuccaacuucacuauugucu

SEQ ID NO: 521403 - RNA, 22 nt, Human
gaaaggucaguuccacuuccau

SEQ ID NO: 521404 - RNA, 21 nt, Human
ugguggagugugcugagcaug

SEQ ID NO: 521405 - RNA, 22 nt, Human
gcugcuaagcguuucuguucca

SEQ ID NO: 521406 - RNA, 22 nt, Human
auacaagacucagcacagacgg

SEQ ID NO: 521407 - RNA, 19 nt, Human
gcaggucauuaggcuaggu

SEQ ID NO: 521408 - RNA, 22 nt, Human
cccuguuuuaaguugauauuga

SEQ ID NO: 521409 - RNA, 22 nt, Human
gcuggguccuaugcugguagag

SEQ ID NO: 521410 - RNA, 22 nt, Human
acccuuucuuacucacacgcuc

SEQ ID NO: 521411 - RNA, 22 nt, Human
auuaucuauguagaaugauuuu

SEQ ID NO: 521412 - RNA, 22 nt, Human
uagcuauuuggaaaauuccaau

SEQ ID NO: 521413 - RNA, 22 nt, Human
ggcagagacuggguuggcagag

SEQ ID NO: 521414 - RNA, 22 nt, Human
uugcugaaaagcuggccuuugu

SEQ ID NO: 521415 - RNA, 22 nt, Human
uggagggcuaagcugagggaua

SEQ ID NO: 521416 - RNA, 22 nt, Human
cuggacagaaagggcugcugug

SEQ ID NO: 521417 - RNA, 22 nt, Human
uaauuuugucacagugacaugc

SEQ ID NO: 521418 - RNA, 22 nt, Human
cauggccacaucuagcugcaag

SEQ ID NO: 521419 - RNA, 22 nt, Human
uauuuucauucugugugacugu

SEQ ID NO: 521420 - RNA, 22 nt, Human
aacauaauguggccaaagucac

SEQ ID NO: 521421 - RNA, 22 nt, Human
uauuaucauugguaauaugguc

SEQ ID NO: 521422 - RNA, 18 nt, Human
acucugggaccuguuauu

SEQ ID NO: 521423 - RNA, 21 nt, Human
gccaccccuggcacaggugcu

SEQ ID NO: 521424 - RNA, 22 nt, Human
auuucacucuuaauugcuuccu

SEQ ID NO: 521425 - RNA, 22 nt, Human
ggugggaggcaggcugcuccca

SEQ ID NO: 521426 - RNA, 22 nt, Human
agagcuuauaucuuggccaucc

SEQ ID NO: 521427 - RNA, 22 nt, Human
uaaagguaugucuuaaucaaac

SEQ ID NO: 521428 - RNA, 22 nt, Human
caggaugggauguagugggccc

SEQ ID NO: 521429 - RNA, 22 nt, Human
gagcugccuacauugccaagag

SEQ ID NO: 521430 - RNA, 22 nt, Human
ucaucacucauuggacaacaga

SEQ ID NO: 521431 - RNA, 22 nt, Human
cucaggaaccgcggcagcagcc

SEQ ID NO: 521432 - RNA, 22 nt, Human
ccugucugcagauaucucaggu

SEQ ID NO: 521433 - RNA, 22 nt, Human
aucucugguuguuuugcuccca

SEQ ID NO: 521434 - RNA, 22 nt, Human
ucccuggcugggggcugccuug

SEQ ID NO: 521435 - RNA, 22 nt, Human
cucucaguaaauuucugcccca

SEQ ID NO: 521436 - RNA, 22 nt, Human
aguauguagugcaaucagucag

SEQ ID NO: 521437 - RNA, 22 nt, Human
augauggugggagaugacccag

SEQ ID NO: 521438 - RNA, 22 nt, Human
aucuggaggccugucuuauccc

SEQ ID NO: 521439 - RNA, 22 nt, Human
ucagggcaccaaaaaagaugcc

SEQ ID NO: 521440 - RNA, 22 nt, Human
aagaaaggauauaugggaggua

SEQ ID NO: 521441 - RNA, 22 nt, Human
uuuugaaagaguccugcuacag

SEQ ID NO: 521442 - RNA, 22 nt, Human
gagggagagugauggaccauug

SEQ ID NO: 521443 - RNA, 22 nt, Human
cuuucccuuagccccauucuau

SEQ ID NO: 521444 - RNA, 22 nt, Human
gcaggcugagaguccaagaagg

SEQ ID NO: 521445 - RNA, 22 nt, Human
ucuggagggguuuagagggaca

SEQ ID NO: 521446 - RNA, 19 nt, Human
agcugcuggcccagggacc

SEQ ID NO: 521447 - RNA, 22 nt, Human
uugcuuuauucacaucuauauu

SEQ ID NO: 521448 - RNA, 22 nt, Human
ccagcuccagcauagccaccau

SEQ ID NO: 521449 - RNA, 22 nt, Human
gacauaaaauucaauaauuugu

SEQ ID NO: 521450 - RNA, 22 nt, Human
uggcugagagaagacggggaag

SEQ ID NO: 521451 - RNA, 23 nt, Human
aagauacagguguggaaugguuu

SEQ ID NO: 521452 - RNA, 22 nt, Human
gcagcaucaauccaugcuucuc

SEQ ID NO: 521453 - RNA, 22 nt, Human
cauaauauacuacauugaugaa

SEQ ID NO: 521454 - RNA, 22 nt, Human
aaggucauugguucugaauucu

SEQ ID NO: 521455 - RNA, 22 nt, Human
auuagcuuauuguaaggugaaa

SEQ ID NO: 521456 - RNA, 22 nt, Human
cccaggcauuuucaacuuuagu

SEQ ID NO: 521457 - RNA, 22 nt, Human
agagacuguacguggcaaguau

SEQ ID NO: 521458 - RNA, 22 nt, Human
cuugggcucagacuugaggaca

SEQ ID NO: 521459 - RNA, 20 nt, Human
ugcagggcugccucccagcu

SEQ ID NO: 521460 - RNA, 22 nt, Human
uugcauuuuuagaugcuucugu

SEQ ID NO: 521461 - RNA, 22 nt, Human
uucugggcacacaggcccuggu

SEQ ID NO: 521462 - RNA, 22 nt, Human
uuguaugaucccauuuagugaa

SEQ ID NO: 521463 - RNA, 22 nt, Human
gcugaggcuuagcuaaaaauuu

SEQ ID NO: 521464 - RNA, 22 nt, Human
gcucccaccuuugcuaucagua

SEQ ID NO: 521465 - RNA, 22 nt, Human
ggagacauauuccagagcuggg

SEQ ID NO: 521466 - RNA, 22 nt, Human
uuguuucagcuguaugcuaugu

SEQ ID NO: 521467 - RNA, 22 nt, Human
uuauuagguuauucucuguacu

SEQ ID NO: 521468 - RNA, 22 nt, Human
auaaggcagucccuuaacaagg

SEQ ID NO: 521469 - RNA, 22 nt, Human
ggcaaaaaccacaauuacuuuu

SEQ ID NO: 521470 - RNA, 22 nt, Human
uuauuuuuaaaaguucacacag

SEQ ID NO: 521471 - RNA, 23 nt, Human
uacauuguggauggaguccuggg

SEQ ID NO: 521472 - RNA, 22 nt, Human
gcaggcaguugcaguuuucuag

SEQ ID NO: 521473 - RNA, 22 nt, Human
gcugcagggagcuggaaggcuc

SEQ ID NO: 521474 - RNA, 20 nt, Human
ccaguccaccugagacaugu

SEQ ID NO: 521475 - RNA, 22 nt, Human
ucaguguagcagacuuguagcc

SEQ ID NO: 521476 - RNA, 22 nt, Human
ugccuggguguaaagggccaac

SEQ ID NO: 521477 - RNA, 22 nt, Human
gugggcuucuguuagggaggcu

SEQ ID NO: 521478 - RNA, 22 nt, Human
gagguucaguccugcucuguca

SEQ ID NO: 521479 - RNA, 23 nt, Human
ccgugaagacagacagacagcag

SEQ ID NO: 521480 - RNA, 22 nt, Human
ccagcuggggaaguggggcaua

SEQ ID NO: 521481 - RNA, 22 nt, Human
gcugucugucuucacaucucgc

SEQ ID NO: 521482 - RNA, 22 nt, Human
acaggcacugucaagucaugaa

SEQ ID NO: 521483 - RNA, 22 nt, Human
uuuggaaaguugucacuuuaga

SEQ ID NO: 521484 - RNA, 22 nt, Human
uuugugaaaugaagucacaacu

SEQ ID NO: 521485 - RNA, 22 nt, Human
ugggcaggauaauaucucaugu

SEQ ID NO: 521486 - RNA, 21 nt, Human
gcugcaucaaucuacccaggg

SEQ ID NO: 521487 - RNA, 22 nt, Human
acugggcuuaugcuguggagua

SEQ ID NO: 521488 - RNA, 22 nt, Human
uguggcaggaagagcuucugag

SEQ ID NO: 521489 - RNA, 23 nt, Human
gagguacagcaccagugaauagg

SEQ ID NO: 521490 - RNA, 22 nt, Human
uuuucuuacugucugugauccu

SEQ ID NO: 521491 - RNA, 22 nt, Human
uggggucuggaguugcccauga

SEQ ID NO: 521492 - RNA, 22 nt, Human
guacauuggcaacucucuuaga

SEQ ID NO: 521493 - RNA, 22 nt, Human
aaauuccagaaacucaguauau

SEQ ID NO: 521494 - RNA, 22 nt, Human
aaguuuguagcuggaugucugu

SEQ ID NO: 521495 - RNA, 22 nt, Human
gcagggaccuugcccacccucc

SEQ ID NO: 521496 - RNA, 22 nt, Human
agcaccugcuuaaugugcagug

SEQ ID NO: 521497 - RNA, 21 nt, Human
ugggagagggcucagcuaccc

SEQ ID NO: 521498 - RNA, 22 nt, Human
aguggggacaaugagagcaggu

SEQ ID NO: 521499 - RNA, 22 nt, Human
augggaguuuucucugaugcuc

SEQ ID NO: 521500 - RNA, 20 nt, Human
cuguggcucaugcaucugcc

SEQ ID NO: 521501 - RNA, 22 nt, Human
agcucagaagccuaugcauagu

SEQ ID NO: 521502 - RNA, 22 nt, Human
gagcagggagacaacucuggug

SEQ ID NO: 521503 - RNA, 22 nt, Human
cucugggcggcccaggccaacc

SEQ ID NO: 521504 - RNA, 22 nt, Human
gacuuucucuccucccaggugu

SEQ ID NO: 521505 - RNA, 21 nt, Human
ggccccagcccauggguucuc

SEQ ID NO: 521506 - RNA, 23 nt, Human
ugcugguguuuuugggaccaggg

SEQ ID NO: 521507 - RNA, 22 nt, Human
ccaaagugcugagauuacaggu

SEQ ID NO: 521508 - RNA, 22 nt, Human
uaaaugugggggccacgggcuu

SEQ ID NO: 521509 - RNA, 22 nt, Human
auauucacugagcauaaagcca

SEQ ID NO: 521510 - RNA, 22 nt, Human
ggcucugggaaauggucuuccu

SEQ ID NO: 521511 - RNA, 22 nt, Human
uggauauccuuguuaacuuucu

SEQ ID NO: 521512 - RNA, 22 nt, Human
aaaggugacacucugccagcug

SEQ ID NO: 521513 - RNA, 22 nt, Human
cagcaagauuuuuaaagcaagg

SEQ ID NO: 521514 - RNA, 22 nt, Human
cuccugagcucugaggaagcuu

SEQ ID NO: 521515 - RNA, 22 nt, Human
gcagaauuccuucuuccuuggg

SEQ ID NO: 521516 - RNA, 22 nt, Human
cccaguuucaacuuuccagugg

SEQ ID NO: 521517 - RNA, 21 nt, Human
cagugagguccccagccuagg

SEQ ID NO: 521518 - RNA, 22 nt, Human
agggcuuugauggcauucucau

SEQ ID NO: 521519 - RNA, 22 nt, Human
guuccauaucacagcagacgaa

SEQ ID NO: 521520 - RNA, 22 nt, Human
augcccuguggcaguacauauu

SEQ ID NO: 521521 - RNA, 22 nt, Human
caggucugaagagucacaugcc

SEQ ID NO: 521522 - RNA, 22 nt, Human
cuggcucauagagcagcuccaa

SEQ ID NO: 521523 - RNA, 22 nt, Human
cagggagcuuucccaggacccu

SEQ ID NO: 521524 - RNA, 23 nt, Human
ucagagaggcccccugcagagau

SEQ ID NO: 521525 - RNA, 22 nt, Human
auuuauuaugggauuuggcuca

SEQ ID NO: 521526 - RNA, 22 nt, Human
uguccugugccaccuuccugag

SEQ ID NO: 521527 - RNA, 23 nt, Human
agaggccaacuucuugccccucc

SEQ ID NO: 521528 - RNA, 22 nt, Human
gcaccugggacccagaggcacc

SEQ ID NO: 521529 - RNA, 22 nt, Human
ugcucuggcugggaugagugca

SEQ ID NO: 521530 - RNA, 22 nt, Human
uucauuuguugacagagacaug

SEQ ID NO: 521531 - RNA, 22 nt, Human
agcuucauggaaccugaggcua

SEQ ID NO: 521532 - RNA, 22 nt, Human
agucagugaaggcauugcucaa

SEQ ID NO: 521533 - RNA, 22 nt, Human
uccuccaggucuaggguggcuu

SEQ ID NO: 521534 - RNA, 22 nt, Human
uuguuuugcuaaagggucauca

SEQ ID NO: 521535 - RNA, 23 nt, Human
acaaugcacuuuaaaugguuccc

SEQ ID NO: 521536 - RNA, 22 nt, Human
gucuggcuagagacacccuccc

SEQ ID NO: 521537 - RNA, 22 nt, Human
uaugcacauuaucuaauccauu

SEQ ID NO: 521538 - RNA, 22 nt, Human
gguuucaaaguggacaguuagu

SEQ ID NO: 521539 - RNA, 22 nt, Human
gccuggagcccaguguggggcu

SEQ ID NO: 521540 - RNA, 22 nt, Human
agcccggcuuccccgguugcua

SEQ ID NO: 521541 - RNA, 22 nt, Human
gcggcccgagcaggacgggugg

SEQ ID NO: 521542 - RNA, 22 nt, Human
cugccccuggugauggacgcca

SEQ ID NO: 521543 - RNA, 22 nt, Human
gagaguucuaccucugaaggcg

SEQ ID NO: 521544 - RNA, 22 nt, Human
guggccucaugucuauaaagag

SEQ ID NO: 521545 - RNA, 22 nt, Human
gagaggcugaaaucacaggagc

SEQ ID NO: 521546 - RNA, 22 nt, Human
aguaaaauuucugcugaggaga

SEQ ID NO: 521547 - RNA, 22 nt, Human
agagucaccuuuuccucaggau

SEQ ID NO: 521548 - RNA, 22 nt, Human
ccagucccgcaugguccagaau

SEQ ID NO: 521549 - RNA, 22 nt, Human
aaauaagugugggccagucaaa

SEQ ID NO: 521550 - RNA, 22 nt, Human
cagaauaugacaagauuuuccu

SEQ ID NO: 521551 - RNA, 23 nt, Human
agagaaagggauaacacguugaa

SEQ ID NO: 521552 - RNA, 22 nt, Human
cagugaggcucugcugagcggu

SEQ ID NO: 521553 - RNA, 18 nt, Human
ugagagugugugcucuug

SEQ ID NO: 521554 - RNA, 22 nt, Human
agggcagagacaugcuuccuga

SEQ ID NO: 521555 - RNA, 22 nt, Human
auggaacaggcucagagaugcu

SEQ ID NO: 521556 - RNA, 22 nt, Human
ugucaccaguuccaggaaauaa

SEQ ID NO: 521557 - RNA, 22 nt, Human
aggaaauaggaccagacaaagc

SEQ ID NO: 521558 - RNA, 22 nt, Human
agcagcaaggaagcgaggaugg

SEQ ID NO: 521559 - RNA, 22 nt, Human
caggagcccguugcuccggcgg

SEQ ID NO: 521560 - RNA, 22 nt, Human
gcagcagagcuuuguccuggcu

SEQ ID NO: 521561 - RNA, 22 nt, Human
ucaggccuucagaccuggcccg

SEQ ID NO: 521562 - RNA, 22 nt, Human
cccagcagggucucugugucua

SEQ ID NO: 521563 - RNA, 22 nt, Human
agcaccuguggcucaugcucgu

SEQ ID NO: 521564 - RNA, 22 nt, Human
uccugggagcacaugguccugc

SEQ ID NO: 521565 - RNA, 22 nt, Human
ucucauucauacccuacaugcu

SEQ ID NO: 521566 - RNA, 22 nt, Human
aggccuguuccaggccccuuuu

SEQ ID NO: 521567 - RNA, 22 nt, Human
augagguaucucauuuccugaa

SEQ ID NO: 521568 - RNA, 22 nt, Human
cucuggacagcaggugcugugg

SEQ ID NO: 521569 - RNA, 21 nt, Human
agcagaacagucgagcacugc

SEQ ID NO: 521570 - RNA, 22 nt, Human
cagucuggaggucagcuggcuu

SEQ ID NO: 521571 - RNA, 22 nt, Human
cgaggcagggaagcugcaaaag

SEQ ID NO: 521572 - RNA, 22 nt, Human
agggcagccugagugcuggccc

SEQ ID NO: 521573 - RNA, 17 nt, Human
ggcuggagcagcucccc

SEQ ID NO: 521574 - RNA, 22 nt, Human
agcugccaccucugccuuuggg

SEQ ID NO: 521575 - RNA, 22 nt, Human
caaauucaaauuucaucagugu

SEQ ID NO: 521576 - RNA, 22 nt, Human
aggagucagauaugggaaaguu

SEQ ID NO: 521577 - RNA, 22 nt, Human
ucaaguguaguggugucagguc

SEQ ID NO: 521578 - RNA, 22 nt, Human
cuacaggucaagcaguagcucu

SEQ ID NO: 521579 - RNA, 22 nt, Human
uccuggggcucugagcgagaca

SEQ ID NO: 521580 - RNA, 22 nt, Human
ucaaaauuuuauuucucaagga

SEQ ID NO: 521581 - RNA, 22 nt, Human
cucuggaguuagugaucugggc

SEQ ID NO: 521582 - RNA, 21 nt, Human
ugccagggauuuacagagccu

SEQ ID NO: 521583 - RNA, 22 nt, Human
auacaaauuuauagaugcauuu

SEQ ID NO: 521584 - RNA, 22 nt, Human
aaacuguaaacacagcaguaca

SEQ ID NO: 521585 - RNA, 22 nt, Human
uucauaguguuuccuuccagug

SEQ ID NO: 521586 - RNA, 22 nt, Human
gccuguuuggaaucuguuuaau

SEQ ID NO: 521587 - RNA, 22 nt, Human
ggcuucagugagcugagcucac

SEQ ID NO: 521588 - RNA, 22 nt, Human
gggccuggggacaccaccauga

SEQ ID NO: 521589 - RNA, 22 nt, Human
gagggaagaaagaauugaugcg

SEQ ID NO: 521590 - RNA, 22 nt, Human
ucuggggguuaagugaggacaa

SEQ ID NO: 521591 - RNA, 22 nt, Human
ucuguucagcugccucagggua

SEQ ID NO: 521592 - RNA, 20 nt, Human
agugucuggugcagggccuc

SEQ ID NO: 521593 - RNA, 22 nt, Human
agaaauguaauugcaacugucu

SEQ ID NO: 521594 - RNA, 22 nt, Human
ugcuuuauaaccauuucugugg

SEQ ID NO: 521595 - RNA, 22 nt, Human
ugggccuccaauuccagcggga

SEQ ID NO: 521596 - RNA, 22 nt, Human
augccaggccccacgcugggca

SEQ ID NO: 521597 - RNA, 22 nt, Human
uuagaggggcugcugaauggga

SEQ ID NO: 521598 - RNA, 22 nt, Human
agaaugauagcuaguauuuacu

SEQ ID NO: 521599 - RNA, 22 nt, Human
acaggcugcugggcuccgugcu

SEQ ID NO: 521600 - RNA, 22 nt, Human
aagaaugauuacaaagcaacga

SEQ ID NO: 521601 - RNA, 23 nt, Human
gccugugccuaugcccagcucug

SEQ ID NO: 521602 - RNA, 22 nt, Human
gcaggcaguuugcuuuucccuc

SEQ ID NO: 521603 - RNA, 22 nt, Human
cagagccucccuccucugccau

SEQ ID NO: 521604 - RNA, 22 nt, Human
aggcuguguggaugagucuuac

SEQ ID NO: 521605 - RNA, 22 nt, Human
cugggccaucucucugcaagug

SEQ ID NO: 521606 - RNA, 22 nt, Human
aaggcuuuuguuccuauuuagu

SEQ ID NO: 521607 - RNA, 22 nt, Human
uacucaaacucacuaagacaga

SEQ ID NO: 521608 - RNA, 22 nt, Human
uuuccucuuugugacacagcug

SEQ ID NO: 521609 - RNA, 22 nt, Human
gaauaacauuggaacccugaag

SEQ ID NO: 521610 - RNA, 22 nt, Human
accuuaaaacugacacauggag

SEQ ID NO: 521611 - RNA, 23 nt, Human
ggugggagauuauccagaauuau

SEQ ID NO: 521612 - RNA, 22 nt, Human
cuggggaccagugucuguuugu

SEQ ID NO: 521613 - RNA, 22 nt, Human
cagcuggcgggcagagccgcca

SEQ ID NO: 521614 - RNA, 22 nt, Human
cuucagcagaugugcuagagau

SEQ ID NO: 521615 - RNA, 22 nt, Human
auucucugugucugcuuuccca

SEQ ID NO: 521616 - RNA, 22 nt, Human
agagccaggacugugucucacu

SEQ ID NO: 521617 - RNA, 22 nt, Human
ggagaggcuuccagagucgugc

SEQ ID NO: 521618 - RNA, 22 nt, Human
ccuguacacggucuaugccucc

SEQ ID NO: 521619 - RNA, 22 nt, Human
guccuggguccccgcaggucag

SEQ ID NO: 521620 - RNA, 22 nt, Human
caucacagaaauaaacauaccu

SEQ ID NO: 521621 - RNA, 22 nt, Human
aggagauuguacugucaucacu

SEQ ID NO: 521622 - RNA, 22 nt, Human
ggccuccucacccugcucaggc

SEQ ID NO: 521623 - RNA, 22 nt, Human
gcacauaacugaccacaucuaa

SEQ ID NO: 521624 - RNA, 22 nt, Human
gaccaccagagguccgugggua

SEQ ID NO: 521625 - RNA, 22 nt, Human
gguggccugaauuagcucaggg

SEQ ID NO: 521626 - RNA, 22 nt, Human
cucaaauguuuccacuucugcu

SEQ ID NO: 521627 - RNA, 22 nt, Human
cugguccucuccagcaggcauu

SEQ ID NO: 521628 - RNA, 22 nt, Human
aauguugaggauaucagaaaau

SEQ ID NO: 521629 - RNA, 22 nt, Human
agccaucauuucugucacuggc

SEQ ID NO: 521630 - RNA, 22 nt, Human
gucugcagagggaaggcuucag

SEQ ID NO: 521631 - RNA, 22 nt, Human
uggcuccucccugugugugcgu

SEQ ID NO: 521632 - RNA, 22 nt, Human
cagguccagaaaccaaaggauu

SEQ ID NO: 521633 - RNA, 22 nt, Human
cagcaauaaugucuacaaaucu

SEQ ID NO: 521634 - RNA, 22 nt, Human
gagguuagaggucagugcaguc

SEQ ID NO: 521635 - RNA, 22 nt, Human
uauguacaccaaggauugaaaa

SEQ ID NO: 521636 - RNA, 22 nt, Human
aaguuugagaagcuuauagaua

SEQ ID NO: 521637 - RNA, 22 nt, Human
cccucacuguccuugggcccuu

SEQ ID NO: 521638 - RNA, 22 nt, Human
uggauuucuccagcucuccauu

SEQ ID NO: 521639 - RNA, 22 nt, Human
gccuuggccaacaccuugcaaa

SEQ ID NO: 521640 - RNA, 22 nt, Human
agacacagaacacaaaagcaua

SEQ ID NO: 521641 - RNA, 22 nt, Human
cugcccuggguuuuaugggagu

SEQ ID NO: 521642 - RNA, 22 nt, Human
cucugggcaggacgccaggccu

SEQ ID NO: 521643 - RNA, 22 nt, Human
augggcagagcuggugggaggc

SEQ ID NO: 521644 - RNA, 22 nt, Human
aagagguugucugugaugaguu

SEQ ID NO: 521645 - RNA, 22 nt, Human
uccuggcuaguuuugcugaaau

SEQ ID NO: 521646 - RNA, 22 nt, Human
acaguaauauugaugcucguca

SEQ ID NO: 521647 - RNA, 22 nt, Human
aaacuguaggagggaaaggaag

SEQ ID NO: 521648 - RNA, 23 nt, Human
uuccugagugcuggagagagugc

SEQ ID NO: 521649 - RNA, 22 nt, Human
agcugggugcgguggcucaugc

SEQ ID NO: 521650 - RNA, 22 nt, Human
gggcuugcugauuugggcagga

SEQ ID NO: 521651 - RNA, 22 nt, Human
ugcugccagccaggccauggag

SEQ ID NO: 521652 - RNA, 22 nt, Human
guuagaauaaaaggucagagag

SEQ ID NO: 521653 - RNA, 22 nt, Human
ugccugucagggggagugggaa

SEQ ID NO: 521654 - RNA, 22 nt, Human
accuguuuaccugcaccuguuu

SEQ ID NO: 521655 - RNA, 22 nt, Human
cagagauuuuuaugcacaccaa

SEQ ID NO: 521656 - RNA, 22 nt, Human
uuucaaagguuuugucaugucu

SEQ ID NO: 521657 - RNA, 22 nt, Human
cuggagaggcugggaacagguu

SEQ ID NO: 521658 - RNA, 22 nt, Human
cugguccuugacgcgugggagg

SEQ ID NO: 521659 - RNA, 22 nt, Human
aucaauucuuaggaaaauagcu

SEQ ID NO: 521660 - RNA, 22 nt, Human
ggccuugguaaagggaugcaug

SEQ ID NO: 521661 - RNA, 22 nt, Human
cuggcucccgucugguggccau

SEQ ID NO: 521662 - RNA, 22 nt, Human
uuauuccauagaagucaaggaa

SEQ ID NO: 521663 - RNA, 18 nt, Human
aagaacugagguccuaga

SEQ ID NO: 521664 - RNA, 22 nt, Human
agcuccagaggcagugaugaag

SEQ ID NO: 521665 - RNA, 22 nt, Human
uccuggugaucaaaauucauuu

SEQ ID NO: 521666 - RNA, 20 nt, Human
aucccucuuccuagaguccc

SEQ ID NO: 521667 - RNA, 22 nt, Human
ugcagggcuacaggacuacaac

SEQ ID NO: 521668 - RNA, 21 nt, Human
ccuggacuaaaaccaggccac

SEQ ID NO: 521669 - RNA, 18 nt, Human
aagcugcccucaggcagg

SEQ ID NO: 521670 - RNA, 22 nt, Human
gugcccugggccuucagggcca

SEQ ID NO: 521671 - RNA, 22 nt, Human
gaagcacugcauuucaagauca

SEQ ID NO: 521672 - RNA, 22 nt, Human
uugggccacuuuaguuuccuua

SEQ ID NO: 521673 - RNA, 22 nt, Human
gcuguucaaaagccacaguuac

SEQ ID NO: 521674 - RNA, 22 nt, Human
gaauauuuuuaaagggacuaau

SEQ ID NO: 521675 - RNA, 22 nt, Human
uggagcccagggugagaaggag

SEQ ID NO: 521676 - RNA, 22 nt, Human
ucauccagccucaucaggagcu

SEQ ID NO: 521677 - RNA, 22 nt, Human
ggaacuccugcuccaagcagcu

SEQ ID NO: 521678 - RNA, 22 nt, Human
ggcaaacuacauuuuugaaaua

SEQ ID NO: 521679 - RNA, 22 nt, Human
uuuguuuucaaugugucauuca

SEQ ID NO: 521680 - RNA, 22 nt, Human
gcugcagcuuuaggauccagug

SEQ ID NO: 521681 - RNA, 22 nt, Human
gggggcuggacuuucccacaca

SEQ ID NO: 521682 - RNA, 22 nt, Human
cagggauggcugucaggaugua

SEQ ID NO: 521683 - RNA, 22 nt, Human
agaaaugccuacgagauaggga

SEQ ID NO: 521684 - RNA, 19 nt, Human
uugaggggccaggggagau

SEQ ID NO: 521685 - RNA, 22 nt, Human
ccaggcucugagaggaauguga

SEQ ID NO: 521686 - RNA, 22 nt, Human
uuagggacagcucuguagguga

SEQ ID NO: 521687 - RNA, 22 nt, Human
uggcucugccacuaacuuggua

SEQ ID NO: 521688 - RNA, 22 nt, Human
agguuccaggucuggguuaugu

SEQ ID NO: 521689 - RNA, 20 nt, Human
ugugugcacacaugacauuc

SEQ ID NO: 521690 - RNA, 17 nt, Human
acagggcagaaacagcu

SEQ ID NO: 521691 - RNA, 22 nt, Human
uucccacauucuuuacauucau

SEQ ID NO: 521692 - RNA, 22 nt, Human
aguucucuuuagcucauauggu

SEQ ID NO: 521693 - RNA, 22 nt, Human
gucucaguuguaucaccugguu

SEQ ID NO: 521694 - RNA, 23 nt, Human
gcagaggagcaagcuggacacca

SEQ ID NO: 521695 - RNA, 22 nt, Human
gagaaggaguagcugaccuggg

SEQ ID NO: 521696 - RNA, 22 nt, Human
uagaaaugcaguguacuguguc

SEQ ID NO: 521697 - RNA, 22 nt, Human
uucaagauccagcacaacagug

SEQ ID NO: 521698 - RNA, 22 nt, Human
cuugcaggcagggccuccugga

SEQ ID NO: 521699 - RNA, 22 nt, Human
uauguacuacacuagaacauuu

SEQ ID NO: 521700 - RNA, 22 nt, Human
gaggacaggagacucacuguuu

SEQ ID NO: 521701 - RNA, 22 nt, Human
aacugcauucagaaagcucacu

SEQ ID NO: 521702 - RNA, 22 nt, Human
ugcaggcuuuagccccauggcu

SEQ ID NO: 521703 - RNA, 22 nt, Human
acaaagucaaauugcagccgcc

SEQ ID NO: 521704 - RNA, 22 nt, Human
uaauaacaauuguaggacauga

SEQ ID NO: 521705 - RNA, 17 nt, Human
cccuggcucuaggugga

SEQ ID NO: 521706 - RNA, 22 nt, Human
uggguccacaaacaucagauau

SEQ ID NO: 521707 - RNA, 22 nt, Human
gccugggauagaggcaaugcau

SEQ ID NO: 521708 - RNA, 20 nt, Human
aggucugauuccagaaucag

SEQ ID NO: 521709 - RNA, 22 nt, Human
agauguaccagguauuacagga

SEQ ID NO: 521710 - RNA, 22 nt, Human
aaaucacuaaguuauagugugg

SEQ ID NO: 521711 - RNA, 21 nt, Human
cagaggggcuagccuggcugc

SEQ ID NO: 521712 - RNA, 22 nt, Human
cuuagcaugcaguguucugccc

SEQ ID NO: 521713 - RNA, 22 nt, Human
agccuggcuguaaccucauggu

SEQ ID NO: 521714 - RNA, 21 nt, Human
cucaggauggcggccuggugg

SEQ ID NO: 521715 - RNA, 21 nt, Human
cucacaggaugcaguguuacu

SEQ ID NO: 521716 - RNA, 22 nt, Human
uccuguaguugcuaaguuuguu

SEQ ID NO: 521717 - RNA, 22 nt, Human
cuggccagggugcgaucguggu

SEQ ID NO: 521718 - RNA, 22 nt, Human
ccagaggcuggguucaccucag

SEQ ID NO: 521719 - RNA, 22 nt, Human
uucaaugcauauagauauagaa

SEQ ID NO: 521720 - RNA, 22 nt, Human
guacauuucauuuaaaugaugu

SEQ ID NO: 521721 - RNA, 22 nt, Human
gucuuuauuugagauugucauu

SEQ ID NO: 521722 - RNA, 22 nt, Human
aggcagaggaaggguggauuug

SEQ ID NO: 521723 - RNA, 22 nt, Human
ugcuagaauaccuaccuggagg

SEQ ID NO: 521724 - RNA, 22 nt, Human
cagaagcauugacuccuugcuc

SEQ ID NO: 521725 - RNA, 22 nt, Human
acagcagguuacaguggcacag

SEQ ID NO: 521726 - RNA, 22 nt, Human
cagagccucaucauccacucca

SEQ ID NO: 521727 - RNA, 18 nt, Human
cauuguacaaugcuuuau

SEQ ID NO: 521728 - RNA, 22 nt, Human
uaaugagacucaauugugugug

SEQ ID NO: 521729 - RNA, 22 nt, Human
ccacagaggacaacugccuggc

SEQ ID NO: 521730 - RNA, 22 nt, Human
cuggugucugcucccucacagc

SEQ ID NO: 521731 - RNA, 22 nt, Human
ccccuucuguguccugucagcc

SEQ ID NO: 521732 - RNA, 22 nt, Human
ggagggcacaggaccagaaauc

SEQ ID NO: 521733 - RNA, 22 nt, Human
ugcucugcaagcaggagcaaga

SEQ ID NO: 521734 - RNA, 22 nt, Human
auuauuagacuuauaugguagu

SEQ ID NO: 521735 - RNA, 22 nt, Human
uugggccaaagauguccuuguu

SEQ ID NO: 521736 - RNA, 22 nt, Human
uggcugaacuaaugugcuguuu

SEQ ID NO: 521737 - RNA, 22 nt, Human
cagaagcuuugucuagucuuga

SEQ ID NO: 521738 - RNA, 22 nt, Human
gucucaguuugaagugaugcca

SEQ ID NO: 521739 - RNA, 22 nt, Human
cuggcucucugagauauugagu

SEQ ID NO: 521740 - RNA, 22 nt, Human
cacacaucaaccuagacauugu

SEQ ID NO: 521741 - RNA, 22 nt, Human
ugggcugaggggccuugaugac

SEQ ID NO: 521742 - RNA, 22 nt, Human
guucuaauauuuuaaaagccaa

SEQ ID NO: 521743 - RNA, 22 nt, Human
uagugaaacaguuaucaaucug

SEQ ID NO: 521744 - RNA, 22 nt, Human
uuuauuguguugaaacugaauu

SEQ ID NO: 521745 - RNA, 22 nt, Human
gcagggcagccacaggcccccu

SEQ ID NO: 521746 - RNA, 22 nt, Human
ucagcaguccuccaggaucaag

SEQ ID NO: 521747 - RNA, 22 nt, Human
ugaaucaauugucuuaagacau

SEQ ID NO: 521748 - RNA, 22 nt, Human
uggucaggggcuucugagcugu

SEQ ID NO: 521749 - RNA, 22 nt, Human
ucagugcauucuaccaaaaggc

SEQ ID NO: 521750 - RNA, 22 nt, Human
cagcuauuauuuucucuaaauu

SEQ ID NO: 521751 - RNA, 22 nt, Human
uguuccaucaguuuuugguuga

SEQ ID NO: 521752 - RNA, 22 nt, Human
gggaaacuggggacugaaucug

SEQ ID NO: 521753 - RNA, 23 nt, Human
agcuuccuagugaccuggagucu

SEQ ID NO: 521754 - RNA, 22 nt, Human
gcagggcucaacaggacacccc

SEQ ID NO: 521755 - RNA, 22 nt, Human
ugcucacagcccagaacauaau

SEQ ID NO: 521756 - RNA, 22 nt, Human
uaugagaauaaucugguaaaua

SEQ ID NO: 521757 - RNA, 22 nt, Human
aagcugccacacggugaguacu

SEQ ID NO: 521758 - RNA, 22 nt, Human
ugucagugaguuggguccugag

SEQ ID NO: 521759 - RNA, 22 nt, Human
cagagccacuuggagaugagaa

SEQ ID NO: 521760 - RNA, 22 nt, Human
uucuuauucuugaaauguggga

SEQ ID NO: 521761 - RNA, 22 nt, Human
ucaaagagcucuaucuucaaaa

SEQ ID NO: 521762 - RNA, 22 nt, Human
ucucccaggcugcccuguggac

SEQ ID NO: 521763 - RNA, 22 nt, Human
gauuagcucuagaucugggcua

SEQ ID NO: 521764 - RNA, 22 nt, Human
accugagggagauuaggccuga

SEQ ID NO: 521765 - RNA, 22 nt, Human
uugcagcuucuaccacuguuuc

SEQ ID NO: 521766 - RNA, 22 nt, Human
cgucuuccucuuacgaugcgcu

SEQ ID NO: 521767 - RNA, 22 nt, Human
ugucagaacucuauugaugucc

SEQ ID NO: 521768 - RNA, 22 nt, Human
aggugaaguugaggaggcagaa

SEQ ID NO: 521769 - RNA, 22 nt, Human
uaacuucuuugguuuaaagaga

SEQ ID NO: 521770 - RNA, 22 nt, Human
ugugaaagauacuaggcagagg

SEQ ID NO: 521771 - RNA, 22 nt, Human
ucagcucuguuuugaguggaac

SEQ ID NO: 521772 - RNA, 22 nt, Human
cuucaagauccauagauauugc

SEQ ID NO: 521773 - RNA, 22 nt, Human
acugugugaaacaucaaugugu

SEQ ID NO: 521774 - RNA, 22 nt, Human
gccuggccugaacuaggaggug

SEQ ID NO: 521775 - RNA, 22 nt, Human
agcuucucaggagucugaggca

SEQ ID NO: 521776 - RNA, 20 nt, Human
cccugagacaaaggaggggc

SEQ ID NO: 521777 - RNA, 22 nt, Human
ggagucugcucccagacaugau

SEQ ID NO: 521778 - RNA, 18 nt, Human
ggagggcuuuggggacug

SEQ ID NO: 521779 - RNA, 22 nt, Human
gagcuguggaaggcagggacca

SEQ ID NO: 521780 - RNA, 22 nt, Human
gcagaggccaucaacuuugcca

SEQ ID NO: 521781 - RNA, 22 nt, Human
agauacauauagaaaacaucaa

SEQ ID NO: 521782 - RNA, 22 nt, Human
uuucacauaugguuguugauug

SEQ ID NO: 521783 - RNA, 18 nt, Human
gaguguggcacugggccc

SEQ ID NO: 521784 - RNA, 22 nt, Human
gcggggcccccggccgagcucu

SEQ ID NO: 521785 - RNA, 22 nt, Human
acagcucuguguauugucaucu

SEQ ID NO: 521786 - RNA, 20 nt, Human
gggugagauguaggagaggg

SEQ ID NO: 521787 - RNA, 20 nt, Human
ccugggguacacuggcaugu

SEQ ID NO: 521788 - RNA, 19 nt, Human
gagcaggccacacaugugu

SEQ ID NO: 521789 - RNA, 22 nt, Human
uucugugugcuuacugguguuc

SEQ ID NO: 521790 - RNA, 22 nt, Human
ggagggggacugacacugauuu

SEQ ID NO: 521791 - RNA, 23 nt, Human
uggggccaagugaggaagggucu

SEQ ID NO: 521792 - RNA, 22 nt, Human
cuggcugccuauagucucccuu

SEQ ID NO: 521793 - RNA, 20 nt, Human
gagccuuccccucaccacug

SEQ ID NO: 521794 - RNA, 22 nt, Human
uaucuaaaggauuuaauuuagu

SEQ ID NO: 521795 - RNA, 22 nt, Human
cuacauuuggagaguauaggaa

SEQ ID NO: 521796 - RNA, 22 nt, Human
ccuccucugugcagcugugggu

SEQ ID NO: 521797 - RNA, 22 nt, Human
ggagcagagcugggcuuggcug

SEQ ID NO: 521798 - RNA, 21 nt, Human
cagcuccacuaaagcagcugu

SEQ ID NO: 521799 - RNA, 22 nt, Human
gagaaggaggcgaagcgugugc

SEQ ID NO: 521800 - RNA, 18 nt, Human
aaguaacagaagagcaca

SEQ ID NO: 521801 - RNA, 22 nt, Human
aggaagaggugugcaauggugu

SEQ ID NO: 521802 - RNA, 22 nt, Human
caguacuucuuggaaacuggau

SEQ ID NO: 521803 - RNA, 19 nt, Human
uugcugaaggaagccucug

SEQ ID NO: 521804 - RNA, 22 nt, Human
agcuuuuaguacguuaaaauug

SEQ ID NO: 521805 - RNA, 22 nt, Human
caggggcagucugugugcgugg

SEQ ID NO: 521806 - RNA, 22 nt, Human
ggcagcacugcagcuuguuggg

SEQ ID NO: 521807 - RNA, 22 nt, Human
guuucucacuuccaguagccaa

SEQ ID NO: 521808 - RNA, 22 nt, Human
ugggcagacgggagcuugccuu

SEQ ID NO: 521809 - RNA, 22 nt, Human
uuucacagguacaaacacuccu

SEQ ID NO: 521810 - RNA, 22 nt, Human
acugugugcuggacaugauguu

SEQ ID NO: 521811 - RNA, 21 nt, Human
gccugcaguuuugaagcccuu

SEQ ID NO: 521812 - RNA, 21 nt, Human
agcugagguaaggcaagagag

SEQ ID NO: 521813 - RNA, 22 nt, Human
gccacauuagcccucaccaucu

SEQ ID NO: 521814 - RNA, 22 nt, Human
aaguucaagagugacauauuag

SEQ ID NO: 521815 - RNA, 22 nt, Human
cuggcccucggaguccagcugc

SEQ ID NO: 521816 - RNA, 22 nt, Human
aguagaauaauuggauuacagu

SEQ ID NO: 521817 - RNA, 22 nt, Human
cugccugcuucugagccagagg

SEQ ID NO: 521818 - RNA, 22 nt, Human
cugucccucaucaccucugggu

SEQ ID NO: 521819 - RNA, 22 nt, Human
gugcaggguagcgacggcagga

SEQ ID NO: 521820 - RNA, 22 nt, Human
uccaggagugcugguuagagua

SEQ ID NO: 521821 - RNA, 22 nt, Human
aaacaaacaauuaguugugugg

SEQ ID NO: 521822 - RNA, 22 nt, Human
gcccagagagaugcuguagacc

SEQ ID NO: 521823 - RNA, 22 nt, Human
augaccccuaaaauuuacuguc

SEQ ID NO: 521824 - RNA, 22 nt, Human
uucucuggggacuugguuggag

SEQ ID NO: 521825 - RNA, 22 nt, Human
uugcuuauuugauuaaaugucu

SEQ ID NO: 521826 - RNA, 22 nt, Human
aacaaacaguuaaguguggaug

SEQ ID NO: 521827 - RNA, 20 nt, Human
uaacaguaagugauguuaca

SEQ ID NO: 521828 - RNA, 22 nt, Human
cuagcagcaucacaggaagacu

SEQ ID NO: 521829 - RNA, 23 nt, Human
gcugucaguuguuuuugucucua

SEQ ID NO: 521830 - RNA, 22 nt, Human
uggcacugaccccaggccugug

SEQ ID NO: 521831 - RNA, 22 nt, Human
ucuggcuccguguccgcuccca

SEQ ID NO: 521832 - RNA, 19 nt, Human
ugcucaggccaaggagccc

SEQ ID NO: 521833 - RNA, 22 nt, Human
aagcagugcgcucaucuaaggg

SEQ ID NO: 521834 - RNA, 21 nt, Human
uucugggccggagaaggggcg

SEQ ID NO: 521835 - RNA, 22 nt, Human
gaaugaauucagcacauggaau

SEQ ID NO: 521836 - RNA, 22 nt, Human
auaugaagaaucuaggauaggc

SEQ ID NO: 521837 - RNA, 22 nt, Human
ggagccuggccuggcucugugu

SEQ ID NO: 521838 - RNA, 22 nt, Human
guggggaggcauucuucucccu

SEQ ID NO: 521839 - RNA, 22 nt, Human
gugggagaagcccuguucguag

SEQ ID NO: 521840 - RNA, 22 nt, Human
gagcuggcaggaggcuccccga

SEQ ID NO: 521841 - RNA, 20 nt, Human
agcaggcugcagggugaaau

SEQ ID NO: 521842 - RNA, 22 nt, Human
ugauuucccuguagccucugaa

SEQ ID NO: 521843 - RNA, 22 nt, Human
guucagcaaguacucaguccac

SEQ ID NO: 521844 - RNA, 22 nt, Human
aggcacuggucuaccccuuagu

SEQ ID NO: 521845 - RNA, 21 nt, Human
uuugcauuuuacaugugggga

SEQ ID NO: 521846 - RNA, 22 nt, Human
aaagccagagcaagcugucaca

SEQ ID NO: 521847 - RNA, 22 nt, Human
cccaggagguggagguugcagu

SEQ ID NO: 521848 - RNA, 22 nt, Human
uccagagguauguagagaguau

SEQ ID NO: 521849 - RNA, 22 nt, Human
acagggccucagccagggcaga

SEQ ID NO: 521850 - RNA, 22 nt, Human
ucaggaagucucaauuagcuac

SEQ ID NO: 521851 - RNA, 23 nt, Human
cugucuccugggcuagguggaau

SEQ ID NO: 521852 - RNA, 22 nt, Human
gaaagaagcuuuagauggcuau

SEQ ID NO: 521853 - RNA, 22 nt, Human
ggcaguggcuccucucuacucc

SEQ ID NO: 521854 - RNA, 22 nt, Human
cugggcucaaauccuggcccug

SEQ ID NO: 521855 - RNA, 22 nt, Human
uauguuguggggugcaucaaaa

SEQ ID NO: 521856 - RNA, 22 nt, Human
cacacaggaugaagcagcagaa

SEQ ID NO: 521857 - RNA, 22 nt, Human
agaaauguacgauguuaugcag

SEQ ID NO: 521858 - RNA, 22 nt, Human
cugccgagugggucaugaggca

SEQ ID NO: 521859 - RNA, 22 nt, Human
aggucuaggagucugaaaguau

SEQ ID NO: 521860 - RNA, 22 nt, Human
aagacccacaaggcugaauguu

SEQ ID NO: 521861 - RNA, 22 nt, Human
gccccuggcuggccagcuccuc

SEQ ID NO: 521862 - RNA, 22 nt, Human
acagauauaugauuguguaaau

SEQ ID NO: 521863 - RNA, 22 nt, Human
ucucccacuggccuuguaugau

SEQ ID NO: 521864 - RNA, 19 nt, Human
uguguaaagucugugguca

SEQ ID NO: 521865 - RNA, 22 nt, Human
gauugaaucauaugaaauugug

SEQ ID NO: 521866 - RNA, 22 nt, Human
cugcuccacaccuccauuuccu

SEQ ID NO: 521867 - RNA, 22 nt, Human
ucuguacaacaaagggaugaga

SEQ ID NO: 521868 - RNA, 22 nt, Human
gcuggagcugaguucccugggc

SEQ ID NO: 521869 - RNA, 21 nt, Human
agaaaaacacgauauaagccc

SEQ ID NO: 521870 - RNA, 23 nt, Human
gcuguccuccugggcccagcagc

SEQ ID NO: 521871 - RNA, 20 nt, Human
acacaguagaugagugacug

SEQ ID NO: 521872 - RNA, 22 nt, Human
uguguccugcagacagacucag

SEQ ID NO: 521873 - RNA, 19 nt, Human
uccugggcugggccagguc

SEQ ID NO: 521874 - RNA, 23 nt, Human
ggcagcugggcagcacucauggg

SEQ ID NO: 521875 - RNA, 22 nt, Human
acaagcuccuuauucagcuggg

SEQ ID NO: 521876 - RNA, 17 nt, Human
uguggccuucugagcuu

SEQ ID NO: 521877 - RNA, 22 nt, Human
guccagggcuaaaucagguucc

SEQ ID NO: 521878 - RNA, 22 nt, Human
ucugucugcucauuuaccucag

SEQ ID NO: 521879 - RNA, 22 nt, Human
uggcucagugcauucacaguaa

SEQ ID NO: 521880 - RNA, 22 nt, Human
gcagcugggccccagccucucc

SEQ ID NO: 521881 - RNA, 22 nt, Human
ccucccuucaguagagcccaau

SEQ ID NO: 521882 - RNA, 22 nt, Human
acagaauucuaguauguggcuu

SEQ ID NO: 521883 - RNA, 22 nt, Human
gugccugguuuggggaauguuc

SEQ ID NO: 521884 - RNA, 19 nt, Human
uccaggcauccuucaggcu

SEQ ID NO: 521885 - RNA, 22 nt, Human
ccauuguaaauucuguggaagu

SEQ ID NO: 521886 - RNA, 22 nt, Human
uuuuuaagagauucuccagucu

SEQ ID NO: 521887 - RNA, 22 nt, Human
cuguaaaacugcuuaaguaugc

SEQ ID NO: 521888 - RNA, 22 nt, Human
ggucagguuuuuaggagugacc

SEQ ID NO: 521889 - RNA, 22 nt, Human
agcacaggaccaaggaagcugu

SEQ ID NO: 521890 - RNA, 22 nt, Human
aguuuuugagaauuuacuaugu

SEQ ID NO: 521891 - RNA, 22 nt, Human
agaaaucacaggaggcagaagg

SEQ ID NO: 521892 - RNA, 22 nt, Human
ugcuuccugaggccgucuucuc

SEQ ID NO: 521893 - RNA, 22 nt, Human
uuuaggagucaaauguuuuagg

SEQ ID NO: 521894 - RNA, 19 nt, Human
caguggccuggaggucucu

SEQ ID NO: 521895 - RNA, 22 nt, Human
ugcaguggugguaaagaugcuc

SEQ ID NO: 521896 - RNA, 22 nt, Human
aagugaauuucauuccaauucu

SEQ ID NO: 521897 - RNA, 22 nt, Human
uucagggacuuugauguaucag

SEQ ID NO: 521898 - RNA, 22 nt, Human
agccagcagggcuuagaggaca

SEQ ID NO: 521899 - RNA, 21 nt, Human
accuucugaauuaccuaccaa

SEQ ID NO: 521900 - RNA, 22 nt, Human
uucacaguuugcugggacagga

SEQ ID NO: 521901 - RNA, 22 nt, Human
gacagcuguggagaggcaugug

SEQ ID NO: 521902 - RNA, 22 nt, Human
agcuuuauagaaaggaucagug

SEQ ID NO: 521903 - RNA, 22 nt, Human
uagauguuuuaacucuugguua

SEQ ID NO: 521904 - RNA, 22 nt, Human
agagcuggagcagccccacugg

SEQ ID NO: 521905 - RNA, 22 nt, Human
auauuaggaguuaaauguauua

SEQ ID NO: 521906 - RNA, 22 nt, Human
agccacaggaaacagagacagc

SEQ ID NO: 521907 - RNA, 22 nt, Human
uucuaguucccacauaguugcc

SEQ ID NO: 521908 - RNA, 22 nt, Human
gagggcagugaauuuugaagcu

SEQ ID NO: 521909 - RNA, 22 nt, Human
aagcacugagcacaguggcuga

SEQ ID NO: 521910 - RNA, 22 nt, Human
uucaugugaucacagauuguaa

SEQ ID NO: 521911 - RNA, 22 nt, Human
cuguaugauuccauuucuauaa

SEQ ID NO: 521912 - RNA, 20 nt, Human
uacagucagggcacaggcag

SEQ ID NO: 521913 - RNA, 19 nt, Human
guggccugcgcugggugcg

SEQ ID NO: 521914 - RNA, 22 nt, Human
auucuguauuucuaauaagauc

SEQ ID NO: 521915 - RNA, 22 nt, Human
aauuucagaacccaaauuagcg

SEQ ID NO: 521916 - RNA, 22 nt, Human
cugugggcuccugcagcucagg

SEQ ID NO: 521917 - RNA, 22 nt, Human
agcagcugguaggaguggccac

SEQ ID NO: 521918 - RNA, 18 nt, Human
cccagcuccacuucccuc

SEQ ID NO: 521919 - RNA, 22 nt, Human
agccagaggccagccugccuca

SEQ ID NO: 521920 - RNA, 22 nt, Human
uuuaaauuauaguuaaugucug

SEQ ID NO: 521921 - RNA, 22 nt, Human
cacaucagggcugcuugggggu

SEQ ID NO: 521922 - RNA, 22 nt, Human
ugggggugaaagucuggacagu

SEQ ID NO: 521923 - RNA, 22 nt, Human
uaaguuacacuuaacuuacuag

SEQ ID NO: 521924 - RNA, 22 nt, Human
aggggcuggaguucgagguuac

SEQ ID NO: 521925 - RNA, 22 nt, Human
cugagccaugggucuaagcacu

SEQ ID NO: 521926 - RNA, 22 nt, Human
cccaagaucuuucgugcacuaa

SEQ ID NO: 521927 - RNA, 22 nt, Human
gaaggccacggaauggagcugg

SEQ ID NO: 521928 - RNA, 22 nt, Human
ccugccugcuuucugcuuugca

SEQ ID NO: 521929 - RNA, 22 nt, Human
acuuugcagggcuugauaucca

SEQ ID NO: 521930 - RNA, 21 nt, Human
ccuuuacaauuuugcauuccu

SEQ ID NO: 521931 - RNA, 22 nt, Human
gguuucaaugagaagugcuugu

SEQ ID NO: 521932 - RNA, 22 nt, Human
acaguguucucuuccuguauag

SEQ ID NO: 521933 - RNA, 22 nt, Human
ugaguucuuuccguuagguaug

SEQ ID NO: 521934 - RNA, 22 nt, Human
ugucuuuaaaauuaaacacauc

SEQ ID NO: 521935 - RNA, 21 nt, Human
agaauucuuaaguauucuaau

SEQ ID NO: 521936 - RNA, 22 nt, Human
uuagggaaggcugcugucagcu

SEQ ID NO: 521937 - RNA, 22 nt, Human
ucuggcccuauggcauguaccu

SEQ ID NO: 521938 - RNA, 22 nt, Human
ccuggccucuccgaguaaccug

SEQ ID NO: 521939 - RNA, 22 nt, Human
cuguccugggggugguccuugc

SEQ ID NO: 521940 - RNA, 19 nt, Human
ucugcagaaggcauacaug

SEQ ID NO: 521941 - RNA, 22 nt, Human
ugggcuggcugaacuucaaccu

SEQ ID NO: 521942 - RNA, 22 nt, Human
agcccaagcauaggagggaggc

SEQ ID NO: 521943 - RNA, 22 nt, Human
ucagaggagcaaaagaggggau

SEQ ID NO: 521944 - RNA, 23 nt, Human
caguggucagaacgugggagggu

SEQ ID NO: 521945 - RNA, 22 nt, Human
uuuuaucagcagggauaacaag

SEQ ID NO: 521946 - RNA, 22 nt, Human
agucccagccuguaggauuggg

SEQ ID NO: 521947 - RNA, 22 nt, Human
cugccaggccuccgcugucccc

SEQ ID NO: 521948 - RNA, 22 nt, Human
cucuggccccaguggccccuug

SEQ ID NO: 521949 - RNA, 22 nt, Human
gcccauccauggggucauggcc

SEQ ID NO: 521950 - RNA, 22 nt, Human
ggggcugauggaacucaggccu

SEQ ID NO: 521951 - RNA, 22 nt, Human
auacaaagcuuucugucuggua

SEQ ID NO: 521952 - RNA, 22 nt, Human
aguauuucugcucaugaaagag

SEQ ID NO: 521953 - RNA, 22 nt, Human
gguccuggaaguguaaguggca

SEQ ID NO: 521954 - RNA, 22 nt, Human
cucugcccucgcacaucugcca

SEQ ID NO: 521955 - RNA, 21 nt, Human
ugaaaguuggagucaaaugua

SEQ ID NO: 521956 - RNA, 19 nt, Human
agcuuccauauucucuagu

SEQ ID NO: 521957 - RNA, 22 nt, Human
aggccaggcaacauucugaagu

SEQ ID NO: 521958 - RNA, 22 nt, Human
cagccuccugggacacucaccg

SEQ ID NO: 521959 - RNA, 22 nt, Human
ugguuccacuaaccugagagcc

SEQ ID NO: 521960 - RNA, 22 nt, Human
guacuucccugggaggcaagca

SEQ ID NO: 521961 - RNA, 20 nt, Human
caccacagaauuggggacag

SEQ ID NO: 521962 - RNA, 22 nt, Human
ugcaaguaacuuguuugggagg

SEQ ID NO: 521963 - RNA, 22 nt, Human
cagcuucuuacgagcugguacu

SEQ ID NO: 521964 - RNA, 22 nt, Human
ggcuggcuggaugaauggauua

SEQ ID NO: 521965 - RNA, 20 nt, Human
uggguccugugggagaagaa

SEQ ID NO: 521966 - RNA, 22 nt, Human
ucagcagugcagggugaggcag

SEQ ID NO: 521967 - RNA, 21 nt, Human
agcuggaaucuggcugugcuu

SEQ ID NO: 521968 - RNA, 22 nt, Human
agguaucugguaagaggcagac

SEQ ID NO: 521969 - RNA, 22 nt, Human
aaagugcugggauuacaagcgu

SEQ ID NO: 521970 - RNA, 22 nt, Human
aaggcaguaggaucuuccacag

SEQ ID NO: 521971 - RNA, 22 nt, Human
aaugauuggcacuagauacaca

SEQ ID NO: 521972 - RNA, 22 nt, Human
ugcaggcuggcagugcugaaau

SEQ ID NO: 521973 - RNA, 22 nt, Human
agaccugcagggccaggccugc

SEQ ID NO: 521974 - RNA, 22 nt, Human
aagccagguguugugguaagag

SEQ ID NO: 521975 - RNA, 22 nt, Human
cagccucuaagcacagccucuc

SEQ ID NO: 521976 - RNA, 22 nt, Human
cugggcaguuuuacaucauugc

SEQ ID NO: 521977 - RNA, 22 nt, Human
ucagaagccggaagugcuccuc

SEQ ID NO: 521978 - RNA, 22 nt, Human
acugcaggagacacagcugcug

SEQ ID NO: 521979 - RNA, 22 nt, Human
gucccaggcuuauguggagcuu

SEQ ID NO: 521980 - RNA, 22 nt, Human
gaggcagcaucuauggugggaa

SEQ ID NO: 521981 - RNA, 22 nt, Human
uaugcaaaucauuagauuuccu

SEQ ID NO: 521982 - RNA, 22 nt, Human
uaagaaauuuaguuauagaaug

SEQ ID NO: 521983 - RNA, 22 nt, Human
ggguggcuccuaugggcauagc

SEQ ID NO: 521984 - RNA, 22 nt, Human
gugagcaggauaggggcucccu

SEQ ID NO: 521985 - RNA, 22 nt, Human
agcuggccuucggugucacugg

SEQ ID NO: 521986 - RNA, 22 nt, Human
aaggcugaggagggccugcagg

SEQ ID NO: 521987 - RNA, 22 nt, Human
aggcuggcgacaucuggcgggc

SEQ ID NO: 521988 - RNA, 22 nt, Human
auccuuggaugugucuuuuugu

SEQ ID NO: 521989 - RNA, 22 nt, Human
caucaaagcuuuuuucuguguu

SEQ ID NO: 521990 - RNA, 20 nt, Human
ugaaaaggucaggagacaug

SEQ ID NO: 521991 - RNA, 22 nt, Human
gcacugagcaccagccacagau

SEQ ID NO: 521992 - RNA, 22 nt, Human
cuccagggagcugcgggagcca

SEQ ID NO: 521993 - RNA, 22 nt, Human
agagcuggaaucagaccucagg

SEQ ID NO: 521994 - RNA, 19 nt, Human
cuugguuaugguaugaugc

SEQ ID NO: 521995 - RNA, 22 nt, Human
uuccagcccgcgacuuguucag

SEQ ID NO: 521996 - RNA, 22 nt, Human
aguuaaagucugaaauagagaa

SEQ ID NO: 521997 - RNA, 17 nt, Human
cauguguaugugggagu

SEQ ID NO: 521998 - RNA, 22 nt, Human
agccugcaggaugggcagcacc

SEQ ID NO: 521999 - RNA, 21 nt, Human
guggccugauuaugaaugggu

SEQ ID NO: 522000 - RNA, 22 nt, Human
agcccagccggauucccaguuc

SEQ ID NO: 522001 - RNA, 22 nt, Human
agagcugccgagcuggggccau

SEQ ID NO: 522002 - RNA, 22 nt, Human
ggcccuguccuggcugucuccg

SEQ ID NO: 522003 - RNA, 22 nt, Human
caguccugucuuuaugacuuca

SEQ ID NO: 522004 - RNA, 22 nt, Human
auauuaaugggauuuagucagg

SEQ ID NO: 522005 - RNA, 22 nt, Human
ucugaagcacagcaggaagggu

SEQ ID NO: 522006 - RNA, 18 nt, Human
uuccuucugauguauaug

SEQ ID NO: 522007 - RNA, 22 nt, Human
aguuuguaucaauuugcuuuau

SEQ ID NO: 522008 - RNA, 22 nt, Human
cuuagaaauuguuacucauuca

SEQ ID NO: 522009 - RNA, 21 nt, Human
ccagcuccaggaccuuggauc

SEQ ID NO: 522010 - RNA, 22 nt, Human
gcuggcaccugcaccaagcagg

SEQ ID NO: 522011 - RNA, 22 nt, Human
guuugaaugcaguaugcauuuu

SEQ ID NO: 522012 - RNA, 22 nt, Human
aguguucagugauugucaaccg

SEQ ID NO: 522013 - RNA, 22 nt, Human
cugcccugcuggagaucacagu

SEQ ID NO: 522014 - RNA, 22 nt, Human
aggcugggaaauguagucuucc

SEQ ID NO: 522015 - RNA, 22 nt, Human
ucagauggguuuugaaggaugu

SEQ ID NO: 522016 - RNA, 22 nt, Human
cuuguauuccccuaucucuaaa

SEQ ID NO: 522017 - RNA, 22 nt, Human
guauagaaggaucuggugaauu

SEQ ID NO: 522018 - RNA, 22 nt, Human
uagugauugcugauauuccauu

SEQ ID NO: 522019 - RNA, 22 nt, Human
ucagcucugccuguggaggcac

SEQ ID NO: 522020 - RNA, 22 nt, Human
ucucucagggggaaggcugaag

SEQ ID NO: 522021 - RNA, 22 nt, Human
gcaucaagacgaugugaaaucg

SEQ ID NO: 522022 - RNA, 23 nt, Human
gcagacagagcagacuaagacaa

SEQ ID NO: 522023 - RNA, 22 nt, Human
agggaugacucuuggcugauuc

SEQ ID NO: 522024 - RNA, 22 nt, Human
ucugccuuccccauaaucugau

SEQ ID NO: 522025 - RNA, 22 nt, Human
uguguccaucugacaggagagg

SEQ ID NO: 522026 - RNA, 22 nt, Human
cagcagcauugcucuggauucc

SEQ ID NO: 522027 - RNA, 22 nt, Human
ucuucagauugcacugagcaag

SEQ ID NO: 522028 - RNA, 22 nt, Human
gccuucaggaaaucaguccuug

SEQ ID NO: 522029 - RNA, 23 nt, Human
gccugccugaccugugcaaaguc

SEQ ID NO: 522030 - RNA, 22 nt, Human
ggcuuuauguuuuucauguggu

SEQ ID NO: 522031 - RNA, 22 nt, Human
aaugcuguauaucuuagcuaau

SEQ ID NO: 522032 - RNA, 22 nt, Human
accugccuucucaaggacauga

SEQ ID NO: 522033 - RNA, 22 nt, Human
gagacacaaacacauuuagagg

SEQ ID NO: 522034 - RNA, 22 nt, Human
cccucagcuucucccugcagcu

SEQ ID NO: 522035 - RNA, 22 nt, Human
ccagcagccaccuucucgaaau

SEQ ID NO: 522036 - RNA, 20 nt, Human
ggccugagcauggcuggcag

SEQ ID NO: 522037 - RNA, 22 nt, Human
ggcugccucugaugugcagacg

SEQ ID NO: 522038 - RNA, 22 nt, Human
gggagagagagcucauguugaa

SEQ ID NO: 522039 - RNA, 22 nt, Human
ugucacuuuggccaagccauug

SEQ ID NO: 522040 - RNA, 22 nt, Human
augcaaaugcuagagaauguug

SEQ ID NO: 522041 - RNA, 18 nt, Human
acaaaggaucaugaggga

SEQ ID NO: 522042 - RNA, 22 nt, Human
aguuuauguaaaauuaguaaug

SEQ ID NO: 522043 - RNA, 21 nt, Human
aaagaacaggcagauguucuu

SEQ ID NO: 522044 - RNA, 22 nt, Human
aucuggaggauucugggacuug

SEQ ID NO: 522045 - RNA, 22 nt, Human
agcagaugcgucugagugggag

SEQ ID NO: 522046 - RNA, 22 nt, Human
ucaggcugugggcacuggccau

SEQ ID NO: 522047 - RNA, 22 nt, Human
ccaguccuagaagaggagucga

SEQ ID NO: 522048 - RNA, 22 nt, Human
agguucagacgcauaauaggca

SEQ ID NO: 522049 - RNA, 22 nt, Human
gggaaggaaaguuauuagcaga

SEQ ID NO: 522050 - RNA, 22 nt, Human
uuuggaauguaguuuaaucauc

SEQ ID NO: 522051 - RNA, 22 nt, Human
acauguguacauauauaugugc

SEQ ID NO: 522052 - RNA, 22 nt, Human
caggucugagucacauguucau

SEQ ID NO: 522053 - RNA, 18 nt, Human
ugggcuugaaagcaaggu

SEQ ID NO: 522054 - RNA, 22 nt, Human
cuggaucuguccccuuuuuguu

SEQ ID NO: 522055 - RNA, 22 nt, Human
cagagcaccagugggagacaag

SEQ ID NO: 522056 - RNA, 18 nt, Human
cucaccauucugcccaau

SEQ ID NO: 522057 - RNA, 22 nt, Human
ugaaugauguauaauauugaga

SEQ ID NO: 522058 - RNA, 22 nt, Human
cugggcucccucaugugucugc

SEQ ID NO: 522059 - RNA, 22 nt, Human
gcaaauguuuuugaguguuuac

SEQ ID NO: 522060 - RNA, 22 nt, Human
acauacuaugaauacauguguc

SEQ ID NO: 522061 - RNA, 22 nt, Human
uacacaacugacaaccauucug

SEQ ID NO: 522062 - RNA, 22 nt, Human
ucugugugcccuaaagccugcu

SEQ ID NO: 522063 - RNA, 22 nt, Human
cagauuuaccuaacuccaaguu

SEQ ID NO: 522064 - RNA, 22 nt, Human
cugucuuugguccugucuguua

SEQ ID NO: 522065 - RNA, 23 nt, Human
ucugcagacgcuguucuauuguc

SEQ ID NO: 522066 - RNA, 22 nt, Human
cacaguguagacuaauaauaga

SEQ ID NO: 522067 - RNA, 22 nt, Human
ggggcagagagaaggaagcuug

SEQ ID NO: 522068 - RNA, 22 nt, Human
ugcaagcacucaaugcaaacag

SEQ ID NO: 522069 - RNA, 22 nt, Human
aaguuacuggcaagggcugcag

SEQ ID NO: 522070 - RNA, 22 nt, Human
gcuggccugggcucaagaccag

SEQ ID NO: 522071 - RNA, 22 nt, Human
cacugugggccugucgugggug

SEQ ID NO: 522072 - RNA, 20 nt, Human
gcuuucuaugagauggacug

SEQ ID NO: 522073 - RNA, 22 nt, Human
augugcacacagugucaugcaa

SEQ ID NO: 522074 - RNA, 22 nt, Human
acauuucuuccacaugcugcug

SEQ ID NO: 522075 - RNA, 22 nt, Human
agccacgucccugucaggguca

SEQ ID NO: 522076 - RNA, 21 nt, Human
agggaaagaaaaugagcuaau

SEQ ID NO: 522077 - RNA, 22 nt, Human
ccuggggaagucacuucucuuu

SEQ ID NO: 522078 - RNA, 22 nt, Human
ugugccagccucuggcuguguc

SEQ ID NO: 522079 - RNA, 19 nt, Human
uccuggggauguggucacc

SEQ ID NO: 522080 - RNA, 22 nt, Human
aggugcagcaugaguccaacgg

SEQ ID NO: 522081 - RNA, 22 nt, Human
ugucccagacauaaguggacau

SEQ ID NO: 522082 - RNA, 22 nt, Human
ggcaugggagugagcaaccuua

SEQ ID NO: 522083 - RNA, 22 nt, Human
aucaguuuuguucacuacuaua

SEQ ID NO: 522084 - RNA, 17 nt, Human
uccuguuuaucauugau

SEQ ID NO: 522085 - RNA, 22 nt, Human
auagcaaagaugucaauucccc

SEQ ID NO: 522086 - RNA, 20 nt, Human
ucugguccaggucuucaugg

SEQ ID NO: 522087 - RNA, 22 nt, Human
cuggguggcuguccagccagcc

SEQ ID NO: 522088 - RNA, 22 nt, Human
gcacauacccacugucaagcac

SEQ ID NO: 522089 - RNA, 22 nt, Human
gcucagagauggggaaugaaaa

SEQ ID NO: 522090 - RNA, 22 nt, Human
uuuccaggaaguaaggauaauc

SEQ ID NO: 522091 - RNA, 22 nt, Human
uaguacagaaaaccucaggguc

SEQ ID NO: 522092 - RNA, 22 nt, Human
ucaggccuuguccugaccuccu

SEQ ID NO: 522093 - RNA, 22 nt, Human
aauguacaauaagacaaagagg

SEQ ID NO: 522094 - RNA, 22 nt, Human
ccagaggugccacagaaagagc

SEQ ID NO: 522095 - RNA, 22 nt, Human
uccagcaugacuaguuccccau

SEQ ID NO: 522096 - RNA, 22 nt, Human
ucucuuaauuguaaugguuccu

SEQ ID NO: 522097 - RNA, 22 nt, Human
acacaguaggauaguuugagga

SEQ ID NO: 522098 - RNA, 22 nt, Human
cugagcugcucccgcugcagcg

SEQ ID NO: 522099 - RNA, 22 nt, Human
gcugccacuuggucaugucaug

SEQ ID NO: 522100 - RNA, 22 nt, Human
aucccuggacggcgccucccca

SEQ ID NO: 522101 - RNA, 22 nt, Human
agaaaugcaguuucaagacaaa

SEQ ID NO: 522102 - RNA, 22 nt, Human
ggagggacccacugcggugacc

SEQ ID NO: 522103 - RNA, 21 nt, Human
ggccugagcaccuguccaccu

SEQ ID NO: 522104 - RNA, 22 nt, Human
acauuucugucuuagggacugu

SEQ ID NO: 522105 - RNA, 22 nt, Human
uggaugugucgcccuggcucuc

SEQ ID NO: 522106 - RNA, 22 nt, Human
uugaaugaagucccuuuuuacu

SEQ ID NO: 522107 - RNA, 22 nt, Human
guauuugucuuguuggucucca

SEQ ID NO: 522108 - RNA, 22 nt, Human
uggcacugagcagccgcggcag

SEQ ID NO: 522109 - RNA, 22 nt, Human
aaggcugugucagaagcucccu

SEQ ID NO: 522110 - RNA, 22 nt, Human
gaaccucagugaaacuggaggu

SEQ ID NO: 522111 - RNA, 22 nt, Human
cuuggcagcuuuuggaggagcc

SEQ ID NO: 522112 - RNA, 19 nt, Human
aggcucugagcuccuggag

SEQ ID NO: 522113 - RNA, 22 nt, Human
uagcagcuggggcuauucauca

SEQ ID NO: 522114 - RNA, 22 nt, Human
aacaaauggggccuuguaugaa

SEQ ID NO: 522115 - RNA, 22 nt, Human
uggcucagcuuuccccaucugg

SEQ ID NO: 522116 - RNA, 22 nt, Human
gacccugauaggaguagaagaa

SEQ ID NO: 522117 - RNA, 22 nt, Human
aaggcaaaagaggugucaucac

SEQ ID NO: 522118 - RNA, 22 nt, Human
ugaaacaaaaguauguagcuug

SEQ ID NO: 522119 - RNA, 22 nt, Human
gccuuagcaucuuaaagcugug

SEQ ID NO: 522120 - RNA, 22 nt, Human
agagaagggguaaagaguccug

SEQ ID NO: 522121 - RNA, 22 nt, Human
cagcuggcuggucagugcacaa

SEQ ID NO: 522122 - RNA, 23 nt, Human
aggcuccacaugggcacuuugca

SEQ ID NO: 522123 - RNA, 22 nt, Human
agugcacaccuuaguacaaagu

SEQ ID NO: 522124 - RNA, 22 nt, Human
gccugggagaaugaccuccaac

SEQ ID NO: 522125 - RNA, 22 nt, Human
cucaguuucugacauuaaaauc

SEQ ID NO: 522126 - RNA, 22 nt, Human
gaggcaguccaguggguaagaa

SEQ ID NO: 522127 - RNA, 18 nt, Human
cguuuuuccgggauugca

SEQ ID NO: 522128 - RNA, 22 nt, Human
uuagaaacccagacucuuaggu

SEQ ID NO: 522129 - RNA, 22 nt, Human
ccugggcuucugucuagauguu

SEQ ID NO: 522130 - RNA, 20 nt, Human
uagugcaaaggcagccauag

SEQ ID NO: 522131 - RNA, 22 nt, Human
ugaaguuucuugaaucuuggag

SEQ ID NO: 522132 - RNA, 22 nt, Human
uccuggaguaggccuuagccau

SEQ ID NO: 522133 - RNA, 22 nt, Human
gcccacagcucguuccucuccu

SEQ ID NO: 522134 - RNA, 22 nt, Human
cugcuuuguggaaucacacugg

SEQ ID NO: 522135 - RNA, 19 nt, Human
ugcuauuugaagaagugua

SEQ ID NO: 522136 - RNA, 22 nt, Human
gcagcuuugucacggagugucg

SEQ ID NO: 522137 - RNA, 22 nt, Human
cuccaagucggcugcagcugga

SEQ ID NO: 522138 - RNA, 22 nt, Human
gacaagacaccucucuccaucc

SEQ ID NO: 522139 - RNA, 22 nt, Human
gcagcaggauggccaauugcca

SEQ ID NO: 522140 - RNA, 22 nt, Human
ucaguguuuccugugguacagc

SEQ ID NO: 522141 - RNA, 22 nt, Human
ugggcagaguugugaugaacug

SEQ ID NO: 522142 - RNA, 22 nt, Human
uacauuguucaugcaugagaaa

SEQ ID NO: 522143 - RNA, 20 nt, Human
ugggccuguggcagaagucu

SEQ ID NO: 522144 - RNA, 22 nt, Human
agguggagacccagagaaggcg

SEQ ID NO: 522145 - RNA, 22 nt, Human
uaagauguuuugguuugauaag

SEQ ID NO: 522146 - RNA, 22 nt, Human
ugcagcaggagccaggccuggu

SEQ ID NO: 522147 - RNA, 22 nt, Human
agugucuuugucucucaagcac

SEQ ID NO: 522148 - RNA, 22 nt, Human
cuggcccucgucaguuucacug

SEQ ID NO: 522149 - RNA, 22 nt, Human
augcaaaugcagccauugcaga

SEQ ID NO: 522150 - RNA, 22 nt, Human
gcagaggucuagcaccaagaau

SEQ ID NO: 522151 - RNA, 22 nt, Human
cuggcugugcugacugagaggg

SEQ ID NO: 522152 - RNA, 22 nt, Human
gcagugggagcuuaggcagugc

SEQ ID NO: 522153 - RNA, 23 nt, Human
cuguggcccugcuucaugcagcc

SEQ ID NO: 522154 - RNA, 22 nt, Human
gccuguuuaucuaucaugaacu

SEQ ID NO: 522155 - RNA, 22 nt, Human
cccagcccccgagugucuggaa

SEQ ID NO: 522156 - RNA, 22 nt, Human
uacaaaugaguuguaugaacca

SEQ ID NO: 522157 - RNA, 22 nt, Human
uagauuuguuuccuucucucca

SEQ ID NO: 522158 - RNA, 22 nt, Human
ccaggcuggauuuugcaguuca

SEQ ID NO: 522159 - RNA, 22 nt, Human
acagcauugcuccaucucaaga

SEQ ID NO: 522160 - RNA, 22 nt, Human
caauuagaggaggaagcucaua

SEQ ID NO: 522161 - RNA, 22 nt, Human
ucuuugaaaagggagauagaaa

SEQ ID NO: 522162 - RNA, 23 nt, Human
ugguggggucuuggagacagcac

SEQ ID NO: 522163 - RNA, 22 nt, Human
auucagaaauagaaaauuugau

SEQ ID NO: 522164 - RNA, 22 nt, Human
uccugggcuuaguggcuagguc

SEQ ID NO: 522165 - RNA, 22 nt, Human
agggauguaaauucuucuucuu

SEQ ID NO: 522166 - RNA, 22 nt, Human
auuggccauuugcauguauuau

SEQ ID NO: 522167 - RNA, 22 nt, Human
gcaggggcuacucugagcuucc

SEQ ID NO: 522168 - RNA, 22 nt, Human
aggcugguaguauuuagucaca

SEQ ID NO: 522169 - RNA, 22 nt, Human
agucccagaucuccauucgguc

SEQ ID NO: 522170 - RNA, 22 nt, Human
gugcuuucugcaugguuccuac

SEQ ID NO: 522171 - RNA, 22 nt, Human
uuuucuggucacauguuauuaa

SEQ ID NO: 522172 - RNA, 22 nt, Human
ucuggucccugcucacuucuug

SEQ ID NO: 522173 - RNA, 22 nt, Human
ggcuggucacaccacugcaggg

SEQ ID NO: 522174 - RNA, 22 nt, Human
gagagcaggcucucgggggcca

SEQ ID NO: 522175 - RNA, 22 nt, Human
aagaggggugugugucaaccca

SEQ ID NO: 522176 - RNA, 22 nt, Human
gcucugaggcugugaggugcug

SEQ ID NO: 522177 - RNA, 22 nt, Human
gagguccugucugagaauggag

SEQ ID NO: 522178 - RNA, 22 nt, Human
ccucugugucuugguuucaaga

SEQ ID NO: 522179 - RNA, 22 nt, Human
ccaaauauuaacaaaguaauuu

SEQ ID NO: 522180 - RNA, 22 nt, Human
augaaacugggauaacuauagc

SEQ ID NO: 522181 - RNA, 22 nt, Human
cuuggucauuucuuguccuguu

SEQ ID NO: 522182 - RNA, 22 nt, Human
uucacauuauaaucaguucugc

SEQ ID NO: 522183 - RNA, 22 nt, Human
gggugggagaaaugaguaucua

SEQ ID NO: 522184 - RNA, 18 nt, Human
ucugaaggaaugauucca

SEQ ID NO: 522185 - RNA, 22 nt, Human
uuuuagaaucagguugucuggg

SEQ ID NO: 522186 - RNA, 22 nt, Human
aaggcuuuuaacuacuguuuua

SEQ ID NO: 522187 - RNA, 22 nt, Human
agccuggauucgugcauccaca

SEQ ID NO: 522188 - RNA, 22 nt, Human
gagcucagcaaaggucugugug

SEQ ID NO: 522189 - RNA, 22 nt, Human
augaaacaaaccucuauggagu

SEQ ID NO: 522190 - RNA, 21 nt, Human
ucacagagccacagaauuggu

SEQ ID NO: 522191 - RNA, 22 nt, Human
cagagcaacacccuuuacaucg

SEQ ID NO: 522192 - RNA, 22 nt, Human
cuuucacaguccugacugagcg

SEQ ID NO: 522193 - RNA, 22 nt, Human
aauucacauauacauuauuccu

SEQ ID NO: 522194 - RNA, 22 nt, Human
uugauagguuuuauguauaguu

SEQ ID NO: 522195 - RNA, 22 nt, Human
aagaaaguggguaauaugauuu

SEQ ID NO: 522196 - RNA, 22 nt, Human
gcuggggaccagcugucucuga

SEQ ID NO: 522197 - RNA, 19 nt, Human
ggcugcugaagagaauuac

SEQ ID NO: 522198 - RNA, 22 nt, Human
uggccugaguugucugcaggcc

SEQ ID NO: 522199 - RNA, 19 nt, Human
ugaaacaaacuuaaaagga

SEQ ID NO: 522200 - RNA, 18 nt, Human
cagaggagagacauucag

SEQ ID NO: 522201 - RNA, 22 nt, Human
ggucaggguauaaucaagugag

SEQ ID NO: 522202 - RNA, 22 nt, Human
augagagguuucgucagaggaa

SEQ ID NO: 522203 - RNA, 22 nt, Human
cagagccauuauggagacuugc

SEQ ID NO: 522204 - RNA, 22 nt, Human
cugcccuggucccauggcugau

SEQ ID NO: 522205 - RNA, 22 nt, Human
gcaggguggauggcagggccag

SEQ ID NO: 522206 - RNA, 22 nt, Human
caaaguuuggcucucaugacau

SEQ ID NO: 522207 - RNA, 22 nt, Human
guggcagagguuccucagugug

SEQ ID NO: 522208 - RNA, 22 nt, Human
aaauaacuugguuucaucagag

SEQ ID NO: 522209 - RNA, 22 nt, Human
uaugagaagaacaggugacuuu

SEQ ID NO: 522210 - RNA, 22 nt, Human
aaggccagcuuguagggcuggu

SEQ ID NO: 522211 - RNA, 22 nt, Human
aggaauucaagaccagcugggc

SEQ ID NO: 522212 - RNA, 22 nt, Human
ccaggcucacugacuaccacau

SEQ ID NO: 522213 - RNA, 22 nt, Human
agcagccacacgccuccuucuc

SEQ ID NO: 522214 - RNA, 22 nt, Human
agagcuguucaacguagcaaug

SEQ ID NO: 522215 - RNA, 22 nt, Human
aaauagauugcugaggcauuac

SEQ ID NO: 522216 - RNA, 22 nt, Human
cuugaaagaagggucuuuuaau

SEQ ID NO: 522217 - RNA, 22 nt, Human
ugacaccacaacuagccauuga

SEQ ID NO: 522218 - RNA, 22 nt, Human
uuuuucaugagacuagaaguca

SEQ ID NO: 522219 - RNA, 19 nt, Human
gcuguauuaaagauacaug

SEQ ID NO: 522220 - RNA, 22 nt, Human
uggcuggcaaggcuggagucag

SEQ ID NO: 522221 - RNA, 22 nt, Human
acagucuugagcaucagccaga

SEQ ID NO: 522222 - RNA, 22 nt, Human
gacccugccaugagugacaggg

SEQ ID NO: 522223 - RNA, 22 nt, Human
uuuuucucuaaguagucccaaa

SEQ ID NO: 522224 - RNA, 22 nt, Human
gggagcuggagcuggaagacuc

SEQ ID NO: 522225 - RNA, 22 nt, Human
aaugaaagaaugaaacagccca

SEQ ID NO: 522226 - RNA, 22 nt, Human
uugauuuguaggaauggagacc

SEQ ID NO: 522227 - RNA, 22 nt, Human
uggucucugugcucgggcaugg

SEQ ID NO: 522228 - RNA, 22 nt, Human
uguccuagauccagcugugcug

SEQ ID NO: 522229 - RNA, 20 nt, Human
gucagugucuucaguaguga

SEQ ID NO: 522230 - RNA, 23 nt, Human
gcaggugguucgaacagaaguuu

SEQ ID NO: 522231 - RNA, 21 nt, Human
aagggagauaggaaucaggcc

SEQ ID NO: 522232 - RNA, 22 nt, Human
agcaggcuccuuccuucucugg

SEQ ID NO: 522233 - RNA, 22 nt, Human
auccaguuuaugucauauucuu

SEQ ID NO: 522234 - RNA, 22 nt, Human
ggaugggagcagaggacgacca

SEQ ID NO: 522235 - RNA, 22 nt, Human
ggcaggggugaggccacucuga

SEQ ID NO: 522236 - RNA, 22 nt, Human
cgcagaagagguugucuagucc

SEQ ID NO: 522237 - RNA, 22 nt, Human
gaagucuucaucugaugcucug

SEQ ID NO: 522238 - RNA, 22 nt, Human
cagaaauauuccaaguacugca

SEQ ID NO: 522239 - RNA, 22 nt, Human
cagaagcugcagugaucuggga

SEQ ID NO: 522240 - RNA, 22 nt, Human
aaaauagaugaaaggaagucug

SEQ ID NO: 522241 - RNA, 20 nt, Human
uggagcuguaaucuugucug

SEQ ID NO: 522242 - RNA, 20 nt, Human
gcagaugagacucacagagg

SEQ ID NO: 522243 - RNA, 22 nt, Human
agcugugggagaaucucugggu

SEQ ID NO: 522244 - RNA, 22 nt, Human
guucucucugcuuccaagaugg

SEQ ID NO: 522245 - RNA, 22 nt, Human
uacagcuuaaaagaugcauuua

SEQ ID NO: 522246 - RNA, 21 nt, Human
cacauuugaaccucacagcaa

SEQ ID NO: 522247 - RNA, 22 nt, Human
guuucgucaggcuuauucuauc

SEQ ID NO: 522248 - RNA, 22 nt, Human
gccaggcagacaggucaucagg

SEQ ID NO: 522249 - RNA, 22 nt, Human
auuagaauuaugcuugcuaaug

SEQ ID NO: 522250 - RNA, 22 nt, Human
uccauugucuuugguccuagcc

SEQ ID NO: 522251 - RNA, 22 nt, Human
cauuuagagucuugcaauuuua

SEQ ID NO: 522252 - RNA, 22 nt, Human
uuauuguuuggguauaauuuga

SEQ ID NO: 522253 - RNA, 23 nt, Human
caggaaaucaauucuuccagcau

SEQ ID NO: 522254 - RNA, 22 nt, Human
cagucuucuaaccuagcagccu

SEQ ID NO: 522255 - RNA, 22 nt, Human
ugccaccaucuggcuguguuga

SEQ ID NO: 522256 - RNA, 22 nt, Human
auguuuuacccuuugcacaaac

SEQ ID NO: 522257 - RNA, 22 nt, Human
cucaggauguacuacagaaggc

SEQ ID NO: 522258 - RNA, 22 nt, Human
caguagccacuagacacaugua

SEQ ID NO: 522259 - RNA, 22 nt, Human
agggucugacuccucuggcaag

SEQ ID NO: 522260 - RNA, 22 nt, Human
cauuuacuuaaaucuuuacaag

SEQ ID NO: 522261 - RNA, 22 nt, Human
uaauuucaccguugcuagaaau

SEQ ID NO: 522262 - RNA, 22 nt, Human
ccuagaugggauggcggccggg

SEQ ID NO: 522263 - RNA, 22 nt, Human
uucagcacuuuguuuugcucau

SEQ ID NO: 522264 - RNA, 22 nt, Human
uuuacaaggcaguuauuuuccu

SEQ ID NO: 522265 - RNA, 22 nt, Human
uaaguucauuagacuacagaua

SEQ ID NO: 522266 - RNA, 22 nt, Human
auuucucauguacaaaaacacu

SEQ ID NO: 522267 - RNA, 22 nt, Human
ucuggggauggucuacuuucug

SEQ ID NO: 522268 - RNA, 22 nt, Human
uggguccugucuccuuguucug

SEQ ID NO: 522269 - RNA, 22 nt, Human
ugcuuuauucagucucugccau

SEQ ID NO: 522270 - RNA, 22 nt, Human
ucuguucuuccuacauucacau

SEQ ID NO: 522271 - RNA, 22 nt, Human
agagcugcaccuaugcagaccu

SEQ ID NO: 522272 - RNA, 18 nt, Human
guaggucaguaccaagca

SEQ ID NO: 522273 - RNA, 22 nt, Human
gcucugcuggagggaaagagaa

SEQ ID NO: 522274 - RNA, 22 nt, Human
cagucuggcucagcacaaaggg

SEQ ID NO: 522275 - RNA, 22 nt, Human
ccagagaggcaaaacuccuucc

SEQ ID NO: 522276 - RNA, 20 nt, Human
agaagcauucaaagaaaacu

SEQ ID NO: 522277 - RNA, 22 nt, Human
gugggcuucccuuaagccagag

SEQ ID NO: 522278 - RNA, 22 nt, Human
ugcagcucugggcaagugccuu

SEQ ID NO: 522279 - RNA, 22 nt, Human
uuuguuaaauauuuauugagug

SEQ ID NO: 522280 - RNA, 22 nt, Human
uggccacagccucugccaguuc

SEQ ID NO: 522281 - RNA, 22 nt, Human
aauaucagcucugucacuuacu

SEQ ID NO: 522282 - RNA, 22 nt, Human
ggagagguguauucaguggguc

SEQ ID NO: 522283 - RNA, 23 nt, Human
acugggucuaucuccagagaaga

SEQ ID NO: 522284 - RNA, 22 nt, Human
gucugcccucacgccagcuggg

SEQ ID NO: 522285 - RNA, 22 nt, Human
ucaaaccugcugucuuguucau

SEQ ID NO: 522286 - RNA, 22 nt, Human
gcugagucuugagcacugagca

SEQ ID NO: 522287 - RNA, 22 nt, Human
uaggaagccuaaauuaaguggu

SEQ ID NO: 522288 - RNA, 22 nt, Human
uauugaaaugaaugacagugau

SEQ ID NO: 522289 - RNA, 22 nt, Human
guaauaagaaacagcaauuauu

SEQ ID NO: 522290 - RNA, 22 nt, Human
ugaaggccacuuccugugagcu

SEQ ID NO: 522291 - RNA, 22 nt, Human
uagugauuaaaggcagaauguu

SEQ ID NO: 522292 - RNA, 22 nt, Human
gcauggccuucagggacagcug

SEQ ID NO: 522293 - RNA, 22 nt, Human
ccuggcugguggcagcgacaag

SEQ ID NO: 522294 - RNA, 22 nt, Human
aaggcucucugauggcagcagu

SEQ ID NO: 522295 - RNA, 22 nt, Human
cucuguccuaugcuugauagaa

SEQ ID NO: 522296 - RNA, 22 nt, Human
uuauucagauuggcuacaggau

SEQ ID NO: 522297 - RNA, 18 nt, Human
aggcaggugcuggaaguc

SEQ ID NO: 522298 - RNA, 22 nt, Human
aguccuggcauauagguccuca

SEQ ID NO: 522299 - RNA, 22 nt, Human
cuuacauugucuuaguuuucaa

SEQ ID NO: 522300 - RNA, 22 nt, Human
ccaggaggugcuggaagaaagc

SEQ ID NO: 522301 - RNA, 23 nt, Human
aguggcugagaguguuucauaug

SEQ ID NO: 522302 - RNA, 22 nt, Human
cugccuggaaggagcaagggga

SEQ ID NO: 522303 - RNA, 22 nt, Human
agcugcucuugggugacuucaa

SEQ ID NO: 522304 - RNA, 19 nt, Human
ccuggaggugaagguucuc

SEQ ID NO: 522305 - RNA, 21 nt, Human
ugcauauauaagugcauacac

SEQ ID NO: 522306 - RNA, 22 nt, Human
aauagauacuacuuagauguag

SEQ ID NO: 522307 - RNA, 22 nt, Human
ggcaaagccuuccagcuguuac

SEQ ID NO: 522308 - RNA, 22 nt, Human
ccacuguaguuaugaugaaguu

SEQ ID NO: 522309 - RNA, 22 nt, Human
uaaauucuacaacuucaaagau

SEQ ID NO: 522310 - RNA, 22 nt, Human
acaguguuuggcaaugcaugca

SEQ ID NO: 522311 - RNA, 22 nt, Human
ugcauauuuuauaaagauggaa

SEQ ID NO: 522312 - RNA, 22 nt, Human
ugcugcagaucagcugaguccu

SEQ ID NO: 522313 - RNA, 19 nt, Human
agacucugccacucuucuc

SEQ ID NO: 522314 - RNA, 22 nt, Human
caggcacugugcugagcucugc

SEQ ID NO: 522315 - RNA, 20 nt, Human
cugaacacagaauaagcaca

SEQ ID NO: 522316 - RNA, 22 nt, Human
auagugguuggauaugucagag

SEQ ID NO: 522317 - RNA, 22 nt, Human
aggcugcagaacagucaggugc

SEQ ID NO: 522318 - RNA, 21 nt, Human
ccagagagagggaaguggguu

SEQ ID NO: 522319 - RNA, 22 nt, Human
ucccauguugugccuggcugca

SEQ ID NO: 522320 - RNA, 22 nt, Human
ucagcuccagaguugcacagug

SEQ ID NO: 522321 - RNA, 22 nt, Human
gcuguauuccugcacuguauag

SEQ ID NO: 522322 - RNA, 22 nt, Human
cagcacuaugacauuuaauucu

SEQ ID NO: 522323 - RNA, 22 nt, Human
uccugcuguuuucuggcccaca

SEQ ID NO: 522324 - RNA, 22 nt, Human
ugcccuguuaucuuggaagagu

SEQ ID NO: 522325 - RNA, 22 nt, Human
uuucaaagguggaagagugaau

SEQ ID NO: 522326 - RNA, 22 nt, Human
ucauggggcucuucaaguggag

SEQ ID NO: 522327 - RNA, 22 nt, Human
caauagcagcuucugaaugcaa

SEQ ID NO: 522328 - RNA, 22 nt, Human
uccuuuccagccucaccucagc

SEQ ID NO: 522329 - RNA, 22 nt, Human
cagcaggaaaaucaauucugug

SEQ ID NO: 522330 - RNA, 21 nt, Human
uccuucaguucugcacuuucu

SEQ ID NO: 522331 - RNA, 22 nt, Human
auuguggcuagacagucacaau

SEQ ID NO: 522332 - RNA, 22 nt, Human
gccagagcacaggcugguagua

SEQ ID NO: 522333 - RNA, 20 nt, Human
gcuguucacauuauuaguag

SEQ ID NO: 522334 - RNA, 22 nt, Human
gcuggccuugugucugaggaag

SEQ ID NO: 522335 - RNA, 22 nt, Human
acagcugggugcugcucagagc

SEQ ID NO: 522336 - RNA, 22 nt, Human
auuauuauauagggaaaguccc

SEQ ID NO: 522337 - RNA, 18 nt, Human
ugcucuggucucacuugg

SEQ ID NO: 522338 - RNA, 22 nt, Human
cugcccugcuugaugacagcga

SEQ ID NO: 522339 - RNA, 22 nt, Human
gggcugagaauucagcuuuccu

SEQ ID NO: 522340 - RNA, 22 nt, Human
agugaaauaugcccauugcugu

SEQ ID NO: 522341 - RNA, 22 nt, Human
agggagcuguggucagcucagu

SEQ ID NO: 522342 - RNA, 22 nt, Human
aggacaugugccuccagggcag

SEQ ID NO: 522343 - RNA, 22 nt, Human
gaggcaggcccugaaugaguca

SEQ ID NO: 522344 - RNA, 22 nt, Human
guucucaguggggagcaggguu

SEQ ID NO: 522345 - RNA, 23 nt, Human
agaauuguaaauagaauauaccu

SEQ ID NO: 522346 - RNA, 22 nt, Human
aagauggagcacgagcagaagc

SEQ ID NO: 522347 - RNA, 22 nt, Human
gggacuguaaauucauauggcc

SEQ ID NO: 522348 - RNA, 22 nt, Human
cagaaacacuuguagagaaguu

SEQ ID NO: 522349 - RNA, 22 nt, Human
cuuacaaaggagaggagauagg

SEQ ID NO: 522350 - RNA, 22 nt, Human
gcacaugucuuauucacuguua

SEQ ID NO: 522351 - RNA, 22 nt, Human
ugaugggaggugcugcaggacc

SEQ ID NO: 522352 - RNA, 22 nt, Human
ccugugcucccauagcuucugu

SEQ ID NO: 522353 - RNA, 22 nt, Human
cuuucauuugauaagaaugcca

SEQ ID NO: 522354 - RNA, 22 nt, Human
uuguuuuggaagaacuuacucu

SEQ ID NO: 522355 - RNA, 22 nt, Human
uggccuuccuggugacucauga

SEQ ID NO: 522356 - RNA, 22 nt, Human
uucuggcugcagucccuguaau

SEQ ID NO: 522357 - RNA, 22 nt, Human
acagauguaaucuauucacauu

SEQ ID NO: 522358 - RNA, 22 nt, Human
gcucugggauuaccagccuuag

SEQ ID NO: 522359 - RNA, 22 nt, Human
uucugggcuaccuucccggcag

SEQ ID NO: 522360 - RNA, 22 nt, Human
cugaaccaucucuguucuguau

SEQ ID NO: 522361 - RNA, 22 nt, Human
ugugaaggcagcagcucugucc

SEQ ID NO: 522362 - RNA, 22 nt, Human
gguggcugugagcauuauguga

SEQ ID NO: 522363 - RNA, 22 nt, Human
cacaggcugcccgcagcuggga

SEQ ID NO: 522364 - RNA, 22 nt, Human
gcugcaggcggccgugguggcg

SEQ ID NO: 522365 - RNA, 22 nt, Human
gcuggggcugggcugaggaaga

SEQ ID NO: 522366 - RNA, 22 nt, Human
gucugagcacccuggccuguca

SEQ ID NO: 522367 - RNA, 22 nt, Human
cuccagcuuuuucccaguuggc

SEQ ID NO: 522368 - RNA, 20 nt, Human
caagcccucuuuagccugcc

SEQ ID NO: 522369 - RNA, 22 nt, Human
ugaaacuuauucaguuucuacc

SEQ ID NO: 522370 - RNA, 22 nt, Human
agauuucccacuccauguauug

SEQ ID NO: 522371 - RNA, 22 nt, Human
uugcaagauguuaccauuguua

SEQ ID NO: 522372 - RNA, 22 nt, Human
aaaagggacuacucucagcucc

SEQ ID NO: 522373 - RNA, 22 nt, Human
augguguuuauaggcaaagauc

SEQ ID NO: 522374 - RNA, 22 nt, Human
uggagagcuccuauuugcuguc

SEQ ID NO: 522375 - RNA, 22 nt, Human
aggaaacuucagaguuuugguc

SEQ ID NO: 522376 - RNA, 22 nt, Human
gaggccuguagucauggaugua

SEQ ID NO: 522377 - RNA, 22 nt, Human
cgcuaggauuaggauuaauccu

SEQ ID NO: 522378 - RNA, 22 nt, Human
accaggcaacugugaaugggcu

SEQ ID NO: 522379 - RNA, 22 nt, Human
agugcugaacauagaauggaca

SEQ ID NO: 522380 - RNA, 22 nt, Human
aggaagcugggaaacugacauu

SEQ ID NO: 522381 - RNA, 23 nt, Human
uggcucugugucacauacaggau

SEQ ID NO: 522382 - RNA, 20 nt, Human
cuuagaaauuuuuacccugg

SEQ ID NO: 522383 - RNA, 22 nt, Human
uucagcacugacugagugguua

SEQ ID NO: 522384 - RNA, 22 nt, Human
gggcucugcgcucagcuccagc

SEQ ID NO: 522385 - RNA, 22 nt, Human
ugaaguccuagaacuccuggua

SEQ ID NO: 522386 - RNA, 18 nt, Human
guccugagcucugcugua

SEQ ID NO: 522387 - RNA, 22 nt, Human
uccuucaaucacccagugggga

SEQ ID NO: 522388 - RNA, 22 nt, Human
caguggcugugaccagggaccu

SEQ ID NO: 522389 - RNA, 22 nt, Human
aggcugucaucuuugcaggcag

SEQ ID NO: 522390 - RNA, 22 nt, Human
agcagugggugacagagcugag

SEQ ID NO: 522391 - RNA, 22 nt, Human
ggagucugauuuuuuaugggug

SEQ ID NO: 522392 - RNA, 18 nt, Human
gacacauccccaggccuc

SEQ ID NO: 522393 - RNA, 22 nt, Human
aacacaaaaauucucaggggca

SEQ ID NO: 522394 - RNA, 19 nt, Human
uagaggagaagggaagugg

SEQ ID NO: 522395 - RNA, 22 nt, Human
aagggcucuguugccauuucag

SEQ ID NO: 522396 - RNA, 22 nt, Human
cacagcuuugcuuuccuuaaua

SEQ ID NO: 522397 - RNA, 22 nt, Human
cuguacaggucaaugauaagau

SEQ ID NO: 522398 - RNA, 22 nt, Human
gcguuggggaccccgaagcugg

SEQ ID NO: 522399 - RNA, 22 nt, Human
gaugagggccugguggcugugc

SEQ ID NO: 522400 - RNA, 22 nt, Human
ugaggaaguuguuucucuucua

SEQ ID NO: 522401 - RNA, 22 nt, Human
gaaggaagacugguuuaaaugu

SEQ ID NO: 522402 - RNA, 22 nt, Human
gaguccaguaguuaggacagag

SEQ ID NO: 522403 - RNA, 22 nt, Human
cagcugccugcaacacaagcuu

SEQ ID NO: 522404 - RNA, 22 nt, Human
uuugaaaguccuaggagagucc

SEQ ID NO: 522405 - RNA, 22 nt, Human
acugggcccauauacucagucu

SEQ ID NO: 522406 - RNA, 22 nt, Human
cagcagcugcaaauggaaacag

SEQ ID NO: 522407 - RNA, 22 nt, Human
gcaguguuuuacagaccagcau

SEQ ID NO: 522408 - RNA, 22 nt, Human
acuaaagaagccaaaguuuucu

SEQ ID NO: 522409 - RNA, 22 nt, Human
gacagcagacaaaccauguuuu

SEQ ID NO: 522410 - RNA, 22 nt, Human
ugaacgcagguccacauggcuc

SEQ ID NO: 522411 - RNA, 22 nt, Human
auuccacagcuacaucaaucua

SEQ ID NO: 522412 - RNA, 19 nt, Human
acccucucagugccugagg

SEQ ID NO: 522413 - RNA, 22 nt, Human
cucccugggcagauguggcucu

SEQ ID NO: 522414 - RNA, 22 nt, Human
uucuuuaaaauagugagaaaga

SEQ ID NO: 522415 - RNA, 22 nt, Human
augucacagucugacucaguga

SEQ ID NO: 522416 - RNA, 22 nt, Human
uccuggauuaauagggagcugu

SEQ ID NO: 522417 - RNA, 22 nt, Human
ugucucaguacacuccgauguu

SEQ ID NO: 522418 - RNA, 22 nt, Human
uuggccacaauccaagccuugg

SEQ ID NO: 522419 - RNA, 19 nt, Human
uggaccugugcccauggcu

SEQ ID NO: 522420 - RNA, 22 nt, Human
acacaagaaguuaaugggcaaa

SEQ ID NO: 522421 - RNA, 22 nt, Human
ucaggggcccuucccucagcag

SEQ ID NO: 522422 - RNA, 22 nt, Human
uccugaggcuaaagugcagugg

SEQ ID NO: 522423 - RNA, 22 nt, Human
uggauuuauuagguuggugaaa

SEQ ID NO: 522424 - RNA, 19 nt, Human
ggagaggcuggagggaugc

SEQ ID NO: 522425 - RNA, 22 nt, Human
uuguuucaugaguguaaaggga

SEQ ID NO: 522426 - RNA, 23 nt, Human
cagagcuggcucagagcugccug

SEQ ID NO: 522427 - RNA, 22 nt, Human
gcaguguugguuugcucugcag

SEQ ID NO: 522428 - RNA, 22 nt, Human
guguaugauuucaaauggcuag

SEQ ID NO: 522429 - RNA, 22 nt, Human
aguguggguuuuauggagcccu

SEQ ID NO: 522430 - RNA, 22 nt, Human
acagaccaaaaaaggauauugg

SEQ ID NO: 522431 - RNA, 20 nt, Human
ggcauggguggggcucccag

SEQ ID NO: 522432 - RNA, 22 nt, Human
ggaugggaacuugguagggcau

SEQ ID NO: 522433 - RNA, 22 nt, Human
uggccugggccugccggugcaa

SEQ ID NO: 522434 - RNA, 22 nt, Human
ggccacagucucuggaaggaug

SEQ ID NO: 522435 - RNA, 22 nt, Human
ugaggcaguucuuacuuguauu

SEQ ID NO: 522436 - RNA, 22 nt, Human
ucuuggaacuuauuauuguaga

SEQ ID NO: 522437 - RNA, 22 nt, Human
aaaugcacaggagaaccaauuc

SEQ ID NO: 522438 - RNA, 22 nt, Human
gguacaaggagugaagguuugg

SEQ ID NO: 522439 - RNA, 22 nt, Human
agggccugggucuguacuccuc

SEQ ID NO: 522440 - RNA, 21 nt, Human
gcagcuggucucagagcuugc

SEQ ID NO: 522441 - RNA, 19 nt, Human
cagcugccuuuucuuugca

SEQ ID NO: 522442 - RNA, 22 nt, Human
gggaaggagguggaccugcccc

SEQ ID NO: 522443 - RNA, 22 nt, Human
cagucacauggaugauggauag

SEQ ID NO: 522444 - RNA, 22 nt, Human
guuuucucugagaugccuuucu

SEQ ID NO: 522445 - RNA, 22 nt, Human
guggaggacaaaagaagccuuu

SEQ ID NO: 522446 - RNA, 22 nt, Human
agcaggaacucagggaguucuc

SEQ ID NO: 522447 - RNA, 22 nt, Human
ugaaccaggaggcagccagcac

SEQ ID NO: 522448 - RNA, 22 nt, Human
ggaugcugcuaucaggcuucga

SEQ ID NO: 522449 - RNA, 22 nt, Human
ucugccuuggcaaccacagcuu

SEQ ID NO: 522450 - RNA, 22 nt, Human
aaaugcagcagcuaauugaaaa

SEQ ID NO: 522451 - RNA, 22 nt, Human
uuugaaagacagaauauuuuug

SEQ ID NO: 522452 - RNA, 22 nt, Human
gacaucaauucagcauuuuaag

SEQ ID NO: 522453 - RNA, 22 nt, Human
gaggcagcgggucaggaccgug

SEQ ID NO: 522454 - RNA, 22 nt, Human
uaacaguauugaagauaaacua

SEQ ID NO: 522455 - RNA, 22 nt, Human
ggcuucccagcagagggcgcac

SEQ ID NO: 522456 - RNA, 22 nt, Human
auuuauugagagggaggggaau

SEQ ID NO: 522457 - RNA, 22 nt, Human
cugagauggaguuuugcucuug

SEQ ID NO: 522458 - RNA, 22 nt, Human
uugcccugucuuaagcuggcaa

SEQ ID NO: 522459 - RNA, 22 nt, Human
gccugccaugagcuaaugacac

SEQ ID NO: 522460 - RNA, 22 nt, Human
caucuugcuucaucugcugugu

SEQ ID NO: 522461 - RNA, 22 nt, Human
accagcuguguccuggcugcag

SEQ ID NO: 522462 - RNA, 22 nt, Human
uacuucauuccuuuguaaaaug

SEQ ID NO: 522463 - RNA, 22 nt, Human
auuagcugaccucuaaggagcc

SEQ ID NO: 522464 - RNA, 22 nt, Human
gcugucacucaccaggccugca

SEQ ID NO: 522465 - RNA, 22 nt, Human
aucuuucuaugguacuuucucc

SEQ ID NO: 522466 - RNA, 22 nt, Human
uguuaaaguggauaagcugaau

SEQ ID NO: 522467 - RNA, 22 nt, Human
uguccuggccuccagaaagucg

SEQ ID NO: 522468 - RNA, 22 nt, Human
cugcagcuauauuuucccacag

SEQ ID NO: 522469 - RNA, 22 nt, Human
cugccuggcuaaacucaagucg

SEQ ID NO: 522470 - RNA, 22 nt, Human
agcugauuccacuuuuucccca

SEQ ID NO: 522471 - RNA, 23 nt, Human
ugaaugauggugcuccucaucuu

SEQ ID NO: 522472 - RNA, 22 nt, Human
gcucugucauuuugcagacacu

SEQ ID NO: 522473 - RNA, 22 nt, Human
gcaggcucuucuuucugcccag

SEQ ID NO: 522474 - RNA, 22 nt, Human
guguuuccuaguuuaaugaaug

SEQ ID NO: 522475 - RNA, 21 nt, Human
uccagcucuuauguucaugaa

SEQ ID NO: 522476 - RNA, 22 nt, Human
caguggucugugcuucuguaca

SEQ ID NO: 522477 - RNA, 22 nt, Human
uucucuaauacauuuugacaaa

SEQ ID NO: 522478 - RNA, 22 nt, Human
acauauauuacuaguaaagaca

SEQ ID NO: 522479 - RNA, 22 nt, Human
cuccugggagcagggauggaug

SEQ ID NO: 522480 - RNA, 22 nt, Human
agccagggaagaggccuaccuc

SEQ ID NO: 522481 - RNA, 22 nt, Human
ggcagucccagcccagaggcgc

SEQ ID NO: 522482 - RNA, 22 nt, Human
uguccucuuccagugcuccuuc

SEQ ID NO: 522483 - RNA, 22 nt, Human
ugugaaugucuagguuuuaugu

SEQ ID NO: 522484 - RNA, 22 nt, Human
cugagauggccacugggucuca

SEQ ID NO: 522485 - RNA, 22 nt, Human
uuaaagaugcagcuuuagagaa

SEQ ID NO: 522486 - RNA, 22 nt, Human
gccugcaggcuguaguuuguga

SEQ ID NO: 522487 - RNA, 22 nt, Human
agugaaaugauucugagcaaga

SEQ ID NO: 522488 - RNA, 18 nt, Human
auggucucauacugggag

SEQ ID NO: 522489 - RNA, 22 nt, Human
uucaagaucgaguuuaaaguga

SEQ ID NO: 522490 - RNA, 22 nt, Human
cagcagcucacugaauaaugac

SEQ ID NO: 522491 - RNA, 22 nt, Human
uguguacuugaaagggcagguc

SEQ ID NO: 522492 - RNA, 22 nt, Human
uaauuuuaacugugcuguuugg

SEQ ID NO: 522493 - RNA, 22 nt, Human
ccagaagggcuauugcagugac

SEQ ID NO: 522494 - RNA, 22 nt, Human
agacaggcagaggcugcagagg

SEQ ID NO: 522495 - RNA, 22 nt, Human
aauccugaggcaaagagaugag

SEQ ID NO: 522496 - RNA, 22 nt, Human
gauaaauugcacuuuuucuuac

SEQ ID NO: 522497 - RNA, 22 nt, Human
auucuccacacauccagaccuu

SEQ ID NO: 522498 - RNA, 22 nt, Human
agagccugaggaugucccagcu

SEQ ID NO: 522499 - RNA, 22 nt, Human
acagaggguuucuaaggauuug

SEQ ID NO: 522500 - RNA, 22 nt, Human
agagcuggaagcugcucuuaga

SEQ ID NO: 522501 - RNA, 22 nt, Human
gcccagugcugagggugcugcu

SEQ ID NO: 522502 - RNA, 22 nt, Human
gagagcugugguuugaccaggc

SEQ ID NO: 522503 - RNA, 22 nt, Human
ugagagguaggaaaugaacaag

SEQ ID NO: 522504 - RNA, 22 nt, Human
uccauaagcagguucuuccuga

SEQ ID NO: 522505 - RNA, 20 nt, Human
cucagcucuucagggcaagu

SEQ ID NO: 522506 - RNA, 22 nt, Human
agcugccagcaaguuucaaaca

SEQ ID NO: 522507 - RNA, 22 nt, Human
ugggcuguccagcaccugggcu

SEQ ID NO: 522508 - RNA, 22 nt, Human
gcucuggcuacuccacccuguu

SEQ ID NO: 522509 - RNA, 22 nt, Human
uuccuggggcgacuguaucuga

SEQ ID NO: 522510 - RNA, 22 nt, Human
ugaggaaugcugagcagaggaa

SEQ ID NO: 522511 - RNA, 22 nt, Human
uuauuauuuuguguacagcaaa

SEQ ID NO: 522512 - RNA, 22 nt, Human
cuaaaaauccacacuaggugaa

SEQ ID NO: 522513 - RNA, 22 nt, Human
uuucuucucacccaggacagag

SEQ ID NO: 522514 - RNA, 22 nt, Human
acagcuguguuuuauaaucagc

SEQ ID NO: 522515 - RNA, 22 nt, Human
acaguguucacuaagguuagcu

SEQ ID NO: 522516 - RNA, 22 nt, Human
ugcagaaggccugacauugcac

SEQ ID NO: 522517 - RNA, 18 nt, Human
ucuggaacaacuucaugu

SEQ ID NO: 522518 - RNA, 22 nt, Human
uauucauaguaaacaaaagugg

SEQ ID NO: 522519 - RNA, 22 nt, Human
auucucaguucacuaguuucuu

SEQ ID NO: 522520 - RNA, 21 nt, Human
uccaggaguggcugggcaggg

SEQ ID NO: 522521 - RNA, 22 nt, Human
gcauaauauacaugcuugaucc

SEQ ID NO: 522522 - RNA, 22 nt, Human
uccaaaggaagaggcugucagu

SEQ ID NO: 522523 - RNA, 22 nt, Human
ccaaagugcugggguuacaggc

SEQ ID NO: 522524 - RNA, 22 nt, Human
gaauaacauuuuuuccuuuaca

SEQ ID NO: 522525 - RNA, 22 nt, Human
gcauuguccugcuucugagugu

SEQ ID NO: 522526 - RNA, 22 nt, Human
aggcuuuaaguggccuacagcu

SEQ ID NO: 522527 - RNA, 22 nt, Human
cuagggaccucagcuccuggag

SEQ ID NO: 522528 - RNA, 22 nt, Human
auugacaagacaauggcucuua

SEQ ID NO: 522529 - RNA, 22 nt, Human
ccagucuggcaggagggggaac

SEQ ID NO: 522530 - RNA, 22 nt, Human
uggacucagaaguguucuuuua

SEQ ID NO: 522531 - RNA, 22 nt, Human
gggcggggggagcuggaaugaa

SEQ ID NO: 522532 - RNA, 21 nt, Human
ugcaggcugugcgcuccugcc

SEQ ID NO: 522533 - RNA, 22 nt, Human
gcuccuggucuggagcuucaag

SEQ ID NO: 522534 - RNA, 22 nt, Human
uagcugccuagacagcuauagc

SEQ ID NO: 522535 - RNA, 22 nt, Human
caaaggcaguuacugaaugaag

SEQ ID NO: 522536 - RNA, 21 nt, Human
aacuuguauuucuccuuauuc

SEQ ID NO: 522537 - RNA, 19 nt, Human
aggcaugggaagagaaguc

SEQ ID NO: 522538 - RNA, 22 nt, Human
aacagcuucaucacauggcaua

SEQ ID NO: 522539 - RNA, 22 nt, Human
ccugagcauuagacauccauca

SEQ ID NO: 522540 - RNA, 22 nt, Human
gucuuuggagaggugccauuuc

SEQ ID NO: 522541 - RNA, 22 nt, Human
cuuggcuggaacuccugagaaa

SEQ ID NO: 522542 - RNA, 22 nt, Human
agaaaguuuugugcuauauaug

SEQ ID NO: 522543 - RNA, 22 nt, Human
gcaaugauauugaagugaugaa

SEQ ID NO: 522544 - RNA, 22 nt, Human
augcugaacugagauguaacuu

SEQ ID NO: 522545 - RNA, 22 nt, Human
uacuuucuguccuucuguuaaa

SEQ ID NO: 522546 - RNA, 22 nt, Human
gcuggccauucucuuugagaug

SEQ ID NO: 522547 - RNA, 22 nt, Human
uggcagcaauuugugauguuga

SEQ ID NO: 522548 - RNA, 22 nt, Human
guacaauagcaguuuucccuuu

SEQ ID NO: 522549 - RNA, 22 nt, Human
aggccuggccccaguugcuagg

SEQ ID NO: 522550 - RNA, 20 nt, Human
caugcugccuccauugaugc

SEQ ID NO: 522551 - RNA, 22 nt, Human
gcaggagagccagcaggcuucc

SEQ ID NO: 522552 - RNA, 22 nt, Human
caggaggaggguacaccaucag

SEQ ID NO: 522553 - RNA, 22 nt, Human
agucucugcacaguaagaagca

SEQ ID NO: 522554 - RNA, 23 nt, Human
cagugcugguucugccugugggg

SEQ ID NO: 522555 - RNA, 22 nt, Human
gcagcucugacaaugccuggaa

SEQ ID NO: 522556 - RNA, 22 nt, Human
aaaugcuguguuuuaacauaga

SEQ ID NO: 522557 - RNA, 22 nt, Human
aaugucuacauucugaauucgu

SEQ ID NO: 522558 - RNA, 22 nt, Human
gggguugguuuaaaugcuugag

SEQ ID NO: 522559 - RNA, 22 nt, Human
uguaaagaaagacgcagaguua

SEQ ID NO: 522560 - RNA, 22 nt, Human
uggcucuggggacaguaagucc

SEQ ID NO: 522561 - RNA, 22 nt, Human
aagaguuugggcaagucauaaa

SEQ ID NO: 522562 - RNA, 22 nt, Human
gggcugggauugcuugcuguga

SEQ ID NO: 522563 - RNA, 22 nt, Human
aaagguaucauguccauacagu

SEQ ID NO: 522564 - RNA, 22 nt, Human
aagcgccacgagaagcuggacc

SEQ ID NO: 522565 - RNA, 22 nt, Human
ccuaggaacccccaggcuucug

SEQ ID NO: 522566 - RNA, 22 nt, Human
cugggcacuugcucacagcucu

SEQ ID NO: 522567 - RNA, 20 nt, Human
aaaugaugggaauaaucuau

SEQ ID NO: 522568 - RNA, 22 nt, Human
gcaggaugggagcuucacuuug

SEQ ID NO: 522569 - RNA, 22 nt, Human
uaguuacagcaggcaggauaua

SEQ ID NO: 522570 - RNA, 23 nt, Human
aguuuguaaagaaauauuugcac

SEQ ID NO: 522571 - RNA, 22 nt, Human
cgucccaguuccagccgcgcug

SEQ ID NO: 522572 - RNA, 22 nt, Human
ucagugugcacaugguagcagu

SEQ ID NO: 522573 - RNA, 22 nt, Human
aggauccuuuuucugcuguuug

SEQ ID NO: 522574 - RNA, 22 nt, Human
caucaagagucuuacuaucagu

SEQ ID NO: 522575 - RNA, 22 nt, Human
ugggcagauguggcucuccuug

SEQ ID NO: 522576 - RNA, 22 nt, Human
agugucugugaugaggucagga

SEQ ID NO: 522577 - RNA, 22 nt, Human
uuucaaggauguuauauaaaug

SEQ ID NO: 522578 - RNA, 21 nt, Human
gacaaagugaagcaggcagga

SEQ ID NO: 522579 - RNA, 22 nt, Human
augggcugugggacccuggacc

SEQ ID NO: 522580 - RNA, 22 nt, Human
caguucugacuuucauaauguc

SEQ ID NO: 522581 - RNA, 22 nt, Human
cucuuuuucaccucugucagcg

SEQ ID NO: 522582 - RNA, 22 nt, Human
guuuagaaugaaacuuuugagc

SEQ ID NO: 522583 - RNA, 22 nt, Human
aucuugaucaaggcuaucauga

SEQ ID NO: 522584 - RNA, 23 nt, Human
auacauacagucuuacugacuuu

SEQ ID NO: 522585 - RNA, 20 nt, Human
cagugcaacugaagaacuga

SEQ ID NO: 522586 - RNA, 22 nt, Human
aggagaggaaucauuauuacaa

SEQ ID NO: 522587 - RNA, 18 nt, Human
uuaauguggcuuacuaug

SEQ ID NO: 522588 - RNA, 22 nt, Human
uuucacaaguuucaggauucug

SEQ ID NO: 522589 - RNA, 22 nt, Human
uucaaacucuugcucugcuagu

SEQ ID NO: 522590 - RNA, 22 nt, Human
augaaauuuuaauuauaccucu

SEQ ID NO: 522591 - RNA, 21 nt, Human
guguuuccuguuuauggcuug

SEQ ID NO: 522592 - RNA, 22 nt, Human
gugcccugaugcaauugucuca

SEQ ID NO: 522593 - RNA, 22 nt, Human
acagcaagccagcuugucacug

SEQ ID NO: 522594 - RNA, 22 nt, Human
uggcugaggcuggagugcagug

SEQ ID NO: 522595 - RNA, 22 nt, Human
guggccucuguuggcuccuagg

SEQ ID NO: 522596 - RNA, 19 nt, Human
cacaucagcagggcugugg

SEQ ID NO: 522597 - RNA, 20 nt, Human
gccuggaggcaaugggaaga

SEQ ID NO: 522598 - RNA, 22 nt, Human
uuugaaagcaggugugggaggg

SEQ ID NO: 522599 - RNA, 22 nt, Human
acagcuuuucaauucugcugag

SEQ ID NO: 522600 - RNA, 22 nt, Human
uggcacaguccugggugccugc

SEQ ID NO: 522601 - RNA, 22 nt, Human
uggcugccaugacgccugggga

SEQ ID NO: 522602 - RNA, 22 nt, Human
uauugacaauuugugaaacuau

SEQ ID NO: 522603 - RNA, 22 nt, Human
agcagcauggagaaaccguuca

SEQ ID NO: 522604 - RNA, 22 nt, Human
gaaugauauuauuucgugcugg

SEQ ID NO: 522605 - RNA, 22 nt, Human
uccugugugggcaggaugagaa

SEQ ID NO: 522606 - RNA, 22 nt, Human
ggcagcugcugcauuacguugu

SEQ ID NO: 522607 - RNA, 22 nt, Human
cacugcuucuggaggaauuugg

SEQ ID NO: 522608 - RNA, 22 nt, Human
cuguccuggagggcauaggacg

SEQ ID NO: 522609 - RNA, 22 nt, Human
aguuuuucugggaggcacugcu

SEQ ID NO: 522610 - RNA, 22 nt, Human
uucauucccuuauauuagcauu

SEQ ID NO: 522611 - RNA, 22 nt, Human
guuuuucuagaaaucuccuccu

SEQ ID NO: 522612 - RNA, 17 nt, Human
ggagaucuggcagaggg

SEQ ID NO: 522613 - RNA, 20 nt, Human
ccuggaagagcuccccaggc

SEQ ID NO: 522614 - RNA, 22 nt, Human
cuggcccuggcuggagcccagg

SEQ ID NO: 522615 - RNA, 22 nt, Human
cuguccuaugaguacucacuag

SEQ ID NO: 522616 - RNA, 22 nt, Human
gagacauggcaaaagcacuggu

SEQ ID NO: 522617 - RNA, 22 nt, Human
aaaaacuguaauuacuuuugca

SEQ ID NO: 522618 - RNA, 22 nt, Human
ggccucugggguccugagccca

SEQ ID NO: 522619 - RNA, 22 nt, Human
guggcagcugugggacacuggu

SEQ ID NO: 522620 - RNA, 22 nt, Human
gugugccaccagucaaggugaa

SEQ ID NO: 522621 - RNA, 22 nt, Human
ccucugagagaaggccuucagc

SEQ ID NO: 522622 - RNA, 22 nt, Human
auggguuuauagguggacuuuu

SEQ ID NO: 522623 - RNA, 22 nt, Human
uuuguugacaucccuguacuuu

SEQ ID NO: 522624 - RNA, 22 nt, Human
agcaggcagcugggggaguuga

SEQ ID NO: 522625 - RNA, 19 nt, Human
agaggcugucaccuguagc

SEQ ID NO: 522626 - RNA, 22 nt, Human
cugaagauuauaaacagacaua

SEQ ID NO: 522627 - RNA, 22 nt, Human
gaaaaggaaauuuauagagauc

SEQ ID NO: 522628 - RNA, 22 nt, Human
agggaaaucuuucaacacuuca

SEQ ID NO: 522629 - RNA, 22 nt, Human
auauuuguauuucgugugugua

SEQ ID NO: 522630 - RNA, 17 nt, Human
ucacaucacacaagcaa

SEQ ID NO: 522631 - RNA, 22 nt, Human
gugguguaggucacaguuagga

SEQ ID NO: 522632 - RNA, 22 nt, Human
aagaaacugaaaguggcuucau

SEQ ID NO: 522633 - RNA, 22 nt, Human
cugcugcugagagcucagccug

SEQ ID NO: 522634 - RNA, 22 nt, Human
auagcagaaaccaagcuucuuc

SEQ ID NO: 522635 - RNA, 22 nt, Human
ucugagcuggagcccaucaccu

SEQ ID NO: 522636 - RNA, 20 nt, Human
uggcccuguuuucuccaggc

SEQ ID NO: 522637 - RNA, 22 nt, Human
ugauuucucauauuguucaaaa

SEQ ID NO: 522638 - RNA, 22 nt, Human
ccugggagguggagguugcagu

SEQ ID NO: 522639 - RNA, 22 nt, Human
uugaaaggugaacaugaugcac

SEQ ID NO: 522640 - RNA, 22 nt, Human
uguuccaugucuuuguaggacu

SEQ ID NO: 522641 - RNA, 22 nt, Human
uggaggucugcaaggcgcugga

SEQ ID NO: 522642 - RNA, 22 nt, Human
ucaugugucugccaguguuuau

SEQ ID NO: 522643 - RNA, 22 nt, Human
aaguuauugcagcaauccaagu

SEQ ID NO: 522644 - RNA, 22 nt, Human
ccugucucccuggcauggcuca

SEQ ID NO: 522645 - RNA, 22 nt, Human
ucacacgugagguucuauccug

SEQ ID NO: 522646 - RNA, 22 nt, Human
acaugcuaugagagauuacuuc

SEQ ID NO: 522647 - RNA, 22 nt, Human
cuagaaagauacuuaaaucaag

SEQ ID NO: 522648 - RNA, 22 nt, Human
gguggguauugaauacaggugu

SEQ ID NO: 522649 - RNA, 22 nt, Human
aggggagcuugccuggucaccc

SEQ ID NO: 522650 - RNA, 22 nt, Human
uguaugugcuugagaagguggg

SEQ ID NO: 522651 - RNA, 22 nt, Human
cugugcuuccaggauggcagcu

SEQ ID NO: 522652 - RNA, 22 nt, Human
uugcuuccucgaggccagcgug

SEQ ID NO: 522653 - RNA, 22 nt, Human
gggauggacuuggggacuccag

SEQ ID NO: 522654 - RNA, 22 nt, Human
ccagcaggggaauauuuuuagg

SEQ ID NO: 522655 - RNA, 22 nt, Human
cacaagucuguggucuccaaca

SEQ ID NO: 522656 - RNA, 22 nt, Human
ccucuggggugagugggccacu

SEQ ID NO: 522657 - RNA, 23 nt, Human
uuugaaaguaucaacucgccuga

SEQ ID NO: 522658 - RNA, 23 nt, Human
uggugccucagaagcagugggcu

SEQ ID NO: 522659 - RNA, 22 nt, Human
ccaguguuacggcuugaacuau

SEQ ID NO: 522660 - RNA, 18 nt, Human
ucauuuguuuugcaugaa

SEQ ID NO: 522661 - RNA, 22 nt, Human
auauuagggucucuaaauucua

SEQ ID NO: 522662 - RNA, 22 nt, Human
cucagugucuuauuguacacau

SEQ ID NO: 522663 - RNA, 22 nt, Human
uguccuguaggaggcagaacaa

SEQ ID NO: 522664 - RNA, 22 nt, Human
acacuagucucuucuugacuug

SEQ ID NO: 522665 - RNA, 22 nt, Human
ucucugggccuguuuucucauc

SEQ ID NO: 522666 - RNA, 22 nt, Human
cucagagcaaugaacaugcaaa

SEQ ID NO: 522667 - RNA, 22 nt, Human
uccucagugcuagccaacugcc

SEQ ID NO: 522668 - RNA, 22 nt, Human
ggaaggagggcggcaaugauga

SEQ ID NO: 522669 - RNA, 22 nt, Human
cauuacaaaguuauaaacaguu

SEQ ID NO: 522670 - RNA, 20 nt, Human
ccucaggaugagggugagca

SEQ ID NO: 522671 - RNA, 22 nt, Human
uauguacauacaugugcauacg

SEQ ID NO: 522672 - RNA, 22 nt, Human
cugagcugggaguggauagugg

SEQ ID NO: 522673 - RNA, 22 nt, Human
uuaucauugucgcagucuaauu

SEQ ID NO: 522674 - RNA, 22 nt, Human
uagcagcuaugccauuuugaca

SEQ ID NO: 522675 - RNA, 22 nt, Human
acagaugagguguuuggagagc

SEQ ID NO: 522676 - RNA, 22 nt, Human
cuggguuuagggucuccccuug

SEQ ID NO: 522677 - RNA, 22 nt, Human
ucuccccagggguauggguauu

SEQ ID NO: 522678 - RNA, 22 nt, Human
gcagggcuuuuugaaacauggu

SEQ ID NO: 522679 - RNA, 22 nt, Human
uucagugucaauuuuuaaauau

SEQ ID NO: 522680 - RNA, 22 nt, Human
uccaggagaggccugaccaggu

SEQ ID NO: 522681 - RNA, 22 nt, Human
ucagaggaauaaugcugcauuu

SEQ ID NO: 522682 - RNA, 21 nt, Human
uauuucuuugacucucucccu

SEQ ID NO: 522683 - RNA, 22 nt, Human
ggcuuccuuucacuacccucag

SEQ ID NO: 522684 - RNA, 22 nt, Human
aggcucccaagcacugacccca

SEQ ID NO: 522685 - RNA, 22 nt, Human
uucucuagguuuuagaugaaga

SEQ ID NO: 522686 - RNA, 22 nt, Human
cugggggcaauggucagagugu

SEQ ID NO: 522687 - RNA, 22 nt, Human
ucagcuuuuuggauugcccaag

SEQ ID NO: 522688 - RNA, 22 nt, Human
ugauugacuuuagaauagcacu

SEQ ID NO: 522689 - RNA, 22 nt, Human
gcugguccucaagggcacagcc

SEQ ID NO: 522690 - RNA, 20 nt, Human
ugucugaaaaggaagcuauc

SEQ ID NO: 522691 - RNA, 22 nt, Human
guuugaaaaaagcaguauguaa

SEQ ID NO: 522692 - RNA, 22 nt, Human
uuggaaaugauuucuauuauua

SEQ ID NO: 522693 - RNA, 22 nt, Human
ucugcagcuuacuuucacauga

SEQ ID NO: 522694 - RNA, 22 nt, Human
agcugccacagagccuggccag

SEQ ID NO: 522695 - RNA, 22 nt, Human
ccucagggccaucucugucccu

SEQ ID NO: 522696 - RNA, 22 nt, Human
aacuuucagcaaguaauucugg

SEQ ID NO: 522697 - RNA, 22 nt, Human
auuucuucaggucagaaauaga

SEQ ID NO: 522698 - RNA, 22 nt, Human
gaggcagcuuggggcugugggu

SEQ ID NO: 522699 - RNA, 22 nt, Human
gagcagcugcagugcagacccu

SEQ ID NO: 522700 - RNA, 22 nt, Human
ucacuguaccuuccauuucauu

SEQ ID NO: 522701 - RNA, 22 nt, Human
cccagacuccucuggcuggugg

SEQ ID NO: 522702 - RNA, 22 nt, Human
accagagcuggcagaguaucaa

SEQ ID NO: 522703 - RNA, 21 nt, Human
uuucugaaggcaacaucuauc

SEQ ID NO: 522704 - RNA, 22 nt, Human
gaaaucugaaucuucuguuggu

SEQ ID NO: 522705 - RNA, 22 nt, Human
agggaaggaaaagcugucgcuu

SEQ ID NO: 522706 - RNA, 22 nt, Human
aaagagcuaacauugccgagau

SEQ ID NO: 522707 - RNA, 22 nt, Human
auugaaaggcaaaguaggaagc

SEQ ID NO: 522708 - RNA, 22 nt, Human
gugcuuccucugccaacacucu

SEQ ID NO: 522709 - RNA, 22 nt, Human
ccuuugugagguccuguggggg

SEQ ID NO: 522710 - RNA, 22 nt, Human
ucucccucuuugucugcuuugg

SEQ ID NO: 522711 - RNA, 22 nt, Human
gggucucucaugcaguugcugu

SEQ ID NO: 522712 - RNA, 22 nt, Human
acagagcucccagccaucuccu

SEQ ID NO: 522713 - RNA, 22 nt, Human
gaggcuagagcaggggcucaau

SEQ ID NO: 522714 - RNA, 22 nt, Human
aaugcacauaaauauggucuua

SEQ ID NO: 522715 - RNA, 22 nt, Human
ccaggggaaacagggagcacuc

SEQ ID NO: 522716 - RNA, 22 nt, Human
agugugaccuuauuuggaaaca

SEQ ID NO: 522717 - RNA, 22 nt, Human
ugugugauugcaggagaugugg

SEQ ID NO: 522718 - RNA, 22 nt, Human
gaaggagagaaaggcaauucug

SEQ ID NO: 522719 - RNA, 22 nt, Human
uuuuguuuaaaauccuggaugg

SEQ ID NO: 522720 - RNA, 22 nt, Human
agcagggaauagcggaaagaau

SEQ ID NO: 522721 - RNA, 20 nt, Human
guggccuguccuguuguggg

SEQ ID NO: 522722 - RNA, 22 nt, Human
aaaguuacuaucacaaugaaau

SEQ ID NO: 522723 - RNA, 22 nt, Human
cacugcuuucacaguuuguucc

SEQ ID NO: 522724 - RNA, 22 nt, Human
agaaucaauucacugcugcagc

SEQ ID NO: 522725 - RNA, 22 nt, Human
gauggcagguaguggucucauc

SEQ ID NO: 522726 - RNA, 22 nt, Human
agccucugguccucccucagcu

SEQ ID NO: 522727 - RNA, 20 nt, Human
cucugggcugcacccucgcc

SEQ ID NO: 522728 - RNA, 22 nt, Human
gaccucagugaauggucaugua

SEQ ID NO: 522729 - RNA, 22 nt, Human
ccugaaugccugacauuucacu

SEQ ID NO: 522730 - RNA, 22 nt, Human
agaaacuucagcuauucuuuug

SEQ ID NO: 522731 - RNA, 22 nt, Human
gcugucuucacuuccugguuuc

SEQ ID NO: 522732 - RNA, 22 nt, Human
aggccuggcaugagaccugaga

SEQ ID NO: 522733 - RNA, 22 nt, Human
guuuccuggaaacauuaggaga

SEQ ID NO: 522734 - RNA, 22 nt, Human
aggcuccaaauuaccaagcucu

SEQ ID NO: 522735 - RNA, 19 nt, Human
uccucaggggcucacagac

SEQ ID NO: 522736 - RNA, 22 nt, Human
uguguguggggaggcagcagau

SEQ ID NO: 522737 - RNA, 22 nt, Human
aggccugaaggaagaugagcug

SEQ ID NO: 522738 - RNA, 22 nt, Human
auaguacacauccuacaauguu

SEQ ID NO: 522739 - RNA, 22 nt, Human
uuucaguguguaaauugaaaua

SEQ ID NO: 522740 - RNA, 22 nt, Human
gcugcaggcucugcaggaauug

SEQ ID NO: 522741 - RNA, 19 nt, Human
ugcagaagacacaguggug

SEQ ID NO: 522742 - RNA, 22 nt, Human
ugauuuccaugaagcugaaggc

SEQ ID NO: 522743 - RNA, 22 nt, Human
ucauagaagcacucagcucccu

SEQ ID NO: 522744 - RNA, 22 nt, Human
ccagacccugcucuggggcucu

SEQ ID NO: 522745 - RNA, 22 nt, Human
accuguggaucagauucuugua

SEQ ID NO: 522746 - RNA, 22 nt, Human
auuuuccaaaauaauuguuacu

SEQ ID NO: 522747 - RNA, 22 nt, Human
ugguggcaaaucaggacacuuc

SEQ ID NO: 522748 - RNA, 22 nt, Human
ucucacugggucacagcagagg

SEQ ID NO: 522749 - RNA, 22 nt, Human
ugcugugagguugagaaggaag

SEQ ID NO: 522750 - RNA, 17 nt, Human
ccuuucucuuucaucuc

SEQ ID NO: 522751 - RNA, 22 nt, Human
agguccugugguuuggguaaaa

SEQ ID NO: 522752 - RNA, 22 nt, Human
acagagguuuccauugagguuu

SEQ ID NO: 522753 - RNA, 22 nt, Human
acuguguccucauguggcagaa

SEQ ID NO: 522754 - RNA, 22 nt, Human
ccagcugguuaaaauagagaaa

SEQ ID NO: 522755 - RNA, 22 nt, Human
acagaugaguuaaagcagagug

SEQ ID NO: 522756 - RNA, 22 nt, Human
ggcccaucucuugcucuggguu

SEQ ID NO: 522757 - RNA, 22 nt, Human
ugguccagaugccuuggcuuua

SEQ ID NO: 522758 - RNA, 21 nt, Human
agagagggagaugaaacaucc

SEQ ID NO: 522759 - RNA, 22 nt, Human
ugugaaaggagccauagacagu

SEQ ID NO: 522760 - RNA, 22 nt, Human
uggcagccuggaaucucucagc

SEQ ID NO: 522761 - RNA, 22 nt, Human
agaaguauuuggcuaaaagaca

SEQ ID NO: 522762 - RNA, 22 nt, Human
accccagcccugcuucugggag

SEQ ID NO: 522763 - RNA, 22 nt, Human
auugacaauguauuuguaucug

SEQ ID NO: 522764 - RNA, 22 nt, Human
gcuggcuuuugaagucuagcua

SEQ ID NO: 522765 - RNA, 23 nt, Human
ggagaggggugugggcaucuuua

SEQ ID NO: 522766 - RNA, 22 nt, Human
cucugagauaguuucuaucaau

SEQ ID NO: 522767 - RNA, 22 nt, Human
gaaaguuugccucucucuugag

SEQ ID NO: 522768 - RNA, 22 nt, Human
agcaaggggcagugaaagugug

SEQ ID NO: 522769 - RNA, 23 nt, Human
uggcauagugaggggcacagaga

SEQ ID NO: 522770 - RNA, 22 nt, Human
cuuccuugugguccuucucauu

SEQ ID NO: 522771 - RNA, 21 nt, Human
cugcucugacagugaggccag

SEQ ID NO: 522772 - RNA, 22 nt, Human
gagcucuguguagccugagggu

SEQ ID NO: 522773 - RNA, 22 nt, Human
gagaaacuuggaguuauucugg

SEQ ID NO: 522774 - RNA, 22 nt, Human
ggcaaagcggcccuguggccag

SEQ ID NO: 522775 - RNA, 18 nt, Human
uggcucugccacucaccg

SEQ ID NO: 522776 - RNA, 22 nt, Human
ggaggaaaggcucccucccucu

SEQ ID NO: 522777 - RNA, 22 nt, Human
aagcugcccucauucccagugc

SEQ ID NO: 522778 - RNA, 22 nt, Human
ggagagagaugccgccuugcuc

SEQ ID NO: 522779 - RNA, 22 nt, Human
acaugucaauuuaguacucuua

SEQ ID NO: 522780 - RNA, 22 nt, Human
cugcccugugaggguccuuggg

SEQ ID NO: 522781 - RNA, 19 nt, Human
ugccugucaguagaucuca

SEQ ID NO: 522782 - RNA, 22 nt, Human
uauuuucuggacagucuugcuu

SEQ ID NO: 522783 - RNA, 22 nt, Human
uuuagcuuguuggaacaauuga

SEQ ID NO: 522784 - RNA, 22 nt, Human
agggccuggcuucacuuucuca

SEQ ID NO: 522785 - RNA, 22 nt, Human
uucuuacagcccuauuacuaaa

SEQ ID NO: 522786 - RNA, 22 nt, Human
cugugaggcggguggaguggag

SEQ ID NO: 522787 - RNA, 22 nt, Human
cugggaguguucuaggucacau

SEQ ID NO: 522788 - RNA, 22 nt, Human
cggcuggggcuguccccaugac

SEQ ID NO: 522789 - RNA, 22 nt, Human
gacagcagacagaacuaccugc

SEQ ID NO: 522790 - RNA, 22 nt, Human
uccuucagaaaaccucagucuu

SEQ ID NO: 522791 - RNA, 22 nt, Human
cugcccccaggcugcauggcug

SEQ ID NO: 522792 - RNA, 22 nt, Human
agcaggugaauuccuggaugug

SEQ ID NO: 522793 - RNA, 22 nt, Human
agacagagauacuauguuguca

SEQ ID NO: 522794 - RNA, 22 nt, Human
cagggaugagcagauggagcaa

SEQ ID NO: 522795 - RNA, 22 nt, Human
acaaaguuaacaguuggauagu

SEQ ID NO: 522796 - RNA, 22 nt, Human
ucucccagaggaucccagugga

SEQ ID NO: 522797 - RNA, 22 nt, Human
caggggcaagaaugcugucagc

SEQ ID NO: 522798 - RNA, 18 nt, Human
agucccaucuucagcucu

SEQ ID NO: 522799 - RNA, 23 nt, Human
ugaggaccucucaggggccaggc

SEQ ID NO: 522800 - RNA, 22 nt, Human
gucaaguuaagauaaggucaug

SEQ ID NO: 522801 - RNA, 22 nt, Human
caaguaugagaaagcuauuacc

SEQ ID NO: 522802 - RNA, 22 nt, Human
ugagcagcaggaucuucuggua

SEQ ID NO: 522803 - RNA, 22 nt, Human
accuggagucauuugaggagua

SEQ ID NO: 522804 - RNA, 22 nt, Human
ucucagagaacaguuggugcuu

SEQ ID NO: 522805 - RNA, 22 nt, Human
ucagggcucaccagccucugcc

SEQ ID NO: 522806 - RNA, 23 nt, Human
ccaggccucucagagggugugcc

SEQ ID NO: 522807 - RNA, 22 nt, Human
uuaugcuaguauaguccuuaga

SEQ ID NO: 522808 - RNA, 22 nt, Human
caggcucccugggcaguggcag

SEQ ID NO: 522809 - RNA, 22 nt, Human
guaacauaguuugugcuucauc

SEQ ID NO: 522810 - RNA, 17 nt, Human
ugcaggcuccugucccu

SEQ ID NO: 522811 - RNA, 22 nt, Human
agagucugauauuuguaccaga

SEQ ID NO: 522812 - RNA, 22 nt, Human
uaugagaacgggggcguguggg

SEQ ID NO: 522813 - RNA, 22 nt, Human
cuccucuguauugauugggacu

SEQ ID NO: 522814 - RNA, 22 nt, Human
ugcagggccagacuggguugga

SEQ ID NO: 522815 - RNA, 22 nt, Human
gacagaggagaagaugcugugg

SEQ ID NO: 522816 - RNA, 22 nt, Human
aggcccagagagccaguuagug

SEQ ID NO: 522817 - RNA, 22 nt, Human
guggcugcagcggcuguggaga

SEQ ID NO: 522818 - RNA, 22 nt, Human
aaaggucaagcuggacucaggu

SEQ ID NO: 522819 - RNA, 22 nt, Human
ggaggagcccacucaaagggga

SEQ ID NO: 522820 - RNA, 22 nt, Human
ccaguguuagagacugauacag

SEQ ID NO: 522821 - RNA, 22 nt, Human
gugaauggggcaggaaggaugg

SEQ ID NO: 522822 - RNA, 23 nt, Human
ccacagagcugccaauuccugug

SEQ ID NO: 522823 - RNA, 22 nt, Human
cgcuccuugagcgugucggccu

SEQ ID NO: 522824 - RNA, 22 nt, Human
gugcucuggcuggucucccggu

SEQ ID NO: 522825 - RNA, 22 nt, Human
cuguucacagaauccuccccug

SEQ ID NO: 522826 - RNA, 22 nt, Human
cccaggaggcagaaguugcagu

SEQ ID NO: 522827 - RNA, 22 nt, Human
gaaggagagggucaaggauaau

SEQ ID NO: 522828 - RNA, 22 nt, Human
uggcccugggcagaggcaacau

SEQ ID NO: 522829 - RNA, 22 nt, Human
uguggcuuuugcuagcuuugca

SEQ ID NO: 522830 - RNA, 22 nt, Human
auauuucucucagacauggaag

SEQ ID NO: 522831 - RNA, 20 nt, Human
agauggugaaggccagggag

SEQ ID NO: 522832 - RNA, 22 nt, Human
agaagccacaggaaagcagcuu

SEQ ID NO: 522833 - RNA, 21 nt, Human
ucccauuguuccccuccagug

SEQ ID NO: 522834 - RNA, 22 nt, Human
uguuugaauuuugcuaacgugu

SEQ ID NO: 522835 - RNA, 22 nt, Human
uugagucaguaauuccauuucu

SEQ ID NO: 522836 - RNA, 22 nt, Human
cagccaggacagggaaacuagu

SEQ ID NO: 522837 - RNA, 22 nt, Human
cugggaggugcagcaaaaauca

SEQ ID NO: 522838 - RNA, 22 nt, Human
cuguccuuacugcuucuggcuu

SEQ ID NO: 522839 - RNA, 21 nt, Human
guucuuaguuauauucucaau

SEQ ID NO: 522840 - RNA, 21 nt, Human
acagacagggccagugucccc

SEQ ID NO: 522841 - RNA, 22 nt, Human
auuauaaauauuuucuaggggu

SEQ ID NO: 522842 - RNA, 22 nt, Human
agguuucuccuuuaaagcaugg

SEQ ID NO: 522843 - RNA, 22 nt, Human
cugccgaguacagccauagaaa

SEQ ID NO: 522844 - RNA, 22 nt, Human
gccaccugugugggccuuugug

SEQ ID NO: 522845 - RNA, 22 nt, Human
acuuccuggcguagcugacauu

SEQ ID NO: 522846 - RNA, 22 nt, Human
aaucacaugugcucaauuuuaa

SEQ ID NO: 522847 - RNA, 22 nt, Human
uguuuaaucuauaaaauggaga

SEQ ID NO: 522848 - RNA, 22 nt, Human
ccauucugagucuuaugucuuu

SEQ ID NO: 522849 - RNA, 22 nt, Human
uggccccuggcacacggaggau

SEQ ID NO: 522850 - RNA, 19 nt, Human
ggcauccagaacuaccagu

SEQ ID NO: 522851 - RNA, 22 nt, Human
agaaugcaguuugaaauaaggu

SEQ ID NO: 522852 - RNA, 22 nt, Human
aauguacaaaagucagccaacu

SEQ ID NO: 522853 - RNA, 22 nt, Human
uuuugccuaagaaucucucuga

SEQ ID NO: 522854 - RNA, 22 nt, Human
gaggacagugugaucugccagc

SEQ ID NO: 522855 - RNA, 22 nt, Human
agauaauuugaguaaauuaauu

SEQ ID NO: 522856 - RNA, 22 nt, Human
uuugcauucuagaaaaauuucu

SEQ ID NO: 522857 - RNA, 22 nt, Human
uacauugacuuggauuguuaga

SEQ ID NO: 522858 - RNA, 22 nt, Human
aauggccagcugggagaguuga

SEQ ID NO: 522859 - RNA, 22 nt, Human
ggagagcaggguccugagauac

SEQ ID NO: 522860 - RNA, 23 nt, Human
aaaugacuaaauguucuuauaga

SEQ ID NO: 522861 - RNA, 22 nt, Human
ugcacuuuaaaaaauggugaug

SEQ ID NO: 522862 - RNA, 21 nt, Human
auccuugaucagaagagugcu

SEQ ID NO: 522863 - RNA, 22 nt, Human
agaauuuaggaugcaugugaau

SEQ ID NO: 522864 - RNA, 22 nt, Human
uggccucucuaccaggcagccu

SEQ ID NO: 522865 - RNA, 22 nt, Human
ucaagaaagggcuucaccagga

SEQ ID NO: 522866 - RNA, 20 nt, Human
ucagggcaugggacagcccc

SEQ ID NO: 522867 - RNA, 20 nt, Human
augucugaaguaauccauuu

SEQ ID NO: 522868 - RNA, 22 nt, Human
caggcuggucccagagcauugc

SEQ ID NO: 522869 - RNA, 22 nt, Human
agcuccugugugaagccucccu

SEQ ID NO: 522870 - RNA, 22 nt, Human
caaagugcugggauuagugcug

SEQ ID NO: 522871 - RNA, 22 nt, Human
augucuaaaagauaaaguuuaa

SEQ ID NO: 522872 - RNA, 22 nt, Human
acucugaaugugcauguaaauc

SEQ ID NO: 522873 - RNA, 22 nt, Human
acccuucauagaggagaagcug

SEQ ID NO: 522874 - RNA, 22 nt, Human
guguccugccacccugggcuuu

SEQ ID NO: 522875 - RNA, 22 nt, Human
uauuucuguaacucagggucug

SEQ ID NO: 522876 - RNA, 22 nt, Human
cucaaggaaagucuggagaaga

SEQ ID NO: 522877 - RNA, 22 nt, Human
ccugucaguugcugucagggau

SEQ ID NO: 522878 - RNA, 22 nt, Human
uccuucagcucucuauuuagau

SEQ ID NO: 522879 - RNA, 21 nt, Human
gcucccugcucagcuccuggg

SEQ ID NO: 522880 - RNA, 22 nt, Human
uagauuuccucuuccucauucc

SEQ ID NO: 522881 - RNA, 22 nt, Human
ggcuccuguggcaagacagcuu

SEQ ID NO: 522882 - RNA, 22 nt, Human
agcuggcauacuuugcuaggaa

SEQ ID NO: 522883 - RNA, 22 nt, Human
aaaacauuuuacugccaucuca

SEQ ID NO: 522884 - RNA, 22 nt, Human
aauuuguguuaguccacguuca

SEQ ID NO: 522885 - RNA, 22 nt, Human
cuggcucccuggacauggggcc

SEQ ID NO: 522886 - RNA, 20 nt, Human
gcaggcuccgggcuugggag

SEQ ID NO: 522887 - RNA, 22 nt, Human
aagcagccuggcaugaugcuuu

SEQ ID NO: 522888 - RNA, 22 nt, Human
cuguguguccucggacgaguuu

SEQ ID NO: 522889 - RNA, 22 nt, Human
aaauaauguuaggccuuugcuc

SEQ ID NO: 522890 - RNA, 22 nt, Human
aggggcuguggaaaccaacucu

SEQ ID NO: 522891 - RNA, 22 nt, Human
uccaauuuuacgucuguauaaa

SEQ ID NO: 522892 - RNA, 22 nt, Human
cacauugcagcuucuuuuggcu

SEQ ID NO: 522893 - RNA, 20 nt, Human
agugccagggcaggugagag

SEQ ID NO: 522894 - RNA, 22 nt, Human
aggaaacugauguuuuuuacaa

SEQ ID NO: 522895 - RNA, 22 nt, Human
ccagaggugcugggagaggucu

SEQ ID NO: 522896 - RNA, 22 nt, Human
agcagacagguaggaggauaaa

SEQ ID NO: 522897 - RNA, 22 nt, Human
aacagcuuugcuucuggagaca

SEQ ID NO: 522898 - RNA, 22 nt, Human
gcagccaggaaagcuggacccu

SEQ ID NO: 522899 - RNA, 22 nt, Human
ccaaaguccuuucuccaccugc

SEQ ID NO: 522900 - RNA, 22 nt, Human
aggacuccauguguccuggaga

SEQ ID NO: 522901 - RNA, 22 nt, Human
aaggcacucagccuugggacag

SEQ ID NO: 522902 - RNA, 22 nt, Human
ucuguucauguugggcuuuucc

SEQ ID NO: 522903 - RNA, 22 nt, Human
cugagaagcaaagaacugcacu

SEQ ID NO: 522904 - RNA, 22 nt, Human
aggcugcagugcagguaggauu

SEQ ID NO: 522905 - RNA, 22 nt, Human
uaaagaugcuauagugaaggag

SEQ ID NO: 522906 - RNA, 21 nt, Human
aguugcauaggccagccaucc

SEQ ID NO: 522907 - RNA, 21 nt, Human
uugaagcaaggguggcucuga

SEQ ID NO: 522908 - RNA, 17 nt, Human
guaaggcuugcagaugc

SEQ ID NO: 522909 - RNA, 22 nt, Human
cucucuguuaugcuuucaugaa

SEQ ID NO: 522910 - RNA, 22 nt, Human
aagcugccaccagcccagggca

SEQ ID NO: 522911 - RNA, 22 nt, Human
ucagcaggcagugggucacaau

SEQ ID NO: 522912 - RNA, 22 nt, Human
cuuaaagaugucaaggcuguuu

SEQ ID NO: 522913 - RNA, 22 nt, Human
ucauuucuguugugcaucacug

SEQ ID NO: 522914 - RNA, 22 nt, Human
uccaaacacccuccaugcugca

SEQ ID NO: 522915 - RNA, 22 nt, Human
uucugggcucacagagcagcag

SEQ ID NO: 522916 - RNA, 22 nt, Human
ccaguguugaacaguauuugga

SEQ ID NO: 522917 - RNA, 22 nt, Human
cucaaauauguggucagaaagc

SEQ ID NO: 522918 - RNA, 22 nt, Human
ugcacaggccuugaagggagag

SEQ ID NO: 522919 - RNA, 22 nt, Human
cuucuggguaauucuucuucau

SEQ ID NO: 522920 - RNA, 22 nt, Human
ccaggagcaaagaucacuggga

SEQ ID NO: 522921 - RNA, 22 nt, Human
ccagcccuccuccaucagagga

SEQ ID NO: 522922 - RNA, 22 nt, Human
uugaagcaaauucugugcagua

SEQ ID NO: 522923 - RNA, 22 nt, Human
ucccaggcaaaggcagcucauu

SEQ ID NO: 522924 - RNA, 22 nt, Human
uguaauauuguagugacaguac

SEQ ID NO: 522925 - RNA, 22 nt, Human
uguacaaggccaucuacaugcu

SEQ ID NO: 522926 - RNA, 22 nt, Human
agcaggaguguccccuggcugu

SEQ ID NO: 522927 - RNA, 22 nt, Human
ggaagggccucgggcgugggac

SEQ ID NO: 522928 - RNA, 22 nt, Human
ggauguucugggguucucuugu

SEQ ID NO: 522929 - RNA, 22 nt, Human
cugcagaggguuugagcauccu

SEQ ID NO: 522930 - RNA, 21 nt, Human
agcacagcauauccaauguca

SEQ ID NO: 522931 - RNA, 22 nt, Human
ccugugugauuggaagcugaga

SEQ ID NO: 522932 - RNA, 22 nt, Human
uaaauuauggcuggcagagcag

SEQ ID NO: 522933 - RNA, 23 nt, Human
ugcagccacucaggagcucagug

SEQ ID NO: 522934 - RNA, 22 nt, Human
uauguacacauacacuuguaau

SEQ ID NO: 522935 - RNA, 22 nt, Human
accaggcacucuuguggcagug

SEQ ID NO: 522936 - RNA, 22 nt, Human
ucccagacaaucauuggccacc

SEQ ID NO: 522937 - RNA, 22 nt, Human
caaaggcaggugcugaauauuc

SEQ ID NO: 522938 - RNA, 22 nt, Human
cagagcuuccugcugggcuucu

SEQ ID NO: 522939 - RNA, 22 nt, Human
ucucagugacacucuucauaca

SEQ ID NO: 522940 - RNA, 20 nt, Human
aagagcugacucacaguggu

SEQ ID NO: 522941 - RNA, 22 nt, Human
cauuaucucuucuauaugcuag

SEQ ID NO: 522942 - RNA, 22 nt, Human
accuguuuguguccauuaguga

SEQ ID NO: 522943 - RNA, 22 nt, Human
cuccuuccugccccagugauaa

SEQ ID NO: 522944 - RNA, 21 nt, Human
ugcagcugacacccuuuggga

SEQ ID NO: 522945 - RNA, 22 nt, Human
ucggggucuuugacacgcucug

SEQ ID NO: 522946 - RNA, 22 nt, Human
uggaaagacauucagccgcugg

SEQ ID NO: 522947 - RNA, 22 nt, Human
cugaggcagaaaaagcaagggu

SEQ ID NO: 522948 - RNA, 22 nt, Human
gagcuuuaggagaaggagguca

SEQ ID NO: 522949 - RNA, 22 nt, Human
ucagaacauugacauucuuauu

SEQ ID NO: 522950 - RNA, 22 nt, Human
agagaagagucuugucaaauua

SEQ ID NO: 522951 - RNA, 22 nt, Human
auggcagaccugggcuggagaa

SEQ ID NO: 522952 - RNA, 22 nt, Human
cauggccagggagagagaaugu

SEQ ID NO: 522953 - RNA, 22 nt, Human
acaguguucuuggcgcugagug

SEQ ID NO: 522954 - RNA, 20 nt, Human
uccagcauauaaacuccucu

SEQ ID NO: 522955 - RNA, 21 nt, Human
aaaggccauaaucacggagca

SEQ ID NO: 522956 - RNA, 22 nt, Human
gugucugaguuuggaaagucca

SEQ ID NO: 522957 - RNA, 22 nt, Human
cagcccugaaacaaccuccucu

SEQ ID NO: 522958 - RNA, 22 nt, Human
ucugagcuuuuauuaucaaccu

SEQ ID NO: 522959 - RNA, 22 nt, Human
uguaaaagacauuucuaagcaa

SEQ ID NO: 522960 - RNA, 22 nt, Human
gcagggaccugccacugcuguc

SEQ ID NO: 522961 - RNA, 23 nt, Human
ucacaggggccagcgcucugugg

SEQ ID NO: 522962 - RNA, 22 nt, Human
acagcuuugggcaaugcuauga

SEQ ID NO: 522963 - RNA, 22 nt, Human
aggucacacuuggaucauagaa

SEQ ID NO: 522964 - RNA, 22 nt, Human
uccauggggcccaggaugagag

SEQ ID NO: 522965 - RNA, 22 nt, Human
ucaaggaggugcuuggcuucac

SEQ ID NO: 522966 - RNA, 22 nt, Human
acagagagcugugauugaguua

SEQ ID NO: 522967 - RNA, 22 nt, Human
acugggaggcaaagagcaagga

SEQ ID NO: 522968 - RNA, 22 nt, Human
auuuuugcccugcaguacauaa

SEQ ID NO: 522969 - RNA, 22 nt, Human
ggcacucagagauucaggcugu

SEQ ID NO: 522970 - RNA, 22 nt, Human
cagguccaguaaaaagaguccu

SEQ ID NO: 522971 - RNA, 22 nt, Human
ucucccaggugggugccuggag

SEQ ID NO: 522972 - RNA, 22 nt, Human
uccacagauuaaaaacauacuu

SEQ ID NO: 522973 - RNA, 22 nt, Human
gcuaguccacagccauccaggc

SEQ ID NO: 522974 - RNA, 22 nt, Human
aguggcaguagaugagcugguu

SEQ ID NO: 522975 - RNA, 22 nt, Human
agcuccaggaucugaaaguucg

SEQ ID NO: 522976 - RNA, 22 nt, Human
ccuuccuuucagggcuaugccu

SEQ ID NO: 522977 - RNA, 22 nt, Human
aaaggucuacaucacugaaaga

SEQ ID NO: 522978 - RNA, 22 nt, Human
aaucuucauuuugacaagauuc

SEQ ID NO: 522979 - RNA, 22 nt, Human
uucuacacucacccagcuguaa

SEQ ID NO: 522980 - RNA, 22 nt, Human
uggcagaguuauggguauuuau

SEQ ID NO: 522981 - RNA, 18 nt, Human
uccuccuuuggccuuuuc

SEQ ID NO: 522982 - RNA, 20 nt, Human
aguagcagugugacauugac

SEQ ID NO: 522983 - RNA, 22 nt, Human
aauuucaaugcacucaugguug

SEQ ID NO: 522984 - RNA, 20 nt, Human
acaugaacagggcuacagca

SEQ ID NO: 522985 - RNA, 22 nt, Human
aaagucugaaagauaagaguga

SEQ ID NO: 522986 - RNA, 20 nt, Human
agcugguuaucuuaauucuu

SEQ ID NO: 522987 - RNA, 22 nt, Human
auccagggauaaaaguaagguu

SEQ ID NO: 522988 - RNA, 22 nt, Human
ggggggugcugaucaguggagc

SEQ ID NO: 522989 - RNA, 22 nt, Human
auuuagaaguuggagggcaaga

SEQ ID NO: 522990 - RNA, 22 nt, Human
ggcuccagggaguggagagaag

SEQ ID NO: 522991 - RNA, 19 nt, Human
uaccauguugacuuuccug

SEQ ID NO: 522992 - RNA, 22 nt, Human
uccacagugguugaacuaguuu

SEQ ID NO: 522993 - RNA, 22 nt, Human
auccuugaaugacucugcccuc

SEQ ID NO: 522994 - RNA, 22 nt, Human
auuugaaugcagguagcugagu

SEQ ID NO: 522995 - RNA, 22 nt, Human
ugguuugcccacucgagugauu

SEQ ID NO: 522996 - RNA, 18 nt, Human
gcugccugcauuccucac

SEQ ID NO: 522997 - RNA, 22 nt, Human
uucuuucucaacaugaauguuu

SEQ ID NO: 522998 - RNA, 22 nt, Human
cuggccuggcaggggaccucua

SEQ ID NO: 522999 - RNA, 20 nt, Human
uccaagcccuccuuccauuc

SEQ ID NO: 523000 - RNA, 20 nt, Human
ggcccagugaaccaggacgg

SEQ ID NO: 523001 - RNA, 22 nt, Human
gaaucacgguauucugcacggg

SEQ ID NO: 523002 - RNA, 22 nt, Human
ugccuggcccugacagcccugg

SEQ ID NO: 523003 - RNA, 22 nt, Human
gcugagaggcacuaucuccgga

SEQ ID NO: 523004 - RNA, 22 nt, Human
gaacagcugcuagagaucugug

SEQ ID NO: 523005 - RNA, 22 nt, Human
agaagauuuagguugacgcuau

SEQ ID NO: 523006 - RNA, 20 nt, Human
cugggaggucuuccaaauca

SEQ ID NO: 523007 - RNA, 22 nt, Human
caaggaaguuuuaggagaggaa

SEQ ID NO: 523008 - RNA, 22 nt, Human
aggcagguuacaaaaacuuuau

SEQ ID NO: 523009 - RNA, 22 nt, Human
cagugagggaagaucucagcac

SEQ ID NO: 523010 - RNA, 22 nt, Human
uucucugggcuuuucggauccg

SEQ ID NO: 523011 - RNA, 22 nt, Human
auucugagaggcacaaugugga

SEQ ID NO: 523012 - RNA, 23 nt, Human
guggagccacaucacaggcuccu

SEQ ID NO: 523013 - RNA, 22 nt, Human
gaagagcugcaguuuccugggc

SEQ ID NO: 523014 - RNA, 22 nt, Human
agcccaaggcuucccugcuggc

SEQ ID NO: 523015 - RNA, 22 nt, Human
acuguaaccaguguggugagag

SEQ ID NO: 523016 - RNA, 22 nt, Human
augagugugaaguuagcucagu

SEQ ID NO: 523017 - RNA, 23 nt, Human
ugggccacuauagaaaucucuca

SEQ ID NO: 523018 - RNA, 22 nt, Human
acaugaaaagacuaucugauua

SEQ ID NO: 523019 - RNA, 22 nt, Human
acagaaauaacuuuuuauguuu

SEQ ID NO: 523020 - RNA, 22 nt, Human
uuuacaguuccaugugauaggc

SEQ ID NO: 523021 - RNA, 22 nt, Human
ggaaagaccugagauaggaaua

SEQ ID NO: 523022 - RNA, 22 nt, Human
cuggcugcaggaugaggcugcc

SEQ ID NO: 523023 - RNA, 22 nt, Human
uuauuuauucauucugucuguc

SEQ ID NO: 523024 - RNA, 22 nt, Human
ccuggcugccgagugugcagcg

SEQ ID NO: 523025 - RNA, 22 nt, Human
ugggguggauagaaagugaugu

SEQ ID NO: 523026 - RNA, 22 nt, Human
uuucuagaggcuccaggggagu

SEQ ID NO: 523027 - RNA, 22 nt, Human
auugcugaaaguauuuuaugac

SEQ ID NO: 523028 - RNA, 22 nt, Human
ucaaggcaaaguaaauauucaa

SEQ ID NO: 523029 - RNA, 19 nt, Human
cugcucaggucagucuguc

SEQ ID NO: 523030 - RNA, 22 nt, Human
ccugucagcugauggcuaugua

SEQ ID NO: 523031 - RNA, 22 nt, Human
ugcagaagaaaacagcugugug

SEQ ID NO: 523032 - RNA, 22 nt, Human
aaguagacagucaucuacuuug

SEQ ID NO: 523033 - RNA, 22 nt, Human
uuguguuaaggugcaucuagug

SEQ ID NO: 523034 - RNA, 18 nt, Human
ugucauugccagggaagc

SEQ ID NO: 523035 - RNA, 22 nt, Human
ugggagcaagcuggugcuggag

SEQ ID NO: 523036 - RNA, 22 nt, Human
uuguugacgacuugacuuucuc

SEQ ID NO: 523037 - RNA, 22 nt, Human
cuauuagguaugcagccuauuu

SEQ ID NO: 523038 - RNA, 22 nt, Human
guguacaguuagccaccaaauu

SEQ ID NO: 523039 - RNA, 22 nt, Human
augcagagacagauguggcaug

SEQ ID NO: 523040 - RNA, 22 nt, Human
gccacauagaggaggauauuaa

SEQ ID NO: 523041 - RNA, 22 nt, Human
uucucuggcgcgcugugcuaug

SEQ ID NO: 523042 - RNA, 22 nt, Human
agccaugggagacugugggaga

SEQ ID NO: 523043 - RNA, 22 nt, Human
aucuggaagccagauacucagu

SEQ ID NO: 523044 - RNA, 17 nt, Human
gcccugccugcugcccu

SEQ ID NO: 523045 - RNA, 22 nt, Human
caaggccagagccagcgauaag

SEQ ID NO: 523046 - RNA, 22 nt, Human
ugggcagaggcucugaagucca

SEQ ID NO: 523047 - RNA, 22 nt, Human
augggcugagaaucaagaauau

SEQ ID NO: 523048 - RNA, 22 nt, Human
cugggcuuagcagcuccugguc

SEQ ID NO: 523049 - RNA, 22 nt, Human
gacagacaugggacuucauacu

SEQ ID NO: 523050 - RNA, 22 nt, Human
gcagcugaaagggaucucuaca

SEQ ID NO: 523051 - RNA, 20 nt, Human
acuccagguggcaugaggac

SEQ ID NO: 523052 - RNA, 22 nt, Human
aggccagacagcuagaaacagg

SEQ ID NO: 523053 - RNA, 22 nt, Human
ugccugcaagaguuggggcuac

SEQ ID NO: 523054 - RNA, 18 nt, Human
ucucaaaaauaauggcuu

SEQ ID NO: 523055 - RNA, 22 nt, Human
agguccugaagauuuuacuaga

SEQ ID NO: 523056 - RNA, 22 nt, Human
aucaguuuggaacauucaggcc

SEQ ID NO: 523057 - RNA, 22 nt, Human
ugggagaaagaacccugaguga

SEQ ID NO: 523058 - RNA, 22 nt, Human
ggcucacacaugacugggcucu

SEQ ID NO: 523059 - RNA, 22 nt, Human
agugguaacuaaguccugcuua

SEQ ID NO: 523060 - RNA, 22 nt, Human
ugcugccuggagccuuuuguuu

SEQ ID NO: 523061 - RNA, 22 nt, Human
uacaagaugacaggugcaugau

SEQ ID NO: 523062 - RNA, 22 nt, Human
uguuccuucacagcaguggaca

SEQ ID NO: 523063 - RNA, 22 nt, Human
uucuaacucuguuauguguuuc

SEQ ID NO: 523064 - RNA, 22 nt, Human
agagaauuacagaagaauguca

SEQ ID NO: 523065 - RNA, 22 nt, Human
caggcaaggaggcacugaggga

SEQ ID NO: 523066 - RNA, 22 nt, Human
gugcagggcuggcaccggaggc

SEQ ID NO: 523067 - RNA, 22 nt, Human
ggggcugaaccuggaggugguc

SEQ ID NO: 523068 - RNA, 18 nt, Human
cugaaggauccaggugua

SEQ ID NO: 523069 - RNA, 22 nt, Human
gcccggcagucacacacccagg

SEQ ID NO: 523070 - RNA, 22 nt, Human
aaugcaaauucuagggcccuau

SEQ ID NO: 523071 - RNA, 22 nt, Human
cugcucucuguuccccuggauc

SEQ ID NO: 523072 - RNA, 22 nt, Human
aaucaagaaaaugaggauucuu

SEQ ID NO: 523073 - RNA, 23 nt, Human
cgcccagccucagugaccugggc

SEQ ID NO: 523074 - RNA, 22 nt, Human
gccugugacucgucuugggcca

SEQ ID NO: 523075 - RNA, 23 nt, Human
aaggcauuggcuucucucauuuc

SEQ ID NO: 523076 - RNA, 22 nt, Human
aggagggagaugcccauccugg

SEQ ID NO: 523077 - RNA, 22 nt, Human
ugaagauccuaucugcaaauau

SEQ ID NO: 523078 - RNA, 22 nt, Human
acaguagaguaaaugguuagau

SEQ ID NO: 523079 - RNA, 22 nt, Human
ucuggagcuuguuucagauggu

SEQ ID NO: 523080 - RNA, 22 nt, Human
gaguuauucuagguccuuugua

SEQ ID NO: 523081 - RNA, 22 nt, Human
auacauacguacauacguaugu

SEQ ID NO: 523082 - RNA, 22 nt, Human
agcuucagcuugcagcugugau

SEQ ID NO: 523083 - RNA, 22 nt, Human
augcccuggggcuaccucugag

SEQ ID NO: 523084 - RNA, 22 nt, Human
uggcagaaagaaccaugugcaa

SEQ ID NO: 523085 - RNA, 22 nt, Human
accccagcucugagccacacca

SEQ ID NO: 523086 - RNA, 22 nt, Human
ugguuaaaaugcagauucagua

SEQ ID NO: 523087 - RNA, 22 nt, Human
cccagguagugagaaauggagg

SEQ ID NO: 523088 - RNA, 21 nt, Human
ggccucugucauccugggaag

SEQ ID NO: 523089 - RNA, 22 nt, Human
uccacauucucuguuacagaua

SEQ ID NO: 523090 - RNA, 22 nt, Human
ucuggaguagggucugggaauu

SEQ ID NO: 523091 - RNA, 22 nt, Human
ugaggggagaagcagcagccug

SEQ ID NO: 523092 - RNA, 16 nt, Human
agcagccagcacugga

SEQ ID NO: 523093 - RNA, 22 nt, Human
agagucugugcuuucaucagga

SEQ ID NO: 523094 - RNA, 22 nt, Human
accacugcccauggugaaaacu

SEQ ID NO: 523095 - RNA, 22 nt, Human
gguccaggggguagauauguga

SEQ ID NO: 523096 - RNA, 22 nt, Human
ccugggucuguauugguaggua

SEQ ID NO: 523097 - RNA, 22 nt, Human
acaggugguaaaauggacuguc

SEQ ID NO: 523098 - RNA, 22 nt, Human
ucagcagauggguuguguuggc

SEQ ID NO: 523099 - RNA, 22 nt, Human
aaccagagugacacucuacaga

SEQ ID NO: 523100 - RNA, 22 nt, Human
agaauucuccuucagggcagga

SEQ ID NO: 523101 - RNA, 22 nt, Human
uuggcccuuuaugggaugggca

SEQ ID NO: 523102 - RNA, 22 nt, Human
auuuaguuuaggaaaaguaggu

SEQ ID NO: 523103 - RNA, 22 nt, Human
ugccauuucuuucaauauucuu

SEQ ID NO: 523104 - RNA, 22 nt, Human
cggagccugcuuguugcagcug

SEQ ID NO: 523105 - RNA, 22 nt, Human
ucagcacuggcgcugggcaggu

SEQ ID NO: 523106 - RNA, 22 nt, Human
acaguaccugcucucaagcaaa

SEQ ID NO: 523107 - RNA, 22 nt, Human
ccagugggagggagcuaggcca

SEQ ID NO: 523108 - RNA, 22 nt, Human
auauggaaguuaccugacuuca

SEQ ID NO: 523109 - RNA, 22 nt, Human
caauucaaaugcauaguucaca

SEQ ID NO: 523110 - RNA, 22 nt, Human
ugauuuccacgugcacccaggu

SEQ ID NO: 523111 - RNA, 22 nt, Human
uaaggccaauuaacaaccaggg

SEQ ID NO: 523112 - RNA, 22 nt, Human
aucacaggugguaggaaaagaa

SEQ ID NO: 523113 - RNA, 22 nt, Human
gugcccugaggucuucacuuug

SEQ ID NO: 523114 - RNA, 22 nt, Human
uuuauuauccaguguugucaug

SEQ ID NO: 523115 - RNA, 22 nt, Human
aaaucaugugcagagaucagga

SEQ ID NO: 523116 - RNA, 22 nt, Human
uucuucaaauagcagggaguca

SEQ ID NO: 523117 - RNA, 22 nt, Human
gagccagcgccuugccucuggg

SEQ ID NO: 523118 - RNA, 22 nt, Human
ucaggcugauaggaggaacuga

SEQ ID NO: 523119 - RNA, 22 nt, Human
ugguuacccagucgcuggaguu

SEQ ID NO: 523120 - RNA, 22 nt, Human
ccagcuggucugugcucauguu

SEQ ID NO: 523121 - RNA, 22 nt, Human
gcagcauuuguggaaugggccc

SEQ ID NO: 523122 - RNA, 22 nt, Human
aucugucuauguggcuauguau

SEQ ID NO: 523123 - RNA, 22 nt, Human
cccagccuuugcuuccugguuc

SEQ ID NO: 523124 - RNA, 22 nt, Human
agggacuggcucucugagcagg

SEQ ID NO: 523125 - RNA, 22 nt, Human
cccugaggggaguggugaggug

SEQ ID NO: 523126 - RNA, 19 nt, Human
gucuucugaauguggcugc

SEQ ID NO: 523127 - RNA, 22 nt, Human
cucagcacaucuuuacauuucc

SEQ ID NO: 523128 - RNA, 22 nt, Human
augaaguucucaauaaucaugu

SEQ ID NO: 523129 - RNA, 22 nt, Human
uuuaagacuuagauuuauuggg

SEQ ID NO: 523130 - RNA, 22 nt, Human
uugaaaggugcugugugcugau

SEQ ID NO: 523131 - RNA, 22 nt, Human
cagccuguagaauacaguaaau

SEQ ID NO: 523132 - RNA, 22 nt, Human
ucaguuuucucaucugugaaau

SEQ ID NO: 523133 - RNA, 22 nt, Human
agcuuuauauguuguuucucca

SEQ ID NO: 523134 - RNA, 19 nt, Human
gcagaugaugaggcugguc

SEQ ID NO: 523135 - RNA, 22 nt, Human
uccacagggccuuucuggugug

SEQ ID NO: 523136 - RNA, 22 nt, Human
gagggaccuuuacacagacauu

SEQ ID NO: 523137 - RNA, 22 nt, Human
augauugaaaaugacauugcca

SEQ ID NO: 523138 - RNA, 21 nt, Human
gggugggaggacacagcaggc

SEQ ID NO: 523139 - RNA, 22 nt, Human
aguuacuugagacguuuaugaa

SEQ ID NO: 523140 - RNA, 23 nt, Human
uccaccccagcugaggcuuagcc

SEQ ID NO: 523141 - RNA, 22 nt, Human
gagagaggccuccauguacuga

SEQ ID NO: 523142 - RNA, 22 nt, Human
cagaaauucccauuucagauuc

SEQ ID NO: 523143 - RNA, 22 nt, Human
agucuugguccaggcucauuuc

SEQ ID NO: 523144 - RNA, 22 nt, Human
cagagcugguguuacaagucca

SEQ ID NO: 523145 - RNA, 22 nt, Human
caguagcacucugucagugaag

SEQ ID NO: 523146 - RNA, 22 nt, Human
ggucagugacuuuuuucugugg

SEQ ID NO: 523147 - RNA, 22 nt, Human
gucacuguuuccuauuauauuu

SEQ ID NO: 523148 - RNA, 22 nt, Human
ggcucugggucuguggggagcg

SEQ ID NO: 523149 - RNA, 22 nt, Human
ugucaccaugccagcuucugcc

SEQ ID NO: 523150 - RNA, 22 nt, Human
agcuucagugucaggcccgugg

SEQ ID NO: 523151 - RNA, 19 nt, Human
agccuggagggcuggucac

SEQ ID NO: 523152 - RNA, 22 nt, Human
cccugcagcauucucuaacugg

SEQ ID NO: 523153 - RNA, 20 nt, Human
gcucugaccauaucaagaca

SEQ ID NO: 523154 - RNA, 22 nt, Human
guagaauauaugguuaguauug

SEQ ID NO: 523155 - RNA, 22 nt, Human
ccucugaggucauggacuuggc

SEQ ID NO: 523156 - RNA, 22 nt, Human
uagggcagccacccaggcugcu

SEQ ID NO: 523157 - RNA, 22 nt, Human
ugaaacaaauuuggaaaaucua

SEQ ID NO: 523158 - RNA, 23 nt, Human
aaacuugcuauggcugaaaucau

SEQ ID NO: 523159 - RNA, 22 nt, Human
ucaggccacggcucacugagac

SEQ ID NO: 523160 - RNA, 22 nt, Human
acaagauuuuaugacucuuuuu

SEQ ID NO: 523161 - RNA, 22 nt, Human
gcugcucuuuucagagaugaga

SEQ ID NO: 523162 - RNA, 22 nt, Human
caaaugcuaugauuuugaguuu

SEQ ID NO: 523163 - RNA, 23 nt, Human
acagaugaaaguguggcucagag

SEQ ID NO: 523164 - RNA, 22 nt, Human
ugagggcugcuuccagagcuag

SEQ ID NO: 523165 - RNA, 22 nt, Human
ggaaccaggaguuacacgaguu

SEQ ID NO: 523166 - RNA, 19 nt, Human
ccucugccagcccgccucu

SEQ ID NO: 523167 - RNA, 22 nt, Human
cagagcucuauguucauggagg

SEQ ID NO: 523168 - RNA, 22 nt, Human
ugggcagacuaaggucaaagcu

SEQ ID NO: 523169 - RNA, 22 nt, Human
aaagcagccgguucccuggucu

SEQ ID NO: 523170 - RNA, 22 nt, Human
ucaaaugcugccuuugugugcc

SEQ ID NO: 523171 - RNA, 22 nt, Human
uuagaaaaauguucaguaguuu

SEQ ID NO: 523172 - RNA, 22 nt, Human
cccauuuaaacacaagcuuuca

SEQ ID NO: 523173 - RNA, 22 nt, Human
ccagccuggacugggucuugug

SEQ ID NO: 523174 - RNA, 22 nt, Human
gacagagguguccuugagucca

SEQ ID NO: 523175 - RNA, 18 nt, Human
uguuccugccuuucucug

SEQ ID NO: 523176 - RNA, 22 nt, Human
cugaaggauucaaaauggcagg

SEQ ID NO: 523177 - RNA, 22 nt, Human
gaggcaggguguugauuacaga

SEQ ID NO: 523178 - RNA, 22 nt, Human
gucccacaccuugaggggucuu

SEQ ID NO: 523179 - RNA, 23 nt, Human
ucuguucaaggcuuucuccuuga

SEQ ID NO: 523180 - RNA, 21 nt, Human
uuguugagaguuagaacaugg

SEQ ID NO: 523181 - RNA, 22 nt, Human
ccagggcaggagaaagacucac

SEQ ID NO: 523182 - RNA, 22 nt, Human
agcagcaucucuuauugcagug

SEQ ID NO: 523183 - RNA, 22 nt, Human
cugaauggcgaguuaguuaguu

SEQ ID NO: 523184 - RNA, 22 nt, Human
agccuggauccuaggcucagcu

SEQ ID NO: 523185 - RNA, 22 nt, Human
aguggguguagucuuccuccug

SEQ ID NO: 523186 - RNA, 22 nt, Human
cauuagaagaacaguuauauua

SEQ ID NO: 523187 - RNA, 22 nt, Human
auugucuuuggugcuuccagga

SEQ ID NO: 523188 - RNA, 19 nt, Human
agugucaucagcuacucag

SEQ ID NO: 523189 - RNA, 20 nt, Human
ggagggcagcugagaguugg

SEQ ID NO: 523190 - RNA, 22 nt, Human
auauuagcagugaucaaaaugg

SEQ ID NO: 523191 - RNA, 19 nt, Human
ucaaagcaagcauguucug

SEQ ID NO: 523192 - RNA, 18 nt, Human
uccugcagcuucuaugua

SEQ ID NO: 523193 - RNA, 22 nt, Human
ugaaggaaaugacggcagaaga

SEQ ID NO: 523194 - RNA, 21 nt, Human
cuugggcuuguagauggugga

SEQ ID NO: 523195 - RNA, 22 nt, Human
ucaaagcaucagucaauuuagg

SEQ ID NO: 523196 - RNA, 22 nt, Human
cagaaggcuuuguggaguagac

SEQ ID NO: 523197 - RNA, 22 nt, Human
ugcaaacaggagaguaaguaua

SEQ ID NO: 523198 - RNA, 22 nt, Human
uggaugagggcugagcacuggg

SEQ ID NO: 523199 - RNA, 22 nt, Human
ucuaauuuuaggcauuuguuca

SEQ ID NO: 523200 - RNA, 21 nt, Human
gaacauuuggguuguuucuac

SEQ ID NO: 523201 - RNA, 19 nt, Human
ccaggccugcgggcguugg

SEQ ID NO: 523202 - RNA, 22 nt, Human
ccugagacaugaaccaggcucc

SEQ ID NO: 523203 - RNA, 22 nt, Human
uacagcuuugggaaggccccau

SEQ ID NO: 523204 - RNA, 22 nt, Human
uucugggcuugaaaguuuaaua

SEQ ID NO: 523205 - RNA, 19 nt, Human
ggaggccuggguauuugcc

SEQ ID NO: 523206 - RNA, 22 nt, Human
cuccugaguaguagcauuguca

SEQ ID NO: 523207 - RNA, 22 nt, Human
uagaugauggaaaaaagcaaua

SEQ ID NO: 523208 - RNA, 21 nt, Human
gcucuuggaaggggcucagcu

SEQ ID NO: 523209 - RNA, 22 nt, Human
caaugauugcuauuuacauaaa

SEQ ID NO: 523210 - RNA, 22 nt, Human
ugauauuugcugacugcauugu

SEQ ID NO: 523211 - RNA, 22 nt, Human
uugguuuagagagugugguuac

SEQ ID NO: 523212 - RNA, 22 nt, Human
gugaacagauaauagaaaugaa

SEQ ID NO: 523213 - RNA, 17 nt, Human
agcagcuggguugaucu

SEQ ID NO: 523214 - RNA, 22 nt, Human
cugaagcaaaggaucgagcuaa

SEQ ID NO: 523215 - RNA, 22 nt, Human
cuagaaaugcucaagagaaagu

SEQ ID NO: 523216 - RNA, 22 nt, Human
cuuuacagauaggaacuacuca

SEQ ID NO: 523217 - RNA, 19 nt, Human
guagggacagugguucuga

SEQ ID NO: 523218 - RNA, 22 nt, Human
uccucugcuccaucuuuacugu

SEQ ID NO: 523219 - RNA, 22 nt, Human
uaaaugacauucuuaagucuug

SEQ ID NO: 523220 - RNA, 18 nt, Human
ggcugugcguggaggcug

SEQ ID NO: 523221 - RNA, 22 nt, Human
ugcagcuguaacagaggccuca

SEQ ID NO: 523222 - RNA, 22 nt, Human
auguacauuuagaucauuucug

SEQ ID NO: 523223 - RNA, 22 nt, Human
agaagcagaaggaagcagggcc

SEQ ID NO: 523224 - RNA, 22 nt, Human
aggggagcaucugugaugguua

SEQ ID NO: 523225 - RNA, 22 nt, Human
agggcagcuuccauagucuggc

SEQ ID NO: 523226 - RNA, 22 nt, Human
agggcagacuaggauggaagug

SEQ ID NO: 523227 - RNA, 22 nt, Human
agccacccauucccgagcccua

SEQ ID NO: 523228 - RNA, 22 nt, Human
gacagcaggagaucaugauaga

SEQ ID NO: 523229 - RNA, 20 nt, Human
uuccuggggaaugauagaag

SEQ ID NO: 523230 - RNA, 22 nt, Human
ggcugggcuccgggagcaugcg

SEQ ID NO: 523231 - RNA, 21 nt, Human
ugauuuccaucuuaaaauaaa

SEQ ID NO: 523232 - RNA, 22 nt, Human
uuucuuauacuauauugucauc

SEQ ID NO: 523233 - RNA, 22 nt, Human
agggcccucuggcaggccaggc

SEQ ID NO: 523234 - RNA, 22 nt, Human
ggcaggucaucaacuguaauuu

SEQ ID NO: 523235 - RNA, 22 nt, Human
ggcagcugagcauggcuaccuu

SEQ ID NO: 523236 - RNA, 23 nt, Human
ugguaauagggagcagaagguag

SEQ ID NO: 523237 - RNA, 22 nt, Human
caaaauuagggagugagcugga

SEQ ID NO: 523238 - RNA, 22 nt, Human
uagggcagcugcaucaggcacu

SEQ ID NO: 523239 - RNA, 22 nt, Human
gccaccagggggcuccagugag

SEQ ID NO: 523240 - RNA, 22 nt, Human
ucuuguccuaagagcuggauuc

SEQ ID NO: 523241 - RNA, 22 nt, Human
guggugcauccuugaguaagcu

SEQ ID NO: 523242 - RNA, 22 nt, Human
ggcucagguugggucacaugac

SEQ ID NO: 523243 - RNA, 22 nt, Human
ucuaccuggaguccguuguuaa

SEQ ID NO: 523244 - RNA, 20 nt, Human
auugucagccuucagaggag

SEQ ID NO: 523245 - RNA, 22 nt, Human
gagaggcugacuggcuguccug

SEQ ID NO: 523246 - RNA, 22 nt, Human
agagauucauguuuacuguagg

SEQ ID NO: 523247 - RNA, 22 nt, Human
uuagccauuaaauuacaaggug

SEQ ID NO: 523248 - RNA, 19 nt, Human
ucccaagauuucuguauca

SEQ ID NO: 523249 - RNA, 22 nt, Human
uccagggccugagguugaagug

SEQ ID NO: 523250 - RNA, 22 nt, Human
ucacagacaauuguuuuggugu

SEQ ID NO: 523251 - RNA, 22 nt, Human
aaaugagguuaauacagugcuu

SEQ ID NO: 523252 - RNA, 22 nt, Human
gcugugagcugccugugucaca

SEQ ID NO: 523253 - RNA, 22 nt, Human
gucugaggaagaugcaggggga

SEQ ID NO: 523254 - RNA, 22 nt, Human
gaagagcugcucagaacaugau

SEQ ID NO: 523255 - RNA, 22 nt, Human
cagaguuuugugaacaacuugg

SEQ ID NO: 523256 - RNA, 22 nt, Human
guucauauuuaacuaagauagg

SEQ ID NO: 523257 - RNA, 22 nt, Human
acacauuugcauaauaccucau

SEQ ID NO: 523258 - RNA, 22 nt, Human
cuggccugaggccgccuucaga

SEQ ID NO: 523259 - RNA, 22 nt, Human
ucacaaagugaagugugucaug

SEQ ID NO: 523260 - RNA, 22 nt, Human
ugcagauucaaaugaaaugcaa

SEQ ID NO: 523261 - RNA, 22 nt, Human
ggaugcugacuuuggagcaugg

SEQ ID NO: 523262 - RNA, 17 nt, Human
aggccagaugaggcaag

SEQ ID NO: 523263 - RNA, 22 nt, Human
ccagcugcugugaggaccacag

SEQ ID NO: 523264 - RNA, 22 nt, Human
uuuucuaauuuaguuacccucc

SEQ ID NO: 523265 - RNA, 22 nt, Human
cagucccagacauaguaaggga

SEQ ID NO: 523266 - RNA, 22 nt, Human
caggauggagaguuguugguug

SEQ ID NO: 523267 - RNA, 22 nt, Human
caucagagguacuuaaugaaug

SEQ ID NO: 523268 - RNA, 22 nt, Human
aguguuugucccguuagaaaug

SEQ ID NO: 523269 - RNA, 22 nt, Human
aaauggaguucuaaguauagua

SEQ ID NO: 523270 - RNA, 22 nt, Human
uuacuaggccaguuuucacuuu

SEQ ID NO: 523271 - RNA, 22 nt, Human
gcaggccucuguugagggccuu

SEQ ID NO: 523272 - RNA, 20 nt, Human
gccaacgcgcuggggcugcc

SEQ ID NO: 523273 - RNA, 18 nt, Human
cugagggcagccccuggg

SEQ ID NO: 523274 - RNA, 22 nt, Human
cuguacauauacauuuuuuucc

SEQ ID NO: 523275 - RNA, 22 nt, Human
acccugagucagacagccugac

SEQ ID NO: 523276 - RNA, 22 nt, Human
ugggcugagaguaccuuauaaa

SEQ ID NO: 523277 - RNA, 22 nt, Human
gccaccugccaacuugcuggaa

SEQ ID NO: 523278 - RNA, 22 nt, Human
gaggagagagggacugucugca

SEQ ID NO: 523279 - RNA, 22 nt, Human
aaacuguauauuuauggcaugu

SEQ ID NO: 523280 - RNA, 22 nt, Human
uuuacaguaagguggaugguac

SEQ ID NO: 523281 - RNA, 22 nt, Human
acacagccaggguaguaaggcu

SEQ ID NO: 523282 - RNA, 19 nt, Human
gagcgcagagggcagggga

SEQ ID NO: 523283 - RNA, 22 nt, Human
cagcauuggguuaccuuuguuu

SEQ ID NO: 523284 - RNA, 22 nt, Human
ccaggucugucuucuuagcuca

SEQ ID NO: 523285 - RNA, 22 nt, Human
ccagccagcugcccuuggggcc

SEQ ID NO: 523286 - RNA, 17 nt, Human
uggggaagcucagauuu

SEQ ID NO: 523287 - RNA, 22 nt, Human
guauucauauuaaacauaucaa

SEQ ID NO: 523288 - RNA, 22 nt, Human
guguaugaggggagaauguuuu

SEQ ID NO: 523289 - RNA, 22 nt, Human
ccagcuccuucugucuguggag

SEQ ID NO: 523290 - RNA, 22 nt, Human
gaggagcaagaaauagugccca

SEQ ID NO: 523291 - RNA, 22 nt, Human
auacuuacuuuucuucagacua

SEQ ID NO: 523292 - RNA, 22 nt, Human
aggccagccucaggcagggacc

SEQ ID NO: 523293 - RNA, 22 nt, Human
acagaugaaaaagcuuguggau

SEQ ID NO: 523294 - RNA, 22 nt, Human
aaguccagggaucaaaguaggc

SEQ ID NO: 523295 - RNA, 22 nt, Human
cauccagggcagccauggccug

SEQ ID NO: 523296 - RNA, 22 nt, Human
uuguggcugugcaccgcugccu

SEQ ID NO: 523297 - RNA, 22 nt, Human
auuguaucuugucauuaugcau

SEQ ID NO: 523298 - RNA, 22 nt, Human
uagcauuaaagguaagacauua

SEQ ID NO: 523299 - RNA, 22 nt, Human
gugggccacaucccagggcucu

SEQ ID NO: 523300 - RNA, 22 nt, Human
cagcaucuaaucuucaugccgg

SEQ ID NO: 523301 - RNA, 22 nt, Human
caucacagauguuguguggagu

SEQ ID NO: 523302 - RNA, 22 nt, Human
auuaaacaauguaaaguucuug

SEQ ID NO: 523303 - RNA, 20 nt, Human
uggccaccugcgucccagcc

SEQ ID NO: 523304 - RNA, 22 nt, Human
agagcuguucagcagccagguu

SEQ ID NO: 523305 - RNA, 17 nt, Human
ugcauuguuggaaauuu

SEQ ID NO: 523306 - RNA, 22 nt, Human
guggcagcugguaugcagacag

SEQ ID NO: 523307 - RNA, 22 nt, Human
augcaguggcagcuccuggugu

SEQ ID NO: 523308 - RNA, 22 nt, Human
ccugagaggcccucucacuguc

SEQ ID NO: 523309 - RNA, 22 nt, Human
uacccagggcuuuucugaugca

SEQ ID NO: 523310 - RNA, 22 nt, Human
ugcccaaguccuccaccgaggu

SEQ ID NO: 523311 - RNA, 19 nt, Human
agcaggcuaggcugccucu

SEQ ID NO: 523312 - RNA, 21 nt, Human
gaggccacuaauaggggcaga

SEQ ID NO: 523313 - RNA, 22 nt, Human
ugggggcugaguaagaugagau

SEQ ID NO: 523314 - RNA, 22 nt, Human
caagauggagaagcagcaaggg

SEQ ID NO: 523315 - RNA, 22 nt, Human
agagcagauggccagggggccu

SEQ ID NO: 523316 - RNA, 22 nt, Human
gaggcugagacucugaauuuuu

SEQ ID NO: 523317 - RNA, 22 nt, Human
gaaauauuguacuggagauguu

SEQ ID NO: 523318 - RNA, 22 nt, Human
uuuacagagaauguacauaaag

SEQ ID NO: 523319 - RNA, 22 nt, Human
caggcacaaauuucuagauaag

SEQ ID NO: 523320 - RNA, 22 nt, Human
uagaggcauaagagggaagcag

SEQ ID NO: 523321 - RNA, 22 nt, Human
cccaggcagcccuucugacgca

SEQ ID NO: 523322 - RNA, 22 nt, Human
acauauguguuguacaugcaug

SEQ ID NO: 523323 - RNA, 22 nt, Human
cauacauauguggaugucauau

SEQ ID NO: 523324 - RNA, 22 nt, Human
ugagguaggugguaagagauac

SEQ ID NO: 523325 - RNA, 22 nt, Human
augcacaauuaggauauagcuu

SEQ ID NO: 523326 - RNA, 22 nt, Human
ccagucccagcucugccaugcu

SEQ ID NO: 523327 - RNA, 22 nt, Human
ggcagcucugcuccacaugagu

SEQ ID NO: 523328 - RNA, 22 nt, Human
uucauuccugagcccauauuua

SEQ ID NO: 523329 - RNA, 22 nt, Human
gcuuagcaaugugacaagaugc

SEQ ID NO: 523330 - RNA, 22 nt, Human
agaggaugguugaggaagaccu

SEQ ID NO: 523331 - RNA, 22 nt, Human
gaaguucucaaggaucacagaa

SEQ ID NO: 523332 - RNA, 22 nt, Human
uguuuagaggaacuggaaucag

SEQ ID NO: 523333 - RNA, 22 nt, Human
acccagaggugucuagcaagcu

SEQ ID NO: 523334 - RNA, 21 nt, Human
ggauggauagggaagagauuu

SEQ ID NO: 523335 - RNA, 22 nt, Human
gggcuagcagauucuaccuaau

SEQ ID NO: 523336 - RNA, 22 nt, Human
uuucauguuuucuuaaauggca

SEQ ID NO: 523337 - RNA, 22 nt, Human
cugaggucuauuuugaaacugc

SEQ ID NO: 523338 - RNA, 22 nt, Human
agaaauuccuaagguacacaag

SEQ ID NO: 523339 - RNA, 22 nt, Human
ugcuucuggcacuugagggggu

SEQ ID NO: 523340 - RNA, 22 nt, Human
caggccugaguguggaagucuu

SEQ ID NO: 523341 - RNA, 22 nt, Human
ucucagagggaggauuacugcc

SEQ ID NO: 523342 - RNA, 22 nt, Human
gccuggaguuguggugaagcca

SEQ ID NO: 523343 - RNA, 19 nt, Human
cuuauuagagugagagcuu

SEQ ID NO: 523344 - RNA, 22 nt, Human
uugcacagaugagggugaugcu

SEQ ID NO: 523345 - RNA, 22 nt, Human
cuggggcccaucgagggcugag

SEQ ID NO: 523346 - RNA, 20 nt, Human
ccugccuguguuugugauga

SEQ ID NO: 523347 - RNA, 22 nt, Human
uggggcuguccuuagucugaga

SEQ ID NO: 523348 - RNA, 21 nt, Human
ccuggcuccagaacuuccggu

SEQ ID NO: 523349 - RNA, 22 nt, Human
ccugggagccaagccucugugu

SEQ ID NO: 523350 - RNA, 22 nt, Human
auuuacaguuuagcauuucaag

SEQ ID NO: 523351 - RNA, 22 nt, Human
aguaacuuaggagauacauggg

SEQ ID NO: 523352 - RNA, 22 nt, Human
aggccagcacgacagccgcagg

SEQ ID NO: 523353 - RNA, 22 nt, Human
gucucaguaagaaaggcuccug

SEQ ID NO: 523354 - RNA, 22 nt, Human
ggcucaggagaggggcuaaaag

SEQ ID NO: 523355 - RNA, 22 nt, Human
ugggcacagaauagauggccca

SEQ ID NO: 523356 - RNA, 22 nt, Human
caggguuucaccauguuagcag

SEQ ID NO: 523357 - RNA, 19 nt, Human
aauaauguucaugagauug

SEQ ID NO: 523358 - RNA, 22 nt, Human
ugggcuuccuggagccugugcu

SEQ ID NO: 523359 - RNA, 22 nt, Human
uuaagacauucagauauuucua

SEQ ID NO: 523360 - RNA, 22 nt, Human
uggcucagccuggcccuuucau

SEQ ID NO: 523361 - RNA, 22 nt, Human
ggcagcagcaagguuggagcug

SEQ ID NO: 523362 - RNA, 22 nt, Human
uggagcugggaguccugggcug

SEQ ID NO: 523363 - RNA, 22 nt, Human
gacccaggcccaaggcugccag

SEQ ID NO: 523364 - RNA, 22 nt, Human
gggcagguggccucuuguacua

SEQ ID NO: 523365 - RNA, 22 nt, Human
ugccugggagugaccaagacuc

SEQ ID NO: 523366 - RNA, 22 nt, Human
gcaagcaguuguggcuucugag

SEQ ID NO: 523367 - RNA, 22 nt, Human
ucagagaaguaagguggggugc

SEQ ID NO: 523368 - RNA, 23 nt, Human
agguucaggagauggaggaacaa

SEQ ID NO: 523369 - RNA, 22 nt, Human
ccagaaaguucagcugugaaug

SEQ ID NO: 523370 - RNA, 22 nt, Human
agucccagaugacccagcuacu

SEQ ID NO: 523371 - RNA, 22 nt, Human
ucugugugggauaguuugagga

SEQ ID NO: 523372 - RNA, 23 nt, Human
ugggggugcacgggccacaucuu

SEQ ID NO: 523373 - RNA, 21 nt, Human
uguggcugacacccuuuggga

SEQ ID NO: 523374 - RNA, 22 nt, Human
guauuuauaggggaaugagagu

SEQ ID NO: 523375 - RNA, 22 nt, Human
agcugagcugcagaugacugua

SEQ ID NO: 523376 - RNA, 22 nt, Human
cuuaauuuaaaauaguucaggc

SEQ ID NO: 523377 - RNA, 22 nt, Human
uggcagaaguacacaagcaugc

SEQ ID NO: 523378 - RNA, 22 nt, Human
uaucagcaccgcggacagcauc

SEQ ID NO: 523379 - RNA, 22 nt, Human
uucuggagauugagaaggcauu

SEQ ID NO: 523380 - RNA, 22 nt, Human
uggccuugggcagguggccugc

SEQ ID NO: 523381 - RNA, 22 nt, Human
uuucuguaaggacuuaaugcaa

SEQ ID NO: 523382 - RNA, 22 nt, Human
ugcugaaucaaaacaaagguuu

SEQ ID NO: 523383 - RNA, 22 nt, Human
ucuucaaauccuacagugucug

SEQ ID NO: 523384 - RNA, 22 nt, Human
gggcagguguugucaaucuaau

SEQ ID NO: 523385 - RNA, 22 nt, Human
ugccucagcugaggccgcucca

SEQ ID NO: 523386 - RNA, 22 nt, Human
cauuauguucaguagcuuaaaa

SEQ ID NO: 523387 - RNA, 22 nt, Human
uugaauaauguguauguuguua

SEQ ID NO: 523388 - RNA, 22 nt, Human
aaggaaccuggaguagagggag

SEQ ID NO: 523389 - RNA, 22 nt, Human
ggagcuggcagcgcaacccaga

SEQ ID NO: 523390 - RNA, 22 nt, Human
uggaaacugggaguuaaaugua

SEQ ID NO: 523391 - RNA, 22 nt, Human
cuguugcugggaacgcauguca

SEQ ID NO: 523392 - RNA, 22 nt, Human
uggcccugcuuaugucucucuu

SEQ ID NO: 523393 - RNA, 22 nt, Human
guccugguccugccuccccaug

SEQ ID NO: 523394 - RNA, 22 nt, Human
uccugggguuuagagggaagug

SEQ ID NO: 523395 - RNA, 22 nt, Human
uuucuaaggcuaggucuuaagg

SEQ ID NO: 523396 - RNA, 23 nt, Human
ucauaaauauuagcacaguagga

SEQ ID NO: 523397 - RNA, 22 nt, Human
uagcauuagagauagaaauagu

SEQ ID NO: 523398 - RNA, 22 nt, Human
ggcagccaugcacgcugccugg

SEQ ID NO: 523399 - RNA, 23 nt, Human
agcagccauagggaagcaauaca

SEQ ID NO: 523400 - RNA, 22 nt, Human
ucagagucauugcaaguagaag

SEQ ID NO: 523401 - RNA, 22 nt, Human
cacauaauacauguuccacuua

SEQ ID NO: 523402 - RNA, 23 nt, Human
aaguaacagggauaauagcaguu

SEQ ID NO: 523403 - RNA, 18 nt, Human
uggagccauugccaccau

SEQ ID NO: 523404 - RNA, 22 nt, Human
ucaggacagccagggugcagac

SEQ ID NO: 523405 - RNA, 22 nt, Human
ccaggagcagauauggacauaa

SEQ ID NO: 523406 - RNA, 22 nt, Human
agggcagagcugucuaaauggc

SEQ ID NO: 523407 - RNA, 22 nt, Human
aggcugcucugcgaagucagcu

SEQ ID NO: 523408 - RNA, 22 nt, Human
uacaagaaaguccaguggguuu

SEQ ID NO: 523409 - RNA, 23 nt, Human
ucuccuccuagauacagucaugg

SEQ ID NO: 523410 - RNA, 22 nt, Human
agcacugugauuuauaacauuu

SEQ ID NO: 523411 - RNA, 22 nt, Human
aagucuguagaaaaacaguuua

SEQ ID NO: 523412 - RNA, 22 nt, Human
aucaggaagaauuggaugcuac

SEQ ID NO: 523413 - RNA, 22 nt, Human
cagcagcuucuguugaucagaa

SEQ ID NO: 523414 - RNA, 22 nt, Human
cagcacugugauaacugagcca

SEQ ID NO: 523415 - RNA, 22 nt, Human
accugaggcuguuagucuaggu

SEQ ID NO: 523416 - RNA, 22 nt, Human
acagaauugaaaguauaaucug

SEQ ID NO: 523417 - RNA, 22 nt, Human
gagcuggggcggauacucagcu

SEQ ID NO: 523418 - RNA, 22 nt, Human
cuauuaaauacucuucaaauug

SEQ ID NO: 523419 - RNA, 22 nt, Human
gaucuugagcaaguugcauccc

SEQ ID NO: 523420 - RNA, 19 nt, Human
uagucucugaugaggcuuu

SEQ ID NO: 523421 - RNA, 22 nt, Human
gagaagggauauggcuucuuga

SEQ ID NO: 523422 - RNA, 22 nt, Human
ucugggagagggaaagaagacu

SEQ ID NO: 523423 - RNA, 22 nt, Human
ccagagagaguacugggcucug

SEQ ID NO: 523424 - RNA, 22 nt, Human
accaugggucagccaccucagc

SEQ ID NO: 523425 - RNA, 22 nt, Human
uaggacaggugaggggcugugg

SEQ ID NO: 523426 - RNA, 22 nt, Human
auggguuucccucugaaauuau

SEQ ID NO: 523427 - RNA, 22 nt, Human
cgccaggcuugguagcucaugc

SEQ ID NO: 523428 - RNA, 22 nt, Human
ggguccagagccucagcccaga

SEQ ID NO: 523429 - RNA, 22 nt, Human
cucaggaguaguucagcagcug

SEQ ID NO: 523430 - RNA, 22 nt, Human
ugagccagucugucugggugaa

SEQ ID NO: 523431 - RNA, 20 nt, Human
cuuggccuacuuagcuuugu

SEQ ID NO: 523432 - RNA, 21 nt, Human
uucaaugaaaacaaagugagg

SEQ ID NO: 523433 - RNA, 22 nt, Human
augcucuggaguacgugaaauu

SEQ ID NO: 523434 - RNA, 22 nt, Human
ucugggcucugcgaagcccuuc

SEQ ID NO: 523435 - RNA, 22 nt, Human
aggcacugugcuucuuauaugu

SEQ ID NO: 523436 - RNA, 22 nt, Human
ggaucugggcucugccaaucag

SEQ ID NO: 523437 - RNA, 22 nt, Human
agcaggaaguagucuguaagca

SEQ ID NO: 523438 - RNA, 22 nt, Human
ucugaaauguucucuuguuuug

SEQ ID NO: 523439 - RNA, 22 nt, Human
gauguggaugaucuuagauggu

SEQ ID NO: 523440 - RNA, 22 nt, Human
aaaguuuuagcuguccaguucc

SEQ ID NO: 523441 - RNA, 23 nt, Human
ccagccucugggucuucauccag

SEQ ID NO: 523442 - RNA, 22 nt, Human
aaaugcuacauacacaucaggg

SEQ ID NO: 523443 - RNA, 22 nt, Human
gcagggugacguugcccaccuc

SEQ ID NO: 523444 - RNA, 18 nt, Human
aguuuuuaggaagaaaug

SEQ ID NO: 523445 - RNA, 22 nt, Human
gcucagugugguccucagaugu

SEQ ID NO: 523446 - RNA, 22 nt, Human
uccuuagcaacacuguuauaau

SEQ ID NO: 523447 - RNA, 19 nt, Human
gggcacagccuccccccag

SEQ ID NO: 523448 - RNA, 22 nt, Human
gcaguguuucagugcuuuuucu

SEQ ID NO: 523449 - RNA, 22 nt, Human
gcucagaggagcaucauaagga

SEQ ID NO: 523450 - RNA, 22 nt, Human
gccucaguaaccuuaggggaua

SEQ ID NO: 523451 - RNA, 22 nt, Human
cauuuaaucuggcucaugagca

SEQ ID NO: 523452 - RNA, 22 nt, Human
gcugggucagaaucucccugug

SEQ ID NO: 523453 - RNA, 22 nt, Human
gcagaagcugggcagcgaggug

SEQ ID NO: 523454 - RNA, 22 nt, Human
gggcugcuacgagaacugaaua

SEQ ID NO: 523455 - RNA, 18 nt, Human
gaugaagcugcuggggau

SEQ ID NO: 523456 - RNA, 23 nt, Human
gccaggcacaugguggacacgca

SEQ ID NO: 523457 - RNA, 22 nt, Human
agcuuguuagaaauguagacuc

SEQ ID NO: 523458 - RNA, 22 nt, Human
gcucccugacucaguuccugag

SEQ ID NO: 523459 - RNA, 22 nt, Human
auggcaggcccagguguucauu

SEQ ID NO: 523460 - RNA, 22 nt, Human
aggcugaggcagguggaucacu

SEQ ID NO: 523461 - RNA, 22 nt, Human
gcugagagcaguguggccuuaa

SEQ ID NO: 523462 - RNA, 20 nt, Human
ugggcugaggaucaggugcc

SEQ ID NO: 523463 - RNA, 22 nt, Human
ucuggccccuggcaguccugga

SEQ ID NO: 523464 - RNA, 22 nt, Human
aauguguguauuucuaggcgag

SEQ ID NO: 523465 - RNA, 22 nt, Human
cagccuucaaggcuuagcucag

SEQ ID NO: 523466 - RNA, 22 nt, Human
aaaaguucccugguuagaaaag

SEQ ID NO: 523467 - RNA, 22 nt, Human
ucagcaggugaacaucaugcca

SEQ ID NO: 523468 - RNA, 22 nt, Human
augaugugugcugaucaagcuu

SEQ ID NO: 523469 - RNA, 22 nt, Human
accaaggaguuugguauuuuag

SEQ ID NO: 523470 - RNA, 22 nt, Human
acacacucaauugcauaagcac

SEQ ID NO: 523471 - RNA, 22 nt, Human
gucucagugcccaaugccauaa

SEQ ID NO: 523472 - RNA, 22 nt, Human
uccagggagauacuggcugcca

SEQ ID NO: 523473 - RNA, 22 nt, Human
guagggacuguucucaccugag

SEQ ID NO: 523474 - RNA, 22 nt, Human
uggcucagcgcggccuggucuu

SEQ ID NO: 523475 - RNA, 22 nt, Human
uccagggcuccccaacauccag

SEQ ID NO: 523476 - RNA, 22 nt, Human
uggcugagaaguucugguggga

SEQ ID NO: 523477 - RNA, 22 nt, Human
aaauaaguaguuuaguguugug

SEQ ID NO: 523478 - RNA, 22 nt, Human
agcugcaguaaagcucuccagg

SEQ ID NO: 523479 - RNA, 22 nt, Human
acaggccacaguggagucucug

SEQ ID NO: 523480 - RNA, 22 nt, Human
gcagagcuguuaauggagcuga

SEQ ID NO: 523481 - RNA, 22 nt, Human
ucugggcacugcugagccugua

SEQ ID NO: 523482 - RNA, 22 nt, Human
cacagggcagugauuguccaca

SEQ ID NO: 523483 - RNA, 22 nt, Human
ccuggcccuggaauagggcagg

SEQ ID NO: 523484 - RNA, 22 nt, Human
caaggccacguucugcaugcgg

SEQ ID NO: 523485 - RNA, 22 nt, Human
agcugggagcagagccacagcc

SEQ ID NO: 523486 - RNA, 21 nt, Human
ccuggcuucagggugcacugg

SEQ ID NO: 523487 - RNA, 22 nt, Human
agagugggccucugagucccag

SEQ ID NO: 523488 - RNA, 22 nt, Human
gcaggcagucaucuuucauauu

SEQ ID NO: 523489 - RNA, 22 nt, Human
auuccaguucuccucucuaaag

SEQ ID NO: 523490 - RNA, 22 nt, Human
ggccuuggugccauggccaguu

SEQ ID NO: 523491 - RNA, 22 nt, Human
agaucucaccucuguguauuau

SEQ ID NO: 523492 - RNA, 22 nt, Human
uuggcuuccaggggcuuuuaca

SEQ ID NO: 523493 - RNA, 22 nt, Human
agaagccauucccuguaggcuc

SEQ ID NO: 523494 - RNA, 22 nt, Human
aaauuucaagcaaaguagcuau

SEQ ID NO: 523495 - RNA, 22 nt, Human
agccaaagaucagugugcaagu

SEQ ID NO: 523496 - RNA, 22 nt, Human
uggccgggccgggcgccuccac

SEQ ID NO: 523497 - RNA, 22 nt, Human
uuucagauggagguuuaggaca

SEQ ID NO: 523498 - RNA, 22 nt, Human
auauacaguauguacugugguu

SEQ ID NO: 523499 - RNA, 22 nt, Human
gaaugcacuuccaacaucuauu

SEQ ID NO: 523500 - RNA, 22 nt, Human
agaaauguuuauggcugccuau

SEQ ID NO: 523501 - RNA, 22 nt, Human
aagcagcagaccugauuuugaa

SEQ ID NO: 523502 - RNA, 23 nt, Human
gaggaaagaauauagaugcaauc

SEQ ID NO: 523503 - RNA, 22 nt, Human
uaugagaaucugcaguaugcuu

SEQ ID NO: 523504 - RNA, 22 nt, Human
ccuuccuugagaagcaauuccu

SEQ ID NO: 523505 - RNA, 22 nt, Human
uagcagggaagaugaucagaau

SEQ ID NO: 523506 - RNA, 22 nt, Human
ggcugcagcggauuggggauug

SEQ ID NO: 523507 - RNA, 22 nt, Human
gcagcauugugagguccugccc

SEQ ID NO: 523508 - RNA, 22 nt, Human
cuggggccacaacggcgcacgc

SEQ ID NO: 523509 - RNA, 22 nt, Human
aggucauuacaauuaucauuuu

SEQ ID NO: 523510 - RNA, 22 nt, Human
ucaggcucuggguacaccugac

SEQ ID NO: 523511 - RNA, 23 nt, Human
uggauaaagcugugcugcauagg

SEQ ID NO: 523512 - RNA, 22 nt, Human
cugggcagcuaccaccacugcu

SEQ ID NO: 523513 - RNA, 22 nt, Human
uggccuccccuaacagccucuu

SEQ ID NO: 523514 - RNA, 22 nt, Human
gcacagaacacuggugaguccc

SEQ ID NO: 523515 - RNA, 22 nt, Human
uugaccauaccuccaggcaguu

SEQ ID NO: 523516 - RNA, 22 nt, Human
ucuucucccaucuccaggcagg

SEQ ID NO: 523517 - RNA, 22 nt, Human
agacauaagcgagcaucacagg

SEQ ID NO: 523518 - RNA, 22 nt, Human
agaaaucaugucuuauuucuau

SEQ ID NO: 523519 - RNA, 22 nt, Human
gggggcggagcacgugaccacg

SEQ ID NO: 523520 - RNA, 23 nt, Human
ccaaagucgaagucuaguccaga

SEQ ID NO: 523521 - RNA, 22 nt, Human
gggaaacucacaggugcagggg

SEQ ID NO: 523522 - RNA, 22 nt, Human
caaggccacugcucagguuucc

SEQ ID NO: 523523 - RNA, 22 nt, Human
ccaggccugauugggaaucuug

SEQ ID NO: 523524 - RNA, 22 nt, Human
aggauccugcgcuuugggggag

SEQ ID NO: 523525 - RNA, 22 nt, Human
cacuguugaagauacuuccucu

SEQ ID NO: 523526 - RNA, 22 nt, Human
aaugagaacugggaguuggugg

SEQ ID NO: 523527 - RNA, 22 nt, Human
ugguccugagcaccagccugac

SEQ ID NO: 523528 - RNA, 21 nt, Human
ucugggcccaugcugccucac

SEQ ID NO: 523529 - RNA, 17 nt, Human
acaagcaguggccaugg

SEQ ID NO: 523530 - RNA, 19 nt, Human
uucuuacaacacccuggga

SEQ ID NO: 523531 - RNA, 20 nt, Human
caucuugaaggucuuccaca

SEQ ID NO: 523532 - RNA, 23 nt, Human
ucaguccuguaggggcuccaggu

SEQ ID NO: 523533 - RNA, 22 nt, Human
uagugcaaucucuuccucagca

SEQ ID NO: 523534 - RNA, 22 nt, Human
ugcagguguagaguugggcucc

SEQ ID NO: 523535 - RNA, 22 nt, Human
cuggcuuuguucugauugcuuc

SEQ ID NO: 523536 - RNA, 22 nt, Human
cagagcugcucaugguggccag

SEQ ID NO: 523537 - RNA, 22 nt, Human
aaaguguacuaugucaugaaca

SEQ ID NO: 523538 - RNA, 22 nt, Human
gucucagggacugcuucugggg

SEQ ID NO: 523539 - RNA, 22 nt, Human
gggcuggcaucgguugcugaga

SEQ ID NO: 523540 - RNA, 22 nt, Human
ugucaugggucuaaacauugau

SEQ ID NO: 523541 - RNA, 22 nt, Human
agaugcugucacacacacuguu

SEQ ID NO: 523542 - RNA, 22 nt, Human
gcccugagacugagcauggguu

SEQ ID NO: 523543 - RNA, 22 nt, Human
gugcugucguggaacugggcug

SEQ ID NO: 523544 - RNA, 22 nt, Human
ccucacucugcacccugcagca

SEQ ID NO: 523545 - RNA, 22 nt, Human
aucuuugaagaggacuugaagu

SEQ ID NO: 523546 - RNA, 22 nt, Human
auguuacacauaggcauaaaug

SEQ ID NO: 523547 - RNA, 19 nt, Human
ccaggucuggggccagauu

SEQ ID NO: 523548 - RNA, 18 nt, Human
auauggaaugccuggcua

SEQ ID NO: 523549 - RNA, 22 nt, Human
uaguaaucagagguaaacuuua

SEQ ID NO: 523550 - RNA, 23 nt, Human
uucuuucaagaaguucacagugc

SEQ ID NO: 523551 - RNA, 22 nt, Human
gcagcuuuaaacauuggaaaua

SEQ ID NO: 523552 - RNA, 22 nt, Human
ucugggcugugggaauucaaca

SEQ ID NO: 523553 - RNA, 22 nt, Human
ccagccuuacugcccuucagug

SEQ ID NO: 523554 - RNA, 22 nt, Human
ugcaggcuggggaggcagacuu

SEQ ID NO: 523555 - RNA, 22 nt, Human
cugagcuguuacucuguccucg

SEQ ID NO: 523556 - RNA, 22 nt, Human
uauuccuauuucuaaacauaug

SEQ ID NO: 523557 - RNA, 22 nt, Human
uauuuucuggggagagugaacc

SEQ ID NO: 523558 - RNA, 22 nt, Human
ggagcugcauuuagggagccuu

SEQ ID NO: 523559 - RNA, 22 nt, Human
cucaggaaggaagcagggagcc

SEQ ID NO: 523560 - RNA, 22 nt, Human
uucuucaaagaugucuguugga

SEQ ID NO: 523561 - RNA, 22 nt, Human
aaaugcauguagaauaauagag

SEQ ID NO: 523562 - RNA, 22 nt, Human
ugggcagagucguggggaauag

SEQ ID NO: 523563 - RNA, 22 nt, Human
uagugugguaaauaaauguuuu

SEQ ID NO: 523564 - RNA, 22 nt, Human
uaggaagcucuuuguuuuguga

SEQ ID NO: 523565 - RNA, 19 nt, Human
uccagggcaggaacaugua

SEQ ID NO: 523566 - RNA, 19 nt, Human
gacuccaacuuuaagcaug

SEQ ID NO: 523567 - RNA, 22 nt, Human
gaggugagaagggggucagaug

SEQ ID NO: 523568 - RNA, 20 nt, Human
cccacacccuucccacuugg

SEQ ID NO: 523569 - RNA, 22 nt, Human
auucucuguuuccaagaugaaa

SEQ ID NO: 523570 - RNA, 22 nt, Human
acagaugaggaaacagggucag

SEQ ID NO: 523571 - RNA, 16 nt, Human
gcuggagggagggguu

SEQ ID NO: 523572 - RNA, 22 nt, Human
uggcacugggacagaugcucuc

SEQ ID NO: 523573 - RNA, 22 nt, Human
aaggcugggaaacaugcaggcc

SEQ ID NO: 523574 - RNA, 22 nt, Human
cuuagcagauaaaaaccuucag

SEQ ID NO: 523575 - RNA, 23 nt, Human
uggcuggcagaaacugaagcaug

SEQ ID NO: 523576 - RNA, 22 nt, Human
cucaggagagucuuauaucucc

SEQ ID NO: 523577 - RNA, 22 nt, Human
uggagccuguucugagaagccg

SEQ ID NO: 523578 - RNA, 22 nt, Human
accaggcacuccugaggucuga

SEQ ID NO: 523579 - RNA, 22 nt, Human
uaccuuuugcuuauuaugacac

SEQ ID NO: 523580 - RNA, 22 nt, Human
aaacucaaagucagaucagaga

SEQ ID NO: 523581 - RNA, 17 nt, Human
uuagcaaaauagcacuu

SEQ ID NO: 523582 - RNA, 18 nt, Human
uccugggaaaggcauaca

SEQ ID NO: 523583 - RNA, 22 nt, Human
aggagccaagcagaacuaagga

SEQ ID NO: 523584 - RNA, 21 nt, Human
ggcacugagccagauggacuc

SEQ ID NO: 523585 - RNA, 22 nt, Human
agaggcuggauugagcauagac

SEQ ID NO: 523586 - RNA, 22 nt, Human
gccaagcuuauaugaugcuuga

SEQ ID NO: 523587 - RNA, 22 nt, Human
uuucucugaggcuggccucccu

SEQ ID NO: 523588 - RNA, 22 nt, Human
gcuggaggauggacuggaagaa

SEQ ID NO: 523589 - RNA, 22 nt, Human
ugugaagguagcucuuggcacu

SEQ ID NO: 523590 - RNA, 22 nt, Human
gaagaagacauggaacaauagu

SEQ ID NO: 523591 - RNA, 22 nt, Human
cuggcuccaccccaggaggaug

SEQ ID NO: 523592 - RNA, 22 nt, Human
auucagaaagauaugccugguu

SEQ ID NO: 523593 - RNA, 22 nt, Human
ugagcagcaacuguccauggca

SEQ ID NO: 523594 - RNA, 22 nt, Human
ucugugcacuaacauuccuggu

SEQ ID NO: 523595 - RNA, 22 nt, Human
gaaggaggcuccccaaagucug

SEQ ID NO: 523596 - RNA, 22 nt, Human
ucuuagcauuuguuaauaccca

SEQ ID NO: 523597 - RNA, 22 nt, Human
ccugcagggaaucgaggcagaa

SEQ ID NO: 523598 - RNA, 21 nt, Human
uggcucuguucaauauaugga

SEQ ID NO: 523599 - RNA, 22 nt, Human
agaauucuggaguugggaggaa

SEQ ID NO: 523600 - RNA, 22 nt, Human
acuuaaaaagaaucuuuucacg

SEQ ID NO: 523601 - RNA, 21 nt, Human
acuguucaucuguucagaagc

SEQ ID NO: 523602 - RNA, 22 nt, Human
aggagucaggaccaaauggaaa

SEQ ID NO: 523603 - RNA, 22 nt, Human
cccagacugcagagcgggcaga

SEQ ID NO: 523604 - RNA, 22 nt, Human
auucacacuguauacacaggau

SEQ ID NO: 523605 - RNA, 22 nt, Human
aauacaguaauuuugaugaguu

SEQ ID NO: 523606 - RNA, 22 nt, Human
gaauauauuauucagcuuuuca

SEQ ID NO: 523607 - RNA, 22 nt, Human
uuuuaagaugcuaguauuucag

SEQ ID NO: 523608 - RNA, 22 nt, Human
ucaagcaggguagcaagcuggu

SEQ ID NO: 523609 - RNA, 22 nt, Human
ugcaguggaaucuggagagcag

SEQ ID NO: 523610 - RNA, 22 nt, Human
auuaagacugcccauguuuuua

SEQ ID NO: 523611 - RNA, 22 nt, Human
ugugaaggcagagccagugaaa

SEQ ID NO: 523612 - RNA, 22 nt, Human
cagacagaccugcaagggcaca

SEQ ID NO: 523613 - RNA, 22 nt, Human
ccugcccuaauccagagacuag

SEQ ID NO: 523614 - RNA, 22 nt, Human
uaauccaauggcacaauguaug

SEQ ID NO: 523615 - RNA, 22 nt, Human
gcaaggcagcgcggaguagcua

SEQ ID NO: 523616 - RNA, 22 nt, Human
uguacuuccccaaugacagcac

SEQ ID NO: 523617 - RNA, 22 nt, Human
gugcccaguccugccuugacag

SEQ ID NO: 523618 - RNA, 22 nt, Human
gcugggcuggccgccgagaucg

SEQ ID NO: 523619 - RNA, 22 nt, Human
agucugaaggcaaucugcugac

SEQ ID NO: 523620 - RNA, 22 nt, Human
caucuugaugcuuugacagguu

SEQ ID NO: 523621 - RNA, 22 nt, Human
ggggugagaucaaggaagcccu

SEQ ID NO: 523622 - RNA, 22 nt, Human
caugcuuuaccaaagcagugau

SEQ ID NO: 523623 - RNA, 22 nt, Human
agggcagagcacugaauuggga

SEQ ID NO: 523624 - RNA, 18 nt, Human
cagggccccagaauuauc

SEQ ID NO: 523625 - RNA, 22 nt, Human
ccaggcugccgaggaaagaaag

SEQ ID NO: 523626 - RNA, 22 nt, Human
ucuggucccuuuuccugcaguc

SEQ ID NO: 523627 - RNA, 22 nt, Human
agagccagcaacucuagcccug

SEQ ID NO: 523628 - RNA, 22 nt, Human
aggcccaguguggcuuccugga

SEQ ID NO: 523629 - RNA, 22 nt, Human
aaauguuccggguaaggagaaa

SEQ ID NO: 523630 - RNA, 22 nt, Human
gccacacugcuucuuugagccu

SEQ ID NO: 523631 - RNA, 22 nt, Human
agaggcucuggugcagcaugca

SEQ ID NO: 523632 - RNA, 22 nt, Human
ucugggagaagcugaugugaag

SEQ ID NO: 523633 - RNA, 21 nt, Human
guccagagagccggcuccuga

SEQ ID NO: 523634 - RNA, 22 nt, Human
guugaaugaaucauucuaugua

SEQ ID NO: 523635 - RNA, 22 nt, Human
uggcagguagucagaggcgaca

SEQ ID NO: 523636 - RNA, 22 nt, Human
uugcugaaguugcucagcucca

SEQ ID NO: 523637 - RNA, 22 nt, Human
ucuuuccuguaacugcuguuca

SEQ ID NO: 523638 - RNA, 22 nt, Human
acaggugucuaaggcagacagc

SEQ ID NO: 523639 - RNA, 22 nt, Human
aaauagcagcuuugacagcaca

SEQ ID NO: 523640 - RNA, 22 nt, Human
gcucagaaaagugaggcucagu

SEQ ID NO: 523641 - RNA, 22 nt, Human
aagcuucauauaugugugaguc

SEQ ID NO: 523642 - RNA, 22 nt, Human
uccugggcaaagaggggcagug

SEQ ID NO: 523643 - RNA, 22 nt, Human
agaaggguguauacauuuccug

SEQ ID NO: 523644 - RNA, 22 nt, Human
cagaggcuaagaugagugggug

SEQ ID NO: 523645 - RNA, 22 nt, Human
aacuucuugguccugagcuguu

SEQ ID NO: 523646 - RNA, 22 nt, Human
acacauaagaaacuacaaagag

SEQ ID NO: 523647 - RNA, 22 nt, Human
ggagggagcauccccuugcuga

SEQ ID NO: 523648 - RNA, 22 nt, Human
aaaaugugaucuacaaaugcaa

SEQ ID NO: 523649 - RNA, 22 nt, Human
gaacagcagcucguucucgaug

SEQ ID NO: 523650 - RNA, 22 nt, Human
aacucaguguguuucuuaguau

SEQ ID NO: 523651 - RNA, 22 nt, Human
agagagcauugaggaaaucuuc

SEQ ID NO: 523652 - RNA, 22 nt, Human
gaacaguaucaguagugccagu

SEQ ID NO: 523653 - RNA, 22 nt, Human
gccucugcggagcuguacauca

SEQ ID NO: 523654 - RNA, 21 nt, Human
gcagagccugagguucuugag

SEQ ID NO: 523655 - RNA, 22 nt, Human
ucagcaggcaggaggcaugcca

SEQ ID NO: 523656 - RNA, 22 nt, Human
ugcauuaagcacacuuuugaau

SEQ ID NO: 523657 - RNA, 22 nt, Human
agaugguuuugucuuuaugauu

SEQ ID NO: 523658 - RNA, 22 nt, Human
aaaagcaucucaaaggagcuuc

SEQ ID NO: 523659 - RNA, 18 nt, Human
cucauguguggucccagc

SEQ ID NO: 523660 - RNA, 23 nt, Human
cauaaaauauuaguaugguagca

SEQ ID NO: 523661 - RNA, 22 nt, Human
ugggaaugugagcauucauuca

SEQ ID NO: 523662 - RNA, 22 nt, Human
cuauuugucaguuuggcuuuaa

SEQ ID NO: 523663 - RNA, 22 nt, Human
gagaggcuaugagguucugugu

SEQ ID NO: 523664 - RNA, 22 nt, Human
gagggcucuaccaaguaacucu

SEQ ID NO: 523665 - RNA, 22 nt, Human
uuuucacauugucccagcacua

SEQ ID NO: 523666 - RNA, 22 nt, Human
aaaguagaggcauugaucaggu

SEQ ID NO: 523667 - RNA, 17 nt, Human
gagccacccugugcgag

SEQ ID NO: 523668 - RNA, 18 nt, Human
agcuggcccuggcugccg

SEQ ID NO: 523669 - RNA, 22 nt, Human
aaguuugagagccuuuaguaua

SEQ ID NO: 523670 - RNA, 22 nt, Human
agaaaugaauauguagugguua

SEQ ID NO: 523671 - RNA, 22 nt, Human
uaaaucuccuguuuuucaucua

SEQ ID NO: 523672 - RNA, 22 nt, Human
caggcagcauuuacucugauga

SEQ ID NO: 523673 - RNA, 22 nt, Human
uggccugucuuguugugcuaga

SEQ ID NO: 523674 - RNA, 22 nt, Human
auggccaccaucucuaaaacac

SEQ ID NO: 523675 - RNA, 22 nt, Human
ggcuggaaaagacaaagcuauu

SEQ ID NO: 523676 - RNA, 22 nt, Human
ucuagaaauuuugccuuguauu

SEQ ID NO: 523677 - RNA, 22 nt, Human
gaggggccuggcacugagcugg

SEQ ID NO: 523678 - RNA, 22 nt, Human
uaggccaggacagagcuuccag

SEQ ID NO: 523679 - RNA, 20 nt, Human
cucugcagcaaggccugggu

SEQ ID NO: 523680 - RNA, 22 nt, Human
uucuagcaugccuuuuagcaca

SEQ ID NO: 523681 - RNA, 22 nt, Human
auaugaaguuacagguaagaaa

SEQ ID NO: 523682 - RNA, 22 nt, Human
caggccaggguugagaagagaa

SEQ ID NO: 523683 - RNA, 22 nt, Human
ccagaauccaaaacguuuugag

SEQ ID NO: 523684 - RNA, 22 nt, Human
aaacagaaggguagguaaacau

SEQ ID NO: 523685 - RNA, 22 nt, Human
uguacacaaccuacagucugcu

SEQ ID NO: 523686 - RNA, 22 nt, Human
uguggcuguggaugcuuuccag

SEQ ID NO: 523687 - RNA, 22 nt, Human
ucaaguauaucuagucauuagg

SEQ ID NO: 523688 - RNA, 22 nt, Human
gacauuucaaucucauuauggg

SEQ ID NO: 523689 - RNA, 20 nt, Human
cucuccuugccgacuuggca

SEQ ID NO: 523690 - RNA, 17 nt, Human
uguuccauuugaccacc

SEQ ID NO: 523691 - RNA, 22 nt, Human
aggcagaaaauagucauccaaa

SEQ ID NO: 523692 - RNA, 22 nt, Human
uucaugaauguuccaugugagu

SEQ ID NO: 523693 - RNA, 22 nt, Human
ugcaaaggaggaugggaaagaa

SEQ ID NO: 523694 - RNA, 22 nt, Human
agcauuaagagagacugaacug

SEQ ID NO: 523695 - RNA, 22 nt, Human
ucuggagaacuugcaagaggau

SEQ ID NO: 523696 - RNA, 22 nt, Human
ucucuuucuauugcaccaugcu

SEQ ID NO: 523697 - RNA, 22 nt, Human
aauccaauccuacucagaaagu

SEQ ID NO: 523698 - RNA, 17 nt, Human
ggccacagagcuugggg

SEQ ID NO: 523699 - RNA, 22 nt, Human
ggcccagcacagugcuuggggg

SEQ ID NO: 523700 - RNA, 22 nt, Human
ugacuuccugcacucaggugau

SEQ ID NO: 523701 - RNA, 22 nt, Human
agaaauguauucuguauguuuu

SEQ ID NO: 523702 - RNA, 22 nt, Human
accccagggcugccagccuccu

SEQ ID NO: 523703 - RNA, 22 nt, Human
guucacaguguuuucuuugcau

SEQ ID NO: 523704 - RNA, 22 nt, Human
uauuuguccuuauuaagaucug

SEQ ID NO: 523705 - RNA, 22 nt, Human
cauauucuuuaagcaaugcucu

SEQ ID NO: 523706 - RNA, 22 nt, Human
acacagggggcauucuaggagu

SEQ ID NO: 523707 - RNA, 22 nt, Human
acaaguaguaaauuauuaggug

SEQ ID NO: 523708 - RNA, 22 nt, Human
auuauuagauucuuaauuguaa

SEQ ID NO: 523709 - RNA, 22 nt, Human
ugcuucuguuuguuucugucau

SEQ ID NO: 523710 - RNA, 22 nt, Human
cagugcugacagggaggaaccu

SEQ ID NO: 523711 - RNA, 21 nt, Human
ucugagaacuucugcugcagc

SEQ ID NO: 523712 - RNA, 22 nt, Human
ucugggccaacccuuccauggg

SEQ ID NO: 523713 - RNA, 22 nt, Human
uccuggagcuggugucuuuccc

SEQ ID NO: 523714 - RNA, 22 nt, Human
auuuagugaccugaacugaaac

SEQ ID NO: 523715 - RNA, 22 nt, Human
acaaauuuauugaagggcauau

SEQ ID NO: 523716 - RNA, 22 nt, Human
gagacagcagggccagggccug

SEQ ID NO: 523717 - RNA, 22 nt, Human
ccaucagugaaggagacagauu

SEQ ID NO: 523718 - RNA, 22 nt, Human
aagcauaaaacguuacaacaug

SEQ ID NO: 523719 - RNA, 22 nt, Human
ugcauuccuccaccuccugcac

SEQ ID NO: 523720 - RNA, 22 nt, Human
cagcaguguggaagcugagggg

SEQ ID NO: 523721 - RNA, 22 nt, Human
ugcauuaaaaccaucgaccauc

SEQ ID NO: 523722 - RNA, 17 nt, Human
uuucuccuuccaucuca

SEQ ID NO: 523723 - RNA, 22 nt, Human
ucuggcccagccccugagguca

SEQ ID NO: 523724 - RNA, 22 nt, Human
ugaggcaggagaauggcgggaa

SEQ ID NO: 523725 - RNA, 22 nt, Human
gcuucagccgggcacuuaauga

SEQ ID NO: 523726 - RNA, 22 nt, Human
ugaggagcaggguggcuuacuc

SEQ ID NO: 523727 - RNA, 23 nt, Human
auauuagggagauuagcccucua

SEQ ID NO: 523728 - RNA, 22 nt, Human
cucaggauauugggcuggagca

SEQ ID NO: 523729 - RNA, 22 nt, Human
agaaaaugugaacuugugaauu

SEQ ID NO: 523730 - RNA, 22 nt, Human
aguuuucaguaaauauuaguga

SEQ ID NO: 523731 - RNA, 22 nt, Human
gcagggacaucuuugucuagua

SEQ ID NO: 523732 - RNA, 22 nt, Human
acagccugagaguggagcuggc

SEQ ID NO: 523733 - RNA, 22 nt, Human
acagcauuuaaagaaaaugaac

SEQ ID NO: 523734 - RNA, 22 nt, Human
ugucccauggacacaacuucuu

SEQ ID NO: 523735 - RNA, 22 nt, Human
gagggagggacuagcauucucu

SEQ ID NO: 523736 - RNA, 22 nt, Human
gacccauauaggacccuccaaa

SEQ ID NO: 523737 - RNA, 22 nt, Human
uugccuugauucuucucaugug

SEQ ID NO: 523738 - RNA, 22 nt, Human
ccugccaggacauugcuugaag

SEQ ID NO: 523739 - RNA, 22 nt, Human
ggagccuuagacaucugauccu

SEQ ID NO: 523740 - RNA, 22 nt, Human
gccaggucucauaaaugcagcu

SEQ ID NO: 523741 - RNA, 22 nt, Human
cucuggaguucuucaagcuacu

SEQ ID NO: 523742 - RNA, 22 nt, Human
augcaaagcaccacacuaagau

SEQ ID NO: 523743 - RNA, 22 nt, Human
uuuugaaagccagguuuguaug

SEQ ID NO: 523744 - RNA, 22 nt, Human
aaagugcugggauuacaggcuu

SEQ ID NO: 523745 - RNA, 22 nt, Human
gcaggcuccaacuggaggaguu

SEQ ID NO: 523746 - RNA, 22 nt, Human
caaucacaaagagacaaguguc

SEQ ID NO: 523747 - RNA, 23 nt, Human
ugcagaggcaugaucacugcuca

SEQ ID NO: 523748 - RNA, 22 nt, Human
uuaaauauuauguugucugcaa

SEQ ID NO: 523749 - RNA, 22 nt, Human
auaguguuacccuucuuaaagu

SEQ ID NO: 523750 - RNA, 22 nt, Human
cauaaauuguacccauuccaac

SEQ ID NO: 523751 - RNA, 22 nt, Human
gccugccucaaaaucccaguuc

SEQ ID NO: 523752 - RNA, 22 nt, Human
aguuuagacaaagucuugcauu

SEQ ID NO: 523753 - RNA, 22 nt, Human
ucugggccuauagaagucuacc

SEQ ID NO: 523754 - RNA, 21 nt, Human
agcaggaggcagucacagcuc

SEQ ID NO: 523755 - RNA, 22 nt, Human
auguguauccaucugucuauuu

SEQ ID NO: 523756 - RNA, 22 nt, Human
ccuucuccugccuuggguucau

SEQ ID NO: 523757 - RNA, 22 nt, Human
cagcagcucccauccgcugagc

SEQ ID NO: 523758 - RNA, 22 nt, Human
caggggccaaggguccagaccu

SEQ ID NO: 523759 - RNA, 22 nt, Human
caucacugacgcugagauucca

SEQ ID NO: 523760 - RNA, 22 nt, Human
gucugggcagcagcauuucuua

SEQ ID NO: 523761 - RNA, 22 nt, Human
aguccaggcauuccagccauuc

SEQ ID NO: 523762 - RNA, 22 nt, Human
guccaggaaucaaaagauggaa

SEQ ID NO: 523763 - RNA, 22 nt, Human
guggcagcaaaauccugcauuc

SEQ ID NO: 523764 - RNA, 22 nt, Human
uuuuuuguuggguagaacggaa

SEQ ID NO: 523765 - RNA, 22 nt, Human
acucagaguuugcguuccauac

SEQ ID NO: 523766 - RNA, 22 nt, Human
ccaggcagagggauccccaucc

SEQ ID NO: 523767 - RNA, 22 nt, Human
agagcuaggaaugaccacucuc

SEQ ID NO: 523768 - RNA, 22 nt, Human
acagaauaguuggcccugcuau

SEQ ID NO: 523769 - RNA, 22 nt, Human
cuggcaggaagaggaaagguca

SEQ ID NO: 523770 - RNA, 20 nt, Human
aaguuacauuguauuguacc

SEQ ID NO: 523771 - RNA, 22 nt, Human
auuuaacaagacagagaacugg

SEQ ID NO: 523772 - RNA, 22 nt, Human
ggcaaguaauacaggauuauuu

SEQ ID NO: 523773 - RNA, 22 nt, Human
agagaugucgccuugcccaggg

SEQ ID NO: 523774 - RNA, 21 nt, Human
uggccaaaaccauauuauuaa

SEQ ID NO: 523775 - RNA, 22 nt, Human
aaagaugucaguuugaaauaac

SEQ ID NO: 523776 - RNA, 22 nt, Human
cugugccuccagucucgcuucu

SEQ ID NO: 523777 - RNA, 16 nt, Human
aggaggggaauuagga

SEQ ID NO: 523778 - RNA, 22 nt, Human
aaugcacaaaaauuguauguaa

SEQ ID NO: 523779 - RNA, 22 nt, Human
gggcacagcugcuacccagugc

SEQ ID NO: 523780 - RNA, 22 nt, Human
uuucuaagaauauugcucuuaa

SEQ ID NO: 523781 - RNA, 22 nt, Human
aggcacugaaggaagcuugcgc

SEQ ID NO: 523782 - RNA, 22 nt, Human
aucaaaauggaagaauuuggcu

SEQ ID NO: 523783 - RNA, 22 nt, Human
gucccugcccuccugggacuca

SEQ ID NO: 523784 - RNA, 22 nt, Human
ugaauggucacugagcaucugu

SEQ ID NO: 523785 - RNA, 22 nt, Human
ccucaggauacaggagccacag

SEQ ID NO: 523786 - RNA, 22 nt, Human
ggauucugccuuguugcuucaa

SEQ ID NO: 523787 - RNA, 20 nt, Human
ucagaggcugccagcugggg

SEQ ID NO: 523788 - RNA, 22 nt, Human
uuaggcaugcaagauuaagcuc

SEQ ID NO: 523789 - RNA, 22 nt, Human
guugcugauggcaagauuccag

SEQ ID NO: 523790 - RNA, 22 nt, Human
ccugggcucgcgcacuucaccc

SEQ ID NO: 523791 - RNA, 22 nt, Human
aauauuuaugacaggaaguagc

SEQ ID NO: 523792 - RNA, 22 nt, Human
ccagccuccauguagauagcug

SEQ ID NO: 523793 - RNA, 22 nt, Human
agcugguucacuaagcauaaua

SEQ ID NO: 523794 - RNA, 22 nt, Human
aggccucaguuugucaucugua

SEQ ID NO: 523795 - RNA, 22 nt, Human
uuaugaaggaucagguacuugg

SEQ ID NO: 523796 - RNA, 22 nt, Human
aaagcucuuuuccaaguauuga

SEQ ID NO: 523797 - RNA, 21 nt, Human
uauuaauaugucuaagcugau

SEQ ID NO: 523798 - RNA, 22 nt, Human
gagccuggacaucucaggccca

SEQ ID NO: 523799 - RNA, 22 nt, Human
augucuuuauuaauaucaugcc

SEQ ID NO: 523800 - RNA, 22 nt, Human
cuggcuccaaauucugauguuc

SEQ ID NO: 523801 - RNA, 22 nt, Human
uucugggcauguuacauucugu

SEQ ID NO: 523802 - RNA, 22 nt, Human
ugggacacccucacgccugcac

SEQ ID NO: 523803 - RNA, 22 nt, Human
agggcagcacaaggcauggacu

SEQ ID NO: 523804 - RNA, 22 nt, Human
uacaguaacauguuguacaagc

SEQ ID NO: 523805 - RNA, 22 nt, Human
uccugcaguuacaucccagcca

SEQ ID NO: 523806 - RNA, 22 nt, Human
uccugggccaagggcugugagg

SEQ ID NO: 523807 - RNA, 22 nt, Human
ugaggggcgcuggcagguuccu

SEQ ID NO: 523808 - RNA, 22 nt, Human
acucuggccccaggaucugugu

SEQ ID NO: 523809 - RNA, 22 nt, Human
uaggccagaggagcagcuuugg

SEQ ID NO: 523810 - RNA, 22 nt, Human
uccagggaagagcagaggcuac

SEQ ID NO: 523811 - RNA, 22 nt, Human
acaauguaggauauguacuugu

SEQ ID NO: 523812 - RNA, 22 nt, Human
ggacacaaaagugaauaaaaua

SEQ ID NO: 523813 - RNA, 17 nt, Human
cugucugcugcuuccuc

SEQ ID NO: 523814 - RNA, 22 nt, Human
caggcaugaucauaggaguuua

SEQ ID NO: 523815 - RNA, 22 nt, Human
aauggagacuucaaaauggauu

SEQ ID NO: 523816 - RNA, 22 nt, Human
acaaugcaccagcaucuucacc

SEQ ID NO: 523817 - RNA, 22 nt, Human
ccacagaguuacaaaacaguca

SEQ ID NO: 523818 - RNA, 22 nt, Human
gaccuggcuuugggccccggca

SEQ ID NO: 523819 - RNA, 22 nt, Human
cuguggcugcguaggucuggca

SEQ ID NO: 523820 - RNA, 19 nt, Human
aggcagaggcuuggcuagc

SEQ ID NO: 523821 - RNA, 21 nt, Human
aggugccaaggagaagcaggc

SEQ ID NO: 523822 - RNA, 22 nt, Human
ugccuucaccaggccuucagcc

SEQ ID NO: 523823 - RNA, 22 nt, Human
caaaugcaggucagcagguguc

SEQ ID NO: 523824 - RNA, 22 nt, Human
caggcccucgcccgcagcgacc

SEQ ID NO: 523825 - RNA, 22 nt, Human
aaagaacagauguguggugcau

SEQ ID NO: 523826 - RNA, 22 nt, Human
cuguccugcccacccugcaggg

SEQ ID NO: 523827 - RNA, 22 nt, Human
acagacauuuuaagacacuuua

SEQ ID NO: 523828 - RNA, 22 nt, Human
acaugcaugucuaugggcaggu

SEQ ID NO: 523829 - RNA, 22 nt, Human
aaugucaaaauggaaugagacu

SEQ ID NO: 523830 - RNA, 23 nt, Human
cccagagcacagccuccagaugc

SEQ ID NO: 523831 - RNA, 22 nt, Human
cuuugaaaacacacgaauagac

SEQ ID NO: 523832 - RNA, 22 nt, Human
ugcacuuuuauaucacucuggc

SEQ ID NO: 523833 - RNA, 22 nt, Human
agggcagcacagcugugcuccu

SEQ ID NO: 523834 - RNA, 22 nt, Human
ucuguggcuguuaucuuuauau

SEQ ID NO: 523835 - RNA, 23 nt, Human
caugggagugagaaugccagcuc

SEQ ID NO: 523836 - RNA, 22 nt, Human
ucaggauguuaauauagcauua

SEQ ID NO: 523837 - RNA, 22 nt, Human
agcugccuguccuaggccauca

SEQ ID NO: 523838 - RNA, 22 nt, Human
cagagcagaagcgguccucaca

SEQ ID NO: 523839 - RNA, 22 nt, Human
aagccucuggggccucaucugu

SEQ ID NO: 523840 - RNA, 22 nt, Human
agggggcuggagacaccuccuc

SEQ ID NO: 523841 - RNA, 22 nt, Human
aggauuuaaucaguuggcauuu

SEQ ID NO: 523842 - RNA, 22 nt, Human
agcagggaggcccagggcacug

SEQ ID NO: 523843 - RNA, 22 nt, Human
ucucaggaagugauauugagac

SEQ ID NO: 523844 - RNA, 23 nt, Human
ggguccagagaagccauuagggc

SEQ ID NO: 523845 - RNA, 22 nt, Human
aggucugucuggccccaugaau

SEQ ID NO: 523846 - RNA, 22 nt, Human
cuggggacucauucagagcaua

SEQ ID NO: 523847 - RNA, 22 nt, Human
gacaagacagcuugcagacaac

SEQ ID NO: 523848 - RNA, 22 nt, Human
gagagcuggauucuggauaggu

SEQ ID NO: 523849 - RNA, 22 nt, Human
ccuggcugaacaaagucccucc

SEQ ID NO: 523850 - RNA, 22 nt, Human
ccugggcuuucaaaaccagccu

SEQ ID NO: 523851 - RNA, 22 nt, Human
auaaaaacugacccauccuuug

SEQ ID NO: 523852 - RNA, 22 nt, Human
agaugcugugucuguucccuug

SEQ ID NO: 523853 - RNA, 22 nt, Human
gcagcucccaucagggcacaga

SEQ ID NO: 523854 - RNA, 18 nt, Human
agugucuggauauuuggg

SEQ ID NO: 523855 - RNA, 18 nt, Human
ucugucuguacaaguauc

SEQ ID NO: 523856 - RNA, 22 nt, Human
aaaaguauuuuggaucucagau

SEQ ID NO: 523857 - RNA, 22 nt, Human
uauaauccauucauugauuucu

SEQ ID NO: 523858 - RNA, 22 nt, Human
ugaggccugaagccuggagccu

SEQ ID NO: 523859 - RNA, 17 nt, Human
cagugcagagcccuuuc

SEQ ID NO: 523860 - RNA, 22 nt, Human
auaacaugaccugugcuucaca

SEQ ID NO: 523861 - RNA, 22 nt, Human
aauaauguugacgauagucuua

SEQ ID NO: 523862 - RNA, 22 nt, Human
gccuggcaaggcccuguugacu

SEQ ID NO: 523863 - RNA, 22 nt, Human
gcugccucaggcaccuccuggc

SEQ ID NO: 523864 - RNA, 22 nt, Human
aggucagaagugccagggaauu

SEQ ID NO: 523865 - RNA, 22 nt, Human
uugacagcuauuuugcuuugau

SEQ ID NO: 523866 - RNA, 22 nt, Human
aaaggaggccacauggcuagga

SEQ ID NO: 523867 - RNA, 22 nt, Human
cacagagacagaagcacuuaug

SEQ ID NO: 523868 - RNA, 22 nt, Human
agagccagaccauugccgugca

SEQ ID NO: 523869 - RNA, 22 nt, Human
gagagguagcaguaagaacagg

SEQ ID NO: 523870 - RNA, 22 nt, Human
uggcugcuuguuuuagugaggc

SEQ ID NO: 523871 - RNA, 22 nt, Human
gacccuccacucacugcugugu

SEQ ID NO: 523872 - RNA, 22 nt, Human
acauuaucccuggcacaacugc

SEQ ID NO: 523873 - RNA, 22 nt, Human
ugagugaggaagcgguggagga

SEQ ID NO: 523874 - RNA, 22 nt, Human
auccugggcagugugucacucu

SEQ ID NO: 523875 - RNA, 22 nt, Human
ccuccagcugccucagucucuu

SEQ ID NO: 523876 - RNA, 22 nt, Human
uaugagaaaauaaauaucuguu

SEQ ID NO: 523877 - RNA, 22 nt, Human
ucucagagugacaaugagaauu

SEQ ID NO: 523878 - RNA, 22 nt, Human
cugggugucaggagacaugaug

SEQ ID NO: 523879 - RNA, 21 nt, Human
aggguccuacagggcucagga

SEQ ID NO: 523880 - RNA, 22 nt, Human
uuuaaaaaacuagucugagucu

SEQ ID NO: 523881 - RNA, 22 nt, Human
cccuuccucccaggcuucugug

SEQ ID NO: 523882 - RNA, 22 nt, Human
aauguuguuuuucugcaugucu

SEQ ID NO: 523883 - RNA, 22 nt, Human
agggccugagaccguggcuuga

SEQ ID NO: 523884 - RNA, 22 nt, Human
aguagaauguucuaugucaaug

SEQ ID NO: 523885 - RNA, 22 nt, Human
ugauggcuaucccuggaagggc

SEQ ID NO: 523886 - RNA, 22 nt, Human
uauuuagugauagaagcaagga

SEQ ID NO: 523887 - RNA, 22 nt, Human
gaggucaggcuugcagcagggu

SEQ ID NO: 523888 - RNA, 20 nt, Human
cugaagagacuggaggggca

SEQ ID NO: 523889 - RNA, 22 nt, Human
cugucuuuuacuaucauuuacu

SEQ ID NO: 523890 - RNA, 20 nt, Human
caggucuucauguggcuguc

SEQ ID NO: 523891 - RNA, 22 nt, Human
gcuggccucuacaggccggcca

SEQ ID NO: 523892 - RNA, 22 nt, Human
uggcucagauuuuuguaggcuu

SEQ ID NO: 523893 - RNA, 23 nt, Human
agaugagccaacaccuccaugcc

SEQ ID NO: 523894 - RNA, 22 nt, Human
caguacugcuugugggagcaga

SEQ ID NO: 523895 - RNA, 22 nt, Human
cugaggcagagggcagaccaga

SEQ ID NO: 523896 - RNA, 22 nt, Human
ugcugaaugguaaagaaguaua

SEQ ID NO: 523897 - RNA, 22 nt, Human
ugcucugaaggggaagggaugg

SEQ ID NO: 523898 - RNA, 22 nt, Human
aauguguauaugaacauacagg

SEQ ID NO: 523899 - RNA, 19 nt, Human
agaggcaaggguggaagua

SEQ ID NO: 523900 - RNA, 21 nt, Human
uaaauaauaaguugcugagau

SEQ ID NO: 523901 - RNA, 22 nt, Human
agggaucacgguggacuuggau

SEQ ID NO: 523902 - RNA, 22 nt, Human
aggcucagaggugagcaucugc

SEQ ID NO: 523903 - RNA, 22 nt, Human
caggugaaaaagcaaccauauu

SEQ ID NO: 523904 - RNA, 22 nt, Human
acagaggccucguagguacaac

SEQ ID NO: 523905 - RNA, 18 nt, Human
guucaaggucaagagaga

SEQ ID NO: 523906 - RNA, 22 nt, Human
uucugggcucccacauauuuca

SEQ ID NO: 523907 - RNA, 22 nt, Human
gcuggcucccagaggccccagc

SEQ ID NO: 523908 - RNA, 22 nt, Human
acauguguggacaugaaucuac

SEQ ID NO: 523909 - RNA, 22 nt, Human
augcauaauguauguauugacu

SEQ ID NO: 523910 - RNA, 22 nt, Human
ugaggccaaugacccugggcag

SEQ ID NO: 523911 - RNA, 22 nt, Human
aaacuuuaagacaguccucaag

SEQ ID NO: 523912 - RNA, 22 nt, Human
gggcugcuuccuggggaaugcu

SEQ ID NO: 523913 - RNA, 22 nt, Human
cagaugugccuccagggcuuug

SEQ ID NO: 523914 - RNA, 22 nt, Human
ucuuagaaugucaacugauguu

SEQ ID NO: 523915 - RNA, 22 nt, Human
aaaaagguugauccagauuagg

SEQ ID NO: 523916 - RNA, 22 nt, Human
cuugccuucuuuuccuauagaa

SEQ ID NO: 523917 - RNA, 21 nt, Human
gcacagugccaggcacacagu

SEQ ID NO: 523918 - RNA, 22 nt, Human
gaugcaaacugugacauagagu

SEQ ID NO: 523919 - RNA, 22 nt, Human
cacucuccagcacaccccauuu

SEQ ID NO: 523920 - RNA, 22 nt, Human
gcugggcucauuugugugucug

SEQ ID NO: 523921 - RNA, 22 nt, Human
gugugcagggggccagcgcagc

SEQ ID NO: 523922 - RNA, 22 nt, Human
caggguccaucuuucaucacug

SEQ ID NO: 523923 - RNA, 22 nt, Human
cccagcucuggaagguggggga

SEQ ID NO: 523924 - RNA, 20 nt, Human
agucccaacauucagcucug

SEQ ID NO: 523925 - RNA, 22 nt, Human
cucaggagaugacagaagguau

SEQ ID NO: 523926 - RNA, 22 nt, Human
cugucugucaccaaaacagacu

SEQ ID NO: 523927 - RNA, 22 nt, Human
cccuggaguccuggcaguugau

SEQ ID NO: 523928 - RNA, 22 nt, Human
gcucagcugagcgaaggacaug

SEQ ID NO: 523929 - RNA, 22 nt, Human
gagcugaguuaccuccagauca

SEQ ID NO: 523930 - RNA, 17 nt, Human
ggcagcugugugcaugc

SEQ ID NO: 523931 - RNA, 22 nt, Human
cccagcuugcccaggacugagg

SEQ ID NO: 523932 - RNA, 22 nt, Human
ugugucugcacugaguccucac

SEQ ID NO: 523933 - RNA, 22 nt, Human
gcaccuggcugcccagguggag

SEQ ID NO: 523934 - RNA, 22 nt, Human
cugaggacauugaugaggcaau

SEQ ID NO: 523935 - RNA, 22 nt, Human
auauauuuugcggucacguggc

SEQ ID NO: 523936 - RNA, 22 nt, Human
guuuauuagaguuuucugucug

SEQ ID NO: 523937 - RNA, 22 nt, Human
gccuucaguagugucagcugua

SEQ ID NO: 523938 - RNA, 22 nt, Human
auaaggcaucucucaguuagca

SEQ ID NO: 523939 - RNA, 22 nt, Human
gagagugaaggcuucccagcaa

SEQ ID NO: 523940 - RNA, 22 nt, Human
agaggcugaaugaugucaucau

SEQ ID NO: 523941 - RNA, 22 nt, Human
gagagugaggcaucaggggcag

SEQ ID NO: 523942 - RNA, 22 nt, Human
uugaagauaggccaggaugagc

SEQ ID NO: 523943 - RNA, 22 nt, Human
uguguucugaaggagaagagug

SEQ ID NO: 523944 - RNA, 22 nt, Human
ugaacauauucaccucuaaaua

SEQ ID NO: 523945 - RNA, 22 nt, Human
uucauuacugcgguagucacac

SEQ ID NO: 523946 - RNA, 22 nt, Human
gcucuguguugucagaggcacc

SEQ ID NO: 523947 - RNA, 17 nt, Human
agcacuaaaaugcuucc

SEQ ID NO: 523948 - RNA, 21 nt, Human
aguuugaugcaauuucugaga

SEQ ID NO: 523949 - RNA, 22 nt, Human
auggacaggcugagcuuccuca

SEQ ID NO: 523950 - RNA, 22 nt, Human
caggcagcagaggaguguggga

SEQ ID NO: 523951 - RNA, 22 nt, Human
caggauggagggagggcuguua

SEQ ID NO: 523952 - RNA, 22 nt, Human
auuucuaaagagggugguuugg

SEQ ID NO: 523953 - RNA, 22 nt, Human
agaauacaauuguucaguaaua

SEQ ID NO: 523954 - RNA, 22 nt, Human
uuaugcaaaggggccucuuccu

SEQ ID NO: 523955 - RNA, 22 nt, Human
ucuguacuuuuauuuuggcacu

SEQ ID NO: 523956 - RNA, 22 nt, Human
cagagagagugggguguggauu

SEQ ID NO: 523957 - RNA, 22 nt, Human
uccagccaugacucggacagug

SEQ ID NO: 523958 - RNA, 22 nt, Human
uguguauucagcaagcgaaaca

SEQ ID NO: 523959 - RNA, 22 nt, Human
uuuauuuauaagccacuugcug

SEQ ID NO: 523960 - RNA, 22 nt, Human
uagaugauuuucagucaaagca

SEQ ID NO: 523961 - RNA, 22 nt, Human
ucagaagcagauauuucaaaau

SEQ ID NO: 523962 - RNA, 19 nt, Human
acaggggcuagcggaagca

SEQ ID NO: 523963 - RNA, 22 nt, Human
ucucugggaucagguggcccag

SEQ ID NO: 523964 - RNA, 22 nt, Human
caggcugcagcagcaguggccc

SEQ ID NO: 523965 - RNA, 22 nt, Human
ucucagaggugcccuggcaucu

SEQ ID NO: 523966 - RNA, 22 nt, Human
agugcuccuauggaucaguugu

SEQ ID NO: 523967 - RNA, 21 nt, Human
gagcugggcgaggcuccgggg

SEQ ID NO: 523968 - RNA, 22 nt, Human
gcaggcuccaggccggccccuu

SEQ ID NO: 523969 - RNA, 22 nt, Human
gacagcuucgaggaggugagcu

SEQ ID NO: 523970 - RNA, 22 nt, Human
cacaggcuccggccuugcagcc

SEQ ID NO: 523971 - RNA, 22 nt, Human
uacagauacagaucuagauaca

SEQ ID NO: 523972 - RNA, 22 nt, Human
auguaucagaaauagcauuggc

SEQ ID NO: 523973 - RNA, 22 nt, Human
agcugccauggccugaauuuac

SEQ ID NO: 523974 - RNA, 22 nt, Human
agugaaaacacuaguucuugcc

SEQ ID NO: 523975 - RNA, 23 nt, Human
gcugacugugaaauucuggagcu

SEQ ID NO: 523976 - RNA, 20 nt, Human
gcuucucagggcuucucuga

SEQ ID NO: 523977 - RNA, 22 nt, Human
acaggcuucucacagaaaaggg

SEQ ID NO: 523978 - RNA, 22 nt, Human
agccagcaucccuucagucucc

SEQ ID NO: 523979 - RNA, 22 nt, Human
uggcagguuucguuaaaaaugg

SEQ ID NO: 523980 - RNA, 19 nt, Human
uggaggagaggaaaaguca

SEQ ID NO: 523981 - RNA, 21 nt, Human
cuggacugaggagacagucgc

SEQ ID NO: 523982 - RNA, 22 nt, Human
agaggaugauuuuaaggacacu

SEQ ID NO: 523983 - RNA, 18 nt, Human
gugagcagagagcaucac

SEQ ID NO: 523984 - RNA, 22 nt, Human
uuuacaagaaaucaugaugcua

SEQ ID NO: 523985 - RNA, 22 nt, Human
acuagaaaguuuccagaguuau

SEQ ID NO: 523986 - RNA, 22 nt, Human
auaguaacuggcauguuuauga

SEQ ID NO: 523987 - RNA, 22 nt, Human
aguggcagagugcacucaggca

SEQ ID NO: 523988 - RNA, 22 nt, Human
ugacuugucucuuugggagaca

SEQ ID NO: 523989 - RNA, 22 nt, Human
uggccaggccucuuggugccca

SEQ ID NO: 523990 - RNA, 22 nt, Human
ugcccugggaguuggagcugcu

SEQ ID NO: 523991 - RNA, 22 nt, Human
uccagggcuguuacuuuacaua

SEQ ID NO: 523992 - RNA, 22 nt, Human
ugcacacacaugaaguagcaug

SEQ ID NO: 523993 - RNA, 22 nt, Human
acuaaauaguuuugacagaaca

SEQ ID NO: 523994 - RNA, 23 nt, Human
agcuggaggcugucuacucccaa

SEQ ID NO: 523995 - RNA, 17 nt, Human
uggcacagaggugcuau

SEQ ID NO: 523996 - RNA, 19 nt, Human
uccucugguaccacccuug

SEQ ID NO: 523997 - RNA, 22 nt, Human
caaacauugcuaccagagguuu

SEQ ID NO: 523998 - RNA, 22 nt, Human
uaaguuuaaauguacaugaagc

SEQ ID NO: 523999 - RNA, 22 nt, Human
gcccagcacuaaaagcuuugcu

SEQ ID NO: 524000 - RNA, 22 nt, Human
gcuucuggaagcauaugcaaga

SEQ ID NO: 524001 - RNA, 22 nt, Human
uugcugaaguauugugaauccu

SEQ ID NO: 524002 - RNA, 18 nt, Human
aggcacuggaauuaaggg

SEQ ID NO: 524003 - RNA, 22 nt, Human
ucucagaauuguguccacuggg

SEQ ID NO: 524004 - RNA, 22 nt, Human
ucucaguggcuuccucacuuuu

SEQ ID NO: 524005 - RNA, 17 nt, Human
uuccaguuuaguauugu

SEQ ID NO: 524006 - RNA, 22 nt, Human
aggcuguuuuguauaaacugga

SEQ ID NO: 524007 - RNA, 22 nt, Human
aaggcaguaaaaucuaccuugc

SEQ ID NO: 524008 - RNA, 19 nt, Human
auguaugaggucuucugcu

SEQ ID NO: 524009 - RNA, 22 nt, Human
auguagcaugaggcacugugcc

SEQ ID NO: 524010 - RNA, 22 nt, Human
agggaaacuagacugccuuucu

SEQ ID NO: 524011 - RNA, 22 nt, Human
auguacauuuguaguaauauca

SEQ ID NO: 524012 - RNA, 22 nt, Human
cuggccugagaaugcuacccuu

SEQ ID NO: 524013 - RNA, 22 nt, Human
acagaggcugcgcuugggaacg

SEQ ID NO: 524014 - RNA, 22 nt, Human
caggaaaauggaaucaccugua

SEQ ID NO: 524015 - RNA, 22 nt, Human
ggcugccaggagaagcucagug

SEQ ID NO: 524016 - RNA, 22 nt, Human
caaggccaguucaccaagggca

SEQ ID NO: 524017 - RNA, 22 nt, Human
cugugcuuucgagaugugaucu

SEQ ID NO: 524018 - RNA, 22 nt, Human
agcuguggcagcagccguggca

SEQ ID NO: 524019 - RNA, 22 nt, Human
aaaaguuaccucuguaauauaa

SEQ ID NO: 524020 - RNA, 22 nt, Human
aucaggaaagaguggaacucug

SEQ ID NO: 524021 - RNA, 22 nt, Human
uagacauuggccauuccugugg

SEQ ID NO: 524022 - RNA, 20 nt, Human
uauuucugggcaaccauuua

SEQ ID NO: 524023 - RNA, 22 nt, Human
ccacaucauggauacaguuaug

SEQ ID NO: 524024 - RNA, 21 nt, Human
ugcuggccucaagggugacuu

SEQ ID NO: 524025 - RNA, 22 nt, Human
uccaggagguuuggaggaagca

SEQ ID NO: 524026 - RNA, 22 nt, Human
gagcugggcacacgccacuuga

SEQ ID NO: 524027 - RNA, 22 nt, Human
gggcuccaacuacaucagccuu

SEQ ID NO: 524028 - RNA, 22 nt, Human
cuggcagguccagcuggacuca

SEQ ID NO: 524029 - RNA, 22 nt, Human
ugauacccuuuggcugcgagca

SEQ ID NO: 524030 - RNA, 22 nt, Human
uuucagugcuucuguuuaccgg

SEQ ID NO: 524031 - RNA, 22 nt, Human
ugauagaaaaugcugucaagcu

SEQ ID NO: 524032 - RNA, 22 nt, Human
cccagacucaucccugggagcu

SEQ ID NO: 524033 - RNA, 22 nt, Human
auugcugaaaugaaaggauaug

SEQ ID NO: 524034 - RNA, 22 nt, Human
uuaaguccuugguaauuuucuu

SEQ ID NO: 524035 - RNA, 17 nt, Human
accagccucuccugggg

SEQ ID NO: 524036 - RNA, 22 nt, Human
gugcugucaauugcuuucagua

SEQ ID NO: 524037 - RNA, 22 nt, Human
aaagaauacuccuuuugccuug

SEQ ID NO: 524038 - RNA, 22 nt, Human
uggcucagaaggcugccuucac

SEQ ID NO: 524039 - RNA, 22 nt, Human
cagaaauguucuaaugauucag

SEQ ID NO: 524040 - RNA, 22 nt, Human
guccagagccggaagagugaca

SEQ ID NO: 524041 - RNA, 22 nt, Human
ggggacagucgaucuagugauu

SEQ ID NO: 524042 - RNA, 22 nt, Human
ucaggaucaggggccuuuccuu

SEQ ID NO: 524043 - RNA, 22 nt, Human
gcugaggcggaaggauugcuag

SEQ ID NO: 524044 - RNA, 22 nt, Human
acauguggucaaucuguguagg

SEQ ID NO: 524045 - RNA, 22 nt, Human
guagaggacauuugacaugaug

SEQ ID NO: 524046 - RNA, 22 nt, Human
agucucugcugguugugccuau

SEQ ID NO: 524047 - RNA, 22 nt, Human
acaggggauugauuggaagucu

SEQ ID NO: 524048 - RNA, 22 nt, Human
gggcacagucuaaaguugggcc

SEQ ID NO: 524049 - RNA, 22 nt, Human
gagcuguccuaccaggaguccu

SEQ ID NO: 524050 - RNA, 22 nt, Human
ugucauuuucuaaucuguuguc

SEQ ID NO: 524051 - RNA, 22 nt, Human
uagcaucagccacaccuuguac

SEQ ID NO: 524052 - RNA, 22 nt, Human
uuucagagcucuaggcucucag

SEQ ID NO: 524053 - RNA, 22 nt, Human
ccagugcauaaucaauacagcc

SEQ ID NO: 524054 - RNA, 22 nt, Human
gugggagaagauuuggucaucu

SEQ ID NO: 524055 - RNA, 22 nt, Human
ggguucagagucaggugugaua

SEQ ID NO: 524056 - RNA, 19 nt, Human
aggagaagacucucucccc

SEQ ID NO: 524057 - RNA, 23 nt, Human
ucagggacaugaugugucauauc

SEQ ID NO: 524058 - RNA, 21 nt, Human
uugcuguuuucccaaugcagu

SEQ ID NO: 524059 - RNA, 22 nt, Human
uugcacagugguuuagagccug

SEQ ID NO: 524060 - RNA, 20 nt, Human
uccaggcagcucagaguguc

SEQ ID NO: 524061 - RNA, 22 nt, Human
acuggggccuccuccaugcucu

SEQ ID NO: 524062 - RNA, 22 nt, Human
uagccucuggaauccuuucucu

SEQ ID NO: 524063 - RNA, 22 nt, Human
ucuugggagucccaggacauag

SEQ ID NO: 524064 - RNA, 22 nt, Human
ugggccacuugaaaguggaugu

SEQ ID NO: 524065 - RNA, 22 nt, Human
acagugcaaacccucgggaaag

SEQ ID NO: 524066 - RNA, 19 nt, Human
acuuucuccaggaccuguu

SEQ ID NO: 524067 - RNA, 22 nt, Human
cagcugggagcuccauuagaua

SEQ ID NO: 524068 - RNA, 22 nt, Human
gucccaggaacauucuggcuag

SEQ ID NO: 524069 - RNA, 22 nt, Human
uguuucuucucacacaaacuca

SEQ ID NO: 524070 - RNA, 22 nt, Human
guuccugaaagaugaguaauua

SEQ ID NO: 524071 - RNA, 22 nt, Human
ugcuucagaggaaaggcaaaag

SEQ ID NO: 524072 - RNA, 22 nt, Human
gccaggcagcaggaagccagug

SEQ ID NO: 524073 - RNA, 22 nt, Human
agugucauuccagggacccucg

SEQ ID NO: 524074 - RNA, 23 nt, Human
acauacauggagauaaagugaug

SEQ ID NO: 524075 - RNA, 22 nt, Human
aggguggagggagucccugagc

SEQ ID NO: 524076 - RNA, 22 nt, Human
ucaucaaagcgcuuggaguagg

SEQ ID NO: 524077 - RNA, 22 nt, Human
agguacagggugaaaguuuaug

SEQ ID NO: 524078 - RNA, 22 nt, Human
ucugaagagcuuuggaaguaug

SEQ ID NO: 524079 - RNA, 22 nt, Human
agaguuuguauuuuucagugaa

SEQ ID NO: 524080 - RNA, 22 nt, Human
caguggaggccuugggaccuuu

SEQ ID NO: 524081 - RNA, 22 nt, Human
uggugguuaugcgcuuuguggg

SEQ ID NO: 524082 - RNA, 19 nt, Human
guucaaacacugauucagc

SEQ ID NO: 524083 - RNA, 22 nt, Human
agggggcaggagagaccugcug

SEQ ID NO: 524084 - RNA, 22 nt, Human
aggcagugcagaguccucuucu

SEQ ID NO: 524085 - RNA, 22 nt, Human
ugcaccccauuuuacauuuaca

SEQ ID NO: 524086 - RNA, 22 nt, Human
aagguuaaauagguauuuucca

SEQ ID NO: 524087 - RNA, 22 nt, Human
uauuggugggggcagagagaga

SEQ ID NO: 524088 - RNA, 22 nt, Human
agaugacagcuacgggaugaaa

SEQ ID NO: 524089 - RNA, 22 nt, Human
acaggaaaugaaaugguaucua

SEQ ID NO: 524090 - RNA, 22 nt, Human
uuagauaauguagagauaugag

SEQ ID NO: 524091 - RNA, 22 nt, Human
cagucucucuccuugcaggcgu

SEQ ID NO: 524092 - RNA, 22 nt, Human
cagagcagggugcaccuugggc

SEQ ID NO: 524093 - RNA, 22 nt, Human
uucaggaaaugucugccuacca

SEQ ID NO: 524094 - RNA, 22 nt, Human
aacucaguucuuuccacaaugc

SEQ ID NO: 524095 - RNA, 22 nt, Human
guuuagaauucuaacuuuaagg

SEQ ID NO: 524096 - RNA, 22 nt, Human
cagcaugguggagcugcucuuu

SEQ ID NO: 524097 - RNA, 22 nt, Human
accaugaugcauccuuaaggaa

SEQ ID NO: 524098 - RNA, 22 nt, Human
ccugcagguugcagaggcggaa

SEQ ID NO: 524099 - RNA, 22 nt, Human
ggagacagugguagggccuaag

SEQ ID NO: 524100 - RNA, 22 nt, Human
aguuacaaccaugacacaagca

SEQ ID NO: 524101 - RNA, 22 nt, Human
cagugcaguugguggcaggggu

SEQ ID NO: 524102 - RNA, 22 nt, Human
uguuaaauguauuauguguucu

SEQ ID NO: 524103 - RNA, 22 nt, Human
gagccugaaauacaggucacug

SEQ ID NO: 524104 - RNA, 22 nt, Human
ugauauuuaagcaaaaauaugg

SEQ ID NO: 524105 - RNA, 22 nt, Human
uggcacagggcuuggucgcuca

SEQ ID NO: 524106 - RNA, 22 nt, Human
acucugaggagugacuagaggu

SEQ ID NO: 524107 - RNA, 22 nt, Human
gcacacagccagcugagggcua

SEQ ID NO: 524108 - RNA, 22 nt, Human
cuuugcaauagaggcacacaug

SEQ ID NO: 524109 - RNA, 22 nt, Human
aggccagggucccacacucgca

SEQ ID NO: 524110 - RNA, 22 nt, Human
acagagcacauagauuggaguu

SEQ ID NO: 524111 - RNA, 23 nt, Human
agcagggccagaauacuugcugu

SEQ ID NO: 524112 - RNA, 22 nt, Human
auuugccuuuuaaacucacaau

SEQ ID NO: 524113 - RNA, 22 nt, Human
ucucauguauugcccuggugug

SEQ ID NO: 524114 - RNA, 22 nt, Human
ccugugugucugucacugcaca

SEQ ID NO: 524115 - RNA, 22 nt, Human
cuauugaaaguguacaauucaa

SEQ ID NO: 524116 - RNA, 22 nt, Human
gagcuugguguuauuucugugg

SEQ ID NO: 524117 - RNA, 22 nt, Human
ugguggcuucugaggauggcga

SEQ ID NO: 524118 - RNA, 20 nt, Human
cucuggcuccgcgugaccgc

SEQ ID NO: 524119 - RNA, 22 nt, Human
gcuccagguauuugcccuuuua

SEQ ID NO: 524120 - RNA, 20 nt, Human
ucuguacacucaucuucugc

SEQ ID NO: 524121 - RNA, 22 nt, Human
uaaaucaguuucucuuauuggu

SEQ ID NO: 524122 - RNA, 22 nt, Human
guuuuauuuccaugagagaccg

SEQ ID NO: 524123 - RNA, 17 nt, Human
ugcacaagagacaauag

SEQ ID NO: 524124 - RNA, 22 nt, Human
aggacaguguggaagagggugc

SEQ ID NO: 524125 - RNA, 22 nt, Human
uuuggaaugaaacagcagagcc

SEQ ID NO: 524126 - RNA, 22 nt, Human
uauguguaaucaaacacaugcu

SEQ ID NO: 524127 - RNA, 22 nt, Human
ugguuacacagcauguggacuu

SEQ ID NO: 524128 - RNA, 22 nt, Human
ccuggcuguggcggugcucuca

SEQ ID NO: 524129 - RNA, 22 nt, Human
caaacauuccgcuucucccagg

SEQ ID NO: 524130 - RNA, 22 nt, Human
cugggcucugcaguugauguuu

SEQ ID NO: 524131 - RNA, 22 nt, Human
gggaccugaggcccugcuccac

SEQ ID NO: 524132 - RNA, 22 nt, Human
ucacagaacacaaaugccacuu

SEQ ID NO: 524133 - RNA, 18 nt, Human
gagagggaucccucagga

SEQ ID NO: 524134 - RNA, 22 nt, Human
uucauuccuucccuaagcaacu

SEQ ID NO: 524135 - RNA, 22 nt, Human
uggucugggcaaauccuucuga

SEQ ID NO: 524136 - RNA, 22 nt, Human
ugaggcagaaauuccuguuuuc

SEQ ID NO: 524137 - RNA, 22 nt, Human
gcuguucccauguggggcucag

SEQ ID NO: 524138 - RNA, 22 nt, Human
uaugcauaauuggauaaguaga

SEQ ID NO: 524139 - RNA, 22 nt, Human
agcugagcacauucaaacaggu

SEQ ID NO: 524140 - RNA, 22 nt, Human
gaggccugucgcuaggccucug

SEQ ID NO: 524141 - RNA, 22 nt, Human
cccugagagugagugccaccuu

SEQ ID NO: 524142 - RNA, 22 nt, Human
agugugggugagggaggcccuc

SEQ ID NO: 524143 - RNA, 22 nt, Human
cugaagcaaaugaaacagcucu

SEQ ID NO: 524144 - RNA, 20 nt, Human
cucaggauugucuagccccu

SEQ ID NO: 524145 - RNA, 22 nt, Human
ucugagggcuugaggggaagua

SEQ ID NO: 524146 - RNA, 22 nt, Human
auauguguauggauuucuaucu

SEQ ID NO: 524147 - RNA, 22 nt, Human
ccugcuuaacauugccaugaca

SEQ ID NO: 524148 - RNA, 22 nt, Human
uugaagauggaucgccacucuc

SEQ ID NO: 524149 - RNA, 22 nt, Human
uuugaacugauaaucuucuguu

SEQ ID NO: 524150 - RNA, 22 nt, Human
cucagggcuugaguguccagga

SEQ ID NO: 524151 - RNA, 23 nt, Human
ggcuggaagaaaacagaauuguu

SEQ ID NO: 524152 - RNA, 22 nt, Human
guggcugcagagggcacagcau

SEQ ID NO: 524153 - RNA, 22 nt, Human
cuacacaguucugccuaauggc

SEQ ID NO: 524154 - RNA, 22 nt, Human
gggcuuggcacaugggcucagc

SEQ ID NO: 524155 - RNA, 22 nt, Human
ccagaagcaaaacagacaguuu

SEQ ID NO: 524156 - RNA, 22 nt, Human
agccagggucucucgcucuguu

SEQ ID NO: 524157 - RNA, 22 nt, Human
uacuuuuuagcacagugugugc

SEQ ID NO: 524158 - RNA, 22 nt, Human
auucacaaaugcugccccauuc

SEQ ID NO: 524159 - RNA, 22 nt, Human
gggauggggucgggacccugcu

SEQ ID NO: 524160 - RNA, 22 nt, Human
guacuuccguggacuaauuguu

SEQ ID NO: 524161 - RNA, 22 nt, Human
cuggugccauucuguggccuag

SEQ ID NO: 524162 - RNA, 22 nt, Human
ggagccagaggcugcugcugug

SEQ ID NO: 524163 - RNA, 22 nt, Human
agaaaugacacacaugagacau

SEQ ID NO: 524164 - RNA, 22 nt, Human
ccauggccgccgcugcucagga

SEQ ID NO: 524165 - RNA, 22 nt, Human
uagcuuuaauaagcugcugaau

SEQ ID NO: 524166 - RNA, 22 nt, Human
cucugcugucucagaugggcca

SEQ ID NO: 524167 - RNA, 22 nt, Human
uccagaggcuccaaagggagau

SEQ ID NO: 524168 - RNA, 22 nt, Human
cugaaggacuuggugauaguug

SEQ ID NO: 524169 - RNA, 22 nt, Human
uuccaaaguuaguuauuagaaa

SEQ ID NO: 524170 - RNA, 22 nt, Human
auugaaagcacaaagaacaagu

SEQ ID NO: 524171 - RNA, 22 nt, Human
cuggggaccgagcaagcucugg

SEQ ID NO: 524172 - RNA, 22 nt, Human
caggggcugagaaggaacgucc

SEQ ID NO: 524173 - RNA, 22 nt, Human
ucauuuaauugguuuugcucgu

SEQ ID NO: 524174 - RNA, 22 nt, Human
ugcacaucuuucagcaucauac

SEQ ID NO: 524175 - RNA, 22 nt, Human
uaaacauuuguuauucuuguuu

SEQ ID NO: 524176 - RNA, 22 nt, Human
cugggucuucagcagcaggcgg

SEQ ID NO: 524177 - RNA, 21 nt, Human
gacacaaaggguaguaauggu

SEQ ID NO: 524178 - RNA, 22 nt, Human
augcccugcucucgggaaggga

SEQ ID NO: 524179 - RNA, 22 nt, Human
caggguggcacucagcgcaucu

SEQ ID NO: 524180 - RNA, 19 nt, Human
cuggaccuggaggcccgga

SEQ ID NO: 524181 - RNA, 22 nt, Human
cugaaugaaaucaaggacugag

SEQ ID NO: 524182 - RNA, 22 nt, Human
aguugacauccagagacauucu

SEQ ID NO: 524183 - RNA, 22 nt, Human
caaagauaaucacagaauaccc

SEQ ID NO: 524184 - RNA, 22 nt, Human
ggcaguguggccugaguaaguc

SEQ ID NO: 524185 - RNA, 22 nt, Human
ggcacugaaguggguguugggu

SEQ ID NO: 524186 - RNA, 22 nt, Human
caaaacugucuagagagagaag

SEQ ID NO: 524187 - RNA, 22 nt, Human
uauaucaccaaaaacaguucug

SEQ ID NO: 524188 - RNA, 22 nt, Human
uggcuggacagugggcagugga

SEQ ID NO: 524189 - RNA, 22 nt, Human
aggaaaaauaaggcagcagggc

SEQ ID NO: 524190 - RNA, 22 nt, Human
ggcauccaaauaccaagaugua

SEQ ID NO: 524191 - RNA, 22 nt, Human
cagggcacaguuauggaggugg

SEQ ID NO: 524192 - RNA, 22 nt, Human
uaguagcaaaacucaucucuuu

SEQ ID NO: 524193 - RNA, 22 nt, Human
caaaugaagaaccuucucaccu

SEQ ID NO: 524194 - RNA, 22 nt, Human
cauuucuguucucuuccuguac

SEQ ID NO: 524195 - RNA, 22 nt, Human
cccagcuccaagggacagcgaa

SEQ ID NO: 524196 - RNA, 22 nt, Human
ucacauaaauuuaccagaugau

SEQ ID NO: 524197 - RNA, 20 nt, Human
ugcacagcugugaauaggau

SEQ ID NO: 524198 - RNA, 22 nt, Human
aggcuggugccugcagugaauc

SEQ ID NO: 524199 - RNA, 22 nt, Human
gcuggcuguguuucaucucuga

SEQ ID NO: 524200 - RNA, 22 nt, Human
ucuuuccuaggugauaugcaau

SEQ ID NO: 524201 - RNA, 22 nt, Human
cuugcaggauuuugcugcugua

SEQ ID NO: 524202 - RNA, 22 nt, Human
gaugugaggugguaaacaggga

SEQ ID NO: 524203 - RNA, 22 nt, Human
uuuccuuccuugcuagccugag

SEQ ID NO: 524204 - RNA, 22 nt, Human
cucccaggcacagggaggagcc

SEQ ID NO: 524205 - RNA, 22 nt, Human
ugucacagggauaccauggggc

SEQ ID NO: 524206 - RNA, 22 nt, Human
ggacagaggguugacagaguau

SEQ ID NO: 524207 - RNA, 22 nt, Human
ccaggcagccaagugugugugu

SEQ ID NO: 524208 - RNA, 22 nt, Human
aucaguuuugggggacauacug

SEQ ID NO: 524209 - RNA, 23 nt, Human
aucagucuugguagcugugccca

SEQ ID NO: 524210 - RNA, 22 nt, Human
agcccagugggccgaggcgggg

SEQ ID NO: 524211 - RNA, 22 nt, Human
gcagcuggagcaucuucucauc

SEQ ID NO: 524212 - RNA, 22 nt, Human
ggcuuucuaugaacucaaaggc

SEQ ID NO: 524213 - RNA, 22 nt, Human
aucagagaaguuucacuggcau

SEQ ID NO: 524214 - RNA, 22 nt, Human
acgugcaggaucugguuggcga

SEQ ID NO: 524215 - RNA, 22 nt, Human
ggcgcucaguguugccccagag

SEQ ID NO: 524216 - RNA, 23 nt, Human
uccagggauuaaugaagucaguc

SEQ ID NO: 524217 - RNA, 22 nt, Human
uugcccuguggggccuccagcc

SEQ ID NO: 524218 - RNA, 22 nt, Human
uuaaauuaggacucuaguucug

SEQ ID NO: 524219 - RNA, 22 nt, Human
gacacagauaucucugagauua

SEQ ID NO: 524220 - RNA, 22 nt, Human
augaaaaguucgaucuagaagg

SEQ ID NO: 524221 - RNA, 22 nt, Human
uagguucagcuuucauccugaa

SEQ ID NO: 524222 - RNA, 22 nt, Human
gccugagcaggcguggaccaug

SEQ ID NO: 524223 - RNA, 22 nt, Human
uauuucuuguuauucucguuga

SEQ ID NO: 524224 - RNA, 20 nt, Human
uuauguguaccugugcuccc

SEQ ID NO: 524225 - RNA, 22 nt, Human
cucuggaguaagagcuaugaaa

SEQ ID NO: 524226 - RNA, 22 nt, Human
ucagagugugacuuggucauga

SEQ ID NO: 524227 - RNA, 19 nt, Human
aggcugugagggaggacuc

SEQ ID NO: 524228 - RNA, 22 nt, Human
guuugcauauuugcacaggaau

SEQ ID NO: 524229 - RNA, 22 nt, Human
ucaguguuuccuagagcauaua

SEQ ID NO: 524230 - RNA, 22 nt, Human
ugcaggcucaccugccagggcc

SEQ ID NO: 524231 - RNA, 22 nt, Human
ggaagaaaucugguuaagagau

SEQ ID NO: 524232 - RNA, 22 nt, Human
uagccauuuuuauuaaugcugg

SEQ ID NO: 524233 - RNA, 22 nt, Human
cucugggugucuuaggagcuca

SEQ ID NO: 524234 - RNA, 22 nt, Human
agaugaagauaucugcaggggc

SEQ ID NO: 524235 - RNA, 22 nt, Human
cagaccugggucccuggccugu

SEQ ID NO: 524236 - RNA, 22 nt, Human
agcagggcaaagucaggcuaac

SEQ ID NO: 524237 - RNA, 22 nt, Human
cugcuucugggaugauggagua

SEQ ID NO: 524238 - RNA, 22 nt, Human
uuaaagcaucacacuauuaauu

SEQ ID NO: 524239 - RNA, 22 nt, Human
aguuuggaagucaggcuuuucu

SEQ ID NO: 524240 - RNA, 22 nt, Human
gccaggugggagacagacagca

SEQ ID NO: 524241 - RNA, 22 nt, Human
uggguaaacugggucuggagag

SEQ ID NO: 524242 - RNA, 22 nt, Human
ugaggcagcauucuucaagaca

SEQ ID NO: 524243 - RNA, 17 nt, Human
aaucucaguggcuuaag

SEQ ID NO: 524244 - RNA, 22 nt, Human
caaaaugaugugauuuuauugu

SEQ ID NO: 524245 - RNA, 22 nt, Human
uauggcuggaauacugaaaggc

SEQ ID NO: 524246 - RNA, 22 nt, Human
gcaggaggaucacuugagccca

SEQ ID NO: 524247 - RNA, 22 nt, Human
uguguucauuucucucugcugu

SEQ ID NO: 524248 - RNA, 22 nt, Human
agcuuccucaccucagaggucu

SEQ ID NO: 524249 - RNA, 22 nt, Human
guucucaguucaggaaggacau

SEQ ID NO: 524250 - RNA, 22 nt, Human
aucccaugagaccacguuggcu

SEQ ID NO: 524251 - RNA, 22 nt, Human
ugggcuggcguggagaguuuag

SEQ ID NO: 524252 - RNA, 22 nt, Human
aaguuaguggauaaacagcaaa

SEQ ID NO: 524253 - RNA, 21 nt, Human
agcuuccagagcacauuccau

SEQ ID NO: 524254 - RNA, 22 nt, Human
cagguccaccaugccucaagcc

SEQ ID NO: 524255 - RNA, 22 nt, Human
cuuuaauuaggaaguauaauga

SEQ ID NO: 524256 - RNA, 22 nt, Human
aaaaagacuuccaacucaggag

SEQ ID NO: 524257 - RNA, 22 nt, Human
cugagcuggucuauggacuugg

SEQ ID NO: 524258 - RNA, 22 nt, Human
uguccucacaggaaugaacuuu

SEQ ID NO: 524259 - RNA, 22 nt, Human
ccuaggcuuguuuucaucagcu

SEQ ID NO: 524260 - RNA, 22 nt, Human
caaguccuuagaugguucuuug

SEQ ID NO: 524261 - RNA, 22 nt, Human
caggaaauucuuuuguuugugc

SEQ ID NO: 524262 - RNA, 22 nt, Human
ugggugaggaugaugaggcagc

SEQ ID NO: 524263 - RNA, 22 nt, Human
gggcuucuugccauggggacgg

SEQ ID NO: 524264 - RNA, 22 nt, Human
uggcccugcuaugauccugcaa

SEQ ID NO: 524265 - RNA, 22 nt, Human
uuccugggguacuggagaaaau

SEQ ID NO: 524266 - RNA, 22 nt, Human
ugacaguuguauuacaugggaa

SEQ ID NO: 524267 - RNA, 22 nt, Human
uacauguauguuuaucuugaga

SEQ ID NO: 524268 - RNA, 22 nt, Human
gagcuuuucccgucuuucucgu

SEQ ID NO: 524269 - RNA, 22 nt, Human
uuuacauugcauuagguauuau

SEQ ID NO: 524270 - RNA, 22 nt, Human
cagcaguguacaaggugucaga

SEQ ID NO: 524271 - RNA, 22 nt, Human
cucucugagugagggacaagcu

SEQ ID NO: 524272 - RNA, 22 nt, Human
cagugcuggaggcuggagggaa

SEQ ID NO: 524273 - RNA, 22 nt, Human
ccagcccucacugaggccucuc

SEQ ID NO: 524274 - RNA, 22 nt, Human
uuucuaaggugauccuuucuua

SEQ ID NO: 524275 - RNA, 22 nt, Human
gccaggcuguggggaacuugaa

SEQ ID NO: 524276 - RNA, 20 nt, Human
gccaggcacuguucucaaua

SEQ ID NO: 524277 - RNA, 22 nt, Human
ggggccccuguggcuugaugcc

SEQ ID NO: 524278 - RNA, 22 nt, Human
cugggcuuaggaccuggugcgg

SEQ ID NO: 524279 - RNA, 22 nt, Human
ccugcagcuccggauuucuggg

SEQ ID NO: 524280 - RNA, 20 nt, Human
agguccugguucucugggau

SEQ ID NO: 524281 - RNA, 22 nt, Human
acucuggcacuggguaccucag

SEQ ID NO: 524282 - RNA, 22 nt, Human
auauacaguuuuacaggguuuc

SEQ ID NO: 524283 - RNA, 22 nt, Human
ggcugcuucucacucauuugca

SEQ ID NO: 524284 - RNA, 22 nt, Human
uccuguggucuggaaggaaugg

SEQ ID NO: 524285 - RNA, 22 nt, Human
cugggcuuucaggcccuaaggc

SEQ ID NO: 524286 - RNA, 22 nt, Human
cagcuuuagagaaaacauauuu

SEQ ID NO: 524287 - RNA, 22 nt, Human
caaagugcuaggauuacaggcc

SEQ ID NO: 524288 - RNA, 22 nt, Human
cuggccagacuacacaugugug

SEQ ID NO: 524289 - RNA, 22 nt, Human
cccaaggcauggcaugguggca

SEQ ID NO: 524290 - RNA, 21 nt, Human
uccaagccuucaacacauuca

SEQ ID NO: 524291 - RNA, 22 nt, Human
aggcucugaucagguggcugug

SEQ ID NO: 524292 - RNA, 22 nt, Human
ucagaggaggcauuuaaacaga

SEQ ID NO: 524293 - RNA, 22 nt, Human
uauugacagagggucagaagag

SEQ ID NO: 524294 - RNA, 22 nt, Human
gcagcucccuggcugcaaauga

SEQ ID NO: 524295 - RNA, 22 nt, Human
cucccacuccuggcucaccaca

SEQ ID NO: 524296 - RNA, 22 nt, Human
ucucagugagcuuuucuauguu

SEQ ID NO: 524297 - RNA, 22 nt, Human
ucacagaaugucagaguugggg

SEQ ID NO: 524298 - RNA, 22 nt, Human
cuggagggugagccucaucucu

SEQ ID NO: 524299 - RNA, 22 nt, Human
gaauuuccucuaaaccccugag

SEQ ID NO: 524300 - RNA, 22 nt, Human
ucaggaguccugccugcagccu

SEQ ID NO: 524301 - RNA, 22 nt, Human
gccccucuccuugugcaccugc

SEQ ID NO: 524302 - RNA, 22 nt, Human
uagggcucugagaguucagccu

SEQ ID NO: 524303 - RNA, 22 nt, Human
gggcacugaaugccaagcuagg

SEQ ID NO: 524304 - RNA, 22 nt, Human
ccacacugucuaacaaggcaua

SEQ ID NO: 524305 - RNA, 22 nt, Human
gguuucaacucagcuaguaagg

SEQ ID NO: 524306 - RNA, 22 nt, Human
agcaggcugagcacccaggggg

SEQ ID NO: 524307 - RNA, 22 nt, Human
ugaagcaggugaauggaugucg

SEQ ID NO: 524308 - RNA, 22 nt, Human
aagaucaagaucagagaacagc

SEQ ID NO: 524309 - RNA, 22 nt, Human
ugcagcucauugcuggggucug

SEQ ID NO: 524310 - RNA, 22 nt, Human
uaaagaacacagggaauagcac

SEQ ID NO: 524311 - RNA, 22 nt, Human
ugugugcauguuaaugagaaaa

SEQ ID NO: 524312 - RNA, 19 nt, Human
acagucagggaauaaagac

SEQ ID NO: 524313 - RNA, 21 nt, Human
cagggcaaccaaguccagaga

SEQ ID NO: 524314 - RNA, 22 nt, Human
ggacacagcugcagccacaccc

SEQ ID NO: 524315 - RNA, 22 nt, Human
uuaucacuuaugagcuuuuugc

SEQ ID NO: 524316 - RNA, 22 nt, Human
cuuucaaugugccugccuuggg

SEQ ID NO: 524317 - RNA, 22 nt, Human
ugugccuucucaguccugcuca

SEQ ID NO: 524318 - RNA, 22 nt, Human
uuucauuuugguuaugccauaa

SEQ ID NO: 524319 - RNA, 22 nt, Human
uagaaacagaaaacuguaauag

SEQ ID NO: 524320 - RNA, 23 nt, Human
cagaggcaucggauucaacauca

SEQ ID NO: 524321 - RNA, 18 nt, Human
ggguccugugggagacag

SEQ ID NO: 524322 - RNA, 22 nt, Human
gauauuuucgcagggagaauuc

SEQ ID NO: 524323 - RNA, 22 nt, Human
gggcagcugcagggauggugac

SEQ ID NO: 524324 - RNA, 22 nt, Human
augugcugaguguguauauaca

SEQ ID NO: 524325 - RNA, 22 nt, Human
cccaggaggcagagcuugcagu

SEQ ID NO: 524326 - RNA, 22 nt, Human
caggaacauguuggaaagaaau

SEQ ID NO: 524327 - RNA, 22 nt, Human
gcucuggcccaaacccuuucua

SEQ ID NO: 524328 - RNA, 22 nt, Human
uggggggcacuucagcacaaug

SEQ ID NO: 524329 - RNA, 22 nt, Human
cagagacaguuucacagggucu

SEQ ID NO: 524330 - RNA, 22 nt, Human
auugagaauccauuugagauga

SEQ ID NO: 524331 - RNA, 22 nt, Human
auuuugauaaucauguuagaga

SEQ ID NO: 524332 - RNA, 22 nt, Human
cucugggucuaccuguggccag

SEQ ID NO: 524333 - RNA, 22 nt, Human
agauaaaaugauuuucuggauc

SEQ ID NO: 524334 - RNA, 22 nt, Human
gaucaaaagcuggguucuaaaa

SEQ ID NO: 524335 - RNA, 18 nt, Human
agcugcagaccaggaggu

SEQ ID NO: 524336 - RNA, 22 nt, Human
uauacagauuaacagauuuaaa

SEQ ID NO: 524337 - RNA, 22 nt, Human
ccuccuuuccuguuuuccugag

SEQ ID NO: 524338 - RNA, 20 nt, Human
acugagcugcauggagagga

SEQ ID NO: 524339 - RNA, 22 nt, Human
cuuccaagaugaacagcaagcg

SEQ ID NO: 524340 - RNA, 22 nt, Human
gccucuguggcucagccuugcu

SEQ ID NO: 524341 - RNA, 22 nt, Human
ggccccucagcaucugagucag

SEQ ID NO: 524342 - RNA, 22 nt, Human
acagguggccccgagggagugg

SEQ ID NO: 524343 - RNA, 20 nt, Human
caugagaagggcagugugag

SEQ ID NO: 524344 - RNA, 22 nt, Human
aguaugaagaugaugaaaaaua

SEQ ID NO: 524345 - RNA, 22 nt, Human
aggguccugggugcaguugcuu

SEQ ID NO: 524346 - RNA, 22 nt, Human
ucucuggaguauaaccagggau

SEQ ID NO: 524347 - RNA, 22 nt, Human
ggcugggcaggucugcacaggg

SEQ ID NO: 524348 - RNA, 22 nt, Human
agugugggggcuuuggugucac

SEQ ID NO: 524349 - RNA, 22 nt, Human
uguauuagaucugagaacuucu

SEQ ID NO: 524350 - RNA, 22 nt, Human
cugggaggcccacguugggaag

SEQ ID NO: 524351 - RNA, 22 nt, Human
ucaaugaugcugaagguagcgu

SEQ ID NO: 524352 - RNA, 22 nt, Human
cucccuggaggcccagaccugg

SEQ ID NO: 524353 - RNA, 22 nt, Human
agugcgugguuuacagcuaguu

SEQ ID NO: 524354 - RNA, 18 nt, Human
uuccauaauguauguaac

SEQ ID NO: 524355 - RNA, 22 nt, Human
aagcagcauguggguuaucggg

SEQ ID NO: 524356 - RNA, 22 nt, Human
cagguucccuugcagcuaagug

SEQ ID NO: 524357 - RNA, 22 nt, Human
guauuuuucaguuaggagcuua

SEQ ID NO: 524358 - RNA, 22 nt, Human
agcuggggcugcagagaacagg

SEQ ID NO: 524359 - RNA, 20 nt, Human
aggagaaauucgggacaccu

SEQ ID NO: 524360 - RNA, 22 nt, Human
uggaggcauuuuagguugucac

SEQ ID NO: 524361 - RNA, 22 nt, Human
cacaggagguuaggaagugguc

SEQ ID NO: 524362 - RNA, 22 nt, Human
aggccugaggaccagauaaaug

SEQ ID NO: 524363 - RNA, 22 nt, Human
accuaauaaagguaaauucugu

SEQ ID NO: 524364 - RNA, 22 nt, Human
ggcagagcuugcagugagccga

SEQ ID NO: 524365 - RNA, 22 nt, Human
cuucucuucccagggacacagg

SEQ ID NO: 524366 - RNA, 22 nt, Human
gggugggguucaggaaucuuca

SEQ ID NO: 524367 - RNA, 22 nt, Human
agaaagggucacugaaagagga

SEQ ID NO: 524368 - RNA, 22 nt, Human
cagguccugcagggagaguaaa

SEQ ID NO: 524369 - RNA, 22 nt, Human
ccagcugguaagugauggagcc

SEQ ID NO: 524370 - RNA, 22 nt, Human
aucucccagccacagcauucuu

SEQ ID NO: 524371 - RNA, 22 nt, Human
aaaaaccuuucccauacuaaga

SEQ ID NO: 524372 - RNA, 22 nt, Human
gguaaaaugcagauucuuagcc

SEQ ID NO: 524373 - RNA, 19 nt, Human
cucagcacuuuuacacagg

SEQ ID NO: 524374 - RNA, 22 nt, Human
aggagaguaccauugggccgca

SEQ ID NO: 524375 - RNA, 22 nt, Human
aaagugcucggauuacagguau

SEQ ID NO: 524376 - RNA, 22 nt, Human
auacucaauuuguuggaaagca

SEQ ID NO: 524377 - RNA, 22 nt, Human
ggcccugagcugaaguacugug

SEQ ID NO: 524378 - RNA, 22 nt, Human
acuguucaagcaaaugacauug

SEQ ID NO: 524379 - RNA, 22 nt, Human
gagggcucuacucaccacccug

SEQ ID NO: 524380 - RNA, 22 nt, Human
cuugccuuugucuucaaaggcu

SEQ ID NO: 524381 - RNA, 17 nt, Human
uuccagcauguuacuaa

SEQ ID NO: 524382 - RNA, 22 nt, Human
uacaaagucaccagcuucuugc

SEQ ID NO: 524383 - RNA, 21 nt, Human
ugggaccuauuucaacuggau

SEQ ID NO: 524384 - RNA, 22 nt, Human
gguuugcaugugauguugggca

SEQ ID NO: 524385 - RNA, 22 nt, Human
auucuucugccuacuuucaucc

SEQ ID NO: 524386 - RNA, 22 nt, Human
gaaggagcuaccaagacugaau

SEQ ID NO: 524387 - RNA, 22 nt, Human
ucccagagucuucuccuguaau

SEQ ID NO: 524388 - RNA, 22 nt, Human
guuuuacacaccuaugaaagac

SEQ ID NO: 524389 - RNA, 22 nt, Human
auguguaggugaaucgaggcug

SEQ ID NO: 524390 - RNA, 22 nt, Human
ggcccugggaugcucagcagug

SEQ ID NO: 524391 - RNA, 22 nt, Human
aaaugcacucugcuucugugac

SEQ ID NO: 524392 - RNA, 22 nt, Human
cagauguuguuccugccuguag

SEQ ID NO: 524393 - RNA, 21 nt, Human
augaagucuaugcuucugugu

SEQ ID NO: 524394 - RNA, 22 nt, Human
acugugcaaugaguaauaaacu

SEQ ID NO: 524395 - RNA, 22 nt, Human
aaaagagucuuaggcagucaua

SEQ ID NO: 524396 - RNA, 22 nt, Human
ccucgaccuccccaggcucagg

SEQ ID NO: 524397 - RNA, 20 nt, Human
acucuggggcucauuagggg

SEQ ID NO: 524398 - RNA, 22 nt, Human
auguucuguuuuguaauucaua

SEQ ID NO: 524399 - RNA, 22 nt, Human
cuucugcaagagcaucaguugu

SEQ ID NO: 524400 - RNA, 21 nt, Human
uccuggcccacucuaucccca

SEQ ID NO: 524401 - RNA, 22 nt, Human
gcuuuuaauuaguugcuuccau

SEQ ID NO: 524402 - RNA, 22 nt, Human
agcacuagacauguaagugagc

SEQ ID NO: 524403 - RNA, 19 nt, Human
cccaaggcccugggcaggc

SEQ ID NO: 524404 - RNA, 23 nt, Human
cuggcccuggcucugugaucaug

SEQ ID NO: 524405 - RNA, 22 nt, Human
aaggcagcccuggcucagccug

SEQ ID NO: 524406 - RNA, 22 nt, Human
agagucuuccaggcagccugag

SEQ ID NO: 524407 - RNA, 22 nt, Human
cucuccuugcagauggcugccu

SEQ ID NO: 524408 - RNA, 22 nt, Human
caaaugaauagggagugugaug

SEQ ID NO: 524409 - RNA, 22 nt, Human
cuaagcaagaaugagugcaaca

SEQ ID NO: 524410 - RNA, 22 nt, Human
ggcaccugguaagugcucagua

SEQ ID NO: 524411 - RNA, 22 nt, Human
uauuagguaaaggacuugcagg

SEQ ID NO: 524412 - RNA, 22 nt, Human
gcgguagcucaagcuuguaauc

SEQ ID NO: 524413 - RNA, 22 nt, Human
cuuucuugcauaauuugaaacc

SEQ ID NO: 524414 - RNA, 22 nt, Human
ggguaccaagcugcuugggggc

SEQ ID NO: 524415 - RNA, 19 nt, Human
acagcagggauuuuuggag

SEQ ID NO: 524416 - RNA, 22 nt, Human
uacauuaucuuguuaucuuuca

SEQ ID NO: 524417 - RNA, 20 nt, Human
uguuccaugacuauuuggau

SEQ ID NO: 524418 - RNA, 22 nt, Human
agagcacaggcucuggagucua

SEQ ID NO: 524419 - RNA, 22 nt, Human
ccaggaggcagaaguugcagug

SEQ ID NO: 524420 - RNA, 23 nt, Human
agaguaauguuuuuacuguauuc

SEQ ID NO: 524421 - RNA, 22 nt, Human
ggccuggaagaggacagagaaa

SEQ ID NO: 524422 - RNA, 22 nt, Human
ugcuucugcaggagcuccugau

SEQ ID NO: 524423 - RNA, 22 nt, Human
ccucucaucauuaucgcuuugu

SEQ ID NO: 524424 - RNA, 22 nt, Human
agcagcauggaugggccucagc

SEQ ID NO: 524425 - RNA, 22 nt, Human
gcaggggaguggaugauggauu

SEQ ID NO: 524426 - RNA, 22 nt, Human
caguuucucucaauaagcaucg

SEQ ID NO: 524427 - RNA, 22 nt, Human
ugugaaaagcaggcuacuuucu

SEQ ID NO: 524428 - RNA, 22 nt, Human
caggagugagaugcgaucacuu

SEQ ID NO: 524429 - RNA, 22 nt, Human
ucauuccauuuccagcucugaa

SEQ ID NO: 524430 - RNA, 22 nt, Human
ccagcucugcuugcccagucag

SEQ ID NO: 524431 - RNA, 22 nt, Human
cauccagcuccugggggccacc

SEQ ID NO: 524432 - RNA, 22 nt, Human
gaagagaagguguaggccaucc

SEQ ID NO: 524433 - RNA, 22 nt, Human
auauaauaguuucauaaaggcu

SEQ ID NO: 524434 - RNA, 22 nt, Human
guauuuuauggcaugcaguggc

SEQ ID NO: 524435 - RNA, 22 nt, Human
acaggcagcgucauugcugcuc

SEQ ID NO: 524436 - RNA, 20 nt, Human
aagagucuuuacugagcuaa

SEQ ID NO: 524437 - RNA, 21 nt, Human
gggccuggcugcgcaggacgg

SEQ ID NO: 524438 - RNA, 22 nt, Human
uccuggcugcaccagugacccu

SEQ ID NO: 524439 - RNA, 23 nt, Human
uucucaguccugcccagggaggc

SEQ ID NO: 524440 - RNA, 23 nt, Human
ugcugggguaguuuguggcacag

SEQ ID NO: 524441 - RNA, 22 nt, Human
ccugggcaauauagugaggccc

SEQ ID NO: 524442 - RNA, 20 nt, Human
agagccuggaaaaagacauc

SEQ ID NO: 524443 - RNA, 22 nt, Human
ggcacugagcugccuuggggca

SEQ ID NO: 524444 - RNA, 20 nt, Human
gauaaauugucucuuaagug

SEQ ID NO: 524445 - RNA, 22 nt, Human
ggcuucuugugugucaggcucu

SEQ ID NO: 524446 - RNA, 22 nt, Human
cagcugugcuguauuaagcucu

SEQ ID NO: 524447 - RNA, 22 nt, Human
ccagcagcccacaggcgucccu

SEQ ID NO: 524448 - RNA, 22 nt, Human
uuucauuacguguuugacuugu

SEQ ID NO: 524449 - RNA, 22 nt, Human
ggggaucuaggauauuucauga

SEQ ID NO: 524450 - RNA, 22 nt, Human
ggacacaagcuccggggcugca

SEQ ID NO: 524451 - RNA, 22 nt, Human
gucugccugcuaguggcugccu

SEQ ID NO: 524452 - RNA, 22 nt, Human
acauuugugcaacguauccaca

SEQ ID NO: 524453 - RNA, 22 nt, Human
uaagcaaaguuuauaaggcucu

SEQ ID NO: 524454 - RNA, 22 nt, Human
ucccucagucccuggacaggca

SEQ ID NO: 524455 - RNA, 22 nt, Human
uugggugcugucauggggcacg

SEQ ID NO: 524456 - RNA, 18 nt, Human
gcagagcagaagcucaag

SEQ ID NO: 524457 - RNA, 23 nt, Human
ggccacugaauuuucugcaucuu

SEQ ID NO: 524458 - RNA, 22 nt, Human
cuugcugagauaaaugcugucu

SEQ ID NO: 524459 - RNA, 22 nt, Human
augcccugccaagcaggcuaaa

SEQ ID NO: 524460 - RNA, 22 nt, Human
agcuuuaugaggagaccuuagu

SEQ ID NO: 524461 - RNA, 22 nt, Human
auagugucagaaaaucauaaga

SEQ ID NO: 524462 - RNA, 22 nt, Human
aagaguuuaauuuugucuagac

SEQ ID NO: 524463 - RNA, 22 nt, Human
uagggcaguuucauguuaucuu

SEQ ID NO: 524464 - RNA, 22 nt, Human
ccuggcagcagcacaugccuuc

SEQ ID NO: 524465 - RNA, 22 nt, Human
auuuauuaagcaucugcuaugu

SEQ ID NO: 524466 - RNA, 20 nt, Human
guauuagguguuccucuuuc

SEQ ID NO: 524467 - RNA, 22 nt, Human
acugaaggcuuucccaagguca

SEQ ID NO: 524468 - RNA, 22 nt, Human
uaacagaauuugcuaaacuccg

SEQ ID NO: 524469 - RNA, 22 nt, Human
augaaucaagugagaacagcau

SEQ ID NO: 524470 - RNA, 22 nt, Human
gagcagggcuuguccuccucau

SEQ ID NO: 524471 - RNA, 22 nt, Human
uuaaagcaaaaacuaggaugga

SEQ ID NO: 524472 - RNA, 21 nt, Human
uggaucugugaucuggggcac

SEQ ID NO: 524473 - RNA, 22 nt, Human
guuuuccuguugaguaguauuc

SEQ ID NO: 524474 - RNA, 22 nt, Human
augucccaagauacagcuagag

SEQ ID NO: 524475 - RNA, 22 nt, Human
auuuuacauaaggaagguuuaa

SEQ ID NO: 524476 - RNA, 22 nt, Human
aggugcuggaguagaagaaaaa

SEQ ID NO: 524477 - RNA, 22 nt, Human
cgggcuccgggucuuugcaguc

SEQ ID NO: 524478 - RNA, 22 nt, Human
ccuccagcgcgauccacuccgg

SEQ ID NO: 524479 - RNA, 22 nt, Human
uggagcuggaauuucugggccu

SEQ ID NO: 524480 - RNA, 22 nt, Human
ugaggcaggaguucaggcugcg

SEQ ID NO: 524481 - RNA, 20 nt, Human
gcugaccccugcugucaugc

SEQ ID NO: 524482 - RNA, 22 nt, Human
ucacauguguggcagugcaagu

SEQ ID NO: 524483 - RNA, 22 nt, Human
ucaggaaaguguucucagagga

SEQ ID NO: 524484 - RNA, 22 nt, Human
aaguauucuacaaagaaauuga

SEQ ID NO: 524485 - RNA, 22 nt, Human
ucccuuguccucuucgucacug

SEQ ID NO: 524486 - RNA, 22 nt, Human
ugaaugauaugugaaaaggaac

SEQ ID NO: 524487 - RNA, 22 nt, Human
agggcuccugaggcccuucugg

SEQ ID NO: 524488 - RNA, 22 nt, Human
aagaggaguagaugugguuggu

SEQ ID NO: 524489 - RNA, 22 nt, Human
auuuucaucauggguuuaacau

SEQ ID NO: 524490 - RNA, 22 nt, Human
auaauaacaccugaauaggaaa

SEQ ID NO: 524491 - RNA, 22 nt, Human
aggcacugauucucagaguuac

SEQ ID NO: 524492 - RNA, 22 nt, Human
ccucacuuuccuuucuccuggg

SEQ ID NO: 524493 - RNA, 21 nt, Human
acagcagagaucaagacuaag

SEQ ID NO: 524494 - RNA, 22 nt, Human
ucucagagagaugaaacuucca

SEQ ID NO: 524495 - RNA, 22 nt, Human
aacuuuauuguuaggggcuaaa

SEQ ID NO: 524496 - RNA, 22 nt, Human
gcuggcccagugacccacagug

SEQ ID NO: 524497 - RNA, 22 nt, Human
ugcagcugaccagcaaguccug

SEQ ID NO: 524498 - RNA, 22 nt, Human
ugcuggccaauggcagaggcgg

SEQ ID NO: 524499 - RNA, 21 nt, Human
uucaauacuauuucaauaguc

SEQ ID NO: 524500 - RNA, 18 nt, Human
ggagagugacagagucgu

SEQ ID NO: 524501 - RNA, 22 nt, Human
cagggccauaucuugugcacca

SEQ ID NO: 524502 - RNA, 18 nt, Human
aaugcacacauuuacucc

SEQ ID NO: 524503 - RNA, 22 nt, Human
uacuguacugucuuuuuugcug

SEQ ID NO: 524504 - RNA, 22 nt, Human
agcccugcaggaugagggaggu

SEQ ID NO: 524505 - RNA, 22 nt, Human
aggaaagggguagguguggacg

SEQ ID NO: 524506 - RNA, 22 nt, Human
gggcuauagcacuauguauggg

SEQ ID NO: 524507 - RNA, 22 nt, Human
ucugccuggaugauggcagggc

SEQ ID NO: 524508 - RNA, 22 nt, Human
cacaccuguaauaccagcuacu

SEQ ID NO: 524509 - RNA, 22 nt, Human
acaugugugacaacagagguga

SEQ ID NO: 524510 - RNA, 22 nt, Human
cagcucugagacugaggcuaug

SEQ ID NO: 524511 - RNA, 22 nt, Human
ccagcagcuuuauuggcucucc

SEQ ID NO: 524512 - RNA, 22 nt, Human
acaccuuugccccaagucauag

SEQ ID NO: 524513 - RNA, 22 nt, Human
uguaaacauaccagagccaagu

SEQ ID NO: 524514 - RNA, 22 nt, Human
ugcaaggcccagacaagagcuc

SEQ ID NO: 524515 - RNA, 22 nt, Human
gcucagugugcacgaguacucu

SEQ ID NO: 524516 - RNA, 22 nt, Human
aucaggauuacacggggaugcu

SEQ ID NO: 524517 - RNA, 22 nt, Human
auuugucugcuugcugccuucc

SEQ ID NO: 524518 - RNA, 22 nt, Human
uuuucaugucauguccuugagg

SEQ ID NO: 524519 - RNA, 22 nt, Human
cugauauuauugaagcuggagu

SEQ ID NO: 524520 - RNA, 22 nt, Human
acaggccugugugcacacgagg

SEQ ID NO: 524521 - RNA, 22 nt, Human
cauuaaaucuuccagaccucac

SEQ ID NO: 524522 - RNA, 22 nt, Human
cagcagagacgguaagcagaac

SEQ ID NO: 524523 - RNA, 22 nt, Human
ucagcagcagcucagcauguuu

SEQ ID NO: 524524 - RNA, 22 nt, Human
cagucccacuagugccaauacc

SEQ ID NO: 524525 - RNA, 22 nt, Human
agcaauauuucagcuagcaggu

SEQ ID NO: 524526 - RNA, 22 nt, Human
ccaaggagcaaggcucaacaag

SEQ ID NO: 524527 - RNA, 22 nt, Human
cagaaccaggaacugauggaga

SEQ ID NO: 524528 - RNA, 22 nt, Human
aaacaguagaaguguauuuuau

SEQ ID NO: 524529 - RNA, 22 nt, Human
agcuucuggaaggcaaggcuug

SEQ ID NO: 524530 - RNA, 22 nt, Human
ucuuuucuugcauuauugcacu

SEQ ID NO: 524531 - RNA, 22 nt, Human
uuucauaugggcauuggcaaua

SEQ ID NO: 524532 - RNA, 22 nt, Human
cccaagagaucgcauguaguug

SEQ ID NO: 524533 - RNA, 22 nt, Human
ccugggcuuugcuggcaaggcc

SEQ ID NO: 524534 - RNA, 22 nt, Human
ggccugaggcaauagucagaca

SEQ ID NO: 524535 - RNA, 22 nt, Human
ccuggagcucacugggagccgg

SEQ ID NO: 524536 - RNA, 22 nt, Human
agagcuggggccagagucaagg

SEQ ID NO: 524537 - RNA, 22 nt, Human
uggcaggugaaguuguuaggga

SEQ ID NO: 524538 - RNA, 22 nt, Human
uuauaauucuggcauaggcugu

SEQ ID NO: 524539 - RNA, 22 nt, Human
auuuucaucgcuagguuggccu

SEQ ID NO: 524540 - RNA, 22 nt, Human
cagccucuugcacuuugaaggc

SEQ ID NO: 524541 - RNA, 22 nt, Human
ggaaugauggugccuagauuau

SEQ ID NO: 524542 - RNA, 22 nt, Human
ucacagaacaauguuuaguucu

SEQ ID NO: 524543 - RNA, 22 nt, Human
cuggcaggcggcagagcccagg

SEQ ID NO: 524544 - RNA, 22 nt, Human
ucacaaaagcuuuugaauuugg

SEQ ID NO: 524545 - RNA, 22 nt, Human
agaauaaaucaaauguccugag

SEQ ID NO: 524546 - RNA, 22 nt, Human
uuacaaggaggauagcauuucc

SEQ ID NO: 524547 - RNA, 22 nt, Human
caaagaaggaacuauaauccca

SEQ ID NO: 524548 - RNA, 22 nt, Human
auggagggugguaagacagaga

SEQ ID NO: 524549 - RNA, 22 nt, Human
auacacacugcuauccuuuuuu

SEQ ID NO: 524550 - RNA, 22 nt, Human
ugugcucuggaguugccuucac

SEQ ID NO: 524551 - RNA, 22 nt, Human
gcacccagagggcagggucucc

SEQ ID NO: 524552 - RNA, 22 nt, Human
ccuggggagaagagcuuccccc

SEQ ID NO: 524553 - RNA, 22 nt, Human
gcccagcugcacccuggugggu

SEQ ID NO: 524554 - RNA, 22 nt, Human
ccucaggaaccacauugcugcu

SEQ ID NO: 524555 - RNA, 22 nt, Human
cgggcagauugggaagguucau

SEQ ID NO: 524556 - RNA, 22 nt, Human
ggccgggcaggucucagccagc

SEQ ID NO: 524557 - RNA, 22 nt, Human
ucugggcagcagcagcuaguag

SEQ ID NO: 524558 - RNA, 17 nt, Human
gcugagugcagggaguc

SEQ ID NO: 524559 - RNA, 22 nt, Human
uagguccacagauuugguuucu

SEQ ID NO: 524560 - RNA, 22 nt, Human
uugcauugaucccagcuugggc

SEQ ID NO: 524561 - RNA, 22 nt, Human
ccuucuagcaaaucaacauaaa

SEQ ID NO: 524562 - RNA, 22 nt, Human
caaguagagauuacagugugca

SEQ ID NO: 524563 - RNA, 22 nt, Human
aaauuguugaucuacaguaagg

SEQ ID NO: 524564 - RNA, 22 nt, Human
gucugcucaugcuaccgcgggc

SEQ ID NO: 524565 - RNA, 22 nt, Human
ccaguggguaggccauggugag

SEQ ID NO: 524566 - RNA, 22 nt, Human
aaggucauuguugcauguucuc

SEQ ID NO: 524567 - RNA, 22 nt, Human
ucagcacuguguccagucuccc

SEQ ID NO: 524568 - RNA, 22 nt, Human
auaaaaaugagggcgguagcua

SEQ ID NO: 524569 - RNA, 22 nt, Human
gagguggguguaucacagguca

SEQ ID NO: 524570 - RNA, 22 nt, Human
guggcuucacauggcauuuggc

SEQ ID NO: 524571 - RNA, 22 nt, Human
ucucuggguuuuuguccuguac

SEQ ID NO: 524572 - RNA, 22 nt, Human
ccaaggagaaaugcugugcuuu

SEQ ID NO: 524573 - RNA, 22 nt, Human
uaaagcaagacacacccauagc

SEQ ID NO: 524574 - RNA, 22 nt, Human
uaucuuuaacuugcaguauuua

SEQ ID NO: 524575 - RNA, 17 nt, Human
ugagaaguaggcaucau

SEQ ID NO: 524576 - RNA, 22 nt, Human
caaucccaucaccaucugcucu

SEQ ID NO: 524577 - RNA, 22 nt, Human
ggaaagcucagaucuuguugga

SEQ ID NO: 524578 - RNA, 22 nt, Human
uuuagcaauuauuaaggguuga

SEQ ID NO: 524579 - RNA, 17 nt, Human
ugccugccagcauugga

SEQ ID NO: 524580 - RNA, 22 nt, Human
ugcaaaaaggcagacuggugau

SEQ ID NO: 524581 - RNA, 22 nt, Human
ugucuuccucuuggcuugagcu

SEQ ID NO: 524582 - RNA, 22 nt, Human
auauuucaugggguuccauacu

SEQ ID NO: 524583 - RNA, 22 nt, Human
cugcccuguagcuguucuagca

SEQ ID NO: 524584 - RNA, 19 nt, Human
ggcugccuggagcgagggc

SEQ ID NO: 524585 - RNA, 22 nt, Human
aacauucaaguucugguuuaug

SEQ ID NO: 524586 - RNA, 22 nt, Human
agugugugcaugcauucgugca

SEQ ID NO: 524587 - RNA, 22 nt, Human
uaauuuacucagauguucaauc

SEQ ID NO: 524588 - RNA, 22 nt, Human
ucagaggcuugaagcccaagcc

SEQ ID NO: 524589 - RNA, 22 nt, Human
ugaggaugacgauggcaauggc

SEQ ID NO: 524590 - RNA, 22 nt, Human
guggccagaagacugcaaugcu

SEQ ID NO: 524591 - RNA, 22 nt, Human
agaggcagaaguguucaaaccc

SEQ ID NO: 524592 - RNA, 22 nt, Human
cccagccucugggcucacccaa

SEQ ID NO: 524593 - RNA, 22 nt, Human
uggcucuggccaccgggagggc

SEQ ID NO: 524594 - RNA, 22 nt, Human
augucagagcuuccacaauagu

SEQ ID NO: 524595 - RNA, 19 nt, Human
uucugggcauucauauuua

SEQ ID NO: 524596 - RNA, 22 nt, Human
acagagaccaguuacagcgucc

SEQ ID NO: 524597 - RNA, 22 nt, Human
gagggauggugugagaggcuca

SEQ ID NO: 524598 - RNA, 21 nt, Human
uuugaaagugggugauucuuu

SEQ ID NO: 524599 - RNA, 22 nt, Human
gcagcuggcucugggaaaaacu

SEQ ID NO: 524600 - RNA, 22 nt, Human
cuuccucccggcccaugcucug

SEQ ID NO: 524601 - RNA, 22 nt, Human
ccugggugaaaucucuccugca

SEQ ID NO: 524602 - RNA, 22 nt, Human
aaaaugugcaguuuuuaagcug

SEQ ID NO: 524603 - RNA, 22 nt, Human
acuggggagugguuuugggaag

SEQ ID NO: 524604 - RNA, 22 nt, Human
uuuuguaagaaacugccaagcc

SEQ ID NO: 524605 - RNA, 22 nt, Human
ggagaggauguuuuaguaacuu

SEQ ID NO: 524606 - RNA, 22 nt, Human
guggcaggaucacggcucacug

SEQ ID NO: 524607 - RNA, 22 nt, Human
aguuggagugaacaugagauug

SEQ ID NO: 524608 - RNA, 22 nt, Human
aucuuguuaaaaugcagaaacu

SEQ ID NO: 524609 - RNA, 22 nt, Human
uuucuauuuacagugcuaggua

SEQ ID NO: 524610 - RNA, 18 nt, Human
uacaugcauaaaugaagc

SEQ ID NO: 524611 - RNA, 22 nt, Human
cccaggcugauguucagcgggu

SEQ ID NO: 524612 - RNA, 22 nt, Human
cagggccagccauccugcuggg

SEQ ID NO: 524613 - RNA, 17 nt, Human
ggacacagcucauggcu

SEQ ID NO: 524614 - RNA, 22 nt, Human
ggccugagucacaucaggagag

SEQ ID NO: 524615 - RNA, 22 nt, Human
gcacacagacuaaccauauuuc

SEQ ID NO: 524616 - RNA, 21 nt, Human
uggcucugcucagagcagucc

SEQ ID NO: 524617 - RNA, 22 nt, Human
acagagagaauuggguuuacag

SEQ ID NO: 524618 - RNA, 22 nt, Human
auugucugaauccaaagcucug

SEQ ID NO: 524619 - RNA, 22 nt, Human
ggggaaacugaggcacagacag

SEQ ID NO: 524620 - RNA, 22 nt, Human
uucuaccauugggaaaacagcc

SEQ ID NO: 524621 - RNA, 22 nt, Human
aaaauguaaagcuugaguguag

SEQ ID NO: 524622 - RNA, 20 nt, Human
gcucccagccugcagucccc

SEQ ID NO: 524623 - RNA, 22 nt, Human
ccuucugcuggucaucccagug

SEQ ID NO: 524624 - RNA, 22 nt, Human
ggagggcaucaaucaggccugg

SEQ ID NO: 524625 - RNA, 22 nt, Human
cugcuuccaugcaauggcaguc

SEQ ID NO: 524626 - RNA, 22 nt, Human
ggcaggugaucuagagucaaua

SEQ ID NO: 524627 - RNA, 22 nt, Human
ccagcagcccucuuccaagacu

SEQ ID NO: 524628 - RNA, 22 nt, Human
gcugcuggagcuuugcagaagg

SEQ ID NO: 524629 - RNA, 22 nt, Human
ugccagcaguagcaguaggcca

SEQ ID NO: 524630 - RNA, 20 nt, Human
gcaagugaaaacuaugggug

SEQ ID NO: 524631 - RNA, 22 nt, Human
cuuacagagaagaaaauguagu

SEQ ID NO: 524632 - RNA, 22 nt, Human
gugauaaaauagaaacaguggu

SEQ ID NO: 524633 - RNA, 19 nt, Human
ucucuggcauagacucaau

SEQ ID NO: 524634 - RNA, 22 nt, Human
agucccuguacuuuccacugcc

SEQ ID NO: 524635 - RNA, 22 nt, Human
cacagucccauucgagaguaau

SEQ ID NO: 524636 - RNA, 22 nt, Human
uccagcucuaacaugcugggcc

SEQ ID NO: 524637 - RNA, 22 nt, Human
ugcagaccucccauggcugccu

SEQ ID NO: 524638 - RNA, 22 nt, Human
aaauguauugcauaggauauuu

SEQ ID NO: 524639 - RNA, 22 nt, Human
ucaguuuuaagguuugagaauu

SEQ ID NO: 524640 - RNA, 22 nt, Human
ucaaacuagccugacugguauu

SEQ ID NO: 524641 - RNA, 22 nt, Human
uuaccuguguguuugauacaua

SEQ ID NO: 524642 - RNA, 22 nt, Human
gggcucuguguucuagcucucg

SEQ ID NO: 524643 - RNA, 22 nt, Human
cuucauuucaggcugaagaaua

SEQ ID NO: 524644 - RNA, 22 nt, Human
gcucccacugcagcccugagcc

SEQ ID NO: 524645 - RNA, 21 nt, Human
ucacuagugccuucugucauu

SEQ ID NO: 524646 - RNA, 22 nt, Human
gagauauguuagaaagcuauug

SEQ ID NO: 524647 - RNA, 22 nt, Human
ccuguacuagggucucauugcc

SEQ ID NO: 524648 - RNA, 22 nt, Human
caaguccaagaucaagaagcca

SEQ ID NO: 524649 - RNA, 23 nt, Human
agaugaggcuucuccauguuggu

SEQ ID NO: 524650 - RNA, 22 nt, Human
gucugggccaggcgagccgagg

SEQ ID NO: 524651 - RNA, 19 nt, Human
agccagaacuaguguuucu

SEQ ID NO: 524652 - RNA, 22 nt, Human
caggaagagaacauggaggcug

SEQ ID NO: 524653 - RNA, 22 nt, Human
aggccuguuccuuccugggcac

SEQ ID NO: 524654 - RNA, 22 nt, Human
gaauuucaagcagugcaauguu

SEQ ID NO: 524655 - RNA, 22 nt, Human
ugagcuucaaaauaugugaauc

SEQ ID NO: 524656 - RNA, 22 nt, Human
uaauuuuacuuccugagcaccu

SEQ ID NO: 524657 - RNA, 22 nt, Human
agaauuguaagcaauuugauua

SEQ ID NO: 524658 - RNA, 20 nt, Human
uuagcuuuggcaauagugac

SEQ ID NO: 524659 - RNA, 22 nt, Human
cagggcuggauccuccagacuc

SEQ ID NO: 524660 - RNA, 22 nt, Human
cugccugugugugccugcagaa

SEQ ID NO: 524661 - RNA, 22 nt, Human
auuccaaagacagaagcagcug

SEQ ID NO: 524662 - RNA, 22 nt, Human
uccucuggauauaagccucacc

SEQ ID NO: 524663 - RNA, 19 nt, Human
ggcuccuguggcugcagcc

SEQ ID NO: 524664 - RNA, 21 nt, Human
uaaaugugagcagggcugggc

SEQ ID NO: 524665 - RNA, 22 nt, Human
gggcacagccuaacuauggaga

SEQ ID NO: 524666 - RNA, 22 nt, Human
aagagcuggaugaagaaaucaa

SEQ ID NO: 524667 - RNA, 22 nt, Human
gggcugggaauggcuaaguaug

SEQ ID NO: 524668 - RNA, 22 nt, Human
ugccacauggugcauuuccuag

SEQ ID NO: 524669 - RNA, 22 nt, Human
auuccaaagcacaucagaacua

SEQ ID NO: 524670 - RNA, 22 nt, Human
uaaguucaguuggucgaaguag

SEQ ID NO: 524671 - RNA, 17 nt, Human
gccuucucugcccucac

SEQ ID NO: 524672 - RNA, 22 nt, Human
cagcaucaacauucucagcucu

SEQ ID NO: 524673 - RNA, 22 nt, Human
caaggccugacugcuugucuaa

SEQ ID NO: 524674 - RNA, 19 nt, Human
uggaacaaacugcaaugac

SEQ ID NO: 524675 - RNA, 22 nt, Human
uccugaggaugguugaagugca

SEQ ID NO: 524676 - RNA, 22 nt, Human
agggaguuagaaauccaggaua

SEQ ID NO: 524677 - RNA, 22 nt, Human
cagcagcaaaucuagaagagga

SEQ ID NO: 524678 - RNA, 22 nt, Human
caugaaaauaacauuguuguga

SEQ ID NO: 524679 - RNA, 22 nt, Human
gccuguuuguuaugucauggua

SEQ ID NO: 524680 - RNA, 22 nt, Human
gugccaggugcuaagcugugcu

SEQ ID NO: 524681 - RNA, 22 nt, Human
ccugaagaugcuguggccuggu

SEQ ID NO: 524682 - RNA, 22 nt, Human
uggagcugaacuuugaggccag

SEQ ID NO: 524683 - RNA, 22 nt, Human
agggcccauagaucgucagcuu

SEQ ID NO: 524684 - RNA, 22 nt, Human
agugucugccagcugccaggug

SEQ ID NO: 524685 - RNA, 22 nt, Human
gggagcugguuccugcccucca

SEQ ID NO: 524686 - RNA, 22 nt, Human
ccagcugguguuccuuaggacc

SEQ ID NO: 524687 - RNA, 22 nt, Human
aagaguuaagcaacagauacca

SEQ ID NO: 524688 - RNA, 22 nt, Human
ugcuucuggggacaggcugccu

SEQ ID NO: 524689 - RNA, 22 nt, Human
acaucacacgccuuccaggagg

SEQ ID NO: 524690 - RNA, 22 nt, Human
aguggcagaucucuggucugga

SEQ ID NO: 524691 - RNA, 22 nt, Human
uaaggagagaauuuagagguuu

SEQ ID NO: 524692 - RNA, 22 nt, Human
caaaugcaaaauauaacccugu

SEQ ID NO: 524693 - RNA, 22 nt, Human
guagaauuuuaauaauggagau

SEQ ID NO: 524694 - RNA, 22 nt, Human
ggggaggccaguggaccguccc

SEQ ID NO: 524695 - RNA, 22 nt, Human
ggaucuggggcucugcugcuca

SEQ ID NO: 524696 - RNA, 22 nt, Human
gcugucugacuccaaguuggag

SEQ ID NO: 524697 - RNA, 22 nt, Human
cuuuucuggaaucaucucuaac

SEQ ID NO: 524698 - RNA, 22 nt, Human
cagcaaaauuugaggauugccu

SEQ ID NO: 524699 - RNA, 21 nt, Human
cccaggucguggucuucccag

SEQ ID NO: 524700 - RNA, 22 nt, Human
uuacaagaugggaaagggaagu

SEQ ID NO: 524701 - RNA, 22 nt, Human
gagaggaaagaaccaaugaccc

SEQ ID NO: 524702 - RNA, 22 nt, Human
gcugugcacuaccuauacaucc

SEQ ID NO: 524703 - RNA, 23 nt, Human
ucucagaggauuccugggccuug

SEQ ID NO: 524704 - RNA, 22 nt, Human
uucuuguuuauuaagauauaaa

SEQ ID NO: 524705 - RNA, 22 nt, Human
caugggagcuaucuccaucacu

SEQ ID NO: 524706 - RNA, 22 nt, Human
aaggagugcaugacucagagua

SEQ ID NO: 524707 - RNA, 22 nt, Human
caggggcucuaaugcaugauca

SEQ ID NO: 524708 - RNA, 23 nt, Human
ucuuguuuccuuugcgcuaucca

SEQ ID NO: 524709 - RNA, 22 nt, Human
agcaggcuuaugguugaaggga

SEQ ID NO: 524710 - RNA, 22 nt, Human
uuuucaguaaugucuacauaau

SEQ ID NO: 524711 - RNA, 22 nt, Human
ccuggccacucagguguggggc

SEQ ID NO: 524712 - RNA, 22 nt, Human
uugcaaaagccgaggcacucca

SEQ ID NO: 524713 - RNA, 22 nt, Human
uauauguguggauucuuguaga

SEQ ID NO: 524714 - RNA, 22 nt, Human
aguguccccuacagaggcauuc

SEQ ID NO: 524715 - RNA, 22 nt, Human
auguguuuugguggaucauuca

SEQ ID NO: 524716 - RNA, 22 nt, Human
uacagugcauagaggcaugaua

SEQ ID NO: 524717 - RNA, 22 nt, Human
acaggcucgugcgcgcacgugu

SEQ ID NO: 524718 - RNA, 21 nt, Human
cuggagucauuuucugaguag

SEQ ID NO: 524719 - RNA, 22 nt, Human
aaguccugugcuagagacaccu

SEQ ID NO: 524720 - RNA, 22 nt, Human
gacuguguccaugugcuggauu

SEQ ID NO: 524721 - RNA, 22 nt, Human
acuuuuaugauaaucaauguuc

SEQ ID NO: 524722 - RNA, 22 nt, Human
uuccuuggauacaaguaacuuu

SEQ ID NO: 524723 - RNA, 22 nt, Human
cuuuacagaaagagaacucugg

SEQ ID NO: 524724 - RNA, 22 nt, Human
uccuggccgccgcguggggccg

SEQ ID NO: 524725 - RNA, 22 nt, Human
ucugucugcgcuugcccuggug

SEQ ID NO: 524726 - RNA, 22 nt, Human
ggcuggcucagggcuugagaga

SEQ ID NO: 524727 - RNA, 22 nt, Human
uuuggaaaauauugaacugguu

SEQ ID NO: 524728 - RNA, 22 nt, Human
aaauguaguauguugcauguau

SEQ ID NO: 524729 - RNA, 22 nt, Human
agggcagcagcuccuccuagcu

SEQ ID NO: 524730 - RNA, 22 nt, Human
ucucaaauuuauacagaguuca

SEQ ID NO: 524731 - RNA, 22 nt, Human
cugccuuugcccuugacacugu

SEQ ID NO: 524732 - RNA, 22 nt, Human
ggccuuggggaggauggugucc

SEQ ID NO: 524733 - RNA, 22 nt, Human
aggaggcuguggagcacuccau

SEQ ID NO: 524734 - RNA, 22 nt, Human
gccccuuccaucaugugaggac

SEQ ID NO: 524735 - RNA, 22 nt, Human
ucacauuuucauauucucugag

SEQ ID NO: 524736 - RNA, 22 nt, Human
ugcauguuaagaaaauauugag

SEQ ID NO: 524737 - RNA, 22 nt, Human
ugccucugugggccuuccuggc

SEQ ID NO: 524738 - RNA, 22 nt, Human
uucacauuucauaccacagcuu

SEQ ID NO: 524739 - RNA, 22 nt, Human
cugcucuguauaugagcaggaa

SEQ ID NO: 524740 - RNA, 22 nt, Human
uuauuugcccauguuuagcaga

SEQ ID NO: 524741 - RNA, 22 nt, Human
auaauucagguuuucuggcaca

SEQ ID NO: 524742 - RNA, 22 nt, Human
cugggccagucucggccgcucu

SEQ ID NO: 524743 - RNA, 22 nt, Human
uuuuccucuguauuugaaaugc

SEQ ID NO: 524744 - RNA, 19 nt, Human
uuuacucuccaaggugagu

SEQ ID NO: 524745 - RNA, 22 nt, Human
aggggagcaaggccguggugua

SEQ ID NO: 524746 - RNA, 22 nt, Human
gguggccugcccugaucccugg

SEQ ID NO: 524747 - RNA, 18 nt, Human
gcacagagcccaggcucu

SEQ ID NO: 524748 - RNA, 22 nt, Human
aggcaacaugggccaggcagaa

SEQ ID NO: 524749 - RNA, 22 nt, Human
caguuucuacgacuuaagcaca

SEQ ID NO: 524750 - RNA, 22 nt, Human
uguccuggccaaggccuugcuu

SEQ ID NO: 524751 - RNA, 22 nt, Human
gggcuucuagaccagcagugag

SEQ ID NO: 524752 - RNA, 22 nt, Human
gugugcagcagagacaggacuc

SEQ ID NO: 524753 - RNA, 22 nt, Human
gagacugcauagauggccacaa

SEQ ID NO: 524754 - RNA, 22 nt, Human
gccaggcaauguguuagaagcg

SEQ ID NO: 524755 - RNA, 22 nt, Human
aggcccuuaggaccccugcgug

SEQ ID NO: 524756 - RNA, 22 nt, Human
cagugcauaaucuaaauggggg

SEQ ID NO: 524757 - RNA, 22 nt, Human
uggcagagaugaagaguuguuu

SEQ ID NO: 524758 - RNA, 22 nt, Human
aggaagccaugguggacgucua

SEQ ID NO: 524759 - RNA, 20 nt, Human
guguuucaugugauacaaug

SEQ ID NO: 524760 - RNA, 22 nt, Human
aaccucaggcucucuggacaau

SEQ ID NO: 524761 - RNA, 22 nt, Human
ggucuggcacucaugcagcagg

SEQ ID NO: 524762 - RNA, 18 nt, Human
cccacacagcaguagcuc

SEQ ID NO: 524763 - RNA, 22 nt, Human
uccuguuucaacccuuacacug

SEQ ID NO: 524764 - RNA, 22 nt, Human
ugggcugaguguggaacuaguu

SEQ ID NO: 524765 - RNA, 22 nt, Human
uuugcugaguugaaguuugagg

SEQ ID NO: 524766 - RNA, 22 nt, Human
gccaagcuuugcaggaguguug

SEQ ID NO: 524767 - RNA, 22 nt, Human
guaggaagcucugaggcuaguu

SEQ ID NO: 524768 - RNA, 22 nt, Human
aaguuucauuguucauguaaca

SEQ ID NO: 524769 - RNA, 22 nt, Human
cucucccccacagcagccuucu

SEQ ID NO: 524770 - RNA, 22 nt, Human
cagcuucagcgugacaccagug

SEQ ID NO: 524771 - RNA, 22 nt, Human
ggagaguuguuuuugccuagau

SEQ ID NO: 524772 - RNA, 22 nt, Human
cuucuuuacuuucuagaaauaa

SEQ ID NO: 524773 - RNA, 22 nt, Human
cuggaaagucaggucagaaacu

SEQ ID NO: 524774 - RNA, 22 nt, Human
uggcacuuagaucagguugggu

SEQ ID NO: 524775 - RNA, 21 nt, Human
ucugucucuccacugcccugc

SEQ ID NO: 524776 - RNA, 22 nt, Human
aaaggcuaugagauagaagaua

SEQ ID NO: 524777 - RNA, 22 nt, Human
uuugggcaguagauguaucacu

SEQ ID NO: 524778 - RNA, 22 nt, Human
ucucagcaacgauccggaguaa

SEQ ID NO: 524779 - RNA, 22 nt, Human
cucggaauggaacaacagcggu

SEQ ID NO: 524780 - RNA, 22 nt, Human
gcuaggaagaagggugcuugaa

SEQ ID NO: 524781 - RNA, 21 nt, Human
uggcugccuggcucugugguu

SEQ ID NO: 524782 - RNA, 21 nt, Human
agcugccuccacuucugaggc

SEQ ID NO: 524783 - RNA, 22 nt, Human
ucugggaguuagaauacauggg

SEQ ID NO: 524784 - RNA, 22 nt, Human
ggagccagugcccucuggugga

SEQ ID NO: 524785 - RNA, 22 nt, Human
gaggaacccagcugggguugcc

SEQ ID NO: 524786 - RNA, 22 nt, Human
uggagggcucuuucaccuggua

SEQ ID NO: 524787 - RNA, 22 nt, Human
ccucccacauccuagcucugcu

SEQ ID NO: 524788 - RNA, 22 nt, Human
cccagcaguuguuggugcacau

SEQ ID NO: 524789 - RNA, 22 nt, Human
ccaugugcuugcucuggcaccu

SEQ ID NO: 524790 - RNA, 22 nt, Human
uaggaaaagcacaggauguucu

SEQ ID NO: 524791 - RNA, 21 nt, Human
cagugggcugcugcgcuccag

SEQ ID NO: 524792 - RNA, 22 nt, Human
uugcagggaccugcagaaagcu

SEQ ID NO: 524793 - RNA, 22 nt, Human
ggggaagaauggcagaaaacau

SEQ ID NO: 524794 - RNA, 22 nt, Human
ggcaggugagagcucuuugaaa

SEQ ID NO: 524795 - RNA, 22 nt, Human
cccauggagugccugagggcca

SEQ ID NO: 524796 - RNA, 22 nt, Human
caggcugagcucuggccugggc

SEQ ID NO: 524797 - RNA, 22 nt, Human
cauguacacucauguaacuaua

SEQ ID NO: 524798 - RNA, 22 nt, Human
caaggaaggagagaugaugggu

SEQ ID NO: 524799 - RNA, 23 nt, Human
agcauuagagaugccagcccugu

SEQ ID NO: 524800 - RNA, 22 nt, Human
cagccugcagggcugccuguug

SEQ ID NO: 524801 - RNA, 22 nt, Human
ggucacugcucuaaacaaaagu

SEQ ID NO: 524802 - RNA, 22 nt, Human
uugcauugggagugaggagacc

SEQ ID NO: 524803 - RNA, 22 nt, Human
cccuggagggcagacagaugcc

SEQ ID NO: 524804 - RNA, 22 nt, Human
uggaaauuaaaauuccucuuaa

SEQ ID NO: 524805 - RNA, 22 nt, Human
uggcuggggccugaauccugca

SEQ ID NO: 524806 - RNA, 22 nt, Human
aaauuugauaagccauuguuac

SEQ ID NO: 524807 - RNA, 18 nt, Human
gcucugcccaggcugccc

SEQ ID NO: 524808 - RNA, 22 nt, Human
aaggcacuuuucuaaagaccuu

SEQ ID NO: 524809 - RNA, 22 nt, Human
acguuuucagugacugugcuuc

SEQ ID NO: 524810 - RNA, 22 nt, Human
acauuuuaauaugcuuagugug

SEQ ID NO: 524811 - RNA, 22 nt, Human
cagcagguauguuuguucagca

SEQ ID NO: 524812 - RNA, 22 nt, Human
cucugagggucuaaggagucac

SEQ ID NO: 524813 - RNA, 20 nt, Human
gccauccagccucccaggag

SEQ ID NO: 524814 - RNA, 22 nt, Human
ucccaggcugggggccugaagu

SEQ ID NO: 524815 - RNA, 22 nt, Human
aaggcagauauaaagacuagag

SEQ ID NO: 524816 - RNA, 22 nt, Human
uuuuaucuaccuaugcucauuu

SEQ ID NO: 524817 - RNA, 22 nt, Human
aaaagguagauucuccuucuau

SEQ ID NO: 524818 - RNA, 22 nt, Human
gccaaagcagucuugccucugc

SEQ ID NO: 524819 - RNA, 22 nt, Human
cuuuuccucaggaggagacgcg

SEQ ID NO: 524820 - RNA, 22 nt, Human
ugacaaaacugcaauuacuuuu

SEQ ID NO: 524821 - RNA, 22 nt, Human
agguggcucugacagcucuggu

SEQ ID NO: 524822 - RNA, 22 nt, Human
caggaaauauaggaaaaggaac

SEQ ID NO: 524823 - RNA, 21 nt, Human
agaugcugugcuccaggagca

SEQ ID NO: 524824 - RNA, 22 nt, Human
ugugaagguuaaauaauaugau

SEQ ID NO: 524825 - RNA, 22 nt, Human
uauuugaugguucuaaaacagc

SEQ ID NO: 524826 - RNA, 22 nt, Human
uuggcagcauuccagccaagca

SEQ ID NO: 524827 - RNA, 22 nt, Human
uucaggauggaguaccuuuuau

SEQ ID NO: 524828 - RNA, 22 nt, Human
gcugucacacaugggaucucag

SEQ ID NO: 524829 - RNA, 22 nt, Human
gagccucguggcggccacugcg

SEQ ID NO: 524830 - RNA, 19 nt, Human
uggcagggagaguuugaag

SEQ ID NO: 524831 - RNA, 22 nt, Human
ucucuggggguagaacucaggc

SEQ ID NO: 524832 - RNA, 22 nt, Human
ucagaggcuuccuuccucggag

SEQ ID NO: 524833 - RNA, 22 nt, Human
ucaguguuuuccagggucuacu

SEQ ID NO: 524834 - RNA, 22 nt, Human
uguguuuacuucuaugcaguuu

SEQ ID NO: 524835 - RNA, 22 nt, Human
agaaggcucacuaagagugacu

SEQ ID NO: 524836 - RNA, 22 nt, Human
aguuuagaagaggaacuuguua

SEQ ID NO: 524837 - RNA, 17 nt, Human
gucugggcuuuagagac

SEQ ID NO: 524838 - RNA, 18 nt, Human
aagcaggguccauugugc

SEQ ID NO: 524839 - RNA, 22 nt, Human
aaaaucugguaauuugaaugug

SEQ ID NO: 524840 - RNA, 22 nt, Human
ggcucuggugaggguaggagau

SEQ ID NO: 524841 - RNA, 22 nt, Human
gagucuggugauggucauuguc

SEQ ID NO: 524842 - RNA, 22 nt, Human
aagaggaagucuccauggagag

SEQ ID NO: 524843 - RNA, 22 nt, Human
uauugaaauccauuacguucuu

SEQ ID NO: 524844 - RNA, 22 nt, Human
augaacacauguacacauuucu

SEQ ID NO: 524845 - RNA, 22 nt, Human
cagccaggagcucccccugcuc

SEQ ID NO: 524846 - RNA, 22 nt, Human
ucuggaguccagauccauuugg

SEQ ID NO: 524847 - RNA, 22 nt, Human
auggcugcccacguuggugcuu

SEQ ID NO: 524848 - RNA, 22 nt, Human
aaagaguucuaugaucuuucca

SEQ ID NO: 524849 - RNA, 22 nt, Human
cugggucuggcuacugcuuccu

SEQ ID NO: 524850 - RNA, 22 nt, Human
guaucuuuugguggaaaaauaa

SEQ ID NO: 524851 - RNA, 22 nt, Human
aaugcacauauauguguauaca

SEQ ID NO: 524852 - RNA, 22 nt, Human
agcucugcuucuugggaagaug

SEQ ID NO: 524853 - RNA, 22 nt, Human
agugccauggaggaacagaugc

SEQ ID NO: 524854 - RNA, 22 nt, Human
gaggagaaugcgcaccacauau

SEQ ID NO: 524855 - RNA, 17 nt, Human
gguguauggggagggaa

SEQ ID NO: 524856 - RNA, 22 nt, Human
aggugggcgcugcucccgcugg

SEQ ID NO: 524857 - RNA, 22 nt, Human
agugucugcuuugagucaggug

SEQ ID NO: 524858 - RNA, 22 nt, Human
uucacagaugagaaaauugagg

SEQ ID NO: 524859 - RNA, 22 nt, Human
gcagagcauguccucaggacag

SEQ ID NO: 524860 - RNA, 22 nt, Human
agguccaguugccagaauggcc

SEQ ID NO: 524861 - RNA, 22 nt, Human
uuguccugugauuucagggccu

SEQ ID NO: 524862 - RNA, 22 nt, Human
agccuaggggguccugggccac

SEQ ID NO: 524863 - RNA, 20 nt, Human
gcugggggugugcugaguga

SEQ ID NO: 524864 - RNA, 22 nt, Human
gccuggaguagcauggcaagcc

SEQ ID NO: 524865 - RNA, 22 nt, Human
aaaagguuuugaguacaaauau

SEQ ID NO: 524866 - RNA, 22 nt, Human
cugggagucuggccucuggucc

SEQ ID NO: 524867 - RNA, 22 nt, Human
ccugagauggggauuauuccaa

SEQ ID NO: 524868 - RNA, 22 nt, Human
ggagugaguacuggaguagcug

SEQ ID NO: 524869 - RNA, 22 nt, Human
cccucccugaagaaguuacucu

SEQ ID NO: 524870 - RNA, 18 nt, Human
aggccucugugugcccag

SEQ ID NO: 524871 - RNA, 22 nt, Human
acaaagcacgagugccauggac

SEQ ID NO: 524872 - RNA, 22 nt, Human
cugcugcucgaccagucccagg

SEQ ID NO: 524873 - RNA, 22 nt, Human
guagcuuccagaaagugucuuu

SEQ ID NO: 524874 - RNA, 22 nt, Human
guucagcacaggugcucagaca

SEQ ID NO: 524875 - RNA, 21 nt, Human
aggcuguccuuugccagcccu

SEQ ID NO: 524876 - RNA, 22 nt, Human
ucugggcucugggaauuaggga

SEQ ID NO: 524877 - RNA, 22 nt, Human
ucucaggaguagugggauccau

SEQ ID NO: 524878 - RNA, 22 nt, Human
acagaauucucucugcagaggc

SEQ ID NO: 524879 - RNA, 22 nt, Human
uuacaauaccacaucaccucau

SEQ ID NO: 524880 - RNA, 22 nt, Human
ugcagcuguuacggacccuguc

SEQ ID NO: 524881 - RNA, 22 nt, Human
acuauacauugaauguuaaggu

SEQ ID NO: 524882 - RNA, 22 nt, Human
aggccuggugaaugaaguaucu

SEQ ID NO: 524883 - RNA, 22 nt, Human
ugccagcuuuugacuaucuuag

SEQ ID NO: 524884 - RNA, 22 nt, Human
cauucauuagaauagauaugua

SEQ ID NO: 524885 - RNA, 22 nt, Human
ugggaccugcucuuggaaugag

SEQ ID NO: 524886 - RNA, 20 nt, Human
uccagcugggaacagcugau

SEQ ID NO: 524887 - RNA, 22 nt, Human
ugaaugauauauugggaauaau

SEQ ID NO: 524888 - RNA, 22 nt, Human
gugacuguuuuuaggaggagua

SEQ ID NO: 524889 - RNA, 22 nt, Human
ccagcccuuagauaaaccuggc

SEQ ID NO: 524890 - RNA, 22 nt, Human
acaaugaauaucaugaaguacu

SEQ ID NO: 524891 - RNA, 22 nt, Human
aucccacaccccuacaacauau

SEQ ID NO: 524892 - RNA, 22 nt, Human
acagcugggugucccacuucug

SEQ ID NO: 524893 - RNA, 19 nt, Human
uuugaaagaguuuuauugg

SEQ ID NO: 524894 - RNA, 22 nt, Human
ucccagagccaagcuauggaug

SEQ ID NO: 524895 - RNA, 22 nt, Human
cccagggaagggcuaccugagg

SEQ ID NO: 524896 - RNA, 22 nt, Human
uauaaaauggcaucagcuccaa

SEQ ID NO: 524897 - RNA, 22 nt, Human
ugaaaucauugccaaguauuga

SEQ ID NO: 524898 - RNA, 20 nt, Human
ccuuuauuauuuguaugaug

SEQ ID NO: 524899 - RNA, 22 nt, Human
auucaguuaaaaacuguacuuc

SEQ ID NO: 524900 - RNA, 22 nt, Human
aggcuaggccuugcccuggaac

SEQ ID NO: 524901 - RNA, 22 nt, Human
gcuuccagggcucagucacugc

SEQ ID NO: 524902 - RNA, 23 nt, Human
ccugaagggucaggguccucagc

SEQ ID NO: 524903 - RNA, 22 nt, Human
gacaaaacacauuaguuuaaaa

SEQ ID NO: 524904 - RNA, 22 nt, Human
ucaagauaccaccauuauaugu

SEQ ID NO: 524905 - RNA, 23 nt, Human
acauuacuuagccagagucucag

SEQ ID NO: 524906 - RNA, 22 nt, Human
gcagcaugagcuauacaaagua

SEQ ID NO: 524907 - RNA, 21 nt, Human
ggggcagagcuaggcccugca

SEQ ID NO: 524908 - RNA, 22 nt, Human
aauaagaauuuacuugucaaga

SEQ ID NO: 524909 - RNA, 22 nt, Human
uuuucaguuugcacugcagugc

SEQ ID NO: 524910 - RNA, 22 nt, Human
gcucuggccagacccucagugg

SEQ ID NO: 524911 - RNA, 22 nt, Human
aguaaaauuaauggaucagaag

SEQ ID NO: 524912 - RNA, 22 nt, Human
acuguacaaauauugcaaaaua

SEQ ID NO: 524913 - RNA, 22 nt, Human
aacacauggcaagagcaggaaa

SEQ ID NO: 524914 - RNA, 22 nt, Human
ucagcaggcccauccuccaggc

SEQ ID NO: 524915 - RNA, 22 nt, Human
caguccugggcacagcccuggg

SEQ ID NO: 524916 - RNA, 20 nt, Human
ucccagucagccagagugag

SEQ ID NO: 524917 - RNA, 22 nt, Human
cagccugacuauggcugcaggu

SEQ ID NO: 524918 - RNA, 22 nt, Human
auaauacaugguugaucuuuuc

SEQ ID NO: 524919 - RNA, 23 nt, Human
caugugugacaguaucacuguuu

SEQ ID NO: 524920 - RNA, 22 nt, Human
agaggugacauaggagaggcuc

SEQ ID NO: 524921 - RNA, 22 nt, Human
aaugucugcucuacucaggagg

SEQ ID NO: 524922 - RNA, 22 nt, Human
gcugccaugccacagcacucac

SEQ ID NO: 524923 - RNA, 21 nt, Human
auuuagaaggaaauuuugcaa

SEQ ID NO: 524924 - RNA, 22 nt, Human
cggcagcaaaggaagccagguc

SEQ ID NO: 524925 - RNA, 22 nt, Human
aucugguuuggggauccuugug

SEQ ID NO: 524926 - RNA, 22 nt, Human
ucccagagauuuccucuccuuc

SEQ ID NO: 524927 - RNA, 22 nt, Human
cauugaaauauggaaacugaug

SEQ ID NO: 524928 - RNA, 23 nt, Human
gcagagucaaguagucaugagug

SEQ ID NO: 524929 - RNA, 19 nt, Human
ccugggucugcagcauuca

SEQ ID NO: 524930 - RNA, 22 nt, Human
aacacauuuugccuaggcaaua

SEQ ID NO: 524931 - RNA, 22 nt, Human
cagcauggagacaaagugggca

SEQ ID NO: 524932 - RNA, 22 nt, Human
uggcagcuggagggcaauggcc

SEQ ID NO: 524933 - RNA, 22 nt, Human
caucagcacuaugauuaaagua

SEQ ID NO: 524934 - RNA, 17 nt, Human
cuggagccuccaacucc

SEQ ID NO: 524935 - RNA, 22 nt, Human
gagacacacacaggagguggca

SEQ ID NO: 524936 - RNA, 20 nt, Human
aggaagccaaaggcugucuu

SEQ ID NO: 524937 - RNA, 22 nt, Human
agcuccugcccaggaaggcucu

SEQ ID NO: 524938 - RNA, 22 nt, Human
ugaguucaaguccaaguugcug

SEQ ID NO: 524939 - RNA, 22 nt, Human
aggcagcguagcaaggcuagua

SEQ ID NO: 524940 - RNA, 22 nt, Human
ucuuuuucuuauucccacacug

SEQ ID NO: 524941 - RNA, 22 nt, Human
uugucugugaaauggaaauagu

SEQ ID NO: 524942 - RNA, 22 nt, Human
gcagauggacuguaugaccuga

SEQ ID NO: 524943 - RNA, 22 nt, Human
ugcuuuaucaaagcuauaguga

SEQ ID NO: 524944 - RNA, 22 nt, Human
cuggccuggagccucugggugg

SEQ ID NO: 524945 - RNA, 22 nt, Human
auacaguguacuauuuagcagu

SEQ ID NO: 524946 - RNA, 22 nt, Human
gaucuugaaauaucuuuuccua

SEQ ID NO: 524947 - RNA, 22 nt, Human
agugaauguccccgcgggucag

SEQ ID NO: 524948 - RNA, 22 nt, Human
gucugagaaucuugcauaucau

SEQ ID NO: 524949 - RNA, 22 nt, Human
uggcucugugcuucuaguaucu

SEQ ID NO: 524950 - RNA, 18 nt, Human
aggccugggaagcugagg

SEQ ID NO: 524951 - RNA, 22 nt, Human
acacaguaugacauuggcagag

SEQ ID NO: 524952 - RNA, 22 nt, Human
ccaaaauguuugaaugcaugug

SEQ ID NO: 524953 - RNA, 22 nt, Human
ugauuuccuagcugacaugaaa

SEQ ID NO: 524954 - RNA, 22 nt, Human
ccuuucucuuugcugaucaugu

SEQ ID NO: 524955 - RNA, 22 nt, Human
aagucauugguagcuugauagg

SEQ ID NO: 524956 - RNA, 22 nt, Human
ggcccacuugaaauggagcuca

SEQ ID NO: 524957 - RNA, 22 nt, Human
uuuuggcucugucuguaucuuu

SEQ ID NO: 524958 - RNA, 22 nt, Human
ggagccaggcauaucggggcac

SEQ ID NO: 524959 - RNA, 22 nt, Human
caugugugaagacugcgggcca

SEQ ID NO: 524960 - RNA, 22 nt, Human
auccaaaguagauuaagucaca

SEQ ID NO: 524961 - RNA, 22 nt, Human
cagggcagggccacacccccug

SEQ ID NO: 524962 - RNA, 22 nt, Human
ccauacacacaccaaauuugua

SEQ ID NO: 524963 - RNA, 23 nt, Human
ugucauugugacuacagaaccag

SEQ ID NO: 524964 - RNA, 22 nt, Human
gcccccucuuuggagccagcca

SEQ ID NO: 524965 - RNA, 22 nt, Human
uaugacaagguggaguaugagu

SEQ ID NO: 524966 - RNA, 22 nt, Human
uuucuaaguaucuugcaguuuu

SEQ ID NO: 524967 - RNA, 22 nt, Human
cugaaaauguuacacaggaaga

SEQ ID NO: 524968 - RNA, 22 nt, Human
aguguuucucagaagggccuau

SEQ ID NO: 524969 - RNA, 22 nt, Human
uauacaggaacuguuggcuccc

SEQ ID NO: 524970 - RNA, 22 nt, Human
cugucaggggcggguggagcgg

SEQ ID NO: 524971 - RNA, 22 nt, Human
agauuucaauggauauugcaag

SEQ ID NO: 524972 - RNA, 22 nt, Human
cagagucucugggaggcugggu

SEQ ID NO: 524973 - RNA, 22 nt, Human
cuucucuuccuuugucaacuga

SEQ ID NO: 524974 - RNA, 22 nt, Human
aucaguuuaacugucaagagcc

SEQ ID NO: 524975 - RNA, 21 nt, Human
agacagagugcagucuacaua

SEQ ID NO: 524976 - RNA, 22 nt, Human
ggcagcugugaagugccucaca

SEQ ID NO: 524977 - RNA, 22 nt, Human
uacauucuacuuuuucacuccc

SEQ ID NO: 524978 - RNA, 22 nt, Human
ucgcauuugggcaggagaugcu

SEQ ID NO: 524979 - RNA, 22 nt, Human
agguucuugguguccagauuuc

SEQ ID NO: 524980 - RNA, 22 nt, Human
ccuggccugcucggcucuuaag

SEQ ID NO: 524981 - RNA, 20 nt, Human
aggcagagcgcacuuuuaga

SEQ ID NO: 524982 - RNA, 22 nt, Human
aggcuggguaccugucauaugc

SEQ ID NO: 524983 - RNA, 22 nt, Human
ccucuggcaacuucacagccca

SEQ ID NO: 524984 - RNA, 22 nt, Human
guguacauagaauugugcuuug

SEQ ID NO: 524985 - RNA, 22 nt, Human
ccagacaggaacacacaucucc

SEQ ID NO: 524986 - RNA, 22 nt, Human
ugacccugcuucuuggugcagg

SEQ ID NO: 524987 - RNA, 22 nt, Human
cuacuucugugaugaaacuaca

SEQ ID NO: 524988 - RNA, 22 nt, Human
uagauaaaagggcaaagggcau

SEQ ID NO: 524989 - RNA, 22 nt, Human
gcaaacauucaggaguacagga

SEQ ID NO: 524990 - RNA, 22 nt, Human
aaggcaggaugcggacccaucu

SEQ ID NO: 524991 - RNA, 22 nt, Human
ggccugagcucuggggaggcaa

SEQ ID NO: 524992 - RNA, 22 nt, Human
gucauuguguggacauggagaa

SEQ ID NO: 524993 - RNA, 22 nt, Human
agggugaaucucacaacucuua

SEQ ID NO: 524994 - RNA, 22 nt, Human
aaauauuugucugaggcgguug

SEQ ID NO: 524995 - RNA, 20 nt, Human
uccuggccucccuggggcuc

SEQ ID NO: 524996 - RNA, 22 nt, Human
ugggcuacucugggagccuaac

SEQ ID NO: 524997 - RNA, 22 nt, Human
ucauugcaccccagucccagcu

SEQ ID NO: 524998 - RNA, 22 nt, Human
agagaauuuuaaaagccuugaa

SEQ ID NO: 524999 - RNA, 20 nt, Human
ugccaugguaacagagugug

SEQ ID NO: 525000 - RNA, 22 nt, Human
aggggagccgaggggcaucugu

SEQ ID NO: 525001 - RNA, 22 nt, Human
uggccuggggaccugugagacc

SEQ ID NO: 525002 - RNA, 22 nt, Human
gagcuuuaccuuagguucuguu

SEQ ID NO: 525003 - RNA, 22 nt, Human
gguguccaucaggcugugcuuc

SEQ ID NO: 525004 - RNA, 22 nt, Human
caguauuuguucccuaucaaug

SEQ ID NO: 525005 - RNA, 22 nt, Human
gcccagcacauugcugaggacc

SEQ ID NO: 525006 - RNA, 22 nt, Human
ggucacccaugaucacaucacc

SEQ ID NO: 525007 - RNA, 22 nt, Human
uuggcucaggaccccugugacu

SEQ ID NO: 525008 - RNA, 19 nt, Human
gccugcagaaaaggcaggg

SEQ ID NO: 525009 - RNA, 22 nt, Human
caguuugucuugauucagaaca

SEQ ID NO: 525010 - RNA, 22 nt, Human
aguuuauagcccagauucaugg

SEQ ID NO: 525011 - RNA, 22 nt, Human
gaggagaagcuaagaaacacag

SEQ ID NO: 525012 - RNA, 22 nt, Human
gaggucugggauggggccugaa

SEQ ID NO: 525013 - RNA, 22 nt, Human
gcucccagcuggagccucaaca

SEQ ID NO: 525014 - RNA, 22 nt, Human
uccucccuucucacugggaagg

SEQ ID NO: 525015 - RNA, 23 nt, Human
ccuggggcacuugaguccucauc

SEQ ID NO: 525016 - RNA, 22 nt, Human
gauucaauguugcagauggaau

SEQ ID NO: 525017 - RNA, 22 nt, Human
ucuuuuggguucuuaugauuua

SEQ ID NO: 525018 - RNA, 22 nt, Human
uuuggaauuccauuucugcauu

SEQ ID NO: 525019 - RNA, 22 nt, Human
guugaaagaugucuugguuccc

SEQ ID NO: 525020 - RNA, 22 nt, Human
cacauacuuguguguacauaug

SEQ ID NO: 525021 - RNA, 19 nt, Human
ucaaagucugagucacuuu

SEQ ID NO: 525022 - RNA, 22 nt, Human
uccagggaugccagccauguug

SEQ ID NO: 525023 - RNA, 22 nt, Human
auuccacauaggccuucaugac

SEQ ID NO: 525024 - RNA, 22 nt, Human
uccccuuggcuuggucaagagg

SEQ ID NO: 525025 - RNA, 22 nt, Human
aagaaacuguugcgugacagcg

SEQ ID NO: 525026 - RNA, 22 nt, Human
aagcuuuaagugucagucagcc

SEQ ID NO: 525027 - RNA, 22 nt, Human
uccucugcuggaagggcaagag

SEQ ID NO: 525028 - RNA, 22 nt, Human
uccaucagauucccuccugaga

SEQ ID NO: 525029 - RNA, 22 nt, Human
ucuggaucucccucauccuggg

SEQ ID NO: 525030 - RNA, 22 nt, Human
gggaaggacacagccaugacug

SEQ ID NO: 525031 - RNA, 23 nt, Human
uggcuaaacaguggagaaagcuu

SEQ ID NO: 525032 - RNA, 21 nt, Human
agaagccuggguggagguggg

SEQ ID NO: 525033 - RNA, 22 nt, Human
gcaggccugacuguagggggca

SEQ ID NO: 525034 - RNA, 22 nt, Human
caggaccccauauucacugaac

SEQ ID NO: 525035 - RNA, 22 nt, Human
ucuaccacuaagugugcuuuga

SEQ ID NO: 525036 - RNA, 22 nt, Human
uuaggaaaaucaugagagauga

SEQ ID NO: 525037 - RNA, 20 nt, Human
gcaaggcacagugaggaggg

SEQ ID NO: 525038 - RNA, 22 nt, Human
gauuucaaguaucuugggcgag

SEQ ID NO: 525039 - RNA, 22 nt, Human
agcauuuauuucuuagaaauug

SEQ ID NO: 525040 - RNA, 22 nt, Human
guuauguaugggggccuuauga

SEQ ID NO: 525041 - RNA, 18 nt, Human
uaugagaagauuagcaau

SEQ ID NO: 525042 - RNA, 22 nt, Human
uuuacagcuagacauaccugag

SEQ ID NO: 525043 - RNA, 18 nt, Human
ggccucuggacuggcagc

SEQ ID NO: 525044 - RNA, 20 nt, Human
ugcccagcaagagugcaguu

SEQ ID NO: 525045 - RNA, 22 nt, Human
acagugcagugugaugaguauu

SEQ ID NO: 525046 - RNA, 22 nt, Human
gggcagcagaggaucccuuaau

SEQ ID NO: 525047 - RNA, 22 nt, Human
uguuuaaauagaacauacugca

SEQ ID NO: 525048 - RNA, 22 nt, Human
uccuuggcaugccgucuucucc

SEQ ID NO: 525049 - RNA, 22 nt, Human
cagugcaauuacaagcuaauuc

SEQ ID NO: 525050 - RNA, 22 nt, Human
agaaguauucugcauguacuga

SEQ ID NO: 525051 - RNA, 22 nt, Human
uuucugaauuccuaggauguug

SEQ ID NO: 525052 - RNA, 22 nt, Human
cugucugaauccuaagcuuccu

SEQ ID NO: 525053 - RNA, 22 nt, Human
agagaaaguccugaucucucua

SEQ ID NO: 525054 - RNA, 19 nt, Human
cuggcagccugucuguguc

SEQ ID NO: 525055 - RNA, 22 nt, Human
ucagcugagcuccagcucauag

SEQ ID NO: 525056 - RNA, 22 nt, Human
ucugguuagccaauaaugccaa

SEQ ID NO: 525057 - RNA, 22 nt, Human
ccugguguugccaaucugugcc

SEQ ID NO: 525058 - RNA, 22 nt, Human
aguugcagacgcagagauguug

SEQ ID NO: 525059 - RNA, 22 nt, Human
gagccuggauugucaccgacuu

SEQ ID NO: 525060 - RNA, 19 nt, Human
ggaccagguccugggcagc

SEQ ID NO: 525061 - RNA, 22 nt, Human
ugaaugaguuuggcugcuguuc

SEQ ID NO: 525062 - RNA, 22 nt, Human
uucaguguuaaauucaaagagu

SEQ ID NO: 525063 - RNA, 22 nt, Human
ggaagagggaaccacgacugua

SEQ ID NO: 525064 - RNA, 22 nt, Human
uacagugugacauuucuacaaa

SEQ ID NO: 525065 - RNA, 22 nt, Human
caggccugucugcacaugaggc

SEQ ID NO: 525066 - RNA, 22 nt, Human
uguauuccaaaaugcugaggau

SEQ ID NO: 525067 - RNA, 22 nt, Human
cagagagagucaaaucuuugcu

SEQ ID NO: 525068 - RNA, 18 nt, Human
gcagcuuuugauucaccc

SEQ ID NO: 525069 - RNA, 22 nt, Human
uccugggcuugcuccuccagcu

SEQ ID NO: 525070 - RNA, 22 nt, Human
ugugccagaaaauaugcugagg

SEQ ID NO: 525071 - RNA, 22 nt, Human
ugagcugggcugggcugagcug

SEQ ID NO: 525072 - RNA, 22 nt, Human
uucccaguuagucauuuuuaca

SEQ ID NO: 525073 - RNA, 22 nt, Human
ggccugcuccgggggcugagcu

SEQ ID NO: 525074 - RNA, 22 nt, Human
guccuuggcugggcuugccucg

SEQ ID NO: 525075 - RNA, 22 nt, Human
cacauacaaggcacacuggagg

SEQ ID NO: 525076 - RNA, 22 nt, Human
ccccacucucggccagauaggc

SEQ ID NO: 525077 - RNA, 22 nt, Human
uuauuuugguaaauguuugccu

SEQ ID NO: 525078 - RNA, 22 nt, Human
acacugaguauugaguagggua

SEQ ID NO: 525079 - RNA, 20 nt, Human
gcccacucuaauccacuguc

SEQ ID NO: 525080 - RNA, 22 nt, Human
gaccugccugagcugccucugc

SEQ ID NO: 525081 - RNA, 22 nt, Human
uguccuggggacaagaggcccu

SEQ ID NO: 525082 - RNA, 22 nt, Human
uagaaaugauuuugaugcuuca

SEQ ID NO: 525083 - RNA, 22 nt, Human
ugucuuuauauauuuggaaaau

SEQ ID NO: 525084 - RNA, 22 nt, Human
agaugaaaauacgugacuuuaa

SEQ ID NO: 525085 - RNA, 22 nt, Human
aaaugcaugugcuauagaugug

SEQ ID NO: 525086 - RNA, 22 nt, Human
cucagaauuuagggcucugagg

SEQ ID NO: 525087 - RNA, 22 nt, Human
gagguucauucagcucugucac

SEQ ID NO: 525088 - RNA, 22 nt, Human
ccugggcagggcuggacucuca

SEQ ID NO: 525089 - RNA, 22 nt, Human
gggcugagggguaucucauggg

SEQ ID NO: 525090 - RNA, 22 nt, Human
caggcgggcaggugcggccccu

SEQ ID NO: 525091 - RNA, 22 nt, Human
caauuucucgaacucuaaucca

SEQ ID NO: 525092 - RNA, 22 nt, Human
guaacagaaagucaugcucauu

SEQ ID NO: 525093 - RNA, 22 nt, Human
gggaaggcugccugagggaugg

SEQ ID NO: 525094 - RNA, 22 nt, Human
uuugcauuaucucacuuauaua

SEQ ID NO: 525095 - RNA, 22 nt, Human
gcugggcuguaguuugcugacc

SEQ ID NO: 525096 - RNA, 22 nt, Human
ugcuggaguggcacuguguggc

SEQ ID NO: 525097 - RNA, 22 nt, Human
ugggcucugaagggucccggau

SEQ ID NO: 525098 - RNA, 22 nt, Human
gaugaggaaaccaaggcucagg

SEQ ID NO: 525099 - RNA, 22 nt, Human
uuauuuguggcauaugagacga

SEQ ID NO: 525100 - RNA, 22 nt, Human
aguauuuccuggcuuaucugcu

SEQ ID NO: 525101 - RNA, 22 nt, Human
uucagucuccucauuuuacaaa

SEQ ID NO: 525102 - RNA, 21 nt, Human
gugucaugguugacuuuggca

SEQ ID NO: 525103 - RNA, 22 nt, Human
gagaggcccuguggucccagcu

SEQ ID NO: 525104 - RNA, 22 nt, Human
cugagcucuaaugucagccuug

SEQ ID NO: 525105 - RNA, 22 nt, Human
ggcacagccacuuuggagaacu

SEQ ID NO: 525106 - RNA, 22 nt, Human
uugaagaucuuugcauugcagg

SEQ ID NO: 525107 - RNA, 22 nt, Human
cuucuggguauuccagauaccu

SEQ ID NO: 525108 - RNA, 22 nt, Human
ucugggucuaugaucucacuuc

SEQ ID NO: 525109 - RNA, 22 nt, Human
gucccagagagcacuaguccau

SEQ ID NO: 525110 - RNA, 22 nt, Human
guccagccagcugguccuugcc

SEQ ID NO: 525111 - RNA, 22 nt, Human
gccaccucccaggacgaggcug

SEQ ID NO: 525112 - RNA, 22 nt, Human
ucaucaguguccuuaucacuua

SEQ ID NO: 525113 - RNA, 22 nt, Human
aaugggaaaagaguaugauuua

SEQ ID NO: 525114 - RNA, 22 nt, Human
caguauuuauggcuugaguauu

SEQ ID NO: 525115 - RNA, 22 nt, Human
uauuuugacuauuaaaccaaca

SEQ ID NO: 525116 - RNA, 22 nt, Human
ccagcaccuugaucuuggaguu

SEQ ID NO: 525117 - RNA, 22 nt, Human
ucagcacuuggauuucagagau

SEQ ID NO: 525118 - RNA, 22 nt, Human
gacagcagccacagggagaggg

SEQ ID NO: 525119 - RNA, 22 nt, Human
ugcuggccugggcugcaccuug

SEQ ID NO: 525120 - RNA, 22 nt, Human
ugggaccuguuacauugaguua

SEQ ID NO: 525121 - RNA, 22 nt, Human
agacugggauucucccugauca

SEQ ID NO: 525122 - RNA, 22 nt, Human
aggucugggcaccacuggcugc

SEQ ID NO: 525123 - RNA, 22 nt, Human
cagcuguggggagcuugggcca

SEQ ID NO: 525124 - RNA, 22 nt, Human
guuuuguugcugcagagcucaa

SEQ ID NO: 525125 - RNA, 22 nt, Human
gggcugggauggcuugaagauu

SEQ ID NO: 525126 - RNA, 22 nt, Human
ugcucuggagggugaagcuuuu

SEQ ID NO: 525127 - RNA, 22 nt, Human
aggucauuuccuuagaggcaga

SEQ ID NO: 525128 - RNA, 22 nt, Human
ugagcuggucacuccuucugaa

SEQ ID NO: 525129 - RNA, 22 nt, Human
gcucagucuuugugggguacgg

SEQ ID NO: 525130 - RNA, 22 nt, Human
caguuuuucaaaauuacaugau

SEQ ID NO: 525131 - RNA, 22 nt, Human
gugaaugacauauuuuguacug

SEQ ID NO: 525132 - RNA, 22 nt, Human
agaaagggagagccagcacacg

SEQ ID NO: 525133 - RNA, 17 nt, Human
agugaggagauuggaag

SEQ ID NO: 525134 - RNA, 22 nt, Human
cccaggagauggagguugcagu

SEQ ID NO: 525135 - RNA, 17 nt, Human
agcugccagggagugug

SEQ ID NO: 525136 - RNA, 22 nt, Human
gggugaggcccauuugaggcca

SEQ ID NO: 525137 - RNA, 22 nt, Human
uccuguguaaauagaucugguu

SEQ ID NO: 525138 - RNA, 22 nt, Human
ugucuuuacuuagaaguucagg

SEQ ID NO: 525139 - RNA, 22 nt, Human
ggcaggugugagaucgaggcca

SEQ ID NO: 525140 - RNA, 22 nt, Human
uaaggccauuauggugggcccg

SEQ ID NO: 525141 - RNA, 20 nt, Human
uccuggagcugcuugaauuc

SEQ ID NO: 525142 - RNA, 22 nt, Human
gcugugugcucacguaguggaa

SEQ ID NO: 525143 - RNA, 22 nt, Human
auuugugauaauuuguuacagc

SEQ ID NO: 525144 - RNA, 22 nt, Human
gggcugucaugugucagugacc

SEQ ID NO: 525145 - RNA, 22 nt, Human
ccugggucccagccaggcuuug

SEQ ID NO: 525146 - RNA, 22 nt, Human
augcccaaugucacaauuuuug

SEQ ID NO: 525147 - RNA, 22 nt, Human
ucugucauuagccuugacugua

SEQ ID NO: 525148 - RNA, 22 nt, Human
caaaugugacuuuugggcuucu

SEQ ID NO: 525149 - RNA, 19 nt, Human
ggcagacacaguugacaug

SEQ ID NO: 525150 - RNA, 22 nt, Human
ucccuucaucagugagcaagcc

SEQ ID NO: 525151 - RNA, 22 nt, Human
agggcugggcugcuuguuguca

SEQ ID NO: 525152 - RNA, 22 nt, Human
ucagcacucgcuaccuaguaaa

SEQ ID NO: 525153 - RNA, 23 nt, Human
gggagaauaugaggaugauggug

SEQ ID NO: 525154 - RNA, 22 nt, Human
caggaacauuguagaauugaaa

SEQ ID NO: 525155 - RNA, 22 nt, Human
gggggcucugacucccucagcu

SEQ ID NO: 525156 - RNA, 22 nt, Human
cuuauguaaaacggaaagggaa

SEQ ID NO: 525157 - RNA, 22 nt, Human
gagguaucuuagagaguguaga

SEQ ID NO: 525158 - RNA, 22 nt, Human
aaugacaaauauggaagccuga

SEQ ID NO: 525159 - RNA, 22 nt, Human
ugcacagagagaugagacacgu

SEQ ID NO: 525160 - RNA, 19 nt, Human
gaggagcuaucggagacag

SEQ ID NO: 525161 - RNA, 22 nt, Human
aggcaggucacaugcuuggcga

SEQ ID NO: 525162 - RNA, 22 nt, Human
agcuggagaauguggaugaucc

SEQ ID NO: 525163 - RNA, 22 nt, Human
gagaacaggcucuggagucaga

SEQ ID NO: 525164 - RNA, 22 nt, Human
auuugcuuccuaauacucauau

SEQ ID NO: 525165 - RNA, 22 nt, Human
ggguggggcccaggaaaucuau

SEQ ID NO: 525166 - RNA, 22 nt, Human
ucgaacucauagucguagcugu

SEQ ID NO: 525167 - RNA, 22 nt, Human
aagggcuccacuugaaucacac

SEQ ID NO: 525168 - RNA, 22 nt, Human
aaguccaggcuggcguagaguc

SEQ ID NO: 525169 - RNA, 22 nt, Human
guccacagcuggccagggccuc

SEQ ID NO: 525170 - RNA, 22 nt, Human
guucauuuuucccuaaugagua

SEQ ID NO: 525171 - RNA, 22 nt, Human
cuguggggaagauagaaccgac

SEQ ID NO: 525172 - RNA, 22 nt, Human
gcugaggcaagauuugaaccca

SEQ ID NO: 525173 - RNA, 22 nt, Human
caguguggcugagacagaggcu

SEQ ID NO: 525174 - RNA, 22 nt, Human
agcugcuacugcucugccagag

SEQ ID NO: 525175 - RNA, 22 nt, Human
gguggcugguuuuauaagaggu

SEQ ID NO: 525176 - RNA, 22 nt, Human
gcuggcuugauaguuucugcuu

SEQ ID NO: 525177 - RNA, 21 nt, Human
ucagaggcugggggaaugccc

SEQ ID NO: 525178 - RNA, 22 nt, Human
augagguacuaguauauacgua

SEQ ID NO: 525179 - RNA, 22 nt, Human
uggguccucugagagggcagcg

SEQ ID NO: 525180 - RNA, 22 nt, Human
acauuucugcuagaauagguga

SEQ ID NO: 525181 - RNA, 19 nt, Human
ugucucagugucccuuccu

SEQ ID NO: 525182 - RNA, 22 nt, Human
cuucugggauuaauuuuuccug

SEQ ID NO: 525183 - RNA, 18 nt, Human
agcuccugaacucugugg

SEQ ID NO: 525184 - RNA, 22 nt, Human
ugggcaaaugucacuuucuuuu

SEQ ID NO: 525185 - RNA, 22 nt, Human
ccagcagcagcguccaaggaga

SEQ ID NO: 525186 - RNA, 22 nt, Human
cugagggcaugaacauuccaua

SEQ ID NO: 525187 - RNA, 22 nt, Human
aggaagcuuggggcagggcuac

SEQ ID NO: 525188 - RNA, 22 nt, Human
uuaaagcaaccaucaauuugga

SEQ ID NO: 525189 - RNA, 22 nt, Human
cccaggcuggcacugcugaagu

SEQ ID NO: 525190 - RNA, 22 nt, Human
gcugggcucugucaugccuucc

SEQ ID NO: 525191 - RNA, 22 nt, Human
ugagcuacacacuaggcauggg

SEQ ID NO: 525192 - RNA, 22 nt, Human
auggcagccuguggacagucaa

SEQ ID NO: 525193 - RNA, 22 nt, Human
cuuagcuuuuccagcuucuaga

SEQ ID NO: 525194 - RNA, 22 nt, Human
ccucauuaacacaaugucauuu

SEQ ID NO: 525195 - RNA, 22 nt, Human
cgcugauaaacgucacguuccc

SEQ ID NO: 525196 - RNA, 22 nt, Human
cuuauguacacacauauauugu

SEQ ID NO: 525197 - RNA, 22 nt, Human
agcuuccuacaaccaucucaga

SEQ ID NO: 525198 - RNA, 22 nt, Human
gcuccuggcuccaggcagccaa

SEQ ID NO: 525199 - RNA, 22 nt, Human
ggagucuuggccugcugagaaa

SEQ ID NO: 525200 - RNA, 22 nt, Human
ccugccugauuccaggauggcu

SEQ ID NO: 525201 - RNA, 22 nt, Human
aggccagggcacugcucuuuag

SEQ ID NO: 525202 - RNA, 22 nt, Human
uguggagcucagaaguagcagu

SEQ ID NO: 525203 - RNA, 22 nt, Human
cccagcacaggcaauuccauac

SEQ ID NO: 525204 - RNA, 22 nt, Human
ugacacauuaaaugcucacaaa

SEQ ID NO: 525205 - RNA, 22 nt, Human
uacacaaaggcacucuguuguu

SEQ ID NO: 525206 - RNA, 22 nt, Human
auuugucaauaagaugaacaua

SEQ ID NO: 525207 - RNA, 22 nt, Human
ucagggacagggugcugcugcg

SEQ ID NO: 525208 - RNA, 22 nt, Human
cccucuggcucuucucaggccg

SEQ ID NO: 525209 - RNA, 21 nt, Human
acuggcugccaugauccaggg

SEQ ID NO: 525210 - RNA, 22 nt, Human
uccagucaucucccuucacauu

SEQ ID NO: 525211 - RNA, 22 nt, Human
gguggcugcacccuggcuaacu

SEQ ID NO: 525212 - RNA, 22 nt, Human
ggugugccuggggcuuagcugc

SEQ ID NO: 525213 - RNA, 20 nt, Human
aaagucuuaugguuaauuuu

SEQ ID NO: 525214 - RNA, 22 nt, Human
uagcagcucacagccucccauu

SEQ ID NO: 525215 - RNA, 22 nt, Human
uggcuuccuccagagcaggagg

SEQ ID NO: 525216 - RNA, 22 nt, Human
agacaggcuuugcuguauauca

SEQ ID NO: 525217 - RNA, 22 nt, Human
aagcuuacaguuccacguagca

SEQ ID NO: 525218 - RNA, 22 nt, Human
aaguguagauuauggagugucu

SEQ ID NO: 525219 - RNA, 22 nt, Human
gggcuccaccuagggacacugg

SEQ ID NO: 525220 - RNA, 22 nt, Human
caugaagcucuugcaccucuag

SEQ ID NO: 525221 - RNA, 22 nt, Human
cauguaauccuggggagaugaa

SEQ ID NO: 525222 - RNA, 22 nt, Human
uuagaaaucaccucugaagauc

SEQ ID NO: 525223 - RNA, 22 nt, Human
auagucuuagucuauaguuuug

SEQ ID NO: 525224 - RNA, 18 nt, Human
aguuucagggcaggaaac

SEQ ID NO: 525225 - RNA, 22 nt, Human
aggcucaguucuguggugagcc

SEQ ID NO: 525226 - RNA, 22 nt, Human
gguccuggcagucuuugguugu

SEQ ID NO: 525227 - RNA, 22 nt, Human
gggccugacugagagcuccuca

SEQ ID NO: 525228 - RNA, 22 nt, Human
agccagcuggagaccacuguuu

SEQ ID NO: 525229 - RNA, 22 nt, Human
uagguucagcuuccacugccua

SEQ ID NO: 525230 - RNA, 19 nt, Human
ggucucagugcagcugcag

SEQ ID NO: 525231 - RNA, 22 nt, Human
cugcccugggccaggaagcggc

SEQ ID NO: 525232 - RNA, 22 nt, Human
cagucccaguuugagacucugg

SEQ ID NO: 525233 - RNA, 22 nt, Human
ggagccuggcaaugcugcgucc

SEQ ID NO: 525234 - RNA, 22 nt, Human
ucugcaucauuuuucagagccg

SEQ ID NO: 525235 - RNA, 22 nt, Human
aaacucuguugagauaauauuu

SEQ ID NO: 525236 - RNA, 21 nt, Human
agcaggcuuuggaguggggcu

SEQ ID NO: 525237 - RNA, 22 nt, Human
gaggaggcuuccgggaggcacg

SEQ ID NO: 525238 - RNA, 22 nt, Human
caggccucuccuuagucuggca

SEQ ID NO: 525239 - RNA, 22 nt, Human
gccucugcaccaguacugugcc

SEQ ID NO: 525240 - RNA, 22 nt, Human
agccccaguccgcugcgggcgg

SEQ ID NO: 525241 - RNA, 23 nt, Human
ugggccuggaaagccuuagagag

SEQ ID NO: 525242 - RNA, 21 nt, Human
gccucugcugucuuauuguga

SEQ ID NO: 525243 - RNA, 18 nt, Human
gcagcugcaguuguagcu

SEQ ID NO: 525244 - RNA, 19 nt, Human
uuccaggugcuguggggag

SEQ ID NO: 525245 - RNA, 22 nt, Human
cugagguggaacagaggugaag

SEQ ID NO: 525246 - RNA, 22 nt, Human
caugccugccuggugggcgugg

SEQ ID NO: 525247 - RNA, 22 nt, Human
uugaggcauuacuguaaugaga

SEQ ID NO: 525248 - RNA, 23 nt, Human
ucaggauauugugugccaaggug

SEQ ID NO: 525249 - RNA, 22 nt, Human
cccucucagucagagccagaua

SEQ ID NO: 525250 - RNA, 20 nt, Human
ugaaaggugggaauuguggg

SEQ ID NO: 525251 - RNA, 22 nt, Human
ucucugaguuuuaaggaugaug

SEQ ID NO: 525252 - RNA, 23 nt, Human
ccugcagcugcuggggcuccacc

SEQ ID NO: 525253 - RNA, 22 nt, Human
cugugcaagacuuacuuuaaua

SEQ ID NO: 525254 - RNA, 22 nt, Human
ucucuggggauggaccugggag

SEQ ID NO: 525255 - RNA, 22 nt, Human
gcaggucuguugauuacaguca

SEQ ID NO: 525256 - RNA, 22 nt, Human
ccaguguucaucaagaaaaugu

SEQ ID NO: 525257 - RNA, 22 nt, Human
aagcagaguuagcuugucaccu

SEQ ID NO: 525258 - RNA, 22 nt, Human
augcaaauaagugcaggcgugg

SEQ ID NO: 525259 - RNA, 22 nt, Human
aggcccuguuaugagccacugu

SEQ ID NO: 525260 - RNA, 22 nt, Human
cuggcuggccggaggcaucccu

SEQ ID NO: 525261 - RNA, 22 nt, Human
cuguagccaguuuggccucacc

SEQ ID NO: 525262 - RNA, 22 nt, Human
aagaauuauugcaauacuagau

SEQ ID NO: 525263 - RNA, 22 nt, Human
gcaguguuggcaggauggggcu

SEQ ID NO: 525264 - RNA, 21 nt, Human
ucaggcaggcgcagagggaag

SEQ ID NO: 525265 - RNA, 22 nt, Human
guggccagcugucagcacccuu

SEQ ID NO: 525266 - RNA, 23 nt, Human
gccaggcuccggucuguggccac

SEQ ID NO: 525267 - RNA, 19 nt, Human
gaucuuugccaauuuaagc

SEQ ID NO: 525268 - RNA, 22 nt, Human
aaggcacuuuuccugagaugau

SEQ ID NO: 525269 - RNA, 22 nt, Human
ugggacagggaaucugaucccc

SEQ ID NO: 525270 - RNA, 18 nt, Human
cugucuuuuuucucucca

SEQ ID NO: 525271 - RNA, 21 nt, Human
uagaaagucaaagcuaucagc

SEQ ID NO: 525272 - RNA, 22 nt, Human
ucuggcucauacaagccugcaa

SEQ ID NO: 525273 - RNA, 22 nt, Human
acagcagccuuguugguuucga

SEQ ID NO: 525274 - RNA, 22 nt, Human
gagcugggccucagaacacagu

SEQ ID NO: 525275 - RNA, 22 nt, Human
cuucaagauauuucuagaauca

SEQ ID NO: 525276 - RNA, 22 nt, Human
uucagagcaucucuaaagccag

SEQ ID NO: 525277 - RNA, 22 nt, Human
gccaccagguuagauccagccu

SEQ ID NO: 525278 - RNA, 22 nt, Human
aagggcugaaagaccuugggca

SEQ ID NO: 525279 - RNA, 22 nt, Human
cagaguggcagucccaggccca

SEQ ID NO: 525280 - RNA, 22 nt, Human
ccaggucuaucaaguugggcuc

SEQ ID NO: 525281 - RNA, 22 nt, Human
gcagcagcugacagugggugcc

SEQ ID NO: 525282 - RNA, 22 nt, Human
guucuguacuccaagcucuucc

SEQ ID NO: 525283 - RNA, 17 nt, Human
guccuggugugugagga

SEQ ID NO: 525284 - RNA, 22 nt, Human
uggugugggcguggcaggcaag

SEQ ID NO: 525285 - RNA, 22 nt, Human
agcuccugauacaugcaggaau

SEQ ID NO: 525286 - RNA, 22 nt, Human
ugugugugugcgcgcacgcaua

SEQ ID NO: 525287 - RNA, 22 nt, Human
gucugucucucuccagagugca

SEQ ID NO: 525288 - RNA, 22 nt, Human
uguauuuugugaggaucacucu

SEQ ID NO: 525289 - RNA, 22 nt, Human
uucauuuaaucagaaucucuaa

SEQ ID NO: 525290 - RNA, 22 nt, Human
guggcccucugauagggucagg

SEQ ID NO: 525291 - RNA, 22 nt, Human
uucuguccacugcuggggccuc

SEQ ID NO: 525292 - RNA, 22 nt, Human
ccuggcucugccguaaccacca

SEQ ID NO: 525293 - RNA, 22 nt, Human
ccagggcaaaugagaucauagc

SEQ ID NO: 525294 - RNA, 22 nt, Human
ccaggagcagggcuggcugcac

SEQ ID NO: 525295 - RNA, 22 nt, Human
cugggccagcaacugcaaugga

SEQ ID NO: 525296 - RNA, 22 nt, Human
accagggcggcuugaggaggca

SEQ ID NO: 525297 - RNA, 22 nt, Human
guguugaugacauuuuagaaac

SEQ ID NO: 525298 - RNA, 22 nt, Human
uacagucaauacuaggaccaua

SEQ ID NO: 525299 - RNA, 22 nt, Human
ucaaucaaagcacugggcuuug

SEQ ID NO: 525300 - RNA, 22 nt, Human
ugcuucugcucagcuuccuacu

SEQ ID NO: 525301 - RNA, 22 nt, Human
auucagcauaaucaguagcuug

SEQ ID NO: 525302 - RNA, 22 nt, Human
cagcuguuacucugaguaaaug

SEQ ID NO: 525303 - RNA, 22 nt, Human
gugaaggauaaggaucuaaauu

SEQ ID NO: 525304 - RNA, 22 nt, Human
uaaauuacucaaugcacauaaa

SEQ ID NO: 525305 - RNA, 22 nt, Human
cagacaugauguaagcagaggc

SEQ ID NO: 525306 - RNA, 22 nt, Human
uuauguguguacaugcauaugu

SEQ ID NO: 525307 - RNA, 22 nt, Human
cagagcugugauaaauagauau

SEQ ID NO: 525308 - RNA, 22 nt, Human
ucaaugcaaucauuggacaagu

SEQ ID NO: 525309 - RNA, 22 nt, Human
cuuagcagaagcuucagcuuca

SEQ ID NO: 525310 - RNA, 20 nt, Human
aggagcugaauuagaggguu

SEQ ID NO: 525311 - RNA, 22 nt, Human
uacaaagugaaauaauucugag

SEQ ID NO: 525312 - RNA, 22 nt, Human
acaaaguuugugguauuccaag

SEQ ID NO: 525313 - RNA, 22 nt, Human
aguggacucuucccagugcuug

SEQ ID NO: 525314 - RNA, 21 nt, Human
ugagccaggcugacggcugug

SEQ ID NO: 525315 - RNA, 22 nt, Human
ccagggaguuuccaaucugaga

SEQ ID NO: 525316 - RNA, 22 nt, Human
agggcuuugagaauaguggaac

SEQ ID NO: 525317 - RNA, 22 nt, Human
gccacguugccacccgggugac

SEQ ID NO: 525318 - RNA, 21 nt, Human
uauuugcugccaucuuugagg

SEQ ID NO: 525319 - RNA, 22 nt, Human
cauuucacgcacacucauuacu

SEQ ID NO: 525320 - RNA, 22 nt, Human
gaaagguuguaacaagacucuu

SEQ ID NO: 525321 - RNA, 22 nt, Human
cugguccagaauuuaugauucu

SEQ ID NO: 525322 - RNA, 20 nt, Human
aggcucagagcaguaguaca

SEQ ID NO: 525323 - RNA, 22 nt, Human
cagccucugagccuuggcagau

SEQ ID NO: 525324 - RNA, 22 nt, Human
gcuguacaucacaauuugcugu

SEQ ID NO: 525325 - RNA, 22 nt, Human
uagccauugacuuaaagcuuau

SEQ ID NO: 525326 - RNA, 22 nt, Human
uggcccuuugguuuaugacuga

SEQ ID NO: 525327 - RNA, 22 nt, Human
gugauaagacaguaggcacaag

SEQ ID NO: 525328 - RNA, 22 nt, Human
acacaucuuagacugaaauaug

SEQ ID NO: 525329 - RNA, 22 nt, Human
uggaaagaaaguaaaggcguau

SEQ ID NO: 525330 - RNA, 22 nt, Human
gugguaauagagcuccaaacua

SEQ ID NO: 525331 - RNA, 22 nt, Human
acuuagcaauuugauuaaaaga

SEQ ID NO: 525332 - RNA, 22 nt, Human
ugcagcagagugggccugggug

SEQ ID NO: 525333 - RNA, 19 nt, Human
ccuggcccugcugcgcggg

SEQ ID NO: 525334 - RNA, 23 nt, Human
aaagacugcugagaauuuuagga

SEQ ID NO: 525335 - RNA, 23 nt, Human
gggauauggaccuuggaggaguc

SEQ ID NO: 525336 - RNA, 22 nt, Human
aaauuauuaugccccucuauaa

SEQ ID NO: 525337 - RNA, 22 nt, Human
guagaggggugauucugugaga

SEQ ID NO: 525338 - RNA, 20 nt, Human
aggagccauugacugcagca

SEQ ID NO: 525339 - RNA, 23 nt, Human
auggagcugguacuagcuaccuc

SEQ ID NO: 525340 - RNA, 22 nt, Human
aggaacaacugauucagucaac

SEQ ID NO: 525341 - RNA, 22 nt, Human
aagcagccagccaucaugcccg

SEQ ID NO: 525342 - RNA, 22 nt, Human
cacagcuucuccuugauaucgc

SEQ ID NO: 525343 - RNA, 22 nt, Human
ccaaagucuggagcagcagagc

SEQ ID NO: 525344 - RNA, 22 nt, Human
acagcagcaauagcagugacau

SEQ ID NO: 525345 - RNA, 22 nt, Human
agguccuggugaccauggaguu

SEQ ID NO: 525346 - RNA, 22 nt, Human
guccuucagcuuuaucugaaca

SEQ ID NO: 525347 - RNA, 22 nt, Human
accaggcaaaaccacaggagca

SEQ ID NO: 525348 - RNA, 21 nt, Human
uuacaaagcaagugcuguguc

SEQ ID NO: 525349 - RNA, 22 nt, Human
agaugcuucaguguuuaauuua

SEQ ID NO: 525350 - RNA, 22 nt, Human
cagagcugcaaaugccccuccg

SEQ ID NO: 525351 - RNA, 23 nt, Human
cugggcuguccugaggucaccuc

SEQ ID NO: 525352 - RNA, 22 nt, Human
aagacaauauugcugugaacgu

SEQ ID NO: 525353 - RNA, 22 nt, Human
ucauugccauggcauuugcaga

SEQ ID NO: 525354 - RNA, 22 nt, Human
uauuuucaccuucucuggauau

SEQ ID NO: 525355 - RNA, 23 nt, Human
cugaggccugcugcguucagguu

SEQ ID NO: 525356 - RNA, 22 nt, Human
uggcuccucuucuggguguccc

SEQ ID NO: 525357 - RNA, 22 nt, Human
uauaaauuauuaggcugcuaaa

SEQ ID NO: 525358 - RNA, 22 nt, Human
gaaauguguuguucauuucuaa

SEQ ID NO: 525359 - RNA, 22 nt, Human
uaaugcacaugacugaacuauu

SEQ ID NO: 525360 - RNA, 22 nt, Human
ggaaggggagcuaaaucuacug

SEQ ID NO: 525361 - RNA, 17 nt, Human
agaugcuggccacaugu

SEQ ID NO: 525362 - RNA, 22 nt, Human
gguggcaguuacaggggcaaau

SEQ ID NO: 525363 - RNA, 22 nt, Human
agcuguucccucacugcaguca

SEQ ID NO: 525364 - RNA, 22 nt, Human
ugcagugguugagagcccagac

SEQ ID NO: 525365 - RNA, 22 nt, Human
agugcaugcgcuugggaggggu

SEQ ID NO: 525366 - RNA, 22 nt, Human
ugauuuccuaggucuggagaag

SEQ ID NO: 525367 - RNA, 21 nt, Human
ucagcagcuuuugcagucccu

SEQ ID NO: 525368 - RNA, 21 nt, Human
guagauaaagcauuuucauua

SEQ ID NO: 525369 - RNA, 22 nt, Human
agcuucaggaacaggcagccug

SEQ ID NO: 525370 - RNA, 22 nt, Human
cacagcuuccauuagaaugaga

SEQ ID NO: 525371 - RNA, 22 nt, Human
uagggcaggggaggaaucugaa

SEQ ID NO: 525372 - RNA, 22 nt, Human
auccucuguggauuacaccuag

SEQ ID NO: 525373 - RNA, 16 nt, Human
gggcugggggauucug

SEQ ID NO: 525374 - RNA, 22 nt, Human
auaaugcagcuuuucaauggcc

SEQ ID NO: 525375 - RNA, 22 nt, Human
cacugaguucccugacauuuca

SEQ ID NO: 525376 - RNA, 22 nt, Human
cagccucuguggcugccacacc

SEQ ID NO: 525377 - RNA, 22 nt, Human
agguccagaguugagauacaga

SEQ ID NO: 525378 - RNA, 20 nt, Human
cucugcuuuaggagagucag

SEQ ID NO: 525379 - RNA, 22 nt, Human
gaaaugcaggcuuggauucagc

SEQ ID NO: 525380 - RNA, 22 nt, Human
aggugagguuugggagguguca

SEQ ID NO: 525381 - RNA, 22 nt, Human
uuuccucugagugagcugggag

SEQ ID NO: 525382 - RNA, 22 nt, Human
auacaucaccuauauauucaca

SEQ ID NO: 525383 - RNA, 19 nt, Human
ucuggcugccaaggauuga

SEQ ID NO: 525384 - RNA, 22 nt, Human
aaggaagggaaauagugauguc

SEQ ID NO: 525385 - RNA, 22 nt, Human
uggaccucacugucugcuggua

SEQ ID NO: 525386 - RNA, 22 nt, Human
uggcacagagggacccagcagc

SEQ ID NO: 525387 - RNA, 22 nt, Human
uggguccuuuuuggacuucuuc

SEQ ID NO: 525388 - RNA, 22 nt, Human
aauuaguaaccuaauuccaucu

SEQ ID NO: 525389 - RNA, 22 nt, Human
augaggcaaucaugguccaguu

SEQ ID NO: 525390 - RNA, 22 nt, Human
cccagccugugacagccguccu

SEQ ID NO: 525391 - RNA, 22 nt, Human
uaggcugagcuaagagagcuua

SEQ ID NO: 525392 - RNA, 22 nt, Human
cuuagcuucauuauugguggcc

SEQ ID NO: 525393 - RNA, 22 nt, Human
aauucaaugguuuuuaggauau

SEQ ID NO: 525394 - RNA, 19 nt, Human
cagucccaaauucuuguca

SEQ ID NO: 525395 - RNA, 22 nt, Human
uugcauuucacuuucaguaggc

SEQ ID NO: 525396 - RNA, 22 nt, Human
cugggcucagcccaugcugucc

SEQ ID NO: 525397 - RNA, 22 nt, Human
ucccugcucagcucaccuggca

SEQ ID NO: 525398 - RNA, 22 nt, Human
gcagagccccucaagccagccu

SEQ ID NO: 525399 - RNA, 22 nt, Human
gcuacagguauauagaugaaac

SEQ ID NO: 525400 - RNA, 22 nt, Human
aggagcugcuuaaaugguuggu

SEQ ID NO: 525401 - RNA, 22 nt, Human
ccugaggcucgcgcgccccugg

SEQ ID NO: 525402 - RNA, 22 nt, Human
ugaaaguuacaggaaaacagau

SEQ ID NO: 525403 - RNA, 22 nt, Human
aaguagcaaucucauuaguugg

SEQ ID NO: 525404 - RNA, 22 nt, Human
ucagugucuugggcuugaaugc

SEQ ID NO: 525405 - RNA, 22 nt, Human
uuuucauuguaaaucaggaaac

SEQ ID NO: 525406 - RNA, 22 nt, Human
gagccugaauuugaccugcuua

SEQ ID NO: 525407 - RNA, 22 nt, Human
ggggaccuaggcucugucucuu

SEQ ID NO: 525408 - RNA, 22 nt, Human
gcuuagucaauuauaaauaggc

SEQ ID NO: 525409 - RNA, 22 nt, Human
ggcgaggccgggacaggcugga

SEQ ID NO: 525410 - RNA, 22 nt, Human
gcauuuuucuaaucauuggcau

SEQ ID NO: 525411 - RNA, 22 nt, Human
acugaaggucucagcaaggaug

SEQ ID NO: 525412 - RNA, 19 nt, Human
uuugugaagaaaaugaugc

SEQ ID NO: 525413 - RNA, 22 nt, Human
ggcccagccggcgagucucgcg

SEQ ID NO: 525414 - RNA, 22 nt, Human
ugcugccacaaauucagcugcc

SEQ ID NO: 525415 - RNA, 21 nt, Human
aggcucagcagguguauaaag

SEQ ID NO: 525416 - RNA, 19 nt, Human
ccagagcccgccagauggg

SEQ ID NO: 525417 - RNA, 22 nt, Human
gcuuuuguggugauggagaggc

SEQ ID NO: 525418 - RNA, 22 nt, Human
aguaaauaacagagaaaauggg

SEQ ID NO: 525419 - RNA, 22 nt, Human
ccagcagcuguggcuuugccuc

SEQ ID NO: 525420 - RNA, 22 nt, Human
uuuccucuaaacgcauuugcuu

SEQ ID NO: 525421 - RNA, 22 nt, Human
uccaagcuacugaagguuuggg

SEQ ID NO: 525422 - RNA, 22 nt, Human
cagcagcagcuuaguggucccc

SEQ ID NO: 525423 - RNA, 22 nt, Human
uaagcuauuccugaagaagguu

SEQ ID NO: 525424 - RNA, 22 nt, Human
ggaggccaggguggguggaucg

SEQ ID NO: 525425 - RNA, 22 nt, Human
ugggcagaaugugggauccaga

SEQ ID NO: 525426 - RNA, 22 nt, Human
ggcucuggagauguccgaccug

SEQ ID NO: 525427 - RNA, 22 nt, Human
aaucaguuucuuggcaaguuua

SEQ ID NO: 525428 - RNA, 22 nt, Human
gggcugacaccacccaggcgca

SEQ ID NO: 525429 - RNA, 22 nt, Human
ugagccugcaauaagcacagcc

SEQ ID NO: 525430 - RNA, 22 nt, Human
uagcuucuugagaaagggugcc

SEQ ID NO: 525431 - RNA, 22 nt, Human
uuugggaacucuaucauggaaa

SEQ ID NO: 525432 - RNA, 22 nt, Human
ucagugcagugaaagguuuacu

SEQ ID NO: 525433 - RNA, 22 nt, Human
gccugccuagaauugcagcuuu

SEQ ID NO: 525434 - RNA, 19 nt, Human
uucacauuggaagaaguag

SEQ ID NO: 525435 - RNA, 22 nt, Human
agcacagauggauguauucauu

SEQ ID NO: 525436 - RNA, 22 nt, Human
auuugccuugugauuuguaagu

SEQ ID NO: 525437 - RNA, 22 nt, Human
cagccacagcugggugccugac

SEQ ID NO: 525438 - RNA, 22 nt, Human
augggccaggcuugggaugaca

SEQ ID NO: 525439 - RNA, 22 nt, Human
uggcuaggacucauccuguuuc

SEQ ID NO: 525440 - RNA, 22 nt, Human
guugucagguaaaacaguaugg

SEQ ID NO: 525441 - RNA, 22 nt, Human
cugcuuccauggucuggagacu

SEQ ID NO: 525442 - RNA, 22 nt, Human
aagagagaacucccuucgccag

SEQ ID NO: 525443 - RNA, 22 nt, Human
ucgggguagacgccagcucgga

SEQ ID NO: 525444 - RNA, 22 nt, Human
gccaggggacgcggagcgacga

SEQ ID NO: 525445 - RNA, 22 nt, Human
acugucugcaaaacucauacuc

SEQ ID NO: 525446 - RNA, 22 nt, Human
gcacagagucacuagcuaagca

SEQ ID NO: 525447 - RNA, 22 nt, Human
acauuaacaccauaaguguguu

SEQ ID NO: 525448 - RNA, 19 nt, Human
gcccucaggcagcuccauc

SEQ ID NO: 525449 - RNA, 18 nt, Human
acugugguuuauguguag

SEQ ID NO: 525450 - RNA, 22 nt, Human
gccuggcucugagggagcuccu

SEQ ID NO: 525451 - RNA, 22 nt, Human
ugcugccacauuuaaagagggg

SEQ ID NO: 525452 - RNA, 22 nt, Human
ucacagacauggugagguaaca

SEQ ID NO: 525453 - RNA, 22 nt, Human
ucuaacauuguuuuucacagau

SEQ ID NO: 525454 - RNA, 22 nt, Human
uaggcagcgcuuggcugugcuu

SEQ ID NO: 525455 - RNA, 22 nt, Human
aguccugggucuggagaaugga

SEQ ID NO: 525456 - RNA, 22 nt, Human
cuugaaucuucugaguauuugc

SEQ ID NO: 525457 - RNA, 22 nt, Human
agaaucaaagagaaauacuuug

SEQ ID NO: 525458 - RNA, 22 nt, Human
cagggcucccuugcaaggaggg

SEQ ID NO: 525459 - RNA, 22 nt, Human
ucagugcauggacagauuuaga

SEQ ID NO: 525460 - RNA, 22 nt, Human
ugguggcuguugcagaacugag

SEQ ID NO: 525461 - RNA, 22 nt, Human
ucacauguauaugcagcacagc

SEQ ID NO: 525462 - RNA, 23 nt, Human
cagcccuggagaugugggaggca

SEQ ID NO: 525463 - RNA, 22 nt, Human
cugcugucuaguaucuuaaaaa

SEQ ID NO: 525464 - RNA, 22 nt, Human
agcaggcugaugggcaugcuug

SEQ ID NO: 525465 - RNA, 22 nt, Human
aguggguggcgcagaggaggaa

SEQ ID NO: 525466 - RNA, 22 nt, Human
cacagggccuugugugacugca

SEQ ID NO: 525467 - RNA, 18 nt, Human
uggcuggcagugggcagc

SEQ ID NO: 525468 - RNA, 23 nt, Human
uggcuucugccccauucucucca

SEQ ID NO: 525469 - RNA, 22 nt, Human
aaauagaaaccaacaaggucag

SEQ ID NO: 525470 - RNA, 22 nt, Human
gaggucaauaauaugugcuuua

SEQ ID NO: 525471 - RNA, 19 nt, Human
cgccuggcaggcccugcgc

SEQ ID NO: 525472 - RNA, 20 nt, Human
ccagcacccucucagcugaa

SEQ ID NO: 525473 - RNA, 22 nt, Human
ucugcagaauucgaggaagaaa

SEQ ID NO: 525474 - RNA, 22 nt, Human
agaauuguugggguaauaaaag

SEQ ID NO: 525475 - RNA, 20 nt, Human
gcaacucacccacagcagcu

SEQ ID NO: 525476 - RNA, 22 nt, Human
cugcccuguaucuucucccaau

SEQ ID NO: 525477 - RNA, 22 nt, Human
accucugcucaagaccccuccg

SEQ ID NO: 525478 - RNA, 22 nt, Human
cagggcaaagagagcacaugcu

SEQ ID NO: 525479 - RNA, 18 nt, Human
cucugcuaaugggcagcu

SEQ ID NO: 525480 - RNA, 22 nt, Human
uuccaaagucauguugcugaua

SEQ ID NO: 525481 - RNA, 22 nt, Human
uagcuuuaaaaaucaucaaagc

SEQ ID NO: 525482 - RNA, 22 nt, Human
ucaggagggugacaggcccugg

SEQ ID NO: 525483 - RNA, 22 nt, Human
acagcaggcacacaaggauaga

SEQ ID NO: 525484 - RNA, 22 nt, Human
uuagaaaggagcuuauuucuuu

SEQ ID NO: 525485 - RNA, 22 nt, Human
uccugccuuagagcaaggaaaa

SEQ ID NO: 525486 - RNA, 22 nt, Human
ugagccugggagauggaggcug

SEQ ID NO: 525487 - RNA, 22 nt, Human
cagcuuuuuagaaucuagggca

SEQ ID NO: 525488 - RNA, 22 nt, Human
ggagggggaagaagcuaaagac

SEQ ID NO: 525489 - RNA, 22 nt, Human
aggccugagcagaggaguggac

SEQ ID NO: 525490 - RNA, 22 nt, Human
uaauacagaaguguauuaaaau

SEQ ID NO: 525491 - RNA, 22 nt, Human
agagccuggggauuggcaaggg

SEQ ID NO: 525492 - RNA, 22 nt, Human
aauucauccaugaacaauucca

SEQ ID NO: 525493 - RNA, 22 nt, Human
gaagauaauuccuacuuauaac

SEQ ID NO: 525494 - RNA, 22 nt, Human
ugcagggaaaacccaggaugcu

SEQ ID NO: 525495 - RNA, 22 nt, Human
cuucaagagaaugcagggaugu

SEQ ID NO: 525496 - RNA, 22 nt, Human
uccucuucugcccaucagaggc

SEQ ID NO: 525497 - RNA, 22 nt, Human
caauguguuugcauauuaaaau

SEQ ID NO: 525498 - RNA, 22 nt, Human
caaugauguuuagauaaaaucc

SEQ ID NO: 525499 - RNA, 22 nt, Human
accaucagucacauguagagaa

SEQ ID NO: 525500 - RNA, 22 nt, Human
aagcagaaguugaucuaccaua

SEQ ID NO: 525501 - RNA, 22 nt, Human
caaugcugugcuccucaugagg

SEQ ID NO: 525502 - RNA, 22 nt, Human
uggcagagcaaaaagauagaau

SEQ ID NO: 525503 - RNA, 22 nt, Human
accacccauucagaaacacuga

SEQ ID NO: 525504 - RNA, 22 nt, Human
uaauuuuaugacaguguauuuu

SEQ ID NO: 525505 - RNA, 22 nt, Human
aagagcuggauugugcugcaga

SEQ ID NO: 525506 - RNA, 23 nt, Human
cacacccaucacuaagagcuccu

SEQ ID NO: 525507 - RNA, 22 nt, Human
ugcaaauauugggacagucuag

SEQ ID NO: 525508 - RNA, 19 nt, Human
cugccuguuauggagagaa

SEQ ID NO: 525509 - RNA, 22 nt, Human
uaugcacaccuggguccuuguc

SEQ ID NO: 525510 - RNA, 22 nt, Human
ucacagaauugacaugggaauc

SEQ ID NO: 525511 - RNA, 22 nt, Human
ucugggcugcuaugaggcagag

SEQ ID NO: 525512 - RNA, 22 nt, Human
gagaggagucccuaucacaguu

SEQ ID NO: 525513 - RNA, 22 nt, Human
gcuaggaagcuggggagaaguc

SEQ ID NO: 525514 - RNA, 22 nt, Human
gagagcuguguucauucuacca

SEQ ID NO: 525515 - RNA, 22 nt, Human
auuauuugcuuggcucaucuaa

SEQ ID NO: 525516 - RNA, 22 nt, Human
cugggacuuuacccuguggccc

SEQ ID NO: 525517 - RNA, 22 nt, Human
ugggaaggggagcuggaaagga

SEQ ID NO: 525518 - RNA, 22 nt, Human
uuugaaaauuuaagugcuacac

SEQ ID NO: 525519 - RNA, 22 nt, Human
uggcugggcccccaccugccuc

SEQ ID NO: 525520 - RNA, 22 nt, Human
cuggcaggucucgcugacgugu

SEQ ID NO: 525521 - RNA, 22 nt, Human
gaagggagaagguugggugacg

SEQ ID NO: 525522 - RNA, 22 nt, Human
uugagcccaggaggccugggug

SEQ ID NO: 525523 - RNA, 22 nt, Human
cagggcaggaugcugugauuau

SEQ ID NO: 525524 - RNA, 22 nt, Human
aucaguuugagugcugugucaa

SEQ ID NO: 525525 - RNA, 22 nt, Human
ugauuuaggaaacagcuacagg

SEQ ID NO: 525526 - RNA, 22 nt, Human
caggccacagcuaaagaggauu

SEQ ID NO: 525527 - RNA, 22 nt, Human
ucugcgcugccuugauccuugg

SEQ ID NO: 525528 - RNA, 22 nt, Human
aagaacaguugggaggugagcc

SEQ ID NO: 525529 - RNA, 22 nt, Human
ugaaugauacagaauuauguag

SEQ ID NO: 525530 - RNA, 22 nt, Human
ucaggauccauagacucccaaa

SEQ ID NO: 525531 - RNA, 22 nt, Human
ggccugugagcccuugcaugua

SEQ ID NO: 525532 - RNA, 22 nt, Human
cugggccagauccagccucaca

SEQ ID NO: 525533 - RNA, 23 nt, Human
ugauuacaggaaguucaaguguu

SEQ ID NO: 525534 - RNA, 22 nt, Human
ggagcagaugucuucauggccu

SEQ ID NO: 525535 - RNA, 22 nt, Human
cuggccagagguuccucugccc

SEQ ID NO: 525536 - RNA, 22 nt, Human
auuacuuucagaugugcuguaa

SEQ ID NO: 525537 - RNA, 22 nt, Human
uuuccucuucuucccaugucau

SEQ ID NO: 525538 - RNA, 22 nt, Human
caugccuguaaucccagcucuu

SEQ ID NO: 525539 - RNA, 22 nt, Human
ccuugggcuugggcauagcuuu

SEQ ID NO: 525540 - RNA, 21 nt, Human
agcuggcucucucuggagaga

SEQ ID NO: 525541 - RNA, 22 nt, Human
gucacuguauccagguuccagc

SEQ ID NO: 525542 - RNA, 22 nt, Human
uggaacaaauuacaauuaacuu

SEQ ID NO: 525543 - RNA, 22 nt, Human
gaggcuccccaugaggccccag

SEQ ID NO: 525544 - RNA, 20 nt, Human
uaagaacaagacuaggaagc

SEQ ID NO: 525545 - RNA, 22 nt, Human
cucaggccugaguggcaguccc

SEQ ID NO: 525546 - RNA, 22 nt, Human
agaaaucaauaucuauauguug

SEQ ID NO: 525547 - RNA, 19 nt, Human
ccagcccugucacuucuug

SEQ ID NO: 525548 - RNA, 22 nt, Human
uuccaggacaagauguuucagg

SEQ ID NO: 525549 - RNA, 22 nt, Human
uguauuagagcauauaauuuga

SEQ ID NO: 525550 - RNA, 22 nt, Human
cagguacauucguagacccauu

SEQ ID NO: 525551 - RNA, 21 nt, Human
cuacuuaaguaggggauuagg

SEQ ID NO: 525552 - RNA, 20 nt, Human
ugugaaagcaguagaaugac

SEQ ID NO: 525553 - RNA, 22 nt, Human
ugucuuuagccagcagucuucu

SEQ ID NO: 525554 - RNA, 22 nt, Human
cacugggcguguccugggugag

SEQ ID NO: 525555 - RNA, 22 nt, Human
ugugaggagaggcccagcuccc

SEQ ID NO: 525556 - RNA, 22 nt, Human
cugcaggggcuggaguuggcuu

SEQ ID NO: 525557 - RNA, 22 nt, Human
ucccucuaaacuguaagauucu

SEQ ID NO: 525558 - RNA, 22 nt, Human
acugccaggauggcacuagagg

SEQ ID NO: 525559 - RNA, 22 nt, Human
ggacaaaggguggagccucuga

SEQ ID NO: 525560 - RNA, 22 nt, Human
caggcagcugcuggguucagcc

SEQ ID NO: 525561 - RNA, 22 nt, Human
aacacauauuuauauaugcaca

SEQ ID NO: 525562 - RNA, 22 nt, Human
ucugggccagugauuuuuccag

SEQ ID NO: 525563 - RNA, 18 nt, Human
uggcuucuugagcuaaca

SEQ ID NO: 525564 - RNA, 22 nt, Human
acacagaguauuuagaaggggu

SEQ ID NO: 525565 - RNA, 22 nt, Human
aagggcugcuguagaagcagag

SEQ ID NO: 525566 - RNA, 22 nt, Human
uagaaauggguuacauuuagag

SEQ ID NO: 525567 - RNA, 22 nt, Human
gcuucucaauucucacccucca

SEQ ID NO: 525568 - RNA, 22 nt, Human
augcaaucauauggcauacagc

SEQ ID NO: 525569 - RNA, 22 nt, Human
acugggcuguuccuuauuucua

SEQ ID NO: 525570 - RNA, 22 nt, Human
uggcugaaucugcagcaggaag

SEQ ID NO: 525571 - RNA, 22 nt, Human
uucugggcuguccagaggguga

SEQ ID NO: 525572 - RNA, 22 nt, Human
cugcccgcugcuagagaggccg

SEQ ID NO: 525573 - RNA, 22 nt, Human
uccugggcccaggcugccaggg

SEQ ID NO: 525574 - RNA, 22 nt, Human
uuuccucuccggggccuccagg

SEQ ID NO: 525575 - RNA, 22 nt, Human
agcaaagcugauuaagagcaca

SEQ ID NO: 525576 - RNA, 22 nt, Human
uuccaagugcccauauuucauc

SEQ ID NO: 525577 - RNA, 22 nt, Human
uuguccugauuuauaaaaugaa

SEQ ID NO: 525578 - RNA, 22 nt, Human
gauuuucaugauaaacuuguga

SEQ ID NO: 525579 - RNA, 22 nt, Human
gaaaaugccucuggcauuaaac

SEQ ID NO: 525580 - RNA, 22 nt, Human
ggggcugacgggcauguggcuu

SEQ ID NO: 525581 - RNA, 22 nt, Human
agcaauauuuaaagguuugcaa

SEQ ID NO: 525582 - RNA, 22 nt, Human
auuugaagucuucaugauuucu

SEQ ID NO: 525583 - RNA, 22 nt, Human
cuccugucaauaggcuccuggc

SEQ ID NO: 525584 - RNA, 22 nt, Human
gccagggggucagcaggcacuu

SEQ ID NO: 525585 - RNA, 22 nt, Human
uggagcaugagagucuuuagcu

SEQ ID NO: 525586 - RNA, 22 nt, Human
cuuagcuucacugggucucagu

SEQ ID NO: 525587 - RNA, 22 nt, Human
guggccuggaaaggcuggucug

SEQ ID NO: 525588 - RNA, 22 nt, Human
guacucucuugaaggccuuucu

SEQ ID NO: 525589 - RNA, 22 nt, Human
gacacuguuauggugagguaag

SEQ ID NO: 525590 - RNA, 22 nt, Human
uggucugaggaacaccagcacu

SEQ ID NO: 525591 - RNA, 22 nt, Human
guuuuauaggcuguugcuauau

SEQ ID NO: 525592 - RNA, 22 nt, Human
aauaugcauguauacaugugua

SEQ ID NO: 525593 - RNA, 22 nt, Human
acagugucugacacauuguagc

SEQ ID NO: 525594 - RNA, 21 nt, Human
gugcucugggcagcagagggc

SEQ ID NO: 525595 - RNA, 18 nt, Human
gagagcugcuaccuagcu

SEQ ID NO: 525596 - RNA, 22 nt, Human
cuaggccagagagaccucauga

SEQ ID NO: 525597 - RNA, 22 nt, Human
aggcaacaggaaaccacaugau

SEQ ID NO: 525598 - RNA, 22 nt, Human
agagggagugaaauggaauaga

SEQ ID NO: 525599 - RNA, 22 nt, Human
cagcugccugucuggaggcaau

SEQ ID NO: 525600 - RNA, 22 nt, Human
auggccaggguggcacuguggu

SEQ ID NO: 525601 - RNA, 22 nt, Human
aauuaugagguagauaucacau

SEQ ID NO: 525602 - RNA, 22 nt, Human
gagcagugguugaacagaggca

SEQ ID NO: 525603 - RNA, 22 nt, Human
cccucagcuccacccucagcag

SEQ ID NO: 525604 - RNA, 22 nt, Human
auuugccuguaagacaaggccu

SEQ ID NO: 525605 - RNA, 22 nt, Human
uggccuggcucacagugagauu

SEQ ID NO: 525606 - RNA, 22 nt, Human
ggcugcagcagagggacucacg

SEQ ID NO: 525607 - RNA, 22 nt, Human
aaacacaccuuuggaacuguga

SEQ ID NO: 525608 - RNA, 22 nt, Human
aguuauauuccauagauucaga

SEQ ID NO: 525609 - RNA, 22 nt, Human
accauuuaauaaguauuuccau

SEQ ID NO: 525610 - RNA, 22 nt, Human
agucuccuuggccucaaugccu

SEQ ID NO: 525611 - RNA, 22 nt, Human
agcugcccuucucuugcccuug

SEQ ID NO: 525612 - RNA, 22 nt, Human
gcugucagaaggugaaggguaa

SEQ ID NO: 525613 - RNA, 22 nt, Human
ucacaugcuugaggaaagaaaa

SEQ ID NO: 525614 - RNA, 22 nt, Human
ugggccuggguuccuccugggc

SEQ ID NO: 525615 - RNA, 22 nt, Human
gaaaucaaggcuacauucaggu

SEQ ID NO: 525616 - RNA, 22 nt, Human
ccagcauggcaccugagaugag

SEQ ID NO: 525617 - RNA, 22 nt, Human
gauuucaaccuaacaguaugac

SEQ ID NO: 525618 - RNA, 22 nt, Human
acacagggcggaaagcaugaga

SEQ ID NO: 525619 - RNA, 21 nt, Human
ggguccugggaugggauccag

SEQ ID NO: 525620 - RNA, 22 nt, Human
uuggaaggcagcauuuguccau

SEQ ID NO: 525621 - RNA, 22 nt, Human
caaugguggugucagaagagau

SEQ ID NO: 525622 - RNA, 21 nt, Human
aguuuucugaguuauaaaaua

SEQ ID NO: 525623 - RNA, 22 nt, Human
gaggcugaauggccagaagcca

SEQ ID NO: 525624 - RNA, 22 nt, Human
acagggcagagugaaaugcuau

SEQ ID NO: 525625 - RNA, 22 nt, Human
ugcugagcgcauccggcggccg

SEQ ID NO: 525626 - RNA, 22 nt, Human
aaaguucagugccuucuauaca

SEQ ID NO: 525627 - RNA, 22 nt, Human
ccaggccucccuuuuccagcca

SEQ ID NO: 525628 - RNA, 18 nt, Human
aggcugcacugucuuaaa

SEQ ID NO: 525629 - RNA, 22 nt, Human
guccaggcugcccaggguccug

SEQ ID NO: 525630 - RNA, 22 nt, Human
caaggccacuccagagacuggu

SEQ ID NO: 525631 - RNA, 22 nt, Human
cauagcaacagcaucaagucaa

SEQ ID NO: 525632 - RNA, 22 nt, Human
uuguacaaaggauuuggaagag

SEQ ID NO: 525633 - RNA, 22 nt, Human
agcaggcugcuggcguugaagu

SEQ ID NO: 525634 - RNA, 22 nt, Human
gacuucugaauuccuaucaggu

SEQ ID NO: 525635 - RNA, 22 nt, Human
cagcagcuagaggaagggcaga

SEQ ID NO: 525636 - RNA, 22 nt, Human
uccuagaacagcccaccuggaa

SEQ ID NO: 525637 - RNA, 22 nt, Human
auguguguguuuaauccucaaa

SEQ ID NO: 525638 - RNA, 22 nt, Human
ggccaccaaaguccuguggcuu

SEQ ID NO: 525639 - RNA, 22 nt, Human
gggcagguggcaaagccagagg

SEQ ID NO: 525640 - RNA, 23 nt, Human
gucagggcuggggucagagugac

SEQ ID NO: 525641 - RNA, 22 nt, Human
gccugcagaggugcugcuagcu

SEQ ID NO: 525642 - RNA, 22 nt, Human
gaggagcugucaccgugacuca

SEQ ID NO: 525643 - RNA, 22 nt, Human
cugugggaacacugaggacuuc

SEQ ID NO: 525644 - RNA, 19 nt, Human
ucaggacugacuugaaguc

SEQ ID NO: 525645 - RNA, 22 nt, Human
aauuagcuuauguguacuuuuc

SEQ ID NO: 525646 - RNA, 22 nt, Human
aaagccuucaaguagauguaag

SEQ ID NO: 525647 - RNA, 22 nt, Human
agagccugcuguguaagucaca

SEQ ID NO: 525648 - RNA, 22 nt, Human
acagccagugacuggacaagcu

SEQ ID NO: 525649 - RNA, 22 nt, Human
gugugagcaucaaagccuguca

SEQ ID NO: 525650 - RNA, 22 nt, Human
guucugggaagguggaccuguu

SEQ ID NO: 525651 - RNA, 20 nt, Human
uccuggccuucucgggcagu

SEQ ID NO: 525652 - RNA, 22 nt, Human
uccugggcccuccggaucaggu

SEQ ID NO: 525653 - RNA, 22 nt, Human
guccugguagggcucugugucu

SEQ ID NO: 525654 - RNA, 22 nt, Human
uggcagguggagacagcagagc

SEQ ID NO: 525655 - RNA, 22 nt, Human
ggucccugcugaagccuuggug

SEQ ID NO: 525656 - RNA, 22 nt, Human
gagcugugauuggugucucacu

SEQ ID NO: 525657 - RNA, 22 nt, Human
uguguggcaagcuguaugcuag

SEQ ID NO: 525658 - RNA, 22 nt, Human
ggagggagggcuagaccaaaga

SEQ ID NO: 525659 - RNA, 22 nt, Human
cccuccagagcuugaccugcug

SEQ ID NO: 525660 - RNA, 22 nt, Human
cagugggguuucugugggugcu

SEQ ID NO: 525661 - RNA, 22 nt, Human
gauuuacagaucuaagggucac

SEQ ID NO: 525662 - RNA, 22 nt, Human
ucaaucaaagccagauguccuu

SEQ ID NO: 525663 - RNA, 22 nt, Human
uuguauaagaaguuggcagaua

SEQ ID NO: 525664 - RNA, 20 nt, Human
ggaggguggaagaaagcaag

SEQ ID NO: 525665 - RNA, 22 nt, Human
caggcaagauuagagaugagca

SEQ ID NO: 525666 - RNA, 22 nt, Human
agugcaauagcaaagaacaaca

SEQ ID NO: 525667 - RNA, 22 nt, Human
gcaguguuuggauccauagcga

SEQ ID NO: 525668 - RNA, 22 nt, Human
aaagcagggaugaggcuagagg

SEQ ID NO: 525669 - RNA, 19 nt, Human
ugggccugcaucugggucu

SEQ ID NO: 525670 - RNA, 22 nt, Human
cuggcugcuggccugaggaugc

SEQ ID NO: 525671 - RNA, 23 nt, Human
uggcaggugguuagauguuuugu

SEQ ID NO: 525672 - RNA, 19 nt, Human
ggcaggcuggauagagagg

SEQ ID NO: 525673 - RNA, 21 nt, Human
aaggcugagacaacucaggag

SEQ ID NO: 525674 - RNA, 22 nt, Human
ggagcaagagguggugaaaaau

SEQ ID NO: 525675 - RNA, 22 nt, Human
uuagaaauacaagugagguuga

SEQ ID NO: 525676 - RNA, 22 nt, Human
guguaaaucagcuuguguaaua

SEQ ID NO: 525677 - RNA, 22 nt, Human
ccaaggagcaaguuuacaccug

SEQ ID NO: 525678 - RNA, 22 nt, Human
cagaggcagacccuccagggcg

SEQ ID NO: 525679 - RNA, 21 nt, Human
uucccuucugguuuugagaga

SEQ ID NO: 525680 - RNA, 22 nt, Human
uuuaccaguguuaaacaccagc

SEQ ID NO: 525681 - RNA, 22 nt, Human
ucaguccuccacacaggcaccc

SEQ ID NO: 525682 - RNA, 22 nt, Human
uuacaaaguucugaguucaaac

SEQ ID NO: 525683 - RNA, 22 nt, Human
agguccugucuuaucucuguaa

SEQ ID NO: 525684 - RNA, 22 nt, Human
gccuucccacccugcgaggcug

SEQ ID NO: 525685 - RNA, 22 nt, Human
auagauacauuagguaacuugu

SEQ ID NO: 525686 - RNA, 22 nt, Human
uuccaugaagggcagccucuca

SEQ ID NO: 525687 - RNA, 23 nt, Human
ggaguuggauuguacuugcugcu

SEQ ID NO: 525688 - RNA, 22 nt, Human
cuuguuaaaaugcagauuccaa

SEQ ID NO: 525689 - RNA, 22 nt, Human
uaauagaaagguauuuuuugca

SEQ ID NO: 525690 - RNA, 22 nt, Human
ucauuucccuccuacaaagagg

SEQ ID NO: 525691 - RNA, 22 nt, Human
aggaagagcauucacaugguag

SEQ ID NO: 525692 - RNA, 22 nt, Human
ucugccuucgcugcucccugaa

SEQ ID NO: 525693 - RNA, 22 nt, Human
aagcugccugccacgcuagaua

SEQ ID NO: 525694 - RNA, 18 nt, Human
ggagagugagaucaaaca

SEQ ID NO: 525695 - RNA, 22 nt, Human
ccuugcuguuagccuacauuau

SEQ ID NO: 525696 - RNA, 22 nt, Human
uugccagggaacagggagaggc

SEQ ID NO: 525697 - RNA, 22 nt, Human
agggcuccgggcaggcgaugga

SEQ ID NO: 525698 - RNA, 22 nt, Human
ccaaggagaaugacaccaugga

SEQ ID NO: 525699 - RNA, 22 nt, Human
gcucucuggguggugggcaaca

SEQ ID NO: 525700 - RNA, 18 nt, Human
ugcaggcuguugaaacug

SEQ ID NO: 525701 - RNA, 22 nt, Human
aagagcugcaucuaagccauga

SEQ ID NO: 525702 - RNA, 22 nt, Human
ucauuuuuagcgcgcaaaaguu

SEQ ID NO: 525703 - RNA, 20 nt, Human
gcagggcaagggauaugaaa

SEQ ID NO: 525704 - RNA, 22 nt, Human
aauaauuuccagccaacuggaa

SEQ ID NO: 525705 - RNA, 19 nt, Human
ugaagcaauaccauuuuug

SEQ ID NO: 525706 - RNA, 20 nt, Human
uggcagguggccucaguucc

SEQ ID NO: 525707 - RNA, 22 nt, Human
ucaucacaauuuuaugacccuc

SEQ ID NO: 525708 - RNA, 22 nt, Human
gcagugguccaguucacaccca

SEQ ID NO: 525709 - RNA, 22 nt, Human
uuugcugaccccauucugaguc

SEQ ID NO: 525710 - RNA, 22 nt, Human
gcugugcuauaucucugagugu

SEQ ID NO: 525711 - RNA, 22 nt, Human
gcugaagagagaugcguccagc

SEQ ID NO: 525712 - RNA, 22 nt, Human
aacuguaagacaaaugacuucu

SEQ ID NO: 525713 - RNA, 22 nt, Human
uuguauuugauugucauaucgu

SEQ ID NO: 525714 - RNA, 22 nt, Human
uauccaaaguggcauauuauag

SEQ ID NO: 525715 - RNA, 22 nt, Human
ggccagagaauaugccuuacgu

SEQ ID NO: 525716 - RNA, 22 nt, Human
ugcagggcacacgcacgggugu

SEQ ID NO: 525717 - RNA, 22 nt, Human
uaguuauuauuguuacuaucag

SEQ ID NO: 525718 - RNA, 22 nt, Human
cagagcuggggacuguuggaug

SEQ ID NO: 525719 - RNA, 21 nt, Human
aggaaaggaaguccccagggu

SEQ ID NO: 525720 - RNA, 22 nt, Human
aucagagaaauggagggcgcuu

SEQ ID NO: 525721 - RNA, 22 nt, Human
ggcagcaguaggagcuaaucuu

SEQ ID NO: 525722 - RNA, 22 nt, Human
accuggcuucagagucuggcca

SEQ ID NO: 525723 - RNA, 22 nt, Human
gucuggcuuuauauuugcuauu

SEQ ID NO: 525724 - RNA, 22 nt, Human
uuucaagcauaacugggaagag

SEQ ID NO: 525725 - RNA, 22 nt, Human
cugagcuuccaguuccuccagg

SEQ ID NO: 525726 - RNA, 22 nt, Human
cagcucuuugaguauuccauuu

SEQ ID NO: 525727 - RNA, 22 nt, Human
uaugagaauuugcuaauuggcu

SEQ ID NO: 525728 - RNA, 22 nt, Human
gcuguucagggcacucaugggc

SEQ ID NO: 525729 - RNA, 19 nt, Human
agggaguuuauauuugcac

SEQ ID NO: 525730 - RNA, 22 nt, Human
aauccuggcugcguuggccagc

SEQ ID NO: 525731 - RNA, 22 nt, Human
gugcauuuggugacucucaccc

SEQ ID NO: 525732 - RNA, 22 nt, Human
cagacagagucuucccaucagu

SEQ ID NO: 525733 - RNA, 22 nt, Human
agagcacagugcaggauccccg

SEQ ID NO: 525734 - RNA, 22 nt, Human
ugcugccaaaugcgagcucugu

SEQ ID NO: 525735 - RNA, 22 nt, Human
uuauacagggaguuucccugca

SEQ ID NO: 525736 - RNA, 22 nt, Human
aaggcacuacgcugcuggggcg

SEQ ID NO: 525737 - RNA, 22 nt, Human
ucccauguaagaaggagacagg

SEQ ID NO: 525738 - RNA, 22 nt, Human
ccuccugggcuccugucugcac

SEQ ID NO: 525739 - RNA, 22 nt, Human
cagggcucagggacugcagaaa

SEQ ID NO: 525740 - RNA, 22 nt, Human
acugugugcccugacgccaggg

SEQ ID NO: 525741 - RNA, 22 nt, Human
agccuggcacugaggcagggcg

SEQ ID NO: 525742 - RNA, 22 nt, Human
ggcaucaggguaggaagguauc

SEQ ID NO: 525743 - RNA, 22 nt, Human
agcaagaagggcaaggaaguuu

SEQ ID NO: 525744 - RNA, 23 nt, Human
ugcuucucugcuugacaguucug

SEQ ID NO: 525745 - RNA, 22 nt, Human
cuggccugaucucaugcugucc

SEQ ID NO: 525746 - RNA, 22 nt, Human
gggcagcucuggcugugggaag

SEQ ID NO: 525747 - RNA, 22 nt, Human
cuugaaagucagcagaguggau

SEQ ID NO: 525748 - RNA, 22 nt, Human
cagcuuggcuuccgcuuuacug

SEQ ID NO: 525749 - RNA, 22 nt, Human
ggguggaguagaaagaugaauu

SEQ ID NO: 525750 - RNA, 22 nt, Human
gaggaggggcacuugucuccua

SEQ ID NO: 525751 - RNA, 22 nt, Human
uuguauuaauugaaaugaaugc

SEQ ID NO: 525752 - RNA, 18 nt, Human
guggccagccuggucuug

SEQ ID NO: 525753 - RNA, 22 nt, Human
gccucccuggcccacagcagcg

SEQ ID NO: 525754 - RNA, 22 nt, Human
uuguccugucaggcugggggcu

SEQ ID NO: 525755 - RNA, 22 nt, Human
cuaaaauuaccuaccaguuuag

SEQ ID NO: 525756 - RNA, 22 nt, Human
ugcaggagagugagucaguagg

SEQ ID NO: 525757 - RNA, 22 nt, Human
gcugaagguaugaguuuuaucu

SEQ ID NO: 525758 - RNA, 22 nt, Human
acauuugaggauguuaagaaug

SEQ ID NO: 525759 - RNA, 22 nt, Human
aauggcugggaguguauuuugg

SEQ ID NO: 525760 - RNA, 22 nt, Human
cagcaggagcagucagacuccu

SEQ ID NO: 525761 - RNA, 22 nt, Human
uaaagguagugugacauauugu

SEQ ID NO: 525762 - RNA, 22 nt, Human
ccacuugugaaauaaucaaaua

SEQ ID NO: 525763 - RNA, 22 nt, Human
cacauaaguggguuccauugca

SEQ ID NO: 525764 - RNA, 22 nt, Human
uggccugcagcucucagggaag

SEQ ID NO: 525765 - RNA, 22 nt, Human
uagcuuuaaugaguugguaaga

SEQ ID NO: 525766 - RNA, 22 nt, Human
acauuucuccuugcaggaguca

SEQ ID NO: 525767 - RNA, 22 nt, Human
agcugggaggugggcagugaga

SEQ ID NO: 525768 - RNA, 22 nt, Human
agcagaagugccuuagcaauca

SEQ ID NO: 525769 - RNA, 22 nt, Human
ccuggccucagacagagggugg

SEQ ID NO: 525770 - RNA, 22 nt, Human
uccugagauaaaucucauguga

SEQ ID NO: 525771 - RNA, 22 nt, Human
gaggcaagagaagccagcuuuc

SEQ ID NO: 525772 - RNA, 22 nt, Human
agcuuuauauuuaaugaauucu

SEQ ID NO: 525773 - RNA, 22 nt, Human
agugcaaaauucagaagcaauu

SEQ ID NO: 525774 - RNA, 22 nt, Human
agcugccugcuuaugagcucca

SEQ ID NO: 525775 - RNA, 22 nt, Human
gcagcuuuaaucugaauaagua

SEQ ID NO: 525776 - RNA, 22 nt, Human
aguuucaguguugacagauggu

SEQ ID NO: 525777 - RNA, 22 nt, Human
agcugccucugcugguuuagaa

SEQ ID NO: 525778 - RNA, 22 nt, Human
ucugggccucaguuucuucauc

SEQ ID NO: 525779 - RNA, 22 nt, Human
gaggggaaagugugaggcugcg

SEQ ID NO: 525780 - RNA, 22 nt, Human
ugcagaagaccuuccagggcug

SEQ ID NO: 525781 - RNA, 22 nt, Human
gagccagaaaagcugccugacu

SEQ ID NO: 525782 - RNA, 22 nt, Human
aaggcccuggcaggaagcagga

SEQ ID NO: 525783 - RNA, 22 nt, Human
cugaggcaugaaugugggcuuu

SEQ ID NO: 525784 - RNA, 21 nt, Human
uuguuuccucccaaaaugcca

SEQ ID NO: 525785 - RNA, 22 nt, Human
ucagccagugccuugaucuugc

SEQ ID NO: 525786 - RNA, 23 nt, Human
ugucacauuuaguuggcauuguu

SEQ ID NO: 525787 - RNA, 22 nt, Human
aaguugaagcaugaaccaaggu

SEQ ID NO: 525788 - RNA, 22 nt, Human
uggcccugaggggcugugcccc

SEQ ID NO: 525789 - RNA, 22 nt, Human
aagugguagacaaagauaauug

SEQ ID NO: 525790 - RNA, 22 nt, Human
gagcagcuugcgcugucuucac

SEQ ID NO: 525791 - RNA, 22 nt, Human
uugucugagagauggcagaggu

SEQ ID NO: 525792 - RNA, 22 nt, Human
cuaaaugccuuuccuaccuaac

SEQ ID NO: 525793 - RNA, 22 nt, Human
auuucucaguguacauuauguu

SEQ ID NO: 525794 - RNA, 22 nt, Human
gaaugcacucacccaucacuca

SEQ ID NO: 525795 - RNA, 22 nt, Human
ugcugcuccugccuggcuccca

SEQ ID NO: 525796 - RNA, 22 nt, Human
auuccuugcucucaucaaccuu

SEQ ID NO: 525797 - RNA, 22 nt, Human
ucagagugcagggaguagcagc

SEQ ID NO: 525798 - RNA, 18 nt, Human
cagcugccagcucaugga

SEQ ID NO: 525799 - RNA, 22 nt, Human
uuauuaggaaaaggucagaugu

SEQ ID NO: 525800 - RNA, 22 nt, Human
ucugccugcggcugcagguggc

SEQ ID NO: 525801 - RNA, 22 nt, Human
auugaauagaugcauuauacua

SEQ ID NO: 525802 - RNA, 22 nt, Human
ggcggguguaaguaggacagcg

SEQ ID NO: 525803 - RNA, 22 nt, Human
agcuugauuucucugcagugug

SEQ ID NO: 525804 - RNA, 22 nt, Human
aagauguugacuccuuugaugu

SEQ ID NO: 525805 - RNA, 22 nt, Human
ugcugcacgauaaauaauuucu

SEQ ID NO: 525806 - RNA, 22 nt, Human
uguuuuauuucuccaagaggga

SEQ ID NO: 525807 - RNA, 22 nt, Human
gcccaugcucucaggcgggccu

SEQ ID NO: 525808 - RNA, 22 nt, Human
ucaaagcaauuucaccagugcc

SEQ ID NO: 525809 - RNA, 22 nt, Human
gaaauucaggacaaagacucuu

SEQ ID NO: 525810 - RNA, 22 nt, Human
auuagauuguaaauguuuucac

SEQ ID NO: 525811 - RNA, 22 nt, Human
ccacagagagugucagccuuug

SEQ ID NO: 525812 - RNA, 22 nt, Human
ccugggaagagcugacaggagg

SEQ ID NO: 525813 - RNA, 22 nt, Human
cagcuggguuuaguggggugug

SEQ ID NO: 525814 - RNA, 22 nt, Human
uggaaacacucaagcuuauauu

SEQ ID NO: 525815 - RNA, 18 nt, Human
gcucuggcucaccuccag

SEQ ID NO: 525816 - RNA, 22 nt, Human
aaauuccauuaggaaacuucca

SEQ ID NO: 525817 - RNA, 22 nt, Human
caggcagagugagguggucuaa

SEQ ID NO: 525818 - RNA, 22 nt, Human
cuuuccaaugucacuaugaauc

SEQ ID NO: 525819 - RNA, 22 nt, Human
ucuccacacuuucucucccagg

SEQ ID NO: 525820 - RNA, 22 nt, Human
uccagggccccccaguugcacg

SEQ ID NO: 525821 - RNA, 22 nt, Human
ugaaggcccagccacagaaugg

SEQ ID NO: 525822 - RNA, 22 nt, Human
auccuggguuugugaguuuaug

SEQ ID NO: 525823 - RNA, 22 nt, Human
ucagagagaaauaguuuuugac

SEQ ID NO: 525824 - RNA, 22 nt, Human
ccugggcuguaccugugcgcgg

SEQ ID NO: 525825 - RNA, 22 nt, Human
uguaaugagaaagagagugaau

SEQ ID NO: 525826 - RNA, 22 nt, Human
gcugucagugaggugagacaug

SEQ ID NO: 525827 - RNA, 19 nt, Human
ccucuccgcccaccagccc

SEQ ID NO: 525828 - RNA, 22 nt, Human
ugcucuccggcuuccguggccu

SEQ ID NO: 525829 - RNA, 22 nt, Human
cugcagggcagggccuccuggc

SEQ ID NO: 525830 - RNA, 22 nt, Human
ugguggccuugauggcaucugc

SEQ ID NO: 525831 - RNA, 22 nt, Human
ugagacaguucugcagcugggu

SEQ ID NO: 525832 - RNA, 22 nt, Human
aggacauguaaauggagaggga

SEQ ID NO: 525833 - RNA, 22 nt, Human
ucaguguuacauuauauagaac

SEQ ID NO: 525834 - RNA, 22 nt, Human
caaaucuccuuaaagguaaaau

SEQ ID NO: 525835 - RNA, 22 nt, Human
gcagccacuuugcaaccaagag

SEQ ID NO: 525836 - RNA, 22 nt, Human
cuguggcugaacucugaagagg

SEQ ID NO: 525837 - RNA, 22 nt, Human
acaggugugagaacaugccuug

SEQ ID NO: 525838 - RNA, 22 nt, Human
ccaguguucccucggguucaug

SEQ ID NO: 525839 - RNA, 22 nt, Human
gaguuauuuguagggauuauau

SEQ ID NO: 525840 - RNA, 22 nt, Human
aauguacaaaccuucuuuguag

SEQ ID NO: 525841 - RNA, 22 nt, Human
gaaggcugaugacagauucugc

SEQ ID NO: 525842 - RNA, 22 nt, Human
auuuguacaaauuuauguuagu

SEQ ID NO: 525843 - RNA, 22 nt, Human
gcuggcucuucaguggagauag

SEQ ID NO: 525844 - RNA, 22 nt, Human
cuggcagcugugugaagaacug

SEQ ID NO: 525845 - RNA, 22 nt, Human
aucuguggcuggugagaggcag

SEQ ID NO: 525846 - RNA, 22 nt, Human
aaagacugggacugcagcaggc

SEQ ID NO: 525847 - RNA, 22 nt, Human
acagcucuguugccagaucugc

SEQ ID NO: 525848 - RNA, 22 nt, Human
agccaugcuccuuccccucugg

SEQ ID NO: 525849 - RNA, 22 nt, Human
acuguacuguguauuguagaau

SEQ ID NO: 525850 - RNA, 22 nt, Human
auuugagaugguaaauaacuuu

SEQ ID NO: 525851 - RNA, 19 nt, Human
ccugccugagcugucccuc

SEQ ID NO: 525852 - RNA, 22 nt, Human
ucaggcaggcagagggcaaaug

SEQ ID NO: 525853 - RNA, 22 nt, Human
uugucugucccagcuugugcau

SEQ ID NO: 525854 - RNA, 22 nt, Human
uagcacuacuuagguacagcca

SEQ ID NO: 525855 - RNA, 22 nt, Human
cccagaggugcuucagaggugc

SEQ ID NO: 525856 - RNA, 18 nt, Human
uucaccagugugaugggu

SEQ ID NO: 525857 - RNA, 22 nt, Human
uagucuuuugagaaguauaucu

SEQ ID NO: 525858 - RNA, 22 nt, Human
gcaguguucuuguugcuuuuau

SEQ ID NO: 525859 - RNA, 22 nt, Human
gaauaauauugacuuugcaggc

SEQ ID NO: 525860 - RNA, 22 nt, Human
uuacaaagcgcuuuaccucuga

SEQ ID NO: 525861 - RNA, 22 nt, Human
aucuggcugacuuugugggaca

SEQ ID NO: 525862 - RNA, 22 nt, Human
uccagccaccaccuugauugcc

SEQ ID NO: 525863 - RNA, 22 nt, Human
guuaaauucgaugauggauaaa

SEQ ID NO: 525864 - RNA, 22 nt, Human
gcaggagcccuggcauguucuu

SEQ ID NO: 525865 - RNA, 22 nt, Human
ugguaaagaaggcuagaucuga

SEQ ID NO: 525866 - RNA, 22 nt, Human
auguacaguggaaacuaacaaa

SEQ ID NO: 525867 - RNA, 19 nt, Human
gcagcugugggaagagcca

SEQ ID NO: 525868 - RNA, 22 nt, Human
ggcuagaacuuuacacuuugca

SEQ ID NO: 525869 - RNA, 22 nt, Human
ugcaggccucacaccuggcacc

SEQ ID NO: 525870 - RNA, 23 nt, Human
gggugggccaaauuagguagccu

SEQ ID NO: 525871 - RNA, 22 nt, Human
ccuccaggauaagucagggccu

SEQ ID NO: 525872 - RNA, 22 nt, Human
acuggcucagaguuccuagaga

SEQ ID NO: 525873 - RNA, 18 nt, Human
ucucagaggccauccuag

SEQ ID NO: 525874 - RNA, 22 nt, Human
gugccugcagcaauccauggca

SEQ ID NO: 525875 - RNA, 22 nt, Human
aaaugaugauuaaaaugaggua

SEQ ID NO: 525876 - RNA, 22 nt, Human
ccugggccaggcuugggaaugc

SEQ ID NO: 525877 - RNA, 22 nt, Human
uggaccugcuggaugggcaggu

SEQ ID NO: 525878 - RNA, 22 nt, Human
aaacauugagcacuugcuauuu

SEQ ID NO: 525879 - RNA, 18 nt, Human
agccugggcucugccugg

SEQ ID NO: 525880 - RNA, 22 nt, Human
ucugcaaacuuaaguugaaaua

SEQ ID NO: 525881 - RNA, 22 nt, Human
gggcucugugguugugcuuugu

SEQ ID NO: 525882 - RNA, 22 nt, Human
auguccaggaagucuuaacuca

SEQ ID NO: 525883 - RNA, 22 nt, Human
gggcugacaaucucuuuacuua

SEQ ID NO: 525884 - RNA, 20 nt, Human
gcugccuguuucuguaagua

SEQ ID NO: 525885 - RNA, 22 nt, Human
aaucuaaggacuuagcauugcu

SEQ ID NO: 525886 - RNA, 22 nt, Human
uuuucuuaugugcagcuauaug

SEQ ID NO: 525887 - RNA, 22 nt, Human
agucuucucauuucacaugcuu

SEQ ID NO: 525888 - RNA, 22 nt, Human
acaaaugcuuaguucaccaaaa

SEQ ID NO: 525889 - RNA, 22 nt, Human
augcaagauguauagaagacuu

SEQ ID NO: 525890 - RNA, 22 nt, Human
cacauugaaaugacccaauaau

SEQ ID NO: 525891 - RNA, 22 nt, Human
cccucccaggaguggccagaga

SEQ ID NO: 525892 - RNA, 22 nt, Human
gcaaguaggaaguguccuccuu

SEQ ID NO: 525893 - RNA, 22 nt, Human
ugcacaggugagacucaggaag

SEQ ID NO: 525894 - RNA, 22 nt, Human
cugggagauugcuagagaugca

SEQ ID NO: 525895 - RNA, 22 nt, Human
ugauguuuaauacuaugcuuuu

SEQ ID NO: 525896 - RNA, 22 nt, Human
gcucagagaaucagcagacacc

SEQ ID NO: 525897 - RNA, 22 nt, Human
ucuuugcauggacauguguuuu

SEQ ID NO: 525898 - RNA, 22 nt, Human
agggacuugaugucagggagau

SEQ ID NO: 525899 - RNA, 22 nt, Human
auccccacgauauagccaaagc

SEQ ID NO: 525900 - RNA, 22 nt, Human
ggcuucagugacuggugcccuc

SEQ ID NO: 525901 - RNA, 22 nt, Human
aauuucagaugucauaaauaua

SEQ ID NO: 525902 - RNA, 22 nt, Human
aaggcugagagucacaguccua

SEQ ID NO: 525903 - RNA, 22 nt, Human
cagggacccgcacagguagcau

SEQ ID NO: 525904 - RNA, 22 nt, Human
uuauugccugauugaggucauu

SEQ ID NO: 525905 - RNA, 22 nt, Human
uacaggaagucucaguacagua

SEQ ID NO: 525906 - RNA, 22 nt, Human
cucaccacagagccuguccagc

SEQ ID NO: 525907 - RNA, 17 nt, Human
ccaggcuccaucacugu

SEQ ID NO: 525908 - RNA, 22 nt, Human
cugcuggugcagaguggggcug

SEQ ID NO: 525909 - RNA, 22 nt, Human
cagggcuccccagagagccucu

SEQ ID NO: 525910 - RNA, 22 nt, Human
gcacacaggggaguucucagaa

SEQ ID NO: 525911 - RNA, 22 nt, Human
aggaccugcuaaugugccaagu

SEQ ID NO: 525912 - RNA, 19 nt, Human
uccaggaggcugccauuga

SEQ ID NO: 525913 - RNA, 17 nt, Human
acaggcagaucaccuga

SEQ ID NO: 525914 - RNA, 22 nt, Human
uccacauuauguuucuccuuuc

SEQ ID NO: 525915 - RNA, 22 nt, Human
cuauuucugccuaaugaccugu

SEQ ID NO: 525916 - RNA, 22 nt, Human
uccagggcuugacagggugccu

SEQ ID NO: 525917 - RNA, 22 nt, Human
cuggccaguuguccuggcuugg

SEQ ID NO: 525918 - RNA, 22 nt, Human
cauguacaaggaugcucagagu

SEQ ID NO: 525919 - RNA, 22 nt, Human
cugagagcagggacuugagcca

SEQ ID NO: 525920 - RNA, 22 nt, Human
guguaaggugaaaucaacaaau

SEQ ID NO: 525921 - RNA, 22 nt, Human
uuccaaacugccaauucagaag

SEQ ID NO: 525922 - RNA, 22 nt, Human
ggcgcacaaugugcagguuugu

SEQ ID NO: 525923 - RNA, 22 nt, Human
cagaggccauauuucuucacuc

SEQ ID NO: 525924 - RNA, 22 nt, Human
uagguucauauucuagaaucau

SEQ ID NO: 525925 - RNA, 20 nt, Human
aaauuuaggaaauuuuacgc

SEQ ID NO: 525926 - RNA, 22 nt, Human
ugcccuggggucuggagcagca

SEQ ID NO: 525927 - RNA, 16 nt, Human
ucaguguuccagaaua

SEQ ID NO: 525928 - RNA, 22 nt, Human
accugcagcugagaaaaugacu

SEQ ID NO: 525929 - RNA, 22 nt, Human
ggagauggcucugcaaggucua

SEQ ID NO: 525930 - RNA, 22 nt, Human
ggagucagccugucagagugua

SEQ ID NO: 525931 - RNA, 22 nt, Human
uuuucauuguuacuaugagcua

SEQ ID NO: 525932 - RNA, 23 nt, Human
agguucagcuuucuuacucuggg

SEQ ID NO: 525933 - RNA, 22 nt, Human
uucagaaagugaaucuuguuau

SEQ ID NO: 525934 - RNA, 22 nt, Human
gcagagcacccugcagugguau

SEQ ID NO: 525935 - RNA, 22 nt, Human
uuacaguagauacaaugaguaa

SEQ ID NO: 525936 - RNA, 22 nt, Human
ugucucugguauuaggugaaaa

SEQ ID NO: 525937 - RNA, 22 nt, Human
cucccaagauaaauaaggcagu

SEQ ID NO: 525938 - RNA, 21 nt, Human
ggccucugccuugccccacuc

SEQ ID NO: 525939 - RNA, 22 nt, Human
uaacucugaauccucacagcag

SEQ ID NO: 525940 - RNA, 22 nt, Human
cagccuucugaaugaacguacu

SEQ ID NO: 525941 - RNA, 22 nt, Human
aaaggaggaauggagagaugcu

SEQ ID NO: 525942 - RNA, 22 nt, Human
ucaguguuuuaacugucuuuua

SEQ ID NO: 525943 - RNA, 22 nt, Human
aguccuggacuuggagucaggg

SEQ ID NO: 525944 - RNA, 22 nt, Human
ucccucuacagggaagcgcuuu

SEQ ID NO: 525945 - RNA, 22 nt, Human
aggugaguccugggcacaggua

SEQ ID NO: 525946 - RNA, 22 nt, Human
ccugggcuguugcaucauccuu

SEQ ID NO: 525947 - RNA, 22 nt, Human
cuggagucucuucuguagcuac

SEQ ID NO: 525948 - RNA, 22 nt, Human
uauguguacaucugguugagca

SEQ ID NO: 525949 - RNA, 22 nt, Human
agggccuggugaccuggguccu

SEQ ID NO: 525950 - RNA, 22 nt, Human
uggcuggcccugggagugcaga

SEQ ID NO: 525951 - RNA, 22 nt, Human
agcucccagggcugggcaaguu

SEQ ID NO: 525952 - RNA, 22 nt, Human
ugucucugcuuuccuugcaggg

SEQ ID NO: 525953 - RNA, 22 nt, Human
cugaggaguuuggguuguucaa

SEQ ID NO: 525954 - RNA, 22 nt, Human
ccaggguggcguagaugcuggg

SEQ ID NO: 525955 - RNA, 22 nt, Human
ucucaguguuaucuaucugccu

SEQ ID NO: 525956 - RNA, 22 nt, Human
agagacaccgcgcaucauggcu

SEQ ID NO: 525957 - RNA, 22 nt, Human
auuccuuguuucacugaaaagg

SEQ ID NO: 525958 - RNA, 22 nt, Human
uaaaugauaauaaugcuagugu

SEQ ID NO: 525959 - RNA, 22 nt, Human
uggcaggguggcaacuuuuggu

SEQ ID NO: 525960 - RNA, 22 nt, Human
aaggccauuauucugauauauu

SEQ ID NO: 525961 - RNA, 22 nt, Human
ggcuuccagcugggccuuggag

SEQ ID NO: 525962 - RNA, 22 nt, Human
ugccuucaagacccauccucca

SEQ ID NO: 525963 - RNA, 22 nt, Human
gcucccugcagcugagaguucc

SEQ ID NO: 525964 - RNA, 22 nt, Human
ugacagaacagguugggagcaa

SEQ ID NO: 525965 - RNA, 20 nt, Human
gcaggcagggaaugggggug

SEQ ID NO: 525966 - RNA, 22 nt, Human
auggccagucaagccucuggcu

SEQ ID NO: 525967 - RNA, 22 nt, Human
agguucaggcacuugcccaaca

SEQ ID NO: 525968 - RNA, 22 nt, Human
agcucacaguguccuuccucaa

SEQ ID NO: 525969 - RNA, 22 nt, Human
acuuccuuuugggaaacuguuu

SEQ ID NO: 525970 - RNA, 22 nt, Human
cacugcaguaacucuaggacug

SEQ ID NO: 525971 - RNA, 18 nt, Human
agaguguucucagugaaa

SEQ ID NO: 525972 - RNA, 22 nt, Human
guuuccuguuucucagcagccc

SEQ ID NO: 525973 - RNA, 22 nt, Human
ucagacagagaaguacaaugag

SEQ ID NO: 525974 - RNA, 19 nt, Human
acaggcagaauugggugug

SEQ ID NO: 525975 - RNA, 22 nt, Human
uuuaauuuuccugguaggccug

SEQ ID NO: 525976 - RNA, 22 nt, Human
aguucacucuuuaugagaaagu

SEQ ID NO: 525977 - RNA, 22 nt, Human
ugcuucugaugugagcagcccc

SEQ ID NO: 525978 - RNA, 22 nt, Human
cagggcuguaaauuagugcuga

SEQ ID NO: 525979 - RNA, 22 nt, Human
ugggugaggagaggcugucuaa

SEQ ID NO: 525980 - RNA, 22 nt, Human
acuguucauauucuuagaaauu

SEQ ID NO: 525981 - RNA, 22 nt, Human
gcugcccaguucugcugcugcc

SEQ ID NO: 525982 - RNA, 22 nt, Human
ggccuggcucuugcccagccug

SEQ ID NO: 525983 - RNA, 22 nt, Human
gcucaggaaacagcagggcuug

SEQ ID NO: 525984 - RNA, 22 nt, Human
acaaagauguuuaaagcauuua

SEQ ID NO: 525985 - RNA, 18 nt, Human
agagaugggaguuggaaa

SEQ ID NO: 525986 - RNA, 22 nt, Human
uacacacuuacuggagaugaag

SEQ ID NO: 525987 - RNA, 22 nt, Human
ucagugcacccaauucucucca

SEQ ID NO: 525988 - RNA, 22 nt, Human
gcuggccuuugaggaagcugcg

SEQ ID NO: 525989 - RNA, 22 nt, Human
gaggaaggaaugcaguguaugc

SEQ ID NO: 525990 - RNA, 22 nt, Human
aaugcaaauuaucaggcuucuc

SEQ ID NO: 525991 - RNA, 22 nt, Human
gggcuuuaacacccagucaggg

SEQ ID NO: 525992 - RNA, 22 nt, Human
agccucugugacucacagguca

SEQ ID NO: 525993 - RNA, 22 nt, Human
auauacagggagaaacagcuua

SEQ ID NO: 525994 - RNA, 22 nt, Human
cuggggacugaaggauguugcu

SEQ ID NO: 525995 - RNA, 22 nt, Human
gcaaagauauuagaauagagua

SEQ ID NO: 525996 - RNA, 22 nt, Human
caagaagucauuuagccucuca

SEQ ID NO: 525997 - RNA, 22 nt, Human
uccugggauucugcauuucuaa

SEQ ID NO: 525998 - RNA, 22 nt, Human
caggccucuauggucagcugag

SEQ ID NO: 525999 - RNA, 22 nt, Human
gagcuggcuaauacugacuuau

SEQ ID NO: 526000 - RNA, 22 nt, Human
ggagcugcucagagccaguccc

SEQ ID NO: 526001 - RNA, 19 nt, Human
ucaaggcucccugagggau

SEQ ID NO: 526002 - RNA, 22 nt, Human
cuucagcaccauagcuccuucu

SEQ ID NO: 526003 - RNA, 22 nt, Human
ccagagagggcgccaccuggag

SEQ ID NO: 526004 - RNA, 22 nt, Human
gacagaagaggaacuuggacag

SEQ ID NO: 526005 - RNA, 22 nt, Human
acaggcagagaacucagccaga

SEQ ID NO: 526006 - RNA, 22 nt, Human
cacagaggaaugcaucagcaga

SEQ ID NO: 526007 - RNA, 22 nt, Human
ucagggaagacuucuuagagga

SEQ ID NO: 526008 - RNA, 22 nt, Human
aagcagauuggggauuuccaug

SEQ ID NO: 526009 - RNA, 21 nt, Human
gccugggaagagaaagguaag

SEQ ID NO: 526010 - RNA, 22 nt, Human
gggaccugggccagaggacagu

SEQ ID NO: 526011 - RNA, 22 nt, Human
cagagccuuaguucuccuagaa

SEQ ID NO: 526012 - RNA, 22 nt, Human
aaagauuucacaucccaagccu

SEQ ID NO: 526013 - RNA, 22 nt, Human
uaaguuugugucucuguuacuu

SEQ ID NO: 526014 - RNA, 22 nt, Human
guuuccugacuguggaauuaua

SEQ ID NO: 526015 - RNA, 22 nt, Human
uagcauuccaucacucagcacc

SEQ ID NO: 526016 - RNA, 22 nt, Human
agagccaggaaguggcgugggg

SEQ ID NO: 526017 - RNA, 22 nt, Human
uucaccuguguuuuguggcuga

SEQ ID NO: 526018 - RNA, 22 nt, Human
uucucugguaaacacaugcgua

SEQ ID NO: 526019 - RNA, 22 nt, Human
uuggaagacagugaaacagcac

SEQ ID NO: 526020 - RNA, 22 nt, Human
aagggcaggcacccacccucac

SEQ ID NO: 526021 - RNA, 20 nt, Human
agccaaaggagaacagugcu

SEQ ID NO: 526022 - RNA, 22 nt, Human
agacuucucaguuuuauuagua

SEQ ID NO: 526023 - RNA, 20 nt, Human
auaauuauuuacuuuugugc

SEQ ID NO: 526024 - RNA, 22 nt, Human
ucugcaggccucgacaaggcca

SEQ ID NO: 526025 - RNA, 22 nt, Human
aacucagucauaaagcgaaugc

SEQ ID NO: 526026 - RNA, 22 nt, Human
ucagaagacuacuaggacacau

SEQ ID NO: 526027 - RNA, 22 nt, Human
ccagaaaaugcagaacauagaa

SEQ ID NO: 526028 - RNA, 22 nt, Human
cucuggaaaaccacuagcagga

SEQ ID NO: 526029 - RNA, 23 nt, Human
aggaggaaaaguuaucugcugag

SEQ ID NO: 526030 - RNA, 19 nt, Human
gccaggagggcucuggcug

SEQ ID NO: 526031 - RNA, 22 nt, Human
ugccaaauuagaguucccaggc

SEQ ID NO: 526032 - RNA, 22 nt, Human
cacaggcuuccaguccccagcu

SEQ ID NO: 526033 - RNA, 20 nt, Human
ccagagaguagguuagugau

SEQ ID NO: 526034 - RNA, 18 nt, Human
gccugcucugcucucccc

SEQ ID NO: 526035 - RNA, 22 nt, Human
gguuucaaauuaaagucuuaag

SEQ ID NO: 526036 - RNA, 22 nt, Human
caagccugucucaccagugcua

SEQ ID NO: 526037 - RNA, 23 nt, Human
aggagaagagauuuccacaugca

SEQ ID NO: 526038 - RNA, 22 nt, Human
gcuuuuucaaaugaaagcuggu

SEQ ID NO: 526039 - RNA, 22 nt, Human
gaucucuggguccuguuggccu

SEQ ID NO: 526040 - RNA, 22 nt, Human
caaaaagcuuagguaacaagcc

SEQ ID NO: 526041 - RNA, 22 nt, Human
ugucaauaguuuugaguucucu

SEQ ID NO: 526042 - RNA, 22 nt, Human
gcuccccauugaucugcaggcu

SEQ ID NO: 526043 - RNA, 21 nt, Human
uccaggaguucuaauaggugu

SEQ ID NO: 526044 - RNA, 22 nt, Human
agagucuguuacuuguccccua

SEQ ID NO: 526045 - RNA, 21 nt, Human
gcagccacagccaccaagcua

SEQ ID NO: 526046 - RNA, 22 nt, Human
cuguggagaugcagaccaggcc

SEQ ID NO: 526047 - RNA, 22 nt, Human
guccucuggugaaagcauuccc

SEQ ID NO: 526048 - RNA, 22 nt, Human
uugaaaggugacauuguuagag

SEQ ID NO: 526049 - RNA, 22 nt, Human
cgucaucacggcaagcaucucc

SEQ ID NO: 526050 - RNA, 22 nt, Human
cugcucggcgcgcauggcugcc

SEQ ID NO: 526051 - RNA, 23 nt, Human
aaauauucuuuuuuaguaagugc

SEQ ID NO: 526052 - RNA, 22 nt, Human
gggcccagcgugguuccaucug

SEQ ID NO: 526053 - RNA, 22 nt, Human
cugagcugcuuugcuuuugggg

SEQ ID NO: 526054 - RNA, 22 nt, Human
ugggggagauugugcaucucua

SEQ ID NO: 526055 - RNA, 20 nt, Human
ggagcugcccugggcuggag

SEQ ID NO: 526056 - RNA, 22 nt, Human
uccuucagggcugaccacaggc

SEQ ID NO: 526057 - RNA, 22 nt, Human
uacaguuuguuacauuguuagu

SEQ ID NO: 526058 - RNA, 18 nt, Human
aaaauaacaaaguuggcu

SEQ ID NO: 526059 - RNA, 19 nt, Human
uguuggugcggauguggag

SEQ ID NO: 526060 - RNA, 22 nt, Human
agaggucauaucucagaagaga

SEQ ID NO: 526061 - RNA, 21 nt, Human
cuucagcaaauacuuggcagg

SEQ ID NO: 526062 - RNA, 22 nt, Human
cccagcucuuccugggagcuaa

SEQ ID NO: 526063 - RNA, 22 nt, Human
ucuggcucccuggagcuccaca

SEQ ID NO: 526064 - RNA, 23 nt, Human
ugcucugugaauaguuggugacu

SEQ ID NO: 526065 - RNA, 22 nt, Human
ucuuugcaucccuuccauaguu

SEQ ID NO: 526066 - RNA, 23 nt, Human
acugccugugccgaucucucuca

SEQ ID NO: 526067 - RNA, 22 nt, Human
uaugagaacaagaacaaucucc

SEQ ID NO: 526068 - RNA, 22 nt, Human
gguggggucacgacagagggaa

SEQ ID NO: 526069 - RNA, 22 nt, Human
gugcugugugauccaugcuggc

SEQ ID NO: 526070 - RNA, 22 nt, Human
agcagcauaucagagaaaguca

SEQ ID NO: 526071 - RNA, 22 nt, Human
cacuuggaggcccccugugccc

SEQ ID NO: 526072 - RNA, 21 nt, Human
cacaugugaauuacugaacug

SEQ ID NO: 526073 - RNA, 22 nt, Human
gccuggcaggccugggccagca

SEQ ID NO: 526074 - RNA, 22 nt, Human
cuggcaggaaguuagaugguaa

SEQ ID NO: 526075 - RNA, 22 nt, Human
uggcaggugcacuuuugguuuc

SEQ ID NO: 526076 - RNA, 20 nt, Human
aggaaggagaaucugagcaa

SEQ ID NO: 526077 - RNA, 22 nt, Human
ucugucacucccugaugaugaa

SEQ ID NO: 526078 - RNA, 22 nt, Human
ggcccagagucugcaauggagu

SEQ ID NO: 526079 - RNA, 22 nt, Human
ccagccagccuugaucugagua

SEQ ID NO: 526080 - RNA, 22 nt, Human
uaaaaguuuuaguuguacauaa

SEQ ID NO: 526081 - RNA, 22 nt, Human
gagaggaagccuucuguacuug

SEQ ID NO: 526082 - RNA, 22 nt, Human
agcugcuccuuuccugcaggcg

SEQ ID NO: 526083 - RNA, 22 nt, Human
uagugauuuucauauuacauua

SEQ ID NO: 526084 - RNA, 21 nt, Human
uccugccuuaguccagagcag

SEQ ID NO: 526085 - RNA, 22 nt, Human
uguaccuggagagcucuuggcc

SEQ ID NO: 526086 - RNA, 18 nt, Human
gguggcaggucagaugcc

SEQ ID NO: 526087 - RNA, 22 nt, Human
ggaggagacggagugauuagug

SEQ ID NO: 526088 - RNA, 22 nt, Human
aaggcagccucugccagccggg

SEQ ID NO: 526089 - RNA, 22 nt, Human
uacuuaaugccacugaauugua

SEQ ID NO: 526090 - RNA, 18 nt, Human
caaagcucacguuccauc

SEQ ID NO: 526091 - RNA, 22 nt, Human
gaggccuggucuaugagauguu

SEQ ID NO: 526092 - RNA, 22 nt, Human
cuccucuggcuuccuggaggca

SEQ ID NO: 526093 - RNA, 20 nt, Human
ggggcugcaugcagagaaga

SEQ ID NO: 526094 - RNA, 22 nt, Human
gcugccaguaguuggagcucca

SEQ ID NO: 526095 - RNA, 22 nt, Human
ugcauuugucuugucucaugaa

SEQ ID NO: 526096 - RNA, 22 nt, Human
uaggguccucaucuguaaauga

SEQ ID NO: 526097 - RNA, 22 nt, Human
ggcaggcugcuugggucauguc

SEQ ID NO: 526098 - RNA, 22 nt, Human
augaagauauucuuguuuucug

SEQ ID NO: 526099 - RNA, 22 nt, Human
agaagcuuccuacauuguucuu

SEQ ID NO: 526100 - RNA, 22 nt, Human
ucucuggccccauggcugagcu

SEQ ID NO: 526101 - RNA, 22 nt, Human
ucagcagggccaugcucucucu

SEQ ID NO: 526102 - RNA, 22 nt, Human
uuauuugccagaauuucucuug

SEQ ID NO: 526103 - RNA, 22 nt, Human
augaugguggguaauguguaaa

SEQ ID NO: 526104 - RNA, 22 nt, Human
gaggaaaugguuguucaggugg

SEQ ID NO: 526105 - RNA, 22 nt, Human
agagcagcugugacauggacag

SEQ ID NO: 526106 - RNA, 22 nt, Human
gaucaggaauauuggaaaguac

SEQ ID NO: 526107 - RNA, 22 nt, Human
ucacugggagagcugacaagga

SEQ ID NO: 526108 - RNA, 22 nt, Human
uucugugcccauuuuaaaaugg

SEQ ID NO: 526109 - RNA, 22 nt, Human
caccagggcucugagcucugaa

SEQ ID NO: 526110 - RNA, 22 nt, Human
ccagggaaaaucaacuucuacu

SEQ ID NO: 526111 - RNA, 22 nt, Human
aagaaaugcagaaaugugcugg

SEQ ID NO: 526112 - RNA, 22 nt, Human
cagagcugacccaaggauugaa

SEQ ID NO: 526113 - RNA, 22 nt, Human
auugacaauuagcccuuaggug

SEQ ID NO: 526114 - RNA, 22 nt, Human
gugcaaaaaucuaucaccagca

SEQ ID NO: 526115 - RNA, 22 nt, Human
ccucccugguggcucuggucua

SEQ ID NO: 526116 - RNA, 22 nt, Human
gcagcugccuauucagggcuug

SEQ ID NO: 526117 - RNA, 22 nt, Human
ucugucacccaggcuggagugc

SEQ ID NO: 526118 - RNA, 22 nt, Human
agucaguggauuuaccaugcgu

SEQ ID NO: 526119 - RNA, 22 nt, Human
aaauguuccauuauuguguaau

SEQ ID NO: 526120 - RNA, 22 nt, Human
cugccuguggucugugaucuaa

SEQ ID NO: 526121 - RNA, 22 nt, Human
cucaggaugaaagucaugguga

SEQ ID NO: 526122 - RNA, 22 nt, Human
aaguuugaugaguuucuggagg

SEQ ID NO: 526123 - RNA, 22 nt, Human
aauaugcagcaugaugaaguaa

SEQ ID NO: 526124 - RNA, 22 nt, Human
cuguguuuuuggucugaucuau

SEQ ID NO: 526125 - RNA, 22 nt, Human
gaugcaaaccuuacauggaccu

SEQ ID NO: 526126 - RNA, 22 nt, Human
auaagaaacauuauucuuucca

SEQ ID NO: 526127 - RNA, 20 nt, Human
acuuuggggucuuucucaga

SEQ ID NO: 526128 - RNA, 22 nt, Human
gcagagaggaaugaagccaucc

SEQ ID NO: 526129 - RNA, 22 nt, Human
cagugagggcauucagugcugg

SEQ ID NO: 526130 - RNA, 23 nt, Human
ucagagaacucgggcagaugacc

SEQ ID NO: 526131 - RNA, 22 nt, Human
gggacuggaacuacuggugcag

SEQ ID NO: 526132 - RNA, 22 nt, Human
aucuacaggcugaggugggagg

SEQ ID NO: 526133 - RNA, 22 nt, Human
gggcaggugccagcucccuguc

SEQ ID NO: 526134 - RNA, 20 nt, Human
ugcuugucaugcacucaggc

SEQ ID NO: 526135 - RNA, 22 nt, Human
uaacuucugcacagaaaauuug

SEQ ID NO: 526136 - RNA, 22 nt, Human
gccagguggcugagcagcugca

SEQ ID NO: 526137 - RNA, 22 nt, Human
ggugaggcuaagugacacaggg

SEQ ID NO: 526138 - RNA, 22 nt, Human
guggcacaggguuguuggucau

SEQ ID NO: 526139 - RNA, 22 nt, Human
uagauucaugcaguaugcuagu

SEQ ID NO: 526140 - RNA, 22 nt, Human
gugcagggagcccagaaggucc

SEQ ID NO: 526141 - RNA, 22 nt, Human
uggcuuccacugugugcccccu

SEQ ID NO: 526142 - RNA, 22 nt, Human
aggucacccguuugacuaucca

SEQ ID NO: 526143 - RNA, 22 nt, Human
guaccagucucugugggcaccu

SEQ ID NO: 526144 - RNA, 22 nt, Human
caaacauagugaagcaaugaca

SEQ ID NO: 526145 - RNA, 22 nt, Human
gggaguggagagcaauggauga

SEQ ID NO: 526146 - RNA, 22 nt, Human
gagaagggcuugggagucaaca

SEQ ID NO: 526147 - RNA, 22 nt, Human
ggcuggcuacauuggaggaagg

SEQ ID NO: 526148 - RNA, 19 nt, Human
acaaacugaguacacuugu

SEQ ID NO: 526149 - RNA, 22 nt, Human
aggcuauuuccacucuucucau

SEQ ID NO: 526150 - RNA, 22 nt, Human
gcacagagagggaagguaacuu

SEQ ID NO: 526151 - RNA, 22 nt, Human
aggguggggugcuacaucuuua

SEQ ID NO: 526152 - RNA, 22 nt, Human
ugcuggcccaguauggacugca

SEQ ID NO: 526153 - RNA, 22 nt, Human
accaaggagacaaagguguauu

SEQ ID NO: 526154 - RNA, 22 nt, Human
gucugaagccagugguaguccg

SEQ ID NO: 526155 - RNA, 22 nt, Human
ugcuuuauugcaucaguguggg

SEQ ID NO: 526156 - RNA, 22 nt, Human
cugagcugacaucuuccucuuu

SEQ ID NO: 526157 - RNA, 22 nt, Human
ugggccaggucugugucagcug

SEQ ID NO: 526158 - RNA, 22 nt, Human
ccucacuggccagccaggggug

SEQ ID NO: 526159 - RNA, 22 nt, Human
cuguagaacgauccaggcauuu

SEQ ID NO: 526160 - RNA, 22 nt, Human
aaggcugcuuuuaacaugcaua

SEQ ID NO: 526161 - RNA, 22 nt, Human
cccaggacucggcacucuccuu

SEQ ID NO: 526162 - RNA, 22 nt, Human
ugagaugaauaacuccugcuaa

SEQ ID NO: 526163 - RNA, 22 nt, Human
cagaacauucacucauaugugg

SEQ ID NO: 526164 - RNA, 22 nt, Human
ccaggccucuggcugcuuaguc

SEQ ID NO: 526165 - RNA, 22 nt, Human
uggccuuggagaggcacggccc

SEQ ID NO: 526166 - RNA, 22 nt, Human
cuaucuuucgauucuagcuuaa

SEQ ID NO: 526167 - RNA, 22 nt, Human
cagcaguacuucucagagguau

SEQ ID NO: 526168 - RNA, 22 nt, Human
uagagaaacagaaccaacaggg

SEQ ID NO: 526169 - RNA, 22 nt, Human
uguguucagaauuugcugcuuu

SEQ ID NO: 526170 - RNA, 23 nt, Human
gcagaaauucucacacugaggcc

SEQ ID NO: 526171 - RNA, 22 nt, Human
cugggaggcaccgcgucgugcu

SEQ ID NO: 526172 - RNA, 22 nt, Human
gccugcagggugaugggcugcc

SEQ ID NO: 526173 - RNA, 22 nt, Human
uggcucagcugacucggcuucu

SEQ ID NO: 526174 - RNA, 22 nt, Human
gcugccugccuaguuccacagu

SEQ ID NO: 526175 - RNA, 22 nt, Human
cagcugccuguauuguccucau

SEQ ID NO: 526176 - RNA, 22 nt, Human
cccaggacucugacacccccaa

SEQ ID NO: 526177 - RNA, 22 nt, Human
ugggagagauaggcuucuggac

SEQ ID NO: 526178 - RNA, 22 nt, Human
gagggccaaugugucccugagc

SEQ ID NO: 526179 - RNA, 22 nt, Human
aaagcacauuacaagcucaguc

SEQ ID NO: 526180 - RNA, 22 nt, Human
cuugacacugucacucaggcca

SEQ ID NO: 526181 - RNA, 22 nt, Human
agcuaguauuucauugaggauu

SEQ ID NO: 526182 - RNA, 21 nt, Human
cccagaaguuccauggggggc

SEQ ID NO: 526183 - RNA, 19 nt, Human
cucugccucuggcuguggc

SEQ ID NO: 526184 - RNA, 20 nt, Human
uucacagaggacucagguca

SEQ ID NO: 526185 - RNA, 22 nt, Human
ccaggaagaaacagucuuuaua

SEQ ID NO: 526186 - RNA, 22 nt, Human
agacacauuuucagcucugcca

SEQ ID NO: 526187 - RNA, 22 nt, Human
agagaagcagggagucaucugu

SEQ ID NO: 526188 - RNA, 22 nt, Human
ugguacauggguagguaucucu

SEQ ID NO: 526189 - RNA, 22 nt, Human
gccugagccgccugagcggcgg

SEQ ID NO: 526190 - RNA, 22 nt, Human
ugggcagacgggagcuugccuu

SEQ ID NO: 526191 - RNA, 22 nt, Human
gaggugaguggggucuccaggg

SEQ ID NO: 526192 - RNA, 22 nt, Human
uaaccuguuaagggcugaccca

SEQ ID NO: 526193 - RNA, 22 nt, Human
uaagccugcaugaaccaugaga

SEQ ID NO: 526194 - RNA, 22 nt, Human
agguaagguuuggaggcagugg

SEQ ID NO: 526195 - RNA, 23 nt, Human
uacugggcagcugcucugacacc

SEQ ID NO: 526196 - RNA, 22 nt, Human
gccagugccugcugcucagggc

SEQ ID NO: 526197 - RNA, 22 nt, Human
gagugggugaaugugcucauaa

SEQ ID NO: 526198 - RNA, 22 nt, Human
uccccaguaagccugcacugug

SEQ ID NO: 526199 - RNA, 22 nt, Human
cagcuggacugggauguagcga

SEQ ID NO: 526200 - RNA, 22 nt, Human
ccucuugauugguuggaagcgg

SEQ ID NO: 526201 - RNA, 22 nt, Human
cuuccugcaacaccuguguugc

SEQ ID NO: 526202 - RNA, 21 nt, Human
ucugaggagaaacucuuggug

SEQ ID NO: 526203 - RNA, 22 nt, Human
uuuauccaccuuacccuguucc

SEQ ID NO: 526204 - RNA, 22 nt, Human
agcugcaaguccaaaggaauua

SEQ ID NO: 526205 - RNA, 21 nt, Human
ucagcuugcuucauuauuaug

SEQ ID NO: 526206 - RNA, 22 nt, Human
gggcauuucuugucaauguagg

SEQ ID NO: 526207 - RNA, 19 nt, Human
gcacacccugcaccaccau

SEQ ID NO: 526208 - RNA, 22 nt, Human
gcugcccauugcucucccacuc

SEQ ID NO: 526209 - RNA, 22 nt, Human
ccaggcuccccaggaggcccuu

SEQ ID NO: 526210 - RNA, 21 nt, Human
ugugacagaggcggugccuac

SEQ ID NO: 526211 - RNA, 20 nt, Human
ucacuguaauugccuacauu

SEQ ID NO: 526212 - RNA, 22 nt, Human
cuucuccgacaaccgacgccgg

SEQ ID NO: 526213 - RNA, 22 nt, Human
ucgggcugcucgcugcggaacu

SEQ ID NO: 526214 - RNA, 22 nt, Human
uuucgagggauuagcuaggacu

SEQ ID NO: 526215 - RNA, 22 nt, Human
uggcugaggagagggcggaagu

SEQ ID NO: 526216 - RNA, 22 nt, Human
uuauuugcccauguuuagcaga

SEQ ID NO: 526217 - RNA, 22 nt, Human
cagaaacacuguauuuagggaa

SEQ ID NO: 526218 - RNA, 22 nt, Human
cagguuccaguugcagggacuu

SEQ ID NO: 526219 - RNA, 22 nt, Human
caggcacaaugagcgccaucuu

SEQ ID NO: 526220 - RNA, 22 nt, Human
gagguuggagggcuggccugca

SEQ ID NO: 526221 - RNA, 22 nt, Human
uggguccuggaaggcgacaggu

SEQ ID NO: 526222 - RNA, 22 nt, Human
gucugcccuuggccugggacuu

SEQ ID NO: 526223 - RNA, 22 nt, Human
aaugacaguggcacagucacuu

SEQ ID NO: 526224 - RNA, 22 nt, Human
guggcauugccuucugcaggaa

SEQ ID NO: 526225 - RNA, 20 nt, Human
cagagcagugcccaggcggc

SEQ ID NO: 526226 - RNA, 22 nt, Human
agacuucucuaacuugaggacc

SEQ ID NO: 526227 - RNA, 21 nt, Human
uuccuggaggcagaaacguga

SEQ ID NO: 526228 - RNA, 22 nt, Human
caugagaucugcagggaugggc

SEQ ID NO: 526229 - RNA, 22 nt, Human
uuuccagggaggaauguggggu

SEQ ID NO: 526230 - RNA, 22 nt, Human
gugcacagaaacauacaaugug

SEQ ID NO: 526231 - RNA, 22 nt, Human
aggccacaggaguacugucggu

SEQ ID NO: 526232 - RNA, 22 nt, Human
ggagugggaacaaugacauggu

SEQ ID NO: 526233 - RNA, 22 nt, Human
cugagauggaguuucgcucuuc

SEQ ID NO: 526234 - RNA, 22 nt, Human
cccuggaacccauggccagugu

SEQ ID NO: 526235 - RNA, 22 nt, Human
aguccagggcuuagucagcggg

SEQ ID NO: 526236 - RNA, 22 nt, Human
ccucuggccuaggccgggagag

SEQ ID NO: 526237 - RNA, 22 nt, Human
augcaguggcagcuccuggugu

SEQ ID NO: 526238 - RNA, 22 nt, Human
gggcccugcgacucgcggcgga

SEQ ID NO: 526239 - RNA, 22 nt, Human
augcccugggagugcuguacca

SEQ ID NO: 526240 - RNA, 22 nt, Human
guccuuucgagggugagugaaa

SEQ ID NO: 526241 - RNA, 20 nt, Human
guggcagugguggcagcagu

SEQ ID NO: 526242 - RNA, 22 nt, Human
uccagcagguccgagacaaguu

SEQ ID NO: 526243 - RNA, 22 nt, Human
gggagaguagcuggaagguucu

SEQ ID NO: 526244 - RNA, 22 nt, Human
ugaggaggugggcacacagagu

SEQ ID NO: 526245 - RNA, 22 nt, Human
ggccacuguuuccugggcaguu

SEQ ID NO: 526246 - RNA, 18 nt, Human
ggaaggugcuggagugca

SEQ ID NO: 526247 - RNA, 22 nt, Human
cagggcacuuaaauugccucgu

SEQ ID NO: 526248 - RNA, 22 nt, Human
aaacugaggcucccgagggugu

SEQ ID NO: 526249 - RNA, 22 nt, Human
gcagccuccgcacugcgagucc

SEQ ID NO: 526250 - RNA, 22 nt, Human
uuuccacacucacugcacucau

SEQ ID NO: 526251 - RNA, 19 nt, Human
agacaaguuuccagaagcc

SEQ ID NO: 526252 - RNA, 22 nt, Human
ggcacagcugaugcagacacac

SEQ ID NO: 526253 - RNA, 22 nt, Human
ucccagugggaagcagcacgcu

SEQ ID NO: 526254 - RNA, 22 nt, Human
uccaggcuccccugcgugcucc

SEQ ID NO: 526255 - RNA, 22 nt, Human
uccaggaguccuggguggcccc

SEQ ID NO: 526256 - RNA, 22 nt, Human
acaaacagaguugaaaaauagg

SEQ ID NO: 526257 - RNA, 20 nt, Human
gaacagucuucugagccaca

SEQ ID NO: 526258 - RNA, 22 nt, Human
gcaggguaggugacagguaguc

SEQ ID NO: 526259 - RNA, 22 nt, Human
ugaggaaugugacaaaaccaag

SEQ ID NO: 526260 - RNA, 22 nt, Human
cccccagcucugcugggucccg

SEQ ID NO: 526261 - RNA, 22 nt, Human
cuggagcuggcccaggcuggcc

SEQ ID NO: 526262 - RNA, 21 nt, Human
cugugauguugccgggguagg

SEQ ID NO: 526263 - RNA, 22 nt, Human
gcccagcugagaagcgcggggc

SEQ ID NO: 526264 - RNA, 20 nt, Human
ucauccaggacaggaguggc

SEQ ID NO: 526265 - RNA, 21 nt, Human
ccaugucagaugugggcugug

SEQ ID NO: 526266 - RNA, 22 nt, Human
uugcccacuggcuguuggucag

SEQ ID NO: 526267 - RNA, 22 nt, Human
ucugcuguuuacugugugauau

SEQ ID NO: 526268 - RNA, 22 nt, Human
cugagcugguucucuugugaaa

SEQ ID NO: 526269 - RNA, 22 nt, Human
gagcugggaagauagcuugagc

SEQ ID NO: 526270 - RNA, 22 nt, Human
cccaggcacacugaagugacau

SEQ ID NO: 526271 - RNA, 23 nt, Human
cagcugguugugggaguggcugc

SEQ ID NO: 526272 - RNA, 22 nt, Human
agucauaaagccagugggaggc

SEQ ID NO: 526273 - RNA, 22 nt, Human
ugcccguggccuggggcagcuu

SEQ ID NO: 526274 - RNA, 22 nt, Human
agucacuguuuaaucuagcuaa

SEQ ID NO: 526275 - RNA, 20 nt, Human
ugagucagcugcaugggugg

SEQ ID NO: 526276 - RNA, 19 nt, Human
ccuggcccugcugcgcggg

SEQ ID NO: 526277 - RNA, 22 nt, Human
gaaggcaagugagccaagagaa

SEQ ID NO: 526278 - RNA, 22 nt, Human
agauugucauugacgaugagca

SEQ ID NO: 526279 - RNA, 22 nt, Human
guggcauuugggagaugcgugg

SEQ ID NO: 526280 - RNA, 22 nt, Human
uugaagcauuugcuauagcauu

SEQ ID NO: 526281 - RNA, 21 nt, Human
gcugcucgagauccagugcuu

SEQ ID NO: 526282 - RNA, 22 nt, Human
ugucacagagcgugcaacagaa

SEQ ID NO: 526283 - RNA, 22 nt, Human
gaggcuggcagaaaagcacagg

SEQ ID NO: 526284 - RNA, 22 nt, Human
agaagugaguugugacuauggg

SEQ ID NO: 526285 - RNA, 22 nt, Human
aacacaguuucugcauugguag

SEQ ID NO: 526286 - RNA, 22 nt, Human
ucugugggcauuuauaaucugg

SEQ ID NO: 526287 - RNA, 22 nt, Human
cagggagaggccucuguugccc

SEQ ID NO: 526288 - RNA, 22 nt, Human
aagcagccagccaucaugcccg

SEQ ID NO: 526289 - RNA, 22 nt, Human
caggccacacggcggcucccug

SEQ ID NO: 526290 - RNA, 22 nt, Human
agcaggccugccaccucggggu

SEQ ID NO: 526291 - RNA, 22 nt, Human
gcuucuggaagcauaugcaaga

SEQ ID NO: 526292 - RNA, 19 nt, Human
ggccuggauuuagggcucc

SEQ ID NO: 526293 - RNA, 22 nt, Human
cuacuucuguggcucuaagaga

SEQ ID NO: 526294 - RNA, 22 nt, Human
aaggugccacuucccucagacu

SEQ ID NO: 526295 - RNA, 19 nt, Human
augggaagcggccagcgga

SEQ ID NO: 526296 - RNA, 22 nt, Human
gugcugauugggagcugggauu

SEQ ID NO: 526297 - RNA, 22 nt, Human
ugguuggauggcucuuguggcu

SEQ ID NO: 526298 - RNA, 22 nt, Human
uugcuugaacccaggaagugga

SEQ ID NO: 526299 - RNA, 22 nt, Human
uuccugagucgccgagucuaug

SEQ ID NO: 526300 - RNA, 22 nt, Human
aaggggaguuagugauaaaacc

SEQ ID NO: 526301 - RNA, 17 nt, Human
aggucugagaguaucug

SEQ ID NO: 526302 - RNA, 22 nt, Human
aagucccaucugccuccaugua

SEQ ID NO: 526303 - RNA, 22 nt, Human
agagaagagucuugucaaauua

SEQ ID NO: 526304 - RNA, 22 nt, Human
cugaaggacacgugaggagcca

SEQ ID NO: 526305 - RNA, 22 nt, Human
gccauguucuugaaucuggguc

SEQ ID NO: 526306 - RNA, 22 nt, Human
uugaggucuggcaguagcguug

SEQ ID NO: 526307 - RNA, 22 nt, Human
ugguccugagcaccagccugac

SEQ ID NO: 526308 - RNA, 21 nt, Human
acagaagcggcgaguggcccc

SEQ ID NO: 526309 - RNA, 22 nt, Human
aucugccuggcuccaggugagc

SEQ ID NO: 526310 - RNA, 20 nt, Human
cagagccaggguuuuguuuu

SEQ ID NO: 526311 - RNA, 22 nt, Human
acagggcaccugagguaggaag

SEQ ID NO: 526312 - RNA, 20 nt, Human
gcuccccuucucugggccuc

SEQ ID NO: 526313 - RNA, 22 nt, Human
ugaggagcaggguggcuuacuc

SEQ ID NO: 526314 - RNA, 22 nt, Human
agcaccauugcaaauauggcag

SEQ ID NO: 526315 - RNA, 22 nt, Human
caaagaagagauuuacagagcu

SEQ ID NO: 526316 - RNA, 22 nt, Human
uucuuucugggguccuucggcu

SEQ ID NO: 526317 - RNA, 22 nt, Human
augucccugagggucucucuga

SEQ ID NO: 526318 - RNA, 22 nt, Human
uagcuucccugcuggaucauaa

SEQ ID NO: 526319 - RNA, 22 nt, Human
ugcugugagaccauuuguugag

SEQ ID NO: 526320 - RNA, 22 nt, Human
cuucacugcagucauggcucug

SEQ ID NO: 526321 - RNA, 22 nt, Human
ugccuggauggcucugagcagg

SEQ ID NO: 526322 - RNA, 22 nt, Human
agaagagccacuguugacggca

SEQ ID NO: 526323 - RNA, 22 nt, Human
ggcgagcaugagucacucuggg

SEQ ID NO: 526324 - RNA, 22 nt, Human
cccuuguuuuugaguacaauag

SEQ ID NO: 526325 - RNA, 23 nt, Human
ucuggcugcuccuuucaaugcuc

SEQ ID NO: 526326 - RNA, 22 nt, Human
aaagagcucggaaaguguugaa

SEQ ID NO: 526327 - RNA, 22 nt, Human
accuuuaugaaacagcugucgu

SEQ ID NO: 526328 - RNA, 19 nt, Human
ucaaagucugagucacuuu

SEQ ID NO: 526329 - RNA, 22 nt, Human
ggagagagaccuccaugcccag

SEQ ID NO: 526330 - RNA, 23 nt, Human
ugacacccucauugugugucgca

SEQ ID NO: 526331 - RNA, 22 nt, Human
uucuccccgucucucugaggcc

SEQ ID NO: 526332 - RNA, 22 nt, Human
agggagcauugugacauaucac

SEQ ID NO: 526333 - RNA, 22 nt, Human
gcggagaggcagagacuccgcg

SEQ ID NO: 526334 - RNA, 22 nt, Human
cugcuguguggauucaauggcu

SEQ ID NO: 526335 - RNA, 22 nt, Human
cuuccucuguggccagagugua

SEQ ID NO: 526336 - RNA, 22 nt, Human
caugugaccgcugggugagcga

SEQ ID NO: 526337 - RNA, 22 nt, Human
ugugguuuugguucagaaacaa

SEQ ID NO: 526338 - RNA, 22 nt, Human
auagcaaaggacaauagucagu

SEQ ID NO: 526339 - RNA, 22 nt, Human
guucuucagauuccauuucagu

SEQ ID NO: 526340 - RNA, 22 nt, Human
gagcagcaucuccggcuuaaag

SEQ ID NO: 526341 - RNA, 22 nt, Human
gagugccuuccccaugcuuugg

SEQ ID NO: 526342 - RNA, 23 nt, Human
cuguggaucuagagggggcccua

SEQ ID NO: 526343 - RNA, 22 nt, Human
aauccagguggcggagguugug

SEQ ID NO: 526344 - RNA, 22 nt, Human
uaucaguagaacaauggacauu

SEQ ID NO: 526345 - RNA, 22 nt, Human
accaugucauuuauuggccaaa

SEQ ID NO: 526346 - RNA, 22 nt, Human
uucccuuucuuaaagaguuagg

SEQ ID NO: 526347 - RNA, 22 nt, Human
gcccucugguggccgccucggc

SEQ ID NO: 526348 - RNA, 22 nt, Human
ugagccuggagucguggagggg

SEQ ID NO: 526349 - RNA, 22 nt, Human
guguuuaaugcagaugugggug

SEQ ID NO: 526350 - RNA, 22 nt, Human
uuuuuggguccaggcuguaucu

SEQ ID NO: 526351 - RNA, 22 nt, Human
caggagcucaagaccacccugg

SEQ ID NO: 526352 - RNA, 22 nt, Human
uguccuguccuuccuggaaguc

SEQ ID NO: 526353 - RNA, 22 nt, Human
cucaguggggcgacagggugcu

SEQ ID NO: 526354 - RNA, 22 nt, Human
agcacugugagcaccagcacgc

SEQ ID NO: 526355 - RNA, 22 nt, Human
auucagaaauagaaaauuugau

SEQ ID NO: 526356 - RNA, 22 nt, Human
guccuggugcuggucauugucg

SEQ ID NO: 526357 - RNA, 22 nt, Human
uuucuucucacccaggacagag

SEQ ID NO: 526358 - RNA, 22 nt, Human
aggcucugucaggcggagcagc

SEQ ID NO: 526359 - RNA, 22 nt, Human
cagagguagccgagugcaaucg

SEQ ID NO: 526360 - RNA, 19 nt, Human
ugguggaggugcaccugac

SEQ ID NO: 526361 - RNA, 22 nt, Human
augcggagccccaagcuugaag

SEQ ID NO: 526362 - RNA, 22 nt, Human
auguaacauaugugaucgcauu

SEQ ID NO: 526363 - RNA, 22 nt, Human
acuggcaguagagggagcgcau

SEQ ID NO: 526364 - RNA, 22 nt, Human
guuuccaagucucucaacaccc

SEQ ID NO: 526365 - RNA, 22 nt, Human
uuuguagauuuucucuccagua

SEQ ID NO: 526366 - RNA, 18 nt, Human
gggguagaguguccuauu

SEQ ID NO: 526367 - RNA, 22 nt, Human
ggcuggcuggcuuagcagagga

SEQ ID NO: 526368 - RNA, 22 nt, Human
acaagauagcuuagaagauuca

SEQ ID NO: 526369 - RNA, 22 nt, Human
ccaggaaguaugacccaacaga

SEQ ID NO: 526370 - RNA, 22 nt, Human
uguccugugcacuguagcaugu

SEQ ID NO: 526371 - RNA, 22 nt, Human
caggacccaaccucccugcucu

SEQ ID NO: 526372 - RNA, 21 nt, Human
cuguccccagugagcaccccc

SEQ ID NO: 526373 - RNA, 22 nt, Human
guggcagcggcccaggccgucu

SEQ ID NO: 526374 - RNA, 22 nt, Human
uuuugguaauuaaguagauauu

SEQ ID NO: 526375 - RNA, 22 nt, Human
gccucugcaccaguacugugcc

SEQ ID NO: 526376 - RNA, 22 nt, Human
ucucauaauuguuucccagcua

SEQ ID NO: 526377 - RNA, 22 nt, Human
cccagagcaugugcugccuuug

SEQ ID NO: 526378 - RNA, 22 nt, Human
ggcacugggugagggucacugg

SEQ ID NO: 526379 - RNA, 22 nt, Human
guugggcugaagugugugcuua

SEQ ID NO: 526380 - RNA, 22 nt, Human
aauucaaggaucuguuaaaucu

SEQ ID NO: 526381 - RNA, 22 nt, Human
gcugggcaggccucgugagggc

SEQ ID NO: 526382 - RNA, 21 nt, Human
ccuguggugccagaucgccag

SEQ ID NO: 526383 - RNA, 22 nt, Human
ggcuucuuagaauuugacuuac

SEQ ID NO: 526384 - RNA, 22 nt, Human
cagcagcaacaacggaagccuu

SEQ ID NO: 526385 - RNA, 22 nt, Human
guucuucagcccucagguccua

SEQ ID NO: 526386 - RNA, 22 nt, Human
guggauggagcuggaagccauu

SEQ ID NO: 526387 - RNA, 22 nt, Human
ugcuccaucuagagcucugcag

SEQ ID NO: 526388 - RNA, 22 nt, Human
gcggggccauguccaacggccu

SEQ ID NO: 526389 - RNA, 22 nt, Human
uguuccucugaacuucuuccaa

SEQ ID NO: 526390 - RNA, 22 nt, Human
guggaaauuuuaggaucaucuu

SEQ ID NO: 526391 - RNA, 22 nt, Human
auggaggaugugcagcaugggc

SEQ ID NO: 526392 - RNA, 22 nt, Human
gccaggguggcagaaggcccca

SEQ ID NO: 526393 - RNA, 22 nt, Human
ucacaguucaacuaguucagau

SEQ ID NO: 526394 - RNA, 22 nt, Human
ugaggccugaagccuggagccu

SEQ ID NO: 526395 - RNA, 22 nt, Human
uagcccauggacuggucagcug

SEQ ID NO: 526396 - RNA, 22 nt, Human
aguggguguagucuuccuccug

SEQ ID NO: 526397 - RNA, 22 nt, Human
acccaggucucucgacuucugg

SEQ ID NO: 526398 - RNA, 22 nt, Human
cucacucaguuuuuaguucauc

SEQ ID NO: 526399 - RNA, 22 nt, Human
guccaggccugccucugaggag

SEQ ID NO: 526400 - RNA, 22 nt, Human
ucaaagcacuggggaaagccug

SEQ ID NO: 526401 - RNA, 22 nt, Human
gucucuaucauagcugaacccu

SEQ ID NO: 526402 - RNA, 22 nt, Human
cugucuggaaugcaguacauag

SEQ ID NO: 526403 - RNA, 22 nt, Human
acagcuggaggucugugagcac

SEQ ID NO: 526404 - RNA, 22 nt, Human
cucagcugucucaugggucugu

SEQ ID NO: 526405 - RNA, 22 nt, Human
cucagucucuugggcugugaag

SEQ ID NO: 526406 - RNA, 22 nt, Human
uaacuugagcucucagugcuau

SEQ ID NO: 526407 - RNA, 22 nt, Human
ccaagcuggacagcagcaagga

SEQ ID NO: 526408 - RNA, 22 nt, Human
gcuagcaaaugucauuuggaag

SEQ ID NO: 526409 - RNA, 22 nt, Human
uccggcggccggccugagcccg

SEQ ID NO: 526410 - RNA, 23 nt, Human
aggcagguuugggcucuucuugu

SEQ ID NO: 526411 - RNA, 22 nt, Human
aaguuauugguggagagcacug

SEQ ID NO: 526412 - RNA, 22 nt, Human
cggagaggugggggcagcaucu

SEQ ID NO: 526413 - RNA, 22 nt, Human
ccucucauagucuguauccuuu

SEQ ID NO: 526414 - RNA, 22 nt, Human
guuuccuuuuggaauuagagcu

SEQ ID NO: 526415 - RNA, 19 nt, Human
uccugcccaccagccaggg

SEQ ID NO: 526416 - RNA, 22 nt, Human
gccacguagaagugccgcgaga

SEQ ID NO: 526417 - RNA, 22 nt, Human
cugacucccaaagaggacgcgu

SEQ ID NO: 526418 - RNA, 22 nt, Human
cugagcaugcuacaugcagcac

SEQ ID NO: 526419 - RNA, 22 nt, Human
cuugggcuuagaagguaaguga

SEQ ID NO: 526420 - RNA, 22 nt, Human
cucccucaggccuuagcccugc

SEQ ID NO: 526421 - RNA, 22 nt, Human
gccuggaaugcaaugugacgaa

SEQ ID NO: 526422 - RNA, 22 nt, Human
cuggcagcucugagucccuucu

SEQ ID NO: 526423 - RNA, 19 nt, Human
acccagcccaggaguggca

SEQ ID NO: 526424 - RNA, 22 nt, Human
uagcaccggcagugguaggugc

SEQ ID NO: 526425 - RNA, 22 nt, Human
uugcucuauguuuguaaacaga

SEQ ID NO: 526426 - RNA, 22 nt, Human
caggguggcaggcaccauggcc

SEQ ID NO: 526427 - RNA, 22 nt, Human
uggcccugccgccacgacgucu

SEQ ID NO: 526428 - RNA, 19 nt, Human
aggaaggcggcggcugccc

SEQ ID NO: 526429 - RNA, 20 nt, Human
uuugauugccccucugacuu

SEQ ID NO: 526430 - RNA, 22 nt, Human
ucccacacagcccgcucaccgg

SEQ ID NO: 526431 - RNA, 22 nt, Human
ccugugcuucacucaacaagcc

SEQ ID NO: 526432 - RNA, 22 nt, Human
cuggcuccucaggacugcggga

SEQ ID NO: 526433 - RNA, 22 nt, Human
gccuggcucugaguuucucucc

SEQ ID NO: 526434 - RNA, 22 nt, Human
agccccaguucccuggaagucu

SEQ ID NO: 526435 - RNA, 22 nt, Human
gaggcauaaguagaagagauug

SEQ ID NO: 526436 - RNA, 22 nt, Human
augaggagucaaggagucggag

SEQ ID NO: 526437 - RNA, 22 nt, Human
ggcugcccucggggucgcaggc

SEQ ID NO: 526438 - RNA, 20 nt, Human
ucuggggaugaggucuagga

SEQ ID NO: 526439 - RNA, 22 nt, Human
agaaagcacccugcacuuucug

SEQ ID NO: 526440 - RNA, 22 nt, Human
gucugcacgugccagggagggg

SEQ ID NO: 526441 - RNA, 22 nt, Human
cuugggcaggggaaacagcugc

SEQ ID NO: 526442 - RNA, 22 nt, Human
ccaagaggggaagggccgcagc

SEQ ID NO: 526443 - RNA, 22 nt, Human
gagcucagccugaggccuggcu

SEQ ID NO: 526444 - RNA, 22 nt, Human
uggcagcagggccccuggagga

SEQ ID NO: 526445 - RNA, 21 nt, Human
uccugccuuaguccagagcag

SEQ ID NO: 526446 - RNA, 22 nt, Human
ugcuggcugggcugcuggagac

SEQ ID NO: 526447 - RNA, 22 nt, Human
cagagccacugucugccaggca

SEQ ID NO: 526448 - RNA, 22 nt, Human
cagggcucgcucgcucgcucgc

SEQ ID NO: 526449 - RNA, 22 nt, Human
ucgggguagacgccagcucgga

SEQ ID NO: 526450 - RNA, 22 nt, Human
gucaucaucaggcagaugcugc

SEQ ID NO: 526451 - RNA, 22 nt, Human
uggaggcagccgugaaccaccu

SEQ ID NO: 526452 - RNA, 22 nt, Human
aggccgugugagcaugugugag

SEQ ID NO: 526453 - RNA, 22 nt, Human
cugacagcgagagaguugcccc

SEQ ID NO: 526454 - RNA, 22 nt, Human
aggucccugcagcagacugcca

SEQ ID NO: 526455 - RNA, 22 nt, Human
uaaugccuuaugucaaauguaa

SEQ ID NO: 526456 - RNA, 22 nt, Human
ugguaaaugucuaacaaucacu

SEQ ID NO: 526457 - RNA, 22 nt, Human
gcccuguguguuugcacugauu

SEQ ID NO: 526458 - RNA, 22 nt, Human
agggggcuccuuggugugcaga

SEQ ID NO: 526459 - RNA, 22 nt, Human
aucccuggccacgaagcugccc

SEQ ID NO: 526460 - RNA, 22 nt, Human
uuuuguguugccauguuaagca

SEQ ID NO: 526461 - RNA, 22 nt, Human
aggcuuuaauuaucuacaggag

SEQ ID NO: 526462 - RNA, 22 nt, Human
ugcuggccucggcgcugggccu

SEQ ID NO: 526463 - RNA, 22 nt, Human
ccaggccuguguuguguggagg

SEQ ID NO: 526464 - RNA, 22 nt, Human
ccaaaauauuagugcuuaagua

SEQ ID NO: 526465 - RNA, 22 nt, Human
uugcugccagcgcccugcaggg

SEQ ID NO: 526466 - RNA, 22 nt, Human
ugugaagaucaggguccuagag

SEQ ID NO: 526467 - RNA, 22 nt, Human
ucucuccuccacaccgggugcu

SEQ ID NO: 526468 - RNA, 22 nt, Human
uccuggcccuguggccugcagu

SEQ ID NO: 526469 - RNA, 22 nt, Human
cucuggcaauugcugcugacuc

SEQ ID NO: 526470 - RNA, 22 nt, Human
gcugcugcuugaaggcucggag

SEQ ID NO: 526471 - RNA, 22 nt, Human
uaucaguccaggguuuugugac

SEQ ID NO: 526472 - RNA, 22 nt, Human
uccagcaguccaugugagacac

SEQ ID NO: 526473 - RNA, 22 nt, Human
cacaucucagggcuacaggcag

SEQ ID NO: 526474 - RNA, 22 nt, Human
gaaggagaggauugugaggcug

SEQ ID NO: 526475 - RNA, 22 nt, Human
ccacugcuaacuugcugcagcu

SEQ ID NO: 526476 - RNA, 22 nt, Human
gcuggccugcgagggcaggcug

SEQ ID NO: 526477 - RNA, 22 nt, Human
ggaauccugguguuuucugccu

SEQ ID NO: 526478 - RNA, 22 nt, Human
cagcugcucugguggucucucc

SEQ ID NO: 526479 - RNA, 22 nt, Human
ggcaguggcuccucucuacucc

SEQ ID NO: 526480 - RNA, 22 nt, Human
ucccacugcuuugcucugcuca

SEQ ID NO: 526481 - RNA, 22 nt, Human
ugcugaggagguggcugugcuu

SEQ ID NO: 526482 - RNA, 22 nt, Human
gagggugguggcuuaaggugcu

SEQ ID NO: 526483 - RNA, 22 nt, Human
aggcggcuccgggagugugggc

SEQ ID NO: 526484 - RNA, 22 nt, Human
gccuguuucuccuccuuggccc

SEQ ID NO: 526485 - RNA, 22 nt, Human
gggaugagagcugggacagaag

SEQ ID NO: 526486 - RNA, 22 nt, Human
ucagacaccgucuauuuugccu

SEQ ID NO: 526487 - RNA, 22 nt, Human
auguauacgugcaggucacagg

SEQ ID NO: 526488 - RNA, 22 nt, Human
uggugcagacaggagccccgcu

SEQ ID NO: 526489 - RNA, 22 nt, Human
ccagagcugcagguaaaaugcu

SEQ ID NO: 526490 - RNA, 22 nt, Human
aaggaggaauguagccagcucc

SEQ ID NO: 526491 - RNA, 22 nt, Human
cauggcaggugcagauucugug

SEQ ID NO: 526492 - RNA, 22 nt, Human
uagcagcacuauuuguuguagu

SEQ ID NO: 526493 - RNA, 22 nt, Human
ggaaugugcugacacgcgagag

SEQ ID NO: 526494 - RNA, 22 nt, Human
ccagcagcgauagggugagugc

SEQ ID NO: 526495 - RNA, 22 nt, Human
cccagccugaucucggccagcu

SEQ ID NO: 526496 - RNA, 22 nt, Human
uggggugugcucagagcagggg

SEQ ID NO: 526497 - RNA, 22 nt, Human
ccuguacuuguauuaaaggucc

SEQ ID NO: 526498 - RNA, 20 nt, Human
ucucccugcccaucucagau

SEQ ID NO: 526499 - RNA, 22 nt, Human
ugcccagucuccgggccagccc

SEQ ID NO: 526500 - RNA, 19 nt, Human
uuuaaugugugcugcaauc

SEQ ID NO: 526501 - RNA, 22 nt, Human
cucuggagcgcugcuucccgcg

SEQ ID NO: 526502 - RNA, 22 nt, Human
aucuucaaggaaaaaauacagu

SEQ ID NO: 526503 - RNA, 22 nt, Human
ucggugcgcgaggcgcgguccc

SEQ ID NO: 526504 - RNA, 21 nt, Human
gcucuguguuacaaguugggg

SEQ ID NO: 526505 - RNA, 22 nt, Human
acugagaacuuggggacagagg

SEQ ID NO: 526506 - RNA, 22 nt, Human
uggcuccguuguacaggcugga

SEQ ID NO: 526507 - RNA, 22 nt, Human
ucccaguggcuucauaaggcag

SEQ ID NO: 526508 - RNA, 22 nt, Human
uggucccugaagagagaccuug

SEQ ID NO: 526509 - RNA, 22 nt, Human
caggaacagcaccaggagcuag

SEQ ID NO: 526510 - RNA, 22 nt, Human
ucccggcgcugggagguggguc

SEQ ID NO: 526511 - RNA, 15 nt, Human
uggugguguugagac

SEQ ID NO: 526512 - RNA, 22 nt, Human
auguccaggaagucuuaacuca

SEQ ID NO: 526513 - RNA, 22 nt, Human
uaaaaucaugacagauugacau

SEQ ID NO: 526514 - RNA, 22 nt, Human
cuggcuccauccuugagcucug

SEQ ID NO: 526515 - RNA, 22 nt, Human
uccuccuuuccccgcuggagcc

SEQ ID NO: 526516 - RNA, 22 nt, Human
agacagcacuuuuguauggggg

SEQ ID NO: 526517 - RNA, 22 nt, Human
cuucauguacaguuauuggaga

SEQ ID NO: 526518 - RNA, 22 nt, Human
ggcaagagggcagauggagugc

SEQ ID NO: 526519 - RNA, 22 nt, Human
caggcgggcaggugcggccccu

SEQ ID NO: 526520 - RNA, 22 nt, Human
auguuugaaauuguaaguauau

SEQ ID NO: 526521 - RNA, 22 nt, Human
ugugugcucgauggcccugcag

SEQ ID NO: 526522 - RNA, 22 nt, Human
cagcuccccucuguggggcagu

SEQ ID NO: 526523 - RNA, 22 nt, Human
ccucccugccggcuggacuagu

SEQ ID NO: 526524 - RNA, 22 nt, Human
ugacaagagaccccuccgcagg

SEQ ID NO: 526525 - RNA, 22 nt, Human
uaaguauuggccuauagcuaga

SEQ ID NO: 526526 - RNA, 22 nt, Human
acuagaaacuaauggauuauua

SEQ ID NO: 526527 - RNA, 20 nt, Human
aucagguguucagccacugc

SEQ ID NO: 526528 - RNA, 22 nt, Human
gccccuucguggaagugcauuc

SEQ ID NO: 526529 - RNA, 22 nt, Human
aguucacagcaaaguggggacc

SEQ ID NO: 526530 - RNA, 22 nt, Human
gaggagagaagcuaacggugcu

SEQ ID NO: 526531 - RNA, 22 nt, Human
auguaagagcuuugcagggaaa

SEQ ID NO: 526532 - RNA, 21 nt, Human
gccaucaccaagcucuucccc

SEQ ID NO: 526533 - RNA, 22 nt, Human
gagcagcagcugggccagguuc

SEQ ID NO: 526534 - RNA, 22 nt, Human
gucccucugccugugguucucu

SEQ ID NO: 526535 - RNA, 22 nt, Human
uuauugagcacauaguaugugg

SEQ ID NO: 526536 - RNA, 21 nt, Human
agcauucaaaagaugccauaa

SEQ ID NO: 526537 - RNA, 22 nt, Human
acggagcccgugucagguggga

SEQ ID NO: 526538 - RNA, 22 nt, Human
gggcuggagagucccacguggg

SEQ ID NO: 526539 - RNA, 22 nt, Human
ggaccugcucucccaguucucu

SEQ ID NO: 526540 - RNA, 22 nt, Human
agggcacucugcagggaccacc

SEQ ID NO: 526541 - RNA, 22 nt, Human
ucuguggcuuucguguaagaug

SEQ ID NO: 526542 - RNA, 22 nt, Human
ggggaccuuuccauuucugaga

SEQ ID NO: 526543 - RNA, 20 nt, Human
gccaagaauaugcccgacuc

SEQ ID NO: 526544 - RNA, 22 nt, Human
ucccacugucuucucgugcucg

SEQ ID NO: 526545 - RNA, 22 nt, Human
ggggagaguauuuuauucaagu

SEQ ID NO: 526546 - RNA, 22 nt, Human
ggcuagggagacagagggcaug

SEQ ID NO: 526547 - RNA, 22 nt, Human
cagggccugccugguuccugga

SEQ ID NO: 526548 - RNA, 22 nt, Human
accugguaaccugccugacuaa

SEQ ID NO: 526549 - RNA, 22 nt, Human
gucccugauaagagccaucgau

SEQ ID NO: 526550 - RNA, 22 nt, Human
gggucagggaggccccaccaug

SEQ ID NO: 526551 - RNA, 22 nt, Human
cugggcccaggcggcucucgga

SEQ ID NO: 526552 - RNA, 21 nt, Human
uaaagcucguucaggaaaguc

SEQ ID NO: 526553 - RNA, 22 nt, Human
uggcaauguggaaugguccagg

SEQ ID NO: 526554 - RNA, 22 nt, Human
acagaauugggguucuugggga

SEQ ID NO: 526555 - RNA, 22 nt, Human
gucagaggggcagcugccaggc

SEQ ID NO: 526556 - RNA, 22 nt, Human
agcugcaccggcuggaccacug

SEQ ID NO: 526557 - RNA, 22 nt, Human
auauuuguuuggcagaguucag

SEQ ID NO: 526558 - RNA, 22 nt, Human
ucaguccuuaucugguguucag

SEQ ID NO: 526559 - RNA, 22 nt, Human
guggcagagagcaagugucuga

SEQ ID NO: 526560 - RNA, 22 nt, Human
acaaaggugagcagaagacaca

SEQ ID NO: 526561 - RNA, 22 nt, Human
guuauguaaucuaacacucagu

SEQ ID NO: 526562 - RNA, 22 nt, Human
aaaagagccacuuaugaccuca

SEQ ID NO: 526563 - RNA, 18 nt, Human
ggccucagccuggccgga

SEQ ID NO: 526564 - RNA, 22 nt, Human
uugaggucuucaggaucaggcu

SEQ ID NO: 526565 - RNA, 22 nt, Human
augaacugcaguauaaacuugg

SEQ ID NO: 526566 - RNA, 22 nt, Human
caggcucgguccaguggcaccc

SEQ ID NO: 526567 - RNA, 21 nt, Human
ugcuccaggagggggcagucc

SEQ ID NO: 526568 - RNA, 23 nt, Human
ggaagcucacguaguccugcacu

SEQ ID NO: 526569 - RNA, 22 nt, Human
cugguuuuccaauguuuugacu

SEQ ID NO: 526570 - RNA, 22 nt, Human
agcucugcuucuugggaagaug

SEQ ID NO: 526571 - RNA, 22 nt, Human
gcagggcugauggcuucccuca

SEQ ID NO: 526572 - RNA, 22 nt, Human
guguggcuaggauggcuuugcu

SEQ ID NO: 526573 - RNA, 22 nt, Human
gaccacugaaugcacuucuaau

SEQ ID NO: 526574 - RNA, 22 nt, Human
ucucagaguuccucuggagucc

SEQ ID NO: 526575 - RNA, 22 nt, Human
guccuggugccaccugcgggau

SEQ ID NO: 526576 - RNA, 22 nt, Human
uuaagguucagaaaucaauacc

SEQ ID NO: 526577 - RNA, 18 nt, Human
gaggcacauaguuggggc

SEQ ID NO: 526578 - RNA, 22 nt, Human
ugaaggccuccccgagcauuag

SEQ ID NO: 526579 - RNA, 22 nt, Human
ggcuagggaucuagaccaggac

SEQ ID NO: 526580 - RNA, 22 nt, Human
caauaguaaauuacggaggaga

SEQ ID NO: 526581 - RNA, 22 nt, Human
gcugccuggaauaacggcuggc

SEQ ID NO: 526582 - RNA, 22 nt, Human
uucucuaguuuugacgaggauu

SEQ ID NO: 526583 - RNA, 22 nt, Human
aucuaaagugucauaaguagcu

SEQ ID NO: 526584 - RNA, 22 nt, Human
gacaagaugacaucauggcuuc

SEQ ID NO: 526585 - RNA, 22 nt, Human
ugccagcaguagcaguaggcca

SEQ ID NO: 526586 - RNA, 22 nt, Human
ugacagugugcccggagguuag

SEQ ID NO: 526587 - RNA, 22 nt, Human
ugcuucucucuaggaagacgcu

SEQ ID NO: 526588 - RNA, 22 nt, Human
caaacugaacacgaaagucuuu

SEQ ID NO: 526589 - RNA, 22 nt, Human
ugaggccaagccuccucugcca

SEQ ID NO: 526590 - RNA, 22 nt, Human
augaugaagcaugguuacacug

SEQ ID NO: 526591 - RNA, 22 nt, Human
gccuuugcugugacaaugcugg

SEQ ID NO: 526592 - RNA, 22 nt, Human
uccagcugugcuccaggaggug

SEQ ID NO: 526593 - RNA, 22 nt, Human
uuugacucugggugcuuuuucg

SEQ ID NO: 526594 - RNA, 22 nt, Human
ggucuccugaccuuuagucccu

SEQ ID NO: 526595 - RNA, 22 nt, Human
aaagcagaacugagagagcugg

SEQ ID NO: 526596 - RNA, 20 nt, Human
uggcccagcacgacgaggac

SEQ ID NO: 526597 - RNA, 22 nt, Human
cggcagagcccugagucagccu

SEQ ID NO: 526598 - RNA, 22 nt, Human
aucagugacuucuuccaaaguu

SEQ ID NO: 526599 - RNA, 22 nt, Human
cagagcugucauuugccaguga

SEQ ID NO: 526600 - RNA, 21 nt, Human
ucugugcuuuuuuggcuccua

SEQ ID NO: 526601 - RNA, 22 nt, Human
gcccagcccagaaagguucgga

SEQ ID NO: 526602 - RNA, 22 nt, Human
aguggcugugaaauacauggga

SEQ ID NO: 526603 - RNA, 22 nt, Human
ugacaggcuugcuaagacauag

SEQ ID NO: 526604 - RNA, 22 nt, Human
gcggcuccgaagccaggccgcg

SEQ ID NO: 526605 - RNA, 22 nt, Human
ucacauguguggcagugcaagu

SEQ ID NO: 526606 - RNA, 22 nt, Human
ucaccucucuggccgucuaccu

SEQ ID NO: 526607 - RNA, 22 nt, Human
gccucugcacuguggcacacca

SEQ ID NO: 526608 - RNA, 19 nt, Human
ggggcccggggucugcgag

SEQ ID NO: 526609 - RNA, 22 nt, Human
ccaggacaagccagagggacag

SEQ ID NO: 526610 - RNA, 22 nt, Human
cacaauuuccauugagcagcag

SEQ ID NO: 526611 - RNA, 22 nt, Human
aaagcugggcuggccaacccag

SEQ ID NO: 526612 - RNA, 23 nt, Human
guccuagugcuuggugcccaggc

SEQ ID NO: 526613 - RNA, 22 nt, Human
cagcuccaucuugcuuauacca

SEQ ID NO: 526614 - RNA, 22 nt, Human
gaccaaggaagaggggagccag

SEQ ID NO: 526615 - RNA, 22 nt, Human
aagcagcauaugacagcaucca

SEQ ID NO: 526616 - RNA, 22 nt, Human
gaauuguacugcaaucagggga

SEQ ID NO: 526617 - RNA, 21 nt, Human
uuccuccucuggagaagaaga

SEQ ID NO: 526618 - RNA, 22 nt, Human
caggcuguguuccuggaacccc

SEQ ID NO: 526619 - RNA, 22 nt, Human
cugggaguugacgaggcuugua

SEQ ID NO: 526620 - RNA, 22 nt, Human
guguguggaaugcucauuuauu

SEQ ID NO: 526621 - RNA, 22 nt, Human
cucaggucuuaguucugucauc

SEQ ID NO: 526622 - RNA, 22 nt, Human
ggcaccuuucaucccaucuaga

SEQ ID NO: 526623 - RNA, 22 nt, Human
gcugcuuugucuguaaaaugga

SEQ ID NO: 526624 - RNA, 22 nt, Human
gcuguggcuccaauggugagcc

SEQ ID NO: 526625 - RNA, 22 nt, Human
cugagcaggacagugggagacc

SEQ ID NO: 526626 - RNA, 22 nt, Human
aggccugggacgggagccguga

SEQ ID NO: 526627 - RNA, 22 nt, Human
guaugucuuaggguucaguaac

SEQ ID NO: 526628 - RNA, 19 nt, Human
cacuaagaagcaggggagc

SEQ ID NO: 526629 - RNA, 22 nt, Human
agucuggagugauuauguggga

SEQ ID NO: 526630 - RNA, 22 nt, Human
ggcugagucugugacccaugcg

SEQ ID NO: 526631 - RNA, 18 nt, Human
acagggagggcgcugggg

SEQ ID NO: 526632 - RNA, 22 nt, Human
gugauuuucuccuccuagaagu

SEQ ID NO: 526633 - RNA, 22 nt, Human
gugcaggugguuggcccagccg

SEQ ID NO: 526634 - RNA, 22 nt, Human
uugcacagaugcacaugguugc

SEQ ID NO: 526635 - RNA, 22 nt, Human
cacaucauguuaauucauuaca

SEQ ID NO: 526636 - RNA, 22 nt, Human
guggcaggagggcaucacuugg

SEQ ID NO: 526637 - RNA, 22 nt, Human
ccagccagcugcccuuggggcc

SEQ ID NO: 526638 - RNA, 22 nt, Human
ucuggggucaccuggggugcuu

SEQ ID NO: 526639 - RNA, 22 nt, Human
gucugcccugcagacaugccuc

SEQ ID NO: 526640 - RNA, 22 nt, Human
uucuccagcucaucagggaggg

SEQ ID NO: 526641 - RNA, 22 nt, Human
cagugccagcugcuuggccuac

SEQ ID NO: 526642 - RNA, 22 nt, Human
ucuggcccaucuucugccacca

SEQ ID NO: 526643 - RNA, 22 nt, Human
ccugggacgacucuguacccuu

SEQ ID NO: 526644 - RNA, 22 nt, Human
uggaaacacccacgcaugcaua

SEQ ID NO: 526645 - RNA, 22 nt, Human
gagcacucuggcauguaaccuu

SEQ ID NO: 526646 - RNA, 16 nt, Human
ucucccuugucaccug

SEQ ID NO: 526647 - RNA, 22 nt, Human
ggagacucaccccgcauucuag

SEQ ID NO: 526648 - RNA, 22 nt, Human
ggcuggccuguguggccgccac

SEQ ID NO: 526649 - RNA, 22 nt, Human
gggcagagguucaacuucaaca

SEQ ID NO: 526650 - RNA, 22 nt, Human
cuguguacccacgugggcaccc

SEQ ID NO: 526651 - RNA, 22 nt, Human
ucgucugugaaauugggauaag

SEQ ID NO: 526652 - RNA, 22 nt, Human
gccugaucagguccucggcaua

SEQ ID NO: 526653 - RNA, 22 nt, Human
gacaguggagccacguugggag

SEQ ID NO: 526654 - RNA, 22 nt, Human
cccacugcaugaguugguauua

SEQ ID NO: 526655 - RNA, 17 nt, Human
gcuccagaauucuaguc

SEQ ID NO: 526656 - RNA, 23 nt, Human
ggucccaguggagaggccucacc

SEQ ID NO: 526657 - RNA, 22 nt, Human
gccagcuggcugcaggucccag

SEQ ID NO: 526658 - RNA, 22 nt, Human
ggcagagcuugcagugagccga

SEQ ID NO: 526659 - RNA, 22 nt, Human
agccagcuaccggggcuccugg

SEQ ID NO: 526660 - RNA, 22 nt, Human
uccuggcucaggccccuggugc

SEQ ID NO: 526661 - RNA, 22 nt, Human
cgccguccccuaggaaagagcu

SEQ ID NO: 526662 - RNA, 22 nt, Human
gccagcuagaggcugcagugca

SEQ ID NO: 526663 - RNA, 22 nt, Human
gggaccuggacaugugugugcu

SEQ ID NO: 526664 - RNA, 22 nt, Human
gcugugcagaggugagaaucca

SEQ ID NO: 526665 - RNA, 22 nt, Human
ggggcccagcaccccuccucgc

SEQ ID NO: 526666 - RNA, 22 nt, Human
uggcauuuuguagcuguguauc

SEQ ID NO: 526667 - RNA, 22 nt, Human
aagucaauuaguaaacuuggaa

SEQ ID NO: 526668 - RNA, 22 nt, Human
cagcccacugccucugugguag

SEQ ID NO: 526669 - RNA, 20 nt, Human
uugcaaagugaauagcaauu

SEQ ID NO: 526670 - RNA, 22 nt, Human
gaggcuguaacuugggcacugg

SEQ ID NO: 526671 - RNA, 22 nt, Human
ugggguccucucacuuggaggg

SEQ ID NO: 526672 - RNA, 22 nt, Human
ugcaagagcccaaacuauauac

SEQ ID NO: 526673 - RNA, 22 nt, Human
uuugacuccuguguuucuggaa

SEQ ID NO: 526674 - RNA, 22 nt, Human
aggugacaucccggcagcagag

SEQ ID NO: 526675 - RNA, 22 nt, Human
ggucuggccuccgggcaggugg

SEQ ID NO: 526676 - RNA, 22 nt, Human
ugugaacuggcagguggacggg

SEQ ID NO: 526677 - RNA, 22 nt, Human
cggucaggugcagcguuggcac

SEQ ID NO: 526678 - RNA, 22 nt, Human
caugaccagagaggacggccag

SEQ ID NO: 526679 - RNA, 22 nt, Human
uggccagaacucagacaugugg

SEQ ID NO: 526680 - RNA, 22 nt, Human
gacggagcugguugcugcggcu

SEQ ID NO: 526681 - RNA, 22 nt, Human
uauggcaagaugacauguucuc

SEQ ID NO: 526682 - RNA, 22 nt, Human
cacauuggcaaacgggguugca

SEQ ID NO: 526683 - RNA, 21 nt, Human
gucuuggcaccaggagagaga

SEQ ID NO: 526684 - RNA, 22 nt, Human
uuccagagaguuauuccccugg

SEQ ID NO: 526685 - RNA, 22 nt, Human
gcugcuggcuuccugcuguuuu

SEQ ID NO: 526686 - RNA, 21 nt, Human
accgucaguacuaguauugac

SEQ ID NO: 526687 - RNA, 22 nt, Human
gcagagauccaggguauagguu

SEQ ID NO: 526688 - RNA, 22 nt, Human
gccaugaacucgggcauggaga

SEQ ID NO: 526689 - RNA, 22 nt, Human
ccugggacuuggucugggguuu

SEQ ID NO: 526690 - RNA, 21 nt, Human
aggcagcgauuuucauauugc

SEQ ID NO: 526691 - RNA, 22 nt, Human
ucugcucagccgaucugcuccg

SEQ ID NO: 526692 - RNA, 22 nt, Human
gacagucccccagcagcaaacc

SEQ ID NO: 526693 - RNA, 22 nt, Human
ugugcuugucguggagccaggc

SEQ ID NO: 526694 - RNA, 22 nt, Human
ggagcugcucagagccaguccc

SEQ ID NO: 526695 - RNA, 22 nt, Human
cagcccuugcgacacccuggcu

SEQ ID NO: 526696 - RNA, 22 nt, Human
aggugcaucucguagcucuucu

SEQ ID NO: 526697 - RNA, 22 nt, Human
uucuacauugugaaguucuuua

SEQ ID NO: 526698 - RNA, 22 nt, Human
gaauguuauugaacuacgagcu

SEQ ID NO: 526699 - RNA, 22 nt, Human
aacacauggcaagagcaggaaa

SEQ ID NO: 526700 - RNA, 22 nt, Human
gucauggaggauugugaguggu

SEQ ID NO: 526701 - RNA, 18 nt, Human
uggggggcuugucugaag

SEQ ID NO: 526702 - RNA, 22 nt, Human
uccaggagcucauccacgucaa

SEQ ID NO: 526703 - RNA, 20 nt, Human
ugggguccuggaggggaucc

SEQ ID NO: 526704 - RNA, 22 nt, Human
auguacaaucuaucacaagaag

SEQ ID NO: 526705 - RNA, 22 nt, Human
ucagcacaggucuugcaaaaca

SEQ ID NO: 526706 - RNA, 22 nt, Human
caaggcuaagcuuuggcuuucu

SEQ ID NO: 526707 - RNA, 22 nt, Human
aagcacagggacucaggaccgg

SEQ ID NO: 526708 - RNA, 22 nt, Human
acacugagcuuccaagaugggg

SEQ ID NO: 526709 - RNA, 22 nt, Human
gcagcucucuggccugcccugg

SEQ ID NO: 526710 - RNA, 22 nt, Human
agacugugagaagauggcugcg

SEQ ID NO: 526711 - RNA, 22 nt, Human
guuuauuggguauuguggagcc

SEQ ID NO: 526712 - RNA, 22 nt, Human
gagaugugucagguccuggggg

SEQ ID NO: 526713 - RNA, 22 nt, Human
uaaguauguuagaaaaucaagu

SEQ ID NO: 526714 - RNA, 22 nt, Human
uggcuggcuguccagcugggca

SEQ ID NO: 526715 - RNA, 22 nt, Human
ucaucaucauucucccccacuu

SEQ ID NO: 526716 - RNA, 22 nt, Human
ugcauguuucuguauguuaaug

SEQ ID NO: 526717 - RNA, 21 nt, Human
ucccucagaagcucuugguca

SEQ ID NO: 526718 - RNA, 22 nt, Human
agcaaggcagcuuucacugcuu

SEQ ID NO: 526719 - RNA, 21 nt, Human
agagacugucacugcaguacc

SEQ ID NO: 526720 - RNA, 20 nt, Human
uugaggagauauugaauacu

SEQ ID NO: 526721 - RNA, 22 nt, Human
cagcacauggauggaguuagga

SEQ ID NO: 526722 - RNA, 23 nt, Human
uggggcugauggagacggaccag

SEQ ID NO: 526723 - RNA, 22 nt, Human
auggcucugcugggcaaagcaa

SEQ ID NO: 526724 - RNA, 22 nt, Human
gugcuaaugaauuggagugccu

SEQ ID NO: 526725 - RNA, 22 nt, Human
cacugcccuggggguugccauc

SEQ ID NO: 526726 - RNA, 21 nt, Human
caggaacauucuuuacauuua

SEQ ID NO: 526727 - RNA, 22 nt, Human
gaggggcucuugggcaugaagg

SEQ ID NO: 526728 - RNA, 22 nt, Human
ggagcgugcacuccaggcccuu

SEQ ID NO: 526729 - RNA, 22 nt, Human
cugggugagcuggccagagggu

SEQ ID NO: 526730 - RNA, 22 nt, Human
gccggacugcugcagcugcuag

SEQ ID NO: 526731 - RNA, 19 nt, Human
cacuguccuagucgaggcc

SEQ ID NO: 526732 - RNA, 22 nt, Human
ugagaugaagugauguaaaaca

SEQ ID NO: 526733 - RNA, 22 nt, Human
augcuuuauuggagacagucau

SEQ ID NO: 526734 - RNA, 22 nt, Human
ccagcagcucccucaggguccg

SEQ ID NO: 526735 - RNA, 17 nt, Human
uggcacagaggugcuau

SEQ ID NO: 526736 - RNA, 19 nt, Human
cuucuggauccgcagggcc

SEQ ID NO: 526737 - RNA, 22 nt, Human
uuuguaguuguggaugcugaag

SEQ ID NO: 526738 - RNA, 22 nt, Human
cucugcaggcacccaggguggg

SEQ ID NO: 526739 - RNA, 22 nt, Human
auugagaaaauucgagcaaguu

SEQ ID NO: 526740 - RNA, 22 nt, Human
uucucaggaacucagugucagc

SEQ ID NO: 526741 - RNA, 22 nt, Human
gggcagcaggcuccacguuccu

SEQ ID NO: 526742 - RNA, 21 nt, Human
ucugcccacacuggccacugc

SEQ ID NO: 526743 - RNA, 22 nt, Human
guccuguguaaguacuugcuca

SEQ ID NO: 526744 - RNA, 22 nt, Human
ucuauuaaugauucaauagugu

SEQ ID NO: 526745 - RNA, 22 nt, Human
gggggacaggaugaauaucugu

SEQ ID NO: 526746 - RNA, 22 nt, Human
cggucguaguucuucagcaggu

SEQ ID NO: 526747 - RNA, 22 nt, Human
cagacucuugagcugauuguau

SEQ ID NO: 526748 - RNA, 22 nt, Human
acugggcaaggauaugaugggu

SEQ ID NO: 526749 - RNA, 22 nt, Human
aaaucugagaaauauuguccag

SEQ ID NO: 526750 - RNA, 22 nt, Human
gacagcagccacagggagaggg

SEQ ID NO: 526751 - RNA, 22 nt, Human
ggcaguggugggaggcucgcuc

SEQ ID NO: 526752 - RNA, 22 nt, Human
gaggcugugugucccucuggac

SEQ ID NO: 526753 - RNA, 22 nt, Human
aucugucccuccucacagccuc

SEQ ID NO: 526754 - RNA, 20 nt, Human
uaugugcaguuugguuuauc

SEQ ID NO: 526755 - RNA, 21 nt, Human
gggcuggauauuggaaagagg

SEQ ID NO: 526756 - RNA, 22 nt, Human
ucuccaggcuuaaucucagcuu

SEQ ID NO: 526757 - RNA, 22 nt, Human
cugagcugcucccgcugcagcg

SEQ ID NO: 526758 - RNA, 23 nt, Human
ugaaagcaaugggucuauaguau

SEQ ID NO: 526759 - RNA, 22 nt, Human
uggccugauuuugcuaagagaa

SEQ ID NO: 526760 - RNA, 22 nt, Human
ggcacuggcaaagcaaagucug

SEQ ID NO: 526761 - RNA, 22 nt, Human
uuggcagugacugcgggccccg

SEQ ID NO: 526762 - RNA, 22 nt, Human
acagcuggccgaggcucaggga

SEQ ID NO: 526763 - RNA, 22 nt, Human
ucucugccacagcuucugccuu

SEQ ID NO: 526764 - RNA, 22 nt, Human
gcagcucacagucuccgccauc

SEQ ID NO: 526765 - RNA, 22 nt, Human
ugguccagacuuugaccucuca

SEQ ID NO: 526766 - RNA, 22 nt, Human
gccaggucgucuccauguccaa

SEQ ID NO: 526767 - RNA, 17 nt, Human
gugcuggccuggggcuc

SEQ ID NO: 526768 - RNA, 22 nt, Human
auauguggcauuauuucugagg

SEQ ID NO: 526769 - RNA, 22 nt, Human
auggugguagaagcacuaugug

SEQ ID NO: 526770 - RNA, 22 nt, Human
cagagggagcccuccaggagca

SEQ ID NO: 526771 - RNA, 22 nt, Human
aggaaaauggaccagaguuguu

SEQ ID NO: 526772 - RNA, 22 nt, Human
ucacacuuuauuuauuucaugc

SEQ ID NO: 526773 - RNA, 22 nt, Human
gacggggcagccagcugguggc

SEQ ID NO: 526774 - RNA, 22 nt, Human
uugggcccugcucugaguugcu

SEQ ID NO: 526775 - RNA, 22 nt, Human
agcucagggccaggcgcguuuc

SEQ ID NO: 526776 - RNA, 22 nt, Human
ccagaacagaccugccugaccu

SEQ ID NO: 526777 - RNA, 22 nt, Human
aaaccuguuaauagagcgaugc

SEQ ID NO: 526778 - RNA, 22 nt, Human
auugaagacuugguauccgugg

SEQ ID NO: 526779 - RNA, 22 nt, Human
aagcugccugggaggaagggcu

SEQ ID NO: 526780 - RNA, 22 nt, Human
gaaugcacacgugugugcaugc

SEQ ID NO: 526781 - RNA, 22 nt, Human
cagagaauaaaagggcauuccu

SEQ ID NO: 526782 - RNA, 22 nt, Human
ugccaggcugcccuccagucug

SEQ ID NO: 526783 - RNA, 22 nt, Human
aaucacagccacaaccuggggg

SEQ ID NO: 526784 - RNA, 22 nt, Human
acauuuuuggguugaugucuga

SEQ ID NO: 526785 - RNA, 22 nt, Human
gccggucuuaagcugacuguga

SEQ ID NO: 526786 - RNA, 22 nt, Human
uucuccacccacucuuuuguug

SEQ ID NO: 526787 - RNA, 17 nt, Human
aguuggcagccguugcu

SEQ ID NO: 526788 - RNA, 22 nt, Human
agcagcaggagccgugggguga

SEQ ID NO: 526789 - RNA, 22 nt, Human
accagucauagaaagcaguggu

SEQ ID NO: 526790 - RNA, 22 nt, Human
ccagcugggucccugcuggggc

SEQ ID NO: 526791 - RNA, 22 nt, Human
gcaggaguguggugggacaucc

SEQ ID NO: 526792 - RNA, 22 nt, Human
uggcauuggaauuuguguugca

SEQ ID NO: 526793 - RNA, 22 nt, Human
uucagcacuggacagcgagucu

SEQ ID NO: 526794 - RNA, 22 nt, Human
aggugcugccccgagaaggaug

SEQ ID NO: 526795 - RNA, 22 nt, Human
uugcuucacuacuucuaggcuc

SEQ ID NO: 526796 - RNA, 23 nt, Human
ggacaugucucuggguauuuuga

SEQ ID NO: 526797 - RNA, 22 nt, Human
cuggcuuugaucagagugaccu

SEQ ID NO: 526798 - RNA, 22 nt, Human
gagcugcuggccuccugcggga

SEQ ID NO: 526799 - RNA, 21 nt, Human
ugucagcaacaauacuuucuc

SEQ ID NO: 526800 - RNA, 22 nt, Human
uaccugagaagaaacccguguu

SEQ ID NO: 526801 - RNA, 22 nt, Human
ggaagccaguugcuuggugugg

SEQ ID NO: 526802 - RNA, 22 nt, Human
cugaggaucuaauuauuggguc

SEQ ID NO: 526803 - RNA, 22 nt, Human
cagaaagcaguugucaaugggc

SEQ ID NO: 526804 - RNA, 22 nt, Human
aggggagguggcagaaaugugc

SEQ ID NO: 526805 - RNA, 22 nt, Human
uaggauaugcauuuuuauacau

SEQ ID NO: 526806 - RNA, 20 nt, Human
ugcuggaggcgccggcgcuc

SEQ ID NO: 526807 - RNA, 22 nt, Human
cuccugcagcccucagcagcca

SEQ ID NO: 526808 - RNA, 20 nt, Human
uuuuccacuccucaaaacag

SEQ ID NO: 526809 - RNA, 22 nt, Human
cggagcagagccacucgggccg

SEQ ID NO: 526810 - RNA, 22 nt, Human
gagguauaguucuauuagauga

SEQ ID NO: 526811 - RNA, 22 nt, Human
ucugccaucaagaugcucuggc

SEQ ID NO: 526812 - RNA, 22 nt, Human
cucagcacauuccuaagggaug

SEQ ID NO: 526813 - RNA, 23 nt, Human
agacagaggcugaggcuggccgc

SEQ ID NO: 526814 - RNA, 22 nt, Human
gcucguugaaccuguccccgag

SEQ ID NO: 526815 - RNA, 22 nt, Human
cagggccagggcuauggugaag

SEQ ID NO: 526816 - RNA, 22 nt, Human
ugagcaccaggcaccacagcuc

SEQ ID NO: 526817 - RNA, 22 nt, Human
ggacugucuccuugcugguagg

SEQ ID NO: 526818 - RNA, 22 nt, Human
cccugacccuaucagagggcca

SEQ ID NO: 526819 - RNA, 22 nt, Human
aggaaagcucccaguagggcuc

SEQ ID NO: 526820 - RNA, 16 nt, Human
ccccucaggaaguaca

SEQ ID NO: 526821 - RNA, 23 nt, Human
aaggggauacuuccacuuucuuu

SEQ ID NO: 526822 - RNA, 22 nt, Human
gccuggaucccagggagucagg

SEQ ID NO: 526823 - RNA, 22 nt, Human
augcauaucuccuaucuccuca

SEQ ID NO: 526824 - RNA, 22 nt, Human
gguggcugugagcauuauguga

SEQ ID NO: 526825 - RNA, 22 nt, Human
cugagcaucauggcagaaucuu

SEQ ID NO: 526826 - RNA, 22 nt, Human
uaaaaguuagcuaggacaaagu

SEQ ID NO: 526827 - RNA, 22 nt, Human
ugcugcuuguuuuguaaauaaa

SEQ ID NO: 526828 - RNA, 22 nt, Human
ggcgaggugucugccaucaagc

SEQ ID NO: 526829 - RNA, 22 nt, Human
gcaggccugucuugcucgcccu

SEQ ID NO: 526830 - RNA, 22 nt, Human
augccccagugugugcuuccuu

SEQ ID NO: 526831 - RNA, 22 nt, Human
cucuccaggcgagguccuacug

SEQ ID NO: 526832 - RNA, 22 nt, Human
cuagcagcauucuucuaguuag

SEQ ID NO: 526833 - RNA, 22 nt, Human
ggaugacagaugcaggcuuuga

SEQ ID NO: 526834 - RNA, 22 nt, Human
ucucaggcuuccuggugcugug

SEQ ID NO: 526835 - RNA, 22 nt, Human
gaauguuaaugcacuucuagcu

SEQ ID NO: 526836 - RNA, 22 nt, Human
gugacaugguuugccgucccug

SEQ ID NO: 526837 - RNA, 17 nt, Human
ucugagaacuugaagca

SEQ ID NO: 526838 - RNA, 22 nt, Human
cagcugccuaugaccuagccuc

SEQ ID NO: 526839 - RNA, 17 nt, Human
agcagcuggguugaucu

SEQ ID NO: 526840 - RNA, 22 nt, Human
agguggagaagagaugggcagu

SEQ ID NO: 526841 - RNA, 22 nt, Human
ucaccuguucaacagcaauaau

SEQ ID NO: 526842 - RNA, 22 nt, Human
ggucagugccuaucaugugggc

SEQ ID NO: 526843 - RNA, 22 nt, Human
guuguuuuugaacggugguggc

SEQ ID NO: 526844 - RNA, 22 nt, Human
acagcuucgaggaucucauccc

SEQ ID NO: 526845 - RNA, 22 nt, Human
uccaugacagcgugagaguuug

SEQ ID NO: 526846 - RNA, 22 nt, Human
ggcagugaugucaaacagugaa

SEQ ID NO: 526847 - RNA, 22 nt, Human
ucccuggcacaagaaggcuguc

SEQ ID NO: 526848 - RNA, 22 nt, Human
uccguggggccuguggcuuccg

SEQ ID NO: 526849 - RNA, 22 nt, Human
caggggcggguaaaaggccucc

SEQ ID NO: 526850 - RNA, 22 nt, Human
gcagcccaggaggcgggagccc

SEQ ID NO: 526851 - RNA, 22 nt, Human
agcagcaccuguccucgcugcu

SEQ ID NO: 526852 - RNA, 22 nt, Human
gcucuccacugaccacggggca

SEQ ID NO: 526853 - RNA, 22 nt, Human
ucucugagaucagccacugacu

SEQ ID NO: 526854 - RNA, 22 nt, Human
cuccagagagaaaggaggccgc

SEQ ID NO: 526855 - RNA, 22 nt, Human
ugcugcacuuauggcucugagg

SEQ ID NO: 526856 - RNA, 22 nt, Human
agaccagugaguaggccuuaga

SEQ ID NO: 526857 - RNA, 22 nt, Human
aaauacaguggcagcagauaau

SEQ ID NO: 526858 - RNA, 22 nt, Human
uaaaguucuuagaacaaggccu

SEQ ID NO: 526859 - RNA, 22 nt, Human
gugcugccuccauauccgucag

SEQ ID NO: 526860 - RNA, 22 nt, Human
caggccuugaaggccugcggga

SEQ ID NO: 526861 - RNA, 22 nt, Human
gggagcugagcuggaagagaau

SEQ ID NO: 526862 - RNA, 22 nt, Human
gccagguugcugacgacgaucu

SEQ ID NO: 526863 - RNA, 22 nt, Human
cugggagggguagccaauccua

SEQ ID NO: 526864 - RNA, 22 nt, Human
agcagcaggugaccucgaugcc

SEQ ID NO: 526865 - RNA, 22 nt, Human
cuggccucacagaggcuaagcc

SEQ ID NO: 526866 - RNA, 22 nt, Human
acucagaguuugcguuccauac

SEQ ID NO: 526867 - RNA, 22 nt, Human
uggccucuuucuucccuuugac

SEQ ID NO: 526868 - RNA, 22 nt, Human
cucagaggggaugcuuggagaa

SEQ ID NO: 526869 - RNA, 22 nt, Human
auuuccaggaguugaggucuga

SEQ ID NO: 526870 - RNA, 22 nt, Human
ucaggggcuugaggugcauguc

SEQ ID NO: 526871 - RNA, 22 nt, Human
cucaugucggcaggacucgccc

SEQ ID NO: 526872 - RNA, 22 nt, Human
agaaggcaucagaaguguguag

SEQ ID NO: 526873 - RNA, 22 nt, Human
ccugguccccaucggcccagcg

SEQ ID NO: 526874 - RNA, 22 nt, Human
cgggcuccgggucuuugcaguc

SEQ ID NO: 526875 - RNA, 22 nt, Human
ucuguccauucagaauggcccu

SEQ ID NO: 526876 - RNA, 22 nt, Human
ccaggcauccauugcuuccucu

SEQ ID NO: 526877 - RNA, 22 nt, Human
ucugagaaugguggauguggug

SEQ ID NO: 526878 - RNA, 22 nt, Human
ggcagcugaagaggaacuuugg

SEQ ID NO: 526879 - RNA, 22 nt, Human
ugcagguggcagcggggcacca

SEQ ID NO: 526880 - RNA, 22 nt, Human
aacccuggggcugcucugccug

SEQ ID NO: 526881 - RNA, 22 nt, Human
uugggacaaagacuccuugaau

SEQ ID NO: 526882 - RNA, 22 nt, Human
ucagccagaggcuucuugguuu

SEQ ID NO: 526883 - RNA, 22 nt, Human
uuaguguccagaguuuuuauua

SEQ ID NO: 526884 - RNA, 22 nt, Human
auggccuuucucaguggugcuu

SEQ ID NO: 526885 - RNA, 22 nt, Human
auccucagagaacgaacacaau

SEQ ID NO: 526886 - RNA, 22 nt, Human
agcuuugggcagaagaggauuc

SEQ ID NO: 526887 - RNA, 22 nt, Human
cugggacacguugugcuuuaac

SEQ ID NO: 526888 - RNA, 22 nt, Human
ucacuugaaccugggaggcaga

SEQ ID NO: 526889 - RNA, 21 nt, Human
agcugugguuuuacaucuuuu

SEQ ID NO: 526890 - RNA, 22 nt, Human
gaaggcaguaaauggcuguuuu

SEQ ID NO: 526891 - RNA, 22 nt, Human
ggcuagcuuagagucaugcuag

SEQ ID NO: 526892 - RNA, 22 nt, Human
augagugcuuagagaguaaucc

SEQ ID NO: 526893 - RNA, 20 nt, Human
cugaccagcagccugucucc

SEQ ID NO: 526894 - RNA, 18 nt, Human
agguguguuucuaggagc

SEQ ID NO: 526895 - RNA, 18 nt, Human
ggguccccagcugcaggg

SEQ ID NO: 526896 - RNA, 21 nt, Human
acaaauuguuuauauaggaag

SEQ ID NO: 526897 - RNA, 22 nt, Human
uuauuccauagaagucaaggaa

SEQ ID NO: 526898 - RNA, 23 nt, Human
ugucuugguuucuucacccuagu

SEQ ID NO: 526899 - RNA, 22 nt, Human
gccgugcgugcgcaggugcugu

SEQ ID NO: 526900 - RNA, 22 nt, Human
ggccuuggaguccuccacugga

SEQ ID NO: 526901 - RNA, 22 nt, Human
gacuuugccacuugcuccagcu

SEQ ID NO: 526902 - RNA, 22 nt, Human
cugaccaguccuuagcaccugg

SEQ ID NO: 526903 - RNA, 22 nt, Human
ggaaacauuccaagaguugaaa

SEQ ID NO: 526904 - RNA, 22 nt, Human
cucuagcucccagggagcgucu

SEQ ID NO: 526905 - RNA, 22 nt, Human
ccacuguuuccuuucugcuggc

SEQ ID NO: 526906 - RNA, 22 nt, Human
agaggagguccuuuucugaugu

SEQ ID NO: 526907 - RNA, 22 nt, Human
auggaguguggccaggcaguaa

SEQ ID NO: 526908 - RNA, 22 nt, Human
ccaggugugcucugcaguggau

SEQ ID NO: 526909 - RNA, 22 nt, Human
ugauuuacaguagugucuaaac

SEQ ID NO: 526910 - RNA, 22 nt, Human
ccuguaccgcgaucugcugcgc

SEQ ID NO: 526911 - RNA, 22 nt, Human
uggaagguguggcaggucuagu

SEQ ID NO: 526912 - RNA, 22 nt, Human
uggaauuaucugaagugauuug

SEQ ID NO: 526913 - RNA, 22 nt, Human
caggcacaagaucggcuagaua

SEQ ID NO: 526914 - RNA, 22 nt, Human
agcaggaacucagggaguucuc

SEQ ID NO: 526915 - RNA, 22 nt, Human
caaguaugagaaagcuauuacc

SEQ ID NO: 526916 - RNA, 22 nt, Human
uaacauuucggugacaguggga

SEQ ID NO: 526917 - RNA, 22 nt, Human
uccagccauaucuuguagcccu

SEQ ID NO: 526918 - RNA, 22 nt, Human
agugccaaaucgagggcucuga

SEQ ID NO: 526919 - RNA, 22 nt, Human
uggagcugguucuggggaagcu

SEQ ID NO: 526920 - RNA, 22 nt, Human
ucagccuggcaggauggccugg

SEQ ID NO: 526921 - RNA, 22 nt, Human
ggcagcaggguagccauuucuc

SEQ ID NO: 526922 - RNA, 22 nt, Human
guccagaguagucgaguauucu

SEQ ID NO: 526923 - RNA, 22 nt, Human
gugggcaucuccuuggaagcca

SEQ ID NO: 526924 - RNA, 22 nt, Human
ugggucagauugagccccuggu

SEQ ID NO: 526925 - RNA, 22 nt, Human
cugcacagucauuuccucucaa

SEQ ID NO: 526926 - RNA, 20 nt, Human
uuacagaaaugauguuauuu

SEQ ID NO: 526927 - RNA, 22 nt, Human
cagagccuuaguucuccuagaa

SEQ ID NO: 526928 - RNA, 22 nt, Human
ugcccuguuccugccuccagcu

SEQ ID NO: 526929 - RNA, 22 nt, Human
cagacugaaaaucccugguagu

SEQ ID NO: 526930 - RNA, 22 nt, Human
ugaggcuggaugggaugccucc

SEQ ID NO: 526931 - RNA, 22 nt, Human
ucugagagcuguagaagccuau

SEQ ID NO: 526932 - RNA, 22 nt, Human
ugcuuguauucauaucacagcu

SEQ ID NO: 526933 - RNA, 22 nt, Human
gcucagguagaugggguugucc

SEQ ID NO: 526934 - RNA, 22 nt, Human
agcaggaggagagccuggcggu

SEQ ID NO: 526935 - RNA, 22 nt, Human
ggcagguguuuuuauauuaaag

SEQ ID NO: 526936 - RNA, 22 nt, Human
agugccucugcagguccgaguu

SEQ ID NO: 526937 - RNA, 22 nt, Human
ccugugguuuacucuguggcua

SEQ ID NO: 526938 - RNA, 22 nt, Human
ugaagcuagaauguccauauuu

SEQ ID NO: 526939 - RNA, 22 nt, Human
cauuuuccucugcugguguuca

SEQ ID NO: 526940 - RNA, 22 nt, Human
uggcccgggaguuuugaagagu

SEQ ID NO: 526941 - RNA, 20 nt, Human
ucucuggcaagaagcugcag

SEQ ID NO: 526942 - RNA, 22 nt, Human
gggcugacaccacccaggcgca

SEQ ID NO: 526943 - RNA, 22 nt, Human
ccauggccaggaaagccaaggu

SEQ ID NO: 526944 - RNA, 22 nt, Human
cacugguugccucuuucuguuc

SEQ ID NO: 526945 - RNA, 22 nt, Human
gugggccugaugcugccaugag

SEQ ID NO: 526946 - RNA, 22 nt, Human
augggagugacagggccacugg

SEQ ID NO: 526947 - RNA, 23 nt, Human
gccagagcugccugcccuugcug

SEQ ID NO: 526948 - RNA, 22 nt, Human
uaggaaauaauucacucuggcu

SEQ ID NO: 526949 - RNA, 22 nt, Human
agucaagguggaccagaaaaau

SEQ ID NO: 526950 - RNA, 22 nt, Human
gggcugagggguaucucauggg

SEQ ID NO: 526951 - RNA, 22 nt, Human
gauacuuuguggaauccuggau

SEQ ID NO: 526952 - RNA, 23 nt, Human
aagaaugcuucugaagagcugcc

SEQ ID NO: 526953 - RNA, 22 nt, Human
uuuucaguugugcucucuaguu

SEQ ID NO: 526954 - RNA, 22 nt, Human
ucuaaugcuugacugggggcuu

SEQ ID NO: 526955 - RNA, 22 nt, Human
agagacauagcacaguuuuucg

SEQ ID NO: 526956 - RNA, 22 nt, Human
cagaggauauaugguuuguaug

SEQ ID NO: 526957 - RNA, 22 nt, Human
ucccugagugggcugguaguau

SEQ ID NO: 526958 - RNA, 22 nt, Human
gcugggcccugggugcccuagc

SEQ ID NO: 526959 - RNA, 22 nt, Human
ggagggaguuucauuccugccc

SEQ ID NO: 526960 - RNA, 21 nt, Human
ucccacuggcccagggcucca

SEQ ID NO: 526961 - RNA, 22 nt, Human
uagucaccuguugugugaugcc

SEQ ID NO: 526962 - RNA, 22 nt, Human
gagcuguguaugcaucauucug

SEQ ID NO: 526963 - RNA, 22 nt, Human
ugggaagauaugagugaccaac

SEQ ID NO: 526964 - RNA, 20 nt, Human
ugagccugcuguaggaggcc

SEQ ID NO: 526965 - RNA, 22 nt, Human
uccacagggaugccugcggcuu

SEQ ID NO: 526966 - RNA, 20 nt, Human
ucagugggaaagugagagug

SEQ ID NO: 526967 - RNA, 22 nt, Human
gaaggaagcugucuggaugugu

SEQ ID NO: 526968 - RNA, 22 nt, Human
uggguaggaccagaaaugcacu

SEQ ID NO: 526969 - RNA, 22 nt, Human
ggugcccaaggaagguugccgu

SEQ ID NO: 526970 - RNA, 22 nt, Human
gcugcccucuguguuuguccuu

SEQ ID NO: 526971 - RNA, 22 nt, Human
caucucccacuuccuugggggu

SEQ ID NO: 526972 - RNA, 22 nt, Human
auggcauuugaaucugucuuuu

SEQ ID NO: 526973 - RNA, 22 nt, Human
cucagaguccauaguuuacagu

SEQ ID NO: 526974 - RNA, 22 nt, Human
cccacucccugcacgccugccg

SEQ ID NO: 526975 - RNA, 22 nt, Human
ggagccuggaguuucugauggg

SEQ ID NO: 526976 - RNA, 18 nt, Human
uggguggcuagggaguuu

SEQ ID NO: 526977 - RNA, 22 nt, Human
augaagcauuacaggaugacag

SEQ ID NO: 526978 - RNA, 22 nt, Human
gugcuggcuggggcaucaggca

SEQ ID NO: 526979 - RNA, 22 nt, Human
ccagucagccaagcugcagcgg

SEQ ID NO: 526980 - RNA, 19 nt, Human
agugagcauggcuugacug

SEQ ID NO: 526981 - RNA, 22 nt, Human
uuggaauuugagaccaagaaaa

SEQ ID NO: 526982 - RNA, 21 nt, Human
uccagcacagaugaccucccc

SEQ ID NO: 526983 - RNA, 22 nt, Human
cuggacacuggggaugcgcagu

SEQ ID NO: 526984 - RNA, 22 nt, Human
gcucuggcuacuguggcuaccg

SEQ ID NO: 526985 - RNA, 22 nt, Human
caggcuugaugugucuauacuu

SEQ ID NO: 526986 - RNA, 22 nt, Human
cagagcagaaaccugggugauu

SEQ ID NO: 526987 - RNA, 21 nt, Human
ucuuggggaggagggcugcac

SEQ ID NO: 526988 - RNA, 22 nt, Human
uggacucaccuugaguuagcca

SEQ ID NO: 526989 - RNA, 22 nt, Human
gcugcuccgcagagugugugug

SEQ ID NO: 526990 - RNA, 22 nt, Human
cagucccaguuugagacucugg

SEQ ID NO: 526991 - RNA, 22 nt, Human
uuaccacagugccugucuaaug

SEQ ID NO: 526992 - RNA, 22 nt, Human
auccaggcgaaugcagaaggcc

SEQ ID NO: 526993 - RNA, 22 nt, Human
cagacagagucuucccaucagu

SEQ ID NO: 526994 - RNA, 22 nt, Human
cagaccagccauuugccucuuc

SEQ ID NO: 526995 - RNA, 23 nt, Human
cagcacaguacauuuccugucuc

SEQ ID NO: 526996 - RNA, 22 nt, Human
uguggaauguccucagcauccu

SEQ ID NO: 526997 - RNA, 22 nt, Human
caacauuucaaggucuuuagga

SEQ ID NO: 526998 - RNA, 23 nt, Human
gagcugggauacaggcuuacugc

SEQ ID NO: 526999 - RNA, 22 nt, Human
uucuggagacccagcaacaggg

SEQ ID NO: 527000 - RNA, 22 nt, Human
gagugugucggucagcguggcg

SEQ ID NO: 527001 - RNA, 22 nt, Human
ucugagugggaacucucaugac

SEQ ID NO: 527002 - RNA, 22 nt, Human
gucccaggggagcucucugauu

SEQ ID NO: 527003 - RNA, 22 nt, Human
uucagaagguaggaaugucccu

SEQ ID NO: 527004 - RNA, 22 nt, Human
uugagcugccuggcuguggcuc

SEQ ID NO: 527005 - RNA, 19 nt, Human
aacuacagcgcacuguccu

SEQ ID NO: 527006 - RNA, 19 nt, Human
ccauucugucucugccaca

SEQ ID NO: 527007 - RNA, 22 nt, Human
gcucccuggaauguuggcugcc

SEQ ID NO: 527008 - RNA, 22 nt, Human
aaacacaucauucaugucguca

SEQ ID NO: 527009 - RNA, 22 nt, Human
ugcuugucacccugccugagug

SEQ ID NO: 527010 - RNA, 22 nt, Human
ggagccaguuuagaccucaguu

SEQ ID NO: 527011 - RNA, 22 nt, Human
auguacauuauucgagugaugg

SEQ ID NO: 527012 - RNA, 22 nt, Human
acucacagggccucaguuuucc

SEQ ID NO: 527013 - RNA, 22 nt, Human
agugauguagguggauucuggc

SEQ ID NO: 527014 - RNA, 22 nt, Human
acucuguuugcagguagcucag

SEQ ID NO: 527015 - RNA, 22 nt, Human
cugggcuguuuguucuggucuc

SEQ ID NO: 527016 - RNA, 22 nt, Human
aauggcaaaguguuuucauacc

SEQ ID NO: 527017 - RNA, 22 nt, Human
aggacagcagugcuggcacuug

SEQ ID NO: 527018 - RNA, 22 nt, Human
ccuuuguucacuggagagugga

SEQ ID NO: 527019 - RNA, 22 nt, Human
gguguggcaguggaccugugaa

SEQ ID NO: 527020 - RNA, 22 nt, Human
gcccagccccuggguggacgug

SEQ ID NO: 527021 - RNA, 22 nt, Human
gcggcgccugggacccgccagc

SEQ ID NO: 527022 - RNA, 22 nt, Human
uguccugugaccuggcaccaca

SEQ ID NO: 527023 - RNA, 18 nt, Human
gugacugccccaaaaggc

SEQ ID NO: 527024 - RNA, 22 nt, Human
acgccucugcagcugccgggcc

SEQ ID NO: 527025 - RNA, 22 nt, Human
caggacccaucagccaggcacu

SEQ ID NO: 527026 - RNA, 22 nt, Human
cagaaagugauuugcuauucca

SEQ ID NO: 527027 - RNA, 22 nt, Human
cuguuccuccaccucaacaaac

SEQ ID NO: 527028 - RNA, 23 nt, Human
uacagccaugucgcugauuuaac

SEQ ID NO: 527029 - RNA, 22 nt, Human
gggcagcaaaucugagucuggu

SEQ ID NO: 527030 - RNA, 22 nt, Human
gagccucguggcggccacugcg

SEQ ID NO: 527031 - RNA, 22 nt, Human
ucuccacaccagaaggagcuga

SEQ ID NO: 527032 - RNA, 22 nt, Human
uucugauugcugaugaggccca

SEQ ID NO: 527033 - RNA, 22 nt, Human
gcuguaacuuuuucauuuucaa

SEQ ID NO: 527034 - RNA, 20 nt, Human
gugcuaaguacugugaaggg

SEQ ID NO: 527035 - RNA, 20 nt, Human
ccacccuguccggggcggag

SEQ ID NO: 527036 - RNA, 20 nt, Human
gugcccaguuggugacagac

SEQ ID NO: 527037 - RNA, 22 nt, Human
uggaauguuaaaccucaaugau

SEQ ID NO: 527038 - RNA, 22 nt, Human
ugucuacaagccuuguucggca

SEQ ID NO: 527039 - RNA, 22 nt, Human
cuucuggcguuggaggucugag

SEQ ID NO: 527040 - RNA, 22 nt, Human
agcauggccucccgggccuggc

SEQ ID NO: 527041 - RNA, 22 nt, Human
cagaaccaggaacugauggaga

SEQ ID NO: 527042 - RNA, 21 nt, Human
agccaggcaagcacccccacu

SEQ ID NO: 527043 - RNA, 22 nt, Human
ucuccauggauuuggaaaugau

SEQ ID NO: 527044 - RNA, 22 nt, Human
guggcccaggcuuggcgcuggc

SEQ ID NO: 527045 - RNA, 22 nt, Human
cuggagcucuccagagccccgu

SEQ ID NO: 527046 - RNA, 22 nt, Human
cuccaaaggauaaaagcagagu

SEQ ID NO: 527047 - RNA, 21 nt, Human
agccugcaauguagguaccgg

SEQ ID NO: 527048 - RNA, 22 nt, Human
cugggaggcccacguugggaag

SEQ ID NO: 527049 - RNA, 22 nt, Human
ugugacagugccagcuucauag

SEQ ID NO: 527050 - RNA, 22 nt, Human
aaaaugcucaucagcgauggcu

SEQ ID NO: 527051 - RNA, 22 nt, Human
cagugcagccaaggacaggcac

SEQ ID NO: 527052 - RNA, 22 nt, Human
gugggccaguuccucacaggua

SEQ ID NO: 527053 - RNA, 22 nt, Human
aauucagguuauauuugcaacu

SEQ ID NO: 527054 - RNA, 22 nt, Human
uccaguggugguuugaagggca

SEQ ID NO: 527055 - RNA, 22 nt, Human
uuuaagguacagcuagcagcau

SEQ ID NO: 527056 - RNA, 19 nt, Human
cuggcuucaagcaguccuc

SEQ ID NO: 527057 - RNA, 22 nt, Human
agcugucuaccugcagaguccu

SEQ ID NO: 527058 - RNA, 22 nt, Human
agugacauuauuuuguguacua

SEQ ID NO: 527059 - RNA, 21 nt, Human
caagacauaugaguacucugg

SEQ ID NO: 527060 - RNA, 22 nt, Human
uggugcaggccaagcugcgagc

SEQ ID NO: 527061 - RNA, 22 nt, Human
uguaccacucuacuaaggguuc

SEQ ID NO: 527062 - RNA, 22 nt, Human
gcagcccaggcucgcucacugc

SEQ ID NO: 527063 - RNA, 22 nt, Human
gcugcaagugcauguugcaacu

SEQ ID NO: 527064 - RNA, 22 nt, Human
aguguauucugcaugggagacu

SEQ ID NO: 527065 - RNA, 22 nt, Human
ucaccggcagacguggccugau

SEQ ID NO: 527066 - RNA, 21 nt, Human
ggagucagggucuggcugggg

SEQ ID NO: 527067 - RNA, 22 nt, Human
ggccauggcgggagccggcguc

SEQ ID NO: 527068 - RNA, 22 nt, Human
cauggaaggcaaaagacacaga

SEQ ID NO: 527069 - RNA, 22 nt, Human
ugcagcugccuagggcuggcuu

SEQ ID NO: 527070 - RNA, 22 nt, Human
acuuggucguggugcagcaugg

SEQ ID NO: 527071 - RNA, 22 nt, Human
aaccagcacugcuggggccugc

SEQ ID NO: 527072 - RNA, 18 nt, Human
cuuuagcugucaucuuug

SEQ ID NO: 527073 - RNA, 22 nt, Human
ccagcagccaccuucucgaaau

SEQ ID NO: 527074 - RNA, 22 nt, Human
gcuagagaccagaggccuugaa

SEQ ID NO: 527075 - RNA, 22 nt, Human
ccugggcaaaugccagagacaa

SEQ ID NO: 527076 - RNA, 22 nt, Human
ucauccagccucaucaggagcu

SEQ ID NO: 527077 - RNA, 22 nt, Human
ucgggacgguggcauuugugcc

SEQ ID NO: 527078 - RNA, 22 nt, Human
ugaccguuuuggcacccaugcu

SEQ ID NO: 527079 - RNA, 22 nt, Human
cgaggaggaaacgcggagaacu

SEQ ID NO: 527080 - RNA, 22 nt, Human
aaaugccucauuuucucucacu

SEQ ID NO: 527081 - RNA, 22 nt, Human
uggaagggguuacgcagcagga

SEQ ID NO: 527082 - RNA, 22 nt, Human
ugcuggaguggcacuguguggc

SEQ ID NO: 527083 - RNA, 22 nt, Human
aaguuacacauuuucauuguaa

SEQ ID NO: 527084 - RNA, 22 nt, Human
cugcugccuuccaaaggccagg

SEQ ID NO: 527085 - RNA, 20 nt, Human
uccugggguaagccaugguc

SEQ ID NO: 527086 - RNA, 22 nt, Human
uggcugagugaacauguccauu

SEQ ID NO: 527087 - RNA, 22 nt, Human
auucccuuugacgaucccuagg

SEQ ID NO: 527088 - RNA, 22 nt, Human
acaggcgcacaugagggccgug

SEQ ID NO: 527089 - RNA, 22 nt, Human
ugugcugcucucagugacagcc

SEQ ID NO: 527090 - RNA, 22 nt, Human
uuuacagagaauguacauaaag

SEQ ID NO: 527091 - RNA, 22 nt, Human
uucucaaagugugcucccugga

SEQ ID NO: 527092 - RNA, 22 nt, Human
ugggaccugcucuuggaaugag

SEQ ID NO: 527093 - RNA, 22 nt, Human
cccuggcucugccucagagccc

SEQ ID NO: 527094 - RNA, 22 nt, Human
guagagcagggagcaggaagcu

SEQ ID NO: 527095 - RNA, 22 nt, Human
ggcaaucauuggcauucucugg

SEQ ID NO: 527096 - RNA, 22 nt, Human
gucccagaggacagggucacau

SEQ ID NO: 527097 - RNA, 22 nt, Human
uggcuacauuuauacucucauu

SEQ ID NO: 527098 - RNA, 22 nt, Human
ugcugugcuggcggcagaggcc

SEQ ID NO: 527099 - RNA, 22 nt, Human
gauauucauaggcagguauuua

SEQ ID NO: 527100 - RNA, 22 nt, Human
aacuagaaagaacauauuucca

SEQ ID NO: 527101 - RNA, 22 nt, Human
acccugccucugcuuccuguag

SEQ ID NO: 527102 - RNA, 21 nt, Human
cacuccacuuagaacaggguu

SEQ ID NO: 527103 - RNA, 22 nt, Human
ccaggagagcucucguucagug

SEQ ID NO: 527104 - RNA, 22 nt, Human
aaucuguuuuaaaguuugugcc

SEQ ID NO: 527105 - RNA, 22 nt, Human
uaaaguauaagcauuggaguau

SEQ ID NO: 527106 - RNA, 22 nt, Human
agcugggcuggagcuccaagcg

SEQ ID NO: 527107 - RNA, 22 nt, Human
cagcuauuguucuguauaauga

SEQ ID NO: 527108 - RNA, 22 nt, Human
ucaaagaucagaugguuguagg

SEQ ID NO: 527109 - RNA, 22 nt, Human
uugaggagucaggggcacggaa

SEQ ID NO: 527110 - RNA, 22 nt, Human
agacaagagcugaggacauauu

SEQ ID NO: 527111 - RNA, 22 nt, Human
uguacauauucaagcacuucua

SEQ ID NO: 527112 - RNA, 22 nt, Human
aagcccucagagccucuuugac

SEQ ID NO: 527113 - RNA, 22 nt, Human
gccaggcaggccacgcuguguu

SEQ ID NO: 527114 - RNA, 22 nt, Human
uccugaaaauaauuucacaaga

SEQ ID NO: 527115 - RNA, 21 nt, Human
uuggccgugcagaugaacagc

SEQ ID NO: 527116 - RNA, 22 nt, Human
cagaguggugcaagggcagugu

SEQ ID NO: 527117 - RNA, 22 nt, Human
aaugaacacuuagccuuucuau

SEQ ID NO: 527118 - RNA, 22 nt, Human
gcggcccgagcaggacgggugg

SEQ ID NO: 527119 - RNA, 22 nt, Human
gccggggcuggggagagacaug

SEQ ID NO: 527120 - RNA, 20 nt, Human
agcuuugguuaagccagugg

SEQ ID NO: 527121 - RNA, 22 nt, Human
ggcuguggucauuaggagguug

SEQ ID NO: 527122 - RNA, 23 nt, Human
uggccucuccccaccuggcagaa

SEQ ID NO: 527123 - RNA, 22 nt, Human
acaucguguaucacugaaccuu

SEQ ID NO: 527124 - RNA, 22 nt, Human
ggacaucuguugugguagagga

SEQ ID NO: 527125 - RNA, 22 nt, Human
uuugggaaacuuaggggucaga

SEQ ID NO: 527126 - RNA, 22 nt, Human
gcccuguuuucuggguuccuug

SEQ ID NO: 527127 - RNA, 22 nt, Human
gggacuggaguagaggccggug

SEQ ID NO: 527128 - RNA, 22 nt, Human
aguaaaaucaccaucucuuugu

SEQ ID NO: 527129 - RNA, 22 nt, Human
caggcuacauuugcucugagaa

SEQ ID NO: 527130 - RNA, 22 nt, Human
aggagcggauguguccugccag

SEQ ID NO: 527131 - RNA, 17 nt, Human
gagguaggaagugaguc

SEQ ID NO: 527132 - RNA, 22 nt, Human
auacaccaccuuggaucuuuca

SEQ ID NO: 527133 - RNA, 22 nt, Human
auggcuguguuguuccucugaa

SEQ ID NO: 527134 - RNA, 22 nt, Human
caggaacacaaugagucucaaa

SEQ ID NO: 527135 - RNA, 22 nt, Human
aggcuuucgaugaacgcuugcu

SEQ ID NO: 527136 - RNA, 22 nt, Human
cccauugugguuguugaggaua

SEQ ID NO: 527137 - RNA, 22 nt, Human
ucucuacagcacccgcaugcua

SEQ ID NO: 527138 - RNA, 22 nt, Human
cugagcagucuagccagguguu

SEQ ID NO: 527139 - RNA, 22 nt, Human
aggugggacccguggggugcga

SEQ ID NO: 527140 - RNA, 21 nt, Human
agaugcaguuugcaggugggu

SEQ ID NO: 527141 - RNA, 22 nt, Human
cccagcugaacuugcauuccaa

SEQ ID NO: 527142 - RNA, 22 nt, Human
accuuguuguagguacaaaaga

SEQ ID NO: 527143 - RNA, 20 nt, Human
cgggacacucaagcucuggg

SEQ ID NO: 527144 - RNA, 22 nt, Human
agcagccuugugacuccggggu

SEQ ID NO: 527145 - RNA, 22 nt, Human
cagggacugagauccagacugu

SEQ ID NO: 527146 - RNA, 23 nt, Human
uagauccuuccaacuacucuuac

SEQ ID NO: 527147 - RNA, 22 nt, Human
gauggaggagauggcagggugc

SEQ ID NO: 527148 - RNA, 22 nt, Human
gagcuaggauaucaugagggua

SEQ ID NO: 527149 - RNA, 22 nt, Human
gauggcgguggccaccuccuug

SEQ ID NO: 527150 - RNA, 22 nt, Human
ggacauggaaguauggagugga

SEQ ID NO: 527151 - RNA, 22 nt, Human
cagcagcucaggcuccuuccca

SEQ ID NO: 527152 - RNA, 22 nt, Human
uggcagcauuuuuuccagaaca

SEQ ID NO: 527153 - RNA, 22 nt, Human
aggcucagugauguaaaauaua

SEQ ID NO: 527154 - RNA, 22 nt, Human
gguauggagucugaguuucuag

SEQ ID NO: 527155 - RNA, 22 nt, Human
ugguuuacucuguaaaccagga

SEQ ID NO: 527156 - RNA, 22 nt, Human
uguucauaucauuuugaaagcu

SEQ ID NO: 527157 - RNA, 22 nt, Human
ugucuuacagcaaucuguucug

SEQ ID NO: 527158 - RNA, 22 nt, Human
gagagaagggggauaugagccu

SEQ ID NO: 527159 - RNA, 22 nt, Human
cagaggccccauuggcugugcg

SEQ ID NO: 527160 - RNA, 20 nt, Human
uacaauauucccacuuugcu

SEQ ID NO: 527161 - RNA, 22 nt, Human
cccucucccugcagaauguggc

SEQ ID NO: 527162 - RNA, 22 nt, Human
ggcuuuuguuucagcucugcua

SEQ ID NO: 527163 - RNA, 22 nt, Human
ugaguggacgugaggcugagua

SEQ ID NO: 527164 - RNA, 22 nt, Human
cuugucuaguuccuggugaugu

SEQ ID NO: 527165 - RNA, 22 nt, Human
gcaugcaggaagggcuugggga

SEQ ID NO: 527166 - RNA, 22 nt, Human
aaguguguauuuuucuucagug

SEQ ID NO: 527167 - RNA, 21 nt, Human
uuggaacaagcagcaguuugc

SEQ ID NO: 527168 - RNA, 22 nt, Human
caagcuuguuucuccugggggu

SEQ ID NO: 527169 - RNA, 20 nt, Human
cucaccagguguaggcugag

SEQ ID NO: 527170 - RNA, 20 nt, Human
gagcagugagccagggaaag

SEQ ID NO: 527171 - RNA, 22 nt, Human
auguccagaguaaagcacauuc

SEQ ID NO: 527172 - RNA, 22 nt, Human
cugcgugguaggacucaguucu

SEQ ID NO: 527173 - RNA, 22 nt, Human
gcugccaccguggagaugagug

SEQ ID NO: 527174 - RNA, 19 nt, Human
gcagcugugggaagagcca

SEQ ID NO: 527175 - RNA, 22 nt, Human
ggccuugguaaauuggcauuug

SEQ ID NO: 527176 - RNA, 22 nt, Human
ugguaugcuuauuaucuucaac

SEQ ID NO: 527177 - RNA, 23 nt, Human
aacucuggcuagcauagaauaga

SEQ ID NO: 527178 - RNA, 22 nt, Human
ugaguccagaugggccagcagg

SEQ ID NO: 527179 - RNA, 22 nt, Human
ccugaggcccuggcugugcuga

SEQ ID NO: 527180 - RNA, 22 nt, Human
agaaacaucgcuuaguccucau

SEQ ID NO: 527181 - RNA, 22 nt, Human
ucccucugcuagugcuugagcu

SEQ ID NO: 527182 - RNA, 22 nt, Human
ucaccggugacccucggcucgc

SEQ ID NO: 527183 - RNA, 22 nt, Human
ccuggccgacauggugaaacgc

SEQ ID NO: 527184 - RNA, 22 nt, Human
uaggcagggauuaggguugauu

SEQ ID NO: 527185 - RNA, 22 nt, Human
gacucugguugcggguucugcu

SEQ ID NO: 527186 - RNA, 22 nt, Human
uagugucuuccaggacauggua

SEQ ID NO: 527187 - RNA, 22 nt, Human
uccuggguccauggcagccgaa

SEQ ID NO: 527188 - RNA, 19 nt, Human
ccgucauggagaguggggu

SEQ ID NO: 527189 - RNA, 22 nt, Human
ccaugcccuugucaucuccagg

SEQ ID NO: 527190 - RNA, 22 nt, Human
cagcuccagccaccggggggug

SEQ ID NO: 527191 - RNA, 22 nt, Human
guggcuaggcccaacggcagga

SEQ ID NO: 527192 - RNA, 23 nt, Human
uuguccucuggaucgguuugguu

SEQ ID NO: 527193 - RNA, 22 nt, Human
ucaggcuagcccagugcuuggg

SEQ ID NO: 527194 - RNA, 22 nt, Human
acaggacagucuaguaacagua

SEQ ID NO: 527195 - RNA, 22 nt, Human
aggcugagccugggcguggugg

SEQ ID NO: 527196 - RNA, 17 nt, Human
ucuccuggcucuaucag

SEQ ID NO: 527197 - RNA, 22 nt, Human
ugggaagaguuagagacagcug

SEQ ID NO: 527198 - RNA, 22 nt, Human
auguggcuuucugcguuuucuc

SEQ ID NO: 527199 - RNA, 22 nt, Human
uggcuccuuccgcagcaugccu

SEQ ID NO: 527200 - RNA, 22 nt, Human
uaguggguuuauacaauuuaaa

SEQ ID NO: 527201 - RNA, 22 nt, Human
ugucuagaaaugcugagucuca

SEQ ID NO: 527202 - RNA, 22 nt, Human
gaguguuccagaaacuggcccu

SEQ ID NO: 527203 - RNA, 22 nt, Human
uggcggugacggcggcgccugg

SEQ ID NO: 527204 - RNA, 22 nt, Human
guccacauaggaacccagcuuc

SEQ ID NO: 527205 - RNA, 22 nt, Human
uuuucuuggaguggcuguccuu

SEQ ID NO: 527206 - RNA, 18 nt, Human
ucugagggugcgggagcu

SEQ ID NO: 527207 - RNA, 22 nt, Human
ucagauggucauucacuagggu

SEQ ID NO: 527208 - RNA, 22 nt, Human
gccugugcuuaacugacgugag

SEQ ID NO: 527209 - RNA, 22 nt, Human
gagaugggcgagaagguggacu

SEQ ID NO: 527210 - RNA, 20 nt, Human
gggugugugcagggccuggu

SEQ ID NO: 527211 - RNA, 22 nt, Human
cugugcuggcagaccuggaguu

SEQ ID NO: 527212 - RNA, 22 nt, Human
aggccagugguucucugugucc

SEQ ID NO: 527213 - RNA, 22 nt, Human
aacuuucugaaaagcuugauca

SEQ ID NO: 527214 - RNA, 22 nt, Human
uggcucaucuuuuuagacuuau

SEQ ID NO: 527215 - RNA, 23 nt, Human
uccugcagauaagcugguugaca

SEQ ID NO: 527216 - RNA, 22 nt, Human
uggccagucuuagcugugccug

SEQ ID NO: 527217 - RNA, 22 nt, Human
ccagcaggaaagugacguuuga

SEQ ID NO: 527218 - RNA, 22 nt, Human
uccugggcccuccggaucaggu

SEQ ID NO: 527219 - RNA, 22 nt, Human
ggucuggagcuaaucuuguugg

SEQ ID NO: 527220 - RNA, 22 nt, Human
ggccgugcuccaaagucaucgu

SEQ ID NO: 527221 - RNA, 22 nt, Human
uucucucaguuaaacuuuguga

SEQ ID NO: 527222 - RNA, 22 nt, Human
cuguguccaauggccuuagcag

SEQ ID NO: 527223 - RNA, 22 nt, Human
ucucacacuaaugcucuaucag

SEQ ID NO: 527224 - RNA, 22 nt, Human
cuccuucacgcaggcugccaug

SEQ ID NO: 527225 - RNA, 22 nt, Human
gcagcagugugggcugaaccua

SEQ ID NO: 527226 - RNA, 22 nt, Human
caacauggcgaaaccccaucuc

SEQ ID NO: 527227 - RNA, 22 nt, Human
gaccaggagauuugagcuaggc

SEQ ID NO: 527228 - RNA, 22 nt, Human
gggcagcaucaggaggggcuuu

SEQ ID NO: 527229 - RNA, 22 nt, Human
uugcaaauaauagccugaaacu

SEQ ID NO: 527230 - RNA, 22 nt, Human
ggcagcagaacuggcccuguau

SEQ ID NO: 527231 - RNA, 22 nt, Human
aggcccugcugaggccucccuc

SEQ ID NO: 527232 - RNA, 22 nt, Human
ucucgugcaggccuugcucgga

SEQ ID NO: 527233 - RNA, 22 nt, Human
ggcucuggcgagcuuuaguaca

SEQ ID NO: 527234 - RNA, 22 nt, Human
uggcacugucaccaaugcuguc

SEQ ID NO: 527235 - RNA, 22 nt, Human
gcgguauuugugugggugucga

SEQ ID NO: 527236 - RNA, 20 nt, Human
uugagcagcagugcuguguc

SEQ ID NO: 527237 - RNA, 22 nt, Human
ugcaguccuggugaggggacau

SEQ ID NO: 527238 - RNA, 22 nt, Human
uagcugcacaggaaguaagauu

SEQ ID NO: 527239 - RNA, 22 nt, Human
gaugcugauuuuacuguuuucu

SEQ ID NO: 527240 - RNA, 22 nt, Human
cucucugggcccaguuggcacc

SEQ ID NO: 527241 - RNA, 22 nt, Human
gaggcaaagcauguggcucagg

SEQ ID NO: 527242 - RNA, 22 nt, Human
agccugugaaaucucugccacu

SEQ ID NO: 527243 - RNA, 22 nt, Human
guuugagauggguuauugcucu

SEQ ID NO: 527244 - RNA, 22 nt, Human
ugcccauggcaggauuucugaa

SEQ ID NO: 527245 - RNA, 22 nt, Human
ugaagccagggacugacacuuc

SEQ ID NO: 527246 - RNA, 19 nt, Human
cccuggaggaguguuggcu

SEQ ID NO: 527247 - RNA, 22 nt, Human
uagcagaacaauagucaaugau

SEQ ID NO: 527248 - RNA, 22 nt, Human
uccuggccaaguagauguggcg

SEQ ID NO: 527249 - RNA, 22 nt, Human
acucaucuuugaauuuucagua

SEQ ID NO: 527250 - RNA, 22 nt, Human
cuuccagcugauuggcauccag

SEQ ID NO: 527251 - RNA, 19 nt, Human
ugcucucuggugcuucaug

SEQ ID NO: 527252 - RNA, 22 nt, Human
caaagaugccaaaaggaagaca

SEQ ID NO: 527253 - RNA, 22 nt, Human
ugucaccuugcucauccucgga

SEQ ID NO: 527254 - RNA, 21 nt, Human
ugacaguguggcauggaaggu

SEQ ID NO: 527255 - RNA, 22 nt, Human
caguuuuucaaaauuacaugau

SEQ ID NO: 527256 - RNA, 22 nt, Human
gaugucuggcuaccacucgcac

SEQ ID NO: 527257 - RNA, 22 nt, Human
uugugcccucaaagggugcguc

SEQ ID NO: 527258 - RNA, 22 nt, Human
gggcaugguggcaggcaccugu

SEQ ID NO: 527259 - RNA, 18 nt, Human
gcugaaauucuaaacaaa

SEQ ID NO: 527260 - RNA, 22 nt, Human
agggccacgugcaccgcggucu

SEQ ID NO: 527261 - RNA, 22 nt, Human
acgugcaggaucugguuggcga

SEQ ID NO: 527262 - RNA, 22 nt, Human
ccagcuggaacggcagcccagc

SEQ ID NO: 527263 - RNA, 22 nt, Human
gcccagaguuugaagauacagu

SEQ ID NO: 527264 - RNA, 22 nt, Human
gcacugagcuuuggaggagcag

SEQ ID NO: 527265 - RNA, 21 nt, Human
ugggcucuuuaacccaggcac

SEQ ID NO: 527266 - RNA, 22 nt, Human
ccagagacaaggagcuggaguc

SEQ ID NO: 527267 - RNA, 22 nt, Human
agagcaauuagcuuagguaaaa

SEQ ID NO: 527268 - RNA, 22 nt, Human
aaguccagguccucauuccauc

SEQ ID NO: 527269 - RNA, 22 nt, Human
ggcugagcuuuucaugaugguu

SEQ ID NO: 527270 - RNA, 22 nt, Human
gccaggaugacuauacaacagc

SEQ ID NO: 527271 - RNA, 22 nt, Human
cagugccaaggauggccuggga

SEQ ID NO: 527272 - RNA, 22 nt, Human
gagcucauccccaugguccguc

SEQ ID NO: 527273 - RNA, 22 nt, Human
cucugagguuccuuugcccucg

SEQ ID NO: 527274 - RNA, 22 nt, Human
cguggcucugggcuccuuugcc

SEQ ID NO: 527275 - RNA, 22 nt, Human
aaauucuguccugaaugccauu

SEQ ID NO: 527276 - RNA, 22 nt, Human
uggugcugccaccuccucugcu

SEQ ID NO: 527277 - RNA, 22 nt, Human
ccucugcccuuuuccuguauca

SEQ ID NO: 527278 - RNA, 22 nt, Human
cugucacagcccgcgucuccuc

SEQ ID NO: 527279 - RNA, 21 nt, Human
aggucccagguuugggcagca

SEQ ID NO: 527280 - RNA, 22 nt, Human
ucccagccugacagugcaucaa

SEQ ID NO: 527281 - RNA, 22 nt, Human
agcccugugugcuuguguuccu

SEQ ID NO: 527282 - RNA, 22 nt, Human
ugagacaaagcagcugacagaa

SEQ ID NO: 527283 - RNA, 22 nt, Human
acaugggcaucuaugaggcucu

SEQ ID NO: 527284 - RNA, 22 nt, Human
uggagugcaguugggaggacac

SEQ ID NO: 527285 - RNA, 22 nt, Human
aggccagaacagcucugcacca

SEQ ID NO: 527286 - RNA, 22 nt, Human
gccagcagcgagaguuuaaccu

SEQ ID NO: 527287 - RNA, 22 nt, Human
aaugauguuuuuaaagaacaua

SEQ ID NO: 527288 - RNA, 22 nt, Human
uggaucuugaugcuccaagagu

SEQ ID NO: 527289 - RNA, 22 nt, Human
gagccacaguggauugauucca

SEQ ID NO: 527290 - RNA, 22 nt, Human
cugaggcucugagaaagccaaa

SEQ ID NO: 527291 - RNA, 22 nt, Human
ccugcugaggucagccacccaa

SEQ ID NO: 527292 - RNA, 18 nt, Human
ucagacaaguuagacagg

SEQ ID NO: 527293 - RNA, 22 nt, Human
ucccuggcugguguagagggau

SEQ ID NO: 527294 - RNA, 22 nt, Human
ggugggugagcccugggagcug

SEQ ID NO: 527295 - RNA, 22 nt, Human
uuccaaguuaggcgagcuggug

SEQ ID NO: 527296 - RNA, 22 nt, Human
augacagcucuagcacacagua

SEQ ID NO: 527297 - RNA, 22 nt, Human
gcagagcugguacuugagccug

SEQ ID NO: 527298 - RNA, 22 nt, Human
cgugaugcucaggaggucauag

SEQ ID NO: 527299 - RNA, 22 nt, Human
aauacagugaaagugagcaagg

SEQ ID NO: 527300 - RNA, 22 nt, Human
ccugcgggcugugcugaagccu

SEQ ID NO: 527301 - RNA, 22 nt, Human
gaagaccccagagcgagguaag

SEQ ID NO: 527302 - RNA, 22 nt, Human
uacugucuuuuccuaaaugggu

SEQ ID NO: 527303 - RNA, 22 nt, Human
gccaagaaugcgacagccguca

SEQ ID NO: 527304 - RNA, 22 nt, Human
ccgcuguccuggagcugcugcu

SEQ ID NO: 527305 - RNA, 22 nt, Human
ucuugggcaauuucucuagagg

SEQ ID NO: 527306 - RNA, 22 nt, Human
accaaucuccuauuuuguuuca

SEQ ID NO: 527307 - RNA, 22 nt, Human
cccagccuuugcuuccugguuc

SEQ ID NO: 527308 - RNA, 22 nt, Human
uuacccagugaagccgaggcag

SEQ ID NO: 527309 - RNA, 22 nt, Human
ggagaugccuuguuucaggaac

SEQ ID NO: 527310 - RNA, 17 nt, Human
ucugagaaugcuggagg

SEQ ID NO: 527311 - RNA, 22 nt, Human
gacaaagcgccugcucgcgggc

SEQ ID NO: 527312 - RNA, 21 nt, Human
agggccucuguguacuggggg

SEQ ID NO: 527313 - RNA, 22 nt, Human
cuggcccugucagcacagaauc

SEQ ID NO: 527314 - RNA, 22 nt, Human
caacagcuggaggcuuggcccg

SEQ ID NO: 527315 - RNA, 22 nt, Human
aagguggugaucaucuugaagg

SEQ ID NO: 527316 - RNA, 20 nt, Human
gucagaggacccuagagcga

SEQ ID NO: 527317 - RNA, 22 nt, Human
cagugccauauugaaagacauu

SEQ ID NO: 527318 - RNA, 22 nt, Human
acccacagccgcugugcguccc

SEQ ID NO: 527319 - RNA, 22 nt, Human
gggagggcuuggacccagaugu

SEQ ID NO: 527320 - RNA, 22 nt, Human
gggagggucugagagcugcacc

SEQ ID NO: 527321 - RNA, 22 nt, Human
aaggcacauauuuuagagucac

SEQ ID NO: 527322 - RNA, 22 nt, Human
gugcucuagaaauugucagugg

SEQ ID NO: 527323 - RNA, 22 nt, Human
uggccaggcagguagaacggcc

SEQ ID NO: 527324 - RNA, 22 nt, Human
cagccuuugggucagaagauuc

SEQ ID NO: 527325 - RNA, 22 nt, Human
ccuugagacacagccaaagaug

SEQ ID NO: 527326 - RNA, 22 nt, Human
cugcagggcagggccuccuggc

SEQ ID NO: 527327 - RNA, 22 nt, Human
gucuccugaggcauccauugaa

SEQ ID NO: 527328 - RNA, 22 nt, Human
auuccaaagccugaauaaugga

SEQ ID NO: 527329 - RNA, 22 nt, Human
agcaggugucacuuucacucca

SEQ ID NO: 527330 - RNA, 22 nt, Human
uucagguuuuuaaguucugccu

SEQ ID NO: 527331 - RNA, 22 nt, Human
gggcggggcuuccguccuccac

SEQ ID NO: 527332 - RNA, 22 nt, Human
ggccuugggauguggcugcagc

SEQ ID NO: 527333 - RNA, 22 nt, Human
aggaggguggggucugccuguc

SEQ ID NO: 527334 - RNA, 22 nt, Human
uaaauacuuuuacuccacugau

SEQ ID NO: 527335 - RNA, 22 nt, Human
gcggggacagaaggcgguucuc

SEQ ID NO: 527336 - RNA, 22 nt, Human
gaagaaguguaagucuguuuca

SEQ ID NO: 527337 - RNA, 22 nt, Human
ugacagcccaccucacaggauu

SEQ ID NO: 527338 - RNA, 22 nt, Human
agucagucugcuagccugugga

SEQ ID NO: 527339 - RNA, 22 nt, Human
uguguccuucugggagucccag

SEQ ID NO: 527340 - RNA, 22 nt, Human
uuguaacaguagcugucagcuc

SEQ ID NO: 527341 - RNA, 22 nt, Human
ucuaugucucuggaaggagugu

SEQ ID NO: 527342 - RNA, 19 nt, Human
uugcuucaugucuuuugcu

SEQ ID NO: 527343 - RNA, 22 nt, Human
uauagugucucuagaucaaaga

SEQ ID NO: 527344 - RNA, 23 nt, Human
gggcugcuccaggccaaggcugg

SEQ ID NO: 527345 - RNA, 22 nt, Human
ugaaucaaugaauugcacuuca

SEQ ID NO: 527346 - RNA, 20 nt, Human
aaaaacaguaaugcugaaga

SEQ ID NO: 527347 - RNA, 22 nt, Human
caucaguuccugccccugcccc

SEQ ID NO: 527348 - RNA, 22 nt, Human
cagagcugagucuucaagguug

SEQ ID NO: 527349 - RNA, 19 nt, Human
cugaaacacagagagggcu

SEQ ID NO: 527350 - RNA, 22 nt, Human
cagcuuugccaaguaaggucuu

SEQ ID NO: 527351 - RNA, 22 nt, Human
gugcugagugcagagugcagag

SEQ ID NO: 527352 - RNA, 22 nt, Human
uggcaggaaaaagggccagagg

SEQ ID NO: 527353 - RNA, 22 nt, Human
uggcugagcugcagcguggcuu

SEQ ID NO: 527354 - RNA, 22 nt, Human
uggcccagcucagggugggcgg

SEQ ID NO: 527355 - RNA, 22 nt, Human
ccagguaggagagucaacaugu

SEQ ID NO: 527356 - RNA, 22 nt, Human
cgcugggcgcgcuccgaacccg

SEQ ID NO: 527357 - RNA, 22 nt, Human
uugacccgaguccuucuugggg

SEQ ID NO: 527358 - RNA, 22 nt, Human
agcuggguacacguugucacaa

SEQ ID NO: 527359 - RNA, 22 nt, Human
uuagcaaacaucuucgugugag

SEQ ID NO: 527360 - RNA, 22 nt, Human
ugguccucacccuacccagcug

SEQ ID NO: 527361 - RNA, 22 nt, Human
cagcgguggcaaggugacugug

SEQ ID NO: 527362 - RNA, 22 nt, Human
ugggugguugcugaggcuccuu

SEQ ID NO: 527363 - RNA, 22 nt, Human
uggcucaggccuacgacgccuu

SEQ ID NO: 527364 - RNA, 21 nt, Human
uaggugggagccccaguaugc

SEQ ID NO: 527365 - RNA, 22 nt, Human
cuccccacgccuggacuaagag

SEQ ID NO: 527366 - RNA, 22 nt, Human
agugaaaaccuaaucaugcagu

SEQ ID NO: 527367 - RNA, 22 nt, Human
ucucagucuuugcaaggaugcu

SEQ ID NO: 527368 - RNA, 22 nt, Human
gagcuuggugcugccuguuguc

SEQ ID NO: 527369 - RNA, 22 nt, Human
guugcaaaugggaagaugguua

SEQ ID NO: 527370 - RNA, 22 nt, Human
uccgcgcucucacccgcucccg

SEQ ID NO: 527371 - RNA, 22 nt, Human
cucugccagccaaagucaucac

SEQ ID NO: 527372 - RNA, 18 nt, Human
augggcagguaagaucca

SEQ ID NO: 527373 - RNA, 20 nt, Human
ggacccuggguucuucugag

SEQ ID NO: 527374 - RNA, 22 nt, Human
uccaggagugauaaggccacug

SEQ ID NO: 527375 - RNA, 22 nt, Human
guggacagacauaauccuaauu

SEQ ID NO: 527376 - RNA, 22 nt, Human
agggcagagauuaauuaagaca

SEQ ID NO: 527377 - RNA, 22 nt, Human
ugaaagcucugucaucauuccu

SEQ ID NO: 527378 - RNA, 22 nt, Human
agcagugugggcugcacgcugg

SEQ ID NO: 527379 - RNA, 22 nt, Human
accauccaaacugcuuucugug

SEQ ID NO: 527380 - RNA, 22 nt, Human
cuggcuuuuuucccauuaugca

SEQ ID NO: 527381 - RNA, 22 nt, Human
gcagcugcgcugguguggggca

SEQ ID NO: 527382 - RNA, 22 nt, Human
cuccaggacugaggacagagcu

SEQ ID NO: 527383 - RNA, 22 nt, Human
acaucucacuucuuugaaggcu

SEQ ID NO: 527384 - RNA, 22 nt, Human
cugguuaauccauaaacagaga

SEQ ID NO: 527385 - RNA, 22 nt, Human
ggcucuguaaguguugcaggua

SEQ ID NO: 527386 - RNA, 22 nt, Human
aggccaagcucccagagaagcu

SEQ ID NO: 527387 - RNA, 22 nt, Human
cagagcagcagagcuuccaugg

SEQ ID NO: 527388 - RNA, 22 nt, Human
gcaggccuccccugcuggagcu

SEQ ID NO: 527389 - RNA, 22 nt, Human
uagaagaacaugucaaacuaua

SEQ ID NO: 527390 - RNA, 22 nt, Human
aucccugugacgagcaucccua

SEQ ID NO: 527391 - RNA, 22 nt, Human
caugcaugccgggcugacagag

SEQ ID NO: 527392 - RNA, 22 nt, Human
ccugugucaucagcuguggcua

SEQ ID NO: 527393 - RNA, 22 nt, Human
uuuggcaagcgaguacuuucug

SEQ ID NO: 527394 - RNA, 22 nt, Human
cucccugggccucaguuucucu

SEQ ID NO: 527395 - RNA, 22 nt, Human
ugcagggcagcuagggagcuuu

SEQ ID NO: 527396 - RNA, 22 nt, Human
uucagagcuggugucuacagcu

SEQ ID NO: 527397 - RNA, 22 nt, Human
ccuccccacagcccaggagacu

SEQ ID NO: 527398 - RNA, 22 nt, Human
gggcuguaggagcuggaauggg

SEQ ID NO: 527399 - RNA, 22 nt, Human
ugccgcgcgcccagguuaggug

SEQ ID NO: 527400 - RNA, 22 nt, Human
agguggaguuaagugugaacug

SEQ ID NO: 527401 - RNA, 22 nt, Human
uguuccugacggccaaagaggu

SEQ ID NO: 527402 - RNA, 22 nt, Human
gcuguagguaaggauggcaaag

SEQ ID NO: 527403 - RNA, 22 nt, Human
ucuguggcaugguaucuggagg

SEQ ID NO: 527404 - RNA, 22 nt, Human
gcuucugcagagccguccugag

SEQ ID NO: 527405 - RNA, 22 nt, Human
auccugggaaguggccuccucc

SEQ ID NO: 527406 - RNA, 22 nt, Human
cccuggcucaggcagcuuuguu

SEQ ID NO: 527407 - RNA, 22 nt, Human
gccacccuggacgcacuguucg

SEQ ID NO: 527408 - RNA, 22 nt, Human
ucaggggacagccagcuggagg

SEQ ID NO: 527409 - RNA, 22 nt, Human
uuuguguuggaagaaaugcuac

SEQ ID NO: 527410 - RNA, 20 nt, Human
ugggaucgaaucaagucugu

SEQ ID NO: 527411 - RNA, 22 nt, Human
cauggggaugaggcugagacuu

SEQ ID NO: 527412 - RNA, 22 nt, Human
cuccacagccccuccaguggca

SEQ ID NO: 527413 - RNA, 22 nt, Human
uuugcagagugcagaagcaucu

SEQ ID NO: 527414 - RNA, 22 nt, Human
gugacagguauacucaccauug

SEQ ID NO: 527415 - RNA, 22 nt, Human
ucuucagacuguuguucuuuug

SEQ ID NO: 527416 - RNA, 19 nt, Human
acaguuugggaaaugagca

SEQ ID NO: 527417 - RNA, 22 nt, Human
ccaggcagccaagugugugugu

SEQ ID NO: 527418 - RNA, 17 nt, Human
gcaggcacugcugccug

SEQ ID NO: 527419 - RNA, 23 nt, Human
uggcuugcuaauguuccaaauaa

SEQ ID NO: 527420 - RNA, 22 nt, Human
cacauuuaaagguugaagcuga

SEQ ID NO: 527421 - RNA, 22 nt, Human
ccugucugaaggcagggggaug

SEQ ID NO: 527422 - RNA, 22 nt, Human
caggaggaaaguuccacucaac

SEQ ID NO: 527423 - RNA, 22 nt, Human
gacagcaggaugugaggggaug

SEQ ID NO: 527424 - RNA, 22 nt, Human
ugggaugggaucucgcuguguc

SEQ ID NO: 527425 - RNA, 22 nt, Human
ugccauagcaaugguaagcuga

SEQ ID NO: 527426 - RNA, 22 nt, Human
cacauuuaugggcugggaggca

SEQ ID NO: 527427 - RNA, 22 nt, Human
ugcucccaaaccugacaggcuc

SEQ ID NO: 527428 - RNA, 22 nt, Human
ccacccuuccauucuuccucuu

SEQ ID NO: 527429 - RNA, 22 nt, Human
gcaguugcaggauuuguguugu

SEQ ID NO: 527430 - RNA, 22 nt, Human
uuccaggcgcacgucggccuua

SEQ ID NO: 527431 - RNA, 22 nt, Human
acuccuggguuccggagauucu

SEQ ID NO: 527432 - RNA, 22 nt, Human
ugaaaugccuaugaagucagga

SEQ ID NO: 527433 - RNA, 18 nt, Human
uuugggauccucuuuucu

SEQ ID NO: 527434 - RNA, 22 nt, Human
aauugguuugaauaaauaaaga

SEQ ID NO: 527435 - RNA, 22 nt, Human
cuuggcauguucaucugcuugg

SEQ ID NO: 527436 - RNA, 22 nt, Human
ugugcucagucuuuggcuggga

SEQ ID NO: 527437 - RNA, 22 nt, Human
cucacagcugcuucaggaucca

SEQ ID NO: 527438 - RNA, 22 nt, Human
aggcugcugccuuggagagugu

SEQ ID NO: 527439 - RNA, 16 nt, Human
aggagcuggguaggag

SEQ ID NO: 527440 - RNA, 22 nt, Human
uguguacauguaucaacuaucg

SEQ ID NO: 527441 - RNA, 19 nt, Human
uggcagcauugguaccuug

SEQ ID NO: 527442 - RNA, 22 nt, Human
gcuaggaguggugggucaagga

SEQ ID NO: 527443 - RNA, 22 nt, Human
ggagguggagcuggaaguucca

SEQ ID NO: 527444 - RNA, 21 nt, Human
ggcagcucagcagauggggac

SEQ ID NO: 527445 - RNA, 22 nt, Human
aggcauuuaaagauguaagacu

SEQ ID NO: 527446 - RNA, 22 nt, Human
uagggcuguuaguaauucucag

SEQ ID NO: 527447 - RNA, 22 nt, Human
gagccaggcccguacuugcugu

SEQ ID NO: 527448 - RNA, 22 nt, Human
cagguagaggcugccaucagcu

SEQ ID NO: 527449 - RNA, 22 nt, Human
caugcauuucuaccaaggaaua

SEQ ID NO: 527450 - RNA, 22 nt, Human
ugcugcucuucaccauggccuc

SEQ ID NO: 527451 - RNA, 22 nt, Human
ugauauccuuuaaccuggaccg

SEQ ID NO: 527452 - RNA, 22 nt, Human
cucuggagggaggcugagcugg

SEQ ID NO: 527453 - RNA, 22 nt, Human
aagaagguugaaugacuacuuu

SEQ ID NO: 527454 - RNA, 22 nt, Human
gaugcgggcccgcuccacugcc

SEQ ID NO: 527455 - RNA, 22 nt, Human
acuggcccuggcugcuaggcug

SEQ ID NO: 527456 - RNA, 22 nt, Human
aucuggcucccuuggaauccgu

SEQ ID NO: 527457 - RNA, 22 nt, Human
acagcugggaacucacacagca

SEQ ID NO: 527458 - RNA, 22 nt, Human
uaucacauacuucucauccagg

SEQ ID NO: 527459 - RNA, 22 nt, Human
acaugcacagcaagggugagag

SEQ ID NO: 527460 - RNA, 22 nt, Human
agccccaggcccggacgccucu

SEQ ID NO: 527461 - RNA, 22 nt, Human
gagcugcagcggcugacgcaac

SEQ ID NO: 527462 - RNA, 22 nt, Human
agagaauuaacauuccauggcu

SEQ ID NO: 527463 - RNA, 19 nt, Human
gggucccacugcccgucug

SEQ ID NO: 527464 - RNA, 22 nt, Human
gguguugcaguugaagacuggu

SEQ ID NO: 527465 - RNA, 22 nt, Human
aaggcccacagaacugucucca

SEQ ID NO: 527466 - RNA, 22 nt, Human
uccagagaacgaugaaagcugg

SEQ ID NO: 527467 - RNA, 22 nt, Human
ccaaggcuggagggcuuaugua

SEQ ID NO: 527468 - RNA, 22 nt, Human
gucacccguuugacuauccacc

SEQ ID NO: 527469 - RNA, 20 nt, Human
gacuucaauuucuaucuuuu

SEQ ID NO: 527470 - RNA, 22 nt, Human
cugguuuuuagugcuuaggagu

SEQ ID NO: 527471 - RNA, 22 nt, Human
uuguacuuaaauaugcaaauag

SEQ ID NO: 527472 - RNA, 22 nt, Human
cccagaggcugaguugggagca

SEQ ID NO: 527473 - RNA, 22 nt, Human
cuguccauggcaaugaugcaga

SEQ ID NO: 527474 - RNA, 22 nt, Human
gagguggcugcuugcugggaaa

SEQ ID NO: 527475 - RNA, 22 nt, Human
gggcucuguuuagaccagagau

SEQ ID NO: 527476 - RNA, 20 nt, Human
uuucacaaugaacaugucuc

SEQ ID NO: 527477 - RNA, 22 nt, Human
gcugauggcuugcuggcugaca

SEQ ID NO: 527478 - RNA, 22 nt, Human
gaccacaguccagucaucaugg

SEQ ID NO: 527479 - RNA, 22 nt, Human
acagaagugacaauuucuuggg

SEQ ID NO: 527480 - RNA, 22 nt, Human
gcucagugaagggugccaagua

SEQ ID NO: 527481 - RNA, 20 nt, Human
ccuggagccuggaaggaguc

SEQ ID NO: 527482 - RNA, 19 nt, Human
ccugcugaagugaugcagc

SEQ ID NO: 527483 - RNA, 22 nt, Human
augcccucuguuucccaaggcc

SEQ ID NO: 527484 - RNA, 18 nt, Human
ccucuggguuuuguuccc

SEQ ID NO: 527485 - RNA, 19 nt, Human
agcagagcagggccguggg

SEQ ID NO: 527486 - RNA, 22 nt, Human
acagacacaggcguggagucgc

SEQ ID NO: 527487 - RNA, 22 nt, Human
uucagucuuguugaaaacuugg

SEQ ID NO: 527488 - RNA, 22 nt, Human
augaaacaacagacuuggucaa

SEQ ID NO: 527489 - RNA, 22 nt, Human
ugagaagcaguuucaguaagaa

SEQ ID NO: 527490 - RNA, 22 nt, Human
guuguacauaugaggauaaguu

SEQ ID NO: 527491 - RNA, 22 nt, Human
cggcuggagcugagaaaggagc

SEQ ID NO: 527492 - RNA, 22 nt, Human
ugagaacaaaguugaaaguuug

SEQ ID NO: 527493 - RNA, 22 nt, Human
ucuuugcauggacauguguuuu

SEQ ID NO: 527494 - RNA, 22 nt, Human
uagcaggacaugugcagagaag

SEQ ID NO: 527495 - RNA, 22 nt, Human
ucccacagcuucgugcuucccc

SEQ ID NO: 527496 - RNA, 22 nt, Human
gaggcugaacagguucucauga

SEQ ID NO: 527497 - RNA, 22 nt, Human
uuccaauaaaauguuauuugca

SEQ ID NO: 527498 - RNA, 22 nt, Human
cugcauaucaaauuacuccugg

SEQ ID NO: 527499 - RNA, 22 nt, Human
agcuggugauguggucccucac

SEQ ID NO: 527500 - RNA, 22 nt, Human
aguguguccaggaagcagaugg

SEQ ID NO: 527501 - RNA, 22 nt, Human
augcacacguacccuacaaggc

SEQ ID NO: 527502 - RNA, 22 nt, Human
uccugaaggccugaguuccacc

SEQ ID NO: 527503 - RNA, 22 nt, Human
ugaggauggaaugcugugcaag

SEQ ID NO: 527504 - RNA, 17 nt, Human
gccuggcccagccuggc

SEQ ID NO: 527505 - RNA, 22 nt, Human
aguggcaguagaugagcugguu

SEQ ID NO: 527506 - RNA, 22 nt, Human
gguccagcacaacacuggcaug

SEQ ID NO: 527507 - RNA, 19 nt, Human
acucaggcuuccucugagg

SEQ ID NO: 527508 - RNA, 19 nt, Human
ugguucuccuuccacaguc

SEQ ID NO: 527509 - RNA, 22 nt, Human
ccacuguuggcccgaagggguc

SEQ ID NO: 527510 - RNA, 22 nt, Human
gccccucuccuugugcaccugc

SEQ ID NO: 527511 - RNA, 22 nt, Human
ucccuguccugggcaaucccag

SEQ ID NO: 527512 - RNA, 22 nt, Human
uggcagccugcgugaaggagcu

SEQ ID NO: 527513 - RNA, 22 nt, Human
aaaugcacaauaaaguaaaggc

SEQ ID NO: 527514 - RNA, 22 nt, Human
aggucacguccugugaugucau

SEQ ID NO: 527515 - RNA, 23 nt, Human
guuauugcuggugcuggccagcc

SEQ ID NO: 527516 - RNA, 22 nt, Human
cccagccucuggguucugccgg

SEQ ID NO: 527517 - RNA, 22 nt, Human
uuuccaaggaugugucucucua

SEQ ID NO: 527518 - RNA, 22 nt, Human
cucccagccuucgccagucuga

SEQ ID NO: 527519 - RNA, 22 nt, Human
uccugaccacuaggaccaggcu

SEQ ID NO: 527520 - RNA, 19 nt, Human
cugggacaaugaaagcauc

SEQ ID NO: 527521 - RNA, 22 nt, Human
auaggacuuuguaucaggauga

SEQ ID NO: 527522 - RNA, 22 nt, Human
ucaauuuauguggcuauucauu

SEQ ID NO: 527523 - RNA, 22 nt, Human
ucaugcaccucuccaugucccc

SEQ ID NO: 527524 - RNA, 21 nt, Human
uagaccagcugugcuccucgg

SEQ ID NO: 527525 - RNA, 19 nt, Human
cucuggcuccugggcugcc

SEQ ID NO: 527526 - RNA, 18 nt, Human
cugccagugugcucuccg

SEQ ID NO: 527527 - RNA, 22 nt, Human
ccuacucccuuucuagaguaug

SEQ ID NO: 527528 - RNA, 22 nt, Human
gaugugucccuuucaacucaga

SEQ ID NO: 527529 - RNA, 22 nt, Human
caguguuuagcacagugcuugg

SEQ ID NO: 527530 - RNA, 22 nt, Human
gaucuguccuggcaguuaacac

SEQ ID NO: 527531 - RNA, 22 nt, Human
ugagcauuaccugaggccacug

SEQ ID NO: 527532 - RNA, 22 nt, Human
uggaaaauauuuaggugaauga

SEQ ID NO: 527533 - RNA, 21 nt, Human
agggaaaaggcugagugaggg

SEQ ID NO: 527534 - RNA, 22 nt, Human
cugccaucugagccaaaagugc

SEQ ID NO: 527535 - RNA, 22 nt, Human
cagaggccuggcuuggacaccu

SEQ ID NO: 527536 - RNA, 22 nt, Human
agccacugugugaccagcuguc

SEQ ID NO: 527537 - RNA, 22 nt, Human
aaaucaugguggaagaaacaga

SEQ ID NO: 527538 - RNA, 22 nt, Human
ucacuuuaccucauucaggcag

SEQ ID NO: 527539 - RNA, 22 nt, Human
ucaccgccuugcccggccgggc

SEQ ID NO: 527540 - RNA, 22 nt, Human
aaucuucaggguccuggggcuc

SEQ ID NO: 527541 - RNA, 22 nt, Human
acagccaggaauucuggagaag

SEQ ID NO: 527542 - RNA, 20 nt, Human
ggcagagcuaugucuguugc

SEQ ID NO: 527543 - RNA, 20 nt, Human
gcagcagacagacaggggac

SEQ ID NO: 527544 - RNA, 18 nt, Human
uucggcagauacgcuugg

SEQ ID NO: 527545 - RNA, 22 nt, Human
cuugaggcugcacuccagggcc

SEQ ID NO: 527546 - RNA, 22 nt, Human
uguuggcagugcuacagucagu

SEQ ID NO: 527547 - RNA, 22 nt, Human
gucaggaugagggaugaggagu

SEQ ID NO: 527548 - RNA, 22 nt, Human
uaucuguauucugacagucacu

SEQ ID NO: 527549 - RNA, 22 nt, Human
uuggccguuucacugggcaguu

SEQ ID NO: 527550 - RNA, 22 nt, Human
ucuucacaguccuggucagugg

SEQ ID NO: 527551 - RNA, 22 nt, Human
ugcccugcagacccugcagugu

SEQ ID NO: 527552 - RNA, 22 nt, Human
gcagauggauguggacggcgcc

SEQ ID NO: 527553 - RNA, 22 nt, Human
ccgggagguggagauugcggug

SEQ ID NO: 527554 - RNA, 22 nt, Human
ugggcccaucauugcugugggc

SEQ ID NO: 527555 - RNA, 22 nt, Human
ucacccagacugucugacucuu

SEQ ID NO: 527556 - RNA, 22 nt, Human
gggucugcuccaccugcagccc

SEQ ID NO: 527557 - RNA, 22 nt, Human
aguggcagggacuucauauaaa

SEQ ID NO: 527558 - RNA, 22 nt, Human
cuaagaaggaggaaaagugcca

SEQ ID NO: 527559 - RNA, 22 nt, Human
uccagaugcugcacauuccuga

SEQ ID NO: 527560 - RNA, 22 nt, Human
gagauuuccauauuuuguaaca

SEQ ID NO: 527561 - RNA, 22 nt, Human
uccuggggaggucgaggcugag

SEQ ID NO: 527562 - RNA, 19 nt, Human
agcagccaucgaccaugga

SEQ ID NO: 527563 - RNA, 21 nt, Human
ccaccaggucuucugcucggg

SEQ ID NO: 527564 - RNA, 21 nt, Human
ugcaaugcauugacagcagca

SEQ ID NO: 527565 - RNA, 22 nt, Human
agccaccaccacugaaagguua

SEQ ID NO: 527566 - RNA, 22 nt, Human
cuuugcagagggggugggagcu

SEQ ID NO: 527567 - RNA, 22 nt, Human
uuuauucucuaguuggucagau

SEQ ID NO: 527568 - RNA, 19 nt, Human
aaugcugcuucuuuuugca

SEQ ID NO: 527569 - RNA, 21 nt, Human
ccuuugaguguguuugaagua

SEQ ID NO: 527570 - RNA, 22 nt, Human
aagguccuguagccacagagcc

SEQ ID NO: 527571 - RNA, 22 nt, Human
cuggagggcugcagcgaggcug

SEQ ID NO: 527572 - RNA, 22 nt, Human
gucaggggccaugggccaagga

SEQ ID NO: 527573 - RNA, 22 nt, Human
caccgagugacaguagccauca

SEQ ID NO: 527574 - RNA, 22 nt, Human
aucagaagaaauggaugugacu

SEQ ID NO: 527575 - RNA, 22 nt, Human
aagaggaggacgguucccagaa

SEQ ID NO: 527576 - RNA, 22 nt, Human
acugaaauuuauauuuugggca

SEQ ID NO: 527577 - RNA, 22 nt, Human
gccugcuggcuggaaauucucc

SEQ ID NO: 527578 - RNA, 22 nt, Human
uggucccuagugugggagcuug

SEQ ID NO: 527579 - RNA, 22 nt, Human
ccaaacauuucaaauuuagaga

SEQ ID NO: 527580 - RNA, 22 nt, Human
uggcuggggccugaauccugca

SEQ ID NO: 527581 - RNA, 22 nt, Human
uggcuccaggggacacgcagua

SEQ ID NO: 527582 - RNA, 21 nt, Human
ucuccucccggggagaggccg

SEQ ID NO: 527583 - RNA, 22 nt, Human
gggagcuggagcuggaagacuc

SEQ ID NO: 527584 - RNA, 22 nt, Human
ucaccccuugugaaugcugcuc

SEQ ID NO: 527585 - RNA, 22 nt, Human
ugcagaauauucuggugacaau

SEQ ID NO: 527586 - RNA, 22 nt, Human
agucaacauuugagaugcaaug

SEQ ID NO: 527587 - RNA, 19 nt, Human
acccucuccccacuggguc

SEQ ID NO: 527588 - RNA, 22 nt, Human
ucagccaggccaggcauucaca

SEQ ID NO: 527589 - RNA, 19 nt, Human
gggaaugauggaagacuuc

SEQ ID NO: 527590 - RNA, 22 nt, Human
ccccaacccugguuccguggcg

SEQ ID NO: 527591 - RNA, 22 nt, Human
cugggaagggacgccagugccu

SEQ ID NO: 527592 - RNA, 22 nt, Human
ugaaauguggagaugguaagua

SEQ ID NO: 527593 - RNA, 22 nt, Human
ccugugcaugccaggguacacc

SEQ ID NO: 527594 - RNA, 22 nt, Human
ucaugucccguugcuggcugcc

SEQ ID NO: 527595 - RNA, 22 nt, Human
ugagaagcauuaggaagaacau

SEQ ID NO: 527596 - RNA, 22 nt, Human
caggguggaacaggcaauacuu

SEQ ID NO: 527597 - RNA, 22 nt, Human
cuguuuauucucaucuaaaaug

SEQ ID NO: 527598 - RNA, 22 nt, Human
ggaagcaaauuccagaaccaca

SEQ ID NO: 527599 - RNA, 22 nt, Human
augaucaagaauuuuguauucc

SEQ ID NO: 527600 - RNA, 22 nt, Human
acuggaaaguauucuuucacug

SEQ ID NO: 527601 - RNA, 22 nt, Human
acaacuuuaauggguuucagcu

SEQ ID NO: 527602 - RNA, 21 nt, Human
ucucugacccaggaagagggc

SEQ ID NO: 527603 - RNA, 22 nt, Human
ucucaguccaaaugagagguug

SEQ ID NO: 527604 - RNA, 21 nt, Human
gcuccuggugcugcguggcgc

SEQ ID NO: 527605 - RNA, 22 nt, Human
cagugcccuuccaggacugcag

SEQ ID NO: 527606 - RNA, 22 nt, Human
gugggaguggagcucagcaugu

SEQ ID NO: 527607 - RNA, 23 nt, Human
gguuggcuguacccaggcucccu

SEQ ID NO: 527608 - RNA, 22 nt, Human
ucugcuggaaaaccagggaauu

SEQ ID NO: 527609 - RNA, 22 nt, Human
uuaggcauccugucccuggauu

SEQ ID NO: 527610 - RNA, 22 nt, Human
agcuggguguagggcuggacaa

SEQ ID NO: 527611 - RNA, 22 nt, Human
uggcccagaucucugaccuuga

SEQ ID NO: 527612 - RNA, 22 nt, Human
ccugugauauuguucauaauau

SEQ ID NO: 527613 - RNA, 18 nt, Human
gguccugggccuggcuca

SEQ ID NO: 527614 - RNA, 22 nt, Human
acccagcucuuugauggucuug

SEQ ID NO: 527615 - RNA, 22 nt, Human
agaauguaagaaugcaaagauu

SEQ ID NO: 527616 - RNA, 22 nt, Human
gaggaggcuuccgggaggcacg

SEQ ID NO: 527617 - RNA, 22 nt, Human
cucucuccuuagcugcagacca

SEQ ID NO: 527618 - RNA, 22 nt, Human
cacagagagcuacgugcagcgu

SEQ ID NO: 527619 - RNA, 18 nt, Human
augcucuagucuuuccug

SEQ ID NO: 527620 - RNA, 22 nt, Human
cuggcccagguggucguugagg

SEQ ID NO: 527621 - RNA, 23 nt, Human
uugguuacuggauuugaggggcc

SEQ ID NO: 527622 - RNA, 22 nt, Human
ucugggccggagccgacggcag

SEQ ID NO: 527623 - RNA, 22 nt, Human
gccuggcgccgggcugccuguc

SEQ ID NO: 527624 - RNA, 22 nt, Human
uguucauucugugaccugguuc

SEQ ID NO: 527625 - RNA, 22 nt, Human
ccucuuccacugggccccaucc

SEQ ID NO: 527626 - RNA, 22 nt, Human
agagcagaggcauggccguggg

SEQ ID NO: 527627 - RNA, 22 nt, Human
gcccaguggcaucuucacugcu

SEQ ID NO: 527628 - RNA, 22 nt, Human
aggcucaguauagcuggcaagu

SEQ ID NO: 527629 - RNA, 22 nt, Human
ugugcccuccugccaggggcug

SEQ ID NO: 527630 - RNA, 17 nt, Human
aguuuuuggaccugugu

SEQ ID NO: 527631 - RNA, 17 nt, Human
ggugaguguccaggugg

SEQ ID NO: 527632 - RNA, 22 nt, Human
gagggcucaacuacuacuaggc

SEQ ID NO: 527633 - RNA, 22 nt, Human
cacgugcaggucuuaggagaca

SEQ ID NO: 527634 - RNA, 22 nt, Human
uuccaggccgggcaggaaacac

SEQ ID NO: 527635 - RNA, 22 nt, Human
ugagcagacuugaugaggcagc

SEQ ID NO: 527636 - RNA, 22 nt, Human
uuaaaagaauccuguuauccuc

SEQ ID NO: 527637 - RNA, 22 nt, Human
ccugguuugggugccagugagu

SEQ ID NO: 527638 - RNA, 22 nt, Human
uuuucaguuccaucucugcucu

SEQ ID NO: 527639 - RNA, 22 nt, Human
ucaccuguuggauguauacugu

SEQ ID NO: 527640 - RNA, 22 nt, Human
ucccgggcaggucgagcgagcc

SEQ ID NO: 527641 - RNA, 23 nt, Human
guguggccccagggccuccucgc

SEQ ID NO: 527642 - RNA, 22 nt, Human
cugcucaauuccggcacgcugg

SEQ ID NO: 527643 - RNA, 22 nt, Human
gcccagcaccucucucaggguu

SEQ ID NO: 527644 - RNA, 22 nt, Human
acagugcaaauaggacugucuu

SEQ ID NO: 527645 - RNA, 22 nt, Human
cagggaugggauggagucaguu

SEQ ID NO: 527646 - RNA, 22 nt, Human
acagcagguuauuguuauggca

SEQ ID NO: 527647 - RNA, 22 nt, Human
ccuggguccaauucuggcuugu

SEQ ID NO: 527648 - RNA, 22 nt, Human
caacuuuagaccccaaguagcu

SEQ ID NO: 527649 - RNA, 22 nt, Human
ggccccagggauuaggccaacc

SEQ ID NO: 527650 - RNA, 22 nt, Human
cagggucuuggcgccaucaccc

SEQ ID NO: 527651 - RNA, 22 nt, Human
cauuuugugcuagacacuaugg

SEQ ID NO: 527652 - RNA, 22 nt, Human
agggcccuagggaaugagacau

SEQ ID NO: 527653 - RNA, 22 nt, Human
ggcggcacgcaggcugcugucg

SEQ ID NO: 527654 - RNA, 22 nt, Human
gcagcagaaggccaaggggagc

SEQ ID NO: 527655 - RNA, 22 nt, Human
uggcagaaugaagacuggggcc

SEQ ID NO: 527656 - RNA, 22 nt, Human
ugagccuggccugcagagacca

SEQ ID NO: 527657 - RNA, 22 nt, Human
cagggagaucuuggcuccuggu

SEQ ID NO: 527658 - RNA, 20 nt, Human
caauaauuuacuucccuauu

SEQ ID NO: 527659 - RNA, 22 nt, Human
aaagcugcaagcuccugaggaa

SEQ ID NO: 527660 - RNA, 22 nt, Human
ucauuccuccagcgggagucca

SEQ ID NO: 527661 - RNA, 22 nt, Human
aaugucaacacaagagaaaugc

SEQ ID NO: 527662 - RNA, 22 nt, Human
gucuguggaguugcuugcugga

SEQ ID NO: 527663 - RNA, 22 nt, Human
aguuggcauuuuauuuaaguau

SEQ ID NO: 527664 - RNA, 22 nt, Human
uuagcacccugauacuagaaug

SEQ ID NO: 527665 - RNA, 22 nt, Human
ugucuuaugcugcauagacuau

SEQ ID NO: 527666 - RNA, 22 nt, Human
ccccagcagacucagggcaggu

SEQ ID NO: 527667 - RNA, 22 nt, Human
guucuucaggcugugcucuaga

SEQ ID NO: 527668 - RNA, 22 nt, Human
uuugugcaagagggccaccuua

SEQ ID NO: 527669 - RNA, 22 nt, Human
ugcaaauucuuuacucugugau

SEQ ID NO: 527670 - RNA, 22 nt, Human
cuccguggcuguggacgcagcc

SEQ ID NO: 527671 - RNA, 22 nt, Human
aggcuccaugguucucccucag

SEQ ID NO: 527672 - RNA, 22 nt, Human
accucccuaacccuuuuggcuc

SEQ ID NO: 527673 - RNA, 23 nt, Human
uggcucugagcuuccugguggcc

SEQ ID NO: 527674 - RNA, 22 nt, Human
agguuuggguucauugcuggcu

SEQ ID NO: 527675 - RNA, 22 nt, Human
auaacugagugagcagcgacuc

SEQ ID NO: 527676 - RNA, 22 nt, Human
uguacacauuaagcucuuuaga

SEQ ID NO: 527677 - RNA, 22 nt, Human
auacaggaugcugaacaucucu

SEQ ID NO: 527678 - RNA, 22 nt, Human
auuucagaguagaucguuauuu

SEQ ID NO: 527679 - RNA, 22 nt, Human
uccagugguggcucccggaccu

SEQ ID NO: 527680 - RNA, 22 nt, Human
gccugagauuggacauuauuua

SEQ ID NO: 527681 - RNA, 22 nt, Human
ucccugagcucacauggcagga

SEQ ID NO: 527682 - RNA, 22 nt, Human
cuggagccggcgagccccagcc

SEQ ID NO: 527683 - RNA, 22 nt, Human
ucuccucuauuucuguauguau

SEQ ID NO: 527684 - RNA, 21 nt, Human
ucugaugguagaugagaugug

SEQ ID NO: 527685 - RNA, 22 nt, Human
ucugcacccugugguccucuag

SEQ ID NO: 527686 - RNA, 22 nt, Human
cuggcagcugcccgagaugccc

SEQ ID NO: 527687 - RNA, 17 nt, Human
gugagcugagucaggac

SEQ ID NO: 527688 - RNA, 22 nt, Human
gucauuuuugacuuugaaguga

SEQ ID NO: 527689 - RNA, 22 nt, Human
uucacagaauugucuugacugg

SEQ ID NO: 527690 - RNA, 22 nt, Human
ccaucuucucuugaaccuccuu

SEQ ID NO: 527691 - RNA, 22 nt, Human
uccgguccggguacuccucucu

SEQ ID NO: 527692 - RNA, 22 nt, Human
acugggccaggugugggugagu

SEQ ID NO: 527693 - RNA, 22 nt, Human
acaaaugcuuaguucaccaaaa

SEQ ID NO: 527694 - RNA, 22 nt, Human
uaaaguuggaccugauuuuauu

SEQ ID NO: 527695 - RNA, 22 nt, Human
cucagcucauuguggauccggu

SEQ ID NO: 527696 - RNA, 22 nt, Human
ugcuggaagggucggcgugggc

SEQ ID NO: 527697 - RNA, 22 nt, Human
aagcaaaagguuacacuucugg

SEQ ID NO: 527698 - RNA, 22 nt, Human
aaacaucuucucuugauucuuu

SEQ ID NO: 527699 - RNA, 21 nt, Human
acugggcuagccugacuucug

SEQ ID NO: 527700 - RNA, 22 nt, Human
ugggaugagcuauauagaaagu

SEQ ID NO: 527701 - RNA, 18 nt, Human
uccaccgcgugcaccucu

SEQ ID NO: 527702 - RNA, 22 nt, Human
agauauguuaggcuuguucccu

SEQ ID NO: 527703 - RNA, 22 nt, Human
uagcuguucucuguaaauugga

SEQ ID NO: 527704 - RNA, 22 nt, Human
ccaggaggaaagaccagcccau

SEQ ID NO: 527705 - RNA, 22 nt, Human
ugucccuggacuccaggagcca

SEQ ID NO: 527706 - RNA, 22 nt, Human
uaagcuauuccugaagaagguu

SEQ ID NO: 527707 - RNA, 22 nt, Human
ccuuugagccugggcgcggacc

SEQ ID NO: 527708 - RNA, 22 nt, Human
gcugcagggagcuggaaggcuc

SEQ ID NO: 527709 - RNA, 22 nt, Human
uuugggcuguacaauuucugua

SEQ ID NO: 527710 - RNA, 23 nt, Human
uggugggcccugcuugcucacug

SEQ ID NO: 527711 - RNA, 22 nt, Human
aagagcuggcucuugcagcagc

SEQ ID NO: 527712 - RNA, 22 nt, Human
ucaggagaguguucaguggagg

SEQ ID NO: 527713 - RNA, 21 nt, Human
cuggagcuuggugagaagugu

SEQ ID NO: 527714 - RNA, 22 nt, Human
accaagaguccaagugagguug

SEQ ID NO: 527715 - RNA, 17 nt, Human
agcuuggagcagcauga

SEQ ID NO: 527716 - RNA, 22 nt, Human
uucucacguuauuggcugagag

SEQ ID NO: 527717 - RNA, 22 nt, Human
aaguuacaggagaaagagauca

SEQ ID NO: 527718 - RNA, 22 nt, Human
uggggcuccuccuggcaggagg

SEQ ID NO: 527719 - RNA, 22 nt, Human
uacuuucuagcucuccccaguu

SEQ ID NO: 527720 - RNA, 22 nt, Human
cacccucaagcaguggcacgug

SEQ ID NO: 527721 - RNA, 22 nt, Human
augccuguuugaaauuggaccu

SEQ ID NO: 527722 - RNA, 22 nt, Human
caucugcaggggaagccaguuu

SEQ ID NO: 527723 - RNA, 22 nt, Human
cagcaguacuucucagagguau

SEQ ID NO: 527724 - RNA, 22 nt, Human
ggcgcaguugagcgugcuguuc

SEQ ID NO: 527725 - RNA, 22 nt, Human
acaagguugauucuggcaucug

SEQ ID NO: 527726 - RNA, 22 nt, Human
uuugcaaaguccauugaaguua

SEQ ID NO: 527727 - RNA, 22 nt, Human
cuggcuuuuggaggagggucag

SEQ ID NO: 527728 - RNA, 22 nt, Human
ggccagccuggggcucccagac

SEQ ID NO: 527729 - RNA, 22 nt, Human
aaagaggcucaaggugggccag

SEQ ID NO: 527730 - RNA, 22 nt, Human
gggaggaaggcuugggugagua

SEQ ID NO: 527731 - RNA, 22 nt, Human
aaaugcacugaauauuccaaau

SEQ ID NO: 527732 - RNA, 22 nt, Human
gcguuggggaccccgaagcugg

SEQ ID NO: 527733 - RNA, 22 nt, Human
gugcuggggagauaggaagaga

SEQ ID NO: 527734 - RNA, 22 nt, Human
gaaguauuucugaguugcccag

SEQ ID NO: 527735 - RNA, 22 nt, Human
cccuugagguagacugaacacc

SEQ ID NO: 527736 - RNA, 22 nt, Human
cugagcagaagggugcacgugc

SEQ ID NO: 527737 - RNA, 22 nt, Human
auuucagcagcccauguuugga

SEQ ID NO: 527738 - RNA, 22 nt, Human
uggggugccgacagggagggca

SEQ ID NO: 527739 - RNA, 22 nt, Human
gcauaaaggacuauaaggauca

SEQ ID NO: 527740 - RNA, 22 nt, Human
aagcucucuguccccuggacug

SEQ ID NO: 527741 - RNA, 22 nt, Human
caggacagaaauaaggaauaua

SEQ ID NO: 527742 - RNA, 22 nt, Human
cucagugaauuggaggauggcc

SEQ ID NO: 527743 - RNA, 22 nt, Human
cuguucccgguggccgggccag

SEQ ID NO: 527744 - RNA, 22 nt, Human
cgaggagugugaaggcuugucg

SEQ ID NO: 527745 - RNA, 22 nt, Human
agagaugcuguggguagaggca

SEQ ID NO: 527746 - RNA, 22 nt, Human
auggucacuucacccaugagcu

SEQ ID NO: 527747 - RNA, 22 nt, Human
aagcagggugucuugacccaug

SEQ ID NO: 527748 - RNA, 22 nt, Human
aacacugugcccacccuagucc

SEQ ID NO: 527749 - RNA, 22 nt, Human
guggccuccuccguccgccucu

SEQ ID NO: 527750 - RNA, 22 nt, Human
agucagcuugucucuaggguug

SEQ ID NO: 527751 - RNA, 22 nt, Human
uacucugcaggauggacuaugg

SEQ ID NO: 527752 - RNA, 22 nt, Human
auggccugcagugcugccacag

SEQ ID NO: 527753 - RNA, 22 nt, Human
uugagcagaucgggcugugggg

SEQ ID NO: 527754 - RNA, 20 nt, Human
gcugugccaugacccucgag

SEQ ID NO: 527755 - RNA, 22 nt, Human
cccugccuacaggguuuucuuu

SEQ ID NO: 527756 - RNA, 22 nt, Human
aggagggagcuuaagccaggca

SEQ ID NO: 527757 - RNA, 22 nt, Human
uucccuucuaguuuugagagac

SEQ ID NO: 527758 - RNA, 22 nt, Human
augagagcugaugacuuuacaa

SEQ ID NO: 527759 - RNA, 22 nt, Human
cuaccugguacauagaaauguu

SEQ ID NO: 527760 - RNA, 20 nt, Human
ugugugaauuagggcauguu

SEQ ID NO: 527761 - RNA, 22 nt, Human
ucagaagcauguggggagccug

SEQ ID NO: 527762 - RNA, 18 nt, Human
ucaguccuccauagagcu

SEQ ID NO: 527763 - RNA, 22 nt, Human
gccagaggggcucgaaggcgcg

SEQ ID NO: 527764 - RNA, 22 nt, Human
gcugcaggcucugcaggaauug

SEQ ID NO: 527765 - RNA, 22 nt, Human
augaagcugguuuuggcuuggg

SEQ ID NO: 527766 - RNA, 22 nt, Human
ugaagacaguuuuacucaugag

SEQ ID NO: 527767 - RNA, 22 nt, Human
ugccuaggcuggaaugcagugg

SEQ ID NO: 527768 - RNA, 22 nt, Human
cugggucccggcuucuauccac

SEQ ID NO: 527769 - RNA, 21 nt, Human
gcagcaugagaaagccccaaa

SEQ ID NO: 527770 - RNA, 22 nt, Human
auguuuguguuucccauucagg

SEQ ID NO: 527771 - RNA, 22 nt, Human
gacacuacguggcucacauuuc

SEQ ID NO: 527772 - RNA, 18 nt, Human
auuugcaggcaugcaggc

SEQ ID NO: 527773 - RNA, 22 nt, Human
auuuggcauaggcagaggccca

SEQ ID NO: 527774 - RNA, 18 nt, Human
gccuggcuucggagccgc

SEQ ID NO: 527775 - RNA, 22 nt, Human
uuauuuaaaagugguaagauuc

SEQ ID NO: 527776 - RNA, 22 nt, Human
ggcucucuuaacuggccauccu

SEQ ID NO: 527777 - RNA, 22 nt, Human
uccugugccuccaccugcuccg

SEQ ID NO: 527778 - RNA, 22 nt, Human
caggaugccuuugaacucugga

SEQ ID NO: 527779 - RNA, 20 nt, Human
ggucacuguggcugcaggau

SEQ ID NO: 527780 - RNA, 22 nt, Human
cagcucugguuccugggcccag

SEQ ID NO: 527781 - RNA, 21 nt, Human
uggcaggcagcuggaagcuug

SEQ ID NO: 527782 - RNA, 22 nt, Human
ugggugugagcccgggagccgc

SEQ ID NO: 527783 - RNA, 22 nt, Human
uccgggagcugaacgucuugcg

SEQ ID NO: 527784 - RNA, 19 nt, Human
ggcugccuucugcucaucu

SEQ ID NO: 527785 - RNA, 22 nt, Human
ggugggucuuguggggcagcuu

SEQ ID NO: 527786 - RNA, 22 nt, Human
uccagcucugcugugcgccggu

SEQ ID NO: 527787 - RNA, 22 nt, Human
aaucugagggaacuugaacucc

SEQ ID NO: 527788 - RNA, 22 nt, Human
ggcucagaaaccucuggugucu

SEQ ID NO: 527789 - RNA, 22 nt, Human
agcauggcuuuggaggauagca

SEQ ID NO: 527790 - RNA, 22 nt, Human
uugggugcugucauggggcacg

SEQ ID NO: 527791 - RNA, 22 nt, Human
ggggucacacuguggugacugg

SEQ ID NO: 527792 - RNA, 21 nt, Human
uacaucaguuuucuuggcuca

SEQ ID NO: 527793 - RNA, 22 nt, Human
ucuguagcauucaccagcccug

SEQ ID NO: 527794 - RNA, 22 nt, Human
uacucuggaguugagaugcgag

SEQ ID NO: 527795 - RNA, 22 nt, Human
cucccagggucuaggcugcugg

SEQ ID NO: 527796 - RNA, 22 nt, Human
gcagagcuggaacugguacuca

SEQ ID NO: 527797 - RNA, 22 nt, Human
agggaagcagcagccgccuguc

SEQ ID NO: 527798 - RNA, 22 nt, Human
cuggagcagcagguggccaggg

SEQ ID NO: 527799 - RNA, 22 nt, Human
cuagagaaaaagcuuagguacg

SEQ ID NO: 527800 - RNA, 22 nt, Human
gccagccccagacauccuaucg

SEQ ID NO: 527801 - RNA, 22 nt, Human
ugcaggccuggacugauguggu

SEQ ID NO: 527802 - RNA, 22 nt, Human
cugaggagauccccccagaagu

SEQ ID NO: 527803 - RNA, 22 nt, Human
ccucaaaggccuggcaccagaa

SEQ ID NO: 527804 - RNA, 19 nt, Human
ugguggaggccccauguuc

SEQ ID NO: 527805 - RNA, 22 nt, Human
uaggugucuggacaacuuugua

SEQ ID NO: 527806 - RNA, 22 nt, Human
cuggagcucuguguguuccuga

SEQ ID NO: 527807 - RNA, 18 nt, Human
cuggucucccuucgcuuu

SEQ ID NO: 527808 - RNA, 22 nt, Human
aggcagccuauggggagcucag

SEQ ID NO: 527809 - RNA, 22 nt, Human
gaaaauaguucaucacaaugau

SEQ ID NO: 527810 - RNA, 22 nt, Human
cacaggaagcaagccuggggcc

SEQ ID NO: 527811 - RNA, 22 nt, Human
gcugacugguucaggucccgcu

SEQ ID NO: 527812 - RNA, 22 nt, Human
ugccuggcugggcugcucaugg

SEQ ID NO: 527813 - RNA, 22 nt, Human
gcuccugggcccugggcuaacu

SEQ ID NO: 527814 - RNA, 23 nt, Human
ugagagccuggcagccuggguuc

SEQ ID NO: 527815 - RNA, 17 nt, Human
ugaggccugcaucagug

SEQ ID NO: 527816 - RNA, 20 nt, Human
caucaacaccuugucagccu

SEQ ID NO: 527817 - RNA, 22 nt, Human
cacagaggaugcccaagcgauc

SEQ ID NO: 527818 - RNA, 22 nt, Human
aguggcuguuccaggugaggac

SEQ ID NO: 527819 - RNA, 22 nt, Human
gugccuccaggcucgacuaguc

SEQ ID NO: 527820 - RNA, 22 nt, Human
gggagacaaaggugagguucuu

SEQ ID NO: 527821 - RNA, 20 nt, Human
gggugugggcccggccaggc

SEQ ID NO: 527822 - RNA, 22 nt, Human
ucccaggauguuuauggcuggu

SEQ ID NO: 527823 - RNA, 22 nt, Human
gcaggaguuagagguuuaaucu

SEQ ID NO: 527824 - RNA, 22 nt, Human
uggcugaggucuggggcuucug

SEQ ID NO: 527825 - RNA, 22 nt, Human
gcagcugccgugagcucacgcc

SEQ ID NO: 527826 - RNA, 18 nt, Human
ugugccucugcaggacgu

SEQ ID NO: 527827 - RNA, 22 nt, Human
auggguggccccgugugcaguc

SEQ ID NO: 527828 - RNA, 22 nt, Human
gguggcagaggugcaucagccc

SEQ ID NO: 527829 - RNA, 22 nt, Human
cacacuguccccuucuccccag

SEQ ID NO: 527830 - RNA, 22 nt, Human
agggcaguguggugggacugac

SEQ ID NO: 527831 - RNA, 22 nt, Human
agcuccacucccugccuguuuc

SEQ ID NO: 527832 - RNA, 23 nt, Human
uuaacaggaucucgggcaagagg

SEQ ID NO: 527833 - RNA, 22 nt, Human
uucuccucagcaaggcagcuuu

SEQ ID NO: 527834 - RNA, 19 nt, Human
cgcacagccugccaggcgc

SEQ ID NO: 527835 - RNA, 22 nt, Human
ugucugccugcgggccggcaca

SEQ ID NO: 527836 - RNA, 22 nt, Human
guggccaucuuuggcccugacu

SEQ ID NO: 527837 - RNA, 22 nt, Human
cuccagcucgcgagcucugcuc

SEQ ID NO: 527838 - RNA, 22 nt, Human
uaguggauguucagagauuuga

SEQ ID NO: 527839 - RNA, 22 nt, Human
ucaucuguuaugggaguuuuug

SEQ ID NO: 527840 - RNA, 22 nt, Human
cucguugcugaagccaaaguca

SEQ ID NO: 527841 - RNA, 20 nt, Human
cuguuugcuaucaugagcug

SEQ ID NO: 527842 - RNA, 21 nt, Human
gcccacagugaggaggauccc

SEQ ID NO: 527843 - RNA, 22 nt, Human
aggcuaggccuugcccuggaac

SEQ ID NO: 527844 - RNA, 22 nt, Human
acaugaggaacucaggagucac

SEQ ID NO: 527845 - RNA, 21 nt, Human
uccaggagcacgggacuagga

SEQ ID NO: 527846 - RNA, 22 nt, Human
aggcuguccucucuugcucagu

SEQ ID NO: 527847 - RNA, 22 nt, Human
guguccagagccgggcugaaug

SEQ ID NO: 527848 - RNA, 22 nt, Human
cuggaaggagcccgggcggauc

SEQ ID NO: 527849 - RNA, 22 nt, Human
ugcacaguuggcuacaucgugg

SEQ ID NO: 527850 - RNA, 22 nt, Human
agcugggugcccgaagccacgu

SEQ ID NO: 527851 - RNA, 22 nt, Human
ccaggcccugcuccucacacca

SEQ ID NO: 527852 - RNA, 20 nt, Human
ucugccacuuuuucugucac

SEQ ID NO: 527853 - RNA, 22 nt, Human
ccucugagcuggccuguggggc

SEQ ID NO: 527854 - RNA, 22 nt, Human
caagauauguccuguuacuaag

SEQ ID NO: 527855 - RNA, 22 nt, Human
aagacagugacagucacaauug

SEQ ID NO: 527856 - RNA, 22 nt, Human
ucucugagguuguuuccagcac

SEQ ID NO: 527857 - RNA, 22 nt, Human
ucugguuucccaguuccuccgu

SEQ ID NO: 527858 - RNA, 22 nt, Human
gccaccagccccaugcgcugug

SEQ ID NO: 527859 - RNA, 22 nt, Human
gagguccacugaggcaacaggg

SEQ ID NO: 527860 - RNA, 22 nt, Human
aggcaguuguugcugagcagcu

SEQ ID NO: 527861 - RNA, 22 nt, Human
cagcugcuguucaguuuuguuu

SEQ ID NO: 527862 - RNA, 22 nt, Human
aacaggcuaaauuguccauuuc

SEQ ID NO: 527863 - RNA, 22 nt, Human
ucggagcuguagaugaaacccu

SEQ ID NO: 527864 - RNA, 22 nt, Human
ggcaagaaccucaauuaccuuu

SEQ ID NO: 527865 - RNA, 22 nt, Human
ucuuuuaucuguuguguaacaa

SEQ ID NO: 527866 - RNA, 22 nt, Human
ugacauuugagagagauauaca

SEQ ID NO: 527867 - RNA, 22 nt, Human
gccaggaccucagaugcagggc

SEQ ID NO: 527868 - RNA, 22 nt, Human
uguccagaucaaugcccacaug

SEQ ID NO: 527869 - RNA, 22 nt, Human
uggccgggaagggacagugugg

SEQ ID NO: 527870 - RNA, 22 nt, Human
cuguggcugcgcccugggggag

SEQ ID NO: 527871 - RNA, 22 nt, Human
cagggagcuggugccagccgac

SEQ ID NO: 527872 - RNA, 22 nt, Human
guggcauuuuagaacagcugac

SEQ ID NO: 527873 - RNA, 22 nt, Human
uugauucugcugaucucggacg

SEQ ID NO: 527874 - RNA, 22 nt, Human
uuucccaggcuggaaugcagug

SEQ ID NO: 527875 - RNA, 22 nt, Human
uguuaccauaggucagaacguu

SEQ ID NO: 527876 - RNA, 22 nt, Human
gcucaugggcccagagcagccc

SEQ ID NO: 527877 - RNA, 22 nt, Human
uugcaggucuggggguccuggu

SEQ ID NO: 527878 - RNA, 23 nt, Human
agguggagcugugcagccggggc

SEQ ID NO: 527879 - RNA, 22 nt, Human
cugccuuggcccuaguucaugg

SEQ ID NO: 527880 - RNA, 22 nt, Human
gaggugggaugugugugcuacu

SEQ ID NO: 527881 - RNA, 22 nt, Human
gcagcagcaggcgcucggccgu

SEQ ID NO: 527882 - RNA, 22 nt, Human
ucugaggcugaauggacuccgu

SEQ ID NO: 527883 - RNA, 22 nt, Human
uucucugaguacguuucagugu

SEQ ID NO: 527884 - RNA, 22 nt, Human
cuggagauaagcagucccaggc

SEQ ID NO: 527885 - RNA, 22 nt, Human
aaaggugccucuuacaaggcuu

SEQ ID NO: 527886 - RNA, 21 nt, Human
ggucaggcaugugcccugagc

SEQ ID NO: 527887 - RNA, 22 nt, Human
augcccagaacccccuggaugg

SEQ ID NO: 527888 - RNA, 22 nt, Human
gcuuggccagcagccgggaugc

SEQ ID NO: 527889 - RNA, 22 nt, Human
ccacccagccagaugcaggaag

SEQ ID NO: 527890 - RNA, 22 nt, Human
cugucuacagaugaaauaagca

SEQ ID NO: 527891 - RNA, 22 nt, Human
ccaggaugacccccacuuuccu

SEQ ID NO: 527892 - RNA, 22 nt, Human
uauagcagcaugauuuauaguc

SEQ ID NO: 527893 - RNA, 22 nt, Human
augaauuguccgauguugugca

SEQ ID NO: 527894 - RNA, 22 nt, Human
ccagcugcgggcaucgagaguu

SEQ ID NO: 527895 - RNA, 22 nt, Human
ugcucuguucaguguaucuugu

SEQ ID NO: 527896 - RNA, 22 nt, Human
ugaggucuguccugucuuugga

SEQ ID NO: 527897 - RNA, 22 nt, Human
gccuggcaaggcccuguugacu

SEQ ID NO: 527898 - RNA, 22 nt, Human
ccagaucccuguuugccucugg

SEQ ID NO: 527899 - RNA, 22 nt, Human
agugacagauuaccggcagagc

SEQ ID NO: 527900 - RNA, 22 nt, Human
acagaguaucuaucaggaguau

SEQ ID NO: 527901 - RNA, 22 nt, Human
agccagggacgcugcaggcuac

SEQ ID NO: 527902 - RNA, 22 nt, Human
cauuguuggcagagggacagag

SEQ ID NO: 527903 - RNA, 18 nt, Human
uggucacuguggauagug

SEQ ID NO: 527904 - RNA, 22 nt, Human
gaggggccuggcgaggacaugu

SEQ ID NO: 527905 - RNA, 22 nt, Human
ccaggagcccugccacaauggu

SEQ ID NO: 527906 - RNA, 22 nt, Human
ucugcuugugucuguccagccu

SEQ ID NO: 527907 - RNA, 22 nt, Human
ugugacuaggccugagcucuug

SEQ ID NO: 527908 - RNA, 22 nt, Human
cugaaggauguguggugggagu

SEQ ID NO: 527909 - RNA, 22 nt, Human
cugggcuccuaaccauccaggu

SEQ ID NO: 527910 - RNA, 22 nt, Human
aggaagccuggaguccugccca

SEQ ID NO: 527911 - RNA, 22 nt, Human
cuggccuggcaggggaccucua

SEQ ID NO: 527912 - RNA, 22 nt, Human
uguguccugugaucucuagggu

SEQ ID NO: 527913 - RNA, 18 nt, Human
gaaggcauucaguggcuu

SEQ ID NO: 527914 - RNA, 19 nt, Human
ucucccaugccugugucua

SEQ ID NO: 527915 - RNA, 22 nt, Human
cuggcaguguccagcucgugau

SEQ ID NO: 527916 - RNA, 22 nt, Human
gggaggugauuaggaccaugua

SEQ ID NO: 527917 - RNA, 22 nt, Human
acgugcuggagaagagcucgcc

SEQ ID NO: 527918 - RNA, 22 nt, Human
aggcagaugggagcuggaaguu

SEQ ID NO: 527919 - RNA, 22 nt, Human
agcaccaggucgcuggcacgcu

SEQ ID NO: 527920 - RNA, 21 nt, Human
ugaggccugccagucucagaa

SEQ ID NO: 527921 - RNA, 22 nt, Human
acauagcuuaaaugagaagaua

SEQ ID NO: 527922 - RNA, 22 nt, Human
agguccugucuuaucucuguaa

SEQ ID NO: 527923 - RNA, 22 nt, Human
gccccacuguggaaccuaaguc

SEQ ID NO: 527924 - RNA, 22 nt, Human
gucuguccacuuggaagcuccc

SEQ ID NO: 527925 - RNA, 22 nt, Human
uggcccaggugcacccagaggc

SEQ ID NO: 527926 - RNA, 22 nt, Human
ucagagaaguaggcuaauggug

SEQ ID NO: 527927 - RNA, 23 nt, Human herpesvirus 4 [Epstein-Barr virus]
aucagcaaauccaguuguauuca

SEQ ID NO: 527928 - RNA, 22 nt, Human herpesvirus 4 [Epstein-Barr virus]
ccagcuccugaacacggccccu

SEQ ID NO: 527929 - RNA, 22 nt, Human herpesvirus 4 [Epstein-Barr virus]
cagcguccugaggcugcugcuu

SEQ ID NO: 527930 - RNA, 17 nt, Human herpesvirus 4 [Epstein-Barr virus]
agcccugcucacgaaug

SEQ ID NO: 527931 - RNA, 22 nt, Human herpesvirus 4 [Epstein-Barr virus]
agcucgaguacgacugugaggu

SEQ ID NO: 527932 - RNA, 22 nt, Human herpesvirus 4 [Epstein-Barr virus]
aggcucucccaacacaauagaa

SEQ ID NO: 527933 - RNA, 22 nt, Human herpesvirus 4 [Epstein-Barr virus]
aguucauccugggcuuuguggc

SEQ ID NO: 527934 - RNA, 22 nt, Human herpesvirus 4 [Epstein-Barr virus]
cagcagcaggcgcagcgacugg

SEQ ID NO: 527935 - RNA, 22 nt, Human herpesvirus 4 [Epstein-Barr virus]
ucauggucuuuuuacaaacuca

SEQ ID NO: 527936 - RNA, 17 nt, Human herpesvirus 4 [Epstein-Barr virus]
ggccacaggggaggugg

SEQ ID NO: 527937 - RNA, 23 nt, Human herpesvirus 4 [Epstein-Barr virus]
gccugcacguccugccacgcccu

SEQ ID NO: 527938 - RNA, 22 nt, Human herpesvirus 4 [Epstein-Barr virus]
gccacguggccacgugacacac

SEQ ID NO: 527939 - RNA, 23 nt, Human herpesvirus 4 [Epstein-Barr virus]
gccacuagcacaggugagaagcg

SEQ ID NO: 527940 - RNA, 17 nt, Human herpesvirus 4 [Epstein-Barr virus]
uuauggcuagauuuccu

SEQ ID NO: 527941 - RNA, 22 nt, Human herpesvirus 4 [Epstein-Barr virus]
auccaggccuucgcuggcuucu

SEQ ID NO: 527942 - RNA, 22 nt, Human herpesvirus 4 [Epstein-Barr virus]
cagauagugaacguggagguug

SEQ ID NO: 527943 - RNA, 22 nt, Human herpesvirus 4 [Epstein-Barr virus]
cucacgccgcacgguccggcac

SEQ ID NO: 527944 - RNA, 22 nt, Human herpesvirus 4 [Epstein-Barr virus]
cuguacauccagcugcuguaug

SEQ ID NO: 527945 - RNA, 22 nt, Human herpesvirus 4 [Epstein-Barr virus]
gaggcccacgguggcggcagac

SEQ ID NO: 527946 - RNA, 22 nt, Human herpesvirus 4 [Epstein-Barr virus]
ucugggguccaggagucugcug

SEQ ID NO: 527947 - RNA, 17 nt, Human herpesvirus 4 [Epstein-Barr virus]
uggcagacgcccuccug

SEQ ID NO: 527948 - RNA, 22 nt, Human herpesvirus 4 [Epstein-Barr virus]
uggagcuccuuggugcaggaga

SEQ ID NO: 527949 - RNA, 22 nt, Human herpesvirus 4 [Epstein-Barr virus]
cggccacacggccggagcuccg

SEQ ID NO: 527950 - RNA, 22 nt, Human herpesvirus 4 [Epstein-Barr virus]
ugcgccugcugcugggaaccug

SEQ ID NO: 527951 - RNA, 22 nt, Human herpesvirus 4 [Epstein-Barr virus]
uggugcagagagccacacaguu

SEQ ID NO: 527952 - RNA, 22 nt, Human herpesvirus 4 [Epstein-Barr virus]
gaggucucugaugagcuggaag

SEQ ID NO: 527953 - RNA, 22 nt, Human herpesvirus 4 [Epstein-Barr virus]
uauuugcggcugggcuaaugau

SEQ ID NO: 527954 - RNA, 22 nt, Human herpesvirus 4 [Epstein-Barr virus]
uaugaggacauuuucccaaucu

SEQ ID NO: 527955 - RNA, 22 nt, Human herpesvirus 4 [Epstein-Barr virus]
uaggcauagagagugaugagcc

SEQ ID NO: 527956 - RNA, 22 nt, Human herpesvirus 4 [Epstein-Barr virus]
gaugcguguagcccagaagcgu

SEQ ID NO: 527957 - RNA, 22 nt, Human herpesvirus 4 [Epstein-Barr virus]
gagggggaucgcccgggucucu

SEQ ID NO: 527958 - RNA, 22 nt, Human herpesvirus 4 [Epstein-Barr virus]
gagcuccaaagccaggcucgag

SEQ ID NO: 527959 - RNA, 22 nt, Human herpesvirus 4 [Epstein-Barr virus]
cggggcaguauuuucgaccgag

SEQ ID NO: 527960 - RNA, 22 nt, Human herpesvirus 4 [Epstein-Barr virus]
uggagcguucucagggaucgcu

SEQ ID NO: 527961 - RNA, 22 nt, Human herpesvirus 4 [Epstein-Barr virus]
uggagggcaucuuccgggagua

SEQ ID NO: 527962 - RNA, 22 nt, Human herpesvirus 4 [Epstein-Barr virus]
uggcaaagugcugagagcaagg

SEQ ID NO: 527963 - RNA, 22 nt, Human herpesvirus 4 [Epstein-Barr virus]
uuguggaccucucagaguuuca

SEQ ID NO: 527964 - RNA, 22 nt, Human herpesvirus 4 [Epstein-Barr virus]
ccgggccguggaaugagggccu

SEQ ID NO: 527965 - RNA, 22 nt, Human herpesvirus 4 [Epstein-Barr virus]
ccauguguguccagugccuaau

SEQ ID NO: 527966 - RNA, 22 nt, Human herpesvirus 4 [Epstein-Barr virus]
gucaggagacacggcucuguca

SEQ ID NO: 527967 - RNA, 22 nt, Human herpesvirus 4 [Epstein-Barr virus]
ucggugggaggcauaggcccca

SEQ ID NO: 527968 - RNA, 22 nt, Human herpesvirus 4 [Epstein-Barr virus]
aacuguguggcucucugcacca

SEQ ID NO: 527969 - RNA, 22 nt, Human herpesvirus 4 [Epstein-Barr virus]
caggaggccccgcggcaggagg

SEQ ID NO: 527970 - RNA, 18 nt, Human herpesvirus 4 [Epstein-Barr virus]
ccagcguguuucuuaucc

SEQ ID NO: 527971 - RNA, 22 nt, Human herpesvirus 4 [Epstein-Barr virus]
agcaccaucagcccggggggac

SEQ ID NO: 527972 - RNA, 22 nt, Human herpesvirus 4 [Epstein-Barr virus]
gcuccacgcaaagucagauugc

SEQ ID NO: 527973 - RNA, 22 nt, Human herpesvirus 4 [Epstein-Barr virus]
cuguacauccagcugcuguaug

SEQ ID NO: 527974 - RNA, 22 nt, Human herpesvirus 4 [Epstein-Barr virus]
gaccacguccccccagacgcgc

SEQ ID NO: 527975 - RNA, 22 nt, Human
gagcugucucuauaugaaugcu

SEQ ID NO: 527976 - RNA, 22 nt, Human
auauaaagaaguggaaaaugag

SEQ ID NO: 527977 - RNA, 17 nt, Human
gcaaucucagucuccuu

SEQ ID NO: 527978 - RNA, 22 nt, Human
ugguccugucucaaggagccuu

SEQ ID NO: 527979 - RNA, 22 nt, Human
ccaggaccuggagcucuaugaa

SEQ ID NO: 527980 - RNA, 23 nt, Human
uccaggcaugagcucuggaugga

SEQ ID NO: 527981 - RNA, 22 nt, Human
gcaaaucaccaccuagcuggau

SEQ ID NO: 527982 - RNA, 22 nt, Human
cugugucggacgugggcagcag

SEQ ID NO: 527983 - RNA, 22 nt, Human
ucaaaacaaucauuggaugugc

SEQ ID NO: 527984 - RNA, 22 nt, Human
aguuauuuuggaaaaugaguca

SEQ ID NO: 527985 - RNA, 21 nt, Human
gccacguuucagucuucucag

SEQ ID NO: 527986 - RNA, 22 nt, Human
uggcucagccauucguguugcc

SEQ ID NO: 527987 - RNA, 22 nt, Human
accaggcagcacuuuccuugca

SEQ ID NO: 527988 - RNA, 22 nt, Human
aaaacacaagaagcaggguaca

SEQ ID NO: 527989 - RNA, 22 nt, Human
augauauagagaguagauuaaa

SEQ ID NO: 527990 - RNA, 22 nt, Human
cacauuuaagugcuuguucaga

SEQ ID NO: 527991 - RNA, 22 nt, Human
ucacauuuucauauucucugag

SEQ ID NO: 527992 - RNA, 22 nt, Human
caggugggagccacagcguaca

SEQ ID NO: 527993 - RNA, 22 nt, Human
auguuacaauccaacaaaauua

SEQ ID NO: 527994 - RNA, 22 nt, Human
aauaagaacuccauuuacucgu

SEQ ID NO: 527995 - RNA, 22 nt, Human
acucugaacuccaggaggcuca

SEQ ID NO: 527996 - RNA, 22 nt, Human
gaacuaaaagcuaacaucaggc

SEQ ID NO: 527997 - RNA, 22 nt, Human
cuuucacagcacaagccugccu

SEQ ID NO: 527998 - RNA, 21 nt, Human
gcccccuggacuccucaucca

SEQ ID NO: 527999 - RNA, 22 nt, Human
ugcaggcucugguuuauagugc

SEQ ID NO: 528000 - RNA, 22 nt, Human
ucuauuuaccaaauguaguucc

SEQ ID NO: 528001 - RNA, 22 nt, Human
cuucuuaaucccuuauauauuu

SEQ ID NO: 528002 - RNA, 22 nt, Human
aagaugcagcuuuacaauaagg

SEQ ID NO: 528003 - RNA, 22 nt, Human
cuucccuuggugaacagagcau

SEQ ID NO: 528004 - RNA, 22 nt, Human
ccugccuggcccaccuugccac

SEQ ID NO: 528005 - RNA, 22 nt, Human
agagugaaguucaucgugcagc

SEQ ID NO: 528006 - RNA, 22 nt, Human
auuuggcaacauuaauugaauc

SEQ ID NO: 528007 - RNA, 22 nt, Human
ccuccucugggaagauucagag

SEQ ID NO: 528008 - RNA, 22 nt, Human
uuucccaauugagagguucugu

SEQ ID NO: 528009 - RNA, 22 nt, Human
caugagacugccuuuucaaacc

SEQ ID NO: 528010 - RNA, 22 nt, Human
aaagucaucauuucuuuucaaa

SEQ ID NO: 528011 - RNA, 22 nt, Human
auuugucugcuugcugccuucc

SEQ ID NO: 528012 - RNA, 22 nt, Human
ggaagccacccagcuuugauag

SEQ ID NO: 528013 - RNA, 22 nt, Human
gccugguggugugcucaagugg

SEQ ID NO: 528014 - RNA, 22 nt, Human
ggaagaagggucauuggcagcc

SEQ ID NO: 528015 - RNA, 21 nt, Human
guuugcaugaacaagucagcc

SEQ ID NO: 528016 - RNA, 22 nt, Human
agggccagcagcuuggccaacc

SEQ ID NO: 528017 - RNA, 22 nt, Human
aggaaacuccccuacaucucaa

SEQ ID NO: 528018 - RNA, 22 nt, Human
uuauuccagcuaagaguccugg

SEQ ID NO: 528019 - RNA, 22 nt, Human
ucauuuugcagagcugaggaac

SEQ ID NO: 528020 - RNA, 22 nt, Human
gcugacucuuugacaaaaugca

SEQ ID NO: 528021 - RNA, 22 nt, Human
gggacccucaacaucugcuucu

SEQ ID NO: 528022 - RNA, 22 nt, Human
gaggaacccagcugggguugcc

SEQ ID NO: 528023 - RNA, 22 nt, Human
uaauguguugaauauuuguaca

SEQ ID NO: 528024 - RNA, 22 nt, Human
ugguccagacuuugaccucuca

SEQ ID NO: 528025 - RNA, 22 nt, Human
uuuucuuaggugcuccaaguag

SEQ ID NO: 528026 - RNA, 22 nt, Human
ugcaaauuuauauggugacugc

SEQ ID NO: 528027 - RNA, 22 nt, Human
ucagggugaaccaggcaggaau

SEQ ID NO: 528028 - RNA, 22 nt, Human
ugaggccugacagaccaagccu

SEQ ID NO: 528029 - RNA, 22 nt, Human
gccuucugauugcuggacugac

SEQ ID NO: 528030 - RNA, 22 nt, Human
uguaaguacauugaaacaucuu

SEQ ID NO: 528031 - RNA, 22 nt, Human
gaagccacccuccuuccagccc

SEQ ID NO: 528032 - RNA, 22 nt, Human
auuccaaaggcuggccuggagg

SEQ ID NO: 528033 - RNA, 18 nt, Human
cauuccaaguucuaccuc

SEQ ID NO: 528034 - RNA, 22 nt, Human
cucuucaaaugauuuccuuagg

SEQ ID NO: 528035 - RNA, 19 nt, Human
cugccuguuauggagagaa

SEQ ID NO: 528036 - RNA, 22 nt, Human
cagagacauguggccugcacgu

SEQ ID NO: 528037 - RNA, 23 nt, Human
gggagccauggguggucauggag

SEQ ID NO: 528038 - RNA, 22 nt, Human
gaggcucaguuaugucaucagg

SEQ ID NO: 528039 - RNA, 22 nt, Human
uugaauaauuaauuacacucag

SEQ ID NO: 528040 - RNA, 22 nt, Human
ucauccuuuugcaugggaaggc

SEQ ID NO: 528041 - RNA, 22 nt, Human
gcuuugcccaagggcccuaccc

SEQ ID NO: 528042 - RNA, 22 nt, Human
aaaggccaccaacaugaagcau

SEQ ID NO: 528043 - RNA, 22 nt, Human
gcagggcaucccugagcgggug

SEQ ID NO: 528044 - RNA, 22 nt, Human
acauuuagcuguacaaucuaug

SEQ ID NO: 528045 - RNA, 22 nt, Human
auuugaagucuucaugauuucu

SEQ ID NO: 528046 - RNA, 22 nt, Human
aaauacugguuuuggagaugcu

SEQ ID NO: 528047 - RNA, 18 nt, Human
ugcugggcauuaggcuua

SEQ ID NO: 528048 - RNA, 22 nt, Human
accugcaggggugcucucuggg

SEQ ID NO: 528049 - RNA, 22 nt, Human
acuuuacacaucuuuucucauu

SEQ ID NO: 528050 - RNA, 22 nt, Human
aaggacuaaugaauagaugaau

SEQ ID NO: 528051 - RNA, 22 nt, Human
uagggcucuggugggcucuguu

SEQ ID NO: 528052 - RNA, 22 nt, Human
ucagggcauccauugccuguug

SEQ ID NO: 528053 - RNA, 22 nt, Human
gcugggaggcagcaccuuuagc

SEQ ID NO: 528054 - RNA, 22 nt, Human
aggccugucuggggcucagcca

SEQ ID NO: 528055 - RNA, 22 nt, Human
acuguuuugugccuuaguuucc

SEQ ID NO: 528056 - RNA, 22 nt, Human
uuagcucagaaaauuuaaacuu

SEQ ID NO: 528057 - RNA, 22 nt, Human
ggagcugucuguagggcacagg

SEQ ID NO: 528058 - RNA, 22 nt, Human
uucaaacauucaaauaaaccgg

SEQ ID NO: 528059 - RNA, 22 nt, Human
uggugcugauaauggcaggauu

SEQ ID NO: 528060 - RNA, 22 nt, Human
ucuccccaaaggacucacucuc

SEQ ID NO: 528061 - RNA, 22 nt, Human
uuaagucauuucugauuauaga

SEQ ID NO: 528062 - RNA, 23 nt, Human
auuugaaacuuucuuguuuccag

SEQ ID NO: 528063 - RNA, 22 nt, Human
agugagguggggucacagggac

SEQ ID NO: 528064 - RNA, 22 nt, Human
cucaggaugcaauuccaucaag

SEQ ID NO: 528065 - RNA, 22 nt, Human
gaggccugcagcguggucccug

SEQ ID NO: 528066 - RNA, 22 nt, Human
guggccaauuuccaucuguaag

SEQ ID NO: 528067 - RNA, 22 nt, Human
cagcccugcacgcugccuccgc

SEQ ID NO: 528068 - RNA, 22 nt, Human
gaaugcuaagcaugugggaguu

SEQ ID NO: 528069 - RNA, 23 nt, Human
gccugccugaccugugcaaaguc

SEQ ID NO: 528070 - RNA, 22 nt, Human
ccucugugugugcaugcaugcg

SEQ ID NO: 528071 - RNA, 22 nt, Human
gagguucacaggcuaucacagu

SEQ ID NO: 528072 - RNA, 22 nt, Human
ccugggcugcucauggggauga

SEQ ID NO: 528073 - RNA, 21 nt, Human
ggcugcugggagagcugcgug

SEQ ID NO: 528074 - RNA, 22 nt, Human
uggaugagucugagauugggca

SEQ ID NO: 528075 - RNA, 22 nt, Human
gcaagcuggcuguuagaggaug

SEQ ID NO: 528076 - RNA, 22 nt, Human
auucuaaauguaauuuagaauu

SEQ ID NO: 528077 - RNA, 22 nt, Human
agucuagaggauggguccagau

SEQ ID NO: 528078 - RNA, 22 nt, Human
uuucuuuuccaauaucccuacu

SEQ ID NO: 528079 - RNA, 22 nt, Human
caggccagcagggccuccgugg

SEQ ID NO: 528080 - RNA, 22 nt, Human
gugccugggguugagcuaugaa

SEQ ID NO: 528081 - RNA, 22 nt, Human
aggcuaggcaugugcuaccaca

SEQ ID NO: 528082 - RNA, 22 nt, Human
uauguacagggauagaacuuga

SEQ ID NO: 528083 - RNA, 22 nt, Human
aagagucacuccauaaauccca

SEQ ID NO: 528084 - RNA, 22 nt, Human
cucccucugucuuguccagaaa

SEQ ID NO: 528085 - RNA, 22 nt, Human
agaaagggaugagguagcugcu

SEQ ID NO: 528086 - RNA, 22 nt, Human
ugugucagaaggcaauggggau

SEQ ID NO: 528087 - RNA, 22 nt, Human
aguguugucaaacggcucagca

SEQ ID NO: 528088 - RNA, 22 nt, Human
aggccucugcuggaaagaguug

SEQ ID NO: 528089 - RNA, 22 nt, Human
auuccagauguuacugaaaggc

SEQ ID NO: 528090 - RNA, 22 nt, Human
ugcaggcuccaugaggacaggc

SEQ ID NO: 528091 - RNA, 22 nt, Human
ggagggugcuuaaguuguguuu

SEQ ID NO: 528092 - RNA, 22 nt, Human
acauuugugggggaacaggaua

SEQ ID NO: 528093 - RNA, 22 nt, Human
ggugcaaaaguaaucacaguuu

SEQ ID NO: 528094 - RNA, 22 nt, Human
agcccucugcaaacaccugaua

SEQ ID NO: 528095 - RNA, 22 nt, Human
uucuggggcuaauacagagguc

SEQ ID NO: 528096 - RNA, 22 nt, Human
uguguuuuaucuauuguaucuu

SEQ ID NO: 528097 - RNA, 22 nt, Human
aaagcaauuacaaaagggauaa

SEQ ID NO: 528098 - RNA, 21 nt, Human
aaguaaaucagagaaauaacc

SEQ ID NO: 528099 - RNA, 22 nt, Human
aauaucaguauauuguaucagu

SEQ ID NO: 528100 - RNA, 22 nt, Human
gaaggcuguuucugguagugau

SEQ ID NO: 528101 - RNA, 22 nt, Human
aacaaaacauuugucuuguuuc

SEQ ID NO: 528102 - RNA, 22 nt, Human
ucugccugaggacugacaccag

SEQ ID NO: 528103 - RNA, 22 nt, Human
agcuggugcugaagcucuugag

SEQ ID NO: 528104 - RNA, 22 nt, Human
accuggcacacacuggggagug

SEQ ID NO: 528105 - RNA, 22 nt, Human
ggcacagcacaguggacccagg

SEQ ID NO: 528106 - RNA, 20 nt, Human
caguccaggcugcagcaucu

SEQ ID NO: 528107 - RNA, 22 nt, Human
uguggggaagaguaugacuugg

SEQ ID NO: 528108 - RNA, 22 nt, Human
aagcaaacaggagaagagcugu

SEQ ID NO: 528109 - RNA, 22 nt, Human
ugauguucuguauaucauauag

SEQ ID NO: 528110 - RNA, 22 nt, Human
uaaugaauaaacuugagaguca

SEQ ID NO: 528111 - RNA, 22 nt, Human
gcucugcugagauaucugggag

SEQ ID NO: 528112 - RNA, 21 nt, Human
aucugaaagguuaguguugag

SEQ ID NO: 528113 - RNA, 16 nt, Human
agcccugccguguacu

SEQ ID NO: 528114 - RNA, 22 nt, Human
uccucagggcggccuccgucuu

SEQ ID NO: 528115 - RNA, 22 nt, Human
uaaggccagcaugaaugcagca

SEQ ID NO: 528116 - RNA, 22 nt, Human
caaacauuuugagugguuucug

SEQ ID NO: 528117 - RNA, 22 nt, Human
uuuauucagcagcagcaguggu

SEQ ID NO: 528118 - RNA, 18 nt, Human
gcccaugguaaaugcugu

SEQ ID NO: 528119 - RNA, 22 nt, Human
aucaggauuacacggggaugcu

SEQ ID NO: 528120 - RNA, 22 nt, Human
acagaauuaucaggaaauguua

SEQ ID NO: 528121 - RNA, 22 nt, Human
cacacacucuuccuggcaccua

SEQ ID NO: 528122 - RNA, 22 nt, Human
augcaaaaguaacugugauuuu

SEQ ID NO: 528123 - RNA, 22 nt, Human
ugccagcacuucuggcugucug

SEQ ID NO: 528124 - RNA, 22 nt, Human
agggcucauugacauggaaaag

SEQ ID NO: 528125 - RNA, 22 nt, Human
acagagcaugauggaagaucga

SEQ ID NO: 528126 - RNA, 22 nt, Human
uucucaaggacaaaaugacaug

SEQ ID NO: 528127 - RNA, 22 nt, Human
ccuggcugcuuccucugccaug

SEQ ID NO: 528128 - RNA, 23 nt, Human
cacaacuaaucagaaucucuagg

SEQ ID NO: 528129 - RNA, 22 nt, Human
uuuacagagaauguacauaaag

SEQ ID NO: 528130 - RNA, 22 nt, Human
aaagcaguauaaguaacggaag

SEQ ID NO: 528131 - RNA, 23 nt, Human
gugugccaagcacugugccagga

SEQ ID NO: 528132 - RNA, 22 nt, Human
uguuauugagguuacuuauaag

SEQ ID NO: 528133 - RNA, 22 nt, Human
acagguggggcacuuggagccu

SEQ ID NO: 528134 - RNA, 22 nt, Human
uuggcucaccugucuacccaga

SEQ ID NO: 528135 - RNA, 22 nt, Human
gcagccugaggcccuuucuggc

SEQ ID NO: 528136 - RNA, 22 nt, Human
uuuccucugagugagcugggag

SEQ ID NO: 528137 - RNA, 22 nt, Human
ugcauuguugaccaguugugca

SEQ ID NO: 528138 - RNA, 22 nt, Human
uauauucauuuuaaagccaucu

SEQ ID NO: 528139 - RNA, 22 nt, Human
gggcagcagccacucauuuagc

SEQ ID NO: 528140 - RNA, 22 nt, Human
ugggaagauggagugacaggca

SEQ ID NO: 528141 - RNA, 22 nt, Human
cucuuaaagaauguuccagcug

SEQ ID NO: 528142 - RNA, 17 nt, Human
ucucuuucccuuucugc

SEQ ID NO: 528143 - RNA, 22 nt, Human
ucucugagguuguuuccagcac

SEQ ID NO: 528144 - RNA, 22 nt, Human
cacagcauaaugaaauauacuu

SEQ ID NO: 528145 - RNA, 22 nt, Human
cagcugccugucuggaggcaau

SEQ ID NO: 528146 - RNA, 22 nt, Human
gcagauggcgcaguggaaguuc

SEQ ID NO: 528147 - RNA, 22 nt, Human
ugcugagcgcauccggcggccg

SEQ ID NO: 528148 - RNA, 22 nt, Human
gcucuccaaacccuguggcuuu

SEQ ID NO: 528149 - RNA, 22 nt, Human
gagcaggcucugccuguguguc

SEQ ID NO: 528150 - RNA, 22 nt, Human
uucaaacuuaaggagcagcaga

SEQ ID NO: 528151 - RNA, 22 nt, Human
auauaguuggguuucauucuac

SEQ ID NO: 528152 - RNA, 22 nt, Human
guauuugauagauuucaaagga

SEQ ID NO: 528153 - RNA, 22 nt, Human
agagugggugaucucuguuguc

SEQ ID NO: 528154 - RNA, 22 nt, Human
uccuggcccacuaugccagcau

SEQ ID NO: 528155 - RNA, 22 nt, Human
aaauuuaaggaggugcucacuu

SEQ ID NO: 528156 - RNA, 21 nt, Human
ccuauugaauauaggaagauu

SEQ ID NO: 528157 - RNA, 23 nt, Human
ucugcucugaaguucggcugagc

SEQ ID NO: 528158 - RNA, 22 nt, Human
cuguucaugcugauucuguaug

SEQ ID NO: 528159 - RNA, 17 nt, Human
cuaaauacuugcguuuc

SEQ ID NO: 528160 - RNA, 22 nt, Human
auggggagagaagggcugagcu

SEQ ID NO: 528161 - RNA, 22 nt, Human
caggagaagguuuggagugcag

SEQ ID NO: 528162 - RNA, 22 nt, Human
ugaccaaaggugguuuauuugg

SEQ ID NO: 528163 - RNA, 22 nt, Human
ccagccuggguguuagaagaca

SEQ ID NO: 528164 - RNA, 22 nt, Human
gcugccacauuuucaggacuaa

SEQ ID NO: 528165 - RNA, 22 nt, Human
cagcugagaaauggggaaaggg

SEQ ID NO: 528166 - RNA, 22 nt, Human
gagcuagacagcaagggccugc

SEQ ID NO: 528167 - RNA, 22 nt, Human
gaaggcugucagagaggagggc

SEQ ID NO: 528168 - RNA, 22 nt, Human
cuggugagacucagggaugcuu

SEQ ID NO: 528169 - RNA, 21 nt, Human
ccuguucacagaucuguaacu

SEQ ID NO: 528170 - RNA, 22 nt, Human
aucaagaaaagugcuuucggcu

SEQ ID NO: 528171 - RNA, 22 nt, Human
ucaggaugaccacgagccucua

SEQ ID NO: 528172 - RNA, 21 nt, Human
ugcccacagcaaaugcagagg

SEQ ID NO: 528173 - RNA, 22 nt, Human
uagucucuggagacucuagggg

SEQ ID NO: 528174 - RNA, 22 nt, Human
uccuuccucggggacccagauc

SEQ ID NO: 528175 - RNA, 22 nt, Human
uugaaauagaugcgucagagau

SEQ ID NO: 528176 - RNA, 22 nt, Human
acugaguguaggacuuugaguu

SEQ ID NO: 528177 - RNA, 22 nt, Human
uguuaauauacuaaaauccacu

SEQ ID NO: 528178 - RNA, 22 nt, Human
uaaaugcaguuaguacuugcca

SEQ ID NO: 528179 - RNA, 22 nt, Human
ugaaguccuagaacuccuggua

SEQ ID NO: 528180 - RNA, 22 nt, Human
ugccuagcauaguauuugucac

SEQ ID NO: 528181 - RNA, 22 nt, Human
gggcuggagccagcuguggcug

SEQ ID NO: 528182 - RNA, 22 nt, Human
uugauagguuuuauguauaguu

SEQ ID NO: 528183 - RNA, 22 nt, Human
uucaacuagaggugauuuugcc

SEQ ID NO: 528184 - RNA, 22 nt, Human
uagcuagaaugcuucgugauau

SEQ ID NO: 528185 - RNA, 22 nt, Human
uccaggcucagcacuugcuacu

SEQ ID NO: 528186 - RNA, 21 nt, Human
uucaacaaagggaauaaguuu

SEQ ID NO: 528187 - RNA, 22 nt, Human
agggcacaucugcugggaaugg

SEQ ID NO: 528188 - RNA, 22 nt, Human
gagccaaggguugccauggaga

SEQ ID NO: 528189 - RNA, 22 nt, Human
uuuauggcacacaaauaucaaa

SEQ ID NO: 528190 - RNA, 22 nt, Human
gcuggaguuggcaaggcaugua

SEQ ID NO: 528191 - RNA, 22 nt, Human
cuuaauaaaugguagcuguuau

SEQ ID NO: 528192 - RNA, 23 nt, Human
uacaagguagcauuaguuucuuc

SEQ ID NO: 528193 - RNA, 22 nt, Human
accugccuucucaaggacauga

SEQ ID NO: 528194 - RNA, 22 nt, Human
aauuuucugaugaugaagcacg

SEQ ID NO: 528195 - RNA, 22 nt, Human
gagccucguggcggccacugcg

SEQ ID NO: 528196 - RNA, 22 nt, Human
aaauaaaggaacuguuuuccca

SEQ ID NO: 528197 - RNA, 22 nt, Human
ccgggccucgggacaccgggua

SEQ ID NO: 528198 - RNA, 20 nt, Human
aggggccuggaacaggccuu

SEQ ID NO: 528199 - RNA, 22 nt, Human
ucaaauaugugauagaagcuaa

SEQ ID NO: 528200 - RNA, 22 nt, Human
aaucaaaaccuacagagguaau

SEQ ID NO: 528201 - RNA, 22 nt, Human
ucccagagaagagcuggaugga

SEQ ID NO: 528202 - RNA, 22 nt, Human
uaacagaaaagaacugaguuug

SEQ ID NO: 528203 - RNA, 22 nt, Human
uacaguagacaauguuaguaug

SEQ ID NO: 528204 - RNA, 22 nt, Human
ugggcagacgggagcuugccuu

SEQ ID NO: 528205 - RNA, 22 nt, Human
gagaaccucuccacaagucugg

SEQ ID NO: 528206 - RNA, 22 nt, Human
gaaauucacuguauuucuuggg

SEQ ID NO: 528207 - RNA, 22 nt, Human
cugagggcccugaagcuuggca

SEQ ID NO: 528208 - RNA, 22 nt, Human
ugagcagaggccagcaccuggg

SEQ ID NO: 528209 - RNA, 22 nt, Human
uuuguagauucauugaacuuuu

SEQ ID NO: 528210 - RNA, 22 nt, Human
aucuuccuucacuuucucccac

SEQ ID NO: 528211 - RNA, 18 nt, Human
cuuuagcugucaucuuug

SEQ ID NO: 528212 - RNA, 22 nt, Human
aggucauuuccuuagaggcaga

SEQ ID NO: 528213 - RNA, 22 nt, Human
auuucacucuuaauugcuuccu

SEQ ID NO: 528214 - RNA, 22 nt, Human
agaagagccuggggaccauggc

SEQ ID NO: 528215 - RNA, 22 nt, Human
aaaugcagguucuugagccaag

SEQ ID NO: 528216 - RNA, 22 nt, Human
acagcuuuucaauucugcugag

SEQ ID NO: 528217 - RNA, 22 nt, Human
agcacacaucacuucugcucau

SEQ ID NO: 528218 - RNA, 22 nt, Human
acacacuucagauguaauuugu

SEQ ID NO: 528219 - RNA, 22 nt, Human
uucauucccuuauauuagcauu

SEQ ID NO: 528220 - RNA, 22 nt, Human
uacaguauuaugagugauugaa

SEQ ID NO: 528221 - RNA, 22 nt, Human
ucaugacaucuguuuaucucaa

SEQ ID NO: 528222 - RNA, 22 nt, Human
acaauagaguucucauaggaca

SEQ ID NO: 528223 - RNA, 22 nt, Human
uauggaaaguguuuucuucugu

SEQ ID NO: 528224 - RNA, 22 nt, Human
uguggucucguuauguugccca

SEQ ID NO: 528225 - RNA, 22 nt, Human
acagugauuauuaguugguggu

SEQ ID NO: 528226 - RNA, 22 nt, Human
uauauugcuagugguacuguaa

SEQ ID NO: 528227 - RNA, 22 nt, Human
auguucuuccuucaauuuggaa

SEQ ID NO: 528228 - RNA, 22 nt, Human
ccugccagggccuuggaagaaa

SEQ ID NO: 528229 - RNA, 22 nt, Human
gaaggccacaaaaaaugucaua

SEQ ID NO: 528230 - RNA, 22 nt, Human
agcacaaauauaaaaaugucug

SEQ ID NO: 528231 - RNA, 22 nt, Human
cuuuauguucaguacaaugcuu

SEQ ID NO: 528232 - RNA, 22 nt, Human
acacugcagaugaaagcauaag

SEQ ID NO: 528233 - RNA, 22 nt, Human
ggccuggaaugcuuuccuacca

SEQ ID NO: 528234 - RNA, 19 nt, Human
agcaguggagccaugccug

SEQ ID NO: 528235 - RNA, 20 nt, Human
ccaggcacugucccaugcag

SEQ ID NO: 528236 - RNA, 22 nt, Human
cucauuuacuguagaacaguua

SEQ ID NO: 528237 - RNA, 22 nt, Human
uaucauaaguuaauuaaacagu

SEQ ID NO: 528238 - RNA, 22 nt, Human
ccacugucugcaggccucagca

SEQ ID NO: 528239 - RNA, 22 nt, Human
agaagccaccagcugaggaaga

SEQ ID NO: 528240 - RNA, 22 nt, Human
ccagagcuccagggcuacagaa

SEQ ID NO: 528241 - RNA, 22 nt, Human
gaugaagccccaguguaaguaa

SEQ ID NO: 528242 - RNA, 22 nt, Human
gggagcugagcuggaagagaau

SEQ ID NO: 528243 - RNA, 22 nt, Human
ccacacagauaaguguuuucua

SEQ ID NO: 528244 - RNA, 22 nt, Human
gacaguuuuuaauccuuucaug

SEQ ID NO: 528245 - RNA, 22 nt, Human
gcagcaggcacggucucgacau

SEQ ID NO: 528246 - RNA, 20 nt, Human
cucucccagcacagcuuccu

SEQ ID NO: 528247 - RNA, 22 nt, Human
aauaaaggcaccauaaggcaaa

SEQ ID NO: 528248 - RNA, 22 nt, Human
uaauguguccugaaagcuucug

SEQ ID NO: 528249 - RNA, 22 nt, Human
uggcuuccacugugugcccccu

SEQ ID NO: 528250 - RNA, 22 nt, Human
gcugccuucaguucugauucau

SEQ ID NO: 528251 - RNA, 22 nt, Human
gccuggcaggggccugggagug

SEQ ID NO: 528252 - RNA, 22 nt, Human
uggagcugggguuugaaucugg

SEQ ID NO: 528253 - RNA, 22 nt, Human
uuuauucacuucagugccaaag

SEQ ID NO: 528254 - RNA, 22 nt, Human
aucauaauugcuccagugauau

SEQ ID NO: 528255 - RNA, 21 nt, Human
caggaugaugauaauucaugg

SEQ ID NO: 528256 - RNA, 22 nt, Human
ucaggauguuaauauagcauua

SEQ ID NO: 528257 - RNA, 21 nt, Human
guguuuccuguuuauggcuug

SEQ ID NO: 528258 - RNA, 20 nt, Human
ucaaagcacugccugucauc

SEQ ID NO: 528259 - RNA, 22 nt, Human
aggacucaucccugcuugucag

SEQ ID NO: 528260 - RNA, 23 nt, Human
acauuucaauacugagggucuga

SEQ ID NO: 528261 - RNA, 22 nt, Human
uccucugcuccaggcuggacuu

SEQ ID NO: 528262 - RNA, 22 nt, Human
ccucccuuggccauagccagcc

SEQ ID NO: 528263 - RNA, 22 nt, Human
gaagcaagugcaaggaagaggc

SEQ ID NO: 528264 - RNA, 22 nt, Human
uacaggcauguagcauggugau

SEQ ID NO: 528265 - RNA, 22 nt, Human
agcugccccaugagaggcaggu

SEQ ID NO: 528266 - RNA, 22 nt, Human
uccuccucuaucagacagugcc

SEQ ID NO: 528267 - RNA, 22 nt, Human
uagaaguuaaaggaauacagaa

SEQ ID NO: 528268 - RNA, 22 nt, Human
ccugcccagcuucaccucaggc

SEQ ID NO: 528269 - RNA, 22 nt, Human
agaaaugcauuagcacauauag

SEQ ID NO: 528270 - RNA, 22 nt, Human
ucuguaaagucuguguaaaguc

SEQ ID NO: 528271 - RNA, 22 nt, Human
guccaagagucaagaagggggc

SEQ ID NO: 528272 - RNA, 22 nt, Human
augcaguaaaauaggagguaau

SEQ ID NO: 528273 - RNA, 22 nt, Human
uacauugcuagaaauguauuuu

SEQ ID NO: 528274 - RNA, 22 nt, Human
agagcuguggauaguccuggau

SEQ ID NO: 528275 - RNA, 22 nt, Human
aaguauuucguucugaaaaagu

SEQ ID NO: 528276 - RNA, 22 nt, Human
agccuggagaagauguguauug

SEQ ID NO: 528277 - RNA, 22 nt, Human
ugcugggccucuucccuggaua

SEQ ID NO: 528278 - RNA, 22 nt, Human
caggccuugcgucccauggccu

SEQ ID NO: 528279 - RNA, 22 nt, Human
gcuggcagaauuucuucuugcu

SEQ ID NO: 528280 - RNA, 22 nt, Human
uguucuuaugaugaagcacuga

SEQ ID NO: 528281 - RNA, 22 nt, Human
aaugcacauguuguaauaaaua

SEQ ID NO: 528282 - RNA, 22 nt, Human
aguccagucucacucuuggcag

SEQ ID NO: 528283 - RNA, 22 nt, Human
gcugagacuggcagcaggaagu

SEQ ID NO: 528284 - RNA, 22 nt, Human
guggcagucaucaaggacagau

SEQ ID NO: 528285 - RNA, 22 nt, Human
cugagcugggaguggauagugg

SEQ ID NO: 528286 - RNA, 20 nt, Human
cagcccuccaguggaggcag

SEQ ID NO: 528287 - RNA, 22 nt, Human
ucuuagaaugucaacugauguu

SEQ ID NO: 528288 - RNA, 22 nt, Human
caucagaaucugagucucugcc

SEQ ID NO: 528289 - RNA, 22 nt, Human
ggcagcacugcagcuuguuggg

SEQ ID NO: 528290 - RNA, 21 nt, Human
cugcucuggggaccggcugug

SEQ ID NO: 528291 - RNA, 22 nt, Human
uaaagcaguguugggucggacg

SEQ ID NO: 528292 - RNA, 22 nt, Human
uggcagccacaucucguggauu

SEQ ID NO: 528293 - RNA, 22 nt, Human
ucuguucagguuucagagaacu

SEQ ID NO: 528294 - RNA, 22 nt, Human
aggcucagugauguaaaauaua

SEQ ID NO: 528295 - RNA, 22 nt, Human
cugccagccaggccagguaggc

SEQ ID NO: 528296 - RNA, 22 nt, Human
gcagcaggagaguuuguccugc

SEQ ID NO: 528297 - RNA, 22 nt, Human
aaucaaagaaugggcuaguugg

SEQ ID NO: 528298 - RNA, 22 nt, Human
gagccagcugagcugcacuguc

SEQ ID NO: 528299 - RNA, 22 nt, Human
aaggaagagcaaagaauuaugu

SEQ ID NO: 528300 - RNA, 22 nt, Human
ucccccacucuaaaggagccuu

SEQ ID NO: 528301 - RNA, 22 nt, Human
ggcaggcacauuugggggccgu

SEQ ID NO: 528302 - RNA, 22 nt, Human
aggagguguugauagaagguuu

SEQ ID NO: 528303 - RNA, 22 nt, Human
auuuacauuuauuugagaaggu

SEQ ID NO: 528304 - RNA, 22 nt, Human
ggcaguuucaucaggagaaaag

SEQ ID NO: 528305 - RNA, 22 nt, Human
agauuccagaucccaaaaauga

SEQ ID NO: 528306 - RNA, 17 nt, Human
agagauaaggcggagaa

SEQ ID NO: 528307 - RNA, 22 nt, Human
acauucuaugaagauaauuuua

SEQ ID NO: 528308 - RNA, 22 nt, Human
cuggcuucugggccagggcaga

SEQ ID NO: 528309 - RNA, 22 nt, Human
augcuuuggccaaugagaagug

SEQ ID NO: 528310 - RNA, 23 nt, Human
aagcugccuucgcaguuggucug

SEQ ID NO: 528311 - RNA, 22 nt, Human
cugcauguuuacauuuuugaga

SEQ ID NO: 528312 - RNA, 22 nt, Human
ucagaaaccccaacaauggaga

SEQ ID NO: 528313 - RNA, 23 nt, Human
gcacugggcucucagcaaggugu

SEQ ID NO: 528314 - RNA, 22 nt, Human
cuggccagagguuccucugccc

SEQ ID NO: 528315 - RNA, 22 nt, Human
acacaugagaaacaucaguugu

SEQ ID NO: 528316 - RNA, 22 nt, Human
cccagcuccaagggacagcgaa

SEQ ID NO: 528317 - RNA, 22 nt, Human
ggcuuuauauuguuugagcaga

SEQ ID NO: 528318 - RNA, 22 nt, Human
cagccaggccuggugaccaaag

SEQ ID NO: 528319 - RNA, 22 nt, Human
aaucaagucaaccaucaugugc

SEQ ID NO: 528320 - RNA, 22 nt, Human
acuggggaauggaacugggaau

SEQ ID NO: 528321 - RNA, 22 nt, Human
uggcagaguaggauggcccugu

SEQ ID NO: 528322 - RNA, 22 nt, Human
cauuuaauagaugcuguuucag

SEQ ID NO: 528323 - RNA, 22 nt, Human
aggagcuggaguccaggcaagu

SEQ ID NO: 528324 - RNA, 22 nt, Human
auucacaaagaagggaaguaca

SEQ ID NO: 528325 - RNA, 22 nt, Human
auaugguaagaguauauuuacu

SEQ ID NO: 528326 - RNA, 22 nt, Human
uuggaaggagucaaccagcuga

SEQ ID NO: 528327 - RNA, 22 nt, Human
gucacacucagaaugacuagag

SEQ ID NO: 528328 - RNA, 22 nt, Human
ugagccagccuugcagcugugc

SEQ ID NO: 528329 - RNA, 22 nt, Human
aaaugcauguagaauaauagag

SEQ ID NO: 528330 - RNA, 23 nt, Human
ggcacugaagcuacaauggugag

SEQ ID NO: 528331 - RNA, 21 nt, Human
uccagcucuuauguucaugaa

SEQ ID NO: 528332 - RNA, 22 nt, Human
aggcuuguggauuggagcgagu

SEQ ID NO: 528333 - RNA, 22 nt, Human
aagcagggugucuugacccaug

SEQ ID NO: 528334 - RNA, 22 nt, Human
uagggugccuuuuauugcugug

SEQ ID NO: 528335 - RNA, 19 nt, Human
uccuuugaauaucaguuga

SEQ ID NO: 528336 - RNA, 22 nt, Human
auuuggaaacaauuauauucuu

SEQ ID NO: 528337 - RNA, 22 nt, Human
agccuccaguagcugaagagac

SEQ ID NO: 528338 - RNA, 22 nt, Human
ucagcuuuuuacaugugaaaua

SEQ ID NO: 528339 - RNA, 22 nt, Human
gggcagugacaaaggggaugaa

SEQ ID NO: 528340 - RNA, 22 nt, Human
cucacagcugcuucaggaucca

SEQ ID NO: 528341 - RNA, 22 nt, Human
aaauaaguaguuuaguguugug

SEQ ID NO: 528342 - RNA, 22 nt, Human
cuggggacugaaggauguugcu

SEQ ID NO: 528343 - RNA, 22 nt, Human
aggagcugggcugcugcuggga

SEQ ID NO: 528344 - RNA, 21 nt, Human
ucauaaacuaguaucaaaguu

SEQ ID NO: 528345 - RNA, 22 nt, Human
ggcagaggaggggugaauuugc

SEQ ID NO: 528346 - RNA, 22 nt, Human
ggugggaaggggccagugugcg

SEQ ID NO: 528347 - RNA, 22 nt, Human
cuacaccuugaucuaacauuuu

SEQ ID NO: 528348 - RNA, 22 nt, Human
aggaugggccugggauaugcuu

SEQ ID NO: 528349 - RNA, 22 nt, Human
augcaguggcagcuccuggugu

SEQ ID NO: 528350 - RNA, 22 nt, Human
auugcugggaauauuuagccca

SEQ ID NO: 528351 - RNA, 22 nt, Human
agggcuagaguugagaugggga

SEQ ID NO: 528352 - RNA, 22 nt, Human
cuaugaaaugucagauucugca

SEQ ID NO: 528353 - RNA, 22 nt, Human
cuggacagugggcagaggagac

SEQ ID NO: 528354 - RNA, 22 nt, Human
cuucgauuuaauucuuaaccuu

SEQ ID NO: 528355 - RNA, 21 nt, Human
uccugcagaaugccuuccuac

SEQ ID NO: 528356 - RNA, 22 nt, Human
cugucugcuagaacaucuauac

SEQ ID NO: 528357 - RNA, 22 nt, Human
ccauuucauugccuguaaagug

SEQ ID NO: 528358 - RNA, 22 nt, Human
uaggccauuccuucucuugauc

SEQ ID NO: 528359 - RNA, 22 nt, Human
guguguccucaguaguggcaug

SEQ ID NO: 528360 - RNA, 22 nt, Human
ucuggcuccguguccgcuccca

SEQ ID NO: 528361 - RNA, 22 nt, Human
agacaggcuuugcuguauauca

SEQ ID NO: 528362 - RNA, 22 nt, Human
aaagaaguguugaauuugcaag

SEQ ID NO: 528363 - RNA, 22 nt, Human
ugagcugcaagaaaauuucagu

SEQ ID NO: 528364 - RNA, 22 nt, Human
agcuucuguucaucuuccaggc

SEQ ID NO: 528365 - RNA, 22 nt, Human
agagccuggucugagauaggac

SEQ ID NO: 528366 - RNA, 21 nt, Human
ugcucugguguuuuauuuaac

SEQ ID NO: 528367 - RNA, 22 nt, Human
gucucccaucguuugugaggaa

SEQ ID NO: 528368 - RNA, 22 nt, Human
ccagaggaguugaggcuuuggg

SEQ ID NO: 528369 - RNA, 22 nt, Human
uuuauugacccaaagcgagagu

SEQ ID NO: 528370 - RNA, 22 nt, Human
ucaagagacaggacguguuuca

SEQ ID NO: 528371 - RNA, 22 nt, Human
ugcagaagaaugagcuuggagu

SEQ ID NO: 528372 - RNA, 22 nt, Human
cuucuccucugaguccugggag

SEQ ID NO: 528373 - RNA, 22 nt, Human
uuucagugugagugucuuauuu

SEQ ID NO: 528374 - RNA, 22 nt, Human
ucacagcaacacuggggcagac

SEQ ID NO: 528375 - RNA, 22 nt, Human
cacagcuucuccuugauaucgc

SEQ ID NO: 528376 - RNA, 17 nt, Human
agugaggagauuggaag

SEQ ID NO: 528377 - RNA, 22 nt, Human
gucaggauuauaauccccaugg

SEQ ID NO: 528378 - RNA, 22 nt, Human
guguggcugccagccaagaggc

SEQ ID NO: 528379 - RNA, 22 nt, Human
gagggcucacugagaaagcagu

SEQ ID NO: 528380 - RNA, 22 nt, Human
aucaaagugauuuguaaacagg

SEQ ID NO: 528381 - RNA, 22 nt, Human
cagcucuguaaauuccuucauc

SEQ ID NO: 528382 - RNA, 22 nt, Human
auuugucuagugguauucacgu

SEQ ID NO: 528383 - RNA, 22 nt, Human
uucugagaggcagagcuuguga

SEQ ID NO: 528384 - RNA, 22 nt, Human
aggugggggcuguguccuugac

SEQ ID NO: 528385 - RNA, 22 nt, Human
ggcaauaaugacauuuuaaaaa

SEQ ID NO: 528386 - RNA, 22 nt, Human
ucuguucagcugccucagggua

SEQ ID NO: 528387 - RNA, 23 nt, Human
guuuucaacacaauaaauguaac

SEQ ID NO: 528388 - RNA, 20 nt, Human
ggcaggugcuguccccuccu

SEQ ID NO: 528389 - RNA, 22 nt, Human
agccaggaaccagcuacagucu

SEQ ID NO: 528390 - RNA, 22 nt, Human
auaaauagugugucauaaaguc

SEQ ID NO: 528391 - RNA, 22 nt, Human
gauguuucccguuaagagaaaa

SEQ ID NO: 528392 - RNA, 22 nt, Human
uucagauguggcuuugucaggc

SEQ ID NO: 528393 - RNA, 22 nt, Human
gaauguuuuuaggaauguuaug

SEQ ID NO: 528394 - RNA, 22 nt, Human
agcaccugcacaguggaggaaa

SEQ ID NO: 528395 - RNA, 22 nt, Human
uucaggauccccuugaugggcu

SEQ ID NO: 528396 - RNA, 22 nt, Human
cauuauguucaguagcuuaaaa

SEQ ID NO: 528397 - RNA, 22 nt, Human
augccaggaacaaacaguggug

SEQ ID NO: 528398 - RNA, 22 nt, Human
aauuugaaacauagucaccacu

SEQ ID NO: 528399 - RNA, 22 nt, Human
agcugggaugauaaccucaguc

SEQ ID NO: 528400 - RNA, 22 nt, Human
ccugcuggcugguagaguuccg

SEQ ID NO: 528401 - RNA, 22 nt, Human
agacagagauacuauguuguca

SEQ ID NO: 528402 - RNA, 22 nt, Human
acagcacuuauucagcacagug

SEQ ID NO: 528403 - RNA, 20 nt, Human
uauauuuucucuuuggccuu

SEQ ID NO: 528404 - RNA, 21 nt, Human
auccuugaucagaagagugcu

SEQ ID NO: 528405 - RNA, 22 nt, Human
gggucaggcucagcagggcagc

SEQ ID NO: 528406 - RNA, 22 nt, Human
aguaaaaucaccaucucuuugu

SEQ ID NO: 528407 - RNA, 22 nt, Human
uucacagggcagcagcugagcc

SEQ ID NO: 528408 - RNA, 17 nt, Human
ugaaacaccaagacugu

SEQ ID NO: 528409 - RNA, 22 nt, Human
ucagagaggcaauacuguuuaa

SEQ ID NO: 528410 - RNA, 22 nt, Human
agaaaauuacuccagagacaag

SEQ ID NO: 528411 - RNA, 19 nt, Human
uucaggauugacccuacug

SEQ ID NO: 528412 - RNA, 22 nt, Human
agccaggcagacucucuuucuu

SEQ ID NO: 528413 - RNA, 22 nt, Human
acagagccaaaaggacauagua

SEQ ID NO: 528414 - RNA, 22 nt, Human
uuucacaacguuguggugagag

SEQ ID NO: 528415 - RNA, 22 nt, Human
ccugcccuguguuuggggacua

SEQ ID NO: 528416 - RNA, 22 nt, Human
ugagcagauggaggcuucugca

SEQ ID NO: 528417 - RNA, 22 nt, Human
uugaaaaugguaagcaugauau

SEQ ID NO: 528418 - RNA, 22 nt, Human
gcaggagaacaaagcaagcugc

SEQ ID NO: 528419 - RNA, 22 nt, Human
ucagggaagacuucuuagagga

SEQ ID NO: 528420 - RNA, 22 nt, Human
uccagagucuccuguuguuguu

SEQ ID NO: 528421 - RNA, 20 nt, Human
agugggagagggcagacugc

SEQ ID NO: 528422 - RNA, 22 nt, Human
cugaaauuccauuucagccaca

SEQ ID NO: 528423 - RNA, 22 nt, Human
ccugucuggaacauggccuguu

SEQ ID NO: 528424 - RNA, 22 nt, Human
ggagcuguugcgcaugcgcucg

SEQ ID NO: 528425 - RNA, 22 nt, Human
caggucuguuuccaucagugcu

SEQ ID NO: 528426 - RNA, 22 nt, Human
aucuuugugaaucucaacuugg

SEQ ID NO: 528427 - RNA, 22 nt, Human
gagaagccgagucagcugagcc

SEQ ID NO: 528428 - RNA, 22 nt, Human
gcgggccaccuuggagagcgcu

SEQ ID NO: 528429 - RNA, 20 nt, Human
cugggcugcccagcuauggg

SEQ ID NO: 528430 - RNA, 22 nt, Human
ugguaucagagccaucuguauu

SEQ ID NO: 528431 - RNA, 22 nt, Human
uguuuacaaggaguuuauauug

SEQ ID NO: 528432 - RNA, 22 nt, Human
agcagguggauuuagacgggag

SEQ ID NO: 528433 - RNA, 22 nt, Human
ugccaggcaggacccuagaacc

SEQ ID NO: 528434 - RNA, 22 nt, Human
agggcaugaagcaguggacagc

SEQ ID NO: 528435 - RNA, 22 nt, Human
uggaaaaaacccagacucuaga

SEQ ID NO: 528436 - RNA, 22 nt, Human
uggagcucaaaggccuguggga

SEQ ID NO: 528437 - RNA, 22 nt, Human
aaugaugguauugaugagcuaa

SEQ ID NO: 528438 - RNA, 22 nt, Human
uucucuaauggugaugauuaga

SEQ ID NO: 528439 - RNA, 19 nt, Human
ccagagacauuggcaucuu

SEQ ID NO: 528440 - RNA, 22 nt, Human
uaaagcauaaugaauaucuaga

SEQ ID NO: 528441 - RNA, 23 nt, Human
ugcauuauccucucugaagacca

SEQ ID NO: 528442 - RNA, 22 nt, Human
aaauuccauuaugauaauuucg

SEQ ID NO: 528443 - RNA, 22 nt, Human
ccagcuaguuggguauuauaag

SEQ ID NO: 528444 - RNA, 22 nt, Human
uugcauuguugcaaugaaguau

SEQ ID NO: 528445 - RNA, 22 nt, Human
ccagaugguccagagucuagcc

SEQ ID NO: 528446 - RNA, 18 nt, Human
ucauucauuaaacuuggc

SEQ ID NO: 528447 - RNA, 22 nt, Human
acuugaaagaaguuuccuuaaa

SEQ ID NO: 528448 - RNA, 22 nt, Human
ucaguuuuuguuugccagauag

SEQ ID NO: 528449 - RNA, 22 nt, Human
acaggcagcgucauugcugcuc

SEQ ID NO: 528450 - RNA, 22 nt, Human
acacaguaugaaaagucuaguu

SEQ ID NO: 528451 - RNA, 22 nt, Human
gagaugagugggggaucucuca

SEQ ID NO: 528452 - RNA, 21 nt, Human
aguuggaggcaguuuggcaau

SEQ ID NO: 528453 - RNA, 22 nt, Human
gcccaugcucucaggcgggccu

SEQ ID NO: 528454 - RNA, 22 nt, Human
agagucugaggcagcugcagcc

SEQ ID NO: 528455 - RNA, 22 nt, Human
acagugucuccugguacccagu

SEQ ID NO: 528456 - RNA, 22 nt, Human
agugagggaugaagaacugcgg

SEQ ID NO: 528457 - RNA, 22 nt, Human
aacaugucuggguauucacaag

SEQ ID NO: 528458 - RNA, 22 nt, Human
agggcucccgcgguguccggga

SEQ ID NO: 528459 - RNA, 22 nt, Human
gcacagggcccugugcguaggu

SEQ ID NO: 528460 - RNA, 22 nt, Human
uugacaauguccuuugaauuuc

SEQ ID NO: 528461 - RNA, 22 nt, Human
ccagaugguuugcaugggaggg

SEQ ID NO: 528462 - RNA, 22 nt, Human
ggcaguguccuugcagcucuac

SEQ ID NO: 528463 - RNA, 20 nt, Human
ccagagaguagguuagugau

SEQ ID NO: 528464 - RNA, 22 nt, Human
cccuucucuuucacucacuauu

SEQ ID NO: 528465 - RNA, 22 nt, Human
uuugaauaucacaaacuuucaa

SEQ ID NO: 528466 - RNA, 22 nt, Human
gagcugagccuggguggaccgc

SEQ ID NO: 528467 - RNA, 22 nt, Human
agaggggacagccaccugcccg

SEQ ID NO: 528468 - RNA, 22 nt, Human
auccuucagcugcccuguuacc

SEQ ID NO: 528469 - RNA, 22 nt, Human
uauuugagcgaagcaguguuuu

SEQ ID NO: 528470 - RNA, 22 nt, Human
aaauguguuucgaaaacuggug

SEQ ID NO: 528471 - RNA, 22 nt, Human
cucuucaaaagucuaauccuua

SEQ ID NO: 528472 - RNA, 21 nt, Human
cugugcuucuuccuaagccag

SEQ ID NO: 528473 - RNA, 21 nt, Human
aggcagaaagagcccaggcug

SEQ ID NO: 528474 - RNA, 22 nt, Human
gagucacauuaauuuaauuuua

SEQ ID NO: 528475 - RNA, 22 nt, Human
aauuuauucccgucucugggcu

SEQ ID NO: 528476 - RNA, 22 nt, Human
cacaguaacuggcguguaguaa

SEQ ID NO: 528477 - RNA, 22 nt, Human
uguguacaaauuuagccagcag

SEQ ID NO: 528478 - RNA, 22 nt, Human
aaacagugacugguacauaaua

SEQ ID NO: 528479 - RNA, 22 nt, Human
uauacaaugaguacauucuggg

SEQ ID NO: 528480 - RNA, 22 nt, Human
agggaagaaaauccaucgcugc

SEQ ID NO: 528481 - RNA, 22 nt, Human
aggcuucagguuugcuuugcag

SEQ ID NO: 528482 - RNA, 22 nt, Human
uguuuccaaaugguauaaagac

SEQ ID NO: 528483 - RNA, 22 nt, Human
gcuucugcagccaaagaagccg

SEQ ID NO: 528484 - RNA, 22 nt, Human
ugggccuguugggguugaguua

SEQ ID NO: 528485 - RNA, 22 nt, Human
caacuacaggaaaagucauuca

SEQ ID NO: 528486 - RNA, 22 nt, Human
gcucacugcaaccucugcuucc

SEQ ID NO: 528487 - RNA, 22 nt, Human
uccuggagauaauugcagugaa

SEQ ID NO: 528488 - RNA, 22 nt, Human
caauguuuguuagagcucuaga

SEQ ID NO: 528489 - RNA, 22 nt, Human
cagagacaguuucacagggucu

SEQ ID NO: 528490 - RNA, 22 nt, Human
ugcuucugaguugcaggacuug

SEQ ID NO: 528491 - RNA, 22 nt, Human
ugguggcaauguccuggagaag

SEQ ID NO: 528492 - RNA, 22 nt, Human
cuuaauuuaaaauaguucaggc

SEQ ID NO: 528493 - RNA, 22 nt, Human
aagcagaggguauggccagguu

SEQ ID NO: 528494 - RNA, 22 nt, Human
gaguucaauuuccagcuguucu

SEQ ID NO: 528495 - RNA, 22 nt, Human
ucuguuccaguagaaaggugca

SEQ ID NO: 528496 - RNA, 22 nt, Human
agggcuccaaggaaguguagcu

SEQ ID NO: 528497 - RNA, 19 nt, Human
aucugccuguuaucacaua

SEQ ID NO: 528498 - RNA, 18 nt, Human
ggcucaggcuauccuaac

SEQ ID NO: 528499 - RNA, 22 nt, Human
auuaaauuggacgcugggggaa

SEQ ID NO: 528500 - RNA, 22 nt, Human
gccuggaaugcaaugugacgaa

SEQ ID NO: 528501 - RNA, 22 nt, Human
ucagggacuaggugcugccuga

SEQ ID NO: 528502 - RNA, 22 nt, Human
uagccaggcgaggucagugucg

SEQ ID NO: 528503 - RNA, 22 nt, Human
ccuggagcuuggucacgcugcg

SEQ ID NO: 528504 - RNA, 22 nt, Human
gaagaaggguaaggaguguuga

SEQ ID NO: 528505 - RNA, 22 nt, Human
aaagcaauggaugagaaucugu

SEQ ID NO: 528506 - RNA, 22 nt, Human
cacaggcuccggccuugcagcc

SEQ ID NO: 528507 - RNA, 22 nt, Human
uagcagcuuccagagagggcag

SEQ ID NO: 528508 - RNA, 22 nt, Human
agaugguucucagaaacucaac

SEQ ID NO: 528509 - RNA, 22 nt, Human
uggugagaaguuuugagauucu

SEQ ID NO: 528510 - RNA, 22 nt, Human
cagcagaacaguuaaagaaacc

SEQ ID NO: 528511 - RNA, 19 nt, Human
auauagcauuauucaauuu

SEQ ID NO: 528512 - RNA, 22 nt, Human
uccaggcccauggagcagagcu

SEQ ID NO: 528513 - RNA, 22 nt, Human
ugcuuuauaucucucuucuuag

SEQ ID NO: 528514 - RNA, 22 nt, Human
uccaguggcacuggagacuaga

SEQ ID NO: 528515 - RNA, 22 nt, Human
uggcagucuuguaggcaucucc

SEQ ID NO: 528516 - RNA, 22 nt, Human
aggcacugaccugcuuccuuga

SEQ ID NO: 528517 - RNA, 22 nt, Human
gcugaagcccacguggcuugua

SEQ ID NO: 528518 - RNA, 23 nt, Human
agcccugcugagacccagcuccc

SEQ ID NO: 528519 - RNA, 22 nt, Human
caauguuugaguaggagcauaa

SEQ ID NO: 528520 - RNA, 23 nt, Human
cucaacauccauucuugcccuuc

SEQ ID NO: 528521 - RNA, 21 nt, Human
cagaggcagguccugggacgg

SEQ ID NO: 528522 - RNA, 22 nt, Human
auagcaaaaggcaccagaguga

SEQ ID NO: 528523 - RNA, 22 nt, Human
ucuggagcuggagggcaaggca

SEQ ID NO: 528524 - RNA, 22 nt, Human
ggaaggggagcuggaaagggua

SEQ ID NO: 528525 - RNA, 22 nt, Human
uggcccuguucuguaccucaua

SEQ ID NO: 528526 - RNA, 22 nt, Human
aagaagcauggcuguagauucc

SEQ ID NO: 528527 - RNA, 22 nt, Human
ucccaaggugcucggcaacagg

SEQ ID NO: 528528 - RNA, 22 nt, Human
cacaucauguuaauucauuaca

SEQ ID NO: 528529 - RNA, 17 nt, Human
ccauacugacauauuga

SEQ ID NO: 528530 - RNA, 22 nt, Human
acacucucagcuuuucaacuua

SEQ ID NO: 528531 - RNA, 22 nt, Human
agaaguuaccacauacuucucu

SEQ ID NO: 528532 - RNA, 20 nt, Human
cauuaugguugggcacagug

SEQ ID NO: 528533 - RNA, 22 nt, Human
agagcagcguuuguggaacacu

SEQ ID NO: 528534 - RNA, 22 nt, Human
acaguacaccacuguguacagu

SEQ ID NO: 528535 - RNA, 22 nt, Human
guaaacaugcuguguacucagc

SEQ ID NO: 528536 - RNA, 22 nt, Human
uuuagaaauucaucuauggccu

SEQ ID NO: 528537 - RNA, 22 nt, Human
uucuuuucuuggcaggaguaga

SEQ ID NO: 528538 - RNA, 17 nt, Human
ugggguguugaaggguu

SEQ ID NO: 528539 - RNA, 22 nt, Human
ccucagaccccugcugagcuuc

SEQ ID NO: 528540 - RNA, 22 nt, Human
ucauuauaaacauaugcuaaag

SEQ ID NO: 528541 - RNA, 22 nt, Human
ugcauacacacaucaaauguuu

SEQ ID NO: 528542 - RNA, 22 nt, Human
cuacaucacuuaauucuuagaa

SEQ ID NO: 528543 - RNA, 22 nt, Human
aggcagccaguucagguuucuu

SEQ ID NO: 528544 - RNA, 22 nt, Human
cauguguagguauacaaaauuc

SEQ ID NO: 528545 - RNA, 22 nt, Human
ccuugcaggggaacaggcagug

SEQ ID NO: 528546 - RNA, 22 nt, Human
cgcugccaggauccccugccgg

SEQ ID NO: 528547 - RNA, 22 nt, Human
agugguggagagaugaggacac

SEQ ID NO: 528548 - RNA, 22 nt, Human
caggcagccaggggaccugucc

SEQ ID NO: 528549 - RNA, 22 nt, Human
ccaguguuuccccagaagagag

SEQ ID NO: 528550 - RNA, 22 nt, Human
cuauuagguaugcagccuauuu

SEQ ID NO: 528551 - RNA, 22 nt, Human
auggccagcccuucccgcagcu

SEQ ID NO: 528552 - RNA, 22 nt, Human
cacagggccacuuucccaguaa

SEQ ID NO: 528553 - RNA, 22 nt, Human
gcugaagcugcagcaggaggaa

SEQ ID NO: 528554 - RNA, 22 nt, Human
acacauacauggggaagaugag

SEQ ID NO: 528555 - RNA, 22 nt, Human
gggaagaagacauggugaaggc

SEQ ID NO: 528556 - RNA, 22 nt, Human
accauuaaagagauccugggga

SEQ ID NO: 528557 - RNA, 20 nt, Human
aacacagauaccaaagguug

SEQ ID NO: 528558 - RNA, 20 nt, Human
uucuaaacuguuaggcuugc

SEQ ID NO: 528559 - RNA, 22 nt, Human
auguuuaaggaacugguuugcu

SEQ ID NO: 528560 - RNA, 22 nt, Human
ucauuucuauugcuacugucug

SEQ ID NO: 528561 - RNA, 22 nt, Human
caggcugccuggaagaggacug

SEQ ID NO: 528562 - RNA, 22 nt, Human
uauacacaaggugugcauuugu

SEQ ID NO: 528563 - RNA, 22 nt, Human
ugcagcauugcaaagcagucuu

SEQ ID NO: 528564 - RNA, 22 nt, Human
gggcagcugcagggauggugac

SEQ ID NO: 528565 - RNA, 22 nt, Human
aucuacaggauuuuacagaguu

SEQ ID NO: 528566 - RNA, 22 nt, Human
ucugaaaucuguaagcacuagc

SEQ ID NO: 528567 - RNA, 19 nt, Human
gcuucccaccagccagccc

SEQ ID NO: 528568 - RNA, 22 nt, Human
uuuauuauucucuggagaaugu

SEQ ID NO: 528569 - RNA, 22 nt, Human
cuuccugcauugugccagaguu

SEQ ID NO: 528570 - RNA, 22 nt, Human
ugcugguggagaaaguggaggu

SEQ ID NO: 528571 - RNA, 22 nt, Human
gagucugagucuaauggcccca

SEQ ID NO: 528572 - RNA, 22 nt, Human
uccugggaccaggcaccuacug

SEQ ID NO: 528573 - RNA, 22 nt, Human
cugggccuagaggaagcugaca

SEQ ID NO: 528574 - RNA, 22 nt, Human
gacuauuuaguuucagauuagu

SEQ ID NO: 528575 - RNA, 20 nt, Human
ugucagugccugaggcacag

SEQ ID NO: 528576 - RNA, 22 nt, Human
uucacauuucauaccacagcuu

SEQ ID NO: 528577 - RNA, 22 nt, Human
ggccuugguaaagggaugcaug

SEQ ID NO: 528578 - RNA, 22 nt, Human
gagcugcagaguaaccuuugca

SEQ ID NO: 528579 - RNA, 22 nt, Human
augaaaugugaaugcuuuucau

SEQ ID NO: 528580 - RNA, 22 nt, Human
aaauuaagaguaacucuguaga

SEQ ID NO: 528581 - RNA, 22 nt, Human
cugggcugcagcgggagcgacg

SEQ ID NO: 528582 - RNA, 19 nt, Human
ucccuuccugucgggcucc

SEQ ID NO: 528583 - RNA, 22 nt, Human
guccugguuuucacagaccuuu

SEQ ID NO: 528584 - RNA, 22 nt, Human
gacuucagauauuuuuuaaguu

SEQ ID NO: 528585 - RNA, 22 nt, Human
aaguucaaucagaugaaaaagc

SEQ ID NO: 528586 - RNA, 20 nt, Human
gucucaaguaucucacaguc

SEQ ID NO: 528587 - RNA, 22 nt, Human
acagagcuucccagccugagca

SEQ ID NO: 528588 - RNA, 22 nt, Human
aaggaagggaaauagugauguc

SEQ ID NO: 528589 - RNA, 22 nt, Human
ccagguggcccugcccuacucu

SEQ ID NO: 528590 - RNA, 22 nt, Human
aaagucaucuguccuaggcucu

SEQ ID NO: 528591 - RNA, 22 nt, Human
acccugccgugggcugcuugug

SEQ ID NO: 528592 - RNA, 22 nt, Human
aggcaacacuugcauuuuuuag

SEQ ID NO: 528593 - RNA, 22 nt, Human
gcucugucuucagcacacagua

SEQ ID NO: 528594 - RNA, 22 nt, Human
ccuggcuccugccucugcaggg

SEQ ID NO: 528595 - RNA, 22 nt, Human
cucuggacacuggcaugggguc

SEQ ID NO: 528596 - RNA, 22 nt, Human
ucaguaaaugaaugaauauaug

SEQ ID NO: 528597 - RNA, 20 nt, Human
uaggacaggcagccgagggg

SEQ ID NO: 528598 - RNA, 22 nt, Human
caaggcugcuggcuucugagcu

SEQ ID NO: 528599 - RNA, 22 nt, Human
acaguguucacuuaacaaugga

SEQ ID NO: 528600 - RNA, 22 nt, Human
ggcuuuaugcagggauagaaau

SEQ ID NO: 528601 - RNA, 22 nt, Human
aagauuuccauuucuagcucau

SEQ ID NO: 528602 - RNA, 22 nt, Human
acagaugguagcauuauguugg

SEQ ID NO: 528603 - RNA, 22 nt, Human
acuaaaugaacuauuaauacuu

SEQ ID NO: 528604 - RNA, 22 nt, Human
aaggugaacugguaaugacaga

SEQ ID NO: 528605 - RNA, 22 nt, Human
uguaaaaccaaaucaaucuagu

SEQ ID NO: 528606 - RNA, 22 nt, Human
uugcaaggguguuuugaggugu

SEQ ID NO: 528607 - RNA, 19 nt, Human
gcaucagagcagaaggggu

SEQ ID NO: 528608 - RNA, 20 nt, Human
acauguacuaaugaauacag

SEQ ID NO: 528609 - RNA, 22 nt, Human
aggcugaguuucucauucucgc

SEQ ID NO: 528610 - RNA, 22 nt, Human
gaucaacaacuuuugaauagcu

SEQ ID NO: 528611 - RNA, 22 nt, Human
uuguacuuacauuuuaaagcua

SEQ ID NO: 528612 - RNA, 22 nt, Human
gcugucacaaauauuucucagc

SEQ ID NO: 528613 - RNA, 22 nt, Human
ugaaauuagaaauauguauggg

SEQ ID NO: 528614 - RNA, 22 nt, Human
acaaggaacaagcauguaguuu

SEQ ID NO: 528615 - RNA, 22 nt, Human
uugaagcaaauucugugcagua

SEQ ID NO: 528616 - RNA, 22 nt, Human
agcugcuacugcucugccagag

SEQ ID NO: 528617 - RNA, 22 nt, Human
cuuugaucuacucacuaaacaa

SEQ ID NO: 528618 - RNA, 22 nt, Human
cagggccuucguaaguguccgg

SEQ ID NO: 528619 - RNA, 22 nt, Human
caaagguauaaguuaauauaca

SEQ ID NO: 528620 - RNA, 22 nt, Human
gugguggucaccaaauugaggg

SEQ ID NO: 528621 - RNA, 22 nt, Human
ucuggcuccacaccucacugca

SEQ ID NO: 528622 - RNA, 22 nt, Human
uucuguuugccauauauaguag

SEQ ID NO: 528623 - RNA, 22 nt, Human
ggugaggguaaauauaggcaaa

SEQ ID NO: 528624 - RNA, 22 nt, Human
ggcucagcgcgcugggagggag

SEQ ID NO: 528625 - RNA, 22 nt, Human
ugcuggcuccaaccuggcaucu

SEQ ID NO: 528626 - RNA, 22 nt, Human
ggcagcagggcugucucccuac

SEQ ID NO: 528627 - RNA, 19 nt, Human
ccauggcaaugaucugaug

SEQ ID NO: 528628 - RNA, 22 nt, Human
acguuuucuagagaauaugcag

SEQ ID NO: 528629 - RNA, 22 nt, Human
uugcaaauauuguuuaccuuuc

SEQ ID NO: 528630 - RNA, 22 nt, Human
aucacaaaggguuuucucugag

SEQ ID NO: 528631 - RNA, 19 nt, Human
ucucagaggaaaaauugcu

SEQ ID NO: 528632 - RNA, 22 nt, Human
aggucaaguuuagauagaguua

SEQ ID NO: 528633 - RNA, 22 nt, Human
ucaggcuggaaugcaguggggc

SEQ ID NO: 528634 - RNA, 22 nt, Human
ucauggaagagguauuuuuugu

SEQ ID NO: 528635 - RNA, 22 nt, Human
ucagaauuggaacgugaagauu

SEQ ID NO: 528636 - RNA, 22 nt, Human
augaguucaauuguuucaguca

SEQ ID NO: 528637 - RNA, 22 nt, Human
gccagguggcugagugacugag

SEQ ID NO: 528638 - RNA, 22 nt, Human
ggcagugagaggucuccugguc

SEQ ID NO: 528639 - RNA, 22 nt, Human
ucuacugugguccuuguaacca

SEQ ID NO: 528640 - RNA, 23 nt, Human
agaaaucaucuccaccccauguc

SEQ ID NO: 528641 - RNA, 22 nt, Human
agaacagcaguuaugguucauu

SEQ ID NO: 528642 - RNA, 21 nt, Human
ggcugggucaugcagcuggcc

SEQ ID NO: 528643 - RNA, 22 nt, Human
cagauaaaggcuuacuaguagu

SEQ ID NO: 528644 - RNA, 22 nt, Human
aggagcagaacuguuguggagg

SEQ ID NO: 528645 - RNA, 22 nt, Human
uucauauauaugcacuacguac

SEQ ID NO: 528646 - RNA, 22 nt, Human
cugggccugggaggccaggucu

SEQ ID NO: 528647 - RNA, 22 nt, Human
aauuaaaagauaacccaugagu

SEQ ID NO: 528648 - RNA, 22 nt, Human
cuguccuccggccaccuacagu

SEQ ID NO: 528649 - RNA, 22 nt, Human
acaggggauugauuggaagucu

SEQ ID NO: 528650 - RNA, 22 nt, Human
aucugccugcaguggagguggg

SEQ ID NO: 528651 - RNA, 22 nt, Human
aucaagaacuuauuuuggaaau

SEQ ID NO: 528652 - RNA, 22 nt, Human
gcucaggagcucuugguggcgc

SEQ ID NO: 528653 - RNA, 22 nt, Human
aggcagugcagaguccucuucu

SEQ ID NO: 528654 - RNA, 22 nt, Human
ugacauuuuuauaagagucaaa

SEQ ID NO: 528655 - RNA, 22 nt, Human
auuauuaggacuacugggguug

SEQ ID NO: 528656 - RNA, 22 nt, Human
cacaauuuccuugcuucacuuu

SEQ ID NO: 528657 - RNA, 22 nt, Human
agggccugucagcgguguccug

SEQ ID NO: 528658 - RNA, 22 nt, Human
gaggaaaauauucagggagguu

SEQ ID NO: 528659 - RNA, 22 nt, Human
ucucugagaagcugaggcuggg

SEQ ID NO: 528660 - RNA, 22 nt, Human
caugcagugccucuggauucuu

SEQ ID NO: 528661 - RNA, 22 nt, Human
cugccugccacguucagcugua

SEQ ID NO: 528662 - RNA, 22 nt, Human
uacaaagugacaagcucugcug

SEQ ID NO: 528663 - RNA, 22 nt, Human
uaaagacaugcaaagucuaauu

SEQ ID NO: 528664 - RNA, 22 nt, Human
acucuugucucaacuuuuguau

SEQ ID NO: 528665 - RNA, 23 nt, Human
aaaaucauuaauuuacccugaaa

SEQ ID NO: 528666 - RNA, 22 nt, Human
ccuucugcucccuggccagggc

SEQ ID NO: 528667 - RNA, 22 nt, Human
uucucuggaacugaaacaagau

SEQ ID NO: 528668 - RNA, 22 nt, Human
ccugguggcuucuggguggacg

SEQ ID NO: 528669 - RNA, 22 nt, Human
gugcagcagggggaagacagug

SEQ ID NO: 528670 - RNA, 21 nt, Human
gaggccucagccucagcuccu

SEQ ID NO: 528671 - RNA, 22 nt, Human
ugaugguuuuauuaauaggacc

SEQ ID NO: 528672 - RNA, 22 nt, Human
aguggcagaagccaagucugca

SEQ ID NO: 528673 - RNA, 22 nt, Human
aacugaaaccaaacacuuuagg

SEQ ID NO: 528674 - RNA, 23 nt, Human
cagaccuggcagucauccucaac

SEQ ID NO: 528675 - RNA, 22 nt, Human
ggggcacacuuuugguagauau

SEQ ID NO: 528676 - RNA, 22 nt, Human
ugaugcugcugggaguggugcu

SEQ ID NO: 528677 - RNA, 22 nt, Human
aagagccagugggaaagucuug

SEQ ID NO: 528678 - RNA, 22 nt, Human
gaaagcagcuaagucuuaugau

SEQ ID NO: 528679 - RNA, 22 nt, Human
gcucaggacuggaggagcgggg

SEQ ID NO: 528680 - RNA, 22 nt, Human
ggguguguuccuaaggaaacca

SEQ ID NO: 528681 - RNA, 22 nt, Human
gcacacagccagcugagggcua

SEQ ID NO: 528682 - RNA, 22 nt, Human
uccuagccuggugagaaacugu

SEQ ID NO: 528683 - RNA, 22 nt, Human
caucuacaggagaaugucacug

SEQ ID NO: 528684 - RNA, 21 nt, Human
aaaauguagacuuuucccuga

SEQ ID NO: 528685 - RNA, 22 nt, Human
aauaaagccuuauugauuuuac

SEQ ID NO: 528686 - RNA, 22 nt, Human
cagcccagccuugucucuuuau

SEQ ID NO: 528687 - RNA, 22 nt, Human
aggcucuguuauucuagagggc

SEQ ID NO: 528688 - RNA, 22 nt, Human
aguguacaagaccuuauuguug

SEQ ID NO: 528689 - RNA, 22 nt, Human
uaaaaaguugaaaggacuuauc

SEQ ID NO: 528690 - RNA, 23 nt, Human
uuacaacaguguccauauuugua

SEQ ID NO: 528691 - RNA, 22 nt, Human
ugcuuuaacauaagauaucuuu

SEQ ID NO: 528692 - RNA, 22 nt, Human
ugguaaaguguacugaauauga

SEQ ID NO: 528693 - RNA, 22 nt, Human
aguggcugacaacuggguuaac

SEQ ID NO: 528694 - RNA, 20 nt, Human
gcugaccccugcugucaugc

SEQ ID NO: 528695 - RNA, 22 nt, Human
gcuuuauuuugugagggauuac

SEQ ID NO: 528696 - RNA, 23 nt, Human
aggcugagcucucccagcuucag

SEQ ID NO: 528697 - RNA, 22 nt, Human
ugacaugcuuguuuuccuugaa

SEQ ID NO: 528698 - RNA, 22 nt, Human
ggcaggcaguguggugugaaac

SEQ ID NO: 528699 - RNA, 22 nt, Human
agcagcuuacauguggccuauc

SEQ ID NO: 528700 - RNA, 22 nt, Human
cuggccacugauuccuccccug

SEQ ID NO: 528701 - RNA, 22 nt, Human
gccagccuucuguggccugcaa

SEQ ID NO: 528702 - RNA, 22 nt, Human
gcccaggaagugacucagaugu

SEQ ID NO: 528703 - RNA, 18 nt, Human
gugggguguugugaggau

SEQ ID NO: 528704 - RNA, 22 nt, Human
cuggauuuaggacuaguccaag

SEQ ID NO: 528705 - RNA, 18 nt, Human
ccagagcuggcuccucgc

SEQ ID NO: 528706 - RNA, 22 nt, Human
gccagguguaguggccacaccu

SEQ ID NO: 528707 - RNA, 22 nt, Human
aauagcauaagaugucaaauag

SEQ ID NO: 528708 - RNA, 22 nt, Human
ccugccugucuuuauccccugu

SEQ ID NO: 528709 - RNA, 22 nt, Human
ggguggggccaggcaauuugca

SEQ ID NO: 528710 - RNA, 22 nt, Human
cugcugaugaccucaaacucuu

SEQ ID NO: 528711 - RNA, 22 nt, Human
aggucagaagugccagggaauu

SEQ ID NO: 528712 - RNA, 22 nt, Human
ugcaccccauuuuacauuuaca

SEQ ID NO: 528713 - RNA, 22 nt, Human
gccuggcacugggcuccuggcc

SEQ ID NO: 528714 - RNA, 22 nt, Human
uaauauaccaaacuguaauuuu

SEQ ID NO: 528715 - RNA, 23 nt, Human
agcagugaguaaacagauaggau

SEQ ID NO: 528716 - RNA, 22 nt, Human
uguuuuaaucucccauugcucu

SEQ ID NO: 528717 - RNA, 22 nt, Human
aucagaaaaaugagaagagcug

SEQ ID NO: 528718 - RNA, 22 nt, Human
aaauccuaaggagaauaugauu

SEQ ID NO: 528719 - RNA, 21 nt, Human
gugcugggacacagccaggcu

SEQ ID NO: 528720 - RNA, 23 nt, Human
aggcagguuugggcucuucuugu

SEQ ID NO: 528721 - RNA, 22 nt, Human
gugugcaggccacaggccaggg

SEQ ID NO: 528722 - RNA, 22 nt, Human
gcucugcuggagggaaagagaa

SEQ ID NO: 528723 - RNA, 22 nt, Human
ugucagugaguuaguugcaagu

SEQ ID NO: 528724 - RNA, 22 nt, Human
uaaaagagaauggauaacagag

SEQ ID NO: 528725 - RNA, 22 nt, Human
ggggcagagagaaggaagcuug

SEQ ID NO: 528726 - RNA, 22 nt, Human
guaacaaacgguuccaagaugc

SEQ ID NO: 528727 - RNA, 21 nt, Human
gucuuucuaccucuauguggc

SEQ ID NO: 528728 - RNA, 23 nt, Human
uucaaaacuggaaaaucagaugc

SEQ ID NO: 528729 - RNA, 22 nt, Human
aaacaacaugguggguguguag

SEQ ID NO: 528730 - RNA, 23 nt, Human
gcccauggagucuggaucuggcc

SEQ ID NO: 528731 - RNA, 23 nt, Human
uccucccaaauuucagccucauu

SEQ ID NO: 528732 - RNA, 22 nt, Human
gcucaggagcugacagccucaa

SEQ ID NO: 528733 - RNA, 22 nt, Human
agccucagugucaccaucuacc

SEQ ID NO: 528734 - RNA, 19 nt, Human
auaaggcaggaggaaauuu

SEQ ID NO: 528735 - RNA, 22 nt, Human
uuuccauauucugcgucugcca

SEQ ID NO: 528736 - RNA, 22 nt, Human
ugcccaagcagaggagugauuc

SEQ ID NO: 528737 - RNA, 22 nt, Human
gcguccagggaaggcccagcug

SEQ ID NO: 528738 - RNA, 22 nt, Human
ucuagggggacagcuggcugug

SEQ ID NO: 528739 - RNA, 22 nt, Human
uaacuucucugagccucauucc

SEQ ID NO: 528740 - RNA, 22 nt, Human
auguacauuuguaguaauauca

SEQ ID NO: 528741 - RNA, 22 nt, Human
acucccuguacuugccucucuu

SEQ ID NO: 528742 - RNA, 22 nt, Human
uaggcugagguugaugccaggg

SEQ ID NO: 528743 - RNA, 23 nt, Human
acucaaaauuuggcauuugagga

SEQ ID NO: 528744 - RNA, 22 nt, Human
gguggccaggccagcucuggcc

SEQ ID NO: 528745 - RNA, 22 nt, Human
cucuggcuuugcucaugcaucc

SEQ ID NO: 528746 - RNA, 22 nt, Human
auguuuaaucggcugccuuucc

SEQ ID NO: 528747 - RNA, 22 nt, Human
cagcugugcuagaagccacgaa

SEQ ID NO: 528748 - RNA, 21 nt, Human
gcuuccaagauggcaccuuga

SEQ ID NO: 528749 - RNA, 22 nt, Human
aauucuagcauugugaaaauau

SEQ ID NO: 528750 - RNA, 22 nt, Human
uucucagggucuggauggccug

SEQ ID NO: 528751 - RNA, 22 nt, Human
guuauuagaagugaaggauugu

SEQ ID NO: 528752 - RNA, 22 nt, Human
guuucacagggccauggaggaa

SEQ ID NO: 528753 - RNA, 18 nt, Human
uggcagggaggaaauaua

SEQ ID NO: 528754 - RNA, 22 nt, Human
caacaucaguccucaugagaca

SEQ ID NO: 528755 - RNA, 22 nt, Human
ccucuggucccagcucugcugc

SEQ ID NO: 528756 - RNA, 21 nt, Human
aaacugaccuugccugagaca

SEQ ID NO: 528757 - RNA, 22 nt, Human
aggcuucuacguggucccaggg

SEQ ID NO: 528758 - RNA, 22 nt, Human
uuuguguggcguuggccggcgg

SEQ ID NO: 528759 - RNA, 22 nt, Human
cagcucugaagaaaggugucua

SEQ ID NO: 528760 - RNA, 22 nt, Human
uugaaauaaggaagcucgaaau

SEQ ID NO: 528761 - RNA, 22 nt, Human
agugcacaccuuaguacaaagu

SEQ ID NO: 528762 - RNA, 22 nt, Human
uggcugaauaauauucuguugu

SEQ ID NO: 528763 - RNA, 22 nt, Human
gaaagacuuccuuugagaguac

SEQ ID NO: 528764 - RNA, 22 nt, Human
ggccugcuuuccgagccugcag

SEQ ID NO: 528765 - RNA, 22 nt, Human
ggguccagcgacagcaggcuca

SEQ ID NO: 528766 - RNA, 22 nt, Human
aucaaaguaguagguuuuggac

SEQ ID NO: 528767 - RNA, 22 nt, Human
agcagcauguugggaugugaaa

SEQ ID NO: 528768 - RNA, 22 nt, Human
acccugagggguauagcagaag

SEQ ID NO: 528769 - RNA, 18 nt, Human
uuugcuuuccuucuucag

SEQ ID NO: 528770 - RNA, 22 nt, Human
ugcuuuaucugugagaaccuga

SEQ ID NO: 528771 - RNA, 22 nt, Human
ugcagcugguuuagaacuagau

SEQ ID NO: 528772 - RNA, 22 nt, Human
uguauacaggauuacucauagc

SEQ ID NO: 528773 - RNA, 22 nt, Human
agguggguccuggcucugccau

SEQ ID NO: 528774 - RNA, 22 nt, Human
aauguuugagcaucuacaugcu

SEQ ID NO: 528775 - RNA, 22 nt, Human
uauauauucuuaaguaguguag

SEQ ID NO: 528776 - RNA, 22 nt, Human
cccucagcuucucccugcagcu

SEQ ID NO: 528777 - RNA, 22 nt, Human
ucaggcagaggauggggagcgu

SEQ ID NO: 528778 - RNA, 22 nt, Human
auacuuuggucacuauuauugg

SEQ ID NO: 528779 - RNA, 22 nt, Human
uccucagaugcucuuggacgcc

SEQ ID NO: 528780 - RNA, 22 nt, Human
augucccagcugagagacaacu

SEQ ID NO: 528781 - RNA, 21 nt, Human
uauuuauuaauuuguaaggcu

SEQ ID NO: 528782 - RNA, 22 nt, Human
auuuuucucucacacuuaccag

SEQ ID NO: 528783 - RNA, 22 nt, Human
gaagccaguguuugaagaauuu

SEQ ID NO: 528784 - RNA, 22 nt, Human
cugggccuuggauugacacugu

SEQ ID NO: 528785 - RNA, 22 nt, Human
caaaguuaucaacugcaacauu

SEQ ID NO: 528786 - RNA, 22 nt, Human
uggcucaguagcagugugguca

SEQ ID NO: 528787 - RNA, 22 nt, Human
cucugagggcugucaggaaagg

SEQ ID NO: 528788 - RNA, 22 nt, Human
cccagcauuucugggcugcacu

SEQ ID NO: 528789 - RNA, 22 nt, Human
cugcagggaccacaagcagguu

SEQ ID NO: 528790 - RNA, 22 nt, Human
uuucaguguuaugacuuucauu

SEQ ID NO: 528791 - RNA, 22 nt, Human
uuuccaaaggcuaaacucaguu

SEQ ID NO: 528792 - RNA, 22 nt, Human
uccucuggggcgugguccugga

SEQ ID NO: 528793 - RNA, 23 nt, Human
uugaaagguagcuggcagcuaga

SEQ ID NO: 528794 - RNA, 22 nt, Human
acauguaaacauuuacaguauu

SEQ ID NO: 528795 - RNA, 22 nt, Human
acagcagagacacucaggaggc

SEQ ID NO: 528796 - RNA, 22 nt, Human
gccuggcacauugcaguggauu

SEQ ID NO: 528797 - RNA, 22 nt, Human
ugugguggcuauucuggucuca

SEQ ID NO: 528798 - RNA, 22 nt, Human
uacauaguguuuugaagaauua

SEQ ID NO: 528799 - RNA, 22 nt, Human
uggcagucuucaucaguucugg

SEQ ID NO: 528800 - RNA, 19 nt, Human
guccaguguuuuccaguca

SEQ ID NO: 528801 - RNA, 22 nt, Human
gcugucugcaucucuagagcuu

SEQ ID NO: 528802 - RNA, 22 nt, Human
acagaacagaggguuuuagaau

SEQ ID NO: 528803 - RNA, 22 nt, Human
gcucccagcauugcuucccagg

SEQ ID NO: 528804 - RNA, 22 nt, Human
ggauaagaaaauuguaauaacu

SEQ ID NO: 528805 - RNA, 22 nt, Human
uacaacaggaauuucaacuuug

SEQ ID NO: 528806 - RNA, 22 nt, Human
cugcaggguuuuucaaggacaa

SEQ ID NO: 528807 - RNA, 22 nt, Human
cugagcugaaacuugagaggcu

SEQ ID NO: 528808 - RNA, 22 nt, Human
guccaaggaugcaggaugcugu

SEQ ID NO: 528809 - RNA, 22 nt, Human
ugaaagggguugaguuacagcu

SEQ ID NO: 528810 - RNA, 22 nt, Human
gagaccaggaaguacagcagcc

SEQ ID NO: 528811 - RNA, 22 nt, Human
guggggcuuccuggggcaaguu

SEQ ID NO: 528812 - RNA, 22 nt, Human
gcaguggauggccagcaggggc

SEQ ID NO: 528813 - RNA, 22 nt, Human
ggagccaggcauaucggggcac

SEQ ID NO: 528814 - RNA, 22 nt, Human
gcaaaaauuccagggacgacuc

SEQ ID NO: 528815 - RNA, 21 nt, Human
agaaaaaccagcauguuuuca

SEQ ID NO: 528816 - RNA, 22 nt, Human
ucuuucaauccauucauauguc

SEQ ID NO: 528817 - RNA, 22 nt, Human
aaccauuugcaguuacugagac

SEQ ID NO: 528818 - RNA, 22 nt, Human
uuuaccuaguauaaugcaaccu

SEQ ID NO: 528819 - RNA, 21 nt, Human
uucauucauggcauaauauag

SEQ ID NO: 528820 - RNA, 22 nt, Human
agacauuuuacauucuuccauu

SEQ ID NO: 528821 - RNA, 17 nt, Human
cagagucugucugcauc

SEQ ID NO: 528822 - RNA, 22 nt, Human
acauagaaccuggcacauagua

SEQ ID NO: 528823 - RNA, 22 nt, Human
uuugaacuguucuaggauuuaa

SEQ ID NO: 528824 - RNA, 22 nt, Human
ucugagagcucuggggccccuu

SEQ ID NO: 528825 - RNA, 22 nt, Human
gaaacaugucugacaauuuacc

SEQ ID NO: 528826 - RNA, 22 nt, Human
uuucauggcuaggacuagagug

SEQ ID NO: 528827 - RNA, 22 nt, Human
cagcagagaugagauuccuaua

SEQ ID NO: 528828 - RNA, 22 nt, Human
aaaugguguuucuaaugcuaga

SEQ ID NO: 528829 - RNA, 22 nt, Human
uggguggcggccugguucugag

SEQ ID NO: 528830 - RNA, 23 nt, Human
uuugaaaguaucaacucgccuga

SEQ ID NO: 528831 - RNA, 22 nt, Human
ucaacauuggaggcaacauuca

SEQ ID NO: 528832 - RNA, 20 nt, Human
agauguuuugaagucuugga

SEQ ID NO: 528833 - RNA, 18 nt, Human
caagagcugcuccuggcc

SEQ ID NO: 528834 - RNA, 22 nt, Human
uugcauguuauuuaaucuguau

SEQ ID NO: 528835 - RNA, 22 nt, Human
uugauauucccgauuuaaggua

SEQ ID NO: 528836 - RNA, 22 nt, Human
agcucagggcgaucugucucgg

SEQ ID NO: 528837 - RNA, 22 nt, Human
agaggaggcuggguccagauaa

SEQ ID NO: 528838 - RNA, 22 nt, Human
ggcccagaauacuuuguaaaau

SEQ ID NO: 528839 - RNA, 22 nt, Human
gcagcuguucagcuggccagau

SEQ ID NO: 528840 - RNA, 22 nt, Human
ucauauaaguuuaaaacuaucu

SEQ ID NO: 528841 - RNA, 22 nt, Human
gucuccugagccuugacugcaa

SEQ ID NO: 528842 - RNA, 22 nt, Human
uguacauacauagauauacaca

SEQ ID NO: 528843 - RNA, 22 nt, Human
ucaaucauucuugccauuuauu

SEQ ID NO: 528844 - RNA, 21 nt, Human
uagggcaggcauuggaagaga

SEQ ID NO: 528845 - RNA, 22 nt, Human
ucuggcucacuucaggcuucac

SEQ ID NO: 528846 - RNA, 22 nt, Human
cauacuuuuuagaucugccuuc

SEQ ID NO: 528847 - RNA, 22 nt, Human
uccagaccuagggcaccccagu

SEQ ID NO: 528848 - RNA, 22 nt, Human
ugacucuguaccugucugccuu

SEQ ID NO: 528849 - RNA, 22 nt, Human
uggcuuucucccccagcuucuc

SEQ ID NO: 528850 - RNA, 22 nt, Human
cugaggucaauuaaucaacaac

SEQ ID NO: 528851 - RNA, 22 nt, Human
ggacucuguuuuccugaucacu

SEQ ID NO: 528852 - RNA, 22 nt, Human
uguucucucuggcugccaguac

SEQ ID NO: 528853 - RNA, 22 nt, Human
acagugaugccgggcgagaaug

SEQ ID NO: 528854 - RNA, 22 nt, Human
uaagaccaauccuguguaccuc

SEQ ID NO: 528855 - RNA, 21 nt, Human
uucagcaguccucuagagaua

SEQ ID NO: 528856 - RNA, 22 nt, Human
agucaggauaugccuugugggc

SEQ ID NO: 528857 - RNA, 22 nt, Human
acuuuucuuaucagaaaggcca

SEQ ID NO: 528858 - RNA, 22 nt, Human
aaaaucuggcaacacuaaguuu

SEQ ID NO: 528859 - RNA, 22 nt, Human
ccugccuggcacauaguacucu

SEQ ID NO: 528860 - RNA, 22 nt, Human
gcuggccugcaaagcccggcug

SEQ ID NO: 528861 - RNA, 22 nt, Human
gaauuguagagggaacagaagc

SEQ ID NO: 528862 - RNA, 22 nt, Human
ggcugggccgcggcuacccaga

SEQ ID NO: 528863 - RNA, 22 nt, Human
acucuucaagggccuagaggug

SEQ ID NO: 528864 - RNA, 22 nt, Human
gggcagguacaagaugcuucuu

SEQ ID NO: 528865 - RNA, 22 nt, Human
ggcugccugugcccaggcacac

SEQ ID NO: 528866 - RNA, 22 nt, Human
agcuuuaugaggagaccuuagu

SEQ ID NO: 528867 - RNA, 22 nt, Human
guuacacaggaaaacauuagca

SEQ ID NO: 528868 - RNA, 22 nt, Human
gugggcaggcccuaggcgauuu

SEQ ID NO: 528869 - RNA, 22 nt, Human
ugaagcagcaccauuuuagagc

SEQ ID NO: 528870 - RNA, 22 nt, Human
agagccuguacuuuucugugaa

SEQ ID NO: 528871 - RNA, 22 nt, Human
ucucuggguuuuuguccuguac

SEQ ID NO: 528872 - RNA, 19 nt, Human
uguggccaugguucagcug

SEQ ID NO: 528873 - RNA, 22 nt, Human
ugggaagaugaggugccauggg

SEQ ID NO: 528874 - RNA, 22 nt, Human
ggggugggguuacucauugugc

SEQ ID NO: 528875 - RNA, 22 nt, Human
gcugggcuuguggccagcuggg

SEQ ID NO: 528876 - RNA, 20 nt, Human
gagggcaggcacccauuuca

SEQ ID NO: 528877 - RNA, 22 nt, Human
gagugguaguuucuagaggugu

SEQ ID NO: 528878 - RNA, 17 nt, Human
caacuucacaaacuguc

SEQ ID NO: 528879 - RNA, 22 nt, Human
caaggucagcgugaaguucugu

SEQ ID NO: 528880 - RNA, 22 nt, Human
aacugggcccagucugaguugg

SEQ ID NO: 528881 - RNA, 22 nt, Human
uaguggaggguguagcugcugg

SEQ ID NO: 528882 - RNA, 22 nt, Human
caggccuggggcuggcuuccag

SEQ ID NO: 528883 - RNA, 22 nt, Human
ucaaaguauaucccuucgaaac

SEQ ID NO: 528884 - RNA, 19 nt, Human
acauucccaucagcaaugu

SEQ ID NO: 528885 - RNA, 22 nt, Human
cuggcuuccaugcuguaguggc

SEQ ID NO: 528886 - RNA, 22 nt, Human
agcugggcuggagcuccaagcg

SEQ ID NO: 528887 - RNA, 22 nt, Human
ggcaugggagugagcaaccuua

SEQ ID NO: 528888 - RNA, 22 nt, Human
uuguaaggguuacaagaaaaca

SEQ ID NO: 528889 - RNA, 22 nt, Human
cacagcugccauggcugcacuu

SEQ ID NO: 528890 - RNA, 22 nt, Human
aaaugguaugaaaagagauuuc

SEQ ID NO: 528891 - RNA, 22 nt, Human
uuguuucagcuguaugcuaugu

SEQ ID NO: 528892 - RNA, 22 nt, Human
cagaccagaaggaagccgacaa

SEQ ID NO: 528893 - RNA, 22 nt, Human
uaacuuuuacuuaccaucugag

SEQ ID NO: 528894 - RNA, 22 nt, Human
ucaugcccagagcaguaaauua

SEQ ID NO: 528895 - RNA, 17 nt, Human
aaggccauuuccaccca

SEQ ID NO: 528896 - RNA, 22 nt, Human
cuucaagaagacagcagagcau

SEQ ID NO: 528897 - RNA, 22 nt, Human
ucagggcacugucaccugauau

SEQ ID NO: 528898 - RNA, 22 nt, Human
acagagguguuccagaccuagg

SEQ ID NO: 528899 - RNA, 22 nt, Human
caggguggcacaucacagcauu

SEQ ID NO: 528900 - RNA, 22 nt, Human
gcagagucaggauuccauccca

SEQ ID NO: 528901 - RNA, 22 nt, Human
caggccaaaauucaggcauucu

SEQ ID NO: 528902 - RNA, 22 nt, Human
agagaagagcaaugauaaauuu

SEQ ID NO: 528903 - RNA, 22 nt, Human
cacagggcagaggguccguggc

SEQ ID NO: 528904 - RNA, 19 nt, Human
cccucaggucugagcaguc

SEQ ID NO: 528905 - RNA, 22 nt, Human
ugggaagggucaacagcuggaa

SEQ ID NO: 528906 - RNA, 22 nt, Human
aaacaaugaaauucauucuuca

SEQ ID NO: 528907 - RNA, 22 nt, Human
aaguuuguuuuagucuaaugau

SEQ ID NO: 528908 - RNA, 23 nt, Human
cugugcugggucccaucuugggc

SEQ ID NO: 528909 - RNA, 22 nt, Human
gcaagcugaugugauagugaaa

SEQ ID NO: 528910 - RNA, 22 nt, Human
cagaguguuagcgcugguuggg

SEQ ID NO: 528911 - RNA, 22 nt, Human
uuaaggcugauaagucagauau

SEQ ID NO: 528912 - RNA, 22 nt, Human
uuccuggugguggugacagcac

SEQ ID NO: 528913 - RNA, 22 nt, Human
uauuggaaggaagcaagagagg

SEQ ID NO: 528914 - RNA, 21 nt, Human
ccauaauuuuguuucagaagu

SEQ ID NO: 528915 - RNA, 18 nt, Human
gugugcaguugcaggggu

SEQ ID NO: 528916 - RNA, 22 nt, Human
caacagaaaucaauuuucccau

SEQ ID NO: 528917 - RNA, 22 nt, Human
aggugccagaugcacagcugaa

SEQ ID NO: 528918 - RNA, 22 nt, Human
aauuaccaggauuuuucaguau

SEQ ID NO: 528919 - RNA, 22 nt, Human
agugucauuccagggacccucg

SEQ ID NO: 528920 - RNA, 22 nt, Human
ucauuuaucauuugugcuguag

SEQ ID NO: 528921 - RNA, 22 nt, Human
ggagagaacugaccugaaagga

SEQ ID NO: 528922 - RNA, 22 nt, Human
aaucgguugaacccaggaagug

SEQ ID NO: 528923 - RNA, 19 nt, Human
ggcugucuggcguguggau

SEQ ID NO: 528924 - RNA, 22 nt, Human
cagcacugcuucgcagccaggg

SEQ ID NO: 528925 - RNA, 22 nt, Human
uaaacgugcuucauauuuuuag

SEQ ID NO: 528926 - RNA, 22 nt, Human
cuauuucuaaaccuauaaguga

SEQ ID NO: 528927 - RNA, 22 nt, Human
cacccaggcuagagugcagugg

SEQ ID NO: 528928 - RNA, 22 nt, Human
ggcauagcggcucagcguccag

SEQ ID NO: 528929 - RNA, 15 nt, Human
cagucccagggaccc

SEQ ID NO: 528930 - RNA, 22 nt, Human
gaagcccagggcguggccgggc

SEQ ID NO: 528931 - RNA, 22 nt, Human
cagggccucuccuccaggaacu

SEQ ID NO: 528932 - RNA, 22 nt, Human
cccagaguauuugugauguuag

SEQ ID NO: 528933 - RNA, 22 nt, Human
ggcacuuuucuccccggucaug

SEQ ID NO: 528934 - RNA, 22 nt, Human
gaaauauugggacucagagcuu

SEQ ID NO: 528935 - RNA, 20 nt, Human
ugcagcuucaccugugucau

SEQ ID NO: 528936 - RNA, 22 nt, Human
cuucuggauuuauucauuccuu

SEQ ID NO: 528937 - RNA, 22 nt, Human
acagguggcagaagcauuuacu

SEQ ID NO: 528938 - RNA, 23 nt, Human
ggccuccuggucuaggcuagacu

SEQ ID NO: 528939 - RNA, 22 nt, Human
ugaggggauacgguacacauug

SEQ ID NO: 528940 - RNA, 22 nt, Human
cacaggaggaggugcccgggcc

SEQ ID NO: 528941 - RNA, 22 nt, Human
aguacaaaggcccuugauuacu

SEQ ID NO: 528942 - RNA, 22 nt, Human
accucugccaagaugugcuccc

SEQ ID NO: 528943 - RNA, 22 nt, Human
ggacagaaaccauaugagugua

SEQ ID NO: 528944 - RNA, 22 nt, Human
gaaguuagucuugaaguuaguc

SEQ ID NO: 528945 - RNA, 20 nt, Human
cccagccccuaccuguugcc

SEQ ID NO: 528946 - RNA, 22 nt, Human
ugcuauugugaacagugccaca

SEQ ID NO: 528947 - RNA, 22 nt, Human
uccaggcaaagggacuagcagg

SEQ ID NO: 528948 - RNA, 22 nt, Human
aagguuaaauagguauuuucca

SEQ ID NO: 528949 - RNA, 22 nt, Human
uucuccagagggcucugcagga

SEQ ID NO: 528950 - RNA, 22 nt, Human
augaagucugcacaugcaugug

SEQ ID NO: 528951 - RNA, 22 nt, Human
ucuaauccuugcuaccugggug

SEQ ID NO: 528952 - RNA, 22 nt, Human
uuugaaacaggugauucagcua

SEQ ID NO: 528953 - RNA, 22 nt, Human
uguaaacaguaggacuaaagag

SEQ ID NO: 528954 - RNA, 22 nt, Human
ucacaucuuauuagaguaucuc

SEQ ID NO: 528955 - RNA, 22 nt, Human
aagcgcagacacagagagugga

SEQ ID NO: 528956 - RNA, 22 nt, Human
aggcagggaccaguuguuuucu

SEQ ID NO: 528957 - RNA, 22 nt, Human
ccagcuggggaaguggggcaua

SEQ ID NO: 528958 - RNA, 22 nt, Human
ggaaaacaagagaaugauguuu

SEQ ID NO: 528959 - RNA, 18 nt, Human
cagucccaaaccuuagga

SEQ ID NO: 528960 - RNA, 22 nt, Human
guggaggaaaagaaguugggug

SEQ ID NO: 528961 - RNA, 22 nt, Human
gacaaagugcuaaaccacagag

SEQ ID NO: 528962 - RNA, 22 nt, Human
aaaggcaagcauuuauauagga

SEQ ID NO: 528963 - RNA, 22 nt, Human
aaucagaacuucucaggguggg

SEQ ID NO: 528964 - RNA, 22 nt, Human
agaggcccucucucuccugaug

SEQ ID NO: 528965 - RNA, 22 nt, Human
uuagaaaugauuucaccucuuu

SEQ ID NO: 528966 - RNA, 22 nt, Human
uaugugcaguuugcucuuaaca

SEQ ID NO: 528967 - RNA, 22 nt, Human
uuuccaaauaaggucacauucu

SEQ ID NO: 528968 - RNA, 22 nt, Human
gggagcuguaguccagauaccg

SEQ ID NO: 528969 - RNA, 22 nt, Human
guuugcaaauuguguuaaagcu

SEQ ID NO: 528970 - RNA, 22 nt, Human
uggaagaccacaagcccuuaac

SEQ ID NO: 528971 - RNA, 22 nt, Human
cacagggcaggccccaggccuc

SEQ ID NO: 528972 - RNA, 22 nt, Human
auccucaguguuucugacaucu

SEQ ID NO: 528973 - RNA, 18 nt, Human
cuuguucuucucuuggcg

SEQ ID NO: 528974 - RNA, 22 nt, Human
ggcggguguaaguaggacagcg

SEQ ID NO: 528975 - RNA, 22 nt, Human
uguagcucuccagccagcaagg

SEQ ID NO: 528976 - RNA, 22 nt, Human
accucccagcucugagcuuggg

SEQ ID NO: 528977 - RNA, 22 nt, Human
cccuuucccuucuggcucaggg

SEQ ID NO: 528978 - RNA, 22 nt, Human
ucuucuuccucauuuauacaua

SEQ ID NO: 528979 - RNA, 22 nt, Human
aggccagguggucaugcuugcu

SEQ ID NO: 528980 - RNA, 22 nt, Human
ccagcagcucccucaggguccg

SEQ ID NO: 528981 - RNA, 22 nt, Human
gggccucucccuucucacgcau

SEQ ID NO: 528982 - RNA, 22 nt, Human
uuuacugagugaccuagaauaa

SEQ ID NO: 528983 - RNA, 22 nt, Human
gggcuggggcucaauaauuugu

SEQ ID NO: 528984 - RNA, 22 nt, Human
cuggacagaaagggcugcugug

SEQ ID NO: 528985 - RNA, 22 nt, Human
aaagcagucacuccagugugau

SEQ ID NO: 528986 - RNA, 22 nt, Human
cagacaggcaggugagagcucc

SEQ ID NO: 528987 - RNA, 22 nt, Human
ggggccagcacugugccuuugu

SEQ ID NO: 528988 - RNA, 22 nt, Human
uuccuauggcucaguugcauuu

SEQ ID NO: 528989 - RNA, 22 nt, Human
ugaggcucacaaaucugcauuu

SEQ ID NO: 528990 - RNA, 22 nt, Human
uuucaaguucuguuccuaaacu

SEQ ID NO: 528991 - RNA, 22 nt, Human
gugcuccuggccacaugaagcu

SEQ ID NO: 528992 - RNA, 22 nt, Human
gggaucagcaagccacugcacc

SEQ ID NO: 528993 - RNA, 22 nt, Human
accagccagccacaguggcucc

SEQ ID NO: 528994 - RNA, 22 nt, Human
ccuccagcgcgauccacuccgg

SEQ ID NO: 528995 - RNA, 22 nt, Human
gccuuuugaaauagaaaucuga

SEQ ID NO: 528996 - RNA, 22 nt, Human
caggaaaugaacaggaaugaac

SEQ ID NO: 528997 - RNA, 21 nt, Human
aucagcaaaugccugucuccc

SEQ ID NO: 528998 - RNA, 22 nt, Human
ucagcagggaggcucugugccc

SEQ ID NO: 528999 - RNA, 22 nt, Human
cugccugugugugccugcagaa

SEQ ID NO: 529000 - RNA, 22 nt, Human
auagcuguuagauuggggucga

SEQ ID NO: 529001 - RNA, 21 nt, Human
agcaggaggcagucacagcuc

SEQ ID NO: 529002 - RNA, 22 nt, Human
aaggccugggaggccucucuuc

SEQ ID NO: 529003 - RNA, 22 nt, Human
ggggcagggagguuaucgccga

SEQ ID NO: 529004 - RNA, 22 nt, Human
cagggaggcugucuuaugccug

SEQ ID NO: 529005 - RNA, 22 nt, Human
ugucucugugagaucugacgau

SEQ ID NO: 529006 - RNA, 22 nt, Human
agcugucucugguauuauguga

SEQ ID NO: 529007 - RNA, 22 nt, Human
cucuguccacagguuugucccu

SEQ ID NO: 529008 - RNA, 22 nt, Human
uacagauugagguuuuuaauau

SEQ ID NO: 529009 - RNA, 22 nt, Human
ccacauuuacuggaugcucagg

SEQ ID NO: 529010 - RNA, 23 nt, Human
ucucagaggauuccugggccuug

SEQ ID NO: 529011 - RNA, 22 nt, Human
gaaaagcuaggccaguucagcu

SEQ ID NO: 529012 - RNA, 22 nt, Human
auucuuuuaaauggcaguagua

SEQ ID NO: 529013 - RNA, 22 nt, Human
aucaguuuuuauuaauguagcu

SEQ ID NO: 529014 - RNA, 22 nt, Human
ucccacucccaggcaggccucu

SEQ ID NO: 529015 - RNA, 22 nt, Human
uucagcuucauuugucuuuaug

SEQ ID NO: 529016 - RNA, 22 nt, Human
uuaauauguugaaauuuauuag

SEQ ID NO: 529017 - RNA, 22 nt, Human
cauucauuuaugaaauaucuau

SEQ ID NO: 529018 - RNA, 22 nt, Human
cagggugcgccacucagaugua

SEQ ID NO: 529019 - RNA, 22 nt, Human
uagcagaguaucuugcaaauua

SEQ ID NO: 529020 - RNA, 22 nt, Human
gcuggggaggcagcagagaaca

SEQ ID NO: 529021 - RNA, 22 nt, Human
aagucacaagcauauaugcauu

SEQ ID NO: 529022 - RNA, 22 nt, Human
uggaaguggcagaaaaugaaca

SEQ ID NO: 529023 - RNA, 22 nt, Human
aagcagagccugagacagggau

SEQ ID NO: 529024 - RNA, 22 nt, Human
ugcuggggauccguaccaaccc

SEQ ID NO: 529025 - RNA, 22 nt, Human
caggugggccgggguuuguucu

SEQ ID NO: 529026 - RNA, 22 nt, Human
aggaccuguagggccugcaucc

SEQ ID NO: 529027 - RNA, 21 nt, Human
uucaaaguuugccuaaagauu

SEQ ID NO: 529028 - RNA, 22 nt, Human
uaaagaacacagggaauagcac

SEQ ID NO: 529029 - RNA, 22 nt, Human
gccugcagauauauaggauggu

SEQ ID NO: 529030 - RNA, 22 nt, Human
aaaaacugcaauuacuuuuguc

SEQ ID NO: 529031 - RNA, 22 nt, Human
ggcagggaggaggugaaaguga

SEQ ID NO: 529032 - RNA, 23 nt, Human
ccuggcuguggauuugggccugc

SEQ ID NO: 529033 - RNA, 21 nt, Human
ucuggagucaucuuuaccaua

SEQ ID NO: 529034 - RNA, 19 nt, Human
ucccuucuauaguaauaaa

SEQ ID NO: 529035 - RNA, 22 nt, Human
cagaaacuagauuuagacacaa

SEQ ID NO: 529036 - RNA, 22 nt, Human
uuuucauguuccuuguuaagug

SEQ ID NO: 529037 - RNA, 22 nt, Human
ucugggaguuagaauacauggg

SEQ ID NO: 529038 - RNA, 22 nt, Human
cugggagcaagaggcugcaaau

SEQ ID NO: 529039 - RNA, 22 nt, Human
auuuuguugaugguggaguagc

SEQ ID NO: 529040 - RNA, 22 nt, Human
agagcuguucaacguagcaaug

SEQ ID NO: 529041 - RNA, 22 nt, Human
uuauucagauuggcuacaggau

SEQ ID NO: 529042 - RNA, 20 nt, Human
acucuugagaaauucucugu

SEQ ID NO: 529043 - RNA, 22 nt, Human
gcagagaagaugcccaggcuuc

SEQ ID NO: 529044 - RNA, 22 nt, Human
gcucccaggaugaggagccagg

SEQ ID NO: 529045 - RNA, 22 nt, Human
gcagcuggauuucaagagggag

SEQ ID NO: 529046 - RNA, 22 nt, Human
cacuauuuauacuuccugaucc

SEQ ID NO: 529047 - RNA, 22 nt, Human
auuucuguuugcuacuauaagu

SEQ ID NO: 529048 - RNA, 22 nt, Human
uuugaaagagcugauacaugaa

SEQ ID NO: 529049 - RNA, 22 nt, Human
uggcagguuuccuccucauagu

SEQ ID NO: 529050 - RNA, 22 nt, Human
gccugccugcugucaucugccu

SEQ ID NO: 529051 - RNA, 22 nt, Human
ggagucagaacccaggcuucua

SEQ ID NO: 529052 - RNA, 18 nt, Human
uuacuguuaucaaaacag

SEQ ID NO: 529053 - RNA, 22 nt, Human
ucccuuaagcaccugaguaguc

SEQ ID NO: 529054 - RNA, 22 nt, Human
caggcagagcaacugguccaga

SEQ ID NO: 529055 - RNA, 22 nt, Human
gacauuuacugaauacugauua

SEQ ID NO: 529056 - RNA, 22 nt, Human
ggagauggcucugcaaggucua

SEQ ID NO: 529057 - RNA, 22 nt, Human
uuucucaacuguauuaugcaga

SEQ ID NO: 529058 - RNA, 22 nt, Human
uccagcagguccgagacaaguu

SEQ ID NO: 529059 - RNA, 22 nt, Human
acugucaauagugcugagcuug

SEQ ID NO: 529060 - RNA, 22 nt, Human
aaacuuuaagacaguccucaag

SEQ ID NO: 529061 - RNA, 22 nt, Human
augggaggaugcucgggugcuc

SEQ ID NO: 529062 - RNA, 23 nt, Human
aggcagugucucuuauccugucc

SEQ ID NO: 529063 - RNA, 21 nt, Human
ucgugcagcagcugaggcuug

SEQ ID NO: 529064 - RNA, 22 nt, Human
cugcugagaaaagacugaggga

SEQ ID NO: 529065 - RNA, 22 nt, Human
aggugagguuugggagguguca

SEQ ID NO: 529066 - RNA, 22 nt, Human
agaaacuaagucauaacucuuu

SEQ ID NO: 529067 - RNA, 21 nt, Human
ccaaaggcuauguaucuucug

SEQ ID NO: 529068 - RNA, 22 nt, Human
agugauuugggugucagaaagu

SEQ ID NO: 529069 - RNA, 22 nt, Human
gaaauacaggaaugccacacag

SEQ ID NO: 529070 - RNA, 21 nt, Human
ugcagugucccuaacaguggu

SEQ ID NO: 529071 - RNA, 22 nt, Human
agagacaggguuuugucguguu

SEQ ID NO: 529072 - RNA, 22 nt, Human
cagcaauaagguaagcuucucc

SEQ ID NO: 529073 - RNA, 22 nt, Human
cuggccagguuuugaacaguug

SEQ ID NO: 529074 - RNA, 22 nt, Human
guugugcagggcgaggaccuga

SEQ ID NO: 529075 - RNA, 22 nt, Human
cacugucuuuugugaagacaau

SEQ ID NO: 529076 - RNA, 22 nt, Human
uaguccaguaaaacagcuaacg

SEQ ID NO: 529077 - RNA, 22 nt, Human
gcagggaccucacuacccccag

SEQ ID NO: 529078 - RNA, 22 nt, Human
gagagucacugucugcauuucc

SEQ ID NO: 529079 - RNA, 21 nt, Human
cugagggccgcagcugggcuc

SEQ ID NO: 529080 - RNA, 22 nt, Human
cagccaggacagggaaacuagu

SEQ ID NO: 529081 - RNA, 22 nt, Human
acacuguguggucucucucgga

SEQ ID NO: 529082 - RNA, 22 nt, Human
uuucacauaaauggaguaaaga

SEQ ID NO: 529083 - RNA, 22 nt, Human
acaacaucagcugagaccuuca

SEQ ID NO: 529084 - RNA, 22 nt, Human
agggccagccaggcccuacaaa

SEQ ID NO: 529085 - RNA, 22 nt, Human
ggcugcuguacugaugucaguu

SEQ ID NO: 529086 - RNA, 22 nt, Human
acaguaauauugaugcucguca

SEQ ID NO: 529087 - RNA, 22 nt, Human
ggggucccugcaccagcauguc

SEQ ID NO: 529088 - RNA, 22 nt, Human
ugggccuuggaucgcuaagcug

SEQ ID NO: 529089 - RNA, 22 nt, Human
caugggcuacagaagcaugcug

SEQ ID NO: 529090 - RNA, 22 nt, Human
augguguagcaugugauaugac

SEQ ID NO: 529091 - RNA, 22 nt, Human
cccagcucaucaggagccgccc

SEQ ID NO: 529092 - RNA, 22 nt, Human
agauggggcucaguguggaggc

SEQ ID NO: 529093 - RNA, 22 nt, Human
agagccagagaccuggguucac

SEQ ID NO: 529094 - RNA, 22 nt, Human
cuggagguaauguuauuuuugu

SEQ ID NO: 529095 - RNA, 22 nt, Human
uaucuuuauuaugucuaucugc

SEQ ID NO: 529096 - RNA, 22 nt, Human
guuucacagucugcagaauuuu

SEQ ID NO: 529097 - RNA, 22 nt, Human
cucugggcaggaccaguggacc

SEQ ID NO: 529098 - RNA, 22 nt, Human
auggacaaugugaaacuacaag

SEQ ID NO: 529099 - RNA, 19 nt, Human
guuuuuaguuucugaacug

SEQ ID NO: 529100 - RNA, 22 nt, Human
aagucuggaagucucaguuuuc

SEQ ID NO: 529101 - RNA, 22 nt, Human
ccaaggagaaaugcugugcuuu

SEQ ID NO: 529102 - RNA, 22 nt, Human
cugccucaugcugccugcagcc

SEQ ID NO: 529103 - RNA, 22 nt, Human
cucacuggcaagacuacaggug

SEQ ID NO: 529104 - RNA, 22 nt, Human
aguggcugagugacugugacuc

SEQ ID NO: 529105 - RNA, 22 nt, Human
ucucagagaugucaagagucua

SEQ ID NO: 529106 - RNA, 22 nt, Human
agcaaaguagcugcuguucuua

SEQ ID NO: 529107 - RNA, 22 nt, Human
ugucuuuucuacuguaagcaua

SEQ ID NO: 529108 - RNA, 22 nt, Human
cccugcuuagcacccuugcacc

SEQ ID NO: 529109 - RNA, 22 nt, Human
auugugaauaaugcugcaauaa

SEQ ID NO: 529110 - RNA, 20 nt, Human
uuccacaucuuugcacaugc

SEQ ID NO: 529111 - RNA, 22 nt, Human
uuuagagaguguaaaaauauau

SEQ ID NO: 529112 - RNA, 22 nt, Human
uugcauugaucccagcuugggc

SEQ ID NO: 529113 - RNA, 19 nt, Human
ugcccugcacgcuguccug

SEQ ID NO: 529114 - RNA, 22 nt, Human
gugggcagcaccagggaagugu

SEQ ID NO: 529115 - RNA, 22 nt, Human
uucagcuauggagucuuaguua

SEQ ID NO: 529116 - RNA, 21 nt, Human
ucugucugguuuuagaguggc

SEQ ID NO: 529117 - RNA, 22 nt, Human
uugcccugcagcggugaguggu

SEQ ID NO: 529118 - RNA, 22 nt, Human
auauuagguuggugcaaaagua

SEQ ID NO: 529119 - RNA, 22 nt, Human
ucaguauuccuggaaauacaag

SEQ ID NO: 529120 - RNA, 22 nt, Human
ucaaugauagacaagaucuaag

SEQ ID NO: 529121 - RNA, 17 nt, Human
gcugagugcagggaguc

SEQ ID NO: 529122 - RNA, 22 nt, Human
uuggaauuuaguaaaauaaugc

SEQ ID NO: 529123 - RNA, 22 nt, Human
gaacucaacacaguauuuggua

SEQ ID NO: 529124 - RNA, 22 nt, Human
ccuggagcucacugggagccgg

SEQ ID NO: 529125 - RNA, 22 nt, Human
guugggaaggcaagaaguagaa

SEQ ID NO: 529126 - RNA, 21 nt, Human
aggaaguggccagauugggaa

SEQ ID NO: 529127 - RNA, 22 nt, Human
aaacacuguacaaucugcaggg

SEQ ID NO: 529128 - RNA, 22 nt, Human
guuuucaaggggauuuaacuga

SEQ ID NO: 529129 - RNA, 22 nt, Human
gaauuuaaggaccaagcauuuu

SEQ ID NO: 529130 - RNA, 22 nt, Human
augucagauuccuaaauaucuu

SEQ ID NO: 529131 - RNA, 22 nt, Human
aaucacauuacagcauaucugu

SEQ ID NO: 529132 - RNA, 22 nt, Human
uguucuuaugaauucaagacac

SEQ ID NO: 529133 - RNA, 19 nt, Human
gcugcucugggucucaucu

SEQ ID NO: 529134 - RNA, 22 nt, Human
uguuucagucccuguguucaau

SEQ ID NO: 529135 - RNA, 22 nt, Human
cugggaggugcagcaaaaauca

SEQ ID NO: 529136 - RNA, 22 nt, Human
ggugcccuggaagcugcugcau

SEQ ID NO: 529137 - RNA, 22 nt, Human
uuccaagugcugaggacaguag

SEQ ID NO: 529138 - RNA, 22 nt, Human
ucccagcauaacaaacugcccg

SEQ ID NO: 529139 - RNA, 22 nt, Human
cccccaaggccaggcugagacc

SEQ ID NO: 529140 - RNA, 23 nt, Human
aucuagaaaccugaugacucugu

SEQ ID NO: 529141 - RNA, 22 nt, Human
ucaggauguccaaaauccagcc

SEQ ID NO: 529142 - RNA, 21 nt, Human
gcugccugccccucgggggcu

SEQ ID NO: 529143 - RNA, 22 nt, Human
ggcuuccuggggccuccugcaa

SEQ ID NO: 529144 - RNA, 22 nt, Human
gauuucuuugaauuagagaggu

SEQ ID NO: 529145 - RNA, 22 nt, Human
gugcaggugaccuaauccaugu

SEQ ID NO: 529146 - RNA, 22 nt, Human
ccuuccuggcuguccgccugau

SEQ ID NO: 529147 - RNA, 22 nt, Human
cccauggguuuuccucccugcc

SEQ ID NO: 529148 - RNA, 22 nt, Human
ucuggaguccagauccauuugg

SEQ ID NO: 529149 - RNA, 22 nt, Human
caggaaaugcuaucauagcuga

SEQ ID NO: 529150 - RNA, 22 nt, Human
ccaggccucccuuuuccagcca

SEQ ID NO: 529151 - RNA, 22 nt, Human
agagggcugccucagucagcua

SEQ ID NO: 529152 - RNA, 18 nt, Human
aauuucuuugacaacuua

SEQ ID NO: 529153 - RNA, 22 nt, Human
cugcucugugcacuuguucagg

SEQ ID NO: 529154 - RNA, 22 nt, Human
gaauacaugauacaugaacugc

SEQ ID NO: 529155 - RNA, 18 nt, Human
aggccugggaagcugagg

SEQ ID NO: 529156 - RNA, 22 nt, Human
uguccucuaauuggccucuugc

SEQ ID NO: 529157 - RNA, 19 nt, Human
aaacacagauuucuuacca

SEQ ID NO: 529158 - RNA, 22 nt, Human
gccugcugaaccucaugcaguc

SEQ ID NO: 529159 - RNA, 22 nt, Human
agaccaagacuauaaugagagg

SEQ ID NO: 529160 - RNA, 22 nt, Human
cagcccaggucucucuuccagu

SEQ ID NO: 529161 - RNA, 22 nt, Human
ugcuagaauaccuaccuggagg

SEQ ID NO: 529162 - RNA, 22 nt, Human
ggcccugcaagguacccaggcc

SEQ ID NO: 529163 - RNA, 22 nt, Human
agagcuguagcuuccuagagcc

SEQ ID NO: 529164 - RNA, 22 nt, Human
acaggcugccuaccaaguauca

SEQ ID NO: 529165 - RNA, 22 nt, Human
uuucacauaugguuguugauug

SEQ ID NO: 529166 - RNA, 22 nt, Human
aagagaauaucgauagcacucu

SEQ ID NO: 529167 - RNA, 22 nt, Human
uagaaacaucagcuaaccaaaa

SEQ ID NO: 529168 - RNA, 22 nt, Human
ucucccaacauguggaggucag

SEQ ID NO: 529169 - RNA, 22 nt, Human
agcucugcaggcacagcugagg

SEQ ID NO: 529170 - RNA, 20 nt, Human
aggaacuggaagggaggaaa

SEQ ID NO: 529171 - RNA, 22 nt, Human
aaguaaaauguuuccuuuauua

SEQ ID NO: 529172 - RNA, 22 nt, Human
gggugcaggggacccuagggac

SEQ ID NO: 529173 - RNA, 22 nt, Human
gccuuuuuuguugcucugucac

SEQ ID NO: 529174 - RNA, 22 nt, Human
agugcagcuuauaaagcaucaa

SEQ ID NO: 529175 - RNA, 22 nt, Human
ugccacugggcaugcagauguc

SEQ ID NO: 529176 - RNA, 19 nt, Human
acagaagcauagaaaagga

SEQ ID NO: 529177 - RNA, 22 nt, Human
gggucagcugcugggggcugac

SEQ ID NO: 529178 - RNA, 22 nt, Human
cuguggaagguuuagauaggua

SEQ ID NO: 529179 - RNA, 22 nt, Human
uuugacagacauuuacuacauu

SEQ ID NO: 529180 - RNA, 22 nt, Human
guggggcugaguggagccagaa

SEQ ID NO: 529181 - RNA, 22 nt, Human
aacuguugcuuguaauaugugc

SEQ ID NO: 529182 - RNA, 22 nt, Human
ucagaagaaagauguuauuacu

SEQ ID NO: 529183 - RNA, 20 nt, Human
gggagaagggcugaugagag

SEQ ID NO: 529184 - RNA, 19 nt, Human
agcagcguuuaaaaaaugc

SEQ ID NO: 529185 - RNA, 22 nt, Human
agcauaaaauaaauaguuugca

SEQ ID NO: 529186 - RNA, 20 nt, Human
cccaggagugagcagcuuua

SEQ ID NO: 529187 - RNA, 22 nt, Human
ugagaauuuuuugucaugcauu

SEQ ID NO: 529188 - RNA, 22 nt, Human
augcuguguggucaaguuaauu

SEQ ID NO: 529189 - RNA, 22 nt, Human
cugcagcuuuggaaaccuguuu

SEQ ID NO: 529190 - RNA, 20 nt, Human
uccugagauuuaagggguuc

SEQ ID NO: 529191 - RNA, 22 nt, Human
uauuaucauugguaauaugguc

SEQ ID NO: 529192 - RNA, 22 nt, Human
aaguaacuuauuugcaaacagg

SEQ ID NO: 529193 - RNA, 22 nt, Human
ggaagcccagcugucuccuguc

SEQ ID NO: 529194 - RNA, 22 nt, Human
aaguuacaggagaaagagauca

SEQ ID NO: 529195 - RNA, 22 nt, Human
agagcuggauggucaagauggc

SEQ ID NO: 529196 - RNA, 22 nt, Human
gagccuccuccuggugugccga

SEQ ID NO: 529197 - RNA, 19 nt, Human
ucugcauggcaggaagaga

SEQ ID NO: 529198 - RNA, 22 nt, Human
uaggcugagcuuguagaucgua

SEQ ID NO: 529199 - RNA, 22 nt, Human
uccagucaagcuugagaauuuc

SEQ ID NO: 529200 - RNA, 22 nt, Human
gcugggagccccgagccagcgc

SEQ ID NO: 529201 - RNA, 22 nt, Human
ggagugggcagcacugcccugu

SEQ ID NO: 529202 - RNA, 19 nt, Human
agggaguuuauauuugcac

SEQ ID NO: 529203 - RNA, 22 nt, Human
cuucccagaccuuagagugcag

SEQ ID NO: 529204 - RNA, 20 nt, Human
gccucagccaacccaugggg

SEQ ID NO: 529205 - RNA, 22 nt, Human
ggcugccaggagggaggccagu

SEQ ID NO: 529206 - RNA, 22 nt, Human
aaaggcaggacugcagcauagg

SEQ ID NO: 529207 - RNA, 22 nt, Human
ucugccuguucccgauuccaug

SEQ ID NO: 529208 - RNA, 22 nt, Human
cagggugacugcccuggccacu

SEQ ID NO: 529209 - RNA, 22 nt, Human
ggggcagauggaacagagcaca

SEQ ID NO: 529210 - RNA, 22 nt, Human
gccuuccuuuuaccaccagcca

SEQ ID NO: 529211 - RNA, 20 nt, Human
uccugggguaagccaugguc

SEQ ID NO: 529212 - RNA, 22 nt, Human
ucaggcucccugcugggcucug

SEQ ID NO: 529213 - RNA, 22 nt, Human
uuugaaagcaccauuugaguag

SEQ ID NO: 529214 - RNA, 22 nt, Human
aaaugguaagacaacacauuau

SEQ ID NO: 529215 - RNA, 22 nt, Human
gcacagccugucccuguccugg

SEQ ID NO: 529216 - RNA, 22 nt, Human
ccaccagcuucagcagccgcgg

SEQ ID NO: 529217 - RNA, 22 nt, Human
agcagggcaugaauaaggguuu

SEQ ID NO: 529218 - RNA, 22 nt, Human
aauuaacagagggcuuauuacu

SEQ ID NO: 529219 - RNA, 22 nt, Human
uuauuuagucuagaugaauuuu

SEQ ID NO: 529220 - RNA, 21 nt, Human
ccaggcugggagggcaguucc

SEQ ID NO: 529221 - RNA, 22 nt, Human
gaggccagaaugagcugaaugc

SEQ ID NO: 529222 - RNA, 22 nt, Human
aaagauuuaagaauaauuugug

SEQ ID NO: 529223 - RNA, 22 nt, Human
uacugaaagaauacauaauuuc

SEQ ID NO: 529224 - RNA, 22 nt, Human
aggcaaaauuacaaaguuauua

SEQ ID NO: 529225 - RNA, 22 nt, Human
uuucuccaauguaucagcacac

SEQ ID NO: 529226 - RNA, 22 nt, Human
cagccagggagggcaaaugaga

SEQ ID NO: 529227 - RNA, 22 nt, Human
caggaggaacaagagguucugg

SEQ ID NO: 529228 - RNA, 22 nt, Human
gaaaauaggcugcaucuccuuc

SEQ ID NO: 529229 - RNA, 22 nt, Human
gugcccagcuccaccucacaga

SEQ ID NO: 529230 - RNA, 22 nt, Human
gcugucugcaagccaggaaaug

SEQ ID NO: 529231 - RNA, 22 nt, Human
aaagacagauggcaaggaugau

SEQ ID NO: 529232 - RNA, 22 nt, Human
auuuaaauuuucugauggagag

SEQ ID NO: 529233 - RNA, 22 nt, Human
uuuuccucugagcuuugaauaa

SEQ ID NO: 529234 - RNA, 22 nt, Human
cuuaaggcuucagcacagguau

SEQ ID NO: 529235 - RNA, 19 nt, Human
aggguacacgagagaagag

SEQ ID NO: 529236 - RNA, 22 nt, Human
caugggcaguuggcagggcuca

SEQ ID NO: 529237 - RNA, 22 nt, Human
aguuguaagagacagauauaaa

SEQ ID NO: 529238 - RNA, 22 nt, Human
gcugucacacauggccccagcu

SEQ ID NO: 529239 - RNA, 22 nt, Human
caauaauauccugugcuguuug

SEQ ID NO: 529240 - RNA, 22 nt, Human
aaacauuagacaccauaugcuc

SEQ ID NO: 529241 - RNA, 22 nt, Human
ucagcugcuucauguucugaau

SEQ ID NO: 529242 - RNA, 22 nt, Human
aucaguguauucauagggaaua

SEQ ID NO: 529243 - RNA, 22 nt, Human
gcugcucucagagcucaugcug

SEQ ID NO: 529244 - RNA, 22 nt, Human
acauuuguuucucuagaguagg

SEQ ID NO: 529245 - RNA, 22 nt, Human
aggacagugguguucuggagug

SEQ ID NO: 529246 - RNA, 22 nt, Human
ugauucuuucuccaccaauuca

SEQ ID NO: 529247 - RNA, 22 nt, Human
cagggcaggaauuugacauugc

SEQ ID NO: 529248 - RNA, 22 nt, Human
ccagaggcuggguucaccucag

SEQ ID NO: 529249 - RNA, 22 nt, Human
uucaacaugcuuuauuucuaaa

SEQ ID NO: 529250 - RNA, 22 nt, Human
ucagauuugaauauuccuuucg

SEQ ID NO: 529251 - RNA, 20 nt, Human
ggcagccaaucagcgugccg

SEQ ID NO: 529252 - RNA, 22 nt, Human
gaaggaaaggucucaugccuuu

SEQ ID NO: 529253 - RNA, 22 nt, Human
gagcugggacauggguccucuc

SEQ ID NO: 529254 - RNA, 22 nt, Human
cccaggcagugcugaucccuca

SEQ ID NO: 529255 - RNA, 22 nt, Human
ucucagggugaggaaagaauuu

SEQ ID NO: 529256 - RNA, 22 nt, Human
auaaggcagucccuuaacaagg

SEQ ID NO: 529257 - RNA, 22 nt, Human
gcagugcuaaguagcuggccca

SEQ ID NO: 529258 - RNA, 20 nt, Human
agacccuguguccuguggcc

SEQ ID NO: 529259 - RNA, 22 nt, Human
cuguaugauuccauuucuauaa

SEQ ID NO: 529260 - RNA, 22 nt, Human
aggaagccuggcauuaaaaagc

SEQ ID NO: 529261 - RNA, 22 nt, Human
gggcaugguggugcacaccugu

SEQ ID NO: 529262 - RNA, 22 nt, Human
aaagaucagucugaagcaacau

SEQ ID NO: 529263 - RNA, 22 nt, Human
cucugcaugccuugcucagaca

SEQ ID NO: 529264 - RNA, 22 nt, Human
cagaggcagaauggagauuugg

SEQ ID NO: 529265 - RNA, 22 nt, Human
acagauuuuaaaugacacuccc

SEQ ID NO: 529266 - RNA, 18 nt, Human
uaacaauccugagugucu

SEQ ID NO: 529267 - RNA, 21 nt, Human
uuuaauuugcauguaugacgc

SEQ ID NO: 529268 - RNA, 22 nt, Human
agggcacagccuaaagccuaug

SEQ ID NO: 529269 - RNA, 22 nt, Human
uucacagaugccugaugugugg

SEQ ID NO: 529270 - RNA, 22 nt, Human
ugaaaaugcccucuaugucuca

SEQ ID NO: 529271 - RNA, 22 nt, Human
agaaaucaugacuaagagcagu

SEQ ID NO: 529272 - RNA, 22 nt, Human
caagauauguccuguuacuaag

SEQ ID NO: 529273 - RNA, 22 nt, Human
aaacacagcauguccuugggga

SEQ ID NO: 529274 - RNA, 22 nt, Human
cugguccuccuugccuucagau

SEQ ID NO: 529275 - RNA, 22 nt, Human
ugccuuccuggagcugaaggcu

SEQ ID NO: 529276 - RNA, 22 nt, Human
aagauacugaugauguaggcua

SEQ ID NO: 529277 - RNA, 22 nt, Human
gcaguggauccaaugguaucuu

SEQ ID NO: 529278 - RNA, 22 nt, Human
ucagagagugcaaaauauagcu

SEQ ID NO: 529279 - RNA, 22 nt, Human
ccaugggaauugggagguccca

SEQ ID NO: 529280 - RNA, 18 nt, Human
uacagauuauagauacau

SEQ ID NO: 529281 - RNA, 22 nt, Human
gcagcuuugucacggagugucg

SEQ ID NO: 529282 - RNA, 22 nt, Human
uugcagcagggugaauucacuc

SEQ ID NO: 529283 - RNA, 23 nt, Human
ucugaguuauguccuuacauuug

SEQ ID NO: 529284 - RNA, 22 nt, Human
guucaugugacuacuaugaccu

SEQ ID NO: 529285 - RNA, 19 nt, Human
cagagccucagagcuagaa

SEQ ID NO: 529286 - RNA, 22 nt, Human
ggggacccucaggacugcgucu

SEQ ID NO: 529287 - RNA, 22 nt, Human
cccagcucugcagaccugcccu

SEQ ID NO: 529288 - RNA, 22 nt, Human
uaguuuuacuugcgaugauaau

SEQ ID NO: 529289 - RNA, 22 nt, Human
aaaugucuuucuucugcuacgu

SEQ ID NO: 529290 - RNA, 22 nt, Human
uuuccucuuauacaguguuuau

SEQ ID NO: 529291 - RNA, 22 nt, Human
cucccugguguccccuccagga

SEQ ID NO: 529292 - RNA, 22 nt, Human
uaggcugggccugccuuccagg

SEQ ID NO: 529293 - RNA, 22 nt, Human
cuauugaauagcccaaaucauu

SEQ ID NO: 529294 - RNA, 22 nt, Human
gcuccugucaucaaacaauccu

SEQ ID NO: 529295 - RNA, 22 nt, Human
uuuauccauaucauuaaaaucu

SEQ ID NO: 529296 - RNA, 22 nt, Human
ggcuuuauuuugcaugaaugcu

SEQ ID NO: 529297 - RNA, 22 nt, Human
uccuuggaguaguuguucuuua

SEQ ID NO: 529298 - RNA, 22 nt, Human
aggaccugacauuguguuuucu

SEQ ID NO: 529299 - RNA, 22 nt, Human
guuccaggcaagugggauagga

SEQ ID NO: 529300 - RNA, 22 nt, Human
gcaggcagagaaggaacauuua

SEQ ID NO: 529301 - RNA, 20 nt, Human
cauuucauugugucuucacu

SEQ ID NO: 529302 - RNA, 22 nt, Human
caggagugcagguggugaggca

SEQ ID NO: 529303 - RNA, 20 nt, Human
guggcagugguggcagcagu

SEQ ID NO: 529304 - RNA, 22 nt, Human
ugcaggcuguuugguggaucuc

SEQ ID NO: 529305 - RNA, 22 nt, Human
auguucuucuaucuuuauuaaa

SEQ ID NO: 529306 - RNA, 22 nt, Human
aaggcagaaagggaugugagug

SEQ ID NO: 529307 - RNA, 22 nt, Human
ccagggccucguguucugagug

SEQ ID NO: 529308 - RNA, 22 nt, Human
cucagggaggccucugcugguu

SEQ ID NO: 529309 - RNA, 22 nt, Human
cagucaggggugggaucaaggc

SEQ ID NO: 529310 - RNA, 22 nt, Human
aaaggccacacagagcagggag

SEQ ID NO: 529311 - RNA, 22 nt, Human
auucaaaguaauaaccagaacu

SEQ ID NO: 529312 - RNA, 22 nt, Human
ucagggcacaggccuguggguu

SEQ ID NO: 529313 - RNA, 22 nt, Human
gaaggaagggcuggcugucuug

SEQ ID NO: 529314 - RNA, 22 nt, Human
guccuggcccacuggcaggcug

SEQ ID NO: 529315 - RNA, 22 nt, Human
aguucugggaggugcacgucca

SEQ ID NO: 529316 - RNA, 22 nt, Human
gcuguggaaaugccuaacauga

SEQ ID NO: 529317 - RNA, 22 nt, Human
gacauauuugaaaccaagagaa

SEQ ID NO: 529318 - RNA, 22 nt, Human
gccuucaggaaaucaguccuug

SEQ ID NO: 529319 - RNA, 22 nt, Human
uugugcaugacugugaauagcu

SEQ ID NO: 529320 - RNA, 22 nt, Human
ucaguguuggucaagaaucagu

SEQ ID NO: 529321 - RNA, 19 nt, Human
ccagcagcuuugauucucu

SEQ ID NO: 529322 - RNA, 21 nt, Human
ucuacauaucaauauguaauu

SEQ ID NO: 529323 - RNA, 22 nt, Human
aaaagguagauucuccuucuau

SEQ ID NO: 529324 - RNA, 23 nt, Human
cuggcucauccugguugcagugg

SEQ ID NO: 529325 - RNA, 21 nt, Human
acaggcucuggggaugcuggg

SEQ ID NO: 529326 - RNA, 22 nt, Human
ccaaggcuccucagcuggucuu

SEQ ID NO: 529327 - RNA, 22 nt, Human
caggagacaaguuagcagcuga

SEQ ID NO: 529328 - RNA, 22 nt, Human
acauuucucauaggagagccac

SEQ ID NO: 529329 - RNA, 22 nt, Human
gagguuagaggucagugcaguc

SEQ ID NO: 529330 - RNA, 22 nt, Human
aaaugcagauugucauucagga

SEQ ID NO: 529331 - RNA, 22 nt, Human
cuaauacucauuucuguaacuc

SEQ ID NO: 529332 - RNA, 22 nt, Human
caggaagaccagggcuguggcu

SEQ ID NO: 529333 - RNA, 22 nt, Human
gucaccagucccagcuccugaa

SEQ ID NO: 529334 - RNA, 22 nt, Human
cuggccucauagccaagcugug

SEQ ID NO: 529335 - RNA, 22 nt, Human
uucaucaauguguuuaauaaug

SEQ ID NO: 529336 - RNA, 22 nt, Human
gcaaaauuaaacuuagcaucau

SEQ ID NO: 529337 - RNA, 22 nt, Human
gaaagccauagcccagcuuuac

SEQ ID NO: 529338 - RNA, 22 nt, Human
ugcugccuugaccuccugggcu

SEQ ID NO: 529339 - RNA, 22 nt, Human
ccagcugucacucagaaaggcc

SEQ ID NO: 529340 - RNA, 22 nt, Human
aggcuuaaugaguuaaaucacu

SEQ ID NO: 529341 - RNA, 22 nt, Human
acacauuaaaacgucuacaaug

SEQ ID NO: 529342 - RNA, 22 nt, Human
aguauguagugcaaucagucag

SEQ ID NO: 529343 - RNA, 22 nt, Human
auaaugaggauuugcauauuag

SEQ ID NO: 529344 - RNA, 22 nt, Human
ggagagcuagugccugccagua

SEQ ID NO: 529345 - RNA, 22 nt, Human
aacuucugaccucaagaacugu

SEQ ID NO: 529346 - RNA, 22 nt, Human
gccucugccaagggggcugcgg

SEQ ID NO: 529347 - RNA, 22 nt, Human
ucuggcucuccagugcucuuag

SEQ ID NO: 529348 - RNA, 22 nt, Human
uguggcugcucaggugcagacc

SEQ ID NO: 529349 - RNA, 22 nt, Human
gaagggagaagguugggugacg

SEQ ID NO: 529350 - RNA, 22 nt, Human
gggcugacucaaccuugcaaag

SEQ ID NO: 529351 - RNA, 22 nt, Human
auuuucugguugagguuuaaca

SEQ ID NO: 529352 - RNA, 22 nt, Human
ccuggcccacauggcuucuccc

SEQ ID NO: 529353 - RNA, 20 nt, Human
cguaaggcaagugcugcauc

SEQ ID NO: 529354 - RNA, 22 nt, Human
ggugggcaggcgaggcccaggu

SEQ ID NO: 529355 - RNA, 15 nt, Human
ggcagguggaucacu

SEQ ID NO: 529356 - RNA, 21 nt, Human
gggggaagaggaguugcuagu

SEQ ID NO: 529357 - RNA, 22 nt, Human
aaaguauucuugacuguuuuuc

SEQ ID NO: 529358 - RNA, 22 nt, Human
gugccagcaguuauggugauuu

SEQ ID NO: 529359 - RNA, 20 nt, Human
uuuuagcacuuguuauggug

SEQ ID NO: 529360 - RNA, 22 nt, Human
ggaggccuagccagcuccaguu

SEQ ID NO: 529361 - RNA, 22 nt, Human
uuucuuucucguaaacuuaguu

SEQ ID NO: 529362 - RNA, 22 nt, Human
ugcuuuauggagcccaucucau

SEQ ID NO: 529363 - RNA, 22 nt, Human
gggaaagagagguggacgcagg

SEQ ID NO: 529364 - RNA, 22 nt, Human
agcaggaguuugaugcuuuuau

SEQ ID NO: 529365 - RNA, 22 nt, Human
acacccagagcgccagugccga

SEQ ID NO: 529366 - RNA, 22 nt, Human
uagauuuugcauuucuaacaag

SEQ ID NO: 529367 - RNA, 22 nt, Human
caggccucagagaguggcgggg

SEQ ID NO: 529368 - RNA, 19 nt, Human
gcauuucucuuuacagcca

SEQ ID NO: 529369 - RNA, 22 nt, Human
uaagcacuuuauaugcuuuauc

SEQ ID NO: 529370 - RNA, 22 nt, Human
uuacauauugucuauuguucaa

SEQ ID NO: 529371 - RNA, 22 nt, Human
ucuuccaaggugcagaucuucu

SEQ ID NO: 529372 - RNA, 22 nt, Human
aaggaggacacccaggacuggg

SEQ ID NO: 529373 - RNA, 22 nt, Human
uggcugagaccaucagggugua

SEQ ID NO: 529374 - RNA, 22 nt, Human
agccacagagguugaugugguu

SEQ ID NO: 529375 - RNA, 21 nt, Human
guggcucugccaggacugaaa

SEQ ID NO: 529376 - RNA, 22 nt, Human
gcuggugccuuguuguuguuac

SEQ ID NO: 529377 - RNA, 22 nt, Human
uuacaguggucauuugggaaaa

SEQ ID NO: 529378 - RNA, 22 nt, Human
cuggugggagauaauugaauca

SEQ ID NO: 529379 - RNA, 22 nt, Human
augcaguacugauacaugccac

SEQ ID NO: 529380 - RNA, 22 nt, Human
auucucagaucuuagaggaaua

SEQ ID NO: 529381 - RNA, 22 nt, Human
uguaaaaggaaaucaaagcacu

SEQ ID NO: 529382 - RNA, 22 nt, Human
uggugcagguguugaugcagga

SEQ ID NO: 529383 - RNA, 22 nt, Human
cacagaauuaagggagaaauau

SEQ ID NO: 529384 - RNA, 22 nt, Human
uguauacauuuggugcauauuu

SEQ ID NO: 529385 - RNA, 19 nt, Human
ugccuggcaccagcuccac

SEQ ID NO: 529386 - RNA, 22 nt, Human
cugggaagcuucgagcaggaaa

SEQ ID NO: 529387 - RNA, 22 nt, Human
ggcugccuacuuucccagaguu

SEQ ID NO: 529388 - RNA, 22 nt, Human
auccagcuuugucuggucuucg

SEQ ID NO: 529389 - RNA, 22 nt, Human
auauuugucaauucacuguuca

SEQ ID NO: 529390 - RNA, 22 nt, Human
ugggccaggggccucuucugau

SEQ ID NO: 529391 - RNA, 18 nt, Human
ugugcaauauuaaccacc

SEQ ID NO: 529392 - RNA, 22 nt, Human
cugaagcaauugagagauguuu

SEQ ID NO: 529393 - RNA, 20 nt, Human
ucacacaugguaagcuauga

SEQ ID NO: 529394 - RNA, 22 nt, Human
uggcagagucugggcuugggca

SEQ ID NO: 529395 - RNA, 22 nt, Human
ucacacacauuugcugucugau

SEQ ID NO: 529396 - RNA, 22 nt, Human
ucucagaguuccucuggagucc

SEQ ID NO: 529397 - RNA, 22 nt, Human
uguggcugucuguucuccuagg

SEQ ID NO: 529398 - RNA, 22 nt, Human
aaaguuagcauucucucuugcu

SEQ ID NO: 529399 - RNA, 22 nt, Human
ugcuggagaggaaggugggguc

SEQ ID NO: 529400 - RNA, 20 nt, Human
uguggcaggaugagggcgga

SEQ ID NO: 529401 - RNA, 22 nt, Human
aggggcucaguuacuuuggcag

SEQ ID NO: 529402 - RNA, 22 nt, Human
ucagaguccucacccugaggau

SEQ ID NO: 529403 - RNA, 22 nt, Human
gccauuaacaagaauauaguag

SEQ ID NO: 529404 - RNA, 22 nt, Human
ucccagcuguguggaggagaug

SEQ ID NO: 529405 - RNA, 22 nt, Human
gguuggacacuagguaggagcg

SEQ ID NO: 529406 - RNA, 22 nt, Human
cacagagagcuacgugcagcgu

SEQ ID NO: 529407 - RNA, 22 nt, Human
uuaauuuauguccaaaccagau

SEQ ID NO: 529408 - RNA, 22 nt, Human
gaaggaagugcucauacuaguu

SEQ ID NO: 529409 - RNA, 22 nt, Human
gucuuguuugggauguggaugg

SEQ ID NO: 529410 - RNA, 22 nt, Human
ggaugcugcugcacauccugca

SEQ ID NO: 529411 - RNA, 22 nt, Human
gcagugauuggaucagagaugg

SEQ ID NO: 529412 - RNA, 19 nt, Human
ugggagaggcaacagagua

SEQ ID NO: 529413 - RNA, 22 nt, Human
agacucugcuaagaauauaauu

SEQ ID NO: 529414 - RNA, 22 nt, Human
uccuucaugaugcuuagcagag

SEQ ID NO: 529415 - RNA, 22 nt, Human
uguuaaauguuccuuuacugga

SEQ ID NO: 529416 - RNA, 22 nt, Human
ugugcaaauuaaguagauuuuc

SEQ ID NO: 529417 - RNA, 22 nt, Human
cuuuccuagauggccaucuuuc

SEQ ID NO: 529418 - RNA, 22 nt, Human
uggggagaagcaauagacucua

SEQ ID NO: 529419 - RNA, 22 nt, Human
ggagagagagauuguguuuauu

SEQ ID NO: 529420 - RNA, 22 nt, Human
gcagcugucacuuucacaaugc

SEQ ID NO: 529421 - RNA, 21 nt, Human
cgggcuggccgggcccucacc

SEQ ID NO: 529422 - RNA, 21 nt, Human
agaagagaagcaggacccucu

SEQ ID NO: 529423 - RNA, 22 nt, Human
uaugaguacaaggacucugucu

SEQ ID NO: 529424 - RNA, 23 nt, Human
uuacuuuugcaccaaccuaauau

SEQ ID NO: 529425 - RNA, 22 nt, Human
cagugcagacguggagggggca

SEQ ID NO: 529426 - RNA, 22 nt, Human
ugauuucaaguagugacaugcu

SEQ ID NO: 529427 - RNA, 22 nt, Human
gucagaggaauggaugagugau

SEQ ID NO: 529428 - RNA, 22 nt, Human
ucccagauuccugcucuuauau

SEQ ID NO: 529429 - RNA, 19 nt, Human
gcaggugugaauccguaga

SEQ ID NO: 529430 - RNA, 22 nt, Human
uaggaagccugcugugcacagc

SEQ ID NO: 529431 - RNA, 22 nt, Human
uuccuguauuuugcgaauuuuc

SEQ ID NO: 529432 - RNA, 18 nt, Human
ccuggaccugucuccuuu

SEQ ID NO: 529433 - RNA, 22 nt, Human
auaucaaaauaaacagcaugca

SEQ ID NO: 529434 - RNA, 22 nt, Human
ugugcaaucuugagcaauuuau

SEQ ID NO: 529435 - RNA, 22 nt, Human
gccuggcaggccucaugagggg

SEQ ID NO: 529436 - RNA, 21 nt, Human
acuggcugccaugauccaggg

SEQ ID NO: 529437 - RNA, 18 nt, Human
uccagcgugcuccagggc

SEQ ID NO: 529438 - RNA, 22 nt, Human
uaagaaggguacaauaaggcau

SEQ ID NO: 529439 - RNA, 22 nt, Human
uuccaaguagaagcauuugcau

SEQ ID NO: 529440 - RNA, 22 nt, Human
auggcugaggcuggagguggca

SEQ ID NO: 529441 - RNA, 22 nt, Human
ucugaacacugagugucaucac

SEQ ID NO: 529442 - RNA, 22 nt, Human
acauuucuccuacuuguuauuu

SEQ ID NO: 529443 - RNA, 18 nt, Human
agaagccacgaggagucc

SEQ ID NO: 529444 - RNA, 22 nt, Human
agacaugagaaacccaccagag

SEQ ID NO: 529445 - RNA, 22 nt, Human
accgggaaguccugcacugggc

SEQ ID NO: 529446 - RNA, 22 nt, Human
uagcagagaggggacaguggca

SEQ ID NO: 529447 - RNA, 22 nt, Human
gcugcccaguucugcugcugcc

SEQ ID NO: 529448 - RNA, 22 nt, Human
uuucuuuauccuccuuugcaca

SEQ ID NO: 529449 - RNA, 17 nt, Human
cucagaguugcuuuguc

SEQ ID NO: 529450 - RNA, 22 nt, Human
cuguggcauugccgaggcuggc

SEQ ID NO: 529451 - RNA, 22 nt, Human
gagcaugguuccauagguuggu

SEQ ID NO: 529452 - RNA, 22 nt, Human
cuucaaguccagcucaugcucu

SEQ ID NO: 529453 - RNA, 22 nt, Human
augcagaaggagccaugcuugc

SEQ ID NO: 529454 - RNA, 22 nt, Human
aagcagcuucccuggcuccugg

SEQ ID NO: 529455 - RNA, 19 nt, Human
gaucagagugucagcuugu

SEQ ID NO: 529456 - RNA, 22 nt, Human
gaucaacaaauguccuuuguga

SEQ ID NO: 529457 - RNA, 22 nt, Human
accacccauucagaaacacuga

SEQ ID NO: 529458 - RNA, 22 nt, Human
agauuuccaucuuuuucaugug

SEQ ID NO: 529459 - RNA, 22 nt, Human
gucuggagccacccuaagcauu

SEQ ID NO: 529460 - RNA, 22 nt, Human
gagccuggccuccugccucagc

SEQ ID NO: 529461 - RNA, 16 nt, Human
uagagagggcagggag

SEQ ID NO: 529462 - RNA, 22 nt, Human
cuggccaguuguccuggcuugg

SEQ ID NO: 529463 - RNA, 22 nt, Human
agaggugacauaggagaggcuc

SEQ ID NO: 529464 - RNA, 22 nt, Human
gcucugugggugaguagaaucu

SEQ ID NO: 529465 - RNA, 20 nt, Human
uuucacaucugucccuuuaa

SEQ ID NO: 529466 - RNA, 22 nt, Human
uacagucuuuggaaagagauag

SEQ ID NO: 529467 - RNA, 22 nt, Human
ugcaggcucucugcugccagau

SEQ ID NO: 529468 - RNA, 22 nt, Human
ugcaacaguggggcaugcugaa

SEQ ID NO: 529469 - RNA, 20 nt, Human
aguuugugugucuaugcgcu

SEQ ID NO: 529470 - RNA, 22 nt, Human
ggaagagaauuucucucuuuuu

SEQ ID NO: 529471 - RNA, 22 nt, Human
auuuucaagggagaggccucug

SEQ ID NO: 529472 - RNA, 22 nt, Human
agaucacaguggcaacucccuu

SEQ ID NO: 529473 - RNA, 22 nt, Human
gaggcagagguuguugcaguga

SEQ ID NO: 529474 - RNA, 22 nt, Human
auaagagcuagucuuuuccuug

SEQ ID NO: 529475 - RNA, 22 nt, Human
acugagagucuuagaaacacau

SEQ ID NO: 529476 - RNA, 22 nt, Human
gagcuagagggagaagggcacu

SEQ ID NO: 529477 - RNA, 22 nt, Human
ucugccugcuucuucauagucu

SEQ ID NO: 529478 - RNA, 22 nt, Human
agcaggguuccaggaguugcag

SEQ ID NO: 529479 - RNA, 22 nt, Human
uuuugaaagaguccugcuacag

SEQ ID NO: 529480 - RNA, 22 nt, Human
ccaggcugugguuuagauagag

SEQ ID NO: 529481 - RNA, 22 nt, Human
gcagcuggaagugacacucugu

SEQ ID NO: 529482 - RNA, 22 nt, Human
ggccaggccaagaggguuggaa

SEQ ID NO: 529483 - RNA, 18 nt, Human
uuccauaauguauguaac

SEQ ID NO: 529484 - RNA, 22 nt, Human
uucuggaguauuccuggcagcc

SEQ ID NO: 529485 - RNA, 22 nt, Human
aaggaagguucauagucaaaga

SEQ ID NO: 529486 - RNA, 20 nt, Human
ccagaagagaugaucaucca

SEQ ID NO: 529487 - RNA, 22 nt, Human
cagagugaaauaggggaucaag

SEQ ID NO: 529488 - RNA, 22 nt, Human
ugagugugcagggaaguggcgg

SEQ ID NO: 529489 - RNA, 22 nt, Human
acuagucugcauuacaaaauag

SEQ ID NO: 529490 - RNA, 22 nt, Human
ccagcucucagcgggagacuca

SEQ ID NO: 529491 - RNA, 22 nt, Human
gaggcucaccuagggagcacug

SEQ ID NO: 529492 - RNA, 22 nt, Human
gcagagugccgagauggaagcg

SEQ ID NO: 529493 - RNA, 22 nt, Human
ugucacauauauaauguucaau

SEQ ID NO: 529494 - RNA, 22 nt, Human
caagagcucccagaccugggca

SEQ ID NO: 529495 - RNA, 22 nt, Human
ugucccaggcugaaguacagug

SEQ ID NO: 529496 - RNA, 21 nt, Human
ugaaagaaggugcagucugaa

SEQ ID NO: 529497 - RNA, 22 nt, Human
cuggagccugcaguuuucacuu

SEQ ID NO: 529498 - RNA, 18 nt, Human
acauacauucugucugca

SEQ ID NO: 529499 - RNA, 21 nt, Human
gacaggcaaggagucacuuag

SEQ ID NO: 529500 - RNA, 22 nt, Human
agugugggugagggaggcccuc

SEQ ID NO: 529501 - RNA, 22 nt, Human
cugggaggcagucucucuagaa

SEQ ID NO: 529502 - RNA, 19 nt, Human
aucauacauguuacacucu

SEQ ID NO: 529503 - RNA, 22 nt, Human
cacuuaaaucuguugagaaaaa

SEQ ID NO: 529504 - RNA, 22 nt, Human
gcugccugggcuggcauuccca

SEQ ID NO: 529505 - RNA, 22 nt, Human
ccauuaaaauggaauguaguga

SEQ ID NO: 529506 - RNA, 22 nt, Human
ugucaugccaggaaauaguccc

SEQ ID NO: 529507 - RNA, 22 nt, Human
augaaacaugagaaauggagag

SEQ ID NO: 529508 - RNA, 22 nt, Human
ugucccagaucacaggagggga

SEQ ID NO: 529509 - RNA, 21 nt, Human
uuugggcuuuuacuggacgug

SEQ ID NO: 529510 - RNA, 22 nt, Human
uuggaaggugagucccuggguu

SEQ ID NO: 529511 - RNA, 22 nt, Human
uggccuggccacauccagcagg

SEQ ID NO: 529512 - RNA, 22 nt, Human
ugguuugagagugugagcuuuu

SEQ ID NO: 529513 - RNA, 22 nt, Human
cagcugucuaaguugagcagga

SEQ ID NO: 529514 - RNA, 22 nt, Human
guuucuaaauguucugaguuuu

SEQ ID NO: 529515 - RNA, 19 nt, Human
ugggcagguucaguaaugg

SEQ ID NO: 529516 - RNA, 22 nt, Human
caguauuuggaauauagcuaag

SEQ ID NO: 529517 - RNA, 17 nt, Human
accagccucuccugggg

SEQ ID NO: 529518 - RNA, 22 nt, Human
uuucuaaacuggauucagccug

SEQ ID NO: 529519 - RNA, 22 nt, Human
gcugagcugcuguucauccugc

SEQ ID NO: 529520 - RNA, 20 nt, Human
agacagaaucagagauaaag

SEQ ID NO: 529521 - RNA, 22 nt, Human
aaugcacagcuaaagugguucc

SEQ ID NO: 529522 - RNA, 21 nt, Human
acccuggguucuccauacccu

SEQ ID NO: 529523 - RNA, 22 nt, Human
caauguguuugcauauuaaaau

SEQ ID NO: 529524 - RNA, 22 nt, Human
uucaagaugcacaguggcauuc

SEQ ID NO: 529525 - RNA, 22 nt, Human
aguccugaugcucuggcaggag

SEQ ID NO: 529526 - RNA, 22 nt, Human
uguuccugguuccugcaugaug

SEQ ID NO: 529527 - RNA, 22 nt, Human
ucucugcucugugccucaguuu

SEQ ID NO: 529528 - RNA, 22 nt, Human
uugccugugucagcagguggaa

SEQ ID NO: 529529 - RNA, 22 nt, Human
cuccauugaacauccucucaga

SEQ ID NO: 529530 - RNA, 22 nt, Human
uucauauaaauggaaucagaau

SEQ ID NO: 529531 - RNA, 22 nt, Human
acuccugguuuguguccuggcu

SEQ ID NO: 529532 - RNA, 22 nt, Human
ggucucaggagacuggagagca

SEQ ID NO: 529533 - RNA, 22 nt, Human
agaauacaguaggagccugggc

SEQ ID NO: 529534 - RNA, 22 nt, Human
ugggcaggaugcguugauucuu

SEQ ID NO: 529535 - RNA, 22 nt, Human
uuucaaguuguugcauuaaaug

SEQ ID NO: 529536 - RNA, 23 nt, Human
ucuccuccuagauacagucaugg

SEQ ID NO: 529537 - RNA, 22 nt, Human
acacacaugccuuuccuaagua

SEQ ID NO: 529538 - RNA, 22 nt, Human
aaauguacugauacuuauuuua

SEQ ID NO: 529539 - RNA, 22 nt, Human
cagcugaguuuccaagucugcc

SEQ ID NO: 529540 - RNA, 22 nt, Human
gcuuucugauugcgaaaacaaa

SEQ ID NO: 529541 - RNA, 22 nt, Human
aagucauguggaagaauaaccu

SEQ ID NO: 529542 - RNA, 22 nt, Human
uggcugaggcuggagugcagug

SEQ ID NO: 529543 - RNA, 22 nt, Human
aguaaaauuucugcugaggaga

SEQ ID NO: 529544 - RNA, 22 nt, Human
cuuuuucuucuaggugugccug

SEQ ID NO: 529545 - RNA, 22 nt, Human
agggaggaucugcuccuugucu

SEQ ID NO: 529546 - RNA, 22 nt, Human
agccagagcagggaauuggaca

SEQ ID NO: 529547 - RNA, 22 nt, Human
uaacagaaauauuuccagguga

SEQ ID NO: 529548 - RNA, 22 nt, Human
uuuccuaagauagauacuucag

SEQ ID NO: 529549 - RNA, 22 nt, Human
ugcccuggcacacacacagcug

SEQ ID NO: 529550 - RNA, 22 nt, Human
gaaggaaggaaaaauauauuua

SEQ ID NO: 529551 - RNA, 23 nt, Human
ugcagccacucaggagcucagug

SEQ ID NO: 529552 - RNA, 22 nt, Human
uaggaacaaagagccucacauu

SEQ ID NO: 529553 - RNA, 22 nt, Human
ggguccaggucuucaggcagag

SEQ ID NO: 529554 - RNA, 22 nt, Human
gacacagagcucacagucuccu

SEQ ID NO: 529555 - RNA, 22 nt, Human
gggggccuuauucaucugccag

SEQ ID NO: 529556 - RNA, 22 nt, Human
aaggcauugagcaguuacagua

SEQ ID NO: 529557 - RNA, 22 nt, Human
uagauguugaagucauauuugg

SEQ ID NO: 529558 - RNA, 22 nt, Human
cagugcaggaagugagaugccu

SEQ ID NO: 529559 - RNA, 22 nt, Human
caaagcagaagguucuguggua

SEQ ID NO: 529560 - RNA, 22 nt, Human
aaaauaugacugugcuccuuaa

SEQ ID NO: 529561 - RNA, 22 nt, Human
agaaaucauugaauuauuugcu

SEQ ID NO: 529562 - RNA, 22 nt, Human
ccagcuccuucugucuguggag

SEQ ID NO: 529563 - RNA, 22 nt, Human
cagcaguggcugcaggcagcug

SEQ ID NO: 529564 - RNA, 22 nt, Human
gagcugggagcugggauuugga

SEQ ID NO: 529565 - RNA, 17 nt, Human
cugauuuauuagcagac

SEQ ID NO: 529566 - RNA, 22 nt, Human
cuggagcauccaugcccagggu

SEQ ID NO: 529567 - RNA, 22 nt, Human
ugcuaagucacucaagaccucu

SEQ ID NO: 529568 - RNA, 22 nt, Human
uaucauuuagaguauuucuuca

SEQ ID NO: 529569 - RNA, 22 nt, Human
gggcuggcaggaccugggcuga

SEQ ID NO: 529570 - RNA, 22 nt, Human
aaaugcaauuguauguacucca

SEQ ID NO: 529571 - RNA, 22 nt, Human
aaagcaaugggucuaagguaaa

SEQ ID NO: 529572 - RNA, 22 nt, Human
agucccagccuaggcugugcug

SEQ ID NO: 529573 - RNA, 19 nt, Human
acagauggaggaaucuggg

SEQ ID NO: 529574 - RNA, 22 nt, Human
ggaagagaaugauggcuauggg

SEQ ID NO: 529575 - RNA, 22 nt, Human
gaaggccugugguagugagacg

SEQ ID NO: 529576 - RNA, 22 nt, Human
cugggcacuugcucacagcucu

SEQ ID NO: 529577 - RNA, 22 nt, Human
uucaggauucuuucagacuggg

SEQ ID NO: 529578 - RNA, 22 nt, Human
ccaggugugcucugcaguggau

SEQ ID NO: 529579 - RNA, 22 nt, Human
gcgcaggugcugcuggagcagc

SEQ ID NO: 529580 - RNA, 21 nt, Human
gcuuucuguggacucugcacc

SEQ ID NO: 529581 - RNA, 22 nt, Human
gagcagugagugaauguugccu

SEQ ID NO: 529582 - RNA, 22 nt, Human
agcaggcuacuccuguguucgu

SEQ ID NO: 529583 - RNA, 19 nt, Human
ugagcugccgucuucccug

SEQ ID NO: 529584 - RNA, 22 nt, Human
agaaugcaagauaaacuuuauu

SEQ ID NO: 529585 - RNA, 22 nt, Human
agugucaaugccaacaguauau

SEQ ID NO: 529586 - RNA, 22 nt, Human
uucagaaugacuuauguaaggc

SEQ ID NO: 529587 - RNA, 22 nt, Human
gaaaauuuaauucucuucugug

SEQ ID NO: 529588 - RNA, 22 nt, Human
augcaucauggaaaacucaguu

SEQ ID NO: 529589 - RNA, 22 nt, Human
ggcuucccagcagagggcgcac

SEQ ID NO: 529590 - RNA, 22 nt, Human
uguccucaggaccuggcacagu

SEQ ID NO: 529591 - RNA, 22 nt, Human
uccugaggaaaguucaugaaug

SEQ ID NO: 529592 - RNA, 22 nt, Human
acaggcaggcgggacagcccga

SEQ ID NO: 529593 - RNA, 22 nt, Human
uuucacagucaauuuggaguca

SEQ ID NO: 529594 - RNA, 21 nt, Human
acaugucucuaaucucaguga

SEQ ID NO: 529595 - RNA, 22 nt, Human
aaggcuuuccuguaggaagaca

SEQ ID NO: 529596 - RNA, 22 nt, Human
gugcuuccugccuggugccuuu

SEQ ID NO: 529597 - RNA, 22 nt, Human
guucacauggcauuuucacauc

SEQ ID NO: 529598 - RNA, 22 nt, Human
gcagagugaagggagaggugug

SEQ ID NO: 529599 - RNA, 22 nt, Human
uuccagagaaaagguuuauuuc

SEQ ID NO: 529600 - RNA, 22 nt, Human
cuggcagcgcagcaugaagucg

SEQ ID NO: 529601 - RNA, 22 nt, Human
auccuucaaggggcugacagcu

SEQ ID NO: 529602 - RNA, 22 nt, Human
ugaacaacugcaaaaaucucca

SEQ ID NO: 529603 - RNA, 22 nt, Human
ucaacaauuuugagaugagaca

SEQ ID NO: 529604 - RNA, 22 nt, Human
uuuuuaagagucuggaaauagu

SEQ ID NO: 529605 - RNA, 22 nt, Human
ccuuggcccuagccucaggcaa

SEQ ID NO: 529606 - RNA, 22 nt, Human
auuucaucucuggaacauaacu

SEQ ID NO: 529607 - RNA, 21 nt, Human
ccucuggcuugugcugugccc

SEQ ID NO: 529608 - RNA, 22 nt, Human
acagguggcauaggcaguuuga

SEQ ID NO: 529609 - RNA, 22 nt, Human
agcauccagcauccuauagaaa

SEQ ID NO: 529610 - RNA, 22 nt, Human
gcagcugaauguccauugcugc

SEQ ID NO: 529611 - RNA, 22 nt, Human
uugaagcauuucuuugagcuuc

SEQ ID NO: 529612 - RNA, 22 nt, Human
auguguguaaacaaguauaauu

SEQ ID NO: 529613 - RNA, 22 nt, Human
ucugggagauccaagcagaacu

SEQ ID NO: 529614 - RNA, 22 nt, Human
gccaggugcauggcugagucuc

SEQ ID NO: 529615 - RNA, 22 nt, Human
ccaggcucagggcagacuuuca

SEQ ID NO: 529616 - RNA, 22 nt, Human
cagaauuuuucgaauguacugu

SEQ ID NO: 529617 - RNA, 22 nt, Human
ggcuggagauaugucuggaaca

SEQ ID NO: 529618 - RNA, 22 nt, Human
uacagaagcugagacacugaga

SEQ ID NO: 529619 - RNA, 22 nt, Human
gcuguucacggaggaggauggg

SEQ ID NO: 529620 - RNA, 20 nt, Human
uacauucaaaacaaacucug

SEQ ID NO: 529621 - RNA, 22 nt, Human
cucugugauuuugugagccaga

SEQ ID NO: 529622 - RNA, 22 nt, Human
uucacagauuucccugcacaug

SEQ ID NO: 529623 - RNA, 22 nt, Human
cuguccuggccgcccuugugag

SEQ ID NO: 529624 - RNA, 22 nt, Human
auauacuguaggccacuauaag

SEQ ID NO: 529625 - RNA, 22 nt, Human
cugggccucaagcucagauuuc

SEQ ID NO: 529626 - RNA, 22 nt, Human
gggcacagccuaacuauggaga

SEQ ID NO: 529627 - RNA, 22 nt, Human
gcaaaggcuagagacacaggga

SEQ ID NO: 529628 - RNA, 22 nt, Human
auaaaauuugcuacuguuaaau

SEQ ID NO: 529629 - RNA, 22 nt, Human
cugggcugucaauggcccucug

SEQ ID NO: 529630 - RNA, 22 nt, Human
ucaguguuuccugugguacagc

SEQ ID NO: 529631 - RNA, 22 nt, Human
cagugauggauauggagaaguc

SEQ ID NO: 529632 - RNA, 22 nt, Human
gcagggcagcugaagcuaggug

SEQ ID NO: 529633 - RNA, 22 nt, Human
accuauuuaugcaauuaugaaa

SEQ ID NO: 529634 - RNA, 22 nt, Human
ucucuuccaguaagagucuuua

SEQ ID NO: 529635 - RNA, 22 nt, Human
uccugccucaggcucuggagua

SEQ ID NO: 529636 - RNA, 22 nt, Human
ucagacagaaagaugaguaugg

SEQ ID NO: 529637 - RNA, 22 nt, Human
aaaucagaucuuacacaauugu

SEQ ID NO: 529638 - RNA, 21 nt, Human
agaggccuuacaggauagacc

SEQ ID NO: 529639 - RNA, 18 nt, Human
uggcaggggcaguacgcc

SEQ ID NO: 529640 - RNA, 22 nt, Human
uuugugcaauuuauguacuaua

SEQ ID NO: 529641 - RNA, 22 nt, Human
ggacacagcugcagccacaccc

SEQ ID NO: 529642 - RNA, 16 nt, Human
uccaggcauaucugag

SEQ ID NO: 529643 - RNA, 22 nt, Human
uuucauugcagagucugugugc

SEQ ID NO: 529644 - RNA, 22 nt, Human
aucagcuaauuagaauuaggau

SEQ ID NO: 529645 - RNA, 22 nt, Human
aagccacaaucugcaucagcau

SEQ ID NO: 529646 - RNA, 20 nt, Human
agaaggcuccuuuugccaag

SEQ ID NO: 529647 - RNA, 22 nt, Human
ucauucucagacucuuggccuc

SEQ ID NO: 529648 - RNA, 22 nt, Human
ggcuccuggggaggugagcuug

SEQ ID NO: 529649 - RNA, 22 nt, Human
acacauauauacauauuugugc

SEQ ID NO: 529650 - RNA, 22 nt, Human
aucaggaugcugucaguuacca

SEQ ID NO: 529651 - RNA, 22 nt, Human
cugggccuuaugaguaccugga

SEQ ID NO: 529652 - RNA, 22 nt, Human
agcaggaaggggccuagccugg

SEQ ID NO: 529653 - RNA, 22 nt, Human
ugccaggagagugcaugcaggg

SEQ ID NO: 529654 - RNA, 22 nt, Human
ucugugcaggaagucauuauga

SEQ ID NO: 529655 - RNA, 22 nt, Human
cagcuguuaugagguguacaug

SEQ ID NO: 529656 - RNA, 22 nt, Human
cugcagggaacugaggcccaga

SEQ ID NO: 529657 - RNA, 22 nt, Human
agggccucuaccauccaagguu

SEQ ID NO: 529658 - RNA, 21 nt, Human
uuguaaagguuuagaagaaug

SEQ ID NO: 529659 - RNA, 22 nt, Human
acuuuguaggaaaaagucacaa

SEQ ID NO: 529660 - RNA, 22 nt, Human
guggccuggcgagcuggcgcgg

SEQ ID NO: 529661 - RNA, 22 nt, Human
augugcaugcacuuacaugugu

SEQ ID NO: 529662 - RNA, 22 nt, Human
ucagcugcucuguugagcugaa

SEQ ID NO: 529663 - RNA, 22 nt, Human
ggcaagggacggccgugagaca

SEQ ID NO: 529664 - RNA, 22 nt, Human
cuggccuuuuguuucuggagaa

SEQ ID NO: 529665 - RNA, 22 nt, Human
uccagggcuuggcugggacggu

SEQ ID NO: 529666 - RNA, 22 nt, Human
acaaaugucuccucuuuuguua

SEQ ID NO: 529667 - RNA, 22 nt, Human
uuccugagggacuuuugagauu

SEQ ID NO: 529668 - RNA, 22 nt, Human
acaggcacaacugaguagacuc

SEQ ID NO: 529669 - RNA, 22 nt, Human
ggccugcuggcuccagcgcccg

SEQ ID NO: 529670 - RNA, 22 nt, Human
aucaggaucacagaaacuuuua

SEQ ID NO: 529671 - RNA, 22 nt, Human
augugagggaaaucagucagaa

SEQ ID NO: 529672 - RNA, 22 nt, Human
ccugggcugcaugauggcauuu

SEQ ID NO: 529673 - RNA, 22 nt, Human
aauaguguuguucacucaggag

SEQ ID NO: 529674 - RNA, 20 nt, Human
gagggcucguggauggauaa

SEQ ID NO: 529675 - RNA, 22 nt, Human
gggguggauuucaggcgguguc

SEQ ID NO: 529676 - RNA, 22 nt, Human
ccccuuccuuccucagacagcc

SEQ ID NO: 529677 - RNA, 22 nt, Human
uaaggccauuauggugggcccg

SEQ ID NO: 529678 - RNA, 22 nt, Human
ccugcuggacguggaggagggg

SEQ ID NO: 529679 - RNA, 22 nt, Human
ugcaccauuaauuuaugugaga

SEQ ID NO: 529680 - RNA, 22 nt, Human
guuuacaugcaugcaagaauga

SEQ ID NO: 529681 - RNA, 22 nt, Human
uggcuaggacucauccuguuuc

SEQ ID NO: 529682 - RNA, 19 nt, Human
ggagacucagcccaugccu

SEQ ID NO: 529683 - RNA, 22 nt, Human
uauauucaaugauuaguaucag

SEQ ID NO: 529684 - RNA, 22 nt, Human
ccuuguccucugguuuccuguu

SEQ ID NO: 529685 - RNA, 22 nt, Human
cacacauucaccaugacugaaa

SEQ ID NO: 529686 - RNA, 22 nt, Human
agaauuacagcuuuuagaauag

SEQ ID NO: 529687 - RNA, 22 nt, Human
caggauagaaaggccauggagu

SEQ ID NO: 529688 - RNA, 22 nt, Human
auuagggaaggauuuggccuga

SEQ ID NO: 529689 - RNA, 22 nt, Human
uuagccauugucagcacauggc

SEQ ID NO: 529690 - RNA, 22 nt, Human
agaaguaugugagaaauuaucc

SEQ ID NO: 529691 - RNA, 22 nt, Human
ucucuguggcaagcaugcugcu

SEQ ID NO: 529692 - RNA, 22 nt, Human
ccugccaggagcuggugcugca

SEQ ID NO: 529693 - RNA, 22 nt, Human
acccuggacuggggcugaggcu

SEQ ID NO: 529694 - RNA, 15 nt, Human
aaucuggcggcaagu

SEQ ID NO: 529695 - RNA, 22 nt, Human
gagccuguguuuccuguagcca

SEQ ID NO: 529696 - RNA, 22 nt, Human
agaaaugcucuuccugaccaga

SEQ ID NO: 529697 - RNA, 22 nt, Human
agcucagcccuccugugcagcu

SEQ ID NO: 529698 - RNA, 22 nt, Human
cuggggggagcugcguccagca

SEQ ID NO: 529699 - RNA, 20 nt, Human
acuggagccaucucagccua

SEQ ID NO: 529700 - RNA, 23 nt, Human
gggagccaggaccucgcgcccca

SEQ ID NO: 529701 - RNA, 19 nt, Human
aggaaagguggccuuagca

SEQ ID NO: 529702 - RNA, 22 nt, Human
ugagggaguuggguguauagga

SEQ ID NO: 529703 - RNA, 22 nt, Human
ccugucugagccagggugggca

SEQ ID NO: 529704 - RNA, 22 nt, Human
acacuuuagaaaaaagaauggu

SEQ ID NO: 529705 - RNA, 22 nt, Human
agaggccaucugcucugugggg

SEQ ID NO: 529706 - RNA, 22 nt, Human
ccaaagucagugcucagucguc

SEQ ID NO: 529707 - RNA, 20 nt, Human
acauccuggugacuagaacu

SEQ ID NO: 529708 - RNA, 22 nt, Human
gcagcugcuggaaguuccugcc

SEQ ID NO: 529709 - RNA, 22 nt, Human
gcaguguuuacauauuagaaac

SEQ ID NO: 529710 - RNA, 22 nt, Human
gcagccacagaggagggaugca

SEQ ID NO: 529711 - RNA, 22 nt, Human
cacagauaccuagugaaacaua

SEQ ID NO: 529712 - RNA, 22 nt, Human
gcugcugggcacccccugagcu

SEQ ID NO: 529713 - RNA, 18 nt, Human
augggaggggccaagaga

SEQ ID NO: 529714 - RNA, 22 nt, Human
ugaacaaacugcauucuucacu

SEQ ID NO: 529715 - RNA, 20 nt, Human
cuggggaggaggauguguuc

SEQ ID NO: 529716 - RNA, 22 nt, Human
aguaugaauggaaacuaccuau

SEQ ID NO: 529717 - RNA, 21 nt, Human
cucuucaguggugagcucuuc

SEQ ID NO: 529718 - RNA, 22 nt, Human
caggccuucucccucccucaac

SEQ ID NO: 529719 - RNA, 22 nt, Human
uuagggcuuuucugaauaggcc

SEQ ID NO: 529720 - RNA, 22 nt, Human
aaauagaauuaacuagcuacug

SEQ ID NO: 529721 - RNA, 22 nt, Human
uccauuuucuugcucuagguaa

SEQ ID NO: 529722 - RNA, 22 nt, Human
cugcuuuaaguauucaacaaag

SEQ ID NO: 529723 - RNA, 22 nt, Human
uugaaagcuccauauuguagag

SEQ ID NO: 529724 - RNA, 22 nt, Human
gaagcugggucgcugggauccu

SEQ ID NO: 529725 - RNA, 22 nt, Human
ccccuguguuguucaaggguca

SEQ ID NO: 529726 - RNA, 22 nt, Human
aggauugugccuccagucagaa

SEQ ID NO: 529727 - RNA, 22 nt, Human
acugggccuggauuggcguguc

SEQ ID NO: 529728 - RNA, 22 nt, Human
uuuauguacauauccacaagga

SEQ ID NO: 529729 - RNA, 22 nt, Human
caaagucuuggugaucaacuuu

SEQ ID NO: 529730 - RNA, 22 nt, Human
ccuccagguguuacauaugacu

SEQ ID NO: 529731 - RNA, 22 nt, Human
acagcuuuuuacuaauagauug

SEQ ID NO: 529732 - RNA, 20 nt, Human
uggagcuccagcguccaugu

SEQ ID NO: 529733 - RNA, 22 nt, Human
aacuucuggauguuucaaaugu

SEQ ID NO: 529734 - RNA, 22 nt, Human
gccugagcccaggugugcagag

SEQ ID NO: 529735 - RNA, 21 nt, Human
ugcagccauucagcccuaugc

SEQ ID NO: 529736 - RNA, 22 nt, Human
uaagcaguuuuucuuguauuaa

SEQ ID NO: 529737 - RNA, 22 nt, Human
uucagagagaccaaguggcgug

SEQ ID NO: 529738 - RNA, 22 nt, Human
gguggggcugcaagcaguucgg

SEQ ID NO: 529739 - RNA, 22 nt, Human
gggccugggaacuugcauuuag

SEQ ID NO: 529740 - RNA, 22 nt, Human
caaugaaagcaacugccuauaa

SEQ ID NO: 529741 - RNA, 22 nt, Human
auguggaaugaacaaaggaggc

SEQ ID NO: 529742 - RNA, 22 nt, Human
cagcuccuagaucggcgaagug

SEQ ID NO: 529743 - RNA, 23 nt, Human
ugccagaggcagucacaguggug

SEQ ID NO: 529744 - RNA, 22 nt, Human
auuuuuaugacaaaccauccuc

SEQ ID NO: 529745 - RNA, 22 nt, Human
ugcugcuccugccuggcuccca

SEQ ID NO: 529746 - RNA, 18 nt, Human
ucacagaauauugagugg

SEQ ID NO: 529747 - RNA, 22 nt, Human
gcucucugcagccuccuuggag

SEQ ID NO: 529748 - RNA, 22 nt, Human
agcagugaaacagcugcauaug

SEQ ID NO: 529749 - RNA, 22 nt, Human
aggaccagccuccaggucucuu

SEQ ID NO: 529750 - RNA, 22 nt, Human
ccugggcucaggcuugggcagc

SEQ ID NO: 529751 - RNA, 22 nt, Human
uguucauugcccccuguguaaa

SEQ ID NO: 529752 - RNA, 22 nt, Human
cccccaaaguuugcacggauaa

SEQ ID NO: 529753 - RNA, 22 nt, Human
cagcucaaguuucccaggucag

SEQ ID NO: 529754 - RNA, 22 nt, Human
uggagcugguaaacagugacau

SEQ ID NO: 529755 - RNA, 22 nt, Human
ugccaggcagugucagauugag

SEQ ID NO: 529756 - RNA, 21 nt, Human
gggaaauuaggauugcucauc

SEQ ID NO: 529757 - RNA, 22 nt, Human
uccaggagaggccugaccaggu

SEQ ID NO: 529758 - RNA, 22 nt, Human
cacaugaugguggaagccauag

SEQ ID NO: 529759 - RNA, 22 nt, Human
agggcccuuacgcaggcccuuc

SEQ ID NO: 529760 - RNA, 22 nt, Human
ucauuuguaccauuuuuuaaga

SEQ ID NO: 529761 - RNA, 22 nt, Human
gcugcccagcaggccccagggg

SEQ ID NO: 529762 - RNA, 21 nt, Human
gccagagcaguacaaugaggu

SEQ ID NO: 529763 - RNA, 22 nt, Human
uucugcauugacuuuuauuucc

SEQ ID NO: 529764 - RNA, 22 nt, Human
ugggccuuguccccucagcugu

SEQ ID NO: 529765 - RNA, 22 nt, Human
ccagcucccugaagccuggucu

SEQ ID NO: 529766 - RNA, 22 nt, Human
agaaucugcauuucuaauaagc

SEQ ID NO: 529767 - RNA, 20 nt, Human
aggaagccaaaggcugucuu

SEQ ID NO: 529768 - RNA, 19 nt, Human
agaaucaggucaggugaca

SEQ ID NO: 529769 - RNA, 22 nt, Human
acagaagagcacauuuaguaug

SEQ ID NO: 529770 - RNA, 22 nt, Human
uauauuaacacccacuugccuc

SEQ ID NO: 529771 - RNA, 22 nt, Human
cugugucucuccuuacaagacu

SEQ ID NO: 529772 - RNA, 18 nt, Human
acucaggaaaugaugaca

SEQ ID NO: 529773 - RNA, 22 nt, Human
uggccaggggaguuccccucca

SEQ ID NO: 529774 - RNA, 22 nt, Human
uuuuacuucauuccugacuuca

SEQ ID NO: 529775 - RNA, 22 nt, Human
aagggcagaaagggacgcuuug

SEQ ID NO: 529776 - RNA, 22 nt, Human
ccagagccucgcccggagccuc

SEQ ID NO: 529777 - RNA, 22 nt, Human
aaggaagaugaggugcugcuua

SEQ ID NO: 529778 - RNA, 22 nt, Human
ugugaaaucugaacucaaagau

SEQ ID NO: 529779 - RNA, 22 nt, Human
guauccuuugcggaaauuucua

SEQ ID NO: 529780 - RNA, 22 nt, Human
agacagcugcucgcagagcuau

SEQ ID NO: 529781 - RNA, 22 nt, Human
aaaguucuccuggauugugcug

SEQ ID NO: 529782 - RNA, 22 nt, Human
guccugggcccaggggcugccu

SEQ ID NO: 529783 - RNA, 22 nt, Human
cacagggccuggggcagcugcu

SEQ ID NO: 529784 - RNA, 22 nt, Human
ugucacagggauaccauggggc

SEQ ID NO: 529785 - RNA, 22 nt, Human
ugauuucccucaucauaacaga

SEQ ID NO: 529786 - RNA, 22 nt, Human
ggcugcucugcacaggggcugg

SEQ ID NO: 529787 - RNA, 20 nt, Human
guggcaggcagugaaggagc

SEQ ID NO: 529788 - RNA, 22 nt, Human
agcaccugcuuaaugugcagug

SEQ ID NO: 529789 - RNA, 22 nt, Human
agugcauugcaucucugcuuca

SEQ ID NO: 529790 - RNA, 22 nt, Human
gcuuugcagacaaaauuccagc

SEQ ID NO: 529791 - RNA, 17 nt, Human
ucaggcugugccuggua

SEQ ID NO: 529792 - RNA, 22 nt, Human
ucugccuguaccucuuuuuugc

SEQ ID NO: 529793 - RNA, 22 nt, Human
uuaacagauguuuauggagcau

SEQ ID NO: 529794 - RNA, 22 nt, Human
gagaaacaacacuugaugccuu

SEQ ID NO: 529795 - RNA, 22 nt, Human
gcagauggugccaugucuugug

SEQ ID NO: 529796 - RNA, 20 nt, Human
uguuccaugacuauuuggau

SEQ ID NO: 529797 - RNA, 22 nt, Human
ucagcagggagaggagaaugca

SEQ ID NO: 529798 - RNA, 22 nt, Human
uguguccuucugggagucccag

SEQ ID NO: 529799 - RNA, 22 nt, Human
aggcaggagcaagcccuacaag

SEQ ID NO: 529800 - RNA, 22 nt, Human
accaaacaaaauugugcacugu

SEQ ID NO: 529801 - RNA, 22 nt, Human
guauuuuauggcaugcaguggc

SEQ ID NO: 529802 - RNA, 22 nt, Human
augcacaucacucugaagaaaa

SEQ ID NO: 529803 - RNA, 20 nt, Human
guugaaaguaauaugaugcu

SEQ ID NO: 529804 - RNA, 22 nt, Human
cugcccugacugaccuuuugaa

SEQ ID NO: 529805 - RNA, 22 nt, Human
uauauuguagcugaugacaaau

SEQ ID NO: 529806 - RNA, 22 nt, Human
cuuggauuccgugaacuuaacc

SEQ ID NO: 529807 - RNA, 17 nt, Human
ucuggccuuccugaacu

SEQ ID NO: 529808 - RNA, 21 nt, Human
acaggcucacgauccauuucu

SEQ ID NO: 529809 - RNA, 22 nt, Human
ggcuuuauuauguggccaugug

SEQ ID NO: 529810 - RNA, 22 nt, Human
gcuccucuauuccccacauuuu

SEQ ID NO: 529811 - RNA, 22 nt, Human
uuuuagaaauacugauuuagug

SEQ ID NO: 529812 - RNA, 22 nt, Human
ugggagagucuaaaaccgaggu

SEQ ID NO: 529813 - RNA, 22 nt, Human
gcaccaggcuuagagccccagg

SEQ ID NO: 529814 - RNA, 22 nt, Human
auuucucaguguacauuauguu

SEQ ID NO: 529815 - RNA, 22 nt, Human
gauuucuuuagcucaucagauc

SEQ ID NO: 529816 - RNA, 22 nt, Human
aauguacaucucaguguaguac

SEQ ID NO: 529817 - RNA, 22 nt, Human
ccacccuggacaggccucugag

SEQ ID NO: 529818 - RNA, 19 nt, Human
ucugaauuauuuauguacc

SEQ ID NO: 529819 - RNA, 22 nt, Human
agggcuggcuaggugcguuccc

SEQ ID NO: 529820 - RNA, 22 nt, Human
uuugaaagggacaaagucacug

SEQ ID NO: 529821 - RNA, 22 nt, Human
uuugcugacuggaugcaguugg

SEQ ID NO: 529822 - RNA, 17 nt, Human
agccaggcauaugaagu

SEQ ID NO: 529823 - RNA, 22 nt, Human
cacaggagugcugcuauuguug

SEQ ID NO: 529824 - RNA, 22 nt, Human
acuucauuguaauauuauagca

SEQ ID NO: 529825 - RNA, 22 nt, Human
aaguuucauguggagguagacu

SEQ ID NO: 529826 - RNA, 22 nt, Human
gcuccccuugguccuccuggga

SEQ ID NO: 529827 - RNA, 22 nt, Human
gcauaauauacaugcuugaucc

SEQ ID NO: 529828 - RNA, 22 nt, Human
ucagcuuuuuggauugcccaag

SEQ ID NO: 529829 - RNA, 22 nt, Human
ucaagaauuuggauaagaaaug

SEQ ID NO: 529830 - RNA, 22 nt, Human
uuucaaagaguuguaaauuacu

SEQ ID NO: 529831 - RNA, 22 nt, Human
uuaaagggccgauuuccaggcc

SEQ ID NO: 529832 - RNA, 22 nt, Human
guggagcccugguagggacccc

SEQ ID NO: 529833 - RNA, 21 nt, Human
uucauuuguuauagacaaagu

SEQ ID NO: 529834 - RNA, 22 nt, Human
uucuguuuacucagaaauacaa

SEQ ID NO: 529835 - RNA, 22 nt, Human
gugggcagagcaagggaacuca

SEQ ID NO: 529836 - RNA, 22 nt, Human
aucacauuguuagcauagacug

SEQ ID NO: 529837 - RNA, 22 nt, Human
uacuuugucauucuaaccuucc

SEQ ID NO: 529838 - RNA, 22 nt, Human
ugaggccucauaaugagauuuc

SEQ ID NO: 529839 - RNA, 22 nt, Human
gccugguggacacugggcauca

SEQ ID NO: 529840 - RNA, 22 nt, Human
uuuggaaaguugucacuuuaga

SEQ ID NO: 529841 - RNA, 22 nt, Human
ccugugucagccccugccucca

SEQ ID NO: 529842 - RNA, 22 nt, Human
auaaaaguaggaccaacuuaca

SEQ ID NO: 529843 - RNA, 22 nt, Human
aaauucaguuuuaauaaucacu

SEQ ID NO: 529844 - RNA, 22 nt, Human
cagagaccccgcugcccuucug

SEQ ID NO: 529845 - RNA, 22 nt, Human
uuccagaaaucuuucagcucaa

SEQ ID NO: 529846 - RNA, 20 nt, Human
uuugagaccagucugcccaa

SEQ ID NO: 529847 - RNA, 22 nt, Human
agggccagaaucccucagucua

SEQ ID NO: 529848 - RNA, 22 nt, Human
ucagcuuuugucagaaauugua

SEQ ID NO: 529849 - RNA, 22 nt, Human
uucaugaaaguguaucuugugg

SEQ ID NO: 529850 - RNA, 23 nt, Human
guuaauaaugaacacuuucuccc

SEQ ID NO: 529851 - RNA, 22 nt, Human
cuucccuuucuggugacuucuc

SEQ ID NO: 529852 - RNA, 22 nt, Human
aaggaaccucuaagccucuguu

SEQ ID NO: 529853 - RNA, 22 nt, Human
uggccugggugcugcugacauc

SEQ ID NO: 529854 - RNA, 22 nt, Human
gucccuggaucugggacagcug

SEQ ID NO: 529855 - RNA, 22 nt, Human
ggaggaggggugacugaaugcu

SEQ ID NO: 529856 - RNA, 22 nt, Human
uuucaugugcaauuagcaauau

SEQ ID NO: 529857 - RNA, 22 nt, Human
ucaucacauaugucaugauuug

SEQ ID NO: 529858 - RNA, 22 nt, Human
uagauuuuuuggagacucucug

SEQ ID NO: 529859 - RNA, 22 nt, Human
agcagggcuuuggcuggcuuuc

SEQ ID NO: 529860 - RNA, 22 nt, Human
ugggagcacucuuugggaagca

SEQ ID NO: 529861 - RNA, 22 nt, Human
uguggcaaagaccauuucuuuc

SEQ ID NO: 529862 - RNA, 22 nt, Human
aaauuagauaugugugagacuc

SEQ ID NO: 529863 - RNA, 22 nt, Human
ggcaggagcucagguugguucc

SEQ ID NO: 529864 - RNA, 22 nt, Human
ucaugauuuccugguuaaggac

SEQ ID NO: 529865 - RNA, 22 nt, Human
acacuaaaugagucuacaguac

SEQ ID NO: 529866 - RNA, 23 nt, Human
auucuaagaugugaucuuauaac

SEQ ID NO: 529867 - RNA, 21 nt, Human
cugccuugaaugguacuggga

SEQ ID NO: 529868 - RNA, 22 nt, Human
agagugauggguugugcugacc

SEQ ID NO: 529869 - RNA, 22 nt, Human
ggcccagcacagugcuuggggg

SEQ ID NO: 529870 - RNA, 22 nt, Human
aagauggagcacgagcagaagc

SEQ ID NO: 529871 - RNA, 22 nt, Human
gcucugugcaguucagggacac

SEQ ID NO: 529872 - RNA, 17 nt, Human
agaggcagauacuugga

SEQ ID NO: 529873 - RNA, 22 nt, Human
uccaggccccugccugggccug

SEQ ID NO: 529874 - RNA, 22 nt, Human
ccugggaggcggagguugcagg

SEQ ID NO: 529875 - RNA, 22 nt, Human
gcagggugccgacuucagggau

SEQ ID NO: 529876 - RNA, 22 nt, Human
cuggauuuacugaguuuuauca

SEQ ID NO: 529877 - RNA, 23 nt, Human
agcugggccagguggucagaccu

SEQ ID NO: 529878 - RNA, 22 nt, Human
gccuggagcuacuggacacuga

SEQ ID NO: 529879 - RNA, 22 nt, Human
agccaggcuacuccuugcugac

SEQ ID NO: 529880 - RNA, 22 nt, Human
uguuucccuaaggucuggcucu

SEQ ID NO: 529881 - RNA, 22 nt, Human
cacugcaggucugagauggggg

SEQ ID NO: 529882 - RNA, 22 nt, Human
uagcauuuuagcuguuuucucu

SEQ ID NO: 529883 - RNA, 22 nt, Human
cucugggcacauuuuccaggac

SEQ ID NO: 529884 - RNA, 22 nt, Human
ggagccuggccuggcucugugu

SEQ ID NO: 529885 - RNA, 22 nt, Human
gggaccugaggcccugcuccac

SEQ ID NO: 529886 - RNA, 22 nt, Human
caagagcuggagaggcagucua

SEQ ID NO: 529887 - RNA, 22 nt, Human
uuuauuauucuguucucucuac

SEQ ID NO: 529888 - RNA, 20 nt, Human
aggagaaauucgggacaccu

SEQ ID NO: 529889 - RNA, 22 nt, Human
gggcugagucaucuggggccuc

SEQ ID NO: 529890 - RNA, 22 nt, Human
aucaaaguaucucaauauggua

SEQ ID NO: 529891 - RNA, 20 nt, Human
cugggcucaagugauccucc

SEQ ID NO: 529892 - RNA, 22 nt, Human
uuuaaaagggguauuaagucca

SEQ ID NO: 529893 - RNA, 22 nt, Human
caagcagagagguuagaacaca

SEQ ID NO: 529894 - RNA, 22 nt, Human
auagacuugguuaguaaauuug

SEQ ID NO: 529895 - RNA, 22 nt, Human
ugggccuggguuccuccugggc

SEQ ID NO: 529896 - RNA, 22 nt, Human
ucuucucaguuucucuaggaug

SEQ ID NO: 529897 - RNA, 22 nt, Human
ccagcagaagcucccgcugggu

SEQ ID NO: 529898 - RNA, 22 nt, Human
uaacuacaagggcggucucugu

SEQ ID NO: 529899 - RNA, 22 nt, Human
acggaaugagucuugaaaagug

SEQ ID NO: 529900 - RNA, 22 nt, Human
guguugaugacauuuuagaaac

SEQ ID NO: 529901 - RNA, 22 nt, Human
caggcucuuuugguggcaagga

SEQ ID NO: 529902 - RNA, 22 nt, Human
uagggcucagagaaguggggcc

SEQ ID NO: 529903 - RNA, 22 nt, Human
ucugcagauuuaucagcagcug

SEQ ID NO: 529904 - RNA, 22 nt, Human
uagauuuuacuucugucauuac

SEQ ID NO: 529905 - RNA, 22 nt, Human
uugcucuguccagccagcaggu

SEQ ID NO: 529906 - RNA, 22 nt, Human
accaaaaauuguggggcugaau

SEQ ID NO: 529907 - RNA, 20 nt, Human
gaagcagcuucauguagaca

SEQ ID NO: 529908 - RNA, 22 nt, Human
auuguaauuuuagagaaagugg

SEQ ID NO: 529909 - RNA, 22 nt, Human
uguuaacaucuuggacucguga

SEQ ID NO: 529910 - RNA, 22 nt, Human
gagccagguuugaaucucaguc

SEQ ID NO: 529911 - RNA, 22 nt, Human
gagugcaguaucuucugugucc

SEQ ID NO: 529912 - RNA, 22 nt, Human
acagcagcauaaacugacuaag

SEQ ID NO: 529913 - RNA, 22 nt, Human
cagcuuuaccuuuaggaguaac

SEQ ID NO: 529914 - RNA, 22 nt, Human
gccaccucggcuuucucugcuc

SEQ ID NO: 529915 - RNA, 22 nt, Human
gaacagcuucuugggagcuggg

SEQ ID NO: 529916 - RNA, 22 nt, Human
uaaauguguuagucaugguuuu

SEQ ID NO: 529917 - RNA, 22 nt, Human
agagcauccaucggccaggacc

SEQ ID NO: 529918 - RNA, 22 nt, Human
ucacagcauugucacaaggcug

SEQ ID NO: 529919 - RNA, 22 nt, Human
cauuuacuguugaaucccuagc

SEQ ID NO: 529920 - RNA, 22 nt, Human
uucuuucucagugggcagauac

SEQ ID NO: 529921 - RNA, 22 nt, Human
uuuauucaucaucuguucauau

SEQ ID NO: 529922 - RNA, 22 nt, Human
ggaccaaaauuacagucgcucc

SEQ ID NO: 529923 - RNA, 21 nt, Human
ucagaguggaagacaguuuga

SEQ ID NO: 529924 - RNA, 22 nt, Human
gccuuaggggucagacagagcu

SEQ ID NO: 529925 - RNA, 21 nt, Human
gcuccuggugcugcguggcgc

SEQ ID NO: 529926 - RNA, 22 nt, Human
uggcuagguagcuuucugcugu

SEQ ID NO: 529927 - RNA, 22 nt, Human
gaucaaaagcuggguucuaaaa

SEQ ID NO: 529928 - RNA, 22 nt, Human
gaagaacaccugcugcccagug

SEQ ID NO: 529929 - RNA, 22 nt, Human
uacagccacaggugacucucau

SEQ ID NO: 529930 - RNA, 22 nt, Human
cucugagcagaggccguggcua

SEQ ID NO: 529931 - RNA, 22 nt, Human
gugugcagcagagacaggacuc

SEQ ID NO: 529932 - RNA, 22 nt, Human
uuucacaguagaaaucauuaug

SEQ ID NO: 529933 - RNA, 22 nt, Human
caaaucugagucuacaauuuua

SEQ ID NO: 529934 - RNA, 22 nt, Human
ccaguguuuaggaauaaaaugu

SEQ ID NO: 529935 - RNA, 20 nt, Human
ccuggaagagcuccccaggc

SEQ ID NO: 529936 - RNA, 22 nt, Human
ccugcuggccacugcuccaccu

SEQ ID NO: 529937 - RNA, 22 nt, Human
uacauuuauaaggcuucucugu

SEQ ID NO: 529938 - RNA, 22 nt, Human
cauuaugugggaaaauguucuu

SEQ ID NO: 529939 - RNA, 22 nt, Human
uuguauuagcuguaaauuuucu

SEQ ID NO: 529940 - RNA, 21 nt, Human
guccucagcugaugggagcug

SEQ ID NO: 529941 - RNA, 18 nt, Human
cugcugugucgucugggc

SEQ ID NO: 529942 - RNA, 22 nt, Human
uuccaggacaagauguuucagg

SEQ ID NO: 529943 - RNA, 22 nt, Human
ggcccuguccuggcugucuccg

SEQ ID NO: 529944 - RNA, 22 nt, Human
ucaggcucugagcugaugcuaa

SEQ ID NO: 529945 - RNA, 22 nt, Human
cugcagagcauaaaucugaaua

SEQ ID NO: 529946 - RNA, 22 nt, Human
ggacuccucuagaaguugaggc

SEQ ID NO: 529947 - RNA, 22 nt, Human
uauuucuguaugcauaaaagga

SEQ ID NO: 529948 - RNA, 22 nt, Human
ucuuaacauauuauuuuagcac

SEQ ID NO: 529949 - RNA, 22 nt, Human
guguuuuaagaaagaagcucag

SEQ ID NO: 529950 - RNA, 20 nt, Human
ucaaagcaaagggagaugau

SEQ ID NO: 529951 - RNA, 22 nt, Human
gaggaggcacuaguuagugaca

SEQ ID NO: 529952 - RNA, 22 nt, Human
ccaggccaguguuugguccagg

SEQ ID NO: 529953 - RNA, 22 nt, Human
auuccugagacuuaucuguuuc

SEQ ID NO: 529954 - RNA, 22 nt, Human
acauuucauguuuuccagagca

SEQ ID NO: 529955 - RNA, 22 nt, Human
acugaugaaaacuaauaaauua

SEQ ID NO: 529956 - RNA, 22 nt, Human
aacagaauaguugauguacagu

SEQ ID NO: 529957 - RNA, 22 nt, Human
ucagccacuacccaccuuaaca

SEQ ID NO: 529958 - RNA, 22 nt, Human
cagcagugcuucagugugagau

SEQ ID NO: 529959 - RNA, 22 nt, Human
guguuuccucacuucucugacu

SEQ ID NO: 529960 - RNA, 23 nt, Human
uuucacagcuuuuauucugcauc

SEQ ID NO: 529961 - RNA, 22 nt, Human
gagcuggugugugcccgagcac

SEQ ID NO: 529962 - RNA, 22 nt, Human
ucucacagggcuaggcccugcc

SEQ ID NO: 529963 - RNA, 23 nt, Human
aaaugcagggucgcagguuacag

SEQ ID NO: 529964 - RNA, 22 nt, Human
gcacagcccuggucggggcccc

SEQ ID NO: 529965 - RNA, 18 nt, Human
agcugcagaccaggaggu

SEQ ID NO: 529966 - RNA, 22 nt, Human
uccaggcaaagccuuguagacg

SEQ ID NO: 529967 - RNA, 22 nt, Human
uguuacuuaucucacgugaugc

SEQ ID NO: 529968 - RNA, 20 nt, Human
gcacugaaauucaauguuug

SEQ ID NO: 529969 - RNA, 22 nt, Human
aaaccaucagauaauucauacu

SEQ ID NO: 529970 - RNA, 22 nt, Human
cucagaguccccaguggguuug

SEQ ID NO: 529971 - RNA, 22 nt, Human
ucucaggaaauaggauuugagu

SEQ ID NO: 529972 - RNA, 17 nt, Human
ggugagaccucccacuc

SEQ ID NO: 529973 - RNA, 23 nt, Human
uauugcacacauagaaacauaga

SEQ ID NO: 529974 - RNA, 22 nt, Human
ggaagccaugagggacaguucu

SEQ ID NO: 529975 - RNA, 22 nt, Human
uugguucaaagggauucaauuu

SEQ ID NO: 529976 - RNA, 22 nt, Human
cugggcuuagcagcuccugguc

SEQ ID NO: 529977 - RNA, 22 nt, Human
auucuucaucagagaugcacua

SEQ ID NO: 529978 - RNA, 22 nt, Human
ccugugugcacacgaggccaug

SEQ ID NO: 529979 - RNA, 22 nt, Human
gcaggcagguggcaucuuguga

SEQ ID NO: 529980 - RNA, 22 nt, Human
aauuucacuggaaaagauaauu

SEQ ID NO: 529981 - RNA, 22 nt, Human
uuguauuugauugucauaucgu

SEQ ID NO: 529982 - RNA, 22 nt, Human
caguggcugugaccagggaccu

SEQ ID NO: 529983 - RNA, 21 nt, Human
uugaagcaaggguggcucuga

SEQ ID NO: 529984 - RNA, 22 nt, Human
cuucuuggaagucguccuucca

SEQ ID NO: 529985 - RNA, 22 nt, Human
aaaaucugcuuccuuuuacaga

SEQ ID NO: 529986 - RNA, 22 nt, Human
cuaucaaacagccauuaauaua

SEQ ID NO: 529987 - RNA, 22 nt, Human
uuuauccauucaccaguugaac

SEQ ID NO: 529988 - RNA, 22 nt, Human
guccccugguggcuggagcugc

SEQ ID NO: 529989 - RNA, 22 nt, Human
aaagauuucacaucccaagccu

SEQ ID NO: 529990 - RNA, 18 nt, Human
ucagcuuuugaaaaccaa

SEQ ID NO: 529991 - RNA, 22 nt, Human
auggaagggacagaagggcaag

SEQ ID NO: 529992 - RNA, 22 nt, Human
auugcaaagaaauacaugcuua

SEQ ID NO: 529993 - RNA, 22 nt, Human
uuuguaagcaaguuaacauuuu

SEQ ID NO: 529994 - RNA, 22 nt, Human
aagaaauuaaggaaugcaacga

SEQ ID NO: 529995 - RNA, 22 nt, Human
acauacauggugcuuucuuggu

SEQ ID NO: 529996 - RNA, 22 nt, Human
aggagaaggaagugcaucacua

SEQ ID NO: 529997 - RNA, 22 nt, Human
cugggacacccaaggaaagagc

SEQ ID NO: 529998 - RNA, 22 nt, Human
gagggcucaacuacuacuaggc

SEQ ID NO: 529999 - RNA, 18 nt, Human
cuaacagggaaaauagaa

SEQ ID NO: 530000 - RNA, 22 nt, Human
ucauugcaagcucauuuaucug

SEQ ID NO: 530001 - RNA, 22 nt, Human
agggcugcccagugugagagcu

SEQ ID NO: 530002 - RNA, 22 nt, Human
gcaggcaguuugcuuuucccuc

SEQ ID NO: 530003 - RNA, 22 nt, Human
uguaugaaccuuuaauauagug

SEQ ID NO: 530004 - RNA, 22 nt, Human
gggcaguguggucgugccuuug

SEQ ID NO: 530005 - RNA, 22 nt, Human
uagaaaugugauaauagcuuaa

SEQ ID NO: 530006 - RNA, 22 nt, Human
acaaaugcaaguuuuaugucaa

SEQ ID NO: 530007 - RNA, 22 nt, Human
agucccagagaggucggggcca

SEQ ID NO: 530008 - RNA, 22 nt, Human
auuguacaugcagugagucauc

SEQ ID NO: 530009 - RNA, 22 nt, Human
aagugaaauugccauucuuaua

SEQ ID NO: 530010 - RNA, 22 nt, Human
uuaguaaauaaagucuacuuuc

SEQ ID NO: 530011 - RNA, 21 nt, Human
aggaggaacccguggcugggc

SEQ ID NO: 530012 - RNA, 22 nt, Human
uccuggaucagcgggggcaggc

SEQ ID NO: 530013 - RNA, 19 nt, Human
cugugcuuuaaacuccuau

SEQ ID NO: 530014 - RNA, 22 nt, Human
gggccucuccggccuuugcauc

SEQ ID NO: 530015 - RNA, 22 nt, Human
caaaguaauuuggagauauaua

SEQ ID NO: 530016 - RNA, 22 nt, Human
ugcucccaggcauucucuguug

SEQ ID NO: 530017 - RNA, 22 nt, Human
uuguguguacugguuaugggca

SEQ ID NO: 530018 - RNA, 22 nt, Human
uucaacauuugauacaagucag

SEQ ID NO: 530019 - RNA, 22 nt, Human
ugaaagggaaccugcuggacug

SEQ ID NO: 530020 - RNA, 22 nt, Human
ccugaauaauuugugaaaagau

SEQ ID NO: 530021 - RNA, 22 nt, Human
ugugaaauauuggcaauuucau

SEQ ID NO: 530022 - RNA, 22 nt, Human
caggcacagaguuauucauuua

SEQ ID NO: 530023 - RNA, 22 nt, Human
uuaacuugucagaaaauacagu

SEQ ID NO: 530024 - RNA, 22 nt, Human
gccagcuggagugagagugggc

SEQ ID NO: 530025 - RNA, 22 nt, Human
aacugaacugauaacauacacg

SEQ ID NO: 530026 - RNA, 22 nt, Human
uuucuaggcacagugucuuccc

SEQ ID NO: 530027 - RNA, 22 nt, Human
gagcucugccauggcucccacc

SEQ ID NO: 530028 - RNA, 22 nt, Human
aagacuaaauguguucuaaagu

SEQ ID NO: 530029 - RNA, 22 nt, Human
ggcugccuccacugcuuguccc

SEQ ID NO: 530030 - RNA, 22 nt, Human
ucccucagucccuggacaggca

SEQ ID NO: 530031 - RNA, 22 nt, Human
gggaaggacacagccaugacug

SEQ ID NO: 530032 - RNA, 22 nt, Human
ggggcugaaccuggaggugguc

SEQ ID NO: 530033 - RNA, 22 nt, Human
gggugcagagcuuaacuguagg

SEQ ID NO: 530034 - RNA, 22 nt, Human
gcaccaggcagcugagcaggcc

SEQ ID NO: 530035 - RNA, 18 nt, Human
cugugcagcaaacugagc

SEQ ID NO: 530036 - RNA, 22 nt, Human
ggacacuguauaaguuagagua

SEQ ID NO: 530037 - RNA, 22 nt, Human
ugcccauguuucucuguauccc

SEQ ID NO: 530038 - RNA, 22 nt, Human
cagagguaccagcagccucugg

SEQ ID NO: 530039 - RNA, 22 nt, Human
uguucuuagcaggagcaucuau

SEQ ID NO: 530040 - RNA, 22 nt, Human
aagagcugcccaaggugaacag

SEQ ID NO: 530041 - RNA, 22 nt, Human
ugcacacacggagauaggcuuu

SEQ ID NO: 530042 - RNA, 22 nt, Human
gaaacaaucaucaugugauuug

SEQ ID NO: 530043 - RNA, 22 nt, Human
cuuguuaaaaugcagauuccaa

SEQ ID NO: 530044 - RNA, 22 nt, Human
cagggacugagauccagacugu

SEQ ID NO: 530045 - RNA, 18 nt, Human
agucuucugauccauuuu

SEQ ID NO: 530046 - RNA, 22 nt, Human
agauuaucuccugauuuuaagg

SEQ ID NO: 530047 - RNA, 22 nt, Human
cauuuaguccuugacuucucuc

SEQ ID NO: 530048 - RNA, 22 nt, Human
augugugccccuuuuacucuuu

SEQ ID NO: 530049 - RNA, 22 nt, Human
uggcaaagacugcaaggacuuu

SEQ ID NO: 530050 - RNA, 21 nt, Human
uccuucucuaugauugucuga

SEQ ID NO: 530051 - RNA, 22 nt, Human
auguaucagaaauagcauuggc

SEQ ID NO: 530052 - RNA, 22 nt, Human
uauacagaacugcacgugcacg

SEQ ID NO: 530053 - RNA, 22 nt, Human
gcgagggcacgcgguugaaggc

SEQ ID NO: 530054 - RNA, 22 nt, Human
ucaugcaaucucuuguucagga

SEQ ID NO: 530055 - RNA, 22 nt, Human
aaguugaagcaugaaccaaggu

SEQ ID NO: 530056 - RNA, 22 nt, Human
ugcagagcagcaacugcgugcg

SEQ ID NO: 530057 - RNA, 22 nt, Human
cgcaggcaagagaguacaguua

SEQ ID NO: 530058 - RNA, 22 nt, Human
uuugcaaauaccaugaaacuug

SEQ ID NO: 530059 - RNA, 22 nt, Human
cugaagcaggccuacuucauug

SEQ ID NO: 530060 - RNA, 22 nt, Human
uauuuaaaaagaggccagcugg

SEQ ID NO: 530061 - RNA, 22 nt, Human
gcagggcuccccaggcccgagg

SEQ ID NO: 530062 - RNA, 22 nt, Human
acauuuugagaaaugacaagcu

SEQ ID NO: 530063 - RNA, 22 nt, Human
aaauauuauugcuuaaggggag

SEQ ID NO: 530064 - RNA, 22 nt, Human
cccugccuugggguccacaccg

SEQ ID NO: 530065 - RNA, 22 nt, Human
cugcucucuguuccccuggauc

SEQ ID NO: 530066 - RNA, 22 nt, Human
ucugaaauaagggagaagggaa

SEQ ID NO: 530067 - RNA, 22 nt, Human
agggcuggccacaugauuuggu

SEQ ID NO: 530068 - RNA, 22 nt, Human
cuggggaauagagcuggagacc

SEQ ID NO: 530069 - RNA, 21 nt, Human
ugcucacagaugugcucagug

SEQ ID NO: 530070 - RNA, 22 nt, Human
uucccacauucuuuacauucau

SEQ ID NO: 530071 - RNA, 19 nt, Human
uccucaggggcucacagac

SEQ ID NO: 530072 - RNA, 22 nt, Human
aauuuuaucucuaagcaggcuu

SEQ ID NO: 530073 - RNA, 22 nt, Human
cagggugcagugucgcugcuag

SEQ ID NO: 530074 - RNA, 22 nt, Human
ucauuguuucugcuuuucauga

SEQ ID NO: 530075 - RNA, 20 nt, Human
ucagagucaucaaagauggu

SEQ ID NO: 530076 - RNA, 22 nt, Human
ucagcagcagcucagcauguuu

SEQ ID NO: 530077 - RNA, 22 nt, Human
agcaccaagccuagagugaugu

SEQ ID NO: 530078 - RNA, 23 nt, Human
gccugugccuaugcccagcucug

SEQ ID NO: 530079 - RNA, 22 nt, Human
aaagcagaggugauaugacuua

SEQ ID NO: 530080 - RNA, 22 nt, Human
cugugggaauacugcgagugua

SEQ ID NO: 530081 - RNA, 22 nt, Human
aaaugucugagacuucugaacu

SEQ ID NO: 530082 - RNA, 23 nt, Human
uccagagugugagcuugccgugc

SEQ ID NO: 530083 - RNA, 22 nt, Human
ugggaggaagugcuaaugggag

SEQ ID NO: 530084 - RNA, 22 nt, Human
aacccaggguggagguugcagu

SEQ ID NO: 530085 - RNA, 22 nt, Human
agaagagaacugccaaacacuu

SEQ ID NO: 530086 - RNA, 22 nt, Human
aauaaaguguauucuuugucau

SEQ ID NO: 530087 - RNA, 22 nt, Human
uauccaaaguggcauauuauag

SEQ ID NO: 530088 - RNA, 22 nt, Human
ugggccuccaauuccagcggga

SEQ ID NO: 530089 - RNA, 22 nt, Human
guacaaaugagaguucuguuuu

SEQ ID NO: 530090 - RNA, 22 nt, Human
cugugucuaaucaggucaguca

SEQ ID NO: 530091 - RNA, 22 nt, Human
agacacaguguugaaggcuagu

SEQ ID NO: 530092 - RNA, 22 nt, Human
gcucugcucuugacuuaccagg

SEQ ID NO: 530093 - RNA, 22 nt, Human
cagagugggcugucagccacca

SEQ ID NO: 530094 - RNA, 22 nt, Human
cacaggagggagcgggcagcca

SEQ ID NO: 530095 - RNA, 22 nt, Human
uccugcacauuaguauuuuuua

SEQ ID NO: 530096 - RNA, 22 nt, Human
ucuggccagugaaaugcagaau

SEQ ID NO: 530097 - RNA, 22 nt, Human
cugaggagugggugggcaguga

SEQ ID NO: 530098 - RNA, 19 nt, Human
acccagagcccuuugcagg

SEQ ID NO: 530099 - RNA, 22 nt, Human
cacagaagaaucaugcuguguu

SEQ ID NO: 530100 - RNA, 20 nt, Human
ucuuacaaucguuacaucca

SEQ ID NO: 530101 - RNA, 22 nt, Human
uuuuaauacugcuauuguagga

SEQ ID NO: 530102 - RNA, 19 nt, Human
uuuuguguagcugcugguu

SEQ ID NO: 530103 - RNA, 21 nt, Human
gccaccccuggcacaggugcu

SEQ ID NO: 530104 - RNA, 22 nt, Human
caugaacagauucuucauuucu

SEQ ID NO: 530105 - RNA, 22 nt, Human
gaggcugcaggcaaugcugccc

SEQ ID NO: 530106 - RNA, 22 nt, Human
uuaauaugcugcuucuugaaaa

SEQ ID NO: 530107 - RNA, 17 nt, Human
agauggcaggaggcaga

SEQ ID NO: 530108 - RNA, 22 nt, Human
acuuuuaugauaaucaauguuc

SEQ ID NO: 530109 - RNA, 22 nt, Human
aagguaauccauaauaguuacu

SEQ ID NO: 530110 - RNA, 22 nt, Human
cacuuaagcaguuaauuuaucu

SEQ ID NO: 530111 - RNA, 22 nt, Human
cagggcugaaaucaagguguag

SEQ ID NO: 530112 - RNA, 22 nt, Human
ugaaaguugcacauaagagaau

SEQ ID NO: 530113 - RNA, 22 nt, Human
ucauauauuuuggcagugauca

SEQ ID NO: 530114 - RNA, 22 nt, Human
gcucaggaucagccaccucuuu

SEQ ID NO: 530115 - RNA, 22 nt, Human
uuguaacaaucugucauaaaug

SEQ ID NO: 530116 - RNA, 18 nt, Human
auuuugaacugggaauau

SEQ ID NO: 530117 - RNA, 19 nt, Human
aguuuauuauaggugauuc

SEQ ID NO: 530118 - RNA, 21 nt, Human
cuggagucauuuucugaguag

SEQ ID NO: 530119 - RNA, 19 nt, Human
uacagugaaccaggaggag

SEQ ID NO: 530120 - RNA, 22 nt, Human
uuuucaagggcagggaaaucau

SEQ ID NO: 530121 - RNA, 22 nt, Human
uuuuauuggagugauaccaagc

SEQ ID NO: 530122 - RNA, 22 nt, Human
caagucaucauagaaguucccc

SEQ ID NO: 530123 - RNA, 23 nt, Human
ggaguuggauuguacuugcugcu

SEQ ID NO: 530124 - RNA, 22 nt, Human
uaauagaauaguggaaacauug

SEQ ID NO: 530125 - RNA, 22 nt, Human
cagcuguuguuaugucugcagg

SEQ ID NO: 530126 - RNA, 22 nt, Human
aaacaaguuuguagacuagcca

SEQ ID NO: 530127 - RNA, 21 nt, Human
aaggccugcuuacugcuaguu

SEQ ID NO: 530128 - RNA, 22 nt, Human
aucaacauaaagaaguccucag

SEQ ID NO: 530129 - RNA, 19 nt, Human
cugcucccuccuucuggca

SEQ ID NO: 530130 - RNA, 22 nt, Human
gaggaagcugcguggcauuuca

SEQ ID NO: 530131 - RNA, 22 nt, Human
augcuuuuaugucacaugguca

SEQ ID NO: 530132 - RNA, 22 nt, Human
ucacuggggccuuuggucagga

SEQ ID NO: 530133 - RNA, 22 nt, Human
uggcccugucccuggagccugg

SEQ ID NO: 530134 - RNA, 19 nt, Human
uugaggggccaggggagau

SEQ ID NO: 530135 - RNA, 22 nt, Human
uauuuauaaucugccaaagaga

SEQ ID NO: 530136 - RNA, 22 nt, Human
ucugcaauguuuucccauccug

SEQ ID NO: 530137 - RNA, 22 nt, Human
ggcaggugacggggaugaguau

SEQ ID NO: 530138 - RNA, 22 nt, Human
uagagcugauaaugaggccaag

SEQ ID NO: 530139 - RNA, 22 nt, Human
uacacagaaccugguguacagu

SEQ ID NO: 530140 - RNA, 22 nt, Human
gggcugacauauuuggugcucu

SEQ ID NO: 530141 - RNA, 22 nt, Human
caagaaauuucuuaagaacuaa

SEQ ID NO: 530142 - RNA, 22 nt, Human
uuucuaaacaaagggaguuugg

SEQ ID NO: 530143 - RNA, 22 nt, Human
uucaagaagcccaaagacuagc

SEQ ID NO: 530144 - RNA, 22 nt, Human
acuacuuugggccauuuguuua

SEQ ID NO: 530145 - RNA, 22 nt, Human
acaguguauauuguuuaucugg

SEQ ID NO: 530146 - RNA, 22 nt, Human
uccaggagguuuggaggaagca

SEQ ID NO: 530147 - RNA, 20 nt, Human
cucugagguaucuguaaagu

SEQ ID NO: 530148 - RNA, 22 nt, Human
guuucaaagggaagacgcugga

SEQ ID NO: 530149 - RNA, 22 nt, Human
cagaaacacuguauuuagggaa

SEQ ID NO: 530150 - RNA, 22 nt, Human
uucagaaugugaccuuauuugg

SEQ ID NO: 530151 - RNA, 22 nt, Human
ggaggguuagcaaaggcacaga

SEQ ID NO: 530152 - RNA, 22 nt, Human
uggggcuguggauucucacgaa

SEQ ID NO: 530153 - RNA, 22 nt, Human
agagugagggggcacugagacg

SEQ ID NO: 530154 - RNA, 22 nt, Human
ggguggcagcuguugccaaggu

SEQ ID NO: 530155 - RNA, 22 nt, Human
aaguuauaucaucucauugacg

SEQ ID NO: 530156 - RNA, 22 nt, Human
cauuugaaugagauugcuguaa

SEQ ID NO: 530157 - RNA, 22 nt, Human
gccaccaggagcccaguccaaa

SEQ ID NO: 530158 - RNA, 22 nt, Human
agucaguggcuccgagccuggu

SEQ ID NO: 530159 - RNA, 22 nt, Human
gucuccagaauucuugggaggg

SEQ ID NO: 530160 - RNA, 22 nt, Human
ggcaggugugagcuguaaagga

SEQ ID NO: 530161 - RNA, 22 nt, Human
aggaggcuguggagcacuccau

SEQ ID NO: 530162 - RNA, 22 nt, Human
cugaaagaauaagauguuuaca

SEQ ID NO: 530163 - RNA, 22 nt, Human
uucagaaguuuucaaaacuaag

SEQ ID NO: 530164 - RNA, 22 nt, Human
uugcaagggcaugugugcgugu

SEQ ID NO: 530165 - RNA, 22 nt, Human
uucacauuaagccuccuccuac

SEQ ID NO: 530166 - RNA, 22 nt, Human
cucacuguuuaauagcuggauc

SEQ ID NO: 530167 - RNA, 22 nt, Human
cuagaaaaauacuuuauuguga

SEQ ID NO: 530168 - RNA, 22 nt, Human
ugcugcucuguaaagugaugag

SEQ ID NO: 530169 - RNA, 22 nt, Human
uuucccaggcccucagggcugc

SEQ ID NO: 530170 - RNA, 22 nt, Human
ucuagaaacaugacauugaucu

SEQ ID NO: 530171 - RNA, 21 nt, Human
uucugcuaagaaaacauuauu

SEQ ID NO: 530172 - RNA, 22 nt, Human
gucaggaucucccaguacauau

SEQ ID NO: 530173 - RNA, 22 nt, Human
uuauuugcccauguuuagcaga

SEQ ID NO: 530174 - RNA, 22 nt, Human
aguuggagugaacaugagauug

SEQ ID NO: 530175 - RNA, 22 nt, Human
agagugggcaggagccucgacu

SEQ ID NO: 530176 - RNA, 23 nt, Human
acacagaagaagacccaaggaag

SEQ ID NO: 530177 - RNA, 22 nt, Human
agggaugguggagguugcaagu

SEQ ID NO: 530178 - RNA, 22 nt, Human
gucauuuugcugcauauuuaga

SEQ ID NO: 530179 - RNA, 23 nt, Human
uggcagagacccagaaucuacau

SEQ ID NO: 530180 - RNA, 22 nt, Human
agcauggggcaaugcaugugcu

SEQ ID NO: 530181 - RNA, 22 nt, Human
augaaaacggaccagagcuauu

SEQ ID NO: 530182 - RNA, 22 nt, Human
ucagcauuguggcagagaaugg

SEQ ID NO: 530183 - RNA, 22 nt, Human
agcugagcacauucaaacaggu

SEQ ID NO: 530184 - RNA, 22 nt, Human
uucccaugccuggccccuaucc

SEQ ID NO: 530185 - RNA, 22 nt, Human
gacauuuagaaguuagauucaa

SEQ ID NO: 530186 - RNA, 19 nt, Human
uuuauuugagacaugccuu

SEQ ID NO: 530187 - RNA, 22 nt, Human
ucaggaagcauccugagguguc

SEQ ID NO: 530188 - RNA, 22 nt, Human
ugugacuaucauucuaaacauc

SEQ ID NO: 530189 - RNA, 22 nt, Human
agcucagguagacucagcaucu

SEQ ID NO: 530190 - RNA, 22 nt, Human
uacagugucccuuuuucagaca

SEQ ID NO: 530191 - RNA, 22 nt, Human
ugucagugguagacccagaggu

SEQ ID NO: 530192 - RNA, 22 nt, Human
ugcagcuucuccaucuccuugu

SEQ ID NO: 530193 - RNA, 22 nt, Human
auguuucaccagcaaauuaccu

SEQ ID NO: 530194 - RNA, 22 nt, Human
acaaagucaaauugcagccgcc

SEQ ID NO: 530195 - RNA, 22 nt, Human
aaaugucagaggaacauauuga

SEQ ID NO: 530196 - RNA, 22 nt, Human
ggagaaggaauauuggaguagg

SEQ ID NO: 530197 - RNA, 17 nt, Human
auuucacuuagcaugag

SEQ ID NO: 530198 - RNA, 22 nt, Human
ccaucuccacugucccugucaa

SEQ ID NO: 530199 - RNA, 22 nt, Human
ccaaagagcuagaauuauaggc

SEQ ID NO: 530200 - RNA, 22 nt, Human
augcucucuguccugcucagag

SEQ ID NO: 530201 - RNA, 22 nt, Human
acugcuuuucagagucugccug

SEQ ID NO: 530202 - RNA, 22 nt, Human
gguagcacauugcauuaggaga

SEQ ID NO: 530203 - RNA, 22 nt, Human
ccuucugcuggucaucccagug

SEQ ID NO: 530204 - RNA, 22 nt, Human
cuacccagcaccuaggcugccu

SEQ ID NO: 530205 - RNA, 22 nt, Human
caguggcaugguugacugcagu

SEQ ID NO: 530206 - RNA, 22 nt, Human
uagaaaagauaacauucugugc

SEQ ID NO: 530207 - RNA, 22 nt, Human
ccaguccacgucaagaagaggu

SEQ ID NO: 530208 - RNA, 22 nt, Human
ucacucagaaauagaaugaacc

SEQ ID NO: 530209 - RNA, 22 nt, Human
ugcaaaugaugaaacuaacuuu

SEQ ID NO: 530210 - RNA, 22 nt, Human
uuuucuauuaacucauuuugca

SEQ ID NO: 530211 - RNA, 22 nt, Human
uuuucaguaaugucuacauaau

SEQ ID NO: 530212 - RNA, 22 nt, Human
ugccuggcacuccuggagcuca

SEQ ID NO: 530213 - RNA, 22 nt, Human
agaggcuuggccucaguucugu

SEQ ID NO: 530214 - RNA, 22 nt, Human
gccagcugguaggcaccuagcc

SEQ ID NO: 530215 - RNA, 22 nt, Human
agcaaauacauuuuuagcauaa

SEQ ID NO: 530216 - RNA, 22 nt, Human
gcuggacucaggggacucaggg

SEQ ID NO: 530217 - RNA, 22 nt, Human
aauucacaauguguagucaugc

SEQ ID NO: 530218 - RNA, 22 nt, Human
gaaggaggcguuagcccuagga

SEQ ID NO: 530219 - RNA, 21 nt, Human
gcucccuggcugugugaccug

SEQ ID NO: 530220 - RNA, 22 nt, Human
aguggcagagccaagauaugau

SEQ ID NO: 530221 - RNA, 22 nt, Human
agcuaagacuuagugacuuagu

SEQ ID NO: 530222 - RNA, 20 nt, Human
aguguuccggaagacuggca

SEQ ID NO: 530223 - RNA, 22 nt, Human
ucaaaaucaaagauacuugaaa

SEQ ID NO: 530224 - RNA, 22 nt, Human
accuggcuuuggggauaggcuu

SEQ ID NO: 530225 - RNA, 22 nt, Human
gcagggcuguggacacuuuggu

SEQ ID NO: 530226 - RNA, 22 nt, Human
uaaguucaguuggucgaaguag

SEQ ID NO: 530227 - RNA, 22 nt, Human
gaaggcuugcagcucuguggca

SEQ ID NO: 530228 - RNA, 22 nt, Human
caagggcucacggucugcuggg

SEQ ID NO: 530229 - RNA, 22 nt, Human
uuuucaaagacuggaggcugau

SEQ ID NO: 530230 - RNA, 21 nt, Human
auaagcaugcugauuacauuu

SEQ ID NO: 530231 - RNA, 20 nt, Human
gucaucgccggcagcaaaga

SEQ ID NO: 530232 - RNA, 22 nt, Human
cugcuuugacuguuaagaacca

SEQ ID NO: 530233 - RNA, 22 nt, Human
aaauguguuuagaugguuuauu

SEQ ID NO: 530234 - RNA, 22 nt, Human
aguguccccuacagaggcauuc

SEQ ID NO: 530235 - RNA, 22 nt, Human
ucaaaguacuacucaguucagc

SEQ ID NO: 530236 - RNA, 23 nt, Human
aaaugcacaguauugauuuuuaa

SEQ ID NO: 530237 - RNA, 22 nt, Human
cacauuugaaggaauuagcauu

SEQ ID NO: 530238 - RNA, 22 nt, Human
uaguuuguaaugaggagaagua

SEQ ID NO: 530239 - RNA, 20 nt, Human
ucaauuucagguagcauagu

SEQ ID NO: 530240 - RNA, 22 nt, Human
aggcacugugcugaugucuuau

SEQ ID NO: 530241 - RNA, 22 nt, Human
aucucagucagguugaauuugg

SEQ ID NO: 530242 - RNA, 22 nt, Human
gaggagaagcuauuggaaggac

SEQ ID NO: 530243 - RNA, 22 nt, Human
auuuuacauaaggaagguuuaa

SEQ ID NO: 530244 - RNA, 22 nt, Human
cauccugguuaccccauaguca

SEQ ID NO: 530245 - RNA, 22 nt, Human
uuccagaggggagguggcagcc

SEQ ID NO: 530246 - RNA, 22 nt, Human
ugcuuuauaacuuaguuuaugg

SEQ ID NO: 530247 - RNA, 22 nt, Human
aagacaaagggguccuuggaug

SEQ ID NO: 530248 - RNA, 22 nt, Human
uucuaaacugaaguauuuuaaa

SEQ ID NO: 530249 - RNA, 22 nt, Human
caccucugcuguccacaggaug

SEQ ID NO: 530250 - RNA, 22 nt, Human
acuggcuugaaguagauucaaa

SEQ ID NO: 530251 - RNA, 22 nt, Human
ugggcuggcccaccacaccucg

SEQ ID NO: 530252 - RNA, 22 nt, Human
uuaacaaggugacugcauuaaa

SEQ ID NO: 530253 - RNA, 22 nt, Human
agggucaguucugugagguguu

SEQ ID NO: 530254 - RNA, 22 nt, Human
uuuucuuuaaucugguggggug

SEQ ID NO: 530255 - RNA, 17 nt, Human
auuucccagcagugcua

SEQ ID NO: 530256 - RNA, 22 nt, Human
agagcugggugguggugacuca

SEQ ID NO: 530257 - RNA, 22 nt, Human
cagggagaagucuggucagucc

SEQ ID NO: 530258 - RNA, 22 nt, Human
ugcagagaaaccaguggaggac

SEQ ID NO: 530259 - RNA, 22 nt, Human
acuggcugaaguuuacuuuuug

SEQ ID NO: 530260 - RNA, 19 nt, Human
gcuccugggccucacucau

SEQ ID NO: 530261 - RNA, 22 nt, Human
cugcaggauucucccaguugga

SEQ ID NO: 530262 - RNA, 22 nt, Human
ugaguaauaaacugucuugcuc

SEQ ID NO: 530263 - RNA, 22 nt, Human
acaugauuaaaagauuuuaaag

SEQ ID NO: 530264 - RNA, 22 nt, Human
aagggcuggaauaucucuuaga

SEQ ID NO: 530265 - RNA, 22 nt, Human
guuuuccauggaggucugaccu

SEQ ID NO: 530266 - RNA, 22 nt, Human
acagacauggaccaagcacugu

SEQ ID NO: 530267 - RNA, 22 nt, Human
cagggucuuauaaggccaauuu

SEQ ID NO: 530268 - RNA, 22 nt, Human
cugugcccauaaucugguauuu

SEQ ID NO: 530269 - RNA, 22 nt, Human
uccagagugacaaaugacugau

SEQ ID NO: 530270 - RNA, 22 nt, Human
gacagccaucagcacacgcugc

SEQ ID NO: 530271 - RNA, 22 nt, Human
acucaggaauggggcugggacu

SEQ ID NO: 530272 - RNA, 22 nt, Human
gcuucuggaagcugcuucugcc

SEQ ID NO: 530273 - RNA, 22 nt, Human
uugaaaggguuaaagugguaaa

SEQ ID NO: 530274 - RNA, 22 nt, Human
ugccaggcugaacagggucuua

SEQ ID NO: 530275 - RNA, 19 nt, Human
ccuuggaguuccaggugga

SEQ ID NO: 530276 - RNA, 22 nt, Human
aaguucaaggcagguccugagg

SEQ ID NO: 530277 - RNA, 22 nt, Human
gacaaagagaaguaacaguacc

SEQ ID NO: 530278 - RNA, 22 nt, Human
gucauuauaccauuauaauugu

SEQ ID NO: 530279 - RNA, 22 nt, Human
agcaguuuuagggagacacauu

SEQ ID NO: 530280 - RNA, 22 nt, Human
acugaaggcuuaacucuuucau

SEQ ID NO: 530281 - RNA, 22 nt, Human
gagagggcugccuggugugagg

SEQ ID NO: 530282 - RNA, 19 nt, Human
ggcucucuuaaagcuguuu

SEQ ID NO: 530283 - RNA, 22 nt, Human
cccuucagcugagugggacagc

SEQ ID NO: 530284 - RNA, 22 nt, Human
ugggcccugacuucaagcaucc

SEQ ID NO: 530285 - RNA, 22 nt, Human
ugaugcugagccugggacugac

SEQ ID NO: 530286 - RNA, 22 nt, Human
cagaagcaaaugccuugcugag

SEQ ID NO: 530287 - RNA, 22 nt, Human
aaacaucaccauuuuaccuaau

SEQ ID NO: 530288 - RNA, 22 nt, Human
ucagaaguaggagacauucuug

SEQ ID NO: 530289 - RNA, 20 nt, Human
cccuccagcaaccaggacuu

SEQ ID NO: 530290 - RNA, 22 nt, Human
cugguucaucgcggccacuuau

SEQ ID NO: 530291 - RNA, 22 nt, Human
aggcugagacugugcauuagug

SEQ ID NO: 530292 - RNA, 22 nt, Human
guggcccugucccaggccuccu

SEQ ID NO: 530293 - RNA, 22 nt, Human
aucugcuuuugagaauuuacuu

SEQ ID NO: 530294 - RNA, 22 nt, Human
agucaacaaaaauguggagccu

SEQ ID NO: 530295 - RNA, 22 nt, Human
ccugcccuagagaugacacaau

SEQ ID NO: 530296 - RNA, 22 nt, Human
agcugacauaagcacuuucuaa

SEQ ID NO: 530297 - RNA, 21 nt, Human
aacugcuggucuuuucugucu

SEQ ID NO: 530298 - RNA, 22 nt, Human
aaaggugacacucugccagcug

SEQ ID NO: 530299 - RNA, 19 nt, Human
cuccaagugccaaggacag

SEQ ID NO: 530300 - RNA, 22 nt, Human
aggcccagggcugcucucugaa

SEQ ID NO: 530301 - RNA, 22 nt, Human
uaugagaucccuuuuccuagag

SEQ ID NO: 530302 - RNA, 22 nt, Human
uuaauaacauuguguaucaccc

SEQ ID NO: 530303 - RNA, 22 nt, Human
cccagagucacaugggguguuc

SEQ ID NO: 530304 - RNA, 22 nt, Human
gaugggcguggcgcguuuggug

SEQ ID NO: 530305 - RNA, 22 nt, Human
ucuaggagcuuaaaggaggcca

SEQ ID NO: 530306 - RNA, 22 nt, Human
auauauacuuugacacauucug

SEQ ID NO: 530307 - RNA, 22 nt, Human
aauacugccugugagguaacuc

SEQ ID NO: 530308 - RNA, 22 nt, Human
ugugauuacugaauagaaaaua

SEQ ID NO: 530309 - RNA, 22 nt, Human
aagcauuuuagauaaagcauca

SEQ ID NO: 530310 - RNA, 22 nt, Human
cuguaugauauccaaauugaua

SEQ ID NO: 530311 - RNA, 22 nt, Human
acuggcagagguuggacaccau

SEQ ID NO: 530312 - RNA, 19 nt, Human
cuucugugauacaucaguc

SEQ ID NO: 530313 - RNA, 22 nt, Human
ugugauuagcugaauacacugg

SEQ ID NO: 530314 - RNA, 22 nt, Human
cauucugcauuuggaaggggca

SEQ ID NO: 530315 - RNA, 22 nt, Human
uaaacagaaugcguaagaagug

SEQ ID NO: 530316 - RNA, 22 nt, Human
gggcugagcacauacugacagc

SEQ ID NO: 530317 - RNA, 19 nt, Human
aggugaugugacucuagaa

SEQ ID NO: 530318 - RNA, 22 nt, Human
ugaggcagugugagauaauaaa

SEQ ID NO: 530319 - RNA, 22 nt, Human
cugccugcucaccagggcucug

SEQ ID NO: 530320 - RNA, 22 nt, Human
uuucacaaacugaggagacaau

SEQ ID NO: 530321 - RNA, 22 nt, Human
aggaaagauggaaggaggauaa

SEQ ID NO: 530322 - RNA, 22 nt, Human
cugcugcaggaugggcacucug

SEQ ID NO: 530323 - RNA, 22 nt, Human
uuugaaaguucuucugacacua

SEQ ID NO: 530324 - RNA, 22 nt, Human
cauugcacuccaucuugggcaa

SEQ ID NO: 530325 - RNA, 22 nt, Human
gaggccugggagccuguccucc

SEQ ID NO: 530326 - RNA, 19 nt, Human
cuugccuguuccuacagcu

SEQ ID NO: 530327 - RNA, 22 nt, Human
ccacugcccccugaagaccagg

SEQ ID NO: 530328 - RNA, 22 nt, Human
uuucuucuugaguaaccagauu

SEQ ID NO: 530329 - RNA, 22 nt, Human
uuucugaaaacugaaguagugc

SEQ ID NO: 530330 - RNA, 22 nt, Human
uuaagucacuggacuugccuag

SEQ ID NO: 530331 - RNA, 22 nt, Human
uaggugugggcucaggaaugug

SEQ ID NO: 530332 - RNA, 22 nt, Human
uccuguuuaucugugugacucg

SEQ ID NO: 530333 - RNA, 22 nt, Human
agcugugauuauccacuggaau

SEQ ID NO: 530334 - RNA, 22 nt, Human
ugaaugcaagucacacauuucu

SEQ ID NO: 530335 - RNA, 22 nt, Human
agagccuugaagaucuggaaaa

SEQ ID NO: 530336 - RNA, 22 nt, Human
uggaaguugaaucucagucaug

SEQ ID NO: 530337 - RNA, 22 nt, Human
gaaaauuucugccacaugugug

SEQ ID NO: 530338 - RNA, 22 nt, Human
ugaguggagacuguguguagag

SEQ ID NO: 530339 - RNA, 22 nt, Human
ccagcuuuucagaaucugccug

SEQ ID NO: 530340 - RNA, 22 nt, Human
uugguggguuaaugagugacug

SEQ ID NO: 530341 - RNA, 22 nt, Human
ucagaucauggaucuauuacuu

SEQ ID NO: 530342 - RNA, 22 nt, Human
ucugggagacguguguugucag

SEQ ID NO: 530343 - RNA, 22 nt, Human
uuuuaaaggauacucuugucua

SEQ ID NO: 530344 - RNA, 22 nt, Human
cagcagaguaauucucaccucu

SEQ ID NO: 530345 - RNA, 22 nt, Human
ccagcucuuuuggcugagugag

SEQ ID NO: 530346 - RNA, 22 nt, Human
aaggcauaugcuguguacaguu

SEQ ID NO: 530347 - RNA, 22 nt, Human
aguucugguugcccaugacauc

SEQ ID NO: 530348 - RNA, 22 nt, Human
ucucgacagccuggcacagugg

SEQ ID NO: 530349 - RNA, 22 nt, Human
uccaaagaacauugcugagacc

SEQ ID NO: 530350 - RNA, 22 nt, Human
aaugauauagcagacauagccu

SEQ ID NO: 530351 - RNA, 22 nt, Human
agucuucccugugccagagugu

SEQ ID NO: 530352 - RNA, 22 nt, Human
cuuugaaauucuucagcugaag

SEQ ID NO: 530353 - RNA, 22 nt, Human
caagggcauugcuugggaccuu

SEQ ID NO: 530354 - RNA, 22 nt, Human
gucucuggguuaagcagugcau

SEQ ID NO: 530355 - RNA, 22 nt, Human
ugaaaguucaauaccaauuugg

SEQ ID NO: 530356 - RNA, 22 nt, Human
aggcacugacucaagggagcca

SEQ ID NO: 530357 - RNA, 22 nt, Human
ucuaacuugaacucaugacugu

SEQ ID NO: 530358 - RNA, 22 nt, Human
ucccagagucuucuccuguaau

SEQ ID NO: 530359 - RNA, 22 nt, Human
aucauacauguaacuaaguaaa

SEQ ID NO: 530360 - RNA, 21 nt, Human
uuacuuuugcaccaaccuaau

SEQ ID NO: 530361 - RNA, 22 nt, Human
ucucaggggauucacuggcacc

SEQ ID NO: 530362 - RNA, 22 nt, Human
caguggcgugaucucugcucac

SEQ ID NO: 530363 - RNA, 19 nt, Human
uaugagcugacaaaggccu

SEQ ID NO: 530364 - RNA, 19 nt, Human
ucugccucuggucaggcuc

SEQ ID NO: 530365 - RNA, 22 nt, Human
ucuggcaguuccuuguugauau

SEQ ID NO: 530366 - RNA, 22 nt, Human
gccaaaucuggauuuagcaaga

SEQ ID NO: 530367 - RNA, 22 nt, Human
ucagcuaggcacuucucacuga

SEQ ID NO: 530368 - RNA, 22 nt, Human
ucagcuggauguggaagugcua

SEQ ID NO: 530369 - RNA, 22 nt, Human
gcuucucccuacagaugucagu

SEQ ID NO: 530370 - RNA, 22 nt, Human
cauauuuauagaucuggcauuu

SEQ ID NO: 530371 - RNA, 22 nt, Human
aaaauguaaagcuugaguguag

SEQ ID NO: 530372 - RNA, 22 nt, Human
aagaggugccagggguuuugua

SEQ ID NO: 530373 - RNA, 22 nt, Human
cuuguaaaauauccaguuaagg

SEQ ID NO: 530374 - RNA, 22 nt, Human
gcuggcaguaaaggguuuggca

SEQ ID NO: 530375 - RNA, 22 nt, Human
aagcuuuaagugucagucagcc

SEQ ID NO: 530376 - RNA, 22 nt, Human
cuccagugcacccagaggauuu

SEQ ID NO: 530377 - RNA, 22 nt, Human
uucugaugcaugggucucuguu

SEQ ID NO: 530378 - RNA, 23 nt, Human
ugcaagaguuccaaacuguucaa

SEQ ID NO: 530379 - RNA, 22 nt, Human
uaagaacaguguuucaucucua

SEQ ID NO: 530380 - RNA, 22 nt, Human
acagugauucugcaaaccauau

SEQ ID NO: 530381 - RNA, 22 nt, Human
uucuucuuucccccugugguac

SEQ ID NO: 530382 - RNA, 22 nt, Human
uucaaucauuagaaucucaggc

SEQ ID NO: 530383 - RNA, 22 nt, Human
ccagggcaauuauuuggagggu

SEQ ID NO: 530384 - RNA, 22 nt, Human
acuuucucaggaauucacagac

SEQ ID NO: 530385 - RNA, 22 nt, Human
aacaucagaauauccauguugg

SEQ ID NO: 530386 - RNA, 22 nt, Human
agaggcagaaguguucaaaccc

SEQ ID NO: 530387 - RNA, 22 nt, Human
aagcugccaccagcccagggca

SEQ ID NO: 530388 - RNA, 22 nt, Human
aucucaacuaagccuaacuuuu

SEQ ID NO: 530389 - RNA, 22 nt, Human
acauuuacagugcuagacaauc

SEQ ID NO: 530390 - RNA, 22 nt, Human
gaaagaagcuuuagauggcuau

SEQ ID NO: 530391 - RNA, 21 nt, Human
ccucaucaaacuuucacuugc

SEQ ID NO: 530392 - RNA, 18 nt, Human
caaauucucauugauuuc

SEQ ID NO: 530393 - RNA, 22 nt, Human
auuauuauuuuagagagaggcc

SEQ ID NO: 530394 - RNA, 22 nt, Human
guuuacaaauauuuuaaauggu

SEQ ID NO: 530395 - RNA, 22 nt, Human
acagaacuuggaacuuuucaca

SEQ ID NO: 530396 - RNA, 22 nt, Human
acacacuguugcucauccaggc

SEQ ID NO: 530397 - RNA, 22 nt, Human
uuuuugagauggauuuagcucu

SEQ ID NO: 530398 - RNA, 22 nt, Human
cuggagcagcagguggccaggg

SEQ ID NO: 530399 - RNA, 22 nt, Human
ggcagggcagcgcugauuaggg

SEQ ID NO: 530400 - RNA, 22 nt, Human
aaauacuguugaaugaaguaag

SEQ ID NO: 530401 - RNA, 22 nt, Human
ggcaccaggcugggcauaggcc

SEQ ID NO: 530402 - RNA, 22 nt, Human
uucacauuugaaaggaaagaua

SEQ ID NO: 530403 - RNA, 22 nt, Human
uuucacauguauauaggcauua

SEQ ID NO: 530404 - RNA, 22 nt, Human
aaaguccuagcgauccacagaa

SEQ ID NO: 530405 - RNA, 22 nt, Human
ccccaccagcacccucucuauc

SEQ ID NO: 530406 - RNA, 22 nt, Human
uauuuguugcgggaauugcuau

SEQ ID NO: 530407 - RNA, 22 nt, Human
agugacucacuagcucucagug

SEQ ID NO: 530408 - RNA, 22 nt, Human
gggcugacucugcacugagcca

SEQ ID NO: 530409 - RNA, 22 nt, Human
agccagacauggcuccugcucc

SEQ ID NO: 530410 - RNA, 22 nt, Human
aauguugaggauaucagaaaau

SEQ ID NO: 530411 - RNA, 22 nt, Human
uguuaucugagcaacgucgacg

SEQ ID NO: 530412 - RNA, 22 nt, Human
ggcuguggcagcuggaaguggu

SEQ ID NO: 530413 - RNA, 22 nt, Human
gccaggcaauguguuagaagcg

SEQ ID NO: 530414 - RNA, 22 nt, Human
aggcucagggacucccucccuc

SEQ ID NO: 530415 - RNA, 21 nt, Human
gggugggaggacacagcaggc

SEQ ID NO: 530416 - RNA, 22 nt, Human
uaugaaauugccauuuuuaugg

SEQ ID NO: 530417 - RNA, 22 nt, Human
uugcucugaacccagggcacca

SEQ ID NO: 530418 - RNA, 22 nt, Human
aaagucauuuagccuuaucucc

SEQ ID NO: 530419 - RNA, 22 nt, Human
uggaccugcguaggugcugggc

SEQ ID NO: 530420 - RNA, 22 nt, Human
ugaacucuccaggcaaaugauc

SEQ ID NO: 530421 - RNA, 22 nt, Human
ugggcaggauaauaucucaugu

SEQ ID NO: 530422 - RNA, 22 nt, Human
uuucuggaaccacaaaaguaug

SEQ ID NO: 530423 - RNA, 22 nt, Human
augcuuaacucuguacauaguu

SEQ ID NO: 530424 - RNA, 22 nt, Human
gcucucuggcuaguccaucggg

SEQ ID NO: 530425 - RNA, 17 nt, Human
gucugggcuuuagagac

SEQ ID NO: 530426 - RNA, 22 nt, Human
uuaauacauuucagacuguuau

SEQ ID NO: 530427 - RNA, 22 nt, Human
auguguaggugaaucgaggcug

SEQ ID NO: 530428 - RNA, 22 nt, Human
aggaacccugcgccauacuuug

SEQ ID NO: 530429 - RNA, 22 nt, Human
uccagaguuguaaguguugaca

SEQ ID NO: 530430 - RNA, 16 nt, Human
ugggcagaugagaaga

SEQ ID NO: 530431 - RNA, 22 nt, Human
aaggcaggagcuguaucuuauu

SEQ ID NO: 530432 - RNA, 21 nt, Human
aucagaaguuuuggucaguag

SEQ ID NO: 530433 - RNA, 22 nt, Human
acauaacaaucauaggacauag

SEQ ID NO: 530434 - RNA, 22 nt, Human
agaggcucugccgccucaggua

SEQ ID NO: 530435 - RNA, 22 nt, Human
guggcuucugcggugugcgcag

SEQ ID NO: 530436 - RNA, 22 nt, Human
aucuacaggauaguuuaauauu

SEQ ID NO: 530437 - RNA, 23 nt, Human
ggacagggcccugcccuauggcc

SEQ ID NO: 530438 - RNA, 17 nt, Human
agcagcugaagcagcca

SEQ ID NO: 530439 - RNA, 22 nt, Human
uauuugugagacugacugaagu

SEQ ID NO: 530440 - RNA, 19 nt, Human
aguagcagaaagugcagug

SEQ ID NO: 530441 - RNA, 22 nt, Human
auucugaaguugcaggagaagc

SEQ ID NO: 530442 - RNA, 22 nt, Human
cugaggcugcccagggccaggu

SEQ ID NO: 530443 - RNA, 22 nt, Human
acauuucagcgugcaugacaug

SEQ ID NO: 530444 - RNA, 22 nt, Human
acagacacaggcguggagucgc

SEQ ID NO: 530445 - RNA, 22 nt, Human
ggcuuaaaguuuucuagaauaa

SEQ ID NO: 530446 - RNA, 22 nt, Human
gggcccuggggccugauuugca

SEQ ID NO: 530447 - RNA, 22 nt, Human
ucaguuuuuaaaugauauaauu

SEQ ID NO: 530448 - RNA, 22 nt, Human
ugauuuccccagucuugcugcu

SEQ ID NO: 530449 - RNA, 22 nt, Human
gcugccugauuuacauagugaa

SEQ ID NO: 530450 - RNA, 20 nt, Human
gggcaguggcgcuaucucag

SEQ ID NO: 530451 - RNA, 22 nt, Human
agauguuuaaaaagaugacucu

SEQ ID NO: 530452 - RNA, 22 nt, Human
ggguccagacuaugaagaacuu

SEQ ID NO: 530453 - RNA, 22 nt, Human
acagugugugcuuucccuuacg

SEQ ID NO: 530454 - RNA, 22 nt, Human
ucugagaguacgggcugcgcgc

SEQ ID NO: 530455 - RNA, 22 nt, Human
acugggaaaagcuauggcaaau

SEQ ID NO: 530456 - RNA, 22 nt, Human
aaggucauugguucugaauucu

SEQ ID NO: 530457 - RNA, 22 nt, Human
gaguuaauucgaauauucuagc

SEQ ID NO: 530458 - RNA, 22 nt, Human
aaaugcacagguuuuaaauccu

SEQ ID NO: 530459 - RNA, 21 nt, Human
uugaaggaucacuucuguacc

SEQ ID NO: 530460 - RNA, 22 nt, Human
gaguccaguucuuuccagcagu

SEQ ID NO: 530461 - RNA, 22 nt, Human
cugcugccggcgagccucccuu

SEQ ID NO: 530462 - RNA, 22 nt, Human
ccaguguuauuuuagaguguga

SEQ ID NO: 530463 - RNA, 23 nt, Human
uccuggugacaugccugagcauc

SEQ ID NO: 530464 - RNA, 20 nt, Human
ggagagcagggaagacagua

SEQ ID NO: 530465 - RNA, 22 nt, Human
aagccaggaccaaacucauccu

SEQ ID NO: 530466 - RNA, 22 nt, Human
ggaccugcucucccaguucucu

SEQ ID NO: 530467 - RNA, 22 nt, Human
uccaggcaaaaggaacugcuug

SEQ ID NO: 530468 - RNA, 21 nt, Human
agcaggugaaccuccaguaca

SEQ ID NO: 530469 - RNA, 22 nt, Human
ccagggugggguccaggaacca

SEQ ID NO: 530470 - RNA, 22 nt, Human
agcaggagcugugggaagaugg

SEQ ID NO: 530471 - RNA, 18 nt, Human
cucagagaugcccuuauu

SEQ ID NO: 530472 - RNA, 22 nt, Human
uuucaaauaccauaaaccuaau

SEQ ID NO: 530473 - RNA, 20 nt, Human
cucuuuucacucucaguggu

SEQ ID NO: 530474 - RNA, 22 nt, Human
auggagugggccaauuuuagug

SEQ ID NO: 530475 - RNA, 22 nt, Human
uacauaauuaaucuuuaaguuc

SEQ ID NO: 530476 - RNA, 22 nt, Human
ggguguccugugccaagcuggg

SEQ ID NO: 530477 - RNA, 22 nt, Human
cagagcugauuggauccagaga

SEQ ID NO: 530478 - RNA, 22 nt, Human
gauuccuuggcucugucucagg

SEQ ID NO: 530479 - RNA, 22 nt, Human
gcaguggcuaggagucuggcgu

SEQ ID NO: 530480 - RNA, 22 nt, Human
aaaucaguuguuauauuaaaga

SEQ ID NO: 530481 - RNA, 22 nt, Human
cugggcucaguggcucauggcu

SEQ ID NO: 530482 - RNA, 22 nt, Human
ugugccaagaucaaacuuuucu

SEQ ID NO: 530483 - RNA, 22 nt, Human
agcugagagguggcaagcugua

SEQ ID NO: 530484 - RNA, 22 nt, Human
caauuucauggauaaaagaugu

SEQ ID NO: 530485 - RNA, 22 nt, Human
augggaguuuucucugaugcuc

SEQ ID NO: 530486 - RNA, 22 nt, Human
ggccugccucacagucagcacc

SEQ ID NO: 530487 - RNA, 22 nt, Human
gaagcacauggcugugagcaac

SEQ ID NO: 530488 - RNA, 22 nt, Human
agugggagagaagcaaguagua

SEQ ID NO: 530489 - RNA, 22 nt, Human
gggccucugugcagaggggccu

SEQ ID NO: 530490 - RNA, 22 nt, Human
cuacaaagcucuucuacaggca

SEQ ID NO: 530491 - RNA, 22 nt, Human
auuaauauccugcuggcuaaau

SEQ ID NO: 530492 - RNA, 20 nt, Human
uugcaaauaucuauugauug

SEQ ID NO: 530493 - RNA, 22 nt, Human
cugagagaucaagccacaggau

SEQ ID NO: 530494 - RNA, 22 nt, Human
acagugauuucugcaagggcuc

SEQ ID NO: 530495 - RNA, 22 nt, Human
aauucuauguucuugaguaaga

SEQ ID NO: 530496 - RNA, 22 nt, Human
agcuggagaugcccagcaccgg

SEQ ID NO: 530497 - RNA, 22 nt, Human
uccuucagcuacucaguuucca

SEQ ID NO: 530498 - RNA, 20 nt, Human
cccucugcuacacugggagc

SEQ ID NO: 530499 - RNA, 22 nt, Human
ucauuguuauguuuugcugucu

SEQ ID NO: 530500 - RNA, 17 nt, Human
gcaagggaugggagauu

SEQ ID NO: 530501 - RNA, 22 nt, Human
cuauuuauuguggguauccagg

SEQ ID NO: 530502 - RNA, 22 nt, Human
uggacaggaucugagacugaga

SEQ ID NO: 530503 - RNA, 19 nt, Human
guaagggcuaauggacuau

SEQ ID NO: 530504 - RNA, 22 nt, Human
uagugauuaaaggcagaauguu

SEQ ID NO: 530505 - RNA, 22 nt, Human
ugacagggcuagaggcaaugca

SEQ ID NO: 530506 - RNA, 22 nt, Human
gaggcucaaaccuggacagagc

SEQ ID NO: 530507 - RNA, 22 nt, Human
ucuggggaccauggcaucuaaa

SEQ ID NO: 530508 - RNA, 22 nt, Human
ggagccagcagggugacacuga

SEQ ID NO: 530509 - RNA, 22 nt, Human
agcaggcuuuccacagaaggag

SEQ ID NO: 530510 - RNA, 22 nt, Human
agcgcaggaacacgucugccuu

SEQ ID NO: 530511 - RNA, 22 nt, Human
aacaguaucuuuuaucagaaau

SEQ ID NO: 530512 - RNA, 17 nt, Human
uguuuucauucauugcu

SEQ ID NO: 530513 - RNA, 21 nt, Human
cugcaucucauagaacauguc

SEQ ID NO: 530514 - RNA, 22 nt, Human
ugaggcucuccaagcagaugag

SEQ ID NO: 530515 - RNA, 22 nt, Human
caaauuagagguuuguuuugau

SEQ ID NO: 530516 - RNA, 22 nt, Human
ucaguggauugacaugaaaaag

SEQ ID NO: 530517 - RNA, 22 nt, Human
aucauuuaaaacaagucucuau

SEQ ID NO: 530518 - RNA, 17 nt, Human
gcuggcugacccaugcc

SEQ ID NO: 530519 - RNA, 22 nt, Human
agucuggggucugguagaacga

SEQ ID NO: 530520 - RNA, 22 nt, Human
uguauuagaucugagaacuucu

SEQ ID NO: 530521 - RNA, 20 nt, Human
ucagagagagggugccacuu

SEQ ID NO: 530522 - RNA, 22 nt, Human
cuuucuucaagcuggucucaau

SEQ ID NO: 530523 - RNA, 22 nt, Human
cuguggaguccuggggaaugga

SEQ ID NO: 530524 - RNA, 22 nt, Human
cuaggaaucaccaagauucuag

SEQ ID NO: 530525 - RNA, 22 nt, Human
ucuaaaaugcagaucuacuggu

SEQ ID NO: 530526 - RNA, 22 nt, Human
cugaggcugggcauggggucca

SEQ ID NO: 530527 - RNA, 22 nt, Human
gggcuccagcccgggaccaggu

SEQ ID NO: 530528 - RNA, 21 nt, Human
aaagaaaucucccauugguag

SEQ ID NO: 530529 - RNA, 22 nt, Human
gaaggccacuuuguguugagaa

SEQ ID NO: 530530 - RNA, 22 nt, Human
ugcucacugaacucuugcuguc

SEQ ID NO: 530531 - RNA, 22 nt, Human
ucugggcagaagcagugcaaag

SEQ ID NO: 530532 - RNA, 22 nt, Human
aaucucuugggaggaaugaauu

SEQ ID NO: 530533 - RNA, 22 nt, Human
ccagcuugaagaugugcugguu

SEQ ID NO: 530534 - RNA, 22 nt, Human
cuggagcucuccagagccccgu

SEQ ID NO: 530535 - RNA, 23 nt, Human
ucuggcuccauccuuggggaucc

SEQ ID NO: 530536 - RNA, 22 nt, Human
ccugaagaugcuguggccuggu

SEQ ID NO: 530537 - RNA, 22 nt, Human
ggcaggugcuaagagagguaaa

SEQ ID NO: 530538 - RNA, 21 nt, Human
uccuggcuuuaugcuaccucu

SEQ ID NO: 530539 - RNA, 22 nt, Human
ucagucuuugcuuaugacaaua

SEQ ID NO: 530540 - RNA, 22 nt, Human
auaacagaugugaagugcuaau

SEQ ID NO: 530541 - RNA, 22 nt, Human
ggcucagaccucccagcuccag

SEQ ID NO: 530542 - RNA, 22 nt, Human
gucaggauuggggucaugaguc

SEQ ID NO: 530543 - RNA, 22 nt, Human
ggaagagagaucccauagaugu

SEQ ID NO: 530544 - RNA, 22 nt, Human
ggaaccaguggaaugauaugcu

SEQ ID NO: 530545 - RNA, 22 nt, Human
aucuggcugcugugcuuaagcu

SEQ ID NO: 530546 - RNA, 22 nt, Human
aagaauaaauuaagauacuuag

SEQ ID NO: 530547 - RNA, 22 nt, Human
ucuuaaaaguaugccaauugga

SEQ ID NO: 530548 - RNA, 22 nt, Human
gaaggaagucauuagugcagac

SEQ ID NO: 530549 - RNA, 22 nt, Human
auuauucauggucuuccacaau

SEQ ID NO: 530550 - RNA, 22 nt, Human
agcuggcagagcauuuguggcc

SEQ ID NO: 530551 - RNA, 22 nt, Human
cacaggcuuccaguccccagcu

SEQ ID NO: 530552 - RNA, 22 nt, Human
aucaaauauaauaauuuucgcu

SEQ ID NO: 530553 - RNA, 22 nt, Human
gagcuguccgccccugggccga

SEQ ID NO: 530554 - RNA, 23 nt, Human
agaaaagcuuggacacauggccu

SEQ ID NO: 530555 - RNA, 22 nt, Human
agauuacagaagaauaaguaga

SEQ ID NO: 530556 - RNA, 22 nt, Human
gaggcugaguagcuuugugcuc

SEQ ID NO: 530557 - RNA, 19 nt, Human
agccagaacuaguguuucu

SEQ ID NO: 530558 - RNA, 22 nt, Human
agcuuuaucacaauauuggcua

SEQ ID NO: 530559 - RNA, 22 nt, Human
cucuccuugcagauggcugccu

SEQ ID NO: 530560 - RNA, 22 nt, Human
acugccugaugugguucuaaau

SEQ ID NO: 530561 - RNA, 22 nt, Human
aagcauuuauagauaagaauuu

SEQ ID NO: 530562 - RNA, 22 nt, Human
cagggcugaagaaauucaaaag

SEQ ID NO: 530563 - RNA, 22 nt, Human
uguucuaaguguuuuguucaug

SEQ ID NO: 530564 - RNA, 22 nt, Human
cagugcccaagaugugccaugc

SEQ ID NO: 530565 - RNA, 22 nt, Human
accuggcaugaagcaugccuua

SEQ ID NO: 530566 - RNA, 22 nt, Human
aagcacagcagagccuugcuug

SEQ ID NO: 530567 - RNA, 22 nt, Human
auacagaacucucaguuguaua

SEQ ID NO: 530568 - RNA, 22 nt, Human
gugcugcgaugauuuuacagag

SEQ ID NO: 530569 - RNA, 22 nt, Human
ucuagaaaguuuguacugauuu

SEQ ID NO: 530570 - RNA, 22 nt, Human
gugggcuuguuuugaugagauc

SEQ ID NO: 530571 - RNA, 21 nt, Human
cucaaagaccaaaaguguaga

SEQ ID NO: 530572 - RNA, 22 nt, Human
uugcuucaguagcucuuuaaag

SEQ ID NO: 530573 - RNA, 22 nt, Human
acuucagugugguauaaaacgu

SEQ ID NO: 530574 - RNA, 22 nt, Human
uccuggagcuuccuucauggua

SEQ ID NO: 530575 - RNA, 22 nt, Human
cagaaugcaaauuuuauaauau

SEQ ID NO: 530576 - RNA, 22 nt, Human
ccagguggugaaagugggcccu

SEQ ID NO: 530577 - RNA, 22 nt, Human
cugggccagucucggccgcucu

SEQ ID NO: 530578 - RNA, 22 nt, Human
ggggcugauggaacucaggccu

SEQ ID NO: 530579 - RNA, 22 nt, Human
ugaugauguuuaucuugguauu

SEQ ID NO: 530580 - RNA, 22 nt, Human
gaaauacagaaagggcugaaug

SEQ ID NO: 530581 - RNA, 22 nt, Human
cugcuuccauaaauaaugugcu

SEQ ID NO: 530582 - RNA, 22 nt, Human
ugugcugguacaugugaggaug

SEQ ID NO: 530583 - RNA, 19 nt, Human
agggcuaggcacauagggc

SEQ ID NO: 530584 - RNA, 22 nt, Human
ggcagagguagcuggaaccagg

SEQ ID NO: 530585 - RNA, 22 nt, Human
cugugugcugaaaugcagugag

SEQ ID NO: 530586 - RNA, 22 nt, Human
uagauacaugaaauggcagaua

SEQ ID NO: 530587 - RNA, 22 nt, Human
auuuccacauaagggaaauaag

SEQ ID NO: 530588 - RNA, 22 nt, Human
uuacaacauauuuagcuugauu

SEQ ID NO: 530589 - RNA, 22 nt, Human
augugcauuaaaugucaauguu

SEQ ID NO: 530590 - RNA, 17 nt, Human
gcucugccccagccucu

SEQ ID NO: 530591 - RNA, 22 nt, Human
cuuguauuccccuaucucuaaa

SEQ ID NO: 530592 - RNA, 22 nt, Human
ccagcucugccaagcgucagcu

SEQ ID NO: 530593 - RNA, 22 nt, Human
uucuucaaacaaaaguggcaug

SEQ ID NO: 530594 - RNA, 22 nt, Human
uccaaacacccuccaugcugca

SEQ ID NO: 530595 - RNA, 20 nt, Human
uucuuucaucuacacguugu

SEQ ID NO: 530596 - RNA, 22 nt, Human
ggggaugguggcauuuguaaaa

SEQ ID NO: 530597 - RNA, 22 nt, Human
aucagaaaguucaucauguuug

SEQ ID NO: 530598 - RNA, 22 nt, Human
uccucccugaguggggacagcu

SEQ ID NO: 530599 - RNA, 22 nt, Human
ucuuuucuucuuaaugguuaau

SEQ ID NO: 530600 - RNA, 22 nt, Human
aaguguauauaugacuuauaaa

SEQ ID NO: 530601 - RNA, 22 nt, Human
auucauuuagguauucacuuac

SEQ ID NO: 530602 - RNA, 22 nt, Human
uuugucuugaggcuggggaagu

SEQ ID NO: 530603 - RNA, 20 nt, Human
ccuaggcaugcugagucucc

SEQ ID NO: 530604 - RNA, 22 nt, Human
agugggcagcccaggaggucuu

SEQ ID NO: 530605 - RNA, 22 nt, Human
cuuccagucuagagcuaucugu

SEQ ID NO: 530606 - RNA, 22 nt, Human
cagggcagugaagaacacacgu

SEQ ID NO: 530607 - RNA, 22 nt, Human
aaugcacauaaauauggucuua

SEQ ID NO: 530608 - RNA, 22 nt, Human
ugcaucuuucugcauauguaaa

SEQ ID NO: 530609 - RNA, 22 nt, Human
uuugcaaaaugaggugaagagu

SEQ ID NO: 530610 - RNA, 22 nt, Human
ggagcuggcuacagagaacucc

SEQ ID NO: 530611 - RNA, 22 nt, Human
gcagcuuuaaucugaauaagua

SEQ ID NO: 530612 - RNA, 20 nt, Human
cugcugugugugccucagcc

SEQ ID NO: 530613 - RNA, 22 nt, Human
gagguggcuccuucagggaaua

SEQ ID NO: 530614 - RNA, 22 nt, Human
uaaggccagccagcaaaucugu

SEQ ID NO: 530615 - RNA, 22 nt, Human
cagaggcauacucccagucuug

SEQ ID NO: 530616 - RNA, 22 nt, Human
ugcagcuagcgugccuagugaa

SEQ ID NO: 530617 - RNA, 22 nt, Human
gccaccagggggugcaaggucc

SEQ ID NO: 530618 - RNA, 22 nt, Human
uaaagucaucuuuacaucuuug

SEQ ID NO: 530619 - RNA, 22 nt, Human
ucaauaauggcaggauaaauuu

SEQ ID NO: 530620 - RNA, 22 nt, Human
cuucuuaacuguauauacuaug

SEQ ID NO: 530621 - RNA, 19 nt, Human
ucaguggagaaaggggaag

SEQ ID NO: 530622 - RNA, 22 nt, Human
gcagcagagcuuuguccuggcu

SEQ ID NO: 530623 - RNA, 22 nt, Human
acacauaugguugcugcaguga

SEQ ID NO: 530624 - RNA, 22 nt, Human
gggcagcaaaucugagucuggu

SEQ ID NO: 530625 - RNA, 22 nt, Human
uucaguuuuauuguacugcuau

SEQ ID NO: 530626 - RNA, 22 nt, Human
cuggcugcgucugcucugacag

SEQ ID NO: 530627 - RNA, 22 nt, Human
acuggcuggccgcgcucuucgc

SEQ ID NO: 530628 - RNA, 22 nt, Human
uuugaauguuggauugacuuag

SEQ ID NO: 530629 - RNA, 22 nt, Human
ccagggcucaggcucccagugg

SEQ ID NO: 530630 - RNA, 22 nt, Human
ucacaauucagaaaccaaguag

SEQ ID NO: 530631 - RNA, 22 nt, Human
cacucucagcauaaugaaugug

SEQ ID NO: 530632 - RNA, 22 nt, Human
cuauuauuauccuaauuucugu

SEQ ID NO: 530633 - RNA, 22 nt, Human
ugaaagcacugauucucaacuc

SEQ ID NO: 530634 - RNA, 22 nt, Human
agcucacagaaauccugcagga

SEQ ID NO: 530635 - RNA, 22 nt, Human
cugucaguucuuccagauagag

SEQ ID NO: 530636 - RNA, 22 nt, Human
uguaugugcuugagaagguggg

SEQ ID NO: 530637 - RNA, 22 nt, Human
agaauucugacaauagaauugg

SEQ ID NO: 530638 - RNA, 22 nt, Human
uuggcuucuugugaaaucugag

SEQ ID NO: 530639 - RNA, 22 nt, Human
ggagaagcaggugcuuuggguc

SEQ ID NO: 530640 - RNA, 22 nt, Human
uacauauuguccauaguugcuu

SEQ ID NO: 530641 - RNA, 22 nt, Human
caggcagaaggaaguaccaggc

SEQ ID NO: 530642 - RNA, 22 nt, Human
cuggggaacaauuugccacacu

SEQ ID NO: 530643 - RNA, 22 nt, Human
agcugagccagcagcaacagga

SEQ ID NO: 530644 - RNA, 22 nt, Human
uuucaacagcucucaaaugauc

SEQ ID NO: 530645 - RNA, 22 nt, Human
gagaaaaucuugggucaagaau

SEQ ID NO: 530646 - RNA, 22 nt, Human
ucucaggaagauuagggcuaag

SEQ ID NO: 530647 - RNA, 22 nt, Human
uguaugaagccagaaucuguuu

SEQ ID NO: 530648 - RNA, 22 nt, Human
agugcaaaaguaauuggaguuu

SEQ ID NO: 530649 - RNA, 22 nt, Human
cugaggcugggcuugccuucuu

SEQ ID NO: 530650 - RNA, 22 nt, Human
ucuuugaaaagauauuccuccu

SEQ ID NO: 530651 - RNA, 22 nt, Human
auuugucuucaguagguucuuc

SEQ ID NO: 530652 - RNA, 22 nt, Human
gcuuuacacagcugguucuugu

SEQ ID NO: 530653 - RNA, 22 nt, Human
auuucuguauccugcugucaga

SEQ ID NO: 530654 - RNA, 22 nt, Human
acugugcaugaaccgaaacaaa

SEQ ID NO: 530655 - RNA, 22 nt, Human
auaaaacuuggguaugaucccu

SEQ ID NO: 530656 - RNA, 22 nt, Human
cagucaggaaugccuccuuccu

SEQ ID NO: 530657 - RNA, 22 nt, Human
auuuuagagaaacaaacguagg

SEQ ID NO: 530658 - RNA, 22 nt, Human
cagcuuucaucagugacacuca

SEQ ID NO: 530659 - RNA, 22 nt, Human
aggagcuguuuuguucagcaaa

SEQ ID NO: 530660 - RNA, 22 nt, Human
uaaauuuacccaaggaacaugu

SEQ ID NO: 530661 - RNA, 22 nt, Human
auaugaagucagacaaacuggg

SEQ ID NO: 530662 - RNA, 22 nt, Human
gguggccucugcaggccucgac

SEQ ID NO: 530663 - RNA, 22 nt, Human
uuauucacucugaagccauccu

SEQ ID NO: 530664 - RNA, 20 nt, Human
caguuaaugacuaggcauca

SEQ ID NO: 530665 - RNA, 22 nt, Human
gaagaauauauaaugauuuugu

SEQ ID NO: 530666 - RNA, 22 nt, Human
uagcuuguacugcaguagagaa

SEQ ID NO: 530667 - RNA, 23 nt, Human
agcugaggcagaggggcauucuc

SEQ ID NO: 530668 - RNA, 22 nt, Human
cuaaacaagggauuauaauuga

SEQ ID NO: 530669 - RNA, 22 nt, Human
ccagaggucuccugcacgggau

SEQ ID NO: 530670 - RNA, 22 nt, Human
aagaaggccugguagacgucuu

SEQ ID NO: 530671 - RNA, 22 nt, Human
uauguacaucguugaauucaaa

SEQ ID NO: 530672 - RNA, 22 nt, Human
uugucccaggacuugcauagau

SEQ ID NO: 530673 - RNA, 22 nt, Human
ccagauggguuacuucaagcaa

SEQ ID NO: 530674 - RNA, 22 nt, Human
ccucagacgcaggccuaugggc

SEQ ID NO: 530675 - RNA, 22 nt, Human
auguaaaguaucugaaaugcug

SEQ ID NO: 530676 - RNA, 22 nt, Human
acaauauaguccaugagcaugc

SEQ ID NO: 530677 - RNA, 22 nt, Human
ugcuccagggccuccagugggg

SEQ ID NO: 530678 - RNA, 22 nt, Human
ucauuucuguugugcaucacug

SEQ ID NO: 530679 - RNA, 22 nt, Human
cucuccucagaacaggcccucu

SEQ ID NO: 530680 - RNA, 22 nt, Human
uccugcagaccucagucagguc

SEQ ID NO: 530681 - RNA, 22 nt, Human
ucaagaguuggucaaauccaaa

SEQ ID NO: 530682 - RNA, 22 nt, Human
aguuacaagcuauuuuacuuaa

SEQ ID NO: 530683 - RNA, 23 nt, Human
ugaauuuuggcauauucugaaau

SEQ ID NO: 530684 - RNA, 22 nt, Human
acaucccacagaaacauacaua

SEQ ID NO: 530685 - RNA, 22 nt, Human
ggaugcugggagacagcaggca

SEQ ID NO: 530686 - RNA, 22 nt, Human
gucagcaggguccccuugagug

SEQ ID NO: 530687 - RNA, 22 nt, Human
cauaucuuaugguuuucuaagu

SEQ ID NO: 530688 - RNA, 23 nt, Human
uguaacagagcacugauugacaa

SEQ ID NO: 530689 - RNA, 22 nt, Human
uggcugagguuaugcugguugu

SEQ ID NO: 530690 - RNA, 22 nt, Human
auaaagcaagcauaccauuaag

SEQ ID NO: 530691 - RNA, 22 nt, Human
auuguacuuuuauuacauguag

SEQ ID NO: 530692 - RNA, 22 nt, Human
aucagaaaaacauaauguuauu

SEQ ID NO: 530693 - RNA, 22 nt, Human
agagccagcauuugacacuggc

SEQ ID NO: 530694 - RNA, 22 nt, Human
aucaaaaccuugacuuuuaaug

SEQ ID NO: 530695 - RNA, 22 nt, Human
aguggggucuccuccagccccc

SEQ ID NO: 530696 - RNA, 22 nt, Human
uacuuugagaugaugcugaucg

SEQ ID NO: 530697 - RNA, 22 nt, Human
agggcugacaguaaaaguauga

SEQ ID NO: 530698 - RNA, 22 nt, Human
gcagauggauguggacggcgcc

SEQ ID NO: 530699 - RNA, 22 nt, Human
uugucuuucccagcuucuagag

SEQ ID NO: 530700 - RNA, 22 nt, Human
ccacagagagugucagccuuug

SEQ ID NO: 530701 - RNA, 22 nt, Human
caaggccaagguuuugugaacu

SEQ ID NO: 530702 - RNA, 22 nt, Human
cugcuguguuggcauuggauag

SEQ ID NO: 530703 - RNA, 22 nt, Human
uuuguaagcaguguuuuuacag

SEQ ID NO: 530704 - RNA, 22 nt, Human
agccaagcugaucuccugcuga

SEQ ID NO: 530705 - RNA, 22 nt, Human
gggaggugauuaggaccaugua

SEQ ID NO: 530706 - RNA, 22 nt, Human
ugcaugcaaaaaaaucugcauu

SEQ ID NO: 530707 - RNA, 22 nt, Human
cuuggaguagagauuuagugaa

SEQ ID NO: 530708 - RNA, 21 nt, Human
ccuggcugcacaguugcuggu

SEQ ID NO: 530709 - RNA, 22 nt, Human
caggacccaaccucccugcucu

SEQ ID NO: 530710 - RNA, 23 nt, Human
ugucacauuuaguuggcauuguu

SEQ ID NO: 530711 - RNA, 22 nt, Human
uggugggaguccgcugugcugc

SEQ ID NO: 530712 - RNA, 21 nt, Human
uccagaaaagaggucauuagc

SEQ ID NO: 530713 - RNA, 22 nt, Human
ggucccaguccucucccugcua

SEQ ID NO: 530714 - RNA, 22 nt, Human
uccaggagggauugggcugugg

SEQ ID NO: 530715 - RNA, 22 nt, Human
gcagagccaggcuggggcaggu

SEQ ID NO: 530716 - RNA, 22 nt, Human
gcagcuaguccaguuauguggc

SEQ ID NO: 530717 - RNA, 22 nt, Human
agggcagaccacgugcaaggau

SEQ ID NO: 530718 - RNA, 22 nt, Human
ucaaaguaagaauuuauuacaa

SEQ ID NO: 530719 - RNA, 22 nt, Human
acauugaagcugugaaaucaaa

SEQ ID NO: 530720 - RNA, 22 nt, Human
gccaggcagacaggucaucagg

SEQ ID NO: 530721 - RNA, 22 nt, Human
uucaagucugcccagagucagc

SEQ ID NO: 530722 - RNA, 22 nt, Human
cucuccagccacagaagcugcu

SEQ ID NO: 530723 - RNA, 22 nt, Human
cagugcagccaaggacaggcac

SEQ ID NO: 530724 - RNA, 22 nt, Human
cagaguacugggagaacagaag

SEQ ID NO: 530725 - RNA, 22 nt, Human
acagaauucuaguauguggcuu

SEQ ID NO: 530726 - RNA, 22 nt, Human
agccacagagagggagcugcaa

SEQ ID NO: 530727 - RNA, 23 nt, Human
ucugcuggugacacggucacauu

SEQ ID NO: 530728 - RNA, 22 nt, Human
auguuauuaaaguacagauucu

SEQ ID NO: 530729 - RNA, 22 nt, Human
caggccuugaguuuugggcuuu

SEQ ID NO: 530730 - RNA, 23 nt, Human
ucugucaccuauggcugcucuuc

SEQ ID NO: 530731 - RNA, 22 nt, Human
aaagacagagcuguaggggaaa

SEQ ID NO: 530732 - RNA, 22 nt, Human
ucaggccuuucuucagagcuuc

SEQ ID NO: 530733 - RNA, 22 nt, Human
agcagggggaguuagacuagau

SEQ ID NO: 530734 - RNA, 23 nt, Human
cugucuccugggcuagguggaau

SEQ ID NO: 530735 - RNA, 21 nt, Human
ucauggccagcaaguggcaga

SEQ ID NO: 530736 - RNA, 22 nt, Human
aaagucugaaagauaagaguga

SEQ ID NO: 530737 - RNA, 22 nt, Human
ugagcaggcgcagcaggagguc

SEQ ID NO: 530738 - RNA, 22 nt, Human
aaaauuuugcccuauccuucau

SEQ ID NO: 530739 - RNA, 22 nt, Human
ccuugcucaagcuagugacggg

SEQ ID NO: 530740 - RNA, 21 nt, Human
ggccucagccaccuggcucug

SEQ ID NO: 530741 - RNA, 22 nt, Human
guaauagguuuucuugcuccag

SEQ ID NO: 530742 - RNA, 22 nt, Human
caggggcaggugugagaucauc

SEQ ID NO: 530743 - RNA, 22 nt, Human
uugggugcugucauggggcacg

SEQ ID NO: 530744 - RNA, 22 nt, Human
uccaagaucuacagcaguuuag

SEQ ID NO: 530745 - RNA, 22 nt, Human
uagucuuaaguaauucauggaa

SEQ ID NO: 530746 - RNA, 22 nt, Human
ucaguguucuuauuuaauuagg

SEQ ID NO: 530747 - RNA, 22 nt, Human
ugucucaggggcauugaaauaa

SEQ ID NO: 530748 - RNA, 22 nt, Human
aagauggaguaguguaaugguu

SEQ ID NO: 530749 - RNA, 22 nt, Human
cucaggcccacagcagacccac

SEQ ID NO: 530750 - RNA, 22 nt, Human
uucagaaugagaauggaugggu

SEQ ID NO: 530751 - RNA, 22 nt, Human
ucauguuauugacucauaauau

SEQ ID NO: 530752 - RNA, 22 nt, Human
guauuuuucaguuaggagcuua

SEQ ID NO: 530753 - RNA, 22 nt, Human
auuggaaauacaguagaaaaau

SEQ ID NO: 530754 - RNA, 22 nt, Human
gccugggagaaugaccuccaac

SEQ ID NO: 530755 - RNA, 22 nt, Human
cugggcugucccagggcggcag

SEQ ID NO: 530756 - RNA, 22 nt, Human
gaaggccacaagagaaguuaag

SEQ ID NO: 530757 - RNA, 22 nt, Human
ggaaagaggauaguggguaggu

SEQ ID NO: 530758 - RNA, 17 nt, Human
aggcaggagauuggaga

SEQ ID NO: 530759 - RNA, 22 nt, Human
caggcugggcagccuccccggc

SEQ ID NO: 530760 - RNA, 22 nt, Human
gaugccuccaaaugagggcaga

SEQ ID NO: 530761 - RNA, 22 nt, Human
ugggcagaguugugaugaacug

SEQ ID NO: 530762 - RNA, 22 nt, Human
agacaaaugaacaaauauguga

SEQ ID NO: 530763 - RNA, 22 nt, Human
agggccacaguggggccugaga

SEQ ID NO: 530764 - RNA, 22 nt, Human
aaucacagaaggcagucuucua

SEQ ID NO: 530765 - RNA, 18 nt, Human
ucacagugcucuugccua

SEQ ID NO: 530766 - RNA, 22 nt, Human
gagcuggcagugguagacaugg

SEQ ID NO: 530767 - RNA, 22 nt, Human
agauggaguuaguaccagaguc

SEQ ID NO: 530768 - RNA, 22 nt, Human
uuucuaaggccagagacugcug

SEQ ID NO: 530769 - RNA, 22 nt, Human
gggaaggagccugcuugcuaga

SEQ ID NO: 530770 - RNA, 22 nt, Human
cucagagauauagucccugcuu

SEQ ID NO: 530771 - RNA, 22 nt, Human
ggcucuggcggcucuuucaaua

SEQ ID NO: 530772 - RNA, 22 nt, Human
gauuuauuuuuaaucagcaggg

SEQ ID NO: 530773 - RNA, 22 nt, Human
ugggaagggaguuucuuggagu

SEQ ID NO: 530774 - RNA, 22 nt, Human
aaaucugggucaagguggagug

SEQ ID NO: 530775 - RNA, 22 nt, Human
uauuuaucaagguaggagaaua

SEQ ID NO: 530776 - RNA, 22 nt, Human
ggcagcagggucuagauugaug

SEQ ID NO: 530777 - RNA, 22 nt, Human
ucuuuccuguaacugcuguuca

SEQ ID NO: 530778 - RNA, 22 nt, Human
gaggaaaauggaguguaauuaa

SEQ ID NO: 530779 - RNA, 22 nt, Human
uauaaaugcacuuuugaaauau

SEQ ID NO: 530780 - RNA, 22 nt, Human
uguuuuugucuccuugucugcu

SEQ ID NO: 530781 - RNA, 22 nt, Human
caagcucugggauagcagagag

SEQ ID NO: 530782 - RNA, 22 nt, Human
ccugccugcuuucugcuuugca

SEQ ID NO: 530783 - RNA, 21 nt, Human
gucagcagauccagcacuugu

SEQ ID NO: 530784 - RNA, 22 nt, Human
caguggagaggcaugcuuggca

SEQ ID NO: 530785 - RNA, 22 nt, Human
uuuuauugucaaugaagacaga

SEQ ID NO: 530786 - RNA, 22 nt, Human
ucuccaagaaaagaucucagcu

SEQ ID NO: 530787 - RNA, 22 nt, Human
agagccugaggccaggaaaaug

SEQ ID NO: 530788 - RNA, 22 nt, Human
uuugaauauacuucaaacaaag

SEQ ID NO: 530789 - RNA, 22 nt, Human
ucagaauuggacaauagaagca

SEQ ID NO: 530790 - RNA, 20 nt, Human
agcuggagaagggcccuucc

SEQ ID NO: 530791 - RNA, 22 nt, Human
cccucugccugcgcccuggugu

SEQ ID NO: 530792 - RNA, 22 nt, Human
agggccagcuagagcccucgcc

SEQ ID NO: 530793 - RNA, 22 nt, Human
acuuuucaaaugggaaacucag

SEQ ID NO: 530794 - RNA, 21 nt, Human
aagaggucaaauuauaaaugg

SEQ ID NO: 530795 - RNA, 19 nt, Human
cucuggccucuggaugcug

SEQ ID NO: 530796 - RNA, 22 nt, Human
caguuacagcugcaccagagcc

SEQ ID NO: 530797 - RNA, 22 nt, Human
uaaagcaaugaaaguuuugcag

SEQ ID NO: 530798 - RNA, 22 nt, Human
agcagguguauauaaggcugag

SEQ ID NO: 530799 - RNA, 18 nt, Human
uccugccugugccccagg

SEQ ID NO: 530800 - RNA, 19 nt, Human
cagauguuuucaguucauu

SEQ ID NO: 530801 - RNA, 18 nt, Human
gcuuccugaaagcugccc

SEQ ID NO: 530802 - RNA, 22 nt, Human
augucaccuucgguggcacggu

SEQ ID NO: 530803 - RNA, 19 nt, Human
uuugaauauaaugcagcua

SEQ ID NO: 530804 - RNA, 23 nt, Human
acauacauggagauaaagugaug

SEQ ID NO: 530805 - RNA, 22 nt, Human
uugguucaauacuaacuugaac

SEQ ID NO: 530806 - RNA, 22 nt, Human
aagcaguguucccagcuggccc

SEQ ID NO: 530807 - RNA, 22 nt, Human
gaggagggagaauuaggcuuaa

SEQ ID NO: 530808 - RNA, 22 nt, Human
ucucucagaggccaggguccug

SEQ ID NO: 530809 - RNA, 20 nt, Human
ggggcugcaugcagagaaga

SEQ ID NO: 530810 - RNA, 22 nt, Human
acagguggaggcuuuaggaggu

SEQ ID NO: 530811 - RNA, 22 nt, Human
agccaaggacacggagccuccu

SEQ ID NO: 530812 - RNA, 22 nt, Human
acagaaggacuugagaaagaca

SEQ ID NO: 530813 - RNA, 22 nt, Human
cagaggcuaagaugagugggug

SEQ ID NO: 530814 - RNA, 22 nt, Human
uucuaucauacuugaauacauu

SEQ ID NO: 530815 - RNA, 22 nt, Human
aaguuuauguucuuugaaggca

SEQ ID NO: 530816 - RNA, 22 nt, Human
gugcagagaaaugagaagucga

SEQ ID NO: 530817 - RNA, 22 nt, Human
gcaggugaugugaugugagcau

SEQ ID NO: 530818 - RNA, 22 nt, Human
ugggcucaggaccccagaggcc

SEQ ID NO: 530819 - RNA, 22 nt, Human
caaugugucaggaaaagggcca

SEQ ID NO: 530820 - RNA, 18 nt, Human
cauuguacaaugcuuuau

SEQ ID NO: 530821 - RNA, 22 nt, Human
aguggaguugaguugauggauu

SEQ ID NO: 530822 - RNA, 22 nt, Human
ucacaguaaaagcauggaagag

SEQ ID NO: 530823 - RNA, 22 nt, Human
ucuguugcaaugugcaugguga

SEQ ID NO: 530824 - RNA, 19 nt, Human
uaucuuuaugcaguggugg

SEQ ID NO: 530825 - RNA, 22 nt, Human
ucuugauucauguucccugcau

SEQ ID NO: 530826 - RNA, 22 nt, Human
ugucaccaguuccaggaaauaa

SEQ ID NO: 530827 - RNA, 22 nt, Human
uggugccuugggccuacagcgc

SEQ ID NO: 530828 - RNA, 22 nt, Human
ugauuacagucugacagauguu

SEQ ID NO: 530829 - RNA, 22 nt, Human
uuucagugaaagcuacuguuag

SEQ ID NO: 530830 - RNA, 22 nt, Human
gcugccuguguggccacucacu

SEQ ID NO: 530831 - RNA, 22 nt, Human
agcagccagaaagggcagucga

SEQ ID NO: 530832 - RNA, 22 nt, Human
cugggcacacagugacucugca

SEQ ID NO: 530833 - RNA, 22 nt, Human
augcucugggcaggagcccugg

SEQ ID NO: 530834 - RNA, 18 nt, Human
agcuggcccuggcugccg

SEQ ID NO: 530835 - RNA, 22 nt, Human
cccuuuaaggaaaggaaggaug

SEQ ID NO: 530836 - RNA, 22 nt, Human
ugaaaaggagccuuagguaggu

SEQ ID NO: 530837 - RNA, 22 nt, Human
gcucccagauuucagccuugug

SEQ ID NO: 530838 - RNA, 21 nt, Human
uauacagaggggaacaggaga

SEQ ID NO: 530839 - RNA, 19 nt, Human
aucuuacagagcagaguac

SEQ ID NO: 530840 - RNA, 22 nt, Human
cccagcccagcguucgaggggu

SEQ ID NO: 530841 - RNA, 22 nt, Human
uuacuaagagaaguaaauauuu

SEQ ID NO: 530842 - RNA, 21 nt, Human
gcagcagaggcuugacagaca

SEQ ID NO: 530843 - RNA, 22 nt, Human
auacaaguugugauaauguaaa

SEQ ID NO: 530844 - RNA, 22 nt, Human
ucugggagagcacguggcugac

SEQ ID NO: 530845 - RNA, 22 nt, Human
ccugggacuuggucugggguuu

SEQ ID NO: 530846 - RNA, 19 nt, Human
aggagaagacucucucccc

SEQ ID NO: 530847 - RNA, 17 nt, Human
gagauuuucguccugaa

SEQ ID NO: 530848 - RNA, 22 nt, Human
gaggcucagagugguuaaauaa

SEQ ID NO: 530849 - RNA, 22 nt, Human
aguuucauuucuuaguaccagu

SEQ ID NO: 530850 - RNA, 20 nt, Human
gaaaugugaccucuucugug

SEQ ID NO: 530851 - RNA, 22 nt, Human
aucaguuugauaauaaggcuug

SEQ ID NO: 530852 - RNA, 22 nt, Human
ucuuuagaguuaacaauaauga

SEQ ID NO: 530853 - RNA, 22 nt, Human
aggcugagcuggcccuugaaau

SEQ ID NO: 530854 - RNA, 22 nt, Human
ggcucccacccauagggcgagu

SEQ ID NO: 530855 - RNA, 22 nt, Human
ggcacugacacuagcauggcac

SEQ ID NO: 530856 - RNA, 17 nt, Human
uucagcuacucaacaca

SEQ ID NO: 530857 - RNA, 19 nt, Human
uggccagguacugucugcu

SEQ ID NO: 530858 - RNA, 22 nt, Human
cagaaauggaaguucugguuua

SEQ ID NO: 530859 - RNA, 22 nt, Human
uggccuggugucugcgaggccu

SEQ ID NO: 530860 - RNA, 22 nt, Human
aguacagaccugucucuuccug

SEQ ID NO: 530861 - RNA, 22 nt, Human
gcauuucugugcauacacauga

SEQ ID NO: 530862 - RNA, 22 nt, Human
cucuuuuucagccuuaccaaag

SEQ ID NO: 530863 - RNA, 22 nt, Human
cagagcuguuacuauucaugaa

SEQ ID NO: 530864 - RNA, 22 nt, Human
ucaaagcagcacauucgcaagc

SEQ ID NO: 530865 - RNA, 20 nt, Human
ugaaaaggucaggagacaug

SEQ ID NO: 530866 - RNA, 22 nt, Human
ucuuuacaagucacauuuucug

SEQ ID NO: 530867 - RNA, 22 nt, Human
agguaagaauagaggauugggg

SEQ ID NO: 530868 - RNA, 22 nt, Human
uucagaaaugaauauugguauu

SEQ ID NO: 530869 - RNA, 22 nt, Human
uuucacagcgucuuucucuugc

SEQ ID NO: 530870 - RNA, 22 nt, Human
agacauggauuucuuacauaaa

SEQ ID NO: 530871 - RNA, 21 nt, Human
cagaggccucaugcucugugc

SEQ ID NO: 530872 - RNA, 22 nt, Human
gaggcuggaggucaaagaugaa

SEQ ID NO: 530873 - RNA, 22 nt, Human
agcuguguagggaaucagagaa

SEQ ID NO: 530874 - RNA, 22 nt, Human
uggcccugaggacccagugugg

SEQ ID NO: 530875 - RNA, 22 nt, Human
ccaggcucugcgcuggacaugg

SEQ ID NO: 530876 - RNA, 22 nt, Human
gcucucugaggugcuggcagag

SEQ ID NO: 530877 - RNA, 22 nt, Human
gcuggccagggcugcucgcgga

SEQ ID NO: 530878 - RNA, 22 nt, Human
ccugccuggcugucagcagagc

SEQ ID NO: 530879 - RNA, 22 nt, Human
ugccaggccaaugaaggcaggg

SEQ ID NO: 530880 - RNA, 23 nt, Human
ucagagagcuguugagagcugcc

SEQ ID NO: 530881 - RNA, 22 nt, Human
agaagcagacucugaggcaagg

SEQ ID NO: 530882 - RNA, 22 nt, Human
ugcaggagacauaauagggacu

SEQ ID NO: 530883 - RNA, 22 nt, Human
ucaaucuagagauuaaaauagg

SEQ ID NO: 530884 - RNA, 22 nt, Human
cuuguguggucuggucuugcua

SEQ ID NO: 530885 - RNA, 22 nt, Human
gggcugagggccaauuccuacu

SEQ ID NO: 530886 - RNA, 22 nt, Human
gugcucuccuggcugcccugac

SEQ ID NO: 530887 - RNA, 22 nt, Human
auuuguaagcuagagccaugau

SEQ ID NO: 530888 - RNA, 22 nt, Human
ccuggguggcagagguugcagu

SEQ ID NO: 530889 - RNA, 22 nt, Human
acacauuugggcuccuacauaa

SEQ ID NO: 530890 - RNA, 22 nt, Human
cguguggucccggcaaggcaag

SEQ ID NO: 530891 - RNA, 22 nt, Human
cugaguccagggacagaggcgu

SEQ ID NO: 530892 - RNA, 22 nt, Human
ucagggaauaaguagaugagug

SEQ ID NO: 530893 - RNA, 22 nt, Human
gcucccagcaauugaggcagcc

SEQ ID NO: 530894 - RNA, 22 nt, Human
cagcugccacaccucuuucucu

SEQ ID NO: 530895 - RNA, 22 nt, Human
uaaauucuacaacuucaaagau

SEQ ID NO: 530896 - RNA, 22 nt, Human
cuaucuuucgauucuagcuuaa

SEQ ID NO: 530897 - RNA, 22 nt, Human
agaggcaggaagagcugauuuu

SEQ ID NO: 530898 - RNA, 22 nt, Human
cugagaaggaagccuccacucu

SEQ ID NO: 530899 - RNA, 22 nt, Human
acugcagcaaagcccgugucuu

SEQ ID NO: 530900 - RNA, 22 nt, Human
uaggagcuaaaauauuuuauau

SEQ ID NO: 530901 - RNA, 22 nt, Human
agucugucagucauucuaacaa

SEQ ID NO: 530902 - RNA, 22 nt, Human
gaguccagacaccauaccugau

SEQ ID NO: 530903 - RNA, 22 nt, Human
ucuggcucucaacaaauauuua

SEQ ID NO: 530904 - RNA, 20 nt, Human
gguagcagcugcugucaucc

SEQ ID NO: 530905 - RNA, 22 nt, Human
ucacuuauugcucaucucaugc

SEQ ID NO: 530906 - RNA, 22 nt, Human
gccagguggcugagcagcugca

SEQ ID NO: 530907 - RNA, 22 nt, Human
cuucuugcugggggccucagug

SEQ ID NO: 530908 - RNA, 22 nt, Human
gcugggcuggccgccgagaucg

SEQ ID NO: 530909 - RNA, 22 nt, Human
cuguagaacgauccaggcauuu

SEQ ID NO: 530910 - RNA, 22 nt, Human
uaaaaucauucuggugucagua

SEQ ID NO: 530911 - RNA, 22 nt, Human
gcugagguaggagguugcagug

SEQ ID NO: 530912 - RNA, 22 nt, Human
aagggagguaaagcuauuuaaa

SEQ ID NO: 530913 - RNA, 22 nt, Human
uuugagaagcaucugguccacu

SEQ ID NO: 530914 - RNA, 22 nt, Human
cauuugcaagagauaaauguuu

SEQ ID NO: 530915 - RNA, 22 nt, Human
cauggcugcgagaagagugggu

SEQ ID NO: 530916 - RNA, 22 nt, Human
guggcucuaggugagcauggag

SEQ ID NO: 530917 - RNA, 19 nt, Human
ccuuugaaucaggacacuu

SEQ ID NO: 530918 - RNA, 22 nt, Human
ggcucugcgcgguaaagugacu

SEQ ID NO: 530919 - RNA, 22 nt, Human
auuucugugcaguaaaugguga

SEQ ID NO: 530920 - RNA, 22 nt, Human
cuuucacagcugugcuuaugau

SEQ ID NO: 530921 - RNA, 22 nt, Human
acagugaugagccggcugaggc

SEQ ID NO: 530922 - RNA, 23 nt, Human
cuccaaggcccaacugucuaggc

SEQ ID NO: 530923 - RNA, 22 nt, Human
cuggagcaggcuugucccagcu

SEQ ID NO: 530924 - RNA, 22 nt, Human
cuggccugaggucggcuguagg

SEQ ID NO: 530925 - RNA, 22 nt, Human
cccagcaugcacgcugacacuc

SEQ ID NO: 530926 - RNA, 22 nt, Human
aauuauacaauugucaaguucu

SEQ ID NO: 530927 - RNA, 22 nt, Human
ucaguguuuacaugcauccuug

SEQ ID NO: 530928 - RNA, 22 nt, Human
uucuaccuacccucugcauaca

SEQ ID NO: 530929 - RNA, 22 nt, Human
acuuugcagggcuugauaucca

SEQ ID NO: 530930 - RNA, 22 nt, Human
aaagggagcauggcugcaggga

SEQ ID NO: 530931 - RNA, 22 nt, Human
guuuuucuaggaccaugugauu

SEQ ID NO: 530932 - RNA, 22 nt, Human
gguggaaggccuggaaggaggc

SEQ ID NO: 530933 - RNA, 17 nt, Human
guccuacccauggucua

SEQ ID NO: 530934 - RNA, 22 nt, Human
ggaggccaaggaggagcuugcc

SEQ ID NO: 530935 - RNA, 22 nt, Human
acauuucugucuuagggacugu

SEQ ID NO: 530936 - RNA, 22 nt, Human
ggagcugagguaacagugagug

SEQ ID NO: 530937 - RNA, 22 nt, Human
uauguguaggaggaggacaggg

SEQ ID NO: 530938 - RNA, 22 nt, Human
cagagccugccucuggcugugg

SEQ ID NO: 530939 - RNA, 19 nt, Human
aagggcugggcaccucacu

SEQ ID NO: 530940 - RNA, 22 nt, Human
ugacuuccugcacucaggugau

SEQ ID NO: 530941 - RNA, 20 nt, Human
caaagacaugcuaggggugg

SEQ ID NO: 530942 - RNA, 23 nt, Human
ucugcagacgcuguucuauuguc

SEQ ID NO: 530943 - RNA, 22 nt, Human
ucauuucuuaacuagagugaac

SEQ ID NO: 530944 - RNA, 22 nt, Human
ccugccucaggacucugcauau

SEQ ID NO: 530945 - RNA, 22 nt, Human
gcagaagcugggcagcgaggug

SEQ ID NO: 530946 - RNA, 22 nt, Human
acagcacaaucugagucccaga

SEQ ID NO: 530947 - RNA, 22 nt, Human
aauuugauucagcaaauguuca

SEQ ID NO: 530948 - RNA, 22 nt, Human
cauugcacagcccuguggugau

SEQ ID NO: 530949 - RNA, 21 nt, Human
uaauacugaaagugacaucug

SEQ ID NO: 530950 - RNA, 22 nt, Human
ggcaggcagaggcugagacagg

SEQ ID NO: 530951 - RNA, 22 nt, Human
augggcugaaagaguaagcugu

SEQ ID NO: 530952 - RNA, 22 nt, Human
ccagagccugcugagccccauu

SEQ ID NO: 530953 - RNA, 22 nt, Human
ucuucauguugcuguagggaga

SEQ ID NO: 530954 - RNA, 19 nt, Human
ugucuuaauuaacucagag

SEQ ID NO: 530955 - RNA, 22 nt, Human
uauauuaaacccucucuguagg

SEQ ID NO: 530956 - RNA, 22 nt, Human
aaagcaugcuacuuuauauagg

SEQ ID NO: 530957 - RNA, 17 nt, Human
agcagcuggguugaucu

SEQ ID NO: 530958 - RNA, 22 nt, Human
ccuucccuaaagcgucgcuuag

SEQ ID NO: 530959 - RNA, 22 nt, Human
uccagaaacugcugagauaaga

SEQ ID NO: 530960 - RNA, 22 nt, Human
gcucugcccagugcccugagac

SEQ ID NO: 530961 - RNA, 18 nt, Human
gcagcuagccaggggggc

SEQ ID NO: 530962 - RNA, 19 nt, Human
agccaggguccagacaugu

SEQ ID NO: 530963 - RNA, 22 nt, Human
auggauaauggugauaguugca

SEQ ID NO: 530964 - RNA, 19 nt, Human
uuccaguucuaaucucuuc

SEQ ID NO: 530965 - RNA, 22 nt, Human
cagcaggaggcauggcuucccu

SEQ ID NO: 530966 - RNA, 22 nt, Human
ucauugcagacuaacaaucuca

SEQ ID NO: 530967 - RNA, 22 nt, Human
gaagccagccuugucugccucu

SEQ ID NO: 530968 - RNA, 22 nt, Human
cacaauuuuccuuuaaguguau

SEQ ID NO: 530969 - RNA, 18 nt, Human
agggcucucugcuggguu

SEQ ID NO: 530970 - RNA, 22 nt, Human
aaauacuagaauucagaguuga

SEQ ID NO: 530971 - RNA, 22 nt, Human
gggagggaucugcuaggcaaug

SEQ ID NO: 530972 - RNA, 22 nt, Human
cuccugggagcuguggcagagc

SEQ ID NO: 530973 - RNA, 22 nt, Human
gcagcugccccgacugugaguc

SEQ ID NO: 530974 - RNA, 19 nt, Human
aucccaucugguuuuuccc

SEQ ID NO: 530975 - RNA, 22 nt, Human
ccaaaguuuuuauaguuagcau

SEQ ID NO: 530976 - RNA, 18 nt, Human
cacaauuuacagaugaca

SEQ ID NO: 530977 - RNA, 22 nt, Human
cagagcagggugcaccuugggc

SEQ ID NO: 530978 - RNA, 22 nt, Human
uaacagaauagcagaaacagaa

SEQ ID NO: 530979 - RNA, 22 nt, Human
aggcacugaauauccaguaaaa

SEQ ID NO: 530980 - RNA, 22 nt, Human
uaccauuugagagagaacauaa

SEQ ID NO: 530981 - RNA, 22 nt, Human
ggcuguccaccuaccaugccgg

SEQ ID NO: 530982 - RNA, 22 nt, Human
uccugccugcaaucccagcacu

SEQ ID NO: 530983 - RNA, 22 nt, Human
auucuggauauuacuuaucuau

SEQ ID NO: 530984 - RNA, 20 nt, Human
acaggagaucugaggaaagg

SEQ ID NO: 530985 - RNA, 22 nt, Human
cugagagucagcuucuccuccu

SEQ ID NO: 530986 - RNA, 22 nt, Human
agacucaagcagauaggaauua

SEQ ID NO: 530987 - RNA, 22 nt, Human
ggagccuguuaguugagugcuc

SEQ ID NO: 530988 - RNA, 22 nt, Human
uucacuuaacaucauaucauga

SEQ ID NO: 530989 - RNA, 22 nt, Human
cuaugaaaggauuuggaguugu

SEQ ID NO: 530990 - RNA, 22 nt, Human
gucaaguuaagauaaggucaug

SEQ ID NO: 530991 - RNA, 22 nt, Human
ugaugggaaaaugaggccuggg

SEQ ID NO: 530992 - RNA, 22 nt, Human
aguguaucaugguuggcagaca

SEQ ID NO: 530993 - RNA, 22 nt, Human
gcugucacucaccaggccugca

SEQ ID NO: 530994 - RNA, 19 nt, Human
ucugccugcuuguaggggc

SEQ ID NO: 530995 - RNA, 22 nt, Human
gucaaauaauuuucucaauagu

SEQ ID NO: 530996 - RNA, 22 nt, Human
cagcagguauguuuguucagca

SEQ ID NO: 530997 - RNA, 22 nt, Human
caggaccccauauucacugaac

SEQ ID NO: 530998 - RNA, 22 nt, Human
ucacauaaauuauacaauuuca

SEQ ID NO: 530999 - RNA, 22 nt, Human
gccccucucccuugaggcaggc

SEQ ID NO: 531000 - RNA, 22 nt, Human
gcaggguggauggcagggccag

SEQ ID NO: 531001 - RNA, 22 nt, Human
uugcauccgggcuacuuccaca

SEQ ID NO: 531002 - RNA, 22 nt, Human
uuucagaggaaaucucauugag

SEQ ID NO: 531003 - RNA, 22 nt, Human
gaagcagcuagcccacuaguca

SEQ ID NO: 531004 - RNA, 20 nt, Human
accucugcaucaauccuuug

SEQ ID NO: 531005 - RNA, 22 nt, Human
guaagggauuugaacauagguu

SEQ ID NO: 531006 - RNA, 22 nt, Human
ggcuuuauuucacuguaccaua

SEQ ID NO: 531007 - RNA, 22 nt, Human
gaaauguaggcauaauuauuuu

SEQ ID NO: 531008 - RNA, 22 nt, Human
uggcugcagaucaagggcaggc

SEQ ID NO: 531009 - RNA, 22 nt, Human
gaaauguguuguucauuucuaa

SEQ ID NO: 531010 - RNA, 22 nt, Human
guacaaguguauuuggcuugau

SEQ ID NO: 531011 - RNA, 22 nt, Human
aacagaaaucauuuagggcucu

SEQ ID NO: 531012 - RNA, 22 nt, Human
cguguacagucuaucuuuuuuc

SEQ ID NO: 531013 - RNA, 22 nt, Human
ugaguccauguggaggggaggu

SEQ ID NO: 531014 - RNA, 22 nt, Human
ggccugggcccacugucaagag

SEQ ID NO: 531015 - RNA, 22 nt, Human
aagaaggccucugcccuggcuu

SEQ ID NO: 531016 - RNA, 22 nt, Human
agcaggaaagaaaaaucugugu

SEQ ID NO: 531017 - RNA, 22 nt, Human
ggcucaguguuuguggaacaua

SEQ ID NO: 531018 - RNA, 22 nt, Human
uaaugcaguagguauuaaagaa

SEQ ID NO: 531019 - RNA, 20 nt, Human
ugcaggugggcccuucuggg

SEQ ID NO: 531020 - RNA, 22 nt, Human
auuauguauuugguauaguuug

SEQ ID NO: 531021 - RNA, 22 nt, Human
caacagagagaccagaaacagg

SEQ ID NO: 531022 - RNA, 22 nt, Human
ucaaagagcuauucaguugugg

SEQ ID NO: 531023 - RNA, 22 nt, Human
acagagucauucacugaugaag

SEQ ID NO: 531024 - RNA, 22 nt, Human
cuacaaagaauuucucuagcuc

SEQ ID NO: 531025 - RNA, 19 nt, Human
ugaaauggcaguugcuaaa

SEQ ID NO: 531026 - RNA, 22 nt, Human
agucccagacuccaguuuucug

SEQ ID NO: 531027 - RNA, 22 nt, Human
aagaaaagauguuugguuuuca

SEQ ID NO: 531028 - RNA, 22 nt, Human
uacccagggcuuuucugaugca

SEQ ID NO: 531029 - RNA, 22 nt, Human
agcagggccuggcacuccuggg

SEQ ID NO: 531030 - RNA, 22 nt, Human
cagcugcaggaacaaaaaugug

SEQ ID NO: 531031 - RNA, 22 nt, Human
aagcagccuggcaugaugcuuu

SEQ ID NO: 531032 - RNA, 22 nt, Human
ggcaggcuccguguuccauucc

SEQ ID NO: 531033 - RNA, 22 nt, Human
uggcccugccgccacgacgucu

SEQ ID NO: 531034 - RNA, 22 nt, Human
aggucauuccuugucuucuugc

SEQ ID NO: 531035 - RNA, 22 nt, Human
uuuuuccuagugcuuucuggua

SEQ ID NO: 531036 - RNA, 22 nt, Human
uugggaguuccuacugcgguuu

SEQ ID NO: 531037 - RNA, 22 nt, Human
aaacacugguaugauguauagu

SEQ ID NO: 531038 - RNA, 22 nt, Human
uuccaguuaaggaagcuauucu

SEQ ID NO: 531039 - RNA, 22 nt, Human
aagauacacggucaacucucaa

SEQ ID NO: 531040 - RNA, 22 nt, Human
aauguaaaguugggcacaaaug

SEQ ID NO: 531041 - RNA, 22 nt, Human
acaugaaaccugagucuaacuc

SEQ ID NO: 531042 - RNA, 22 nt, Human
ccaaaaauuagauacacauaua

SEQ ID NO: 531043 - RNA, 22 nt, Human
cggucaggugcagcguuggcac

SEQ ID NO: 531044 - RNA, 22 nt, Human
uggccugggcaugaagcaucgu

SEQ ID NO: 531045 - RNA, 22 nt, Human
acuaaacauucuugucucucaa

SEQ ID NO: 531046 - RNA, 22 nt, Human
uuucuaagaaaguaaugguuau

SEQ ID NO: 531047 - RNA, 22 nt, Human
acagcagcgucaacuuaaaauu

SEQ ID NO: 531048 - RNA, 22 nt, Human
acguggagagaauagggcacca

SEQ ID NO: 531049 - RNA, 22 nt, Human
agaaaucugacugcugugcaca

SEQ ID NO: 531050 - RNA, 19 nt, Human
ugccuguggcgagcaucuu

SEQ ID NO: 531051 - RNA, 20 nt, Human
cccucccagaugcuucccaa

SEQ ID NO: 531052 - RNA, 22 nt, Human
ugccuuaauuucccuguuuugu

SEQ ID NO: 531053 - RNA, 20 nt, Human
uugcaacuguaagaagcagg

SEQ ID NO: 531054 - RNA, 17 nt, Human
gccaaaggguuccaauc

SEQ ID NO: 531055 - RNA, 22 nt, Human
gaggcaguuccugagugacaag

SEQ ID NO: 531056 - RNA, 22 nt, Human
augcugaagagugcacaggcua

SEQ ID NO: 531057 - RNA, 22 nt, Human
aggcagggcucauuucuuaggc

SEQ ID NO: 531058 - RNA, 22 nt, Human
uuguccuaauuuauggccugga

SEQ ID NO: 531059 - RNA, 22 nt, Human
cuggguggcuguccagccagcc

SEQ ID NO: 531060 - RNA, 22 nt, Human
aauuucuucagcucuaaaaugg

SEQ ID NO: 531061 - RNA, 22 nt, Human
guaaaugugcuucuuuuaacuu

SEQ ID NO: 531062 - RNA, 18 nt, Human
ucugggcaaucucaguau

SEQ ID NO: 531063 - RNA, 22 nt, Human
aucagcaagcaugguuaggugu

SEQ ID NO: 531064 - RNA, 22 nt, Human
agcccaugguguacucuguggc

SEQ ID NO: 531065 - RNA, 22 nt, Human
agcagccagagaaugaugcagu

SEQ ID NO: 531066 - RNA, 22 nt, Human
uaguauaucuuuaguacauagu

SEQ ID NO: 531067 - RNA, 22 nt, Human
agaggcggagguugcagugagc

SEQ ID NO: 531068 - RNA, 22 nt, Human
ucagagaguuacacaaauuguu

SEQ ID NO: 531069 - RNA, 22 nt, Human
uuucauagccuucuaaugaguu

SEQ ID NO: 531070 - RNA, 22 nt, Human
aacgucauugauugaugguagu

SEQ ID NO: 531071 - RNA, 22 nt, Human
aauguuaaaaccuucagugcuu

SEQ ID NO: 531072 - RNA, 16 nt, Human
uggcagagguucagcc

SEQ ID NO: 531073 - RNA, 22 nt, Human
uuugcauuaucucacuuauaua

SEQ ID NO: 531074 - RNA, 22 nt, Human
aucuggagaucagcugguggca

SEQ ID NO: 531075 - RNA, 20 nt, Human
ugcuggggacauacagggug

SEQ ID NO: 531076 - RNA, 22 nt, Human
gcagggucgcucuaggagauca

SEQ ID NO: 531077 - RNA, 22 nt, Human
ucauugcaguagggagagaccc

SEQ ID NO: 531078 - RNA, 22 nt, Human
gccuccugacuuacacugagcu

SEQ ID NO: 531079 - RNA, 22 nt, Human
uguggcaggaagagcuucugag

SEQ ID NO: 531080 - RNA, 22 nt, Human
cacuuguagaggcauuauucca

SEQ ID NO: 531081 - RNA, 21 nt, Human
agcaggcuuuggaguggggcu

SEQ ID NO: 531082 - RNA, 22 nt, Human
uacauucuggaaaggcacagac

SEQ ID NO: 531083 - RNA, 22 nt, Human
uccaaucuaguaugauaaauga

SEQ ID NO: 531084 - RNA, 20 nt, Human
acaguuuauccaguuagcag

SEQ ID NO: 531085 - RNA, 22 nt, Human
acaugcuuuaacuuauuuugau

SEQ ID NO: 531086 - RNA, 22 nt, Human
agguauagaauugaaaggguuu

SEQ ID NO: 531087 - RNA, 21 nt, Human
uuaagagcuuagcaguaggcc

SEQ ID NO: 531088 - RNA, 22 nt, Human
gggcaggugcccagggccagag

SEQ ID NO: 531089 - RNA, 22 nt, Human
aggcuuaaccugaucacaugag

SEQ ID NO: 531090 - RNA, 22 nt, Human
acugccugugcacuggucuuuu

SEQ ID NO: 531091 - RNA, 22 nt, Human
ugcugccaccugguggcugaag

SEQ ID NO: 531092 - RNA, 22 nt, Human
caccagcuuugcccacugccca

SEQ ID NO: 531093 - RNA, 22 nt, Human
ggcucccugccuguccucaguc

SEQ ID NO: 531094 - RNA, 23 nt, Human
acugggcugaaauuuuucauggc

SEQ ID NO: 531095 - RNA, 22 nt, Human
acagagucauaagcggagcucg

SEQ ID NO: 531096 - RNA, 22 nt, Human
caccugccccagucuuggagcu

SEQ ID NO: 531097 - RNA, 22 nt, Human
aucugccuccaaguccaugugu

SEQ ID NO: 531098 - RNA, 22 nt, Human
ggcuucuuccugugaacauguu

SEQ ID NO: 531099 - RNA, 22 nt, Human
acauagcuuaaaugagaagaua

SEQ ID NO: 531100 - RNA, 22 nt, Human
acuccugguucccaguugagau

SEQ ID NO: 531101 - RNA, 19 nt, Human
aaggaauggcuuuaaguag

SEQ ID NO: 531102 - RNA, 22 nt, Human
uuuguacacaggucauucaggg

SEQ ID NO: 531103 - RNA, 22 nt, Human
acagcugugaaaauccacagga

SEQ ID NO: 531104 - RNA, 22 nt, Human
auaacagaauaagucauuaccg

SEQ ID NO: 531105 - RNA, 22 nt, Human
uccaggcaaagugcugggcugc

SEQ ID NO: 531106 - RNA, 22 nt, Human
agacugaaguaagaaugcagcu

SEQ ID NO: 531107 - RNA, 22 nt, Human
ggccagagagccgcuguuagga

SEQ ID NO: 531108 - RNA, 22 nt, Human
agcaucuggucaugagugagaa

SEQ ID NO: 531109 - RNA, 22 nt, Human
acaucagagggcucacaugauc

SEQ ID NO: 531110 - RNA, 22 nt, Human
ugcaguggugguaaagaugcuc

SEQ ID NO: 531111 - RNA, 22 nt, Human
agccuccaaaugucaggucccg

SEQ ID NO: 531112 - RNA, 22 nt, Human
agcuuccuuggcgcugaggccu

SEQ ID NO: 531113 - RNA, 22 nt, Human
augugaggcagcacggagauua

SEQ ID NO: 531114 - RNA, 21 nt, Human
gggccacaccuucugcagacc

SEQ ID NO: 531115 - RNA, 20 nt, Human
uccaggcccacucagcugaa

SEQ ID NO: 531116 - RNA, 22 nt, Human
uccuugagagccacugucuugg

SEQ ID NO: 531117 - RNA, 22 nt, Human
gagacagagaucuugcugaguc

SEQ ID NO: 531118 - RNA, 22 nt, Human
gaaauauacauugcaggaagag

SEQ ID NO: 531119 - RNA, 22 nt, Human
acagaaaaaugagggagcugga

SEQ ID NO: 531120 - RNA, 22 nt, Human
aagauuuuuuuccacagacuca

SEQ ID NO: 531121 - RNA, 22 nt, Human
ugccugcucuuaccacucuccc

SEQ ID NO: 531122 - RNA, 22 nt, Human
uggcccugacagguccugggca

SEQ ID NO: 531123 - RNA, 22 nt, Human
uugcugaggacgcagugcagug

SEQ ID NO: 531124 - RNA, 18 nt, Human
uucuuuaauucaguuuga

SEQ ID NO: 531125 - RNA, 22 nt, Human
ccacugccaugggcuaggcaug

SEQ ID NO: 531126 - RNA, 22 nt, Human
guauuagguuggugcaaaauug

SEQ ID NO: 531127 - RNA, 22 nt, Human
gaagggugugauuugccugaga

SEQ ID NO: 531128 - RNA, 22 nt, Human
agcugccacagagccuggccag

SEQ ID NO: 531129 - RNA, 22 nt, Human
gaaagacuaacuagaaagugca

SEQ ID NO: 531130 - RNA, 22 nt, Human
ucccuggcuguguucaggugcg

SEQ ID NO: 531131 - RNA, 22 nt, Human
ugggaggcagguaggugaugau

SEQ ID NO: 531132 - RNA, 22 nt, Human
aggcugagaaagugggaagaug

SEQ ID NO: 531133 - RNA, 22 nt, Human
acaagaauuuacauguagugga

SEQ ID NO: 531134 - RNA, 21 nt, Human
ucucuggaguuagcagagaga

SEQ ID NO: 531135 - RNA, 22 nt, Human
ccugggcuucugucuagauguu

SEQ ID NO: 531136 - RNA, 22 nt, Human
uuuuauuaucuuugaaugggac

SEQ ID NO: 531137 - RNA, 22 nt, Human
uggaggcaguaacugagcaaca

SEQ ID NO: 531138 - RNA, 22 nt, Human
uuucauugucaucuaucuuaga

SEQ ID NO: 531139 - RNA, 22 nt, Human
aagcugccugccacgcuagaua

SEQ ID NO: 531140 - RNA, 22 nt, Human
guccagugucuucuacauaaca

SEQ ID NO: 531141 - RNA, 22 nt, Human
cugcuuuagugugguguuagag

SEQ ID NO: 531142 - RNA, 23 nt, Human
cuguccuuggucuuggcugagug

SEQ ID NO: 531143 - RNA, 22 nt, Human
aggugcuggcgccccaggagac

SEQ ID NO: 531144 - RNA, 22 nt, Human
cuggaggagaacuugaggaagg

SEQ ID NO: 531145 - RNA, 22 nt, Human
ucagcaaugagaacuggcauuu

SEQ ID NO: 531146 - RNA, 22 nt, Human
ccuggccagcuaauugcccauc

SEQ ID NO: 531147 - RNA, 22 nt, Human
agcucuuugacuaaucuugcuu

SEQ ID NO: 531148 - RNA, 22 nt, Human
gcuugcauucuggaucuauggu

SEQ ID NO: 531149 - RNA, 22 nt, Human
aggaugaauauuuagugggaua

SEQ ID NO: 531150 - RNA, 22 nt, Human
aaguuaauuaaccucuccauca

SEQ ID NO: 531151 - RNA, 23 nt, Human
uauacacauguggcaguauagug

SEQ ID NO: 531152 - RNA, 22 nt, Human
uucaguuggccauaccccuaga

SEQ ID NO: 531153 - RNA, 22 nt, Human
cgcuggccauagccuccugugu

SEQ ID NO: 531154 - RNA, 22 nt, Human
agucagcagugaaagcacagcc

SEQ ID NO: 531155 - RNA, 20 nt, Human
ucucaggccccaguuuucuu

SEQ ID NO: 531156 - RNA, 22 nt, Human
ucagagcuuaucucuugcugga

SEQ ID NO: 531157 - RNA, 18 nt, Human
ccucacagacuuccaugu

SEQ ID NO: 531158 - RNA, 22 nt, Human
aguguacauguuuacagcaucu

SEQ ID NO: 531159 - RNA, 22 nt, Human
cagcauuuggaggagaggcuuu

SEQ ID NO: 531160 - RNA, 22 nt, Human
uccugggcagcgggacgcucag

SEQ ID NO: 531161 - RNA, 23 nt, Human
agguuacaguuguuaaguugcaa

SEQ ID NO: 531162 - RNA, 22 nt, Human
gucccacaccuugaggggucuu

SEQ ID NO: 531163 - RNA, 22 nt, Human
gacagguguguguauauuaggg

SEQ ID NO: 531164 - RNA, 22 nt, Human
agcuggagaucaugcugauacu

SEQ ID NO: 531165 - RNA, 22 nt, Human
uauuuuacagacuacuuuagau

SEQ ID NO: 531166 - RNA, 22 nt, Human
gggcugccugagcaucuccucc

SEQ ID NO: 531167 - RNA, 21 nt, Human
uuauaggcugggguuugcuuu

SEQ ID NO: 531168 - RNA, 22 nt, Human
uaccuugggcuauuaucuuuga

SEQ ID NO: 531169 - RNA, 22 nt, Human
ccaaggagcaaguuuacaccug

SEQ ID NO: 531170 - RNA, 22 nt, Human
aucaggaugacaacugcugggu

SEQ ID NO: 531171 - RNA, 22 nt, Human
uuuaacagaugcuaugucuacc

SEQ ID NO: 531172 - RNA, 22 nt, Human
aaguggagcuauaggcucagau

SEQ ID NO: 531173 - RNA, 22 nt, Human
guucuucaaagugacaacuaaa

SEQ ID NO: 531174 - RNA, 22 nt, Human
ccugcagguaaggcuaacugcc

SEQ ID NO: 531175 - RNA, 22 nt, Human
ugaguccacuuuaaaaugucag

SEQ ID NO: 531176 - RNA, 22 nt, Human
gcugaauagaagucuucaaagg

SEQ ID NO: 531177 - RNA, 19 nt, Human
uuuaaagugacugguauuu

SEQ ID NO: 531178 - RNA, 22 nt, Human
ggaaaggagauauuggagagug

SEQ ID NO: 531179 - RNA, 22 nt, Human
cagaagcaaguagugauucuuu

SEQ ID NO: 531180 - RNA, 22 nt, Human
agagaucaguuaaaaucuuuuu

SEQ ID NO: 531181 - RNA, 22 nt, Human
uccuuugguuguagacaggaau

SEQ ID NO: 531182 - RNA, 22 nt, Human
caaaguauauuucauagucuca

SEQ ID NO: 531183 - RNA, 22 nt, Human
acaggcugacuuccugccaugu

SEQ ID NO: 531184 - RNA, 22 nt, Human
cucuggaaaaccacuagcagga

SEQ ID NO: 531185 - RNA, 22 nt, Human
agucaauuaucucuaggucauc

SEQ ID NO: 531186 - RNA, 22 nt, Human
agugaaauugcuguaagaggaa

SEQ ID NO: 531187 - RNA, 22 nt, Human
uucauacauuuuuacuaacagc

SEQ ID NO: 531188 - RNA, 22 nt, Human
agagugaucagauaucaggugu

SEQ ID NO: 531189 - RNA, 22 nt, Human
acuagcagggauguuauuacuu

SEQ ID NO: 531190 - RNA, 22 nt, Human
gggagagguuacccgagcaacu

SEQ ID NO: 531191 - RNA, 22 nt, Human
gucccagggagguucagggcuu

SEQ ID NO: 531192 - RNA, 22 nt, Human
acagcuggaggccccauugucc

SEQ ID NO: 531193 - RNA, 22 nt, Human
ucucucugccaacucacagcca

SEQ ID NO: 531194 - RNA, 22 nt, Human
aggcccugcuuuccagagcuca

SEQ ID NO: 531195 - RNA, 22 nt, Human
guuacauuuauuagaggucucu

SEQ ID NO: 531196 - RNA, 20 nt, Human
uguuucuuuuaaugagcggc

SEQ ID NO: 531197 - RNA, 22 nt, Human
uggaagaggcccaugacugccu

SEQ ID NO: 531198 - RNA, 22 nt, Human
aggcagcauucaggggugauga

SEQ ID NO: 531199 - RNA, 22 nt, Human
uuguuacagcagugauuucaga

SEQ ID NO: 531200 - RNA, 22 nt, Human
gcugcuucucugauggagucca

SEQ ID NO: 531201 - RNA, 22 nt, Human
aagguacaguuuuaagaauaag

SEQ ID NO: 531202 - RNA, 22 nt, Human
ugagguaggugguaagagauac

SEQ ID NO: 531203 - RNA, 22 nt, Human
ggagagcugguagcuggcucca

SEQ ID NO: 531204 - RNA, 22 nt, Human
cuccagggcagcauggcagugg

SEQ ID NO: 531205 - RNA, 22 nt, Human
uggcucagugacauuccuccca

SEQ ID NO: 531206 - RNA, 20 nt, Human
uguugauuggugucaucuca

SEQ ID NO: 531207 - RNA, 22 nt, Human
gacauacaagcugguaccuccu

SEQ ID NO: 531208 - RNA, 22 nt, Human
cuccagggagcuuggaaagacc

SEQ ID NO: 531209 - RNA, 22 nt, Human
cugcugugugcuuacuuggguu

SEQ ID NO: 531210 - RNA, 22 nt, Human
ucuucauuuuacaggcagaccu

SEQ ID NO: 531211 - RNA, 22 nt, Human
aagucaaaccuugcucacagga

SEQ ID NO: 531212 - RNA, 22 nt, Human
uuguugcauuucaaguaugaga

SEQ ID NO: 531213 - RNA, 22 nt, Human
cuggccuggggccucagcugcu

SEQ ID NO: 531214 - RNA, 22 nt, Human
ugggcugcagggguugagagcu

SEQ ID NO: 531215 - RNA, 18 nt, Human
cccagccucuccuuucua

SEQ ID NO: 531216 - RNA, 22 nt, Human
aggagguggcugaacuugaggg

SEQ ID NO: 531217 - RNA, 22 nt, Human
agauuucagguuggggcagaag

SEQ ID NO: 531218 - RNA, 22 nt, Human
aaucaagaguuguguaauauuu

SEQ ID NO: 531219 - RNA, 20 nt, Human
uuguuuuaaauccuggauga

SEQ ID NO: 531220 - RNA, 23 nt, Human
acagacaacacugaugagagaaa

SEQ ID NO: 531221 - RNA, 22 nt, Human
uuuaucuuuaggacuuugcaga

SEQ ID NO: 531222 - RNA, 22 nt, Human
uuuucagagagcuuuuaugucc

SEQ ID NO: 531223 - RNA, 22 nt, Human
ucaaagucucugcuucuguaac

SEQ ID NO: 531224 - RNA, 22 nt, Human
cagcauuuagaauuugaagugu

SEQ ID NO: 531225 - RNA, 22 nt, Human
gguucuuuguauauaucacuuu

SEQ ID NO: 531226 - RNA, 19 nt, Human
gcuuuucuccuucaagcca

SEQ ID NO: 531227 - RNA, 22 nt, Human
aaacaguuaauugcuuucaguu

SEQ ID NO: 531228 - RNA, 22 nt, Human
ugaugcaauguuuacaucuuga

SEQ ID NO: 531229 - RNA, 22 nt, Human
cuggccagaguuggagggugug

SEQ ID NO: 531230 - RNA, 21 nt, Human
augacagaugcugcagaucgu

SEQ ID NO: 531231 - RNA, 19 nt, Human
ugagugggccccugcagac

SEQ ID NO: 531232 - RNA, 22 nt, Human
uuaauacagaagcaagacacug

SEQ ID NO: 531233 - RNA, 22 nt, Human
gcuuuuaauuaguugcuuccau

SEQ ID NO: 531234 - RNA, 22 nt, Human
ugucaugccaccguuucccaga

SEQ ID NO: 531235 - RNA, 22 nt, Human
uucauuacugcgguagucacac

SEQ ID NO: 531236 - RNA, 18 nt, Human
ucagcuggggcugcagcc

SEQ ID NO: 531237 - RNA, 21 nt, Human
agcagaacagucgagcacugc

SEQ ID NO: 531238 - RNA, 22 nt, Human
agaagccaauucugugugaguc

SEQ ID NO: 531239 - RNA, 22 nt, Human
guuauguacuuuuuaaaucuug

SEQ ID NO: 531240 - RNA, 22 nt, Human
ucuucauguugcuuauucuggg

SEQ ID NO: 531241 - RNA, 22 nt, Human
aggaagccuggaguccugccca

SEQ ID NO: 531242 - RNA, 20 nt, Human
cucaguguggccugaguguu

SEQ ID NO: 531243 - RNA, 23 nt, Human
aaacaaugucaucaggacuuggu

SEQ ID NO: 531244 - RNA, 22 nt, Human
uucagagacagcaaccaggaca

SEQ ID NO: 531245 - RNA, 22 nt, Human
agugcagagaccuggucaggca

SEQ ID NO: 531246 - RNA, 22 nt, Human
cacuggcaaagccuguuccuua

SEQ ID NO: 531247 - RNA, 22 nt, Human
auuucucagugaaaugacaggc

SEQ ID NO: 531248 - RNA, 22 nt, Human
uauuaggguaaauuugacaugc

SEQ ID NO: 531249 - RNA, 22 nt, Human
uuggaaaacuuacacagagcug

SEQ ID NO: 531250 - RNA, 22 nt, Human
cauucugugauucuaaaucccu

SEQ ID NO: 531251 - RNA, 22 nt, Human
uguaagaaaaguaaauagugac

SEQ ID NO: 531252 - RNA, 22 nt, Human
agauuucccaaauacuuguuau

SEQ ID NO: 531253 - RNA, 22 nt, Human
ugccugggggacuaaggccaaa

SEQ ID NO: 531254 - RNA, 22 nt, Human
aguccuucaagaaaucuggaaa

SEQ ID NO: 531255 - RNA, 22 nt, Human
uacagcuugauguuuguguguu

SEQ ID NO: 531256 - RNA, 22 nt, Human
gcuucuggaggagcugggcuga

SEQ ID NO: 531257 - RNA, 22 nt, Human
cuuccucaugugcaaugcaagc

SEQ ID NO: 531258 - RNA, 22 nt, Human
auguagcagauauuugugcaca

SEQ ID NO: 531259 - RNA, 22 nt, Human
uugugaguagugccgcaauaaa

SEQ ID NO: 531260 - RNA, 22 nt, Human
acagggcagagaggcaggcuug

SEQ ID NO: 531261 - RNA, 22 nt, Human
acagauuuaggacuguagcgau

SEQ ID NO: 531262 - RNA, 23 nt, Human
aaucaccagcagccaaugugcag

SEQ ID NO: 531263 - RNA, 22 nt, Human
gccaggaauggagagguggccu

SEQ ID NO: 531264 - RNA, 22 nt, Human
uaaaugugcacagguuagaagg

SEQ ID NO: 531265 - RNA, 22 nt, Human
gaacaucaugaagaaaacauau

SEQ ID NO: 531266 - RNA, 22 nt, Human
acauagcacgucucaauuugga

SEQ ID NO: 531267 - RNA, 22 nt, Human
uccuccagugucuggggccuug

SEQ ID NO: 531268 - RNA, 22 nt, Human
acuuuggaucugauguaaucag

SEQ ID NO: 531269 - RNA, 22 nt, Human
uuuauuauccaguguugucaug

SEQ ID NO: 531270 - RNA, 22 nt, Human
aaauauguaagauuagcacuag

SEQ ID NO: 531271 - RNA, 22 nt, Human
aagugguagagagagcauaagc

SEQ ID NO: 531272 - RNA, 22 nt, Human
auucucuguuuccaagaugaaa

SEQ ID NO: 531273 - RNA, 22 nt, Human
aauguuguuuuucugcaugucu

SEQ ID NO: 531274 - RNA, 22 nt, Human
agaggcuggauugagcauagac

SEQ ID NO: 531275 - RNA, 23 nt, Human
uuuauauuccuaaugucuugagc

SEQ ID NO: 531276 - RNA, 19 nt, Human
uagcugccuguuaccucca

SEQ ID NO: 531277 - RNA, 22 nt, Human
gcuggccucuacaggccggcca

SEQ ID NO: 531278 - RNA, 22 nt, Human
uguauguaaaguuuguaauaga

SEQ ID NO: 531279 - RNA, 23 nt, Human
gcccugcccuuagcacacucaca

SEQ ID NO: 531280 - RNA, 22 nt, Human
ugccaggcaacugcccagccau

SEQ ID NO: 531281 - RNA, 22 nt, Human
gaggcucugugaugugccaggc

SEQ ID NO: 531282 - RNA, 22 nt, Human
guaucuuucccaccaaucacaa

SEQ ID NO: 531283 - RNA, 22 nt, Human
uccuugaaugaagagaggugac

SEQ ID NO: 531284 - RNA, 22 nt, Human
gaggaacuggagcuuucauuuu

SEQ ID NO: 531285 - RNA, 22 nt, Human
cagccuguagaauacaguaaau

SEQ ID NO: 531286 - RNA, 22 nt, Human
gucccugcccuccugggacuca

SEQ ID NO: 531287 - RNA, 22 nt, Human
gaaaugugugacaaguuucaau

SEQ ID NO: 531288 - RNA, 22 nt, Human
gagagugaaggcuucccagcaa

SEQ ID NO: 531289 - RNA, 22 nt, Human
gcugucaguuuuacccacagac

SEQ ID NO: 531290 - RNA, 22 nt, Human
auaaauucucugauguauagua

SEQ ID NO: 531291 - RNA, 22 nt, Human
gauuuugucaaauuccaaaugu

SEQ ID NO: 531292 - RNA, 22 nt, Human
ccucugcaccauagccuucagc

SEQ ID NO: 531293 - RNA, 22 nt, Human
gacauguacuucaauuucucuu

SEQ ID NO: 531294 - RNA, 22 nt, Human
cugugcccuggccaggccucuc

SEQ ID NO: 531295 - RNA, 22 nt, Human
cuuuacauccuguuucccguuu

SEQ ID NO: 531296 - RNA, 22 nt, Human
cuucagggaggagcauggguuc

SEQ ID NO: 531297 - RNA, 22 nt, Human
cucuggaggccguuggcccuua

SEQ ID NO: 531298 - RNA, 22 nt, Human
aagugaugcuacgacuuugaca

SEQ ID NO: 531299 - RNA, 22 nt, Human
uccaggcaugucccaagccgga

SEQ ID NO: 531300 - RNA, 22 nt, Human
gaggucaggggagaggcugaug

SEQ ID NO: 531301 - RNA, 21 nt, Human
ucagcagcaucugccuagagu

SEQ ID NO: 531302 - RNA, 22 nt, Human
ugacauaaaucuaaaggaaagg

SEQ ID NO: 531303 - RNA, 22 nt, Human
cuuugacauccuuguuccucag

SEQ ID NO: 531304 - RNA, 22 nt, Human
gggcucucgauuagacccuggg

SEQ ID NO: 531305 - RNA, 22 nt, Human
cugggcucagaaccuuguuaag

SEQ ID NO: 531306 - RNA, 19 nt, Human
cagcugcaccgugaccauc

SEQ ID NO: 531307 - RNA, 22 nt, Human
ccaggccuuccaguacgcagaa

SEQ ID NO: 531308 - RNA, 22 nt, Human
aauucacaaaaccagauugcuu

SEQ ID NO: 531309 - RNA, 22 nt, Human
cacauaaauggugccauguuuu

SEQ ID NO: 531310 - RNA, 20 nt, Human
gcugcucuccacggucugca

SEQ ID NO: 531311 - RNA, 22 nt, Human
cacauuuaauugguuuagggug

SEQ ID NO: 531312 - RNA, 22 nt, Human
cagggcagggagcuuagaauga

SEQ ID NO: 531313 - RNA, 22 nt, Human
cacccacauuccaucacucugc

SEQ ID NO: 531314 - RNA, 22 nt, Human
aagaugauguuguguuuucacu

SEQ ID NO: 531315 - RNA, 20 nt, Human
cagcugccuggcucugggau

SEQ ID NO: 531316 - RNA, 22 nt, Human
gacagggaggagcagagcuucu

SEQ ID NO: 531317 - RNA, 22 nt, Human
gucaguaggaaccuagggucaa

SEQ ID NO: 531318 - RNA, 22 nt, Human
aacaguaauuugcgguuuuugc

SEQ ID NO: 531319 - RNA, 22 nt, Human
caagagcuuuagaaaugcucau

SEQ ID NO: 531320 - RNA, 22 nt, Human
cuuuggaagugaccacaauccu

SEQ ID NO: 531321 - RNA, 19 nt, Human
uuccugugcugcugugucc

SEQ ID NO: 531322 - RNA, 22 nt, Human
uucuuauuuuccugaggaagaa

SEQ ID NO: 531323 - RNA, 22 nt, Human
acauuucagaaucacacagcuu

SEQ ID NO: 531324 - RNA, 22 nt, Human
gcuggagugcugaggugcagug

SEQ ID NO: 531325 - RNA, 22 nt, Human
caaaguaaacuaccacuguuuc

SEQ ID NO: 531326 - RNA, 22 nt, Human
aagggcugaaugaaggguugaa

SEQ ID NO: 531327 - RNA, 22 nt, Human
ggaagaggcugguagugcccgu

SEQ ID NO: 531328 - RNA, 22 nt, Human
ugcccaaggucaccuaguuagu

SEQ ID NO: 531329 - RNA, 22 nt, Human
guaaacauuuucaucugugccc

SEQ ID NO: 531330 - RNA, 22 nt, Human
aggcaggugagucaaaacagac

SEQ ID NO: 531331 - RNA, 22 nt, Human
ugcauauuauguguaucugucu

SEQ ID NO: 531332 - RNA, 22 nt, Human
ucccugcccucagugcacccgg

SEQ ID NO: 531333 - RNA, 21 nt, Human
aagccucaagcagaagacaga

SEQ ID NO: 531334 - RNA, 22 nt, Human
uuguccuuggaugaagcuggga

SEQ ID NO: 531335 - RNA, 22 nt, Human
cucagacuugcuuuuuauggaa

SEQ ID NO: 531336 - RNA, 22 nt, Human
aaaguugugaaaccgaacaugu

SEQ ID NO: 531337 - RNA, 22 nt, Human
guucacagaaauuguguaccuc

SEQ ID NO: 531338 - RNA, 22 nt, Human
uuuguucauuuugagcucauca

SEQ ID NO: 531339 - RNA, 22 nt, Human
agcagcucugagaggccagcac

SEQ ID NO: 531340 - RNA, 22 nt, Human
caggaagcuggucagauccugu

SEQ ID NO: 531341 - RNA, 22 nt, Human
auaguggugagcugcauuuaug

SEQ ID NO: 531342 - RNA, 22 nt, Human
uuauuuguaucaaggacgguug

SEQ ID NO: 531343 - RNA, 22 nt, Human
ucagagcuaaggggagagcaaa

SEQ ID NO: 531344 - RNA, 22 nt, Human
ggcagcuggguuggccagaaac

SEQ ID NO: 531345 - RNA, 22 nt, Human
aagcuguuguucauccugaauu

SEQ ID NO: 531346 - RNA, 22 nt, Human
uaaaauguuugcaagagaccag

SEQ ID NO: 531347 - RNA, 22 nt, Human
cuguacauauacauuuuuuucc

SEQ ID NO: 531348 - RNA, 22 nt, Human
gcccagaaaugaacuugcugug

SEQ ID NO: 531349 - RNA, 22 nt, Human
uuccagcaggcagacaggagau

SEQ ID NO: 531350 - RNA, 22 nt, Human
ggaaccaggaguuacacgaguu

SEQ ID NO: 531351 - RNA, 22 nt, Human
ggugcugguucaggguggcugu

SEQ ID NO: 531352 - RNA, 19 nt, Human
agggcugcucuggccuggg

SEQ ID NO: 531353 - RNA, 22 nt, Human
ugugaaauguguguauaauuaa

SEQ ID NO: 531354 - RNA, 22 nt, Human
aaguaaauaucuguagucuuua

SEQ ID NO: 531355 - RNA, 22 nt, Human
uguccuuuaugaaaugguguuu

SEQ ID NO: 531356 - RNA, 22 nt, Human
augcuuuauuauuuugcaggga

SEQ ID NO: 531357 - RNA, 22 nt, Human
ucuggguuauuaugauggcuac

SEQ ID NO: 531358 - RNA, 22 nt, Human
ugaacgcagguccacauggcuc

SEQ ID NO: 531359 - RNA, 22 nt, Human
ucuaggagcaugaagggaaggc

SEQ ID NO: 531360 - RNA, 22 nt, Human
uggcagugggaagcuggaaguc

SEQ ID NO: 531361 - RNA, 22 nt, Human
ggcaguggaggacccugugucu

SEQ ID NO: 531362 - RNA, 23 nt, Human
uacugccuuguucauguguauuu

SEQ ID NO: 531363 - RNA, 22 nt, Human
uggccucugugggagcugagca

SEQ ID NO: 531364 - RNA, 22 nt, Human
ggaggagguggguuaaguugua

SEQ ID NO: 531365 - RNA, 22 nt, Human
gcagggccuuggucaucuuuuu

SEQ ID NO: 531366 - RNA, 22 nt, Human
uguaaauuggaaaucaaucaag

SEQ ID NO: 531367 - RNA, 18 nt, Human
acaguaaagaaaggaauu

SEQ ID NO: 531368 - RNA, 22 nt, Human
uucauucagguguauuuauggg

SEQ ID NO: 531369 - RNA, 22 nt, Human
auagaaaacagauguccuuaaa

SEQ ID NO: 531370 - RNA, 22 nt, Human
cccagcuccuuacagggccgaa

SEQ ID NO: 531371 - RNA, 22 nt, Human
uagcuuuaggcacguuugaauu

SEQ ID NO: 531372 - RNA, 22 nt, Human
ucuggcagcaagucuguuucuc

SEQ ID NO: 531373 - RNA, 23 nt, Human
caggcucccggaccaggauccgc

SEQ ID NO: 531374 - RNA, 22 nt, Human
gccaggugggagacagacagca

SEQ ID NO: 531375 - RNA, 22 nt, Human
gcauacaaagguuuacaacuga

SEQ ID NO: 531376 - RNA, 22 nt, Human
aucuggcuuuuaccccacggcc

SEQ ID NO: 531377 - RNA, 22 nt, Human
acagccuguuugaucuggugcu

SEQ ID NO: 531378 - RNA, 22 nt, Human
uaccauuucauucuuuccucau

SEQ ID NO: 531379 - RNA, 22 nt, Human
aucuggcucccuuggaauccgu

SEQ ID NO: 531380 - RNA, 22 nt, Human
acauucaugucccacuucuagc

SEQ ID NO: 531381 - RNA, 22 nt, Human
aagggcagccugacucacgguc

SEQ ID NO: 531382 - RNA, 22 nt, Human
uaagaacagugucugucucaca

SEQ ID NO: 531383 - RNA, 21 nt, Human
augggcagaggcagagaggcu

SEQ ID NO: 531384 - RNA, 22 nt, Human
gauuuucauuauagcuaguuuc

SEQ ID NO: 531385 - RNA, 22 nt, Human
ccaggagccacucaggcccaca

SEQ ID NO: 531386 - RNA, 22 nt, Human
ucuucaaauacagucauauuga

SEQ ID NO: 531387 - RNA, 22 nt, Human
aagggugggcccuggcagccau

SEQ ID NO: 531388 - RNA, 22 nt, Human
uaaaacuagugguugggacuaa

SEQ ID NO: 531389 - RNA, 22 nt, Human
ggcucuuuaacuugucuaaauu

SEQ ID NO: 531390 - RNA, 22 nt, Human
cagggcagggccacacccccug

SEQ ID NO: 531391 - RNA, 22 nt, Human
uaauacugaaaggaguaucagc

SEQ ID NO: 531392 - RNA, 22 nt, Human
gagaggcuuaagggcugugaag

SEQ ID NO: 531393 - RNA, 22 nt, Human
uuuguaagugguagaucuaaga

SEQ ID NO: 531394 - RNA, 20 nt, Human
ggcacuggaagcacacagga

SEQ ID NO: 531395 - RNA, 22 nt, Human
ucaacauuuaugaagcuguggc

SEQ ID NO: 531396 - RNA, 19 nt, Human
agauggggaagagugugag

SEQ ID NO: 531397 - RNA, 19 nt, Human
gccacuccugaugcugccc

SEQ ID NO: 531398 - RNA, 22 nt, Human
uuccaacuuugucauauauuau

SEQ ID NO: 531399 - RNA, 22 nt, Human
uuucuucucacccaggacagag

SEQ ID NO: 531400 - RNA, 22 nt, Human
ccugugcucccauagcuucugu

SEQ ID NO: 531401 - RNA, 22 nt, Human
cacauugaaaugacccaauaau

SEQ ID NO: 531402 - RNA, 22 nt, Human
aagauuucucuccuggaaagca

SEQ ID NO: 531403 - RNA, 22 nt, Human
uucagaaaaaacuucaauaagu

SEQ ID NO: 531404 - RNA, 22 nt, Human
guaaaguucuauuugaauuuag

SEQ ID NO: 531405 - RNA, 22 nt, Human
uucacauuaucaggauuguuuc

SEQ ID NO: 531406 - RNA, 22 nt, Human
aauaauuacccaucuuuuugua

SEQ ID NO: 531407 - RNA, 23 nt, Human
ccugcagcugcuggggcuccacc

SEQ ID NO: 531408 - RNA, 22 nt, Human
caguagcaggcacucagcacgu

SEQ ID NO: 531409 - RNA, 22 nt, Human
gcaggcucccuugcagagcagg

SEQ ID NO: 531410 - RNA, 22 nt, Human
ccagguggaaggucugugcucu

SEQ ID NO: 531411 - RNA, 22 nt, Human
cucagcuagggaagguuagcuu

SEQ ID NO: 531412 - RNA, 22 nt, Human
agggaaggaaaagcugucgcuu

SEQ ID NO: 531413 - RNA, 22 nt, Human
ucucugguggcuccaucaguag

SEQ ID NO: 531414 - RNA, 21 nt, Human
caggaaaagcggaagucuagc

SEQ ID NO: 531415 - RNA, 22 nt, Human
guucacagauccuugaagccag

SEQ ID NO: 531416 - RNA, 22 nt, Human
acccagagccagggucaggagc

SEQ ID NO: 531417 - RNA, 21 nt, Human
ugcaggcuacuucugacucua

SEQ ID NO: 531418 - RNA, 22 nt, Human
uuacauuagacccacuuucaug

SEQ ID NO: 531419 - RNA, 23 nt, Human
caacagcuguuagauaugggcuu

SEQ ID NO: 531420 - RNA, 18 nt, Human
ugcucuggucucacuugg

SEQ ID NO: 531421 - RNA, 22 nt, Human
agguggggcugggaaagauucc

SEQ ID NO: 531422 - RNA, 22 nt, Human
aaaguaaccuaguaauaguguc

SEQ ID NO: 531423 - RNA, 19 nt, Human
ccauuucauauguauugug

SEQ ID NO: 531424 - RNA, 22 nt, Human
uggaaaacauugagauaccaag

SEQ ID NO: 531425 - RNA, 22 nt, Human
ugucauuuccugaaugcugagu

SEQ ID NO: 531426 - RNA, 22 nt, Human
cacagcagaaaguguaggagga

SEQ ID NO: 531427 - RNA, 22 nt, Human
aaggagagagcuuugcuggaac

SEQ ID NO: 531428 - RNA, 23 nt, Human
aguuuguaaagaaauauuugcac

SEQ ID NO: 531429 - RNA, 22 nt, Human
agccagcagggcuuagaggaca

SEQ ID NO: 531430 - RNA, 22 nt, Human
uguacagaaggcacuaagguca

SEQ ID NO: 531431 - RNA, 19 nt, Human
uggcagaggcaguuuguac

SEQ ID NO: 531432 - RNA, 22 nt, Human
ucagggcagaauccaaagaauu

SEQ ID NO: 531433 - RNA, 22 nt, Human
auucaagaggaacaaugaagau

SEQ ID NO: 531434 - RNA, 22 nt, Human
uuuucuucuaccugcuguccaa

SEQ ID NO: 531435 - RNA, 22 nt, Human
uuuuuggcagcucagaaacuuc

SEQ ID NO: 531436 - RNA, 22 nt, Human
aacuacauuguccuuucugaag

SEQ ID NO: 531437 - RNA, 22 nt, Human
ugaggcagcuuuuucugugugu

SEQ ID NO: 531438 - RNA, 22 nt, Human
ugugaagaguagacauguggug

SEQ ID NO: 531439 - RNA, 22 nt, Human
gcugaaggucucuggagagguc

SEQ ID NO: 531440 - RNA, 22 nt, Human
uucaauucaauucuaaauauau

SEQ ID NO: 531441 - RNA, 22 nt, Human
aggcagucuaucucuggagccu

SEQ ID NO: 531442 - RNA, 22 nt, Human
gugccuggagcuaauguguaua

SEQ ID NO: 531443 - RNA, 22 nt, Human
aacaugaaaguugcuaagugca

SEQ ID NO: 531444 - RNA, 22 nt, Human
cauguccauuuaugcacagaaa

SEQ ID NO: 531445 - RNA, 22 nt, Human
ucuggggagugccuaaguggaa

SEQ ID NO: 531446 - RNA, 22 nt, Human
aagaugcagcuuccacuuuugc

SEQ ID NO: 531447 - RNA, 22 nt, Human
aacaauuacuaccaaggccugu

SEQ ID NO: 531448 - RNA, 22 nt, Human
ggagugugggauggagcucagg

SEQ ID NO: 531449 - RNA, 22 nt, Human
acauuucucccugcaugccugc

SEQ ID NO: 531450 - RNA, 19 nt, Human
cauaauacaguggaucuga

SEQ ID NO: 531451 - RNA, 22 nt, Human
ggggcggggcucugagaagcau

SEQ ID NO: 531452 - RNA, 22 nt, Human
aggaaauugucuuuuuccuugu

SEQ ID NO: 531453 - RNA, 22 nt, Human
cuggcaggaaguuagaugguaa

SEQ ID NO: 531454 - RNA, 22 nt, Human
cugccagcucucuggaggcucu

SEQ ID NO: 531455 - RNA, 19 nt, Human
augauacaggugaaaauug

SEQ ID NO: 531456 - RNA, 22 nt, Human
cucagggcaguauggcugagag

SEQ ID NO: 531457 - RNA, 22 nt, Human
cgccugggaguccacaccugcu

SEQ ID NO: 531458 - RNA, 22 nt, Human
cagcuggacuuuugauagaagu

SEQ ID NO: 531459 - RNA, 21 nt, Human
gcagaugggagucaucaggcu

SEQ ID NO: 531460 - RNA, 22 nt, Human
gcccuuccuuagacagcaggau

SEQ ID NO: 531461 - RNA, 22 nt, Human
aagcacuuagaagagugccugc

SEQ ID NO: 531462 - RNA, 22 nt, Human
agcccuccucacaucagcgucc

SEQ ID NO: 531463 - RNA, 22 nt, Human
gcauggugacaucaugugaaug

SEQ ID NO: 531464 - RNA, 22 nt, Human
auuugcuuucagguauaaaagg

SEQ ID NO: 531465 - RNA, 19 nt, Human
gcauaaaaugucaaugugu

SEQ ID NO: 531466 - RNA, 22 nt, Human
gaagccagcaguggagaaagga

SEQ ID NO: 531467 - RNA, 22 nt, Human
gccaggagagcuccuucagguu

SEQ ID NO: 531468 - RNA, 22 nt, Human
ggagggguggaaggagugccug

SEQ ID NO: 531469 - RNA, 22 nt, Human
ugauucaagcuacuguuacugg

SEQ ID NO: 531470 - RNA, 22 nt, Human
accgaaggaaacuggaaccguu

SEQ ID NO: 531471 - RNA, 22 nt, Human
ggccacagcaaugcugugaugu

SEQ ID NO: 531472 - RNA, 22 nt, Human
uagaacugcucucauacuugcu

SEQ ID NO: 531473 - RNA, 23 nt, Human
aacagcaggaugauagaggaggu

SEQ ID NO: 531474 - RNA, 22 nt, Human
gggugggguguaucggauccua

SEQ ID NO: 531475 - RNA, 22 nt, Human
uguuucauuaguacugacaaua

SEQ ID NO: 531476 - RNA, 22 nt, Human
cuggauuuuaucauuguaguuu

SEQ ID NO: 531477 - RNA, 22 nt, Human
cucugaagggagggccaagccc

SEQ ID NO: 531478 - RNA, 22 nt, Human
uaauguagggguguaacacaca

SEQ ID NO: 531479 - RNA, 22 nt, Human
uugcucaggcuuagagcuacua

SEQ ID NO: 531480 - RNA, 21 nt, Human
aagagcugucaggaaggcugc

SEQ ID NO: 531481 - RNA, 22 nt, Human
agccagagcugaugucauucuc

SEQ ID NO: 531482 - RNA, 22 nt, Human
aaacacaucauucaugucguca

SEQ ID NO: 531483 - RNA, 22 nt, Human
uuuauuauguacaggcacuaua

SEQ ID NO: 531484 - RNA, 22 nt, Human
ucagaaaagaccacauuauucu

SEQ ID NO: 531485 - RNA, 22 nt, Human
acauuucucuuagaguuggacu

SEQ ID NO: 531486 - RNA, 19 nt, Human
agacacacuugauaugugu

SEQ ID NO: 531487 - RNA, 21 nt, Human
uuuagggaggauauuuaacuu

SEQ ID NO: 531488 - RNA, 22 nt, Human
ggaugcugacuuuggagcaugg

SEQ ID NO: 531489 - RNA, 22 nt, Human
gugugggcugcagaggcacagc

SEQ ID NO: 531490 - RNA, 22 nt, Human
agggaccugcucacugccuggc

SEQ ID NO: 531491 - RNA, 22 nt, Human
ccaggcagggcucaaggaaccu

SEQ ID NO: 531492 - RNA, 22 nt, Human
aucagaauaauuagauuucaga

SEQ ID NO: 531493 - RNA, 22 nt, Human
gacauguaaauggcaauuaugg

SEQ ID NO: 531494 - RNA, 22 nt, Human
caucagagugguggccuggugu

SEQ ID NO: 531495 - RNA, 23 nt, Human
aaguaacagggauaauagcaguu

SEQ ID NO: 531496 - RNA, 22 nt, Human
uugcauaaaugcuuaaaauuug

SEQ ID NO: 531497 - RNA, 22 nt, Human
cuuucuaaauguuccuugauua

SEQ ID NO: 531498 - RNA, 22 nt, Human
ugcugaaucaaaacaaagguuu

SEQ ID NO: 531499 - RNA, 22 nt, Human
cagaaauucccauuucagauuc

SEQ ID NO: 531500 - RNA, 22 nt, Human
uagaaagacuguccagauuuca

SEQ ID NO: 531501 - RNA, 20 nt, Human
gcucugaccauaucaagaca

SEQ ID NO: 531502 - RNA, 22 nt, Human
uucaaacucuugcucugcuagu

SEQ ID NO: 531503 - RNA, 19 nt, Human
uuuugaaguaugagacagg

SEQ ID NO: 531504 - RNA, 22 nt, Human
ucccagaguucaaugggaaggu

SEQ ID NO: 531505 - RNA, 22 nt, Human
augaaaauacugugguugauag

SEQ ID NO: 531506 - RNA, 22 nt, Human
ggcucuguuuacuuucagaggc

SEQ ID NO: 531507 - RNA, 22 nt, Human
gccaggcagcugggagggugcc

SEQ ID NO: 531508 - RNA, 22 nt, Human
agugauuaauuguaaaaauucu

SEQ ID NO: 531509 - RNA, 22 nt, Human
cagagcugagaauguugaugcu

SEQ ID NO: 531510 - RNA, 22 nt, Human
gggacagcuguagugcuuggcu

SEQ ID NO: 531511 - RNA, 22 nt, Human
agaggcugaaugaugucaucau

SEQ ID NO: 531512 - RNA, 22 nt, Human
ugccaaauugcccuauaaauga

SEQ ID NO: 531513 - RNA, 21 nt, Human
acacagaggcaucaucacuuu

SEQ ID NO: 531514 - RNA, 22 nt, Human
ccucccucuuucagucccacag

SEQ ID NO: 531515 - RNA, 22 nt, Human
cagcuugcuaauuuugacuuca

SEQ ID NO: 531516 - RNA, 22 nt, Human
gaagccaagugcaaaugccuua

SEQ ID NO: 531517 - RNA, 22 nt, Human
auacuaaaguauagaacuuagu

SEQ ID NO: 531518 - RNA, 23 nt, Human
agaggcaggaguggcuugcccgg

SEQ ID NO: 531519 - RNA, 22 nt, Human
caggcuggagugcaguugugca

SEQ ID NO: 531520 - RNA, 22 nt, Human
ucuguggcacgauugcacugca

SEQ ID NO: 531521 - RNA, 22 nt, Human
ugaaaugaaacagaacauauca

SEQ ID NO: 531522 - RNA, 22 nt, Human
acccuggggguggccagugcca

SEQ ID NO: 531523 - RNA, 22 nt, Human
ggaccagagaagugagcaccug

SEQ ID NO: 531524 - RNA, 22 nt, Human
uuuguaagagcauauguaaagg

SEQ ID NO: 531525 - RNA, 19 nt, Human
gagcccucuccauggccac

SEQ ID NO: 531526 - RNA, 22 nt, Human
aauguguguucggggcccagag

SEQ ID NO: 531527 - RNA, 22 nt, Human
cugguccuugcuacccagcaag

SEQ ID NO: 531528 - RNA, 20 nt, Human
uccucagaagacauuugggg

SEQ ID NO: 531529 - RNA, 22 nt, Human
acugggccaggggcuuuggagc

SEQ ID NO: 531530 - RNA, 18 nt, Human
gccagagggaagcaggug

SEQ ID NO: 531531 - RNA, 22 nt, Human
agaacaauugccccaaagcuug

SEQ ID NO: 531532 - RNA, 22 nt, Human
cggggccuaccgcugcguggcc

SEQ ID NO: 531533 - RNA, 20 nt, Human
agggucagagagcgugagug

SEQ ID NO: 531534 - RNA, 22 nt, Human
auuuuagauuuaagaauaaggu

SEQ ID NO: 531535 - RNA, 22 nt, Human
gcgcaagccacacagccugggg

SEQ ID NO: 531536 - RNA, 22 nt, Human
uucaaagagaaauuguauuuuc

SEQ ID NO: 531537 - RNA, 22 nt, Human
ccuuuugcucucccauccagaa

SEQ ID NO: 531538 - RNA, 22 nt, Human
aagcagagaccggcuaauggag

SEQ ID NO: 531539 - RNA, 22 nt, Human
aauucacaggaucacaggagag

SEQ ID NO: 531540 - RNA, 22 nt, Human
uuucuuauacuauauugucauc

SEQ ID NO: 531541 - RNA, 22 nt, Human
uuuacauuucccucugucaguu

SEQ ID NO: 531542 - RNA, 22 nt, Human
gccuggccgcuccgagcuccgc

SEQ ID NO: 531543 - RNA, 22 nt, Human
ucucuuucuauugcaccaugcu

SEQ ID NO: 531544 - RNA, 22 nt, Human
gcuauuuauuaaaauggugaag

SEQ ID NO: 531545 - RNA, 22 nt, Human
cugagcuuggccaggaaugaau

SEQ ID NO: 531546 - RNA, 22 nt, Human
cggcuggguucggcugcaggcc

SEQ ID NO: 531547 - RNA, 22 nt, Human
uuuauguaguuacggacuauca

SEQ ID NO: 531548 - RNA, 22 nt, Human
uuccggaagguucucuagaauu

SEQ ID NO: 531549 - RNA, 22 nt, Human
ugcauugcaguuaacucaguau

SEQ ID NO: 531550 - RNA, 22 nt, Human
uuccagaacucaagaaaugccc

SEQ ID NO: 531551 - RNA, 22 nt, Human
gcuggggagggcgucaaggcca

SEQ ID NO: 531552 - RNA, 22 nt, Human
uucuggcuuugaccaaguucaa

SEQ ID NO: 531553 - RNA, 22 nt, Human
gcauuuuaaugagguuuaugag

SEQ ID NO: 531554 - RNA, 22 nt, Human
gauuuucugagccuucaaauuu

SEQ ID NO: 531555 - RNA, 22 nt, Human
cgggcaguguggcuccagaguc

SEQ ID NO: 531556 - RNA, 22 nt, Human
aaagucaucuaggagcagauuu

SEQ ID NO: 531557 - RNA, 19 nt, Human
uggaggagaggaaaaguca

SEQ ID NO: 531558 - RNA, 22 nt, Human
uagauggcguccauggccgcag

SEQ ID NO: 531559 - RNA, 21 nt, Human
auugaaagucaacaaucaguu

SEQ ID NO: 531560 - RNA, 22 nt, Human
ucacauuuucuuaggaaacuua

SEQ ID NO: 531561 - RNA, 22 nt, Human
gguuugcauucugaaaggcuca

SEQ ID NO: 531562 - RNA, 22 nt, Human
gagaaacuaacaucugaaggug

SEQ ID NO: 531563 - RNA, 22 nt, Human
uggcuaacaguuaagauuucau

SEQ ID NO: 531564 - RNA, 22 nt, Human
acugccuuauaugcugugugug

SEQ ID NO: 531565 - RNA, 22 nt, Human
cugugccuuuguagcugugccu

SEQ ID NO: 531566 - RNA, 22 nt, Human
uccucugccaaagggaguugcc

SEQ ID NO: 531567 - RNA, 22 nt, Human
cagcaucccucaggggccucug

SEQ ID NO: 531568 - RNA, 22 nt, Human
cuuuagauguugcuuuaacuau

SEQ ID NO: 531569 - RNA, 22 nt, Human
cuucagggugacgcaggcugca

SEQ ID NO: 531570 - RNA, 20 nt, Human
caguagcaauaauuagaagc

SEQ ID NO: 531571 - RNA, 21 nt, Human
ccagcuuucccaagucccuuu

SEQ ID NO: 531572 - RNA, 22 nt, Human
acauugaagggaaugcaaagau

SEQ ID NO: 531573 - RNA, 22 nt, Human
gaagggugcauggagggaaguc

SEQ ID NO: 531574 - RNA, 22 nt, Human
cacagauuucuggucuucaccc

SEQ ID NO: 531575 - RNA, 22 nt, Human
uaccacagacagauuucaguaa

SEQ ID NO: 531576 - RNA, 22 nt, Human
uuccaauugugagauuuuuuaa

SEQ ID NO: 531577 - RNA, 22 nt, Human
ucacuucacacccacuaucaug

SEQ ID NO: 531578 - RNA, 22 nt, Human
ugccuuuuaccuuguaauucug

SEQ ID NO: 531579 - RNA, 22 nt, Human
cugccucugguuuuggucccug

SEQ ID NO: 531580 - RNA, 22 nt, Human
aaacagcagcuguuuaauuugc

SEQ ID NO: 531581 - RNA, 17 nt, Human
ucuguucaagugagagg

SEQ ID NO: 531582 - RNA, 22 nt, Human
uugaggcugcacaguacaggcu

SEQ ID NO: 531583 - RNA, 22 nt, Human
acugugugcccugacgccaggg

SEQ ID NO: 531584 - RNA, 22 nt, Human
aggcagcagucaugaggaaaga

SEQ ID NO: 531585 - RNA, 22 nt, Human
cuuggcagcuuuuggaggagcc

SEQ ID NO: 531586 - RNA, 22 nt, Human
aaucaccaucucucuugucccc

SEQ ID NO: 531587 - RNA, 22 nt, Human
aguguuucucagaagggccuau

SEQ ID NO: 531588 - RNA, 22 nt, Human
ugagaagcugcugacuuagccu

SEQ ID NO: 531589 - RNA, 22 nt, Human
uuauauguuucuguuuggaggc

SEQ ID NO: 531590 - RNA, 22 nt, Human
ccuggauagcuacuggccaggc

SEQ ID NO: 531591 - RNA, 22 nt, Human
cuccucccugcgauugcucugc

SEQ ID NO: 531592 - RNA, 22 nt, Human
agaaagggucacugaaagagga

SEQ ID NO: 531593 - RNA, 22 nt, Human
gccugccuuuguaugacccuga

SEQ ID NO: 531594 - RNA, 22 nt, Human
agacucaagacugcagaagacg

SEQ ID NO: 531595 - RNA, 22 nt, Human
uccagagccuauauguucaacu

SEQ ID NO: 531596 - RNA, 22 nt, Human
cuccagggagcugcgggagcca

SEQ ID NO: 531597 - RNA, 22 nt, Human
aagcagaaagaacaacugagug

SEQ ID NO: 531598 - RNA, 22 nt, Human
gccaccuguuucgcuugcccag

SEQ ID NO: 531599 - RNA, 22 nt, Human
uuucuguagggauuucacaguu

SEQ ID NO: 531600 - RNA, 22 nt, Human
uauuugaagggagaaagugcca

SEQ ID NO: 531601 - RNA, 21 nt, Human
gcaugccugcaucuuaguguu

SEQ ID NO: 531602 - RNA, 22 nt, Human
aagagccagcuagugaagaggc

SEQ ID NO: 531603 - RNA, 22 nt, Human
guuuuacacaccuaugaaagac

SEQ ID NO: 531604 - RNA, 22 nt, Human
ggcucacgcaauuaucccggcc

SEQ ID NO: 531605 - RNA, 22 nt, Human
uauguacacacacaugcaugua

SEQ ID NO: 531606 - RNA, 19 nt, Human
gggcuucugggaucaagag

SEQ ID NO: 531607 - RNA, 21 nt, Human
agccuggcccagggggaggcu

SEQ ID NO: 531608 - RNA, 22 nt, Human
aagccaggguuuguggaucuau

SEQ ID NO: 531609 - RNA, 22 nt, Human
uucaggaugaaagugugcaaca

SEQ ID NO: 531610 - RNA, 22 nt, Human
uggcucagccuggcccuuucau

SEQ ID NO: 531611 - RNA, 22 nt, Human
guacccagaggcaugaucccag

SEQ ID NO: 531612 - RNA, 22 nt, Human
ccugcuggcagaggggguuacu

SEQ ID NO: 531613 - RNA, 22 nt, Human
cacaggagaaaggggaagcucg

SEQ ID NO: 531614 - RNA, 22 nt, Human
ugcugcugaaaaggugugcuua

SEQ ID NO: 531615 - RNA, 22 nt, Human
ggaggccaaggcgggcggauca

SEQ ID NO: 531616 - RNA, 22 nt, Human
uaauguuuccagucuaugaugg

SEQ ID NO: 531617 - RNA, 22 nt, Human
ucuuagcauuucauaacaacug

SEQ ID NO: 531618 - RNA, 17 nt, Human
ugcauguccuuuguucc

SEQ ID NO: 531619 - RNA, 22 nt, Human
cugggaggugaacagaaaaacu

SEQ ID NO: 531620 - RNA, 22 nt, Human
cugcuucuaagaaccugcagcu

SEQ ID NO: 531621 - RNA, 22 nt, Human
cuucaauugccaccagcuagca

SEQ ID NO: 531622 - RNA, 22 nt, Human
caaaaaacaccugugugaguau

SEQ ID NO: 531623 - RNA, 22 nt, Human
aucuuucagagcuccaucaggg

SEQ ID NO: 531624 - RNA, 22 nt, Human
cuggcucaggaaaguugcugcu

SEQ ID NO: 531625 - RNA, 22 nt, Human
augaaauauuucagagcagagu

SEQ ID NO: 531626 - RNA, 22 nt, Human
aauaagaugugcuugaguuugg

SEQ ID NO: 531627 - RNA, 22 nt, Human
uuaaagcauccugucagucugu

SEQ ID NO: 531628 - RNA, 22 nt, Human
guggggcggcagaugcucccug

SEQ ID NO: 531629 - RNA, 22 nt, Human
aaggucauuuuuuccucuguug

SEQ ID NO: 531630 - RNA, 22 nt, Human
ugccucagaguugucccuacca

SEQ ID NO: 531631 - RNA, 19 nt, Human
cucuccagcuccaguagcu

SEQ ID NO: 531632 - RNA, 22 nt, Human
ccuccuagaggaaccccagggc

SEQ ID NO: 531633 - RNA, 22 nt, Human
caguguuuguauagaauaugca

SEQ ID NO: 531634 - RNA, 22 nt, Human
ucagaggaauuugcuuuucaug

SEQ ID NO: 531635 - RNA, 22 nt, Human
cuggaugcuuccucucugcuag

SEQ ID NO: 531636 - RNA, 22 nt, Human
agugucugugcuuugcagcaaa

SEQ ID NO: 531637 - RNA, 22 nt, Human
gcucaggauuucauccaugugu

SEQ ID NO: 531638 - RNA, 21 nt, Human
uuagaaagcucacuacaguua

SEQ ID NO: 531639 - RNA, 22 nt, Human
ugggccaggucugugucagcug

SEQ ID NO: 531640 - RNA, 22 nt, Human
cuggcuggcaaguagaacacaa

SEQ ID NO: 531641 - RNA, 22 nt, Human
ccuggcucucugcagauccugg

SEQ ID NO: 531642 - RNA, 22 nt, Human
acaggcucucagccaguuggca

SEQ ID NO: 531643 - RNA, 22 nt, Human
ucauugcacuccagccugggca

SEQ ID NO: 531644 - RNA, 22 nt, Human
cagagucauaucagagaauaug

SEQ ID NO: 531645 - RNA, 22 nt, Human
ugugccugucacccucagagag

SEQ ID NO: 531646 - RNA, 22 nt, Human
uaaugccuagauuauucuguuu

SEQ ID NO: 531647 - RNA, 22 nt, Human
aaguaccaaguuuguuugacgc

SEQ ID NO: 531648 - RNA, 22 nt, Human
gaagacauguuuuuaauaugua

SEQ ID NO: 531649 - RNA, 21 nt, Human
aacaaagggaugcucaucuuu

SEQ ID NO: 531650 - RNA, 22 nt, Human
ggcuccacugcugaccacucca

SEQ ID NO: 531651 - RNA, 22 nt, Human
ccagcuccucuucccaguguca

SEQ ID NO: 531652 - RNA, 22 nt, Human
cacaguacgcacccgauacaug

SEQ ID NO: 531653 - RNA, 19 nt, Human
ccagguggaacugagguag

SEQ ID NO: 531654 - RNA, 16 nt, Human
aaggcugauuuucccu

SEQ ID NO: 531655 - RNA, 22 nt, Human
ggcagcaguuacaaaugugcag

SEQ ID NO: 531656 - RNA, 22 nt, Human
uguguacagcaugguccagcag

SEQ ID NO: 531657 - RNA, 22 nt, Human
ucccagaggacuguuggugcua

SEQ ID NO: 531658 - RNA, 22 nt, Human
ugagcccagucugucugacaug

SEQ ID NO: 531659 - RNA, 22 nt, Human
gcaggguauaauacuuagguga

SEQ ID NO: 531660 - RNA, 22 nt, Human
auaugaaaagaagucaccauug

SEQ ID NO: 531661 - RNA, 22 nt, Human
uaaagacauaggaucagggaga

SEQ ID NO: 531662 - RNA, 22 nt, Human
ucuccugcucccaacugcugca

SEQ ID NO: 531663 - RNA, 22 nt, Human
cauguacaguuuuucuguccug

SEQ ID NO: 531664 - RNA, 22 nt, Human
agugauggggcccugcacugau

SEQ ID NO: 531665 - RNA, 22 nt, Human
guugggcuuauguaauuuuaag

SEQ ID NO: 531666 - RNA, 22 nt, Human
ggucccagcuggucacugucag

SEQ ID NO: 531667 - RNA, 22 nt, Human
acugcaggagacacagcugcug

SEQ ID NO: 531668 - RNA, 22 nt, Human
gagacaaaaguuggagugcaag

SEQ ID NO: 531669 - RNA, 23 nt, Human
ggccuguguuuugucugaaguac

SEQ ID NO: 531670 - RNA, 23 nt, Human
acagaucaucucgaaacaacuau

SEQ ID NO: 531671 - RNA, 22 nt, Human
uuaagucaauaucaaucucagc

SEQ ID NO: 531672 - RNA, 14 nt, Human
gcagguggaucacu

SEQ ID NO: 531673 - RNA, 23 nt, Human
aagaauaaaugacauuaaaggug

SEQ ID NO: 531674 - RNA, 22 nt, Human
agccacaggaaacagagacagc

SEQ ID NO: 531675 - RNA, 22 nt, Human
aguguccaacucagcuugucaa

SEQ ID NO: 531676 - RNA, 22 nt, Human
auugaaaggcaaaguaggaagc

SEQ ID NO: 531677 - RNA, 18 nt, Human
agacccucuaagggcagu

SEQ ID NO: 531678 - RNA, 22 nt, Human
ggagccuugggcgcucucccau

SEQ ID NO: 531679 - RNA, 22 nt, Human
uaggcugaaaggagaggugaag

SEQ ID NO: 531680 - RNA, 22 nt, Human
gcaggagucacugacuuggucc

SEQ ID NO: 531681 - RNA, 22 nt, Human
accaggcacucuuguggcagug

SEQ ID NO: 531682 - RNA, 22 nt, Human
uuacuacaagauucuguuuuau

SEQ ID NO: 531683 - RNA, 22 nt, Human
uugauguacagaauuguucaca

SEQ ID NO: 531684 - RNA, 22 nt, Human
cagccuguggcagaggucuaau

SEQ ID NO: 531685 - RNA, 22 nt, Human
gaggacagcuuagggcuuccug

SEQ ID NO: 531686 - RNA, 22 nt, Human
agagcagucaggcuaggacacu

SEQ ID NO: 531687 - RNA, 22 nt, Human
uaaaugugcacuuuacuuuuca

SEQ ID NO: 531688 - RNA, 22 nt, Human
uguggcucucaugcacucccag

SEQ ID NO: 531689 - RNA, 22 nt, Human
cagguccugcagggagaguaaa

SEQ ID NO: 531690 - RNA, 22 nt, Human
ccagggaaugugggaugacucu

SEQ ID NO: 531691 - RNA, 22 nt, Human
uaugaagaaguucugugaaaug

SEQ ID NO: 531692 - RNA, 22 nt, Human
uuuugcuuuuguaacacagugu

SEQ ID NO: 531693 - RNA, 22 nt, Human
uggcaguggugucugcacaggc

SEQ ID NO: 531694 - RNA, 22 nt, Human
ucugaagggcugaguggaggag

SEQ ID NO: 531695 - RNA, 21 nt, Human
ucccagagugcuugggacugc

SEQ ID NO: 531696 - RNA, 22 nt, Human
acuuucucccacccacccgucu

SEQ ID NO: 531697 - RNA, 22 nt, Human
gcacaacaccaagggagguauc

SEQ ID NO: 531698 - RNA, 22 nt, Human
uggcucugggcaccguguccac

SEQ ID NO: 531699 - RNA, 19 nt, Human
ggcugucucggcccagcca

SEQ ID NO: 531700 - RNA, 22 nt, Human
uaucacacucggaaaucuagga

SEQ ID NO: 531701 - RNA, 22 nt, Human
gccucugcaucaucacuccagc

SEQ ID NO: 531702 - RNA, 22 nt, Human
gugcaugugucuuuauaguagc

SEQ ID NO: 531703 - RNA, 21 nt, Human
cugggcuuucucucaaagaca

SEQ ID NO: 531704 - RNA, 22 nt, Human
aggucauuacaauuaucauuuu

SEQ ID NO: 531705 - RNA, 22 nt, Human
aaagaagggacagacugccucu

SEQ ID NO: 531706 - RNA, 22 nt, Human
ucagagugugagacauauugga

SEQ ID NO: 531707 - RNA, 22 nt, Human
ucacauuucucagcacugauga

SEQ ID NO: 531708 - RNA, 22 nt, Human
gcuucaugccaggagguuuaag

SEQ ID NO: 531709 - RNA, 22 nt, Human
uuaagauuuucuucaguauuau

SEQ ID NO: 531710 - RNA, 22 nt, Human
ucacaguagacuucucaagagc

SEQ ID NO: 531711 - RNA, 22 nt, Human
agaaaacacugcccccucucuc

SEQ ID NO: 531712 - RNA, 22 nt, Human
gcaggcucuucuuucugcccag

SEQ ID NO: 531713 - RNA, 22 nt, Human
ucaaaacacuauuaccuuuaau

SEQ ID NO: 531714 - RNA, 22 nt, Human
cugggaggcggagguuguagug

SEQ ID NO: 531715 - RNA, 22 nt, Human
agcuugucuuucaaaggaguuu

SEQ ID NO: 531716 - RNA, 20 nt, Human
ggcucugcuugugagcagcc

SEQ ID NO: 531717 - RNA, 22 nt, Human
uucuaagaaugcuuugcaaaau

SEQ ID NO: 531718 - RNA, 22 nt, Human
gaagagcugacagugucauccu

SEQ ID NO: 531719 - RNA, 22 nt, Human
aggccaggaccauuagcccaga

SEQ ID NO: 531720 - RNA, 22 nt, Human
accaugggucagccaccucagc

SEQ ID NO: 531721 - RNA, 22 nt, Human
agggagcuuccgaacuacagcu

SEQ ID NO: 531722 - RNA, 22 nt, Human
caguguguggauccucccagga

SEQ ID NO: 531723 - RNA, 21 nt, Human
auuucauggugcuuuuaagaa

SEQ ID NO: 531724 - RNA, 23 nt, Human
ucucaggacacacaugucuauca

SEQ ID NO: 531725 - RNA, 22 nt, Human
ugccugugaucagcugaguuca

SEQ ID NO: 531726 - RNA, 22 nt, Human
gcugcugggaaugaacaguguu

SEQ ID NO: 531727 - RNA, 22 nt, Human
uuacagauucaagcucuuugaa

SEQ ID NO: 531728 - RNA, 22 nt, Human
caucacuguccucagcauucca

SEQ ID NO: 531729 - RNA, 22 nt, Human
uggcucugaccagguagaggag

SEQ ID NO: 531730 - RNA, 22 nt, Human
gccagcccagcuccaggggaaa

SEQ ID NO: 531731 - RNA, 22 nt, Human
cugccuggaaugccagcuucuc

SEQ ID NO: 531732 - RNA, 23 nt, Human
ucuuuucaaugguucuuuaugug

SEQ ID NO: 531733 - RNA, 22 nt, Human
uacacauuucucuuagagacac

SEQ ID NO: 531734 - RNA, 22 nt, Human
ugaguagagaauucagcuaagg

SEQ ID NO: 531735 - RNA, 22 nt, Human
agcuuuaucuucaccugggaau

SEQ ID NO: 531736 - RNA, 22 nt, Human
uuccaggagacuuccagaaaua

SEQ ID NO: 531737 - RNA, 22 nt, Human
agcaggaaggucugugugaguc

SEQ ID NO: 531738 - RNA, 22 nt, Human
uuuauccagaaucaggauuuuu

SEQ ID NO: 531739 - RNA, 22 nt, Human
agagacaaugccaaugcacacg

SEQ ID NO: 531740 - RNA, 22 nt, Human
caucaaagcuuuuuucuguguu

SEQ ID NO: 531741 - RNA, 23 nt, Human
acuuuauugaccccaggucaguu

SEQ ID NO: 531742 - RNA, 22 nt, Human
auuuucuauguuguaauuguua

SEQ ID NO: 531743 - RNA, 22 nt, Human
uccaggcauuccagccauucca

SEQ ID NO: 531744 - RNA, 19 nt, Human
gcuggggaauggauauuga

SEQ ID NO: 531745 - RNA, 22 nt, Human
acagagucuuacguggugauaa

SEQ ID NO: 531746 - RNA, 22 nt, Human
ggcaggugaguucauuaucugc

SEQ ID NO: 531747 - RNA, 22 nt, Human
aaaugguaaugucuuucuguuu

SEQ ID NO: 531748 - RNA, 22 nt, Human
cuauugaauuaacuauuaaagu

SEQ ID NO: 531749 - RNA, 22 nt, Human
gaguuauuucagaaggaaagau

SEQ ID NO: 531750 - RNA, 17 nt, Human
auucucaguguacagug

SEQ ID NO: 531751 - RNA, 22 nt, Human
ugaaaucuucacuaagucucuu

SEQ ID NO: 531752 - RNA, 22 nt, Human
cccaggacucggcacucuccuu

SEQ ID NO: 531753 - RNA, 22 nt, Human
gccuucaggaggguuccagaca

SEQ ID NO: 531754 - RNA, 22 nt, Human
aagcuguucucuaaguuucaug

SEQ ID NO: 531755 - RNA, 22 nt, Human
cgugagcaaaauggacacuccc

SEQ ID NO: 531756 - RNA, 22 nt, Human
cccagcucuuccugggagcuaa

SEQ ID NO: 531757 - RNA, 22 nt, Human
aaguguuuacuuaaagucaugg

SEQ ID NO: 531758 - RNA, 22 nt, Human
guuugaaaguggcaaguccuug

SEQ ID NO: 531759 - RNA, 22 nt, Human
uggcccugcagaacuagccugg

SEQ ID NO: 531760 - RNA, 22 nt, Human
ccugucuggccaccagggcgau

SEQ ID NO: 531761 - RNA, 22 nt, Human
aaagaggaaccaagagcacgug

SEQ ID NO: 531762 - RNA, 22 nt, Human
uugguucaggacauauuugagu

SEQ ID NO: 531763 - RNA, 20 nt, Human
ccucaagcagacugacagcu

SEQ ID NO: 531764 - RNA, 22 nt, Human
ugacauuuaucuucuacaauga

SEQ ID NO: 531765 - RNA, 22 nt, Human
guggauggacaugggcaagagg

SEQ ID NO: 531766 - RNA, 22 nt, Human
ucugcagcuucuugccagagag

SEQ ID NO: 531767 - RNA, 22 nt, Human
aucagaagcuuguagucucucu

SEQ ID NO: 531768 - RNA, 22 nt, Human
cggagaggaccugcaacucgcu

SEQ ID NO: 531769 - RNA, 22 nt, Human
ccugccagucacuaugucaccu

SEQ ID NO: 531770 - RNA, 22 nt, Human
uuacuugauuguggagucugag

SEQ ID NO: 531771 - RNA, 22 nt, Human
guuucuaauuggaacuuugagg

SEQ ID NO: 531772 - RNA, 22 nt, Human
ccagcucuggcuucuugcuggg

SEQ ID NO: 531773 - RNA, 22 nt, Human
gcuggggaccagcugucucuga

SEQ ID NO: 531774 - RNA, 22 nt, Human
ggccauggaccccgagcugacc

SEQ ID NO: 531775 - RNA, 22 nt, Human
uuuccaaagcugaguugagcaa

SEQ ID NO: 531776 - RNA, 22 nt, Human
ugagcuggucuugaguguagcu

SEQ ID NO: 531777 - RNA, 22 nt, Human
gucuaaaccucaaaucaguguc

SEQ ID NO: 531778 - RNA, 22 nt, Human
ugaaugaaugaauuaauagagu

SEQ ID NO: 531779 - RNA, 22 nt, Human
uaacaaagguugccaaacuaag

SEQ ID NO: 531780 - RNA, 22 nt, Human
agagccugcagcugugaagaaa

SEQ ID NO: 531781 - RNA, 22 nt, Human
aguggcagagugcacucaggca

SEQ ID NO: 531782 - RNA, 22 nt, Human
gcugucaggccaugugggccuu

SEQ ID NO: 531783 - RNA, 22 nt, Human
cccagggaagggcuaccugagg

SEQ ID NO: 531784 - RNA, 20 nt, Human
cccuuuaagcuuuaguaugc

SEQ ID NO: 531785 - RNA, 23 nt, Human
ugucaucuccagacucccagugc

SEQ ID NO: 531786 - RNA, 22 nt, Human
acauucuagaagucuuugcaau

SEQ ID NO: 531787 - RNA, 22 nt, Human
ucccagggacaccaagcuguuu

SEQ ID NO: 531788 - RNA, 22 nt, Human
ugugggaggaauuagaauggga

SEQ ID NO: 531789 - RNA, 22 nt, Human
uuugaacagggaauguuccaca

SEQ ID NO: 531790 - RNA, 22 nt, Human
gagcucugacugcugggugaca

SEQ ID NO: 531791 - RNA, 22 nt, Human
uuguuuucacagcuuugcccgg

SEQ ID NO: 531792 - RNA, 22 nt, Human
auccuugagaaaauaaaugacc

SEQ ID NO: 531793 - RNA, 22 nt, Human
gccaggcugcuggcugcugucc

SEQ ID NO: 531794 - RNA, 22 nt, Human
agcaggaaggcuuuggggguuc

SEQ ID NO: 531795 - RNA, 22 nt, Human
caugccucugcagcuguuuauu

SEQ ID NO: 531796 - RNA, 22 nt, Human
gggcccugcguccggaagucug

SEQ ID NO: 531797 - RNA, 22 nt, Human
acuugcauuauauuuaucacaa

SEQ ID NO: 531798 - RNA, 19 nt, Human
agugguagaugagcaggag

SEQ ID NO: 531799 - RNA, 22 nt, Human
agcaggcuccaggcuggccauc

SEQ ID NO: 531800 - RNA, 22 nt, Human
ccagcugggauuaagggaaaau

SEQ ID NO: 531801 - RNA, 22 nt, Human
aagcagaauuucccacuaguug

SEQ ID NO: 531802 - RNA, 22 nt, Human
uggccucugcaauggauucacc

SEQ ID NO: 531803 - RNA, 19 nt, Human
uggggccuccugucccugg

SEQ ID NO: 531804 - RNA, 22 nt, Human
aauuuguuacacagcaauauaa

SEQ ID NO: 531805 - RNA, 22 nt, Human
gccuuccuuacaccugcucagc

SEQ ID NO: 531806 - RNA, 22 nt, Human
ugcagagggacagccacagcuc

SEQ ID NO: 531807 - RNA, 19 nt, Human
ccagcccacagugacuuuc

SEQ ID NO: 531808 - RNA, 22 nt, Human
ggccagaggccauccuccugcu

SEQ ID NO: 531809 - RNA, 22 nt, Human
ccaggagucuggaugagguguc

SEQ ID NO: 531810 - RNA, 19 nt, Human
aggcagucauuggaauaua

SEQ ID NO: 531811 - RNA, 22 nt, Human
cccugugccuaguuggccuaaa

SEQ ID NO: 531812 - RNA, 22 nt, Human
ucauuucagaugcauuuagaau

SEQ ID NO: 531813 - RNA, 22 nt, Human
uuugcauuugcaaauaaugaaa

SEQ ID NO: 531814 - RNA, 22 nt, Human
cauuuaaucuggcucaugagca

SEQ ID NO: 531815 - RNA, 18 nt, Human
gcccugguggagcuggug

SEQ ID NO: 531816 - RNA, 22 nt, Human
aaaaguuuaagacucauucuag

SEQ ID NO: 531817 - RNA, 22 nt, Human
cuggagugaagucuggcagcuu

SEQ ID NO: 531818 - RNA, 21 nt, Human
ggccuuggcgggggccgaauu

SEQ ID NO: 531819 - RNA, 22 nt, Human
aagagcuggaagugaagauaac

SEQ ID NO: 531820 - RNA, 23 nt, Human
uguggccugcagcucugguuugg

SEQ ID NO: 531821 - RNA, 23 nt, Human
agaauuucuaacucuagcucugu

SEQ ID NO: 531822 - RNA, 22 nt, Human
auugacaauguauuuguaucug

SEQ ID NO: 531823 - RNA, 22 nt, Human
ggcauguuucaucacaucaaga

SEQ ID NO: 531824 - RNA, 22 nt, Human
cucacugugaccucagcagaca

SEQ ID NO: 531825 - RNA, 22 nt, Human
agccucuggcccuagacugcuu

SEQ ID NO: 531826 - RNA, 22 nt, Human
agggcaguucaacuucauagug

SEQ ID NO: 531827 - RNA, 22 nt, Human
gccuggagaauuaaaaggaagg

SEQ ID NO: 531828 - RNA, 22 nt, Human
uaacaguaccauuaacuuugau

SEQ ID NO: 531829 - RNA, 22 nt, Human
gaggaagcagggcuuggcugag

SEQ ID NO: 531830 - RNA, 22 nt, Human
uuuccaaagguggcaggaacaa

SEQ ID NO: 531831 - RNA, 18 nt, Human
gucaccuggaucagauua

SEQ ID NO: 531832 - RNA, 22 nt, Human
aguacauauaguaauuuagcca

SEQ ID NO: 531833 - RNA, 22 nt, Human
uuugcauuaguuuagauuucaa

SEQ ID NO: 531834 - RNA, 22 nt, Human
agggcagcacagcugugcuccu

SEQ ID NO: 531835 - RNA, 22 nt, Human
agcaggagagcagugcgugguc

SEQ ID NO: 531836 - RNA, 22 nt, Human
agaauaauacugaaaugcugaa

SEQ ID NO: 531837 - RNA, 22 nt, Human
uguguacucaauugagccauuu

SEQ ID NO: 531838 - RNA, 22 nt, Human
gauggggaugagaagugagcag

SEQ ID NO: 531839 - RNA, 22 nt, Human
ugaaagcagcaccaauaccauu

SEQ ID NO: 531840 - RNA, 22 nt, Human
ugagaacaaaguugaaaguuug

SEQ ID NO: 531841 - RNA, 22 nt, Human
augauuuuuucuaacacagucg

SEQ ID NO: 531842 - RNA, 22 nt, Human
caaaugauacuguuuuuagucu

SEQ ID NO: 531843 - RNA, 22 nt, Human
aggggagcuugaggcauggccu

SEQ ID NO: 531844 - RNA, 22 nt, Human
ucuucacaggagccugccugcc

SEQ ID NO: 531845 - RNA, 22 nt, Human
cugccucucaggucccugagau

SEQ ID NO: 531846 - RNA, 23 nt, Human
agucacaucuuagcagccagguc

SEQ ID NO: 531847 - RNA, 22 nt, Human
caaaauuagaaaugcagcuguu

SEQ ID NO: 531848 - RNA, 22 nt, Human
gugggcagugguuugcgcgguc

SEQ ID NO: 531849 - RNA, 22 nt, Human
caccugcugagcugcugggggu

SEQ ID NO: 531850 - RNA, 22 nt, Human
gcuggcugaggucuagcucuuu

SEQ ID NO: 531851 - RNA, 22 nt, Human
uuauuuauguuaacagucgaga

SEQ ID NO: 531852 - RNA, 22 nt, Human
auguguccacaggugugagaga

SEQ ID NO: 531853 - RNA, 22 nt, Human
acaacaaaaugaggaagugguc

SEQ ID NO: 531854 - RNA, 22 nt, Human
agcaaaagauagauuaacaaga

SEQ ID NO: 531855 - RNA, 22 nt, Human
gugggagcauggucccagugcc

SEQ ID NO: 531856 - RNA, 22 nt, Human
gagcuggugaucagcuggagga

SEQ ID NO: 531857 - RNA, 22 nt, Human
uguucuggagauaagagguaga

SEQ ID NO: 531858 - RNA, 18 nt, Human
aauguuuguccucucuaa

SEQ ID NO: 531859 - RNA, 22 nt, Human
uugauacccaaguguuaugggu

SEQ ID NO: 531860 - RNA, 22 nt, Human
ccaaggagcaaggcucaacaag

SEQ ID NO: 531861 - RNA, 22 nt, Human
agguggguaucaugagagauua

SEQ ID NO: 531862 - RNA, 22 nt, Human
ucugucugagggagugacauuu

SEQ ID NO: 531863 - RNA, 22 nt, Human
uucaaaauuguucuaagcucug

SEQ ID NO: 531864 - RNA, 22 nt, Human
ucugggcagcagcagcuaguag

SEQ ID NO: 531865 - RNA, 22 nt, Human
gggcacuggaaggcucucaggc

SEQ ID NO: 531866 - RNA, 22 nt, Human
uugucuaaugagcuccacuuca

SEQ ID NO: 531867 - RNA, 22 nt, Human
gggucccaggaaggagcagugu

SEQ ID NO: 531868 - RNA, 22 nt, Human
uugaaaaccgugggaggcugaa

SEQ ID NO: 531869 - RNA, 22 nt, Human
ccagagccuaagaucugauccu

SEQ ID NO: 531870 - RNA, 22 nt, Human
ggcagccagagggcagcuggau

SEQ ID NO: 531871 - RNA, 22 nt, Human
ugcucuguaaggucagaaaagg

SEQ ID NO: 531872 - RNA, 22 nt, Human
ccagaaagguaaacacuggauu

SEQ ID NO: 531873 - RNA, 22 nt, Human
uucccacaguguugaauccucu

SEQ ID NO: 531874 - RNA, 22 nt, Human
gucccagaaacauauugcuggu

SEQ ID NO: 531875 - RNA, 22 nt, Human
uucuaagauucaugaggacagg

SEQ ID NO: 531876 - RNA, 22 nt, Human
aggaagccuggggcugcccucg

SEQ ID NO: 531877 - RNA, 22 nt, Human
uguuugugcugccuggugggca

SEQ ID NO: 531878 - RNA, 22 nt, Human
gcagugguggagcuuacauauc

SEQ ID NO: 531879 - RNA, 19 nt, Human
uauauuugagugugcaugc

SEQ ID NO: 531880 - RNA, 22 nt, Human
ugcaggcuccacguuguugucc

SEQ ID NO: 531881 - RNA, 23 nt, Human
aggagccaggugcagcccuugug

SEQ ID NO: 531882 - RNA, 22 nt, Human
gaaaauguuuguccggagcuga

SEQ ID NO: 531883 - RNA, 22 nt, Human
ucauggaaacagcaaugcuaau

SEQ ID NO: 531884 - RNA, 22 nt, Human
uccagugguuugaaaggggugu

SEQ ID NO: 531885 - RNA, 22 nt, Human
ucuaagaucuacuauacaugug

SEQ ID NO: 531886 - RNA, 22 nt, Human
cuucaaagauuauugaaaacaa

SEQ ID NO: 531887 - RNA, 22 nt, Human
uggcagcagggaggccaguguu

SEQ ID NO: 531888 - RNA, 22 nt, Human
acuuccaaauaccaucacauug

SEQ ID NO: 531889 - RNA, 22 nt, Human
acugaugucuggggcagagucu

SEQ ID NO: 531890 - RNA, 22 nt, Human
aaagaaauagauggcauuuaaa

SEQ ID NO: 531891 - RNA, 22 nt, Human
ccaggaaagaggaagaacgcau

SEQ ID NO: 531892 - RNA, 18 nt, Human
ggcucagcaggcucucuc

SEQ ID NO: 531893 - RNA, 22 nt, Human
gccaaagcagucuugccucugc

SEQ ID NO: 531894 - RNA, 22 nt, Human
cuguggcuuucucugccuccuu

SEQ ID NO: 531895 - RNA, 22 nt, Human
aaggccugcucagcugucugug

SEQ ID NO: 531896 - RNA, 22 nt, Human
ucugggcuuuugcacuggccau

SEQ ID NO: 531897 - RNA, 22 nt, Human
gaauucugguuuugaaaugaau

SEQ ID NO: 531898 - RNA, 22 nt, Human
ccuuucucuaucgacccaucgc

SEQ ID NO: 531899 - RNA, 22 nt, Human
gcugccugaaugaaccuuguuc

SEQ ID NO: 531900 - RNA, 22 nt, Human
aauaccuuuccugccauucacu

SEQ ID NO: 531901 - RNA, 22 nt, Human
uaauuauucuagucacauagca

SEQ ID NO: 531902 - RNA, 22 nt, Human
ccagagcccagggucaugcagg

SEQ ID NO: 531903 - RNA, 22 nt, Human
uuacaaagcaggucagcugaaa

SEQ ID NO: 531904 - RNA, 22 nt, Human
cccaggcagugugugcaugcgu

SEQ ID NO: 531905 - RNA, 22 nt, Human
auuuacuuugcugagauccauc

SEQ ID NO: 531906 - RNA, 22 nt, Human
gauggcaggcaggugaguagag

SEQ ID NO: 531907 - RNA, 22 nt, Human
gagcccagguucugcuuccagc

SEQ ID NO: 531908 - RNA, 22 nt, Human
uuucagagucagcuccucucua

SEQ ID NO: 531909 - RNA, 21 nt, Human
uguuccuguucucuaggaucc

SEQ ID NO: 531910 - RNA, 22 nt, Human
guggcagagguuccucagugug

SEQ ID NO: 531911 - RNA, 22 nt, Human
ucccacaccugucuauuccuag

SEQ ID NO: 531912 - RNA, 22 nt, Human
accaucaguacuggaugcugac

SEQ ID NO: 531913 - RNA, 22 nt, Human
gggaggucagggugccugcugg

SEQ ID NO: 531914 - RNA, 22 nt, Human
uugaaaguuuauggagucugca

SEQ ID NO: 531915 - RNA, 23 nt, Human
ugaguucucaucuuggcuucuau

SEQ ID NO: 531916 - RNA, 18 nt, Human
cagaggagagacauucag

SEQ ID NO: 531917 - RNA, 22 nt, Human
cuuguccuuuacuugagacuca

SEQ ID NO: 531918 - RNA, 22 nt, Human
agggccaggaacaccugaaggg

SEQ ID NO: 531919 - RNA, 22 nt, Human
cugcugugaguuuggaggucua

SEQ ID NO: 531920 - RNA, 22 nt, Human
aaguccagaacuccugugauag

SEQ ID NO: 531921 - RNA, 22 nt, Human
gccagccugugcuuggccaggc

SEQ ID NO: 531922 - RNA, 22 nt, Human
uucauuccuucccuaagcaacu

SEQ ID NO: 531923 - RNA, 22 nt, Human
auuuugcuggucugaauuacuu

SEQ ID NO: 531924 - RNA, 22 nt, Human
agugcaugccuuccuguggaug

SEQ ID NO: 531925 - RNA, 22 nt, Human
ucuggagagucacagugccaga

SEQ ID NO: 531926 - RNA, 16 nt, Human
cuacccagugagaagg

SEQ ID NO: 531927 - RNA, 22 nt, Human
aggcacugggaauaugcugagg

SEQ ID NO: 531928 - RNA, 22 nt, Human
caggcagcugggucaccguccc

SEQ ID NO: 531929 - RNA, 22 nt, Human
uccagaaaauuuuacagugccu

SEQ ID NO: 531930 - RNA, 22 nt, Human
aguguccuccucugggagccag

SEQ ID NO: 531931 - RNA, 22 nt, Human
uuugcaaaguccauugaaguua

SEQ ID NO: 531932 - RNA, 22 nt, Human
aggaaaaagaguugcugccuuc

SEQ ID NO: 531933 - RNA, 22 nt, Human
gaggcaggcagauugcuugagg

SEQ ID NO: 531934 - RNA, 22 nt, Human
uguguauuucuggaacagacua

SEQ ID NO: 531935 - RNA, 22 nt, Human
ucacgugagggaccugugucug

SEQ ID NO: 531936 - RNA, 22 nt, Human
gggaguggauuauguggaccca

SEQ ID NO: 531937 - RNA, 22 nt, Human
uacauuacaggaaagauaaaga

SEQ ID NO: 531938 - RNA, 22 nt, Human
caauagaaaacucaauacuuaa

SEQ ID NO: 531939 - RNA, 21 nt, Human
aggugcagagccagggaccag

SEQ ID NO: 531940 - RNA, 22 nt, Human
acacaaacagucuauagcacca

SEQ ID NO: 531941 - RNA, 22 nt, Human
ucuuuucugccagcugagcccu

SEQ ID NO: 531942 - RNA, 22 nt, Human
uuacaaagagugccagagugug

SEQ ID NO: 531943 - RNA, 20 nt, Human
cccagagccauagccagaca

SEQ ID NO: 531944 - RNA, 22 nt, Human
auggaaauguaacuucugauuc

SEQ ID NO: 531945 - RNA, 22 nt, Human
guacaaaaguuauugcgguuuu

SEQ ID NO: 531946 - RNA, 22 nt, Human
guucacauccuugugaggauuu

SEQ ID NO: 531947 - RNA, 22 nt, Human
cagcccuggugccaagguuccc

SEQ ID NO: 531948 - RNA, 22 nt, Human
uacagcuugacccauaaugucu

SEQ ID NO: 531949 - RNA, 22 nt, Human
cauuugaugacucaacucauaa

SEQ ID NO: 531950 - RNA, 22 nt, Human
acagcaggauuuggcgauguug

SEQ ID NO: 531951 - RNA, 22 nt, Human
gaguggguccacagaggugaca

SEQ ID NO: 531952 - RNA, 22 nt, Human
cugccugaagaauuguguugca

SEQ ID NO: 531953 - RNA, 22 nt, Human
ugcccaugcaugacagauggcu

SEQ ID NO: 531954 - RNA, 22 nt, Human
gcagggucuugagaggcagcca

SEQ ID NO: 531955 - RNA, 22 nt, Human
ucauggauggccgggaggugau

SEQ ID NO: 531956 - RNA, 22 nt, Human
ccugcagguugcagaggcggaa

SEQ ID NO: 531957 - RNA, 17 nt, Human
ugcaggcuccugucccu

SEQ ID NO: 531958 - RNA, 21 nt, Human
uauuugcugccaucuuugagg

SEQ ID NO: 531959 - RNA, 22 nt, Human
gcuaagggacccuuucuaaugu

SEQ ID NO: 531960 - RNA, 23 nt, Human
ggggaaagaccaugcuugaggac

SEQ ID NO: 531961 - RNA, 22 nt, Human
aggaagcaccggaaugaugacu

SEQ ID NO: 531962 - RNA, 21 nt, Human
gguugguguguccaguggcca

SEQ ID NO: 531963 - RNA, 22 nt, Human
ucuccaggccuuucccaucuua

SEQ ID NO: 531964 - RNA, 22 nt, Human
cagagccaggccugcccucuuu

SEQ ID NO: 531965 - RNA, 22 nt, Human
gcuucucucucagacugcaagc

SEQ ID NO: 531966 - RNA, 16 nt, Human
gaaggagauucagaaa

SEQ ID NO: 531967 - RNA, 22 nt, Human
cacagaaaaaggcuugaaaauc

SEQ ID NO: 531968 - RNA, 23 nt, Human
ucauuucauccagccuugagagu

SEQ ID NO: 531969 - RNA, 22 nt, Human
agagucccagggacacuccaga

SEQ ID NO: 531970 - RNA, 22 nt, Human
uuucuucaauugcuaacaagga

SEQ ID NO: 531971 - RNA, 22 nt, Human
ugaaagaagugucacauugcca

SEQ ID NO: 531972 - RNA, 22 nt, Human
ggagucaggagcaggcugggcu

SEQ ID NO: 531973 - RNA, 22 nt, Human
gggagggaggugaugcuuggcu

SEQ ID NO: 531974 - RNA, 23 nt, Human
uggaagcaguuccagcacaaaua

SEQ ID NO: 531975 - RNA, 22 nt, Human
gacauuuguuccucuaagugac

SEQ ID NO: 531976 - RNA, 22 nt, Human
ucucuggaauuggcugaggcaa

SEQ ID NO: 531977 - RNA, 22 nt, Human
uucuuacaaguaugacguagca

SEQ ID NO: 531978 - RNA, 22 nt, Human
cuuuuuccagcuucaggguggg

SEQ ID NO: 531979 - RNA, 22 nt, Human
uuucuucuccauggcagguccu

SEQ ID NO: 531980 - RNA, 22 nt, Human
ucaauuauuuuggcuaugcuaa

SEQ ID NO: 531981 - RNA, 18 nt, Human
acagaacucaggggcacc

SEQ ID NO: 531982 - RNA, 22 nt, Human
augaaaauguacauguguauaa

SEQ ID NO: 531983 - RNA, 21 nt, Human
cuucaauucaacacugccaug

SEQ ID NO: 531984 - RNA, 22 nt, Human
gccugagaaggacacagcaggu

SEQ ID NO: 531985 - RNA, 22 nt, Human
uuccucagccagcacuuagggg

SEQ ID NO: 531986 - RNA, 22 nt, Human
ucaucucaaaacccaaggggca

SEQ ID NO: 531987 - RNA, 22 nt, Human
auguuucagauacagaucaaau

SEQ ID NO: 531988 - RNA, 22 nt, Human
uguuccugaaugccuggcuggc

SEQ ID NO: 531989 - RNA, 22 nt, Human
aucaggauuauuaaaucuggau

SEQ ID NO: 531990 - RNA, 22 nt, Human
uaaggguucagaaugcaguggu

SEQ ID NO: 531991 - RNA, 22 nt, Human
auggaaaaggcugauuucauua

SEQ ID NO: 531992 - RNA, 22 nt, Human
aaucagaauuuguccccugagu

SEQ ID NO: 531993 - RNA, 22 nt, Human
gcagcuguggguuccaagucua

SEQ ID NO: 531994 - RNA, 22 nt, Human
ugagaaauccagaugugcaguu

SEQ ID NO: 531995 - RNA, 22 nt, Human
ugggaagggagaguguccugga

SEQ ID NO: 531996 - RNA, 22 nt, Human
cucacagaugcugugggucagg

SEQ ID NO: 531997 - RNA, 22 nt, Human
cauuuguaucauauguaucuua

SEQ ID NO: 531998 - RNA, 22 nt, Human
accagagcuuacaugcuagaaa

SEQ ID NO: 531999 - RNA, 22 nt, Human
aaacuguauauuuauggcaugu

SEQ ID NO: 532000 - RNA, 22 nt, Human
aagcaggcauuccagagacaau

SEQ ID NO: 532001 - RNA, 22 nt, Human
gcugucccgcugacuuccagcu

SEQ ID NO: 532002 - RNA, 22 nt, Human
ugcaguuuugccaggcaaugga

SEQ ID NO: 532003 - RNA, 22 nt, Human
uaccaaauguaaucauucuaau

SEQ ID NO: 532004 - RNA, 19 nt, Human
ugaggccaaggucacagau

SEQ ID NO: 532005 - RNA, 22 nt, Human
aucuuucaaucaggaaaaaucu

SEQ ID NO: 532006 - RNA, 22 nt, Human
gucacuggggccacaugcagaa

SEQ ID NO: 532007 - RNA, 22 nt, Human
ucuguccuguuuccuccugaca

SEQ ID NO: 532008 - RNA, 22 nt, Human
aguggggccgcgguccugcccu

SEQ ID NO: 532009 - RNA, 22 nt, Human
caggagccccaggcugacaaua

SEQ ID NO: 532010 - RNA, 23 nt, Human
uggagcugacagucagagggagg

SEQ ID NO: 532011 - RNA, 21 nt, Human
agaagccaugugguggagaac

SEQ ID NO: 532012 - RNA, 22 nt, Human
auguuuuaugcuucagaugagg

SEQ ID NO: 532013 - RNA, 22 nt, Human
ugucacuucaggaaugcaggga

SEQ ID NO: 532014 - RNA, 19 nt, Human
gcacacccugcaccaccau

SEQ ID NO: 532015 - RNA, 20 nt, Human
caggcagaggaugcugacca

SEQ ID NO: 532016 - RNA, 22 nt, Human
agggcugcaggcaagauauggc

SEQ ID NO: 532017 - RNA, 22 nt, Human
ggcugcagaaguacuuccggau

SEQ ID NO: 532018 - RNA, 22 nt, Human
ugccucugguuaucugguaccu

SEQ ID NO: 532019 - RNA, 22 nt, Human
uggccuccccuaacagccucuu

SEQ ID NO: 532020 - RNA, 22 nt, Human
gagaagcaaucaguggccaccc

SEQ ID NO: 532021 - RNA, 22 nt, Human
ucucccaagugaccaggaaaga

SEQ ID NO: 532022 - RNA, 22 nt, Human
uaacagaaaggcucaggugcuc

SEQ ID NO: 532023 - RNA, 22 nt, Human
cuauaagacagauacugacuuu

SEQ ID NO: 532024 - RNA, 22 nt, Human
cacagcccugcgccccaguuug

SEQ ID NO: 532025 - RNA, 22 nt, Human
gggcuggagccuggcggugguu

SEQ ID NO: 532026 - RNA, 17 nt, Human
aggugcuggagcaucag

SEQ ID NO: 532027 - RNA, 22 nt, Human
ucauaaaaauagacucuaaagu

SEQ ID NO: 532028 - RNA, 22 nt, Human
ccugagugcuuccagagucaug

SEQ ID NO: 532029 - RNA, 22 nt, Human
uaugaagaaaucuuugaaaauc

SEQ ID NO: 532030 - RNA, 22 nt, Human
cccuggaagguucucuggcuca

SEQ ID NO: 532031 - RNA, 22 nt, Human
agggcucacuacaacccuggga

SEQ ID NO: 532032 - RNA, 22 nt, Human
ugaggcuguucuaccagggcca

SEQ ID NO: 532033 - RNA, 22 nt, Human
aaagucauacauggugcuuacu

SEQ ID NO: 532034 - RNA, 22 nt, Human
cuguuaaucugcuugcaugaug

SEQ ID NO: 532035 - RNA, 22 nt, Human
ugcaguggcgccaucucagcuc

SEQ ID NO: 532036 - RNA, 22 nt, Human
uuuccuuccagguuccuaaggc

SEQ ID NO: 532037 - RNA, 22 nt, Human
agaaaaacacaaucgggccucc

SEQ ID NO: 532038 - RNA, 22 nt, Human
ucaucaguuuagaaaaaauaug

SEQ ID NO: 532039 - RNA, 22 nt, Human
acuggggagagucaugccagca

SEQ ID NO: 532040 - RNA, 22 nt, Human
agggaagugaaugacagauauc

SEQ ID NO: 532041 - RNA, 22 nt, Human
gaggggcugcccuggugucagg

SEQ ID NO: 532042 - RNA, 22 nt, Human
acugggcucccaggcuugucau

SEQ ID NO: 532043 - RNA, 22 nt, Human
ugugggcuguacugagggcagg

SEQ ID NO: 532044 - RNA, 22 nt, Human
ucauugaacgaagagcuccauu

SEQ ID NO: 532045 - RNA, 22 nt, Human
guucauauuacuuugagugcag

SEQ ID NO: 532046 - RNA, 22 nt, Human
gccauuaaugagaucaagaauc

SEQ ID NO: 532047 - RNA, 22 nt, Human
auagugguuggauaugucagag

SEQ ID NO: 532048 - RNA, 22 nt, Human
cacagggcagguacucucagag

SEQ ID NO: 532049 - RNA, 22 nt, Human
agcuuccuguugagagagggag

SEQ ID NO: 532050 - RNA, 22 nt, Human
ugugcuucagguugucgccacg

SEQ ID NO: 532051 - RNA, 22 nt, Human
cagcugccugcaacacaagcuu

SEQ ID NO: 532052 - RNA, 22 nt, Human
gcagguggggcugcuaccagaa

SEQ ID NO: 532053 - RNA, 22 nt, Human
aaucagaacuccuaccacagag

SEQ ID NO: 532054 - RNA, 22 nt, Human
gucagcuaggcagcugcgaugg

SEQ ID NO: 532055 - RNA, 22 nt, Human
ccaggaagccucagaugcugag

SEQ ID NO: 532056 - RNA, 22 nt, Human
uaaaacuagaccgugagucuaa

SEQ ID NO: 532057 - RNA, 22 nt, Human
agugcaaacuuuauugugaccu

SEQ ID NO: 532058 - RNA, 22 nt, Human
ggucucagcaguugcuuugacu

SEQ ID NO: 532059 - RNA, 22 nt, Human
aaguaacaaugcuguugaauug

SEQ ID NO: 532060 - RNA, 22 nt, Human
acacauuugcauaauaccucau

SEQ ID NO: 532061 - RNA, 22 nt, Human
guuucuuagguaaauucuuuga

SEQ ID NO: 532062 - RNA, 22 nt, Human
uuuuuuccagcuucuagaggcc

SEQ ID NO: 532063 - RNA, 19 nt, Human
agguggucuaggcuggaga

SEQ ID NO: 532064 - RNA, 22 nt, Human
cugggcaguuuauucaguucug

SEQ ID NO: 532065 - RNA, 22 nt, Human
gcucugagccgggggccugucc

SEQ ID NO: 532066 - RNA, 21 nt, Human
ccuggcuucagggugcacugg

SEQ ID NO: 532067 - RNA, 22 nt, Human
gugaagcauaugcuucucugcc

SEQ ID NO: 532068 - RNA, 22 nt, Human
aaagaugucaguuugaaauaac

SEQ ID NO: 532069 - RNA, 22 nt, Human
cuauugaaaguguacaauucaa

SEQ ID NO: 532070 - RNA, 22 nt, Human
cagagguguuggugaauggaga

SEQ ID NO: 532071 - RNA, 22 nt, Human
cauuuacauuuaagguuaauau

SEQ ID NO: 532072 - RNA, 22 nt, Human
cacagaggaaaggcaguuggua

SEQ ID NO: 532073 - RNA, 23 nt, Human
agccacuucuaucuugcuccugg

SEQ ID NO: 532074 - RNA, 22 nt, Human
uuacuugacauaaaugaguuua

SEQ ID NO: 532075 - RNA, 20 nt, Human
uucuauacauaucacugaaa

SEQ ID NO: 532076 - RNA, 22 nt, Human
uauuccagguauucuucaagag

SEQ ID NO: 532077 - RNA, 21 nt, Human
ccccugggagcccugucagua

SEQ ID NO: 532078 - RNA, 22 nt, Human
ugggccuggcccuguggaggag

SEQ ID NO: 532079 - RNA, 22 nt, Human
aacaaacaaacauuuugucauc

SEQ ID NO: 532080 - RNA, 22 nt, Human
agaguuggagaaauuaaaauuu

SEQ ID NO: 532081 - RNA, 22 nt, Human
gaagaucaagugucauucugug

SEQ ID NO: 532082 - RNA, 22 nt, Human
gaaauacaaagccagccauuuu

SEQ ID NO: 532083 - RNA, 22 nt, Human
agaaauacuuuguaaaucucac

SEQ ID NO: 532084 - RNA, 22 nt, Human
aguaaaaucuuaagcacagugg

SEQ ID NO: 532085 - RNA, 22 nt, Human
uauacaguuaaguuucuucagu

SEQ ID NO: 532086 - RNA, 22 nt, Human
ucagggaaaccuaaggaagcca

SEQ ID NO: 532087 - RNA, 22 nt, Human
gugguccuuacaggaggcuuac

SEQ ID NO: 532088 - RNA, 20 nt, Human
auaugcugagugaaggcaga

SEQ ID NO: 532089 - RNA, 22 nt, Human
gugaaaaaucaucaugacuuga

SEQ ID NO: 532090 - RNA, 22 nt, Human
gaucaccaguuguagguauuuu

SEQ ID NO: 532091 - RNA, 22 nt, Human
cugaauaucauuuacauuugga

SEQ ID NO: 532092 - RNA, 22 nt, Human
gccuuccugcagcucugagcgu

SEQ ID NO: 532093 - RNA, 22 nt, Human
cagauuuaccuaacuccaaguu

SEQ ID NO: 532094 - RNA, 22 nt, Human
aaauaacuuucuguguauaguc

SEQ ID NO: 532095 - RNA, 22 nt, Human
agcacuuuaagcaacagaucaa

SEQ ID NO: 532096 - RNA, 22 nt, Human
uuugagguuagcuagcagauca

SEQ ID NO: 532097 - RNA, 22 nt, Human
ucagccagguaauguggagaug

SEQ ID NO: 532098 - RNA, 22 nt, Human
cuggcagguggauggggacucc

SEQ ID NO: 532099 - RNA, 22 nt, Human
uuugucaauaacuaccaacagg

SEQ ID NO: 532100 - RNA, 22 nt, Human
agcaggugucggcgagggucuu

SEQ ID NO: 532101 - RNA, 22 nt, Human
uacaagauaagaauuggcaagg

SEQ ID NO: 532102 - RNA, 22 nt, Human
gcaaauacauguugagcaccua

SEQ ID NO: 532103 - RNA, 22 nt, Human
cgugggccccagccacucccuc

SEQ ID NO: 532104 - RNA, 22 nt, Human
aaggcauagucuuuaaguucug

SEQ ID NO: 532105 - RNA, 22 nt, Human
uuccucagaaaauacuguccaa

SEQ ID NO: 532106 - RNA, 20 nt, Human
ggcucuggaaucuggugggc

SEQ ID NO: 532107 - RNA, 22 nt, Human
ugaagccaucaggaagccagca

SEQ ID NO: 532108 - RNA, 22 nt, Human
cuauuauuagauaaucuacuug

SEQ ID NO: 532109 - RNA, 22 nt, Human
ggcaggagcucuccaguuugcc

SEQ ID NO: 532110 - RNA, 22 nt, Human
ugcagggcccucauuccugucc

SEQ ID NO: 532111 - RNA, 22 nt, Human
aacacuguggucuuuucaguaa

SEQ ID NO: 532112 - RNA, 22 nt, Human
uuuaaaaggcagcuucuuuugu

SEQ ID NO: 532113 - RNA, 22 nt, Human
uggcaguccucuuccucgggcg

SEQ ID NO: 532114 - RNA, 22 nt, Human
ugaaaucaguaugucuuucuca

SEQ ID NO: 532115 - RNA, 22 nt, Human
ugcuuuauguuaucagaagggu

SEQ ID NO: 532116 - RNA, 20 nt, Human
ggggcagguuuuuauggcua

SEQ ID NO: 532117 - RNA, 22 nt, Human
aucaguuuggaacauucaggcc

SEQ ID NO: 532118 - RNA, 22 nt, Human
caggggaagaugccaagggaga

SEQ ID NO: 532119 - RNA, 22 nt, Human
ugcaggugucucugucuagcgu

SEQ ID NO: 532120 - RNA, 22 nt, Human
ugagcugggcugggcugagcug

SEQ ID NO: 532121 - RNA, 22 nt, Human
uucuugauucuuccuugaagga

SEQ ID NO: 532122 - RNA, 22 nt, Human
cugggcacaggggagcagaguc

SEQ ID NO: 532123 - RNA, 22 nt, Human
ggaugcaggaguugaagaagga

SEQ ID NO: 532124 - RNA, 22 nt, Human
agagggcuuugauucucaguuc

SEQ ID NO: 532125 - RNA, 22 nt, Human
uggcucuggugcgggcuccugc

SEQ ID NO: 532126 - RNA, 22 nt, Human
ugguacauaaauggauguuuuc

SEQ ID NO: 532127 - RNA, 22 nt, Human
ucagggaacaauguuauggcuu

SEQ ID NO: 532128 - RNA, 22 nt, Human
gauuaaguaacugaacacuuug

SEQ ID NO: 532129 - RNA, 22 nt, Human
gaaggagagggucaaggauaau

SEQ ID NO: 532130 - RNA, 22 nt, Human
gcccauggacacccaagugcca

SEQ ID NO: 532131 - RNA, 22 nt, Human
caguguguggauugcccuugca

SEQ ID NO: 532132 - RNA, 22 nt, Human
ucuacaaagaagaauuaauguc

SEQ ID NO: 532133 - RNA, 22 nt, Human
gcuggcuguaucaccuggccag

SEQ ID NO: 532134 - RNA, 22 nt, Human
gcuucugggguucuggcaugcu

SEQ ID NO: 532135 - RNA, 22 nt, Human
cugugcaaaggccuuauguuuu

SEQ ID NO: 532136 - RNA, 22 nt, Human
uuuguucacaugucauguacaa

SEQ ID NO: 532137 - RNA, 22 nt, Human
ccaggcucugccaggcccuuga

SEQ ID NO: 532138 - RNA, 22 nt, Human
guuagggagucagguggcucuu

SEQ ID NO: 532139 - RNA, 22 nt, Human
gagccagguuggaggcugcagu

SEQ ID NO: 532140 - RNA, 22 nt, Human
cagcucugcugggaggaugcag

SEQ ID NO: 532141 - RNA, 22 nt, Human
ggccucagagaaggcugugcgg

SEQ ID NO: 532142 - RNA, 22 nt, Human
aggcagagcugauguucuguga

SEQ ID NO: 532143 - RNA, 23 nt, Human
agggccugauggcucccgcuggc

SEQ ID NO: 532144 - RNA, 22 nt, Human
gagagucuagugcaccuaguuu

SEQ ID NO: 532145 - RNA, 22 nt, Human
ucagggcaggacaguguaggcc

SEQ ID NO: 532146 - RNA, 20 nt, Human
uaaaugcaugaauguaaggc

SEQ ID NO: 532147 - RNA, 22 nt, Human
caggaaagccgagugccauagg

SEQ ID NO: 532148 - RNA, 22 nt, Human
ugaggcucaagaauagacagua

SEQ ID NO: 532149 - RNA, 22 nt, Human
cuuccugguuugaagcucgccg

SEQ ID NO: 532150 - RNA, 22 nt, Human
augcaaugguauauggucaccu

SEQ ID NO: 532151 - RNA, 22 nt, Human
ucauauuuauauguuggcacag

SEQ ID NO: 532152 - RNA, 21 nt, Human
ugcaggcuguuuaagaggcaa

SEQ ID NO: 532153 - RNA, 22 nt, Human
gcucuguguugucagaggcacc

SEQ ID NO: 532154 - RNA, 22 nt, Human
ucuuugaauucaaacuguucaa

SEQ ID NO: 532155 - RNA, 22 nt, Human
cuucacagucuuuauuuccucc

SEQ ID NO: 532156 - RNA, 22 nt, Human
cauuuguaucugggcugcugug

SEQ ID NO: 532157 - RNA, 22 nt, Human
aaaauucuaacaugcagccaag

SEQ ID NO: 532158 - RNA, 22 nt, Human
gcucuggacuggggccugagaa

SEQ ID NO: 532159 - RNA, 19 nt, Human
ucauaaggagagaggaaau

SEQ ID NO: 532160 - RNA, 22 nt, Human
ccaggaggcggaagguacagug

SEQ ID NO: 532161 - RNA, 22 nt, Human
ugcugggcagugugcccucgag

SEQ ID NO: 532162 - RNA, 22 nt, Human
ccagcuuuccaggguugacugg

SEQ ID NO: 532163 - RNA, 20 nt, Human
uaaagcagccguggagggua

SEQ ID NO: 532164 - RNA, 22 nt, Human
aguuuagaguucaaauuaguuc

SEQ ID NO: 532165 - RNA, 22 nt, Human
gagagugauucccucccauaga

SEQ ID NO: 532166 - RNA, 22 nt, Human
cugucaacauuggugucuguca

SEQ ID NO: 532167 - RNA, 22 nt, Human
aauaugacauagaauugagaug

SEQ ID NO: 532168 - RNA, 22 nt, Human
gaggcgagaagcuggagauggu

SEQ ID NO: 532169 - RNA, 22 nt, Human
gcaggcaguugcaguuuucuag

SEQ ID NO: 532170 - RNA, 22 nt, Human
cuguggcugcguaggucuggca

SEQ ID NO: 532171 - RNA, 22 nt, Human
cagguggggcagcugugggagc

SEQ ID NO: 532172 - RNA, 22 nt, Human
agggaccuugauggguuuggga

SEQ ID NO: 532173 - RNA, 22 nt, Human
ggcugcugugaccucaggugau

SEQ ID NO: 532174 - RNA, 22 nt, Human
uggcugaaucugcagcaggaag

SEQ ID NO: 532175 - RNA, 22 nt, Human
uugaaagaacucuucagagaua

SEQ ID NO: 532176 - RNA, 22 nt, Human
gaaugugucacccugucccaug

SEQ ID NO: 532177 - RNA, 22 nt, Human
ucaaaggcuugugguucuggga

SEQ ID NO: 532178 - RNA, 19 nt, Human
gcgaggaagucacuguggu

SEQ ID NO: 532179 - RNA, 22 nt, Human
uugcugaauugaauccuuuggu

SEQ ID NO: 532180 - RNA, 22 nt, Human
gaccauuucuaggaaucagacu

SEQ ID NO: 532181 - RNA, 22 nt, Human
ccugaggcuuaaucugucccaa

SEQ ID NO: 532182 - RNA, 22 nt, Human
gagcucagcaaaggucugugug

SEQ ID NO: 532183 - RNA, 22 nt, Human
cuggcaugccuugggugccucu

SEQ ID NO: 532184 - RNA, 22 nt, Human
aauauuuuaggcuuuccaggcu

SEQ ID NO: 532185 - RNA, 22 nt, Human
ucaaacauccccaccagggacu

SEQ ID NO: 532186 - RNA, 22 nt, Human
uuuuaaagagaugcugugcaua

SEQ ID NO: 532187 - RNA, 22 nt, Human
uugcugcuuucauuuauacagu

SEQ ID NO: 532188 - RNA, 22 nt, Human
gacaggugcuaagggaccuggc

SEQ ID NO: 532189 - RNA, 22 nt, Human
acagugauuucauccuucuggg

SEQ ID NO: 532190 - RNA, 22 nt, Human
ugacuuuuggaccucacugucc

SEQ ID NO: 532191 - RNA, 17 nt, Human
aggcauggucuggggug

SEQ ID NO: 532192 - RNA, 22 nt, Human
cugagcagcaacccagagccuc

SEQ ID NO: 532193 - RNA, 20 nt, Human
agggccugcucugugguguc

SEQ ID NO: 532194 - RNA, 22 nt, Human
uugggccaagugauucucugcc

SEQ ID NO: 532195 - RNA, 21 nt, Human
ggggcagagcuaggcccugca

SEQ ID NO: 532196 - RNA, 22 nt, Human
gacaaaggaucagagguuggga

SEQ ID NO: 532197 - RNA, 17 nt, Human
ccaggugggaggugggg

SEQ ID NO: 532198 - RNA, 22 nt, Human
gcucucuguuauuaagaucuuu

SEQ ID NO: 532199 - RNA, 22 nt, Human
uguggggccaaagcccagccac

SEQ ID NO: 532200 - RNA, 22 nt, Human
uggagcuggaauuugagcugga

SEQ ID NO: 532201 - RNA, 22 nt, Human
cuggccucaccucagacuuacu

SEQ ID NO: 532202 - RNA, 22 nt, Human
ccaguguucaucaagaaaaugu

SEQ ID NO: 532203 - RNA, 20 nt, Human
ccuggcugcauucaggacgg

SEQ ID NO: 532204 - RNA, 23 nt, Human
aaugauuucaugaugauagcagc

SEQ ID NO: 532205 - RNA, 22 nt, Human
gaggcugaacagguucucauga

SEQ ID NO: 532206 - RNA, 19 nt, Human
acagaaauuaguuauuuuc

SEQ ID NO: 532207 - RNA, 22 nt, Human
ugggggacugcacuggcgucag

SEQ ID NO: 532208 - RNA, 22 nt, Human
uaaaugugucuauggacccgcc

SEQ ID NO: 532209 - RNA, 18 nt, Human
aacaguuuccagauucuc

SEQ ID NO: 532210 - RNA, 22 nt, Human
ucuaaaaaagucuguucacuug

SEQ ID NO: 532211 - RNA, 22 nt, Human
uuucacaggaguccuuucuaua

SEQ ID NO: 532212 - RNA, 22 nt, Human
aggccagaaauuuggaguaugu

SEQ ID NO: 532213 - RNA, 22 nt, Human
acauuaaugaggugaugacaca

SEQ ID NO: 532214 - RNA, 22 nt, Human
ugggaagggccugcccuuccuc

SEQ ID NO: 532215 - RNA, 21 nt, Human
ucuuugcaucaguuguuuucu

SEQ ID NO: 532216 - RNA, 22 nt, Human
cugugggaacacugaggacuuc

SEQ ID NO: 532217 - RNA, 18 nt, Human
caaagcaggugacagugu

SEQ ID NO: 532218 - RNA, 22 nt, Human
cacugaagccugggaguaagac

SEQ ID NO: 532219 - RNA, 22 nt, Human
gacagggccgcagauggagacu

SEQ ID NO: 532220 - RNA, 22 nt, Human
cacccagccuucacacaggagu

SEQ ID NO: 532221 - RNA, 22 nt, Human
ccugcagacacuuguccagcaa

SEQ ID NO: 532222 - RNA, 22 nt, Human
ugcugcucaaugagaugccauc

SEQ ID NO: 532223 - RNA, 22 nt, Human
ccucagggccaucucugucccu

SEQ ID NO: 532224 - RNA, 22 nt, Human
gacucuuucccugugacagagu

SEQ ID NO: 532225 - RNA, 22 nt, Human
gaaacacucaauuuaguaauuc

SEQ ID NO: 532226 - RNA, 22 nt, Human
cuggcuggccggagcgaggcgg

SEQ ID NO: 532227 - RNA, 22 nt, Human
agucucuuuguggacucugccu

SEQ ID NO: 532228 - RNA, 22 nt, Human
gcaaaugcucuccuuggucagg

SEQ ID NO: 532229 - RNA, 22 nt, Human
gagcaguugggcucuaggaagu

SEQ ID NO: 532230 - RNA, 22 nt, Human
uucauguauuuaucauguaaau

SEQ ID NO: 532231 - RNA, 19 nt, Human
caguuuaacuaauuuuauc

SEQ ID NO: 532232 - RNA, 22 nt, Human
uuugacaauucaugacauuuau

SEQ ID NO: 532233 - RNA, 22 nt, Human
cuggcaagugguugggauggau

SEQ ID NO: 532234 - RNA, 22 nt, Human
ucagggaccccucugaguggag

SEQ ID NO: 532235 - RNA, 22 nt, Human
uuuguaaaaggaggaagcaugg

SEQ ID NO: 532236 - RNA, 22 nt, Human
gggaagggagcuggguauuuag

SEQ ID NO: 532237 - RNA, 22 nt, Human
ccucugaguagacuggacauga

SEQ ID NO: 532238 - RNA, 22 nt, Human
ccacauuuacugauguauguau

SEQ ID NO: 532239 - RNA, 22 nt, Human
cugggaggcccacguugggaag

SEQ ID NO: 532240 - RNA, 22 nt, Human
uucaccuugaauaugucuuaaa

SEQ ID NO: 532241 - RNA, 21 nt, Human
aucucacagcccagagaagcc

SEQ ID NO: 532242 - RNA, 22 nt, Human
uuaaagcaaaaacuaggaugga

SEQ ID NO: 532243 - RNA, 22 nt, Human
uggcagcaaguucuugggaggu

SEQ ID NO: 532244 - RNA, 21 nt, Human
gcagccacugccuucaacaau

SEQ ID NO: 532245 - RNA, 22 nt, Human
uguguacaagaguguuuacugu

SEQ ID NO: 532246 - RNA, 22 nt, Human
uagcauuuggacauugucaccu

SEQ ID NO: 532247 - RNA, 22 nt, Human
aaaugguccauccuaaagaagu

SEQ ID NO: 532248 - RNA, 22 nt, Human
acaggaagaaagugcaguagau

SEQ ID NO: 532249 - RNA, 22 nt, Human
gaugugagugguagcugggauu

SEQ ID NO: 532250 - RNA, 22 nt, Human
gccugugacucgucuugggcca

SEQ ID NO: 532251 - RNA, 22 nt, Human
ggagccagggaagcugcuuccu

SEQ ID NO: 532252 - RNA, 22 nt, Human
gugccagcucuccccacaucug

SEQ ID NO: 532253 - RNA, 22 nt, Human
aaagacauugaagaaggacuua

SEQ ID NO: 532254 - RNA, 22 nt, Human
ccugccagcccgcguucaugcc

SEQ ID NO: 532255 - RNA, 22 nt, Human
gagauguacaauguguauuaau

SEQ ID NO: 532256 - RNA, 22 nt, Human
aaaugcaaggauuuuguuaggc

SEQ ID NO: 532257 - RNA, 22 nt, Human
uuaucauugucgcagucuaauu

SEQ ID NO: 532258 - RNA, 22 nt, Human
caugaaaauaacauuguuguga

SEQ ID NO: 532259 - RNA, 23 nt, Human
ugcuucucugcuugacaguucug

SEQ ID NO: 532260 - RNA, 22 nt, Human
cugugccuccagucucgcuucu

SEQ ID NO: 532261 - RNA, 22 nt, Human
auucaaguccagcuucucuaca

SEQ ID NO: 532262 - RNA, 22 nt, Human
uuucacagcugauaccucuucc

SEQ ID NO: 532263 - RNA, 22 nt, Human
agauaaauuccuaagauuucag

SEQ ID NO: 532264 - RNA, 22 nt, Human
aagccaguguuuuugagaguug

SEQ ID NO: 532265 - RNA, 22 nt, Human
ccugggcuccacuccaagagca

SEQ ID NO: 532266 - RNA, 22 nt, Human
uccuuacaacuuguuauuuuuc

SEQ ID NO: 532267 - RNA, 22 nt, Human
cugaggccucucuccugggcuu

SEQ ID NO: 532268 - RNA, 22 nt, Human
guggggggacguuggucacuuu

SEQ ID NO: 532269 - RNA, 22 nt, Human
uauacacaccuccaaagcagga

SEQ ID NO: 532270 - RNA, 22 nt, Human
uuguaacagguacuaaauaacu

SEQ ID NO: 532271 - RNA, 19 nt, Human
ugcuuugccuugauuagcu

SEQ ID NO: 532272 - RNA, 22 nt, Human
agggcagaaaucgauuacaccu

SEQ ID NO: 532273 - RNA, 22 nt, Human
cuucccuuuagcauauaguagu

SEQ ID NO: 532274 - RNA, 22 nt, Human
ugcauacacaugugcacauacg

SEQ ID NO: 532275 - RNA, 22 nt, Human
agcagcugaccagugaguccug

SEQ ID NO: 532276 - RNA, 22 nt, Human
caaagacugcauaacacaugaa

SEQ ID NO: 532277 - RNA, 21 nt, Human
uggccaaaaccauauuauuaa

SEQ ID NO: 532278 - RNA, 22 nt, Human
gccacauagaggaggauauuaa

SEQ ID NO: 532279 - RNA, 22 nt, Human
aucagaagcaggaggaaugaag

SEQ ID NO: 532280 - RNA, 22 nt, Human
augggcugcuucuccagcaccu

SEQ ID NO: 532281 - RNA, 22 nt, Human
agcuggcuuugagcugggaggu

SEQ ID NO: 532282 - RNA, 22 nt, Human
uguuaacagaggucauuuuggg

SEQ ID NO: 532283 - RNA, 22 nt, Human
ccaggacuuuaaguccagcacu

SEQ ID NO: 532284 - RNA, 22 nt, Human
acauguaaaagauaaauuaaca

SEQ ID NO: 532285 - RNA, 22 nt, Human
ugcuucugcaggagcuccugau

SEQ ID NO: 532286 - RNA, 22 nt, Human
auccagaguaauacagaaugca

SEQ ID NO: 532287 - RNA, 22 nt, Human
gaagccaggggccugacaggca

SEQ ID NO: 532288 - RNA, 22 nt, Human
aacuuuauuguuaggggcuaaa

SEQ ID NO: 532289 - RNA, 22 nt, Human
aguaaaauuguauuggaaaaca

SEQ ID NO: 532290 - RNA, 22 nt, Human
ccaaaauuaagccucuuauguu

SEQ ID NO: 532291 - RNA, 22 nt, Human
aggcugcuuucauggccgcccc

SEQ ID NO: 532292 - RNA, 23 nt, Human
uggggccaagugaggaagggucu

SEQ ID NO: 532293 - RNA, 22 nt, Human
guuuccauggcucuguuaaugg

SEQ ID NO: 532294 - RNA, 22 nt, Human
aggcacugauucucagaguuac

SEQ ID NO: 532295 - RNA, 22 nt, Human
acacuuuacagaauguuuugau

SEQ ID NO: 532296 - RNA, 22 nt, Human
acaaguuagguuuuaauccaaa

SEQ ID NO: 532297 - RNA, 22 nt, Human
cauuuauuaguuaguucgaugu

SEQ ID NO: 532298 - RNA, 22 nt, Human
agggacccauagagagaccagu

SEQ ID NO: 532299 - RNA, 22 nt, Human
uccaauggggccucucugucag

SEQ ID NO: 532300 - RNA, 22 nt, Human
ucauuuguacuugugugcuugu

SEQ ID NO: 532301 - RNA, 21 nt, Human
uuacuaaacaaaacaugcagg

SEQ ID NO: 532302 - RNA, 22 nt, Human
cuguccuguagcuccaucaguc

SEQ ID NO: 532303 - RNA, 22 nt, Human
cagugcagguuuagggcugggg

SEQ ID NO: 532304 - RNA, 22 nt, Human
uggcucaguuucaguccugguu

SEQ ID NO: 532305 - RNA, 22 nt, Human
uaauacaauggaguugggcccc

SEQ ID NO: 532306 - RNA, 22 nt, Human
aacaugcucuggauugcuguga

SEQ ID NO: 532307 - RNA, 21 nt, Human
caugaagccgguucccuguuu

SEQ ID NO: 532308 - RNA, 22 nt, Human
gcaggagcucguuuccaggcug

SEQ ID NO: 532309 - RNA, 22 nt, Human
uggcucaguuucugcccagcug

SEQ ID NO: 532310 - RNA, 22 nt, Human
caucagugguaacugaaugguu

SEQ ID NO: 532311 - RNA, 22 nt, Human
auauccuuuucggaagagcagc

SEQ ID NO: 532312 - RNA, 22 nt, Human
caggggcuuaagugacagaagg

SEQ ID NO: 532313 - RNA, 22 nt, Human
ugucaccucuuuggcugcagcu

SEQ ID NO: 532314 - RNA, 22 nt, Human
ucaauucugguccucaggaacu

SEQ ID NO: 532315 - RNA, 22 nt, Human
uagcuuuaggaugguucucuug

SEQ ID NO: 532316 - RNA, 22 nt, Human
uggccugccuucgcugagcuga

SEQ ID NO: 532317 - RNA, 22 nt, Human
uuugacagauccuuaacucagc

SEQ ID NO: 532318 - RNA, 22 nt, Human
ugggacugcucuugcugggguc

SEQ ID NO: 532319 - RNA, 22 nt, Human
ugcuggccaauggcagaggcgg

SEQ ID NO: 532320 - RNA, 22 nt, Human
ugcagggaccccgaggcucucu

SEQ ID NO: 532321 - RNA, 22 nt, Human
aucagaaugcagccagcaguua

SEQ ID NO: 532322 - RNA, 22 nt, Human
uggcuucugggacuugugagca

SEQ ID NO: 532323 - RNA, 22 nt, Human
uagauuuuaggagauuuuacug

SEQ ID NO: 532324 - RNA, 22 nt, Human
aagaugguuauuucaucaccua

SEQ ID NO: 532325 - RNA, 22 nt, Human
aguccaguguguucuggcagca

SEQ ID NO: 532326 - RNA, 22 nt, Human
caagcuggcugggagaggcacg

SEQ ID NO: 532327 - RNA, 22 nt, Human
accugagaaugggggcaugugu

SEQ ID NO: 532328 - RNA, 22 nt, Human
ccuucauugcaucuuuaagaga

SEQ ID NO: 532329 - RNA, 22 nt, Human
uuuucuuauggugaagcacaaa

SEQ ID NO: 532330 - RNA, 23 nt, Human
uggcagcagaucuuaaagugacc

SEQ ID NO: 532331 - RNA, 22 nt, Human
augaaacaaggguauuuucucu

SEQ ID NO: 532332 - RNA, 22 nt, Human
uaaaugcagauuccugagccua

SEQ ID NO: 532333 - RNA, 22 nt, Human
auuuugaaaagcauuugaguaa

SEQ ID NO: 532334 - RNA, 22 nt, Human
uucuaacucuguuauguguuuc

SEQ ID NO: 532335 - RNA, 22 nt, Human
cagggacccuacuagcucacac

SEQ ID NO: 532336 - RNA, 22 nt, Human
ggcucugguggcaauugacugg

SEQ ID NO: 532337 - RNA, 22 nt, Human
gagacugauggggcucccagaa

SEQ ID NO: 532338 - RNA, 22 nt, Human
agaugaugauaauugaaaggca

SEQ ID NO: 532339 - RNA, 22 nt, Human
uacacauuagucaagaguuuga

SEQ ID NO: 532340 - RNA, 22 nt, Human
aggagccaagauggggcaagua

SEQ ID NO: 532341 - RNA, 22 nt, Human
aaguacaugcuguaaugauugg

SEQ ID NO: 532342 - RNA, 22 nt, Human
cugggagauugaggccauggug

SEQ ID NO: 532343 - RNA, 22 nt, Human
ucacacagcugacagagccuuu

SEQ ID NO: 532344 - RNA, 22 nt, Human
ccaaaugcuccacugacuuugg

SEQ ID NO: 532345 - RNA, 22 nt, Human
aggccaaagcacagagcuggaa

SEQ ID NO: 532346 - RNA, 22 nt, Human
agaaaacauuacauaggugugu

SEQ ID NO: 532347 - RNA, 22 nt, Human
ccccagccuuccaugggaauug

SEQ ID NO: 532348 - RNA, 22 nt, Human
cuuacauacugagaaaauaucc

SEQ ID NO: 532349 - RNA, 22 nt, Human
uuuguucaacaucacuuccacc

SEQ ID NO: 532350 - RNA, 22 nt, Human
ugcaggugguccauuugggaac

SEQ ID NO: 532351 - RNA, 22 nt, Human
aaauuucuguuguuuugagcca

SEQ ID NO: 532352 - RNA, 22 nt, Human
uagggaggcuacuucuuguagg

SEQ ID NO: 532353 - RNA, 22 nt, Human
auaacagaguugggaagugaaa

SEQ ID NO: 532354 - RNA, 22 nt, Human
aaguuucaugauguaauuauug

SEQ ID NO: 532355 - RNA, 22 nt, Human
augaaacucuaacuuaacaagu

SEQ ID NO: 532356 - RNA, 22 nt, Human
ucucuggagggcuccaggcggg

SEQ ID NO: 532357 - RNA, 22 nt, Human
ucuguucaguugauuagacaga

SEQ ID NO: 532358 - RNA, 22 nt, Human
cucccaggcacagggaggagcc

SEQ ID NO: 532359 - RNA, 20 nt, Human
ugccagggccagcagaggcu

SEQ ID NO: 532360 - RNA, 22 nt, Human
cucugcccucgcacaucugcca

SEQ ID NO: 532361 - RNA, 22 nt, Human
uuucuuuguuguuaucacauca

SEQ ID NO: 532362 - RNA, 22 nt, Human
uccuauugguagacauuucugu

SEQ ID NO: 532363 - RNA, 22 nt, Human
acagcuauagacgauguauaga

SEQ ID NO: 532364 - RNA, 22 nt, Human
gugagaguguuuggaaauagaa

SEQ ID NO: 532365 - RNA, 22 nt, Human
gagcagcagguggggcuggcuu

SEQ ID NO: 532366 - RNA, 22 nt, Human
ugcuggggguucagaugaguaa

SEQ ID NO: 532367 - RNA, 22 nt, Human
uagggcucacugagaugaauau

SEQ ID NO: 532368 - RNA, 22 nt, Human
ugaggaugacgauggcaauggc

SEQ ID NO: 532369 - RNA, 22 nt, Human
gaggcacaucacuuggugcauu

SEQ ID NO: 532370 - RNA, 22 nt, Human
uugauuacuauguguugaaagc

SEQ ID NO: 532371 - RNA, 22 nt, Human
guaauuaggaauaaaaugggaa

SEQ ID NO: 532372 - RNA, 19 nt, Human
cagauggccaccuacuugc

SEQ ID NO: 532373 - RNA, 22 nt, Human
ccagaugggccagggguuuguu

SEQ ID NO: 532374 - RNA, 19 nt, Human
uucuggggccuggccuugg

SEQ ID NO: 532375 - RNA, 22 nt, Human
uuccaggaggagguacuagagg

SEQ ID NO: 532376 - RNA, 22 nt, Human
agaggcuccuagccacuggcuu

SEQ ID NO: 532377 - RNA, 22 nt, Human
ugcagcugaggccagcuaugcc

SEQ ID NO: 532378 - RNA, 19 nt, Human
ggacacagaaagcugcauu

SEQ ID NO: 532379 - RNA, 22 nt, Human
ugugaaaugcuauugugacaaa

SEQ ID NO: 532380 - RNA, 16 nt, Human
ccaccugcagcucuca

SEQ ID NO: 532381 - RNA, 23 nt, Human
acagaaaguucugcuggacagag

SEQ ID NO: 532382 - RNA, 22 nt, Human
uaacagaaauuuuaguuagggg

SEQ ID NO: 532383 - RNA, 22 nt, Human
ggaaggagggcggcaaugauga

SEQ ID NO: 532384 - RNA, 22 nt, Human
uggaccugggguggccuccucu

SEQ ID NO: 532385 - RNA, 22 nt, Human
uucagcuauuauacccacuuuu

SEQ ID NO: 532386 - RNA, 22 nt, Human
cauuaucugccauugacaccau

SEQ ID NO: 532387 - RNA, 22 nt, Human
accuuuuuucagaacucuaaag

SEQ ID NO: 532388 - RNA, 22 nt, Human
ucaggcucuacacuugacacac

SEQ ID NO: 532389 - RNA, 22 nt, Human
cuggagugauacucagaaugug

SEQ ID NO: 532390 - RNA, 21 nt, Human
aaggaaaagcuuggucucuga

SEQ ID NO: 532391 - RNA, 22 nt, Human
uagcuuuaagaugagaugugga

SEQ ID NO: 532392 - RNA, 22 nt, Human
acacacagaaggaagccccacu

SEQ ID NO: 532393 - RNA, 22 nt, Human
gcugcucuggcucugcaguguc

SEQ ID NO: 532394 - RNA, 22 nt, Human
uaaaacugaauacauacugagg

SEQ ID NO: 532395 - RNA, 22 nt, Human
caaauguuuuuauucuacaaca

SEQ ID NO: 532396 - RNA, 22 nt, Human
ccagagcuucggggcggcugua

SEQ ID NO: 532397 - RNA, 22 nt, Human
aaauguaguauguugcauguau

SEQ ID NO: 532398 - RNA, 22 nt, Human
ccucauggccuugagcugaggg

SEQ ID NO: 532399 - RNA, 22 nt, Human
uuuugaaagccagguuuguaug

SEQ ID NO: 532400 - RNA, 22 nt, Human
ucaacauucauauauagccaca

SEQ ID NO: 532401 - RNA, 22 nt, Human
agcagggcugugcuccuuccga

SEQ ID NO: 532402 - RNA, 22 nt, Human
gacuauuuauuuacagaaagcu

SEQ ID NO: 532403 - RNA, 22 nt, Human
gcaccacaucaaugaggggagc

SEQ ID NO: 532404 - RNA, 22 nt, Human
uucuuaagcaguuuggcauguu

SEQ ID NO: 532405 - RNA, 22 nt, Human
ggccucuguucugcauuccucc

SEQ ID NO: 532406 - RNA, 22 nt, Human
uuggaggcaaugggaaggaggc

SEQ ID NO: 532407 - RNA, 22 nt, Human
cauuugaacuaauaacugugcu

SEQ ID NO: 532408 - RNA, 22 nt, Human
aauagcaauuacccuucaacuc

SEQ ID NO: 532409 - RNA, 22 nt, Human
uucaauaucauuguuuagucuc

SEQ ID NO: 532410 - RNA, 23 nt, Human
agcagcaaaaauuuaucuuucug

SEQ ID NO: 532411 - RNA, 22 nt, Human
gguggccugaauuagcucaggg

SEQ ID NO: 532412 - RNA, 22 nt, Human
gcuggaaggcuaggcucaguug

SEQ ID NO: 532413 - RNA, 20 nt, Human
gaggcugcggacugcuggac

SEQ ID NO: 532414 - RNA, 22 nt, Human
agcugggcuccaagagggaucu

SEQ ID NO: 532415 - RNA, 22 nt, Human
ucuuuauaaaagucauuauguc

SEQ ID NO: 532416 - RNA, 22 nt, Human
ggugcuggacacguggcacucc

SEQ ID NO: 532417 - RNA, 22 nt, Human
agcagggccaacaguaaacacc

SEQ ID NO: 532418 - RNA, 22 nt, Human
ggcugaguggcugggucuaguu

SEQ ID NO: 532419 - RNA, 22 nt, Human
agacuucucaguuuuauuagua

SEQ ID NO: 532420 - RNA, 22 nt, Human
gaggcagagucacaaagagucu

SEQ ID NO: 532421 - RNA, 22 nt, Human
aaagcagugcugugagaacacu

SEQ ID NO: 532422 - RNA, 22 nt, Human
agggcuccuaugccccauggac

SEQ ID NO: 532423 - RNA, 22 nt, Human
gaggaggcuguuucucugcauu

SEQ ID NO: 532424 - RNA, 22 nt, Human
agaggggaaguaaugaaugaua

SEQ ID NO: 532425 - RNA, 22 nt, Human
cagacagaaggaaggccaacau

SEQ ID NO: 532426 - RNA, 22 nt, Human
aucaggaucagggcuagcagag

SEQ ID NO: 532427 - RNA, 22 nt, Human
ucaagucauuugacuguguguu

SEQ ID NO: 532428 - RNA, 22 nt, Human
acauguuugccugcaggcuuag

SEQ ID NO: 532429 - RNA, 17 nt, Human
aaugaaugaauucuuug

SEQ ID NO: 532430 - RNA, 22 nt, Human
uucacagggccacuggcaggag

SEQ ID NO: 532431 - RNA, 22 nt, Human
aaacaaagcaucuugcuaugca

SEQ ID NO: 532432 - RNA, 22 nt, Human
cucuggagaugguucucaauug

SEQ ID NO: 532433 - RNA, 22 nt, Human
uggcccuggguggaauguccca

SEQ ID NO: 532434 - RNA, 22 nt, Human
uuuguaaagucuguucugaguu

SEQ ID NO: 532435 - RNA, 22 nt, Human
gggggcuggacuuucccacaca

SEQ ID NO: 532436 - RNA, 22 nt, Human
ugaggcuggaugggaugccucc

SEQ ID NO: 532437 - RNA, 22 nt, Human
cguggccuuugagugagcuccc

SEQ ID NO: 532438 - RNA, 23 nt, Human
ccuccugggcacaggccugaugg

SEQ ID NO: 532439 - RNA, 22 nt, Human
agcagauguuucagagcaggcu

SEQ ID NO: 532440 - RNA, 22 nt, Human
cagagguagccgagugcaaucg

SEQ ID NO: 532441 - RNA, 22 nt, Human
ugaaauuuaggugcagauaaau

SEQ ID NO: 532442 - RNA, 21 nt, Human
ucuuuucucagcuuugugguu

SEQ ID NO: 532443 - RNA, 22 nt, Human
gcuucuggugaggccucaggaa

SEQ ID NO: 532444 - RNA, 22 nt, Human
aaaacauaaacugacagcccau

SEQ ID NO: 532445 - RNA, 22 nt, Human
aaugggagagaacacaaagucc

SEQ ID NO: 532446 - RNA, 22 nt, Human
agccagugcaacagcagugaag

SEQ ID NO: 532447 - RNA, 22 nt, Human
cggcagagcuuccugcucagcg

SEQ ID NO: 532448 - RNA, 22 nt, Human
aggagccaugagugacaucaca

SEQ ID NO: 532449 - RNA, 22 nt, Human
gggcugagcuaagcuggguuga

SEQ ID NO: 532450 - RNA, 22 nt, Human
cuggccuuggugcuugcagaca

SEQ ID NO: 532451 - RNA, 17 nt, Human
uccagagcacagagcuc

SEQ ID NO: 532452 - RNA, 22 nt, Human
agguccagaacgugccuacucu

SEQ ID NO: 532453 - RNA, 22 nt, Human
ucuggcucaaaauacguacucu

SEQ ID NO: 532454 - RNA, 22 nt, Human
cccugcuuugcacccaggcugg

SEQ ID NO: 532455 - RNA, 22 nt, Human
caacuuuagaccccaaguagcu

SEQ ID NO: 532456 - RNA, 22 nt, Human
uauguacauggagagcaauuga

SEQ ID NO: 532457 - RNA, 22 nt, Human
ccuccaguacuccaguccagcg

SEQ ID NO: 532458 - RNA, 22 nt, Human
caugaagucacuggagcuuuca

SEQ ID NO: 532459 - RNA, 20 nt, Human
ugucauuguuucuaggaccu

SEQ ID NO: 532460 - RNA, 22 nt, Human
ucacaguucaacuaguucagau

SEQ ID NO: 532461 - RNA, 22 nt, Human
cuuuccaaugucacuaugaauc

SEQ ID NO: 532462 - RNA, 22 nt, Human
gagccagggcugugagcugagc

SEQ ID NO: 532463 - RNA, 21 nt, Human
uucuucaaagaagaaggcaca

SEQ ID NO: 532464 - RNA, 22 nt, Human
gagccagccgcaagagcuguga

SEQ ID NO: 532465 - RNA, 22 nt, Human
gacaggaggcagagcucaggug

SEQ ID NO: 532466 - RNA, 22 nt, Human
uagagcagauagugaaacagaa

SEQ ID NO: 532467 - RNA, 22 nt, Human
uuuaacacuaguuucuuuaacu

SEQ ID NO: 532468 - RNA, 18 nt, Human
ggguccugugggagacag

SEQ ID NO: 532469 - RNA, 22 nt, Human
aagaacauucgaacuauuuucu

SEQ ID NO: 532470 - RNA, 22 nt, Human
uucuuaacuggaaaaugucaga

SEQ ID NO: 532471 - RNA, 22 nt, Human
ugaauaaacuaugaggaggaau

SEQ ID NO: 532472 - RNA, 22 nt, Human
ugucugucugcaagccagaaag

SEQ ID NO: 532473 - RNA, 18 nt, Human
gaggauggaaggagaugc

SEQ ID NO: 532474 - RNA, 22 nt, Human
uucuuucacucaagaaggaucu

SEQ ID NO: 532475 - RNA, 22 nt, Human
cuuauucaaugcuggaaauguu

SEQ ID NO: 532476 - RNA, 22 nt, Human
cauuagggacugaggaauaagg

SEQ ID NO: 532477 - RNA, 22 nt, Human
uaaauagggaauagaagaggaa

SEQ ID NO: 532478 - RNA, 22 nt, Human
gaugcacuugccccuccucaga

SEQ ID NO: 532479 - RNA, 22 nt, Human
cacauuuaauccuuuauaagua

SEQ ID NO: 532480 - RNA, 22 nt, Human
cucugggcaccaaagagcagcu

SEQ ID NO: 532481 - RNA, 22 nt, Human
auucuucauuguugauucaugu

SEQ ID NO: 532482 - RNA, 22 nt, Human
ugaaaacagaauccuuguuuuc

SEQ ID NO: 532483 - RNA, 22 nt, Human
gcuguucuguccccauggguaa

SEQ ID NO: 532484 - RNA, 22 nt, Human
ugcauuuucuuccaccaauauc

SEQ ID NO: 532485 - RNA, 22 nt, Human
uggcucagaggggaagugguuu

SEQ ID NO: 532486 - RNA, 22 nt, Human
uggcuucugcuuucaguggagg

SEQ ID NO: 532487 - RNA, 22 nt, Human
uccauuuuguagguaugcuaca

SEQ ID NO: 532488 - RNA, 22 nt, Human
aagccuuccugagugcaaggcc

SEQ ID NO: 532489 - RNA, 22 nt, Human
acuggaaaacacuacuacaugc

SEQ ID NO: 532490 - RNA, 22 nt, Human
agaggcggagcuugcagugagc

SEQ ID NO: 532491 - RNA, 22 nt, Human
gccucugcccuccugggacugc

SEQ ID NO: 532492 - RNA, 22 nt, Human
auugaaaaauucacaauucugg

SEQ ID NO: 532493 - RNA, 22 nt, Human
cugaggccuaagacaugaauga

SEQ ID NO: 532494 - RNA, 22 nt, Human
cugggcaggagaggugguugga

SEQ ID NO: 532495 - RNA, 22 nt, Human
ugauaugcauguaagggagaca

SEQ ID NO: 532496 - RNA, 22 nt, Human
agccuggccacucagggccuga

SEQ ID NO: 532497 - RNA, 22 nt, Human
uucacaggaauguaggggucuu

SEQ ID NO: 532498 - RNA, 19 nt, Human
gggcucuggccucaguggg

SEQ ID NO: 532499 - RNA, 22 nt, Human
aagcauuuuucacagcaacagc

SEQ ID NO: 532500 - RNA, 18 nt, Human
gcaggagauggguggggu

SEQ ID NO: 532501 - RNA, 22 nt, Human
aauggccagcaacaggagugaa

SEQ ID NO: 532502 - RNA, 22 nt, Human
acagccagaggagccaggcugg

SEQ ID NO: 532503 - RNA, 22 nt, Human
gggugcaggcagcccaggcagg

SEQ ID NO: 532504 - RNA, 23 nt, Human
ugcuuauucaaaaggugcuuuca

SEQ ID NO: 532505 - RNA, 22 nt, Human
gaucauuugcaggaaacauuaa

SEQ ID NO: 532506 - RNA, 22 nt, Human
guguccagagaaacucacagcu

SEQ ID NO: 532507 - RNA, 22 nt, Human
agucugccuuuccaaucccgug

SEQ ID NO: 532508 - RNA, 22 nt, Human
auaucacaguaguuguuuaguu

SEQ ID NO: 532509 - RNA, 22 nt, Human
uguggcagaaagcauguggaca

SEQ ID NO: 532510 - RNA, 22 nt, Human
cugccgagugggucaugaggca

SEQ ID NO: 532511 - RNA, 22 nt, Human
auauuucuugagcaccugguau

SEQ ID NO: 532512 - RNA, 22 nt, Human
gcaggagugacauggaugugga

SEQ ID NO: 532513 - RNA, 22 nt, Human
caguuuuuagauuaguuggugg

SEQ ID NO: 532514 - RNA, 22 nt, Human
gggugggguucaggaaucuuca

SEQ ID NO: 532515 - RNA, 22 nt, Human
caucuuuucagaagccauucug

SEQ ID NO: 532516 - RNA, 22 nt, Human
aaauucugauuuaauaagugua

SEQ ID NO: 532517 - RNA, 22 nt, Human
gcaagauguuaacauagggaga

SEQ ID NO: 532518 - RNA, 22 nt, Human
cuuccuggccauugccauggca

SEQ ID NO: 532519 - RNA, 22 nt, Human
ucagcaauccucccacaggugg

SEQ ID NO: 532520 - RNA, 22 nt, Human
guccuggggaauacagaagccg

SEQ ID NO: 532521 - RNA, 22 nt, Human
ugcucuguaacaaauugacaug

SEQ ID NO: 532522 - RNA, 22 nt, Human
agagacuggagaugggcagugu

SEQ ID NO: 532523 - RNA, 22 nt, Human
uucuuuauccuauuuguaggug

SEQ ID NO: 532524 - RNA, 22 nt, Human
ggugcagggagaggcaggcccc

SEQ ID NO: 532525 - RNA, 22 nt, Human
agcagcauucucugguaugggg

SEQ ID NO: 532526 - RNA, 22 nt, Human
gccugagccgccugagcggcgg

SEQ ID NO: 532527 - RNA, 22 nt, Human
ucagaacagaagcuggcuauaa

SEQ ID NO: 532528 - RNA, 22 nt, Human
agucucagaaaagaagcaugga

SEQ ID NO: 532529 - RNA, 21 nt, Human
agaaaaguagaguuuucagag

SEQ ID NO: 532530 - RNA, 22 nt, Human
cagggcugguuugucgaagaaa

SEQ ID NO: 532531 - RNA, 22 nt, Human
uuugaaacucugaacauguuuc

SEQ ID NO: 532532 - RNA, 22 nt, Human
gccagucugcucccacaaguuc

SEQ ID NO: 532533 - RNA, 18 nt, Human
cugggccuuuguauuuuu

SEQ ID NO: 532534 - RNA, 22 nt, Human
cugggccaagaaguuguguaug

SEQ ID NO: 532535 - RNA, 22 nt, Human
agucagauuuaaagcuguuuga

SEQ ID NO: 532536 - RNA, 22 nt, Human
caaacuauuuacaauggaauca

SEQ ID NO: 532537 - RNA, 22 nt, Human
gcugggagcaaguacucaucuu

SEQ ID NO: 532538 - RNA, 22 nt, Human
ugagaagcaguuucaguaagaa

SEQ ID NO: 532539 - RNA, 22 nt, Human
ugggagugauacaguauggaau

SEQ ID NO: 532540 - RNA, 22 nt, Human
gggugcagggucuccagcagcu

SEQ ID NO: 532541 - RNA, 22 nt, Human
gcucaggaucccaggggugugc

SEQ ID NO: 532542 - RNA, 22 nt, Human
uguaugcagggcuuguaugcag

SEQ ID NO: 532543 - RNA, 22 nt, Human
accuccuggcuuaucauggaca

SEQ ID NO: 532544 - RNA, 18 nt, Human
uugagggaggggcagagu

SEQ ID NO: 532545 - RNA, 22 nt, Human
ugggagcaagcuggugcuggag

SEQ ID NO: 532546 - RNA, 22 nt, Human
gggcaguggcucacgccuguaa

SEQ ID NO: 532547 - RNA, 22 nt, Human
auucaaguggcugcuauguuaa

SEQ ID NO: 532548 - RNA, 22 nt, Human
cagggugccaaagaacaaauau

SEQ ID NO: 532549 - RNA, 22 nt, Human
ugucauugaggaaaacuaggug

SEQ ID NO: 532550 - RNA, 22 nt, Human
cuaggaaugguaccucuuacaa

SEQ ID NO: 532551 - RNA, 22 nt, Human
agguuuaugccuuggagcuggg

SEQ ID NO: 532552 - RNA, 22 nt, Human
gaguggagaucgugccacugca

SEQ ID NO: 532553 - RNA, 22 nt, Human
aggcaggugggucacuugaguc

SEQ ID NO: 532554 - RNA, 21 nt, Human
cauaugaaagaaguaucugac

SEQ ID NO: 532555 - RNA, 23 nt, Human
aaauaugucugagggcaaagaau

SEQ ID NO: 532556 - RNA, 22 nt, Human
aggccagcucacccuggcuccu

SEQ ID NO: 532557 - RNA, 22 nt, Human
cagcucucacacccuccuccca

SEQ ID NO: 532558 - RNA, 22 nt, Human
uccuuggcaugccgucuucucc

SEQ ID NO: 532559 - RNA, 22 nt, Human
auggacagugugucuguuucca

SEQ ID NO: 532560 - RNA, 22 nt, Human
acacucuuucugugggucacau

SEQ ID NO: 532561 - RNA, 22 nt, Human
uggugcagagagggaucuaggg

SEQ ID NO: 532562 - RNA, 22 nt, Human
cagguggguguaugaaugcaaa

SEQ ID NO: 532563 - RNA, 22 nt, Human
uugcauaaaagaguauaucuua

SEQ ID NO: 532564 - RNA, 22 nt, Human
gugguaauagagcuccaaacua

SEQ ID NO: 532565 - RNA, 22 nt, Human
caagucaaagacuagaacuagu

SEQ ID NO: 532566 - RNA, 22 nt, Human
agccucugcacgggcacgggug

SEQ ID NO: 532567 - RNA, 21 nt, Human
cauuucuauugaugagaaaag

SEQ ID NO: 532568 - RNA, 22 nt, Human
uauuauguagaguaaggguuaa

SEQ ID NO: 532569 - RNA, 22 nt, Human
cugagccauccauaccagcuua

SEQ ID NO: 532570 - RNA, 22 nt, Human
cuaggcaaaguauuaaugagug

SEQ ID NO: 532571 - RNA, 22 nt, Human
cuaagucauggaaagugugugu

SEQ ID NO: 532572 - RNA, 20 nt, Human
uuacaaagaggcaucgcuuu

SEQ ID NO: 532573 - RNA, 22 nt, Human
uuuccucugacugcuccccugc

SEQ ID NO: 532574 - RNA, 22 nt, Human
aggaggcugaacuagggucugg

SEQ ID NO: 532575 - RNA, 22 nt, Human
acuguucacuagugaggguuga

SEQ ID NO: 532576 - RNA, 22 nt, Human
ucacauuuguguuuuauuagag

SEQ ID NO: 532577 - RNA, 16 nt, Human
cucagcuaaggagagg

SEQ ID NO: 532578 - RNA, 22 nt, Human
uagggugcuuaauacuagauuu

SEQ ID NO: 532579 - RNA, 22 nt, Human
aggacugggugcagagggcauc

SEQ ID NO: 532580 - RNA, 21 nt, Human
uccuccuucaaguccuggccu

SEQ ID NO: 532581 - RNA, 22 nt, Human
cugagcuuccaguuccuccagg

SEQ ID NO: 532582 - RNA, 20 nt, Human
ccaaauguggagaaaaagua

SEQ ID NO: 532583 - RNA, 20 nt, Human
cuguggcaucugucauggug

SEQ ID NO: 532584 - RNA, 22 nt, Human
agggcagaaguacagacacuua

SEQ ID NO: 532585 - RNA, 22 nt, Human
agaagcaggccucacagaucug

SEQ ID NO: 532586 - RNA, 22 nt, Human
guuauugcaguauagaggucua

SEQ ID NO: 532587 - RNA, 22 nt, Human
uauaguacauggaaucuucaua

SEQ ID NO: 532588 - RNA, 22 nt, Human
ugggccugugaugcugggcuau

SEQ ID NO: 532589 - RNA, 19 nt, Human
aagaagcaauaagcuguga

SEQ ID NO: 532590 - RNA, 22 nt, Human
agccucucuguuagucacuggg

SEQ ID NO: 532591 - RNA, 22 nt, Human
aauucaaggaucuguuaaaucu

SEQ ID NO: 532592 - RNA, 22 nt, Human
uguguuugaggcauguugcaga

SEQ ID NO: 532593 - RNA, 22 nt, Human
auguccagggcacacagcagug

SEQ ID NO: 532594 - RNA, 22 nt, Human
ugaaaugagauagauaaucagg

SEQ ID NO: 532595 - RNA, 22 nt, Human
aauauaaauuccugggcccagc

SEQ ID NO: 532596 - RNA, 22 nt, Human
uuagucaauagugaauauagag

SEQ ID NO: 532597 - RNA, 22 nt, Human
agacacauuuuacauuaacugu

SEQ ID NO: 532598 - RNA, 22 nt, Human
caguaugagaguugaaucaagg

SEQ ID NO: 532599 - RNA, 22 nt, Human
cccaggcugaugggaugggcca

SEQ ID NO: 532600 - RNA, 23 nt, Human
uggaccugaaccagugccucugu

SEQ ID NO: 532601 - RNA, 22 nt, Human
uuugcaaacacuuaagaagaga

SEQ ID NO: 532602 - RNA, 22 nt, Human
cacacuuuuggcauguuugguu

SEQ ID NO: 532603 - RNA, 19 nt, Human
ucugcccaguugucugccc

SEQ ID NO: 532604 - RNA, 22 nt, Human
ugcugggcuagaagcugaggcc

SEQ ID NO: 532605 - RNA, 22 nt, Human
uggcucugugucucccagcagc

SEQ ID NO: 532606 - RNA, 22 nt, Human
augguacuggggucccggaguu

SEQ ID NO: 532607 - RNA, 20 nt, Human
cagaaugcuguaaucaagaa

SEQ ID NO: 532608 - RNA, 22 nt, Human
uuucauaaccucaagcuacagu

SEQ ID NO: 532609 - RNA, 22 nt, Human
gaggucaauaauaugugcuuua

SEQ ID NO: 532610 - RNA, 22 nt, Human
uuuagacuaauuccuaaagggc

SEQ ID NO: 532611 - RNA, 22 nt, Human
ugauucacagacuucacaaggc

SEQ ID NO: 532612 - RNA, 22 nt, Human
gugagacucgccuuuguguagc

SEQ ID NO: 532613 - RNA, 22 nt, Human
cccagcuccuuggaugggcagg

SEQ ID NO: 532614 - RNA, 22 nt, Human
ucaggcagaaaaaucacuaauu

SEQ ID NO: 532615 - RNA, 22 nt, Human
cagauggcaacagcucugugac

SEQ ID NO: 532616 - RNA, 22 nt, Human
aaacaccagcacuguuuacaaa

SEQ ID NO: 532617 - RNA, 23 nt, Human
cccuggaguaaauucuuggaagg

SEQ ID NO: 532618 - RNA, 22 nt, Human
cugcagagcagccaguccccca

SEQ ID NO: 532619 - RNA, 22 nt, Human
ccagcuuuggaguguuguugcu

SEQ ID NO: 532620 - RNA, 17 nt, Human
agcuccugcccauggcu

SEQ ID NO: 532621 - RNA, 22 nt, Human
caauaaagaagauuuuugcaau

SEQ ID NO: 532622 - RNA, 22 nt, Human
ugguggcuguugcagaacugag

SEQ ID NO: 532623 - RNA, 22 nt, Human
acuuucaaaagagaagucauga

SEQ ID NO: 532624 - RNA, 22 nt, Human
gaguggggucugggcaucaguc

SEQ ID NO: 532625 - RNA, 22 nt, Human
cccagccucugggcucacccaa

SEQ ID NO: 532626 - RNA, 22 nt, Human
uugcaaauucauggaucugaau

SEQ ID NO: 532627 - RNA, 22 nt, Human
ccucugcucccuggugucugag

SEQ ID NO: 532628 - RNA, 22 nt, Human
ugcccugcuguggcucugccca

SEQ ID NO: 532629 - RNA, 22 nt, Human
gaggcaggcacuguuaucagca

SEQ ID NO: 532630 - RNA, 22 nt, Human
uuuuccucuguuauuaguguga

SEQ ID NO: 532631 - RNA, 22 nt, Human
aaacaguuuauaacaugauacu

SEQ ID NO: 532632 - RNA, 20 nt, Human
cucuccucacccgugucagg

SEQ ID NO: 532633 - RNA, 22 nt, Human
ucuuuagccaguaucauaauga

SEQ ID NO: 532634 - RNA, 22 nt, Human
aggaaaggugagagcggccgcg

SEQ ID NO: 532635 - RNA, 22 nt, Human
aaggcucucugauggcagcagu

SEQ ID NO: 532636 - RNA, 22 nt, Human
guguggcuaccucagaggagca

SEQ ID NO: 532637 - RNA, 21 nt, Human
aacuuuagaaagacugggaag

SEQ ID NO: 532638 - RNA, 21 nt, Human
gcaaagugugggcauaaacag

SEQ ID NO: 532639 - RNA, 22 nt, Human
ugcauauuuguaugauguuuag

SEQ ID NO: 532640 - RNA, 22 nt, Human
cuccuggacauggagcggagga

SEQ ID NO: 532641 - RNA, 22 nt, Human
uuauacagcauugcuagugaug

SEQ ID NO: 532642 - RNA, 22 nt, Human
gcaaagaaaugucagugagagg

SEQ ID NO: 532643 - RNA, 22 nt, Human
uccaagcuugcuuuagccacag

SEQ ID NO: 532644 - RNA, 20 nt, Human
agggcagcuugaggagccgg

SEQ ID NO: 532645 - RNA, 22 nt, Human
cagucuggaggucagcuggcuu

SEQ ID NO: 532646 - RNA, 22 nt, Human
cccuggugguacggcacuggca

SEQ ID NO: 532647 - RNA, 22 nt, Human
ggaagcuuucucuguuuccuua

SEQ ID NO: 532648 - RNA, 22 nt, Human
auacaucauuuauggaauaagg

SEQ ID NO: 532649 - RNA, 22 nt, Human
aggaacugauuuauaacuuuag

SEQ ID NO: 532650 - RNA, 22 nt, Human
uaagaacaagauguuccuguuu

SEQ ID NO: 532651 - RNA, 22 nt, Human
gaaauacaguugggaggaggua

SEQ ID NO: 532652 - RNA, 22 nt, Human
gcugucuugcucacucuugcag

SEQ ID NO: 532653 - RNA, 22 nt, Human
gaauauuuuuaaagggacuaau

SEQ ID NO: 532654 - RNA, 20 nt, Human
augggcugguuaggaagugu

SEQ ID NO: 532655 - RNA, 22 nt, Human
acauuucuuucuauucaguagc

SEQ ID NO: 532656 - RNA, 22 nt, Human
uggcaugggccagggagagcug

SEQ ID NO: 532657 - RNA, 22 nt, Human
uuugaaaauuagacacaggcua

SEQ ID NO: 532658 - RNA, 22 nt, Human
uaacaauaguguuugcuaguca

SEQ ID NO: 532659 - RNA, 22 nt, Human
gggugggccugucuggccaugu

SEQ ID NO: 532660 - RNA, 22 nt, Human
ccugcuguuuucuucacuucag

SEQ ID NO: 532661 - RNA, 22 nt, Human
aaggaaccugggaaccuaucau

SEQ ID NO: 532662 - RNA, 22 nt, Human
gggguggcccuacccucuggaa

SEQ ID NO: 532663 - RNA, 22 nt, Human
accugccuauggagccacaugg

SEQ ID NO: 532664 - RNA, 22 nt, Human
uaaguucauuagacuacagaua

SEQ ID NO: 532665 - RNA, 22 nt, Human
aggcagagagcaguggccgucu

SEQ ID NO: 532666 - RNA, 22 nt, Human
augugaaagagguguucagugg

SEQ ID NO: 532667 - RNA, 23 nt, Human
aauuacaaccaagaacuggaagg

SEQ ID NO: 532668 - RNA, 22 nt, Human
gaaaucaucugaguaauaaucu

SEQ ID NO: 532669 - RNA, 22 nt, Human
ugagcccaggaguaugaggcug

SEQ ID NO: 532670 - RNA, 22 nt, Human
cagccugcccuggaagcccagc

SEQ ID NO: 532671 - RNA, 22 nt, Human
gucacacagagcccugugcuca

SEQ ID NO: 532672 - RNA, 22 nt, Human
ccacagcuccucagccucuuuc

SEQ ID NO: 532673 - RNA, 22 nt, Human
agaaugauuuuggacaauaugg

SEQ ID NO: 532674 - RNA, 22 nt, Human
ugaaaucagugguauaaucggg

SEQ ID NO: 532675 - RNA, 21 nt, Human
augauaugcuuguauuuccaa

SEQ ID NO: 532676 - RNA, 22 nt, Human
uaagucauggagcugggauuga

SEQ ID NO: 532677 - RNA, 22 nt, Human
cagcgucucguugugggccucg

SEQ ID NO: 532678 - RNA, 22 nt, Human
ugccugaugcaggaguaucaga

SEQ ID NO: 532679 - RNA, 22 nt, Human
uuauuuguuuucugagaaguau

SEQ ID NO: 532680 - RNA, 22 nt, Human
uacaaagugagcaaccucuuuu

SEQ ID NO: 532681 - RNA, 22 nt, Human
gagagcuguguucauucuacca

SEQ ID NO: 532682 - RNA, 22 nt, Human
gaugucaucaggcuaagacacu

SEQ ID NO: 532683 - RNA, 22 nt, Human
gcagagcuccccaagacaccaa

SEQ ID NO: 532684 - RNA, 22 nt, Human
gccacccccaaguagguggucu

SEQ ID NO: 532685 - RNA, 22 nt, Human
acuuacaagcuagggaagcuug

SEQ ID NO: 532686 - RNA, 22 nt, Human
gucucuaucauagcugaacccu

SEQ ID NO: 532687 - RNA, 22 nt, Human
cuggaaggguacauaggaaacu

SEQ ID NO: 532688 - RNA, 22 nt, Human
gccggggcuggggagagacaug

SEQ ID NO: 532689 - RNA, 22 nt, Human
auuccaaagcacaucagaacua

SEQ ID NO: 532690 - RNA, 21 nt, Human
ggagaaggacaauguugagua

SEQ ID NO: 532691 - RNA, 22 nt, Human
aucagagaaauggagggcgcuu

SEQ ID NO: 532692 - RNA, 22 nt, Human
uccugagauaggaguugaaggc

SEQ ID NO: 532693 - RNA, 22 nt, Human
aggcucccaagcacugacccca

SEQ ID NO: 532694 - RNA, 22 nt, Human
ugugcucuaccucagugucauu

SEQ ID NO: 532695 - RNA, 22 nt, Human
ggcagguggccaagugucuaag

SEQ ID NO: 532696 - RNA, 22 nt, Human
cuccuccagcucucccuggggg

SEQ ID NO: 532697 - RNA, 22 nt, Human
uguaggaguccaaucaggagac

SEQ ID NO: 532698 - RNA, 22 nt, Human
guguccaucagcagccacugug

SEQ ID NO: 532699 - RNA, 22 nt, Human
guccuugcuugagacaggcagu

SEQ ID NO: 532700 - RNA, 22 nt, Human
uacaaagucagaauaacaggug

SEQ ID NO: 532701 - RNA, 20 nt, Human
cucuggcuccgcgugaccgc

SEQ ID NO: 532702 - RNA, 22 nt, Human
ggggcagaaagcccacagagug

SEQ ID NO: 532703 - RNA, 22 nt, Human
aacauugcagcuuaauugcagg

SEQ ID NO: 532704 - RNA, 22 nt, Human
cagaaaauaaaguuucuacgca

SEQ ID NO: 532705 - RNA, 22 nt, Human
aagccagguuccauggaggagc

SEQ ID NO: 532706 - RNA, 23 nt, Human
cccagcuuucccacugccgagag

SEQ ID NO: 532707 - RNA, 22 nt, Human
agugggccuuagaagguucccu

SEQ ID NO: 532708 - RNA, 22 nt, Human
gcugaagagagaugcguccagc

SEQ ID NO: 532709 - RNA, 22 nt, Human
gcucugcuugcaucaugacugc

SEQ ID NO: 532710 - RNA, 19 nt, Human
accucugcagagauguuua

SEQ ID NO: 532711 - RNA, 22 nt, Human
uucaaauacauucuuugccacu

SEQ ID NO: 532712 - RNA, 22 nt, Human
cugggcucagaugagaggaagg

SEQ ID NO: 532713 - RNA, 22 nt, Human
ccuguucacgguguguuguuag

SEQ ID NO: 532714 - RNA, 22 nt, Human
aucugacaaccuauugacuuga

SEQ ID NO: 532715 - RNA, 20 nt, Human
uguaaacaauaguguucuug

SEQ ID NO: 532716 - RNA, 22 nt, Human
caggucagagucccccuguccu

SEQ ID NO: 532717 - RNA, 21 nt, Human
aucccagcacccaggagugca

SEQ ID NO: 532718 - RNA, 22 nt, Human
cagagcggccacuagagggcgc

SEQ ID NO: 532719 - RNA, 18 nt, Human
uugaauucuucuacaugu

SEQ ID NO: 532720 - RNA, 22 nt, Human
cggggccucaguuuccccaccu

SEQ ID NO: 532721 - RNA, 22 nt, Human
cagcaauaaugucuacaaaucu

SEQ ID NO: 532722 - RNA, 22 nt, Human
uuucagaaauggcacugaaauc

SEQ ID NO: 532723 - RNA, 20 nt, Human
agccagaagaaggcuggaga

SEQ ID NO: 532724 - RNA, 22 nt, Human
cuggcagcucugagucccuucu

SEQ ID NO: 532725 - RNA, 22 nt, Human
uuccugaugcacacagucauuu

SEQ ID NO: 532726 - RNA, 19 nt, Human
ugcucagcuccugugaguc

SEQ ID NO: 532727 - RNA, 22 nt, Human
gucaggauguuuauucuccagu

SEQ ID NO: 532728 - RNA, 22 nt, Human
uuuaccaagcuuuaauuacaua

SEQ ID NO: 532729 - RNA, 22 nt, Human
aagagcaucuauuucacagugg

SEQ ID NO: 532730 - RNA, 23 nt, Human
uggacaguaggguagacagugcc

SEQ ID NO: 532731 - RNA, 22 nt, Human
aggaggccgauuucagaggucg

SEQ ID NO: 532732 - RNA, 21 nt, Human
cagaggcaggcucugugugug

SEQ ID NO: 532733 - RNA, 22 nt, Human
ggcaggcuagcacugauguccu

SEQ ID NO: 532734 - RNA, 22 nt, Human
gagcugggauucaucuaugucu

SEQ ID NO: 532735 - RNA, 22 nt, Human
gucucagagagcuacucucuua

SEQ ID NO: 532736 - RNA, 22 nt, Human
auaacagagagcuacugaacug

SEQ ID NO: 532737 - RNA, 22 nt, Human
ccaagggcucugacuugccugc

SEQ ID NO: 532738 - RNA, 22 nt, Human
uaauucagggccagaaucccca

SEQ ID NO: 532739 - RNA, 22 nt, Human
gggacccagguaauccugugcu

SEQ ID NO: 532740 - RNA, 22 nt, Human
gcagacagcauguugggcuauu

SEQ ID NO: 532741 - RNA, 22 nt, Human
acauuuaaugauccuacuguga

SEQ ID NO: 532742 - RNA, 22 nt, Human
ggcugcucuccaucccaggccu

SEQ ID NO: 532743 - RNA, 22 nt, Human
aggaagaggguggcagauaauc

SEQ ID NO: 532744 - RNA, 22 nt, Human
acaggcagguccugucccagcu

SEQ ID NO: 532745 - RNA, 23 nt, Human
cugcccugaucuugaucuauugu

SEQ ID NO: 532746 - RNA, 22 nt, Human
ucaaaucucacucugcauuucu

SEQ ID NO: 532747 - RNA, 22 nt, Human
cucucccuugggugggcuuugg

SEQ ID NO: 532748 - RNA, 22 nt, Human
uccauuuuucaugacuccucaa

SEQ ID NO: 532749 - RNA, 22 nt, Human
ucuggcucaggagcuguguuca

SEQ ID NO: 532750 - RNA, 22 nt, Human
cucagaaucugccaaguucagg

SEQ ID NO: 532751 - RNA, 22 nt, Human
agugcaggagccuggccagagc

SEQ ID NO: 532752 - RNA, 22 nt, Human
auguuuaauuaucuggguuuug

SEQ ID NO: 532753 - RNA, 22 nt, Human
uggcagcaauagaaauauaauc

SEQ ID NO: 532754 - RNA, 22 nt, Human
aagauuuucucaacuguauuug

SEQ ID NO: 532755 - RNA, 17 nt, Human
auuuguaacuagcucuu

SEQ ID NO: 532756 - RNA, 22 nt, Human
uagcagaaacuguuacagaagg

SEQ ID NO: 532757 - RNA, 22 nt, Human
cuugaaaauaagaaagacuuuc

SEQ ID NO: 532758 - RNA, 22 nt, Human
gaggaaugucagcacaggccuc

SEQ ID NO: 532759 - RNA, 22 nt, Human
cugggagagguggugggaagua

SEQ ID NO: 532760 - RNA, 20 nt, Human
aucaaaauccuauugagguu

SEQ ID NO: 532761 - RNA, 22 nt, Human
agggugcagggacaggugugca

SEQ ID NO: 532762 - RNA, 22 nt, Human
uccagggaagagcagaggcuac

SEQ ID NO: 532763 - RNA, 22 nt, Human
gcugugugacugagagccuggc

SEQ ID NO: 532764 - RNA, 22 nt, Human
agaguccaugaagacagcugag

SEQ ID NO: 532765 - RNA, 20 nt, Human
aaguuacauuguauuguacc

SEQ ID NO: 532766 - RNA, 22 nt, Human
aaaguuagaaugauaucaacga

SEQ ID NO: 532767 - RNA, 22 nt, Human
auuugcuuguaaauguaugccu

SEQ ID NO: 532768 - RNA, 20 nt, Human
ggcaccaggcuaggauugga

SEQ ID NO: 532769 - RNA, 22 nt, Human
cagcaacugugccugacacaca

SEQ ID NO: 532770 - RNA, 22 nt, Human
caggcuggacauuagauacaua

SEQ ID NO: 532771 - RNA, 22 nt, Human
cucauggauauaagaacuguuu

SEQ ID NO: 532772 - RNA, 22 nt, Human
aucaacauacugcucaggcauu

SEQ ID NO: 532773 - RNA, 22 nt, Human
auugaaaguccuaucuaaggga

SEQ ID NO: 532774 - RNA, 22 nt, Human
cagcuggcagcccuggcccugc

SEQ ID NO: 532775 - RNA, 22 nt, Human
acauuucuuagccuaguuccag

SEQ ID NO: 532776 - RNA, 22 nt, Human
agaaacaacuuguuucucuugc

SEQ ID NO: 532777 - RNA, 22 nt, Human
auauuuuuccaugugggacucu

SEQ ID NO: 532778 - RNA, 22 nt, Human
aagcuggccuguaccugcugag

SEQ ID NO: 532779 - RNA, 22 nt, Human
aaaaguuugugcaaacacucag

SEQ ID NO: 532780 - RNA, 22 nt, Human
acagagcaauaacagggagagg

SEQ ID NO: 532781 - RNA, 22 nt, Human
uucaaaaagguauguucaaguc

SEQ ID NO: 532782 - RNA, 22 nt, Human
uccugggcugugugccacucug

SEQ ID NO: 532783 - RNA, 22 nt, Human
auggaacaggcucagagaugcu

SEQ ID NO: 532784 - RNA, 22 nt, Human
cagaggcucagauggcccuggc

SEQ ID NO: 532785 - RNA, 22 nt, Human
caggaugaagggcaaaggcaag

SEQ ID NO: 532786 - RNA, 22 nt, Human
ucagggcaagucucagaagguu

SEQ ID NO: 532787 - RNA, 22 nt, Human
ggcacagcacagagcacaugua

SEQ ID NO: 532788 - RNA, 22 nt, Human
aaugguacccuggugacuuaga

SEQ ID NO: 532789 - RNA, 22 nt, Human
uaaacaucaggaaugaaaaccu

SEQ ID NO: 532790 - RNA, 22 nt, Human
ugacuggauugucauuacgacg

SEQ ID NO: 532791 - RNA, 22 nt, Human
gggucucucucggcuccacgcg

SEQ ID NO: 532792 - RNA, 22 nt, Human
ugagccuggagucguggagggg

SEQ ID NO: 532793 - RNA, 22 nt, Human
gaaggucaccuccccucucugg

SEQ ID NO: 532794 - RNA, 22 nt, Human
ggacugaggacaugugaggcau

SEQ ID NO: 532795 - RNA, 22 nt, Human
agugucugcuuaucaguucuug

SEQ ID NO: 532796 - RNA, 22 nt, Human
ugauuaaguucaaaauauagaa

SEQ ID NO: 532797 - RNA, 21 nt, Human
ugggcucuuuaacccaggcac

SEQ ID NO: 532798 - RNA, 22 nt, Human
agcacaggaccaaggaagcugu

SEQ ID NO: 532799 - RNA, 22 nt, Human
gccuggucucuuucaugucagu

SEQ ID NO: 532800 - RNA, 21 nt, Human
aaggagccuaggaggcucagg

SEQ ID NO: 532801 - RNA, 22 nt, Human
ugaaaucuuagccauucugccu

SEQ ID NO: 532802 - RNA, 22 nt, Human
ccugugagucaaccccuccuug

SEQ ID NO: 532803 - RNA, 22 nt, Human
aaauguuagguuguacugaguc

SEQ ID NO: 532804 - RNA, 19 nt, Human
caaggguugggucugucau

SEQ ID NO: 532805 - RNA, 19 nt, Human
gagguggguccccgcagcc

SEQ ID NO: 532806 - RNA, 22 nt, Human
uaaaaucagccgaccauggugg

SEQ ID NO: 532807 - RNA, 19 nt, Human
uucacaauuaugaaauuag

SEQ ID NO: 532808 - RNA, 22 nt, Human
uugcuaaauguguuauaucugu

SEQ ID NO: 532809 - RNA, 21 nt, Human
agcuggcaauguuguccucuu

SEQ ID NO: 532810 - RNA, 22 nt, Human
caguuuauagcucuagcagcuu

SEQ ID NO: 532811 - RNA, 22 nt, Human
uagauuucucauucauagauug

SEQ ID NO: 532812 - RNA, 22 nt, Human
uaaagcauuuuugaaauuauga

SEQ ID NO: 532813 - RNA, 22 nt, Human
aaacaauguacacaugaauguu

SEQ ID NO: 532814 - RNA, 19 nt, Human
uccaaaggacccaccucca

SEQ ID NO: 532815 - RNA, 22 nt, Human
ccuggauucaagucuuucuuuc

SEQ ID NO: 532816 - RNA, 22 nt, Human
cagcagcugggaaggaggcuga

SEQ ID NO: 532817 - RNA, 22 nt, Human
cgcaggugaaagaggcugggca

SEQ ID NO: 532818 - RNA, 22 nt, Human
cagggcucaggaaaucagacgu

SEQ ID NO: 532819 - RNA, 20 nt, Human
uggagccacagucagguucc

SEQ ID NO: 532820 - RNA, 22 nt, Human
caaauuuagguaacagucugua

SEQ ID NO: 532821 - RNA, 22 nt, Human
gggugcagugguucacgccugu

SEQ ID NO: 532822 - RNA, 22 nt, Human
gccucugcaugcucagcaccca

SEQ ID NO: 532823 - RNA, 22 nt, Human
uccuccugucuaccaguuccug

SEQ ID NO: 532824 - RNA, 22 nt, Human
ccuggagcaggagcugcagagg

SEQ ID NO: 532825 - RNA, 22 nt, Human
aagagaaggugaggaagccggu

SEQ ID NO: 532826 - RNA, 22 nt, Human
aagcagcaaguuuauuucuauc

SEQ ID NO: 532827 - RNA, 22 nt, Human
cccugcacagccuggcucucuu

SEQ ID NO: 532828 - RNA, 22 nt, Human
aggcagcauccagaggagaaug

SEQ ID NO: 532829 - RNA, 22 nt, Human
ccagggcagaaaaagagggaau

SEQ ID NO: 532830 - RNA, 21 nt, Human
auacagugguaugaauguagg

SEQ ID NO: 532831 - RNA, 22 nt, Human
cuucaagauccauagauauugc

SEQ ID NO: 532832 - RNA, 20 nt, Human
agcuaggagaaagcauggag

SEQ ID NO: 532833 - RNA, 22 nt, Human
gagggcagagacagugauucac

SEQ ID NO: 532834 - RNA, 22 nt, Human
ugucuccucauacugucauauu

SEQ ID NO: 532835 - RNA, 22 nt, Human
uggagaggaaagugcaguuuug

SEQ ID NO: 532836 - RNA, 22 nt, Human
acacaguauuacaauaggugcu

SEQ ID NO: 532837 - RNA, 22 nt, Human
cauuauuaauucagcacaugcu

SEQ ID NO: 532838 - RNA, 22 nt, Human
ucaaauauuggcuauuucacau

SEQ ID NO: 532839 - RNA, 22 nt, Human
ugggcugcugcggugcucuugg

SEQ ID NO: 532840 - RNA, 22 nt, Human
uacaaaaguaauuacgguuuuu

SEQ ID NO: 532841 - RNA, 23 nt, Human
ugcauaucagaaauuucauaugg

SEQ ID NO: 532842 - RNA, 22 nt, Human
gguggggcccaggcaucugaug

SEQ ID NO: 532843 - RNA, 22 nt, Human
aggaagaaacugagcucugaca

SEQ ID NO: 532844 - RNA, 22 nt, Human
acucccacuccagaguagaagc

SEQ ID NO: 532845 - RNA, 22 nt, Human
ccacagggugucaucagcuuga

SEQ ID NO: 532846 - RNA, 17 nt, Human
uauguaguacuuauaaa

SEQ ID NO: 532847 - RNA, 22 nt, Human
ucuccugguuuguuaaauaauu

SEQ ID NO: 532848 - RNA, 22 nt, Human
aggggaugccuaguggagucuc

SEQ ID NO: 532849 - RNA, 22 nt, Human
agcaggcuuaugguugaaggga

SEQ ID NO: 532850 - RNA, 22 nt, Human
uuugaaaguccuaggagagucc

SEQ ID NO: 532851 - RNA, 22 nt, Human
uucugcaggagcccuaguguau

SEQ ID NO: 532852 - RNA, 22 nt, Human
acugagaggaaauugagacuau

SEQ ID NO: 532853 - RNA, 22 nt, Human
aaugcuguaaagaugcuaucug

SEQ ID NO: 532854 - RNA, 22 nt, Human
ccaggagcuggagggugcagug

SEQ ID NO: 532855 - RNA, 22 nt, Human
ugcagccaucgcagagucugua

SEQ ID NO: 532856 - RNA, 22 nt, Human
acagugaaugcccaagaaaagu

SEQ ID NO: 532857 - RNA, 22 nt, Human
accauugccuagaaaaauuccu

SEQ ID NO: 532858 - RNA, 22 nt, Human
cagauguauaugcauaaaaagu

SEQ ID NO: 532859 - RNA, 22 nt, Human
caauuaaagaagaccugccuca

SEQ ID NO: 532860 - RNA, 22 nt, Human
ucccaaagcuacucuucugacu

SEQ ID NO: 532861 - RNA, 22 nt, Human
uggcccugcccucuucaucuuu

SEQ ID NO: 532862 - RNA, 22 nt, Human
cuggaagaguccuaaacagaua

SEQ ID NO: 532863 - RNA, 22 nt, Human
acaugaaaagacuaucugauua

SEQ ID NO: 532864 - RNA, 21 nt, Human
agacagagugcagucuacaua

SEQ ID NO: 532865 - RNA, 22 nt, Human
agaaaugcucaggucaacuuaa

SEQ ID NO: 532866 - RNA, 22 nt, Human
caucacauuuaaggggaaggac

SEQ ID NO: 532867 - RNA, 22 nt, Human
ucaagaaagggcuucaccagga

SEQ ID NO: 532868 - RNA, 22 nt, Human
uucaagauggccccagugagcc

SEQ ID NO: 532869 - RNA, 22 nt, Human
acuguguguuugucuagcacag

SEQ ID NO: 532870 - RNA, 22 nt, Human
auaggcaagcacaaagucagga

SEQ ID NO: 532871 - RNA, 22 nt, Human
auguuuaugcaaacaugugagu

SEQ ID NO: 532872 - RNA, 22 nt, Human
ccagagucauuuugagucauaa

SEQ ID NO: 532873 - RNA, 22 nt, Human
cagaaugggaaggacugcaguu

SEQ ID NO: 532874 - RNA, 22 nt, Human
cagggccucauggccggggugc

SEQ ID NO: 532875 - RNA, 22 nt, Human
gaggccugcuuuggcacucugg

SEQ ID NO: 532876 - RNA, 22 nt, Human
uaugcacauugguuuccucauu

SEQ ID NO: 532877 - RNA, 22 nt, Human
uacauauagacaguuacucuag

SEQ ID NO: 532878 - RNA, 22 nt, Human
cugggagcccugacuagccugg

SEQ ID NO: 532879 - RNA, 22 nt, Human
ggcuucugaaaucucugugcgu

SEQ ID NO: 532880 - RNA, 22 nt, Human
cagaguguauucugcaguugca

SEQ ID NO: 532881 - RNA, 22 nt, Human
caaagcagugauccuuaaagga

SEQ ID NO: 532882 - RNA, 22 nt, Human
agcagcugucccuuaacaucag

SEQ ID NO: 532883 - RNA, 22 nt, Human
ugaaugauuugggugcauucag

SEQ ID NO: 532884 - RNA, 22 nt, Human
accucugcuucccggguucaag

SEQ ID NO: 532885 - RNA, 22 nt, Human
gcagggcagaaggugcugagga

SEQ ID NO: 532886 - RNA, 19 nt, Human
cugggagguguucagagaa

SEQ ID NO: 532887 - RNA, 22 nt, Human
guggccaggccgacugccaggc

SEQ ID NO: 532888 - RNA, 22 nt, Human
acaugauauuaaugucuuauuu

SEQ ID NO: 532889 - RNA, 22 nt, Human
ucaggcuggagugcaguggcgc

SEQ ID NO: 532890 - RNA, 22 nt, Human
cugggcacuuuggggagccuac

SEQ ID NO: 532891 - RNA, 22 nt, Human
uggcaguccccugugccuggaa

SEQ ID NO: 532892 - RNA, 22 nt, Human
ugggcuccaauuuguccuuuca

SEQ ID NO: 532893 - RNA, 22 nt, Human
gggcacaggaauuugggaugug

SEQ ID NO: 532894 - RNA, 21 nt, Human
cuucagcaaauacuuggcagg

SEQ ID NO: 532895 - RNA, 22 nt, Human
ucacaauuguuuuuaggaucaa

SEQ ID NO: 532896 - RNA, 22 nt, Human
caugaagcucuugcaccucuag

SEQ ID NO: 532897 - RNA, 22 nt, Human
ucccagagcugauaagccuuua

SEQ ID NO: 532898 - RNA, 22 nt, Human
caggaagagguaucaccgagca

SEQ ID NO: 532899 - RNA, 22 nt, Human
aggacaguguggaagagggugc

SEQ ID NO: 532900 - RNA, 18 nt, Human
agcaggugugcagaaugu

SEQ ID NO: 532901 - RNA, 22 nt, Human
ugggcagagaguagaggcaacg

SEQ ID NO: 532902 - RNA, 19 nt, Human
auaaauaaaaagugggaga

SEQ ID NO: 532903 - RNA, 22 nt, Human
aaggggaauagaguggguugug

SEQ ID NO: 532904 - RNA, 23 nt, Human
cccauuuucauguuaacuccugg

SEQ ID NO: 532905 - RNA, 22 nt, Human
uucugagacaauugagagucua

SEQ ID NO: 532906 - RNA, 22 nt, Human
ugaugcuucacgcugaauaugc

SEQ ID NO: 532907 - RNA, 22 nt, Human
uuaugauuugccacagauuggu

SEQ ID NO: 532908 - RNA, 22 nt, Human
agaaauuauuagugaauagucu

SEQ ID NO: 532909 - RNA, 22 nt, Human
uuugcauuguaauauuuaguuc

SEQ ID NO: 532910 - RNA, 21 nt, Human
uccaagcucaacucccuuccu

SEQ ID NO: 532911 - RNA, 22 nt, Human
ucuuuccagaggaauuuuuaga

SEQ ID NO: 532912 - RNA, 21 nt, Human
gccugcaguuuugaagcccuu

SEQ ID NO: 532913 - RNA, 22 nt, Human
ggcugagccuggagcaucuggu

SEQ ID NO: 532914 - RNA, 22 nt, Human
accuggcacuacaggcaccugu

SEQ ID NO: 532915 - RNA, 22 nt, Human
uucaacaucauuguaagccucu

SEQ ID NO: 532916 - RNA, 22 nt, Human
gucagagauggcaugaaagauu

SEQ ID NO: 532917 - RNA, 22 nt, Human
gaacagaauuaccgaagaucug

SEQ ID NO: 532918 - RNA, 22 nt, Human
guuagaaacacauucuuauuga

SEQ ID NO: 532919 - RNA, 22 nt, Human
ugaaacacugcgauaaaauccu

SEQ ID NO: 532920 - RNA, 21 nt, Human
agauguuucccccuuggcuuc

SEQ ID NO: 532921 - RNA, 22 nt, Human
aagggagacaguugugugagga

SEQ ID NO: 532922 - RNA, 22 nt, Human
cccagagucucugcucuugccu

SEQ ID NO: 532923 - RNA, 21 nt, Human
uuuguucauagcucacucuuu

SEQ ID NO: 532924 - RNA, 22 nt, Human
cuguggaguggggaguacuggu

SEQ ID NO: 532925 - RNA, 22 nt, Human
cccacucuggcucccuucuagu

SEQ ID NO: 532926 - RNA, 22 nt, Human
cucagacuggggcucccugagu

SEQ ID NO: 532927 - RNA, 22 nt, Human
ggccucuggcaggcaggcccuc

SEQ ID NO: 532928 - RNA, 19 nt, Human
cugcugggugcugagggag

SEQ ID NO: 532929 - RNA, 22 nt, Human
ugcucuguugugcaugugggau

SEQ ID NO: 532930 - RNA, 22 nt, Human
cuauuugucacaacugguguuu

SEQ ID NO: 532931 - RNA, 22 nt, Human
ucagaugguacuaauuuaagga

SEQ ID NO: 532932 - RNA, 22 nt, Human
guggccugggguuuguucugag

SEQ ID NO: 532933 - RNA, 22 nt, Human
aaguaugacauuuaagacaauu

SEQ ID NO: 532934 - RNA, 22 nt, Human
gaggcagugaacaauuccugug

SEQ ID NO: 532935 - RNA, 22 nt, Human
ucccauggauagugaccuuguu

SEQ ID NO: 532936 - RNA, 22 nt, Human
aauaucagcucugucacuuacu

SEQ ID NO: 532937 - RNA, 21 nt, Human
uucucaugggauaaguacaug

SEQ ID NO: 532938 - RNA, 22 nt, Human
uucaaacacugcuuugagaggg

SEQ ID NO: 532939 - RNA, 22 nt, Human
agaauaucguagcauauuaucu

SEQ ID NO: 532940 - RNA, 22 nt, Human
ucucuucugaaaccugucuuua

SEQ ID NO: 532941 - RNA, 22 nt, Human
agugucaaaucagcaucugggu

SEQ ID NO: 532942 - RNA, 22 nt, Human
augauucagggaguuuucagga

SEQ ID NO: 532943 - RNA, 22 nt, Human
ggcccaucucuugcucuggguu

SEQ ID NO: 532944 - RNA, 22 nt, Human
caacaguguugcaaucugaaaa

SEQ ID NO: 532945 - RNA, 22 nt, Human
uccuuugguucucuaagaugcu

SEQ ID NO: 532946 - RNA, 22 nt, Human
ccugcugggacgugugguugcc

SEQ ID NO: 532947 - RNA, 22 nt, Human
ucuguucauaguaguguauaug

SEQ ID NO: 532948 - RNA, 22 nt, Human
auuccacagcuacaucaaucua

SEQ ID NO: 532949 - RNA, 22 nt, Human
ucaggaagaaagaagggagugu

SEQ ID NO: 532950 - RNA, 22 nt, Human
cuguccucuguccucagcagga

SEQ ID NO: 532951 - RNA, 22 nt, Human
agcuguggggcaggcagcgagg

SEQ ID NO: 532952 - RNA, 19 nt, Human
augucuguugaauuucaua

SEQ ID NO: 532953 - RNA, 22 nt, Human
uuugcauuuguucaaguauuga

SEQ ID NO: 532954 - RNA, 22 nt, Human
aagugagugguaaggagcaugg

SEQ ID NO: 532955 - RNA, 22 nt, Human
cauuucaguguuauucuaauuu

SEQ ID NO: 532956 - RNA, 22 nt, Human
uacaguucacaguaucauaaau

SEQ ID NO: 532957 - RNA, 19 nt, Human
ccucuccgcccaccagccc

SEQ ID NO: 532958 - RNA, 22 nt, Human
ggaaaaaugacacauaucucaa

SEQ ID NO: 532959 - RNA, 22 nt, Human
aauacagucuuacuagaaaauc

SEQ ID NO: 532960 - RNA, 22 nt, Human
aucccuggacggcgccucccca

SEQ ID NO: 532961 - RNA, 22 nt, Human
caagcuccuuacauccacaggg

SEQ ID NO: 532962 - RNA, 23 nt, Human
uuugcaaauuggacacaaccaca

SEQ ID NO: 532963 - RNA, 22 nt, Human
ccaggagcaacuugaaggcaag

SEQ ID NO: 532964 - RNA, 22 nt, Human
aguggacucuucccagugcuug

SEQ ID NO: 532965 - RNA, 22 nt, Human
uucuuucuuagcaaucuauggu

SEQ ID NO: 532966 - RNA, 22 nt, Human
gaaggagggugcggaucugagc

SEQ ID NO: 532967 - RNA, 22 nt, Human
auucucaauggcuacuuucaua

SEQ ID NO: 532968 - RNA, 22 nt, Human
uacugcuugguguuguuguauc

SEQ ID NO: 532969 - RNA, 22 nt, Human
uuggcucaggaccccugugacu

SEQ ID NO: 532970 - RNA, 22 nt, Human
ugaggcucaagaaagauuuguu

SEQ ID NO: 532971 - RNA, 22 nt, Human
ccagccugguucagaauuggcu

SEQ ID NO: 532972 - RNA, 16 nt, Human
ggaggaaggcauagug

SEQ ID NO: 532973 - RNA, 22 nt, Human
gauauuuucagucuccuuucaa

SEQ ID NO: 532974 - RNA, 22 nt, Human
ucaaggcuaaacuuucagagua

SEQ ID NO: 532975 - RNA, 22 nt, Human
auuaaauuuucacuaggcuccc

SEQ ID NO: 532976 - RNA, 22 nt, Human
caugucuuuguuaugcucacca

SEQ ID NO: 532977 - RNA, 22 nt, Human
uauccaaaguuucucagaaacu

SEQ ID NO: 532978 - RNA, 22 nt, Human
ugcagggcacggugcgcguggg

SEQ ID NO: 532979 - RNA, 22 nt, Human
ugacuccaaacagaaaacgaau

SEQ ID NO: 532980 - RNA, 21 nt, Human
uucagcuuaugugucacuugc

SEQ ID NO: 532981 - RNA, 22 nt, Human
aaauaugagggugaugcccaga

SEQ ID NO: 532982 - RNA, 22 nt, Human
cacugcuuauaaauucuaggca

SEQ ID NO: 532983 - RNA, 22 nt, Human
agcaaugacuuugaaaucauga

SEQ ID NO: 532984 - RNA, 22 nt, Human
auugaaagcauggauuuggauu

SEQ ID NO: 532985 - RNA, 20 nt, Human
uauucaacuuuaaaaacuua

SEQ ID NO: 532986 - RNA, 22 nt, Human
ggaaucagaugaggggcagagc

SEQ ID NO: 532987 - RNA, 22 nt, Human
aguggcaggcagaagcuucuca

SEQ ID NO: 532988 - RNA, 22 nt, Human
auguacaguggaaacuaacaaa

SEQ ID NO: 532989 - RNA, 22 nt, Human
cuucuuuucauggcuugggaag

SEQ ID NO: 532990 - RNA, 22 nt, Human
gcugaggcuccucgggaggaca

SEQ ID NO: 532991 - RNA, 20 nt, Human
ucagugauuaucucugagug

SEQ ID NO: 532992 - RNA, 22 nt, Human
cagagcagaaaccugggugauu

SEQ ID NO: 532993 - RNA, 22 nt, Human
gggaccaggugggugcauuccg

SEQ ID NO: 532994 - RNA, 22 nt, Human
ucugccuggcggacucccggaa

SEQ ID NO: 532995 - RNA, 22 nt, Human
gcuguauuuaacaacuggcuca

SEQ ID NO: 532996 - RNA, 22 nt, Human
ucuuccucuagaucugaggccc

SEQ ID NO: 532997 - RNA, 22 nt, Human
ucuguguaagaccagugcuggg

SEQ ID NO: 532998 - RNA, 22 nt, Human
ccuggaguuuuuugguugacuc

SEQ ID NO: 532999 - RNA, 22 nt, Human
uuaauacagucuccagaaguaa

SEQ ID NO: 533000 - RNA, 22 nt, Human
ucucccaagggcacauucaagg

SEQ ID NO: 533001 - RNA, 22 nt, Human
gugcucagggccuggcugggga

SEQ ID NO: 533002 - RNA, 22 nt, Human
uauacagauaucuaagauguaa

SEQ ID NO: 533003 - RNA, 21 nt, Human
uucaaagacuugaugcugacc

SEQ ID NO: 533004 - RNA, 22 nt, Human
gaaccucagugaaacuggaggu

SEQ ID NO: 533005 - RNA, 22 nt, Human
ucuccugguauguaugcaccug

SEQ ID NO: 533006 - RNA, 19 nt, Human
gaaggcugaaaugaagcac

SEQ ID NO: 533007 - RNA, 22 nt, Human
agggaccucuucuugcagcuga

SEQ ID NO: 533008 - RNA, 22 nt, Human
ucccuggagguguuugcucagg

SEQ ID NO: 533009 - RNA, 22 nt, Human
uuugcauuucuaaugagcuccg

SEQ ID NO: 533010 - RNA, 22 nt, Human
uauaucauggagauuaacauuc

SEQ ID NO: 533011 - RNA, 22 nt, Human
aaaacaguuuuugcuaacugcu

SEQ ID NO: 533012 - RNA, 19 nt, Human
uccuuccccccagcacaga

SEQ ID NO: 533013 - RNA, 22 nt, Human
gucagcuaugucuguuguugag

SEQ ID NO: 533014 - RNA, 22 nt, Human
uggcucaggggucuggcucugu

SEQ ID NO: 533015 - RNA, 22 nt, Human
ucuauuuuguuuccagcucuac

SEQ ID NO: 533016 - RNA, 22 nt, Human
cugggccucaugcacagagaug

SEQ ID NO: 533017 - RNA, 22 nt, Human
ucauacaaggaggguguucaaa

SEQ ID NO: 533018 - RNA, 22 nt, Human
cucugcagaauuugagcugcuc

SEQ ID NO: 533019 - RNA, 22 nt, Human
ccugucuggugaggggguugca

SEQ ID NO: 533020 - RNA, 22 nt, Human
gaguccaguaguuaggacagag

SEQ ID NO: 533021 - RNA, 23 nt, Human
cagggcugggcuugguguuaggc

SEQ ID NO: 533022 - RNA, 22 nt, Human
ggucccugguucccucugagcu

SEQ ID NO: 533023 - RNA, 21 nt, Human
uuacaaagcaagugcuguguc

SEQ ID NO: 533024 - RNA, 22 nt, Human
aacaaaagccgaaguagguguc

SEQ ID NO: 533025 - RNA, 22 nt, Human
auggacagugugaagcagauag

SEQ ID NO: 533026 - RNA, 22 nt, Human
gcuuggaaguaggauugggaga

SEQ ID NO: 533027 - RNA, 22 nt, Human
cccuggcucugccucagagccc

SEQ ID NO: 533028 - RNA, 22 nt, Human
gcugucuucacuuccugguuuc

SEQ ID NO: 533029 - RNA, 22 nt, Human
acuggggauuagggacucagug

SEQ ID NO: 533030 - RNA, 22 nt, Human
caucauuucacuuagaugaagu

SEQ ID NO: 533031 - RNA, 22 nt, Human
cccugcuuucaaccuucuagcu

SEQ ID NO: 533032 - RNA, 22 nt, Human
ccuuggagcggucagcacuggu

SEQ ID NO: 533033 - RNA, 21 nt, Human
agcagaggcagaauguaugca

SEQ ID NO: 533034 - RNA, 22 nt, Human
uaauacaaggcaggaagcagua

SEQ ID NO: 533035 - RNA, 21 nt, Human
ggaaggcuaugguguauuuuu

SEQ ID NO: 533036 - RNA, 22 nt, Human
agcccaagcuaugaggugaccu

SEQ ID NO: 533037 - RNA, 20 nt, Human
agagugagacuccaucucag

SEQ ID NO: 533038 - RNA, 22 nt, Human
ggcuuccuuucacuacccucag

SEQ ID NO: 533039 - RNA, 19 nt, Human
cauuuuaagcauccccagu

SEQ ID NO: 533040 - RNA, 22 nt, Human
cuuugaaaacuuaaauaacagc

SEQ ID NO: 533041 - RNA, 22 nt, Human
uaaaagaagcuucaaggccggc

SEQ ID NO: 533042 - RNA, 18 nt, Human
uggcagccagcugcuccu

SEQ ID NO: 533043 - RNA, 22 nt, Human
ucacaguacuccccaaaguuuc

SEQ ID NO: 533044 - RNA, 22 nt, Human
uuaagcucucauuauuauuauu

SEQ ID NO: 533045 - RNA, 22 nt, Human
cucagcagcagggaagagguca

SEQ ID NO: 533046 - RNA, 22 nt, Human
agcagaagugccuuagcaauca

SEQ ID NO: 533047 - RNA, 22 nt, Human
uggaagagguggaaguggcuuc

SEQ ID NO: 533048 - RNA, 22 nt, Human
agguggcagagcuggcccagcg

SEQ ID NO: 533049 - RNA, 23 nt, Human
uucuuuguggauaaucuccagug

SEQ ID NO: 533050 - RNA, 22 nt, Human
agacaaaggauuaaugaugaug

SEQ ID NO: 533051 - RNA, 22 nt, Human
gccuccugaaaggaagagcucc

SEQ ID NO: 533052 - RNA, 22 nt, Human
aaaugcacaggagaaccaauuc

SEQ ID NO: 533053 - RNA, 22 nt, Human
gccagagcacaggcugguagua

SEQ ID NO: 533054 - RNA, 22 nt, Human
caucauuuuuguaagcugguag

SEQ ID NO: 533055 - RNA, 22 nt, Human
ggcagagcuuguuccuucuguu

SEQ ID NO: 533056 - RNA, 22 nt, Human
acaccacaaguaacucuuuucc

SEQ ID NO: 533057 - RNA, 22 nt, Human
gggcugcugcugccagcgacac

SEQ ID NO: 533058 - RNA, 22 nt, Human
ccucuggcaacuucacagccca

SEQ ID NO: 533059 - RNA, 22 nt, Human
auguagagcaguguuguccaau

SEQ ID NO: 533060 - RNA, 20 nt, Human
caggcacacucauuccugcu

SEQ ID NO: 533061 - RNA, 22 nt, Human
ugggcaggggcccugcuuccgu

SEQ ID NO: 533062 - RNA, 22 nt, Human
agguaaagacagugaaagaggg

SEQ ID NO: 533063 - RNA, 22 nt, Human
uggcaagggauuguggagaacu

SEQ ID NO: 533064 - RNA, 22 nt, Human
ccugcagaagaguccagcucau

SEQ ID NO: 533065 - RNA, 22 nt, Human
gcagcugagagaagaacagggc

SEQ ID NO: 533066 - RNA, 22 nt, Human
uaaaguuuggcagacaauaaca

SEQ ID NO: 533067 - RNA, 22 nt, Human
ucagagcugcccaugcaagggg

SEQ ID NO: 533068 - RNA, 22 nt, Human
cagaacagaaguaaaauuuacc

SEQ ID NO: 533069 - RNA, 22 nt, Human
ccuggcuuccuggagcucacaa

SEQ ID NO: 533070 - RNA, 22 nt, Human
cugcucugugguccaugagaca

SEQ ID NO: 533071 - RNA, 22 nt, Human
ucucaggacuuugggaagcuca

SEQ ID NO: 533072 - RNA, 20 nt, Human
ucuuuagauuuaucuuaugu

SEQ ID NO: 533073 - RNA, 22 nt, Human
aguguuaagagaaaauucugcu

SEQ ID NO: 533074 - RNA, 22 nt, Human
aggccagacagcuagaaacagg

SEQ ID NO: 533075 - RNA, 22 nt, Human
aaggugggguccugucaucuga

SEQ ID NO: 533076 - RNA, 22 nt, Human
gaggcagagaccuucaggaccu

SEQ ID NO: 533077 - RNA, 22 nt, Human
cagugggcugugauggauucac

SEQ ID NO: 533078 - RNA, 22 nt, Human
uuugcauuuguuuagaaccuga

SEQ ID NO: 533079 - RNA, 22 nt, Human
cugcugugcagacagacucucu

SEQ ID NO: 533080 - RNA, 22 nt, Human
agagucugauauuuguaccaga

SEQ ID NO: 533081 - RNA, 22 nt, Human
acauuugacucuguucauauua

SEQ ID NO: 533082 - RNA, 22 nt, Human
gugucauuaaccaccaugcaaa

SEQ ID NO: 533083 - RNA, 22 nt, Human
uccaggagguagugcuuaauuu

SEQ ID NO: 533084 - RNA, 23 nt, Human
ucugggcugagacuuggaagguc

SEQ ID NO: 533085 - RNA, 22 nt, Human
aaaaaccuuucccauacuaaga

SEQ ID NO: 533086 - RNA, 22 nt, Human
acugggccuugccauggcagcc

SEQ ID NO: 533087 - RNA, 15 nt, Human
gcagaugggggugau

SEQ ID NO: 533088 - RNA, 22 nt, Human
auccaaaccuggacaugagugg

SEQ ID NO: 533089 - RNA, 20 nt, Human
cugggaggucuuccaaauca

SEQ ID NO: 533090 - RNA, 22 nt, Human
ucuguuuuugaggcuaucuucu

SEQ ID NO: 533091 - RNA, 22 nt, Human
ggagggguggucaccuggcagg

SEQ ID NO: 533092 - RNA, 22 nt, Human
agaaggcacucacacuggcacg

SEQ ID NO: 533093 - RNA, 22 nt, Human
ggugaggcagguggcugcugag

SEQ ID NO: 533094 - RNA, 16 nt, Human
uggaaggggucuccgg

SEQ ID NO: 533095 - RNA, 22 nt, Human
agacccugucaguguuaggaaa

SEQ ID NO: 533096 - RNA, 22 nt, Human
aacugcaaaauaaucaaguugu

SEQ ID NO: 533097 - RNA, 22 nt, Human
gcagcuuuaaacauuggaaaua

SEQ ID NO: 533098 - RNA, 22 nt, Human
aaacuucagugaaugacuuaug

SEQ ID NO: 533099 - RNA, 22 nt, Human
augcaagauguauagaagacuu

SEQ ID NO: 533100 - RNA, 22 nt, Human
cagagcugcgcuuuuuccuggu

SEQ ID NO: 533101 - RNA, 21 nt, Human
guggcccugguguggcugcac

SEQ ID NO: 533102 - RNA, 22 nt, Human
ugggcagaaaucaguaucagau

SEQ ID NO: 533103 - RNA, 22 nt, Human
acaagagauuaucuacagauga

SEQ ID NO: 533104 - RNA, 22 nt, Human
gaucuuuucagaauuuaucagu

SEQ ID NO: 533105 - RNA, 22 nt, Human
uauuuugucuucugcucaucac

SEQ ID NO: 533106 - RNA, 22 nt, Human
ggcugcuggaagacugaacaag

SEQ ID NO: 533107 - RNA, 22 nt, Human
gcacagccagcaucugagggau

SEQ ID NO: 533108 - RNA, 22 nt, Human
ugugugccagccuacgaggagc

SEQ ID NO: 533109 - RNA, 22 nt, Human
gaagcagcaaguauaggacagg

SEQ ID NO: 533110 - RNA, 22 nt, Human
ugccugggugcuggcuggucac

SEQ ID NO: 533111 - RNA, 22 nt, Human
cugcucuggucucuucauguuu

SEQ ID NO: 533112 - RNA, 22 nt, Human
uggugagaccuuguuccuuaug

SEQ ID NO: 533113 - RNA, 22 nt, Human
gcugugcucaacgugccuuccu

SEQ ID NO: 533114 - RNA, 22 nt, Human
cugaaauguuaaauacuuggcu

SEQ ID NO: 533115 - RNA, 22 nt, Human
cagauaaauagauagauaaacu

SEQ ID NO: 533116 - RNA, 20 nt, Human
ggcagggcaucaacagcucu

SEQ ID NO: 533117 - RNA, 22 nt, Human
guguuuccuaguuuaaugaaug

SEQ ID NO: 533118 - RNA, 22 nt, Human
uaggccaguggcagguugugug

SEQ ID NO: 533119 - RNA, 22 nt, Human
cuggagccgcauggagcaggga

SEQ ID NO: 533120 - RNA, 22 nt, Human
caggccucuauggucagcugag

SEQ ID NO: 533121 - RNA, 22 nt, Human
gggcugagaauucagcuuuccu

SEQ ID NO: 533122 - RNA, 18 nt, Human
cacagugacuucugauac

SEQ ID NO: 533123 - RNA, 22 nt, Human
agggcagcagcccauggcucug

SEQ ID NO: 533124 - RNA, 22 nt, Human
cgccggcuugaggcaggcggca

SEQ ID NO: 533125 - RNA, 22 nt, Human
uugcccagagucacccagcuca

SEQ ID NO: 533126 - RNA, 22 nt, Human
gaaggaaaaauacucuguaagg

SEQ ID NO: 533127 - RNA, 22 nt, Human
aauaauuuugagagccuggaaa

SEQ ID NO: 533128 - RNA, 22 nt, Human
uuuauacuccacucugcaagcg

SEQ ID NO: 533129 - RNA, 22 nt, Human
uccuugaauauaauaacaguag

SEQ ID NO: 533130 - RNA, 22 nt, Human
gcugugcagguccccacugccu

SEQ ID NO: 533131 - RNA, 22 nt, Human
ucagcaguggcucucaugcagu

SEQ ID NO: 533132 - RNA, 22 nt, Human
gugcccuguugcacacuugagg

SEQ ID NO: 533133 - RNA, 22 nt, Human
uggccugccugggagcagcagg

SEQ ID NO: 533134 - RNA, 19 nt, Human
uccccagcaccucugaguc

SEQ ID NO: 533135 - RNA, 22 nt, Human
uguuuauucauggcuaaugaaa

SEQ ID NO: 533136 - RNA, 22 nt, Human
agugucauuuuguccaucuucu

SEQ ID NO: 533137 - RNA, 22 nt, Human
aucuggcuccuacacuugaaga

SEQ ID NO: 533138 - RNA, 22 nt, Human
caauaugcaagcuauuaaguau

SEQ ID NO: 533139 - RNA, 18 nt, Human
uucagcagcagacacacu

SEQ ID NO: 533140 - RNA, 22 nt, Human
ucaaguguaguggugucagguc

SEQ ID NO: 533141 - RNA, 22 nt, Human
guuucuggcgccggggcaggcc

SEQ ID NO: 533142 - RNA, 22 nt, Human
caucuccuuuggucuacuucca

SEQ ID NO: 533143 - RNA, 22 nt, Human
agcugucuuucugccuccugau

SEQ ID NO: 533144 - RNA, 20 nt, Human
cacguuuuuccacuagcaaa

SEQ ID NO: 533145 - RNA, 22 nt, Human
auuuaguguguauugcuauuau

SEQ ID NO: 533146 - RNA, 22 nt, Human
uuugaaacucaugaucaucacu

SEQ ID NO: 533147 - RNA, 20 nt, Human
ugaaggccagcagcauaggg

SEQ ID NO: 533148 - RNA, 22 nt, Human
agguauuauuagcaucucuauu

SEQ ID NO: 533149 - RNA, 20 nt, Human
ucugaggcugagcucuacuu

SEQ ID NO: 533150 - RNA, 21 nt, Human
uuccagaaaucucuuucuuca

SEQ ID NO: 533151 - RNA, 22 nt, Human
gcuccaggagagggaagcagau

SEQ ID NO: 533152 - RNA, 22 nt, Human
uagcacaggucuuguugccauu

SEQ ID NO: 533153 - RNA, 22 nt, Human
aacagcagcaaguaagcagguc

SEQ ID NO: 533154 - RNA, 22 nt, Human
ccagcuggaagagugcagaacu

SEQ ID NO: 533155 - RNA, 22 nt, Human
gggauggacuuggggacuccag

SEQ ID NO: 533156 - RNA, 22 nt, Human
uucaacauuugaaaugaaugaa

SEQ ID NO: 533157 - RNA, 22 nt, Human
cagcaauauacacagucuaugg

SEQ ID NO: 533158 - RNA, 22 nt, Human
ucagagaaaugaaguagggauu

SEQ ID NO: 533159 - RNA, 22 nt, Human
aaggcacauuccugaaaacaau

SEQ ID NO: 533160 - RNA, 23 nt, Human
uuggggacaaacaugcuacuuuc

SEQ ID NO: 533161 - RNA, 22 nt, Human
cagccacguagcccuuggccgu

SEQ ID NO: 533162 - RNA, 22 nt, Human
gcagacaggggcuuaggaaagg

SEQ ID NO: 533163 - RNA, 22 nt, Human
uucaaagauaauuaccaaacau

SEQ ID NO: 533164 - RNA, 22 nt, Human
ccaaggagaaugacaccaugga

SEQ ID NO: 533165 - RNA, 22 nt, Human
auauauuacaaaagaggaagga

SEQ ID NO: 533166 - RNA, 22 nt, Human
uucuguaugccaauggguuuuu

SEQ ID NO: 533167 - RNA, 22 nt, Human
ggcuucucgugccgaagcaaga

SEQ ID NO: 533168 - RNA, 22 nt, Human
auuauuaaagcuacaucaagga

SEQ ID NO: 533169 - RNA, 19 nt, Human
uacuuuuucaggacagagu

SEQ ID NO: 533170 - RNA, 22 nt, Human
cuuuaugguaaguauagaugac

SEQ ID NO: 533171 - RNA, 22 nt, Human
uucauagaaagugcuuagauug

SEQ ID NO: 533172 - RNA, 22 nt, Human
acagagccacuuuggugccuac

SEQ ID NO: 533173 - RNA, 22 nt, Human
cccaggcacaccccgaacggaa

SEQ ID NO: 533174 - RNA, 18 nt, Human
uauaaacacacuuagguu

SEQ ID NO: 533175 - RNA, 22 nt, Human
uggcaucucaaacaggcagauu

SEQ ID NO: 533176 - RNA, 22 nt, Human
ucuguaaaacaauauuguauuc

SEQ ID NO: 533177 - RNA, 22 nt, Human
ccaacucugaaaauccagauau

SEQ ID NO: 533178 - RNA, 21 nt, Human
accucaagcaacaaccaaggu

SEQ ID NO: 533179 - RNA, 22 nt, Human
agaaagcacucugucuuuuacc

SEQ ID NO: 533180 - RNA, 22 nt, Human
aauuucaaacuaauaggaacca

SEQ ID NO: 533181 - RNA, 22 nt, Human
acugugauguucucuaucuugg

SEQ ID NO: 533182 - RNA, 21 nt, Human
uaaggccaagucuauuucugu

SEQ ID NO: 533183 - RNA, 22 nt, Human
guggugcaggccagcaggggcg

SEQ ID NO: 533184 - RNA, 22 nt, Human
ugcagggccagacuggguugga

SEQ ID NO: 533185 - RNA, 22 nt, Human
gucugcugcagagcauggcuuu

SEQ ID NO: 533186 - RNA, 22 nt, Human
caggagcucuuaaggaugugau

SEQ ID NO: 533187 - RNA, 19 nt, Human
augauggucccauucaccu

SEQ ID NO: 533188 - RNA, 22 nt, Human
cacauuucucuaccucacacaa

SEQ ID NO: 533189 - RNA, 22 nt, Human
ccugagggaaggaugcuaccca

SEQ ID NO: 533190 - RNA, 22 nt, Human
ugcccugcagugagugcgucug

SEQ ID NO: 533191 - RNA, 22 nt, Human
aggcacugagaggcuguguugc

SEQ ID NO: 533192 - RNA, 19 nt, Human
auggaaaaugccagacuga

SEQ ID NO: 533193 - RNA, 22 nt, Human
ccugcuguagggccccuggggc

SEQ ID NO: 533194 - RNA, 22 nt, Human
uucaaagugcuuuuaaccuuua

SEQ ID NO: 533195 - RNA, 22 nt, Human
ccugggcagggagaccaggcuc

SEQ ID NO: 533196 - RNA, 19 nt, Human
agugcagggagcacccuca

SEQ ID NO: 533197 - RNA, 22 nt, Human
acaggcagguugagaaacauuu

SEQ ID NO: 533198 - RNA, 22 nt, Human
cauugcacuccagcuugggcaa

SEQ ID NO: 533199 - RNA, 22 nt, Human
uaaagcagugcaaaagcguuuu

SEQ ID NO: 533200 - RNA, 22 nt, Human
agugcaaaauucagaagcaauu

SEQ ID NO: 533201 - RNA, 22 nt, Human
ugaggccugcuuggaauugaau

SEQ ID NO: 533202 - RNA, 22 nt, Human
uuccaagaguaaauucaaauug

SEQ ID NO: 533203 - RNA, 20 nt, Human
ccagguggugccuggagagg

SEQ ID NO: 533204 - RNA, 20 nt, Human
cacagcuugccuuuuaugac

SEQ ID NO: 533205 - RNA, 22 nt, Human
caggcugaggcaguaggguuug

SEQ ID NO: 533206 - RNA, 22 nt, Human
ucuuuccuagaggcugaugagu

SEQ ID NO: 533207 - RNA, 22 nt, Human
uagagcuggaaaacugcaggua

SEQ ID NO: 533208 - RNA, 22 nt, Human
gcagucaguaaggcagccagaa

SEQ ID NO: 533209 - RNA, 22 nt, Human
acaaagcuagagaagagaauug

SEQ ID NO: 533210 - RNA, 22 nt, Human
uaguggagaguuguuuugugca

SEQ ID NO: 533211 - RNA, 22 nt, Human
ugccugugcccuuugcugggag

SEQ ID NO: 533212 - RNA, 19 nt, Human
uuugaaagaguuuuauugg

SEQ ID NO: 533213 - RNA, 22 nt, Human
aagaaucauuguaaaguucugu

SEQ ID NO: 533214 - RNA, 22 nt, Human
gggccaguagcaccugugugga

SEQ ID NO: 533215 - RNA, 22 nt, Human
uggaggaaguggcuggccagaa

SEQ ID NO: 533216 - RNA, 22 nt, Human
ugcagccccugaaaauggcagc

SEQ ID NO: 533217 - RNA, 19 nt, Human
cagagcagugguuccugaa

SEQ ID NO: 533218 - RNA, 22 nt, Human
ugcaggcuccaggugcacauau

SEQ ID NO: 533219 - RNA, 22 nt, Human
gagauggccagugccaggacaa

SEQ ID NO: 533220 - RNA, 22 nt, Human
uguuuuucaaauauugcucugu

SEQ ID NO: 533221 - RNA, 22 nt, Human
gaggugucccgcaguccccaag

SEQ ID NO: 533222 - RNA, 22 nt, Human
gggccuucuaguuagccccaau

SEQ ID NO: 533223 - RNA, 22 nt, Human
accaaggaagaaucuauuugag

SEQ ID NO: 533224 - RNA, 22 nt, Human
auuugaaccacucagaacucau

SEQ ID NO: 533225 - RNA, 22 nt, Human
cuuggagugaaugggggcaggu

SEQ ID NO: 533226 - RNA, 19 nt, Human
cagguggcgcucuacaggg

SEQ ID NO: 533227 - RNA, 18 nt, Human
uccugccugcgggcuccc

SEQ ID NO: 533228 - RNA, 22 nt, Human
cugggcugcaguuccugguccu

SEQ ID NO: 533229 - RNA, 22 nt, Human
aauaugcauuauacagacugau

SEQ ID NO: 533230 - RNA, 22 nt, Human
ggcucaccauggccucccugcu

SEQ ID NO: 533231 - RNA, 22 nt, Human
guccagaauuacuacuguuuga

SEQ ID NO: 533232 - RNA, 22 nt, Human
ccugugcucccuauguaucugg

SEQ ID NO: 533233 - RNA, 22 nt, Human
uccucugcuguucugguucuuu

SEQ ID NO: 533234 - RNA, 22 nt, Human
acagaugaaucugugauugcug

SEQ ID NO: 533235 - RNA, 23 nt, Human
cccuggagcuagucugagcagag

SEQ ID NO: 533236 - RNA, 22 nt, Human
caggucccgccccgggcugacc

SEQ ID NO: 533237 - RNA, 22 nt, Human
uauuugaaaguguacaaaaacu

SEQ ID NO: 533238 - RNA, 22 nt, Human
acuugguuggucucacccuguu

SEQ ID NO: 533239 - RNA, 22 nt, Human
cuacauuaaauuggcuuacuua

SEQ ID NO: 533240 - RNA, 22 nt, Human
uagaaauguugguauuaacauu

SEQ ID NO: 533241 - RNA, 22 nt, Human
augcacaagcaagagauaaugg

SEQ ID NO: 533242 - RNA, 22 nt, Human
uuagauaacaguagaauaucaa

SEQ ID NO: 533243 - RNA, 22 nt, Human
guucaaguuucugagcuuuaau

SEQ ID NO: 533244 - RNA, 22 nt, Human
gucagagagggcacgugcacac

SEQ ID NO: 533245 - RNA, 22 nt, Human
gcaggcaggagcccaacugccu

SEQ ID NO: 533246 - RNA, 22 nt, Human
ugaggcucaaggucugguggag

SEQ ID NO: 533247 - RNA, 22 nt, Human
cacacacugacaccuuaucuug

SEQ ID NO: 533248 - RNA, 22 nt, Human
aggcugaggcuggcagcuccag

SEQ ID NO: 533249 - RNA, 22 nt, Human
ggccaguggcucugugcuuggg

SEQ ID NO: 533250 - RNA, 22 nt, Human
uaaacaucaccuucugcaguug

SEQ ID NO: 533251 - RNA, 22 nt, Human
ugaggaggcccagguuggggcu

SEQ ID NO: 533252 - RNA, 14 nt, Human
caggaagacucagc

SEQ ID NO: 533253 - RNA, 17 nt, Human
uuguguguaguucugau

SEQ ID NO: 533254 - RNA, 22 nt, Human
ggggacaguuaaagaccaagac

SEQ ID NO: 533255 - RNA, 22 nt, Human
caaaauguucuggcaccuuuaa

SEQ ID NO: 533256 - RNA, 22 nt, Human
cagcaucaccgccauuucugau

SEQ ID NO: 533257 - RNA, 22 nt, Human
gcugaggccccagggugauggg

SEQ ID NO: 533258 - RNA, 22 nt, Human
aaguucaaggcucuagaguucc

SEQ ID NO: 533259 - RNA, 22 nt, Human
uucacacacagcuuccuauugu

SEQ ID NO: 533260 - RNA, 22 nt, Human
gcugggcuccaggccaggguga

SEQ ID NO: 533261 - RNA, 21 nt, Human
cucaggauggcggccuggugg

SEQ ID NO: 533262 - RNA, 23 nt, Human
uggccagguagaggagguaguga

SEQ ID NO: 533263 - RNA, 17 nt, Human
acagggcagaaacagcu

SEQ ID NO: 533264 - RNA, 22 nt, Human
acaauuuuucaaagaagcuuau

SEQ ID NO: 533265 - RNA, 22 nt, Human
acuguguccuauuuccuugaca

SEQ ID NO: 533266 - RNA, 22 nt, Human
gaaaggugccccauaggcagga

SEQ ID NO: 533267 - RNA, 22 nt, Human
uccucuggcccagcugccucug

SEQ ID NO: 533268 - RNA, 22 nt, Human
cagagcuggagcuugaauggag

SEQ ID NO: 533269 - RNA, 22 nt, Human
cuacauuuggagaguauaggaa

SEQ ID NO: 533270 - RNA, 18 nt, Human
ugggagugggaguggaua

SEQ ID NO: 533271 - RNA, 22 nt, Human
cagaggugcauacaggucauua

SEQ ID NO: 533272 - RNA, 22 nt, Human
ugggagcagcuuugcgagggag

SEQ ID NO: 533273 - RNA, 22 nt, Human
caggccugggcuucggggcuga

SEQ ID NO: 533274 - RNA, 22 nt, Human
aaggccuugccgaaggaugcca

SEQ ID NO: 533275 - RNA, 22 nt, Human
cagaguguuucuuugggugggu

SEQ ID NO: 533276 - RNA, 23 nt, Human
agagcaucaugaugcuaagucug

SEQ ID NO: 533277 - RNA, 22 nt, Human
augcuggggccucagaccagaa

SEQ ID NO: 533278 - RNA, 22 nt, Human
cagaagcagugagagaugugca

SEQ ID NO: 533279 - RNA, 22 nt, Human
uauagcaauucagaauacaugu

SEQ ID NO: 533280 - RNA, 22 nt, Human
ggagccuuccagacugcccaca

SEQ ID NO: 533281 - RNA, 22 nt, Human
gugggcagacagugcuuugcag

SEQ ID NO: 533282 - RNA, 23 nt, Human
caugcaaacacuauugcauuugg

SEQ ID NO: 533283 - RNA, 22 nt, Human
agggaugcaguaaaaacuguag

SEQ ID NO: 533284 - RNA, 22 nt, Human
uucaggaaauuugugucacagg

SEQ ID NO: 533285 - RNA, 22 nt, Human
augcaccugaacuccaucagcu

SEQ ID NO: 533286 - RNA, 22 nt, Human
aaaacauugaauugcacacuau

SEQ ID NO: 533287 - RNA, 22 nt, Human
cuguggcuucugcuugggccuc

SEQ ID NO: 533288 - RNA, 22 nt, Human
accuccugaugagaguaaagga

SEQ ID NO: 533289 - RNA, 22 nt, Human
agggcccauagaucgucagcuu

SEQ ID NO: 533290 - RNA, 22 nt, Human
cagaggcaggauaagaacugcg

SEQ ID NO: 533291 - RNA, 22 nt, Human
ugcuaaauaaguggaauagaca

SEQ ID NO: 533292 - RNA, 22 nt, Human
aagcuggagaguuaggugaaua

SEQ ID NO: 533293 - RNA, 22 nt, Human
ucagaggaacacuguuucaugc

SEQ ID NO: 533294 - RNA, 22 nt, Human
agggcagagagaugaaugggau

SEQ ID NO: 533295 - RNA, 22 nt, Human
uucucuuagcuguaaagucaau

SEQ ID NO: 533296 - RNA, 22 nt, Human
uuauuuuuaaaaguucacacag

SEQ ID NO: 533297 - RNA, 22 nt, Human
acauacaaauagagcuguagua

SEQ ID NO: 533298 - RNA, 22 nt, Human
gauuuucaugauaaacuuguga

SEQ ID NO: 533299 - RNA, 22 nt, Human
gcugagaggcacuaucuccgga

SEQ ID NO: 533300 - RNA, 22 nt, Human
agcagggcagugcuucagcucu

SEQ ID NO: 533301 - RNA, 22 nt, Human
ucacugcaaggaggcuucucaa

SEQ ID NO: 533302 - RNA, 22 nt, Human
uaaagcauguuucaguaagguu

SEQ ID NO: 533303 - RNA, 22 nt, Human
cucucugaggaaggagcaucug

SEQ ID NO: 533304 - RNA, 22 nt, Human
acucagaguuuuacccagagac

SEQ ID NO: 533305 - RNA, 22 nt, Human
ucacagaaauaagauaguuauu

SEQ ID NO: 533306 - RNA, 22 nt, Human
augggccuugacacauggagug

SEQ ID NO: 533307 - RNA, 22 nt, Human
aauaaaucaauccuauugguag

SEQ ID NO: 533308 - RNA, 22 nt, Human
gggccugcuggugcuuccauug

SEQ ID NO: 533309 - RNA, 22 nt, Human
ugcauacacaagcauacaugua

SEQ ID NO: 533310 - RNA, 22 nt, Human
gcauuucagaagcaugcccucu

SEQ ID NO: 533311 - RNA, 22 nt, Human
cucagagaaaaggagcaagggu

SEQ ID NO: 533312 - RNA, 22 nt, Human
cugccucucagccugaccgcca

SEQ ID NO: 533313 - RNA, 22 nt, Human
acagcagccugcagcccugugu

SEQ ID NO: 533314 - RNA, 19 nt, Human
ugcagcucagggcaggggc

SEQ ID NO: 533315 - RNA, 22 nt, Human
gcacugcagguggguggagagg

SEQ ID NO: 533316 - RNA, 19 nt, Human
ggaagagaggaaaggugga

SEQ ID NO: 533317 - RNA, 22 nt, Human
uuugugugguggauacugggua

SEQ ID NO: 533318 - RNA, 22 nt, Human
uggaguuccuuugaaaggcucu

SEQ ID NO: 533319 - RNA, 22 nt, Human
gcagggcaugggcccugucugc

SEQ ID NO: 533320 - RNA, 22 nt, Human
uuuaaucaggcaaagcauaaua

SEQ ID NO: 533321 - RNA, 22 nt, Human
guucaauuuagaaagcacaguu

SEQ ID NO: 533322 - RNA, 22 nt, Human
aaggccugggaguacugggaca

SEQ ID NO: 533323 - RNA, 22 nt, Human
uuuucaagagaguguucuaugu

SEQ ID NO: 533324 - RNA, 22 nt, Human
ccagggagccuggugugucagc

SEQ ID NO: 533325 - RNA, 22 nt, Human
acagcugggaacucacacagca

SEQ ID NO: 533326 - RNA, 22 nt, Human
aauggcugccagggcaggaggu

SEQ ID NO: 533327 - RNA, 22 nt, Human
aauucagcaaaaagauacagga

SEQ ID NO: 533328 - RNA, 22 nt, Human
agcucugggccaggaacccuaa

SEQ ID NO: 533329 - RNA, 22 nt, Human
uaauguuugggaaggugcuuug

SEQ ID NO: 533330 - RNA, 23 nt, Human
gggaagugaggagccccucugcc

SEQ ID NO: 533331 - RNA, 22 nt, Human
agcccagguugaggcugcagug

SEQ ID NO: 533332 - RNA, 22 nt, Human
ugcagcaggagccaggccuggu

SEQ ID NO: 533333 - RNA, 22 nt, Human
auucauaaguaaaugauuaccu

SEQ ID NO: 533334 - RNA, 19 nt, Human
ccuguucaugacucugucc

SEQ ID NO: 533335 - RNA, 22 nt, Human
ccaucaguuuuaucugacaaaa

SEQ ID NO: 533336 - RNA, 19 nt, Human
aauaagcuuggguaaaacu

SEQ ID NO: 533337 - RNA, 22 nt, Human
uuugguuuuuaccugcugagag

SEQ ID NO: 533338 - RNA, 22 nt, Human
ggugggaaauaauuaggauuau

SEQ ID NO: 533339 - RNA, 22 nt, Human
gggcucagcugggcgugcuggu

SEQ ID NO: 533340 - RNA, 22 nt, Human
uuuuauguuccugaagcuaucu

SEQ ID NO: 533341 - RNA, 22 nt, Human
gcugguuaggugagggugcgcc

SEQ ID NO: 533342 - RNA, 22 nt, Human
aaaauugaggcucauguuaaau

SEQ ID NO: 533343 - RNA, 22 nt, Human
cauugcacuucugcuuuuccuc

SEQ ID NO: 533344 - RNA, 22 nt, Human
auuuucaaaacaucugcugugu

SEQ ID NO: 533345 - RNA, 22 nt, Human
ucaaaugcacguagagaaaaua

SEQ ID NO: 533346 - RNA, 22 nt, Human
gauaaaauaacuauggaauacu

SEQ ID NO: 533347 - RNA, 22 nt, Human
ucauucuccucuggaaaaggca

SEQ ID NO: 533348 - RNA, 22 nt, Human
guugaaagaucauguggcugcc

SEQ ID NO: 533349 - RNA, 22 nt, Human
ccugugcccucagccuggcucu

SEQ ID NO: 533350 - RNA, 22 nt, Human
ccugggcagugcuggaguugaa

SEQ ID NO: 533351 - RNA, 22 nt, Human
gaggguggccuuuagagcccau

SEQ ID NO: 533352 - RNA, 22 nt, Human
guggggugggcugaguuaggcc

SEQ ID NO: 533353 - RNA, 22 nt, Human
gaaaguauuuaaguccauauuu

SEQ ID NO: 533354 - RNA, 22 nt, Human
auucacagggcuuuccgcaugg

SEQ ID NO: 533355 - RNA, 21 nt, Human
ccuggccaaucugauaggguu

SEQ ID NO: 533356 - RNA, 22 nt, Human
ucuuugaacucuguguauuaac

SEQ ID NO: 533357 - RNA, 22 nt, Human
accaggcagucaccguccagga

SEQ ID NO: 533358 - RNA, 22 nt, Human
ggaggcagaauagagugugggu

SEQ ID NO: 533359 - RNA, 22 nt, Human
aauauguugagucuaucuuuau

SEQ ID NO: 533360 - RNA, 22 nt, Human
ccugacgaaaggcgugcuggag

SEQ ID NO: 533361 - RNA, 22 nt, Human
ggcagggaguggagacucccua

SEQ ID NO: 533362 - RNA, 22 nt, Human
gucacacagggccuccaaauca

SEQ ID NO: 533363 - RNA, 20 nt, Human
uguaaauaggcauuguaguu

SEQ ID NO: 533364 - RNA, 22 nt, Human
ucccacaggaaaguagacauug

SEQ ID NO: 533365 - RNA, 22 nt, Human
uauugaaauccauuacguucuu

SEQ ID NO: 533366 - RNA, 22 nt, Human
ccagguggacuugauuugaaua

SEQ ID NO: 533367 - RNA, 22 nt, Human
ucugcagcgugcaggcuggugc

SEQ ID NO: 533368 - RNA, 22 nt, Human
uagcugucagcaaucaaguggu

SEQ ID NO: 533369 - RNA, 20 nt, Human
uucuuaaagaccucacuuug

SEQ ID NO: 533370 - RNA, 22 nt, Human
cagcugaauucuucagacucca

SEQ ID NO: 533371 - RNA, 22 nt, Human
uggagcaggaaacaucuagagg

SEQ ID NO: 533372 - RNA, 22 nt, Human
cagaggcacaagaaagcaaggc

SEQ ID NO: 533373 - RNA, 22 nt, Human
gagggcuccauuccccgugccc

SEQ ID NO: 533374 - RNA, 21 nt, Human
aggcagcucaggcccagagag

SEQ ID NO: 533375 - RNA, 22 nt, Human
augcuugaaaguuauuucauuu

SEQ ID NO: 533376 - RNA, 22 nt, Human
uccacagaauguaagauccaca

SEQ ID NO: 533377 - RNA, 22 nt, Human
acauucuuucaccuugugucca

SEQ ID NO: 533378 - RNA, 22 nt, Human
aucucacacuggguuugagggu

SEQ ID NO: 533379 - RNA, 22 nt, Human
uucuucaaagaugucuguugga

SEQ ID NO: 533380 - RNA, 22 nt, Human
agugcaaauaucuacgcgguga

SEQ ID NO: 533381 - RNA, 17 nt, Human
gggaaguggagaaagcu

SEQ ID NO: 533382 - RNA, 22 nt, Human
cucagcucugacaggaggcauc

SEQ ID NO: 533383 - RNA, 19 nt, Human
uagcagagaugacuccagc

SEQ ID NO: 533384 - RNA, 22 nt, Human
ucuuccaaaauuagucucaguu

SEQ ID NO: 533385 - RNA, 22 nt, Human
gugagacaauuccucaguagac

SEQ ID NO: 533386 - RNA, 22 nt, Human
ucaggcugaaucauccuagcuu

SEQ ID NO: 533387 - RNA, 20 nt, Human
gggugagauguaggagaggg

SEQ ID NO: 533388 - RNA, 22 nt, Human
ggcaggagggcggacaaugacc

SEQ ID NO: 533389 - RNA, 22 nt, Human
auggagggugguaagacagaga

SEQ ID NO: 533390 - RNA, 21 nt, Human
agcaugcacuacuucaucuua

SEQ ID NO: 533391 - RNA, 22 nt, Human
gucaggauuuuaaaaucccagu

SEQ ID NO: 533392 - RNA, 22 nt, Human
ucauaaacacacuaguaugauu

SEQ ID NO: 533393 - RNA, 22 nt, Human
aagaguuuuagacaaacugauu

SEQ ID NO: 533394 - RNA, 22 nt, Human
uggaaagagguagaggaucugg

SEQ ID NO: 533395 - RNA, 22 nt, Human
uggagggaacccaggcugcucu

SEQ ID NO: 533396 - RNA, 22 nt, Human
ccacucugauuuuggcuccacu

SEQ ID NO: 533397 - RNA, 22 nt, Human
uaaccauauuuuccauuaaguu

SEQ ID NO: 533398 - RNA, 22 nt, Human
ucagcuuggacagcuugguuga

SEQ ID NO: 533399 - RNA, 22 nt, Human
auuuuuucccaguuagccagga

SEQ ID NO: 533400 - RNA, 22 nt, Human
auccuuaauuuacuugcaucuu

SEQ ID NO: 533401 - RNA, 22 nt, Human
ucucagggaccaugaugaugac

SEQ ID NO: 533402 - RNA, 22 nt, Human
gagccaggcccguacuugcugu

SEQ ID NO: 533403 - RNA, 22 nt, Human
auauuuaaacaggguaccaaua

SEQ ID NO: 533404 - RNA, 22 nt, Human
uacuuugaauuaaauauuucag

SEQ ID NO: 533405 - RNA, 22 nt, Human
ucuuaagcagagaagaaguuga

SEQ ID NO: 533406 - RNA, 22 nt, Human
ggcuucaccgcgggguugcagg

SEQ ID NO: 533407 - RNA, 22 nt, Human
cacugagaggucucauuuccaa

SEQ ID NO: 533408 - RNA, 22 nt, Human
cacaauguauauguauaucaaa

SEQ ID NO: 533409 - RNA, 21 nt, Human
aacacauccagaguauuugac

SEQ ID NO: 533410 - RNA, 22 nt, Human
cugggagcuggaugcccugccc

SEQ ID NO: 533411 - RNA, 22 nt, Human
gccaaucuuugacuauaugugu

SEQ ID NO: 533412 - RNA, 22 nt, Human
gaggccaggguaccaucaacau

SEQ ID NO: 533413 - RNA, 18 nt, Human
agaggggagguaagucug

SEQ ID NO: 533414 - RNA, 22 nt, Human
uacaguuuguuacauuguuagu

SEQ ID NO: 533415 - RNA, 22 nt, Human
ucuuggaaucuccauagaguga

SEQ ID NO: 533416 - RNA, 22 nt, Human
caguacuugggaaugcugggga

SEQ ID NO: 533417 - RNA, 22 nt, Human
aaagauacuuaauaguugucug

SEQ ID NO: 533418 - RNA, 22 nt, Human
augaagauuucccagagacaug

SEQ ID NO: 533419 - RNA, 22 nt, Human
uggccagugauuaaugacgcuu

SEQ ID NO: 533420 - RNA, 22 nt, Human
cagcugggccuccugagcccug

SEQ ID NO: 533421 - RNA, 22 nt, Human
uaaagguacgaagugagggauu

SEQ ID NO: 533422 - RNA, 22 nt, Human
uuuagcauauccuauaaaacua

SEQ ID NO: 533423 - RNA, 22 nt, Human
caaaaguagugaaguuguacau

SEQ ID NO: 533424 - RNA, 22 nt, Human
caggugggagcgaggagcuacu

SEQ ID NO: 533425 - RNA, 22 nt, Human
uuacagagcucauuucuaaggg

SEQ ID NO: 533426 - RNA, 22 nt, Human
cuuuuaaugggagcaguauuug

SEQ ID NO: 533427 - RNA, 22 nt, Human
aggcuggguaccugucauaugc

SEQ ID NO: 533428 - RNA, 22 nt, Human
cuuugcaauagaggcacacaug

SEQ ID NO: 533429 - RNA, 22 nt, Human
ggauggcagucugcaugagaaa

SEQ ID NO: 533430 - RNA, 22 nt, Human
uugaaagggauauaucuuucug

SEQ ID NO: 533431 - RNA, 19 nt, Human
uccaggaggcugccauuga

SEQ ID NO: 533432 - RNA, 22 nt, Human
uggcagagacaaggccgggccu

SEQ ID NO: 533433 - RNA, 22 nt, Human
aagacuuucccucaucagaacg

SEQ ID NO: 533434 - RNA, 22 nt, Human
gagaggagguggcuaugacagc

SEQ ID NO: 533435 - RNA, 22 nt, Human
uuugagaaggugacaaauucua

SEQ ID NO: 533436 - RNA, 22 nt, Human
uacagagauuuauugcuaaggc

SEQ ID NO: 533437 - RNA, 22 nt, Human
uccuugaaaggggcugcagggc

SEQ ID NO: 533438 - RNA, 22 nt, Human
aaaugucaaagacguguuuuug

SEQ ID NO: 533439 - RNA, 22 nt, Human
ugccaggggaccuagggauguc

SEQ ID NO: 533440 - RNA, 22 nt, Human
uuuccucuuugugacacagcug

SEQ ID NO: 533441 - RNA, 22 nt, Human
auacaagugagaaaacugaaga

SEQ ID NO: 533442 - RNA, 17 nt, Human
ggagaucuggcagaggg

SEQ ID NO: 533443 - RNA, 22 nt, Human
caguggaggccuugggaccuuu

SEQ ID NO: 533444 - RNA, 22 nt, Human
uggcugagcugcagcguggcuu

SEQ ID NO: 533445 - RNA, 22 nt, Human
guccucugggcagcugccccac

SEQ ID NO: 533446 - RNA, 22 nt, Human
ugucuacagaauguuaauauuu

SEQ ID NO: 533447 - RNA, 23 nt, Human
caauuucauaugauucuaccuaa

SEQ ID NO: 533448 - RNA, 22 nt, Human
agcagggcagguaaggaucaga

SEQ ID NO: 533449 - RNA, 17 nt, Human
cgagggcuugcuggcuc

SEQ ID NO: 533450 - RNA, 22 nt, Human
aucuggcuuggguguggguagc

SEQ ID NO: 533451 - RNA, 22 nt, Human
ugggcagcauccuccacaguca

SEQ ID NO: 533452 - RNA, 22 nt, Human
aucuacaaaaacugucucagga

SEQ ID NO: 533453 - RNA, 22 nt, Human
gcugcagggcucucacaggggg

SEQ ID NO: 533454 - RNA, 22 nt, Human
aagcagaacugggaaguagugg

SEQ ID NO: 533455 - RNA, 22 nt, Human
agcuaguucacugaagccuaug

SEQ ID NO: 533456 - RNA, 22 nt, Human
cacagggcagagaccugggugc

SEQ ID NO: 533457 - RNA, 22 nt, Human
aggcucaguucacgucaacuuu

SEQ ID NO: 533458 - RNA, 22 nt, Human
uguggaaaagaauaagggagau

SEQ ID NO: 533459 - RNA, 22 nt, Human
cagucuuaggagaaacuacaga

SEQ ID NO: 533460 - RNA, 22 nt, Human
agugcaaagccgagguuucuug

SEQ ID NO: 533461 - RNA, 23 nt, Human
uggauaaagcugugcugcauagg

SEQ ID NO: 533462 - RNA, 22 nt, Human
gagaggaguagacacuuugguu

SEQ ID NO: 533463 - RNA, 22 nt, Human
gggguugguuuaaaugcuugag

SEQ ID NO: 533464 - RNA, 22 nt, Human
aagggaaauggccaggcagaga

SEQ ID NO: 533465 - RNA, 22 nt, Human
gcaaaggccacuggggcgaugg

SEQ ID NO: 533466 - RNA, 22 nt, Human
ugcaaagaagccacagucccag

SEQ ID NO: 533467 - RNA, 22 nt, Human
gcgcaggugaugcgucugccuu

SEQ ID NO: 533468 - RNA, 22 nt, Human
ucuuugcaucccuuccauaguu

SEQ ID NO: 533469 - RNA, 17 nt, Human
aggggagagugggaaga

SEQ ID NO: 533470 - RNA, 22 nt, Human
ucugcaucauuuuucagagccg

SEQ ID NO: 533471 - RNA, 22 nt, Human
cagcugcccaggccaccuggag

SEQ ID NO: 533472 - RNA, 22 nt, Human
auguaugaugcuaggcucucag

SEQ ID NO: 533473 - RNA, 22 nt, Human
ccagcuccaaguuugggcauca

SEQ ID NO: 533474 - RNA, 22 nt, Human
agcagggcacuggaaggcacug

SEQ ID NO: 533475 - RNA, 20 nt, Human
ccccacacuauugagcacuu

SEQ ID NO: 533476 - RNA, 22 nt, Human
cauggggagacaccuagggaaa

SEQ ID NO: 533477 - RNA, 20 nt, Human
ggaccagguggggcgguggc

SEQ ID NO: 533478 - RNA, 22 nt, Human
ccucugcucugguccaugugcu

SEQ ID NO: 533479 - RNA, 22 nt, Human
caaagcaggaagcuccugacag

SEQ ID NO: 533480 - RNA, 22 nt, Human
ugaagcccugugucagcuucca

SEQ ID NO: 533481 - RNA, 22 nt, Human
cuguguccugcgucaagccaau

SEQ ID NO: 533482 - RNA, 20 nt, Human
ccugucuccucuuaccuggc

SEQ ID NO: 533483 - RNA, 22 nt, Human
cugugcuuguguucauuguuaa

SEQ ID NO: 533484 - RNA, 23 nt, Human
uccugcagauaagcugguugaca

SEQ ID NO: 533485 - RNA, 22 nt, Human
uuguguguguaacuuuaugaga

SEQ ID NO: 533486 - RNA, 22 nt, Human
auugaagaguugauuauuaucu

SEQ ID NO: 533487 - RNA, 22 nt, Human
gucacuuuauuaauuuugguga

SEQ ID NO: 533488 - RNA, 22 nt, Human
aggcucaguucuguggugagcc

SEQ ID NO: 533489 - RNA, 22 nt, Human
aaggcucuccaaaugauauaau

SEQ ID NO: 533490 - RNA, 22 nt, Human
uuuaaauguguucuuaguagcu

SEQ ID NO: 533491 - RNA, 22 nt, Human
uuuuuccaggguuagauguuua

SEQ ID NO: 533492 - RNA, 22 nt, Human
caggcagaugcugacaagaguu

SEQ ID NO: 533493 - RNA, 22 nt, Human
gugccugcugcagagucgcugu

SEQ ID NO: 533494 - RNA, 22 nt, Human
ucagagaggauuuuaauaagug

SEQ ID NO: 533495 - RNA, 18 nt, Human
uaagucauuugaaaugcc

SEQ ID NO: 533496 - RNA, 22 nt, Human
ugcccaggcuccucgcagccuu

SEQ ID NO: 533497 - RNA, 22 nt, Human
uucuuacaucaguuuauuuugu

SEQ ID NO: 533498 - RNA, 22 nt, Human
ucauuucaaugauacuacuaag

SEQ ID NO: 533499 - RNA, 22 nt, Human
ggcagaggugacagugucuuuu

SEQ ID NO: 533500 - RNA, 22 nt, Human
acauuaaauuucauagugauua

SEQ ID NO: 533501 - RNA, 22 nt, Human
uucuguauuuaguuugaggaca

SEQ ID NO: 533502 - RNA, 22 nt, Human
aaggcagcuucaccacagcauu

SEQ ID NO: 533503 - RNA, 22 nt, Human
agcuccagccucuucuggaggu

SEQ ID NO: 533504 - RNA, 22 nt, Human
ugggacugagaauaugaugggg

SEQ ID NO: 533505 - RNA, 23 nt, Human
aggcagugggggccacuuugcuu

SEQ ID NO: 533506 - RNA, 22 nt, Human
aagucacacuagacaacugagg

SEQ ID NO: 533507 - RNA, 22 nt, Human
uaagacuugauccaaagaacua

SEQ ID NO: 533508 - RNA, 23 nt, Human
ucacauaauccuucauccacagg

SEQ ID NO: 533509 - RNA, 22 nt, Human
gcagaggacacaggagggcaag

SEQ ID NO: 533510 - RNA, 22 nt, Human
uggggccuuggccucauuagau

SEQ ID NO: 533511 - RNA, 22 nt, Human
uuacucagucucccauacauug

SEQ ID NO: 533512 - RNA, 19 nt, Human
cuucagggaggggccaggc

SEQ ID NO: 533513 - RNA, 22 nt, Human
gcaggaguguggugggacaucc

SEQ ID NO: 533514 - RNA, 22 nt, Human
ugugcaaucauauuuuaaaaug

SEQ ID NO: 533515 - RNA, 22 nt, Human
gccaguggcaugcggcagggac

SEQ ID NO: 533516 - RNA, 22 nt, Human
gagggccagcagccucagcaug

SEQ ID NO: 533517 - RNA, 22 nt, Human
uauuacugagguuuuauggagu

SEQ ID NO: 533518 - RNA, 19 nt, Human
ucucuggggacacuuucac

SEQ ID NO: 533519 - RNA, 20 nt, Human
agcccuguuuccuggagaga

SEQ ID NO: 533520 - RNA, 22 nt, Human
cagugccucuuaagugucaccc

SEQ ID NO: 533521 - RNA, 22 nt, Human
uuggcaggaggcuucaguuccu

SEQ ID NO: 533522 - RNA, 22 nt, Human
aucugaagggaaguggaaggca

SEQ ID NO: 533523 - RNA, 22 nt, Human
uaccauuuacuugaaaauaaaa

SEQ ID NO: 533524 - RNA, 22 nt, Human
cugguccuugacgcgugggagg

SEQ ID NO: 533525 - RNA, 21 nt, Human
acacacucugagucuucuauu

SEQ ID NO: 533526 - RNA, 22 nt, Human
cauugcucaggcccagcaggaa

SEQ ID NO: 533527 - RNA, 22 nt, Human
ucuaggagaaccaucagggagg

SEQ ID NO: 533528 - RNA, 22 nt, Human
agugcugggauugcaggcauga

SEQ ID NO: 533529 - RNA, 22 nt, Human
agugcugggauuacaggcauaa

SEQ ID NO: 533530 - RNA, 22 nt, Human
aucuggcuuuuacugaauugcu

SEQ ID NO: 533531 - RNA, 21 nt, Human
aaauuucugcaagccucaacu

SEQ ID NO: 533532 - RNA, 19 nt, Human
cagcucaguuugauucucu

SEQ ID NO: 533533 - RNA, 22 nt, Human
uaaugcuuuguuuugaucuaac

SEQ ID NO: 533534 - RNA, 22 nt, Human
uuccaaguccagccaggccaaa

SEQ ID NO: 533535 - RNA, 22 nt, Human
cccuggguucuggcugggcugc

SEQ ID NO: 533536 - RNA, 22 nt, Human
gcuggugagcaaaggagaagga

SEQ ID NO: 533537 - RNA, 22 nt, Human
auaaacagcuccauuuagugcc

SEQ ID NO: 533538 - RNA, 22 nt, Human
ugaagcagagugaaggugaauu

SEQ ID NO: 533539 - RNA, 22 nt, Human
uucuuuuccuacacagcgauuu

SEQ ID NO: 533540 - RNA, 22 nt, Human
uauugaaaugaaugacagugau

SEQ ID NO: 533541 - RNA, 22 nt, Human
uggagaggagcaccauggccau

SEQ ID NO: 533542 - RNA, 22 nt, Human
cagccagugugaccgaggagga

SEQ ID NO: 533543 - RNA, 23 nt, Human
uccuuccuuugagaggcuccauc

SEQ ID NO: 533544 - RNA, 22 nt, Human
agguaguguagcugagugggau

SEQ ID NO: 533545 - RNA, 22 nt, Human
acagugauuuuaggauagaugg

SEQ ID NO: 533546 - RNA, 22 nt, Human
uggagguguggagucaaaggga

SEQ ID NO: 533547 - RNA, 22 nt, Human
gcugggcuucucaaugcugccu

SEQ ID NO: 533548 - RNA, 22 nt, Human
aauaucugucucuaaugcauau

SEQ ID NO: 533549 - RNA, 22 nt, Human
uggccuuggagaggcacggccc

SEQ ID NO: 533550 - RNA, 22 nt, Human
caguguuccaggcggcagugaa

SEQ ID NO: 533551 - RNA, 22 nt, Human
gccagugggacccgcugugggc

SEQ ID NO: 533552 - RNA, 22 nt, Human
cuguuuucccuggaguucagca

SEQ ID NO: 533553 - RNA, 22 nt, Human
aagcagaggaccgacggaggga

SEQ ID NO: 533554 - RNA, 22 nt, Human
ccucacuggccagccaggggug

SEQ ID NO: 533555 - RNA, 22 nt, Human
uucaacaucaagaaugcaugga

SEQ ID NO: 533556 - RNA, 22 nt, Human
agcagcagaucaaacaggcuug

SEQ ID NO: 533557 - RNA, 22 nt, Human
uccauccauguaggaagauggu

SEQ ID NO: 533558 - RNA, 18 nt, Human
acaaauguagugucuuaa

SEQ ID NO: 533559 - RNA, 22 nt, Human
agaagaaacugucggggauauu

SEQ ID NO: 533560 - RNA, 22 nt, Human
uuuaaggcuucacuggaguggg

SEQ ID NO: 533561 - RNA, 23 nt, Human
agaugaaagcuucccaucacagu

SEQ ID NO: 533562 - RNA, 22 nt, Human
uuucucaaccucaacacuauuu

SEQ ID NO: 533563 - RNA, 22 nt, Human
augugcauaaacauauuguugg

SEQ ID NO: 533564 - RNA, 22 nt, Human
aagauuuacuagcauaauagcu

SEQ ID NO: 533565 - RNA, 22 nt, Human
gaggcugugugucccucuggac

SEQ ID NO: 533566 - RNA, 22 nt, Human
cugguucaugguggaaugacau

SEQ ID NO: 533567 - RNA, 22 nt, Human
uuccuaauggcaaaacauguuu

SEQ ID NO: 533568 - RNA, 22 nt, Human
cagcaucucuuuuugcauuccu

SEQ ID NO: 533569 - RNA, 22 nt, Human
uagauuccucuacaauaaauga

SEQ ID NO: 533570 - RNA, 23 nt, Human
agccuucaggcaaugucaguaga

SEQ ID NO: 533571 - RNA, 22 nt, Human
ggcuccaggugcaugccaggcu

SEQ ID NO: 533572 - RNA, 18 nt, Human
uaaaugcauguuaauaac

SEQ ID NO: 533573 - RNA, 22 nt, Human
uuccucucgcucuccggggccc

SEQ ID NO: 533574 - RNA, 22 nt, Human
ccaggaaggaagcagggguuuc

SEQ ID NO: 533575 - RNA, 22 nt, Human
gccaggugcaccugcccuggcc

SEQ ID NO: 533576 - RNA, 22 nt, Human
aaggacuccaauucuuucaucu

SEQ ID NO: 533577 - RNA, 23 nt, Human
uccuccugagugagagugccagc

SEQ ID NO: 533578 - RNA, 22 nt, Human
auuuagaaguuggagggcaaga

SEQ ID NO: 533579 - RNA, 22 nt, Human
uggcucuggauuaaucuaggaa

SEQ ID NO: 533580 - RNA, 22 nt, Human
ccugccugucaucgccugcgcc

SEQ ID NO: 533581 - RNA, 22 nt, Human
gcugguggcagagacaucaggu

SEQ ID NO: 533582 - RNA, 22 nt, Human
ggcagguggaaggucuccauuc

SEQ ID NO: 533583 - RNA, 22 nt, Human
ugcuggaguaacaagacacuca

SEQ ID NO: 533584 - RNA, 22 nt, Human
gugcaauggggcaauaucagcu

SEQ ID NO: 533585 - RNA, 22 nt, Human
gauuuauuggucuuucauuggu

SEQ ID NO: 533586 - RNA, 22 nt, Human
aggcucagcccaagguggagag

SEQ ID NO: 533587 - RNA, 22 nt, Human
ccuguucacuuugacuucucca

SEQ ID NO: 533588 - RNA, 22 nt, Human
gcugaugagagagacaaaugcu

SEQ ID NO: 533589 - RNA, 21 nt, Human
caguagugcgucgcagaggac

SEQ ID NO: 533590 - RNA, 22 nt, Human
uggaaggaaagguagcagagaa

SEQ ID NO: 533591 - RNA, 22 nt, Human
aggcugugcgaggucucagagu

SEQ ID NO: 533592 - RNA, 22 nt, Human
caacuauagaucaaaugaguuu

SEQ ID NO: 533593 - RNA, 22 nt, Human
gcagaugguggggcaggaaaau

SEQ ID NO: 533594 - RNA, 22 nt, Human
gggcugcugccaaucacagccu

SEQ ID NO: 533595 - RNA, 22 nt, Human
gcugccugccuaguuccacagu

SEQ ID NO: 533596 - RNA, 22 nt, Human
acaugauuuuaguaucauaaua

SEQ ID NO: 533597 - RNA, 21 nt, Human
ccacaggggcuccccugucag

SEQ ID NO: 533598 - RNA, 22 nt, Human
cuuacagugacccugcagauuu

SEQ ID NO: 533599 - RNA, 22 nt, Human
uaaguuagaucuuaauuaaagu

SEQ ID NO: 533600 - RNA, 22 nt, Human
ugugcaaaguguacaaauuaau

SEQ ID NO: 533601 - RNA, 22 nt, Human
aagaugcuuauugcuccugcag

SEQ ID NO: 533602 - RNA, 22 nt, Human
gggcagcagcaggaggucucug

SEQ ID NO: 533603 - RNA, 22 nt, Human
uagcagcucugauucugggccc

SEQ ID NO: 533604 - RNA, 22 nt, Human
caaggccacugcucagguuucc

SEQ ID NO: 533605 - RNA, 22 nt, Human
ccgggcgggggcucucgucacc

SEQ ID NO: 533606 - RNA, 22 nt, Human
aaaagcaguuuauagucaguug

SEQ ID NO: 533607 - RNA, 17 nt, Human
cauaaaacaguucuauu

SEQ ID NO: 533608 - RNA, 22 nt, Human
ggagccuguggccgucacgacu

SEQ ID NO: 533609 - RNA, 22 nt, Human
aaaaaagauugaugguggaugc

SEQ ID NO: 533610 - RNA, 22 nt, Human
aguuacuugagacguuuaugaa

SEQ ID NO: 533611 - RNA, 22 nt, Human
aggcugaaaacgagauggcaau

SEQ ID NO: 533612 - RNA, 22 nt, Human
cugccucuugacagaucguggc

SEQ ID NO: 533613 - RNA, 22 nt, Human
acagauguacacucauauauaa

SEQ ID NO: 533614 - RNA, 22 nt, Human
acuugcaugucaggaaauuaac

SEQ ID NO: 533615 - RNA, 22 nt, Human
aaaugcuuauuagugucacaaa

SEQ ID NO: 533616 - RNA, 22 nt, Human
ucucaagagggaggcaaucaug

SEQ ID NO: 533617 - RNA, 22 nt, Human
acaaaguaggaagauuagcuga

SEQ ID NO: 533618 - RNA, 22 nt, Human
cagcaggguauacagggaauuu

SEQ ID NO: 533619 - RNA, 20 nt, Human
aggcugggguguuuugccca

SEQ ID NO: 533620 - RNA, 22 nt, Human
uuuguguuuuagcuggugaggc

SEQ ID NO: 533621 - RNA, 22 nt, Human
uccugugccuccaccugcuccg

SEQ ID NO: 533622 - RNA, 22 nt, Human
caggccuuucuuggggcuuaga

SEQ ID NO: 533623 - RNA, 22 nt, Human
gcugagagcaguguggccuuaa

SEQ ID NO: 533624 - RNA, 22 nt, Human
accaggcaguauggugcugcaa

SEQ ID NO: 533625 - RNA, 22 nt, Human
cauacaaucaaguucuuuauua

SEQ ID NO: 533626 - RNA, 22 nt, Human
gagauggagucuuuuucuguca

SEQ ID NO: 533627 - RNA, 22 nt, Human
acauuccugaggaaauacauuc

SEQ ID NO: 533628 - RNA, 22 nt, Human
ggaagggccucgggcgugggac

SEQ ID NO: 533629 - RNA, 22 nt, Human
acucuugauugauuuagucuuu

SEQ ID NO: 533630 - RNA, 22 nt, Human
aggauccugcgcuuugggggag

SEQ ID NO: 533631 - RNA, 22 nt, Human
aaggugugaagagaugggaaga

SEQ ID NO: 533632 - RNA, 22 nt, Human
acugggcuccaaggaccuggag

SEQ ID NO: 533633 - RNA, 22 nt, Human
aagacuuucucccaaauccuca

SEQ ID NO: 533634 - RNA, 21 nt, Human
uguuuaauacauauuugugga

SEQ ID NO: 533635 - RNA, 22 nt, Human
gaagaccaauuugggccauggc

SEQ ID NO: 533636 - RNA, 22 nt, Human
uaguuucagcuccuucauccug

SEQ ID NO: 533637 - RNA, 22 nt, Human
caggcccaaaugcaaccuucuu

SEQ ID NO: 533638 - RNA, 22 nt, Human
gcggcaggaagagcgcagcccc

SEQ ID NO: 533639 - RNA, 22 nt, Human
cuuaacagcaagaucuguguca

SEQ ID NO: 533640 - RNA, 22 nt, Human
ugcaaaugcccauuuauuuucu

SEQ ID NO: 533641 - RNA, 22 nt, Human
ggucccaggaaucuguguucua

SEQ ID NO: 533642 - RNA, 22 nt, Human
uuucccuugaauaaagauaucu

SEQ ID NO: 533643 - RNA, 22 nt, Human
gcucuggacccuggaguggcug

SEQ ID NO: 533644 - RNA, 22 nt, Human
uaggcaggugugcacugcccac

SEQ ID NO: 533645 - RNA, 22 nt, Human
uuguaacaggcacucugugcca

SEQ ID NO: 533646 - RNA, 22 nt, Human
auuucucaguuccuacuguuua

SEQ ID NO: 533647 - RNA, 22 nt, Human
uucauacaaugggauauuauga

SEQ ID NO: 533648 - RNA, 22 nt, Human
ugggccacgugacccuuacccu

SEQ ID NO: 533649 - RNA, 22 nt, Human
gugggagaagcccuguucguag

SEQ ID NO: 533650 - RNA, 22 nt, Human
agggcugaagggaggugcucau

SEQ ID NO: 533651 - RNA, 22 nt, Human
ggcugcagcggauuggggauug

SEQ ID NO: 533652 - RNA, 19 nt, Human
ucaguuuuagucaucaguu

SEQ ID NO: 533653 - RNA, 22 nt, Human
auguuacauaguccuuauuugu

SEQ ID NO: 533654 - RNA, 22 nt, Human
uugggcugaaguagagggcaga

SEQ ID NO: 533655 - RNA, 22 nt, Human
aaguuauugcagcaauccaagu

SEQ ID NO: 533656 - RNA, 19 nt, Human
ugggaguggggaagguccu

SEQ ID NO: 533657 - RNA, 22 nt, Human
cagguaggauggaagggcucaa

SEQ ID NO: 533658 - RNA, 22 nt, Human
uguauuaucaaguaaauacaug

SEQ ID NO: 533659 - RNA, 22 nt, Human
ucuucucccaucuccaggcagg

SEQ ID NO: 533660 - RNA, 22 nt, Human
ugccugagugauguggcagcca

SEQ ID NO: 533661 - RNA, 21 nt, Human
gugguucuagagaaacagaau

SEQ ID NO: 533662 - RNA, 23 nt, Human
ugcagagggacugaagccagcuu

SEQ ID NO: 533663 - RNA, 22 nt, Human
uuucuuccuuaccuuacuagag

SEQ ID NO: 533664 - RNA, 22 nt, Human
ugaagcuugagugucaguuccu

SEQ ID NO: 533665 - RNA, 22 nt, Human
uuucuauaugaggagcuaaagu

SEQ ID NO: 533666 - RNA, 22 nt, Human
agcagguguagggcucuuugua

SEQ ID NO: 533667 - RNA, 22 nt, Human
aagagcugauuaagucaugagg

SEQ ID NO: 533668 - RNA, 22 nt, Human
uccaggcuacuuggauuccugg

SEQ ID NO: 533669 - RNA, 22 nt, Human
cccaggucugugccagcucuga

SEQ ID NO: 533670 - RNA, 22 nt, Human
gccuggcaggccuguuggggcu

SEQ ID NO: 533671 - RNA, 22 nt, Human
uucucacuauguauguagauug

SEQ ID NO: 533672 - RNA, 22 nt, Human
gccaggaguucagaugcauguu

SEQ ID NO: 533673 - RNA, 22 nt, Human
cuuuucuucucacggcugucag

SEQ ID NO: 533674 - RNA, 19 nt, Human
ccucugccagcccgccucu

SEQ ID NO: 533675 - RNA, 17 nt, Human
uuagcaaaauagcacuu

SEQ ID NO: 533676 - RNA, 22 nt, Human
auuaagacugcccauguuuuua

SEQ ID NO: 533677 - RNA, 21 nt, Human
agccugccugaacucuguggc

SEQ ID NO: 533678 - RNA, 22 nt, Human
aagcagagguagggugugcagu

SEQ ID NO: 533679 - RNA, 22 nt, Human
uggccaaauuugguguaacuug

SEQ ID NO: 533680 - RNA, 22 nt, Human
ucuggagaacuugcaagaggau

SEQ ID NO: 533681 - RNA, 22 nt, Human
agcuguguccugaagacacugc

SEQ ID NO: 533682 - RNA, 22 nt, Human
aaucuucacucauucagaguug

SEQ ID NO: 533683 - RNA, 22 nt, Human
aacuguaaggcuuagaacagca

SEQ ID NO: 533684 - RNA, 22 nt, Human
uucucacaggaaguaggacuuu

SEQ ID NO: 533685 - RNA, 22 nt, Human
uugguucaguaggcaugccugg

SEQ ID NO: 533686 - RNA, 22 nt, Human
cacaggagcuguggggcagugu

SEQ ID NO: 533687 - RNA, 22 nt, Human
ugcugagucguauuauuuuuua

SEQ ID NO: 533688 - RNA, 22 nt, Human
gcucccagggcagcgcagaaga

SEQ ID NO: 533689 - RNA, 22 nt, Human
auuuuuuguuaacucaggauag

SEQ ID NO: 533690 - RNA, 22 nt, Human
ucccacuggacgucugugcugg

SEQ ID NO: 533691 - RNA, 22 nt, Human
aggaaauugagaaucagaauaa

SEQ ID NO: 533692 - RNA, 22 nt, Human
ggagagcaggguccugagauac

SEQ ID NO: 533693 - RNA, 22 nt, Human
acacuucagcuccacaaacauu

SEQ ID NO: 533694 - RNA, 22 nt, Human
aacauacuuauacuaaauaaug

SEQ ID NO: 533695 - RNA, 22 nt, Human
cagaagcagauucuaaagcaag

SEQ ID NO: 533696 - RNA, 22 nt, Human
aacuuucaggcaaugaauauuu

SEQ ID NO: 533697 - RNA, 22 nt, Human
caggcuggucccagagcauugc

SEQ ID NO: 533698 - RNA, 22 nt, Human
ggcuugggagcaggcaugugac

SEQ ID NO: 533699 - RNA, 22 nt, Human
gcugggcaaggcugaagcuacc

SEQ ID NO: 533700 - RNA, 22 nt, Human
acugcagggcauccuggccaag

SEQ ID NO: 533701 - RNA, 22 nt, Human
cagauauuaggagcucaauaau

SEQ ID NO: 533702 - RNA, 22 nt, Human
aucagcuauuaugugaagaaag

SEQ ID NO: 533703 - RNA, 22 nt, Human
guuugaaaugucugcaagggaa

SEQ ID NO: 533704 - RNA, 22 nt, Human
gcugggccagacuuucaauguc

SEQ ID NO: 533705 - RNA, 22 nt, Human
gcuccucucccagagcugcagg

SEQ ID NO: 533706 - RNA, 22 nt, Human
aaugcuuugucugcuccagacu

SEQ ID NO: 533707 - RNA, 21 nt, Human
aggccucuucauggccaugau

SEQ ID NO: 533708 - RNA, 22 nt, Human
gggcacagcccagugggguccc

SEQ ID NO: 533709 - RNA, 22 nt, Human
gcacugggaagaaugagccugu

SEQ ID NO: 533710 - RNA, 22 nt, Human
ugccaggaggaggugggacaga

SEQ ID NO: 533711 - RNA, 22 nt, Human
uuuccucuucgauuaaguuugg

SEQ ID NO: 533712 - RNA, 22 nt, Human
gagaaacacuguuaguuuauua

SEQ ID NO: 533713 - RNA, 22 nt, Human
agcacugauuuuguugcacuua

SEQ ID NO: 533714 - RNA, 22 nt, Human
gagugcaucguggccauuuuaa

SEQ ID NO: 533715 - RNA, 22 nt, Human
acaucugaggagaccagccucu

SEQ ID NO: 533716 - RNA, 22 nt, Human
gggcuccuccucugacuguggc

SEQ ID NO: 533717 - RNA, 22 nt, Human
guaugaaguuggacuguauaaa

SEQ ID NO: 533718 - RNA, 22 nt, Human
uuagaaagaacuuuagauauca

SEQ ID NO: 533719 - RNA, 22 nt, Human
uauuaacauuuuaugaaaauaa

SEQ ID NO: 533720 - RNA, 22 nt, Human
uccuugaagcaacgugcagaca

SEQ ID NO: 533721 - RNA, 22 nt, Human
aguuuccaaauauuguuuuagc

SEQ ID NO: 533722 - RNA, 22 nt, Human
gauuuaaaguagaccuuuguuu

SEQ ID NO: 533723 - RNA, 22 nt, Human
gccugcagggcccuuguggguc

SEQ ID NO: 533724 - RNA, 22 nt, Human
caggcugcagcagcaguggccc

SEQ ID NO: 533725 - RNA, 22 nt, Human
uucugagauuguuaggcacuaa

SEQ ID NO: 533726 - RNA, 22 nt, Human
cuguucacacacuuguacucuc

SEQ ID NO: 533727 - RNA, 22 nt, Human
cauuauggcagccaggauauug

SEQ ID NO: 533728 - RNA, 22 nt, Human
aagccaugguagaaaacucagu

SEQ ID NO: 533729 - RNA, 22 nt, Human
uucacagauguauuggaacucc

SEQ ID NO: 533730 - RNA, 22 nt, Human
ccaggccccagggcuggcuuuc

SEQ ID NO: 533731 - RNA, 22 nt, Human
caggaacaauguaagucucauu

SEQ ID NO: 533732 - RNA, 19 nt, Human
aaauaucagagagaugaua

SEQ ID NO: 533733 - RNA, 22 nt, Human
aucaggauucaccccagagcug

SEQ ID NO: 533734 - RNA, 22 nt, Human
cucucugucuuggcauuugguc

SEQ ID NO: 533735 - RNA, 22 nt, Human
cugggguggauggguccaaguu

SEQ ID NO: 533736 - RNA, 22 nt, Human
agggccagaggcaccuugcagc

SEQ ID NO: 533737 - RNA, 22 nt, Human
ccugcuggacagggguguucau

SEQ ID NO: 533738 - RNA, 22 nt, Human
cuggccuggcaggggaccucua

SEQ ID NO: 533739 - RNA, 22 nt, Human
cauuuauucucagauccuuguc

SEQ ID NO: 533740 - RNA, 22 nt, Human
caggugccgggaaugcagcaau

SEQ ID NO: 533741 - RNA, 22 nt, Human
uguuacagucauuguuuucuga

SEQ ID NO: 533742 - RNA, 22 nt, Human
gagcccuccauggagccaggca

SEQ ID NO: 533743 - RNA, 22 nt, Human
ccucaggcuuacgggcaaugga

SEQ ID NO: 533744 - RNA, 22 nt, Human
cuggcucaggguggucuggguc

SEQ ID NO: 533745 - RNA, 22 nt, Human
aacacaguuaguaagggaaaua

SEQ ID NO: 533746 - RNA, 22 nt, Human
cccaagaucuaggacagaaaga

SEQ ID NO: 533747 - RNA, 22 nt, Human
uuguuucaggaugguuuguuac

SEQ ID NO: 533748 - RNA, 22 nt, Human
ugacauuuaaucccuaaauauu

SEQ ID NO: 533749 - RNA, 22 nt, Human
aggcugucugaccccagagccc

SEQ ID NO: 533750 - RNA, 22 nt, Human
guucacagcuucuuaggucaua

SEQ ID NO: 533751 - RNA, 22 nt, Human
uucacauugaaggugcuuucuu

SEQ ID NO: 533752 - RNA, 22 nt, Human
ggagcugcucagagccaguccc

SEQ ID NO: 533753 - RNA, 22 nt, Human
aagaggucauaccagauaaggg

SEQ ID NO: 533754 - RNA, 22 nt, Human
uuagucuucuuccuuauauguu

SEQ ID NO: 533755 - RNA, 22 nt, Human
ggagcagagcauuucacagccu

SEQ ID NO: 533756 - RNA, 22 nt, Human
gcugccuggcuuuaguccacuu

SEQ ID NO: 533757 - RNA, 22 nt, Human
acaagauagguugagucuagcc

SEQ ID NO: 533758 - RNA, 22 nt, Human
aggagccaaauuuuagacucug

SEQ ID NO: 533759 - RNA, 22 nt, Human
agugugagcccuggaguggugc

SEQ ID NO: 533760 - RNA, 22 nt, Human
ggcuagggacuccuccucaggg

SEQ ID NO: 533761 - RNA, 22 nt, Human
acacaaugugcaggacaccugu

SEQ ID NO: 533762 - RNA, 22 nt, Human
auucacauugagcuucacugug

SEQ ID NO: 533763 - RNA, 22 nt, Human
aaagaggauggaguagucagcu

SEQ ID NO: 533764 - RNA, 22 nt, Human
acacagaguuugacacauggga

SEQ ID NO: 533765 - RNA, 22 nt, Human
gugaggacugguaaggacugca

SEQ ID NO: 533766 - RNA, 22 nt, Human
aacuaacagucauuaaaagaac

SEQ ID NO: 533767 - RNA, 22 nt, Human
caaaacuaucaggcucaaagcu

SEQ ID NO: 533768 - RNA, 22 nt, Human
uagaggugagacuucagugaca

SEQ ID NO: 533769 - RNA, 22 nt, Human
aacuucagggggcacauucaag

SEQ ID NO: 533770 - RNA, 18 nt, Human
ccugugcuccagcaucug

SEQ ID NO: 533771 - RNA, 22 nt, Human
agcacuuuccuggcaaaugugg

SEQ ID NO: 533772 - RNA, 22 nt, Human
uccugaagaacgaagucaugua

SEQ ID NO: 533773 - RNA, 22 nt, Human
aacaugugucuugcauuucuug

SEQ ID NO: 533774 - RNA, 22 nt, Human
uccccagccgugaaggagagga

SEQ ID NO: 533775 - RNA, 22 nt, Human
ucuccuggucaccucagaaguc

SEQ ID NO: 533776 - RNA, 21 nt, Human
guggcccugccgcagugucca

SEQ ID NO: 533777 - RNA, 22 nt, Human
uuccuauccuuuuauguuuaug

SEQ ID NO: 533778 - RNA, 22 nt, Human
uaugcaauucucuuaauauucu

SEQ ID NO: 533779 - RNA, 22 nt, Human
uaucaccagagggauagucucu

SEQ ID NO: 533780 - RNA, 22 nt, Human
ucacauuuaaacaggaggauua

SEQ ID NO: 533781 - RNA, 23 nt, Human
gcucaucaggcuuagagucaagg

SEQ ID NO: 533782 - RNA, 19 nt, Human
gcauuucauuuaaccauca

SEQ ID NO: 533783 - RNA, 22 nt, Human
cccagccuuugcuuccugguuc

SEQ ID NO: 533784 - RNA, 22 nt, Human
auacuuugcuacauuguacauu

SEQ ID NO: 533785 - RNA, 22 nt, Human
gugcuuaauacaugucaauaac

SEQ ID NO: 533786 - RNA, 22 nt, Human
guccucuccaggaggcucugau

SEQ ID NO: 533787 - RNA, 22 nt, Human
gcauggcauuaacaagauggaa

SEQ ID NO: 533788 - RNA, 22 nt, Human
gaggagagaagcuaacggugcu

SEQ ID NO: 533789 - RNA, 22 nt, Human
uacagagaguacagcauccaca

SEQ ID NO: 533790 - RNA, 22 nt, Human
uucaggauccccaccgcguuua

SEQ ID NO: 533791 - RNA, 22 nt, Human
aaaauuuccaccaucuuugugu

SEQ ID NO: 533792 - RNA, 18 nt, Human
gggcacuggggacuggag

SEQ ID NO: 533793 - RNA, 20 nt, Human
ucccaagggcugagaggauc

SEQ ID NO: 533794 - RNA, 22 nt, Human
gaggaaaaugcaacaggaaugc

SEQ ID NO: 533795 - RNA, 22 nt, Human
gaaagcagaugaaauugcaaca

SEQ ID NO: 533796 - RNA, 22 nt, Human
ugugucaauuuucauuccuacu

SEQ ID NO: 533797 - RNA, 22 nt, Human
ccagagcccagcacacggugcu

SEQ ID NO: 533798 - RNA, 22 nt, Human
gaugcuuuggccccaucaugag

SEQ ID NO: 533799 - RNA, 22 nt, Human
ucauuucaguccucugugugag

SEQ ID NO: 533800 - RNA, 22 nt, Human
aggugggguucagucucagccg

SEQ ID NO: 533801 - RNA, 22 nt, Human
caaggcugugcaggguccauau

SEQ ID NO: 533802 - RNA, 22 nt, Human
gaguuuaaucauuguucuaucc

SEQ ID NO: 533803 - RNA, 22 nt, Human
uagggcagccacccaggcugcu

SEQ ID NO: 533804 - RNA, 22 nt, Human
augagcugggccauccagugau

SEQ ID NO: 533805 - RNA, 22 nt, Human
gaauauuaguaucaguuauacc

SEQ ID NO: 533806 - RNA, 22 nt, Human
ggcuccaagucucagagugaag

SEQ ID NO: 533807 - RNA, 22 nt, Human
uugaaaaaauugguagaggaug

SEQ ID NO: 533808 - RNA, 22 nt, Human
uggccugauuuugcuaagagaa

SEQ ID NO: 533809 - RNA, 22 nt, Human
auuugacauugacacaccuaug

SEQ ID NO: 533810 - RNA, 22 nt, Human
cuggcuuguuuuaagaauacaa

SEQ ID NO: 533811 - RNA, 22 nt, Human
agccuucagcaguucaggugcc

SEQ ID NO: 533812 - RNA, 18 nt, Human
uggagcaggaagccuggc

SEQ ID NO: 533813 - RNA, 22 nt, Human
ucuaaacuaggguuaaaggaaa

SEQ ID NO: 533814 - RNA, 22 nt, Human
cugaccaucauggugaaacccc

SEQ ID NO: 533815 - RNA, 22 nt, Human
caagcuacucaggcaagaugug

SEQ ID NO: 533816 - RNA, 22 nt, Human
gaggagaaagcagugauuugug

SEQ ID NO: 533817 - RNA, 22 nt, Human
uaauaccuagagaugauacaaa

SEQ ID NO: 533818 - RNA, 22 nt, Human
aaaaagcuuaaaugagcaguuc

SEQ ID NO: 533819 - RNA, 22 nt, Human
gcaugguggccuuaggguagcc

SEQ ID NO: 533820 - RNA, 22 nt, Human
auugacaaucuacuauguucug

SEQ ID NO: 533821 - RNA, 22 nt, Human
agauggggcagaauggagccau

SEQ ID NO: 533822 - RNA, 22 nt, Human
acagaauugaaaguauaaucug

SEQ ID NO: 533823 - RNA, 22 nt, Human
ucacauuuuguucaaggcuagu

SEQ ID NO: 533824 - RNA, 22 nt, Human
ugccuggguccaggccaagccu

SEQ ID NO: 533825 - RNA, 22 nt, Human
uauuuccagaggaguauagaag

SEQ ID NO: 533826 - RNA, 22 nt, Human
uuugcaacagacucaucauuga

SEQ ID NO: 533827 - RNA, 22 nt, Human
ccagccagucccgcaugaccgc

SEQ ID NO: 533828 - RNA, 21 nt, Human
ccccauggaguacaguugggc

SEQ ID NO: 533829 - RNA, 22 nt, Human
acacauguauggcacuuacauu

SEQ ID NO: 533830 - RNA, 22 nt, Human
uugaaaggccuguuuauccagc

SEQ ID NO: 533831 - RNA, 22 nt, Human
uaacaguugguguaauuucuug

SEQ ID NO: 533832 - RNA, 22 nt, Human
cucacagcagcucugcgagaua

SEQ ID NO: 533833 - RNA, 22 nt, Human
cuguauuuguccucuauuuauu

SEQ ID NO: 533834 - RNA, 22 nt, Human
agagcaauggcauccagcugau

SEQ ID NO: 533835 - RNA, 22 nt, Human
ccaucaguggcaaauaaacacc

SEQ ID NO: 533836 - RNA, 22 nt, Human
aaugucaaguagccaaugcuuc

SEQ ID NO: 533837 - RNA, 22 nt, Human
ccagaauagaaggcagcuguca

SEQ ID NO: 533838 - RNA, 22 nt, Human
uaagcauaacuaaaaaugauuu

SEQ ID NO: 533839 - RNA, 22 nt, Human
agagcagauggagcuggaagag

SEQ ID NO: 533840 - RNA, 22 nt, Human
gucauuccuauccauuugauac

SEQ ID NO: 533841 - RNA, 21 nt, Human
aguuuuuacucuuaacugugg

SEQ ID NO: 533842 - RNA, 22 nt, Human
cacacaggaugaagcagcagaa

SEQ ID NO: 533843 - RNA, 22 nt, Human
auaaagaggauguauuuacagc

SEQ ID NO: 533844 - RNA, 22 nt, Human
aaauuaagggugagaagaguug

SEQ ID NO: 533845 - RNA, 22 nt, Human
gccuaauaugcaaaauugauac

SEQ ID NO: 533846 - RNA, 22 nt, Human
ugaagauuuccaccaaaucaca

SEQ ID NO: 533847 - RNA, 22 nt, Human
agaauucuccuucagggcagga

SEQ ID NO: 533848 - RNA, 22 nt, Human
gaguuauuuguagggauuauau

SEQ ID NO: 533849 - RNA, 22 nt, Human
cagcuguguaugagagcaugcu

SEQ ID NO: 533850 - RNA, 20 nt, Human
ccugggcucaaagcauccuc

SEQ ID NO: 533851 - RNA, 22 nt, Human
cacugggcaauucugagccuaa

SEQ ID NO: 533852 - RNA, 22 nt, Human
ucuugauuuacucuaauagcuu

SEQ ID NO: 533853 - RNA, 22 nt, Human
gccugugcuuucuucccuccug

SEQ ID NO: 533854 - RNA, 22 nt, Human
caguuaaaaugugcuauaagaa

SEQ ID NO: 533855 - RNA, 22 nt, Human
uggaaggggagcuggaaagggg

SEQ ID NO: 533856 - RNA, 21 nt, Human
cagcccagcccauugacagug

SEQ ID NO: 533857 - RNA, 23 nt, Human
aggagaagagauuuccacaugca

SEQ ID NO: 533858 - RNA, 22 nt, Human
uaagcaaauaaugcaucaaggg

SEQ ID NO: 533859 - RNA, 20 nt, Human
gggagucuggaugaaagaug

SEQ ID NO: 533860 - RNA, 22 nt, Human
agagaaaagaguucaggcuuug

SEQ ID NO: 533861 - RNA, 22 nt, Human
gggagagaauuauugccagacc

SEQ ID NO: 533862 - RNA, 22 nt, Human
acauuucuaucauccuguaaug

SEQ ID NO: 533863 - RNA, 22 nt, Human
uuucuucuaagauuucaaacua

SEQ ID NO: 533864 - RNA, 22 nt, Human
gcugugcagauguagggagugg

SEQ ID NO: 533865 - RNA, 22 nt, Human
uucuacaauaugaauaaugaag

SEQ ID NO: 533866 - RNA, 19 nt, Human
ccauauaaccagcaagugu

SEQ ID NO: 533867 - RNA, 22 nt, Human
uaagaauuguguugaauagagu

SEQ ID NO: 533868 - RNA, 22 nt, Human
agggagugguuaagaaggugca

SEQ ID NO: 533869 - RNA, 22 nt, Human
gaggccuggcugggaggaggug

SEQ ID NO: 533870 - RNA, 22 nt, Human
caaagcagacgcaguaagggua

SEQ ID NO: 533871 - RNA, 22 nt, Human
aauuuuaagcauaugacugguu

SEQ ID NO: 533872 - RNA, 22 nt, Human
uggcagaguuggagguggaaga

SEQ ID NO: 533873 - RNA, 17 nt, Human
ucuuuccugccaugcuc

SEQ ID NO: 533874 - RNA, 22 nt, Human
gagcuuuaagggcacuggucuu

SEQ ID NO: 533875 - RNA, 22 nt, Human
cagguugguauucaucuccaca

SEQ ID NO: 533876 - RNA, 22 nt, Human
ucuugauuaauaccuuagcccu

SEQ ID NO: 533877 - RNA, 22 nt, Human
accagaguaauguguggaaauu

SEQ ID NO: 533878 - RNA, 22 nt, Human
gggcacuguacacugugcaugg

SEQ ID NO: 533879 - RNA, 22 nt, Human
uacccagcaaucccuagagguu

SEQ ID NO: 533880 - RNA, 22 nt, Human
cccaagggagugccuggucaac

SEQ ID NO: 533881 - RNA, 19 nt, Human
gggaugggcccucacccuc

SEQ ID NO: 533882 - RNA, 22 nt, Human
acagugauuggcacugauucag

SEQ ID NO: 533883 - RNA, 23 nt, Human
uggcuggcagaaacugaagcaug

SEQ ID NO: 533884 - RNA, 22 nt, Human
caggggccuggcugucuaggaa

SEQ ID NO: 533885 - RNA, 22 nt, Human
cacacaugucucuccaugcucu

SEQ ID NO: 533886 - RNA, 22 nt, Human
aauuuuaaucaguggugcugag

SEQ ID NO: 533887 - RNA, 22 nt, Human
ggucucugacuuagagauggau

SEQ ID NO: 533888 - RNA, 22 nt, Human
cccaggcuggagugcaauggug

SEQ ID NO: 533889 - RNA, 22 nt, Human
uuggaauugcuauugauaacaa

SEQ ID NO: 533890 - RNA, 22 nt, Human
ucauuuccucaaauucaagguu

SEQ ID NO: 533891 - RNA, 22 nt, Human
ucugucaaaugggcauaaggau

SEQ ID NO: 533892 - RNA, 22 nt, Human
gcuggccauggccugcgccauc

SEQ ID NO: 533893 - RNA, 22 nt, Human
agugauggugagugagaagcuc

SEQ ID NO: 533894 - RNA, 22 nt, Human
cagaaucagugacacauguaua

SEQ ID NO: 533895 - RNA, 22 nt, Human
ucuggcucaucucuccagguaa

SEQ ID NO: 533896 - RNA, 22 nt, Human
caucaucaccugcuauacgauc

SEQ ID NO: 533897 - RNA, 19 nt, Human
ucucuggaugacagacacu

SEQ ID NO: 533898 - RNA, 22 nt, Human
gcugcuuuagguugagcucagc

SEQ ID NO: 533899 - RNA, 22 nt, Human
acucuucacuuccccugccagc

SEQ ID NO: 533900 - RNA, 22 nt, Human
ugucauuaugaggauuacaaua

SEQ ID NO: 533901 - RNA, 22 nt, Human
cucagagucccuucccucgugg

SEQ ID NO: 533902 - RNA, 22 nt, Human
ucccugcugggagaugaccuua

SEQ ID NO: 533903 - RNA, 22 nt, Human
aauuaaauugguuuagagagga

SEQ ID NO: 533904 - RNA, 21 nt, Human
cagcaaaucauugggcagacu

SEQ ID NO: 533905 - RNA, 22 nt, Human
ugaugaauaaacuugagaguca

SEQ ID NO: 533906 - RNA, 23 nt, Human
aagaaucaguaaguaaggagacc

SEQ ID NO: 533907 - RNA, 22 nt, Human
ucuuugcaggagcccuuugaac

SEQ ID NO: 533908 - RNA, 22 nt, Human
gggcugccaagccugccugccu

SEQ ID NO: 533909 - RNA, 23 nt, Human
uuccaagugcuuuacuuaauccu

SEQ ID NO: 533910 - RNA, 22 nt, Human
ucuucaugccaaaugaguuuug

SEQ ID NO: 533911 - RNA, 22 nt, Human
agagacaagaaauaccugggac

SEQ ID NO: 533912 - RNA, 22 nt, Human
gcuggcuuugcacugggugcau

SEQ ID NO: 533913 - RNA, 22 nt, Human
ugaaauuagugaaguuacaguu

SEQ ID NO: 533914 - RNA, 22 nt, Human
ugcaggcuggaggagggacuaa

SEQ ID NO: 533915 - RNA, 22 nt, Human
cagagggguguagagaucacug

SEQ ID NO: 533916 - RNA, 22 nt, Human
uuccagaaaacucugccuggua

SEQ ID NO: 533917 - RNA, 22 nt, Human
aauucuuguuguuaguauauuu

SEQ ID NO: 533918 - RNA, 22 nt, Human
aagacagaagugauuugaugug

SEQ ID NO: 533919 - RNA, 22 nt, Human
uuaacaguggcuaagacugagg

SEQ ID NO: 533920 - RNA, 22 nt, Human
acagauuuauugaagcugcugc

SEQ ID NO: 533921 - RNA, 22 nt, Human
aggcacugugcuucuuauaugu

SEQ ID NO: 533922 - RNA, 22 nt, Human
aguucuuugugauggaaauuua

SEQ ID NO: 533923 - RNA, 22 nt, Human
aacaggaaaacagcacaauagc

SEQ ID NO: 533924 - RNA, 22 nt, Human
uguacaaugccagggaacacca

SEQ ID NO: 533925 - RNA, 22 nt, Human
caagucugaccucugggugaag

SEQ ID NO: 533926 - RNA, 22 nt, Human
gagggugguggcuuaaggugcu

SEQ ID NO: 533927 - RNA, 22 nt, Human
auagggccuaaaaaguauugcu

SEQ ID NO: 533928 - RNA, 22 nt, Human
aaggguugaagauaaauaaggu

SEQ ID NO: 533929 - RNA, 22 nt, Human
aacacagaucaaaauauuuccu

SEQ ID NO: 533930 - RNA, 22 nt, Human
cccuggagcaucucugcugucu

SEQ ID NO: 533931 - RNA, 21 nt, Human
guucaaauccugacacuacac

SEQ ID NO: 533932 - RNA, 22 nt, Human
ggagacucaccccgcauucuag

SEQ ID NO: 533933 - RNA, 22 nt, Human
ucagaggacgcacuaggguugu

SEQ ID NO: 533934 - RNA, 22 nt, Human
ggccucucagggcagagacccu

SEQ ID NO: 533935 - RNA, 22 nt, Human
ugaaaucaucaaaagagccauu

SEQ ID NO: 533936 - RNA, 22 nt, Human
uaaaaaguagugagaauggcgc

SEQ ID NO: 533937 - RNA, 22 nt, Human
gcagcaguacucaauauccugg

SEQ ID NO: 533938 - RNA, 22 nt, Human
gcacauaaagggcaugggaggu

SEQ ID NO: 533939 - RNA, 22 nt, Human
ucaggacagccagggugcagac

SEQ ID NO: 533940 - RNA, 22 nt, Human
uuaauugagccagaaaguaucu

SEQ ID NO: 533941 - RNA, 22 nt, Human
uuaauuuuaaccuguuuguguc

SEQ ID NO: 533942 - RNA, 22 nt, Human
uugccauuuaguaugcuuguau

SEQ ID NO: 533943 - RNA, 22 nt, Human
ucuggaguguuucuaauuacug

SEQ ID NO: 533944 - RNA, 22 nt, Human
uuuguaaaagcccaagcuguag

SEQ ID NO: 533945 - RNA, 22 nt, Human
agugaaaugacugaaucagaua

SEQ ID NO: 533946 - RNA, 22 nt, Human
cccugcugugucccaccuggaa

SEQ ID NO: 533947 - RNA, 22 nt, Human
acaaaauuguguuaaacuuuau

SEQ ID NO: 533948 - RNA, 22 nt, Human
guaucuagucaaugcuguucaa

SEQ ID NO: 533949 - RNA, 22 nt, Human
gcacccagaauaaggacaggac

SEQ ID NO: 533950 - RNA, 22 nt, Human
acagcuuugggcaaugcuauga

SEQ ID NO: 533951 - RNA, 17 nt, Human
aggagucucagaugagc

SEQ ID NO: 533952 - RNA, 22 nt, Human
cagcuauugguccacagguaug

SEQ ID NO: 533953 - RNA, 22 nt, Human
ggagaggugcaggucaguggca

SEQ ID NO: 533954 - RNA, 22 nt, Human
gggcucagccccauugaaccag

SEQ ID NO: 533955 - RNA, 23 nt, Human
gauguguagggaaagucagacuc

SEQ ID NO: 533956 - RNA, 22 nt, Human
gcagggaccagggccagaucca

SEQ ID NO: 533957 - RNA, 22 nt, Human
gaaggagagaaaggcaauucug

SEQ ID NO: 533958 - RNA, 22 nt, Human
ugggcagccaucccagccucuc

SEQ ID NO: 533959 - RNA, 22 nt, Human
uauuuauucauucagcaagcau

SEQ ID NO: 533960 - RNA, 22 nt, Human
gcagcugauggaaguccuauug

SEQ ID NO: 533961 - RNA, 22 nt, Human
cuuuacaaacuauaaagugcgg

SEQ ID NO: 533962 - RNA, 22 nt, Human
ucugaaaacuccaugagcucgu

SEQ ID NO: 533963 - RNA, 22 nt, Human
uccugcagguggaugauucucu

SEQ ID NO: 533964 - RNA, 22 nt, Human
uacacagauuucaguaucauca

SEQ ID NO: 533965 - RNA, 22 nt, Human
aggagggagcuuaagccaggca

SEQ ID NO: 533966 - RNA, 22 nt, Human
caccagggcagcagccuagucu

SEQ ID NO: 533967 - RNA, 22 nt, Human
ugguggggucaucgucagaugc

SEQ ID NO: 533968 - RNA, 22 nt, Human
auuuaauuuggagagagaaacc

SEQ ID NO: 533969 - RNA, 22 nt, Human
uuuaauguagcgugaaaugauu

SEQ ID NO: 533970 - RNA, 22 nt, Human
ugggcuguccagcaccugggcu

SEQ ID NO: 533971 - RNA, 22 nt, Human
gucccucugugucccugcaguc

SEQ ID NO: 533972 - RNA, 22 nt, Human
ccugggagccaagccucugugu

SEQ ID NO: 533973 - RNA, 22 nt, Human
auacaaguugcccaaaugauua

SEQ ID NO: 533974 - RNA, 22 nt, Human
aggcaguuuauccccagagccu

SEQ ID NO: 533975 - RNA, 22 nt, Human
agaggcaguauacaauccgagc

SEQ ID NO: 533976 - RNA, 22 nt, Human
aaaugucauauuuaaguaggaa

SEQ ID NO: 533977 - RNA, 22 nt, Human
augcccugugguucaugugaga

SEQ ID NO: 533978 - RNA, 22 nt, Human
gagggcaguagccucguacccu

SEQ ID NO: 533979 - RNA, 22 nt, Human
uuucacauucagauauagacuu

SEQ ID NO: 533980 - RNA, 22 nt, Human
uagcaggguaaauguagaugga

SEQ ID NO: 533981 - RNA, 17 nt, Human
cugggccuccccugucc

SEQ ID NO: 533982 - RNA, 22 nt, Human
ggcuucucucccccagcuccac

SEQ ID NO: 533983 - RNA, 22 nt, Human
cuggcucccucgcugaggugcu

SEQ ID NO: 533984 - RNA, 18 nt, Human
ugggcugccuggccucug

SEQ ID NO: 533985 - RNA, 20 nt, Human
cucaggauacugcaaaguug

SEQ ID NO: 533986 - RNA, 22 nt, Human
ggaggacaggggcugcagcaca

SEQ ID NO: 533987 - RNA, 22 nt, Human
acuuuguauaagacaauaaaga

SEQ ID NO: 533988 - RNA, 22 nt, Human
uggcaggguggcaacuuuuggu

SEQ ID NO: 533989 - RNA, 22 nt, Human
gggcacugaaugccaagcuagg

SEQ ID NO: 533990 - RNA, 22 nt, Human
ggccugagcuugggcagcguau

SEQ ID NO: 533991 - RNA, 22 nt, Human
uagaccaggggagucaacaggu

SEQ ID NO: 533992 - RNA, 22 nt, Human
aaaagagucuuaggcagucaua

SEQ ID NO: 533993 - RNA, 22 nt, Human
uccaggcucucaggugucagca

SEQ ID NO: 533994 - RNA, 22 nt, Human
gagcaggcauucuaguggcuga

SEQ ID NO: 533995 - RNA, 22 nt, Human
uggagaugaauauguguaccug

SEQ ID NO: 533996 - RNA, 22 nt, Human
uccaggcaaggauaauaaacau

SEQ ID NO: 533997 - RNA, 22 nt, Human
ccugcacuaccuggggcugcug

SEQ ID NO: 533998 - RNA, 22 nt, Human
ggagggugcagacccuuugcaa

SEQ ID NO: 533999 - RNA, 22 nt, Human
uuuguguguauauguauauaga

SEQ ID NO: 534000 - RNA, 22 nt, Human
cagcucuggcagagcccaaccc

SEQ ID NO: 534001 - RNA, 22 nt, Human
acaggcucacagucauuucauu

SEQ ID NO: 534002 - RNA, 22 nt, Human
gugguucagugucauauuaacg

SEQ ID NO: 534003 - RNA, 22 nt, Human
ugugccuggucccugagucgag

SEQ ID NO: 534004 - RNA, 22 nt, Human
uuuccucugucaugacagcuga

SEQ ID NO: 534005 - RNA, 22 nt, Human
acugcuggcaugcauauacaaa

SEQ ID NO: 534006 - RNA, 21 nt, Human
auauuuuuguuuggacuguca

SEQ ID NO: 534007 - RNA, 22 nt, Human
guggcagugugaggauccugcu

SEQ ID NO: 534008 - RNA, 22 nt, Human
cugugacaguuucucagacuuu

SEQ ID NO: 534009 - RNA, 22 nt, Human
cgcaggugaacuguucugcagu

SEQ ID NO: 534010 - RNA, 22 nt, Human
uccucaggauguggaguagaau

SEQ ID NO: 534011 - RNA, 19 nt, Human
cuucuagaccuuauaccac

SEQ ID NO: 534012 - RNA, 22 nt, Human
aggguggggugcuacaucuuua

SEQ ID NO: 534013 - RNA, 22 nt, Human
uuguaaacaucuguugcuuaga

SEQ ID NO: 534014 - RNA, 22 nt, Human
auacaugugugugcauacaugu

SEQ ID NO: 534015 - RNA, 22 nt, Human
guaugcaucgacucaagucuga

SEQ ID NO: 534016 - RNA, 22 nt, Human
accaaggagaaggugcaagcuu

SEQ ID NO: 534017 - RNA, 22 nt, Human
uggcucaguuugggggauugaa

SEQ ID NO: 534018 - RNA, 22 nt, Human
cucccugggccucaguuucucu

SEQ ID NO: 534019 - RNA, 22 nt, Human
ugugccauuucuauucugcagc

SEQ ID NO: 534020 - RNA, 22 nt, Human
augaggcaaggaucagguaagg

SEQ ID NO: 534021 - RNA, 22 nt, Human
aucuacaaccccucaaacugug

SEQ ID NO: 534022 - RNA, 22 nt, Human
cuggcagcguguuuaugaacau

SEQ ID NO: 534023 - RNA, 22 nt, Human
ggcaucuguccaucucuccagc

SEQ ID NO: 534024 - RNA, 22 nt, Human
ggcagccaugcacgcugccugg

SEQ ID NO: 534025 - RNA, 22 nt, Human
ggcagcuguaagaugagugaau

SEQ ID NO: 534026 - RNA, 22 nt, Human
ucuguucauguugggcuuuucc

SEQ ID NO: 534027 - RNA, 22 nt, Human
uaugucaugggucaaaaugaag

SEQ ID NO: 534028 - RNA, 22 nt, Human
aaggcugaggcuggagaauuac

SEQ ID NO: 534029 - RNA, 22 nt, Human
caggccugacccugagcuucac

SEQ ID NO: 534030 - RNA, 22 nt, Human
uugugaaacauucauggauuug

SEQ ID NO: 534031 - RNA, 22 nt, Human
gcagcuuucuaagcuuuauugc

SEQ ID NO: 534032 - RNA, 22 nt, Human
caaagagguuuugagggcagcu

SEQ ID NO: 534033 - RNA, 22 nt, Human
uuacacagaaacacuguucaga

SEQ ID NO: 534034 - RNA, 22 nt, Human
ugugagacguaggccaucgagg

SEQ ID NO: 534035 - RNA, 22 nt, Human
acagccagguaaaggcauggca

SEQ ID NO: 534036 - RNA, 22 nt, Human
agcucaggcaacucugggcccc

SEQ ID NO: 534037 - RNA, 22 nt, Human
ucucagaguuuacggggcugaa

SEQ ID NO: 534038 - RNA, 22 nt, Human
uuguuaaaaauagauuuccagg

SEQ ID NO: 534039 - RNA, 22 nt, Human
cuuuauggaaucaaagacugga

SEQ ID NO: 534040 - RNA, 22 nt, Human
aggagccaguuccaccccagga

SEQ ID NO: 534041 - RNA, 22 nt, Human
auucucugugcagauuuaagac

SEQ ID NO: 534042 - RNA, 22 nt, Human
gacagggcgcccagccuguuuc

SEQ ID NO: 534043 - RNA, 22 nt, Human
aggcucauucuugccucugagc

SEQ ID NO: 534044 - RNA, 22 nt, Human
gaugaagcuauuugguuggcac

SEQ ID NO: 534045 - RNA, 22 nt, Human
gaauacaugauuaaaguuugau

SEQ ID NO: 534046 - RNA, 22 nt, Human
ugggccugaaggagcugcgccc

SEQ ID NO: 534047 - RNA, 22 nt, Human
agaagccaaucagcucucugcu

SEQ ID NO: 534048 - RNA, 22 nt, Human
ggguccagaguugaagagguua

SEQ ID NO: 534049 - RNA, 22 nt, Human
aaaagcagaccacgcuuugugg

SEQ ID NO: 534050 - RNA, 22 nt, Human
aagacagagggaagcaaugaug

SEQ ID NO: 534051 - RNA, 22 nt, Human
ugcucauuggcgaucugaggga

SEQ ID NO: 534052 - RNA, 22 nt, Human
aguguuguaugggaugacugcu

SEQ ID NO: 534053 - RNA, 21 nt, Human
auuguuaguaauaguccacac

SEQ ID NO: 534054 - RNA, 22 nt, Human
cuguggcucucugcaggguccc

SEQ ID NO: 534055 - RNA, 22 nt, Human
gaacaguaucaguagugccagu

SEQ ID NO: 534056 - RNA, 22 nt, Human
cucaggaggaggaaguucauug

SEQ ID NO: 534057 - RNA, 22 nt, Human
ggcuccuggcaucuggugggua

SEQ ID NO: 534058 - RNA, 22 nt, Human
ggccaggcugguuccuugaccu

SEQ ID NO: 534059 - RNA, 22 nt, Human
uugcauucuguuaaaauguauu

SEQ ID NO: 534060 - RNA, 22 nt, Human
aaggggaaguagcaccagaggu

SEQ ID NO: 534061 - RNA, 22 nt, Human
uggcagcugaggggaggcuuug

SEQ ID NO: 534062 - RNA, 17 nt, Human
cacaggugugguuugag

SEQ ID NO: 534063 - RNA, 22 nt, Human
gcugagagugagcacuggauau

SEQ ID NO: 534064 - RNA, 22 nt, Human
ucagcuuucucucgccaucagg

SEQ ID NO: 534065 - RNA, 22 nt, Human
cuuccuccgaagaaguugcugg

SEQ ID NO: 534066 - RNA, 22 nt, Human
ugaaauauccagcccagcagga

SEQ ID NO: 534067 - RNA, 22 nt, Human
aguucaaacucuauaagaacuu

SEQ ID NO: 534068 - RNA, 22 nt, Human
accagagaugucuaauaggggc

SEQ ID NO: 534069 - RNA, 22 nt, Human
agagaauacaggguaacaggaa

SEQ ID NO: 534070 - RNA, 23 nt, Human
aaggccagaauuucaauggugcc

SEQ ID NO: 534071 - RNA, 22 nt, Human
ggcugagggccagggcuagucu

SEQ ID NO: 534072 - RNA, 22 nt, Human
acagauaauaggauguacccug

SEQ ID NO: 534073 - RNA, 22 nt, Human
ggcacagcuacuugcucacucu

SEQ ID NO: 534074 - RNA, 22 nt, Human
agaauauaugacugcaagacua

SEQ ID NO: 534075 - RNA, 22 nt, Human
aacauuuaugguagucauugca

SEQ ID NO: 534076 - RNA, 22 nt, Human
gcaggaagggaaagguugacuc

SEQ ID NO: 534077 - RNA, 19 nt, Human
cccagagcauccugaacuu

SEQ ID NO: 534078 - RNA, 22 nt, Human
ccaggagcaaagaucacuggga

SEQ ID NO: 534079 - RNA, 22 nt, Human
agaaggaaggcugagugcugau

SEQ ID NO: 534080 - RNA, 22 nt, Human
aagucagcacuccaggaagcca

SEQ ID NO: 534081 - RNA, 22 nt, Human
caugaauauuuaguauuuacuu

SEQ ID NO: 534082 - RNA, 22 nt, Human
aucccugcccucauggagcuua

SEQ ID NO: 534083 - RNA, 22 nt, Human
ccucuccaguuuuaacgugacc

SEQ ID NO: 534084 - RNA, 20 nt, Human
uuggucagugguucaguuug

SEQ ID NO: 534085 - RNA, 22 nt, Human
caaaagauacuugcaucuaacu

SEQ ID NO: 534086 - RNA, 22 nt, Human
aaggcgacacaggcagcaggcc

SEQ ID NO: 534087 - RNA, 22 nt, Human
gcaugcugcaccagagccucuc

SEQ ID NO: 534088 - RNA, 22 nt, Human
uuacauuuggcuauguccucua

SEQ ID NO: 534089 - RNA, 22 nt, Human
uccuuuguuaaggagguuuguu

SEQ ID NO: 534090 - RNA, 22 nt, Human
uacaagagguauauagaaacag

SEQ ID NO: 534091 - RNA, 22 nt, Human
agcauugccugccuauugcuaa

SEQ ID NO: 534092 - RNA, 22 nt, Human
auguuugucaggauuguaauua

SEQ ID NO: 534093 - RNA, 22 nt, Human
agagggaaugugauugcaccau

SEQ ID NO: 534094 - RNA, 22 nt, Human
gaaauacaauuuugucccagcu

SEQ ID NO: 534095 - RNA, 23 nt, Human
gccaggcacaugguggacacgca

SEQ ID NO: 534096 - RNA, 22 nt, Human
ucccagggcagcuguccagaag

SEQ ID NO: 534097 - RNA, 22 nt, Human
uggguaggccaggaagcagugu

SEQ ID NO: 534098 - RNA, 22 nt, Human
caggccugcuucuuacccuuca

SEQ ID NO: 534099 - RNA, 22 nt, Human
aaaaugugaucuacaaaugcaa

SEQ ID NO: 534100 - RNA, 22 nt, Human
caauauauaggaacaacuuagg

SEQ ID NO: 534101 - RNA, 22 nt, Human
ccaggccuucugaggacacucu

SEQ ID NO: 534102 - RNA, 22 nt, Human
gcuagcuuuauaaugcugggcg

SEQ ID NO: 534103 - RNA, 22 nt, Human
accugaggcuguuagucuaggu

SEQ ID NO: 534104 - RNA, 22 nt, Human
gcugguccacucccuggaggcu

SEQ ID NO: 534105 - RNA, 22 nt, Human
agggcagccucucagccuaggu

SEQ ID NO: 534106 - RNA, 22 nt, Human
aagaucaagugcuggcaguguu

SEQ ID NO: 534107 - RNA, 19 nt, Human
ucccaggcaaaggcuucuc

SEQ ID NO: 534108 - RNA, 22 nt, Human
accugagaccuaaucugacugu

SEQ ID NO: 534109 - RNA, 22 nt, Human
auggccagucaagccucuggcu

SEQ ID NO: 534110 - RNA, 22 nt, Human
uauguacaugauuucauuugcu

SEQ ID NO: 534111 - RNA, 22 nt, Human
gaaauauacaugaagucggcug

SEQ ID NO: 534112 - RNA, 21 nt, Human
ggauggauagggaagagauuu

SEQ ID NO: 534113 - RNA, 22 nt, Human
gaggaaccaccuuggguaggcu

SEQ ID NO: 534114 - RNA, 18 nt, Human
gagcucugccucccaguc

SEQ ID NO: 534115 - RNA, 22 nt, Human
uuucacauaucaacucuauccu

SEQ ID NO: 534116 - RNA, 22 nt, Human
aucuuuaguagaggaauauauu

SEQ ID NO: 534117 - RNA, 22 nt, Human
ccucugaguccuuugggcucuc

SEQ ID NO: 534118 - RNA, 22 nt, Human
uccaguucuaggucacucucug

SEQ ID NO: 534119 - RNA, 19 nt, Human
uggagcagggcccuuguuu

SEQ ID NO: 534120 - RNA, 22 nt, Human
acuuugaaauguguaagagaga

SEQ ID NO: 534121 - RNA, 22 nt, Human
uuucuggaggcccaagggcaga

SEQ ID NO: 534122 - RNA, 22 nt, Human
auaaaguagccacuggaaagcu

SEQ ID NO: 534123 - RNA, 22 nt, Human
uaguuuuagucccauuuuacag

SEQ ID NO: 534124 - RNA, 22 nt, Human
uaagaacagugacagccaacau

SEQ ID NO: 534125 - RNA, 22 nt, Human
ugcagauucaaaugaaaugcaa

SEQ ID NO: 534126 - RNA, 22 nt, Human
gccaggcaugggcuucugggcg

SEQ ID NO: 534127 - RNA, 22 nt, Human
gcaggaagaugagcucagguaa

SEQ ID NO: 534128 - RNA, 22 nt, Human
gucacuuuggccucuacagcca

SEQ ID NO: 534129 - RNA, 22 nt, Human
cucaacagcucugccauacucc

SEQ ID NO: 534130 - RNA, 22 nt, Human
gauauacauagguuucuaugca

SEQ ID NO: 534131 - RNA, 22 nt, Human
ugugccaggcacuugcccaggc

SEQ ID NO: 534132 - RNA, 22 nt, Human
gcuggcagucccaucagcuggg

SEQ ID NO: 534133 - RNA, 22 nt, Human
uagggcucagaguccaguuucu

SEQ ID NO: 534134 - RNA, 22 nt, Human
uccugggaggcugugccuggcu

SEQ ID NO: 534135 - RNA, 22 nt, Human
cuggagaggccccaagauauuu

SEQ ID NO: 534136 - RNA, 21 nt, Human
acaugagacacacauauaugu

SEQ ID NO: 534137 - RNA, 22 nt, Human
ugauuuuacuuagcaugauguu

SEQ ID NO: 534138 - RNA, 19 nt, Human
agcaggcuaggcugccucu

SEQ ID NO: 534139 - RNA, 22 nt, Human
cugaagaugucugagaugcuca

SEQ ID NO: 534140 - RNA, 22 nt, Human
gcaagcaguuguggcuucugag

SEQ ID NO: 534141 - RNA, 22 nt, Human
aaaaugaacagaacaaugggga

SEQ ID NO: 534142 - RNA, 22 nt, Human
uccaagaagucaucuaaacugu

SEQ ID NO: 534143 - RNA, 22 nt, Human
ggccagguggcuguccuggcgu

SEQ ID NO: 534144 - RNA, 22 nt, Human
acauucaccacacuuauagggc

SEQ ID NO: 534145 - RNA, 22 nt, Human
ucacugggcccugaggugggac

SEQ ID NO: 534146 - RNA, 22 nt, Human
uuacacaacagugcaucagcag

SEQ ID NO: 534147 - RNA, 20 nt, Human
aacuuguucuaccuguuuca

SEQ ID NO: 534148 - RNA, 22 nt, Human
gccagagcagaauagaguggcc

SEQ ID NO: 534149 - RNA, 22 nt, Human
auuuguagugaagugaaaauaa

SEQ ID NO: 534150 - RNA, 22 nt, Human
agagcccucucauuggcuuauu

SEQ ID NO: 534151 - RNA, 22 nt, Human
aaauaauugaguuggucaauau

SEQ ID NO: 534152 - RNA, 22 nt, Human
acacuuuaucucaucucagaca

SEQ ID NO: 534153 - RNA, 22 nt, Human
ugaaugagaacacugaaagagg

SEQ ID NO: 534154 - RNA, 22 nt, Human
auaaacuauguaauuugcucua

SEQ ID NO: 534155 - RNA, 22 nt, Human
uaaaugaagaaauggagauugu

SEQ ID NO: 534156 - RNA, 22 nt, Human
gucugaggaagaugcaggggga

SEQ ID NO: 534157 - RNA, 22 nt, Human
caaaggcaugugaguauaugug

SEQ ID NO: 534158 - RNA, 22 nt, Human
gauggcagcagcagccagggau

SEQ ID NO: 534159 - RNA, 22 nt, Human
agcuuugugacuuugagcuagu

SEQ ID NO: 534160 - RNA, 22 nt, Human
acauaaugaaaugcagaaauca

SEQ ID NO: 534161 - RNA, 22 nt, Human
uucacauaaauagaucacauca

SEQ ID NO: 534162 - RNA, 22 nt, Human
ugcccugccaagaccaaguggu

SEQ ID NO: 534163 - RNA, 22 nt, Human
agcaggcacaagaaagggaggu

SEQ ID NO: 534164 - RNA, 22 nt, Human
cuagggaccucagcuccuggag

SEQ ID NO: 534165 - RNA, 22 nt, Human
aacauuagauuuguuuuucuag

SEQ ID NO: 534166 - RNA, 22 nt, Human
aaauuauuuucagaauggagaa

SEQ ID NO: 534167 - RNA, 19 nt, Human
agcuggggcgguguguguu

SEQ ID NO: 534168 - RNA, 22 nt, Human
gagggcucuaccaaguaacucu

SEQ ID NO: 534169 - RNA, 22 nt, Human
ucuggggagcagcccuggugag

SEQ ID NO: 534170 - RNA, 22 nt, Human
aaaugcuacauacacaucaggg

SEQ ID NO: 534171 - RNA, 22 nt, Human
gagagugaggcaucaggggcag

SEQ ID NO: 534172 - RNA, 22 nt, Human
uaauuucuaauucauuuucagu

SEQ ID NO: 534173 - RNA, 22 nt, Human
uccugaggcacaauccuagaau

SEQ ID NO: 534174 - RNA, 18 nt, Human
agcagaauucuaggguuc

SEQ ID NO: 534175 - RNA, 22 nt, Human
ugccugugaaaacccugggguu

SEQ ID NO: 534176 - RNA, 22 nt, Human
ucucuuuuauguacacccugac

SEQ ID NO: 534177 - RNA, 22 nt, Human
ggcaaagccuuccagcuguuac

SEQ ID NO: 534178 - RNA, 22 nt, Human
gaaaucuacgauuagugaaaau

SEQ ID NO: 534179 - RNA, 22 nt, Human
gugucacaugguuuacugcagc

SEQ ID NO: 534180 - RNA, 22 nt, Human
caggaaauuuauguucuacuua

SEQ ID NO: 534181 - RNA, 22 nt, Human
ccuccuggccugugcagagccc

SEQ ID NO: 534182 - RNA, 22 nt, Human
auuccacacaguaauacucaau

SEQ ID NO: 534183 - RNA, 22 nt, Human
ggaagugguagagccaugagug

SEQ ID NO: 534184 - RNA, 22 nt, Human
ggcuucugaaccaggcccugga

SEQ ID NO: 534185 - RNA, 22 nt, Human
aaugccuuauaggcugaaaauu

SEQ ID NO: 534186 - RNA, 22 nt, Human
caaggcaggcaguucacuugag

SEQ ID NO: 534187 - RNA, 22 nt, Human
uuauuauaaugagggauaaaaa

SEQ ID NO: 534188 - RNA, 22 nt, Human
acaguuuacagggauuugagcu

SEQ ID NO: 534189 - RNA, 22 nt, Human
aggcuucagaugaccuuagcau

SEQ ID NO: 534190 - RNA, 22 nt, Human
auaugauuguccuuagcaaauu

SEQ ID NO: 534191 - RNA, 22 nt, Human
ggcugcucugccuuccagcugg

SEQ ID NO: 534192 - RNA, 22 nt, Human
uaaagcagugugguuguguccc

SEQ ID NO: 534193 - RNA, 22 nt, Human
cagaaauguacugacaugcagu

SEQ ID NO: 534194 - RNA, 22 nt, Human
uuccaggggcagcagugauggu

SEQ ID NO: 534195 - RNA, 22 nt, Human
ggccucacccaucggugccuuu

SEQ ID NO: 534196 - RNA, 20 nt, Human
cauuuguuagcuuucuacug

SEQ ID NO: 534197 - RNA, 22 nt, Human
ugccuggcaagaggggcuggcu

SEQ ID NO: 534198 - RNA, 22 nt, Human
acagaacuuccagggaacauac

SEQ ID NO: 534199 - RNA, 22 nt, Human
acaaaugugucuaauugugccu

SEQ ID NO: 534200 - RNA, 22 nt, Human
ugcuuaaaauaguucauuuuug

SEQ ID NO: 534201 - RNA, 22 nt, Human
gagagugagauaauuucacaua

SEQ ID NO: 534202 - RNA, 22 nt, Human
gaacaugauggcuguuauuuug

SEQ ID NO: 534203 - RNA, 22 nt, Human
uggcaaagaugaagcauuucgu

SEQ ID NO: 534204 - RNA, 22 nt, Human
ugacacagauuagagacauacc

SEQ ID NO: 534205 - RNA, 22 nt, Human
ugaggccuuuucugucuggcua

SEQ ID NO: 534206 - RNA, 22 nt, Human
cuggggacuugcagacacaauu

SEQ ID NO: 534207 - RNA, 22 nt, Human
ugcuuuauucaggguuuacccc

SEQ ID NO: 534208 - RNA, 22 nt, Human
gaggaagaagggauuagaacuc

SEQ ID NO: 534209 - RNA, 22 nt, Human
auucuugcaguauacaacuacu

SEQ ID NO: 534210 - RNA, 22 nt, Human
guuuauaaauucugcuuuuguu

SEQ ID NO: 534211 - RNA, 22 nt, Human
cugugcugauucagcacaggcc

SEQ ID NO: 534212 - RNA, 22 nt, Human
agguuccuuauggggauggcua

SEQ ID NO: 534213 - RNA, 22 nt, Human
cugccugacugauaaucucuga

SEQ ID NO: 534214 - RNA, 22 nt, Human
aaagcagacugauuugcaucac

SEQ ID NO: 534215 - RNA, 22 nt, Human
uuaccagaugggggacuaugag

SEQ ID NO: 534216 - RNA, 22 nt, Human
acuucuguaaagggaagacagu

SEQ ID NO: 534217 - RNA, 22 nt, Human
agccagccgggggaccacagug

SEQ ID NO: 534218 - RNA, 22 nt, Human
ucaucacauguguagucauccc

SEQ ID NO: 534219 - RNA, 22 nt, Human
aucagaaaggugggcaagcaga

SEQ ID NO: 534220 - RNA, 18 nt, Human
agccuggaggguugaagu

SEQ ID NO: 534221 - RNA, 22 nt, Human
cuuauacagaucaagggaaaag

SEQ ID NO: 534222 - RNA, 22 nt, Human
gcacugaaugcuuuuacuguaa

SEQ ID NO: 534223 - RNA, 22 nt, Human
ccugccucaucaacuugucgug

SEQ ID NO: 534224 - RNA, 22 nt, Human
augggaggaagagaagaugucu

SEQ ID NO: 534225 - RNA, 22 nt, Human
ucagaguccuuuggccugacag

SEQ ID NO: 534226 - RNA, 22 nt, Human
gauggcacacagacauccccgc

SEQ ID NO: 534227 - RNA, 22 nt, Human
cauaucauaggucuuggauaau

SEQ ID NO: 534228 - RNA, 22 nt, Human
uugcccugccucccugagguga

SEQ ID NO: 534229 - RNA, 22 nt, Human
uggcaccugaacuuagaggugu

SEQ ID NO: 534230 - RNA, 22 nt, Human
ggcacacaggcagauggagugu

SEQ ID NO: 534231 - RNA, 22 nt, Human
ugaaggaaugaguauacuguuu

SEQ ID NO: 534232 - RNA, 21 nt, Human
auucaacuagaugauuauuuc

SEQ ID NO: 534233 - RNA, 22 nt, Human
cuccaguaucuguaggaaaagg

SEQ ID NO: 534234 - RNA, 23 nt, Human
cuucacaaucaaaaucaguucug

SEQ ID NO: 534235 - RNA, 22 nt, Human
ggauauaugcauguuaucauuu

SEQ ID NO: 534236 - RNA, 22 nt, Human
auuauuaggugcucucugacaa

SEQ ID NO: 534237 - RNA, 22 nt, Human
ggacagaggguugacagaguau

SEQ ID NO: 534238 - RNA, 22 nt, Human
gcaggcuccaggccggccccuu

SEQ ID NO: 534239 - RNA, 23 nt, Human
gccugggacucaggaggagcuca

SEQ ID NO: 534240 - RNA, 22 nt, Human
cucuucaauagauuguugaggg

SEQ ID NO: 534241 - RNA, 22 nt, Human
gauagcaacauagaacagaauu

SEQ ID NO: 534242 - RNA, 22 nt, Human
aguguauugauuggaacagccu

SEQ ID NO: 534243 - RNA, 18 nt, Human
cgcccugcuauaaaugac

SEQ ID NO: 534244 - RNA, 22 nt, Human
ggaggaguguggggcacucugc

SEQ ID NO: 534245 - RNA, 22 nt, Human
uuguaacacuuuucuauuaaua

SEQ ID NO: 534246 - RNA, 23 nt, Human
agagcuuucuaaaauguaaaucu

SEQ ID NO: 534247 - RNA, 22 nt, Human
gcauggcaaauaucgagggcag

SEQ ID NO: 534248 - RNA, 22 nt, Human
augaaggcuguguagauggaug

SEQ ID NO: 534249 - RNA, 22 nt, Human
uggcagucgaucauauucagca

SEQ ID NO: 534250 - RNA, 22 nt, Human
uggucucuucuuccaagauggc

SEQ ID NO: 534251 - RNA, 22 nt, Human
acagagucauucauuguccagu

SEQ ID NO: 534252 - RNA, 22 nt, Human
cuccagugggggugagccuaga

SEQ ID NO: 534253 - RNA, 22 nt, Human
aaagcagagguugcagugagcu

SEQ ID NO: 534254 - RNA, 22 nt, Human
cagccaggcccccgagucguug

SEQ ID NO: 534255 - RNA, 22 nt, Human
agcacuagagccaaaauuuggg

SEQ ID NO: 534256 - RNA, 22 nt, Human
agggcuggagccacagcuggga

SEQ ID NO: 534257 - RNA, 22 nt, Human
uggggcugucccgguuuggcga

SEQ ID NO: 534258 - RNA, 22 nt, Human
aaugagcuagaccugcuuccuc

SEQ ID NO: 534259 - RNA, 22 nt, Human
aagugcaaaucuguggcugaaa

SEQ ID NO: 534260 - RNA, 22 nt, Human
auuugcagagcucugaauuuug

SEQ ID NO: 534261 - RNA, 22 nt, Human
agagagaacacccucggcaugg

SEQ ID NO: 534262 - RNA, 22 nt, Human
gggcucugcgcucagcuccagc

SEQ ID NO: 534263 - RNA, 22 nt, Human
cagagaaacucagauagcugau

SEQ ID NO: 534264 - RNA, 22 nt, Human
agagccaguuacaacuguggag

SEQ ID NO: 534265 - RNA, 22 nt, Human
agaggguggugaggccugguuc

SEQ ID NO: 534266 - RNA, 22 nt, Human
uaacagaaaggggacagaaaua

SEQ ID NO: 534267 - RNA, 22 nt, Human
gaacagcagcuuccugggaauu

SEQ ID NO: 534268 - RNA, 22 nt, Human
uucucuucuguucagugcccaa

SEQ ID NO: 534269 - RNA, 22 nt, Human
ugggggagaguuuagaugauuu

SEQ ID NO: 534270 - RNA, 22 nt, Human
ccuuaccugauugcuggcaucc

SEQ ID NO: 534271 - RNA, 23 nt, Human
cgcccagccucagugaccugggc

SEQ ID NO: 534272 - RNA, 23 nt, Human
uuacaguaggaguuggaaaacca

SEQ ID NO: 534273 - RNA, 22 nt, Human
cugggcucccucaugugucugc

SEQ ID NO: 534274 - RNA, 22 nt, Human
guguaugaacgaaagaauggau

SEQ ID NO: 534275 - RNA, 22 nt, Human
aacuuuaaggcuauaaauuaug

SEQ ID NO: 534276 - RNA, 22 nt, Human
cagguugggcugcgaggaggag

SEQ ID NO: 534277 - RNA, 22 nt, Human
augaaacagaguacuuaauaua

SEQ ID NO: 534278 - RNA, 22 nt, Human
agcugcugagccaggcugaugu

SEQ ID NO: 534279 - RNA, 22 nt, Human
ugggcuguggagcaccuuugca

SEQ ID NO: 534280 - RNA, 22 nt, Human
cacauucaauuacacagauagg

SEQ ID NO: 534281 - RNA, 22 nt, Human
ucagaguguuuuacuaaacaag

SEQ ID NO: 534282 - RNA, 22 nt, Human
uucaugaacgaacauauguaua

SEQ ID NO: 534283 - RNA, 22 nt, Human
gccaggcugacucccccggccu

SEQ ID NO: 534284 - RNA, 22 nt, Human
uuagggcaggcaugagagaacu

SEQ ID NO: 534285 - RNA, 22 nt, Human
agcaaggcagucagcuggcugg

SEQ ID NO: 534286 - RNA, 22 nt, Human
ugcagcucauugcuggggucug

SEQ ID NO: 534287 - RNA, 21 nt, Human
acuguucauuugaugaacugg

SEQ ID NO: 534288 - RNA, 22 nt, Human
acugggcugguuaguuuuacua

SEQ ID NO: 534289 - RNA, 22 nt, Human
gcugcugggagggaucguaaau

SEQ ID NO: 534290 - RNA, 22 nt, Human
aacagaauugcugcugccaaug

SEQ ID NO: 534291 - RNA, 22 nt, Human
acaucuguuugagaaaaagaag

SEQ ID NO: 534292 - RNA, 21 nt, Human
agauuguauggaggugagagg

SEQ ID NO: 534293 - RNA, 19 nt, Human
aggcucugagcuccuggag

SEQ ID NO: 534294 - RNA, 22 nt, Human
gcugccucaggcaccuccuggc

SEQ ID NO: 534295 - RNA, 22 nt, Human
ugggaagggucaguuucuucau

SEQ ID NO: 534296 - RNA, 22 nt, Human
ucagcaguuuuauaugcagcuu

SEQ ID NO: 534297 - RNA, 20 nt, Human
cuucaaguuaugguuggcaa

SEQ ID NO: 534298 - RNA, 22 nt, Human
aaacaucauaggcaugcaugau

SEQ ID NO: 534299 - RNA, 22 nt, Human
caguaaugggcaagacaauaug

SEQ ID NO: 534300 - RNA, 22 nt, Human
uuuuccaaaguaccaugucccu

SEQ ID NO: 534301 - RNA, 22 nt, Human
uaucuugagagacaacacagca

SEQ ID NO: 534302 - RNA, 22 nt, Human
cugcagcuguagaggacagugg

SEQ ID NO: 534303 - RNA, 22 nt, Human
auugcaaaugagucuuaauaua

SEQ ID NO: 534304 - RNA, 22 nt, Human
aucuaggauuugaaugcacagu

SEQ ID NO: 534305 - RNA, 22 nt, Human
gccuucaguagugucagcugua

SEQ ID NO: 534306 - RNA, 22 nt, Human
gcagagaguugggcugcgccag

SEQ ID NO: 534307 - RNA, 22 nt, Human
ggaggccaguccuggccgggcu

SEQ ID NO: 534308 - RNA, 22 nt, Human
cccuguccuggaugggagcacu

SEQ ID NO: 534309 - RNA, 22 nt, Human
auuauguaacugugguucagca

SEQ ID NO: 534310 - RNA, 22 nt, Human
ucccaggcuggcaggcagcagu

SEQ ID NO: 534311 - RNA, 22 nt, Human
cagcaucuguauccuaggcuga

SEQ ID NO: 534312 - RNA, 22 nt, Human
aagcauuugugaaauucagaug

SEQ ID NO: 534313 - RNA, 22 nt, Human
uacacauacaccaaugugguca

SEQ ID NO: 534314 - RNA, 20 nt, Human
ugcuuuuauaccuauaauga

SEQ ID NO: 534315 - RNA, 22 nt, Human
guggccugccgugugguauggg

SEQ ID NO: 534316 - RNA, 22 nt, Human
auguaaauuguacugacacacg

SEQ ID NO: 534317 - RNA, 22 nt, Human
uugaauaggacucagcagugau

SEQ ID NO: 534318 - RNA, 22 nt, Human
accaucagucacauguagagaa

SEQ ID NO: 534319 - RNA, 22 nt, Human
gcugccaauccagcugugggag

SEQ ID NO: 534320 - RNA, 18 nt, Human
gucacuguguuucugagc

SEQ ID NO: 534321 - RNA, 22 nt, Human
agcugcucucacuggacgccug

SEQ ID NO: 534322 - RNA, 22 nt, Human
ugcuuuuaggagauuaaaauua

SEQ ID NO: 534323 - RNA, 22 nt, Human
caguuugucuugauucagaaca

SEQ ID NO: 534324 - RNA, 22 nt, Human
ucagggacugcagagggaagcu

SEQ ID NO: 534325 - RNA, 22 nt, Human
uaagaaacaugauacuuuuccu

SEQ ID NO: 534326 - RNA, 22 nt, Human
cagacacagcaauucuguguug

SEQ ID NO: 534327 - RNA, 22 nt, Human
cugaagccacgauagcuuccua

SEQ ID NO: 534328 - RNA, 22 nt, Human
gcucaagggaugggagugggug

SEQ ID NO: 534329 - RNA, 22 nt, Human
ugccaggcccagcuccagagcu

SEQ ID NO: 534330 - RNA, 22 nt, Human
auaaggcacacauagauagggu

SEQ ID NO: 534331 - RNA, 22 nt, Human
ucagcauaucuugagcuucaug

SEQ ID NO: 534332 - RNA, 22 nt, Human
aguaauuuguuauaaagcaaua

SEQ ID NO: 534333 - RNA, 21 nt, Human
uauuucuuugacucucucccu

SEQ ID NO: 534334 - RNA, 22 nt, Human
guggucaggcagugggagagaa

SEQ ID NO: 534335 - RNA, 22 nt, Human
agcagggcuuugcagacuuggg

SEQ ID NO: 534336 - RNA, 22 nt, Human
aaugggaggauuuucucucuug

SEQ ID NO: 534337 - RNA, 22 nt, Human
uuuccacaauguuuuugcagga

SEQ ID NO: 534338 - RNA, 22 nt, Human
uugguccugggcacugauuaac

SEQ ID NO: 534339 - RNA, 22 nt, Human
uccaggcagcccuuccugacuc

SEQ ID NO: 534340 - RNA, 22 nt, Human
uuucacauguggaaugccaggu

SEQ ID NO: 534341 - RNA, 22 nt, Human
agaugguuaucuuuucuuugua

SEQ ID NO: 534342 - RNA, 22 nt, Human
acuuucaauuugcacuaaccua

SEQ ID NO: 534343 - RNA, 22 nt, Human
uggcccugcugggucagagcug

SEQ ID NO: 534344 - RNA, 22 nt, Human
gggcaguagcuucguaggcauc

SEQ ID NO: 534345 - RNA, 22 nt, Human
gcguaaggccucuggucucgga

SEQ ID NO: 534346 - RNA, 22 nt, Human
uggagcagccuuuucuaagcaa

SEQ ID NO: 534347 - RNA, 22 nt, Human
ugaaacuucuaauaugaauagu

SEQ ID NO: 534348 - RNA, 22 nt, Human
cccugcaggggaccugcagccu

SEQ ID NO: 534349 - RNA, 22 nt, Human
ggcaggagauaaaauauuaguu

SEQ ID NO: 534350 - RNA, 22 nt, Human
ccaggcucugagccucacucuu

SEQ ID NO: 534351 - RNA, 22 nt, Human
gcugggcucuuaucaccuguac

SEQ ID NO: 534352 - RNA, 22 nt, Human
uugcacuauaggaaaauguguc

SEQ ID NO: 534353 - RNA, 22 nt, Human
cuggccagcugacagcagggcu

SEQ ID NO: 534354 - RNA, 22 nt, Human
gccagcagggcccaaaugcugg

SEQ ID NO: 534355 - RNA, 22 nt, Human
ccuggcugggccugauuucuca

SEQ ID NO: 534356 - RNA, 22 nt, Human
ccugccagauccccugagcuga

SEQ ID NO: 534357 - RNA, 22 nt, Human
ucugccuuccccauaaucugau

SEQ ID NO: 534358 - RNA, 22 nt, Human
agucccagaugacccagcuacu

SEQ ID NO: 534359 - RNA, 22 nt, Human
ugcuucucccaaccagggccug

SEQ ID NO: 534360 - RNA, 22 nt, Human
ugaggcagguggauuacaaggu

SEQ ID NO: 534361 - RNA, 22 nt, Human
ccaggcugccgaggaaagaaag

SEQ ID NO: 534362 - RNA, 22 nt, Human
aggaagugaaagggaaggaguu

SEQ ID NO: 534363 - RNA, 20 nt, Human
aggcagacaaggagucuguu

SEQ ID NO: 534364 - RNA, 22 nt, Human
ucagaguguggugagaugugca

SEQ ID NO: 534365 - RNA, 22 nt, Human
ggagaaggaagaaagcuacuau

SEQ ID NO: 534366 - RNA, 22 nt, Human
agaggagcugggaggcccucgu

SEQ ID NO: 534367 - RNA, 22 nt, Human
cucgcaggacagugcuaggacu

SEQ ID NO: 534368 - RNA, 22 nt, Human
gugacucacacaggccugggcu

SEQ ID NO: 534369 - RNA, 22 nt, Human
cugccuuccaaccccagacucc

SEQ ID NO: 534370 - RNA, 22 nt, Human
gccucugcacuguggcacacca

SEQ ID NO: 534371 - RNA, 22 nt, Human
uauccuuguacuauaguauuua

SEQ ID NO: 534372 - RNA, 22 nt, Human
uguuccaucaguuuuugguuga

SEQ ID NO: 534373 - RNA, 20 nt, Human
uuauuucucauucuccuacu

SEQ ID NO: 534374 - RNA, 22 nt, Human
gaaauauuacaguggaggggau

SEQ ID NO: 534375 - RNA, 22 nt, Human
aguuacauauaagaagacagac

SEQ ID NO: 534376 - RNA, 22 nt, Human
gggggcuggaauauccaucaac

SEQ ID NO: 534377 - RNA, 22 nt, Human
ugcaggugcuccgggggugccc

SEQ ID NO: 534378 - RNA, 22 nt, Human
auuauucuuaugucaucauggc

SEQ ID NO: 534379 - RNA, 22 nt, Human
cuuucuuugcagugagccagag

SEQ ID NO: 534380 - RNA, 22 nt, Human
ucacuuaaaaauucuaguuaug

SEQ ID NO: 534381 - RNA, 22 nt, Human
agcuuguaacagacauaaaaau

SEQ ID NO: 534382 - RNA, 22 nt, Human
ucagguggagaccuccuuggcc

SEQ ID NO: 534383 - RNA, 22 nt, Human
auuguacaaugccuggaacauu

SEQ ID NO: 534384 - RNA, 22 nt, Human
uauauuuuagacacccucacgc

SEQ ID NO: 534385 - RNA, 22 nt, Human
auucagcaguuccugcuucagu

SEQ ID NO: 534386 - RNA, 22 nt, Human
ugccagucagugguuuaaaagu

SEQ ID NO: 534387 - RNA, 22 nt, Human
agggcugcaccggggcuucgcg

SEQ ID NO: 534388 - RNA, 22 nt, Human
ucaaagucauggcaggcucaga

SEQ ID NO: 534389 - RNA, 21 nt, Human
uucauaaaccauucucaugca

SEQ ID NO: 534390 - RNA, 22 nt, Human
aaugaguucugguucauuuuau

SEQ ID NO: 534391 - RNA, 22 nt, Human
acuguguggaccacucugaggc

SEQ ID NO: 534392 - RNA, 22 nt, Human
ucucuuaauuguaaugguuccu

SEQ ID NO: 534393 - RNA, 22 nt, Human
acagaauuaacauuugaugaau

SEQ ID NO: 534394 - RNA, 22 nt, Human
aagauucuguauuucuaacaau

SEQ ID NO: 534395 - RNA, 22 nt, Human
gaaaucugcccagugcacuggu

SEQ ID NO: 534396 - RNA, 21 nt, Human
uacauugacuacaaauaaagc

SEQ ID NO: 534397 - RNA, 22 nt, Human
cagcaggaccauugaggcauca

SEQ ID NO: 534398 - RNA, 22 nt, Human
gauauugcauauuggaugaguu

SEQ ID NO: 534399 - RNA, 22 nt, Human
cugggcugucccaaccccaucc

SEQ ID NO: 534400 - RNA, 22 nt, Human
cuguggggaagauagaaccgac

SEQ ID NO: 534401 - RNA, 22 nt, Human
aggcccagagagccaguuagug

SEQ ID NO: 534402 - RNA, 22 nt, Human
gacacagagggcaccagauaug

SEQ ID NO: 534403 - RNA, 22 nt, Human
gagccuggauagccuuguucca

SEQ ID NO: 534404 - RNA, 22 nt, Human
ugaaaucauugccaaguauuga

SEQ ID NO: 534405 - RNA, 22 nt, Human
uuugauuuucagcaauaguggc

SEQ ID NO: 534406 - RNA, 20 nt, Human
cucuccuugccgacuuggca

SEQ ID NO: 534407 - RNA, 22 nt, Human
gccugcugccacccuggcuccg

SEQ ID NO: 534408 - RNA, 22 nt, Human
gcuggucccaauguguuuccuu

SEQ ID NO: 534409 - RNA, 22 nt, Human
cucaggcuugggaggaggccca

SEQ ID NO: 534410 - RNA, 22 nt, Human
uguuacacagcagaauagcaag

SEQ ID NO: 534411 - RNA, 22 nt, Human
cgcagggccgcgagcgggacca

SEQ ID NO: 534412 - RNA, 22 nt, Human
aggcagccagauggcagccugc

SEQ ID NO: 534413 - RNA, 22 nt, Human
uggggucugaguaucugcauuu

SEQ ID NO: 534414 - RNA, 22 nt, Human
cuauuagguuggugcaaaagua

SEQ ID NO: 534415 - RNA, 22 nt, Human
guggagacuucuacuagagacc

SEQ ID NO: 534416 - RNA, 20 nt, Human
acugggccuaggggaggcau

SEQ ID NO: 534417 - RNA, 22 nt, Human
gcccauggcagaacugugagca

SEQ ID NO: 534418 - RNA, 22 nt, Human
cagcuguugaucucuuaagccu

SEQ ID NO: 534419 - RNA, 22 nt, Human
guggcaguucugugucucuugu

SEQ ID NO: 534420 - RNA, 22 nt, Human
auaaggcaagcugucaguuugu

SEQ ID NO: 534421 - RNA, 20 nt, Human
uucagcuaccagguaucuuc

SEQ ID NO: 534422 - RNA, 22 nt, Human
aaacaccaagagcuagcuauua

SEQ ID NO: 534423 - RNA, 22 nt, Human
aagcccagaugggagcauuuca

SEQ ID NO: 534424 - RNA, 22 nt, Human
ugggcuggcugaacuucaaccu

SEQ ID NO: 534425 - RNA, 22 nt, Human
uucuuaaaacuuauggacaggu

SEQ ID NO: 534426 - RNA, 22 nt, Human
aaaauuauggaguaucccaaag

SEQ ID NO: 534427 - RNA, 22 nt, Human
uuuucauuuuuguagaugcaag

SEQ ID NO: 534428 - RNA, 22 nt, Human
gccaggcagauaugugagcuua

SEQ ID NO: 534429 - RNA, 22 nt, Human
cagugaggaagcugucuggacc

SEQ ID NO: 534430 - RNA, 22 nt, Human
agugguucaguuuuggucuggc

SEQ ID NO: 534431 - RNA, 22 nt, Human
gugcucaggggcaauccuggga

SEQ ID NO: 534432 - RNA, 22 nt, Human
caggcuugauuauucagacaau

SEQ ID NO: 534433 - RNA, 22 nt, Human
cagcugggcuaagaguagaggc

SEQ ID NO: 534434 - RNA, 22 nt, Human
aauaggaagcaccaaauucucc

SEQ ID NO: 534435 - RNA, 22 nt, Human
uugcaagguuucucucugccua

SEQ ID NO: 534436 - RNA, 22 nt, Human
ugcagccaccaccucugcugaa

SEQ ID NO: 534437 - RNA, 22 nt, Human
gccucugcggagcuguacauca

SEQ ID NO: 534438 - RNA, 22 nt, Human
agggcuccaggggaccaucagu

SEQ ID NO: 534439 - RNA, 22 nt, Human
ggcugugggaugcauaggagcu

SEQ ID NO: 534440 - RNA, 22 nt, Human
agggucaagaggcagaguucuu

SEQ ID NO: 534441 - RNA, 22 nt, Human
ccacccagaccagggaucuggg

SEQ ID NO: 534442 - RNA, 21 nt, Human
ugggaugggucugggaccagc

SEQ ID NO: 534443 - RNA, 22 nt, Human
acaaggcugugggagaaccucu

SEQ ID NO: 534444 - RNA, 23 nt, Human
auacauacagucuuacugacuuu

SEQ ID NO: 534445 - RNA, 22 nt, Human
ugucauuuggugccaggaaaga

SEQ ID NO: 534446 - RNA, 22 nt, Human
guuucaaaaugaugcuguaacu

SEQ ID NO: 534447 - RNA, 22 nt, Human
cauggacucugguuuggggagc

SEQ ID NO: 534448 - RNA, 22 nt, Human
agacaaguucugugggucaccu

SEQ ID NO: 534449 - RNA, 22 nt, Human
ugggcacuggaagccugcugug

SEQ ID NO: 534450 - RNA, 22 nt, Human
ccagcuaguaagcaccugcauc

SEQ ID NO: 534451 - RNA, 20 nt, Human
aggcacuggauuucuuauau

SEQ ID NO: 534452 - RNA, 22 nt, Human
acauacauauguuuaaaugcau

SEQ ID NO: 534453 - RNA, 22 nt, Human
aacccgggaggcagagguugug

SEQ ID NO: 534454 - RNA, 22 nt, Human
cacaggguuguucugaggauuc

SEQ ID NO: 534455 - RNA, 20 nt, Human
uggagcuguaaucuugucug

SEQ ID NO: 534456 - RNA, 22 nt, Human
uuaaauuagucaagcuucucug

SEQ ID NO: 534457 - RNA, 22 nt, Human
ccuguucacugcacaguuuccg

SEQ ID NO: 534458 - RNA, 22 nt, Human
cuggaaagauuuacacggggaa

SEQ ID NO: 534459 - RNA, 19 nt, Human
ucugucacuggggguauuc

SEQ ID NO: 534460 - RNA, 22 nt, Human
ugaggugaagaguggagcucag

SEQ ID NO: 534461 - RNA, 22 nt, Human
ucuguaaagacuccaaaagcca

SEQ ID NO: 534462 - RNA, 22 nt, Human
uguggggcuuacaaaggcagau

SEQ ID NO: 534463 - RNA, 22 nt, Human
ugcaugcaacaauucuucuaua

SEQ ID NO: 534464 - RNA, 22 nt, Human
agcaggcugggcaauaugggca

SEQ ID NO: 534465 - RNA, 22 nt, Human
acagcuggaggucugugagcac

SEQ ID NO: 534466 - RNA, 23 nt, Human
aggaggccugaaacugaggcuga

SEQ ID NO: 534467 - RNA, 22 nt, Human
aauaaacugcucaauugcauca

SEQ ID NO: 534468 - RNA, 22 nt, Human
ucugucacccagagugcagugg

SEQ ID NO: 534469 - RNA, 21 nt, Human
uccugggaagcacuggggugg

SEQ ID NO: 534470 - RNA, 22 nt, Human
uuguaugagcuccaggaacuca

SEQ ID NO: 534471 - RNA, 22 nt, Human
ccaaggcaggggaucaaaguuu

SEQ ID NO: 534472 - RNA, 22 nt, Human
cugaaggauucaaaauggcagg

SEQ ID NO: 534473 - RNA, 22 nt, Human
cuggcagcuuccuuugcaucug

SEQ ID NO: 534474 - RNA, 22 nt, Human
uaaacuacccaugacaguuuca

SEQ ID NO: 534475 - RNA, 22 nt, Human
ucaagaauuuuuaaugugacug

SEQ ID NO: 534476 - RNA, 22 nt, Human
agguaccaaaagccuuuuucug

SEQ ID NO: 534477 - RNA, 22 nt, Human
ucagagaaguaagguggggugc

SEQ ID NO: 534478 - RNA, 22 nt, Human
ucagaaagcuauaugguguguc

SEQ ID NO: 534479 - RNA, 22 nt, Human
uaaaguuuauuugaacaucucu

SEQ ID NO: 534480 - RNA, 22 nt, Human
aacuaaaagugugucucuugua

SEQ ID NO: 534481 - RNA, 22 nt, Human
gcccagcagaucucagugucuc

SEQ ID NO: 534482 - RNA, 22 nt, Human
cuauuuguaaagugccuggugu

SEQ ID NO: 534483 - RNA, 22 nt, Human
gcugagagaaaagugagguucu

SEQ ID NO: 534484 - RNA, 20 nt, Human
agugcaagaaagcacagcug

SEQ ID NO: 534485 - RNA, 22 nt, Human
guuugaaaguucaacaggaaaa

SEQ ID NO: 534486 - RNA, 22 nt, Human
aaguauaagcuauucuucauga

SEQ ID NO: 534487 - RNA, 21 nt, Human
agaggcaggcauuaaguacac

SEQ ID NO: 534488 - RNA, 22 nt, Human
agcuuccuacaaccaucucaga

SEQ ID NO: 534489 - RNA, 22 nt, Human
agacacagaaguugcuguuggg

SEQ ID NO: 534490 - RNA, 22 nt, Human
ugggaagaugauaauucacagu

SEQ ID NO: 534491 - RNA, 22 nt, Human
ucugccugagggagcugaggaa

SEQ ID NO: 534492 - RNA, 22 nt, Human
guacauuucauuuaaaugaugu

SEQ ID NO: 534493 - RNA, 22 nt, Human
cuggugugauugagcccaggug

SEQ ID NO: 534494 - RNA, 22 nt, Human
acacauaucuaagauagaugac

SEQ ID NO: 534495 - RNA, 20 nt, Human
auucugcuuugaaaauaagg

SEQ ID NO: 534496 - RNA, 22 nt, Human
uagcagaggguagugccggggc

SEQ ID NO: 534497 - RNA, 22 nt, Human
uagauggcugguguucugagcu

SEQ ID NO: 534498 - RNA, 22 nt, Human
ggugcagugguguggcaaaggg

SEQ ID NO: 534499 - RNA, 22 nt, Human
cuggagcugcuguccuugggug

SEQ ID NO: 534500 - RNA, 22 nt, Human
agccuggauucgugcauccaca

SEQ ID NO: 534501 - RNA, 22 nt, Human
uuuccucugaugcugacuugga

SEQ ID NO: 534502 - RNA, 22 nt, Human
gauuucaaggaguuuucacagu

SEQ ID NO: 534503 - RNA, 22 nt, Human
cccugagcccauaguugacauu

SEQ ID NO: 534504 - RNA, 22 nt, Human
gaggccacccuaugggucccag

SEQ ID NO: 534505 - RNA, 22 nt, Human
aucagagauggcuccagugcuc

SEQ ID NO: 534506 - RNA, 22 nt, Human
ggaggccagggacccagucagc

SEQ ID NO: 534507 - RNA, 22 nt, Human
cccaggagauggagguugcagu

SEQ ID NO: 534508 - RNA, 22 nt, Human
ugggagaagcagcagccaagug

SEQ ID NO: 534509 - RNA, 22 nt, Human
caaggccaguccauuuuggaag

SEQ ID NO: 534510 - RNA, 22 nt, Human
cuggagccuucaccaggggaaa

SEQ ID NO: 534511 - RNA, 19 nt, Human
acauguuuugcagaacagc

SEQ ID NO: 534512 - RNA, 22 nt, Human
ugcaucuguucagagcugucga

SEQ ID NO: 534513 - RNA, 17 nt, Human
cuggagccaagagggcc

SEQ ID NO: 534514 - RNA, 22 nt, Human
uaacuaacuaguguucaaaaua

SEQ ID NO: 534515 - RNA, 22 nt, Human
gacauuuaugaaggagauaugc

SEQ ID NO: 534516 - RNA, 20 nt, Human
auauguguacguguauacau

SEQ ID NO: 534517 - RNA, 18 nt, Human
uggcucagauggcuuuaa

SEQ ID NO: 534518 - RNA, 22 nt, Human
acccaaaagucacucaggagca

SEQ ID NO: 534519 - RNA, 22 nt, Human
auuuuguuauaggagcugaaau

SEQ ID NO: 534520 - RNA, 22 nt, Human
caguagacacauuaauauggaa

SEQ ID NO: 534521 - RNA, 22 nt, Human
uugaaaguuaucuagauucuga

SEQ ID NO: 534522 - RNA, 22 nt, Human
uauuuauuggacaguguugcug

SEQ ID NO: 534523 - RNA, 22 nt, Human
aaaaaucacuuuuauaggcagc

SEQ ID NO: 534524 - RNA, 22 nt, Human
ccugggugaugugcugcccucg

SEQ ID NO: 534525 - RNA, 22 nt, Human
uuugacaaaggaaaaaugcaca

SEQ ID NO: 534526 - RNA, 22 nt, Human
ugucccaguuuaucugggacug

SEQ ID NO: 534527 - RNA, 22 nt, Human
cagaagccugccucagaugcac

SEQ ID NO: 534528 - RNA, 22 nt, Human
uucagcagguggugaguucugc

SEQ ID NO: 534529 - RNA, 22 nt, Human
acaaauuuggugagaguaaaua

SEQ ID NO: 534530 - RNA, 22 nt, Human
uccauuaacaccuguacguggc

SEQ ID NO: 534531 - RNA, 22 nt, Human
aaacaccagucccaguauacac

SEQ ID NO: 534532 - RNA, 22 nt, Human
ugcaccauacccauuccccucu

SEQ ID NO: 534533 - RNA, 22 nt, Human
aaagcaauugugguuuuuguca

SEQ ID NO: 534534 - RNA, 22 nt, Human
ugggcucugcugcguaccaguu

SEQ ID NO: 534535 - RNA, 22 nt, Human
aggggcugggacagagccaagc

SEQ ID NO: 534536 - RNA, 22 nt, Human
uaaggcacacaguugcugcaug

SEQ ID NO: 534537 - RNA, 22 nt, Human
cugggcacaaguggcccuggau

SEQ ID NO: 534538 - RNA, 22 nt, Human
gcagggaaguuugaucuuuuuc

SEQ ID NO: 534539 - RNA, 22 nt, Human
gcaaaaaaugcuuguugcuuag

SEQ ID NO: 534540 - RNA, 20 nt, Human
caggaggcaaggucaagguc

SEQ ID NO: 534541 - RNA, 17 nt, Human
ucauuucaguaaaucca

SEQ ID NO: 534542 - RNA, 22 nt, Human
uaucuuugcaaauaucucuaag

SEQ ID NO: 534543 - RNA, 21 nt, Human
agcugcagcccaaaggccugu

SEQ ID NO: 534544 - RNA, 22 nt, Human
augucuuuggcuuugacauggc

SEQ ID NO: 534545 - RNA, 22 nt, Human
agcccaagcauaggagggaggc

SEQ ID NO: 534546 - RNA, 22 nt, Human
uucuggagguuauuaggagucu

SEQ ID NO: 534547 - RNA, 22 nt, Human
ugaaauguuugaagaccacuga

SEQ ID NO: 534548 - RNA, 22 nt, Human
gggaaagaccuuccuggggugu

SEQ ID NO: 534549 - RNA, 22 nt, Human
aaguucuuggaggaugaagagu

SEQ ID NO: 534550 - RNA, 22 nt, Human
uuacacagacauggcaucauga

SEQ ID NO: 534551 - RNA, 22 nt, Human
auggccaguguuucccucaguu

SEQ ID NO: 534552 - RNA, 22 nt, Human
gugaauggggcaggaaggaugg

SEQ ID NO: 534553 - RNA, 22 nt, Human
ugccuuuuguaugcaggccaug

SEQ ID NO: 534554 - RNA, 22 nt, Human
uacacagaaauuguguagggau

SEQ ID NO: 534555 - RNA, 22 nt, Human
cagaggaggcgguauacacugc

SEQ ID NO: 534556 - RNA, 22 nt, Human
aacaguaaugugguguuggguu

SEQ ID NO: 534557 - RNA, 22 nt, Human
caguuuuagcuagagcaaacca

SEQ ID NO: 534558 - RNA, 19 nt, Human
cagucccaaauucuuguca

SEQ ID NO: 534559 - RNA, 22 nt, Human
uacacaauucuggaugcauguc

SEQ ID NO: 534560 - RNA, 22 nt, Human
uagcuugucagugaauagcugu

SEQ ID NO: 534561 - RNA, 22 nt, Human
gaggcauaaaucacaguguuca

SEQ ID NO: 534562 - RNA, 22 nt, Human
uguuuccaaagucuuuucuuaa

SEQ ID NO: 534563 - RNA, 22 nt, Human
aauaggaaaauauuuaacaaga

SEQ ID NO: 534564 - RNA, 19 nt, Human
aaaucagaaucugcauuuu

SEQ ID NO: 534565 - RNA, 19 nt, Human
cagagcugcuggccucguc

SEQ ID NO: 534566 - RNA, 22 nt, Human
caucagugaaagugaauguucu

SEQ ID NO: 534567 - RNA, 22 nt, Human
uuccaacucugaaaugugaaau

SEQ ID NO: 534568 - RNA, 22 nt, Human
gaggcuccccaugaggccccag

SEQ ID NO: 534569 - RNA, 22 nt, Human
cugcugagccuggugcgggaug

SEQ ID NO: 534570 - RNA, 22 nt, Human
aggacccugagcgggcaugccg

SEQ ID NO: 534571 - RNA, 19 nt, Human
gaggaggcuucagcuuucu

SEQ ID NO: 534572 - RNA, 20 nt, Human
agacaggagcccccauucag

SEQ ID NO: 534573 - RNA, 22 nt, Human
uuugacaguaauaaagcacaag

SEQ ID NO: 534574 - RNA, 23 nt, Human
cagguggcuccacgagggguggg

SEQ ID NO: 534575 - RNA, 22 nt, Human
cauuucuguacauguuuuggug

SEQ ID NO: 534576 - RNA, 22 nt, Human
uggggugugcucagagcagggg

SEQ ID NO: 534577 - RNA, 22 nt, Human
aaucuuaagcugaauucucucc

SEQ ID NO: 534578 - RNA, 22 nt, Human
augaaacugggauaacuauagc

SEQ ID NO: 534579 - RNA, 22 nt, Human
agucucuuccuucaaggcuggu

SEQ ID NO: 534580 - RNA, 22 nt, Human
aaaaugcaugagaaugugcucg

SEQ ID NO: 534581 - RNA, 22 nt, Human
agguaagggucacaguucauau

SEQ ID NO: 534582 - RNA, 22 nt, Human
cagcucagucuggagagaugca

SEQ ID NO: 534583 - RNA, 22 nt, Human
agccuauucaucugaucuugaa

SEQ ID NO: 534584 - RNA, 22 nt, Human
uggccuggcagagcaaggccug

SEQ ID NO: 534585 - RNA, 22 nt, Human
agggccagcacuccuggcagga

SEQ ID NO: 534586 - RNA, 22 nt, Human
uucaacauuuuugaguuuaggu

SEQ ID NO: 534587 - RNA, 22 nt, Human
ucuggcucuuugggugauugua

SEQ ID NO: 534588 - RNA, 22 nt, Human
ggcaggugugagaucgaggcca

SEQ ID NO: 534589 - RNA, 22 nt, Human
uggacagcgaaagugccuggga

SEQ ID NO: 534590 - RNA, 22 nt, Human
cucaggauguacuacagaaggc

SEQ ID NO: 534591 - RNA, 22 nt, Human
ugaggcagcaauugauuauuca

SEQ ID NO: 534592 - RNA, 22 nt, Human
agaagccacaggccucgucugg

SEQ ID NO: 534593 - RNA, 22 nt, Human
agccuauuccaggaugagcuca

SEQ ID NO: 534594 - RNA, 22 nt, Human
uacauuccauguguguguauuc

SEQ ID NO: 534595 - RNA, 22 nt, Human
augccacugacauggacaauuu

SEQ ID NO: 534596 - RNA, 22 nt, Human
uguuuuguuuaugagagcacag

SEQ ID NO: 534597 - RNA, 22 nt, Human
uuucugaauuuacucaagguca

SEQ ID NO: 534598 - RNA, 22 nt, Human
gcugccucuguagcuuuggacc

SEQ ID NO: 534599 - RNA, 22 nt, Human
gucugucucucuccagagugca

SEQ ID NO: 534600 - RNA, 21 nt, Human
acagacagggccagugucccc

SEQ ID NO: 534601 - RNA, 22 nt, Human
uuaaaaugcagauuaugacuca

SEQ ID NO: 534602 - RNA, 22 nt, Human
uaucaauacauguuaucagugu

SEQ ID NO: 534603 - RNA, 22 nt, Human
ugggagagcagagaacccucuu

SEQ ID NO: 534604 - RNA, 22 nt, Human
auauguccaccuguaugcuaaa

SEQ ID NO: 534605 - RNA, 22 nt, Human
uccuucaguucaauuaguccgu

SEQ ID NO: 534606 - RNA, 22 nt, Human
cuggcucacaggugagaugcau

SEQ ID NO: 534607 - RNA, 22 nt, Human
gcucccagacugaccagaggug

SEQ ID NO: 534608 - RNA, 21 nt, Human
aauuucagacccauuuugccu

SEQ ID NO: 534609 - RNA, 22 nt, Human
gcucaggcaggagugcaguggc

SEQ ID NO: 534610 - RNA, 22 nt, Human
auauucuuauccuuuucucugu

SEQ ID NO: 534611 - RNA, 22 nt, Human
aggcacacagaccccagcaagu

SEQ ID NO: 534612 - RNA, 22 nt, Human
aucuggguucaccaugcuccug

SEQ ID NO: 534613 - RNA, 22 nt, Human
gcugcuggagcuuugcagaagg

SEQ ID NO: 534614 - RNA, 22 nt, Human
agagccaggcaggcaauguuga

SEQ ID NO: 534615 - RNA, 22 nt, Human
uggcugcuuguuuuagugaggc

SEQ ID NO: 534616 - RNA, 22 nt, Human
ccugggcuggaguacagcagug

SEQ ID NO: 534617 - RNA, 22 nt, Human
ggcugccauaacagaguaccac

SEQ ID NO: 534618 - RNA, 21 nt, Human
gcuggcugucccagggaagca

SEQ ID NO: 534619 - RNA, 18 nt, Human
gugacagcugcuagcuca

SEQ ID NO: 534620 - RNA, 22 nt, Human
guauuuuacugcucaaagcucu

SEQ ID NO: 534621 - RNA, 22 nt, Human
agguggggaguauauguaauug

SEQ ID NO: 534622 - RNA, 22 nt, Human
ucuucaaugcauucucuuguuu

SEQ ID NO: 534623 - RNA, 20 nt, Human
cugccuggaggccucuaccu

SEQ ID NO: 534624 - RNA, 22 nt, Human
gcaaggagacuguagggccaag

SEQ ID NO: 534625 - RNA, 22 nt, Human
gaaaucacuuuuuucauaguug

SEQ ID NO: 534626 - RNA, 18 nt, Human
gcuucauggaaggguugu

SEQ ID NO: 534627 - RNA, 22 nt, Human
aagugaagaaauacaugagaau

SEQ ID NO: 534628 - RNA, 22 nt, Human
cuuauggccugcccacaguagu

SEQ ID NO: 534629 - RNA, 22 nt, Human
uggaggcauuuuagguugucac

SEQ ID NO: 534630 - RNA, 22 nt, Human
uugaagcaugguacuuguucaa

SEQ ID NO: 534631 - RNA, 22 nt, Human
uaacaguuuugaguuuugcuuc

SEQ ID NO: 534632 - RNA, 23 nt, Human
ccagugauugccuggaaggaggu

SEQ ID NO: 534633 - RNA, 18 nt, Human
cccugagaugaugcugug

SEQ ID NO: 534634 - RNA, 22 nt, Human
agucucuggacugggagauggc

SEQ ID NO: 534635 - RNA, 22 nt, Human
cagggccugcuuccuucuuguu

SEQ ID NO: 534636 - RNA, 22 nt, Human
auaugcauguacgugugcacaa

SEQ ID NO: 534637 - RNA, 22 nt, Human
aaaucagagugguuggucaucc

SEQ ID NO: 534638 - RNA, 22 nt, Human
agggcugacaguggcguggcgu

SEQ ID NO: 534639 - RNA, 22 nt, Human
acacucuuuuugugguugucua

SEQ ID NO: 534640 - RNA, 22 nt, Human
ugcagggcuaagucagagccug

SEQ ID NO: 534641 - RNA, 22 nt, Human
aggaggaggcuggaguacaccc

SEQ ID NO: 534642 - RNA, 22 nt, Human
ugccuucaaucaggauggucuc

SEQ ID NO: 534643 - RNA, 22 nt, Human
uuugaaaaaggccuuugguaug

SEQ ID NO: 534644 - RNA, 22 nt, Human
ucagggacagggugcugcugcg

SEQ ID NO: 534645 - RNA, 22 nt, Human
aguaucaaggaucuccagcacc

SEQ ID NO: 534646 - RNA, 22 nt, Human
gccagcagguugucaaggagcu

SEQ ID NO: 534647 - RNA, 22 nt, Human
agggauguaaauucuucuucuu

SEQ ID NO: 534648 - RNA, 19 nt, Human
uggcuccugccugccuucu

SEQ ID NO: 534649 - RNA, 22 nt, Human
cuguccucaacccauccuucuc

SEQ ID NO: 534650 - RNA, 17 nt, Human
ggcaggugacagacacc

SEQ ID NO: 534651 - RNA, 22 nt, Human
ugcugucuguuuacuggcuaua

SEQ ID NO: 534652 - RNA, 22 nt, Human
gagauuuuucaacaagaauagg

SEQ ID NO: 534653 - RNA, 22 nt, Human
aaguacauauauuuaugauucu

SEQ ID NO: 534654 - RNA, 22 nt, Human
uugcaccaaaugaguuaaaauu

SEQ ID NO: 534655 - RNA, 22 nt, Human
uuguguaacuugagcaaacaca

SEQ ID NO: 534656 - RNA, 22 nt, Human
auuauugccagcuauuacaaca

SEQ ID NO: 534657 - RNA, 22 nt, Human
cucaggccaauaagcuccagcc

SEQ ID NO: 534658 - RNA, 22 nt, Human
cugagccaaccacagcaggagc

SEQ ID NO: 534659 - RNA, 22 nt, Human
ggcagcaggcgacuucccuauu

SEQ ID NO: 534660 - RNA, 22 nt, Human
cugccuggccugaucuccacgc

SEQ ID NO: 534661 - RNA, 22 nt, Human
acauguuuacauuaggugauau

SEQ ID NO: 534662 - RNA, 22 nt, Human
uagggaccuuagaauuguaugu

SEQ ID NO: 534663 - RNA, 18 nt, Human
ucacuggguguauguggc

SEQ ID NO: 534664 - RNA, 22 nt, Human
gggcuucucuuaugcuaacugg

SEQ ID NO: 534665 - RNA, 22 nt, Human
cccuccagcucaaagcaaccgg

SEQ ID NO: 534666 - RNA, 22 nt, Human
uuauuuacaacucuucucuucc

SEQ ID NO: 534667 - RNA, 22 nt, Human
uaaagucauaagaguggauccg

SEQ ID NO: 534668 - RNA, 22 nt, Human
agagucauaguuuaacuuuugu

SEQ ID NO: 534669 - RNA, 21 nt, Human
ugggaccuagcuuugcacagg

SEQ ID NO: 534670 - RNA, 18 nt, Human
aggcagcagcaucuucuc

SEQ ID NO: 534671 - RNA, 22 nt, Human
ugguucauugagaagacugaag

SEQ ID NO: 534672 - RNA, 23 nt, Human
agcccagcagagaaccuaggucc

SEQ ID NO: 534673 - RNA, 22 nt, Human
ugauuucucuccguuauuucag

SEQ ID NO: 534674 - RNA, 22 nt, Human
auaauaaaccaggaugggucug

SEQ ID NO: 534675 - RNA, 22 nt, Human
gucccugggucuaaggcaguaa

SEQ ID NO: 534676 - RNA, 22 nt, Human
cuguuuuugugcugugucuccc

SEQ ID NO: 534677 - RNA, 22 nt, Human
gucuggagagcugagcagaguu

SEQ ID NO: 534678 - RNA, 22 nt, Human
cagagcuggagaaguggauuua

SEQ ID NO: 534679 - RNA, 22 nt, Human
uccugcagagucccacugauuu

SEQ ID NO: 534680 - RNA, 22 nt, Human
cuggcuggcagaugcucuugcu

SEQ ID NO: 534681 - RNA, 22 nt, Human
ggcagcaguggcugcuauuguc

SEQ ID NO: 534682 - RNA, 22 nt, Human
aaauauacggucccuaacaguc

SEQ ID NO: 534683 - RNA, 22 nt, Human
guuuacaacaucuuguccuuca

SEQ ID NO: 534684 - RNA, 22 nt, Human
uuguucuugccaagacaugaag

SEQ ID NO: 534685 - RNA, 22 nt, Human
ccugggcuuugcuggcaaggcc

SEQ ID NO: 534686 - RNA, 22 nt, Human
aggaugugaguggacacagucc

SEQ ID NO: 534687 - RNA, 22 nt, Human
ccagcuggagcucgcagauagg

SEQ ID NO: 534688 - RNA, 22 nt, Human
uuuucauugagcaccugaguaa

SEQ ID NO: 534689 - RNA, 22 nt, Human
caagauggaguccgggaaugug

SEQ ID NO: 534690 - RNA, 22 nt, Human
ggacuggccggcgcugaggccc

SEQ ID NO: 534691 - RNA, 22 nt, Human
ucccagccuuucuuuucugcug

SEQ ID NO: 534692 - RNA, 22 nt, Human
cucuggaguuagugaucugggc

SEQ ID NO: 534693 - RNA, 22 nt, Human
uaguaucuuucuauauuuccca

SEQ ID NO: 534694 - RNA, 22 nt, Human
augcaucuauucccaagggcag

SEQ ID NO: 534695 - RNA, 22 nt, Human
ccagcagaggggcggagugcag

SEQ ID NO: 534696 - RNA, 22 nt, Human
ucuggagucugagaucugagga

SEQ ID NO: 534697 - RNA, 22 nt, Human
aagugauucauugaugaugagg

SEQ ID NO: 534698 - RNA, 22 nt, Human
uugaccauaccuccaggcaguu

SEQ ID NO: 534699 - RNA, 22 nt, Human
gucaggaugacaagugcuuuca

SEQ ID NO: 534700 - RNA, 18 nt, Human
gccugccuagagcuugcc

SEQ ID NO: 534701 - RNA, 20 nt, Human
ggaagcuguggguccccagg

SEQ ID NO: 534702 - RNA, 22 nt, Human
cagaugagaguggccaggguuc

SEQ ID NO: 534703 - RNA, 21 nt, Human
ccuggcagaagccugauaugc

SEQ ID NO: 534704 - RNA, 22 nt, Human
gugggcaguggggucuucugcc

SEQ ID NO: 534705 - RNA, 22 nt, Human
ucauauuuaggccuuuaauuca

SEQ ID NO: 534706 - RNA, 22 nt, Human
uugcuuuguuuaaaagugguau

SEQ ID NO: 534707 - RNA, 21 nt, Human
agggucaggaaccaggguacc

SEQ ID NO: 534708 - RNA, 22 nt, Human
guuugcauguauuaagucaaua

SEQ ID NO: 534709 - RNA, 22 nt, Human
uaaacagaaagcagauguacuu

SEQ ID NO: 534710 - RNA, 22 nt, Human
gccaggccugcaagugcuggug

SEQ ID NO: 534711 - RNA, 20 nt, Human
cugugcuuuggaaccuggaa

SEQ ID NO: 534712 - RNA, 23 nt, Human
ccagcccuccaccagcucuaggc

SEQ ID NO: 534713 - RNA, 22 nt, Human
ccugggcuugguuguugagaac

SEQ ID NO: 534714 - RNA, 22 nt, Human
ggcauggcucggagucagaaca

SEQ ID NO: 534715 - RNA, 22 nt, Human
gauuuccuagacauggggcaga

SEQ ID NO: 534716 - RNA, 22 nt, Human
ccugagagcgaguggccucaug

SEQ ID NO: 534717 - RNA, 22 nt, Human
gcacagcccugagcgcaugucu

SEQ ID NO: 534718 - RNA, 21 nt, Human
agcugccuccacuucugaggc

SEQ ID NO: 534719 - RNA, 21 nt, Human
auuuucauuaauucagugugg

SEQ ID NO: 534720 - RNA, 22 nt, Human
aacagcaguggcaggagaaggc

SEQ ID NO: 534721 - RNA, 22 nt, Human
gcugggcucuuuaccccuguac

SEQ ID NO: 534722 - RNA, 22 nt, Human
cuggucagggcucuuugggagc

SEQ ID NO: 534723 - RNA, 22 nt, Human
uucuccccugacccugaugagg

SEQ ID NO: 534724 - RNA, 22 nt, Human
cucugagcuccuggaagcgugc

SEQ ID NO: 534725 - RNA, 22 nt, Human
auacuacacauugacuauauuu

SEQ ID NO: 534726 - RNA, 22 nt, Human
cuggcaggucucgcugacgugu

SEQ ID NO: 534727 - RNA, 22 nt, Human
agcugcucuuugaaggacacuu

SEQ ID NO: 534728 - RNA, 22 nt, Human
aggcagcagacuguuaaucaga

SEQ ID NO: 534729 - RNA, 22 nt, Human
ggaagagagggcugggccucaa

SEQ ID NO: 534730 - RNA, 22 nt, Human
ugcaggugugggcaggggagca

SEQ ID NO: 534731 - RNA, 22 nt, Human
uucaggauucugugucugacaa

SEQ ID NO: 534732 - RNA, 19 nt, Human
uaugucccuuucccccauu

SEQ ID NO: 534733 - RNA, 22 nt, Human
ggggaaagugaauuguguagug

SEQ ID NO: 534734 - RNA, 17 nt, Human
gcugcagcgguaggcag

SEQ ID NO: 534735 - RNA, 22 nt, Human
aagcauuugguucugaagacuc

SEQ ID NO: 534736 - RNA, 22 nt, Human
aagcauuuuguuuuaagaauga

SEQ ID NO: 534737 - RNA, 22 nt, Human
ccaggccuggaccaugccaggg

SEQ ID NO: 534738 - RNA, 22 nt, Human
aagagcugugggugguaguccu

SEQ ID NO: 534739 - RNA, 23 nt, Human
agaugagccaacaccuccaugcc

SEQ ID NO: 534740 - RNA, 20 nt, Human
auauagagucaaaauggcuu

SEQ ID NO: 534741 - RNA, 22 nt, Human
agcagagcuauucuugugcaau

SEQ ID NO: 534742 - RNA, 22 nt, Human
acagaauacuacagacugguua

SEQ ID NO: 534743 - RNA, 22 nt, Human
cuggggcagagcccagcaauuu

SEQ ID NO: 534744 - RNA, 22 nt, Human
aaacucuuccuuucuuuaaagu

SEQ ID NO: 534745 - RNA, 22 nt, Human
uuuggaaagacacacaguuuua

SEQ ID NO: 534746 - RNA, 22 nt, Human
auuuucagaacauucauucacu

SEQ ID NO: 534747 - RNA, 22 nt, Human
ggcacugagcgggcucugagcg

SEQ ID NO: 534748 - RNA, 22 nt, Human
gcauuuagcuuuaaaauauuuc

SEQ ID NO: 534749 - RNA, 22 nt, Human
uguccugugaccuggcaccaca

SEQ ID NO: 534750 - RNA, 22 nt, Human
auuccaguccaaauguuuuccu

SEQ ID NO: 534751 - RNA, 22 nt, Human
auucuagaaggcaaagcaaggg

SEQ ID NO: 534752 - RNA, 22 nt, Human
caggaggcccaaagggcgcaga

SEQ ID NO: 534753 - RNA, 18 nt, Human
cuuucagauggauaugcu

SEQ ID NO: 534754 - RNA, 22 nt, Human
ccuguaacuccuuggcucaagu

SEQ ID NO: 534755 - RNA, 22 nt, Human
guuacauuaaaaacauucacug

SEQ ID NO: 534756 - RNA, 22 nt, Human
auuucucaaguaaaugagucau

SEQ ID NO: 534757 - RNA, 17 nt, Human
cccugcacccuacucuc

SEQ ID NO: 534758 - RNA, 22 nt, Human
uaaacuacugggcaaggacagg

SEQ ID NO: 534759 - RNA, 22 nt, Human
gccugguguccagaggcgagug

SEQ ID NO: 534760 - RNA, 22 nt, Human
ucagcugaaguggagaagcaga

SEQ ID NO: 534761 - RNA, 22 nt, Human
aaucacaucacugagaaugagg

SEQ ID NO: 534762 - RNA, 22 nt, Human
uaaauguguguagccaucugug

SEQ ID NO: 534763 - RNA, 22 nt, Human
cagugaaguguggacgucacca

SEQ ID NO: 534764 - RNA, 22 nt, Human
uguuucuuacguuuuuagaggc

SEQ ID NO: 534765 - RNA, 22 nt, Human
uguggggcugugguguucuucu

SEQ ID NO: 534766 - RNA, 22 nt, Human
gagcugucuggggacucugggu

SEQ ID NO: 534767 - RNA, 22 nt, Human
guuaaugugauauaaaguauuu

SEQ ID NO: 534768 - RNA, 22 nt, Human
caguagccacuagacacaugua

SEQ ID NO: 534769 - RNA, 22 nt, Human
ccaucuccaaauaccaucacau

SEQ ID NO: 534770 - RNA, 22 nt, Human
uccaguccuagaaacuggagag

SEQ ID NO: 534771 - RNA, 22 nt, Human
gcccucucggcauagcaggggc

SEQ ID NO: 534772 - RNA, 22 nt, Human
cagagagcuuagugugcugcau

SEQ ID NO: 534773 - RNA, 22 nt, Human
gagcuggaagucuguggucaga

SEQ ID NO: 534774 - RNA, 22 nt, Human
gcuggccucgcaggcaggaugu

SEQ ID NO: 534775 - RNA, 22 nt, Human
auagcauauaaguuauaaaacu

SEQ ID NO: 534776 - RNA, 22 nt, Human
ggccuugggcagacacgucaca

SEQ ID NO: 534777 - RNA, 22 nt, Human
agauguuucaguaauuuaucuu

SEQ ID NO: 534778 - RNA, 22 nt, Human
aauguuuuauagcucaagcaau

SEQ ID NO: 534779 - RNA, 18 nt, Human
ucaugagguagaggcugg

SEQ ID NO: 534780 - RNA, 22 nt, Human
aaaugcacucugcuucugugac

SEQ ID NO: 534781 - RNA, 22 nt, Human
uuuauuagugcuuguaucacug

SEQ ID NO: 534782 - RNA, 22 nt, Human
uuaauuuucucaucugugaaau

SEQ ID NO: 534783 - RNA, 22 nt, Human
uaaaugcaguacaaauuguucu

SEQ ID NO: 534784 - RNA, 22 nt, Human
agagugguggccguggugucac

SEQ ID NO: 534785 - RNA, 22 nt, Human
ucagcuuugccaccagcuguaa

SEQ ID NO: 534786 - RNA, 20 nt, Human
ugcuuugauggaaauacagc

SEQ ID NO: 534787 - RNA, 23 nt, Human
gaagccacacaaaggucgccaag

SEQ ID NO: 534788 - RNA, 22 nt, Human
cccacacucugagaaaugcuga

SEQ ID NO: 534789 - RNA, 22 nt, Human
ggucaucuugaauuuccauucu

SEQ ID NO: 534790 - RNA, 22 nt, Human
auggcuaauacgccacuggaca

SEQ ID NO: 534791 - RNA, 22 nt, Human
uaaggcacgcauaagagggggc

SEQ ID NO: 534792 - RNA, 22 nt, Human
uccucugccccagaugaaauuu

SEQ ID NO: 534793 - RNA, 22 nt, Human
uggcacagagggacccagcagc

SEQ ID NO: 534794 - RNA, 22 nt, Human
aacuaaaacugguuuguucucu

SEQ ID NO: 534795 - RNA, 23 nt, Human
ggcugagacuacaggcgcuugcc

SEQ ID NO: 534796 - RNA, 19 nt, Human
aacuagaaagguuuugaga

SEQ ID NO: 534797 - RNA, 22 nt, Human
uucaguuucagucuugcaaaaa

SEQ ID NO: 534798 - RNA, 22 nt, Human
aggucuggaggcggagucagga

SEQ ID NO: 534799 - RNA, 22 nt, Human
cagcccugagaaggaggaucuc

SEQ ID NO: 534800 - RNA, 22 nt, Human
gaaauuuauuaucuacaucauu

SEQ ID NO: 534801 - RNA, 22 nt, Human
gcuaaugugauagagcagaaag

SEQ ID NO: 534802 - RNA, 22 nt, Human
agccaauacacugaagaucuaa

SEQ ID NO: 534803 - RNA, 18 nt, Human
uggcagcaggaagccauu

SEQ ID NO: 534804 - RNA, 19 nt, Human
ucacaagagagauaaagug

SEQ ID NO: 534805 - RNA, 22 nt, Human
aaggcacacaguuagauagagc

SEQ ID NO: 534806 - RNA, 21 nt, Human
uugcacagaaaaccauagaga

SEQ ID NO: 534807 - RNA, 21 nt, Human
cucugcugucuaccagcuguu

SEQ ID NO: 534808 - RNA, 22 nt, Human
uagacacaucuucauccacaau

SEQ ID NO: 534809 - RNA, 19 nt, Human
ucccuggcgccucucgggc

SEQ ID NO: 534810 - RNA, 22 nt, Human
cagucccaucucccagguggcu

SEQ ID NO: 534811 - RNA, 22 nt, Human
ucacauuuggagaaagccugcc

SEQ ID NO: 534812 - RNA, 22 nt, Human
uauuuacuuuuaaauugagaac

SEQ ID NO: 534813 - RNA, 22 nt, Human
acucuucagggcagugagcggg

SEQ ID NO: 534814 - RNA, 22 nt, Human
uugaagcaggaaaauuucuauu

SEQ ID NO: 534815 - RNA, 22 nt, Human
uaacaaaguauuguuuguguau

SEQ ID NO: 534816 - RNA, 22 nt, Human
acuucaguuucccucaacaaga

SEQ ID NO: 534817 - RNA, 22 nt, Human
uauaaaacagaaagcacuaccu

SEQ ID NO: 534818 - RNA, 23 nt, Human
uugcuucugugcaauucaguacu

SEQ ID NO: 534819 - RNA, 22 nt, Human
uuucacagauccuacagcuugu

SEQ ID NO: 534820 - RNA, 22 nt, Human
uuuccauauuuggucuuuggga

SEQ ID NO: 534821 - RNA, 22 nt, Human
cugccuguuccugaucauucua

SEQ ID NO: 534822 - RNA, 22 nt, Human
uacaggaggauuaucaaaggau

SEQ ID NO: 534823 - RNA, 22 nt, Human
auucacagggacaaugggagag

SEQ ID NO: 534824 - RNA, 22 nt, Human
augcaguacagauaauucuaca

SEQ ID NO: 534825 - RNA, 22 nt, Human
ccuggagcaaaaaucuaaggag

SEQ ID NO: 534826 - RNA, 22 nt, Human
ccaucccuucucuggccagcag

SEQ ID NO: 534827 - RNA, 22 nt, Human
ucccaggaucugagggcagaga

SEQ ID NO: 534828 - RNA, 22 nt, Human
uuucuggaacaguaauugaaga

SEQ ID NO: 534829 - RNA, 22 nt, Human
cccagcuucugagggggccuug

SEQ ID NO: 534830 - RNA, 22 nt, Human
cccagcagaccgcugugauggc

SEQ ID NO: 534831 - RNA, 22 nt, Human
uagaaagacaugggccagcagc

SEQ ID NO: 534832 - RNA, 22 nt, Human
uuguaugaggauagcaagaagc

SEQ ID NO: 534833 - RNA, 22 nt, Human
aguguuuuuacaagcacucugg

SEQ ID NO: 534834 - RNA, 22 nt, Human
ggaaaguggugguggaaagagg

SEQ ID NO: 534835 - RNA, 22 nt, Human
gcagcuggugcaaaugucacuc

SEQ ID NO: 534836 - RNA, 22 nt, Human
caaguuuggauuaugaaaaagu

SEQ ID NO: 534837 - RNA, 18 nt, Human
ugggauggagaguaacug

SEQ ID NO: 534838 - RNA, 22 nt, Human
ggcugugcgggcagccguggga

SEQ ID NO: 534839 - RNA, 22 nt, Human
ucaggaagcucuugcugauucu

SEQ ID NO: 534840 - RNA, 22 nt, Human
gguuuccugcauugggaaauuu

SEQ ID NO: 534841 - RNA, 22 nt, Human
caggugcucccagagaagugcu

SEQ ID NO: 534842 - RNA, 17 nt, Human
aagacagaagccaugag

SEQ ID NO: 534843 - RNA, 22 nt, Human
cccaggaaguggagguugcagu

SEQ ID NO: 534844 - RNA, 22 nt, Human
ucugcagcuugcacaggcaggc

SEQ ID NO: 534845 - RNA, 22 nt, Human
gcagauggcagcccaggcuggg

SEQ ID NO: 534846 - RNA, 22 nt, Human
ugaggcaggaguucaggcugcg

SEQ ID NO: 534847 - RNA, 22 nt, Human
uccuggcuucugucuccuuauu

SEQ ID NO: 534848 - RNA, 22 nt, Human
agaguccauaugugggaggagu

SEQ ID NO: 534849 - RNA, 22 nt, Human
ccccagcugcauacuugccaag

SEQ ID NO: 534850 - RNA, 22 nt, Human
ccugugaugguguuacacuguu

SEQ ID NO: 534851 - RNA, 22 nt, Human
uuccucaucugugcaccucacu

SEQ ID NO: 534852 - RNA, 22 nt, Human
uaaaguguuguacaaauguaug

SEQ ID NO: 534853 - RNA, 22 nt, Human
uaguauuuauaaucaugcuuaa

SEQ ID NO: 534854 - RNA, 22 nt, Human
ugaaggugaaugucuaugggga

SEQ ID NO: 534855 - RNA, 22 nt, Human
cagcugauuugagaaagaauga

SEQ ID NO: 534856 - RNA, 22 nt, Human
ccuccagcugccucagucucuu

SEQ ID NO: 534857 - RNA, 22 nt, Human
cuguauuuaguuaaaaugcuaa

SEQ ID NO: 534858 - RNA, 22 nt, Human
ucuaaacaguuucacucuuaau

SEQ ID NO: 534859 - RNA, 22 nt, Human
ggggcacuuccaggcugaggcu

SEQ ID NO: 534860 - RNA, 20 nt, Human
cuguuaaaagguaugaauuc

SEQ ID NO: 534861 - RNA, 23 nt, Human
gcugggcuuacucuuucagugag

SEQ ID NO: 534862 - RNA, 22 nt, Human
aaggagaauuuggcuugugaug

SEQ ID NO: 534863 - RNA, 22 nt, Human
ucaagugagcguagcugaaugg

SEQ ID NO: 534864 - RNA, 22 nt, Human
gggacaggcugagacuugagcu

SEQ ID NO: 534865 - RNA, 22 nt, Human
uucaaaguaccguacuuaaugg

SEQ ID NO: 534866 - RNA, 22 nt, Human
uacagcaugaucacaauggaaa

SEQ ID NO: 534867 - RNA, 22 nt, Human
ggagauaguccaggugaaggga

SEQ ID NO: 534868 - RNA, 22 nt, Human
acaacaaaaucacuagucuucc

SEQ ID NO: 534869 - RNA, 22 nt, Human
cucagcuacuugggaagcuuag

SEQ ID NO: 534870 - RNA, 22 nt, Human
gacaaaacugagaucacacugu

SEQ ID NO: 534871 - RNA, 22 nt, Human
gucagaggggcagcugccaggc

SEQ ID NO: 534872 - RNA, 22 nt, Human
agacacauaggaccacacugug

SEQ ID NO: 534873 - RNA, 22 nt, Human
ugugcagcuaguccuggacuug

SEQ ID NO: 534874 - RNA, 22 nt, Human
uccugagagcagaguccaggug

SEQ ID NO: 534875 - RNA, 22 nt, Human
ucaugucaguuucuucuauaaa

SEQ ID NO: 534876 - RNA, 22 nt, Human
guaggcagucucucaggugauc

SEQ ID NO: 534877 - RNA, 22 nt, Human
gggaagugaaguguagcugucu

SEQ ID NO: 534878 - RNA, 22 nt, Human
uuugucuuaaaucuuguuacug

SEQ ID NO: 534879 - RNA, 22 nt, Human
aagagagagugcgcucacagaa

SEQ ID NO: 534880 - RNA, 22 nt, Human
ugaaggcccuaucuccauauac

SEQ ID NO: 534881 - RNA, 22 nt, Human
ucccagauucuucugugugggc

SEQ ID NO: 534882 - RNA, 22 nt, Human
cuggggcuggugaggcaggcuc

SEQ ID NO: 534883 - RNA, 22 nt, Human
cucccagagagcaggugggccg

SEQ ID NO: 534884 - RNA, 22 nt, Human
caggaguccagagugucauuuu

SEQ ID NO: 534885 - RNA, 18 nt, Human
uaaauauauuucccccuu

SEQ ID NO: 534886 - RNA, 22 nt, Human
cuggccugagaaugcuacccuu

SEQ ID NO: 534887 - RNA, 22 nt, Human
accucugcaguagggcugugcc

SEQ ID NO: 534888 - RNA, 22 nt, Human
ucagagugaggcgucaacauga

SEQ ID NO: 534889 - RNA, 22 nt, Human
ugucugagugugccugggcauu

SEQ ID NO: 534890 - RNA, 22 nt, Human
cccaggaaaagcagugccagca

SEQ ID NO: 534891 - RNA, 21 nt, Human
agaguaauuccugcuggaaag

SEQ ID NO: 534892 - RNA, 22 nt, Human
cuucuguguagaaagguagccc

SEQ ID NO: 534893 - RNA, 22 nt, Human
aguggaugguauugggaccagg

SEQ ID NO: 534894 - RNA, 22 nt, Human
aguccccucuaacccaacuuua

SEQ ID NO: 534895 - RNA, 22 nt, Human
gcugugaguggaguucugugcu

SEQ ID NO: 534896 - RNA, 22 nt, Human
ugggcuccagcaccugugcucu

SEQ ID NO: 534897 - RNA, 22 nt, Human
aaggaagaagacucuuuacucc

SEQ ID NO: 534898 - RNA, 22 nt, Human
aaguacuaaggcuauuaugaug

SEQ ID NO: 534899 - RNA, 22 nt, Human
acauacaugggauuaaaaaauu

SEQ ID NO: 534900 - RNA, 22 nt, Human
aggcucagcugguggugaucgc

SEQ ID NO: 534901 - RNA, 22 nt, Human
aggacuucuccgauaagucaga

SEQ ID NO: 534902 - RNA, 22 nt, Human
gcugugcaguaguagguacagu

SEQ ID NO: 534903 - RNA, 22 nt, Human
uagaaagcuugggguguuuaaa

SEQ ID NO: 534904 - RNA, 22 nt, Human
aaauguaccuugauaguuuggu

SEQ ID NO: 534905 - RNA, 22 nt, Human
cagugccacaggaauggccaau

SEQ ID NO: 534906 - RNA, 22 nt, Human
agaggcacuaagggaagagcag

SEQ ID NO: 534907 - RNA, 22 nt, Human
uggcucugugcuucuaguaucu

SEQ ID NO: 534908 - RNA, 22 nt, Human
ccugccaggccagugagcuucc

SEQ ID NO: 534909 - RNA, 22 nt, Human
aauuucagaugucauaaauaua

SEQ ID NO: 534910 - RNA, 22 nt, Human
ucucaggaagugauauugagac

SEQ ID NO: 534911 - RNA, 22 nt, Human
acagauggaauguguuauggga

SEQ ID NO: 534912 - RNA, 22 nt, Human
aauacuugucagaugaauaaga

SEQ ID NO: 534913 - RNA, 22 nt, Human
gugauuuucuccuccuagaagu

SEQ ID NO: 534914 - RNA, 22 nt, Human
ugugagacacacugcugcuuca

SEQ ID NO: 534915 - RNA, 20 nt, Human
ucuguucaaaucuuaguucc

SEQ ID NO: 534916 - RNA, 22 nt, Human
auggacaggaacucccuuggca

SEQ ID NO: 534917 - RNA, 22 nt, Human
ucuuugcuccacacucuagaga

SEQ ID NO: 534918 - RNA, 22 nt, Human
ugagcagagucgcuccagagug

SEQ ID NO: 534919 - RNA, 22 nt, Human
uucuacaucacuuaacaugcua

SEQ ID NO: 534920 - RNA, 22 nt, Human
acugcccuggagacagcagagu

SEQ ID NO: 534921 - RNA, 22 nt, Human
aucaguuucuaccauguggaau

SEQ ID NO: 534922 - RNA, 22 nt, Human
acuuuuaucaaggaagugaucu

SEQ ID NO: 534923 - RNA, 22 nt, Human
ucucaggaauagaguggcagca

SEQ ID NO: 534924 - RNA, 22 nt, Human
cuucacagcaugagcuuuggag

SEQ ID NO: 534925 - RNA, 22 nt, Human
ggccagaaaguuaagcuguggc

SEQ ID NO: 534926 - RNA, 23 nt, Human
agagcuuagggaauucacaugag

SEQ ID NO: 534927 - RNA, 22 nt, Human
gagcuuccacucuagaaggagu

SEQ ID NO: 534928 - RNA, 22 nt, Human
acaauuucaccuuuugguucaa

SEQ ID NO: 534929 - RNA, 22 nt, Human
ggcugagcuuuucaugaugguu

SEQ ID NO: 534930 - RNA, 22 nt, Human
agauacauauagaaaacaucaa

SEQ ID NO: 534931 - RNA, 22 nt, Human
cauuucaaacaguuacagcugc

SEQ ID NO: 534932 - RNA, 22 nt, Human
auuucuacaguacacaugcauu

SEQ ID NO: 534933 - RNA, 22 nt, Human
ucugagugagggugugagauau

SEQ ID NO: 534934 - RNA, 22 nt, Human
uggccagcagaguucacucucu

SEQ ID NO: 534935 - RNA, 22 nt, Human
uuccuuguuuguagcucuggga

SEQ ID NO: 534936 - RNA, 22 nt, Human
agguggggaaaccagcgauccc

SEQ ID NO: 534937 - RNA, 22 nt, Human
ugucuucaguaaaauacacuau

SEQ ID NO: 534938 - RNA, 22 nt, Human
aagagcuggcccaaucugagca

SEQ ID NO: 534939 - RNA, 22 nt, Human
uccagccuaggggaacagcugc

SEQ ID NO: 534940 - RNA, 22 nt, Human
agcauauacaaacucauauaca

SEQ ID NO: 534941 - RNA, 22 nt, Human
cagcaggcguugggagaaagac

SEQ ID NO: 534942 - RNA, 22 nt, Human
aggcugugaguuuugucucaga

SEQ ID NO: 534943 - RNA, 22 nt, Human
uugcagagagguuaggaacuca

SEQ ID NO: 534944 - RNA, 22 nt, Human
gccuggaagugugucgugggaa

SEQ ID NO: 534945 - RNA, 22 nt, Human
auguaauaggguaacauaacau

SEQ ID NO: 534946 - RNA, 22 nt, Human
aucuuuagacaggaagcaauca

SEQ ID NO: 534947 - RNA, 22 nt, Human
guguuuggucagacguccgggg

SEQ ID NO: 534948 - RNA, 22 nt, Human
uccugggguccugacugcuucc

SEQ ID NO: 534949 - RNA, 22 nt, Human
uggcccuguggaggucagugag

SEQ ID NO: 534950 - RNA, 22 nt, Human
gccugucaauuuuguguacaau

SEQ ID NO: 534951 - RNA, 22 nt, Human
aauuaguaaccuaauuccaucu

SEQ ID NO: 534952 - RNA, 22 nt, Human
augcugaagaguucaugauuau

SEQ ID NO: 534953 - RNA, 19 nt, Human
uggcuucuguuuucauguu

SEQ ID NO: 534954 - RNA, 19 nt, Human
aagaacuaugugauuacag

SEQ ID NO: 534955 - RNA, 22 nt, Human
aagcagcacaguaauauuggug

SEQ ID NO: 534956 - RNA, 22 nt, Human
aagauuuagggccaguuuacau

SEQ ID NO: 534957 - RNA, 19 nt, Human
agcuguggggccuagcacc

SEQ ID NO: 534958 - RNA, 22 nt, Human
ggagcacuauaauagagauuuu

SEQ ID NO: 534959 - RNA, 20 nt, Human
ccucugccccggggcugcua

SEQ ID NO: 534960 - RNA, 22 nt, Human
aggcugagugcuccccuagaug

SEQ ID NO: 534961 - RNA, 15 nt, Human
uccaggcauucauuc

SEQ ID NO: 534962 - RNA, 21 nt, Human
gagcugcaccuugaccuguuu

SEQ ID NO: 534963 - RNA, 18 nt, Human
ugaauuaguuugugguuu

SEQ ID NO: 534964 - RNA, 18 nt, Human
ugucauugccagggaagc

SEQ ID NO: 534965 - RNA, 22 nt, Human
cuauuuguaagagccccacacc

SEQ ID NO: 534966 - RNA, 22 nt, Human
ccuccugguccagcaucucuuu

SEQ ID NO: 534967 - RNA, 23 nt, Human
cccagaccuugugcugcccuugg

SEQ ID NO: 534968 - RNA, 22 nt, Human
cugcaggcaucuaacugugggc

SEQ ID NO: 534969 - RNA, 22 nt, Human
cauaacauguacauauaaaugc

SEQ ID NO: 534970 - RNA, 22 nt, Human
ucuuugauggagagauagauau

SEQ ID NO: 534971 - RNA, 22 nt, Human
uccauucuaugcuuacauuuau

SEQ ID NO: 534972 - RNA, 22 nt, Human
uuauucuucuucucuugccagg

SEQ ID NO: 534973 - RNA, 22 nt, Human
cacauaauugaacgugaugagu

SEQ ID NO: 534974 - RNA, 22 nt, Human
aggcacaguggcucacaccugu

SEQ ID NO: 534975 - RNA, 22 nt, Human
cugucccaggagcuguaagaca

SEQ ID NO: 534976 - RNA, 22 nt, Human
guuagaaagugucugcuugggu

SEQ ID NO: 534977 - RNA, 22 nt, Human
cuggaaagugucuccauccugg

SEQ ID NO: 534978 - RNA, 22 nt, Human
cuguccucaccuuggcaggggg

SEQ ID NO: 534979 - RNA, 22 nt, Human
ucugccugugcuguguuuucau

SEQ ID NO: 534980 - RNA, 22 nt, Human
cuggccacaugugugcugagca

SEQ ID NO: 534981 - RNA, 22 nt, Human
ccuggcugucguuuugugaaau

SEQ ID NO: 534982 - RNA, 16 nt, Human
ugggaccuguggccaa

SEQ ID NO: 534983 - RNA, 22 nt, Human
cuuccagguccuucuugagaag

SEQ ID NO: 534984 - RNA, 23 nt, Human
ggcucugugcugggccugcagga

SEQ ID NO: 534985 - RNA, 22 nt, Human
ugggcucuccuggaggacaaca

SEQ ID NO: 534986 - RNA, 22 nt, Human
cagccagcuggugcggcagagc

SEQ ID NO: 534987 - RNA, 22 nt, Human
ucuuguccuaagagcuggauuc

SEQ ID NO: 534988 - RNA, 22 nt, Human
ucauugcagcuucagguguuca

SEQ ID NO: 534989 - RNA, 22 nt, Human
guguaaggugaaaucaacaaau

SEQ ID NO: 534990 - RNA, 18 nt, Human
ugcuuacaggaguuccug

SEQ ID NO: 534991 - RNA, 22 nt, Human
cuggcuccacucccugccugac

SEQ ID NO: 534992 - RNA, 22 nt, Human
uaguucuguguagcucaagagu

SEQ ID NO: 534993 - RNA, 22 nt, Human
uuccagaaggaagccggggagc

SEQ ID NO: 534994 - RNA, 22 nt, Human
ucaggugggcguuccggugcgg

SEQ ID NO: 534995 - RNA, 22 nt, Human
aacaaccaaaaagaugaaugua

SEQ ID NO: 534996 - RNA, 20 nt, Human
agugacagagacuguguggc

SEQ ID NO: 534997 - RNA, 22 nt, Human
gucacuguauccagguuccagc

SEQ ID NO: 534998 - RNA, 22 nt, Human
agccuggauccauguggcuacc

SEQ ID NO: 534999 - RNA, 22 nt, Human
aauaugcagcaugaugaaguaa

SEQ ID NO: 535000 - RNA, 22 nt, Human
uguacagagacuaccauuaaua

SEQ ID NO: 535001 - RNA, 22 nt, Human
uucagucagugacuaagcaguu

SEQ ID NO: 535002 - RNA, 22 nt, Human
aggggcaguuccaaguuuugug

SEQ ID NO: 535003 - RNA, 22 nt, Human
ugcagaguaaaagcagaugcua

SEQ ID NO: 535004 - RNA, 22 nt, Human
uccaggcauguugggaagauga

SEQ ID NO: 535005 - RNA, 22 nt, Human
cugcuuuaauguaagauauacc

SEQ ID NO: 535006 - RNA, 22 nt, Human
cugaaggaagcagguggccugu

SEQ ID NO: 535007 - RNA, 22 nt, Human
cuccaggcucguccaagaucga

SEQ ID NO: 535008 - RNA, 22 nt, Human
uacccaggggcugagcagaggu

SEQ ID NO: 535009 - RNA, 22 nt, Human
ccagcucugcauguuucccuug

SEQ ID NO: 535010 - RNA, 22 nt, Human
aaaugacaauaaaaguccaugc

SEQ ID NO: 535011 - RNA, 22 nt, Human
acugcuauuuuauaacagaaga

SEQ ID NO: 535012 - RNA, 20 nt, Human
uccaggcagacagcuauggg

SEQ ID NO: 535013 - RNA, 22 nt, Human
ugcagaugagagggaguuuuua

SEQ ID NO: 535014 - RNA, 22 nt, Human
uccuuccugcaggccaaguccu

SEQ ID NO: 535015 - RNA, 22 nt, Human
ugcaauaaggaguaauaguaaa

SEQ ID NO: 535016 - RNA, 22 nt, Human
cauuuguagcuauuuacuguau

SEQ ID NO: 535017 - RNA, 22 nt, Human
agcuggccuguuagagcugagu

SEQ ID NO: 535018 - RNA, 22 nt, Human
ugaggcagguaagcaaguuuug

SEQ ID NO: 535019 - RNA, 22 nt, Human
gaggaaccuaugauuuagagca

SEQ ID NO: 535020 - RNA, 22 nt, Human
ccucuggguaucuguggaagua

SEQ ID NO: 535021 - RNA, 22 nt, Human
uccugccuucauacugcuguau

SEQ ID NO: 535022 - RNA, 22 nt, Human
guccucagagugggcagguccu

SEQ ID NO: 535023 - RNA, 22 nt, Human
aaggcacucagccuugggacag

SEQ ID NO: 535024 - RNA, 22 nt, Human
aaaguggucaccuucucauuuc

SEQ ID NO: 535025 - RNA, 22 nt, Human
cagagccugcucacgucucugu

SEQ ID NO: 535026 - RNA, 22 nt, Human
caggggcuguuugccucaggcc

SEQ ID NO: 535027 - RNA, 22 nt, Human
acccaggagccgugagagguua

SEQ ID NO: 535028 - RNA, 22 nt, Human
caguacuuugaagauauuuuag

SEQ ID NO: 535029 - RNA, 22 nt, Human
agcaggugaauuccuggaugug

SEQ ID NO: 535030 - RNA, 22 nt, Human
acagcuuuugaaaaauuacugg

SEQ ID NO: 535031 - RNA, 22 nt, Human
ugagagucucagaccuccuggu

SEQ ID NO: 535032 - RNA, 22 nt, Human
cccaggcagaauuaguguuuca

SEQ ID NO: 535033 - RNA, 22 nt, Human
aaaaccugauugaauucuauuu

SEQ ID NO: 535034 - RNA, 22 nt, Human
ggugaggaaagauggugacagu

SEQ ID NO: 535035 - RNA, 22 nt, Human
cagaaagaccugggcucaagag

SEQ ID NO: 535036 - RNA, 22 nt, Human
acagcagcacuauugacauuuu

SEQ ID NO: 535037 - RNA, 22 nt, Human
uggaggugagugugguacagca

SEQ ID NO: 535038 - RNA, 22 nt, Human
acagaaagauaggcacaagguc

SEQ ID NO: 535039 - RNA, 22 nt, Human
cucuuaaaaacuugauauauuu

SEQ ID NO: 535040 - RNA, 22 nt, Human
ucuguaaacaccauguuagagu

SEQ ID NO: 535041 - RNA, 22 nt, Human
uuacuguuugaaaaaugaaugu

SEQ ID NO: 535042 - RNA, 22 nt, Human
cuggccagccugucgaugcccu

SEQ ID NO: 535043 - RNA, 22 nt, Human
ccucagagguguggcaucucug

SEQ ID NO: 535044 - RNA, 22 nt, Human
guucacaguuucuaaucccagc

SEQ ID NO: 535045 - RNA, 22 nt, Human
uucucagauccaucagaagucc

SEQ ID NO: 535046 - RNA, 22 nt, Human
acaggggcuccgaaggugaggg

SEQ ID NO: 535047 - RNA, 21 nt, Human
aaauacugggcagugacuuga

SEQ ID NO: 535048 - RNA, 20 nt, Human
gccuggaggcaaugggaaga

SEQ ID NO: 535049 - RNA, 22 nt, Human
uuacauacuuacuagaucuaug

SEQ ID NO: 535050 - RNA, 20 nt, Human
aggguggggacguucugacu

SEQ ID NO: 535051 - RNA, 22 nt, Human
auucauuugcuauuguguaugg

SEQ ID NO: 535052 - RNA, 22 nt, Human
aguggcaguggcugggcagagc

SEQ ID NO: 535053 - RNA, 22 nt, Human
acauuucugcaucucagagcua

SEQ ID NO: 535054 - RNA, 22 nt, Human
gcugcuggcacuggagugagcc

SEQ ID NO: 535055 - RNA, 22 nt, Human
uugaagcagagaaauacuugaa

SEQ ID NO: 535056 - RNA, 21 nt, Human
gcacagcaugaguguuggcau

SEQ ID NO: 535057 - RNA, 22 nt, Human
aauguuugugcauaaauauguu

SEQ ID NO: 535058 - RNA, 22 nt, Human
acugagagggaggcuguccggu

SEQ ID NO: 535059 - RNA, 17 nt, Human
agaaagaggauccacag

SEQ ID NO: 535060 - RNA, 22 nt, Human
ucugaggcccugcaggcagugu

SEQ ID NO: 535061 - RNA, 22 nt, Human
guuaauguuaucugaagacagu

SEQ ID NO: 535062 - RNA, 22 nt, Human
guccugucccccaaggcugugg

SEQ ID NO: 535063 - RNA, 22 nt, Human
uggcucugucacugugagcuau

SEQ ID NO: 535064 - RNA, 22 nt, Human
aacauugccaugguuaauuuua

SEQ ID NO: 535065 - RNA, 22 nt, Human
ucccaggccauaaaacucagag

SEQ ID NO: 535066 - RNA, 22 nt, Human
ucugaaauauugguaauacuuu

SEQ ID NO: 535067 - RNA, 22 nt, Human
cagucuuuguucccauuacuga

SEQ ID NO: 535068 - RNA, 22 nt, Human
acauguuuaaguuuguuauaug

SEQ ID NO: 535069 - RNA, 22 nt, Human
gaaggaaaucugugauuuaugc

SEQ ID NO: 535070 - RNA, 22 nt, Human
gggcaagcacagcgagcgugcg

SEQ ID NO: 535071 - RNA, 22 nt, Human
gggcugugcugaguaggaggug

SEQ ID NO: 535072 - RNA, 22 nt, Human
gugccucagcaccgccugcagc

SEQ ID NO: 535073 - RNA, 22 nt, Human
gcugagagaucaaggcaggauu

SEQ ID NO: 535074 - RNA, 22 nt, Human
uauuuguauuucaugcaguaaa

SEQ ID NO: 535075 - RNA, 17 nt, Human
gaaagguccuagaaauc

SEQ ID NO: 535076 - RNA, 22 nt, Human
gucacacuagggccaaguggag

SEQ ID NO: 535077 - RNA, 22 nt, Human
ucauuuguggaagugauugugg

SEQ ID NO: 535078 - RNA, 22 nt, Human
ucaggcuaacccuaggcagaag

SEQ ID NO: 535079 - RNA, 22 nt, Human
ugugaccucaucuuaacuggaa

SEQ ID NO: 535080 - RNA, 22 nt, Human
ggcagcuuuuaucccugacaga

SEQ ID NO: 535081 - RNA, 22 nt, Human
gcuuucuucauacucaagcauc

SEQ ID NO: 535082 - RNA, 22 nt, Human
caucccugcccucaugccuaua

SEQ ID NO: 535083 - RNA, 21 nt, Human
gggagcuggaaacugggugac

SEQ ID NO: 535084 - RNA, 22 nt, Human
agugggggcagagccucucucg

SEQ ID NO: 535085 - RNA, 22 nt, Human
auuauauugaguauaaccagag

SEQ ID NO: 535086 - RNA, 22 nt, Human
acuuuuuacaggguguauacca

SEQ ID NO: 535087 - RNA, 22 nt, Human
gcuuugcauuguuuaaucagga

SEQ ID NO: 535088 - RNA, 22 nt, Human
cacagcuuaugccacugauugg

SEQ ID NO: 535089 - RNA, 22 nt, Human
uggcagaguucgcuccuauuca

SEQ ID NO: 535090 - RNA, 22 nt, Human
cagcauuuucuuaauguaggug

SEQ ID NO: 535091 - RNA, 22 nt, Human
uuuacaauugguuuucucuaau

SEQ ID NO: 535092 - RNA, 22 nt, Human
uuauaacaacaguuuacuuuaa

SEQ ID NO: 535093 - RNA, 22 nt, Human
ggugaguugggguucacagguc

SEQ ID NO: 535094 - RNA, 22 nt, Human
acagagcucccagccaucuccu

SEQ ID NO: 535095 - RNA, 22 nt, Human
uggugggggaggcugucuagca

SEQ ID NO: 535096 - RNA, 22 nt, Human
uuugcauuccugccugcauuca

SEQ ID NO: 535097 - RNA, 21 nt, Human
guucaaauggguagauucaca

SEQ ID NO: 535098 - RNA, 21 nt, Human
uuucuuucuggcucucacagu

SEQ ID NO: 535099 - RNA, 22 nt, Human
caguguuugcuuaaguuauaug

SEQ ID NO: 535100 - RNA, 22 nt, Human
uauauuaacuugugauccugga

SEQ ID NO: 535101 - RNA, 22 nt, Human
ucuguucauacagaguauagua

SEQ ID NO: 535102 - RNA, 22 nt, Human
caguaaaagauggaaauagaau

SEQ ID NO: 535103 - RNA, 19 nt, Human
agagacugccaccagcugu

SEQ ID NO: 535104 - RNA, 22 nt, Human
aaccucaggcucucuggacaau

SEQ ID NO: 535105 - RNA, 22 nt, Human
uguuaacagccagauuugguga

SEQ ID NO: 535106 - RNA, 22 nt, Human
augcagaaucuugagaaaaauu

SEQ ID NO: 535107 - RNA, 22 nt, Human
cccagcugcaccucuauggccu

SEQ ID NO: 535108 - RNA, 22 nt, Human
ugugauuuauugaaaagagcuu

SEQ ID NO: 535109 - RNA, 22 nt, Human
aggcaggccccugagaauagac

SEQ ID NO: 535110 - RNA, 22 nt, Human
agagcagcuggggcagagacca

SEQ ID NO: 535111 - RNA, 20 nt, Human
gacaucauguacacauugcc

SEQ ID NO: 535112 - RNA, 22 nt, Human
aauaaaauggucaguuuucuca

SEQ ID NO: 535113 - RNA, 22 nt, Human
uuccauauguauauagcuguua

SEQ ID NO: 535114 - RNA, 22 nt, Human
cuguuuaucuaggaguugcagg

SEQ ID NO: 535115 - RNA, 20 nt, Human
auacaagaugaguaauuucu

SEQ ID NO: 535116 - RNA, 23 nt, Human
aagcuuccuucacgucuccuggg

SEQ ID NO: 535117 - RNA, 22 nt, Human
cagcuguuccuggaaggagacc

SEQ ID NO: 535118 - RNA, 22 nt, Human
gacauucacaguuuccgauggu

SEQ ID NO: 535119 - RNA, 22 nt, Human
uacauacacaaaugcugaaugg

SEQ ID NO: 535120 - RNA, 22 nt, Human
ucuggaaguuagaggaggaaag

SEQ ID NO: 535121 - RNA, 22 nt, Human
ugugggcuuuggagucaggaag

SEQ ID NO: 535122 - RNA, 22 nt, Human
cauggccucucuccuggaaugg

SEQ ID NO: 535123 - RNA, 22 nt, Human
agaggccagggacacugcucaa

SEQ ID NO: 535124 - RNA, 18 nt, Human
ucugccugcagggcaucu

SEQ ID NO: 535125 - RNA, 22 nt, Human
uguauuuccugguuuagaucaa

SEQ ID NO: 535126 - RNA, 22 nt, Human
gccugcuggacauuggccggcc

SEQ ID NO: 535127 - RNA, 22 nt, Human
aaaauagccucacauaauugcu

SEQ ID NO: 535128 - RNA, 22 nt, Human
aaagucauguaaugauaugauu

SEQ ID NO: 535129 - RNA, 22 nt, Human
agaaaaggcuugaagagguuuu

SEQ ID NO: 535130 - RNA, 21 nt, Human
ugcaggaaagugcugcgaccc

SEQ ID NO: 535131 - RNA, 22 nt, Human
ugacagauuuugauggcuaaua

SEQ ID NO: 535132 - RNA, 22 nt, Human
guguaugauuucaaauggcuag

SEQ ID NO: 535133 - RNA, 22 nt, Human
cuccaagucggcugcagcugga

SEQ ID NO: 535134 - RNA, 22 nt, Human
ggagagaauucagcuuaagauu

SEQ ID NO: 535135 - RNA, 22 nt, Human
ccuguucaaguugcagggcugg

SEQ ID NO: 535136 - RNA, 22 nt, Human
ccuggccaggcauggagucaca

SEQ ID NO: 535137 - RNA, 22 nt, Human
cugcuggguuugccuuucacca

SEQ ID NO: 535138 - RNA, 22 nt, Human
caacauuucaaggucuuuagga

SEQ ID NO: 535139 - RNA, 22 nt, Human
uggagaagcuguagguggacuc

SEQ ID NO: 535140 - RNA, 22 nt, Human
aaugcugcaagaggugaaaaga

SEQ ID NO: 535141 - RNA, 22 nt, Human
ggagcaguggucauucagcugg

SEQ ID NO: 535142 - RNA, 22 nt, Human
uguacagaaauuccuacuacau

SEQ ID NO: 535143 - RNA, 22 nt, Human
ugagggugugcggcccagacag

SEQ ID NO: 535144 - RNA, 22 nt, Human
ccagcaccuugaucuuggaguu

SEQ ID NO: 535145 - RNA, 20 nt, Human
cuuuuucuccagcucugagc

SEQ ID NO: 535146 - RNA, 22 nt, Human
cagucauuccuaaccaagaaca

SEQ ID NO: 535147 - RNA, 22 nt, Human
ucucccuagggccgcuggcuaa

SEQ ID NO: 535148 - RNA, 22 nt, Human
acugggaauggagccugggccu

SEQ ID NO: 535149 - RNA, 19 nt, Human
gcagcugugggaagagcca

SEQ ID NO: 535150 - RNA, 22 nt, Human
ugcacacauacaugggaagugc

SEQ ID NO: 535151 - RNA, 22 nt, Human
auuaaagcuauccagucaugaa

SEQ ID NO: 535152 - RNA, 22 nt, Human
uuugcaauuugugcugcaaaug

SEQ ID NO: 535153 - RNA, 22 nt, Human
ucccagauuguugauggcuuaa

SEQ ID NO: 535154 - RNA, 22 nt, Human
ucuguucacugagcaauggcaa

SEQ ID NO: 535155 - RNA, 22 nt, Human
ugaaaucuuuaguuucuguccc

SEQ ID NO: 535156 - RNA, 22 nt, Human
cucugugggggagaggcagcug

SEQ ID NO: 535157 - RNA, 22 nt, Human
ugaccaaagaguugcuuguauu

SEQ ID NO: 535158 - RNA, 22 nt, Human
uugugcaauccccucauuuuau

SEQ ID NO: 535159 - RNA, 22 nt, Human
cugcugugcacccaggaaggcu

SEQ ID NO: 535160 - RNA, 22 nt, Human
acacagggcggaaagcaugaga

SEQ ID NO: 535161 - RNA, 22 nt, Human
aucaguuucugugaagaacaca

SEQ ID NO: 535162 - RNA, 22 nt, Human
cucagggcuugaguguccagga

SEQ ID NO: 535163 - RNA, 22 nt, Human
cauaagaaauaaugaugaugac

SEQ ID NO: 535164 - RNA, 22 nt, Human
caaauacuguacugaacacugu

SEQ ID NO: 535165 - RNA, 22 nt, Human
guuaaagaagaauaguuccuuu

SEQ ID NO: 535166 - RNA, 22 nt, Human
ccagcagcgauagggugagugc

SEQ ID NO: 535167 - RNA, 22 nt, Human
guguucauggaugucaauuuga

SEQ ID NO: 535168 - RNA, 21 nt, Human
uuugaaagcuacaucuauagc

SEQ ID NO: 535169 - RNA, 22 nt, Human
uccagcagaccaucaaggcuca

SEQ ID NO: 535170 - RNA, 22 nt, Human
cucagcagugacaagagaguau

SEQ ID NO: 535171 - RNA, 18 nt, Human
guuaauuuugaaguucau

SEQ ID NO: 535172 - RNA, 22 nt, Human
cacuauuucagugauucugcag

SEQ ID NO: 535173 - RNA, 22 nt, Human
gugcugcagagucucgugccgc

SEQ ID NO: 535174 - RNA, 22 nt, Human
cucugcuuggaacuggacagaa

SEQ ID NO: 535175 - RNA, 22 nt, Human
uggcucuggcgugaagcccaga

SEQ ID NO: 535176 - RNA, 22 nt, Human
agcaaacagugugcuaagaaau

SEQ ID NO: 535177 - RNA, 22 nt, Human
aggccuagaggaauggccaggg

SEQ ID NO: 535178 - RNA, 22 nt, Human
gccugcuggcuguccauugcag

SEQ ID NO: 535179 - RNA, 20 nt, Human
cuguccccgaggucaccagg

SEQ ID NO: 535180 - RNA, 22 nt, Human
guuugcuaauuuaaagcuauuu

SEQ ID NO: 535181 - RNA, 22 nt, Human
cagcauggggcuuggagucagc

SEQ ID NO: 535182 - RNA, 22 nt, Human
guccucuggccuuucccaggac

SEQ ID NO: 535183 - RNA, 22 nt, Human
aaaaguacuauuuuaacaaagu

SEQ ID NO: 535184 - RNA, 23 nt, Human
gguccaggaaaggcagcagcacc

SEQ ID NO: 535185 - RNA, 22 nt, Human
cagggugggcacccagccucca

SEQ ID NO: 535186 - RNA, 22 nt, Human
augaugugugcugaucaagcuu

SEQ ID NO: 535187 - RNA, 22 nt, Human
augaagcugguuuuggcuuggg

SEQ ID NO: 535188 - RNA, 22 nt, Human
uccaggcccugggaugggagca

SEQ ID NO: 535189 - RNA, 22 nt, Human
cucacugcccugaaguuggguu

SEQ ID NO: 535190 - RNA, 19 nt, Human
cacaucagcagggcugugg

SEQ ID NO: 535191 - RNA, 22 nt, Human
gccucuccucuuaauaccauua

SEQ ID NO: 535192 - RNA, 22 nt, Human
acaggaaagagcuaggcauagg

SEQ ID NO: 535193 - RNA, 22 nt, Human
aggcuuuaaguggccuacagcu

SEQ ID NO: 535194 - RNA, 22 nt, Human
augguuuguguggcccagauga

SEQ ID NO: 535195 - RNA, 22 nt, Human
uacuugugugucaugugcagag

SEQ ID NO: 535196 - RNA, 19 nt, Human
uccugggcugggccagguc

SEQ ID NO: 535197 - RNA, 22 nt, Human
accagaaaggaugccuccuucc

SEQ ID NO: 535198 - RNA, 22 nt, Human
aggagucagauaugggaaaguu

SEQ ID NO: 535199 - RNA, 19 nt, Human
agaguugggcacuguuuca

SEQ ID NO: 535200 - RNA, 22 nt, Human
ggagccaggggaccuucacaga

SEQ ID NO: 535201 - RNA, 22 nt, Human
cuuucccuuagccccauucuau

SEQ ID NO: 535202 - RNA, 22 nt, Human
uagaaacugauagucuugugcu

SEQ ID NO: 535203 - RNA, 22 nt, Human
ccuggccuuaagggcagggagc

SEQ ID NO: 535204 - RNA, 22 nt, Human
ugcuugucuucaggaaugcuga

SEQ ID NO: 535205 - RNA, 22 nt, Human
agaguggggacagggccugucc

SEQ ID NO: 535206 - RNA, 23 nt, Human
cuccucguaacucuguggugggu

SEQ ID NO: 535207 - RNA, 22 nt, Human
agcaaucaccaccucuauauuu

SEQ ID NO: 535208 - RNA, 22 nt, Human
ucugaagugaucaucauuucuc

SEQ ID NO: 535209 - RNA, 22 nt, Human
ccaggcagagggaauagcaagu

SEQ ID NO: 535210 - RNA, 22 nt, Human
uggcagagaacacacaugauuc

SEQ ID NO: 535211 - RNA, 22 nt, Human
ccugucugcggaggaguggaag

SEQ ID NO: 535212 - RNA, 22 nt, Human
uuugaaguaccugguucugacu

SEQ ID NO: 535213 - RNA, 22 nt, Human
cagggcagaaggcacucuacuc

SEQ ID NO: 535214 - RNA, 22 nt, Human
caauuucuggaacuaauucuga

SEQ ID NO: 535215 - RNA, 22 nt, Human
cauagauuuuagguuagaucga

SEQ ID NO: 535216 - RNA, 22 nt, Human
uuauuuguaaggcagggccagu

SEQ ID NO: 535217 - RNA, 22 nt, Human
gugugccaggaacuggcugcug

SEQ ID NO: 535218 - RNA, 22 nt, Human
cagcagaguaggugcuacuucu

SEQ ID NO: 535219 - RNA, 22 nt, Human
cagcuguugugcugggcaguua

SEQ ID NO: 535220 - RNA, 22 nt, Human
agcagggcuggggcacgagcca

SEQ ID NO: 535221 - RNA, 22 nt, Human
uguguacacaaugauugcagag

SEQ ID NO: 535222 - RNA, 22 nt, Human
caagcagagaagucucuaggcu

SEQ ID NO: 535223 - RNA, 22 nt, Human
uguucauuuggcccuuuuguau

SEQ ID NO: 535224 - RNA, 22 nt, Human
aaggccagccugagagcuaaca

SEQ ID NO: 535225 - RNA, 22 nt, Human
gaaaagagaacaucugaggauc

SEQ ID NO: 535226 - RNA, 22 nt, Human
auuugucuuugagugcccugcu

SEQ ID NO: 535227 - RNA, 22 nt, Human
ucagggcauacucuucaagguc

SEQ ID NO: 535228 - RNA, 22 nt, Human
uggcaggaggaugaggcggcua

SEQ ID NO: 535229 - RNA, 22 nt, Human
aaugaagccagguagaagagaa

SEQ ID NO: 535230 - RNA, 22 nt, Human
caaauaguaugagcaaugauuc

SEQ ID NO: 535231 - RNA, 22 nt, Human
uguuugacaacaggcucacaga

SEQ ID NO: 535232 - RNA, 22 nt, Human
auucuccacacauccagaccuu

SEQ ID NO: 535233 - RNA, 22 nt, Human
gaugguuuggaaugaaguagcu

SEQ ID NO: 535234 - RNA, 22 nt, Human
auggcaagcaagcugaagagau

SEQ ID NO: 535235 - RNA, 22 nt, Human
agauaacuaaagaaagggauua

SEQ ID NO: 535236 - RNA, 22 nt, Human
auucauuuagagggauuaagca

SEQ ID NO: 535237 - RNA, 22 nt, Human
uguaugaaaaggaauagauuga

SEQ ID NO: 535238 - RNA, 22 nt, Human
ccagguguggggaggacucaca

SEQ ID NO: 535239 - RNA, 22 nt, Human
agucauaauuauaaacaucagu

SEQ ID NO: 535240 - RNA, 22 nt, Human
uuuguaacaucccaacaaauuu

SEQ ID NO: 535241 - RNA, 20 nt, Human
uuaagaaaagcacauccugc

SEQ ID NO: 535242 - RNA, 22 nt, Human
cugggccucauccucagaguuu

SEQ ID NO: 535243 - RNA, 22 nt, Human
caggccuugaaggccugcggga

SEQ ID NO: 535244 - RNA, 22 nt, Human
ucauaaguaauuuaaacauucc

SEQ ID NO: 535245 - RNA, 22 nt, Human
gcagaugccugaaggagcuggg

SEQ ID NO: 535246 - RNA, 22 nt, Human
aaaggcauguggucaaggcuca

SEQ ID NO: 535247 - RNA, 22 nt, Human
ugggguggauagaaagugaugu

SEQ ID NO: 535248 - RNA, 22 nt, Human
aaggggauagagcagacacucc

SEQ ID NO: 535249 - RNA, 22 nt, Human
cauugacaucaggcuuggccaa

SEQ ID NO: 535250 - RNA, 22 nt, Human
cuuucacacacauacauuugga

SEQ ID NO: 535251 - RNA, 22 nt, Human
cacauuuaagcagauguggacc

SEQ ID NO: 535252 - RNA, 22 nt, Human
ugccugucuuggaguccuggcc

SEQ ID NO: 535253 - RNA, 22 nt, Human
agaagaaagauugaagguuccu

SEQ ID NO: 535254 - RNA, 22 nt, Human
ugggaggcuuccagaccuugcu

SEQ ID NO: 535255 - RNA, 22 nt, Human
aagcugccacacggugaguacu

SEQ ID NO: 535256 - RNA, 22 nt, Human
aaagccacguggccuggggagc

SEQ ID NO: 535257 - RNA, 22 nt, Human
ugugaaagauacuaggcagagg

SEQ ID NO: 535258 - RNA, 22 nt, Human
gcugccugcacagagcugcuuu

SEQ ID NO: 535259 - RNA, 22 nt, Human
ucaaaguuuuugagaauuacau

SEQ ID NO: 535260 - RNA, 22 nt, Human
cucugcaggggaggcaugcacu

SEQ ID NO: 535261 - RNA, 21 nt, Human
accuccuggcauccuguuccc

SEQ ID NO: 535262 - RNA, 22 nt, Human
aaaguguuuucugauguguucu

SEQ ID NO: 535263 - RNA, 22 nt, Human
uggaauuaucugaagugauuug

SEQ ID NO: 535264 - RNA, 22 nt, Human
ugcccagcagggagcuaccugg

SEQ ID NO: 535265 - RNA, 22 nt, Human
agcaaagcuaucucuauggaga

SEQ ID NO: 535266 - RNA, 22 nt, Human
acacacucaauugcauaagcac

SEQ ID NO: 535267 - RNA, 22 nt, Human
guucaaauucuaugaaauaugu

SEQ ID NO: 535268 - RNA, 22 nt, Human
ccugaggggcugcaggccagcu

SEQ ID NO: 535269 - RNA, 20 nt, Human
cagcagaaauggggugggaa

SEQ ID NO: 535270 - RNA, 22 nt, Human
aguauuuccuggcuuaucugcu

SEQ ID NO: 535271 - RNA, 22 nt, Human
aggaggugcguggugauccccu

SEQ ID NO: 535272 - RNA, 22 nt, Human
gcaggaugaaggcagaggcuga

SEQ ID NO: 535273 - RNA, 22 nt, Human
aucuguaaaugcaaauguagcu

SEQ ID NO: 535274 - RNA, 22 nt, Human
uggcucuggccaccgggagggc

SEQ ID NO: 535275 - RNA, 22 nt, Human
ugaaacagucuccagacuugga

SEQ ID NO: 535276 - RNA, 22 nt, Human
ggcuggcuuucucuccgcaccu

SEQ ID NO: 535277 - RNA, 22 nt, Human
uacaaagcuguauagccugguc

SEQ ID NO: 535278 - RNA, 22 nt, Human
ccagggugagugucauggguua

SEQ ID NO: 535279 - RNA, 22 nt, Human
ugcccagggauaagccuagaga

SEQ ID NO: 535280 - RNA, 22 nt, Human
aucaggaagccagucuaaugga

SEQ ID NO: 535281 - RNA, 22 nt, Human
ggcccuguuagagcucccacaa

SEQ ID NO: 535282 - RNA, 23 nt, Human
ugaugggaaggaacgacuaccac

SEQ ID NO: 535283 - RNA, 22 nt, Human
ucucagagauucagggagaagu

SEQ ID NO: 535284 - RNA, 22 nt, Human
cagcuggguggcucuucugcuc

SEQ ID NO: 535285 - RNA, 22 nt, Human
aucaaaauggaagaauuuggcu

SEQ ID NO: 535286 - RNA, 22 nt, Human
auauuuguuagagucuaugugu

SEQ ID NO: 535287 - RNA, 22 nt, Human
ccuccuuuccuguuuuccugag

SEQ ID NO: 535288 - RNA, 22 nt, Human
cugugcuugcggguguggagcc

SEQ ID NO: 535289 - RNA, 18 nt, Human
ucagagguacagaaaagu

SEQ ID NO: 535290 - RNA, 22 nt, Human
ggagaagccacacauugggugu

SEQ ID NO: 535291 - RNA, 22 nt, Human
ccuuuguucacuggagagugga

SEQ ID NO: 535292 - RNA, 22 nt, Human
agcucugacugaagagaugcaa

SEQ ID NO: 535293 - RNA, 18 nt, Human
uaagaagguggcuccagc

SEQ ID NO: 535294 - RNA, 22 nt, Human
gcagugaagccagaucugaaau

SEQ ID NO: 535295 - RNA, 22 nt, Human
ugagccagucugucugggugaa

SEQ ID NO: 535296 - RNA, 22 nt, Human
gagguagccacagauagagacu

SEQ ID NO: 535297 - RNA, 22 nt, Human
caaagcucaugcucuuagccau

SEQ ID NO: 535298 - RNA, 22 nt, Human
gguguugggagagcugguuuug

SEQ ID NO: 535299 - RNA, 22 nt, Human
augagcagaugcuccugccucu

SEQ ID NO: 535300 - RNA, 22 nt, Human
ccggggacuuaaagugaaggaa

SEQ ID NO: 535301 - RNA, 22 nt, Human
caggcccucaggcaagggcucu

SEQ ID NO: 535302 - RNA, 22 nt, Human
agaagagaguccuaccccauac

SEQ ID NO: 535303 - RNA, 20 nt, Human
ccugccuguguuugugauga

SEQ ID NO: 535304 - RNA, 22 nt, Human
ugccaggcuguccugggccugg

SEQ ID NO: 535305 - RNA, 22 nt, Human
uuucaauguaugucuuucugag

SEQ ID NO: 535306 - RNA, 22 nt, Human
guuauacauauguguuaacaaa

SEQ ID NO: 535307 - RNA, 22 nt, Human
aaggcugaccaguuuacacuuu

SEQ ID NO: 535308 - RNA, 22 nt, Human
uugcagagcaguaggaauauag

SEQ ID NO: 535309 - RNA, 22 nt, Human
uuauuagaucuguuagggaucc

SEQ ID NO: 535310 - RNA, 20 nt, Human
gccuggaggcagagauaaag

SEQ ID NO: 535311 - RNA, 22 nt, Human
guauuaggaggaacacaggccu

SEQ ID NO: 535312 - RNA, 22 nt, Human
ugcuccagcuggagaugggggc

SEQ ID NO: 535313 - RNA, 22 nt, Human
uuacacaaaaauaagauauggc

SEQ ID NO: 535314 - RNA, 22 nt, Human
acuguagaauggaaccaauugu

SEQ ID NO: 535315 - RNA, 22 nt, Human
uuggaugaagucuagcuuuagu

SEQ ID NO: 535316 - RNA, 22 nt, Human
cagacagaccugcaagggcaca

SEQ ID NO: 535317 - RNA, 22 nt, Human
uuuuuaagagauucuccagucu

SEQ ID NO: 535318 - RNA, 22 nt, Human
ucagggaaucagacucugcagc

SEQ ID NO: 535319 - RNA, 22 nt, Human
ggccugagcagacagcaugaug

SEQ ID NO: 535320 - RNA, 20 nt, Human
agcaggcugcagggugaaau

SEQ ID NO: 535321 - RNA, 22 nt, Human
ccagagagaaauggauuugagu

SEQ ID NO: 535322 - RNA, 22 nt, Human
gagaggggcccaagccacauag

SEQ ID NO: 535323 - RNA, 22 nt, Human
ugcuggcucuaggcugagacag

SEQ ID NO: 535324 - RNA, 22 nt, Human
cugagcagccccaccagccauu

SEQ ID NO: 535325 - RNA, 22 nt, Human
acacugaaagaagccagcuugu

SEQ ID NO: 535326 - RNA, 22 nt, Human
gcauagucaguaggauucucaa

SEQ ID NO: 535327 - RNA, 22 nt, Human
guauuuucaagagcaguaguau

SEQ ID NO: 535328 - RNA, 22 nt, Human
ugauuuaugaccaaguuagaau

SEQ ID NO: 535329 - RNA, 22 nt, Human
uacauguuugguaaaugauggc

SEQ ID NO: 535330 - RNA, 22 nt, Human
ggccuuccaucugccucuguuu

SEQ ID NO: 535331 - RNA, 19 nt, Human
cuucuggauccgcagggcc

SEQ ID NO: 535332 - RNA, 22 nt, Human
ucugggagguaaccaugcugau

SEQ ID NO: 535333 - RNA, 22 nt, Human
aucaacauuugcauccuuccac

SEQ ID NO: 535334 - RNA, 22 nt, Human
gcagagcagcaaauggaaagga

SEQ ID NO: 535335 - RNA, 22 nt, Human
caggcccagugaucagggcucu

SEQ ID NO: 535336 - RNA, 22 nt, Human
accugagagcuauaagguuuua

SEQ ID NO: 535337 - RNA, 22 nt, Human
cccagacugcagagcgggcaga

SEQ ID NO: 535338 - RNA, 22 nt, Human
uuuaacuugaucaguagagcau

SEQ ID NO: 535339 - RNA, 22 nt, Human
guuugucauuuguacuucuagc

SEQ ID NO: 535340 - RNA, 22 nt, Human
uacauacaagauguguuuaaaa

SEQ ID NO: 535341 - RNA, 22 nt, Human
uggcacagacagaucaggaguc

SEQ ID NO: 535342 - RNA, 21 nt, Human
agccaggcaagcacccccacu

SEQ ID NO: 535343 - RNA, 19 nt, Human
gguagaagggaaguguuuu

SEQ ID NO: 535344 - RNA, 22 nt, Human
auacagaugggucagauuucau

SEQ ID NO: 535345 - RNA, 22 nt, Human
guuacaaaugccaaagcugaga

SEQ ID NO: 535346 - RNA, 22 nt, Human
cuauuuucauucuuacauuguc

SEQ ID NO: 535347 - RNA, 22 nt, Human
uccugcaggccuguucccagua

SEQ ID NO: 535348 - RNA, 22 nt, Human
aggacccagaggcagaggacgu

SEQ ID NO: 535349 - RNA, 22 nt, Human
ccucuccuugcacccgucccgc

SEQ ID NO: 535350 - RNA, 22 nt, Human
aagcauuucagguagagauauu

SEQ ID NO: 535351 - RNA, 22 nt, Human
uggcagaguucgcugugccuuu

SEQ ID NO: 535352 - RNA, 22 nt, Human
uggccaccccuuucucugcacu

SEQ ID NO: 535353 - RNA, 22 nt, Human
aaggaaccuggaguagagggag

SEQ ID NO: 535354 - RNA, 18 nt, Human
uuuccaagaagagagcuc

SEQ ID NO: 535355 - RNA, 22 nt, Human
ggcaguggguuccccaaggcac

SEQ ID NO: 535356 - RNA, 22 nt, Human
ugcccugcagacccugcagugu

SEQ ID NO: 535357 - RNA, 22 nt, Human
acaacuguuggaggaacacagg

SEQ ID NO: 535358 - RNA, 22 nt, Human
uacacuaauguuuuugcaaagc

SEQ ID NO: 535359 - RNA, 22 nt, Human
uucuuucucaacaugaauguuu

SEQ ID NO: 535360 - RNA, 22 nt, Human
agcaugcacaugacuggcuuaa

SEQ ID NO: 535361 - RNA, 22 nt, Human
acuuaaaaagaaucuuuucacg

SEQ ID NO: 535362 - RNA, 22 nt, Human
ugcccugucgcucacucccacc

SEQ ID NO: 535363 - RNA, 22 nt, Human
ggcucaccauuuucacucucug

SEQ ID NO: 535364 - RNA, 22 nt, Human
ugggauggcauccugggccuug

SEQ ID NO: 535365 - RNA, 22 nt, Human
ugcauucugaacguaaauguga

SEQ ID NO: 535366 - RNA, 22 nt, Human
ggugaggcuggcuugccuucuu

SEQ ID NO: 535367 - RNA, 22 nt, Human
ccaggcagagggauccccaucc

SEQ ID NO: 535368 - RNA, 21 nt, Human
gccacugcacuccagccuggg

SEQ ID NO: 535369 - RNA, 22 nt, Human
ccagaagucaggaaugagucuu

SEQ ID NO: 535370 - RNA, 22 nt, Human
cauuuguacuguucaaugucau

SEQ ID NO: 535371 - RNA, 22 nt, Human
aggcacacagcuugcauaaauc

SEQ ID NO: 535372 - RNA, 22 nt, Human
augguuuguaacccaauacucc

SEQ ID NO: 535373 - RNA, 22 nt, Human
aagggcucuguugccauuucag

SEQ ID NO: 535374 - RNA, 22 nt, Human
uagcuuguuacacagcaauguu

SEQ ID NO: 535375 - RNA, 22 nt, Human
ucaggcugcccguucagggcuc

SEQ ID NO: 535376 - RNA, 22 nt, Human
gccauuuagggaggcaagguga

SEQ ID NO: 535377 - RNA, 22 nt, Human
cuggacuuuggcccaucugcca

SEQ ID NO: 535378 - RNA, 22 nt, Human
ccuguggacauucuguguggaa

SEQ ID NO: 535379 - RNA, 22 nt, Human
gcaaggcagcgcggaguagcua

SEQ ID NO: 535380 - RNA, 22 nt, Human
uuaaagcaugcugcuuuuccau

SEQ ID NO: 535381 - RNA, 22 nt, Human
guucacaagaguuacagacaga

SEQ ID NO: 535382 - RNA, 22 nt, Human
uccucaaauuagcagaucauag

SEQ ID NO: 535383 - RNA, 22 nt, Human
ugggccaggcaugugaucagca

SEQ ID NO: 535384 - RNA, 22 nt, Human
cuccucccucuuugccacacau

SEQ ID NO: 535385 - RNA, 22 nt, Human
ccagggcuccauugcucauccu

SEQ ID NO: 535386 - RNA, 22 nt, Human
cugcuucuccaaaguaggacuu

SEQ ID NO: 535387 - RNA, 22 nt, Human
ugaaagguagcuggccucauag

SEQ ID NO: 535388 - RNA, 18 nt, Human
uccugggaaaggcauaca

SEQ ID NO: 535389 - RNA, 22 nt, Human
ugaauaagugaugucauauaua

SEQ ID NO: 535390 - RNA, 22 nt, Human
aggcugaggcagguggaucauu

SEQ ID NO: 535391 - RNA, 22 nt, Human
aucagcaaucaaauugcagagu

SEQ ID NO: 535392 - RNA, 22 nt, Human
ucuggaugaagacccagaggcu

SEQ ID NO: 535393 - RNA, 22 nt, Human
ggcagcaacucggagagaagag

SEQ ID NO: 535394 - RNA, 22 nt, Human
ucauucauaucucucaagcuua

SEQ ID NO: 535395 - RNA, 22 nt, Human
uacauuccacuagugacuggcg

SEQ ID NO: 535396 - RNA, 18 nt, Human
auacaagcucuguuacuu

SEQ ID NO: 535397 - RNA, 22 nt, Human
gaggguggaagagcugcugaga

SEQ ID NO: 535398 - RNA, 22 nt, Human
uauuucaccucacccaggagaa

SEQ ID NO: 535399 - RNA, 22 nt, Human
caagaaggcauccccagucccu

SEQ ID NO: 535400 - RNA, 22 nt, Human
uuuccuucaucaucugagagcu

SEQ ID NO: 535401 - RNA, 22 nt, Human
auugaaaaugacauuugugccc

SEQ ID NO: 535402 - RNA, 22 nt, Human
aaggagucugggccauucagag

SEQ ID NO: 535403 - RNA, 22 nt, Human
cugcccugggugcuggggaucc

SEQ ID NO: 535404 - RNA, 22 nt, Human
ucuugcccucaacaagagcaug

SEQ ID NO: 535405 - RNA, 22 nt, Human
uccaaauucuauguucuuucca

SEQ ID NO: 535406 - RNA, 18 nt, Human
ccuggagcuccacagcaa

SEQ ID NO: 535407 - RNA, 22 nt, Human
auccuugaaugacucugcccuc

SEQ ID NO: 535408 - RNA, 21 nt, Human
cacuuuaaaaauaucuuuaua

SEQ ID NO: 535409 - RNA, 22 nt, Human
uagaauaugauuaauuuucuua

SEQ ID NO: 535410 - RNA, 22 nt, Human
aauucacaggagguauuugucc

SEQ ID NO: 535411 - RNA, 22 nt, Human
gcaugcaaauagucaugcuucc

SEQ ID NO: 535412 - RNA, 22 nt, Human
cgaggcaggcaggcggaggaua

SEQ ID NO: 535413 - RNA, 22 nt, Human
ugccucagucuaaagucucuca

SEQ ID NO: 535414 - RNA, 23 nt, Human
cuuuuaacuugaucugagaccag

SEQ ID NO: 535415 - RNA, 22 nt, Human
agaagccauugaagcagaccuc

SEQ ID NO: 535416 - RNA, 22 nt, Human
cagcuuugcaggcuggucagug

SEQ ID NO: 535417 - RNA, 22 nt, Human
gagaggcauggaacagauucuu

SEQ ID NO: 535418 - RNA, 22 nt, Human
cagaaauguuuauauguggugu

SEQ ID NO: 535419 - RNA, 21 nt, Human
cugaggcagcacagcuaguca

SEQ ID NO: 535420 - RNA, 22 nt, Human
auacaacugccuuagaaggaaa

SEQ ID NO: 535421 - RNA, 22 nt, Human
auaaggcagugacuucaucuau

SEQ ID NO: 535422 - RNA, 22 nt, Human
gcugcucuccauggccgugagu

SEQ ID NO: 535423 - RNA, 22 nt, Human
cuggaaguggagaguggcccuc

SEQ ID NO: 535424 - RNA, 22 nt, Human
ucccagccggugccuggguccc

SEQ ID NO: 535425 - RNA, 22 nt, Human
agcugccugugcugggagccca

SEQ ID NO: 535426 - RNA, 22 nt, Human
ccagcccuguaaggaugaggca

SEQ ID NO: 535427 - RNA, 22 nt, Human
ccagcugcugugaggaccacag

SEQ ID NO: 535428 - RNA, 22 nt, Human
cuucccugauaagagccucaga

SEQ ID NO: 535429 - RNA, 22 nt, Human
uguugacucaacacugugggca

SEQ ID NO: 535430 - RNA, 22 nt, Human
acagaacaggcugagaaaaaca

SEQ ID NO: 535431 - RNA, 22 nt, Human
auauuucuccaaauguuuucaa

SEQ ID NO: 535432 - RNA, 22 nt, Human
gcagagcuucuguccuucagga

SEQ ID NO: 535433 - RNA, 22 nt, Human
ugcuauuuuagacauacuuugu

SEQ ID NO: 535434 - RNA, 22 nt, Human
aagauacauuuucuucagagaa

SEQ ID NO: 535435 - RNA, 17 nt, Human
cugcuuugugcaacgcu

SEQ ID NO: 535436 - RNA, 22 nt, Human
ggaccugaacauaaaacgaggc

SEQ ID NO: 535437 - RNA, 22 nt, Human
guucauucagcuggguaggagg

SEQ ID NO: 535438 - RNA, 22 nt, Human
gcacccagggacuuggcuggcc

SEQ ID NO: 535439 - RNA, 22 nt, Human
cagggccauuggcguggcuguc

SEQ ID NO: 535440 - RNA, 23 nt, Human
ucuccuggcugcacuguggccac

SEQ ID NO: 535441 - RNA, 23 nt, Human
agggaagaaacaugaagggcugu

SEQ ID NO: 535442 - RNA, 22 nt, Human
gcaaggaccuuugagcgugcca

SEQ ID NO: 535443 - RNA, 22 nt, Human
uggcucagcauucacuggucuu

SEQ ID NO: 535444 - RNA, 18 nt, Human
ugcucuguuuaaugauuu

SEQ ID NO: 535445 - RNA, 22 nt, Human
caggcagcucuaauggaaagug

SEQ ID NO: 535446 - RNA, 22 nt, Human
cuucuuuugaagggcguugugu

SEQ ID NO: 535447 - RNA, 22 nt, Human
aagcaggagaugcaggaaugua

SEQ ID NO: 535448 - RNA, 22 nt, Human
aaauggcaggcucuuugcuagu

SEQ ID NO: 535449 - RNA, 22 nt, Human
auugugaauagugcugcaauaa

SEQ ID NO: 535450 - RNA, 22 nt, Human
gcucagagcacucagacucagc

SEQ ID NO: 535451 - RNA, 22 nt, Human
ucaaaguagaguucagugcagc

SEQ ID NO: 535452 - RNA, 22 nt, Human
guaauuuuuaguucauucuauc

SEQ ID NO: 535453 - RNA, 22 nt, Human
uggaggaugagugugggcucug

SEQ ID NO: 535454 - RNA, 22 nt, Human
cugggugguuuugaugugaauu

SEQ ID NO: 535455 - RNA, 22 nt, Human
agccaggggauucaucagggac

SEQ ID NO: 535456 - RNA, 22 nt, Human
ccugcuggcauucuugcucccu

SEQ ID NO: 535457 - RNA, 22 nt, Human
gcagagucauuauuuaugcaau

SEQ ID NO: 535458 - RNA, 22 nt, Human
aucuuuuugacauggugauggu

SEQ ID NO: 535459 - RNA, 22 nt, Human
acugggccggugcagaguaguu

SEQ ID NO: 535460 - RNA, 22 nt, Human
uagggcagcugcaucaggcacu

SEQ ID NO: 535461 - RNA, 23 nt, Human
ugaagguauuaccugagaugcuc

SEQ ID NO: 535462 - RNA, 20 nt, Human
ccaccuggccaaggcugugc

SEQ ID NO: 535463 - RNA, 22 nt, Human
ggcagucuaguguccuugggcc

SEQ ID NO: 535464 - RNA, 22 nt, Human
caugaaaaugucaaguucugcu

SEQ ID NO: 535465 - RNA, 22 nt, Human
ggggccugcgagguucaacuuc

SEQ ID NO: 535466 - RNA, 22 nt, Human
cuccucuguauugauugggacu

SEQ ID NO: 535467 - RNA, 22 nt, Human
uccuguguuacugccuggagcg

SEQ ID NO: 535468 - RNA, 22 nt, Human
ccagcugaggcagccacacagg

SEQ ID NO: 535469 - RNA, 22 nt, Human
augaaauuugcugcuaaguucc

SEQ ID NO: 535470 - RNA, 22 nt, Human
uccaaguugauguuucuuaaau

SEQ ID NO: 535471 - RNA, 22 nt, Human
cuccucugucuggcccugagcc

SEQ ID NO: 535472 - RNA, 22 nt, Human
cagaggcugcucuggguggcau

SEQ ID NO: 535473 - RNA, 22 nt, Human
ucacacacauggauaguauuuu

SEQ ID NO: 535474 - RNA, 23 nt, Human
ggguccagagacaggcaugggug

SEQ ID NO: 535475 - RNA, 22 nt, Human
cacccagcauuggcuaagagag

SEQ ID NO: 535476 - RNA, 22 nt, Human
cugaggccuggugaggugguga

SEQ ID NO: 535477 - RNA, 22 nt, Human
acuuuuaaaugaguuucaguug

SEQ ID NO: 535478 - RNA, 22 nt, Human
aagggaggccagagguuuugca

SEQ ID NO: 535479 - RNA, 22 nt, Human
auagaaacagaugcacuucucu

SEQ ID NO: 535480 - RNA, 22 nt, Human
ugucaacacaccuaucucaauu

SEQ ID NO: 535481 - RNA, 22 nt, Human
caagcagaaaucuagaacucca

SEQ ID NO: 535482 - RNA, 17 nt, Human
uaucagaauguguuuac

SEQ ID NO: 535483 - RNA, 18 nt, Human
agcaaauauuaagugcau

SEQ ID NO: 535484 - RNA, 22 nt, Human
gggcacugcuuugcucugucac

SEQ ID NO: 535485 - RNA, 22 nt, Human
aaagauucgagcgauguauaaa

SEQ ID NO: 535486 - RNA, 22 nt, Human
aaacaaguuuagaauaaugaau

SEQ ID NO: 535487 - RNA, 22 nt, Human
uuucacaaguuucaggauucug

SEQ ID NO: 535488 - RNA, 22 nt, Human
ugcugccuuagcagccaggcaa

SEQ ID NO: 535489 - RNA, 22 nt, Human
agccaggacguugcucagcucc

SEQ ID NO: 535490 - RNA, 22 nt, Human
ucaccagucuuucuuaccauug

SEQ ID NO: 535491 - RNA, 22 nt, Human
gcagagcagaggugcagguugg

SEQ ID NO: 535492 - RNA, 22 nt, Human
agcucugugaagccagcaguuc

SEQ ID NO: 535493 - RNA, 22 nt, Human
caucagucagucucuucaguau

SEQ ID NO: 535494 - RNA, 22 nt, Human
uacuuacagagcuuauaaguua

SEQ ID NO: 535495 - RNA, 22 nt, Human
guggccagccagggugcugaug

SEQ ID NO: 535496 - RNA, 22 nt, Human
augcuauguaacuggcagauag

SEQ ID NO: 535497 - RNA, 22 nt, Human
uauacagaaccgccugaagucu

SEQ ID NO: 535498 - RNA, 18 nt, Human
gcuccuggaccaggucac

SEQ ID NO: 535499 - RNA, 22 nt, Human
uguauuuaagcuuuaccuaaaa

SEQ ID NO: 535500 - RNA, 22 nt, Human
uuuccaauaaggucaccuuccu

SEQ ID NO: 535501 - RNA, 22 nt, Human
gcaggugguggggcuaugaucu

SEQ ID NO: 535502 - RNA, 22 nt, Human
cauucccacguguucuuugcuu

SEQ ID NO: 535503 - RNA, 22 nt, Human
cauucaaauuaagauuuuguua

SEQ ID NO: 535504 - RNA, 22 nt, Human
ugaggcuggcaaggcugguauu

SEQ ID NO: 535505 - RNA, 22 nt, Human
auaagaaacauuauucuuucca

SEQ ID NO: 535506 - RNA, 21 nt, Human
aaagaacaggcagauguucuu

SEQ ID NO: 535507 - RNA, 22 nt, Human
cuuauaguaugauguugagaau

SEQ ID NO: 535508 - RNA, 22 nt, Human
cugugcaaugccuaaucacaaa

SEQ ID NO: 535509 - RNA, 21 nt, Human
ugcaggcaggcagagaugcug

SEQ ID NO: 535510 - RNA, 22 nt, Human
gugugcagugagcaaaagaucu

SEQ ID NO: 535511 - RNA, 22 nt, Human
acuuugcacuaaguuacucauu

SEQ ID NO: 535512 - RNA, 22 nt, Human
ugagagcagaggugggcagccu

SEQ ID NO: 535513 - RNA, 22 nt, Human
caguucagcuagaagaaacaaa

SEQ ID NO: 535514 - RNA, 22 nt, Human
ugggccacggggguggagagcu

SEQ ID NO: 535515 - RNA, 22 nt, Human
acaggcacugucaagucaugaa

SEQ ID NO: 535516 - RNA, 22 nt, Human
accaucagagcacaguccgugc

SEQ ID NO: 535517 - RNA, 22 nt, Human
gggcugagugaccucaggccaa

SEQ ID NO: 535518 - RNA, 22 nt, Human
ugcaagagcccagggccaggaa

SEQ ID NO: 535519 - RNA, 22 nt, Human
aaaagucagucucuccuagcuc

SEQ ID NO: 535520 - RNA, 22 nt, Human
augcacuguaggugccaucugc

SEQ ID NO: 535521 - RNA, 23 nt, Human
acacaaggguaacugccagccau

SEQ ID NO: 535522 - RNA, 22 nt, Human
aaguaaaagcuuuaccaugcgc

SEQ ID NO: 535523 - RNA, 22 nt, Human
uggccugcagcucucagggaag

SEQ ID NO: 535524 - RNA, 22 nt, Human
ccuggcugaacaaagucccucc

SEQ ID NO: 535525 - RNA, 22 nt, Human
guauuacauuuaguaauuaggc

SEQ ID NO: 535526 - RNA, 22 nt, Human
ucccacuauuauccuauguggg

SEQ ID NO: 535527 - RNA, 20 nt, Human
gcugucuggauuagaagccu

SEQ ID NO: 535528 - RNA, 22 nt, Human
cugcaggcccccuuccuggagu

SEQ ID NO: 535529 - RNA, 22 nt, Human
ccaaaugugccuguuucaacaa

SEQ ID NO: 535530 - RNA, 22 nt, Human
cucaacauuuaacagugaaaaa

SEQ ID NO: 535531 - RNA, 16 nt, Human
ggcaccagugaacaca

SEQ ID NO: 535532 - RNA, 22 nt, Human
gcagagucagccuccgagacag

SEQ ID NO: 535533 - RNA, 22 nt, Human
gacaauaaaaugaucuuacagu

SEQ ID NO: 535534 - RNA, 22 nt, Human
ugucagugauuuguagggaauu

SEQ ID NO: 535535 - RNA, 22 nt, Human
agggugcagguguggagucuag

SEQ ID NO: 535536 - RNA, 22 nt, Human
gaacacuuuaacauuccuuuuc

SEQ ID NO: 535537 - RNA, 22 nt, Human
cauacuuuugcccugacauucu

SEQ ID NO: 535538 - RNA, 22 nt, Human
augggcugggaucugaguguca

SEQ ID NO: 535539 - RNA, 22 nt, Human
gagugagggcagcaggggcugc

SEQ ID NO: 535540 - RNA, 22 nt, Human
agugugaguaauucagggaggg

SEQ ID NO: 535541 - RNA, 22 nt, Human
ggcucaggaugagccuucucau

SEQ ID NO: 535542 - RNA, 22 nt, Human
gggauggggagcuggaaagggg

SEQ ID NO: 535543 - RNA, 22 nt, Human
cagcaggacauggaggaguaaa

SEQ ID NO: 535544 - RNA, 22 nt, Human
acagaugagauucauugaccac

SEQ ID NO: 535545 - RNA, 22 nt, Human
ugggcaggagagaagcuaaaga

SEQ ID NO: 535546 - RNA, 21 nt, Human
ucuggcaggaagacggauggg

SEQ ID NO: 535547 - RNA, 22 nt, Human
ccugccugggcucacuugccag

SEQ ID NO: 535548 - RNA, 22 nt, Human
ggaaggcugugccagaagaacu

SEQ ID NO: 535549 - RNA, 22 nt, Human
ugggagcaccuugagggcagaa

SEQ ID NO: 535550 - RNA, 19 nt, Human
ucucaauguucagaaagcu

SEQ ID NO: 535551 - RNA, 22 nt, Human
uuucuuuccauacauauugcua

SEQ ID NO: 535552 - RNA, 22 nt, Human
gccaggagccagcuucuuagca

SEQ ID NO: 535553 - RNA, 22 nt, Human
cccagaguucaaacccugcguc

SEQ ID NO: 535554 - RNA, 22 nt, Human
caaaugcuacuaauaggcaagu

SEQ ID NO: 535555 - RNA, 22 nt, Human
aguggaaggcugggaaaugcgg

SEQ ID NO: 535556 - RNA, 17 nt, Human
auacaaagccauaaacc

SEQ ID NO: 535557 - RNA, 22 nt, Human
guagccauuggcaaugaagccu

SEQ ID NO: 535558 - RNA, 22 nt, Human
ggcugucugugguggagcguug

SEQ ID NO: 535559 - RNA, 22 nt, Human
aucauaaaauugcaccauuucu

SEQ ID NO: 535560 - RNA, 23 nt, Human
acagggcauugcuggccucgagg

SEQ ID NO: 535561 - RNA, 22 nt, Human
augcagcugucagggagaacau

SEQ ID NO: 535562 - RNA, 22 nt, Human
uguuacaauauuaucaacugag

SEQ ID NO: 535563 - RNA, 22 nt, Human
acacauaagccuaaucaucucc

SEQ ID NO: 535564 - RNA, 22 nt, Human
aaggcacugaaaaauugugugu

SEQ ID NO: 535565 - RNA, 22 nt, Human
uuaauuaugagaaagggaaaag

SEQ ID NO: 535566 - RNA, 22 nt, Human
gcagugcugaucccauggcaga

SEQ ID NO: 535567 - RNA, 22 nt, Human
cccugcagccuugcaugccuuc

SEQ ID NO: 535568 - RNA, 19 nt, Human
ggccccucucacaggaguu

SEQ ID NO: 535569 - RNA, 22 nt, Human
cugugcccagcucccugacugc

SEQ ID NO: 535570 - RNA, 23 nt, Human
agaauuguaaauagaauauaccu

SEQ ID NO: 535571 - RNA, 22 nt, Human
aggaaacuguccccucauccua

SEQ ID NO: 535572 - RNA, 22 nt, Human
ugcagaugaaugcugagacacu

SEQ ID NO: 535573 - RNA, 22 nt, Human
aggagccaccuaggagcuguuu

SEQ ID NO: 535574 - RNA, 23 nt, Human
uuccagaguccacaucugccacc

SEQ ID NO: 535575 - RNA, 23 nt, Human
agguucaggagauggaggaacaa

SEQ ID NO: 535576 - RNA, 22 nt, Human
aucuuuccuguuuucagacagc

SEQ ID NO: 535577 - RNA, 22 nt, Human
aaauuguccuuuuaagaaacag

SEQ ID NO: 535578 - RNA, 22 nt, Human
ccagccuccauguagauagcug

SEQ ID NO: 535579 - RNA, 22 nt, Human
aauuuagauugauaaacaugga

SEQ ID NO: 535580 - RNA, 22 nt, Human
cucugauuuauauuauaaagug

SEQ ID NO: 535581 - RNA, 22 nt, Human
uccauuuucuaaguaucacuua

SEQ ID NO: 535582 - RNA, 22 nt, Human
uuggaagaucuaacagaggcau

SEQ ID NO: 535583 - RNA, 22 nt, Human
gcugccugaagugucuacacug

SEQ ID NO: 535584 - RNA, 22 nt, Human
ggcaggcuggcuuuguuccagg

SEQ ID NO: 535585 - RNA, 22 nt, Human
acaaagugcugacauuacaggc

SEQ ID NO: 535586 - RNA, 22 nt, Human
acagggccucagcugauucugg

SEQ ID NO: 535587 - RNA, 22 nt, Human
acccaugggccaguuggggugg

SEQ ID NO: 535588 - RNA, 22 nt, Human
aaaaaccucaauuacuuuugca

SEQ ID NO: 535589 - RNA, 22 nt, Human
uugaacaguuuugucagguuca

SEQ ID NO: 535590 - RNA, 22 nt, Human
cagcaucuucaugugcaucucc

SEQ ID NO: 535591 - RNA, 22 nt, Human
gcagaugguggaggcaagaggc

SEQ ID NO: 535592 - RNA, 22 nt, Human
agcuccugggagcaggugguac

SEQ ID NO: 535593 - RNA, 22 nt, Human
ucaggcaggcucagaggaaaac

SEQ ID NO: 535594 - RNA, 22 nt, Human
caggagugagaugcgaucacuu

SEQ ID NO: 535595 - RNA, 22 nt, Human
uuuucacaugcuuggggacuua

SEQ ID NO: 535596 - RNA, 22 nt, Human
cuucccagacgggguggcagcc

SEQ ID NO: 535597 - RNA, 22 nt, Human
guggagacgggacagaagcuaa

SEQ ID NO: 535598 - RNA, 22 nt, Human
uuuguucaugccuauauucuca

SEQ ID NO: 535599 - RNA, 22 nt, Human
gagggcuccucacauucucuau

SEQ ID NO: 535600 - RNA, 21 nt, Human
ugucagaaauaagcaugugau

SEQ ID NO: 535601 - RNA, 22 nt, Human
cuccagcuucccucagcugugg

SEQ ID NO: 535602 - RNA, 17 nt, Human
uauacacagacagacug

SEQ ID NO: 535603 - RNA, 22 nt, Human
cuuacauuaaguaagagauuga

SEQ ID NO: 535604 - RNA, 22 nt, Human
gguggcucaaagagagcacaga

SEQ ID NO: 535605 - RNA, 22 nt, Human
aagauucagccaaauuguucau

SEQ ID NO: 535606 - RNA, 22 nt, Human
auuaauaaaauaccacuuuguu

SEQ ID NO: 535607 - RNA, 22 nt, Human
uacagaguuuuccugccaagaa

SEQ ID NO: 535608 - RNA, 22 nt, Human
agggccuggaacugugggcagg

SEQ ID NO: 535609 - RNA, 22 nt, Human
gcaggaagccuuaccaagccca

SEQ ID NO: 535610 - RNA, 22 nt, Human
ccuucaaauuuagaacaaguga

SEQ ID NO: 535611 - RNA, 20 nt, Human
cucugcccccagacugacag

SEQ ID NO: 535612 - RNA, 22 nt, Human
uugaauaguuuuggauagcaua

SEQ ID NO: 535613 - RNA, 21 nt, Human
agcugccacccuagcuucuga

SEQ ID NO: 535614 - RNA, 22 nt, Human
gggcagcucuggcugugggaag

SEQ ID NO: 535615 - RNA, 22 nt, Human
ucagaagcaggagugugcacaa

SEQ ID NO: 535616 - RNA, 22 nt, Human
aacaaaguagcugcuguucuua

SEQ ID NO: 535617 - RNA, 22 nt, Human
ccugcaccaggcccagcauggu

SEQ ID NO: 535618 - RNA, 22 nt, Human
ccaggcuguuuucaaacuuggg

SEQ ID NO: 535619 - RNA, 22 nt, Human
ugugaaaugaagauaauucuug

SEQ ID NO: 535620 - RNA, 22 nt, Human
agagcccuuucuccaggcaccu

SEQ ID NO: 535621 - RNA, 22 nt, Human
aaguucuugaagacuuuaaaua

SEQ ID NO: 535622 - RNA, 22 nt, Human
ugcuucaggagaugucaccaug

SEQ ID NO: 535623 - RNA, 22 nt, Human
aggcacugaagaacucuuuuug

SEQ ID NO: 535624 - RNA, 22 nt, Human
ggcugggucccagcugggagga

SEQ ID NO: 535625 - RNA, 22 nt, Human
caugugucaaaugauguagcug

SEQ ID NO: 535626 - RNA, 21 nt, Human
ucagaguguguuacagcaagc

SEQ ID NO: 535627 - RNA, 22 nt, Human
uuacagagaggugauugugaag

SEQ ID NO: 535628 - RNA, 22 nt, Human
ugugcccaucccucuggagugu

SEQ ID NO: 535629 - RNA, 22 nt, Human
ucaggaaggcacuugguguguu

SEQ ID NO: 535630 - RNA, 21 nt, Human
cuccugggcuaagauauagug

SEQ ID NO: 535631 - RNA, 22 nt, Human
uaucaaggcauggaaaaugcua

SEQ ID NO: 535632 - RNA, 22 nt, Human
auacaugacucacacauucugc

SEQ ID NO: 535633 - RNA, 19 nt, Human
uaaaucuguauucuucaaa

SEQ ID NO: 535634 - RNA, 22 nt, Human
uggcugucagcugccuggugcg

SEQ ID NO: 535635 - RNA, 22 nt, Human
auaaggcagaaaugauucuagu

SEQ ID NO: 535636 - RNA, 21 nt, Human
ugggccucaggcagcugugac

SEQ ID NO: 535637 - RNA, 16 nt, Human
agcagguguauagugu

SEQ ID NO: 535638 - RNA, 22 nt, Human
agcacaggacguagagcuugga

SEQ ID NO: 535639 - RNA, 22 nt, Human
aaaggccaauaaagacaagcug

SEQ ID NO: 535640 - RNA, 22 nt, Human
gagacugaggucaccaggcugu

SEQ ID NO: 535641 - RNA, 22 nt, Human
ggcucugcaugugagugggugg

SEQ ID NO: 535642 - RNA, 22 nt, Human
cucagggcuggaaagccaggaa

SEQ ID NO: 535643 - RNA, 22 nt, Human
ccugggagggcaagugcugaug

SEQ ID NO: 535644 - RNA, 22 nt, Human
caaguauucuguaaaaagucaa

SEQ ID NO: 535645 - RNA, 22 nt, Human
ccucccucuguuagagcugucu

SEQ ID NO: 535646 - RNA, 22 nt, Human
acauucaaggccuucugacaca

SEQ ID NO: 535647 - RNA, 22 nt, Human
uaauuuaauccaaguguuacau

SEQ ID NO: 535648 - RNA, 22 nt, Human
agcaaacagaugucuccuuuag

SEQ ID NO: 535649 - RNA, 22 nt, Human
aacauuuauucuaauucuggga

SEQ ID NO: 535650 - RNA, 23 nt, Human
cugaggccugcugcguucagguu

SEQ ID NO: 535651 - RNA, 22 nt, Human
ucucugucccuaggagccuugc

SEQ ID NO: 535652 - RNA, 21 nt, Human
ggcuaggaugcugggguuucc

SEQ ID NO: 535653 - RNA, 17 nt, Human
agcugccagggagugug

SEQ ID NO: 535654 - RNA, 22 nt, Human
uaugauuuguagacauuugauu

SEQ ID NO: 535655 - RNA, 23 nt, Human
agcauaaaccucuguggcuuuag

SEQ ID NO: 535656 - RNA, 21 nt, Human
auacuuugaauuacagccuug

SEQ ID NO: 535657 - RNA, 22 nt, Human
caauauauaaugaguacuuucc

SEQ ID NO: 535658 - RNA, 22 nt, Human
ggaguuggugagcaccaggcuu

SEQ ID NO: 535659 - RNA, 22 nt, Human
ucugcccugccauucacuggaa

SEQ ID NO: 535660 - RNA, 22 nt, Human
auuugaauggcuuaacacaacg

SEQ ID NO: 535661 - RNA, 22 nt, Human
ccaguggaaauguggucaggau

SEQ ID NO: 535662 - RNA, 22 nt, Human
ucagaagaagagacuccacagc

SEQ ID NO: 535663 - RNA, 22 nt, Human
gcccagcacagcuggaagaguc

SEQ ID NO: 535664 - RNA, 20 nt, Human
cucugcugcccgccggcugc

SEQ ID NO: 535665 - RNA, 22 nt, Human
acaauuucuuauaguucaauuc

SEQ ID NO: 535666 - RNA, 22 nt, Human
ccuggccugcucggcucuuaag

SEQ ID NO: 535667 - RNA, 22 nt, Human
caagauauauguaugauuccau

SEQ ID NO: 535668 - RNA, 22 nt, Human
ccuggcagcgugccgagcugcg

SEQ ID NO: 535669 - RNA, 22 nt, Human
uguggggaggcugcagugcugc

SEQ ID NO: 535670 - RNA, 22 nt, Human
acguuuucagccuuaauguaga

SEQ ID NO: 535671 - RNA, 22 nt, Human
cugggcuuugaagccaggcugc

SEQ ID NO: 535672 - RNA, 20 nt, Human
gcugcugagcuucccugggg

SEQ ID NO: 535673 - RNA, 22 nt, Human
acuuccuguuaugugugccucu

SEQ ID NO: 535674 - RNA, 22 nt, Human
aauggacaggagagcauaguca

SEQ ID NO: 535675 - RNA, 18 nt, Human
gggcagcacagcagccuc

SEQ ID NO: 535676 - RNA, 22 nt, Human
cagcuguugugauccauuuacg

SEQ ID NO: 535677 - RNA, 22 nt, Human
cuucugggcauggcagagccug

SEQ ID NO: 535678 - RNA, 22 nt, Human
ugaagugaccuggggcagugua

SEQ ID NO: 535679 - RNA, 22 nt, Human
cccacaggcuagggguagggca

SEQ ID NO: 535680 - RNA, 22 nt, Human
uuuuuauaacucuuuugugaca

SEQ ID NO: 535681 - RNA, 22 nt, Human
cugacccauauaagaguggagg

SEQ ID NO: 535682 - RNA, 22 nt, Human
caauuucauuaauagauauaga

SEQ ID NO: 535683 - RNA, 22 nt, Human
ugccaaggguaugggcaagaua

SEQ ID NO: 535684 - RNA, 19 nt, Human
cccaaggcccugggcaggc

SEQ ID NO: 535685 - RNA, 23 nt, Human
uuauugcauccaaaugcauuccu

SEQ ID NO: 535686 - RNA, 22 nt, Human
cccuucuguaaaugcugacugg

SEQ ID NO: 535687 - RNA, 22 nt, Human
cagugcagguggcagaggacag

SEQ ID NO: 535688 - RNA, 22 nt, Human
cuguggagguaggagcaggaca

SEQ ID NO: 535689 - RNA, 16 nt, Human
gcaggcagaucacaug

SEQ ID NO: 535690 - RNA, 21 nt, Human
uagggcucuauuuuuauuuca

SEQ ID NO: 535691 - RNA, 22 nt, Human
gcugcagcagaaguucucagag

SEQ ID NO: 535692 - RNA, 22 nt, Human
guggcugcuguccucucugguu

SEQ ID NO: 535693 - RNA, 22 nt, Human
guccucuguagggcugggccac

SEQ ID NO: 535694 - RNA, 22 nt, Human
cccugcagcauucucuaacugg

SEQ ID NO: 535695 - RNA, 22 nt, Human
cccugagagugagugccaccuu

SEQ ID NO: 535696 - RNA, 22 nt, Human
cucuucagguuucugcucugga

SEQ ID NO: 535697 - RNA, 20 nt, Human
aaacuugauggcauagaaua

SEQ ID NO: 535698 - RNA, 22 nt, Human
aauauuaauagaagggguucua

SEQ ID NO: 535699 - RNA, 22 nt, Human
ugaagcaguuacuggguguuaa

SEQ ID NO: 535700 - RNA, 22 nt, Human
ucugggagcacacgcagugauc

SEQ ID NO: 535701 - RNA, 22 nt, Human
agcuugccucuuaaucaccuca

SEQ ID NO: 535702 - RNA, 22 nt, Human
agguacagcaauauaagagguc

SEQ ID NO: 535703 - RNA, 22 nt, Human
gagggcugauaaaugcgcaugg

SEQ ID NO: 535704 - RNA, 18 nt, Human
aaggcuucaaagaguaga

SEQ ID NO: 535705 - RNA, 22 nt, Human
guuucauauaccaagcacuuga

SEQ ID NO: 535706 - RNA, 22 nt, Human
gggcauguaggaauccauggag

SEQ ID NO: 535707 - RNA, 22 nt, Human
gccuccuguuaugccaugugcc

SEQ ID NO: 535708 - RNA, 22 nt, Human
ucucccaggcugcccuguggac

SEQ ID NO: 535709 - RNA, 22 nt, Human
uccagagaacgaugaaagcugg

SEQ ID NO: 535710 - RNA, 22 nt, Human
acacagaaccucauagccucuc

SEQ ID NO: 535711 - RNA, 22 nt, Human
uuuaaugauagucuuacgaaaa

SEQ ID NO: 535712 - RNA, 22 nt, Human
acaaauuauagaaaauugagcu

SEQ ID NO: 535713 - RNA, 22 nt, Human
auguaugauauuuccaguauca

SEQ ID NO: 535714 - RNA, 22 nt, Human
uacuguuuucuauaauggcugu

SEQ ID NO: 535715 - RNA, 22 nt, Human
guggccugagcuucagaguugg

SEQ ID NO: 535716 - RNA, 22 nt, Human
ucccaagacgaugugcuuggcc

SEQ ID NO: 535717 - RNA, 22 nt, Human
uucuuacagcccuauuacuaaa

SEQ ID NO: 535718 - RNA, 20 nt, Human
uauuuagauucaaguaugga

SEQ ID NO: 535719 - RNA, 22 nt, Human
caugcaaaauguauuuuauuag

SEQ ID NO: 535720 - RNA, 22 nt, Human
gugaagcauaacugaaggauuu

SEQ ID NO: 535721 - RNA, 22 nt, Human
ggaagagagguucagcccuaag

SEQ ID NO: 535722 - RNA, 22 nt, Human
ucugcccacaguccaauaguug

SEQ ID NO: 535723 - RNA, 22 nt, Human
cucaggauuaaggaaucuaaau

SEQ ID NO: 535724 - RNA, 22 nt, Human
aaaguucuuugcaucuuugcuc

SEQ ID NO: 535725 - RNA, 22 nt, Human
ccauaagguuuggggccaugca

SEQ ID NO: 535726 - RNA, 22 nt, Human
cagaggaagagauacaagcccu

SEQ ID NO: 535727 - RNA, 22 nt, Human
ugcacacauaugagcaugugug

SEQ ID NO: 535728 - RNA, 22 nt, Human
gccuccucuugagggucaggga

SEQ ID NO: 535729 - RNA, 22 nt, Human
aauauugagaaccagcauguuu

SEQ ID NO: 535730 - RNA, 22 nt, Human
ucuaaagccuuccauauaacgc

SEQ ID NO: 535731 - RNA, 22 nt, Human
uggcugagggcacuaugaagcc

SEQ ID NO: 535732 - RNA, 22 nt, Human
gcugaggccucagaaggcugag

SEQ ID NO: 535733 - RNA, 22 nt, Human
ggccaagauggaaggagagaug

SEQ ID NO: 535734 - RNA, 20 nt, Human
auguuuaauguuguccaccc

SEQ ID NO: 535735 - RNA, 22 nt, Human
uagcccagagucccaauuccag

SEQ ID NO: 535736 - RNA, 22 nt, Human
ugcuguggcaguuuauguauag

SEQ ID NO: 535737 - RNA, 22 nt, Human
gucccagaggcuuuggccacag

SEQ ID NO: 535738 - RNA, 22 nt, Human
gaguguuuuacucaaagaaaga

SEQ ID NO: 535739 - RNA, 22 nt, Human
ccaucagcaugggagcaugggc

SEQ ID NO: 535740 - RNA, 22 nt, Human
uggcacugagcagccgcggcag

SEQ ID NO: 535741 - RNA, 22 nt, Human
uacauuccuucguuuagagauu

SEQ ID NO: 535742 - RNA, 22 nt, Human
ggggaggaagcuggaacacggg

SEQ ID NO: 535743 - RNA, 20 nt, Human
augccucuaauuuugcaaac

SEQ ID NO: 535744 - RNA, 17 nt, Human
aggauguggagaaaauu

SEQ ID NO: 535745 - RNA, 22 nt, Human
uuuuucaugagacuagaaguca

SEQ ID NO: 535746 - RNA, 22 nt, Human
cugugaggcccugggugcugga

SEQ ID NO: 535747 - RNA, 22 nt, Human
uuggcugaagguuaagugcugg

SEQ ID NO: 535748 - RNA, 22 nt, Human
uaaugcacaugacugaacuauu

SEQ ID NO: 535749 - RNA, 22 nt, Human
uguguucauuagcauugccuug

SEQ ID NO: 535750 - RNA, 22 nt, Human
uccugggaaguugcaucaccgu

SEQ ID NO: 535751 - RNA, 22 nt, Human
gacaggcuuccuaagugccaga

SEQ ID NO: 535752 - RNA, 21 nt, Human
ggccucugccuugccccacuc

SEQ ID NO: 535753 - RNA, 22 nt, Human
uaaagcaaggaauagaguaguc

SEQ ID NO: 535754 - RNA, 22 nt, Human
ugcacacacacguagagaaaag

SEQ ID NO: 535755 - RNA, 22 nt, Human
uagaucugauacaauucaucug

SEQ ID NO: 535756 - RNA, 22 nt, Human
augcaguaaauguuaagaaaaa

SEQ ID NO: 535757 - RNA, 22 nt, Human
gcugcuccgucugagcucuggu

SEQ ID NO: 535758 - RNA, 22 nt, Human
caggcccaggccagugguuccc

SEQ ID NO: 535759 - RNA, 22 nt, Human
agcacugauuuaaacuggauuu

SEQ ID NO: 535760 - RNA, 22 nt, Human
caggaaccagaaccuucccccg

SEQ ID NO: 535761 - RNA, 22 nt, Human
gcaaagucucaagacccaagug

SEQ ID NO: 535762 - RNA, 22 nt, Human
uuuguggcaggagcggagaccg

SEQ ID NO: 535763 - RNA, 21 nt, Human
uuuagggaccaggucauaggc

SEQ ID NO: 535764 - RNA, 21 nt, Human
acagauuuuauaucucugcug

SEQ ID NO: 535765 - RNA, 22 nt, Human
cugcuguggguuaagacacugu

SEQ ID NO: 535766 - RNA, 22 nt, Human
gggacccugggaggcuggcgca

SEQ ID NO: 535767 - RNA, 22 nt, Human
aggcuuccucgugccuuagaua

SEQ ID NO: 535768 - RNA, 22 nt, Human
agcuccugaaaagcgcuugcuu

SEQ ID NO: 535769 - RNA, 22 nt, Human
aggcucagacaggaaaaguaac

SEQ ID NO: 535770 - RNA, 22 nt, Human
agcuccugucucaagggagccu

SEQ ID NO: 535771 - RNA, 18 nt, Human
cuguucuagaacuccugu

SEQ ID NO: 535772 - RNA, 22 nt, Human
uccuuaaauccuucagagauua

SEQ ID NO: 535773 - RNA, 22 nt, Human
ucuauuuuauacucaaaucuuc

SEQ ID NO: 535774 - RNA, 22 nt, Human
aagagcuggaugaagaaaucaa

SEQ ID NO: 535775 - RNA, 22 nt, Human
gggcugggaauggcuaaguaug

SEQ ID NO: 535776 - RNA, 22 nt, Human
cuggcaggaaggcauuuagaca

SEQ ID NO: 535777 - RNA, 22 nt, Human
ggcaaggggucaggcugagaca

SEQ ID NO: 535778 - RNA, 22 nt, Human
aaggcugaaagaccuugaaccu

SEQ ID NO: 535779 - RNA, 22 nt, Human
cuggcugguuacuauuucuggu

SEQ ID NO: 535780 - RNA, 22 nt, Human
caauguaucaagaagcaucagu

SEQ ID NO: 535781 - RNA, 22 nt, Human
ggccugaggcgucccagcugug

SEQ ID NO: 535782 - RNA, 19 nt, Human
ggcauccagaacuaccagu

SEQ ID NO: 535783 - RNA, 21 nt, Human
guuauuuuaagugagcuuugc

SEQ ID NO: 535784 - RNA, 22 nt, Human
cagggagcuuucccaggacccu

SEQ ID NO: 535785 - RNA, 22 nt, Human
ccuucaaaguacacaucuuuau

SEQ ID NO: 535786 - RNA, 22 nt, Human
ugcaaaauaaugaacgauuuuu

SEQ ID NO: 535787 - RNA, 17 nt, Human
ucaaaguauucugaugc

SEQ ID NO: 535788 - RNA, 22 nt, Human
cuucacauguuggaguccuuug

SEQ ID NO: 535789 - RNA, 22 nt, Human
guagggacaauauguuauuaga

SEQ ID NO: 535790 - RNA, 22 nt, Human
acucaggaaaugagaggcucuc

SEQ ID NO: 535791 - RNA, 22 nt, Human
ugccagucucacccuggguccu

SEQ ID NO: 535792 - RNA, 23 nt, Human
cugagcaaagggggaagcugcuu

SEQ ID NO: 535793 - RNA, 22 nt, Human
ucugugcucuucucaguaucac

SEQ ID NO: 535794 - RNA, 22 nt, Human
agaauaaauguuggacuuagga

SEQ ID NO: 535795 - RNA, 22 nt, Human
uuugauaauacacaagagaaag

SEQ ID NO: 535796 - RNA, 22 nt, Human
guggucagcagcagugggagug

SEQ ID NO: 535797 - RNA, 22 nt, Human
ggccucugggguccugagccca

SEQ ID NO: 535798 - RNA, 22 nt, Human
ucagugcuucggcgagcaccua

SEQ ID NO: 535799 - RNA, 22 nt, Human
aacagcugucugccuaucucug

SEQ ID NO: 535800 - RNA, 22 nt, Human
ugcacagagagaugagacacgu

SEQ ID NO: 535801 - RNA, 22 nt, Human
uuuguucacuauaucccucagu

SEQ ID NO: 535802 - RNA, 22 nt, Human
auuucaguagaaaaucuugauu

SEQ ID NO: 535803 - RNA, 22 nt, Human
uggccugccucccggcuucuuu

SEQ ID NO: 535804 - RNA, 22 nt, Human
ucccagaguuuccuguguccca

SEQ ID NO: 535805 - RNA, 22 nt, Human
gaccaaggaagaggggagccag

SEQ ID NO: 535806 - RNA, 22 nt, Human
cccaggcugauguucagcgggu

SEQ ID NO: 535807 - RNA, 22 nt, Human
cagggccagccauccugcuggg

SEQ ID NO: 535808 - RNA, 22 nt, Human
uucaaacaguguagaauauaug

SEQ ID NO: 535809 - RNA, 22 nt, Human
guguauaaugcuguuuguacau

SEQ ID NO: 535810 - RNA, 21 nt, Human
aagccagcccacagugguuug

SEQ ID NO: 535811 - RNA, 22 nt, Human
ucagaggacagcagcuaaauaa

SEQ ID NO: 535812 - RNA, 22 nt, Human
caaaguuuggcucucaugacau

SEQ ID NO: 535813 - RNA, 22 nt, Human
uguuccuguacugcuguggcuu

SEQ ID NO: 535814 - RNA, 22 nt, Human
auauaaguguguggcuguuagu

SEQ ID NO: 535815 - RNA, 22 nt, Human
agugcaaaaaaguguugugaca

SEQ ID NO: 535816 - RNA, 22 nt, Human
agccaggcugcaguuggcuggc

SEQ ID NO: 535817 - RNA, 22 nt, Human
agucaguugcaaacaucaggca

SEQ ID NO: 535818 - RNA, 22 nt, Human
ugugaaauugagaaacuuucac

SEQ ID NO: 535819 - RNA, 22 nt, Human
gccucacugcagccccaggaag

SEQ ID NO: 535820 - RNA, 22 nt, Human
agcuggugcucaggggcaugga

SEQ ID NO: 535821 - RNA, 19 nt, Human
gcugugccccugccgcuug

SEQ ID NO: 535822 - RNA, 22 nt, Human
uguuuuaagagcgcacuuuaua

SEQ ID NO: 535823 - RNA, 22 nt, Human
ugagaagcagcuuacagguguc

SEQ ID NO: 535824 - RNA, 22 nt, Human
aauguacaauaagacaaagagg

SEQ ID NO: 535825 - RNA, 22 nt, Human
ccuucaaaacacuaguuuuuga

SEQ ID NO: 535826 - RNA, 22 nt, Human
cagacaugagauacagcugcua

SEQ ID NO: 535827 - RNA, 22 nt, Human
cucuguccuugcacaguuccua

SEQ ID NO: 535828 - RNA, 22 nt, Human
uugauacagcagccugugaucc

SEQ ID NO: 535829 - RNA, 17 nt, Human
cacuuuguugcuguggg

SEQ ID NO: 535830 - RNA, 22 nt, Human
auuguggcuagacagucacaau

SEQ ID NO: 535831 - RNA, 22 nt, Human
cagcccugccauggagccuccu

SEQ ID NO: 535832 - RNA, 22 nt, Human
cauuuguauguuccuccuuagg

SEQ ID NO: 535833 - RNA, 22 nt, Human
cugggcuuucaggcccuaaggc

SEQ ID NO: 535834 - RNA, 22 nt, Human
uuucuucauugaugucaggugg

SEQ ID NO: 535835 - RNA, 17 nt, Human
ggaaaaggaugauacag

SEQ ID NO: 535836 - RNA, 22 nt, Human
ugugugacccccagugaagccu

SEQ ID NO: 535837 - RNA, 22 nt, Human
aucccaugagaccacguuggcu

SEQ ID NO: 535838 - RNA, 23 nt, Human
cauggcagcaagagcucauggcc

SEQ ID NO: 535839 - RNA, 22 nt, Human
uggagccaugccuggccuuucc

SEQ ID NO: 535840 - RNA, 22 nt, Human
ucugugaaaggaaagaacugac

SEQ ID NO: 535841 - RNA, 22 nt, Human
cuccucuggcuuccuggaggca

SEQ ID NO: 535842 - RNA, 22 nt, Human
ucagcaacuauuuaucaaauuc

SEQ ID NO: 535843 - RNA, 22 nt, Human
uguucuaaauuugcauggucca

SEQ ID NO: 535844 - RNA, 22 nt, Human
ccagagccucuuaugaagaucg

SEQ ID NO: 535845 - RNA, 22 nt, Human
cagcagagaaauuaaacuucug

SEQ ID NO: 535846 - RNA, 22 nt, Human
guccugggaaggaagccaggga

SEQ ID NO: 535847 - RNA, 20 nt, Human
ccaggccugggccugcucua

SEQ ID NO: 535848 - RNA, 22 nt, Human
acaucuuuuuggaaacggcuga

SEQ ID NO: 535849 - RNA, 22 nt, Human
cccagcaucccagugggcagca

SEQ ID NO: 535850 - RNA, 22 nt, Human
uuguacuugccauagaacaaca

SEQ ID NO: 535851 - RNA, 22 nt, Human
cagaauuugaaguaauauucca

SEQ ID NO: 535852 - RNA, 22 nt, Human
aaagaaggggucuacauccaau

SEQ ID NO: 535853 - RNA, 22 nt, Human
ccagcuggugggucuuucucug

SEQ ID NO: 535854 - RNA, 22 nt, Human
cacaugggugugccuggaggaa

SEQ ID NO: 535855 - RNA, 22 nt, Human
ucagauggauucauuacaugac

SEQ ID NO: 535856 - RNA, 22 nt, Human
aaaaaugaaacggcugguuggc

SEQ ID NO: 535857 - RNA, 22 nt, Human
acucacagucccuguaggagug

SEQ ID NO: 535858 - RNA, 22 nt, Human
uaaagcaggugcucagugacca

SEQ ID NO: 535859 - RNA, 22 nt, Human
ucagaggagccaaaguucugag

SEQ ID NO: 535860 - RNA, 20 nt, Human
cagaccugcacccacuucga

SEQ ID NO: 535861 - RNA, 17 nt, Human
ugagaaguaggcaucau

SEQ ID NO: 535862 - RNA, 22 nt, Human
acuaacauguuaaucaaaagaa

SEQ ID NO: 535863 - RNA, 22 nt, Human
aaacaugagcauuucuguuuaa

SEQ ID NO: 535864 - RNA, 22 nt, Human
gggaagugaggagccccucugc

SEQ ID NO: 535865 - RNA, 22 nt, Human
caucuucaggggcuacaucugu

SEQ ID NO: 535866 - RNA, 22 nt, Human
uccuccugcuguuagucuugaa

SEQ ID NO: 535867 - RNA, 22 nt, Human
aggcuguccucucuugcucagu

SEQ ID NO: 535868 - RNA, 22 nt, Human
ucucuggggauggaccugggag

SEQ ID NO: 535869 - RNA, 22 nt, Human
gagaaagggauaauuugaagag

SEQ ID NO: 535870 - RNA, 22 nt, Human
ccuggagugacagguguagccu

SEQ ID NO: 535871 - RNA, 22 nt, Human
cugagagccuccuguuggcuag

SEQ ID NO: 535872 - RNA, 22 nt, Human
ugugaaaagggcuuuguacaaa

SEQ ID NO: 535873 - RNA, 22 nt, Human
ucagcuggagaugagaaccgaa

SEQ ID NO: 535874 - RNA, 22 nt, Human
gagcacagcuggagguagcauu

SEQ ID NO: 535875 - RNA, 22 nt, Human
acauauguuguaaacauuccaa

SEQ ID NO: 535876 - RNA, 22 nt, Human
uggcacaguccugggugccugc

SEQ ID NO: 535877 - RNA, 22 nt, Human
gggaggaaggcuugggugagua

SEQ ID NO: 535878 - RNA, 22 nt, Human
cuuauguacacacauauauugu

SEQ ID NO: 535879 - RNA, 22 nt, Human
cagggcuggguuaaaagcaggg

SEQ ID NO: 535880 - RNA, 22 nt, Human
acucuguguuuugguggcagca

SEQ ID NO: 535881 - RNA, 22 nt, Human
ggcucugcugguaagaugccuc

SEQ ID NO: 535882 - RNA, 22 nt, Human
guguggggucuucucuuggccu

SEQ ID NO: 535883 - RNA, 22 nt, Human
acaaauuaccauggaauuuggg

SEQ ID NO: 535884 - RNA, 22 nt, Human
ugugacaucgcugugucuguuu

SEQ ID NO: 535885 - RNA, 22 nt, Human
uucuuuccccauggaguucgga

SEQ ID NO: 535886 - RNA, 22 nt, Human
ucucugggauaaacugggccag

SEQ ID NO: 535887 - RNA, 22 nt, Human
gugcucaggaagcuguuccugc

SEQ ID NO: 535888 - RNA, 21 nt, Human
caaauacuuagaaacuuaaga

SEQ ID NO: 535889 - RNA, 22 nt, Human
gcuguucacauuuugggccaaa

SEQ ID NO: 535890 - RNA, 22 nt, Human
auguuuuauuaccaacuuguac

SEQ ID NO: 535891 - RNA, 22 nt, Human
uaaggcaccuguccaggcuggg

SEQ ID NO: 535892 - RNA, 22 nt, Human
uagaaacaaagaccugggugcu

SEQ ID NO: 535893 - RNA, 22 nt, Human
gccagagcaugcacugccugca

SEQ ID NO: 535894 - RNA, 22 nt, Human
cugagcacugggcacauagcug

SEQ ID NO: 535895 - RNA, 22 nt, Human
acugugugggccgcucacuggg

SEQ ID NO: 535896 - RNA, 22 nt, Human
aaggcugugucagaagcucccu

SEQ ID NO: 535897 - RNA, 22 nt, Human
ucucagaguaauucuuuaaggu

SEQ ID NO: 535898 - RNA, 22 nt, Human
aaacauuguaauuuuagcaugg

SEQ ID NO: 535899 - RNA, 21 nt, Human
ugcagaggcacaaacaagccc

SEQ ID NO: 535900 - RNA, 22 nt, Human
cagaaucugagucgugauugua

SEQ ID NO: 535901 - RNA, 22 nt, Human
gacuucugagcuauccagcugu

SEQ ID NO: 535902 - RNA, 22 nt, Human
ccagaggugccacagaaagagc

SEQ ID NO: 535903 - RNA, 22 nt, Human
uguaugaaugggaaaaggaaac

SEQ ID NO: 535904 - RNA, 19 nt, Human
ggagccuggagcacgugcc

SEQ ID NO: 535905 - RNA, 22 nt, Human
uuucuuaggcucuaaaaugacu

SEQ ID NO: 535906 - RNA, 22 nt, Human
aggauuugcacugguguuugag

SEQ ID NO: 535907 - RNA, 22 nt, Human
gagggugggcuccuaucugggu

SEQ ID NO: 535908 - RNA, 22 nt, Human
uucuuucccaguagaugugaaa

SEQ ID NO: 535909 - RNA, 22 nt, Human
ucaggaagugguaaaggauguu

SEQ ID NO: 535910 - RNA, 20 nt, Human
caagcccucuuuagccugcc

SEQ ID NO: 535911 - RNA, 22 nt, Human
cucaggaugcaggucacaggac

SEQ ID NO: 535912 - RNA, 22 nt, Human
aaauaauuauagcgagucuauc

SEQ ID NO: 535913 - RNA, 21 nt, Human
ggcccugguuacgccuccucu

SEQ ID NO: 535914 - RNA, 22 nt, Human
uagacagauuuaaaggaaugga

SEQ ID NO: 535915 - RNA, 22 nt, Human
aauuagggaaguauuuaguagu

SEQ ID NO: 535916 - RNA, 19 nt, Human
ggcuggcaagugacagugu

SEQ ID NO: 535917 - RNA, 22 nt, Human
ggccugaggccaccagcagccc

SEQ ID NO: 535918 - RNA, 22 nt, Human
acaaagugcacaagaugagaac

SEQ ID NO: 535919 - RNA, 19 nt, Human
uggcuaauuuuauagaggc

SEQ ID NO: 535920 - RNA, 22 nt, Human
ugcuugucacauacaggagcau

SEQ ID NO: 535921 - RNA, 22 nt, Human
caaaguuuaaaguagauuucag

SEQ ID NO: 535922 - RNA, 21 nt, Human
auacacauacacauaaaugug

SEQ ID NO: 535923 - RNA, 22 nt, Human
uuuguugacaucccuguacuuu

SEQ ID NO: 535924 - RNA, 22 nt, Human
gaagacauuuuaugcauacucu

SEQ ID NO: 535925 - RNA, 22 nt, Human
aaguccaguuuuuccagguggu

SEQ ID NO: 535926 - RNA, 22 nt, Human
ugaacagaucaauagaacugac

SEQ ID NO: 535927 - RNA, 22 nt, Human
auuuauuaugggauuuggcaca

SEQ ID NO: 535928 - RNA, 22 nt, Human
gcugaaaugucuuuagcagugu

SEQ ID NO: 535929 - RNA, 22 nt, Human
agcagcuguggggacaagggua

SEQ ID NO: 535930 - RNA, 22 nt, Human
uucucauggugucuuuauacau

SEQ ID NO: 535931 - RNA, 22 nt, Human
ccugucucuguuaccacauuug

SEQ ID NO: 535932 - RNA, 22 nt, Human
ugaacccaggagguugcaguga

SEQ ID NO: 535933 - RNA, 20 nt, Human
cugggcagguguuugaucuc

SEQ ID NO: 535934 - RNA, 21 nt, Human
guuuucuuugauagagggaag

SEQ ID NO: 535935 - RNA, 22 nt, Human
auugaaagagaauguagcucuu

SEQ ID NO: 535936 - RNA, 22 nt, Human
caggagcaguuagaagcccacu

SEQ ID NO: 535937 - RNA, 22 nt, Human
ugagcuuacgugggaacagacu

SEQ ID NO: 535938 - RNA, 22 nt, Human
caucugcuguuccuuggacuca

SEQ ID NO: 535939 - RNA, 22 nt, Human
gccaagagaaugugagagaaau

SEQ ID NO: 535940 - RNA, 22 nt, Human
ggggaggcugaugugggcaaag

SEQ ID NO: 535941 - RNA, 22 nt, Human
acaggagugaaucuggcacuua

SEQ ID NO: 535942 - RNA, 22 nt, Human
cugagaaaauuucaggaagugu

SEQ ID NO: 535943 - RNA, 22 nt, Human
ucaucuuuccucaaaagaucca

SEQ ID NO: 535944 - RNA, 22 nt, Human
agaaacuaaccugguaggguuc

SEQ ID NO: 535945 - RNA, 22 nt, Human
gacaggaagucugaaggaggga

SEQ ID NO: 535946 - RNA, 22 nt, Human
aaggagucucagcugggccuga

SEQ ID NO: 535947 - RNA, 22 nt, Human
gcugagguggcugccuuaguaa

SEQ ID NO: 535948 - RNA, 22 nt, Human
uucuuuccacagaggggaugau

SEQ ID NO: 535949 - RNA, 22 nt, Human
caaagauaugacauggaaaaug

SEQ ID NO: 535950 - RNA, 22 nt, Human
uaacauuuagaaaguguccauu

SEQ ID NO: 535951 - RNA, 22 nt, Human
uucaaugagcccggggccauag

SEQ ID NO: 535952 - RNA, 22 nt, Human
uucaggccuaauuucuagcccc

SEQ ID NO: 535953 - RNA, 22 nt, Human
aggaaccuaagagccugcaguc

SEQ ID NO: 535954 - RNA, 21 nt, Human
gcccucaggggaggauggccu

SEQ ID NO: 535955 - RNA, 22 nt, Human
uuuaccagaauugccaccagaa

SEQ ID NO: 535956 - RNA, 22 nt, Human
acagagagaauuggguuuacag

SEQ ID NO: 535957 - RNA, 22 nt, Human
cacugguguauuagagcuagaa

SEQ ID NO: 535958 - RNA, 22 nt, Human
uggaaagaauuccuaugguuca

SEQ ID NO: 535959 - RNA, 22 nt, Human
uugcugaagugaagguauguuu

SEQ ID NO: 535960 - RNA, 22 nt, Human
accugucuauaaaagugaauac

SEQ ID NO: 535961 - RNA, 22 nt, Human
ucagagugggagaaugugccaa

SEQ ID NO: 535962 - RNA, 22 nt, Human
aguggcagagaccccagccagc

SEQ ID NO: 535963 - RNA, 19 nt, Human
agaggcagucuccaacagg

SEQ ID NO: 535964 - RNA, 22 nt, Human
ucaaaaauuuucugaggaugag

SEQ ID NO: 535965 - RNA, 22 nt, Human
cucuggagugcagccugguggc

SEQ ID NO: 535966 - RNA, 19 nt, Human
cccagcuugaccaccugcu

SEQ ID NO: 535967 - RNA, 22 nt, Human
uggccugacugucaggcuguau

SEQ ID NO: 535968 - RNA, 22 nt, Human
gaauaugaacuauuccuagccc

SEQ ID NO: 535969 - RNA, 22 nt, Human
cuugccuagguguauauuaaau

SEQ ID NO: 535970 - RNA, 22 nt, Human
auuauucagucuuguaaggagu

SEQ ID NO: 535971 - RNA, 22 nt, Human
aauuucuccaagaaugcuuaga

SEQ ID NO: 535972 - RNA, 22 nt, Human
ggcugcaagcaugcacagauac

SEQ ID NO: 535973 - RNA, 22 nt, Human
uccaauuuguuugaugauggaa

SEQ ID NO: 535974 - RNA, 22 nt, Human
gaggccugguagccgagcccca

SEQ ID NO: 535975 - RNA, 22 nt, Human
uuccuuaauaucccuuuuggaa

SEQ ID NO: 535976 - RNA, 22 nt, Human
uccugguggcuuucccugccuu

SEQ ID NO: 535977 - RNA, 22 nt, Human
caccuaggguuucgccuuucuu

SEQ ID NO: 535978 - RNA, 22 nt, Human
guuucaaaggugucaggcaguu

SEQ ID NO: 535979 - RNA, 23 nt, Human
auuuacagguuaaaugaaaucag

SEQ ID NO: 535980 - RNA, 22 nt, Human
ugcacacauguuuacaagcauc

SEQ ID NO: 535981 - RNA, 22 nt, Human
ucucacugggucacagcagagg

SEQ ID NO: 535982 - RNA, 22 nt, Human
gaauaacagcaaguuugcaggc

SEQ ID NO: 535983 - RNA, 22 nt, Human
uaugcacgucuauuuaugaaga

SEQ ID NO: 535984 - RNA, 22 nt, Human
caagaucaaggugucagcaggu

SEQ ID NO: 535985 - RNA, 22 nt, Human
caagaucaagguaucagcagau

SEQ ID NO: 535986 - RNA, 22 nt, Human
aauagguagccagauauauaaa

SEQ ID NO: 535987 - RNA, 22 nt, Human
cuccaggccauggcugcggagg

SEQ ID NO: 535988 - RNA, 19 nt, Human
aguggcagaucuggaagua

SEQ ID NO: 535989 - RNA, 22 nt, Human
ucuuuuccuucccuacagaucu

SEQ ID NO: 535990 - RNA, 22 nt, Human
agccugguguggggcugcagag

SEQ ID NO: 535991 - RNA, 18 nt, Human
aggaaagaaaggcaggug

SEQ ID NO: 535992 - RNA, 22 nt, Human
auauaucaugaguaaaacuuga

SEQ ID NO: 535993 - RNA, 22 nt, Human
cuggcucucugagauauugagu

SEQ ID NO: 535994 - RNA, 22 nt, Human
ggcugagugcugcuguucacga

SEQ ID NO: 535995 - RNA, 22 nt, Human
uggcuggcccugggagugcaga

SEQ ID NO: 535996 - RNA, 22 nt, Human
acagcuuuguuuucccugcuga

SEQ ID NO: 535997 - RNA, 22 nt, Human
aagauuucuuacuuauugaugc

SEQ ID NO: 535998 - RNA, 22 nt, Human
gagcagaacuacucacauaucg

SEQ ID NO: 535999 - RNA, 22 nt, Human
ucagaagagcuggugcugccug

SEQ ID NO: 536000 - RNA, 21 nt, Human
ucccaagaauaugcauaaguu

SEQ ID NO: 536001 - RNA, 22 nt, Human
uuacaaacaagaucuuauucuu

SEQ ID NO: 536002 - RNA, 22 nt, Human
uuguaagacuguagaaugcaaa

SEQ ID NO: 536003 - RNA, 23 nt, Human
ucucccugagguuguuagcauua

SEQ ID NO: 536004 - RNA, 22 nt, Human
auuucuuuucaagagggugcuu

SEQ ID NO: 536005 - RNA, 19 nt, Human
uggggcuguguuuugaccc

SEQ ID NO: 536006 - RNA, 22 nt, Human
uugggggaagaggauagacagu

SEQ ID NO: 536007 - RNA, 22 nt, Human
ugggcacuauggcucugugcac

SEQ ID NO: 536008 - RNA, 22 nt, Human
ugucccagcacuuugggagucu

SEQ ID NO: 536009 - RNA, 22 nt, Human
cucagaauuaauaaccacaagg

SEQ ID NO: 536010 - RNA, 22 nt, Human
uagcaaaaacugcaguuacuuu

SEQ ID NO: 536011 - RNA, 22 nt, Human
gauuucuucauuuguggugaau

SEQ ID NO: 536012 - RNA, 22 nt, Human
aguguucauuuauucauucacu

SEQ ID NO: 536013 - RNA, 22 nt, Human
uguuucuugauaaagcagaaaa

SEQ ID NO: 536014 - RNA, 22 nt, Human
uauaaagcugacucaugaaacu

SEQ ID NO: 536015 - RNA, 22 nt, Human
uaaauucccaacucugcucuuc

SEQ ID NO: 536016 - RNA, 22 nt, Human
agaaggccuaacuugggggcaa

SEQ ID NO: 536017 - RNA, 22 nt, Human
aaggccaggacaccaggggacu

SEQ ID NO: 536018 - RNA, 23 nt, Human
gccucugcucugcguuggggacu

SEQ ID NO: 536019 - RNA, 22 nt, Human
uucuucuuuccuauaauuaauu

SEQ ID NO: 536020 - RNA, 22 nt, Human
cucucuggcuuggcacggagau

SEQ ID NO: 536021 - RNA, 23 nt, Human
acacugucucauggauagacugc

SEQ ID NO: 536022 - RNA, 22 nt, Human
ucacaucauggagaauuauggg

SEQ ID NO: 536023 - RNA, 22 nt, Human
agcaggaacgaguucaugggga

SEQ ID NO: 536024 - RNA, 22 nt, Human
uguaggauuuucaccagaccuu

SEQ ID NO: 536025 - RNA, 22 nt, Human
caaaugcaggucauaaccugag

SEQ ID NO: 536026 - RNA, 20 nt, Human
guucacaggcuuccuuucag

SEQ ID NO: 536027 - RNA, 22 nt, Human
gagcugcagacauagauaagcg

SEQ ID NO: 536028 - RNA, 22 nt, Human
agggaguuagaaauccaggaua

SEQ ID NO: 536029 - RNA, 22 nt, Human
aaguggugguaugaaccgaggg

SEQ ID NO: 536030 - RNA, 22 nt, Human
cagugcauagauccugaggccu

SEQ ID NO: 536031 - RNA, 22 nt, Human
uuauuuauggcccucaccugau

SEQ ID NO: 536032 - RNA, 22 nt, Human
uccuggcuuuucuuggcucauc

SEQ ID NO: 536033 - RNA, 22 nt, Human
ccagcugguguuccuuaggacc

SEQ ID NO: 536034 - RNA, 22 nt, Human
uuacacagugaauuuacucaag

SEQ ID NO: 536035 - RNA, 19 nt, Human
gagcagcugcacccauuga

SEQ ID NO: 536036 - RNA, 22 nt, Human
gaagccaacauuccaaguagaa

SEQ ID NO: 536037 - RNA, 22 nt, Human
uagaaaggauauugagaugaau

SEQ ID NO: 536038 - RNA, 22 nt, Human
ucuguagcaagugagaggcauu

SEQ ID NO: 536039 - RNA, 22 nt, Human
gcagccagguuugaggaccacu

SEQ ID NO: 536040 - RNA, 22 nt, Human
ugcaggccucacaccuggcacc

SEQ ID NO: 536041 - RNA, 22 nt, Human
uacauuguuuuuucuugccauc

SEQ ID NO: 536042 - RNA, 22 nt, Human
aggagccagaauccagacucgg

SEQ ID NO: 536043 - RNA, 22 nt, Human
uccuucagggggccgccugcac

SEQ ID NO: 536044 - RNA, 22 nt, Human
uagggacaaagagcugaggccu

SEQ ID NO: 536045 - RNA, 22 nt, Human
cucucccuggccagcugugcag

SEQ ID NO: 536046 - RNA, 21 nt, Human
guuuguaaggcacuguguucu

SEQ ID NO: 536047 - RNA, 22 nt, Human
gccugcuguugagggaagagcu

SEQ ID NO: 536048 - RNA, 22 nt, Human
ugagccugggagauggaggcug

SEQ ID NO: 536049 - RNA, 22 nt, Human
cuggcagcugcccgagaugccc

SEQ ID NO: 536050 - RNA, 22 nt, Human
agugcacuggcaccaucucagc

SEQ ID NO: 536051 - RNA, 22 nt, Human
ggagacucggguucuagccuug

SEQ ID NO: 536052 - RNA, 22 nt, Human
ccagagcccgggaccuggacuu

SEQ ID NO: 536053 - RNA, 22 nt, Human
agucccuucucaaagugugcgg

SEQ ID NO: 536054 - RNA, 22 nt, Human
accagagauggggcuucucugu

SEQ ID NO: 536055 - RNA, 22 nt, Human
uguauacaagucguguaaacuu

SEQ ID NO: 536056 - RNA, 22 nt, Human
ugcuuuauaggggauugcaggc

SEQ ID NO: 536057 - RNA, 22 nt, Human
ucuguucaguugauguaguuuu

SEQ ID NO: 536058 - RNA, 22 nt, Human
ugaaaguuacaggaaaacagau

SEQ ID NO: 536059 - RNA, 22 nt, Human
uuccucaugggguuccuucaga

SEQ ID NO: 536060 - RNA, 22 nt, Human
agucccagugagaugagccacg

SEQ ID NO: 536061 - RNA, 22 nt, Human
cugagggcaugaacauuccaua

SEQ ID NO: 536062 - RNA, 22 nt, Human
cagcuuuuuagaaucuagggca

SEQ ID NO: 536063 - RNA, 22 nt, Human
gcccucuggcagccuuggcugg

SEQ ID NO: 536064 - RNA, 22 nt, Human
agcccugggaggccagcuugua

SEQ ID NO: 536065 - RNA, 22 nt, Human
gcagcccagguguagcucuuug

SEQ ID NO: 536066 - RNA, 19 nt, Human
ugaagcagcaaacucucag

SEQ ID NO: 536067 - RNA, 22 nt, Human
cuggcauguguuuggcuccugu

SEQ ID NO: 536068 - RNA, 18 nt, Human
uggaggaaucacaauggc

SEQ ID NO: 536069 - RNA, 22 nt, Human
gaggaacagcagccacaugucc

SEQ ID NO: 536070 - RNA, 20 nt, Human
ugaugguucuuuccggguug

SEQ ID NO: 536071 - RNA, 22 nt, Human
gugcaguggcagauccuagcuc

SEQ ID NO: 536072 - RNA, 22 nt, Human
guaaauaacugguaauuggggu

SEQ ID NO: 536073 - RNA, 22 nt, Human
caaauucucaagguuuauccca

SEQ ID NO: 536074 - RNA, 22 nt, Human
gcuguggccaacaaaccacuuu

SEQ ID NO: 536075 - RNA, 22 nt, Human
ucuuagaaauuccccaguggcu

SEQ ID NO: 536076 - RNA, 22 nt, Human
gggcaagcucuucagaagcucu

SEQ ID NO: 536077 - RNA, 21 nt, Human
uccucagggccccagagcacu

SEQ ID NO: 536078 - RNA, 21 nt, Human
agagacugucacugcaguacc

SEQ ID NO: 536079 - RNA, 22 nt, Human
cauuuauucaugaucuguagcu

SEQ ID NO: 536080 - RNA, 18 nt, Human
ugcuuuaugcuuauauaa

SEQ ID NO: 536081 - RNA, 22 nt, Human
uuuagggaugucagaacaggga

SEQ ID NO: 536082 - RNA, 22 nt, Human
aaauauguauggaguucaugaa

SEQ ID NO: 536083 - RNA, 22 nt, Human
ggcagauguuauaugaucugag

SEQ ID NO: 536084 - RNA, 22 nt, Human
aggacagaccuaggacuggagc

SEQ ID NO: 536085 - RNA, 22 nt, Human
gccuggcaguguaauuccuguc

SEQ ID NO: 536086 - RNA, 22 nt, Human
cugccugcaugcugccauagcu

SEQ ID NO: 536087 - RNA, 23 nt, Human
aaggucacagaacuuagcaagcc

SEQ ID NO: 536088 - RNA, 22 nt, Human
ccaggcucugcaaaaucaggcu

SEQ ID NO: 536089 - RNA, 22 nt, Human
caggcuuuuucugcuguccucu

SEQ ID NO: 536090 - RNA, 22 nt, Human
aauguacaaaccuucuuuguag

SEQ ID NO: 536091 - RNA, 22 nt, Human
auuuugugaacccucaagcaau

SEQ ID NO: 536092 - RNA, 22 nt, Human
agguaacacuacuuaguauacu

SEQ ID NO: 536093 - RNA, 22 nt, Human
cugcuuugcauagcugccagag

SEQ ID NO: 536094 - RNA, 22 nt, Human
ggaaggcuccacccaaggcgag

SEQ ID NO: 536095 - RNA, 22 nt, Human
aaaauaugaaguugucaguaug

SEQ ID NO: 536096 - RNA, 22 nt, Human
cagggcucccucuggcucccag

SEQ ID NO: 536097 - RNA, 17 nt, Human
uggcacagaggugcuau

SEQ ID NO: 536098 - RNA, 20 nt, Human
aggcacuguugucuguaucc

SEQ ID NO: 536099 - RNA, 22 nt, Human
cagaacauuccaugugcccugc

SEQ ID NO: 536100 - RNA, 22 nt, Human
gggaaggaaaguuauuagcaga

SEQ ID NO: 536101 - RNA, 22 nt, Human
gccagguguccucacagugagg

SEQ ID NO: 536102 - RNA, 22 nt, Human
cauucacagagggggaagcauc

SEQ ID NO: 536103 - RNA, 22 nt, Human
uccugagaggugugaggugcag

SEQ ID NO: 536104 - RNA, 22 nt, Human
agccacagcuccuugguggaga

SEQ ID NO: 536105 - RNA, 22 nt, Human
acaggggaauuuacugucauua

SEQ ID NO: 536106 - RNA, 22 nt, Human
gcuuacaaacaacagaaauuaa

SEQ ID NO: 536107 - RNA, 22 nt, Human
cagucuucuaaccuagcagccu

SEQ ID NO: 536108 - RNA, 22 nt, Human
cucuccuccaacagcccugccg

SEQ ID NO: 536109 - RNA, 22 nt, Human
gcagggagguuugcugaccugg

SEQ ID NO: 536110 - RNA, 22 nt, Human
auucuagaugcuguaaguagca

SEQ ID NO: 536111 - RNA, 22 nt, Human
uugcauuccaguccccacugug

SEQ ID NO: 536112 - RNA, 22 nt, Human
accagagaaaacacagcaggcu

SEQ ID NO: 536113 - RNA, 22 nt, Human
cagcuuuaccaauauuuggaaa

SEQ ID NO: 536114 - RNA, 22 nt, Human
ucccugccugacagcacccacc

SEQ ID NO: 536115 - RNA, 22 nt, Human
uacaaaugaccauagccacuua

SEQ ID NO: 536116 - RNA, 22 nt, Human
cugagccaugagccugcgccca

SEQ ID NO: 536117 - RNA, 22 nt, Human
auucuuuccagacacugauugc

SEQ ID NO: 536118 - RNA, 20 nt, Human
augugaaagaucaguugucu

SEQ ID NO: 536119 - RNA, 22 nt, Human
ggagaugguggaagcuggugca

SEQ ID NO: 536120 - RNA, 22 nt, Human
cccagagccucauucuguuggg

SEQ ID NO: 536121 - RNA, 22 nt, Human
uugaaaggugaacaugaugcac

SEQ ID NO: 536122 - RNA, 22 nt, Human
agguggagacccagagaaggcg

SEQ ID NO: 536123 - RNA, 22 nt, Human
ccuuuucuaggaugcuuuauag

SEQ ID NO: 536124 - RNA, 23 nt, Human
acucacaaagcaggaucauguug

SEQ ID NO: 536125 - RNA, 22 nt, Human
gggcccuggggauguggacgcg

SEQ ID NO: 536126 - RNA, 22 nt, Human
cuaggcuguucaugcucagacc

SEQ ID NO: 536127 - RNA, 22 nt, Human
aguguuaacaugaaugguuucc

SEQ ID NO: 536128 - RNA, 22 nt, Human
gcugucagaaggugaaggguaa

SEQ ID NO: 536129 - RNA, 22 nt, Human
accauuuaauaaguauuuccau

SEQ ID NO: 536130 - RNA, 21 nt, Human
uuaauuuauucaugauagcua

SEQ ID NO: 536131 - RNA, 22 nt, Human
uucugccuuacgauauuuucaa

SEQ ID NO: 536132 - RNA, 22 nt, Human
uuguuuuuaaacaugugacuga

SEQ ID NO: 536133 - RNA, 22 nt, Human
ugaggcagaguaagauacauga

SEQ ID NO: 536134 - RNA, 22 nt, Human
cauuucacgcacacucauuacu

SEQ ID NO: 536135 - RNA, 21 nt, Human
ccuucucuugcuucagcuuca

SEQ ID NO: 536136 - RNA, 21 nt, Human
gauugaaaccauggcagugag

SEQ ID NO: 536137 - RNA, 22 nt, Human
agggccugagcuggcugaccuc

SEQ ID NO: 536138 - RNA, 17 nt, Human
ccaggcuccaucacugu

SEQ ID NO: 536139 - RNA, 22 nt, Human
acuuguuugccuaaaauuuuga

SEQ ID NO: 536140 - RNA, 22 nt, Human
ggugagaggccugagagcugga

SEQ ID NO: 536141 - RNA, 22 nt, Human
ugcaaagaugaaauauuaaagg

SEQ ID NO: 536142 - RNA, 22 nt, Human
gaacacuuggcuuuggauuuaa

SEQ ID NO: 536143 - RNA, 22 nt, Human
gcugccugccugcauuuaaucc

SEQ ID NO: 536144 - RNA, 22 nt, Human
cccagacucaucccugggagcu

SEQ ID NO: 536145 - RNA, 20 nt, Human
gauacacagcacagagggcc

SEQ ID NO: 536146 - RNA, 22 nt, Human
aggagggcuaggaaaaccagga

SEQ ID NO: 536147 - RNA, 22 nt, Human
gaggggcucuugggcaugaagg

SEQ ID NO: 536148 - RNA, 22 nt, Human
cagcagagcuuauguuggguca

SEQ ID NO: 536149 - RNA, 22 nt, Human
cucacuguccaacaggcuuuac

SEQ ID NO: 536150 - RNA, 22 nt, Human
cuauuuguacagcauucgaguu

SEQ ID NO: 536151 - RNA, 16 nt, Human
ccuuuucucaucucua

SEQ ID NO: 536152 - RNA, 22 nt, Human
accugugcacagucagcccugg

SEQ ID NO: 536153 - RNA, 20 nt, Human
guggccuguccuguuguggg

SEQ ID NO: 536154 - RNA, 22 nt, Human
ugggcuucuggaguggggcaga

SEQ ID NO: 536155 - RNA, 22 nt, Human
gaaggagagagacaucgucccu

SEQ ID NO: 536156 - RNA, 22 nt, Human
uuccaagugggggaagcugagu

SEQ ID NO: 536157 - RNA, 22 nt, Human
cgcugauaaacgucacguuccc

SEQ ID NO: 536158 - RNA, 19 nt, Human
ugaguucugugguucucaa

SEQ ID NO: 536159 - RNA, 22 nt, Human
aacaaguuacucuuaaaguaua

SEQ ID NO: 536160 - RNA, 22 nt, Human
cccaggaggcagagguugcagu

SEQ ID NO: 536161 - RNA, 22 nt, Human
guggguggaggcgucgagggca

SEQ ID NO: 536162 - RNA, 22 nt, Human
ugaaacuugaguauauauggau

SEQ ID NO: 536163 - RNA, 22 nt, Human
gccugucugcgucacgcuuauu

SEQ ID NO: 536164 - RNA, 22 nt, Human
ucuccaggaagcccucccugac

SEQ ID NO: 536165 - RNA, 22 nt, Human
ugggacaguuguccuccacucu

SEQ ID NO: 536166 - RNA, 22 nt, Human
ugugugccugagccgugccugg

SEQ ID NO: 536167 - RNA, 22 nt, Human
uuacauaacgguaugaaaaaug

SEQ ID NO: 536168 - RNA, 22 nt, Human
uaauuuaugaugcaaagaaaag

SEQ ID NO: 536169 - RNA, 22 nt, Human
gaagguccagcguggccaaguc

SEQ ID NO: 536170 - RNA, 22 nt, Human
cugcugaggccuucccuguccu

SEQ ID NO: 536171 - RNA, 22 nt, Human
aggcacugaaggaagcuugcgc

SEQ ID NO: 536172 - RNA, 22 nt, Human
gcucuguccagcgugcacagaa

SEQ ID NO: 536173 - RNA, 22 nt, Human
ggugagaggcagugcuguggaa

SEQ ID NO: 536174 - RNA, 22 nt, Human
ugacagaaagaauaugucaauc

SEQ ID NO: 536175 - RNA, 22 nt, Human
caugagauaauuuuucuccagu

SEQ ID NO: 536176 - RNA, 18 nt, Human
uagagggggccugggcau

SEQ ID NO: 536177 - RNA, 22 nt, Human
ucugagaguagagcugccucuu

SEQ ID NO: 536178 - RNA, 22 nt, Human
ccagggcagugggagaaggugc

SEQ ID NO: 536179 - RNA, 22 nt, Human
auucagcauaaucaguagcuug

SEQ ID NO: 536180 - RNA, 22 nt, Human
ggugcaaguuuuuugaggaagu

SEQ ID NO: 536181 - RNA, 22 nt, Human
ugacagaaugugacucucagau

SEQ ID NO: 536182 - RNA, 22 nt, Human
cugaggagagaucacguggugu

SEQ ID NO: 536183 - RNA, 22 nt, Human
gucagaggggacaagacacaga

SEQ ID NO: 536184 - RNA, 22 nt, Human
uaacacuugaagccauuuuugc

SEQ ID NO: 536185 - RNA, 22 nt, Human
cagcugaagagaggugcugagu

SEQ ID NO: 536186 - RNA, 22 nt, Human
ugccauuucucaaauaugacua

SEQ ID NO: 536187 - RNA, 22 nt, Human
ggcaaaaaccauaauuacuuuu

SEQ ID NO: 536188 - RNA, 22 nt, Human
gcugggcugagcuagacuuggc

SEQ ID NO: 536189 - RNA, 22 nt, Human
auuuucauuuugcagggugaga

SEQ ID NO: 536190 - RNA, 22 nt, Human
uguaauggaagugggauugcau

SEQ ID NO: 536191 - RNA, 22 nt, Human
cgagcagaauggagggugccga

SEQ ID NO: 536192 - RNA, 22 nt, Human
caguguuuagcacagugcuugg

SEQ ID NO: 536193 - RNA, 22 nt, Human
acaguggaauggugggccugca

SEQ ID NO: 536194 - RNA, 22 nt, Human
gggcugagggguaucucauggg

SEQ ID NO: 536195 - RNA, 22 nt, Human
agcugaaucuugacuaggaaga

SEQ ID NO: 536196 - RNA, 22 nt, Human
ccagacccugcucuggggcucu

SEQ ID NO: 536197 - RNA, 22 nt, Human
ggcgaggccgggacaggcugga

SEQ ID NO: 536198 - RNA, 22 nt, Human
uuaugaaguuccuguuacagug

SEQ ID NO: 536199 - RNA, 22 nt, Human
uuguccaaggucccacaguuag

SEQ ID NO: 536200 - RNA, 22 nt, Human
acagcugugagggucacuugua

SEQ ID NO: 536201 - RNA, 20 nt, Human
uaggcagagcugugcagccu

SEQ ID NO: 536202 - RNA, 22 nt, Human
gaaggccaguuuugagauaggu

SEQ ID NO: 536203 - RNA, 22 nt, Human
ugaagccaucccucagauggcc

SEQ ID NO: 536204 - RNA, 19 nt, Human
gaguuauugccagggcaug

SEQ ID NO: 536205 - RNA, 22 nt, Human
agacagcauggagcugauaaca

SEQ ID NO: 536206 - RNA, 22 nt, Human
cagacuggccacaucugcacug

SEQ ID NO: 536207 - RNA, 19 nt, Human
ccagaggacuguuaaugaa

SEQ ID NO: 536208 - RNA, 22 nt, Human
uagcuggggcuuucauucuugc

SEQ ID NO: 536209 - RNA, 22 nt, Human
uucaggagcuggcugcgaagga

SEQ ID NO: 536210 - RNA, 22 nt, Human
ggcagggaaacagcugauccca

SEQ ID NO: 536211 - RNA, 22 nt, Human
cagaccugagguugaguaccag

SEQ ID NO: 536212 - RNA, 22 nt, Human
gcagcucugacaaugccuggaa

SEQ ID NO: 536213 - RNA, 22 nt, Human
auauguguauuugguuagccua

SEQ ID NO: 536214 - RNA, 22 nt, Human
gcuggacaggccacauggagga

SEQ ID NO: 536215 - RNA, 17 nt, Human
uccaggcauaucuccua

SEQ ID NO: 536216 - RNA, 19 nt, Human
augagcuggcauuucaggu

SEQ ID NO: 536217 - RNA, 22 nt, Human
cccaggccagaacuugguugcu

SEQ ID NO: 536218 - RNA, 22 nt, Human
uuucacaggggcaaccuccaug

SEQ ID NO: 536219 - RNA, 22 nt, Human
guuauaaaggugauaaugguca

SEQ ID NO: 536220 - RNA, 20 nt, Human
ucauugcacauaauggaagc

SEQ ID NO: 536221 - RNA, 22 nt, Human
ucuaaacagccucuuaccaacu

SEQ ID NO: 536222 - RNA, 22 nt, Human
ugaagccaaucugccaggcaga

SEQ ID NO: 536223 - RNA, 22 nt, Human
gcugauauaaaauuacagagga

SEQ ID NO: 536224 - RNA, 21 nt, Human
gagacagacuuucguccccug

SEQ ID NO: 536225 - RNA, 18 nt, Human
ggcggguguuuuauucac

SEQ ID NO: 536226 - RNA, 22 nt, Human
cucuggagguugagcccagcaa

SEQ ID NO: 536227 - RNA, 22 nt, Human
ugaaacaauuagaauguaauga

SEQ ID NO: 536228 - RNA, 19 nt, Human
gggaccugacuaauuggca

SEQ ID NO: 536229 - RNA, 22 nt, Human
cagagcaguggagaguaggucu

SEQ ID NO: 536230 - RNA, 22 nt, Human
aacuuucugucugagcugcaga

SEQ ID NO: 536231 - RNA, 22 nt, Human
cuggacaggcuggggacugcaa

SEQ ID NO: 536232 - RNA, 22 nt, Human
cagcugccaagaaucuuuucua

SEQ ID NO: 536233 - RNA, 22 nt, Human
auauuccauugguuucccuucu

SEQ ID NO: 536234 - RNA, 22 nt, Human
ugcaggugcugauaccuacucc

SEQ ID NO: 536235 - RNA, 22 nt, Human
auuauuagacuuauaugguagu

SEQ ID NO: 536236 - RNA, 22 nt, Human
ugauuuccuaggucuggagaag

SEQ ID NO: 536237 - RNA, 22 nt, Human
guuuuggcagccguguucacau

SEQ ID NO: 536238 - RNA, 17 nt, Human
ggccuuggggccucagu

SEQ ID NO: 536239 - RNA, 17 nt, Human
ccacagccuggcacuug

SEQ ID NO: 536240 - RNA, 22 nt, Human
cuuagaaauuguuacucauuca

SEQ ID NO: 536241 - RNA, 22 nt, Human
acauuucucaucuaguagagua

SEQ ID NO: 536242 - RNA, 22 nt, Human
aaaugcauaucaaagacuugaa

SEQ ID NO: 536243 - RNA, 22 nt, Human
cuucaagauauuucuagaauca

SEQ ID NO: 536244 - RNA, 21 nt, Human
ugccagcauuaaacagucauu

SEQ ID NO: 536245 - RNA, 22 nt, Human
auagacauuuugcauucaagca

SEQ ID NO: 536246 - RNA, 22 nt, Human
ggcaggcugggagucaucagag

SEQ ID NO: 536247 - RNA, 22 nt, Human
aaaugcaucagcucauaagaga

SEQ ID NO: 536248 - RNA, 22 nt, Human
agaggcugcacuugcucaugau

SEQ ID NO: 536249 - RNA, 22 nt, Human
caaaguauauuggauugaaugg

SEQ ID NO: 536250 - RNA, 23 nt, Human
ugggucagcugccuccaggacaa

SEQ ID NO: 536251 - RNA, 22 nt, Human
agauguguuucuaguuccugca

SEQ ID NO: 536252 - RNA, 22 nt, Human
gugcaugucggggugcauguca

SEQ ID NO: 536253 - RNA, 22 nt, Human
ugcaccauuuugucaggcuacu

SEQ ID NO: 536254 - RNA, 22 nt, Human
ucagagugugacuuggucauga

SEQ ID NO: 536255 - RNA, 22 nt, Human
ucaggccuggagaaaggaauga

SEQ ID NO: 536256 - RNA, 22 nt, Human
ucacacguccuugcuacuccuc

SEQ ID NO: 536257 - RNA, 22 nt, Human
cauagcaacagcaucaagucaa

SEQ ID NO: 536258 - RNA, 22 nt, Human
cuuucugaaagacauuuuaacu

SEQ ID NO: 536259 - RNA, 22 nt, Human
uacaaagauaguguuagaguaa

SEQ ID NO: 536260 - RNA, 20 nt, Human
uccuggccucccuggggcuc

SEQ ID NO: 536261 - RNA, 22 nt, Human
gcugcagccuucuugccauuaa

SEQ ID NO: 536262 - RNA, 22 nt, Human
cucuuuaacucccauucugucc

SEQ ID NO: 536263 - RNA, 20 nt, Human
cagaaauuuguaaaagggau

SEQ ID NO: 536264 - RNA, 22 nt, Human
gagggaggcaucaugaauccag

SEQ ID NO: 536265 - RNA, 17 nt, Human
gcccugccugcugcccu

SEQ ID NO: 536266 - RNA, 22 nt, Human
caggccugucugcacaugaggc

SEQ ID NO: 536267 - RNA, 22 nt, Human
uugcucagcacuggagccagcu

SEQ ID NO: 536268 - RNA, 22 nt, Human
ucacaguuauagucuguagaau

SEQ ID NO: 536269 - RNA, 18 nt, Human
aggcaggugcuggaaguc

SEQ ID NO: 536270 - RNA, 22 nt, Human
cgcaggugccggcagauggggu

SEQ ID NO: 536271 - RNA, 22 nt, Human
aaguucaagagugacauauuag

SEQ ID NO: 536272 - RNA, 22 nt, Human
cugaggcauguuacaggacaua

SEQ ID NO: 536273 - RNA, 22 nt, Human
cagcagcccacgcgugcugucc

SEQ ID NO: 536274 - RNA, 22 nt, Human
caguacuuuucaaccaguauga

SEQ ID NO: 536275 - RNA, 22 nt, Human
gauuuuauauggcauacugugg

SEQ ID NO: 536276 - RNA, 19 nt, Human
uagcagcugccaaaggaga

SEQ ID NO: 536277 - RNA, 22 nt, Human
ugccagugggugugcagagacu

SEQ ID NO: 536278 - RNA, 22 nt, Human
uuuguguguguauaggaaagga

SEQ ID NO: 536279 - RNA, 22 nt, Human
aaaugguaaauuaguaguagcu

SEQ ID NO: 536280 - RNA, 22 nt, Human
ucaguguuucaguuuggaaaug

SEQ ID NO: 536281 - RNA, 22 nt, Human
agccaggccagacucacacccu

SEQ ID NO: 536282 - RNA, 22 nt, Human
aggcaguuuaggcagcgauuua

SEQ ID NO: 536283 - RNA, 21 nt, Human
agagagaaggccauauggucc

SEQ ID NO: 536284 - RNA, 22 nt, Human
uuucuaaggugauccuuucuua

SEQ ID NO: 536285 - RNA, 22 nt, Human
acagauggagcuacuagguaaa

SEQ ID NO: 536286 - RNA, 22 nt, Human
uuucauaaugucacagucaaaa

SEQ ID NO: 536287 - RNA, 20 nt, Human
auacacauucauagaaaaau

SEQ ID NO: 536288 - RNA, 22 nt, Human
ggagguggagguugcaaugagc

SEQ ID NO: 536289 - RNA, 22 nt, Human
acaguggaagcaugaugcuauc

SEQ ID NO: 536290 - RNA, 22 nt, Human
uaggaccccugugguagauggg

SEQ ID NO: 536291 - RNA, 22 nt, Human
cccugcagaccaaugccauaga

SEQ ID NO: 536292 - RNA, 22 nt, Human
ggcucagaaacuaaaggcgcug

SEQ ID NO: 536293 - RNA, 22 nt, Human
uucucuuauucuggauaugcag

SEQ ID NO: 536294 - RNA, 22 nt, Human
aaacaugaguuaaaaguaacug

SEQ ID NO: 536295 - RNA, 22 nt, Human
ggagcugugcagugacuacaga

SEQ ID NO: 536296 - RNA, 22 nt, Human
gggcagugucgaggucuggucc

SEQ ID NO: 536297 - RNA, 22 nt, Human
cuuacauuuaaucaugugucau

SEQ ID NO: 536298 - RNA, 22 nt, Human
ugucucugcuuuccuugcaggg

SEQ ID NO: 536299 - RNA, 22 nt, Human
acugggcuguuuuuugagugga

SEQ ID NO: 536300 - RNA, 22 nt, Human
cugaggugcuauggaggauacg

SEQ ID NO: 536301 - RNA, 22 nt, Human
ugggacagagugagcuuuggcc

SEQ ID NO: 536302 - RNA, 22 nt, Human
agaaacaagguguagguugacc

SEQ ID NO: 536303 - RNA, 19 nt, Human
uuuaaugugugcugcaauc

SEQ ID NO: 536304 - RNA, 22 nt, Human
gcacccaguuugucucaggguu

SEQ ID NO: 536305 - RNA, 22 nt, Human
gcugugugaaaacugggccugg

SEQ ID NO: 536306 - RNA, 22 nt, Human
aaucuauucccuuucuguaaaa

SEQ ID NO: 536307 - RNA, 23 nt, Human
uggccuggagagaaaagaugagu

SEQ ID NO: 536308 - RNA, 18 nt, Human
aagcugcccucaggcagg

SEQ ID NO: 536309 - RNA, 22 nt, Human
gccugcugaagccagagugugu

SEQ ID NO: 536310 - RNA, 22 nt, Human
acaggugguagaguggaaagag

SEQ ID NO: 536311 - RNA, 22 nt, Human
uguucuuacggaacuuaucuuu

SEQ ID NO: 536312 - RNA, 22 nt, Human
aucuuuagagucaucugagugu

SEQ ID NO: 536313 - RNA, 22 nt, Human
ugaacagauggcccagcagagg

SEQ ID NO: 536314 - RNA, 22 nt, Human
accucugcaaugcaaugucaug

SEQ ID NO: 536315 - RNA, 22 nt, Human
ggcugcugguggaaugguaggc

SEQ ID NO: 536316 - RNA, 22 nt, Human
uucucuuaucuggcauuauugg

SEQ ID NO: 536317 - RNA, 22 nt, Human
uuucuuucaauucuccuaaugc

SEQ ID NO: 536318 - RNA, 22 nt, Human
ccaggguuuaaauucugacuau

SEQ ID NO: 536319 - RNA, 22 nt, Human
cuucuuucccaggcauguuuua

SEQ ID NO: 536320 - RNA, 22 nt, Human
auguaacaggugaagcucugag

SEQ ID NO: 536321 - RNA, 22 nt, Human
ugagcccagagaucugagcuau

SEQ ID NO: 536322 - RNA, 22 nt, Human
gaaggaaaacagaucugccuga

SEQ ID NO: 536323 - RNA, 21 nt, Human
aggagggcacaaggccaggaa

SEQ ID NO: 536324 - RNA, 22 nt, Human
aggcacuuuaggaucagguuga

SEQ ID NO: 536325 - RNA, 22 nt, Human
agagaguugaggaagcaacacu

SEQ ID NO: 536326 - RNA, 22 nt, Human
uaucuaagagagucaauauuua

SEQ ID NO: 536327 - RNA, 22 nt, Human
uggcuuccugcacagugucugc

SEQ ID NO: 536328 - RNA, 22 nt, Human
gugcagugacccuggagagcug

SEQ ID NO: 536329 - RNA, 22 nt, Human
aacaguuucaguuacugaugag

SEQ ID NO: 536330 - RNA, 22 nt, Human
aguggcagggcuggcugcugca

SEQ ID NO: 536331 - RNA, 22 nt, Human
cgcaggcucgguucacagagca

SEQ ID NO: 536332 - RNA, 22 nt, Human
caucugaauuugccuuaguuuc

SEQ ID NO: 536333 - RNA, 20 nt, Human
uccugcaguuccuaggaggg

SEQ ID NO: 536334 - RNA, 22 nt, Human
cagagcaucgcgcagagagccu

SEQ ID NO: 536335 - RNA, 22 nt, Human
cugcugaucagggcaaagcaaa

SEQ ID NO: 536336 - RNA, 22 nt, Human
auccaagucagggauaguuuga

SEQ ID NO: 536337 - RNA, 22 nt, Human
auagacaaugguuugccaagaa

SEQ ID NO: 536338 - RNA, 22 nt, Human
gggcuggcucccagguguugaa

SEQ ID NO: 536339 - RNA, 22 nt, Human
cagaccucaguccucaguagga

SEQ ID NO: 536340 - RNA, 22 nt, Human
ugcagggaggccccgcagcccu

SEQ ID NO: 536341 - RNA, 22 nt, Human
aguuacaugacugccggcggug

SEQ ID NO: 536342 - RNA, 22 nt, Human
aaagcauauuaggacugaauua

SEQ ID NO: 536343 - RNA, 22 nt, Human
uuugcauuuugauaagaucacu

SEQ ID NO: 536344 - RNA, 22 nt, Human
uccugcugagcgucugucauuu

SEQ ID NO: 536345 - RNA, 22 nt, Human
uguuucaaguuugcucaaagga

SEQ ID NO: 536346 - RNA, 22 nt, Human
caccugcccagcaccugggauc

SEQ ID NO: 536347 - RNA, 22 nt, Human
caguggccaugguggcaggggu

SEQ ID NO: 536348 - RNA, 22 nt, Human
ccuguucaauauucuuccuugu

SEQ ID NO: 536349 - RNA, 22 nt, Human
gggaaccagccgcuuccgccuc

SEQ ID NO: 536350 - RNA, 22 nt, Human
ggagcugagcagcgauggcgga

SEQ ID NO: 536351 - RNA, 22 nt, Human
uggcugagguaacuaugaauaa

SEQ ID NO: 536352 - RNA, 22 nt, Human
aagggcugcuguagaagcagag

SEQ ID NO: 536353 - RNA, 22 nt, Human
gcugucugucucugucccacca

SEQ ID NO: 536354 - RNA, 22 nt, Human
agacagggucuugaucagagcu

SEQ ID NO: 536355 - RNA, 22 nt, Human
uguucauucugugaccugguuc

SEQ ID NO: 536356 - RNA, 22 nt, Human
ggggccuuggaucugugccccg

SEQ ID NO: 536357 - RNA, 21 nt, Human
uagaaaucagcuggugccucu

SEQ ID NO: 536358 - RNA, 18 nt, Human
gcauuuuaaucugaggca

SEQ ID NO: 536359 - RNA, 22 nt, Human
cuuauucagcacuugcucugua

SEQ ID NO: 536360 - RNA, 22 nt, Human
agcagcuggugagcaagcucag

SEQ ID NO: 536361 - RNA, 22 nt, Human
agcauuuaauuacaguuuaauu

SEQ ID NO: 536362 - RNA, 22 nt, Human
aacacuuuuuccuccugucugg

SEQ ID NO: 536363 - RNA, 22 nt, Human
cagguacauucguagacccauu

SEQ ID NO: 536364 - RNA, 22 nt, Human
uaggaaaacgugauuuucucac

SEQ ID NO: 536365 - RNA, 22 nt, Human
cuuuuucuaaucauaauugucu

SEQ ID NO: 536366 - RNA, 22 nt, Human
cacaccagagguuaccugcaaa

SEQ ID NO: 536367 - RNA, 22 nt, Human
uggccagguguggguucucaga

SEQ ID NO: 536368 - RNA, 22 nt, Human
ugcaggcucaucucaagaguag

SEQ ID NO: 536369 - RNA, 22 nt, Human
ugaucugaaggacaugggaccc

SEQ ID NO: 536370 - RNA, 22 nt, Human
ucauuuguucucauucucuacu

SEQ ID NO: 536371 - RNA, 21 nt, Human
uugauuuuaggaaguuuguca

SEQ ID NO: 536372 - RNA, 22 nt, Human
agaaggaagccaggagggugca

SEQ ID NO: 536373 - RNA, 22 nt, Human
agaaguuaauuccugaaauucu

SEQ ID NO: 536374 - RNA, 22 nt, Human
ugcaauaacccaguaucuguga

SEQ ID NO: 536375 - RNA, 22 nt, Human
cauuuguauagugcuuagacca

SEQ ID NO: 536376 - RNA, 22 nt, Human
uggcaguguauagguggcuccu

SEQ ID NO: 536377 - RNA, 22 nt, Human
uaccaggcagcugcacagaggc

SEQ ID NO: 536378 - RNA, 22 nt, Human
uucuuguacuggagauacauga

SEQ ID NO: 536379 - RNA, 22 nt, Human
uuugaguuuuaccuguauuacu

SEQ ID NO: 536380 - RNA, 22 nt, Human
cugggccaguuaugucucaucu

SEQ ID NO: 536381 - RNA, 22 nt, Human
ugcaaacauccgacugaaagcc

SEQ ID NO: 536382 - RNA, 22 nt, Human
aggcuucccagcugagcucagc

SEQ ID NO: 536383 - RNA, 22 nt, Human
acagaauauuuuauuuagauca

SEQ ID NO: 536384 - RNA, 22 nt, Human
uucuucauucccuuacuuccga

SEQ ID NO: 536385 - RNA, 22 nt, Human
uacacuuuuuacuacagauucu

SEQ ID NO: 536386 - RNA, 22 nt, Human
aagaauguucuuguagucauga

SEQ ID NO: 536387 - RNA, 22 nt, Human
ucaaacuagccugacugguauu

SEQ ID NO: 536388 - RNA, 22 nt, Human
uccucucagugugguuguggga

SEQ ID NO: 536389 - RNA, 22 nt, Human
acuuucuaggucucaguccuuu

SEQ ID NO: 536390 - RNA, 22 nt, Human
gaagaagccucuguggaucuga

SEQ ID NO: 536391 - RNA, 22 nt, Human
agggucagugaugagggagccc

SEQ ID NO: 536392 - RNA, 22 nt, Human
guucacaguguuuucuuugcau

SEQ ID NO: 536393 - RNA, 22 nt, Human
ugggcuucauaauugguccuag

SEQ ID NO: 536394 - RNA, 22 nt, Human
auuuacagaugaugcuauuuga

SEQ ID NO: 536395 - RNA, 23 nt, Human
ggcaccaggccauggagcgggag

SEQ ID NO: 536396 - RNA, 20 nt, Human
ucaguuaggaagaggcacuc

SEQ ID NO: 536397 - RNA, 22 nt, Human
aaauguagaccuauagggaccu

SEQ ID NO: 536398 - RNA, 22 nt, Human
agggccugagaccguggcuuga

SEQ ID NO: 536399 - RNA, 19 nt, Human
ucaaugcaugaaaucagcc

SEQ ID NO: 536400 - RNA, 22 nt, Human
ucacaucuguugauacagcauc

SEQ ID NO: 536401 - RNA, 23 nt, Human
ccuucagaagaaguaacaggggc

SEQ ID NO: 536402 - RNA, 22 nt, Human
acuauucauguuuccuaacuau

SEQ ID NO: 536403 - RNA, 22 nt, Human
agggcugcuuugcuaaauaugg

SEQ ID NO: 536404 - RNA, 22 nt, Human
agugcuguccaguuucacaggu

SEQ ID NO: 536405 - RNA, 22 nt, Human
uuuacucuugcuacacaacugu

SEQ ID NO: 536406 - RNA, 22 nt, Human
cugcugugagugguucuugccu

SEQ ID NO: 536407 - RNA, 22 nt, Human
acagggcagagggcaguuggua

SEQ ID NO: 536408 - RNA, 17 nt, Human
cuggagccuccaacucc

SEQ ID NO: 536409 - RNA, 22 nt, Human
cccaggcacauccacucuguga

SEQ ID NO: 536410 - RNA, 22 nt, Human
aaaauaacuucuacuauuugca

SEQ ID NO: 536411 - RNA, 22 nt, Human
aaggaaccugagggaccccaaa

SEQ ID NO: 536412 - RNA, 22 nt, Human
uauuuucuguggaggaccagau

SEQ ID NO: 536413 - RNA, 18 nt, Human
acacacacaccuguguau

SEQ ID NO: 536414 - RNA, 22 nt, Human
gcagaaggauccgcaggugcaa

SEQ ID NO: 536415 - RNA, 22 nt, Human
uccagcagaaaagagguaggga

SEQ ID NO: 536416 - RNA, 22 nt, Human
auauauuuacucuccuguugca

SEQ ID NO: 536417 - RNA, 22 nt, Human
caaauucagaaaauugguagag

SEQ ID NO: 536418 - RNA, 22 nt, Human
ggaaggcuaauaaugcaagaaa

SEQ ID NO: 536419 - RNA, 22 nt, Human
gaggggaagacuucuggacagu

SEQ ID NO: 536420 - RNA, 23 nt, Human
agccucuuuucuccugcccugca

SEQ ID NO: 536421 - RNA, 22 nt, Human
cuuaauaauaggugaggcuaug

SEQ ID NO: 536422 - RNA, 21 nt, Human
ccuuuacaauuuugcauuccu

SEQ ID NO: 536423 - RNA, 22 nt, Human
gucugagaaucuugcauaucau

SEQ ID NO: 536424 - RNA, 22 nt, Human
aaacugaaacaucaucauguug

SEQ ID NO: 536425 - RNA, 22 nt, Human
uguguauucagcaagcgaaaca

SEQ ID NO: 536426 - RNA, 22 nt, Human
agugagcauucguuuggaaccc

SEQ ID NO: 536427 - RNA, 22 nt, Human
caggcuugcugcuagagcacuu

SEQ ID NO: 536428 - RNA, 20 nt, Human
aagaggugauaacaggugag

SEQ ID NO: 536429 - RNA, 22 nt, Human
cagcuguguagaugcaggguca

SEQ ID NO: 536430 - RNA, 22 nt, Human
cugcagggcccgccugagcccu

SEQ ID NO: 536431 - RNA, 22 nt, Human
uuccaaucaggauaauaauuag

SEQ ID NO: 536432 - RNA, 22 nt, Human
ggcuccuguccccucagcugcu

SEQ ID NO: 536433 - RNA, 22 nt, Human
acuuuuuaguuuccucaaacau

SEQ ID NO: 536434 - RNA, 22 nt, Human
acagcucuguugccagaucugc

SEQ ID NO: 536435 - RNA, 22 nt, Human
aaaagacaggugucugcggccc

SEQ ID NO: 536436 - RNA, 22 nt, Human
aguguuucccaguaggaugaaa

SEQ ID NO: 536437 - RNA, 22 nt, Human
gcugggcaccggagagacccca

SEQ ID NO: 536438 - RNA, 22 nt, Human
gcagauggacuguaugaccuga

SEQ ID NO: 536439 - RNA, 22 nt, Human
ucuccucucuuaccugguacaa

SEQ ID NO: 536440 - RNA, 22 nt, Human
agggccugugcuuccugagaua

SEQ ID NO: 536441 - RNA, 22 nt, Human
gggcuaggcuuggccagcacug

SEQ ID NO: 536442 - RNA, 22 nt, Human
ugcacacacaggagucuccucc

SEQ ID NO: 536443 - RNA, 21 nt, Human
ugcuggccucaagggugacuu

SEQ ID NO: 536444 - RNA, 22 nt, Human
aaauagaaaccaacaaggucag

SEQ ID NO: 536445 - RNA, 22 nt, Human
gcuccuggcuccaggcagccaa

SEQ ID NO: 536446 - RNA, 22 nt, Human
agggaggaguccucaaagucau

SEQ ID NO: 536447 - RNA, 22 nt, Human
gcagacaauuuauuagcagauu

SEQ ID NO: 536448 - RNA, 22 nt, Human
aaagcaguauaguggaagggcu

SEQ ID NO: 536449 - RNA, 23 nt, Human
ugucugucauggaauuucaaggu

SEQ ID NO: 536450 - RNA, 22 nt, Human
gaagagcugcaguuuccugggc

SEQ ID NO: 536451 - RNA, 22 nt, Human
cugccugugccaaugcuccuuu

SEQ ID NO: 536452 - RNA, 22 nt, Human
augaaguuccaguauaugcagu

SEQ ID NO: 536453 - RNA, 21 nt, Human
ucacuagugccuucugucauu

SEQ ID NO: 536454 - RNA, 22 nt, Human
uguucagagacagaaauucuaa

SEQ ID NO: 536455 - RNA, 22 nt, Human
aacaucuuguccuuagauuaaa

SEQ ID NO: 536456 - RNA, 22 nt, Human
acaaaugacucaaacaccacuu

SEQ ID NO: 536457 - RNA, 22 nt, Human
ucacuguauuuggaagggaugg

SEQ ID NO: 536458 - RNA, 22 nt, Human
cuuacauugugugcaugagggg

SEQ ID NO: 536459 - RNA, 22 nt, Human
ccucccuggccagagcagcagc

SEQ ID NO: 536460 - RNA, 22 nt, Human
ugggacagugugccuugcuccu

SEQ ID NO: 536461 - RNA, 22 nt, Human
caacaucuguaucauuaguaca

SEQ ID NO: 536462 - RNA, 22 nt, Human
uuauuugugaaucauuuaucua

SEQ ID NO: 536463 - RNA, 22 nt, Human
gaaaucauuagcaaagauaugu

SEQ ID NO: 536464 - RNA, 22 nt, Human
ucaugaaaauagaucagaaauu

SEQ ID NO: 536465 - RNA, 22 nt, Human
acuuccugcuaugagcuucugu

SEQ ID NO: 536466 - RNA, 22 nt, Human
cagugcagaacacauggaaaau

SEQ ID NO: 536467 - RNA, 22 nt, Human
cacugaaggacaguaggaaggg

SEQ ID NO: 536468 - RNA, 21 nt, Human
aggcccagagucuugggggga

SEQ ID NO: 536469 - RNA, 22 nt, Human
cccuuuaauuccaacacaggaa

SEQ ID NO: 536470 - RNA, 22 nt, Human
gugcagguguuuuggcugccag

SEQ ID NO: 536471 - RNA, 22 nt, Human
caguacuuugcaucauuccacu

SEQ ID NO: 536472 - RNA, 22 nt, Human
cuugaaagauuuggccucugug

SEQ ID NO: 536473 - RNA, 22 nt, Human
ugugggaggucuggaaggcucc

SEQ ID NO: 536474 - RNA, 22 nt, Human
uuccuccacgugacaggagcca

SEQ ID NO: 536475 - RNA, 22 nt, Human
cacauuuauuugaggcuaauug

SEQ ID NO: 536476 - RNA, 22 nt, Human
gcagagcucuguucuuaucucc

SEQ ID NO: 536477 - RNA, 21 nt, Human
aggcucccagaaaugggcauc

SEQ ID NO: 536478 - RNA, 22 nt, Human
guguuuuaucagacaaaguaua

SEQ ID NO: 536479 - RNA, 22 nt, Human
agccugagugcuuaggacuguu

SEQ ID NO: 536480 - RNA, 22 nt, Human
aaagaagagcuggaaggagucu

SEQ ID NO: 536481 - RNA, 22 nt, Human
acuccugggugcugaccagcgu

SEQ ID NO: 536482 - RNA, 20 nt, Human
gggaugagaguccuagcucu

SEQ ID NO: 536483 - RNA, 22 nt, Human
cagccucugagccuuggcagau

SEQ ID NO: 536484 - RNA, 22 nt, Human
uccuccugccuuugcuucuugu

SEQ ID NO: 536485 - RNA, 22 nt, Human
uggaaagaugaagauguuuaag

SEQ ID NO: 536486 - RNA, 22 nt, Human
gcuggcucuucaguggagauag

SEQ ID NO: 536487 - RNA, 22 nt, Human
ucauguaaguauagaaagcagu

SEQ ID NO: 536488 - RNA, 22 nt, Human
agcccugcacaguucgggagga

SEQ ID NO: 536489 - RNA, 22 nt, Human
ccaaaauguuugaaugcaugug

SEQ ID NO: 536490 - RNA, 22 nt, Human
gcaaagcaagauucagauguag

SEQ ID NO: 536491 - RNA, 22 nt, Human
uauacucugagaaacgugucac

SEQ ID NO: 536492 - RNA, 22 nt, Human
ugguccugcccacgcccaucug

SEQ ID NO: 536493 - RNA, 22 nt, Human
aagauuguuuuggaugcuaacu

SEQ ID NO: 536494 - RNA, 22 nt, Human
uucaggauggcggauguugggg

SEQ ID NO: 536495 - RNA, 22 nt, Human
cugccuguuagucuagcaguua

SEQ ID NO: 536496 - RNA, 22 nt, Human
ugcucagcugcucuguauucuu

SEQ ID NO: 536497 - RNA, 22 nt, Human
ucuuugaaaagggagauagaaa

SEQ ID NO: 536498 - RNA, 23 nt, Human
aggcaggcaguucagcuguuguu

SEQ ID NO: 536499 - RNA, 22 nt, Human
agcagccacccagcugcucauu

SEQ ID NO: 536500 - RNA, 22 nt, Human
agcugagcucaggcugauguaa

SEQ ID NO: 536501 - RNA, 22 nt, Human
ccugccugacagagaagguuca

SEQ ID NO: 536502 - RNA, 23 nt, Human
cuuucauugugguuucacagagc

SEQ ID NO: 536503 - RNA, 22 nt, Human
ggugggcaacauuuggccugag

SEQ ID NO: 536504 - RNA, 22 nt, Human
cagggccuuauccugccauuga

SEQ ID NO: 536505 - RNA, 22 nt, Human
cugcuggccuagcccauccucu

SEQ ID NO: 536506 - RNA, 22 nt, Human
uuuuagaaggaaugcuauggug

SEQ ID NO: 536507 - RNA, 22 nt, Human
uugaaacugggaagcagggggu

SEQ ID NO: 536508 - RNA, 22 nt, Human
uccugcagccuugggcuggagc

SEQ ID NO: 536509 - RNA, 22 nt, Human
gcaggugaaugauggacuagga

SEQ ID NO: 536510 - RNA, 22 nt, Human
acuggcugaguuuauguucaca

SEQ ID NO: 536511 - RNA, 21 nt, Human
ccagcccagcugugucccagc

SEQ ID NO: 536512 - RNA, 22 nt, Human
uuaacauuguccuuagcagauu

SEQ ID NO: 536513 - RNA, 22 nt, Human
ggucccaaucuaaucacaugag

SEQ ID NO: 536514 - RNA, 22 nt, Human
guagcccaccuggggagggcga

SEQ ID NO: 536515 - RNA, 22 nt, Human
ccugucugcaugagugagcaua

SEQ ID NO: 536516 - RNA, 22 nt, Human
uuucuaagugaacauucaaguu

SEQ ID NO: 536517 - RNA, 22 nt, Human
ugguuucccauuaucugcagga

SEQ ID NO: 536518 - RNA, 19 nt, Human
uguugccagguaucauguu

SEQ ID NO: 536519 - RNA, 21 nt, Human
uggcucugcucagagcagucc

SEQ ID NO: 536520 - RNA, 22 nt, Human
aggcugggaaaccugaaguugu

SEQ ID NO: 536521 - RNA, 22 nt, Human
ugaguacucggagugcuuugga

SEQ ID NO: 536522 - RNA, 20 nt, Human
aaaaucucccagaaacuuau

SEQ ID NO: 536523 - RNA, 22 nt, Human
auguuuauguugggcuauauuu

SEQ ID NO: 536524 - RNA, 22 nt, Human
uucuucuccuaaggagaguccu

SEQ ID NO: 536525 - RNA, 20 nt, Human
auuccauaguuggcacuuuu

SEQ ID NO: 536526 - RNA, 22 nt, Human
aagucuguuugagugucacacu

SEQ ID NO: 536527 - RNA, 18 nt, Human
uacaugcauaaaugaagc

SEQ ID NO: 536528 - RNA, 22 nt, Human
ugcuagugugugagauguucaa

SEQ ID NO: 536529 - RNA, 22 nt, Human
gggagcuggagcuggaagacuc

SEQ ID NO: 536530 - RNA, 22 nt, Human
uucacauugguucuugauagcu

SEQ ID NO: 536531 - RNA, 22 nt, Human
uugaggaguguuuagggugagg

SEQ ID NO: 536532 - RNA, 22 nt, Human
cagggcucgcucuugcccuucg

SEQ ID NO: 536533 - RNA, 20 nt, Human
uccaguuuuggagacauucu

SEQ ID NO: 536534 - RNA, 22 nt, Human
guuugcaaagaucauuuucucc

SEQ ID NO: 536535 - RNA, 22 nt, Human
uccuucagucuucugagccaua

SEQ ID NO: 536536 - RNA, 22 nt, Human
augauucaggauugaaccauuu

SEQ ID NO: 536537 - RNA, 19 nt, Human
gauuuaaacguggcucuau

SEQ ID NO: 536538 - RNA, 22 nt, Human
aagaauucacugguagagucaa

SEQ ID NO: 536539 - RNA, 22 nt, Human
ggcacugaauuucuuggcaucu

SEQ ID NO: 536540 - RNA, 20 nt, Human
agaagaggauacaaccaggc

SEQ ID NO: 536541 - RNA, 22 nt, Human
guauuccugcaaauagcaguga

SEQ ID NO: 536542 - RNA, 22 nt, Human
gucucagauaacauguauucua

SEQ ID NO: 536543 - RNA, 22 nt, Human
cacagcuuguuuagugacucac

SEQ ID NO: 536544 - RNA, 22 nt, Human
gcugcuggccgcccagcuucuc

SEQ ID NO: 536545 - RNA, 22 nt, Human
gggccaggaguggagauauggg

SEQ ID NO: 536546 - RNA, 22 nt, Human
gcagggacgccagggacagcaa

SEQ ID NO: 536547 - RNA, 22 nt, Human
uggaagagggagcuggguggcc

SEQ ID NO: 536548 - RNA, 22 nt, Human
caugggcuugcucucugagcuc

SEQ ID NO: 536549 - RNA, 22 nt, Human
cauaucaaagagaaggauagga

SEQ ID NO: 536550 - RNA, 22 nt, Human
gucccaggugggcuccaccucu

SEQ ID NO: 536551 - RNA, 22 nt, Human
uaucuucauagauuuuuacacc

SEQ ID NO: 536552 - RNA, 22 nt, Human
gcagguggcagaggugggaucu

SEQ ID NO: 536553 - RNA, 21 nt, Human
agacagaacaacugcucucca

SEQ ID NO: 536554 - RNA, 22 nt, Human
uaguuaggguucugcagagaca

SEQ ID NO: 536555 - RNA, 22 nt, Human
acaaaugacuauuugguacagg

SEQ ID NO: 536556 - RNA, 22 nt, Human
ugcacacaaaugugaacgugcc

SEQ ID NO: 536557 - RNA, 22 nt, Human
gcugcuggggucacaugguaag

SEQ ID NO: 536558 - RNA, 22 nt, Human
aaaguuuucugccuucauuaga

SEQ ID NO: 536559 - RNA, 22 nt, Human
uuaugcaaagaaauagacuaau

SEQ ID NO: 536560 - RNA, 22 nt, Human
cagcaggggaacugugggccag

SEQ ID NO: 536561 - RNA, 22 nt, Human
ugagcaggagauaaacagguag

SEQ ID NO: 536562 - RNA, 22 nt, Human
aaggcuaugaucuuuuucauga

SEQ ID NO: 536563 - RNA, 22 nt, Human
cuuucaaucaaaguuucuagug

SEQ ID NO: 536564 - RNA, 22 nt, Human
auguaucagauaaagcaugugg

SEQ ID NO: 536565 - RNA, 22 nt, Human
uuacaaguuucuggcuucaucc

SEQ ID NO: 536566 - RNA, 22 nt, Human
gcugucacaagcaucuggggca

SEQ ID NO: 536567 - RNA, 21 nt, Human
acaguuuuaaggagcacaugg

SEQ ID NO: 536568 - RNA, 22 nt, Human
aggugcugaacuggugaggucu

SEQ ID NO: 536569 - RNA, 22 nt, Human
uccuccuccucacagucaccug

SEQ ID NO: 536570 - RNA, 20 nt, Human
guggccucucacauucugag

SEQ ID NO: 536571 - RNA, 22 nt, Human
uagaaacuacuagaauaagaga

SEQ ID NO: 536572 - RNA, 22 nt, Human
aagggcucacccaacucacuuc

SEQ ID NO: 536573 - RNA, 22 nt, Human
aggaguguggccagggcucugg

SEQ ID NO: 536574 - RNA, 22 nt, Human
aguggagaauaugcagaaagcc

SEQ ID NO: 536575 - RNA, 22 nt, Human
aagacccacaaggcugaauguu

SEQ ID NO: 536576 - RNA, 22 nt, Human
uuuuggcucuugguaggucaga

SEQ ID NO: 536577 - RNA, 22 nt, Human
agcucuggaauaaugaugugau

SEQ ID NO: 536578 - RNA, 22 nt, Human
aaaugaacucuuccugcauccc

SEQ ID NO: 536579 - RNA, 22 nt, Human
ugagccuggguggucgaggcug

SEQ ID NO: 536580 - RNA, 22 nt, Human
ucuccuccuuuuuucaacauag

SEQ ID NO: 536581 - RNA, 22 nt, Human
acugagagucaagauagcaugg

SEQ ID NO: 536582 - RNA, 22 nt, Human
ucuggcaggacaugcugaccau

SEQ ID NO: 536583 - RNA, 22 nt, Human
aguuuuguaauucucaaaaaua

SEQ ID NO: 536584 - RNA, 22 nt, Human
uggcaugauaggaggugcagaa

SEQ ID NO: 536585 - RNA, 18 nt, Human
gccagagggcccaagguc

SEQ ID NO: 536586 - RNA, 22 nt, Human
uuauuauugugguugcauuauc

SEQ ID NO: 536587 - RNA, 22 nt, Human
gacacagaaggucacauguuca

SEQ ID NO: 536588 - RNA, 22 nt, Human
ggccuguccagccugccuggcu

SEQ ID NO: 536589 - RNA, 22 nt, Human
gcccuggagcuagacuaggaca

SEQ ID NO: 536590 - RNA, 22 nt, Human
acuguucaagcaaaugacauug

SEQ ID NO: 536591 - RNA, 22 nt, Human
ggaaagucuuguguagaugucu

SEQ ID NO: 536592 - RNA, 22 nt, Human
ucaggcaggacaauuauuuagg

SEQ ID NO: 536593 - RNA, 22 nt, Human
ggagcuggccgccuaugugcag

SEQ ID NO: 536594 - RNA, 22 nt, Human
ccagccuggggaggcagcuucu

SEQ ID NO: 536595 - RNA, 22 nt, Human
ugucccaacccugagaagauuc

SEQ ID NO: 536596 - RNA, 23 nt, Human
agcuggguggccugcgugaagcu

SEQ ID NO: 536597 - RNA, 22 nt, Human
gcugccugccuugccuggagga

SEQ ID NO: 536598 - RNA, 20 nt, Human
uaaggcuguuuuguauuccu

SEQ ID NO: 536599 - RNA, 22 nt, Human
augagcaguagguucauggcug

SEQ ID NO: 536600 - RNA, 21 nt, Human
cagacccucuagaggccaccu

SEQ ID NO: 536601 - RNA, 19 nt, Human
gugaggauacugcucagag

SEQ ID NO: 536602 - RNA, 20 nt, Human
agaguaacuggcacauaggg

SEQ ID NO: 536603 - RNA, 22 nt, Human
gaggcucacgacgggacgaacu

SEQ ID NO: 536604 - RNA, 22 nt, Human
agcguggguccaaggcucuggu

SEQ ID NO: 536605 - RNA, 22 nt, Human
agacaaagacagcaucucaggu

SEQ ID NO: 536606 - RNA, 19 nt, Human
ccugucugucuucagcuag

SEQ ID NO: 536607 - RNA, 22 nt, Human
ccugggcaaauuauguuacuca

SEQ ID NO: 536608 - RNA, 23 nt, Human
gccugcuggucaccuaaucugcc

SEQ ID NO: 536609 - RNA, 22 nt, Human
agucagugaaaacuagaauguu

SEQ ID NO: 536610 - RNA, 22 nt, Human
gcugcagugagccaagaucgug

SEQ ID NO: 536611 - RNA, 22 nt, Human
ugggaaaguaauugucauccuu

SEQ ID NO: 536612 - RNA, 22 nt, Human
cugcuuauggagaugaguaaga

SEQ ID NO: 536613 - RNA, 18 nt, Human
cccucuugcacaaagcaa

SEQ ID NO: 536614 - RNA, 22 nt, Human
ccucucucuccugcacacacac

SEQ ID NO: 536615 - RNA, 22 nt, Human
agcacccuccaacuucccugua

SEQ ID NO: 536616 - RNA, 22 nt, Human
gagaagcaauuuccaacugugc

SEQ ID NO: 536617 - RNA, 22 nt, Human
gcagcuuggauuucuguaguuu

SEQ ID NO: 536618 - RNA, 22 nt, Human
uuugucaaguuugcaaauacgu

SEQ ID NO: 536619 - RNA, 22 nt, Human
cccaggcacagauuaucccaau

SEQ ID NO: 536620 - RNA, 16 nt, Human
gggagggaguuggugg

SEQ ID NO: 536621 - RNA, 22 nt, Human
uggggugccgacagggagggca

SEQ ID NO: 536622 - RNA, 22 nt, Human
ucucagagugacaaugagaauu

SEQ ID NO: 536623 - RNA, 22 nt, Human
uaugagaaaauaaauaucuguu

SEQ ID NO: 536624 - RNA, 22 nt, Human
ggcagcaugagccuggugaauu

SEQ ID NO: 536625 - RNA, 22 nt, Human
auacaaauuuauagaugcauuu

SEQ ID NO: 536626 - RNA, 22 nt, Human
cuuaauuucaaacugcuaguga

SEQ ID NO: 536627 - RNA, 22 nt, Human
ucaguguuugguuucagaauug

SEQ ID NO: 536628 - RNA, 22 nt, Human
gaaaugcagauucugauucugu

SEQ ID NO: 536629 - RNA, 22 nt, Human
uuugaaaccuaguuauaugacu

SEQ ID NO: 536630 - RNA, 22 nt, Human
agcaaagucaguggaaccaucc

SEQ ID NO: 536631 - RNA, 22 nt, Human
auuauuauauagggaaaguccc

SEQ ID NO: 536632 - RNA, 21 nt, Human
uuacaaagcuacagauguugc

SEQ ID NO: 536633 - RNA, 22 nt, Human
ggagccugggcauuaguaauuu

SEQ ID NO: 536634 - RNA, 23 nt, Human
ccuggcuggauucucugcauuca

SEQ ID NO: 536635 - RNA, 22 nt, Human
uuaaacagagucugaaauguaa

SEQ ID NO: 536636 - RNA, 22 nt, Human
ggcuccugggagauagagguca

SEQ ID NO: 536637 - RNA, 22 nt, Human
uccuuugacuucuugcagucca

SEQ ID NO: 536638 - RNA, 23 nt, Human
ggggccugcaccggucugcgcgg

SEQ ID NO: 536639 - RNA, 22 nt, Human
auucuucacauaagugcuguac

SEQ ID NO: 536640 - RNA, 22 nt, Human
uguucccaagauaagauuauga

SEQ ID NO: 536641 - RNA, 18 nt, Human
cagcagagacauucaaaa

SEQ ID NO: 536642 - RNA, 22 nt, Human
aagaauuauugcaauacuagau

SEQ ID NO: 536643 - RNA, 22 nt, Human
gaggugaguggaucacgagguc

SEQ ID NO: 536644 - RNA, 22 nt, Human
gugugaaaugguucucuuuguu

SEQ ID NO: 536645 - RNA, 22 nt, Human
uucuucuuuaucucaguauccu

SEQ ID NO: 536646 - RNA, 22 nt, Human
uuguuaaagaugcagauuccau

SEQ ID NO: 536647 - RNA, 22 nt, Human
gcagaugcuuggcacugacagu

SEQ ID NO: 536648 - RNA, 22 nt, Human
ugcccagcacugugccagucac

SEQ ID NO: 536649 - RNA, 16 nt, Human
ucacauacuuccuugc

SEQ ID NO: 536650 - RNA, 22 nt, Human
uugaaacucaucuuagugaugu

SEQ ID NO: 536651 - RNA, 22 nt, Human
auuauuuuaugugcggccugau

SEQ ID NO: 536652 - RNA, 22 nt, Human
gcagagccaugggagguuuuug

SEQ ID NO: 536653 - RNA, 22 nt, Human
cagaccaucuugaagcaaacug

SEQ ID NO: 536654 - RNA, 22 nt, Human
gccaggcucucagugacugccc

SEQ ID NO: 536655 - RNA, 22 nt, Human
uggcagcuccggguaggggcug

SEQ ID NO: 536656 - RNA, 22 nt, Human
gccugggaagacuaagugggag

SEQ ID NO: 536657 - RNA, 22 nt, Human
cucuccagccaggggcuuccug

SEQ ID NO: 536658 - RNA, 22 nt, Human
aaaaggauguuuucaugaaaca

SEQ ID NO: 536659 - RNA, 22 nt, Human
ucuucauuccguagauauuuau

SEQ ID NO: 536660 - RNA, 22 nt, Human
augaggcaggagugcaguggca

SEQ ID NO: 536661 - RNA, 22 nt, Human
caugcuuucuguccaaauguua

SEQ ID NO: 536662 - RNA, 19 nt, Human
aauacaguguuauagaauu

SEQ ID NO: 536663 - RNA, 22 nt, Human
agcaaagcuuccauaaagcagc

SEQ ID NO: 536664 - RNA, 22 nt, Human
agggccuguccgcucccgcccg

SEQ ID NO: 536665 - RNA, 22 nt, Human
ccaggguggaggcuggauggag

SEQ ID NO: 536666 - RNA, 22 nt, Human
agccaccuucuccaaggccuag

SEQ ID NO: 536667 - RNA, 22 nt, Human
ucacagaaucucugauaagucu

SEQ ID NO: 536668 - RNA, 22 nt, Human
ucucagggcgcagugaggcagu

SEQ ID NO: 536669 - RNA, 22 nt, Human
gggcucuguccauuccuucaua

SEQ ID NO: 536670 - RNA, 22 nt, Human
aguuuucugccucuggaugcgu

SEQ ID NO: 536671 - RNA, 22 nt, Human
ugccugucuucaggagugucac

SEQ ID NO: 536672 - RNA, 22 nt, Human
uugcucugauuagguggaaaca

SEQ ID NO: 536673 - RNA, 22 nt, Human
ucagcacugauguuucagaaga

SEQ ID NO: 536674 - RNA, 21 nt, Human
ugccagcauguaggcuaguug

SEQ ID NO: 536675 - RNA, 22 nt, Human
caggcagaguuagugauuuagg

SEQ ID NO: 536676 - RNA, 22 nt, Human
gcaaagcaucaguagaaauguu

SEQ ID NO: 536677 - RNA, 22 nt, Human
gcucaggcuggauugcaguggc

SEQ ID NO: 536678 - RNA, 22 nt, Human
aaggcaguaggaucuuccacag

SEQ ID NO: 536679 - RNA, 22 nt, Human
cacugaaauauuaauaucuuau

SEQ ID NO: 536680 - RNA, 22 nt, Human
cugaaguggacaaauggagugg

SEQ ID NO: 536681 - RNA, 22 nt, Human
aaauaagaggacagauguuugg

SEQ ID NO: 536682 - RNA, 22 nt, Human
aguuggugggugugagcuggac

SEQ ID NO: 536683 - RNA, 22 nt, Human
cugcuguguuucacaccucugg

SEQ ID NO: 536684 - RNA, 22 nt, Human
cuggacagaaaaggccacugga

SEQ ID NO: 536685 - RNA, 22 nt, Human
cagcaucuuucucuucuggagu

SEQ ID NO: 536686 - RNA, 22 nt, Human
ccaggacucaguggggaaaggg

SEQ ID NO: 536687 - RNA, 22 nt, Human
ugcaggcuguaaucugaggcua

SEQ ID NO: 536688 - RNA, 22 nt, Human
gcuggcagguaaagccccgggg

SEQ ID NO: 536689 - RNA, 19 nt, Human
ggcuccuguggcugcagcc

SEQ ID NO: 536690 - RNA, 22 nt, Human
agggaagggcagggucuaugca

SEQ ID NO: 536691 - RNA, 22 nt, Human
cucgggcuugaggcuguuuacc

SEQ ID NO: 536692 - RNA, 22 nt, Human
uccaagcuuuccaugcccucac

SEQ ID NO: 536693 - RNA, 18 nt, Human
gaaaggagagacaguagg

SEQ ID NO: 536694 - RNA, 22 nt, Human
ugggaauggaugcuaagugcua

SEQ ID NO: 536695 - RNA, 22 nt, Human
cuggccugcugggugagguccu

SEQ ID NO: 536696 - RNA, 22 nt, Human
acagcacaggaguugaaugggc

SEQ ID NO: 536697 - RNA, 22 nt, Human
uauguguacaucugguugagca

SEQ ID NO: 536698 - RNA, 22 nt, Human
gacacauagaucuaucucacuc

SEQ ID NO: 536699 - RNA, 23 nt, Human
auuucccauugugucagcagagc

SEQ ID NO: 536700 - RNA, 18 nt, Human
aaugaaauguacaccuuu

SEQ ID NO: 536701 - RNA, 22 nt, Human
uggacuggaaugcugauccucu

SEQ ID NO: 536702 - RNA, 22 nt, Human
gugccugcagcaauccauggca

SEQ ID NO: 536703 - RNA, 22 nt, Human
uugauuucuuacucuuccaagg

SEQ ID NO: 536704 - RNA, 22 nt, Human
ucccugcucagcucaccuggca

SEQ ID NO: 536705 - RNA, 22 nt, Human
cucaggauuuacuaauuucaag

SEQ ID NO: 536706 - RNA, 22 nt, Human
agggcccuaaggaaggcacaca

SEQ ID NO: 536707 - RNA, 22 nt, Human
aaauuauaggugccaccuugga

SEQ ID NO: 536708 - RNA, 22 nt, Human
ggaggccaaggagggcggauca

SEQ ID NO: 536709 - RNA, 22 nt, Human
aaaguuagguguggauuucuca

SEQ ID NO: 536710 - RNA, 22 nt, Human
ggcugagccaugggcacugcag

SEQ ID NO: 536711 - RNA, 22 nt, Human
aggagcagcuucugaaccaugu

SEQ ID NO: 536712 - RNA, 22 nt, Human
ugcccucagcagcagcuccugc

SEQ ID NO: 536713 - RNA, 22 nt, Human
agugaaauccuggucaacaggu

SEQ ID NO: 536714 - RNA, 18 nt, Human
uccagagagggagaagug

SEQ ID NO: 536715 - RNA, 22 nt, Human
ugaggcaggacauggacaacug

SEQ ID NO: 536716 - RNA, 22 nt, Human
guuugcauaucugugaaaugga

SEQ ID NO: 536717 - RNA, 22 nt, Human
cuggugguucaggagaauggcu

SEQ ID NO: 536718 - RNA, 22 nt, Human
ugcuuuauuaagagagaaauuu

SEQ ID NO: 536719 - RNA, 22 nt, Human
uccagccaccaccuugauugcc

SEQ ID NO: 536720 - RNA, 22 nt, Human
gcagagccugacgggauuuuuc

SEQ ID NO: 536721 - RNA, 22 nt, Human
ccucaggggcuuuucguuguug

SEQ ID NO: 536722 - RNA, 22 nt, Human
gagggagggacuagcauucucu

SEQ ID NO: 536723 - RNA, 22 nt, Human
ggugacuggagggacccaggcc

SEQ ID NO: 536724 - RNA, 20 nt, Human
gaagccagaggggaaaggag

SEQ ID NO: 536725 - RNA, 22 nt, Human
ccagcacugcucucagacugag

SEQ ID NO: 536726 - RNA, 22 nt, Human
gggcugcuuuuaagggucucag

SEQ ID NO: 536727 - RNA, 22 nt, Human
caugcacauguggcuauguaau

SEQ ID NO: 536728 - RNA, 22 nt, Human
cccuggagcugcuugcauguug

SEQ ID NO: 536729 - RNA, 22 nt, Human
ccaggaggggucucugucuccc

SEQ ID NO: 536730 - RNA, 20 nt, Human
uuuacauuuugaaacaguga

SEQ ID NO: 536731 - RNA, 19 nt, Human
gcugucugaugcugagguc

SEQ ID NO: 536732 - RNA, 22 nt, Human
ugagagugccuuguaaaccugc

SEQ ID NO: 536733 - RNA, 22 nt, Human
caggguggcccuguggucucau

SEQ ID NO: 536734 - RNA, 22 nt, Human
cugugacaguuucucagaauuu

SEQ ID NO: 536735 - RNA, 22 nt, Human
cauggaaggcaaaagacacaga

SEQ ID NO: 536736 - RNA, 22 nt, Human
acugugcaucuauugccauuua

SEQ ID NO: 536737 - RNA, 18 nt, Human
ggguccuguucuuggaag

SEQ ID NO: 536738 - RNA, 22 nt, Human
aacugaaaguuucaccugaggu

SEQ ID NO: 536739 - RNA, 22 nt, Human
cggcagggcuccaugcauuucu

SEQ ID NO: 536740 - RNA, 22 nt, Human
cgggcagaucacacagggcuug

SEQ ID NO: 536741 - RNA, 22 nt, Human
gaaaggagugaauauuugugac

SEQ ID NO: 536742 - RNA, 22 nt, Human
auggccuggccagagcucugcu

SEQ ID NO: 536743 - RNA, 22 nt, Human
agccaggaauuggacaacacau

SEQ ID NO: 536744 - RNA, 22 nt, Human
ugugcucugcaaucaguucuuu

SEQ ID NO: 536745 - RNA, 22 nt, Human
uguggggaucuucuagcuuuuc

SEQ ID NO: 536746 - RNA, 22 nt, Human
uuccauaaucaccuuauucuuu

SEQ ID NO: 536747 - RNA, 22 nt, Human
gcauuccuacaggcugcuauga

SEQ ID NO: 536748 - RNA, 22 nt, Human
ccagggaggguccuguggcuuc

SEQ ID NO: 536749 - RNA, 17 nt, Human
ugcaggcuguuauagcc

SEQ ID NO: 536750 - RNA, 20 nt, Human
ggaagccagggugcagggga

SEQ ID NO: 536751 - RNA, 22 nt, Human
uauuacauccacuuuuauugca

SEQ ID NO: 536752 - RNA, 22 nt, Human
gcauccagagguagccacugug

SEQ ID NO: 536753 - RNA, 22 nt, Human
cugcccucuagaggaggacuga

SEQ ID NO: 536754 - RNA, 22 nt, Human
uggcccugacugauguggaggg

SEQ ID NO: 536755 - RNA, 22 nt, Human
uucuugcucaaugucuguuuaa

SEQ ID NO: 536756 - RNA, 22 nt, Human
ccugucaggguuugccucagaa

SEQ ID NO: 536757 - RNA, 22 nt, Human
ugaccugggcauuacaggugca

SEQ ID NO: 536758 - RNA, 22 nt, Human
acuuguucauugaguacauaug

SEQ ID NO: 536759 - RNA, 22 nt, Human
aaguggagagcccuggaggucu

SEQ ID NO: 536760 - RNA, 22 nt, Human
acaaagcacgagugccauggac

SEQ ID NO: 536761 - RNA, 22 nt, Human
ucaaauaguugacauuaacuug

SEQ ID NO: 536762 - RNA, 22 nt, Human
agaggagguggugaugcuuuaa

SEQ ID NO: 536763 - RNA, 22 nt, Human
ccugugaggucaucugugguaa

SEQ ID NO: 536764 - RNA, 22 nt, Human
augcuauacauaugacaucaca

SEQ ID NO: 536765 - RNA, 22 nt, Human
agggcuccugaggcccuucugg

SEQ ID NO: 536766 - RNA, 22 nt, Human
uucucuacuugagauuuuaaug

SEQ ID NO: 536767 - RNA, 22 nt, Human
cuggaggcacccuuagagaggc

SEQ ID NO: 536768 - RNA, 20 nt, Human
gcucugggagggaugugaug

SEQ ID NO: 536769 - RNA, 22 nt, Human
cugccuggaccggcagcccucc

SEQ ID NO: 536770 - RNA, 22 nt, Human
ucaagaauagcugcaaacaggg

SEQ ID NO: 536771 - RNA, 22 nt, Human
uguaguaagugcgcaauaaaua

SEQ ID NO: 536772 - RNA, 22 nt, Human
gcugcuggcaucuagggggugg

SEQ ID NO: 536773 - RNA, 22 nt, Human
acacuuuuguuugaagucucca

SEQ ID NO: 536774 - RNA, 22 nt, Human
auuuccuaggguagaugucaca

SEQ ID NO: 536775 - RNA, 22 nt, Human
gagggaguaacguacuacagug

SEQ ID NO: 536776 - RNA, 22 nt, Human
ucccagagaaagucaaggucuu

SEQ ID NO: 536777 - RNA, 22 nt, Human
uguauacauuuaacuagauaga

SEQ ID NO: 536778 - RNA, 21 nt, Human
cagagcuguccaaacccugac

SEQ ID NO: 536779 - RNA, 22 nt, Human
aguaugaaucuuucagaccgua

SEQ ID NO: 536780 - RNA, 19 nt, Human
aucugaaguaggugcagcu

SEQ ID NO: 536781 - RNA, 22 nt, Human
gcuggguggaucggaggcucug

SEQ ID NO: 536782 - RNA, 22 nt, Human
cuuauguauauuuggaacguac

SEQ ID NO: 536783 - RNA, 22 nt, Human
guuccauaucacagcagacgaa

SEQ ID NO: 536784 - RNA, 22 nt, Human
aagagcauauuaauaguggaga

SEQ ID NO: 536785 - RNA, 22 nt, Human
agaggggaaggaugugauguga

SEQ ID NO: 536786 - RNA, 22 nt, Human
ggcuucagaagacuggacaggu

SEQ ID NO: 536787 - RNA, 22 nt, Human
aguguuuaaacugaagugauga

SEQ ID NO: 536788 - RNA, 22 nt, Human
acuuucaagcaagaacacuuug

SEQ ID NO: 536789 - RNA, 22 nt, Human
acauuuaaccaaacuguuuaau

SEQ ID NO: 536790 - RNA, 22 nt, Human
gaggccaggagugcuguaaguu

SEQ ID NO: 536791 - RNA, 20 nt, Human
ugcagggcugccucccagcu

SEQ ID NO: 536792 - RNA, 22 nt, Human
ucagacagauuuugacacuugc

SEQ ID NO: 536793 - RNA, 19 nt, Human
acauuuaaauucagaucuc

SEQ ID NO: 536794 - RNA, 22 nt, Human
cuggcuccuccaaggccuggag

SEQ ID NO: 536795 - RNA, 22 nt, Human
ccuggccucagacagagggugg

SEQ ID NO: 536796 - RNA, 22 nt, Human
gccucugcgccucagccgaccu

SEQ ID NO: 536797 - RNA, 22 nt, Human
auuaaauuaaguggcuaauuua

SEQ ID NO: 536798 - RNA, 22 nt, Human
gcacuagguaaguggguggcaa

SEQ ID NO: 536799 - RNA, 22 nt, Human
ugucuuuuaccuaaugagcugg

SEQ ID NO: 536800 - RNA, 22 nt, Human
ucaggcugcagcugucagcagc

SEQ ID NO: 536801 - RNA, 22 nt, Human
aguucaaaaagguaaaguuuau

SEQ ID NO: 536802 - RNA, 22 nt, Human
ucaguuuauagauauugcugau

SEQ ID NO: 536803 - RNA, 23 nt, Human
acaguuauagcugugaauaacau

SEQ ID NO: 536804 - RNA, 22 nt, Human
ugcuccagcgcugccaccaguu

SEQ ID NO: 536805 - RNA, 22 nt, Human
uaaaggcaugcaggugaaugua

SEQ ID NO: 536806 - RNA, 22 nt, Human
uggccaggaggcugcuucugac

SEQ ID NO: 536807 - RNA, 22 nt, Human
auugcaaaggucccauucaaga

SEQ ID NO: 536808 - RNA, 22 nt, Human
guggcauucucggcaccaucug

SEQ ID NO: 536809 - RNA, 22 nt, Human
guuuuuaucuaauagcaguuau

SEQ ID NO: 536810 - RNA, 22 nt, Human
gagaagaaauagaaucacauuu

SEQ ID NO: 536811 - RNA, 22 nt, Human
cauguaaaacacucagaacagu

SEQ ID NO: 536812 - RNA, 22 nt, Human
gaggaagaugguugaguggucc

SEQ ID NO: 536813 - RNA, 22 nt, Human
ugacagggugauuaugagagcu

SEQ ID NO: 536814 - RNA, 22 nt, Human
aaaugcugcagcuaguguguuu

SEQ ID NO: 536815 - RNA, 22 nt, Human
cacaugcauaaggauaauuacu

SEQ ID NO: 536816 - RNA, 22 nt, Human
cgugaaaugaguugaauuauug

SEQ ID NO: 536817 - RNA, 22 nt, Human
acagcaaaugguuuucugucug

SEQ ID NO: 536818 - RNA, 21 nt, Human
guagggacagagaguugguga

SEQ ID NO: 536819 - RNA, 22 nt, Human
ccuggcuguggcggugcucuca

SEQ ID NO: 536820 - RNA, 22 nt, Human
cugccagcucgccacaaugaca

SEQ ID NO: 536821 - RNA, 22 nt, Human
aagagcuguugucugcuuacug

SEQ ID NO: 536822 - RNA, 22 nt, Human
cagaaggcauagaugaaggccu

SEQ ID NO: 536823 - RNA, 22 nt, Human
uuucacauucuucugaaucuac

SEQ ID NO: 536824 - RNA, 22 nt, Human
aggucccagucugugaugacuc

SEQ ID NO: 536825 - RNA, 22 nt, Human
aaaggccagguuggcugguauu

SEQ ID NO: 536826 - RNA, 20 nt, Human
agaaaucagcauguccucug

SEQ ID NO: 536827 - RNA, 22 nt, Human
gugcaugugcauccauguguac

SEQ ID NO: 536828 - RNA, 22 nt, Human
aguggugucgugggaguggaag

SEQ ID NO: 536829 - RNA, 22 nt, Human
uuugggcucacuaugcugaaga

SEQ ID NO: 536830 - RNA, 22 nt, Human
gcugucuugaugauuggaugcu

SEQ ID NO: 536831 - RNA, 22 nt, Human
uggaagagaaaauccacccuua

SEQ ID NO: 536832 - RNA, 19 nt, Human
aauucuguuucagcagauc

SEQ ID NO: 536833 - RNA, 22 nt, Human
agcucuuuugugagcauuuggc

SEQ ID NO: 536834 - RNA, 22 nt, Human
gucccugggaugcccuucuggg

SEQ ID NO: 536835 - RNA, 18 nt, Human
caaagcucacguuccauc

SEQ ID NO: 536836 - RNA, 22 nt, Human
cauuguaagaggcuuugcagca

SEQ ID NO: 536837 - RNA, 22 nt, Human
cucaggggaccuggcuccgagu

SEQ ID NO: 536838 - RNA, 22 nt, Human
ccuggcugugugaccuuggcaa

SEQ ID NO: 536839 - RNA, 22 nt, Human
auauuuguuuggcagaguucag

SEQ ID NO: 536840 - RNA, 22 nt, Human
ucucaguguuguucugcagaug

SEQ ID NO: 536841 - RNA, 22 nt, Human
ggcugccuucagacuccagcuu

SEQ ID NO: 536842 - RNA, 22 nt, Human
uacaaacuuguuuuaaguaagu

SEQ ID NO: 536843 - RNA, 22 nt, Human
cagaggacaauagaauggaaag

SEQ ID NO: 536844 - RNA, 21 nt, Human
ccugagccuguuuauccagaa

SEQ ID NO: 536845 - RNA, 22 nt, Human
agaaagccucaaucuucaggcc

SEQ ID NO: 536846 - RNA, 22 nt, Human
aaagaugaucuacaaguucauu

SEQ ID NO: 536847 - RNA, 22 nt, Human
gagcagcuccagccgcaugacu

SEQ ID NO: 536848 - RNA, 22 nt, Human
ugcuauaagaauuauauuacuc

SEQ ID NO: 536849 - RNA, 22 nt, Human
gugucucuaucuaugccugaag

SEQ ID NO: 536850 - RNA, 22 nt, Human
agagucaacaucgagccacugg

SEQ ID NO: 536851 - RNA, 22 nt, Human
gguucacacuaagcuuaagugg

SEQ ID NO: 536852 - RNA, 22 nt, Human
guguucuuuauuuagugaugcu

SEQ ID NO: 536853 - RNA, 22 nt, Human
auauucacacuguuuaguuaca

SEQ ID NO: 536854 - RNA, 22 nt, Human
ggcugcuguuucagagacuguu

SEQ ID NO: 536855 - RNA, 22 nt, Human
ugucugguggguugacaggcag

SEQ ID NO: 536856 - RNA, 22 nt, Human
ccugggaagcccauagcagcuu

SEQ ID NO: 536857 - RNA, 22 nt, Human
aguuuguaauaaugaaggaagu

SEQ ID NO: 536858 - RNA, 22 nt, Human
cuggcucccguuguccuugaag

SEQ ID NO: 536859 - RNA, 16 nt, Human
ggggaaggcaagaggg

SEQ ID NO: 536860 - RNA, 22 nt, Human
uacaguaaccuuauuugucauu

SEQ ID NO: 536861 - RNA, 22 nt, Human
uuucacaguuagcaugaggacu

SEQ ID NO: 536862 - RNA, 22 nt, Human
ucugggcugaaaugaaggccuu

SEQ ID NO: 536863 - RNA, 22 nt, Human
ucugggguuggugcuuacacca

SEQ ID NO: 536864 - RNA, 22 nt, Human
gaagcagccacggggagacaga

SEQ ID NO: 536865 - RNA, 22 nt, Human
accagugggaaguggaaaauga

SEQ ID NO: 536866 - RNA, 22 nt, Human
ccacuguaaguuugaaaauaac

SEQ ID NO: 536867 - RNA, 22 nt, Human
ugggucagaaucagagaguugc

SEQ ID NO: 536868 - RNA, 22 nt, Human
ucacuuauaaaaugcaagaucu

SEQ ID NO: 536869 - RNA, 22 nt, Human
cuuccaaauguaaauaaguuuc

SEQ ID NO: 536870 - RNA, 22 nt, Human
caaaugcuggcccugcuacuua

SEQ ID NO: 536871 - RNA, 22 nt, Human
caggccucuuccaugcagcagc

SEQ ID NO: 536872 - RNA, 20 nt, Human
aggaggaagaaagcacacug

SEQ ID NO: 536873 - RNA, 22 nt, Human
aggugcaguggcucaugccugu

SEQ ID NO: 536874 - RNA, 22 nt, Human
accuuaaaugugacauagucua

SEQ ID NO: 536875 - RNA, 22 nt, Human
cacagugauugauuuuuacuuu

SEQ ID NO: 536876 - RNA, 22 nt, Human
cugggcaggauacuucauggga

SEQ ID NO: 536877 - RNA, 20 nt, Human
acaauauguagaugaauagc

SEQ ID NO: 536878 - RNA, 22 nt, Human
ugcagaagaaaacagcugugug

SEQ ID NO: 536879 - RNA, 22 nt, Human
acuguucacccagcacuagcag

SEQ ID NO: 536880 - RNA, 22 nt, Human
cuacugaguccuucagcugcca

SEQ ID NO: 536881 - RNA, 22 nt, Human
cacuauuuucucuucagauggc

SEQ ID NO: 536882 - RNA, 22 nt, Human
uuuaugcagccucaguaucaga

SEQ ID NO: 536883 - RNA, 22 nt, Human
cagaggggcugacacccuuggc

SEQ ID NO: 536884 - RNA, 22 nt, Human
gggaccugccauugcucacagg

SEQ ID NO: 536885 - RNA, 22 nt, Human
gacuauuuugcacaaaacaauu

SEQ ID NO: 536886 - RNA, 22 nt, Human
accaaggaagagauucucaguu

SEQ ID NO: 536887 - RNA, 22 nt, Human
gcucuguaugagggugagagau

SEQ ID NO: 536888 - RNA, 23 nt, Human
cccagagucaucuguagcugugg

SEQ ID NO: 536889 - RNA, 22 nt, Human
ugcucagccgugagcagagccg

SEQ ID NO: 536890 - RNA, 22 nt, Human
gugggaugguagguagguaaua

SEQ ID NO: 536891 - RNA, 22 nt, Human
acagugauaaaauuucacaugu

SEQ ID NO: 536892 - RNA, 18 nt, Human
aaauguacuguccauggc

SEQ ID NO: 536893 - RNA, 22 nt, Human
acuuuuuuauaaggaagaagau

SEQ ID NO: 536894 - RNA, 22 nt, Human
agauuucugucaccuucuaugc

SEQ ID NO: 536895 - RNA, 22 nt, Human
ggcuccaaagggcagugugagg

SEQ ID NO: 536896 - RNA, 22 nt, Human
ugccaggcccugcgggguccca

SEQ ID NO: 536897 - RNA, 22 nt, Human
augaaggcaguuaaacgucauc

SEQ ID NO: 536898 - RNA, 22 nt, Human
cugggcagugcagcuauagaac

SEQ ID NO: 536899 - RNA, 22 nt, Human
ucuggccaggauggcaagacca

SEQ ID NO: 536900 - RNA, 22 nt, Human
agagugauucuaguuagggaau

SEQ ID NO: 536901 - RNA, 22 nt, Human
cuuuuccuauugauucuguuac

SEQ ID NO: 536902 - RNA, 22 nt, Human
agcagguggccuccugucuguc

SEQ ID NO: 536903 - RNA, 22 nt, Human
gugccuuccccgguggucuguu

SEQ ID NO: 536904 - RNA, 22 nt, Human
aauacuuuccuauauaaggugc

SEQ ID NO: 536905 - RNA, 22 nt, Human
gagucugaugucccccaggcca

SEQ ID NO: 536906 - RNA, 22 nt, Human
cuguaaaaugaaccuagucauc

SEQ ID NO: 536907 - RNA, 22 nt, Human
cacugaagccacuggaagagga

SEQ ID NO: 536908 - RNA, 23 nt, Human
gggcagguuuuuauaggcuucag

SEQ ID NO: 536909 - RNA, 21 nt, Human
ccuccaggugauuccgugcuc

SEQ ID NO: 536910 - RNA, 21 nt, Human
gcucccugcucagcuccuggg

SEQ ID NO: 536911 - RNA, 22 nt, Human
ccugggcaauauagugaggccc

SEQ ID NO: 536912 - RNA, 22 nt, Human
caagagcuggguggcaagcuag

SEQ ID NO: 536913 - RNA, 22 nt, Human
acuggcugcgggguggaagaag

SEQ ID NO: 536914 - RNA, 22 nt, Human
ucuucaaauccuacagugucug

SEQ ID NO: 536915 - RNA, 22 nt, Human
ucugggagaagcugaugugaag

SEQ ID NO: 536916 - RNA, 22 nt, Human
gcuggccugcgagggcaggcug

SEQ ID NO: 536917 - RNA, 22 nt, Human
agcaaagcugauuaagagcaca

SEQ ID NO: 536918 - RNA, 22 nt, Human
guacacacuauguauuguacac

SEQ ID NO: 536919 - RNA, 22 nt, Human
ugcaggcugugucauuuaguga

SEQ ID NO: 536920 - RNA, 22 nt, Human
gaaggccauuagagccugugcc

SEQ ID NO: 536921 - RNA, 19 nt, Human
uuuguaaguccuuacugau

SEQ ID NO: 536922 - RNA, 22 nt, Human
cugggcuguucugccccugggu

SEQ ID NO: 536923 - RNA, 22 nt, Human
guuauaaaugacugcaaaaguu

SEQ ID NO: 536924 - RNA, 22 nt, Human
aguucugguuaaccugcaaccu

SEQ ID NO: 536925 - RNA, 22 nt, Human
guuaaagaguuuggcuuucuuc

SEQ ID NO: 536926 - RNA, 22 nt, Human
aaagccuucaaguagauguaag

SEQ ID NO: 536927 - RNA, 22 nt, Human
gccuccugcccagaugagugau

SEQ ID NO: 536928 - RNA, 22 nt, Human
gugcuuaaggcagucugucaaa

SEQ ID NO: 536929 - RNA, 20 nt, Human
gauuucaaagcagaguggcc

SEQ ID NO: 536930 - RNA, 22 nt, Human
uucuuuuuaaaguguguaugca

SEQ ID NO: 536931 - RNA, 22 nt, Human
uggacccugaagcaacagggag

SEQ ID NO: 536932 - RNA, 22 nt, Human
guggauggauuuugaggaaugg

SEQ ID NO: 536933 - RNA, 22 nt, Human
uuauuguuuacuaguuugcaga

SEQ ID NO: 536934 - RNA, 22 nt, Human
guuauguaaucuaacacucagu

SEQ ID NO: 536935 - RNA, 22 nt, Human
aggcuuaacuuaacuuuagagc

SEQ ID NO: 536936 - RNA, 22 nt, Human
ggcagagcuugcagugagccga

SEQ ID NO: 536937 - RNA, 22 nt, Human
gccuaggaguacagaaugguuu

SEQ ID NO: 536938 - RNA, 22 nt, Human
cuauucaauuuugcuauuguag

SEQ ID NO: 536939 - RNA, 22 nt, Human
cacacauugaauucauucuugu

SEQ ID NO: 536940 - RNA, 22 nt, Human
uccaggccaggguaagaggaga

SEQ ID NO: 536941 - RNA, 22 nt, Human
gccugccacgcaugcagaguca

SEQ ID NO: 536942 - RNA, 22 nt, Human
ugaccaaagacuuuagauguuc

SEQ ID NO: 536943 - RNA, 22 nt, Human
agugaucuuuuaaaaagaagug

SEQ ID NO: 536944 - RNA, 22 nt, Human
augaaugaugccaguugaaaug

SEQ ID NO: 536945 - RNA, 22 nt, Human
ucagagcccugcuccuccccaa

SEQ ID NO: 536946 - RNA, 22 nt, Human
ugccuugguucucuacuuggag

SEQ ID NO: 536947 - RNA, 22 nt, Human
cugggcugcaucaaagaggcau

SEQ ID NO: 536948 - RNA, 22 nt, Human
gcugcugggguggagaaacgcu

SEQ ID NO: 536949 - RNA, 22 nt, Human
ugaccaaaaaauucccugugag

SEQ ID NO: 536950 - RNA, 22 nt, Human
cuguaugaguugggaauagaau

SEQ ID NO: 536951 - RNA, 22 nt, Human
aaaaccaggcguuuccuauuau

SEQ ID NO: 536952 - RNA, 18 nt, Human
cagagcagagguggagcg

SEQ ID NO: 536953 - RNA, 20 nt, Human
ucuguaaagacuccagaagc

SEQ ID NO: 536954 - RNA, 22 nt, Human
acacugaauaauugagaguuga

SEQ ID NO: 536955 - RNA, 22 nt, Human
uugcauugggagugaggagacc

SEQ ID NO: 536956 - RNA, 20 nt, Human
cagcaggaaaagugccucag

SEQ ID NO: 536957 - RNA, 22 nt, Human
auuuuguuuccuuuggaguaga

SEQ ID NO: 536958 - RNA, 22 nt, Human
agaagcaguuauuuuuugcaca

SEQ ID NO: 536959 - RNA, 22 nt, Human
uggcugaguaaguugugauaug

SEQ ID NO: 536960 - RNA, 22 nt, Human
uguggcagucucacuggagggc

SEQ ID NO: 536961 - RNA, 22 nt, Human
cuucaguuuaucccaucaucca

SEQ ID NO: 536962 - RNA, 22 nt, Human
auuucuuccauugccucuucaa

SEQ ID NO: 536963 - RNA, 22 nt, Human
uacauguauguguuaauaucug

SEQ ID NO: 536964 - RNA, 22 nt, Human
ggcugccaggagaagcucagug

SEQ ID NO: 536965 - RNA, 22 nt, Human
aagaugguaaggcagcuggcag

SEQ ID NO: 536966 - RNA, 22 nt, Human
gguggcucagugucaggcccug

SEQ ID NO: 536967 - RNA, 22 nt, Human
uagcagaguagugccuccagau

SEQ ID NO: 536968 - RNA, 22 nt, Human
cuuaaaguagaauacaagaccu

SEQ ID NO: 536969 - RNA, 22 nt, Human
ugcugccuaacagaacucuuuc

SEQ ID NO: 536970 - RNA, 22 nt, Human
uucugaaaggcagguuguuugc

SEQ ID NO: 536971 - RNA, 22 nt, Human
acugccaaugguaguuugaugg

SEQ ID NO: 536972 - RNA, 22 nt, Human
ugaaccaggaggcagccagcac

SEQ ID NO: 536973 - RNA, 22 nt, Human
gugguaauuuaauccuacacug

SEQ ID NO: 536974 - RNA, 22 nt, Human
gccuguccuggaugcucugcaa

SEQ ID NO: 536975 - RNA, 22 nt, Human
caguuucuuagugacacaaauc

SEQ ID NO: 536976 - RNA, 22 nt, Human
caaugucagaauuacaguugau

SEQ ID NO: 536977 - RNA, 22 nt, Human
ggcaaaaaccacaauuacuuuu

SEQ ID NO: 536978 - RNA, 21 nt, Human
agcugagcccagaagacuggu

SEQ ID NO: 536979 - RNA, 22 nt, Human
acagaauagagacugccugcuc

SEQ ID NO: 536980 - RNA, 19 nt, Human
aauauuuuagccucuuccu

SEQ ID NO: 536981 - RNA, 22 nt, Human
ucaaaugcucuuugcagagagg

SEQ ID NO: 536982 - RNA, 22 nt, Human
ucaaauaccagcaauuucaugu

SEQ ID NO: 536983 - RNA, 19 nt, Human
cuggggcuuugguacugcc

SEQ ID NO: 536984 - RNA, 22 nt, Human
aagauuucugcuuuuggaggca

SEQ ID NO: 536985 - RNA, 22 nt, Human
ucucugggaaugggccugggua

SEQ ID NO: 536986 - RNA, 22 nt, Human
uuugacaaaauuaugcuaauau

SEQ ID NO: 536987 - RNA, 19 nt, Human
gggcagaauggcaucucag

SEQ ID NO: 536988 - RNA, 22 nt, Human
auugaaagauuuugggcucaug

SEQ ID NO: 536989 - RNA, 20 nt, Human
gcucccugguagaaauguuu

SEQ ID NO: 536990 - RNA, 22 nt, Human
uacuacauuaauaaaacauuca

SEQ ID NO: 536991 - RNA, 22 nt, Human
uuaaugaauaugacaggagagg

SEQ ID NO: 536992 - RNA, 20 nt, Human
acugcuucuuucucugaccu

SEQ ID NO: 536993 - RNA, 22 nt, Human
ugcugcaggaauucucaaggga

SEQ ID NO: 536994 - RNA, 22 nt, Human
agugcagguuaaggaacuggcc

SEQ ID NO: 536995 - RNA, 18 nt, Human
ggagagugacagagucgu

SEQ ID NO: 536996 - RNA, 22 nt, Human
augauacaagcaaaacuaauca

SEQ ID NO: 536997 - RNA, 22 nt, Human
cugugaaaugcuuugcgauggu

SEQ ID NO: 536998 - RNA, 22 nt, Human
uggcagcuugaaugcagucuuu

SEQ ID NO: 536999 - RNA, 22 nt, Human
gcccaggcuggagugcaguagc

SEQ ID NO: 537000 - RNA, 23 nt, Human
aucaagauaauccagaugaccua

SEQ ID NO: 537001 - RNA, 23 nt, Human
uggcauuuuaguuagcuucagug

SEQ ID NO: 537002 - RNA, 22 nt, Human
agaaaucacuuaaugaacguag

SEQ ID NO: 537003 - RNA, 19 nt, Human
cugaggcccauguaccaug

SEQ ID NO: 537004 - RNA, 22 nt, Human
cuggagggugagccucaucucu

SEQ ID NO: 537005 - RNA, 22 nt, Human
ggccugugagcccuugcaugua

SEQ ID NO: 537006 - RNA, 22 nt, Human
ucugcagaaguggcugggccac

SEQ ID NO: 537007 - RNA, 22 nt, Human
gagagcccugcuccuaucccag

SEQ ID NO: 537008 - RNA, 22 nt, Human
gcauccaaauguuucauuucuu

SEQ ID NO: 537009 - RNA, 18 nt, Human
aacaugcauuagaacugc

SEQ ID NO: 537010 - RNA, 22 nt, Human
acuauacaccaaaauauuaagg

SEQ ID NO: 537011 - RNA, 23 nt, Human
caugggagugagaaugccagcuc

SEQ ID NO: 537012 - RNA, 22 nt, Human
gagcuagaguuuguaggguaga

SEQ ID NO: 537013 - RNA, 22 nt, Human
gaugaaaaucuugagaugucga

SEQ ID NO: 537014 - RNA, 17 nt, Human
gaagaaggaaucuagaa

SEQ ID NO: 537015 - RNA, 22 nt, Human
ggaggagacaguaaaaagcacg

SEQ ID NO: 537016 - RNA, 22 nt, Human
gugggcuuuggccucuuucucc

SEQ ID NO: 537017 - RNA, 22 nt, Human
aggcacugacaauucuggacug

SEQ ID NO: 537018 - RNA, 22 nt, Human
cugggccacaagccugugugau

SEQ ID NO: 537019 - RNA, 22 nt, Human
auuugucaacaggcauuuaggu

SEQ ID NO: 537020 - RNA, 22 nt, Human
ucacaggguaucugggauggau

SEQ ID NO: 537021 - RNA, 22 nt, Human
cagcuuugauucuuucugccau

SEQ ID NO: 537022 - RNA, 20 nt, Human
cagcucugggaaagaggcca

SEQ ID NO: 537023 - RNA, 22 nt, Human
gugcugaguagaaugaaugccu

SEQ ID NO: 537024 - RNA, 22 nt, Human
ucuucacagaugcauauacuuc

SEQ ID NO: 537025 - RNA, 20 nt, Human
uggaccugucucuuuaggga

SEQ ID NO: 537026 - RNA, 22 nt, Human
ucaggugguccuaagugccauc

SEQ ID NO: 537027 - RNA, 22 nt, Human
gcuccuggguguggcugccccu

SEQ ID NO: 537028 - RNA, 22 nt, Human
uaagaaacaugauuaauggcag

SEQ ID NO: 537029 - RNA, 22 nt, Human
ggcaggguguggaguugggaca

SEQ ID NO: 537030 - RNA, 22 nt, Human
agccuccuggaguuucugggau

SEQ ID NO: 537031 - RNA, 22 nt, Human
uuucuggaaacggguucaagcu

SEQ ID NO: 537032 - RNA, 22 nt, Human
uuccagaacaauguggacguau

SEQ ID NO: 537033 - RNA, 20 nt, Human
cagcaaaaugaaaauggauu

SEQ ID NO: 537034 - RNA, 22 nt, Human
uccugcaguuacaucccagcca

SEQ ID NO: 537035 - RNA, 22 nt, Human
ccauuguaguaucuguuuuagu

SEQ ID NO: 537036 - RNA, 22 nt, Human
ccuccuggugggcgcuucuggc

SEQ ID NO: 537037 - RNA, 22 nt, Human
auguuucaugacugagcaaaau

SEQ ID NO: 537038 - RNA, 22 nt, Human
acuguucacagauuagucgaug

SEQ ID NO: 537039 - RNA, 22 nt, Human
ucuauaaaacucaagagcaauu

SEQ ID NO: 537040 - RNA, 22 nt, Human
uaagucauagauuaauggccac

SEQ ID NO: 537041 - RNA, 22 nt, Human
ugaugggacugccagcugcuga

SEQ ID NO: 537042 - RNA, 22 nt, Human
uguuucaacuguuaagauaugc

SEQ ID NO: 537043 - RNA, 22 nt, Human
ccuggagauuauuugguccaau

SEQ ID NO: 537044 - RNA, 22 nt, Human
gguuugcacgauauuuccaugg

SEQ ID NO: 537045 - RNA, 22 nt, Human
ucauugcaguugaguuguguua

SEQ ID NO: 537046 - RNA, 22 nt, Human
ucuguaucacccguucccagaa

SEQ ID NO: 537047 - RNA, 22 nt, Human
acagggcagcaacuuugugccu

SEQ ID NO: 537048 - RNA, 22 nt, Human
aagcgccaugguuccugcgcag

SEQ ID NO: 537049 - RNA, 22 nt, Human
cuacaaaaguaauugugguuuu

SEQ ID NO: 537050 - RNA, 23 nt, Human
ugcuccagccucuuugauagugu

SEQ ID NO: 537051 - RNA, 22 nt, Human
ugaggccagucucaucacaggc

SEQ ID NO: 537052 - RNA, 22 nt, Human
auuauuauaaagugcaugaccu

SEQ ID NO: 537053 - RNA, 20 nt, Human
ugcucaggauggagaggugu

SEQ ID NO: 537054 - RNA, 22 nt, Human
aguggagguuauugaguuaagg

SEQ ID NO: 537055 - RNA, 22 nt, Human
auuuucaugacuaccuuaaaua

SEQ ID NO: 537056 - RNA, 22 nt, Human
aauacuugugaauucaaagucu

SEQ ID NO: 537057 - RNA, 22 nt, Human
uccuucagauuccugcuucugg

SEQ ID NO: 537058 - RNA, 22 nt, Human
cagcuguugacugguacaugaa

SEQ ID NO: 537059 - RNA, 21 nt, Human
agcugggccucagccugcagu

SEQ ID NO: 537060 - RNA, 22 nt, Human
gcagcaaucuucacagugucau

SEQ ID NO: 537061 - RNA, 22 nt, Human
agaggccagcagugccuaucug

SEQ ID NO: 537062 - RNA, 22 nt, Human
ggcagccaugucccagggcuuc

SEQ ID NO: 537063 - RNA, 21 nt, Human
ggcacagccugaaaugccuca

SEQ ID NO: 537064 - RNA, 22 nt, Human
ucuuggccagguguggugccuc

SEQ ID NO: 537065 - RNA, 22 nt, Human
agugaggggcagcugagugggc

SEQ ID NO: 537066 - RNA, 22 nt, Human
uuccucaggcuucccuuugucc

SEQ ID NO: 537067 - RNA, 23 nt, Human
guggccuccccggaaugccucgc

SEQ ID NO: 537068 - RNA, 22 nt, Human
agaucagaaauguaauggcagu

SEQ ID NO: 537069 - RNA, 22 nt, Human
gggccacauugaagggugggua

SEQ ID NO: 537070 - RNA, 22 nt, Human
guuucauaauucaaucaaauga

SEQ ID NO: 537071 - RNA, 19 nt, Human
ccagcuggccugggaccuc

SEQ ID NO: 537072 - RNA, 22 nt, Human
uccuuuuuauaguuagagaaac

SEQ ID NO: 537073 - RNA, 19 nt, Human
cugcucaggucagucuguc

SEQ ID NO: 537074 - RNA, 22 nt, Human
agcugcccuggcggagcugcuc

SEQ ID NO: 537075 - RNA, 22 nt, Human
uucacaauagcuggcaucaucu

SEQ ID NO: 537076 - RNA, 22 nt, Human
acagcaggcacacaaggauaga

SEQ ID NO: 537077 - RNA, 22 nt, Human
aagaguuaagcaacagauacca

SEQ ID NO: 537078 - RNA, 21 nt, Human
aguuacauguauagauaaagu

SEQ ID NO: 537079 - RNA, 22 nt, Human
ccuguucaaugcccuggcuuca

SEQ ID NO: 537080 - RNA, 23 nt, Human
ucacagggcacuggcugggguug

SEQ ID NO: 537081 - RNA, 20 nt, Human
agucucuguagugccugaga

SEQ ID NO: 537082 - RNA, 20 nt, Human
uagaaaucuuauaaaagacu

SEQ ID NO: 537083 - RNA, 20 nt, Human
aauuuuaucuccauccuuug

SEQ ID NO: 537084 - RNA, 22 nt, Human
ucaggccuucagaccuggcccg

SEQ ID NO: 537085 - RNA, 23 nt, Human
ucaugcccaggcuccagauguca

SEQ ID NO: 537086 - RNA, 22 nt, Human
cagagugagggccugcaccugc

SEQ ID NO: 537087 - RNA, 22 nt, Human
ggcaggcuguucaccugcuuuu

SEQ ID NO: 537088 - RNA, 22 nt, Human
aaguacaaauuuugaagagcuu

SEQ ID NO: 537089 - RNA, 22 nt, Human
gcucuccacugaccacggggca

SEQ ID NO: 537090 - RNA, 22 nt, Human
uagcagcucacagccucccauu

SEQ ID NO: 537091 - RNA, 22 nt, Human
auguguacaaccaagcacuaaa

SEQ ID NO: 537092 - RNA, 22 nt, Human
uucuaagaggcuaaugaagaau

SEQ ID NO: 537093 - RNA, 21 nt, Human
uaucagaagagaaagaaugau

SEQ ID NO: 537094 - RNA, 22 nt, Human
uucuuaaguuuagcaacuugug

SEQ ID NO: 537095 - RNA, 22 nt, Human
cagcucagcuuccugggugugu

SEQ ID NO: 537096 - RNA, 20 nt, Human
ucucugcuguccacauuugc

SEQ ID NO: 537097 - RNA, 22 nt, Human
agccucuguagaaagcagugug

SEQ ID NO: 537098 - RNA, 22 nt, Human
ucagcaguguaguuuaucauuc

SEQ ID NO: 537099 - RNA, 22 nt, Human
gcaagaccuaucuaguugcugu

SEQ ID NO: 537100 - RNA, 19 nt, Human
ugagagugaggaaggcuuc

SEQ ID NO: 537101 - RNA, 22 nt, Human
ccuuuucuguuuccugucacug

SEQ ID NO: 537102 - RNA, 22 nt, Human
caagaugaaugaugaagugugu

SEQ ID NO: 537103 - RNA, 22 nt, Human
ugguccagaugccuuggcuuua

SEQ ID NO: 537104 - RNA, 22 nt, Human
agugggggcuggcucugucugu

SEQ ID NO: 537105 - RNA, 22 nt, Human
ugggaagggccgauggagccuc

SEQ ID NO: 537106 - RNA, 22 nt, Human
uggaaggaagccaaggaagguu

SEQ ID NO: 537107 - RNA, 22 nt, Human
aaacucuguagcuaaacauaau

SEQ ID NO: 537108 - RNA, 22 nt, Human
accugcagccacuucucuccuu

SEQ ID NO: 537109 - RNA, 22 nt, Human
ucccagcgcggggggaggaucc

SEQ ID NO: 537110 - RNA, 22 nt, Human
ugaaagagugcaagucaaggag

SEQ ID NO: 537111 - RNA, 23 nt, Human
uagggcagcugggagggacaugc

SEQ ID NO: 537112 - RNA, 22 nt, Human
acaggcugcugagccauuugcu

SEQ ID NO: 537113 - RNA, 22 nt, Human
uauaaagaauccagaagagaca

SEQ ID NO: 537114 - RNA, 17 nt, Human
gacaggcucagugacga

SEQ ID NO: 537115 - RNA, 22 nt, Human
augcugugucaggaauuugaua

SEQ ID NO: 537116 - RNA, 22 nt, Human
ugcuucuguuuguuucugucau

SEQ ID NO: 537117 - RNA, 20 nt, Human
aggcucagagcaguaguaca

SEQ ID NO: 537118 - RNA, 22 nt, Human
ggcugugagcaggcagaaugcu

SEQ ID NO: 537119 - RNA, 22 nt, Human
agugaaauagcauuuaugaagc

SEQ ID NO: 537120 - RNA, 22 nt, Human
uuauuucauauaauguuaucaa

SEQ ID NO: 537121 - RNA, 22 nt, Human
cugccaggccucaucccagcca

SEQ ID NO: 537122 - RNA, 22 nt, Human
agccacagcccacaggacucuu

SEQ ID NO: 537123 - RNA, 21 nt, Human
uaguguagcugcagcagcaga

SEQ ID NO: 537124 - RNA, 22 nt, Human
gcuguucucuguaacaugcauu

SEQ ID NO: 537125 - RNA, 22 nt, Human
uucuucaauaaauucccauaag

SEQ ID NO: 537126 - RNA, 22 nt, Human
uaauuucacaguucaacgcaca

SEQ ID NO: 537127 - RNA, 22 nt, Human
ugaaauuaugcauuguuguacc

SEQ ID NO: 537128 - RNA, 22 nt, Human
acagaaagaagguguauuugag

SEQ ID NO: 537129 - RNA, 22 nt, Human
ucccagcagagccagcaagccg

SEQ ID NO: 537130 - RNA, 22 nt, Human
aucacaaucuucaaaucgauuc

SEQ ID NO: 537131 - RNA, 22 nt, Human
ugccugggccucugaggaaggc

SEQ ID NO: 537132 - RNA, 22 nt, Human
gcagggcugagucaugugugcc

SEQ ID NO: 537133 - RNA, 22 nt, Human
uaaaguaauccuucauaaggag

SEQ ID NO: 537134 - RNA, 22 nt, Human
aagcaaaacgugcucuaggagg

SEQ ID NO: 537135 - RNA, 22 nt, Human
cugaaccaucucuguucuguau

SEQ ID NO: 537136 - RNA, 22 nt, Human
gucccuggggaaucagcuggag

SEQ ID NO: 537137 - RNA, 22 nt, Human
augaaucagaaucugcauuuua

SEQ ID NO: 537138 - RNA, 22 nt, Human
aguuuuucugcuggucucacua

SEQ ID NO: 537139 - RNA, 22 nt, Human
uggggcagggaugggaaacuau

SEQ ID NO: 537140 - RNA, 22 nt, Human
gggcaggugccagcucccuguc

SEQ ID NO: 537141 - RNA, 22 nt, Human
gguggcagaggugcaucagccc

SEQ ID NO: 537142 - RNA, 22 nt, Human
cugagcuggucuauggacuugg

SEQ ID NO: 537143 - RNA, 22 nt, Human
ucaggugggucuacaauuaguu

SEQ ID NO: 537144 - RNA, 22 nt, Human
agauuuguaugucuaaauguaa

SEQ ID NO: 537145 - RNA, 22 nt, Human
cacaagucuguggucuccaaca

SEQ ID NO: 537146 - RNA, 22 nt, Human
ggccaccucugcccuacugagu

SEQ ID NO: 537147 - RNA, 22 nt, Human
gaggccugaaaggggaccuaug

SEQ ID NO: 537148 - RNA, 22 nt, Human
auauuaguguagguagcuaaua

SEQ ID NO: 537149 - RNA, 22 nt, Human
ugaaagcagugccaugauuaug

SEQ ID NO: 537150 - RNA, 22 nt, Human
uaugugcagcacuugccauuac

SEQ ID NO: 537151 - RNA, 22 nt, Human
ugggccaggucugcggucauuu

SEQ ID NO: 537152 - RNA, 22 nt, Human
uauuuuguaauuggucauagcu

SEQ ID NO: 537153 - RNA, 22 nt, Human
ugcuucugacugggucaguuga

SEQ ID NO: 537154 - RNA, 22 nt, Human
aaacaauuuccaccucuccuga

SEQ ID NO: 537155 - RNA, 19 nt, Human
auaaggcagugacuuuuuu

SEQ ID NO: 537156 - RNA, 22 nt, Human
cagcauggggaucacuguaggc

SEQ ID NO: 537157 - RNA, 22 nt, Human
acaagguaagaaacauuggcuu

SEQ ID NO: 537158 - RNA, 22 nt, Human
uuugcucugcuguugccaggug

SEQ ID NO: 537159 - RNA, 22 nt, Human
gacagguggggaaacuaaggua

SEQ ID NO: 537160 - RNA, 22 nt, Human
cagagacagaaaauggaucuag

SEQ ID NO: 537161 - RNA, 22 nt, Human
cauacagagaaggauaauaaag

SEQ ID NO: 537162 - RNA, 22 nt, Human
cuccaggguuccccgauccacu

SEQ ID NO: 537163 - RNA, 22 nt, Human
ugauuucuuccuugucauuaga

SEQ ID NO: 537164 - RNA, 22 nt, Human
aggccugagguuccugugcuca

SEQ ID NO: 537165 - RNA, 22 nt, Human
gcuggcuguguuucaucucuga

SEQ ID NO: 537166 - RNA, 22 nt, Human
gcuugcauuuggaauagauuaa

SEQ ID NO: 537167 - RNA, 22 nt, Human
cucugggcaaguaugauagaaa

SEQ ID NO: 537168 - RNA, 22 nt, Human
cugaggugagcuucccugggcu

SEQ ID NO: 537169 - RNA, 22 nt, Human
cagagccaggucuaggagucuc

SEQ ID NO: 537170 - RNA, 22 nt, Human
aaagcagggaugaggcuagagg

SEQ ID NO: 537171 - RNA, 22 nt, Human
aggcuucacgaugggugaggug

SEQ ID NO: 537172 - RNA, 22 nt, Human
guuucauucggcagcucauaag

SEQ ID NO: 537173 - RNA, 22 nt, Human
cacacaauuaugugugcacaau

SEQ ID NO: 537174 - RNA, 22 nt, Human
gccuggagaccugcuccucuac

SEQ ID NO: 537175 - RNA, 22 nt, Human
ucuucuuuaugucauaugccag

SEQ ID NO: 537176 - RNA, 22 nt, Human
cugggccuccagcucugccagc

SEQ ID NO: 537177 - RNA, 22 nt, Human
cccacacaaaucauggggagaa

SEQ ID NO: 537178 - RNA, 22 nt, Human
ccuuucucuuggauaccgauug

SEQ ID NO: 537179 - RNA, 19 nt, Human
uuucuuccaaagacuaugg

SEQ ID NO: 537180 - RNA, 22 nt, Human
agcaggggcaggguuuugugcu

SEQ ID NO: 537181 - RNA, 22 nt, Human
acauucuauuucaucaugucua

SEQ ID NO: 537182 - RNA, 22 nt, Human
auauuugucaucugccuuaguu

SEQ ID NO: 537183 - RNA, 22 nt, Human
agauuccuaaaguaagauauca

SEQ ID NO: 537184 - RNA, 22 nt, Human
gagggcuuccauggggagcccc

SEQ ID NO: 537185 - RNA, 22 nt, Human
guuucuuaaguuacaaaaucuu

SEQ ID NO: 537186 - RNA, 20 nt, Human
accuugaacccgccagccau

SEQ ID NO: 537187 - RNA, 22 nt, Human
cagggcucagaagacagaccuc

SEQ ID NO: 537188 - RNA, 22 nt, Human
gaccauuuguugaaaagauuau

SEQ ID NO: 537189 - RNA, 22 nt, Human
aaaguuggauuucauccucaug

SEQ ID NO: 537190 - RNA, 22 nt, Human
cccaggcagcggggucuccuug

SEQ ID NO: 537191 - RNA, 22 nt, Human
aucaguuuaacugucaagagcc

SEQ ID NO: 537192 - RNA, 22 nt, Human
cucugggcacuguauggguucu

SEQ ID NO: 537193 - RNA, 22 nt, Human
aggaaaaauaaggcagcagggc

SEQ ID NO: 537194 - RNA, 22 nt, Human
ucucccaggcuggagugcagug

SEQ ID NO: 537195 - RNA, 22 nt, Human
agguccuguguccaggggccug

SEQ ID NO: 537196 - RNA, 22 nt, Human
aaguuguauauaccgcuuuaag

SEQ ID NO: 537197 - RNA, 22 nt, Human
gcuccugggcucuaccuugcua

SEQ ID NO: 537198 - RNA, 22 nt, Human
ggccucugaggacagccuuggc

SEQ ID NO: 537199 - RNA, 22 nt, Human
uccagcccgacugggccugccg

SEQ ID NO: 537200 - RNA, 21 nt, Human
cagggcacacagaggauggua

SEQ ID NO: 537201 - RNA, 19 nt, Human
caaaguaccuggcacagug

SEQ ID NO: 537202 - RNA, 22 nt, Human
uugaaagugauggggaagaugg

SEQ ID NO: 537203 - RNA, 22 nt, Human
gcagauggcugagccugcagau

SEQ ID NO: 537204 - RNA, 22 nt, Human
ugcuucugucucuuaugccuug

SEQ ID NO: 537205 - RNA, 22 nt, Human
aggcugagcaaagggccuuacc

SEQ ID NO: 537206 - RNA, 22 nt, Human
uuuauuaugauggacaccuucg

SEQ ID NO: 537207 - RNA, 22 nt, Human
cauuuguuaaccaguguggauu

SEQ ID NO: 537208 - RNA, 22 nt, Human
ugaagccacagagcaucugccu

SEQ ID NO: 537209 - RNA, 22 nt, Human
gcucugggaacugacugccuuc

SEQ ID NO: 537210 - RNA, 22 nt, Human
cacagcuucccaaaguggaccu

SEQ ID NO: 537211 - RNA, 20 nt, Human
cacugggcuggagucagggc

SEQ ID NO: 537212 - RNA, 22 nt, Human
uuucaaguggggacauuugaga

SEQ ID NO: 537213 - RNA, 22 nt, Human
uucuuguaauuuggagaaauga

SEQ ID NO: 537214 - RNA, 22 nt, Human
acagggccauuaucuguucuag

SEQ ID NO: 537215 - RNA, 22 nt, Human
gggaagggagggaccucagucu

SEQ ID NO: 537216 - RNA, 22 nt, Human
acuagcagggauauuauauaag

SEQ ID NO: 537217 - RNA, 22 nt, Human
agcagguuguuuuguggccagg

SEQ ID NO: 537218 - RNA, 23 nt, Human
ggcagcucucaucugaugacuga

SEQ ID NO: 537219 - RNA, 22 nt, Human
guagcuuauuagggauaauagu

SEQ ID NO: 537220 - RNA, 22 nt, Human
acacucugugaggcauguaaug

SEQ ID NO: 537221 - RNA, 19 nt, Human
ucuaaacucuauacuggua

SEQ ID NO: 537222 - RNA, 22 nt, Human
uccaggcuggacaugaggcggg

SEQ ID NO: 537223 - RNA, 22 nt, Human
agagcugugcuuugcaccacgu

SEQ ID NO: 537224 - RNA, 22 nt, Human
ggagugacucacagcugggaca

SEQ ID NO: 537225 - RNA, 22 nt, Human
ugucucaggcccaagccaguaa

SEQ ID NO: 537226 - RNA, 22 nt, Human
cucucugguacauagaguuugg

SEQ ID NO: 537227 - RNA, 22 nt, Human
ugaaggccagggauuugcagcc

SEQ ID NO: 537228 - RNA, 17 nt, Human
uggcuucccugggccac

SEQ ID NO: 537229 - RNA, 22 nt, Human
uccagugguaguaaagaggucu

SEQ ID NO: 537230 - RNA, 22 nt, Human
ugcugagaugaauagggcuguc

SEQ ID NO: 537231 - RNA, 22 nt, Human
aauguguagauguugcauuccu

SEQ ID NO: 537232 - RNA, 22 nt, Human
gaacacaugauuauaaaugcua

SEQ ID NO: 537233 - RNA, 22 nt, Human
ugaaaucauaacaguuuggcuu

SEQ ID NO: 537234 - RNA, 22 nt, Human
agucucagccacacagaccuau

SEQ ID NO: 537235 - RNA, 22 nt, Human
uuguaugcugaucaaaagcuuc

SEQ ID NO: 537236 - RNA, 22 nt, Human
gaauuguacgcuuuacauaggu

SEQ ID NO: 537237 - RNA, 22 nt, Human
auuugucuuuggaccugugaga

SEQ ID NO: 537238 - RNA, 19 nt, Human
ccaggccucuggggccugu

SEQ ID NO: 537239 - RNA, 22 nt, Human
aagggcucccaacucaucuuuu

SEQ ID NO: 537240 - RNA, 22 nt, Human
gcucagagcaucccagugaaug

SEQ ID NO: 537241 - RNA, 22 nt, Human
gagcucuguguagccugagggu

SEQ ID NO: 537242 - RNA, 20 nt, Human
acaguguaauauucacauuc

SEQ ID NO: 537243 - RNA, 22 nt, Human
uguggcagaguaaggacccagu

SEQ ID NO: 537244 - RNA, 22 nt, Human
guacuuccagccaagugagaca

SEQ ID NO: 537245 - RNA, 22 nt, Human
ucaucucagagagguauguuag

SEQ ID NO: 537246 - RNA, 20 nt, Human
acauagcuauagaaagucga

SEQ ID NO: 537247 - RNA, 18 nt, Human
cugccuguugcugagagg

SEQ ID NO: 537248 - RNA, 22 nt, Human
ccuggaggagcgcugaccagcu

SEQ ID NO: 537249 - RNA, 22 nt, Human
cacacagaaccgcucgccacuu

SEQ ID NO: 537250 - RNA, 22 nt, Human
ugaaaaggguagaucccuaagu

SEQ ID NO: 537251 - RNA, 22 nt, Human
cagguuccaguugcagggacuu

SEQ ID NO: 537252 - RNA, 22 nt, Human
acacaguauugugacuauaacu

SEQ ID NO: 537253 - RNA, 22 nt, Human
acacauuuuguuaaacccugug

SEQ ID NO: 537254 - RNA, 22 nt, Human
gugcccugucucuugucuccag

SEQ ID NO: 537255 - RNA, 22 nt, Human
gcucccugaaaagaacaaaguc

SEQ ID NO: 537256 - RNA, 22 nt, Human
gcugggagcaaagccaugcaua

SEQ ID NO: 537257 - RNA, 22 nt, Human
acuugauuuugaaccuuucuac

SEQ ID NO: 537258 - RNA, 22 nt, Human
caguauuuccucuucuuaacuu

SEQ ID NO: 537259 - RNA, 22 nt, Human
uuucuguuaggcaucauuuuaa

SEQ ID NO: 537260 - RNA, 18 nt, Human
ucaaaauauuucugugga

SEQ ID NO: 537261 - RNA, 22 nt, Human
gugaggcagagaugccaaaacu

SEQ ID NO: 537262 - RNA, 22 nt, Human
ucugaaaugaccuuuccccacu

SEQ ID NO: 537263 - RNA, 22 nt, Human
uagcugucaccagaaauggcca

SEQ ID NO: 537264 - RNA, 19 nt, Human
caggaaugagguaauggcu

SEQ ID NO: 537265 - RNA, 22 nt, Human
auacacaugcacacaugugugu

SEQ ID NO: 537266 - RNA, 22 nt, Human
auguguauacuugugcuuacuc

SEQ ID NO: 537267 - RNA, 22 nt, Human
gcagaggggaagcugaggaauu

SEQ ID NO: 537268 - RNA, 22 nt, Human
acaauacuauuuucaguauccu

SEQ ID NO: 537269 - RNA, 22 nt, Human
ugcucugugguccaagauggcu

SEQ ID NO: 537270 - RNA, 22 nt, Human
ccacagccauuccagggaggcu

SEQ ID NO: 537271 - RNA, 22 nt, Human
uggggaggacgggcgccuuccu

SEQ ID NO: 537272 - RNA, 22 nt, Human
cagggcccagucccugcuguca

SEQ ID NO: 537273 - RNA, 22 nt, Human
aacauuucauuggaagcuaugu

SEQ ID NO: 537274 - RNA, 22 nt, Human
cuguacagaccuauuagcccag

SEQ ID NO: 537275 - RNA, 22 nt, Human
aguaggaggcgggagcaugaag

SEQ ID NO: 537276 - RNA, 22 nt, Human
ucugucauugcaauaaaauuuc

SEQ ID NO: 537277 - RNA, 22 nt, Human
gaaagcaaguugacugcagaau

SEQ ID NO: 537278 - RNA, 19 nt, Human
ugcaaucagcuacccaggu

SEQ ID NO: 537279 - RNA, 22 nt, Human
uaagaacaagcuggggguucca

SEQ ID NO: 537280 - RNA, 22 nt, Human
ggaugcaggacggcauggaugu

SEQ ID NO: 537281 - RNA, 22 nt, Human
ggauccuucuuugaccucacag

SEQ ID NO: 537282 - RNA, 22 nt, Human
agagucuuccaggcagccugag

SEQ ID NO: 537283 - RNA, 22 nt, Human
auaaggacuugaauuagacauu

SEQ ID NO: 537284 - RNA, 22 nt, Human
augucccaagauacagcuagag

SEQ ID NO: 537285 - RNA, 22 nt, Human
agcucugcuucuugggaagaug

SEQ ID NO: 537286 - RNA, 22 nt, Human
uauuuguagaauggauuaaggg

SEQ ID NO: 537287 - RNA, 22 nt, Human
cugcucuguauaugagcaggaa

SEQ ID NO: 537288 - RNA, 23 nt, Human
aaccagauaaauggcuccagggc

SEQ ID NO: 537289 - RNA, 22 nt, Human
caggagaaacauaauuuucugg

SEQ ID NO: 537290 - RNA, 22 nt, Human
agugaaaggaaaaacugauauu

SEQ ID NO: 537291 - RNA, 22 nt, Human
uuauuccaguaaucucuguaau

SEQ ID NO: 537292 - RNA, 22 nt, Human
uggcucagauaauucaaggggc

SEQ ID NO: 537293 - RNA, 22 nt, Human
cccugcagaucagugagaacuu

SEQ ID NO: 537294 - RNA, 22 nt, Human
aaaaagauguccugaaguuuag

SEQ ID NO: 537295 - RNA, 20 nt, Human
gaggaaccacugggaggaga

SEQ ID NO: 537296 - RNA, 22 nt, Human
acugaaauacugcucuuggauu

SEQ ID NO: 537297 - RNA, 22 nt, Human
ucugaggccccugggcaggaug

SEQ ID NO: 537298 - RNA, 22 nt, Human
aucuucuggucaaauuuuugca

SEQ ID NO: 537299 - RNA, 22 nt, Human
agacugaauaacaagcaaauaa

SEQ ID NO: 537300 - RNA, 22 nt, Human
ucuucagucaauccagauguuu

SEQ ID NO: 537301 - RNA, 22 nt, Human
ugcuuaaacauacuauuuauau

SEQ ID NO: 537302 - RNA, 20 nt, Human
agcaggaaaagugccagucu

SEQ ID NO: 537303 - RNA, 22 nt, Human
gcuccucuccucggagucgggg

SEQ ID NO: 537304 - RNA, 19 nt, Human
cauuuagaaguacauauua

SEQ ID NO: 537305 - RNA, 22 nt, Human
caggcagaagaaguggaaggac

SEQ ID NO: 537306 - RNA, 22 nt, Human
uugaaggaggcuccuuuuuaaa

SEQ ID NO: 537307 - RNA, 22 nt, Human
ccugagggucaaggagcccuag

SEQ ID NO: 537308 - RNA, 22 nt, Human
ugaagcuuuccuguggucagga

SEQ ID NO: 537309 - RNA, 22 nt, Human
gggcacaggagaaggaucuggc

SEQ ID NO: 537310 - RNA, 22 nt, Human
acaugaagcaagaaagaugcua

SEQ ID NO: 537311 - RNA, 22 nt, Human
uccucacauggugagccacaca

SEQ ID NO: 537312 - RNA, 22 nt, Human
uuuuacacuucgguugugugca

SEQ ID NO: 537313 - RNA, 22 nt, Human
acaguguugaggugcuuguuuc

SEQ ID NO: 537314 - RNA, 22 nt, Human
uuugaauguuuuagguacuuaa

SEQ ID NO: 537315 - RNA, 22 nt, Human
acauuuaaauaccuauguuucu

SEQ ID NO: 537316 - RNA, 22 nt, Human
uuugaaaagaaccaucgccuua

SEQ ID NO: 537317 - RNA, 21 nt, Human
cagcuuugucugucuucgggg

SEQ ID NO: 537318 - RNA, 22 nt, Human
ucccaggguccucuucuggaau

SEQ ID NO: 537319 - RNA, 22 nt, Human
caaagccaggcuuucuaaugua

SEQ ID NO: 537320 - RNA, 22 nt, Human
uggcagggugccaguugcgagu

SEQ ID NO: 537321 - RNA, 22 nt, Human
uaaaucaagaauaucagcuugu

SEQ ID NO: 537322 - RNA, 22 nt, Human
ccagcccuugcugaaggguggc

SEQ ID NO: 537323 - RNA, 22 nt, Human
uuaaaaccaucagcuguaagau

SEQ ID NO: 537324 - RNA, 18 nt, Human
ccuguggcucagcccaca

SEQ ID NO: 537325 - RNA, 22 nt, Human
uccuugagauuaauuaaucacc

SEQ ID NO: 537326 - RNA, 22 nt, Human
gcugagaguguaggauguuuac

SEQ ID NO: 537327 - RNA, 22 nt, Human
acugggcuuaugcuguggagua

SEQ ID NO: 537328 - RNA, 22 nt, Human
uaggcagggauuaggguugauu

SEQ ID NO: 537329 - RNA, 22 nt, Human
uuggcugagagaggaaaagggc

SEQ ID NO: 537330 - RNA, 22 nt, Human
ccagaaaagcaucugguucuuu

SEQ ID NO: 537331 - RNA, 22 nt, Human
agaaacaucauuggaacacaag

SEQ ID NO: 537332 - RNA, 22 nt, Human
guguuuuagugcugcugagcug

SEQ ID NO: 537333 - RNA, 22 nt, Human
aagaaauaagacuucucugucc

SEQ ID NO: 537334 - RNA, 22 nt, Human
agcagccauccuuagagaaaga

SEQ ID NO: 537335 - RNA, 22 nt, Human
aggugucuucagggugagacag

SEQ ID NO: 537336 - RNA, 22 nt, Human
uuuguguuggaagaaaugcuac

SEQ ID NO: 537337 - RNA, 22 nt, Human
aaaccuauauagucuuagaagc

SEQ ID NO: 537338 - RNA, 23 nt, Human
uaggaagacagcaaaagaaugga

SEQ ID NO: 537339 - RNA, 22 nt, Human
ugggaguggggcauagaaggua

SEQ ID NO: 537340 - RNA, 22 nt, Human
gcccagcuuuucacuuccacac

SEQ ID NO: 537341 - RNA, 22 nt, Human
aggaacccggucugucacugug

SEQ ID NO: 537342 - RNA, 22 nt, Human
aucagagauuguaguaugugca

SEQ ID NO: 537343 - RNA, 22 nt, Human
aaagcagcagcacguggaagag

SEQ ID NO: 537344 - RNA, 22 nt, Human
ugaggggagcuagcaugccuug

SEQ ID NO: 537345 - RNA, 22 nt, Human
ucuguucaucaucuggacacau

SEQ ID NO: 537346 - RNA, 22 nt, Human
agugcagugguuaggagccagg

SEQ ID NO: 537347 - RNA, 22 nt, Human
guggccuuuaucuuagguaucc

SEQ ID NO: 537348 - RNA, 18 nt, Human
cugugggcuggugcauga

SEQ ID NO: 537349 - RNA, 22 nt, Human
ggaggccaaagugugggcggcu

SEQ ID NO: 537350 - RNA, 22 nt, Human
acaguuauuuucccagcauuua

SEQ ID NO: 537351 - RNA, 22 nt, Human
aacauuuaggaaggaccuccuc

SEQ ID NO: 537352 - RNA, 22 nt, Human
acaaggcucuaauuucauugaa

SEQ ID NO: 537353 - RNA, 22 nt, Human
caaagcaguauuggauucuuua

SEQ ID NO: 537354 - RNA, 22 nt, Human
aaggcugacguuuguguuuauu

SEQ ID NO: 537355 - RNA, 22 nt, Human
gagccuggggacccuccugagu

SEQ ID NO: 537356 - RNA, 22 nt, Human
gaggugggguuuuguucuugaa

SEQ ID NO: 537357 - RNA, 22 nt, Human
aaacugaagccuuggagugaca

SEQ ID NO: 537358 - RNA, 22 nt, Human
gugcccuucagcuuugcugaaa

SEQ ID NO: 537359 - RNA, 22 nt, Human
gucaaguuuauccgcucauuca

SEQ ID NO: 537360 - RNA, 22 nt, Human
uuaauuuuuauguauagugugu

SEQ ID NO: 537361 - RNA, 22 nt, Human
aaaaguguucaggaagaauaau

SEQ ID NO: 537362 - RNA, 22 nt, Human
ugaagccaccgaaccagaagag

SEQ ID NO: 537363 - RNA, 22 nt, Human
uuacacaaguucuuuaaccuau

SEQ ID NO: 537364 - RNA, 22 nt, Human
gcugucagcgcccaaggagcuc

SEQ ID NO: 537365 - RNA, 17 nt, Human
cagcuuuaugcuacugu

SEQ ID NO: 537366 - RNA, 22 nt, Human
uggucaguugcaucagagaagu

SEQ ID NO: 537367 - RNA, 22 nt, Human
aaguaaaacacacaguccaccg

SEQ ID NO: 537368 - RNA, 22 nt, Human
ugggcuacucugggagccuaac

SEQ ID NO: 537369 - RNA, 22 nt, Human
agcagggcucacauuaguggau

SEQ ID NO: 537370 - RNA, 22 nt, Human
gccauuaaagugcauguuuugc

SEQ ID NO: 537371 - RNA, 22 nt, Human
agggcccuccccgcucagggca

SEQ ID NO: 537372 - RNA, 22 nt, Human
ggcugggcugcggcuguaccug

SEQ ID NO: 537373 - RNA, 22 nt, Human
gcucccaccuccagccugaguu

SEQ ID NO: 537374 - RNA, 22 nt, Human
ggcuggcagaggggagucugug

SEQ ID NO: 537375 - RNA, 22 nt, Human
uuauuccauuauuucacuuagg

SEQ ID NO: 537376 - RNA, 22 nt, Human
ccuacauucucugaguuuuccu

SEQ ID NO: 537377 - RNA, 22 nt, Human
uugcuauuuugagagucauagu

SEQ ID NO: 537378 - RNA, 22 nt, Human
uucugaaaacacacuuugcagc

SEQ ID NO: 537379 - RNA, 22 nt, Human
uccugggccuguacuccauccg

SEQ ID NO: 537380 - RNA, 22 nt, Human
ugcaaacuauugguagagaugg

SEQ ID NO: 537381 - RNA, 22 nt, Human
ugaaagguuaaaaguaguauug

SEQ ID NO: 537382 - RNA, 22 nt, Human
cauugcuuugugcauauuuaaa

SEQ ID NO: 537383 - RNA, 22 nt, Human
uuuuaaugugcucugcaaugau

SEQ ID NO: 537384 - RNA, 22 nt, Human
uggcagagaauaaaucuugacu

SEQ ID NO: 537385 - RNA, 22 nt, Human
ucuuuccuacuuuauugugaac

SEQ ID NO: 537386 - RNA, 22 nt, Human
gggcugagugggccucuuacuu

SEQ ID NO: 537387 - RNA, 22 nt, Human
aucagaauggagcccacauggu

SEQ ID NO: 537388 - RNA, 22 nt, Human
uacacacagaggccaugggauu

SEQ ID NO: 537389 - RNA, 22 nt, Human
ugcaauaacuacuuuaauguug

SEQ ID NO: 537390 - RNA, 22 nt, Human
auuuauguaucuguguagauca

SEQ ID NO: 537391 - RNA, 22 nt, Human
uccacaagaugauaaagagagg

SEQ ID NO: 537392 - RNA, 22 nt, Human
ccuggggcucaagauggcgccg

SEQ ID NO: 537393 - RNA, 22 nt, Human
ggaagcuucauaccuuuauuua

SEQ ID NO: 537394 - RNA, 20 nt, Human
agcuuugguuaagccagugg

SEQ ID NO: 537395 - RNA, 22 nt, Human
gaaaugugcagaauguguuaga

SEQ ID NO: 537396 - RNA, 22 nt, Human
uucuuucuguccauaaugagac

SEQ ID NO: 537397 - RNA, 22 nt, Human
gugccgcuggagcuggaauuga

SEQ ID NO: 537398 - RNA, 22 nt, Human
gccuggagggcucuagagaggc

SEQ ID NO: 537399 - RNA, 22 nt, Human
acuacacagggaugugacuacc

SEQ ID NO: 537400 - RNA, 22 nt, Human
guucacagcuuguguuuucucu

SEQ ID NO: 537401 - RNA, 22 nt, Human
agcuggcagggguucacacugc

SEQ ID NO: 537402 - RNA, 22 nt, Human
aguuucuuuagauagaaaguuc

SEQ ID NO: 537403 - RNA, 22 nt, Human
caagagagaugcagcucacuca

SEQ ID NO: 537404 - RNA, 22 nt, Human
caguuucuuggaugccaauuuc

SEQ ID NO: 537405 - RNA, 22 nt, Human
ugcagcuccucuggcugccuga

SEQ ID NO: 537406 - RNA, 22 nt, Human
ucaguucuaagugcuuuacaug

SEQ ID NO: 537407 - RNA, 22 nt, Human
gggccagagcuuggcagcuggg

SEQ ID NO: 537408 - RNA, 22 nt, Human
uggaaauuacuaacacuuagag

SEQ ID NO: 537409 - RNA, 22 nt, Human
ugcagcccuuccuuccucuggg

SEQ ID NO: 537410 - RNA, 20 nt, Human
aauuuacucacagaaugaau

SEQ ID NO: 537411 - RNA, 22 nt, Human
auaaacacuucuagggcacaca

SEQ ID NO: 537412 - RNA, 22 nt, Human
agcugccacugagggugcacag

SEQ ID NO: 537413 - RNA, 22 nt, Human
acagagucucaaaccuacaaag

SEQ ID NO: 537414 - RNA, 22 nt, Human
cuuuucaaacgcugaugucagu

SEQ ID NO: 537415 - RNA, 22 nt, Human
ucucuguacaguacaugccgug

SEQ ID NO: 537416 - RNA, 22 nt, Human
uuuuugaaggcugaugugauua

SEQ ID NO: 537417 - RNA, 22 nt, Human
cagcagcugauggggaagugau

SEQ ID NO: 537418 - RNA, 22 nt, Human
cuauuuucugucucuauagagu

SEQ ID NO: 537419 - RNA, 22 nt, Human
ugucuuuagccagcagucuucu

SEQ ID NO: 537420 - RNA, 22 nt, Human
cuucauuuccauccaacuggga

SEQ ID NO: 537421 - RNA, 22 nt, Human
uuguaaaugaccuuuucuaauu

SEQ ID NO: 537422 - RNA, 22 nt, Human
uacaguaaagcugcuaugaauu

SEQ ID NO: 537423 - RNA, 22 nt, Human
uccccacucaccacuggccaaa

SEQ ID NO: 537424 - RNA, 22 nt, Human
ugagccugcugucgcuggaccc

SEQ ID NO: 537425 - RNA, 22 nt, Human
ucaggaagaagacggggcagga

SEQ ID NO: 537426 - RNA, 22 nt, Human
aagugaaacauguaucucuuua

SEQ ID NO: 537427 - RNA, 21 nt, Human
cacuauuuauauaugccagcu

SEQ ID NO: 537428 - RNA, 22 nt, Human
accugagggcccaaacuuggua

SEQ ID NO: 537429 - RNA, 22 nt, Human
ggcacagcaccuuuucacauug

SEQ ID NO: 537430 - RNA, 22 nt, Human
gguuccccaggcggcccuugga

SEQ ID NO: 537431 - RNA, 22 nt, Human
cagaguggagauguguguggaa

SEQ ID NO: 537432 - RNA, 22 nt, Human
ggcagugaaugaaacagaggcu

SEQ ID NO: 537433 - RNA, 22 nt, Human
gccaugcuugguaugcugugag

SEQ ID NO: 537434 - RNA, 22 nt, Human
ugcuguuauacuuagcugguua

SEQ ID NO: 537435 - RNA, 22 nt, Human
gauuuuucaguauaaaauauau

SEQ ID NO: 537436 - RNA, 22 nt, Human
gauucccauccucagcagcagc

SEQ ID NO: 537437 - RNA, 22 nt, Human
aacauuucauaacuugacuuuu

SEQ ID NO: 537438 - RNA, 22 nt, Human
uccaggcauguggccaguacuc

SEQ ID NO: 537439 - RNA, 22 nt, Human
ugacauaaaccagugagcaaaa

SEQ ID NO: 537440 - RNA, 22 nt, Human
agaaaugcaguuucaagacaaa

SEQ ID NO: 537441 - RNA, 22 nt, Human
ugaacuucagugcauaauuauc

SEQ ID NO: 537442 - RNA, 22 nt, Human
ccccauucuggccagcccagcu

SEQ ID NO: 537443 - RNA, 22 nt, Human
ugcuggaggaguuuacuguggc

SEQ ID NO: 537444 - RNA, 22 nt, Human
ucagacaucucauaauguauua

SEQ ID NO: 537445 - RNA, 22 nt, Human
uggagcaugagagucuuuagcu

SEQ ID NO: 537446 - RNA, 22 nt, Human
agugguucuugaucuguagagu

SEQ ID NO: 537447 - RNA, 22 nt, Human
aucagacagggaguucuguguc

SEQ ID NO: 537448 - RNA, 22 nt, Human
aucauacauacaugguccucag

SEQ ID NO: 537449 - RNA, 22 nt, Human
uauuccuaagucccaacuacau

SEQ ID NO: 537450 - RNA, 22 nt, Human
agucuccuuggccucaaugccu

SEQ ID NO: 537451 - RNA, 22 nt, Human
ucaaagucauggcuaguaauga

SEQ ID NO: 537452 - RNA, 22 nt, Human
agaagaauacuugauguucaug

SEQ ID NO: 537453 - RNA, 22 nt, Human
guuucauacagauuauucaugg

SEQ ID NO: 537454 - RNA, 22 nt, Human
agccuucaaccuagcuagagca

SEQ ID NO: 537455 - RNA, 22 nt, Human
aaaguauucaaaaauauuuggu

SEQ ID NO: 537456 - RNA, 22 nt, Human
aagggaggaggauuuauuguac

SEQ ID NO: 537457 - RNA, 22 nt, Human
aaaggaagaucuauacacccca

SEQ ID NO: 537458 - RNA, 22 nt, Human
aucuuuuacauuacugcccaga

SEQ ID NO: 537459 - RNA, 22 nt, Human
gccugugcuuaacugacgugag

SEQ ID NO: 537460 - RNA, 22 nt, Human
gcagagguggcaucugggcucu

SEQ ID NO: 537461 - RNA, 22 nt, Human
aagcagccacuggccaguuaua

SEQ ID NO: 537462 - RNA, 22 nt, Human
cuuuuucugauguuccaugauu

SEQ ID NO: 537463 - RNA, 22 nt, Human
ggccugugcaagacagcacccc

SEQ ID NO: 537464 - RNA, 22 nt, Human
ggcaggaggaagaguuagcacc

SEQ ID NO: 537465 - RNA, 19 nt, Human
gcuuuuuguugucaaaggu

SEQ ID NO: 537466 - RNA, 22 nt, Human
ccucuucauccuggaagcugcu

SEQ ID NO: 537467 - RNA, 22 nt, Human
gaacagaagaggcuggugccac

SEQ ID NO: 537468 - RNA, 22 nt, Human
ugcauugcauuugucaugaaga

SEQ ID NO: 537469 - RNA, 22 nt, Human
cccuggagucagguuggccugg

SEQ ID NO: 537470 - RNA, 22 nt, Human
uaacagcaggguuacaggcauu

SEQ ID NO: 537471 - RNA, 20 nt, Human
uguccuaauagacaagcaga

SEQ ID NO: 537472 - RNA, 21 nt, Human
agcugccugcucuggaccugg

SEQ ID NO: 537473 - RNA, 22 nt, Human
ugcuugucaggauaagcucugg

SEQ ID NO: 537474 - RNA, 18 nt, Human
uauguauaacauaguuca

SEQ ID NO: 537475 - RNA, 22 nt, Human
uuaccaaugugcuuuugcuaca

SEQ ID NO: 537476 - RNA, 22 nt, Human
aggcagcagugauaagauagga

SEQ ID NO: 537477 - RNA, 22 nt, Human
gauuucaaccuaacaguaugac

SEQ ID NO: 537478 - RNA, 18 nt, Human
ucagccuguugucugccu

SEQ ID NO: 537479 - RNA, 22 nt, Human
gugggcuucuguuagggaggcu

SEQ ID NO: 537480 - RNA, 22 nt, Human
gcuggcagcuggaaguugggcu

SEQ ID NO: 537481 - RNA, 22 nt, Human
ccagggugugagaaggaaguag

SEQ ID NO: 537482 - RNA, 22 nt, Human
agacagcaugauacaugaugcu

SEQ ID NO: 537483 - RNA, 22 nt, Human
aagaaagugcuuuguaaauuau

SEQ ID NO: 537484 - RNA, 23 nt, Human
cuucacagguucaggggauuaag

SEQ ID NO: 537485 - RNA, 22 nt, Human
uguggcugacuccuggucccca

SEQ ID NO: 537486 - RNA, 22 nt, Human
uuuuauuaguggcuagaugggg

SEQ ID NO: 537487 - RNA, 22 nt, Human
cugagcagcguggggagcuggc

SEQ ID NO: 537488 - RNA, 22 nt, Human
ccuucuucuguguggcccaaga

SEQ ID NO: 537489 - RNA, 22 nt, Human
gcauugucaaaagugguaugac

SEQ ID NO: 537490 - RNA, 22 nt, Human
agcagggcuccugaaagccgcg

SEQ ID NO: 537491 - RNA, 23 nt, Human
ugcagggcaaguuagagacccca

SEQ ID NO: 537492 - RNA, 22 nt, Human
cagcagugaugugugaggguuc

SEQ ID NO: 537493 - RNA, 22 nt, Human
ggcgggaaguucuugcccacuu

SEQ ID NO: 537494 - RNA, 17 nt, Human
agccccucagcgucacc

SEQ ID NO: 537495 - RNA, 21 nt, Human
uggcugccuacaugcugcagg

SEQ ID NO: 537496 - RNA, 22 nt, Human
auuuuagagcuccaaguacagc

SEQ ID NO: 537497 - RNA, 22 nt, Human
ccugggaggcggagguugcagu

SEQ ID NO: 537498 - RNA, 22 nt, Human
gggguagggugauugugaagua

SEQ ID NO: 537499 - RNA, 22 nt, Human
uauccaauucaccauugauggg

SEQ ID NO: 537500 - RNA, 22 nt, Human
aaggcugaauucaaggguaggc

SEQ ID NO: 537501 - RNA, 22 nt, Human
agcuguggcagcacuuuggagu

SEQ ID NO: 537502 - RNA, 22 nt, Human
gacauacagcauggucuaugaa

SEQ ID NO: 537503 - RNA, 22 nt, Human
gcuucaugaaaaucacugguca

SEQ ID NO: 537504 - RNA, 22 nt, Human
uuuuccagauggauacuagaau

SEQ ID NO: 537505 - RNA, 22 nt, Human
ggcuggcaagugucugcucaug

SEQ ID NO: 537506 - RNA, 22 nt, Human
gaucggguggguucugccauca

SEQ ID NO: 537507 - RNA, 22 nt, Human
ugaggccaggaucccaggcucu

SEQ ID NO: 537508 - RNA, 22 nt, Human
aaaaaugaauucuucaguggca

SEQ ID NO: 537509 - RNA, 22 nt, Human
ccaagcaggauauucuguguca

SEQ ID NO: 537510 - RNA, 22 nt, Human
ggccagcagucacagggucaga

SEQ ID NO: 537511 - RNA, 22 nt, Human
ugcacuuugcaggcauggaaac

SEQ ID NO: 537512 - RNA, 22 nt, Human
cucugaggaagucaaguagcca

SEQ ID NO: 537513 - RNA, 22 nt, Human
agucaggagcugcugcauugua

SEQ ID NO: 537514 - RNA, 22 nt, Human
aucuucaacuugaucauuugaa

SEQ ID NO: 537515 - RNA, 22 nt, Human
aaguacaaucuuucuguaaagg

SEQ ID NO: 537516 - RNA, 22 nt, Human
gcauggaauucccuuaugggcc

SEQ ID NO: 537517 - RNA, 22 nt, Human
cagagggcucggcggccgcucc

SEQ ID NO: 537518 - RNA, 22 nt, Human
caucaaauaaagaaauuccuug

SEQ ID NO: 537519 - RNA, 22 nt, Human
gccuuuugaucuauaacugugu

SEQ ID NO: 537520 - RNA, 22 nt, Human
ugaagcaguucucagaaguggg

SEQ ID NO: 537521 - RNA, 22 nt, Human
agggaucaaaaaauguacaugc

SEQ ID NO: 537522 - RNA, 22 nt, Human
aaagccuugggauuugugauca

SEQ ID NO: 537523 - RNA, 22 nt, Human
uccagccaagggagguuacuag

SEQ ID NO: 537524 - RNA, 22 nt, Human
uaagaauaguguuugccuuugg

SEQ ID NO: 537525 - RNA, 22 nt, Human
uucaaaguccugucagguagcc

SEQ ID NO: 537526 - RNA, 21 nt, Human
ucugaacaacauacgaaucuu

SEQ ID NO: 537527 - RNA, 22 nt, Human
uaggcaggcugaauguagauuu

SEQ ID NO: 537528 - RNA, 22 nt, Human
auacauguuguaccauauguuu

SEQ ID NO: 537529 - RNA, 22 nt, Human
caugaauauacauccugauggc

SEQ ID NO: 537530 - RNA, 19 nt, Human
aacaucuuuccaguagagg

SEQ ID NO: 537531 - RNA, 22 nt, Human
agggcugcuauguugauucaga

SEQ ID NO: 537532 - RNA, 22 nt, Human
guuacaauguucuucaguucug

SEQ ID NO: 537533 - RNA, 22 nt, Human
ugaaugauacagaauuauguag

SEQ ID NO: 537534 - RNA, 20 nt, Human
gucugaggagcagugggaaa

SEQ ID NO: 537535 - RNA, 22 nt, Human
aguauaauuagauaucaaaagu

SEQ ID NO: 537536 - RNA, 22 nt, Human
ucugaaagaaagauuuuguuuc

SEQ ID NO: 537537 - RNA, 22 nt, Human
guggccuggaugagcuucgaca

SEQ ID NO: 537538 - RNA, 22 nt, Human
aggugaguccugggcacaggua

SEQ ID NO: 537539 - RNA, 22 nt, Human
ugugggcacuaaugacaugcag

SEQ ID NO: 537540 - RNA, 22 nt, Human
gcacacaggggaguucucagaa

SEQ ID NO: 537541 - RNA, 22 nt, Human
agcuguguguuuccacugagcu

SEQ ID NO: 537542 - RNA, 22 nt, Human
ucugucacuuauuaagauggau

SEQ ID NO: 537543 - RNA, 22 nt, Human
cuugaaucuucugaguauuugc

SEQ ID NO: 537544 - RNA, 22 nt, Human
cugauucucugacucuuggcuu

SEQ ID NO: 537545 - RNA, 22 nt, Human
cagcucugggugacaggagggc

SEQ ID NO: 537546 - RNA, 22 nt, Human
auacagaagccuguauuucugg

SEQ ID NO: 537547 - RNA, 20 nt, Human
gagcagugagccagggaaag

SEQ ID NO: 537548 - RNA, 22 nt, Human
uucaggaucacuaaacccucca

SEQ ID NO: 537549 - RNA, 22 nt, Human
ucucaggguuuccugggggcug

SEQ ID NO: 537550 - RNA, 22 nt, Human
agauguuccagccaaugggaau

SEQ ID NO: 537551 - RNA, 23 nt, Human
ggacacugcuauaaaggaucugc

SEQ ID NO: 537552 - RNA, 22 nt, Human
cugggagauaugaggaucugga

SEQ ID NO: 537553 - RNA, 22 nt, Human
cuggcccagucucagaguguca

SEQ ID NO: 537554 - RNA, 22 nt, Human
ggcuagggagacagagggcaug

SEQ ID NO: 537555 - RNA, 23 nt, Human
uccucaguauauaaaggcagaug

SEQ ID NO: 537556 - RNA, 22 nt, Human
uggccuuggacagagcgcuccu

SEQ ID NO: 537557 - RNA, 22 nt, Human
caauuuuuguacuuauaguacu

SEQ ID NO: 537558 - RNA, 22 nt, Human
auuuaagacugacuucaccagu

SEQ ID NO: 537559 - RNA, 22 nt, Human
aaagccuuggucaucugguucc

SEQ ID NO: 537560 - RNA, 21 nt, Human
agggcagauuagcuguaagag

SEQ ID NO: 537561 - RNA, 22 nt, Human
gcugucaagguagaaaacagag

SEQ ID NO: 537562 - RNA, 22 nt, Human
aaaggccauuacuugcuuuuag

SEQ ID NO: 537563 - RNA, 22 nt, Human
uucccagauuggagggcagggg

SEQ ID NO: 537564 - RNA, 22 nt, Human
cccucaccaggcuccaggcaug

SEQ ID NO: 537565 - RNA, 22 nt, Human
acccagccacagcauugaggga

SEQ ID NO: 537566 - RNA, 22 nt, Human
aagagcagccuccaggggugga

SEQ ID NO: 537567 - RNA, 19 nt, Human
agcaaauauaauaguguuc

SEQ ID NO: 537568 - RNA, 22 nt, Human
ugcugugggcaguacauaagcu

SEQ ID NO: 537569 - RNA, 22 nt, Human
cuggguggaaagugcugagaau

SEQ ID NO: 537570 - RNA, 22 nt, Human
ucaguuaagaggccacggcagu

SEQ ID NO: 537571 - RNA, 22 nt, Human
gcaugugucuccccaguggagg

SEQ ID NO: 537572 - RNA, 22 nt, Human
ucauucauacucuuuucuauua

SEQ ID NO: 537573 - RNA, 22 nt, Human
caagccugucucaccagugcua

SEQ ID NO: 537574 - RNA, 22 nt, Human
uauuuccugcauggugauguaa

SEQ ID NO: 537575 - RNA, 22 nt, Human
aagggcugcauuugauguguca

SEQ ID NO: 537576 - RNA, 22 nt, Human
ugggagaugguucugagacuuu

SEQ ID NO: 537577 - RNA, 22 nt, Human
ggacacaagcuccggggcugca

SEQ ID NO: 537578 - RNA, 21 nt, Human
ggaugccacgaagcaccagga

SEQ ID NO: 537579 - RNA, 22 nt, Human
auacaugucaucauauguuugu

SEQ ID NO: 537580 - RNA, 22 nt, Human
caccugcagggggagucaagag

SEQ ID NO: 537581 - RNA, 22 nt, Human
ggagaggugagagguacaaguu

SEQ ID NO: 537582 - RNA, 22 nt, Human
gggcagguggcagggucucugg

SEQ ID NO: 537583 - RNA, 20 nt, Human
gagccuuccccucaccacug

SEQ ID NO: 537584 - RNA, 22 nt, Human
agcuguggaagacugucagggu

SEQ ID NO: 537585 - RNA, 22 nt, Human
aaagaacaaaugauauaugguu

SEQ ID NO: 537586 - RNA, 22 nt, Human
gcaggagguugagccaggacug

SEQ ID NO: 537587 - RNA, 22 nt, Human
guguuacaaaucaccugugcug

SEQ ID NO: 537588 - RNA, 22 nt, Human
agggcuggcuccguuaccuuga

SEQ ID NO: 537589 - RNA, 22 nt, Human
ugugaaaggggucacagggaaa

SEQ ID NO: 537590 - RNA, 22 nt, Human
gaggcacaguguuuggucagug

SEQ ID NO: 537591 - RNA, 22 nt, Human
uucaacauuacacaggcaauuc

SEQ ID NO: 537592 - RNA, 22 nt, Human
uggaaagggacuuaugaguucc

SEQ ID NO: 537593 - RNA, 22 nt, Human
gggcagguuauuggaguaggga

SEQ ID NO: 537594 - RNA, 22 nt, Human
gaggaggcuggcgccgccugcc

SEQ ID NO: 537595 - RNA, 22 nt, Human
ccuggggaccugccucagcccu

SEQ ID NO: 537596 - RNA, 22 nt, Human
ugcacacaggucuaggacaugg

SEQ ID NO: 537597 - RNA, 22 nt, Human
augauugaccaucugcugggcu

SEQ ID NO: 537598 - RNA, 22 nt, Human
aaugaugggaaggagaaaagca

SEQ ID NO: 537599 - RNA, 22 nt, Human
ugcaugcauaaauguacacaca

SEQ ID NO: 537600 - RNA, 22 nt, Human
acaugauuuuuaaagagauaau

SEQ ID NO: 537601 - RNA, 21 nt, Human
aguguccuugaucuugccuug

SEQ ID NO: 537602 - RNA, 23 nt, Human
ucuugaaaagccuacagcaguuc

SEQ ID NO: 537603 - RNA, 22 nt, Human
acauuaucccuggcacaacugc

SEQ ID NO: 537604 - RNA, 21 nt, Human
ccucugcucgggcaugcguuu

SEQ ID NO: 537605 - RNA, 17 nt, Human
ucagcaaagacaaagga

SEQ ID NO: 537606 - RNA, 22 nt, Human
agccaggccuuuucucaagguu

SEQ ID NO: 537607 - RNA, 22 nt, Human
cucaggaucgcuugcccuaggg

SEQ ID NO: 537608 - RNA, 22 nt, Human
ccucccacuucuugcugagguc

SEQ ID NO: 537609 - RNA, 22 nt, Human
gggaaagagugcuuguccagag

SEQ ID NO: 537610 - RNA, 22 nt, Human
acauaacauaguugacauuuuu

SEQ ID NO: 537611 - RNA, 22 nt, Human
ccugggcucgcgcacuucaccc

SEQ ID NO: 537612 - RNA, 22 nt, Human
uaaagcagccagggucuaagcc

SEQ ID NO: 537613 - RNA, 19 nt, Human
cagaggcaccagguauaga

SEQ ID NO: 537614 - RNA, 22 nt, Human
gcagaucaauugauuguucacu

SEQ ID NO: 537615 - RNA, 22 nt, Human
cacagcauuaacugggacagcu

SEQ ID NO: 537616 - RNA, 22 nt, Human
aagaaaagaaaccugaggcuuu

SEQ ID NO: 537617 - RNA, 22 nt, Human
cagguggggagaguguggagca

SEQ ID NO: 537618 - RNA, 22 nt, Human
uuucuggaaacuguaaagagga

SEQ ID NO: 537619 - RNA, 22 nt, Human
uacauucugguggagaaaguaa

SEQ ID NO: 537620 - RNA, 22 nt, Human
gggggaagaaagaacauggcau

SEQ ID NO: 537621 - RNA, 22 nt, Human
aaauuguaggaucacaugaccu

SEQ ID NO: 537622 - RNA, 22 nt, Human
ggcugaaggaugaaagcugcag

SEQ ID NO: 537623 - RNA, 22 nt, Human
acaaagaaggaauuggucuuua

SEQ ID NO: 537624 - RNA, 22 nt, Human
uauuccuauggccacugcuacu

SEQ ID NO: 537625 - RNA, 22 nt, Human
gcuguccagagcaugggagcaa

SEQ ID NO: 537626 - RNA, 22 nt, Human
gugucccaggagaggagacaau

SEQ ID NO: 537627 - RNA, 22 nt, Human
ugagaaaagguugagaugauaa

SEQ ID NO: 537628 - RNA, 22 nt, Human
uccucuggcucuuucccuagga

SEQ ID NO: 537629 - RNA, 22 nt, Human
ucugcagcuuuuugguggggug

SEQ ID NO: 537630 - RNA, 23 nt, Human
ugcaggggaggcuuaaagcaggu

SEQ ID NO: 537631 - RNA, 22 nt, Human
ugugaaaagcaggcuacuuucu

SEQ ID NO: 537632 - RNA, 18 nt, Human
gcuguucuucgcacuggc

SEQ ID NO: 537633 - RNA, 22 nt, Human
gccacuggacccagaaagggaa

SEQ ID NO: 537634 - RNA, 23 nt, Human
ugcugggcagagcuggugcugag

SEQ ID NO: 537635 - RNA, 22 nt, Human
ggcagguuggaugcuguaguga

SEQ ID NO: 537636 - RNA, 17 nt, Human
ugaagaugcauggcagc

SEQ ID NO: 537637 - RNA, 22 nt, Human
ccuggaagucauuccucguucc

SEQ ID NO: 537638 - RNA, 22 nt, Human
ccaucacaguccccaucgugau

SEQ ID NO: 537639 - RNA, 22 nt, Human
ugcauuauacuuuuagaaauuu

SEQ ID NO: 537640 - RNA, 22 nt, Human
ucauaaaacacaccagguaguu

SEQ ID NO: 537641 - RNA, 22 nt, Human
uaauuuuaugacaguguauuuu

SEQ ID NO: 537642 - RNA, 22 nt, Human
uaacaugcuaggaagagugauu

SEQ ID NO: 537643 - RNA, 22 nt, Human
gggcagguauuuaucuucuauu

SEQ ID NO: 537644 - RNA, 22 nt, Human
aagaacuuccuaauauauuuuc

SEQ ID NO: 537645 - RNA, 23 nt, Human
gccaggcuccggucuguggccac

SEQ ID NO: 537646 - RNA, 22 nt, Human
gacacagacaguuagagguaau

SEQ ID NO: 537647 - RNA, 23 nt, Human
uuucuguuggguauauauccaag

SEQ ID NO: 537648 - RNA, 22 nt, Human
cucugagaagaguucaaguaaa

SEQ ID NO: 537649 - RNA, 22 nt, Human
gcacagccacugagugagaacc

SEQ ID NO: 537650 - RNA, 17 nt, Human
ucaaagaaugcaugcag

SEQ ID NO: 537651 - RNA, 22 nt, Human
agcacagguacggagaugcuac

SEQ ID NO: 537652 - RNA, 22 nt, Human
ucaggcagagggagaagccaag

SEQ ID NO: 537653 - RNA, 22 nt, Human
gcuguucauagaaauggucuca

SEQ ID NO: 537654 - RNA, 22 nt, Human
cauguuuaauugcgauguuuga

SEQ ID NO: 537655 - RNA, 22 nt, Human
gggcaaguccggugcccagagc

SEQ ID NO: 537656 - RNA, 22 nt, Human
cuacauuuugugauuaugaaau

SEQ ID NO: 537657 - RNA, 22 nt, Human
gagcagcuguccccaaagcuuc

SEQ ID NO: 537658 - RNA, 22 nt, Human
ccagagagcuacaaggcauaaa

SEQ ID NO: 537659 - RNA, 22 nt, Human
agccuggaccaggggccucaga

SEQ ID NO: 537660 - RNA, 18 nt, Human
ucugucucuguccuugcu

SEQ ID NO: 537661 - RNA, 22 nt, Human
aggcagagaaaaaccagauaug

SEQ ID NO: 537662 - RNA, 22 nt, Human
agcuguguucugguugauucac

SEQ ID NO: 537663 - RNA, 22 nt, Human
guccuuaaccacuuguguuuau

SEQ ID NO: 537664 - RNA, 22 nt, Human
acuugauuuuuauaauaaaugg

SEQ ID NO: 537665 - RNA, 22 nt, Human
cuacuucuaaguacauggugau

SEQ ID NO: 537666 - RNA, 22 nt, Human
ucaucaaagcgcuuggaguagg

SEQ ID NO: 537667 - RNA, 22 nt, Human
gggcuggaucuccugcaggcag

SEQ ID NO: 537668 - RNA, 22 nt, Human
gaacaauagugguaacaaagcc

SEQ ID NO: 537669 - RNA, 22 nt, Human
ucaggccacuucacaggugauu

SEQ ID NO: 537670 - RNA, 22 nt, Human
gaagagcuguagccugcucuuu

SEQ ID NO: 537671 - RNA, 22 nt, Human
aggcacugaagugguaaaugua

SEQ ID NO: 537672 - RNA, 21 nt, Human
cauuucaguaaggaagccugu

SEQ ID NO: 537673 - RNA, 22 nt, Human
caguauuuuccuuguuaacuua

SEQ ID NO: 537674 - RNA, 22 nt, Human
cugggagcccgcguccuggugg

SEQ ID NO: 537675 - RNA, 22 nt, Human
ucacagaaugucuagcauaauu

SEQ ID NO: 537676 - RNA, 22 nt, Human
ucauucuugaucacuaguuagu

SEQ ID NO: 537677 - RNA, 22 nt, Human
gugaggcuacucagcuguccga

SEQ ID NO: 537678 - RNA, 22 nt, Human
uaaauacagucauuugagccau

SEQ ID NO: 537679 - RNA, 20 nt, Human
ugguccugucccacccacuc

SEQ ID NO: 537680 - RNA, 22 nt, Human
ucuaaacugcuagcugacugag

SEQ ID NO: 537681 - RNA, 22 nt, Human
uuucacagagaaauauaacagg

SEQ ID NO: 537682 - RNA, 22 nt, Human
acuucaaaugugacaaugugaa

SEQ ID NO: 537683 - RNA, 19 nt, Human
ucucacaucagcuccuagc

SEQ ID NO: 537684 - RNA, 22 nt, Human
agcacuuuagaauuuagaguug

SEQ ID NO: 537685 - RNA, 18 nt, Human
uagauggcagucugcaga

SEQ ID NO: 537686 - RNA, 22 nt, Human
ugggcuggagcuuguugcuucc

SEQ ID NO: 537687 - RNA, 22 nt, Human
gagugugggggugcugaggaca

SEQ ID NO: 537688 - RNA, 21 nt, Human
aggagcuguguuagcuggucg

SEQ ID NO: 537689 - RNA, 22 nt, Human
caggaagccacaggacagguag

SEQ ID NO: 537690 - RNA, 22 nt, Human
ucaggcugcuggccagcaggcu

SEQ ID NO: 537691 - RNA, 22 nt, Human
uaaguuuaaauguacaugaagc

SEQ ID NO: 537692 - RNA, 18 nt, Human
gaguguggcacugggccc

SEQ ID NO: 537693 - RNA, 22 nt, Human
agccauugaauuuagugccuuu

SEQ ID NO: 537694 - RNA, 22 nt, Human
auccucagcaucuagcaugaag

SEQ ID NO: 537695 - RNA, 22 nt, Human
ugcuuucacugauguaucauuu

SEQ ID NO: 537696 - RNA, 22 nt, Human
accagaguuuuauuaguucuaa

SEQ ID NO: 537697 - RNA, 22 nt, Human
cagaccugggucccuggccugu

SEQ ID NO: 537698 - RNA, 22 nt, Human
acuaccuuauacaaaauguagg

SEQ ID NO: 537699 - RNA, 22 nt, Human
gggucuggcaugcugagaugga

SEQ ID NO: 537700 - RNA, 22 nt, Human
gagagcuguccggcugagcagc

SEQ ID NO: 537701 - RNA, 22 nt, Human
gggcuugcugauuugggcagga

SEQ ID NO: 537702 - RNA, 22 nt, Human
uaacagcauaugaaauuacugg

SEQ ID NO: 537703 - RNA, 22 nt, Human
guaauugacucagcucuguuca

SEQ ID NO: 537704 - RNA, 22 nt, Human
ucugggcuggcuuuaugcugac

SEQ ID NO: 537705 - RNA, 22 nt, Human
uuguuucauggggauguuuauu

SEQ ID NO: 537706 - RNA, 22 nt, Human
acauuuaaauaugccuuauauu

SEQ ID NO: 537707 - RNA, 22 nt, Human
gagcugccuacauugccaagag

SEQ ID NO: 537708 - RNA, 20 nt, Human
accauaauguuaauuacaaa

SEQ ID NO: 537709 - RNA, 22 nt, Human
cugugaccuccaggaaggggug

SEQ ID NO: 537710 - RNA, 23 nt, Human
uccagggauuaaugaagucaguc

SEQ ID NO: 537711 - RNA, 22 nt, Human
guggcuucacauggcauuuggc

SEQ ID NO: 537712 - RNA, 22 nt, Human
cuauaaaucuacccagcauugg

SEQ ID NO: 537713 - RNA, 22 nt, Human
gcuuccgcgauguccuaggugg

SEQ ID NO: 537714 - RNA, 22 nt, Human
auuucacaucuaucucagauuu

SEQ ID NO: 537715 - RNA, 22 nt, Human
gguaugaauucacuacuuccaa

SEQ ID NO: 537716 - RNA, 22 nt, Human
uagaaaucagguuuuuagaaag

SEQ ID NO: 537717 - RNA, 22 nt, Human
uagcaggguccaaugugaggca

SEQ ID NO: 537718 - RNA, 22 nt, Human
aucuauuucugcuaauaacaau

SEQ ID NO: 537719 - RNA, 22 nt, Human
cuucagugcauguuuauaauca

SEQ ID NO: 537720 - RNA, 22 nt, Human
uuaauacaagcauaugcacaca

SEQ ID NO: 537721 - RNA, 22 nt, Human
acagcugugaagcaagcacucu

SEQ ID NO: 537722 - RNA, 22 nt, Human
ucugucuuugagaucucagccu

SEQ ID NO: 537723 - RNA, 22 nt, Human
uucaaugagcccaagaacguga

SEQ ID NO: 537724 - RNA, 20 nt, Human
auacaaagagauugauguau

SEQ ID NO: 537725 - RNA, 21 nt, Human
agugaaaugaaguguaugcuc

SEQ ID NO: 537726 - RNA, 22 nt, Human
uuggccuuguuaaggaggcccu

SEQ ID NO: 537727 - RNA, 22 nt, Human
uuaugcuaaaugaaucaaguca

SEQ ID NO: 537728 - RNA, 22 nt, Human
cugcccugagggccuguguguu

SEQ ID NO: 537729 - RNA, 22 nt, Human
ggcuccugggaugggacugagc

SEQ ID NO: 537730 - RNA, 22 nt, Human
gaagcagcgaaguggaagggac

SEQ ID NO: 537731 - RNA, 22 nt, Human
uggcagggaguugcaggauuuc

SEQ ID NO: 537732 - RNA, 22 nt, Human
ucccagccugacagugcaucaa

SEQ ID NO: 537733 - RNA, 23 nt, Human
guaaaauacgcagugcaguguga

SEQ ID NO: 537734 - RNA, 22 nt, Human
uucuuucugucaugguguacug

SEQ ID NO: 537735 - RNA, 22 nt, Human
cagggcagggauguugcggcag

SEQ ID NO: 537736 - RNA, 22 nt, Human
ucagcucuaaguuuuaugcaaa

SEQ ID NO: 537737 - RNA, 22 nt, Human
ccagugggugcugggcucugcc

SEQ ID NO: 537738 - RNA, 22 nt, Human
uguuuuuuuauauaccugaagu

SEQ ID NO: 537739 - RNA, 22 nt, Human
auucaaagagcugccagaacug

SEQ ID NO: 537740 - RNA, 22 nt, Human
aaauuauuaaacagugggaugc

SEQ ID NO: 537741 - RNA, 22 nt, Human
guguaugagccuccagcugggc

SEQ ID NO: 537742 - RNA, 22 nt, Human
agauuauuuccagacuaaugaa

SEQ ID NO: 537743 - RNA, 22 nt, Human
uucacauucucacaagaggaaa

SEQ ID NO: 537744 - RNA, 22 nt, Human
cgaggcagggaagcugcaaaag

SEQ ID NO: 537745 - RNA, 19 nt, Human
gcucugugaugcugagggg

SEQ ID NO: 537746 - RNA, 22 nt, Human
uuaauuaauuaguuaagcaugu

SEQ ID NO: 537747 - RNA, 22 nt, Human
ucucugagcgcauuccuccggc

SEQ ID NO: 537748 - RNA, 22 nt, Human
aucaggaucugggagccugaaa

SEQ ID NO: 537749 - RNA, 22 nt, Human
caaaggaggugauaggcccucu

SEQ ID NO: 537750 - RNA, 22 nt, Human
gcucagaggaugcuccuuuaug

SEQ ID NO: 537751 - RNA, 22 nt, Human
cacaguguggcaaauuucaacu

SEQ ID NO: 537752 - RNA, 22 nt, Human
aacaucuuugauaaacuuagug

SEQ ID NO: 537753 - RNA, 22 nt, Human
ccugcuggcguggcuggcgccc

SEQ ID NO: 537754 - RNA, 18 nt, Human
uguuuauuuuucucuuac

SEQ ID NO: 537755 - RNA, 22 nt, Human
uuaucguacgcuucagaaauuu

SEQ ID NO: 537756 - RNA, 22 nt, Human
ggggccagcuucgcgugcucuu

SEQ ID NO: 537757 - RNA, 22 nt, Human
ucugccuguucaagucuucuag

SEQ ID NO: 537758 - RNA, 22 nt, Human
uaaauuauguuccauguccuuu

SEQ ID NO: 537759 - RNA, 22 nt, Human
agagccagcauuugggcccugc

SEQ ID NO: 537760 - RNA, 22 nt, Human
ccagagucuaugaguccucauu

SEQ ID NO: 537761 - RNA, 22 nt, Human
auauaucugcaguacugaagaa

SEQ ID NO: 537762 - RNA, 22 nt, Human
cucuggaauguuuacaugcccu

SEQ ID NO: 537763 - RNA, 22 nt, Human
agcaaaucagcugcucaggaaa

SEQ ID NO: 537764 - RNA, 22 nt, Human
cuccugagcucugaggaagcuu

SEQ ID NO: 537765 - RNA, 22 nt, Human
augaaauguaaguagagaguuu

SEQ ID NO: 537766 - RNA, 22 nt, Human
agcugcucuugggugacuucaa

SEQ ID NO: 537767 - RNA, 22 nt, Human
cagggccucucaucccacgggc

SEQ ID NO: 537768 - RNA, 20 nt, Human
agaagcugauacugauggaa

SEQ ID NO: 537769 - RNA, 22 nt, Human
augggcagagcuggugggaggc

SEQ ID NO: 537770 - RNA, 22 nt, Human
augggcugaggugggauagaag

SEQ ID NO: 537771 - RNA, 22 nt, Human
cacauggaagagauacagugag

SEQ ID NO: 537772 - RNA, 22 nt, Human
aggcagcccacaggacacagga

SEQ ID NO: 537773 - RNA, 22 nt, Human
gcuggccuucugcagaguucug

SEQ ID NO: 537774 - RNA, 22 nt, Human
uagccaggucacacuguguguu

SEQ ID NO: 537775 - RNA, 22 nt, Human
acauacuugaagcaagugauca

SEQ ID NO: 537776 - RNA, 22 nt, Human
agucagcagccuggccaggaga

SEQ ID NO: 537777 - RNA, 22 nt, Human
uuacaguuguagaaagugguug

SEQ ID NO: 537778 - RNA, 22 nt, Human
ucugcuggccuuagcaggucua

SEQ ID NO: 537779 - RNA, 20 nt, Human
ucaggcaguggggaaaggca

SEQ ID NO: 537780 - RNA, 21 nt, Human
gccugccugcgugacccucuu

SEQ ID NO: 537781 - RNA, 22 nt, Human
ucuggcucuaacuaggcaucag

SEQ ID NO: 537782 - RNA, 22 nt, Human
cuggcagcucuacucagagccu

SEQ ID NO: 537783 - RNA, 22 nt, Human
uuuaguauccuaucucauuuaa

SEQ ID NO: 537784 - RNA, 20 nt, Human
caucaucacaugagccaauu

SEQ ID NO: 537785 - RNA, 22 nt, Human
ucagacagaggagcucgugcag

SEQ ID NO: 537786 - RNA, 22 nt, Human
aguuaauaauggaaagacacau

SEQ ID NO: 537787 - RNA, 22 nt, Human
ucugucugacaggguaugaacu

SEQ ID NO: 537788 - RNA, 22 nt, Human
uucagugucaauuuuuaaauau

SEQ ID NO: 537789 - RNA, 22 nt, Human
agcugcucauucccagcacaug

SEQ ID NO: 537790 - RNA, 22 nt, Human
agcagugaugcaugacagccua

SEQ ID NO: 537791 - RNA, 22 nt, Human
uuuguguggauggaaggcagua

SEQ ID NO: 537792 - RNA, 22 nt, Human
cagcuucuggcguggagccuga

SEQ ID NO: 537793 - RNA, 22 nt, Human
augcccuguggcaguacauauu

SEQ ID NO: 537794 - RNA, 22 nt, Human
uuccuguaguugugcaauguac

SEQ ID NO: 537795 - RNA, 22 nt, Human
ucagcuuuccugcagcuaaggg

SEQ ID NO: 537796 - RNA, 22 nt, Human
ucaauuauuugauaugaaaggg

SEQ ID NO: 537797 - RNA, 22 nt, Human
ucugaaauggcagcgggaauga

SEQ ID NO: 537798 - RNA, 22 nt, Human
uaaagguagcaugaaacugcaa

SEQ ID NO: 537799 - RNA, 22 nt, Human
uauucauaguaaacaaaagugg

SEQ ID NO: 537800 - RNA, 22 nt, Human
ugccugaagaaaacuugcagca

SEQ ID NO: 537801 - RNA, 20 nt, Human
ggagcuggcauccagccucu

SEQ ID NO: 537802 - RNA, 22 nt, Human
ugagccagaggaggcugugugg

SEQ ID NO: 537803 - RNA, 22 nt, Human
ggcagaguggagugcggccucc

SEQ ID NO: 537804 - RNA, 22 nt, Human
cuugcugggguaagucugugcu

SEQ ID NO: 537805 - RNA, 22 nt, Human
guuucauuuacaucuguaggua

SEQ ID NO: 537806 - RNA, 22 nt, Human
gacuucuauuaauaccucuacu

SEQ ID NO: 537807 - RNA, 22 nt, Human
cagugagguggauggauggccu

SEQ ID NO: 537808 - RNA, 22 nt, Human
uggccuggugcucaggcaguag

SEQ ID NO: 537809 - RNA, 22 nt, Human
auugcaccuuggguuuugaaag

SEQ ID NO: 537810 - RNA, 22 nt, Human
agucaguuaaccucacagcauc

SEQ ID NO: 537811 - RNA, 22 nt, Human
gggaagagugucgguugaagug

SEQ ID NO: 537812 - RNA, 22 nt, Human
caggccuggcugcagcucgccu

SEQ ID NO: 537813 - RNA, 22 nt, Human
gcccacaccauuuauucuuugu

SEQ ID NO: 537814 - RNA, 19 nt, Human
gauauugcuugaguaacug

SEQ ID NO: 537815 - RNA, 22 nt, Human
uuacaaguauuuaagaugcugu

SEQ ID NO: 537816 - RNA, 22 nt, Human
uguuuauugcugcaauugugcc

SEQ ID NO: 537817 - RNA, 22 nt, Human
cugucacacugauaucaggcuu

SEQ ID NO: 537818 - RNA, 22 nt, Human
uaacacugauuuguucucaggg

SEQ ID NO: 537819 - RNA, 22 nt, Human
uuacuaaguuuuaugcaacuua

SEQ ID NO: 537820 - RNA, 22 nt, Human
ugcuggcccaugaagacgcagu

SEQ ID NO: 537821 - RNA, 22 nt, Human
uugauaaaaugaugaaaucacu

SEQ ID NO: 537822 - RNA, 22 nt, Human
acacagggcaaugcuuugaccu

SEQ ID NO: 537823 - RNA, 22 nt, Human
uugguucauugcaggcgccggg

SEQ ID NO: 537824 - RNA, 22 nt, Human
gggagcugagggaccucugugg

SEQ ID NO: 537825 - RNA, 23 nt, Human
ccaggcucuuucaccugcuauuc

SEQ ID NO: 537826 - RNA, 22 nt, Human
uuauuuaauuuucucacucaga

SEQ ID NO: 537827 - RNA, 22 nt, Human
uguaacaucacagugauguuug

SEQ ID NO: 537828 - RNA, 19 nt, Human
ucaaaacacaaaugguuga

SEQ ID NO: 537829 - RNA, 20 nt, Human
ccucaguguccuggacuggg

SEQ ID NO: 537830 - RNA, 22 nt, Human
caggcagcagccacucugguau

SEQ ID NO: 537831 - RNA, 22 nt, Human
gguggcagucuuaagagaucuu

SEQ ID NO: 537832 - RNA, 22 nt, Human
guugugcagucagacugccugg

SEQ ID NO: 537833 - RNA, 21 nt, Human
auggagucaggggaaugggcc

SEQ ID NO: 537834 - RNA, 22 nt, Human
agagggagcccagucauagcug

SEQ ID NO: 537835 - RNA, 22 nt, Human
ugcccuggcucuccacuaguuu

SEQ ID NO: 537836 - RNA, 21 nt, Human
gcugugcaggugccccugcuc

SEQ ID NO: 537837 - RNA, 22 nt, Human
aaccauuugccauuaucuuaag

SEQ ID NO: 537838 - RNA, 22 nt, Human
augaauacgcggucauacacau

SEQ ID NO: 537839 - RNA, 22 nt, Human
agagccugucugccuuucuacc

SEQ ID NO: 537840 - RNA, 22 nt, Human
cuuacauaugcaagacaaaggg

SEQ ID NO: 537841 - RNA, 22 nt, Human
aggcugcuuccuuacguggcug

SEQ ID NO: 537842 - RNA, 22 nt, Human
agcaauauaaauguuggguaga

SEQ ID NO: 537843 - RNA, 22 nt, Human
aaauuauugggucccaccccag

SEQ ID NO: 537844 - RNA, 22 nt, Human
aggcccugcccagugccacaag

SEQ ID NO: 537845 - RNA, 22 nt, Human
cacugaaggaaggacuacugca

SEQ ID NO: 537846 - RNA, 22 nt, Human
cccaggcagccccagaagcuug

SEQ ID NO: 537847 - RNA, 22 nt, Human
gacuuugagggauacaaacauu

SEQ ID NO: 537848 - RNA, 22 nt, Human
aucugccucuucuucauugcga

SEQ ID NO: 537849 - RNA, 22 nt, Human
aacacaaaaauucucaggggca

SEQ ID NO: 537850 - RNA, 20 nt, Human
agccaggcucaagcuccccc

SEQ ID NO: 537851 - RNA, 22 nt, Human
auaaagucauuucaaaaguuga

SEQ ID NO: 537852 - RNA, 22 nt, Human
ccaggcugcuuagccuuaucuu

SEQ ID NO: 537853 - RNA, 17 nt, Human
gccuggcccagccuggc

SEQ ID NO: 537854 - RNA, 22 nt, Human
gaacugaguuuucugccuggac

SEQ ID NO: 537855 - RNA, 22 nt, Human
cugggcugcuguccacuagggu

SEQ ID NO: 537856 - RNA, 22 nt, Human
ucucaccauggugcuugcuuau

SEQ ID NO: 537857 - RNA, 22 nt, Human
agcaaauauuuuguugaagugc

SEQ ID NO: 537858 - RNA, 22 nt, Human
uuugaacaggaguaucuauagu

SEQ ID NO: 537859 - RNA, 22 nt, Human
agucaacaguuuuugauguaaa

SEQ ID NO: 537860 - RNA, 22 nt, Human
uaaauuuuuguuaacagccucu

SEQ ID NO: 537861 - RNA, 18 nt, Human
uucaccagugugaugggu

SEQ ID NO: 537862 - RNA, 22 nt, Human
uuuuccuauaugcaaagaaugc

SEQ ID NO: 537863 - RNA, 22 nt, Human
cgguccuguacuugaugagaua

SEQ ID NO: 537864 - RNA, 22 nt, Human
uucuuuucccaauauuuugcug

SEQ ID NO: 537865 - RNA, 22 nt, Human
ccaggugugccagcagggacug

SEQ ID NO: 537866 - RNA, 22 nt, Human
gcucaaagaauauucagaauga

SEQ ID NO: 537867 - RNA, 22 nt, Human
gggcucuucucaggagcuaucu

SEQ ID NO: 537868 - RNA, 22 nt, Human
uuggcagggccaggcucucucu

SEQ ID NO: 537869 - RNA, 22 nt, Human
uucagagaagcaaaggcagauu

SEQ ID NO: 537870 - RNA, 22 nt, Human
agggcugacaaauggcagugac

SEQ ID NO: 537871 - RNA, 22 nt, Human
ucugauuuauauaugcagauac

SEQ ID NO: 537872 - RNA, 22 nt, Human
uuuccugugacuaaucuggaca

SEQ ID NO: 537873 - RNA, 17 nt, Human
cauuuguugaucaguug

SEQ ID NO: 537874 - RNA, 22 nt, Human
cauuucugauuacagaauacua

SEQ ID NO: 537875 - RNA, 22 nt, Human
gagagaagaaagccaugguccu

SEQ ID NO: 537876 - RNA, 22 nt, Human
uuauuucuacuauuuugccuga

SEQ ID NO: 537877 - RNA, 22 nt, Human
agagaggcugggcguagggcuu

SEQ ID NO: 537878 - RNA, 22 nt, Human
ucaagucuugaugagacaaacc

SEQ ID NO: 537879 - RNA, 22 nt, Human
ugaagccauaggacagaggaua

SEQ ID NO: 537880 - RNA, 20 nt, Human
gacaacacagcuucaggucc

SEQ ID NO: 537881 - RNA, 22 nt, Human
gugcuuuccauccucccugcug

SEQ ID NO: 537882 - RNA, 22 nt, Human
cagaaggcaaacaaaaggauuu

SEQ ID NO: 537883 - RNA, 22 nt, Human
aaacuucuugcugcauuuucug

SEQ ID NO: 537884 - RNA, 22 nt, Human
agagccuguuuugugggagaug

SEQ ID NO: 537885 - RNA, 20 nt, Human
cuuagaaauuuuuacccugg

SEQ ID NO: 537886 - RNA, 22 nt, Human
aggaagagcuggaccagaggac

SEQ ID NO: 537887 - RNA, 22 nt, Human
agggggugcuacuuccagaguu

SEQ ID NO: 537888 - RNA, 22 nt, Human
ucccuggcagcuaagggugguc

SEQ ID NO: 537889 - RNA, 17 nt, Human
gauuuccugaaguucuu

SEQ ID NO: 537890 - RNA, 22 nt, Human
acaaucacacaugcaauuauac

SEQ ID NO: 537891 - RNA, 22 nt, Human
gcuggcccagggucaccuagga

SEQ ID NO: 537892 - RNA, 22 nt, Human
cagcugccccauaaaucacagu

SEQ ID NO: 537893 - RNA, 22 nt, Human
ugcuucugcaacuugaauguac

SEQ ID NO: 537894 - RNA, 20 nt, Human
uugaaauuggaugguagcua

SEQ ID NO: 537895 - RNA, 22 nt, Human
cucuggccagagccugcgggaa

SEQ ID NO: 537896 - RNA, 22 nt, Human
uuggcagucagucuuggugcuu

SEQ ID NO: 537897 - RNA, 22 nt, Human
acagaauucucucugcagaggc

SEQ ID NO: 537898 - RNA, 22 nt, Human
agauuucagaugcucggcaguu

SEQ ID NO: 537899 - RNA, 22 nt, Human
cagcccucagguccucagcagc

SEQ ID NO: 537900 - RNA, 22 nt, Human
aguugaagguuggcugauccau

SEQ ID NO: 537901 - RNA, 22 nt, Human
uggcaggaaaaacauuggagau

SEQ ID NO: 537902 - RNA, 22 nt, Human
cagaaguaaugaugucauuccu

SEQ ID NO: 537903 - RNA, 22 nt, Human
caaauacuacgauucuugcagu

SEQ ID NO: 537904 - RNA, 22 nt, Human
ggggcugguggugguuucucca

SEQ ID NO: 537905 - RNA, 22 nt, Human
auacacacugcuauccuuuuuu

SEQ ID NO: 537906 - RNA, 22 nt, Human
uggagccagagcgcagccuggg

SEQ ID NO: 537907 - RNA, 22 nt, Human
aucugcccaucuguccugcuuc

SEQ ID NO: 537908 - RNA, 22 nt, Human
gcucaggaaggcucaaccagga

SEQ ID NO: 537909 - RNA, 22 nt, Human
ucccaagagacagaaugguauc

SEQ ID NO: 537910 - RNA, 19 nt, Human
caguuacagcagcuaagac

SEQ ID NO: 537911 - RNA, 22 nt, Human
uggcaaagcuagacauucccuc

SEQ ID NO: 537912 - RNA, 22 nt, Human
agccaggcuaaaugagccauga

SEQ ID NO: 537913 - RNA, 22 nt, Human
acauugaucagccucccaugca

SEQ ID NO: 537914 - RNA, 22 nt, Human
gaggcacaccagggagucuugu

SEQ ID NO: 537915 - RNA, 22 nt, Human
uggaggcauaggccugggcccu

SEQ ID NO: 537916 - RNA, 22 nt, Human
agaagcugccuacaugaccagc

SEQ ID NO: 537917 - RNA, 22 nt, Human
uugcagggaccugcagaaagcu

SEQ ID NO: 537918 - RNA, 22 nt, Human
uaagcagaaaaagugggaguua

SEQ ID NO: 537919 - RNA, 22 nt, Human
agauuaugcuggcugcuacaag

SEQ ID NO: 537920 - RNA, 21 nt, Human
gggcaggucucugaugucaac

SEQ ID NO: 537921 - RNA, 22 nt, Human
acacuuaagcaugaaguauaaa

SEQ ID NO: 537922 - RNA, 22 nt, Human
agggccugagcucuccuccagu

SEQ ID NO: 537923 - RNA, 22 nt, Human
ugaggcagcaauuguauuguau

SEQ ID NO: 537924 - RNA, 22 nt, Human
ugccuuuuccagcuuccaggag

SEQ ID NO: 537925 - RNA, 23 nt, Human
uggaagcaaucacuguagugaau

SEQ ID NO: 537926 - RNA, 20 nt, Human
agagcugggaagcucccuau

SEQ ID NO: 537927 - RNA, 22 nt, Human
ucagcuuguuuaugauaagcag

SEQ ID NO: 537928 - RNA, 22 nt, Human
cuucugggcagaaguuuugaga

SEQ ID NO: 537929 - RNA, 22 nt, Human
ccugagguggcugcagcacugc

SEQ ID NO: 537930 - RNA, 22 nt, Human
cugagagcagggacuugagcca

SEQ ID NO: 537931 - RNA, 23 nt, Human
ugagaagccaggggagcgugagg

SEQ ID NO: 537932 - RNA, 22 nt, Human
ccugacucuggccaggccagcu

SEQ ID NO: 537933 - RNA, 22 nt, Human
gcaggcucacucuguuuggcuc

SEQ ID NO: 537934 - RNA, 22 nt, Human
aaaauccucuaauucuagaaua

SEQ ID NO: 537935 - RNA, 22 nt, Human
aaaugcauugguuucuacuugu

SEQ ID NO: 537936 - RNA, 20 nt, Human
uagggcucauuaugaucucc

SEQ ID NO: 537937 - RNA, 22 nt, Human
ugcagggcaucuuugaagugug

SEQ ID NO: 537938 - RNA, 18 nt, Human
caauguuuuagaucucua

SEQ ID NO: 537939 - RNA, 22 nt, Human
cuucucccuggcuucugcacac

SEQ ID NO: 537940 - RNA, 22 nt, Human
uaacaacuugcuuuuaucuuag

SEQ ID NO: 537941 - RNA, 22 nt, Human
ggccgggcaggucucagccagc

SEQ ID NO: 537942 - RNA, 20 nt, Human
aagcagaagcugcucucagc

SEQ ID NO: 537943 - RNA, 22 nt, Human
aucuaagauguauugagcacuu

SEQ ID NO: 537944 - RNA, 22 nt, Human
accuuggaaaguuuaauugagg

SEQ ID NO: 537945 - RNA, 22 nt, Human
auggaagacagauaaggcagaa

SEQ ID NO: 537946 - RNA, 22 nt, Human
guuagggaagcgcuguguucuu

SEQ ID NO: 537947 - RNA, 22 nt, Human
uagaaacaaaaucugaugacuc

SEQ ID NO: 537948 - RNA, 22 nt, Human
cagguggcaugacugccuacaa

SEQ ID NO: 537949 - RNA, 21 nt, Human
ccuuuagauuucuaugcaguu

SEQ ID NO: 537950 - RNA, 22 nt, Human
uggaaaaacugagacuuagaca

SEQ ID NO: 537951 - RNA, 19 nt, Human
gguguccuagagauaagag

SEQ ID NO: 537952 - RNA, 18 nt, Human
ucaaagucuggcuccacu

SEQ ID NO: 537953 - RNA, 22 nt, Human
agggcagcagcuccuccuagcu

SEQ ID NO: 537954 - RNA, 22 nt, Human
cucuuuucaaaccuguuuaugg

SEQ ID NO: 537955 - RNA, 22 nt, Human
cuccagggaaaggggcguccgc

SEQ ID NO: 537956 - RNA, 22 nt, Human
aaaaaccauugucuucagucuc

SEQ ID NO: 537957 - RNA, 22 nt, Human
uucacaauaggagcaugcaaau

SEQ ID NO: 537958 - RNA, 22 nt, Human
gagaugguagccucagaagagu

SEQ ID NO: 537959 - RNA, 22 nt, Human
ggagaagaggagcuggaagccu

SEQ ID NO: 537960 - RNA, 22 nt, Human
uauaacaguuuaggugguguca

SEQ ID NO: 537961 - RNA, 22 nt, Human
ugguaaauauguccauucucuu

SEQ ID NO: 537962 - RNA, 18 nt, Human
gcagaucauuagauaauu

SEQ ID NO: 537963 - RNA, 22 nt, Human
uuggguaggagaaagaacagau

SEQ ID NO: 537964 - RNA, 22 nt, Human
agaauucuguucuucgggugug

SEQ ID NO: 537965 - RNA, 22 nt, Human
cugucauuuaagacauucugga

SEQ ID NO: 537966 - RNA, 22 nt, Human
acagcuuuucugauagauccug

SEQ ID NO: 537967 - RNA, 22 nt, Human
aggaggcaggaagucuauggga

SEQ ID NO: 537968 - RNA, 22 nt, Human
auccuucaaaaggaauagcagg

SEQ ID NO: 537969 - RNA, 22 nt, Human
auaugcacgcauacacacauaa

SEQ ID NO: 537970 - RNA, 23 nt, Human
aaauucaguccuucaacucugag

SEQ ID NO: 537971 - RNA, 22 nt, Human
aaugucugccugaacuuuauau

SEQ ID NO: 537972 - RNA, 22 nt, Human
gaacaucaaggucugugucuag

SEQ ID NO: 537973 - RNA, 22 nt, Human
agggccaccagagcagggcagu

SEQ ID NO: 537974 - RNA, 22 nt, Human
gaaauucugugucccagagugc

SEQ ID NO: 537975 - RNA, 22 nt, Human
gagcugcagcggcugacgcaac

SEQ ID NO: 537976 - RNA, 22 nt, Human
acagaagacagaguguucaucu

SEQ ID NO: 537977 - RNA, 22 nt, Human
cugaagcaaaugaaacagcucu

SEQ ID NO: 537978 - RNA, 22 nt, Human
uucacagagaguaugcagagaa

SEQ ID NO: 537979 - RNA, 22 nt, Human
cagggcucaggcucugggauuc

SEQ ID NO: 537980 - RNA, 22 nt, Human
cugggggcaauggucagagugu

SEQ ID NO: 537981 - RNA, 18 nt, Human
acaaaugugucacaggaa

SEQ ID NO: 537982 - RNA, 22 nt, Human
ccuaggccuuacuuuccugugc

SEQ ID NO: 537983 - RNA, 22 nt, Human
uagcuauuuggaaaauuccaau

SEQ ID NO: 537984 - RNA, 22 nt, Human
uacauaauugucuuuguccuca

SEQ ID NO: 537985 - RNA, 22 nt, Human
agccagcugccuuucacaucug

SEQ ID NO: 537986 - RNA, 22 nt, Human
gagcugaaauaugaagccaauu

SEQ ID NO: 537987 - RNA, 22 nt, Human
guucauaauuugaaggaauagg

SEQ ID NO: 537988 - RNA, 18 nt, Human
ugggaaaguuuauagaau

SEQ ID NO: 537989 - RNA, 22 nt, Human
aguucuuuugugaacauaugcu

SEQ ID NO: 537990 - RNA, 22 nt, Human
uuauucagucugucuagggagu

SEQ ID NO: 537991 - RNA, 22 nt, Human
acuguggcucaucaggcuggug

SEQ ID NO: 537992 - RNA, 22 nt, Human
gcugcugggauccugggucuca

SEQ ID NO: 537993 - RNA, 22 nt, Human
aaaggaguuacucauaaagcuu

SEQ ID NO: 537994 - RNA, 22 nt, Human
acuguucauuuggauuucucug

SEQ ID NO: 537995 - RNA, 23 nt, Human
aagcuucuagggugggcaagaug

SEQ ID NO: 537996 - RNA, 20 nt, Human
agugcccuccgacauuguuu

SEQ ID NO: 537997 - RNA, 22 nt, Human
agggcgaggagacggaggcaca

SEQ ID NO: 537998 - RNA, 22 nt, Human
uucccagaccuguaggaucaga

SEQ ID NO: 537999 - RNA, 21 nt, Human
ccuaaacaagacugacacaca

SEQ ID NO: 538000 - RNA, 22 nt, Human
ccugucugcaagggguggaucc

SEQ ID NO: 538001 - RNA, 22 nt, Human
uuuuuacacuuagcauugagcg

SEQ ID NO: 538002 - RNA, 19 nt, Human
ugcuucuggaaccaugauc

SEQ ID NO: 538003 - RNA, 22 nt, Human
ucuccugugcacccucccugug

SEQ ID NO: 538004 - RNA, 22 nt, Human
guacaaggcauuuaucuguuca

SEQ ID NO: 538005 - RNA, 22 nt, Human
acuucaaauuuucagaagaaau

SEQ ID NO: 538006 - RNA, 22 nt, Human
ugucagugguaagguugggagu

SEQ ID NO: 538007 - RNA, 22 nt, Human
uccaaagaagucacaaacgaag

SEQ ID NO: 538008 - RNA, 22 nt, Human
uuuagaaugugacuguauuuga

SEQ ID NO: 538009 - RNA, 22 nt, Human
auggcugugaaggucacacccu

SEQ ID NO: 538010 - RNA, 22 nt, Human
caaagaugccaaaaggaagaca

SEQ ID NO: 538011 - RNA, 22 nt, Human
uaugacaagaaauacagaggua

SEQ ID NO: 538012 - RNA, 22 nt, Human
cagaggaaaugggaaggagaua

SEQ ID NO: 538013 - RNA, 22 nt, Human
uuugggcaguagauguaucacu

SEQ ID NO: 538014 - RNA, 22 nt, Human
cggagcugccugccaagccugc

SEQ ID NO: 538015 - RNA, 23 nt, Human
ucagagaggcccccugcagagau

SEQ ID NO: 538016 - RNA, 22 nt, Human
uguaugcaccauuguauuaccu

SEQ ID NO: 538017 - RNA, 22 nt, Human
gcccacacaccagcucaggagg

SEQ ID NO: 538018 - RNA, 23 nt, Human
acagccaguucaccucuccuugg

SEQ ID NO: 538019 - RNA, 22 nt, Human
gggaggaaagagaaguggucca

SEQ ID NO: 538020 - RNA, 22 nt, Human
cggcacagccgggcaaggcugg

SEQ ID NO: 538021 - RNA, 22 nt, Human
cagcuuuguggccuugaccucg

SEQ ID NO: 538022 - RNA, 22 nt, Human
gccuucugauaucucuuggcau

SEQ ID NO: 538023 - RNA, 22 nt, Human
accugggaguaugcagugguga

SEQ ID NO: 538024 - RNA, 22 nt, Human
gcauuccugagaaugcagagug

SEQ ID NO: 538025 - RNA, 22 nt, Human
augcuguguuuuaaauggaaau

SEQ ID NO: 538026 - RNA, 22 nt, Human
aggccagcaccagagucaagaa

SEQ ID NO: 538027 - RNA, 22 nt, Human
uaccacaggccaaauuugaggu

SEQ ID NO: 538028 - RNA, 22 nt, Human
gcaguaaaaaaggauaugugca

SEQ ID NO: 538029 - RNA, 22 nt, Human
ugaaggagcugauguaaggggu

SEQ ID NO: 538030 - RNA, 22 nt, Human
ugaggcagaaauuccuguuuuc

SEQ ID NO: 538031 - RNA, 22 nt, Human
ucaguuuugauuccugguucuc

SEQ ID NO: 538032 - RNA, 19 nt, Human
gaagaagcuugagaaguag

SEQ ID NO: 538033 - RNA, 22 nt, Human
aacagacaacuccuguggcuca

SEQ ID NO: 538034 - RNA, 22 nt, Human
ucaguuuuucuauacuuuguag

SEQ ID NO: 538035 - RNA, 22 nt, Human
aaggucauuguugcauguucuc

SEQ ID NO: 538036 - RNA, 22 nt, Human
gcagccuccgcacugcgagucc

SEQ ID NO: 538037 - RNA, 22 nt, Human
ccagaagacaagaauguucuua

SEQ ID NO: 538038 - RNA, 22 nt, Human
ucuggccuuaucuguccaagcc

SEQ ID NO: 538039 - RNA, 22 nt, Human
agaauaaaucaaauguccugag

SEQ ID NO: 538040 - RNA, 22 nt, Human
caucacugacgcugagauucca

SEQ ID NO: 538041 - RNA, 23 nt, Human
augaaaguucuuaaaaugucaug

SEQ ID NO: 538042 - RNA, 22 nt, Human
uccagggcugacuugggagagg

SEQ ID NO: 538043 - RNA, 22 nt, Human
aaagcagccgguucccuggucu

SEQ ID NO: 538044 - RNA, 22 nt, Human
acagaaguguugaaguuuucau

SEQ ID NO: 538045 - RNA, 22 nt, Human
guccucugaaagaugaaccaug

SEQ ID NO: 538046 - RNA, 22 nt, Human
uaaaggcucacuggcuuggggu

SEQ ID NO: 538047 - RNA, 22 nt, Human
ccagaggcauguucaaagcaau

SEQ ID NO: 538048 - RNA, 22 nt, Human
gcugagcccucaucccuaguuu

SEQ ID NO: 538049 - RNA, 22 nt, Human
caggagcaugcugaugccagaa

SEQ ID NO: 538050 - RNA, 22 nt, Human
uuagaaaucugcugccaugcaa

SEQ ID NO: 538051 - RNA, 22 nt, Human
ugcccaaguccuccaccgaggu

SEQ ID NO: 538052 - RNA, 22 nt, Human
uuuccucuuccgagggggaggc

SEQ ID NO: 538053 - RNA, 22 nt, Human
acuuaguauuuuucagcuuuga

SEQ ID NO: 538054 - RNA, 22 nt, Human
aaauauaauuucugccucaaua

SEQ ID NO: 538055 - RNA, 22 nt, Human
uaaacagagagugcaguuauag

SEQ ID NO: 538056 - RNA, 22 nt, Human
uuuucuguauuauugugcuuca

SEQ ID NO: 538057 - RNA, 22 nt, Human
uggcucaggagggaucuuugcu

SEQ ID NO: 538058 - RNA, 22 nt, Human
gagcugaggcucaggcuggcgu

SEQ ID NO: 538059 - RNA, 22 nt, Human
cuuguagaauugaaauggucuc

SEQ ID NO: 538060 - RNA, 22 nt, Human
aaguuacaguuauuauuuaaaa

SEQ ID NO: 538061 - RNA, 22 nt, Human
uccuucaaagcuccuagugagc

SEQ ID NO: 538062 - RNA, 22 nt, Human
ugcuuuauugcaucaguguggg

SEQ ID NO: 538063 - RNA, 22 nt, Human
caaguuauuucauuggaacaau

SEQ ID NO: 538064 - RNA, 22 nt, Human
uguuuacagggugauuuuaccu

SEQ ID NO: 538065 - RNA, 19 nt, Human
uagucuuuauucuuaauuu

SEQ ID NO: 538066 - RNA, 22 nt, Human
uacacagaagccagaaggccug

SEQ ID NO: 538067 - RNA, 22 nt, Human
ucacauuuuaguaccaugauuu

SEQ ID NO: 538068 - RNA, 22 nt, Human
ugaagcaggguggccagauugu

SEQ ID NO: 538069 - RNA, 22 nt, Human
aagauuucugcuccugagagaa

SEQ ID NO: 538070 - RNA, 22 nt, Human
cucugcccgugccuuucccagu

SEQ ID NO: 538071 - RNA, 22 nt, Human
uuucaguggguuuauuucaugu

SEQ ID NO: 538072 - RNA, 22 nt, Human
gagaugcugccugauuuauuca

SEQ ID NO: 538073 - RNA, 22 nt, Human
aggagccagcguuccucaggau

SEQ ID NO: 538074 - RNA, 22 nt, Human
cgggaaaguuccacagauggau

SEQ ID NO: 538075 - RNA, 22 nt, Human
cuccagggaugagacagaguag

SEQ ID NO: 538076 - RNA, 20 nt, Human
ugcagaagaacguucugguu

SEQ ID NO: 538077 - RNA, 22 nt, Human
ccucugagccugugugcggcac

SEQ ID NO: 538078 - RNA, 23 nt, Human
gccugggacugguagugugaccu

SEQ ID NO: 538079 - RNA, 22 nt, Human
cugcagugaaaucaggaagcaa

SEQ ID NO: 538080 - RNA, 22 nt, Human
uggcugagggggcucugcucag

SEQ ID NO: 538081 - RNA, 22 nt, Human
agcaggugcguuacuucacucu

SEQ ID NO: 538082 - RNA, 22 nt, Human
ggcccugugguuuugcaaaguc

SEQ ID NO: 538083 - RNA, 22 nt, Human
gcuaccugagcaagagcuucaa

SEQ ID NO: 538084 - RNA, 22 nt, Human
augaggcagucuggccugaggg

SEQ ID NO: 538085 - RNA, 22 nt, Human
uggaggcaucagagugcuuggc

SEQ ID NO: 538086 - RNA, 22 nt, Human
gaggcagcuuggggcugugggu

SEQ ID NO: 538087 - RNA, 22 nt, Human
ugugaaaggagccauagacagu

SEQ ID NO: 538088 - RNA, 22 nt, Human
uccuucaagaugccacagcuuu

SEQ ID NO: 538089 - RNA, 22 nt, Human
uuauuaaugaguacaaguuauu

SEQ ID NO: 538090 - RNA, 22 nt, Human
acacauuucucuuuuuguaagu

SEQ ID NO: 538091 - RNA, 22 nt, Human
cucacugugccuuuucccaaac

SEQ ID NO: 538092 - RNA, 22 nt, Human
cauacauuuugcauauuuacca

SEQ ID NO: 538093 - RNA, 22 nt, Human
ugcugggcaucguaggagguac

SEQ ID NO: 538094 - RNA, 22 nt, Human
cagucaggcugcgcuucucuga

SEQ ID NO: 538095 - RNA, 22 nt, Human
uugcucugacuggagugcagug

SEQ ID NO: 538096 - RNA, 22 nt, Human
ugggcagagaucuggaucaaac

SEQ ID NO: 538097 - RNA, 22 nt, Human
acagagucugacagguaggcgc

SEQ ID NO: 538098 - RNA, 22 nt, Human
gaggcucaacccacagggguug

SEQ ID NO: 538099 - RNA, 22 nt, Human
ucugggugaugaaaugcacugu

SEQ ID NO: 538100 - RNA, 22 nt, Human
ucugagaguccaucuccaagcc

SEQ ID NO: 538101 - RNA, 22 nt, Human
uuuaauuuuccugguaggccug

SEQ ID NO: 538102 - RNA, 22 nt, Human
gugaaaucugaggcccaugaug

SEQ ID NO: 538103 - RNA, 22 nt, Human
guagggacccacagucuauauu

SEQ ID NO: 538104 - RNA, 22 nt, Human
guggagcaggacuagcugagaa

SEQ ID NO: 538105 - RNA, 22 nt, Human
aggggccuggcacugagcuggc

SEQ ID NO: 538106 - RNA, 22 nt, Human
aggaaagguucagugauugaaa

SEQ ID NO: 538107 - RNA, 22 nt, Human
uuuccuaacacaaugcaugaga

SEQ ID NO: 538108 - RNA, 22 nt, Human
caggguccaucuuucaucacug

SEQ ID NO: 538109 - RNA, 22 nt, Human
ucaagcagagucaaaaguacca

SEQ ID NO: 538110 - RNA, 22 nt, Human
cagagugaaaacugagcucaaa

SEQ ID NO: 538111 - RNA, 20 nt, Human
ucuggcucuuugcuccuccc

SEQ ID NO: 538112 - RNA, 22 nt, Human
cuggagcugucuucacaggccu

SEQ ID NO: 538113 - RNA, 22 nt, Human
gucugcccuuggccugggacuu

SEQ ID NO: 538114 - RNA, 20 nt, Human
gcaugaggaaucauugcagc

SEQ ID NO: 538115 - RNA, 22 nt, Human
acaaaugucuacauugagaaua

SEQ ID NO: 538116 - RNA, 22 nt, Human
ucucuuaaaggucuucagcuga

SEQ ID NO: 538117 - RNA, 22 nt, Human
uaaaggcucguauuguugugug

SEQ ID NO: 538118 - RNA, 22 nt, Human
cugacacacugagcauuugaua

SEQ ID NO: 538119 - RNA, 22 nt, Human
agcaggugaucgcgugugcucc

SEQ ID NO: 538120 - RNA, 20 nt, Human
cacaggaaagcuacucaguu

SEQ ID NO: 538121 - RNA, 22 nt, Human
aacuucagggacagaaaagagc

SEQ ID NO: 538122 - RNA, 22 nt, Human
cacacaugaaucccuaguaccu

SEQ ID NO: 538123 - RNA, 22 nt, Human
ccaaggcacacucugcaagguu

SEQ ID NO: 538124 - RNA, 22 nt, Human
ugggggugugccagggaccucc

SEQ ID NO: 538125 - RNA, 22 nt, Human
cuggaagguucuuugugugccu

SEQ ID NO: 538126 - RNA, 22 nt, Human
uuguggcagaccaugagucuaa

SEQ ID NO: 538127 - RNA, 22 nt, Human
caaggccaagucucugugaaga

SEQ ID NO: 538128 - RNA, 22 nt, Human
caguuuuaugucgaauguauac

SEQ ID NO: 538129 - RNA, 22 nt, Human
acauuguagacuuuucauaugu

SEQ ID NO: 538130 - RNA, 22 nt, Human
uggcucagcgguggcagcagac

SEQ ID NO: 538131 - RNA, 22 nt, Human
ucaaauaccagcuuuuccagaa

SEQ ID NO: 538132 - RNA, 22 nt, Human
uggcuucuuagaccaguggccu

SEQ ID NO: 538133 - RNA, 22 nt, Human
auggaaagcuaagccauuuacc

SEQ ID NO: 538134 - RNA, 22 nt, Human
aaguuugugguuauacuugauu

SEQ ID NO: 538135 - RNA, 22 nt, Human
augggaagguuuugagagcggg

SEQ ID NO: 538136 - RNA, 22 nt, Human
cagggaguuuuuguuccucuag

SEQ ID NO: 538137 - RNA, 22 nt, Human
ugaaaucaauaauuggugauug

SEQ ID NO: 538138 - RNA, 22 nt, Human
agguauauauucugguccuuau

SEQ ID NO: 538139 - RNA, 22 nt, Human
ggguaccaagcugcuugggggc

SEQ ID NO: 538140 - RNA, 22 nt, Human
ccugggucacucaggcaggcgg

SEQ ID NO: 538141 - RNA, 22 nt, Human
accucuggccuucaggcaucau

SEQ ID NO: 538142 - RNA, 22 nt, Human
ucacaagacagaaaacauuuag

SEQ ID NO: 538143 - RNA, 22 nt, Human
aacaugaaaagcccagagaggu

SEQ ID NO: 538144 - RNA, 22 nt, Human
cugcccugcuuguuuccagugg

SEQ ID NO: 538145 - RNA, 22 nt, Human
caauuucagucucagagaguuc

SEQ ID NO: 538146 - RNA, 22 nt, Human
gcugagaguccaggaaaacauc

SEQ ID NO: 538147 - RNA, 22 nt, Human
auaauguagguauguguauuua

SEQ ID NO: 538148 - RNA, 22 nt, Human
uccugagaaggcacagcuugca

SEQ ID NO: 538149 - RNA, 22 nt, Human
aaaggaagugccacucuucuuc

SEQ ID NO: 538150 - RNA, 22 nt, Human
acaaguggguccuacauaaagc

SEQ ID NO: 538151 - RNA, 23 nt, Human
ucuguucaaggcuuucuccuuga

SEQ ID NO: 538152 - RNA, 22 nt, Human
guuaaauucgaugauggauaaa

SEQ ID NO: 538153 - RNA, 22 nt, Human
cuggcucaguucuugguuuuca

SEQ ID NO: 538154 - RNA, 22 nt, Human
aguaaugugccugaaauacuug

SEQ ID NO: 538155 - RNA, 22 nt, Human
uggcucaggccuacgacgccuu

SEQ ID NO: 538156 - RNA, 22 nt, Human
agggucaggagacacuggcaac

SEQ ID NO: 538157 - RNA, 22 nt, Human
cagagacccuucucaguggcca

SEQ ID NO: 538158 - RNA, 22 nt, Human
ucaaagcaugguuuugaaagac

SEQ ID NO: 538159 - RNA, 22 nt, Human
ucugccuuuucacugccacuaa

SEQ ID NO: 538160 - RNA, 22 nt, Human
uauuguacauuuccaaauugcu

SEQ ID NO: 538161 - RNA, 22 nt, Human
aucuguagucacugcacagcuc

SEQ ID NO: 538162 - RNA, 22 nt, Human
uauguucaucuggugcaucagu

SEQ ID NO: 538163 - RNA, 22 nt, Human
guccucugauuucuagguauau

SEQ ID NO: 538164 - RNA, 22 nt, Human
ugcagguggacacgggagacgg

SEQ ID NO: 538165 - RNA, 22 nt, Human
cuuucaaagaguaggagguuuu

SEQ ID NO: 538166 - RNA, 22 nt, Human
uggcccuguguccugcugccag

SEQ ID NO: 538167 - RNA, 22 nt, Human
agagccccugguggagugagaa

SEQ ID NO: 538168 - RNA, 22 nt, Human
gcagggacgcagcacucuccgu

SEQ ID NO: 538169 - RNA, 22 nt, Human
ucuuuccuaggugauaugcaau

SEQ ID NO: 538170 - RNA, 22 nt, Human
ggagcacccugcucagccaagc

SEQ ID NO: 538171 - RNA, 22 nt, Human
ggcuccagaggccuuaccugca

SEQ ID NO: 538172 - RNA, 22 nt, Human
gcugcagcagcugcaggguugu

SEQ ID NO: 538173 - RNA, 22 nt, Human
guugaguggguuaggaugcuga

SEQ ID NO: 538174 - RNA, 22 nt, Human
ugcuucuggaguaacaggguga

SEQ ID NO: 538175 - RNA, 22 nt, Human
gccugcagccagggaguucucu

SEQ ID NO: 538176 - RNA, 22 nt, Human
ucccucugguccucgguggaga

SEQ ID NO: 538177 - RNA, 22 nt, Human
aagggcagcugacagaugcuua

SEQ ID NO: 538178 - RNA, 22 nt, Human
acacacaugcaugcuugccauu

SEQ ID NO: 538179 - RNA, 22 nt, Human
uauagacuagcagcagaauuua

SEQ ID NO: 538180 - RNA, 22 nt, Human
gacaggggucccucugggcugu

SEQ ID NO: 538181 - RNA, 19 nt, Human
cacauuuugagucugagau

SEQ ID NO: 538182 - RNA, 22 nt, Human
cauaaacucucuguaccaauau

SEQ ID NO: 538183 - RNA, 22 nt, Human
cgcaccacugaauuccagccug

SEQ ID NO: 538184 - RNA, 22 nt, Human
aacagugagaagguggacagga

SEQ ID NO: 538185 - RNA, 22 nt, Human
gcagggcacaaggacgcacagg

SEQ ID NO: 538186 - RNA, 22 nt, Human
uggccugguaccacauagauuu

SEQ ID NO: 538187 - RNA, 22 nt, Human
gguggcagugcuugcgggucua

SEQ ID NO: 538188 - RNA, 22 nt, Human
ucucaggguuuguacaagugua

SEQ ID NO: 538189 - RNA, 22 nt, Human
uaauuucuagggacuaaggugc

SEQ ID NO: 538190 - RNA, 22 nt, Human
cauacauaugcauguguguaua

SEQ ID NO: 538191 - RNA, 21 nt, Human
ucagguggcagaguguuuaug

SEQ ID NO: 538192 - RNA, 22 nt, Human
ugcccacauggugccauggcca

SEQ ID NO: 538193 - RNA, 22 nt, Human
gcuccacuugcagcuaggcuug

SEQ ID NO: 538194 - RNA, 22 nt, Human
uuucuguaauuaaaagggcagg

SEQ ID NO: 538195 - RNA, 22 nt, Human
cacuguccaauagauacauaau

SEQ ID NO: 538196 - RNA, 22 nt, Human
uucacauuggugauauguuucu

SEQ ID NO: 538197 - RNA, 22 nt, Human
ucuacauuuuaacaagaugccc

SEQ ID NO: 538198 - RNA, 22 nt, Human
cagagcuggagggaacccuggc

SEQ ID NO: 538199 - RNA, 22 nt, Human
cauauuuuaguugcugaacagc

SEQ ID NO: 538200 - RNA, 22 nt, Human
uauuuugacuauuaaaccaaca

SEQ ID NO: 538201 - RNA, 22 nt, Human
uggaguucauccaugacagcuu

SEQ ID NO: 538202 - RNA, 22 nt, Human
ccaugccccaauacaggacacc

SEQ ID NO: 538203 - RNA, 23 nt, Human
gugaagguuucugcauuuauugg

SEQ ID NO: 538204 - RNA, 22 nt, Human
cagcaugguggagcugcucuuu

SEQ ID NO: 538205 - RNA, 22 nt, Human
caagagcucaccggagagcauu

SEQ ID NO: 538206 - RNA, 22 nt, Human
aaggcacugagccagccgucuc

SEQ ID NO: 538207 - RNA, 22 nt, Human
gagcuuggacaccuuggcaggu

SEQ ID NO: 538208 - RNA, 22 nt, Human
ggagaagggacagacucagcuu

SEQ ID NO: 538209 - RNA, 22 nt, Human
ucagaaauagucuuuaaaauga

SEQ ID NO: 538210 - RNA, 22 nt, Human
acaaggcuuauaguugcuuuuu

SEQ ID NO: 538211 - RNA, 22 nt, Human
cuggccacaacuagcccaggac

SEQ ID NO: 538212 - RNA, 22 nt, Human
agggagaagguccaugccuguc

SEQ ID NO: 538213 - RNA, 22 nt, Human
aggggccucgcaggaccgcucc

SEQ ID NO: 538214 - RNA, 23 nt, Human
cucugagacccagguggacacgg

SEQ ID NO: 538215 - RNA, 22 nt, Human
cagggagccuccaaagcuuuca

SEQ ID NO: 538216 - RNA, 22 nt, Human
aacaaaguacuuuucagugcuu

SEQ ID NO: 538217 - RNA, 22 nt, Human
gacauaaaauucaauaauuugu

SEQ ID NO: 538218 - RNA, 22 nt, Human
caggauggucuucauuuggcuc

SEQ ID NO: 538219 - RNA, 22 nt, Human
uaaguggaagguuauaugcuaa

SEQ ID NO: 538220 - RNA, 22 nt, Human
uggcuuccuggacagaugcggu

SEQ ID NO: 538221 - RNA, 19 nt, Human
gccugagccagccaugcaa

SEQ ID NO: 538222 - RNA, 22 nt, Human
cugugagcuggguggccaggac

SEQ ID NO: 538223 - RNA, 22 nt, Human
acaguggagaaggcaugaggcu

SEQ ID NO: 538224 - RNA, 22 nt, Human
ucccagagacaucauuucuccg

SEQ ID NO: 538225 - RNA, 22 nt, Human
cugcucugcagcuuggacuccc

SEQ ID NO: 538226 - RNA, 22 nt, Human
gcagaggaucaggcucuggaaa

SEQ ID NO: 538227 - RNA, 22 nt, Human
ugguccuucguggugcaguucu

SEQ ID NO: 538228 - RNA, 22 nt, Human
cccagaguuggucaggggaccc

SEQ ID NO: 538229 - RNA, 22 nt, Human
ucuugauuuuguuaaaauuaga

SEQ ID NO: 538230 - RNA, 22 nt, Human
uguacagauaucaggagugagg

SEQ ID NO: 538231 - RNA, 22 nt, Human
ggaaacaugccugcuggacagu

SEQ ID NO: 538232 - RNA, 22 nt, Human
ugcugcuguugacggcugucca

SEQ ID NO: 538233 - RNA, 20 nt, Human
accuuucaaaugauucagca

SEQ ID NO: 538234 - RNA, 22 nt, Human
gacaucaauauucugcagggau

SEQ ID NO: 538235 - RNA, 22 nt, Human
aauaucuucuaaggauagaacu

SEQ ID NO: 538236 - RNA, 22 nt, Human
auuacaauaagguuuauuugua

SEQ ID NO: 538237 - RNA, 22 nt, Human
acacaguucaggaucaaauagc

SEQ ID NO: 538238 - RNA, 22 nt, Human
uccauuuuagaagaaaauccac

SEQ ID NO: 538239 - RNA, 22 nt, Human
aaagcaaugcccguucauuauc

SEQ ID NO: 538240 - RNA, 22 nt, Human
aaaauccugcugacucgagaug

SEQ ID NO: 538241 - RNA, 22 nt, Human
aaauuccagaaacucaguauau

SEQ ID NO: 538242 - RNA, 22 nt, Human
uucuuuucuuuaggcauugugu

SEQ ID NO: 538243 - RNA, 22 nt, Human
aggaagaacagauaauggacgc

SEQ ID NO: 538244 - RNA, 22 nt, Human
cucuggagaacgcuauggaucu

SEQ ID NO: 538245 - RNA, 22 nt, Human
ccacagggcacaagggagguug

SEQ ID NO: 538246 - RNA, 22 nt, Human
gagggguguggagccaucaguu

SEQ ID NO: 538247 - RNA, 22 nt, Human
augcaaauuaacauauaguaga

SEQ ID NO: 538248 - RNA, 22 nt, Human
uacagaggguaauugaucaagg

SEQ ID NO: 538249 - RNA, 22 nt, Human
uaagagaacuggauagauagga

SEQ ID NO: 538250 - RNA, 22 nt, Human
uucagcuugaaucuggcuuuga

SEQ ID NO: 538251 - RNA, 22 nt, Human
cugguggagggacaggcuuagc

SEQ ID NO: 538252 - RNA, 22 nt, Human
caggaacccaaugggccaggcc

SEQ ID NO: 538253 - RNA, 22 nt, Human
cugcuggggucagagcacuggg

SEQ ID NO: 538254 - RNA, 22 nt, Human
aagagagaguuccuaggcaaaa

SEQ ID NO: 538255 - RNA, 22 nt, Human
cagagacauccauguuaguugg

SEQ ID NO: 538256 - RNA, 22 nt, Human
uccuggcccuguggccugcagu

SEQ ID NO: 538257 - RNA, 22 nt, Human
uggcagaggagaauuaagauua

SEQ ID NO: 538258 - RNA, 22 nt, Human
cagggcuguuagcugcugcucu

SEQ ID NO: 538259 - RNA, 22 nt, Human
gaacagcccuguuaagucuguu

SEQ ID NO: 538260 - RNA, 22 nt, Human
ggcucaggccuguaauccuagc

SEQ ID NO: 538261 - RNA, 22 nt, Human
cuagggcacuaggacucaugug

SEQ ID NO: 538262 - RNA, 22 nt, Human
ggaggcaggaaagacagguuca

SEQ ID NO: 538263 - RNA, 22 nt, Human
uucaguauguguaaacuacuuu

SEQ ID NO: 538264 - RNA, 22 nt, Human
cugggcacacucugcuccagcu

SEQ ID NO: 538265 - RNA, 22 nt, Human
ugccucgugucugagucuguuc

SEQ ID NO: 538266 - RNA, 22 nt, Human
agaggcaacauggggaacagau

SEQ ID NO: 538267 - RNA, 22 nt, Human
ugugaaaucacaggcuauuuag

SEQ ID NO: 538268 - RNA, 22 nt, Human
cagcagaguuuggcuucuaaug

SEQ ID NO: 538269 - RNA, 22 nt, Human
auucauaacggcaaaugucacc

SEQ ID NO: 538270 - RNA, 22 nt, Human
gcucugagucucagcuaccaca

SEQ ID NO: 538271 - RNA, 22 nt, Human
cugaacucaugauaugcuuuug

SEQ ID NO: 538272 - RNA, 22 nt, Human
agaucauauuguaacuuuauug

SEQ ID NO: 538273 - RNA, 22 nt, Human
cuaaaaacucuacgaugcacag

SEQ ID NO: 538274 - RNA, 22 nt, Human
caggcucagaugcccugcgcug

SEQ ID NO: 538275 - RNA, 22 nt, Human
uaagcaggggucaaguguacaa

SEQ ID NO: 538276 - RNA, 22 nt, Human
ggaaugcacuagacugugaaac

SEQ ID NO: 538277 - RNA, 22 nt, Human
cagcuucucagaaagcugaggu

SEQ ID NO: 538278 - RNA, 22 nt, Human
aggagggcaggcuggcugccua

SEQ ID NO: 538279 - RNA, 22 nt, Human
gcugugugcucacguaguggaa

SEQ ID NO: 538280 - RNA, 20 nt, Human
agaggcuuccuugggaggag

SEQ ID NO: 538281 - RNA, 22 nt, Human
cccuggccuccaggcaguccug

SEQ ID NO: 538282 - RNA, 22 nt, Human
aauauuucuguagcuauguucu

SEQ ID NO: 538283 - RNA, 22 nt, Human
ucaaaggcgguccaggaauaaa

SEQ ID NO: 538284 - RNA, 21 nt, Human
ugguggagugugcugagcaug

SEQ ID NO: 538285 - RNA, 22 nt, Human
uggccaggcagguagaacggcc

SEQ ID NO: 538286 - RNA, 22 nt, Human
ugcacagcugccuccucucugc

SEQ ID NO: 538287 - RNA, 22 nt, Human
aaggcaggaugggaaaagauuu

SEQ ID NO: 538288 - RNA, 22 nt, Human
gcuggcuuccuucugcagcuag

SEQ ID NO: 538289 - RNA, 22 nt, Human
aucuuuagucaggcguggguau

SEQ ID NO: 538290 - RNA, 22 nt, Human
agcccugcgugccaggggacug

SEQ ID NO: 538291 - RNA, 22 nt, Human
acucugccaucccaggugcugu

SEQ ID NO: 538292 - RNA, 22 nt, Human
ggggugggcgugcagggacacc

SEQ ID NO: 538293 - RNA, 22 nt, Human
aaggugucggguuagcucagcc

SEQ ID NO: 538294 - RNA, 22 nt, Human
ccucaguguuaggauaagagaa

SEQ ID NO: 538295 - RNA, 22 nt, Human
cuuguucaguccugacuuccug

SEQ ID NO: 538296 - RNA, 22 nt, Human
ugcaggagaaaguacggagcgu

SEQ ID NO: 538297 - RNA, 22 nt, Human
ucugcaggacugaggccuguuu

SEQ ID NO: 538298 - RNA, 22 nt, Human
ucggagcgucacuggcuggagg

SEQ ID NO: 538299 - RNA, 22 nt, Human
agugaccaacaaugcugagaag

SEQ ID NO: 538300 - RNA, 22 nt, Human
ugggugcuucgucagcucugag

SEQ ID NO: 538301 - RNA, 22 nt, Human
caaggccaugagcagcgagugu

SEQ ID NO: 538302 - RNA, 22 nt, Human
ggccagaggugguacauagcuu

SEQ ID NO: 538303 - RNA, 22 nt, Human
uuuccaauaaagugucauuguu

SEQ ID NO: 538304 - RNA, 22 nt, Human
agggucagagaucggccaugug

SEQ ID NO: 538305 - RNA, 22 nt, Human
aagcuucuuuacaggagagauu

SEQ ID NO: 538306 - RNA, 20 nt, Human
gggcagccucgggagugggu

SEQ ID NO: 538307 - RNA, 22 nt, Human
uaaggccaaacuauuauaguuc

SEQ ID NO: 538308 - RNA, 22 nt, Human
cugagcccaggcgggagcugag

SEQ ID NO: 538309 - RNA, 22 nt, Human
uccuggauucugcccugaaggc

SEQ ID NO: 538310 - RNA, 22 nt, Human
ugcccugccaagacucaguggu

SEQ ID NO: 538311 - RNA, 22 nt, Human
ugaggaaguugaucucaucagu

SEQ ID NO: 538312 - RNA, 22 nt, Human
ccagcuccaggacugggagcug

SEQ ID NO: 538313 - RNA, 22 nt, Human
ggccacuccgcugcuacuggaa

SEQ ID NO: 538314 - RNA, 22 nt, Human
guuuacaugcagaaaaucaaug

SEQ ID NO: 538315 - RNA, 22 nt, Human
auguuuuaaauauguguguaaa

SEQ ID NO: 538316 - RNA, 22 nt, Human
guuauuaaaguauuugauguua

SEQ ID NO: 538317 - RNA, 22 nt, Human
cgggcacacacuugacagguuc

SEQ ID NO: 538318 - RNA, 22 nt, Human
cucugaacucuugggcagcaug

SEQ ID NO: 538319 - RNA, 22 nt, Human
aauacauaauaaguuuugucug

SEQ ID NO: 538320 - RNA, 22 nt, Human
uacuuuggauccuuacaauagc

SEQ ID NO: 538321 - RNA, 22 nt, Human
uucaggauuguguuuuuccuga

SEQ ID NO: 538322 - RNA, 22 nt, Human
ugaacuuucacaagaauaugcu

SEQ ID NO: 538323 - RNA, 22 nt, Human
uguccuguccuuccuggaaguc

SEQ ID NO: 538324 - RNA, 22 nt, Human
agggcugccauuucuggcccaa

SEQ ID NO: 538325 - RNA, 22 nt, Human
acugucaaaagagauuauauua

SEQ ID NO: 538326 - RNA, 22 nt, Human
uuacuuuagaaauagucaucaa

SEQ ID NO: 538327 - RNA, 22 nt, Human
ugaggcaggaguuaaugugcuc

SEQ ID NO: 538328 - RNA, 22 nt, Human
ugcagggcaguggagguugagu

SEQ ID NO: 538329 - RNA, 22 nt, Human
ccucugaggucauggacuuggc

SEQ ID NO: 538330 - RNA, 22 nt, Human
ugcuuccaguuccucaccacau

SEQ ID NO: 538331 - RNA, 22 nt, Human
gccaggcuggccagcaccuucu

SEQ ID NO: 538332 - RNA, 22 nt, Human
ggaggccauaguuugggaguca

SEQ ID NO: 538333 - RNA, 22 nt, Human
uuugagaagauguaauguuaag

SEQ ID NO: 538334 - RNA, 22 nt, Human
uucuccaaguagaagcuaaguu

SEQ ID NO: 538335 - RNA, 21 nt, Human
ucacauuucucauggguaaau

SEQ ID NO: 538336 - RNA, 22 nt, Human
agcagcagggacaaaggaacag

SEQ ID NO: 538337 - RNA, 22 nt, Human
gguuggggcgagcuggaggccc

SEQ ID NO: 538338 - RNA, 19 nt, Human
agcagagcccugaagaucc

SEQ ID NO: 538339 - RNA, 22 nt, Human
ugcuccugcugcaugcaucucc

SEQ ID NO: 538340 - RNA, 22 nt, Human
uggcccugacacgugguacugg

SEQ ID NO: 538341 - RNA, 17 nt, Human
gccugcaggcccgcaga

SEQ ID NO: 538342 - RNA, 22 nt, Human
gcagauggcucagacacugggg

SEQ ID NO: 538343 - RNA, 22 nt, Human
aaucuguucuacucuauucaga

SEQ ID NO: 538344 - RNA, 22 nt, Human
ugugaggaacccggaauguggg

SEQ ID NO: 538345 - RNA, 22 nt, Human
uucuugaaggggauauaaauag

SEQ ID NO: 538346 - RNA, 22 nt, Human
gcuggccacauugugccguccu

SEQ ID NO: 538347 - RNA, 22 nt, Human
uggcagcaauuagcuagagcug

SEQ ID NO: 538348 - RNA, 22 nt, Human
aucaggaagaagaauguguugg

SEQ ID NO: 538349 - RNA, 22 nt, Human
ucaggcacugcuuucugauaug

SEQ ID NO: 538350 - RNA, 21 nt, Human
ugcauaaagaaauacaaauac

SEQ ID NO: 538351 - RNA, 22 nt, Human
aucaaauaaagguaccuagcuu

SEQ ID NO: 538352 - RNA, 20 nt, Human
accaauguuagcuuaguacu

SEQ ID NO: 538353 - RNA, 22 nt, Human
agggcaugugggagaggagccu

SEQ ID NO: 538354 - RNA, 16 nt, Human
cagagaggacagaggc

SEQ ID NO: 538355 - RNA, 22 nt, Human
uuccaguuugcaguugacacua

SEQ ID NO: 538356 - RNA, 22 nt, Human
uaugaagcuuugaaaagcuuac

SEQ ID NO: 538357 - RNA, 22 nt, Human
uuuucauuuacauuagggaaga

SEQ ID NO: 538358 - RNA, 22 nt, Human
acucuucacacaugcugcccuc

SEQ ID NO: 538359 - RNA, 20 nt, Human
ugaagcagccuugauucugu

SEQ ID NO: 538360 - RNA, 19 nt, Human
cuguccuuggcugcacugu

SEQ ID NO: 538361 - RNA, 20 nt, Human
aaguuuucuccaaauacagu

SEQ ID NO: 538362 - RNA, 22 nt, Human
gcagaggcucuuuaaugcuuag

SEQ ID NO: 538363 - RNA, 22 nt, Human
ucuuccucucuaauugaucaga

SEQ ID NO: 538364 - RNA, 22 nt, Human
uuacauaaaaguucacguaggc

SEQ ID NO: 538365 - RNA, 23 nt, Human
aggcuuccuaucuuagagcuggg

SEQ ID NO: 538366 - RNA, 22 nt, Human
cugcuuuggcagaagucagcua

SEQ ID NO: 538367 - RNA, 22 nt, Human
gcaggggaguggcaggcccgga

SEQ ID NO: 538368 - RNA, 22 nt, Human
gaaaauguuagcuucauaguca

SEQ ID NO: 538369 - RNA, 22 nt, Human
aaaguuacacaucuaguaagug

SEQ ID NO: 538370 - RNA, 22 nt, Human
gaguccuucuggcuggcaggau

SEQ ID NO: 538371 - RNA, 22 nt, Human
ugggccuggacaaggccacuag

SEQ ID NO: 538372 - RNA, 22 nt, Human
aggcuguguggaugagucuuac

SEQ ID NO: 538373 - RNA, 17 nt, Human
gccaguugucuuggcau

SEQ ID NO: 538374 - RNA, 20 nt, Human
uccagggcuagggagcucau

SEQ ID NO: 538375 - RNA, 22 nt, Human
agucucuuuugcgaagaguguu

SEQ ID NO: 538376 - RNA, 22 nt, Human
ccaggcucuguuccccgaggag

SEQ ID NO: 538377 - RNA, 21 nt, Human
ucagaacaauuccaugccucc

SEQ ID NO: 538378 - RNA, 22 nt, Human
ugcaauauguugcauuguaugg

SEQ ID NO: 538379 - RNA, 22 nt, Human
acaaaugccauauauaaauucu

SEQ ID NO: 538380 - RNA, 22 nt, Human
acaggugguaaaauggacuguc

SEQ ID NO: 538381 - RNA, 22 nt, Human
ggcuggcaagucagugcugaug

SEQ ID NO: 538382 - RNA, 22 nt, Human
cucccuggaggugagcuggcac

SEQ ID NO: 538383 - RNA, 22 nt, Human
cuaccggguucucagccaggca

SEQ ID NO: 538384 - RNA, 22 nt, Human
ugggcucugaagucagucugcu

SEQ ID NO: 538385 - RNA, 22 nt, Human
agugaaaugauaguguaaauac

SEQ ID NO: 538386 - RNA, 22 nt, Human
cuuuccaacucuagugaaauuu

SEQ ID NO: 538387 - RNA, 22 nt, Human
aaguggacuaauacaaggacua

SEQ ID NO: 538388 - RNA, 22 nt, Human
agagugaaaagcuagagcagua

SEQ ID NO: 538389 - RNA, 22 nt, Human
gcugggagccguaccugucacg

SEQ ID NO: 538390 - RNA, 22 nt, Human
ugaggcagugcugggaagccug

SEQ ID NO: 538391 - RNA, 22 nt, Human
aggaagagcauucacaugguag

SEQ ID NO: 538392 - RNA, 22 nt, Human
caugcagugaugcacugcauca

SEQ ID NO: 538393 - RNA, 22 nt, Human
aaacauuuuucuucaucauccu

SEQ ID NO: 538394 - RNA, 22 nt, Human
uuuuuaaugcagucugagacau

SEQ ID NO: 538395 - RNA, 22 nt, Human
aauuucaccugcacuacaucgc

SEQ ID NO: 538396 - RNA, 22 nt, Human
uaaaaccauaaggcuggaagga

SEQ ID NO: 538397 - RNA, 22 nt, Human
gaggagaaauuauccuuggugu

SEQ ID NO: 538398 - RNA, 22 nt, Human
auacuuuggggguuaguguaga

SEQ ID NO: 538399 - RNA, 22 nt, Human
cccucaguuuuccagugugggc

SEQ ID NO: 538400 - RNA, 22 nt, Human
ccugagugccaugagagcaccc

SEQ ID NO: 538401 - RNA, 22 nt, Human
accaggcaugauguggagcaca

SEQ ID NO: 538402 - RNA, 22 nt, Human
ggcuuuaugcacagcagauggu

SEQ ID NO: 538403 - RNA, 22 nt, Human
gggagccacagugaggugcaug

SEQ ID NO: 538404 - RNA, 22 nt, Human
aguuuguaaccuaagauucagg

SEQ ID NO: 538405 - RNA, 22 nt, Human
cuucugcaggagucaacucugg

SEQ ID NO: 538406 - RNA, 22 nt, Human
gggccccuuguaucucuggcuc

SEQ ID NO: 538407 - RNA, 22 nt, Human
ugugcaguuucuauguugucca

SEQ ID NO: 538408 - RNA, 21 nt, Human
gucagcugugugugaggaccc

SEQ ID NO: 538409 - RNA, 22 nt, Human
acaaauguggacauggauaaug

SEQ ID NO: 538410 - RNA, 20 nt, Human
uucaaaguguaugauaugca

SEQ ID NO: 538411 - RNA, 22 nt, Human
agccaucauuucugucacuggc

SEQ ID NO: 538412 - RNA, 22 nt, Human
caccaggcugaaccagagggga

SEQ ID NO: 538413 - RNA, 22 nt, Human
uccuuggcuuucuggagcuucu

SEQ ID NO: 538414 - RNA, 22 nt, Human
acauuucuuuucaucucuauau

SEQ ID NO: 538415 - RNA, 22 nt, Human
agcagcuggggccugugacgau

SEQ ID NO: 538416 - RNA, 22 nt, Human
guggccugccagcagauggcgc

SEQ ID NO: 538417 - RNA, 22 nt, Human
agcugggcgcaguggcugguga

SEQ ID NO: 538418 - RNA, 22 nt, Human
agagcugggacuuggacucaau

SEQ ID NO: 538419 - RNA, 22 nt, Human
acagggucauuuuaugaucugu

SEQ ID NO: 538420 - RNA, 22 nt, Human
cuucagcugcaguuauguuuag

SEQ ID NO: 538421 - RNA, 22 nt, Human
guggccaggacauugccaggca

SEQ ID NO: 538422 - RNA, 22 nt, Human
acacaggggaaaguggagcuga

SEQ ID NO: 538423 - RNA, 22 nt, Human
cuucuguagccaguaacauaua

SEQ ID NO: 538424 - RNA, 22 nt, Human
ugacaccacaacuagccauuga

SEQ ID NO: 538425 - RNA, 22 nt, Human
acagagcugggugcccccugga

SEQ ID NO: 538426 - RNA, 22 nt, Human
gcuguggccuggcgcagagcug

SEQ ID NO: 538427 - RNA, 22 nt, Human
gaucuuuacuacugccuucucu

SEQ ID NO: 538428 - RNA, 22 nt, Human
gguccagggaacuuugaaggau

SEQ ID NO: 538429 - RNA, 20 nt, Human
cugagcccccagccugcagg

SEQ ID NO: 538430 - RNA, 19 nt, Human
ccagcagguucauuucagg

SEQ ID NO: 538431 - RNA, 22 nt, Human
uagaaacauauaggauggcagg

SEQ ID NO: 538432 - RNA, 22 nt, Human
cuuggccagacagggagcucca

SEQ ID NO: 538433 - RNA, 22 nt, Human
augccagacauuaacgacuaug

SEQ ID NO: 538434 - RNA, 22 nt, Human
gcugccugaucauacaccaggg

SEQ ID NO: 538435 - RNA, 22 nt, Human
gcagggcugcugaaacuuguuu

SEQ ID NO: 538436 - RNA, 22 nt, Human
gcucuggagauggagccuugag

SEQ ID NO: 538437 - RNA, 22 nt, Human
ucacagcuuucagauuguuccc

SEQ ID NO: 538438 - RNA, 22 nt, Human
aucuguggcgcaaacaaaggcu

SEQ ID NO: 538439 - RNA, 22 nt, Human
cacagacccagaagggaugaag

SEQ ID NO: 538440 - RNA, 22 nt, Human
caggcagcugcuggguucagcc

SEQ ID NO: 538441 - RNA, 22 nt, Human
cagcuggaggagcagcuuccag

SEQ ID NO: 538442 - RNA, 22 nt, Human
aacacuuuccugccuuucugau

SEQ ID NO: 538443 - RNA, 22 nt, Human
ucagguggcuucggggaguggc

SEQ ID NO: 538444 - RNA, 22 nt, Human
ucagggaaacagguuuucccuu

SEQ ID NO: 538445 - RNA, 22 nt, Human
aaugauuggcacuagauacaca

SEQ ID NO: 538446 - RNA, 22 nt, Human
caucuucagguucauggucaua

SEQ ID NO: 538447 - RNA, 23 nt, Human
agucuucauuguauuuccagacc

SEQ ID NO: 538448 - RNA, 22 nt, Human
ucucauucauacccuacaugcu

SEQ ID NO: 538449 - RNA, 22 nt, Human
ggguggaguagaaagaugaauu

SEQ ID NO: 538450 - RNA, 22 nt, Human
gagguggcuggcucagagccag

SEQ ID NO: 538451 - RNA, 21 nt, Human
ccaggcagagcugugaguucu

SEQ ID NO: 538452 - RNA, 22 nt, Human
uauucuuacucucgacugcauu

SEQ ID NO: 538453 - RNA, 22 nt, Human
uaacagaaauaguaggugaggg

SEQ ID NO: 538454 - RNA, 22 nt, Human
ucacugaauuucaagcuagugg

SEQ ID NO: 538455 - RNA, 19 nt, Human
cugggccugcaugguuguu

SEQ ID NO: 538456 - RNA, 22 nt, Human
gcagggacaucuucagaucacu

SEQ ID NO: 538457 - RNA, 22 nt, Human
aaauuuuaaggcuggaacuuaa

SEQ ID NO: 538458 - RNA, 23 nt, Human
gcugucugucaucucugcgggag

SEQ ID NO: 538459 - RNA, 23 nt, Human
agucucagcuggaaacauguguc

SEQ ID NO: 538460 - RNA, 22 nt, Human
gggcuggcucugucuagaaagg

SEQ ID NO: 538461 - RNA, 22 nt, Human
aaguguuaaaagauuaaaugcu

SEQ ID NO: 538462 - RNA, 22 nt, Human
uccugucugcucacagagcugg

SEQ ID NO: 538463 - RNA, 22 nt, Human
aggucaagaguaaauuugggua

SEQ ID NO: 538464 - RNA, 22 nt, Human
aggcaguuguagagagggcucu

SEQ ID NO: 538465 - RNA, 22 nt, Human
gucauugcaguggcaaaucaca

SEQ ID NO: 538466 - RNA, 22 nt, Human
aggggagccagggcugcgaguu

SEQ ID NO: 538467 - RNA, 20 nt, Human
agcccaggccugugugaguc

SEQ ID NO: 538468 - RNA, 22 nt, Human
ugggcucucaaagugcggcuug

SEQ ID NO: 538469 - RNA, 22 nt, Human
ccagagucaggagcucauguga

SEQ ID NO: 538470 - RNA, 22 nt, Human
ugacacaggcagcucccagcac

SEQ ID NO: 538471 - RNA, 23 nt, Human
uacauuguggauggaguccuggg

SEQ ID NO: 538472 - RNA, 21 nt, Human
gcacagggacagaucaucaca

SEQ ID NO: 538473 - RNA, 22 nt, Human
gcagagugaagcaguauggaaa

SEQ ID NO: 538474 - RNA, 22 nt, Human
ugcuuucaugaagucuauagag

SEQ ID NO: 538475 - RNA, 22 nt, Human
uucuguauguacauauguguau

SEQ ID NO: 538476 - RNA, 22 nt, Human
aauguuuggacuggaagguccc

SEQ ID NO: 538477 - RNA, 20 nt, Human
cagaaagaagguagauuuuu

SEQ ID NO: 538478 - RNA, 22 nt, Human
gcagaggauagcauaugaaccu

SEQ ID NO: 538479 - RNA, 22 nt, Human
uuacaaacugucauauaguauu

SEQ ID NO: 538480 - RNA, 22 nt, Human
auuguaaaguacuguguacaau

SEQ ID NO: 538481 - RNA, 22 nt, Human
agaaaucagaacccugaaguuc

SEQ ID NO: 538482 - RNA, 22 nt, Human
uggccucucuaccaggcagccu

SEQ ID NO: 538483 - RNA, 22 nt, Human
aaucuuuaaggacucagucucu

SEQ ID NO: 538484 - RNA, 22 nt, Human
agagccagguguagucucggag

SEQ ID NO: 538485 - RNA, 22 nt, Human
gucaggaugggcagccaaacua

SEQ ID NO: 538486 - RNA, 22 nt, Human
agcacagggcccagccuaggcc

SEQ ID NO: 538487 - RNA, 22 nt, Human
ucacaugcucaccuaagccaca

SEQ ID NO: 538488 - RNA, 22 nt, Human
ugcaagagacagacaugacuca

SEQ ID NO: 538489 - RNA, 22 nt, Human
uguaaacagccccauggagagc

SEQ ID NO: 538490 - RNA, 22 nt, Human
agcaguuaugugucucuugacu

SEQ ID NO: 538491 - RNA, 22 nt, Human
gccuaauaacuagcuguguaac

SEQ ID NO: 538492 - RNA, 22 nt, Human
uccucccugcacucagugaagu

SEQ ID NO: 538493 - RNA, 22 nt, Human
uccucaggucaaagcaggagaa

SEQ ID NO: 538494 - RNA, 20 nt, Human
cagagacccaggcuucagcu

SEQ ID NO: 538495 - RNA, 22 nt, Human
aaaauugucgaacaguaguaac

SEQ ID NO: 538496 - RNA, 22 nt, Human
ucuccaagcagggcugcaaggc

SEQ ID NO: 538497 - RNA, 22 nt, Human
ugcaucaaccuaauaucagcuc

SEQ ID NO: 538498 - RNA, 22 nt, Human
aaggccaggagacuuggaguca

SEQ ID NO: 538499 - RNA, 22 nt, Human
aggccuguuucuuguccagcuc

SEQ ID NO: 538500 - RNA, 22 nt, Human
agcaggagaacacuguggcucu

SEQ ID NO: 538501 - RNA, 20 nt, Human
ugcuugucaugcacucaggc

SEQ ID NO: 538502 - RNA, 22 nt, Human
cccuggaggucagaggccuggg

SEQ ID NO: 538503 - RNA, 22 nt, Human
cccagcuccgagcuccgagccg

SEQ ID NO: 538504 - RNA, 18 nt, Human
ccauuucaugauuauuac

SEQ ID NO: 538505 - RNA, 22 nt, Human
uucaauuugugcuaaggcaccg

SEQ ID NO: 538506 - RNA, 22 nt, Human
gccuggagagcacugugcgcuu

SEQ ID NO: 538507 - RNA, 22 nt, Human
ucagaagcaaacaucacucuag

SEQ ID NO: 538508 - RNA, 22 nt, Human
uauguagaagcugcucaaagaa

SEQ ID NO: 538509 - RNA, 22 nt, Human
aaaugcacagaggccagagagg

SEQ ID NO: 538510 - RNA, 22 nt, Human
uacagaaaaacuggcauugaag

SEQ ID NO: 538511 - RNA, 22 nt, Human
caguccuggggaccaggcugag

SEQ ID NO: 538512 - RNA, 22 nt, Human
gagaaacaggaauugagucgcu

SEQ ID NO: 538513 - RNA, 22 nt, Human
cucuggaguggguggccgggag

SEQ ID NO: 538514 - RNA, 22 nt, Human
agccuggcacugaggcagggcg

SEQ ID NO: 538515 - RNA, 22 nt, Human
gggcucagggacacaugugugu

SEQ ID NO: 538516 - RNA, 22 nt, Human
cauggcagugauucagccuuug

SEQ ID NO: 538517 - RNA, 19 nt, Human
cucuuacagaauagacaca

SEQ ID NO: 538518 - RNA, 23 nt, Human
ccucccaccuauuucacuuucuu

SEQ ID NO: 538519 - RNA, 22 nt, Human
ugcauuugucuugucucaugaa

SEQ ID NO: 538520 - RNA, 19 nt, Human
ugggcuuccccagggcaga

SEQ ID NO: 538521 - RNA, 22 nt, Human
agccacagucugaugccugaga

SEQ ID NO: 538522 - RNA, 22 nt, Human
uaaauaugcauguauccuuauc

SEQ ID NO: 538523 - RNA, 22 nt, Human
ucuccucaccaccagcagcaga

SEQ ID NO: 538524 - RNA, 22 nt, Human
caggaagagaacauggaggcug

SEQ ID NO: 538525 - RNA, 22 nt, Human
cauucucaauaguagaugagua

SEQ ID NO: 538526 - RNA, 22 nt, Human
agaaauguuacaguuguuauuu

SEQ ID NO: 538527 - RNA, 22 nt, Human
gggcacagucugcagcccccca

SEQ ID NO: 538528 - RNA, 22 nt, Human
caucuuaaaaugugucauaacu

SEQ ID NO: 538529 - RNA, 22 nt, Human
aaugccaguguguugauuccag

SEQ ID NO: 538530 - RNA, 22 nt, Human
ggcaguggguggaucucaggga

SEQ ID NO: 538531 - RNA, 22 nt, Human
caccugagugucaguauucuca

SEQ ID NO: 538532 - RNA, 22 nt, Human
aggcccagagcaggaaaggguu

SEQ ID NO: 538533 - RNA, 22 nt, Human
ccagauggugccugucagaagg

SEQ ID NO: 538534 - RNA, 22 nt, Human
aauuagggagccaucauaaggu

SEQ ID NO: 538535 - RNA, 22 nt, Human
aaauguguuccuuugcuacaga

SEQ ID NO: 538536 - RNA, 22 nt, Human
ggugaggaauuggggacugacc

SEQ ID NO: 538537 - RNA, 22 nt, Human
ggcaggugaccuggccucccag

SEQ ID NO: 538538 - RNA, 16 nt, Human
aggcagagauuuaccc

SEQ ID NO: 538539 - RNA, 22 nt, Human
aaacuuuuuuagguucauaggc

SEQ ID NO: 538540 - RNA, 22 nt, Human
acagaaauuagcagugaguuua

SEQ ID NO: 538541 - RNA, 22 nt, Human
acuguucaaguuuuaugcugga

SEQ ID NO: 538542 - RNA, 22 nt, Human
uaaagugucugccucagcucag

SEQ ID NO: 538543 - RNA, 22 nt, Human
uaugagaaaggagaaugacuuu

SEQ ID NO: 538544 - RNA, 22 nt, Human
uuuauucugugcuacaugaaga

SEQ ID NO: 538545 - RNA, 22 nt, Human
uuuucuaaaauauccaggacag

SEQ ID NO: 538546 - RNA, 22 nt, Human
cuguuuuaauggagacugaugu

SEQ ID NO: 538547 - RNA, 22 nt, Human
ucuguaaucagaguagcagaua

SEQ ID NO: 538548 - RNA, 22 nt, Human
ccaggcuccgcauagaccccac

SEQ ID NO: 538549 - RNA, 22 nt, Human
caauacuauucggaccaucucu

SEQ ID NO: 538550 - RNA, 20 nt, Human
ggcagcucacuacuuucugu

SEQ ID NO: 538551 - RNA, 22 nt, Human
uuucagaaaacuuaucaucagu

SEQ ID NO: 538552 - RNA, 22 nt, Human
ccugaggcccuggcugugcuga

SEQ ID NO: 538553 - RNA, 22 nt, Human
gcccaugcacuuucugugaugg

SEQ ID NO: 538554 - RNA, 22 nt, Human
aauuagggaggacaaagguaca

SEQ ID NO: 538555 - RNA, 22 nt, Human
caggaagauuagaccaagagcu

SEQ ID NO: 538556 - RNA, 22 nt, Human
ugauacagucagcucacaauug

SEQ ID NO: 538557 - RNA, 22 nt, Human
cuauuuguacagcauuaguaau

SEQ ID NO: 538558 - RNA, 22 nt, Human
gcuggagcugcagccugggccu

SEQ ID NO: 538559 - RNA, 22 nt, Human
aaaucagacacagugaaaguua

SEQ ID NO: 538560 - RNA, 22 nt, Human
uuuuauguaauccuuacugucg

SEQ ID NO: 538561 - RNA, 22 nt, Human
uagggcucagcucuagcuccug

SEQ ID NO: 538562 - RNA, 22 nt, Human
cugugggccuagucuggccuag

SEQ ID NO: 538563 - RNA, 22 nt, Human
cuggcaggcggcagagcccagg

SEQ ID NO: 538564 - RNA, 22 nt, Human
ugcugggggugucucaccaggc

SEQ ID NO: 538565 - RNA, 22 nt, Human
cagaacagacuuaacagggcug

SEQ ID NO: 538566 - RNA, 22 nt, Human
ggccugaggcaauagucagaca

SEQ ID NO: 538567 - RNA, 22 nt, Human
gaaaggaaauauucuaagcacu

SEQ ID NO: 538568 - RNA, 22 nt, Human
uuggaacauccaggacagauau

SEQ ID NO: 538569 - RNA, 22 nt, Human
agaggcacaaacuggaaaggac

SEQ ID NO: 538570 - RNA, 22 nt, Human
gccugagacagugugguccaau

SEQ ID NO: 538571 - RNA, 22 nt, Human
gccauuaaugugaaggaaggaa

SEQ ID NO: 538572 - RNA, 22 nt, Human
uuagauaauguagagauaugag

SEQ ID NO: 538573 - RNA, 22 nt, Human
caggcugagcucuggccugggc

SEQ ID NO: 538574 - RNA, 22 nt, Human
ccuugcugaccaucaccuuuga

SEQ ID NO: 538575 - RNA, 22 nt, Human
aaaugucuaucuggcauauucc

SEQ ID NO: 538576 - RNA, 22 nt, Human
ccagugacuggcuuucuggugu

SEQ ID NO: 538577 - RNA, 22 nt, Human
ugucaaagccugaaucacauag

SEQ ID NO: 538578 - RNA, 22 nt, Human
ucaguuuugaaaacauugaaug

SEQ ID NO: 538579 - RNA, 22 nt, Human
ugaaacacuuucaauuacauau

SEQ ID NO: 538580 - RNA, 22 nt, Human
ccagagcugcauccagcagguu

SEQ ID NO: 538581 - RNA, 22 nt, Human
uuguaauuugcaaauguauugu

SEQ ID NO: 538582 - RNA, 22 nt, Human
agagucugccuuuuucuccugc

SEQ ID NO: 538583 - RNA, 22 nt, Human
ugcagggcuacaggacuacaac

SEQ ID NO: 538584 - RNA, 18 nt, Human
gcuuuuuagugcaucuuc

SEQ ID NO: 538585 - RNA, 22 nt, Human
auuucucacugagcagauaaaa

SEQ ID NO: 538586 - RNA, 22 nt, Human
ccagcuggaacggcagcccagc

SEQ ID NO: 538587 - RNA, 22 nt, Human
ccugcaggcugcaggccaguuc

SEQ ID NO: 538588 - RNA, 22 nt, Human
agccagggugggugaaugcuau

SEQ ID NO: 538589 - RNA, 22 nt, Human
uggcuuccgccgcgggccucgg

SEQ ID NO: 538590 - RNA, 22 nt, Human
ucugaggcuaagagacagaggc

SEQ ID NO: 538591 - RNA, 22 nt, Human
uaggaaaagcacaggauguucu

SEQ ID NO: 538592 - RNA, 22 nt, Human
ucagauauucaauuaaguuaaa

SEQ ID NO: 538593 - RNA, 22 nt, Human
uguguuccugccuggcucuggu

SEQ ID NO: 538594 - RNA, 20 nt, Human
acagaaagagagaaugucag

SEQ ID NO: 538595 - RNA, 22 nt, Human
aggcucagccugggccuagagc

SEQ ID NO: 538596 - RNA, 22 nt, Human
uacccaggaggaaacugaggcu

SEQ ID NO: 538597 - RNA, 21 nt, Human
ccugcagcaccagaaggagau

SEQ ID NO: 538598 - RNA, 22 nt, Human
uaucuuuaacuugcaguauuua

SEQ ID NO: 538599 - RNA, 22 nt, Human
cauauucuguuggucacauaga

SEQ ID NO: 538600 - RNA, 22 nt, Human
aacuccaggcagggaggccacu

SEQ ID NO: 538601 - RNA, 22 nt, Human
aaggcugagacagcacaggucc

SEQ ID NO: 538602 - RNA, 22 nt, Human
cugccuggggaaugugaggauu

SEQ ID NO: 538603 - RNA, 23 nt, Human
ucuuuccucagcacacaccaaga

SEQ ID NO: 538604 - RNA, 22 nt, Human
ggcuuccuaauacucccuacac

SEQ ID NO: 538605 - RNA, 19 nt, Human
aggaaaggaucaaaauagc

SEQ ID NO: 538606 - RNA, 22 nt, Human
gauuucuuugcaagcuguguuc

SEQ ID NO: 538607 - RNA, 19 nt, Human
ggcugcugguuacagaggc

SEQ ID NO: 538608 - RNA, 22 nt, Human
gagcugcaugcggaaaccuguu

SEQ ID NO: 538609 - RNA, 22 nt, Human
cuguacagaguucugaguguac

SEQ ID NO: 538610 - RNA, 22 nt, Human
ucuguuccauguuuuguuccau

SEQ ID NO: 538611 - RNA, 22 nt, Human
uccagcucuaacaugcugggcc

SEQ ID NO: 538612 - RNA, 20 nt, Human
gucucagaauggauuugcau

SEQ ID NO: 538613 - RNA, 22 nt, Human
ggcacacauagaucugcacugg

SEQ ID NO: 538614 - RNA, 22 nt, Human
cuguaaaacugcuuaaguaugc

SEQ ID NO: 538615 - RNA, 22 nt, Human
cauuagggccaccauaacaaaa

SEQ ID NO: 538616 - RNA, 22 nt, Human
ucacaccuguaaucccaggccu

SEQ ID NO: 538617 - RNA, 22 nt, Human
ucuggccaacaaaaacuaaguc

SEQ ID NO: 538618 - RNA, 22 nt, Human
ugaagcaggaaccagcagcauu

SEQ ID NO: 538619 - RNA, 22 nt, Human
uucuguaucucuguguuucuug

SEQ ID NO: 538620 - RNA, 22 nt, Human
gagcugagaucgugccauugca

SEQ ID NO: 538621 - RNA, 22 nt, Human
gucccauaaguagugcaacuug

SEQ ID NO: 538622 - RNA, 22 nt, Human
uauucacaguugauuuacaguu

SEQ ID NO: 538623 - RNA, 22 nt, Human
acagucucuccacacugcaggg

SEQ ID NO: 538624 - RNA, 22 nt, Human
acauuuuacaguugucuggcua

SEQ ID NO: 538625 - RNA, 22 nt, Human
aauguucugauguaggguuuag

SEQ ID NO: 538626 - RNA, 22 nt, Human
cuuaauuuuuguaguagaugga

SEQ ID NO: 538627 - RNA, 22 nt, Human
caaaugcagauucaggaguucu

SEQ ID NO: 538628 - RNA, 22 nt, Human
aauacaagauuuauaguuguuu

SEQ ID NO: 538629 - RNA, 21 nt, Human
gccuggcagguggaagggcuc

SEQ ID NO: 538630 - RNA, 22 nt, Human
ucucauguauugcccuggugug

SEQ ID NO: 538631 - RNA, 22 nt, Human
gcagagcagagccugcauuggc

SEQ ID NO: 538632 - RNA, 22 nt, Human
uuuaacagaugugaaauuuuca

SEQ ID NO: 538633 - RNA, 22 nt, Human
gaggcagagugcaccccaggag

SEQ ID NO: 538634 - RNA, 19 nt, Human
caggccagugucagggggc

SEQ ID NO: 538635 - RNA, 20 nt, Human
ucccaaggaugccugggugu

SEQ ID NO: 538636 - RNA, 22 nt, Human
uagugcaacagggaaagagugu

SEQ ID NO: 538637 - RNA, 22 nt, Human
agagcugggugaagugccauca

SEQ ID NO: 538638 - RNA, 22 nt, Human
ggcugagcucaggggcagcagg

SEQ ID NO: 538639 - RNA, 22 nt, Human
agaggcuguuacacucccagau

SEQ ID NO: 538640 - RNA, 22 nt, Human
ugguccugaggcuuguuuccac

SEQ ID NO: 538641 - RNA, 22 nt, Human
aggacagagggaccagagccca

SEQ ID NO: 538642 - RNA, 22 nt, Human
uuccagaauagauggagcucua

SEQ ID NO: 538643 - RNA, 22 nt, Human
cugggaggcacuauucaggagg

SEQ ID NO: 538644 - RNA, 22 nt, Human
aaggagugcaugacucagagua

SEQ ID NO: 538645 - RNA, 22 nt, Human
cccagcaggucggugcugccug

SEQ ID NO: 538646 - RNA, 22 nt, Human
aaugucuuuuaaauguugaggu

SEQ ID NO: 538647 - RNA, 18 nt, Human
cagggccccagaauuauc

SEQ ID NO: 538648 - RNA, 23 nt, Human
gcugagguacauuuacaggaaga

SEQ ID NO: 538649 - RNA, 22 nt, Human
gggcaugagagggcagcuggca

SEQ ID NO: 538650 - RNA, 22 nt, Human
gccucuccgagccacugccucu

SEQ ID NO: 538651 - RNA, 22 nt, Human
ucauuaaaaugcagauucugac

SEQ ID NO: 538652 - RNA, 22 nt, Human
aggcugugggaguugagagucu

SEQ ID NO: 538653 - RNA, 22 nt, Human
cccaggcagccugcagggaagg

SEQ ID NO: 538654 - RNA, 22 nt, Human
acaguggaaagaaacgaauuag

SEQ ID NO: 538655 - RNA, 22 nt, Human
gaggcagcaugguaccuuggag

SEQ ID NO: 538656 - RNA, 22 nt, Human
gagaauuagggcguaauucaga

SEQ ID NO: 538657 - RNA, 22 nt, Human
gugagcagaacagguggcuucu

SEQ ID NO: 538658 - RNA, 22 nt, Human
gaugaagccugacuucucggug

SEQ ID NO: 538659 - RNA, 22 nt, Human
ccuuuacaguaugguuguauca

SEQ ID NO: 538660 - RNA, 22 nt, Human
agggaccucauguaaguggauu

SEQ ID NO: 538661 - RNA, 22 nt, Human
ugcauaaacuucucugguguga

SEQ ID NO: 538662 - RNA, 22 nt, Human
gcauagcuuugaugcugccuua

SEQ ID NO: 538663 - RNA, 22 nt, Human
acaaccuucuggagauaucugu

SEQ ID NO: 538664 - RNA, 22 nt, Human
gaggggcagaaugugaucaggg

SEQ ID NO: 538665 - RNA, 22 nt, Human
aucaaagagugagauuuuuacu

SEQ ID NO: 538666 - RNA, 22 nt, Human
cuggggaccgagcaagcucugg

SEQ ID NO: 538667 - RNA, 22 nt, Human
gcaucuuucuguccauucagca

SEQ ID NO: 538668 - RNA, 22 nt, Human
gcugugggacagguccagccag

SEQ ID NO: 538669 - RNA, 22 nt, Human
aaauuacagaucaccaaugcau

SEQ ID NO: 538670 - RNA, 22 nt, Human
uauuccaaaaucccaaacugcc

SEQ ID NO: 538671 - RNA, 22 nt, Human
augugucaauuuucaaaugcuu

SEQ ID NO: 538672 - RNA, 21 nt, Human
uucuucaggccaaugcucauu

SEQ ID NO: 538673 - RNA, 22 nt, Human
aagcuggcaauuaucaaaacug

SEQ ID NO: 538674 - RNA, 22 nt, Human
acugccugagcuauuggaaaag

SEQ ID NO: 538675 - RNA, 22 nt, Human
uaacaguauauuuaccaaaccu

SEQ ID NO: 538676 - RNA, 22 nt, Human
gggccaguucuccgccucuuuu

SEQ ID NO: 538677 - RNA, 22 nt, Human
auucacaguucauuagcuguaa

SEQ ID NO: 538678 - RNA, 15 nt, Human
cacacagacagcuug

SEQ ID NO: 538679 - RNA, 22 nt, Human
aaaagaggagugguuuaugaca

SEQ ID NO: 538680 - RNA, 22 nt, Human
uuuuucuuaaauguggguuggc

SEQ ID NO: 538681 - RNA, 22 nt, Human
ugucauuuugucucacugcuau

SEQ ID NO: 538682 - RNA, 22 nt, Human
gagagugucgggggccccagga

SEQ ID NO: 538683 - RNA, 22 nt, Human
acagucuuucaguaauaauacu

SEQ ID NO: 538684 - RNA, 22 nt, Human
aggcugugacagggucauggag

SEQ ID NO: 538685 - RNA, 22 nt, Human
ucauuuguuuagguagcaccau

SEQ ID NO: 538686 - RNA, 22 nt, Human
caagcuggaguuccucagagug

SEQ ID NO: 538687 - RNA, 22 nt, Human
aggugacaucccggcagcagag

SEQ ID NO: 538688 - RNA, 22 nt, Human
gcccucagaggacagcugacuu

SEQ ID NO: 538689 - RNA, 22 nt, Human
ugugaaauauuuauauacucaa

SEQ ID NO: 538690 - RNA, 22 nt, Human
agucccagcucugccacuuacu

SEQ ID NO: 538691 - RNA, 22 nt, Human
ggguggcacaggugcagagggu

SEQ ID NO: 538692 - RNA, 18 nt, Human
agcaaagcaagagaucac

SEQ ID NO: 538693 - RNA, 22 nt, Human
aagcagaauuuaauagaaaggu

SEQ ID NO: 538694 - RNA, 23 nt, Human
ucuuuagaagaacaucagaaaug

SEQ ID NO: 538695 - RNA, 22 nt, Human
cagcagaguauggcacucaacu

SEQ ID NO: 538696 - RNA, 22 nt, Human
guuacaaaggucauaaaagugu

SEQ ID NO: 538697 - RNA, 18 nt, Human
ucuggaacaacuucaugu

SEQ ID NO: 538698 - RNA, 22 nt, Human
uuuacagaucuguugauuuguu

SEQ ID NO: 538699 - RNA, 22 nt, Human
ggagauuuauagcacacuucag

SEQ ID NO: 538700 - RNA, 20 nt, Human
ucugugugccaucaccuaac

SEQ ID NO: 538701 - RNA, 23 nt, Human
cagugccauuugucuugccuaug

SEQ ID NO: 538702 - RNA, 22 nt, Human
caggggcucugagauugucuaa

SEQ ID NO: 538703 - RNA, 22 nt, Human
caauucuuuguagaagcucucc

SEQ ID NO: 538704 - RNA, 22 nt, Human
uguugauuaguguuuagacuua

SEQ ID NO: 538705 - RNA, 22 nt, Human
aucaggauguuuggcugucaua

SEQ ID NO: 538706 - RNA, 22 nt, Human
agcucccagaguccucugccca

SEQ ID NO: 538707 - RNA, 22 nt, Human
aacuuuacacugcuuuacauga

SEQ ID NO: 538708 - RNA, 22 nt, Human
gccaggcauguccucugcagaa

SEQ ID NO: 538709 - RNA, 23 nt, Human
cauuucugggagauuuauaaaau

SEQ ID NO: 538710 - RNA, 22 nt, Human
aaaaaugugaccacaggguguu

SEQ ID NO: 538711 - RNA, 22 nt, Human
ugggccuucucaaugcacugga

SEQ ID NO: 538712 - RNA, 22 nt, Human
aggugccaauuuucagugaaca

SEQ ID NO: 538713 - RNA, 22 nt, Human
ugcaagaggcaucuuuuaaaaa

SEQ ID NO: 538714 - RNA, 22 nt, Human
uggacaggugagugacucaggg

SEQ ID NO: 538715 - RNA, 22 nt, Human
ucugccucgcuaacagcagcca

SEQ ID NO: 538716 - RNA, 22 nt, Human
ugaaacaagauccacagacuug

SEQ ID NO: 538717 - RNA, 22 nt, Human
caaaugcuaacuucuuuccaaa

SEQ ID NO: 538718 - RNA, 22 nt, Human
gagccuggagcuggaacgaagc

SEQ ID NO: 538719 - RNA, 22 nt, Human
cuguucauggaaaaauaguugg

SEQ ID NO: 538720 - RNA, 20 nt, Human
agugucuggugcagggccuc

SEQ ID NO: 538721 - RNA, 22 nt, Human
aguauuacccucagaacuugau

SEQ ID NO: 538722 - RNA, 22 nt, Human
gcaagaaaagagccuucagugg

SEQ ID NO: 538723 - RNA, 20 nt, Human
auguaaaagacagggaguag

SEQ ID NO: 538724 - RNA, 22 nt, Human
ugcuuugacagggaugacauga

SEQ ID NO: 538725 - RNA, 22 nt, Human
uccugggaguggccauguaaug

SEQ ID NO: 538726 - RNA, 22 nt, Human
cucaggauccaucuccugcccu

SEQ ID NO: 538727 - RNA, 22 nt, Human
aaucuuagaguguuuuugaagc

SEQ ID NO: 538728 - RNA, 22 nt, Human
cccuaggaauucuauggccaag

SEQ ID NO: 538729 - RNA, 22 nt, Human
uaaagauugcucaaaacuguga

SEQ ID NO: 538730 - RNA, 22 nt, Human
ucauacaacuaagaguuucaga

SEQ ID NO: 538731 - RNA, 21 nt, Human
agcugcuccagggagcucagg

SEQ ID NO: 538732 - RNA, 22 nt, Human
ugcaaagaagcaacauccuugu

SEQ ID NO: 538733 - RNA, 22 nt, Human
uucagcagugcagacacccagu

SEQ ID NO: 538734 - RNA, 22 nt, Human
aauuagagaagcuucuuccauu

SEQ ID NO: 538735 - RNA, 22 nt, Human
agccaguguuaagugacugguu

SEQ ID NO: 538736 - RNA, 22 nt, Human
uccucagacacccugcuggcuu

SEQ ID NO: 538737 - RNA, 21 nt, Human
uuuuaacaaggauuucccuag

SEQ ID NO: 538738 - RNA, 21 nt, Human
agagcugggacuugccugaga

SEQ ID NO: 538739 - RNA, 22 nt, Human
aguaugaauugcuuugccugua

SEQ ID NO: 538740 - RNA, 22 nt, Human
aaguuugagaagcuuauagaua

SEQ ID NO: 538741 - RNA, 22 nt, Human
auuuauuaagcaucugcuaugu

SEQ ID NO: 538742 - RNA, 22 nt, Human
caacauauuuuccaagagugaa

SEQ ID NO: 538743 - RNA, 22 nt, Human
gugugcagucugcuaggcaggg

SEQ ID NO: 538744 - RNA, 22 nt, Human
gagggucccgagcccugucaga

SEQ ID NO: 538745 - RNA, 17 nt, Human
ugaggcucggugaggag

SEQ ID NO: 538746 - RNA, 22 nt, Human
ccucagagccuccagaaggaau

SEQ ID NO: 538747 - RNA, 22 nt, Human
caggugcuguccugcacauguc

SEQ ID NO: 538748 - RNA, 22 nt, Human
gggcguggauggucagugcagg

SEQ ID NO: 538749 - RNA, 22 nt, Human
cugagcagcacagggcgccagg

SEQ ID NO: 538750 - RNA, 22 nt, Human
uuucaagcauaacugggaagag

SEQ ID NO: 538751 - RNA, 22 nt, Human
ggcauccaaauaccaagaugua

SEQ ID NO: 538752 - RNA, 22 nt, Human
aaucucaugagcuucuuguccc

SEQ ID NO: 538753 - RNA, 22 nt, Human
cauucauuuacuuucaacagcu

SEQ ID NO: 538754 - RNA, 22 nt, Human
ugaggggcggccugcagaggcc

SEQ ID NO: 538755 - RNA, 22 nt, Human
aggcucugcagaccccagcugu

SEQ ID NO: 538756 - RNA, 22 nt, Human
uguaccuuuuucugugcaugcu

SEQ ID NO: 538757 - RNA, 20 nt, Human
caaauucuguugaauacacc

SEQ ID NO: 538758 - RNA, 22 nt, Human
cagcagagacgguaagcagaac

SEQ ID NO: 538759 - RNA, 23 nt, Human
ggugggagauuauccagaauuau

SEQ ID NO: 538760 - RNA, 22 nt, Human
aaaggagaaaacauacaggacu

SEQ ID NO: 538761 - RNA, 22 nt, Human
gcagggccagugcagagaggaa

SEQ ID NO: 538762 - RNA, 22 nt, Human
caguuuauaugucagagcugua

SEQ ID NO: 538763 - RNA, 22 nt, Human
ccugcuuaacauugccaugaca

SEQ ID NO: 538764 - RNA, 22 nt, Human
aggagagggguaggauuaauuu

SEQ ID NO: 538765 - RNA, 22 nt, Human
caagaugaucccugaaggcagc

SEQ ID NO: 538766 - RNA, 22 nt, Human
ccaaggcaacguuggugucagg

SEQ ID NO: 538767 - RNA, 22 nt, Human
accugagccuagggagguugag

SEQ ID NO: 538768 - RNA, 22 nt, Human
uguaaacaaaugcauucuugcu

SEQ ID NO: 538769 - RNA, 18 nt, Human
uggcaggaaaugcacuuu

SEQ ID NO: 538770 - RNA, 22 nt, Human
gaagggugugugugagggacac

SEQ ID NO: 538771 - RNA, 22 nt, Human
ggcucagggaaugaggaagaau

SEQ ID NO: 538772 - RNA, 22 nt, Human
gaaggccauuuuuagguagaau

SEQ ID NO: 538773 - RNA, 22 nt, Human
cuuauucuacuccacaagcucu

SEQ ID NO: 538774 - RNA, 22 nt, Human
aggaggaacucagaaagaaggu

SEQ ID NO: 538775 - RNA, 22 nt, Human
aauuccugucuuaacaguucug

SEQ ID NO: 538776 - RNA, 22 nt, Human
caggagcugggucuggaagcag

SEQ ID NO: 538777 - RNA, 22 nt, Human
aguguacauguacacauuagua

SEQ ID NO: 538778 - RNA, 20 nt, Human
gggguuggcuggcacaggga

SEQ ID NO: 538779 - RNA, 22 nt, Human
gagugggcaccgugggcacacu

SEQ ID NO: 538780 - RNA, 22 nt, Human
ugucuuccucuuggcuugagcu

SEQ ID NO: 538781 - RNA, 22 nt, Human
auuuaucaccaguuagcugacu

SEQ ID NO: 538782 - RNA, 22 nt, Human
ccucacuuuccuuucuccuggg

SEQ ID NO: 538783 - RNA, 22 nt, Human
gauuuuauagucaggaaaaaga

SEQ ID NO: 538784 - RNA, 22 nt, Human
cuugagagccacuccuggggcc

SEQ ID NO: 538785 - RNA, 22 nt, Human
aucagcuagauaagucaagcaa

SEQ ID NO: 538786 - RNA, 22 nt, Human
uucaacauaugaauuuugggug

SEQ ID NO: 538787 - RNA, 22 nt, Human
gcucccacaaccuucuugcucc

SEQ ID NO: 538788 - RNA, 22 nt, Human
gccuggaguggacuuggccccu

SEQ ID NO: 538789 - RNA, 22 nt, Human
aacuauucuguggacucuuaua

SEQ ID NO: 538790 - RNA, 22 nt, Human
cacaguacccagcacuacugag

SEQ ID NO: 538791 - RNA, 22 nt, Human
caggagcaaggagcagugggau

SEQ ID NO: 538792 - RNA, 22 nt, Human
aauaagacucugcuagaaauuc

SEQ ID NO: 538793 - RNA, 22 nt, Human
ucauuuguugaacuuuagugcg

SEQ ID NO: 538794 - RNA, 22 nt, Human
cacagcuucuccccgcugcggc

SEQ ID NO: 538795 - RNA, 22 nt, Human
auuucuguaacuuaugaaaguu

SEQ ID NO: 538796 - RNA, 22 nt, Human
cuggcuuucucugugguguuca

SEQ ID NO: 538797 - RNA, 20 nt, Human
gccagcugcccuuccacccu

SEQ ID NO: 538798 - RNA, 22 nt, Human
gggcuggcuaagacuuuucugu

SEQ ID NO: 538799 - RNA, 22 nt, Human
gcagcuuuguaaaguaugaagc

SEQ ID NO: 538800 - RNA, 22 nt, Human
ugaguucuaguggcugcagauu

SEQ ID NO: 538801 - RNA, 22 nt, Human
aaaaauguuaucuacuguccga

SEQ ID NO: 538802 - RNA, 22 nt, Human
aaaaugaauaaguuaacccagg

SEQ ID NO: 538803 - RNA, 22 nt, Human
uccuggauuuaacccuggcucu

SEQ ID NO: 538804 - RNA, 22 nt, Human
agacaacaccaaaugcuagugu

SEQ ID NO: 538805 - RNA, 22 nt, Human
uaacaacucaguuuguuccuug

SEQ ID NO: 538806 - RNA, 22 nt, Human
agaggcagcagucauacuacag

SEQ ID NO: 538807 - RNA, 22 nt, Human
accagaaaggaauaauagaauu

SEQ ID NO: 538808 - RNA, 22 nt, Human
cacauuuaggagguggggaagc

SEQ ID NO: 538809 - RNA, 22 nt, Human
cuggugggaagauggaaaacau

SEQ ID NO: 538810 - RNA, 22 nt, Human
cugcuuugaaaauaaacuuguc

SEQ ID NO: 538811 - RNA, 22 nt, Human
gacccuccacucacugcugugu

SEQ ID NO: 538812 - RNA, 22 nt, Human
auuugugggacuauaaugcagg

SEQ ID NO: 538813 - RNA, 22 nt, Human
ccugggcugaagucaagugugg

SEQ ID NO: 538814 - RNA, 22 nt, Human
cgcagguguucaguaaauguau

SEQ ID NO: 538815 - RNA, 22 nt, Human
agaaaugacacacaugagacau

SEQ ID NO: 538816 - RNA, 19 nt, Human
accuuacagaaacaggcau

SEQ ID NO: 538817 - RNA, 22 nt, Human
cuguggagcuuguggcaguggg

SEQ ID NO: 538818 - RNA, 22 nt, Human
cuggacagaucccuuguagcuu

SEQ ID NO: 538819 - RNA, 17 nt, Human
caucuuuaaaauccuga

SEQ ID NO: 538820 - RNA, 22 nt, Human
ggccugagaaccauggggccaa

SEQ ID NO: 538821 - RNA, 22 nt, Human
uacauuguacuuacaaauagug

SEQ ID NO: 538822 - RNA, 23 nt, Human
uuuaugcagcauguagaacaugg

SEQ ID NO: 538823 - RNA, 22 nt, Human
uacagugaaugaauggcugugc

SEQ ID NO: 538824 - RNA, 22 nt, Human
ccuccugggacucauuagcacc

SEQ ID NO: 538825 - RNA, 19 nt, Human
aauuagggagucgguuaag

SEQ ID NO: 538826 - RNA, 22 nt, Human
auugucugaauccaaagcucug

SEQ ID NO: 538827 - RNA, 19 nt, Human
cacagcucugcucagggaa

SEQ ID NO: 538828 - RNA, 22 nt, Human
ggguacuuaauauuuacggggu

SEQ ID NO: 538829 - RNA, 22 nt, Human
ccauaaggagccagacauucca

SEQ ID NO: 538830 - RNA, 22 nt, Human
aacauauaaacucuuaaguuca

SEQ ID NO: 538831 - RNA, 22 nt, Human
caguggauuagccagagcugga

SEQ ID NO: 538832 - RNA, 22 nt, Human
cucugcugucucagaugggcca

SEQ ID NO: 538833 - RNA, 22 nt, Human
agcacuuugugcauuucugaag

SEQ ID NO: 538834 - RNA, 22 nt, Human
cuugucagccaauuguggauuu

SEQ ID NO: 538835 - RNA, 22 nt, Human
aacagugucaggauuacagaua

SEQ ID NO: 538836 - RNA, 22 nt, Human
gccugcuggauguggccaggcc

SEQ ID NO: 538837 - RNA, 22 nt, Human
caggaugagguagaggcagaua

SEQ ID NO: 538838 - RNA, 22 nt, Human
gucauuuuugacuuugaaguga

SEQ ID NO: 538839 - RNA, 22 nt, Human
ucccagagcucugacaccagcu

SEQ ID NO: 538840 - RNA, 22 nt, Human
auggcucauuuaucuugcagcc

SEQ ID NO: 538841 - RNA, 22 nt, Human
agauuguagaaacuguagcauu

SEQ ID NO: 538842 - RNA, 22 nt, Human
ucagcugccccaguggccccag

SEQ ID NO: 538843 - RNA, 22 nt, Human
guccuggcuuaguucgcuguaa

SEQ ID NO: 538844 - RNA, 22 nt, Human
gaaaggccauuucugaggguuu

SEQ ID NO: 538845 - RNA, 22 nt, Human
auaaggcaucucucaguuagca

SEQ ID NO: 538846 - RNA, 22 nt, Human
gcuguucacaucuggaccauuu

SEQ ID NO: 538847 - RNA, 22 nt, Human
aaagcagagcagggcacuuaug

SEQ ID NO: 538848 - RNA, 22 nt, Human
aagugauuucugccugcauguu

SEQ ID NO: 538849 - RNA, 22 nt, Human
cagagagcaugggaggcccgag

SEQ ID NO: 538850 - RNA, 21 nt, Human
agcucuggagcagcaaucaag

SEQ ID NO: 538851 - RNA, 22 nt, Human
ugaagagaagaaaauuaucuuu

SEQ ID NO: 538852 - RNA, 22 nt, Human
auauagauuccaugguuccuuu

SEQ ID NO: 538853 - RNA, 22 nt, Human
guaggaaagggagugaagggaa

SEQ ID NO: 538854 - RNA, 22 nt, Human
ggcucugucaccuaugagcuga

SEQ ID NO: 538855 - RNA, 21 nt, Human
uagcacuucgcuguaauuggg

SEQ ID NO: 538856 - RNA, 22 nt, Human
aaggcacuacgcugcuggggcg

SEQ ID NO: 538857 - RNA, 22 nt, Human
ccaggcucagcgcgcacgucug

SEQ ID NO: 538858 - RNA, 22 nt, Human
uaauaggagccaggucacauag

SEQ ID NO: 538859 - RNA, 22 nt, Human
gugggcugcccuugaggucagc

SEQ ID NO: 538860 - RNA, 22 nt, Human
auacuguacgucccagauagga

SEQ ID NO: 538861 - RNA, 22 nt, Human
ugcuaacuauuccuaaagauca

SEQ ID NO: 538862 - RNA, 22 nt, Human
gaaaggagaggguuaaggagcu

SEQ ID NO: 538863 - RNA, 22 nt, Human
uuuuaucuaccuaugcucauuu

SEQ ID NO: 538864 - RNA, 22 nt, Human
uauccaaaggaacaaucacagc

SEQ ID NO: 538865 - RNA, 17 nt, Human
uuccaguuuaguauugu

SEQ ID NO: 538866 - RNA, 19 nt, Human
cucagcuguagcucaugug

SEQ ID NO: 538867 - RNA, 22 nt, Human
uuaguuagucccugguaccuuu

SEQ ID NO: 538868 - RNA, 22 nt, Human
ugcaguggaggccgugagacag

SEQ ID NO: 538869 - RNA, 20 nt, Human
gugugaagcccucaggagga

SEQ ID NO: 538870 - RNA, 22 nt, Human
uagaaacagauguuuuugaaga

SEQ ID NO: 538871 - RNA, 22 nt, Human
acuucacaacuguacauggcag

SEQ ID NO: 538872 - RNA, 22 nt, Human
caaacugaacacgaaagucuuu

SEQ ID NO: 538873 - RNA, 21 nt, Human
cagaggggcuagccuggcugc

SEQ ID NO: 538874 - RNA, 22 nt, Human
uuucaacaggaugauaauaggc

SEQ ID NO: 538875 - RNA, 22 nt, Human
cacccagggcugugccugccca

SEQ ID NO: 538876 - RNA, 20 nt, Human
uccugcagucgcuagcgccc

SEQ ID NO: 538877 - RNA, 22 nt, Human
ugucccagggaaggcccagcac

SEQ ID NO: 538878 - RNA, 22 nt, Human
agaaucaaagagaaauacuuug

SEQ ID NO: 538879 - RNA, 22 nt, Human
accuugugagguuacauaaugu

SEQ ID NO: 538880 - RNA, 21 nt, Human
uaauauagguucacaacuagu

SEQ ID NO: 538881 - RNA, 22 nt, Human
caggcaggucagugaagaagga

SEQ ID NO: 538882 - RNA, 22 nt, Human
caguccugugucccuugguggg

SEQ ID NO: 538883 - RNA, 18 nt, Human
uggagccagcucuaggau

SEQ ID NO: 538884 - RNA, 23 nt, Human
aucaaaguggaaaucaauuaucu

SEQ ID NO: 538885 - RNA, 22 nt, Human
aggcacugaaagguggccagag

SEQ ID NO: 538886 - RNA, 22 nt, Human
uggugagaugcagcaacagaca

SEQ ID NO: 538887 - RNA, 22 nt, Human
gagcacagaaucuucccaugca

SEQ ID NO: 538888 - RNA, 22 nt, Human
cugggcagcuguaucagggagu

SEQ ID NO: 538889 - RNA, 22 nt, Human
augagacuaccuguaauguggc

SEQ ID NO: 538890 - RNA, 22 nt, Human
uaagacacauucauaucugucu

SEQ ID NO: 538891 - RNA, 22 nt, Human
gcaggccugacuguagggggca

SEQ ID NO: 538892 - RNA, 22 nt, Human
cuucuggaggacacuggcccca

SEQ ID NO: 538893 - RNA, 22 nt, Human
ggcucuggagcacagacgucug

SEQ ID NO: 538894 - RNA, 22 nt, Human
gcuccaagguauccaccagggu

SEQ ID NO: 538895 - RNA, 22 nt, Human
caggccuugggacccagacugg

SEQ ID NO: 538896 - RNA, 22 nt, Human
cacauuuaugggcugggaggca

SEQ ID NO: 538897 - RNA, 22 nt, Human
uucacagcuccuuuuacucaac

SEQ ID NO: 538898 - RNA, 22 nt, Human
agggguggccugccuuacuccc

SEQ ID NO: 538899 - RNA, 23 nt, Human
cagugcagggcaacucagacucc

SEQ ID NO: 538900 - RNA, 22 nt, Human
cuggguggcagagccugcagug

SEQ ID NO: 538901 - RNA, 17 nt, Human
gccuuccuuccuccaca

SEQ ID NO: 538902 - RNA, 22 nt, Human
agguacagaugaaagucuaguu

SEQ ID NO: 538903 - RNA, 22 nt, Human
agcugggucuugggccaggaga

SEQ ID NO: 538904 - RNA, 22 nt, Human
uuucuuagcgaugcuugauaaa

SEQ ID NO: 538905 - RNA, 22 nt, Human
ccagggugaccagcuggccuag

SEQ ID NO: 538906 - RNA, 20 nt, Human
uggcccuguuuucuccaggc

SEQ ID NO: 538907 - RNA, 22 nt, Human
uucagaauguacugauagaaca

SEQ ID NO: 538908 - RNA, 22 nt, Human
aauucuugguccuaguguauaa

SEQ ID NO: 538909 - RNA, 19 nt, Human
ugcagggcugcgccugggg

SEQ ID NO: 538910 - RNA, 23 nt, Human
gcccugcuccuggcugggaggga

SEQ ID NO: 538911 - RNA, 22 nt, Human
agagucagcuuaugacacaguc

SEQ ID NO: 538912 - RNA, 22 nt, Human
gcucagggaacuuuuugcaggc

SEQ ID NO: 538913 - RNA, 22 nt, Human
ucugaaaucuaaugcucugugg

SEQ ID NO: 538914 - RNA, 20 nt, Human
cagagaccugucuucacaga

SEQ ID NO: 538915 - RNA, 23 nt, Human
auuuuacaggucaguuccuugaa

SEQ ID NO: 538916 - RNA, 22 nt, Human
uccuguggaagacaguguuggg

SEQ ID NO: 538917 - RNA, 22 nt, Human
cagacaggcuagccagacucac

SEQ ID NO: 538918 - RNA, 22 nt, Human
gucagcuagaggaugugacauu

SEQ ID NO: 538919 - RNA, 22 nt, Human
acugcuuuuagaaaucuauaga

SEQ ID NO: 538920 - RNA, 22 nt, Human
uucucuuuuagaggcuccauga

SEQ ID NO: 538921 - RNA, 22 nt, Human
gacacuaaaguauaggguaucu

SEQ ID NO: 538922 - RNA, 22 nt, Human
ugggugagugggaaaagcccag

SEQ ID NO: 538923 - RNA, 22 nt, Human
cagggccaugaggcacaggguc

SEQ ID NO: 538924 - RNA, 22 nt, Human
cccagggucccugcucucugug

SEQ ID NO: 538925 - RNA, 20 nt, Human
cugcaucaugguuaagaaca

SEQ ID NO: 538926 - RNA, 22 nt, Human
gccaggcugaggcucuggaaga

SEQ ID NO: 538927 - RNA, 22 nt, Human
gcccaggagguggaggugcagu

SEQ ID NO: 538928 - RNA, 22 nt, Human
guguuuccaguucagaaagcaa

SEQ ID NO: 538929 - RNA, 22 nt, Human
cccacuguugccucaaauauca

SEQ ID NO: 538930 - RNA, 22 nt, Human
aagagcagaaguccuuggaucc

SEQ ID NO: 538931 - RNA, 22 nt, Human
aauauuuuugaggcccuguuau

SEQ ID NO: 538932 - RNA, 22 nt, Human
aacauucaccucuaccuccuuc

SEQ ID NO: 538933 - RNA, 22 nt, Human
ucacagaaggaccuuguuucau

SEQ ID NO: 538934 - RNA, 22 nt, Human
ugccaggcucaggaugucccug

SEQ ID NO: 538935 - RNA, 22 nt, Human
aauauguuccacuuaaagcugg

SEQ ID NO: 538936 - RNA, 22 nt, Human
cugucucucuaggacacugggg

SEQ ID NO: 538937 - RNA, 22 nt, Human
gcccagaagugacucagcacug

SEQ ID NO: 538938 - RNA, 22 nt, Human
augagguaauacuuucaguccu

SEQ ID NO: 538939 - RNA, 22 nt, Human
auagauacauuagguaacuugu

SEQ ID NO: 538940 - RNA, 22 nt, Human
agacaggagagggaacugccgg

SEQ ID NO: 538941 - RNA, 22 nt, Human
gagccauacaaccuauaaagug

SEQ ID NO: 538942 - RNA, 19 nt, Human
agaaaaacugguacugcug

SEQ ID NO: 538943 - RNA, 22 nt, Human
ccucagcugcuucccuggagcc

SEQ ID NO: 538944 - RNA, 22 nt, Human
guguugacucuuggacuucaag

SEQ ID NO: 538945 - RNA, 22 nt, Human
ggcuccugggagaaguuuuauu

SEQ ID NO: 538946 - RNA, 22 nt, Human
ggcaggcauggggucugccauu

SEQ ID NO: 538947 - RNA, 22 nt, Human
agggaggucuuugaggggcuua

SEQ ID NO: 538948 - RNA, 22 nt, Human
aggugcuggagucugggcagga

SEQ ID NO: 538949 - RNA, 22 nt, Human
gcucagagggaacaaggggcug

SEQ ID NO: 538950 - RNA, 22 nt, Human
uuucuaaggugagguagaaaau

SEQ ID NO: 538951 - RNA, 23 nt, Human
cucaacccuaguaagggaguagg

SEQ ID NO: 538952 - RNA, 22 nt, Human
uucuggagaucugccuauggga

SEQ ID NO: 538953 - RNA, 22 nt, Human
gucaugccagcggagcucggga

SEQ ID NO: 538954 - RNA, 22 nt, Human
cuucacagaugcugagagggcu

SEQ ID NO: 538955 - RNA, 22 nt, Human
uguaacagcucuccaugugggg

SEQ ID NO: 538956 - RNA, 22 nt, Human
aauuagggaaaauuuacuugua

SEQ ID NO: 538957 - RNA, 22 nt, Human
ugaacacauuuucuucaguaga

SEQ ID NO: 538958 - RNA, 22 nt, Human
cucucugugguggcugucccau

SEQ ID NO: 538959 - RNA, 22 nt, Human
ggaaggggccuugagcaaacug

SEQ ID NO: 538960 - RNA, 22 nt, Human
uuagggacagcucuguagguga

SEQ ID NO: 538961 - RNA, 22 nt, Human
gugcaggggccuccccuugcug

SEQ ID NO: 538962 - RNA, 22 nt, Human
ugguaaagaaggcuagaucuga

SEQ ID NO: 538963 - RNA, 22 nt, Human
cuguaugaggaucagacuggac

SEQ ID NO: 538964 - RNA, 22 nt, Human
gggcuacauugugagagaaguu

SEQ ID NO: 538965 - RNA, 21 nt, Human
cucugcccagggccuccugcc

SEQ ID NO: 538966 - RNA, 22 nt, Human
uagcugccuaugugauaagaga

SEQ ID NO: 538967 - RNA, 22 nt, Human
gauggguggucucagacuugcc

SEQ ID NO: 538968 - RNA, 22 nt, Human
uagaaaauagggccuguggagc

SEQ ID NO: 538969 - RNA, 22 nt, Human
aggcagcauuucugcuuaucca

SEQ ID NO: 538970 - RNA, 22 nt, Human
acagaaagaugauuugaaaugg

SEQ ID NO: 538971 - RNA, 22 nt, Human
ugaugguugauuauaaaucagu

SEQ ID NO: 538972 - RNA, 21 nt, Human
auauuucagauuuccguaauc

SEQ ID NO: 538973 - RNA, 22 nt, Human
ugccuguccugaggaugagggu

SEQ ID NO: 538974 - RNA, 22 nt, Human
agaaaguuaucacaaaauugag

SEQ ID NO: 538975 - RNA, 22 nt, Human
uggagcagagaugguggccuuc

SEQ ID NO: 538976 - RNA, 22 nt, Human
gcagccaccucccauggcgggg

SEQ ID NO: 538977 - RNA, 18 nt, Human
agcaggcguugccuggga

SEQ ID NO: 538978 - RNA, 22 nt, Human
gggagggaggugcugguucacg

SEQ ID NO: 538979 - RNA, 22 nt, Human
uuuggaaaaagacagcuuauga

SEQ ID NO: 538980 - RNA, 22 nt, Human
uuugcauuucucguaaggaaac

SEQ ID NO: 538981 - RNA, 22 nt, Human
cauuuucucaaugaacccucuu

SEQ ID NO: 538982 - RNA, 22 nt, Human
cugcagaguggagccucggcug

SEQ ID NO: 538983 - RNA, 22 nt, Human
gggaguggagagcaauggauga

SEQ ID NO: 538984 - RNA, 22 nt, Human
gccaggcaggccacgcuguguu

SEQ ID NO: 538985 - RNA, 22 nt, Human
guggcugcagagggcacagcau

SEQ ID NO: 538986 - RNA, 22 nt, Human
uuugaaguccaucuggcccagu

SEQ ID NO: 538987 - RNA, 21 nt, Human
gagaugcuuuuuauucaaccc

SEQ ID NO: 538988 - RNA, 22 nt, Human
aucuuucaguuucauaccaauu

SEQ ID NO: 538989 - RNA, 22 nt, Human
uuagcuuuggauugcauuuagu

SEQ ID NO: 538990 - RNA, 22 nt, Human
acagggcagguggcuacugguc

SEQ ID NO: 538991 - RNA, 22 nt, Human
aaucaacuguuuccacagggag

SEQ ID NO: 538992 - RNA, 22 nt, Human
acugugaaucacuacuaguaga

SEQ ID NO: 538993 - RNA, 22 nt, Human
uuuugagauggagucuugcucu

SEQ ID NO: 538994 - RNA, 17 nt, Human
agcagggagucaaggga

SEQ ID NO: 538995 - RNA, 22 nt, Human
agggcuacugccugccuucagg

SEQ ID NO: 538996 - RNA, 22 nt, Human
cugggcucaccuguggcuggca

SEQ ID NO: 538997 - RNA, 22 nt, Human
cugcagcuauauuuucccacag

SEQ ID NO: 538998 - RNA, 22 nt, Human
uaggaacccgcagcaguccgag

SEQ ID NO: 538999 - RNA, 22 nt, Human
gugcccugagcuuaugcauucu

SEQ ID NO: 539000 - RNA, 18 nt, Human
gggcauggaugcagcauc

SEQ ID NO: 539001 - RNA, 22 nt, Human
cccuuuaacacacagaggcugc

SEQ ID NO: 539002 - RNA, 22 nt, Human
gugaagauaaggaugcugcagu

SEQ ID NO: 539003 - RNA, 22 nt, Human
ucacauuuauacuccauuugca

SEQ ID NO: 539004 - RNA, 22 nt, Human
auuauaggcuugagccaccgug

SEQ ID NO: 539005 - RNA, 22 nt, Human
caccaggcugcccaggacaggg

SEQ ID NO: 539006 - RNA, 22 nt, Human
aguauaauuuacauuugguauu

SEQ ID NO: 539007 - RNA, 21 nt, Human
ggacuuacauagguaaggggu

SEQ ID NO: 539008 - RNA, 22 nt, Human
uagucuuuuuaauaaauaaugc

SEQ ID NO: 539009 - RNA, 22 nt, Human
ucuuucagccacuuaccugucu

SEQ ID NO: 539010 - RNA, 22 nt, Human
gaaaucaaacccuuuucugaua

SEQ ID NO: 539011 - RNA, 22 nt, Human
uuacagauacauuucuuuuguu

SEQ ID NO: 539012 - RNA, 22 nt, Human
ucagagaacacagaggugaugu

SEQ ID NO: 539013 - RNA, 22 nt, Human
ugaaugauguauaauauugaga

SEQ ID NO: 539014 - RNA, 22 nt, Human
acaaaguuaacaguuggauagu

SEQ ID NO: 539015 - RNA, 22 nt, Human
gcuucuggagucuucagaggaa

SEQ ID NO: 539016 - RNA, 22 nt, Human
acaucuuuguuucuuaguguau

SEQ ID NO: 539017 - RNA, 17 nt, Human
cagacagauauccuggg

SEQ ID NO: 539018 - RNA, 22 nt, Human
auguguaaaaagugcuuaauau

SEQ ID NO: 539019 - RNA, 16 nt, Human
gcagguggaucaccug

SEQ ID NO: 539020 - RNA, 22 nt, Human
ccaggaggcagaaguugcagug

SEQ ID NO: 539021 - RNA, 22 nt, Human
caguucugguuugcagauauau

SEQ ID NO: 539022 - RNA, 22 nt, Human
agccuccuguagcccucaccca

SEQ ID NO: 539023 - RNA, 22 nt, Human
cugccaggacugacgucuucag

SEQ ID NO: 539024 - RNA, 22 nt, Human
ugcacacauuaaggauacacag

SEQ ID NO: 539025 - RNA, 22 nt, Human
aggggagcuaacaccagagccc

SEQ ID NO: 539026 - RNA, 22 nt, Human
cugucugucaaguucaucucca

SEQ ID NO: 539027 - RNA, 22 nt, Human
gccuggagacaaggacaaaggg

SEQ ID NO: 539028 - RNA, 22 nt, Human
agagagcauggcacagaggggu

SEQ ID NO: 539029 - RNA, 22 nt, Human
acuuuacauuugaucucucuaa

SEQ ID NO: 539030 - RNA, 22 nt, Human
ccaguggguaggccauggugag

SEQ ID NO: 539031 - RNA, 22 nt, Human
gccuggcacucacugaagaggc

SEQ ID NO: 539032 - RNA, 22 nt, Human
uucaggcccaacgcacagcuuc

SEQ ID NO: 539033 - RNA, 22 nt, Human
cuuagaaauaaugguuucaguu

SEQ ID NO: 539034 - RNA, 22 nt, Human
aucaguuuugggggacauacug

SEQ ID NO: 539035 - RNA, 22 nt, Human
guuucuggagugacuauaacug

SEQ ID NO: 539036 - RNA, 22 nt, Human
augugcaaauccaaugugaaug

SEQ ID NO: 539037 - RNA, 17 nt, Human
ucaggauguagcaguag

SEQ ID NO: 539038 - RNA, 22 nt, Human
cccaggagguggagcuugcagu

SEQ ID NO: 539039 - RNA, 20 nt, Human
aaaguguaagcauauaauua

SEQ ID NO: 539040 - RNA, 22 nt, Human
gcauuuguguucuuccuagagc

SEQ ID NO: 539041 - RNA, 22 nt, Human
guuggccugaauggucaagagg

SEQ ID NO: 539042 - RNA, 22 nt, Human
ugcaaagucgcaaaauucuucu

SEQ ID NO: 539043 - RNA, 22 nt, Human
aggcugaggcaagaggaucacu

SEQ ID NO: 539044 - RNA, 21 nt, Human
acaugucuggucauuuuuagc

SEQ ID NO: 539045 - RNA, 22 nt, Human
cccuggagaaggggacgcggag

SEQ ID NO: 539046 - RNA, 22 nt, Human
uaagauaauccauuauaauguu

SEQ ID NO: 539047 - RNA, 22 nt, Human
acucaugauaugccuauaagau

SEQ ID NO: 539048 - RNA, 22 nt, Human
uaaggccaauuacauauguuca

SEQ ID NO: 539049 - RNA, 22 nt, Human
cuccacucaccagaugccagga

SEQ ID NO: 539050 - RNA, 22 nt, Human
uacagaauguuaugaagcauag

SEQ ID NO: 539051 - RNA, 22 nt, Human
ugcugggcuugaaagcugcuaa

SEQ ID NO: 539052 - RNA, 22 nt, Human
uaacagcacuggcaggcacugu

SEQ ID NO: 539053 - RNA, 22 nt, Human
agcagacaacccagaugaccca

SEQ ID NO: 539054 - RNA, 22 nt, Human
uucacuuauagggauguuauug

SEQ ID NO: 539055 - RNA, 22 nt, Human
ggaagcuuaaugccuaauuucc

SEQ ID NO: 539056 - RNA, 22 nt, Human
guuuacauguuuuucucuuaca

SEQ ID NO: 539057 - RNA, 22 nt, Human
uccuucagcugcuaggaaauga

SEQ ID NO: 539058 - RNA, 22 nt, Human
cuucuggguugcaggucuuggc

SEQ ID NO: 539059 - RNA, 22 nt, Human
uuuuuccuaagcaguggagcug

SEQ ID NO: 539060 - RNA, 22 nt, Human
cugguucagugaaaggcauggg

SEQ ID NO: 539061 - RNA, 22 nt, Human
uugcuuccaguccaagucuguu

SEQ ID NO: 539062 - RNA, 22 nt, Human
ugaaggccagcucuuuaucagc

SEQ ID NO: 539063 - RNA, 22 nt, Human
ucaacacaacagagaaaugcug

SEQ ID NO: 539064 - RNA, 22 nt, Human
aagcagaggccacagagugggc

SEQ ID NO: 539065 - RNA, 22 nt, Human
uucuuugugcauccaauuuucu

SEQ ID NO: 539066 - RNA, 20 nt, Human
agcaggaaugaugcuuucau

SEQ ID NO: 539067 - RNA, 22 nt, Human
uucuucuuaauguccugggaac

SEQ ID NO: 539068 - RNA, 22 nt, Human
agugcaaauuauuuaccugauu

SEQ ID NO: 539069 - RNA, 22 nt, Human
uagaaagaucuguaggcaagag

SEQ ID NO: 539070 - RNA, 22 nt, Human
agagcuggggcauaaaugccac

SEQ ID NO: 539071 - RNA, 22 nt, Human
gccugcagaacugugaggcaau

SEQ ID NO: 539072 - RNA, 22 nt, Human
aaagucaugcaguugaacuuuu

SEQ ID NO: 539073 - RNA, 22 nt, Human
ugugcccauuacacagaggcau

SEQ ID NO: 539074 - RNA, 22 nt, Human
cuucuuuacuuucuagaaauaa

SEQ ID NO: 539075 - RNA, 22 nt, Human
gcuuuuuugggaugccugccuu

SEQ ID NO: 539076 - RNA, 18 nt, Human
gcagcugacacuggaguu

SEQ ID NO: 539077 - RNA, 22 nt, Human
gugcccuggaugacuuuggucu

SEQ ID NO: 539078 - RNA, 22 nt, Human
auguagcagaagauguuuuccu

SEQ ID NO: 539079 - RNA, 22 nt, Human
auuuuauccccacuggauuaca

SEQ ID NO: 539080 - RNA, 22 nt, Human
cugaagcaugcguuuguaaacu

SEQ ID NO: 539081 - RNA, 22 nt, Human
guccagaaggaggucaaguugg

SEQ ID NO: 539082 - RNA, 22 nt, Human
agugaaauaaagcugccuaugg

SEQ ID NO: 539083 - RNA, 21 nt, Human
cucuggaggcaagggagagug

SEQ ID NO: 539084 - RNA, 22 nt, Human
cagcaguggccaucuguguggu

SEQ ID NO: 539085 - RNA, 22 nt, Human
auaugcaagcacauagaauacu

SEQ ID NO: 539086 - RNA, 19 nt, Human
acacugaauguagaauugg

SEQ ID NO: 539087 - RNA, 22 nt, Human
acaggcuggugguccuggccau

SEQ ID NO: 539088 - RNA, 23 nt, Human
uugauacagaagaaucaguuugu

SEQ ID NO: 539089 - RNA, 22 nt, Human
uuugugaauagguuggcuucca

SEQ ID NO: 539090 - RNA, 22 nt, Human
guccuucauggaguuacagccu

SEQ ID NO: 539091 - RNA, 22 nt, Human
cucaggccuugaagucuuuucu

SEQ ID NO: 539092 - RNA, 22 nt, Human
cagcuuggcuuccgcuuuacug

SEQ ID NO: 539093 - RNA, 22 nt, Human
ugaagcagaggggucuugagcu

SEQ ID NO: 539094 - RNA, 22 nt, Human
aucugccuggcuccaggugagc

SEQ ID NO: 539095 - RNA, 22 nt, Human
uacacauccauguuuugacuuu

SEQ ID NO: 539096 - RNA, 17 nt, Human
cugaggggagugcugug

SEQ ID NO: 539097 - RNA, 22 nt, Human
aaagauuauggaacacacauga

SEQ ID NO: 539098 - RNA, 23 nt, Human
uaguuauuuucucuguaauuugc

SEQ ID NO: 539099 - RNA, 22 nt, Human
agagcugcaauuucauguggug

SEQ ID NO: 539100 - RNA, 22 nt, Human
auauuuguaguggguaagaagu

SEQ ID NO: 539101 - RNA, 22 nt, Human
uuuauuguguugaaacugaauu

SEQ ID NO: 539102 - RNA, 22 nt, Human
acuauuuacucaaaugagguug

SEQ ID NO: 539103 - RNA, 22 nt, Human
uggaggugggagggacuguccu

SEQ ID NO: 539104 - RNA, 22 nt, Human
aacaucuucagagaagcuaagu

SEQ ID NO: 539105 - RNA, 22 nt, Human
guccucagucaguuuggugggg

SEQ ID NO: 539106 - RNA, 22 nt, Human
ucauauaagagcuuuagaguca

SEQ ID NO: 539107 - RNA, 22 nt, Human
ucaugccacuuacaaaauaaug

SEQ ID NO: 539108 - RNA, 22 nt, Human
gacccagccugguuuuuauagg

SEQ ID NO: 539109 - RNA, 22 nt, Human
uauggcuucuuuugcaacuacu

SEQ ID NO: 539110 - RNA, 22 nt, Human
ccaggggaaacagggagcacuc

SEQ ID NO: 539111 - RNA, 22 nt, Human
caggagguuguaagagcaggcc

SEQ ID NO: 539112 - RNA, 23 nt, Human
cuugcagggcuggaggcuuagaa

SEQ ID NO: 539113 - RNA, 23 nt, Human
auggagcugguacuagcuaccuc

SEQ ID NO: 539114 - RNA, 21 nt, Human
cagugagguccccagccuagg

SEQ ID NO: 539115 - RNA, 22 nt, Human
aauauuugcaucauuagcuauu

SEQ ID NO: 539116 - RNA, 22 nt, Human
uguaagauauucagcuuauuga

SEQ ID NO: 539117 - RNA, 22 nt, Human
ggaggggagucucccaaagccg

SEQ ID NO: 539118 - RNA, 21 nt, Human
auuuuguacauagaauuuguc

SEQ ID NO: 539119 - RNA, 22 nt, Human
aaugaaauguagcuuauccaua

SEQ ID NO: 539120 - RNA, 22 nt, Human
ugugcuucaucacuucucaguu

SEQ ID NO: 539121 - RNA, 22 nt, Human
acagaacugggggcacagauag

SEQ ID NO: 539122 - RNA, 23 nt, Human
caggacaugggaggaaguauggc

SEQ ID NO: 539123 - RNA, 19 nt, Human
ggcaggcuggauagagagg

SEQ ID NO: 539124 - RNA, 22 nt, Human
uaagaaacccaggaauuucuua

SEQ ID NO: 539125 - RNA, 22 nt, Human
cagguagguauggugcagucuu

SEQ ID NO: 539126 - RNA, 22 nt, Human
ggcagucuuaucagcauuggac

SEQ ID NO: 539127 - RNA, 22 nt, Human
accaaaggcagagcugaacacu

SEQ ID NO: 539128 - RNA, 18 nt, Human
ggacaucaucaggugcuu

SEQ ID NO: 539129 - RNA, 22 nt, Human
gccugccuuuuggaggcacauu

SEQ ID NO: 539130 - RNA, 22 nt, Human
gugucccaaucuacuuuucccu

SEQ ID NO: 539131 - RNA, 22 nt, Human
guauuccuucagaagacguuua

SEQ ID NO: 539132 - RNA, 22 nt, Human
uggagcagggcaucacugugcg

SEQ ID NO: 539133 - RNA, 22 nt, Human
aaagagcccuuccaugacucuu

SEQ ID NO: 539134 - RNA, 22 nt, Human
uaaaucacuccuaauaaucagu

SEQ ID NO: 539135 - RNA, 22 nt, Human
uggaagcacugaagagacaacc

SEQ ID NO: 539136 - RNA, 22 nt, Human
ccuggcugguggcagcgacaag

SEQ ID NO: 539137 - RNA, 22 nt, Human
uucauuugugugccugaugcaa

SEQ ID NO: 539138 - RNA, 22 nt, Human
gccuggcccagggcuccgcagg

SEQ ID NO: 539139 - RNA, 22 nt, Human
gcugagcacaccuaggguagag

SEQ ID NO: 539140 - RNA, 22 nt, Human
cucagaguccccacaucugggu

SEQ ID NO: 539141 - RNA, 22 nt, Human
uuugugcagauguauauuugug

SEQ ID NO: 539142 - RNA, 21 nt, Human
ugaggcaggggugcuuuuguc

SEQ ID NO: 539143 - RNA, 18 nt, Human
ucauuuguuuugcaugaa

SEQ ID NO: 539144 - RNA, 22 nt, Human
caaaagucuuccuauucucuua

SEQ ID NO: 539145 - RNA, 22 nt, Human
ugcacacauguauguauaugug

SEQ ID NO: 539146 - RNA, 22 nt, Human
gggaaauugugugagaucuuug

SEQ ID NO: 539147 - RNA, 20 nt, Human
uuucagagugucuuuccauu

SEQ ID NO: 539148 - RNA, 22 nt, Human
ucugagagguuaagcaauuuga

SEQ ID NO: 539149 - RNA, 22 nt, Human
uggcuggacagugggcagugga

SEQ ID NO: 539150 - RNA, 22 nt, Human
cagggcucuuccggagcaggga

SEQ ID NO: 539151 - RNA, 22 nt, Human
cucuccagaauaugccgccgug

SEQ ID NO: 539152 - RNA, 22 nt, Human
ugcacagcuggcucuccuuuuc

SEQ ID NO: 539153 - RNA, 22 nt, Human
cagggccucauccucagagauu

SEQ ID NO: 539154 - RNA, 22 nt, Human
ccuggcucugccguaaccacca

SEQ ID NO: 539155 - RNA, 22 nt, Human
uggauaaacucacuguaaguug

SEQ ID NO: 539156 - RNA, 22 nt, Human
agauacauugaguuuccuccug

SEQ ID NO: 539157 - RNA, 22 nt, Human
guuucuaagcacaugugagugu

SEQ ID NO: 539158 - RNA, 22 nt, Human
ucugagagcuguagaagccuau

SEQ ID NO: 539159 - RNA, 22 nt, Human
gagcuuuaagggauaaaaugau

SEQ ID NO: 539160 - RNA, 22 nt, Human
gggcaguuuauucuagaugguu

SEQ ID NO: 539161 - RNA, 22 nt, Human
gggcucauucaucugggcuugg

SEQ ID NO: 539162 - RNA, 20 nt, Human
uggcaucucucaauuguagg

SEQ ID NO: 539163 - RNA, 22 nt, Human
aagcugccaaugguaagcugcu

SEQ ID NO: 539164 - RNA, 22 nt, Human
ugugaaggcagcagcucugucc

SEQ ID NO: 539165 - RNA, 22 nt, Human
guuuccaaccccaccaaagugc

SEQ ID NO: 539166 - RNA, 22 nt, Human
aagcugccuugcugaggagaaa

SEQ ID NO: 539167 - RNA, 22 nt, Human
cacagauagaccuuaugagauu

SEQ ID NO: 539168 - RNA, 22 nt, Human
auguuccuuccagagagcagaa

SEQ ID NO: 539169 - RNA, 21 nt, Human
ucacagacuggucagugaggc

SEQ ID NO: 539170 - RNA, 22 nt, Human
uugaaauccaauuaucauaugu

SEQ ID NO: 539171 - RNA, 18 nt, Human
aggcuucccaggcaggcc

SEQ ID NO: 539172 - RNA, 22 nt, Human
aggcagagcuaggaagaauugu

SEQ ID NO: 539173 - RNA, 22 nt, Human
gcagggccagguacaagaagca

SEQ ID NO: 539174 - RNA, 22 nt, Human
ggucagguuuuuaggagugacc

SEQ ID NO: 539175 - RNA, 22 nt, Human
ggggcagaguagcuggggugug

SEQ ID NO: 539176 - RNA, 22 nt, Human
agucuaauguuuguaaaaucau

SEQ ID NO: 539177 - RNA, 22 nt, Human
gagucaguaauggauaugucau

SEQ ID NO: 539178 - RNA, 20 nt, Human
gagggugggacuuccuaggc

SEQ ID NO: 539179 - RNA, 22 nt, Human
uggcaaaggcgcucacaugccu

SEQ ID NO: 539180 - RNA, 22 nt, Human
uagaaucccagccagcuggaag

SEQ ID NO: 539181 - RNA, 22 nt, Human
uaaaguguaugccaucucucau

SEQ ID NO: 539182 - RNA, 22 nt, Human
uggaagaaggcagagaggcauu

SEQ ID NO: 539183 - RNA, 22 nt, Human
ucccagagugagccaggggcag

SEQ ID NO: 539184 - RNA, 22 nt, Human
auguaacuucugugaaucugac

SEQ ID NO: 539185 - RNA, 22 nt, Human
uccugccuaccuugcggaggug

SEQ ID NO: 539186 - RNA, 22 nt, Human
aaugucugccagaacugaucau

SEQ ID NO: 539187 - RNA, 22 nt, Human
ucagagucaacuguugccuguu

SEQ ID NO: 539188 - RNA, 22 nt, Human
agcaggcaggaggcuacuaagg

SEQ ID NO: 539189 - RNA, 22 nt, Human
uucagcuaaugggaauaagagu

SEQ ID NO: 539190 - RNA, 22 nt, Human
agcaggcuuacuuucugauuag

SEQ ID NO: 539191 - RNA, 22 nt, Human
auauguguaaaugcauuuguuu

SEQ ID NO: 539192 - RNA, 22 nt, Human
uauauuaccugccugaucuaua

SEQ ID NO: 539193 - RNA, 22 nt, Human
uuuuaaugggcgacuauuaugg

SEQ ID NO: 539194 - RNA, 22 nt, Human
ugcaaagaacuaagcagccuua

SEQ ID NO: 539195 - RNA, 22 nt, Human
aucuacagcugucugcacagua

SEQ ID NO: 539196 - RNA, 22 nt, Human
cauuuguuuagaagucuuuaua

SEQ ID NO: 539197 - RNA, 22 nt, Human
acauauauguaaaguacuuugu

SEQ ID NO: 539198 - RNA, 22 nt, Human
ccugucucuuucaaucugagag

SEQ ID NO: 539199 - RNA, 22 nt, Human
uuuguuuucuguaggccuuucc

SEQ ID NO: 539200 - RNA, 22 nt, Human
aggcugcguuagccucacuccc

SEQ ID NO: 539201 - RNA, 22 nt, Human
uuauguaccugaauuaguaaag

SEQ ID NO: 539202 - RNA, 19 nt, Human
ucaaaggcuuuuaggagac

SEQ ID NO: 539203 - RNA, 22 nt, Human
gcauccaaaccauucaucagcc

SEQ ID NO: 539204 - RNA, 22 nt, Human
cacuggugacuucugagcugga

SEQ ID NO: 539205 - RNA, 22 nt, Human
acauuugaaauaaacucaagug

SEQ ID NO: 539206 - RNA, 22 nt, Human
agauggagaccuuggaugaacu

SEQ ID NO: 539207 - RNA, 22 nt, Human
ggcugaaacagauuucaagaca

SEQ ID NO: 539208 - RNA, 22 nt, Human
agcagaaacagccagucuggac

SEQ ID NO: 539209 - RNA, 22 nt, Human
cuggaaggcucugcugccuguc

SEQ ID NO: 539210 - RNA, 22 nt, Human
uccugcagagacagaggccuca

SEQ ID NO: 539211 - RNA, 22 nt, Human
aaaagacaucuauuucaggcag

SEQ ID NO: 539212 - RNA, 20 nt, Human
ccagagcugauggcugcccg

SEQ ID NO: 539213 - RNA, 22 nt, Human
acaaagugaauugcaucgaguu

SEQ ID NO: 539214 - RNA, 22 nt, Human
aagcuccccgaaacccaccucu

SEQ ID NO: 539215 - RNA, 22 nt, Human
uguguuuuacaaauucucuuaa

SEQ ID NO: 539216 - RNA, 22 nt, Human
cuggacagaaaccaguccuggg

SEQ ID NO: 539217 - RNA, 22 nt, Human
gauuuauugucccuguccugcu

SEQ ID NO: 539218 - RNA, 22 nt, Human
uggaagccaggcccgcuccuaa

SEQ ID NO: 539219 - RNA, 22 nt, Human
ccuuuuucaauauagaauugca

SEQ ID NO: 539220 - RNA, 19 nt, Human
ggcucuggcggcuguagcc

SEQ ID NO: 539221 - RNA, 22 nt, Human
ucagaucacaaaaguuucuauu

SEQ ID NO: 539222 - RNA, 22 nt, Human
aacaucuacagugagauguuag

SEQ ID NO: 539223 - RNA, 22 nt, Human
agucugcaggcugugauuuuuu

SEQ ID NO: 539224 - RNA, 22 nt, Human
ugcaggugucuccagggcaggu

SEQ ID NO: 539225 - RNA, 22 nt, Human
cagacuuucuggaagcuaaaaa

SEQ ID NO: 539226 - RNA, 22 nt, Human
auuuuuucagauugaguguuaa

SEQ ID NO: 539227 - RNA, 22 nt, Human
ucucagaggugcccuggcaucu

SEQ ID NO: 539228 - RNA, 20 nt, Human
gaggcucugggcauggcgcc

SEQ ID NO: 539229 - RNA, 22 nt, Human
uuccuguauucuaaagggaaag

SEQ ID NO: 539230 - RNA, 22 nt, Human
cagucucugccacuucuaagcu

SEQ ID NO: 539231 - RNA, 22 nt, Human
ucagacuugacuuuguaaguuu

SEQ ID NO: 539232 - RNA, 22 nt, Human
gagugguaggcaguguuaggaa

SEQ ID NO: 539233 - RNA, 22 nt, Human
ucaguggaacugucugggugag

SEQ ID NO: 539234 - RNA, 22 nt, Human
gagaauauauugaaguaguucc

SEQ ID NO: 539235 - RNA, 22 nt, Human
gaauauuuucaguacagauggu

SEQ ID NO: 539236 - RNA, 22 nt, Human
cugcuggaaguuugcuguggau

SEQ ID NO: 539237 - RNA, 22 nt, Human
cauuacaaccccaaauuacaaa

SEQ ID NO: 539238 - RNA, 22 nt, Human
ucuauaaauuaugcagucucag

SEQ ID NO: 539239 - RNA, 22 nt, Human
uuuccuaggagauugaucacau

SEQ ID NO: 539240 - RNA, 22 nt, Human
uugucugaaagaucauuacauu

SEQ ID NO: 539241 - RNA, 22 nt, Human
uaaaggcagccuaggaaguguu

SEQ ID NO: 539242 - RNA, 22 nt, Human
uauaguaaaauuuucauuuaug

SEQ ID NO: 539243 - RNA, 21 nt, Human
ggccaguggccuugacuuucc

SEQ ID NO: 539244 - RNA, 23 nt, Human
ggcuggcccggggcugcuccuga

SEQ ID NO: 539245 - RNA, 22 nt, Human
gacauguauuaguacauauggu

SEQ ID NO: 539246 - RNA, 22 nt, Human
accaggagccauagagucaggc

SEQ ID NO: 539247 - RNA, 22 nt, Human
uacagaaggaaguuuagcuaaa

SEQ ID NO: 539248 - RNA, 22 nt, Human
uuuauucacucauucagccagu

SEQ ID NO: 539249 - RNA, 22 nt, Human
gucccagggaugcagacaugag

SEQ ID NO: 539250 - RNA, 22 nt, Human
gaaaauuauugaaaauggcucu

SEQ ID NO: 539251 - RNA, 22 nt, Human
uauuuaauaaaacuauggcaug

SEQ ID NO: 539252 - RNA, 22 nt, Human
acacauuaucucauuaaauacu

SEQ ID NO: 539253 - RNA, 23 nt, Human
cuggcuccgaagacuccaggauc

SEQ ID NO: 539254 - RNA, 22 nt, Human
ucagaggaaaggucagauggcu

SEQ ID NO: 539255 - RNA, 22 nt, Human
ucaaaauuuuauuucucaagga

SEQ ID NO: 539256 - RNA, 22 nt, Human
ucucagugauggcccauuugga

SEQ ID NO: 539257 - RNA, 22 nt, Human
uggcucagaagaaaagguaaac

SEQ ID NO: 539258 - RNA, 22 nt, Human
cuagaaaugcucaagagaaagu

SEQ ID NO: 539259 - RNA, 19 nt, Human
ggcauccacgaaugcagag

SEQ ID NO: 539260 - RNA, 22 nt, Human
cagcucuuuuucacacaacaug

SEQ ID NO: 539261 - RNA, 22 nt, Human
aaauucuuucauggcuaauaag

SEQ ID NO: 539262 - RNA, 22 nt, Human
uagaaaacuaauacaugcuuga

SEQ ID NO: 539263 - RNA, 22 nt, Human
ucaagagagugcugcuuggggu

SEQ ID NO: 539264 - RNA, 22 nt, Human
uaaagcaggcaucucucuccuc

SEQ ID NO: 539265 - RNA, 22 nt, Human
uucauuccugagcccauauuua

SEQ ID NO: 539266 - RNA, 23 nt, Human
uuuauacaagaaaccgcuggccu

SEQ ID NO: 539267 - RNA, 22 nt, Human
ccaagcuacuuaggagucugag

SEQ ID NO: 539268 - RNA, 22 nt, Human
uuucuucucaucccugaaauca

SEQ ID NO: 539269 - RNA, 22 nt, Human
cugagcucuaaugucagccuug

SEQ ID NO: 539270 - RNA, 22 nt, Human
uggcugcugagaaggcagcugu

SEQ ID NO: 539271 - RNA, 22 nt, Human
auuuccaguacccagaacagag

SEQ ID NO: 539272 - RNA, 23 nt, Human
uguaugaauaugccacaguuuaa

SEQ ID NO: 539273 - RNA, 22 nt, Human
agcugccauccuguucagcacc

SEQ ID NO: 539274 - RNA, 22 nt, Human
aauguauuccucaugcaagagu

SEQ ID NO: 539275 - RNA, 22 nt, Human
aacaggagaguaaauauaugau

SEQ ID NO: 539276 - RNA, 22 nt, Human
aaacauuugcaacucgguuugg

SEQ ID NO: 539277 - RNA, 19 nt, Human
cuucuaagucauuuggaau

SEQ ID NO: 539278 - RNA, 21 nt, Human
guuuuaagggagaaaaccuag

SEQ ID NO: 539279 - RNA, 19 nt, Human
gucaccauuuccaaaugcc

SEQ ID NO: 539280 - RNA, 22 nt, Human
gaagauuucuuuaugaaagaug

SEQ ID NO: 539281 - RNA, 22 nt, Human
gagcaggugccuguagcucucu

SEQ ID NO: 539282 - RNA, 22 nt, Human
auguaacaaaugguauacaugu

SEQ ID NO: 539283 - RNA, 22 nt, Human
uguucccuccuccccacugggu

SEQ ID NO: 539284 - RNA, 22 nt, Human
cuccuuccccuacucagcaucc

SEQ ID NO: 539285 - RNA, 22 nt, Human
gccagcagccacagaagucacu

SEQ ID NO: 539286 - RNA, 22 nt, Human
gaguuauagauggacuauuauu

SEQ ID NO: 539287 - RNA, 22 nt, Human
uggcacugaccccaggccugug

SEQ ID NO: 539288 - RNA, 22 nt, Human
agggggcaucagguccuggcuc

SEQ ID NO: 539289 - RNA, 22 nt, Human
uaaagguaugucuuaaucaaac

SEQ ID NO: 539290 - RNA, 22 nt, Human
ugccugucucugacugccauua

SEQ ID NO: 539291 - RNA, 22 nt, Human
cccagcagccagaaugaggagc

SEQ ID NO: 539292 - RNA, 22 nt, Human
agucccagcuucccccaugcag

SEQ ID NO: 539293 - RNA, 22 nt, Human
caggaagcugugaaggagacgg

SEQ ID NO: 539294 - RNA, 22 nt, Human
ucugucacccaggcuggagugc

SEQ ID NO: 539295 - RNA, 22 nt, Human
ccugugugucugucacugcaca

SEQ ID NO: 539296 - RNA, 22 nt, Human
augauggugggagaugacccag

SEQ ID NO: 539297 - RNA, 22 nt, Human
agggcugccugacuccagagcc

SEQ ID NO: 539298 - RNA, 22 nt, Human
gagagugagauccuccugggga

SEQ ID NO: 539299 - RNA, 22 nt, Human
caagaauauauauggaguggag

SEQ ID NO: 539300 - RNA, 22 nt, Human
gucaggauuauuuuauuaaaag

SEQ ID NO: 539301 - RNA, 22 nt, Human
ucuaguucuagaucccugagga

SEQ ID NO: 539302 - RNA, 22 nt, Human
ucucagagggaaaggccaauuu

SEQ ID NO: 539303 - RNA, 22 nt, Human
acauuucuauagugcaucuguu

SEQ ID NO: 539304 - RNA, 22 nt, Human
uccugccucuuuucuuauucca

SEQ ID NO: 539305 - RNA, 22 nt, Human
gaaugcaaauauauggaucagu

SEQ ID NO: 539306 - RNA, 22 nt, Human
aguuuaugaaacacagauuuga

SEQ ID NO: 539307 - RNA, 22 nt, Human
uuugacaugugcuuauaacuuu

SEQ ID NO: 539308 - RNA, 22 nt, Human
ucuuccaagguugcacacuauc

SEQ ID NO: 539309 - RNA, 22 nt, Human
uauuugucagcuguugaguuca

SEQ ID NO: 539310 - RNA, 22 nt, Human
cugcacagagcagggcagacac

SEQ ID NO: 539311 - RNA, 22 nt, Human
uuuagcauguuccuuucauaga

SEQ ID NO: 539312 - RNA, 22 nt, Human
uuugaguugcuuauuuaauagg

SEQ ID NO: 539313 - RNA, 22 nt, Human
ucuuagcacagcuauauaaguu

SEQ ID NO: 539314 - RNA, 22 nt, Human
aggagugggggcgagaaguuaa

SEQ ID NO: 539315 - RNA, 22 nt, Human
cuuucauuugauaagaaugcca

SEQ ID NO: 539316 - RNA, 22 nt, Human
ggcugguguugagugccuguag

SEQ ID NO: 539317 - RNA, 19 nt, Human
gagcugccuuuugaagacc

SEQ ID NO: 539318 - RNA, 22 nt, Human
aagaccauugcuguauuuguag

SEQ ID NO: 539319 - RNA, 23 nt, Human
cuggucagaggcugcuggaaggg

SEQ ID NO: 539320 - RNA, 22 nt, Human
cuagucacucagcacugacaaa

SEQ ID NO: 539321 - RNA, 23 nt, Human
gggcuccagucucugcucaguug

SEQ ID NO: 539322 - RNA, 22 nt, Human
auacauaguucugugaaaagua

SEQ ID NO: 539323 - RNA, 22 nt, Human
ugcccaggcuggagugcagagg

SEQ ID NO: 539324 - RNA, 21 nt, Human
gcaggcuggucaaaccucagu

SEQ ID NO: 539325 - RNA, 22 nt, Human
ccaaagucuggagcagcagagc

SEQ ID NO: 539326 - RNA, 22 nt, Human
ugggccuucuaaucuggucccu

SEQ ID NO: 539327 - RNA, 22 nt, Human
aguguggguuuuauggagcccu

SEQ ID NO: 539328 - RNA, 22 nt, Human
uguuuaauucaccaucauguuc

SEQ ID NO: 539329 - RNA, 22 nt, Human
gguccuggaaauugacggaaag

SEQ ID NO: 539330 - RNA, 17 nt, Human
ggagagugggaauggcc

SEQ ID NO: 539331 - RNA, 22 nt, Human
ucuucccauuaguaaugaagug

SEQ ID NO: 539332 - RNA, 22 nt, Human
ugugauuauauuguaguacauu

SEQ ID NO: 539333 - RNA, 22 nt, Human
aacuguaauuuuuacauaguaa

SEQ ID NO: 539334 - RNA, 22 nt, Human
agcacacaggacuugauucaug

SEQ ID NO: 539335 - RNA, 22 nt, Human
uuugucuucauccuucgagcug

SEQ ID NO: 539336 - RNA, 22 nt, Human
uuuaaaaaacuagucugagucu

SEQ ID NO: 539337 - RNA, 22 nt, Human
uaccaaguguauuaugcuuugu

SEQ ID NO: 539338 - RNA, 22 nt, Human
acugccuggcagagguuugcaa

SEQ ID NO: 539339 - RNA, 23 nt, Human
acagcugcaccuggccgccuggc

SEQ ID NO: 539340 - RNA, 22 nt, Human
aagaauauuuccugcacuuggg

SEQ ID NO: 539341 - RNA, 22 nt, Human
uaagcaaaagucgagugugagc

SEQ ID NO: 539342 - RNA, 22 nt, Human
gaggccuggguuggaggugcau

SEQ ID NO: 539343 - RNA, 21 nt, Human
ugcccuggggcucuucccuca

SEQ ID NO: 539344 - RNA, 22 nt, Human
augcacagacccaaaggccauc

SEQ ID NO: 539345 - RNA, 22 nt, Human
aggucccaggcauagcuggucu

SEQ ID NO: 539346 - RNA, 22 nt, Human
gggccaggucggugaaugguca

SEQ ID NO: 539347 - RNA, 22 nt, Human
caguucaggccggcugacucag

SEQ ID NO: 539348 - RNA, 22 nt, Human
acauacauaugacaacuuuccu

SEQ ID NO: 539349 - RNA, 22 nt, Human
ucagcuuucucuucuaucgaua

SEQ ID NO: 539350 - RNA, 23 nt, Human
uuucuucucgaagagggagcuua

SEQ ID NO: 539351 - RNA, 22 nt, Human
cugggaagccacaggguguggg

SEQ ID NO: 539352 - RNA, 22 nt, Human
caggcacugugcuagauccuug

SEQ ID NO: 539353 - RNA, 22 nt, Human
aaggcccugucuccaaauacag

SEQ ID NO: 539354 - RNA, 18 nt, Human
ccugagcccugcuuacuu

SEQ ID NO: 539355 - RNA, 22 nt, Human
cagguggcuucucccuaggcca

SEQ ID NO: 539356 - RNA, 22 nt, Human
agauauuuaaaucagacaaaga

SEQ ID NO: 539357 - RNA, 23 nt, Human
uuauugcaagguaaaauugcuga

SEQ ID NO: 539358 - RNA, 22 nt, Human
auuauaaagaacaugugugugg

SEQ ID NO: 539359 - RNA, 18 nt, Human
ugaauagggguuugcaga

SEQ ID NO: 539360 - RNA, 22 nt, Human
acccaggagguggaggcugcag

SEQ ID NO: 539361 - RNA, 22 nt, Human
uaaaaugccagaccaguucacg

SEQ ID NO: 539362 - RNA, 22 nt, Human
aacuuuaaaaaauaugucuguu

SEQ ID NO: 539363 - RNA, 22 nt, Human
uuuacagucaccaaacuuugcu

SEQ ID NO: 539364 - RNA, 22 nt, Human
cuuaaauuuucaucuacaagaa

SEQ ID NO: 539365 - RNA, 22 nt, Human
acagagcaguaagaacacagcu

SEQ ID NO: 539366 - RNA, 22 nt, Human
augaaggauggcuggcugcccu

SEQ ID NO: 539367 - RNA, 19 nt, Human
uuucaaagggcauaagccu

SEQ ID NO: 539368 - RNA, 21 nt, Human
gagugcaggucugaugccauc

SEQ ID NO: 539369 - RNA, 22 nt, Human
guuauucaauggcuuauaagga

SEQ ID NO: 539370 - RNA, 22 nt, Human
gcucucuggaggccauggacag

SEQ ID NO: 539371 - RNA, 22 nt, Human
aacacuuucuuccuugcucagg

SEQ ID NO: 539372 - RNA, 20 nt, Human
ugaagaggaagaggacggcc

SEQ ID NO: 539373 - RNA, 22 nt, Human
caguuaaaggcccaauaucugg

SEQ ID NO: 539374 - RNA, 22 nt, Human
uggccucuuacgacauagccuu

SEQ ID NO: 539375 - RNA, 19 nt, Human
ugucucugaaagaugagcu

SEQ ID NO: 539376 - RNA, 22 nt, Human
ccucucccacguggcagaggcu

SEQ ID NO: 539377 - RNA, 22 nt, Human
ugucucugugacuccuuccgcc

SEQ ID NO: 539378 - RNA, 22 nt, Human
guccagaagcucaaguugaacu

SEQ ID NO: 539379 - RNA, 22 nt, Human
gaauacaaacuuaaggcuuuac

SEQ ID NO: 539380 - RNA, 22 nt, Human
cucugagagcggucuguggcuu

SEQ ID NO: 539381 - RNA, 22 nt, Human
ucuggcuccacuuucuucauuu

SEQ ID NO: 539382 - RNA, 22 nt, Human
uccauuuucaucucauguauaa

SEQ ID NO: 539383 - RNA, 22 nt, Human
agugcugaacauagaauggaca

SEQ ID NO: 539384 - RNA, 22 nt, Human
aaugggaagucacuacuguuac

SEQ ID NO: 539385 - RNA, 22 nt, Human
gcaguggcuaagcucgcaugca

SEQ ID NO: 539386 - RNA, 22 nt, Human
auucuuaauugccaugcuguau

SEQ ID NO: 539387 - RNA, 22 nt, Human
ccuggcaggccccuccuggauu

SEQ ID NO: 539388 - RNA, 22 nt, Human
uggagauggguuaauggagaga

SEQ ID NO: 539389 - RNA, 22 nt, Human
acaucucaugaaugauaaauca

SEQ ID NO: 539390 - RNA, 22 nt, Human
aaggcagggaaaguggauuagg

SEQ ID NO: 539391 - RNA, 22 nt, Human
ggcagggugccuggcuccuguu

SEQ ID NO: 539392 - RNA, 23 nt, Human
ugcugguguuuuugggaccaggg

SEQ ID NO: 539393 - RNA, 22 nt, Human
gcuggagcugaguucccugggc

SEQ ID NO: 539394 - RNA, 22 nt, Human
uucaggaucaaguugccaguag

SEQ ID NO: 539395 - RNA, 22 nt, Human
uccugagauguggagcuccaug

SEQ ID NO: 539396 - RNA, 22 nt, Human
ccacuguauuuuggaagcagau

SEQ ID NO: 539397 - RNA, 22 nt, Human
uugugcaauuuaaaaucuuccu

SEQ ID NO: 539398 - RNA, 18 nt, Human
gugagcagagagcaucac

SEQ ID NO: 539399 - RNA, 22 nt, Human
cugcagaggucuugcugauggu

SEQ ID NO: 539400 - RNA, 22 nt, Human
augccaggccccacgcugggca

SEQ ID NO: 539401 - RNA, 22 nt, Human
aucauaagacccagccaguauu

SEQ ID NO: 539402 - RNA, 22 nt, Human
gcuggucagggagggcacccau

SEQ ID NO: 539403 - RNA, 22 nt, Human
aaggcauauauucuaaacagga

SEQ ID NO: 539404 - RNA, 22 nt, Human
gugaggggaguaaagccauguu

SEQ ID NO: 539405 - RNA, 22 nt, Human
uggggcuggcacagucucuauu

SEQ ID NO: 539406 - RNA, 22 nt, Human
uugcccugcguuaccaucucuu

SEQ ID NO: 539407 - RNA, 20 nt, Human
uggcuccugcgguggaacca

SEQ ID NO: 539408 - RNA, 22 nt, Human
augcaaggacauguaaugaugu

SEQ ID NO: 539409 - RNA, 22 nt, Human
cucagaguggggcucccugagg

SEQ ID NO: 539410 - RNA, 22 nt, Human
uucuagauaucuaguguauaac

SEQ ID NO: 539411 - RNA, 22 nt, Human
aaggggaaaaaguguuaggagu

SEQ ID NO: 539412 - RNA, 22 nt, Human
acucagaggcagcugcucaccc

SEQ ID NO: 539413 - RNA, 22 nt, Human
uugggggcagagggagcaucug

SEQ ID NO: 539414 - RNA, 22 nt, Human
ugaaggcuguuggauggggaag

SEQ ID NO: 539415 - RNA, 20 nt, Human
aagcccauuaccaugcuugg

SEQ ID NO: 539416 - RNA, 20 nt, Human
uuucaaaggcaccuaugaag

SEQ ID NO: 539417 - RNA, 22 nt, Human
agaagcuuccuacauuguucuu

SEQ ID NO: 539418 - RNA, 22 nt, Human
ucaaaggcugcuugucuucugg

SEQ ID NO: 539419 - RNA, 22 nt, Human
uggagccuccucacacuguggc

SEQ ID NO: 539420 - RNA, 20 nt, Human
gucaggauuaguaaacucug

SEQ ID NO: 539421 - RNA, 22 nt, Human
gcccugugcgacucuagagguu

SEQ ID NO: 539422 - RNA, 21 nt, Human
uccugccuuaguccagagcag

SEQ ID NO: 539423 - RNA, 22 nt, Human
agaaauguuuauggcugccuau

SEQ ID NO: 539424 - RNA, 22 nt, Human
cagggagggacaauugucaccu

SEQ ID NO: 539425 - RNA, 22 nt, Human
agggacuugaugucagggagau

SEQ ID NO: 539426 - RNA, 22 nt, Human
cggcuggugucgggcacagcaa

SEQ ID NO: 539427 - RNA, 22 nt, Human
agcagggcuggauuuggcaaga

SEQ ID NO: 539428 - RNA, 22 nt, Human
gcagcccaaaaaagagguagau

SEQ ID NO: 539429 - RNA, 22 nt, Human
uucacauuauaaucaguucugc

SEQ ID NO: 539430 - RNA, 22 nt, Human
cugccuuugcccuugacacugu

SEQ ID NO: 539431 - RNA, 22 nt, Human
gaagagcuccaaaaacagugag

SEQ ID NO: 539432 - RNA, 22 nt, Human
uaugcauacaaugagauauucc

SEQ ID NO: 539433 - RNA, 22 nt, Human
aaauaugacuagaaugccaggu

SEQ ID NO: 539434 - RNA, 22 nt, Human
uuacacaugaagguccaauguu

SEQ ID NO: 539435 - RNA, 22 nt, Human
ucaguuuucauuucaugagcag

SEQ ID NO: 539436 - RNA, 22 nt, Human
cuugaauugggggaagaucacu

SEQ ID NO: 539437 - RNA, 22 nt, Human
ucuuuauuuuaugcuugugcaa

SEQ ID NO: 539438 - RNA, 22 nt, Human
gugucacaagagcccaggaaac

SEQ ID NO: 539439 - RNA, 22 nt, Human
uaggccagaggagcagcuuugg

SEQ ID NO: 539440 - RNA, 22 nt, Human
aggagagagcugagcuuugcug

SEQ ID NO: 539441 - RNA, 22 nt, Human
ccuggcagacugugagggcagg

SEQ ID NO: 539442 - RNA, 22 nt, Human
augcuucagugcuaccuucaaa

SEQ ID NO: 539443 - RNA, 22 nt, Human
cagaggcauuacugaaaaggug

SEQ ID NO: 539444 - RNA, 22 nt, Human
gagaaagggaacuuacagagug

SEQ ID NO: 539445 - RNA, 23 nt, Human
acagagguccaaacaguauaagc

SEQ ID NO: 539446 - RNA, 22 nt, Human
cugggccuggcguuccaggcug

SEQ ID NO: 539447 - RNA, 22 nt, Human
ucacagcagaauuuaggaggca

SEQ ID NO: 539448 - RNA, 22 nt, Human
gcugagggcuguaacagcagag

SEQ ID NO: 539449 - RNA, 22 nt, Human
ucacuguugaccuggaaguggg

SEQ ID NO: 539450 - RNA, 22 nt, Human
ggcugcagcagagggacucacg

SEQ ID NO: 539451 - RNA, 22 nt, Human
uugaaucauuacaauagauaag

SEQ ID NO: 539452 - RNA, 22 nt, Human
auggcagcaaaugucuggcugg

SEQ ID NO: 539453 - RNA, 22 nt, Human
ucgcuugaacccaggaagugga

SEQ ID NO: 539454 - RNA, 22 nt, Human
cagggcucaucugugugaccag

SEQ ID NO: 539455 - RNA, 22 nt, Human
gaagucugcugcucaggaguuu

SEQ ID NO: 539456 - RNA, 22 nt, Human
aggccuccuggcuccaggccuu

SEQ ID NO: 539457 - RNA, 22 nt, Human
aaaaguaauugaugcaaucgua

SEQ ID NO: 539458 - RNA, 22 nt, Human
aaauguuuaaguguaggagcaa

SEQ ID NO: 539459 - RNA, 22 nt, Human
ucauccaguaccauggaaggca

SEQ ID NO: 539460 - RNA, 22 nt, Human
uucaaacuaguuaaaagucaga

SEQ ID NO: 539461 - RNA, 22 nt, Human
uccuuuucccugaagguauuua

SEQ ID NO: 539462 - RNA, 22 nt, Human
ucucuuaauaaguaaauacuga

SEQ ID NO: 539463 - RNA, 22 nt, Human
gggcagcauucugugggcaggu

SEQ ID NO: 539464 - RNA, 22 nt, Human
uucauuuucuuucacgcugcug

SEQ ID NO: 539465 - RNA, 22 nt, Human
aauacagugaaagugagcaagg

SEQ ID NO: 539466 - RNA, 22 nt, Human
aucuuucagggccauuuguauu

SEQ ID NO: 539467 - RNA, 22 nt, Human
cuguggggagcugaucagauca

SEQ ID NO: 539468 - RNA, 22 nt, Human
ugagagcuguccaccuguggga

SEQ ID NO: 539469 - RNA, 22 nt, Human
uguacagucaugcuuucuguuc

SEQ ID NO: 539470 - RNA, 22 nt, Human
guucuggaagcuuuugagcaac

SEQ ID NO: 539471 - RNA, 20 nt, Human
ucauuacagugcuaagaugu

SEQ ID NO: 539472 - RNA, 22 nt, Human
ggugcagaggagccagcugggg

SEQ ID NO: 539473 - RNA, 17 nt, Human
caaggccagcaucuuca

SEQ ID NO: 539474 - RNA, 22 nt, Human
caugucuggguauaugcauaug

SEQ ID NO: 539475 - RNA, 22 nt, Human
uuguaugaccacaaucugacgu

SEQ ID NO: 539476 - RNA, 22 nt, Human
gaauacaagccugccaccugga

SEQ ID NO: 539477 - RNA, 22 nt, Human
cagggcaggacagauacauuac

SEQ ID NO: 539478 - RNA, 22 nt, Human
aaacuugaggcaaugaaggugu

SEQ ID NO: 539479 - RNA, 22 nt, Human
cuccucuuuacccgcauggucu

SEQ ID NO: 539480 - RNA, 22 nt, Human
uuuagcauuacuaaaaugaaaa

SEQ ID NO: 539481 - RNA, 22 nt, Human
ugccagcuccgaggagcugcag

SEQ ID NO: 539482 - RNA, 22 nt, Human
acaguauagggcuuauauugua

SEQ ID NO: 539483 - RNA, 22 nt, Human
uucucucauucaaauuaaagug

SEQ ID NO: 539484 - RNA, 22 nt, Human
acagagcaauucuuggguguuu

SEQ ID NO: 539485 - RNA, 22 nt, Human
agcugccaggccccugagaacc

SEQ ID NO: 539486 - RNA, 22 nt, Human
aauuucagaacccaaauuagcg

SEQ ID NO: 539487 - RNA, 22 nt, Human
ugccuguguaugugcaugcaca

SEQ ID NO: 539488 - RNA, 18 nt, Human
uggagcagguaggcauga

SEQ ID NO: 539489 - RNA, 22 nt, Human
aggagaaguaaggcuagaugau

SEQ ID NO: 539490 - RNA, 20 nt, Human
caccaggcgcucugagaaca

SEQ ID NO: 539491 - RNA, 22 nt, Human
cugcuguguggauucaauggcu

SEQ ID NO: 539492 - RNA, 22 nt, Human
uugaaaguagcagcugcauaug

SEQ ID NO: 539493 - RNA, 22 nt, Human
ugagccuggcggaagcagcgug

SEQ ID NO: 539494 - RNA, 22 nt, Human
uuauccaacaugacuuaugucc

SEQ ID NO: 539495 - RNA, 22 nt, Human
aaguuacauuuuggucuaauug

SEQ ID NO: 539496 - RNA, 22 nt, Human
ucaggaagugccuaggcuggcc

SEQ ID NO: 539497 - RNA, 22 nt, Human
acuguucauuuguccuguaucu

SEQ ID NO: 539498 - RNA, 22 nt, Human
agauaugacuagaagcucauuu

SEQ ID NO: 539499 - RNA, 22 nt, Human
cuguuuucaaagagagagaaug

SEQ ID NO: 539500 - RNA, 22 nt, Human
cagaaguaagauuacugugagu

SEQ ID NO: 539501 - RNA, 22 nt, Human
acacacuguaaggacuaucacu

SEQ ID NO: 539502 - RNA, 22 nt, Human
aucagaaauugcccagcuguuu

SEQ ID NO: 539503 - RNA, 22 nt, Human
uaagcaaaguuuauaaggcucu

SEQ ID NO: 539504 - RNA, 22 nt, Human
agggcucugagugggaaagagg

SEQ ID NO: 539505 - RNA, 22 nt, Human
ugggacagguuggagagaagca

SEQ ID NO: 539506 - RNA, 22 nt, Human
ggcaagagggcagauggagugc

SEQ ID NO: 539507 - RNA, 22 nt, Human
ggcaggugggaacccuccccac

SEQ ID NO: 539508 - RNA, 21 nt, Human
ugauuuaugcccaagucccug

SEQ ID NO: 539509 - RNA, 22 nt, Human
agcugaggcauggacaggcugc

SEQ ID NO: 539510 - RNA, 22 nt, Human
acauuugaaauucugaacagau

SEQ ID NO: 539511 - RNA, 22 nt, Human
ucaggcagaauuaucaaaagau

SEQ ID NO: 539512 - RNA, 22 nt, Human
ugaaaagucuuauauugucuga

SEQ ID NO: 539513 - RNA, 22 nt, Human
auggaaauacagccagagcaga

SEQ ID NO: 539514 - RNA, 22 nt, Human
uguacaguaggaacuuguuauu

SEQ ID NO: 539515 - RNA, 22 nt, Human
gcugcucucucccuaaguuggg

SEQ ID NO: 539516 - RNA, 22 nt, Human
gucucaguuuuccaaacuguca

SEQ ID NO: 539517 - RNA, 22 nt, Human
gccucuggggcagcugagucau

SEQ ID NO: 539518 - RNA, 22 nt, Human
ccugccaggcuuugggcuucug

SEQ ID NO: 539519 - RNA, 22 nt, Human
uaagaccaguaugcauuuucac

SEQ ID NO: 539520 - RNA, 22 nt, Human
uauaauccauucauugauuucu

SEQ ID NO: 539521 - RNA, 22 nt, Human
ugauuacauugguaauguuuau

SEQ ID NO: 539522 - RNA, 22 nt, Human
auuuuccagccuuucuagaacu

SEQ ID NO: 539523 - RNA, 21 nt, Human
accauuaacacccagguuucu

SEQ ID NO: 539524 - RNA, 22 nt, Human
uuugaaagacagaauauuuuug

SEQ ID NO: 539525 - RNA, 22 nt, Human
cuccucuggaaauuccucugcc

SEQ ID NO: 539526 - RNA, 22 nt, Human
cagggccagccgcagcauccac

SEQ ID NO: 539527 - RNA, 22 nt, Human
auagaauaugacuuuuagaucc

SEQ ID NO: 539528 - RNA, 22 nt, Human
ucacguuuuacugagugagaua

SEQ ID NO: 539529 - RNA, 22 nt, Human
aaaucaguuagugguaggauug

SEQ ID NO: 539530 - RNA, 22 nt, Human
cagcuacaaauacuuuuguaug

SEQ ID NO: 539531 - RNA, 22 nt, Human
gggcucuggauggagccugcag

SEQ ID NO: 539532 - RNA, 22 nt, Human
auuucuucaggucagaaauaga

SEQ ID NO: 539533 - RNA, 22 nt, Human
agccccaguaagggagggccug

SEQ ID NO: 539534 - RNA, 22 nt, Human
cacccacauggaaauucacagu

SEQ ID NO: 539535 - RNA, 22 nt, Human
gcugagggcauguguggcgacu

SEQ ID NO: 539536 - RNA, 22 nt, Human
cagcuccugccugggcagcugu

SEQ ID NO: 539537 - RNA, 22 nt, Human
ugggagagaauucuggugacug

SEQ ID NO: 539538 - RNA, 22 nt, Human
uuucuaaggcuaggucuuaagg

SEQ ID NO: 539539 - RNA, 22 nt, Human
augaaacuaaacuacauaaguu

SEQ ID NO: 539540 - RNA, 22 nt, Human
gccuggaaucaugcagggguua

SEQ ID NO: 539541 - RNA, 22 nt, Human
ucuugauuacaaauaacaucau

SEQ ID NO: 539542 - RNA, 20 nt, Human
uuccagagaucugcauuuua

SEQ ID NO: 539543 - RNA, 22 nt, Human
ucugaggccuugggacagaagu

SEQ ID NO: 539544 - RNA, 22 nt, Human
ccugcucugguuuagucagucu

SEQ ID NO: 539545 - RNA, 22 nt, Human
aacuuaaacccacucauguaga

SEQ ID NO: 539546 - RNA, 22 nt, Human
uuauguuuuauggcuauaucau

SEQ ID NO: 539547 - RNA, 22 nt, Human
agccuguccagaggacagggcu

SEQ ID NO: 539548 - RNA, 22 nt, Human
ccugcugggccugagcaaugag

SEQ ID NO: 539549 - RNA, 22 nt, Human
guggggcucccaucuccuggcu

SEQ ID NO: 539550 - RNA, 16 nt, Human
gagaagagcccggcag

SEQ ID NO: 539551 - RNA, 22 nt, Human
ggcucugggucuguggggagcg

SEQ ID NO: 539552 - RNA, 22 nt, Human
ucagcugaguucuagagcacuc

SEQ ID NO: 539553 - RNA, 22 nt, Human
gucuccagggcugcuggcgccu

SEQ ID NO: 539554 - RNA, 22 nt, Human
aaaagagaguugccagucugua

SEQ ID NO: 539555 - RNA, 20 nt, Human
uauaaauucagagcuuuggu

SEQ ID NO: 539556 - RNA, 22 nt, Human
uucacccuggaccagaaauugg

SEQ ID NO: 539557 - RNA, 22 nt, Human
ucugaggccuucagcaugaauc

SEQ ID NO: 539558 - RNA, 22 nt, Human
ugaaauaucauuuucaucuccc

SEQ ID NO: 539559 - RNA, 22 nt, Human
cacugaaggcugcagcucagcc

SEQ ID NO: 539560 - RNA, 22 nt, Human
caagggcagaggcagggccccg

SEQ ID NO: 539561 - RNA, 22 nt, Human
acuguggaugccaaaggggagg

SEQ ID NO: 539562 - RNA, 22 nt, Human
acagccuggacuggcucucugc

SEQ ID NO: 539563 - RNA, 22 nt, Human
ucucccacgguacaggauaaac

SEQ ID NO: 539564 - RNA, 22 nt, Human
cagagcugcagauugaaggcau

SEQ ID NO: 539565 - RNA, 22 nt, Human
ucauaaauugauuaugugcuuu

SEQ ID NO: 539566 - RNA, 21 nt, Human
auggagggaccagggaagcag

SEQ ID NO: 539567 - RNA, 20 nt, Human
uuacagaaaugauguuauuu

SEQ ID NO: 539568 - RNA, 22 nt, Human
guagcagaaucagugcuacaga

SEQ ID NO: 539569 - RNA, 22 nt, Human
ugcuccaggcugcugaagaucu

SEQ ID NO: 539570 - RNA, 22 nt, Human
caagauaucaaugacauaguau

SEQ ID NO: 539571 - RNA, 18 nt, Human
ggcugccuguuccugaag

SEQ ID NO: 539572 - RNA, 22 nt, Human
uagugcacacgcauguagcagu

SEQ ID NO: 539573 - RNA, 22 nt, Human
ucacagacaauuguuuuggugu

SEQ ID NO: 539574 - RNA, 22 nt, Human
ucugaaauguucucuuguuuug

SEQ ID NO: 539575 - RNA, 22 nt, Human
cuagagaaaggcaguggagcaa

SEQ ID NO: 539576 - RNA, 19 nt, Human
agguuacaggugucacaga

SEQ ID NO: 539577 - RNA, 22 nt, Human
uggcucugagacacaggcucuc

SEQ ID NO: 539578 - RNA, 22 nt, Human
uccugguggugccagcugcagg

SEQ ID NO: 539579 - RNA, 22 nt, Human
cccaggaaugggaaggaggaau

SEQ ID NO: 539580 - RNA, 22 nt, Human
gguuucaacuaaaucaagaagg

SEQ ID NO: 539581 - RNA, 22 nt, Human
cuucacaggcaagucuguuuuu

SEQ ID NO: 539582 - RNA, 22 nt, Human
ugcaggaauagcuacagagcug

SEQ ID NO: 539583 - RNA, 22 nt, Human
guauuuucaugauuucagacca

SEQ ID NO: 539584 - RNA, 22 nt, Human
aaaugcacaaagauuuugcacu

SEQ ID NO: 539585 - RNA, 22 nt, Human
ugcugucaagaaaacaagcaau

SEQ ID NO: 539586 - RNA, 19 nt, Human
cucugcccuacagaaagcu

SEQ ID NO: 539587 - RNA, 22 nt, Human
ugcaagaaaugugaagcuacaa

SEQ ID NO: 539588 - RNA, 20 nt, Human
ugcagcugcaggaggguggg

SEQ ID NO: 539589 - RNA, 22 nt, Human
augggcagacagggagcucacg

SEQ ID NO: 539590 - RNA, 22 nt, Human
cuguacagaagcuagagcaaau

SEQ ID NO: 539591 - RNA, 22 nt, Human
guacacacuguuugaucauuuc

SEQ ID NO: 539592 - RNA, 22 nt, Human
uggcuggcaaggcuggagucag

SEQ ID NO: 539593 - RNA, 22 nt, Human
ccacccagcagaggaggcaaga

SEQ ID NO: 539594 - RNA, 23 nt, Human
uggcugagcccacuaucuuggcc

SEQ ID NO: 539595 - RNA, 22 nt, Human
ccugggcucacagccaaggcuc

SEQ ID NO: 539596 - RNA, 22 nt, Human
ucaucaguguccuuaucacuua

SEQ ID NO: 539597 - RNA, 22 nt, Human
gaggcugaaguguacaugggug

SEQ ID NO: 539598 - RNA, 22 nt, Human
uuacaugguuguuggaaaugcu

SEQ ID NO: 539599 - RNA, 22 nt, Human
ucauccagccucaucaggagcu

SEQ ID NO: 539600 - RNA, 22 nt, Human
ggcaaaguuuucaucucauaac

SEQ ID NO: 539601 - RNA, 22 nt, Human
acuagacaucgagcuacagagu

SEQ ID NO: 539602 - RNA, 22 nt, Human
cuuacaaauacacuuaggagag

SEQ ID NO: 539603 - RNA, 22 nt, Human
ccagccuggacugggucuugug

SEQ ID NO: 539604 - RNA, 22 nt, Human
cccaguggagauaggagugugg

SEQ ID NO: 539605 - RNA, 22 nt, Human
cagagcucagagcagggcacuc

SEQ ID NO: 539606 - RNA, 22 nt, Human
aaauggauggaauugacauuua

SEQ ID NO: 539607 - RNA, 22 nt, Human
uacugugacagaguacuuaaac

SEQ ID NO: 539608 - RNA, 22 nt, Human
acugggaguucuccaugucccu

SEQ ID NO: 539609 - RNA, 22 nt, Human
aguuuauagcccagauucaugg

SEQ ID NO: 539610 - RNA, 22 nt, Human
ugucccagguccuagaugacca

SEQ ID NO: 539611 - RNA, 22 nt, Human
gccugccucaaaaucccaguuc

SEQ ID NO: 539612 - RNA, 22 nt, Human
ggcugggcaaacaagacucuuc

SEQ ID NO: 539613 - RNA, 22 nt, Human
cccuggagcuagucugagcaga

SEQ ID NO: 539614 - RNA, 22 nt, Human
aucaacaugacaggagaagaga

SEQ ID NO: 539615 - RNA, 22 nt, Human
uggguggcacuucuggggucca

SEQ ID NO: 539616 - RNA, 22 nt, Human
uauguacaccggggaagguggg

SEQ ID NO: 539617 - RNA, 22 nt, Human
acaguaaugauucugagucucu

SEQ ID NO: 539618 - RNA, 20 nt, Human
aguaggggaaugcaagagca

SEQ ID NO: 539619 - RNA, 22 nt, Human
uccagugguacauggagacacu

SEQ ID NO: 539620 - RNA, 22 nt, Human
cccagaaggucgaggcugcagu

SEQ ID NO: 539621 - RNA, 22 nt, Human
cccaggaggucgaagcugcagu

SEQ ID NO: 539622 - RNA, 22 nt, Human
ccaguuuuuccagugcuuucug

SEQ ID NO: 539623 - RNA, 22 nt, Human
gcugcuggggccuucccucggg

SEQ ID NO: 539624 - RNA, 22 nt, Human
ugugugugacucauacuagaac

SEQ ID NO: 539625 - RNA, 22 nt, Human
aaaaguauuggccaccauuucu

SEQ ID NO: 539626 - RNA, 22 nt, Human
ggcugagacuagagugaggcau

SEQ ID NO: 539627 - RNA, 22 nt, Human
uugaaaggugacauuguuagag

SEQ ID NO: 539628 - RNA, 22 nt, Human
agugaggcuaauaggcaauggu

SEQ ID NO: 539629 - RNA, 22 nt, Human
guauucuugaguggcaacuagg

SEQ ID NO: 539630 - RNA, 22 nt, Human
uaaauguguaaaccuccauuac

SEQ ID NO: 539631 - RNA, 22 nt, Human
aagggcucugugugccucccca

SEQ ID NO: 539632 - RNA, 22 nt, Human
ggugucccaggccagcugugug

SEQ ID NO: 539633 - RNA, 22 nt, Human
ugcagcuuaucucuuuggcagu

SEQ ID NO: 539634 - RNA, 22 nt, Human
uuucagagaugcagaauucagg

SEQ ID NO: 539635 - RNA, 22 nt, Human
aucuuuucuguuugcuaugucu

SEQ ID NO: 539636 - RNA, 22 nt, Human
acauuucagugagcuauugaag

SEQ ID NO: 539637 - RNA, 22 nt, Human
gcaggcugaugacuggaguugg

SEQ ID NO: 539638 - RNA, 22 nt, Human
uuucucaaguucagauauuuga

SEQ ID NO: 539639 - RNA, 22 nt, Human
gagguccucuguguccgcgggc

SEQ ID NO: 539640 - RNA, 22 nt, Human
agagccagccuucucagcuuac

SEQ ID NO: 539641 - RNA, 22 nt, Human
uacaguaacauguuguacaagc

SEQ ID NO: 539642 - RNA, 22 nt, Human
aggcucaggucucaggucuggc

SEQ ID NO: 539643 - RNA, 18 nt, Human
cauuaugugguuauagaa

SEQ ID NO: 539644 - RNA, 22 nt, Human
acuuaaaaccagacagcgucau

SEQ ID NO: 539645 - RNA, 22 nt, Human
ucauuuguuacagccacauacc

SEQ ID NO: 539646 - RNA, 22 nt, Human
cuggccucagagggucauggug

SEQ ID NO: 539647 - RNA, 22 nt, Human
uuugaacaugcugcaugauaau

SEQ ID NO: 539648 - RNA, 22 nt, Human
acaaugaauacuaagcaccagg

SEQ ID NO: 539649 - RNA, 22 nt, Human
ccagcuuuaucaagucugagcu

SEQ ID NO: 539650 - RNA, 20 nt, Human
uccaagcccuccuuccauuc

SEQ ID NO: 539651 - RNA, 18 nt, Human
caggucagccuggccuca

SEQ ID NO: 539652 - RNA, 20 nt, Human
agagacccuguagcuugcag

SEQ ID NO: 539653 - RNA, 22 nt, Human
acaggcauugggauggagguug

SEQ ID NO: 539654 - RNA, 21 nt, Human
aggaaaggaaguccccagggu

SEQ ID NO: 539655 - RNA, 22 nt, Human
gugggcuucccuuaagccagag

SEQ ID NO: 539656 - RNA, 22 nt, Human
uuggaaaugcauuuguuauuau

SEQ ID NO: 539657 - RNA, 22 nt, Human
ucugccuggacccuggugagcu

SEQ ID NO: 539658 - RNA, 22 nt, Human
uuucaagcaugucaaguuaguc

SEQ ID NO: 539659 - RNA, 22 nt, Human
auacuuccugcuucccugaucu

SEQ ID NO: 539660 - RNA, 22 nt, Human
ccuggcugagggaccucgggua

SEQ ID NO: 539661 - RNA, 22 nt, Human
cagcuguugucaccucacaucc

SEQ ID NO: 539662 - RNA, 22 nt, Human
gccuggcuugccagcccuggcg

SEQ ID NO: 539663 - RNA, 22 nt, Human
aggcacuggucuaccccuuagu

SEQ ID NO: 539664 - RNA, 22 nt, Human
ucucccacugcaagcccaggcu

SEQ ID NO: 539665 - RNA, 17 nt, Human
aucuggcugcuucuaga

SEQ ID NO: 539666 - RNA, 22 nt, Human
gugccugguuuggggaauguuc

SEQ ID NO: 539667 - RNA, 22 nt, Human
auuugucaauaagaugaacaua

SEQ ID NO: 539668 - RNA, 19 nt, Human
cugucaggggcuggauguu

SEQ ID NO: 539669 - RNA, 22 nt, Human
gcagcuuuagaaacaagggcug

SEQ ID NO: 539670 - RNA, 22 nt, Human
aggcagaggagaaugaucuucc

SEQ ID NO: 539671 - RNA, 23 nt, Human
cagggccaggcagcagcugucac

SEQ ID NO: 539672 - RNA, 19 nt, Human
aaagugauuuuuucuggca

SEQ ID NO: 539673 - RNA, 18 nt, Human
ccuggcuuccaucuuggu

SEQ ID NO: 539674 - RNA, 22 nt, Human
uuuucacacaaggugauaaguu

SEQ ID NO: 539675 - RNA, 22 nt, Human
aaagccaguucuuagagaaagc

SEQ ID NO: 539676 - RNA, 22 nt, Human
guguggggcucagugggaaugu

SEQ ID NO: 539677 - RNA, 22 nt, Human
acugucaccaucagagcgggaa

SEQ ID NO: 539678 - RNA, 22 nt, Human
ucucaggccccugaguuucucu

SEQ ID NO: 539679 - RNA, 22 nt, Human
uuacuuugaugaucaaugagcg

SEQ ID NO: 539680 - RNA, 22 nt, Human
gcagggugauagugaggcucag

SEQ ID NO: 539681 - RNA, 22 nt, Human
auuguuaauaacuauuacauug

SEQ ID NO: 539682 - RNA, 22 nt, Human
gccaagcuuauaugaugcuuga

SEQ ID NO: 539683 - RNA, 22 nt, Human
cagggccucgaagccucugggc

SEQ ID NO: 539684 - RNA, 20 nt, Human
gcagcugaaaguaugacacc

SEQ ID NO: 539685 - RNA, 22 nt, Human
gauuucuugaccccugucucag

SEQ ID NO: 539686 - RNA, 18 nt, Human
gaaaugugauucuagggc

SEQ ID NO: 539687 - RNA, 22 nt, Human
cuucugggcauucagcugcaca

SEQ ID NO: 539688 - RNA, 22 nt, Human
uuucuauugaucuaauaaacau

SEQ ID NO: 539689 - RNA, 22 nt, Human
cuagggacagaaagaggguaga

SEQ ID NO: 539690 - RNA, 22 nt, Human
gacauuuaaauugcaggcagcc

SEQ ID NO: 539691 - RNA, 22 nt, Human
aggaccugagaguuggaaaucc

SEQ ID NO: 539692 - RNA, 21 nt, Human
uccacaaguuagaaggaaauu

SEQ ID NO: 539693 - RNA, 22 nt, Human
ugagccccaggaaauugaggag

SEQ ID NO: 539694 - RNA, 23 nt, Human
acauuucauauaaaagggaucag

SEQ ID NO: 539695 - RNA, 17 nt, Human
cucugggcagccugggg

SEQ ID NO: 539696 - RNA, 22 nt, Human
guaguucugcagugucaccuga

SEQ ID NO: 539697 - RNA, 22 nt, Human
ccagucagccaagcugcagcgg

SEQ ID NO: 539698 - RNA, 22 nt, Human
ucugagaagcuagaggacaaag

SEQ ID NO: 539699 - RNA, 22 nt, Human
uucaugaauaccccuucuguaa

SEQ ID NO: 539700 - RNA, 22 nt, Human
cugggcagcugugcaaacaaua

SEQ ID NO: 539701 - RNA, 22 nt, Human
aauuugauucccugcaccuguu

SEQ ID NO: 539702 - RNA, 22 nt, Human
ggagugugauuguucucuguua

SEQ ID NO: 539703 - RNA, 22 nt, Human
ugccuguguccccuucuuggca

SEQ ID NO: 539704 - RNA, 22 nt, Human
ucccaaggccaggcaucuagaa

SEQ ID NO: 539705 - RNA, 22 nt, Human
aggucauuguuaagucaccaua

SEQ ID NO: 539706 - RNA, 18 nt, Human
agagcagcggcaucacac

SEQ ID NO: 539707 - RNA, 18 nt, Human
cugggucuccaggcugcc

SEQ ID NO: 539708 - RNA, 22 nt, Human
ugcucagacaagcugaacagua

SEQ ID NO: 539709 - RNA, 23 nt, Human
ugagcaucacaggagaaccaggc

SEQ ID NO: 539710 - RNA, 22 nt, Human
ucagcagauggguuguguuggc

SEQ ID NO: 539711 - RNA, 22 nt, Human
uuggcagugucacuagggagcc

SEQ ID NO: 539712 - RNA, 19 nt, Human
ccaggccugcgggcguugg

SEQ ID NO: 539713 - RNA, 22 nt, Human
uggagcaggugggaugucguga

SEQ ID NO: 539714 - RNA, 22 nt, Human
caagggaguuacugagggcggg

SEQ ID NO: 539715 - RNA, 22 nt, Human
ggcaggguaaaccgagguaagu

SEQ ID NO: 539716 - RNA, 22 nt, Human
guguguccaggcgggagucaag

SEQ ID NO: 539717 - RNA, 22 nt, Human
cugugcccaccuggcucugagg

SEQ ID NO: 539718 - RNA, 22 nt, Human
uggagcagcacaagaaagggga

SEQ ID NO: 539719 - RNA, 22 nt, Human
ucagaacauugacauucuuauu

SEQ ID NO: 539720 - RNA, 23 nt, Human
uggcagugaucaaaagcuuacau

SEQ ID NO: 539721 - RNA, 19 nt, Human
uggagaggaaaugcugcuc

SEQ ID NO: 539722 - RNA, 22 nt, Human
guauucauauuaaacauaucaa

SEQ ID NO: 539723 - RNA, 22 nt, Human
aaagccagugguaugagagaaa

SEQ ID NO: 539724 - RNA, 22 nt, Human
aauaucuuggcccaacuccaga

SEQ ID NO: 539725 - RNA, 22 nt, Human
ugauuuccacgugcacccaggu

SEQ ID NO: 539726 - RNA, 22 nt, Human
uggugcucccuggaguugugca

SEQ ID NO: 539727 - RNA, 22 nt, Human
aggcacaguuucauccccgggc

SEQ ID NO: 539728 - RNA, 22 nt, Human
ucccugggccuccugcuaugca

SEQ ID NO: 539729 - RNA, 22 nt, Human
agcucacaguguccuuccucaa

SEQ ID NO: 539730 - RNA, 22 nt, Human
gucagagcugugcaaggcugag

SEQ ID NO: 539731 - RNA, 22 nt, Human
gcagaaagcuuagaggguuugc

SEQ ID NO: 539732 - RNA, 22 nt, Human
agaagccauucccuguaggcuc

SEQ ID NO: 539733 - RNA, 22 nt, Human
uggccugucuuguugugcuaga

SEQ ID NO: 539734 - RNA, 18 nt, Human
cacaggcucccagugagg

SEQ ID NO: 539735 - RNA, 22 nt, Human
ggagagagaugccgccuugcuc

SEQ ID NO: 539736 - RNA, 22 nt, Human
ucauaaaguuacccaaauuuua

SEQ ID NO: 539737 - RNA, 22 nt, Human
ugcacacaccgugcuucacuga

SEQ ID NO: 539738 - RNA, 21 nt, Human
ucuggcaggcacgggcccagc

SEQ ID NO: 539739 - RNA, 20 nt, Human
acacacuuugaucuugagcc

SEQ ID NO: 539740 - RNA, 22 nt, Human
cacugucccuguuuccuggaaa

SEQ ID NO: 539741 - RNA, 22 nt, Human
caguuucuauggcugggcucug

SEQ ID NO: 539742 - RNA, 22 nt, Human
acaauucuggguauuuauauag

SEQ ID NO: 539743 - RNA, 22 nt, Human
cauuacaugguccaggauauau

SEQ ID NO: 539744 - RNA, 22 nt, Human
ccuuuuucccuggagggacagc

SEQ ID NO: 539745 - RNA, 22 nt, Human
ucauguuuuaguaaagugaagg

SEQ ID NO: 539746 - RNA, 22 nt, Human
uggaagaagcuacaagcgguga

SEQ ID NO: 539747 - RNA, 22 nt, Human
aggcaguuguugcugagcagcu

SEQ ID NO: 539748 - RNA, 22 nt, Human
cuucuggggauggagcccagaa

SEQ ID NO: 539749 - RNA, 22 nt, Human
gucagaucuuuggggaugcugu

SEQ ID NO: 539750 - RNA, 22 nt, Human
ccaugggcgcacaggccuggag

SEQ ID NO: 539751 - RNA, 22 nt, Human
uucuggagcuaaaguccacucu

SEQ ID NO: 539752 - RNA, 23 nt, Human
ugggccuggaaagccuuagagag

SEQ ID NO: 539753 - RNA, 22 nt, Human
cugcccaggaaggagaggaugg

SEQ ID NO: 539754 - RNA, 22 nt, Human
gaggaggcacuugagcagaugu

SEQ ID NO: 539755 - RNA, 22 nt, Human
cuuacauugucuuaguuuucaa

SEQ ID NO: 539756 - RNA, 22 nt, Human
ugaggcucagaaauguaaguuu

SEQ ID NO: 539757 - RNA, 22 nt, Human
uauguguuugacacccugcaag

SEQ ID NO: 539758 - RNA, 22 nt, Human
guguaaaucagcuuguguaaua

SEQ ID NO: 539759 - RNA, 22 nt, Human
cucccaggggaacuaucaagua

SEQ ID NO: 539760 - RNA, 22 nt, Human
uagacacauccguggaagcuuc

SEQ ID NO: 539761 - RNA, 22 nt, Human
uggagagcgugcuuagcacucu

SEQ ID NO: 539762 - RNA, 22 nt, Human
agcauacaguaggugcucaguu

SEQ ID NO: 539763 - RNA, 22 nt, Human
ccuucagaccuagacaggaauc

SEQ ID NO: 539764 - RNA, 22 nt, Human
aggcugagcggggucccagagc

SEQ ID NO: 539765 - RNA, 22 nt, Human
aggcuggcgacaucuggcgggc

SEQ ID NO: 539766 - RNA, 22 nt, Human
cugggcuccacuacuugcuaac

SEQ ID NO: 539767 - RNA, 22 nt, Human
ggaggaugagcuacgaggagcu

SEQ ID NO: 539768 - RNA, 22 nt, Human
uggagcagcuaagccucugaga

SEQ ID NO: 539769 - RNA, 22 nt, Human
gaacacagugguuguuuggagg

SEQ ID NO: 539770 - RNA, 22 nt, Human
gcagccagccccucugaccucu

SEQ ID NO: 539771 - RNA, 22 nt, Human
caggcuggaguuaccuuuaggg

SEQ ID NO: 539772 - RNA, 16 nt, Human
ccacagggcaaggggc

SEQ ID NO: 539773 - RNA, 22 nt, Human
acagaguagcucaagaagauug

SEQ ID NO: 539774 - RNA, 22 nt, Human
gaaucauuuagcucugcaugga

SEQ ID NO: 539775 - RNA, 22 nt, Human
cugccucuggccucaggcccag

SEQ ID NO: 539776 - RNA, 22 nt, Human
uggcucaggauaauuuucccaa

SEQ ID NO: 539777 - RNA, 22 nt, Human
uguuacauuucucuuucuugga

SEQ ID NO: 539778 - RNA, 22 nt, Human
aggaagcucggagagggcaaau

SEQ ID NO: 539779 - RNA, 22 nt, Human
acauuaaaauugggugggguaa

SEQ ID NO: 539780 - RNA, 22 nt, Human
gugggcuuugcuggauccuucc

SEQ ID NO: 539781 - RNA, 22 nt, Human
cagcacaauuuucaggagucca

SEQ ID NO: 539782 - RNA, 22 nt, Human
accugccuaguugguucugccc

SEQ ID NO: 539783 - RNA, 22 nt, Human
uagauuucgcugcaucucaauc

SEQ ID NO: 539784 - RNA, 22 nt, Human
ucaggcagaccaccgugggcag

SEQ ID NO: 539785 - RNA, 22 nt, Human
gaggaggucgcugcugagcccc

SEQ ID NO: 539786 - RNA, 22 nt, Human
gcaggggcugcugggaacucgg

SEQ ID NO: 539787 - RNA, 22 nt, Human
uuguacagggaaguaauacaag

SEQ ID NO: 539788 - RNA, 22 nt, Human
ugcagcauuauucacaguagcc

SEQ ID NO: 539789 - RNA, 23 nt, Human
uucaaagcuuaagcucuuuccac

SEQ ID NO: 539790 - RNA, 22 nt, Human
ggagcaggagucucuugaauuu

SEQ ID NO: 539791 - RNA, 22 nt, Human
cccaucaggaacccaggagccc

SEQ ID NO: 539792 - RNA, 22 nt, Human
caugggcugcugacaggggcuc

SEQ ID NO: 539793 - RNA, 22 nt, Human
gugagacaagauuuguaggcag

SEQ ID NO: 539794 - RNA, 22 nt, Human
aaggcugcuuuuaacaugcaua

SEQ ID NO: 539795 - RNA, 21 nt, Human
ggcacugagccagauggacuc

SEQ ID NO: 539796 - RNA, 22 nt, Human
cacagagacagaagcacuuaug

SEQ ID NO: 539797 - RNA, 22 nt, Human
guccucugcuucaugcccugau

SEQ ID NO: 539798 - RNA, 21 nt, Human
uccaggccucaggaagggaug

SEQ ID NO: 539799 - RNA, 22 nt, Human
uccuggagccacggagcuuuca

SEQ ID NO: 539800 - RNA, 22 nt, Human
gggcuacagacaugcucuaagc

SEQ ID NO: 539801 - RNA, 22 nt, Human
aggacuccauguguccuggaga

SEQ ID NO: 539802 - RNA, 22 nt, Human
gcaugggcaagaggacuggggg

SEQ ID NO: 539803 - RNA, 22 nt, Human
aggcaagggggcgccaccuucc

SEQ ID NO: 539804 - RNA, 23 nt, Human
cugguucauagucaagagauuga

SEQ ID NO: 539805 - RNA, 22 nt, Human
acauucuacaguuaaccauuag

SEQ ID NO: 539806 - RNA, 22 nt, Human
cugccugcuuuucugggagccg

SEQ ID NO: 539807 - RNA, 22 nt, Human
uacaguauggaaaauguauagu

SEQ ID NO: 539808 - RNA, 22 nt, Human
uggcugggugcuauccaguacu

SEQ ID NO: 539809 - RNA, 22 nt, Human
gacagaggcaagaccagaagcc

SEQ ID NO: 539810 - RNA, 23 nt, Human
gcaggaguuccuggacuccagga

SEQ ID NO: 539811 - RNA, 22 nt, Human
cagcuagagggaugcuguguga

SEQ ID NO: 539812 - RNA, 22 nt, Human
agucuucagcauagcauauggc

SEQ ID NO: 539813 - RNA, 22 nt, Human
gcagggucugaggccacagagg

SEQ ID NO: 539814 - RNA, 22 nt, Human
uucugcaucugaauuuaaguac

SEQ ID NO: 539815 - RNA, 22 nt, Human
uuucagagaacugaguccuugc

SEQ ID NO: 539816 - RNA, 22 nt, Human
gcaaagcauucuguggagucua

SEQ ID NO: 539817 - RNA, 21 nt, Human
cagugguuuauaaacaacaga

SEQ ID NO: 539818 - RNA, 22 nt, Human
uuugucuuguguccuuaggacc

SEQ ID NO: 539819 - RNA, 22 nt, Human
cauucacauucuucuuacuguu

SEQ ID NO: 539820 - RNA, 22 nt, Human
aaaugucuguuagucauaucau

SEQ ID NO: 539821 - RNA, 18 nt, Human
ucauuuugucugccuuug

SEQ ID NO: 539822 - RNA, 22 nt, Human
ggcagggcuugucucugugaug

SEQ ID NO: 539823 - RNA, 22 nt, Human
gaggccuggcucugcccuccug

SEQ ID NO: 539824 - RNA, 22 nt, Human
aaauguuuugcucccauguggu

SEQ ID NO: 539825 - RNA, 22 nt, Human
agcagauggugucaugggaugg

SEQ ID NO: 539826 - RNA, 23 nt, Human
uugcauguagcccaugaguaacu

SEQ ID NO: 539827 - RNA, 22 nt, Human
gcauuuaaauuugaacuucaga

SEQ ID NO: 539828 - RNA, 23 nt, Human
ucccagccucuucucuugcauac

SEQ ID NO: 539829 - RNA, 22 nt, Human
ggugcagaucuuucucuucagg

SEQ ID NO: 539830 - RNA, 22 nt, Human
aguuuuauuccaaugugcagca

SEQ ID NO: 539831 - RNA, 22 nt, Human
uuccaggauggcaauaaugaau

SEQ ID NO: 539832 - RNA, 22 nt, Human
gugcagugaaaaaagaaugucc

SEQ ID NO: 539833 - RNA, 22 nt, Human
ccacuggcauccagcugccauc

SEQ ID NO: 539834 - RNA, 22 nt, Human
uguuuauugagugccuacuaua

SEQ ID NO: 539835 - RNA, 22 nt, Human
cacauuuaucuguucuuucuag

SEQ ID NO: 539836 - RNA, 22 nt, Human
agagggcccauguugggcugcu

SEQ ID NO: 539837 - RNA, 22 nt, Human
agcuggccuucggugucacugg

SEQ ID NO: 539838 - RNA, 22 nt, Human
gguggcucucugucagugacag

SEQ ID NO: 539839 - RNA, 22 nt, Human
gcugucugcugugcacugagca

SEQ ID NO: 539840 - RNA, 22 nt, Human
ugaagggguucagcaugggggu

SEQ ID NO: 539841 - RNA, 22 nt, Human
aagaggaacugggggcugaguc

SEQ ID NO: 539842 - RNA, 17 nt, Human
uuucagauucacuuucu

SEQ ID NO: 539843 - RNA, 22 nt, Human
auucuguauggaaaagcacuau

SEQ ID NO: 539844 - RNA, 22 nt, Human
cuucugcaggccuuauuuuagu

SEQ ID NO: 539845 - RNA, 22 nt, Human
auguaugaagcuuuguuuggga

SEQ ID NO: 539846 - RNA, 22 nt, Human
uuacacaugcucacuuauuugu

SEQ ID NO: 539847 - RNA, 22 nt, Human
ucaggcugguggucagauggcu

SEQ ID NO: 539848 - RNA, 22 nt, Human
cuucacagucacccugcugugu

SEQ ID NO: 539849 - RNA, 22 nt, Human
cccuggauuuacaucauucuga

SEQ ID NO: 539850 - RNA, 22 nt, Human
uagcagaguaauacuuuggagc

SEQ ID NO: 539851 - RNA, 22 nt, Human
ggagucagaauggcaggguggu

SEQ ID NO: 539852 - RNA, 22 nt, Human
caguuaauguccuauacaauag

SEQ ID NO: 539853 - RNA, 22 nt, Human
gcagguguggauuugcauccag

SEQ ID NO: 539854 - RNA, 22 nt, Human
guucauguuuguguauugcuca

SEQ ID NO: 539855 - RNA, 22 nt, Human
ccuguucacccuccaugcacag

SEQ ID NO: 539856 - RNA, 22 nt, Human
cuguucacagaauccuccccug

SEQ ID NO: 539857 - RNA, 20 nt, Human
aggaaggagaaucugagcaa

SEQ ID NO: 539858 - RNA, 22 nt, Human
gucaggaucaaauugaaguuau

SEQ ID NO: 539859 - RNA, 22 nt, Human
auauuaggcaaggagauuauuu

SEQ ID NO: 539860 - RNA, 19 nt, Human
cuguccugguuuggucccu

SEQ ID NO: 539861 - RNA, 22 nt, Human
cuuucuuauaccugucagggcc

SEQ ID NO: 539862 - RNA, 22 nt, Human
uaugggucuggaaaauggcuug

SEQ ID NO: 539863 - RNA, 22 nt, Human
gccuguguggaugggccccugg

SEQ ID NO: 539864 - RNA, 22 nt, Human
ggggcuguuuuuggaauggcug

SEQ ID NO: 539865 - RNA, 22 nt, Human
caaagcagaccuuuacccuuua

SEQ ID NO: 539866 - RNA, 22 nt, Human
caaggaaguuuuaggagaggaa

SEQ ID NO: 539867 - RNA, 22 nt, Human
ugcuucuguauugaaauuguua

SEQ ID NO: 539868 - RNA, 22 nt, Human
agauauuuugugugauguuuca

SEQ ID NO: 539869 - RNA, 22 nt, Human
ugggcugaguguggaacuaguu

SEQ ID NO: 539870 - RNA, 22 nt, Human
uagauaaauuagaaaguuuacu

SEQ ID NO: 539871 - RNA, 22 nt, Human
uguaauauuguagugacaguac

SEQ ID NO: 539872 - RNA, 22 nt, Human
ggaagggcaauaaaaucucagg

SEQ ID NO: 539873 - RNA, 22 nt, Human
ugaggaaguuguuucucuucua

SEQ ID NO: 539874 - RNA, 22 nt, Human
ggaaggucgagcugcaucuggc

SEQ ID NO: 539875 - RNA, 22 nt, Human
guggcagcggcccaggccgucu

SEQ ID NO: 539876 - RNA, 22 nt, Human
auaucuuuguuuuugccaagau

SEQ ID NO: 539877 - RNA, 22 nt, Human
aagcagaaaaacugagcuccaa

SEQ ID NO: 539878 - RNA, 22 nt, Human
cgugcccugcgcaagugcugcu

SEQ ID NO: 539879 - RNA, 22 nt, Human
caggaggcaguuucagaaguca

SEQ ID NO: 539880 - RNA, 22 nt, Human
ugccuuguccuucgucagggcu

SEQ ID NO: 539881 - RNA, 22 nt, Human
gcucaaggcaggcagacaugag

SEQ ID NO: 539882 - RNA, 22 nt, Human
agccuucauaaucuugggcuuu

SEQ ID NO: 539883 - RNA, 22 nt, Human
aaagcuuuucaguauguucaug

SEQ ID NO: 539884 - RNA, 22 nt, Human
uaugcacacauguaugcaugug

SEQ ID NO: 539885 - RNA, 22 nt, Human
agcugguucagaaauuagaugg

SEQ ID NO: 539886 - RNA, 22 nt, Human
cuuuggcaugguccucacuaua

SEQ ID NO: 539887 - RNA, 22 nt, Human
aaaaugaggucaauauccuuuu

SEQ ID NO: 539888 - RNA, 22 nt, Human
aaagauuuaugaaguucaauua

SEQ ID NO: 539889 - RNA, 22 nt, Human
caggccucuccuuagucuggca

SEQ ID NO: 539890 - RNA, 22 nt, Human
guccucuggaagaugaguucuu

SEQ ID NO: 539891 - RNA, 22 nt, Human
agcugcugguuuaagggauggg

SEQ ID NO: 539892 - RNA, 22 nt, Human
uggcucagucuggguugacuga

SEQ ID NO: 539893 - RNA, 22 nt, Human
agugcugacucugggcacagug

SEQ ID NO: 539894 - RNA, 22 nt, Human
agcagcucuguuuaccuggagg

SEQ ID NO: 539895 - RNA, 22 nt, Human
agaacagaggccuuauguuuca

SEQ ID NO: 539896 - RNA, 22 nt, Human
caaggccacguucugcaugcgg

SEQ ID NO: 539897 - RNA, 22 nt, Human
agaggaugguugaggaagaccu

SEQ ID NO: 539898 - RNA, 20 nt, Human
ugcugggcaugcaguggaaa

SEQ ID NO: 539899 - RNA, 22 nt, Human
accucugccacuuucuaacucu

SEQ ID NO: 539900 - RNA, 19 nt, Human
uguuuacauguuucuucag

SEQ ID NO: 539901 - RNA, 22 nt, Human
cuggcacuuggcacccaugaaa

SEQ ID NO: 539902 - RNA, 22 nt, Human
ggugaggcguccccaccauggg

SEQ ID NO: 539903 - RNA, 22 nt, Human
gugucucuuagccugcuaaugc

SEQ ID NO: 539904 - RNA, 22 nt, Human
ccaggccuagccccugagggua

SEQ ID NO: 539905 - RNA, 22 nt, Human
cagaauaugacucgggcacuac

SEQ ID NO: 539906 - RNA, 22 nt, Human
augaagcugaccuugucuugcu

SEQ ID NO: 539907 - RNA, 22 nt, Human
gaggccuggucuaugagauguu

SEQ ID NO: 539908 - RNA, 22 nt, Human
aauaagaacaacuaagguuuau

SEQ ID NO: 539909 - RNA, 22 nt, Human
agguagaggccuccaggcagca

SEQ ID NO: 539910 - RNA, 22 nt, Human
gaauuugucccuugauauaaaa

SEQ ID NO: 539911 - RNA, 22 nt, Human
ugaggaagaacaagaauuuaga

SEQ ID NO: 539912 - RNA, 22 nt, Human
gagacagaguuucacucuuguu

SEQ ID NO: 539913 - RNA, 22 nt, Human
caagauuuauauuuucacacaa

SEQ ID NO: 539914 - RNA, 22 nt, Human
uccugucagugaggcagaugaa

SEQ ID NO: 539915 - RNA, 22 nt, Human
cagcuggcuggucagugcacaa

SEQ ID NO: 539916 - RNA, 22 nt, Human
ucugggagagggaaagaagacu

SEQ ID NO: 539917 - RNA, 22 nt, Human
ccugguggagaggggcggagcg

SEQ ID NO: 539918 - RNA, 22 nt, Human
aacacuuuguugccuaugaacg

SEQ ID NO: 539919 - RNA, 22 nt, Human
agaauuuuugauuaucuacucg

SEQ ID NO: 539920 - RNA, 22 nt, Human
acacucuguaaugucacacucc

SEQ ID NO: 539921 - RNA, 22 nt, Human
ugggaagaggcgggaggcuguu

SEQ ID NO: 539922 - RNA, 19 nt, Human
ggauaagguuggagugauc

SEQ ID NO: 539923 - RNA, 22 nt, Human
guccucuguuagaaaugugcuu

SEQ ID NO: 539924 - RNA, 22 nt, Human
cccaggaggcagaaguugcagu

SEQ ID NO: 539925 - RNA, 21 nt, Human
agaauucuuaaguauucuaau

SEQ ID NO: 539926 - RNA, 22 nt, Human
ugcagugggccggaggccaggg

SEQ ID NO: 539927 - RNA, 21 nt, Human
ugugucacuaacuagaggcua

SEQ ID NO: 539928 - RNA, 22 nt, Human
gacccagaaggagugcccuaga

SEQ ID NO: 539929 - RNA, 22 nt, Human
ucacaaauagcuauauuaagga

SEQ ID NO: 539930 - RNA, 18 nt, Human
cucucugggugaggacaa

SEQ ID NO: 539931 - RNA, 23 nt, Human
agacagaggcugaggcuggccgc

SEQ ID NO: 539932 - RNA, 22 nt, Human
ugggaaggaacugccuuuagcu

SEQ ID NO: 539933 - RNA, 22 nt, Human
agggccuggacuaauuggaucc

SEQ ID NO: 539934 - RNA, 22 nt, Human
auaugaaguuacagguaagaaa

SEQ ID NO: 539935 - RNA, 22 nt, Human
uggccugcuuucauuugaugcu

SEQ ID NO: 539936 - RNA, 22 nt, Human
ccaggcagagugcuccagaaag

SEQ ID NO: 539937 - RNA, 22 nt, Human
gcugccuggaauaacggcuggc

SEQ ID NO: 539938 - RNA, 22 nt, Human
uaaaggcacggaguuguuaugg

SEQ ID NO: 539939 - RNA, 22 nt, Human
ucagacagugugaucagucucu

SEQ ID NO: 539940 - RNA, 22 nt, Human
uugaaagaagaagcugcgaugu

SEQ ID NO: 539941 - RNA, 22 nt, Human
cuucacaaagcucucuuuaugu

SEQ ID NO: 539942 - RNA, 22 nt, Human
uggagcugguucuggggaagcu

SEQ ID NO: 539943 - RNA, 22 nt, Human
uaagacaaauacuauuucaaga

SEQ ID NO: 539944 - RNA, 22 nt, Human
aauucaugaguagaaucuauau

SEQ ID NO: 539945 - RNA, 22 nt, Human
ggcucaggcuggagugcagugg

SEQ ID NO: 539946 - RNA, 22 nt, Human
cuacaaagaaaguauacuggac

SEQ ID NO: 539947 - RNA, 22 nt, Human
uuauuuaggagaaggaacccug

SEQ ID NO: 539948 - RNA, 21 nt, Human
gccauuguuuucuaccuggag

SEQ ID NO: 539949 - RNA, 22 nt, Human
auaaauuuucuugcuguacuua

SEQ ID NO: 539950 - RNA, 22 nt, Human
ggccacugcugcucugguggag

SEQ ID NO: 539951 - RNA, 22 nt, Human
uggcagccaucagagcaggggu

SEQ ID NO: 539952 - RNA, 22 nt, Human
caagugucuauaucagugcuug

SEQ ID NO: 539953 - RNA, 22 nt, Human
acuuuacaaacuccucacuguu

SEQ ID NO: 539954 - RNA, 19 nt, Human
cuggugcuugagugaguca

SEQ ID NO: 539955 - RNA, 22 nt, Human
caggugggauuuugcugcuuga

SEQ ID NO: 539956 - RNA, 18 nt, Human
agggagagaccgcggguc

SEQ ID NO: 539957 - RNA, 22 nt, Human
agccucugauggcucccaagga

SEQ ID NO: 539958 - RNA, 22 nt, Human
cugggagcugaggcugacgcug

SEQ ID NO: 539959 - RNA, 22 nt, Human
agagcucaagacgcucacagua

SEQ ID NO: 539960 - RNA, 19 nt, Human
aggcagaggcuuggcuagc

SEQ ID NO: 539961 - RNA, 22 nt, Human
ugggcugcggauaggccucgga

SEQ ID NO: 539962 - RNA, 22 nt, Human
ucuggggaugagguccagugau

SEQ ID NO: 539963 - RNA, 22 nt, Human
ugauuucauaguauauacauga

SEQ ID NO: 539964 - RNA, 22 nt, Human
uugcccagaguccacagcguac

SEQ ID NO: 539965 - RNA, 22 nt, Human
gugcauuugugcaugcacaugu

SEQ ID NO: 539966 - RNA, 23 nt, Human
ucacauauguagaaguggaauuc

SEQ ID NO: 539967 - RNA, 22 nt, Human
aaagccagaguguguuagagac

SEQ ID NO: 539968 - RNA, 22 nt, Human
uuguacaaauaggaaccucuga

SEQ ID NO: 539969 - RNA, 19 nt, Human
agcagagcagggccguggg

SEQ ID NO: 539970 - RNA, 21 nt, Human
augcacaaaaagacucuuucu

SEQ ID NO: 539971 - RNA, 19 nt, Human
cuggaaaguuggcagugag

SEQ ID NO: 539972 - RNA, 20 nt, Human
uauuugaaauggccaagugu

SEQ ID NO: 539973 - RNA, 20 nt, Human
uugcagcagugaggugaagg

SEQ ID NO: 539974 - RNA, 22 nt, Human
ucauacauaaauaagaguuuag

SEQ ID NO: 539975 - RNA, 22 nt, Human
caaagccucugauuucacuugu

SEQ ID NO: 539976 - RNA, 22 nt, Human
caggcccugggcaggaucagcc

SEQ ID NO: 539977 - RNA, 22 nt, Human
guucaaggaagggaggaaagcc

SEQ ID NO: 539978 - RNA, 22 nt, Human
uaguuugucaaccacugucaca

SEQ ID NO: 539979 - RNA, 22 nt, Human
auaugagagaggaaagauuuua

SEQ ID NO: 539980 - RNA, 22 nt, Human
ggugugguuugaagggagaugg

SEQ ID NO: 539981 - RNA, 18 nt, Human
cugagggcagccccuggg

SEQ ID NO: 539982 - RNA, 22 nt, Human
aaaacauucugugaacucucaa

SEQ ID NO: 539983 - RNA, 22 nt, Human
guguuuaacaucugguuuauac

SEQ ID NO: 539984 - RNA, 22 nt, Human
gagcacagaacuaaaugcuggu

SEQ ID NO: 539985 - RNA, 22 nt, Human
auauuuggaaagaaaaucauug

SEQ ID NO: 539986 - RNA, 22 nt, Human
augggccuguuccuaugcuggu

SEQ ID NO: 539987 - RNA, 21 nt, Human
auucacagguauccucucccu

SEQ ID NO: 539988 - RNA, 22 nt, Human
uuuagaguugaguauucauugg

SEQ ID NO: 539989 - RNA, 22 nt, Human
gccugagaaggauaggaagcga

SEQ ID NO: 539990 - RNA, 22 nt, Human
cuguccugcaguugggggcagg

SEQ ID NO: 539991 - RNA, 21 nt, Human
ucaggcagugcaaauacaugg

SEQ ID NO: 539992 - RNA, 22 nt, Human
guugaaagagcauggacuugaa

SEQ ID NO: 539993 - RNA, 22 nt, Human
ggccucagaaauagaguaaaau

SEQ ID NO: 539994 - RNA, 22 nt, Human
aguguuaaugguguauauuagg

SEQ ID NO: 539995 - RNA, 22 nt, Human
uucacaguggcccucucugagu

SEQ ID NO: 539996 - RNA, 22 nt, Human
aggugaguugguaggaaguuug

SEQ ID NO: 539997 - RNA, 22 nt, Human
cugcacugagcaucuaaccuua

SEQ ID NO: 539998 - RNA, 19 nt, Human
agggccaggauucuggaac

SEQ ID NO: 539999 - RNA, 22 nt, Human
gcugaguugaaagcagaggaua

SEQ ID NO: 540000 - RNA, 22 nt, Human
gggcacagcugcuacccagugc

SEQ ID NO: 540001 - RNA, 22 nt, Human
gccaggcacugcucuaagcccu

SEQ ID NO: 540002 - RNA, 21 nt, Human
aucuuuagccauccaaucaga

SEQ ID NO: 540003 - RNA, 22 nt, Human
cauggcagaaaccugagcugcu

SEQ ID NO: 540004 - RNA, 22 nt, Human
ggcccugcgauuagguggcagg

SEQ ID NO: 540005 - RNA, 22 nt, Human
uccuucagcuuauuucuuagga

SEQ ID NO: 540006 - RNA, 22 nt, Human
aaagagaacuuuuacccaagaa

SEQ ID NO: 540007 - RNA, 22 nt, Human
caggacagguguucuagaucag

SEQ ID NO: 540008 - RNA, 22 nt, Human
cccuggagggacagcugcucua

SEQ ID NO: 540009 - RNA, 18 nt, Human
ggcugagguugacuagaa

SEQ ID NO: 540010 - RNA, 22 nt, Human
gcccaggaguugaagggcugac

SEQ ID NO: 540011 - RNA, 22 nt, Human
gugcagugagcagugcagcacc

SEQ ID NO: 540012 - RNA, 22 nt, Human
ucagagagccucaggcacugcc

SEQ ID NO: 540013 - RNA, 22 nt, Human
auguuaacugaagccauucucg

SEQ ID NO: 540014 - RNA, 22 nt, Human
aaggcugacucaacagggggcc

SEQ ID NO: 540015 - RNA, 22 nt, Human
cagggccacacggaagggaaca

SEQ ID NO: 540016 - RNA, 22 nt, Human
caggcacacauccgugagagau

SEQ ID NO: 540017 - RNA, 22 nt, Human
auggccuggggagcaugggaag

SEQ ID NO: 540018 - RNA, 22 nt, Human
agggccugucuguagaacugaa

SEQ ID NO: 540019 - RNA, 22 nt, Human
aguucuggcgcccaugagcaga

SEQ ID NO: 540020 - RNA, 22 nt, Human
gccugggaaagaguagggaaau

SEQ ID NO: 540021 - RNA, 22 nt, Human
ccaaaggccaggcacugagguu

SEQ ID NO: 540022 - RNA, 22 nt, Human
ugucaaaaauaagagagauugu

SEQ ID NO: 540023 - RNA, 22 nt, Human
agaggaugauuuuaaggacacu

SEQ ID NO: 540024 - RNA, 22 nt, Human
ggagaguuguuuuugccuagau

SEQ ID NO: 540025 - RNA, 22 nt, Human
ugguaccagggguuauuucugc

SEQ ID NO: 540026 - RNA, 22 nt, Human
guggacugcgcuugagggggcc

SEQ ID NO: 540027 - RNA, 22 nt, Human
ucugucacucccugaugaugaa

SEQ ID NO: 540028 - RNA, 22 nt, Human
ggcccagcugugcuuccagccc

SEQ ID NO: 540029 - RNA, 22 nt, Human
ucagagucauugcaaguagaag

SEQ ID NO: 540030 - RNA, 22 nt, Human
uccaggcaagggaggagcaugg

SEQ ID NO: 540031 - RNA, 22 nt, Human
ucuucccucuucugccaaauac

SEQ ID NO: 540032 - RNA, 22 nt, Human
uaaaucuccuguuuuucaucua

SEQ ID NO: 540033 - RNA, 22 nt, Human
ugugcuucuugcagcuccugua

SEQ ID NO: 540034 - RNA, 17 nt, Human
acagagguuauacagac

SEQ ID NO: 540035 - RNA, 22 nt, Human
caaguccaagaucaagaagcca

SEQ ID NO: 540036 - RNA, 21 nt, Human
cugcucugacagugaggccag

SEQ ID NO: 540037 - RNA, 22 nt, Human
acauuuaccuaguuaagucaau

SEQ ID NO: 540038 - RNA, 22 nt, Human
cuguccuccagacgacaguccc

SEQ ID NO: 540039 - RNA, 22 nt, Human
gaaaacauccagagauagaccu

SEQ ID NO: 540040 - RNA, 22 nt, Human
ugaaagcacucacuucugcucu

SEQ ID NO: 540041 - RNA, 21 nt, Human
ccagucuguaaaauggggaca

SEQ ID NO: 540042 - RNA, 22 nt, Human
gucuuuauuugagauugucauu

SEQ ID NO: 540043 - RNA, 22 nt, Human
uuauuuaaaagugguaagauuc

SEQ ID NO: 540044 - RNA, 22 nt, Human
uggcucuguuuuaugaguacca

SEQ ID NO: 540045 - RNA, 22 nt, Human
ucacagccuggucacucugccc

SEQ ID NO: 540046 - RNA, 22 nt, Human
agcagcagauccaaaaaaugug

SEQ ID NO: 540047 - RNA, 19 nt, Human
gaaggagagcugaguuagg

SEQ ID NO: 540048 - RNA, 22 nt, Human
acagugaaaauaauaucuucaa

SEQ ID NO: 540049 - RNA, 22 nt, Human
uugcagagugguugugaggauu

SEQ ID NO: 540050 - RNA, 19 nt, Human
cuuauuagagugagagcuu

SEQ ID NO: 540051 - RNA, 22 nt, Human
uuuacaaguuuacagaaugaug

SEQ ID NO: 540052 - RNA, 22 nt, Human
cagacuuuugacauuaauacag

SEQ ID NO: 540053 - RNA, 22 nt, Human
ccagcugcgggcaucgagaguu

SEQ ID NO: 540054 - RNA, 22 nt, Human
cccuggccagcucaugucugag

SEQ ID NO: 540055 - RNA, 22 nt, Human
augucuuucgcaucaguagcua

SEQ ID NO: 540056 - RNA, 22 nt, Human
acagaccaaguuuccagcaggu

SEQ ID NO: 540057 - RNA, 22 nt, Human
gccagggaacccaagggccuca

SEQ ID NO: 540058 - RNA, 22 nt, Human
acagcaggcaugaagaaauguu

SEQ ID NO: 540059 - RNA, 22 nt, Human
uggcugggccgggccuugugcc

SEQ ID NO: 540060 - RNA, 22 nt, Human
ccagccagccuugaucugagua

SEQ ID NO: 540061 - RNA, 22 nt, Human
gcuucuauuauuuggagcugag

SEQ ID NO: 540062 - RNA, 23 nt, Human
ugaagugaaauuucacaagggac

SEQ ID NO: 540063 - RNA, 22 nt, Human
caguacuuauuucuauuuaggg

SEQ ID NO: 540064 - RNA, 22 nt, Human
uggcugagaaguucugguggga

SEQ ID NO: 540065 - RNA, 22 nt, Human
cagccugcucucagauguugag

SEQ ID NO: 540066 - RNA, 22 nt, Human
cagcaucucacuucccagaagg

SEQ ID NO: 540067 - RNA, 22 nt, Human
acugugcuuucucuggaggcau

SEQ ID NO: 540068 - RNA, 22 nt, Human
ccuggcucuguccucgcgcaaa

SEQ ID NO: 540069 - RNA, 22 nt, Human
accaggcaaaaccacaggagca

SEQ ID NO: 540070 - RNA, 22 nt, Human
gcaaagaaaguuuuaaugaggu

SEQ ID NO: 540071 - RNA, 22 nt, Human
gggagccagcagggcauggagc

SEQ ID NO: 540072 - RNA, 22 nt, Human
acagcaaaggacgaacacucug

SEQ ID NO: 540073 - RNA, 22 nt, Human
auaaagcuaagacuuacaugaa

SEQ ID NO: 540074 - RNA, 22 nt, Human
uuuucugaaguuuaagacauuu

SEQ ID NO: 540075 - RNA, 22 nt, Human
ugaaagguuauuuaggucugcu

SEQ ID NO: 540076 - RNA, 22 nt, Human
gaaaucauuauaugguauugcu

SEQ ID NO: 540077 - RNA, 22 nt, Human
auuaauauacacuguuagcaug

SEQ ID NO: 540078 - RNA, 22 nt, Human
cagcuccugcagcugcugccgu

SEQ ID NO: 540079 - RNA, 22 nt, Human
uuuauauguuuguacaauuaag

SEQ ID NO: 540080 - RNA, 22 nt, Human
cagcagaggugguucacauugu

SEQ ID NO: 540081 - RNA, 23 nt, Human
aggaacugaggccuagggaggua

SEQ ID NO: 540082 - RNA, 20 nt, Human
cccugcagccaugggagugg

SEQ ID NO: 540083 - RNA, 20 nt, Human
cuucuucagccuaugcuuca

SEQ ID NO: 540084 - RNA, 22 nt, Human
agaucucaccucuguguauuau

SEQ ID NO: 540085 - RNA, 23 nt, Human
uuuaacuuuccaauaauucauug

SEQ ID NO: 540086 - RNA, 22 nt, Human
caggcccugccuugagggaccu

SEQ ID NO: 540087 - RNA, 22 nt, Human
cuggcugcaggaugaggcugcc

SEQ ID NO: 540088 - RNA, 22 nt, Human
gauuaguaagaguuuaccuauu

SEQ ID NO: 540089 - RNA, 22 nt, Human
agagcuggguggacuuguaguu

SEQ ID NO: 540090 - RNA, 22 nt, Human
agugcuggagggaggcagguuc

SEQ ID NO: 540091 - RNA, 22 nt, Human
aaaugcuagggagaaacucucc

SEQ ID NO: 540092 - RNA, 22 nt, Human
gcugagccacccuugcuucccu

SEQ ID NO: 540093 - RNA, 22 nt, Human
uguuugugguuauaauaaguau

SEQ ID NO: 540094 - RNA, 23 nt, Human
ucacuaaaguguuuagugcagau

SEQ ID NO: 540095 - RNA, 22 nt, Human
uuucuagggcucuugucuucug

SEQ ID NO: 540096 - RNA, 22 nt, Human
ugaggcagcccacuuuccuuag

SEQ ID NO: 540097 - RNA, 21 nt, Human
ugaggcucuguugugccugca

SEQ ID NO: 540098 - RNA, 22 nt, Human
ugccaggcucagccccuaucuu

SEQ ID NO: 540099 - RNA, 20 nt, Human
agaaaucagaccacacacua

SEQ ID NO: 540100 - RNA, 22 nt, Human
agccugagagccaagcugugca

SEQ ID NO: 540101 - RNA, 22 nt, Human
acacugaauguuuaagaacuug

SEQ ID NO: 540102 - RNA, 22 nt, Human
gggcagagagcuggaacuccuu

SEQ ID NO: 540103 - RNA, 19 nt, Human
aaggcagaaguuggauaug

SEQ ID NO: 540104 - RNA, 22 nt, Human
uuuuucaucugauugauaacuc

SEQ ID NO: 540105 - RNA, 19 nt, Human
uucuaccuuacuguaggcu

SEQ ID NO: 540106 - RNA, 22 nt, Human
cuguacaggucaaugauaagau

SEQ ID NO: 540107 - RNA, 22 nt, Human
augucacagcucccauuccucc

SEQ ID NO: 540108 - RNA, 22 nt, Human
auaaacaguaaaugugagcagu

SEQ ID NO: 540109 - RNA, 22 nt, Human
gaaacauuguguucuacagauu

SEQ ID NO: 540110 - RNA, 22 nt, Human
augaggcagaaaaaagucggag

SEQ ID NO: 540111 - RNA, 22 nt, Human
agcagcugccacuggaauagga

SEQ ID NO: 540112 - RNA, 22 nt, Human
ucagaauuuaaaauguguagau

SEQ ID NO: 540113 - RNA, 22 nt, Human
uauugacaauuugugaaacuau

SEQ ID NO: 540114 - RNA, 22 nt, Human
cugagaggaugcugcaguggag

SEQ ID NO: 540115 - RNA, 22 nt, Human
guuuucauuacugcugugauuu

SEQ ID NO: 540116 - RNA, 22 nt, Human
acaggccacaguggagucucug

SEQ ID NO: 540117 - RNA, 22 nt, Human
uuugaaagaauuuauguacuuu

SEQ ID NO: 540118 - RNA, 22 nt, Human
caggagacuauggcccaaggcc

SEQ ID NO: 540119 - RNA, 22 nt, Human
aaugauggucauggcaacuuuu

SEQ ID NO: 540120 - RNA, 22 nt, Human
uggguaaacugggucuggagag

SEQ ID NO: 540121 - RNA, 22 nt, Human
gcuguggcugaccaccaggggg

SEQ ID NO: 540122 - RNA, 22 nt, Human
aaaucagagaauauauuuagaa

SEQ ID NO: 540123 - RNA, 19 nt, Human
uggcugggcgugccuccgu

SEQ ID NO: 540124 - RNA, 20 nt, Human
ucucaggguucagcaaagua

SEQ ID NO: 540125 - RNA, 22 nt, Human
uugagaguuaccagcagaggaa

SEQ ID NO: 540126 - RNA, 22 nt, Human
aggcugggaaauguauuccagc

SEQ ID NO: 540127 - RNA, 22 nt, Human
aaaagcaaggcagucugucuga

SEQ ID NO: 540128 - RNA, 22 nt, Human
aggggcuccuggccuggagagc

SEQ ID NO: 540129 - RNA, 22 nt, Human
augggcuggggaagcucacucc

SEQ ID NO: 540130 - RNA, 22 nt, Human
ucagggcaaaagggaaaccauu

SEQ ID NO: 540131 - RNA, 22 nt, Human
aauaggacuuugguccuagcuc

SEQ ID NO: 540132 - RNA, 22 nt, Human
ugaauucauccauuuaugcaag

SEQ ID NO: 540133 - RNA, 22 nt, Human
ccugggcaacauagugagaccc

SEQ ID NO: 540134 - RNA, 22 nt, Human
gcucagugcagccuuucuguau

SEQ ID NO: 540135 - RNA, 22 nt, Human
ggggauggaauguaguagugau

SEQ ID NO: 540136 - RNA, 18 nt, Human
uucucauaccucacuuag

SEQ ID NO: 540137 - RNA, 19 nt, Human
auagucuuuccaauuauac

SEQ ID NO: 540138 - RNA, 22 nt, Human
uucagaguaggauacuagcuua

SEQ ID NO: 540139 - RNA, 22 nt, Human
gcagggcagugugucugugggg

SEQ ID NO: 540140 - RNA, 22 nt, Human
uuuugcuuaaucuagauuuugc

SEQ ID NO: 540141 - RNA, 22 nt, Human
ucagauuuggacacaggaacuu

SEQ ID NO: 540142 - RNA, 22 nt, Human
gaguucugugagccauccuagc

SEQ ID NO: 540143 - RNA, 22 nt, Human
aaaggcagugugauacuguggu

SEQ ID NO: 540144 - RNA, 22 nt, Human
cgaaaucaaacuugggcuucug

SEQ ID NO: 540145 - RNA, 22 nt, Human
uuuguagacuaccaguaauugu

SEQ ID NO: 540146 - RNA, 22 nt, Human
ugcagggcacacgcacgggugu

SEQ ID NO: 540147 - RNA, 23 nt, Human
uguaaauuuuguagucacauuuu

SEQ ID NO: 540148 - RNA, 23 nt, Human
aacaauagguuuuggcagaauag

SEQ ID NO: 540149 - RNA, 22 nt, Human
uugggcuuggucgguuugaggc

SEQ ID NO: 540150 - RNA, 22 nt, Human
guuucacagcaaaguucccugu

SEQ ID NO: 540151 - RNA, 22 nt, Human
caguugcuacaguucaagugug

SEQ ID NO: 540152 - RNA, 22 nt, Human
agggugucagccacggaauggg

SEQ ID NO: 540153 - RNA, 22 nt, Human
cuaguggaaacuaacuggaauu

SEQ ID NO: 540154 - RNA, 22 nt, Human
agauaauuugaguaaauuaauu

SEQ ID NO: 540155 - RNA, 22 nt, Human
ucaaagcaauuucaccagugcc

SEQ ID NO: 540156 - RNA, 22 nt, Human
uggcugagaccuucccaaauuc

SEQ ID NO: 540157 - RNA, 22 nt, Human
uccuggagaauccugccaccug

SEQ ID NO: 540158 - RNA, 22 nt, Human
agcagcagaggucagaaaggua

SEQ ID NO: 540159 - RNA, 22 nt, Human
caguuucagaaucaaaacauca

SEQ ID NO: 540160 - RNA, 22 nt, Human
cugugccaggcccagcugacuu

SEQ ID NO: 540161 - RNA, 21 nt, Human
uucagcuauucagaaggggag

SEQ ID NO: 540162 - RNA, 22 nt, Human
uuucacauagaaagugauuuac

SEQ ID NO: 540163 - RNA, 22 nt, Human
gcagcucucuggccugcccugg

SEQ ID NO: 540164 - RNA, 22 nt, Human
gucagcuaggcagcugugaugg

SEQ ID NO: 540165 - RNA, 22 nt, Human
ucuguucaagacugaggugaca

SEQ ID NO: 540166 - RNA, 22 nt, Human
uacacaucccagacucccagga

SEQ ID NO: 540167 - RNA, 22 nt, Human
agugacugacaccuguaauccc

SEQ ID NO: 540168 - RNA, 20 nt, Human
aauguucaguaauuguuuua

SEQ ID NO: 540169 - RNA, 22 nt, Human
aggcgcagaaggccaggggccu

SEQ ID NO: 540170 - RNA, 22 nt, Human
aggcagcuggaggcagagacua

SEQ ID NO: 540171 - RNA, 22 nt, Human
ccaggcucaccuggagccccug

SEQ ID NO: 540172 - RNA, 16 nt, Human
aggcucagaggcugga

SEQ ID NO: 540173 - RNA, 22 nt, Human
acagccagggucucaggaggcg

SEQ ID NO: 540174 - RNA, 22 nt, Human
auuucucagcacuuccuaucuc

SEQ ID NO: 540175 - RNA, 22 nt, Human
cucacagcacuugugucauugg

SEQ ID NO: 540176 - RNA, 22 nt, Human
gugugcaugcauagacaccaca

SEQ ID NO: 540177 - RNA, 22 nt, Human
uggacagguugaguaggaggag

SEQ ID NO: 540178 - RNA, 22 nt, Human
agcaggugacccaagcaggcug

SEQ ID NO: 540179 - RNA, 21 nt, Human
ucuguucaaggaacuacggau

SEQ ID NO: 540180 - RNA, 17 nt, Human
uuucuggaaugggcaaa

SEQ ID NO: 540181 - RNA, 22 nt, Human
cagagggcucuuggcugccugc

SEQ ID NO: 540182 - RNA, 22 nt, Human
gaagacauuaagucuaugucac

SEQ ID NO: 540183 - RNA, 22 nt, Human
uuguacagaaacugcauuugga

SEQ ID NO: 540184 - RNA, 22 nt, Human
uagggugcaugacaagaucccu

SEQ ID NO: 540185 - RNA, 22 nt, Human
uguuccuggaaagccagguggg

SEQ ID NO: 540186 - RNA, 23 nt, Human
ugcucugugaauaguuggugacu

SEQ ID NO: 540187 - RNA, 22 nt, Human
gggugggagucuggcccucaaa

SEQ ID NO: 540188 - RNA, 22 nt, Human
agaggagguccuuuucugaugu

SEQ ID NO: 540189 - RNA, 22 nt, Human
uccagaccauggauggcugcaa

SEQ ID NO: 540190 - RNA, 22 nt, Human
uuaguaauguguuaauaugaau

SEQ ID NO: 540191 - RNA, 22 nt, Human
gagaggugaauguggaugccac

SEQ ID NO: 540192 - RNA, 22 nt, Human
uggaccaacauucacuggcaua

SEQ ID NO: 540193 - RNA, 22 nt, Human
cucuccuggggagcacacacac

SEQ ID NO: 540194 - RNA, 22 nt, Human
cuuccagagauagggccucaag

SEQ ID NO: 540195 - RNA, 17 nt, Human
ucauuuguugugacuag

SEQ ID NO: 540196 - RNA, 22 nt, Human
ggccccacgggggaguccuagu

SEQ ID NO: 540197 - RNA, 19 nt, Human
ccuggcugugaagccugca

SEQ ID NO: 540198 - RNA, 22 nt, Human
agaguguuuuucugucaaggac

SEQ ID NO: 540199 - RNA, 22 nt, Human
uugaaacuuuaguaaacuaagg

SEQ ID NO: 540200 - RNA, 22 nt, Human
gagugugggcacgggggccuug

SEQ ID NO: 540201 - RNA, 22 nt, Human
cuaugagaagaaaacaagauua

SEQ ID NO: 540202 - RNA, 22 nt, Human
ucuggauggucagcucuuccug

SEQ ID NO: 540203 - RNA, 22 nt, Human
uuucccaaguguaaacauggca

SEQ ID NO: 540204 - RNA, 22 nt, Human
acuguggccugcuguaugggcu

SEQ ID NO: 540205 - RNA, 18 nt, Human
auccuugaugagaggucu

SEQ ID NO: 540206 - RNA, 22 nt, Human
cugaagcagggagugaugaagu

SEQ ID NO: 540207 - RNA, 22 nt, Human
ggcucuggugugaagcagccuc

SEQ ID NO: 540208 - RNA, 22 nt, Human
uacugcuuguuagcuguauuug

SEQ ID NO: 540209 - RNA, 22 nt, Human
agcaugaaagcauaggacaguc

SEQ ID NO: 540210 - RNA, 23 nt, Human
ccugaagggucaggguccucagc

SEQ ID NO: 540211 - RNA, 22 nt, Human
caagaaacuuuauucugccaua

SEQ ID NO: 540212 - RNA, 22 nt, Human
agucucugcugguugugccuau

SEQ ID NO: 540213 - RNA, 22 nt, Human
gcuguggaguacagagcugguu

SEQ ID NO: 540214 - RNA, 22 nt, Human
cggggagaacacuguguccuuc

SEQ ID NO: 540215 - RNA, 22 nt, Human
gggaggagcugagugugugugc

SEQ ID NO: 540216 - RNA, 22 nt, Human
ggguaauuggggccuugcagug

SEQ ID NO: 540217 - RNA, 20 nt, Human
ugaaggccauuuguuccaga

SEQ ID NO: 540218 - RNA, 22 nt, Human
aucaggaucugcaucauaagaa

SEQ ID NO: 540219 - RNA, 22 nt, Human
uucaacauagcugaggcauaua

SEQ ID NO: 540220 - RNA, 22 nt, Human
agagaugggaaggcagacuuca

SEQ ID NO: 540221 - RNA, 22 nt, Human
aacagaacuguuguucuggagg

SEQ ID NO: 540222 - RNA, 22 nt, Human
cagccaagaaccacagacccag

SEQ ID NO: 540223 - RNA, 22 nt, Human
ugucauuuuagugcaucacuca

SEQ ID NO: 540224 - RNA, 22 nt, Human
aaagugacaaccauuuauuaag

SEQ ID NO: 540225 - RNA, 22 nt, Human
gauauuuuuaguauuucugccu

SEQ ID NO: 540226 - RNA, 22 nt, Human
uucugugcccauuuuaaaaugg

SEQ ID NO: 540227 - RNA, 22 nt, Human
cugaggcaggagaauugcugga

SEQ ID NO: 540228 - RNA, 20 nt, Human
cugccaugauugauagagug

SEQ ID NO: 540229 - RNA, 22 nt, Human
ugggaacaguagcugcugagcu

SEQ ID NO: 540230 - RNA, 22 nt, Human
ugcaauaaguuguguuaucacu

SEQ ID NO: 540231 - RNA, 22 nt, Human
cugguacaaaaugcugauauca

SEQ ID NO: 540232 - RNA, 22 nt, Human
uguuugcacauucguuucaaua

SEQ ID NO: 540233 - RNA, 22 nt, Human
uagaaacagcauauauuagccc

SEQ ID NO: 540234 - RNA, 22 nt, Human
gcucccagucugauggaggaga

SEQ ID NO: 540235 - RNA, 22 nt, Human
gcagauggaaagugcuugaggg

SEQ ID NO: 540236 - RNA, 22 nt, Human
ugaggcaggagaaucaccggaa

SEQ ID NO: 540237 - RNA, 22 nt, Human
gcagcuggacccacacggcuua

SEQ ID NO: 540238 - RNA, 22 nt, Human
uggaggccagagguacugggac

SEQ ID NO: 540239 - RNA, 22 nt, Human
cugugugugucugcagcauacu

SEQ ID NO: 540240 - RNA, 19 nt, Human
uuugaaaggauuguuauuu

SEQ ID NO: 540241 - RNA, 22 nt, Human
ugcuucugaacucagcaugugg

SEQ ID NO: 540242 - RNA, 22 nt, Human
gaggucaucuguuuugguuacu

SEQ ID NO: 540243 - RNA, 22 nt, Human
gggaauuauagcugucacaggc

SEQ ID NO: 540244 - RNA, 22 nt, Human
uggaaugacagagagucugaau

SEQ ID NO: 540245 - RNA, 19 nt, Human
aaaaggagagaucagaguu

SEQ ID NO: 540246 - RNA, 22 nt, Human
agccuggagcuugaguuaugag

SEQ ID NO: 540247 - RNA, 22 nt, Human
uccuuuccaugcuucuagaggc

SEQ ID NO: 540248 - RNA, 18 nt, Human
caggaaccucuccuuuuu

SEQ ID NO: 540249 - RNA, 22 nt, Human
uuucagagcucuaggcucucag

SEQ ID NO: 540250 - RNA, 22 nt, Human
agaugcugcuccacaggccagg

SEQ ID NO: 540251 - RNA, 22 nt, Human
cagggcugaggacacaaguaaa

SEQ ID NO: 540252 - RNA, 22 nt, Human
ucagggcaaugucccucagaag

SEQ ID NO: 540253 - RNA, 22 nt, Human
cugagcaggacagugggagacc

SEQ ID NO: 540254 - RNA, 22 nt, Human
agggcuccgggcaggcgaugga

SEQ ID NO: 540255 - RNA, 22 nt, Human
gagcuuuaggagaaggagguca

SEQ ID NO: 540256 - RNA, 22 nt, Human
gguggggucacgacagagggaa

SEQ ID NO: 540257 - RNA, 22 nt, Human
ggaagaaagguggacaacaggu

SEQ ID NO: 540258 - RNA, 22 nt, Human
cuauaucauaaaucugaagagg

SEQ ID NO: 540259 - RNA, 22 nt, Human
guuccacaaaauguacccaguu

SEQ ID NO: 540260 - RNA, 22 nt, Human
agcccaaggcuucccugcuggc

SEQ ID NO: 540261 - RNA, 22 nt, Human
guccucuggugaaagcauuccc

SEQ ID NO: 540262 - RNA, 22 nt, Human
auaacccucuggauaggacagg

SEQ ID NO: 540263 - RNA, 22 nt, Human
augaaauaucuugaagaaauuc

SEQ ID NO: 540264 - RNA, 22 nt, Human
cagccucucuguaucucaggau

SEQ ID NO: 540265 - RNA, 22 nt, Human
ggcucaggacugcagcguagag

SEQ ID NO: 540266 - RNA, 22 nt, Human
acagaguccuagcugcaaagaa

SEQ ID NO: 540267 - RNA, 22 nt, Human
uugguucaaaacauggaagggu

SEQ ID NO: 540268 - RNA, 22 nt, Human
accuucaaguaugugggcugaa

SEQ ID NO: 540269 - RNA, 22 nt, Human
aaggccaugcacauccuaggca

SEQ ID NO: 540270 - RNA, 22 nt, Human
gagguagcaugcuggaagggac

SEQ ID NO: 540271 - RNA, 22 nt, Human
gugcaugaagacucagaaaguc

SEQ ID NO: 540272 - RNA, 22 nt, Human
uccagaccaugugagaggcgca

SEQ ID NO: 540273 - RNA, 22 nt, Human
auuaauuuuaccuuuguaaaca

SEQ ID NO: 540274 - RNA, 22 nt, Human
gggcagguggcaaagccagagg

SEQ ID NO: 540275 - RNA, 20 nt, Human
auugugaauacugcauaugu

SEQ ID NO: 540276 - RNA, 22 nt, Human
ucccauggucuauauagaggca

SEQ ID NO: 540277 - RNA, 22 nt, Human
aauauagauuuacucaagagaa

SEQ ID NO: 540278 - RNA, 19 nt, Human
uggcucugucgaaggcaca

SEQ ID NO: 540279 - RNA, 22 nt, Human
caggccuggcccccggcacacc

SEQ ID NO: 540280 - RNA, 22 nt, Human
gauaugaaguggcauugugaag

SEQ ID NO: 540281 - RNA, 22 nt, Human
aagagagagcauucuucuguua

SEQ ID NO: 540282 - RNA, 22 nt, Human
auuuccuaacagaggcaacagu

SEQ ID NO: 540283 - RNA, 22 nt, Human
agcacagaguugcagagagcgu

SEQ ID NO: 540284 - RNA, 22 nt, Human
ugcagucuuccagcugcacaaa

SEQ ID NO: 540285 - RNA, 22 nt, Human
aauguacaaaagucagccaacu

SEQ ID NO: 540286 - RNA, 18 nt, Human
gaaguuaguggugugcua

SEQ ID NO: 540287 - RNA, 23 nt, Human
acaacuuuacagauacauuuugu

SEQ ID NO: 540288 - RNA, 22 nt, Human
cggggcaggagucccuguagag

SEQ ID NO: 540289 - RNA, 22 nt, Human
acuguacuuacgcauauacagg

SEQ ID NO: 540290 - RNA, 22 nt, Human
ucagugcagaauagugaugcau

SEQ ID NO: 540291 - RNA, 22 nt, Human
ugccaggcugucaauucaccca

SEQ ID NO: 540292 - RNA, 21 nt, Human
ucugcccuccaggagcucaua

SEQ ID NO: 540293 - RNA, 22 nt, Human
uccagggaucuuuagagucuuu

SEQ ID NO: 540294 - RNA, 22 nt, Human
cagggguguuuuuggccaggag

SEQ ID NO: 540295 - RNA, 22 nt, Human
uuccagaaaguucuggaacugg

SEQ ID NO: 540296 - RNA, 22 nt, Human
uagauaauuuggcaucauauug

SEQ ID NO: 540297 - RNA, 22 nt, Human
gagagcuguaauagucaugucu

SEQ ID NO: 540298 - RNA, 22 nt, Human
cuggaacaguguuggagcuuga

SEQ ID NO: 540299 - RNA, 22 nt, Human
gagccugaauuugaccugcuua

SEQ ID NO: 540300 - RNA, 20 nt, Human
uugauaggcagcuugucagg

SEQ ID NO: 540301 - RNA, 22 nt, Human
gcuccccauugaucugcaggcu

SEQ ID NO: 540302 - RNA, 22 nt, Human
gcugcugggucccucugugcca

SEQ ID NO: 540303 - RNA, 22 nt, Human
agccaggauggucucgaucggc

SEQ ID NO: 540304 - RNA, 22 nt, Human
aauuauguggaagaggauuaaa

SEQ ID NO: 540305 - RNA, 22 nt, Human
uuuguuuagaugguaaaucagu

SEQ ID NO: 540306 - RNA, 22 nt, Human
cagaauggcuuuuauggcucag

SEQ ID NO: 540307 - RNA, 22 nt, Human
agauucuacucuagauccaugg

SEQ ID NO: 540308 - RNA, 22 nt, Human
gucacaggaagcagcaggcacu

SEQ ID NO: 540309 - RNA, 22 nt, Human
uccaugccaggcagucgaugca

SEQ ID NO: 540310 - RNA, 22 nt, Human
aucaggaugaagcuguagcgaa

SEQ ID NO: 540311 - RNA, 21 nt, Human
acuuuacaauuuacauaguga

SEQ ID NO: 540312 - RNA, 22 nt, Human
ggagugaggcauuuguagcuga

SEQ ID NO: 540313 - RNA, 22 nt, Human
uacaggcaugaaugaaaucugu

SEQ ID NO: 540314 - RNA, 22 nt, Human
auuucaugguacaucgugacuu

SEQ ID NO: 540315 - RNA, 22 nt, Human
ugucuagggagcugcucaggcu

SEQ ID NO: 540316 - RNA, 22 nt, Human
gagcaguggucugaucuucuaa

SEQ ID NO: 540317 - RNA, 22 nt, Human
auugaaagauauacuguucuca

SEQ ID NO: 540318 - RNA, 22 nt, Human
uucaaaacaaucuguuugcauu

SEQ ID NO: 540319 - RNA, 22 nt, Human
aaaguucaugguguuauagaaa

SEQ ID NO: 540320 - RNA, 22 nt, Human
agcugagcuaguaguuccagug

SEQ ID NO: 540321 - RNA, 22 nt, Human
ccagcuuuagguugccugccag

SEQ ID NO: 540322 - RNA, 22 nt, Human
cagaggcagccgggggagaacg

SEQ ID NO: 540323 - RNA, 22 nt, Human
acucugccccgaguucugggaa

SEQ ID NO: 540324 - RNA, 22 nt, Human
acauuucuuccuaauuaucccu

SEQ ID NO: 540325 - RNA, 22 nt, Human
guuuuguugcugcagagcucaa

SEQ ID NO: 540326 - RNA, 21 nt, Human
gcugugcacauaguagaagug

SEQ ID NO: 540327 - RNA, 22 nt, Human
gcaggccuccccugcuggagcu

SEQ ID NO: 540328 - RNA, 22 nt, Human
uuugacagcuuguuacaaaguu

SEQ ID NO: 540329 - RNA, 22 nt, Human
caauguuuuuccuuccuuaaua

SEQ ID NO: 540330 - RNA, 22 nt, Human
cuccagucauagucugucuugu

SEQ ID NO: 540331 - RNA, 22 nt, Human
uucuuguauguaugcaaaauca

SEQ ID NO: 540332 - RNA, 22 nt, Human
agaggucauaucucagaagaga

SEQ ID NO: 540333 - RNA, 22 nt, Human
aggcccaguccucugccgucug

SEQ ID NO: 540334 - RNA, 22 nt, Human
gugauucaaauguaacuaauua

SEQ ID NO: 540335 - RNA, 22 nt, Human
aguggauggucacugauccagu

SEQ ID NO: 540336 - RNA, 22 nt, Human
gcagagaggauauuauugucca

SEQ ID NO: 540337 - RNA, 22 nt, Human
uaggaacaguuucaggauguuu

SEQ ID NO: 540338 - RNA, 22 nt, Human
ccaaaguaaggcaauuccuaaa

SEQ ID NO: 540339 - RNA, 22 nt, Human
ucaguuuuaagguuugagaauu

SEQ ID NO: 540340 - RNA, 22 nt, Human
uauaacuaauacuggccaugag

SEQ ID NO: 540341 - RNA, 22 nt, Human
caauuuuacucuuccucuucca

SEQ ID NO: 540342 - RNA, 22 nt, Human
cauaacacauucaucagcagag

SEQ ID NO: 540343 - RNA, 22 nt, Human
ugggaggaucucuugaggccag

SEQ ID NO: 540344 - RNA, 22 nt, Human
cauuucauuccuuugaaagugg

SEQ ID NO: 540345 - RNA, 22 nt, Human
aaacauugcuaaauaaugcugc

SEQ ID NO: 540346 - RNA, 22 nt, Human
cauugcaccacauugcaucccu

SEQ ID NO: 540347 - RNA, 22 nt, Human
accuucagacaucaacuaucuc

SEQ ID NO: 540348 - RNA, 22 nt, Human
gggacuggaguagaggccggug

SEQ ID NO: 540349 - RNA, 22 nt, Human
agggggucguccggaagaccug

SEQ ID NO: 540350 - RNA, 22 nt, Human
ucacaguaucacacaaggauua

SEQ ID NO: 540351 - RNA, 22 nt, Human
gcuguccucugaucucuggagg

SEQ ID NO: 540352 - RNA, 22 nt, Human
aagagaaggauucugagccugg

SEQ ID NO: 540353 - RNA, 22 nt, Human
gccaggcuguggggaacuugaa

SEQ ID NO: 540354 - RNA, 22 nt, Human
guuuguaaccagaacagagagu

SEQ ID NO: 540355 - RNA, 22 nt, Human
uuuacagucucuauagucaaaa

SEQ ID NO: 540356 - RNA, 22 nt, Human
ccuguucagagcuaagcaucau

SEQ ID NO: 540357 - RNA, 22 nt, Human
uguccaaugcccuuuccacaug

SEQ ID NO: 540358 - RNA, 22 nt, Human
aagggcucucugcauugaaauu

SEQ ID NO: 540359 - RNA, 22 nt, Human
uguaaggagugugaguuugagu

SEQ ID NO: 540360 - RNA, 22 nt, Human
cugugggaugggaccucagcug

SEQ ID NO: 540361 - RNA, 22 nt, Human
ucagaauuuucuggaauggagc

SEQ ID NO: 540362 - RNA, 22 nt, Human
guacccaggcacgccuugcuga

SEQ ID NO: 540363 - RNA, 23 nt, Human
uagcagcauuuuuagccucuguc

SEQ ID NO: 540364 - RNA, 22 nt, Human
ugaggcaggaggauugcaggau

SEQ ID NO: 540365 - RNA, 22 nt, Human
cacaugacucuggcuacccaga

SEQ ID NO: 540366 - RNA, 21 nt, Human
ccugggcugugguuuggagac

SEQ ID NO: 540367 - RNA, 22 nt, Human
cagcuguucagcaacucgcaga

SEQ ID NO: 540368 - RNA, 22 nt, Human
ucaaaaguuucacauagagaua

SEQ ID NO: 540369 - RNA, 22 nt, Human
ugaaguaggcagcaugcugaga

SEQ ID NO: 540370 - RNA, 22 nt, Human
acugcccuguaacugccaggua

SEQ ID NO: 540371 - RNA, 22 nt, Human
ucuugaaagcauuuucuucauc

SEQ ID NO: 540372 - RNA, 22 nt, Human
uucuuucucacucuuuaggaag

SEQ ID NO: 540373 - RNA, 21 nt, Human
aggaagaucuggaggucggcg

SEQ ID NO: 540374 - RNA, 22 nt, Human
aauguuucguaaauugucuaug

SEQ ID NO: 540375 - RNA, 22 nt, Human
aagacauugcaugauaaugcug

SEQ ID NO: 540376 - RNA, 22 nt, Human
caggauccuggcugcauggacg

SEQ ID NO: 540377 - RNA, 22 nt, Human
uggcagaaguacacaagcaugc

SEQ ID NO: 540378 - RNA, 22 nt, Human
ggcaggcuugguggcaccgguu

SEQ ID NO: 540379 - RNA, 22 nt, Human
cgggcagcggcguggccauggu

SEQ ID NO: 540380 - RNA, 22 nt, Human
gagcuggcaggaggcuccccga

SEQ ID NO: 540381 - RNA, 22 nt, Human
uagaagacaggaaauacaaacc

SEQ ID NO: 540382 - RNA, 22 nt, Human
gcaaagaaugcagauuugccuc

SEQ ID NO: 540383 - RNA, 22 nt, Human
ugaccugcguaggugguuucug

SEQ ID NO: 540384 - RNA, 22 nt, Human
uucuaaacacuacgggauuugg

SEQ ID NO: 540385 - RNA, 22 nt, Human
gaaaacacuuugaucugaaagu

SEQ ID NO: 540386 - RNA, 22 nt, Human
uaagaacaucuguccccagauu

SEQ ID NO: 540387 - RNA, 22 nt, Human
aacuucauguaauuuaaaacag

SEQ ID NO: 540388 - RNA, 22 nt, Human
agcaguggcuggauggugugcu

SEQ ID NO: 540389 - RNA, 22 nt, Human
acgagguuggagaguuguuugg

SEQ ID NO: 540390 - RNA, 22 nt, Human
uuaaggaauuacgaaaauauuu

SEQ ID NO: 540391 - RNA, 22 nt, Human
ccucaugguacuuacuguagcu

SEQ ID NO: 540392 - RNA, 22 nt, Human
aucuagaaguggcaugaauuac

SEQ ID NO: 540393 - RNA, 22 nt, Human
aaggaaagauucucucucuaga

SEQ ID NO: 540394 - RNA, 22 nt, Human
aagaaauuaaugugccauuacu

SEQ ID NO: 540395 - RNA, 22 nt, Human
agcagagccugggcuaggggug

SEQ ID NO: 540396 - RNA, 22 nt, Human
caggguuucaccauguuagcag

SEQ ID NO: 540397 - RNA, 23 nt, Human
uugugggcagauuccauggggag

SEQ ID NO: 540398 - RNA, 22 nt, Human
aagcaaguucucaucauuuaua

SEQ ID NO: 540399 - RNA, 22 nt, Human
gcagaggaggacccaggaauua

SEQ ID NO: 540400 - RNA, 22 nt, Human
cauguuuucuaggcuuucacaa

SEQ ID NO: 540401 - RNA, 22 nt, Human
gcuggcaguguauuguuagcug

SEQ ID NO: 540402 - RNA, 22 nt, Human
gaguggagcaaaagagguagau

SEQ ID NO: 540403 - RNA, 22 nt, Human
acagguggcuuccauuuucuaa

SEQ ID NO: 540404 - RNA, 22 nt, Human
auucuggacaaugagaaacugg

SEQ ID NO: 540405 - RNA, 22 nt, Human
uggccacccagcugacgccuuc

SEQ ID NO: 540406 - RNA, 18 nt, Human
gagcugggagaaggaagg

SEQ ID NO: 540407 - RNA, 22 nt, Human
uuugcuaaauaagugauuaagu

SEQ ID NO: 540408 - RNA, 22 nt, Human
uccuggauggccugcaggcggu

SEQ ID NO: 540409 - RNA, 22 nt, Human
gcugucacucuccggccuuccc

SEQ ID NO: 540410 - RNA, 22 nt, Human
gcucugcucuaacauuccugac

SEQ ID NO: 540411 - RNA, 22 nt, Human
guccuuugaaggcaaaaggaga

SEQ ID NO: 540412 - RNA, 20 nt, Human
cagaaggucuaagcuuuaga

SEQ ID NO: 540413 - RNA, 22 nt, Human
uagaggcauaagagggaagcag

SEQ ID NO: 540414 - RNA, 22 nt, Human
ucccagggcacucacccucccu

SEQ ID NO: 540415 - RNA, 22 nt, Human
gcucugagagugggugauucug

SEQ ID NO: 540416 - RNA, 22 nt, Human
ggucauugucagagccuguacu

SEQ ID NO: 540417 - RNA, 22 nt, Human
agcuucuugggcuuuacacaaa

SEQ ID NO: 540418 - RNA, 22 nt, Human
gcccauggucagggaggcaggg

SEQ ID NO: 540419 - RNA, 22 nt, Human
cagggcagagggaaacuccuuu

SEQ ID NO: 540420 - RNA, 20 nt, Human
agccucugcccuucccacug

SEQ ID NO: 540421 - RNA, 22 nt, Human
aaaucuaggcucauccuggucc

SEQ ID NO: 540422 - RNA, 22 nt, Human
cauugacaguucuuuaaguugc

SEQ ID NO: 540423 - RNA, 22 nt, Human
gaggaagaaucaggguggugag

SEQ ID NO: 540424 - RNA, 22 nt, Human
aucuggcuuacgaagcacuggu

SEQ ID NO: 540425 - RNA, 22 nt, Human
gcacagggagacagccguggcc

SEQ ID NO: 540426 - RNA, 22 nt, Human
ugugccuuaugaauucuuucug

SEQ ID NO: 540427 - RNA, 22 nt, Human
auccaguucucagugcuuacag

SEQ ID NO: 540428 - RNA, 22 nt, Human
ugcaaaugggcaucuccaagug

SEQ ID NO: 540429 - RNA, 22 nt, Human
uuccaagugucagaucagauuu

SEQ ID NO: 540430 - RNA, 22 nt, Human
gccuggaguuguggugaagcca

SEQ ID NO: 540431 - RNA, 22 nt, Human
ccaaaguccauaguuuacauaa

SEQ ID NO: 540432 - RNA, 22 nt, Human
ugaagcuggaagcaugcagacu

SEQ ID NO: 540433 - RNA, 22 nt, Human
ggcagcucugcuccacaugagu

SEQ ID NO: 540434 - RNA, 22 nt, Human
agggucccgaaggagacagcaa

SEQ ID NO: 540435 - RNA, 22 nt, Human
guccucugacucagccuuggga

SEQ ID NO: 540436 - RNA, 22 nt, Human
aaggcagcucagcucauggcag

SEQ ID NO: 540437 - RNA, 22 nt, Human
agggcugcugcuccgggcccag

SEQ ID NO: 540438 - RNA, 21 nt, Human
aguguuaauggaaauuauauu

SEQ ID NO: 540439 - RNA, 22 nt, Human
ucaagagaagugcuccacagua

SEQ ID NO: 540440 - RNA, 22 nt, Human
gcagcugcuguggcaucaagcu

SEQ ID NO: 540441 - RNA, 22 nt, Human
gagcaagacuacaggcagauga

SEQ ID NO: 540442 - RNA, 22 nt, Human
ggcagugguuagaaacaugagc

SEQ ID NO: 540443 - RNA, 22 nt, Human
caaagucuucaguugauucuga

SEQ ID NO: 540444 - RNA, 22 nt, Human
cuggcagcccaaccuagagucu

SEQ ID NO: 540445 - RNA, 20 nt, Human
agccaggccucaaguuaagu

SEQ ID NO: 540446 - RNA, 22 nt, Human
auauuaggugcucaauacaugc

SEQ ID NO: 540447 - RNA, 22 nt, Human
aaauuucuaagcagccacuucc

SEQ ID NO: 540448 - RNA, 22 nt, Human
acagccuguguaccagcuggga

SEQ ID NO: 540449 - RNA, 22 nt, Human
ugaggcuuagagaagaugggau

SEQ ID NO: 540450 - RNA, 22 nt, Human
gggagcucucccugaggccugg

SEQ ID NO: 540451 - RNA, 22 nt, Human
uguggcagaaccagaauucaaa

SEQ ID NO: 540452 - RNA, 22 nt, Human
ggcuccucucuggccgcucccg

SEQ ID NO: 540453 - RNA, 22 nt, Human
caauagcagcuucugaaugcaa

SEQ ID NO: 540454 - RNA, 22 nt, Human
caaagccauagaguagauaaga

SEQ ID NO: 540455 - RNA, 22 nt, Human
cugugccuccaaguggucucug

SEQ ID NO: 540456 - RNA, 22 nt, Human
ucaauucaauugaacaguuacu

SEQ ID NO: 540457 - RNA, 22 nt, Human
gaucauuuugaugcccuuuuag

SEQ ID NO: 540458 - RNA, 22 nt, Human
cuuuggcaaugaaacacaagaa

SEQ ID NO: 540459 - RNA, 22 nt, Human
ugugcagcucuagagccaagcc

SEQ ID NO: 540460 - RNA, 22 nt, Human
accaucaagaccuuaucuaguu

SEQ ID NO: 540461 - RNA, 22 nt, Human
aauuucacauaaggcucauugg

SEQ ID NO: 540462 - RNA, 22 nt, Human
aguuucuugaagacugauguuu

SEQ ID NO: 540463 - RNA, 22 nt, Human
cugugcuucgcaacuccaaggu

SEQ ID NO: 540464 - RNA, 22 nt, Human
ggucaggguuccagguaucuuc

SEQ ID NO: 540465 - RNA, 23 nt, Human
ucggugggcguggaggccgaggc

SEQ ID NO: 540466 - RNA, 22 nt, Human
agagccugggaauuugcauguu

SEQ ID NO: 540467 - RNA, 22 nt, Human
uccuggccucacaguccugggu

SEQ ID NO: 540468 - RNA, 22 nt, Human
ucugucucaaguucuugcacuc

SEQ ID NO: 540469 - RNA, 22 nt, Human
acugccuguagcucuucaucuc

SEQ ID NO: 540470 - RNA, 22 nt, Human
uuauucugcacuuuuaaaauau

SEQ ID NO: 540471 - RNA, 22 nt, Human
aaguauauuuuuugaagcauau

SEQ ID NO: 540472 - RNA, 23 nt, Human
aagagcagggaauauuuauuugc

SEQ ID NO: 540473 - RNA, 22 nt, Human
cucagagucugcauuucuguca

SEQ ID NO: 540474 - RNA, 22 nt, Human
cagaguggcacucugcuggaug

SEQ ID NO: 540475 - RNA, 22 nt, Human
uugcacaguuugaagaugacuc

SEQ ID NO: 540476 - RNA, 22 nt, Human
aaaaguauuuauggcuauguaa

SEQ ID NO: 540477 - RNA, 22 nt, Human
guggcaggggcgggcuguuccg

SEQ ID NO: 540478 - RNA, 22 nt, Human
cagggcccaagacacaaugagg

SEQ ID NO: 540479 - RNA, 22 nt, Human
gcagggaagaucuuggagcugc

SEQ ID NO: 540480 - RNA, 22 nt, Human
ucaagagaaggggaaauagacu

SEQ ID NO: 540481 - RNA, 22 nt, Human
cuaguucuagaucccugaggaa

SEQ ID NO: 540482 - RNA, 22 nt, Human
cugggcagccucacacaauguu

SEQ ID NO: 540483 - RNA, 22 nt, Human
aggacagcagccauuggcaguc

SEQ ID NO: 540484 - RNA, 22 nt, Human
agagugaaguaauuguuaggau

SEQ ID NO: 540485 - RNA, 22 nt, Human
aaggguggauuucugagcucua

SEQ ID NO: 540486 - RNA, 22 nt, Human
gguuucaacucagcuaguaagg

SEQ ID NO: 540487 - RNA, 22 nt, Human
aaaucucaauuugaauuguagc

SEQ ID NO: 540488 - RNA, 22 nt, Human
gagcuuccauggacgccaucug

SEQ ID NO: 540489 - RNA, 23 nt, Human
uggcucagggucucuuaugaagu

SEQ ID NO: 540490 - RNA, 22 nt, Human
ucaugcuuuggguuagaaaccu

SEQ ID NO: 540491 - RNA, 22 nt, Human
aaaggaagauugagcuuuucca

SEQ ID NO: 540492 - RNA, 22 nt, Human
aaaucacuaaguuauagugugg

SEQ ID NO: 540493 - RNA, 22 nt, Human
acugugugcuggacaugauguu

SEQ ID NO: 540494 - RNA, 22 nt, Human
augaggcacaucacagccaaug

SEQ ID NO: 540495 - RNA, 22 nt, Human
gaggcugcuuugaugacaggag

SEQ ID NO: 540496 - RNA, 22 nt, Human
uuuuggcucugucuguaucuuu

SEQ ID NO: 540497 - RNA, 23 nt, Human
aacugagauaauguauguaaagc

SEQ ID NO: 540498 - RNA, 22 nt, Human
gggcagcauaacaaucacugaa

SEQ ID NO: 540499 - RNA, 22 nt, Human
uuuaagguggacaucuaaguca

SEQ ID NO: 540500 - RNA, 22 nt, Human
gggcuuggcacaugggcucagc

SEQ ID NO: 540501 - RNA, 22 nt, Human
aggaccugcuaaugugccaagu

SEQ ID NO: 540502 - RNA, 22 nt, Human
gcaggcucguuggaaguccccu

SEQ ID NO: 540503 - RNA, 22 nt, Human
cagcccuggccccagguggucu

SEQ ID NO: 540504 - RNA, 22 nt, Human
ugcagguggccaucuucguucu

SEQ ID NO: 540505 - RNA, 22 nt, Human
aagagcugcacauauuuauauc

SEQ ID NO: 540506 - RNA, 18 nt, Human
cagaaaguuauuuacucu

SEQ ID NO: 540507 - RNA, 22 nt, Human
aaacacagguacugcagaagug

SEQ ID NO: 540508 - RNA, 22 nt, Human
ucagagagguuggugauaagaa

SEQ ID NO: 540509 - RNA, 22 nt, Human
acagagcuguacaugugccaug

SEQ ID NO: 540510 - RNA, 22 nt, Human
agcaggugccagguguacccgc

SEQ ID NO: 540511 - RNA, 22 nt, Human
gccagcuggaaaucugcuugaa

SEQ ID NO: 540512 - RNA, 21 nt, Human
acucaggagacuaacuauguc

SEQ ID NO: 540513 - RNA, 22 nt, Human
ucgggcuccugcacuuggagac

SEQ ID NO: 540514 - RNA, 22 nt, Human
auuucauggcagacuuuaaccc

SEQ ID NO: 540515 - RNA, 22 nt, Human
uggcuccuucauucuccugcca

SEQ ID NO: 540516 - RNA, 21 nt, Human
ugagagccuccaaccggcuac

SEQ ID NO: 540517 - RNA, 22 nt, Human
cuugaucuacauagugaaaccc

SEQ ID NO: 540518 - RNA, 22 nt, Human
caggaaaauggaaucaccugua

SEQ ID NO: 540519 - RNA, 20 nt, Human
ccagcugagccaaggggaga

SEQ ID NO: 540520 - RNA, 17 nt, Human
uuauuuuuugggcugag

SEQ ID NO: 540521 - RNA, 22 nt, Human
ggaagccagaaagugagaauau

SEQ ID NO: 540522 - RNA, 22 nt, Human
gggagagagagcucauguugaa

SEQ ID NO: 540523 - RNA, 22 nt, Human
ucuguuuaggcaaaauagcuac

SEQ ID NO: 540524 - RNA, 22 nt, Human
gaggaaccugggcuuccauccu

SEQ ID NO: 540525 - RNA, 22 nt, Human
gggagggaagguaccuguguga

SEQ ID NO: 540526 - RNA, 19 nt, Human
agccuggcuuugcucugcu

SEQ ID NO: 540527 - RNA, 22 nt, Human
aagaaggcggaccagaagggag

SEQ ID NO: 540528 - RNA, 22 nt, Human
agguuuccagcauggggaaggc

SEQ ID NO: 540529 - RNA, 22 nt, Human
cauuuguaguuaaaaaugucuc

SEQ ID NO: 540530 - RNA, 22 nt, Human
uuggccuucucauuugcuuauu

SEQ ID NO: 540531 - RNA, 22 nt, Human
cacagaacaccaaagaaccuuc

SEQ ID NO: 540532 - RNA, 22 nt, Human
ggcaucaggaucugucuugcuu

SEQ ID NO: 540533 - RNA, 22 nt, Human
uccuggaguauuucuguggugu

SEQ ID NO: 540534 - RNA, 19 nt, Human
gggcacagccuccccccag

SEQ ID NO: 540535 - RNA, 22 nt, Human
cccuggcaaaacacucucuuga

SEQ ID NO: 540536 - RNA, 22 nt, Human
caggcugaucagggcugggaug

SEQ ID NO: 540537 - RNA, 22 nt, Human
aauagcuuuggucaccaucugg

SEQ ID NO: 540538 - RNA, 22 nt, Human
aggacagcccuugagagcacau

SEQ ID NO: 540539 - RNA, 22 nt, Human
cucuguagaaacagggcagaag

SEQ ID NO: 540540 - RNA, 22 nt, Human
cagagcauugagggucugccaa

SEQ ID NO: 540541 - RNA, 22 nt, Human
uggcagagccuugccaaacucc

SEQ ID NO: 540542 - RNA, 18 nt, Human
ucauagaagugaaucaga

SEQ ID NO: 540543 - RNA, 19 nt, Human
aggcagcacccaguccuug

SEQ ID NO: 540544 - RNA, 22 nt, Human
ccuggcagguggcgcccucggc

SEQ ID NO: 540545 - RNA, 22 nt, Human
ucccaagagcucugggauaagg

SEQ ID NO: 540546 - RNA, 22 nt, Human
ugccuuuucuguagcucuggaa

SEQ ID NO: 540547 - RNA, 22 nt, Human
ucuacuuuucccuauacaguuu

SEQ ID NO: 540548 - RNA, 19 nt, Human
cagaguacaccagauagga

SEQ ID NO: 540549 - RNA, 22 nt, Human
ucccagccauuccuuuaggugu

SEQ ID NO: 540550 - RNA, 19 nt, Human
ccuggcccugcugcgcggg

SEQ ID NO: 540551 - RNA, 22 nt, Human
gauuauuuugugcaauaaucgg

SEQ ID NO: 540552 - RNA, 22 nt, Human
guggcagucuuuggcaaugaca

SEQ ID NO: 540553 - RNA, 22 nt, Human
gcucagacucuggccugaugau

SEQ ID NO: 540554 - RNA, 22 nt, Human
aagggcagcuuaaauugguagc

SEQ ID NO: 540555 - RNA, 22 nt, Human
cagaaagaccugauuggcaguu

SEQ ID NO: 540556 - RNA, 22 nt, Human
cugaggcuggcguuugaggaag

SEQ ID NO: 540557 - RNA, 17 nt, Human
aggaagggcaaguuucu

SEQ ID NO: 540558 - RNA, 22 nt, Human
gagauaaugaugcuaacccagu

SEQ ID NO: 540559 - RNA, 22 nt, Human
ggaaggggucaccuccugauga

SEQ ID NO: 540560 - RNA, 22 nt, Human
aaguccagcagugcuuguugau

SEQ ID NO: 540561 - RNA, 22 nt, Human
agucucugugagcucccaaugg

SEQ ID NO: 540562 - RNA, 22 nt, Human
ccccaggacacauggaccaagu

SEQ ID NO: 540563 - RNA, 22 nt, Human
aguugcagacgcagagauguug

SEQ ID NO: 540564 - RNA, 22 nt, Human
uucagaaagugaaucuuguuau

SEQ ID NO: 540565 - RNA, 17 nt, Human
uucugagccacuuccuu

SEQ ID NO: 540566 - RNA, 22 nt, Human
uuuuuaucuuguaugugucucu

SEQ ID NO: 540567 - RNA, 22 nt, Human
agggcucugggguggcagagau

SEQ ID NO: 540568 - RNA, 22 nt, Human
uuugcauuacuugacuuuaguu

SEQ ID NO: 540569 - RNA, 22 nt, Human
agcuuuggagacugacuccauc

SEQ ID NO: 540570 - RNA, 22 nt, Human
uauauuaaaugaccaguuuuaa

SEQ ID NO: 540571 - RNA, 19 nt, Human
gaauguuuguauucagcgc

SEQ ID NO: 540572 - RNA, 22 nt, Human
aaacuuaguagaguucauauua

SEQ ID NO: 540573 - RNA, 22 nt, Human
aaagcccauguggaaguacagg

SEQ ID NO: 540574 - RNA, 22 nt, Human
ucaauucugcauacauuucacu

SEQ ID NO: 540575 - RNA, 22 nt, Human
uucuaugccauguucagcuacu

SEQ ID NO: 540576 - RNA, 22 nt, Human
ucuaagaaaucagaugaugagg

SEQ ID NO: 540577 - RNA, 22 nt, Human
agcugcagcguucauuuuucca

SEQ ID NO: 540578 - RNA, 22 nt, Human
uagaauaugugguguauacuuu

SEQ ID NO: 540579 - RNA, 22 nt, Human
gugcccuggcucacagugucuc

SEQ ID NO: 540580 - RNA, 22 nt, Human
ugcaggccggcccuaggccuca

SEQ ID NO: 540581 - RNA, 22 nt, Human
ccugcuucagggaugauggcac

SEQ ID NO: 540582 - RNA, 22 nt, Human
auuuagcaaaaaaugaugaagc

SEQ ID NO: 540583 - RNA, 22 nt, Human
aguaaaauuaauggaucagaag

SEQ ID NO: 540584 - RNA, 22 nt, Human
ugagugugcuaggugucucggu

SEQ ID NO: 540585 - RNA, 22 nt, Human
auuccaaaaggauguuagaaug

SEQ ID NO: 540586 - RNA, 22 nt, Human
cugcucugacccuuucaccuuc

SEQ ID NO: 540587 - RNA, 22 nt, Human
gauuucaaagguucugcaugcc

SEQ ID NO: 540588 - RNA, 22 nt, Human
uagcagagguaaguguggcaau

SEQ ID NO: 540589 - RNA, 22 nt, Human
cccagguguuuguggcagaggu

SEQ ID NO: 540590 - RNA, 22 nt, Human
accaugaugggaagcucagggc

SEQ ID NO: 540591 - RNA, 22 nt, Human
cugagaggcggagcuugcagug

SEQ ID NO: 540592 - RNA, 22 nt, Human
uggagaauucuauguugagggg

SEQ ID NO: 540593 - RNA, 22 nt, Human
gaggaagaaagcauaggugggg

SEQ ID NO: 540594 - RNA, 22 nt, Human
ccagggcaacgcugucucagag

SEQ ID NO: 540595 - RNA, 20 nt, Human
aggagaugauccagagucag

SEQ ID NO: 540596 - RNA, 20 nt, Human
agagagaccuaggccuaguc

SEQ ID NO: 540597 - RNA, 23 nt, Human
aaggggauacuuccacuuucuuu

SEQ ID NO: 540598 - RNA, 22 nt, Human
uacaguagaauuuuuaguaacu

SEQ ID NO: 540599 - RNA, 22 nt, Human
uuguucaugguuguaaguuuga

SEQ ID NO: 540600 - RNA, 22 nt, Human
aaauuagucgguuuaggaauuu

SEQ ID NO: 540601 - RNA, 18 nt, Human
uccuccuuuggccuuuuc

SEQ ID NO: 540602 - RNA, 22 nt, Human
cccaagcagggugcagaggcau

SEQ ID NO: 540603 - RNA, 22 nt, Human
caggguagacaguaggugucug

SEQ ID NO: 540604 - RNA, 23 nt, Human
agugcuggagaagcuucuggcuu

SEQ ID NO: 540605 - RNA, 22 nt, Human
cagccaugagucuaagcaguuu

SEQ ID NO: 540606 - RNA, 22 nt, Human
acugucuuccaggucuggaggu

SEQ ID NO: 540607 - RNA, 22 nt, Human
aggggccuggacauggacgcgc

SEQ ID NO: 540608 - RNA, 22 nt, Human
acagagucaugguagucaaagg

SEQ ID NO: 540609 - RNA, 22 nt, Human
uugguucagaugggaucugcga

SEQ ID NO: 540610 - RNA, 22 nt, Human
gagcugcacgcagcauccaaga

SEQ ID NO: 540611 - RNA, 22 nt, Human
ugcauuaugcuacccagaagcu

SEQ ID NO: 540612 - RNA, 22 nt, Human
gugccagggaguggaggagcuu

SEQ ID NO: 540613 - RNA, 22 nt, Human
uuucauucauguguuaaaggug

SEQ ID NO: 540614 - RNA, 22 nt, Human
gacagggcgagacucagucuca

SEQ ID NO: 540615 - RNA, 22 nt, Human
gccuccuggccuuugcuccuca

SEQ ID NO: 540616 - RNA, 22 nt, Human
uaccuguggcuuguuggaugga

SEQ ID NO: 540617 - RNA, 20 nt, Human
cuagccuggccuugcucugg

SEQ ID NO: 540618 - RNA, 18 nt, Human
guucaagccaacaucaag

SEQ ID NO: 540619 - RNA, 18 nt, Human
acauuuaggagagucaau

SEQ ID NO: 540620 - RNA, 22 nt, Human
uuuuguuuguguccacugcagu

SEQ ID NO: 540621 - RNA, 20 nt, Human
uucuugagccaaaaggcaua

SEQ ID NO: 540622 - RNA, 22 nt, Human
aacacauaggcagagcaugaca

SEQ ID NO: 540623 - RNA, 22 nt, Human
gacagaguuguugauguaugcu

SEQ ID NO: 540624 - RNA, 22 nt, Human
guugacagcuggugagcugcua

SEQ ID NO: 540625 - RNA, 18 nt, Human
gacaaaugcaauuuaaag

SEQ ID NO: 540626 - RNA, 22 nt, Human
agcuggcuuuugugaagguuuu

SEQ ID NO: 540627 - RNA, 22 nt, Human
ccaggccugauugggaaucuug

SEQ ID NO: 540628 - RNA, 22 nt, Human
ugcagggcaguuuguuucggca

SEQ ID NO: 540629 - RNA, 22 nt, Human
ugggccugaguuugggaacugg

SEQ ID NO: 540630 - RNA, 22 nt, Human
cuucucuucccagggacacagg

SEQ ID NO: 540631 - RNA, 22 nt, Human
cugcagcuuauuugcuguguga

SEQ ID NO: 540632 - RNA, 22 nt, Human
uuguccuuaccucaaucuggaa

SEQ ID NO: 540633 - RNA, 22 nt, Human
ccagccaguccagcauuggugu

SEQ ID NO: 540634 - RNA, 22 nt, Human
uuucugaauaacucuaugauau

SEQ ID NO: 540635 - RNA, 20 nt, Human
cagaggcauuuucagacucu

SEQ ID NO: 540636 - RNA, 22 nt, Human
gcucugagcacugugcggcugg

SEQ ID NO: 540637 - RNA, 22 nt, Human
cccaccccuggacaggugagug

SEQ ID NO: 540638 - RNA, 22 nt, Human
cagcaguguacaaggugucaga

SEQ ID NO: 540639 - RNA, 22 nt, Human
ucuucuuaugugccauuaucuc

SEQ ID NO: 540640 - RNA, 22 nt, Human
uuuucuuccuggauuuuggcau

SEQ ID NO: 540641 - RNA, 20 nt, Human
agaaaaaguguggaaauuuc

SEQ ID NO: 540642 - RNA, 22 nt, Human
uaaaaucaugacagauugacau

SEQ ID NO: 540643 - RNA, 22 nt, Human
gaaugaguagaguauaaacaaa

SEQ ID NO: 540644 - RNA, 19 nt, Human
ugcuaaguccuuuagaggc

SEQ ID NO: 540645 - RNA, 22 nt, Human
uccuuucaccaaaaaguguugu

SEQ ID NO: 540646 - RNA, 22 nt, Human
uugaagcagcucaggaggcuua

SEQ ID NO: 540647 - RNA, 22 nt, Human
cagagcagagugauuguucugg

SEQ ID NO: 540648 - RNA, 22 nt, Human
aguguuguaauaaauaucaucu

SEQ ID NO: 540649 - RNA, 22 nt, Human
augggcaguaacaguggcaguc

SEQ ID NO: 540650 - RNA, 22 nt, Human
aauaacaggguugauuugcaau

SEQ ID NO: 540651 - RNA, 22 nt, Human
ccugucugaggaggugcucuuu

SEQ ID NO: 540652 - RNA, 22 nt, Human
aaguguuuagguuugcagucga

SEQ ID NO: 540653 - RNA, 22 nt, Human
agaccaaagaaaacacaucugg

SEQ ID NO: 540654 - RNA, 22 nt, Human
guccucugcccaggucaagguu

SEQ ID NO: 540655 - RNA, 22 nt, Human
aagcaguaugguauuuaaguca

SEQ ID NO: 540656 - RNA, 22 nt, Human
uuucuuuuacaguguggcuauu

SEQ ID NO: 540657 - RNA, 22 nt, Human
agcugggcagacugcagugguu

SEQ ID NO: 540658 - RNA, 17 nt, Human
uguagcuucuccuucuc

SEQ ID NO: 540659 - RNA, 22 nt, Human
cuggggugagcagaaacagggg

SEQ ID NO: 540660 - RNA, 22 nt, Human
gaggcugcggggaggagccugc

SEQ ID NO: 540661 - RNA, 22 nt, Human
uuuaucuuuggaucuucagaaa

SEQ ID NO: 540662 - RNA, 22 nt, Human
cucaaguaauuagcaacaaaua

SEQ ID NO: 540663 - RNA, 22 nt, Human
gaggaaaauaacaacuaagggc

SEQ ID NO: 540664 - RNA, 22 nt, Human
cugcaggguuuuaacaauggac

SEQ ID NO: 540665 - RNA, 22 nt, Human
cuggaggcugaguugggucucc

SEQ ID NO: 540666 - RNA, 22 nt, Human
uguacaaugccgagacuaacuc

SEQ ID NO: 540667 - RNA, 18 nt, Human
cccagugcucacugccuc

SEQ ID NO: 540668 - RNA, 22 nt, Human
uuccaaagucauguugcugaua

SEQ ID NO: 540669 - RNA, 22 nt, Human
uuagaaaucaccucugaagauc

SEQ ID NO: 540670 - RNA, 22 nt, Human
cuggagugaggucugggagccu

SEQ ID NO: 540671 - RNA, 16 nt, Human
uaacauuuuuaaaagg

SEQ ID NO: 540672 - RNA, 22 nt, Human
accagccugucugagucguggg

SEQ ID NO: 540673 - RNA, 22 nt, Human
ugucccucauugacgcugugcc

SEQ ID NO: 540674 - RNA, 22 nt, Human
ccugccuguacuagagacccag

SEQ ID NO: 540675 - RNA, 22 nt, Human
ccuuuccuuuuuagugugggag

SEQ ID NO: 540676 - RNA, 22 nt, Human
aauguuuaauguuagugguaau

SEQ ID NO: 540677 - RNA, 22 nt, Human
cuugaaagcacuuaguaaauua

SEQ ID NO: 540678 - RNA, 22 nt, Human
agaucugaguggcugcauguaa

SEQ ID NO: 540679 - RNA, 18 nt, Human
aggcuucuuggcucaguc

SEQ ID NO: 540680 - RNA, 20 nt, Human
uucauucauuccacaacuuc

SEQ ID NO: 540681 - RNA, 22 nt, Human
gcuuuuuugcuauugaaguggu

SEQ ID NO: 540682 - RNA, 22 nt, Human
uggaaagaaaguaaaggcguau

SEQ ID NO: 540683 - RNA, 22 nt, Human
ugcuggcuuuuugugucaaaga

SEQ ID NO: 540684 - RNA, 22 nt, Human
uggcugagagcaauugacucug

SEQ ID NO: 540685 - RNA, 22 nt, Human
ccugggugacccgugagcgucc

SEQ ID NO: 540686 - RNA, 22 nt, Human
acagggcaugugcaagagacau

SEQ ID NO: 540687 - RNA, 22 nt, Human
uacuuuuuagcacagugugugc

SEQ ID NO: 540688 - RNA, 22 nt, Human
aggguagggcccggagacagac

SEQ ID NO: 540689 - RNA, 22 nt, Human
ucaacaguucuguccaauuaau

SEQ ID NO: 540690 - RNA, 22 nt, Human
cagagcaugaauaaaaguuaca

SEQ ID NO: 540691 - RNA, 22 nt, Human
aggcacugugcagucccaagca

SEQ ID NO: 540692 - RNA, 22 nt, Human
ucuugauuugaauugcaguugu

SEQ ID NO: 540693 - RNA, 22 nt, Human
gcuggcagugugaaugacaagc

SEQ ID NO: 540694 - RNA, 22 nt, Human
auaguuugaaggcuguucuacu

SEQ ID NO: 540695 - RNA, 22 nt, Human
ggggcugagucagugggaagag

SEQ ID NO: 540696 - RNA, 22 nt, Human
ggcagucagugugguucauaaa

SEQ ID NO: 540697 - RNA, 22 nt, Human
cauaugaaauaugaguugaaca

SEQ ID NO: 540698 - RNA, 22 nt, Human
aagaauguuaguuucugauaca

SEQ ID NO: 540699 - RNA, 22 nt, Human
acauguauugacauuauauucu

SEQ ID NO: 540700 - RNA, 22 nt, Human
aagaaugucguugguauuuuaa

SEQ ID NO: 540701 - RNA, 22 nt, Human
aaacugauaaaauaaguacauu

SEQ ID NO: 540702 - RNA, 22 nt, Human
aagcauuuuaguaaugaacuug

SEQ ID NO: 540703 - RNA, 22 nt, Human
gcugucuggguugagggcccug

SEQ ID NO: 540704 - RNA, 22 nt, Human
ugccaggcuaaguggaggacuu

SEQ ID NO: 540705 - RNA, 22 nt, Human
gagaugaauguaaacaaaggca

SEQ ID NO: 540706 - RNA, 22 nt, Human
cagagccccccuucugaucaca

SEQ ID NO: 540707 - RNA, 22 nt, Human
caaagugcugagauuacaggua

SEQ ID NO: 540708 - RNA, 22 nt, Human
aggagucacucagggcuucauc

SEQ ID NO: 540709 - RNA, 22 nt, Human
gaacccaggcuuuugaggcugu

SEQ ID NO: 540710 - RNA, 22 nt, Human
ggaggugguggcagugacaauu

SEQ ID NO: 540711 - RNA, 22 nt, Human
ugggcagagucauacaggagac

SEQ ID NO: 540712 - RNA, 22 nt, Human
auaacaugaccugugcuucaca

SEQ ID NO: 540713 - RNA, 22 nt, Human
gaucuuuaaggcuuacccugga

SEQ ID NO: 540714 - RNA, 23 nt, Human
ugcuggguaucagaaucacugag

SEQ ID NO: 540715 - RNA, 22 nt, Human
caguauucaucuaaggagcuug

SEQ ID NO: 540716 - RNA, 23 nt, Human
uggacccugcacaccagcucuac

SEQ ID NO: 540717 - RNA, 22 nt, Human
gaagagcuauguccagggagca

SEQ ID NO: 540718 - RNA, 22 nt, Human
cugcccuggcagccuaccaugg

SEQ ID NO: 540719 - RNA, 22 nt, Human
cuggagcucuguguguuccuga

SEQ ID NO: 540720 - RNA, 22 nt, Human
ucuccugcuucaacugauggac

SEQ ID NO: 540721 - RNA, 22 nt, Human
guggcauuaggccaggugcaua

SEQ ID NO: 540722 - RNA, 22 nt, Human
gauuucaaaaguagauccauca

SEQ ID NO: 540723 - RNA, 22 nt, Human
cacagacuugagaagcaccuua

SEQ ID NO: 540724 - RNA, 22 nt, Human
gacaaagcagacaagauaauuc

SEQ ID NO: 540725 - RNA, 22 nt, Human
uucuaagaaauggaaaacgauu

SEQ ID NO: 540726 - RNA, 22 nt, Human
ucucaguggcuuccucacuuuu

SEQ ID NO: 540727 - RNA, 22 nt, Human
uguucaaaugaucuucuuaaau

SEQ ID NO: 540728 - RNA, 18 nt, Human
ugaggcagucagugaugg

SEQ ID NO: 540729 - RNA, 22 nt, Human
aagugguaggaagagagcacug

SEQ ID NO: 540730 - RNA, 22 nt, Human
acuccagggcugaacgaggccc

SEQ ID NO: 540731 - RNA, 22 nt, Human
ugguagggacacuaugcagaaa

SEQ ID NO: 540732 - RNA, 22 nt, Human
aagcagagcaagcguauuuauu

SEQ ID NO: 540733 - RNA, 22 nt, Human
ucaguaaaugagcaaaaauuuc

SEQ ID NO: 540734 - RNA, 22 nt, Human
agggucagguuaagggagucau

SEQ ID NO: 540735 - RNA, 22 nt, Human
acaaaugugauuguuucugaaa

SEQ ID NO: 540736 - RNA, 22 nt, Human
acaaggcuaugaaguauuaguu

SEQ ID NO: 540737 - RNA, 22 nt, Human
ugccaggccacguagcuucaag

SEQ ID NO: 540738 - RNA, 22 nt, Human
auuuacagugugccuacuauau

SEQ ID NO: 540739 - RNA, 22 nt, Human
gccugcagccucaagggcugag

SEQ ID NO: 540740 - RNA, 22 nt, Human
aauaugcauguauacaugugua

SEQ ID NO: 540741 - RNA, 20 nt, Human
caaugcacacagcugcuucu

SEQ ID NO: 540742 - RNA, 22 nt, Human
cccuuccucccaggcuucugug

SEQ ID NO: 540743 - RNA, 22 nt, Human
gggacuguaaauucauauggcc

SEQ ID NO: 540744 - RNA, 22 nt, Human
gagccuggauugucaccgacuu

SEQ ID NO: 540745 - RNA, 22 nt, Human
aaacacaagaggcaggguacag

SEQ ID NO: 540746 - RNA, 19 nt, Human
aggacccuuauccuggcuu

SEQ ID NO: 540747 - RNA, 22 nt, Human
ggucagcagugcagggcagagc

SEQ ID NO: 540748 - RNA, 22 nt, Human
uucccacagagauuacauugaa

SEQ ID NO: 540749 - RNA, 22 nt, Human
ugaguguauaucaggagagagc

SEQ ID NO: 540750 - RNA, 22 nt, Human
ugaagcagagaauuugacaguc

SEQ ID NO: 540751 - RNA, 22 nt, Human
auuacagauagacuuugaagcu

SEQ ID NO: 540752 - RNA, 22 nt, Human
aacauuucagcaaauaagaaca

SEQ ID NO: 540753 - RNA, 22 nt, Human
uggagcugacucacaccagcua

SEQ ID NO: 540754 - RNA, 22 nt, Human
cugaccuguaacuguaagagac

SEQ ID NO: 540755 - RNA, 22 nt, Human
aaaagagaauccuguacagaga

SEQ ID NO: 540756 - RNA, 22 nt, Human
aucuggcucucucauuuacaaa

SEQ ID NO: 540757 - RNA, 23 nt, Human
gcagauggccccagagugcugcc

SEQ ID NO: 540758 - RNA, 22 nt, Human
ucuuuauuuaagucuguuguaa

SEQ ID NO: 540759 - RNA, 22 nt, Human
gugccaggugcuaagcugugcu

SEQ ID NO: 540760 - RNA, 22 nt, Human
gcccaggccggagagcagugcu

SEQ ID NO: 540761 - RNA, 22 nt, Human
agcacagaaaguauugacugaa

SEQ ID NO: 540762 - RNA, 22 nt, Human
ugcccagguuugagugcccaag

SEQ ID NO: 540763 - RNA, 22 nt, Human
uaaggccaccguuauagaacca

SEQ ID NO: 540764 - RNA, 22 nt, Human
acaugcauucucuaaaagcaaa

SEQ ID NO: 540765 - RNA, 18 nt, Human
gagcagaggaggguuuuu

SEQ ID NO: 540766 - RNA, 22 nt, Human
uugucuuaaauggauggacaau

SEQ ID NO: 540767 - RNA, 22 nt, Human
agaaaugacaagacugaucagg

SEQ ID NO: 540768 - RNA, 22 nt, Human
uuugucaaucccuugaaaaccu

SEQ ID NO: 540769 - RNA, 22 nt, Human
cccaggaaagagacugcugggu

SEQ ID NO: 540770 - RNA, 22 nt, Human
cuacauuuuucaccgagccucu

SEQ ID NO: 540771 - RNA, 22 nt, Human
ucagcuuuccuugcuuuagauu

SEQ ID NO: 540772 - RNA, 22 nt, Human
cugcacuguguaacagauaacu

SEQ ID NO: 540773 - RNA, 17 nt, Human
uuuucucucuuggauuc

SEQ ID NO: 540774 - RNA, 19 nt, Human
gcucugagaggggcauggg

SEQ ID NO: 540775 - RNA, 19 nt, Human
uugaaagauuagcuuucua

SEQ ID NO: 540776 - RNA, 22 nt, Human
gaaaggucuuccggucuuccag

SEQ ID NO: 540777 - RNA, 22 nt, Human
uuaaauuauuucuagugaggug

SEQ ID NO: 540778 - RNA, 22 nt, Human
gucagagcccccagcggcgcgg

SEQ ID NO: 540779 - RNA, 22 nt, Human
agcagagguuuguuggaaaccu

SEQ ID NO: 540780 - RNA, 22 nt, Human
aagaugguguggucaaggacca

SEQ ID NO: 540781 - RNA, 22 nt, Human
cugggcacauuuugacuagugu

SEQ ID NO: 540782 - RNA, 22 nt, Human
gagauggggucagcugggacau

SEQ ID NO: 540783 - RNA, 22 nt, Human
ccaggugugauuuggcaguguc

SEQ ID NO: 540784 - RNA, 22 nt, Human
aacaguuugccugaaauguauu

SEQ ID NO: 540785 - RNA, 22 nt, Human
uagaaacaugagagaaacucuu

SEQ ID NO: 540786 - RNA, 22 nt, Human
uuuaaaaguuaucaucugucca

SEQ ID NO: 540787 - RNA, 22 nt, Human
cuguuuuaucucaagaguucaa

SEQ ID NO: 540788 - RNA, 22 nt, Human
acuaaagaagccaaaguuuucu

SEQ ID NO: 540789 - RNA, 22 nt, Human
ugcagcagucagucaggccugg

SEQ ID NO: 540790 - RNA, 22 nt, Human
gcagaggagcaaguugcuacag

SEQ ID NO: 540791 - RNA, 22 nt, Human
cacucugcagcugaagggcugg

SEQ ID NO: 540792 - RNA, 22 nt, Human
augcccaaugucacaauuuuug

SEQ ID NO: 540793 - RNA, 22 nt, Human
aaaauagauaaugccaggguca

SEQ ID NO: 540794 - RNA, 22 nt, Human
acagagcauuugggacagagag

SEQ ID NO: 540795 - RNA, 22 nt, Human
acugaaauauuuagaagugaag

SEQ ID NO: 540796 - RNA, 22 nt, Human
cuuagggaaucuuagagcugga

SEQ ID NO: 540797 - RNA, 22 nt, Human
agcucccugagaugccacagca

SEQ ID NO: 540798 - RNA, 22 nt, Human
cauuucaccuuagagaauuauu

SEQ ID NO: 540799 - RNA, 22 nt, Human
gauauuuucgcagggagaauuc

SEQ ID NO: 540800 - RNA, 22 nt, Human
ccugucugcagauaucucaggu

SEQ ID NO: 540801 - RNA, 19 nt, Human
gucuuacaggcaacaugag

SEQ ID NO: 540802 - RNA, 22 nt, Human
cauaacuagagugaaauguuga

SEQ ID NO: 540803 - RNA, 21 nt, Human
gaaaagcaagggaguagaaca

SEQ ID NO: 540804 - RNA, 22 nt, Human
aacauuuauauggguucaugaa

SEQ ID NO: 540805 - RNA, 22 nt, Human
cacaugcaggagccaauguaca

SEQ ID NO: 540806 - RNA, 22 nt, Human
uauuaauucuugccaauucucc

SEQ ID NO: 540807 - RNA, 22 nt, Human
guaucuuuccacaucuucagua

SEQ ID NO: 540808 - RNA, 22 nt, Human
ccuguucaagguauuaauuauc

SEQ ID NO: 540809 - RNA, 22 nt, Human
ucuuuagcuagaaauacucuaa

SEQ ID NO: 540810 - RNA, 22 nt, Human
ugagguagaagccuggguugag

SEQ ID NO: 540811 - RNA, 22 nt, Human
caggaggcuuugggauccaagu

SEQ ID NO: 540812 - RNA, 22 nt, Human
ccaagcagaaccauucaggcac

SEQ ID NO: 540813 - RNA, 22 nt, Human
accaaaaccugcuacuaaagga

SEQ ID NO: 540814 - RNA, 22 nt, Human
uagugaaauuuaugcacagcua

SEQ ID NO: 540815 - RNA, 20 nt, Human
gcccacucuaauccacuguc

SEQ ID NO: 540816 - RNA, 22 nt, Human
gauuucuguaacacuucagaua

SEQ ID NO: 540817 - RNA, 22 nt, Human
caaagcaccacaaaccagguga

SEQ ID NO: 540818 - RNA, 22 nt, Human
ggcuggagugggcuccagaguu

SEQ ID NO: 540819 - RNA, 22 nt, Human
cagcccuggcuagggcgagggc

SEQ ID NO: 540820 - RNA, 23 nt, Human
ccugucugugcuggguggacaca

SEQ ID NO: 540821 - RNA, 22 nt, Human
guuacucuuccccggggucugg

SEQ ID NO: 540822 - RNA, 15 nt, Human
aggcacugugggacc

SEQ ID NO: 540823 - RNA, 22 nt, Human
cugcagcuccugagcucagaga

SEQ ID NO: 540824 - RNA, 22 nt, Human
uaaagguagugugacauauugu

SEQ ID NO: 540825 - RNA, 22 nt, Human
ugagaaagccuuuagucccagg

SEQ ID NO: 540826 - RNA, 22 nt, Human
acuugguguauuagcucucacu

SEQ ID NO: 540827 - RNA, 22 nt, Human
ugugaagaauuaaugugaauca

SEQ ID NO: 540828 - RNA, 22 nt, Human
ugggccuccugcccuggccuag

SEQ ID NO: 540829 - RNA, 22 nt, Human
cuucagcugacgucaaaacacc

SEQ ID NO: 540830 - RNA, 22 nt, Human
agugccuaaccccuuguaugaa

SEQ ID NO: 540831 - RNA, 22 nt, Human
ugcaggugauucugaugcaguu

SEQ ID NO: 540832 - RNA, 22 nt, Human
ugaaaauucaucucauagcaga

SEQ ID NO: 540833 - RNA, 22 nt, Human
gggucuccauguuaacaucacu

SEQ ID NO: 540834 - RNA, 22 nt, Human
cagcuuuauuaaugauugucuu

SEQ ID NO: 540835 - RNA, 22 nt, Human
agggccagaugaagccacaagc

SEQ ID NO: 540836 - RNA, 16 nt, Human
uacauucugaucacug

SEQ ID NO: 540837 - RNA, 22 nt, Human
auaggcaaauuaauaagucaua

SEQ ID NO: 540838 - RNA, 22 nt, Human
agguccaggauuuguggggucu

SEQ ID NO: 540839 - RNA, 22 nt, Human
uccccauggguggggacacaua

SEQ ID NO: 540840 - RNA, 22 nt, Human
cagcuggaucccugcagaacuu

SEQ ID NO: 540841 - RNA, 22 nt, Human
acucagagcagagcagccugag

SEQ ID NO: 540842 - RNA, 22 nt, Human
caggcacugugcaagggucucg

SEQ ID NO: 540843 - RNA, 22 nt, Human
cuugaaucuggcuuugccacuu

SEQ ID NO: 540844 - RNA, 22 nt, Human
ucaaggaaugacuauaugagga

SEQ ID NO: 540845 - RNA, 17 nt, Human
aggaaacauuuucuuuc

SEQ ID NO: 540846 - RNA, 22 nt, Human
ccugucucccuggcauggcuca

SEQ ID NO: 540847 - RNA, 22 nt, Human
uuucacauucucugguuaucga

SEQ ID NO: 540848 - RNA, 22 nt, Human
guucuggaguggugccaggccu

SEQ ID NO: 540849 - RNA, 22 nt, Human
gcuccugcagagauguuccaug

SEQ ID NO: 540850 - RNA, 22 nt, Human
cucuugcagauaccuugaagga

SEQ ID NO: 540851 - RNA, 22 nt, Human
acuuugugcccaacagaaagaa

SEQ ID NO: 540852 - RNA, 22 nt, Human
uauuucuuuucgugacuuauug

SEQ ID NO: 540853 - RNA, 22 nt, Human
ggcuggcucagggcuugagaga

SEQ ID NO: 540854 - RNA, 22 nt, Human
aguucaggcauaaggcaugaac

SEQ ID NO: 540855 - RNA, 15 nt, Human
uucaggauaugacuc

SEQ ID NO: 540856 - RNA, 22 nt, Human
uauagcaucuaggaugauugca

SEQ ID NO: 540857 - RNA, 23 nt, Human
ugguugcagugccaaguaucacg

SEQ ID NO: 540858 - RNA, 22 nt, Human
ucagauggauuuauacuauuuc

SEQ ID NO: 540859 - RNA, 22 nt, Human
aagaugcaugcugaagcuggcu

SEQ ID NO: 540860 - RNA, 22 nt, Human
caagagcuagaaauugguuaga

SEQ ID NO: 540861 - RNA, 18 nt, Human
ggagccagucugucucug

SEQ ID NO: 540862 - RNA, 22 nt, Human
cauuuagagaagauuacaagga

SEQ ID NO: 540863 - RNA, 21 nt, Human
uccucugcucucauaccacaa

SEQ ID NO: 540864 - RNA, 22 nt, Human
cugagaguauuggcaggcuugg

SEQ ID NO: 540865 - RNA, 23 nt, Human
uccugcugaaagcuccagcuggc

SEQ ID NO: 540866 - RNA, 22 nt, Human
guucauuuaggaaaggaagagu

SEQ ID NO: 540867 - RNA, 22 nt, Human
uuuccaaauaaggucacacuca

SEQ ID NO: 540868 - RNA, 22 nt, Human
cagcagcaacaacggaagccuu

SEQ ID NO: 540869 - RNA, 22 nt, Human
uccucccacauaggacaauggg

SEQ ID NO: 540870 - RNA, 22 nt, Human
uuacuuuguucucaagauaugu

SEQ ID NO: 540871 - RNA, 20 nt, Human
aggaaaaauggaaacuggag

SEQ ID NO: 540872 - RNA, 22 nt, Human
acagggccaggugagaggugcu

SEQ ID NO: 540873 - RNA, 22 nt, Human
agugcaaagggaucagauuggg

SEQ ID NO: 540874 - RNA, 22 nt, Human
uuucagagucuggcugcagccu

SEQ ID NO: 540875 - RNA, 22 nt, Human
agaugguucagaauuauaaaga

SEQ ID NO: 540876 - RNA, 22 nt, Human
ccacccugagccgcaagagcag

SEQ ID NO: 540877 - RNA, 22 nt, Human
agucugcacucagguggagguc

SEQ ID NO: 540878 - RNA, 22 nt, Human
agccacagagcaggagaccuuu

SEQ ID NO: 540879 - RNA, 22 nt, Human
cugggcacagacccccugggcc

SEQ ID NO: 540880 - RNA, 22 nt, Human
aaauuucuaagucaagaagaac

SEQ ID NO: 540881 - RNA, 22 nt, Human
uaggaagaugaguaucaacuug

SEQ ID NO: 540882 - RNA, 22 nt, Human
ugccagcccaccuuggggccuc

SEQ ID NO: 540883 - RNA, 23 nt, Human
guggagccacaucacaggcuccu

SEQ ID NO: 540884 - RNA, 22 nt, Human
ucuggcucagggcucugaggga

SEQ ID NO: 540885 - RNA, 22 nt, Human
ugguucaggcaggguguugcug

SEQ ID NO: 540886 - RNA, 17 nt, Human
uuguuucuucucugugg

SEQ ID NO: 540887 - RNA, 22 nt, Human
ccuggcagcccagagcgccgcu

SEQ ID NO: 540888 - RNA, 22 nt, Human
agggccuggcuucacuuucuca

SEQ ID NO: 540889 - RNA, 22 nt, Human
auaugcacauacauacauaggu

SEQ ID NO: 540890 - RNA, 22 nt, Human
gugcauuugacgaauacucacu

SEQ ID NO: 540891 - RNA, 22 nt, Human
gagcagugguugaacagaggca

SEQ ID NO: 540892 - RNA, 22 nt, Human
ugguuccuucugcauuuucagc

SEQ ID NO: 540893 - RNA, 19 nt, Human
ugucucagugucccuuccu

SEQ ID NO: 540894 - RNA, 21 nt, Human
agcaggugcuguuggaggaaa

SEQ ID NO: 540895 - RNA, 22 nt, Human
uggccugguuguugcugccguu

SEQ ID NO: 540896 - RNA, 22 nt, Human
cggagaggugggggcagcaucu

SEQ ID NO: 540897 - RNA, 22 nt, Human
ggucagggcucuuccaguggcu

SEQ ID NO: 540898 - RNA, 22 nt, Human
cugccucacauuggcuguguga

SEQ ID NO: 540899 - RNA, 22 nt, Human
uugcauugauguuccuucuugc

SEQ ID NO: 540900 - RNA, 22 nt, Human
uuuguacauauauaaaaucugu

SEQ ID NO: 540901 - RNA, 22 nt, Human
ugaaaucugucccacuuuagcu

SEQ ID NO: 540902 - RNA, 22 nt, Human
gcucaguguuucugguagaaaa

SEQ ID NO: 540903 - RNA, 22 nt, Human
ugggcagaggacagggaagauc

SEQ ID NO: 540904 - RNA, 22 nt, Human
uccucagugcuagccaacugcc

SEQ ID NO: 540905 - RNA, 22 nt, Human
gccugcagaggugcugcuagcu

SEQ ID NO: 540906 - RNA, 22 nt, Human
cugggccugguguggcaccugc

SEQ ID NO: 540907 - RNA, 22 nt, Human
cugucaaauucauaacacuuau

SEQ ID NO: 540908 - RNA, 22 nt, Human
aucacauucuuucaaagcaguc

SEQ ID NO: 540909 - RNA, 22 nt, Human
ugcuuuggccacuagaauucag

SEQ ID NO: 540910 - RNA, 22 nt, Human
uaugaacuuuugaugugacaug

SEQ ID NO: 540911 - RNA, 22 nt, Human
gggcugacaaucucuuuacuua

SEQ ID NO: 540912 - RNA, 22 nt, Human
gaagaacaagcagugcuuuccu

SEQ ID NO: 540913 - RNA, 22 nt, Human
cugguucaauggggcugagccc

SEQ ID NO: 540914 - RNA, 22 nt, Human
ggcagacacaaaaacauaaggu

SEQ ID NO: 540915 - RNA, 22 nt, Human
aaugacuuugaaauauuugagu

SEQ ID NO: 540916 - RNA, 22 nt, Human
gcagcuuuuuggaugucaguua

SEQ ID NO: 540917 - RNA, 22 nt, Human
caucugcugacuugacaaguac

SEQ ID NO: 540918 - RNA, 22 nt, Human
uggccugggccggcagauauac

SEQ ID NO: 540919 - RNA, 23 nt, Human
ugguggggucuuggagacagcac

SEQ ID NO: 540920 - RNA, 22 nt, Human
cugcaggcugagcgccugccgg

SEQ ID NO: 540921 - RNA, 22 nt, Human
cacugcuuuaaggcugaguaac

SEQ ID NO: 540922 - RNA, 21 nt, Human
guacacacagguggaugggcu

SEQ ID NO: 540923 - RNA, 22 nt, Human
aagccaggggcugcuuaggaga

SEQ ID NO: 540924 - RNA, 22 nt, Human
uuuagggaagaagcccauggcc

SEQ ID NO: 540925 - RNA, 22 nt, Human
ugagaaaauccagaggcuaguu

SEQ ID NO: 540926 - RNA, 22 nt, Human
aacuuucuccagugccaacuau

SEQ ID NO: 540927 - RNA, 22 nt, Human
aguggcagacacaaugugggca

SEQ ID NO: 540928 - RNA, 22 nt, Human
gugcuuucugcaugguuccuac

SEQ ID NO: 540929 - RNA, 22 nt, Human
ucuggggauaagacccagguau

SEQ ID NO: 540930 - RNA, 22 nt, Human
cuaacuuuagcuuagauuauca

SEQ ID NO: 540931 - RNA, 22 nt, Human
aaagguaguacuucuagaaggg

SEQ ID NO: 540932 - RNA, 22 nt, Human
cugggagcaccauacuuguuuc

SEQ ID NO: 540933 - RNA, 22 nt, Human
ucaaacauguuagcagucugug

SEQ ID NO: 540934 - RNA, 22 nt, Human
ucaggccuuugaacuuggagug

SEQ ID NO: 540935 - RNA, 22 nt, Human
aaucuucacagaaaaaugucug

SEQ ID NO: 540936 - RNA, 22 nt, Human
acuaaagaugucuaaauauauu

SEQ ID NO: 540937 - RNA, 22 nt, Human
gcugcuggagagcgagacuguu

SEQ ID NO: 540938 - RNA, 22 nt, Human
cgcaggcuccggggugcccugg

SEQ ID NO: 540939 - RNA, 17 nt, Human
ugguucuuuucauuccc

SEQ ID NO: 540940 - RNA, 22 nt, Human
gaaaggucaguuccacuuccau

SEQ ID NO: 540941 - RNA, 17 nt, Human
gcaguuaaauuaagaug

SEQ ID NO: 540942 - RNA, 22 nt, Human
gaggugugguccucagccccca

SEQ ID NO: 540943 - RNA, 22 nt, Human
uggcagagagacucuccuugau

SEQ ID NO: 540944 - RNA, 22 nt, Human
uggcccugccgcacuauccuca

SEQ ID NO: 540945 - RNA, 22 nt, Human
cauaaguuggguaauauaauga

SEQ ID NO: 540946 - RNA, 22 nt, Human
cucuuaaagcuuccaguuucaa

SEQ ID NO: 540947 - RNA, 22 nt, Human
gaaauauucuugucuuguuuuc

SEQ ID NO: 540948 - RNA, 22 nt, Human
ugaaacauuaggaaaucauuau

SEQ ID NO: 540949 - RNA, 22 nt, Human
acauccagaucucagcauggcu

SEQ ID NO: 540950 - RNA, 22 nt, Human
aagaacauuuaugauggcauuu

SEQ ID NO: 540951 - RNA, 22 nt, Human
gggcugaggaacauauuuuguu

SEQ ID NO: 540952 - RNA, 22 nt, Human
auuugucaaaacacagagaaca

SEQ ID NO: 540953 - RNA, 22 nt, Human
uugagggucuggaucugcugcu

SEQ ID NO: 540954 - RNA, 22 nt, Human
cucacaggagaaagucaugguc

SEQ ID NO: 540955 - RNA, 22 nt, Human
caauuucucgaacucuaaucca

SEQ ID NO: 540956 - RNA, 22 nt, Human
agggccaccucucuggguuccc

SEQ ID NO: 540957 - RNA, 22 nt, Human
aguggcugauguaggcaguggg

SEQ ID NO: 540958 - RNA, 19 nt, Human
augagcaauaguuuuaauc

SEQ ID NO: 540959 - RNA, 22 nt, Human
ugaaacaaaccaguaauuuugu

SEQ ID NO: 540960 - RNA, 22 nt, Human
cagggccaaguuggugccuuuu

SEQ ID NO: 540961 - RNA, 22 nt, Human
auggccaggcaccucuggcuga

SEQ ID NO: 540962 - RNA, 22 nt, Human
gaggagcaugggaaggcucugg

SEQ ID NO: 540963 - RNA, 18 nt, Human
uuugcaaaggaaguaugg

SEQ ID NO: 540964 - RNA, 22 nt, Human
acaacaaagacacuugaaauga

SEQ ID NO: 540965 - RNA, 22 nt, Human
ucacagugaugacgugggagca

SEQ ID NO: 540966 - RNA, 22 nt, Human
uuaugcaaaggggccucuuccu

SEQ ID NO: 540967 - RNA, 22 nt, Human
aagaacauguuaaaagauucac

SEQ ID NO: 540968 - RNA, 22 nt, Human
cuuaacauccugcauuuuucuu

SEQ ID NO: 540969 - RNA, 22 nt, Human
guguaucaaagcacagacuuca

SEQ ID NO: 540970 - RNA, 22 nt, Human
guuauuauuucucuccuugcua

SEQ ID NO: 540971 - RNA, 22 nt, Human
ugggaggaaugucacugagcca

SEQ ID NO: 540972 - RNA, 22 nt, Human
cagaggcuguguaggcagacug

SEQ ID NO: 540973 - RNA, 22 nt, Human
agcuuugggcagaagaggauuc

SEQ ID NO: 540974 - RNA, 22 nt, Human
aaucagcagaagagaggucuua

SEQ ID NO: 540975 - RNA, 23 nt, Human
uggggagaguuacccuggaagcg

SEQ ID NO: 540976 - RNA, 22 nt, Human
uucuggagggcaugcugcugcc

SEQ ID NO: 540977 - RNA, 20 nt, Human
gagauggacagaugaagggg

SEQ ID NO: 540978 - RNA, 22 nt, Human
cauguuuuguguacagaauauu

SEQ ID NO: 540979 - RNA, 22 nt, Human
uugaaacuuagaaauugagcug

SEQ ID NO: 540980 - RNA, 22 nt, Human
aguauacuccccauccuagaaa

SEQ ID NO: 540981 - RNA, 22 nt, Human
agaaugcauuuuguguagcuau

SEQ ID NO: 540982 - RNA, 22 nt, Human
agcuggcuucacaggcagugug

SEQ ID NO: 540983 - RNA, 22 nt, Human
ugcagcuucuuguccugugauu

SEQ ID NO: 540984 - RNA, 22 nt, Human
guuuauuauacaacaaaagcua

SEQ ID NO: 540985 - RNA, 22 nt, Human
auuaagggccaauccuccagcc

SEQ ID NO: 540986 - RNA, 22 nt, Human
aucacagagauugcuuuuaaaa

SEQ ID NO: 540987 - RNA, 22 nt, Human
cugcugaucgaaucagucaccc

SEQ ID NO: 540988 - RNA, 22 nt, Human
ucaccacugaacagaccuuugg

SEQ ID NO: 540989 - RNA, 22 nt, Human
agggcugccccaguccagccgg

SEQ ID NO: 540990 - RNA, 22 nt, Human
ggugggauggaggaucuuagac

SEQ ID NO: 540991 - RNA, 22 nt, Human
cagaaacuguuuguuaauauuu

SEQ ID NO: 540992 - RNA, 22 nt, Human
uguggccugggagcugaggucu

SEQ ID NO: 540993 - RNA, 22 nt, Human
aaauaagaaauucuucuuugca

SEQ ID NO: 540994 - RNA, 22 nt, Human
aaaagcaaguugccuagguuga

SEQ ID NO: 540995 - RNA, 22 nt, Human
augcugugauuguagaaauauu

SEQ ID NO: 540996 - RNA, 22 nt, Human
aauaauuagugggacagagaac

SEQ ID NO: 540997 - RNA, 18 nt, Human
gccugcaggcacgggggu

SEQ ID NO: 540998 - RNA, 22 nt, Human
guaacaaaggauaacuugguuu

SEQ ID NO: 540999 - RNA, 22 nt, Human
augcugcacaagccacauguag

SEQ ID NO: 541000 - RNA, 21 nt, Human
acuggcugguggcuaagaauc

SEQ ID NO: 541001 - RNA, 22 nt, Human
aagcugcagaugugccugugga

SEQ ID NO: 541002 - RNA, 22 nt, Human
ccuuuucuugccacugacucgg

SEQ ID NO: 541003 - RNA, 22 nt, Human
aggggcuccucucugagaguag

SEQ ID NO: 541004 - RNA, 22 nt, Human
gagcaggcuugcagagaagggg

SEQ ID NO: 541005 - RNA, 22 nt, Human
aucaggauccaccuugagccug

SEQ ID NO: 541006 - RNA, 22 nt, Human
caaagcaggaagaauauugaaa

SEQ ID NO: 541007 - RNA, 22 nt, Human
caguggaauauauaggggauuu

SEQ ID NO: 541008 - RNA, 22 nt, Human
ugucuucuguauucaagucuau

SEQ ID NO: 541009 - RNA, 22 nt, Human
ggcagguguuuuuauauuaaag

SEQ ID NO: 541010 - RNA, 22 nt, Human
gcucugucauuuugcagacacu

SEQ ID NO: 541011 - RNA, 20 nt, Human
cugcuguguuauuguagaac

SEQ ID NO: 541012 - RNA, 22 nt, Human
aucuggcucuuccuggaguucc

SEQ ID NO: 541013 - RNA, 20 nt, Human
uccagcugggaacagcugau

SEQ ID NO: 541014 - RNA, 23 nt, Human
uccucccugacuucuacagcaca

SEQ ID NO: 541015 - RNA, 23 nt, Human
aggcccaacucugugagggcugc

SEQ ID NO: 541016 - RNA, 19 nt, Human
acauauguggauauacaug

SEQ ID NO: 541017 - RNA, 22 nt, Human
ugguggacaccgcagccaugaa

SEQ ID NO: 541018 - RNA, 20 nt, Human
cagccuccacucacucagcu

SEQ ID NO: 541019 - RNA, 22 nt, Human
gugcagggcuggcaccggaggc

SEQ ID NO: 541020 - RNA, 22 nt, Human
uuuuacaagcugagucguuaaa

SEQ ID NO: 541021 - RNA, 22 nt, Human
agucugucuaauauuauucagg

SEQ ID NO: 541022 - RNA, 22 nt, Human
cuuaaaagagaugacggcaggg

SEQ ID NO: 541023 - RNA, 22 nt, Human
uccucuucugcccaucagaggc

SEQ ID NO: 541024 - RNA, 22 nt, Human
gaugcaggugugccacagagcu

SEQ ID NO: 541025 - RNA, 19 nt, Human
ccagucccauacaggagau

SEQ ID NO: 541026 - RNA, 22 nt, Human
uuccaacuuuaaaauucauucu

SEQ ID NO: 541027 - RNA, 22 nt, Human
ggaggaagugcaguucuacuac

SEQ ID NO: 541028 - RNA, 22 nt, Human
aaaugucaggugguggauggcu

SEQ ID NO: 541029 - RNA, 22 nt, Human
caggcucagccacaggggaagg

SEQ ID NO: 541030 - RNA, 22 nt, Human
ugccaggcuccggaacgacagu

SEQ ID NO: 541031 - RNA, 22 nt, Human
augccuuuuuaucauggaugau

SEQ ID NO: 541032 - RNA, 22 nt, Human
aggcccaguuauccuacuuguu

SEQ ID NO: 541033 - RNA, 22 nt, Human
ucugucuccucugaggugccag

SEQ ID NO: 541034 - RNA, 22 nt, Human
aaacugucauuggaugcauuug

SEQ ID NO: 541035 - RNA, 23 nt, Human
agcagggccagaauacuugcugu

SEQ ID NO: 541036 - RNA, 22 nt, Human
gcagaagcugggagaagggauu

SEQ ID NO: 541037 - RNA, 20 nt, Human
gcuuccuucccagcccccac

SEQ ID NO: 541038 - RNA, 22 nt, Human
acagaggccccgugggagagcc

SEQ ID NO: 541039 - RNA, 22 nt, Human
agaaucugaaggcaccucuggu

SEQ ID NO: 541040 - RNA, 22 nt, Human
gaggcugcccaacuggagugga

SEQ ID NO: 541041 - RNA, 22 nt, Human
ugcucucucaggccuggcccac

SEQ ID NO: 541042 - RNA, 22 nt, Human
gauucuuacuucuaagcaagcu

SEQ ID NO: 541043 - RNA, 17 nt, Human
agcugagcuggccaggg

SEQ ID NO: 541044 - RNA, 22 nt, Human
cuggagccccaggcugugcaga

SEQ ID NO: 541045 - RNA, 22 nt, Human
ugggccuguuucccuucagggc

SEQ ID NO: 541046 - RNA, 22 nt, Human
ucagccuggugauuccucuguc

SEQ ID NO: 541047 - RNA, 19 nt, Human
gguaaaagugagcuucagg

SEQ ID NO: 541048 - RNA, 22 nt, Human
uguuccuaaauaugaauggaga

SEQ ID NO: 541049 - RNA, 22 nt, Human
ucuuggagaauggcagagaagc

SEQ ID NO: 541050 - RNA, 22 nt, Human
uaggcuggaacuuaggcagagg

SEQ ID NO: 541051 - RNA, 20 nt, Human
uccuggccuucucgggcagu

SEQ ID NO: 541052 - RNA, 22 nt, Human
uuuuucagccaugaauuacacu

SEQ ID NO: 541053 - RNA, 22 nt, Human
acagagucgccuuguagcuggc

SEQ ID NO: 541054 - RNA, 22 nt, Human
gagcacaggcuuugguggacac

SEQ ID NO: 541055 - RNA, 22 nt, Human
aaguaccuagaaauauuuuuga

SEQ ID NO: 541056 - RNA, 22 nt, Human
uucagcuagcaucucacuuggu

SEQ ID NO: 541057 - RNA, 22 nt, Human
ugcagggauuagaggccgggga

SEQ ID NO: 541058 - RNA, 19 nt, Human
acuuucuccaggaccuguu

SEQ ID NO: 541059 - RNA, 22 nt, Human
agggccugggucuguacuccuc

SEQ ID NO: 541060 - RNA, 22 nt, Human
gcccuggugugcccagcauggg

SEQ ID NO: 541061 - RNA, 22 nt, Human
aacuggaauagcacaggaaaag

SEQ ID NO: 541062 - RNA, 22 nt, Human
cucucaggcuugggucguggca

SEQ ID NO: 541063 - RNA, 22 nt, Human
cacagguguaugaauaugucca

SEQ ID NO: 541064 - RNA, 19 nt, Human
gaauuauuuuuaugggaug

SEQ ID NO: 541065 - RNA, 22 nt, Human
ucagucauuguccuuaaaacac

SEQ ID NO: 541066 - RNA, 22 nt, Human
ccuggcagguuacaaccaguua

SEQ ID NO: 541067 - RNA, 22 nt, Human
gcagagugguuucagaguugag

SEQ ID NO: 541068 - RNA, 22 nt, Human
ccugucuggccuuccacggggg

SEQ ID NO: 541069 - RNA, 22 nt, Human
ugcugcaguguuugcugaaguu

SEQ ID NO: 541070 - RNA, 22 nt, Human
gcugcagcuguaggacacaauu

SEQ ID NO: 541071 - RNA, 22 nt, Human
aggaaaggauuggcuucucugu

SEQ ID NO: 541072 - RNA, 22 nt, Human
agcccucauggaacagcuccua

SEQ ID NO: 541073 - RNA, 22 nt, Human
cccuuuaaguccuggaacaaag

SEQ ID NO: 541074 - RNA, 22 nt, Human
gccaccagguuagauccagccu

SEQ ID NO: 541075 - RNA, 22 nt, Human
aauuucacuguggagcacauuu

SEQ ID NO: 541076 - RNA, 22 nt, Human
ugaggcaguauuuuagugacuu

SEQ ID NO: 541077 - RNA, 22 nt, Human
aaacuacacuuugggaccagca

SEQ ID NO: 541078 - RNA, 22 nt, Human
caaggaaaacagaugaucaaca

SEQ ID NO: 541079 - RNA, 22 nt, Human
ugggagcucagaaagggagguc

SEQ ID NO: 541080 - RNA, 22 nt, Human
uauuucuugagacucgucuucc

SEQ ID NO: 541081 - RNA, 22 nt, Human
cagcuugaaauauuaggagaug

SEQ ID NO: 541082 - RNA, 22 nt, Human
ccagagguccugcucacuggug

SEQ ID NO: 541083 - RNA, 22 nt, Human
gggcugugagaguggggcugcu

SEQ ID NO: 541084 - RNA, 22 nt, Human
uaggaaaagucuagauugauga

SEQ ID NO: 541085 - RNA, 22 nt, Human
ugcagcugcuggcccaggugcu

SEQ ID NO: 541086 - RNA, 22 nt, Human
ucagaaaagguagcugugacaa

SEQ ID NO: 541087 - RNA, 22 nt, Human
uaugaagacaaugauagcauga

SEQ ID NO: 541088 - RNA, 22 nt, Human
aagagcuguaugccauaugauu

SEQ ID NO: 541089 - RNA, 22 nt, Human
acccugcccucuccagcucagg

SEQ ID NO: 541090 - RNA, 22 nt, Human
uuuaucugaccucacuucuuaa

SEQ ID NO: 541091 - RNA, 22 nt, Human
cugaggccggagcacugaagag

SEQ ID NO: 541092 - RNA, 22 nt, Human
auucagagcacuggguagaauu

SEQ ID NO: 541093 - RNA, 22 nt, Human
ugaaggccucugguacaugcca

SEQ ID NO: 541094 - RNA, 22 nt, Human
uacaucaagauaaaaacuguca

SEQ ID NO: 541095 - RNA, 22 nt, Human
gcagagaccccgcagugaggcc

SEQ ID NO: 541096 - RNA, 22 nt, Human
uuuaaagaaauuccucaucuuu

SEQ ID NO: 541097 - RNA, 22 nt, Human
aagaauuuaaacuaaccauaug

SEQ ID NO: 541098 - RNA, 22 nt, Human
cacauuuagguuccuauagcca

SEQ ID NO: 541099 - RNA, 22 nt, Human
caggguccggcugccuggcugu

SEQ ID NO: 541100 - RNA, 22 nt, Human
aauguacagcugcugcugaagg

SEQ ID NO: 541101 - RNA, 22 nt, Human
aguuucuaccgguacauucagg

SEQ ID NO: 541102 - RNA, 22 nt, Human
gccugagcuacuagggagucug

SEQ ID NO: 541103 - RNA, 22 nt, Human
ugcaggcuuuagccccauggcu

SEQ ID NO: 541104 - RNA, 22 nt, Human
ggagcugcuuugaucugaagaa

SEQ ID NO: 541105 - RNA, 22 nt, Human
uagcauuuauggucaugugucc

SEQ ID NO: 541106 - RNA, 22 nt, Human
uaguggagguggucugugaacu

SEQ ID NO: 541107 - RNA, 22 nt, Human
aggccugacuugaauuuagggc

SEQ ID NO: 541108 - RNA, 21 nt, Human
ccuccaggagcagagcccuga

SEQ ID NO: 541109 - RNA, 22 nt, Human
uuaaaaucuaaagcaguugucu

SEQ ID NO: 541110 - RNA, 22 nt, Human
ucccagaaucuuuggaagagca

SEQ ID NO: 541111 - RNA, 22 nt, Human
cuucaaagggucacuauuuauc

SEQ ID NO: 541112 - RNA, 22 nt, Human
agcagcuuaucuuggagaggca

SEQ ID NO: 541113 - RNA, 22 nt, Human
ucuggcaggcaaucggcucugg

SEQ ID NO: 541114 - RNA, 22 nt, Human
cuuccaguaguaucauucucau

SEQ ID NO: 541115 - RNA, 22 nt, Human
uccucugcucagcauuccucac

SEQ ID NO: 541116 - RNA, 22 nt, Human
caguagcacucugucagugaag

SEQ ID NO: 541117 - RNA, 22 nt, Human
gcaguguuaggaauaaaaauga

SEQ ID NO: 541118 - RNA, 22 nt, Human
auauucuugugauuauaaagua

SEQ ID NO: 541119 - RNA, 22 nt, Human
uaaagucagggagauugaggcu

SEQ ID NO: 541120 - RNA, 17 nt, Human
aggcagcucagaacauc

SEQ ID NO: 541121 - RNA, 22 nt, Human
cagagcagguaucuuuggugaa

SEQ ID NO: 541122 - RNA, 22 nt, Human
ucucuguaguugggcagcugcu

SEQ ID NO: 541123 - RNA, 22 nt, Human
uggccuguggcuuaaggucugu

SEQ ID NO: 541124 - RNA, 22 nt, Human
uaaaauguagcuucuaggcugg

SEQ ID NO: 541125 - RNA, 22 nt, Human
ggaggccaccugaccugcuguu

SEQ ID NO: 541126 - RNA, 22 nt, Human
cccacccugggcuacacaucca

SEQ ID NO: 541127 - RNA, 22 nt, Human
agcucccaauugacuugaacua

SEQ ID NO: 541128 - RNA, 22 nt, Human
gguggccugcccugaucccugg

SEQ ID NO: 541129 - RNA, 22 nt, Human
aaugagaaccuugaaaggaacu

SEQ ID NO: 541130 - RNA, 22 nt, Human
aagccagccagugccagucuua

SEQ ID NO: 541131 - RNA, 22 nt, Human
uuacaguacagaaaauaacaga

SEQ ID NO: 541132 - RNA, 22 nt, Human
aggccuuccucggagacaggga

SEQ ID NO: 541133 - RNA, 22 nt, Human
uugaaacuaugaagacaaccau

SEQ ID NO: 541134 - RNA, 22 nt, Human
gaggaggaaacccuguuccucu

SEQ ID NO: 541135 - RNA, 22 nt, Human
uccucugcuggaagggcaagag

SEQ ID NO: 541136 - RNA, 15 nt, Human
ugggcagaucacuug

SEQ ID NO: 541137 - RNA, 22 nt, Human
cuagagaggcagauguccugug

SEQ ID NO: 541138 - RNA, 22 nt, Human
uacacaguauaugggaucacag

SEQ ID NO: 541139 - RNA, 22 nt, Human
cacagcuggggaagcugaggcc

SEQ ID NO: 541140 - RNA, 22 nt, Human
cauuaacacuuuggauuuagac

SEQ ID NO: 541141 - RNA, 22 nt, Human
gcugggagaggcagcuuucgga

SEQ ID NO: 541142 - RNA, 22 nt, Human
aauauaugacuccacugcauga

SEQ ID NO: 541143 - RNA, 22 nt, Human
cugagguguugaugaccuaugc

SEQ ID NO: 541144 - RNA, 22 nt, Human
gaggaaggcuaaggggcuuaga

SEQ ID NO: 541145 - RNA, 22 nt, Human
uaaaugugagugaugcggugaa

SEQ ID NO: 541146 - RNA, 22 nt, Human
ucuuuagagcucagaaauacag

SEQ ID NO: 541147 - RNA, 22 nt, Human
acacugaauauacaaugaauau

SEQ ID NO: 541148 - RNA, 20 nt, Human
gcugccagugccugaugcuu

SEQ ID NO: 541149 - RNA, 22 nt, Human
caguugaugggacucauguggg

SEQ ID NO: 541150 - RNA, 22 nt, Human
agggcuccgggccaccggccug

SEQ ID NO: 541151 - RNA, 22 nt, Human
gcagagcccuggggguauggug

SEQ ID NO: 541152 - RNA, 22 nt, Human
ugauuuccaguugcugggugcu

SEQ ID NO: 541153 - RNA, 22 nt, Human
auuugcaauuacucaugucauu

SEQ ID NO: 541154 - RNA, 18 nt, Human
ucugucuguacaaguauc

SEQ ID NO: 541155 - RNA, 18 nt, Human
uagaggggaagaccuuua

SEQ ID NO: 541156 - RNA, 22 nt, Human
cuacauuuguucuauagcuuuu

SEQ ID NO: 541157 - RNA, 22 nt, Human
aaggcacugacugugcagggga

SEQ ID NO: 541158 - RNA, 22 nt, Human
ugggccuggagcccuggagagu

SEQ ID NO: 541159 - RNA, 22 nt, Human
ccugagggaggguauaggcugu

SEQ ID NO: 541160 - RNA, 17 nt, Human
agguggguggaucaccu

SEQ ID NO: 541161 - RNA, 22 nt, Human
aacagcaauagcacuauucauu

SEQ ID NO: 541162 - RNA, 22 nt, Human
uuaauacaacuguugucacugg

SEQ ID NO: 541163 - RNA, 18 nt, Human
ggcagcaagaagggaggg

SEQ ID NO: 541164 - RNA, 22 nt, Human
guucaugcuacccuuuccuaau

SEQ ID NO: 541165 - RNA, 23 nt, Human
ucuggcugcuccuuucaaugcuc

SEQ ID NO: 541166 - RNA, 22 nt, Human
caagcugguaucagcuagagcg

SEQ ID NO: 541167 - RNA, 22 nt, Human
acagcuguauccccagagcuca

SEQ ID NO: 541168 - RNA, 22 nt, Human
agcccugcaggaugagggaggu

SEQ ID NO: 541169 - RNA, 22 nt, Human
aaacagauaaugcuauaaaugg

SEQ ID NO: 541170 - RNA, 22 nt, Human
auuauucaaucauauuaaaagu

SEQ ID NO: 541171 - RNA, 22 nt, Human
caggaaccuacaucuguuuggg

SEQ ID NO: 541172 - RNA, 22 nt, Human
cuggugucugcucccucacagc

SEQ ID NO: 541173 - RNA, 22 nt, Human
ugcuuucaaaggcuuucuagau

SEQ ID NO: 541174 - RNA, 22 nt, Human
aaaaugacauuccagugauauu

SEQ ID NO: 541175 - RNA, 22 nt, Human
agggaauguagcaagaugccaa

SEQ ID NO: 541176 - RNA, 22 nt, Human
cagauggccagaggcagcugca

SEQ ID NO: 541177 - RNA, 22 nt, Human
uuuaugaacuacagauauaacu

SEQ ID NO: 541178 - RNA, 22 nt, Human
uggaacacuuuguugaaaugca

SEQ ID NO: 541179 - RNA, 22 nt, Human
uuuauguaaguggaaugaugcc

SEQ ID NO: 541180 - RNA, 22 nt, Human
ucacagaagaugcuggauguug

SEQ ID NO: 541181 - RNA, 22 nt, Human
acacaucaugccaaguuucacc

SEQ ID NO: 541182 - RNA, 22 nt, Human
augugcaacuucagcagaaagg

SEQ ID NO: 541183 - RNA, 19 nt, Human
uuggaaggagccagagugg

SEQ ID NO: 541184 - RNA, 22 nt, Human
caaaaguucucacccagacaug

SEQ ID NO: 541185 - RNA, 22 nt, Human
aaucuuucccuauuaaaugugg

SEQ ID NO: 541186 - RNA, 22 nt, Human
ugcagaggugugcauucuuaag

SEQ ID NO: 541187 - RNA, 22 nt, Human
ucugggcccuaaaccagcucua

SEQ ID NO: 541188 - RNA, 22 nt, Human
ggcuuucuaugaacucaaaggc

SEQ ID NO: 541189 - RNA, 22 nt, Human
guauuccuaagucaugacaaau

SEQ ID NO: 541190 - RNA, 23 nt, Human
aauuaccaugcaacuugugaaac

SEQ ID NO: 541191 - RNA, 22 nt, Human
agacuucuugagcuggcacuuc

SEQ ID NO: 541192 - RNA, 22 nt, Human
uuguuuaaaagaaaucauagaa

SEQ ID NO: 541193 - RNA, 20 nt, Human
uauaacaguguugggugugu

SEQ ID NO: 541194 - RNA, 22 nt, Human
aggagaguucacacuggucaga

SEQ ID NO: 541195 - RNA, 22 nt, Human
aaggccuggauuuagguuguga

SEQ ID NO: 541196 - RNA, 22 nt, Human
ugggaaggacgugucaguggca

SEQ ID NO: 541197 - RNA, 22 nt, Human
ggagagguuauccguguuaugu

SEQ ID NO: 541198 - RNA, 22 nt, Human
gcagcuggcucagagagguggg

SEQ ID NO: 541199 - RNA, 22 nt, Human
cuguuuauacgacagguggagg

SEQ ID NO: 541200 - RNA, 22 nt, Human
uccucagacuucccuuugugua

SEQ ID NO: 541201 - RNA, 22 nt, Human
acauuucauuugcaguauggau

SEQ ID NO: 541202 - RNA, 19 nt, Human
cucugccucuggcuguggc

SEQ ID NO: 541203 - RNA, 22 nt, Human
gcugaagggagugcugagucug

SEQ ID NO: 541204 - RNA, 22 nt, Human
ccugccuggcuuccagaagaga

SEQ ID NO: 541205 - RNA, 22 nt, Human
agucucagaaaauaugcuuuuu

SEQ ID NO: 541206 - RNA, 22 nt, Human
augcacaugaggcaagcaaaau

SEQ ID NO: 541207 - RNA, 22 nt, Human
gcaauuauaucaccagagaucu

SEQ ID NO: 541208 - RNA, 22 nt, Human
uuuauguaauuucauaggugug

SEQ ID NO: 541209 - RNA, 22 nt, Human
cugugaauuaaguauuguuauc

SEQ ID NO: 541210 - RNA, 22 nt, Human
ugccucugcugcuguggcauca

SEQ ID NO: 541211 - RNA, 22 nt, Human
ucuucauuuuauagcaucugug

SEQ ID NO: 541212 - RNA, 19 nt, Human
cuaaggcaagaaacuggac

SEQ ID NO: 541213 - RNA, 22 nt, Human
ggugaggcccagugaucugugu

SEQ ID NO: 541214 - RNA, 18 nt, Human
gcaggugccacugcuguu

SEQ ID NO: 541215 - RNA, 22 nt, Human
cagaggcagaggucaucucugg

SEQ ID NO: 541216 - RNA, 22 nt, Human
ccuuuauucaauuaguccuaau

SEQ ID NO: 541217 - RNA, 22 nt, Human
aaagaagguagggcuggugacu

SEQ ID NO: 541218 - RNA, 22 nt, Human
aauucauccaugaacaauucca

SEQ ID NO: 541219 - RNA, 22 nt, Human
gagagaagaauguuccgaggcc

SEQ ID NO: 541220 - RNA, 22 nt, Human
uccugcagcauccgucgucugu

SEQ ID NO: 541221 - RNA, 19 nt, Human
ugagaggcuuaaggcagcu

SEQ ID NO: 541222 - RNA, 22 nt, Human
aaugcuuugacuauaucuauaa

SEQ ID NO: 541223 - RNA, 22 nt, Human
gagcuuuagcugagaccugcuu

SEQ ID NO: 541224 - RNA, 22 nt, Human
caggaaggcgcggcugugccug

SEQ ID NO: 541225 - RNA, 18 nt, Human
uuaagagcugaaagggga

SEQ ID NO: 541226 - RNA, 22 nt, Human
ugaggccuggacucugcaugga

SEQ ID NO: 541227 - RNA, 22 nt, Human
agcuggcauucuccuuguuauu

SEQ ID NO: 541228 - RNA, 22 nt, Human
auaucacaaacaagucuguacu

SEQ ID NO: 541229 - RNA, 22 nt, Human
uugcagcuuagugauguuaucu

SEQ ID NO: 541230 - RNA, 21 nt, Human
ugggaccuauuucaacuggau

SEQ ID NO: 541231 - RNA, 22 nt, Human
ccagcugcaggggagcagugga

SEQ ID NO: 541232 - RNA, 22 nt, Human
uccaguggagugugggggugaa

SEQ ID NO: 541233 - RNA, 22 nt, Human
cuccugggaauuuaguugugag

SEQ ID NO: 541234 - RNA, 22 nt, Human
aggcugagcugguagugaguac

SEQ ID NO: 541235 - RNA, 22 nt, Human
accuucaaugaaaauaauaguc

SEQ ID NO: 541236 - RNA, 22 nt, Human
aucagaaaauacccaguguuua

SEQ ID NO: 541237 - RNA, 20 nt, Human
ggccuuggguuucgccuguu

SEQ ID NO: 541238 - RNA, 22 nt, Human
aggagcccugcgggaggcagag

SEQ ID NO: 541239 - RNA, 23 nt, Human
aggagacagggaagugccuggcu

SEQ ID NO: 541240 - RNA, 22 nt, Human
uacaagguuguacuuucucucu

SEQ ID NO: 541241 - RNA, 20 nt, Human
ugggccugagccugugggcu

SEQ ID NO: 541242 - RNA, 22 nt, Human
gcuggaccaggugugcacaggc

SEQ ID NO: 541243 - RNA, 22 nt, Human
agcugggccugagcuggaagcu

SEQ ID NO: 541244 - RNA, 23 nt, Human
uucacagauuaaauauuucuucu

SEQ ID NO: 541245 - RNA, 22 nt, Human
uuguggaaauacagacuccaag

SEQ ID NO: 541246 - RNA, 22 nt, Human
cagagccaggguugcaccccug

SEQ ID NO: 541247 - RNA, 22 nt, Human
uaagacaugguugaucuagugu

SEQ ID NO: 541248 - RNA, 22 nt, Human
aaggcugaguaaaacagagaac

SEQ ID NO: 541249 - RNA, 22 nt, Human
agucugggagaaggugagauua

SEQ ID NO: 541250 - RNA, 19 nt, Human
ggcucucccuugagagagc

SEQ ID NO: 541251 - RNA, 22 nt, Human
acccugggcuuggccugcucag

SEQ ID NO: 541252 - RNA, 22 nt, Human
agcaauauuuaaagguuugcaa

SEQ ID NO: 541253 - RNA, 22 nt, Human
uuagaauuauuguuuccuucua

SEQ ID NO: 541254 - RNA, 22 nt, Human
guagggacuuguuuuacuagua

SEQ ID NO: 541255 - RNA, 22 nt, Human
ccuuucaaaacagaacacuagc

SEQ ID NO: 541256 - RNA, 22 nt, Human
cugaggcucaagggcagguggg

SEQ ID NO: 541257 - RNA, 20 nt, Human
agugucugggccucaggccc

SEQ ID NO: 541258 - RNA, 22 nt, Human
ugcugccacauuuaaagagggg

SEQ ID NO: 541259 - RNA, 22 nt, Human
auaugggggggcgugcagagga

SEQ ID NO: 541260 - RNA, 22 nt, Human
aagauuuccuggauguaauucc

SEQ ID NO: 541261 - RNA, 22 nt, Human
gccuaacuuggcuuuguucacc

SEQ ID NO: 541262 - RNA, 22 nt, Human
agcucagcgggcuucugguaag

SEQ ID NO: 541263 - RNA, 22 nt, Human
ucagcaggcacggacaggcugc

SEQ ID NO: 541264 - RNA, 22 nt, Human
cagucccaccaggaucgcucuu

SEQ ID NO: 541265 - RNA, 22 nt, Human
gcaggaagcauagaagaaugcc

SEQ ID NO: 541266 - RNA, 22 nt, Human
ggccucucuccagucagugcag

SEQ ID NO: 541267 - RNA, 22 nt, Human
ucaaaaauguuuuauauuggua

SEQ ID NO: 541268 - RNA, 22 nt, Human
auggauaagucaaagaguaucc

SEQ ID NO: 541269 - RNA, 22 nt, Human
aaaaaccuuucauugcaaaugu

SEQ ID NO: 541270 - RNA, 19 nt, Human
cauauuuuugggcuggcau

SEQ ID NO: 541271 - RNA, 22 nt, Human
agugguaacuaaguccugcuua

SEQ ID NO: 541272 - RNA, 22 nt, Human
uggccugccccgagauccuggc

SEQ ID NO: 541273 - RNA, 22 nt, Human
uaacaaaguaccauagacugga

SEQ ID NO: 541274 - RNA, 22 nt, Human
gugggguguccagcagcgagcu

SEQ ID NO: 541275 - RNA, 22 nt, Human
aucugcuugcccucuuaggacc

SEQ ID NO: 541276 - RNA, 22 nt, Human
uugggccucacucuagaaggca

SEQ ID NO: 541277 - RNA, 19 nt, Human
cuuuucaagccaucaguuu

SEQ ID NO: 541278 - RNA, 22 nt, Human
gagggagagugauggaccauug

SEQ ID NO: 541279 - RNA, 22 nt, Human
agagaauuacagaagaauguca

SEQ ID NO: 541280 - RNA, 22 nt, Human
ucugccuggaugauggcagggc

SEQ ID NO: 541281 - RNA, 20 nt, Human
ggcaggcuuuauauggaggg

SEQ ID NO: 541282 - RNA, 22 nt, Human
gcaguccaaaguggcucucacc

SEQ ID NO: 541283 - RNA, 20 nt, Human
ggaaaaaugcaugcucaaga

SEQ ID NO: 541284 - RNA, 22 nt, Human
ugcaaaugaguugcagaucagg

SEQ ID NO: 541285 - RNA, 22 nt, Human
cccaggucugccagccuguggg

SEQ ID NO: 541286 - RNA, 22 nt, Human
auucacagagugguuaguggua

SEQ ID NO: 541287 - RNA, 22 nt, Human
guacuagaugagacagcguggg

SEQ ID NO: 541288 - RNA, 22 nt, Human
ugaggcagccugcauuaaagag

SEQ ID NO: 541289 - RNA, 22 nt, Human
uucaaaggcaggauagcagcug

SEQ ID NO: 541290 - RNA, 22 nt, Human
uuaugcuaguugaaauaacaca

SEQ ID NO: 541291 - RNA, 22 nt, Human
aggcucagugcaaaucauucug

SEQ ID NO: 541292 - RNA, 22 nt, Human
aauguuucuggauauugugggu

SEQ ID NO: 541293 - RNA, 22 nt, Human
auuuguuccacacauauuuacu

SEQ ID NO: 541294 - RNA, 22 nt, Human
ggccugcuauuggugggcagac

SEQ ID NO: 541295 - RNA, 22 nt, Human
ccaccuccaccuauugccagcc

SEQ ID NO: 541296 - RNA, 22 nt, Human
aaauucagcagugaaaugcccc

SEQ ID NO: 541297 - RNA, 22 nt, Human
cagagcugggcauggugaaagg

SEQ ID NO: 541298 - RNA, 19 nt, Human
auucuucagcagugagacc

SEQ ID NO: 541299 - RNA, 22 nt, Human
agugggaggcggcugacgggcg

SEQ ID NO: 541300 - RNA, 22 nt, Human
gcagggaccuugcccacccucc

SEQ ID NO: 541301 - RNA, 22 nt, Human
aucaggauagugguuaccuggg

SEQ ID NO: 541302 - RNA, 22 nt, Human
aggugggcaaugaggccugagu

SEQ ID NO: 541303 - RNA, 22 nt, Human
ugaggcucagagaagugcuguu

SEQ ID NO: 541304 - RNA, 22 nt, Human
uucccaagucuccaauguggga

SEQ ID NO: 541305 - RNA, 22 nt, Human
ucagaggagaugguuaccaggg

SEQ ID NO: 541306 - RNA, 22 nt, Human
ucauuucaaguucugacagcua

SEQ ID NO: 541307 - RNA, 19 nt, Human
auggaaaauuguacucaau

SEQ ID NO: 541308 - RNA, 22 nt, Human
gaguuaauacugaguuuauuaa

SEQ ID NO: 541309 - RNA, 22 nt, Human
gaagaagcaggaguguguagca

SEQ ID NO: 541310 - RNA, 22 nt, Human
cauuugcagagggugacacucu

SEQ ID NO: 541311 - RNA, 22 nt, Human
cuuggcagagggcugggcucag

SEQ ID NO: 541312 - RNA, 22 nt, Human
guauuuuuaguagagucggggu

SEQ ID NO: 541313 - RNA, 22 nt, Human
aagacauugucauuuuauaauu

SEQ ID NO: 541314 - RNA, 22 nt, Human
gcaagcaagcagguagagcuga

SEQ ID NO: 541315 - RNA, 22 nt, Human
ugguuuauuucucugaaagguu

SEQ ID NO: 541316 - RNA, 22 nt, Human
aguuucaauucuuuucacaaag

SEQ ID NO: 541317 - RNA, 19 nt, Human
ucauuguugguuugucggg

SEQ ID NO: 541318 - RNA, 18 nt, Human
gagucuuuguuacugcug

SEQ ID NO: 541319 - RNA, 22 nt, Human
acacagaugcauuacacaucua

SEQ ID NO: 541320 - RNA, 22 nt, Human
aggggcugacuggaaagugcca

SEQ ID NO: 541321 - RNA, 22 nt, Human
ccagaugggcuuuagcaaauga

SEQ ID NO: 541322 - RNA, 22 nt, Human
aaauuuguauuccuuuuccgua

SEQ ID NO: 541323 - RNA, 22 nt, Human
cagggcucccaaauaucucuuc

SEQ ID NO: 541324 - RNA, 20 nt, Human
aauguuucugaacagguagu

SEQ ID NO: 541325 - RNA, 22 nt, Human
auugcaaagcguagacucuaaa

SEQ ID NO: 541326 - RNA, 22 nt, Human
aaggccuuucuuaucaguagau

SEQ ID NO: 541327 - RNA, 22 nt, Human
gaagaggaugacaggagccggu

SEQ ID NO: 541328 - RNA, 22 nt, Human
gccaccuggacagcugugcccu

SEQ ID NO: 541329 - RNA, 22 nt, Human
caaagguaguauauauauuguu

SEQ ID NO: 541330 - RNA, 22 nt, Human
ugggcucagaagauaguuucca

SEQ ID NO: 541331 - RNA, 22 nt, Human
gauuucuuuaugaaguacagaa

SEQ ID NO: 541332 - RNA, 22 nt, Human
ucugccuggauuuuggaaagcu

SEQ ID NO: 541333 - RNA, 18 nt, Human
gcuuuauuucuuggggaa

SEQ ID NO: 541334 - RNA, 22 nt, Human
aggccuggccccaguugcuagg

SEQ ID NO: 541335 - RNA, 22 nt, Human
aaaagacauaugugggcauucu

SEQ ID NO: 541336 - RNA, 22 nt, Human
gcuggugcauuagcugcaguuc

SEQ ID NO: 541337 - RNA, 22 nt, Human
uguuuuuaaauaaugauagaaa

SEQ ID NO: 541338 - RNA, 22 nt, Human
aaucaguuguccaaaguucaca

SEQ ID NO: 541339 - RNA, 22 nt, Human
augaaaugucuggaucuuuuuc

SEQ ID NO: 541340 - RNA, 22 nt, Human
uggcagcaaaaccagaaucaga

SEQ ID NO: 541341 - RNA, 19 nt, Human
ccacacagugugcaauuua

SEQ ID NO: 541342 - RNA, 22 nt, Human
agugggagccagcagcuugggg

SEQ ID NO: 541343 - RNA, 22 nt, Human
gcugggcugcgucggggaagcc

SEQ ID NO: 541344 - RNA, 22 nt, Human
acagauuuuugguaaauaauuu

SEQ ID NO: 541345 - RNA, 20 nt, Human
cugcccugcccuggguccug

SEQ ID NO: 541346 - RNA, 19 nt, Human
agcagcuggagguggagug

SEQ ID NO: 541347 - RNA, 22 nt, Human
aagcacaguucuuagaguuaca

SEQ ID NO: 541348 - RNA, 22 nt, Human
uaggcugggaagaaagauucuc

SEQ ID NO: 541349 - RNA, 22 nt, Human
aaacaucaauugcaucucccaa

SEQ ID NO: 541350 - RNA, 22 nt, Human
gguggggccugcuccagcggcc

SEQ ID NO: 541351 - RNA, 22 nt, Human
ggcaggugcucaaaaauauuug

SEQ ID NO: 541352 - RNA, 22 nt, Human
ugaagagauagaaguacaugcu

SEQ ID NO: 541353 - RNA, 22 nt, Human
gcuguggccgucagggaaaugg

SEQ ID NO: 541354 - RNA, 22 nt, Human
gcagcucuccucugugaggaac

SEQ ID NO: 541355 - RNA, 22 nt, Human
gcugugcagucuuuggugugcc

SEQ ID NO: 541356 - RNA, 16 nt, Human
ggugggguaguuagaa

SEQ ID NO: 541357 - RNA, 22 nt, Human
gggccuuccgacucccaaggcc

SEQ ID NO: 541358 - RNA, 22 nt, Human
ccauuaaguauuauuaaugauu

SEQ ID NO: 541359 - RNA, 22 nt, Human
cuguagcaaguuauucaauaaa

SEQ ID NO: 541360 - RNA, 21 nt, Human
aagacagaaaagccuauuuuc

SEQ ID NO: 541361 - RNA, 22 nt, Human
cccaggagguagagguugcagu

SEQ ID NO: 541362 - RNA, 22 nt, Human
ucugagugcacuaggaggggca

SEQ ID NO: 541363 - RNA, 19 nt, Human
uggcagggagaguuugaag

SEQ ID NO: 541364 - RNA, 22 nt, Human
aagaaaucagaaaagcauucgu

SEQ ID NO: 541365 - RNA, 22 nt, Human
ucugagccguauggcuuggcua

SEQ ID NO: 541366 - RNA, 22 nt, Human
gaaggcaacaccaggaugcacu

SEQ ID NO: 541367 - RNA, 21 nt, Human
uuaagaccugcaucaucauua

SEQ ID NO: 541368 - RNA, 22 nt, Human
cagguggcuuagucccauuuua

SEQ ID NO: 541369 - RNA, 22 nt, Human
gggcugaggcuaccacuggucu

SEQ ID NO: 541370 - RNA, 22 nt, Human
acaaaaguguaggaauuccuua

SEQ ID NO: 541371 - RNA, 17 nt, Human
aggcaggcagagcggga

SEQ ID NO: 541372 - RNA, 18 nt, Human
ugggccugcauccuaguc

SEQ ID NO: 541373 - RNA, 22 nt, Human
guuucgucaggcuuauucuauc

SEQ ID NO: 541374 - RNA, 22 nt, Human
cccagcucaagcagagagcuaa

SEQ ID NO: 541375 - RNA, 21 nt, Human
ugcugccaucaugcagagaug

SEQ ID NO: 541376 - RNA, 22 nt, Human
gucuucuguaagaugagguccc

SEQ ID NO: 541377 - RNA, 22 nt, Human
aagccgggccugagaaaugaca

SEQ ID NO: 541378 - RNA, 22 nt, Human
aagugcaagcaggacuuaguuu

SEQ ID NO: 541379 - RNA, 22 nt, Human
ucacaaaagcuuuugaauuugg

SEQ ID NO: 541380 - RNA, 22 nt, Human
uccucuggauauaagccucacc

SEQ ID NO: 541381 - RNA, 22 nt, Human
agcugcugccucacuggucugu

SEQ ID NO: 541382 - RNA, 22 nt, Human
uccugggagcacaugguccugc

SEQ ID NO: 541383 - RNA, 22 nt, Human
gggcucagucggcaagccccuu

SEQ ID NO: 541384 - RNA, 22 nt, Human
gucacacaauaguaaguggucc

SEQ ID NO: 541385 - RNA, 21 nt, Human
acagucuccccagaucucucc

SEQ ID NO: 541386 - RNA, 22 nt, Human
auuuucuauucugcugguuuag

SEQ ID NO: 541387 - RNA, 22 nt, Human
uuaguguauuuucaaauguaga

SEQ ID NO: 541388 - RNA, 22 nt, Human
uuugcauuuccagaguagcaga

SEQ ID NO: 541389 - RNA, 22 nt, Human
uuucugcugugcuuucuugcgu

SEQ ID NO: 541390 - RNA, 22 nt, Human
uuuauguuugacaaugaucugg

SEQ ID NO: 541391 - RNA, 22 nt, Human
aaaauauguauaacucuucugc

SEQ ID NO: 541392 - RNA, 22 nt, Human
aggagcagcccacuccuguccu

SEQ ID NO: 541393 - RNA, 22 nt, Human
ugcugucaguuggcaggaugag

SEQ ID NO: 541394 - RNA, 22 nt, Human
ucaggcagaugcagggauggau

SEQ ID NO: 541395 - RNA, 22 nt, Human
gaugcugcucgggugccuggga

SEQ ID NO: 541396 - RNA, 22 nt, Human
ucccacauaugcaauccugaau

SEQ ID NO: 541397 - RNA, 22 nt, Human
agugaaaacacuaguucuugcc

SEQ ID NO: 541398 - RNA, 22 nt, Human
uccagagcagguggucagaagg

SEQ ID NO: 541399 - RNA, 22 nt, Human
ccaggggcuggugcugagcugg

SEQ ID NO: 541400 - RNA, 22 nt, Human
ucaccccuacauuucccuugcu

SEQ ID NO: 541401 - RNA, 22 nt, Human
uggggaagggcacccuggagac

SEQ ID NO: 541402 - RNA, 22 nt, Human
uucucuuuucaccaguugcuaa

SEQ ID NO: 541403 - RNA, 22 nt, Human
guacacauuaugcuucucuaaa

SEQ ID NO: 541404 - RNA, 22 nt, Human
aaauguauccuacuuccugagu

SEQ ID NO: 541405 - RNA, 22 nt, Human
gcacagaaguaaaauacaaguc

SEQ ID NO: 541406 - RNA, 22 nt, Human
uuagauaaaaguguucaauaaa

SEQ ID NO: 541407 - RNA, 19 nt, Human
ccuggcugcugugggaugc

SEQ ID NO: 541408 - RNA, 22 nt, Human
aaauaucauuuauaacuuuuaa

SEQ ID NO: 541409 - RNA, 22 nt, Human
ccugagagugagggccuccuua

SEQ ID NO: 541410 - RNA, 22 nt, Human
acacuucuauucccugcacaaa

SEQ ID NO: 541411 - RNA, 23 nt, Human
auagaagauuauugcaacagucc

SEQ ID NO: 541412 - RNA, 22 nt, Human
ccaagauaaucugugaaaaauc

SEQ ID NO: 541413 - RNA, 22 nt, Human
gauuucuuggcccacucucaga

SEQ ID NO: 541414 - RNA, 22 nt, Human
agcugaguuaauucaucacuua

SEQ ID NO: 541415 - RNA, 22 nt, Human
uccccacugggccuccucuuuc

SEQ ID NO: 541416 - RNA, 22 nt, Human
gaugcacugcaguauauacugu

SEQ ID NO: 541417 - RNA, 22 nt, Human
uuugaacugauaaucuucuguu

SEQ ID NO: 541418 - RNA, 22 nt, Human
aaaugcagacagcuucacacac

SEQ ID NO: 541419 - RNA, 22 nt, Human
aaguuugacagaaguuucuaau

SEQ ID NO: 541420 - RNA, 22 nt, Human
uacuuaaaaauuaucaaagugg

SEQ ID NO: 541421 - RNA, 22 nt, Human
gagggcugcugccagauaugcc

SEQ ID NO: 541422 - RNA, 22 nt, Human
uuccaaguuaggcgagcuggug

SEQ ID NO: 541423 - RNA, 22 nt, Human
ugguuccaguuuucaauagagc

SEQ ID NO: 541424 - RNA, 22 nt, Human
gccacucaugggaggugugcaa

SEQ ID NO: 541425 - RNA, 22 nt, Human
caaauguuugguggcauuuugu

SEQ ID NO: 541426 - RNA, 22 nt, Human
caggaaugaggucguaaguguc

SEQ ID NO: 541427 - RNA, 22 nt, Human
ucaguguuuuccagggucuacu

SEQ ID NO: 541428 - RNA, 22 nt, Human
uucauuugggaugagucagaag

SEQ ID NO: 541429 - RNA, 22 nt, Human
agcaguggagcgagauguuuaa

SEQ ID NO: 541430 - RNA, 22 nt, Human
aaauacagauuccagggucuua

SEQ ID NO: 541431 - RNA, 22 nt, Human
acauauuuccaugcagcauguc

SEQ ID NO: 541432 - RNA, 22 nt, Human
agguggaacguucaggugcuag

SEQ ID NO: 541433 - RNA, 22 nt, Human
aaggagaaggcaucauucaagu

SEQ ID NO: 541434 - RNA, 18 nt, Human
ucaggcucucuggcuaga

SEQ ID NO: 541435 - RNA, 23 nt, Human
agggcccaagccuggacagcagg

SEQ ID NO: 541436 - RNA, 22 nt, Human
ugcacacagccagugaguggca

SEQ ID NO: 541437 - RNA, 22 nt, Human
cccagguggguuggccucuguc

SEQ ID NO: 541438 - RNA, 22 nt, Human
uggagcagaggcugagguuggg

SEQ ID NO: 541439 - RNA, 22 nt, Human
aaaauggucucagcuggcacca

SEQ ID NO: 541440 - RNA, 22 nt, Human
gcagggaggaagagaugcuucc

SEQ ID NO: 541441 - RNA, 22 nt, Human
aagauucucagagugaaagaau

SEQ ID NO: 541442 - RNA, 23 nt, Human
cccagcagauuguaaagugucca

SEQ ID NO: 541443 - RNA, 22 nt, Human
aaauccuaaaaguuugacuuaa

SEQ ID NO: 541444 - RNA, 22 nt, Human
aaugguuuaacauaugcuugag

SEQ ID NO: 541445 - RNA, 22 nt, Human
agacaucagcuugugugcaggg

SEQ ID NO: 541446 - RNA, 22 nt, Human
agaggccuccgaaaggugggcu

SEQ ID NO: 541447 - RNA, 22 nt, Human
cugcuuuguguggucccuccag

SEQ ID NO: 541448 - RNA, 22 nt, Human
gcaacagcauucucauugacau

SEQ ID NO: 541449 - RNA, 22 nt, Human
accagcucagaagccagaaaga

SEQ ID NO: 541450 - RNA, 22 nt, Human
acuuccugcagcuucucagccc

SEQ ID NO: 541451 - RNA, 22 nt, Human
agguccugucuuaucucuguaa

SEQ ID NO: 541452 - RNA, 22 nt, Human
uuauuuauuguguaccuacugu

SEQ ID NO: 541453 - RNA, 22 nt, Human
uccaggcccgagaugggcugga

SEQ ID NO: 541454 - RNA, 22 nt, Human
cagcaagauuuuuaaagcaagg

SEQ ID NO: 541455 - RNA, 22 nt, Human
gcucccagaaccaaggcugggg

SEQ ID NO: 541456 - RNA, 20 nt, Human
gugcauuucaccuguacugu

SEQ ID NO: 541457 - RNA, 22 nt, Human
uuacauuuugggguaaggauaa

SEQ ID NO: 541458 - RNA, 22 nt, Human
ugucccuuuguguucugaaacu

SEQ ID NO: 541459 - RNA, 18 nt, Human
caugggugacagguggau

SEQ ID NO: 541460 - RNA, 20 nt, Human
ucagccagcuaacaugggga

SEQ ID NO: 541461 - RNA, 20 nt, Human
gccugcagagaaggucagag

SEQ ID NO: 541462 - RNA, 22 nt, Human
caucacaaauguaauaaugucu

SEQ ID NO: 541463 - RNA, 22 nt, Human
uuucuguagugugguauguagg

SEQ ID NO: 541464 - RNA, 22 nt, Human
uuccauaauaaccugagagaaa

SEQ ID NO: 541465 - RNA, 22 nt, Human
ugcccugcccuugcuauuucua

SEQ ID NO: 541466 - RNA, 17 nt, Human
auuuacauugucaccga

SEQ ID NO: 541467 - RNA, 22 nt, Human
agagcugggaccgucuggaagu

SEQ ID NO: 541468 - RNA, 22 nt, Human
ugggcagaggcucugaagucca

SEQ ID NO: 541469 - RNA, 22 nt, Human
guuuccuacacuguaguauuau

SEQ ID NO: 541470 - RNA, 22 nt, Human
uacaguuaaaaaguucaauggu

SEQ ID NO: 541471 - RNA, 22 nt, Human
ggauggcauguugggcucuguu

SEQ ID NO: 541472 - RNA, 22 nt, Human
gggccccaaaaugccaggcucu

SEQ ID NO: 541473 - RNA, 22 nt, Human
agaacuguccuuggaggagagu

SEQ ID NO: 541474 - RNA, 22 nt, Human
cccagcauccucagggagcggg

SEQ ID NO: 541475 - RNA, 22 nt, Human
ugggagcccaagggagcugccg

SEQ ID NO: 541476 - RNA, 22 nt, Human
ccuccaggaacuugagagacac

SEQ ID NO: 541477 - RNA, 22 nt, Human
cugugcuugacagugggaagca

SEQ ID NO: 541478 - RNA, 21 nt, Human
cacaggugggucagugaggcc

SEQ ID NO: 541479 - RNA, 22 nt, Human
cuucacagaauaaacucauuau

SEQ ID NO: 541480 - RNA, 22 nt, Human
cagaaauguuuaugcuuuugaa

SEQ ID NO: 541481 - RNA, 22 nt, Human
ggaggaccugcuggcccugcaa

SEQ ID NO: 541482 - RNA, 22 nt, Human
aagauucccagagaaguuccac

SEQ ID NO: 541483 - RNA, 22 nt, Human
gcagcuuuguggagaggcccau

SEQ ID NO: 541484 - RNA, 22 nt, Human
uuucagugcuucuguuuaccgg

SEQ ID NO: 541485 - RNA, 22 nt, Human
agaagccauauuuagggaggag

SEQ ID NO: 541486 - RNA, 22 nt, Human
agaaaucacaggaggcagaagg

SEQ ID NO: 541487 - RNA, 22 nt, Human
aggcagcaauugaaaucauugu

SEQ ID NO: 541488 - RNA, 22 nt, Human
caggauggucagaugcauuguc

SEQ ID NO: 541489 - RNA, 22 nt, Human
ucaaacauaucugauuuuccau

SEQ ID NO: 541490 - RNA, 22 nt, Human
aggcuucuugauaaaaugcaga

SEQ ID NO: 541491 - RNA, 22 nt, Human
guaaaauucuagcaucugaaag

SEQ ID NO: 541492 - RNA, 22 nt, Human
uuuagcaucgaaguaaauuuag

SEQ ID NO: 541493 - RNA, 22 nt, Human
ggggcagcucccgagggcagga

SEQ ID NO: 541494 - RNA, 22 nt, Human
caggcaggugcagauuccucuu

SEQ ID NO: 541495 - RNA, 22 nt, Human
ucaggcugagaaaaucuggacc

SEQ ID NO: 541496 - RNA, 22 nt, Human
gaaaucaguucugaaauuuaca

SEQ ID NO: 541497 - RNA, 22 nt, Human
gggcccuggccgaaucccucug

SEQ ID NO: 541498 - RNA, 22 nt, Human
gugugcagaagacacaagacau

SEQ ID NO: 541499 - RNA, 22 nt, Human
ucuuugauacagauguaagcug

SEQ ID NO: 541500 - RNA, 22 nt, Human
ucacaucucccuggaggacaca

SEQ ID NO: 541501 - RNA, 22 nt, Human
ucuggaguguguguauucagcu

SEQ ID NO: 541502 - RNA, 17 nt, Human
gcaucacagauaacacg

SEQ ID NO: 541503 - RNA, 22 nt, Human
uaggcagagguaugguaaggac

SEQ ID NO: 541504 - RNA, 23 nt, Human
cccugcagucagggugagauggu

SEQ ID NO: 541505 - RNA, 22 nt, Human
ccagcuccugggucuuagucag

SEQ ID NO: 541506 - RNA, 22 nt, Human
ugaacaaauggaaauaaccagu

SEQ ID NO: 541507 - RNA, 21 nt, Human
gccugggaaaucugggaagcc

SEQ ID NO: 541508 - RNA, 22 nt, Human
gccugugaccccuccaucugcu

SEQ ID NO: 541509 - RNA, 22 nt, Human
aguauacauauauuagccuucg

SEQ ID NO: 541510 - RNA, 22 nt, Human
uguaaacauaccagagccaagu

SEQ ID NO: 541511 - RNA, 22 nt, Human
ucagcagaggggaaggcaucug

SEQ ID NO: 541512 - RNA, 18 nt, Human
ggagcugggccugguucc

SEQ ID NO: 541513 - RNA, 21 nt, Human
ucuuuccugcccaguugcccu

SEQ ID NO: 541514 - RNA, 20 nt, Human
gagcacaguaaugacugcua

SEQ ID NO: 541515 - RNA, 22 nt, Human
gcagguggagcaguagucuggu

SEQ ID NO: 541516 - RNA, 18 nt, Human
gcagcuuuugauucaccc

SEQ ID NO: 541517 - RNA, 22 nt, Human
auguagcaucuauccugauaaa

SEQ ID NO: 541518 - RNA, 22 nt, Human
auggaagacuaacagaaacaug

SEQ ID NO: 541519 - RNA, 20 nt, Human
ugauuucucuucuauuccuu

SEQ ID NO: 541520 - RNA, 20 nt, Human
uacauauuauaucagcugca

SEQ ID NO: 541521 - RNA, 22 nt, Human
gggugacauuucccaaugagcc

SEQ ID NO: 541522 - RNA, 22 nt, Human
aaauguacgggaguagaauuag

SEQ ID NO: 541523 - RNA, 22 nt, Human
gcaggugggagccgcugccuga

SEQ ID NO: 541524 - RNA, 22 nt, Human
augaagauuuauaauugccuuu

SEQ ID NO: 541525 - RNA, 22 nt, Human
cugcggcuggggacagcuguug

SEQ ID NO: 541526 - RNA, 19 nt, Human
aggucauugauagugcagg

SEQ ID NO: 541527 - RNA, 22 nt, Human
ucaguggauauuucuguggcug

SEQ ID NO: 541528 - RNA, 22 nt, Human
uggcccugcuguaucaucugcu

SEQ ID NO: 541529 - RNA, 22 nt, Human
uggggacacagagccaaacuau

SEQ ID NO: 541530 - RNA, 17 nt, Human
ucugggcuucagugguc

SEQ ID NO: 541531 - RNA, 22 nt, Human
ucucagagauuuauggaaaacu

SEQ ID NO: 541532 - RNA, 20 nt, Human
auugucagccuucagaggag

SEQ ID NO: 541533 - RNA, 22 nt, Human
acagugucaugucguguucccc

SEQ ID NO: 541534 - RNA, 22 nt, Human
aagaauaacacuuagguuuugc

SEQ ID NO: 541535 - RNA, 21 nt, Human
uccugcaggaggccugagagg

SEQ ID NO: 541536 - RNA, 22 nt, Human
gcauagcuguuaauuugguuuc

SEQ ID NO: 541537 - RNA, 22 nt, Human
cugguucauuagguauuagugg

SEQ ID NO: 541538 - RNA, 22 nt, Human
ggcagcucugaugaugcucugg

SEQ ID NO: 541539 - RNA, 22 nt, Human
ccagagccggcucccucagcuu

SEQ ID NO: 541540 - RNA, 22 nt, Human
acugucugcuggccccugguua

SEQ ID NO: 541541 - RNA, 23 nt, Human
ccagcuccgugagccucgggcuc

SEQ ID NO: 541542 - RNA, 22 nt, Human
ccaggaaugaaauguagauaaa

SEQ ID NO: 541543 - RNA, 22 nt, Human
aucagcaagacuaggggaauac

SEQ ID NO: 541544 - RNA, 22 nt, Human
aggagugaguguccucagcaga

SEQ ID NO: 541545 - RNA, 22 nt, Human
aauggcagaggcaaagauggua

SEQ ID NO: 541546 - RNA, 22 nt, Human
ugggaccugcuccuggaaugag

SEQ ID NO: 541547 - RNA, 22 nt, Human
aauugugcuaugauuaugaaag

SEQ ID NO: 541548 - RNA, 22 nt, Human
guccagugacaaguagcuggcc

SEQ ID NO: 541549 - RNA, 22 nt, Human
agugaagaggaaguggggcaca

SEQ ID NO: 541550 - RNA, 22 nt, Human
aacuauacucuguaaaugugcu

SEQ ID NO: 541551 - RNA, 22 nt, Human
gucugggcucccagggucggcg

SEQ ID NO: 541552 - RNA, 22 nt, Human
agauacaucuugaacuucuaga

SEQ ID NO: 541553 - RNA, 23 nt, Human
caguggagacucaugcuuccuua

SEQ ID NO: 541554 - RNA, 22 nt, Human
cuuuauuccuacaagauuuucu

SEQ ID NO: 541555 - RNA, 22 nt, Human
guaacagaggguuugcagauau

SEQ ID NO: 541556 - RNA, 17 nt, Human
ggccuguguggcugcag

SEQ ID NO: 541557 - RNA, 22 nt, Human
ugcugaguggcggccucacuuu

SEQ ID NO: 541558 - RNA, 19 nt, Human
ugccagcauuaggcugaag

SEQ ID NO: 541559 - RNA, 22 nt, Human
cugugcccuguggcuggcaccu

SEQ ID NO: 541560 - RNA, 22 nt, Human
auaauacaugguugaucuuuuc

SEQ ID NO: 541561 - RNA, 22 nt, Human
gaggcagcaucuauggugggaa

SEQ ID NO: 541562 - RNA, 21 nt, Human
gccagcugcagggcuuccuug

SEQ ID NO: 541563 - RNA, 22 nt, Human
caguggcagagaacagagaccu

SEQ ID NO: 541564 - RNA, 21 nt, Human
gcugagagguugggaaguuca

SEQ ID NO: 541565 - RNA, 22 nt, Human
ucaucaaagucaaagaaugacu

SEQ ID NO: 541566 - RNA, 19 nt, Human
caugaugagcauccugcag

SEQ ID NO: 541567 - RNA, 22 nt, Human
cuggaauugcauaauauguccu

SEQ ID NO: 541568 - RNA, 22 nt, Human
ccugccagugaagcugacgggc

SEQ ID NO: 541569 - RNA, 22 nt, Human
aaagaaggaccuggaggaggau

SEQ ID NO: 541570 - RNA, 22 nt, Human
auuucacucauucauguuacuu

SEQ ID NO: 541571 - RNA, 22 nt, Human
gcugggcucauuugugugucug

SEQ ID NO: 541572 - RNA, 20 nt, Human
gcagcugcccccagucccug

SEQ ID NO: 541573 - RNA, 21 nt, Human
ucaggggcuguguuuuccauc

SEQ ID NO: 541574 - RNA, 22 nt, Human
aggcugagagcaacgugucaga

SEQ ID NO: 541575 - RNA, 22 nt, Human
cauugcccaguaggaucaccag

SEQ ID NO: 541576 - RNA, 22 nt, Human
uucagagaugacaccugguguu

SEQ ID NO: 541577 - RNA, 22 nt, Human
uacuuuuagccuauuugauucu

SEQ ID NO: 541578 - RNA, 22 nt, Human
auuugcauaauagugauuugua

SEQ ID NO: 541579 - RNA, 22 nt, Human
acuaggaaguggcaaaacugga

SEQ ID NO: 541580 - RNA, 22 nt, Human
ugcauuguaggauguuuagcag

SEQ ID NO: 541581 - RNA, 22 nt, Human
gcugggaggaauuuggggaaua

SEQ ID NO: 541582 - RNA, 22 nt, Human
cuguacaucccgagagccagua

SEQ ID NO: 541583 - RNA, 22 nt, Human
aguggcagagccaaguagagcc

SEQ ID NO: 541584 - RNA, 22 nt, Human
uggggacccggacuccuggguc

SEQ ID NO: 541585 - RNA, 22 nt, Human
ccuggggaaucuugcaggggaa

SEQ ID NO: 541586 - RNA, 22 nt, Human
ggcugcagagcugggugggccu

SEQ ID NO: 541587 - RNA, 22 nt, Human
aagugagauuauauguacggga

SEQ ID NO: 541588 - RNA, 22 nt, Human
acuguucugccaagaucaacgu

SEQ ID NO: 541589 - RNA, 22 nt, Human
agggaggauaguagucaguuua

SEQ ID NO: 541590 - RNA, 18 nt, Human
caaauucagugcuggaag

SEQ ID NO: 541591 - RNA, 22 nt, Human
ggguggcaggauuggcaggagu

SEQ ID NO: 541592 - RNA, 22 nt, Human
uguucccauuuucugcauaauc

SEQ ID NO: 541593 - RNA, 22 nt, Human
aaguggagccagggaaacugaa

SEQ ID NO: 541594 - RNA, 22 nt, Human
cuuccugaacaaugccaucaau

SEQ ID NO: 541595 - RNA, 22 nt, Human
uuucuguauuuaaaagaucugg

SEQ ID NO: 541596 - RNA, 22 nt, Human
cugggccagggaggugucugua

SEQ ID NO: 541597 - RNA, 22 nt, Human
agauuuugucucaauacuucug

SEQ ID NO: 541598 - RNA, 22 nt, Human
aaugguuuguaccuguccuugg

SEQ ID NO: 541599 - RNA, 22 nt, Human
aguauuuucgccaucacaagaa

SEQ ID NO: 541600 - RNA, 22 nt, Human
agguggcugagcugugccccug

SEQ ID NO: 541601 - RNA, 22 nt, Human
ccagcccugaacccugcugcau

SEQ ID NO: 541602 - RNA, 22 nt, Human
gccccagccaaggugacacgaa

SEQ ID NO: 541603 - RNA, 21 nt, Human
acagcagggcuggcaugacag

SEQ ID NO: 541604 - RNA, 22 nt, Human
gacucguucauaguuccaauuu

SEQ ID NO: 541605 - RNA, 22 nt, Human
gcccagaguucaaggcugcagu

SEQ ID NO: 541606 - RNA, 22 nt, Human
uuugugaagggaacagaagugu

SEQ ID NO: 541607 - RNA, 22 nt, Human
ucucagagauguuagggaagag

SEQ ID NO: 541608 - RNA, 22 nt, Human
cuggcaggcggagguugcagug

SEQ ID NO: 541609 - RNA, 20 nt, Human
ugagaaaguagagacucagg

SEQ ID NO: 541610 - RNA, 22 nt, Human
gcagugaaaaagugcacccugu

SEQ ID NO: 541611 - RNA, 22 nt, Human
ugcuaaguucugcaaaagauaa

SEQ ID NO: 541612 - RNA, 22 nt, Human
uauaauuuuaagugguaaauua

SEQ ID NO: 541613 - RNA, 22 nt, Human
gagcucuggcagggcaggucug

SEQ ID NO: 541614 - RNA, 22 nt, Human
cauucacaaagcugauugaugg

SEQ ID NO: 541615 - RNA, 22 nt, Human
gcccagcuggcuuccagcacau

SEQ ID NO: 541616 - RNA, 22 nt, Human
uacuuuagaaggaaauaaguuc

SEQ ID NO: 541617 - RNA, 22 nt, Human
acauuuugcccuuauuugcuga

SEQ ID NO: 541618 - RNA, 22 nt, Human
cugagagaaucaugcugcaggu

SEQ ID NO: 541619 - RNA, 22 nt, Human
ccuggagcacucucccuggcug

SEQ ID NO: 541620 - RNA, 22 nt, Human
ggagaggaaaugccagcacuuc

SEQ ID NO: 541621 - RNA, 22 nt, Human
cagucccaggguugguucagcu

SEQ ID NO: 541622 - RNA, 22 nt, Human
ggugggcacccgagacuggauc

SEQ ID NO: 541623 - RNA, 23 nt, Human
acugagccagggccugggucagc

SEQ ID NO: 541624 - RNA, 22 nt, Human
cauacauauguggaugucauau

SEQ ID NO: 541625 - RNA, 22 nt, Human
cugcggcucugcgggcagcugg

SEQ ID NO: 541626 - RNA, 22 nt, Human
agggaguguuacauaauggguu

SEQ ID NO: 541627 - RNA, 22 nt, Human
uaaaucccuacaucuguguuuu

SEQ ID NO: 541628 - RNA, 22 nt, Human
ggcuccagauguccccuggcaa

SEQ ID NO: 541629 - RNA, 22 nt, Human
ugcuucugcucagcuuccuacu

SEQ ID NO: 541630 - RNA, 21 nt, Human
gaguggaacgcucuucacacc

SEQ ID NO: 541631 - RNA, 19 nt, Human
aggucccugucaccucuca

SEQ ID NO: 541632 - RNA, 22 nt, Human
uaaagacaauaggaaaguuguu

SEQ ID NO: 541633 - RNA, 22 nt, Human
aaugcuguauaucuuagcuaau

SEQ ID NO: 541634 - RNA, 22 nt, Human
gguguccucaugauuuucuaga

SEQ ID NO: 541635 - RNA, 22 nt, Human
uuaaagcaaguagaagccugag

SEQ ID NO: 541636 - RNA, 22 nt, Human
acauauaugcugggacugugac

SEQ ID NO: 541637 - RNA, 22 nt, Human
cugcccugcucuccgggaucuu

SEQ ID NO: 541638 - RNA, 22 nt, Human
aagcugccuagaguugaauguc

SEQ ID NO: 541639 - RNA, 22 nt, Human
cugggccagcaacugcaaugga

SEQ ID NO: 541640 - RNA, 22 nt, Human
aucacaggugguaggaaaagaa

SEQ ID NO: 541641 - RNA, 22 nt, Human
ccaggagcagggcuggcugcac

SEQ ID NO: 541642 - RNA, 22 nt, Human
gaggcucagggaaacagcgcag

SEQ ID NO: 541643 - RNA, 22 nt, Human
ccauuuguucgcccagcuccaa

SEQ ID NO: 541644 - RNA, 22 nt, Human
cuuagggagaaugccucugcag

SEQ ID NO: 541645 - RNA, 22 nt, Human
cucugcccagugcccacaggag

SEQ ID NO: 541646 - RNA, 22 nt, Human
acuuuacagaugguuuccugac

SEQ ID NO: 541647 - RNA, 22 nt, Human
ccugagagagaagcgaccuggu

SEQ ID NO: 541648 - RNA, 22 nt, Human
ggcugccugccgcccacuuggc

SEQ ID NO: 541649 - RNA, 22 nt, Human
ggcuuuggggugugcagagaug

SEQ ID NO: 541650 - RNA, 22 nt, Human
agaccgagaaguucuccaggcc

SEQ ID NO: 541651 - RNA, 22 nt, Human
uaagcuauuccugaagaagguu

SEQ ID NO: 541652 - RNA, 22 nt, Human
aggcucugguuggcaaguaaag

SEQ ID NO: 541653 - RNA, 22 nt, Human
agugaggucauacuggagaggg

SEQ ID NO: 541654 - RNA, 22 nt, Human
cacagcuugggcucugacaaua

SEQ ID NO: 541655 - RNA, 22 nt, Human
caaacauuugacuucucucagg

SEQ ID NO: 541656 - RNA, 22 nt, Human
ggccacagaacagcuacaggac

SEQ ID NO: 541657 - RNA, 22 nt, Human
cgugucaucugagccuugggcg

SEQ ID NO: 541658 - RNA, 22 nt, Human
uuucacauaaauauuaugccua

SEQ ID NO: 541659 - RNA, 22 nt, Human
auuuugaaaccaaguuauuucc

SEQ ID NO: 541660 - RNA, 22 nt, Human
ggcucugguugaccaugauggc

SEQ ID NO: 541661 - RNA, 22 nt, Human
ccccuuccgucucuugaguguc

SEQ ID NO: 541662 - RNA, 22 nt, Human
ucaaaccaccuuguuacugggg

SEQ ID NO: 541663 - RNA, 22 nt, Human
uucaaagugugaccugacaagc

SEQ ID NO: 541664 - RNA, 22 nt, Human
aaucuauaugcuuuucacauac

SEQ ID NO: 541665 - RNA, 22 nt, Human
gggcuggcaucaguugccgaga

SEQ ID NO: 541666 - RNA, 22 nt, Human
cugaggcucugggugucacugu

SEQ ID NO: 541667 - RNA, 19 nt, Human
cagaacagaggucauggcc

SEQ ID NO: 541668 - RNA, 22 nt, Human
ugccaggcccagcagggcggcc

SEQ ID NO: 541669 - RNA, 22 nt, Human
caugagaaguggccuucaaaaa

SEQ ID NO: 541670 - RNA, 22 nt, Human
aagcacagacacaaaaggcuuu

SEQ ID NO: 541671 - RNA, 22 nt, Human
cagcuucugagcaagccagggg

SEQ ID NO: 541672 - RNA, 22 nt, Human
acauuauaguugcuacagagua

SEQ ID NO: 541673 - RNA, 22 nt, Human
acaguaaaaagccuuagaauuu

SEQ ID NO: 541674 - RNA, 22 nt, Human
uaauuucuggagggagaaagag

SEQ ID NO: 541675 - RNA, 22 nt, Human
cagacagguagggacagaacau

SEQ ID NO: 541676 - RNA, 22 nt, Human
ugugccugucccgcauucuggu

SEQ ID NO: 541677 - RNA, 22 nt, Human
ugugccugaguuggcugaguac

SEQ ID NO: 541678 - RNA, 22 nt, Human
gagauuggccuggcuugccaac

SEQ ID NO: 541679 - RNA, 16 nt, Human
gagggcagaggcggaa

SEQ ID NO: 541680 - RNA, 22 nt, Human
uguauuaugauuguuguucaug

SEQ ID NO: 541681 - RNA, 22 nt, Human
acccuguaugcuauaucccuaa

SEQ ID NO: 541682 - RNA, 22 nt, Human
ggcagggguccugguguugacu

SEQ ID NO: 541683 - RNA, 22 nt, Human
acucucagaggguggcagcaau

SEQ ID NO: 541684 - RNA, 22 nt, Human
aacucagucauaaagcgaaugc

SEQ ID NO: 541685 - RNA, 22 nt, Human
cucagagcaaugaacaugcaaa

SEQ ID NO: 541686 - RNA, 22 nt, Human
uucacaauuucccuucaucagg

SEQ ID NO: 541687 - RNA, 22 nt, Human
gcacagcaauuucuauaagcuc

SEQ ID NO: 541688 - RNA, 22 nt, Human
uugaaagugccaaguccuagug

SEQ ID NO: 541689 - RNA, 22 nt, Human
agggcaguucagccacaggcuc

SEQ ID NO: 541690 - RNA, 22 nt, Human
uccauuuacuauucucauaucg

SEQ ID NO: 541691 - RNA, 21 nt, Human
ggccugagcaccuguccaccu

SEQ ID NO: 541692 - RNA, 22 nt, Human
ugaggccucauuuagggagagg

SEQ ID NO: 541693 - RNA, 22 nt, Human
cugccagguuggcgcucgcucu

SEQ ID NO: 541694 - RNA, 22 nt, Human
ugcauacacuucaaaugagcau

SEQ ID NO: 541695 - RNA, 22 nt, Human
aaguccaguuucauuugagguc

SEQ ID NO: 541696 - RNA, 22 nt, Human
ccagucccgcaugguccagaau

SEQ ID NO: 541697 - RNA, 22 nt, Human
ggcucaggagaggggcuaaaag

SEQ ID NO: 541698 - RNA, 22 nt, Human
ucugccugcugccugggggcuc

SEQ ID NO: 541699 - RNA, 22 nt, Human
uucuguuucuggggucucugac

SEQ ID NO: 541700 - RNA, 22 nt, Human
cuggugggagcagcaggcagcu

SEQ ID NO: 541701 - RNA, 22 nt, Human
cagucccacaagaucuccacaa

SEQ ID NO: 541702 - RNA, 22 nt, Human
acuaaggaauaugacaaacuca

SEQ ID NO: 541703 - RNA, 22 nt, Human
ggugccagccuagugcaguggu

SEQ ID NO: 541704 - RNA, 22 nt, Human
ugggccugccccaggcuucagc

SEQ ID NO: 541705 - RNA, 22 nt, Human
uaagaaacuaaugcaauaagag

SEQ ID NO: 541706 - RNA, 22 nt, Human
caggcaccccaggugagcacug

SEQ ID NO: 541707 - RNA, 22 nt, Human
aagugccugaccuagccuggag

SEQ ID NO: 541708 - RNA, 22 nt, Human
aaaugcagaucccugaaucuca

SEQ ID NO: 541709 - RNA, 22 nt, Human
ugggcucugcaucagugcccau

SEQ ID NO: 541710 - RNA, 18 nt, Human
aagaggaggagcagguug

SEQ ID NO: 541711 - RNA, 22 nt, Human
cagcagcugaggcgcuggcgug

SEQ ID NO: 541712 - RNA, 20 nt, Human
auuucaguguuugcaauuuc

SEQ ID NO: 541713 - RNA, 22 nt, Human
uggcagaggaggcucagauuga

SEQ ID NO: 541714 - RNA, 22 nt, Human
aaaagcaauugcaguucuugcc

SEQ ID NO: 541715 - RNA, 22 nt, Human
ccuccaggcugaauaucuagaa

SEQ ID NO: 541716 - RNA, 22 nt, Human
cagaauaaacagaaacguagcu

SEQ ID NO: 541717 - RNA, 22 nt, Human
gaacauuuggcaugagaauuug

SEQ ID NO: 541718 - RNA, 22 nt, Human
uggcaggaaaaagggccagagg

SEQ ID NO: 541719 - RNA, 22 nt, Human
uaugcuacuagaaauaaaaugg

SEQ ID NO: 541720 - RNA, 22 nt, Human
ucuccuucgaggcccagcuccc

SEQ ID NO: 541721 - RNA, 22 nt, Human
cuguccuggagggcauaggacg

SEQ ID NO: 541722 - RNA, 22 nt, Human
ucugucacucuagagauggcag

SEQ ID NO: 541723 - RNA, 22 nt, Human
ggcuucaccaggugcaugcaug

SEQ ID NO: 541724 - RNA, 22 nt, Human
auuccugacuguuagaguuugc

SEQ ID NO: 541725 - RNA, 22 nt, Human
ucugcuggaaaaccagggaauu

SEQ ID NO: 541726 - RNA, 22 nt, Human
aaucaaguauuuuccaguggca

SEQ ID NO: 541727 - RNA, 22 nt, Human
aaacuagccacacagaauacac

SEQ ID NO: 541728 - RNA, 22 nt, Human
gagagggccagggugagaacua

SEQ ID NO: 541729 - RNA, 22 nt, Human
gauuuccuaauguggaucucug

SEQ ID NO: 541730 - RNA, 22 nt, Human
uggcagggucuugcuguguugc

SEQ ID NO: 541731 - RNA, 22 nt, Human
uaguaaauuaaaauauugacuu

SEQ ID NO: 541732 - RNA, 22 nt, Human
uggcucaggguccccaaauggu

SEQ ID NO: 541733 - RNA, 22 nt, Human
aggcuuccgaguagcugggacu

SEQ ID NO: 541734 - RNA, 22 nt, Human
gcucucugccuuucucaaugac

SEQ ID NO: 541735 - RNA, 22 nt, Human
uaauaccuugaucucucuuguc

SEQ ID NO: 541736 - RNA, 22 nt, Human
gucccugcaucaccacgggacu

SEQ ID NO: 541737 - RNA, 22 nt, Human
agagccaggcggcugggcaccu

SEQ ID NO: 541738 - RNA, 22 nt, Human
uacacacaugcauuugccuuau

SEQ ID NO: 541739 - RNA, 22 nt, Human
uauaauuuggggaaaguggugu

SEQ ID NO: 541740 - RNA, 20 nt, Human
caggaaccaaagaggacucc

SEQ ID NO: 541741 - RNA, 22 nt, Human
gggcugagagcuggaaucugag

SEQ ID NO: 541742 - RNA, 19 nt, Human
cuuuucaucaacagccaau

SEQ ID NO: 541743 - RNA, 22 nt, Human
auucucaguucacuaguuucuu

SEQ ID NO: 541744 - RNA, 22 nt, Human
cuacccaggcuggagugcagua

SEQ ID NO: 541745 - RNA, 22 nt, Human
aagauauucaaagauuuauuag

SEQ ID NO: 541746 - RNA, 22 nt, Human
gcaggugggggagaaguuguga

SEQ ID NO: 541747 - RNA, 21 nt, Human
cccugcaggccagggcugagc

SEQ ID NO: 541748 - RNA, 22 nt, Human
uuuacacuuauuaugaagcuuu

SEQ ID NO: 541749 - RNA, 22 nt, Human
aguucaauagaaaaauauauua

SEQ ID NO: 541750 - RNA, 22 nt, Human
gagaaucuacaggaaaccgaag

SEQ ID NO: 541751 - RNA, 22 nt, Human
acauguaaaaggaacaugcaug

SEQ ID NO: 541752 - RNA, 22 nt, Human
ugcagaagauggucugagcacc

SEQ ID NO: 541753 - RNA, 22 nt, Human
ugccacagaggugaagcccacu

SEQ ID NO: 541754 - RNA, 22 nt, Human
uucuucaaugugcccuguuuuc

SEQ ID NO: 541755 - RNA, 22 nt, Human
augccaguaagucucagcuagg

SEQ ID NO: 541756 - RNA, 20 nt, Human
ucugagagucugagugauga

SEQ ID NO: 541757 - RNA, 22 nt, Human
agauuucccucuuguauuugca

SEQ ID NO: 541758 - RNA, 22 nt, Human
gagauauguuagaaagcuauug

SEQ ID NO: 541759 - RNA, 22 nt, Human
gcagcaguggucuguagaagga

SEQ ID NO: 541760 - RNA, 22 nt, Human
aaguaucuuucuagcaacuaaa

SEQ ID NO: 541761 - RNA, 20 nt, Human
auuuuguuuauguuccucuc

SEQ ID NO: 541762 - RNA, 18 nt, Human
ucucagaggccauccuag

SEQ ID NO: 541763 - RNA, 22 nt, Human
cagaggccuuucuacagugaua

SEQ ID NO: 541764 - RNA, 22 nt, Human
gguaacaguauguagaguaaga

SEQ ID NO: 541765 - RNA, 22 nt, Human
gccuggcuccuaagagcacaac

SEQ ID NO: 541766 - RNA, 22 nt, Human
gcccucagaugggaaaggaggg

SEQ ID NO: 541767 - RNA, 22 nt, Human
agcaaguugaaugauaauacuc

SEQ ID NO: 541768 - RNA, 22 nt, Human
cagggagaaaucuccaggaggu

SEQ ID NO: 541769 - RNA, 22 nt, Human
acacagauaaugcucauauagg

SEQ ID NO: 541770 - RNA, 22 nt, Human
uuucuguaaguggcaaauaaug

SEQ ID NO: 541771 - RNA, 22 nt, Human
ucucuucauagugacacccauc

SEQ ID NO: 541772 - RNA, 22 nt, Human
uuccagaauugggagccuugag

SEQ ID NO: 541773 - RNA, 22 nt, Human
cuggcugcaggaaggagugggc

SEQ ID NO: 541774 - RNA, 21 nt, Human
gccugcugccuguggccgguc

SEQ ID NO: 541775 - RNA, 22 nt, Human
ccugggcaacauagggagaccc

SEQ ID NO: 541776 - RNA, 22 nt, Human
ccagccugaaaugccucauccu

SEQ ID NO: 541777 - RNA, 22 nt, Human
uuuagcagcaaauaaguagugc

SEQ ID NO: 541778 - RNA, 21 nt, Human
cacucaggguaugugccaggc

SEQ ID NO: 541779 - RNA, 22 nt, Human
cucuggagcaccgggcuaucca

SEQ ID NO: 541780 - RNA, 22 nt, Human
agaagccaugguaugcaacuac

SEQ ID NO: 541781 - RNA, 21 nt, Human
gcugcaucaaucuacccaggg

SEQ ID NO: 541782 - RNA, 22 nt, Human
uuuccucuuuguaccuugacua

SEQ ID NO: 541783 - RNA, 22 nt, Human
gcugcaggggggucuggacuug

SEQ ID NO: 541784 - RNA, 22 nt, Human
auuugagaugguaaauaacuuu

SEQ ID NO: 541785 - RNA, 22 nt, Human
gcucaagagagaugcaguucuu

SEQ ID NO: 541786 - RNA, 22 nt, Human
agcugccugggcuuguacaccu

SEQ ID NO: 541787 - RNA, 22 nt, Human
agagcuauauacagauuauuga

SEQ ID NO: 541788 - RNA, 22 nt, Human
ucaaaaauggucuuugagcugc

SEQ ID NO: 541789 - RNA, 22 nt, Human
uugauguugcucuuaacaguau

SEQ ID NO: 541790 - RNA, 22 nt, Human
uacaggaaggagcacaucggga

SEQ ID NO: 541791 - RNA, 20 nt, Human
uucacagaggacucagguca

SEQ ID NO: 541792 - RNA, 22 nt, Human
aaaucaaaagacauguguuuua

SEQ ID NO: 541793 - RNA, 22 nt, Human
ccugccugcaccuucucugggg

SEQ ID NO: 541794 - RNA, 22 nt, Human
ggcagggcccugauuccugggg

SEQ ID NO: 541795 - RNA, 22 nt, Human
guuuugugaggcacccacaggu

SEQ ID NO: 541796 - RNA, 22 nt, Human
ggaggugggagacauaggcggc

SEQ ID NO: 541797 - RNA, 22 nt, Human
uauuccagugugaucuuuguag

SEQ ID NO: 541798 - RNA, 23 nt, Human
uguaaaaugggguaguguuacca

SEQ ID NO: 541799 - RNA, 22 nt, Human
uucuaaacggcuucacaggaau

SEQ ID NO: 541800 - RNA, 22 nt, Human
ccagcuuuuagugggcuuauua

SEQ ID NO: 541801 - RNA, 22 nt, Human
ugaugggaggugcugcaggacc

SEQ ID NO: 541802 - RNA, 22 nt, Human
aagggcuccauccuuauaaaug

SEQ ID NO: 541803 - RNA, 22 nt, Human
acuggcaguuugagaaugcauu

SEQ ID NO: 541804 - RNA, 20 nt, Human
gcccuggagccuuguccugg

SEQ ID NO: 541805 - RNA, 22 nt, Human
aggagcugcaaauauuaguaau

SEQ ID NO: 541806 - RNA, 19 nt, Human
agcaccugugagagccugg

SEQ ID NO: 541807 - RNA, 20 nt, Human
ugcacagcugugaauaggau

SEQ ID NO: 541808 - RNA, 22 nt, Human
uuaacagagugccuggcaugua

SEQ ID NO: 541809 - RNA, 22 nt, Human
ugccuuuuauggcuagccucag

SEQ ID NO: 541810 - RNA, 23 nt, Human
cacugcagcguggucuggcagga

SEQ ID NO: 541811 - RNA, 22 nt, Human
caaugaaaauuuaaguugcagc

SEQ ID NO: 541812 - RNA, 22 nt, Human
uugugugguagcuucauugaac

SEQ ID NO: 541813 - RNA, 22 nt, Human
acccaggagcaggcugggcagu

SEQ ID NO: 541814 - RNA, 22 nt, Human
gugugccaccagucaaggugaa

SEQ ID NO: 541815 - RNA, 22 nt, Human
agggcagccugagugcuggccc

SEQ ID NO: 541816 - RNA, 22 nt, Human
uucagaaaggauaauuggaagg

SEQ ID NO: 541817 - RNA, 22 nt, Human
aaggaagagucuagaacaggca

SEQ ID NO: 541818 - RNA, 22 nt, Human
ccaccagcuuugccacccugcu

SEQ ID NO: 541819 - RNA, 22 nt, Human
ugcuucuggaaacaguggcugu

SEQ ID NO: 541820 - RNA, 22 nt, Human
agugaggauaccaauguguaga

SEQ ID NO: 541821 - RNA, 22 nt, Human
cugccugcugacauucuuuaua

SEQ ID NO: 541822 - RNA, 22 nt, Human
gagaaaggcauuccuaugcaaa

SEQ ID NO: 541823 - RNA, 22 nt, Human
guccagagauggacgagcagau

SEQ ID NO: 541824 - RNA, 22 nt, Human
ugcagucuggauguccucagau

SEQ ID NO: 541825 - RNA, 22 nt, Human
aacuggaagagugaauauaacu

SEQ ID NO: 541826 - RNA, 22 nt, Human
ccucgaccuccccaggcucagg

SEQ ID NO: 541827 - RNA, 22 nt, Human
uucuuuauugagacuucauugu

SEQ ID NO: 541828 - RNA, 22 nt, Human
ggagcagggaauuacagcgcag

SEQ ID NO: 541829 - RNA, 16 nt, Human
ucagggcagaauggca

SEQ ID NO: 541830 - RNA, 22 nt, Human
cucagggucugguccuuagauu

SEQ ID NO: 541831 - RNA, 22 nt, Human
uuccucuccucacaugagucac

SEQ ID NO: 541832 - RNA, 22 nt, Human
auguuucaucaguaagguuuug

SEQ ID NO: 541833 - RNA, 22 nt, Human
uccaggcagagcaacaaaauau

SEQ ID NO: 541834 - RNA, 22 nt, Human
acccagcuaacccuacccugga

SEQ ID NO: 541835 - RNA, 22 nt, Human
ucugaggcauaaccuguucugc

SEQ ID NO: 541836 - RNA, 22 nt, Human
cagcuguucggggcuggcaugu

SEQ ID NO: 541837 - RNA, 21 nt, Human
ucugggcccaugcugccucac

SEQ ID NO: 541838 - RNA, 17 nt, Human
agggacagcaguuuagg

SEQ ID NO: 541839 - RNA, 22 nt, Human
acaugauuugcaugauuuguaa

SEQ ID NO: 541840 - RNA, 22 nt, Human
aggcagguguugggagacacca

SEQ ID NO: 541841 - RNA, 22 nt, Human
ugcacacagcugggccuggcug

SEQ ID NO: 541842 - RNA, 20 nt, Human
guauuaggagguaaauguaa

SEQ ID NO: 541843 - RNA, 22 nt, Human
uuugugcacauugcuuuucuau

SEQ ID NO: 541844 - RNA, 22 nt, Human
agcuuuguggcuuugcaagacu

SEQ ID NO: 541845 - RNA, 19 nt, Human
cgcaggcuucgggucgcuc

SEQ ID NO: 541846 - RNA, 22 nt, Human
cuuauuauaaaauccuguuuga

SEQ ID NO: 541847 - RNA, 22 nt, Human
auucugaucauucaagauguca

SEQ ID NO: 541848 - RNA, 21 nt, Human
agaugaggauacugaggccua

SEQ ID NO: 541849 - RNA, 22 nt, Human
uugcaacaucugaacauuuauc

SEQ ID NO: 541850 - RNA, 22 nt, Human
agagggcaugcuugguggccug

SEQ ID NO: 541851 - RNA, 22 nt, Human
guacacagaugcuugagaaucu

SEQ ID NO: 541852 - RNA, 22 nt, Human
cauuugcauaugaagaaguaag

SEQ ID NO: 541853 - RNA, 22 nt, Human
uccaggcauaagccuugagugu

SEQ ID NO: 541854 - RNA, 22 nt, Human
gcugucugccgcaggcugccac

SEQ ID NO: 541855 - RNA, 22 nt, Human
auucuuuuguccuagcuugaua

SEQ ID NO: 541856 - RNA, 21 nt, Human
cuuggaguugguugaggaugc

SEQ ID NO: 541857 - RNA, 22 nt, Human
uuucuucugagaucagggagaa

SEQ ID NO: 541858 - RNA, 22 nt, Human
augaaauuuuaauuauaccucu

SEQ ID NO: 541859 - RNA, 22 nt, Human
uuucaaacauaucuucauuacu

SEQ ID NO: 541860 - RNA, 22 nt, Human
aggaagccugcaggugacugcu

SEQ ID NO: 541861 - RNA, 22 nt, Human
aguaaugaggauguuugcaaaa

SEQ ID NO: 541862 - RNA, 22 nt, Human
ucaaaagucugcauucuucaca

SEQ ID NO: 541863 - RNA, 22 nt, Human
agucccuguacuuuccacugcc

SEQ ID NO: 541864 - RNA, 22 nt, Human
ugaaggccacuuccugugagcu

SEQ ID NO: 541865 - RNA, 22 nt, Human
auggcccaggccuccuguggcu

SEQ ID NO: 541866 - RNA, 22 nt, Human
cagugcuccugauguacccuug

SEQ ID NO: 541867 - RNA, 22 nt, Human
caggaaccauuuucucuuuaua

SEQ ID NO: 541868 - RNA, 22 nt, Human
uuuuaucugcuucauuaguuga

SEQ ID NO: 541869 - RNA, 22 nt, Human
uauuacaguucgaguuucuagg

SEQ ID NO: 541870 - RNA, 18 nt, Human
uggccuggagacaacucu

SEQ ID NO: 541871 - RNA, 22 nt, Human
ccugcagguuucccccggacgg

SEQ ID NO: 541872 - RNA, 22 nt, Human
ugcaggcuauccuuugcugcaa

SEQ ID NO: 541873 - RNA, 22 nt, Human
aagcagccaccucaucuccacu

SEQ ID NO: 541874 - RNA, 22 nt, Human
uucuuaagucaguaagaugcaa

SEQ ID NO: 541875 - RNA, 22 nt, Human
ucauugaauuucacagcuuuau

SEQ ID NO: 541876 - RNA, 22 nt, Human
gcauuucagaaagguuaccaac

SEQ ID NO: 541877 - RNA, 22 nt, Human
cagcacuggggggauucggagc

SEQ ID NO: 541878 - RNA, 22 nt, Human
gcccagcagcugguggagaagg

SEQ ID NO: 541879 - RNA, 22 nt, Human
ccuuggaggacugcugcuucuu

SEQ ID NO: 541880 - RNA, 22 nt, Human
aaugaaacuaguagaaucuuug

SEQ ID NO: 541881 - RNA, 22 nt, Human
uguauuuucugaagauaaucaa

SEQ ID NO: 541882 - RNA, 22 nt, Human
uaaagucacagagcaggugcaa

SEQ ID NO: 541883 - RNA, 22 nt, Human
agaauucucuuccauugaaaca

SEQ ID NO: 541884 - RNA, 22 nt, Human
gccuggcuggucacugccuggc

SEQ ID NO: 541885 - RNA, 22 nt, Human
caagauauugauuuccagcuga

SEQ ID NO: 541886 - RNA, 22 nt, Human
gaauuuuaauaaagguuuauca

SEQ ID NO: 541887 - RNA, 22 nt, Human
aaaggccaugguuggaguguuu

SEQ ID NO: 541888 - RNA, 22 nt, Human
acauuugauugaugaaucaaau

SEQ ID NO: 541889 - RNA, 22 nt, Human
aggccagcaagaaagagagucu

SEQ ID NO: 541890 - RNA, 22 nt, Human
gguccagaguccuugcuagaga

SEQ ID NO: 541891 - RNA, 22 nt, Human
aagggagcuuaggagaucaggc

SEQ ID NO: 541892 - RNA, 22 nt, Human
cccagggcccuggacagcuaca

SEQ ID NO: 541893 - RNA, 19 nt, Human
acugggaaaaaggcacugg
